United States Patent Application Publication US 2006/0003322 A1 - sequence listing, part 3

SEQ ID NO: 56646 - RNA, 20 nt, Human
ugggacccugguggucuugg

SEQ ID NO: 56647 - RNA, 23 nt, Human
ugggagggggugggcuggcagug

SEQ ID NO: 56648 - RNA, 22 nt, Human
ugggagggucagauccacaaug

SEQ ID NO: 56649 - RNA, 20 nt, Human
ugggagggucaggagaugag

SEQ ID NO: 56650 - RNA, 19 nt, Human
ugggugcccgggcccuggg

SEQ ID NO: 56651 - RNA, 19 nt, Human
ugggugggagggggugggc

SEQ ID NO: 56652 - RNA, 18 nt, Human
uuccagaggggagcgagg

SEQ ID NO: 56653 - RNA, 19 nt, Human
uugagaaugucugcagucu

SEQ ID NO: 56654 - RNA, 24 nt, Human
uuggaaaguuuuauuuaaauguuu

SEQ ID NO: 56655 - RNA, 18 nt, Human
aaagugcugggauuacaa

SEQ ID NO: 56656 - RNA, 18 nt, Human
aagggguuucaccguguu

SEQ ID NO: 56657 - RNA, 20 nt, Human
aagggguuucaccguguuag

SEQ ID NO: 56658 - RNA, 21 nt, Human
aagugcugggauuacaaacac

SEQ ID NO: 56659 - RNA, 22 nt, Human
aagugcugggauuacaaacacu

SEQ ID NO: 56660 - RNA, 23 nt, Human
acgacaggagguggggagcagga

SEQ ID NO: 56661 - RNA, 18 nt, Human
acugcaaucuccgccgcc

SEQ ID NO: 56662 - RNA, 18 nt, Human
agccgaaggcugugucaa

SEQ ID NO: 56663 - RNA, 24 nt, Human
agcgauuauccugcuucagccucc

SEQ ID NO: 56664 - RNA, 18 nt, Human
aggcagagggcccccugg

SEQ ID NO: 56665 - RNA, 23 nt, Human
aggcagagggcccccuggggggg

SEQ ID NO: 56666 - RNA, 18 nt, Human
aggcagccacagggcaca

SEQ ID NO: 56667 - RNA, 20 nt, Human
aggcagccacagggcacaac

SEQ ID NO: 56668 - RNA, 23 nt, Human
aggcaggacgacaggaggugggg

SEQ ID NO: 56669 - RNA, 19 nt, Human
agggcagcaggacaguggc

SEQ ID NO: 56670 - RNA, 24 nt, Human
agggguuucaccguguuagccagg

SEQ ID NO: 56671 - RNA, 21 nt, Human
aggugguggcuggauggccug

SEQ ID NO: 56672 - RNA, 23 nt, Human
agugcaguggcaugaccucggcu

SEQ ID NO: 56673 - RNA, 24 nt, Human
agugcaguggcaugaccucggcuc

SEQ ID NO: 56674 - RNA, 21 nt, Human
auggggaagcaggagccccag

SEQ ID NO: 56675 - RNA, 21 nt, Human
caaaaucccccuggugauccc

SEQ ID NO: 56676 - RNA, 22 nt, Human
caaagugcugggauuacaaaca

SEQ ID NO: 56677 - RNA, 23 nt, Human
caaagugcugggauuacaaacac

SEQ ID NO: 56678 - RNA, 20 nt, Human
caaggggcagguuugguguc

SEQ ID NO: 56679 - RNA, 24 nt, Human
caagucccacaggugauucaagga

SEQ ID NO: 56680 - RNA, 18 nt, Human
caccguguuagccaggau

SEQ ID NO: 56681 - RNA, 24 nt, Human
caccguguuagccaggauggucuc

SEQ ID NO: 56682 - RNA, 24 nt, Human
caccucggccucccaaagugcugg

SEQ ID NO: 56683 - RNA, 20 nt, Human
cagcaggacaguggcgaggc

SEQ ID NO: 56684 - RNA, 20 nt, Human
cagccuccuggguagcuggg

SEQ ID NO: 56685 - RNA, 20 nt, Human
caggacaguggcgaggcagg

SEQ ID NO: 56686 - RNA, 22 nt, Human
caggauggucuccaucuccuga

SEQ ID NO: 56687 - RNA, 21 nt, Human
caguggcaugaccucggcuca

SEQ ID NO: 56688 - RNA, 19 nt, Human
ccaaagugcugggauuaca

SEQ ID NO: 56689 - RNA, 18 nt, Human
ccacugggcuguaggugg

SEQ ID NO: 56690 - RNA, 20 nt, Human
cccaggcugcagugcagugg

SEQ ID NO: 56691 - RNA, 22 nt, Human
ccccaccccaggagccuccuug

SEQ ID NO: 56692 - RNA, 22 nt, Human
cccccuggggggguacaggggu

SEQ ID NO: 56693 - RNA, 23 nt, Human
cccccuggggggguacaggggug

SEQ ID NO: 56694 - RNA, 21 nt, Human
ccccuggggggguacaggggu

SEQ ID NO: 56695 - RNA, 23 nt, Human
ccccuggggggguacaggggugu

SEQ ID NO: 56696 - RNA, 20 nt, Human
cccggguucaagcgauuauc

SEQ ID NO: 56697 - RNA, 23 nt, Human
cccggguucaagcgauuauccuc

SEQ ID NO: 56698 - RNA, 23 nt, Human
cccggguucaagcgauuauccug

SEQ ID NO: 56699 - RNA, 19 nt, Human
cccuggggggguacagggg

SEQ ID NO: 56700 - RNA, 23 nt, Human
ccgccgcccggguucaagcgauu

SEQ ID NO: 56701 - RNA, 24 nt, Human
ccuccuggguagcugggacuacag

SEQ ID NO: 56702 - RNA, 19 nt, Human
ccuccuuggccagcagggu

SEQ ID NO: 56703 - RNA, 24 nt, Human
ccugcacccagggcuucccaggag

SEQ ID NO: 56704 - RNA, 24 nt, Human
ccugcuucagccuccuggguagcu

SEQ ID NO: 56705 - RNA, 20 nt, Human
ccugggguugggguagggag

SEQ ID NO: 56706 - RNA, 23 nt, Human
ccuggguagcugggacuacaggc

SEQ ID NO: 56707 - RNA, 23 nt, Human
ccuggguagcugggacuacaggc

SEQ ID NO: 56708 - RNA, 23 nt, Human
cgacaggagguggggagcaggag

SEQ ID NO: 56709 - RNA, 23 nt, Human
cgcccggguucaagcgauuaucc

SEQ ID NO: 56710 - RNA, 19 nt, Human
cggggaugacgacucgggc

SEQ ID NO: 56711 - RNA, 22 nt, Human
cuccugaccucgugauccgccc

SEQ ID NO: 56712 - RNA, 20 nt, Human
cucugucgcccaggcugcag

SEQ ID NO: 56713 - RNA, 22 nt, Human
cugagcccccuccuuuccuggg

SEQ ID NO: 56714 - RNA, 22 nt, Human
cuuccuuuuauuauugcuuugu

SEQ ID NO: 56715 - RNA, 22 nt, Human
gaccucgugauccgcccaccuc

SEQ ID NO: 56716 - RNA, 22 nt, Human
gaccucgugauccgcccaccuc

SEQ ID NO: 56717 - RNA, 24 nt, Human
gaccucgugauccgcccaccucgg

SEQ ID NO: 56718 - RNA, 18 nt, Human
gacuacaggcgcauagau

SEQ ID NO: 56719 - RNA, 21 nt, Human
gagcagccaaggggcagguuu

SEQ ID NO: 56720 - RNA, 23 nt, Human
gaggcccuggggaggcaggggag

SEQ ID NO: 56721 - RNA, 20 nt, Human
gcacaaccugcagucccugg

SEQ ID NO: 56722 - RNA, 22 nt, Human
gcacccagggcuucccaggagc

SEQ ID NO: 56723 - RNA, 18 nt, Human
gcaggggagucuuccuuc

SEQ ID NO: 56724 - RNA, 19 nt, Human
gcaguggcaugaccucggc

SEQ ID NO: 56725 - RNA, 24 nt, Human
gcccaggcugcagugcaguggcau

SEQ ID NO: 56726 - RNA, 24 nt, Human
gcccggguucaagcgauuauccug

SEQ ID NO: 56727 - RNA, 25 nt, Human
gcccuggggaggcaggggagucuuc

SEQ ID NO: 56728 - RNA, 24 nt, Human
gcgauuauccugcuucagccuccu

SEQ ID NO: 56729 - RNA, 21 nt, Human
gcucugucgcccaggcugcag

SEQ ID NO: 56730 - RNA, 18 nt, Human
ggaagcaggagccccagg

SEQ ID NO: 56731 - RNA, 18 nt, Human
ggcagcaggacaguggcg

SEQ ID NO: 56732 - RNA, 21 nt, Human
ggcgcggggucugggugcuuc

SEQ ID NO: 56733 - RNA, 20 nt, Human
ggcuguaggugguggcugga

SEQ ID NO: 56734 - RNA, 18 nt, Human
gggagggaccuuuggcuc

SEQ ID NO: 56735 - RNA, 18 nt, Human
ggggagcaggagaacucc

SEQ ID NO: 56736 - RNA, 18 nt, Human
gggguuucaccguguuag

SEQ ID NO: 56737 - RNA, 23 nt, Human
gggguuucaccguguuagccagg

SEQ ID NO: 56738 - RNA, 23 nt, Human
gggugcuucuuuuccccaggaag

SEQ ID NO: 56739 - RNA, 20 nt, Human
ggucuccaucuccugaccuc

SEQ ID NO: 56740 - RNA, 21 nt, Human
guauggaacgucugagaaguu

SEQ ID NO: 56741 - RNA, 24 nt, Human
gugauccgcccaccucggccuccc

SEQ ID NO: 56742 - RNA, 19 nt, Human
uaagggguuucaccguguu

SEQ ID NO: 56743 - RNA, 24 nt, Human
uacaggcgcauagauaagggguuu

SEQ ID NO: 56744 - RNA, 18 nt, Human
uagauaagggguuucacc

SEQ ID NO: 56745 - RNA, 20 nt, Human
uagauaagggguuucaccgu

SEQ ID NO: 56746 - RNA, 24 nt, Human
uagccaggauggucuccaucuccu

SEQ ID NO: 56747 - RNA, 26 nt, Human
uaguggggggcagccgaaggcugugu

SEQ ID NO: 56748 - RNA, 24 nt, Human
ucaccguguuagccaggauggucu

SEQ ID NO: 56749 - RNA, 18 nt, Human
ucacugcaaucuccgccg

SEQ ID NO: 56750 - RNA, 23 nt, Human
ucacugcaaucuccgccgcccgg

SEQ ID NO: 56751 - RNA, 24 nt, Human
ucacugcaaucuccgccgcccggg

SEQ ID NO: 56752 - RNA, 23 nt, Human
ucagccuccuggguagcugggac

SEQ ID NO: 56753 - RNA, 18 nt, Human
ucaguugggugcugaaau

SEQ ID NO: 56754 - RNA, 18 nt, Human
ucccaaagugcugggauu

SEQ ID NO: 56755 - RNA, 24 nt, Human
ucccaaagugcugggauuacaaac

SEQ ID NO: 56756 - RNA, 22 nt, Human
uccccaccccaggagccuccuu

SEQ ID NO: 56757 - RNA, 19 nt, Human
uccccaggaagggagccug

SEQ ID NO: 56758 - RNA, 21 nt, Human
uccccaggaagggagccugcc

SEQ ID NO: 56759 - RNA, 19 nt, Human
uccgggauggggaagcagg

SEQ ID NO: 56760 - RNA, 24 nt, Human
uccuggguagcugggacuacaggc

SEQ ID NO: 56761 - RNA, 18 nt, Human
uccuuggccagcagggug

SEQ ID NO: 56762 - RNA, 20 nt, Human
uccuuggccagcaggguggc

SEQ ID NO: 56763 - RNA, 24 nt, Human
ucgcccaggcugcagugcaguggc

SEQ ID NO: 56764 - RNA, 21 nt, Human
ucggaucucaguugggugcug

SEQ ID NO: 56765 - RNA, 18 nt, Human
ucggccucccaaagugcu

SEQ ID NO: 56766 - RNA, 19 nt, Human
ucuaugcccaguguccaga

SEQ ID NO: 56767 - RNA, 22 nt, Human
ucuccaggcguccugaagaucc

SEQ ID NO: 56768 - RNA, 20 nt, Human
ucucccaggagagcagaggc

SEQ ID NO: 56769 - RNA, 18 nt, Human
ucucgcucugucgcccag

SEQ ID NO: 56770 - RNA, 19 nt, Human
ucucgcucugucgcccagg

SEQ ID NO: 56771 - RNA, 22 nt, Human
ucucgcucugucgcccaggcug

SEQ ID NO: 56772 - RNA, 26 nt, Human
ucucgcucugucgcccaggcugcagu

SEQ ID NO: 56773 - RNA, 27 nt, Human
ucucgcucugucgcccaggcugcagug

SEQ ID NO: 56774 - RNA, 24 nt, Human
ucugucgcccaggcugcagugcag

SEQ ID NO: 56775 - RNA, 20 nt, Human
ugaggcagaaucucgcucug

SEQ ID NO: 56776 - RNA, 22 nt, Human
ugaggcagaaucucgcucuguc

SEQ ID NO: 56777 - RNA, 19 nt, Human
ugaggcagagggcccccug

SEQ ID NO: 56778 - RNA, 24 nt, Human
ugauccgcccaccucggccuccca

SEQ ID NO: 56779 - RNA, 24 nt, Human
ugcagugcaguggcaugaccucgg

SEQ ID NO: 56780 - RNA, 18 nt, Human
ugcugggauuacaaacac

SEQ ID NO: 56781 - RNA, 24 nt, Human
ugcuucagccuccuggguagcugg

SEQ ID NO: 56782 - RNA, 20 nt, Human
ugcuuugucucccaggagag

SEQ ID NO: 56783 - RNA, 18 nt, Human
ugggacuacaggcgcaua

SEQ ID NO: 56784 - RNA, 21 nt, Human
uggggaggcaggggagucuuc

SEQ ID NO: 56785 - RNA, 21 nt, Human
uggggggguacaggggugugg

SEQ ID NO: 56786 - RNA, 23 nt, Human
ugggguagggaguccgagagcag

SEQ ID NO: 56787 - RNA, 24 nt, Human
uggggugcaggcagccacagggca

SEQ ID NO: 56788 - RNA, 19 nt, Human
ugggugcugaaauuggcau

SEQ ID NO: 56789 - RNA, 24 nt, Human
uguccugcacccagggcuucccag

SEQ ID NO: 56790 - RNA, 23 nt, Human
uucaagcgauuauccugcuucag

SEQ ID NO: 56791 - RNA, 24 nt, Human
uucagccuccuggguagcugggac

SEQ ID NO: 56792 - RNA, 18 nt, Human
uuggugucaugggcucag

SEQ ID NO: 56793 - RNA, 19 nt, Human
uuucaccguguuagccagg

SEQ ID NO: 56794 - RNA, 23 nt, Human
aagaauggaggcccagggaggga

SEQ ID NO: 56795 - RNA, 26 nt, Human
accuuagggggcgucgaacaucugag

SEQ ID NO: 56796 - RNA, 21 nt, Human
agguggagguccggcaggacg

SEQ ID NO: 56797 - RNA, 20 nt, Human
augcccagcacccagauggc

SEQ ID NO: 56798 - RNA, 21 nt, Human
auggggaagcaggagccccag

SEQ ID NO: 56799 - RNA, 24 nt, Human
caagagcaagauaaagcaaagggc

SEQ ID NO: 56800 - RNA, 20 nt, Human
caaggcguccugaugcaccc

SEQ ID NO: 56801 - RNA, 22 nt, Human
cagagcuucccaggugcuccuc

SEQ ID NO: 56802 - RNA, 22 nt, Human
cagcagccuccuuggcugggag

SEQ ID NO: 56803 - RNA, 20 nt, Human
cagccuccuuggcugggagg

SEQ ID NO: 56804 - RNA, 25 nt, Human
cagcugccaggcacaaauccccagu

SEQ ID NO: 56805 - RNA, 23 nt, Human
caggcacaaauccccagucccug

SEQ ID NO: 56806 - RNA, 24 nt, Human
ccacagcagccuccuuggcuggga

SEQ ID NO: 56807 - RNA, 19 nt, Human
ccagaagaauggaggccca

SEQ ID NO: 56808 - RNA, 19 nt, Human
ccagaagaauggaggccca

SEQ ID NO: 56809 - RNA, 23 nt, Human
ccaugacugaagcuaaaaaaggc

SEQ ID NO: 56810 - RNA, 21 nt, Human
ccccaccacagcagccuccuu

SEQ ID NO: 56811 - RNA, 22 nt, Human
ccccaccacagcagccuccuug

SEQ ID NO: 56812 - RNA, 19 nt, Human
ccccuaggaggggcacagg

SEQ ID NO: 56813 - RNA, 21 nt, Human
ccccuaggaggggcacagggg

SEQ ID NO: 56814 - RNA, 22 nt, Human
ccccuaggaggggcacaggggu

SEQ ID NO: 56815 - RNA, 20 nt, Human
cccuaggaggggcacagggg

SEQ ID NO: 56816 - RNA, 19 nt, Human
ccucaggugcugccaugac

SEQ ID NO: 56817 - RNA, 23 nt, Human
cgggaggggaagguuccauggca

SEQ ID NO: 56818 - RNA, 18 nt, Human
cuuccuugcugagaaauc

SEQ ID NO: 56819 - RNA, 22 nt, Human
cuuccuuuuauuauugcuuugu

SEQ ID NO: 56820 - RNA, 22 nt, Human
gcgcaggggguccuagguaugg

SEQ ID NO: 56821 - RNA, 18 nt, Human
ggaacucaggugggugcu

SEQ ID NO: 56822 - RNA, 18 nt, Human
ggaagcaggagccccagg

SEQ ID NO: 56823 - RNA, 21 nt, Human
ggauccccaccacagcagccu

SEQ ID NO: 56824 - RNA, 24 nt, Human
ggcgucgaacaucugaguggcugu

SEQ ID NO: 56825 - RNA, 22 nt, Human
gggcguggugucaagggcucgg

SEQ ID NO: 56826 - RNA, 24 nt, Human
gggggugacagcuccagguggagg

SEQ ID NO: 56827 - RNA, 21 nt, Human
ggugacagcuccagguggagg

SEQ ID NO: 56828 - RNA, 22 nt, Human
gguggguugcaggguggcagga

SEQ ID NO: 56829 - RNA, 19 nt, Human
gucuggaagcagucggaga

SEQ ID NO: 56830 - RNA, 21 nt, Human
guggagggacagcagaggacu

SEQ ID NO: 56831 - RNA, 27 nt, Human
uaaugagucuuccuugcugagaaaucc

SEQ ID NO: 56832 - RNA, 22 nt, Human
uagcccaguggagggacagcag

SEQ ID NO: 56833 - RNA, 24 nt, Human
uauccugcacccagagcuucccag

SEQ ID NO: 56834 - RNA, 19 nt, Human
uccaugcccagcacccaga

SEQ ID NO: 56835 - RNA, 19 nt, Human
uccccagucccuggaguug

SEQ ID NO: 56836 - RNA, 21 nt, Human
uccccggggagagagccugcc

SEQ ID NO: 56837 - RNA, 19 nt, Human
uccgggauggggaagcagg

SEQ ID NO: 56838 - RNA, 18 nt, Human
uccucggaacucaggugg

SEQ ID NO: 56839 - RNA, 23 nt, Human
ucgaacaucugaguggcugugac

SEQ ID NO: 56840 - RNA, 18 nt, Human
ucucugacucaugggccc

SEQ ID NO: 56841 - RNA, 21 nt, Human
ucucugacucaugggccccua

SEQ ID NO: 56842 - RNA, 18 nt, Human
ucugaguggcugugacuu

SEQ ID NO: 56843 - RNA, 19 nt, Human
ugaaaugcaggcagcugcc

SEQ ID NO: 56844 - RNA, 21 nt, Human
ugacugaagcuaaaaaaggcg

SEQ ID NO: 56845 - RNA, 19 nt, Human
ugcuggaauggaccuuagg

SEQ ID NO: 56846 - RNA, 24 nt, Human
uggagguggggagcaggggaacuc

SEQ ID NO: 56847 - RNA, 19 nt, Human
uggcaggaagccacgcuuc

SEQ ID NO: 56848 - RNA, 24 nt, Human
uggcugggaggguggguugcaggg

SEQ ID NO: 56849 - RNA, 22 nt, Human
aaaaguaauuaacaucuucuca

SEQ ID NO: 56850 - RNA, 20 nt, Human
aaaaguuccuuucuccccuc

SEQ ID NO: 56851 - RNA, 18 nt, Human
aaacacagccugcaugca

SEQ ID NO: 56852 - RNA, 22 nt, Human
aaacagcuuagaaaaaguuaaa

SEQ ID NO: 56853 - RNA, 25 nt, Human
aaaccaaaaacaaaauuccuauguu

SEQ ID NO: 56854 - RNA, 20 nt, Human
aaaguagagcaaaaaccaug

SEQ ID NO: 56855 - RNA, 19 nt, Human
aaaguuccuuucuccccuc

SEQ ID NO: 56856 - RNA, 21 nt, Human
aagaaaccaaaaacaaaauuc

SEQ ID NO: 56857 - RNA, 22 nt, Human
aaguagagcaaaaaccaugauc

SEQ ID NO: 56858 - RNA, 18 nt, Human
aaguuccuuucuccccuc

SEQ ID NO: 56859 - RNA, 18 nt, Human
aaguuccuuucuccccuc

SEQ ID NO: 56860 - RNA, 21 nt, Human
acacagccugcaugcaaaacu

SEQ ID NO: 56861 - RNA, 24 nt, Human
acagaaagucuaucaagaccugaa

SEQ ID NO: 56862 - RNA, 24 nt, Human
agaaagucuaucaagaccugaagc

SEQ ID NO: 56863 - RNA, 24 nt, Human
agaaccucucccaucaagaaacag

SEQ ID NO: 56864 - RNA, 21 nt, Human
agaccugaagcuccaccggca

SEQ ID NO: 56865 - RNA, 24 nt, Human
agagcaccuauguuauucaaaaca

SEQ ID NO: 56866 - RNA, 24 nt, Human
agcaccuauguuauucaaaacagc

SEQ ID NO: 56867 - RNA, 19 nt, Human
agccaacauuccaaaacag

SEQ ID NO: 56868 - RNA, 22 nt, Human
aggaagacuccagaugguguua

SEQ ID NO: 56869 - RNA, 24 nt, Human
aggccaagaacuggucuaaucuga

SEQ ID NO: 56870 - RNA, 22 nt, Human
aguccuuuuuucugggcucagg

SEQ ID NO: 56871 - RNA, 21 nt, Human
agugugaaguauagggaagaa

SEQ ID NO: 56872 - RNA, 24 nt, Human
agugugaaguauagggaagaacaa

SEQ ID NO: 56873 - RNA, 19 nt, Human
aucaacuucuuuaauauaa

SEQ ID NO: 56874 - RNA, 20 nt, Human
auccucuucuuuuuucaaau

SEQ ID NO: 56875 - RNA, 19 nt, Human
auccugaguucagugugaa

SEQ ID NO: 56876 - RNA, 24 nt, Human
auuucccaguuguuaguccugcuc

SEQ ID NO: 56877 - RNA, 25 nt, Human
caagaaacagcuuagaaaaaguuaa

SEQ ID NO: 56878 - RNA, 19 nt, Human
cacaauacuuuugagaugg

SEQ ID NO: 56879 - RNA, 18 nt, Human
cacaggccuuggaauaca

SEQ ID NO: 56880 - RNA, 20 nt, Human
caccggcagcaccgcgcucc

SEQ ID NO: 56881 - RNA, 18 nt, Human
cacuacaggaagacucca

SEQ ID NO: 56882 - RNA, 22 nt, Human
cacuccaucaccaaaucauucc

SEQ ID NO: 56883 - RNA, 23 nt, Human
cacuccaucaccaaaucauuccu

SEQ ID NO: 56884 - RNA, 19 nt, Human
cacucuguaugcucaccac

SEQ ID NO: 56885 - RNA, 20 nt, Human
caggaagacuccagauggug

SEQ ID NO: 56886 - RNA, 24 nt, Human
cagguggauucaggcaaaccagaa

SEQ ID NO: 56887 - RNA, 25 nt, Human
ccucaggcugccauucacaggccuu

SEQ ID NO: 56888 - RNA, 19 nt, Human
ccuuuuuucugggcucagg

SEQ ID NO: 56889 - RNA, 22 nt, Human
cgaaaacacagccugcaugcaa

SEQ ID NO: 56890 - RNA, 19 nt, Human
cuacuggaagcuuuucuua

SEQ ID NO: 56891 - RNA, 18 nt, Human
cucgaaaacacagccugc

SEQ ID NO: 56892 - RNA, 26 nt, Human
cugaagcuccaccggcagcaccgcgc

SEQ ID NO: 56893 - RNA, 23 nt, Human
cuuggaauacagcguuugcacau

SEQ ID NO: 56894 - RNA, 24 nt, Human
cuuggaauacagcguuugcacaug

SEQ ID NO: 56895 - RNA, 19 nt, Human
cuuguuuccuuuuucuucc

SEQ ID NO: 56896 - RNA, 18 nt, Human
gaacaacaccaggcuggg

SEQ ID NO: 56897 - RNA, 18 nt, Human
gcaaaacuuccucaggcu

SEQ ID NO: 56898 - RNA, 19 nt, Human
gcaaaacuuccucaggcug

SEQ ID NO: 56899 - RNA, 20 nt, Human
gcagaguguggccacuauag

SEQ ID NO: 56900 - RNA, 20 nt, Human
ggagaugagaugaggaagag

SEQ ID NO: 56901 - RNA, 25 nt, Human
ggcagcaccgcgcuccgcauccggc

SEQ ID NO: 56902 - RNA, 24 nt, Human
guagagcaaaaaccaugauccuuu

SEQ ID NO: 56903 - RNA, 19 nt, Human
gucagugggaacacuccau

SEQ ID NO: 56904 - RNA, 22 nt, Human
guuccuuucuccccucccuugg

SEQ ID NO: 56905 - RNA, 18 nt, Human
uagcaugauaaagaaacc

SEQ ID NO: 56906 - RNA, 23 nt, Human
uaggaagggauauccucuucuuu

SEQ ID NO: 56907 - RNA, 21 nt, Human
uaguuuugcacagaaccucuc

SEQ ID NO: 56908 - RNA, 20 nt, Human
uauaaaccaacaacuuacaa

SEQ ID NO: 56909 - RNA, 26 nt, Human
uccacauuuuggggacagaauguggu

SEQ ID NO: 56910 - RNA, 24 nt, Human
uccaccggcagcaccgcgcuccgc

SEQ ID NO: 56911 - RNA, 25 nt, Human
uccaccggcagcaccgcgcuccgca

SEQ ID NO: 56912 - RNA, 24 nt, Human
ucccauccugaguucagugugaag

SEQ ID NO: 56913 - RNA, 19 nt, Human
uccuuuuucuucccauccu

SEQ ID NO: 56914 - RNA, 19 nt, Human
ucuacuggaagcuuuucuu

SEQ ID NO: 56915 - RNA, 22 nt, Human
ucuaucaagaccugaagcucca

SEQ ID NO: 56916 - RNA, 25 nt, Human
ucuccccucccuuggcaaagagacc

SEQ ID NO: 56917 - RNA, 19 nt, Human
ucuguaguagauaauccag

SEQ ID NO: 56918 - RNA, 21 nt, Human
ucuguaguagauaauccaguu

SEQ ID NO: 56919 - RNA, 23 nt, Human
ucuguaguagauaauccaguuuu

SEQ ID NO: 56920 - RNA, 24 nt, Human
ucuguaugcucaccacgguguagg

SEQ ID NO: 56921 - RNA, 20 nt, Human
ugcacauggacaaaugaggu

SEQ ID NO: 56922 - RNA, 22 nt, Human
ugccacaauacuuuugagaugg

SEQ ID NO: 56923 - RNA, 19 nt, Human
ugcucaccacgguguagga

SEQ ID NO: 56924 - RNA, 19 nt, Human
uggaaaaagccaaagcuug

SEQ ID NO: 56925 - RNA, 21 nt, Human
uggaagggacucaggaaggca

SEQ ID NO: 56926 - RNA, 24 nt, Human
uggauucaggcaaaccagaaauuc

SEQ ID NO: 56927 - RNA, 22 nt, Human
ugguauuuuuggaacuuaucau

SEQ ID NO: 56928 - RNA, 24 nt, Human
uucaaaaauauccaucaacuucuu

SEQ ID NO: 56929 - RNA, 25 nt, Human
uucaaaaauauccaucaacuucuuu

SEQ ID NO: 56930 - RNA, 18 nt, Human
uucucagucacuuaacac

SEQ ID NO: 56931 - RNA, 23 nt, Human
uuuaaaaguuccuuucuccccuc

SEQ ID NO: 56932 - RNA, 20 nt, Human
uuugcacagaaccucuccca

SEQ ID NO: 56933 - RNA, 19 nt, Human
uuuuuugcuuauuucccag

SEQ ID NO: 56934 - RNA, 19 nt, Human
aauuucugcccccuuggag

SEQ ID NO: 56935 - RNA, 22 nt, Human
accaacauccaauaucauuucc

SEQ ID NO: 56936 - RNA, 23 nt, Human
acccuguaacguguucccugcug

SEQ ID NO: 56937 - RNA, 19 nt, Human
acugcauggcaugcuggga

SEQ ID NO: 56938 - RNA, 24 nt, Human
agagaugacaauggacuuggacaa

SEQ ID NO: 56939 - RNA, 24 nt, Human
agccagugugccucagucuaugcu

SEQ ID NO: 56940 - RNA, 22 nt, Human
agcgacugggaauggaaaaaga

SEQ ID NO: 56941 - RNA, 21 nt, Human
agugcaggcacauggcaggag

SEQ ID NO: 56942 - RNA, 22 nt, Human
caccuuguucuaagagaaaaga

SEQ ID NO: 56943 - RNA, 25 nt, Human
cagccccaccuuguucuaagagggg

SEQ ID NO: 56944 - RNA, 18 nt, Human
cccccuuggaggggaaga

SEQ ID NO: 56945 - RNA, 19 nt, Human
ccccuuggaggggaagaug

SEQ ID NO: 56946 - RNA, 18 nt, Human
ccucccauuuuccugggu

SEQ ID NO: 56947 - RNA, 21 nt, Human
ccucccauuuuccuggguucc

SEQ ID NO: 56948 - RNA, 24 nt, Human
ccuccgugguguccaggcgggggu

SEQ ID NO: 56949 - RNA, 23 nt, Human
ccuuggccuuuacacccuccuua

SEQ ID NO: 56950 - RNA, 21 nt, Human
cgacugggaauggaaaaagag

SEQ ID NO: 56951 - RNA, 18 nt, Human
cucgcagccuccagaacc

SEQ ID NO: 56952 - RNA, 22 nt, Human
cugacuccaccccaucauggga

SEQ ID NO: 56953 - RNA, 19 nt, Human
cuuggaggggaagaugacu

SEQ ID NO: 56954 - RNA, 21 nt, Human
gaguucaggugaggggacuca

SEQ ID NO: 56955 - RNA, 18 nt, Human
ggaagcagggcagugucu

SEQ ID NO: 56956 - RNA, 18 nt, Human
ggacuuggacaaagucug

SEQ ID NO: 56957 - RNA, 20 nt, Human
ggcuggagcugaggagccag

SEQ ID NO: 56958 - RNA, 19 nt, Human
ggcugggagcgacugggaa

SEQ ID NO: 56959 - RNA, 18 nt, Human
gggcagugucucccugcc

SEQ ID NO: 56960 - RNA, 21 nt, Human
gggcugacuccaccccaucau

SEQ ID NO: 56961 - RNA, 23 nt, Human
ggguggcuggagcugaggagcca

SEQ ID NO: 56962 - RNA, 19 nt, Human
gugcgcccccugcuggugg

SEQ ID NO: 56963 - RNA, 22 nt, Human
uaccaacauccaauaucauuuc

SEQ ID NO: 56964 - RNA, 18 nt, Human
uagcucugggcugguccc

SEQ ID NO: 56965 - RNA, 19 nt, Human
uccaccccaucaugggaga

SEQ ID NO: 56966 - RNA, 24 nt, Human
ucccugcugggggcugacagugcc

SEQ ID NO: 56967 - RNA, 18 nt, Human
uccgugguguccaggcgg

SEQ ID NO: 56968 - RNA, 24 nt, Human
ucuccuaggcagccccaccuuguu

SEQ ID NO: 56969 - RNA, 28 nt, Human
ucuggggcuuggaggcagaggugcuucc

SEQ ID NO: 56970 - RNA, 18 nt, Human
ucuguagaaaucuguuuu

SEQ ID NO: 56971 - RNA, 18 nt, Human
ugacugcauggcaugcug

SEQ ID NO: 56972 - RNA, 18 nt, Human
ugaggggacucaguuugu

SEQ ID NO: 56973 - RNA, 18 nt, Human
ugcgcccccugcuggugg

SEQ ID NO: 56974 - RNA, 22 nt, Human
ugcucucgcagccuccagaacc

SEQ ID NO: 56975 - RNA, 24 nt, Human
uggaaaaagaggugggcagcucau

SEQ ID NO: 56976 - RNA, 25 nt, Human
uggaagaagauuccaaauauguggu

SEQ ID NO: 56977 - RNA, 24 nt, Human
uggacaaagucuggaggaagcagg

SEQ ID NO: 56978 - RNA, 18 nt, Human
uggcaggagugagggugg

SEQ ID NO: 56979 - RNA, 24 nt, Human
uggcaggagugaggguggcuggag

SEQ ID NO: 56980 - RNA, 19 nt, Human
uggcaugcugggagugcag

SEQ ID NO: 56981 - RNA, 21 nt, Human
uggcuggagcugaggagccag

SEQ ID NO: 56982 - RNA, 19 nt, Human
ugggagugcaggcacaugg

SEQ ID NO: 56983 - RNA, 19 nt, Human
uggggcuuggaggcagagg

SEQ ID NO: 56984 - RNA, 18 nt, Human
ugguaggaagaguccugg

SEQ ID NO: 56985 - RNA, 24 nt, Human
ugguggggaggggaagcagggcug

SEQ ID NO: 56986 - RNA, 18 nt, Human
uuccuggguucccugaac

SEQ ID NO: 56987 - RNA, 18 nt, Human
uucgaagccccuucuccu

SEQ ID NO: 56988 - RNA, 25 nt, Human
uuuccuggguucccugaacgaugag

SEQ ID NO: 56989 - RNA, 18 nt, Human
uuugugguaggaagaguc

SEQ ID NO: 56990 - RNA, 19 nt, Human
aggaaagucgagugggagg

SEQ ID NO: 56991 - RNA, 20 nt, Human
aggccccuggcccaggccag

SEQ ID NO: 56992 - RNA, 18 nt, Human
agugccagggaggggccg

SEQ ID NO: 56993 - RNA, 20 nt, Human
cagcaguccacggggccuca

SEQ ID NO: 56994 - RNA, 20 nt, Human
caggccccuggcccaggcca

SEQ ID NO: 56995 - RNA, 19 nt, Human
caggccccuggcccagggg

SEQ ID NO: 56996 - RNA, 20 nt, Human
ccccucccucccagcagucc

SEQ ID NO: 56997 - RNA, 20 nt, Human
ccccucccucccagcagucc

SEQ ID NO: 56998 - RNA, 23 nt, Human
ccuggcuugcgcaggcggcgggc

SEQ ID NO: 56999 - RNA, 27 nt, Human
ccuguggccgggagcaggggucagggc

SEQ ID NO: 57000 - RNA, 21 nt, Human
cgcaggcggcgggcggggacg

SEQ ID NO: 57001 - RNA, 24 nt, Human
cugcugcccccucccucccagcag

SEQ ID NO: 57002 - RNA, 20 nt, Human
gaaaacaugggcguggccca

SEQ ID NO: 57003 - RNA, 22 nt, Human
gaaaacaugggcguggcccaug

SEQ ID NO: 57004 - RNA, 23 nt, Human
gcccccucccucccagcagucca

SEQ ID NO: 57005 - RNA, 23 nt, Human
gccccuggcccaggccagguucc

SEQ ID NO: 57006 - RNA, 19 nt, Human
gccucagugccagggaggg

SEQ ID NO: 57007 - RNA, 22 nt, Human
ggccgggagcaggggucagggc

SEQ ID NO: 57008 - RNA, 23 nt, Human
uccacggggccucagacuugggg

SEQ ID NO: 57009 - RNA, 22 nt, Human
ugagggucaggccccuggccca

SEQ ID NO: 57010 - RNA, 23 nt, Human
ugcccccucccucccagcagucc

SEQ ID NO: 57011 - RNA, 22 nt, Human
ugccuguggccgggagcagggg

SEQ ID NO: 57012 - RNA, 22 nt, Human
uggaaaacaugggcguggccca

SEQ ID NO: 57013 - RNA, 18 nt, Human
uuggcugggaguuugggg

SEQ ID NO: 57014 - RNA, 23 nt, Human
uuggggaggcgaggaggcugugg

SEQ ID NO: 57015 - RNA, 22 nt, Human
uuggggcggcugaaagugcuga

SEQ ID NO: 57016 - RNA, 28 nt, Human
uuggggcggcugaaagugcugaggguca

SEQ ID NO: 57017 - RNA, 23 nt, Human
aacugacugucccucuggacucu

SEQ ID NO: 57018 - RNA, 21 nt, Human
aacugagcagcccuuagcccc

SEQ ID NO: 57019 - RNA, 24 nt, Human
aaggaaagcugacagcccagagac

SEQ ID NO: 57020 - RNA, 18 nt, Human
aauuuguggcauuuccuc

SEQ ID NO: 57021 - RNA, 20 nt, Human
acuuuuaucaccauacaauu

SEQ ID NO: 57022 - RNA, 22 nt, Human
agacaaaaggccuggaugcaac

SEQ ID NO: 57023 - RNA, 25 nt, Human
agacaaaaggccuggaugcaaccaa

SEQ ID NO: 57024 - RNA, 22 nt, Human
agcccagagacccacggggaaa

SEQ ID NO: 57025 - RNA, 21 nt, Human
agcugacagcccagagaccca

SEQ ID NO: 57026 - RNA, 18 nt, Human
auaucaagcaaacuggaa

SEQ ID NO: 57027 - RNA, 19 nt, Human
auucacuugagccguggga

SEQ ID NO: 57028 - RNA, 20 nt, Human
caaauucacuugagccgugg

SEQ ID NO: 57029 - RNA, 23 nt, Human
cagccugaggagaaaucaaacac

SEQ ID NO: 57030 - RNA, 21 nt, Human
cauacaauuuguggcauuucc

SEQ ID NO: 57031 - RNA, 19 nt, Human
cauggagaaaggaaagcug

SEQ ID NO: 57032 - RNA, 26 nt, Human
cauuuucuacauuguagaaucaagag

SEQ ID NO: 57033 - RNA, 19 nt, Human
cccacggggaaacaggccc

SEQ ID NO: 57034 - RNA, 18 nt, Human
ccccagcccagcagccug

SEQ ID NO: 57035 - RNA, 19 nt, Human
cccuaaaacugacuguccc

SEQ ID NO: 57036 - RNA, 18 nt, Human
ccucuggacucuacguag

SEQ ID NO: 57037 - RNA, 19 nt, Human
ccugcaagaagcccuccca

SEQ ID NO: 57038 - RNA, 22 nt, Human
cugagcagcccuuagccccagc

SEQ ID NO: 57039 - RNA, 18 nt, Human
gaagcccucccaaucccc

SEQ ID NO: 57040 - RNA, 22 nt, Human
gaagcccucccaauccccggcg

SEQ ID NO: 57041 - RNA, 23 nt, Human
gaguuacuggauacaggcaaccc

SEQ ID NO: 57042 - RNA, 22 nt, Human
gcccuuagccccagcccagcag

SEQ ID NO: 57043 - RNA, 23 nt, Human
guaauacuguuccuccauguuuc

SEQ ID NO: 57044 - RNA, 22 nt, Human
guagaaucaagaguguaaauaa

SEQ ID NO: 57045 - RNA, 24 nt, Human
uaacuaccauaauuuaguauaagu

SEQ ID NO: 57046 - RNA, 20 nt, Human
uaucaagcaaacuggaaggc

SEQ ID NO: 57047 - RNA, 21 nt, Human
uaucaagcaaacuggaaggca

SEQ ID NO: 57048 - RNA, 25 nt, Human
ucaaaauauaagucaagaaucuuaa

SEQ ID NO: 57049 - RNA, 19 nt, Human
ucaguugaaggcauucuga

SEQ ID NO: 57050 - RNA, 21 nt, Human
ucaguugaaggcauucugauu

SEQ ID NO: 57051 - RNA, 22 nt, Human
uccaugcauacaauguuaugug

SEQ ID NO: 57052 - RNA, 21 nt, Human
ucuugauuagagugguaggac

SEQ ID NO: 57053 - RNA, 24 nt, Human
ugagcagcccuuagccccagccca

SEQ ID NO: 57054 - RNA, 19 nt, Human
ugaggagaaaucaaacaca

SEQ ID NO: 57055 - RNA, 23 nt, Human
ugaggagaaaucaaacacaugga

SEQ ID NO: 57056 - RNA, 24 nt, Human
ugaggagaaaucaaacacauggaa

SEQ ID NO: 57057 - RNA, 18 nt, Human
uguguguuggguauaaga

SEQ ID NO: 57058 - RNA, 22 nt, Human
uuagagggagaucaugaacacc

SEQ ID NO: 57059 - RNA, 24 nt, Human
uucaagaauauaucauuccuuuuu

SEQ ID NO: 57060 - RNA, 22 nt, Human
uucacgugacuuuuaucaccau

SEQ ID NO: 57061 - RNA, 22 nt, Human
uuuccaugcauacaauguuaug

SEQ ID NO: 57062 - RNA, 23 nt, Human
caacagaagggccaccgccuccc

SEQ ID NO: 57063 - RNA, 28 nt, Human
cacaggaccccgggacagagggcucuuc

SEQ ID NO: 57064 - RNA, 20 nt, Human
caggcucggucuagcaacag

SEQ ID NO: 57065 - RNA, 18 nt, Human
ccgggacagacacuggcc

SEQ ID NO: 57066 - RNA, 23 nt, Human
ccugcaacagggcagcugugaac

SEQ ID NO: 57067 - RNA, 23 nt, Human
cuaugggcuccucugccuuggua

SEQ ID NO: 57068 - RNA, 18 nt, Human
ugccacaggaccccggga

SEQ ID NO: 57069 - RNA, 18 nt, Human
ugccuugguauaucccac

SEQ ID NO: 57070 - RNA, 23 nt, Human
uggacccagguugcuuggcgcug

SEQ ID NO: 57071 - RNA, 22 nt, Human
uggcgcugccugccacaggacc

SEQ ID NO: 57072 - RNA, 28 nt, Human
uuuaguuuuuauuuggacccagguucua

SEQ ID NO: 57073 - RNA, 25 nt, Human
aaaacaaaaacaaaaccaaaccaga

SEQ ID NO: 57074 - RNA, 22 nt, Human
aaaacaaaacaaaaacaaaacc

SEQ ID NO: 57075 - RNA, 24 nt, Human
aaaaccaaaacaaaacaaaaacaa

SEQ ID NO: 57076 - RNA, 22 nt, Human
aaaaccaaaccagaccucaagu

SEQ ID NO: 57077 - RNA, 23 nt, Human
aaacaaaaacaaaaccaaaccag

SEQ ID NO: 57078 - RNA, 29 nt, Human
aaacaaaaacaaaaccaaaccagaccuca

SEQ ID NO: 57079 - RNA, 23 nt, Human
aaacaaaacaaaaacaaaaccaa

SEQ ID NO: 57080 - RNA, 20 nt, Human
aaacaaaacaaaaccaaaac

SEQ ID NO: 57081 - RNA, 22 nt, Human
aaacaaaacaaaaccaaaacaa

SEQ ID NO: 57082 - RNA, 20 nt, Human
aaacaaaaccaaaacaaaac

SEQ ID NO: 57083 - RNA, 23 nt, Human
aaacaaaaccaaaacaaaacaaa

SEQ ID NO: 57084 - RNA, 28 nt, Human
aaacaaaaccaaaacaaaacaaaaacaa

SEQ ID NO: 57085 - RNA, 18 nt, Human
aaacacagaagagagcau

SEQ ID NO: 57086 - RNA, 19 nt, Human
aaacaucacugcaucaauc

SEQ ID NO: 57087 - RNA, 24 nt, Human
aaaccaaaacaaaacaaaaacaaa

SEQ ID NO: 57088 - RNA, 25 nt, Human
aaaccaaaacaaaacaaaaacaaaa

SEQ ID NO: 57089 - RNA, 19 nt, Human
aaaggacuauaaaugcagg

SEQ ID NO: 57090 - RNA, 21 nt, Human
aacaaaacaaaaccaaaacaa

SEQ ID NO: 57091 - RNA, 21 nt, Human
aacaagguccaccuuaagcau

SEQ ID NO: 57092 - RNA, 24 nt, Human
aauucaaaaugauuacacuaucau

SEQ ID NO: 57093 - RNA, 22 nt, Human
acaaaacaaaaacaaaaccaaa

SEQ ID NO: 57094 - RNA, 23 nt, Human
acaaaacaaaaacaaaaccaaac

SEQ ID NO: 57095 - RNA, 23 nt, Human
acaaaaccaaaacaaaacaaaaa

SEQ ID NO: 57096 - RNA, 21 nt, Human
acagaagagagcauucaugca

SEQ ID NO: 57097 - RNA, 19 nt, Human
acauguguucucuuuuugc

SEQ ID NO: 57098 - RNA, 20 nt, Human
accaaaacaaaacaaaaaca

SEQ ID NO: 57099 - RNA, 24 nt, Human
accaaaacaaaacaaaaacaaaac

SEQ ID NO: 57100 - RNA, 25 nt, Human
accaaauugaguugcuuucacaagu

SEQ ID NO: 57101 - RNA, 18 nt, Human
acuaaaguucagguuccu

SEQ ID NO: 57102 - RNA, 21 nt, Human
acugauuuaaguccaacacca

SEQ ID NO: 57103 - RNA, 18 nt, Human
agaaaguggagguaacug

SEQ ID NO: 57104 - RNA, 24 nt, Human
agauaucuaacuccuugauauaau

SEQ ID NO: 57105 - RNA, 18 nt, Human
agucacgagauggaaaag

SEQ ID NO: 57106 - RNA, 21 nt, Human
aguggaaagggcugcuaaagg

SEQ ID NO: 57107 - RNA, 19 nt, Human
aucacagucacagaacuuu

SEQ ID NO: 57108 - RNA, 19 nt, Human
augaguaacuggaaucauu

SEQ ID NO: 57109 - RNA, 23 nt, Human
caaaaacaaaaccaaaccagacc

SEQ ID NO: 57110 - RNA, 26 nt, Human
caaaacaaaaacaaaaccaaaccaga

SEQ ID NO: 57111 - RNA, 24 nt, Human
caaaacaaaaacaaaaccaaaccc

SEQ ID NO: 57112 - RNA, 25 nt, Human
caaaacaaaaccaaaacaaaacaaa

SEQ ID NO: 57113 - RNA, 23 nt, Human
caaaacagagcuccucaaaauau

SEQ ID NO: 57114 - RNA, 23 nt, Human
caaaaccaaaacaaaacaaaaac

SEQ ID NO: 57115 - RNA, 23 nt, Human
caaaaccaaaccagaccucaagu

SEQ ID NO: 57116 - RNA, 21 nt, Human
caaaauauuaggugcugugcu

SEQ ID NO: 57117 - RNA, 19 nt, Human
caaaccagaccucaaguca

SEQ ID NO: 57118 - RNA, 21 nt, Human
caaccacagaaaaucaacuaa

SEQ ID NO: 57119 - RNA, 24 nt, Human
caaccacuugauuucaaaccaagu

SEQ ID NO: 57120 - RNA, 20 nt, Human
caagcugacuugauuuacug

SEQ ID NO: 57121 - RNA, 23 nt, Human
caaucucaaucuacaacucuggu

SEQ ID NO: 57122 - RNA, 19 nt, Human
cacagaacagccaguacac

SEQ ID NO: 57123 - RNA, 18 nt, Human
cacagaagagagcauuca

SEQ ID NO: 57124 - RNA, 20 nt, Human
cacaguggugguuauggaaa

SEQ ID NO: 57125 - RNA, 21 nt, Human
caccaaaacuuuuccuuccua

SEQ ID NO: 57126 - RNA, 22 nt, Human
cagccaguacacccaaucucaa

SEQ ID NO: 57127 - RNA, 26 nt, Human
cagucacagaacuuuaagucacgaga

SEQ ID NO: 57128 - RNA, 23 nt, Human
cauacaauucaaaaugauuacac

SEQ ID NO: 57129 - RNA, 18 nt, Human
caucaaguuaguaaaggg

SEQ ID NO: 57130 - RNA, 20 nt, Human
caucacagucacagaacuuu

SEQ ID NO: 57131 - RNA, 19 nt, Human
cauccaccaccuucuacau

SEQ ID NO: 57132 - RNA, 19 nt, Human
cauuagaagcucaauuuca

SEQ ID NO: 57133 - RNA, 25 nt, Human
ccaaaacaaaacaaaaacaaaacca

SEQ ID NO: 57134 - RNA, 23 nt, Human
ccaaaccagaccucaagucaaca

SEQ ID NO: 57135 - RNA, 21 nt, Human
ccaacaccuaaugaggacgaa

SEQ ID NO: 57136 - RNA, 19 nt, Human
cccacaguguuaacagggu

SEQ ID NO: 57137 - RNA, 21 nt, Human
cccagggaccaucuccccccu

SEQ ID NO: 57138 - RNA, 23 nt, Human
cccguuagagagaguagagcgag

SEQ ID NO: 57139 - RNA, 26 nt, Human
ccgccgcugccgccgccgcugcgauu

SEQ ID NO: 57140 - RNA, 18 nt, Human
cgcugccgccgccgcugc

SEQ ID NO: 57141 - RNA, 23 nt, Human
cgcugcgauuguuccagcugugu

SEQ ID NO: 57142 - RNA, 24 nt, Human
cggaacacucacaugcaucacagu

SEQ ID NO: 57143 - RNA, 24 nt, Human
cuagcgaacaaccaacaaccacag

SEQ ID NO: 57144 - RNA, 28 nt, Human
cuagcgaacaaccaacaaccacagaaaa

SEQ ID NO: 57145 - RNA, 19 nt, Human
cuucucccgccgcugccgc

SEQ ID NO: 57146 - RNA, 24 nt, Human
gaaaaacaucacugcaucaaucca

SEQ ID NO: 57147 - RNA, 23 nt, Human
gaacaaccaacaaccacagaaaa

SEQ ID NO: 57148 - RNA, 20 nt, Human
gaagaaaaacuuuaauugcu

SEQ ID NO: 57149 - RNA, 21 nt, Human
gacaccagggagagggaagaa

SEQ ID NO: 57150 - RNA, 22 nt, Human
gcacugcccccagcaucgacau

SEQ ID NO: 57151 - RNA, 21 nt, Human
ggaaacaaaacaaaaccaaaa

SEQ ID NO: 57152 - RNA, 21 nt, Human
uaagucacgagauggaaaaga

SEQ ID NO: 57153 - RNA, 20 nt, Human
uacaaggaacgaaaaacauc

SEQ ID NO: 57154 - RNA, 22 nt, Human
uacaauucaaaaugauuacacu

SEQ ID NO: 57155 - RNA, 25 nt, Human
uacguaaagguaccaacucuugaaa

SEQ ID NO: 57156 - RNA, 19 nt, Human
uagaaacaccaaaaaaagg

SEQ ID NO: 57157 - RNA, 19 nt, Human
uagaaacaccaaaaaaagg

SEQ ID NO: 57158 - RNA, 23 nt, Human
uagaaacaccaaaaaaagguuuu

SEQ ID NO: 57159 - RNA, 19 nt, Human
uagaaaguggagguaacug

SEQ ID NO: 57160 - RNA, 19 nt, Human
uagaaaguggagguaacug

SEQ ID NO: 57161 - RNA, 23 nt, Human
uagaaaguggagguaacuggaug

SEQ ID NO: 57162 - RNA, 19 nt, Human
uagcgaacaaccaacaacc

SEQ ID NO: 57163 - RNA, 19 nt, Human
uagucauuucccauugagu

SEQ ID NO: 57164 - RNA, 21 nt, Human
uauauaaacccacaguguuaa

SEQ ID NO: 57165 - RNA, 23 nt, Human
uauuuauaauguuauucucuuua

SEQ ID NO: 57166 - RNA, 20 nt, Human
uccaagcugacuugauuuac

SEQ ID NO: 57167 - RNA, 21 nt, Human
uccacagaacagccaguacac

SEQ ID NO: 57168 - RNA, 21 nt, Human
ucuacaacucuggucucccug

SEQ ID NO: 57169 - RNA, 22 nt, Human
ucuucucccgccgcugccgcua

SEQ ID NO: 57170 - RNA, 23 nt, Human
ugaauccagaagcaaaauuaugc

SEQ ID NO: 57171 - RNA, 18 nt, Human
ugagacuagcgaacaacc

SEQ ID NO: 57172 - RNA, 18 nt, Human
ugagcgaaaguugaacgu

SEQ ID NO: 57173 - RNA, 23 nt, Human
ugaggccaacaccuaaugaggac

SEQ ID NO: 57174 - RNA, 22 nt, Human
ugaguugcuuucacaaguguug

SEQ ID NO: 57175 - RNA, 18 nt, Human
uggaaagggcugcuaaag

SEQ ID NO: 57176 - RNA, 19 nt, Human
uggcaccaaaacuuuuccu

SEQ ID NO: 57177 - RNA, 21 nt, Human
uggcagagaauaccuaaacac

SEQ ID NO: 57178 - RNA, 19 nt, Human
ugggaaacaaaacaaaacc

SEQ ID NO: 57179 - RNA, 20 nt, Human
ugggacagucauucauuuca

SEQ ID NO: 57180 - RNA, 20 nt, Human
uguauguuuuccacagaaca

SEQ ID NO: 57181 - RNA, 24 nt, Human
uuaauucuauugggaaacaaaaca

SEQ ID NO: 57182 - RNA, 21 nt, Human
uucaaauaaaagucaaacagu

SEQ ID NO: 57183 - RNA, 22 nt, Human
uucacagcaagaguggcagaga

SEQ ID NO: 57184 - RNA, 24 nt, Human
uucuacauguguucucuuuuugcg

SEQ ID NO: 57185 - RNA, 20 nt, Human
uucucaguuccuuaaaaucc

SEQ ID NO: 57186 - RNA, 21 nt, Human
uucucccgccgcugccgccgc

SEQ ID NO: 57187 - RNA, 19 nt, Human
cugcuaaugguacuuuuuu

SEQ ID NO: 57188 - RNA, 20 nt, Human
ucacuccugaaagcaucuga

SEQ ID NO: 57189 - RNA, 19 nt, Human
ucauuccccucucaucuuc

SEQ ID NO: 57190 - RNA, 22 nt, Human
ugcaaguuucuguuugaaacuc

SEQ ID NO: 57191 - RNA, 20 nt, Human
uuaguuacagaauuugcuaa

SEQ ID NO: 57192 - RNA, 20 nt, Human
uaagugauuguaagcaaaaa

SEQ ID NO: 57193 - RNA, 23 nt, Human
ugauuuuuaaaacauuuuauugu

SEQ ID NO: 57194 - RNA, 23 nt, Human
ugguacauuuuuaguuacagaau

SEQ ID NO: 57195 - RNA, 20 nt, Human
uuaguuacagaauuugcuaa

SEQ ID NO: 57196 - RNA, 22 nt, Human
uugugugcuugugucaucccuc

SEQ ID NO: 57197 - RNA, 26 nt, Human
aaaaaaaaaaaaaguaauccaauggg

SEQ ID NO: 57198 - RNA, 26 nt, Human
aaaaaaaaaaaaaguaauccaauggg

SEQ ID NO: 57199 - RNA, 19 nt, Human
aaacaaauagcuaugcucu

SEQ ID NO: 57200 - RNA, 19 nt, Human
aaacaaauagcuaugcucu

SEQ ID NO: 57201 - RNA, 19 nt, Human
aaagcccuucaagguuuac

SEQ ID NO: 57202 - RNA, 19 nt, Human
aaagcccuucaagguuuac

SEQ ID NO: 57203 - RNA, 21 nt, Human
aaaggacuaccacaaaacaaa

SEQ ID NO: 57204 - RNA, 20 nt, Human
aaauagcuaugcucucagca

SEQ ID NO: 57205 - RNA, 25 nt, Human
aaaucacagaaauuuacuaacagca

SEQ ID NO: 57206 - RNA, 25 nt, Human
aaaucacagaaauuuacuaacagca

SEQ ID NO: 57207 - RNA, 26 nt, Human
aacaccagaagagaucauaccuacag

SEQ ID NO: 57208 - RNA, 26 nt, Human
aacaccagaagagaucauaccuacag

SEQ ID NO: 57209 - RNA, 18 nt, Human
aaccaaagcuugcugccu

SEQ ID NO: 57210 - RNA, 27 nt, Human
aacugagcgugucagcuggagguccug

SEQ ID NO: 57211 - RNA, 21 nt, Human
aagagauuugggaccugggcc

SEQ ID NO: 57212 - RNA, 21 nt, Human
aagagauuugggaccugggcc

SEQ ID NO: 57213 - RNA, 18 nt, Human
aagcugccugcugcaggc

SEQ ID NO: 57214 - RNA, 18 nt, Human
aagcugccugcugcaggc

SEQ ID NO: 57215 - RNA, 22 nt, Human
aagucagucccagauguagugg

SEQ ID NO: 57216 - RNA, 22 nt, Human
aagucagucccagauguagugg

SEQ ID NO: 57217 - RNA, 21 nt, Human
acaaaacaaagcuuucaaaga

SEQ ID NO: 57218 - RNA, 21 nt, Human
acaaaacaaagcuuucaaaga

SEQ ID NO: 57219 - RNA, 21 nt, Human
acacugugcgccucccccaca

SEQ ID NO: 57220 - RNA, 21 nt, Human
acacugugcgccucccccaca

SEQ ID NO: 57221 - RNA, 18 nt, Human
accucuggcccccaggcu

SEQ ID NO: 57222 - RNA, 21 nt, Human
acuaacagcauuucaagguaa

SEQ ID NO: 57223 - RNA, 21 nt, Human
acuaacagcauuucaagguaa

SEQ ID NO: 57224 - RNA, 23 nt, Human
acuuccuccugaucgucccccac

SEQ ID NO: 57225 - RNA, 23 nt, Human
acuuccuccugaucgucccccac

SEQ ID NO: 57226 - RNA, 24 nt, Human
agacgggacaaggaaaugcugaga

SEQ ID NO: 57227 - RNA, 24 nt, Human
agacgggacaaggaaaugcugaga

SEQ ID NO: 57228 - RNA, 20 nt, Human
agaggggaggggacccaugg

SEQ ID NO: 57229 - RNA, 22 nt, Human
aggcaggaguagaagcugccug

SEQ ID NO: 57230 - RNA, 22 nt, Human
aggcaggaguagaagcugccug

SEQ ID NO: 57231 - RNA, 21 nt, Human
aggcgaggacugagguccagu

SEQ ID NO: 57232 - RNA, 22 nt, Human
aggcuuuagcacugccuaauuu

SEQ ID NO: 57233 - RNA, 23 nt, Human
aguuugcuuuuuauuauuauuau

SEQ ID NO: 57234 - RNA, 23 nt, Human
aguuugcuuuuuauuauuauuau

SEQ ID NO: 57235 - RNA, 19 nt, Human
aucugaccgcuguguagga

SEQ ID NO: 57236 - RNA, 21 nt, Human
auggaaccuggggaaacaucu

SEQ ID NO: 57237 - RNA, 23 nt, Human
auggaaccuggggaaacaucucu

SEQ ID NO: 57238 - RNA, 23 nt, Human
caaaaggacuaccacaaaacaaa

SEQ ID NO: 57239 - RNA, 20 nt, Human
caaagaguaaaaaaaaaaaa

SEQ ID NO: 57240 - RNA, 30 nt, Human
caaagcuugcugccuaaccacuccccaggg

SEQ ID NO: 57241 - RNA, 30 nt, Human; identical to SEQ ID NO: 57240

SEQ ID NO: 57242 - RNA, 22 nt, Human
caaauagcuaugcucucagcaa

SEQ ID NO: 57243 - RNA, 21 nt, Human
caacaccagaagagaucauac

SEQ ID NO: 57244 - RNA, 22 nt, Human
cacaaaacaaagcuuucaaaga

SEQ ID NO: 57245 - RNA, 22 nt, Human
cacaaaacaaagcuuucaaaga

SEQ ID NO: 57246 - RNA, 21 nt, Human
cacacucaugagaugcaggag

SEQ ID NO: 57247 - RNA, 21 nt, Human
cacacucaugagaugcaggag

SEQ ID NO: 57248 - RNA, 20 nt, Human
cacccuauagcccuggacuu

SEQ ID NO: 57249 - RNA, 23 nt, Human
caccucacugggcuccacuucca

SEQ ID NO: 57250 - RNA, 19 nt, Human
caccucgccgaaguccagc

SEQ ID NO: 57251 - RNA, 21 nt, Human
caccugcauuugugggacgua

SEQ ID NO: 57252 - RNA, 21 nt, Human
caccugcauuugugggacgua

SEQ ID NO: 57253 - RNA, 24 nt, Human
caggaggcagcugaggaaggcaag

SEQ ID NO: 57254 - RNA, 24 nt, Human
caggaggcagcugaggaaggcaag

SEQ ID NO: 57255 - RNA, 24 nt, Human
cauaaaccaaagcuugcugccuaa

SEQ ID NO: 57256 - RNA, 24 nt, Human
cauaaaccaaagcuugcugccuaa

SEQ ID NO: 57257 - RNA, 22 nt, Human
caucuucagaacuuuuguucaa

SEQ ID NO: 57258 - RNA, 20 nt, Human
caucuugcaaggcccacaua

SEQ ID NO: 57259 - RNA, 20 nt, Human
caucuugcaaggcccacaua

SEQ ID NO: 57260 - RNA, 23 nt, Human
caucuuguucaaggaccaaaccc

SEQ ID NO: 57261 - RNA, 23 nt, Human
caucuuguucaaggaccaaaccc

SEQ ID NO: 57262 - RNA, 18 nt, Human
ccaagaugcccugcuggc

SEQ ID NO: 57263 - RNA, 21 nt, Human
ccaggauaaaagauacaaaag

SEQ ID NO: 57264 - RNA, 21 nt, Human
ccaggauaaaagauacaaaag

SEQ ID NO: 57265 - RNA, 24 nt, Human
ccaggcuucccugcgcugcggccg

SEQ ID NO: 57266 - RNA, 22 nt, Human
ccauggggcacacucaugagau

SEQ ID NO: 57267 - RNA, 22 nt, Human
ccauggggcacacucaugagau

SEQ ID NO: 57268 - RNA, 22 nt, Human
cccaccccaagcaguccaguca

SEQ ID NO: 57269 - RNA, 22 nt, Human
cccaccccaagcaguccaguca

SEQ ID NO: 57270 - RNA, 20 nt, Human
ccccaagcaguccagucaac

SEQ ID NO: 57271 - RNA, 20 nt, Human
ccccaagcaguccagucaac

SEQ ID NO: 57272 - RNA, 22 nt, Human
cccugcgcugcggccgggccuc

SEQ ID NO: 57273 - RNA, 26 nt, Human
ccuaaaaauuuaccuaucaccuuuuu

SEQ ID NO: 57274 - RNA, 26 nt, Human
ccuaaaaauuuaccuaucaccuuuuu

SEQ ID NO: 57275 - RNA, 19 nt, Human
ccucccccacacucuuccc

SEQ ID NO: 57276 - RNA, 19 nt, Human
ccucccccacacucuuccc

SEQ ID NO: 57277 - RNA, 20 nt, Human
ccucccccacacucuuccca

SEQ ID NO: 57278 - RNA, 20 nt, Human
ccucccccacacucuuccca

SEQ ID NO: 57279 - RNA, 23 nt, Human
ccucccccacacucuucccacug

SEQ ID NO: 57280 - RNA, 23 nt, Human
cgaaguccagcgucuccuccagg

SEQ ID NO: 57281 - RNA, 26 nt, Human
cgaagucuuccaccucacugggcucc

SEQ ID NO: 57282 - RNA, 24 nt, Human
cgaccucuggcccccaggcuuccc

SEQ ID NO: 57283 - RNA, 19 nt, Human
cgacgugggggcgggcuca

SEQ ID NO: 57284 - RNA, 19 nt, Human
cgacgugggggcgggcuca

SEQ ID NO: 57285 - RNA, 18 nt, Human
cgcuguguaggaaaaggu

SEQ ID NO: 57286 - RNA, 21 nt, Human
cggcagcggcgaccucuggcc

SEQ ID NO: 57287 - RNA, 18 nt, Human
cuaauuuacuucaccaau

SEQ ID NO: 57288 - RNA, 18 nt, Human
cuaauuuacuucaccaau

SEQ ID NO: 57289 - RNA, 23 nt, Human
cuacaugcuuccacaacaacgac

SEQ ID NO: 57290 - RNA, 23 nt, Human
cuacaugcuuccacaacaacgac

SEQ ID NO: 57291 - RNA, 20 nt, Human
cucacugggcuccacuucca

SEQ ID NO: 57292 - RNA, 18 nt, Human
cucaucagcagacuugga

SEQ ID NO: 57293 - RNA, 19 nt, Human
cugcaccagcaugcgcugu

SEQ ID NO: 57294 - RNA, 27 nt, Human
cugcaggcaggcgacugcucacuuccu

SEQ ID NO: 57295 - RNA, 27 nt, Human
cugcaggcaggcgacugcucacuuccu

SEQ ID NO: 57296 - RNA, 21 nt, Human
cugcugcaggcaggcgacugc

SEQ ID NO: 57297 - RNA, 21 nt, Human
cugcugcaggcaggcgacugc

SEQ ID NO: 57298 - RNA, 20 nt, Human
cuggagguccugcaguaccg

SEQ ID NO: 57299 - RNA, 19 nt, Human
cuggcccccaggcuucccu

SEQ ID NO: 57300 - RNA, 18 nt, Human
cuucccaaaaggacuacc

SEQ ID NO: 57301 - RNA, 18 nt, Human
cuucccaaaaggacuacc

SEQ ID NO: 57302 - RNA, 19 nt, Human
gaagagauuugggaccugg

SEQ ID NO: 57303 - RNA, 19 nt, Human
gaagagauuugggaccugg

SEQ ID NO: 57304 - RNA, 20 nt, Human
gaagucuuccaccucacugg

SEQ ID NO: 57305 - RNA, 19 nt, Human
gaccucuggcccccaggcu

SEQ ID NO: 57306 - RNA, 23 nt, Human
gaccucuggcccccaggcuuccc

SEQ ID NO: 57307 - RNA, 22 nt, Human
gaguuugcuuuuuauuauuauu

SEQ ID NO: 57308 - RNA, 22 nt, Human
gaguuugcuuuuuauuauuauu

SEQ ID NO: 57309 - RNA, 20 nt, Human
gaugguauggaaccugggga

SEQ ID NO: 57310 - RNA, 18 nt, Human
gcagaauugggacaggcc

SEQ ID NO: 57311 - RNA, 18 nt, Human
gcagaauugggacaggcc

SEQ ID NO: 57312 - RNA, 19 nt, Human
gccaagaauguugguggug

SEQ ID NO: 57313 - RNA, 22 nt, Human
gcggcagcggcgaccucuggcc

SEQ ID NO: 57314 - RNA, 24 nt, Human
gcucacacugugcgccucccccac

SEQ ID NO: 57315 - RNA, 24 nt, Human
gcucacacugugcgccucccccac

SEQ ID NO: 57316 - RNA, 23 nt, Human
gcucucugaggccgcaucaucuu

SEQ ID NO: 57317 - RNA, 19 nt, Human
gcugcaggcaggcgacugc

SEQ ID NO: 57318 - RNA, 19 nt, Human
gcugcaggcaggcgacugc

SEQ ID NO: 57319 - RNA, 23 nt, Human
ggagguccugcaguaccagaugg

SEQ ID NO: 57320 - RNA, 19 nt, Human
guccaguggcacacgcucg

SEQ ID NO: 57321 - RNA, 25 nt, Human
uaaagcccuucaagguuuacucucc

SEQ ID NO: 57322 - RNA, 25 nt, Human
uaaagcccuucaagguuuacucucc

SEQ ID NO: 57323 - RNA, 21 nt, Human
uaaauuuaucagcuguccaaa

SEQ ID NO: 57324 - RNA, 21 nt, Human
uaaauuuaucagcuguccaaa

SEQ ID NO: 57325 - RNA, 19 nt, Human
uagcccuggacuuuccccu

SEQ ID NO: 57326 - RNA, 19 nt, Human
uagcccuggacuuuccccu

SEQ ID NO: 57327 - RNA, 24 nt, Human
uaggaaaagguacuugaauccguc

SEQ ID NO: 57328 - RNA, 24 nt, Human
uaugcaugaggcaggaguagaagc

SEQ ID NO: 57329 - RNA, 27 nt, Human
ucaaagaguaaaaaaaaaaaaaaaaaa

SEQ ID NO: 57330 - RNA, 27 nt, Human
ucaaagaguaaaaaaaaaaaaaaaaaa

SEQ ID NO: 57331 - RNA, 22 nt, Human
ucaacaccagaagagaucauac

SEQ ID NO: 57332 - RNA, 21 nt, Human
ucaaggaccaaacccacaggc

SEQ ID NO: 57333 - RNA, 26 nt, Human
ucagcaaaacaaauuaaaaaaaaaaa

SEQ ID NO: 57334 - RNA, 20 nt, Human
uccaagaugcccugcuggcu

SEQ ID NO: 57335 - RNA, 25 nt, Human
ucccugcgcugcggccgggccucug

SEQ ID NO: 57336 - RNA, 20 nt, Human
ucucucaucagcagacuugg

SEQ ID NO: 57337 - RNA, 19 nt, Human
ucugaagccuccguuccgc

SEQ ID NO: 57338 - RNA, 22 nt, Human
ugacuucaugguucaaauccuu

SEQ ID NO: 57339 - RNA, 22 nt, Human
ugacuucaugguucaaauccuu

SEQ ID NO: 57340 - RNA, 19 nt, Human
ugagaggggaggggaccca

SEQ ID NO: 57341 - RNA, 19 nt, Human
ugagaggggaggggaccca

SEQ ID NO: 57342 - RNA, 23 nt, Human
ugagaugcaggagcaccagaguu

SEQ ID NO: 57343 - RNA, 23 nt, Human
ugagaugcaggagcaccagaguu

SEQ ID NO: 57344 - RNA, 24 nt, Human
ugaggaaggcaagggagcgcuagg

SEQ ID NO: 57345 - RNA, 24 nt, Human
ugaggcaggaguagaagcugccug

SEQ ID NO: 57346 - RNA, 24 nt, Human
ugaggcaggaguagaagcugccug

SEQ ID NO: 57347 - RNA, 18 nt, Human
ugcaaggcccacaucuug

SEQ ID NO: 57348 - RNA, 18 nt, Human
ugcaaggcccacaucuug

SEQ ID NO: 57349 - RNA, 24 nt, Human
ugcggccgggccucugcggcggcc

SEQ ID NO: 57350 - RNA, 21 nt, Human
ugcugcaggcaggcgacugcu

SEQ ID NO: 57351 - RNA, 21 nt, Human
ugcugcaggcaggcgacugcu

SEQ ID NO: 57352 - RNA, 25 nt, Human
uggcucaggggugcaugagcccgug

SEQ ID NO: 57353 - RNA, 25 nt, Human
uggcucaggggugcaugagcccgug

SEQ ID NO: 57354 - RNA, 18 nt, Human
ugggaccugggcccucuc

SEQ ID NO: 57355 - RNA, 18 nt, Human
ugggaccugggcccucuc

SEQ ID NO: 57356 - RNA, 18 nt, Human
uguccaaacacuauaaga

SEQ ID NO: 57357 - RNA, 18 nt, Human
uguccaaacacuauaaga

SEQ ID NO: 57358 - RNA, 22 nt, Human
uucaaggaccaaacccacaggc

SEQ ID NO: 57359 - RNA, 19 nt, Human
uucuaaggggaagagaaau

SEQ ID NO: 57360 - RNA, 19 nt, Human
uucuaaggggaagagaaau

SEQ ID NO: 57361 - RNA, 25 nt, Human
uucuucccaaaaggacuaccacaaa

SEQ ID NO: 57362 - RNA, 25 nt, Human
uucuucccaaaaggacuaccacaaa

SEQ ID NO: 57363 - RNA, 25 nt, Human
uugaauccguccuucuaaaauauug

SEQ ID NO: 57364 - RNA, 21 nt, Human
uugcauugagcugggaguugc

SEQ ID NO: 57365 - RNA, 24 nt, Human
uuuacuaacagcauuucaagguaa

SEQ ID NO: 57366 - RNA, 24 nt, Human
uuuacuaacagcauuucaagguaa

SEQ ID NO: 57367 - RNA, 18 nt, Human
uuugccaauaauuguaga

SEQ ID NO: 57368 - RNA, 18 nt, Human
uuugccaauaauuguaga

SEQ ID NO: 57369 - RNA, 23 nt, Human
agagcccuuucugucccuggcag

SEQ ID NO: 57370 - RNA, 21 nt, Human
aggugggguguuugugcagga

SEQ ID NO: 57371 - RNA, 21 nt, Human
caggacagaccccuaucuccu

SEQ ID NO: 57372 - RNA, 21 nt, Human
cagugcccggcgcccccacuc

SEQ ID NO: 57373 - RNA, 24 nt, Human
cccagugauagagcugggguaccc

SEQ ID NO: 57374 - RNA, 19 nt, Human
ccccuaucuccucugccgc

SEQ ID NO: 57375 - RNA, 21 nt, Human
ccggcgcccccacuccaggca

SEQ ID NO: 57376 - RNA, 24 nt, Human
ccucggggcaggaguccgcgcggc

SEQ ID NO: 57377 - RNA, 26 nt, Human
cgcccccacuccaggcagaguggccu

SEQ ID NO: 57378 - RNA, 22 nt, Human
cggacccucggggcaggagucc

SEQ ID NO: 57379 - RNA, 18 nt, Human
cggcgcccccacuccagg

SEQ ID NO: 57380 - RNA, 21 nt, Human
cucaaagagcccuuucugucc

SEQ ID NO: 57381 - RNA, 19 nt, Human
gaccccuaucuccucugcc

SEQ ID NO: 57382 - RNA, 24 nt, Human
gagcuggggcgcguccggacccuc

SEQ ID NO: 57383 - RNA, 18 nt, Human
gggaaggggcgcgagcug

SEQ ID NO: 57384 - RNA, 20 nt, Human
ggugcugccaggggcugggc

SEQ ID NO: 57385 - RNA, 18 nt, Human
guccgaauaaauauggga

SEQ ID NO: 57386 - RNA, 21 nt, Human
guccggacccucggggcagga

SEQ ID NO: 57387 - RNA, 22 nt, Human
gugggugcugccaggggcuggg

SEQ ID NO: 57388 - RNA, 19 nt, Human
uaucuccucugccgcgacc

SEQ ID NO: 57389 - RNA, 23 nt, Human
uccaggcagaguggccuucucaa

SEQ ID NO: 57390 - RNA, 24 nt, Human
uccaggcagaguggccuucucaaa

SEQ ID NO: 57391 - RNA, 25 nt, Human
ugccgcgaccuugggggaccggcgc

SEQ ID NO: 57392 - RNA, 19 nt, Human
ugggaaggggcgcgagcug

SEQ ID NO: 57393 - RNA, 24 nt, Human
ugggguccgaauaaauaugggaag

SEQ ID NO: 57394 - RNA, 19 nt, Human
ugggugcugccaggggcug

SEQ ID NO: 57395 - RNA, 18 nt, Human
uugggggacagugcccgg

SEQ ID NO: 57396 - RNA, 22 nt, Human
ccagcacagcugccccuggcca

SEQ ID NO: 57397 - RNA, 20 nt, Human
cccuggccaaaucuuucuuc

SEQ ID NO: 57398 - RNA, 21 nt, Human
gaggauggcagcagcagaagg

SEQ ID NO: 57399 - RNA, 24 nt, Human
gcagcagaaggagaagagcauaag

SEQ ID NO: 57400 - RNA, 20 nt, Human
uggcagcagcagaaggagau

SEQ ID NO: 57401 - RNA, 21 nt, Human
uggccaaaucuuucuucagau

SEQ ID NO: 57402 - RNA, 22 nt, Human
uuuauguuggcauguacauuga

SEQ ID NO: 57403 - RNA, 21 nt, Human
acaguaaaagagauagcuaga

SEQ ID NO: 57404 - RNA, 18 nt, Human
acgcagcguuuccgaccc

SEQ ID NO: 57405 - RNA, 19 nt, Human
acgcggcugccccgcgcgc

SEQ ID NO: 57406 - RNA, 24 nt, Human
agcuagaccaagaagguguagggu

SEQ ID NO: 57407 - RNA, 24 nt, Human
agcuggcggcgggggcgagcacgc

SEQ ID NO: 57408 - RNA, 20 nt, Human
ccacgcagcguuuccgaccc

SEQ ID NO: 57409 - RNA, 19 nt, Human
cccggccccgucugccuag

SEQ ID NO: 57410 - RNA, 18 nt, Human
ccugggaagaggucugca

SEQ ID NO: 57411 - RNA, 19 nt, Human
cgcgcgcgcgccgcucccg

SEQ ID NO: 57412 - RNA, 22 nt, Human
gaccaagaagguguagggucuc

SEQ ID NO: 57413 - RNA, 22 nt, Human
gagcuggcggcgggggcgagca

SEQ ID NO: 57414 - RNA, 26 nt, Human
gagcuggcggcgggggcgagcacgcu

SEQ ID NO: 57415 - RNA, 20 nt, Human
gcgccagaggcuggcggggc

SEQ ID NO: 57416 - RNA, 22 nt, Human
ggaagaggucugcagagaggcc

SEQ ID NO: 57417 - RNA, 26 nt, Human
ucccggccccgucugccuagccacgc

SEQ ID NO: 57418 - RNA, 23 nt, Human
uccugggaagaggucugcagaga

SEQ ID NO: 57419 - RNA, 19 nt, Human
ugaggcgagcuggcggcgg

SEQ ID NO: 57420 - RNA, 21 nt, Human
ugcagagaggcccagugacug

SEQ ID NO: 57421 - RNA, 21 nt, Human
uggcggcgggggcgagcacgc

SEQ ID NO: 57422 - RNA, 27 nt, Human
aaacaccuuuacugaguaaggccaccc

SEQ ID NO: 57423 - RNA, 18 nt, Human
accccucccauguccccc

SEQ ID NO: 57424 - RNA, 22 nt, Human
acuggggccagaggggguggag

SEQ ID NO: 57425 - RNA, 23 nt, Human
agaccccucccaugucccccagu

SEQ ID NO: 57426 - RNA, 24 nt, Human
agaggggguggagagccccaaggu

SEQ ID NO: 57427 - RNA, 18 nt, Human
agcagcuugguaccagga

SEQ ID NO: 57428 - RNA, 22 nt, Human
agccaggcugacagcaggugca

SEQ ID NO: 57429 - RNA, 18 nt, Human
agcuagaccccucccaug

SEQ ID NO: 57430 - RNA, 21 nt, Human
agcuccucacccuccccucac

SEQ ID NO: 57431 - RNA, 21 nt, Human
aggaaggggagguuugggggc

SEQ ID NO: 57432 - RNA, 24 nt, Human
aggaaggggagguuugggggcugg

SEQ ID NO: 57433 - RNA, 20 nt, Human
aggcugggcuccuaguccuc

SEQ ID NO: 57434 - RNA, 25 nt, Human
agggggaaaggaaggggagguuugg

SEQ ID NO: 57435 - RNA, 18 nt, Human
aucugccuucgcacccag

SEQ ID NO: 57436 - RNA, 21 nt, Human
caacuucgcagaucccagccu

SEQ ID NO: 57437 - RNA, 23 nt, Human
caccaggcacggccuuuggcucc

SEQ ID NO: 57438 - RNA, 19 nt, Human
caccccuugccucucuccc

SEQ ID NO: 57439 - RNA, 24 nt, Human
cacggccuuuggcuccguccaccc

SEQ ID NO: 57440 - RNA, 21 nt, Human
cagcuccucacccuccccuca

SEQ ID NO: 57441 - RNA, 23 nt, Human
cagcuccucacccuccccucacc

SEQ ID NO: 57442 - RNA, 21 nt, Human
caggaaacaccuuuacugagu

SEQ ID NO: 57443 - RNA, 21 nt, Human
ccaccaggcacggccuuuggc

SEQ ID NO: 57444 - RNA, 27 nt, Human
ccagcaguggccagcuagaccccuccc

SEQ ID NO: 57445 - RNA, 19 nt, Human
ccagcgcugccuccagcag

SEQ ID NO: 57446 - RNA, 24 nt, Human
ccagcuagaccccucccauguccc

SEQ ID NO: 57447 - RNA, 19 nt, Human
cccagccucuggccgccca

SEQ ID NO: 57448 - RNA, 19 nt, Human
ccccucaccggaaggcggg

SEQ ID NO: 57449 - RNA, 19 nt, Human
ccccucccuccagcuccuc

SEQ ID NO: 57450 - RNA, 21 nt, Human
cccgccccucccuccagcucc

SEQ ID NO: 57451 - RNA, 24 nt, Human
cccgccccucccuccagcuccuca

SEQ ID NO: 57452 - RNA, 25 nt, Human
cccuccagcuccucacccuccccuc

SEQ ID NO: 57453 - RNA, 20 nt, Human
ccgccccucccuccagcucc

SEQ ID NO: 57454 - RNA, 21 nt, Human
ccucacccuccccucaccgga

SEQ ID NO: 57455 - RNA, 22 nt, Human
ccuugccucucucccgccccuc

SEQ ID NO: 57456 - RNA, 18 nt, Human
cggaaggcgggggaagcc

SEQ ID NO: 57457 - RNA, 21 nt, Human
cggaggagggggaaaggaagg

SEQ ID NO: 57458 - RNA, 18 nt, Human
cguccgccccaccaggca

SEQ ID NO: 57459 - RNA, 22 nt, Human
cucccgccccucccuccagcuc

SEQ ID NO: 57460 - RNA, 22 nt, Human
cucucucccgccccucccucca

SEQ ID NO: 57461 - RNA, 19 nt, Human
cugaguaaggccacccugu

SEQ ID NO: 57462 - RNA, 20 nt, Human
cuuggcccccggaggagggg

SEQ ID NO: 57463 - RNA, 21 nt, Human
gaaggggagguuugggggcug

SEQ ID NO: 57464 - RNA, 19 nt, Human
gcaaggcugggcuccuagu

SEQ ID NO: 57465 - RNA, 22 nt, Human
ggaaaggaaggggagguuuggg

SEQ ID NO: 57466 - RNA, 23 nt, Human
ggaaggggagguuugggggcugg

SEQ ID NO: 57467 - RNA, 19 nt, Human
ggagagccccaaggucgac

SEQ ID NO: 57468 - RNA, 21 nt, Human
ggccgguggcggcauagccag

SEQ ID NO: 57469 - RNA, 21 nt, Human
ggcgggggaagccccacuccu

SEQ ID NO: 57470 - RNA, 19 nt, Human
gggcggggccgguggcggc

SEQ ID NO: 57471 - RNA, 23 nt, Human
ggggaaaggaaggggagguuugg

SEQ ID NO: 57472 - RNA, 19 nt, Human
uaccaggagggaugcccac

SEQ ID NO: 57473 - RNA, 20 nt, Human
ucacccuccccucaccggaa

SEQ ID NO: 57474 - RNA, 19 nt, Human
uccagcuccucacccuccc

SEQ ID NO: 57475 - RNA, 23 nt, Human
ucccuccagcuccucacccuccc

SEQ ID NO: 57476 - RNA, 23 nt, Human
ucccuccagcuccucacccuccc

SEQ ID NO: 57477 - RNA, 19 nt, Human
ucgcacccagcagcuuggu

SEQ ID NO: 57478 - RNA, 19 nt, Human
ucucccgccccucccucca

SEQ ID NO: 57479 - RNA, 19 nt, Human
ugccuucgcacccagcagc

SEQ ID NO: 57480 - RNA, 23 nt, Human
uggggccagaggggguggagagc

SEQ ID NO: 57481 - RNA, 27 nt, Human
uuggcccccggaggagggggaaaggaa

SEQ ID NO: 57482 - RNA, 18 nt, Human
aguagaaaagaagagaga

SEQ ID NO: 57483 - RNA, 18 nt, Human
cugacugacacuauaaaa

SEQ ID NO: 57484 - RNA, 20 nt, Human
ggugacugacugacacuaua

SEQ ID NO: 57485 - RNA, 20 nt, Human
uccuugauucuaggauagca

SEQ ID NO: 57486 - RNA, 22 nt, Human
aaaagacaggauuuggaauaag

SEQ ID NO: 57487 - RNA, 24 nt, Human
aaaauccuggccccaacaguucag

SEQ ID NO: 57488 - RNA, 21 nt, Human
aaaccaagacucagaauagga

SEQ ID NO: 57489 - RNA, 26 nt, Human
aacacacacacacacacacacaacua

SEQ ID NO: 57490 - RNA, 19 nt, Human
aacaguucaggcacuggca

SEQ ID NO: 57491 - RNA, 21 nt, Human
aagaaaccaagacucagaaua

SEQ ID NO: 57492 - RNA, 23 nt, Human
aagugcucagcucccagaucccc

SEQ ID NO: 57493 - RNA, 22 nt, Human
aaguuaaaaugcaugucaaaug

SEQ ID NO: 57494 - RNA, 18 nt, Human
acacacacacaacuaaca

SEQ ID NO: 57495 - RNA, 24 nt, Human
acacacacacacacacacaacuaa

SEQ ID NO: 57496 - RNA, 22 nt, Human
acagugauuaaaaacacacaca

SEQ ID NO: 57497 - RNA, 19 nt, Human
acucacucccuucccuccc

SEQ ID NO: 57498 - RNA, 21 nt, Human
acucacucccuucccuccccc

SEQ ID NO: 57499 - RNA, 25 nt, Human
acucacucccuucccucccccaccc

SEQ ID NO: 57500 - RNA, 21 nt, Human
acuuauuagcugugugcccuu

SEQ ID NO: 57501 - RNA, 18 nt, Human
agacaagugcucagcucc

SEQ ID NO: 57502 - RNA, 18 nt, Human
agagcggagcggggcugc

SEQ ID NO: 57503 - RNA, 22 nt, Human
agcauauuagagccaaaaggaa

SEQ ID NO: 57504 - RNA, 24 nt, Human
agccccugagcaucacucacuccc

SEQ ID NO: 57505 - RNA, 21 nt, Human
aggcacuaguaacacagauaa

SEQ ID NO: 57506 - RNA, 19 nt, Human
agggacggccgcagggcug

SEQ ID NO: 57507 - RNA, 22 nt, Human
agucaccaucuuguuacucaga

SEQ ID NO: 57508 - RNA, 21 nt, Human
aguuaaauuucacuuaucugg

SEQ ID NO: 57509 - RNA, 20 nt, Human
auccccggccaggagggccc

SEQ ID NO: 57510 - RNA, 23 nt, Human
caagaaggaagucuuccaucuua

SEQ ID NO: 57511 - RNA, 20 nt, Human
cacacacacacacacacaca

SEQ ID NO: 57512 - RNA, 24 nt, Human
caccaucuuguuacucagaaauac

SEQ ID NO: 57513 - RNA, 18 nt, Human
cacucccuucccuccccc

SEQ ID NO: 57514 - RNA, 24 nt, Human
cacuuaucuggccuaacucuuaau

SEQ ID NO: 57515 - RNA, 19 nt, Human
cagaacacccugaaagcca

SEQ ID NO: 57516 - RNA, 21 nt, Human
cagauaaagaguacacugaua

SEQ ID NO: 57517 - RNA, 24 nt, Human
cagccccaguguaaaacugaugaa

SEQ ID NO: 57518 - RNA, 22 nt, Human
cagcccccgucggugcccuacc

SEQ ID NO: 57519 - RNA, 23 nt, Human
caguucaggcacuggcaguuuca

SEQ ID NO: 57520 - RNA, 19 nt, Human
ccccaacaguucaggcacu

SEQ ID NO: 57521 - RNA, 18 nt, Human
ccccaaggagaagucacc

SEQ ID NO: 57522 - RNA, 23 nt, Human
ccccggccaggagggccccgcgg

SEQ ID NO: 57523 - RNA, 19 nt, Human
ccccugagcaucacucacu

SEQ ID NO: 57524 - RNA, 19 nt, Human
ccccuuuaugaaauggagc

SEQ ID NO: 57525 - RNA, 18 nt, Human
cccgcagcaggcgcgggg

SEQ ID NO: 57526 - RNA, 23 nt, Human
cccgggccgcggcgccaacggga

SEQ ID NO: 57527 - RNA, 19 nt, Human
cccgguuacagugauuaaa

SEQ ID NO: 57528 - RNA, 18 nt, Human
cccucccccacccuaaag

SEQ ID NO: 57529 - RNA, 24 nt, Human
cccugagcaucacucacucccuuc

SEQ ID NO: 57530 - RNA, 20 nt, Human
ccggccaggccccgccccgc

SEQ ID NO: 57531 - RNA, 23 nt, Human
ccggccgaaagggacggccgcag

SEQ ID NO: 57532 - RNA, 24 nt, Human
ccuacaguuguagcauauuagagc

SEQ ID NO: 57533 - RNA, 18 nt, Human
cgcagcgcugcggauccc

SEQ ID NO: 57534 - RNA, 21 nt, Human
cgcccgggccgcggcgccaac

SEQ ID NO: 57535 - RNA, 22 nt, Human
cuaguaacacagauaaagagua

SEQ ID NO: 57536 - RNA, 19 nt, Human
cucacucccuucccucccc

SEQ ID NO: 57537 - RNA, 20 nt, Human
gaacaaguauagacaagugc

SEQ ID NO: 57538 - RNA, 21 nt, Human
gaauaguggggaaaagacagg

SEQ ID NO: 57539 - RNA, 18 nt, Human
gagcggagcagagagagc

SEQ ID NO: 57540 - RNA, 24 nt, Human
gcagcaggcgcgggggccgggcgu

SEQ ID NO: 57541 - RNA, 19 nt, Human
gcauccucuucacagagga

SEQ ID NO: 57542 - RNA, 19 nt, Human
gccccugagcaucacucac

SEQ ID NO: 57543 - RNA, 19 nt, Human
gcccuaccugggcgcggag

SEQ ID NO: 57544 - RNA, 21 nt, Human
gcggagcagagagagccgaga

SEQ ID NO: 57545 - RNA, 23 nt, Human
gcggggcugcuggcacugaggcc

SEQ ID NO: 57546 - RNA, 18 nt, Human
ggacgcgcugggcagagc

SEQ ID NO: 57547 - RNA, 21 nt, Human
ggcgccaacgggaaacuugag

SEQ ID NO: 57548 - RNA, 22 nt, Human
gggccgcggcgccaacgggaaa

SEQ ID NO: 57549 - RNA, 22 nt, Human
ggugaagaaaccaagacucaga

SEQ ID NO: 57550 - RNA, 21 nt, Human
guccuaguucggaaucuugac

SEQ ID NO: 57551 - RNA, 25 nt, Human
uaaaaacacacacacacacacacac

SEQ ID NO: 57552 - RNA, 26 nt, Human
uaaagugagcagugcaaccaaaauca

SEQ ID NO: 57553 - RNA, 27 nt, Human
uaaagugagcagugcaaccaaaaucac

SEQ ID NO: 57554 - RNA, 19 nt, Human
uaccaggcacuaguaacac

SEQ ID NO: 57555 - RNA, 24 nt, Human
uaggaguggcuguuuucaugagua

SEQ ID NO: 57556 - RNA, 19 nt, Human
uauagacaagugcucagcu

SEQ ID NO: 57557 - RNA, 24 nt, Human
uaugaaauggagcuuugaaauuga

SEQ ID NO: 57558 - RNA, 20 nt, Human
uauuagccacagcagacuug

SEQ ID NO: 57559 - RNA, 19 nt, Human
uauucaugaggagauucac

SEQ ID NO: 57560 - RNA, 24 nt, Human
ucaagaaggaagucuuccaucuua

SEQ ID NO: 57561 - RNA, 20 nt, Human
ucacagaggaaaguccuagu

SEQ ID NO: 57562 - RNA, 18 nt, Human
uccaucuuaacuccuuca

SEQ ID NO: 57563 - RNA, 18 nt, Human
uccugugcuuuuugaagu

SEQ ID NO: 57564 - RNA, 19 nt, Human
ucguucaaaugaaaauauu

SEQ ID NO: 57565 - RNA, 23 nt, Human
ucuuccaucuuaacuccuucaaa

SEQ ID NO: 57566 - RNA, 22 nt, Human
ugaaagccacucaucuagucca

SEQ ID NO: 57567 - RNA, 25 nt, Human
ugaaaugaacaacuaccaauuagcc

SEQ ID NO: 57568 - RNA, 25 nt, Human
ugaaauugaaccaaaaaguuaaaau

SEQ ID NO: 57569 - RNA, 19 nt, Human
ugaagaaaccaagacucag

SEQ ID NO: 57570 - RNA, 20 nt, Human
ugagcaucacucacucccuu

SEQ ID NO: 57571 - RNA, 21 nt, Human
ugaguacauuuggcuuccaac

SEQ ID NO: 57572 - RNA, 31 nt, Human
ugauuaaaaacacacacacacacacacacag

SEQ ID NO: 57573 - RNA, 19 nt, Human
ugggcagagcggagcgggg

SEQ ID NO: 57574 - RNA, 20 nt, Human
uuaaaaacacacacacacac

SEQ ID NO: 57575 - RNA, 21 nt, Human
uuaaagugagcagugcaaccc

SEQ ID NO: 57576 - RNA, 21 nt, Human
uuaggaacaaguauagacaag

SEQ ID NO: 57577 - RNA, 19 nt, Human
uucaagagaaauacuugga

SEQ ID NO: 57578 - RNA, 21 nt, Human
uucaagagaaauacuuggaaa

SEQ ID NO: 57579 - RNA, 23 nt, Human
uucacagaacacccugaaagcca

SEQ ID NO: 57580 - RNA, 19 nt, Human
uucaugaggagauucacag

SEQ ID NO: 57581 - RNA, 22 nt, Human
uuuaagaaauucacuaaaaaca

SEQ ID NO: 57582 - RNA, 18 nt, Human
aaagcacaaacaaaccug

SEQ ID NO: 57583 - RNA, 24 nt, Human
acaagagucuccacagcuuggaca

SEQ ID NO: 57584 - RNA, 20 nt, Human
acaauggaaaggaaagaagc

SEQ ID NO: 57585 - RNA, 19 nt, Human
acacauagauccaggaguc

SEQ ID NO: 57586 - RNA, 23 nt, Human
agaugaauaugccccaucuuucu

SEQ ID NO: 57587 - RNA, 20 nt, Human
agcuacaauggaaaggaaag

SEQ ID NO: 57588 - RNA, 19 nt, Human
agcugcccaucccaacuag

SEQ ID NO: 57589 - RNA, 19 nt, Human
aggcagaagagaagacugc

SEQ ID NO: 57590 - RNA, 26 nt, Human
agguuuaaaaaccccguaacugagcu

SEQ ID NO: 57591 - RNA, 28 nt, Human
aguugcauaaauagaaagagguggaaau

SEQ ID NO: 57592 - RNA, 25 nt, Human
auguagccuucugcauacacauaga

SEQ ID NO: 57593 - RNA, 19 nt, Human
cacgugcucacaccugggc

SEQ ID NO: 57594 - RNA, 20 nt, Human
cacgugcucacaccugggca

SEQ ID NO: 57595 - RNA, 21 nt, Human
cacucaauacgauacaccuga

SEQ ID NO: 57596 - RNA, 23 nt, Human
cauaguaaaccugaaagggagcg

SEQ ID NO: 57597 - RNA, 21 nt, Human
cauccugaaaacugcacagua

SEQ ID NO: 57598 - RNA, 22 nt, Human
ccaacuagccuaccuccagcca

SEQ ID NO: 57599 - RNA, 28 nt, Human
ccaucccaacuagccuaccuccagccac

SEQ ID NO: 57600 - RNA, 19 nt, Human
ccggggagcugcgaagagc

SEQ ID NO: 57601 - RNA, 19 nt, Human
ccugaaaacugcacaguac

SEQ ID NO: 57602 - RNA, 21 nt, Human
cuagccuaccuccagccacag

SEQ ID NO: 57603 - RNA, 20 nt, Human
cucauccugaaaacugcaca

SEQ ID NO: 57604 - RNA, 25 nt, Human
gaagcaacuauguauauguagccuu

SEQ ID NO: 57605 - RNA, 18 nt, Human
gacucuuuugccaauggg

SEQ ID NO: 57606 - RNA, 18 nt, Human
gagcgcgcagcggggcug

SEQ ID NO: 57607 - RNA, 21 nt, Human
gagcgcgcagcggggcuggcg

SEQ ID NO: 57608 - RNA, 20 nt, Human
gauacaucuucccaagguuu

SEQ ID NO: 57609 - RNA, 22 nt, Human
gaucaaguacaagagucuccac

SEQ ID NO: 57610 - RNA, 21 nt, Human
ggacaaagcacaaacaaaccu

SEQ ID NO: 57611 - RNA, 20 nt, Human
ggcggcggcgcggaggagcg

SEQ ID NO: 57612 - RNA, 22 nt, Human
gugaagaugaguugcauaaaua

SEQ ID NO: 57613 - RNA, 24 nt, Human
uaacugagcuccuucuugcaguac

SEQ ID NO: 57614 - RNA, 25 nt, Human
uaacugagcuccuucuugcaguacu

SEQ ID NO: 57615 - RNA, 22 nt, Human
uaauuguuacagaugauuugug

SEQ ID NO: 57616 - RNA, 18 nt, Human
uacaauggaaaggaaaga

SEQ ID NO: 57617 - RNA, 19 nt, Human
uacaauggaaaggaaagaa

SEQ ID NO: 57618 - RNA, 21 nt, Human
uacaauggaaaggaaagaagc

SEQ ID NO: 57619 - RNA, 24 nt, Human
uacaauggaaaggaaagaagcaac

SEQ ID NO: 57620 - RNA, 21 nt, Human
uacagcauacaccaucuauuu

SEQ ID NO: 57621 - RNA, 22 nt, Human
uagaggagcuguuuuuauagug

SEQ ID NO: 57622 - RNA, 25 nt, Human
uauguagccuucugcauacacauag

SEQ ID NO: 57623 - RNA, 24 nt, Human
uauguauauguagccuucugcaua

SEQ ID NO: 57624 - RNA, 22 nt, Human
uccauugauacaucuucccaag

SEQ ID NO: 57625 - RNA, 22 nt, Human
ucccaacuagccuaccuccagc

SEQ ID NO: 57626 - RNA, 25 nt, Human
ucccaacuagccuaccuccagccac

SEQ ID NO: 57627 - RNA, 21 nt, Human
ucucugagggugccucagugu

SEQ ID NO: 57628 - RNA, 24 nt, Human
ucugcauacacauagauccaggag

SEQ ID NO: 57629 - RNA, 19 nt, Human
ucuggagaaagcuacuuua

SEQ ID NO: 57630 - RNA, 21 nt, Human
ucuuuuggggguagaugaaua

SEQ ID NO: 57631 - RNA, 18 nt, Human
ugacucuuuugccaaugg

SEQ ID NO: 57632 - RNA, 21 nt, Human
ugagaacuuuugcagcaguuu

SEQ ID NO: 57633 - RNA, 24 nt, Human
ugagaggcaaagagcuacaaugga

SEQ ID NO: 57634 - RNA, 22 nt, Human
ugagugaggauuuuuuccuuaa

SEQ ID NO: 57635 - RNA, 21 nt, Human
ugccagacagaauaagagcaa

SEQ ID NO: 57636 - RNA, 27 nt, Human
ugccccaucuuucuacccaaucucaua

SEQ ID NO: 57637 - RNA, 21 nt, Human
uggaaugacacagcacugaaa

SEQ ID NO: 57638 - RNA, 22 nt, Human
uggcggcggcgcggaggagcgg

SEQ ID NO: 57639 - RNA, 19 nt, Human
ugucuggcaucagucugua

SEQ ID NO: 57640 - RNA, 18 nt, Human
uguguccauauauauaua

SEQ ID NO: 57641 - RNA, 18 nt, Human
uguuauugacaacauggg

SEQ ID NO: 57642 - RNA, 21 nt, Human
uuuuuuuuuuuuaggguaauc

SEQ ID NO: 57643 - RNA, 22 nt, Human
uuuuuuuuuuuuuuuuuuaggg

SEQ ID NO: 57644 - RNA, 18 nt, Human
aggaagcccacccugccc

SEQ ID NO: 57645 - RNA, 18 nt, Human
aggccucugcucggacag

SEQ ID NO: 57646 - RNA, 21 nt, Human
agguggggggaauagguggug

SEQ ID NO: 57647 - RNA, 24 nt, Human
agugggaucauggacugaaacaag

SEQ ID NO: 57648 - RNA, 21 nt, Human
caaagcuucucauuacccucc

SEQ ID NO: 57649 - RNA, 21 nt, Human
caccacacugccaggcacgcc

SEQ ID NO: 57650 - RNA, 23 nt, Human
cagcccuacugugagucagcaau

SEQ ID NO: 57651 - RNA, 20 nt, Human
cagcuucuugacuaaccccu

SEQ ID NO: 57652 - RNA, 21 nt, Human
cagugaguucugccucagcuu

SEQ ID NO: 57653 - RNA, 21 nt, Human
ccaggguaaggcaagucuggg

SEQ ID NO: 57654 - RNA, 25 nt, Human
ccaggguaaggcaagucugggagga

SEQ ID NO: 57655 - RNA, 21 nt, Human
ccuccagcaggcaagaguagg

SEQ ID NO: 57656 - RNA, 24 nt, Human
ccuccagcaggcaagaguagguca

SEQ ID NO: 57657 - RNA, 21 nt, Human
cuaaccccuuguaggggcaaa

SEQ ID NO: 57658 - RNA, 18 nt, Human
cugcaacgagugcagacg

SEQ ID NO: 57659 - RNA, 19 nt, Human
cugcccacccccagugagu

SEQ ID NO: 57660 - RNA, 19 nt, Human
cugcccuacagcagcccug

SEQ ID NO: 57661 - RNA, 19 nt, Human
gaacucagaauagguggug

SEQ ID NO: 57662 - RNA, 20 nt, Human
gaagggacagccccacccug

SEQ ID NO: 57663 - RNA, 21 nt, Human
ggaaagcaaacuggagggggu

SEQ ID NO: 57664 - RNA, 25 nt, Human
ggaguccauuaaugcauaccagggg

SEQ ID NO: 57665 - RNA, 18 nt, Human
gggcagccccaagggcaa

SEQ ID NO: 57666 - RNA, 22 nt, Human
ggguaaggcaagucugggagga

SEQ ID NO: 57667 - RNA, 21 nt, Human
guccauuaaugcauaccaggg

SEQ ID NO: 57668 - RNA, 20 nt, Human
uaaugcauaccaggggcaaa

SEQ ID NO: 57669 - RNA, 26 nt, Human
ucaaccagacaauuagaaucagccuc

SEQ ID NO: 57670 - RNA, 21 nt, Human
ucagaagcaggguccugaagg

SEQ ID NO: 57671 - RNA, 19 nt, Human
ucagcccaggguaaggcaa

SEQ ID NO: 57672 - RNA, 23 nt, Human
uccaccuuaacugcccaccccca

SEQ ID NO: 57673 - RNA, 24 nt, Human
ucccucagccauccccaaguuuac

SEQ ID NO: 57674 - RNA, 23 nt, Human
ucugggaggaagcccacccugcc

SEQ ID NO: 57675 - RNA, 24 nt, Human
ugaaggaagcuggaauggcaugag

SEQ ID NO: 57676 - RNA, 22 nt, Human
ugacuugcaguaaggacaauuu

SEQ ID NO: 57677 - RNA, 23 nt, Human
ugagucagcaaucauuccugacu

SEQ ID NO: 57678 - RNA, 24 nt, Human
ugcaguaaggacaauuugcauuua

SEQ ID NO: 57679 - RNA, 22 nt, Human
ugcccacccccagugaguucug

SEQ ID NO: 57680 - RNA, 20 nt, Human
uggaauggcaugaguuaggu

SEQ ID NO: 57681 - RNA, 18 nt, Human
uggcagagugggagagau

SEQ ID NO: 57682 - RNA, 20 nt, Human
uggcagagugggagagaugg

SEQ ID NO: 57683 - RNA, 21 nt, Human
ugggaggaagcccacccugcc

SEQ ID NO: 57684 - RNA, 23 nt, Human
uuagguggggggaauagguggug

SEQ ID NO: 57685 - RNA, 20 nt, Human
uuugaaguugucaguguccu

SEQ ID NO: 57686 - RNA, 23 nt, Human
uuccagaaacuauuuauauuccu

SEQ ID NO: 57687 - RNA, 20 nt, Human
uuugaaguugucaguguccu

SEQ ID NO: 57688 - RNA, 24 nt, Human
uuuuuuuuuuuuuuguuuugagga

SEQ ID NO: 57689 - RNA, 24 nt, Human
uuuuuuuuuuuuuuuuuuuguuuu

SEQ ID NO: 57690 - RNA, 27 nt, Human
uuuuuuuuuuuuuuuuuuuuuuugggg

SEQ ID NO: 57691 - RNA, 26 nt, Human
aaaaaccuaaaacaucauaaaagccc

SEQ ID NO: 57692 - RNA, 18 nt, Human
aaagaucacuugaagucu

SEQ ID NO: 57693 - RNA, 21 nt, Human
aaccuaaaacaucauaaaagc

SEQ ID NO: 57694 - RNA, 24 nt, Human
agaucacuugaagucuaguugucc

SEQ ID NO: 57695 - RNA, 23 nt, Human
agcuaauaguaguugagugaugu

SEQ ID NO: 57696 - RNA, 18 nt, Human
agugaugugccaggaaaa

SEQ ID NO: 57697 - RNA, 18 nt, Human
cacaucgccagauucaac

SEQ ID NO: 57698 - RNA, 22 nt, Human
caucgccagauucaaccaaagu

SEQ ID NO: 57699 - RNA, 19 nt, Human
ccagguggucaauuucuuc

SEQ ID NO: 57700 - RNA, 23 nt, Human
cccuccauauccauggguuccac

SEQ ID NO: 57701 - RNA, 21 nt, Human
ccuaaaacaucauaaaagccc

SEQ ID NO: 57702 - RNA, 18 nt, Human
cuuccucucaaaguuaga

SEQ ID NO: 57703 - RNA, 21 nt, Human
uccauauccauggguuccaca

SEQ ID NO: 57704 - RNA, 18 nt, Human
ugacucgccagcuaauag

SEQ ID NO: 57705 - RNA, 18 nt, Human
ugccaggaaaaaacaugg

SEQ ID NO: 57706 - RNA, 22 nt, Human
ugucccuagucauuccaacaac

SEQ ID NO: 57707 - RNA, 23 nt, Human
uuccagaaacuauuuauauuccu

SEQ ID NO: 57708 - RNA, 20 nt, Human
uuugaaguugucaguguccu

SEQ ID NO: 57709 - RNA, 19 nt, Human
uuuuuuuuuuuuuugagga

SEQ ID NO: 57710 - RNA, 21 nt, Human
uuuuuuuuuuuuuuuuugagg

SEQ ID NO: 57711 - RNA, 27 nt, Human
uuuuuuuuuuuuuuuuuuuuuuugggg

SEQ ID NO: 57712 - RNA, 18 nt, Human
agcagcccagcagggaug

SEQ ID NO: 57713 - RNA, 21 nt, Human
cggcccgagacuaagucucgg

SEQ ID NO: 57714 - RNA, 18 nt, Human
cucgggcccgcggcgcgc

SEQ ID NO: 57715 - RNA, 24 nt, Human
ugucacaaauacaucauuuauagg

SEQ ID NO: 57716 - RNA, 21 nt, Human
uuuauugacaagauagggugu

SEQ ID NO: 57717 - RNA, 24 nt, Human
uuuuuuuuuuuaaucagaaugcug

SEQ ID NO: 57718 - RNA, 24 nt, Human
uuuuuuuuuuuuuuuuuuaaucag

SEQ ID NO: 57719 - RNA, 20 nt, Human
aaacagaaaacaaaaggucc

SEQ ID NO: 57720 - RNA, 21 nt, Human
aaacagaaaacaaaaggucca

SEQ ID NO: 57721 - RNA, 23 nt, Human
aaacagaaaacaaaagguccagg

SEQ ID NO: 57722 - RNA, 25 nt, Human
agagccagcacuugaccaggggccc

SEQ ID NO: 57723 - RNA, 24 nt, Human
agccagcacuugaccaggggcccg

SEQ ID NO: 57724 - RNA, 18 nt, Human
aggcaaggacagcagagc

SEQ ID NO: 57725 - RNA, 20 nt, Human
auggaaggcaaggacagcag

SEQ ID NO: 57726 - RNA, 22 nt, Human
cagaggggaaauggaaggcaag

SEQ ID NO: 57727 - RNA, 18 nt, Human
caggagcuuugcucucug

SEQ ID NO: 57728 - RNA, 21 nt, Human
caggcuccugcggagggcaaa

SEQ ID NO: 57729 - RNA, 18 nt, Human
cccaagaacagcaucacc

SEQ ID NO: 57730 - RNA, 21 nt, Human
cucuuccaacacaggcuccug

SEQ ID NO: 57731 - RNA, 21 nt, Human
ggaaggcaaggacagcagagc

SEQ ID NO: 57732 - RNA, 24 nt, Human
guagacccaagaacagcaucacca

SEQ ID NO: 57733 - RNA, 24 nt, Human
uccugcggagggcaaaaggaggug

SEQ ID NO: 57734 - RNA, 23 nt, Human
ucuuccaacacaggcuccugcgg

SEQ ID NO: 57735 - RNA, 21 nt, Human
ugcagaggggaaauggaaggc

SEQ ID NO: 57736 - RNA, 19 nt, Human
uuaaacauguugucaaaca

SEQ ID NO: 57737 - RNA, 23 nt, Human
uuccaacacaggcuccugcggag

SEQ ID NO: 57738 - RNA, 22 nt, Human
aaaauggaauuuucauuugaag

SEQ ID NO: 57739 - RNA, 19 nt, Human
aacaaaacaguaaauauca

SEQ ID NO: 57740 - RNA, 22 nt, Human
aacacaaaaggacaaaauacuc

SEQ ID NO: 57741 - RNA, 24 nt, Human
aaccacaugaauuuuaaagacaaa

SEQ ID NO: 57742 - RNA, 19 nt, Human
aacccucuaaaucaugccu

SEQ ID NO: 57743 - RNA, 19 nt, Human
aagaaagcguuugaagaag

SEQ ID NO: 57744 - RNA, 21 nt, Human
aagagauuauuuaagccaaug

SEQ ID NO: 57745 - RNA, 21 nt, Human
aagauggguaagcagaaauca

SEQ ID NO: 57746 - RNA, 23 nt, Human
aagcuggaagcaggcagccuuuc

SEQ ID NO: 57747 - RNA, 18 nt, Human
aagggaauggacugaagg

SEQ ID NO: 57748 - RNA, 21 nt, Human
aaugcuguucuaaauuuuuau

SEQ ID NO: 57749 - RNA, 20 nt, Human
acagaacaacaguaugcuug

SEQ ID NO: 57750 - RNA, 22 nt, Human
accccaaaaauucacuuaaaau

SEQ ID NO: 57751 - RNA, 20 nt, Human
accuuggugacuucacauaa

SEQ ID NO: 57752 - RNA, 18 nt, Human
acuacaguucauuauggc

SEQ ID NO: 57753 - RNA, 19 nt, Human
acuagccauuuguuagcuu

SEQ ID NO: 57754 - RNA, 25 nt, Human
acucuugugaacucaaacggcucca

SEQ ID NO: 57755 - RNA, 21 nt, Human
acugcaugauaaccacagaac

SEQ ID NO: 57756 - RNA, 23 nt, Human
acugguauaauacaucuuuucca

SEQ ID NO: 57757 - RNA, 21 nt, Human
agauauaaacaugcuauguac

SEQ ID NO: 57758 - RNA, 24 nt, Human
agcuucucauugaaaaaggauaau

SEQ ID NO: 57759 - RNA, 19 nt, Human
agcuuuguucuaaaauuuu

SEQ ID NO: 57760 - RNA, 21 nt, Human
aggaaugcaugagugugcccc

SEQ ID NO: 57761 - RNA, 20 nt, Human
agucaaccuacgaaaacuga

SEQ ID NO: 57762 - RNA, 19 nt, Human
auacuccaaaauauugcuu

SEQ ID NO: 57763 - RNA, 19 nt, Human
aucaugccucaucuucucu

SEQ ID NO: 57764 - RNA, 19 nt, Human
caaaaggacaaaauacuca

SEQ ID NO: 57765 - RNA, 23 nt, Human
caaaauaagguccaguaguaguu

SEQ ID NO: 57766 - RNA, 22 nt, Human
caaauaucacuuguaaggcaaa

SEQ ID NO: 57767 - RNA, 23 nt, Human
caccccaaaaauucacuuaaaau

SEQ ID NO: 57768 - RNA, 24 nt, Human
caccccaaaaauucacuuaaaaua

SEQ ID NO: 57769 - RNA, 20 nt, Human
cacuuauugcuggaagggag

SEQ ID NO: 57770 - RNA, 21 nt, Human
cagauucacggucaagaaccu

SEQ ID NO: 57771 - RNA, 23 nt, Human
caguaaauaucaugcuuucuuuu

SEQ ID NO: 57772 - RNA, 27 nt, Human
cauuucucaaacccagacaacaaaaca

SEQ ID NO: 57773 - RNA, 23 nt, Human
ccacagaacaacaguaugcuuga

SEQ ID NO: 57774 - RNA, 20 nt, Human
ccagaguacuugcuuuuacu

SEQ ID NO: 57775 - RNA, 18 nt, Human
cccgacagucaguggagu

SEQ ID NO: 57776 - RNA, 19 nt, Human
ccuaucugcugcagaucug

SEQ ID NO: 57777 - RNA, 26 nt, Human
ccucaaagaaagcguuugaagaagaa

SEQ ID NO: 57778 - RNA, 20 nt, Human
cucaaacccagacaacaaaa

SEQ ID NO: 57779 - RNA, 21 nt, Human
cucaaagaaagcguuugaaga

SEQ ID NO: 57780 - RNA, 19 nt, Human
cucccagaccucagugagu

SEQ ID NO: 57781 - RNA, 22 nt, Human
cugaaaacuguaucaaaaauca

SEQ ID NO: 57782 - RNA, 24 nt, Human
cugcguguacauauucuagacccu

SEQ ID NO: 57783 - RNA, 24 nt, Human
cugcuaugaagaagccaccaagaa

SEQ ID NO: 57784 - RNA, 21 nt, Human
cuuuuccaaaggauuauggca

SEQ ID NO: 57785 - RNA, 26 nt, Human
cuuuuuagauuuaccaagaaaacccu

SEQ ID NO: 57786 - RNA, 22 nt, Human
gaaaaaggauaauuggaaacau

SEQ ID NO: 57787 - RNA, 23 nt, Human
gaacacaaaaggacaaaauacuc

SEQ ID NO: 57788 - RNA, 25 nt, Human
gaucauuugaaaaaugcuaauucaa

SEQ ID NO: 57789 - RNA, 19 nt, Human
gauuuauuguuuccucucu

SEQ ID NO: 57790 - RNA, 23 nt, Human
gcuaugaagaagccaccaagaau

SEQ ID NO: 57791 - RNA, 18 nt, Human
gcuuuguucuaaaauuuu

SEQ ID NO: 57792 - RNA, 20 nt, Human
ggaaauaguauucuuuaucc

SEQ ID NO: 57793 - RNA, 18 nt, Human
guccauguacuacaguuc

SEQ ID NO: 57794 - RNA, 20 nt, Human
uaaaauacauuaucccauag

SEQ ID NO: 57795 - RNA, 22 nt, Human
uaaccaacucagaggacaaugc

SEQ ID NO: 57796 - RNA, 20 nt, Human
uaaggcaaaaagggguagaa

SEQ ID NO: 57797 - RNA, 23 nt, Human
uaaggcaaaaagggguagaauac

SEQ ID NO: 57798 - RNA, 27 nt, Human
uaauaggucuagacaaaaaaaaaagaa

SEQ ID NO: 57799 - RNA, 24 nt, Human
uaaugcaguaacuucaagcacccc

SEQ ID NO: 57800 - RNA, 20 nt, Human
uaauuggaaacaauauuuca

SEQ ID NO: 57801 - RNA, 18 nt, Human
uacauguauguauacaca

SEQ ID NO: 57802 - RNA, 24 nt, Human
uacuguaaaaugaacugcuccaga

SEQ ID NO: 57803 - RNA, 18 nt, Human
uacuugcuuuuacuucaa

SEQ ID NO: 57804 - RNA, 21 nt, Human
uaggucuagacaaaaaaaaaa

SEQ ID NO: 57805 - RNA, 24 nt, Human
uauaacaccuuuucacugguauaa

SEQ ID NO: 57806 - RNA, 20 nt, Human
uauguauacacaugcaagua

SEQ ID NO: 57807 - RNA, 20 nt, Human
uauuccagauuaauuagcua

SEQ ID NO: 57808 - RNA, 20 nt, Human
uauuguccauguacuacagu

SEQ ID NO: 57809 - RNA, 22 nt, Human
uauuguccauguacuacaguuc

SEQ ID NO: 57810 - RNA, 24 nt, Human
ucaaagauagucaaccuacgaaaa

SEQ ID NO: 57811 - RNA, 19 nt, Human
ucaguggaguuuucuauag

SEQ ID NO: 57812 - RNA, 25 nt, Human
ucaucaaaaaaaguagaaccagaaa

SEQ ID NO: 57813 - RNA, 19 nt, Human
ucaucccauagugacucau

SEQ ID NO: 57814 - RNA, 18 nt, Human
uccaagccaagcuggaag

SEQ ID NO: 57815 - RNA, 21 nt, Human
ucgaauaccuaauuauccuau

SEQ ID NO: 57816 - RNA, 23 nt, Human
ucguuaaaacuugagauauuuau

SEQ ID NO: 57817 - RNA, 21 nt, Human
ucuauagucgagccacgugag

SEQ ID NO: 57818 - RNA, 23 nt, Human
ucucaaacccagacaacaaaaca

SEQ ID NO: 57819 - RNA, 22 nt, Human
ucuccggauuucuuuguugcuu

SEQ ID NO: 57820 - RNA, 18 nt, Human
ucugaccucuaaaacuag

SEQ ID NO: 57821 - RNA, 21 nt, Human
ucuuugaaaaagucuuuacag

SEQ ID NO: 57822 - RNA, 21 nt, Human
ucuuuuuuucauauuuuccca

SEQ ID NO: 57823 - RNA, 22 nt, Human
ucuuuuuuucuguuuuacauga

SEQ ID NO: 57824 - RNA, 23 nt, Human
ugaaaaaugcuaauucaagaaaa

SEQ ID NO: 57825 - RNA, 20 nt, Human
ugaagaagaaucauagaaaa

SEQ ID NO: 57826 - RNA, 18 nt, Human
ugcagauauaaacaugcu

SEQ ID NO: 57827 - RNA, 18 nt, Human
ugccagcacacuccuucc

SEQ ID NO: 57828 - RNA, 18 nt, Human
ugccucucgcaaaacuug

SEQ ID NO: 57829 - RNA, 22 nt, Human
ugcuccuuucuucugaccucua

SEQ ID NO: 57830 - RNA, 21 nt, Human
uggaagcaggcagccuuucac

SEQ ID NO: 57831 - RNA, 22 nt, Human
uggaagggagacaauauuguuu

SEQ ID NO: 57832 - RNA, 22 nt, Human
uguauaauaucaaaggaaauau

SEQ ID NO: 57833 - RNA, 21 nt, Human
uguauguauacacaugcaagu

SEQ ID NO: 57834 - RNA, 20 nt, Human
uguauguauacacaugcagu

SEQ ID NO: 57835 - RNA, 26 nt, Human
ugucauaaccuuggacacuuacaggc

SEQ ID NO: 57836 - RNA, 21 nt, Human
ugucucuuuuaugagaggagg

SEQ ID NO: 57837 - RNA, 21 nt, Human
uguuugacucuuucccccuca

SEQ ID NO: 57838 - RNA, 21 nt, Human
uguuuguuugacucuuucccc

SEQ ID NO: 57839 - RNA, 22 nt, Human
uuaaaugaaaacaguugagaag

SEQ ID NO: 57840 - RNA, 25 nt, Human
uuauaauuauuuuauuuuuuauaga

SEQ ID NO: 57841 - RNA, 21 nt, Human
uucaagaaaggucaucaaaaa

SEQ ID NO: 57842 - RNA, 21 nt, Human
uucaccauucccuaaaauuua

SEQ ID NO: 57843 - RNA, 20 nt, Human
uucacucuuuuuuucuguuu

SEQ ID NO: 57844 - RNA, 23 nt, Human
uucuaaaaauauuuuuaaaauaa

SEQ ID NO: 57845 - RNA, 19 nt, Human
uugcuaccuugccaacaac

SEQ ID NO: 57846 - RNA, 18 nt, Human
uuguguguuuauuuuucc

SEQ ID NO: 57847 - RNA, 20 nt, Human
uuuaaaauaaugaaguuaca

SEQ ID NO: 57848 - RNA, 24 nt, Human
uuuagaaggagaggcuuaccugcu

SEQ ID NO: 57849 - RNA, 28 nt, Human
uuucccuuaaaugaaaacaguugagaaa

SEQ ID NO: 57850 - RNA, 26 nt, Human
uuugaaaaaugcuaauucaagaaagg

SEQ ID NO: 57851 - RNA, 19 nt, Human
uuugcagauauaaacaugc

SEQ ID NO: 57852 - RNA, 21 nt, Human
uuugcauagaaaccacaugaa

SEQ ID NO: 57853 - RNA, 28 nt, Human
uuuucccacuacaauuauuaaguggcua

SEQ ID NO: 57854 - RNA, 21 nt, Human
aagucuucucuuuccucuuuu

SEQ ID NO: 57855 - RNA, 20 nt, Human
accugguuuuuacugcugug

SEQ ID NO: 57856 - RNA, 20 nt, Human
acgcugccauggcugggucc

SEQ ID NO: 57857 - RNA, 19 nt, Human
agcuuuuacagagcagcuu

SEQ ID NO: 57858 - RNA, 20 nt, Human
agggcaaacacacguccaga

SEQ ID NO: 57859 - RNA, 21 nt, Human
caaacacacguccagaguccc

SEQ ID NO: 57860 - RNA, 25 nt, Human
caguaauaaaccagcaggguacccc

SEQ ID NO: 57861 - RNA, 19 nt, Human
caguccugcucacuuggga

SEQ ID NO: 57862 - RNA, 20 nt, Human
caguuccucagguggacugg

SEQ ID NO: 57863 - RNA, 21 nt, Human
ccagauccuacaguguuguuc

SEQ ID NO: 57864 - RNA, 25 nt, Human
cucuuuccucuuuuuccaguagcaa

SEQ ID NO: 57865 - RNA, 22 nt, Human
cugaaacgcagggcugcuacgc

SEQ ID NO: 57866 - RNA, 22 nt, Human
ggcugggaggagauaaacacca

SEQ ID NO: 57867 - RNA, 25 nt, Human
gggcaaacacacguccagagucccg

SEQ ID NO: 57868 - RNA, 24 nt, Human
uaaacugucagucugauucucagc

SEQ ID NO: 57869 - RNA, 29 nt, Human
ucaaugaaagucuucucuuuccucuuuuu

SEQ ID NO: 57870 - RNA, 18 nt, Human
ucacuugggagggcugug

SEQ ID NO: 57871 - RNA, 20 nt, Human
ucacuugggagggcuguguc

SEQ ID NO: 57872 - RNA, 21 nt, Human
uccagagucccgagcugcugc

SEQ ID NO: 57873 - RNA, 20 nt, Human
uccaggcaugcaguaaacug

SEQ ID NO: 57874 - RNA, 20 nt, Human
uccucagguggacugggaug

SEQ ID NO: 57875 - RNA, 21 nt, Human
ucuccaggcaugcaguaaacu

SEQ ID NO: 57876 - RNA, 27 nt, Human
ucucuuuccucuuuuuccaguagcaaa

SEQ ID NO: 57877 - RNA, 20 nt, Human
ucuugguugugacagcagcc

SEQ ID NO: 57878 - RNA, 27 nt, Human
ugagggcaaacacacguccagaguccc

SEQ ID NO: 57879 - RNA, 19 nt, Human
uggaagaggacacagugcg

SEQ ID NO: 57880 - RNA, 19 nt, Human
uggcuggguccgucaauga

SEQ ID NO: 57881 - RNA, 24 nt, Human
uggcuggguccgucaaugaaaguc

SEQ ID NO: 57882 - RNA, 18 nt, Human
ugguggaagaggacacag

SEQ ID NO: 57883 - RNA, 18 nt, Human
uguauaacauaaguguuc

SEQ ID NO: 57884 - RNA, 23 nt, Human
uguauuguauaacauaaguguuc

SEQ ID NO: 57885 - RNA, 22 nt, Human
uguucuguuuuccaguuauuua

SEQ ID NO: 57886 - RNA, 19 nt, Human
uuagcaaacuugagggcaa

SEQ ID NO: 57887 - RNA, 24 nt, Human
uuccaguagcaaaccugggguacc

SEQ ID NO: 57888 - RNA, 21 nt, Human
uucuugguugugacagcagcg

SEQ ID NO: 57889 - RNA, 24 nt, Human
uugguugugacagcagcgucugua

SEQ ID NO: 57890 - RNA, 19 nt, Human
uuuacagagcagcuuucac

SEQ ID NO: 57891 - RNA, 21 nt, Human
uuuacugcuguguucucucca

SEQ ID NO: 57892 - RNA, 19 nt, Human
uuugaaaauaguucgagac

SEQ ID NO: 57893 - RNA, 22 nt, Human
agacggaggggaguuggggggc

SEQ ID NO: 57894 - RNA, 20 nt, Human
agccucuggcacagcugcuc

SEQ ID NO: 57895 - RNA, 20 nt, Human
aggcgguggcacagugucuu

SEQ ID NO: 57896 - RNA, 20 nt, Human
agggagagaagaggggcgag

SEQ ID NO: 57897 - RNA, 19 nt, Human
agggggagggagagaagag

SEQ ID NO: 57898 - RNA, 20 nt, Human
agggggagggagagaagagg

SEQ ID NO: 57899 - RNA, 18 nt, Human
cagagcccuaggggcugu

SEQ ID NO: 57900 - RNA, 20 nt, Human
caggcagggagccccugaag

SEQ ID NO: 57901 - RNA, 19 nt, Human
caggcuugccugcagcugc

SEQ ID NO: 57902 - RNA, 21 nt, Human
cagugucuugcaucugggucc

SEQ ID NO: 57903 - RNA, 20 nt, Human
caucuggguccagguugucc

SEQ ID NO: 57904 - RNA, 19 nt, Human
ccccugaagggggagggag

SEQ ID NO: 57905 - RNA, 20 nt, Human
cccuaggggcugugccuggg

SEQ ID NO: 57906 - RNA, 21 nt, Human
cccucaggcagggagccccug

SEQ ID NO: 57907 - RNA, 23 nt, Human
cccugaagggggagggagagaag

SEQ ID NO: 57908 - RNA, 18 nt, Human
cuacaucagagggauggg

SEQ ID NO: 57909 - RNA, 25 nt, Human
cugaagaugugucaauggcgaggga

SEQ ID NO: 57910 - RNA, 22 nt, Human
cuggcucaggaagcccagggug

SEQ ID NO: 57911 - RNA, 24 nt, Human
cugggucaaggagggcuggcucag

SEQ ID NO: 57912 - RNA, 21 nt, Human
gaacacccuccaugucacaga

SEQ ID NO: 57913 - RNA, 24 nt, Human
gaagggggagggagagaagagggg

SEQ ID NO: 57914 - RNA, 19 nt, Human
gcccauucaagguacugug

SEQ ID NO: 57915 - RNA, 19 nt, Human
gccccugaagggggaggga

SEQ ID NO: 57916 - RNA, 21 nt, Human
gcgguggcacagugucuugca

SEQ ID NO: 57917 - RNA, 18 nt, Human
ggcucaggaagcccaggg

SEQ ID NO: 57918 - RNA, 24 nt, Human
ggggagggagagaagaggggcgag

SEQ ID NO: 57919 - RNA, 19 nt, Human
gggggagggagagaagagg

SEQ ID NO: 57920 - RNA, 19 nt, Human
gggugucagggaaggcggu

SEQ ID NO: 57921 - RNA, 20 nt, Human
ggucaaggagggcuggcuca

SEQ ID NO: 57922 - RNA, 24 nt, Human
uacaucagagggaugggccccgaa

SEQ ID NO: 57923 - RNA, 21 nt, Human
ucacagacggaggggaguugg

SEQ ID NO: 57924 - RNA, 21 nt, Human
uccagccucuggcacagcugc

SEQ ID NO: 57925 - RNA, 23 nt, Human
ucugcucagagcccuaggggcug

SEQ ID NO: 57926 - RNA, 21 nt, Human
ugccugggauguccugcugca

SEQ ID NO: 57927 - RNA, 22 nt, Human
ugccugggauguccugcugcag

SEQ ID NO: 57928 - RNA, 18 nt, Human
ugcucagagcccuagggg

SEQ ID NO: 57929 - RNA, 18 nt, Human
uggccaggcuugccugca

SEQ ID NO: 57930 - RNA, 20 nt, Human
uggccaggcuugccugcaga

SEQ ID NO: 57931 - RNA, 18 nt, Human
ugggauguccugcugcag

SEQ ID NO: 57932 - RNA, 20 nt, Human
ugggauguccugcugcagcc

SEQ ID NO: 57933 - RNA, 19 nt, Human
ugucagggaaggcgguggc

SEQ ID NO: 57934 - RNA, 18 nt, Human
uuuuuuuuuuuuuuuuug

SEQ ID NO: 57935 - RNA, 20 nt, Human
uuuuuuuuuuuuuuuuuggu

SEQ ID NO: 57936 - RNA, 19 nt, Human
uaccagauuauuagaccac

SEQ ID NO: 57937 - RNA, 23 nt, Human
uuaacuuggaaugagguuaaugu

SEQ ID NO: 57938 - RNA, 20 nt, Human
aaaaaaaccccaaaaccaaa

SEQ ID NO: 57939 - RNA, 20 nt, Human
aaaaaaaccccaaaaccaaa

SEQ ID NO: 57940 - RNA, 21 nt, Human
aaaaaccccaaaaccaaaacc

SEQ ID NO: 57941 - RNA, 21 nt, Human
aaaaaccccaaaaccaaaacc

SEQ ID NO: 57942 - RNA, 21 nt, Human
aaaaaccccaaaaccaaaacc

SEQ ID NO: 57943 - RNA, 21 nt, Human
aaaaaccccaaaaccaaaacc

SEQ ID NO: 57944 - RNA, 21 nt, Human
aaaaagcccucauucacuuuu

SEQ ID NO: 57945 - RNA, 21 nt, Human
aaaaagcccucauucacuuuu

SEQ ID NO: 57946 - RNA, 21 nt, Human
aaaaagcccucauucacuuuu

SEQ ID NO: 57947 - RNA, 21 nt, Human
aaaaagcccucauucacuuuu

SEQ ID NO: 57948 - RNA, 21 nt, Human
aaaacccauccccagccacaa

SEQ ID NO: 57949 - RNA, 21 nt, Human
aaaacccauccccagccacaa

SEQ ID NO: 57950 - RNA, 21 nt, Human
aaaacccauccccagccacaa

SEQ ID NO: 57951 - RNA, 22 nt, Human
aaagcagccccacccccggccg

SEQ ID NO: 57952 - RNA, 22 nt, Human
aaagcagccccacccccggccg

SEQ ID NO: 57953 - RNA, 18 nt, Human
aacagccucgagccuggc

SEQ ID NO: 57954 - RNA, 18 nt, Human
aacagccucgagccuggc

SEQ ID NO: 57955 - RNA, 20 nt, Human
aaccaaaacccauccccagc

SEQ ID NO: 57956 - RNA, 20 nt, Human
aaccaaaacccauccccagc

SEQ ID NO: 57957 - RNA, 20 nt, Human
aaccaaaacccauccccagc

SEQ ID NO: 57958 - RNA, 20 nt, Human
aaccaaaacccauccccagc

SEQ ID NO: 57959 - RNA, 22 nt, Human
aagcaaaagcagccccaccccc

SEQ ID NO: 57960 - RNA, 22 nt, Human
aagcaaaagcagccccaccccc

SEQ ID NO: 57961 - RNA, 20 nt, Human
aagcagccccacccccggcc

SEQ ID NO: 57962 - RNA, 20 nt, Human
aagcagccccacccccggcc

SEQ ID NO: 57963 - RNA, 22 nt, Human
aagcagccccacccccggccga

SEQ ID NO: 57964 - RNA, 22 nt, Human
aagcagccccacccccggccga

SEQ ID NO: 57965 - RNA, 24 nt, Human
aagcagcccgcccaagugcccuuc

SEQ ID NO: 57966 - RNA, 19 nt, Human
accagcccgguccucuggc

SEQ ID NO: 57967 - RNA, 22 nt, Human
accgaaucggucccagccgcgc

SEQ ID NO: 57968 - RNA, 22 nt, Human
accgaaucggucccagccgcgc

SEQ ID NO: 57969 - RNA, 25 nt, Human
acgcagccucggggaaagggaacgc

SEQ ID NO: 57970 - RNA, 25 nt, Human
acgcagccucggggaaagggaacgc

SEQ ID NO: 57971 - RNA, 18 nt, Human
acucccgcagagcggcgg

SEQ ID NO: 57972 - RNA, 22 nt, Human
agagacaacauaaaaaauucca

SEQ ID NO: 57973 - RNA, 23 nt, Human
agagacaacauaaaaaauuccaa

SEQ ID NO: 57974 - RNA, 21 nt, Human
agagagacaacauaaaaaauu

SEQ ID NO: 57975 - RNA, 21 nt, Human
agagagacaacauaaaaaauu

SEQ ID NO: 57976 - RNA, 22 nt, Human
agccacaaaaagcccucauuca

SEQ ID NO: 57977 - RNA, 22 nt, Human
agccacaaaaagcccucauuca

SEQ ID NO: 57978 - RNA, 22 nt, Human
agccacaaaaagcccucauuca

SEQ ID NO: 57979 - RNA, 22 nt, Human
agccacaaaaagcccucauuca

SEQ ID NO: 57980 - RNA, 20 nt, Human
agcccgcccaagugcccuuc

SEQ ID NO: 57981 - RNA, 22 nt, Human
agcccgcccaagugcccuucug

SEQ ID NO: 57982 - RNA, 23 nt, Human
aggaagcaaaagcagccccaccc

SEQ ID NO: 57983 - RNA, 23 nt, Human
aggaagcaaaagcagccccaccc

SEQ ID NO: 57984 - RNA, 18 nt, Human
aggagcagcuggggcugg

SEQ ID NO: 57985 - RNA, 23 nt, Human
aggagcugcgcugucaggcucug

SEQ ID NO: 57986 - RNA, 23 nt, Human
aggagcugcgcugucaggcucug

SEQ ID NO: 57987 - RNA, 24 nt, Human
aggcaggacagggaacagccucga

SEQ ID NO: 57988 - RNA, 24 nt, Human
aggcaggacagggaacagccucga

SEQ ID NO: 57989 - RNA, 21 nt, Human
aggccccgcggccaggacccu

SEQ ID NO: 57990 - RNA, 21 nt, Human
aggccccgcggccaggacccu

SEQ ID NO: 57991 - RNA, 24 nt, Human
aggcccggagcuagagcuuccucu

SEQ ID NO: 57992 - RNA, 24 nt, Human
aggcccggagcuagagcuuccucu

SEQ ID NO: 57993 - RNA, 20 nt, Human
aggccgccccggggccugcc

SEQ ID NO: 57994 - RNA, 20 nt, Human
aggccgccccggggccugcc

SEQ ID NO: 57995 - RNA, 31 nt, Human
aggcgaguggugugugugugugugugugugg

SEQ ID NO: 57996 - RNA, 21 nt, Human
aggggcugggcagaggggagg

SEQ ID NO: 57997 - RNA, 21 nt, Human
aggggcugggcagaggggagg

SEQ ID NO: 57998 - RNA, 24 nt, Human
aggugccaaagcggagucuggagc

SEQ ID NO: 57999 - RNA, 24 nt, Human
aggugccaaagcggagucuggagc

SEQ ID NO: 58000 - RNA, 23 nt, Human
agugugugggguucagggguugg

SEQ ID NO: 58001 - RNA, 20 nt, Human
aguuuucuuuuuuuuuuuuu

SEQ ID NO: 58002 - RNA, 22 nt, Human
aucagcugucauugcaagaggc

SEQ ID NO: 58003 - RNA, 22 nt, Human
aucagcugucauugcaagaggc

SEQ ID NO: 58004 - RNA, 22 nt, Human
aucagcugucauugcaagaggc

SEQ ID NO: 58005 - RNA, 19 nt, Human
auggcagaguguguggggu

SEQ ID NO: 58006 - RNA, 20 nt, Human
caaaaccaaaacccaucccc

SEQ ID NO: 58007 - RNA, 20 nt, Human
caaaaccaaaacccaucccc

SEQ ID NO: 58008 - RNA, 20 nt, Human
caaaaccaaaacccaucccc

SEQ ID NO: 58009 - RNA, 20 nt, Human
caaaaccaaaacccaucccc

SEQ ID NO: 58010 - RNA, 20 nt, Human
caaaacccauccccagccac

SEQ ID NO: 58011 - RNA, 20 nt, Human
caaaacccauccccagccac

SEQ ID NO: 58012 - RNA, 20 nt, Human
caaaacccauccccagccac

SEQ ID NO: 58013 - RNA, 20 nt, Human
caaaacccauccccagccac

SEQ ID NO: 58014 - RNA, 20 nt, Human
caaaagcagccccacccccc

SEQ ID NO: 58015 - RNA, 20 nt, Human
caaaagcagccccacccccc

SEQ ID NO: 58016 - RNA, 24 nt, Human
caauuuauccacagcuucagaagu

SEQ ID NO: 58017 - RNA, 24 nt, Human
caauuuauccacagcuucagaagu

SEQ ID NO: 58018 - RNA, 19 nt, Human
cacagcuccuucuccugca

SEQ ID NO: 58019 - RNA, 19 nt, Human
cacagcuccuucuccugca

SEQ ID NO: 58020 - RNA, 21 nt, Human
cacagcuccuucuccugcagc

SEQ ID NO: 58021 - RNA, 21 nt, Human
cacagcuccuucuccugcagc

SEQ ID NO: 58022 - RNA, 23 nt, Human
cacagcuccuucuccugcagccg

SEQ ID NO: 58023 - RNA, 23 nt, Human
cacagcuccuucuccugcagccg

SEQ ID NO: 58024 - RNA, 22 nt, Human
caccacggggggccugccucuc

SEQ ID NO: 58025 - RNA, 20 nt, Human
caccagcccgguccucuggc

SEQ ID NO: 58026 - RNA, 22 nt, Human
caccgaggcgaggaacugccag

SEQ ID NO: 58027 - RNA, 22 nt, Human
caccgaggcgaggaacugccag

SEQ ID NO: 58028 - RNA, 22 nt, Human
caccggccugucccccaacuga

SEQ ID NO: 58029 - RNA, 22 nt, Human
caccggccugucccccaacuga

SEQ ID NO: 58030 - RNA, 19 nt, Human
caccugcacccaggguccc

SEQ ID NO: 58031 - RNA, 19 nt, Human
caccugcacccaggguccc

SEQ ID NO: 58032 - RNA, 19 nt, Human
cacucccgcagagcggcgg

SEQ ID NO: 58033 - RNA, 19 nt, Human
cagccacaaaaagcccuca

SEQ ID NO: 58034 - RNA, 19 nt, Human
cagccacaaaaagcccuca

SEQ ID NO: 58035 - RNA, 19 nt, Human
cagccacaaaaagcccuca

SEQ ID NO: 58036 - RNA, 19 nt, Human
cagccacaaaaagcccuca

SEQ ID NO: 58037 - RNA, 18 nt, Human
cagccaccggccuguccc

SEQ ID NO: 58038 - RNA, 18 nt, Human
cagccaccggccuguccc

SEQ ID NO: 58039 - RNA, 20 nt, Human
cagccaccggccuguccccc

SEQ ID NO: 58040 - RNA, 18 nt, Human
cagccguccgggcucgcc

SEQ ID NO: 58041 - RNA, 18 nt, Human
cagccguccgggcucgcc

SEQ ID NO: 58042 - RNA, 21 nt, Human
cagcgaccugggagaggaagg

SEQ ID NO: 58043 - RNA, 21 nt, Human
cagcgaccugggagaggaagg

SEQ ID NO: 58044 - RNA, 19 nt, Human
cagcuccuccgacgcagcc

SEQ ID NO: 58045 - RNA, 19 nt, Human
cagcuccuccgacgcagcc

SEQ ID NO: 58046 - RNA, 22 nt, Human
cagcugucugucuccuuccugc

SEQ ID NO: 58047 - RNA, 22 nt, Human
cagcugucugucuccuuccugc

SEQ ID NO: 58048 - RNA, 18 nt, Human
caggccccgcggccaggg

SEQ ID NO: 58049 - RNA, 18 nt, Human
caggccccgcggccaggg

SEQ ID NO: 58050 - RNA, 21 nt, Human
cagggaacagccucgagccuu

SEQ ID NO: 58051 - RNA, 21 nt, Human
cagggaacagccucgagccuu

SEQ ID NO: 58052 - RNA, 22 nt, Human
cauugguucggcuggugaaggg

SEQ ID NO: 58053 - RNA, 20 nt, Human
ccaaaaccaaaacccauccc

SEQ ID NO: 58054 - RNA, 20 nt, Human
ccaaaaccaaaacccauccc

SEQ ID NO: 58055 - RNA, 20 nt, Human
ccaaaaccaaaacccauccc

SEQ ID NO: 58056 - RNA, 20 nt, Human
ccaaaaccaaaacccauccc

SEQ ID NO: 58057 - RNA, 22 nt, Human
ccaaaaccaaaacccaucccca

SEQ ID NO: 58058 - RNA, 22 nt, Human
ccaaaaccaaaacccaucccca

SEQ ID NO: 58059 - RNA, 22 nt, Human
ccaaaaccaaaacccaucccca

SEQ ID NO: 58060 - RNA, 22 nt, Human
ccaaaaccaaaacccaucccca

SEQ ID NO: 58061 - RNA, 24 nt, Human
ccaaaaccaaaacccauccccagc

SEQ ID NO: 58062 - RNA, 24 nt, Human
ccaaaaccaaaacccauccccagc

SEQ ID NO: 58063 - RNA, 24 nt, Human
ccaaaaccaaaacccauccccagc

SEQ ID NO: 58064 - RNA, 24 nt, Human
ccaaaaccaaaacccauccccagc

SEQ ID NO: 58065 - RNA, 20 nt, Human
ccacccccggccgacaaggc

SEQ ID NO: 58066 - RNA, 20 nt, Human
ccacccccggccgacaaggc

SEQ ID NO: 58067 - RNA, 24 nt, Human
ccaggacaccgaauggcccucucu

SEQ ID NO: 58068 - RNA, 28 nt, Human
cccaaaaccaaaacccauccccagccac

SEQ ID NO: 58069 - RNA, 28 nt, Human
cccaaaaccaaaacccauccccagccac

SEQ ID NO: 58070 - RNA, 28 nt, Human
cccaaaaccaaaacccauccccagccac

SEQ ID NO: 58071 - RNA, 28 nt, Human
cccaaaaccaaaacccauccccagccac

SEQ ID NO: 58072 - RNA, 20 nt, Human
cccaccacggggggccugcc

SEQ ID NO: 58073 - RNA, 19 nt, Human
cccagaggaaugugugcac

SEQ ID NO: 58074 - RNA, 19 nt, Human
cccagaggaaugugugcac

SEQ ID NO: 58075 - RNA, 19 nt, Human
cccagaggaaugugugcac

SEQ ID NO: 58076 - RNA, 19 nt, Human
cccagaggaaugugugcac

SEQ ID NO: 58077 - RNA, 21 nt, Human
cccagcagccaggcucugccc

SEQ ID NO: 58078 - RNA, 20 nt, Human
cccagccacaaaaagcccuc

SEQ ID NO: 58079 - RNA, 21 nt, Human
cccagccacaaaaagcccuca

SEQ ID NO: 58080 - RNA, 21 nt, Human
cccagccacaaaaagcccuca

SEQ ID NO: 58081 - RNA, 21 nt, Human
cccagccacaaaaagcccuca

SEQ ID NO: 58082 - RNA, 21 nt, Human
cccagccacaaaaagcccuca

SEQ ID NO: 58083 - RNA, 24 nt, Human
cccagccugcaggcugccuggacu

SEQ ID NO: 58084 - RNA, 24 nt, Human
cccagccugcaggcugccuggacu

SEQ ID NO: 58085 - RNA, 21 nt, Human
ccccaaaaccaaaacccaucc

SEQ ID NO: 58086 - RNA, 21 nt, Human
ccccaaaaccaaaacccaucc

SEQ ID NO: 58087 - RNA, 21 nt, Human
ccccaaaaccaaaacccaucc

SEQ ID NO: 58088 - RNA, 21 nt, Human
ccccaaaaccaaaacccaucc

SEQ ID NO: 58089 - RNA, 23 nt, Human
ccccaaaaccaaaacccaucccc

SEQ ID NO: 58090 - RNA, 23 nt, Human
ccccaaaaccaaaacccaucccc

SEQ ID NO: 58091 - RNA, 23 nt, Human
ccccaaaaccaaaacccaucccc

SEQ ID NO: 58092 - RNA, 23 nt, Human
ccccaaaaccaaaacccaucccc

SEQ ID NO: 58093 - RNA, 24 nt, Human
ccccaaaaccaaaacccaucccca

SEQ ID NO: 58094 - RNA, 24 nt, Human
ccccaaaaccaaaacccaucccca

SEQ ID NO: 58095 - RNA, 24 nt, Human
ccccaaaaccaaaacccaucccca

SEQ ID NO: 58096 - RNA, 24 nt, Human
ccccaaaaccaaaacccaucccca

SEQ ID NO: 58097 - RNA, 26 nt, Human
ccccagggaccccuugcauucccccu

SEQ ID NO: 58098 - RNA, 18 nt, Human
ccccccugccguggcccc

SEQ ID NO: 58099 - RNA, 18 nt, Human
ccccccugccguggcccc

SEQ ID NO: 58100 - RNA, 23 nt, Human
ccccggggccugccuggccgggg

SEQ ID NO: 58101 - RNA, 23 nt, Human
ccccggggccugccuggccgggg

SEQ ID NO: 58102 - RNA, 19 nt, Human
ccccugagucccccaggga

SEQ ID NO: 58103 - RNA, 20 nt, Human
ccccugagucccccagggac

SEQ ID NO: 58104 - RNA, 19 nt, Human
ccccuggcucgccucucca

SEQ ID NO: 58105 - RNA, 19 nt, Human
ccccuggcucgccucucca

SEQ ID NO: 58106 - RNA, 19 nt, Human
cccucucucuccccgcuuc

SEQ ID NO: 58107 - RNA, 19 nt, Human
cccucucucuccccgcuuc

SEQ ID NO: 58108 - RNA, 19 nt, Human
cccucucucuccccgcuuc

SEQ ID NO: 58109 - RNA, 19 nt, Human
cccucucucuccccgcuuc

SEQ ID NO: 58110 - RNA, 19 nt, Human
cccugagucccccagggac

SEQ ID NO: 58111 - RNA, 21 nt, Human
cccugagucccccagggaccc

SEQ ID NO: 58112 - RNA, 19 nt, Human
cccugggugguccugacuu

SEQ ID NO: 58113 - RNA, 19 nt, Human
cccugggugguccugacuu

SEQ ID NO: 58114 - RNA, 25 nt, Human
ccgacucuacucucaccggccaugc

SEQ ID NO: 58115 - RNA, 25 nt, Human
ccgacucuacucucaccggccaugc

SEQ ID NO: 58116 - RNA, 22 nt, Human
ccgggccgggguggccucuggc

SEQ ID NO: 58117 - RNA, 22 nt, Human
ccgggccgggguggccucuggc

SEQ ID NO: 58118 - RNA, 21 nt, Human
ccguccacaccgcggcuccag

SEQ ID NO: 58119 - RNA, 21 nt, Human
ccguccacaccgcggcuccag

SEQ ID NO: 58120 - RNA, 23 nt, Human
ccguggcccccgggaugggggag

SEQ ID NO: 58121 - RNA, 23 nt, Human
ccguggcccccgggaugggggag

SEQ ID NO: 58122 - RNA, 19 nt, Human
ccuacuccuuuccuuccuc

SEQ ID NO: 58123 - RNA, 19 nt, Human
ccuacuccuuuccuuccuc

SEQ ID NO: 58124 - RNA, 21 nt, Human
ccucccugauggcaccgaggc

SEQ ID NO: 58125 - RNA, 22 nt, Human
ccucccugauggcaccgaggcg

SEQ ID NO: 58126 - RNA, 25 nt, Human
ccucuggcagccagguccccggccc

SEQ ID NO: 58127 - RNA, 19 nt, Human
ccucugggcguccaggcuc

SEQ ID NO: 58128 - RNA, 19 nt, Human
ccucugggcguccaggcuc

SEQ ID NO: 58129 - RNA, 19 nt, Human
ccucuuucacugaaagaca

SEQ ID NO: 58130 - RNA, 27 nt, Human
ccugcccgccccucuaaaggaagcaaa

SEQ ID NO: 58131 - RNA, 27 nt, Human
ccugcccgccccucuaaaggaagcaaa

SEQ ID NO: 58132 - RNA, 19 nt, Human
ccuggcccugggggcgccc

SEQ ID NO: 58133 - RNA, 19 nt, Human
ccuggcccugggggcgccc

SEQ ID NO: 58134 - RNA, 19 nt, Human
ccugugugcauggcagagu

SEQ ID NO: 58135 - RNA, 19 nt, Human
ccugugugcauggcagagu

SEQ ID NO: 58136 - RNA, 19 nt, Human
cgagaggagccagcccugu

SEQ ID NO: 58137 - RNA, 19 nt, Human
cgagaggagccagcccugu

SEQ ID NO: 58138 - RNA, 19 nt, Human
cgagaggagccagcccugu

SEQ ID NO: 58139 - RNA, 21 nt, Human
cgagccuggcaccugcaccca

SEQ ID NO: 58140 - RNA, 21 nt, Human
cgcccaagugcccuucugccc

SEQ ID NO: 58141 - RNA, 19 nt, Human
cgccgaagggccuuggggg

SEQ ID NO: 58142 - RNA, 20 nt, Human
cggccccccugccguggccc

SEQ ID NO: 58143 - RNA, 22 nt, Human
cggccccccugccguggccccc

SEQ ID NO: 58144 - RNA, 21 nt, Human
cggccucugggcguccaggcu

SEQ ID NO: 58145 - RNA, 21 nt, Human
cggccucugggcguccaggcu

SEQ ID NO: 58146 - RNA, 21 nt, Human
cggcuggugaagggagaaugg

SEQ ID NO: 58147 - RNA, 21 nt, Human
cggcuggugaagggagaaugg

SEQ ID NO: 58148 - RNA, 21 nt, Human
cuacagucagucauucaugcc

SEQ ID NO: 58149 - RNA, 21 nt, Human
cuacagucagucauucaugcc

SEQ ID NO: 58150 - RNA, 21 nt, Human
cuacagucagucauucaugcc

SEQ ID NO: 58151 - RNA, 21 nt, Human
cuacagucagucauucaugcc

SEQ ID NO: 58152 - RNA, 21 nt, Human
cuccaggggcgagaggagcca

SEQ ID NO: 58153 - RNA, 21 nt, Human
cuccaggggcgagaggagcca

SEQ ID NO: 58154 - RNA, 18 nt, Human
cuccccgcuucuugcugc

SEQ ID NO: 58155 - RNA, 18 nt, Human
cuccccgcuucuugcugc

SEQ ID NO: 58156 - RNA, 18 nt, Human
cuccccgcuucuugcugc

SEQ ID NO: 58157 - RNA, 18 nt, Human
cuccccgcuucuugcugc

SEQ ID NO: 58158 - RNA, 21 nt, Human
cucccugcccgccccucuaaa

SEQ ID NO: 58159 - RNA, 21 nt, Human
cucccugcccgccccucuaaa

SEQ ID NO: 58160 - RNA, 19 nt, Human
cuccuucuccugcagccgc

SEQ ID NO: 58161 - RNA, 19 nt, Human
cuccuucuccugcagccgc

SEQ ID NO: 58162 - RNA, 23 nt, Human
cucgagccuggcaccugcaccca

SEQ ID NO: 58163 - RNA, 23 nt, Human
cucgagccuggcaccugcaccca

SEQ ID NO: 58164 - RNA, 22 nt, Human
cucuauggacaugcuggugcaa

SEQ ID NO: 58165 - RNA, 19 nt, Human
cucucccugcccgccccuc

SEQ ID NO: 58166 - RNA, 19 nt, Human
cucucccugcccgccccuc

SEQ ID NO: 58167 - RNA, 24 nt, Human
cucugggagacccugggugguccu

SEQ ID NO: 58168 - RNA, 24 nt, Human
cucugggagacccugggugguccu

SEQ ID NO: 58169 - RNA, 21 nt, Human
cugcacccaggguccccagcc

SEQ ID NO: 58170 - RNA, 21 nt, Human
cugcacccaggguccccagcc

SEQ ID NO: 58171 - RNA, 24 nt, Human
cuucuaagaccuggcagauacauu

SEQ ID NO: 58172 - RNA, 24 nt, Human
cuucuaagaccuggcagauacauu

SEQ ID NO: 58173 - RNA, 25 nt, Human
cuucucuauggacaugcuggugcaa

SEQ ID NO: 58174 - RNA, 18 nt, Human
cuuuuguguccugguucc

SEQ ID NO: 58175 - RNA, 18 nt, Human
cuuuuguguccugguucc

SEQ ID NO: 58176 - RNA, 18 nt, Human
cuuuuguguccugguucc

SEQ ID NO: 58177 - RNA, 18 nt, Human
cuuuuguguccugguucc

SEQ ID NO: 58178 - RNA, 23 nt, Human
gaacacggacuaugauauagugc

SEQ ID NO: 58179 - RNA, 23 nt, Human
gaacacggacuaugauauagugc

SEQ ID NO: 58180 - RNA, 21 nt, Human
gacagaugagguugggaaaaa

SEQ ID NO: 58181 - RNA, 21 nt, Human
gacagaugagguugggaaaaa

SEQ ID NO: 58182 - RNA, 21 nt, Human
gacagaugagguugggaaaaa

SEQ ID NO: 58183 - RNA, 21 nt, Human
gacagaugagguugggaaaaa

SEQ ID NO: 58184 - RNA, 19 nt, Human
gacccuuucagaugggguc

SEQ ID NO: 58185 - RNA, 19 nt, Human
gacccuuucagaugggguc

SEQ ID NO: 58186 - RNA, 18 nt, Human
gagaggagccagcccugu

SEQ ID NO: 58187 - RNA, 20 nt, Human
gagccuggcaccugcaccca

SEQ ID NO: 58188 - RNA, 20 nt, Human
gagcugcgggguccgcgggg

SEQ ID NO: 58189 - RNA, 20 nt, Human
gagcugcgggguccgcgggg

SEQ ID NO: 58190 - RNA, 21 nt, Human
gagcugcgggguccgcggggg

SEQ ID NO: 58191 - RNA, 21 nt, Human
gagcugcgggguccgcggggg

SEQ ID NO: 58192 - RNA, 18 nt, Human
gagcuuccucucccugcc

SEQ ID NO: 58193 - RNA, 18 nt, Human
gaggaggagcagcugggg

SEQ ID NO: 58194 - RNA, 20 nt, Human
gaggaggagcagcuggggcu

SEQ ID NO: 58195 - RNA, 23 nt, Human
gauucaguggaggcgaguggugu

SEQ ID NO: 58196 - RNA, 23 nt, Human
gauucaguggaggcgaguggugu

SEQ ID NO: 58197 - RNA, 18 nt, Human
gcccagcagccaggcucu

SEQ ID NO: 58198 - RNA, 18 nt, Human
gccccccugccguggccc

SEQ ID NO: 58199 - RNA, 21 nt, Human
gcccgcccaagugcccuucug

SEQ ID NO: 58200 - RNA, 26 nt, Human
gcccuacuccuuuccuuccucuuuca

SEQ ID NO: 58201 - RNA, 26 nt, Human
gcccuacuccuuuccuuccucuuuca

SEQ ID NO: 58202 - RNA, 18 nt, Human
gcccugucucucucuccu

SEQ ID NO: 58203 - RNA, 18 nt, Human
gcccugucucucucuccu

SEQ ID NO: 58204 - RNA, 19 nt, Human
gcccugucucucucuccug

SEQ ID NO: 58205 - RNA, 19 nt, Human
gcccugucucucucuccug

SEQ ID NO: 58206 - RNA, 21 nt, Human
gccuggccccggccucugggc

SEQ ID NO: 58207 - RNA, 21 nt, Human
gccuggccccggccucugggc

SEQ ID NO: 58208 - RNA, 19 nt, Human
gcgagaggagccagcccug

SEQ ID NO: 58209 - RNA, 19 nt, Human
gcgagaggagccagcccug

SEQ ID NO: 58210 - RNA, 22 nt, Human
ggaagcagggccccucuccgcu

SEQ ID NO: 58211 - RNA, 22 nt, Human
ggaagcagggccccucuccgcu

SEQ ID NO: 58212 - RNA, 19 nt, Human
ggaccccugagucccccag

SEQ ID NO: 58213 - RNA, 28 nt, Human
ggaccccugagucccccagggaccccuu

SEQ ID NO: 58214 - RNA, 21 nt, Human
ggagacccugggugguccuga

SEQ ID NO: 58215 - RNA, 21 nt, Human
ggagacccugggugguccuga

SEQ ID NO: 58216 - RNA, 19 nt, Human
ggagcgugcagccaugcca

SEQ ID NO: 58217 - RNA, 19 nt, Human
ggagcgugcagccaugcca

SEQ ID NO: 58218 - RNA, 21 nt, Human
ggagguauguggguuggggag

SEQ ID NO: 58219 - RNA, 21 nt, Human
ggagguauguggguuggggag

SEQ ID NO: 58220 - RNA, 21 nt, Human
ggccccccugccguggccccc

SEQ ID NO: 58221 - RNA, 21 nt, Human
ggcuggugaagggagaauggu

SEQ ID NO: 58222 - RNA, 21 nt, Human
ggcuggugaagggagaauggu

SEQ ID NO: 58223 - RNA, 21 nt, Human
gggcuugaggaggagcagcug

SEQ ID NO: 58224 - RNA, 19 nt, Human
ggggaggcacugaggcagg

SEQ ID NO: 58225 - RNA, 21 nt, Human
ggggcuacuggguuggcugca

SEQ ID NO: 58226 - RNA, 21 nt, Human
ggggcuacuggguuggcugca

SEQ ID NO: 58227 - RNA, 21 nt, Human
ggguggccucuggcggagacg

SEQ ID NO: 58228 - RNA, 21 nt, Human
ggguggccucuggcggagacg

SEQ ID NO: 58229 - RNA, 20 nt, Human
ggguuggggagggugggcag

SEQ ID NO: 58230 - RNA, 23 nt, Human
ggugugugugugugugugugugg

SEQ ID NO: 58231 - RNA, 19 nt, Human
guccaggcucuccgccucc

SEQ ID NO: 58232 - RNA, 19 nt, Human
guccaggcucuccgccucc

SEQ ID NO: 58233 - RNA, 23 nt, Human
gucccuaacacaaggaaccccga

SEQ ID NO: 58234 - RNA, 23 nt, Human
gucccuaacacaaggaaccccga

SEQ ID NO: 58235 - RNA, 18 nt, Human
gucucucacuguuuacuc

SEQ ID NO: 58236 - RNA, 22 nt, Human
gugcaauccugggucagccacc

SEQ ID NO: 58237 - RNA, 22 nt, Human
gugcaauccugggucagccacc

SEQ ID NO: 58238 - RNA, 18 nt, Human
guggagggggcuucugug

SEQ ID NO: 58239 - RNA, 18 nt, Human
guggagggggcuucugug

SEQ ID NO: 58240 - RNA, 19 nt, Human
guggguuggggaggguggg

SEQ ID NO: 58241 - RNA, 19 nt, Human
guggguuggggaggguggg

SEQ ID NO: 58242 - RNA, 18 nt, Human
guggugugugugugugug

SEQ ID NO: 58243 - RNA, 20 nt, Human
gugugugugugugugugugu

SEQ ID NO: 58244 - RNA, 20 nt, Human
gugugugugugugugugugu

SEQ ID NO: 58245 - RNA, 21 nt, Human
gugugugugugugugugugug

SEQ ID NO: 58246 - RNA, 24 nt, Human
uaaaaaaaaaaccccaaaaccaaa

SEQ ID NO: 58247 - RNA, 24 nt, Human
uaaaaaaaaaaccccaaaaccaaa

SEQ ID NO: 58248 - RNA, 24 nt, Human
uaaaaaaaaaaccccaaaaccaaa

SEQ ID NO: 58249 - RNA, 24 nt, Human
uaaaaaaaaaaccccaaaaccaaa

SEQ ID NO: 58250 - RNA, 21 nt, Human
uaaaggaagcaaaagcagccc

SEQ ID NO: 58251 - RNA, 21 nt, Human
uaaaggaagcaaaagcagccc

SEQ ID NO: 58252 - RNA, 19 nt, Human
uacagucagucauucaugc

SEQ ID NO: 58253 - RNA, 19 nt, Human
uacagucagucauucaugc

SEQ ID NO: 58254 - RNA, 19 nt, Human
uacagucagucauucaugc

SEQ ID NO: 58255 - RNA, 19 nt, Human
uacagucagucauucaugc

SEQ ID NO: 58256 - RNA, 21 nt, Human
uauacaucagaguaggguagg

SEQ ID NO: 58257 - RNA, 21 nt, Human
uauacaucagaguaggguagg

SEQ ID NO: 58258 - RNA, 19 nt, Human
uauccacagcuucagaagu

SEQ ID NO: 58259 - RNA, 19 nt, Human
uauccacagcuucagaagu

SEQ ID NO: 58260 - RNA, 21 nt, Human
ucaagguaauuucaaaacuuc

SEQ ID NO: 58261 - RNA, 21 nt, Human
ucaagguaauuucaaaacuuc

SEQ ID NO: 58262 - RNA, 18 nt, Human
ucacaguaaaaucugugu

SEQ ID NO: 58263 - RNA, 18 nt, Human
ucacaguaaaaucugugu

SEQ ID NO: 58264 - RNA, 22 nt, Human
ucaccgaaucggucccagccgc

SEQ ID NO: 58265 - RNA, 24 nt, Human
ucaccgaaucggucccagccgcgc

SEQ ID NO: 58266 - RNA, 24 nt, Human
ucaccgaaucggucccagccgcgc

SEQ ID NO: 58267 - RNA, 20 nt, Human
ucagaugggguccuggcucc

SEQ ID NO: 58268 - RNA, 20 nt, Human
ucagaugggguccuggcucc

SEQ ID NO: 58269 - RNA, 21 nt, Human
ucagccaccggccuguccccc

SEQ ID NO: 58270 - RNA, 21 nt, Human
ucaggcccggagcuagagcuu

SEQ ID NO: 58271 - RNA, 21 nt, Human
ucaggcccggagcuagagcuu

SEQ ID NO: 58272 - RNA, 25 nt, Human
uccacugggaccccugaguccccca

SEQ ID NO: 58273 - RNA, 20 nt, Human
uccccagccacaaaaagccc

SEQ ID NO: 58274 - RNA, 20 nt, Human
uccccagccacaaaaagccc

SEQ ID NO: 58275 - RNA, 20 nt, Human
uccccagccacaaaaagccc

SEQ ID NO: 58276 - RNA, 20 nt, Human
uccccagccacaaaaagccc

SEQ ID NO: 58277 - RNA, 19 nt, Human
uccccgcuucuugcugcuu

SEQ ID NO: 58278 - RNA, 19 nt, Human
uccccgcuucuugcugcuu

SEQ ID NO: 58279 - RNA, 19 nt, Human
uccccgcuucuugcugcuu

SEQ ID NO: 58280 - RNA, 19 nt, Human
uccccgcuucuugcugcuu

SEQ ID NO: 58281 - RNA, 22 nt, Human
ucccgcagagcggcggggcgga

SEQ ID NO: 58282 - RNA, 22 nt, Human
ucccgcagagcggcggggcgga

SEQ ID NO: 58283 - RNA, 21 nt, Human
ucccucucucuccccgcuucu

SEQ ID NO: 58284 - RNA, 21 nt, Human
ucccucucucuccccgcuucu

SEQ ID NO: 58285 - RNA, 21 nt, Human
ucccucucucuccccgcuucu

SEQ ID NO: 58286 - RNA, 21 nt, Human
ucccucucucuccccgcuucu

SEQ ID NO: 58287 - RNA, 22 nt, Human
uccucuggcagccagguccccg

SEQ ID NO: 58288 - RNA, 24 nt, Human
uccucuggcagccagguccccggc

SEQ ID NO: 58289 - RNA, 21 nt, Human
uccucuuucacugaaagacag

SEQ ID NO: 58290 - RNA, 23 nt, Human
ucggcuggugaagggagaaugga

SEQ ID NO: 58291 - RNA, 23 nt, Human
ucggcuggugaagggagaaugga

SEQ ID NO: 58292 - RNA, 18 nt, Human
ucuaggcaucguguggag

SEQ ID NO: 58293 - RNA, 21 nt, Human
ucucacuguuuacucucucug

SEQ ID NO: 58294 - RNA, 22 nt, Human
ucuccaagaggccacaggggcu

SEQ ID NO: 58295 - RNA, 22 nt, Human
ucuccaagaggccacaggggcu

SEQ ID NO: 58296 - RNA, 18 nt, Human
ucucucacuguuuacucu

SEQ ID NO: 58297 - RNA, 20 nt, Human
ucucuccuggcccugggggc

SEQ ID NO: 58298 - RNA, 20 nt, Human
ucucuccuggcccugggggc

SEQ ID NO: 58299 - RNA, 20 nt, Human
ucucugguuugcucucuugg

SEQ ID NO: 58300 - RNA, 22 nt, Human
ucucugguuugcucucuugguc

SEQ ID NO: 58301 - RNA, 21 nt, Human
ucuugcugcuuuuguguccug

SEQ ID NO: 58302 - RNA, 21 nt, Human
ucuugcugcuuuuguguccug

SEQ ID NO: 58303 - RNA, 21 nt, Human
ucuugcugcuuuuguguccug

SEQ ID NO: 58304 - RNA, 21 nt, Human
ucuugcugcuuuuguguccug

SEQ ID NO: 58305 - RNA, 23 nt, Human
ugaagcagcccgcccaagugccc

SEQ ID NO: 58306 - RNA, 20 nt, Human
ugacguggagggggcuucug

SEQ ID NO: 58307 - RNA, 21 nt, Human
ugacguggagggggcuucugu

SEQ ID NO: 58308 - RNA, 21 nt, Human
ugaggaggagcagcuggggcu

SEQ ID NO: 58309 - RNA, 24 nt, Human
ugauggcaccgaggcgaggaacug

SEQ ID NO: 58310 - RNA, 24 nt, Human
ugauggcaccgaggcgaggaacug

SEQ ID NO: 58311 - RNA, 21 nt, Human
ugcaauccugggucagccacc

SEQ ID NO: 58312 - RNA, 21 nt, Human
ugcaauccugggucagccacc

SEQ ID NO: 58313 - RNA, 22 nt, Human
ugcaauccugggucagccaccg

SEQ ID NO: 58314 - RNA, 22 nt, Human
ugcaauccugggucagccaccg

SEQ ID NO: 58315 - RNA, 21 nt, Human
ugccuggccgggggugcaccg

SEQ ID NO: 58316 - RNA, 21 nt, Human
ugccuggccgggggugcaccg

SEQ ID NO: 58317 - RNA, 18 nt, Human
uggaauggagguaugugg

SEQ ID NO: 58318 - RNA, 18 nt, Human
uggaauggagguaugugg

SEQ ID NO: 58319 - RNA, 25 nt, Human
uggagaccccaaacuccuccccuaa

SEQ ID NO: 58320 - RNA, 25 nt, Human
uggagaccccaaacuccuccccuaa

SEQ ID NO: 58321 - RNA, 20 nt, Human
uggaggccgggccggggugg

SEQ ID NO: 58322 - RNA, 20 nt, Human
uggaggccgggccggggugg

SEQ ID NO: 58323 - RNA, 23 nt, Human
uggcugcagcagcgaccugggag

SEQ ID NO: 58324 - RNA, 23 nt, Human
uggcugcagcagcgaccugggag

SEQ ID NO: 58325 - RNA, 24 nt, Human
ugggcagaggggaggcacugaggc

SEQ ID NO: 58326 - RNA, 24 nt, Human
ugggcagaggggaggcacugaggc

SEQ ID NO: 58327 - RNA, 20 nt, Human
ugggccaggacaccgaaugg

SEQ ID NO: 58328 - RNA, 22 nt, Human
uggggagggugggcagaugagg

SEQ ID NO: 58329 - RNA, 22 nt, Human
uggggagggugggcagaugagg

SEQ ID NO: 58330 - RNA, 21 nt, Human
ugggggaggauggaggggggc

SEQ ID NO: 58331 - RNA, 21 nt, Human
ugggggaggauggaggggggc

SEQ ID NO: 58332 - RNA, 21 nt, Human
uggguuggggagggugggcag

SEQ ID NO: 58333 - RNA, 26 nt, Human
uggugcaauccugggucagccaccgg

SEQ ID NO: 58334 - RNA, 26 nt, Human
uggugcaauccugggucagccaccgg

SEQ ID NO: 58335 - RNA, 22 nt, Human
uggugugugugugugugugugu

SEQ ID NO: 58336 - RNA, 22 nt, Human
uggugugugugugugugugugu

SEQ ID NO: 58337 - RNA, 19 nt, Human
ugguucggcuggugaaggg

SEQ ID NO: 58338 - RNA, 23 nt, Human
ugguuugcucucuuggucucuca

SEQ ID NO: 58339 - RNA, 23 nt, Human
ugugggaagcagggccccucucc

SEQ ID NO: 58340 - RNA, 23 nt, Human
ugugggaagcagggccccucucc

SEQ ID NO: 58341 - RNA, 20 nt, Human
ugugggguucagggguuggg

SEQ ID NO: 58342 - RNA, 24 nt, Human
ugugugcauggcagagagugugug

SEQ ID NO: 58343 - RNA, 24 nt, Human
ugugugcauggcagagagugugug

SEQ ID NO: 58344 - RNA, 22 nt, Human
ugugugcauggcagagugugug

SEQ ID NO: 58345 - RNA, 22 nt, Human
ugugugcauggcagagugugug

SEQ ID NO: 58346 - RNA, 18 nt, Human
uguguguguccugaaugu

SEQ ID NO: 58347 - RNA, 18 nt, Human
uguguguguccugaaugu

SEQ ID NO: 58348 - RNA, 21 nt, Human
uguguguguguguguguccug

SEQ ID NO: 58349 - RNA, 21 nt, Human
uguguguguguguguguccug

SEQ ID NO: 58350 - RNA, 18 nt, Human
ugugugugugugugugug

SEQ ID NO: 58351 - RNA, 18 nt, Human
ugugugugugugugugug

SEQ ID NO: 58352 - RNA, 18 nt, Human
ugugugugugugugugug

SEQ ID NO: 58353 - RNA, 18 nt, Human
ugugugugugugugugug

SEQ ID NO: 58354 - RNA, 18 nt, Human
ugugugugugugugugug

SEQ ID NO: 58355 - RNA, 18 nt, Human
ugugugugugugugugug

SEQ ID NO: 58356 - RNA, 18 nt, Human
ugugugugugugugugug

SEQ ID NO: 58357 - RNA, 18 nt, Human
ugugugugugugugugug

SEQ ID NO: 58358 - RNA, 18 nt, Human
ugugugugugugugugug

SEQ ID NO: 58359 - RNA, 18 nt, Human
ugugugugugugugugug

SEQ ID NO: 58360 - RNA, 21 nt, Human
ugugugugugugugugugugu

SEQ ID NO: 58361 - RNA, 21 nt, Human
ugugugugugugugugugugu

SEQ ID NO: 58362 - RNA, 21 nt, Human
ugugugugugugugugugugu

SEQ ID NO: 58363 - RNA, 21 nt, Human
ugugugugugugugugugugu

SEQ ID NO: 58364 - RNA, 21 nt, Human
ugugugugugugugugugugu

SEQ ID NO: 58365 - RNA, 21 nt, Human
ugugugugugugugugugugu

SEQ ID NO: 58366 - RNA, 21 nt, Human
ugugugugugugugugugugu

SEQ ID NO: 58367 - RNA, 21 nt, Human
ugugugugugugugugugugu

SEQ ID NO: 58368 - RNA, 21 nt, Human
ugugugugugugugugugugu

SEQ ID NO: 58369 - RNA, 21 nt, Human
ugugugugugugugugugugu

SEQ ID NO: 58370 - RNA, 21 nt, Human
ugugugugugugugugugugu

SEQ ID NO: 58371 - RNA, 21 nt, Human
ugugugugugugugugugugu

SEQ ID NO: 58372 - RNA, 21 nt, Human
ugugugugugugugugugugu

SEQ ID NO: 58373 - RNA, 21 nt, Human
ugugugugugugugugugugu

SEQ ID NO: 58374 - RNA, 21 nt, Human
ugugugugugugugugugugu

SEQ ID NO: 58375 - RNA, 21 nt, Human
ugugugugugugugugugugu

SEQ ID NO: 58376 - RNA, 22 nt, Human
ugugugugugugugugugugug

SEQ ID NO: 58377 - RNA, 22 nt, Human
ugugugugugugugugugugug

SEQ ID NO: 58378 - RNA, 22 nt, Human
ugugugugugugugugugugug

SEQ ID NO: 58379 - RNA, 22 nt, Human
ugugugugugugugugugugug

SEQ ID NO: 58380 - RNA, 22 nt, Human
ugugugugugugugugugugug

SEQ ID NO: 58381 - RNA, 19 nt, Human
uguuuucuaucccucucuc

SEQ ID NO: 58382 - RNA, 19 nt, Human
uguuuucuaucccucucuc

SEQ ID NO: 58383 - RNA, 19 nt, Human
uguuuucuaucccucucuc

SEQ ID NO: 58384 - RNA, 19 nt, Human
uguuuucuaucccucucuc

SEQ ID NO: 58385 - RNA, 18 nt, Human
uuacucucucugugggcc

SEQ ID NO: 58386 - RNA, 18 nt, Human
uucaagguaaugauuuuc

SEQ ID NO: 58387 - RNA, 18 nt, Human
uucaagguaaugauuuuc

SEQ ID NO: 58388 - RNA, 26 nt, Human
uuccucucccugcccgccccucuaaa

SEQ ID NO: 58389 - RNA, 26 nt, Human
uuccucucccugcccgccccucuaaa

SEQ ID NO: 58390 - RNA, 21 nt, Human
uuccugccuugacccagagcc

SEQ ID NO: 58391 - RNA, 21 nt, Human
uuccugccuugacccagagcc

SEQ ID NO: 58392 - RNA, 21 nt, Human
uucuaucccucucucuccccg

SEQ ID NO: 58393 - RNA, 21 nt, Human
uucuaucccucucucuccccg

SEQ ID NO: 58394 - RNA, 21 nt, Human
uucuaucccucucucuccccg

SEQ ID NO: 58395 - RNA, 21 nt, Human
uucuaucccucucucuccccg

SEQ ID NO: 58396 - RNA, 19 nt, Human
uugacccagagccuggccc

SEQ ID NO: 58397 - RNA, 19 nt, Human
uugacccagagccuggccc

SEQ ID NO: 58398 - RNA, 22 nt, Human
uuucuaucccucucucuccccg

SEQ ID NO: 58399 - RNA, 23 nt, Human
uuuuuuuuuuuuuucuuuccagg

SEQ ID NO: 58400 - RNA, 23 nt, Human
uuuuuuuuuuuuuucuuuccagg

SEQ ID NO: 58401 - RNA, 21 nt, Human
aaagaacaauggagguggccg

SEQ ID NO: 58402 - RNA, 24 nt, Human
aagaacaauggagguggccaguuc

SEQ ID NO: 58403 - RNA, 30 nt, Human
aagcugcauauugagugaauguguggugca

SEQ ID NO: 58404 - RNA, 18 nt, Human
aaggagcugcuggagauc

SEQ ID NO: 58405 - RNA, 20 nt, Human
agaacaauggagguggccag

SEQ ID NO: 58406 - RNA, 21 nt, Human
agcccucuucugugugauggc

SEQ ID NO: 58407 - RNA, 19 nt, Human
agcugcuggagaucgcgcu

SEQ ID NO: 58408 - RNA, 19 nt, Human
aguuaaagaggauggggga

SEQ ID NO: 58409 - RNA, 27 nt, Human
cacagacacaacaaaguauuggauaca

SEQ ID NO: 58410 - RNA, 22 nt, Human
cuacugaaacaggaagcugcau

SEQ ID NO: 58411 - RNA, 19 nt, Human
cuggaggucguccuggucu

SEQ ID NO: 58412 - RNA, 21 nt, Human
ggcagucccucacuuggccuc

SEQ ID NO: 58413 - RNA, 22 nt, Human
ggucacuccccuacugaaacag

SEQ ID NO: 58414 - RNA, 25 nt, Human
guuacaauaggcagugguuuuaauu

SEQ ID NO: 58415 - RNA, 18 nt, Human
uacagcauccaguaugaa

SEQ ID NO: 58416 - RNA, 18 nt, Human
uagcacagacacaacaaa

SEQ ID NO: 58417 - RNA, 19 nt, Human
uagcacagacacaacaaag

SEQ ID NO: 58418 - RNA, 19 nt, Human
ucaccacagcccucuucug

SEQ ID NO: 58419 - RNA, 21 nt, Human
ucaucugagcauuucagcuau

SEQ ID NO: 58420 - RNA, 23 nt, Human
ucaucugagcauuucagcuauau

SEQ ID NO: 58421 - RNA, 20 nt, Human
ucccagguuagcacagacac

SEQ ID NO: 58422 - RNA, 18 nt, Human
ugcagaagcaaagaacaa

SEQ ID NO: 58423 - RNA, 22 nt, Human
ugcagaagcaaagaacaaugga

SEQ ID NO: 58424 - RNA, 24 nt, Human
ugccgaaggagcugcuggagaucg

SEQ ID NO: 58425 - RNA, 18 nt, Human
ugccguauauuugcuaac

SEQ ID NO: 58426 - RNA, 19 nt, Human
ugcuucaaguccuccuugc

SEQ ID NO: 58427 - RNA, 21 nt, Human
uggaaggauuccuacauagug

SEQ ID NO: 58428 - RNA, 24 nt, Human
ugggcagucccucacuuggccucu

SEQ ID NO: 58429 - RNA, 21 nt, Human
ugugcagaagcaaagaacaau

SEQ ID NO: 58430 - RNA, 26 nt, Human
uuagcacagacacaacaaaguauugg

SEQ ID NO: 58431 - RNA, 18 nt, Human
uuaggucacuccccuacu

SEQ ID NO: 58432 - RNA, 18 nt, Human
uugaagaggucugcaggu

SEQ ID NO: 58433 - RNA, 23 nt, Human
aacauuuuauucuauuuuucugu

SEQ ID NO: 58434 - RNA, 20 nt, Human
aagaaucagugaagagucac

SEQ ID NO: 58435 - RNA, 23 nt, Human
aagagucacccccacccagaauc

SEQ ID NO: 58436 - RNA, 26 nt, Human
aaugcaaagaugcuggagaagcugaa

SEQ ID NO: 58437 - RNA, 20 nt, Human
acaaugcaaagaugcuggag

SEQ ID NO: 58438 - RNA, 18 nt, Human
acaguaauaauuuuacag

SEQ ID NO: 58439 - RNA, 19 nt, Human
acccugacaguuugggucc

SEQ ID NO: 58440 - RNA, 18 nt, Human
agaaagcuuugacuagaa

SEQ ID NO: 58441 - RNA, 24 nt, Human
agcaccauccaccucuaaagcggc

SEQ ID NO: 58442 - RNA, 26 nt, Human
agcauccccccacccccuaaagcaac

SEQ ID NO: 58443 - RNA, 24 nt, Human
aguauacuguaguguuugcaaaau

SEQ ID NO: 58444 - RNA, 19 nt, Human
auagcauccccccaccccc

SEQ ID NO: 58445 - RNA, 24 nt, Human
auagcauccccccacccccuaaag

SEQ ID NO: 58446 - RNA, 24 nt, Human
aucauuccaucuccuucugucccu

SEQ ID NO: 58447 - RNA, 21 nt, Human
auccucucaagcacacacggc

SEQ ID NO: 58448 - RNA, 25 nt, Human
auuccaaucacuagagagaaagcuu

SEQ ID NO: 58449 - RNA, 18 nt, Human
cacagaacuacagaauuc

SEQ ID NO: 58450 - RNA, 21 nt, Human
cagcgaacacacacacacuuc

SEQ ID NO: 58451 - RNA, 21 nt, Human
ccacccagaaucccucccucc

SEQ ID NO: 58452 - RNA, 18 nt, Human
ccacccccuaaagcaacu

SEQ ID NO: 58453 - RNA, 22 nt, Human
ccagaaucccucccuccucuuc

SEQ ID NO: 58454 - RNA, 18 nt, Human
ccauucuacuagcuaagg

SEQ ID NO: 58455 - RNA, 21 nt, Human
ccccacccagaaucccucccu

SEQ ID NO: 58456 - RNA, 23 nt, Human
cuacagaauuccucauuuuggga

SEQ ID NO: 58457 - RNA, 24 nt, Human
cuggaaggacacagugaugaaugu

SEQ ID NO: 58458 - RNA, 24 nt, Human
gcuuccuuguaaaaggugauaucc

SEQ ID NO: 58459 - RNA, 18 nt, Human
ggcaagaauuucuuccuu

SEQ ID NO: 58460 - RNA, 19 nt, Human
guauucugaagaaaaaaau

SEQ ID NO: 58461 - RNA, 20 nt, Human
gugcugccauucuacuagcu

SEQ ID NO: 58462 - RNA, 21 nt, Human
guuauuauuuacagcaaaacu

SEQ ID NO: 58463 - RNA, 19 nt, Human
guuuacagauaaaaucuuu

SEQ ID NO: 58464 - RNA, 22 nt, Human
uaaagcggcaagcauuuacccc

SEQ ID NO: 58465 - RNA, 24 nt, Human
uaaagcggcaagcauuuacccccu

SEQ ID NO: 58466 - RNA, 24 nt, Human
uaacagauagcauccccccacccc

SEQ ID NO: 58467 - RNA, 26 nt, Human
uaacagauagcauccccccacccccu

SEQ ID NO: 58468 - RNA, 18 nt, Human
uagcauccccccaccccc

SEQ ID NO: 58469 - RNA, 22 nt, Human
uagcauccccccacccccuaaa

SEQ ID NO: 58470 - RNA, 21 nt, Human
uaguauucugaagaaaaaaau

SEQ ID NO: 58471 - RNA, 22 nt, Human
uauucuguuuguguucuaagag

SEQ ID NO: 58472 - RNA, 18 nt, Human
ucaccaaaacccaaauaa

SEQ ID NO: 58473 - RNA, 21 nt, Human
ucccuucugauggcaagaauu

SEQ ID NO: 58474 - RNA, 22 nt, Human
ucuagacucaaaaccuggagau

SEQ ID NO: 58475 - RNA, 20 nt, Human
ugaaaaauuggcaauagcaa

SEQ ID NO: 58476 - RNA, 24 nt, Human
ugaaaaauuggcaauagcaacaaa

SEQ ID NO: 58477 - RNA, 21 nt, Human
ugacuagaagcaggaagauau

SEQ ID NO: 58478 - RNA, 27 nt, Human
ugacuagaagcaggaagauauucacaa

SEQ ID NO: 58479 - RNA, 18 nt, Human
ugauacacaugcaucaaa

SEQ ID NO: 58480 - RNA, 19 nt, Human
ugcacacgcgccaauccgg

SEQ ID NO: 58481 - RNA, 23 nt, Human
uggaaugguguuuugucagacuu

SEQ ID NO: 58482 - RNA, 22 nt, Human
uguaaaaggugauauccucagg

SEQ ID NO: 58483 - RNA, 20 nt, Human
uguaguguuugcaaaauugg

SEQ ID NO: 58484 - RNA, 22 nt, Human
uguuguagauuuaguaauuuua

SEQ ID NO: 58485 - RNA, 20 nt, Human
uguuuuaaaaaagaaacaaa

SEQ ID NO: 58486 - RNA, 20 nt, Human
uuaagcacuaacagauagca

SEQ ID NO: 58487 - RNA, 19 nt, Human
uuccaaauccuggaaggac

SEQ ID NO: 58488 - RNA, 24 nt, Human
uuuauacaguguuauuauuuacag

SEQ ID NO: 58489 - RNA, 25 nt, Human
uuuuuuuuuuuuggcccagggcguu

SEQ ID NO: 58490 - RNA, 26 nt, Human
uuuuuuuuuuuuuuuuuggcccaggg

SEQ ID NO: 58491 - RNA, 22 nt, Human
uuuuuuuuuuuuuuuuuuuggc

SEQ ID NO: 58492 - RNA, 28 nt, Human
uuuuuuuuuuuuuuuuuuuuuuuggggg

SEQ ID NO: 58493 - RNA, 26 nt, Human
aaaaaaaaaaucuagaucacugcuaa

SEQ ID NO: 58494 - RNA, 23 nt, Human
aaaccaaaccuuucuacgggaga

SEQ ID NO: 58495 - RNA, 26 nt, Human
aaacuaaaaugcaaaguuaggaugcu

SEQ ID NO: 58496 - RNA, 24 nt, Human
aaaguguugggauuacaggcauga

SEQ ID NO: 58497 - RNA, 24 nt, Human
aacaaaacaaaaaaaagggaacaa

SEQ ID NO: 58498 - RNA, 19 nt, Human
aacccugaaacaaagcaua

SEQ ID NO: 58499 - RNA, 20 nt, Human
aaccucugccucccaggauc

SEQ ID NO: 58500 - RNA, 21 nt, Human
aagaggccaccggggcuccau

SEQ ID NO: 58501 - RNA, 19 nt, Human
aagcaaaucaaaggaagcc

SEQ ID NO: 58502 - RNA, 19 nt, Human
aagcaugaaagucacacau

SEQ ID NO: 58503 - RNA, 21 nt, Human
aagcgauccuccugccucagc

SEQ ID NO: 58504 - RNA, 28 nt, Human
aagggaacaaaauacgaugggagaggga

SEQ ID NO: 58505 - RNA, 19 nt, Human
aaguagcugggacuacaga

SEQ ID NO: 58506 - RNA, 24 nt, Human
aagugauccacccuccuuggccuc

SEQ ID NO: 58507 - RNA, 21 nt, Human
aaguguugggauuacaggcau

SEQ ID NO: 58508 - RNA, 26 nt, Human
aaguguugggauuacaggcaugagcc

SEQ ID NO: 58509 - RNA, 25 nt, Human
acaaaacaaaaaaaagggaacaaaa

SEQ ID NO: 58510 - RNA, 26 nt, Human
acaaauccauaaacccugaaacaaag

SEQ ID NO: 58511 - RNA, 23 nt, Human
acagcacugaaaacgguagacac

SEQ ID NO: 58512 - RNA, 21 nt, Human
acagcuugcucagaucuagga

SEQ ID NO: 58513 - RNA, 18 nt, Human
acaggguuucgccauguu

SEQ ID NO: 58514 - RNA, 23 nt, Human
acaggguuucgccauguuggcca

SEQ ID NO: 58515 - RNA, 24 nt, Human
acaggguuucgccauguuggccag

SEQ ID NO: 58516 - RNA, 28 nt, Human
accccagaagcaugaaaguugagggguc

SEQ ID NO: 58517 - RNA, 21 nt, Human
acggccaugugacugggaagc

SEQ ID NO: 58518 - RNA, 24 nt, Human
acgggguuuugcucuguugcucag

SEQ ID NO: 58519 - RNA, 18 nt, Human
agacaggguuucgccaug

SEQ ID NO: 58520 - RNA, 18 nt, Human
agacaggguuucgccaug

SEQ ID NO: 58521 - RNA, 22 nt, Human
agaucaggaagggcauacccag

SEQ ID NO: 58522 - RNA, 24 nt, Human
agauuuuuuuuuaaucuucucaga

SEQ ID NO: 58523 - RNA, 18 nt, Human
agccacagcccauguaga

SEQ ID NO: 58524 - RNA, 20 nt, Human
aggaaaagccacucugagga

SEQ ID NO: 58525 - RNA, 23 nt, Human
aggagauuguccaggggaggagg

SEQ ID NO: 58526 - RNA, 21 nt, Human
aggcaugagccaccaugcccg

SEQ ID NO: 58527 - RNA, 25 nt, Human
agggaaaagcaagccuucaggaaaa

SEQ ID NO: 58528 - RNA, 22 nt, Human
aggggaggaggacacaacguca

SEQ ID NO: 58529 - RNA, 18 nt, Human
aguacauucucaauuacc

SEQ ID NO: 58530 - RNA, 25 nt, Human
aguagcugggacuacagaugcacac

SEQ ID NO: 58531 - RNA, 23 nt, Human
aguagcugggauuacagguaugu

SEQ ID NO: 58532 - RNA, 23 nt, Human
aguagcugggauuacagguaugu

SEQ ID NO: 58533 - RNA, 23 nt, Human
aguccaucccugcugcccuccca

SEQ ID NO: 58534 - RNA, 18 nt, Human
agugacccauuuauuccc

SEQ ID NO: 58535 - RNA, 24 nt, Human
agugauccacccuccuuggccucc

SEQ ID NO: 58536 - RNA, 20 nt, Human
agugcgauggcgcgaucucg

SEQ ID NO: 58537 - RNA, 24 nt, Human
agugcgauggcgcgaucucggcuc

SEQ ID NO: 58538 - RNA, 23 nt, Human
agugucauccugacugacugucc

SEQ ID NO: 58539 - RNA, 18 nt, Human
agugugagcauacccagu

SEQ ID NO: 58540 - RNA, 19 nt, Human
augcacaccacugugccca

SEQ ID NO: 58541 - RNA, 24 nt, Human
auuuuuauguuuuuaguagagaca

SEQ ID NO: 58542 - RNA, 27 nt, Human
caaaaaaaagggaacaaaauacgaugg

SEQ ID NO: 58543 - RNA, 21 nt, Human
caaaacaaaaaaaagggaaca

SEQ ID NO: 58544 - RNA, 26 nt, Human
caaacuccugaccuuaagugauccaa

SEQ ID NO: 58545 - RNA, 24 nt, Human
caaaguguugggauuacaggcaug

SEQ ID NO: 58546 - RNA, 22 nt, Human
caacaguaaagaccauucacua

SEQ ID NO: 58547 - RNA, 23 nt, Human
caaccaugucaguuugcugcccc

SEQ ID NO: 58548 - RNA, 20 nt, Human
caacgucaaccgugaggcag

SEQ ID NO: 58549 - RNA, 23 nt, Human
caagcaaauucuccugccucagc

SEQ ID NO: 58550 - RNA, 26 nt, Human
caagcucaaguccaucccugcugccc

SEQ ID NO: 58551 - RNA, 19 nt, Human
caaguccaucccugcugcc

SEQ ID NO: 58552 - RNA, 25 nt, Human
cacaacaaagaucugccgggaaaaa

SEQ ID NO: 58553 - RNA, 18 nt, Human
cacaccacugugcccagc

SEQ ID NO: 58554 - RNA, 26 nt, Human
cacaccccaucagcacuggguacccc

SEQ ID NO: 58555 - RNA, 21 nt, Human
cacuacaaccucugccuccca

SEQ ID NO: 58556 - RNA, 20 nt, Human
cagaucuaggagaacgcaga

SEQ ID NO: 58557 - RNA, 22 nt, Human
cagcacugaaaacgguagacac

SEQ ID NO: 58558 - RNA, 20 nt, Human
cagccuccugaguagcuggg

SEQ ID NO: 58559 - RNA, 20 nt, Human
cagcgugccacccgccuccu

SEQ ID NO: 58560 - RNA, 24 nt, Human
cagcugugucuuuuggguuuucgu

SEQ ID NO: 58561 - RNA, 20 nt, Human
caggaagggcauacccagua

SEQ ID NO: 58562 - RNA, 24 nt, Human
caggguuucgccauguuggccagg

SEQ ID NO: 58563 - RNA, 18 nt, Human
cauccugacugacugucc

SEQ ID NO: 58564 - RNA, 25 nt, Human
cauguccccacgugggcacacccca

SEQ ID NO: 58565 - RNA, 24 nt, Human
cauguuggccaggcuggucucaaa

SEQ ID NO: 58566 - RNA, 21 nt, Human
cauucaaccaugucaguuugc

SEQ ID NO: 58567 - RNA, 26 nt, Human
ccaaaacaaaacaaaaaaaagggaac

SEQ ID NO: 58568 - RNA, 23 nt, Human
ccaaaguguugggauuacaggca

SEQ ID NO: 58569 - RNA, 24 nt, Human
ccaaaguguugggauuacaggcau

SEQ ID NO: 58570 - RNA, 18 nt, Human
ccaccaugcccggccugc

SEQ ID NO: 58571 - RNA, 18 nt, Human
ccauaaacccugaaacaa

SEQ ID NO: 58572 - RNA, 19 nt, Human
ccauguuggccaggcuggu

SEQ ID NO: 58573 - RNA, 22 nt, Human
ccauguuggccaggcuggucuc

SEQ ID NO: 58574 - RNA, 24 nt, Human
cccaaaguguugggauuacaggca

SEQ ID NO: 58575 - RNA, 23 nt, Human
cccaaguagcugggacuacagau

SEQ ID NO: 58576 - RNA, 20 nt, Human
cccacacacaucugcugccg

SEQ ID NO: 58577 - RNA, 22 nt, Human
cccacacacaucugcugccgcg

SEQ ID NO: 58578 - RNA, 23 nt, Human
ccccacacacaucugcugccgcg

SEQ ID NO: 58579 - RNA, 19 nt, Human
ccccacgugggcacacccc

SEQ ID NO: 58580 - RNA, 21 nt, Human
cccucccacacaacaaagauu

SEQ ID NO: 58581 - RNA, 21 nt, Human
ccgcgaggggacucugcgggg

SEQ ID NO: 58582 - RNA, 21 nt, Human
ccgugggcugaccccacacac

SEQ ID NO: 58583 - RNA, 18 nt, Human
ccgugggcugaccccacc

SEQ ID NO: 58584 - RNA, 19 nt, Human
ccucccacacaacaaagau

SEQ ID NO: 58585 - RNA, 23 nt, Human
ccucccacacaacaaagaucugc

SEQ ID NO: 58586 - RNA, 24 nt, Human
ccugaccuuaagugauccacccuc

SEQ ID NO: 58587 - RNA, 22 nt, Human
ccugaguagcugggauuacagg

SEQ ID NO: 58588 - RNA, 23 nt, Human
ccugaguagcugggauuacaggu

SEQ ID NO: 58589 - RNA, 24 nt, Human
ccugaguagcugggauuacaggua

SEQ ID NO: 58590 - RNA, 23 nt, Human
ccugccucagccucccaaguagc

SEQ ID NO: 58591 - RNA, 23 nt, Human
ccugccucagccuccugaguagc

SEQ ID NO: 58592 - RNA, 24 nt, Human
ccugcugcccucccacacaacaaa

SEQ ID NO: 58593 - RNA, 21 nt, Human
cgacagaggccgcgggcggcg

SEQ ID NO: 58594 - RNA, 19 nt, Human
cgagggaaaagcaagccuu

SEQ ID NO: 58595 - RNA, 19 nt, Human
cgaugaagggggacaggag

SEQ ID NO: 58596 - RNA, 27 nt, Human
cgccauguuggccaggcuggucucaaa

SEQ ID NO: 58597 - RNA, 20 nt, Human
cggcggcggcggcuccuccu

SEQ ID NO: 58598 - RNA, 23 nt, Human
cggcggggccucgggcgcggcgg

SEQ ID NO: 58599 - RNA, 24 nt, Human
cucacuacaaccucugccucccag

SEQ ID NO: 58600 - RNA, 24 nt, Human
cucagccucccaaguagcugggac

SEQ ID NO: 58601 - RNA, 24 nt, Human
cucagccuccugaguagcugggau

SEQ ID NO: 58602 - RNA, 22 nt, Human
cucccacacaacaaagaucugc

SEQ ID NO: 58603 - RNA, 19 nt, Human
cucugcggggaggcgaggg

SEQ ID NO: 58604 - RNA, 19 nt, Human
cucuguugcucaggcugga

SEQ ID NO: 58605 - RNA, 21 nt, Human
cugaguagcugggauuacagg

SEQ ID NO: 58606 - RNA, 24 nt, Human
cugaguagcugggauuacagguau

SEQ ID NO: 58607 - RNA, 19 nt, Human
cugcagguauguugagcac

SEQ ID NO: 58608 - RNA, 23 nt, Human
cugccucagccucccaaguagcu

SEQ ID NO: 58609 - RNA, 23 nt, Human
cugccucagccuccugaguagcu

SEQ ID NO: 58610 - RNA, 21 nt, Human
cuggaugagacuuaaagcuuc

SEQ ID NO: 58611 - RNA, 20 nt, Human
cuguggccugcugugcaggg

SEQ ID NO: 58612 - RNA, 22 nt, Human
cuguggccugcugugcagggug

SEQ ID NO: 58613 - RNA, 20 nt, Human
cuuaagcgauccuccugccu

SEQ ID NO: 58614 - RNA, 24 nt, Human
cuugucacccaggcuggagugcga

SEQ ID NO: 58615 - RNA, 27 nt, Human
gaaaaaaccugcuuuccaaaacuuaga

SEQ ID NO: 58616 - RNA, 21 nt, Human
gaaauguauuauagccuaaaa

SEQ ID NO: 58617 - RNA, 20 nt, Human
gacaggagagucuguggccu

SEQ ID NO: 58618 - RNA, 21 nt, Human
gacaggagagucuguggccug

SEQ ID NO: 58619 - RNA, 24 nt, Human
gaccuuaagugauccacccuccuu

SEQ ID NO: 58620 - RNA, 18 nt, Human
gagcggggcgcgggccga

SEQ ID NO: 58621 - RNA, 19 nt, Human
gaguagcugggauuacagg

SEQ ID NO: 58622 - RNA, 18 nt, Human
gauuacaggcaugagcca

SEQ ID NO: 58623 - RNA, 21 nt, Human
gauuacaggcaugagccacca

SEQ ID NO: 58624 - RNA, 22 nt, Human
gauuacaggcaugagccaccau

SEQ ID NO: 58625 - RNA, 19 nt, Human
gauuacagguaugugcuac

SEQ ID NO: 58626 - RNA, 23 nt, Human
gccucccaggaucaagcaaauuc

SEQ ID NO: 58627 - RNA, 24 nt, Human
gcgauccuccugccucagccuccc

SEQ ID NO: 58628 - RNA, 19 nt, Human
gcgaugaagggggacagga

SEQ ID NO: 58629 - RNA, 20 nt, Human
gcucuguugcucaggcugga

SEQ ID NO: 58630 - RNA, 20 nt, Human
gcucuugucacccaggcugg

SEQ ID NO: 58631 - RNA, 21 nt, Human
gcucuugucacccaggcugga

SEQ ID NO: 58632 - RNA, 24 nt, Human
gcucuugucacccaggcuggagug

SEQ ID NO: 58633 - RNA, 21 nt, Human
gcugacagccacagcccaugu

SEQ ID NO: 58634 - RNA, 23 nt, Human
gcugcaguccuuugguuccaaga

SEQ ID NO: 58635 - RNA, 20 nt, Human
ggaaaagcaagccuucaggg

SEQ ID NO: 58636 - RNA, 18 nt, Human
ggaaaagccacucugagg

SEQ ID NO: 58637 - RNA, 24 nt, Human
ggacaggagagucuguggccuggu

SEQ ID NO: 58638 - RNA, 22 nt, Human
ggagauucuguccaucugucag

SEQ ID NO: 58639 - RNA, 24 nt, Human
ggauuacaggcaugagccaccaug

SEQ ID NO: 58640 - RNA, 20 nt, Human
ggccugccuuuuucuuucuc

SEQ ID NO: 58641 - RNA, 23 nt, Human
ggcuggucucaaacuccugaccu

SEQ ID NO: 58642 - RNA, 25 nt, Human
gggcugcagcgugccacccgccucc

SEQ ID NO: 58643 - RNA, 22 nt, Human
ggguuucgccauguuggccagg

SEQ ID NO: 58644 - RNA, 24 nt, Human
gugauccacccuccuuggccuccc

SEQ ID NO: 58645 - RNA, 18 nt, Human
guucacagcuaacauuau

SEQ ID NO: 58646 - RNA, 24 nt, Human
guuuugcucuguugcucaggcugg

SEQ ID NO: 58647 - RNA, 18 nt, Human
uaaaaugcaaaguuagga

SEQ ID NO: 58648 - RNA, 22 nt, Human
uaaacagaauguuagaucagga

SEQ ID NO: 58649 - RNA, 21 nt, Human
uaaacccugaaacaaagcaua

SEQ ID NO: 58650 - RNA, 24 nt, Human
uaaagagcacuuccuuaaaagcga

SEQ ID NO: 58651 - RNA, 27 nt, Human
uaagcgauccuccugccucagccuccc

SEQ ID NO: 58652 - RNA, 27 nt, Human
uaagcgauccuccugccucagccuccc

SEQ ID NO: 58653 - RNA, 24 nt, Human
uaauuuuuauguuuuuaguagaga

SEQ ID NO: 58654 - RNA, 23 nt, Human
uacaggcaugagccaccaugccc

SEQ ID NO: 58655 - RNA, 24 nt, Human
uacagguaugugcuaccaccccca

SEQ ID NO: 58656 - RNA, 26 nt, Human
uaccaaaacaaaacaaaaaaaaggga

SEQ ID NO: 58657 - RNA, 19 nt, Human
uacccuacagcaaccuggc

SEQ ID NO: 58658 - RNA, 22 nt, Human
uagagacaggguuucgccaugu

SEQ ID NO: 58659 - RNA, 24 nt, Human
uaguagagacaggguuucgccaug

SEQ ID NO: 58660 - RNA, 19 nt, Human
uauacugcacugcauggau

SEQ ID NO: 58661 - RNA, 23 nt, Human
uauagccuaaaauaaauuacaua

SEQ ID NO: 58662 - RNA, 21 nt, Human
uaugacuaaggauagcagaac

SEQ ID NO: 58663 - RNA, 21 nt, Human
uauucuuccauuguaggaucu

SEQ ID NO: 58664 - RNA, 18 nt, Human
ucacccaggcuggagugc

SEQ ID NO: 58665 - RNA, 18 nt, Human
ucacuacaaccucugccu

SEQ ID NO: 58666 - RNA, 19 nt, Human
ucacuacaaccucugccuc

SEQ ID NO: 58667 - RNA, 24 nt, Human
ucacuacaaccucugccucccagg

SEQ ID NO: 58668 - RNA, 19 nt, Human
ucacugcuaauguucagau

SEQ ID NO: 58669 - RNA, 22 nt, Human
ucagaucuaggagaacgcagag

SEQ ID NO: 58670 - RNA, 18 nt, Human
ucagccucccaaguagcu

SEQ ID NO: 58671 - RNA, 20 nt, Human
ucagccucccaaguagcugg

SEQ ID NO: 58672 - RNA, 20 nt, Human
ucagccuccugaguagcugg

SEQ ID NO: 58673 - RNA, 28 nt, Human
ucauuaccaaaacaaaacaaaaaaaagg

SEQ ID NO: 58674 - RNA, 21 nt, Human
uccacccuccuuggccuccca

SEQ ID NO: 58675 - RNA, 20 nt, Human
uccauaaacccugaaacaaa

SEQ ID NO: 58676 - RNA, 21 nt, Human
uccauaaacccugaaacaaag

SEQ ID NO: 58677 - RNA, 19 nt, Human
uccaucccugcugcccucc

SEQ ID NO: 58678 - RNA, 24 nt, Human
ucccaaaguguugggauuacaggc

SEQ ID NO: 58679 - RNA, 18 nt, Human
ucccaaguagcugggacu

SEQ ID NO: 58680 - RNA, 18 nt, Human
ucccacacaacaaagauc

SEQ ID NO: 58681 - RNA, 22 nt, Human
ucccaggaucaagcaaauucuc

SEQ ID NO: 58682 - RNA, 25 nt, Human
ucccaggaucaagcaaauucuccug

SEQ ID NO: 58683 - RNA, 27 nt, Human
uccuccugccucagccucccaaguagc

SEQ ID NO: 58684 - RNA, 24 nt, Human
uccugaguagcugggauuacaggu

SEQ ID NO: 58685 - RNA, 21 nt, Human
uccuuggccucccaaaguguu

SEQ ID NO: 58686 - RNA, 22 nt, Human
ucgccauguuggccaggcuggu

SEQ ID NO: 58687 - RNA, 24 nt, Human
ucgccauguuggccaggcuggucu

SEQ ID NO: 58688 - RNA, 24 nt, Human
ucuccugccucagccuccugagua

SEQ ID NO: 58689 - RNA, 19 nt, Human
ucugucagccugcugugga

SEQ ID NO: 58690 - RNA, 20 nt, Human
ucuguggccugcugugcagg

SEQ ID NO: 58691 - RNA, 22 nt, Human
ucuuucagucuaggaauucuga

SEQ ID NO: 58692 - RNA, 22 nt, Human
ugaaacugacaaaccuaugggc

SEQ ID NO: 58693 - RNA, 22 nt, Human
ugaaaugcuaucauucaaccau

SEQ ID NO: 58694 - RNA, 20 nt, Human
ugaauacaaauccauaaacc

SEQ ID NO: 58695 - RNA, 21 nt, Human
ugaauacaaauccauaaaccc

SEQ ID NO: 58696 - RNA, 23 nt, Human
ugaauacaaauccauaaacccug

SEQ ID NO: 58697 - RNA, 20 nt, Human
ugaccuuaagugauccaccc

SEQ ID NO: 58698 - RNA, 20 nt, Human
ugaccuuaagugauccaccc

SEQ ID NO: 58699 - RNA, 21 nt, Human
ugaccuuaagugauccacccu

SEQ ID NO: 58700 - RNA, 22 nt, Human
ugaccuuaagugauccacccuc

SEQ ID NO: 58701 - RNA, 27 nt, Human
ugacuaaaucaauuuagugaaccgugu

SEQ ID NO: 58702 - RNA, 22 nt, Human
ugacucgcucuaaugcgaccuu

SEQ ID NO: 58703 - RNA, 23 nt, Human
ugacucuaagcacacuuaauuuu

SEQ ID NO: 58704 - RNA, 18 nt, Human
ugagcacacaagcaauca

SEQ ID NO: 58705 - RNA, 18 nt, Human
ugaggcagcugugucuuc

SEQ ID NO: 58706 - RNA, 21 nt, Human
ugaggcagggguaugaaguca

SEQ ID NO: 58707 - RNA, 18 nt, Human
ugcaaaaacuuccaucug

SEQ ID NO: 58708 - RNA, 20 nt, Human
ugcaaaaacuuccaucuguu

SEQ ID NO: 58709 - RNA, 20 nt, Human
ugcaaaaacuuccaucuguu

SEQ ID NO: 58710 - RNA, 24 nt, Human
ugccucagccucccaaguagcugg

SEQ ID NO: 58711 - RNA, 24 nt, Human
ugccucagccuccugaguagcugg

SEQ ID NO: 58712 - RNA, 20 nt, Human
ugcuagagaauugacacgaa

SEQ ID NO: 58713 - RNA, 21 nt, Human
ugcuagagaauugacacgaaa

SEQ ID NO: 58714 - RNA, 24 nt, Human
ugcucuugucacccaggcuggagu

SEQ ID NO: 58715 - RNA, 24 nt, Human
ugcugccgcgaggggacucugcgg

SEQ ID NO: 58716 - RNA, 23 nt, Human
ugcuguggucacaggucuccguu

SEQ ID NO: 58717 - RNA, 24 nt, Human
uggagugcgauggcgcgaucucgg

SEQ ID NO: 58718 - RNA, 20 nt, Human
uggaguuuugcucuugucac

SEQ ID NO: 58719 - RNA, 24 nt, Human
uggccaggcuggucucaaacuccu

SEQ ID NO: 58720 - RNA, 24 nt, Human
uggcgcgaucucggcucacuacaa

SEQ ID NO: 58721 - RNA, 22 nt, Human
ugggacuacagaugcacaccac

SEQ ID NO: 58722 - RNA, 24 nt, Human
ugggacuacagaugcacaccacug

SEQ ID NO: 58723 - RNA, 18 nt, Human
ugggauuacaggcaugag

SEQ ID NO: 58724 - RNA, 22 nt, Human
ugggauuacaggcaugagccac

SEQ ID NO: 58725 - RNA, 23 nt, Human
ugggauuacaggcaugagccacc

SEQ ID NO: 58726 - RNA, 24 nt, Human
ugggauuacaggcaugagccacca

SEQ ID NO: 58727 - RNA, 25 nt, Human
ugggauuacaggcaugagccaccau

SEQ ID NO: 58728 - RNA, 22 nt, Human
ugggauuacagguaugugcuac

SEQ ID NO: 58729 - RNA, 24 nt, Human
ugggauuacagguaugugcuacca

SEQ ID NO: 58730 - RNA, 24 nt, Human
ugugcuuaagcgauccuccugccu

SEQ ID NO: 58731 - RNA, 23 nt, Human
uguucauugauacaauacguuuc

SEQ ID NO: 58732 - RNA, 21 nt, Human
uuaaaaaaguuagcucaugua

SEQ ID NO: 58733 - RNA, 25 nt, Human
uuaaaguaaaauuagaguaugaaac

SEQ ID NO: 58734 - RNA, 24 nt, Human
uuaguagagacaggguuucgccau

SEQ ID NO: 58735 - RNA, 27 nt, Human
uucaaaccaaaccuuucuacgggagau

SEQ ID NO: 58736 - RNA, 22 nt, Human
uugcucuguugcucaggcugga

SEQ ID NO: 58737 - RNA, 23 nt, Human
uugcucuugucacccaggcugga

SEQ ID NO: 58738 - RNA, 28 nt, Human
uuucauuaccaaaacaaaacaaaaaaaa

SEQ ID NO: 58739 - RNA, 24 nt, Human
uuucgccauguuggccaggcuggu

SEQ ID NO: 58740 - RNA, 24 nt, Human
uuugcucuugucacccaggcugga

SEQ ID NO: 58741 - RNA, 20 nt, Human
uuuguuuaaaaaaaaaaaaa

SEQ ID NO: 58742 - RNA, 23 nt, Human
uuuugcucuguugcucaggcugg

SEQ ID NO: 58743 - RNA, 24 nt, Human
uuuugcucuguugcucaggcugga

SEQ ID NO: 58744 - RNA, 24 nt, Human
uuuugcucuugucacccaggcugg

SEQ ID NO: 58745 - RNA, 22 nt, Human
uuuugugacaauuuaaaaaagu

SEQ ID NO: 58746 - RNA, 22 nt, Human
uuuuuaguagagacaggguuuc

SEQ ID NO: 58747 - RNA, 23 nt, Human
uuuuuaguagagacaggguuucg

SEQ ID NO: 58748 - RNA, 20 nt, Human
uuuuuauguuuuuaguagag

SEQ ID NO: 58749 - RNA, 18 nt, Human
aaaaaccaguaaauauug

SEQ ID NO: 58750 - RNA, 22 nt, Human
aauuuauaaguaaacaaaacua

SEQ ID NO: 58751 - RNA, 21 nt, Human
accagagcagaggaagcccca

SEQ ID NO: 58752 - RNA, 23 nt, Human
agagcagaggaagccccaauuuc

SEQ ID NO: 58753 - RNA, 25 nt, Human
agcacuugauacaaagacugaugau

SEQ ID NO: 58754 - RNA, 18 nt, Human
aggccuccaagcccgggc

SEQ ID NO: 58755 - RNA, 22 nt, Human
agugcaaggucucgcgaccacc

SEQ ID NO: 58756 - RNA, 25 nt, Human
auaagaacaauuuuuuucuagggau

SEQ ID NO: 58757 - RNA, 22 nt, Human
auaguuauaaaaagaguauuac

SEQ ID NO: 58758 - RNA, 21 nt, Human
caccagagcagaggaagcccc

SEQ ID NO: 58759 - RNA, 22 nt, Human
caccgacgacagcagacagcga

SEQ ID NO: 58760 - RNA, 23 nt, Human
cacuugauacaaagacugaugau

SEQ ID NO: 58761 - RNA, 18 nt, Human
cagcugugcccgaaaagu

SEQ ID NO: 58762 - RNA, 18 nt, Human
caguguguucuuggaauc

SEQ ID NO: 58763 - RNA, 23 nt, Human
ccaagaaguaaacaaaagggcaa

SEQ ID NO: 58764 - RNA, 24 nt, Human
ccaccgacgacagcagacagcgag

SEQ ID NO: 58765 - RNA, 18 nt, Human
cccagcgucccgagacag

SEQ ID NO: 58766 - RNA, 22 nt, Human
cucgcucauccgcggcgagcga

SEQ ID NO: 58767 - RNA, 23 nt, Human
cugaaaaugucaaauuacagcac

SEQ ID NO: 58768 - RNA, 22 nt, Human
gauaacuaucuguaccauaaaa

SEQ ID NO: 58769 - RNA, 21 nt, Human
gccgcgacgucacuuccgauu

SEQ ID NO: 58770 - RNA, 22 nt, Human
gcggcgagcggaucccgggcac

SEQ ID NO: 58771 - RNA, 23 nt, Human
ggccuccaagcccgggcuuguuu

SEQ ID NO: 58772 - RNA, 23 nt, Human
uaaaaaacguuccgcagcaaugc

SEQ ID NO: 58773 - RNA, 22 nt, Human
uaauucaacaauaagaacaauu

SEQ ID NO: 58774 - RNA, 21 nt, Human
uacacgagugaagaugacuag

SEQ ID NO: 58775 - RNA, 23 nt, Human
uagaauaauuucugaaaauguca

SEQ ID NO: 58776 - RNA, 21 nt, Human
uagcaaacccuauauaaagug

SEQ ID NO: 58777 - RNA, 24 nt, Human
ucaacaauaagaacaauuuuuuuc

SEQ ID NO: 58778 - RNA, 27 nt, Human
ucccagcgucccgagacaggagcccgc

SEQ ID NO: 58779 - RNA, 24 nt, Human
uccucuugguuuuguaagagcagu

SEQ ID NO: 58780 - RNA, 24 nt, Human
ucuuuuuuuugucccucucuccuu

SEQ ID NO: 58781 - RNA, 24 nt, Human
ugacuaggguagaauaauuucuga

SEQ ID NO: 58782 - RNA, 19 nt, Human
ugacuuaauacacgaguga

SEQ ID NO: 58783 - RNA, 24 nt, Human
ugcacuuuuuaauucaacaauaag

SEQ ID NO: 58784 - RNA, 19 nt, Human
uggaggggagacucuugca

SEQ ID NO: 58785 - RNA, 24 nt, Human
uguaguuucaauaacuaaaacauu

SEQ ID NO: 58786 - RNA, 24 nt, Human
ugucucccgcuggaggggagacuc

SEQ ID NO: 58787 - RNA, 24 nt, Human
uguguucuuggaaucuggauauuu

SEQ ID NO: 58788 - RNA, 18 nt, Human
uuaauacacgagugaaga

SEQ ID NO: 58789 - RNA, 23 nt, Human
uucccaucugaggccagcuucag

SEQ ID NO: 58790 - RNA, 19 nt, Human
uuuuuugucccucucuccu

SEQ ID NO: 58791 - RNA, 22 nt, Human
aaaaaacacagcuucuccugca

SEQ ID NO: 58792 - RNA, 22 nt, Human
aaaaaacacaguuuccccugca

SEQ ID NO: 58793 - RNA, 21 nt, Human
aaaacacuaucccuaucccaa

SEQ ID NO: 58794 - RNA, 19 nt, Human
aaacacagcuucuccugca

SEQ ID NO: 58795 - RNA, 24 nt, Human
aaacacaguuuccccugcaccucc

SEQ ID NO: 58796 - RNA, 20 nt, Human
aacacuccccccauacccca

SEQ ID NO: 58797 - RNA, 19 nt, Human
aacgagaaacgaacggcag

SEQ ID NO: 58798 - RNA, 20 nt, Human
aagagccccacguggacccc

SEQ ID NO: 58799 - RNA, 22 nt, Human
acacagcuucuccugcaccucu

SEQ ID NO: 58800 - RNA, 22 nt, Human
acccuaugggacacaggugaca

SEQ ID NO: 58801 - RNA, 19 nt, Human
acgcaguccacacaacagu

SEQ ID NO: 58802 - RNA, 19 nt, Human
acgccuggggcuucaucac

SEQ ID NO: 58803 - RNA, 20 nt, Human
agcugggaagggugcaggug

SEQ ID NO: 58804 - RNA, 18 nt, Human
aggaacacaggacaggac

SEQ ID NO: 58805 - RNA, 19 nt, Human
aggaacacaggacaggaca

SEQ ID NO: 58806 - RNA, 22 nt, Human
auggaaaaguauccugcccaca

SEQ ID NO: 58807 - RNA, 23 nt, Human
caaaacaucuuaggcaacgagaa

SEQ ID NO: 58808 - RNA, 22 nt, Human
caaauggaacuucuugucccuc

SEQ ID NO: 58809 - RNA, 19 nt, Human
cacgcaguccacacaacag

SEQ ID NO: 58810 - RNA, 20 nt, Human
cacguggacccccggucucc

SEQ ID NO: 58811 - RNA, 21 nt, Human
cagccgccuccugauggcacc

SEQ ID NO: 58812 - RNA, 18 nt, Human
cagcuuggauauuuccug

SEQ ID NO: 58813 - RNA, 21 nt, Human
caggacaagagccccacgugg

SEQ ID NO: 58814 - RNA, 23 nt, Human
caggacaagagccccacguggac

SEQ ID NO: 58815 - RNA, 18 nt, Human
caggacaggacaagagcc

SEQ ID NO: 58816 - RNA, 23 nt, Human
caggugagcagugcaucuacccc

SEQ ID NO: 58817 - RNA, 21 nt, Human
cagguuucaagcaacagcuga

SEQ ID NO: 58818 - RNA, 21 nt, Human
cauuuagagacuagacuaucc

SEQ ID NO: 58819 - RNA, 23 nt, Human
ccaaaucaccuaacaaaaaugag

SEQ ID NO: 58820 - RNA, 19 nt, Human
ccacaaggacucacccaag

SEQ ID NO: 58821 - RNA, 22 nt, Human
ccacacauacgccccgcaaagc

SEQ ID NO: 58822 - RNA, 19 nt, Human
ccagcgccgcggcggcugc

SEQ ID NO: 58823 - RNA, 25 nt, Human
ccaggccacgguacauguuugcacg

SEQ ID NO: 58824 - RNA, 26 nt, Human
ccaucauuuagagacuagacuaucca

SEQ ID NO: 58825 - RNA, 19 nt, Human
ccccauaccccaaaacacu

SEQ ID NO: 58826 - RNA, 21 nt, Human
ccccauaccccaaaacacuau

SEQ ID NO: 58827 - RNA, 24 nt, Human
cccuaucccaaaucaccuaacaaa

SEQ ID NO: 58828 - RNA, 23 nt, Human
cccucaagacuggugagcuccag

SEQ ID NO: 58829 - RNA, 18 nt, Human
cccugcaccucccucaag

SEQ ID NO: 58830 - RNA, 24 nt, Human
ccuaucccaaaucaccuaacaaaa

SEQ ID NO: 58831 - RNA, 21 nt, Human
ccucaggagagaguggaugcu

SEQ ID NO: 58832 - RNA, 18 nt, Human
ccugcaccucuuccccaa

SEQ ID NO: 58833 - RNA, 18 nt, Human
ccuggggccacaccccaa

SEQ ID NO: 58834 - RNA, 21 nt, Human
cgccucaguccccagcacuga

SEQ ID NO: 58835 - RNA, 19 nt, Human
cgguacauguuugcacgca

SEQ ID NO: 58836 - RNA, 27 nt, Human
cucaagacuggugagcuccagcaaccc

SEQ ID NO: 58837 - RNA, 22 nt, Human
cucagcgacccauuaggagcac

SEQ ID NO: 58838 - RNA, 19 nt, Human
gagaauuuuuuaaugacuc

SEQ ID NO: 58839 - RNA, 24 nt, Human
gccacaccccaaacugcugaggug

SEQ ID NO: 58840 - RNA, 22 nt, Human
gccgcggcggcugcccaggugc

SEQ ID NO: 58841 - RNA, 19 nt, Human
ggacaggacaagagcccca

SEQ ID NO: 58842 - RNA, 22 nt, Human
ggcucgccucaguccccagcac

SEQ ID NO: 58843 - RNA, 23 nt, Human
gggagaauuuuuuaaugacucuu

SEQ ID NO: 58844 - RNA, 23 nt, Human
gguacauuaauaucaaucucuau

SEQ ID NO: 58845 - RNA, 22 nt, Human
uaaaaaacacagcuucuccugc

SEQ ID NO: 58846 - RNA, 22 nt, Human
uaaaaaacacaguuuccccugc

SEQ ID NO: 58847 - RNA, 25 nt, Human
uaaaacaauuccauggaaacuuuaa

SEQ ID NO: 58848 - RNA, 23 nt, Human
uaccaugugggcacgugugugug

SEQ ID NO: 58849 - RNA, 22 nt, Human
uagguaagccacaacggggccc

SEQ ID NO: 58850 - RNA, 21 nt, Human
ucaccuaacaaaaaugagagc

SEQ ID NO: 58851 - RNA, 19 nt, Human
uccacacaacaguaaaggc

SEQ ID NO: 58852 - RNA, 20 nt, Human
uccauccccacgaggaacac

SEQ ID NO: 58853 - RNA, 21 nt, Human
uccauccccacgaggaacaca

SEQ ID NO: 58854 - RNA, 18 nt, Human
ucccaaaucaccuaacaa

SEQ ID NO: 58855 - RNA, 21 nt, Human
uccugcaccucuuccccaaga

SEQ ID NO: 58856 - RNA, 21 nt, Human
ucuuaggccuguggcucuaga

SEQ ID NO: 58857 - RNA, 21 nt, Human
ugagggggcucgccucagucc

SEQ ID NO: 58858 - RNA, 21 nt, Human
ugcaccucuuccccaagacug

SEQ ID NO: 58859 - RNA, 19 nt, Human
ugcacuccagcgaccugag

SEQ ID NO: 58860 - RNA, 19 nt, Human
ugcacuccagcgaccugag

SEQ ID NO: 58861 - RNA, 19 nt, Human
ugcacuccagcgaccugag

SEQ ID NO: 58862 - RNA, 20 nt, Human
ugccuagaucgaugauggag

SEQ ID NO: 58863 - RNA, 30 nt, Human
uggacccccggucuccgcaggcagccagga

SEQ ID NO: 58864 - RNA, 23 nt, Human
uggagcgggcaugugcaccugag

SEQ ID NO: 58865 - RNA, 22 nt, Human
ugggaagggugcaggugagcag

SEQ ID NO: 58866 - RNA, 18 nt, Human
ugggacacaggugacagu

SEQ ID NO: 58867 - RNA, 21 nt, Human
uuaacagguuucaagcaacag

SEQ ID NO: 58868 - RNA, 19 nt, Human
uucaagcaacagcugauaa

SEQ ID NO: 58869 - RNA, 23 nt, Human
uucaccuggaggggacacuccgg

SEQ ID NO: 58870 - RNA, 20 nt, Human
uuccccugcaccucccucaa

SEQ ID NO: 58871 - RNA, 22 nt, Human
uuccuuguugcauaaaacauug

SEQ ID NO: 58872 - RNA, 18 nt, Human
uugucccucacgcagucc

SEQ ID NO: 58873 - RNA, 18 nt, Human
aaacaaaaccagaaacaa

SEQ ID NO: 58874 - RNA, 22 nt, Human
aaacagaaauagaagcuauagg

SEQ ID NO: 58875 - RNA, 28 nt, Human
aaauaagaagcaaaaacagaagggaccc

SEQ ID NO: 58876 - RNA, 24 nt, Human
aacaauagaaggaccuugaaaaga

SEQ ID NO: 58877 - RNA, 20 nt, Human
aacagacucaaaacaacacu

SEQ ID NO: 58878 - RNA, 18 nt, Human
aacauaacacaaggacac

SEQ ID NO: 58879 - RNA, 19 nt, Human
aacauaacacaaggacaca

SEQ ID NO: 58880 - RNA, 18 nt, Human
aacuauauggcucaaagu

SEQ ID NO: 58881 - RNA, 21 nt, Human
aagaaaaaagggaauauguga

SEQ ID NO: 58882 - RNA, 23 nt, Human
aagcaaaaacagaaauagaagcu

SEQ ID NO: 58883 - RNA, 27 nt, Human
aagcaaaaacagaaauagaagggaccc

SEQ ID NO: 58884 - RNA, 20 nt, Human
acaaaacaauagaaggaccc

SEQ ID NO: 58885 - RNA, 20 nt, Human
acaaugaaauaguaagccac

SEQ ID NO: 58886 - RNA, 20 nt, Human
acagaaaaguccacauggug

SEQ ID NO: 58887 - RNA, 22 nt, Human
agaaaaaagggaauaugugaug

SEQ ID NO: 58888 - RNA, 19 nt, Human
agcaagucaugcacccccc

SEQ ID NO: 58889 - RNA, 21 nt, Human
agcaagucaugcaccccccau

SEQ ID NO: 58890 - RNA, 18 nt, Human
agcucucccgcgcugcag

SEQ ID NO: 58891 - RNA, 24 nt, Human
aggacacauacauagccaaagaca

SEQ ID NO: 58892 - RNA, 23 nt, Human
aggcgcugggguccgcgcgagcc

SEQ ID NO: 58893 - RNA, 21 nt, Human
auaguaagccacaccaaaggc

SEQ ID NO: 58894 - RNA, 22 nt, Human
aucgucccucagcacucugcug

SEQ ID NO: 58895 - RNA, 21 nt, Human
augcuaaucaggaugauggag

SEQ ID NO: 58896 - RNA, 23 nt, Human
caaacaaaaccagaaacaacaua

SEQ ID NO: 58897 - RNA, 21 nt, Human
caaacaaaggcucauacaaua

SEQ ID NO: 58898 - RNA, 18 nt, Human
caacauaacacaaggaca

SEQ ID NO: 58899 - RNA, 19 nt, Human
caacauaacacaaggacac

SEQ ID NO: 58900 - RNA, 24 nt, Human
caacauaacacaaggacacauaca

SEQ ID NO: 58901 - RNA, 20 nt, Human
caaugcuacacaagguuuga

SEQ ID NO: 58902 - RNA, 25 nt, Human
cacaaggacacauacauagccaaag

SEQ ID NO: 58903 - RNA, 22 nt, Human
cacccuuucuguuuuaagaagg

SEQ ID NO: 58904 - RNA, 23 nt, Human
cacuguacaacauaacacaagga

SEQ ID NO: 58905 - RNA, 18 nt, Human
cagcaagaaggguggggc

SEQ ID NO: 58906 - RNA, 18 nt, Human
caguaaaaaggaguaaca

SEQ ID NO: 58907 - RNA, 21 nt, Human
caucauguccaguaaaaagga

SEQ ID NO: 58908 - RNA, 24 nt, Human
caugcaccccccauuagaagccuc

SEQ ID NO: 58909 - RNA, 20 nt, Human
cauucugcuucuuccucacu

SEQ ID NO: 58910 - RNA, 21 nt, Human
ccaaagacauauucauuacag

SEQ ID NO: 58911 - RNA, 19 nt, Human
ccacccuuucuguuuuaag

SEQ ID NO: 58912 - RNA, 24 nt, Human
cccauagguucuuucaacaugaag

SEQ ID NO: 58913 - RNA, 19 nt, Human
ccccggacgccaccuggug

SEQ ID NO: 58914 - RNA, 24 nt, Human
ccccggacgccaccuggugcagcu

SEQ ID NO: 58915 - RNA, 20 nt, Human
cccgcgcugcagcucacagg

SEQ ID NO: 58916 - RNA, 22 nt, Human
cccuugucuuuaugaucaggag

SEQ ID NO: 58917 - RNA, 26 nt, Human
ccuuucuguuuuaagaaauauaaaga

SEQ ID NO: 58918 - RNA, 24 nt, Human
cgcgcugcagcucacaggcagcga

SEQ ID NO: 58919 - RNA, 23 nt, Human
cucaaacaaaggcucauacaaua

SEQ ID NO: 58920 - RNA, 20 nt, Human
cucaaccuaauauuuaagac

SEQ ID NO: 58921 - RNA, 25 nt, Human
gaaaaagugcucugcggaagcccug

SEQ ID NO: 58922 - RNA, 22 nt, Human
gacacauacauagccaaagaca

SEQ ID NO: 58923 - RNA, 20 nt, Human
gcuauagcauaauaacaucu

SEQ ID NO: 58924 - RNA, 18 nt, Human
gcucugcggaagcccugg

SEQ ID NO: 58925 - RNA, 22 nt, Human
ggaguaacaaauagaaaugagg

SEQ ID NO: 58926 - RNA, 20 nt, Human
gggaagacugaaaagacccc

SEQ ID NO: 58927 - RNA, 21 nt, Human
gggaagacugaaaagaccccu

SEQ ID NO: 58928 - RNA, 22 nt, Human
gggacagcaagaaggguggggc

SEQ ID NO: 58929 - RNA, 22 nt, Human
gggcaccuggggcgagagagcg

SEQ ID NO: 58930 - RNA, 27 nt, Human
ggggacagcaagaaggguggggccggu

SEQ ID NO: 58931 - RNA, 22 nt, Human
guaaauaauaacagacucaaaa

SEQ ID NO: 58932 - RNA, 24 nt, Human
guagacaucaaaagaaaaaaggga

SEQ ID NO: 58933 - RNA, 26 nt, Human
uaagagaaauaagaagcaaaaacaga

SEQ ID NO: 58934 - RNA, 24 nt, Human
uaauacuugugacuauuuucuaga

SEQ ID NO: 58935 - RNA, 20 nt, Human
uagaaaaguccaguguggug

SEQ ID NO: 58936 - RNA, 20 nt, Human
uagaaggaccuugaaaagau

SEQ ID NO: 58937 - RNA, 19 nt, Human
uagacaucaaaagaaaaaa

SEQ ID NO: 58938 - RNA, 20 nt, Human
uaguaagccacaccaaaggc

SEQ ID NO: 58939 - RNA, 18 nt, Human
uauugcuucuguauagug

SEQ ID NO: 58940 - RNA, 23 nt, Human
ucaaccuaauauuuaagacuauc

SEQ ID NO: 58941 - RNA, 19 nt, Human
ucagugaauguugacugag

SEQ ID NO: 58942 - RNA, 24 nt, Human
ucauuacagugaauaucuccuggg

SEQ ID NO: 58943 - RNA, 23 nt, Human
uccuggggguagugagggaauaa

SEQ ID NO: 58944 - RNA, 19 nt, Human
ucuauaguaaaauucgugc

SEQ ID NO: 58945 - RNA, 23 nt, Human
ucuuucaacaugaagcuuuccag

SEQ ID NO: 58946 - RNA, 24 nt, Human
ugacugagaucuauauugugccau

SEQ ID NO: 58947 - RNA, 19 nt, Human
ugaggagagggaagacuga

SEQ ID NO: 58948 - RNA, 23 nt, Human
ugagggaauaaacaugcuaauca

SEQ ID NO: 58949 - RNA, 23 nt, Human
ugcaaugcuacacaagguuugag

SEQ ID NO: 58950 - RNA, 20 nt, Human
ugcuaaucaggaugauggag

SEQ ID NO: 58951 - RNA, 18 nt, Human
uggaccaugaauguaaaa

SEQ ID NO: 58952 - RNA, 19 nt, Human
ugggugggugcacacaaug

SEQ ID NO: 58953 - RNA, 19 nt, Human
ugguagaaaauaugaauag

SEQ ID NO: 58954 - RNA, 21 nt, Human
uguccaguaaaaaggaguaac

SEQ ID NO: 58955 - RNA, 18 nt, Human
uguggugggugggugggu

SEQ ID NO: 58956 - RNA, 28 nt, Human
uguguaaauaauaacagacucaaaacaa

SEQ ID NO: 58957 - RNA, 23 nt, Human
uuagaaccagcaagucaugcacc

SEQ ID NO: 58958 - RNA, 24 nt, Human
uuagaagccucacugaaggucuga

SEQ ID NO: 58959 - RNA, 23 nt, Human
uuauaagagaaauaagaagcaaa

SEQ ID NO: 58960 - RNA, 22 nt, Human
aaacagucaaaucacaauaggg

SEQ ID NO: 58961 - RNA, 20 nt, Human
aaucaauaaaccccgaaccc

SEQ ID NO: 58962 - RNA, 23 nt, Human
aucccuccccccgcaacccccag

SEQ ID NO: 58963 - RNA, 20 nt, Human
auucaaucaauaaaccccga

SEQ ID NO: 58964 - RNA, 22 nt, Human
caaucagaaaaaaauaaguuuc

SEQ ID NO: 58965 - RNA, 28 nt, Human
cacccgccaucccuccccccgcaacccc

SEQ ID NO: 58966 - RNA, 19 nt, Human
cagggggcaggauuggagg

SEQ ID NO: 58967 - RNA, 20 nt, Human
cagggggcaggauuggaggg

SEQ ID NO: 58968 - RNA, 19 nt, Human
caguaaaaauaguauuuua

SEQ ID NO: 58969 - RNA, 24 nt, Human
caguacacucuuccccucucguuc

SEQ ID NO: 58970 - RNA, 22 nt, Human
cccacagcaacguuacaaucag

SEQ ID NO: 58971 - RNA, 23 nt, Human
cccacggccgcgcguuuuaggac

SEQ ID NO: 58972 - RNA, 22 nt, Human
ccccacccgccaucccuccccc

SEQ ID NO: 58973 - RNA, 23 nt, Human
ccccacccgccaucccucccccc

SEQ ID NO: 58974 - RNA, 24 nt, Human
ccccaguacacucuuccccucucg

SEQ ID NO: 58975 - RNA, 22 nt, Human
cccccacccgccaucccucccc

SEQ ID NO: 58976 - RNA, 23 nt, Human
cccccacccgccaucccuccccc

SEQ ID NO: 58977 - RNA, 23 nt, Human
cccccgcaacccccaguacacuc

SEQ ID NO: 58978 - RNA, 20 nt, Human
cccuccccccgcaaccccca

SEQ ID NO: 58979 - RNA, 18 nt, Human
cgcucucucucugcagag

SEQ ID NO: 58980 - RNA, 22 nt, Human
cggaauucaaucaauaaacccc

SEQ ID NO: 58981 - RNA, 20 nt, Human
cucuuccccucucguuccca

SEQ ID NO: 58982 - RNA, 21 nt, Human
cugcagaggcucccgcgccgg

SEQ ID NO: 58983 - RNA, 23 nt, Human
gaacccacggccgcgcguuuuag

SEQ ID NO: 58984 - RNA, 20 nt, Human
gcaggauuggaggggggggg

SEQ ID NO: 58985 - RNA, 19 nt, Human
ggaggggggggggagaggg

SEQ ID NO: 58986 - RNA, 23 nt, Human
ggggagaggggauauggguaaaa

SEQ ID NO: 58987 - RNA, 23 nt, Human
gggggggggagaggggauauggg

SEQ ID NO: 58988 - RNA, 28 nt, Human
ucagaaaaaaauaaguuucagggggcaa

SEQ ID NO: 58989 - RNA, 22 nt, Human
uccccccgcaacccccaguaca

SEQ ID NO: 58990 - RNA, 18 nt, Human
uggaggggggggggagag

SEQ ID NO: 58991 - RNA, 24 nt, Human
uggaggggggggggagaggggaua

SEQ ID NO: 58992 - RNA, 19 nt, Human
uggcaguaaaaauaguauu

SEQ ID NO: 58993 - RNA, 19 nt, Human
uuccccucucguucccaca

SEQ ID NO: 58994 - RNA, 18 nt, Human
uuggaggggggggggaga

SEQ ID NO: 58995 - RNA, 21 nt, Human
uuuuuuuuuuuuuaaagagug

SEQ ID NO: 58996 - RNA, 19 nt, Human
uuuuuuuuuuuuuuuuuaa

SEQ ID NO: 58997 - RNA, 20 nt, Human
acaggugccaugccaggccu

SEQ ID NO: 58998 - RNA, 19 nt, Human
agaacggagcagccccagg

SEQ ID NO: 58999 - RNA, 20 nt, Human
agagagaacgugggcuggag

SEQ ID NO: 59000 - RNA, 22 nt, Human
agagcuucugcucaucuggccc

SEQ ID NO: 59001 - RNA, 18 nt, Human
agaggguacagggcggcc

SEQ ID NO: 59002 - RNA, 18 nt, Human
aggcagagagaacguggg

SEQ ID NO: 59003 - RNA, 21 nt, Human
aggcggcucagggagccucag

SEQ ID NO: 59004 - RNA, 18 nt, Human
agggagccucaggccagg

SEQ ID NO: 59005 - RNA, 19 nt, Human
aggggcugggaggugcuca

SEQ ID NO: 59006 - RNA, 19 nt, Human
aucagccccagggcacugg

SEQ ID NO: 59007 - RNA, 22 nt, Human
cagagagaacgugggcuggaga

SEQ ID NO: 59008 - RNA, 23 nt, Human
cagccugggucaucaggaacuag

SEQ ID NO: 59009 - RNA, 20 nt, Human
cagggcacugggcgacaggu

SEQ ID NO: 59010 - RNA, 21 nt, Human
caucaggaacuagacuggcuc

SEQ ID NO: 59011 - RNA, 25 nt, Human
cccacaacaggcagacugaucaacg

SEQ ID NO: 59012 - RNA, 19 nt, Human
cccccagcaaggccguuca

SEQ ID NO: 59013 - RNA, 18 nt, Human
cccuguugauuccucaga

SEQ ID NO: 59014 - RNA, 20 nt, Human
ccucgggcuccaggaaugga

SEQ ID NO: 59015 - RNA, 18 nt, Human
cggcucagggagccucag

SEQ ID NO: 59016 - RNA, 26 nt, Human
cuagaaauccuuuauuuacauuuucu

SEQ ID NO: 59017 - RNA, 24 nt, Human
cuagggcgggguuggcaugagggg

SEQ ID NO: 59018 - RNA, 20 nt, Human
cucacaggcagagagaacgu

SEQ ID NO: 59019 - RNA, 20 nt, Human
cuuagaaaaaaauauacaga

SEQ ID NO: 59020 - RNA, 21 nt, Human
cuucccugagaucagccccag

SEQ ID NO: 59021 - RNA, 21 nt, Human
gccccagggcacugggcgaca

SEQ ID NO: 59022 - RNA, 19 nt, Human
gcucaucuggcccuggagc

SEQ ID NO: 59023 - RNA, 23 nt, Human
gcucaucuggcccuggagcuggg

SEQ ID NO: 59024 - RNA, 22 nt, Human
ggacacaugugggcaccuugca

SEQ ID NO: 59025 - RNA, 23 nt, Human
ggaggacacuggugccccuuaaa

SEQ ID NO: 59026 - RNA, 19 nt, Human
gggauggacacaugugggc

SEQ ID NO: 59027 - RNA, 21 nt, Human
gggcaggggcugggaggugcu

SEQ ID NO: 59028 - RNA, 26 nt, Human
gggguuggcaugaggggcaggggcug

SEQ ID NO: 59029 - RNA, 27 nt, Human
gggguuggcaugaggggcaggggcugg

SEQ ID NO: 59030 - RNA, 24 nt, Human
ggugaugguggggaggcggcucag

SEQ ID NO: 59031 - RNA, 24 nt, Human
uagaaauccuuuauuuacauuuuc

SEQ ID NO: 59032 - RNA, 20 nt, Human
uagggucuuuagggaaaggu

SEQ ID NO: 59033 - RNA, 19 nt, Human
ucaggccaggcagagaacg

SEQ ID NO: 59034 - RNA, 23 nt, Human
ucaucuagaaauccuuuauuuac

SEQ ID NO: 59035 - RNA, 20 nt, Human
uccuugaggggaggacacug

SEQ ID NO: 59036 - RNA, 22 nt, Human
ucuuagaaaaaaauauacagau

SEQ ID NO: 59037 - RNA, 18 nt, Human
uucccugagaucagcccc

SEQ ID NO: 59038 - RNA, 19 nt, Human
uucccugagaucagcccca

SEQ ID NO: 59039 - RNA, 18 nt, Human
aacauuuuuaaaaaaugg

SEQ ID NO: 59040 - RNA, 19 nt, Human
cauuuuauuuucagcuaca

SEQ ID NO: 59041 - RNA, 22 nt, Human
ggcuauauuuuucagcauguag

SEQ ID NO: 59042 - RNA, 26 nt, Human
uaaaaaugauuuaaaggcuauauuuu

SEQ ID NO: 59043 - RNA, 24 nt, Human
uagaacaacuuguauaggguuuua

SEQ ID NO: 59044 - RNA, 19 nt, Human
ugcaaagaacuaaagagaa

SEQ ID NO: 59045 - RNA, 23 nt, Human
uugaaaaagugucuuuaucucua

SEQ ID NO: 59046 - RNA, 22 nt, Human
agaaacagacauucuuuuggcc

SEQ ID NO: 59047 - RNA, 21 nt, Human
agggaugggguagaaaaggca

SEQ ID NO: 59048 - RNA, 20 nt, Human
agggguggaagacaggccua

SEQ ID NO: 59049 - RNA, 19 nt, Human
ccacggggacuccggacgc

SEQ ID NO: 59050 - RNA, 21 nt, Human
ccuagggcugggucccacucc

SEQ ID NO: 59051 - RNA, 19 nt, Human
cggcgccuggguucugccu

SEQ ID NO: 59052 - RNA, 21 nt, Human
cuagggcugggucccacuccc

SEQ ID NO: 59053 - RNA, 22 nt, Human
cugguguugccggcaggugggc

SEQ ID NO: 59054 - RNA, 24 nt, Human
gacccagguccuguggcacacuau

SEQ ID NO: 59055 - RNA, 20 nt, Human
gccuagggcugggucccacu

SEQ ID NO: 59056 - RNA, 18 nt, Human
gcgggaguggcucucucc

SEQ ID NO: 59057 - RNA, 18 nt, Human
gggcgcggcgccuggguu

SEQ ID NO: 59058 - RNA, 24 nt, Human
gucccgggcgcggcgccuggguuc

SEQ ID NO: 59059 - RNA, 19 nt, Human
ucuuuuggccuuuuccugg

SEQ ID NO: 59060 - RNA, 22 nt, Human
ugaaacaucuauuuuagcagca

SEQ ID NO: 59061 - RNA, 21 nt, Human
ugggcgggaguggcucucucc

SEQ ID NO: 59062 - RNA, 21 nt, Human
uucagaaaaaugaaacaucua

SEQ ID NO: 59063 - RNA, 24 nt, Human
uuucagaaaaaugaaacaucuauu

SEQ ID NO: 59064 - RNA, 23 nt, Human
uuuccuggcacugguguugccgg

SEQ ID NO: 59065 - RNA, 25 nt, Human
aggcaacuaaaaugagguugggggu

SEQ ID NO: 59066 - RNA, 19 nt, Human
cacaguacacaggaggcaa

SEQ ID NO: 59067 - RNA, 22 nt, Human
ccgagagcugagagcgucccca

SEQ ID NO: 59068 - RNA, 19 nt, Human
cuaaaaugagguugggggu

SEQ ID NO: 59069 - RNA, 25 nt, Human
gucacccucacagggauggccacgg

SEQ ID NO: 59070 - RNA, 20 nt, Human
uuuucuagaccuguuagcug

SEQ ID NO: 59071 - RNA, 19 nt, Human
acauuauaaaugagaugcu

SEQ ID NO: 59072 - RNA, 22 nt, Human
cccaucguggaccuuuggagau

SEQ ID NO: 59073 - RNA, 28 nt, Human
cgcuuuuguuguuguuguuauagaacaa

SEQ ID NO: 59074 - RNA, 21 nt, Human
uaacuuugaaagcagaaauau

SEQ ID NO: 59075 - RNA, 20 nt, Human
ugccuugagcugagaucacc

SEQ ID NO: 59076 - RNA, 20 nt, Human
uggagcuguugggaaagccc

SEQ ID NO: 59077 - RNA, 21 nt, Human
uugagcugagaucacacuaau

SEQ ID NO: 59078 - RNA, 22 nt, Human
uuguuguuguuguuauagaaca

SEQ ID NO: 59079 - RNA, 18 nt, Human
uuuucaauuucauuuaug

SEQ ID NO: 59080 - RNA, 18 nt, Human
aaaaacuuaguaaggauc

SEQ ID NO: 59081 - RNA, 28 nt, Human
aaacacaaaguagaaaguaagggacccc

SEQ ID NO: 59082 - RNA, 21 nt, Human
aagaucagaguucagccaccc

SEQ ID NO: 59083 - RNA, 24 nt, Human
aaugauaauagcaguguagaaaaa

SEQ ID NO: 59084 - RNA, 26 nt, Human
acuacagaaagugauuucaacauaag

SEQ ID NO: 59085 - RNA, 22 nt, Human
acucuaaaaauuggauuaggga

SEQ ID NO: 59086 - RNA, 18 nt, Human
agaauccuccuguccuuc

SEQ ID NO: 59087 - RNA, 18 nt, Human
aggaggcagcuguaggcg

SEQ ID NO: 59088 - RNA, 19 nt, Human
aggcguuuuaauuggaaau

SEQ ID NO: 59089 - RNA, 22 nt, Human
augaagaaacuacuagccacuc

SEQ ID NO: 59090 - RNA, 22 nt, Human
caagaucagaguucagccaccc

SEQ ID NO: 59091 - RNA, 21 nt, Human
caagcuggauuaagacauuag

SEQ ID NO: 59092 - RNA, 21 nt, Human
cagccacccaagcagaaguuc

SEQ ID NO: 59093 - RNA, 18 nt, Human
caguguagaaaaaugaag

SEQ ID NO: 59094 - RNA, 24 nt, Human
ccuccuguccuucugggauuuuua

SEQ ID NO: 59095 - RNA, 21 nt, Human
cuuauaagcuuugaaaugcaa

SEQ ID NO: 59096 - RNA, 24 nt, Human
gacauuaacuauaauaauauggaa

SEQ ID NO: 59097 - RNA, 28 nt, Human
gacuacagaaagugauuucaacauaaga

SEQ ID NO: 59098 - RNA, 18 nt, Human
gagcauuacaucauuccc

SEQ ID NO: 59099 - RNA, 20 nt, Human
gauuaagacauuaacuauaa

SEQ ID NO: 59100 - RNA, 22 nt, Human
ggaagucucccaugaaaaacuu

SEQ ID NO: 59101 - RNA, 19 nt, Human
ggaguugaaaggcacagug

SEQ ID NO: 59102 - RNA, 20 nt, Human
uaaagcaucauaaugacuaa

SEQ ID NO: 59103 - RNA, 18 nt, Human
uaauaauacagacagucu

SEQ ID NO: 59104 - RNA, 25 nt, Human
uacuuugacuacagaaagugauuuc

SEQ ID NO: 59105 - RNA, 20 nt, Human
uaggaggcagcuguaggcgg

SEQ ID NO: 59106 - RNA, 26 nt, Human
uaguuugaagcuuauuuuuuuuucca

SEQ ID NO: 59107 - RNA, 19 nt, Human
uauggacaaaaccuaaaaa

SEQ ID NO: 59108 - RNA, 21 nt, Human
uauggacaaaaccuaaaaaaa

SEQ ID NO: 59109 - RNA, 20 nt, Human
ucacugaaaagaaaauaugg

SEQ ID NO: 59110 - RNA, 26 nt, Human
ucucccaugaaaaacuuaguaaggau

SEQ ID NO: 59111 - RNA, 22 nt, Human
ugaaacacaaaguagaaaguaa

SEQ ID NO: 59112 - RNA, 18 nt, Human
ugaaaggcacagugcaaa

SEQ ID NO: 59113 - RNA, 21 nt, Human
ugaaaugcaaguacagcuuua

SEQ ID NO: 59114 - RNA, 20 nt, Human
ugcaaguacagcuuuaaagc

SEQ ID NO: 59115 - RNA, 23 nt, Human
uggacaaaaccuaaaaaaagaga

SEQ ID NO: 59116 - RNA, 30 nt, Human
uggacaaaaccuaaaaaaagagauuuguaa

SEQ ID NO: 59117 - RNA, 21 nt, Human
uggauuagggaaaaaagugau

SEQ ID NO: 59118 - RNA, 25 nt, Human
ugugaaacacaaaguagaaaguaau

SEQ ID NO: 59119 - RNA, 22 nt, Human
uucaaaguguugagaauccucc

SEQ ID NO: 59120 - RNA, 22 nt, Human
uugguauacuuugacuacagaa

SEQ ID NO: 59121 - RNA, 23 nt, Human
aaaagcacucuagccucuuaaaa

SEQ ID NO: 59122 - RNA, 22 nt, Human
aagcaacggaaacgccagcgcc

SEQ ID NO: 59123 - RNA, 19 nt, Human
aagcacuggcauacaaaug

SEQ ID NO: 59124 - RNA, 21 nt, Human
aagcaggaccagacuguggga

SEQ ID NO: 59125 - RNA, 22 nt, Human
aaggugcugaaggaaggcagug

SEQ ID NO: 59126 - RNA, 22 nt, Human
aauaacauuuccaagaguucac

SEQ ID NO: 59127 - RNA, 22 nt, Human
agacgcugaaggauccgcagcu

SEQ ID NO: 59128 - RNA, 20 nt, Human
augcagcuaaaggugcugaa

SEQ ID NO: 59129 - RNA, 24 nt, Human
caccuagacugauccaagcaacgg

SEQ ID NO: 59130 - RNA, 19 nt, Human
cagcagggagcucuucccc

SEQ ID NO: 59131 - RNA, 25 nt, Human
caggaccagacugugggacccaagu

SEQ ID NO: 59132 - RNA, 23 nt, Human
ccccgaacccccgggagagcggc

SEQ ID NO: 59133 - RNA, 23 nt, Human
cgccagcgccccaccccggcccu

SEQ ID NO: 59134 - RNA, 21 nt, Human
cucaggucaggggaaggugaa

SEQ ID NO: 59135 - RNA, 18 nt, Human
cugauccaagcaacggaa

SEQ ID NO: 59136 - RNA, 19 nt, Human
cuucuaugacguguaugug

SEQ ID NO: 59137 - RNA, 21 nt, Human
gacugauccaagcaacggaaa

SEQ ID NO: 59138 - RNA, 20 nt, Human
gagcaugcuaguaugaauaa

SEQ ID NO: 59139 - RNA, 25 nt, Human
gccccgaacccccgggagagcggcg

SEQ ID NO: 59140 - RNA, 19 nt, Human
ggaaacgccagcgccccac

SEQ ID NO: 59141 - RNA, 20 nt, Human
ggaaggugaagcaggaccag

SEQ ID NO: 59142 - RNA, 26 nt, Human
gguggugcaggcacacagcagggagc

SEQ ID NO: 59143 - RNA, 25 nt, Human
guggugcaggcacacagcagggagc

SEQ ID NO: 59144 - RNA, 22 nt, Human
uaaaaaaggcuaaaagcacucu

SEQ ID NO: 59145 - RNA, 20 nt, Human
uaauauaaauggaguuuuua

SEQ ID NO: 59146 - RNA, 20 nt, Human
uagacugauccaagcaacgg

SEQ ID NO: 59147 - RNA, 23 nt, Human
uagacugauccaagcaacggaaa

SEQ ID NO: 59148 - RNA, 18 nt, Human
ucagaaagaagcaccacu

SEQ ID NO: 59149 - RNA, 19 nt, Human
uccaagcaacggaaacgcc

SEQ ID NO: 59150 - RNA, 22 nt, Human
ugccccgaacccccgggagagc

SEQ ID NO: 59151 - RNA, 23 nt, Human
uucuaugacguguauguguuggu

SEQ ID NO: 59152 - RNA, 20 nt, Human
aacccaaccccuccccccac

SEQ ID NO: 59153 - RNA, 21 nt, Human
aacccaaccccuccccccacc

SEQ ID NO: 59154 - RNA, 23 nt, Human
aacccaaccccuccccccacccc

SEQ ID NO: 59155 - RNA, 26 nt, Human
aacccaaccccuccccccaccccugg

SEQ ID NO: 59156 - RNA, 23 nt, Human
aagugcccgccaaagcuguggcc

SEQ ID NO: 59157 - RNA, 18 nt, Human
acccaaccccucccccca

SEQ ID NO: 59158 - RNA, 22 nt, Human
acccaaccccuccccccacccc

SEQ ID NO: 59159 - RNA, 18 nt, Human
agagcccaacccaacccc

SEQ ID NO: 59160 - RNA, 20 nt, Human
agauaagagcccaacccaac

SEQ ID NO: 59161 - RNA, 22 nt, Human
augaagauaagagcccaaccca

SEQ ID NO: 59162 - RNA, 19 nt, Human
auggcccgugggaguggga

SEQ ID NO: 59163 - RNA, 19 nt, Human
caacccaaccccucccccc

SEQ ID NO: 59164 - RNA, 20 nt, Human
caacccaaccccucccccca

SEQ ID NO: 59165 - RNA, 22 nt, Human
caacccaaccccuccccccacc

SEQ ID NO: 59166 - RNA, 23 nt, Human
caacccaaccccuccccccaccc

SEQ ID NO: 59167 - RNA, 24 nt, Human
caaccccuccccccaccccugccc

SEQ ID NO: 59168 - RNA, 23 nt, Human
caccccugccccuuccuuagucu

SEQ ID NO: 59169 - RNA, 18 nt, Human
cagcagaauccagccgca

SEQ ID NO: 59170 - RNA, 24 nt, Human
cagcagaauccagccgcagcggag

SEQ ID NO: 59171 - RNA, 23 nt, Human
cagccgcagcggaggccucgggu

SEQ ID NO: 59172 - RNA, 20 nt, Human
cauuucuuggcagaagugcc

SEQ ID NO: 59173 - RNA, 21 nt, Human
ccaaccccuccccccaccccu

SEQ ID NO: 59174 - RNA, 25 nt, Human
ccaaccccuccccccaccccugccc

SEQ ID NO: 59175 - RNA, 24 nt, Human
cccaaccccuccccccaccccugc

SEQ ID NO: 59176 - RNA, 20 nt, Human
ccccaccccugccccuuccu

SEQ ID NO: 59177 - RNA, 21 nt, Human
ccccuccccccaccccugccc

SEQ ID NO: 59178 - RNA, 23 nt, Human
ccgguucgcagcagaauccagcc

SEQ ID NO: 59179 - RNA, 21 nt, Human
cgcacgggcggacucgaggac

SEQ ID NO: 59180 - RNA, 21 nt, Human
cugccccuuccuuagucucug

SEQ ID NO: 59181 - RNA, 22 nt, Human
cuggugcugauaaccauuucuu

SEQ ID NO: 59182 - RNA, 23 nt, Human
gagcguuuccuaagcuccaugaa

SEQ ID NO: 59183 - RNA, 24 nt, Human
gaggcuguagcaaggggaggaagc

SEQ ID NO: 59184 - RNA, 21 nt, Human
gagggucagaggggaguggag

SEQ ID NO: 59185 - RNA, 20 nt, Human
gcagcggcgcggaccgggag

SEQ ID NO: 59186 - RNA, 19 nt, Human
gcccaacccaaccccuccc

SEQ ID NO: 59187 - RNA, 26 nt, Human
gcccaacccaaccccuccccccaccc

SEQ ID NO: 59188 - RNA, 18 nt, Human
ggcagaggcuguagcaag

SEQ ID NO: 59189 - RNA, 19 nt, Human
ggccauggcggcuggugcu

SEQ ID NO: 59190 - RNA, 26 nt, Human
ggccauggcggcuggugcugauaacc

SEQ ID NO: 59191 - RNA, 18 nt, Human
gggaguggagguggacag

SEQ ID NO: 59192 - RNA, 22 nt, Human
gggcagaggcuguagcaagggg

SEQ ID NO: 59193 - RNA, 19 nt, Human
uaagagcccaacccaaccc

SEQ ID NO: 59194 - RNA, 22 nt, Human
ucaggcuuggccauggcggcug

SEQ ID NO: 59195 - RNA, 22 nt, Human
ucuggagcuggaacaaucaggc

SEQ ID NO: 59196 - RNA, 21 nt, Human
ugaagauaagagcccaaccca

SEQ ID NO: 59197 - RNA, 19 nt, Human
uggagguggacaggaucua

SEQ ID NO: 59198 - RNA, 20 nt, Human
uggagguggacaggaucuau

SEQ ID NO: 59199 - RNA, 21 nt, Human
uuccuuagucucuggagcugg

SEQ ID NO: 59200 - RNA, 27 nt, Human
uuggcagaagugcccgccaaagcugug

SEQ ID NO: 59201 - RNA, 26 nt, Human
aaaaaaaggaaacaacgcgaaaaaaa

SEQ ID NO: 59202 - RNA, 24 nt, Human
aaaaaggaaacaacgcgaaaaaaa

SEQ ID NO: 59203 - RNA, 21 nt, Human
aaacaacgcgaaaaaaaggga

SEQ ID NO: 59204 - RNA, 20 nt, Human
aacccggcuccaucuugcgg

SEQ ID NO: 59205 - RNA, 18 nt, Human
aacgcgaaaaaaagggag

SEQ ID NO: 59206 - RNA, 18 nt, Human
aaggaaacaacgcgaaaa

SEQ ID NO: 59207 - RNA, 20 nt, Human
aaugaaacuaguaagaauga

SEQ ID NO: 59208 - RNA, 18 nt, Human
accaagcacauuacccug

SEQ ID NO: 59209 - RNA, 23 nt, Human
agaaucagagauugcugugauuu

SEQ ID NO: 59210 - RNA, 25 nt, Human
agaaucagagauugcugugauuuuu

SEQ ID NO: 59211 - RNA, 23 nt, Human
agagaacaaaauaaaauuagaau

SEQ ID NO: 59212 - RNA, 19 nt, Human
aggaaacaacgcgaaaaaa

SEQ ID NO: 59213 - RNA, 19 nt, Human
augaaacuaguaagaauga

SEQ ID NO: 59214 - RNA, 18 nt, Human
caacccggcuccaucuug

SEQ ID NO: 59215 - RNA, 18 nt, Human
caagcacauuacccugau

SEQ ID NO: 59216 - RNA, 19 nt, Human
cacagcccaacccggcucc

SEQ ID NO: 59217 - RNA, 23 nt, Human
cacagcccaacccggcuccaucu

SEQ ID NO: 59218 - RNA, 21 nt, Human
cauugcaauauuacuguauca

SEQ ID NO: 59219 - RNA, 18 nt, Human
ccagcagcagcgucacag

SEQ ID NO: 59220 - RNA, 21 nt, Human
cugaccccagcagcagcguca

SEQ ID NO: 59221 - RNA, 20 nt, Human
gaauacagaaccaauuuagg

SEQ ID NO: 59222 - RNA, 24 nt, Human
gaccccagcagcagcgucacagcc

SEQ ID NO: 59223 - RNA, 22 nt, Human
gucacagcccaacccggcucca

SEQ ID NO: 59224 - RNA, 24 nt, Human
gucacagcccaacccggcuccauc

SEQ ID NO: 59225 - RNA, 19 nt, Human
uaaaaggugccacagguaa

SEQ ID NO: 59226 - RNA, 20 nt, Human
uaaaaggugccacagguaau

SEQ ID NO: 59227 - RNA, 27 nt, Human
uaacucaauuuaaaaaaaggaaacaac

SEQ ID NO: 59228 - RNA, 24 nt, Human
uaaggcaauaacaacaugugcaaa

SEQ ID NO: 59229 - RNA, 21 nt, Human
uagagggauuccggaaggcag

SEQ ID NO: 59230 - RNA, 18 nt, Human
uaguaagaaugaagguuu

SEQ ID NO: 59231 - RNA, 20 nt, Human
uaguaagaaugaagguuuac

SEQ ID NO: 59232 - RNA, 18 nt, Human
uauuacuguaucauugug

SEQ ID NO: 59233 - RNA, 20 nt, Human
uauucuagauguaaagguug

SEQ ID NO: 59234 - RNA, 19 nt, Human
ucacagcccaacccggcuc

SEQ ID NO: 59235 - RNA, 24 nt, Human
ugaaacuaguaagaaugaagguuu

SEQ ID NO: 59236 - RNA, 22 nt, Human
uguaaagguugaauuuuuuuuu

SEQ ID NO: 59237 - RNA, 21 nt, Human
uguuugauauugcugcaugca

SEQ ID NO: 59238 - RNA, 22 nt, Human
uugauuguauguagagaacaaa

SEQ ID NO: 59239 - RNA, 24 nt, Human
uuucaguaaccuucuaaaaaauua

SEQ ID NO: 59240 - RNA, 25 nt, Human
aaaaacccauauucccuggccccuc

SEQ ID NO: 59241 - RNA, 25 nt, Human
aaaaacccauauucccuggccccuc

SEQ ID NO: 59242 - RNA, 22 nt, Human
aaccacagcaaaggcacuucaa

SEQ ID NO: 59243 - RNA, 25 nt, Human
aagcuccugcagggaggaaggaaug

SEQ ID NO: 59244 - RNA, 25 nt, Human
aagcuccugcagggaggaaggaaug

SEQ ID NO: 59245 - RNA, 21 nt, Human
accccccucacacccaaccug

SEQ ID NO: 59246 - RNA, 18 nt, Human
acuaagguuggcauugug

SEQ ID NO: 59247 - RNA, 18 nt, Human
acuaagguuggcauugug

SEQ ID NO: 59248 - RNA, 20 nt, Human
agacgcuuguuaaaaaccca

SEQ ID NO: 59249 - RNA, 19 nt, Human
agaugggaauggggcuggg

SEQ ID NO: 59250 - RNA, 19 nt, Human
agaugggaauggggcuggg

SEQ ID NO: 59251 - RNA, 25 nt, Human
aggaaguugggaagaggaguccagg

SEQ ID NO: 59252 - RNA, 24 nt, Human
agugaggaguccuggagacucugg

SEQ ID NO: 59253 - RNA, 18 nt, Human
aguggugcugagggcaug

SEQ ID NO: 59254 - RNA, 18 nt, Human
cacacccaaccugcgucc

SEQ ID NO: 59255 - RNA, 22 nt, Human
caugauagagaaguguuuugua

SEQ ID NO: 59256 - RNA, 22 nt, Human
caugauagagaaguguuuugua

SEQ ID NO: 59257 - RNA, 18 nt, Human
ccacaaguccccaagccc

SEQ ID NO: 59258 - RNA, 18 nt, Human
ccacaaguccccaagccc

SEQ ID NO: 59259 - RNA, 24 nt, Human
ccaggccgguuccaccucuggguc

SEQ ID NO: 59260 - RNA, 19 nt, Human
cccuucaugcugaggcauc

SEQ ID NO: 59261 - RNA, 19 nt, Human
cccuucaugcugaggcauc

SEQ ID NO: 59262 - RNA, 21 nt, Human
ccucacacccaaccugcgucc

SEQ ID NO: 59263 - RNA, 19 nt, Human
ccugcagcugaggagugag

SEQ ID NO: 59264 - RNA, 20 nt, Human
cucccaggccccacccagac

SEQ ID NO: 59265 - RNA, 19 nt, Human
cugaggcaucugucuggcu

SEQ ID NO: 59266 - RNA, 19 nt, Human
cugaggcaucugucuggcu

SEQ ID NO: 59267 - RNA, 23 nt, Human
cugcguccauggccgagguugaa

SEQ ID NO: 59268 - RNA, 18 nt, Human
cuggcuccugcagcugag

SEQ ID NO: 59269 - RNA, 21 nt, Human
cugggaccccccucacaccca

SEQ ID NO: 59270 - RNA, 20 nt, Human
cuucgggggcaccuuucuca

SEQ ID NO: 59271 - RNA, 20 nt, Human
cuuugcucuuguucuucugu

SEQ ID NO: 59272 - RNA, 19 nt, Human
gaaaaccacagcaaaggca

SEQ ID NO: 59273 - RNA, 19 nt, Human
gaauuuguaguuuauuuug

SEQ ID NO: 59274 - RNA, 27 nt, Human
gacccuguuucaguagaugggaauggg

SEQ ID NO: 59275 - RNA, 27 nt, Human
gacccuguuucaguagaugggaauggg

SEQ ID NO: 59276 - RNA, 21 nt, Human
ggaaugauccacaagucccca

SEQ ID NO: 59277 - RNA, 21 nt, Human
ggaaugauccacaagucccca

SEQ ID NO: 59278 - RNA, 21 nt, Human
ggacaagaguggugcugaggg

SEQ ID NO: 59279 - RNA, 19 nt, Human
ggaccccccucacacccaa

SEQ ID NO: 59280 - RNA, 22 nt, Human
ggaccccccucacacccaaccu

SEQ ID NO: 59281 - RNA, 22 nt, Human
ggaggaaggaaugauccacaag

SEQ ID NO: 59282 - RNA, 22 nt, Human
ggaggaaggaaugauccacaag

SEQ ID NO: 59283 - RNA, 18 nt, Human
ggcuucauggucuuugcu

SEQ ID NO: 59284 - RNA, 19 nt, Human
guggugcugagggcauggu

SEQ ID NO: 59285 - RNA, 22 nt, Human
uaagacgcuuguuaaaaaccca

SEQ ID NO: 59286 - RNA, 22 nt, Human
uaagacgcuuguuaaaaaccca

SEQ ID NO: 59287 - RNA, 18 nt, Human
uagaagaccgaaaggcug

SEQ ID NO: 59288 - RNA, 19 nt, Human
uagaugggaauggggcugg

SEQ ID NO: 59289 - RNA, 19 nt, Human
uagaugggaauggggcugg

SEQ ID NO: 59290 - RNA, 22 nt, Human
ucaggaauuuguaguuuauuuu

SEQ ID NO: 59291 - RNA, 22 nt, Human
uccagguacccagucucaguug

SEQ ID NO: 59292 - RNA, 18 nt, Human
ucccaggccccacccaga

SEQ ID NO: 59293 - RNA, 22 nt, Human
ucuguauaaccugugcccagga

SEQ ID NO: 59294 - RNA, 22 nt, Human
ucuguauaaccugugcccagga

SEQ ID NO: 59295 - RNA, 23 nt, Human
ucuguauaaccugugcccaggag

SEQ ID NO: 59296 - RNA, 23 nt, Human
ucuguauaaccugugcccaggag

SEQ ID NO: 59297 - RNA, 26 nt, Human
ucugucuggcuggagaaacacuaagg

SEQ ID NO: 59298 - RNA, 26 nt, Human
ucugucuggcuggagaaacacuaagg

SEQ ID NO: 59299 - RNA, 21 nt, Human
ucugugcugcaugcagagggg

SEQ ID NO: 59300 - RNA, 24 nt, Human
ugaccuggucagccaccaggggag

SEQ ID NO: 59301 - RNA, 23 nt, Human
ugagggcauggucacacccuucu

SEQ ID NO: 59302 - RNA, 18 nt, Human
ugagugaggaguccugga

SEQ ID NO: 59303 - RNA, 20 nt, Human
uggaggaaguugggaagagg

SEQ ID NO: 59304 - RNA, 25 nt, Human
uggaggaaguugggaagaggagucc

SEQ ID NO: 59305 - RNA, 22 nt, Human
uggcauugugcucacacuggga

SEQ ID NO: 59306 - RNA, 22 nt, Human
uggcauugugcucacacuggga

SEQ ID NO: 59307 - RNA, 22 nt, Human
uggcucccaggccccacccaga

SEQ ID NO: 59308 - RNA, 28 nt, Human
uggcuggagaaacacuaagguuggcauu

SEQ ID NO: 59309 - RNA, 28 nt, Human
uggcuggagaaacacuaagguuggcauu

SEQ ID NO: 59310 - RNA, 18 nt, Human
ugggaagaggaguccagg

SEQ ID NO: 59311 - RNA, 19 nt, Human
ugggaauggggcugggguc

SEQ ID NO: 59312 - RNA, 21 nt, Human
ugggaccccccucacacccaa

SEQ ID NO: 59313 - RNA, 23 nt, Human
uggggacaagaguggugcugagg

SEQ ID NO: 59314 - RNA, 24 nt, Human
uggggucuguauaaccugugccca

SEQ ID NO: 59315 - RNA, 24 nt, Human
uggggucuguauaaccugugccca

SEQ ID NO: 59316 - RNA, 19 nt, Human
uggugcugagggcaugguc

SEQ ID NO: 59317 - RNA, 19 nt, Human
uggugcugagggcaugguc

SEQ ID NO: 59318 - RNA, 18 nt, Human
uguggcucccaggcccca

SEQ ID NO: 59319 - RNA, 22 nt, Human
aaagaauucgaguaucagugag

SEQ ID NO: 59320 - RNA, 20 nt, Human
aacucauuuccccacaccca

SEQ ID NO: 59321 - RNA, 21 nt, Human
aacucauuuccccacacccaa

SEQ ID NO: 59322 - RNA, 20 nt, Human
aagaaggagcuggaugaccc

SEQ ID NO: 59323 - RNA, 23 nt, Human
acaagaagcuagagaauguggug

SEQ ID NO: 59324 - RNA, 18 nt, Human
agacaccuuccugcccag

SEQ ID NO: 59325 - RNA, 19 nt, Human
aggagggaugagugaggca

SEQ ID NO: 59326 - RNA, 23 nt, Human
aucaaagaaaacucauuucccca

SEQ ID NO: 59327 - RNA, 21 nt, Human
auuuugagaugggaaaauuaa

SEQ ID NO: 59328 - RNA, 26 nt, Human
cagagucccacaugcagacaccuucc

SEQ ID NO: 59329 - RNA, 18 nt, Human
cagcuggucucccagguu

SEQ ID NO: 59330 - RNA, 21 nt, Human
ccacacccaagaaggagcugg

SEQ ID NO: 59331 - RNA, 22 nt, Human
ccagcaguugucugacucuggc

SEQ ID NO: 59332 - RNA, 25 nt, Human
ccagcuggucucccagguucagcca

SEQ ID NO: 59333 - RNA, 23 nt, Human
cccaagaaggagcuggaugaccc

SEQ ID NO: 59334 - RNA, 21 nt, Human
cccugcucagcagcacaggag

SEQ ID NO: 59335 - RNA, 19 nt, Human
ccugcccagcaucucuucu

SEQ ID NO: 59336 - RNA, 25 nt, Human
ccuuccugcccagcaucucuucucc

SEQ ID NO: 59337 - RNA, 21 nt, Human
cugguugcccugcucagcagc

SEQ ID NO: 59338 - RNA, 19 nt, Human
cuuagggacgaacccagca

SEQ ID NO: 59339 - RNA, 20 nt, Human
gagcacaggccggaaucucu

SEQ ID NO: 59340 - RNA, 19 nt, Human
gccccucccagauguggga

SEQ ID NO: 59341 - RNA, 20 nt, Human
gugaacuccacucagccucu

SEQ ID NO: 59342 - RNA, 21 nt, Human
gugaggcagaaacuaucaaag

SEQ ID NO: 59343 - RNA, 19 nt, Human
uaaagaaacaguuccagcc

SEQ ID NO: 59344 - RNA, 19 nt, Human
ucagcagcacaggagcaca

SEQ ID NO: 59345 - RNA, 19 nt, Human
ucucuaggucagcaggugc

SEQ ID NO: 59346 - RNA, 24 nt, Human
ucucuaggucagcaggugcaaucu

SEQ ID NO: 59347 - RNA, 19 nt, Human
ugagaugggaaaauuaagg

SEQ ID NO: 59348 - RNA, 28 nt, Human
ugaggcagaaacuaucaaagaaaacuca

SEQ ID NO: 59349 - RNA, 20 nt, Human
ugagugaacuccacucagcc

SEQ ID NO: 59350 - RNA, 23 nt, Human
ugccaaaagaauucgaguaucag

SEQ ID NO: 59351 - RNA, 20 nt, Human
ugggagaggaccgggcugua

SEQ ID NO: 59352 - RNA, 19 nt, Human
ugugagcaagaguucuugc

SEQ ID NO: 59353 - RNA, 18 nt, Human
uucuggccaggguacagg

SEQ ID NO: 59354 - RNA, 25 nt, Human
aaagagcuggagggagucuguggga

SEQ ID NO: 59355 - RNA, 21 nt, Human
aagaagaguccuuugggccug

SEQ ID NO: 59356 - RNA, 24 nt, Human
acacacacaccccacccucucaca

SEQ ID NO: 59357 - RNA, 26 nt, Human
acccugagagagccacacacaaagag

SEQ ID NO: 59358 - RNA, 27 nt, Human
acccugagagagccacacacaaagagc

SEQ ID NO: 59359 - RNA, 25 nt, Human
agcuaugcaccccaagugaucaccc

SEQ ID NO: 59360 - RNA, 20 nt, Human
aggaacagcggaaggguuac

SEQ ID NO: 59361 - RNA, 22 nt, Human
caagugaucacccggcuuugga

SEQ ID NO: 59362 - RNA, 21 nt, Human
cacagcauugcacagucgucc

SEQ ID NO: 59363 - RNA, 19 nt, Human
cacucucuuugacacacac

SEQ ID NO: 59364 - RNA, 21 nt, Human
ccccaagugaucacccggcuu

SEQ ID NO: 59365 - RNA, 25 nt, Human
ccccaagugaucacccggcuuugga

SEQ ID NO: 59366 - RNA, 20 nt, Human
ccucucacauacacacuuuu

SEQ ID NO: 59367 - RNA, 22 nt, Human
ccucugccucccugugcucccc

SEQ ID NO: 59368 - RNA, 20 nt, Human
cucuccuucucuuccucacu

SEQ ID NO: 59369 - RNA, 20 nt, Human
cucucuccuucucuuccuca

SEQ ID NO: 59370 - RNA, 26 nt, Human
cugcugaagaagaguccuuugggccc

SEQ ID NO: 59371 - RNA, 22 nt, Human
gcuugcucuuguuggacccuga

SEQ ID NO: 59372 - RNA, 18 nt, Human
uaaaagcacacauaaaca

SEQ ID NO: 59373 - RNA, 20 nt, Human
uaugcaccccaagugaucac

SEQ ID NO: 59374 - RNA, 23 nt, Human
ucacagacccacagcuugcucuu

SEQ ID NO: 59375 - RNA, 19 nt, Human
ucacccggcuuuggaagcu

SEQ ID NO: 59376 - RNA, 22 nt, Human
uccccaggggugcaugcuccug

SEQ ID NO: 59377 - RNA, 20 nt, Human
uccucacucucuuugacaca

SEQ ID NO: 59378 - RNA, 20 nt, Human
uccuucucuuccucacucuc

SEQ ID NO: 59379 - RNA, 20 nt, Human
ucucucucuccuucucuucc

SEQ ID NO: 59380 - RNA, 25 nt, Human
ugaauaaaagcacacauaaacacuc

SEQ ID NO: 59381 - RNA, 22 nt, Human
ugacacacacaccccacccucu

SEQ ID NO: 59382 - RNA, 26 nt, Human
ugacacacacaccccacccucucaca

SEQ ID NO: 59383 - RNA, 18 nt, Human
ugagagaaagacauuugc

SEQ ID NO: 59384 - RNA, 21 nt, Human
uggaauggcacccaaagcacu

SEQ ID NO: 59385 - RNA, 18 nt, Human
uggagcugaggcugcaga

SEQ ID NO: 59386 - RNA, 22 nt, Human
ugggccugugacguggcagccc

SEQ ID NO: 59387 - RNA, 23 nt, Human
aaccacgccgcccgccacacccu

SEQ ID NO: 59388 - RNA, 21 nt, Human
acagggaaaaguacaugugcc

SEQ ID NO: 59389 - RNA, 20 nt, Human
accacgccgcccgccacacc

SEQ ID NO: 59390 - RNA, 21 nt, Human
cacuuuagagaugaacaggaa

SEQ ID NO: 59391 - RNA, 18 nt, Human
gcugaaaucagaauucua

SEQ ID NO: 59392 - RNA, 20 nt, Human
gggggugggaaucuggggag

SEQ ID NO: 59393 - RNA, 22 nt, Human
uacauacaacaucuguuuuaca

SEQ ID NO: 59394 - RNA, 18 nt, Human
ugagaggaacauugaggg

SEQ ID NO: 59395 - RNA, 24 nt, Human
ugagaggaacauugaggggguggg

SEQ ID NO: 59396 - RNA, 24 nt, Human
ugauaaaaacacggagaauagaaa

SEQ ID NO: 59397 - RNA, 18 nt, Human
ugccuaaccacgccgccc

SEQ ID NO: 59398 - RNA, 20 nt, Human
ugccuaaccacgccgcccgc

SEQ ID NO: 59399 - RNA, 19 nt, Human
ugggaaucuggggagcagg

SEQ ID NO: 59400 - RNA, 18 nt, Human
aaacugagggcuggggga

SEQ ID NO: 59401 - RNA, 20 nt, Human
aaagagggaaccaggcugcc

SEQ ID NO: 59402 - RNA, 19 nt, Human
aacacacccagccccagga

SEQ ID NO: 59403 - RNA, 26 nt, Human
aagacccuucccucuccuguccucaa

SEQ ID NO: 59404 - RNA, 25 nt, Human
aagcaacagacacaagggaacgaca

SEQ ID NO: 59405 - RNA, 23 nt, Human
aaucacuugaaaugcuaacuuga

SEQ ID NO: 59406 - RNA, 22 nt, Human
acagacacaagggaacgacaca

SEQ ID NO: 59407 - RNA, 28 nt, Human
acccagccccaggacaggggggaacgcc

SEQ ID NO: 59408 - RNA, 22 nt, Human
acgacacacagggauuggccac

SEQ ID NO: 59409 - RNA, 18 nt, Human
acgggguggggggcuccc

SEQ ID NO: 59410 - RNA, 23 nt, Human
acuccuacucccaauaagcaaca

SEQ ID NO: 59411 - RNA, 18 nt, Human
agaaggaaaggaccugga

SEQ ID NO: 59412 - RNA, 19 nt, Human
agacccccaccucacccag

SEQ ID NO: 59413 - RNA, 22 nt, Human
agacgagaaggaaaggaccugg

SEQ ID NO: 59414 - RNA, 23 nt, Human
agagcaauguauucucacgccag

SEQ ID NO: 59415 - RNA, 25 nt, Human
agcaacaaagggaaccaucuaggga

SEQ ID NO: 59416 - RNA, 25 nt, Human
agcccccuuuuagaguccuuggagg

SEQ ID NO: 59417 - RNA, 26 nt, Human
agcuguccugaaacacacccagcccc

SEQ ID NO: 59418 - RNA, 23 nt, Human
aggaacaggaggaggaggaggaa

SEQ ID NO: 59419 - RNA, 21 nt, Human
aggaggcuccuggcucagagg

SEQ ID NO: 59420 - RNA, 20 nt, Human
aggcaggaacaggaggagga

SEQ ID NO: 59421 - RNA, 25 nt, Human
aggcaggcagacacaaaugcacaga

SEQ ID NO: 59422 - RNA, 18 nt, Human
aggcccugccccacccag

SEQ ID NO: 59423 - RNA, 18 nt, Human
aggcugggccaugccugg

SEQ ID NO: 59424 - RNA, 22 nt, Human
aggcugggccaugccuggccuc

SEQ ID NO: 59425 - RNA, 23 nt, Human
agggcugggggaguaccaggggc

SEQ ID NO: 59426 - RNA, 24 nt, Human
aguggaagaaagagaguccuggca

SEQ ID NO: 59427 - RNA, 24 nt, Human
auagcccccuuuuagaguccuugg

SEQ ID NO: 59428 - RNA, 19 nt, Human
aucauugcacccccaaauc

SEQ ID NO: 59429 - RNA, 19 nt, Human
auccccaauccagaccuca

SEQ ID NO: 59430 - RNA, 19 nt, Human
auuucuguggcuugccuuu

SEQ ID NO: 59431 - RNA, 23 nt, Human
caaccuacugguuccccucccaa

SEQ ID NO: 59432 - RNA, 25 nt, Human
cacacccagccccaggacaggggua

SEQ ID NO: 59433 - RNA, 21 nt, Human
cacccagggcccagcucauuc

SEQ ID NO: 59434 - RNA, 19 nt, Human
cacccuggcccuggagccc

SEQ ID NO: 59435 - RNA, 20 nt, Human
caccucacccagggcccagc

SEQ ID NO: 59436 - RNA, 21 nt, Human
cacuccagccucccaaacagg

SEQ ID NO: 59437 - RNA, 20 nt, Human
cagaagcagcuguccugaaa

SEQ ID NO: 59438 - RNA, 21 nt, Human
cagaauacagagcccugguac

SEQ ID NO: 59439 - RNA, 18 nt, Human
cagacagcaacaaaggga

SEQ ID NO: 59440 - RNA, 20 nt, Human
cagcaacaaagggaaccauc

SEQ ID NO: 59441 - RNA, 18 nt, Human
cagcaagacgggggcucu

SEQ ID NO: 59442 - RNA, 22 nt, Human
cagccccuccuggcuggguggc

SEQ ID NO: 59443 - RNA, 19 nt, Human
cagcuggcaucaacaaggu

SEQ ID NO: 59444 - RNA, 18 nt, Human
caggaacaggaggaggag

SEQ ID NO: 59445 - RNA, 18 nt, Human
caggacuggcaacccuac

SEQ ID NO: 59446 - RNA, 20 nt, Human
caggcagacacaaaugcaca

SEQ ID NO: 59447 - RNA, 19 nt, Human
cagggcccagcucauucgc

SEQ ID NO: 59448 - RNA, 24 nt, Human
ccaaaggagagcaauguauucuca

SEQ ID NO: 59449 - RNA, 19 nt, Human
ccacaugccccaucccagg

SEQ ID NO: 59450 - RNA, 23 nt, Human
ccaucccucacacccuggcccug

SEQ ID NO: 59451 - RNA, 24 nt, Human
ccaucuagggaagcccucggccac

SEQ ID NO: 59452 - RNA, 20 nt, Human
cccacuaggccagaccccca

SEQ ID NO: 59453 - RNA, 21 nt, Human
cccagcugcuccccaucccuc

SEQ ID NO: 59454 - RNA, 21 nt, Human
cccagugcccagcugcucccc

SEQ ID NO: 59455 - RNA, 22 nt, Human
ccccacccaggccaggccccuc

SEQ ID NO: 59456 - RNA, 21 nt, Human
ccccaggacagggguaggagc

SEQ ID NO: 59457 - RNA, 21 nt, Human
ccccauccccaauccagaccu

SEQ ID NO: 59458 - RNA, 22 nt, Human
cccccaccucacccagggccca

SEQ ID NO: 59459 - RNA, 19 nt, Human
ccccuccccacuaggccag

SEQ ID NO: 59460 - RNA, 22 nt, Human
cccuuggccacaugccccaucu

SEQ ID NO: 59461 - RNA, 22 nt, Human
ccgguagucagaugccugggac

SEQ ID NO: 59462 - RNA, 18 nt, Human
ccugaaacacacccagcc

SEQ ID NO: 59463 - RNA, 21 nt, Human
cgacacacagggauuggccac

SEQ ID NO: 59464 - RNA, 20 nt, Human
cgggggcucuguuggcuccu

SEQ ID NO: 59465 - RNA, 23 nt, Human
cuaaaaagauucgggaaagccag

SEQ ID NO: 59466 - RNA, 28 nt, Human
cucacacccuggcccuggagcccuuggc

SEQ ID NO: 59467 - RNA, 18 nt, Human
cucaucuuugaugcccac

SEQ ID NO: 59468 - RNA, 19 nt, Human
cuccaggcugggccaugcc

SEQ ID NO: 59469 - RNA, 25 nt, Human
cuccaggcugggccaugccuggccu

SEQ ID NO: 59470 - RNA, 18 nt, Human
cuccagggaauagccccc

SEQ ID NO: 59471 - RNA, 22 nt, Human
cuccccacuaggccagaccccc

SEQ ID NO: 59472 - RNA, 18 nt, Human
cuccuggcuggguggcug

SEQ ID NO: 59473 - RNA, 23 nt, Human
cuugagacuuccauagggcugga

SEQ ID NO: 59474 - RNA, 19 nt, Human
gaaagagaguccuggcaca

SEQ ID NO: 59475 - RNA, 20 nt, Human
gaaagagaguccuggcacag

SEQ ID NO: 59476 - RNA, 18 nt, Human
gacacaagggaacgacac

SEQ ID NO: 59477 - RNA, 18 nt, Human
gagagaggaagacgagaa

SEQ ID NO: 59478 - RNA, 20 nt, Human
gauucgggaaagccagacag

SEQ ID NO: 59479 - RNA, 23 nt, Human
gcaacaaagggaaccaucuaggg

SEQ ID NO: 59480 - RNA, 18 nt, Human
gcagaauacagagcccug

SEQ ID NO: 59481 - RNA, 23 nt, Human
gcagacacaaaugcacagaagca

SEQ ID NO: 59482 - RNA, 18 nt, Human
gccacaugccccauccca

SEQ ID NO: 59483 - RNA, 22 nt, Human
gcccaagccuggaccaggccag

SEQ ID NO: 59484 - RNA, 24 nt, Human
gccccuccccacuaggccagaccc

SEQ ID NO: 59485 - RNA, 18 nt, Human
gccuggaccaggccaggc

SEQ ID NO: 59486 - RNA, 24 nt, Human
ggacauagggauauccccucagga

SEQ ID NO: 59487 - RNA, 19 nt, Human
ggagcccuuggccacaugc

SEQ ID NO: 59488 - RNA, 22 nt, Human
ggaggaggaggaggaaguaggu

SEQ ID NO: 59489 - RNA, 24 nt, Human
ggaggaggaggaggaaguagguga

SEQ ID NO: 59490 - RNA, 22 nt, Human
gggaauggagcccaagccugga

SEQ ID NO: 59491 - RNA, 20 nt, Human
gggaaugugagcagaagcau

SEQ ID NO: 59492 - RNA, 19 nt, Human
ggggggcucccggacucug

SEQ ID NO: 59493 - RNA, 23 nt, Human
ggguggcuggaguuguaggggcu

SEQ ID NO: 59494 - RNA, 22 nt, Human
ggucaggaggcuccuggcucag

SEQ ID NO: 59495 - RNA, 22 nt, Human
guccugaaacacacccagcccc

SEQ ID NO: 59496 - RNA, 23 nt, Human
guggaagaaagagaguccuggca

SEQ ID NO: 59497 - RNA, 22 nt, Human
ucacccagggcccagcucauuc

SEQ ID NO: 59498 - RNA, 19 nt, Human
ucaggagggacagcaguga

SEQ ID NO: 59499 - RNA, 21 nt, Human
uccacuccagccucccaaaca

SEQ ID NO: 59500 - RNA, 24 nt, Human
uccccaucccucacacccuggccc

SEQ ID NO: 59501 - RNA, 21 nt, Human
uccuggacgggguggggggcu

SEQ ID NO: 59502 - RNA, 18 nt, Human
ucuacuccuuucugaaac

SEQ ID NO: 59503 - RNA, 19 nt, Human
ucuagggaagcccucggcc

SEQ ID NO: 59504 - RNA, 18 nt, Human
ucuauagagagcaugagg

SEQ ID NO: 59505 - RNA, 23 nt, Human
ucucacgccagcaagacgggggc

SEQ ID NO: 59506 - RNA, 23 nt, Human
ugaccuugagacuuccauagggc

SEQ ID NO: 59507 - RNA, 18 nt, Human
ugacugaaaacugagggc

SEQ ID NO: 59508 - RNA, 25 nt, Human
ugagaacucaguacagcuggcauca

SEQ ID NO: 59509 - RNA, 24 nt, Human
ugagagagaggaagacgagaagga

SEQ ID NO: 59510 - RNA, 23 nt, Human
ugagagggaaugugagcagaagc

SEQ ID NO: 59511 - RNA, 23 nt, Human
ugaggcaggcagacacaaaugca

SEQ ID NO: 59512 - RNA, 24 nt, Human
ugagggcugggggaguaccagggg

SEQ ID NO: 59513 - RNA, 21 nt, Human
ugauuaggggucccgugaccu

SEQ ID NO: 59514 - RNA, 21 nt, Human
ugccugaaugugauuggacag

SEQ ID NO: 59515 - RNA, 24 nt, Human
ugccugggacuaagggugggaagg

SEQ ID NO: 59516 - RNA, 21 nt, Human
ugcuccccaucccucacaccc

SEQ ID NO: 59517 - RNA, 22 nt, Human
ugcuccccaucccucacacccu

SEQ ID NO: 59518 - RNA, 24 nt, Human
uggagaggagacggaacuugacug

SEQ ID NO: 59519 - RNA, 23 nt, Human
uggcacaggaaagagggaaccag

SEQ ID NO: 59520 - RNA, 18 nt, Human
uggccacaugccccaucc

SEQ ID NO: 59521 - RNA, 20 nt, Human
uggcucagaggcggaugcga

SEQ ID NO: 59522 - RNA, 21 nt, Human
uggcuggaguuguaggggcuu

SEQ ID NO: 59523 - RNA, 21 nt, Human
uggcuggaguuguaggggcuu

SEQ ID NO: 59524 - RNA, 22 nt, Human
uggcuggaguuguaggggcuuu

SEQ ID NO: 59525 - RNA, 24 nt, Human
uggcuggguggcuggaguuguagg

SEQ ID NO: 59526 - RNA, 22 nt, Human
uguaaguguuaagacccuuccc

SEQ ID NO: 59527 - RNA, 21 nt, Human
uguccccauccccaauccaga

SEQ ID NO: 59528 - RNA, 23 nt, Human
uguuuccacuccagccucccaaa

SEQ ID NO: 59529 - RNA, 21 nt, Human
uuaguauauaaagacauacaa

SEQ ID NO: 59530 - RNA, 19 nt, Human
uucccgguagucagaugcc

SEQ ID NO: 59531 - RNA, 19 nt, Human
uuggcuccuggacggggug

SEQ ID NO: 59532 - RNA, 21 nt, Human
uuguaaggcuguaucagaauu

SEQ ID NO: 59533 - RNA, 18 nt, Human
uuuuuuuuuuuugggccc

SEQ ID NO: 59534 - RNA, 19 nt, Human
uuuuuuuuuuuuuugggcc

SEQ ID NO: 59535 - RNA, 20 nt, Human
uuuuuuuuuuuuuuuuuggg

SEQ ID NO: 59536 - RNA, 22 nt, Human
aaaaugacaacuucacaguuca

SEQ ID NO: 59537 - RNA, 20 nt, Human
aaaugacaacuucacaguuc

SEQ ID NO: 59538 - RNA, 23 nt, Human
aagagacagaguaaugacgaaua

SEQ ID NO: 59539 - RNA, 19 nt, Human
aagcaacacugugggauga

SEQ ID NO: 59540 - RNA, 21 nt, Human
aagcaacacugugggaugauu

SEQ ID NO: 59541 - RNA, 18 nt, Human
aagcauaucuaucaaauc

SEQ ID NO: 59542 - RNA, 23 nt, Human
aaugaucaagucagaguaguuag

SEQ ID NO: 59543 - RNA, 24 nt, Human
accccgaacggagaaagccuugaa

SEQ ID NO: 59544 - RNA, 19 nt, Human
accccuucaucuccucgcc

SEQ ID NO: 59545 - RNA, 23 nt, Human
acccgccgaguggggcggggcuu

SEQ ID NO: 59546 - RNA, 25 nt, Human
acuuuaaaucagcuccagagaaaag

SEQ ID NO: 59547 - RNA, 24 nt, Human
agaaagccuugaauuaagauccaa

SEQ ID NO: 59548 - RNA, 21 nt, Human
agcaauucuuuugccuauuuu

SEQ ID NO: 59549 - RNA, 23 nt, Human
aggaaggugauagcagaaaagga

SEQ ID NO: 59550 - RNA, 18 nt, Human
auccuauucuguggguuu

SEQ ID NO: 59551 - RNA, 18 nt, Human
cacauccaagucaucacc

SEQ ID NO: 59552 - RNA, 18 nt, Human
ccauccaccccgaacgga

SEQ ID NO: 59553 - RNA, 22 nt, Human
cccacuuagauacaugugucua

SEQ ID NO: 59554 - RNA, 20 nt, Human
cccgccgaguggggcggggc

SEQ ID NO: 59555 - RNA, 19 nt, Human
ccggagcgggaggcggagg

SEQ ID NO: 59556 - RNA, 22 nt, Human
ccggcggcaccgacccgccgag

SEQ ID NO: 59557 - RNA, 25 nt, Human
ccuaaaguaccaacccauccacccc

SEQ ID NO: 59558 - RNA, 18 nt, Human
ccugggacccggcggcac

SEQ ID NO: 59559 - RNA, 25 nt, Human
cgaauaucacccuagaggaaaccaa

SEQ ID NO: 59560 - RNA, 21 nt, Human
cgacccgccgaguggggcggg

SEQ ID NO: 59561 - RNA, 18 nt, Human
cggcggcaccgacccgcc

SEQ ID NO: 59562 - RNA, 23 nt, Human
cuccagagaaaagcaacacugug

SEQ ID NO: 59563 - RNA, 24 nt, Human
cuccagagaaaagcaacacugugg

SEQ ID NO: 59564 - RNA, 25 nt, Human
cuccagagaaaagcaacacuguggg

SEQ ID NO: 59565 - RNA, 26 nt, Human
cugucuuucagaucuagcaucuucca

SEQ ID NO: 59566 - RNA, 18 nt, Human
cuugaauuaagauccaac

SEQ ID NO: 59567 - RNA, 23 nt, Human
cuuuaaaucagcuccagagaaaa

SEQ ID NO: 59568 - RNA, 23 nt, Human
cuuucagaucuagcaucuuccag

SEQ ID NO: 59569 - RNA, 18 nt, Human
cuuugccaggaacucuuc

SEQ ID NO: 59570 - RNA, 20 nt, Human
gacccggcggcaccgacccg

SEQ ID NO: 59571 - RNA, 18 nt, Human
gcggggcuugcuggagcc

SEQ ID NO: 59572 - RNA, 24 nt, Human
gcuggagccuaaaguaccaaccca

SEQ ID NO: 59573 - RNA, 19 nt, Human
ggacagauugccaucuggg

SEQ ID NO: 59574 - RNA, 20 nt, Human
gggcccggagcgggaggcgg

SEQ ID NO: 59575 - RNA, 21 nt, Human
ggugauagaagccaaguagga

SEQ ID NO: 59576 - RNA, 19 nt, Human
guuuucaugaaaacuuugg

SEQ ID NO: 59577 - RNA, 23 nt, Human
uacacagaauguuaaaugaucaa

SEQ ID NO: 59578 - RNA, 20 nt, Human
uaccugagcucuuugccagg

SEQ ID NO: 59579 - RNA, 23 nt, Human
uaccugagcucuuugccaggaac

SEQ ID NO: 59580 - RNA, 24 nt, Human
uaugguauaauuucuguuggugau

SEQ ID NO: 59581 - RNA, 24 nt, Human
uauuuuauccuauucuguggguuu

SEQ ID NO: 59582 - RNA, 19 nt, Human
uccggcgaagaugaagacg

SEQ ID NO: 59583 - RNA, 22 nt, Human
ucuguuggugauagaagccaag

SEQ ID NO: 59584 - RNA, 24 nt, Human
ugacaagaggaaggugauagcaga

SEQ ID NO: 59585 - RNA, 24 nt, Human
ugacacauaauauuuaugcaugug

SEQ ID NO: 59586 - RNA, 22 nt, Human
ugauuuacaaauauuuuauccu

SEQ ID NO: 59587 - RNA, 23 nt, Human
ugcaugugauauuuuguuacaua

SEQ ID NO: 59588 - RNA, 21 nt, Human
ugccaggaacucuucccggga

SEQ ID NO: 59589 - RNA, 18 nt, Human
ugggaugauuucugaacu

SEQ ID NO: 59590 - RNA, 25 nt, Human
uggugauagaagccaaguaggaguc

SEQ ID NO: 59591 - RNA, 18 nt, Human
ugguucgagggcccggag

SEQ ID NO: 59592 - RNA, 18 nt, Human
ugugggcgucacuggcgc

SEQ ID NO: 59593 - RNA, 20 nt, Human
uuccuuucaauuucuugaua

SEQ ID NO: 59594 - RNA, 21 nt, Human
uucuuuggucccacuuagaua

SEQ ID NO: 59595 - RNA, 19 nt, Human
uugaagagacagaguaaug

SEQ ID NO: 59596 - RNA, 19 nt, Human
aaaccauccccaaccacuc

SEQ ID NO: 59597 - RNA, 23 nt, Human
aaccacucggaggcagcuuucaa

SEQ ID NO: 59598 - RNA, 18 nt, Human
aaccccgaagaaacccaa

SEQ ID NO: 59599 - RNA, 29 nt, Human
aagaaacccaaacaggaggcggugggcac

SEQ ID NO: 59600 - RNA, 20 nt, Human
aagcuccacacucacccuuc

SEQ ID NO: 59601 - RNA, 22 nt, Human
aagcuccacacucacccuucag

SEQ ID NO: 59602 - RNA, 22 nt, Human
acacagcaguaacaggaaaacc

SEQ ID NO: 59603 - RNA, 19 nt, Human
acagagaaaccccgaagaa

SEQ ID NO: 59604 - RNA, 21 nt, Human
acccagccccaucucucggcc

SEQ ID NO: 59605 - RNA, 22 nt, Human
accucacuuaaccccacaucac

SEQ ID NO: 59606 - RNA, 19 nt, Human
agacaggggcucugggagc

SEQ ID NO: 59607 - RNA, 24 nt, Human
agagaaaccccgaagaaacccaaa

SEQ ID NO: 59608 - RNA, 21 nt, Human
agcuccuugagccccaggccc

SEQ ID NO: 59609 - RNA, 25 nt, Human
agcucugccccucugccggcaccua

SEQ ID NO: 59610 - RNA, 19 nt, Human
agcugccagucggugggga

SEQ ID NO: 59611 - RNA, 23 nt, Human
aggagccaggggcugccggggcu

SEQ ID NO: 59612 - RNA, 22 nt, Human
aggcagugaccacccuuggggc

SEQ ID NO: 59613 - RNA, 20 nt, Human
aggcccuaagugagcagcuc

SEQ ID NO: 59614 - RNA, 18 nt, Human
aggccugggcucagaggc

SEQ ID NO: 59615 - RNA, 19 nt, Human
aggcuggggugggcgcugg

SEQ ID NO: 59616 - RNA, 24 nt, Human
aggggccuccucgauggggcgggc

SEQ ID NO: 59617 - RNA, 21 nt, Human
aggggcucugggagcuucugc

SEQ ID NO: 59618 - RNA, 18 nt, Human
aguaacaggaaaaccuaa

SEQ ID NO: 59619 - RNA, 21 nt, Human
agugcagcugccagucggugg

SEQ ID NO: 59620 - RNA, 18 nt, Human
aguggguggugcaggccc

SEQ ID NO: 59621 - RNA, 19 nt, Human
augauauauauuagaucua

SEQ ID NO: 59622 - RNA, 18 nt, Human
caaaauguccgcggccuc

SEQ ID NO: 59623 - RNA, 19 nt, Human
caaacaggaggcgcacccg

SEQ ID NO: 59624 - RNA, 21 nt, Human
caacugaaaccugggaggcca

SEQ ID NO: 59625 - RNA, 20 nt, Human
cacagccacaggagcagggg

SEQ ID NO: 59626 - RNA, 21 nt, Human
cacccuuggggcagaaguggg

SEQ ID NO: 59627 - RNA, 20 nt, Human
cacuuaaccccacaucacag

SEQ ID NO: 59628 - RNA, 23 nt, Human
cagacacuacagagaaaccccga

SEQ ID NO: 59629 - RNA, 21 nt, Human
cagcagacacuacagagaaac

SEQ ID NO: 59630 - RNA, 18 nt, Human
cagccuagcucugccccu

SEQ ID NO: 59631 - RNA, 25 nt, Human
cagggcaccagccuggugguugcaa

SEQ ID NO: 59632 - RNA, 23 nt, Human
caguaacaggaaaaccuaaugcu

SEQ ID NO: 59633 - RNA, 22 nt, Human
ccacaucacagccacaggagca

SEQ ID NO: 59634 - RNA, 23 nt, Human
ccaccucacuuaaccccacauca

SEQ ID NO: 59635 - RNA, 22 nt, Human
ccacugaguggccuggagcccu

SEQ ID NO: 59636 - RNA, 23 nt, Human
ccaggccagguuggcagggucca

SEQ ID NO: 59637 - RNA, 20 nt, Human
ccaugagagguggcagugga

SEQ ID NO: 59638 - RNA, 25 nt, Human
cccaccucacuuaaccccacaucac

SEQ ID NO: 59639 - RNA, 21 nt, Human
cccagggaucggguggguucu

SEQ ID NO: 59640 - RNA, 23 nt, Human
cccucccugcacacccaggccag

SEQ ID NO: 59641 - RNA, 19 nt, Human
ccgcaggucccaauagcuc

SEQ ID NO: 59642 - RNA, 20 nt, Human
ccggggcugugagccggagg

SEQ ID NO: 59643 - RNA, 21 nt, Human
ccucccagccuagcucugccc

SEQ ID NO: 59644 - RNA, 21 nt, Human
ccucccugcacacccaggcca

SEQ ID NO: 59645 - RNA, 23 nt, Human
ccugguaccaaggggaaccccuc

SEQ ID NO: 59646 - RNA, 20 nt, Human
ccuuugguccccaccucacu

SEQ ID NO: 59647 - RNA, 21 nt, Human
cgccccggcucgguucggcuu

SEQ ID NO: 59648 - RNA, 23 nt, Human
cgggaggcuguggcccaacuggc

SEQ ID NO: 59649 - RNA, 25 nt, Human
cggggcugugagccggaggggcaac

SEQ ID NO: 59650 - RNA, 25 nt, Human
cuacagagaaaccccgaagaaaccc

SEQ ID NO: 59651 - RNA, 19 nt, Human
cucagaggcgacacugagg

SEQ ID NO: 59652 - RNA, 18 nt, Human
cuggcacagcugcagggc

SEQ ID NO: 59653 - RNA, 24 nt, Human
cugguaccaaggggaaccccuccc

SEQ ID NO: 59654 - RNA, 20 nt, Human
cuugagccccaggcccuaag

SEQ ID NO: 59655 - RNA, 23 nt, Human
cuuucugaaaauaagaguaaaca

SEQ ID NO: 59656 - RNA, 22 nt, Human
gagaaaccccgaagaaacccaa

SEQ ID NO: 59657 - RNA, 18 nt, Human
gagagguggcaguggagg

SEQ ID NO: 59658 - RNA, 19 nt, Human
gaggaggaagaugugcugc

SEQ ID NO: 59659 - RNA, 22 nt, Human
gaggagggcagcagacacuaca

SEQ ID NO: 59660 - RNA, 20 nt, Human
gagguggcaguggagggccc

SEQ ID NO: 59661 - RNA, 20 nt, Human
gcaaguggguggugcaggcc

SEQ ID NO: 59662 - RNA, 21 nt, Human
gcagcucuccugguaccaagg

SEQ ID NO: 59663 - RNA, 23 nt, Human
gccccaggcccuaagugagcagc

SEQ ID NO: 59664 - RNA, 24 nt, Human
gccggaggggcaagcuccacacuc

SEQ ID NO: 59665 - RNA, 18 nt, Human
gcugccggggcugugagc

SEQ ID NO: 59666 - RNA, 21 nt, Human
gcugcucuggcucuguuuccu

SEQ ID NO: 59667 - RNA, 18 nt, Human
gcuucugccuggucuuga

SEQ ID NO: 59668 - RNA, 20 nt, Human
ggaggcuguggcccaacugg

SEQ ID NO: 59669 - RNA, 20 nt, Human
ggagggcagcagacacuaca

SEQ ID NO: 59670 - RNA, 23 nt, Human
ggagggcagcagacacuacagag

SEQ ID NO: 59671 - RNA, 21 nt, Human
ggcuggggugggcgcuggccg

SEQ ID NO: 59672 - RNA, 19 nt, Human
gggagcccgagacaggggc

SEQ ID NO: 59673 - RNA, 20 nt, Human
gggagcccgagacaggggcu

SEQ ID NO: 59674 - RNA, 22 nt, Human
gggaggcuguggcccaacuggc

SEQ ID NO: 59675 - RNA, 25 nt, Human
gggcaagcuccacacucacccuuca

SEQ ID NO: 59676 - RNA, 22 nt, Human
gggcagaaggcuggggugggcg

SEQ ID NO: 59677 - RNA, 22 nt, Human
ggggcugugagccggaggggca

SEQ ID NO: 59678 - RNA, 18 nt, Human
gguggugcaggcccuggg

SEQ ID NO: 59679 - RNA, 18 nt, Human
uaaccccacaucacagcc

SEQ ID NO: 59680 - RNA, 21 nt, Human
uacagagaaaccccgaagaaa

SEQ ID NO: 59681 - RNA, 21 nt, Human
uagccaggcuuccgcaggucc

SEQ ID NO: 59682 - RNA, 20 nt, Human
uagcucccggcgccccggcu

SEQ ID NO: 59683 - RNA, 20 nt, Human
uagcucugccccucugccgg

SEQ ID NO: 59684 - RNA, 23 nt, Human
uaucacaggcagugaccacccuu

SEQ ID NO: 59685 - RNA, 18 nt, Human
uauuacacagcaguaaca

SEQ ID NO: 59686 - RNA, 18 nt, Human
ucaccugccgggcggaag

SEQ ID NO: 59687 - RNA, 24 nt, Human
ucagacacaacugaaaccugggag

SEQ ID NO: 59688 - RNA, 19 nt, Human
ucccugcacacccaggcca

SEQ ID NO: 59689 - RNA, 27 nt, Human
ucgguggggagcccgagacaggggcuc

SEQ ID NO: 59690 - RNA, 21 nt, Human
ucucuuucugaaaauaagagu

SEQ ID NO: 59691 - RNA, 22 nt, Human
ucugccaucaggaccagggagc

SEQ ID NO: 59692 - RNA, 19 nt, Human
ucugccccucugccggcac

SEQ ID NO: 59693 - RNA, 18 nt, Human
ucugucagacacaacuga

SEQ ID NO: 59694 - RNA, 23 nt, Human
ugaaaauaagaguaaacauacaa

SEQ ID NO: 59695 - RNA, 23 nt, Human
ugagcagcucuccugguaccaac

SEQ ID NO: 59696 - RNA, 19 nt, Human
ugcgaggaggaagaugugc

SEQ ID NO: 59697 - RNA, 23 nt, Human
uggagccccgccuggucccuccu

SEQ ID NO: 59698 - RNA, 19 nt, Human
uggcacagcugcagggcac

SEQ ID NO: 59699 - RNA, 18 nt, Human
uggcugcucuggcucugu

SEQ ID NO: 59700 - RNA, 23 nt, Human
uggggcagaaguggggaguuggg

SEQ ID NO: 59701 - RNA, 20 nt, Human
uggggcgggcagaaggcugg

SEQ ID NO: 59702 - RNA, 19 nt, Human
uggugcccuaccccaggga

SEQ ID NO: 59703 - RNA, 23 nt, Human
uguagccaggcuuccgcaggucc

SEQ ID NO: 59704 - RNA, 18 nt, Human
ugucccagagcacgggag

SEQ ID NO: 59705 - RNA, 23 nt, Human
uguggcccaacuggcacagcugc

SEQ ID NO: 59706 - RNA, 23 nt, Human
uuaacaccaaccggagagaccaa

SEQ ID NO: 59707 - RNA, 23 nt, Human
uuaaccccacaucacagccacug

SEQ ID NO: 59708 - RNA, 18 nt, Human
aagcagccagccucaaca

SEQ ID NO: 59709 - RNA, 20 nt, Human
aaucucaacaaaagcucuuu

SEQ ID NO: 59710 - RNA, 23 nt, Human
acauacaugugugugucugugug

SEQ ID NO: 59711 - RNA, 22 nt, Human
acucacucuuccuaagggcaaa

SEQ ID NO: 59712 - RNA, 24 nt, Human
acucgcaaggucugaccaguucuu

SEQ ID NO: 59713 - RNA, 22 nt, Human
agaaaaaggcagggcucccuaa

SEQ ID NO: 59714 - RNA, 24 nt, Human
agagcaccauauccuucaugccaa

SEQ ID NO: 59715 - RNA, 24 nt, Human
agauaagaugacuccaauacucac

SEQ ID NO: 59716 - RNA, 18 nt, Human
aguaacuuuaggaaaauc

SEQ ID NO: 59717 - RNA, 21 nt, Human
auugcaguccuuuucuuccag

SEQ ID NO: 59718 - RNA, 23 nt, Human
caacaguagaaagaaggggcaac

SEQ ID NO: 59719 - RNA, 26 nt, Human
cacagaaaaggcuaccaggagccuaa

SEQ ID NO: 59720 - RNA, 18 nt, Human
caccauauccuucaugcc

SEQ ID NO: 59721 - RNA, 21 nt, Human
cagauacaacacaaauguucc

SEQ ID NO: 59722 - RNA, 19 nt, Human
cagcaguaacuuuaggaaa

SEQ ID NO: 59723 - RNA, 24 nt, Human
cagcaguaacuuuaggaaaauccu

SEQ ID NO: 59724 - RNA, 22 nt, Human
cagcaguucucuucagcuccuc

SEQ ID NO: 59725 - RNA, 27 nt, Human
cagugccaguguuacagauacaacaca

SEQ ID NO: 59726 - RNA, 20 nt, Human
caugugugugucugugugua

SEQ ID NO: 59727 - RNA, 22 nt, Human
cauuuccauuccgaaugccaga

SEQ ID NO: 59728 - RNA, 19 nt, Human
ccaagguccaagccaggcu

SEQ ID NO: 59729 - RNA, 19 nt, Human
ccaguccacagagaaacaa

SEQ ID NO: 59730 - RNA, 20 nt, Human
ccauauccuucaugccaaau

SEQ ID NO: 59731 - RNA, 21 nt, Human
ccauauccuucaugccaaauc

SEQ ID NO: 59732 - RNA, 21 nt, Human
ccuccagaagcagccagccuc

SEQ ID NO: 59733 - RNA, 23 nt, Human
cucaagaaauaaaaagggagguu

SEQ ID NO: 59734 - RNA, 19 nt, Human
cuccagaagcagccagccu

SEQ ID NO: 59735 - RNA, 24 nt, Human
cuuugaaacuggugaacuccucuu

SEQ ID NO: 59736 - RNA, 21 nt, Human
gaagagugcaaaguagccucc

SEQ ID NO: 59737 - RNA, 19 nt, Human
gcaaaguagccuccagaag

SEQ ID NO: 59738 - RNA, 20 nt, Human
gcaaaguagccuccagaagc

SEQ ID NO: 59739 - RNA, 20 nt, Human
gccaagguccaagccaggcu

SEQ ID NO: 59740 - RNA, 19 nt, Human
gcuguaaaugugggagggg

SEQ ID NO: 59741 - RNA, 20 nt, Human
ggcagggcucccuaaugucc

SEQ ID NO: 59742 - RNA, 22 nt, Human
gggaaccaguagaaaaaggccg

SEQ ID NO: 59743 - RNA, 21 nt, Human
gggaaucaauuuugaaaauca

SEQ ID NO: 59744 - RNA, 21 nt, Human
gggagcuggaagagccuugga

SEQ ID NO: 59745 - RNA, 23 nt, Human
guucaaacaggcaaguuaugggc

SEQ ID NO: 59746 - RNA, 20 nt, Human
uaacaaugcuucaaggucag

SEQ ID NO: 59747 - RNA, 24 nt, Human
uacaugugugugucuguguguaua

SEQ ID NO: 59748 - RNA, 20 nt, Human
uagaaagaaggggcaacucc

SEQ ID NO: 59749 - RNA, 19 nt, Human
uagaaggugaccauuuugc

SEQ ID NO: 59750 - RNA, 22 nt, Human
ucagcaguucucuucagcuccu

SEQ ID NO: 59751 - RNA, 24 nt, Human
uccaagccaggcucaagaaauaaa

SEQ ID NO: 59752 - RNA, 21 nt, Human
uccacccauuaccauaguuca

SEQ ID NO: 59753 - RNA, 18 nt, Human
uccuaagggcaaagguac

SEQ ID NO: 59754 - RNA, 23 nt, Human
ucuucagcuccucaugcccgugg

SEQ ID NO: 59755 - RNA, 21 nt, Human
ucuuccuaagggcaaagguug

SEQ ID NO: 59756 - RNA, 20 nt, Human
ugaagaugguaacccagcua

SEQ ID NO: 59757 - RNA, 20 nt, Human
uggaagagccuuggaaguuu

SEQ ID NO: 59758 - RNA, 20 nt, Human
uggcgagaaaggggagcugg

SEQ ID NO: 59759 - RNA, 19 nt, Human
ugggagggguggagaagug

SEQ ID NO: 59760 - RNA, 24 nt, Human
ugguaacaaacauacaugugugug

SEQ ID NO: 59761 - RNA, 25 nt, Human
ugguaacaaacauacaugugugugu

SEQ ID NO: 59762 - RNA, 20 nt, Human
uguguauacagcaaugcaca

SEQ ID NO: 59763 - RNA, 21 nt, Human
ugugucuguguguauacagca

SEQ ID NO: 59764 - RNA, 22 nt, Human
uguguguauacagcaaugcaca

SEQ ID NO: 59765 - RNA, 20 nt, Human
ugugugugucuguguguaua

SEQ ID NO: 59766 - RNA, 22 nt, Human
uuagucuuuaacaaugcuucaa

SEQ ID NO: 59767 - RNA, 19 nt, Human
uuggaaguuucuauuacaa

SEQ ID NO: 59768 - RNA, 23 nt, Human
uuuuuuuuuuuuuuuuuuaaccg

SEQ ID NO: 59769 - RNA, 26 nt, Human
aaagaaacgagacuucuugaagacca

SEQ ID NO: 59770 - RNA, 23 nt, Human
aaggcgccacaggcgaggggacu

SEQ ID NO: 59771 - RNA, 20 nt, Human
aaggggcuucugagacgagu

SEQ ID NO: 59772 - RNA, 18 nt, Human
aagugcuuccugagugcc

SEQ ID NO: 59773 - RNA, 26 nt, Human
aaugcacaaagacaaguuccaggaaa

SEQ ID NO: 59774 - RNA, 18 nt, Human
acaaaauggcaacaaaac

SEQ ID NO: 59775 - RNA, 18 nt, Human
acaaacagcaacgaaugc

SEQ ID NO: 59776 - RNA, 21 nt, Human
acaggguggggaggacgggug

SEQ ID NO: 59777 - RNA, 19 nt, Human
accaaaccccaccuccccu

SEQ ID NO: 59778 - RNA, 21 nt, Human
accaagugcuuccugagugcc

SEQ ID NO: 59779 - RNA, 18 nt, Human
acuucaggggcaaagaaa

SEQ ID NO: 59780 - RNA, 24 nt, Human
agcggccgagggcgguggcggcgg

SEQ ID NO: 59781 - RNA, 23 nt, Human
aggaacacccauaaacccauaac

SEQ ID NO: 59782 - RNA, 23 nt, Human
aggaagacaagaagggugagggc

SEQ ID NO: 59783 - RNA, 18 nt, Human
aggagccccgaggccggg

SEQ ID NO: 59784 - RNA, 25 nt, Human
agggcgguggcggcggcagcgacgg

SEQ ID NO: 59785 - RNA, 24 nt, Human
aggggcaaagaaacgagacuucuu

SEQ ID NO: 59786 - RNA, 22 nt, Human
aucucgugacccaggcuggccc

SEQ ID NO: 59787 - RNA, 19 nt, Human
caaaacgacgccccugcug

SEQ ID NO: 59788 - RNA, 23 nt, Human
caaacagcaacgaaugcacaaag

SEQ ID NO: 59789 - RNA, 20 nt, Human
caaagacaaguuccaggaac

SEQ ID NO: 59790 - RNA, 20 nt, Human
caacaaaacgacgccccugc

SEQ ID NO: 59791 - RNA, 22 nt, Human
caaguuccaggaacacccauaa

SEQ ID NO: 59792 - RNA, 23 nt, Human
cacaaacagcaacgaaugcacaa

SEQ ID NO: 59793 - RNA, 22 nt, Human
caccaaaccccaccuccccugg

SEQ ID NO: 59794 - RNA, 24 nt, Human
cacccauaaacccauaacguucaa

SEQ ID NO: 59795 - RNA, 19 nt, Human
caccugcagcuggcuggcu

SEQ ID NO: 59796 - RNA, 25 nt, Human
cagcauaaaaggcuguaaccucuac

SEQ ID NO: 59797 - RNA, 23 nt, Human
cagccucgacguguaaauggccc

SEQ ID NO: 59798 - RNA, 21 nt, Human
caggagccccgaggccggggu

SEQ ID NO: 59799 - RNA, 24 nt, Human
ccaagcgcagacgugggugacacg

SEQ ID NO: 59800 - RNA, 23 nt, Human
ccaggaacacccauaaacccagc

SEQ ID NO: 59801 - RNA, 20 nt, Human
cccauaacguucaacaaaau

SEQ ID NO: 59802 - RNA, 26 nt, Human
cccccgagcgcgccaggugccagccu

SEQ ID NO: 59803 - RNA, 27 nt, Human
ccccugaaacugacuucaggggcaaag

SEQ ID NO: 59804 - RNA, 20 nt, Human
cccgagcgcgccaggugcca

SEQ ID NO: 59805 - RNA, 22 nt, Human
cccugggaaggcgccacaggcg

SEQ ID NO: 59806 - RNA, 22 nt, Human
ccgagggcgguggcggcggcuu

SEQ ID NO: 59807 - RNA, 20 nt, Human
ccugcagcuggcuggcuggc

SEQ ID NO: 59808 - RNA, 21 nt, Human
ccuucguggcagaugccaccu

SEQ ID NO: 59809 - RNA, 22 nt, Human
cggcggcagcgacgguggggac

SEQ ID NO: 59810 - RNA, 21 nt, Human
cgggguguuggcugcgacagc

SEQ ID NO: 59811 - RNA, 23 nt, Human
cucucaccaaaccccaccucccc

SEQ ID NO: 59812 - RNA, 19 nt, Human
cugccaccaggagccccga

SEQ ID NO: 59813 - RNA, 21 nt, Human
cugggcagaggcugggagggu

SEQ ID NO: 59814 - RNA, 20 nt, Human
gcaaagaaacgagacuucuu

SEQ ID NO: 59815 - RNA, 24 nt, Human
gcaacaaaacgacgccccugcugg

SEQ ID NO: 59816 - RNA, 24 nt, Human
gcacaaagacaaguuccaggaaca

SEQ ID NO: 59817 - RNA, 21 nt, Human
gcagguguguccccuggugcu

SEQ ID NO: 59818 - RNA, 19 nt, Human
gccagagaccagggagggc

SEQ ID NO: 59819 - RNA, 21 nt, Human
gccuggcgaggcuggcgcuuc

SEQ ID NO: 59820 - RNA, 28 nt, Human
gcggccgagggcgguggcggcggcagcg

SEQ ID NO: 59821 - RNA, 23 nt, Human
ggaacacccauaaacccauaacg

SEQ ID NO: 59822 - RNA, 22 nt, Human
ggcagagcagauggccugggga

SEQ ID NO: 59823 - RNA, 18 nt, Human
ggccagagaccagggagg

SEQ ID NO: 59824 - RNA, 18 nt, Human
ggcgguggcggcggcagc

SEQ ID NO: 59825 - RNA, 19 nt, Human
ggcugggaggguggccaga

SEQ ID NO: 59826 - RNA, 23 nt, Human
gggaaaggggcuucugagacgag

SEQ ID NO: 59827 - RNA, 21 nt, Human
gggcaaagaaacgagacuucu

SEQ ID NO: 59828 - RNA, 18 nt, Human
gggcagaggcugggaggg

SEQ ID NO: 59829 - RNA, 19 nt, Human
gggccccuccaucuggugg

SEQ ID NO: 59830 - RNA, 25 nt, Human
gggcgguggcggcggcagcgacggu

SEQ ID NO: 59831 - RNA, 25 nt, Human
ggggacagugaggguaaccgguacc

SEQ ID NO: 59832 - RNA, 20 nt, Human
gggugaccaagcgcagacgu

SEQ ID NO: 59833 - RNA, 18 nt, Human
gguaacacaaacagcaac

SEQ ID NO: 59834 - RNA, 19 nt, Human
guaacacaaacagcaacga

SEQ ID NO: 59835 - RNA, 21 nt, Human
guggcggcggcagcgacggug

SEQ ID NO: 59836 - RNA, 22 nt, Human
uaaacccauaacguucaacaaa

SEQ ID NO: 59837 - RNA, 24 nt, Human
uaacguucaacaaaauggcaacaa

SEQ ID NO: 59838 - RNA, 19 nt, Human
uaccugggagcucaacagc

SEQ ID NO: 59839 - RNA, 23 nt, Human
ucccugggcagaggcugggaggg

SEQ ID NO: 59840 - RNA, 18 nt, Human
ucucaccaaaccccaccu

SEQ ID NO: 59841 - RNA, 22 nt, Human
ucucaccaaaccccaccucccc

SEQ ID NO: 59842 - RNA, 25 nt, Human
ugacagcaucucgugacccaggcug

SEQ ID NO: 59843 - RNA, 25 nt, Human
ugagugccguaggacguggguggga

SEQ ID NO: 59844 - RNA, 21 nt, Human
uggccagagaccagggagggc

SEQ ID NO: 59845 - RNA, 22 nt, Human
uggcgaggcuggcgcuuccuuc

SEQ ID NO: 59846 - RNA, 20 nt, Human
uggcggcggcagcgacggug

SEQ ID NO: 59847 - RNA, 21 nt, Human
ugggaaaaagucugaggcugg

SEQ ID NO: 59848 - RNA, 18 nt, Human
ugggaaaggggcuucuga

SEQ ID NO: 59849 - RNA, 23 nt, Human
ugggaaaggggcuucugagacga

SEQ ID NO: 59850 - RNA, 19 nt, Human
ugggaaggcgccacaggcg

SEQ ID NO: 59851 - RNA, 23 nt, Human
ugggcguugagcaaggccgggcg

SEQ ID NO: 59852 - RNA, 23 nt, Human
uggggaaggcaggggucccuggg

SEQ ID NO: 59853 - RNA, 19 nt, Human
uugaagaccagccucuucu

SEQ ID NO: 59854 - RNA, 21 nt, Human
aagaaaggacauaaaggcaga

SEQ ID NO: 59855 - RNA, 18 nt, Human
aagcugccuggcuggcua

SEQ ID NO: 59856 - RNA, 22 nt, Human
aaggccccacugcagccaagga

SEQ ID NO: 59857 - RNA, 21 nt, Human
acagggcccugggcagaggag

SEQ ID NO: 59858 - RNA, 23 nt, Human
acuggagugaaaggccagggcca

SEQ ID NO: 59859 - RNA, 22 nt, Human
acuucccccucccccuccccac

SEQ ID NO: 59860 - RNA, 18 nt, Human
agaaagagggggguccag

SEQ ID NO: 59861 - RNA, 20 nt, Human
agaaaggacauaaaggcaga

SEQ ID NO: 59862 - RNA, 23 nt, Human
agaacagggcccugggcagagga

SEQ ID NO: 59863 - RNA, 23 nt, Human
agaagaaaggacauaaaggcaga

SEQ ID NO: 59864 - RNA, 21 nt, Human
agcugccuggcuggcuagggg

SEQ ID NO: 59865 - RNA, 20 nt, Human
aggagaaagagggggguccg

SEQ ID NO: 59866 - RNA, 19 nt, Human
aggcagacacuucccccuc

SEQ ID NO: 59867 - RNA, 21 nt, Human
aggcagggaauaaaagccaaa

SEQ ID NO: 59868 - RNA, 21 nt, Human
agggagggaaggacaucuggg

SEQ ID NO: 59869 - RNA, 23 nt, Human
agggagggaaggacaucuggggu

SEQ ID NO: 59870 - RNA, 20 nt, Human
cacccccaucugggucacau

SEQ ID NO: 59871 - RNA, 22 nt, Human
cacuucccccucccccucccca

SEQ ID NO: 59872 - RNA, 24 nt, Human
cacuucccccucccccuccccacc

SEQ ID NO: 59873 - RNA, 18 nt, Human
cagccgagucccaccaag

SEQ ID NO: 59874 - RNA, 24 nt, Human
cagccuccggcucggcgcguccca

SEQ ID NO: 59875 - RNA, 20 nt, Human
ccccucccaggcagagaagc

SEQ ID NO: 59876 - RNA, 24 nt, Human
ccccuccccaccccucccagcucc

SEQ ID NO: 59877 - RNA, 20 nt, Human
cccgccacgcugccaggacc

SEQ ID NO: 59878 - RNA, 21 nt, Human
cccgccacgcugccaggaccc

SEQ ID NO: 59879 - RNA, 22 nt, Human
cccucccagcuccugccucacc

SEQ ID NO: 59880 - RNA, 22 nt, Human
ccuccccaccccucccagcucc

SEQ ID NO: 59881 - RNA, 23 nt, Human
ccucccccuccccaccccuccca

SEQ ID NO: 59882 - RNA, 23 nt, Human
ccucccuggcacuggauaaaggc

SEQ ID NO: 59883 - RNA, 21 nt, Human
ccugaacaccuuuucccuuua

SEQ ID NO: 59884 - RNA, 18 nt, Human
cgccacgcugccaggacc

SEQ ID NO: 59885 - RNA, 24 nt, Human
cucaaaguggcaagguuagaaaaa

SEQ ID NO: 59886 - RNA, 23 nt, Human
cuucccccucccccuccccaccc

SEQ ID NO: 59887 - RNA, 19 nt, Human
cuugcccuucccccaaccc

SEQ ID NO: 59888 - RNA, 21 nt, Human
gagaaagagggggguccaggc

SEQ ID NO: 59889 - RNA, 18 nt, Human
gcagccaaggagaaagag

SEQ ID NO: 59890 - RNA, 24 nt, Human
gccaaggagaaagaggggggucca

SEQ ID NO: 59891 - RNA, 27 nt, Human
gcccugaacaccuuuucccuuuaaccu

SEQ ID NO: 59892 - RNA, 22 nt, Human
gccuggcuggcuagggggaggg

SEQ ID NO: 59893 - RNA, 19 nt, Human
gcuagggggaggguggagg

SEQ ID NO: 59894 - RNA, 21 nt, Human
gcugccaggaccccaucgcca

SEQ ID NO: 59895 - RNA, 18 nt, Human
ggcaagguuagaaaaaaa

SEQ ID NO: 59896 - RNA, 19 nt, Human
ggcuagggggaggguggag

SEQ ID NO: 59897 - RNA, 18 nt, Human
gguuaugggacagagagg

SEQ ID NO: 59898 - RNA, 20 nt, Human
gugaaaggccagggccagga

SEQ ID NO: 59899 - RNA, 21 nt, Human
uaaaagccaaauagcaccccc

SEQ ID NO: 59900 - RNA, 19 nt, Human
uagggggaggguggaggua

SEQ ID NO: 59901 - RNA, 20 nt, Human
uagggggaggguggagguag

SEQ ID NO: 59902 - RNA, 23 nt, Human
uaugggacagagaggacaagaag

SEQ ID NO: 59903 - RNA, 24 nt, Human
ucccauaaagcuugcccuuccccc

SEQ ID NO: 59904 - RNA, 19 nt, Human
uccccaccccucccagcuc

SEQ ID NO: 59905 - RNA, 19 nt, Human
ucccccaacccuuccuucc

SEQ ID NO: 59906 - RNA, 22 nt, Human
ucccccaacccuuccuucccuc

SEQ ID NO: 59907 - RNA, 18 nt, Human
ucccgccacgcugccagg

SEQ ID NO: 59908 - RNA, 22 nt, Human
ugaaaggccagggccaggacca

SEQ ID NO: 59909 - RNA, 21 nt, Human
ugcagccaaggagaaagaggg

SEQ ID NO: 59910 - RNA, 22 nt, Human
ugccuggcuggcuagggggagg

SEQ ID NO: 59911 - RNA, 25 nt, Human
ugccuggcuggcuagggggagggug

SEQ ID NO: 59912 - RNA, 20 nt, Human
uggcacuggauaaaggcccc

SEQ ID NO: 59913 - RNA, 19 nt, Human
uggcuggcuagggggaggg

SEQ ID NO: 59914 - RNA, 21 nt, Human
uggcuggcuagggggagggug

SEQ ID NO: 59915 - RNA, 19 nt, Human
ugggcagaggagaagcagc

SEQ ID NO: 59916 - RNA, 19 nt, Human
uucccccucccccucccca

SEQ ID NO: 59917 - RNA, 22 nt, Human
uuuuuuuuuuuuuuuuuuccag

SEQ ID NO: 59918 - RNA, 21 nt, Human
aaaauaaaaauacaaaaggcc

SEQ ID NO: 59919 - RNA, 21 nt, Human
aaagucccaggcaucccccaa

SEQ ID NO: 59920 - RNA, 27 nt, Human
aacagcagcagaugaacaaaaauaaaa

SEQ ID NO: 59921 - RNA, 23 nt, Human
aagcggggaccgggcggaaagga

SEQ ID NO: 59922 - RNA, 21 nt, Human
aaggagccgagccggccgcgg

SEQ ID NO: 59923 - RNA, 22 nt, Human
accccaggcagcgccaaggagc

SEQ ID NO: 59924 - RNA, 21 nt, Human
accgcccccugccccuccccu

SEQ ID NO: 59925 - RNA, 20 nt, Human
aggaccccaggcagcgccaa

SEQ ID NO: 59926 - RNA, 24 nt, Human
agggcuggcuggcgggcgggcggg

SEQ ID NO: 59927 - RNA, 26 nt, Human
aggguggggugggaggggaggagaca

SEQ ID NO: 59928 - RNA, 19 nt, Human
agucccaggcaucccccaa

SEQ ID NO: 59929 - RNA, 22 nt, Human
agucccaggcaucccccaaacc

SEQ ID NO: 59930 - RNA, 23 nt, Human
caaaaauaaaaauacaaaaggcc

SEQ ID NO: 59931 - RNA, 18 nt, Human
caacagggugggguggga

SEQ ID NO: 59932 - RNA, 24 nt, Human
cacaauaauacacagccccuggau

SEQ ID NO: 59933 - RNA, 22 nt, Human
caccaaaacugccucaguccaa

SEQ ID NO: 59934 - RNA, 18 nt, Human
cagaauguaaacagcagc

SEQ ID NO: 59935 - RNA, 20 nt, Human
cagcgccaaggagccgagcc

SEQ ID NO: 59936 - RNA, 21 nt, Human
cagcgccaaggagccgagccg

SEQ ID NO: 59937 - RNA, 18 nt, Human
caggguggggugggaggg

SEQ ID NO: 59938 - RNA, 24 nt, Human
cauccacuucccuggccccucucc

SEQ ID NO: 59939 - RNA, 18 nt, Human
ccaggcagcgccaaggag

SEQ ID NO: 59940 - RNA, 23 nt, Human
cccccaaacccuggugucuucuc

SEQ ID NO: 59941 - RNA, 18 nt, Human
ccccccagaauguaaaca

SEQ ID NO: 59942 - RNA, 18 nt, Human
cccccugccccuccccuc

SEQ ID NO: 59943 - RNA, 22 nt, Human
ccccugccccuccccuccgccc

SEQ ID NO: 59944 - RNA, 21 nt, Human
cccgcgguccggagcucugag

SEQ ID NO: 59945 - RNA, 20 nt, Human
cccuggccccucuccccucu

SEQ ID NO: 59946 - RNA, 20 nt, Human
ccgcccccugccccuccccu

SEQ ID NO: 59947 - RNA, 23 nt, Human
ccucaguccaaggggcugcccag

SEQ ID NO: 59948 - RNA, 24 nt, Human
cgcccccugccccuccccuccgcc

SEQ ID NO: 59949 - RNA, 18 nt, Human
cgggcgggcgggcgggcu

SEQ ID NO: 59950 - RNA, 23 nt, Human
cguggcaccgcccccugccccuc

SEQ ID NO: 59951 - RNA, 21 nt, Human
cuacaacagggugggguggga

SEQ ID NO: 59952 - RNA, 25 nt, Human
cucacaauaauacacagccccugga

SEQ ID NO: 59953 - RNA, 18 nt, Human
cucccccuaaccccccag

SEQ ID NO: 59954 - RNA, 20 nt, Human
cucccccuaaccccccagaa

SEQ ID NO: 59955 - RNA, 24 nt, Human
cuggauggggaggggguaggaggg

SEQ ID NO: 59956 - RNA, 22 nt, Human
cuggugucuucucugucaccag

SEQ ID NO: 59957 - RNA, 24 nt, Human
cuggugucuucucugucaccagug

SEQ ID NO: 59958 - RNA, 21 nt, Human
gagccgagccggccgcgggga

SEQ ID NO: 59959 - RNA, 25 nt, Human
gcagcagaugaacaaaaauaaaaau

SEQ ID NO: 59960 - RNA, 20 nt, Human
gcuggcgggcgggcgggcgg

SEQ ID NO: 59961 - RNA, 23 nt, Human
ggaccgggcggaaaggaccccag

SEQ ID NO: 59962 - RNA, 23 nt, Human
ggauggggaggggguaggagggg

SEQ ID NO: 59963 - RNA, 19 nt, Human
ggccggaggaaagucccag

SEQ ID NO: 59964 - RNA, 23 nt, Human
ggccggaggaaagucccaggcau

SEQ ID NO: 59965 - RNA, 19 nt, Human
ggcuggcgggcgggcgggc

SEQ ID NO: 59966 - RNA, 22 nt, Human
ggcuggcgggcgggcgggcggg

SEQ ID NO: 59967 - RNA, 24 nt, Human
gggcacagagcagcgggggcuggc

SEQ ID NO: 59968 - RNA, 20 nt, Human
ggggaaagggagggaggggg

SEQ ID NO: 59969 - RNA, 19 nt, Human
gggggcuggcaagcgggga

SEQ ID NO: 59970 - RNA, 20 nt, Human
ggggggaaagggagggaggg

SEQ ID NO: 59971 - RNA, 21 nt, Human
gucccaggcaucccccaaacc

SEQ ID NO: 59972 - RNA, 19 nt, Human
uaaaaauacaaaaggccgg

SEQ ID NO: 59973 - RNA, 23 nt, Human
uaaacagcagcagaugaacaaaa

SEQ ID NO: 59974 - RNA, 19 nt, Human
uacacagccccuggauggg

SEQ ID NO: 59975 - RNA, 24 nt, Human
uaggaggggcuacaacaggguggg

SEQ ID NO: 59976 - RNA, 18 nt, Human
ucaguccaaggggcugcc

SEQ ID NO: 59977 - RNA, 24 nt, Human
ucccccaaacccuggugucuucuc

SEQ ID NO: 59978 - RNA, 23 nt, Human
ucccccggggcagaguccagggc

SEQ ID NO: 59979 - RNA, 18 nt, Human
ucugugcuugggggggaa

SEQ ID NO: 59980 - RNA, 20 nt, Human
ucuucucugucaccagugga

SEQ ID NO: 59981 - RNA, 22 nt, Human
ugccggccacaucccccggggc

SEQ ID NO: 59982 - RNA, 20 nt, Human
uggaggucccccauccacca

SEQ ID NO: 59983 - RNA, 20 nt, Human
uggcaccgcccccugccccu

SEQ ID NO: 59984 - RNA, 24 nt, Human
uggcaggccguggcaccgcccccu

SEQ ID NO: 59985 - RNA, 20 nt, Human
uggccggacagggcacagag

SEQ ID NO: 59986 - RNA, 23 nt, Human
uggcuggcgggcgggcgggcggg

SEQ ID NO: 59987 - RNA, 18 nt, Human
uggggaggggguaggagg

SEQ ID NO: 59988 - RNA, 18 nt, Human
uggggugggaggggagga

SEQ ID NO: 59989 - RNA, 22 nt, Human
uggggugggaggggaggagaca

SEQ ID NO: 59990 - RNA, 20 nt, Human
uggugucggcuccaggccug

SEQ ID NO: 59991 - RNA, 23 nt, Human
aaaaaaagaaaaaagcaaacuga

SEQ ID NO: 59992 - RNA, 25 nt, Human
aaaaaagaaaaaagcaaacugaaaa

SEQ ID NO: 59993 - RNA, 22 nt, Human
aaacaguguaacacugcuaaac

SEQ ID NO: 59994 - RNA, 21 nt, Human
aaagaaaaaagcaaacugaaa

SEQ ID NO: 59995 - RNA, 18 nt, Human
aacaggcugguauuuugg

SEQ ID NO: 59996 - RNA, 22 nt, Human
aacagguuuugccucucaggag

SEQ ID NO: 59997 - RNA, 19 nt, Human
aaccuccaucccacuuccc

SEQ ID NO: 59998 - RNA, 19 nt, Human
aaccugcuuuuccgcucca

SEQ ID NO: 59999 - RNA, 20 nt, Human
aacuaggcacagaaaaggca

SEQ ID NO: 60000 - RNA, 18 nt, Human
aagcccacaaguaaggac

SEQ ID NO: 60001 - RNA, 24 nt, Human
aagccgugguggaggcaacagguu

SEQ ID NO: 60002 - RNA, 25 nt, Human
aagcuucacaacacagacacagagc

SEQ ID NO: 60003 - RNA, 21 nt, Human
aagcuucccccaacccccacc

SEQ ID NO: 60004 - RNA, 22 nt, Human
aagcuuggaaugagccaagagg

SEQ ID NO: 60005 - RNA, 20 nt, Human
aaucucugaccagcaaaaga

SEQ ID NO: 60006 - RNA, 22 nt, Human
aaugagccaagagggaagccgu

SEQ ID NO: 60007 - RNA, 19 nt, Human
acacacuuuuccuucugga

SEQ ID NO: 60008 - RNA, 19 nt, Human
acagagcgucaaaaucaau

SEQ ID NO: 60009 - RNA, 22 nt, Human
acccaauaagaacagaggaaug

SEQ ID NO: 60010 - RNA, 21 nt, Human
accuccaucccacuuccccaa

SEQ ID NO: 60011 - RNA, 23 nt, Human
acugguggggaggcugagagaag

SEQ ID NO: 60012 - RNA, 20 nt, Human
acuuuaccaaccugcuuuuc

SEQ ID NO: 60013 - RNA, 18 nt, Human
agaaaaaagcaaacugaa

SEQ ID NO: 60014 - RNA, 19 nt, Human
agaaaaaagcaaacugaaa

SEQ ID NO: 60015 - RNA, 24 nt, Human
agaaaaaagcaaacugaaaaucca

SEQ ID NO: 60016 - RNA, 18 nt, Human
agaacccaucaaaagcua

SEQ ID NO: 60017 - RNA, 23 nt, Human
agaauuccucccuaacucugcuc

SEQ ID NO: 60018 - RNA, 23 nt, Human
agacacacucaggcagaggaggg

SEQ ID NO: 60019 - RNA, 21 nt, Human
agaggaggggggaugcagggc

SEQ ID NO: 60020 - RNA, 18 nt, Human
agcaugguugaaggguac

SEQ ID NO: 60021 - RNA, 19 nt, Human
agcuucccccaacccccac

SEQ ID NO: 60022 - RNA, 18 nt, Human
agcuuugcaacugguaug

SEQ ID NO: 60023 - RNA, 19 nt, Human
aggcagaggaggggggaug

SEQ ID NO: 60024 - RNA, 19 nt, Human
aggcaggagaaggcauuag

SEQ ID NO: 60025 - RNA, 21 nt, Human
aggcuuggccaaggaaaagga

SEQ ID NO: 60026 - RNA, 20 nt, Human
agggcaacauuuccccugcc

SEQ ID NO: 60027 - RNA, 19 nt, Human
aggggaaaacgacaagaga

SEQ ID NO: 60028 - RNA, 23 nt, Human
aguaucaugaagaaagagcagau

SEQ ID NO: 60029 - RNA, 23 nt, Human
agugcaguguuucaguuacacuu

SEQ ID NO: 60030 - RNA, 19 nt, Human
aguguaacacugcuaaaca

SEQ ID NO: 60031 - RNA, 19 nt, Human
auggaauaugugaagagcc

SEQ ID NO: 60032 - RNA, 23 nt, Human
auuccuccucugaguccagugag

SEQ ID NO: 60033 - RNA, 19 nt, Human
caaaagauauucagcugcc

SEQ ID NO: 60034 - RNA, 23 nt, Human
caacaagugcccgcagaucaaac

SEQ ID NO: 60035 - RNA, 20 nt, Human
caacauuuccccugcccccc

SEQ ID NO: 60036 - RNA, 22 nt, Human
caacauuuccccugcccccccu

SEQ ID NO: 60037 - RNA, 19 nt, Human
caacccccacccucccgaa

SEQ ID NO: 60038 - RNA, 21 nt, Human
caacgcauuaagugggguagg

SEQ ID NO: 60039 - RNA, 23 nt, Human
caaggucaagcuucccccaaccc

SEQ ID NO: 60040 - RNA, 19 nt, Human
caauacaauuucuuccagu

SEQ ID NO: 60041 - RNA, 20 nt, Human
cacaacacagacacagagca

SEQ ID NO: 60042 - RNA, 21 nt, Human
cacaacacagacacagagcag

SEQ ID NO: 60043 - RNA, 25 nt, Human
cacagacacagagcaggcuugggug

SEQ ID NO: 60044 - RNA, 21 nt, Human
cacaggaagcuaaaacuaucc

SEQ ID NO: 60045 - RNA, 25 nt, Human
cacccucccgaaaaacaggacccaa

SEQ ID NO: 60046 - RNA, 22 nt, Human
caccuucauucuggcaucuggc

SEQ ID NO: 60047 - RNA, 19 nt, Human
cacuacacagcugacgggc

SEQ ID NO: 60048 - RNA, 26 nt, Human
cacuacacagcugacgggccuuggcg

SEQ ID NO: 60049 - RNA, 23 nt, Human
cagacaugaaauagggguguggg

SEQ ID NO: 60050 - RNA, 23 nt, Human
cagaggaaugagaagcauucuua

SEQ ID NO: 60051 - RNA, 20 nt, Human
cagcaaaagaguucugggug

SEQ ID NO: 60052 - RNA, 21 nt, Human
cagcaauacaauuucuuccag

SEQ ID NO: 60053 - RNA, 26 nt, Human
cagcagcagguggcaagaggugggag

SEQ ID NO: 60054 - RNA, 22 nt, Human
cagcaucuggguucuuguuccc

SEQ ID NO: 60055 - RNA, 23 nt, Human
cagcugacauuacaaagacacac

SEQ ID NO: 60056 - RNA, 21 nt, Human
caggcaaugcaacaagugccc

SEQ ID NO: 60057 - RNA, 26 nt, Human
caggcagaggaggggggaugcagggc

SEQ ID NO: 60058 - RNA, 19 nt, Human
caucaaaagcuaggguagg

SEQ ID NO: 60059 - RNA, 20 nt, Human
caucaaaagcuaggguaggu

SEQ ID NO: 60060 - RNA, 20 nt, Human
caugaagaaagagcagauca

SEQ ID NO: 60061 - RNA, 19 nt, Human
cauggacccugaauauugg

SEQ ID NO: 60062 - RNA, 19 nt, Human
ccaaacuacacucaaaaga

SEQ ID NO: 60063 - RNA, 20 nt, Human
ccacaaguaaggacagauag

SEQ ID NO: 60064 - RNA, 23 nt, Human
ccacccucccgaaaaacaggacc

SEQ ID NO: 60065 - RNA, 19 nt, Human
ccaccucccacauacaauc

SEQ ID NO: 60066 - RNA, 21 nt, Human
ccaccucccacauacaauccu

SEQ ID NO: 60067 - RNA, 22 nt, Human
cccaacccccacccucccgaaa

SEQ ID NO: 60068 - RNA, 18 nt, Human
cccacccucccgaaaaac

SEQ ID NO: 60069 - RNA, 23 nt, Human
cccacuuugccagggacaaagau

SEQ ID NO: 60070 - RNA, 20 nt, Human
ccccaacccccacccucccg

SEQ ID NO: 60071 - RNA, 23 nt, Human
ccccaacccccacccucccgaaa

SEQ ID NO: 60072 - RNA, 25 nt, Human
ccccaacccccacccucccgaaaaa

SEQ ID NO: 60073 - RNA, 20 nt, Human
cccccaacccccacccuccc

SEQ ID NO: 60074 - RNA, 22 nt, Human
cccccccuccccauuucuuucc

SEQ ID NO: 60075 - RNA, 22 nt, Human
cccccccuccccauuucuuucc

SEQ ID NO: 60076 - RNA, 25 nt, Human
ccccugcccccccuccccauuucuu

SEQ ID NO: 60077 - RNA, 20 nt, Human
cccuccccauuucuuuccaa

SEQ ID NO: 60078 - RNA, 23 nt, Human
ccugcccgucacgauucuuuucu

SEQ ID NO: 60079 - RNA, 20 nt, Human
ccuucugcacuacuuguauc

SEQ ID NO: 60080 - RNA, 22 nt, Human
cgaaaaacaggacccaauaaga

SEQ ID NO: 60081 - RNA, 19 nt, Human
cuccaucccacuuccccaa

SEQ ID NO: 60082 - RNA, 20 nt, Human
cucccacauacaauccuaug

SEQ ID NO: 60083 - RNA, 21 nt, Human
cucugcucaggggugugaugg

SEQ ID NO: 60084 - RNA, 23 nt, Human
cugaagugccccugauuuaagca

SEQ ID NO: 60085 - RNA, 19 nt, Human
cuucccccaacccccaccc

SEQ ID NO: 60086 - RNA, 22 nt, Human
cuucccccaacccccacccucc

SEQ ID NO: 60087 - RNA, 21 nt, Human
gaaaauccaaaugaccaggga

SEQ ID NO: 60088 - RNA, 23 nt, Human
gaagagccaaaaacuaggcacag

SEQ ID NO: 60089 - RNA, 20 nt, Human
gaagcaugaaggcuuggcca

SEQ ID NO: 60090 - RNA, 19 nt, Human
gacacacuuuuccuucugg

SEQ ID NO: 60091 - RNA, 20 nt, Human
gaccgcuccccacaagcuuu

SEQ ID NO: 60092 - RNA, 21 nt, Human
gagagcacagcccagguggug

SEQ ID NO: 60093 - RNA, 21 nt, Human
gagagggggugaggggacagc

SEQ ID NO: 60094 - RNA, 24 nt, Human
gagcuguuauccaucacugguggg

SEQ ID NO: 60095 - RNA, 19 nt, Human
gcaagaggugggaggugac

SEQ ID NO: 60096 - RNA, 21 nt, Human
gccgugguggaggcaacaggu

SEQ ID NO: 60097 - RNA, 18 nt, Human
gcgaaggcgagggcgggg

SEQ ID NO: 60098 - RNA, 21 nt, Human
gcgaaggcgagggcgggggug

SEQ ID NO: 60099 - RNA, 18 nt, Human
ggaacugccugaaccucu

SEQ ID NO: 60100 - RNA, 22 nt, Human
ggacagacacucagggaaucuc

SEQ ID NO: 60101 - RNA, 22 nt, Human
ggagaaggcauuaggggaaaac

SEQ ID NO: 60102 - RNA, 18 nt, Human
gggaaucucugaccagca

SEQ ID NO: 60103 - RNA, 21 nt, Human
gggagccggagagcacagccc

SEQ ID NO: 60104 - RNA, 21 nt, Human
ggggguggcggcgggagccgg

SEQ ID NO: 60105 - RNA, 22 nt, Human
guuuguucaggggaaaggaaag

SEQ ID NO: 60106 - RNA, 18 nt, Human
uaaagagcauuugcaaca

SEQ ID NO: 60107 - RNA, 23 nt, Human
uaaagagcauuugcaacaucucu

SEQ ID NO: 60108 - RNA, 19 nt, Human
uaagguauaacuucuguca

SEQ ID NO: 60109 - RNA, 24 nt, Human
uaaguaucaugaagaaagagcaga

SEQ ID NO: 60110 - RNA, 18 nt, Human
uaagucccaagaagggaa

SEQ ID NO: 60111 - RNA, 26 nt, Human
uaccaaccugcuuuuccgcuccacac

SEQ ID NO: 60112 - RNA, 20 nt, Human
uagcacagguuagacuaguu

SEQ ID NO: 60113 - RNA, 20 nt, Human
uaggaaauuguguugucugc

SEQ ID NO: 60114 - RNA, 21 nt, Human
uaggggaaaacgacaagagac

SEQ ID NO: 60115 - RNA, 20 nt, Human
uaggucucaguccaacauga

SEQ ID NO: 60116 - RNA, 22 nt, Human
uaguuugcuuugagaugagaac

SEQ ID NO: 60117 - RNA, 21 nt, Human
ucaggucagcugagaauagga

SEQ ID NO: 60118 - RNA, 21 nt, Human
ucaguccaacaugacgccugu

SEQ ID NO: 60119 - RNA, 20 nt, Human
uccaacgcauuaaguggggu

SEQ ID NO: 60120 - RNA, 23 nt, Human
uccacacaucaccgaccuaucca

SEQ ID NO: 60121 - RNA, 27 nt, Human
uccacacaucaccgaccuauccaccuc

SEQ ID NO: 60122 - RNA, 18 nt, Human
uccagagucucaagcuuc

SEQ ID NO: 60123 - RNA, 23 nt, Human
ucccacuuccccaauuuggccaa

SEQ ID NO: 60124 - RNA, 20 nt, Human
ucccccaacccccacccucc

SEQ ID NO: 60125 - RNA, 21 nt, Human
ucccccaacccccacccuccc

SEQ ID NO: 60126 - RNA, 21 nt, Human
ucccccagucuuuucagagau

SEQ ID NO: 60127 - RNA, 19 nt, Human
uccccugcccccccucccc

SEQ ID NO: 60128 - RNA, 20 nt, Human
uccccugcccccccucccca

SEQ ID NO: 60129 - RNA, 19 nt, Human
ucucuuggagauucucaag

SEQ ID NO: 60130 - RNA, 23 nt, Human
ucugcaccuauucugcuggccuc

SEQ ID NO: 60131 - RNA, 18 nt, Human
ugaaaaccacacugacgg

SEQ ID NO: 60132 - RNA, 23 nt, Human
ugaaaugagcucucaauuacaaa

SEQ ID NO: 60133 - RNA, 19 nt, Human
ugaagugccccugauuuaa

SEQ ID NO: 60134 - RNA, 22 nt, Human
ugacgaagacacaaggucaagc

SEQ ID NO: 60135 - RNA, 20 nt, Human
ugacggggacuuaggagacu

SEQ ID NO: 60136 - RNA, 22 nt, Human
ugaggacagacacucagggaau

SEQ ID NO: 60137 - RNA, 22 nt, Human
ugaggggacagcaucuggguug

SEQ ID NO: 60138 - RNA, 23 nt, Human
ugaugccagcugacauuacaaag

SEQ ID NO: 60139 - RNA, 21 nt, Human
ugcgcaaaacccacuuugcca

SEQ ID NO: 60140 - RNA, 27 nt, Human
uggaaagggggaagcaugaaggcuugg

SEQ ID NO: 60141 - RNA, 27 nt, Human
uggaaugauaguuugcuuugagauggc

SEQ ID NO: 60142 - RNA, 22 nt, Human
ugggagguggcuuccccaagga

SEQ ID NO: 60143 - RNA, 19 nt, Human
ugugaagagccaaaaacua

SEQ ID NO: 60144 - RNA, 27 nt, Human
uuaaugacagucauuucaaugccuucu

SEQ ID NO: 60145 - RNA, 19 nt, Human
uuacaaauguucacaggaa

SEQ ID NO: 60146 - RNA, 19 nt, Human
uucaagaagaucaccguuc

SEQ ID NO: 60147 - RNA, 19 nt, Human
uucacaggaagcuaaaacu

SEQ ID NO: 60148 - RNA, 19 nt, Human
uuccagagucucaagcuuc

SEQ ID NO: 60149 - RNA, 22 nt, Human
uuccgcuccacacaucaccgac

SEQ ID NO: 60150 - RNA, 20 nt, Human
uuccucccuccuuccccaaa

SEQ ID NO: 60151 - RNA, 21 nt, Human
uucucauauguacaaaaguau

SEQ ID NO: 60152 - RNA, 22 nt, Human
uugcagugugaaccuucugcac

SEQ ID NO: 60153 - RNA, 22 nt, Human
uuggaggggaaaaaaagaaaaa

SEQ ID NO: 60154 - RNA, 21 nt, Human
uuggcacagcauggagaagcc

SEQ ID NO: 60155 - RNA, 22 nt, Human
uuuccccugcccccccucccca

SEQ ID NO: 60156 - RNA, 21 nt, Human
uuucucauauguacaaaagua

SEQ ID NO: 60157 - RNA, 22 nt, Human
uuugccagggacaaagauggug

SEQ ID NO: 60158 - RNA, 20 nt, Human
uuuguugucuuuuucugcuu

SEQ ID NO: 60159 - RNA, 21 nt, Human
uuuuagauuugaacuggaccu

SEQ ID NO: 60160 - RNA, 21 nt, Human
uuuugcucuuguuuuccacga

SEQ ID NO: 60161 - RNA, 22 nt, Human
aagcagaguagggacugaggcc

SEQ ID NO: 60162 - RNA, 18 nt, Human
aagcaggagggaggagac

SEQ ID NO: 60163 - RNA, 23 nt, Human
aagcaggagggaggagacacuga

SEQ ID NO: 60164 - RNA, 25 nt, Human
aagcaggagggaggagacacugaug

SEQ ID NO: 60165 - RNA, 21 nt, Human
aagcucacacuaucccaaagc

SEQ ID NO: 60166 - RNA, 26 nt, Human
acagaccugguguccucggcccccug

SEQ ID NO: 60167 - RNA, 21 nt, Human
agagcuguggccacaggggug

SEQ ID NO: 60168 - RNA, 23 nt, Human
agauguccgcccgcccccugcuc

SEQ ID NO: 60169 - RNA, 21 nt, Human
agcaaagcaggagggaggaga

SEQ ID NO: 60170 - RNA, 21 nt, Human
agcggcaccuggaccugugga

SEQ ID NO: 60171 - RNA, 22 nt, Human
agcuguggccacagggguggga

SEQ ID NO: 60172 - RNA, 28 nt, Human
aggccaggacagacagguggaugggaga

SEQ ID NO: 60173 - RNA, 19 nt, Human
agggaaggcagcaaagcag

SEQ ID NO: 60174 - RNA, 23 nt, Human
augggagagcaggagccucagaa

SEQ ID NO: 60175 - RNA, 23 nt, Human
caaaaugaagcucacacuauccc

SEQ ID NO: 60176 - RNA, 21 nt, Human
cacacguguacaaaaugaagc

SEQ ID NO: 60177 - RNA, 19 nt, Human
cacuaucccaaagcagagu

SEQ ID NO: 60178 - RNA, 19 nt, Human
cagguggaugggagagcag

SEQ ID NO: 60179 - RNA, 23 nt, Human
ccaacccucccacuccagagcuu

SEQ ID NO: 60180 - RNA, 20 nt, Human
ccagagcuguggccacaggg

SEQ ID NO: 60181 - RNA, 22 nt, Human
ccaggacagacagguggauggg

SEQ ID NO: 60182 - RNA, 20 nt, Human
cccccugcucugccggcccg

SEQ ID NO: 60183 - RNA, 19 nt, Human
ccccugcucgucugcccgc

SEQ ID NO: 60184 - RNA, 24 nt, Human
ccccugcucgucugcccgcugccu

SEQ ID NO: 60185 - RNA, 25 nt, Human
cggcccccugcucugccggcccggc

SEQ ID NO: 60186 - RNA, 19 nt, Human
cgggcuggugcaaagggaa

SEQ ID NO: 60187 - RNA, 26 nt, Human
cucccacuccagagcuguggccacag

SEQ ID NO: 60188 - RNA, 24 nt, Human
cuccggaucccaagauguccgccc

SEQ ID NO: 60189 - RNA, 22 nt, Human
cuuggcccagaccuagacucgg

SEQ ID NO: 60190 - RNA, 20 nt, Human
gaccuagacucgggcuggug

SEQ ID NO: 60191 - RNA, 18 nt, Human
gcaaccaacccucccacu

SEQ ID NO: 60192 - RNA, 18 nt, Human
gcccagggagcccagggg

SEQ ID NO: 60193 - RNA, 18 nt, Human
gcccaggggcugcuccac

SEQ ID NO: 60194 - RNA, 19 nt, Human
ggaaggaaagggaacccac

SEQ ID NO: 60195 - RNA, 24 nt, Human
ggagcccaggggcugcuccaccgg

SEQ ID NO: 60196 - RNA, 23 nt, Human
ggagccucagaacuccccugccc

SEQ ID NO: 60197 - RNA, 19 nt, Human
ggccacaggggugggaagg

SEQ ID NO: 60198 - RNA, 21 nt, Human
gguguccucggcccccugcuc

SEQ ID NO: 60199 - RNA, 22 nt, Human
guggaugggagagcaggagccu

SEQ ID NO: 60200 - RNA, 27 nt, Human
uacaaaaugaagcucacacuaucccaa

SEQ ID NO: 60201 - RNA, 22 nt, Human
ucacagaacucagagccuggca

SEQ ID NO: 60202 - RNA, 20 nt, Human
ucccaaagcagaguagggac

SEQ ID NO: 60203 - RNA, 18 nt, Human
uccccugcccagggagcc

SEQ ID NO: 60204 - RNA, 18 nt, Human
ucuccgcggcccaucgcu

SEQ ID NO: 60205 - RNA, 21 nt, Human
ugaagcucacacuaucccaaa

SEQ ID NO: 60206 - RNA, 20 nt, Human
ugagaacagaccuggugucc

SEQ ID NO: 60207 - RNA, 22 nt, Human
ugagaacagaccugguguccuc

SEQ ID NO: 60208 - RNA, 22 nt, Human
ugaggccggggauccauuacug

SEQ ID NO: 60209 - RNA, 24 nt, Human
ugcaaagggaaggcagcaaagcag

SEQ ID NO: 60210 - RNA, 21 nt, Human
ugcuccaccggucccacuugu

SEQ ID NO: 60211 - RNA, 21 nt, Human
uggaggaggguggcuggggag

SEQ ID NO: 60212 - RNA, 22 nt, Human
ugggaaggaaagggaacccacc

SEQ ID NO: 60213 - RNA, 25 nt, Human
ugggggagggagcggcaccuggacc

SEQ ID NO: 60214 - RNA, 22 nt, Human
uggugcaaagggaaggcagcaa

SEQ ID NO: 60215 - RNA, 22 nt, Human
uuuuuuuuuuuuuuuuuccacu

SEQ ID NO: 60216 - RNA, 20 nt, Human
accccagcggccccgguccc

SEQ ID NO: 60217 - RNA, 21 nt, Human
acccccguccagaccccagcg

SEQ ID NO: 60218 - RNA, 24 nt, Human
agcaggcgauuccaggaggggccg

SEQ ID NO: 60219 - RNA, 21 nt, Human
aggaggggccggggccggggu

SEQ ID NO: 60220 - RNA, 21 nt, Human
cagcugggucccuuccuccuu

SEQ ID NO: 60221 - RNA, 24 nt, Human
ccccguccagaccccagcggcccc

SEQ ID NO: 60222 - RNA, 26 nt, Human
cgcacagacgcuuauggaaucacacg

SEQ ID NO: 60223 - RNA, 22 nt, Human
cgggguggggugcucgccugcc

SEQ ID NO: 60224 - RNA, 18 nt, Human
cgguggccucugcccaca

SEQ ID NO: 60225 - RNA, 21 nt, Human
cugggucccuuccuccuaggc

SEQ ID NO: 60226 - RNA, 19 nt, Human
cuuguggcccagacccagc

SEQ ID NO: 60227 - RNA, 23 nt, Human
ggccggggccgggguggggugcu

SEQ ID NO: 60228 - RNA, 21 nt, Human
ggggccggggccggggugggg

SEQ ID NO: 60229 - RNA, 19 nt, Human
guggcccagacccagcugg

SEQ ID NO: 60230 - RNA, 26 nt, Human
ucugcccacagccagggcccagagga

SEQ ID NO: 60231 - RNA, 23 nt, Human
ugagggaaggacugcuggguugg

SEQ ID NO: 60232 - RNA, 24 nt, Human
ugagggaaggacugcuggguuggc

SEQ ID NO: 60233 - RNA, 27 nt, Human
ugagggaaggacugcuggguuggccac

SEQ ID NO: 60234 - RNA, 24 nt, Human
ugggaaggggaagcgagcaggcga

SEQ ID NO: 60235 - RNA, 19 nt, Human
uuacucgggacacacacgg

SEQ ID NO: 60236 - RNA, 22 nt, Human
aagcaggagacaagaaugucaa

SEQ ID NO: 60237 - RNA, 24 nt, Human
aagcaggagacaagaaugucaaga

SEQ ID NO: 60238 - RNA, 20 nt, Human
aggcacuuuuguugugugcc

SEQ ID NO: 60239 - RNA, 23 nt, Human
caguaguggaugccaggcacuuu

SEQ ID NO: 60240 - RNA, 25 nt, Human
cccacugccagauggaagggcuauu

SEQ ID NO: 60241 - RNA, 22 nt, Human
gcaaagcaaaaagggggaaagu

SEQ ID NO: 60242 - RNA, 21 nt, Human
gcaguaguggaugccaggcac

SEQ ID NO: 60243 - RNA, 18 nt, Human
ggugcuggcgggugcggg

SEQ ID NO: 60244 - RNA, 22 nt, Human
uauugcauacaugauagauaca

SEQ ID NO: 60245 - RNA, 21 nt, Human
uccugccggggguucucucca

SEQ ID NO: 60246 - RNA, 20 nt, Human
ugagacaacugacaguaaaa

SEQ ID NO: 60247 - RNA, 20 nt, Human
agacuucgccgaggaggagg

SEQ ID NO: 60248 - RNA, 26 nt, Human
agccaaacaggucacagcauuuggaa

SEQ ID NO: 60249 - RNA, 18 nt, Human
cgaggaggagguugcggc

SEQ ID NO: 60250 - RNA, 18 nt, Human
gaggaggagguugcggcg

SEQ ID NO: 60251 - RNA, 22 nt, Human
gaugaugagagagagagagaaa

SEQ ID NO: 60252 - RNA, 18 nt, Human
ggagccaaacaggucaca

SEQ ID NO: 60253 - RNA, 18 nt, Human
ggagguugcggcgcggga

SEQ ID NO: 60254 - RNA, 21 nt, Human
ggaugaugagagagagagaga

SEQ ID NO: 60255 - RNA, 23 nt, Human
gggagagaggacacccugaaugc

SEQ ID NO: 60256 - RNA, 24 nt, Human
ugagagagacugacagccuaggug

SEQ ID NO: 60257 - RNA, 18 nt, Human
ugagagagagagagaaag

SEQ ID NO: 60258 - RNA, 22 nt, Human
ugaugagagagagagagaaaga

SEQ ID NO: 60259 - RNA, 19 nt, Human
ugggagccaaacaggucac

SEQ ID NO: 60260 - RNA, 19 nt, Human
uggggagguauagauggga

SEQ ID NO: 60261 - RNA, 27 nt, Human
aagaacagcaacauugaacuuucauac

SEQ ID NO: 60262 - RNA, 21 nt, Human
acacaacuucuauacaguacc

SEQ ID NO: 60263 - RNA, 23 nt, Human
agaaaaaaaaaaaucacauagga

SEQ ID NO: 60264 - RNA, 23 nt, Human
agaaaaaagucauaauguuuuca

SEQ ID NO: 60265 - RNA, 19 nt, Human
aggugcuuuagaaguccag

SEQ ID NO: 60266 - RNA, 23 nt, Human
auacugauuuuacacaacuucua

SEQ ID NO: 60267 - RNA, 25 nt, Human
auagaggcaugccguaggugggcac

SEQ ID NO: 60268 - RNA, 21 nt, Human
caaaacaccaacauuuuaggu

SEQ ID NO: 60269 - RNA, 18 nt, Human
cacugggggccagggcgg

SEQ ID NO: 60270 - RNA, 20 nt, Human
ccaagagcaaaaguuaagac

SEQ ID NO: 60271 - RNA, 22 nt, Human
gaaaaaaaaaaaucacauagga

SEQ ID NO: 60272 - RNA, 23 nt, Human
gcggaccgggugggcacuggggg

SEQ ID NO: 60273 - RNA, 20 nt, Human
ggggccagggcgggggcggg

SEQ ID NO: 60274 - RNA, 20 nt, Human
gugccgggcggaccgggugg

SEQ ID NO: 60275 - RNA, 24 nt, Human
guuuagaaaagaaaaaaaaaaauc

SEQ ID NO: 60276 - RNA, 25 nt, Human
uaguagccaauacauagaggcaugc

SEQ ID NO: 60277 - RNA, 23 nt, Human
ugaaacacuuuuuaaaacacugu

SEQ ID NO: 60278 - RNA, 19 nt, Human
ugacuuaaauccaagagca

SEQ ID NO: 60279 - RNA, 18 nt, Human
ugagcaagaacagcaaca

SEQ ID NO: 60280 - RNA, 26 nt, Human
ugcaguuuagaaaagaaaaaaaaaaa

SEQ ID NO: 60281 - RNA, 18 nt, Human
ugggaguggccuuuuuac

SEQ ID NO: 60282 - RNA, 24 nt, Human
ugguaaacuuagaugacucuuccc

SEQ ID NO: 60283 - RNA, 21 nt, Human
uuaaaacacuguaguagccaa

SEQ ID NO: 60284 - RNA, 26 nt, Human
uucuuuaaaaucacugagcaagaaca

SEQ ID NO: 60285 - RNA, 23 nt, Human
uuuagaaaagaaaaaaaaaaauc

SEQ ID NO: 60286 - RNA, 19 nt, Human
aaaaaagaaaaaagugagg

SEQ ID NO: 60287 - RNA, 20 nt, Human
aaaaaagaaaaaagugagga

SEQ ID NO: 60288 - RNA, 18 nt, Human
aaaaacaaaaaaaaaagg

SEQ ID NO: 60289 - RNA, 27 nt, Human
aaaacaaaaaaaaaaggugggggggcc

SEQ ID NO: 60290 - RNA, 28 nt, Human
aaaacaaaaaaaaaaggugggggggccu

SEQ ID NO: 60291 - RNA, 18 nt, Human
aaacaagagggagcagga

SEQ ID NO: 60292 - RNA, 22 nt, Human
aaacaagagggagcaggaauag

SEQ ID NO: 60293 - RNA, 18 nt, Human
aaacauacaagagacaua

SEQ ID NO: 60294 - RNA, 19 nt, Human
aaagaaggaaggaaaagag

SEQ ID NO: 60295 - RNA, 23 nt, Human
aaagcaaauuuaaagagugcaaa

SEQ ID NO: 60296 - RNA, 24 nt, Human
aaauuagcugggugugguggcucg

SEQ ID NO: 60297 - RNA, 24 nt, Human
aaauuggccccaccucaaugacua

SEQ ID NO: 60298 - RNA, 18 nt, Human
aacacuuugggaggcuga

SEQ ID NO: 60299 - RNA, 24 nt, Human
aacacuuugggaggcugaggcagg

SEQ ID NO: 60300 - RNA, 20 nt, Human
aacauacaagagacauauaa

SEQ ID NO: 60301 - RNA, 20 nt, Human
aacauagugagacccugucu

SEQ ID NO: 60302 - RNA, 19 nt, Human
aacauggugaaaccccguc

SEQ ID NO: 60303 - RNA, 20 nt, Human
aacauggugaaaccccgucu

SEQ ID NO: 60304 - RNA, 21 nt, Human
aacauggugaaaccccgucuc

SEQ ID NO: 60305 - RNA, 21 nt, Human
aacugcugaaggccaggccuc

SEQ ID NO: 60306 - RNA, 22 nt, Human
aagaaaacuuaaaaauuagcug

SEQ ID NO: 60307 - RNA, 20 nt, Human
aagacagggucuugcuaugu

SEQ ID NO: 60308 - RNA, 23 nt, Human
aagaguucaagaccagccuagac

SEQ ID NO: 60309 - RNA, 18 nt, Human
aagauuguauuuaggaga

SEQ ID NO: 60310 - RNA, 22 nt, Human
aagcaaauuuaaagagugcaaa

SEQ ID NO: 60311 - RNA, 19 nt, Human
aagcaagacucugucucca

SEQ ID NO: 60312 - RNA, 23 nt, Human
aaggcggguagaucaugagguca

SEQ ID NO: 60313 - RNA, 24 nt, Human
aaggguagaccaauaaaaucuacu

SEQ ID NO: 60314 - RNA, 20 nt, Human
aauugcuugaacccaggagg

SEQ ID NO: 60315 - RNA, 20 nt, Human
acaaagcaagacucugucuc

SEQ ID NO: 60316 - RNA, 25 nt, Human
acaaagcaagacucugucuccaaaa

SEQ ID NO: 60317 - RNA, 21 nt, Human
acaagaguuucaaaacauaca

SEQ ID NO: 60318 - RNA, 18 nt, Human
acagaauuuuaccaacag

SEQ ID NO: 60319 - RNA, 22 nt, Human
acauuaauauuauucauccaac

SEQ ID NO: 60320 - RNA, 23 nt, Human
acccaacgcagccugaccccaca

SEQ ID NO: 60321 - RNA, 24 nt, Human
accccgucucuacuaaaaauacaa

SEQ ID NO: 60322 - RNA, 23 nt, Human
accuguagucccagcuacucggg

SEQ ID NO: 60323 - RNA, 18 nt, Human
accuugucuuucuuccca

SEQ ID NO: 60324 - RNA, 24 nt, Human
acgaagacccccagggaccuccga

SEQ ID NO: 60325 - RNA, 19 nt, Human
acucugucuccaaaaacaa

SEQ ID NO: 60326 - RNA, 22 nt, Human
acugcacuccagccuggcaaca

SEQ ID NO: 60327 - RNA, 24 nt, Human
acugcacuccagccuggcaacaaa

SEQ ID NO: 60328 - RNA, 18 nt, Human
acugcacuccagccuggg

SEQ ID NO: 60329 - RNA, 21 nt, Human
acugcacuccagccuggguga

SEQ ID NO: 60330 - RNA, 24 nt, Human
acugcacuccagccugggugauag

SEQ ID NO: 60331 - RNA, 20 nt, Human
acugcugaaggccaggccag

SEQ ID NO: 60332 - RNA, 20 nt, Human
acuugaggccaagaguucaa

SEQ ID NO: 60333 - RNA, 19 nt, Human
agaaaggaaagaaggaagg

SEQ ID NO: 60334 - RNA, 22 nt, Human
agaauugcuugaacccaggagg

SEQ ID NO: 60335 - RNA, 20 nt, Human
agacagaauuuuaccaacag

SEQ ID NO: 60336 - RNA, 18 nt, Human
agacagggucuugcuaug

SEQ ID NO: 60337 - RNA, 25 nt, Human
agacugggagacuccaggccggugg

SEQ ID NO: 60338 - RNA, 26 nt, Human
agagaaaggaaagaaggaaggaaaag

SEQ ID NO: 60339 - RNA, 21 nt, Human
agagugcaaaaaaccucuaag

SEQ ID NO: 60340 - RNA, 21 nt, Human
agccuggcaacaaagcaagac

SEQ ID NO: 60341 - RNA, 23 nt, Human
agccuggcaacaaagcaagacuc

SEQ ID NO: 60342 - RNA, 24 nt, Human
agcgauuguggugagccgagaucg

SEQ ID NO: 60343 - RNA, 18 nt, Human
agcugggugugguggcuc

SEQ ID NO: 60344 - RNA, 23 nt, Human
agcugggugugguggcucgugcc

SEQ ID NO: 60345 - RNA, 22 nt, Human
aggaaagaaggaaggaaaagag

SEQ ID NO: 60346 - RNA, 19 nt, Human
aggaauaguguccaacuca

SEQ ID NO: 60347 - RNA, 21 nt, Human
aggaauaguguccaacucaga

SEQ ID NO: 60348 - RNA, 24 nt, Human
aggagucugaggcugcaaugaggu

SEQ ID NO: 60349 - RNA, 21 nt, Human
aggauuacuugaggccaagag

SEQ ID NO: 60350 - RNA, 24 nt, Human
aggauuacuugaggccaagaguuc

SEQ ID NO: 60351 - RNA, 19 nt, Human
aggcacagccugcauaaca

SEQ ID NO: 60352 - RNA, 24 nt, Human
aggcacgguggcucacgccuguaa

SEQ ID NO: 60353 - RNA, 20 nt, Human
aggcagcgauuguggugagc

SEQ ID NO: 60354 - RNA, 21 nt, Human
aggcagcgauuguggugagcc

SEQ ID NO: 60355 - RNA, 24 nt, Human
aggcagcgauuguggugagccgag

SEQ ID NO: 60356 - RNA, 23 nt, Human
aggcaggagaauugcuugaaccc

SEQ ID NO: 60357 - RNA, 18 nt, Human
aggcaggaggauuacuug

SEQ ID NO: 60358 - RNA, 23 nt, Human
aggcaggaggauugcuugaaccc

SEQ ID NO: 60359 - RNA, 20 nt, Human
aggccaaggcggguagauca

SEQ ID NO: 60360 - RNA, 23 nt, Human
aggccaggccaguggcucauauc

SEQ ID NO: 60361 - RNA, 24 nt, Human
aggcggguagaucaugaggucaag

SEQ ID NO: 60362 - RNA, 21 nt, Human
aggcugaggcaggagaauugc

SEQ ID NO: 60363 - RNA, 24 nt, Human
aggcugaggcaggagaauugcuug

SEQ ID NO: 60364 - RNA, 21 nt, Human
aggcugaggcaggaggauuac

SEQ ID NO: 60365 - RNA, 24 nt, Human
aggcugaggcaggaggauuacuug

SEQ ID NO: 60366 - RNA, 21 nt, Human
aggcugaggcaggaggauugc

SEQ ID NO: 60367 - RNA, 24 nt, Human
aggcugaggcaggaggauugcuug

SEQ ID NO: 60368 - RNA, 23 nt, Human
agggagcccggcgcuacuccgga

SEQ ID NO: 60369 - RNA, 22 nt, Human
agugaggauuaggaaagaucag

SEQ ID NO: 60370 - RNA, 18 nt, Human
aguggggagggcggcacu

SEQ ID NO: 60371 - RNA, 20 nt, Human
auagugcaagacccugucuc

SEQ ID NO: 60372 - RNA, 19 nt, Human
auaucugcaaucccaacac

SEQ ID NO: 60373 - RNA, 21 nt, Human
auccuccugucucagccuccc

SEQ ID NO: 60374 - RNA, 24 nt, Human
aucgcgccacugcacuccagccug

SEQ ID NO: 60375 - RNA, 22 nt, Human
augccacugcacuccagccugg

SEQ ID NO: 60376 - RNA, 22 nt, Human
augugcgcacaccuguaguccc

SEQ ID NO: 60377 - RNA, 24 nt, Human
augugcgcacaccuguagucccag

SEQ ID NO: 60378 - RNA, 24 nt, Human
auuaugccacugcacuccagccug

SEQ ID NO: 60379 - RNA, 23 nt, Human
auuuaugauuccaucaaaggcua

SEQ ID NO: 60380 - RNA, 21 nt, Human
caaaaaaccuccuuaacaaug

SEQ ID NO: 60381 - RNA, 23 nt, Human
caaaaacaaaaaaaaaagguggg

SEQ ID NO: 60382 - RNA, 20 nt, Human
caaaacauacaagagacaua

SEQ ID NO: 60383 - RNA, 23 nt, Human
caaagcaagacucugucuccaaa

SEQ ID NO: 60384 - RNA, 19 nt, Human
caacaauaaaaacaaguua

SEQ ID NO: 60385 - RNA, 24 nt, Human
caacacuuugggaggcugaggcag

SEQ ID NO: 60386 - RNA, 24 nt, Human
caacacuuugggaggcugaggcag

SEQ ID NO: 60387 - RNA, 25 nt, Human
caacacuuugggaggcugaggcagg

SEQ ID NO: 60388 - RNA, 21 nt, Human
caacauagugagacccugucu

SEQ ID NO: 60389 - RNA, 22 nt, Human
caacauagugagacccugucuc

SEQ ID NO: 60390 - RNA, 24 nt, Human
caacauagugagacccugucucua

SEQ ID NO: 60391 - RNA, 24 nt, Human
caacauggugaaaccccgucucua

SEQ ID NO: 60392 - RNA, 20 nt, Human
caacuacauuaaugcuuaac

SEQ ID NO: 60393 - RNA, 23 nt, Human
caagccuuugcgccuaggucuua

SEQ ID NO: 60394 - RNA, 22 nt, Human
caaggaauccuccugucucagc

SEQ ID NO: 60395 - RNA, 18 nt, Human
caaggcaaaaaaaucaua

SEQ ID NO: 60396 - RNA, 19 nt, Human
cacaccuguagucccagcu

SEQ ID NO: 60397 - RNA, 24 nt, Human
caccucugguucuaucccuuuugc

SEQ ID NO: 60398 - RNA, 23 nt, Human
caccuguagucccagcuacucgg

SEQ ID NO: 60399 - RNA, 24 nt, Human
caccuguagucccagcuacucggg

SEQ ID NO: 60400 - RNA, 24 nt, Human
cacgccuguaaucucagcacuuug

SEQ ID NO: 60401 - RNA, 18 nt, Human
cacuacuggacacaaagg

SEQ ID NO: 60402 - RNA, 22 nt, Human
cacuccagccuggcaacaaagc

SEQ ID NO: 60403 - RNA, 20 nt, Human
cacuccagccugggugauag

SEQ ID NO: 60404 - RNA, 20 nt, Human
cacuccagccugggugauag

SEQ ID NO: 60405 - RNA, 21 nt, Human
cacuccagccugggugauagu

SEQ ID NO: 60406 - RNA, 22 nt, Human
cacuccagccugggugauagug

SEQ ID NO: 60407 - RNA, 18 nt, Human
cacugcacuccagccugg

SEQ ID NO: 60408 - RNA, 20 nt, Human
cacugcacuccagccuggca

SEQ ID NO: 60409 - RNA, 23 nt, Human
cacugcacuccagccuggcaaca

SEQ ID NO: 60410 - RNA, 24 nt, Human
cacugcacuccagccuggcaacaa

SEQ ID NO: 60411 - RNA, 19 nt, Human
cacugcacuccagccuggg

SEQ ID NO: 60412 - RNA, 19 nt, Human
cacugcacuccagccuggg

SEQ ID NO: 60413 - RNA, 19 nt, Human
cacugcacuccagccuggg

SEQ ID NO: 60414 - RNA, 21 nt, Human
cacugcacuccagccugggug

SEQ ID NO: 60415 - RNA, 22 nt, Human
cacugcacuccagccuggguga

SEQ ID NO: 60416 - RNA, 22 nt, Human
cacugcacuccagccuggguga

SEQ ID NO: 60417 - RNA, 23 nt, Human
cacugcacuccagccugggugau

SEQ ID NO: 60418 - RNA, 24 nt, Human
cacugcacuccagccugggugaua

SEQ ID NO: 60419 - RNA, 25 nt, Human
cacugcacuccagccugggugauag

SEQ ID NO: 60420 - RNA, 27 nt, Human
cacugcacuccagccugggugauagug

SEQ ID NO: 60421 - RNA, 22 nt, Human
cagcacuuugggaggccaaggc

SEQ ID NO: 60422 - RNA, 24 nt, Human
cagcacuuugggaggccaaggcgg

SEQ ID NO: 60423 - RNA, 24 nt, Human
cagcuacucgggaggcugaggcag

SEQ ID NO: 60424 - RNA, 24 nt, Human
cagcuacuugggaggcugaggcag

SEQ ID NO: 60425 - RNA, 24 nt, Human
caggaauaguguccaacucagaua

SEQ ID NO: 60426 - RNA, 20 nt, Human
caggagucugaggcugcaau

SEQ ID NO: 60427 - RNA, 24 nt, Human
cagggucuugcuaugucacccagg

SEQ ID NO: 60428 - RNA, 20 nt, Human
cauaucugcaaucccaacac

SEQ ID NO: 60429 - RNA, 24 nt, Human
cauaucugcaaucccaacacuuug

SEQ ID NO: 60430 - RNA, 21 nt, Human
cauuaauauuauucauccaac

SEQ ID NO: 60431 - RNA, 19 nt, Human
ccaacaguacaacaaggua

SEQ ID NO: 60432 - RNA, 18 nt, Human
ccaaccacaaacacuuuu

SEQ ID NO: 60433 - RNA, 18 nt, Human
ccaaggcaaaaaaaucau

SEQ ID NO: 60434 - RNA, 26 nt, Human
ccacgggccgcccuccgguggacccc

SEQ ID NO: 60435 - RNA, 18 nt, Human
ccacugcacuccagccug

SEQ ID NO: 60436 - RNA, 19 nt, Human
ccacugcacuccagccugg

SEQ ID NO: 60437 - RNA, 19 nt, Human
ccacugcacuccagccugg

SEQ ID NO: 60438 - RNA, 20 nt, Human
ccacugcacuccagccuggc

SEQ ID NO: 60439 - RNA, 22 nt, Human
ccacugcacuccagccuggcaa

SEQ ID NO: 60440 - RNA, 23 nt, Human
ccacugcacuccagccuggcaac

SEQ ID NO: 60441 - RNA, 20 nt, Human
ccacugcacuccagccuggg

SEQ ID NO: 60442 - RNA, 20 nt, Human
ccacugcacuccagccuggg

SEQ ID NO: 60443 - RNA, 20 nt, Human
ccacugcacuccagccuggg

SEQ ID NO: 60444 - RNA, 21 nt, Human
ccacugcacuccagccugggu

SEQ ID NO: 60445 - RNA, 21 nt, Human
ccacugcacuccagccugggu

SEQ ID NO: 60446 - RNA, 23 nt, Human
ccacugcacuccagccuggguga

SEQ ID NO: 60447 - RNA, 24 nt, Human
ccacugcacuccagccugggugau

SEQ ID NO: 60448 - RNA, 20 nt, Human
ccagauauggcacagggcug

SEQ ID NO: 60449 - RNA, 18 nt, Human
ccagggcucaaggaaucc

SEQ ID NO: 60450 - RNA, 22 nt, Human
ccaguuacagaaacaaaaaaaa

SEQ ID NO: 60451 - RNA, 24 nt, Human
cccaaggagcugggacuacaggca

SEQ ID NO: 60452 - RNA, 22 nt, Human
ccccggggcagguccgggccuc

SEQ ID NO: 60453 - RNA, 21 nt, Human
ccccggggcgcacgaagaccc

SEQ ID NO: 60454 - RNA, 20 nt, Human
cccgaccuaccccacaguua

SEQ ID NO: 60455 - RNA, 22 nt, Human
cccggccaacauggugaaaccc

SEQ ID NO: 60456 - RNA, 23 nt, Human
cccggccaacauggugaaacccc

SEQ ID NO: 60457 - RNA, 24 nt, Human
cccggccaacauggugaaaccccg

SEQ ID NO: 60458 - RNA, 22 nt, Human
ccgacugcccagacuccccacc

SEQ ID NO: 60459 - RNA, 20 nt, Human
ccucugguucuaucccuuuu

SEQ ID NO: 60460 - RNA, 18 nt, Human
ccugcagucucagcuacu

SEQ ID NO: 60461 - RNA, 18 nt, Human
ccugcagucucagcuacu

SEQ ID NO: 60462 - RNA, 21 nt, Human
ccugcagucucagcuacuugg

SEQ ID NO: 60463 - RNA, 22 nt, Human
ccugcagucucagcuacuuggg

SEQ ID NO: 60464 - RNA, 24 nt, Human
ccuggccaggcacgguggcucacg

SEQ ID NO: 60465 - RNA, 22 nt, Human
ccuguaaucucagcacuuuggg

SEQ ID NO: 60466 - RNA, 21 nt, Human
ccuguagucccagcuacucgg

SEQ ID NO: 60467 - RNA, 24 nt, Human
ccugucucagccucccaaggagcu

SEQ ID NO: 60468 - RNA, 18 nt, Human
cgaagacccccagggacc

SEQ ID NO: 60469 - RNA, 23 nt, Human
cgaagacccccagggaccuccga

SEQ ID NO: 60470 - RNA, 24 nt, Human
cgagaccaucccggccaacauggu

SEQ ID NO: 60471 - RNA, 24 nt, Human
cgagaucgcgccacugcacuccag

SEQ ID NO: 60472 - RNA, 22 nt, Human
cgcacgaagacccccagggacc

SEQ ID NO: 60473 - RNA, 25 nt, Human
cgccacugcacuccagccuggcaac

SEQ ID NO: 60474 - RNA, 19 nt, Human
cgccccggggcagguccgg

SEQ ID NO: 60475 - RNA, 22 nt, Human
cgccccggggcagguccgggcc

SEQ ID NO: 60476 - RNA, 23 nt, Human
cgccuguaaucucagcacuuugg

SEQ ID NO: 60477 - RNA, 21 nt, Human
cggccuguggcgcccuucccc

SEQ ID NO: 60478 - RNA, 26 nt, Human
cggccuguggcgcccuucccccgaag

SEQ ID NO: 60479 - RNA, 19 nt, Human
cucacaggcgccuccccug

SEQ ID NO: 60480 - RNA, 22 nt, Human
cucacgccuguaaucucagcac

SEQ ID NO: 60481 - RNA, 24 nt, Human
cucacgccuguaaucucagcacuu

SEQ ID NO: 60482 - RNA, 24 nt, Human
cuccccuggaucucugcagccccc

SEQ ID NO: 60483 - RNA, 25 nt, Human
cucugucuccaaaaacaaaaaaaaa

SEQ ID NO: 60484 - RNA, 21 nt, Human
cugcaaucccaacacuuuggg

SEQ ID NO: 60485 - RNA, 21 nt, Human
cuggaauuacacagaaaacca

SEQ ID NO: 60486 - RNA, 23 nt, Human
cugucucagccucccaaggagcu

SEQ ID NO: 60487 - RNA, 18 nt, Human
cuuaguggggagggcggc

SEQ ID NO: 60488 - RNA, 19 nt, Human
cuuuuuaaaaccugaugug

SEQ ID NO: 60489 - RNA, 22 nt, Human
gaaaggaaagaaggaaggaaaa

SEQ ID NO: 60490 - RNA, 18 nt, Human
gaacccaggaggcagcga

SEQ ID NO: 60491 - RNA, 22 nt, Human
gaagacccccagggaccuccga

SEQ ID NO: 60492 - RNA, 23 nt, Human
gagagagacaagggaaaggaaaa

SEQ ID NO: 60493 - RNA, 23 nt, Human
gagaucgcgccacugcacuccag

SEQ ID NO: 60494 - RNA, 24 nt, Human
gauuacuugaggccaagaguucaa

SEQ ID NO: 60495 - RNA, 21 nt, Human
gauuaugccacugcacuccag

SEQ ID NO: 60496 - RNA, 20 nt, Human
gcaccaacaauaaaaacaag

SEQ ID NO: 60497 - RNA, 22 nt, Human
gcaggagaauugcuugaaccca

SEQ ID NO: 60498 - RNA, 22 nt, Human
gcaggaggauugcuugaaccca

SEQ ID NO: 60499 - RNA, 22 nt, Human
gcagguccgggccucacaggcg

SEQ ID NO: 60500 - RNA, 24 nt, Human
gccaacauggugaaaccccgucuc

SEQ ID NO: 60501 - RNA, 20 nt, Human
gccaccgcaccuggcuccua

SEQ ID NO: 60502 - RNA, 19 nt, Human
gccacugcacuccagccug

SEQ ID NO: 60503 - RNA, 24 nt, Human
gccacugcacuccagccuggguga

SEQ ID NO: 60504 - RNA, 19 nt, Human
gccacugcuacccugaggc

SEQ ID NO: 60505 - RNA, 20 nt, Human
gcccacgggccgcccuccgg

SEQ ID NO: 60506 - RNA, 20 nt, Human
gccgagaucgcgccacugca

SEQ ID NO: 60507 - RNA, 18 nt, Human
gccgcccuccgguggacc

SEQ ID NO: 60508 - RNA, 23 nt, Human
ggaaaauagguuggcuggaaggu

SEQ ID NO: 60509 - RNA, 22 nt, Human
ggaauaguguccaacucagaua

SEQ ID NO: 60510 - RNA, 18 nt, Human
ggagcugggacuacaggc

SEQ ID NO: 60511 - RNA, 19 nt, Human
ggauuacuugaggccaaga

SEQ ID NO: 60512 - RNA, 23 nt, Human
ggauuacuugaggccaagaguuc

SEQ ID NO: 60513 - RNA, 21 nt, Human
ggccaggcacgguggcucacg

SEQ ID NO: 60514 - RNA, 18 nt, Human
gggccuggccaggcacgg

SEQ ID NO: 60515 - RNA, 23 nt, Human
ggguaagugugguucaaaaagca

SEQ ID NO: 60516 - RNA, 19 nt, Human
ggguagaucaugaggucaa

SEQ ID NO: 60517 - RNA, 18 nt, Human
gguagaucaugaggucaa

SEQ ID NO: 60518 - RNA, 23 nt, Human
gguggcucacgccuguaaucuca

SEQ ID NO: 60519 - RNA, 24 nt, Human
gguggcucacgccuguaaucucag

SEQ ID NO: 60520 - RNA, 23 nt, Human
guggcucacgccuguaaucucag

SEQ ID NO: 60521 - RNA, 21 nt, Human
uaaaaacaaaaaaccuccuua

SEQ ID NO: 60522 - RNA, 23 nt, Human
uaaaaacaaaaaaccuccuuaac

SEQ ID NO: 60523 - RNA, 20 nt, Human
uaaaaauacaaaaauuagcc

SEQ ID NO: 60524 - RNA, 21 nt, Human
uaaaaauacaaaaauuagccu

SEQ ID NO: 60525 - RNA, 20 nt, Human
uaaaaccugauguguguugu

SEQ ID NO: 60526 - RNA, 19 nt, Human
uaaaucacaguaagccugu

SEQ ID NO: 60527 - RNA, 19 nt, Human
uaaauggaauuagaugaaa

SEQ ID NO: 60528 - RNA, 22 nt, Human
uacacagaaaaccagagaauuc

SEQ ID NO: 60529 - RNA, 19 nt, Human
uacagaaacaaaaaaaauc

SEQ ID NO: 60530 - RNA, 22 nt, Human
uacaggcacgugccaccgcacc

SEQ ID NO: 60531 - RNA, 19 nt, Human
uaccuugucuuucuuccca

SEQ ID NO: 60532 - RNA, 21 nt, Human
uacuggacacaaagggaggag

SEQ ID NO: 60533 - RNA, 21 nt, Human
uagaguccagauauggcacag

SEQ ID NO: 60534 - RNA, 23 nt, Human
uaucugcaaucccaacacuuugg

SEQ ID NO: 60535 - RNA, 24 nt, Human
uaugauuaugccacugcacuccag

SEQ ID NO: 60536 - RNA, 18 nt, Human
uaugucacccaggcugga

SEQ ID NO: 60537 - RNA, 22 nt, Human
uaugucacccaggcuggacuca

SEQ ID NO: 60538 - RNA, 22 nt, Human
uauucuaaggagacauaccauu

SEQ ID NO: 60539 - RNA, 20 nt, Human
ucaaaaauagcuaguuauug

SEQ ID NO: 60540 - RNA, 18 nt, Human
ucagccucccaaggagcu

SEQ ID NO: 60541 - RNA, 20 nt, Human
ucagccucccaaggagcugg

SEQ ID NO: 60542 - RNA, 24 nt, Human
ucaucugcaaacuacaaaacaaaa

SEQ ID NO: 60543 - RNA, 24 nt, Human
ucaugaggucaagagaucgagacc

SEQ ID NO: 60544 - RNA, 21 nt, Human
uccaaaaacaaaaaaaaaagg

SEQ ID NO: 60545 - RNA, 21 nt, Human
uccaacucagauacugacaac

SEQ ID NO: 60546 - RNA, 24 nt, Human
uccagccugggugauagugcaaga

SEQ ID NO: 60547 - RNA, 20 nt, Human
uccaggccgguggagggaaa

SEQ ID NO: 60548 - RNA, 24 nt, Human
ucccaaggagcugggacuacaggc

SEQ ID NO: 60549 - RNA, 18 nt, Human
uccggaugccgcugcggc

SEQ ID NO: 60550 - RNA, 22 nt, Human
uccgggccucacaggcgccucc

SEQ ID NO: 60551 - RNA, 27 nt, Human
uccuccugucucagccucccaaggagc

SEQ ID NO: 60552 - RNA, 23 nt, Human
ucgcgccacugcacuccagccug

SEQ ID NO: 60553 - RNA, 23 nt, Human
ucgggaggcugaggcaggagaau

SEQ ID NO: 60554 - RNA, 22 nt, Human
ucucgccacauacccuucgccc

SEQ ID NO: 60555 - RNA, 21 nt, Human
ucucuacuaaaaauacaaaaa

SEQ ID NO: 60556 - RNA, 23 nt, Human
ucucuacuaaaaauacaaaaauu

SEQ ID NO: 60557 - RNA, 19 nt, Human
ucuugcuaugucacccagg

SEQ ID NO: 60558 - RNA, 23 nt, Human
ucuugcuaugucacccaggcugg

SEQ ID NO: 60559 - RNA, 24 nt, Human
ucuugcuaugucacccaggcugga

SEQ ID NO: 60560 - RNA, 20 nt, Human
ugaaaaacaagauuaaaggu

SEQ ID NO: 60561 - RNA, 18 nt, Human
ugaacccaggagucugag

SEQ ID NO: 60562 - RNA, 22 nt, Human
ugagagagacaagggaaaggaa

SEQ ID NO: 60563 - RNA, 20 nt, Human
ugagaugagccccuaacagu

SEQ ID NO: 60564 - RNA, 22 nt, Human
ugagccgagaucgcgccacugc

SEQ ID NO: 60565 - RNA, 24 nt, Human
ugaggcaggagaauugcuugaacc

SEQ ID NO: 60566 - RNA, 25 nt, Human
ugaggcaggagaauugcuugaaccc

SEQ ID NO: 60567 - RNA, 20 nt, Human
ugaggcaggaggauuacuuc

SEQ ID NO: 60568 - RNA, 26 nt, Human
ugaggcaggaggauuacuugaggcca

SEQ ID NO: 60569 - RNA, 24 nt, Human
ugaggcaggaggauugcuugaacc

SEQ ID NO: 60570 - RNA, 25 nt, Human
ugaggcaggaggauugcuugaaccc

SEQ ID NO: 60571 - RNA, 23 nt, Human
ugaggcugcaaugagguaugauu

SEQ ID NO: 60572 - RNA, 22 nt, Human
ugauagugcaagacccugucuc

SEQ ID NO: 60573 - RNA, 23 nt, Human
ugccugcagucucagcuacuugg

SEQ ID NO: 60574 - RNA, 24 nt, Human
ugccugcagucucagcuacuuggg

SEQ ID NO: 60575 - RNA, 24 nt, Human
ugcuaugucacccaggcuggacuc

SEQ ID NO: 60576 - RNA, 19 nt, Human
ugcuugaacccaggagucu

SEQ ID NO: 60577 - RNA, 23 nt, Human
uggaauuacacagaaaaccagag

SEQ ID NO: 60578 - RNA, 22 nt, Human
uggaauuagaugaaaauuguuc

SEQ ID NO: 60579 - RNA, 22 nt, Human
uggcucacgccuguaaucucag

SEQ ID NO: 60580 - RNA, 24 nt, Human
uggcucacgccuguaaucucagca

SEQ ID NO: 60581 - RNA, 21 nt, Human
uggcucauaucugcaauccca

SEQ ID NO: 60582 - RNA, 21 nt, Human
ugggacuacaggcacgugcca

SEQ ID NO: 60583 - RNA, 22 nt, Human
ugggacuacaggcacgugccac

SEQ ID NO: 60584 - RNA, 23 nt, Human
ugggacuacaggcacgugccacc

SEQ ID NO: 60585 - RNA, 24 nt, Human
ugggacuacaggcacgugccaccg

SEQ ID NO: 60586 - RNA, 24 nt, Human
ugggaggccaaggcggguagauca

SEQ ID NO: 60587 - RNA, 20 nt, Human
ugggaggcugaggcaggagg

SEQ ID NO: 60588 - RNA, 20 nt, Human
ugggaggcugaggcaggagg

SEQ ID NO: 60589 - RNA, 22 nt, Human
ugggaggcugaggcaggaggau

SEQ ID NO: 60590 - RNA, 22 nt, Human
ugggaggcugaggcaggaggau

SEQ ID NO: 60591 - RNA, 18 nt, Human
ugggugugguggcucgug

SEQ ID NO: 60592 - RNA, 24 nt, Human
ugguggcucgugccugcagucuca

SEQ ID NO: 60593 - RNA, 24 nt, Human
uguaaacuagcuccuugacccacc

SEQ ID NO: 60594 - RNA, 24 nt, Human
ugucucagccucccaaggagcugg

SEQ ID NO: 60595 - RNA, 22 nt, Human
uuaagacagggucuugcuaugu

SEQ ID NO: 60596 - RNA, 25 nt, Human
uuaauauuauucauccaaccacaaa

SEQ ID NO: 60597 - RNA, 20 nt, Human
uuacagaaacaaaaaaaauc

SEQ ID NO: 60598 - RNA, 23 nt, Human
uuacuugaggccaagaguucaag

SEQ ID NO: 60599 - RNA, 24 nt, Human
uuagcugggugugguggcucgugc

SEQ ID NO: 60600 - RNA, 23 nt, Human
uuaugccacugcacuccagccug

SEQ ID NO: 60601 - RNA, 25 nt, Human
uucacaaaaagaacugcugaaggcc

SEQ ID NO: 60602 - RNA, 26 nt, Human
uucacauuucuuagaaaaaucuuauu

SEQ ID NO: 60603 - RNA, 23 nt, Human
uuccugaucaggaggucaaaaau

SEQ ID NO: 60604 - RNA, 18 nt, Human
uugaaugcaucaagacag

SEQ ID NO: 60605 - RNA, 23 nt, Human
uugacccaccauuuaaaaacaaa

SEQ ID NO: 60606 - RNA, 22 nt, Human
uugaggccaagaguucaagacc

SEQ ID NO: 60607 - RNA, 18 nt, Human
uugcuugaacccaggagg

SEQ ID NO: 60608 - RNA, 24 nt, Human
uugcuugaacccaggagucugagg

SEQ ID NO: 60609 - RNA, 20 nt, Human
uugggaggcugaggcaggag

SEQ ID NO: 60610 - RNA, 20 nt, Human
uugggaggcugaggcaggag

SEQ ID NO: 60611 - RNA, 18 nt, Human
uuguggugagccgagauc

SEQ ID NO: 60612 - RNA, 22 nt, Human
uuguggugagccgagaucgcgc

SEQ ID NO: 60613 - RNA, 24 nt, Human
uuuaaaaaagaaaaaagugaggau

SEQ ID NO: 60614 - RNA, 21 nt, Human
uuuaaaauguauaccaaggca

SEQ ID NO: 60615 - RNA, 22 nt, Human
uuuaugauuccaucaaaggcua

SEQ ID NO: 60616 - RNA, 22 nt, Human
aaaaaaaaaaaaaaaaagcaaa

SEQ ID NO: 60617 - RNA, 29 nt, Human
aaaaaaaaaaaaaaaagcaaaucggagag

SEQ ID NO: 60618 - RNA, 26 nt, Human
aaaaaaaaaaagcaaaucggagagag

SEQ ID NO: 60619 - RNA, 25 nt, Human
aaaaaaaagcaaaucggagagagua

SEQ ID NO: 60620 - RNA, 19 nt, Human
aaggggccuuccagagagg

SEQ ID NO: 60621 - RNA, 20 nt, Human
aaggggccuuccagagaggu

SEQ ID NO: 60622 - RNA, 21 nt, Human
aaggggccuuccagagaggug

SEQ ID NO: 60623 - RNA, 18 nt, Human
accaggugggugcuggcu

SEQ ID NO: 60624 - RNA, 23 nt, Human
agagguggguuuccaggggaucu

SEQ ID NO: 60625 - RNA, 22 nt, Human
agcacgagaaacacaaccacga

SEQ ID NO: 60626 - RNA, 21 nt, Human
aggaggaggaugcuuuaagcc

SEQ ID NO: 60627 - RNA, 21 nt, Human
agggaggggaguccaggagga

SEQ ID NO: 60628 - RNA, 19 nt, Human
agguccuuguggauucuuc

SEQ ID NO: 60629 - RNA, 26 nt, Human
aggugggugcuggcugcucuccaucc

SEQ ID NO: 60630 - RNA, 19 nt, Human
augcaugccaccgcgugug

SEQ ID NO: 60631 - RNA, 19 nt, Human
cacacccagaaagcccucc

SEQ ID NO: 60632 - RNA, 24 nt, Human
cacacccagaaagcccuccaggau

SEQ ID NO: 60633 - RNA, 19 nt, Human
cacugcgcucucauuuugc

SEQ ID NO: 60634 - RNA, 18 nt, Human
cagcccacccccuggaca

SEQ ID NO: 60635 - RNA, 22 nt, Human
caugcaugccaccgcguguggc

SEQ ID NO: 60636 - RNA, 24 nt, Human
cccacccccuggacacacccagaa

SEQ ID NO: 60637 - RNA, 25 nt, Human
cccacccccuggacacacccagaaa

SEQ ID NO: 60638 - RNA, 19 nt, Human
cccccuggacacacccaga

SEQ ID NO: 60639 - RNA, 19 nt, Human
ccccuggacacacccagaa

SEQ ID NO: 60640 - RNA, 18 nt, Human
cccuccaggaugguccug

SEQ ID NO: 60641 - RNA, 23 nt, Human
cccuggacacacccagaaagccc

SEQ ID NO: 60642 - RNA, 24 nt, Human
cccuggacacacccagaaagcccu

SEQ ID NO: 60643 - RNA, 19 nt, Human
ccgccugccuggccaccug

SEQ ID NO: 60644 - RNA, 24 nt, Human
ccgcgagcuccuuuuaagaagucu

SEQ ID NO: 60645 - RNA, 19 nt, Human
ccuccaugcaugccaccgc

SEQ ID NO: 60646 - RNA, 24 nt, Human
ccuuguggauucuucucuuccugu

SEQ ID NO: 60647 - RNA, 22 nt, Human
cuggaggggcugggccucagcg

SEQ ID NO: 60648 - RNA, 18 nt, Human
gacugugugugugugugu

SEQ ID NO: 60649 - RNA, 21 nt, Human
gccugacagcuggguccgcgg

SEQ ID NO: 60650 - RNA, 25 nt, Human
gcuccgcuccagccgcugcugccuc

SEQ ID NO: 60651 - RNA, 23 nt, Human
ggaacggcuaggagagaagcugg

SEQ ID NO: 60652 - RNA, 20 nt, Human
ggacacagggaugcagcacg

SEQ ID NO: 60653 - RNA, 19 nt, Human
ggcagugcauaaccuuaau

SEQ ID NO: 60654 - RNA, 27 nt, Human
gggacugugugugugugugugugugug

SEQ ID NO: 60655 - RNA, 18 nt, Human
gguggugggagcagggaa

SEQ ID NO: 60656 - RNA, 18 nt, Human
uaagaagucugcaccucc

SEQ ID NO: 60657 - RNA, 24 nt, Human
uaccacauucccacagauaaacuc

SEQ ID NO: 60658 - RNA, 20 nt, Human
uaccaggugggugcuggcug

SEQ ID NO: 60659 - RNA, 21 nt, Human
uaccaggugggugcuggcugc

SEQ ID NO: 60660 - RNA, 23 nt, Human
uagaagagguuuaagguuggcuc

SEQ ID NO: 60661 - RNA, 20 nt, Human
uauccuggggugagaaggcu

SEQ ID NO: 60662 - RNA, 24 nt, Human
uaugcaaaugggacugugugugug

SEQ ID NO: 60663 - RNA, 20 nt, Human
ucacugcgcucucauuuugc

SEQ ID NO: 60664 - RNA, 18 nt, Human
ucagagagcagggaucag

SEQ ID NO: 60665 - RNA, 26 nt, Human
uccaugcaugccaccgcguguggccg

SEQ ID NO: 60666 - RNA, 28 nt, Human
uccaugcaugccaccgcguguggccgcg

SEQ ID NO: 60667 - RNA, 19 nt, Human
uccuggggugagaaggcuc

SEQ ID NO: 60668 - RNA, 22 nt, Human
ucugugacacuaugguguccuu

SEQ ID NO: 60669 - RNA, 24 nt, Human
ugaauugccaagcucucugugaca

SEQ ID NO: 60670 - RNA, 22 nt, Human
ugacacuaugguguccuugccc

SEQ ID NO: 60671 - RNA, 21 nt, Human
ugacagcgcuggugccaagcc

SEQ ID NO: 60672 - RNA, 19 nt, Human
ugaggacaaccugguaaag

SEQ ID NO: 60673 - RNA, 21 nt, Human
ugccaagcucucugugacacu

SEQ ID NO: 60674 - RNA, 24 nt, Human
ugccagggaaggggccuuccagag

SEQ ID NO: 60675 - RNA, 18 nt, Human
ugccuaaucuucagcuug

SEQ ID NO: 60676 - RNA, 19 nt, Human
uggaggggcugggccucag

SEQ ID NO: 60677 - RNA, 22 nt, Human
ugggaagaaauaauguauggug

SEQ ID NO: 60678 - RNA, 18 nt, Human
ugggaagggaggauucuc

SEQ ID NO: 60679 - RNA, 21 nt, Human
ugggacugugugugugugugu

SEQ ID NO: 60680 - RNA, 26 nt, Human
ugggacugugugugugugugugugug

SEQ ID NO: 60681 - RNA, 25 nt, Human
uggguuuccaggggaucugugugcc

SEQ ID NO: 60682 - RNA, 21 nt, Human
ugguauugaaaaaaaaaaaaa

SEQ ID NO: 60683 - RNA, 18 nt, Human
uggugcuggaggggcugg

SEQ ID NO: 60684 - RNA, 24 nt, Human
ugguugauaacuugaggacaaccu

SEQ ID NO: 60685 - RNA, 18 nt, Human
ugugugugugugugugug

SEQ ID NO: 60686 - RNA, 18 nt, Human
ugugugugugugugugug

SEQ ID NO: 60687 - RNA, 21 nt, Human
ugugugugugugugugugugu

SEQ ID NO: 60688 - RNA, 21 nt, Human
ugugugugugugugugugugu

SEQ ID NO: 60689 - RNA, 19 nt, Human
uuccagagagguggguuuc

SEQ ID NO: 60690 - RNA, 21 nt, Human
uuccccuuuuauccuggggug

SEQ ID NO: 60691 - RNA, 24 nt, Human
uugaaauuagaacuagcaauagaa

SEQ ID NO: 60692 - RNA, 20 nt, Human
aaaaaaagagacuucgagac

SEQ ID NO: 60693 - RNA, 20 nt, Human
aaagacacacacuccacacc

SEQ ID NO: 60694 - RNA, 25 nt, Human
aaagacacacacuccacaccacgca

SEQ ID NO: 60695 - RNA, 21 nt, Human
aaagacauaccccuuuuuggc

SEQ ID NO: 60696 - RNA, 23 nt, Human
aaagccugccaaaauaaaagucc

SEQ ID NO: 60697 - RNA, 21 nt, Human
aagagacuucgagacaagaug

SEQ ID NO: 60698 - RNA, 18 nt, Human
acaagaagaggcucaccc

SEQ ID NO: 60699 - RNA, 20 nt, Human
acaagaagaggcucaccccg

SEQ ID NO: 60700 - RNA, 18 nt, Human
acacagccaucaucaccc

SEQ ID NO: 60701 - RNA, 21 nt, Human
acaguaauaauagcaucuaaa

SEQ ID NO: 60702 - RNA, 18 nt, Human
accccgucuguccacagg

SEQ ID NO: 60703 - RNA, 20 nt, Human
acuccacaccacgcacagcu

SEQ ID NO: 60704 - RNA, 23 nt, Human
acuugaucuacacacaugccacu

SEQ ID NO: 60705 - RNA, 19 nt, Human
agaaucuccagacacaaga

SEQ ID NO: 60706 - RNA, 23 nt, Human
agacacacacuccacaccacgca

SEQ ID NO: 60707 - RNA, 23 nt, Human
agacgacgggagaggcaggugug

SEQ ID NO: 60708 - RNA, 21 nt, Human
agcuguuugggaccauugugg

SEQ ID NO: 60709 - RNA, 19 nt, Human
aggcaggggugacggcugc

SEQ ID NO: 60710 - RNA, 18 nt, Human
aggccugggccaaaaaaa

SEQ ID NO: 60711 - RNA, 19 nt, Human
agggagaagacaguccaga

SEQ ID NO: 60712 - RNA, 19 nt, Human
agucaguggcagaggcagc

SEQ ID NO: 60713 - RNA, 24 nt, Human
aguggcagaggcagcuguuuggga

SEQ ID NO: 60714 - RNA, 18 nt, Human
aucuaaauaaauauggag

SEQ ID NO: 60715 - RNA, 18 nt, Human
augugcguggaugugugu

SEQ ID NO: 60716 - RNA, 23 nt, Human
caaaauacuuggaacgcuuuaca

SEQ ID NO: 60717 - RNA, 22 nt, Human
caagucugcggcccggcuccca

SEQ ID NO: 60718 - RNA, 19 nt, Human
cacacagccaucaucaccc

SEQ ID NO: 60719 - RNA, 21 nt, Human
cacacuccacaccacgcacag

SEQ ID NO: 60720 - RNA, 24 nt, Human
cacacuccacaccacgcacagcua

SEQ ID NO: 60721 - RNA, 18 nt, Human
cacauuggaaaacccuag

SEQ ID NO: 60722 - RNA, 20 nt, Human
cacgcacagcuaccgagaca

SEQ ID NO: 60723 - RNA, 21 nt, Human
cagaggcagcuguuugggacc

SEQ ID NO: 60724 - RNA, 23 nt, Human
ccaaaaaaagagacuucgagaca

SEQ ID NO: 60725 - RNA, 20 nt, Human
cccacaggaccccagacguc

SEQ ID NO: 60726 - RNA, 18 nt, Human
ccccgggagccgcguccc

SEQ ID NO: 60727 - RNA, 19 nt, Human
ccccgggagccgcgucccu

SEQ ID NO: 60728 - RNA, 19 nt, Human
cccgaaaaaucuccuggug

SEQ ID NO: 60729 - RNA, 21 nt, Human
cccggcucccagcuccucugg

SEQ ID NO: 60730 - RNA, 22 nt, Human
cccgggagccgcgucccucgga

SEQ ID NO: 60731 - RNA, 24 nt, Human
cccuagagucuggaaaaaagccug

SEQ ID NO: 60732 - RNA, 23 nt, Human
cccugcagucaguggcagaggca

SEQ ID NO: 60733 - RNA, 19 nt, Human
ccuccuugucucuguggga

SEQ ID NO: 60734 - RNA, 21 nt, Human
ccugcccgguguccuggcugc

SEQ ID NO: 60735 - RNA, 24 nt, Human
cgcacagcuaccgagacacacccu

SEQ ID NO: 60736 - RNA, 21 nt, Human
cgccacgcuggccaagggguc

SEQ ID NO: 60737 - RNA, 23 nt, Human
cggcucccagcuccucugggccc

SEQ ID NO: 60738 - RNA, 22 nt, Human
cuccacaccacgcacagcuacc

SEQ ID NO: 60739 - RNA, 21 nt, Human
cugcgccacgcuggccaaggg

SEQ ID NO: 60740 - RNA, 19 nt, Human
gaggcagccacuaaaauga

SEQ ID NO: 60741 - RNA, 25 nt, Human
gcacagcuucagggaggaaagacac

SEQ ID NO: 60742 - RNA, 23 nt, Human
gcacucacggcuggcugcuuuag

SEQ ID NO: 60743 - RNA, 19 nt, Human
gcagccgggugggagggug

SEQ ID NO: 60744 - RNA, 19 nt, Human
gccccgggagccgcguccc

SEQ ID NO: 60745 - RNA, 25 nt, Human
ggagaagacaguccagaacguggca

SEQ ID NO: 60746 - RNA, 19 nt, Human
ggaggcaggggugacggcu

SEQ ID NO: 60747 - RNA, 23 nt, Human
ggaggcaggggugacggcugccc

SEQ ID NO: 60748 - RNA, 22 nt, Human
ggccugggccaaaaaaagagac

SEQ ID NO: 60749 - RNA, 21 nt, Human
ggcugggcuguggcgucgggg

SEQ ID NO: 60750 - RNA, 23 nt, Human
gggcggcccugcccgguguccug

SEQ ID NO: 60751 - RNA, 24 nt, Human
uaaagacauaccccuuuuuggcaa

SEQ ID NO: 60752 - RNA, 20 nt, Human
uaaagagggggcagacaccu

SEQ ID NO: 60753 - RNA, 22 nt, Human
uaaagagggggcagacaccugu

SEQ ID NO: 60754 - RNA, 21 nt, Human
uacauggaucgcuaaugaacc

SEQ ID NO: 60755 - RNA, 20 nt, Human
ucccugcagucaguggcaga

SEQ ID NO: 60756 - RNA, 23 nt, Human
ucccugcagucaguggcagaggc

SEQ ID NO: 60757 - RNA, 18 nt, Human
uccuggugaucaaaucuu

SEQ ID NO: 60758 - RNA, 23 nt, Human
ucgaauacagucauccuaaagcu

SEQ ID NO: 60759 - RNA, 25 nt, Human
ucuccagacacaagaagaggcucac

SEQ ID NO: 60760 - RNA, 19 nt, Human
ucucugugggagcccugcc

SEQ ID NO: 60761 - RNA, 24 nt, Human
ucucugugggagcccugcccgggu

SEQ ID NO: 60762 - RNA, 22 nt, Human
ugcagccgggugggagggugcc

SEQ ID NO: 60763 - RNA, 22 nt, Human
ugcagucaguggcagaggcagc

SEQ ID NO: 60764 - RNA, 22 nt, Human
ugcaugcaacacacggcacucc

SEQ ID NO: 60765 - RNA, 19 nt, Human
ugcccagaagagacgacgg

SEQ ID NO: 60766 - RNA, 21 nt, Human
ugcccagaagagacgacggga

SEQ ID NO: 60767 - RNA, 20 nt, Human
ugcccggguaugcagccggg

SEQ ID NO: 60768 - RNA, 20 nt, Human
ugcccggguaugcagccggg

SEQ ID NO: 60769 - RNA, 19 nt, Human
uggaaaaaagccugccaaa

SEQ ID NO: 60770 - RNA, 21 nt, Human
uggccaaggggucugcacuca

SEQ ID NO: 60771 - RNA, 23 nt, Human
uggcgucggggucaagucugcgg

SEQ ID NO: 60772 - RNA, 19 nt, Human
ugggcuguggcgucggggu

SEQ ID NO: 60773 - RNA, 22 nt, Human
ugguaaugucccgaaaaaucuc

SEQ ID NO: 60774 - RNA, 20 nt, Human
ugguuuguccacaggagauu

SEQ ID NO: 60775 - RNA, 20 nt, Human
uguccuggcugcguggccag

SEQ ID NO: 60776 - RNA, 21 nt, Human
uucacacagccaucaucaccc

SEQ ID NO: 60777 - RNA, 19 nt, Human
acaagcagguggagggaag

SEQ ID NO: 60778 - RNA, 20 nt, Human
acagcagaggugcccaugga

SEQ ID NO: 60779 - RNA, 21 nt, Human
accagggcuggccuugcuucc

SEQ ID NO: 60780 - RNA, 21 nt, Human
acuccaguguuaucacuuccu

SEQ ID NO: 60781 - RNA, 23 nt, Human
cacaagcagguggagggaaggug

SEQ ID NO: 60782 - RNA, 23 nt, Human
caccugaaacacauggggaugga

SEQ ID NO: 60783 - RNA, 18 nt, Human
cagguggagggaaggugg

SEQ ID NO: 60784 - RNA, 25 nt, Human
ccaugccuggaccagucccuuccuc

SEQ ID NO: 60785 - RNA, 18 nt, Human
cccucccugacccacacc

SEQ ID NO: 60786 - RNA, 24 nt, Human
ccucuuguuaccacuccaguguua

SEQ ID NO: 60787 - RNA, 18 nt, Human
ccuuccuccuucugcccc

SEQ ID NO: 60788 - RNA, 18 nt, Human
ccuugcuuccugcuccuc

SEQ ID NO: 60789 - RNA, 20 nt, Human
ccuugcuuccugcuccucuu

SEQ ID NO: 60790 - RNA, 21 nt, Human
ccuugcuuccugcuccucuug

SEQ ID NO: 60791 - RNA, 19 nt, Human
cggagguggcucaggcugc

SEQ ID NO: 60792 - RNA, 25 nt, Human
gcagggggaagggacccaugccugg

SEQ ID NO: 60793 - RNA, 21 nt, Human
ggauggagaaccagggcuggc

SEQ ID NO: 60794 - RNA, 22 nt, Human
ggggauggagaaccagggcugg

SEQ ID NO: 60795 - RNA, 20 nt, Human
gguggagggaaggugggggc

SEQ ID NO: 60796 - RNA, 18 nt, Human
guagcuacuggggagggg

SEQ ID NO: 60797 - RNA, 21 nt, Human
uagccucuagaccccucccug

SEQ ID NO: 60798 - RNA, 20 nt, Human
uccuccuucugccccugcug

SEQ ID NO: 60799 - RNA, 22 nt, Human
uccuucugccccugcugggucc

SEQ ID NO: 60800 - RNA, 26 nt, Human
ugccuggaccagucccuuccuccuuc

SEQ ID NO: 60801 - RNA, 18 nt, Human
aacacaaacucgccaucc

SEQ ID NO: 60802 - RNA, 25 nt, Human
aacagcuguagacaugaaaugguga

SEQ ID NO: 60803 - RNA, 25 nt, Human
accacagcagcucacccacagcaac

SEQ ID NO: 60804 - RNA, 20 nt, Human
agcagcucacccacagcaac

SEQ ID NO: 60805 - RNA, 19 nt, Human
aggguaaauucucugaaga

SEQ ID NO: 60806 - RNA, 18 nt, Human
aggucuuugguacaaagc

SEQ ID NO: 60807 - RNA, 19 nt, Human
aucagcaacuggauggaag

SEQ ID NO: 60808 - RNA, 21 nt, Human
caaagcucagaaggcaagcuc

SEQ ID NO: 60809 - RNA, 23 nt, Human
caacagguucaauuuuaugaaaa

SEQ ID NO: 60810 - RNA, 18 nt, Human
caaccaacagguucaauu

SEQ ID NO: 60811 - RNA, 27 nt, Human
caaccaacagguucaauuuuaugaaaa

SEQ ID NO: 60812 - RNA, 24 nt, Human
caagacgagagaacaugcuugucu

SEQ ID NO: 60813 - RNA, 23 nt, Human
caauaagaaaaagaccuuccacu

SEQ ID NO: 60814 - RNA, 19 nt, Human
cacaugaugguggcaagac

SEQ ID NO: 60815 - RNA, 20 nt, Human
caccaggcgucagcaauggu

SEQ ID NO: 60816 - RNA, 18 nt, Human
ccaggucuuugguacaaa

SEQ ID NO: 60817 - RNA, 25 nt, Human
ccgaccacagcaugcuuggcuacag

SEQ ID NO: 60818 - RNA, 18 nt, Human
cucacgcaucauucauuc

SEQ ID NO: 60819 - RNA, 20 nt, Human
cuccuuuuuuuccccacaaa

SEQ ID NO: 60820 - RNA, 22 nt, Human
cuuggcuacagaccacagcagc

SEQ ID NO: 60821 - RNA, 20 nt, Human
cuugguuaaggguaaauucu

SEQ ID NO: 60822 - RNA, 22 nt, Human
gacaaagcaucagcaacuggau

SEQ ID NO: 60823 - RNA, 23 nt, Human
gcaaagugcuguaggacuuaaag

SEQ ID NO: 60824 - RNA, 23 nt, Human
gcaagcuccuuuuuuuccccaca

SEQ ID NO: 60825 - RNA, 22 nt, Human
gcucacccacagcaacuccaac

SEQ ID NO: 60826 - RNA, 23 nt, Human
ggcaaagugcuguaggacuuaaa

SEQ ID NO: 60827 - RNA, 22 nt, Human
gguaaauucucugaagacaaag

SEQ ID NO: 60828 - RNA, 23 nt, Human
uaaaacacaaacucgccauccua

SEQ ID NO: 60829 - RNA, 21 nt, Human
uacaaagcucagaaggcaagc

SEQ ID NO: 60830 - RNA, 24 nt, Human
uaggagggguggggccacacucuu

SEQ ID NO: 60831 - RNA, 22 nt, Human
uccacggcugggcagauccgac

SEQ ID NO: 60832 - RNA, 22 nt, Human
ucccaggucuuugguacaaagc

SEQ ID NO: 60833 - RNA, 20 nt, Human
uccgaccacagcaugcuugg

SEQ ID NO: 60834 - RNA, 18 nt, Human
ucugugugugugugaagu

SEQ ID NO: 60835 - RNA, 25 nt, Human
ugaaaaauuaaaacacaaacucgcc

SEQ ID NO: 60836 - RNA, 19 nt, Human
ugaagacaaagcaucagca

SEQ ID NO: 60837 - RNA, 20 nt, Human
ugcuguaggacuuaaagguu

SEQ ID NO: 60838 - RNA, 21 nt, Human
ugcuugucuaacacugcuugg

SEQ ID NO: 60839 - RNA, 21 nt, Human
uguaggacuuaaagguugcuu

SEQ ID NO: 60840 - RNA, 18 nt, Human
ugucaaagagcuugucag

SEQ ID NO: 60841 - RNA, 21 nt, Human
ugucagggaaagcugccaguu

SEQ ID NO: 60842 - RNA, 19 nt, Human
uucacaauauuuacaauaa

SEQ ID NO: 60843 - RNA, 19 nt, Human
uucagguaaauagccgagu

SEQ ID NO: 60844 - RNA, 21 nt, Human
uuccacggcugggcagauccg

SEQ ID NO: 60845 - RNA, 24 nt, Human
uuucuauacugaugccaacagcca

SEQ ID NO: 60846 - RNA, 21 nt, Human
uuuuguucgauuuuaauuccu

SEQ ID NO: 60847 - RNA, 23 nt, Human
cccuuggaccucauuuccgaguc

SEQ ID NO: 60848 - RNA, 21 nt, Human
ccuuggcuacccuuggaccuc

SEQ ID NO: 60849 - RNA, 26 nt, Human
uacccuuggaccucauuuccgagucc

SEQ ID NO: 60850 - RNA, 18 nt, Human
ucauuuccgaguccucaa

SEQ ID NO: 60851 - RNA, 27 nt, Human
acuaacacggccccaguggccucuccc

SEQ ID NO: 60852 - RNA, 21 nt, Human
caccggcagacuaacacggcc

SEQ ID NO: 60853 - RNA, 23 nt, Human
cagccuccaggccgccccgcccc

SEQ ID NO: 60854 - RNA, 24 nt, Human
cagccuccaggccgccccgccccg

SEQ ID NO: 60855 - RNA, 23 nt, Human
cauaagugagccacauacuguag

SEQ ID NO: 60856 - RNA, 21 nt, Human
ccccaguggccucuccccucc

SEQ ID NO: 60857 - RNA, 18 nt, Human
ccccucccucugccggcc

SEQ ID NO: 60858 - RNA, 24 nt, Human
cccgccccgccgcugucggggccg

SEQ ID NO: 60859 - RNA, 20 nt, Human
ccgccccgccccgccgcugu

SEQ ID NO: 60860 - RNA, 20 nt, Human
ccgccccgccgcugucgcgc

SEQ ID NO: 60861 - RNA, 21 nt, Human
cuccaggccgccccgccccgc

SEQ ID NO: 60862 - RNA, 24 nt, Human
agaagcagugaccaggaugagggu

SEQ ID NO: 60863 - RNA, 21 nt, Human
agauaggaaauucaaagaaga

SEQ ID NO: 60864 - RNA, 18 nt, Human
agggcuguuauagcagaa

SEQ ID NO: 60865 - RNA, 22 nt, Human
auccaguugcuuugaccagauc

SEQ ID NO: 60866 - RNA, 20 nt, Human
cagugaccaggaugagggua

SEQ ID NO: 60867 - RNA, 19 nt, Human
gaagcagugaccaggauga

SEQ ID NO: 60868 - RNA, 18 nt, Human
uaagaucuaguauccagu

SEQ ID NO: 60869 - RNA, 21 nt, Human
uagcagaagcagugaccagga

SEQ ID NO: 60870 - RNA, 21 nt, Human
ucaaagaagaaagacugcaga

SEQ ID NO: 60871 - RNA, 22 nt, Human
ugaccagaucucuuagacaguc

SEQ ID NO: 60872 - RNA, 20 nt, Human
ugaggguagcagacaacaca

SEQ ID NO: 60873 - RNA, 22 nt, Human
uucaaagaagaaagacugcaga

SEQ ID NO: 60874 - RNA, 21 nt, Human
uuuuuuuuuuuuuugcaggua

SEQ ID NO: 60875 - RNA, 22 nt, Human
uuuuuuuuuuuuuuuuugcagg

SEQ ID NO: 60876 - RNA, 23 nt, Human
uuuuuuuuuuuuuuuuugcaggu

SEQ ID NO: 60877 - RNA, 27 nt, Human
uuuuuuuuuuuuuuuuuuuuuuugggg

SEQ ID NO: 60878 - RNA, 20 nt, Human
aaaaacccucaaauaaaaaa

SEQ ID NO: 60879 - RNA, 22 nt, Human
aaaagaacucuaucacaggagc

SEQ ID NO: 60880 - RNA, 30 nt, Human
aacccucaaauaaaaaaucuugggcuuaaa

SEQ ID NO: 60881 - RNA, 19 nt, Human
aaggaaugguaguugaggg

SEQ ID NO: 60882 - RNA, 29 nt, Human
acccucaaauaaaaaaucuugggcuuaaa

SEQ ID NO: 60883 - RNA, 24 nt, Human
acgcugagcccccacguggguagc

SEQ ID NO: 60884 - RNA, 21 nt, Human
agaaggaaugguaguugaggg

SEQ ID NO: 60885 - RNA, 22 nt, Human
auaaaaaaucuugggcuuaaaa

SEQ ID NO: 60886 - RNA, 21 nt, Human
aucuugggcuuaaaagaacuc

SEQ ID NO: 60887 - RNA, 19 nt, Human
augagcaaaagagcaaccc

SEQ ID NO: 60888 - RNA, 23 nt, Human
auucaaacaaagucauuaguagu

SEQ ID NO: 60889 - RNA, 25 nt, Human
cacgcugagcccccacguggguagc

SEQ ID NO: 60890 - RNA, 21 nt, Human
ccacguggguagcggaccugg

SEQ ID NO: 60891 - RNA, 24 nt, Human
cccgauggcagccuagcuccuccu

SEQ ID NO: 60892 - RNA, 21 nt, Human
cccucuuaugagcaaaagagc

SEQ ID NO: 60893 - RNA, 23 nt, Human
ccgauggcagccuagcuccuccu

SEQ ID NO: 60894 - RNA, 23 nt, Human
ccucuuaugagcaaaagagcaac

SEQ ID NO: 60895 - RNA, 21 nt, Human
cgcccuugggcagcuguaccg

SEQ ID NO: 60896 - RNA, 21 nt, Human
cgcccuugggcagcuguaccg

SEQ ID NO: 60897 - RNA, 21 nt, Human
cgcccuugggcagcuguaccg

SEQ ID NO: 60898 - RNA, 20 nt, Human
cucgcgagaucugcccucca

SEQ ID NO: 60899 - RNA, 24 nt, Human
cucugaagaguguuuaaagaagga

SEQ ID NO: 60900 - RNA, 28 nt, Human
gcacaaagaagggugcacgcugagcccc

SEQ ID NO: 60901 - RNA, 18 nt, Human
gcccuugggcagcuguac

SEQ ID NO: 60902 - RNA, 18 nt, Human
gcccuugggcagcuguac

SEQ ID NO: 60903 - RNA, 23 nt, Human
uaaaaaacaaaaaacccucaaau

SEQ ID NO: 60904 - RNA, 24 nt, Human
uaaaagaacucuaucacaggagcc

SEQ ID NO: 60905 - RNA, 21 nt, Human
uaccgcgucacccaccgaagc

SEQ ID NO: 60906 - RNA, 21 nt, Human
uaccgcgucacccaccgaagc

SEQ ID NO: 60907 - RNA, 21 nt, Human
uaccgcgucacccaccgaagc

SEQ ID NO: 60908 - RNA, 22 nt, Human
uaucacaggagccugguuggag

SEQ ID NO: 60909 - RNA, 24 nt, Human
uaucacaggagccugguuggagga

SEQ ID NO: 60910 - RNA, 23 nt, Human
ucagaggcgcgcuugucguggcc

SEQ ID NO: 60911 - RNA, 19 nt, Human
ucccaggcucaaagugauu

SEQ ID NO: 60912 - RNA, 22 nt, Human
ucugaagaguguuuaaagaagg

SEQ ID NO: 60913 - RNA, 20 nt, Human
ucuugggcuuaaaagaacuc

SEQ ID NO: 60914 - RNA, 21 nt, Human
ugcacgcugagcccccacgug

SEQ ID NO: 60915 - RNA, 22 nt, Human
ugcagauuucucugaagagugu

SEQ ID NO: 60916 - RNA, 19 nt, Human
uggccgaagaaugcgcgug

SEQ ID NO: 60917 - RNA, 26 nt, Human
uuaguagucuuuguucaauuuuuuuu

SEQ ID NO: 60918 - RNA, 20 nt, Human
uucaaacaaagucauuagua

SEQ ID NO: 60919 - RNA, 22 nt, Human
uucagacugccagcgaagcccc

SEQ ID NO: 60920 - RNA, 18 nt, Human
uuuuuuuugaaacuaugg

SEQ ID NO: 60921 - RNA, 20 nt, Human
uuuuuuuuugaaacuauggc

SEQ ID NO: 60922 - RNA, 22 nt, Human
uuuuuuuuuuugaaacuauggg

SEQ ID NO: 60923 - RNA, 24 nt, Human
uuuuuuuuuuuugaaacuauggcu

SEQ ID NO: 60924 - RNA, 18 nt, Human
uuuuuuuuuuuuuuuuug

SEQ ID NO: 60925 - RNA, 23 nt, Human
uuuuuuuuuuuuuuuuuuuuggg

SEQ ID NO: 60926 - RNA, 21 nt, Human
aaaaagcaccggcgcggaggu

SEQ ID NO: 60927 - RNA, 21 nt, Human
aaaagacuggcugccagggac

SEQ ID NO: 60928 - RNA, 18 nt, Human
aaaaggaaaaagaaaagg

SEQ ID NO: 60929 - RNA, 23 nt, Human
aaacaacaaagaugaacaguuac

SEQ ID NO: 60930 - RNA, 21 nt, Human
aaagccaaaccuacuccaagc

SEQ ID NO: 60931 - RNA, 20 nt, Human
aaccucuggauauuuuuggu

SEQ ID NO: 60932 - RNA, 22 nt, Human
aagaacacagguuuuuuaauug

SEQ ID NO: 60933 - RNA, 26 nt, Human
aagcagaggugaugcaaaggggaccc

SEQ ID NO: 60934 - RNA, 21 nt, Human
aauccuaugcccuauauccac

SEQ ID NO: 60935 - RNA, 18 nt, Human
aaugaaaagaaacaaaaa

SEQ ID NO: 60936 - RNA, 18 nt, Human
aaugauggcaguggagga

SEQ ID NO: 60937 - RNA, 21 nt, Human
aauuuugugaagaaaugugcu

SEQ ID NO: 60938 - RNA, 22 nt, Human
acagugaaaaauuagaccugga

SEQ ID NO: 60939 - RNA, 22 nt, Human
accaaagccaaaccuacuccaa

SEQ ID NO: 60940 - RNA, 21 nt, Human
accccaugccaaugacgacca

SEQ ID NO: 60941 - RNA, 21 nt, Human
acuaaagcucacuucaaucug

SEQ ID NO: 60942 - RNA, 24 nt, Human
agaucagaaguucacucaagccua

SEQ ID NO: 60943 - RNA, 21 nt, Human
agcaggacuccaggaagcccg

SEQ ID NO: 60944 - RNA, 19 nt, Human
agcuaugaugcugguacaa

SEQ ID NO: 60945 - RNA, 24 nt, Human
aggaauggguuuuuccaaaaaugc

SEQ ID NO: 60946 - RNA, 20 nt, Human
agugaaaaucgcaaaaggaa

SEQ ID NO: 60947 - RNA, 19 nt, Human
agugauaaaacaacaaaga

SEQ ID NO: 60948 - RNA, 23 nt, Human
auaaacacucuuaaugugaacaa

SEQ ID NO: 60949 - RNA, 22 nt, Human
auauucaaaugaaaagaaacaa

SEQ ID NO: 60950 - RNA, 18 nt, Human
aucgaguggcacauacuu

SEQ ID NO: 60951 - RNA, 19 nt, Human
augcccuauauccacccca

SEQ ID NO: 60952 - RNA, 20 nt, Human
auuaaagaaaagguacugca

SEQ ID NO: 60953 - RNA, 20 nt, Human
caaaaaugcaaaauuagcau

SEQ ID NO: 60954 - RNA, 19 nt, Human
caaaaggaaaaagaaaagg

SEQ ID NO: 60955 - RNA, 25 nt, Human
caaagccaaaccuacuccaagcuau

SEQ ID NO: 60956 - RNA, 25 nt, Human
caaguaauccuaugcccuauaucca

SEQ ID NO: 60957 - RNA, 24 nt, Human
caaugaaaaacacuagcuuggaag

SEQ ID NO: 60958 - RNA, 20 nt, Human
cagcaugaauuucugguuuu

SEQ ID NO: 60959 - RNA, 22 nt, Human
cagcgaauacaaccggcaacgc

SEQ ID NO: 60960 - RNA, 18 nt, Human
cagcuucauuauauuuua

SEQ ID NO: 60961 - RNA, 18 nt, Human
cagcuucugagacaagua

SEQ ID NO: 60962 - RNA, 18 nt, Human
cagggaccacagugaaaa

SEQ ID NO: 60963 - RNA, 21 nt, Human
ccaaaaaugcaaaauuagcau

SEQ ID NO: 60964 - RNA, 24 nt, Human
ccaaaaugaaccgacgaauaaaca

SEQ ID NO: 60965 - RNA, 20 nt, Human
ccaaugacgaccagucaaaa

SEQ ID NO: 60966 - RNA, 21 nt, Human
cccuauauccaccccaugcca

SEQ ID NO: 60967 - RNA, 19 nt, Human
ccuccuuccggcuccccgc

SEQ ID NO: 60968 - RNA, 26 nt, Human
ccucuagggcauuguaggcuugacuu

SEQ ID NO: 60969 - RNA, 21 nt, Human
ccuggagccaaugaaaaacac

SEQ ID NO: 60970 - RNA, 23 nt, Human
cgcaaaaagcaccggcgcggagg

SEQ ID NO: 60971 - RNA, 20 nt, Human
cgcgcagccgcaaaaagcac

SEQ ID NO: 60972 - RNA, 19 nt, Human
cuaaaaccaugaucguguc

SEQ ID NO: 60973 - RNA, 21 nt, Human
cuaaagcucacuucaaucugu

SEQ ID NO: 60974 - RNA, 19 nt, Human
cuagcucacaagaaaugaa

SEQ ID NO: 60975 - RNA, 19 nt, Human
cuccuuccggcuccccgca

SEQ ID NO: 60976 - RNA, 21 nt, Human
cugccuuuacuaaaauggcac

SEQ ID NO: 60977 - RNA, 23 nt, Human
cuggagccaaugaaaaacacuag

SEQ ID NO: 60978 - RNA, 20 nt, Human
cugguacaauaaugaaugag

SEQ ID NO: 60979 - RNA, 20 nt, Human
cuucuaaguuucugagauug

SEQ ID NO: 60980 - RNA, 20 nt, Human
cuucuaaguuucugagauug

SEQ ID NO: 60981 - RNA, 23 nt, Human
cuugcuucuaaguuucugagauu

SEQ ID NO: 60982 - RNA, 25 nt, Human
cuugcuucuaaguuucugagauugu

SEQ ID NO: 60983 - RNA, 22 nt, Human
gaauaaacacucuuaaugugaa

SEQ ID NO: 60984 - RNA, 21 nt, Human
gacacacuguccugcggggac

SEQ ID NO: 60985 - RNA, 22 nt, Human
gaccacagugaaaaauuagacc

SEQ ID NO: 60986 - RNA, 21 nt, Human
gaccuggagccaaugaaaaac

SEQ ID NO: 60987 - RNA, 18 nt, Human
gcaaaggccugacacugg

SEQ ID NO: 60988 - RNA, 26 nt, Human
gcccgcgcagccgcaaaaagcaccgg

SEQ ID NO: 60989 - RNA, 20 nt, Human
gcgcagccgcaaaaagcacc

SEQ ID NO: 60990 - RNA, 21 nt, Human
gcgcagccgcaaaaagcaccg

SEQ ID NO: 60991 - RNA, 18 nt, Human
gcggggcaagcugcccgc

SEQ ID NO: 60992 - RNA, 24 nt, Human
gcucacuaaagcucacuucaaucu

SEQ ID NO: 60993 - RNA, 20 nt, Human
gcuuuauuuaaaaaucucuc

SEQ ID NO: 60994 - RNA, 23 nt, Human
ggaagcccgcgcagccgcaaaaa

SEQ ID NO: 60995 - RNA, 25 nt, Human
ggaucccuggcagcgcaccacaagu

SEQ ID NO: 60996 - RNA, 23 nt, Human
ggcacuuucguuuacaucaacca

SEQ ID NO: 60997 - RNA, 19 nt, Human
gggggaaaauccccaaaau

SEQ ID NO: 60998 - RNA, 25 nt, Human
gucagguugccuccaccaaaccuga

SEQ ID NO: 60999 - RNA, 24 nt, Human
gugaaaaauuagaccuggagccaa

SEQ ID NO: 61000 - RNA, 24 nt, Human
guucacucaagccuacugcaaagg

SEQ ID NO: 61001 - RNA, 25 nt, Human
uaaaacaacaaagaugaagggaggc

SEQ ID NO: 61002 - RNA, 19 nt, Human
uaaagcaguacauacaggc

SEQ ID NO: 61003 - RNA, 24 nt, Human
uaaagcucacuucaaucugucaaa

SEQ ID NO: 61004 - RNA, 21 nt, Human
uaucuggucuuugaccaacuu

SEQ ID NO: 61005 - RNA, 21 nt, Human
uauguuauuaaaugacaaaac

SEQ ID NO: 61006 - RNA, 21 nt, Human
ucaaaucuagaucagaaguuc

SEQ ID NO: 61007 - RNA, 21 nt, Human
ucaaaugaaaagaaacaaaaa

SEQ ID NO: 61008 - RNA, 22 nt, Human
uccaccaaaccugauugaagca

SEQ ID NO: 61009 - RNA, 19 nt, Human
uccaccccaugccaaugac

SEQ ID NO: 61010 - RNA, 18 nt, Human
uccagaauaucuggucuu

SEQ ID NO: 61011 - RNA, 18 nt, Human
ucccugcauucugauccu

SEQ ID NO: 61012 - RNA, 25 nt, Human
uccggcuccccgcacugguggggac

SEQ ID NO: 61013 - RNA, 21 nt, Human
uccuccuuccggcuccccgca

SEQ ID NO: 61014 - RNA, 23 nt, Human
ucuaaaaccaugaucgugucuga

SEQ ID NO: 61015 - RNA, 20 nt, Human
ucuagggcauuguaggcuug

SEQ ID NO: 61016 - RNA, 19 nt, Human
ucuaugacagcuucugaga

SEQ ID NO: 61017 - RNA, 23 nt, Human
ugaaaagaaacaaaaauagauua

SEQ ID NO: 61018 - RNA, 20 nt, Human
ugaaccgacgaauaaacacu

SEQ ID NO: 61019 - RNA, 19 nt, Human
ugacacacuguccugcggg

SEQ ID NO: 61020 - RNA, 23 nt, Human
ugacauggaaucuuuuuccuguc

SEQ ID NO: 61021 - RNA, 20 nt, Human
ugacgaccagucaaaauggu

SEQ ID NO: 61022 - RNA, 22 nt, Human
ugacugguaaaaucccagaggc

SEQ ID NO: 61023 - RNA, 21 nt, Human
ugaggaaguaaaaaugggcaa

SEQ ID NO: 61024 - RNA, 18 nt, Human
ugcagcaaacuuuccuua

SEQ ID NO: 61025 - RNA, 23 nt, Human
ugccaaugacgaccagucaaaau

SEQ ID NO: 61026 - RNA, 21 nt, Human
ugccuuuacuaaaauggcacu

SEQ ID NO: 61027 - RNA, 23 nt, Human
ugcuuaggauacuaugauuugac

SEQ ID NO: 61028 - RNA, 23 nt, Human
uggaaggaauggguuuuuccaaa

SEQ ID NO: 61029 - RNA, 18 nt, Human
uggacagccagcuagcuc

SEQ ID NO: 61030 - RNA, 19 nt, Human
uggagccaaugaaaaacac

SEQ ID NO: 61031 - RNA, 21 nt, Human
uggcaguggaggaaagcagag

SEQ ID NO: 61032 - RNA, 20 nt, Human
uggcuccuccuuccggcucc

SEQ ID NO: 61033 - RNA, 22 nt, Human
uucacucaagccuacugcaaag

SEQ ID NO: 61034 - RNA, 20 nt, Human
uuccaaaaaugcaaaauuag

SEQ ID NO: 61035 - RNA, 20 nt, Human
uugcuauuuuuuuccugccu

SEQ ID NO: 61036 - RNA, 24 nt, Human
uuuacagaagaccuucaguggucc

SEQ ID NO: 61037 - RNA, 22 nt, Human
uuuuaauuggcagcaagaaauu

SEQ ID NO: 61038 - RNA, 23 nt, Human
aaagagccauaaauaaacuuaaa

SEQ ID NO: 61039 - RNA, 24 nt, Human
aaagagccauaaauaaacuuaaaa

SEQ ID NO: 61040 - RNA, 23 nt, Human
aggaagaggggaggucugggcuc

SEQ ID NO: 61041 - RNA, 19 nt, Human
aggaggugccacgugggga

SEQ ID NO: 61042 - RNA, 23 nt, Human
aggcugggaguugggguucuggg

SEQ ID NO: 61043 - RNA, 21 nt, Human
aggugccacguggggaggcug

SEQ ID NO: 61044 - RNA, 22 nt, Human
ccaggaagaggggaggucuggg

SEQ ID NO: 61045 - RNA, 22 nt, Human
ccccugcacucccgcccggccc

SEQ ID NO: 61046 - RNA, 21 nt, Human
cccgcccggcccggccccagc

SEQ ID NO: 61047 - RNA, 23 nt, Human
cccggcccggccccagcggugac

SEQ ID NO: 61048 - RNA, 21 nt, Human
cgcccggcccggccccagcgg

SEQ ID NO: 61049 - RNA, 21 nt, Human
cgcccucacguccccugcacu

SEQ ID NO: 61050 - RNA, 19 nt, Human
cggcugaaggggugaaggg

SEQ ID NO: 61051 - RNA, 20 nt, Human
cugggaauucuuagggaugg

SEQ ID NO: 61052 - RNA, 19 nt, Human
gcuccaggaagaggggagg

SEQ ID NO: 61053 - RNA, 21 nt, Human
ggucugggcucggcugaaggg

SEQ ID NO: 61054 - RNA, 23 nt, Human
gguucuggggcuccaggaagagg

SEQ ID NO: 61055 - RNA, 19 nt, Human
ucccgcccggcccggcccc

SEQ ID NO: 61056 - RNA, 21 nt, Human
ucuggggcuccaggaagaggg

SEQ ID NO: 61057 - RNA, 20 nt, Human
ugaggaggugccacgugggg

SEQ ID NO: 61058 - RNA, 23 nt, Human
ugaggaggugccacguggggagg

SEQ ID NO: 61059 - RNA, 18 nt, Human
ugcugcccuaggcuggga

SEQ ID NO: 61060 - RNA, 20 nt, Human
uggaaaggggaaauaagaau

SEQ ID NO: 61061 - RNA, 18 nt, Human
ugggguucuggggcucca

SEQ ID NO: 61062 - RNA, 20 nt, Human
uucaagacucccugcugccc

SEQ ID NO: 61063 - RNA, 23 nt, Human
uucaagacucccugcugcccuag

SEQ ID NO: 61064 - RNA, 23 nt, Human
aaaaacaaaacaaaaacagucaa

SEQ ID NO: 61065 - RNA, 21 nt, Human
aaaacaaaaacagucacagga

SEQ ID NO: 61066 - RNA, 22 nt, Human
aaaacaaaaacagucacaggaa

SEQ ID NO: 61067 - RNA, 20 nt, Human
aaaagaaagaaaaagcagaa

SEQ ID NO: 61068 - RNA, 20 nt, Human
aaaagccaggacagugaaug

SEQ ID NO: 61069 - RNA, 27 nt, Human
aaacaaaacaaaaacagucacaggaag

SEQ ID NO: 61070 - RNA, 20 nt, Human
aaacaacagacagugaagaa

SEQ ID NO: 61071 - RNA, 20 nt, Human
aacaaaacaaaaacagucac

SEQ ID NO: 61072 - RNA, 24 nt, Human
aacaaaacaaaaacagucacagga

SEQ ID NO: 61073 - RNA, 22 nt, Human
aaccuccccguguucucuccug

SEQ ID NO: 61074 - RNA, 20 nt, Human
aagaaaaagcagaagcagug

SEQ ID NO: 61075 - RNA, 27 nt, Human
aagaaaaagcagaagcagugagcaucg

SEQ ID NO: 61076 - RNA, 18 nt, Human
aagcucacacacucggac

SEQ ID NO: 61077 - RNA, 23 nt, Human
aauacaccacagguuaccagaac

SEQ ID NO: 61078 - RNA, 23 nt, Human
acaaaacaaaaacagucacagga

SEQ ID NO: 61079 - RNA, 24 nt, Human
acaaaacaaaaacagucacaggaa

SEQ ID NO: 61080 - RNA, 18 nt, Human
accccauuucucagcaac

SEQ ID NO: 61081 - RNA, 20 nt, Human
agaaagaaaaagcagaagca

SEQ ID NO: 61082 - RNA, 22 nt, Human
aggaaaaaaacaaaacaaaaac

SEQ ID NO: 61083 - RNA, 23 nt, Human
aggaaaaaaacaaaacaaaaaca

SEQ ID NO: 61084 - RNA, 22 nt, Human
aggaaaaaggaaaaaaacaaaa

SEQ ID NO: 61085 - RNA, 22 nt, Human
aggacagugaaugaggcugaag

SEQ ID NO: 61086 - RNA, 21 nt, Human
aggaggggguggaggugaggg

SEQ ID NO: 61087 - RNA, 21 nt, Human
agguauccagccguggaaaca

SEQ ID NO: 61088 - RNA, 24 nt, Human
aucgacaucaacuguacaagcauu

SEQ ID NO: 61089 - RNA, 24 nt, Human
auugaaaaucgacauuucccauuu

SEQ ID NO: 61090 - RNA, 25 nt, Human
caaacaaaccuccccguguucucuc

SEQ ID NO: 61091 - RNA, 22 nt, Human
caaaguagaggccgagggucag

SEQ ID NO: 61092 - RNA, 20 nt, Human
caauacaauggaaguggggu

SEQ ID NO: 61093 - RNA, 20 nt, Human
cacacaaacaaaccuccccg

SEQ ID NO: 61094 - RNA, 24 nt, Human
caccccauuucucagcaacuuccu

SEQ ID NO: 61095 - RNA, 19 nt, Human
cagccuggacuacuuuccu

SEQ ID NO: 61096 - RNA, 24 nt, Human
cagcggacacccucaucuguauac

SEQ ID NO: 61097 - RNA, 19 nt, Human
ccacagacucaguuucagg

SEQ ID NO: 61098 - RNA, 18 nt, Human
ccaccccauuucucagca

SEQ ID NO: 61099 - RNA, 18 nt, Human
ccagccguggaaacacug

SEQ ID NO: 61100 - RNA, 21 nt, Human
cccuggcagcggcugcugcuu

SEQ ID NO: 61101 - RNA, 24 nt, Human
cccuggcagcggcugcugcuuggc

SEQ ID NO: 61102 - RNA, 19 nt, Human
ccgaaggaaagcagcagcg

SEQ ID NO: 61103 - RNA, 22 nt, Human
ccgaaggaaagcagcagcggac

SEQ ID NO: 61104 - RNA, 22 nt, Human
ccggugacaggaggggguggag

SEQ ID NO: 61105 - RNA, 25 nt, Human
ccuccuugguguggucuucucugag

SEQ ID NO: 61106 - RNA, 23 nt, Human
ccugcaucccuccgccagggcug

SEQ ID NO: 61107 - RNA, 19 nt, Human
ccuucagauuuaaaauaaa

SEQ ID NO: 61108 - RNA, 21 nt, Human
cgagggucucucacgugcuuc

SEQ ID NO: 61109 - RNA, 22 nt, Human
cucucacgugcuucaguggcca

SEQ ID NO: 61110 - RNA, 18 nt, Human
cugcaucccuccgccagg

SEQ ID NO: 61111 - RNA, 24 nt, Human
gaaaaaggaaaaaaacaaaacaaa

SEQ ID NO: 61112 - RNA, 20 nt, Human
gaaacugguccuuucacauu

SEQ ID NO: 61113 - RNA, 19 nt, Human
gacagccugcauauaaguc

SEQ ID NO: 61114 - RNA, 21 nt, Human
gacaggaggggguggagguga

SEQ ID NO: 61115 - RNA, 23 nt, Human
gcagcggacacccucaucuguau

SEQ ID NO: 61116 - RNA, 21 nt, Human
gcaucccuccgccagggcugc

SEQ ID NO: 61117 - RNA, 23 nt, Human
gccagggcugccgcgcucccugc

SEQ ID NO: 61118 - RNA, 20 nt, Human
gcugccgcgcucccugccac

SEQ ID NO: 61119 - RNA, 21 nt, Human
ggaaagcagcagcggacaccc

SEQ ID NO: 61120 - RNA, 20 nt, Human
ggcagcggcugcugcuuggc

SEQ ID NO: 61121 - RNA, 23 nt, Human
uaaaaaagaaaacuacaucaaau

SEQ ID NO: 61122 - RNA, 24 nt, Human
uaaaaagcuacgguagguaaacaa

SEQ ID NO: 61123 - RNA, 23 nt, Human
uaaaaauacaccacagguuacca

SEQ ID NO: 61124 - RNA, 21 nt, Human
uaaaaugccuuuaacguccuu

SEQ ID NO: 61125 - RNA, 21 nt, Human
uagaagacgcuggaauaaaau

SEQ ID NO: 61126 - RNA, 22 nt, Human
uauaagcuacaggcuaaucucu

SEQ ID NO: 61127 - RNA, 20 nt, Human
ucaagcucacacacucggac

SEQ ID NO: 61128 - RNA, 24 nt, Human
ucacccauuuaaaagaauggaaau

SEQ ID NO: 61129 - RNA, 22 nt, Human
uccacagacucaguuucaggga

SEQ ID NO: 61130 - RNA, 22 nt, Human
uccacaguguccacagacucag

SEQ ID NO: 61131 - RNA, 18 nt, Human
uccuuggugacaggacuu

SEQ ID NO: 61132 - RNA, 18 nt, Human
ucgacaucaacuguacaa

SEQ ID NO: 61133 - RNA, 23 nt, Human
ucuacaguaguacuuuauauagu

SEQ ID NO: 61134 - RNA, 22 nt, Human
ucucaagcucacacacucggac

SEQ ID NO: 61135 - RNA, 18 nt, Human
ugaaugaggcugaagagu

SEQ ID NO: 61136 - RNA, 22 nt, Human
ugacaggacuuuuauggagaca

SEQ ID NO: 61137 - RNA, 20 nt, Human
ugacaggaggggguggaggu

SEQ ID NO: 61138 - RNA, 19 nt, Human
ugagugaaugucacaaggc

SEQ ID NO: 61139 - RNA, 19 nt, Human
ugccuuuggagaaagucca

SEQ ID NO: 61140 - RNA, 21 nt, Human
uggcagcggcugcugcuuggc

SEQ ID NO: 61141 - RNA, 18 nt, Human
uggcagucgaucggaauc

SEQ ID NO: 61142 - RNA, 18 nt, Human
ugucaaauauaagcuaca

SEQ ID NO: 61143 - RNA, 23 nt, Human
uucacacaaacaaaccuccccgu

SEQ ID NO: 61144 - RNA, 19 nt, Human
uuguucaaagcuuuccaca

SEQ ID NO: 61145 - RNA, 21 nt, Human
uuucacacaaacaaaccuccc

SEQ ID NO: 61146 - RNA, 19 nt, Human
uuucucagcaacuuccuga

SEQ ID NO: 61147 - RNA, 24 nt, Human
aaaaauacaaaaauuagccaugug

SEQ ID NO: 61148 - RNA, 21 nt, Human
aaaacaacaacaacaacaaaa

SEQ ID NO: 61149 - RNA, 22 nt, Human
aaaacaacaacaacaacaaaac

SEQ ID NO: 61150 - RNA, 24 nt, Human
aaacagacaccuaccaacacucca

SEQ ID NO: 61151 - RNA, 24 nt, Human
aaacaggcacacaacucagccaga

SEQ ID NO: 61152 - RNA, 26 nt, Human
aaaggaggaaggaaggaaggaaagag

SEQ ID NO: 61153 - RNA, 20 nt, Human
aaaguugaccaggugugaug

SEQ ID NO: 61154 - RNA, 24 nt, Human
aacaacaacaacaaaaagacaaag

SEQ ID NO: 61155 - RNA, 20 nt, Human
aacaacaacaacaacaaaaa

SEQ ID NO: 61156 - RNA, 20 nt, Human
aacagagggaaacuccaucu

SEQ ID NO: 61157 - RNA, 19 nt, Human
aacaugacgaaaccccauu

SEQ ID NO: 61158 - RNA, 20 nt, Human
aacaugacgaaaccccauuu

SEQ ID NO: 61159 - RNA, 21 nt, Human
aacaugacgaaaccccauuuc

SEQ ID NO: 61160 - RNA, 24 nt, Human
aaccugacgaauguggugaaaccc

SEQ ID NO: 61161 - RNA, 23 nt, Human
aagaaagaaaggaaggaagaaag

SEQ ID NO: 61162 - RNA, 24 nt, Human
aagaggaaguagaguagugcaggg

SEQ ID NO: 61163 - RNA, 21 nt, Human
aaguagacuucagaacacaga

SEQ ID NO: 61164 - RNA, 21 nt, Human
aauaacccugccccagagagu

SEQ ID NO: 61165 - RNA, 23 nt, Human
aaucacagucaucccuaacuuca

SEQ ID NO: 61166 - RNA, 24 nt, Human
aaucgcuuaaaccugggaggcaaa

SEQ ID NO: 61167 - RNA, 21 nt, Human
aauguggugaaaccccgucuc

SEQ ID NO: 61168 - RNA, 20 nt, Human
aauugcuuggacccaggaga

SEQ ID NO: 61169 - RNA, 23 nt, Human
acaacaacaacaaaaagacaaag

SEQ ID NO: 61170 - RNA, 24 nt, Human
acaacaacaacaacaaaaagacaa

SEQ ID NO: 61171 - RNA, 23 nt, Human
acaacacagaguucugacuaaca

SEQ ID NO: 61172 - RNA, 23 nt, Human
acagagugagacuccaucucaaa

SEQ ID NO: 61173 - RNA, 24 nt, Human
acagagugagacuccaucucaaaa

SEQ ID NO: 61174 - RNA, 24 nt, Human
acccaggagaaggaggcugcagug

SEQ ID NO: 61175 - RNA, 24 nt, Human
accccauuucuacuaaaaauacaa

SEQ ID NO: 61176 - RNA, 24 nt, Human
accccgucucuacgaaaaauacaa

SEQ ID NO: 61177 - RNA, 24 nt, Human
acccugucuuuacuaaaaauacaa

SEQ ID NO: 61178 - RNA, 23 nt, Human
accuguggucccagcuacucggg

SEQ ID NO: 61179 - RNA, 24 nt, Human
acuccagccagggccacagaacga

SEQ ID NO: 61180 - RNA, 24 nt, Human
acuccagccugggugacagaguga

SEQ ID NO: 61181 - RNA, 18 nt, Human
acugaacuccagccaggg

SEQ ID NO: 61182 - RNA, 23 nt, Human
acugcacucuagccuggcaacag

SEQ ID NO: 61183 - RNA, 23 nt, Human
acugcacucuagccuggcaacag

SEQ ID NO: 61184 - RNA, 24 nt, Human
acugggcaugguggcucaugccug

SEQ ID NO: 61185 - RNA, 24 nt, Human
acuguacuccagccugggugacag

SEQ ID NO: 61186 - RNA, 26 nt, Human
acuguacuccagccugggugacagag

SEQ ID NO: 61187 - RNA, 20 nt, Human
acuguguagcaccugagggu

SEQ ID NO: 61188 - RNA, 20 nt, Human
agaaacaggcacacaacuca

SEQ ID NO: 61189 - RNA, 25 nt, Human
agaaaggaaggaagaaagaaaggaa

SEQ ID NO: 61190 - RNA, 24 nt, Human
agaaggaggcugcagugagccgag

SEQ ID NO: 61191 - RNA, 24 nt, Human
agaauuccuccauggguuuugcau

SEQ ID NO: 61192 - RNA, 22 nt, Human
agagagaaaaggaggaaggaag

SEQ ID NO: 61193 - RNA, 18 nt, Human
agagagagaaaaggagga

SEQ ID NO: 61194 - RNA, 24 nt, Human
agagagagagaaagaaaggaaggg

SEQ ID NO: 61195 - RNA, 23 nt, Human
agagguagcagugagccaagauc

SEQ ID NO: 61196 - RNA, 23 nt, Human
agaucacaaggucaggaguucga

SEQ ID NO: 61197 - RNA, 18 nt, Human
agauggaguuggcuuucc

SEQ ID NO: 61198 - RNA, 22 nt, Human
agcacugucacuuaauacugug

SEQ ID NO: 61199 - RNA, 24 nt, Human
agcacuuugggaggccgaggcggg

SEQ ID NO: 61200 - RNA, 20 nt, Human
agcacuuugggaggucgagg

SEQ ID NO: 61201 - RNA, 21 nt, Human
agccuggcaacagagggaaac

SEQ ID NO: 61202 - RNA, 24 nt, Human
agccuggccaacaugacgaaaccc

SEQ ID NO: 61203 - RNA, 22 nt, Human
agccuggccaauauggugaaac

SEQ ID NO: 61204 - RNA, 24 nt, Human
agccuggccaauauggugaaaccc

SEQ ID NO: 61205 - RNA, 24 nt, Human
agccuggccaauauggugaaaccc

SEQ ID NO: 61206 - RNA, 24 nt, Human
agccugggugacagagugagacuc

SEQ ID NO: 61207 - RNA, 24 nt, Human
agccuguaguuccagcuacuuggg

SEQ ID NO: 61208 - RNA, 22 nt, Human
agcuaugucucucugggaaacu

SEQ ID NO: 61209 - RNA, 20 nt, Human
agcuccuggccagguggccc

SEQ ID NO: 61210 - RNA, 24 nt, Human
aggaaggaagaaagaaaggaaggg

SEQ ID NO: 61211 - RNA, 19 nt, Human
aggaccauuaauccugaaa

SEQ ID NO: 61212 - RNA, 20 nt, Human
aggaggcugcagugagccga

SEQ ID NO: 61213 - RNA, 21 nt, Human
aggaggcugcagugagccgag

SEQ ID NO: 61214 - RNA, 21 nt, Human
aggcaaagguugcaguaagcc

SEQ ID NO: 61215 - RNA, 24 nt, Human
aggcaaagguugcaguaagccgag

SEQ ID NO: 61216 - RNA, 22 nt, Human
aggcagaagaaucgcuuaaacc

SEQ ID NO: 61217 - RNA, 24 nt, Human
aggcagaagaaucgcuuaaaccug

SEQ ID NO: 61218 - RNA, 18 nt, Human
aggcaggagaauugcuca

SEQ ID NO: 61219 - RNA, 20 nt, Human
aggcaggagaauugcucaug

SEQ ID NO: 61220 - RNA, 21 nt, Human
aggcaugagaagggacauagg

SEQ ID NO: 61221 - RNA, 22 nt, Human
aggcauuuaucaaggaucugca

SEQ ID NO: 61222 - RNA, 21 nt, Human
aggccgaggcggguggaucac

SEQ ID NO: 61223 - RNA, 24 nt, Human
aggcgggcagaucacaaggucagg

SEQ ID NO: 61224 - RNA, 24 nt, Human
aggcggguggaucacaaagucagg

SEQ ID NO: 61225 - RNA, 25 nt, Human
aggcggguggaucaccuaggccagg

SEQ ID NO: 61226 - RNA, 24 nt, Human
aggcugaggcacaauaauugcuug

SEQ ID NO: 61227 - RNA, 20 nt, Human
aggcugaggcaggagaauug

SEQ ID NO: 61228 - RNA, 21 nt, Human
aggcugaggcaggagaauugc

SEQ ID NO: 61229 - RNA, 21 nt, Human
aggucgaggcggguggaucac

SEQ ID NO: 61230 - RNA, 24 nt, Human
aggugugauggcucaugccuguaa

SEQ ID NO: 61231 - RNA, 21 nt, Human
auaaucaacuuccuaaccgua

SEQ ID NO: 61232 - RNA, 18 nt, Human
aucacaaagucaggaguu

SEQ ID NO: 61233 - RNA, 21 nt, Human
aucacaaggucaggaguucga

SEQ ID NO: 61234 - RNA, 24 nt, Human
aucaccuaggccaggaguucgaga

SEQ ID NO: 61235 - RNA, 24 nt, Human
aucaugccacugcacucuagccug

SEQ ID NO: 61236 - RNA, 24 nt, Human
aucgacugggcaugguggcucaug

SEQ ID NO: 61237 - RNA, 20 nt, Human
aucucaaaaaaaaaaaaaag

SEQ ID NO: 61238 - RNA, 21 nt, Human
augaagcaaaagcugacagaa

SEQ ID NO: 61239 - RNA, 23 nt, Human
augaguaaaugaaugaauaauau

SEQ ID NO: 61240 - RNA, 22 nt, Human
augauaagagaguaaaugcacc

SEQ ID NO: 61241 - RNA, 19 nt, Human
augccuguaaucccagcac

SEQ ID NO: 61242 - RNA, 19 nt, Human
augccuguaaucccagcac

SEQ ID NO: 61243 - RNA, 23 nt, Human
auggcucaugccuguaaucccag

SEQ ID NO: 61244 - RNA, 21 nt, Human
caaacacagcauuaagaguuu

SEQ ID NO: 61245 - RNA, 19 nt, Human
caaaggaauaacccugccc

SEQ ID NO: 61246 - RNA, 23 nt, Human
caaaggaauaacccugccccaga

SEQ ID NO: 61247 - RNA, 22 nt, Human
caacaacaacaacaaaaagaca

SEQ ID NO: 61248 - RNA, 18 nt, Human
caacacuccaaagagaac

SEQ ID NO: 61249 - RNA, 18 nt, Human
caagaaaagagagagaga

SEQ ID NO: 61250 - RNA, 19 nt, Human
caccagaaaacaugauguc

SEQ ID NO: 61251 - RNA, 21 nt, Human
caccagaaaacaugaugucca

SEQ ID NO: 61252 - RNA, 27 nt, Human
caccagaaaacaugauguccauuuagc

SEQ ID NO: 61253 - RNA, 22 nt, Human
caccaucaacuaccucaaccug

SEQ ID NO: 61254 - RNA, 20 nt, Human
caccucuucaucccucucua

SEQ ID NO: 61255 - RNA, 23 nt, Human
caccugaagucucagcuacucgg

SEQ ID NO: 61256 - RNA, 24 nt, Human
caccugaagucucagcuacucggg

SEQ ID NO: 61257 - RNA, 23 nt, Human
caccuguggucccagcuacucgg

SEQ ID NO: 61258 - RNA, 24 nt, Human
caccuguggucccagcuacucggg

SEQ ID NO: 61259 - RNA, 18 nt, Human
cacugcacucuagccugg

SEQ ID NO: 61260 - RNA, 20 nt, Human
cacugcacucuagccuggca

SEQ ID NO: 61261 - RNA, 23 nt, Human
cacugcacucuagccuggcaaca

SEQ ID NO: 61262 - RNA, 24 nt, Human
cacugcacucuagccuggcaacag

SEQ ID NO: 61263 - RNA, 18 nt, Human
cacugcggaaggcagaac

SEQ ID NO: 61264 - RNA, 19 nt, Human
cacuguacuccagccuggg

SEQ ID NO: 61265 - RNA, 19 nt, Human
cacuguacuccagccuggg

SEQ ID NO: 61266 - RNA, 19 nt, Human
cacuguacuccagccuggg

SEQ ID NO: 61267 - RNA, 20 nt, Human
cacuguacuccagccugggu

SEQ ID NO: 61268 - RNA, 22 nt, Human
cacuguacuccagccuggguga

SEQ ID NO: 61269 - RNA, 23 nt, Human
cacuguacuccagccugggugac

SEQ ID NO: 61270 - RNA, 24 nt, Human
cacuguacuccagccugggugaca

SEQ ID NO: 61271 - RNA, 24 nt, Human
cacuguacuccagccugggugaca

SEQ ID NO: 61272 - RNA, 24 nt, Human
cagcacuuugggaggccgaggcgg

SEQ ID NO: 61273 - RNA, 24 nt, Human
cagcacuuugggaggucgaggcgg

SEQ ID NO: 61274 - RNA, 22 nt, Human
cagccagagcaaugagaugcaa

SEQ ID NO: 61275 - RNA, 24 nt, Human
cagcuacucgggaggcugaggcag

SEQ ID NO: 61276 - RNA, 24 nt, Human
cagcuacuugggaggcugaggcag

SEQ ID NO: 61277 - RNA, 18 nt, Human
caguccuuccugggcagu

SEQ ID NO: 61278 - RNA, 21 nt, Human
cauaucuaucuuucucacaaa

SEQ ID NO: 61279 - RNA, 20 nt, Human
caugccuguaaucccagcac

SEQ ID NO: 61280 - RNA, 24 nt, Human
caugccuguaaucccagcacuuug

SEQ ID NO: 61281 - RNA, 19 nt, Human
ccacugaacuccagccagg

SEQ ID NO: 61282 - RNA, 21 nt, Human
ccacugaacuccagccagggc

SEQ ID NO: 61283 - RNA, 19 nt, Human
ccacugcacucuagccugg

SEQ ID NO: 61284 - RNA, 19 nt, Human
ccacugcacucuagccugg

SEQ ID NO: 61285 - RNA, 20 nt, Human
ccacugcacucuagccuggc

SEQ ID NO: 61286 - RNA, 23 nt, Human
ccacugcacucuagccuggcaac

SEQ ID NO: 61287 - RNA, 20 nt, Human
ccaggaguucgagaccagcc

SEQ ID NO: 61288 - RNA, 21 nt, Human
ccuacacugcggaaggcagaa

SEQ ID NO: 61289 - RNA, 21 nt, Human
ccuaggccaggaguucgagac

SEQ ID NO: 61290 - RNA, 20 nt, Human
ccucuacauaccccuaacuu

SEQ ID NO: 61291 - RNA, 21 nt, Human
ccugaagucucagcuacucgg

SEQ ID NO: 61292 - RNA, 23 nt, Human
ccugacgaauguggugaaacccc

SEQ ID NO: 61293 - RNA, 24 nt, Human
ccugacgaauguggugaaaccccg

SEQ ID NO: 61294 - RNA, 24 nt, Human
ccuggccaacaugacgaaacccca

SEQ ID NO: 61295 - RNA, 22 nt, Human
ccuggccaauauggugaaaccc

SEQ ID NO: 61296 - RNA, 24 nt, Human
ccuggccaauauggugaaacccug

SEQ ID NO: 61297 - RNA, 19 nt, Human
ccugggcaguugccucuag

SEQ ID NO: 61298 - RNA, 22 nt, Human
ccugggugacagagugagacuc

SEQ ID NO: 61299 - RNA, 20 nt, Human
ccuguaaucccagcacuuug

SEQ ID NO: 61300 - RNA, 22 nt, Human
ccuguaaucccagcacuuuggg

SEQ ID NO: 61301 - RNA, 22 nt, Human
ccuguaaucccagcacuuuggg

SEQ ID NO: 61302 - RNA, 18 nt, Human
ccuguaguuccagcuacu

SEQ ID NO: 61303 - RNA, 21 nt, Human
ccuguaguuccagcuacuugg

SEQ ID NO: 61304 - RNA, 21 nt, Human
ccuguggucccagcuacucgg

SEQ ID NO: 61305 - RNA, 21 nt, Human
cgagaccagccuggccaacau

SEQ ID NO: 61306 - RNA, 24 nt, Human
cgagaccagccuggccaauauggu

SEQ ID NO: 61307 - RNA, 21 nt, Human
cgaggcggguggaucacaaag

SEQ ID NO: 61308 - RNA, 26 nt, Human
cgaggcggguggaucacaaagucagg

SEQ ID NO: 61309 - RNA, 19 nt, Human
cgaggcggguggaucaccu

SEQ ID NO: 61310 - RNA, 22 nt, Human
cgggcagaucacaaggucagga

SEQ ID NO: 61311 - RNA, 22 nt, Human
cucaguuucucucaggccucug

SEQ ID NO: 61312 - RNA, 21 nt, Human
cucauaucuaucuuucucaca

SEQ ID NO: 61313 - RNA, 23 nt, Human
cucaugccuguaaucccagcacu

SEQ ID NO: 61314 - RNA, 24 nt, Human
cucaugccuguaaucccagcacuu

SEQ ID NO: 61315 - RNA, 24 nt, Human
cucaugccuguaaucccagcacuu

SEQ ID NO: 61316 - RNA, 19 nt, Human
cuccaucucaaaaaaaaaa

SEQ ID NO: 61317 - RNA, 20 nt, Human
cucuacgaaaaauacaaaaa

SEQ ID NO: 61318 - RNA, 25 nt, Human
cucucaggccucuguugggccucag

SEQ ID NO: 61319 - RNA, 21 nt, Human
cugaagucucagcuacucggg

SEQ ID NO: 61320 - RNA, 22 nt, Human
cugcagugagccgaggucgugu

SEQ ID NO: 61321 - RNA, 24 nt, Human
cuggccaauauggugaaacccugu

SEQ ID NO: 61322 - RNA, 22 nt, Human
cuuaacucucucagccucagga

SEQ ID NO: 61323 - RNA, 18 nt, Human
gaaaaggaggaaggaagg

SEQ ID NO: 61324 - RNA, 23 nt, Human
gaaacaggcacacaacucagcca

SEQ ID NO: 61325 - RNA, 19 nt, Human
gaaacccugucuuuacuaa

SEQ ID NO: 61326 - RNA, 19 nt, Human
gaaagagagcuuccucucu

SEQ ID NO: 61327 - RNA, 19 nt, Human
gaacaaaguccacagcucu

SEQ ID NO: 61328 - RNA, 22 nt, Human
gaauguggugaaaccccgucuc

SEQ ID NO: 61329 - RNA, 23 nt, Human
gagaaagaaaggaaggaagaaag

SEQ ID NO: 61330 - RNA, 23 nt, Human
gagaagcuccuggccagguggcc

SEQ ID NO: 61331 - RNA, 20 nt, Human
gagaucaugccacugcacuc

SEQ ID NO: 61332 - RNA, 23 nt, Human
gaggaagcucugcuugggggagg

SEQ ID NO: 61333 - RNA, 24 nt, Human
gaggcacaauaauugcuuggaccc

SEQ ID NO: 61334 - RNA, 22 nt, Human
gaggcccagucuucccugaccc

SEQ ID NO: 61335 - RNA, 18 nt, Human
gaggcgggcagaucacaa

SEQ ID NO: 61336 - RNA, 24 nt, Human
gaggcggguggaucaccuaggcca

SEQ ID NO: 61337 - RNA, 21 nt, Human
gagugcguauguuauuuuuag

SEQ ID NO: 61338 - RNA, 23 nt, Human
gauaugagcaucaggagagacag

SEQ ID NO: 61339 - RNA, 19 nt, Human
gaucacaaagucaggaguu

SEQ ID NO: 61340 - RNA, 22 nt, Human
gaucacaaagucaggaguuuga

SEQ ID NO: 61341 - RNA, 21 nt, Human
gaucacaaggucaggaguucg

SEQ ID NO: 61342 - RNA, 24 nt, Human
gaucacaaggucaggaguucgaga

SEQ ID NO: 61343 - RNA, 23 nt, Human
gaucaccuaggccaggaguucga

SEQ ID NO: 61344 - RNA, 24 nt, Human
gauggcucaugccuguaaucccag

SEQ ID NO: 61345 - RNA, 23 nt, Human
gcagaacagaaggacauacagaa

SEQ ID NO: 61346 - RNA, 19 nt, Human
gcaucaccagaaaacauga

SEQ ID NO: 61347 - RNA, 24 nt, Human
gcauggugguaggcaccugugguc

SEQ ID NO: 61348 - RNA, 23 nt, Human
gccaauauggugaaacccugucu

SEQ ID NO: 61349 - RNA, 23 nt, Human
gccacugcacucuagccuggcaa

SEQ ID NO: 61350 - RNA, 20 nt, Human
gccgagaucaugccacugca

SEQ ID NO: 61351 - RNA, 23 nt, Human
gccuguaguuccagcuacuuggg

SEQ ID NO: 61352 - RNA, 21 nt, Human
gcuaugucucucugggaaacu

SEQ ID NO: 61353 - RNA, 21 nt, Human
ggaaacagacaccuaccaacc

SEQ ID NO: 61354 - RNA, 22 nt, Human
ggaauaacccugccccagagag

SEQ ID NO: 61355 - RNA, 24 nt, Human
ggaggcgggcagaucacaagguca

SEQ ID NO: 61356 - RNA, 24 nt, Human
ggaggcugcagugagccgaggucg

SEQ ID NO: 61357 - RNA, 23 nt, Human
ggcaugguggcucaugccuguaa

SEQ ID NO: 61358 - RNA, 21 nt, Human
ggcucaugccuguaaucccag

SEQ ID NO: 61359 - RNA, 21 nt, Human
ggcucaugccuguaaucccag

SEQ ID NO: 61360 - RNA, 19 nt, Human
gggaaacagacaccuacca

SEQ ID NO: 61361 - RNA, 22 nt, Human
gggaaacucaugaaagcucaaa

SEQ ID NO: 61362 - RNA, 22 nt, Human
gggaggcugaggcacaauaauu

SEQ ID NO: 61363 - RNA, 24 nt, Human
gggaggcugaggcagaagaaucgc

SEQ ID NO: 61364 - RNA, 24 nt, Human
gggcagaucacaaggucaggaguu

SEQ ID NO: 61365 - RNA, 24 nt, Human
ggguggaucacaaagucaggaguu

SEQ ID NO: 61366 - RNA, 23 nt, Human
gguagagguagcagugagccaag

SEQ ID NO: 61367 - RNA, 21 nt, Human
gguggaucaccuaggccagga

SEQ ID NO: 61368 - RNA, 24 nt, Human
gguggcucaugccuguaaucccag

SEQ ID NO: 61369 - RNA, 24 nt, Human
guacuccagccugggugacagagu

SEQ ID NO: 61370 - RNA, 24 nt, Human
gucacuguacuccagccuggguga

SEQ ID NO: 61371 - RNA, 24 nt, Human
gucgugucacuguacuccagccug

SEQ ID NO: 61372 - RNA, 23 nt, Human
guggaucacaaagucaggaguuu

SEQ ID NO: 61373 - RNA, 19 nt, Human
guucugacuaacacaaggc

SEQ ID NO: 61374 - RNA, 24 nt, Human
guugaccaggugugauggcucaug

SEQ ID NO: 61375 - RNA, 19 nt, Human
uaaaaacaacaacaacaac

SEQ ID NO: 61376 - RNA, 23 nt, Human
uaaaaacaacaacaacaacaaaa

SEQ ID NO: 61377 - RNA, 27 nt, Human
uaaaaacaacaacaacaacaaaaagac

SEQ ID NO: 61378 - RNA, 20 nt, Human
uaaaaauacaaaaauuagcc

SEQ ID NO: 61379 - RNA, 21 nt, Human
uaaaaauacaaaaauuagcca

SEQ ID NO: 61380 - RNA, 21 nt, Human
uaaaaauacaaaaauuagccu

SEQ ID NO: 61381 - RNA, 26 nt, Human
uaacacaaggcuuacucucaccucuu

SEQ ID NO: 61382 - RNA, 21 nt, Human
uaauauagauauauuuaaagu

SEQ ID NO: 61383 - RNA, 22 nt, Human
uacccaacuacaugcagucugu

SEQ ID NO: 61384 - RNA, 22 nt, Human
uacuccagccugggugacagag

SEQ ID NO: 61385 - RNA, 24 nt, Human
uacuccagccugggugacagagug

SEQ ID NO: 61386 - RNA, 21 nt, Human
uacuguguagcaccugagggu

SEQ ID NO: 61387 - RNA, 18 nt, Human
uagagauggaguuggcuu

SEQ ID NO: 61388 - RNA, 20 nt, Human
uagcugggcgcaguggcaug

SEQ ID NO: 61389 - RNA, 19 nt, Human
uaggccaggaguucgagac

SEQ ID NO: 61390 - RNA, 20 nt, Human
uaucacaucagagaagcucc

SEQ ID NO: 61391 - RNA, 20 nt, Human
uaucauccacucuccuauuu

SEQ ID NO: 61392 - RNA, 20 nt, Human
uaucuaaagacagaacaacu

SEQ ID NO: 61393 - RNA, 23 nt, Human
uaucuaauaauagagcgcuaaaa

SEQ ID NO: 61394 - RNA, 20 nt, Human
uauuuugcaucuaucaucca

SEQ ID NO: 61395 - RNA, 21 nt, Human
ucaaaaaaaaaaaaaagugga

SEQ ID NO: 61396 - RNA, 24 nt, Human
ucaauaggaauuuuccagcuaugu

SEQ ID NO: 61397 - RNA, 24 nt, Human
ucacaaagucaggaguuugaaacc

SEQ ID NO: 61398 - RNA, 24 nt, Human
ucacaaggucaggaguucgagacc

SEQ ID NO: 61399 - RNA, 23 nt, Human
ucaccagaaaacaugauguccau

SEQ ID NO: 61400 - RNA, 21 nt, Human
ucaccuaggccaggaguucga

SEQ ID NO: 61401 - RNA, 20 nt, Human
ucacuguacuccagccuggg

SEQ ID NO: 61402 - RNA, 21 nt, Human
ucacuguacuccagccugggu

SEQ ID NO: 61403 - RNA, 24 nt, Human
ucacuguacuccagccugggugac

SEQ ID NO: 61404 - RNA, 21 nt, Human
ucagaacacagaaaauuauca

SEQ ID NO: 61405 - RNA, 22 nt, Human
ucagaacacagaaaauuaucac

SEQ ID NO: 61406 - RNA, 21 nt, Human
ucagccagagcaaugagaugc

SEQ ID NO: 61407 - RNA, 22 nt, Human
ucaugccuguaaucccagcacu

SEQ ID NO: 61408 - RNA, 21 nt, Human
ucaugguagagguagcaguga

SEQ ID NO: 61409 - RNA, 18 nt, Human
uccacaaaggaauaaccc

SEQ ID NO: 61410 - RNA, 23 nt, Human
uccagccugggugacagagugag

SEQ ID NO: 61411 - RNA, 24 nt, Human
uccagccugggugacagagugaga

SEQ ID NO: 61412 - RNA, 22 nt, Human
uccaucucaaaaaaaaaaaaaa

SEQ ID NO: 61413 - RNA, 18 nt, Human
uccucucuccucuuuggg

SEQ ID NO: 61414 - RNA, 24 nt, Human
ucgggaggcugaggcagaagaauc

SEQ ID NO: 61415 - RNA, 23 nt, Human
ucgugucacuguacuccagccug

SEQ ID NO: 61416 - RNA, 22 nt, Human
ucucaggccucuguugggccuc

SEQ ID NO: 61417 - RNA, 25 nt, Human
ucucugaggaagcucugcuuggggg

SEQ ID NO: 61418 - RNA, 23 nt, Human
ucuuuacuaaaaauacaaaaauu

SEQ ID NO: 61419 - RNA, 22 nt, Human
ugaaugaauaaaugaaugagua

SEQ ID NO: 61420 - RNA, 26 nt, Human
ugaaugaguaaaugaaugaauaauau

SEQ ID NO: 61421 - RNA, 22 nt, Human
ugacgaauguggugaaaccccg

SEQ ID NO: 61422 - RNA, 24 nt, Human
ugacgaauguggugaaaccccguc

SEQ ID NO: 61423 - RNA, 22 nt, Human
ugagauaucgacugggcauggu

SEQ ID NO: 61424 - RNA, 22 nt, Human
ugagccgaggucgugucacugu

SEQ ID NO: 61425 - RNA, 24 nt, Human
ugaggcagaagaaucgcuuaaacc

SEQ ID NO: 61426 - RNA, 23 nt, Human
ugaggcaggagaauugcucaugg

SEQ ID NO: 61427 - RNA, 20 nt, Human
ugaggcaggagaauugcucc

SEQ ID NO: 61428 - RNA, 25 nt, Human
ugaguucagcacuuagagauggagu

SEQ ID NO: 61429 - RNA, 24 nt, Human
ugauggcucaugccuguaauccca

SEQ ID NO: 61430 - RNA, 20 nt, Human
ugauuacaugcagagacugg

SEQ ID NO: 61431 - RNA, 23 nt, Human
ugccuguaaucccagcacuuugg

SEQ ID NO: 61432 - RNA, 23 nt, Human
ugccuguaaucccagcacuuugg

SEQ ID NO: 61433 - RNA, 22 nt, Human
ugcguauguuauuuuuagacaa

SEQ ID NO: 61434 - RNA, 21 nt, Human
ugcuuggacccaggagaagga

SEQ ID NO: 61435 - RNA, 26 nt, Human
uggacaaauccacaauuguacuucaa

SEQ ID NO: 61436 - RNA, 26 nt, Human
uggaggaggcucugaguuccgaccac

SEQ ID NO: 61437 - RNA, 24 nt, Human
uggagggaaaggcaugagaaggga

SEQ ID NO: 61438 - RNA, 21 nt, Human
uggaucacaaagucaggaguu

SEQ ID NO: 61439 - RNA, 23 nt, Human
uggaucaccuaggccaggaguuc

SEQ ID NO: 61440 - RNA, 18 nt, Human
uggcaaaauaaaaaguga

SEQ ID NO: 61441 - RNA, 19 nt, Human
uggcaugagccuguaguuc

SEQ ID NO: 61442 - RNA, 20 nt, Human
uggcauggugguaggcaccu

SEQ ID NO: 61443 - RNA, 23 nt, Human
uggcauggugguaggcaccugug

SEQ ID NO: 61444 - RNA, 24 nt, Human
uggccaauauggugaaacccuguc

SEQ ID NO: 61445 - RNA, 24 nt, Human
uggcucaugccuguaaucccagca

SEQ ID NO: 61446 - RNA, 24 nt, Human
uggcucaugccuguaaucccagca

SEQ ID NO: 61447 - RNA, 20 nt, Human
ugggaaacagacaccuacca

SEQ ID NO: 61448 - RNA, 23 nt, Human
ugggaggccgaggcggguggauc

SEQ ID NO: 61449 - RNA, 24 nt, Human
ugggaggccgaggcggguggauca

SEQ ID NO: 61450 - RNA, 19 nt, Human
ugggaggcugaggcaggag

SEQ ID NO: 61451 - RNA, 22 nt, Human
ugggaggcugaggcaggagaau

SEQ ID NO: 61452 - RNA, 23 nt, Human
ugggaggucgaggcggguggauc

SEQ ID NO: 61453 - RNA, 19 nt, Human
uggggauacgagagcuggg

SEQ ID NO: 61454 - RNA, 24 nt, Human
ugguagagguagcagugagccaag

SEQ ID NO: 61455 - RNA, 24 nt, Human
ugguaggcaccuguggucccagcu

SEQ ID NO: 61456 - RNA, 19 nt, Human
uggugaaaccccgucucua

SEQ ID NO: 61457 - RNA, 24 nt, Human
ugguggcucaugccuguaauccca

SEQ ID NO: 61458 - RNA, 24 nt, Human
uggugguaggcaccugugguccca

SEQ ID NO: 61459 - RNA, 21 nt, Human
ugucaagaaaagagagagaga

SEQ ID NO: 61460 - RNA, 18 nt, Human
ugugaccuuagacauuca

SEQ ID NO: 61461 - RNA, 19 nt, Human
ugugguggaaugcaccuga

SEQ ID NO: 61462 - RNA, 24 nt, Human
uuaaaaacaacaacaacaacaaaa

SEQ ID NO: 61463 - RNA, 25 nt, Human
uuaauccugaaaucuugaccucagu

SEQ ID NO: 61464 - RNA, 24 nt, Human
uuaccaccaucaacuaccucaacc

SEQ ID NO: 61465 - RNA, 18 nt, Human
uuagccagaugguguggc

SEQ ID NO: 61466 - RNA, 20 nt, Human
uugcaguaagccgagaucau

SEQ ID NO: 61467 - RNA, 24 nt, Human
uugcuuggacccaggagaaggagg

SEQ ID NO: 61468 - RNA, 19 nt, Human
uuggcuuuccccguuggag

SEQ ID NO: 61469 - RNA, 25 nt, Human
uugggaggccgaggcggguggauca

SEQ ID NO: 61470 - RNA, 23 nt, Human
uugggaggcugaggcaggagaau

SEQ ID NO: 61471 - RNA, 18 nt, Human
uuguggacagguauuauu

SEQ ID NO: 61472 - RNA, 19 nt, Human
uuuaccaccaucaacuacc

SEQ ID NO: 61473 - RNA, 18 nt, Human
uuuagcuacuuguugaaa

SEQ ID NO: 61474 - RNA, 22 nt, Human
uuuagcuacuuguugaaauuuu

SEQ ID NO: 61475 - RNA, 24 nt, Human
uuucaggcucaagcuaccuucuug

SEQ ID NO: 61476 - RNA, 21 nt, Human
uuucuacuaaaaauacaaaaa

SEQ ID NO: 61477 - RNA, 24 nt, Human
uuugcauaauauuuuggguuuucu

SEQ ID NO: 61478 - RNA, 22 nt, Human
uuuguuguggacagguauuauu

SEQ ID NO: 61479 - RNA, 20 nt, Human
ucugagcaccgggaaggggg

SEQ ID NO: 61480 - RNA, 19 nt, Human
agggacaggagcucuagga

SEQ ID NO: 61481 - RNA, 21 nt, Human
cagcgucucuguccuuggugu

SEQ ID NO: 61482 - RNA, 23 nt, Human
ggggagggcggccuagccagcgu

SEQ ID NO: 61483 - RNA, 19 nt, Human
guaacaguggggagggcgg

SEQ ID NO: 61484 - RNA, 20 nt, Human
uagcaaagaguggguaggga

SEQ ID NO: 61485 - RNA, 18 nt, Human
ucucuguccuuggugucu

SEQ ID NO: 61486 - RNA, 21 nt, Human
uggaagacaauggucuggaca

SEQ ID NO: 61487 - RNA, 18 nt, Human
ugggguuggaagacaaug

SEQ ID NO: 61488 - RNA, 20 nt, Human
uggguguucuagaggccagc

SEQ ID NO: 61489 - RNA, 23 nt, Human
uguagcaaagaguggguagggac

SEQ ID NO: 61490 - RNA, 18 nt, Human
uguccuuggugucugugc

SEQ ID NO: 61491 - RNA, 21 nt, Human
agacagacagguggcagggca

SEQ ID NO: 61492 - RNA, 19 nt, Human
agagagguccucaggagag

SEQ ID NO: 61493 - RNA, 19 nt, Human
agagguccucaggagagcu

SEQ ID NO: 61494 - RNA, 20 nt, Human
aggaguuucuugccacacug

SEQ ID NO: 61495 - RNA, 22 nt, Human
aggaguuucuugccacacugga

SEQ ID NO: 61496 - RNA, 19 nt, Human
aggggagcugacagagagg

SEQ ID NO: 61497 - RNA, 25 nt, Human
agguggcagggcagggcaggugucc

SEQ ID NO: 61498 - RNA, 21 nt, Human
auucucagcagcuuuauugaa

SEQ ID NO: 61499 - RNA, 22 nt, Human
cacacuggaugccucccuacaa

SEQ ID NO: 61500 - RNA, 22 nt, Human
caccugcgcugcagugggaacu

SEQ ID NO: 61501 - RNA, 19 nt, Human
cagacagguggcagggcag

SEQ ID NO: 61502 - RNA, 21 nt, Human
ccuacaaucaggggagcugac

SEQ ID NO: 61503 - RNA, 23 nt, Human
ccucccacuggacauguguccuc

SEQ ID NO: 61504 - RNA, 19 nt, Human
cucaccucccacuggacau

SEQ ID NO: 61505 - RNA, 22 nt, Human
gagagguggucucaccucccac

SEQ ID NO: 61506 - RNA, 20 nt, Human
gcuugcugggcuggaggagu

SEQ ID NO: 61507 - RNA, 22 nt, Human
ggacagacagacagguggcagg

SEQ ID NO: 61508 - RNA, 22 nt, Human
ggcuagauucucagcagcuuua

SEQ ID NO: 61509 - RNA, 18 nt, Human
ggcuggaggaguuucuug

SEQ ID NO: 61510 - RNA, 22 nt, Human
ucaccugcgcugcagugggaac

SEQ ID NO: 61511 - RNA, 21 nt, Human
ucaggagagcucaccugcgcu

SEQ ID NO: 61512 - RNA, 23 nt, Human
ugacagagagguccucaggagag

SEQ ID NO: 61513 - RNA, 24 nt, Human
ugacagagagguccucaggagagc

SEQ ID NO: 61514 - RNA, 21 nt, Human
ugagagguggucucaccuccc

SEQ ID NO: 61515 - RNA, 18 nt, Human
uggcagggcagggcaggu

SEQ ID NO: 61516 - RNA, 18 nt, Human
acacaauaaagacuccau

SEQ ID NO: 61517 - RNA, 18 nt, Human
agagaccuuccgagcccu

SEQ ID NO: 61518 - RNA, 18 nt, Human
agcggcagcaaccgagaa

SEQ ID NO: 61519 - RNA, 18 nt, Human
cagccccgcaggucccgg

SEQ ID NO: 61520 - RNA, 20 nt, Human
cagcggcagcaaccgagaag

SEQ ID NO: 61521 - RNA, 18 nt, Human
ccccgcaggucccggugg

SEQ ID NO: 61522 - RNA, 18 nt, Human
ccgagcccuggugccagc

SEQ ID NO: 61523 - RNA, 23 nt, Human
ccuccucccccaaguuuagcaaa

SEQ ID NO: 61524 - RNA, 26 nt, Human
ccuggccucggccucgcggcccuggc

SEQ ID NO: 61525 - RNA, 27 nt, Human
cggccucgcggcccuggcuggcugggc

SEQ ID NO: 61526 - RNA, 20 nt, Human
cggcuccugggcugcggccu

SEQ ID NO: 61527 - RNA, 28 nt, Human
cuccauuuauuuguuccuccucccccaa

SEQ ID NO: 61528 - RNA, 18 nt, Human
cuccugggcugcggccug

SEQ ID NO: 61529 - RNA, 23 nt, Human
cugggcugcggccuggccucggc

SEQ ID NO: 61530 - RNA, 20 nt, Human
gagaagggcacucagccccg

SEQ ID NO: 61531 - RNA, 18 nt, Human
gcccuggugccagcuuug

SEQ ID NO: 61532 - RNA, 22 nt, Human
gcccuggugccagcuuuggugc

SEQ ID NO: 61533 - RNA, 22 nt, Human
uaacuugcaaaaaaugccaucc

SEQ ID NO: 61534 - RNA, 24 nt, Human
uaacuugcaaaaaaugccauccuu

SEQ ID NO: 61535 - RNA, 18 nt, Human
ucaauuggaaaagaagaa

SEQ ID NO: 61536 - RNA, 21 nt, Human
uccugggcugcggccuggccu

SEQ ID NO: 61537 - RNA, 22 nt, Human
uccugggcugcggccuggccuc

SEQ ID NO: 61538 - RNA, 23 nt, Human
ugcagguccaguucauaugugcu

SEQ ID NO: 61539 - RNA, 20 nt, Human
uggcuggcugggcgggcucc

SEQ ID NO: 61540 - RNA, 23 nt, Human
uggcugggcgggcuccucagcgg

SEQ ID NO: 61541 - RNA, 20 nt, Human
uucagagaccuuccgagccc

SEQ ID NO: 61542 - RNA, 23 nt, Human
uuuaacuugcaaaaaaugccauc

SEQ ID NO: 61543 - RNA, 25 nt, Human
aagcgauccucccaccuuggccucc

SEQ ID NO: 61544 - RNA, 20 nt, Human
acccugagagguggucucag

SEQ ID NO: 61545 - RNA, 25 nt, Human
acccugagagguggucucagugggg

SEQ ID NO: 61546 - RNA, 27 nt, Human
caagcgauccucccaccuuggccuccc

SEQ ID NO: 61547 - RNA, 27 nt, Human
caagcgauccucccaccuuggccuccc

SEQ ID NO: 61548 - RNA, 19 nt, Human
cagcugacucaggcugggg

SEQ ID NO: 61549 - RNA, 18 nt, Human
caggcuggggaggaacca

SEQ ID NO: 61550 - RNA, 19 nt, Human
ccacaguggcagagggagc

SEQ ID NO: 61551 - RNA, 21 nt, Human
cccaccuuggccucccaaagc

SEQ ID NO: 61552 - RNA, 21 nt, Human
cccccgugcccagccuccuug

SEQ ID NO: 61553 - RNA, 24 nt, Human
ccucccaccuuggccucccaaagc

SEQ ID NO: 61554 - RNA, 20 nt, Human
ccuggucucaagcgauccuc

SEQ ID NO: 61555 - RNA, 24 nt, Human
cucaagcgauccucccaccuuggc

SEQ ID NO: 61556 - RNA, 27 nt, Human
cuccuggucucaagcgauccucccacc

SEQ ID NO: 61557 - RNA, 21 nt, Human
cuggucucgaacuccuggucu

SEQ ID NO: 61558 - RNA, 23 nt, Human
gaaccagggcaggcacccugaga

SEQ ID NO: 61559 - RNA, 19 nt, Human
gcagagggagcagggcuca

SEQ ID NO: 61560 - RNA, 19 nt, Human
gccucccaaagcucugggg

SEQ ID NO: 61561 - RNA, 24 nt, Human
gcuaugcugcccaggcuggucucg

SEQ ID NO: 61562 - RNA, 22 nt, Human
ggaucuugcuaugcugcccagg

SEQ ID NO: 61563 - RNA, 24 nt, Human
ggcuggucucgaacuccuggucuc

SEQ ID NO: 61564 - RNA, 20 nt, Human
gggagcagggcucaguggca

SEQ ID NO: 61565 - RNA, 24 nt, Human
ggggaucuugcuaugcugcccagg

SEQ ID NO: 61566 - RNA, 20 nt, Human
guggagaggauguguccaca

SEQ ID NO: 61567 - RNA, 19 nt, Human
guggcagagggagcagggc

SEQ ID NO: 61568 - RNA, 19 nt, Human
uacaucaagacacugaggc

SEQ ID NO: 61569 - RNA, 21 nt, Human
uacaucaagacacugaggccc

SEQ ID NO: 61570 - RNA, 21 nt, Human
uaugcugcccaggcuggucuc

SEQ ID NO: 61571 - RNA, 23 nt, Human
uaugcugcccaggcuggucucga

SEQ ID NO: 61572 - RNA, 24 nt, Human
uaugcugcccaggcuggucucgaa

SEQ ID NO: 61573 - RNA, 24 nt, Human
ucaagcgauccucccaccuuggcc

SEQ ID NO: 61574 - RNA, 19 nt, Human
ucaguggcauuggagcaag

SEQ ID NO: 61575 - RNA, 21 nt, Human
ucucgaacuccuggucucaag

SEQ ID NO: 61576 - RNA, 22 nt, Human
ucugguuuugccugcuccauga

SEQ ID NO: 61577 - RNA, 22 nt, Human
ucuugcuaugcugcccaggcug

SEQ ID NO: 61578 - RNA, 23 nt, Human
ucuugcuaugcugcccaggcugg

SEQ ID NO: 61579 - RNA, 24 nt, Human
ucuugcuaugcugcccaggcuggu

SEQ ID NO: 61580 - RNA, 24 nt, Human
ugagagguggucucagugggguag

SEQ ID NO: 61581 - RNA, 18 nt, Human
ugagcccccgugcccagc

SEQ ID NO: 61582 - RNA, 22 nt, Human
ugagcccccgugcccagccucc

SEQ ID NO: 61583 - RNA, 23 nt, Human
ugcccagccuccuugcaguccag

SEQ ID NO: 61584 - RNA, 24 nt, Human
ugcccaggcuggucucgaacuccu

SEQ ID NO: 61585 - RNA, 24 nt, Human
ugcuaugcugcccaggcuggucuc

SEQ ID NO: 61586 - RNA, 27 nt, Human
ugcuaugcugcccaggcuggucucgaa

SEQ ID NO: 61587 - RNA, 21 nt, Human
uggggaggaaccagggcaggc

SEQ ID NO: 61588 - RNA, 24 nt, Human
uggggugacaggcgugagcccccg

SEQ ID NO: 61589 - RNA, 25 nt, Human
uggggugacaggcgugagcccccgu

SEQ ID NO: 61590 - RNA, 18 nt, Human
ugguccaccagccugugu

SEQ ID NO: 61591 - RNA, 21 nt, Human
uuauuuuguuuuuaaaagaug

SEQ ID NO: 61592 - RNA, 24 nt, Human
uuggccucccaaagcucuggggug

SEQ ID NO: 61593 - RNA, 18 nt, Human
uuuuguuuuuaaaagaug

SEQ ID NO: 61594 - RNA, 18 nt, Human
uuuuuuuuuuuuuccuug

SEQ ID NO: 61595 - RNA, 21 nt, Human
acaaaauuccuccagcaguga

SEQ ID NO: 61596 - RNA, 20 nt, Human
agacuuagaauuaugcagug

SEQ ID NO: 61597 - RNA, 23 nt, Human
agggacuccaggacaagaaccag

SEQ ID NO: 61598 - RNA, 18 nt, Human
agggugccgacucagaaa

SEQ ID NO: 61599 - RNA, 21 nt, Human
augugccaaaaaagccgagcu

SEQ ID NO: 61600 - RNA, 24 nt, Human
cacagagguggguauuguggccag

SEQ ID NO: 61601 - RNA, 24 nt, Human
cacggaaucauccuauucaucucc

SEQ ID NO: 61602 - RNA, 22 nt, Human
cagguggguaguugacaaaauu

SEQ ID NO: 61603 - RNA, 21 nt, Human
cagugagcuucauccccaggu

SEQ ID NO: 61604 - RNA, 19 nt, Human
cauucacucuuuagugggu

SEQ ID NO: 61605 - RNA, 19 nt, Human
cauucacucuuuagugggu

SEQ ID NO: 61606 - RNA, 20 nt, Human
ccagcagugauaauacucug

SEQ ID NO: 61607 - RNA, 22 nt, Human
ccgauuuuguugauccaugugc

SEQ ID NO: 61608 - RNA, 24 nt, Human
cuagagucacaccagggugccgac

SEQ ID NO: 61609 - RNA, 18 nt, Human
gaucacuagagucacacc

SEQ ID NO: 61610 - RNA, 19 nt, Human
ggacaagaaccaggugaug

SEQ ID NO: 61611 - RNA, 19 nt, Human
uaaacaggguggaagacuu

SEQ ID NO: 61612 - RNA, 24 nt, Human
uaagaugauuuugccaucuucuug

SEQ ID NO: 61613 - RNA, 24 nt, Human
uacaacaucauccacagagguggg

SEQ ID NO: 61614 - RNA, 21 nt, Human
uauaaaauuaacuuccacgug

SEQ ID NO: 61615 - RNA, 25 nt, Human
uccuccagcagugauaauacucuga

SEQ ID NO: 61616 - RNA, 18 nt, Human
ucuaauagccugggagca

SEQ ID NO: 61617 - RNA, 18 nt, Human
ugauggaugggugaaaau

SEQ ID NO: 61618 - RNA, 19 nt, Human
ugccaaaaaagccgagcua

SEQ ID NO: 61619 - RNA, 20 nt, Human
ugccugagcuucgccagauc

SEQ ID NO: 61620 - RNA, 22 nt, Human
ugcucugucucuggacuuccuc

SEQ ID NO: 61621 - RNA, 18 nt, Human
uggaagacuuagaauuau

SEQ ID NO: 61622 - RNA, 22 nt, Human
uggaagacuuagaauuaugcag

SEQ ID NO: 61623 - RNA, 18 nt, Human
uugauccaugugccaaaa

SEQ ID NO: 61624 - RNA, 18 nt, Human
aggagucacugagggaga

SEQ ID NO: 61625 - RNA, 21 nt, Human
aggcaugucccagauggcugu

SEQ ID NO: 61626 - RNA, 22 nt, Human
aucuaaaccucgggucugaggc

SEQ ID NO: 61627 - RNA, 21 nt, Human
cacuuucguccuucccgagag

SEQ ID NO: 61628 - RNA, 23 nt, Human
cagcaggaauacgugaggcaaag

SEQ ID NO: 61629 - RNA, 21 nt, Human
cagcaugagaaguauauuuca

SEQ ID NO: 61630 - RNA, 21 nt, Human
cgggucugaggcuguuugugu

SEQ ID NO: 61631 - RNA, 20 nt, Human
gaggagagaggccgccggaa

SEQ ID NO: 61632 - RNA, 24 nt, Human
guuuuucuuuuuuuaaaaaaauac

SEQ ID NO: 61633 - RNA, 24 nt, Human
uaaaaaaauacccaacuuaacaua

SEQ ID NO: 61634 - RNA, 19 nt, Human
uaaauaaacuacagcauga

SEQ ID NO: 61635 - RNA, 21 nt, Human
uaggaagacaggcauguccca

SEQ ID NO: 61636 - RNA, 20 nt, Human
ucaaauguuguccagcucca

SEQ ID NO: 61637 - RNA, 19 nt, Human
ucacugagggagaggagag

SEQ ID NO: 61638 - RNA, 22 nt, Human
ucuaaaccucgggucugaggcu

SEQ ID NO: 61639 - RNA, 21 nt, Human
ucucuugguggcagcaggaau

SEQ ID NO: 61640 - RNA, 18 nt, Human
ucuuuuauuaauguugcu

SEQ ID NO: 61641 - RNA, 19 nt, Human
ugacuggagcccauguaug

SEQ ID NO: 61642 - RNA, 19 nt, Human
ugagggagaggagagaggc

SEQ ID NO: 61643 - RNA, 18 nt, Human
uguggcucaggagucacu

SEQ ID NO: 61644 - RNA, 21 nt, Human
uguugcuguuuuucuuuuuuu

SEQ ID NO: 61645 - RNA, 23 nt, Human
uugcauuucucuccuugcagguc

SEQ ID NO: 61646 - RNA, 21 nt, Human
uuucaaguccucuaagggccu

SEQ ID NO: 61647 - RNA, 18 nt, Human
agaaccaagagaggaagc

SEQ ID NO: 61648 - RNA, 24 nt, Human
agcuggagaugguggugaacggcu

SEQ ID NO: 61649 - RNA, 20 nt, Human
aguaguaguagaggcgggcg

SEQ ID NO: 61650 - RNA, 20 nt, Human
aguguuuguggaaacaauua

SEQ ID NO: 61651 - RNA, 23 nt, Human
cacagaaccaagagaggaagcac

SEQ ID NO: 61652 - RNA, 21 nt, Human
cacuucauagcacagccaagu

SEQ ID NO: 61653 - RNA, 21 nt, Human
cacuuguaagcaggcagcugg

SEQ ID NO: 61654 - RNA, 18 nt, Human
caggagcacauugcuuug

SEQ ID NO: 61655 - RNA, 21 nt, Human
caggagcacauugcuuugcug

SEQ ID NO: 61656 - RNA, 23 nt, Human
cauagcacagccaaguguagcuc

SEQ ID NO: 61657 - RNA, 18 nt, Human
caucggauuucugaucug

SEQ ID NO: 61658 - RNA, 24 nt, Human
cauugaaaacuauucugggaauau

SEQ ID NO: 61659 - RNA, 21 nt, Human
cgaaauacaccuggcucgaaa

SEQ ID NO: 61660 - RNA, 24 nt, Human
cgccacacaguccgggcagggggu

SEQ ID NO: 61661 - RNA, 20 nt, Human
cuccgaccauagaggauggg

SEQ ID NO: 61662 - RNA, 21 nt, Human
cucgaaagaccccuguguccc

SEQ ID NO: 61663 - RNA, 22 nt, Human
cucugccuuccuuagagacuga

SEQ ID NO: 61664 - RNA, 23 nt, Human
cuggagaugguggugaacggcuc

SEQ ID NO: 61665 - RNA, 24 nt, Human
cuggcucgaaauacaccuggccuc

SEQ ID NO: 61666 - RNA, 22 nt, Human
cuggugucugugagcagcugga

SEQ ID NO: 61667 - RNA, 18 nt, Human
cuugaucaggagcacauu

SEQ ID NO: 61668 - RNA, 21 nt, Human
cuugaucaggagcacauugcu

SEQ ID NO: 61669 - RNA, 19 nt, Human
gaaagaccccuguguccca

SEQ ID NO: 61670 - RNA, 21 nt, Human
gaaauacaccuggccucgaaa

SEQ ID NO: 61671 - RNA, 19 nt, Human
ggagcacauugcuuugcug

SEQ ID NO: 61672 - RNA, 19 nt, Human
ggccucgaaagaccccugu

SEQ ID NO: 61673 - RNA, 22 nt, Human
gggcuccugccugacucagccu

SEQ ID NO: 61674 - RNA, 20 nt, Human
guggauucauguucagccuc

SEQ ID NO: 61675 - RNA, 22 nt, Human
uacaccuggccucgaaagaccc

SEQ ID NO: 61676 - RNA, 22 nt, Human
uaguagaggcgggcggcggaga

SEQ ID NO: 61677 - RNA, 22 nt, Human
ucuuucccaguaguaguagagg

SEQ ID NO: 61678 - RNA, 18 nt, Human
ucuuuuauucugcugcuc

SEQ ID NO: 61679 - RNA, 20 nt, Human
uggugucugugagcagcugg

SEQ ID NO: 61680 - RNA, 24 nt, Human
uucacuucauagcacagccaagug

SEQ ID NO: 61681 - RNA, 21 nt, Human
uuuauuagucuaaauauggag

SEQ ID NO: 61682 - RNA, 22 nt, Human
aggauuuuuauugguggcaccu

SEQ ID NO: 61683 - RNA, 22 nt, Human
ccuugcuggagggcuugguugg

SEQ ID NO: 61684 - RNA, 20 nt, Human
gcaccuggggccacauggcg

SEQ ID NO: 61685 - RNA, 20 nt, Human
gggcacuccugaauccuugc

SEQ ID NO: 61686 - RNA, 18 nt, Human
ggggcacuccugaauccu

SEQ ID NO: 61687 - RNA, 22 nt, Human
guggcaccuggggccacauggc

SEQ ID NO: 61688 - RNA, 23 nt, Human
uggcaccuggggccacauggcgg

SEQ ID NO: 61689 - RNA, 18 nt, Human
uuucagaggccccuccug

SEQ ID NO: 61690 - RNA, 23 nt, Human
gacucuccccuuguccagggagc

SEQ ID NO: 61691 - RNA, 21 nt, Human
gcacagaaagaacuuggucag

SEQ ID NO: 61692 - RNA, 22 nt, Human
ggagcucagucugaaccugggg

SEQ ID NO: 61693 - RNA, 22 nt, Human
ggaggaggaugcaagagcuacu

SEQ ID NO: 61694 - RNA, 26 nt, Human
uaggggacucuccccuuguccagucu

SEQ ID NO: 61695 - RNA, 20 nt, Human
ugaaccugggggaucagggg

SEQ ID NO: 61696 - RNA, 19 nt, Human
aaggagcucgcaggaugga

SEQ ID NO: 61697 - RNA, 24 nt, Human
aaggagcucgcaggauggauaggc

SEQ ID NO: 61698 - RNA, 20 nt, Human
cagcaugccuggaggggggc

SEQ ID NO: 61699 - RNA, 23 nt, Human
cagcuuuauugggaggccagcau

SEQ ID NO: 61700 - RNA, 20 nt, Human
cuggagcagcugccucuagg

SEQ ID NO: 61701 - RNA, 21 nt, Human
gagcagcugccucuagggaug

SEQ ID NO: 61702 - RNA, 20 nt, Human
ggcagcccuggagauugcag

SEQ ID NO: 61703 - RNA, 21 nt, Human
uacugucccuuuuaagcaacc

SEQ ID NO: 61704 - RNA, 21 nt, Human
uagcagcuucuuguccagcuu

SEQ ID NO: 61705 - RNA, 19 nt, Human
ugagaauacugucccuuuu

SEQ ID NO: 61706 - RNA, 18 nt, Human
ugaggugggguaggagag

SEQ ID NO: 61707 - RNA, 20 nt, Human
ugccuggaggggggccaggc

SEQ ID NO: 61708 - RNA, 21 nt, Human
ugccuggaggggggccaggca

SEQ ID NO: 61709 - RNA, 23 nt, Human
uucuuguccagcuuuauugggag

SEQ ID NO: 61710 - RNA, 20 nt, Human
accucagccuccugaguagc

SEQ ID NO: 61711 - RNA, 22 nt, Human
agaucucgcuguguugcccagg

SEQ ID NO: 61712 - RNA, 22 nt, Human
aggcacccgccacaaccacacc

SEQ ID NO: 61713 - RNA, 18 nt, Human
aguagcugggacuacagg

SEQ ID NO: 61714 - RNA, 19 nt, Human
aguagcugggacuacaggc

SEQ ID NO: 61715 - RNA, 18 nt, Human
caagagaucucgcugugu

SEQ ID NO: 61716 - RNA, 20 nt, Human
cagccuccugaguagcuggg

SEQ ID NO: 61717 - RNA, 19 nt, Human
caggcacccgccacaacca

SEQ ID NO: 61718 - RNA, 20 nt, Human
caggcacccgccacaaccac

SEQ ID NO: 61719 - RNA, 24 nt, Human
cauccuaccucagccuccugagua

SEQ ID NO: 61720 - RNA, 23 nt, Human
cccgccacaaccacaccuggcuu

SEQ ID NO: 61721 - RNA, 24 nt, Human
ccuaccucagccuccugaguagcu

SEQ ID NO: 61722 - RNA, 20 nt, Human
ccucugucccucugugcuca

SEQ ID NO: 61723 - RNA, 23 nt, Human
ccugaguagcugggacuacaggc

SEQ ID NO: 61724 - RNA, 24 nt, Human
ccugaguagcugggacuacaggca

SEQ ID NO: 61725 - RNA, 20 nt, Human
cgaacuccugggcucaagcc

SEQ ID NO: 61726 - RNA, 24 nt, Human
cgccacaaccacaccuggcuuuua

SEQ ID NO: 61727 - RNA, 24 nt, Human
cucagccuccugaguagcugggac

SEQ ID NO: 61728 - RNA, 22 nt, Human
cuuuuuguuuuacccccaagag

SEQ ID NO: 61729 - RNA, 25 nt, Human
gaguagcugggacuacaggcacccg

SEQ ID NO: 61730 - RNA, 24 nt, Human
gcuguguugcccaggcuggucucg

SEQ ID NO: 61731 - RNA, 24 nt, Human
uaccucagccuccugaguagcugg

SEQ ID NO: 61732 - RNA, 23 nt, Human
ucagccuccugaguagcugggac

SEQ ID NO: 61733 - RNA, 18 nt, Human
uccgugccucugucccuc

SEQ ID NO: 61734 - RNA, 24 nt, Human
uccugaguagcugggacuacaggc

SEQ ID NO: 61735 - RNA, 18 nt, Human
uccugggcucaagccauc

SEQ ID NO: 61736 - RNA, 18 nt, Human
uccugggcucaagccauc

SEQ ID NO: 61737 - RNA, 23 nt, Human
ucucgaacuccugggcucaagcc

SEQ ID NO: 61738 - RNA, 19 nt, Human
ucucgcuguguugcccagg

SEQ ID NO: 61739 - RNA, 23 nt, Human
ucucgcuguguugcccaggcugg

SEQ ID NO: 61740 - RNA, 24 nt, Human
ucucgcuguguugcccaggcuggu

SEQ ID NO: 61741 - RNA, 26 nt, Human
ucucgcuguguugcccaggcuggucu

SEQ ID NO: 61742 - RNA, 27 nt, Human
ucucgcuguguugcccaggcuggucuc

SEQ ID NO: 61743 - RNA, 24 nt, Human
ugcccaggcuggucucgaacuccu

SEQ ID NO: 61744 - RNA, 28 nt, Human
ugcccaggcuggucucgaacuccugggc

SEQ ID NO: 61745 - RNA, 21 nt, Human
ugggacuacaggcacccgcca

SEQ ID NO: 61746 - RNA, 22 nt, Human
ugggacuacaggcacccgccac

SEQ ID NO: 61747 - RNA, 27 nt, Human
ugggacuacaggcacccgccacaacca

SEQ ID NO: 61748 - RNA, 24 nt, Human
uguguugcccaggcuggucucgaa

SEQ ID NO: 61749 - RNA, 19 nt, Human
uguugcccaggcuggucuc

SEQ ID NO: 61750 - RNA, 19 nt, Human
uguugcccaggcuggucuc

SEQ ID NO: 61751 - RNA, 22 nt, Human
uguugcccaggcuggucucgaa

SEQ ID NO: 61752 - RNA, 20 nt, Human
uuuucuuuuuguuuuacccc

SEQ ID NO: 61753 - RNA, 21 nt, Human
uuuuuuuuuucuuuuuguuuu

SEQ ID NO: 61754 - RNA, 18 nt, Human
accuggagcuuuucuuuc

SEQ ID NO: 61755 - RNA, 18 nt, Human
caacuuccuuugucgugg

SEQ ID NO: 61756 - RNA, 23 nt, Human
cuuggggcuggguggcuggagaa

SEQ ID NO: 61757 - RNA, 20 nt, Human
gcuggguggcuggagaaggg

SEQ ID NO: 61758 - RNA, 22 nt, Human
ggcuggagaagggaccuggagc

SEQ ID NO: 61759 - RNA, 21 nt, Human
uagggcaugguuacauguuua

SEQ ID NO: 61760 - RNA, 20 nt, Human
uggcuggagaagggaccugg

SEQ ID NO: 61761 - RNA, 21 nt, Human
ugggggggggugggguagggg

SEQ ID NO: 61762 - RNA, 26 nt, Human
ugggggggggugggguaggggaaagc

SEQ ID NO: 61763 - RNA, 23 nt, Human
ugucgugguugauugguuugucu

SEQ ID NO: 61764 - RNA, 19 nt, Human
uuggggcuggguggcugga

SEQ ID NO: 61765 - RNA, 20 nt, Human
uuugucuuuauggggggggg

SEQ ID NO: 61766 - RNA, 21 nt, Human
aggguccaccccaggaggacg

SEQ ID NO: 61767 - RNA, 23 nt, Human
aggguccaccccaggaggacggc

SEQ ID NO: 61768 - RNA, 22 nt, Human
cgcugcaggcugcgcggaggca

SEQ ID NO: 61769 - RNA, 25 nt, Human
cucccgcugcaggcugcgcggaggc

SEQ ID NO: 61770 - RNA, 19 nt, Human
gaggcacgggguggcgugg

SEQ ID NO: 61771 - RNA, 22 nt, Human
ggaggcacgggguggcgugggg

SEQ ID NO: 61772 - RNA, 18 nt, Human
ggcguggggucgcauggc

SEQ ID NO: 61773 - RNA, 23 nt, Human
ggcuggggcggggacagggucuc

SEQ ID NO: 61774 - RNA, 23 nt, Human
gggguggcguggggucgcauggc

SEQ ID NO: 61775 - RNA, 24 nt, Human
uccaccccaggaggacggcugggg

SEQ ID NO: 61776 - RNA, 24 nt, Human
ucccgcugcaggcugcgcggaggc

SEQ ID NO: 61777 - RNA, 21 nt, Human
ugagucacacuggcacuacca

SEQ ID NO: 61778 - RNA, 21 nt, Human
uggaugaacaagaaacaagug

SEQ ID NO: 61779 - RNA, 18 nt, Human
uguggaugagucacacug

SEQ ID NO: 61780 - RNA, 22 nt, Human
uuuugcggcaauaaauucagua

SEQ ID NO: 61781 - RNA, 18 nt, Human
aaaauuagcugggcaugg

SEQ ID NO: 61782 - RNA, 19 nt, Human
aaagugcucggauuacagg

SEQ ID NO: 61783 - RNA, 24 nt, Human
aaagugcucggauuacaggcauga

SEQ ID NO: 61784 - RNA, 19 nt, Human
aacauggugaaaccccauc

SEQ ID NO: 61785 - RNA, 20 nt, Human
aacauggugaaaccccaucu

SEQ ID NO: 61786 - RNA, 21 nt, Human
aacauggugaaaccccaucuc

SEQ ID NO: 61787 - RNA, 21 nt, Human
aacauggugaaaccccaucuc

SEQ ID NO: 61788 - RNA, 23 nt, Human
aacugcuucuucccauuccccac

SEQ ID NO: 61789 - RNA, 21 nt, Human
aagacagcucuagagaucuga

SEQ ID NO: 61790 - RNA, 22 nt, Human
aagcgauggcucacgccuguaa

SEQ ID NO: 61791 - RNA, 20 nt, Human
aagucccuaacacucaguuc

SEQ ID NO: 61792 - RNA, 24 nt, Human
aaucgcuugaacacgggaggcaga

SEQ ID NO: 61793 - RNA, 24 nt, Human
acagagcaagacucugucucagaa

SEQ ID NO: 61794 - RNA, 23 nt, Human
accaccugcccuucaguguucaa

SEQ ID NO: 61795 - RNA, 19 nt, Human
acccaggcuggagugcagu

SEQ ID NO: 61796 - RNA, 24 nt, Human
accccaucucuauuaaaaauacaa

SEQ ID NO: 61797 - RNA, 25 nt, Human
accucccagguucacgccauucucc

SEQ ID NO: 61798 - RNA, 24 nt, Human
accucgugauccgcccgccuuggc

SEQ ID NO: 61799 - RNA, 18 nt, Human
acgggguuucacuguguu

SEQ ID NO: 61800 - RNA, 19 nt, Human
acgggguuucacuguguua

SEQ ID NO: 61801 - RNA, 20 nt, Human
acgggguuucacuguguuag

SEQ ID NO: 61802 - RNA, 24 nt, Human
acgggguuucacuguguuagccag

SEQ ID NO: 61803 - RNA, 21 nt, Human
acuacacccggccccccaaua

SEQ ID NO: 61804 - RNA, 20 nt, Human
acugcaagcuccaccuccca

SEQ ID NO: 61805 - RNA, 18 nt, Human
agagaucugagcuuccuc

SEQ ID NO: 61806 - RNA, 18 nt, Human
agagcuugcagugagcug

SEQ ID NO: 61807 - RNA, 24 nt, Human
agagcuugcagugagcugagaucg

SEQ ID NO: 61808 - RNA, 24 nt, Human
agcacuuugggaggccaagguggg

SEQ ID NO: 61809 - RNA, 23 nt, Human
agcugggcauggugguaggcgcc

SEQ ID NO: 61810 - RNA, 20 nt, Human
aggcagagcuugcagugagc

SEQ ID NO: 61811 - RNA, 24 nt, Human
aggcagagcuugcagugagcugag

SEQ ID NO: 61812 - RNA, 21 nt, Human
aggcaggagaaucgcuugaac

SEQ ID NO: 61813 - RNA, 24 nt, Human
aggcaggagaaucgcuugaacacg

SEQ ID NO: 61814 - RNA, 18 nt, Human
aggccaaggugggcagau

SEQ ID NO: 61815 - RNA, 25 nt, Human
aggcuggagugcaguggcgauaucu

SEQ ID NO: 61816 - RNA, 24 nt, Human
aggugggcagaucaagaggucagg

SEQ ID NO: 61817 - RNA, 23 nt, Human
agugcaguggcgauaucucggcu

SEQ ID NO: 61818 - RNA, 24 nt, Human
agugcaguggcgauaucucggcuc

SEQ ID NO: 61819 - RNA, 21 nt, Human
aguggagccgcuguuucuucu

SEQ ID NO: 61820 - RNA, 22 nt, Human
aucccagcacuuugggaggcca

SEQ ID NO: 61821 - RNA, 19 nt, Human
auccgcccgccuuggccuc

SEQ ID NO: 61822 - RNA, 21 nt, Human
auccuggccaacauggugaaa

SEQ ID NO: 61823 - RNA, 24 nt, Human
aucgcaccauugcacuccaacuug

SEQ ID NO: 61824 - RNA, 20 nt, Human
aucugcauuaaccccucccc

SEQ ID NO: 61825 - RNA, 21 nt, Human
augaguaggugaguuuauugg

SEQ ID NO: 61826 - RNA, 23 nt, Human
auggcucacgccuguaaucccag

SEQ ID NO: 61827 - RNA, 23 nt, Human
auguuccugccuucuccuugcug

SEQ ID NO: 61828 - RNA, 23 nt, Human
auugcacuccaacuuggcgacag

SEQ ID NO: 61829 - RNA, 24 nt, Human
caaagugcucggauuacaggcaug

SEQ ID NO: 61830 - RNA, 24 nt, Human
caacauggugaaaccccaucucua

SEQ ID NO: 61831 - RNA, 22 nt, Human
caagacagcucuagagaucuga

SEQ ID NO: 61832 - RNA, 23 nt, Human
caagacucugucucagaaaaaaa

SEQ ID NO: 61833 - RNA, 23 nt, Human
caaggcaggagaaucgcuugaac

SEQ ID NO: 61834 - RNA, 22 nt, Human
caaggugggcagaucaagaggu

SEQ ID NO: 61835 - RNA, 24 nt, Human
caaggugggcagaucaagagguca

SEQ ID NO: 61836 - RNA, 19 nt, Human
cacacaggucaauccuggg

SEQ ID NO: 61837 - RNA, 24 nt, Human
caccauugcacuccaacuuggcga

SEQ ID NO: 61838 - RNA, 24 nt, Human
cacccaggcuggagugcaguggcg

SEQ ID NO: 61839 - RNA, 22 nt, Human
cacgccauucuccugccucagc

SEQ ID NO: 61840 - RNA, 24 nt, Human
cacgccuguaaucccagcacuuug

SEQ ID NO: 61841 - RNA, 22 nt, Human
cacuccaacuuggcgacagagc

SEQ ID NO: 61842 - RNA, 21 nt, Human
cacugcaagcuccaccuccca

SEQ ID NO: 61843 - RNA, 18 nt, Human
cacuguguuagccaggau

SEQ ID NO: 61844 - RNA, 19 nt, Human
cacuguguuagccaggaug

SEQ ID NO: 61845 - RNA, 24 nt, Human
cacuguguuagccaggauggucuc

SEQ ID NO: 61846 - RNA, 24 nt, Human
cagcacuuugggaggccaaggugg

SEQ ID NO: 61847 - RNA, 23 nt, Human
caguccccaagauauaccgagga

SEQ ID NO: 61848 - RNA, 21 nt, Human
caugacaaccaccccaaugac

SEQ ID NO: 61849 - RNA, 22 nt, Human
caugacaaccaccccaaugacc

SEQ ID NO: 61850 - RNA, 23 nt, Human
caugacaaccaccccaaugacca

SEQ ID NO: 61851 - RNA, 22 nt, Human
cauggugguaggcgccuguagu

SEQ ID NO: 61852 - RNA, 18 nt, Human
cauugcacuccaacuugg

SEQ ID NO: 61853 - RNA, 21 nt, Human
cauugcacuccaacuuggcga

SEQ ID NO: 61854 - RNA, 23 nt, Human
cauugcacuccaacuuggcgaca

SEQ ID NO: 61855 - RNA, 19 nt, Human
ccaaagugcucggauuaca

SEQ ID NO: 61856 - RNA, 24 nt, Human
ccaaagugcucggauuacaggcau

SEQ ID NO: 61857 - RNA, 21 nt, Human
ccaggcauaucucuccuggug

SEQ ID NO: 61858 - RNA, 19 nt, Human
ccauugcacuccaacuugg

SEQ ID NO: 61859 - RNA, 22 nt, Human
ccauugcacuccaacuuggcga

SEQ ID NO: 61860 - RNA, 23 nt, Human
ccauugcacuccaacuuggcgac

SEQ ID NO: 61861 - RNA, 20 nt, Human
cccaaugcuaaacugcuuuc

SEQ ID NO: 61862 - RNA, 20 nt, Human
cccagguucacgccauucuc

SEQ ID NO: 61863 - RNA, 21 nt, Human
ccccaagauauaccgaggaau

SEQ ID NO: 61864 - RNA, 24 nt, Human
ccccaaugaccaucaucaggaagc

SEQ ID NO: 61865 - RNA, 19 nt, Human
cccccaggaggacaaggga

SEQ ID NO: 61866 - RNA, 22 nt, Human
ccccugccaggcauaucucucc

SEQ ID NO: 61867 - RNA, 22 nt, Human
cccgccuuggccucccaaagug

SEQ ID NO: 61868 - RNA, 24 nt, Human
ccgcccaguuagcuggaacuacag

SEQ ID NO: 61869 - RNA, 18 nt, Human
ccucacccucuuuauccc

SEQ ID NO: 61870 - RNA, 19 nt, Human
ccugcugugcucagcuaug

SEQ ID NO: 61871 - RNA, 22 nt, Human
ccuggccaacauggugaaaccc

SEQ ID NO: 61872 - RNA, 23 nt, Human
ccuggccaacauggugaaacccc

SEQ ID NO: 61873 - RNA, 24 nt, Human
ccuggccaacauggugaaacccca

SEQ ID NO: 61874 - RNA, 20 nt, Human
ccugguggcugcccugcccu

SEQ ID NO: 61875 - RNA, 22 nt, Human
ccuguaaucccagcacuuuggg

SEQ ID NO: 61876 - RNA, 18 nt, Human
ccuguagucccagcuacu

SEQ ID NO: 61877 - RNA, 21 nt, Human
ccuguagucccagcuacuugg

SEQ ID NO: 61878 - RNA, 24 nt, Human
cgagaccauccuggccaacauggu

SEQ ID NO: 61879 - RNA, 23 nt, Human
cgccuguaaucccagcacuuugg

SEQ ID NO: 61880 - RNA, 24 nt, Human
cgccuguagucccagcuacuuggg

SEQ ID NO: 61881 - RNA, 24 nt, Human
cgcucugucacccaggcuggagug

SEQ ID NO: 61882 - RNA, 20 nt, Human
cggauuacaggcaugagcca

SEQ ID NO: 61883 - RNA, 23 nt, Human
cggauuacaggcaugagccacua

SEQ ID NO: 61884 - RNA, 20 nt, Human
cggccccccaauauauucuu

SEQ ID NO: 61885 - RNA, 22 nt, Human
cggcgacaagacagcucuagag

SEQ ID NO: 61886 - RNA, 21 nt, Human
cgggaggcagagcuugcagug

SEQ ID NO: 61887 - RNA, 24 nt, Human
cgggguuucacuguguuagccagg

SEQ ID NO: 61888 - RNA, 22 nt, Human
cucacgccuguaaucccagcac

SEQ ID NO: 61889 - RNA, 24 nt, Human
cucacgccuguaaucccagcacuu

SEQ ID NO: 61890 - RNA, 24 nt, Human
cucacugcaagcuccaccucccag

SEQ ID NO: 61891 - RNA, 19 nt, Human
cuccauuuucagcucuuuc

SEQ ID NO: 61892 - RNA, 24 nt, Human
cuccugaccucgugauccgcccgc

SEQ ID NO: 61893 - RNA, 21 nt, Human
cucgcucugucacccaggcug

SEQ ID NO: 61894 - RNA, 24 nt, Human
cucgcucugucacccaggcuggag

SEQ ID NO: 61895 - RNA, 20 nt, Human
cucggauuacaggcaugagc

SEQ ID NO: 61896 - RNA, 20 nt, Human
cucuauuaaaaauacaaaaa

SEQ ID NO: 61897 - RNA, 20 nt, Human
cucuuuaucccccuaauaaa

SEQ ID NO: 61898 - RNA, 24 nt, Human
cugcaagcuccaccucccagguuc

SEQ ID NO: 61899 - RNA, 23 nt, Human
cuggccaacauggugaaacccca

SEQ ID NO: 61900 - RNA, 19 nt, Human
cuugcagugagcugagauc

SEQ ID NO: 61901 - RNA, 21 nt, Human
cuugcagugagcugagaucgc

SEQ ID NO: 61902 - RNA, 21 nt, Human
cuuggcgacagagcaagacuc

SEQ ID NO: 61903 - RNA, 23 nt, Human
cuuuuuuuuuuuuuuuuugagau

SEQ ID NO: 61904 - RNA, 19 nt, Human
gacaaccaccccaaugacc

SEQ ID NO: 61905 - RNA, 24 nt, Human
gacaagggagaguggaugcuggaa

SEQ ID NO: 61906 - RNA, 24 nt, Human
gacagagcaagacucugucucaga

SEQ ID NO: 61907 - RNA, 19 nt, Human
gacauugaaccuggggcug

SEQ ID NO: 61908 - RNA, 21 nt, Human
gaccauggccauggcccacca

SEQ ID NO: 61909 - RNA, 20 nt, Human
gaccucgugauccgcccgcc

SEQ ID NO: 61910 - RNA, 21 nt, Human
gaccucgugauccgcccgccu

SEQ ID NO: 61911 - RNA, 24 nt, Human
gaccucgugauccgcccgccuugg

SEQ ID NO: 61912 - RNA, 18 nt, Human
gacucugucucagaaaaa

SEQ ID NO: 61913 - RNA, 23 nt, Human
gagaaucgcuugaacacgggagg

SEQ ID NO: 61914 - RNA, 23 nt, Human
gagccacuacacccggcccccca

SEQ ID NO: 61915 - RNA, 19 nt, Human
gagccgcuguuucuucucc

SEQ ID NO: 61916 - RNA, 22 nt, Human
gaggcagagcuugcagugagcu

SEQ ID NO: 61917 - RNA, 18 nt, Human
gauuacaggcaugagcca

SEQ ID NO: 61918 - RNA, 21 nt, Human
gauuacaggcaugagccacua

SEQ ID NO: 61919 - RNA, 22 nt, Human
gauuacaggcaugagccacuac

SEQ ID NO: 61920 - RNA, 22 nt, Human
gcaagcuccaccucccagguuc

SEQ ID NO: 61921 - RNA, 20 nt, Human
gcacuuugggaggccaaggu

SEQ ID NO: 61922 - RNA, 20 nt, Human
gcagggccuccuccaaggaa

SEQ ID NO: 61923 - RNA, 24 nt, Human
gccaacauggugaaaccccaucuc

SEQ ID NO: 61924 - RNA, 20 nt, Human
gcccccaggaggacaaggga

SEQ ID NO: 61925 - RNA, 23 nt, Human
gcccggcuaauuuuuuguauuuu

SEQ ID NO: 61926 - RNA, 19 nt, Human
gcucuagagaucugagcuu

SEQ ID NO: 61927 - RNA, 25 nt, Human
gcucugucacccaggcuggagugca

SEQ ID NO: 61928 - RNA, 20 nt, Human
gcuggagugcaguggcgaua

SEQ ID NO: 61929 - RNA, 24 nt, Human
ggauggucucgaucuccugaccuc

SEQ ID NO: 61930 - RNA, 19 nt, Human
ggauuacaggcaugagcca

SEQ ID NO: 61931 - RNA, 20 nt, Human
ggauuacaggcaugagccac

SEQ ID NO: 61932 - RNA, 24 nt, Human
ggauuacaggcaugagccacuaca

SEQ ID NO: 61933 - RNA, 21 nt, Human
ggcagaucaagaggucaggag

SEQ ID NO: 61934 - RNA, 22 nt, Human
ggcauggugguaggcgccugua

SEQ ID NO: 61935 - RNA, 21 nt, Human
ggccccugccaggcauaucuc

SEQ ID NO: 61936 - RNA, 22 nt, Human
ggcgacaagacagcucuagaga

SEQ ID NO: 61937 - RNA, 21 nt, Human
ggcucacgccuguaaucccag

SEQ ID NO: 61938 - RNA, 21 nt, Human
gggaaguuuggguucucaggg

SEQ ID NO: 61939 - RNA, 23 nt, Human
gggacaugcacccuuuaguaacc

SEQ ID NO: 61940 - RNA, 24 nt, Human
gggcugggucuguaguggagccgc

SEQ ID NO: 61941 - RNA, 23 nt, Human
gggguuucacuguguuagccagg

SEQ ID NO: 61942 - RNA, 23 nt, Human
guagagacgggguuucacugugu

SEQ ID NO: 61943 - RNA, 19 nt, Human
gucaaaagcgauggcucac

SEQ ID NO: 61944 - RNA, 22 nt, Human
gucccagcuacuugggaggcca

SEQ ID NO: 61945 - RNA, 23 nt, Human
gugguaggcgccuguagucccag

SEQ ID NO: 61946 - RNA, 19 nt, Human
uaaccagacagguccucca

SEQ ID NO: 61947 - RNA, 27 nt, Human
uaaccagacagguccuccaguccccaa

SEQ ID NO: 61948 - RNA, 24 nt, Human
uaauaaccagacagguccuccagu

SEQ ID NO: 61949 - RNA, 24 nt, Human
uaauuuuuuguauuuuuaguagag

SEQ ID NO: 61950 - RNA, 25 nt, Human
uaauuuuuuguauuuuuaguagaga

SEQ ID NO: 61951 - RNA, 23 nt, Human
uacaggcaugagccacuacaccc

SEQ ID NO: 61952 - RNA, 20 nt, Human
uagcuggaacuacaggcgcc

SEQ ID NO: 61953 - RNA, 18 nt, Human
uaguaaccuggaggggac

SEQ ID NO: 61954 - RNA, 20 nt, Human
uaguagagacgggguuucac

SEQ ID NO: 61955 - RNA, 24 nt, Human
uaguagagacgggguuucacugug

SEQ ID NO: 61956 - RNA, 24 nt, Human
ucaagaggucaggagaucgagacc

SEQ ID NO: 61957 - RNA, 25 nt, Human
ucaagaggucaggagaucgagaccc

SEQ ID NO: 61958 - RNA, 22 nt, Human
ucacccaggcuggagugcagug

SEQ ID NO: 61959 - RNA, 19 nt, Human
ucacugcaagcuccaccuc

SEQ ID NO: 61960 - RNA, 24 nt, Human
ucacugcaagcuccaccucccagg

SEQ ID NO: 61961 - RNA, 24 nt, Human
ucacuguguuagccaggauggucu

SEQ ID NO: 61962 - RNA, 19 nt, Human
uccaaggaaucuuccccug

SEQ ID NO: 61963 - RNA, 24 nt, Human
ucccaaagugcucggauuacaggc

SEQ ID NO: 61964 - RNA, 19 nt, Human
ucccagguucacgccauuc

SEQ ID NO: 61965 - RNA, 20 nt, Human
ucccagguucacgccauucu

SEQ ID NO: 61966 - RNA, 21 nt, Human
ucccagguucacgccauucuc

SEQ ID NO: 61967 - RNA, 24 nt, Human
ucccagguucacgccauucuccug

SEQ ID NO: 61968 - RNA, 22 nt, Human
ucccauuccccacacucuccag

SEQ ID NO: 61969 - RNA, 22 nt, Human
uccccacacucuccaguuccca

SEQ ID NO: 61970 - RNA, 18 nt, Human
uccccuggcagagacuga

SEQ ID NO: 61971 - RNA, 20 nt, Human
uccucucuauucuuccguca

SEQ ID NO: 61972 - RNA, 23 nt, Human
ucgcaccauugcacuccaacuug

SEQ ID NO: 61973 - RNA, 24 nt, Human
ucgcucugucacccaggcuggagu

SEQ ID NO: 61974 - RNA, 18 nt, Human
ucggauuacaggcaugag

SEQ ID NO: 61975 - RNA, 22 nt, Human
ucggauuacaggcaugagccac

SEQ ID NO: 61976 - RNA, 24 nt, Human
ucggauuacaggcaugagccacua

SEQ ID NO: 61977 - RNA, 22 nt, Human
ucucacauacucucugggaagu

SEQ ID NO: 61978 - RNA, 19 nt, Human
ucucagaaaaaaaaaaaag

SEQ ID NO: 61979 - RNA, 19 nt, Human
ucucgcucugucacccagg

SEQ ID NO: 61980 - RNA, 23 nt, Human
ucucgcucugucacccaggcugg

SEQ ID NO: 61981 - RNA, 24 nt, Human
ucucgcucugucacccaggcugga

SEQ ID NO: 61982 - RNA, 26 nt, Human
ucucgcucugucacccaggcuggagu

SEQ ID NO: 61983 - RNA, 27 nt, Human
ucucgcucugucacccaggcuggagug

SEQ ID NO: 61984 - RNA, 23 nt, Human
ucucuauuaaaaauacaaaaauu

SEQ ID NO: 61985 - RNA, 24 nt, Human
ucugucacccaggcuggagugcag

SEQ ID NO: 61986 - RNA, 22 nt, Human
ucugucucagaaaaaaaaaaaa

SEQ ID NO: 61987 - RNA, 20 nt, Human
ucuuucuuuuccuggccuuc

SEQ ID NO: 61988 - RNA, 18 nt, Human
ucuuuuuuuuuuuuuuuu

SEQ ID NO: 61989 - RNA, 22 nt, Human
ugacaaccaccccaaugaccau

SEQ ID NO: 61990 - RNA, 22 nt, Human
ugagauggagucucgcucuguc

SEQ ID NO: 61991 - RNA, 22 nt, Human
ugagcugagaucgcaccauugc

SEQ ID NO: 61992 - RNA, 23 nt, Human
ugaugaguaggugaguuuauugg

SEQ ID NO: 61993 - RNA, 19 nt, Human
ugcaagcuccaccucccag

SEQ ID NO: 61994 - RNA, 21 nt, Human
ugcacuccaacuuggcgacag

SEQ ID NO: 61995 - RNA, 23 nt, Human
ugcacuccaacuuggcgacagag

SEQ ID NO: 61996 - RNA, 23 nt, Human
ugcacugccaucugcauuaaccc

SEQ ID NO: 61997 - RNA, 24 nt, Human
ugcacugccaucugcauuaacccu

SEQ ID NO: 61998 - RNA, 22 nt, Human
ugcaguggcgauaucucggcuc

SEQ ID NO: 61999 - RNA, 21 nt, Human
ugccaaagucccuaacacuca

SEQ ID NO: 62000 - RNA, 25 nt, Human
ugcccggcuaauuuuuuguauuuuu

SEQ ID NO: 62001 - RNA, 21 nt, Human
ugccucagccgcccaguuagc

SEQ ID NO: 62002 - RNA, 24 nt, Human
ugccucagccgcccaguuagcugg

SEQ ID NO: 62003 - RNA, 21 nt, Human
uggaacuacaggcgcccgcca

SEQ ID NO: 62004 - RNA, 24 nt, Human
uggaacuacaggcgcccgccacca

SEQ ID NO: 62005 - RNA, 20 nt, Human
uggagugcaguggcgauauc

SEQ ID NO: 62006 - RNA, 23 nt, Human
uggagugcaguggcgauaucucg

SEQ ID NO: 62007 - RNA, 24 nt, Human
uggagugcaguggcgauaucucgg

SEQ ID NO: 62008 - RNA, 22 nt, Human
uggaucccaccuccaguuaugc

SEQ ID NO: 62009 - RNA, 24 nt, Human
uggccaacauggugaaaccccauc

SEQ ID NO: 62010 - RNA, 24 nt, Human
uggcucacgccuguaaucccagca

SEQ ID NO: 62011 - RNA, 20 nt, Human
ugggaggccaaggugggcag

SEQ ID NO: 62012 - RNA, 24 nt, Human
ugggaggccaaggugggcagauca

SEQ ID NO: 62013 - RNA, 22 nt, Human
ugggcagaucaagaggucagga

SEQ ID NO: 62014 - RNA, 24 nt, Human
uggugguaggcgccuguaguccca

SEQ ID NO: 62015 - RNA, 21 nt, Human
uguauuuuuaguagagacggg

SEQ ID NO: 62016 - RNA, 20 nt, Human
uguggaucccaccuccaguu

SEQ ID NO: 62017 - RNA, 18 nt, Human
uuagcugggcaugguggu

SEQ ID NO: 62018 - RNA, 24 nt, Human
uuagcugggcauggugguaggcgc

SEQ ID NO: 62019 - RNA, 18 nt, Human
uuaguagagacgggguuu

SEQ ID NO: 62020 - RNA, 21 nt, Human
uuaguagagacgggguuucac

SEQ ID NO: 62021 - RNA, 21 nt, Human
uuaguagagacgggguuucac

SEQ ID NO: 62022 - RNA, 24 nt, Human
uuaguagagacgggguuucacugu

SEQ ID NO: 62023 - RNA, 21 nt, Human
uucacuguguuagccaggaug

SEQ ID NO: 62024 - RNA, 21 nt, Human
uugcaggcuccaauguuccug

SEQ ID NO: 62025 - RNA, 18 nt, Human
uugcagugagcugagauc

SEQ ID NO: 62026 - RNA, 19 nt, Human
uugcagugagcugagaucg

SEQ ID NO: 62027 - RNA, 22 nt, Human
uugcagugagcugagaucgcac

SEQ ID NO: 62028 - RNA, 19 nt, Human
uuucacuguguuagccagg

SEQ ID NO: 62029 - RNA, 19 nt, Human
uuuccuggccuucucauug

SEQ ID NO: 62030 - RNA, 24 nt, Human
uuuuuaguagagacgggguuucac

SEQ ID NO: 62031 - RNA, 21 nt, Human
uuuuuguauuuuuaguagaga

SEQ ID NO: 62032 - RNA, 24 nt, Human
uuuuuuguauuuuuaguagagacg

SEQ ID NO: 62033 - RNA, 25 nt, Human
uuuuuuuuuuuugagauggagucuc

SEQ ID NO: 62034 - RNA, 22 nt, Human
uuuuuuuuuuuuuugagaugga

SEQ ID NO: 62035 - RNA, 18 nt, Human
uuuuuuuuuuuuuuuuug

SEQ ID NO: 62036 - RNA, 25 nt, Human
aaaaaaagaaaagcuugaagucuca

SEQ ID NO: 62037 - RNA, 24 nt, Human
aaaaaagaaaagcuugaagucuca

SEQ ID NO: 62038 - RNA, 24 nt, Human
aagcaucugaaauacuuaaaaaug

SEQ ID NO: 62039 - RNA, 18 nt, Human
aaucugccucuucucccc

SEQ ID NO: 62040 - RNA, 21 nt, Human
agaaaagucuugcccgggguu

SEQ ID NO: 62041 - RNA, 24 nt, Human
agaccagcagagcaccccucccca

SEQ ID NO: 62042 - RNA, 18 nt, Human
agagcaccccuccccacc

SEQ ID NO: 62043 - RNA, 25 nt, Human
agcaaucuguacaguaaaaugcagu

SEQ ID NO: 62044 - RNA, 19 nt, Human
agcacagcugucaaaaggc

SEQ ID NO: 62045 - RNA, 21 nt, Human
agcaccccuccccacccgccc

SEQ ID NO: 62046 - RNA, 21 nt, Human
auaagcaaugauucuguacaa

SEQ ID NO: 62047 - RNA, 22 nt, Human
auagugaucaggaaaggaauac

SEQ ID NO: 62048 - RNA, 28 nt, Human
augaagcaucccccaucgauucuuaaag

SEQ ID NO: 62049 - RNA, 26 nt, Human
auugaaucugccucuucuccccaccc

SEQ ID NO: 62050 - RNA, 24 nt, Human
caccgauggguagugaagcaaugg

SEQ ID NO: 62051 - RNA, 23 nt, Human
cagagcaccccuccccacccgcc

SEQ ID NO: 62052 - RNA, 19 nt, Human
cagcagagcaccccucccc

SEQ ID NO: 62053 - RNA, 23 nt, Human
ccacccaaaauuacuucgauuau

SEQ ID NO: 62054 - RNA, 20 nt, Human
ccacuuccauuuucaucuuc

SEQ ID NO: 62055 - RNA, 21 nt, Human
cccccgcgcacgcuccuccgc

SEQ ID NO: 62056 - RNA, 25 nt, Human
ccccgcgcacgcuccuccgcgugcu

SEQ ID NO: 62057 - RNA, 18 nt, Human
cccgcgcacgcuccuccg

SEQ ID NO: 62058 - RNA, 19 nt, Human
cccgcgcacgcuccuccgc

SEQ ID NO: 62059 - RNA, 21 nt, Human
cccgcgccgccaccgccgccg

SEQ ID NO: 62060 - RNA, 22 nt, Human
cccggggcccccgcgcacgcuc

SEQ ID NO: 62061 - RNA, 22 nt, Human
ccgccgcguccuugcucugccc

SEQ ID NO: 62062 - RNA, 24 nt, Human
ccuuauauugccacuuccauuuuc

SEQ ID NO: 62063 - RNA, 22 nt, Human
cgccgccaccgccgccgucucc

SEQ ID NO: 62064 - RNA, 22 nt, Human
cgcugcugugcgagugggaucc

SEQ ID NO: 62065 - RNA, 21 nt, Human
cuccccacccaaaauuacuuc

SEQ ID NO: 62066 - RNA, 19 nt, Human
cuucagaggcugcuguggc

SEQ ID NO: 62067 - RNA, 19 nt, Human
gaagcagcaaucuguacag

SEQ ID NO: 62068 - RNA, 21 nt, Human
gcccgcgccgccaccgccgcc

SEQ ID NO: 62069 - RNA, 23 nt, Human
gccgucucccggggcccccgcgc

SEQ ID NO: 62070 - RNA, 26 nt, Human
gcgccgccaccgccgccgucucccgg

SEQ ID NO: 62071 - RNA, 19 nt, Human
ggcaagagaagcagcugaa

SEQ ID NO: 62072 - RNA, 21 nt, Human
gugugcacauaaaacaggcac

SEQ ID NO: 62073 - RNA, 22 nt, Human
uaaaaugcagucauggaaaaaa

SEQ ID NO: 62074 - RNA, 18 nt, Human
uaauacaguguagaaagc

SEQ ID NO: 62075 - RNA, 24 nt, Human
uacaguaaaaugcagucauggaaa

SEQ ID NO: 62076 - RNA, 21 nt, Human
uacguggacaaaaaaagaaaa

SEQ ID NO: 62077 - RNA, 25 nt, Human
uagucauccuucaaagaaaagucuu

SEQ ID NO: 62078 - RNA, 20 nt, Human
ucacaaauauagcagaagca

SEQ ID NO: 62079 - RNA, 19 nt, Human
ucauccugcagaaaauugu

SEQ ID NO: 62080 - RNA, 26 nt, Human
uccccacccgccccguaaaagugcuu

SEQ ID NO: 62081 - RNA, 22 nt, Human
uccuauaucacaaauauagcag

SEQ ID NO: 62082 - RNA, 19 nt, Human
uccuugcucugcccgcgcc

SEQ ID NO: 62083 - RNA, 19 nt, Human
ucugccucuucuccccacc

SEQ ID NO: 62084 - RNA, 22 nt, Human
ugaagucucaaugccuaaugug

SEQ ID NO: 62085 - RNA, 23 nt, Human
ugcacauaaaacaggcacgaagg

SEQ ID NO: 62086 - RNA, 18 nt, Human
ugcccgcgccgccaccgc

SEQ ID NO: 62087 - RNA, 23 nt, Human
ugcgcugcugugcgagugggauc

SEQ ID NO: 62088 - RNA, 22 nt, Human
ugucauaagcaaugauucugua

SEQ ID NO: 62089 - RNA, 21 nt, Human
ugugcacauaaaacaggcacg

SEQ ID NO: 62090 - RNA, 19 nt, Human
uguuuuggagaauucuugg

SEQ ID NO: 62091 - RNA, 22 nt, Human
uuacaguacacaaaacccauua

SEQ ID NO: 62092 - RNA, 21 nt, Human
uuaucaaagacccaaagauac

SEQ ID NO: 62093 - RNA, 22 nt, Human
uuggagaauucuugguaauuga

SEQ ID NO: 62094 - RNA, 24 nt, Human
uuugauacagcuaaauucuuuaca

SEQ ID NO: 62095 - RNA, 19 nt, Human
acaacccgaaggcaauuac

SEQ ID NO: 62096 - RNA, 20 nt, Human
acagacuaaagcacaacccg

SEQ ID NO: 62097 - RNA, 20 nt, Human
caacccgaaggcaauuacag

SEQ ID NO: 62098 - RNA, 22 nt, Human
cacaacccgaaggcaauuacag

SEQ ID NO: 62099 - RNA, 19 nt, Human
cagacuaaagcacaacccg

SEQ ID NO: 62100 - RNA, 19 nt, Human
gccgccaccagcuccacaa

SEQ ID NO: 62101 - RNA, 21 nt, Human
gcgcggaaaacagccgagccc

SEQ ID NO: 62102 - RNA, 20 nt, Human
gcggaaaacagccgagcccc

SEQ ID NO: 62103 - RNA, 18 nt, Human
ggaaaacagccgagcccc

SEQ ID NO: 62104 - RNA, 20 nt, Human
uuacaguuucaaucauuaac

SEQ ID NO: 62105 - RNA, 19 nt, Human
aaacaucccuacuuaaagg

SEQ ID NO: 62106 - RNA, 20 nt, Human
aacaagguugggaaguucaa

SEQ ID NO: 62107 - RNA, 23 nt, Human
aaccuaacauuuccaucugaaca

SEQ ID NO: 62108 - RNA, 19 nt, Human
aacggugggcacuacaagu

SEQ ID NO: 62109 - RNA, 18 nt, Human
aaggcccccaccucccuc

SEQ ID NO: 62110 - RNA, 27 nt, Human
aaucauaguggcacacaucuaacuuag

SEQ ID NO: 62111 - RNA, 19 nt, Human
aauggaguuagggaggaug

SEQ ID NO: 62112 - RNA, 20 nt, Human
acaagagcgaaacuccgucu

SEQ ID NO: 62113 - RNA, 19 nt, Human
acacaaugaagaaccgucu

SEQ ID NO: 62114 - RNA, 21 nt, Human
acccagaagaaaagcaagcag

SEQ ID NO: 62115 - RNA, 22 nt, Human
acccugugauccuaggcuucua

SEQ ID NO: 62116 - RNA, 22 nt, Human
acugcaguuuucugucugcacu

SEQ ID NO: 62117 - RNA, 24 nt, Human
agacagcuuagauuuuuuuccccu

SEQ ID NO: 62118 - RNA, 18 nt, Human
agacugcaauuaacugag

SEQ ID NO: 62119 - RNA, 23 nt, Human
agccaggcgugguggcaggagcc

SEQ ID NO: 62120 - RNA, 24 nt, Human
agccucugguccaaauaaccaccu

SEQ ID NO: 62121 - RNA, 20 nt, Human
agcuggagauuaauccaaau

SEQ ID NO: 62122 - RNA, 24 nt, Human
aggcaggagaaucgcuggaacccg

SEQ ID NO: 62123 - RNA, 21 nt, Human
aggccaaaagcgucacaaucc

SEQ ID NO: 62124 - RNA, 24 nt, Human
aggcggagguugcagugagccaag

SEQ ID NO: 62125 - RNA, 24 nt, Human
aggcgugguggcaggagccuguaa

SEQ ID NO: 62126 - RNA, 20 nt, Human
aggcugaggcaggagaaucg

SEQ ID NO: 62127 - RNA, 23 nt, Human
aggcugaggcaggagaaucgcug

SEQ ID NO: 62128 - RNA, 19 nt, Human
aguguuuuguuuuuaacug

SEQ ID NO: 62129 - RNA, 21 nt, Human
aguuagggaggaugaggcugu

SEQ ID NO: 62130 - RNA, 20 nt, Human
auaaaguuucagccaaaggc

SEQ ID NO: 62131 - RNA, 22 nt, Human
auccaacacuuaacugugcacc

SEQ ID NO: 62132 - RNA, 19 nt, Human
aucucuuucaguacauccc

SEQ ID NO: 62133 - RNA, 20 nt, Human
augcaggcaugaguggccac

SEQ ID NO: 62134 - RNA, 19 nt, Human
augcuguaugugcacaaaa

SEQ ID NO: 62135 - RNA, 22 nt, Human
auugaaaaacaauuuaccauga

SEQ ID NO: 62136 - RNA, 24 nt, Human
auugcccucccagccugggcaaca

SEQ ID NO: 62137 - RNA, 24 nt, Human
caaaagcgucacaaucccgguucg

SEQ ID NO: 62138 - RNA, 23 nt, Human
caauuuuuaaccaagcagagaca

SEQ ID NO: 62139 - RNA, 19 nt, Human
cacaaaccaaguuuucuag

SEQ ID NO: 62140 - RNA, 25 nt, Human
caccauauguaaaaaguuugcgcaa

SEQ ID NO: 62141 - RNA, 22 nt, Human
cacccagaagaaaagcaagcag

SEQ ID NO: 62142 - RNA, 21 nt, Human
caccucccuccguagcgaacc

SEQ ID NO: 62143 - RNA, 24 nt, Human
cagaauauaucacaaugcugguua

SEQ ID NO: 62144 - RNA, 24 nt, Human
cagcuacucggaaggcugaggcag

SEQ ID NO: 62145 - RNA, 18 nt, Human
caggcaugaguggccacc

SEQ ID NO: 62146 - RNA, 24 nt, Human
caguaaccuaacauuuccaucuga

SEQ ID NO: 62147 - RNA, 22 nt, Human
caucuugcauuguuguaccaaa

SEQ ID NO: 62148 - RNA, 24 nt, Human
cauugcccucccagccugggcaac

SEQ ID NO: 62149 - RNA, 21 nt, Human
ccaaauaaccaccuucuacau

SEQ ID NO: 62150 - RNA, 27 nt, Human
ccacccagaagaaaagcaagcagcaag

SEQ ID NO: 62151 - RNA, 23 nt, Human
ccaccucccuccguagcgaaccc

SEQ ID NO: 62152 - RNA, 19 nt, Human
ccacucaugcuauagauac

SEQ ID NO: 62153 - RNA, 25 nt, Human
ccagccaggccaaaagcgucacaau

SEQ ID NO: 62154 - RNA, 19 nt, Human
ccaggccaaaagcgucaca

SEQ ID NO: 62155 - RNA, 18 nt, Human
cccacagacuacuccaag

SEQ ID NO: 62156 - RNA, 19 nt, Human
cccacagacuacuccaagc

SEQ ID NO: 62157 - RNA, 18 nt, Human
ccccaaaacaacaugguu

SEQ ID NO: 62158 - RNA, 24 nt, Human
ccccaaccaacccccuccuaggga

SEQ ID NO: 62159 - RNA, 18 nt, Human
cccccaccucccuccgua

SEQ ID NO: 62160 - RNA, 23 nt, Human
ccccggaggauucggaggggcgg

SEQ ID NO: 62161 - RNA, 20 nt, Human
cccuccguagcgaaccccuc

SEQ ID NO: 62162 - RNA, 22 nt, Human
cccugccuccuccgggggcaaa

SEQ ID NO: 62163 - RNA, 18 nt, Human
ccgccuccuccucccgaa

SEQ ID NO: 62164 - RNA, 20 nt, Human
ccuccagaaaaaucuuuaag

SEQ ID NO: 62165 - RNA, 21 nt, Human
ccucccgaaggcccccaccuc

SEQ ID NO: 62166 - RNA, 18 nt, Human
ccuccuccgccuccuccu

SEQ ID NO: 62167 - RNA, 21 nt, Human
ccuccugguccuguuagcaaa

SEQ ID NO: 62168 - RNA, 19 nt, Human
ccuguaaucccagcuacuc

SEQ ID NO: 62169 - RNA, 21 nt, Human
ccuguaaucccagcuacucgg

SEQ ID NO: 62170 - RNA, 22 nt, Human
ccuucccuccuccuccgccucc

SEQ ID NO: 62171 - RNA, 23 nt, Human
cgaaggcccccaccucccuccgu

SEQ ID NO: 62172 - RNA, 22 nt, Human
cgcccugccuccuccgggggca

SEQ ID NO: 62173 - RNA, 24 nt, Human
cgcccugccuccuccgggggcaaa

SEQ ID NO: 62174 - RNA, 25 nt, Human
cgccuccuccucccgaaggccccca

SEQ ID NO: 62175 - RNA, 20 nt, Human
cggaaggcugaggcaggaga

SEQ ID NO: 62176 - RNA, 23 nt, Human
cggccgcccugccuccuccgggg

SEQ ID NO: 62177 - RNA, 20 nt, Human
cggcggcagcggacgcaggc

SEQ ID NO: 62178 - RNA, 24 nt, Human
cgggaggcggagguugcagugagc

SEQ ID NO: 62179 - RNA, 21 nt, Human
cggugccauugcccucccagc

SEQ ID NO: 62180 - RNA, 24 nt, Human
cguaaagauuguuaguguuuuguu

SEQ ID NO: 62181 - RNA, 18 nt, Human
cuaaaacauuccugagau

SEQ ID NO: 62182 - RNA, 22 nt, Human
cuaagaucgcagccucuguacu

SEQ ID NO: 62183 - RNA, 18 nt, Human
cuaucagagcaucuugca

SEQ ID NO: 62184 - RNA, 22 nt, Human
cucccgaaggcccccaccuccc

SEQ ID NO: 62185 - RNA, 19 nt, Human
cuccucccgaaggccccca

SEQ ID NO: 62186 - RNA, 18 nt, Human
cugcacuauuaaggagca

SEQ ID NO: 62187 - RNA, 19 nt, Human
cugguccaaauaaccaccu

SEQ ID NO: 62188 - RNA, 18 nt, Human
gaaccagaaauaauagca

SEQ ID NO: 62189 - RNA, 20 nt, Human
gaccaaaggccccuaauuua

SEQ ID NO: 62190 - RNA, 20 nt, Human
gacuugcuuauggcacugcc

SEQ ID NO: 62191 - RNA, 23 nt, Human
gagaaucgcuggaacccgggagg

SEQ ID NO: 62192 - RNA, 21 nt, Human
gagaggaacccggguuccguc

SEQ ID NO: 62193 - RNA, 18 nt, Human
gagguugcagugagccaa

SEQ ID NO: 62194 - RNA, 21 nt, Human
gagguugcagugagccaagac

SEQ ID NO: 62195 - RNA, 22 nt, Human
gaucacccaaaauagggucuuc

SEQ ID NO: 62196 - RNA, 18 nt, Human
gcaauggcucaaaacuaa

SEQ ID NO: 62197 - RNA, 19 nt, Human
gccucuugacauuagacug

SEQ ID NO: 62198 - RNA, 21 nt, Human
gcgaaccccucugcggccccg

SEQ ID NO: 62199 - RNA, 18 nt, Human
ggagguugcagugagcca

SEQ ID NO: 62200 - RNA, 20 nt, Human
ggagguugcagugagccaag

SEQ ID NO: 62201 - RNA, 21 nt, Human
ggcaggagccuguaaucccag

SEQ ID NO: 62202 - RNA, 24 nt, Human
ggggauuuucacguaaagauuguu

SEQ ID NO: 62203 - RNA, 18 nt, Human
gggguggggggcagcuuc

SEQ ID NO: 62204 - RNA, 24 nt, Human
gguggcaggagccuguaaucccag

SEQ ID NO: 62205 - RNA, 22 nt, Human
guagcgaaccccucugcggccc

SEQ ID NO: 62206 - RNA, 19 nt, Human
gugguuguauccacuuauc

SEQ ID NO: 62207 - RNA, 18 nt, Human
uaaagcaaagauaaaacc

SEQ ID NO: 62208 - RNA, 20 nt, Human
uagacugcaauuaacugagg

SEQ ID NO: 62209 - RNA, 18 nt, Human
uaggaaaagacuggguag

SEQ ID NO: 62210 - RNA, 21 nt, Human
uaggaaaugcuguaugugcac

SEQ ID NO: 62211 - RNA, 24 nt, Human
uaugcaauaaauccuaaagcacac

SEQ ID NO: 62212 - RNA, 26 nt, Human
uauuauuuucuucaagauuuuuaaga

SEQ ID NO: 62213 - RNA, 23 nt, Human
uauuguggcacuauuagugggga

SEQ ID NO: 62214 - RNA, 25 nt, Human
ucaacacacauccauucacccacag

SEQ ID NO: 62215 - RNA, 21 nt, Human
ucaaucauguuuuggcaugug

SEQ ID NO: 62216 - RNA, 23 nt, Human
ucacaagugaaaaaauaccuggg

SEQ ID NO: 62217 - RNA, 22 nt, Human
ucacccacagacuacuccaagc

SEQ ID NO: 62218 - RNA, 20 nt, Human
ucagagaaggaugagaccaa

SEQ ID NO: 62219 - RNA, 23 nt, Human
ucaguacaucccccaaccaaccc

SEQ ID NO: 62220 - RNA, 25 nt, Human
uccaaaauuuaaaaagaaaauaauu

SEQ ID NO: 62221 - RNA, 19 nt, Human
uccaaauaaccaccuucua

SEQ ID NO: 62222 - RNA, 21 nt, Human
uccauaaaccauacaguaacc

SEQ ID NO: 62223 - RNA, 23 nt, Human
uccauucacccacagacuacucc

SEQ ID NO: 62224 - RNA, 19 nt, Human
ucccccaaccaacccccuc

SEQ ID NO: 62225 - RNA, 19 nt, Human
ucccuccguagcgaacccc

SEQ ID NO: 62226 - RNA, 18 nt, Human
ucccucuuuuauuaguac

SEQ ID NO: 62227 - RNA, 19 nt, Human
ucccuggaauccgggaaaa

SEQ ID NO: 62228 - RNA, 24 nt, Human
uccgccuccuccucccgaaggccc

SEQ ID NO: 62229 - RNA, 22 nt, Human
uccgucugaaaaaaaaaaaaaa

SEQ ID NO: 62230 - RNA, 19 nt, Human
uccuuacgcaccucaccau

SEQ ID NO: 62231 - RNA, 24 nt, Human
ucgcuggaacccgggaggcggagg

SEQ ID NO: 62232 - RNA, 24 nt, Human
ucggaaggcugaggcaggagaauc

SEQ ID NO: 62233 - RNA, 18 nt, Human
ucuaagacuuauuuuugg

SEQ ID NO: 62234 - RNA, 23 nt, Human
ugaaguacacauccacuucuaaa

SEQ ID NO: 62235 - RNA, 22 nt, Human
ugacacaaugaagaaccgucuu

SEQ ID NO: 62236 - RNA, 19 nt, Human
ugacauuagacugcaauua

SEQ ID NO: 62237 - RNA, 24 nt, Human
ugagaaugauaugaaaggucaucc

SEQ ID NO: 62238 - RNA, 20 nt, Human
ugaggaguaaacucagguuu

SEQ ID NO: 62239 - RNA, 19 nt, Human
ugaggcaggagaaucgcug

SEQ ID NO: 62240 - RNA, 24 nt, Human
ugaggcaggagaaucgcuggaacc

SEQ ID NO: 62241 - RNA, 25 nt, Human
ugaggcaggagaaucgcuggaaccc

SEQ ID NO: 62242 - RNA, 18 nt, Human
ugcaccacaaaccaaguu

SEQ ID NO: 62243 - RNA, 24 nt, Human
uggaacccgggaggcggagguugc

SEQ ID NO: 62244 - RNA, 22 nt, Human
uggaaugcaggcaugaguggcc

SEQ ID NO: 62245 - RNA, 22 nt, Human
uggcaggagccuguaaucccag

SEQ ID NO: 62246 - RNA, 18 nt, Human
uggccaccugagcgacac

SEQ ID NO: 62247 - RNA, 20 nt, Human
uggcucaaaacuaauaggac

SEQ ID NO: 62248 - RNA, 29 nt, Human
ugggcacuacaaguuggugagaaugauau

SEQ ID NO: 62249 - RNA, 23 nt, Human
uggguagaagagucagagaagga

SEQ ID NO: 62250 - RNA, 24 nt, Human
uggguagaagagucagagaaggau

SEQ ID NO: 62251 - RNA, 24 nt, Human
ugguggcaggagccuguaauccca

SEQ ID NO: 62252 - RNA, 21 nt, Human
uguuuuaucacugagugugag

SEQ ID NO: 62253 - RNA, 22 nt, Human
uuaggggaucuuuccauuugac

SEQ ID NO: 62254 - RNA, 21 nt, Human
uucaacaaacucacuaaggcc

SEQ ID NO: 62255 - RNA, 22 nt, Human
uucaacaaacucacuaaggcca

SEQ ID NO: 62256 - RNA, 20 nt, Human
uucacaguaugaauucccug

SEQ ID NO: 62257 - RNA, 22 nt, Human
uuccugagauuuauggacaaaa

SEQ ID NO: 62258 - RNA, 19 nt, Human
uucuacauuaggcuggucc

SEQ ID NO: 62259 - RNA, 19 nt, Human
uugaaaaugugggccagac

SEQ ID NO: 62260 - RNA, 24 nt, Human
uugaaauugccaaacuucccuaau

SEQ ID NO: 62261 - RNA, 22 nt, Human
uugcagugagccaagacggugc

SEQ ID NO: 62262 - RNA, 19 nt, Human
uuucacaguaugaauuccc

SEQ ID NO: 62263 - RNA, 23 nt, Human
aaaaucaccaaauauacaaagca

SEQ ID NO: 62264 - RNA, 22 nt, Human
aaagauaucccaaaaucgaagg

SEQ ID NO: 62265 - RNA, 25 nt, Human
aaagaucaaugcaaaccuaagucau

SEQ ID NO: 62266 - RNA, 19 nt, Human
aacacggugaaaccccguc

SEQ ID NO: 62267 - RNA, 20 nt, Human
aacacggugaaaccccgucu

SEQ ID NO: 62268 - RNA, 21 nt, Human
aacacggugaaaccccgucuc

SEQ ID NO: 62269 - RNA, 24 nt, Human
aacagagcaagacucugucucaaa

SEQ ID NO: 62270 - RNA, 20 nt, Human
aagaaugugauaauaaaaug

SEQ ID NO: 62271 - RNA, 20 nt, Human
aagauaauagcuuuaauccc

SEQ ID NO: 62272 - RNA, 18 nt, Human
aagcaaauauaaagcuua

SEQ ID NO: 62273 - RNA, 24 nt, Human
aauggcgugaaccugggaggcgga

SEQ ID NO: 62274 - RNA, 20 nt, Human
acaccacugcacuccagccu

SEQ ID NO: 62275 - RNA, 24 nt, Human
acaccacugcacuccagccugggc

SEQ ID NO: 62276 - RNA, 21 nt, Human
acacuaugacccagggugcug

SEQ ID NO: 62277 - RNA, 24 nt, Human
acagagcaagacucugucucaaaa

SEQ ID NO: 62278 - RNA, 25 nt, Human
acaguaauggaacaaaagcugaauc

SEQ ID NO: 62279 - RNA, 22 nt, Human
accacugcacuccagccugggc

SEQ ID NO: 62280 - RNA, 21 nt, Human
acccaagaucacaccacugca

SEQ ID NO: 62281 - RNA, 24 nt, Human
accccgucucuacuaaaaauacaa

SEQ ID NO: 62282 - RNA, 24 nt, Human
acugcacuccagccugggcaacag

SEQ ID NO: 62283 - RNA, 24 nt, Human
acugcacuccagccugggcaacag

SEQ ID NO: 62284 - RNA, 20 nt, Human
acuucuccuauacucuacua

SEQ ID NO: 62285 - RNA, 24 nt, Human
agaaaaaacuguauaucaaagaaa

SEQ ID NO: 62286 - RNA, 21 nt, Human
agaaugcauuguagaaguagg

SEQ ID NO: 62287 - RNA, 20 nt, Human
agagccugaggauucuuuug

SEQ ID NO: 62288 - RNA, 18 nt, Human
agagcuuauuaaaacaga

SEQ ID NO: 62289 - RNA, 24 nt, Human
agcacuuugggaggccgaggcggg

SEQ ID NO: 62290 - RNA, 21 nt, Human
agccgggcgcgguggugggcc

SEQ ID NO: 62291 - RNA, 24 nt, Human
agccugggcaacagagcaagacuc

SEQ ID NO: 62292 - RNA, 21 nt, Human
aggcagaaacccaugggcagc

SEQ ID NO: 62293 - RNA, 21 nt, Human
aggcaggagaauggcgugaac

SEQ ID NO: 62294 - RNA, 22 nt, Human
aggcaggagaauggcgugaacc

SEQ ID NO: 62295 - RNA, 24 nt, Human
aggcaggagaauggcgugaaccug

SEQ ID NO: 62296 - RNA, 22 nt, Human
aggcauucaauucauuuucaau

SEQ ID NO: 62297 - RNA, 20 nt, Human
aggccgaggcgggcggauca

SEQ ID NO: 62298 - RNA, 19 nt, Human
aggcggaguuugcagugac

SEQ ID NO: 62299 - RNA, 24 nt, Human
aggcggaguuugcagugacccaag

SEQ ID NO: 62300 - RNA, 24 nt, Human
aggcgggcggaucaugaggucagg

SEQ ID NO: 62301 - RNA, 18 nt, Human
aggcugaggcaggagaau

SEQ ID NO: 62302 - RNA, 19 nt, Human
agucccaaccugagaacua

SEQ ID NO: 62303 - RNA, 22 nt, Human
agugcaguacauuagagaaaug

SEQ ID NO: 62304 - RNA, 22 nt, Human
auaaagggcagcacuugcuacc

SEQ ID NO: 62305 - RNA, 21 nt, Human
auauaguuccaguuucaaauc

SEQ ID NO: 62306 - RNA, 24 nt, Human
aucacaccacugcacuccagccug

SEQ ID NO: 62307 - RNA, 28 nt, Human
aucacaccacugcacuccagccugggca

SEQ ID NO: 62308 - RNA, 21 nt, Human
augaaagaaaagcauauccau

SEQ ID NO: 62309 - RNA, 24 nt, Human
auggaacagaaagcuccagucucc

SEQ ID NO: 62310 - RNA, 22 nt, Human
caaagcaccagcuuaguaaagc

SEQ ID NO: 62311 - RNA, 19 nt, Human
caacaguaauggaacaaaa

SEQ ID NO: 62312 - RNA, 21 nt, Human
cacaccacugcacuccagccu

SEQ ID NO: 62313 - RNA, 23 nt, Human
cacagccaauuacaaugcaagaa

SEQ ID NO: 62314 - RNA, 18 nt, Human
caccccacauguauacca

SEQ ID NO: 62315 - RNA, 24 nt, Human
cacgccuguaaucccagcacuuug

SEQ ID NO: 62316 - RNA, 19 nt, Human
cacugcacuccagccuggg

SEQ ID NO: 62317 - RNA, 21 nt, Human
cacugcacuccagccugggca

SEQ ID NO: 62318 - RNA, 22 nt, Human
cacugcacuccagccugggcaa

SEQ ID NO: 62319 - RNA, 23 nt, Human
cacugcacuccagccugggcaac

SEQ ID NO: 62320 - RNA, 24 nt, Human
cacugcacuccagccugggcaaca

SEQ ID NO: 62321 - RNA, 25 nt, Human
cacugcacuccagccugggcaacaa

SEQ ID NO: 62322 - RNA, 26 nt, Human
cacugcacuccagccugggcaacaga

SEQ ID NO: 62323 - RNA, 23 nt, Human
cacuguacaaaaaucauggacca

SEQ ID NO: 62324 - RNA, 30 nt, Human
cagaaaauacaauguaucauuccauagcaa

SEQ ID NO: 62325 - RNA, 22 nt, Human
cagcacuuugggaggccgaggc

SEQ ID NO: 62326 - RNA, 24 nt, Human
cagcacuuugggaggccgaggcgg

SEQ ID NO: 62327 - RNA, 24 nt, Human
cagcuacucgggaggcugaggcag

SEQ ID NO: 62328 - RNA, 19 nt, Human
cauagaaacugucaaauuc

SEQ ID NO: 62329 - RNA, 24 nt, Human
cauauaguucaacaguaauggaac

SEQ ID NO: 62330 - RNA, 21 nt, Human
caucaccagcaaaauguuccu

SEQ ID NO: 62331 - RNA, 21 nt, Human
caugcaaagcaccagcuuagu

SEQ ID NO: 62332 - RNA, 23 nt, Human
cauuuuagggccgggcacggugg

SEQ ID NO: 62333 - RNA, 20 nt, Human
ccacugcacuccagccuggg

SEQ ID NO: 62334 - RNA, 21 nt, Human
ccacugcacuccagccugggc

SEQ ID NO: 62335 - RNA, 23 nt, Human
ccacugcacuccagccugggcaa

SEQ ID NO: 62336 - RNA, 24 nt, Human
ccacugcacuccagccugggcaac

SEQ ID NO: 62337 - RNA, 24 nt, Human
ccaguuacccucaaagcaucucag

SEQ ID NO: 62338 - RNA, 23 nt, Human
cccaagaucacaccacugcacuu

SEQ ID NO: 62339 - RNA, 23 nt, Human
ccccuguggucccagcuacucgg

SEQ ID NO: 62340 - RNA, 24 nt, Human
ccccuguggucccagcuacucggg

SEQ ID NO: 62341 - RNA, 20 nt, Human
cccuguggucccagcuacuc

SEQ ID NO: 62342 - RNA, 18 nt, Human
ccucaucaccagcaaaau

SEQ ID NO: 62343 - RNA, 23 nt, Human
ccuggcuaacacggugaaacccc

SEQ ID NO: 62344 - RNA, 24 nt, Human
ccuggcuaacacggugaaaccccg

SEQ ID NO: 62345 - RNA, 22 nt, Human
ccugggcaacagagcaagacuc

SEQ ID NO: 62346 - RNA, 22 nt, Human
ccuguaaucccagcacuuuggg

SEQ ID NO: 62347 - RNA, 21 nt, Human
ccuguggucccagcuacucgg

SEQ ID NO: 62348 - RNA, 24 nt, Human
cgagaacauccuggcuaacacggu

SEQ ID NO: 62349 - RNA, 24 nt, Human
cgaggcgggcggaucaugagguca

SEQ ID NO: 62350 - RNA, 23 nt, Human
cgguggugggccccugugguccc

SEQ ID NO: 62351 - RNA, 24 nt, Human
cuauauaucauuauccuauuccua

SEQ ID NO: 62352 - RNA, 22 nt, Human
cucacgccuguaaucccagcac

SEQ ID NO: 62353 - RNA, 24 nt, Human
cucacgccuguaaucccagcacuu

SEQ ID NO: 62354 - RNA, 18 nt, Human
cucaucaccagcaaaaug

SEQ ID NO: 62355 - RNA, 19 nt, Human
gaagucccaaccugagaac

SEQ ID NO: 62356 - RNA, 23 nt, Human
gacaaaaugaaaaaauaaguucu

SEQ ID NO: 62357 - RNA, 23 nt, Human
gaggcgggcggaucaugagguca

SEQ ID NO: 62358 - RNA, 22 nt, Human
gaggcuguuucagaaccaacau

SEQ ID NO: 62359 - RNA, 23 nt, Human
gagugaagccacagagauugguu

SEQ ID NO: 62360 - RNA, 24 nt, Human
gcacuccagccugggcaacagagc

SEQ ID NO: 62361 - RNA, 22 nt, Human
gccaagggcucuaucaaucuug

SEQ ID NO: 62362 - RNA, 21 nt, Human
gccacaauuugaaaccuuaac

SEQ ID NO: 62363 - RNA, 24 nt, Human
gcuaacacggugaaaccccgucuc

SEQ ID NO: 62364 - RNA, 22 nt, Human
gcugaggcaggagaauggcgug

SEQ ID NO: 62365 - RNA, 19 nt, Human
ggaaaaaauucuugagcaa

SEQ ID NO: 62366 - RNA, 24 nt, Human
ggaguuugcagugacccaagauca

SEQ ID NO: 62367 - RNA, 23 nt, Human
ggcacgguggcucacgccuguaa

SEQ ID NO: 62368 - RNA, 21 nt, Human
ggccgggcacgguggcucacg

SEQ ID NO: 62369 - RNA, 21 nt, Human
ggcggaucaugaggucaggag

SEQ ID NO: 62370 - RNA, 23 nt, Human
ggcgggcggaucaugaggucagg

SEQ ID NO: 62371 - RNA, 21 nt, Human
ggcucacgccuguaaucccag

SEQ ID NO: 62372 - RNA, 23 nt, Human
gggcagccuuuaaauaacaaaaa

SEQ ID NO: 62373 - RNA, 23 nt, Human
gguggcucacgccuguaauccca

SEQ ID NO: 62374 - RNA, 24 nt, Human
gguggcucacgccuguaaucccag

SEQ ID NO: 62375 - RNA, 23 nt, Human
gguggugggccccugugguccca

SEQ ID NO: 62376 - RNA, 21 nt, Human
guggcggagggagggcggugg

SEQ ID NO: 62377 - RNA, 21 nt, Human
gugggccccuguggucccagc

SEQ ID NO: 62378 - RNA, 23 nt, Human
uaaaaaacacuguacaaaaauca

SEQ ID NO: 62379 - RNA, 24 nt, Human
uaaaacagaugccauuucuaaugc

SEQ ID NO: 62380 - RNA, 19 nt, Human
uaaaacgaacuacaggucu

SEQ ID NO: 62381 - RNA, 20 nt, Human
uaaauaaacauuacacccau

SEQ ID NO: 62382 - RNA, 22 nt, Human
uaacaaaacaaaagaacugaua

SEQ ID NO: 62383 - RNA, 24 nt, Human
uaacaccauuaaguguaagucuga

SEQ ID NO: 62384 - RNA, 22 nt, Human
uaacacggugaaaccccgucuc

SEQ ID NO: 62385 - RNA, 24 nt, Human
uaacacggugaaaccccgucucua

SEQ ID NO: 62386 - RNA, 25 nt, Human
uaaccacuacugcucugcagcagua

SEQ ID NO: 62387 - RNA, 19 nt, Human
uaacccccagucucauauu

SEQ ID NO: 62388 - RNA, 26 nt, Human
uaagcaaauauaaagcuuaaucuccu

SEQ ID NO: 62389 - RNA, 18 nt, Human
uaauaaaaugccaagggc

SEQ ID NO: 62390 - RNA, 20 nt, Human
uaaugaugaacaccuuccuu

SEQ ID NO: 62391 - RNA, 19 nt, Human
uacaaagcaauuuugcaua

SEQ ID NO: 62392 - RNA, 21 nt, Human
uacaacuuaacccccagucuc

SEQ ID NO: 62393 - RNA, 19 nt, Human
uacagugugaaacagccga

SEQ ID NO: 62394 - RNA, 23 nt, Human
uacauuacaaaaucaccaaauau

SEQ ID NO: 62395 - RNA, 18 nt, Human
uaccaccugccacaauuu

SEQ ID NO: 62396 - RNA, 22 nt, Human
uaccaugaucacauaaagucgg

SEQ ID NO: 62397 - RNA, 19 nt, Human
uaccaugcaaagcaccagc

SEQ ID NO: 62398 - RNA, 19 nt, Human
uagaaagacaaaaucucau

SEQ ID NO: 62399 - RNA, 22 nt, Human
uagaacuucuuuugaaauguca

SEQ ID NO: 62400 - RNA, 24 nt, Human
uagauauaaugcaaaauuaacuca

SEQ ID NO: 62401 - RNA, 21 nt, Human
uagauuguagagccugaggau

SEQ ID NO: 62402 - RNA, 20 nt, Human
uagcaguaucuuuacuuguc

SEQ ID NO: 62403 - RNA, 22 nt, Human
uauauaccuauugugacaaaau

SEQ ID NO: 62404 - RNA, 20 nt, Human
uaucaaagaaaaaaaaaggc

SEQ ID NO: 62405 - RNA, 20 nt, Human
uaucaaagaaaaaaaaaggc

SEQ ID NO: 62406 - RNA, 24 nt, Human
uaucaaagaaaaaaaaaggcuuuu

SEQ ID NO: 62407 - RNA, 18 nt, Human
uauguuuaagggggaaaa

SEQ ID NO: 62408 - RNA, 23 nt, Human
ucacaccacugcacuccagccug

SEQ ID NO: 62409 - RNA, 18 nt, Human
ucacauaaagucgaguuc

SEQ ID NO: 62410 - RNA, 18 nt, Human
ucaugaggucaggagauc

SEQ ID NO: 62411 - RNA, 24 nt, Human
ucaugaggucaggagaucgagaac

SEQ ID NO: 62412 - RNA, 21 nt, Human
ucauuccauagcaguaucuuu

SEQ ID NO: 62413 - RNA, 20 nt, Human
ucccagaaaguacccugaga

SEQ ID NO: 62414 - RNA, 21 nt, Human
uccuuccuuggucaacuucuc

SEQ ID NO: 62415 - RNA, 19 nt, Human
ucuauuagcaguguuaaaa

SEQ ID NO: 62416 - RNA, 23 nt, Human
ucuccaccccacauguauaccaa

SEQ ID NO: 62417 - RNA, 24 nt, Human
ucucuacuaaaaauacaaaaaauu

SEQ ID NO: 62418 - RNA, 19 nt, Human
ugaaaaaauaaguucucca

SEQ ID NO: 62419 - RNA, 20 nt, Human
ugaaagcauuccuuuuggua

SEQ ID NO: 62420 - RNA, 25 nt, Human
ugaaaugucacuugacuuucaauaa

SEQ ID NO: 62421 - RNA, 20 nt, Human
ugacuuaaaacgaacuacag

SEQ ID NO: 62422 - RNA, 22 nt, Human
ugagaccuaaaacagaugccau

SEQ ID NO: 62423 - RNA, 21 nt, Human
ugagaucaacaguaccaccug

SEQ ID NO: 62424 - RNA, 24 nt, Human
ugaggcaggagaauggcgugaacc

SEQ ID NO: 62425 - RNA, 24 nt, Human
ugaggcaggagaauggcgugaacc

SEQ ID NO: 62426 - RNA, 23 nt, Human
ugauuucuuauggacacagccaa

SEQ ID NO: 62427 - RNA, 20 nt, Human
ugcaaaccuaagucaucaag

SEQ ID NO: 62428 - RNA, 22 nt, Human
ugcaagaauuaaaaguucacaa

SEQ ID NO: 62429 - RNA, 22 nt, Human
ugcuggcaacagaauaaauucc

SEQ ID NO: 62430 - RNA, 20 nt, Human
uggaacaaaagcugaaucau

SEQ ID NO: 62431 - RNA, 24 nt, Human
uggaauaguucauauaguucaaca

SEQ ID NO: 62432 - RNA, 18 nt, Human
uggcaggagacgcagcug

SEQ ID NO: 62433 - RNA, 18 nt, Human
uggcaucaagugcaguac

SEQ ID NO: 62434 - RNA, 20 nt, Human
uggcggagggagggcggugg

SEQ ID NO: 62435 - RNA, 24 nt, Human
uggcucacgccuguaaucccagca

SEQ ID NO: 62436 - RNA, 19 nt, Human
ugggaggccgaggcgggcg

SEQ ID NO: 62437 - RNA, 24 nt, Human
ugggaggccgaggcgggcggauca

SEQ ID NO: 62438 - RNA, 29 nt, Human
ugggaggcggaguuugcagugacaacggu

SEQ ID NO: 62439 - RNA, 19 nt, Human
ugggccccuguggucccag

SEQ ID NO: 62440 - RNA, 24 nt, Human
uggugggccccuguggucccagcu

SEQ ID NO: 62441 - RNA, 18 nt, Human
uguggcaaaaacuagacu

SEQ ID NO: 62442 - RNA, 20 nt, Human
uuaaagucuuaguggcuaac

SEQ ID NO: 62443 - RNA, 24 nt, Human
uucacuuacauuacaaaaucacca

SEQ ID NO: 62444 - RNA, 20 nt, Human
uuccuagauauaaugcaaaa

SEQ ID NO: 62445 - RNA, 22 nt, Human
uucuaacaacuuuuuuccugaa

SEQ ID NO: 62446 - RNA, 21 nt, Human
uuggcacauggauagaaggaa

SEQ ID NO: 62447 - RNA, 25 nt, Human
uugggaggccgaggcgggcggauca

SEQ ID NO: 62448 - RNA, 18 nt, Human
uuugaaauuaaacaauaa

SEQ ID NO: 62449 - RNA, 21 nt, Human
aaacacagcuuugccccaggc

SEQ ID NO: 62450 - RNA, 24 nt, Human
agauguugggcugggaggcccugu

SEQ ID NO: 62451 - RNA, 22 nt, Human
agccagcggcagcccgagcgcg

SEQ ID NO: 62452 - RNA, 20 nt, Human
agccggugccccuggucacu

SEQ ID NO: 62453 - RNA, 18 nt, Human
agcgcgccugcgcgggga

SEQ ID NO: 62454 - RNA, 21 nt, Human
aggcuuuggcacuuccagccc

SEQ ID NO: 62455 - RNA, 21 nt, Human
cacagcuuugccccaggcuuu

SEQ ID NO: 62456 - RNA, 22 nt, Human
cagcccgagcgcgccugcgcgg

SEQ ID NO: 62457 - RNA, 21 nt, Human
cagcuggagauguugggcugg

SEQ ID NO: 62458 - RNA, 21 nt, Human
caggagaggcgcugaacccca

SEQ ID NO: 62459 - RNA, 21 nt, Human
ccccaggagaggcgcugaacc

SEQ ID NO: 62460 - RNA, 23 nt, Human
cggugccccuggucacugcaguu

SEQ ID NO: 62461 - RNA, 20 nt, Human
cugaaacacagcuuugcccc

SEQ ID NO: 62462 - RNA, 22 nt, Human
gaagagccagcggcagcccgag

SEQ ID NO: 62463 - RNA, 18 nt, Human
gcgcgccugcgcggggac

SEQ ID NO: 62464 - RNA, 18 nt, Human
gugggcagccggugcccc

SEQ ID NO: 62465 - RNA, 19 nt, Human
ucacugcaguugcccaagg

SEQ ID NO: 62466 - RNA, 21 nt, Human
ucaguguggcugaaacacagc

SEQ ID NO: 62467 - RNA, 22 nt, Human
ucccugugggcagccggugccc

SEQ ID NO: 62468 - RNA, 19 nt, Human
ugaaacacagcuuugcccc

SEQ ID NO: 62469 - RNA, 19 nt, Human
ugccccaggcuuuggcacu

SEQ ID NO: 62470 - RNA, 27 nt, Human
ugccccaggcuuuggcacuuccagccc

SEQ ID NO: 62471 - RNA, 20 nt, Human
ugcgcggggacgggcgggac

SEQ ID NO: 62472 - RNA, 24 nt, Human
uggagauguugggcugggaggccc

SEQ ID NO: 62473 - RNA, 20 nt, Human
uggcugaaacacagcuuugc

SEQ ID NO: 62474 - RNA, 20 nt, Human
uugcccaaggcugauauuuc

SEQ ID NO: 62475 - RNA, 21 nt, Human
caccugcggcugguucagagu

SEQ ID NO: 62476 - RNA, 19 nt, Human
cugaagagcuuggcguguc

SEQ ID NO: 62477 - RNA, 23 nt, Human
cugggaugauagcggccagagag

SEQ ID NO: 62478 - RNA, 24 nt, Human
uaauaacaucgugucuucacugaa

SEQ ID NO: 62479 - RNA, 22 nt, Human
ugaacuccacugcugggaugau

SEQ ID NO: 62480 - RNA, 18 nt, Human
ugagaugggaagccaugg

SEQ ID NO: 62481 - RNA, 21 nt, Human
ugagaugggaagccaugggca

SEQ ID NO: 62482 - RNA, 22 nt, Human
ugucuucacugaagagcuuggc

SEQ ID NO: 62483 - RNA, 18 nt, Human
aaaacuccaaccccccac

SEQ ID NO: 62484 - RNA, 24 nt, Human
aaacaaaagaaucacuagaaaaac

SEQ ID NO: 62485 - RNA, 24 nt, Human
aaacaagacccaucaguaccuuca

SEQ ID NO: 62486 - RNA, 24 nt, Human
aaacagaaauguauaaccagccca

SEQ ID NO: 62487 - RNA, 24 nt, Human
aaacagacuaacagaaaacaagac

SEQ ID NO: 62488 - RNA, 22 nt, Human
aagaaaacuccaaccccccaca

SEQ ID NO: 62489 - RNA, 21 nt, Human
aaggacuggacaaacuaagcc

SEQ ID NO: 62490 - RNA, 23 nt, Human
aaucacuagaaaaacagauccac

SEQ ID NO: 62491 - RNA, 22 nt, Human
aauuugugaaaaagcugcaugu

SEQ ID NO: 62492 - RNA, 24 nt, Human
acaaaacaaaagaaucacuagaaa

SEQ ID NO: 62493 - RNA, 19 nt, Human
acaaaacagacuaacagaa

SEQ ID NO: 62494 - RNA, 24 nt, Human
acagaauuccugagaagggaacau

SEQ ID NO: 62495 - RNA, 24 nt, Human
accaucaucuagccucuuuucuca

SEQ ID NO: 62496 - RNA, 19 nt, Human
acuccaaccccccacacca

SEQ ID NO: 62497 - RNA, 24 nt, Human
acucuaagggacaaaacaaaagaa

SEQ ID NO: 62498 - RNA, 18 nt, Human
agaaaaacagauccacua

SEQ ID NO: 62499 - RNA, 19 nt, Human
agaaaacuccaacccccca

SEQ ID NO: 62500 - RNA, 22 nt, Human
agaaauguauaaccagcccaau

SEQ ID NO: 62501 - RNA, 18 nt, Human
agaacugaugaguacaga

SEQ ID NO: 62502 - RNA, 23 nt, Human
agacaacagguccaagaagacuu

SEQ ID NO: 62503 - RNA, 19 nt, Human
agccucagcuuccugagca

SEQ ID NO: 62504 - RNA, 20 nt, Human
agcuuccugagcagcauccc

SEQ ID NO: 62505 - RNA, 19 nt, Human
aggaggcuguugugaaaau

SEQ ID NO: 62506 - RNA, 20 nt, Human
agggaaaaagaaaguagugg

SEQ ID NO: 62507 - RNA, 21 nt, Human
agggacaaaacaaaagaauca

SEQ ID NO: 62508 - RNA, 23 nt, Human
aguacagaauuccugagaaggga

SEQ ID NO: 62509 - RNA, 20 nt, Human
aucccuuucuauagaaucac

SEQ ID NO: 62510 - RNA, 25 nt, Human
aucuaugacaaacccaaauuccuaa

SEQ ID NO: 62511 - RNA, 25 nt, Human
caaaacaaaagaaucacuagaaaaa

SEQ ID NO: 62512 - RNA, 25 nt, Human
caaacucugcuuuaccuugacauau

SEQ ID NO: 62513 - RNA, 25 nt, Human
caacccagaauaggugccagcaggg

SEQ ID NO: 62514 - RNA, 19 nt, Human
cacaccaucaucuagccuc

SEQ ID NO: 62515 - RNA, 24 nt, Human
cacccuagucucaauuuccucacc

SEQ ID NO: 62516 - RNA, 18 nt, Human
caccuuuccaugcaucag

SEQ ID NO: 62517 - RNA, 24 nt, Human
cacucuaagggacaaaacaaaaga

SEQ ID NO: 62518 - RNA, 22 nt, Human
cacucugcuuucaacuguacuu

SEQ ID NO: 62519 - RNA, 24 nt, Human
cagacuaacagaaaacaagaccca

SEQ ID NO: 62520 - RNA, 21 nt, Human
cagcagcagcucaggcucugc

SEQ ID NO: 62521 - RNA, 21 nt, Human
cagccucagcuuccugagcag

SEQ ID NO: 62522 - RNA, 20 nt, Human
caggguucuuugccucuucc

SEQ ID NO: 62523 - RNA, 20 nt, Human
cagugggccacaccacagcc

SEQ ID NO: 62524 - RNA, 22 nt, Human
cauggaaggacuggacaaacua

SEQ ID NO: 62525 - RNA, 25 nt, Human
ccacccuagucucaauuuccucacc

SEQ ID NO: 62526 - RNA, 19 nt, Human
ccagcacacccgcaucauc

SEQ ID NO: 62527 - RNA, 22 nt, Human
ccagccucagcuuccugagcag

SEQ ID NO: 62528 - RNA, 19 nt, Human
ccaggccaggguucuuugc

SEQ ID NO: 62529 - RNA, 21 nt, Human
ccaugcaucagaaccuaugcu

SEQ ID NO: 62530 - RNA, 31 nt, Human
cccagccacccucaccagagaauacaucuag

SEQ ID NO: 62531 - RNA, 24 nt, Human
cccagccucagcuuccugagcagc

SEQ ID NO: 62532 - RNA, 22 nt, Human
ccccccacaccaucaucuagcc

SEQ ID NO: 62533 - RNA, 19 nt, Human
ccggugccaccacgcaugu

SEQ ID NO: 62534 - RNA, 21 nt, Human
ccuacuuaagagagaugccuc

SEQ ID NO: 62535 - RNA, 26 nt, Human
cucaccagagaauacaucuaugacaa

SEQ ID NO: 62536 - RNA, 25 nt, Human
cuccagggccacacccggugccacc

SEQ ID NO: 62537 - RNA, 18 nt, Human
cucuaagggacaaaacaa

SEQ ID NO: 62538 - RNA, 19 nt, Human
cugggauagaagggcaugg

SEQ ID NO: 62539 - RNA, 20 nt, Human
cuuucaacuguacuugcugu

SEQ ID NO: 62540 - RNA, 19 nt, Human
gagaagggaacauuuaggu

SEQ ID NO: 62541 - RNA, 22 nt, Human
gagaauacaucuaugacaaacc

SEQ ID NO: 62542 - RNA, 22 nt, Human
gcuguuuccucacagccaggaa

SEQ ID NO: 62543 - RNA, 23 nt, Human
ggacaaaacaaaagaaucacuag

SEQ ID NO: 62544 - RNA, 18 nt, Human
gggaaaaagaaaguagug

SEQ ID NO: 62545 - RNA, 22 nt, Human
gggauagaagggcauggaagga

SEQ ID NO: 62546 - RNA, 21 nt, Human
ggucagaccugacaugggucc

SEQ ID NO: 62547 - RNA, 20 nt, Human
guuacacucugcuuucaacu

SEQ ID NO: 62548 - RNA, 18 nt, Human
uaauuuaggaaaugagua

SEQ ID NO: 62549 - RNA, 21 nt, Human
uagaagaaaacuccaaccccc

SEQ ID NO: 62550 - RNA, 23 nt, Human
uagaagaaaacuccaacccccca

SEQ ID NO: 62551 - RNA, 20 nt, Human
uagaaguucacaagcaaccc

SEQ ID NO: 62552 - RNA, 18 nt, Human
uaggugcaucuuuucccu

SEQ ID NO: 62553 - RNA, 21 nt, Human
uaguggcucuacgcaacuuuu

SEQ ID NO: 62554 - RNA, 22 nt, Human
ucaauaauagaauaaauuugug

SEQ ID NO: 62555 - RNA, 19 nt, Human
uccaaccccccacaccauc

SEQ ID NO: 62556 - RNA, 22 nt, Human
uccaaccccccacaccaucauc

SEQ ID NO: 62557 - RNA, 21 nt, Human
uccacuagcacgaguccucca

SEQ ID NO: 62558 - RNA, 23 nt, Human
uccagcccugucccagccucagc

SEQ ID NO: 62559 - RNA, 21 nt, Human
ucccagguuccagcccugucc

SEQ ID NO: 62560 - RNA, 21 nt, Human
uccccaugaaggaagggaaaa

SEQ ID NO: 62561 - RNA, 25 nt, Human
ucccuuguuacacucugcuuucaac

SEQ ID NO: 62562 - RNA, 19 nt, Human
ucuaagggacaaaacaaaa

SEQ ID NO: 62563 - RNA, 23 nt, Human
ucuacgcaacuuuuucauucacc

SEQ ID NO: 62564 - RNA, 18 nt, Human
ucucagggaaaaagaaag

SEQ ID NO: 62565 - RNA, 19 nt, Human
ucuuugccucuuccucaaa

SEQ ID NO: 62566 - RNA, 20 nt, Human
ugaaggaagggaaaagaaua

SEQ ID NO: 62567 - RNA, 23 nt, Human
ugacauggguccuucugaagaug

SEQ ID NO: 62568 - RNA, 23 nt, Human
ugaguacagaauuccugagaagg

SEQ ID NO: 62569 - RNA, 23 nt, Human
ugccugaucucuuucucuuccug

SEQ ID NO: 62570 - RNA, 27 nt, Human
ugcuuccauacucugcauuaggucagu

SEQ ID NO: 62571 - RNA, 18 nt, Human
uggaagucugauucgcug

SEQ ID NO: 62572 - RNA, 20 nt, Human
uggccagaguugcucccagg

SEQ ID NO: 62573 - RNA, 20 nt, Human
uggccagaguugcucccagg

SEQ ID NO: 62574 - RNA, 24 nt, Human
ugggccacaccacagcagcagcuc

SEQ ID NO: 62575 - RNA, 22 nt, Human
uggguccuucugaagauggugg

SEQ ID NO: 62576 - RNA, 19 nt, Human
uggucucugggccacgccc

SEQ ID NO: 62577 - RNA, 21 nt, Human
ugucccagccucagcuuccug

SEQ ID NO: 62578 - RNA, 19 nt, Human
uguccugucucaccaacca

SEQ ID NO: 62579 - RNA, 23 nt, Human
ugugaacauggcuuugcucccaa

SEQ ID NO: 62580 - RNA, 18 nt, Human
ugugaucuaccagcuguu

SEQ ID NO: 62581 - RNA, 25 nt, Human
uguggaagucugauucgcuggugcc

SEQ ID NO: 62582 - RNA, 20 nt, Human
uuaaagguuguccaugccua

SEQ ID NO: 62583 - RNA, 24 nt, Human
uucaagccuugacuccaguggccc

SEQ ID NO: 62584 - RNA, 22 nt, Human
uucaccacccuagucucaauuu

SEQ ID NO: 62585 - RNA, 18 nt, Human
uuccugagcagcaucccu

SEQ ID NO: 62586 - RNA, 24 nt, Human
uugcucccagguuccagcccuguc

SEQ ID NO: 62587 - RNA, 27 nt, Human
uuuuuuuuauccaaauuuauucucagg

SEQ ID NO: 62588 - RNA, 18 nt, Human
aaaaagacaucaaaaggc

SEQ ID NO: 62589 - RNA, 21 nt, Human
aaaaggcugaguacagacacc

SEQ ID NO: 62590 - RNA, 21 nt, Human
aaagacauuuauccuuuuggc

SEQ ID NO: 62591 - RNA, 22 nt, Human
aaaguaacugaaaaaaucuucu

SEQ ID NO: 62592 - RNA, 21 nt, Human
aaaguagccaauuaucacgga

SEQ ID NO: 62593 - RNA, 24 nt, Human
aacaaaugcccuaauacgaccuaa

SEQ ID NO: 62594 - RNA, 21 nt, Human
aagagaagaugagcaccaggg

SEQ ID NO: 62595 - RNA, 18 nt, Human
aagcuucgcuggcagaac

SEQ ID NO: 62596 - RNA, 24 nt, Human
aagcuucgcuggcagaacagggau

SEQ ID NO: 62597 - RNA, 22 nt, Human
aaguagccaauuaucacggaca

SEQ ID NO: 62598 - RNA, 23 nt, Human
aagucucuuuccaggccaugaac

SEQ ID NO: 62599 - RNA, 20 nt, Human
aagugacuaccagcuggaga

SEQ ID NO: 62600 - RNA, 26 nt, Human
aagugacuaccagcuggagaggagga

SEQ ID NO: 62601 - RNA, 24 nt, Human
aagugucuauucaagucuuuugcc

SEQ ID NO: 62602 - RNA, 19 nt, Human
aaugagugaacccaaccac

SEQ ID NO: 62603 - RNA, 22 nt, Human
aaugggcauagaaucuuuaaac

SEQ ID NO: 62604 - RNA, 22 nt, Human
acaaaaccuggcagcccaugcc

SEQ ID NO: 62605 - RNA, 23 nt, Human
acacuacaagagggcgaaggagc

SEQ ID NO: 62606 - RNA, 24 nt, Human
acacugaaucuacaauuauuagau

SEQ ID NO: 62607 - RNA, 24 nt, Human
acccaacaacaccagggccaacca

SEQ ID NO: 62608 - RNA, 21 nt, Human
agaaaaagaucaagcucagga

SEQ ID NO: 62609 - RNA, 20 nt, Human
agacaucaaaaggcugagua

SEQ ID NO: 62610 - RNA, 19 nt, Human
agacgggaggaacaacggg

SEQ ID NO: 62611 - RNA, 20 nt, Human
agagcccuccacagccacac

SEQ ID NO: 62612 - RNA, 21 nt, Human
agauaacagagacaaaugcuc

SEQ ID NO: 62613 - RNA, 19 nt, Human
agcagcugccacccaacaa

SEQ ID NO: 62614 - RNA, 23 nt, Human
agcccaugcaguggaaacucaca

SEQ ID NO: 62615 - RNA, 23 nt, Human
agcuguguaguccacgggaccuc

SEQ ID NO: 62616 - RNA, 24 nt, Human
aggaaacaauggaaaaguagccaa

SEQ ID NO: 62617 - RNA, 23 nt, Human
aggaggaagcuucgcuggcagaa

SEQ ID NO: 62618 - RNA, 22 nt, Human
aggcagagcccuccacagccac

SEQ ID NO: 62619 - RNA, 24 nt, Human
agguaaaagcucugccaaacaaaa

SEQ ID NO: 62620 - RNA, 21 nt, Human
aggugguuccuuucacaguug

SEQ ID NO: 62621 - RNA, 21 nt, Human
aggugguuccuuucacaguug

SEQ ID NO: 62622 - RNA, 20 nt, Human
aguaacugaaaaaaucuucu

SEQ ID NO: 62623 - RNA, 19 nt, Human
aucaaaaggcugaguacag

SEQ ID NO: 62624 - RNA, 27 nt, Human
auccuuuuggcauugguaggcugccaa

SEQ ID NO: 62625 - RNA, 22 nt, Human
auuuuacacacauaucaucaaa

SEQ ID NO: 62626 - RNA, 21 nt, Human
caaaaggcugaguacagacac

SEQ ID NO: 62627 - RNA, 23 nt, Human
caaaaggcugaguacagacacca

SEQ ID NO: 62628 - RNA, 25 nt, Human
caaaaugaaaucuccauuccacugg

SEQ ID NO: 62629 - RNA, 21 nt, Human
caacaacaccagggccaacca

SEQ ID NO: 62630 - RNA, 18 nt, Human
cacagccacacuacaaga

SEQ ID NO: 62631 - RNA, 23 nt, Human
caccacaggcccagcccacagcc

SEQ ID NO: 62632 - RNA, 19 nt, Human
caccagggccaaccauuag

SEQ ID NO: 62633 - RNA, 20 nt, Human
cacuccgggcagucccggcc

SEQ ID NO: 62634 - RNA, 18 nt, Human
cacugcugcugacaaaau

SEQ ID NO: 62635 - RNA, 21 nt, Human
cagaaaaagaucaagcucagg

SEQ ID NO: 62636 - RNA, 20 nt, Human
caugcacuccgggcaguccc

SEQ ID NO: 62637 - RNA, 20 nt, Human
ccaaacaaaauacucugaaa

SEQ ID NO: 62638 - RNA, 25 nt, Human
ccacaggccaccccccauaggcaga

SEQ ID NO: 62639 - RNA, 19 nt, Human
cccaugcacuccgggcagu

SEQ ID NO: 62640 - RNA, 22 nt, Human
ccccgugccccuccuccaccgg

SEQ ID NO: 62641 - RNA, 19 nt, Human
cccgagggagaaagauggg

SEQ ID NO: 62642 - RNA, 18 nt, Human
cccuccacagccacacua

SEQ ID NO: 62643 - RNA, 21 nt, Human
cccuggcccgcgcccaugcac

SEQ ID NO: 62644 - RNA, 24 nt, Human
cgaccuaaacacgaagucacccaa

SEQ ID NO: 62645 - RNA, 19 nt, Human
cgauuugcaaauauuuucu

SEQ ID NO: 62646 - RNA, 19 nt, Human
cgcaagugacuaccagcug

SEQ ID NO: 62647 - RNA, 20 nt, Human
cggcggcugaacgucuuuuc

SEQ ID NO: 62648 - RNA, 28 nt, Human
cgugugcuuguuugccacgcguguaugg

SEQ ID NO: 62649 - RNA, 20 nt, Human
cuagauacagaguuauggau

SEQ ID NO: 62650 - RNA, 21 nt, Human
cucaccauuaacaugcauuua

SEQ ID NO: 62651 - RNA, 24 nt, Human
cucacuagaaucuuugggucccca

SEQ ID NO: 62652 - RNA, 19 nt, Human
cugccacccaacaacacca

SEQ ID NO: 62653 - RNA, 22 nt, Human
cugcugcugacaaaaugaaauc

SEQ ID NO: 62654 - RNA, 21 nt, Human
cuggaugaaugacaagagaag

SEQ ID NO: 62655 - RNA, 19 nt, Human
gaacugacagcaugacagu

SEQ ID NO: 62656 - RNA, 19 nt, Human
gaccacaauacuguauuug

SEQ ID NO: 62657 - RNA, 19 nt, Human
gacuugucaauugggaacu

SEQ ID NO: 62658 - RNA, 20 nt, Human
gagacaaaugcucacacugu

SEQ ID NO: 62659 - RNA, 21 nt, Human
gagcuguguaguccacgggac

SEQ ID NO: 62660 - RNA, 26 nt, Human
gauacaagccacaggccaccccccau

SEQ ID NO: 62661 - RNA, 21 nt, Human
gauccaacaaaugcccuaaua

SEQ ID NO: 62662 - RNA, 21 nt, Human
gauuugcaaauauuuucuccc

SEQ ID NO: 62663 - RNA, 18 nt, Human
gcaaagaauaacagguaa

SEQ ID NO: 62664 - RNA, 21 nt, Human
gcagcccaugccuggaugaau

SEQ ID NO: 62665 - RNA, 18 nt, Human
gcccaugcacuccgggca

SEQ ID NO: 62666 - RNA, 18 nt, Human
gccccgugccccuccucc

SEQ ID NO: 62667 - RNA, 21 nt, Human
gccccgugccccuccuccacc

SEQ ID NO: 62668 - RNA, 18 nt, Human
gcgaccgcucagcguccc

SEQ ID NO: 62669 - RNA, 20 nt, Human
gcuggagcucggaggccccg

SEQ ID NO: 62670 - RNA, 21 nt, Human
ggaaaacuucuuuuaugggaa

SEQ ID NO: 62671 - RNA, 19 nt, Human
gggccaaccauuagcacca

SEQ ID NO: 62672 - RNA, 27 nt, Human
gugugugcaucugugcacgcgcacggu

SEQ ID NO: 62673 - RNA, 25 nt, Human
uaaaaagacaucaaaaggcugagua

SEQ ID NO: 62674 - RNA, 21 nt, Human
uaacagagacaaaugcucaca

SEQ ID NO: 62675 - RNA, 23 nt, Human
uaaccaagccaucggcggcugaa

SEQ ID NO: 62676 - RNA, 22 nt, Human
uacaagccacaggccacccccc

SEQ ID NO: 62677 - RNA, 19 nt, Human
ucacccaagggauucacuc

SEQ ID NO: 62678 - RNA, 23 nt, Human
ucacuagaaucuuugggucccca

SEQ ID NO: 62679 - RNA, 21 nt, Human
ucagcgucccuggcccgcgcc

SEQ ID NO: 62680 - RNA, 19 nt, Human
ucaggaaguguggauucua

SEQ ID NO: 62681 - RNA, 24 nt, Human
ucauaugcauacaaaauacauggu

SEQ ID NO: 62682 - RNA, 23 nt, Human
uccaaaaaguuaauaaauuauca

SEQ ID NO: 62683 - RNA, 24 nt, Human
ucccacacaaacacaaaaguuauu

SEQ ID NO: 62684 - RNA, 18 nt, Human
uccuugggaacggagcug

SEQ ID NO: 62685 - RNA, 21 nt, Human
uccuugggaacggagcuggag

SEQ ID NO: 62686 - RNA, 18 nt, Human
ucggaggccccgugcccc

SEQ ID NO: 62687 - RNA, 23 nt, Human
ucugccaaacaaaauacucugaa

SEQ ID NO: 62688 - RNA, 22 nt, Human
ucuuuaaguggcaauuuaaucu

SEQ ID NO: 62689 - RNA, 19 nt, Human
ucuuuuaugggaauaaggg

SEQ ID NO: 62690 - RNA, 24 nt, Human
ucuuuuaugggaauaaggggaagu

SEQ ID NO: 62691 - RNA, 23 nt, Human
ugauccaacaaaugcccuaauac

SEQ ID NO: 62692 - RNA, 18 nt, Human
ugaugugaggugagaagg

SEQ ID NO: 62693 - RNA, 22 nt, Human
ugccccuccuccaccggggacu

SEQ ID NO: 62694 - RNA, 23 nt, Human
ugccccuccuccaccggggacug

SEQ ID NO: 62695 - RNA, 22 nt, Human
ugggagaagucucuuuccagga

SEQ ID NO: 62696 - RNA, 20 nt, Human
ugugcacgcgcacgcgucug

SEQ ID NO: 62697 - RNA, 22 nt, Human
uuacuuugcagaacaacuguga

SEQ ID NO: 62698 - RNA, 21 nt, Human
uugcuguguagaagagaaagu

SEQ ID NO: 62699 - RNA, 18 nt, Human
uuuagaauccugccauuu

SEQ ID NO: 62700 - RNA, 23 nt, Human
aaaagaaggagggccugcccaaa

SEQ ID NO: 62701 - RNA, 27 nt, Human
aaacagaaagagaaagaaaggggaccc

SEQ ID NO: 62702 - RNA, 22 nt, Human
aacagaaagagaaagaaagaga

SEQ ID NO: 62703 - RNA, 22 nt, Human
aagaaagagauagaaacaggga

SEQ ID NO: 62704 - RNA, 19 nt, Human
aagaggcuugaccaugcag

SEQ ID NO: 62705 - RNA, 22 nt, Human
aagcaauuacgguagaauccca

SEQ ID NO: 62706 - RNA, 26 nt, Human
acuccaaagagacauauaugcagagg

SEQ ID NO: 62707 - RNA, 23 nt, Human
acugcaccuccugggaucucuuc

SEQ ID NO: 62708 - RNA, 18 nt, Human
aggcaguaaguccgagcg

SEQ ID NO: 62709 - RNA, 21 nt, Human
aggccaggaaacagaaagaga

SEQ ID NO: 62710 - RNA, 23 nt, Human
auuucaccccuccccucccuccg

SEQ ID NO: 62711 - RNA, 23 nt, Human
caaagcaauuacgguagaauccc

SEQ ID NO: 62712 - RNA, 18 nt, Human
caccauugggagcaaggu

SEQ ID NO: 62713 - RNA, 18 nt, Human
caccccuccccucccucc

SEQ ID NO: 62714 - RNA, 21 nt, Human
caccccuccccucccuccgcc

SEQ ID NO: 62715 - RNA, 18 nt, Human
cccccuccacugcaccuc

SEQ ID NO: 62716 - RNA, 23 nt, Human
cccccuccacugcaccuccuggg

SEQ ID NO: 62717 - RNA, 24 nt, Human
cccuccacugcaccuccugggauc

SEQ ID NO: 62718 - RNA, 23 nt, Human
ccuccugggaucucuucccccuc

SEQ ID NO: 62719 - RNA, 21 nt, Human
ccugggaucucuucccccucc

SEQ ID NO: 62720 - RNA, 21 nt, Human
ccuggggaaagaacacagggc

SEQ ID NO: 62721 - RNA, 24 nt, Human
cggugagcaacuuuggggcgaggg

SEQ ID NO: 62722 - RNA, 21 nt, Human
cucccuccgcccgccccugcc

SEQ ID NO: 62723 - RNA, 19 nt, Human
cuccgcccgccccugcccc

SEQ ID NO: 62724 - RNA, 21 nt, Human
cugcccccuacguggaugccc

SEQ ID NO: 62725 - RNA, 22 nt, Human
gaucucuucccccuccaagcac

SEQ ID NO: 62726 - RNA, 21 nt, Human
gccccuggggaaagaacacag

SEQ ID NO: 62727 - RNA, 23 nt, Human
gcugcaggccuguagagcucugc

SEQ ID NO: 62728 - RNA, 21 nt, Human
ggaaagagcagcccuggucua

SEQ ID NO: 62729 - RNA, 23 nt, Human
ggagcaaagcuugcccccuccaa

SEQ ID NO: 62730 - RNA, 19 nt, Human
ggggaagugacuuuggcca

SEQ ID NO: 62731 - RNA, 20 nt, Human
ggggaagugacuuuggccag

SEQ ID NO: 62732 - RNA, 21 nt, Human
guuaggaaaagaaggagggcc

SEQ ID NO: 62733 - RNA, 18 nt, Human
uagagcucugccgguccc

SEQ ID NO: 62734 - RNA, 27 nt, Human
uagcaggugggucccuuucuuucaccu

SEQ ID NO: 62735 - RNA, 18 nt, Human
ucaccccuccccucccuc

SEQ ID NO: 62736 - RNA, 19 nt, Human
ucaggcaguaaguccgagc

SEQ ID NO: 62737 - RNA, 22 nt, Human
uccaaggucaggcaguaagucc

SEQ ID NO: 62738 - RNA, 24 nt, Human
ucccuuucuuucaccuccuccaca

SEQ ID NO: 62739 - RNA, 19 nt, Human
uccgcccgccccugccccu

SEQ ID NO: 62740 - RNA, 23 nt, Human
uccgcccgccccugccccugccc

SEQ ID NO: 62741 - RNA, 18 nt, Human
uccugggaucucuucccc

SEQ ID NO: 62742 - RNA, 23 nt, Human
uccugggaucucuucccccucca

SEQ ID NO: 62743 - RNA, 21 nt, Human
ugaaauuccaacuccaaagag

SEQ ID NO: 62744 - RNA, 23 nt, Human
ugaggggcgacuagcaggugggu

SEQ ID NO: 62745 - RNA, 19 nt, Human
ugagucggugagcaacuuu

SEQ ID NO: 62746 - RNA, 19 nt, Human
ugcagaaggaggucacuca

SEQ ID NO: 62747 - RNA, 24 nt, Human
ugccacuuugcagaaggaggucac

SEQ ID NO: 62748 - RNA, 21 nt, Human
uggaugcccgggccagacccc

SEQ ID NO: 62749 - RNA, 22 nt, Human
uggggaaagaacacagggcaag

SEQ ID NO: 62750 - RNA, 23 nt, Human
uucuuucaccuccuccacaacuu

SEQ ID NO: 62751 - RNA, 18 nt, Human
uuggccugagaccgcugc

SEQ ID NO: 62752 - RNA, 22 nt, Human
aaaccuguucacacucaggggc

SEQ ID NO: 62753 - RNA, 18 nt, Human
accaguugcaucauuccc

SEQ ID NO: 62754 - RNA, 22 nt, Human
acuucagacugcgggagaggag

SEQ ID NO: 62755 - RNA, 21 nt, Human
agagaacuuggggaugaacac

SEQ ID NO: 62756 - RNA, 26 nt, Human
agagaacuuggggaugaacacacuug

SEQ ID NO: 62757 - RNA, 21 nt, Human
agcagcuacucugcgcugggg

SEQ ID NO: 62758 - RNA, 19 nt, Human
aggcagggucuguacacuc

SEQ ID NO: 62759 - RNA, 21 nt, Human
aggcucaggcuccuccggcag

SEQ ID NO: 62760 - RNA, 19 nt, Human
aggggcaugcacaacucug

SEQ ID NO: 62761 - RNA, 18 nt, Human
agguuggggaggaagggg

SEQ ID NO: 62762 - RNA, 18 nt, Human
augcuccgggcacucgcu

SEQ ID NO: 62763 - RNA, 26 nt, Human
caacguaggcaaaccuguucacacuc

SEQ ID NO: 62764 - RNA, 22 nt, Human
caccugccucccuccccagcuc

SEQ ID NO: 62765 - RNA, 18 nt, Human
cacuccccacucaguacc

SEQ ID NO: 62766 - RNA, 24 nt, Human
cagaguuucccucuuaccacccac

SEQ ID NO: 62767 - RNA, 22 nt, Human
cagcacuggccugggcgcgcac

SEQ ID NO: 62768 - RNA, 18 nt, Human
cagccaugcacacuugca

SEQ ID NO: 62769 - RNA, 23 nt, Human
cagcucaguccccuaaguuuccc

SEQ ID NO: 62770 - RNA, 19 nt, Human
ccacccaccugccucccuc

SEQ ID NO: 62771 - RNA, 22 nt, Human
cccaccugccucccuccccagc

SEQ ID NO: 62772 - RNA, 18 nt, Human
cccccaaggcagggucug

SEQ ID NO: 62773 - RNA, 18 nt, Human
cccugcggggcuggccca

SEQ ID NO: 62774 - RNA, 19 nt, Human
ccuccggcagccuccuccc

SEQ ID NO: 62775 - RNA, 23 nt, Human
ccugcggggcuggcccagcuguc

SEQ ID NO: 62776 - RNA, 18 nt, Human
ccugggcgcgcacgucca

SEQ ID NO: 62777 - RNA, 22 nt, Human
ccugggcgcgcacguccaggaa

SEQ ID NO: 62778 - RNA, 18 nt, Human
cuaguaaaaccaguugca

SEQ ID NO: 62779 - RNA, 18 nt, Human
cuccccagcucagucccc

SEQ ID NO: 62780 - RNA, 21 nt, Human
cucugcgcuggggccaacuuc

SEQ ID NO: 62781 - RNA, 23 nt, Human
cugcaugugaggacaaaagagaa

SEQ ID NO: 62782 - RNA, 18 nt, Human
gcgggagaggagggacgg

SEQ ID NO: 62783 - RNA, 27 nt, Human
gcgggagaggagggacgggguggcccu

SEQ ID NO: 62784 - RNA, 18 nt, Human
ggagggacgggguggccc

SEQ ID NO: 62785 - RNA, 22 nt, Human
ggcaugcacaacucugcaugug

SEQ ID NO: 62786 - RNA, 21 nt, Human
ggcucaggcuccuccggcagc

SEQ ID NO: 62787 - RNA, 28 nt, Human
ucacagccucagggcaggggggaacgcc

SEQ ID NO: 62788 - RNA, 25 nt, Human
ucaggcuccuccggcagccuccucc

SEQ ID NO: 62789 - RNA, 19 nt, Human
ucccagaacccccaaggca

SEQ ID NO: 62790 - RNA, 20 nt, Human
ucccugaaaaaggcaggaga

SEQ ID NO: 62791 - RNA, 22 nt, Human
uccggcagccuccuccccgccu

SEQ ID NO: 62792 - RNA, 22 nt, Human
ucuccagaguuucccucuuacc

SEQ ID NO: 62793 - RNA, 18 nt, Human
ucugccucgggccucaca

SEQ ID NO: 62794 - RNA, 21 nt, Human
ugaaaaaggcaggagaagcca

SEQ ID NO: 62795 - RNA, 21 nt, Human
ugcacacuugcaccaacguag

SEQ ID NO: 62796 - RNA, 22 nt, Human
ugcagguuggggaggaaggggu

SEQ ID NO: 62797 - RNA, 19 nt, Human
ugccucgggccucacaagc

SEQ ID NO: 62798 - RNA, 19 nt, Human
ugccucgggccucacaagc

SEQ ID NO: 62799 - RNA, 22 nt, Human
ugcgggagaggagggacggggu

SEQ ID NO: 62800 - RNA, 19 nt, Human
uggcccagcugucucaggg

SEQ ID NO: 62801 - RNA, 21 nt, Human
ugggcgcgcacguccaggaag

SEQ ID NO: 62802 - RNA, 22 nt, Human
uggggaggaaggggugcaaggg

SEQ ID NO: 62803 - RNA, 25 nt, Human
acacacacacaccccugcacacaca

SEQ ID NO: 62804 - RNA, 23 nt, Human
acacacaugcacacacacacaua

SEQ ID NO: 62805 - RNA, 27 nt, Human
acacacaugcacacacaugcacacaca

SEQ ID NO: 62806 - RNA, 27 nt, Human
acacacaugcacacacaugcacacaca

SEQ ID NO: 62807 - RNA, 30 nt, Human
acacacaugcacacacaugcacacacacag

SEQ ID NO: 62808 - RNA, 30 nt, Human
acacacaugcacacacaugcacacacaugg

SEQ ID NO: 62809 - RNA, 23 nt, Human
acacaugcacacacaugcacaca

SEQ ID NO: 62810 - RNA, 18 nt, Human
accccccccacacacaca

SEQ ID NO: 62811 - RNA, 19 nt, Human
acccuggaacuuuccucuc

SEQ ID NO: 62812 - RNA, 22 nt, Human
acccuggaacuuuccucuccuu

SEQ ID NO: 62813 - RNA, 24 nt, Human
agacaaaaggauguauugacccaa

SEQ ID NO: 62814 - RNA, 21 nt, Human
aggccagggcagcggaguggg

SEQ ID NO: 62815 - RNA, 18 nt, Human
aggcggcggcgcugucgg

SEQ ID NO: 62816 - RNA, 21 nt, Human
agggagcuccuuagccugaaa

SEQ ID NO: 62817 - RNA, 24 nt, Human
augcacacacacacauaccugcug

SEQ ID NO: 62818 - RNA, 24 nt, Human
caauagccagaaucccuuccgacc

SEQ ID NO: 62819 - RNA, 20 nt, Human
cacacacaugcacacacaca

SEQ ID NO: 62820 - RNA, 29 nt, Human
cacacacaugcacacacacacauaccugg

SEQ ID NO: 62821 - RNA, 25 nt, Human
cacacacaugcacacacaugcacac

SEQ ID NO: 62822 - RNA, 25 nt, Human
cacacacaugcacacacaugcacac

SEQ ID NO: 62823 - RNA, 23 nt, Human
cacagauggacaggcugccuucc

SEQ ID NO: 62824 - RNA, 26 nt, Human
caugcacacacaugcacacacacaca

SEQ ID NO: 62825 - RNA, 26 nt, Human
caugcacacacaugcacacacaugca

SEQ ID NO: 62826 - RNA, 22 nt, Human
cauucucuucccuugggagaca

SEQ ID NO: 62827 - RNA, 31 nt, Human
cccacacacacacaccccugcacacacaugg

SEQ ID NO: 62828 - RNA, 25 nt, Human
cccacacacacacaccccugcacag

SEQ ID NO: 62829 - RNA, 23 nt, Human
cccacacacacacaccccugcag

SEQ ID NO: 62830 - RNA, 19 nt, Human
ccccugaaacauacacacc

SEQ ID NO: 62831 - RNA, 22 nt, Human
ccugaaacauacacacccugga

SEQ ID NO: 62832 - RNA, 26 nt, Human
ccugcacacacaugcacacacaugca

SEQ ID NO: 62833 - RNA, 26 nt, Human
ccugcacacacaugcacacacauggu

SEQ ID NO: 62834 - RNA, 21 nt, Human
ccugcugcccauucucuuccc

SEQ ID NO: 62835 - RNA, 22 nt, Human
ccuugcccugaauaucugggaa

SEQ ID NO: 62836 - RNA, 24 nt, Human
ccuugcccugaauaucugggaacc

SEQ ID NO: 62837 - RNA, 25 nt, Human
cgggcagggguggcgggaggcggug

SEQ ID NO: 62838 - RNA, 21 nt, Human
cggggcaggcggcggcgcugu

SEQ ID NO: 62839 - RNA, 20 nt, Human
cucaaggccagggcagcgga

SEQ ID NO: 62840 - RNA, 18 nt, Human
cugcagcuccuccaugug

SEQ ID NO: 62841 - RNA, 22 nt, Human
gcagcuccuccaugugaagccc

SEQ ID NO: 62842 - RNA, 19 nt, Human
gccuuccccugucucuggg

SEQ ID NO: 62843 - RNA, 21 nt, Human
gcggaguggggagauggcccc

SEQ ID NO: 62844 - RNA, 22 nt, Human
gcugucgggcgggcaggggugg

SEQ ID NO: 62845 - RNA, 23 nt, Human
ggcagggguggcgggaggcggug

SEQ ID NO: 62846 - RNA, 23 nt, Human
gggaggcgguggcgcagcgagca

SEQ ID NO: 62847 - RNA, 20 nt, Human
gggcagggguggcgggaggc

SEQ ID NO: 62848 - RNA, 18 nt, Human
gguccaguggaaauccug

SEQ ID NO: 62849 - RNA, 23 nt, Human
uauugacccaaauuccgguucca

SEQ ID NO: 62850 - RNA, 23 nt, Human
ucccccaauagccagaaucccuu

SEQ ID NO: 62851 - RNA, 23 nt, Human
ugaagccccugaaacauacacac

SEQ ID NO: 62852 - RNA, 19 nt, Human
ugcccauucucuucccuug

SEQ ID NO: 62853 - RNA, 21 nt, Human
ugcucaaggccagggcagcgg

SEQ ID NO: 62854 - RNA, 23 nt, Human
uggaugcucaaggccagggcagc

SEQ ID NO: 62855 - RNA, 18 nt, Human
ugggagacaaaaggaugu

SEQ ID NO: 62856 - RNA, 20 nt, Human
ugggagacaaaaggauguau

SEQ ID NO: 62857 - RNA, 21 nt, Human
uguauugacccaaauuccggu

SEQ ID NO: 62858 - RNA, 20 nt, Human
uuccccugucucugggcucc

SEQ ID NO: 62859 - RNA, 21 nt, Human
uuccccugucucugggcuccc

SEQ ID NO: 62860 - RNA, 24 nt, Human
uugggcaagguccaguggaaaucu

SEQ ID NO: 62861 - RNA, 21 nt, Human
aacaaaccugcacauuucuaa

SEQ ID NO: 62862 - RNA, 24 nt, Human
acaaaucuguuuccuuaaugggug

SEQ ID NO: 62863 - RNA, 23 nt, Human
agugcagcucucauugccugccc

SEQ ID NO: 62864 - RNA, 24 nt, Human
caggcaagacuuaaccaaaucuug

SEQ ID NO: 62865 - RNA, 20 nt, Human
gaaggaaaucugaggacagu

SEQ ID NO: 62866 - RNA, 19 nt, Human
guuucuuccguuccuccuu

SEQ ID NO: 62867 - RNA, 21 nt, Human
uaauaugacaugaaacaacaa

SEQ ID NO: 62868 - RNA, 21 nt, Human
uaauggguggaaggaaaucug

SEQ ID NO: 62869 - RNA, 20 nt, Human
uagguuucuuccguuccucc

SEQ ID NO: 62870 - RNA, 21 nt, Human
ugacuauaccaauauuccagu

SEQ ID NO: 62871 - RNA, 22 nt, Human
ugacuauaccaauauuccagua

SEQ ID NO: 62872 - RNA, 20 nt, Human
ugaggacaguucuaaggagu

SEQ ID NO: 62873 - RNA, 23 nt, Human
uucuaaggagucuugucugcuuu

SEQ ID NO: 62874 - RNA, 18 nt, Human
agguggaugcggcggggg

SEQ ID NO: 62875 - RNA, 25 nt, Human
agguggaugcggcgggggcgggggc

SEQ ID NO: 62876 - RNA, 19 nt, Human
augcggcgggggcgggggc

SEQ ID NO: 62877 - RNA, 21 nt, Human
augcggcgggggcgggggccu

SEQ ID NO: 62878 - RNA, 24 nt, Human
caaccccggcgcgacccccgcccc

SEQ ID NO: 62879 - RNA, 18 nt, Human
cagccgccggcccguccg

SEQ ID NO: 62880 - RNA, 18 nt, Human
cagguuggcucccgcgcu

SEQ ID NO: 62881 - RNA, 24 nt, Human
cccccggccggggcagccgccggc

SEQ ID NO: 62882 - RNA, 19 nt, Human
cccgccccccggccggggc

SEQ ID NO: 62883 - RNA, 22 nt, Human
cccggcgcgacccccgcccccc

SEQ ID NO: 62884 - RNA, 20 nt, Human
ccgcugcgggcccgccgcuc

SEQ ID NO: 62885 - RNA, 21 nt, Human
ccgcugcgggcccgccgcucu

SEQ ID NO: 62886 - RNA, 22 nt, Human
ccgcugcgggcccgccgcucuc

SEQ ID NO: 62887 - RNA, 22 nt, Human
ccgucguccagcgcaaccccgg

SEQ ID NO: 62888 - RNA, 20 nt, Human
cggaggagguggaugcggcg

SEQ ID NO: 62889 - RNA, 21 nt, Human
cggcccagcgucccgggcccu

SEQ ID NO: 62890 - RNA, 19 nt, Human
cggcgcgacccccgccccc

SEQ ID NO: 62891 - RNA, 23 nt, Human
cggcgcgggggggcagggggcgg

SEQ ID NO: 62892 - RNA, 21 nt, Human
cggcgggggcgggggccuggc

SEQ ID NO: 62893 - RNA, 18 nt, Human
cggggccggcgcgggggg

SEQ ID NO: 62894 - RNA, 21 nt, Human
gcacugucccgcgcccacucc

SEQ ID NO: 62895 - RNA, 24 nt, Human
gcccggcgcgagcugccggcgggg

SEQ ID NO: 62896 - RNA, 19 nt, Human
gcgcggcgcggguugggag

SEQ ID NO: 62897 - RNA, 22 nt, Human
gcggccuggcgcgggcccugcu

SEQ ID NO: 62898 - RNA, 18 nt, Human
gcgggcggccgggcgcgg

SEQ ID NO: 62899 - RNA, 18 nt, Human
ggccggggcagccgccgg

SEQ ID NO: 62900 - RNA, 22 nt, Human
ggcgccgcgcacugucccgcgc

SEQ ID NO: 62901 - RNA, 20 nt, Human
ggcgcgacccccgccccccg

SEQ ID NO: 62902 - RNA, 20 nt, Human
ggcgcggggccggcgcgggg

SEQ ID NO: 62903 - RNA, 20 nt, Human
ggcgcgggggggcagggggc

SEQ ID NO: 62904 - RNA, 18 nt, Human
ggcggccgggcgcggggc

SEQ ID NO: 62905 - RNA, 18 nt, Human
ggcggcggaggaggugga

SEQ ID NO: 62906 - RNA, 22 nt, Human
ggcuggcggccuggcgcgggcc

SEQ ID NO: 62907 - RNA, 26 nt, Human
gggaggcuccaggccgcugcgggccc

SEQ ID NO: 62908 - RNA, 19 nt, Human
gggccagcgcggcgcgggu

SEQ ID NO: 62909 - RNA, 20 nt, Human
ggggcgggggccuggcugcg

SEQ ID NO: 62910 - RNA, 19 nt, Human
gggucgcaggcggcggagg

SEQ ID NO: 62911 - RNA, 21 nt, Human
uccaggccgcugcgggcccgc

SEQ ID NO: 62912 - RNA, 24 nt, Human
ucccugggagacggggcucggucc

SEQ ID NO: 62913 - RNA, 21 nt, Human
uccgaccucggggcgucuagc

SEQ ID NO: 62914 - RNA, 23 nt, Human
ucgcaggcggcggaggaggugga

SEQ ID NO: 62915 - RNA, 19 nt, Human
ugcgggcccgccgcucucc

SEQ ID NO: 62916 - RNA, 21 nt, Human
uggcgcgggcccugcuggggc

SEQ ID NO: 62917 - RNA, 18 nt, Human
uggcucccgcgcucuccu

SEQ ID NO: 62918 - RNA, 19 nt, Human
uggcucccgcgcucuccuc

SEQ ID NO: 62919 - RNA, 21 nt, Human
aaaccacacccaaggucagag

SEQ ID NO: 62920 - RNA, 21 nt, Human
aaaccacacccaaggucagag

SEQ ID NO: 62921 - RNA, 27 nt, Human
aaaccacacccaaggucagagaaacac

SEQ ID NO: 62922 - RNA, 25 nt, Human
aaagaucuauugguagagcagucuc

SEQ ID NO: 62923 - RNA, 25 nt, Human
aaagaucuauugguagagcagucuc

SEQ ID NO: 62924 - RNA, 18 nt, Human
aaauauaccccccaaaac

SEQ ID NO: 62925 - RNA, 18 nt, Human
aaauauaccccccaaaac

SEQ ID NO: 62926 - RNA, 23 nt, Human
aaauccccugccuuccucugcuc

SEQ ID NO: 62927 - RNA, 23 nt, Human
aaauccccugccuuccucugcuc

SEQ ID NO: 62928 - RNA, 24 nt, Human
aacagaucaagauucugucucaaa

SEQ ID NO: 62929 - RNA, 22 nt, Human
aaccucccccucccgccacccc

SEQ ID NO: 62930 - RNA, 22 nt, Human
aaccucccuuccucuaucccac

SEQ ID NO: 62931 - RNA, 22 nt, Human
aaccucccuuccucuaucccac

SEQ ID NO: 62932 - RNA, 20 nt, Human
aagcgaagacacagagcacc

SEQ ID NO: 62933 - RNA, 24 nt, Human
aaggaggaaauauaccccccaaaa

SEQ ID NO: 62934 - RNA, 20 nt, Human
aaggauugugaacacugcca

SEQ ID NO: 62935 - RNA, 18 nt, Human
aagguggaacacagaugg

SEQ ID NO: 62936 - RNA, 18 nt, Human
aaguucccuccuccacuc

SEQ ID NO: 62937 - RNA, 23 nt, Human
aaguucccuccuccacucccacc

SEQ ID NO: 62938 - RNA, 22 nt, Human
aaguuugaaaauugguccagcc

SEQ ID NO: 62939 - RNA, 20 nt, Human
aauaugaugaaaccccaucu

SEQ ID NO: 62940 - RNA, 20 nt, Human
aauaugaugaaaccccaucu

SEQ ID NO: 62941 - RNA, 21 nt, Human
aauaugaugaaaccccaucuc

SEQ ID NO: 62942 - RNA, 24 nt, Human
aaucccuugaacccaggagguaga

SEQ ID NO: 62943 - RNA, 24 nt, Human
aaucccuugaacccaggagguaga

SEQ ID NO: 62944 - RNA, 24 nt, Human
aaugggacaaauucacucccagau

SEQ ID NO: 62945 - RNA, 22 nt, Human
acaccacaccgugcccguaaac

SEQ ID NO: 62946 - RNA, 19 nt, Human
acacuguggccugcagcug

SEQ ID NO: 62947 - RNA, 23 nt, Human
acagaucaagauucugucucaaa

SEQ ID NO: 62948 - RNA, 24 nt, Human
acagaucaagauucugucucaaaa

SEQ ID NO: 62949 - RNA, 24 nt, Human
acagaucaagauucugucucaaaa

SEQ ID NO: 62950 - RNA, 23 nt, Human
acagcagucccuggaggaggauu

SEQ ID NO: 62951 - RNA, 24 nt, Human
acccaggagguagagguugcagug

SEQ ID NO: 62952 - RNA, 24 nt, Human
acccaggagguagagguugcagug

SEQ ID NO: 62953 - RNA, 24 nt, Human
accccaucucuacuaaaaauacaa

SEQ ID NO: 62954 - RNA, 24 nt, Human
accccaucucuacuaaaaauacaa

SEQ ID NO: 62955 - RNA, 21 nt, Human
acccugggcuuuugcucucug

SEQ ID NO: 62956 - RNA, 23 nt, Human
accucccccucccgccaccccag

SEQ ID NO: 62957 - RNA, 27 nt, Human
acucccaccuauacccgcacucacaga

SEQ ID NO: 62958 - RNA, 21 nt, Human
acuccuacgggguccaguggg

SEQ ID NO: 62959 - RNA, 21 nt, Human
acuccuacgggguccaguggg

SEQ ID NO: 62960 - RNA, 24 nt, Human
acugcacuccagccuggguaacag

SEQ ID NO: 62961 - RNA, 24 nt, Human
acugcacuccagccuggguaacag

SEQ ID NO: 62962 - RNA, 24 nt, Human
acuuugggaggccgaggugggcag

SEQ ID NO: 62963 - RNA, 23 nt, Human
agaaacacccccaggagcucaga

SEQ ID NO: 62964 - RNA, 23 nt, Human
agaaacacccccaggagcucaga

SEQ ID NO: 62965 - RNA, 23 nt, Human
agagaaacacccccaggagcuca

SEQ ID NO: 62966 - RNA, 23 nt, Human
agagaaacacccccaggagcuca

SEQ ID NO: 62967 - RNA, 22 nt, Human
agagcagucucuguccucagga

SEQ ID NO: 62968 - RNA, 22 nt, Human
agagcagucucuguccucagga

SEQ ID NO: 62969 - RNA, 24 nt, Human
agaggccgggcacgguggcucacg

SEQ ID NO: 62970 - RNA, 18 nt, Human
agagguugcagugagccg

SEQ ID NO: 62971 - RNA, 18 nt, Human
agagguugcagugagccg

SEQ ID NO: 62972 - RNA, 23 nt, Human
agagguugcagugagccgagauc

SEQ ID NO: 62973 - RNA, 23 nt, Human
agagguugcagugagccgagauc

SEQ ID NO: 62974 - RNA, 24 nt, Human
agagguugcagugagccgagauca

SEQ ID NO: 62975 - RNA, 24 nt, Human
agagguugcagugagccgagauca

SEQ ID NO: 62976 - RNA, 20 nt, Human
agagugggcugugggguggg

SEQ ID NO: 62977 - RNA, 20 nt, Human
agagugggcugugggguggg

SEQ ID NO: 62978 - RNA, 20 nt, Human
agauccccggccugcuucag

SEQ ID NO: 62979 - RNA, 23 nt, Human
agaucgccucaggucaggaguuu

SEQ ID NO: 62980 - RNA, 23 nt, Human
agaucgccucaggucaggaguuu

SEQ ID NO: 62981 - RNA, 24 nt, Human
agcacuuugggaggccgagguggg

SEQ ID NO: 62982 - RNA, 24 nt, Human
agcacuuugggaggccgagguggg

SEQ ID NO: 62983 - RNA, 18 nt, Human
agcaguugcuuaaccuca

SEQ ID NO: 62984 - RNA, 24 nt, Human
agccuggguaacagaucaagauuc

SEQ ID NO: 62985 - RNA, 24 nt, Human
agccuggguaacagaucaagauuc

SEQ ID NO: 62986 - RNA, 23 nt, Human
agcugggcgugguggcaggcgcc

SEQ ID NO: 62987 - RNA, 23 nt, Human
agcugggcgugguggcaggcgcc

SEQ ID NO: 62988 - RNA, 18 nt, Human
aggaacccaaggcgcggc

SEQ ID NO: 62989 - RNA, 20 nt, Human
aggaacccaaggcgcggcca

SEQ ID NO: 62990 - RNA, 21 nt, Human
aggaacccaaggcgcggccag

SEQ ID NO: 62991 - RNA, 21 nt, Human
aggagagggccuccaagucag

SEQ ID NO: 62992 - RNA, 23 nt, Human
aggagauuugggggaagaaggug

SEQ ID NO: 62993 - RNA, 23 nt, Human
aggaggaaauauaccccccaaaa

SEQ ID NO: 62994 - RNA, 20 nt, Human
aggaggagauuugggggaag

SEQ ID NO: 62995 - RNA, 19 nt, Human
aggcaggaacccaaggcgc

SEQ ID NO: 62996 - RNA, 23 nt, Human
aggcaggagaaucccuugaaccc

SEQ ID NO: 62997 - RNA, 23 nt, Human
aggcaggagaaucccuugaaccc

SEQ ID NO: 62998 - RNA, 24 nt, Human
aggcaggagaaucccuugaaccca

SEQ ID NO: 62999 - RNA, 21 nt, Human
aggccgaggugggcagaucgc

SEQ ID NO: 63000 - RNA, 21 nt, Human
aggccgaggugggcagaucgc

SEQ ID NO: 63001 - RNA, 22 nt, Human
aggccgggcacgguggcucacg

SEQ ID NO: 63002 - RNA, 24 nt, Human
aggcugaggcaggagaaucccuug

SEQ ID NO: 63003 - RNA, 24 nt, Human
aggcugaggcaggagaaucccuug

SEQ ID NO: 63004 - RNA, 23 nt, Human
aggcugccucaagguggccccag

SEQ ID NO: 63005 - RNA, 24 nt, Human
aggggggcgaaggggaggggaagg

SEQ ID NO: 63006 - RNA, 21 nt, Human
agguagagguugcagugagcc

SEQ ID NO: 63007 - RNA, 24 nt, Human
agguagagguugcagugagccgag

SEQ ID NO: 63008 - RNA, 24 nt, Human
agguagagguugcagugagccgag

SEQ ID NO: 63009 - RNA, 21 nt, Human
aggugggcagaucgccucagg

SEQ ID NO: 63010 - RNA, 21 nt, Human
aggugggcagaucgccucagg

SEQ ID NO: 63011 - RNA, 22 nt, Human
aggugggcagaucgccucaggu

SEQ ID NO: 63012 - RNA, 22 nt, Human
aggugggcagaucgccucaggu

SEQ ID NO: 63013 - RNA, 24 nt, Human
agugaguggugcuccucccacccc

SEQ ID NO: 63014 - RNA, 21 nt, Human
aucaccuuguccaccucccag

SEQ ID NO: 63015 - RNA, 24 nt, Human
aucaugccacugcacuccagccug

SEQ ID NO: 63016 - RNA, 24 nt, Human
aucaugccacugcacuccagccug

SEQ ID NO: 63017 - RNA, 24 nt, Human
aucgccucaggucaggaguuugag

SEQ ID NO: 63018 - RNA, 18 nt, Human
augaggccacugaaagga

SEQ ID NO: 63019 - RNA, 21 nt, Human
augccacugcacuccagccug

SEQ ID NO: 63020 - RNA, 22 nt, Human
augccacugcacuccagccugg

SEQ ID NO: 63021 - RNA, 20 nt, Human
augccugcuccagccugagc

SEQ ID NO: 63022 - RNA, 21 nt, Human
augggcuuaugcauguguaug

SEQ ID NO: 63023 - RNA, 21 nt, Human
caaaaguaaccucccccuccc

SEQ ID NO: 63024 - RNA, 22 nt, Human
caaaaguaaccucccccucccg

SEQ ID NO: 63025 - RNA, 24 nt, Human
caagacaggcaccucagcaccugc

SEQ ID NO: 63026 - RNA, 21 nt, Human
caagaggagcggagagaccug

SEQ ID NO: 63027 - RNA, 19 nt, Human
caagcuuuaagcucauuca

SEQ ID NO: 63028 - RNA, 21 nt, Human
caaggacgcuguggacacugu

SEQ ID NO: 63029 - RNA, 19 nt, Human
caccagcugcagggucaga

SEQ ID NO: 63030 - RNA, 18 nt, Human
caccuguggcuuucaggc

SEQ ID NO: 63031 - RNA, 21 nt, Human
caccuuguccaccucccagcu

SEQ ID NO: 63032 - RNA, 24 nt, Human
cacgccuguaaucccagcacuuug

SEQ ID NO: 63033 - RNA, 24 nt, Human
cacgccuguaaucccagcacuuug

SEQ ID NO: 63034 - RNA, 18 nt, Human
cacugcacuccagccugg

SEQ ID NO: 63035 - RNA, 19 nt, Human
cacugcacuccagccuggg

SEQ ID NO: 63036 - RNA, 19 nt, Human
cacugcacuccagccuggg

SEQ ID NO: 63037 - RNA, 19 nt, Human
cacugcacuccagccuggg

SEQ ID NO: 63038 - RNA, 19 nt, Human
cacugcacuccagccuggg

SEQ ID NO: 63039 - RNA, 22 nt, Human
cacugcacuccagccuggguaa

SEQ ID NO: 63040 - RNA, 22 nt, Human
cacugcacuccagccuggguaa

SEQ ID NO: 63041 - RNA, 23 nt, Human
cacugcacuccagccuggguaac

SEQ ID NO: 63042 - RNA, 23 nt, Human
cacugcacuccagccuggguaac

SEQ ID NO: 63043 - RNA, 24 nt, Human
cacugcacuccagccuggguaaca

SEQ ID NO: 63044 - RNA, 24 nt, Human
cacugcacuccagccuggguaaca

SEQ ID NO: 63045 - RNA, 24 nt, Human
cagagaaacacccccaggagcuca

SEQ ID NO: 63046 - RNA, 21 nt, Human
cagaggcacugaaucucaaau

SEQ ID NO: 63047 - RNA, 21 nt, Human
cagauguccuuccuccugucc

SEQ ID NO: 63048 - RNA, 21 nt, Human
cagcacuuugggaggccgagg

SEQ ID NO: 63049 - RNA, 24 nt, Human
cagcacuuugggaggccgaggugg

SEQ ID NO: 63050 - RNA, 24 nt, Human
cagcacuuugggaggccgaggugg

SEQ ID NO: 63051 - RNA, 21 nt, Human
cagcagucccuggaggaggau

SEQ ID NO: 63052 - RNA, 21 nt, Human
cagccccucuguccgcucucc

SEQ ID NO: 63053 - RNA, 28 nt, Human
cagccugggacaagguccuucaccuccu

SEQ ID NO: 63054 - RNA, 24 nt, Human
cagcuacuugggaggcugaggcag

SEQ ID NO: 63055 - RNA, 24 nt, Human
cagcuacuugggaggcugaggcag

SEQ ID NO: 63056 - RNA, 22 nt, Human
cagcuuucuggggauccuguaa

SEQ ID NO: 63057 - RNA, 22 nt, Human
cagcuuucuggggauccuguaa

SEQ ID NO: 63058 - RNA, 26 nt, Human
cagcuuucuggggauccuguaaugcu

SEQ ID NO: 63059 - RNA, 26 nt, Human
cagcuuucuggggauccuguaaugcu

SEQ ID NO: 63060 - RNA, 19 nt, Human
caggaagcccccagucuga

SEQ ID NO: 63061 - RNA, 19 nt, Human
caggaagcccccagucuga

SEQ ID NO: 63062 - RNA, 26 nt, Human
caggacaaaaggucaagccucccccu

SEQ ID NO: 63063 - RNA, 24 nt, Human
caggaggcuugcuugagaggagac

SEQ ID NO: 63064 - RNA, 21 nt, Human
caguggacugugaacuuccca

SEQ ID NO: 63065 - RNA, 20 nt, Human
caucuggggucaggacuccc

SEQ ID NO: 63066 - RNA, 20 nt, Human
caucuggggucaggacuccc

SEQ ID NO: 63067 - RNA, 19 nt, Human
caugacggagacacaugag

SEQ ID NO: 63068 - RNA, 22 nt, Human
ccaaaaccacacccaaggucag

SEQ ID NO: 63069 - RNA, 23 nt, Human
ccaaugaugauggcagggccgaa

SEQ ID NO: 63070 - RNA, 19 nt, Human
ccacacccaaggucagaga

SEQ ID NO: 63071 - RNA, 19 nt, Human
ccacacccaaggucagaga

SEQ ID NO: 63072 - RNA, 19 nt, Human
ccacccccagggagaaccu

SEQ ID NO: 63073 - RNA, 18 nt, Human
ccaccgccuggccaguug

SEQ ID NO: 63074 - RNA, 20 nt, Human
ccacugcacuccagccuggg

SEQ ID NO: 63075 - RNA, 20 nt, Human
ccacugcacuccagccuggg

SEQ ID NO: 63076 - RNA, 20 nt, Human
ccacugcacuccagccuggg

SEQ ID NO: 63077 - RNA, 20 nt, Human
ccacugcacuccagccuggg

SEQ ID NO: 63078 - RNA, 20 nt, Human
ccacugcacuccagccuggg

SEQ ID NO: 63079 - RNA, 21 nt, Human
ccacugcacuccagccugggu

SEQ ID NO: 63080 - RNA, 21 nt, Human
ccacugcacuccagccugggu

SEQ ID NO: 63081 - RNA, 22 nt, Human
ccacugcacuccagccugggua

SEQ ID NO: 63082 - RNA, 22 nt, Human
ccacugcacuccagccugggua

SEQ ID NO: 63083 - RNA, 24 nt, Human
ccacugcacuccagccuggguaac

SEQ ID NO: 63084 - RNA, 24 nt, Human
ccacugcacuccagccuggguaac

SEQ ID NO: 63085 - RNA, 21 nt, Human
ccacugccaccgccuggccag

SEQ ID NO: 63086 - RNA, 22 nt, Human
ccagacgcgggcucugcccacg

SEQ ID NO: 63087 - RNA, 24 nt, Human
ccagcacgugcccgaacccagcca

SEQ ID NO: 63088 - RNA, 20 nt, Human
ccagugguucaggaggcuug

SEQ ID NO: 63089 - RNA, 23 nt, Human
cccacaaaaccuggaaagcggac

SEQ ID NO: 63090 - RNA, 19 nt, Human
cccacccggauaguggggc

SEQ ID NO: 63091 - RNA, 18 nt, Human
cccaggcucugcagccgu

SEQ ID NO: 63092 - RNA, 22 nt, Human
cccauaucaccuuguccaccuc

SEQ ID NO: 63093 - RNA, 19 nt, Human
ccccaaaaccacacccaag

SEQ ID NO: 63094 - RNA, 19 nt, Human
ccccaaaaccacacccaag

SEQ ID NO: 63095 - RNA, 18 nt, Human
ccccacccagaagaccug

SEQ ID NO: 63096 - RNA, 25 nt, Human
ccccacccagaagaccugaggagaa

SEQ ID NO: 63097 - RNA, 19 nt, Human
ccccaccucuacggugccu

SEQ ID NO: 63098 - RNA, 19 nt, Human
cccccaaaaccacacccaa

SEQ ID NO: 63099 - RNA, 19 nt, Human
cccccaaguugugggcaga

SEQ ID NO: 63100 - RNA, 19 nt, Human
cccccaaguugugggcaga

SEQ ID NO: 63101 - RNA, 26 nt, Human
cccccaccugcagcuccuccaccacg

SEQ ID NO: 63102 - RNA, 26 nt, Human
cccccaccugcagcuccuccaccacg

SEQ ID NO: 63103 - RNA, 19 nt, Human
cccccagggagaaccucca

SEQ ID NO: 63104 - RNA, 19 nt, Human
ccccccaaaaccacaccca

SEQ ID NO: 63105 - RNA, 20 nt, Human
ccccccaaaaccacacccaa

SEQ ID NO: 63106 - RNA, 22 nt, Human
ccccccaaaaccacacccaagg

SEQ ID NO: 63107 - RNA, 23 nt, Human
ccccccaaaaccacacccaaggu

SEQ ID NO: 63108 - RNA, 19 nt, Human
cccccucccgccaccccag

SEQ ID NO: 63109 - RNA, 18 nt, Human
cccccucccgccaccccc

SEQ ID NO: 63110 - RNA, 20 nt, Human
ccccucucuucugcgcccca

SEQ ID NO: 63111 - RNA, 21 nt, Human
ccccucuguccgcucuccacc

SEQ ID NO: 63112 - RNA, 22 nt, Human
ccccuugcucucccugcccucc

SEQ ID NO: 63113 - RNA, 22 nt, Human
cccgccaccccagggagaaccu

SEQ ID NO: 63114 - RNA, 18 nt, Human
cccgccacccccagggag

SEQ ID NO: 63115 - RNA, 23 nt, Human
cccgccacccccagggagaaccu

SEQ ID NO: 63116 - RNA, 21 nt, Human
cccgcccccgccucuuuccuc

SEQ ID NO: 63117 - RNA, 20 nt, Human
cccuaagcaguugcuuaacc

SEQ ID NO: 63118 - RNA, 21 nt, Human
cccuaagcaguugcuuaaccu

SEQ ID NO: 63119 - RNA, 20 nt, Human
cccuccagcccaccugguca

SEQ ID NO: 63120 - RNA, 20 nt, Human
cccuccagcccaccugguca

SEQ ID NO: 63121 - RNA, 20 nt, Human
cccucucuuggccuuuccca

SEQ ID NO: 63122 - RNA, 19 nt, Human
cccugcccucccuggggcu

SEQ ID NO: 63123 - RNA, 24 nt, Human
cccugccuuccucugcucuguccc

SEQ ID NO: 63124 - RNA, 24 nt, Human
cccugccuuccucugcucuguccc

SEQ ID NO: 63125 - RNA, 25 nt, Human
cccuguguccuccacuccaccccca

SEQ ID NO: 63126 - RNA, 22 nt, Human
cccuuagggcuuauucaacagc

SEQ ID NO: 63127 - RNA, 22 nt, Human
cccuuagggcuuauucaacagc

SEQ ID NO: 63128 - RNA, 26 nt, Human
ccgcccccgccucuuuccucucacuu

SEQ ID NO: 63129 - RNA, 22 nt, Human
ccgccucuuuccucucacuucc

SEQ ID NO: 63130 - RNA, 22 nt, Human
ccgcugccugcuuccccagugc

SEQ ID NO: 63131 - RNA, 22 nt, Human
ccucaagguggccccaggggac

SEQ ID NO: 63132 - RNA, 18 nt, Human
ccucacccgcccccgccu

SEQ ID NO: 63133 - RNA, 23 nt, Human
ccucaggucaggaguuugagacc

SEQ ID NO: 63134 - RNA, 23 nt, Human
ccucaggucaggaguuugagacc

SEQ ID NO: 63135 - RNA, 22 nt, Human
ccucaucucagugauccccaca

SEQ ID NO: 63136 - RNA, 20 nt, Human
ccucccagcuggugagaacu

SEQ ID NO: 63137 - RNA, 18 nt, Human
ccucccgccaccccaggg

SEQ ID NO: 63138 - RNA, 24 nt, Human
ccucccgccaccccagggagaacc

SEQ ID NO: 63139 - RNA, 18 nt, Human
ccucccgccacccccagg

SEQ ID NO: 63140 - RNA, 25 nt, Human
ccucccgccacccccagggagaacc

SEQ ID NO: 63141 - RNA, 21 nt, Human
ccuccuggguuccuaccaccc

SEQ ID NO: 63142 - RNA, 21 nt, Human
ccuccuggguuccuaccaccc

SEQ ID NO: 63143 - RNA, 19 nt, Human
ccuccuguccacccaucuc

SEQ ID NO: 63144 - RNA, 20 nt, Human
ccucucuuggccuuucccag

SEQ ID NO: 63145 - RNA, 24 nt, Human
ccugaccaauaugaugaaacccca

SEQ ID NO: 63146 - RNA, 24 nt, Human
ccugaccaauaugaugaaacccca

SEQ ID NO: 63147 - RNA, 23 nt, Human
ccugaccucugcccagccuggga

SEQ ID NO: 63148 - RNA, 20 nt, Human
ccugaggagaaggaugucgu

SEQ ID NO: 63149 - RNA, 19 nt, Human
ccugaggucccuauagcuc

SEQ ID NO: 63150 - RNA, 19 nt, Human
ccugaggucccuauagcuc

SEQ ID NO: 63151 - RNA, 20 nt, Human
ccugcagcugcccuguggcc

SEQ ID NO: 63152 - RNA, 19 nt, Human
ccugcuucaggggguccug

SEQ ID NO: 63153 - RNA, 18 nt, Human
ccuggggcugagcccagg

SEQ ID NO: 63154 - RNA, 22 nt, Human
ccuguaaucccagcacuuuggg

SEQ ID NO: 63155 - RNA, 18 nt, Human
ccuguaaucccagcuacu

SEQ ID NO: 63156 - RNA, 21 nt, Human
ccuguaaucccagcuacuugg

SEQ ID NO: 63157 - RNA, 21 nt, Human
ccuguaaucccagcuacuugg

SEQ ID NO: 63158 - RNA, 21 nt, Human
ccuguccccaggacugugcug

SEQ ID NO: 63159 - RNA, 21 nt, Human
ccuguccccaggacugugcug

SEQ ID NO: 63160 - RNA, 21 nt, Human
ccuugccccuugcucucccug

SEQ ID NO: 63161 - RNA, 24 nt, Human
ccuugccuugcucuggggccucuu

SEQ ID NO: 63162 - RNA, 23 nt, Human
ccuugcucucccugcccucccug

SEQ ID NO: 63163 - RNA, 23 nt, Human
ccuugcucuggggccucuucucu

SEQ ID NO: 63164 - RNA, 21 nt, Human
ccuuguccccagcuagcucgg

SEQ ID NO: 63165 - RNA, 22 nt, Human
cgaagacacagagcaccagcug

SEQ ID NO: 63166 - RNA, 24 nt, Human
cgaggugggcagaucgccucaggu

SEQ ID NO: 63167 - RNA, 24 nt, Human
cgaggugggcagaucgccucaggu

SEQ ID NO: 63168 - RNA, 26 nt, Human
cgaggugggcagaucgccucagguca

SEQ ID NO: 63169 - RNA, 26 nt, Human
cgaggugggcagaucgccucagguca

SEQ ID NO: 63170 - RNA, 22 nt, Human
cgauccuaaauccccugccuuc

SEQ ID NO: 63171 - RNA, 22 nt, Human
cgauccuaaauccccugccuuc

SEQ ID NO: 63172 - RNA, 19 nt, Human
cgccacccccagggagaac

SEQ ID NO: 63173 - RNA, 25 nt, Human
cgccagggucuuggugucggggaac

SEQ ID NO: 63174 - RNA, 23 nt, Human
cgccuguaaucccagcacuuugg

SEQ ID NO: 63175 - RNA, 24 nt, Human
cgccuguaaucccagcacuuuggg

SEQ ID NO: 63176 - RNA, 23 nt, Human
cgccuguaaucccagcuacuugg

SEQ ID NO: 63177 - RNA, 24 nt, Human
cgccuguaaucccagcuacuuggg

SEQ ID NO: 63178 - RNA, 24 nt, Human
cgccuguaaucccagcuacuuggg

SEQ ID NO: 63179 - RNA, 24 nt, Human
cggaugggcuuaugcauguguaug

SEQ ID NO: 63180 - RNA, 18 nt, Human
cgggagagaaaaggaggg

SEQ ID NO: 63181 - RNA, 22 nt, Human
cgggagagaaaaggagggagaa

SEQ ID NO: 63182 - RNA, 22 nt, Human
cggggcugcauggcggcuccaa

SEQ ID NO: 63183 - RNA, 24 nt, Human
cggggcugcauggcggcuccaaga

SEQ ID NO: 63184 - RNA, 26 nt, Human
cguaaacccagaaaguaaguucccuc

SEQ ID NO: 63185 - RNA, 20 nt, Human
cgugcccguaaacccagaaa

SEQ ID NO: 63186 - RNA, 21 nt, Human
cguuagacagcuguggggacg

SEQ ID NO: 63187 - RNA, 24 nt, Human
cuagagcccagacccaggacuugu

SEQ ID NO: 63188 - RNA, 27 nt, Human
cucaaaccucccuuccucuaucccacc

SEQ ID NO: 63189 - RNA, 22 nt, Human
cucacgccuguaaucccagcac

SEQ ID NO: 63190 - RNA, 22 nt, Human
cucacgccuguaaucccagcac

SEQ ID NO: 63191 - RNA, 24 nt, Human
cucacgccuguaaucccagcacuu

SEQ ID NO: 63192 - RNA, 24 nt, Human
cucacgccuguaaucccagcacuu

SEQ ID NO: 63193 - RNA, 18 nt, Human
cucaucucagugaucccc

SEQ ID NO: 63194 - RNA, 19 nt, Human
cuccacccccaucuggcua

SEQ ID NO: 63195 - RNA, 22 nt, Human
cuccagaaagccuguccucucu

SEQ ID NO: 63196 - RNA, 22 nt, Human
cuccagaaagccuguccucucu

SEQ ID NO: 63197 - RNA, 21 nt, Human
cuccagccugagcugaccuga

SEQ ID NO: 63198 - RNA, 21 nt, Human
cuccagccugagcugaccuga

SEQ ID NO: 63199 - RNA, 21 nt, Human
cucccagauucuaccuagaac

SEQ ID NO: 63200 - RNA, 22 nt, Human
cuccuccacucccaccuauacc

SEQ ID NO: 63201 - RNA, 20 nt, Human
cuccuggguuccuaccaccc

SEQ ID NO: 63202 - RNA, 20 nt, Human
cuccuggguuccuaccaccc

SEQ ID NO: 63203 - RNA, 23 nt, Human
cucuccccauaucaccuugucca

SEQ ID NO: 63204 - RNA, 24 nt, Human
cucugugucaguucuucucaaggg

SEQ ID NO: 63205 - RNA, 24 nt, Human
cucugugucaguucuucucaaggg

SEQ ID NO: 63206 - RNA, 21 nt, Human
cucuguuccucuggucucuga

SEQ ID NO: 63207 - RNA, 26 nt, Human
cugacaccacaccgugcccguaaacc

SEQ ID NO: 63208 - RNA, 22 nt, Human
cugcagccguggcuggggccug

SEQ ID NO: 63209 - RNA, 23 nt, Human
cugcagccguggcuggggccugg

SEQ ID NO: 63210 - RNA, 18 nt, Human
cugccccugccccugucc

SEQ ID NO: 63211 - RNA, 19 nt, Human
cugccccugccccuguccc

SEQ ID NO: 63212 - RNA, 19 nt, Human
cugccuagggcugccuguc

SEQ ID NO: 63213 - RNA, 21 nt, Human
cuggcccccuccauaucuagg

SEQ ID NO: 63214 - RNA, 21 nt, Human
cuggggcugagcccaggcucu

SEQ ID NO: 63215 - RNA, 19 nt, Human
cugucucaaaacaaacaaa

SEQ ID NO: 63216 - RNA, 19 nt, Human
cugucucaaaacaaacaaa

SEQ ID NO: 63217 - RNA, 24 nt, Human
cugucugggcucccauuccuuucu

SEQ ID NO: 63218 - RNA, 19 nt, Human
cuguggggugggagcuggg

SEQ ID NO: 63219 - RNA, 19 nt, Human
cuguggggugggagcuggg

SEQ ID NO: 63220 - RNA, 24 nt, Human
cuucaggggcuccgccccugcccc

SEQ ID NO: 63221 - RNA, 22 nt, Human
cuuccucuaucccaccucucua

SEQ ID NO: 63222 - RNA, 22 nt, Human
cuuccucuaucccaccucucua

SEQ ID NO: 63223 - RNA, 24 nt, Human
cuugcuccaggccuggcuuccugu

SEQ ID NO: 63224 - RNA, 23 nt, Human
cuuugggaggccgaggugggcag

SEQ ID NO: 63225 - RNA, 23 nt, Human
gagaucaugccacugcacuccag

SEQ ID NO: 63226 - RNA, 23 nt, Human
gagaucaugccacugcacuccag

SEQ ID NO: 63227 - RNA, 24 nt, Human
gaucgccucaggucaggaguuuga

SEQ ID NO: 63228 - RNA, 24 nt, Human
gaucgccucaggucaggaguuuga

SEQ ID NO: 63229 - RNA, 20 nt, Human
gaugugggggcugucucugg

SEQ ID NO: 63230 - RNA, 20 nt, Human
gaugugggggcugucucugg

SEQ ID NO: 63231 - RNA, 19 nt, Human
gcagcuccuccaccacgcu

SEQ ID NO: 63232 - RNA, 19 nt, Human
gcagcuccuccaccacgcu

SEQ ID NO: 63233 - RNA, 22 nt, Human
gcaggagaaucccuugaaccca

SEQ ID NO: 63234 - RNA, 22 nt, Human
gcaggagaaucccuugaaccca

SEQ ID NO: 63235 - RNA, 19 nt, Human
gccacugcacuccagccug

SEQ ID NO: 63236 - RNA, 19 nt, Human
gccacugcacuccagccug

SEQ ID NO: 63237 - RNA, 24 nt, Human
gccacugcacuccagccuggguaa

SEQ ID NO: 63238 - RNA, 24 nt, Human
gccacugcacuccagccuggguaa

SEQ ID NO: 63239 - RNA, 23 nt, Human
gcccccaccugcagcuccuccac

SEQ ID NO: 63240 - RNA, 18 nt, Human
gccccugccccugccccu

SEQ ID NO: 63241 - RNA, 19 nt, Human
gcccugggccuuggagccc

SEQ ID NO: 63242 - RNA, 20 nt, Human
gccgagaucaugccacugca

SEQ ID NO: 63243 - RNA, 20 nt, Human
gccgagaucaugccacugca

SEQ ID NO: 63244 - RNA, 22 nt, Human
gccucaucucagugauccccac

SEQ ID NO: 63245 - RNA, 23 nt, Human
gccuguaaucccagcuacuuggg

SEQ ID NO: 63246 - RNA, 23 nt, Human
gcucauauaccugcuccagccug

SEQ ID NO: 63247 - RNA, 18 nt, Human
gcucauaugccugcucca

SEQ ID NO: 63248 - RNA, 23 nt, Human
gcucauaugccugcuccagccug

SEQ ID NO: 63249 - RNA, 22 nt, Human
gcucccugaggucccuauagcu

SEQ ID NO: 63250 - RNA, 22 nt, Human
gcucccugaggucccuauagcu

SEQ ID NO: 63251 - RNA, 21 nt, Human
gcucucccugcccucccuggg

SEQ ID NO: 63252 - RNA, 21 nt, Human
gcugcccuguggccuugaagu

SEQ ID NO: 63253 - RNA, 19 nt, Human
gcuugcuugagaggagacu

SEQ ID NO: 63254 - RNA, 21 nt, Human
ggaaauauaccccccaaaacc

SEQ ID NO: 63255 - RNA, 21 nt, Human
ggaaauauaccccccaaaacc

SEQ ID NO: 63256 - RNA, 20 nt, Human
ggaaugagggguguugcuca

SEQ ID NO: 63257 - RNA, 20 nt, Human
ggaaugagggguguugcuca

SEQ ID NO: 63258 - RNA, 20 nt, Human
ggacccucucuuggccuuuc

SEQ ID NO: 63259 - RNA, 20 nt, Human
ggacggggcugcauggcggc

SEQ ID NO: 63260 - RNA, 22 nt, Human
ggacucccuguguccuccacuc

SEQ ID NO: 63261 - RNA, 19 nt, Human
ggagaagccgagauccaga

SEQ ID NO: 63262 - RNA, 19 nt, Human
ggagaagccgagauccaga

SEQ ID NO: 63263 - RNA, 21 nt, Human
ggagaaucccuugaacccagg

SEQ ID NO: 63264 - RNA, 21 nt, Human
ggagaaucccuugaacccagg

SEQ ID NO: 63265 - RNA, 23 nt, Human
ggaggccugugcagaggggucca

SEQ ID NO: 63266 - RNA, 22 nt, Human
ggagguagagguugcagugagc

SEQ ID NO: 63267 - RNA, 22 nt, Human
ggagguagagguugcagugagc

SEQ ID NO: 63268 - RNA, 23 nt, Human
ggcacgguggcucacgccuguaa

SEQ ID NO: 63269 - RNA, 23 nt, Human
ggcacgguggcucacgccuguaa

SEQ ID NO: 63270 - RNA, 25 nt, Human
ggcagaucgccucaggucaggaguu

SEQ ID NO: 63271 - RNA, 21 nt, Human
ggcaggcgccuguaaucccag

SEQ ID NO: 63272 - RNA, 24 nt, Human
ggcccccaccugcagcuccuccac

SEQ ID NO: 63273 - RNA, 19 nt, Human
ggccuggucuccucagcug

SEQ ID NO: 63274 - RNA, 24 nt, Human
ggcgccuguaaucccagcuacuug

SEQ ID NO: 63275 - RNA, 24 nt, Human
ggcgccuguaaucccagcuacuug

SEQ ID NO: 63276 - RNA, 21 nt, Human
ggcucacgccuguaaucccag

SEQ ID NO: 63277 - RNA, 19 nt, Human
ggcucugcagccguggcug

SEQ ID NO: 63278 - RNA, 22 nt, Human
ggcuucucuggcccccaccugc

SEQ ID NO: 63279 - RNA, 22 nt, Human
ggcuucucuggcccccaccugc

SEQ ID NO: 63280 - RNA, 26 nt, Human
gggcagaucgccucaggucaggaguu

SEQ ID NO: 63281 - RNA, 24 nt, Human
gggcgugguggcaggcgccuguaa

SEQ ID NO: 63282 - RNA, 24 nt, Human
gggcgugguggcaggcgccuguaa

SEQ ID NO: 63283 - RNA, 21 nt, Human
gggcuguggggugggagcugg

SEQ ID NO: 63284 - RNA, 21 nt, Human
gggcuguggggugggagcugg

SEQ ID NO: 63285 - RNA, 18 nt, Human
ggggaggggaaggaggaa

SEQ ID NO: 63286 - RNA, 21 nt, Human
ggggaugaugcuaauaauucc

SEQ ID NO: 63287 - RNA, 19 nt, Human
ggucaggacuccuacgggg

SEQ ID NO: 63288 - RNA, 21 nt, Human
ggucaggacuccuacgggguc

SEQ ID NO: 63289 - RNA, 19 nt, Human
ggucaggaguuugagacca

SEQ ID NO: 63290 - RNA, 19 nt, Human
ggucaggaguuugagacca

SEQ ID NO: 63291 - RNA, 18 nt, Human
ggugccuuggccguuccu

SEQ ID NO: 63292 - RNA, 24 nt, Human
gguggcaggcgccuguaaucccag

SEQ ID NO: 63293 - RNA, 24 nt, Human
gguggcaggcgccuguaaucccag

SEQ ID NO: 63294 - RNA, 23 nt, Human
gguggcucacgccuguaauccca

SEQ ID NO: 63295 - RNA, 23 nt, Human
gguggcucacgccuguaauccca

SEQ ID NO: 63296 - RNA, 24 nt, Human
gguggcucacgccuguaaucccag

SEQ ID NO: 63297 - RNA, 24 nt, Human
gguggcucacgccuguaaucccag

SEQ ID NO: 63298 - RNA, 19 nt, Human
guaaugccagggauagggc

SEQ ID NO: 63299 - RNA, 20 nt, Human
guaggggcagcccuucucca

SEQ ID NO: 63300 - RNA, 19 nt, Human
gucaccccacccaggagcu

SEQ ID NO: 63301 - RNA, 24 nt, Human
gucagacaaaaguaaccucccccu

SEQ ID NO: 63302 - RNA, 23 nt, Human
gugcauucccagguccuguucgu

SEQ ID NO: 63303 - RNA, 18 nt, Human
gugcccguaaacccagaa

SEQ ID NO: 63304 - RNA, 20 nt, Human
guggcucugggaccgcugcc

SEQ ID NO: 63305 - RNA, 21 nt, Human
guggcucugggaccgcugccu

SEQ ID NO: 63306 - RNA, 19 nt, Human
guggguaagaagcuggggc

SEQ ID NO: 63307 - RNA, 19 nt, Human
guggguaagaagcuggggc

SEQ ID NO: 63308 - RNA, 18 nt, Human
guguccuccacuccaccc

SEQ ID NO: 63309 - RNA, 24 nt, Human
guugcagugagccgagaucaugcc

SEQ ID NO: 63310 - RNA, 24 nt, Human
guugcagugagccgagaucaugcc

SEQ ID NO: 63311 - RNA, 23 nt, Human
uaaccucccccucccgccacccc

SEQ ID NO: 63312 - RNA, 21 nt, Human
uaaggggggcgaaggggaggg

SEQ ID NO: 63313 - RNA, 19 nt, Human
uaaguucccuccuccacuc

SEQ ID NO: 63314 - RNA, 21 nt, Human
uaaguucccuccuccacuccc

SEQ ID NO: 63315 - RNA, 19 nt, Human
uacagcaagaucacucaga

SEQ ID NO: 63316 - RNA, 22 nt, Human
uaccccccaaaaccacacccaa

SEQ ID NO: 63317 - RNA, 22 nt, Human
uaccccccaaaaccacacccaa

SEQ ID NO: 63318 - RNA, 20 nt, Human
uaccuaggagagggccucca

SEQ ID NO: 63319 - RNA, 20 nt, Human
uacucuggaccagacgcgga

SEQ ID NO: 63320 - RNA, 20 nt, Human
uagagcccagacccaggacu

SEQ ID NO: 63321 - RNA, 19 nt, Human
uagaucagugaggccagga

SEQ ID NO: 63322 - RNA, 20 nt, Human
uagccugagggucgcaggug

SEQ ID NO: 63323 - RNA, 19 nt, Human
uaugaugaaaccccaucuc

SEQ ID NO: 63324 - RNA, 19 nt, Human
uaugaugaaaccccaucuc

SEQ ID NO: 63325 - RNA, 20 nt, Human
ucaagauggcuucccgugcc

SEQ ID NO: 63326 - RNA, 20 nt, Human
ucagaggcugucccagggcc

SEQ ID NO: 63327 - RNA, 21 nt, Human
ucagaggcugucccagggccu

SEQ ID NO: 63328 - RNA, 23 nt, Human
ucagaggcugucccagggccuga

SEQ ID NO: 63329 - RNA, 19 nt, Human
ucaggggccccacccagaa

SEQ ID NO: 63330 - RNA, 19 nt, Human
ucaguucuucucaagggug

SEQ ID NO: 63331 - RNA, 19 nt, Human
ucaguucuucucaagggug

SEQ ID NO: 63332 - RNA, 21 nt, Human
ucaguucuucucaagggugac

SEQ ID NO: 63333 - RNA, 21 nt, Human
ucaguucuucucaagggugac

SEQ ID NO: 63334 - RNA, 23 nt, Human
ucaugccacugcacuccagccug

SEQ ID NO: 63335 - RNA, 23 nt, Human
ucaugccacugcacuccagccug

SEQ ID NO: 63336 - RNA, 28 nt, Human
uccagccugagcugaccugauggggugg

SEQ ID NO: 63337 - RNA, 28 nt, Human
uccagccugagcugaccugauggggugg

SEQ ID NO: 63338 - RNA, 18 nt, Human
uccagggcggguugggcc

SEQ ID NO: 63339 - RNA, 19 nt, Human
ucccagggccugauuccuc

SEQ ID NO: 63340 - RNA, 19 nt, Human
ucccagggccugauuccuc

SEQ ID NO: 63341 - RNA, 20 nt, Human
ucccagggccugauuccucc

SEQ ID NO: 63342 - RNA, 20 nt, Human
ucccagggccugauuccucc

SEQ ID NO: 63343 - RNA, 19 nt, Human
ucccaugucuaagcagagu

SEQ ID NO: 63344 - RNA, 19 nt, Human
ucccaugucuaagcagagu

SEQ ID NO: 63345 - RNA, 20 nt, Human
ucccauuccuuucuccccca

SEQ ID NO: 63346 - RNA, 20 nt, Human
ucccauuccuuucuccccca

SEQ ID NO: 63347 - RNA, 19 nt, Human
uccccacaaaaccuggaaa

SEQ ID NO: 63348 - RNA, 21 nt, Human
uccccagugccgacuugaucu

SEQ ID NO: 63349 - RNA, 23 nt, Human
ucccccaagacuugggcaucugg

SEQ ID NO: 63350 - RNA, 23 nt, Human
ucccccaagacuugggcaucugg

SEQ ID NO: 63351 - RNA, 27 nt, Human
uccccuucucuugacuucuucccuaua

SEQ ID NO: 63352 - RNA, 24 nt, Human
ucccugcagaagugaguggugcuc

SEQ ID NO: 63353 - RNA, 18 nt, Human
ucccuggggcugagccca

SEQ ID NO: 63354 - RNA, 21 nt, Human
ucccuggggcugagcccaggc

SEQ ID NO: 63355 - RNA, 18 nt, Human
ucccuguguccuccacuc

SEQ ID NO: 63356 - RNA, 20 nt, Human
ucccuguguguaguuaggag

SEQ ID NO: 63357 - RNA, 21 nt, Human
ucccuuugagugacugggacc

SEQ ID NO: 63358 - RNA, 19 nt, Human
uccuaaauccccugccuuc

SEQ ID NO: 63359 - RNA, 19 nt, Human
uccucuuccaucucucccc

SEQ ID NO: 63360 - RNA, 20 nt, Human
uccucuuccaucucucccca

SEQ ID NO: 63361 - RNA, 23 nt, Human
uccugaccucugcccagccuggg

SEQ ID NO: 63362 - RNA, 24 nt, Human
uccugaccucugcccagccuggga

SEQ ID NO: 63363 - RNA, 18 nt, Human
uccugggucccuccuggg

SEQ ID NO: 63364 - RNA, 18 nt, Human
uccugggucccuccuggg

SEQ ID NO: 63365 - RNA, 21 nt, Human
uccugggucccuccuggguuc

SEQ ID NO: 63366 - RNA, 21 nt, Human
uccugggucccuccuggguuc

SEQ ID NO: 63367 - RNA, 22 nt, Human
uccugggucccuccuggguucc

SEQ ID NO: 63368 - RNA, 22 nt, Human
uccugggucccuccuggguucc

SEQ ID NO: 63369 - RNA, 22 nt, Human
uccuggguggguaagaagcugg

SEQ ID NO: 63370 - RNA, 19 nt, Human
ucgccucaggucaggaguu

SEQ ID NO: 63371 - RNA, 24 nt, Human
ucgccucaggucaggaguuugaga

SEQ ID NO: 63372 - RNA, 24 nt, Human
ucgccucaggucaggaguuugaga

SEQ ID NO: 63373 - RNA, 21 nt, Human
ucuccagagcauuuggaggau

SEQ ID NO: 63374 - RNA, 21 nt, Human
ucuccagagcauuuggaggau

SEQ ID NO: 63375 - RNA, 21 nt, Human
ucuccucccgguccucuucca

SEQ ID NO: 63376 - RNA, 22 nt, Human
ucuccugaccucugcccagccu

SEQ ID NO: 63377 - RNA, 22 nt, Human
ucucuacuaaaaauacaaaaaa

SEQ ID NO: 63378 - RNA, 22 nt, Human
ucucuacuaaaaauacaaaaaa

SEQ ID NO: 63379 - RNA, 20 nt, Human
ucucugaucuccugucucuu

SEQ ID NO: 63380 - RNA, 22 nt, Human
ucucugaucuccugucucuucu

SEQ ID NO: 63381 - RNA, 20 nt, Human
ucucuggcccccaccugcag

SEQ ID NO: 63382 - RNA, 20 nt, Human
ucucuggcccccaccugcag

SEQ ID NO: 63383 - RNA, 21 nt, Human
ucugcagccguggcuggggcc

SEQ ID NO: 63384 - RNA, 24 nt, Human
ucuggucuucuugauucuuccugu

SEQ ID NO: 63385 - RNA, 24 nt, Human
ucuguggaggcuucucuggccccc

SEQ ID NO: 63386 - RNA, 24 nt, Human
ucuguggaggcuucucuggccccc

SEQ ID NO: 63387 - RNA, 24 nt, Human
ucuugccuugcucuggggccucuu

SEQ ID NO: 63388 - RNA, 19 nt, Human
ugaaaccccaucucuacua

SEQ ID NO: 63389 - RNA, 19 nt, Human
ugaaaccccaucucuacua

SEQ ID NO: 63390 - RNA, 19 nt, Human
ugaaguggaucccaaugag

SEQ ID NO: 63391 - RNA, 23 nt, Human
ugacaccacaccgugcccguaaa

SEQ ID NO: 63392 - RNA, 21 nt, Human
ugaccagggcuugcuccaggc

SEQ ID NO: 63393 - RNA, 23 nt, Human
ugaccagggcuugcuccaggccu

SEQ ID NO: 63394 - RNA, 23 nt, Human
ugacccaggucaugagucaaugg

SEQ ID NO: 63395 - RNA, 23 nt, Human
ugacccaggucaugagucaaugg

SEQ ID NO: 63396 - RNA, 24 nt, Human
ugacggagacacaugaggccaaga

SEQ ID NO: 63397 - RNA, 19 nt, Human
ugacugggacccucucuug

SEQ ID NO: 63398 - RNA, 21 nt, Human
ugagaaaauguucuucucugu

SEQ ID NO: 63399 - RNA, 21 nt, Human
ugagaaaauguucuucucugu

SEQ ID NO: 63400 - RNA, 22 nt, Human
ugagccgagaucaugccacugc

SEQ ID NO: 63401 - RNA, 22 nt, Human
ugagccgagaucaugccacugc

SEQ ID NO: 63402 - RNA, 21 nt, Human
ugaggaauaaagaccuauugg

SEQ ID NO: 63403 - RNA, 21 nt, Human
ugaggaauaaagaccuauugg

SEQ ID NO: 63404 - RNA, 19 nt, Human
ugaggcaggagaaucccuu

SEQ ID NO: 63405 - RNA, 19 nt, Human
ugaggcaggagaaucccuu

SEQ ID NO: 63406 - RNA, 24 nt, Human
ugaggcaggagaaucccuugaacc

SEQ ID NO: 63407 - RNA, 24 nt, Human
ugaggcaggagaaucccuugaacc

SEQ ID NO: 63408 - RNA, 25 nt, Human
ugaggcaggagaaucccuugaaccc

SEQ ID NO: 63409 - RNA, 25 nt, Human
ugaggcaggagaaucccuugaaccc

SEQ ID NO: 63410 - RNA, 21 nt, Human
ugagguggcccagugccacag

SEQ ID NO: 63411 - RNA, 20 nt, Human
ugaucucccaggucucccuc

SEQ ID NO: 63412 - RNA, 22 nt, Human
ugcaaggcaggaagcccaaggg

SEQ ID NO: 63413 - RNA, 24 nt, Human
ugcagcuccuccaccacgcuccug

SEQ ID NO: 63414 - RNA, 24 nt, Human
ugcagcuccuccaccacgcuccug

SEQ ID NO: 63415 - RNA, 21 nt, Human
ugcauggcggcuccaagacag

SEQ ID NO: 63416 - RNA, 23 nt, Human
ugccacagagaucccaaucaugg

SEQ ID NO: 63417 - RNA, 24 nt, Human
ugccccugccccuguccccaccuc

SEQ ID NO: 63418 - RNA, 18 nt, Human
ugccccuugcucucccug

SEQ ID NO: 63419 - RNA, 20 nt, Human
ugcccgaacccagccagcac

SEQ ID NO: 63420 - RNA, 19 nt, Human
ugcccugggccuuggagcc

SEQ ID NO: 63421 - RNA, 18 nt, Human
ugccugugaggauagcca

SEQ ID NO: 63422 - RNA, 21 nt, Human
ugcuccagccugagcugaccu

SEQ ID NO: 63423 - RNA, 21 nt, Human
ugcuccagccugagcugaccu

SEQ ID NO: 63424 - RNA, 24 nt, Human
ugcuccagccugagcugaccugau

SEQ ID NO: 63425 - RNA, 24 nt, Human
ugcuccagccugagcugaccugau

SEQ ID NO: 63426 - RNA, 28 nt, Human
ugcuccagccugagcugaccugaugggg

SEQ ID NO: 63427 - RNA, 28 nt, Human
ugcuccagccugagcugaccugaugggg

SEQ ID NO: 63428 - RNA, 28 nt, Human
ugcuccagccugagcugaccugaugggg

SEQ ID NO: 63429 - RNA, 28 nt, Human
ugcuccagccugagcugaccugaugggg

SEQ ID NO: 63430 - RNA, 18 nt, Human
ugcucuggacccuugcuc

SEQ ID NO: 63431 - RNA, 18 nt, Human
uggaaugagggguguugc

SEQ ID NO: 63432 - RNA, 18 nt, Human
uggaaugagggguguugc

SEQ ID NO: 63433 - RNA, 23 nt, Human
uggacagagggaguuacucugga

SEQ ID NO: 63434 - RNA, 22 nt, Human
uggcagcagguguggaaggagg

SEQ ID NO: 63435 - RNA, 18 nt, Human
uggcagcccuugucccca

SEQ ID NO: 63436 - RNA, 21 nt, Human
uggcaggcccugagucuccug

SEQ ID NO: 63437 - RNA, 22 nt, Human
uggcaggcgccuguaaucccag

SEQ ID NO: 63438 - RNA, 25 nt, Human
uggcagggccgaaggagcgggcugg

SEQ ID NO: 63439 - RNA, 19 nt, Human
uggccaguugagacacugu

SEQ ID NO: 63440 - RNA, 22 nt, Human
uggcucacgccuguaaucccag

SEQ ID NO: 63441 - RNA, 22 nt, Human
uggcucacgccuguaaucccag

SEQ ID NO: 63442 - RNA, 24 nt, Human
uggcucacgccuguaaucccagca

SEQ ID NO: 63443 - RNA, 24 nt, Human
uggcucacgccuguaaucccagca

SEQ ID NO: 63444 - RNA, 19 nt, Human
uggcugccuagggcugccu

SEQ ID NO: 63445 - RNA, 24 nt, Human
uggcuuuugcucucuguggaggcu

SEQ ID NO: 63446 - RNA, 21 nt, Human
ugggagaggccgggcacggug

SEQ ID NO: 63447 - RNA, 20 nt, Human
ugggaggccgaggugggcag

SEQ ID NO: 63448 - RNA, 20 nt, Human
ugggaggccgaggugggcag

SEQ ID NO: 63449 - RNA, 23 nt, Human
ugggaggccgaggugggcagauc

SEQ ID NO: 63450 - RNA, 23 nt, Human
ugggaggccgaggugggcagauc

SEQ ID NO: 63451 - RNA, 24 nt, Human
ugggaggccgaggugggcagaucg

SEQ ID NO: 63452 - RNA, 24 nt, Human
ugggaggccgaggugggcagaucg

SEQ ID NO: 63453 - RNA, 18 nt, Human
ugggaggcugaggcagga

SEQ ID NO: 63454 - RNA, 18 nt, Human
ugggaggcugaggcagga

SEQ ID NO: 63455 - RNA, 19 nt, Human
ugggaggcugaggcaggag

SEQ ID NO: 63456 - RNA, 19 nt, Human
ugggaggcugaggcaggag

SEQ ID NO: 63457 - RNA, 20 nt, Human
ugggaugugggggcugucuc

SEQ ID NO: 63458 - RNA, 21 nt, Human
ugggaugugggggcugucucu

SEQ ID NO: 63459 - RNA, 20 nt, Human
ugggcaucuggggucaggac

SEQ ID NO: 63460 - RNA, 20 nt, Human
ugggcaucuggggucaggac

SEQ ID NO: 63461 - RNA, 20 nt, Human
ugggccuuggagccugaaag

SEQ ID NO: 63462 - RNA, 20 nt, Human
uggggaaaguaaggggggcg

SEQ ID NO: 63463 - RNA, 18 nt, Human
uggggagggaauucaaga

SEQ ID NO: 63464 - RNA, 18 nt, Human
uggggcugagcccaggcu

SEQ ID NO: 63465 - RNA, 23 nt, Human
uggggguggaaugagggguguug

SEQ ID NO: 63466 - RNA, 18 nt, Human
uggggugggauguggggg

SEQ ID NO: 63467 - RNA, 18 nt, Human
uggggugggauguggggg

SEQ ID NO: 63468 - RNA, 19 nt, Human
uggggugggaugugggggc

SEQ ID NO: 63469 - RNA, 19 nt, Human
uggggugggaugugggggc

SEQ ID NO: 63470 - RNA, 21 nt, Human
uggguaagaagcuggggcucc

SEQ ID NO: 63471 - RNA, 21 nt, Human
uggguaagaagcuggggcucc

SEQ ID NO: 63472 - RNA, 21 nt, Human
uggguuccuaccacccuuagg

SEQ ID NO: 63473 - RNA, 21 nt, Human
uggguuccuaccacccuuagg

SEQ ID NO: 63474 - RNA, 24 nt, Human
uggucuucuugauucuuccugucu

SEQ ID NO: 63475 - RNA, 24 nt, Human
uggugagaacuggcaggcccugag

SEQ ID NO: 63476 - RNA, 24 nt, Human
ugguggcaggcgccuguaauccca

SEQ ID NO: 63477 - RNA, 24 nt, Human
ugguggcaggcgccuguaauccca

SEQ ID NO: 63478 - RNA, 19 nt, Human
uguccuccacuccaccccc

SEQ ID NO: 63479 - RNA, 19 nt, Human
ugucucaaaacaaacaaag

SEQ ID NO: 63480 - RNA, 19 nt, Human
ugucucaaaacaaacaaag

SEQ ID NO: 63481 - RNA, 23 nt, Human
uguggacacuguggccugcagcu

SEQ ID NO: 63482 - RNA, 19 nt, Human
ugugucaguucuucucaag

SEQ ID NO: 63483 - RNA, 19 nt, Human
ugugucaguucuucucaag

SEQ ID NO: 63484 - RNA, 18 nt, Human
uguuccugccugagagug

SEQ ID NO: 63485 - RNA, 18 nt, Human
uguuccugccugagagug

SEQ ID NO: 63486 - RNA, 19 nt, Human
uguucgucuggcccccucc

SEQ ID NO: 63487 - RNA, 18 nt, Human
uuagcugggcgugguggc

SEQ ID NO: 63488 - RNA, 18 nt, Human
uuagcugggcgugguggc

SEQ ID NO: 63489 - RNA, 22 nt, Human
uuagcugggcgugguggcaggc

SEQ ID NO: 63490 - RNA, 24 nt, Human
uuagcugggcgugguggcaggcgc

SEQ ID NO: 63491 - RNA, 24 nt, Human
uuagcugggcgugguggcaggcgc

SEQ ID NO: 63492 - RNA, 20 nt, Human
uuccagggcggguugggccu

SEQ ID NO: 63493 - RNA, 20 nt, Human
uucccaagcccacaagguaa

SEQ ID NO: 63494 - RNA, 18 nt, Human
uucccagucucaccugug

SEQ ID NO: 63495 - RNA, 24 nt, Human
uucccagucucaccuguggcuuuc

SEQ ID NO: 63496 - RNA, 23 nt, Human
uucccuccuccacucccaccuau

SEQ ID NO: 63497 - RNA, 21 nt, Human
uuccucuggucucugaucucc

SEQ ID NO: 63498 - RNA, 21 nt, Human
uuccugggucccuccuggguu

SEQ ID NO: 63499 - RNA, 21 nt, Human
uuccugggucccuccuggguu

SEQ ID NO: 63500 - RNA, 24 nt, Human
uuccugggucccuccuggguuccu

SEQ ID NO: 63501 - RNA, 24 nt, Human
uuccugggucccuccuggguuccu

SEQ ID NO: 63502 - RNA, 21 nt, Human
uucuucaggggcuccgccccu

SEQ ID NO: 63503 - RNA, 19 nt, Human
uucuugccuugcucugggg

SEQ ID NO: 63504 - RNA, 18 nt, Human
uugcagugagccgagauc

SEQ ID NO: 63505 - RNA, 18 nt, Human
uugcagugagccgagauc

SEQ ID NO: 63506 - RNA, 18 nt, Human
uugcagugagccgagauc

SEQ ID NO: 63507 - RNA, 20 nt, Human
uugcagugagccgagaucau

SEQ ID NO: 63508 - RNA, 21 nt, Human
uugcagugagccgagaucaug

SEQ ID NO: 63509 - RNA, 21 nt, Human
uugcagugagccgagaucaug

SEQ ID NO: 63510 - RNA, 27 nt, Human
uuggacuucuggcucccuuuccuccgg

SEQ ID NO: 63511 - RNA, 19 nt, Human
uuggagccugaaagugcua

SEQ ID NO: 63512 - RNA, 24 nt, Human
uugggaggccgaggugggcagauc

SEQ ID NO: 63513 - RNA, 24 nt, Human
uugggaggccgaggugggcagauc

SEQ ID NO: 63514 - RNA, 19 nt, Human
uugguuggggccagugguu

SEQ ID NO: 63515 - RNA, 18 nt, Human
uugucuuuuucuuuaucc

SEQ ID NO: 63516 - RNA, 23 nt, Human
uugucuuuuucuuuauccaaguu

SEQ ID NO: 63517 - RNA, 20 nt, Human
uuucacacacucuccaucuc

SEQ ID NO: 63518 - RNA, 25 nt, Human
uuuccuggguggguaagaagcuggg

SEQ ID NO: 63519 - RNA, 21 nt, Human
uuucuagcauuuuaacuucug

SEQ ID NO: 63520 - RNA, 21 nt, Human
uuucuagcauuuuaacuucug

SEQ ID NO: 63521 - RNA, 23 nt, Human
uuuucuagcauuuuaacuucuga

SEQ ID NO: 63522 - RNA, 23 nt, Human
uuuucuagcauuuuaacuucuga

SEQ ID NO: 63523 - RNA, 22 nt, Human
cccuggcucagcuuccaccccc

SEQ ID NO: 63524 - RNA, 24 nt, Human
ccgccuugggggcuucucaguuac

SEQ ID NO: 63525 - RNA, 21 nt, Human
ccuguguccccaguccagagc

SEQ ID NO: 63526 - RNA, 21 nt, Human
cucagccuccgccuugggggc

SEQ ID NO: 63527 - RNA, 20 nt, Human
cuggcucagcuuccaccccc

SEQ ID NO: 63528 - RNA, 22 nt, Human
cugucccuggcucagcuuccac

SEQ ID NO: 63529 - RNA, 22 nt, Human
cuuccacccccagcuggggcuc

SEQ ID NO: 63530 - RNA, 21 nt, Human
gcuuccacccccagcuggggc

SEQ ID NO: 63531 - RNA, 25 nt, Human
uggcucagcuuccacccccagcugg

SEQ ID NO: 63532 - RNA, 21 nt, Human
uugcuuuauuggggaauggau

SEQ ID NO: 63533 - RNA, 19 nt, Human
aaacagccuccuuguccaa

SEQ ID NO: 63534 - RNA, 23 nt, Human
aaccuagagccuccucagcaguc

SEQ ID NO: 63535 - RNA, 19 nt, Human
aaccugcaccugcugugca

SEQ ID NO: 63536 - RNA, 20 nt, Human
aacucggggacauuccucuc

SEQ ID NO: 63537 - RNA, 19 nt, Human
aagauacucuuaucuccua

SEQ ID NO: 63538 - RNA, 20 nt, Human
aagcaagaaauggggugcgg

SEQ ID NO: 63539 - RNA, 19 nt, Human
aaggaaguggccaggcccc

SEQ ID NO: 63540 - RNA, 27 nt, Human
agaaagcaggcccaagcaguggaagca

SEQ ID NO: 63541 - RNA, 23 nt, Human
agcugaugugcagaaacagccuc

SEQ ID NO: 63542 - RNA, 22 nt, Human
aggaauuccaagaaccuagagc

SEQ ID NO: 63543 - RNA, 21 nt, Human
agggggucgcuccucugggcc

SEQ ID NO: 63544 - RNA, 23 nt, Human
caacaaagcaaucaagcaagaaa

SEQ ID NO: 63545 - RNA, 24 nt, Human
cagccuccuuguccaacucgggga

SEQ ID NO: 63546 - RNA, 21 nt, Human
cuagagccuccucagcaguca

SEQ ID NO: 63547 - RNA, 22 nt, Human
gacucuugccugagcugcuggg

SEQ ID NO: 63548 - RNA, 22 nt, Human
gcccccaacaaagcaaucaagc

SEQ ID NO: 63549 - RNA, 19 nt, Human
gcgggcagcguguucccca

SEQ ID NO: 63550 - RNA, 21 nt, Human
ggacaggugagcugaggacac

SEQ ID NO: 63551 - RNA, 25 nt, Human
gggcagugcgggcagcgucgggccc

SEQ ID NO: 63552 - RNA, 20 nt, Human
uccccaggcuggggucucug

SEQ ID NO: 63553 - RNA, 22 nt, Human
ugccugagcugcugggaaaccu

SEQ ID NO: 63554 - RNA, 18 nt, Human
uggcacaaacaucggacu

SEQ ID NO: 63555 - RNA, 20 nt, Human
uggcaggaaaugcaggaacu

SEQ ID NO: 63556 - RNA, 21 nt, Human
uggcaggaaaugcaggaacuc

SEQ ID NO: 63557 - RNA, 18 nt, Human
uggccaggcccccaacaa

SEQ ID NO: 63558 - RNA, 22 nt, Human
uggccaggcccccaacaaagca

SEQ ID NO: 63559 - RNA, 19 nt, Human
ugggccucugcccuggcag

SEQ ID NO: 63560 - RNA, 20 nt, Human
ugucagcuugagaagcaagg

SEQ ID NO: 63561 - RNA, 23 nt, Human
ugugguguuugcacugcucucug

SEQ ID NO: 63562 - RNA, 19 nt, Human
uugcacugcucucugggca

SEQ ID NO: 63563 - RNA, 24 nt, Human
aaaaaacaaaauccuccaccuucc

SEQ ID NO: 63564 - RNA, 21 nt, Human
aaaacacagauaggagccaca

SEQ ID NO: 63565 - RNA, 20 nt, Human
aaaauccuccaccuuccaaa

SEQ ID NO: 63566 - RNA, 23 nt, Human
aaacaaaauccuccaccuuccaa

SEQ ID NO: 63567 - RNA, 20 nt, Human
aaacaagcacaacuugacac

SEQ ID NO: 63568 - RNA, 24 nt, Human
aaacuucaccgaagaggaaagggc

SEQ ID NO: 63569 - RNA, 19 nt, Human
aagaaaggagagaaagaga

SEQ ID NO: 63570 - RNA, 18 nt, Human
aagaagaaaaagaaagga

SEQ ID NO: 63571 - RNA, 19 nt, Human
aagaagaaaaagaaaggag

SEQ ID NO: 63572 - RNA, 21 nt, Human
aagaggaaagggcagcuccgg

SEQ ID NO: 63573 - RNA, 20 nt, Human
aagaugcccagaucuuaaaa

SEQ ID NO: 63574 - RNA, 23 nt, Human
aaggaaacuugcgggagcaacca

SEQ ID NO: 63575 - RNA, 22 nt, Human
acaaugggaagcaaagucugaa

SEQ ID NO: 63576 - RNA, 22 nt, Human
accaggcacuuuccuugcuucc

SEQ ID NO: 63577 - RNA, 23 nt, Human
accaggcacuuuccuugcuuccu

SEQ ID NO: 63578 - RNA, 21 nt, Human
agaaaaaaaaagcccagcaaa

SEQ ID NO: 63579 - RNA, 22 nt, Human
agaaaaaaaaagcccagcaaau

SEQ ID NO: 63580 - RNA, 18 nt, Human
agaaaggagagaaagaga

SEQ ID NO: 63581 - RNA, 24 nt, Human
agaaaggagagaaagagaaaaaaa

SEQ ID NO: 63582 - RNA, 26 nt, Human
agaagaaaaagaaaggagagaaagag

SEQ ID NO: 63583 - RNA, 20 nt, Human
agaagacgggggaggggggg

SEQ ID NO: 63584 - RNA, 22 nt, Human
agacgggggagggggggaaggc

SEQ ID NO: 63585 - RNA, 27 nt, Human
agacgggggagggggggaaggcagggu

SEQ ID NO: 63586 - RNA, 24 nt, Human
agagaagacgggggagggggggaa

SEQ ID NO: 63587 - RNA, 20 nt, Human
agagagugggggaaaacaga

SEQ ID NO: 63588 - RNA, 20 nt, Human
agaucuuaaaagaaaaaaac

SEQ ID NO: 63589 - RNA, 25 nt, Human
aggaggagguggagagagagugggg

SEQ ID NO: 63590 - RNA, 23 nt, Human
aggaggagguggagagaggggac

SEQ ID NO: 63591 - RNA, 32 nt, Human
aggcagcugcgggagagaagacgggggagggg

SEQ ID NO: 63592 - RNA, 19 nt, Human
aggcaggguggggggaggc

SEQ ID NO: 63593 - RNA, 23 nt, Human
aggcaggguggggggaggcgggg

SEQ ID NO: 63594 - RNA, 24 nt, Human
aggcaggguggggggaggcggggu

SEQ ID NO: 63595 - RNA, 24 nt, Human
aggcauacaacaccauucaaaaca

SEQ ID NO: 63596 - RNA, 20 nt, Human
agggaagaagaaaaagaaag

SEQ ID NO: 63597 - RNA, 21 nt, Human
agggggggaaggcaggguggg

SEQ ID NO: 63598 - RNA, 22 nt, Human
agugggggaaaacagaggguuc

SEQ ID NO: 63599 - RNA, 23 nt, Human
agugggggaaaacagaggguucu

SEQ ID NO: 63600 - RNA, 18 nt, Human
auuccccaaggcacugca

SEQ ID NO: 63601 - RNA, 18 nt, Human
caaaacacagauaggagc

SEQ ID NO: 63602 - RNA, 21 nt, Human
caaaacacagauaggagccac

SEQ ID NO: 63603 - RNA, 18 nt, Human
cacaaugggaagcaaagu

SEQ ID NO: 63604 - RNA, 21 nt, Human
cacagauuuaaaggcauacaa

SEQ ID NO: 63605 - RNA, 25 nt, Human
cagcugcgggagagaagacggggga

SEQ ID NO: 63606 - RNA, 23 nt, Human
cagcuuuuaaaaacuucaccgaa

SEQ ID NO: 63607 - RNA, 21 nt, Human
cauguucaugacagacuguac

SEQ ID NO: 63608 - RNA, 19 nt, Human
ccacaaugggaagcaaagu

SEQ ID NO: 63609 - RNA, 22 nt, Human
ccacgcaaaaagcgcucugaca

SEQ ID NO: 63610 - RNA, 21 nt, Human
ccagaucuuaaaagaaaaaaa

SEQ ID NO: 63611 - RNA, 24 nt, Human
cccaccugcgggaagcuccagaga

SEQ ID NO: 63612 - RNA, 19 nt, Human
ccccgccuccccuucucuu

SEQ ID NO: 63613 - RNA, 21 nt, Human
cccucugucgccuccucugcc

SEQ ID NO: 63614 - RNA, 23 nt, Human
cccuuuuucccucugucgccucc

SEQ ID NO: 63615 - RNA, 21 nt, Human
ccgccuccccuucucuugcuc

SEQ ID NO: 63616 - RNA, 20 nt, Human
ccgucccgcucucccagcaa

SEQ ID NO: 63617 - RNA, 18 nt, Human
ccucugggcuugcuccgg

SEQ ID NO: 63618 - RNA, 18 nt, Human
ccuguacagcacuggagc

SEQ ID NO: 63619 - RNA, 23 nt, Human
ccuugagcuuggcugaaucuucc

SEQ ID NO: 63620 - RNA, 24 nt, Human
cgggggagggggggaaggcagggu

SEQ ID NO: 63621 - RNA, 18 nt, Human
cgucccgcucucccagca

SEQ ID NO: 63622 - RNA, 23 nt, Human
cgucccgcucucccagcaagcug

SEQ ID NO: 63623 - RNA, 21 nt, Human
cuccggaccgucccgcucucc

SEQ ID NO: 63624 - RNA, 24 nt, Human
cucgggguggggaaggcaggagga

SEQ ID NO: 63625 - RNA, 19 nt, Human
cuggcuccuaagagccuuc

SEQ ID NO: 63626 - RNA, 24 nt, Human
gaacauguucaugacagacuguac

SEQ ID NO: 63627 - RNA, 18 nt, Human
gaagacgggggagggggg

SEQ ID NO: 63628 - RNA, 23 nt, Human
gagaagacgggggagggggggaa

SEQ ID NO: 63629 - RNA, 24 nt, Human
gagccgggcuggggcuggcguggu

SEQ ID NO: 63630 - RNA, 24 nt, Human
gaggcguuggcugucgcuggagcc

SEQ ID NO: 63631 - RNA, 22 nt, Human
gagggaagaagaaaaagaaagg

SEQ ID NO: 63632 - RNA, 26 nt, Human
gagggaagaagaaaaagaaaggagga

SEQ ID NO: 63633 - RNA, 23 nt, Human
gagugggggaaaacagaggguuc

SEQ ID NO: 63634 - RNA, 18 nt, Human
gcaggguggggggaggcg

SEQ ID NO: 63635 - RNA, 21 nt, Human
gccuggcuccuaagagccuuc

SEQ ID NO: 63636 - RNA, 21 nt, Human
gcugcagcuagcugcccaccu

SEQ ID NO: 63637 - RNA, 22 nt, Human
ggaaaacagaggguucucuccu

SEQ ID NO: 63638 - RNA, 19 nt, Human
ggaagaagaaaaagaaagg

SEQ ID NO: 63639 - RNA, 19 nt, Human
ggagagaagacgggggagg

SEQ ID NO: 63640 - RNA, 27 nt, Human
ggagagagagugggggaaaacagaggg

SEQ ID NO: 63641 - RNA, 21 nt, Human
ggaggcgggguggagaggagg

SEQ ID NO: 63642 - RNA, 19 nt, Human
ggcagcuccgggcggcggc

SEQ ID NO: 63643 - RNA, 23 nt, Human
ggcggguggggagaaggguggug

SEQ ID NO: 63644 - RNA, 19 nt, Human
gggaagaagaaaaagaaag

SEQ ID NO: 63645 - RNA, 21 nt, Human
gggaagaagaaaaagaaagga

SEQ ID NO: 63646 - RNA, 22 nt, Human
gggagagaagacgggggagggg

SEQ ID NO: 63647 - RNA, 18 nt, Human
gggcgggggggcgggugg

SEQ ID NO: 63648 - RNA, 19 nt, Human
ggggaaggcaggguggggg

SEQ ID NO: 63649 - RNA, 22 nt, Human
ggggaaggcaggguggggggag

SEQ ID NO: 63650 - RNA, 18 nt, Human
ggggagggggggaaggca

SEQ ID NO: 63651 - RNA, 19 nt, Human
ggggcgggggggcgggugg

SEQ ID NO: 63652 - RNA, 20 nt, Human
ggggcggguggggagaaggg

SEQ ID NO: 63653 - RNA, 20 nt, Human
gggggagggggggaaggcag

SEQ ID NO: 63654 - RNA, 20 nt, Human
gggggcaugagcuggggugg

SEQ ID NO: 63655 - RNA, 29 nt, Human
gggggggaaggcaggguggggggaggcgg

SEQ ID NO: 63656 - RNA, 18 nt, Human
ggguggggagaagggugg

SEQ ID NO: 63657 - RNA, 20 nt, Human
guagugcuguaaacaagcac

SEQ ID NO: 63658 - RNA, 20 nt, Human
guggggaaggcaggaggagg

SEQ ID NO: 63659 - RNA, 18 nt, Human
gugggggaaaacagaggg

SEQ ID NO: 63660 - RNA, 23 nt, Human
guggugcgucccuucggcuccug

SEQ ID NO: 63661 - RNA, 21 nt, Human
guguggcuggcacagaguagu

SEQ ID NO: 63662 - RNA, 18 nt, Human
uaaccaggcgggucgugg

SEQ ID NO: 63663 - RNA, 26 nt, Human
uaccccgccuccccuucucuugcuca

SEQ ID NO: 63664 - RNA, 19 nt, Human
uagcucucuaaacuucccu

SEQ ID NO: 63665 - RNA, 24 nt, Human
ucaaaagaugcccagaucuuaaaa

SEQ ID NO: 63666 - RNA, 18 nt, Human
ucagaagaguucaacagg

SEQ ID NO: 63667 - RNA, 19 nt, Human
ucaggaacauguucaugac

SEQ ID NO: 63668 - RNA, 19 nt, Human
uccaccuacuucccuuacc

SEQ ID NO: 63669 - RNA, 20 nt, Human
ucccagcaagcuggcucccc

SEQ ID NO: 63670 - RNA, 20 nt, Human
uccccagauaaucuuagcuc

SEQ ID NO: 63671 - RNA, 21 nt, Human
uccccagucgccuggcuccua

SEQ ID NO: 63672 - RNA, 21 nt, Human
ucccuuaccccgccuccccuu

SEQ ID NO: 63673 - RNA, 24 nt, Human
ucgccuggcuccuaagagccuucu

SEQ ID NO: 63674 - RNA, 26 nt, Human
ucgcuggagccgggcuggggcuggcg

SEQ ID NO: 63675 - RNA, 21 nt, Human
ucucccagcaagcuggcuccc

SEQ ID NO: 63676 - RNA, 24 nt, Human
ucucccagcaagcuggcuccccgg

SEQ ID NO: 63677 - RNA, 18 nt, Human
ugagcugggguggggaaa

SEQ ID NO: 63678 - RNA, 23 nt, Human
ugagcugggguggggaaauaggg

SEQ ID NO: 63679 - RNA, 24 nt, Human
ugagcugggguggggaaauagggu

SEQ ID NO: 63680 - RNA, 20 nt, Human
ugaguuauuaucuuuuucuu

SEQ ID NO: 63681 - RNA, 19 nt, Human
ugcagaagaagacacacgg

SEQ ID NO: 63682 - RNA, 23 nt, Human
ugcgggagagaagacgggggagg

SEQ ID NO: 63683 - RNA, 21 nt, Human
ugcgucccuucggcuccugua

SEQ ID NO: 63684 - RNA, 21 nt, Human
ugcuccggaccgucccgcucu

SEQ ID NO: 63685 - RNA, 21 nt, Human
uggagaggaggaggacaaagg

SEQ ID NO: 63686 - RNA, 22 nt, Human
uggcuccgcacucggggugggg

SEQ ID NO: 63687 - RNA, 18 nt, Human
uggcugaaucuuccaccu

SEQ ID NO: 63688 - RNA, 19 nt, Human
uggggaaggcaggaggagg

SEQ ID NO: 63689 - RNA, 18 nt, Human
uggggagaagggugguga

SEQ ID NO: 63690 - RNA, 21 nt, Human
ugggguggggaaauaggguuu

SEQ ID NO: 63691 - RNA, 20 nt, Human
uggugagggggguuggcuga

SEQ ID NO: 63692 - RNA, 21 nt, Human
uggugagggggguuggcuggu

SEQ ID NO: 63693 - RNA, 20 nt, Human
uguguggcuggcacagagua

SEQ ID NO: 63694 - RNA, 18 nt, Human
uguuuguuuuguuuuuug

SEQ ID NO: 63695 - RNA, 19 nt, Human
uguuuugauuuccccagau

SEQ ID NO: 63696 - RNA, 18 nt, Human
uguuuuguuuuuuggcua

SEQ ID NO: 63697 - RNA, 21 nt, Human
uugcucagaagaguucaacag

SEQ ID NO: 63698 - RNA, 26 nt, Human
uugcuuccuccgagucuuuagcagcu

SEQ ID NO: 63699 - RNA, 24 nt, Human
uuuguguggcuggcacagaguagu

SEQ ID NO: 63700 - RNA, 18 nt, Human
uuuuguuuguuuuguuuu

SEQ ID NO: 63701 - RNA, 21 nt, Human
uuuuuguuuguuuuguuuuuu

SEQ ID NO: 63702 - RNA, 23 nt, Human
uuuuuuggcuacugaagaccuga

SEQ ID NO: 63703 - RNA, 18 nt, Human
aagccaagaggaaaccaa

SEQ ID NO: 63704 - RNA, 21 nt, Human
acacaaaagggaccccccaaa

SEQ ID NO: 63705 - RNA, 18 nt, Human
acucagccuuccacccuu

SEQ ID NO: 63706 - RNA, 21 nt, Human
acuggaaaagcacauggggac

SEQ ID NO: 63707 - RNA, 21 nt, Human
agaaagagaggaguccuugaa

SEQ ID NO: 63708 - RNA, 19 nt, Human
agaagaacuggaaaagcac

SEQ ID NO: 63709 - RNA, 22 nt, Human
agacacaaaagggaccccccaa

SEQ ID NO: 63710 - RNA, 19 nt, Human
agagagguucugaguggaa

SEQ ID NO: 63711 - RNA, 22 nt, Human
agccauuggagauggaggagcu

SEQ ID NO: 63712 - RNA, 23 nt, Human
agggggcucagucuuuggcgggg

SEQ ID NO: 63713 - RNA, 22 nt, Human
aucuugggccucucuucuuguu

SEQ ID NO: 63714 - RNA, 21 nt, Human
augauggaggagacagggggc

SEQ ID NO: 63715 - RNA, 21 nt, Human
caaagccaagaggaaaccaaa

SEQ ID NO: 63716 - RNA, 23 nt, Human
caaaguccaggcuccugucgccc

SEQ ID NO: 63717 - RNA, 20 nt, Human
caagaggaaaccaaaugaug

SEQ ID NO: 63718 - RNA, 26 nt, Human
cacagaguccgccuccgucgccucuc

SEQ ID NO: 63719 - RNA, 24 nt, Human
cacauggggacccccucaucuccc

SEQ ID NO: 63720 - RNA, 24 nt, Human
cagaguccgccuccgucgccucuc

SEQ ID NO: 63721 - RNA, 24 nt, Human
cagcagaauucugugcuucuuggu

SEQ ID NO: 63722 - RNA, 19 nt, Human
caggcccuccuguugcuug

SEQ ID NO: 63723 - RNA, 22 nt, Human
ccaaaauuuagaaguaucccca

SEQ ID NO: 63724 - RNA, 27 nt, Human
ccaauaaugauagucuagaagcaaaga

SEQ ID NO: 63725 - RNA, 18 nt, Human
ccaggguggggaaugggg

SEQ ID NO: 63726 - RNA, 22 nt, Human
ccccaaaauccaguggaaggca

SEQ ID NO: 63727 - RNA, 19 nt, Human
ccccccaaaauccacaugg

SEQ ID NO: 63728 - RNA, 18 nt, Human
cccuccuguugcuugucc

SEQ ID NO: 63729 - RNA, 25 nt, Human
ccgccuccgucgccucucggacucu

SEQ ID NO: 63730 - RNA, 22 nt, Human
ccgucgccucucggacucucgu

SEQ ID NO: 63731 - RNA, 20 nt, Human
cgccgcuacagccgccgccg

SEQ ID NO: 63732 - RNA, 20 nt, Human
cgccgcuacagccgccgccg

SEQ ID NO: 63733 - RNA, 23 nt, Human
cuaauuuucacacgacaguccaa

SEQ ID NO: 63734 - RNA, 20 nt, Human
cuacaagaaggcagacaaga

SEQ ID NO: 63735 - RNA, 21 nt, Human
cugcagccuaauuuucacacg

SEQ ID NO: 63736 - RNA, 18 nt, Human
gaagcaaaguggcagggg

SEQ ID NO: 63737 - RNA, 21 nt, Human
gaaguauccccaaagccaaga

SEQ ID NO: 63738 - RNA, 27 nt, Human
gaaguccuuccaguuccuucucugcuc

SEQ ID NO: 63739 - RNA, 19 nt, Human
gaccccccaaaauccacau

SEQ ID NO: 63740 - RNA, 26 nt, Human
gcuccuacaagaaggcagacaagaau

SEQ ID NO: 63741 - RNA, 22 nt, Human
gcuccuuggcguggagggcuga

SEQ ID NO: 63742 - RNA, 21 nt, Human
ggacccccucaucucccaggg

SEQ ID NO: 63743 - RNA, 20 nt, Human
ggagacagggggcucagucu

SEQ ID NO: 63744 - RNA, 19 nt, Human
ggcugagguggggcugggc

SEQ ID NO: 63745 - RNA, 20 nt, Human
gggaaugggggauccugagg

SEQ ID NO: 63746 - RNA, 23 nt, Human
gggcucagucuuuggcggggguc

SEQ ID NO: 63747 - RNA, 20 nt, Human
ggggauccugaggcagcauc

SEQ ID NO: 63748 - RNA, 24 nt, Human
gguggggaaugggggauccugagg

SEQ ID NO: 63749 - RNA, 18 nt, Human
gucacgccgcuacagccg

SEQ ID NO: 63750 - RNA, 20 nt, Human
guugcuugucucacucuuga

SEQ ID NO: 63751 - RNA, 21 nt, Human
uagaaguauccccaaagccaa

SEQ ID NO: 63752 - RNA, 21 nt, Human
uccacauggggugcugggaac

SEQ ID NO: 63753 - RNA, 24 nt, Human
uccagaagaacuggaaaagcacau

SEQ ID NO: 63754 - RNA, 18 nt, Human
uccagagagguucugagu

SEQ ID NO: 63755 - RNA, 18 nt, Human
uccagagagguucugagu

SEQ ID NO: 63756 - RNA, 18 nt, Human
uccaguuccuucucuggg

SEQ ID NO: 63757 - RNA, 23 nt, Human
ucccaggguggggaaugggggau

SEQ ID NO: 63758 - RNA, 19 nt, Human
ucccugguggcuugggcgg

SEQ ID NO: 63759 - RNA, 18 nt, Human
ugagguggggcugggcag

SEQ ID NO: 63760 - RNA, 24 nt, Human
ugagguggggcugggcaggugcca

SEQ ID NO: 63761 - RNA, 22 nt, Human
ugaguggaaucccugccacaaa

SEQ ID NO: 63762 - RNA, 18 nt, Human
ugccaaggucucagcuuc

SEQ ID NO: 63763 - RNA, 24 nt, Human
ugccacaaaucccagccauuggag

SEQ ID NO: 63764 - RNA, 21 nt, Human
ugccauggggcuccuacaaga

SEQ ID NO: 63765 - RNA, 19 nt, Human
ugcgggacucagccuucca

SEQ ID NO: 63766 - RNA, 19 nt, Human
uggcguggagggcugagau

SEQ ID NO: 63767 - RNA, 18 nt, Human
ugggcaggugccaugggg

SEQ ID NO: 63768 - RNA, 21 nt, Human
ugggcugagguggggcugggc

SEQ ID NO: 63769 - RNA, 19 nt, Human
uggggaaugggggauccug

SEQ ID NO: 63770 - RNA, 21 nt, Human
uggggaaugggggauccugag

SEQ ID NO: 63771 - RNA, 22 nt, Human
uuagaaguauccccaaagccaa

SEQ ID NO: 63772 - RNA, 20 nt, Human
uucucugcucaggcccuccu

SEQ ID NO: 63773 - RNA, 22 nt, Human
aaaaaagguuuuuugaaauuaa

SEQ ID NO: 63774 - RNA, 19 nt, Human
aaaagaacagaagacaugc

SEQ ID NO: 63775 - RNA, 20 nt, Human
aaauguggagaaaugaaaau

SEQ ID NO: 63776 - RNA, 19 nt, Human
aacacggugaaaccccguc

SEQ ID NO: 63777 - RNA, 20 nt, Human
aacacggugaaaccccgucu

SEQ ID NO: 63778 - RNA, 21 nt, Human
aacacggugaaaccccgucuc

SEQ ID NO: 63779 - RNA, 18 nt, Human
aacacuuugggaggcuga

SEQ ID NO: 63780 - RNA, 24 nt, Human
aacacuuugggaggcugagguggg

SEQ ID NO: 63781 - RNA, 20 nt, Human
aacagcagcagacaugauua

SEQ ID NO: 63782 - RNA, 20 nt, Human
aagcaauuccacacacagcc

SEQ ID NO: 63783 - RNA, 22 nt, Human
aaggauuucagagauggggaca

SEQ ID NO: 63784 - RNA, 24 nt, Human
aaucauaaccccauuucuguuaga

SEQ ID NO: 63785 - RNA, 18 nt, Human
aaugugaauggauuacag

SEQ ID NO: 63786 - RNA, 24 nt, Human
acaaagugagacuccaucucaaaa

SEQ ID NO: 63787 - RNA, 24 nt, Human
acccaggaggcggagguugcagug

SEQ ID NO: 63788 - RNA, 23 nt, Human
accccgucucuacuaaaauacaa

SEQ ID NO: 63789 - RNA, 20 nt, Human
acgggagcaccagcagcucu

SEQ ID NO: 63790 - RNA, 26 nt, Human
acuaaaauacaaaaaauuagccaguc

SEQ ID NO: 63791 - RNA, 19 nt, Human
agaaaaaaggggucuccag

SEQ ID NO: 63792 - RNA, 21 nt, Human
agaaaccaccaguacaugaug

SEQ ID NO: 63793 - RNA, 19 nt, Human
agaaagaaaaaccuaaagg

SEQ ID NO: 63794 - RNA, 23 nt, Human
agcaacuuagguaaagguagagg

SEQ ID NO: 63795 - RNA, 23 nt, Human
agccaggcgugguggcgugcacc

SEQ ID NO: 63796 - RNA, 22 nt, Human
agccugggcaacacggugaaac

SEQ ID NO: 63797 - RNA, 24 nt, Human
agccugggcaacacggugaaaccc

SEQ ID NO: 63798 - RNA, 24 nt, Human
agccuggguuacaaagugagacuc

SEQ ID NO: 63799 - RNA, 23 nt, Human
agcugggcaugguggcucaugcc

SEQ ID NO: 63800 - RNA, 23 nt, Human
aggauuggcaaagacucccugaa

SEQ ID NO: 63801 - RNA, 23 nt, Human
aggcaggagacuugcuugaaccc

SEQ ID NO: 63802 - RNA, 24 nt, Human
aggcaggagacuugcuugaaccca

SEQ ID NO: 63803 - RNA, 24 nt, Human
aggcggagguugcagugagcugag

SEQ ID NO: 63804 - RNA, 24 nt, Human
aggcgugguggcgugcaccuguag

SEQ ID NO: 63805 - RNA, 24 nt, Human
aggcugaggcaggagacuugcuug

SEQ ID NO: 63806 - RNA, 20 nt, Human
aggcugaggugggcggauug

SEQ ID NO: 63807 - RNA, 24 nt, Human
aguaaucucagaaaaaaaagguuu

SEQ ID NO: 63808 - RNA, 24 nt, Human
aucaugccauugcauuccagccug

SEQ ID NO: 63809 - RNA, 21 nt, Human
augacacucaaaagacuuagg

SEQ ID NO: 63810 - RNA, 19 nt, Human
augccuguaaucccaacac

SEQ ID NO: 63811 - RNA, 22 nt, Human
augucucugugacacugaaaca

SEQ ID NO: 63812 - RNA, 22 nt, Human
auguucagagugggagugguac

SEQ ID NO: 63813 - RNA, 23 nt, Human
auuaaacuugacuuuuaaaaaau

SEQ ID NO: 63814 - RNA, 18 nt, Human
auugcauuccagccuggg

SEQ ID NO: 63815 - RNA, 23 nt, Human
auugcauuccagccuggguuaca

SEQ ID NO: 63816 - RNA, 18 nt, Human
caaauaaauauaaugccu

SEQ ID NO: 63817 - RNA, 27 nt, Human
caaauaguucaccugaauaguccaaaa

SEQ ID NO: 63818 - RNA, 24 nt, Human
caacacggugaaaccccgucucua

SEQ ID NO: 63819 - RNA, 21 nt, Human
caacacuuugggaggcugagg

SEQ ID NO: 63820 - RNA, 24 nt, Human
caacacuuugggaggcugaggugg

SEQ ID NO: 63821 - RNA, 20 nt, Human
caacuuagguaaagguagag

SEQ ID NO: 63822 - RNA, 25 nt, Human
caacuuggcaaagagaugaaggaau

SEQ ID NO: 63823 - RNA, 21 nt, Human
caacuuucaaacaaaacugga

SEQ ID NO: 63824 - RNA, 18 nt, Human
caacuuuuaaccaccccu

SEQ ID NO: 63825 - RNA, 19 nt, Human
caagauggcggccccaagc

SEQ ID NO: 63826 - RNA, 22 nt, Human
cacacacagccauuuaugugug

SEQ ID NO: 63827 - RNA, 21 nt, Human
caccuguagucccagcuacuc

SEQ ID NO: 63828 - RNA, 23 nt, Human
caccuguagucccagcuacucgg

SEQ ID NO: 63829 - RNA, 24 nt, Human
cagaugaucccagugccugacuga

SEQ ID NO: 63830 - RNA, 24 nt, Human
caugccuguaaucccaacacuuug

SEQ ID NO: 63831 - RNA, 23 nt, Human
cauuccagccuggguuacaaagu

SEQ ID NO: 63832 - RNA, 24 nt, Human
cauuccagccuggguuacaaagug

SEQ ID NO: 63833 - RNA, 18 nt, Human
cauugcauuccagccugg

SEQ ID NO: 63834 - RNA, 19 nt, Human
cauugcauuccagccuggg

SEQ ID NO: 63835 - RNA, 20 nt, Human
cauugcauuccagccugggu

SEQ ID NO: 63836 - RNA, 22 nt, Human
cauugcauuccagccuggguua

SEQ ID NO: 63837 - RNA, 24 nt, Human
cauugcauuccagccuggguuaca

SEQ ID NO: 63838 - RNA, 23 nt, Human
ccaauacaaucugccaaagaaaa

SEQ ID NO: 63839 - RNA, 20 nt, Human
ccacuggggauagggguagg

SEQ ID NO: 63840 - RNA, 20 nt, Human
ccacuggggauagggguagg

SEQ ID NO: 63841 - RNA, 24 nt, Human
ccagugccugacugaauguauaga

SEQ ID NO: 63842 - RNA, 20 nt, Human
ccauugcauuccagccuggg

SEQ ID NO: 63843 - RNA, 21 nt, Human
ccauugcauuccagccugggu

SEQ ID NO: 63844 - RNA, 22 nt, Human
ccauugcauuccagccuggguu

SEQ ID NO: 63845 - RNA, 24 nt, Human
ccauugcauuccagccuggguuac

SEQ ID NO: 63846 - RNA, 26 nt, Human
cccacagccuucaaaaucauaacccc

SEQ ID NO: 63847 - RNA, 22 nt, Human
ccccuugacaggaaccgcugcc

SEQ ID NO: 63848 - RNA, 21 nt, Human
cccugaaaggaaaacaacuug

SEQ ID NO: 63849 - RNA, 20 nt, Human
ccugaaaggaaaacaacuug

SEQ ID NO: 63850 - RNA, 23 nt, Human
ccugggcaacacggugaaacccc

SEQ ID NO: 63851 - RNA, 24 nt, Human
ccugggcaacacggugaaaccccg

SEQ ID NO: 63852 - RNA, 22 nt, Human
ccuguaaucccaacacuuuggg

SEQ ID NO: 63853 - RNA, 21 nt, Human
ccuguagucccagcuacucgg

SEQ ID NO: 63854 - RNA, 25 nt, Human
ccuucucagaaaaaccucaugugga

SEQ ID NO: 63855 - RNA, 19 nt, Human
cgcgaccagccugggcaac

SEQ ID NO: 63856 - RNA, 24 nt, Human
cggauugccugagcucaggaguuc

SEQ ID NO: 63857 - RNA, 23 nt, Human
cgggagcaccagcagcucuggac

SEQ ID NO: 63858 - RNA, 24 nt, Human
cucaugccuguaaucccaacacuu

SEQ ID NO: 63859 - RNA, 18 nt, Human
cuggaccugcugcccccu

SEQ ID NO: 63860 - RNA, 23 nt, Human
cugggcaugguggcucaugccug

SEQ ID NO: 63861 - RNA, 24 nt, Human
cuucuagaccccauaccccucaaa

SEQ ID NO: 63862 - RNA, 18 nt, Human
cuucucagaaaaaccucu

SEQ ID NO: 63863 - RNA, 23 nt, Human
cuugucccaagcccuucucagaa

SEQ ID NO: 63864 - RNA, 25 nt, Human
cuugucccaagcccuucucagaaaa

SEQ ID NO: 63865 - RNA, 22 nt, Human
gaaaggaaaacaacuuggcaaa

SEQ ID NO: 63866 - RNA, 25 nt, Human
gaaaggaaaacaacuuggcaaagag

SEQ ID NO: 63867 - RNA, 25 nt, Human
gaaauggaugagauggaaccgagaa

SEQ ID NO: 63868 - RNA, 20 nt, Human
gagcuugcuuuccugcuggc

SEQ ID NO: 63869 - RNA, 22 nt, Human
gagguugcagugagcugagauc

SEQ ID NO: 63870 - RNA, 19 nt, Human
gaguucgcgaccagccugg

SEQ ID NO: 63871 - RNA, 18 nt, Human
gauuacagacuguggcca

SEQ ID NO: 63872 - RNA, 23 nt, Human
gauugccugagcucaggaguucg

SEQ ID NO: 63873 - RNA, 21 nt, Human
gcaaagacucccugaacccac

SEQ ID NO: 63874 - RNA, 23 nt, Human
gcagcugggcaugguggcucaug

SEQ ID NO: 63875 - RNA, 22 nt, Human
gcaggagacuugcuugaaccca

SEQ ID NO: 63876 - RNA, 19 nt, Human
gccauugcauuccagccug

SEQ ID NO: 63877 - RNA, 21 nt, Human
gcccugaaaggaaaacaacuu

SEQ ID NO: 63878 - RNA, 22 nt, Human
ggaggcggagguugcagugagc

SEQ ID NO: 63879 - RNA, 22 nt, Human
ggagguugcagugagcugagau

SEQ ID NO: 63880 - RNA, 23 nt, Human
ggagguugcagugagcugagauc

SEQ ID NO: 63881 - RNA, 24 nt, Human
ggagguugcagugagcugagauca

SEQ ID NO: 63882 - RNA, 19 nt, Human
ggauuacagacuguggcca

SEQ ID NO: 63883 - RNA, 23 nt, Human
ggauugccugagcucaggaguuc

SEQ ID NO: 63884 - RNA, 23 nt, Human
ggcaugguggcucaugccuguaa

SEQ ID NO: 63885 - RNA, 21 nt, Human
ggcggugguggggcgcgcccg

SEQ ID NO: 63886 - RNA, 24 nt, Human
ggcuagaaacuucuuuggcaagca

SEQ ID NO: 63887 - RNA, 18 nt, Human
gggaaagagaaggaagga

SEQ ID NO: 63888 - RNA, 20 nt, Human
gggaggcugaggugggcgga

SEQ ID NO: 63889 - RNA, 24 nt, Human
gguggcgugcaccuguagucccag

SEQ ID NO: 63890 - RNA, 23 nt, Human
gguggcucaugccuguaauccca

SEQ ID NO: 63891 - RNA, 18 nt, Human
guaggauuucuugccugc

SEQ ID NO: 63892 - RNA, 20 nt, Human
gugaaauggagccuccuuga

SEQ ID NO: 63893 - RNA, 24 nt, Human
guugcagugagcugagaucaugcc

SEQ ID NO: 63894 - RNA, 22 nt, Human
uaaaauaaaaauaaaggagcaa

SEQ ID NO: 63895 - RNA, 31 nt, Human
uaaaauaaaaauaaaggagcaacuuagguag

SEQ ID NO: 63896 - RNA, 18 nt, Human
uaaaauaaaggagcagcu

SEQ ID NO: 63897 - RNA, 20 nt, Human
uaaacagaugaucccagugc

SEQ ID NO: 63898 - RNA, 23 nt, Human
uaacuucuagaccccauaccccu

SEQ ID NO: 63899 - RNA, 19 nt, Human
uaaucugaaaauuuuccuu

SEQ ID NO: 63900 - RNA, 24 nt, Human
uacaaagugagacuccaucucaaa

SEQ ID NO: 63901 - RNA, 19 nt, Human
uagaaagaaaaaccuaaag

SEQ ID NO: 63902 - RNA, 21 nt, Human
uaguucaccugaauaguccuu

SEQ ID NO: 63903 - RNA, 23 nt, Human
uaucaaagaaugucucugugaca

SEQ ID NO: 63904 - RNA, 22 nt, Human
ucaaaaucauaaccccauuucu

SEQ ID NO: 63905 - RNA, 22 nt, Human
ucaccugaauaguccaaaaauc

SEQ ID NO: 63906 - RNA, 23 nt, Human
ucaugccauugcauuccagccug

SEQ ID NO: 63907 - RNA, 22 nt, Human
uccacacacagccauuuaugug

SEQ ID NO: 63908 - RNA, 19 nt, Human
uccagccuggguuacaaag

SEQ ID NO: 63909 - RNA, 24 nt, Human
uccagccuggguuacaaagugaga

SEQ ID NO: 63910 - RNA, 24 nt, Human
ucccaagcccuucucagaaaaacc

SEQ ID NO: 63911 - RNA, 23 nt, Human
ucucuacuaaaauacaaaaaauu

SEQ ID NO: 63912 - RNA, 25 nt, Human
ucuggagagcuugcuuuccugcugg

SEQ ID NO: 63913 - RNA, 25 nt, Human
ugaaauggagccuccuugauaguuu

SEQ ID NO: 63914 - RNA, 21 nt, Human
ugaauaguccaaaaaucaaga

SEQ ID NO: 63915 - RNA, 22 nt, Human
ugaauaguccaaaaaucaagaa

SEQ ID NO: 63916 - RNA, 19 nt, Human
ugacagacuucuuguccca

SEQ ID NO: 63917 - RNA, 23 nt, Human
ugagauggaaccgagaaaccacc

SEQ ID NO: 63918 - RNA, 24 nt, Human
ugaggcaggagacuugcuugaacc

SEQ ID NO: 63919 - RNA, 25 nt, Human
ugaggcaggagacuugcuugaaccc

SEQ ID NO: 63920 - RNA, 18 nt, Human
ugagggcggugguggggc

SEQ ID NO: 63921 - RNA, 18 nt, Human
ugaggugggcggauugcc

SEQ ID NO: 63922 - RNA, 19 nt, Human
ugaggugggcggauugccu

SEQ ID NO: 63923 - RNA, 23 nt, Human
ugaggugggcggauugccugagc

SEQ ID NO: 63924 - RNA, 24 nt, Human
ugaggugggcggauugccugagcu

SEQ ID NO: 63925 - RNA, 21 nt, Human
ugcaaaaaaucaaauggugaa

SEQ ID NO: 63926 - RNA, 19 nt, Human
ugcaccuguagucccagcu

SEQ ID NO: 63927 - RNA, 24 nt, Human
ugcauuguaucagaaaaaaggggu

SEQ ID NO: 63928 - RNA, 23 nt, Human
ugccuguaaucccaacacuuugg

SEQ ID NO: 63929 - RNA, 23 nt, Human
ugccuguaaucccaacacuuugg

SEQ ID NO: 63930 - RNA, 24 nt, Human
uggaaggacaggcccugaaaggaa

SEQ ID NO: 63931 - RNA, 21 nt, Human
uggauuacagacuguggccau

SEQ ID NO: 63932 - RNA, 22 nt, Human
uggcaagcaauuccacacacag

SEQ ID NO: 63933 - RNA, 21 nt, Human
uggcucaugccuguaauccca

SEQ ID NO: 63934 - RNA, 24 nt, Human
uggcucaugccuguaaucccaaca

SEQ ID NO: 63935 - RNA, 18 nt, Human
ugggaggcugaggugggc

SEQ ID NO: 63936 - RNA, 22 nt, Human
ugggaggcugaggugggcggau

SEQ ID NO: 63937 - RNA, 24 nt, Human
ugggaggcugaggugggcggauug

SEQ ID NO: 63938 - RNA, 19 nt, Human
ugguggaaaauguugggcu

SEQ ID NO: 63939 - RNA, 24 nt, Human
ugguggcgugcaccuguaguccca

SEQ ID NO: 63940 - RNA, 24 nt, Human
ugguggcucaugccuguaauccca

SEQ ID NO: 63941 - RNA, 23 nt, Human
uguaaacagaugaucccagugcc

SEQ ID NO: 63942 - RNA, 20 nt, Human
uuacaaaaugucucucauuu

SEQ ID NO: 63943 - RNA, 22 nt, Human
uuacaaagugagacuccaucuc

SEQ ID NO: 63944 - RNA, 22 nt, Human
uucaaaaucauaaccccauuuc

SEQ ID NO: 63945 - RNA, 27 nt, Human
uuccuuuucagcucccucuucuuggua

SEQ ID NO: 63946 - RNA, 24 nt, Human
uucuaaacuggaaggacaggcccu

SEQ ID NO: 63947 - RNA, 21 nt, Human
uucuuuuagacaucuugaaga

SEQ ID NO: 63948 - RNA, 24 nt, Human
uugaacccaggaggcggagguugc

SEQ ID NO: 63949 - RNA, 21 nt, Human
uugcagggacggccagauguu

SEQ ID NO: 63950 - RNA, 18 nt, Human
uugcagugagcugagauc

SEQ ID NO: 63951 - RNA, 20 nt, Human
uugcagugagcugagaucau

SEQ ID NO: 63952 - RNA, 21 nt, Human
uugcagugagcugagaucaug

SEQ ID NO: 63953 - RNA, 21 nt, Human
uugccugagcucaggaguucg

SEQ ID NO: 63954 - RNA, 20 nt, Human
uugccugcuuaacuaacaug

SEQ ID NO: 63955 - RNA, 24 nt, Human
uugcuugaacccaggaggcggagg

SEQ ID NO: 63956 - RNA, 26 nt, Human
uuucagagauggggacagacugguga

SEQ ID NO: 63957 - RNA, 21 nt, Human
aacggcggcggggcucgcggg

SEQ ID NO: 63958 - RNA, 23 nt, Human
aacggcggcggggcucgcggguc

SEQ ID NO: 63959 - RNA, 21 nt, Human
cgccgggacggccggggcugg

SEQ ID NO: 63960 - RNA, 18 nt, Human
gaggaggggauggggcag

SEQ ID NO: 63961 - RNA, 19 nt, Human
gaggaggggauggggcagg

SEQ ID NO: 63962 - RNA, 24 nt, Human
ggagcgaauuuauugugaaagcuc

SEQ ID NO: 63963 - RNA, 20 nt, Human
gggugaggaggggauggggc

SEQ ID NO: 63964 - RNA, 20 nt, Human
ugaaagcucguggggugagg

SEQ ID NO: 63965 - RNA, 20 nt, Human
uggggugaggaggggauggg

SEQ ID NO: 63966 - RNA, 18 nt, Human
agugacuccaaugugaua

SEQ ID NO: 63967 - RNA, 22 nt, Human
ccucgggcugucccgggaccuc

SEQ ID NO: 63968 - RNA, 19 nt, Human
cgaguggagaccgggagug

SEQ ID NO: 63969 - RNA, 21 nt, Human
cgcagcggcggcgucucgguc

SEQ ID NO: 63970 - RNA, 23 nt, Human
cgggaccucuggggcgcuggcac

SEQ ID NO: 63971 - RNA, 23 nt, Human
cggggcggcgggcgcggcgccuc

SEQ ID NO: 63972 - RNA, 19 nt, Human
gacuccaaugugauauccu

SEQ ID NO: 63973 - RNA, 18 nt, Human
gcgcuggcacccaggugu

SEQ ID NO: 63974 - RNA, 25 nt, Human
gcggcgccucgggcugucccgggac

SEQ ID NO: 63975 - RNA, 19 nt, Human
ggcgcuggcacccaggugu

SEQ ID NO: 63976 - RNA, 18 nt, Human
ggcggcgggcgcggcgcc

SEQ ID NO: 63977 - RNA, 21 nt, Human
ggggagcucggggcggcgggc

SEQ ID NO: 63978 - RNA, 19 nt, Human
gguguuggaagagcgagug

SEQ ID NO: 63979 - RNA, 19 nt, Human
ucucuggggcaacucgguc

SEQ ID NO: 63980 - RNA, 21 nt, Human
ugaaaaaauacuuuuuaccuu

SEQ ID NO: 63981 - RNA, 18 nt, Human
uggaaagaggaccgacuc

SEQ ID NO: 63982 - RNA, 18 nt, Human
uggaaagaggaccgacuc

SEQ ID NO: 63983 - RNA, 20 nt, Human
uggaaagaggaccgacucau

SEQ ID NO: 63984 - RNA, 26 nt, Human
uggaagagcgaguggagaccgggagu

SEQ ID NO: 63985 - RNA, 21 nt, Human
uggggagcucggggcggcggg

SEQ ID NO: 63986 - RNA, 20 nt, Human
ugucccgggaccucuggggc

SEQ ID NO: 63987 - RNA, 18 nt, Human
uuuuuuuuuuuuuuucug

SEQ ID NO: 63988 - RNA, 23 nt, Human
uuuuuuuuuuuuuuucuguuugg

SEQ ID NO: 63989 - RNA, 23 nt, Human
uuuuuuuuuuuuuuuuucuguuu

SEQ ID NO: 63990 - RNA, 19 nt, Human
aaaaaaugcacugaguuug

SEQ ID NO: 63991 - RNA, 21 nt, Human
aaacaaguauacaaaacaguu

SEQ ID NO: 63992 - RNA, 19 nt, Human
aaauagaccaguucugagg

SEQ ID NO: 63993 - RNA, 21 nt, Human
aaggacacuggccagggacac

SEQ ID NO: 63994 - RNA, 22 nt, Human
acagcugggcuggcgacuggca

SEQ ID NO: 63995 - RNA, 19 nt, Human
agaguaaagcagagggcaa

SEQ ID NO: 63996 - RNA, 22 nt, Human
agcgagcacgaguguuggggac

SEQ ID NO: 63997 - RNA, 25 nt, Human
aggagugagagggaggggggucgcg

SEQ ID NO: 63998 - RNA, 26 nt, Human
aggagugagagggaggggggucgcgu

SEQ ID NO: 63999 - RNA, 19 nt, Human
agggacaccucagaggcug

SEQ ID NO: 64000 - RNA, 18 nt, Human
aggggaacagcugggcug

SEQ ID NO: 64001 - RNA, 22 nt, Human
aucuaugcuaggcggggucucc

SEQ ID NO: 64002 - RNA, 20 nt, Human
auggaaugcagggugaccca

SEQ ID NO: 64003 - RNA, 19 nt, Human
caaagugucugagcgagca

SEQ ID NO: 64004 - RNA, 23 nt, Human
caaauagaccaguucugagguuu

SEQ ID NO: 64005 - RNA, 23 nt, Human
caaccaccaaaauggauuucaac

SEQ ID NO: 64006 - RNA, 22 nt, Human
caagauggcggcucugacggcg

SEQ ID NO: 64007 - RNA, 18 nt, Human
cacgacaccaaauagacc

SEQ ID NO: 64008 - RNA, 19 nt, Human
cacggcgaccgagggacag

SEQ ID NO: 64009 - RNA, 21 nt, Human
cauaggaguaccagaaacugc

SEQ ID NO: 64010 - RNA, 23 nt, Human
ccaccaccaccucauguucccga

SEQ ID NO: 64011 - RNA, 22 nt, Human
cccaagauaaauuuaacagcuc

SEQ ID NO: 64012 - RNA, 18 nt, Human
ccuacauccccucucagc

SEQ ID NO: 64013 - RNA, 19 nt, Human
ccucagaggcugcugcucc

SEQ ID NO: 64014 - RNA, 23 nt, Human
ccucagaggcugcugcuccgagc

SEQ ID NO: 64015 - RNA, 26 nt, Human
ccucagaggcugcugcuccgagccag

SEQ ID NO: 64016 - RNA, 21 nt, Human
ccucucagcacugaacaguga

SEQ ID NO: 64017 - RNA, 23 nt, Human
ccuggaggccaggugcccauggg

SEQ ID NO: 64018 - RNA, 23 nt, Human
ccuggccccugggaaccguggga

SEQ ID NO: 64019 - RNA, 20 nt, Human
cuacugugaccaugcagaau

SEQ ID NO: 64020 - RNA, 28 nt, Human
cugacggcggccacgucagcgccuccuu

SEQ ID NO: 64021 - RNA, 25 nt, Human
cuggcacucacaccacgagccgcac

SEQ ID NO: 64022 - RNA, 24 nt, Human
gaaagcaguaagagguuccacgac

SEQ ID NO: 64023 - RNA, 21 nt, Human
gaaggacacuggccagggaca

SEQ ID NO: 64024 - RNA, 20 nt, Human
gaggagugagagggaggggg

SEQ ID NO: 64025 - RNA, 21 nt, Human
gcaagaggagugagagggagg

SEQ ID NO: 64026 - RNA, 18 nt, Human
gcacauggcuauggaaug

SEQ ID NO: 64027 - RNA, 24 nt, Human
gccuggccccugggaaccguggga

SEQ ID NO: 64028 - RNA, 18 nt, Human
ggacagauggggcccugc

SEQ ID NO: 64029 - RNA, 19 nt, Human
ggcaagaggagugagaggg

SEQ ID NO: 64030 - RNA, 22 nt, Human
ggcaagaggagugagagggagg

SEQ ID NO: 64031 - RNA, 25 nt, Human
gguggcugugggcucccagccuggc

SEQ ID NO: 64032 - RNA, 19 nt, Human
guaaagcagagggcaagag

SEQ ID NO: 64033 - RNA, 20 nt, Human
uaaauaaaaagccuggccgc

SEQ ID NO: 64034 - RNA, 21 nt, Human
uaauagcuauaauuacagugc

SEQ ID NO: 64035 - RNA, 23 nt, Human
uaucaaaauacaaaagaaaaaag

SEQ ID NO: 64036 - RNA, 23 nt, Human
uauugaaagcaguaagagguucc

SEQ ID NO: 64037 - RNA, 19 nt, Human
ucacacacagagguggggu

SEQ ID NO: 64038 - RNA, 24 nt, Human
ucacaccacgagccgcacguuugg

SEQ ID NO: 64039 - RNA, 18 nt, Human
ucccagccuggccccugg

SEQ ID NO: 64040 - RNA, 21 nt, Human
ucccauaggcugccugaaggu

SEQ ID NO: 64041 - RNA, 22 nt, Human
ucgcagucugcugcgccaccac

SEQ ID NO: 64042 - RNA, 23 nt, Human
ucucccaacacagcgacuccugg

SEQ ID NO: 64043 - RNA, 18 nt, Human
ucucuacugugaccaugc

SEQ ID NO: 64044 - RNA, 24 nt, Human
ucuuuuuacaauaaaaaaagcuga

SEQ ID NO: 64045 - RNA, 21 nt, Human
ugaaaacaaguauacaaaaca

SEQ ID NO: 64046 - RNA, 24 nt, Human
ugaaagcaguaagagguuccacga

SEQ ID NO: 64047 - RNA, 26 nt, Human
ugacccaaggacaagcgaguugcggg

SEQ ID NO: 64048 - RNA, 19 nt, Human
ugagcgagcacgaguguug

SEQ ID NO: 64049 - RNA, 18 nt, Human
ugagggagagaaagcuac

SEQ ID NO: 64050 - RNA, 19 nt, Human
ugagggagagaaagcuaca

SEQ ID NO: 64051 - RNA, 21 nt, Human
ugccacaugagaguaaagcag

SEQ ID NO: 64052 - RNA, 19 nt, Human
ugccugaagguggguaggg

SEQ ID NO: 64053 - RNA, 20 nt, Human
ugccugaagguggguagggc

SEQ ID NO: 64054 - RNA, 20 nt, Human
ugcgccaccaccaccucaug

SEQ ID NO: 64055 - RNA, 23 nt, Human
uggaaggacacuggccagggaca

SEQ ID NO: 64056 - RNA, 23 nt, Human
uggacagguggaaggacacuggc

SEQ ID NO: 64057 - RNA, 21 nt, Human
uggccccugggaaccguggga

SEQ ID NO: 64058 - RNA, 22 nt, Human
uguucaaguguucucgacuugg

SEQ ID NO: 64059 - RNA, 21 nt, Human
uugaaagcaguaagagguucc

SEQ ID NO: 64060 - RNA, 22 nt, Human
uugaaagcaguaagagguuccc

SEQ ID NO: 64061 - RNA, 24 nt, Human
uugcaggcugagggagagaaagcu

SEQ ID NO: 64062 - RNA, 21 nt, Human
aaaaaaacaaggugaggggug

SEQ ID NO: 64063 - RNA, 24 nt, Human
aaaaaaacaaggugaggggugagg

SEQ ID NO: 64064 - RNA, 24 nt, Human
aaaacaagaguuggagaagagggg

SEQ ID NO: 64065 - RNA, 21 nt, Human
aaaaggaaagaguucaaggaa

SEQ ID NO: 64066 - RNA, 25 nt, Human
aaacaagaguuggagaagagggacc

SEQ ID NO: 64067 - RNA, 19 nt, Human
aaacacccaaucccaaaag

SEQ ID NO: 64068 - RNA, 19 nt, Human
aaacagggaguagaagggc

SEQ ID NO: 64069 - RNA, 20 nt, Human
aaacagggaguagaagggcu

SEQ ID NO: 64070 - RNA, 19 nt, Human
aaauauaucucucuauaca

SEQ ID NO: 64071 - RNA, 18 nt, Human
aacaaaagagaaugaaga

SEQ ID NO: 64072 - RNA, 22 nt, Human
aacaccccccccacaaccacca

SEQ ID NO: 64073 - RNA, 25 nt, Human
aacaccccccccacaaccaccacac

SEQ ID NO: 64074 - RNA, 18 nt, Human
aacacggaaggggcagau

SEQ ID NO: 64075 - RNA, 21 nt, Human
aaccuccaacaccccccccac

SEQ ID NO: 64076 - RNA, 20 nt, Human
aaccuggccccauggagugg

SEQ ID NO: 64077 - RNA, 23 nt, Human
aagaauccaucaucuguccuauc

SEQ ID NO: 64078 - RNA, 19 nt, Human
aagaggacagcaaccacug

SEQ ID NO: 64079 - RNA, 22 nt, Human
aagcagaaagcuggaaucaggg

SEQ ID NO: 64080 - RNA, 19 nt, Human
aagggcuuguggggacagg

SEQ ID NO: 64081 - RNA, 24 nt, Human
aaugaaauagaaccuccaacaccc

SEQ ID NO: 64082 - RNA, 20 nt, Human
acacaaacacacccacaccc

SEQ ID NO: 64083 - RNA, 21 nt, Human
acacacacacucacacacaca

SEQ ID NO: 64084 - RNA, 25 nt, Human
acacacccacacccauauacacaca

SEQ ID NO: 64085 - RNA, 20 nt, Human
acaggagcccacaggacagc

SEQ ID NO: 64086 - RNA, 18 nt, Human
acaggccuagagagcaag

SEQ ID NO: 64087 - RNA, 21 nt, Human
acaguggggcccaaguagggg

SEQ ID NO: 64088 - RNA, 25 nt, Human
accaaggacagaugacccauccaac

SEQ ID NO: 64089 - RNA, 19 nt, Human
accacugcaucccacaagc

SEQ ID NO: 64090 - RNA, 22 nt, Human
acccccacccccagcccgggau

SEQ ID NO: 64091 - RNA, 18 nt, Human
acgcaaacacagagaggc

SEQ ID NO: 64092 - RNA, 19 nt, Human
acucuaacccccagaucca

SEQ ID NO: 64093 - RNA, 23 nt, Human
acugcaguuaccacuauaacacc

SEQ ID NO: 64094 - RNA, 18 nt, Human
agaaaaaccuaccugcag

SEQ ID NO: 64095 - RNA, 21 nt, Human
agaaccuccaacacccccccc

SEQ ID NO: 64096 - RNA, 25 nt, Human
agaaccuccaacaccccccccacaa

SEQ ID NO: 64097 - RNA, 23 nt, Human
agagaauaccccacucgaccucc

SEQ ID NO: 64098 - RNA, 20 nt, Human
agagaggagaggagagggag

SEQ ID NO: 64099 - RNA, 21 nt, Human
agaggagaggagagggagugg

SEQ ID NO: 64100 - RNA, 20 nt, Human
agaucagaaggguggugggg

SEQ ID NO: 64101 - RNA, 23 nt, Human
agcacugacaaccacuucaggau

SEQ ID NO: 64102 - RNA, 23 nt, Human
agcagccagggauacuaccaaga

SEQ ID NO: 64103 - RNA, 22 nt, Human
agccagcacacacaggagccca

SEQ ID NO: 64104 - RNA, 20 nt, Human
aggaaaaaauacauggaaaa

SEQ ID NO: 64105 - RNA, 21 nt, Human
aggaaggagaggcaauggggc

SEQ ID NO: 64106 - RNA, 21 nt, Human
aggcaaaguccucaugaacca

SEQ ID NO: 64107 - RNA, 27 nt, Human
aggcaaggcucuugcugggcauguggu

SEQ ID NO: 64108 - RNA, 21 nt, Human
aggcaggagaagaggcaaagu

SEQ ID NO: 64109 - RNA, 21 nt, Human
aggcgcagccagcacacacag

SEQ ID NO: 64110 - RNA, 20 nt, Human
agggaaaggacucagaugcc

SEQ ID NO: 64111 - RNA, 20 nt, Human
agggagaggguggcaaagga

SEQ ID NO: 64112 - RNA, 18 nt, Human
agggcuuagcagccaggg

SEQ ID NO: 64113 - RNA, 18 nt, Human
aggggaggcaggggaggc

SEQ ID NO: 64114 - RNA, 21 nt, Human
aggggcauggagggugaaggg

SEQ ID NO: 64115 - RNA, 20 nt, Human
aggggccaccccaugaaacc

SEQ ID NO: 64116 - RNA, 19 nt, Human
agggguaggacuggggcag

SEQ ID NO: 64117 - RNA, 19 nt, Human
agggguggguggggugcuu

SEQ ID NO: 64118 - RNA, 24 nt, Human
aggguggagagaagaguacaagga

SEQ ID NO: 64119 - RNA, 22 nt, Human
agguggacaggaaaaaggaggg

SEQ ID NO: 64120 - RNA, 23 nt, Human
auaaaugccauccuccagcccua

SEQ ID NO: 64121 - RNA, 20 nt, Human
auagaaccuccaacaccccc

SEQ ID NO: 64122 - RNA, 23 nt, Human
auagaaccuccaacacccccccc

SEQ ID NO: 64123 - RNA, 19 nt, Human
auccauuuaugagaaguga

SEQ ID NO: 64124 - RNA, 23 nt, Human
augaggcaggagaagaggcaaag

SEQ ID NO: 64125 - RNA, 20 nt, Human
caacaccccccccacaacca

SEQ ID NO: 64126 - RNA, 21 nt, Human
caacaccccccccacaaccac

SEQ ID NO: 64127 - RNA, 23 nt, Human
caacaccccccccacaaccacca

SEQ ID NO: 64128 - RNA, 23 nt, Human
caaccacugccaaacaaagagaa

SEQ ID NO: 64129 - RNA, 18 nt, Human
caagacaaaauaaaucug

SEQ ID NO: 64130 - RNA, 19 nt, Human
caagauaccugcacacacc

SEQ ID NO: 64131 - RNA, 27 nt, Human
caagcccugagcuucacuccacccccu

SEQ ID NO: 64132 - RNA, 23 nt, Human
cacacaaacacacccacacccau

SEQ ID NO: 64133 - RNA, 28 nt, Human
cacacacacucacacacacacacaggcc

SEQ ID NO: 64134 - RNA, 23 nt, Human
cacacaccauggacuugccaucc

SEQ ID NO: 64135 - RNA, 18 nt, Human
cacacaugcacgcaaaca

SEQ ID NO: 64136 - RNA, 22 nt, Human
cacaugcacgcaaacacagaga

SEQ ID NO: 64137 - RNA, 25 nt, Human
caccacacacaaacacacccacacc

SEQ ID NO: 64138 - RNA, 24 nt, Human
cacccacacccauauacacacaca

SEQ ID NO: 64139 - RNA, 20 nt, Human
caccccacuucccagcuccu

SEQ ID NO: 64140 - RNA, 21 nt, Human
cacccccagcccgggauacuu

SEQ ID NO: 64141 - RNA, 21 nt, Human
caccccccccacaaccaccac

SEQ ID NO: 64142 - RNA, 23 nt, Human
caccccccccacaaccaccacac

SEQ ID NO: 64143 - RNA, 26 nt, Human
caccccccccacaaccaccacacaca

SEQ ID NO: 64144 - RNA, 21 nt, Human
cacccccuccccgcucccccc

SEQ ID NO: 64145 - RNA, 20 nt, Human
cacgucuucacagaaacuac

SEQ ID NO: 64146 - RNA, 19 nt, Human
cacuccacccccuccccgc

SEQ ID NO: 64147 - RNA, 23 nt, Human
cacucgaccucccgaaacccaga

SEQ ID NO: 64148 - RNA, 26 nt, Human
cacugcaucccacaagcacugacaac

SEQ ID NO: 64149 - RNA, 24 nt, Human
cagauuggucccuggagcccccaa

SEQ ID NO: 64150 - RNA, 18 nt, Human
cagcaaccacugccaaac

SEQ ID NO: 64151 - RNA, 18 nt, Human
cagcugcgccgcugcggc

SEQ ID NO: 64152 - RNA, 21 nt, Human
caggaaaaaggaggggaggca

SEQ ID NO: 64153 - RNA, 23 nt, Human
caggaagcagaaagcuggaauca

SEQ ID NO: 64154 - RNA, 20 nt, Human
cagggucacagucaucgcgu

SEQ ID NO: 64155 - RNA, 19 nt, Human
caguagcaacagcuucuga

SEQ ID NO: 64156 - RNA, 25 nt, Human
caguagguaugucaggggugggugg

SEQ ID NO: 64157 - RNA, 18 nt, Human
cagucaaagacuggggca

SEQ ID NO: 64158 - RNA, 23 nt, Human
caguggcagucugguuuuggccu

SEQ ID NO: 64159 - RNA, 24 nt, Human
cauccagaaaaaccuaccugcaga

SEQ ID NO: 64160 - RNA, 22 nt, Human
ccacacacaaacacacccacac

SEQ ID NO: 64161 - RNA, 23 nt, Human
ccacccccuccccgcuccccccg

SEQ ID NO: 64162 - RNA, 22 nt, Human
ccacgucuucacagaaacuaca

SEQ ID NO: 64163 - RNA, 21 nt, Human
ccacucuaacccccagaucca

SEQ ID NO: 64164 - RNA, 21 nt, Human
ccacugcaucccacaagcacu

SEQ ID NO: 64165 - RNA, 22 nt, Human
ccagcccgggauacuucccacc

SEQ ID NO: 64166 - RNA, 20 nt, Human
ccaguaaauuggaaugacuc

SEQ ID NO: 64167 - RNA, 30 nt, Human
ccagucaagcuccagaggaacagaucugaa

SEQ ID NO: 64168 - RNA, 22 nt, Human
cccaaugcccugggucccuaac

SEQ ID NO: 64169 - RNA, 22 nt, Human
cccacaaccaccacacacaaac

SEQ ID NO: 64170 - RNA, 21 nt, Human
cccaccuucuucccuuaaucu

SEQ ID NO: 64171 - RNA, 19 nt, Human
cccagauuggucccuggag

SEQ ID NO: 64172 - RNA, 19 nt, Human
ccccaaugcccuggguccc

SEQ ID NO: 64173 - RNA, 20 nt, Human
ccccacccccagcccgggau

SEQ ID NO: 64174 - RNA, 20 nt, Human
cccccaaaaaaacaagguga

SEQ ID NO: 64175 - RNA, 21 nt, Human
cccccaaaaaaacaaggugag

SEQ ID NO: 64176 - RNA, 22 nt, Human
cccccaaugcccugggucccua

SEQ ID NO: 64177 - RNA, 23 nt, Human
cccccacaaccaccacacacaaa

SEQ ID NO: 64178 - RNA, 24 nt, Human
ccccccacaaccaccacacacaaa

SEQ ID NO: 64179 - RNA, 24 nt, Human
cccccuccccgcuccccccggccc

SEQ ID NO: 64180 - RNA, 21 nt, Human
ccccgcuccccccggccccca

SEQ ID NO: 64181 - RNA, 18 nt, Human
ccccggcucccuccuucc

SEQ ID NO: 64182 - RNA, 18 nt, Human
cccggcucccuccuuccu

SEQ ID NO: 64183 - RNA, 21 nt, Human
cccugagcuucacuccacccc

SEQ ID NO: 64184 - RNA, 25 nt, Human
ccgcuccgcucccucuggcucccca

SEQ ID NO: 64185 - RNA, 18 nt, Human
ccggcugcugcccuggcc

SEQ ID NO: 64186 - RNA, 18 nt, Human
ccuaacacacaccaugga

SEQ ID NO: 64187 - RNA, 21 nt, Human
ccucaggaacaagugcccccu

SEQ ID NO: 64188 - RNA, 21 nt, Human
ccuccaacaccccccccacaa

SEQ ID NO: 64189 - RNA, 21 nt, Human
ccucccaccuucuucccuuaa

SEQ ID NO: 64190 - RNA, 22 nt, Human
ccuccccgcuccccccggcccc

SEQ ID NO: 64191 - RNA, 23 nt, Human
ccuccuaacauuuccagccccag

SEQ ID NO: 64192 - RNA, 21 nt, Human
ccugagcuucacuccaccccc

SEQ ID NO: 64193 - RNA, 18 nt, Human
ccugcacacaccugcugc

SEQ ID NO: 64194 - RNA, 23 nt, Human
ccugcacacaccugcugcauccu

SEQ ID NO: 64195 - RNA, 24 nt, Human
cgcaaacacagagaggcccgugca

SEQ ID NO: 64196 - RNA, 19 nt, Human
cgccucugccccgcagguu

SEQ ID NO: 64197 - RNA, 22 nt, Human
cgcugcggccgccgccucugcc

SEQ ID NO: 64198 - RNA, 22 nt, Human
cuagagaaagucagggaaugag

SEQ ID NO: 64199 - RNA, 26 nt, Human
cucaucaucaggacagcaauuaggga

SEQ ID NO: 64200 - RNA, 24 nt, Human
cuccaacaccccccccacaaccac

SEQ ID NO: 64201 - RNA, 22 nt, Human
cuccacccccuccccgcucccc

SEQ ID NO: 64202 - RNA, 21 nt, Human
cucccuccuuccuucccucca

SEQ ID NO: 64203 - RNA, 22 nt, Human
cucccucuggcuccccaagccg

SEQ ID NO: 64204 - RNA, 18 nt, Human
cugcagacagagagacgc

SEQ ID NO: 64205 - RNA, 23 nt, Human
cuggagcccccaaaaaaacaagg

SEQ ID NO: 64206 - RNA, 23 nt, Human
cuggagcugugcggcguaccccc

SEQ ID NO: 64207 - RNA, 25 nt, Human
cuggccccauggaguggggcuuggg

SEQ ID NO: 64208 - RNA, 18 nt, Human
cuguccuaucauccagaa

SEQ ID NO: 64209 - RNA, 24 nt, Human
gaaaaugguggugaagaauccauc

SEQ ID NO: 64210 - RNA, 22 nt, Human
gaaaugaauacauuuuuaaaug

SEQ ID NO: 64211 - RNA, 20 nt, Human
gaagggacagcaaggauggu

SEQ ID NO: 64212 - RNA, 26 nt, Human
gaaugggauuggcccaugccucaccu

SEQ ID NO: 64213 - RNA, 24 nt, Human
gacagcccuacugggagaccgugu

SEQ ID NO: 64214 - RNA, 20 nt, Human
gacaggaaaaaggaggggag

SEQ ID NO: 64215 - RNA, 26 nt, Human
gaccaaggacagaugacccauccaac

SEQ ID NO: 64216 - RNA, 24 nt, Human
gacccaggcgaggaccucaggaac

SEQ ID NO: 64217 - RNA, 21 nt, Human
gagaaaauucugaccaaggac

SEQ ID NO: 64218 - RNA, 19 nt, Human
gagaagaguacaaggaaaa

SEQ ID NO: 64219 - RNA, 18 nt, Human
gagaggagagggaguggg

SEQ ID NO: 64220 - RNA, 20 nt, Human
gagcaagauaccugcacaca

SEQ ID NO: 64221 - RNA, 22 nt, Human
gauccuguuccugcuaucagcu

SEQ ID NO: 64222 - RNA, 23 nt, Human
gcacacacaggagcccacaggac

SEQ ID NO: 64223 - RNA, 18 nt, Human
gcacuggaaggcaggaau

SEQ ID NO: 64224 - RNA, 23 nt, Human
gcagccagcacacacaggagccc

SEQ ID NO: 64225 - RNA, 21 nt, Human
gcccugggcccugaccuuagc

SEQ ID NO: 64226 - RNA, 18 nt, Human
gccgcugcggccgccgcc

SEQ ID NO: 64227 - RNA, 20 nt, Human
gcggccgccgccucugcccc

SEQ ID NO: 64228 - RNA, 23 nt, Human
gcucccuccuuccuucccuccac

SEQ ID NO: 64229 - RNA, 25 nt, Human
gcucccuccuuccuucccuccaccu

SEQ ID NO: 64230 - RNA, 23 nt, Human
gcuccgcucccucuggcucccca

SEQ ID NO: 64231 - RNA, 21 nt, Human
ggacuugccauccccaccccc

SEQ ID NO: 64232 - RNA, 19 nt, Human
ggagggaagcaucuguggg

SEQ ID NO: 64233 - RNA, 20 nt, Human
ggcagcugucucggagcuca

SEQ ID NO: 64234 - RNA, 22 nt, Human
ggcaguguccuggcugcaagcc

SEQ ID NO: 64235 - RNA, 24 nt, Human
gggauuggucauauagguggacag

SEQ ID NO: 64236 - RNA, 19 nt, Human
gggcauguggacaugauac

SEQ ID NO: 64237 - RNA, 18 nt, Human
ggggggcccugggcccug

SEQ ID NO: 64238 - RNA, 20 nt, Human
gggugaggccugaagugagg

SEQ ID NO: 64239 - RNA, 20 nt, Human
gggugguggggcacuggaag

SEQ ID NO: 64240 - RNA, 20 nt, Human
ggugagagagagagaggggc

SEQ ID NO: 64241 - RNA, 19 nt, Human
gguuuuggccuggucccug

SEQ ID NO: 64242 - RNA, 20 nt, Human
gugaggggugaggccugaag

SEQ ID NO: 64243 - RNA, 20 nt, Human
guggggggcccugggcccug

SEQ ID NO: 64244 - RNA, 24 nt, Human
guucaaggaaggagaggcaauggg

SEQ ID NO: 64245 - RNA, 33 nt, Human
uaaaugaaauagaaccuccaacaccccccccuu

SEQ ID NO: 64246 - RNA, 19 nt, Human
uaacaaaagagaaugaaga

SEQ ID NO: 64247 - RNA, 18 nt, Human
uaacaccacagacaaacu

SEQ ID NO: 64248 - RNA, 23 nt, Human
uaaccagucaaagacuggggcag

SEQ ID NO: 64249 - RNA, 20 nt, Human
uaaggucagcuaugucaccc

SEQ ID NO: 64250 - RNA, 24 nt, Human
uacacacacacucacacacacaca

SEQ ID NO: 64251 - RNA, 19 nt, Human
uacauggaaaagggcaaau

SEQ ID NO: 64252 - RNA, 21 nt, Human
uacccagggcccuggccacac

SEQ ID NO: 64253 - RNA, 20 nt, Human
uacugcccccugcuggacag

SEQ ID NO: 64254 - RNA, 20 nt, Human
uagaaccuccaacacccccc

SEQ ID NO: 64255 - RNA, 19 nt, Human
uaggaaaaaauacauggaa

SEQ ID NO: 64256 - RNA, 18 nt, Human
uaggacuggggcagggug

SEQ ID NO: 64257 - RNA, 21 nt, Human
uauacacacacacucacacac

SEQ ID NO: 64258 - RNA, 20 nt, Human
ucaaggaaggagaggcaaug

SEQ ID NO: 64259 - RNA, 22 nt, Human
ucacagaaacuacagaagucag

SEQ ID NO: 64260 - RNA, 21 nt, Human
ucagcugcgccgcugcggccg

SEQ ID NO: 64261 - RNA, 23 nt, Human
ucagggaaugaggcaggagaaga

SEQ ID NO: 64262 - RNA, 21 nt, Human
uccacucuaacccccagaucc

SEQ ID NO: 64263 - RNA, 19 nt, Human
uccccaccccccagucaag

SEQ ID NO: 64264 - RNA, 22 nt, Human
uccccaccccccagucaagcuc

SEQ ID NO: 64265 - RNA, 19 nt, Human
uccccgcuccccccggccc

SEQ ID NO: 64266 - RNA, 19 nt, Human
uccccggcucccuccuucc

SEQ ID NO: 64267 - RNA, 21 nt, Human
ucccuggagcccccaaaaaaa

SEQ ID NO: 64268 - RNA, 22 nt, Human
ucccuggagcccccaaaaaaac

SEQ ID NO: 64269 - RNA, 24 nt, Human
ucccugguauggaagacuugaucc

SEQ ID NO: 64270 - RNA, 24 nt, Human
uccuaucauccagaaaaaccuacc

SEQ ID NO: 64271 - RNA, 18 nt, Human
uccuuccuucccuccacc

SEQ ID NO: 64272 - RNA, 18 nt, Human
uccuuuagcauauccugg

SEQ ID NO: 64273 - RNA, 24 nt, Human
ucuggcuccccaagccgacuucag

SEQ ID NO: 64274 - RNA, 18 nt, Human
ucuguccuaucauccaga

SEQ ID NO: 64275 - RNA, 21 nt, Human
ugaaacacccaaucccaaaag

SEQ ID NO: 64276 - RNA, 21 nt, Human
ugaaauagaaccuccaacacc

SEQ ID NO: 64277 - RNA, 20 nt, Human
ugacaggcuccagugggcag

SEQ ID NO: 64278 - RNA, 24 nt, Human
ugacccauccaaccccuaagauca

SEQ ID NO: 64279 - RNA, 23 nt, Human
ugagaaaauucugaccaaggaca

SEQ ID NO: 64280 - RNA, 22 nt, Human
ugagaagugagugaggauggca

SEQ ID NO: 64281 - RNA, 21 nt, Human
ugagagagagagaggggccac

SEQ ID NO: 64282 - RNA, 19 nt, Human
ugagcaaggauagagaagg

SEQ ID NO: 64283 - RNA, 22 nt, Human
ugccaaacaaagagaauacccc

SEQ ID NO: 64284 - RNA, 19 nt, Human
ugccaagggcuuagcagcc

SEQ ID NO: 64285 - RNA, 23 nt, Human
ugcccuggcccacuccccggcuc

SEQ ID NO: 64286 - RNA, 21 nt, Human
ugcccugggucccuaacacac

SEQ ID NO: 64287 - RNA, 25 nt, Human
ugccucaccuucuccuaauaacaaa

SEQ ID NO: 64288 - RNA, 21 nt, Human
ugcugcccuggcccacucccc

SEQ ID NO: 64289 - RNA, 18 nt, Human
ugcuguggggggcccugg

SEQ ID NO: 64290 - RNA, 21 nt, Human
ugcuuucuggggacagugggg

SEQ ID NO: 64291 - RNA, 21 nt, Human
uggacaggaaaaaggagggga

SEQ ID NO: 64292 - RNA, 20 nt, Human
uggagcccccaaaaaaacaa

SEQ ID NO: 64293 - RNA, 28 nt, Human
uggagcccccaaaaaaacaaggugaggg

SEQ ID NO: 64294 - RNA, 21 nt, Human
uggcaggggcauggaggguga

SEQ ID NO: 64295 - RNA, 25 nt, Human
ugggaacagucaucuagagauaaau

SEQ ID NO: 64296 - RNA, 18 nt, Human
ugggaaggggucccucag

SEQ ID NO: 64297 - RNA, 19 nt, Human
ugggcccugaccuuagcag

SEQ ID NO: 64298 - RNA, 20 nt, Human
ugggguggggggagcgggag

SEQ ID NO: 64299 - RNA, 23 nt, Human
ugguauggaagacuugauccugu

SEQ ID NO: 64300 - RNA, 21 nt, Human
ugguggggaaggaucaguuga

SEQ ID NO: 64301 - RNA, 23 nt, Human
uguagaaaggaccaccccugcca

SEQ ID NO: 64302 - RNA, 21 nt, Human
ugucucggagcucaggcgcag

SEQ ID NO: 64303 - RNA, 19 nt, Human
uguggggacagggaaagga

SEQ ID NO: 64304 - RNA, 18 nt, Human
uguuagggcugucuggcu

SEQ ID NO: 64305 - RNA, 21 nt, Human
uucaaggaaggagaggcaaug

SEQ ID NO: 64306 - RNA, 21 nt, Human
uucacuccacccccuccccgc

SEQ ID NO: 64307 - RNA, 19 nt, Human
uuccauguaaaacagggag

SEQ ID NO: 64308 - RNA, 26 nt, Human
uugggaacagucaucuagagauaaau

SEQ ID NO: 64309 - RNA, 22 nt, Human
uuuauuuccuccacucuaaccc

SEQ ID NO: 64310 - RNA, 20 nt, Human
uuucuggggacaguggggcc

SEQ ID NO: 64311 - RNA, 18 nt, Human
aaacaccgcagccgcccc

SEQ ID NO: 64312 - RNA, 24 nt, Human
aacuuacaggcaaaugcuaaaaaa

SEQ ID NO: 64313 - RNA, 18 nt, Human
aagaaacagggucgaggu

SEQ ID NO: 64314 - RNA, 25 nt, Human
aagucacuuccauccccccgccccc

SEQ ID NO: 64315 - RNA, 24 nt, Human
acaaaaauaaaaacuaugugacug

SEQ ID NO: 64316 - RNA, 22 nt, Human
acccugcuguccaagugugcag

SEQ ID NO: 64317 - RNA, 22 nt, Human
acugccagccucuucuccaccu

SEQ ID NO: 64318 - RNA, 19 nt, Human
acuuccauccccccgcccc

SEQ ID NO: 64319 - RNA, 24 nt, Human
agaaaaauaagaaacagggucgag

SEQ ID NO: 64320 - RNA, 23 nt, Human
agaagaaaaauaagaaacagggg

SEQ ID NO: 64321 - RNA, 24 nt, Human
agacacaaaaauaaaaacuaugug

SEQ ID NO: 64322 - RNA, 19 nt, Human
aggaaagggagggggggcu

SEQ ID NO: 64323 - RNA, 18 nt, Human
aggcagggaggccuugaa

SEQ ID NO: 64324 - RNA, 21 nt, Human
agguuccagggagcacagcug

SEQ ID NO: 64325 - RNA, 22 nt, Human
aguguggcaccaaaacgggaca

SEQ ID NO: 64326 - RNA, 25 nt, Human
aucccaucucccauccccaccccag

SEQ ID NO: 64327 - RNA, 20 nt, Human
caaaacgggacaccccaugc

SEQ ID NO: 64328 - RNA, 21 nt, Human
cacagacacaaaaauaaaaac

SEQ ID NO: 64329 - RNA, 23 nt, Human
cagacacaaaaauaaaaacuaug

SEQ ID NO: 64330 - RNA, 26 nt, Human
caucccaaacacauucuccaagucac

SEQ ID NO: 64331 - RNA, 20 nt, Human
ccaccccgagcugccuucuu

SEQ ID NO: 64332 - RNA, 24 nt, Human
ccccaccccaguguggcaccaaaa

SEQ ID NO: 64333 - RNA, 25 nt, Human
ccccaccccaguguggcaccaaaag

SEQ ID NO: 64334 - RNA, 20 nt, Human
cccgagcugccuucuuccuc

SEQ ID NO: 64335 - RNA, 23 nt, Human
cccgcccccaaacacauccaauu

SEQ ID NO: 64336 - RNA, 19 nt, Human
cccgcgagacccccgcaga

SEQ ID NO: 64337 - RNA, 21 nt, Human
cccggugaaacaccgcagccg

SEQ ID NO: 64338 - RNA, 18 nt, Human
ccgccccgcgagaccccc

SEQ ID NO: 64339 - RNA, 21 nt, Human
cgcgagacccccgcagacacc

SEQ ID NO: 64340 - RNA, 20 nt, Human
cgggacaccccaugcuccuu

SEQ ID NO: 64341 - RNA, 25 nt, Human
cuaggugggaggaaagggagggggg

SEQ ID NO: 64342 - RNA, 22 nt, Human
cucauagaggcgcucaaggccc

SEQ ID NO: 64343 - RNA, 24 nt, Human
cuccacaguccugcagcgcccacu

SEQ ID NO: 64344 - RNA, 19 nt, Human
cucuccucgagccuuuccc

SEQ ID NO: 64345 - RNA, 21 nt, Human
cugacugagaggucacaggcu

SEQ ID NO: 64346 - RNA, 22 nt, Human
cugcagccuugcacaugaguga

SEQ ID NO: 64347 - RNA, 19 nt, Human
gaggcgcucaaggcccugc

SEQ ID NO: 64348 - RNA, 23 nt, Human
gaucaucucauagaggcgcucaa

SEQ ID NO: 64349 - RNA, 19 nt, Human
gcucaaggcccugcugcag

SEQ ID NO: 64350 - RNA, 22 nt, Human
ggaaagggagggggggcuuggg

SEQ ID NO: 64351 - RNA, 23 nt, Human
ggagauaguuauuucaucccaaa

SEQ ID NO: 64352 - RNA, 25 nt, Human
ggaggaaagggagggggggcuuggg

SEQ ID NO: 64353 - RNA, 22 nt, Human
ggugaaacaccgcagccgcccc

SEQ ID NO: 64354 - RNA, 20 nt, Human
gugggaggaaagggaggggg

SEQ ID NO: 64355 - RNA, 18 nt, Human
uaaggcgccuaguagagg

SEQ ID NO: 64356 - RNA, 23 nt, Human
uacuaggugggaggaaagggagg

SEQ ID NO: 64357 - RNA, 21 nt, Human
uagcucucggacugccagccu

SEQ ID NO: 64358 - RNA, 21 nt, Human
uaggugggaggaaagggaggg

SEQ ID NO: 64359 - RNA, 22 nt, Human
ucacaggcuggucccacccugc

SEQ ID NO: 64360 - RNA, 22 nt, Human
ucacaggcuggucccacccugc

SEQ ID NO: 64361 - RNA, 24 nt, Human
uccaagucacuuccauccccccgc

SEQ ID NO: 64362 - RNA, 22 nt, Human
uccauccccccgcccccaaaca

SEQ ID NO: 64363 - RNA, 24 nt, Human
ucccacccugcuguccaagugugc

SEQ ID NO: 64364 - RNA, 25 nt, Human
ucccacccugcuguccaagugugca

SEQ ID NO: 64365 - RNA, 22 nt, Human
ucccaucucccauccccacccc

SEQ ID NO: 64366 - RNA, 19 nt, Human
uccucuugaggaucaucuc

SEQ ID NO: 64367 - RNA, 22 nt, Human
ucgagguagagucacaguuuac

SEQ ID NO: 64368 - RNA, 20 nt, Human
ucuccaagucacuuccaucc

SEQ ID NO: 64369 - RNA, 22 nt, Human
ucucuccuucauugagguggac

SEQ ID NO: 64370 - RNA, 18 nt, Human
ucuugccaccccgagcug

SEQ ID NO: 64371 - RNA, 20 nt, Human
ugaaacaccgcagccgcccc

SEQ ID NO: 64372 - RNA, 20 nt, Human
ugacugagaggucacaggcu

SEQ ID NO: 64373 - RNA, 24 nt, Human
ugagguggacagguccugcacccc

SEQ ID NO: 64374 - RNA, 22 nt, Human
ugcaaagacaucccaucuccca

SEQ ID NO: 64375 - RNA, 18 nt, Human
ugcagccuugcacaugag

SEQ ID NO: 64376 - RNA, 23 nt, Human
ugguauuccuagaaaagcagccu

SEQ ID NO: 64377 - RNA, 19 nt, Human
uguggggagggguucuugg

SEQ ID NO: 64378 - RNA, 24 nt, Human
uuacauuuacgucuccacaguccu

SEQ ID NO: 64379 - RNA, 18 nt, Human
aaacagaaaaaaaaaagg

SEQ ID NO: 64380 - RNA, 21 nt, Human
aaacagaaaaaaaaaaggaaa

SEQ ID NO: 64381 - RNA, 24 nt, Human
aaacagaaaaaaaaaaggaaaccc

SEQ ID NO: 64382 - RNA, 25 nt, Human
aaacagaaaaaaaaaaggaaaccca

SEQ ID NO: 64383 - RNA, 26 nt, Human
aaacagaaaaaaaaaaggaaacccag

SEQ ID NO: 64384 - RNA, 19 nt, Human
acccaaaacagaaaaaaaa

SEQ ID NO: 64385 - RNA, 18 nt, Human
acccgaagcccucaccuu

SEQ ID NO: 64386 - RNA, 25 nt, Human
agaacaugcaggcaggagcaggagc

SEQ ID NO: 64387 - RNA, 20 nt, Human
agcaccacccgaagcccuca

SEQ ID NO: 64388 - RNA, 18 nt, Human
aggaaagggcacugccug

SEQ ID NO: 64389 - RNA, 18 nt, Human
aggcaggagaguggaccc

SEQ ID NO: 64390 - RNA, 21 nt, Human
aggcaggagaguggaccccuc

SEQ ID NO: 64391 - RNA, 23 nt, Human
aggcaggagaguggaccccucug

SEQ ID NO: 64392 - RNA, 25 nt, Human
aggcaggagaguggaccccucuggu

SEQ ID NO: 64393 - RNA, 19 nt, Human
aggcaggagcaggagcaga

SEQ ID NO: 64394 - RNA, 21 nt, Human
agucuggucaucccggggaug

SEQ ID NO: 64395 - RNA, 21 nt, Human
aucccggggaugcacgcagga

SEQ ID NO: 64396 - RNA, 22 nt, Human
aucccugcuccuccucuggaag

SEQ ID NO: 64397 - RNA, 21 nt, Human
caaaacagaaaaaaaaaagga

SEQ ID NO: 64398 - RNA, 26 nt, Human
caaccuggccccuagaguacacccaa

SEQ ID NO: 64399 - RNA, 26 nt, Human
cacccaaaacagaaaaaaaaaaggaa

SEQ ID NO: 64400 - RNA, 23 nt, Human
cacccgaagcccucaccuucccc

SEQ ID NO: 64401 - RNA, 23 nt, Human
caggaagccccuuccauaggucc

SEQ ID NO: 64402 - RNA, 20 nt, Human
caucaggggccugccccugg

SEQ ID NO: 64403 - RNA, 24 nt, Human
cauuauagcaccacccgaagcccu

SEQ ID NO: 64404 - RNA, 19 nt, Human
ccaaaacagaaaaaaaaaa

SEQ ID NO: 64405 - RNA, 19 nt, Human
ccacccgaagcccucaccu

SEQ ID NO: 64406 - RNA, 18 nt, Human
cccaaaacagaaaaaaaa

SEQ ID NO: 64407 - RNA, 23 nt, Human
cccaaaacagaaaaaaaaaagga

SEQ ID NO: 64408 - RNA, 25 nt, Human
cccaaaacagaaaaaaaaaaggaaa

SEQ ID NO: 64409 - RNA, 19 nt, Human
ccccuagaguacacccaaa

SEQ ID NO: 64410 - RNA, 25 nt, Human
ccuggccccuagaguacacccaaaa

SEQ ID NO: 64411 - RNA, 25 nt, Human
cgggagucuggucaucccggggaug

SEQ ID NO: 64412 - RNA, 20 nt, Human
gaaaaaaaaaaggaaaccca

SEQ ID NO: 64413 - RNA, 21 nt, Human
gaagccccuuccauagguccc

SEQ ID NO: 64414 - RNA, 21 nt, Human
gaguacacccaaaacagaaaa

SEQ ID NO: 64415 - RNA, 19 nt, Human
gaguggaccccucugugcc

SEQ ID NO: 64416 - RNA, 20 nt, Human
ggccccuagaguacacccaa

SEQ ID NO: 64417 - RNA, 24 nt, Human
gggccuuggccaggaagccccuuc

SEQ ID NO: 64418 - RNA, 24 nt, Human
gggggccuuggccaggaagccccu

SEQ ID NO: 64419 - RNA, 19 nt, Human
uacacccaaaacagaaaaa

SEQ ID NO: 64420 - RNA, 23 nt, Human
ucccggggaugcacgcaggagcu

SEQ ID NO: 64421 - RNA, 23 nt, Human
ucccugcuccuccucuggaagag

SEQ ID NO: 64422 - RNA, 19 nt, Human
uggaagagggggccuuggc

SEQ ID NO: 64423 - RNA, 19 nt, Human
uggaccccucugugcccag

SEQ ID NO: 64424 - RNA, 22 nt, Human
uggccaggaagccccuuccaua

SEQ ID NO: 64425 - RNA, 19 nt, Human
uggccccuagaguacaccc

SEQ ID NO: 64426 - RNA, 22 nt, Human
ugggggaggaaaagugggagga

SEQ ID NO: 64427 - RNA, 23 nt, Human
uguggcuaugggggaggaaaagu

SEQ ID NO: 64428 - RNA, 19 nt, Human
aagaaaaugauuagcuuuc

SEQ ID NO: 64429 - RNA, 24 nt, Human
caaguuagaaaauauaagcuuuua

SEQ ID NO: 64430 - RNA, 22 nt, Human
cuccugauuccaagagucccac

SEQ ID NO: 64431 - RNA, 24 nt, Human
uaacucuaugcuuaagaaaaugau

SEQ ID NO: 64432 - RNA, 21 nt, Human
uaaugccagcaaauuuuuaau

SEQ ID NO: 64433 - RNA, 23 nt, Human
uagcuuugucuccugauuccaag

SEQ ID NO: 64434 - RNA, 21 nt, Human
ugaaagaacaagucuuuagaa

SEQ ID NO: 64435 - RNA, 21 nt, Human
uggaaaaacauuuuucugaaa

SEQ ID NO: 64436 - RNA, 23 nt, Human
uuggaaaaacauuuuucugaaag

SEQ ID NO: 64437 - RNA, 19 nt, Human
aaaugcuguuuaugacuuc

SEQ ID NO: 64438 - RNA, 19 nt, Human
aacugcaaaaaaccaaaua

SEQ ID NO: 64439 - RNA, 21 nt, Human
acaacagcaacaagaccagua

SEQ ID NO: 64440 - RNA, 18 nt, Human
acccugugaacugcaaaa

SEQ ID NO: 64441 - RNA, 22 nt, Human
acccugugaacugcaaaaaacc

SEQ ID NO: 64442 - RNA, 22 nt, Human
acuguagcauauuaauacccug

SEQ ID NO: 64443 - RNA, 19 nt, Human
agaauguguaaauguucuc

SEQ ID NO: 64444 - RNA, 20 nt, Human
agccauugaacuucuauagg

SEQ ID NO: 64445 - RNA, 24 nt, Human
aguauucaucuauccccucaaugc

SEQ ID NO: 64446 - RNA, 19 nt, Human
caaacuucugacuacuccc

SEQ ID NO: 64447 - RNA, 20 nt, Human
caaacuucugacuacucccc

SEQ ID NO: 64448 - RNA, 22 nt, Human
caucuauccccucaaugccuca

SEQ ID NO: 64449 - RNA, 24 nt, Human
ccaaaauagaggggaaacuuuaca

SEQ ID NO: 64450 - RNA, 18 nt, Human
ccacuuugcuucucuuug

SEQ ID NO: 64451 - RNA, 18 nt, Human
cccagacaaccauuuagu

SEQ ID NO: 64452 - RNA, 21 nt, Human
cccuaagugacagcuaaagaa

SEQ ID NO: 64453 - RNA, 20 nt, Human
ccucaaugccucauaauucu

SEQ ID NO: 64454 - RNA, 21 nt, Human
ccugggaggccugguuuacua

SEQ ID NO: 64455 - RNA, 21 nt, Human
cuaacccccaaauguuuagaa

SEQ ID NO: 64456 - RNA, 21 nt, Human
cuauccccucaaugccucaua

SEQ ID NO: 64457 - RNA, 19 nt, Human
cuggagcucgccauccugg

SEQ ID NO: 64458 - RNA, 21 nt, Human
gaacaacagcaacaagaccag

SEQ ID NO: 64459 - RNA, 23 nt, Human
gaggaaagaugaaaaaccacuua

SEQ ID NO: 64460 - RNA, 19 nt, Human
ggagcucgccauccuggga

SEQ ID NO: 64461 - RNA, 19 nt, Human
gggaaacuuuacaauugug

SEQ ID NO: 64462 - RNA, 24 nt, Human
guauagccaggcugugggaggagg

SEQ ID NO: 64463 - RNA, 22 nt, Human
ucaaugccucauaauucuggaa

SEQ ID NO: 64464 - RNA, 24 nt, Human
ugaaaaaccacuuaaaugugaagg

SEQ ID NO: 64465 - RNA, 20 nt, Human
ugacaaccaacaagcugcug

SEQ ID NO: 64466 - RNA, 19 nt, Human
ugagguagacaguguuauc

SEQ ID NO: 64467 - RNA, 18 nt, Human
ugcacuguauagccaggc

SEQ ID NO: 64468 - RNA, 19 nt, Human
uggaaugccuguugugaaa

SEQ ID NO: 64469 - RNA, 24 nt, Human
ugggaggagggaggaaagaugaag

SEQ ID NO: 64470 - RNA, 20 nt, Human
uggucccaggucuaaccccc

SEQ ID NO: 64471 - RNA, 22 nt, Human
uuuacauaguacuguagcauau

SEQ ID NO: 64472 - RNA, 22 nt, Human
uuuagaaggaagguuauccaaa

SEQ ID NO: 64473 - RNA, 20 nt, Human
aaacugccuuuauucuauua

SEQ ID NO: 64474 - RNA, 22 nt, Human
aaaugaauuuuccaucugacuu

SEQ ID NO: 64475 - RNA, 21 nt, Human
acagugaggagaaaagagcac

SEQ ID NO: 64476 - RNA, 22 nt, Human
acaugaaaccacagaacuguaa

SEQ ID NO: 64477 - RNA, 19 nt, Human
acuuagcccagcuccaugg

SEQ ID NO: 64478 - RNA, 19 nt, Human
agaagagagacugagugcc

SEQ ID NO: 64479 - RNA, 21 nt, Human
agacagguuaugccaucuucc

SEQ ID NO: 64480 - RNA, 19 nt, Human
agauaaaugaaaaaggcca

SEQ ID NO: 64481 - RNA, 22 nt, Human
agcacugugaauuagagccaga

SEQ ID NO: 64482 - RNA, 22 nt, Human
augaaaccacagaacuguaacu

SEQ ID NO: 64483 - RNA, 18 nt, Human
augaauuuuccaucugac

SEQ ID NO: 64484 - RNA, 22 nt, Human
caccccagagcuaugccaacaa

SEQ ID NO: 64485 - RNA, 19 nt, Human
cagcugcaugaacuugggc

SEQ ID NO: 64486 - RNA, 22 nt, Human
caggugggagugcagaggaggg

SEQ ID NO: 64487 - RNA, 25 nt, Human
cggaguaaagcccugaaguggugac

SEQ ID NO: 64488 - RNA, 22 nt, Human
cuagaaagaagcaagaaguuaa

SEQ ID NO: 64489 - RNA, 24 nt, Human
cucaccagaguaccuugcagcuga

SEQ ID NO: 64490 - RNA, 19 nt, Human
cuccucugggagggaaccu

SEQ ID NO: 64491 - RNA, 25 nt, Human
cugccacagcugcaugaacuugggc

SEQ ID NO: 64492 - RNA, 18 nt, Human
gaaaccacagaacuguaa

SEQ ID NO: 64493 - RNA, 24 nt, Human
guaacucugccacagcugcaugaa

SEQ ID NO: 64494 - RNA, 21 nt, Human
gugucaggugggagugcagag

SEQ ID NO: 64495 - RNA, 19 nt, Human
uaaauacugguagcaagau

SEQ ID NO: 64496 - RNA, 19 nt, Human
uaagauuaauaaacagcac

SEQ ID NO: 64497 - RNA, 22 nt, Human
uaagauuaauaaacagcacuuc

SEQ ID NO: 64498 - RNA, 22 nt, Human
uaauucacaaaaguuaccaacu

SEQ ID NO: 64499 - RNA, 23 nt, Human
uacacaguaacuauaagguaacu

SEQ ID NO: 64500 - RNA, 24 nt, Human
uacacuuucuuuuuuaaaaaacca

SEQ ID NO: 64501 - RNA, 18 nt, Human
uacagugaggagaaaaga

SEQ ID NO: 64502 - RNA, 19 nt, Human
uaguuggcuucuaaauacu

SEQ ID NO: 64503 - RNA, 23 nt, Human
uauuaggaaauccaauuauacaa

SEQ ID NO: 64504 - RNA, 18 nt, Human
ucaggugggagugcagag

SEQ ID NO: 64505 - RNA, 22 nt, Human
uccaaauacacuuucuuuuuua

SEQ ID NO: 64506 - RNA, 18 nt, Human
ucugccacagcugcauga

SEQ ID NO: 64507 - RNA, 18 nt, Human
ucugguugagcccauuuu

SEQ ID NO: 64508 - RNA, 18 nt, Human
ugaauuagagccagaugc

SEQ ID NO: 64509 - RNA, 19 nt, Human
ugagaacugguggcuccuc

SEQ ID NO: 64510 - RNA, 20 nt, Human
ugagauacauggggccgaaa

SEQ ID NO: 64511 - RNA, 23 nt, Human
ugagugccacccaugagaacugg

SEQ ID NO: 64512 - RNA, 18 nt, Human
uggagagaagagagacug

SEQ ID NO: 64513 - RNA, 23 nt, Human
ugggagggaaccuggauacagug

SEQ ID NO: 64514 - RNA, 23 nt, Human
ugguaacauacauuaaguggcac

SEQ ID NO: 64515 - RNA, 24 nt, Human
ugugaauuagagccagaugcuuaa

SEQ ID NO: 64516 - RNA, 21 nt, Human
uugcagcugacagauaauagg

SEQ ID NO: 64517 - RNA, 23 nt, Human
uuuaaaaaaugaauuuuccaucu

SEQ ID NO: 64518 - RNA, 25 nt, Human
aaaaagaaccccgcuccuucgugaa

SEQ ID NO: 64519 - RNA, 19 nt, Human
aaauggguugggagggggu

SEQ ID NO: 64520 - RNA, 21 nt, Human
aagaaggugacacaggcugcc

SEQ ID NO: 64521 - RNA, 27 nt, Human
aagaaggugacacaggcugccccccac

SEQ ID NO: 64522 - RNA, 19 nt, Human
aagaggaacugaaauagag

SEQ ID NO: 64523 - RNA, 23 nt, Human
aagcucuccagcccagaucggga

SEQ ID NO: 64524 - RNA, 20 nt, Human
acuggaaaauggguugggag

SEQ ID NO: 64525 - RNA, 21 nt, Human
acuucagaauuugggcuguga

SEQ ID NO: 64526 - RNA, 23 nt, Human
agaugcauuuaaaauacacacag

SEQ ID NO: 64527 - RNA, 24 nt, Human
agccggccgcuccgggcagggggu

SEQ ID NO: 64528 - RNA, 18 nt, Human
agcuggggagaggggugg

SEQ ID NO: 64529 - RNA, 21 nt, Human
aggaggcuaagggagguggug

SEQ ID NO: 64530 - RNA, 20 nt, Human
aggcggagcgcccccggagc

SEQ ID NO: 64531 - RNA, 20 nt, Human
aggcggcggcccguguccgg

SEQ ID NO: 64532 - RNA, 18 nt, Human
aggcggcgugggcgaggg

SEQ ID NO: 64533 - RNA, 19 nt, Human
aggcggcgugggcgagggc

SEQ ID NO: 64534 - RNA, 22 nt, Human
aggcggcguugggcagguccgg

SEQ ID NO: 64535 - RNA, 22 nt, Human
aggcggcguugggcagguccgg

SEQ ID NO: 64536 - RNA, 23 nt, Human
aggcuaagggagguggugguggg

SEQ ID NO: 64537 - RNA, 24 nt, Human
aggggugggagccccauccugguu

SEQ ID NO: 64538 - RNA, 19 nt, Human
agguggugguggguccaug

SEQ ID NO: 64539 - RNA, 20 nt, Human
aguuggcaggcugaagggca

SEQ ID NO: 64540 - RNA, 21 nt, Human
auacccauaaacuccucccac

SEQ ID NO: 64541 - RNA, 22 nt, Human
auagcaaagguccacggaaaag

SEQ ID NO: 64542 - RNA, 24 nt, Human
auagcggacaucccuucuucaguu

SEQ ID NO: 64543 - RNA, 20 nt, Human
aucucguuuauuugccaaua

SEQ ID NO: 64544 - RNA, 18 nt, Human
cacacagcccgggggcca

SEQ ID NO: 64545 - RNA, 19 nt, Human
caccuggacugggcaggag

SEQ ID NO: 64546 - RNA, 18 nt, Human
cagcgaacugagcgcccc

SEQ ID NO: 64547 - RNA, 19 nt, Human
caggagccacauacccaua

SEQ ID NO: 64548 - RNA, 22 nt, Human
cauacccauaaacuccucccac

SEQ ID NO: 64549 - RNA, 24 nt, Human
ccacauacccauaaacuccuccca

SEQ ID NO: 64550 - RNA, 18 nt, Human
ccacggaaaagggagcuc

SEQ ID NO: 64551 - RNA, 21 nt, Human
ccaugggccaccagccaccuu

SEQ ID NO: 64552 - RNA, 21 nt, Human
cccagaucgggaaagaggaac

SEQ ID NO: 64553 - RNA, 20 nt, Human
cccaguaguagaagcagagu

SEQ ID NO: 64554 - RNA, 23 nt, Human
ccccagggggcgcucacucggcg

SEQ ID NO: 64555 - RNA, 18 nt, Human
cccccacuggaaaauggg

SEQ ID NO: 64556 - RNA, 23 nt, Human
ccccggagcucaccaggugcgcc

SEQ ID NO: 64557 - RNA, 23 nt, Human
ccccggagcucaccaggugcgcc

SEQ ID NO: 64558 - RNA, 18 nt, Human
ccccgggcgucccccucc

SEQ ID NO: 64559 - RNA, 18 nt, Human
cccggagcucaccaggug

SEQ ID NO: 64560 - RNA, 23 nt, Human
ccgcccuccgggcucuggggcag

SEQ ID NO: 64561 - RNA, 22 nt, Human
ccgcgacggggaacuggccaac

SEQ ID NO: 64562 - RNA, 19 nt, Human
ccggagcucaccaggugcg

SEQ ID NO: 64563 - RNA, 19 nt, Human
ccucggugcucugcguucc

SEQ ID NO: 64564 - RNA, 23 nt, Human
ccugcaugcccaucaaauaggcc

SEQ ID NO: 64565 - RNA, 22 nt, Human
ccuuccacauacaccacuucac

SEQ ID NO: 64566 - RNA, 24 nt, Human
ccuucgccgggcucuccgcccucc

SEQ ID NO: 64567 - RNA, 19 nt, Human
cgcgcucccgcucccagcc

SEQ ID NO: 64568 - RNA, 22 nt, Human
cggcccguguccggggggcuuu

SEQ ID NO: 64569 - RNA, 19 nt, Human
cggcuaggcucccuaggua

SEQ ID NO: 64570 - RNA, 20 nt, Human
cggcuaggcucccuagguac

SEQ ID NO: 64571 - RNA, 18 nt, Human
cgggagggcuccugggcg

SEQ ID NO: 64572 - RNA, 22 nt, Human
cgggcgucccccuccccgcucc

SEQ ID NO: 64573 - RNA, 23 nt, Human
cggggauuuggggcgcggaggcg

SEQ ID NO: 64574 - RNA, 20 nt, Human
cguagccugugcuccagggc

SEQ ID NO: 64575 - RNA, 21 nt, Human
cuccagggcaggcggcggccc

SEQ ID NO: 64576 - RNA, 19 nt, Human
cuccuccgaccuuccacau

SEQ ID NO: 64577 - RNA, 29 nt, Human
cugaaauagaguagaagugaaagcccacu

SEQ ID NO: 64578 - RNA, 22 nt, Human
cuucacagcaagccugguccuc

SEQ ID NO: 64579 - RNA, 18 nt, Human
cuuccacauacaccacuu

SEQ ID NO: 64580 - RNA, 19 nt, Human
gagcgcccccggagcucac

SEQ ID NO: 64581 - RNA, 19 nt, Human
gagcuggggagaggggugg

SEQ ID NO: 64582 - RNA, 23 nt, Human
gagguggugguggguccaugggc

SEQ ID NO: 64583 - RNA, 19 nt, Human
gaugcggagcuggggagag

SEQ ID NO: 64584 - RNA, 21 nt, Human
gccaccuuccucagcgaacug

SEQ ID NO: 64585 - RNA, 19 nt, Human
gcccggacgcggcgugggg

SEQ ID NO: 64586 - RNA, 20 nt, Human
gcccguguccggggggcuuu

SEQ ID NO: 64587 - RNA, 18 nt, Human
gccuucgcgggagggcuc

SEQ ID NO: 64588 - RNA, 18 nt, Human
gcucgcucgagccucaac

SEQ ID NO: 64589 - RNA, 20 nt, Human
gcugaagggcaucuaaaugg

SEQ ID NO: 64590 - RNA, 22 nt, Human
gcugcagaaaggucggucugga

SEQ ID NO: 64591 - RNA, 20 nt, Human
ggaagcuggcggccuccugg

SEQ ID NO: 64592 - RNA, 19 nt, Human
ggagaggcuagugggaggg

SEQ ID NO: 64593 - RNA, 20 nt, Human
ggagggcuccugggcgcuuc

SEQ ID NO: 64594 - RNA, 22 nt, Human
ggagguggugguggguccaugg

SEQ ID NO: 64595 - RNA, 18 nt, Human
ggccagcacgaguuggca

SEQ ID NO: 64596 - RNA, 21 nt, Human
ggccccaguaguagaagcaga

SEQ ID NO: 64597 - RNA, 24 nt, Human
ggcguugggcagguccggggauuu

SEQ ID NO: 64598 - RNA, 19 nt, Human
ggcucuggggcagaacagg

SEQ ID NO: 64599 - RNA, 22 nt, Human
gggaaggacgugaagaagguga

SEQ ID NO: 64600 - RNA, 23 nt, Human
gggagguggugguggguccaugg

SEQ ID NO: 64601 - RNA, 18 nt, Human
gggauuuggggcgcggag

SEQ ID NO: 64602 - RNA, 18 nt, Human
gggcaggggguccgcuuc

SEQ ID NO: 64603 - RNA, 18 nt, Human
gggcgcggaggcggagcg

SEQ ID NO: 64604 - RNA, 19 nt, Human
ggggaggggaacuacggua

SEQ ID NO: 64605 - RNA, 22 nt, Human
ggggccagccggccgcuccggg

SEQ ID NO: 64606 - RNA, 19 nt, Human
ggguugggagggggugcgg

SEQ ID NO: 64607 - RNA, 21 nt, Human
ggguugggagggggugcggcc

SEQ ID NO: 64608 - RNA, 25 nt, Human
ggugagcgagucuucccaaccgccg

SEQ ID NO: 64609 - RNA, 21 nt, Human
guggagggggaggggaacuac

SEQ ID NO: 64610 - RNA, 22 nt, Human
guggugguggguccaugggcca

SEQ ID NO: 64611 - RNA, 23 nt, Human
uaagagggacagggaacuggggc

SEQ ID NO: 64612 - RNA, 18 nt, Human
uaagcugccgggccgcga

SEQ ID NO: 64613 - RNA, 22 nt, Human
uacaccacuucacagcaagccu

SEQ ID NO: 64614 - RNA, 28 nt, Human
uccacauacaccacuucacagcaagccu

SEQ ID NO: 64615 - RNA, 25 nt, Human
uccugguuugggugccccagggggc

SEQ ID NO: 64616 - RNA, 19 nt, Human
uccuucgccgggcucuccg

SEQ ID NO: 64617 - RNA, 18 nt, Human
ugaaauagaguagaagug

SEQ ID NO: 64618 - RNA, 22 nt, Human
ugacacaggcugccccccacug

SEQ ID NO: 64619 - RNA, 19 nt, Human
uggaaaauggguugggagg

SEQ ID NO: 64620 - RNA, 20 nt, Human
uggagggggaggggaacuac

SEQ ID NO: 64621 - RNA, 19 nt, Human
ugggcagguccggggauuu

SEQ ID NO: 64622 - RNA, 24 nt, Human
ugggcagguccggggauuuggggc

SEQ ID NO: 64623 - RNA, 20 nt, Human
ugggccaccagccaccuucc

SEQ ID NO: 64624 - RNA, 18 nt, Human
uggggagaggggugggag

SEQ ID NO: 64625 - RNA, 21 nt, Human
uggggagaggggugggagccc

SEQ ID NO: 64626 - RNA, 18 nt, Human
ugggugccccagggggcg

SEQ ID NO: 64627 - RNA, 24 nt, Human
uuaaaaagaaccccgcuccuucgu

SEQ ID NO: 64628 - RNA, 22 nt, Human
uucacagcaagccugguccuca

SEQ ID NO: 64629 - RNA, 20 nt, Human
uucgugaaaccccuuuuccc

SEQ ID NO: 64630 - RNA, 19 nt, Human
uugggagggggugcggccc

SEQ ID NO: 64631 - RNA, 18 nt, Human
uuuaaaauacacacagcc

SEQ ID NO: 64632 - RNA, 18 nt, Human
aacccccuuucucagucc

SEQ ID NO: 64633 - RNA, 20 nt, Human
aacccccuuucucaguccag

SEQ ID NO: 64634 - RNA, 23 nt, Human
agagcaggugggcccaggaaccc

SEQ ID NO: 64635 - RNA, 20 nt, Human
aggaacccccuuucucaguc

SEQ ID NO: 64636 - RNA, 18 nt, Human
cagccagcucagcagcag

SEQ ID NO: 64637 - RNA, 22 nt, Human
caggaacccccuuucucagucc

SEQ ID NO: 64638 - RNA, 20 nt, Human
caggugcagcccugggagca

SEQ ID NO: 64639 - RNA, 19 nt, Human
cccaggaacccccuuucuc

SEQ ID NO: 64640 - RNA, 20 nt, Human
cccaggccucagggccuggc

SEQ ID NO: 64641 - RNA, 18 nt, Human
cgcugagcgggcgggcgg

SEQ ID NO: 64642 - RNA, 20 nt, Human
cggcggucacagccuaggga

SEQ ID NO: 64643 - RNA, 20 nt, Human
cucccaggccucagggccug

SEQ ID NO: 64644 - RNA, 19 nt, Human
cugccccuucccgcgucgc

SEQ ID NO: 64645 - RNA, 25 nt, Human
gagcaggugggcccaggaacccccu

SEQ ID NO: 64646 - RNA, 18 nt, Human
gagcgggcgggcgggcgg

SEQ ID NO: 64647 - RNA, 21 nt, Human
gagugauucucgggcaccgca

SEQ ID NO: 64648 - RNA, 20 nt, Human
gaugucguuuuucuuguuac

SEQ ID NO: 64649 - RNA, 21 nt, Human
gcaccgcaggacgagcccuac

SEQ ID NO: 64650 - RNA, 26 nt, Human
gcaguggaguucggcggucacagccu

SEQ ID NO: 64651 - RNA, 19 nt, Human
gcccagccagcucagcagc

SEQ ID NO: 64652 - RNA, 20 nt, Human
gcccaggaacccccuuucuc

SEQ ID NO: 64653 - RNA, 25 nt, Human
gccgggcgcugagcgggcgggcggg

SEQ ID NO: 64654 - RNA, 22 nt, Human
gcgggcgggcgggcggcugcgg

SEQ ID NO: 64655 - RNA, 20 nt, Human
ggcgggcgggcggcugcggc

SEQ ID NO: 64656 - RNA, 20 nt, Human
ggguguggguucuggccaga

SEQ ID NO: 64657 - RNA, 21 nt, Human
ggucagcgcccugccccuucc

SEQ ID NO: 64658 - RNA, 23 nt, Human
gguccuggcaggugcagcccugg

SEQ ID NO: 64659 - RNA, 22 nt, Human
guccaggacucccaggccucag

SEQ ID NO: 64660 - RNA, 19 nt, Human
guggcgcccgucuguugca

SEQ ID NO: 64661 - RNA, 19 nt, Human
gugggcccaggaacccccu

SEQ ID NO: 64662 - RNA, 25 nt, Human
uagcgagugauucucgggcaccgcc

SEQ ID NO: 64663 - RNA, 22 nt, Human
uagguccuggcaggugcagccc

SEQ ID NO: 64664 - RNA, 20 nt, Human
uaugacaggugggaaggggc

SEQ ID NO: 64665 - RNA, 22 nt, Human
uccuggcaggugcagcccuggg

SEQ ID NO: 64666 - RNA, 25 nt, Human
ucucgggcaccgcaggacgagcccu

SEQ ID NO: 64667 - RNA, 18 nt, Human
ucuguugcaguggaguuc

SEQ ID NO: 64668 - RNA, 20 nt, Human
ugagcgggcgggcgggcggc

SEQ ID NO: 64669 - RNA, 20 nt, Human
uggcaggugcagcccuggga

SEQ ID NO: 64670 - RNA, 21 nt, Human
uggcgcccgucuguugcagug

SEQ ID NO: 64671 - RNA, 21 nt, Human
aagagcagcgagggcagaggu

SEQ ID NO: 64672 - RNA, 20 nt, Human
aaggcaccaaggcacaacug

SEQ ID NO: 64673 - RNA, 18 nt, Human
acaaggcaccaaggcaca

SEQ ID NO: 64674 - RNA, 20 nt, Human
acaaggcaccaaggcacaac

SEQ ID NO: 64675 - RNA, 21 nt, Human
acucagagaaaaaggcauuca

SEQ ID NO: 64676 - RNA, 21 nt, Human
agaggagcagguuaggguaca

SEQ ID NO: 64677 - RNA, 19 nt, Human
agaggggcagagcccaaag

SEQ ID NO: 64678 - RNA, 24 nt, Human
agcagcgagggcagagguuagaga

SEQ ID NO: 64679 - RNA, 30 nt, Human
agcccaaagccccuuucucugcaggccucu

SEQ ID NO: 64680 - RNA, 18 nt, Human
agcugggggcggcggcag

SEQ ID NO: 64681 - RNA, 24 nt, Human
aggcagcaacaacuguguggaaag

SEQ ID NO: 64682 - RNA, 18 nt, Human
aggggcagagcccaaagc

SEQ ID NO: 64683 - RNA, 18 nt, Human
aguccuuaaggcacagcu

SEQ ID NO: 64684 - RNA, 19 nt, Human
auacccaguguucccaagc

SEQ ID NO: 64685 - RNA, 20 nt, Human
caagagcagcgagggcagag

SEQ ID NO: 64686 - RNA, 18 nt, Human
caagccagaggggcagag

SEQ ID NO: 64687 - RNA, 21 nt, Human
ccaaggcacaacugguggggg

SEQ ID NO: 64688 - RNA, 31 nt, Human
ccaaguucccaggcucucaugccuagcccaa

SEQ ID NO: 64689 - RNA, 20 nt, Human
ccacaauaggcagcaacaac

SEQ ID NO: 64690 - RNA, 24 nt, Human
ccagaauuaguccuuaaggcacag

SEQ ID NO: 64691 - RNA, 23 nt, Human
ccccuaaccugaggcggcaccac

SEQ ID NO: 64692 - RNA, 21 nt, Human
ccccuggaaaggggugccaga

SEQ ID NO: 64693 - RNA, 19 nt, Human
ccucccgaggcgggggagc

SEQ ID NO: 64694 - RNA, 20 nt, Human
cggcggcagcggcuccgggc

SEQ ID NO: 64695 - RNA, 20 nt, Human
cugagagccccuaaccugag

SEQ ID NO: 64696 - RNA, 21 nt, Human
cugcaggccuccuuaaggaga

SEQ ID NO: 64697 - RNA, 28 nt, Human
cuggcugcagugacaucugagccuuuuu

SEQ ID NO: 64698 - RNA, 27 nt, Human
cuggcugcagugaccuggugccccucc

SEQ ID NO: 64699 - RNA, 24 nt, Human
cugggggcggcggcagcggcuccu

SEQ ID NO: 64700 - RNA, 28 nt, Human
cuuaaggagaaaaaggcacucagagaaa

SEQ ID NO: 64701 - RNA, 24 nt, Human
cuuggcuuggaugagcucaugaga

SEQ ID NO: 64702 - RNA, 22 nt, Human
cuuuuugcuuccaaguucccag

SEQ ID NO: 64703 - RNA, 18 nt, Human
gaccccucuggcugcagu

SEQ ID NO: 64704 - RNA, 18 nt, Human
gaccccucuggcugcagu

SEQ ID NO: 64705 - RNA, 22 nt, Human
gagaaaaaggcauucagggaac

SEQ ID NO: 64706 - RNA, 20 nt, Human
gaggcgggggagcugggggc

SEQ ID NO: 64707 - RNA, 26 nt, Human
gauucuguggcucccucauuggagaa

SEQ ID NO: 64708 - RNA, 19 nt, Human
gcagcaacaacugugugga

SEQ ID NO: 64709 - RNA, 23 nt, Human
gccagaggggcagagcccaaagc

SEQ ID NO: 64710 - RNA, 24 nt, Human
gcgcaauuccaagagcagcgaggg

SEQ ID NO: 64711 - RNA, 21 nt, Human
gcggcggcagcggcuccgggc

SEQ ID NO: 64712 - RNA, 21 nt, Human
gcggcggcagcggcuccgggc

SEQ ID NO: 64713 - RNA, 21 nt, Human
gcucaugagaauacccagugu

SEQ ID NO: 64714 - RNA, 19 nt, Human
ggcggcagcggcuccgggc

SEQ ID NO: 64715 - RNA, 19 nt, Human
ggcggcggcagcggcuccg

SEQ ID NO: 64716 - RNA, 24 nt, Human
gggcagagguuagagauggcugag

SEQ ID NO: 64717 - RNA, 21 nt, Human
gggcaggggcagccuccaagc

SEQ ID NO: 64718 - RNA, 21 nt, Human
ggggagggcaggggcagccuc

SEQ ID NO: 64719 - RNA, 21 nt, Human
ggguuggccucuuggggaggg

SEQ ID NO: 64720 - RNA, 19 nt, Human
uaaggagaaaaaggcacuc

SEQ ID NO: 64721 - RNA, 21 nt, Human
uacccaguguucccaagccag

SEQ ID NO: 64722 - RNA, 21 nt, Human
ucagggaaccccuggaaaggg

SEQ ID NO: 64723 - RNA, 23 nt, Human
ucccaggcucucaugccuagccc

SEQ ID NO: 64724 - RNA, 21 nt, Human
uccccagaagcaugggggcug

SEQ ID NO: 64725 - RNA, 21 nt, Human
ucugcaggccuccuuaaggag

SEQ ID NO: 64726 - RNA, 22 nt, Human
ucugcaggccuccuuaaggaga

SEQ ID NO: 64727 - RNA, 18 nt, Human
ucuucuggaccccucugg

SEQ ID NO: 64728 - RNA, 18 nt, Human
ucuucuggaccccucugg

SEQ ID NO: 64729 - RNA, 22 nt, Human
ucuucuggaccccucuggcugc

SEQ ID NO: 64730 - RNA, 22 nt, Human
ucuucuggaccccucuggcugc

SEQ ID NO: 64731 - RNA, 21 nt, Human
ugagaauacccaguguuccca

SEQ ID NO: 64732 - RNA, 23 nt, Human
ugaggcggacaaggcaccaaggc

SEQ ID NO: 64733 - RNA, 22 nt, Human
ugcuguagugaggcagugccuc

SEQ ID NO: 64734 - RNA, 23 nt, Human
ugcuguaguggaggcagugccuc

SEQ ID NO: 64735 - RNA, 18 nt, Human
ugggagggggcacugggu

SEQ ID NO: 64736 - RNA, 20 nt, Human
ugggagggggcacuggguug

SEQ ID NO: 64737 - RNA, 21 nt, Human
ugggagggggcacuggguugg

SEQ ID NO: 64738 - RNA, 22 nt, Human
ugggagggggcacuggguuggc

SEQ ID NO: 64739 - RNA, 18 nt, Human
uggggagggguccaaccu

SEQ ID NO: 64740 - RNA, 20 nt, Human
uggggagggguccaaccuug

SEQ ID NO: 64741 - RNA, 18 nt, Human
ugggggcggcggcagcgg

SEQ ID NO: 64742 - RNA, 18 nt, Human
uggguuggccucuugggg

SEQ ID NO: 64743 - RNA, 20 nt, Human
uggguuggccucuuggggag

SEQ ID NO: 64744 - RNA, 23 nt, Human
ugguggggggagggcaggggcag

SEQ ID NO: 64745 - RNA, 21 nt, Human
uuaguccuuaaggcacagcug

SEQ ID NO: 64746 - RNA, 18 nt, Human
uucccaggcucucaugcc

SEQ ID NO: 64747 - RNA, 22 nt, Human
uugaugcugauggggguaggaa

SEQ ID NO: 64748 - RNA, 19 nt, Human
aaaaauaugcaaucuuuuc

SEQ ID NO: 64749 - RNA, 18 nt, Human
aaagcuauggcaaaagca

SEQ ID NO: 64750 - RNA, 18 nt, Human
aaagcuauggcaaaagca

SEQ ID NO: 64751 - RNA, 25 nt, Human
aaagcuucuccgagccccccggggc

SEQ ID NO: 64752 - RNA, 21 nt, Human
aacuccaacucggauuuccac

SEQ ID NO: 64753 - RNA, 19 nt, Human
aagaaaacauuuccucagc

SEQ ID NO: 64754 - RNA, 19 nt, Human
aagaaaacauuuccucagc

SEQ ID NO: 64755 - RNA, 21 nt, Human
aagagggucaggaagaggagg

SEQ ID NO: 64756 - RNA, 20 nt, Human
acacaauagucaaaaccgaa

SEQ ID NO: 64757 - RNA, 20 nt, Human
acacaauagucaaaaccgaa

SEQ ID NO: 64758 - RNA, 21 nt, Human
acacuaagugugccaguggcc

SEQ ID NO: 64759 - RNA, 21 nt, Human
acacuaagugugccaguggcc

SEQ ID NO: 64760 - RNA, 19 nt, Human
acagaaggcaggucccagg

SEQ ID NO: 64761 - RNA, 23 nt, Human
acagaauacacaauagucaaaac

SEQ ID NO: 64762 - RNA, 23 nt, Human
acagaauacacaauagucaaaac

SEQ ID NO: 64763 - RNA, 22 nt, Human
acccaaauccaguauacauaaa

SEQ ID NO: 64764 - RNA, 20 nt, Human
accgaggccaauuuggggac

SEQ ID NO: 64765 - RNA, 22 nt, Human
accuccuaggagaagcgaagau

SEQ ID NO: 64766 - RNA, 18 nt, Human
acuaaaguacgguagaac

SEQ ID NO: 64767 - RNA, 18 nt, Human
acuaaaguacgguagaac

SEQ ID NO: 64768 - RNA, 22 nt, Human
acuuggaguguggccugcaggg

SEQ ID NO: 64769 - RNA, 24 nt, Human
acuuuauaguuggauuccaguuug

SEQ ID NO: 64770 - RNA, 24 nt, Human
acuuuauaguuggauuccaguuug

SEQ ID NO: 64771 - RNA, 23 nt, Human
agaaccuuccuccggagcccaag

SEQ ID NO: 64772 - RNA, 18 nt, Human
agaaggacgagcaaagag

SEQ ID NO: 64773 - RNA, 26 nt, Human
agaaggacgagcaaagagguccagga

SEQ ID NO: 64774 - RNA, 31 nt, Human
agaauacacaauagucaaaaccgaagacacc

SEQ ID NO: 64775 - RNA, 25 nt, Human
agaggcggcccgccguggcuccccg

SEQ ID NO: 64776 - RNA, 21 nt, Human
agagggucaggaagaggagga

SEQ ID NO: 64777 - RNA, 21 nt, Human
agaucugaagaucauacaacu

SEQ ID NO: 64778 - RNA, 21 nt, Human
agaucugaagaucauacaacu

SEQ ID NO: 64779 - RNA, 20 nt, Human
agcaaagcccagcucacgcg

SEQ ID NO: 64780 - RNA, 18 nt, Human
agccagccagcguccccc

SEQ ID NO: 64781 - RNA, 20 nt, Human
agccugccagcgccacuccc

SEQ ID NO: 64782 - RNA, 19 nt, Human
agccugguggcccuggggg

SEQ ID NO: 64783 - RNA, 21 nt, Human
agcgugcugcgcccgggaccu

SEQ ID NO: 64784 - RNA, 18 nt, Human
aggaacaggagaagacgc

SEQ ID NO: 64785 - RNA, 19 nt, Human
aggaggaaaugggacucug

SEQ ID NO: 64786 - RNA, 19 nt, Human
aggaggaaaugggacucug

SEQ ID NO: 64787 - RNA, 21 nt, Human
aggcaaaggugccaggcgggg

SEQ ID NO: 64788 - RNA, 19 nt, Human
agggacguuuuuagauugg

SEQ ID NO: 64789 - RNA, 19 nt, Human
agggacguuuuuagauugg

SEQ ID NO: 64790 - RNA, 19 nt, Human
agggagcagggccccgcuc

SEQ ID NO: 64791 - RNA, 18 nt, Human
agggagcgcucagacagc

SEQ ID NO: 64792 - RNA, 26 nt, Human
agggggggcucggcugggugcgggcu

SEQ ID NO: 64793 - RNA, 20 nt, Human
agggucaggaagaggaggag

SEQ ID NO: 64794 - RNA, 22 nt, Human
agguguggcccggcucugcagc

SEQ ID NO: 64795 - RNA, 22 nt, Human
agguugcgcgccuggccuccgc

SEQ ID NO: 64796 - RNA, 21 nt, Human
auauuauagagccaagaggga

SEQ ID NO: 64797 - RNA, 21 nt, Human
auauuauagagccaagaggga

SEQ ID NO: 64798 - RNA, 24 nt, Human
auauugaaugucugagaaauggcc

SEQ ID NO: 64799 - RNA, 20 nt, Human
aucucggcggggcugcaccu

SEQ ID NO: 64800 - RNA, 24 nt, Human
auggggucuuuggcacugaggugu

SEQ ID NO: 64801 - RNA, 19 nt, Human
caaaagcacagaaacccgc

SEQ ID NO: 64802 - RNA, 19 nt, Human
caaaagcacagaaacccgc

SEQ ID NO: 64803 - RNA, 20 nt, Human
caaaagcacagaaacccgcu

SEQ ID NO: 64804 - RNA, 20 nt, Human
caaaagcacagaaacccgcu

SEQ ID NO: 64805 - RNA, 27 nt, Human
caaaagcacagaaacccggcaggaacu

SEQ ID NO: 64806 - RNA, 27 nt, Human
caaaagcacagaaacccggcaggaacu

SEQ ID NO: 64807 - RNA, 22 nt, Human
caaagcccagcucacgcgccgc

SEQ ID NO: 64808 - RNA, 22 nt, Human
caauagucaaaaccgaagacac

SEQ ID NO: 64809 - RNA, 22 nt, Human
caauagucaaaaccgaagacac

SEQ ID NO: 64810 - RNA, 18 nt, Human
cacagcaggaggaaaugg

SEQ ID NO: 64811 - RNA, 21 nt, Human
caccagcauaaacugcccugg

SEQ ID NO: 64812 - RNA, 20 nt, Human
caccccauaaauuauaauca

SEQ ID NO: 64813 - RNA, 23 nt, Human
caccccauaaauuauaaucagcc

SEQ ID NO: 64814 - RNA, 18 nt, Human
caccgcagggugggcccu

SEQ ID NO: 64815 - RNA, 19 nt, Human
caccuccuccucccucccu

SEQ ID NO: 64816 - RNA, 21 nt, Human
cacggaaaaggaaacuuccga

SEQ ID NO: 64817 - RNA, 20 nt, Human
cacugcccuccgcgcccgcc

SEQ ID NO: 64818 - RNA, 23 nt, Human
cagagcagguuugugacucccag

SEQ ID NO: 64819 - RNA, 18 nt, Human
cagaggcucaaggguugu

SEQ ID NO: 64820 - RNA, 21 nt, Human
cagccugccagcgccacuccc

SEQ ID NO: 64821 - RNA, 26 nt, Human
caggaagaggaggaggaaggucaggc

SEQ ID NO: 64822 - RNA, 21 nt, Human
caggagaagacgcuguggagc

SEQ ID NO: 64823 - RNA, 18 nt, Human
caggaggcgguagccugg

SEQ ID NO: 64824 - RNA, 22 nt, Human
cagggacccucccagccaacga

SEQ ID NO: 64825 - RNA, 21 nt, Human
cagggccggguccaggcugcg

SEQ ID NO: 64826 - RNA, 22 nt, Human
cagggccggguccaggcugcgg

SEQ ID NO: 64827 - RNA, 23 nt, Human
cagggugggcccugcccuccguc

SEQ ID NO: 64828 - RNA, 22 nt, Human
caggucccaggccaugcucuuc

SEQ ID NO: 64829 - RNA, 22 nt, Human
ccacccacgguccccccugggc

SEQ ID NO: 64830 - RNA, 22 nt, Human
ccacccacgguccccccugggc

SEQ ID NO: 64831 - RNA, 19 nt, Human
ccaccgcgcucccggcgcc

SEQ ID NO: 64832 - RNA, 19 nt, Human
ccagagaccuccgcuacug

SEQ ID NO: 64833 - RNA, 24 nt, Human
ccagcaagcuccuccuugccgccc

SEQ ID NO: 64834 - RNA, 24 nt, Human
ccagccuucuaggaaaaugggucu

SEQ ID NO: 64835 - RNA, 22 nt, Human
cccccaggcgcggacuguccug

SEQ ID NO: 64836 - RNA, 18 nt, Human
cccccuuccuagcugagg

SEQ ID NO: 64837 - RNA, 19 nt, Human
ccccggggccgcguccucu

SEQ ID NO: 64838 - RNA, 20 nt, Human
ccccugggcuggagggcggg

SEQ ID NO: 64839 - RNA, 21 nt, Human
ccccugggcuggagggcgggg

SEQ ID NO: 64840 - RNA, 21 nt, Human
ccccugggcuggagggcgggg

SEQ ID NO: 64841 - RNA, 18 nt, Human
cccgccguggcuccccgc

SEQ ID NO: 64842 - RNA, 19 nt, Human
cccuccgcgcccgccucgu

SEQ ID NO: 64843 - RNA, 18 nt, Human
cccuggauccaggcugcc

SEQ ID NO: 64844 - RNA, 21 nt, Human
cccuggggggcggaccccggg

SEQ ID NO: 64845 - RNA, 23 nt, Human
cccuuggccgaggccgcgcuacu

SEQ ID NO: 64846 - RNA, 24 nt, Human
ccgcccgaggacagucccgagggc

SEQ ID NO: 64847 - RNA, 19 nt, Human
ccgcuagaaccuuccuccg

SEQ ID NO: 64848 - RNA, 22 nt, Human
ccggcgcccgagguugcgcgcc

SEQ ID NO: 64849 - RNA, 22 nt, Human
ccuccaaagacugcgugcccac

SEQ ID NO: 64850 - RNA, 19 nt, Human
ccucccgcuccugagccgg

SEQ ID NO: 64851 - RNA, 21 nt, Human
ccucccugcacucucuccuug

SEQ ID NO: 64852 - RNA, 22 nt, Human
ccucccugcacucucuccuugc

SEQ ID NO: 64853 - RNA, 23 nt, Human
ccuccgcgcccgccucgucgcuc

SEQ ID NO: 64854 - RNA, 22 nt, Human
ccugcagggacccucccagcca

SEQ ID NO: 64855 - RNA, 23 nt, Human
ccugcagggacccucccagccaa

SEQ ID NO: 64856 - RNA, 23 nt, Human
ccugcggggugcuggguguggag

SEQ ID NO: 64857 - RNA, 18 nt, Human
ccuggacguggggcgugc

SEQ ID NO: 64858 - RNA, 22 nt, Human
ccugggcuggagggcggggggc

SEQ ID NO: 64859 - RNA, 22 nt, Human
ccugggcuggagggcggggggc

SEQ ID NO: 64860 - RNA, 21 nt, Human
cgacaaguggcccaccagcau

SEQ ID NO: 64861 - RNA, 21 nt, Human
cgacugggcucgccauaccuu

SEQ ID NO: 64862 - RNA, 21 nt, Human
cgagcaaagagguccaggagg

SEQ ID NO: 64863 - RNA, 22 nt, Human
cgaggccgcgcuacuugaagcg

SEQ ID NO: 64864 - RNA, 26 nt, Human
cgcccacucuuccgacugcagaggcu

SEQ ID NO: 64865 - RNA, 23 nt, Human
cgcccgaggacagucccgagggc

SEQ ID NO: 64866 - RNA, 19 nt, Human
cgcccgggaccuccaaaga

SEQ ID NO: 64867 - RNA, 24 nt, Human
cgcgccgccggugcgcuccaagug

SEQ ID NO: 64868 - RNA, 22 nt, Human
cgcucagggucaaguacugcuc

SEQ ID NO: 64869 - RNA, 24 nt, Human
cggagcccaagacgcgaagagggu

SEQ ID NO: 64870 - RNA, 20 nt, Human
cggcggcggcaggagcagcg

SEQ ID NO: 64871 - RNA, 22 nt, Human
cgggggccccuggauccaggcu

SEQ ID NO: 64872 - RNA, 21 nt, Human
cggguccaggcugcgggucug

SEQ ID NO: 64873 - RNA, 23 nt, Human
cgguagccugguggcccuggggg

SEQ ID NO: 64874 - RNA, 19 nt, Human
cuccaaagacugcgugccc

SEQ ID NO: 64875 - RNA, 23 nt, Human
cucccugguccgugggugucucc

SEQ ID NO: 64876 - RNA, 21 nt, Human
cuccucccucccuggacgcug

SEQ ID NO: 64877 - RNA, 21 nt, Human
cucgcuggguucccagcucca

SEQ ID NO: 64878 - RNA, 21 nt, Human
cucugggcaugcguuuauuuc

SEQ ID NO: 64879 - RNA, 22 nt, Human
cugcacucucuccuugccccgg

SEQ ID NO: 64880 - RNA, 18 nt, Human
cugcagcaugucagggcu

SEQ ID NO: 64881 - RNA, 19 nt, Human
cugcagggacccucccagc

SEQ ID NO: 64882 - RNA, 22 nt, Human
cugcgcccgggaccuccaaaga

SEQ ID NO: 64883 - RNA, 25 nt, Human
cugcugcucucgcucggcugcuugg

SEQ ID NO: 64884 - RNA, 23 nt, Human
cugcuggucaaaaauaguuaugc

SEQ ID NO: 64885 - RNA, 23 nt, Human
cugcuggucaaaaauaguuaugc

SEQ ID NO: 64886 - RNA, 21 nt, Human
cuggagccaccuccuaggaga

SEQ ID NO: 64887 - RNA, 24 nt, Human
cugggcuggagggcggggggcucg

SEQ ID NO: 64888 - RNA, 24 nt, Human
cugggcuggagggcggggggcucg

SEQ ID NO: 64889 - RNA, 24 nt, Human
cuggggaccuccugcagccgcuag

SEQ ID NO: 64890 - RNA, 19 nt, Human
cuugaaaacuucaaacuac

SEQ ID NO: 64891 - RNA, 21 nt, Human
cuuugggucgggaaccgaaag

SEQ ID NO: 64892 - RNA, 19 nt, Human
gaaaacuucaaacuacuaa

SEQ ID NO: 64893 - RNA, 19 nt, Human
gaaaacuucaaacuacuaa

SEQ ID NO: 64894 - RNA, 19 nt, Human
gaaaucaccccauaaauua

SEQ ID NO: 64895 - RNA, 20 nt, Human
gaagagggucaggaagagga

SEQ ID NO: 64896 - RNA, 21 nt, Human
gaagaugccauuggggccucc

SEQ ID NO: 64897 - RNA, 18 nt, Human
gacaccgcagggugggcc

SEQ ID NO: 64898 - RNA, 20 nt, Human
gacaggagcucccagaucug

SEQ ID NO: 64899 - RNA, 19 nt, Human
gacccaggggaaccucaua

SEQ ID NO: 64900 - RNA, 18 nt, Human
gacugggcucgccauacc

SEQ ID NO: 64901 - RNA, 20 nt, Human
gagaagcccuuggccgaggc

SEQ ID NO: 64902 - RNA, 19 nt, Human
gaggacagucccgagggcc

SEQ ID NO: 64903 - RNA, 20 nt, Human
gagggucaggaagaggagga

SEQ ID NO: 64904 - RNA, 18 nt, Human
gaugcuggagggaaaaag

SEQ ID NO: 64905 - RNA, 22 nt, Human
gauuauggggcaaagggaaaaa

SEQ ID NO: 64906 - RNA, 22 nt, Human
gauuauggggcaaagggaaaaa

SEQ ID NO: 64907 - RNA, 21 nt, Human
gcccagggcgguggagagcaa

SEQ ID NO: 64908 - RNA, 21 nt, Human
gccgagacucucggcugggag

SEQ ID NO: 64909 - RNA, 18 nt, Human
gccgcccgaggacagucc

SEQ ID NO: 64910 - RNA, 18 nt, Human
gccgcgacccaggggaac

SEQ ID NO: 64911 - RNA, 21 nt, Human
gccgcuagaaccuuccuccgg

SEQ ID NO: 64912 - RNA, 18 nt, Human
gccucgucgcucccgcag

SEQ ID NO: 64913 - RNA, 20 nt, Human
gccucuaagacuccagcaag

SEQ ID NO: 64914 - RNA, 19 nt, Human
gccugaguccuccgagccc

SEQ ID NO: 64915 - RNA, 27 nt, Human
gcgcucagcgcucuccguggaggaggg

SEQ ID NO: 64916 - RNA, 21 nt, Human
gcgguggagagcaaagcccag

SEQ ID NO: 64917 - RNA, 22 nt, Human
gcgugagugcucuaccucugua

SEQ ID NO: 64918 - RNA, 22 nt, Human
gcgugagugcucuaccucugua

SEQ ID NO: 64919 - RNA, 21 nt, Human
gcgugcugcaggcgcgcgaca

SEQ ID NO: 64920 - RNA, 23 nt, Human
gcucaguuuuuucugcgugaccu

SEQ ID NO: 64921 - RNA, 22 nt, Human
gcuccaagugccccggcggcgg

SEQ ID NO: 64922 - RNA, 19 nt, Human
gcucgccauaccuuccucu

SEQ ID NO: 64923 - RNA, 21 nt, Human
gcugcucucgcucggcugcuu

SEQ ID NO: 64924 - RNA, 18 nt, Human
gcuguggagcaggcucug

SEQ ID NO: 64925 - RNA, 21 nt, Human
gcuguggagcaggcucugcgc

SEQ ID NO: 64926 - RNA, 21 nt, Human
gcuugucaucccucccacucc

SEQ ID NO: 64927 - RNA, 22 nt, Human
ggaaaaggaaacuuccgacugc

SEQ ID NO: 64928 - RNA, 24 nt, Human
ggaagaggaggaggaaggucaggc

SEQ ID NO: 64929 - RNA, 18 nt, Human
ggagaagcgaagaugcca

SEQ ID NO: 64930 - RNA, 19 nt, Human
ggagaaggacgagcaaaga

SEQ ID NO: 64931 - RNA, 20 nt, Human
ggcaaaagcacagaaacccg

SEQ ID NO: 64932 - RNA, 20 nt, Human
ggcaaaagcacagaaacccg

SEQ ID NO: 64933 - RNA, 18 nt, Human
ggcacugagguguggccc

SEQ ID NO: 64934 - RNA, 18 nt, Human
ggcaggagcagcagaucc

SEQ ID NO: 64935 - RNA, 24 nt, Human
ggcagggggggcucggcugggugc

SEQ ID NO: 64936 - RNA, 24 nt, Human
ggcagggggggcucggcugggugc

SEQ ID NO: 64937 - RNA, 18 nt, Human
ggccaggacagaaggcag

SEQ ID NO: 64938 - RNA, 21 nt, Human
ggccugaguccuccgagcccc

SEQ ID NO: 64939 - RNA, 20 nt, Human
ggcggggcugcaccugagga

SEQ ID NO: 64940 - RNA, 19 nt, Human
ggcgugcgcccagggcgcg

SEQ ID NO: 64941 - RNA, 21 nt, Human
ggcugcgggucuggcgcagcu

SEQ ID NO: 64942 - RNA, 18 nt, Human
gggcagggcaucggggug

SEQ ID NO: 64943 - RNA, 18 nt, Human
gggcuggagggcgggggg

SEQ ID NO: 64944 - RNA, 18 nt, Human
gggcuggagggcgggggg

SEQ ID NO: 64945 - RNA, 22 nt, Human
ggggccccuggauccaggcugc

SEQ ID NO: 64946 - RNA, 19 nt, Human
ggugcgggcucagaccagc

SEQ ID NO: 64947 - RNA, 21 nt, Human
guggagaaggacgagcaaaga

SEQ ID NO: 64948 - RNA, 22 nt, Human
guggagaaggacgagcaaagag

SEQ ID NO: 64949 - RNA, 22 nt, Human
uaacagcaguaauuggguggca

SEQ ID NO: 64950 - RNA, 23 nt, Human
uaacgugggacggacaacuucuu

SEQ ID NO: 64951 - RNA, 23 nt, Human
uaacgugggacggacaacuucuu

SEQ ID NO: 64952 - RNA, 22 nt, Human
uaagaaacaccacugggaauuu

SEQ ID NO: 64953 - RNA, 22 nt, Human
uaagaaacaccacugggaauuu

SEQ ID NO: 64954 - RNA, 23 nt, Human
uaaggggagaugucuccgcugga

SEQ ID NO: 64955 - RNA, 18 nt, Human
uaagugugccaguggcca

SEQ ID NO: 64956 - RNA, 18 nt, Human
uaagugugccaguggcca

SEQ ID NO: 64957 - RNA, 22 nt, Human
uacacaauagucaaaaccgaag

SEQ ID NO: 64958 - RNA, 22 nt, Human
uacacaauagucaaaaccgaag

SEQ ID NO: 64959 - RNA, 18 nt, Human
uacauaaucuguuacaga

SEQ ID NO: 64960 - RNA, 18 nt, Human
uacauaaucuguuacaga

SEQ ID NO: 64961 - RNA, 21 nt, Human
uaccucuguaggugaacugga

SEQ ID NO: 64962 - RNA, 21 nt, Human
uaccucuguaggugaacugga

SEQ ID NO: 64963 - RNA, 24 nt, Human
uacgcaauggaaccuuauucucaa

SEQ ID NO: 64964 - RNA, 24 nt, Human
uacgcaauggaaccuuauucucaa

SEQ ID NO: 64965 - RNA, 21 nt, Human
uagaacauucuauagaaucuc

SEQ ID NO: 64966 - RNA, 21 nt, Human
uagaacauucuauagaaucuc

SEQ ID NO: 64967 - RNA, 21 nt, Human
uagccugguggcccugggggg

SEQ ID NO: 64968 - RNA, 19 nt, Human
uaguagguucagcuuguuu

SEQ ID NO: 64969 - RNA, 18 nt, Human
uaguauaucucauugcuu

SEQ ID NO: 64970 - RNA, 18 nt, Human
uaguauaucucauugcuu

SEQ ID NO: 64971 - RNA, 23 nt, Human
uaugcaacccaaauccaguauac

SEQ ID NO: 64972 - RNA, 18 nt, Human
ucaaacuacuaaaguacg

SEQ ID NO: 64973 - RNA, 20 nt, Human
ucaauggcgggggcgugagu

SEQ ID NO: 64974 - RNA, 20 nt, Human
ucaauggcgggggcgugagu

SEQ ID NO: 64975 - RNA, 21 nt, Human
ucagaccagcgucucgggcag

SEQ ID NO: 64976 - RNA, 22 nt, Human
ucaggaagaggaggaggaaggu

SEQ ID NO: 64977 - RNA, 19 nt, Human
ucaggagacagccccaagg

SEQ ID NO: 64978 - RNA, 19 nt, Human
ucagggcuuccuuagcugg

SEQ ID NO: 64979 - RNA, 19 nt, Human
ucauacaacuccaacucgg

SEQ ID NO: 64980 - RNA, 23 nt, Human
uccaggugaaaucacccugauuu

SEQ ID NO: 64981 - RNA, 22 nt, Human
ucccacgauaccuuuuguugcc

SEQ ID NO: 64982 - RNA, 24 nt, Human
ucccagauaucugagacuuggagu

SEQ ID NO: 64983 - RNA, 25 nt, Human
ucccccaggcgcggacuguccugcu

SEQ ID NO: 64984 - RNA, 20 nt, Human
uccccgcgcacugcccuccg

SEQ ID NO: 64985 - RNA, 22 nt, Human
uccccgcgcacugcccuccgcg

SEQ ID NO: 64986 - RNA, 19 nt, Human
ucccuggacgcugguggcu

SEQ ID NO: 64987 - RNA, 20 nt, Human
uccgcuacugugaaucuugg

SEQ ID NO: 64988 - RNA, 20 nt, Human
uccgucgcgggggcugcggc

SEQ ID NO: 64989 - RNA, 18 nt, Human
uccugggucuuuggaucc

SEQ ID NO: 64990 - RNA, 21 nt, Human
uccugggucuuuggauccgcu

SEQ ID NO: 64991 - RNA, 21 nt, Human
uccugggucuuuggauccgcu

SEQ ID NO: 64992 - RNA, 18 nt, Human
ucucggcggggcugcacc

SEQ ID NO: 64993 - RNA, 21 nt, Human
ucugacagaucuuucccaagc

SEQ ID NO: 64994 - RNA, 23 nt, Human
ucugcagcccggccacauccagc

SEQ ID NO: 64995 - RNA, 19 nt, Human
ucugcgugaccugcugcuc

SEQ ID NO: 64996 - RNA, 20 nt, Human
ucugggaagcucaaucgcuc

SEQ ID NO: 64997 - RNA, 20 nt, Human
ucuguaaagcuucuccgagc

SEQ ID NO: 64998 - RNA, 23 nt, Human
ugaaaaaaaauugcauaaaauac

SEQ ID NO: 64999 - RNA, 23 nt, Human
ugaaaaaaaauugcauaaaauac

SEQ ID NO: 65000 - RNA, 22 nt, Human
ugaaaucacccugauuucuaag

SEQ ID NO: 65001 - RNA, 24 nt, Human
ugaaauggcagaucauauugaaug

SEQ ID NO: 65002 - RNA, 19 nt, Human
ugaaugccaaguuccccag

SEQ ID NO: 65003 - RNA, 20 nt, Human
ugaaugucugagaaauggcc

SEQ ID NO: 65004 - RNA, 25 nt, Human
ugacucccacgauaccuuuuguugc

SEQ ID NO: 65005 - RNA, 22 nt, Human
ugagaaauggcccagcuggcau

SEQ ID NO: 65006 - RNA, 24 nt, Human
ugagccgggcgccugagcugcgcc

SEQ ID NO: 65007 - RNA, 24 nt, Human
ugaggaccaccuccuccucccucc

SEQ ID NO: 65008 - RNA, 19 nt, Human
ugcauccugaaauggcaga

SEQ ID NO: 65009 - RNA, 18 nt, Human
ugcccuccgcgcccgccu

SEQ ID NO: 65010 - RNA, 19 nt, Human
ugccgcccgaggacagucc

SEQ ID NO: 65011 - RNA, 19 nt, Human
ugccugggcgugcgcccag

SEQ ID NO: 65012 - RNA, 19 nt, Human
ugccugggcgugcgcccag

SEQ ID NO: 65013 - RNA, 18 nt, Human
ugcguuuauuucccagau

SEQ ID NO: 65014 - RNA, 21 nt, Human
ugcugcaguguggggacaccg

SEQ ID NO: 65015 - RNA, 21 nt, Human
uggagagcaaagcccagcuca

SEQ ID NO: 65016 - RNA, 22 nt, Human
uggagggaaaaagaaucagcug

SEQ ID NO: 65017 - RNA, 19 nt, Human
uggcacugagguguggccc

SEQ ID NO: 65018 - RNA, 18 nt, Human
uggcccagcuggcauagc

SEQ ID NO: 65019 - RNA, 28 nt, Human
uggccucuaagacuccagcaagcuccuu

SEQ ID NO: 65020 - RNA, 18 nt, Human
uggccugcagggacccuc

SEQ ID NO: 65021 - RNA, 18 nt, Human
ugggcuggagggcggggg

SEQ ID NO: 65022 - RNA, 18 nt, Human
ugggcuggagggcggggg

SEQ ID NO: 65023 - RNA, 19 nt, Human
ugggcuggagggcgggggg

SEQ ID NO: 65024 - RNA, 19 nt, Human
ugggcuggagggcgggggg

SEQ ID NO: 65025 - RNA, 20 nt, Human
ugggcuggagggcggggggc

SEQ ID NO: 65026 - RNA, 20 nt, Human
ugggcuggagggcggggggc

SEQ ID NO: 65027 - RNA, 21 nt, Human
ugggcuggagggcggggggcu

SEQ ID NO: 65028 - RNA, 21 nt, Human
ugggcuggagggcggggggcu

SEQ ID NO: 65029 - RNA, 18 nt, Human
ugggugcgggcucagacc

SEQ ID NO: 65030 - RNA, 20 nt, Human
ugguuuugugccuaagaucu

SEQ ID NO: 65031 - RNA, 20 nt, Human
ugguuuugugccuaagaucu

SEQ ID NO: 65032 - RNA, 23 nt, Human
uguuuucucuuugugaauauauc

SEQ ID NO: 65033 - RNA, 23 nt, Human
uguuuucucuuugugaauauauc

SEQ ID NO: 65034 - RNA, 18 nt, Human
uuccuaggaugcuggagg

SEQ ID NO: 65035 - RNA, 27 nt, Human
uuccuguccuuucagaacagaggcugg

SEQ ID NO: 65036 - RNA, 23 nt, Human
uugcccagggcgguggagagcaa

SEQ ID NO: 65037 - RNA, 24 nt, Human
uugcugcaguguggggacaccgag

SEQ ID NO: 65038 - RNA, 21 nt, Human
uuggaguguggccugcaggga

SEQ ID NO: 65039 - RNA, 22 nt, Human
uuggauacuaacacuauuuggu

SEQ ID NO: 65040 - RNA, 18 nt, Human
uugggucgggaaccgaaa

SEQ ID NO: 65041 - RNA, 18 nt, Human
uugguucuggaagguugu

SEQ ID NO: 65042 - RNA, 19 nt, Human
uuuggcaaauacugauuau

SEQ ID NO: 65043 - RNA, 19 nt, Human
uuuggcaaauacugauuau

SEQ ID NO: 65044 - RNA, 21 nt, Human
uuuguaguuuugaaaaauaca

SEQ ID NO: 65045 - RNA, 21 nt, Human
uuuguaguuuugaaaaauaca

SEQ ID NO: 65046 - RNA, 18 nt, Human
uuuuuuuuuuuuuuuuug

SEQ ID NO: 65047 - RNA, 18 nt, Human
uuuuuuuuuuuuuuuuug

SEQ ID NO: 65048 - RNA, 21 nt, Human
uuuuuuuuuuuuuuuuugcuu

SEQ ID NO: 65049 - RNA, 25 nt, Human
uuuuuuuuuuuuuuuuuuugcuuaa

SEQ ID NO: 65050 - RNA, 23 nt, Human
aaccuggggggcacagaaagggc

SEQ ID NO: 65051 - RNA, 19 nt, Human
acucgguugagccaggcca

SEQ ID NO: 65052 - RNA, 22 nt, Human
agaccggggauggggcggggga

SEQ ID NO: 65053 - RNA, 24 nt, Human
agacgcacacguccaggggcaacc

SEQ ID NO: 65054 - RNA, 20 nt, Human
agcagaggccuggcugcggc

SEQ ID NO: 65055 - RNA, 25 nt, Human
aggaggcugggccuguggguggggg

SEQ ID NO: 65056 - RNA, 21 nt, Human
aggccccacgguacacuccac

SEQ ID NO: 65057 - RNA, 24 nt, Human
aggcugggccugugggugggggag

SEQ ID NO: 65058 - RNA, 22 nt, Human
agggacggggaggccacaugcu

SEQ ID NO: 65059 - RNA, 18 nt, Human
agggccugucagcacuuu

SEQ ID NO: 65060 - RNA, 21 nt, Human
aggggggucggaggcacucgg

SEQ ID NO: 65061 - RNA, 19 nt, Human
caacacgaagaccggggau

SEQ ID NO: 65062 - RNA, 21 nt, Human
caagcuuagccugggucggga

SEQ ID NO: 65063 - RNA, 20 nt, Human
cacaacacgaagaccgggga

SEQ ID NO: 65064 - RNA, 18 nt, Human
cacaccccagcuccaccc

SEQ ID NO: 65065 - RNA, 23 nt, Human
cagaagcagcaacgagacaggag

SEQ ID NO: 65066 - RNA, 21 nt, Human
cagacacaacacgaagaccgg

SEQ ID NO: 65067 - RNA, 20 nt, Human
cagcacaccccacguguccc

SEQ ID NO: 65068 - RNA, 22 nt, Human
cagcacaccccacgugucccug

SEQ ID NO: 65069 - RNA, 24 nt, Human
cagcacaccccacgugucccuggg

SEQ ID NO: 65070 - RNA, 20 nt, Human
cagcagaggccuggcugcgg

SEQ ID NO: 65071 - RNA, 23 nt, Human
cagcuccaccccggagcagcaga

SEQ ID NO: 65072 - RNA, 19 nt, Human
caggacaauacccagccuc

SEQ ID NO: 65073 - RNA, 19 nt, Human
caggggcaaccacggggcc

SEQ ID NO: 65074 - RNA, 23 nt, Human
cagggugggaggggcacggaggg

SEQ ID NO: 65075 - RNA, 19 nt, Human
cagguggggugggugaggc

SEQ ID NO: 65076 - RNA, 24 nt, Human
caucaugguuagacgggaccgaca

SEQ ID NO: 65077 - RNA, 22 nt, Human
ccagggaggcggaccagggugg

SEQ ID NO: 65078 - RNA, 21 nt, Human
cccacaccccagcuccacccc

SEQ ID NO: 65079 - RNA, 18 nt, Human
cccacagcacaggcagaa

SEQ ID NO: 65080 - RNA, 20 nt, Human
ccccaagccgccggagccau

SEQ ID NO: 65081 - RNA, 18 nt, Human
cccugcccgccucuggcu

SEQ ID NO: 65082 - RNA, 22 nt, Human
ccgcugagacagaaaaggcaga

SEQ ID NO: 65083 - RNA, 23 nt, Human
ccggggauggggcgggggaggca

SEQ ID NO: 65084 - RNA, 19 nt, Human
ccucgggugugacggggag

SEQ ID NO: 65085 - RNA, 20 nt, Human
ccuggcugggcccagguggg

SEQ ID NO: 65086 - RNA, 18 nt, Human
ccuguccagggaaggggg

SEQ ID NO: 65087 - RNA, 18 nt, Human
ccugugggugggggaggg

SEQ ID NO: 65088 - RNA, 20 nt, Human
ccuuguuuguuccuggcugg

SEQ ID NO: 65089 - RNA, 18 nt, Human
cggggauggggcggggga

SEQ ID NO: 65090 - RNA, 23 nt, Human
cguccaggggcaaccacggggcc

SEQ ID NO: 65091 - RNA, 23 nt, Human
cuccgcucccuccugaagccagg

SEQ ID NO: 65092 - RNA, 18 nt, Human
cuccuggcugggcccagg

SEQ ID NO: 65093 - RNA, 19 nt, Human
cugcggccucucuccccca

SEQ ID NO: 65094 - RNA, 22 nt, Human
cuggaggacggcccggccccca

SEQ ID NO: 65095 - RNA, 24 nt, Human
cuggcugggcccaggugggguggg

SEQ ID NO: 65096 - RNA, 24 nt, Human
cuugggggggugugggcucugggc

SEQ ID NO: 65097 - RNA, 18 nt, Human
gaccgaggaggcugggcc

SEQ ID NO: 65098 - RNA, 23 nt, Human
gagcagcagacgcacacguccag

SEQ ID NO: 65099 - RNA, 21 nt, Human
gaggaggcugggccugugggu

SEQ ID NO: 65100 - RNA, 18 nt, Human
gcagcagcagcacacccc

SEQ ID NO: 65101 - RNA, 21 nt, Human
gcaggacaauacccagccucc

SEQ ID NO: 65102 - RNA, 22 nt, Human
gccaggccaguggcccagggac

SEQ ID NO: 65103 - RNA, 18 nt, Human
gccaggcggggcuccugg

SEQ ID NO: 65104 - RNA, 19 nt, Human
gcgguucaggaucccuccc

SEQ ID NO: 65105 - RNA, 23 nt, Human
gcugggcccagguggggugggug

SEQ ID NO: 65106 - RNA, 22 nt, Human
ggaggggaggggcuggggggga

SEQ ID NO: 65107 - RNA, 21 nt, Human
ggcagcagaggccuggcugcg

SEQ ID NO: 65108 - RNA, 20 nt, Human
ggccaggcggggcuccuggc

SEQ ID NO: 65109 - RNA, 18 nt, Human
ggcccggcccccacgagg

SEQ ID NO: 65110 - RNA, 18 nt, Human
ggcugaggaggggggucg

SEQ ID NO: 65111 - RNA, 23 nt, Human
ggcugaggaggggggucggaggc

SEQ ID NO: 65112 - RNA, 24 nt, Human
ggcugggcccagguggggugggug

SEQ ID NO: 65113 - RNA, 18 nt, Human
gggauggggcgggggagg

SEQ ID NO: 65114 - RNA, 24 nt, Human
gggauggggcgggggaggcacagg

SEQ ID NO: 65115 - RNA, 21 nt, Human
gggcagcagaggccuggcugc

SEQ ID NO: 65116 - RNA, 24 nt, Human
gggcccagguggggugggggacuc

SEQ ID NO: 65117 - RNA, 22 nt, Human
gggcucuugggggggugugggc

SEQ ID NO: 65118 - RNA, 19 nt, Human
gggcuggggagcagcagca

SEQ ID NO: 65119 - RNA, 21 nt, Human
ggggagggcugaggagggggg

SEQ ID NO: 65120 - RNA, 21 nt, Human
ggggauggggcgggggaggca

SEQ ID NO: 65121 - RNA, 19 nt, Human
ggggcgggggaggcacagg

SEQ ID NO: 65122 - RNA, 20 nt, Human
gguauggggaggggaggggc

SEQ ID NO: 65123 - RNA, 18 nt, Human
gucccuuguuuguuccug

SEQ ID NO: 65124 - RNA, 25 nt, Human
uacccagccuccuggaugguacuga

SEQ ID NO: 65125 - RNA, 21 nt, Human
uagacgggaccgacagcgaca

SEQ ID NO: 65126 - RNA, 19 nt, Human
uauggggaggggaggggcu

SEQ ID NO: 65127 - RNA, 20 nt, Human
ucagaaaagaagcagggaca

SEQ ID NO: 65128 - RNA, 21 nt, Human
ucaggggcauuuauuucccgg

SEQ ID NO: 65129 - RNA, 23 nt, Human
uccaggggcaaccacggggccug

SEQ ID NO: 65130 - RNA, 22 nt, Human
ucccacaccccagcuccacccc

SEQ ID NO: 65131 - RNA, 23 nt, Human
ucccccacagcacaggcagaagc

SEQ ID NO: 65132 - RNA, 20 nt, Human
ucuccacagcccuguccagg

SEQ ID NO: 65133 - RNA, 22 nt, Human
ugagagccugggggaacaggcg

SEQ ID NO: 65134 - RNA, 18 nt, Human
ugagccuggcagacacaa

SEQ ID NO: 65135 - RNA, 21 nt, Human
ugcggccucucucccccacag

SEQ ID NO: 65136 - RNA, 20 nt, Human
ugcucaugcagacacaggga

SEQ ID NO: 65137 - RNA, 18 nt, Human
uggaugguacugagguga

SEQ ID NO: 65138 - RNA, 25 nt, Human
uggccaggcacuggugggcugggga

SEQ ID NO: 65139 - RNA, 23 nt, Human
uggcccagggacggcacggacgg

SEQ ID NO: 65140 - RNA, 19 nt, Human
ugggcucugggcacugccc

SEQ ID NO: 65141 - RNA, 19 nt, Human
uggggaggggaggggcugg

SEQ ID NO: 65142 - RNA, 21 nt, Human
uggggaggggaggggcugggg

SEQ ID NO: 65143 - RNA, 23 nt, Human
ugggggggugugggcucugggca

SEQ ID NO: 65144 - RNA, 24 nt, Human
ugguauggggaggggaggggcugg

SEQ ID NO: 65145 - RNA, 21 nt, Human
ugguggcacugagagccuggg

SEQ ID NO: 65146 - RNA, 19 nt, Human
uuccuggcugggucaggga

SEQ ID NO: 65147 - RNA, 18 nt, Human
uugguauggggaggggag

SEQ ID NO: 65148 - RNA, 19 nt, Human
uuggucccuuguuuguucc

SEQ ID NO: 65149 - RNA, 25 nt, Human
uuuuuuuuuuuuuuuccuucagggg

SEQ ID NO: 65150 - RNA, 20 nt, Human
aagaagaacucccucuggca

SEQ ID NO: 65151 - RNA, 20 nt, Human
accacguugagugacagggu

SEQ ID NO: 65152 - RNA, 24 nt, Human
accacguugagugacaggguggga

SEQ ID NO: 65153 - RNA, 25 nt, Human
accuacuugaagaggaaacccuggc

SEQ ID NO: 65154 - RNA, 24 nt, Human
agagggacccagcuguggacaggg

SEQ ID NO: 65155 - RNA, 23 nt, Human
agccucuuguucuagggaccacg

SEQ ID NO: 65156 - RNA, 20 nt, Human
agugacagggugggaaaaga

SEQ ID NO: 65157 - RNA, 19 nt, Human
cagcaacaaccacaaaaga

SEQ ID NO: 65158 - RNA, 20 nt, Human
caguuagaacaggaaggaag

SEQ ID NO: 65159 - RNA, 22 nt, Human
cuaggcauuagaaugaacuacu

SEQ ID NO: 65160 - RNA, 21 nt, Human
cuuccagguggcaaggguggg

SEQ ID NO: 65161 - RNA, 18 nt, Human
gaaacccuggcucgugcc

SEQ ID NO: 65162 - RNA, 22 nt, Human
gaaugaacuacuggaaccugag

SEQ ID NO: 65163 - RNA, 19 nt, Human
gacagggaggagggacagg

SEQ ID NO: 65164 - RNA, 22 nt, Human
gacagggaggagggacagggug

SEQ ID NO: 65165 - RNA, 19 nt, Human
gccagcaacaaccacaaaa

SEQ ID NO: 65166 - RNA, 21 nt, Human
gcccgguuuuaagccucuugu

SEQ ID NO: 65167 - RNA, 19 nt, Human
ggacagggaggagggacag

SEQ ID NO: 65168 - RNA, 19 nt, Human
ggaggagggacagggugcu

SEQ ID NO: 65169 - RNA, 20 nt, Human
ggcaggggaugugacuaggg

SEQ ID NO: 65170 - RNA, 23 nt, Human
ggguaagacagggaaauauuaaa

SEQ ID NO: 65171 - RNA, 18 nt, Human
guugagugacaggguggg

SEQ ID NO: 65172 - RNA, 19 nt, Human
uaaggaaauguggcagugu

SEQ ID NO: 65173 - RNA, 25 nt, Human
uauucuuguucucuugugucguuua

SEQ ID NO: 65174 - RNA, 18 nt, Human
ucucucacaaaagaagaa

SEQ ID NO: 65175 - RNA, 20 nt, Human
ugaagaggaaacccuggcuc

SEQ ID NO: 65176 - RNA, 20 nt, Human
ugagagaauucuuccaggug

SEQ ID NO: 65177 - RNA, 21 nt, Human
uggagacguggaagaucuggc

SEQ ID NO: 65178 - RNA, 19 nt, Human
uggcaggggaugugacuag

SEQ ID NO: 65179 - RNA, 22 nt, Human
uguguacugagauggagacgug

SEQ ID NO: 65180 - RNA, 23 nt, Human
ugugucguuuacagugucucuca

SEQ ID NO: 65181 - RNA, 21 nt, Human
uugaagaggaaacccuggcuc

SEQ ID NO: 65182 - RNA, 24 nt, Human
uugggugaaagcccgguuuuaagc

SEQ ID NO: 65183 - RNA, 18 nt, Human
aaaaacagagcgaaggca

SEQ ID NO: 65184 - RNA, 21 nt, Human
aagcagagggcaggagggaga

SEQ ID NO: 65185 - RNA, 22 nt, Human
agagggcaggagggagagaugg

SEQ ID NO: 65186 - RNA, 25 nt, Human
agagggcaggagggagagauggccg

SEQ ID NO: 65187 - RNA, 21 nt, Human
agcccugagucccccaagcag

SEQ ID NO: 65188 - RNA, 18 nt, Human
agcugugugggugggggu

SEQ ID NO: 65189 - RNA, 18 nt, Human
cacuugggggugggggug

SEQ ID NO: 65190 - RNA, 23 nt, Human
cacuuggggguggggguggaggg

SEQ ID NO: 65191 - RNA, 19 nt, Human
cagaauggagcccugaguc

SEQ ID NO: 65192 - RNA, 22 nt, Human
cagcucccucuccucaggcccc

SEQ ID NO: 65193 - RNA, 24 nt, Human
cagcugggccccucccaggcgugg

SEQ ID NO: 65194 - RNA, 24 nt, Human
cagcugggccccucccaggcgugg

SEQ ID NO: 65195 - RNA, 18 nt, Human
cccagcugggccccuccc

SEQ ID NO: 65196 - RNA, 22 nt, Human
cccccacaggcaauacugagau

SEQ ID NO: 65197 - RNA, 18 nt, Human
cccccauuccucuccuuc

SEQ ID NO: 65198 - RNA, 24 nt, Human
cccccauuccucuccuucuugcaa

SEQ ID NO: 65199 - RNA, 22 nt, Human
cucccaggcguggcccacagcu

SEQ ID NO: 65200 - RNA, 18 nt, Human
cugugugggugggggugg

SEQ ID NO: 65201 - RNA, 19 nt, Human
cuuggggguggggguggag

SEQ ID NO: 65202 - RNA, 22 nt, Human
cuuggggguggggguggagggg

SEQ ID NO: 65203 - RNA, 19 nt, Human
gcagcuguguggguggggg

SEQ ID NO: 65204 - RNA, 20 nt, Human
gccccucccaggcguggcca

SEQ ID NO: 65205 - RNA, 18 nt, Human
gcccugagucccccaagc

SEQ ID NO: 65206 - RNA, 22 nt, Human
gcgaaggcacuugggggugggg

SEQ ID NO: 65207 - RNA, 18 nt, Human
ggcucugcaaggcuggug

SEQ ID NO: 65208 - RNA, 20 nt, Human
ggggguggggguggaggggu

SEQ ID NO: 65209 - RNA, 18 nt, Human
gggguggggguggagggg

SEQ ID NO: 65210 - RNA, 18 nt, Human
guccucucccccauuccu

SEQ ID NO: 65211 - RNA, 19 nt, Human
uaaaaaauaaacccuccaa

SEQ ID NO: 65212 - RNA, 20 nt, Human
uaaaaaauaaacccuccaau

SEQ ID NO: 65213 - RNA, 22 nt, Human
uauaaaaacagagcgaaggcac

SEQ ID NO: 65214 - RNA, 21 nt, Human
ucccucacguccucuccccca

SEQ ID NO: 65215 - RNA, 20 nt, Human
ugagauggcccgggucaccg

SEQ ID NO: 65216 - RNA, 18 nt, Human
ugcggcagcugugugggu

SEQ ID NO: 65217 - RNA, 21 nt, Human
uggagcccugagucccccaag

SEQ ID NO: 65218 - RNA, 18 nt, Human
ugggccccucccaggcgu

SEQ ID NO: 65219 - RNA, 20 nt, Human
ugggcucugcaaggcuggug

SEQ ID NO: 65220 - RNA, 24 nt, Human
uggugcccuccagaauggagcccu

SEQ ID NO: 65221 - RNA, 19 nt, Human
uucaggguauaaaaacaga

SEQ ID NO: 65222 - RNA, 24 nt, Human
uugcaaaaggccuuccugggcggg

SEQ ID NO: 65223 - RNA, 24 nt, Human
aaaaaagaaagccaaaaagcucau

SEQ ID NO: 65224 - RNA, 26 nt, Human
aaaaagcucauaaaauauaccuccca

SEQ ID NO: 65225 - RNA, 18 nt, Human
aaaauacagcaaaugccc

SEQ ID NO: 65226 - RNA, 24 nt, Human
aaaauauaccucccaugaaauaca

SEQ ID NO: 65227 - RNA, 24 nt, Human
aaaaucaaauaaacaacaacaaca

SEQ ID NO: 65228 - RNA, 23 nt, Human
aaaccaaaauacagcaaaugccc

SEQ ID NO: 65229 - RNA, 24 nt, Human
aaaccuccagguacuaaaauuuuc

SEQ ID NO: 65230 - RNA, 24 nt, Human
aaagccaggcauacaaacagguua

SEQ ID NO: 65231 - RNA, 23 nt, Human
aaauuacaaguauuucaaaacca

SEQ ID NO: 65232 - RNA, 23 nt, Human
aacaaaacaaggcaaauaaaaau

SEQ ID NO: 65233 - RNA, 20 nt, Human
aacagaaaucuggacauaga

SEQ ID NO: 65234 - RNA, 19 nt, Human
aacagugugcacaugacag

SEQ ID NO: 65235 - RNA, 23 nt, Human
aaggugcuccucccuuccccguc

SEQ ID NO: 65236 - RNA, 23 nt, Human
aagucaaacggaugugacuauaa

SEQ ID NO: 65237 - RNA, 22 nt, Human
aaucccaacccucaauagaaaa

SEQ ID NO: 65238 - RNA, 20 nt, Human
aauuaauuacaggcuccucg

SEQ ID NO: 65239 - RNA, 20 nt, Human
aauuacuaaggacaagacac

SEQ ID NO: 65240 - RNA, 19 nt, Human
aauuucauauccuacaccc

SEQ ID NO: 65241 - RNA, 22 nt, Human
acaacaacaacaacaacuuuuu

SEQ ID NO: 65242 - RNA, 24 nt, Human
acaacaacaacaacaacuuuuuaa

SEQ ID NO: 65243 - RNA, 21 nt, Human
acaaguauuucaaaaccaaaa

SEQ ID NO: 65244 - RNA, 24 nt, Human
acacggccgauacuccaaauccaa

SEQ ID NO: 65245 - RNA, 19 nt, Human
acagaagagagcacagugu

SEQ ID NO: 65246 - RNA, 23 nt, Human
accaaaauacagcaaaugcccag

SEQ ID NO: 65247 - RNA, 20 nt, Human
accaacaccuugccugcagu

SEQ ID NO: 65248 - RNA, 31 nt, Human
accaauuuauuaucaaaacccucaauaccaa

SEQ ID NO: 65249 - RNA, 23 nt, Human
acgacaauggaagaaaacacacc

SEQ ID NO: 65250 - RNA, 21 nt, Human
acgcaguucucaguggugccc

SEQ ID NO: 65251 - RNA, 18 nt, Human
acuccaaauccaacaacc

SEQ ID NO: 65252 - RNA, 23 nt, Human
agaaaaaacuccucugaugguga

SEQ ID NO: 65253 - RNA, 18 nt, Human
agaaacagaaaucuggac

SEQ ID NO: 65254 - RNA, 19 nt, Human
agaugaccaauauuuuguu

SEQ ID NO: 65255 - RNA, 24 nt, Human
agaugaccaauauuuuguuccaga

SEQ ID NO: 65256 - RNA, 23 nt, Human
agccacacggcauagcauaccuu

SEQ ID NO: 65257 - RNA, 21 nt, Human
agccaggcauacaaacagguu

SEQ ID NO: 65258 - RNA, 20 nt, Human
agccuacuggacagcagaga

SEQ ID NO: 65259 - RNA, 21 nt, Human
aggaaaaccaaagaaagucaa

SEQ ID NO: 65260 - RNA, 22 nt, Human
aggcaaaaggaacucuuuucuu

SEQ ID NO: 65261 - RNA, 19 nt, Human
aggcauuucaaaaugugau

SEQ ID NO: 65262 - RNA, 22 nt, Human
aggugcgucauaaaagcuggcc

SEQ ID NO: 65263 - RNA, 19 nt, Human
aggugguucacaggcagau

SEQ ID NO: 65264 - RNA, 18 nt, Human
agucccacucugggcacc

SEQ ID NO: 65265 - RNA, 22 nt, Human
aucaucuuuggacugcagggaa

SEQ ID NO: 65266 - RNA, 20 nt, Human
auggaagaaaacacacccau

SEQ ID NO: 65267 - RNA, 21 nt, Human
auguaucuguaucuguaucua

SEQ ID NO: 65268 - RNA, 22 nt, Human
auugaacugcagggaaagcaaa

SEQ ID NO: 65269 - RNA, 24 nt, Human
caaaaagcucauaaaauauaccuc

SEQ ID NO: 65270 - RNA, 24 nt, Human
caaaacccucaauaccagugggga

SEQ ID NO: 65271 - RNA, 24 nt, Human
caaaauacagcaaaugcccaaagu

SEQ ID NO: 65272 - RNA, 22 nt, Human
caaaggucuaaaacucucacua

SEQ ID NO: 65273 - RNA, 31 nt, Human
caaauaaacaacaacaacaacaacuuuuuuu

SEQ ID NO: 65274 - RNA, 19 nt, Human
caacaaaccugccccacau

SEQ ID NO: 65275 - RNA, 24 nt, Human
caacaaccugcagucaccuccagg

SEQ ID NO: 65276 - RNA, 18 nt, Human
caagaauaacaaauuuau

SEQ ID NO: 65277 - RNA, 24 nt, Human
caaugucuaauguauaauuauaaa

SEQ ID NO: 65278 - RNA, 18 nt, Human
cacagcaggucacuucca

SEQ ID NO: 65279 - RNA, 26 nt, Human
caccaaauuuacuaacaucaaagagg

SEQ ID NO: 65280 - RNA, 21 nt, Human
cacccaaaucccaacccucaa

SEQ ID NO: 65281 - RNA, 21 nt, Human
cacggcauagcauaccuuuga

SEQ ID NO: 65282 - RNA, 19 nt, Human
cacuucauagcaaaggaac

SEQ ID NO: 65283 - RNA, 18 nt, Human
cagaauacaaaguaaaag

SEQ ID NO: 65284 - RNA, 18 nt, Human
cagcacuuugggggcuug

SEQ ID NO: 65285 - RNA, 20 nt, Human
cagcaguaccuguggcuaau

SEQ ID NO: 65286 - RNA, 21 nt, Human
cagccuacuggacagcagaga

SEQ ID NO: 65287 - RNA, 18 nt, Human
caggcauacaaacagguu

SEQ ID NO: 65288 - RNA, 24 nt, Human
caugcaaauacagaguuuuauugu

SEQ ID NO: 65289 - RNA, 21 nt, Human
ccaaaacccaucugauuauac

SEQ ID NO: 65290 - RNA, 21 nt, Human
ccaaagcucuauacauuuggu

SEQ ID NO: 65291 - RNA, 23 nt, Human
ccaaauccaacaaccugcaguca

SEQ ID NO: 65292 - RNA, 22 nt, Human
ccacaugcuagggcaagcccac

SEQ ID NO: 65293 - RNA, 18 nt, Human
ccacccaaaucccaaccc

SEQ ID NO: 65294 - RNA, 19 nt, Human
cccaaaucccaacccucaa

SEQ ID NO: 65295 - RNA, 27 nt, Human
cccaacccucaauagaaaagacgacaa

SEQ ID NO: 65296 - RNA, 22 nt, Human
cccacagaguucagagggcacc

SEQ ID NO: 65297 - RNA, 19 nt, Human
cccacccaaaucccaaccc

SEQ ID NO: 65298 - RNA, 25 nt, Human
cccacccuuuccuuagcaaccccca

SEQ ID NO: 65299 - RNA, 24 nt, Human
cccauccacucucugaccacacca

SEQ ID NO: 65300 - RNA, 23 nt, Human
ccccaccccugccacuauccgaa

SEQ ID NO: 65301 - RNA, 21 nt, Human
ccgauacuccaaauccaacaa

SEQ ID NO: 65302 - RNA, 20 nt, Human
ccucaacuuuucuaauauaa

SEQ ID NO: 65303 - RNA, 19 nt, Human
ccucagggcgggaggaagc

SEQ ID NO: 65304 - RNA, 19 nt, Human
ccuucccaaacucuuuacc

SEQ ID NO: 65305 - RNA, 23 nt, Human
ccuucccaaacucuuuacccacu

SEQ ID NO: 65306 - RNA, 20 nt, Human
cgacuucagagaagaaagcu

SEQ ID NO: 65307 - RNA, 20 nt, Human
cgcaguucucaguggugccc

SEQ ID NO: 65308 - RNA, 18 nt, Human
cgucauaaaagcuggccu

SEQ ID NO: 65309 - RNA, 20 nt, Human
cuacaagcuucuuaauugag

SEQ ID NO: 65310 - RNA, 19 nt, Human
cuauuuucccagaccccag

SEQ ID NO: 65311 - RNA, 26 nt, Human
cucaacuuuucuaauauaacuuggac

SEQ ID NO: 65312 - RNA, 24 nt, Human
cucacaaacagauuagugcagcug

SEQ ID NO: 65313 - RNA, 20 nt, Human
cuccaaauccaacaaccugc

SEQ ID NO: 65314 - RNA, 22 nt, Human
cucugcauccacacuggagcca

SEQ ID NO: 65315 - RNA, 19 nt, Human
cuguaucuguaucuauaua

SEQ ID NO: 65316 - RNA, 19 nt, Human
cuucccaaacucuuuaccc

SEQ ID NO: 65317 - RNA, 20 nt, Human
cuuggacaagacaaaucaac

SEQ ID NO: 65318 - RNA, 21 nt, Human
gaaccauuaagcccacagaag

SEQ ID NO: 65319 - RNA, 23 nt, Human
gcuccucccuuccccgucucacu

SEQ ID NO: 65320 - RNA, 20 nt, Human
ggaaaaaagaaagccaaaaa

SEQ ID NO: 65321 - RNA, 21 nt, Human
ggagaguagagugagggaaug

SEQ ID NO: 65322 - RNA, 22 nt, Human
ggagggaaaagagaaguuaggu

SEQ ID NO: 65323 - RNA, 21 nt, Human
ggccgauacuccaaauccaac

SEQ ID NO: 65324 - RNA, 21 nt, Human
gggcaccaaugaaagauguga

SEQ ID NO: 65325 - RNA, 19 nt, Human
guuaucuucaggugcguca

SEQ ID NO: 65326 - RNA, 23 nt, Human
uaaaaacacagaucaauuuagga

SEQ ID NO: 65327 - RNA, 25 nt, Human
uaaaaacacagaucaauuuaggaca

SEQ ID NO: 65328 - RNA, 20 nt, Human
uaaaacaaaacaaggcaaau

SEQ ID NO: 65329 - RNA, 20 nt, Human
uaaaagacaauucacaggaa

SEQ ID NO: 65330 - RNA, 22 nt, Human
uaagcgagccuucugagcuaaa

SEQ ID NO: 65331 - RNA, 19 nt, Human
uagcuaaaaugcagccugc

SEQ ID NO: 65332 - RNA, 21 nt, Human
uagcuucuaaaaauaauuuuu

SEQ ID NO: 65333 - RNA, 23 nt, Human
uaggacagaaacagaaaucugga

SEQ ID NO: 65334 - RNA, 19 nt, Human
uauauagauauagauauau

SEQ ID NO: 65335 - RNA, 19 nt, Human
uaucaggaaaaaaaugacu

SEQ ID NO: 65336 - RNA, 18 nt, Human
uaugcuucauuuagggua

SEQ ID NO: 65337 - RNA, 21 nt, Human
uauuuuacaaagguacaucug

SEQ ID NO: 65338 - RNA, 23 nt, Human
ucaaaacccucaauaccaguggg

SEQ ID NO: 65339 - RNA, 18 nt, Human
ucaaauuacaaguauuuc

SEQ ID NO: 65340 - RNA, 22 nt, Human
ucaaauuacaaguauuucaaaa

SEQ ID NO: 65341 - RNA, 19 nt, Human
ucaucuuuggacugcaggg

SEQ ID NO: 65342 - RNA, 21 nt, Human
uccacucucugaccacaccac

SEQ ID NO: 65343 - RNA, 25 nt, Human
ucccagaccccagaaaacagaaagu

SEQ ID NO: 65344 - RNA, 19 nt, Human
ucccaggugguucacaggc

SEQ ID NO: 65345 - RNA, 24 nt, Human
ucccuccuaacucaaaaucaaaua

SEQ ID NO: 65346 - RNA, 19 nt, Human
uccgucagccaaaugugcc

SEQ ID NO: 65347 - RNA, 22 nt, Human
uccuuggguguacuaaagacaa

SEQ ID NO: 65348 - RNA, 18 nt, Human
ucgaugguguuaguguca

SEQ ID NO: 65349 - RNA, 23 nt, Human
ucuauuaucccuccuaacucaaa

SEQ ID NO: 65350 - RNA, 19 nt, Human
ucugauuuucucuuuuucu

SEQ ID NO: 65351 - RNA, 23 nt, Human
ugaaauacaauacauaguuacaa

SEQ ID NO: 65352 - RNA, 22 nt, Human
ugaacuagagaaacugaaauuu

SEQ ID NO: 65353 - RNA, 21 nt, Human
ugacucagggcccuuuggcac

SEQ ID NO: 65354 - RNA, 19 nt, Human
ugaggaagcugacugugag

SEQ ID NO: 65355 - RNA, 22 nt, Human
ugaggaagcugacugugaggcc

SEQ ID NO: 65356 - RNA, 24 nt, Human
ugauuugccuugauuaacuguucu

SEQ ID NO: 65357 - RNA, 18 nt, Human
ugcacaaggaaaaccaaa

SEQ ID NO: 65358 - RNA, 18 nt, Human
uggagccaggauguggug

SEQ ID NO: 65359 - RNA, 21 nt, Human
ugguacagguauuucuuuguu

SEQ ID NO: 65360 - RNA, 24 nt, Human
uguauaauuauaaaaaugaaauga

SEQ ID NO: 65361 - RNA, 20 nt, Human
ugugaagaagcccagcacug

SEQ ID NO: 65362 - RNA, 24 nt, Human
ugugggaggccaaguugggaggga

SEQ ID NO: 65363 - RNA, 26 nt, Human
uuacuaacaucaaagaggaaaacaaa

SEQ ID NO: 65364 - RNA, 20 nt, Human
uuagcuucugcuucuaaaau

SEQ ID NO: 65365 - RNA, 24 nt, Human
uuaggguaggauuaaaaccaaagu

SEQ ID NO: 65366 - RNA, 19 nt, Human
uucauuggcaguugcugug

SEQ ID NO: 65367 - RNA, 20 nt, Human
uucauuggcaguugcugugg

SEQ ID NO: 65368 - RNA, 19 nt, Human
uucuuuguacaccaccccu

SEQ ID NO: 65369 - RNA, 20 nt, Human
uuggacugcagggaagcauu

SEQ ID NO: 65370 - RNA, 21 nt, Human
uugggggcuugcugauuugcc

SEQ ID NO: 65371 - RNA, 21 nt, Human
uuucccagaccccagaaaacc

SEQ ID NO: 65372 - RNA, 24 nt, Human
uuugagguccuaugcacgcaguuc

SEQ ID NO: 65373 - RNA, 19 nt, Human
aacagugucugaggguccc

SEQ ID NO: 65374 - RNA, 24 nt, Human
aagucccucgaaaucccccccacc

SEQ ID NO: 65375 - RNA, 22 nt, Human
aaugaugaaagguucccagagu

SEQ ID NO: 65376 - RNA, 19 nt, Human
acaaagcacgaaaggaggc

SEQ ID NO: 65377 - RNA, 20 nt, Human
acaaagcacgaaaggaggcc

SEQ ID NO: 65378 - RNA, 25 nt, Human
accccucuuaaacaucucccuccag

SEQ ID NO: 65379 - RNA, 21 nt, Human
agcccuugccaugagcagcuu

SEQ ID NO: 65380 - RNA, 26 nt, Human
agucccucgaaaucccccccaccaag

SEQ ID NO: 65381 - RNA, 22 nt, Human
caaagucccucgaaaucccccc

SEQ ID NO: 65382 - RNA, 25 nt, Human
caacagugucugagggucggcgucg

SEQ ID NO: 65383 - RNA, 21 nt, Human
caagcacaaagcacgaaagga

SEQ ID NO: 65384 - RNA, 18 nt, Human
cacugaccuugcaccaua

SEQ ID NO: 65385 - RNA, 24 nt, Human
cagaaggccucucuugcaggguuc

SEQ ID NO: 65386 - RNA, 20 nt, Human
cagcucugaaucugcacccu

SEQ ID NO: 65387 - RNA, 26 nt, Human
caggccccaauggucccccuuuuuuu

SEQ ID NO: 65388 - RNA, 19 nt, Human
caggguucuggggccagcc

SEQ ID NO: 65389 - RNA, 18 nt, Human
ccccaauggucccccuuu

SEQ ID NO: 65390 - RNA, 21 nt, Human
ccccccaccaagcacaaagca

SEQ ID NO: 65391 - RNA, 24 nt, Human
cccgaaaaacaacagugucugagg

SEQ ID NO: 65392 - RNA, 21 nt, Human
ccgaaaaacaacagugucuga

SEQ ID NO: 65393 - RNA, 18 nt, Human
ccucgaaaucccccccac

SEQ ID NO: 65394 - RNA, 19 nt, Human
cucacgaaacuccucucag

SEQ ID NO: 65395 - RNA, 23 nt, Human
cucaggccccaauggucccccuu

SEQ ID NO: 65396 - RNA, 18 nt, Human
cucuuaaacaucucccuc

SEQ ID NO: 65397 - RNA, 18 nt, Human
cugaaucugcacccugga

SEQ ID NO: 65398 - RNA, 22 nt, Human
cuuaaacaucucccuccaggag

SEQ ID NO: 65399 - RNA, 21 nt, Human
gaaaucccccccaccaagcac

SEQ ID NO: 65400 - RNA, 18 nt, Human
gagcagcuuguucuucag

SEQ ID NO: 65401 - RNA, 19 nt, Human
gcacaaagcacgaaaggag

SEQ ID NO: 65402 - RNA, 20 nt, Human
gccuaguucuccauccacag

SEQ ID NO: 65403 - RNA, 23 nt, Human
ggccugggccgagggacuggguu

SEQ ID NO: 65404 - RNA, 22 nt, Human
uagaagauaccuuagaggucac

SEQ ID NO: 65405 - RNA, 18 nt, Human
uagaggucaccgggcuga

SEQ ID NO: 65406 - RNA, 18 nt, Human
ucacgaaacuccucucag

SEQ ID NO: 65407 - RNA, 22 nt, Human
ucagcucacgaaacuccucuca

SEQ ID NO: 65408 - RNA, 18 nt, Human
uccaggagacugagguga

SEQ ID NO: 65409 - RNA, 22 nt, Human
uccagugcaaagucccucgaaa

SEQ ID NO: 65410 - RNA, 25 nt, Human
ucccccccaccaagcacaaagcacg

SEQ ID NO: 65411 - RNA, 23 nt, Human
ucccucgaaaucccccccaccaa

SEQ ID NO: 65412 - RNA, 19 nt, Human
ucugcacccuggaggcgga

SEQ ID NO: 65413 - RNA, 19 nt, Human
ucuugaaucugaagagccc

SEQ ID NO: 65414 - RNA, 21 nt, Human
uggggccagcccuugccauga

SEQ ID NO: 65415 - RNA, 23 nt, Human
uguccuuagcuuugagaaggccu

SEQ ID NO: 65416 - RNA, 20 nt, Human
ugucugagggucccggaugu

SEQ ID NO: 65417 - RNA, 19 nt, Human
uuaaugaugaaagguuccc

SEQ ID NO: 65418 - RNA, 19 nt, Human
aaaaaacagaacaacagcc

SEQ ID NO: 65419 - RNA, 19 nt, Human
aaaaugaacaaccaaccaa

SEQ ID NO: 65420 - RNA, 26 nt, Human
aaacaacagcaaaugcccaagcgcgc

SEQ ID NO: 65421 - RNA, 22 nt, Human
aaacacaaaacaaaagccaaag

SEQ ID NO: 65422 - RNA, 21 nt, Human
aaagaggccaauuaauauuac

SEQ ID NO: 65423 - RNA, 18 nt, Human
aaaguuggguucacauuu

SEQ ID NO: 65424 - RNA, 21 nt, Human
aaauaaaaagggcuccucagc

SEQ ID NO: 65425 - RNA, 20 nt, Human
aacaugcauauguacucauc

SEQ ID NO: 65426 - RNA, 25 nt, Human
aaccaaacaacagcaaaugcccaag

SEQ ID NO: 65427 - RNA, 21 nt, Human
aaccaaccaauaaccaaacaa

SEQ ID NO: 65428 - RNA, 22 nt, Human
aaccugugauugaggggaggca

SEQ ID NO: 65429 - RNA, 23 nt, Human
aacuaaaguauuccguaaucaca

SEQ ID NO: 65430 - RNA, 21 nt, Human
aagcacuguuuauuuuuaugu

SEQ ID NO: 65431 - RNA, 20 nt, Human
aagcaugguuaccacucugc

SEQ ID NO: 65432 - RNA, 19 nt, Human
aagggccaaguccccgaaa

SEQ ID NO: 65433 - RNA, 19 nt, Human
aagggcuccucagcaagcu

SEQ ID NO: 65434 - RNA, 24 nt, Human
aaggguacuacaguuuucuugguc

SEQ ID NO: 65435 - RNA, 23 nt, Human
aaguauuccguaaucacaaaaau

SEQ ID NO: 65436 - RNA, 25 nt, Human
aaugaacaaccaaccaauaaccaaa

SEQ ID NO: 65437 - RNA, 18 nt, Human
acaaaacaaaagccaaag

SEQ ID NO: 65438 - RNA, 21 nt, Human
acaaaacaaaagccaaagaag

SEQ ID NO: 65439 - RNA, 23 nt, Human
acaaaaggaauaaggguacuaca

SEQ ID NO: 65440 - RNA, 19 nt, Human
acaaguuagaaaauuugag

SEQ ID NO: 65441 - RNA, 24 nt, Human
acaccacuugguaagguuggcuaa

SEQ ID NO: 65442 - RNA, 21 nt, Human
acagggcaacaggaacccauu

SEQ ID NO: 65443 - RNA, 28 nt, Human
acagggcaacaggaacccauuuauagag

SEQ ID NO: 65444 - RNA, 23 nt, Human
accucagccuccugaguagcugg

SEQ ID NO: 65445 - RNA, 21 nt, Human
acgcacacacauaugcacaca

SEQ ID NO: 65446 - RNA, 22 nt, Human
acugagucaaaucauucagcgg

SEQ ID NO: 65447 - RNA, 18 nt, Human
acugcagccuugaccucc

SEQ ID NO: 65448 - RNA, 22 nt, Human
agaagugagcaaacugagucaa

SEQ ID NO: 65449 - RNA, 21 nt, Human
agaaugagggaaagaaaccua

SEQ ID NO: 65450 - RNA, 26 nt, Human
agagagacucaaacacaaaacaaaag

SEQ ID NO: 65451 - RNA, 19 nt, Human
agcaagcagacaacagccc

SEQ ID NO: 65452 - RNA, 31 nt, Human
agcgcgcacgugcacgcacacacauaugcag

SEQ ID NO: 65453 - RNA, 20 nt, Human
aggcacacuccacccagugg

SEQ ID NO: 65454 - RNA, 18 nt, Human
agguuggagugcaguggu

SEQ ID NO: 65455 - RNA, 22 nt, Human
agugaaggauguuauaucuaaa

SEQ ID NO: 65456 - RNA, 23 nt, Human
agugcaguggugucaucacagcu

SEQ ID NO: 65457 - RNA, 24 nt, Human
agugcaguggugucaucacagcuc

SEQ ID NO: 65458 - RNA, 22 nt, Human
caaaacaaaagccaaagaagug

SEQ ID NO: 65459 - RNA, 23 nt, Human
caaaacccacauuuauaggcauc

SEQ ID NO: 65460 - RNA, 19 nt, Human
caaaagccaaagaagugag

SEQ ID NO: 65461 - RNA, 21 nt, Human
caaacacaaaacaaaagccaa

SEQ ID NO: 65462 - RNA, 22 nt, Human
caaacacaaaacaaaagccaaa

SEQ ID NO: 65463 - RNA, 24 nt, Human
caaacacaaaacaaaagccaaaga

SEQ ID NO: 65464 - RNA, 20 nt, Human
caaaugauccucccaccuca

SEQ ID NO: 65465 - RNA, 27 nt, Human
caaaugauccucccaccucagccuccu

SEQ ID NO: 65466 - RNA, 24 nt, Human
caaaugcccaagcgcgcacgugca

SEQ ID NO: 65467 - RNA, 23 nt, Human
caacacaacuauggcgacacugc

SEQ ID NO: 65468 - RNA, 21 nt, Human
caaccaaccaauaaccaaaca

SEQ ID NO: 65469 - RNA, 28 nt, Human
caagcgcgcacgugcacgcacacacaua

SEQ ID NO: 65470 - RNA, 24 nt, Human
caccaugccuggcuucaaguuugg

SEQ ID NO: 65471 - RNA, 25 nt, Human
cacgugcacgcacacacauaugcac

SEQ ID NO: 65472 - RNA, 19 nt, Human
cacugcagccuugaccucc

SEQ ID NO: 65473 - RNA, 18 nt, Human
cagcacacagcuacuaga

SEQ ID NO: 65474 - RNA, 20 nt, Human
cagccuccugaguagcuggg

SEQ ID NO: 65475 - RNA, 20 nt, Human
cagccuugaccuccugggcu

SEQ ID NO: 65476 - RNA, 23 nt, Human
cagccuugaccuccugggcucaa

SEQ ID NO: 65477 - RNA, 24 nt, Human
cagccuugaccuccugggcucaaa

SEQ ID NO: 65478 - RNA, 24 nt, Human
cagcucacugcagccuugaccucc

SEQ ID NO: 65479 - RNA, 18 nt, Human
caucagaagggccaaguc

SEQ ID NO: 65480 - RNA, 22 nt, Human
ccaaacaacagcaaaugcccaa

SEQ ID NO: 65481 - RNA, 21 nt, Human
ccaacuuucaauggcgcugaa

SEQ ID NO: 65482 - RNA, 21 nt, Human
ccaccaugccuggcuucaagu

SEQ ID NO: 65483 - RNA, 23 nt, Human
ccaccucagccuccugaguagcu

SEQ ID NO: 65484 - RNA, 20 nt, Human
ccagcccaaagaaugugacc

SEQ ID NO: 65485 - RNA, 21 nt, Human
ccagcccaaagaaugugaccu

SEQ ID NO: 65486 - RNA, 23 nt, Human
cccaccucagccuccugaguagc

SEQ ID NO: 65487 - RNA, 18 nt, Human
cccuggggaaaaguuggg

SEQ ID NO: 65488 - RNA, 22 nt, Human
cccuuucucuuucuuacugaau

SEQ ID NO: 65489 - RNA, 24 nt, Human
ccuccugggcucaaaugauccucc

SEQ ID NO: 65490 - RNA, 18 nt, Human
ccuggcuucaaguuuggu

SEQ ID NO: 65491 - RNA, 22 nt, Human
ccugggcucaaaugauccuccc

SEQ ID NO: 65492 - RNA, 18 nt, Human
ccugugauugaggggagg

SEQ ID NO: 65493 - RNA, 22 nt, Human
ccuugaccuccugggcucaaau

SEQ ID NO: 65494 - RNA, 21 nt, Human
ccuuggccagcugcuuugcaa

SEQ ID NO: 65495 - RNA, 22 nt, Human
cucaaacacaaaacaaaagcca

SEQ ID NO: 65496 - RNA, 24 nt, Human
cucaaaugauccucccaccucagc

SEQ ID NO: 65497 - RNA, 24 nt, Human
cucacugcagccuugaccuccugg

SEQ ID NO: 65498 - RNA, 24 nt, Human
cucagccuccugaguagcugggac

SEQ ID NO: 65499 - RNA, 24 nt, Human
cuccugaguagcugggaccacagg

SEQ ID NO: 65500 - RNA, 18 nt, Human
cucuguuaccuagguugg

SEQ ID NO: 65501 - RNA, 24 nt, Human
cugaaggcacacuccacccagugg

SEQ ID NO: 65502 - RNA, 22 nt, Human
cugcagccuugaccuccugggc

SEQ ID NO: 65503 - RNA, 18 nt, Human
cugcugugcagcaagcag

SEQ ID NO: 65504 - RNA, 24 nt, Human
cuugcagguacaggaaagcccugg

SEQ ID NO: 65505 - RNA, 20 nt, Human
gaaagcccuggggaaaaguu

SEQ ID NO: 65506 - RNA, 18 nt, Human
gaccacaggugugggcca

SEQ ID NO: 65507 - RNA, 21 nt, Human
gagagagacucaaacacaaaa

SEQ ID NO: 65508 - RNA, 25 nt, Human
gaguagcugggaccacagguguggg

SEQ ID NO: 65509 - RNA, 25 nt, Human
gcagaaugagggaaagaaaccuauc

SEQ ID NO: 65510 - RNA, 21 nt, Human
gcagacaacagcccuguacca

SEQ ID NO: 65511 - RNA, 22 nt, Human
gcucaaaugauccucccaccuc

SEQ ID NO: 65512 - RNA, 25 nt, Human
ggaacugaaaggccucuacgggcag

SEQ ID NO: 65513 - RNA, 24 nt, Human
ggaccacaggugugggccaccaug

SEQ ID NO: 65514 - RNA, 21 nt, Human
ggccagcugcuuugcaagggc

SEQ ID NO: 65515 - RNA, 19 nt, Human
ggcuguugcagaggcacug

SEQ ID NO: 65516 - RNA, 18 nt, Human
gugaccuuccccaucugg

SEQ ID NO: 65517 - RNA, 21 nt, Human
gugcacgcacacacauaugca

SEQ ID NO: 65518 - RNA, 19 nt, Human
guucacauuuaauaagccu

SEQ ID NO: 65519 - RNA, 21 nt, Human
uaaaaaacagaacaacagcca

SEQ ID NO: 65520 - RNA, 28 nt, Human
uaaaaaguaagcaaagcacauacauacu

SEQ ID NO: 65521 - RNA, 22 nt, Human
uaaaguggaugaugugauucaa

SEQ ID NO: 65522 - RNA, 23 nt, Human
uaaauuaaguacuaagaggcuug

SEQ ID NO: 65523 - RNA, 23 nt, Human
uaaccaaacaacagcaaaugccc

SEQ ID NO: 65524 - RNA, 25 nt, Human
uaaccaaacaacagcaaaugcccaa

SEQ ID NO: 65525 - RNA, 21 nt, Human
uaaccacagaaugggcagaug

SEQ ID NO: 65526 - RNA, 18 nt, Human
uaaguaacuggccugcau

SEQ ID NO: 65527 - RNA, 23 nt, Human
uaauuacagggcaacaggaaccc

SEQ ID NO: 65528 - RNA, 20 nt, Human
uacagggcaacaggaaccca

SEQ ID NO: 65529 - RNA, 22 nt, Human
uaccaaaaauaaaaagggcucc

SEQ ID NO: 65530 - RNA, 26 nt, Human
uaccaaaaauaaaaagggcuccucag

SEQ ID NO: 65531 - RNA, 24 nt, Human
uaccuagguuggagugcaguggug

SEQ ID NO: 65532 - RNA, 20 nt, Human
ucaaacacaaaacaaaagcc

SEQ ID NO: 65533 - RNA, 23 nt, Human
ucacugcagccuugaccuccugg

SEQ ID NO: 65534 - RNA, 24 nt, Human
ucacugcagccuugaccuccuggg

SEQ ID NO: 65535 - RNA, 23 nt, Human
ucagccuccugaguagcugggac

SEQ ID NO: 65536 - RNA, 19 nt, Human
uccagaguaccgagggccc

SEQ ID NO: 65537 - RNA, 20 nt, Human
uccguaaucacaaaaauguu

SEQ ID NO: 65538 - RNA, 24 nt, Human
uccguaaucacaaaaauguuuccu

SEQ ID NO: 65539 - RNA, 26 nt, Human
uccucccaccucagccuccugaguag

SEQ ID NO: 65540 - RNA, 24 nt, Human
uccugaguagcugggaccacaggu

SEQ ID NO: 65541 - RNA, 24 nt, Human
uccugggcucaaaugauccuccca

SEQ ID NO: 65542 - RNA, 23 nt, Human
ucuaguuucugggauaaagugga

SEQ ID NO: 65543 - RNA, 19 nt, Human
ucucuguuaccuagguugg

SEQ ID NO: 65544 - RNA, 22 nt, Human
ucuguuaccuagguuggagugc

SEQ ID NO: 65545 - RNA, 24 nt, Human
ucuguuaccuagguuggagugcag

SEQ ID NO: 65546 - RNA, 19 nt, Human
ucuuauagacaacauaggg

SEQ ID NO: 65547 - RNA, 18 nt, Human
ugaaagcugucuaguagg

SEQ ID NO: 65548 - RNA, 24 nt, Human
ugaaaggccucuacgggcagcagu

SEQ ID NO: 65549 - RNA, 24 nt, Human
ugaacaaccaaccaauaaccaaac

SEQ ID NO: 65550 - RNA, 19 nt, Human
ugaacugaaggcaaucuga

SEQ ID NO: 65551 - RNA, 25 nt, Human
ugaaggcacacuccacccaguggca

SEQ ID NO: 65552 - RNA, 18 nt, Human
ugacacaaaaggaauaag

SEQ ID NO: 65553 - RNA, 25 nt, Human
ugaccuccugggcucaaaugauccu

SEQ ID NO: 65554 - RNA, 21 nt, Human
ugagcaaacugagucaaauca

SEQ ID NO: 65555 - RNA, 23 nt, Human
ugagggcaauggcuguugcagag

SEQ ID NO: 65556 - RNA, 18 nt, Human
ugagucaaaucauucagc

SEQ ID NO: 65557 - RNA, 20 nt, Human
ugagucaaaucauucagcgg

SEQ ID NO: 65558 - RNA, 24 nt, Human
ugaguuaaucaguccugaauaauc

SEQ ID NO: 65559 - RNA, 23 nt, Human
ugauguuggacugcaaaaauagu

SEQ ID NO: 65560 - RNA, 20 nt, Human
ugcaacguacauaaaguaac

SEQ ID NO: 65561 - RNA, 20 nt, Human
ugcagcaagcagacaacagc

SEQ ID NO: 65562 - RNA, 23 nt, Human
ugcugauggauuugguguuggug

SEQ ID NO: 65563 - RNA, 20 nt, Human
uggagugcaguggugucauc

SEQ ID NO: 65564 - RNA, 23 nt, Human
uggagugcaguggugucaucaca

SEQ ID NO: 65565 - RNA, 28 nt, Human
uggagugcaguggugucauggcucuagc

SEQ ID NO: 65566 - RNA, 21 nt, Human
ugggaccacaggugugggcca

SEQ ID NO: 65567 - RNA, 22 nt, Human
ugggaccacaggugugggccac

SEQ ID NO: 65568 - RNA, 24 nt, Human
ugggaccacaggugugggccacca

SEQ ID NO: 65569 - RNA, 19 nt, Human
ugggaccuugagacucuca

SEQ ID NO: 65570 - RNA, 24 nt, Human
ugggcagaugugaagaucuguguu

SEQ ID NO: 65571 - RNA, 18 nt, Human
uggggagggaggggugag

SEQ ID NO: 65572 - RNA, 21 nt, Human
uggggagggaggggugagugg

SEQ ID NO: 65573 - RNA, 24 nt, Human
uggugucaucacagcucacugcag

SEQ ID NO: 65574 - RNA, 19 nt, Human
uggugugggugaccagagc

SEQ ID NO: 65575 - RNA, 19 nt, Human
uguaaaaugaagaccuuuc

SEQ ID NO: 65576 - RNA, 20 nt, Human
uguaaacaacacaacuaugg

SEQ ID NO: 65577 - RNA, 20 nt, Human
ugugcuaaaaaacagaacaa

SEQ ID NO: 65578 - RNA, 21 nt, Human
ugugugcuguucugugacugu

SEQ ID NO: 65579 - RNA, 26 nt, Human
uuaaacaauauuugcaaaacccacau

SEQ ID NO: 65580 - RNA, 24 nt, Human
uuaccuagguuggagugcaguggu

SEQ ID NO: 65581 - RNA, 23 nt, Human
uucaagaugcccugaaggcacac

SEQ ID NO: 65582 - RNA, 25 nt, Human
uuccguaaucacaaaaauguuuccu

SEQ ID NO: 65583 - RNA, 19 nt, Human
uucguuauccagaguaccu

SEQ ID NO: 65584 - RNA, 23 nt, Human
uuggguucacauuuaauaagccu

SEQ ID NO: 65585 - RNA, 22 nt, Human
uuggucuuauagacaacauagg

SEQ ID NO: 65586 - RNA, 24 nt, Human
uuuccuauagaugcaguuugcaca

SEQ ID NO: 65587 - RNA, 23 nt, Human
uuugcaaaacccacauuuauagg

SEQ ID NO: 65588 - RNA, 23 nt, Human
aaaacuccacccaucaguaucag

SEQ ID NO: 65589 - RNA, 24 nt, Human
aaaacugaaagugcuucacaucua

SEQ ID NO: 65590 - RNA, 23 nt, Human
aaacagacacaguuauauacaac

SEQ ID NO: 65591 - RNA, 24 nt, Human
aaacagcaacacaacacucuccca

SEQ ID NO: 65592 - RNA, 23 nt, Human
aaacgcagcaaacucaucugaga

SEQ ID NO: 65593 - RNA, 27 nt, Human
aacacaacacucucccaaggugccccc

SEQ ID NO: 65594 - RNA, 18 nt, Human
aacaguguagcaucaaca

SEQ ID NO: 65595 - RNA, 19 nt, Human
aaccaggcauccaccaggc

SEQ ID NO: 65596 - RNA, 18 nt, Human
aaccuuuucacaggaaag

SEQ ID NO: 65597 - RNA, 21 nt, Human
aagcagaacgaaaaccugcuc

SEQ ID NO: 65598 - RNA, 18 nt, Human
aaggucccagacgcccag

SEQ ID NO: 65599 - RNA, 20 nt, Human
aaggugcccagcucaaaggc

SEQ ID NO: 65600 - RNA, 24 nt, Human
acacaacacucucccaaggugccc

SEQ ID NO: 65601 - RNA, 23 nt, Human
acagcaacacaacacucucccaa

SEQ ID NO: 65602 - RNA, 22 nt, Human
accaccacagguaugcauucaa

SEQ ID NO: 65603 - RNA, 23 nt, Human
accccgacuugggucaggggugc

SEQ ID NO: 65604 - RNA, 20 nt, Human
acccgcaggucugggacugu

SEQ ID NO: 65605 - RNA, 22 nt, Human
acgcugagcccaggcagacaac

SEQ ID NO: 65606 - RNA, 24 nt, Human
acuccgauacuggcccuggaacag

SEQ ID NO: 65607 - RNA, 18 nt, Human
agaaccguaaacagcaac

SEQ ID NO: 65608 - RNA, 23 nt, Human
agacagaaaaucagagagucaaa

SEQ ID NO: 65609 - RNA, 24 nt, Human
agacgagggccgggcacacacgga

SEQ ID NO: 65610 - RNA, 22 nt, Human
agagagcaagguggcgccccac

SEQ ID NO: 65611 - RNA, 20 nt, Human
agagcaaaggaguaacccuc

SEQ ID NO: 65612 - RNA, 23 nt, Human
agccgcagggaagccccgcagcc

SEQ ID NO: 65613 - RNA, 22 nt, Human
aggaagaaccguaaacagcaac

SEQ ID NO: 65614 - RNA, 20 nt, Human
aggaagccaaaggggcuugc

SEQ ID NO: 65615 - RNA, 22 nt, Human
aggaguuucuccacacuuguca

SEQ ID NO: 65616 - RNA, 18 nt, Human
aggcagacaacgugacca

SEQ ID NO: 65617 - RNA, 21 nt, Human
agggagucaaaagacuuuaug

SEQ ID NO: 65618 - RNA, 20 nt, Human
aucacaguacucagacagcg

SEQ ID NO: 65619 - RNA, 20 nt, Human
augggccuuccuugagguca

SEQ ID NO: 65620 - RNA, 19 nt, Human
auggggcagguccacgcug

SEQ ID NO: 65621 - RNA, 22 nt, Human
caaaacgcagcaaacucaucug

SEQ ID NO: 65622 - RNA, 18 nt, Human
caacagaaagaacugagg

SEQ ID NO: 65623 - RNA, 21 nt, Human
caacagaaagaacugaggacg

SEQ ID NO: 65624 - RNA, 21 nt, Human
caacagcaaacuccaauaaac

SEQ ID NO: 65625 - RNA, 19 nt, Human
caagcacagacgccacuga

SEQ ID NO: 65626 - RNA, 21 nt, Human
caaggccgagcgacgcccacg

SEQ ID NO: 65627 - RNA, 21 nt, Human
cacaaccagggcaggcauuca

SEQ ID NO: 65628 - RNA, 22 nt, Human
cacacaaccagggcaggcauuc

SEQ ID NO: 65629 - RNA, 24 nt, Human
cacccaucaguaucagccugcagc

SEQ ID NO: 65630 - RNA, 19 nt, Human
caccguccaggggaagggc

SEQ ID NO: 65631 - RNA, 21 nt, Human
cacggcccgcgcucccaacac

SEQ ID NO: 65632 - RNA, 24 nt, Human
cacgggccgggcuuccugcccagg

SEQ ID NO: 65633 - RNA, 23 nt, Human
cagaaacccgcaggucugggacu

SEQ ID NO: 65634 - RNA, 18 nt, Human
cagaaccaccacagguau

SEQ ID NO: 65635 - RNA, 19 nt, Human
cagaaccgucuguguccuc

SEQ ID NO: 65636 - RNA, 22 nt, Human
cagcaacacaacacucucccaa

SEQ ID NO: 65637 - RNA, 20 nt, Human
cagcauggccuccaucuguu

SEQ ID NO: 65638 - RNA, 20 nt, Human
cagcugcagugacuuauaau

SEQ ID NO: 65639 - RNA, 19 nt, Human
cagcuuuucuauauacaga

SEQ ID NO: 65640 - RNA, 21 nt, Human
caggcgcccugggugucccag

SEQ ID NO: 65641 - RNA, 19 nt, Human
caguacacaaaggauucag

SEQ ID NO: 65642 - RNA, 23 nt, Human
cagugacuuauaauaaauaauac

SEQ ID NO: 65643 - RNA, 18 nt, Human
cauccaccaggcuucugc

SEQ ID NO: 65644 - RNA, 22 nt, Human
ccaaaagcaaagucccuguggu

SEQ ID NO: 65645 - RNA, 23 nt, Human
ccacacuugucaacaggcgcccu

SEQ ID NO: 65646 - RNA, 18 nt, Human
ccacagaaagaaaaggca

SEQ ID NO: 65647 - RNA, 19 nt, Human
ccaccaggcuucugcuucc

SEQ ID NO: 65648 - RNA, 21 nt, Human
cccaaaacgcagcaaacucau

SEQ ID NO: 65649 - RNA, 19 nt, Human
cccagagaagugaagaaau

SEQ ID NO: 65650 - RNA, 24 nt, Human
ccucccaaaacgcagcaaacucau

SEQ ID NO: 65651 - RNA, 19 nt, Human
ccugagugcaccccgacuu

SEQ ID NO: 65652 - RNA, 18 nt, Human
ccugcuacaacagcaaac

SEQ ID NO: 65653 - RNA, 22 nt, Human
ccugcuacaacagcaaacucuu

SEQ ID NO: 65654 - RNA, 24 nt, Human
cgcccagcgcauguggacaagcac

SEQ ID NO: 65655 - RNA, 22 nt, Human
cggaacgaaccaggcauccacc

SEQ ID NO: 65656 - RNA, 20 nt, Human
cucgggcaaaucguggcccc

SEQ ID NO: 65657 - RNA, 18 nt, Human
cugaagcagaacgaaaac

SEQ ID NO: 65658 - RNA, 19 nt, Human
cugaugacaaaacuccacc

SEQ ID NO: 65659 - RNA, 20 nt, Human
cugaugacaaaacuccaccc

SEQ ID NO: 65660 - RNA, 22 nt, Human
cugcuacaacagcaaacuccaa

SEQ ID NO: 65661 - RNA, 20 nt, Human
cuggaaaaacaagacuuuua

SEQ ID NO: 65662 - RNA, 20 nt, Human
cuggucuucaacagaaagaa

SEQ ID NO: 65663 - RNA, 24 nt, Human
cuggugcugcggaacgaaccaggc

SEQ ID NO: 65664 - RNA, 20 nt, Human
cuugcugggcaccagagacu

SEQ ID NO: 65665 - RNA, 18 nt, Human
gacaagcacagacgccac

SEQ ID NO: 65666 - RNA, 21 nt, Human
gacgcccacggcccgcgcucc

SEQ ID NO: 65667 - RNA, 18 nt, Human
gagcgacgcccacggccc

SEQ ID NO: 65668 - RNA, 22 nt, Human
gaggacaguuaaugucgccucc

SEQ ID NO: 65669 - RNA, 27 nt, Human
gagugcaccccgacuugggucaggggu

SEQ ID NO: 65670 - RNA, 22 nt, Human
gauacuggauccacagaaagaa

SEQ ID NO: 65671 - RNA, 19 nt, Human
gcaaagacugugauccaag

SEQ ID NO: 65672 - RNA, 21 nt, Human
gcaaugaguuguucugagacc

SEQ ID NO: 65673 - RNA, 26 nt, Human
gcacugaagccugcuggcuacggcca

SEQ ID NO: 65674 - RNA, 18 nt, Human
gccuggagcgagcccgcu

SEQ ID NO: 65675 - RNA, 18 nt, Human
gccugggcccagcgagcc

SEQ ID NO: 65676 - RNA, 22 nt, Human
gcugaagcagaacgaaaaccug

SEQ ID NO: 65677 - RNA, 21 nt, Human
ggaagauacuggauccacaga

SEQ ID NO: 65678 - RNA, 22 nt, Human
ggacaaggccgagcgacgccca

SEQ ID NO: 65679 - RNA, 25 nt, Human
ggagucaaaagacuuuaugcggugg

SEQ ID NO: 65680 - RNA, 23 nt, Human
ggaguuucuccacacuugucaac

SEQ ID NO: 65681 - RNA, 20 nt, Human
ggccugaugacaaaacucca

SEQ ID NO: 65682 - RNA, 22 nt, Human
ggccugaugacaaaacuccacc

SEQ ID NO: 65683 - RNA, 22 nt, Human
ggcgacgcuggcgagcggcccc

SEQ ID NO: 65684 - RNA, 20 nt, Human
gggaagggcuguuaaaaacc

SEQ ID NO: 65685 - RNA, 20 nt, Human
gggccgggcuuccugcccag

SEQ ID NO: 65686 - RNA, 18 nt, Human
ggugcugccacagcacgg

SEQ ID NO: 65687 - RNA, 23 nt, Human
gugccguaugggccuuccuugag

SEQ ID NO: 65688 - RNA, 21 nt, Human
guggacaagcacagacgccac

SEQ ID NO: 65689 - RNA, 18 nt, Human
gugugaaggaacgagcuu

SEQ ID NO: 65690 - RNA, 18 nt, Human
uaaaaccugcuacaacag

SEQ ID NO: 65691 - RNA, 21 nt, Human
uaaagggcaauuuggccaaua

SEQ ID NO: 65692 - RNA, 23 nt, Human
uaaggaguccacacaaccagggc

SEQ ID NO: 65693 - RNA, 22 nt, Human
uaccaaaaaagaaaguguugau

SEQ ID NO: 65694 - RNA, 20 nt, Human
uaccgacauggggggugcug

SEQ ID NO: 65695 - RNA, 23 nt, Human
uauacaacagggcagguuuuuaa

SEQ ID NO: 65696 - RNA, 24 nt, Human
uaucaaguucccacccccuuggga

SEQ ID NO: 65697 - RNA, 22 nt, Human
uaugcggugagacgagggccgg

SEQ ID NO: 65698 - RNA, 23 nt, Human
uauuuacaagaaacauguauaua

SEQ ID NO: 65699 - RNA, 20 nt, Human
ucaaaagacuuuaugcggug

SEQ ID NO: 65700 - RNA, 20 nt, Human
ucacuaaggaacugaggacc

SEQ ID NO: 65701 - RNA, 20 nt, Human
ucagacagcggacaagagca

SEQ ID NO: 65702 - RNA, 28 nt, Human
ucagccagcaaguugcccucagaaaccc

SEQ ID NO: 65703 - RNA, 19 nt, Human
ucaggcacucgcucucgcu

SEQ ID NO: 65704 - RNA, 19 nt, Human
ucaggugcaguuaaagggc

SEQ ID NO: 65705 - RNA, 21 nt, Human
ucaucagcugcagugacuuau

SEQ ID NO: 65706 - RNA, 21 nt, Human
uccacacaaccagggcaggca

SEQ ID NO: 65707 - RNA, 20 nt, Human
uccacagaaagaaaaggcaa

SEQ ID NO: 65708 - RNA, 21 nt, Human
uccacgcugagcccaggcaga

SEQ ID NO: 65709 - RNA, 18 nt, Human
ucccaaggugcccagcuc

SEQ ID NO: 65710 - RNA, 20 nt, Human
ucuagugaaaaguccaggug

SEQ ID NO: 65711 - RNA, 22 nt, Human
ucucagacgcauuuuuccugcu

SEQ ID NO: 65712 - RNA, 19 nt, Human
ucuccagccgcagggaagc

SEQ ID NO: 65713 - RNA, 22 nt, Human
ucugcacuggaacacagugggg

SEQ ID NO: 65714 - RNA, 24 nt, Human
ucugcagcauggggcagguccacc

SEQ ID NO: 65715 - RNA, 24 nt, Human
ugaaagugcuucacaucuacagga

SEQ ID NO: 65716 - RNA, 20 nt, Human
ugaagaaaugauuggcauua

SEQ ID NO: 65717 - RNA, 22 nt, Human
ugaagcagaacgaaaaccugcu

SEQ ID NO: 65718 - RNA, 19 nt, Human
ugagcccaggcagacaacg

SEQ ID NO: 65719 - RNA, 20 nt, Human
ugagcccaggcagacaacgu

SEQ ID NO: 65720 - RNA, 26 nt, Human
ugagcccaggcagacaacgugaccag

SEQ ID NO: 65721 - RNA, 21 nt, Human
ugcaauuuggguuuuuaaaga

SEQ ID NO: 65722 - RNA, 18 nt, Human
ugcaggagauccguccug

SEQ ID NO: 65723 - RNA, 22 nt, Human
ugcccaggaccgcacaggcuuu

SEQ ID NO: 65724 - RNA, 22 nt, Human
ugcccugugguccugagugcac

SEQ ID NO: 65725 - RNA, 23 nt, Human
ugcugaagcagaacgaaaaccug

SEQ ID NO: 65726 - RNA, 19 nt, Human
ugcuuuauucuugcugaag

SEQ ID NO: 65727 - RNA, 19 nt, Human
uggaaaaacaagacuuuua

SEQ ID NO: 65728 - RNA, 20 nt, Human
uggacaagcacagacgccac

SEQ ID NO: 65729 - RNA, 20 nt, Human
uggacaagcacagacgccac

SEQ ID NO: 65730 - RNA, 23 nt, Human
uggacaagcacagacgccacuga

SEQ ID NO: 65731 - RNA, 19 nt, Human
uggagcgagcccgcugccc

SEQ ID NO: 65732 - RNA, 22 nt, Human
uggauccacagaaagaaaaggc

SEQ ID NO: 65733 - RNA, 19 nt, Human
uggcgccccacccagcccu

SEQ ID NO: 65734 - RNA, 23 nt, Human
uggcgccccacccagcccugccc

SEQ ID NO: 65735 - RNA, 18 nt, Human
uggggcagguccacgcug

SEQ ID NO: 65736 - RNA, 18 nt, Human
ugguccugagugcacccc

SEQ ID NO: 65737 - RNA, 20 nt, Human
uucaaaaugggauauuuacc

SEQ ID NO: 65738 - RNA, 27 nt, Human
uucaucagcugcagugacuuauaauaa

SEQ ID NO: 65739 - RNA, 19 nt, Human
uuccugcccaggaccgcac

SEQ ID NO: 65740 - RNA, 24 nt, Human
uucgcagaauaagcuccagcuuuu

SEQ ID NO: 65741 - RNA, 24 nt, Human
uucgcagaauaagcuccagcuuuu

SEQ ID NO: 65742 - RNA, 19 nt, Human
uuucacaggaaaggaaacc

SEQ ID NO: 65743 - RNA, 23 nt, Human
aaccuccaaagccuagucuucaa

SEQ ID NO: 65744 - RNA, 23 nt, Human
acaguaaaaugacugacuccgga

SEQ ID NO: 65745 - RNA, 22 nt, Human
acuccaagaaguggcaaaggcc

SEQ ID NO: 65746 - RNA, 22 nt, Human
aggaggcgaaaacaaaagggac

SEQ ID NO: 65747 - RNA, 19 nt, Human
aggcgaaaacaaaagcggc

SEQ ID NO: 65748 - RNA, 22 nt, Human
aggcgaaaacaaaagcggccca

SEQ ID NO: 65749 - RNA, 22 nt, Human
agguaggucuguguccucagga

SEQ ID NO: 65750 - RNA, 19 nt, Human
auaggaucaaccucucccu

SEQ ID NO: 65751 - RNA, 22 nt, Human
cacaguuccccaagggauuuuc

SEQ ID NO: 65752 - RNA, 24 nt, Human
cagaaucccagggaaaagagcccu

SEQ ID NO: 65753 - RNA, 22 nt, Human
ccucuccccauuagucuuuggg

SEQ ID NO: 65754 - RNA, 21 nt, Human
cgaaaacaaaagcggcccaag

SEQ ID NO: 65755 - RNA, 22 nt, Human
cgaaaacaaaagcggcccaagc

SEQ ID NO: 65756 - RNA, 20 nt, Human
cggcccaagccuuuucacug

SEQ ID NO: 65757 - RNA, 24 nt, Human
cggcccucccucuccccauuaguc

SEQ ID NO: 65758 - RNA, 18 nt, Human
cuaacuggccugggcaag

SEQ ID NO: 65759 - RNA, 23 nt, Human
cuccaaagccuagucuucaacug

SEQ ID NO: 65760 - RNA, 23 nt, Human
cuucccggcccucccucucccca

SEQ ID NO: 65761 - RNA, 23 nt, Human
cuuugaaaaccuccaaagccuag

SEQ ID NO: 65762 - RNA, 20 nt, Human
gaguucacuuguagagugua

SEQ ID NO: 65763 - RNA, 26 nt, Human
gauuugcagaauguuacuucucccuu

SEQ ID NO: 65764 - RNA, 23 nt, Human
gcugcuugggguguacccagaga

SEQ ID NO: 65765 - RNA, 18 nt, Human
ggccugggcaaggaguuc

SEQ ID NO: 65766 - RNA, 23 nt, Human
gugaaggagaaguuuccaaacag

SEQ ID NO: 65767 - RNA, 18 nt, Human
uacccagagaaaacacca

SEQ ID NO: 65768 - RNA, 19 nt, Human
uagaguguaguuagugaaa

SEQ ID NO: 65769 - RNA, 22 nt, Human
ucaacaaaaggaggcgaaaaca

SEQ ID NO: 65770 - RNA, 25 nt, Human
uccagaaucccagggaaaagagccc

SEQ ID NO: 65771 - RNA, 20 nt, Human
ucccugcccauccaagcacc

SEQ ID NO: 65772 - RNA, 23 nt, Human
ugaaggagaaguuuccaaacagc

SEQ ID NO: 65773 - RNA, 21 nt, Human
ugaaguccagaaucccaggga

SEQ ID NO: 65774 - RNA, 21 nt, Human
ugcauacauaaguguugugug

SEQ ID NO: 65775 - RNA, 23 nt, Human
ugcuugggguguacccagagaaa

SEQ ID NO: 65776 - RNA, 18 nt, Human
uggcaaaggccccgagag

SEQ ID NO: 65777 - RNA, 24 nt, Human
uggcuucccggcccucccucuccc

SEQ ID NO: 65778 - RNA, 23 nt, Human
uggugugugaaggagaaguuucc

SEQ ID NO: 65779 - RNA, 18 nt, Human
ugugaaggagaaguuucc

SEQ ID NO: 65780 - RNA, 22 nt, Human
uucacacuggaagaacugaaaa

SEQ ID NO: 65781 - RNA, 18 nt, Human
uucacuuuuuuaaucaaa

SEQ ID NO: 65782 - RNA, 24 nt, Human
uucuccacggcuucaguuucugau

SEQ ID NO: 65783 - RNA, 18 nt, Human
uuggaaacuguugcagaa

SEQ ID NO: 65784 - RNA, 24 nt, Human
uuuccaaacagcucucugucggcu

SEQ ID NO: 65785 - RNA, 22 nt, Human
uuucugauggaucuagccaugu

SEQ ID NO: 65786 - RNA, 21 nt, Human
uuuuuuuuuuuuauggagacu

SEQ ID NO: 65787 - RNA, 19 nt, Human
aaacaacagcacaaaauca

SEQ ID NO: 65788 - RNA, 24 nt, Human
aaacaacagcacaaaaucaaccau

SEQ ID NO: 65789 - RNA, 20 nt, Human
aacauagugaaaugaguccu

SEQ ID NO: 65790 - RNA, 24 nt, Human
aacugcuaugcagaauacucaaac

SEQ ID NO: 65791 - RNA, 24 nt, Human
acgcagcaauuuaucaaaagccga

SEQ ID NO: 65792 - RNA, 20 nt, Human
agcacaaaaucaaccaugua

SEQ ID NO: 65793 - RNA, 18 nt, Human
agcuggcucuuaaggccc

SEQ ID NO: 65794 - RNA, 19 nt, Human
aggaagagcuggcucuuaa

SEQ ID NO: 65795 - RNA, 19 nt, Human
cagcaggagaccccuuucu

SEQ ID NO: 65796 - RNA, 23 nt, Human
caggaaaagcuuuauuaagucaa

SEQ ID NO: 65797 - RNA, 21 nt, Human
caguccaaacaacagcacaaa

SEQ ID NO: 65798 - RNA, 26 nt, Human
caguccaaacaacagcacaaaaucaa

SEQ ID NO: 65799 - RNA, 19 nt, Human
caugagaaacuacuaacau

SEQ ID NO: 65800 - RNA, 21 nt, Human
cccuaaugaucaacauauuca

SEQ ID NO: 65801 - RNA, 25 nt, Human
gacgccuuccaauuuuucuuucuau

SEQ ID NO: 65802 - RNA, 18 nt, Human
ggagagacugccgcggca

SEQ ID NO: 65803 - RNA, 18 nt, Human
ggcagcaggagaccccuu

SEQ ID NO: 65804 - RNA, 22 nt, Human
gguuaccaaaaggacgccuucc

SEQ ID NO: 65805 - RNA, 24 nt, Human
gugcacaaguucucccacacuuag

SEQ ID NO: 65806 - RNA, 19 nt, Human
uacacaauaaucggguuac

SEQ ID NO: 65807 - RNA, 24 nt, Human
uacacaauuaaaagauaugauuaa

SEQ ID NO: 65808 - RNA, 21 nt, Human
uacaggauaggaagagcuggc

SEQ ID NO: 65809 - RNA, 24 nt, Human
uacuaaaggccuuacuuuaaauac

SEQ ID NO: 65810 - RNA, 19 nt, Human
uagaagacaaaugcgcugc

SEQ ID NO: 65811 - RNA, 18 nt, Human
uagugaaaugaguccacg

SEQ ID NO: 65812 - RNA, 19 nt, Human
uauccacuuacaagguaua

SEQ ID NO: 65813 - RNA, 21 nt, Human
ucacgcagcaauuuaucaaaa

SEQ ID NO: 65814 - RNA, 20 nt, Human
ucacuuucacaauuuucucu

SEQ ID NO: 65815 - RNA, 18 nt, Human
ucucugcucccacacccc

SEQ ID NO: 65816 - RNA, 21 nt, Human
ucugcucccacaccccuaaug

SEQ ID NO: 65817 - RNA, 24 nt, Human
ugauguuuuguucuuuucaaaaca

SEQ ID NO: 65818 - RNA, 25 nt, Human
ugcagaauacucaaacauuuuuaaa

SEQ ID NO: 65819 - RNA, 23 nt, Human
ugccgcggcaaccaacuggacac

SEQ ID NO: 65820 - RNA, 23 nt, Human
uggcagcaggagaccccuuucuc

SEQ ID NO: 65821 - RNA, 23 nt, Human
uguuuuguucuuuucaaaacauu

SEQ ID NO: 65822 - RNA, 19 nt, Human
uuacauucauuacuaaagg

SEQ ID NO: 65823 - RNA, 26 nt, Human
uuagcuggcagcaggagaccccuuuc

SEQ ID NO: 65824 - RNA, 22 nt, Human
aaaacaguccccaacgccaccu

SEQ ID NO: 65825 - RNA, 19 nt, Human
agaaaacaguccccaacgc

SEQ ID NO: 65826 - RNA, 21 nt, Human
aggagggagggagggagcgag

SEQ ID NO: 65827 - RNA, 22 nt, Human
aggcggggagagggcggggacg

SEQ ID NO: 65828 - RNA, 19 nt, Human
agggcggggacgccgaggc

SEQ ID NO: 65829 - RNA, 21 nt, Human
caaaacaauucugguacuaca

SEQ ID NO: 65830 - RNA, 19 nt, Human
cccaacgccaccuccacgg

SEQ ID NO: 65831 - RNA, 22 nt, Human
cccaacgccaccuccacggccg

SEQ ID NO: 65832 - RNA, 22 nt, Human
cccgcgagccgcggcuccuccc

SEQ ID NO: 65833 - RNA, 24 nt, Human
ccggccuccgagagaaaacagucc

SEQ ID NO: 65834 - RNA, 22 nt, Human
ccuccgagagaaaacagucccc

SEQ ID NO: 65835 - RNA, 29 nt, Human
ccuggcuccggccccgcgagccgguuccg

SEQ ID NO: 65836 - RNA, 23 nt, Human
cgccgaggccccggcucucgcuc

SEQ ID NO: 65837 - RNA, 20 nt, Human
cggcuccgcuccggccuccg

SEQ ID NO: 65838 - RNA, 23 nt, Human
cggcuccuccccaggagcggcgg

SEQ ID NO: 65839 - RNA, 19 nt, Human
cggggagggcgcggaggag

SEQ ID NO: 65840 - RNA, 22 nt, Human
cuccacggccgcugcuaucgcu

SEQ ID NO: 65841 - RNA, 19 nt, Human
cuccgcuccggccuccgag

SEQ ID NO: 65842 - RNA, 18 nt, Human
gagccgcggcuccucccc

SEQ ID NO: 65843 - RNA, 22 nt, Human
gcuccggcuccggcugaugucc

SEQ ID NO: 65844 - RNA, 19 nt, Human
gcugguggcggcggggagg

SEQ ID NO: 65845 - RNA, 24 nt, Human
ggagcgagggggccgcuugcugcc

SEQ ID NO: 65846 - RNA, 20 nt, Human
ggaggagggagggagggagc

SEQ ID NO: 65847 - RNA, 21 nt, Human
ggaggagggagggagggagcg

SEQ ID NO: 65848 - RNA, 22 nt, Human
ggccuccgagagaaaacagucc

SEQ ID NO: 65849 - RNA, 18 nt, Human
ggcgcggaggagggaggg

SEQ ID NO: 65850 - RNA, 21 nt, Human
ggcggcggggagggcgcggag

SEQ ID NO: 65851 - RNA, 18 nt, Human
guggcggcggggagggcg

SEQ ID NO: 65852 - RNA, 23 nt, Human
uccccaacgccaccuccacggcc

SEQ ID NO: 65853 - RNA, 20 nt, Human
uccggacgcaggccuggcuc

SEQ ID NO: 65854 - RNA, 22 nt, Human
uggcggcggggagggcgcggag

SEQ ID NO: 65855 - RNA, 22 nt, Human
uguguuuguuuuguuuuaauug

SEQ ID NO: 65856 - RNA, 18 nt, Human
uuguguuuguuuuguuuu

SEQ ID NO: 65857 - RNA, 19 nt, Human
cagcccgggugcaacgcaa

SEQ ID NO: 65858 - RNA, 23 nt, Human
cccggggggcgggggcgggggcc

SEQ ID NO: 65859 - RNA, 19 nt, Human
cgaggacccgaggccagcu

SEQ ID NO: 65860 - RNA, 21 nt, Human
cgcccgagaguccgcccgccc

SEQ ID NO: 65861 - RNA, 21 nt, Human
cggcccggggggcgggggcgg

SEQ ID NO: 65862 - RNA, 20 nt, Human
gcccggggggcgggggcggg

SEQ ID NO: 65863 - RNA, 18 nt, Human
gccgggccaggccggguc

SEQ ID NO: 65864 - RNA, 20 nt, Human
ggaggucggaagggagguuc

SEQ ID NO: 65865 - RNA, 24 nt, Human
ggcgggggccgggccaggccgggu

SEQ ID NO: 65866 - RNA, 25 nt, Human
gggggccgggccaggccgggucggg

SEQ ID NO: 65867 - RNA, 18 nt, Human
agcagcagcaggcugggg

SEQ ID NO: 65868 - RNA, 21 nt, Human
agguugagggaccuggacugc

SEQ ID NO: 65869 - RNA, 23 nt, Human
cagcaggcugggguggaggaggg

SEQ ID NO: 65870 - RNA, 19 nt, Human
cagcaguagcagcuccucc

SEQ ID NO: 65871 - RNA, 20 nt, Human
cagcaguagcagcuccuccc

SEQ ID NO: 65872 - RNA, 18 nt, Human
cagccucgguagcagcag

SEQ ID NO: 65873 - RNA, 23 nt, Human
cagcuccuccccgcccagcccuc

SEQ ID NO: 65874 - RNA, 20 nt, Human
caguagcagcagcaggcugg

SEQ ID NO: 65875 - RNA, 21 nt, Human
ccaaaggccaggucaggagcc

SEQ ID NO: 65876 - RNA, 23 nt, Human
ccagagagacagccagggcacag

SEQ ID NO: 65877 - RNA, 28 nt, Human
ccccccauggguaguguuuggugaaggu

SEQ ID NO: 65878 - RNA, 21 nt, Human
ccccgcccagcccucucuucu

SEQ ID NO: 65879 - RNA, 22 nt, Human
ccccgcccagcccucucuucuu

SEQ ID NO: 65880 - RNA, 19 nt, Human
ccucccgccaugggagccg

SEQ ID NO: 65881 - RNA, 25 nt, Human
cggcagcaguagcagcagcaggcuu

SEQ ID NO: 65882 - RNA, 19 nt, Human
gagcgguuuauuucacaac

SEQ ID NO: 65883 - RNA, 22 nt, Human
gccaaaggccaggucaggagcc

SEQ ID NO: 65884 - RNA, 23 nt, Human
gccagggcacagccucccgccau

SEQ ID NO: 65885 - RNA, 20 nt, Human
gccggcugacucccaacccc

SEQ ID NO: 65886 - RNA, 30 nt, Human
gccucgguagcagcaguagcagcuccuccc

SEQ ID NO: 65887 - RNA, 19 nt, Human
ggagccagagagacagcca

SEQ ID NO: 65888 - RNA, 20 nt, Human
ggcagcaguagcagcagcag

SEQ ID NO: 65889 - RNA, 19 nt, Human
gggaccuggacugcuaggu

SEQ ID NO: 65890 - RNA, 19 nt, Human
ggguggaggagggggagug

SEQ ID NO: 65891 - RNA, 20 nt, Human
ggguggccacagagcagcag

SEQ ID NO: 65892 - RNA, 19 nt, Human
gguggccacagagcagcag

SEQ ID NO: 65893 - RNA, 22 nt, Human
guagcagcagcaggcuggggug

SEQ ID NO: 65894 - RNA, 23 nt, Human
guagcagcagcaggcuggggugg

SEQ ID NO: 65895 - RNA, 19 nt, Human
guagcagcaguagcagcuc

SEQ ID NO: 65896 - RNA, 22 nt, Human
uagcagcuccuccccgcccagc

SEQ ID NO: 65897 - RNA, 24 nt, Human
uagcagcuccuccccgcccagccc

SEQ ID NO: 65898 - RNA, 20 nt, Human
uggaggagggggaguguuag

SEQ ID NO: 65899 - RNA, 22 nt, Human
uggccacagagcagcagcggca

SEQ ID NO: 65900 - RNA, 21 nt, Human
ugggguggaggagggggagug

SEQ ID NO: 65901 - RNA, 18 nt, Human
ugguaugguagccaaagg

SEQ ID NO: 65902 - RNA, 18 nt, Human
acaggcaaaggacggugu

SEQ ID NO: 65903 - RNA, 24 nt, Human
aggagggcagacaggcaaaggacg

SEQ ID NO: 65904 - RNA, 20 nt, Human
aggugcaaauaaauguccca

SEQ ID NO: 65905 - RNA, 20 nt, Human
caaauaaaugucccaaauug

SEQ ID NO: 65906 - RNA, 26 nt, Human
cacuaacuucagaccaaauucccaca

SEQ ID NO: 65907 - RNA, 22 nt, Human
cuugguuuacaacuucucuugg

SEQ ID NO: 65908 - RNA, 21 nt, Human
gcuauaagacugcucccgauc

SEQ ID NO: 65909 - RNA, 19 nt, Human
ggcagacaggcaaaggacg

SEQ ID NO: 65910 - RNA, 26 nt, Human
ucagaccagagaaaaccuacuccaca

SEQ ID NO: 65911 - RNA, 23 nt, Human
uuccaggugcaaauaaauguccc

SEQ ID NO: 65912 - RNA, 20 nt, Human
uucccacaacuguguucugg

SEQ ID NO: 65913 - RNA, 22 nt, Human
agacaguuguggccgcugauug

SEQ ID NO: 65914 - RNA, 27 nt, Human
agacgcggcuccacgugcccucccuca

SEQ ID NO: 65915 - RNA, 21 nt, Human
cagaaggcacuacagcaggac

SEQ ID NO: 65916 - RNA, 22 nt, Human
caggcuucacaucugauacagu

SEQ ID NO: 65917 - RNA, 22 nt, Human
ccgcugauugaaccgggccugg

SEQ ID NO: 65918 - RNA, 21 nt, Human
ccucaggugcaacagagauug

SEQ ID NO: 65919 - RNA, 20 nt, Human
ccucccucauuggcuggugg

SEQ ID NO: 65920 - RNA, 25 nt, Human
cuagacaguuguggccgcugauuga

SEQ ID NO: 65921 - RNA, 23 nt, Human
ucaucaggaaagcuccaggcuuc

SEQ ID NO: 65922 - RNA, 22 nt, Human
ucccagacacacuuugaagucc

SEQ ID NO: 65923 - RNA, 20 nt, Human
ucccucauuggcugguggug

SEQ ID NO: 65924 - RNA, 25 nt, Human
uuguggccgcugauugaaccgggcc

SEQ ID NO: 65925 - RNA, 20 nt, Human
uuucuuuaauaaaaaaaucc

SEQ ID NO: 65926 - RNA, 25 nt, Human
uuugaaguccuagaguacaccagca

SEQ ID NO: 65927 - RNA, 24 nt, Human
uuuuugacagcuagaaauuuuuuu

SEQ ID NO: 65928 - RNA, 24 nt, Human
agcaggggaacagccagaagggaa

SEQ ID NO: 65929 - RNA, 19 nt, Human
agggaagggaagggagagg

SEQ ID NO: 65930 - RNA, 18 nt, Human
caccccuuauccucaccc

SEQ ID NO: 65931 - RNA, 21 nt, Human
caccccuuauccucaccccaa

SEQ ID NO: 65932 - RNA, 26 nt, Human
cagaugccaccgccgccgcgccaccc

SEQ ID NO: 65933 - RNA, 23 nt, Human
cagugauuuuuucucccccaccc

SEQ ID NO: 65934 - RNA, 19 nt, Human
ccagugggaggagccgcca

SEQ ID NO: 65935 - RNA, 19 nt, Human
cccccccccagugggagga

SEQ ID NO: 65936 - RNA, 20 nt, Human
cgccgccgcgccaccccccc

SEQ ID NO: 65937 - RNA, 21 nt, Human
cgccgcgccacccccccccca

SEQ ID NO: 65938 - RNA, 18 nt, Human
gaagggaaaggggguaca

SEQ ID NO: 65939 - RNA, 23 nt, Human
gagcaggggaacagccagaaggg

SEQ ID NO: 65940 - RNA, 23 nt, Human
gccgccgcgccacccccccccca

SEQ ID NO: 65941 - RNA, 20 nt, Human
gugauuuuuucucccccacc

SEQ ID NO: 65942 - RNA, 19 nt, Human
ucucccccaccccuuaucc

SEQ ID NO: 65943 - RNA, 18 nt, Human
ugccaccgccgccgcgcc

SEQ ID NO: 65944 - RNA, 21 nt, Human
ugucaggggugagggaaggga

SEQ ID NO: 65945 - RNA, 18 nt, Human
uuaggaggcaacagagca

SEQ ID NO: 65946 - RNA, 21 nt, Human
aaaaagcucuagaaacugcaa

SEQ ID NO: 65947 - RNA, 24 nt, Human
aaacaaacauaagaccccccaaac

SEQ ID NO: 65948 - RNA, 18 nt, Human
aaacaaagucacaagugc

SEQ ID NO: 65949 - RNA, 21 nt, Human
aaacauaagaccccccaaacc

SEQ ID NO: 65950 - RNA, 18 nt, Human
aaacuguccacugacacc

SEQ ID NO: 65951 - RNA, 22 nt, Human
aaagugcugccgggagugggga

SEQ ID NO: 65952 - RNA, 20 nt, Human
aaaugauuuauccacagcaa

SEQ ID NO: 65953 - RNA, 22 nt, Human
aacaaacauaagaccccccaaa

SEQ ID NO: 65954 - RNA, 19 nt, Human
aacucuccuccaagaaaca

SEQ ID NO: 65955 - RNA, 19 nt, Human
aacuggaacccaugucuuc

SEQ ID NO: 65956 - RNA, 18 nt, Human
aagaagaaagagaaaugg

SEQ ID NO: 65957 - RNA, 18 nt, Human
aagaagaaagagaaaugg

SEQ ID NO: 65958 - RNA, 22 nt, Human
aagaggccgaaggaguccucac

SEQ ID NO: 65959 - RNA, 25 nt, Human
aagcagaccacaggggccaugagca

SEQ ID NO: 65960 - RNA, 18 nt, Human
aaggacucugggagggac

SEQ ID NO: 65961 - RNA, 26 nt, Human
aaggagcugcuuccucuaagaggagg

SEQ ID NO: 65962 - RNA, 21 nt, Human
aagugagucacagagucaaac

SEQ ID NO: 65963 - RNA, 23 nt, Human
aaugccuccccaucaggucuagc

SEQ ID NO: 65964 - RNA, 24 nt, Human
aauugucuaucaagagauuauuca

SEQ ID NO: 65965 - RNA, 21 nt, Human
acaaaaagcucuagaaacugc

SEQ ID NO: 65966 - RNA, 18 nt, Human
acaaaagccagggacacc

SEQ ID NO: 65967 - RNA, 22 nt, Human
acacuagcuuuggccacaaaag

SEQ ID NO: 65968 - RNA, 18 nt, Human
acagacaaaaagcucuag

SEQ ID NO: 65969 - RNA, 21 nt, Human
acagacacaaggcacaacaca

SEQ ID NO: 65970 - RNA, 22 nt, Human
accccccaaacuuccaaacuca

SEQ ID NO: 65971 - RNA, 18 nt, Human
acccuggaccccuguuga

SEQ ID NO: 65972 - RNA, 20 nt, Human
accucuucaguggggagcug

SEQ ID NO: 65973 - RNA, 24 nt, Human
acucugcuugcccauuuucccagc

SEQ ID NO: 65974 - RNA, 20 nt, Human
acugagcaauguuugacuuu

SEQ ID NO: 65975 - RNA, 18 nt, Human
acuggcaugggaggcucu

SEQ ID NO: 65976 - RNA, 22 nt, Human
agaagaaagagaaaugguuaag

SEQ ID NO: 65977 - RNA, 23 nt, Human
agacagaccagcggagcugaggg

SEQ ID NO: 65978 - RNA, 21 nt, Human
agagccauccuuggccauccu

SEQ ID NO: 65979 - RNA, 19 nt, Human
agaguguucuagagccauc

SEQ ID NO: 65980 - RNA, 18 nt, Human
agauccaauugggaggag

SEQ ID NO: 65981 - RNA, 24 nt, Human
agccagggaucaugggcucagagg

SEQ ID NO: 65982 - RNA, 20 nt, Human
agcggagcugaggggcaggu

SEQ ID NO: 65983 - RNA, 24 nt, Human
agcugaggggcaggugccucugug

SEQ ID NO: 65984 - RNA, 23 nt, Human
aggagacagcgacuuaggccaag

SEQ ID NO: 65985 - RNA, 27 nt, Human
aggcaaaacaaacauaagaccccccaa

SEQ ID NO: 65986 - RNA, 18 nt, Human
aggcagagguggccccaa

SEQ ID NO: 65987 - RNA, 20 nt, Human
aggcucuuuugcaaaccagg

SEQ ID NO: 65988 - RNA, 18 nt, Human
agucagugggcugauggg

SEQ ID NO: 65989 - RNA, 21 nt, Human
auaaacucuccucaaauccaa

SEQ ID NO: 65990 - RNA, 22 nt, Human
auaaacucuccucaaauccaag

SEQ ID NO: 65991 - RNA, 23 nt, Human
augaagcaagccguccugcuccc

SEQ ID NO: 65992 - RNA, 23 nt, Human
auuaggacagcaaguccauguca

SEQ ID NO: 65993 - RNA, 20 nt, Human
caaaacaaacauaagacccc

SEQ ID NO: 65994 - RNA, 19 nt, Human
caaaaggaagaaaacacaa

SEQ ID NO: 65995 - RNA, 18 nt, Human
caaacuccuuccugcaug

SEQ ID NO: 65996 - RNA, 20 nt, Human
caaagucacaagugccucuc

SEQ ID NO: 65997 - RNA, 19 nt, Human
caaaugauuuauccacagc

SEQ ID NO: 65998 - RNA, 22 nt, Human
caacacauccauuaggacagca

SEQ ID NO: 65999 - RNA, 24 nt, Human
caagaaacagaagaggcaaaacaa

SEQ ID NO: 66000 - RNA, 20 nt, Human
caagcagaccacaggggcca

SEQ ID NO: 66001 - RNA, 19 nt, Human
caagccagggaucaugggc

SEQ ID NO: 66002 - RNA, 24 nt, Human
caagugccucuccccuuucuaauc

SEQ ID NO: 66003 - RNA, 21 nt, Human
cacaaccaaacuuaaggaccc

SEQ ID NO: 66004 - RNA, 20 nt, Human
cacagcaaacacucucucca

SEQ ID NO: 66005 - RNA, 23 nt, Human
cacagcacaguucacauccauaa

SEQ ID NO: 66006 - RNA, 18 nt, Human
caccaguggggcaaggau

SEQ ID NO: 66007 - RNA, 20 nt, Human
caccuaagaaaagccucaac

SEQ ID NO: 66008 - RNA, 21 nt, Human
caccuaagaaaagccucaacu

SEQ ID NO: 66009 - RNA, 24 nt, Human
caccugccauuuccccagaagcaa

SEQ ID NO: 66010 - RNA, 22 nt, Human
cacuguacagcaggagccucac

SEQ ID NO: 66011 - RNA, 22 nt, Human
cacuuucaaggucagugcccca

SEQ ID NO: 66012 - RNA, 19 nt, Human
cagaauccccccacucucu

SEQ ID NO: 66013 - RNA, 18 nt, Human
cagacaaaaagcucuaga

SEQ ID NO: 66014 - RNA, 22 nt, Human
cagacccugggccgagcauccu

SEQ ID NO: 66015 - RNA, 18 nt, Human
cagagaaauucaaggccg

SEQ ID NO: 66016 - RNA, 19 nt, Human
cagaggucccugaaaacag

SEQ ID NO: 66017 - RNA, 19 nt, Human
caggcacaagguccuccuc

SEQ ID NO: 66018 - RNA, 20 nt, Human
caggcucugggcaggcacaa

SEQ ID NO: 66019 - RNA, 20 nt, Human
cagggccccuggucaguggc

SEQ ID NO: 66020 - RNA, 19 nt, Human
caggugccucugugucucu

SEQ ID NO: 66021 - RNA, 18 nt, Human
caguccugggcuucuccc

SEQ ID NO: 66022 - RNA, 23 nt, Human
caguggccgagcagccgcggcug

SEQ ID NO: 66023 - RNA, 21 nt, Human
cauaacacuagcuuuggccac

SEQ ID NO: 66024 - RNA, 27 nt, Human
cauaagaccccccaaacuuccaaacuc

SEQ ID NO: 66025 - RNA, 19 nt, Human
cauaagcaaaaacugcagu

SEQ ID NO: 66026 - RNA, 21 nt, Human
cauauacacaaccgacuuaau

SEQ ID NO: 66027 - RNA, 26 nt, Human
caucgacaucacaguauggguggcac

SEQ ID NO: 66028 - RNA, 26 nt, Human
caugacagacacaaggcacaacacau

SEQ ID NO: 66029 - RNA, 23 nt, Human
caugagcauuccggccuccaagg

SEQ ID NO: 66030 - RNA, 19 nt, Human
caugcacagcuggcgacca

SEQ ID NO: 66031 - RNA, 21 nt, Human
caugcaucuacaguggagacc

SEQ ID NO: 66032 - RNA, 19 nt, Human
caugugcccugcagcagcc

SEQ ID NO: 66033 - RNA, 22 nt, Human
ccacaaaagccagggacaccuc

SEQ ID NO: 66034 - RNA, 22 nt, Human
ccagaacuggaacccaugucuu

SEQ ID NO: 66035 - RNA, 23 nt, Human
ccauccuguugccaucacugacc

SEQ ID NO: 66036 - RNA, 20 nt, Human
ccauucuggggcuggcccug

SEQ ID NO: 66037 - RNA, 19 nt, Human
cccaaacuuccaaacucac

SEQ ID NO: 66038 - RNA, 19 nt, Human
ccccagaagcaagaaagcc

SEQ ID NO: 66039 - RNA, 21 nt, Human
ccccagaagcaagaaagccuc

SEQ ID NO: 66040 - RNA, 21 nt, Human
cccccaaacuuccaaacucac

SEQ ID NO: 66041 - RNA, 23 nt, Human
cccccaaacuuccaaacucacaa

SEQ ID NO: 66042 - RNA, 24 nt, Human
ccccuggggcacgugcgauucucc

SEQ ID NO: 66043 - RNA, 21 nt, Human
cccucagugcccagcacagcu

SEQ ID NO: 66044 - RNA, 18 nt, Human
cccugcuaucuacaucug

SEQ ID NO: 66045 - RNA, 20 nt, Human
ccugggccgagcauccucug

SEQ ID NO: 66046 - RNA, 19 nt, Human
ccugggcuucucccccucc

SEQ ID NO: 66047 - RNA, 22 nt, Human
ccugugaaaccuccauuuugcc

SEQ ID NO: 66048 - RNA, 23 nt, Human
ccuuucuuucuuuuuuuaaagga

SEQ ID NO: 66049 - RNA, 18 nt, Human
cgcggcugcaggggagag

SEQ ID NO: 66050 - RNA, 20 nt, Human
cucacuccacucucagguuc

SEQ ID NO: 66051 - RNA, 19 nt, Human
cuccaucaccccuauuuuc

SEQ ID NO: 66052 - RNA, 22 nt, Human
cucccagagcugcuguuccucc

SEQ ID NO: 66053 - RNA, 22 nt, Human
cucuuguucuugucuugagacc

SEQ ID NO: 66054 - RNA, 20 nt, Human
cugcaucuguguccuugcug

SEQ ID NO: 66055 - RNA, 21 nt, Human
cugcuggaggcagagguggcc

SEQ ID NO: 66056 - RNA, 19 nt, Human
cugcuggugcugcuugguc

SEQ ID NO: 66057 - RNA, 25 nt, Human
cuggugcugcuuggucacucugggc

SEQ ID NO: 66058 - RNA, 25 nt, Human
cuugagaccaccagagaaauucaag

SEQ ID NO: 66059 - RNA, 18 nt, Human
cuuggaaaugugccugca

SEQ ID NO: 66060 - RNA, 19 nt, Human
cuuggaccaaagaacugac

SEQ ID NO: 66061 - RNA, 24 nt, Human
gaaaaccccuggggcacgugcgau

SEQ ID NO: 66062 - RNA, 21 nt, Human
gacagggcugggguuuaaugu

SEQ ID NO: 66063 - RNA, 19 nt, Human
gacaugcuuaugugggauc

SEQ ID NO: 66064 - RNA, 21 nt, Human
gaccucuucaguggggagcug

SEQ ID NO: 66065 - RNA, 23 nt, Human
gagcacacacagauaaaauacaa

SEQ ID NO: 66066 - RNA, 20 nt, Human
gagcuggaagggaaggaggc

SEQ ID NO: 66067 - RNA, 24 nt, Human
gagggacacaagggcuuucccaga

SEQ ID NO: 66068 - RNA, 19 nt, Human
gagggggcguaauggucac

SEQ ID NO: 66069 - RNA, 18 nt, Human
gauucauaaacucuccuc

SEQ ID NO: 66070 - RNA, 23 nt, Human
gcaaaacaaacauaagacccccc

SEQ ID NO: 66071 - RNA, 22 nt, Human
gcagagaaaggcccauucuggg

SEQ ID NO: 66072 - RNA, 23 nt, Human
gcagggcaagcagggcgagggug

SEQ ID NO: 66073 - RNA, 19 nt, Human
gcauucccccagagcccca

SEQ ID NO: 66074 - RNA, 21 nt, Human
gccagggccccuggucagugg

SEQ ID NO: 66075 - RNA, 19 nt, Human
gccccaagggcagggcagg

SEQ ID NO: 66076 - RNA, 21 nt, Human
gccccaagggcagggcaggca

SEQ ID NO: 66077 - RNA, 20 nt, Human
gccugcuggugcugcuuggu

SEQ ID NO: 66078 - RNA, 24 nt, Human
gcggagcugaggggcaggugccuc

SEQ ID NO: 66079 - RNA, 19 nt, Human
gcucuuguucuugucuuga

SEQ ID NO: 66080 - RNA, 19 nt, Human
gcugcaucuguguccuugc

SEQ ID NO: 66081 - RNA, 21 nt, Human
gcuucucccccuccaucaccc

SEQ ID NO: 66082 - RNA, 22 nt, Human
gcuucugguggggggccugcgg

SEQ ID NO: 66083 - RNA, 21 nt, Human
ggaacccaugucuucugcccc

SEQ ID NO: 66084 - RNA, 20 nt, Human
ggaaugaccccggcagguua

SEQ ID NO: 66085 - RNA, 18 nt, Human
ggacaagcagaccacagg

SEQ ID NO: 66086 - RNA, 19 nt, Human
ggcccauucuggggcuggc

SEQ ID NO: 66087 - RNA, 22 nt, Human
ggccgguggugcugagcuuggg

SEQ ID NO: 66088 - RNA, 19 nt, Human
ggcugcaucuguguccuug

SEQ ID NO: 66089 - RNA, 20 nt, Human
gggcaaggaugagacaugcu

SEQ ID NO: 66090 - RNA, 22 nt, Human
gggcagggaugcacggguuguu

SEQ ID NO: 66091 - RNA, 20 nt, Human
gggccccuggucaggacccu

SEQ ID NO: 66092 - RNA, 20 nt, Human
gggcuucucccccuccauca

SEQ ID NO: 66093 - RNA, 21 nt, Human
ggggagaccaccauucauucc

SEQ ID NO: 66094 - RNA, 21 nt, Human
gggggccugcggcagggcaag

SEQ ID NO: 66095 - RNA, 19 nt, Human
gugcucccuuggggcuccu

SEQ ID NO: 66096 - RNA, 22 nt, Human
gugcugagcuuggggacagggc

SEQ ID NO: 66097 - RNA, 22 nt, Human
guuggagaguagagcagaaugu

SEQ ID NO: 66098 - RNA, 22 nt, Human
uaaaauacaauaaauacaacug

SEQ ID NO: 66099 - RNA, 21 nt, Human
uaagaaacagggagggggcgu

SEQ ID NO: 66100 - RNA, 19 nt, Human
uaagaccccccaaacuucc

SEQ ID NO: 66101 - RNA, 21 nt, Human
uaagaccccccaaacuuccaa

SEQ ID NO: 66102 - RNA, 23 nt, Human
uaaggaaagccaguugaaagucc

SEQ ID NO: 66103 - RNA, 21 nt, Human
uacaauaaauacaacugaucc

SEQ ID NO: 66104 - RNA, 24 nt, Human
ucacuggcuucuuccuguuuaugu

SEQ ID NO: 66105 - RNA, 20 nt, Human
ucagauuucccgccuaugcu

SEQ ID NO: 66106 - RNA, 24 nt, Human
ucagccaggcagaagauucuagag

SEQ ID NO: 66107 - RNA, 18 nt, Human
ucauuucacugagaaaca

SEQ ID NO: 66108 - RNA, 22 nt, Human
uccaaacucacaagcuaaaggc

SEQ ID NO: 66109 - RNA, 22 nt, Human
uccaagagaagcacagcaagcc

SEQ ID NO: 66110 - RNA, 22 nt, Human
uccacugacaccugcuuaugaa

SEQ ID NO: 66111 - RNA, 23 nt, Human
uccaggugagagaugacaaggcc

SEQ ID NO: 66112 - RNA, 19 nt, Human
uccagguggcucauggcuc

SEQ ID NO: 66113 - RNA, 21 nt, Human
ucccagaggguaggucccucc

SEQ ID NO: 66114 - RNA, 22 nt, Human
uccccagaagcaagaaagccuc

SEQ ID NO: 66115 - RNA, 19 nt, Human
ucccuuggggcuccugugg

SEQ ID NO: 66116 - RNA, 21 nt, Human
uccucuggucauggccggugg

SEQ ID NO: 66117 - RNA, 24 nt, Human
uccugggcaggccugcuggugcug

SEQ ID NO: 66118 - RNA, 20 nt, Human
uccugggcuucucccccucc

SEQ ID NO: 66119 - RNA, 19 nt, Human
ucuccaaacuccuuccugc

SEQ ID NO: 66120 - RNA, 23 nt, Human
ucucccaguccugggcuucuccc

SEQ ID NO: 66121 - RNA, 18 nt, Human
ucuccugggaaugaauga

SEQ ID NO: 66122 - RNA, 22 nt, Human
ucuccugggaaugaaugaaggu

SEQ ID NO: 66123 - RNA, 22 nt, Human
ucucuccaaacuccuuccugca

SEQ ID NO: 66124 - RNA, 23 nt, Human
ucugugcuucuuggcuccagcug

SEQ ID NO: 66125 - RNA, 20 nt, Human
ucuuucuuuuuuuaaaggaa

SEQ ID NO: 66126 - RNA, 19 nt, Human
ugaaggacaagcagaccac

SEQ ID NO: 66127 - RNA, 22 nt, Human
ugaaggacaagcagaccacagg

SEQ ID NO: 66128 - RNA, 22 nt, Human
ugaaggacucugggagggacac

SEQ ID NO: 66129 - RNA, 22 nt, Human
ugaccucaaggcgugcuguccu

SEQ ID NO: 66130 - RNA, 22 nt, Human
ugagaaacacuucuuugaucca

SEQ ID NO: 66131 - RNA, 21 nt, Human
ugauccccuaaugucugccag

SEQ ID NO: 66132 - RNA, 18 nt, Human
ugcagucagacucuacuc

SEQ ID NO: 66133 - RNA, 24 nt, Human
ugcauguguggcuaaucuggagaa

SEQ ID NO: 66134 - RNA, 20 nt, Human
ugccccagacuccagauggu

SEQ ID NO: 66135 - RNA, 18 nt, Human
ugccuaaagugcugccgg

SEQ ID NO: 66136 - RNA, 24 nt, Human
ugcugcuuggucacucugggcauu

SEQ ID NO: 66137 - RNA, 21 nt, Human
ugcuuaaacuguccacugaca

SEQ ID NO: 66138 - RNA, 21 nt, Human
ugcuuaugaaaucuuuuccuu

SEQ ID NO: 66139 - RNA, 20 nt, Human
uggaagggaaggaggcuggg

SEQ ID NO: 66140 - RNA, 18 nt, Human
uggacagaguguucuaga

SEQ ID NO: 66141 - RNA, 19 nt, Human
uggagccuuacuguggcug

SEQ ID NO: 66142 - RNA, 24 nt, Human
uggaggcagagguggccccaaggg

SEQ ID NO: 66143 - RNA, 27 nt, Human
uggaggcagagguggccccaagggcag

SEQ ID NO: 66144 - RNA, 18 nt, Human
uggaucacagcaaacacu

SEQ ID NO: 66145 - RNA, 24 nt, Human
uggaugcacagacagaccagcgga

SEQ ID NO: 66146 - RNA, 21 nt, Human
uggcaugggaggcucuuuugc

SEQ ID NO: 66147 - RNA, 18 nt, Human
uggcuaaucuggagaaca

SEQ ID NO: 66148 - RNA, 23 nt, Human
uggcugaacuuucauggguauaa

SEQ ID NO: 66149 - RNA, 20 nt, Human
uggcugcaucuguguccuug

SEQ ID NO: 66150 - RNA, 23 nt, Human
uggcugcaucuguguccuugcug

SEQ ID NO: 66151 - RNA, 21 nt, Human
ugggacugguuucuuucucgg

SEQ ID NO: 66152 - RNA, 23 nt, Human
ugggagaaggcagaggucccuga

SEQ ID NO: 66153 - RNA, 18 nt, Human
ugggaggagggugagugc

SEQ ID NO: 66154 - RNA, 23 nt, Human
uggggcaagcucaagccugcugg

SEQ ID NO: 66155 - RNA, 23 nt, Human
uggggggagugacgcauggacag

SEQ ID NO: 66156 - RNA, 24 nt, Human
uggguguguggcagaaccagaacu

SEQ ID NO: 66157 - RNA, 24 nt, Human
ugucacacugcacaaauuacauau

SEQ ID NO: 66158 - RNA, 20 nt, Human
ugucuucugccccugagacc

SEQ ID NO: 66159 - RNA, 19 nt, Human
ugugcaggguuucaaccac

SEQ ID NO: 66160 - RNA, 23 nt, Human
uguggcugcaucuguguccuugc

SEQ ID NO: 66161 - RNA, 23 nt, Human
uguuccuccagucgggcugaaga

SEQ ID NO: 66162 - RNA, 22 nt, Human
uuacugagcaauguuugacuuu

SEQ ID NO: 66163 - RNA, 19 nt, Human
uucaaggucagugccccac

SEQ ID NO: 66164 - RNA, 19 nt, Human
uuucacugagaaacacuuc

SEQ ID NO: 66165 - RNA, 25 nt, Human
uuuccuuucuuucuuuuuuuaaagg

SEQ ID NO: 66166 - RNA, 21 nt, Human
uuuucauuucacugagaaaca

SEQ ID NO: 66167 - RNA, 22 nt, Human
aaaacaccauacaucugaaaug

SEQ ID NO: 66168 - RNA, 24 nt, Human
aaaugaccauuugcauauaaaagc

SEQ ID NO: 66169 - RNA, 21 nt, Human
aauaaucaaugaugaggaaac

SEQ ID NO: 66170 - RNA, 20 nt, Human
aaugaugaggaaacacugga

SEQ ID NO: 66171 - RNA, 19 nt, Human
accauacaucugaaaugac

SEQ ID NO: 66172 - RNA, 24 nt, Human
auccacagcuagcccaauaaucaa

SEQ ID NO: 66173 - RNA, 22 nt, Human
caagcuauccacagcuagccca

SEQ ID NO: 66174 - RNA, 19 nt, Human
caauggcucugagauggcu

SEQ ID NO: 66175 - RNA, 24 nt, Human
caggaagcccucuagcguagauuc

SEQ ID NO: 66176 - RNA, 21 nt, Human
cauuggaaaaguuaagcuugg

SEQ ID NO: 66177 - RNA, 22 nt, Human
ccuuauccaguaagcuucacag

SEQ ID NO: 66178 - RNA, 19 nt, Human
cgcccgcgcccgcgcccgc

SEQ ID NO: 66179 - RNA, 18 nt, Human
cggcggcggcggcgguga

SEQ ID NO: 66180 - RNA, 20 nt, Human
gaaccaaugaaggcccagga

SEQ ID NO: 66181 - RNA, 19 nt, Human
gagcaggcuuaguuccacu

SEQ ID NO: 66182 - RNA, 18 nt, Human
gauacuauagcuguugcc

SEQ ID NO: 66183 - RNA, 21 nt, Human
gcccucuagcguagauuccua

SEQ ID NO: 66184 - RNA, 24 nt, Human
gcggcggcggcggugaguccggcg

SEQ ID NO: 66185 - RNA, 19 nt, Human
gcggcggugaguccggcgc

SEQ ID NO: 66186 - RNA, 23 nt, Human
ggaucccgcggcggcggcggcgg

SEQ ID NO: 66187 - RNA, 26 nt, Human
ggaucccgcggcggcggcggcgguga

SEQ ID NO: 66188 - RNA, 21 nt, Human
uaagauugacuuguaucaaug

SEQ ID NO: 66189 - RNA, 19 nt, Human
uacaaggaagaauaaacgg

SEQ ID NO: 66190 - RNA, 19 nt, Human
ucaggcggucagcuucuuc

SEQ ID NO: 66191 - RNA, 24 nt, Human
uccaaaaaccacagugcccggcac

SEQ ID NO: 66192 - RNA, 21 nt, Human
uccaaaauauacaauuaaugc

SEQ ID NO: 66193 - RNA, 18 nt, Human
ucccgcggcggcggcggc

SEQ ID NO: 66194 - RNA, 18 nt, Human
uccuaugacaucggaacc

SEQ ID NO: 66195 - RNA, 19 nt, Human
ucggaaccaaugaaggccc

SEQ ID NO: 66196 - RNA, 18 nt, Human
ucugaaaugaccauuugc

SEQ ID NO: 66197 - RNA, 18 nt, Human
ugaggaaacacuggagca

SEQ ID NO: 66198 - RNA, 23 nt, Human
ugaggaaacacuggagcaggcuu

SEQ ID NO: 66199 - RNA, 25 nt, Human
ugauuaaaaaauucaacacaaacag

SEQ ID NO: 66200 - RNA, 23 nt, Human
ugggaggaguuaggggccucugg

SEQ ID NO: 66201 - RNA, 24 nt, Human
ugggaggaguuaggggccucugga

SEQ ID NO: 66202 - RNA, 19 nt, Human
uuaaaaauauuuaacuguc

SEQ ID NO: 66203 - RNA, 18 nt, Human
uuacaccccagauccagc

SEQ ID NO: 66204 - RNA, 21 nt, Human
uuaugaagucaguacauaaaa

SEQ ID NO: 66205 - RNA, 22 nt, Human
uucaacacaaacagaauccaaa

SEQ ID NO: 66206 - RNA, 26 nt, Human
uuuuuuuuuuuuuuuauagaacaagg

SEQ ID NO: 66207 - RNA, 24 nt, Human
aaaacggagaaucccuuaagaacc

SEQ ID NO: 66208 - RNA, 27 nt, Human
aggcaaggacggagggagaggggaccc

SEQ ID NO: 66209 - RNA, 24 nt, Human
caaaacggagaaucccuuaagaac

SEQ ID NO: 66210 - RNA, 27 nt, Human
caaaauggaaccaaaacggagaaucuu

SEQ ID NO: 66211 - RNA, 26 nt, Human
caacauuaaaagcuacgauuauccag

SEQ ID NO: 66212 - RNA, 24 nt, Human
ccaaaacggagaaucccuuaagaa

SEQ ID NO: 66213 - RNA, 23 nt, Human
ggagaaucccuuaagaaccugaa

SEQ ID NO: 66214 - RNA, 25 nt, Human
gguaagggaggcaaggacggaggga

SEQ ID NO: 66215 - RNA, 22 nt, Human
uacaaaauggaaccaaaacgga

SEQ ID NO: 66216 - RNA, 19 nt, Human
uguacaaaauggaaccaaa

SEQ ID NO: 66217 - RNA, 24 nt, Human
agccuuuucuggggagagagauga

SEQ ID NO: 66218 - RNA, 18 nt, Human
auguugagccuuuucugg

SEQ ID NO: 66219 - RNA, 22 nt, Human
ccuuuucuggggagagagauga

SEQ ID NO: 66220 - RNA, 19 nt, Human
ucccacacagacgggcacc

SEQ ID NO: 66221 - RNA, 22 nt, Human
uuuuuuuuuuuuuuuuucacau

SEQ ID NO: 66222 - RNA, 24 nt, Human
aguggagccggagccacguggagg

SEQ ID NO: 66223 - RNA, 23 nt, Human
accagcggagucgggccgggggg

SEQ ID NO: 66224 - RNA, 19 nt, Human
acccccuccagacaccugg

SEQ ID NO: 66225 - RNA, 18 nt, Human
agacaccugagccucccc

SEQ ID NO: 66226 - RNA, 20 nt, Human
aggagccgguaccgggcugc

SEQ ID NO: 66227 - RNA, 20 nt, Human
aggcacaaacccccuccaga

SEQ ID NO: 66228 - RNA, 18 nt, Human
agggagcccaggaggagc

SEQ ID NO: 66229 - RNA, 18 nt, Human
aucacaugcccaggccag

SEQ ID NO: 66230 - RNA, 23 nt, Human
augggaccgaggggucuguccca

SEQ ID NO: 66231 - RNA, 21 nt, Human
caaacccccuccagacaccuu

SEQ ID NO: 66232 - RNA, 20 nt, Human
cacaaacccccuccagacac

SEQ ID NO: 66233 - RNA, 22 nt, Human
cacaaacccccuccagacaccu

SEQ ID NO: 66234 - RNA, 24 nt, Human
caccugagccucccccaaccggag

SEQ ID NO: 66235 - RNA, 27 nt, Human
caccugagccucccccacaggcuccca

SEQ ID NO: 66236 - RNA, 18 nt, Human
ccaaauacuccccgaccc

SEQ ID NO: 66237 - RNA, 26 nt, Human
ccaggcgccgcccuucccugagaccc

SEQ ID NO: 66238 - RNA, 18 nt, Human
ccccggacccaaauacuc

SEQ ID NO: 66239 - RNA, 30 nt, Human
cccggacccaaauacuccccgacccugacc

SEQ ID NO: 66240 - RNA, 20 nt, Human
cccugagaccccggacccaa

SEQ ID NO: 66241 - RNA, 20 nt, Human
ccgauaccgcagacccaggc

SEQ ID NO: 66242 - RNA, 22 nt, Human
ccugacggccgccuccugaagc

SEQ ID NO: 66243 - RNA, 20 nt, Human
ccugagaccccggacccaaa

SEQ ID NO: 66244 - RNA, 18 nt, Human
cgacccugacggccgccu

SEQ ID NO: 66245 - RNA, 19 nt, Human
cgggagaccgcgggcuggg

SEQ ID NO: 66246 - RNA, 22 nt, Human
cuccagacaccugagccucccc

SEQ ID NO: 66247 - RNA, 25 nt, Human
cuccccgacccugacggccgccucc

SEQ ID NO: 66248 - RNA, 22 nt, Human
gacaccugagccucccccacag

SEQ ID NO: 66249 - RNA, 22 nt, Human
gacccaaauacuccccgacccu

SEQ ID NO: 66250 - RNA, 22 nt, Human
gacggccgccuccugaagcucc

SEQ ID NO: 66251 - RNA, 18 nt, Human
gaucugauccuccucgcc

SEQ ID NO: 66252 - RNA, 18 nt, Human
gcagacccaggcgccgcc

SEQ ID NO: 66253 - RNA, 21 nt, Human
ggacaugggaccgaggggucu

SEQ ID NO: 66254 - RNA, 22 nt, Human
ggagggcuacuuggcuccagca

SEQ ID NO: 66255 - RNA, 18 nt, Human
ggccgccuccugaagcuc

SEQ ID NO: 66256 - RNA, 21 nt, Human
ggcugggacggaacuccucca

SEQ ID NO: 66257 - RNA, 27 nt, Human
gggccggggcccgacaguaccgggaga

SEQ ID NO: 66258 - RNA, 22 nt, Human
uagagggagcccaggaggagcc

SEQ ID NO: 66259 - RNA, 22 nt, Human
ucacaugcccaggccagccgag

SEQ ID NO: 66260 - RNA, 21 nt, Human
ucccugagaccccggacccaa

SEQ ID NO: 66261 - RNA, 22 nt, Human
ucccugagaccccggacccaaa

SEQ ID NO: 66262 - RNA, 21 nt, Human
ugaagcuccagagggccgggg

SEQ ID NO: 66263 - RNA, 21 nt, Human
ugagccucccccacaggcucc

SEQ ID NO: 66264 - RNA, 21 nt, Human
ugcccaggccagccgaggggc

SEQ ID NO: 66265 - RNA, 18 nt, Human
ugggacggaacuccucca

SEQ ID NO: 66266 - RNA, 21 nt, Human
uucccugagaccccggaccca

SEQ ID NO: 66267 - RNA, 18 nt, Human
uuuccgauaccgcagacc

SEQ ID NO: 66268 - RNA, 23 nt, Human
uuuuuuuuuucagaugugcaagu

SEQ ID NO: 66269 - RNA, 21 nt, Human
aaacccagccacccccaccuc

SEQ ID NO: 66270 - RNA, 25 nt, Human
aaaggccugagguccaacuuccaau

SEQ ID NO: 66271 - RNA, 18 nt, Human
aaaugguuaaaccucuga

SEQ ID NO: 66272 - RNA, 21 nt, Human
aacuggcuauuggcagagggg

SEQ ID NO: 66273 - RNA, 22 nt, Human
aagccacagucauggugcaggc

SEQ ID NO: 66274 - RNA, 18 nt, Human
aagccugcaacaacucug

SEQ ID NO: 66275 - RNA, 28 nt, Human
acaaagcaucuucacagcccgcgucucc

SEQ ID NO: 66276 - RNA, 18 nt, Human
acaugcuccagccaacag

SEQ ID NO: 66277 - RNA, 24 nt, Human
acccccaccucuagacacaugcuc

SEQ ID NO: 66278 - RNA, 23 nt, Human
accugaacaacaaaaugggccuu

SEQ ID NO: 66279 - RNA, 18 nt, Human
agaaaugugauucacucc

SEQ ID NO: 66280 - RNA, 21 nt, Human
agaagccuugccaacagaacc

SEQ ID NO: 66281 - RNA, 18 nt, Human
agcaagagaagggccaag

SEQ ID NO: 66282 - RNA, 20 nt, Human
agccacccccaccucuagac

SEQ ID NO: 66283 - RNA, 18 nt, Human
agccagcuguuccagccu

SEQ ID NO: 66284 - RNA, 24 nt, Human
caacaaaaugggccuuaugcucug

SEQ ID NO: 66285 - RNA, 20 nt, Human
caacagcaggaguguugcag

SEQ ID NO: 66286 - RNA, 20 nt, Human
caccaaggcccguuaucuuc

SEQ ID NO: 66287 - RNA, 21 nt, Human
cacuuggagugccugaacaug

SEQ ID NO: 66288 - RNA, 21 nt, Human
cagcuguuccagccuccagga

SEQ ID NO: 66289 - RNA, 25 nt, Human
ccacagucauggugcaggcauucug

SEQ ID NO: 66290 - RNA, 24 nt, Human
ccacccccaccucuagacacaugc

SEQ ID NO: 66291 - RNA, 19 nt, Human
ccccgccgccuccgacccg

SEQ ID NO: 66292 - RNA, 22 nt, Human
ccccgccgccuccgacccgggc

SEQ ID NO: 66293 - RNA, 21 nt, Human
cccgcgggcgcccgcugcccg

SEQ ID NO: 66294 - RNA, 24 nt, Human
ccuccgacccgggcccccggcugc

SEQ ID NO: 66295 - RNA, 20 nt, Human
ccuguaaagccugcaacaac

SEQ ID NO: 66296 - RNA, 25 nt, Human
cgaggccgggcgcucggcccccgcc

SEQ ID NO: 66297 - RNA, 19 nt, Human
cggcccccgccgccuccga

SEQ ID NO: 66298 - RNA, 22 nt, Human
cucggcccccgccgccuccgac

SEQ ID NO: 66299 - RNA, 23 nt, Human
cugaacaugauccuucaccgaca

SEQ ID NO: 66300 - RNA, 24 nt, Human
cugaaccaugaugucuagcuagca

SEQ ID NO: 66301 - RNA, 24 nt, Human
cugucugcucccuucauuugcgua

SEQ ID NO: 66302 - RNA, 18 nt, Human
gagccagcuguuccagcc

SEQ ID NO: 66303 - RNA, 19 nt, Human
gauaacaaaugagacaaga

SEQ ID NO: 66304 - RNA, 24 nt, Human
gcuuaggaaagggggauaaaccca

SEQ ID NO: 66305 - RNA, 23 nt, Human
ggccaagugaacccagguuggga

SEQ ID NO: 66306 - RNA, 20 nt, Human
gggggauaaacccagccacc

SEQ ID NO: 66307 - RNA, 22 nt, Human
gugaguaaggggugaaccaaga

SEQ ID NO: 66308 - RNA, 18 nt, Human
uaaaagccacagucaugg

SEQ ID NO: 66309 - RNA, 26 nt, Human
uaaaccucugacucagauccugaacc

SEQ ID NO: 66310 - RNA, 22 nt, Human
uaaaccucugacucaggacccu

SEQ ID NO: 66311 - RNA, 27 nt, Human
uaaagccugcaacaacucugacaguua

SEQ ID NO: 66312 - RNA, 23 nt, Human
uaagaaaugugauucacuccaau

SEQ ID NO: 66313 - RNA, 26 nt, Human
uaagaaaugugauucacuccaauaau

SEQ ID NO: 66314 - RNA, 21 nt, Human
uaagagcaagagaagggccaa

SEQ ID NO: 66315 - RNA, 23 nt, Human
uaaguucccagcugucccaaggc

SEQ ID NO: 66316 - RNA, 22 nt, Human
ugacuugugagucuaaaagagc

SEQ ID NO: 66317 - RNA, 24 nt, Human
ugagacaagagucgugagaaaagg

SEQ ID NO: 66318 - RNA, 24 nt, Human
ugccaauuuuucauaagaaaaaag

SEQ ID NO: 66319 - RNA, 18 nt, Human
ugcccggcuucuuggaaa

SEQ ID NO: 66320 - RNA, 22 nt, Human
ugccggggccugcuccgccccg

SEQ ID NO: 66321 - RNA, 18 nt, Human
ugcuguggcggaggagga

SEQ ID NO: 66322 - RNA, 21 nt, Human
ugggccuuaugcucugugaug

SEQ ID NO: 66323 - RNA, 19 nt, Human
ugugaugagauaagugagu

SEQ ID NO: 66324 - RNA, 21 nt, Human
uguggcagguccagcaauguc

SEQ ID NO: 66325 - RNA, 21 nt, Human
ugugguuuaagagcaagagaa

SEQ ID NO: 66326 - RNA, 21 nt, Human
uuagacauuauaauuagugcc

SEQ ID NO: 66327 - RNA, 23 nt, Human
uucauaagaaaaaagcuuauaaa

SEQ ID NO: 66328 - RNA, 20 nt, Human
uuccccggcaauuaaauuug

SEQ ID NO: 66329 - RNA, 19 nt, Human
uuccuaaaaaaaaagaugu

SEQ ID NO: 66330 - RNA, 19 nt, Human
uugcuguugaccugaacaa

SEQ ID NO: 66331 - RNA, 19 nt, Human
aaaacuccccgaggucucc

SEQ ID NO: 66332 - RNA, 24 nt, Human
aaaaugcugggauuaaaggcauga

SEQ ID NO: 66333 - RNA, 23 nt, Human
acagggucuugcuauguggccca

SEQ ID NO: 66334 - RNA, 23 nt, Human
accucagccucuggaguagcugg

SEQ ID NO: 66335 - RNA, 24 nt, Human
acgagaucugguuguuuaaaagug

SEQ ID NO: 66336 - RNA, 24 nt, Human
acuauguugcccaggcuggucuug

SEQ ID NO: 66337 - RNA, 25 nt, Human
acuauguugcccaggcuggucuuga

SEQ ID NO: 66338 - RNA, 22 nt, Human
acuccuggucucaagccaucuu

SEQ ID NO: 66339 - RNA, 20 nt, Human
agacagggucuugcuaugug

SEQ ID NO: 66340 - RNA, 20 nt, Human
agccucagccuccugggcuc

SEQ ID NO: 66341 - RNA, 21 nt, Human
aucucccugccuuagccuccc

SEQ ID NO: 66342 - RNA, 20 nt, Human
augcuucugugcagcugcag

SEQ ID NO: 66343 - RNA, 24 nt, Human
caaaaugcugggauuaaaggcaug

SEQ ID NO: 66344 - RNA, 21 nt, Human
caccucagccucuggaguagc

SEQ ID NO: 66345 - RNA, 19 nt, Human
cacuauguugcccaggcug

SEQ ID NO: 66346 - RNA, 24 nt, Human
cacuauguugcccaggcuggucuu

SEQ ID NO: 66347 - RNA, 27 nt, Human
cacuauguugcccaggcuggucuugaa

SEQ ID NO: 66348 - RNA, 20 nt, Human
cagaaauacugaaggaccag

SEQ ID NO: 66349 - RNA, 23 nt, Human
cagccucagccuccugggcucaa

SEQ ID NO: 66350 - RNA, 24 nt, Human
cagccucagccuccugggcucaaa

SEQ ID NO: 66351 - RNA, 22 nt, Human
cagccuccugggcucaaaugau

SEQ ID NO: 66352 - RNA, 24 nt, Human
cagggucuugcuauguggcccagg

SEQ ID NO: 66353 - RNA, 20 nt, Human
cagguauuucuuugcaagaa

SEQ ID NO: 66354 - RNA, 19 nt, Human
cauugcagccucagccucc

SEQ ID NO: 66355 - RNA, 24 nt, Human
ccaaaaugcugggauuaaaggcau

SEQ ID NO: 66356 - RNA, 22 nt, Human
ccaugagcaaaaacuccccgag

SEQ ID NO: 66357 - RNA, 23 nt, Human
cccaccucagccucuggaguagc

SEQ ID NO: 66358 - RNA, 23 nt, Human
ccccgaggucucccagaagcaga

SEQ ID NO: 66359 - RNA, 19 nt, Human
cccgaggucucccagaagc

SEQ ID NO: 66360 - RNA, 20 nt, Human
ccgcaagacgccugcucccc

SEQ ID NO: 66361 - RNA, 22 nt, Human
ccucagccuccugggcucaaau

SEQ ID NO: 66362 - RNA, 21 nt, Human
ccucagccucuggaguagcug

SEQ ID NO: 66363 - RNA, 24 nt, Human
ccuccugggcucaaaugaucuucc

SEQ ID NO: 66364 - RNA, 18 nt, Human
ccucuccucucuuggucc

SEQ ID NO: 66365 - RNA, 22 nt, Human
ccugggcucaaaugaucuuccc

SEQ ID NO: 66366 - RNA, 20 nt, Human
ccuggucucaagccaucucc

SEQ ID NO: 66367 - RNA, 26 nt, Human
ccuuuuuuuuuuuuuuuuuuuuuuug

SEQ ID NO: 66368 - RNA, 19 nt, Human
cgcaagacgccugcucccc

SEQ ID NO: 66369 - RNA, 23 nt, Human
cgccugcucccccuucgccuucc

SEQ ID NO: 66370 - RNA, 24 nt, Human
cucaaaugaucuucccaccucagc

SEQ ID NO: 66371 - RNA, 24 nt, Human
cucagccucuggaguagcugggac

SEQ ID NO: 66372 - RNA, 23 nt, Human
cucccagaagcagaugcugccau

SEQ ID NO: 66373 - RNA, 26 nt, Human
cucccugccuuagccucccaaaaugc

SEQ ID NO: 66374 - RNA, 24 nt, Human
cucuggaguagcugggaccacagg

SEQ ID NO: 66375 - RNA, 23 nt, Human
cugaaggaccaaauaaaugauau

SEQ ID NO: 66376 - RNA, 23 nt, Human
cugccuuagccucccaaaaugcu

SEQ ID NO: 66377 - RNA, 24 nt, Human
cugccuuagccucccaaaaugcug

SEQ ID NO: 66378 - RNA, 24 nt, Human
cuggaguagcugggaccacaggug

SEQ ID NO: 66379 - RNA, 22 nt, Human
cuggcccagagcgcaggaccuu

SEQ ID NO: 66380 - RNA, 20 nt, Human
cugggauuaaaggcaugagc

SEQ ID NO: 66381 - RNA, 23 nt, Human
cuucccaccucagccucuggagu

SEQ ID NO: 66382 - RNA, 21 nt, Human
cuugcuauguggcccaggcug

SEQ ID NO: 66383 - RNA, 20 nt, Human
gagacagggucuugcuaugu

SEQ ID NO: 66384 - RNA, 26 nt, Human
gaguagcugggaccacaggugcacac

SEQ ID NO: 66385 - RNA, 18 nt, Human
gauuaaaggcaugagcca

SEQ ID NO: 66386 - RNA, 20 nt, Human
gcagccucagccuccugggc

SEQ ID NO: 66387 - RNA, 19 nt, Human
gccauagaaggaaggugac

SEQ ID NO: 66388 - RNA, 20 nt, Human
gcccaggcuggaguucagug

SEQ ID NO: 66389 - RNA, 18 nt, Human
gccucagccuccugggcu

SEQ ID NO: 66390 - RNA, 26 nt, Human
gcguccuuuauuccuuuuuuuuuuuu

SEQ ID NO: 66391 - RNA, 19 nt, Human
ggcgguggggccugggggg

SEQ ID NO: 66392 - RNA, 24 nt, Human
ggcuggucuugaacuccuggucuc

SEQ ID NO: 66393 - RNA, 24 nt, Human
gggcgucucacuauguugcccagg

SEQ ID NO: 66394 - RNA, 21 nt, Human
guagcuucucacgagaucugg

SEQ ID NO: 66395 - RNA, 20 nt, Human
guggugcaauaauuaucagu

SEQ ID NO: 66396 - RNA, 19 nt, Human
uacccagucucagguauuu

SEQ ID NO: 66397 - RNA, 20 nt, Human
uagagaugggggggggggcg

SEQ ID NO: 66398 - RNA, 22 nt, Human
uaguuucuguaacuucuaauga

SEQ ID NO: 66399 - RNA, 18 nt, Human
uauguggcccaggcugga

SEQ ID NO: 66400 - RNA, 19 nt, Human
uauguugcccaggcugguc

SEQ ID NO: 66401 - RNA, 23 nt, Human
uauguugcccaggcuggucuuga

SEQ ID NO: 66402 - RNA, 24 nt, Human
uauguugcccaggcuggucuugaa

SEQ ID NO: 66403 - RNA, 18 nt, Human
ucagccucuggaguagcu

SEQ ID NO: 66404 - RNA, 22 nt, Human
ucaguggugcaauaauuaucag

SEQ ID NO: 66405 - RNA, 23 nt, Human
ucauugcagccucagccuccugg

SEQ ID NO: 66406 - RNA, 24 nt, Human
ucauugcagccucagccuccuggg

SEQ ID NO: 66407 - RNA, 28 nt, Human
uccaccaugagcaaaaacuccccgaggu

SEQ ID NO: 66408 - RNA, 24 nt, Human
ucccaaaaugcugggauuaaaggc

SEQ ID NO: 66409 - RNA, 25 nt, Human
ucccagaagcagaugcugccaugcu

SEQ ID NO: 66410 - RNA, 18 nt, Human
ucccccgcuuggugcugc

SEQ ID NO: 66411 - RNA, 21 nt, Human
uccccgaggucucccagaagc

SEQ ID NO: 66412 - RNA, 20 nt, Human
uccugggcucaaaugaucuu

SEQ ID NO: 66413 - RNA, 24 nt, Human
uccugggcucaaaugaucuuccca

SEQ ID NO: 66414 - RNA, 18 nt, Human
uccuuuuuuuuuuuuuuu

SEQ ID NO: 66415 - RNA, 18 nt, Human
uccuuuuuuuuuuuuuuu

SEQ ID NO: 66416 - RNA, 19 nt, Human
ucucacuauguugcccagg

SEQ ID NO: 66417 - RNA, 23 nt, Human
ucucacuauguugcccaggcugg

SEQ ID NO: 66418 - RNA, 24 nt, Human
ucucacuauguugcccaggcuggu

SEQ ID NO: 66419 - RNA, 26 nt, Human
ucucacuauguugcccaggcuggucu

SEQ ID NO: 66420 - RNA, 27 nt, Human
ucucacuauguugcccaggcuggucuu

SEQ ID NO: 66421 - RNA, 24 nt, Human
ucuggaguagcugggaccacaggu

SEQ ID NO: 66422 - RNA, 21 nt, Human
ucuugaacuccuggucucaag

SEQ ID NO: 66423 - RNA, 22 nt, Human
ucuugcuauguggcccaggcug

SEQ ID NO: 66424 - RNA, 23 nt, Human
ucuugcuauguggcccaggcugg

SEQ ID NO: 66425 - RNA, 24 nt, Human
ucuugcuauguggcccaggcugga

SEQ ID NO: 66426 - RNA, 23 nt, Human
ugagcaaaaacuccccgaggucu

SEQ ID NO: 66427 - RNA, 21 nt, Human
ugaggcuguuaagucauuggc

SEQ ID NO: 66428 - RNA, 22 nt, Human
ugcagaacgugagccaauccaa

SEQ ID NO: 66429 - RNA, 24 nt, Human
ugcccaggcuggucuugaacuccu

SEQ ID NO: 66430 - RNA, 21 nt, Human
ugccccaccugaaaaugcaga

SEQ ID NO: 66431 - RNA, 23 nt, Human
ugcccugcgcacuccgcgcccgg

SEQ ID NO: 66432 - RNA, 24 nt, Human
ugccuuagccucccaaaaugcugg

SEQ ID NO: 66433 - RNA, 24 nt, Human
uggaguagcugggaccacaggugc

SEQ ID NO: 66434 - RNA, 24 nt, Human
ugggaccacaggugcacaccacca

SEQ ID NO: 66435 - RNA, 22 nt, Human
ugggauuaaaggcaugagccac

SEQ ID NO: 66436 - RNA, 23 nt, Human
ugggauuaaaggcaugagccacc

SEQ ID NO: 66437 - RNA, 25 nt, Human
ugggauuaaaggcaugagccaccuu

SEQ ID NO: 66438 - RNA, 22 nt, Human
ugggcucaaaugaucuucccac

SEQ ID NO: 66439 - RNA, 24 nt, Human
ugggcucaaaugaucuucccaccu

SEQ ID NO: 66440 - RNA, 18 nt, Human
uggggggaggugacugaa

SEQ ID NO: 66441 - RNA, 20 nt, Human
uuaaauuuuuuguagagaug

SEQ ID NO: 66442 - RNA, 23 nt, Human
uucccaccucagccucuggagua

SEQ ID NO: 66443 - RNA, 20 nt, Human
uuccucuccucucuuggucc

SEQ ID NO: 66444 - RNA, 20 nt, Human
uugcagccucagccuccugg

SEQ ID NO: 66445 - RNA, 21 nt, Human
uuguuuaaaagugugcggcuc

SEQ ID NO: 66446 - RNA, 18 nt, Human
uuuuuuguagagaugggg

SEQ ID NO: 66447 - RNA, 25 nt, Human
uuuuuuuuuuuuggagacagggucu

SEQ ID NO: 66448 - RNA, 18 nt, Human
uuuuuuuuuuuuuuuuug

SEQ ID NO: 66449 - RNA, 28 nt, Human
uuuuuuuuuuuuuuuuuuggagacaggg

SEQ ID NO: 66450 - RNA, 19 nt, Human
ccugaauccccgaucaaga

SEQ ID NO: 66451 - RNA, 20 nt, Human
cugcuccugggcuccuuccu

SEQ ID NO: 66452 - RNA, 18 nt, Human
ucucucucuacuuccucu

SEQ ID NO: 66453 - RNA, 19 nt, Human
ucugcuccugggcuccuuc

SEQ ID NO: 66454 - RNA, 26 nt, Human
aaacaaaaagguuggaucccaacagu

SEQ ID NO: 66455 - RNA, 24 nt, Human
agcacuuugggaggccgaggccgg

SEQ ID NO: 66456 - RNA, 24 nt, Human
agccuggucaacauggugagagcc

SEQ ID NO: 66457 - RNA, 24 nt, Human
aggaguggugguucacgccuguaa

SEQ ID NO: 66458 - RNA, 21 nt, Human
aggccgaggccggcggaucac

SEQ ID NO: 66459 - RNA, 22 nt, Human
aggccggcggaucacuugaggg

SEQ ID NO: 66460 - RNA, 21 nt, Human
aucacuugaggucgggaguuc

SEQ ID NO: 66461 - RNA, 25 nt, Human
caacagcaguggaaaaguaacagaa

SEQ ID NO: 66462 - RNA, 20 nt, Human
caacauggugagagccuguc

SEQ ID NO: 66463 - RNA, 22 nt, Human
caacauggugagagccugucuc

SEQ ID NO: 66464 - RNA, 24 nt, Human
cacgccuguaaucccagcacuuug

SEQ ID NO: 66465 - RNA, 20 nt, Human
cagaagggccaggaguggug

SEQ ID NO: 66466 - RNA, 22 nt, Human
cagcacuuugggaggccgaggc

SEQ ID NO: 66467 - RNA, 25 nt, Human
cagcacuuugggaggccgaggccgg

SEQ ID NO: 66468 - RNA, 20 nt, Human
cagugggccuuuaauaaucu

SEQ ID NO: 66469 - RNA, 18 nt, Human
ccaaaggcuuccucuggu

SEQ ID NO: 66470 - RNA, 22 nt, Human
ccuggucaacauggugagagcc

SEQ ID NO: 66471 - RNA, 24 nt, Human
ccuggucaacauggugagagccug

SEQ ID NO: 66472 - RNA, 22 nt, Human
ccuguaaucccagcacuuuggg

SEQ ID NO: 66473 - RNA, 24 nt, Human
cgagaccagccuggucaacauggu

SEQ ID NO: 66474 - RNA, 21 nt, Human
cgaggccggcggaucacuuga

SEQ ID NO: 66475 - RNA, 24 nt, Human
cgaggccggcggaucacuugaggu

SEQ ID NO: 66476 - RNA, 23 nt, Human
cgccuguaaucccagcacuuugg

SEQ ID NO: 66477 - RNA, 24 nt, Human
cggaucacuugaggucgggaguuc

SEQ ID NO: 66478 - RNA, 26 nt, Human
gacuucuaucucaacagcaguggaaa

SEQ ID NO: 66479 - RNA, 24 nt, Human
gaucacuugaggucgggaguucga

SEQ ID NO: 66480 - RNA, 20 nt, Human
ggaucacuugaggucgggaa

SEQ ID NO: 66481 - RNA, 23 nt, Human
ggaucacuugaggucgggaguuc

SEQ ID NO: 66482 - RNA, 19 nt, Human
gggaggccgaggccggcgg

SEQ ID NO: 66483 - RNA, 24 nt, Human
ggugguucacgccuguaaucccag

SEQ ID NO: 66484 - RNA, 19 nt, Human
uaauuaucucuucucguua

SEQ ID NO: 66485 - RNA, 19 nt, Human
uagccugauuguaauuauc

SEQ ID NO: 66486 - RNA, 24 nt, Human
uauacaaacaaaaagguuggaucc

SEQ ID NO: 66487 - RNA, 23 nt, Human
ucacgccuguaaucccagcacuu

SEQ ID NO: 66488 - RNA, 28 nt, Human
ugaaagcaccaaaguuaguuggagaccc

SEQ ID NO: 66489 - RNA, 18 nt, Human
ugggaggccgaggccggc

SEQ ID NO: 66490 - RNA, 24 nt, Human
ugggaggccgaggccggcggauca

SEQ ID NO: 66491 - RNA, 24 nt, Human
uggugguucacgccuguaauccca

SEQ ID NO: 66492 - RNA, 24 nt, Human
ugguucacgccuguaaucccagca

SEQ ID NO: 66493 - RNA, 25 nt, Human
uugggaggccgaggccggcggauca

SEQ ID NO: 66494 - RNA, 21 nt, Human
aagcacacauggccaacaucc

SEQ ID NO: 66495 - RNA, 20 nt, Human
agccggucuggcagcuacca

SEQ ID NO: 66496 - RNA, 18 nt, Human
cacacauggccaacaucc

SEQ ID NO: 66497 - RNA, 19 nt, Human
ccucaucuaggccuugucc

SEQ ID NO: 66498 - RNA, 19 nt, Human
cucaguuuccucaucuagg

SEQ ID NO: 66499 - RNA, 21 nt, Human
cugaagcacacauggccaaca

SEQ ID NO: 66500 - RNA, 22 nt, Human
uacagcccuggguaagguucag

SEQ ID NO: 66501 - RNA, 19 nt, Human
ucuaggccuuguccugggu

SEQ ID NO: 66502 - RNA, 18 nt, Human
ucuccuguuucuccacca

SEQ ID NO: 66503 - RNA, 25 nt, Human
uggguaagguucaguccccagauug

SEQ ID NO: 66504 - RNA, 22 nt, Human
uuacacugaagcacacauggcc

SEQ ID NO: 66505 - RNA, 18 nt, Human
uuuuuuuuuugccggccc

SEQ ID NO: 66506 - RNA, 19 nt, Human
uuuuuuuuuuuuuugccgg

SEQ ID NO: 66507 - RNA, 22 nt, Human
uuuuuuuuuuuuuuuuugccgg

SEQ ID NO: 66508 - RNA, 27 nt, Human
uuuuuuuuuuuuuuuuuuuuuuugggg

SEQ ID NO: 66509 - RNA, 27 nt, Human
aaaaauacaucauuccuuuugaucucc

SEQ ID NO: 66510 - RNA, 19 nt, Human
aaacugacuccccacucuc

SEQ ID NO: 66511 - RNA, 18 nt, Human
aagugaaaaguucuguga

SEQ ID NO: 66512 - RNA, 22 nt, Human
caaacugacuccccacucucag

SEQ ID NO: 66513 - RNA, 18 nt, Human
cagaaguauacaguuuuc

SEQ ID NO: 66514 - RNA, 23 nt, Human
ccaacacguaaaaaauacaucau

SEQ ID NO: 66515 - RNA, 24 nt, Human
cuuucugaauuugcaaaaugaaua

SEQ ID NO: 66516 - RNA, 22 nt, Human
uauccagugacuuuggccaaca

SEQ ID NO: 66517 - RNA, 21 nt, Human
ucaaacugacuccccacucuc

SEQ ID NO: 66518 - RNA, 23 nt, Human
ugaauaacaaauauacaauucuc

SEQ ID NO: 66519 - RNA, 24 nt, Human
ugacauauaucuggaccaacuuuc

SEQ ID NO: 66520 - RNA, 21 nt, Human
uguggaucccuauaguuauuu

SEQ ID NO: 66521 - RNA, 24 nt, Human
uuggccaacacguaaaaaauacau

SEQ ID NO: 66522 - RNA, 21 nt, Human
uuuaccuaaucaaaaucuuuu

SEQ ID NO: 66523 - RNA, 24 nt, Human
uuuuuuuuuuuuuuuuuuaccuaa

SEQ ID NO: 66524 - RNA, 19 nt, Human
aaagcccagccaggcaccc

SEQ ID NO: 66525 - RNA, 24 nt, Human
acacacagcaccaugucaguaaac

SEQ ID NO: 66526 - RNA, 20 nt, Human
acgaacagcaggcacugaaa

SEQ ID NO: 66527 - RNA, 22 nt, Human
acggcacgaucugcucagggug

SEQ ID NO: 66528 - RNA, 19 nt, Human
acugcagggcucuggggag

SEQ ID NO: 66529 - RNA, 21 nt, Human
acugcagggcucuggggaggu

SEQ ID NO: 66530 - RNA, 22 nt, Human
agcagcccagucggccuccucg

SEQ ID NO: 66531 - RNA, 18 nt, Human
agcaugggcuggagaaag

SEQ ID NO: 66532 - RNA, 20 nt, Human
agcccagccaggcacccuuc

SEQ ID NO: 66533 - RNA, 25 nt, Human
aggcuccaggcagaugcggcagccc

SEQ ID NO: 66534 - RNA, 19 nt, Human
agguaggauggggggagug

SEQ ID NO: 66535 - RNA, 22 nt, Human
augcggcagccccggccccagc

SEQ ID NO: 66536 - RNA, 23 nt, Human
caaagcccagccaggcacccuuc

SEQ ID NO: 66537 - RNA, 19 nt, Human
cacagcaccaugucaguaa

SEQ ID NO: 66538 - RNA, 21 nt, Human
caccccccacaccguggucug

SEQ ID NO: 66539 - RNA, 23 nt, Human
caccccccacaccguggucugcc

SEQ ID NO: 66540 - RNA, 26 nt, Human
cacccuccuaucccaccagccccaaa

SEQ ID NO: 66541 - RNA, 23 nt, Human
cacccuccuaucccaccagccuc

SEQ ID NO: 66542 - RNA, 21 nt, Human
cacccuucccugccaccuccc

SEQ ID NO: 66543 - RNA, 19 nt, Human
caccucccugggcccugcc

SEQ ID NO: 66544 - RNA, 21 nt, Human
cacgcggccgcaacucggacc

SEQ ID NO: 66545 - RNA, 23 nt, Human
cagaccuggcccgcaccacuggg

SEQ ID NO: 66546 - RNA, 24 nt, Human
cagcaugggcuggagaaaggcucu

SEQ ID NO: 66547 - RNA, 24 nt, Human
cagcccccucccugccuagcugcc

SEQ ID NO: 66548 - RNA, 20 nt, Human
caggccuagggaguuaggua

SEQ ID NO: 66549 - RNA, 22 nt, Human
ccagcagcccagucggccuccu

SEQ ID NO: 66550 - RNA, 22 nt, Human
ccagccccaaagcccagccagg

SEQ ID NO: 66551 - RNA, 22 nt, Human
ccaggcagaugcggcagccccg

SEQ ID NO: 66552 - RNA, 24 nt, Human
ccagucggccuccucgggccuucu

SEQ ID NO: 66553 - RNA, 19 nt, Human
cccaccagccccaaagccc

SEQ ID NO: 66554 - RNA, 24 nt, Human
cccaggcuccaggcagaugcggca

SEQ ID NO: 66555 - RNA, 23 nt, Human
cccagggcugggccuuguggggc

SEQ ID NO: 66556 - RNA, 19 nt, Human
ccccaaagcccagccaggc

SEQ ID NO: 66557 - RNA, 22 nt, Human
ccccaaagcccagccaggcacc

SEQ ID NO: 66558 - RNA, 22 nt, Human
ccccaaagucaggcuuggcugg

SEQ ID NO: 66559 - RNA, 19 nt, Human
ccccaccuugcugcuucca

SEQ ID NO: 66560 - RNA, 24 nt, Human
ccccggccccagccagcaugggcu

SEQ ID NO: 66561 - RNA, 20 nt, Human
ccccggguccguuggcgcgc

SEQ ID NO: 66562 - RNA, 18 nt, Human
ccccucccuccaggccca

SEQ ID NO: 66563 - RNA, 22 nt, Human
ccccuggcgccagaccuggccc

SEQ ID NO: 66564 - RNA, 23 nt, Human
cccuccuaucccaccagccccaa

SEQ ID NO: 66565 - RNA, 19 nt, Human
ccuccaggcccagcgcgca

SEQ ID NO: 66566 - RNA, 19 nt, Human
ccucccugccuagcugccu

SEQ ID NO: 66567 - RNA, 20 nt, Human
ccuccuaucccaccagcccc

SEQ ID NO: 66568 - RNA, 26 nt, Human
ccuccuaucccaccagccccaaagcc

SEQ ID NO: 66569 - RNA, 27 nt, Human
ccuccuaucccaccagccggguccuuc

SEQ ID NO: 66570 - RNA, 23 nt, Human
ccuccucgggccuucugucacuc

SEQ ID NO: 66571 - RNA, 23 nt, Human
ccucggaccccagaagggcuucc

SEQ ID NO: 66572 - RNA, 28 nt, Human
ccucggaccccagaagggcuuccccggg

SEQ ID NO: 66573 - RNA, 27 nt, Human
ccugacccccaccuugcugccgguucc

SEQ ID NO: 66574 - RNA, 21 nt, Human
ccugcagggugcccagggaga

SEQ ID NO: 66575 - RNA, 23 nt, Human
ccugccugcagggugcccaggga

SEQ ID NO: 66576 - RNA, 20 nt, Human
ccuggcgccagaccuggccc

SEQ ID NO: 66577 - RNA, 22 nt, Human
ccuucccugccaccucccuggg

SEQ ID NO: 66578 - RNA, 23 nt, Human
ccuucccugccaccucccugggc

SEQ ID NO: 66579 - RNA, 24 nt, Human
ccuugcccagggcugggccuugug

SEQ ID NO: 66580 - RNA, 24 nt, Human
cgacacccacccugcaggcucugg

SEQ ID NO: 66581 - RNA, 19 nt, Human
cgccagaccuggcccgcac

SEQ ID NO: 66582 - RNA, 18 nt, Human
cgcccccucccuccaggc

SEQ ID NO: 66583 - RNA, 21 nt, Human
cgcccccucccuccaggccca

SEQ ID NO: 66584 - RNA, 19 nt, Human
cggugcggcgcggcgcggg

SEQ ID NO: 66585 - RNA, 24 nt, Human
cucccugggcccugccccagcagc

SEQ ID NO: 66586 - RNA, 18 nt, Human
cugcagggcucuggggag

SEQ ID NO: 66587 - RNA, 19 nt, Human
cugccaccucccugggccc

SEQ ID NO: 66588 - RNA, 19 nt, Human
cugccugcagggugcccag

SEQ ID NO: 66589 - RNA, 19 nt, Human
cuugcccagggcugggccu

SEQ ID NO: 66590 - RNA, 21 nt, Human
gaccggugcgggggccgcccc

SEQ ID NO: 66591 - RNA, 20 nt, Human
gaccuggcccgcaccacugg

SEQ ID NO: 66592 - RNA, 21 nt, Human
gccccaaagcccagccaggca

SEQ ID NO: 66593 - RNA, 23 nt, Human
gccccaaagcccagccaggcacc

SEQ ID NO: 66594 - RNA, 21 nt, Human
gccuccucgggccuucuguca

SEQ ID NO: 66595 - RNA, 18 nt, Human
gcgcggcgcgggucgcag

SEQ ID NO: 66596 - RNA, 21 nt, Human
ggcaggaggguguccccaaag

SEQ ID NO: 66597 - RNA, 20 nt, Human
gggagcggcguucccagggc

SEQ ID NO: 66598 - RNA, 18 nt, Human
gggagugggguggggggg

SEQ ID NO: 66599 - RNA, 20 nt, Human
gggcaccccccacaccgugg

SEQ ID NO: 66600 - RNA, 18 nt, Human
ggggagguggggcaccug

SEQ ID NO: 66601 - RNA, 18 nt, Human
ggggaguggggugggggg

SEQ ID NO: 66602 - RNA, 22 nt, Human
ggggaguggggugggggggcag

SEQ ID NO: 66603 - RNA, 22 nt, Human
guucuuucccagcccccucccu

SEQ ID NO: 66604 - RNA, 19 nt, Human
uaagaacaagaggcugggc

SEQ ID NO: 66605 - RNA, 19 nt, Human
uagccugacccccaccuug

SEQ ID NO: 66606 - RNA, 21 nt, Human
uagccugacccccaccuugcu

SEQ ID NO: 66607 - RNA, 19 nt, Human
uaggauggggggagugggg

SEQ ID NO: 66608 - RNA, 23 nt, Human
uccaaagcuuccuugcccagggc

SEQ ID NO: 66609 - RNA, 19 nt, Human
uccaagcccuaagaacaag

SEQ ID NO: 66610 - RNA, 23 nt, Human
uccaagcccuaagaacaagaggc

SEQ ID NO: 66611 - RNA, 22 nt, Human
uccacgauccaagcccuaagaa

SEQ ID NO: 66612 - RNA, 24 nt, Human
uccacgcggccgcaacucggaccg

SEQ ID NO: 66613 - RNA, 19 nt, Human
ucccagggcgcggcgcggu

SEQ ID NO: 66614 - RNA, 18 nt, Human
ucccaggggcacccuccu

SEQ ID NO: 66615 - RNA, 24 nt, Human
uccccggguccguuggcgcgcggg

SEQ ID NO: 66616 - RNA, 22 nt, Human
ucccuccaggcccagcgcgcaa

SEQ ID NO: 66617 - RNA, 18 nt, Human
uccuggagcgcagcgugg

SEQ ID NO: 66618 - RNA, 19 nt, Human
ugagggaagaucagcaugu

SEQ ID NO: 66619 - RNA, 22 nt, Human
ugagggaagaucagcauguccc

SEQ ID NO: 66620 - RNA, 25 nt, Human
ugcccaggcuccaggcagaugcggg

SEQ ID NO: 66621 - RNA, 19 nt, Human
ugcccagggcugggccuug

SEQ ID NO: 66622 - RNA, 21 nt, Human
ugccccagcagcccagucggc

SEQ ID NO: 66623 - RNA, 24 nt, Human
ugccccuggcgccagaccuggccc

SEQ ID NO: 66624 - RNA, 19 nt, Human
ugccugcagggugcccagg

SEQ ID NO: 66625 - RNA, 24 nt, Human
ugccugccccuggcgccagaccug

SEQ ID NO: 66626 - RNA, 21 nt, Human
ugcuuuaauuuuuaaauuuuc

SEQ ID NO: 66627 - RNA, 19 nt, Human
uggcuggggcgaggcgcug

SEQ ID NO: 66628 - RNA, 21 nt, Human
ugggcccugccccagcagccc

SEQ ID NO: 66629 - RNA, 23 nt, Human
uggggcaccuguagccugacccc

SEQ ID NO: 66630 - RNA, 19 nt, Human
uggggugggggggcaggag

SEQ ID NO: 66631 - RNA, 21 nt, Human
uggggugggggggcaggaggg

SEQ ID NO: 66632 - RNA, 22 nt, Human
ugucaguaaacagcuaacucag

SEQ ID NO: 66633 - RNA, 22 nt, Human
uguuuaccaauagucuuauuuu

SEQ ID NO: 66634 - RNA, 24 nt, Human
uucuguuucugagucacgaacagc

SEQ ID NO: 66635 - RNA, 23 nt, Human
uucuuccacgauccaagcccuaa

SEQ ID NO: 66636 - RNA, 21 nt, Human
uuuuucucaguguuuuucuuu

SEQ ID NO: 66637 - RNA, 23 nt, Human
aaaaagaaaaaagauauuuacaa

SEQ ID NO: 66638 - RNA, 19 nt, Human
aaaauugcagaaaauacaa

SEQ ID NO: 66639 - RNA, 23 nt, Human
aaagaaaaaagauauuuacaagu

SEQ ID NO: 66640 - RNA, 24 nt, Human
aagauuuuuccaaagcuuucacag

SEQ ID NO: 66641 - RNA, 23 nt, Human
aagcacuucagaaaucagaaaca

SEQ ID NO: 66642 - RNA, 19 nt, Human
aauuugcaugguuguccuc

SEQ ID NO: 66643 - RNA, 19 nt, Human
acuguccacucuucagcag

SEQ ID NO: 66644 - RNA, 22 nt, Human
aggccagaaaauucugggacaa

SEQ ID NO: 66645 - RNA, 23 nt, Human
auacaagcacuucagaaaucaga

SEQ ID NO: 66646 - RNA, 21 nt, Human
auacacaaagggaagagacca

SEQ ID NO: 66647 - RNA, 21 nt, Human
caaauucuuuucaaaucaaua

SEQ ID NO: 66648 - RNA, 18 nt, Human
cacaagacuccauaguca

SEQ ID NO: 66649 - RNA, 19 nt, Human
cacaauuugcaugguuguc

SEQ ID NO: 66650 - RNA, 19 nt, Human
cacaguaaaauugcagaaa

SEQ ID NO: 66651 - RNA, 18 nt, Human
cagaaaauucugggacaa

SEQ ID NO: 66652 - RNA, 22 nt, Human
cagaaacauuaaaaaaaagaaa

SEQ ID NO: 66653 - RNA, 21 nt, Human
cagccucaagcuugaccaaaa

SEQ ID NO: 66654 - RNA, 21 nt, Human
caucaagaaaaugacaccaau

SEQ ID NO: 66655 - RNA, 22 nt, Human
ccaaaaaaaaaaaaaaaaaaaa

SEQ ID NO: 66656 - RNA, 23 nt, Human
ccaaaaaaaaaaaaaaaaaaaaa

SEQ ID NO: 66657 - RNA, 22 nt, Human
ccaaaguaagguccaacugucc

SEQ ID NO: 66658 - RNA, 24 nt, Human
ccaaaguaagguccaacuguccac

SEQ ID NO: 66659 - RNA, 18 nt, Human
ccuccggguugccgacuc

SEQ ID NO: 66660 - RNA, 19 nt, Human
cuuuaugucuacauagcca

SEQ ID NO: 66661 - RNA, 19 nt, Human
gaagauuaagggugcccag

SEQ ID NO: 66662 - RNA, 20 nt, Human
gacaccaauuguugaaaaca

SEQ ID NO: 66663 - RNA, 22 nt, Human
gacucgcuacuccgcucacucc

SEQ ID NO: 66664 - RNA, 22 nt, Human
gccgcagauaaaagcuauacaa

SEQ ID NO: 66665 - RNA, 21 nt, Human
ggcuaaagcaugugaccacaa

SEQ ID NO: 66666 - RNA, 21 nt, Human
uaaagcaugugaccacaaaug

SEQ ID NO: 66667 - RNA, 23 nt, Human
uaaagccgcagauaaaagcuaua

SEQ ID NO: 66668 - RNA, 23 nt, Human
uaacucuccaacaaauagugaca

SEQ ID NO: 66669 - RNA, 20 nt, Human
uagcacuucgccgccguacc

SEQ ID NO: 66670 - RNA, 23 nt, Human
uagugacaucaagaaaaugacac

SEQ ID NO: 66671 - RNA, 21 nt, Human
uauguuuacaaauuuaggaac

SEQ ID NO: 66672 - RNA, 27 nt, Human
ucagaaacauuaaaaaaaagaaaaaag

SEQ ID NO: 66673 - RNA, 22 nt, Human
ucagccucaagcuugaccaaaa

SEQ ID NO: 66674 - RNA, 22 nt, Human
ucccuuuuagcacuucgccgcc

SEQ ID NO: 66675 - RNA, 21 nt, Human
ucuuuucaaaucaauagaucc

SEQ ID NO: 66676 - RNA, 23 nt, Human
ugaaaggccagaaaauucuggga

SEQ ID NO: 66677 - RNA, 21 nt, Human
ugcaucaaaggcuuuauucag

SEQ ID NO: 66678 - RNA, 22 nt, Human
uggcuaaagcaugugaccacaa

SEQ ID NO: 66679 - RNA, 23 nt, Human
uguaauggcagacaauuuagcac

SEQ ID NO: 66680 - RNA, 22 nt, Human
uguccacucuucagcaguccca

SEQ ID NO: 66681 - RNA, 21 nt, Human
ugucuacauagccaucgcaca

SEQ ID NO: 66682 - RNA, 23 nt, Human
uugaccaaaaaaaaaaaaaaaaa

SEQ ID NO: 66683 - RNA, 20 nt, Human
uugcaugguuguccuccuau

SEQ ID NO: 66684 - RNA, 23 nt, Human
uuucaaaucaauagauccaauaa

SEQ ID NO: 66685 - RNA, 23 nt, Human
uuucacaauuugcaugguugucc

SEQ ID NO: 66686 - RNA, 24 nt, Human
aacaauaauaacuuuaguauaagc

SEQ ID NO: 66687 - RNA, 19 nt, Human
aagcagaacgacccgcgac

SEQ ID NO: 66688 - RNA, 18 nt, Human
aaucaaccgcagcacuug

SEQ ID NO: 66689 - RNA, 21 nt, Human
agcagaacgacccgcgaccac

SEQ ID NO: 66690 - RNA, 22 nt, Human
caccugaggagcaaugacaguc

SEQ ID NO: 66691 - RNA, 19 nt, Human
cagaacgacccgcgaccac

SEQ ID NO: 66692 - RNA, 21 nt, Human
cccgcgcacgccccucgggca

SEQ ID NO: 66693 - RNA, 22 nt, Human
cccugcagaucacuuucucccu

SEQ ID NO: 66694 - RNA, 24 nt, Human
cccugcagaucacuuucucccuca

SEQ ID NO: 66695 - RNA, 19 nt, Human
ccgccuccgcggccgcccc

SEQ ID NO: 66696 - RNA, 21 nt, Human
ccgcggccgccccugacccgc

SEQ ID NO: 66697 - RNA, 24 nt, Human
ccucccugcagaucacuuucuccc

SEQ ID NO: 66698 - RNA, 24 nt, Human
ccuccgcggccgccccugacccgc

SEQ ID NO: 66699 - RNA, 21 nt, Human
cuuccggcgccgccucgugcc

SEQ ID NO: 66700 - RNA, 22 nt, Human
gccuccgcggccgccccugacc

SEQ ID NO: 66701 - RNA, 20 nt, Human
gcucgguguccaccucccug

SEQ ID NO: 66702 - RNA, 18 nt, Human
ucagcggcccaggcaccu

SEQ ID NO: 66703 - RNA, 19 nt, Human
ucagcugacaaugacccaa

SEQ ID NO: 66704 - RNA, 19 nt, Human
uccaccucccugcagauca

SEQ ID NO: 66705 - RNA, 22 nt, Human
ugacccaaggacuguucagcgg

SEQ ID NO: 66706 - RNA, 19 nt, Human
ugacccgcgcacgccccuc

SEQ ID NO: 66707 - RNA, 24 nt, Human
ugggaaaaacaauaauaacuuuag

SEQ ID NO: 66708 - RNA, 21 nt, Human
uuuuuuuuuuuuuuuuuuggg

SEQ ID NO: 66709 - RNA, 18 nt, Human
aaagcagauggccggguc

SEQ ID NO: 66710 - RNA, 22 nt, Human
aacaaagcccuccaagacccag

SEQ ID NO: 66711 - RNA, 23 nt, Human
aacaaagcccuccaagacccagg

SEQ ID NO: 66712 - RNA, 19 nt, Human
aaccucaccccaccccccg

SEQ ID NO: 66713 - RNA, 22 nt, Human
aagcucuggcccugagacccag

SEQ ID NO: 66714 - RNA, 21 nt, Human
aaggggcucaggcucacugcu

SEQ ID NO: 66715 - RNA, 25 nt, Human
aaugagguuaaccucaccccacccc

SEQ ID NO: 66716 - RNA, 27 nt, Human
accccaccccccggucccccuccccag

SEQ ID NO: 66717 - RNA, 23 nt, Human
acuccucucuccccguggcccca

SEQ ID NO: 66718 - RNA, 21 nt, Human
agaacaccucaagcucugccc

SEQ ID NO: 66719 - RNA, 20 nt, Human
agagguuucugccauuccug

SEQ ID NO: 66720 - RNA, 20 nt, Human
agcaccaccuuccccagaac

SEQ ID NO: 66721 - RNA, 23 nt, Human
agcaccaccuuccccagaacacc

SEQ ID NO: 66722 - RNA, 18 nt, Human
aggaaugaggauggaggg

SEQ ID NO: 66723 - RNA, 19 nt, Human
aggaaugaggauggaggga

SEQ ID NO: 66724 - RNA, 22 nt, Human
aggcagauaggaagcaagguga

SEQ ID NO: 66725 - RNA, 18 nt, Human
aggcagaucccugcgggg

SEQ ID NO: 66726 - RNA, 21 nt, Human
aggcucccccuacccccuacc

SEQ ID NO: 66727 - RNA, 22 nt, Human
aggcucccccuacccccuaccu

SEQ ID NO: 66728 - RNA, 23 nt, Human
aggggcacagggaaggcucugag

SEQ ID NO: 66729 - RNA, 21 nt, Human
agguagagaaggucugggauc

SEQ ID NO: 66730 - RNA, 19 nt, Human
agucuuuggagagaaagcu

SEQ ID NO: 66731 - RNA, 20 nt, Human
aguggugaguuuuccagaac

SEQ ID NO: 66732 - RNA, 21 nt, Human
caaagcccuccaagacccagg

SEQ ID NO: 66733 - RNA, 28 nt, Human
caaagcccuccaagacccaggcuccccc

SEQ ID NO: 66734 - RNA, 23 nt, Human
caaagcugagaagccaagcugua

SEQ ID NO: 66735 - RNA, 24 nt, Human
caagacccaggcucccccuacccc

SEQ ID NO: 66736 - RNA, 23 nt, Human
cacagggcucugaaccaaagcag

SEQ ID NO: 66737 - RNA, 24 nt, Human
cacagggcucugaaccaaagcaga

SEQ ID NO: 66738 - RNA, 21 nt, Human
caccucaagcucugcccuggc

SEQ ID NO: 66739 - RNA, 23 nt, Human
caccucaagcucugcccuggccc

SEQ ID NO: 66740 - RNA, 22 nt, Human
caggcaggaaugaggauggagg

SEQ ID NO: 66741 - RNA, 18 nt, Human
caggcucccccuaccccc

SEQ ID NO: 66742 - RNA, 19 nt, Human
caggcucccccuacccccu

SEQ ID NO: 66743 - RNA, 21 nt, Human
caggucccaggaugaaagggg

SEQ ID NO: 66744 - RNA, 20 nt, Human
ccaaagcagauggccggguu

SEQ ID NO: 66745 - RNA, 23 nt, Human
ccagaacaaguggaggggcacag

SEQ ID NO: 66746 - RNA, 22 nt, Human
cccaggcucccccuacccccua

SEQ ID NO: 66747 - RNA, 22 nt, Human
ccccaccccccggucccccucc

SEQ ID NO: 66748 - RNA, 24 nt, Human
ccccagaacaccucaagcucugcc

SEQ ID NO: 66749 - RNA, 21 nt, Human
ccccccacgcccaccugccag

SEQ ID NO: 66750 - RNA, 20 nt, Human
ccccccggucccccucccca

SEQ ID NO: 66751 - RNA, 18 nt, Human
ccccuccccagccaacca

SEQ ID NO: 66752 - RNA, 25 nt, Human
cccggucccccuccccagccaacca

SEQ ID NO: 66753 - RNA, 20 nt, Human
cccuccaagacccaggcucc

SEQ ID NO: 66754 - RNA, 22 nt, Human
ccucaagcucugcccuggcccc

SEQ ID NO: 66755 - RNA, 20 nt, Human
cgcugcugugucuccggauu

SEQ ID NO: 66756 - RNA, 24 nt, Human
cgucuucaucuuagucuuuggaga

SEQ ID NO: 66757 - RNA, 24 nt, Human
cuacuccucucuccccguggcccc

SEQ ID NO: 66758 - RNA, 23 nt, Human
cucaccccaccccccgguccccc

SEQ ID NO: 66759 - RNA, 20 nt, Human
cuccaagacccaggcucccc

SEQ ID NO: 66760 - RNA, 21 nt, Human
cuggccaaagcucuggcccug

SEQ ID NO: 66761 - RNA, 22 nt, Human
cuggccccaggaauagagguuu

SEQ ID NO: 66762 - RNA, 23 nt, Human
cuguaccugugccccccacgccc

SEQ ID NO: 66763 - RNA, 19 nt, Human
cugugugcuggacaccgcu

SEQ ID NO: 66764 - RNA, 20 nt, Human
cuucaggcaggaaugaggau

SEQ ID NO: 66765 - RNA, 20 nt, Human
gaggauggagggagagccag

SEQ ID NO: 66766 - RNA, 21 nt, Human
gcaaagcagaggauaggggag

SEQ ID NO: 66767 - RNA, 18 nt, Human
gcacagggaaggcucuga

SEQ ID NO: 66768 - RNA, 21 nt, Human
gccaagcuguaccugugcccc

SEQ ID NO: 66769 - RNA, 20 nt, Human
gccccaggaauagagguuuc

SEQ ID NO: 66770 - RNA, 20 nt, Human
gcccuggccccaggaauaga

SEQ ID NO: 66771 - RNA, 22 nt, Human
gcucuggcccugagacccagug

SEQ ID NO: 66772 - RNA, 21 nt, Human
ggagagccagggagagacuga

SEQ ID NO: 66773 - RNA, 18 nt, Human
ggagauuuaaaugaccau

SEQ ID NO: 66774 - RNA, 23 nt, Human
ggccaggcagaucccugcggggc

SEQ ID NO: 66775 - RNA, 23 nt, Human
guuuuccagaacaaguggagggg

SEQ ID NO: 66776 - RNA, 24 nt, Human
uaauacuuaacaaagcccuccaag

SEQ ID NO: 66777 - RNA, 22 nt, Human
uagagaaggucugggaucugcu

SEQ ID NO: 66778 - RNA, 23 nt, Human
uaggagcagacacuauaguaacc

SEQ ID NO: 66779 - RNA, 18 nt, Human
uccaggcugagagggagg

SEQ ID NO: 66780 - RNA, 21 nt, Human
uccccagaacaccucaagcuc

SEQ ID NO: 66781 - RNA, 19 nt, Human
ucuggccaaagcucuggcc

SEQ ID NO: 66782 - RNA, 21 nt, Human
ucuggccaaagcucuggcccu

SEQ ID NO: 66783 - RNA, 21 nt, Human
ucuugucccagggguaggagc

SEQ ID NO: 66784 - RNA, 18 nt, Human
ugacugacagacacaggg

SEQ ID NO: 66785 - RNA, 20 nt, Human
ugagacccagugagauccug

SEQ ID NO: 66786 - RNA, 22 nt, Human
ugagacuuaguaagaagagucu

SEQ ID NO: 66787 - RNA, 19 nt, Human
uggagagaaagcucugaag

SEQ ID NO: 66788 - RNA, 22 nt, Human
uggcaaagcagaggauagggga

SEQ ID NO: 66789 - RNA, 21 nt, Human
uguccaggcugagagggaggc

SEQ ID NO: 66790 - RNA, 19 nt, Human
uuaaccucaccccaccccc

SEQ ID NO: 66791 - RNA, 24 nt, Human
uucaucuuagucuuuggagagaaa

SEQ ID NO: 66792 - RNA, 22 nt, Human
uuuggcccuuggaggaagcccu

SEQ ID NO: 66793 - RNA, 22 nt, Human
aaaaacuuguacucuguggcuc

SEQ ID NO: 66794 - RNA, 18 nt, Human
aaaaugaucagguaaaua

SEQ ID NO: 66795 - RNA, 22 nt, Human
aaaaugaucagguaaauaaaua

SEQ ID NO: 66796 - RNA, 25 nt, Human
aagcagaaaaugaucaaaagggacc

SEQ ID NO: 66797 - RNA, 23 nt, Human
acaauuuuuuuuuuuuuuuuuuu

SEQ ID NO: 66798 - RNA, 18 nt, Human
cacugaacuacuggcccc

SEQ ID NO: 66799 - RNA, 19 nt, Human
cacugaacuacuggccccc

SEQ ID NO: 66800 - RNA, 20 nt, Human
cauucucacugaacuacugg

SEQ ID NO: 66801 - RNA, 23 nt, Human
cucacugaacuacuggcccccca

SEQ ID NO: 66802 - RNA, 20 nt, Human
cuucuacaccgaaauggcug

SEQ ID NO: 66803 - RNA, 24 nt, Human
uaagugauguuuacaauuuuuuuu

SEQ ID NO: 66804 - RNA, 24 nt, Human
uacuggugaugaagcugcaauaaa

SEQ ID NO: 66805 - RNA, 23 nt, Human
uaguuguaaacauaaacauucuc

SEQ ID NO: 66806 - RNA, 24 nt, Human
ucacugaacuacuggccccccaaa

SEQ ID NO: 66807 - RNA, 18 nt, Human
ugccgugcugccacuucu

SEQ ID NO: 66808 - RNA, 20 nt, Human
ugggaaggcuaguuguaaac

SEQ ID NO: 66809 - RNA, 24 nt, Human
uuguacucuguggcucuuuugucu

SEQ ID NO: 66810 - RNA, 21 nt, Human
uuucagagaaaaaaauuagcu

SEQ ID NO: 66811 - RNA, 21 nt, Human
uuuuuuuuuuuuuuuuacugg

SEQ ID NO: 66812 - RNA, 23 nt, Human
uuuuuuuuuuuuuuuuuauguuu

SEQ ID NO: 66813 - RNA, 24 nt, Human
uuuuuuuuuuuuuuuuuuacuggg

SEQ ID NO: 66814 - RNA, 23 nt, Human
acuacacccuugguccccuccca

SEQ ID NO: 66815 - RNA, 24 nt, Human
ccccgccccgguccguugcccucc

SEQ ID NO: 66816 - RNA, 25 nt, Human
ccccgcugcagccgccgaccaggag

SEQ ID NO: 66817 - RNA, 19 nt, Human
ccccggccgcugccgccgc

SEQ ID NO: 66818 - RNA, 25 nt, Human
ccccgguccguugcccuccagcaaa

SEQ ID NO: 66819 - RNA, 21 nt, Human
ccgcucaccccgcugcagccg

SEQ ID NO: 66820 - RNA, 22 nt, Human
ccgcugccgccgcucaccccgc

SEQ ID NO: 66821 - RNA, 24 nt, Human
ccgcugccgccgcucaccccgcug

SEQ ID NO: 66822 - RNA, 22 nt, Human
ccguugcccuccagcaaaaggc

SEQ ID NO: 66823 - RNA, 23 nt, Human
gcaaaaggcgcuuccuuacuaca

SEQ ID NO: 66824 - RNA, 20 nt, Human
gccccgguccguugcccucc

SEQ ID NO: 66825 - RNA, 20 nt, Human
ggccucuggauuggggcccc

SEQ ID NO: 66826 - RNA, 22 nt, Human
uccccggccgcugccgccgcuc

SEQ ID NO: 66827 - RNA, 24 nt, Human
uccccggccgcugccgccgcucac

SEQ ID NO: 66828 - RNA, 19 nt, Human
uccccucccacccaggccu

SEQ ID NO: 66829 - RNA, 19 nt, Human
ucuggauuggggccccagg

SEQ ID NO: 66830 - RNA, 21 nt, Human
ugccaggggcugaccggagug

SEQ ID NO: 66831 - RNA, 23 nt, Human
uggauuggggccccaggccgucg

SEQ ID NO: 66832 - RNA, 18 nt, Human
ugguccccucccacccag

SEQ ID NO: 66833 - RNA, 23 nt, Human
uugguccccucccacccaggccu

SEQ ID NO: 66834 - RNA, 22 nt, Human
aaaaaaaagcagaagcagcagc

SEQ ID NO: 66835 - RNA, 21 nt, Human
aaaaggaaauaugaagcggga

SEQ ID NO: 66836 - RNA, 22 nt, Human
aaagccaugucucucaggcaug

SEQ ID NO: 66837 - RNA, 27 nt, Human
aagcagaagcagcagcaaaagggaccc

SEQ ID NO: 66838 - RNA, 27 nt, Human
aagcagcagcaaaagucagugcugaac

SEQ ID NO: 66839 - RNA, 24 nt, Human
aagggacccgagcaagaacuuuca

SEQ ID NO: 66840 - RNA, 21 nt, Human
acuuuaagaaagggcgaggag

SEQ ID NO: 66841 - RNA, 21 nt, Human
agaaaaaaaaaagcagaagca

SEQ ID NO: 66842 - RNA, 23 nt, Human
agaaagggcgaggaggugaaggg

SEQ ID NO: 66843 - RNA, 20 nt, Human
agagggaaagaaaaggaaau

SEQ ID NO: 66844 - RNA, 18 nt, Human
agcagcagcaaaagucag

SEQ ID NO: 66845 - RNA, 22 nt, Human
aggaacagagagggaaagaaaa

SEQ ID NO: 66846 - RNA, 22 nt, Human
auccgggacgcgaggugcgggg

SEQ ID NO: 66847 - RNA, 25 nt, Human
auuggagugcaaagauacuguucug

SEQ ID NO: 66848 - RNA, 20 nt, Human
caaaauccccgggagacuuc

SEQ ID NO: 66849 - RNA, 19 nt, Human
caagaaagcacuaaagaug

SEQ ID NO: 66850 - RNA, 23 nt, Human
caagaaagcacuaaagaugcagg

SEQ ID NO: 66851 - RNA, 18 nt, Human
caccagggccugaccagg

SEQ ID NO: 66852 - RNA, 18 nt, Human
cacccugcuuccaaaguc

SEQ ID NO: 66853 - RNA, 21 nt, Human
ccagggccugaccaggccgag

SEQ ID NO: 66854 - RNA, 22 nt, Human
cccugcacgccgccuccuccuc

SEQ ID NO: 66855 - RNA, 20 nt, Human
cccuucugccaggagcccac

SEQ ID NO: 66856 - RNA, 18 nt, Human
ccuuuucucccccuccca

SEQ ID NO: 66857 - RNA, 21 nt, Human
cgcagcggcggccaaggaguc

SEQ ID NO: 66858 - RNA, 19 nt, Human
cucccuucugccaggagcc

SEQ ID NO: 66859 - RNA, 19 nt, Human
cucucaggcaugccucgcu

SEQ ID NO: 66860 - RNA, 18 nt, Human
cugcacgccgccuccucc

SEQ ID NO: 66861 - RNA, 21 nt, Human
cuuagagugggagcaaaaaaa

SEQ ID NO: 66862 - RNA, 19 nt, Human
cuuuucuucuucuucuucu

SEQ ID NO: 66863 - RNA, 20 nt, Human
gaaaaugcuuuuucuccucc

SEQ ID NO: 66864 - RNA, 23 nt, Human
gaacagagagggaaagaaaagga

SEQ ID NO: 66865 - RNA, 25 nt, Human
gaacugcacuuuaagaaagggcgag

SEQ ID NO: 66866 - RNA, 18 nt, Human
gcagcggcggccaaggag

SEQ ID NO: 66867 - RNA, 19 nt, Human
gccucgcguggcgcucgcg

SEQ ID NO: 66868 - RNA, 21 nt, Human
gcgaggugcggggcccgcgag

SEQ ID NO: 66869 - RNA, 18 nt, Human
gcgcucugccgcgucucg

SEQ ID NO: 66870 - RNA, 19 nt, Human
gggcgaggaggugaaggga

SEQ ID NO: 66871 - RNA, 20 nt, Human
gggugcaggaacagagaggg

SEQ ID NO: 66872 - RNA, 24 nt, Human
ggugcaggaacagagagggaaaga

SEQ ID NO: 66873 - RNA, 26 nt, Human
uaagaaaaaaaaaagcagaagcugga

SEQ ID NO: 66874 - RNA, 20 nt, Human
uaagaaagggcgaggaggug

SEQ ID NO: 66875 - RNA, 21 nt, Human
ucagagcgauccgggacgcga

SEQ ID NO: 66876 - RNA, 19 nt, Human
uccaaaguccauucgcacc

SEQ ID NO: 66877 - RNA, 23 nt, Human
uccauucgcaccagggccugacc

SEQ ID NO: 66878 - RNA, 19 nt, Human
uccucccuccccuccuccc

SEQ ID NO: 66879 - RNA, 22 nt, Human
ucguuuuuuucuucuucucuuu

SEQ ID NO: 66880 - RNA, 25 nt, Human
ucuaagaaaaaaaaaagcagaagca

SEQ ID NO: 66881 - RNA, 18 nt, Human
ucuucucuuuucuucuuc

SEQ ID NO: 66882 - RNA, 18 nt, Human
ucuucuucucuuuucuuc

SEQ ID NO: 66883 - RNA, 21 nt, Human
ugaaaaugcuuuuucuccucc

SEQ ID NO: 66884 - RNA, 22 nt, Human
ugaaaaugcuuuuucuccuccc

SEQ ID NO: 66885 - RNA, 20 nt, Human
ugacaagaaagcacuaaaga

SEQ ID NO: 66886 - RNA, 21 nt, Human
ugacucaggucccaguugcuc

SEQ ID NO: 66887 - RNA, 24 nt, Human
ugcacacaagcugcauuuugcgca

SEQ ID NO: 66888 - RNA, 20 nt, Human
ugcugcucccuucugccagg

SEQ ID NO: 66889 - RNA, 24 nt, Human
ugggagcaaaaaaagugaaaaugc

SEQ ID NO: 66890 - RNA, 24 nt, Human
uuaaaaaauauauacaaaaucccc

SEQ ID NO: 66891 - RNA, 22 nt, Human
uuacuauaacgcgugugcugcu

SEQ ID NO: 66892 - RNA, 21 nt, Human
uuuccuuuucucccccuccca

SEQ ID NO: 66893 - RNA, 21 nt, Human
uuuuucuuuuccuuuucuccc

SEQ ID NO: 66894 - RNA, 22 nt, Human
uuuuucuuuuccuuuucucccc

SEQ ID NO: 66895 - RNA, 21 nt, Human
aggaggccuagugguggcagg

SEQ ID NO: 66896 - RNA, 24 nt, Human
aggcagaggaaccggaggcgacgg

SEQ ID NO: 66897 - RNA, 19 nt, Human
caggaaggugcaggcagag

SEQ ID NO: 66898 - RNA, 19 nt, Human
cccgcccgcuccagguccc

SEQ ID NO: 66899 - RNA, 21 nt, Human
cccgcccgcuccaggucccgg

SEQ ID NO: 66900 - RNA, 18 nt, Human
ccgcccgcuccagguccc

SEQ ID NO: 66901 - RNA, 18 nt, Human
ccgcccgcuccagguccc

SEQ ID NO: 66902 - RNA, 21 nt, Human
ccgcccgcuccaggucccggc

SEQ ID NO: 66903 - RNA, 21 nt, Human
ccgccgccgucgccuuucuca

SEQ ID NO: 66904 - RNA, 21 nt, Human
ccgccgucgccuuucucacgc

SEQ ID NO: 66905 - RNA, 23 nt, Human
ccgccgucgccuuucucacgccc

SEQ ID NO: 66906 - RNA, 21 nt, Human
ccgcgccgccgccgucgccuu

SEQ ID NO: 66907 - RNA, 23 nt, Human
ccuccgcgccgccgccgucgccu

SEQ ID NO: 66908 - RNA, 24 nt, Human
ccuccgcgccgccgccgucgccuu

SEQ ID NO: 66909 - RNA, 20 nt, Human
ccugcauccacccgcccgcu

SEQ ID NO: 66910 - RNA, 23 nt, Human
cgccgccaggcaacuccccaggg

SEQ ID NO: 66911 - RNA, 20 nt, Human
cgccgccgccgucgccuuuc

SEQ ID NO: 66912 - RNA, 20 nt, Human
cggggaaaacuguggcgccc

SEQ ID NO: 66913 - RNA, 21 nt, Human
cgucuggagcccggggauagg

SEQ ID NO: 66914 - RNA, 19 nt, Human
cuccaggucccggcgcgcc

SEQ ID NO: 66915 - RNA, 18 nt, Human
cuccgcgccgccgccguc

SEQ ID NO: 66916 - RNA, 21 nt, Human
gccgcaggaaggugcaggcag

SEQ ID NO: 66917 - RNA, 22 nt, Human
gccgccaggcaacuccccaggg

SEQ ID NO: 66918 - RNA, 18 nt, Human
gcgccccaagggggcuuc

SEQ ID NO: 66919 - RNA, 18 nt, Human
ggagcccggggauaggag

SEQ ID NO: 66920 - RNA, 19 nt, Human
ggaggccuagugguggcag

SEQ ID NO: 66921 - RNA, 23 nt, Human
ggcgccgccaggcaacuccccag

SEQ ID NO: 66922 - RNA, 21 nt, Human
uaggaggccuagugguggcag

SEQ ID NO: 66923 - RNA, 22 nt, Human
uaggaggccuagugguggcagg

SEQ ID NO: 66924 - RNA, 18 nt, Human
uccaggucccggcgcgcc

SEQ ID NO: 66925 - RNA, 24 nt, Human
ucccggcgcgccgcaggaaggugc

SEQ ID NO: 66926 - RNA, 18 nt, Human
uccgcgccgccgccgucg

SEQ ID NO: 66927 - RNA, 20 nt, Human
uccuaggucgucuggagccc

SEQ ID NO: 66928 - RNA, 19 nt, Human
uccuccgcgccgccgccgu

SEQ ID NO: 66929 - RNA, 19 nt, Human
ucuccgcaggcgcggcgca

SEQ ID NO: 66930 - RNA, 24 nt, Human
uggcgccccaagggggcuucuggg

SEQ ID NO: 66931 - RNA, 24 nt, Human
ugucccgcgcgugcggccggacuc

SEQ ID NO: 66932 - RNA, 20 nt, Human
uguggcgccccaagggggcu

SEQ ID NO: 66933 - RNA, 19 nt, Human
aaaaaaaaaguucacaaug

SEQ ID NO: 66934 - RNA, 22 nt, Human
aaaaaaaaguucacaaugauaa

SEQ ID NO: 66935 - RNA, 24 nt, Human
acccuauccuuccccuucccuuaa

SEQ ID NO: 66936 - RNA, 18 nt, Human
aggcccccagaugggcgg

SEQ ID NO: 66937 - RNA, 21 nt, Human
cagggucucagggucugauuc

SEQ ID NO: 66938 - RNA, 25 nt, Human
ccccagaugggcggauucccaaucc

SEQ ID NO: 66939 - RNA, 22 nt, Human
cccuuaaaauccuagaugaaaa

SEQ ID NO: 66940 - RNA, 18 nt, Human
ccuauccuuccccuuccc

SEQ ID NO: 66941 - RNA, 24 nt, Human
cgaacuaaggagggggcugaagcu

SEQ ID NO: 66942 - RNA, 18 nt, Human
cucaccuucggaacauca

SEQ ID NO: 66943 - RNA, 20 nt, Human
cucagggucugauucccagg

SEQ ID NO: 66944 - RNA, 19 nt, Human
cuucccuuaaaauccuaga

SEQ ID NO: 66945 - RNA, 22 nt, Human
gaacuaaggagggggcugaagc

SEQ ID NO: 66946 - RNA, 22 nt, Human
gaaugggggugggcggacagcc

SEQ ID NO: 66947 - RNA, 18 nt, Human
gcagaagaggcccccaga

SEQ ID NO: 66948 - RNA, 23 nt, Human
gcccccagaugggcggauuccca

SEQ ID NO: 66949 - RNA, 18 nt, Human
ggagggggcugaagcuug

SEQ ID NO: 66950 - RNA, 19 nt, Human
ggcuggcgcuggaccuggg

SEQ ID NO: 66951 - RNA, 21 nt, Human
ggucucagggucugauuccca

SEQ ID NO: 66952 - RNA, 19 nt, Human
uaaccugcaaacugcagaa

SEQ ID NO: 66953 - RNA, 20 nt, Human
uaaggagggggcugaagcuu

SEQ ID NO: 66954 - RNA, 21 nt, Human
ucccaaucccggaccccugcg

SEQ ID NO: 66955 - RNA, 24 nt, Human
ucccuuaaaauccuagaugaaaau

SEQ ID NO: 66956 - RNA, 23 nt, Human
uccuagaugaaaauucccgagaa

SEQ ID NO: 66957 - RNA, 19 nt, Human
ucucagggucugauuccca

SEQ ID NO: 66958 - RNA, 18 nt, Human
ugauaaccugcaaacugc

SEQ ID NO: 66959 - RNA, 22 nt, Human
ugcagaaagcgccacggguuuc

SEQ ID NO: 66960 - RNA, 19 nt, Human
ugccgaacuaaggaggggg

SEQ ID NO: 66961 - RNA, 21 nt, Human
ugcucagggucucagggucug

SEQ ID NO: 66962 - RNA, 24 nt, Human
aacgcagggucggagggguucggg

SEQ ID NO: 66963 - RNA, 23 nt, Human
acgcagggucggagggguucggg

SEQ ID NO: 66964 - RNA, 24 nt, Human
acgcagggucggagggguucgggg

SEQ ID NO: 66965 - RNA, 22 nt, Human
agaagccagagcugggcaggug

SEQ ID NO: 66966 - RNA, 18 nt, Human
agaguggaggaggggcug

SEQ ID NO: 66967 - RNA, 22 nt, Human
agaguggaggaggggcuggucc

SEQ ID NO: 66968 - RNA, 19 nt, Human
agcucuuccccauaccccu

SEQ ID NO: 66969 - RNA, 20 nt, Human
aggugcagauucacguggag

SEQ ID NO: 66970 - RNA, 19 nt, Human
aucugugaaagguguggag

SEQ ID NO: 66971 - RNA, 23 nt, Human
caaaauccucaacagagaagcca

SEQ ID NO: 66972 - RNA, 26 nt, Human
caacagagaagccagagcugggcagg

SEQ ID NO: 66973 - RNA, 27 nt, Human
caacagagaagccagagcugggcagga

SEQ ID NO: 66974 - RNA, 22 nt, Human
caaggagggguuaaagccagga

SEQ ID NO: 66975 - RNA, 25 nt, Human
cccgggcuggagcuggagcuggagc

SEQ ID NO: 66976 - RNA, 25 nt, Human
cccgggcuggagcuggagcuggagc

SEQ ID NO: 66977 - RNA, 25 nt, Human
cccgggcuggagcuggagcuggagc

SEQ ID NO: 66978 - RNA, 18 nt, Human
ccuggccuuggccaagga

SEQ ID NO: 66979 - RNA, 24 nt, Human
cuaccuccuuucucucuuugcuca

SEQ ID NO: 66980 - RNA, 25 nt, Human
cugagguugcucugagggcuggggc

SEQ ID NO: 66981 - RNA, 25 nt, Human
cugagguugcucugagggcuggggc

SEQ ID NO: 66982 - RNA, 23 nt, Human
cuggagcuggagcugggcugggc

SEQ ID NO: 66983 - RNA, 23 nt, Human
cuggggcagaggugcagauucac

SEQ ID NO: 66984 - RNA, 22 nt, Human
gaagaggcugacgauuauaaua

SEQ ID NO: 66985 - RNA, 21 nt, Human
gagaagccagagcugggcagg

SEQ ID NO: 66986 - RNA, 23 nt, Human
gagaagccagagcugggcaggug

SEQ ID NO: 66987 - RNA, 21 nt, Human
gaggaggggcugguccgggca

SEQ ID NO: 66988 - RNA, 24 nt, Human
gagggcuggggcuggggcagaggu

SEQ ID NO: 66989 - RNA, 20 nt, Human
gaucugugaaagguguggag

SEQ ID NO: 66990 - RNA, 23 nt, Human
gcuggagcugggcugggcugggc

SEQ ID NO: 66991 - RNA, 20 nt, Human
ggagaggagaguggaggagg

SEQ ID NO: 66992 - RNA, 22 nt, Human
ggagcuggagcuggagcugggc

SEQ ID NO: 66993 - RNA, 22 nt, Human
ggagcuggagcuggagcugggc

SEQ ID NO: 66994 - RNA, 22 nt, Human
ggagcuggagcuggagcugggc

SEQ ID NO: 66995 - RNA, 18 nt, Human
ggagcuggagcugggcug

SEQ ID NO: 66996 - RNA, 18 nt, Human
ggagcuggagcugggcug

SEQ ID NO: 66997 - RNA, 20 nt, Human
ggagcuggagcugggcuggg

SEQ ID NO: 66998 - RNA, 20 nt, Human
ggagcuggagcugggcuggg

SEQ ID NO: 66999 - RNA, 20 nt, Human
ggagcuggagcugggcuggg

SEQ ID NO: 67000 - RNA, 21 nt, Human
ggagcuggagcugggcugggc

SEQ ID NO: 67001 - RNA, 21 nt, Human
ggagcuggagcugggcugggc

SEQ ID NO: 67002 - RNA, 21 nt, Human
ggagcuggagcugggcugggc

SEQ ID NO: 67003 - RNA, 19 nt, Human
ggagcugggcugggcuggg

SEQ ID NO: 67004 - RNA, 19 nt, Human
ggagcugggcugggcuggg

SEQ ID NO: 67005 - RNA, 19 nt, Human
ggagcugggcugggcuggg

SEQ ID NO: 67006 - RNA, 20 nt, Human
ggagcugggcugggcugggc

SEQ ID NO: 67007 - RNA, 20 nt, Human
ggagcugggcugggcugggc

SEQ ID NO: 67008 - RNA, 20 nt, Human
ggagcugggcugggcugggc

SEQ ID NO: 67009 - RNA, 19 nt, Human
ggagguugauggugggaug

SEQ ID NO: 67010 - RNA, 25 nt, Human
ggauggaacgcagggucggaggggu

SEQ ID NO: 67011 - RNA, 21 nt, Human
ggccaaggagggguuaaagcc

SEQ ID NO: 67012 - RNA, 22 nt, Human
ggccuuggccaaggagggguua

SEQ ID NO: 67013 - RNA, 18 nt, Human
ggcugagguugcucugag

SEQ ID NO: 67014 - RNA, 18 nt, Human
ggcugagguugcucugag

SEQ ID NO: 67015 - RNA, 18 nt, Human
ggcugagguugcucugag

SEQ ID NO: 67016 - RNA, 23 nt, Human
gggcugggcugggcugagguugc

SEQ ID NO: 67017 - RNA, 23 nt, Human
gggcugggcugggcugagguugc

SEQ ID NO: 67018 - RNA, 23 nt, Human
gggcugggcugggcugagguugc

SEQ ID NO: 67019 - RNA, 23 nt, Human
gggcuggggcagaggugcagauu

SEQ ID NO: 67020 - RNA, 19 nt, Human
gguguggagagcggacgcc

SEQ ID NO: 67021 - RNA, 18 nt, Human
gucagggacucuuaaacu

SEQ ID NO: 67022 - RNA, 21 nt, Human
ucagcucuuccccauaccccu

SEQ ID NO: 67023 - RNA, 23 nt, Human
uccccauaccccugucucagugu

SEQ ID NO: 67024 - RNA, 21 nt, Human
ucccgcaggcaacccuggccu

SEQ ID NO: 67025 - RNA, 18 nt, Human
ugcucugagggcuggggc

SEQ ID NO: 67026 - RNA, 18 nt, Human
ugcucugagggcuggggc

SEQ ID NO: 67027 - RNA, 19 nt, Human
uggagcuggagcugggcug

SEQ ID NO: 67028 - RNA, 19 nt, Human
uggagcuggagcugggcug

SEQ ID NO: 67029 - RNA, 19 nt, Human
uggagcuggagcugggcug

SEQ ID NO: 67030 - RNA, 22 nt, Human
uggagcuggagcugggcugggc

SEQ ID NO: 67031 - RNA, 22 nt, Human
uggagcuggagcugggcugggc

SEQ ID NO: 67032 - RNA, 18 nt, Human
uggagcugggcugggcug

SEQ ID NO: 67033 - RNA, 18 nt, Human
uggagcugggcugggcug

SEQ ID NO: 67034 - RNA, 21 nt, Human
uggagcugggcugggcugggc

SEQ ID NO: 67035 - RNA, 21 nt, Human
uggagcugggcugggcugggc

SEQ ID NO: 67036 - RNA, 21 nt, Human
uggagcugggcugggcugggc

SEQ ID NO: 67037 - RNA, 19 nt, Human
ugggaucucaguccuccag

SEQ ID NO: 67038 - RNA, 23 nt, Human
ugggcugggcugagguugcucug

SEQ ID NO: 67039 - RNA, 23 nt, Human
ugggcugggcugagguugcucug

SEQ ID NO: 67040 - RNA, 23 nt, Human
ugggcugggcugagguugcucug

SEQ ID NO: 67041 - RNA, 19 nt, Human
ugggcugggcugggcugag

SEQ ID NO: 67042 - RNA, 19 nt, Human
ugggcugggcugggcugag

SEQ ID NO: 67043 - RNA, 19 nt, Human
ugggcugggcugggcugag

SEQ ID NO: 67044 - RNA, 21 nt, Human
ugggcugggcugggcugaggu

SEQ ID NO: 67045 - RNA, 21 nt, Human
ugggcugggcugggcugaggu

SEQ ID NO: 67046 - RNA, 21 nt, Human
ugggcugggcugggcugaggu

SEQ ID NO: 67047 - RNA, 21 nt, Human
uggggcccgggcuggagcugg

SEQ ID NO: 67048 - RNA, 21 nt, Human
uggggcccgggcuggagcugg

SEQ ID NO: 67049 - RNA, 21 nt, Human
uggggcccgggcuggagcugg

SEQ ID NO: 67050 - RNA, 22 nt, Human
uguggagagcggacgccuggcu

SEQ ID NO: 67051 - RNA, 24 nt, Human
uugaagaggcugacgauuauaaua

SEQ ID NO: 67052 - RNA, 19 nt, Human
aaaacaaggaucuccaaaa

SEQ ID NO: 67053 - RNA, 19 nt, Human
aaaacucgaaaccagcauc

SEQ ID NO: 67054 - RNA, 24 nt, Human
aaacaaggaucuccaaaacucgaa

SEQ ID NO: 67055 - RNA, 21 nt, Human
aacaacauggccccauucccc

SEQ ID NO: 67056 - RNA, 19 nt, Human
aacauggccccauuccccu

SEQ ID NO: 67057 - RNA, 23 nt, Human
aacccuuuccucucccucuccac

SEQ ID NO: 67058 - RNA, 19 nt, Human
aagaacuaccgugcccuuc

SEQ ID NO: 67059 - RNA, 19 nt, Human
aaggcuaaagggggcaaac

SEQ ID NO: 67060 - RNA, 21 nt, Human
aaggugaagcaauggagaaga

SEQ ID NO: 67061 - RNA, 22 nt, Human
aaguggggaagaggggguggcc

SEQ ID NO: 67062 - RNA, 23 nt, Human
acagaacccuuuccucucccucu

SEQ ID NO: 67063 - RNA, 20 nt, Human
acccuuuccucucccucucc

SEQ ID NO: 67064 - RNA, 23 nt, Human
accuaaugucaacaacauggccc

SEQ ID NO: 67065 - RNA, 20 nt, Human
agagguagggagggggcagc

SEQ ID NO: 67066 - RNA, 27 nt, Human
agcaauggagaagaaaaagggagggcc

SEQ ID NO: 67067 - RNA, 18 nt, Human
agcaggaggcaggacuga

SEQ ID NO: 67068 - RNA, 22 nt, Human
aggagaagggaaagguggaagg

SEQ ID NO: 67069 - RNA, 24 nt, Human
aggccgaggccgagagcgaugaga

SEQ ID NO: 67070 - RNA, 18 nt, Human
agggaaguggggaagagg

SEQ ID NO: 67071 - RNA, 18 nt, Human
agggaaguggggaagagg

SEQ ID NO: 67072 - RNA, 18 nt, Human
agguagggagggggcagc

SEQ ID NO: 67073 - RNA, 23 nt, Human
auaaaaaacaaggaucuccaaaa

SEQ ID NO: 67074 - RNA, 21 nt, Human
auaggaagcagcuucuucgca

SEQ ID NO: 67075 - RNA, 19 nt, Human
auggccccauuccccuugc

SEQ ID NO: 67076 - RNA, 19 nt, Human
auuccauuuuggggaguag

SEQ ID NO: 67077 - RNA, 21 nt, Human
caaugugguccucccuccucu

SEQ ID NO: 67078 - RNA, 19 nt, Human
cagaaaaaccuaagcugug

SEQ ID NO: 67079 - RNA, 18 nt, Human
cagaacccuuuccucucc

SEQ ID NO: 67080 - RNA, 22 nt, Human
caggacugauuagcuccacugg

SEQ ID NO: 67081 - RNA, 23 nt, Human
cauaaaaaacaaggaucuccaaa

SEQ ID NO: 67082 - RNA, 23 nt, Human
caucaaugugguccucccuccuc

SEQ ID NO: 67083 - RNA, 19 nt, Human
caucuuucucgugucggag

SEQ ID NO: 67084 - RNA, 23 nt, Human
ccaaaacucgaaaccagcaucuu

SEQ ID NO: 67085 - RNA, 24 nt, Human
cccaccccugucuauacccagaga

SEQ ID NO: 67086 - RNA, 19 nt, Human
cccauuccccuugcccaga

SEQ ID NO: 67087 - RNA, 18 nt, Human
ccccauuccccuugccca

SEQ ID NO: 67088 - RNA, 21 nt, Human
ccuccgcuucccuggguccac

SEQ ID NO: 67089 - RNA, 22 nt, Human
ccucucccucuccacuagcucc

SEQ ID NO: 67090 - RNA, 24 nt, Human
ccuugcccagauggacccuuccca

SEQ ID NO: 67091 - RNA, 22 nt, Human
cgagagaggagaagggaaaggu

SEQ ID NO: 67092 - RNA, 22 nt, Human
cgaggccgaggccgagagcgau

SEQ ID NO: 67093 - RNA, 28 nt, Human
cucacauuuuacuuugaccugguugggc

SEQ ID NO: 67094 - RNA, 22 nt, Human
cuccucucuacauuauuaaccc

SEQ ID NO: 67095 - RNA, 22 nt, Human
cuguguuccauaaaaaacaagg

SEQ ID NO: 67096 - RNA, 18 nt, Human
gaaaaaccuaagcugugg

SEQ ID NO: 67097 - RNA, 21 nt, Human
gagcugucaacucacauuuua

SEQ ID NO: 67098 - RNA, 22 nt, Human
gaggccgaggccgaggccgaga

SEQ ID NO: 67099 - RNA, 23 nt, Human
gaguagagguagggagggggcag

SEQ ID NO: 67100 - RNA, 20 nt, Human
gccgaggccgagagcgauga

SEQ ID NO: 67101 - RNA, 18 nt, Human
ggacccuucccaccccug

SEQ ID NO: 67102 - RNA, 20 nt, Human
ggcuccuccgcuucccuggg

SEQ ID NO: 67103 - RNA, 26 nt, Human
ggggaguagagguagggagggggcag

SEQ ID NO: 67104 - RNA, 22 nt, Human
guagcucuuggagccaacagag

SEQ ID NO: 67105 - RNA, 24 nt, Human
gugggguggggcaaaugcuauaaa

SEQ ID NO: 67106 - RNA, 22 nt, Human
uaaaaaacaaggaucuccaaaa

SEQ ID NO: 67107 - RNA, 24 nt, Human
uaaaaaacaaggaucuccaaaacu

SEQ ID NO: 67108 - RNA, 19 nt, Human
uaccuggguauaggaagca

SEQ ID NO: 67109 - RNA, 21 nt, Human
uaucccaugauuccauuuugg

SEQ ID NO: 67110 - RNA, 23 nt, Human
uaucccaugauuccauuuugggg

SEQ ID NO: 67111 - RNA, 19 nt, Human
ucccucuccacuagcucca

SEQ ID NO: 67112 - RNA, 19 nt, Human
ucggaggccgaggccgagg

SEQ ID NO: 67113 - RNA, 21 nt, Human
ucuauacccagagagcaggag

SEQ ID NO: 67114 - RNA, 23 nt, Human
ucuauacccagagagcaggaggc

SEQ ID NO: 67115 - RNA, 21 nt, Human
ucuuggacagaacccuuuccu

SEQ ID NO: 67116 - RNA, 18 nt, Human
ugacagaaaaaccuaagc

SEQ ID NO: 67117 - RNA, 19 nt, Human
ugacagaaaaaccuaagcu

SEQ ID NO: 67118 - RNA, 21 nt, Human
ugcagggaaguggggaagagg

SEQ ID NO: 67119 - RNA, 18 nt, Human
ugccaaggaaucuuauga

SEQ ID NO: 67120 - RNA, 18 nt, Human
uggacccuucccaccccu

SEQ ID NO: 67121 - RNA, 21 nt, Human
uggccgccaggcuccuccgcu

SEQ ID NO: 67122 - RNA, 22 nt, Human
ugggggccuucccuaucccaug

SEQ ID NO: 67123 - RNA, 18 nt, Human
uucccuggguccacggcg

SEQ ID NO: 67124 - RNA, 23 nt, Human
aaaacaaaaacaaaacccccagu

SEQ ID NO: 67125 - RNA, 19 nt, Human
acccccaguauuauuccca

SEQ ID NO: 67126 - RNA, 23 nt, Human
agacaguucaaaaacaaaaacaa

SEQ ID NO: 67127 - RNA, 22 nt, Human
agggggcuuaugcaauccugga

SEQ ID NO: 67128 - RNA, 26 nt, Human
augguacacaaaauaagagcagucac

SEQ ID NO: 67129 - RNA, 23 nt, Human
caaaaacaaaaacaaaaccccca

SEQ ID NO: 67130 - RNA, 24 nt, Human
caaaaacaaaaacaaaacccccag

SEQ ID NO: 67131 - RNA, 21 nt, Human
cacuggaaguggggagaaaau

SEQ ID NO: 67132 - RNA, 21 nt, Human
cagcgguuguuggcuuauggu

SEQ ID NO: 67133 - RNA, 23 nt, Human
cagggggcuuaugcaauccugga

SEQ ID NO: 67134 - RNA, 24 nt, Human
cuguguuuuuagcaucuuugggag

SEQ ID NO: 67135 - RNA, 28 nt, Human
gaaaauggugaaaggcaggccgguaccc

SEQ ID NO: 67136 - RNA, 24 nt, Human
gaacauuugagacaguucaaaaac

SEQ ID NO: 67137 - RNA, 23 nt, Human
ggguaugcaguacagcaccgauu

SEQ ID NO: 67138 - RNA, 23 nt, Human
ucaaaaacaaaaacaaaaccccc

SEQ ID NO: 67139 - RNA, 18 nt, Human
ucaaugcccacagaagga

SEQ ID NO: 67140 - RNA, 21 nt, Human
ugaaaggcaggcagucucccg

SEQ ID NO: 67141 - RNA, 24 nt, Human
uguguuuuuagcaucuuugggaga

SEQ ID NO: 67142 - RNA, 20 nt, Human
uuaccauuuccuuggaaaac

SEQ ID NO: 67143 - RNA, 21 nt, Human
uuaccauuuccuuggaaaaca

SEQ ID NO: 67144 - RNA, 22 nt, Human
uucaaaaacaaaaacaaaaccc

SEQ ID NO: 67145 - RNA, 24 nt, Human
uugagacaguucaaaaacaaaaac

SEQ ID NO: 67146 - RNA, 21 nt, Human
uugauuucagguguucucaga

SEQ ID NO: 67147 - RNA, 21 nt, Human
aagcagcugacaucagggcag

SEQ ID NO: 67148 - RNA, 24 nt, Human
aagcagcugacaucagggcagggg

SEQ ID NO: 67149 - RNA, 23 nt, Human
aagcgggaagaggacagggacag

SEQ ID NO: 67150 - RNA, 22 nt, Human
aaggucuccugcccccucccua

SEQ ID NO: 67151 - RNA, 21 nt, Human
accgcccccaggccucuccca

SEQ ID NO: 67152 - RNA, 23 nt, Human
acgccgcgcagccccagccgcuc

SEQ ID NO: 67153 - RNA, 24 nt, Human
acugggagcugggccaggccugcu

SEQ ID NO: 67154 - RNA, 23 nt, Human
agaagggacucuagggguggggc

SEQ ID NO: 67155 - RNA, 19 nt, Human
agcagcccuggugcccucc

SEQ ID NO: 67156 - RNA, 21 nt, Human
agccagcagcccuggugcccu

SEQ ID NO: 67157 - RNA, 21 nt, Human
agccucccugcccugucccuc

SEQ ID NO: 67158 - RNA, 21 nt, Human
agcugggccaggccugcuggg

SEQ ID NO: 67159 - RNA, 20 nt, Human
agggguggggcuggugcagg

SEQ ID NO: 67160 - RNA, 20 nt, Human
aguggcagugguggcagcgg

SEQ ID NO: 67161 - RNA, 23 nt, Human
aguggcagugguggcagcggcug

SEQ ID NO: 67162 - RNA, 22 nt, Human
aucagggcaggggaggaugaga

SEQ ID NO: 67163 - RNA, 21 nt, Human
caaagcagcugacaucagggc

SEQ ID NO: 67164 - RNA, 24 nt, Human
cacccuccaagcucagccgaaguc

SEQ ID NO: 67165 - RNA, 19 nt, Human
cagagggcucccccucccc

SEQ ID NO: 67166 - RNA, 19 nt, Human
cagcacagcugucagcccc

SEQ ID NO: 67167 - RNA, 21 nt, Human
cagcacagcugucagccccug

SEQ ID NO: 67168 - RNA, 20 nt, Human
cagcagcccuggugcccucc

SEQ ID NO: 67169 - RNA, 18 nt, Human
cagggugggggcccgagg

SEQ ID NO: 67170 - RNA, 23 nt, Human
ccaccccuguagcccuacccacc

SEQ ID NO: 67171 - RNA, 18 nt, Human
ccacccuccaagcucagc

SEQ ID NO: 67172 - RNA, 21 nt, Human
ccagcagcccuggugcccucc

SEQ ID NO: 67173 - RNA, 18 nt, Human
cccagcacuccugagucc

SEQ ID NO: 67174 - RNA, 20 nt, Human
cccagcagcuccgcagcccu

SEQ ID NO: 67175 - RNA, 18 nt, Human
cccaggccucucccagga

SEQ ID NO: 67176 - RNA, 19 nt, Human
ccccacccggcuuucccua

SEQ ID NO: 67177 - RNA, 20 nt, Human
cccccucccucuccuuccuu

SEQ ID NO: 67178 - RNA, 21 nt, Human
ccccucccucuccuuccuucc

SEQ ID NO: 67179 - RNA, 19 nt, Human
cccggggcaccagccuggg

SEQ ID NO: 67180 - RNA, 22 nt, Human
cccuccccccacccggcuuucc

SEQ ID NO: 67181 - RNA, 20 nt, Human
cccucccucuccuuccuucc

SEQ ID NO: 67182 - RNA, 19 nt, Human
cccugucccucccuagcca

SEQ ID NO: 67183 - RNA, 18 nt, Human
ccgcagcccuggugcugc

SEQ ID NO: 67184 - RNA, 19 nt, Human
ccgcugcugccucugcugc

SEQ ID NO: 67185 - RNA, 25 nt, Human
ccuccaagcucagccgaagucugga

SEQ ID NO: 67186 - RNA, 23 nt, Human
ccucccugcccugucccucccua

SEQ ID NO: 67187 - RNA, 21 nt, Human
ccugcccccucccuauagaag

SEQ ID NO: 67188 - RNA, 19 nt, Human
ccuguagcccuacccaccu

SEQ ID NO: 67189 - RNA, 24 nt, Human
ccuuaucagcaccagcacagcugu

SEQ ID NO: 67190 - RNA, 20 nt, Human
ccuuccuucccuuccucucc

SEQ ID NO: 67191 - RNA, 26 nt, Human
ccuucuacaucuguauccccuccccc

SEQ ID NO: 67192 - RNA, 18 nt, Human
cgaggugggggagucacu

SEQ ID NO: 67193 - RNA, 18 nt, Human
cgccacgccgcgcagccc

SEQ ID NO: 67194 - RNA, 23 nt, Human
cggcugcugggacuggccagagc

SEQ ID NO: 67195 - RNA, 19 nt, Human
cucagggcaagcgggaaga

SEQ ID NO: 67196 - RNA, 20 nt, Human
cucccccucccucuccuucc

SEQ ID NO: 67197 - RNA, 21 nt, Human
cucccuagccagcagcccugg

SEQ ID NO: 67198 - RNA, 21 nt, Human
cuccgcagcccuggugcugcc

SEQ ID NO: 67199 - RNA, 22 nt, Human
cuccgcagcccuggugcugccu

SEQ ID NO: 67200 - RNA, 24 nt, Human
cuccgccacgccgcgcagccccag

SEQ ID NO: 67201 - RNA, 20 nt, Human
cugccaagaggggagcuggg

SEQ ID NO: 67202 - RNA, 21 nt, Human
cugcugccucugcugccgcuu

SEQ ID NO: 67203 - RNA, 20 nt, Human
cuggugcccucccgaguggc

SEQ ID NO: 67204 - RNA, 18 nt, Human
gacagggacagggugggg

SEQ ID NO: 67205 - RNA, 22 nt, Human
gacagggugggggcccgaggug

SEQ ID NO: 67206 - RNA, 22 nt, Human
gacauuggggcugggacccugg

SEQ ID NO: 67207 - RNA, 23 nt, Human
gacauuggggcugggacccuggc

SEQ ID NO: 67208 - RNA, 22 nt, Human
gaggaugagagcaggaacugag

SEQ ID NO: 67209 - RNA, 23 nt, Human
gagggagagaggacugagaaggc

SEQ ID NO: 67210 - RNA, 20 nt, Human
gcagcuccgcagcccuggug

SEQ ID NO: 67211 - RNA, 23 nt, Human
gcagggggaacugggagcugggg

SEQ ID NO: 67212 - RNA, 20 nt, Human
gccaagaggggagcugggcc

SEQ ID NO: 67213 - RNA, 21 nt, Human
gccacgccgcgcagccccagc

SEQ ID NO: 67214 - RNA, 24 nt, Human
gcccauggccuggucuccagcccu

SEQ ID NO: 67215 - RNA, 18 nt, Human
gcugccucugccgcugcu

SEQ ID NO: 67216 - RNA, 18 nt, Human
ggacagggacaggguggg

SEQ ID NO: 67217 - RNA, 23 nt, Human
ggagaaugugcuggggaucccag

SEQ ID NO: 67218 - RNA, 20 nt, Human
ggccagagccucccugcccu

SEQ ID NO: 67219 - RNA, 18 nt, Human
ggccaggccugcugggcc

SEQ ID NO: 67220 - RNA, 25 nt, Human
ggcuggugcagggggaacugggagc

SEQ ID NO: 67221 - RNA, 22 nt, Human
gggacucuagggguggggcugg

SEQ ID NO: 67222 - RNA, 18 nt, Human
ggggaacugggagcuggg

SEQ ID NO: 67223 - RNA, 22 nt, Human
gggguguggacaagaaggaccu

SEQ ID NO: 67224 - RNA, 20 nt, Human
ggguguggacaagaaggacc

SEQ ID NO: 67225 - RNA, 20 nt, Human
ggguguggacaagaaggacc

SEQ ID NO: 67226 - RNA, 24 nt, Human
gugcugccucugccgcugcugccu

SEQ ID NO: 67227 - RNA, 20 nt, Human
guggcagcggcugcucuucu

SEQ ID NO: 67228 - RNA, 29 nt, Human
guggcagugguggcagcggcugcucuucu

SEQ ID NO: 67229 - RNA, 24 nt, Human
gugggggcccgaggugggggaguc

SEQ ID NO: 67230 - RNA, 19 nt, Human
uacagagggcucccccucc

SEQ ID NO: 67231 - RNA, 25 nt, Human
uaggaccagcccagcacuccugagu

SEQ ID NO: 67232 - RNA, 21 nt, Human
ucagggcaggggaggaugaga

SEQ ID NO: 67233 - RNA, 19 nt, Human
ucccacccuccaagcucag

SEQ ID NO: 67234 - RNA, 24 nt, Human
ucccacccuccaagcucagccgaa

SEQ ID NO: 67235 - RNA, 23 nt, Human
ucccacucccagcagcuccgcag

SEQ ID NO: 67236 - RNA, 19 nt, Human
ucccccucccucuccuucc

SEQ ID NO: 67237 - RNA, 20 nt, Human
ucccgaguggcagugguggc

SEQ ID NO: 67238 - RNA, 21 nt, Human
ucccuaaaucacccaccccug

SEQ ID NO: 67239 - RNA, 21 nt, Human
uccgcagcccuggugcugccu

SEQ ID NO: 67240 - RNA, 19 nt, Human
uccgccacgccgcgcagcc

SEQ ID NO: 67241 - RNA, 23 nt, Human
uccgccacgccgcgcagccccag

SEQ ID NO: 67242 - RNA, 18 nt, Human
uccugaguccuggggcuc

SEQ ID NO: 67243 - RNA, 19 nt, Human
uccuuccuucccuuccucu

SEQ ID NO: 67244 - RNA, 20 nt, Human
uccuuccuucccuuccucuc

SEQ ID NO: 67245 - RNA, 28 nt, Human
ucuacaucuguauccccuccccccaccc

SEQ ID NO: 67246 - RNA, 23 nt, Human
ucuccugcccccucccuauagaa

SEQ ID NO: 67247 - RNA, 24 nt, Human
ucuggaaggucuccugcccccucc

SEQ ID NO: 67248 - RNA, 21 nt, Human
ucuguauccccuccccccacc

SEQ ID NO: 67249 - RNA, 21 nt, Human
ugacauuggggcugggacccu

SEQ ID NO: 67250 - RNA, 23 nt, Human
ugacauuggggcugggacccugg

SEQ ID NO: 67251 - RNA, 22 nt, Human
ugagagcaggaacugaguccug

SEQ ID NO: 67252 - RNA, 23 nt, Human
ugagagcaggaacugaguccugg

SEQ ID NO: 67253 - RNA, 20 nt, Human
ugaguccuggggcucucccu

SEQ ID NO: 67254 - RNA, 21 nt, Human
ugccaagaggggagcugggcc

SEQ ID NO: 67255 - RNA, 21 nt, Human
ugcccugucccucccuagcca

SEQ ID NO: 67256 - RNA, 24 nt, Human
ugccucugccgcugcugccucugc

SEQ ID NO: 67257 - RNA, 25 nt, Human
ugcuccgccacgccgcgcagcccca

SEQ ID NO: 67258 - RNA, 18 nt, Human
uggaaggucuccugcccc

SEQ ID NO: 67259 - RNA, 21 nt, Human
uggaaggucuccugcccccuc

SEQ ID NO: 67260 - RNA, 18 nt, Human
uggagggagagaggacug

SEQ ID NO: 67261 - RNA, 19 nt, Human
uggcagugguggcagcggc

SEQ ID NO: 67262 - RNA, 24 nt, Human
uggggauaagggguguggacaaga

SEQ ID NO: 67263 - RNA, 28 nt, Human
uggggcuggugcagggggaacugggagc

SEQ ID NO: 67264 - RNA, 18 nt, Human
uggugcagggggaacugg

SEQ ID NO: 67265 - RNA, 22 nt, Human
ugguggcagcggcugcucuucu

SEQ ID NO: 67266 - RNA, 24 nt, Human
ugucccuaaaucacccaccccugu

SEQ ID NO: 67267 - RNA, 19 nt, Human
ugugcaaagcagcugacau

SEQ ID NO: 67268 - RNA, 23 nt, Human
uucccuuccucuccgugagggcc

SEQ ID NO: 67269 - RNA, 23 nt, Human
uuucccuaaauauuuacaaaugu

SEQ ID NO: 67270 - RNA, 23 nt, Human
caagccaggucucccugaagucc

SEQ ID NO: 67271 - RNA, 19 nt, Human
ccccgcguccccgaagccc

SEQ ID NO: 67272 - RNA, 26 nt, Human
ccccgcguccccgaagcccugccugc

SEQ ID NO: 67273 - RNA, 19 nt, Human
cccgaagcccugccugcuc

SEQ ID NO: 67274 - RNA, 19 nt, Human
cccgccugcagcccuggga

SEQ ID NO: 67275 - RNA, 18 nt, Human
ccgcccgagaagcgcccc

SEQ ID NO: 67276 - RNA, 22 nt, Human
ccugccugcucgcggccgggag

SEQ ID NO: 67277 - RNA, 19 nt, Human
cgcggccgggagugggggc

SEQ ID NO: 67278 - RNA, 22 nt, Human
cuggaaccuccgcccgccugca

SEQ ID NO: 67279 - RNA, 18 nt, Human
gaagcgccccgcgucccc

SEQ ID NO: 67280 - RNA, 18 nt, Human
ucccugaagucccaucuc

SEQ ID NO: 67281 - RNA, 19 nt, Human
acaaacgagugggcugcgg

SEQ ID NO: 67282 - RNA, 18 nt, Human
acaggacggccgccucuc

SEQ ID NO: 67283 - RNA, 21 nt, Human
agccucagagagcucgugccg

SEQ ID NO: 67284 - RNA, 24 nt, Human
caggacggccgccucucuccuucc

SEQ ID NO: 67285 - RNA, 24 nt, Human
cauuccguugcucucucagucuca

SEQ ID NO: 67286 - RNA, 20 nt, Human
ccccgcccccucacgccgcc

SEQ ID NO: 67287 - RNA, 21 nt, Human
ccccucacgccgccguccuuc

SEQ ID NO: 67288 - RNA, 19 nt, Human
ccccucgugccugccuucu

SEQ ID NO: 67289 - RNA, 24 nt, Human
cccucacgccgccguccuucucgc

SEQ ID NO: 67290 - RNA, 26 nt, Human
ccgccguccuucucgcgccucgcucu

SEQ ID NO: 67291 - RNA, 22 nt, Human
ccgcgaaagcacggcuuccccc

SEQ ID NO: 67292 - RNA, 20 nt, Human
ccggagaaagugucgcaccg

SEQ ID NO: 67293 - RNA, 22 nt, Human
ccggcaccuacaugcugggucc

SEQ ID NO: 67294 - RNA, 22 nt, Human
ccggcuccaaggcgcggaggag

SEQ ID NO: 67295 - RNA, 19 nt, Human
ccgggcucucgguccgccg

SEQ ID NO: 67296 - RNA, 22 nt, Human
cgugccugccuucucgcgcugc

SEQ ID NO: 67297 - RNA, 22 nt, Human
cuccuuccgccagcuacggccu

SEQ ID NO: 67298 - RNA, 23 nt, Human
cucgaguuuuuuuuuuuuuuuuu

SEQ ID NO: 67299 - RNA, 27 nt, Human
cucgcgcucgccccucgugccugccuu

SEQ ID NO: 67300 - RNA, 20 nt, Human
gaguuuuuuuuuuuuuuuuu

SEQ ID NO: 67301 - RNA, 22 nt, Human
gaguuuuuuuuuuuuuuuuuuu

SEQ ID NO: 67302 - RNA, 18 nt, Human
gccucgcgcucgccccuc

SEQ ID NO: 67303 - RNA, 19 nt, Human
gcgcagccucagagagcuc

SEQ ID NO: 67304 - RNA, 21 nt, Human
gcgccucgcucuggcccugca

SEQ ID NO: 67305 - RNA, 20 nt, Human
gcucuggcccugcagguugu

SEQ ID NO: 67306 - RNA, 18 nt, Human
guguuuccgccucuaccc

SEQ ID NO: 67307 - RNA, 23 nt, Human
guugacaggacggccgccucucu

SEQ ID NO: 67308 - RNA, 21 nt, Human
uccggggccggauccggcucc

SEQ ID NO: 67309 - RNA, 18 nt, Human
ucgcgcugcgcgccccgc

SEQ ID NO: 67310 - RNA, 22 nt, Human
ucgcgcugcgcgccccgccccc

SEQ ID NO: 67311 - RNA, 23 nt, Human
ucgugccugccuucucgcgcugc

SEQ ID NO: 67312 - RNA, 21 nt, Human
ucucacgccacgcgccgugcc

SEQ ID NO: 67313 - RNA, 24 nt, Human
ucucacgccacgcgccgugccccg

SEQ ID NO: 67314 - RNA, 18 nt, Human
ucucucagucucagaccc

SEQ ID NO: 67315 - RNA, 24 nt, Human
ucucuccuuccgccagcuacggcc

SEQ ID NO: 67316 - RNA, 22 nt, Human
ugaaaacgcgucacgcggccgc

SEQ ID NO: 67317 - RNA, 18 nt, Human
uguuuccgccucuacccc

SEQ ID NO: 67318 - RNA, 23 nt, Human
uugacaggacggccgccucucuc

SEQ ID NO: 67319 - RNA, 19 nt, Human
uuuuuuuuuuuuuuuuuaa

SEQ ID NO: 67320 - RNA, 19 nt, Human
aaagugcugggauuacagg

SEQ ID NO: 67321 - RNA, 18 nt, Human
aagugcugggauuacagg

SEQ ID NO: 67322 - RNA, 19 nt, Human
aagugcugggauuacaggc

SEQ ID NO: 67323 - RNA, 19 nt, Human
aagugcugggauuacaggc

SEQ ID NO: 67324 - RNA, 24 nt, Human
acacagcagccuccucucgcgccc

SEQ ID NO: 67325 - RNA, 20 nt, Human
accuccuuggccagcagggu

SEQ ID NO: 67326 - RNA, 19 nt, Human
agcaacgagggagccaggc

SEQ ID NO: 67327 - RNA, 21 nt, Human
agcccagcaacgagggagccc

SEQ ID NO: 67328 - RNA, 21 nt, Human
agccccgaaagcccagcaacg

SEQ ID NO: 67329 - RNA, 19 nt, Human
aggccacccugcccugccu

SEQ ID NO: 67330 - RNA, 24 nt, Human
aggcugugucaaacuccuggccuc

SEQ ID NO: 67331 - RNA, 18 nt, Human
agugcugggauuacaggc

SEQ ID NO: 67332 - RNA, 24 nt, Human
auuuguuuuauuauugaguagaga

SEQ ID NO: 67333 - RNA, 23 nt, Human
caaagugcugggauuacaggcca

SEQ ID NO: 67334 - RNA, 21 nt, Human
cacgcccgucccgcccauccg

SEQ ID NO: 67335 - RNA, 21 nt, Human
cagccccgaaagcccagcaac

SEQ ID NO: 67336 - RNA, 22 nt, Human
cagcccuuggggacgcggacgu

SEQ ID NO: 67337 - RNA, 18 nt, Human
caggaaacacacagcagc

SEQ ID NO: 67338 - RNA, 25 nt, Human
cauccucgcaccuugcccuuccaaa

SEQ ID NO: 67339 - RNA, 19 nt, Human
ccaaagugcugggauuaca

SEQ ID NO: 67340 - RNA, 20 nt, Human
ccaaagugcugggauuacag

SEQ ID NO: 67341 - RNA, 22 nt, Human
ccaaagugcugggauuacaggc

SEQ ID NO: 67342 - RNA, 22 nt, Human
ccaaagugcugggauuacaggc

SEQ ID NO: 67343 - RNA, 23 nt, Human
ccaaagugcugggauuacaggcc

SEQ ID NO: 67344 - RNA, 22 nt, Human
ccacgcccgucccgcccauccg

SEQ ID NO: 67345 - RNA, 24 nt, Human
ccucaagcauccucgcaccuugcc

SEQ ID NO: 67346 - RNA, 21 nt, Human
ccuccgggucuggaagacaag

SEQ ID NO: 67347 - RNA, 19 nt, Human
ccuggccucaagcauccuc

SEQ ID NO: 67348 - RNA, 18 nt, Human
ccuguguugcccaggcug

SEQ ID NO: 67349 - RNA, 20 nt, Human
cgaaagcccagcaacgaggg

SEQ ID NO: 67350 - RNA, 25 nt, Human
cuccuggccucaagcauccucgcac

SEQ ID NO: 67351 - RNA, 19 nt, Human
cucggcguccuccacgccc

SEQ ID NO: 67352 - RNA, 18 nt, Human
cugacuguccccacuggc

SEQ ID NO: 67353 - RNA, 20 nt, Human
cuguccccacuggccagccc

SEQ ID NO: 67354 - RNA, 21 nt, Human
cuguccccacuggccagcccc

SEQ ID NO: 67355 - RNA, 19 nt, Human
gaaagcccagcaacgaggg

SEQ ID NO: 67356 - RNA, 19 nt, Human
gagccaggcuggggcagga

SEQ ID NO: 67357 - RNA, 21 nt, Human
gagccaggcuggggcaggaaa

SEQ ID NO: 67358 - RNA, 19 nt, Human
gcaacgagggagccaggcu

SEQ ID NO: 67359 - RNA, 18 nt, Human
gcccugccucuccagucc

SEQ ID NO: 67360 - RNA, 22 nt, Human
gcugugucaaacuccuggccuc

SEQ ID NO: 67361 - RNA, 20 nt, Human
ggaaacacacagcagccucc

SEQ ID NO: 67362 - RNA, 23 nt, Human
gggcaggaaacacacagcagccu

SEQ ID NO: 67363 - RNA, 24 nt, Human
gggggucucccuguguugcccagg

SEQ ID NO: 67364 - RNA, 22 nt, Human
gggucucccuguguugcccagg

SEQ ID NO: 67365 - RNA, 23 nt, Human
uccaaagugcugggauuacaggc

SEQ ID NO: 67366 - RNA, 24 nt, Human
uccccacuggccagccccgaaagc

SEQ ID NO: 67367 - RNA, 22 nt, Human
ucccccgggccgggcuggcucc

SEQ ID NO: 67368 - RNA, 20 nt, Human
ucccugacuguccccacugg

SEQ ID NO: 67369 - RNA, 21 nt, Human
ucccuguguugcccaggcugu

SEQ ID NO: 67370 - RNA, 23 nt, Human
uccucgcaccuugcccuuccaaa

SEQ ID NO: 67371 - RNA, 23 nt, Human
ucggcguccuccacgcccguccc

SEQ ID NO: 67372 - RNA, 21 nt, Human
ucgucguccggaagcuucggu

SEQ ID NO: 67373 - RNA, 25 nt, Human
ucuccagucccugacuguccccacu

SEQ ID NO: 67374 - RNA, 19 nt, Human
ucucccuguguugcccagg

SEQ ID NO: 67375 - RNA, 21 nt, Human
ugcucggcguccuccacgccc

SEQ ID NO: 67376 - RNA, 18 nt, Human
ugcugggauuacaggcca

SEQ ID NO: 67377 - RNA, 21 nt, Human
uggcuccgaguucugggcacu

SEQ ID NO: 67378 - RNA, 21 nt, Human
ugggauuacaggccacccugc

SEQ ID NO: 67379 - RNA, 22 nt, Human
uguguugcccaggcugugucaa

SEQ ID NO: 67380 - RNA, 23 nt, Human
uguguugcccaggcugugucaaa

SEQ ID NO: 67381 - RNA, 21 nt, Human
uguugcccaggcugugucaaa

SEQ ID NO: 67382 - RNA, 23 nt, Human
ccgcuuccuucucucugcgcuuu

SEQ ID NO: 67383 - RNA, 23 nt, Human
ccuccgcucgcugccucuccucc

SEQ ID NO: 67384 - RNA, 21 nt, Human
cucacagcugcuuuccuccgc

SEQ ID NO: 67385 - RNA, 22 nt, Human
cucgcugccucuccuccgcuuc

SEQ ID NO: 67386 - RNA, 19 nt, Human
ggagccucuggagcgcuug

SEQ ID NO: 67387 - RNA, 18 nt, Human
uccaggucacaagaaaca

SEQ ID NO: 67388 - RNA, 21 nt, Human
uccgcucgcugccucuccucc

SEQ ID NO: 67389 - RNA, 23 nt, Human
uuccggagccucuggagcgcuug

SEQ ID NO: 67390 - RNA, 24 nt, Human
uucuucucuuugcugcuccaguuc

SEQ ID NO: 67391 - RNA, 23 nt, Human
uuuguucuucucuuugcugcucc

SEQ ID NO: 67392 - RNA, 22 nt, Human
aauggaccccucccugccuccu

SEQ ID NO: 67393 - RNA, 20 nt, Human
aggugggagagguagggggc

SEQ ID NO: 67394 - RNA, 23 nt, Human
cacgugauccagcggagcgcacc

SEQ ID NO: 67395 - RNA, 21 nt, Human
cagccccaccagggggaaugg

SEQ ID NO: 67396 - RNA, 19 nt, Human
ccccgaggggguggggagg

SEQ ID NO: 67397 - RNA, 22 nt, Human
ccccgaggggguggggagggug

SEQ ID NO: 67398 - RNA, 24 nt, Human
ccccgaggggguggggagggugga

SEQ ID NO: 67399 - RNA, 21 nt, Human
ccugcccaaguggcucccccu

SEQ ID NO: 67400 - RNA, 20 nt, Human
cuuugugcaaacucugcccc

SEQ ID NO: 67401 - RNA, 23 nt, Human
gaagagcaagaggugggagaggu

SEQ ID NO: 67402 - RNA, 18 nt, Human
gggguggggaggguggag

SEQ ID NO: 67403 - RNA, 20 nt, Human
gugaaauggcagcgguuggg

SEQ ID NO: 67404 - RNA, 20 nt, Human
guggagggugagugugaaau

SEQ ID NO: 67405 - RNA, 20 nt, Human
uacagcuccccaccagcccc

SEQ ID NO: 67406 - RNA, 19 nt, Human
ucccugccuccugcccaag

SEQ ID NO: 67407 - RNA, 21 nt, Human
ucccugccuccugcccaagug

SEQ ID NO: 67408 - RNA, 21 nt, Human
ucccugccuccugcccaagug

SEQ ID NO: 67409 - RNA, 25 nt, Human
ucugccccgaggggguggggagggu

SEQ ID NO: 67410 - RNA, 27 nt, Human
uggaccccucccugccuccugcccaag

SEQ ID NO: 67411 - RNA, 23 nt, Human
uggagggugagugugaaauggca

SEQ ID NO: 67412 - RNA, 19 nt, Human
uggcagcgguuggggcugg

SEQ ID NO: 67413 - RNA, 18 nt, Human
uggcucacgugauccagc

SEQ ID NO: 67414 - RNA, 19 nt, Human
uuuauugaagagcaagagg

SEQ ID NO: 67415 - RNA, 26 nt, Human
acugguggggauggcggggugagagg

SEQ ID NO: 67416 - RNA, 18 nt, Human
agacagguggggacuggu

SEQ ID NO: 67417 - RNA, 20 nt, Human
aggaggagggugagcggucc

SEQ ID NO: 67418 - RNA, 23 nt, Human
aggggaggaggagggugagcggu

SEQ ID NO: 67419 - RNA, 19 nt, Human
caacacgaagaaauauuug

SEQ ID NO: 67420 - RNA, 19 nt, Human
cacaguccccauccaacac

SEQ ID NO: 67421 - RNA, 23 nt, Human
cagacaccgagacggugauaagg

SEQ ID NO: 67422 - RNA, 22 nt, Human
caggguuugcucagcaagucac

SEQ ID NO: 67423 - RNA, 20 nt, Human
cagguggggacuggugggga

SEQ ID NO: 67424 - RNA, 18 nt, Human
cccacaguccccauccaa

SEQ ID NO: 67425 - RNA, 23 nt, Human
ccccuaucuacccacagucccca

SEQ ID NO: 67426 - RNA, 24 nt, Human
ccccuaucuacccacaguccccau

SEQ ID NO: 67427 - RNA, 22 nt, Human
cgacgccacauaguaaaaaaaa

SEQ ID NO: 67428 - RNA, 23 nt, Human
cgacgccacauaguaaaaaaaag

SEQ ID NO: 67429 - RNA, 25 nt, Human
cggugauaaggccgcagucucuucc

SEQ ID NO: 67430 - RNA, 21 nt, Human
cucucauuguuccccuaucua

SEQ ID NO: 67431 - RNA, 21 nt, Human
cugccggccgcgguucccucu

SEQ ID NO: 67432 - RNA, 25 nt, Human
gacagguggggacugguggggaugg

SEQ ID NO: 67433 - RNA, 21 nt, Human
gacgccacauaguaaaaaaaa

SEQ ID NO: 67434 - RNA, 19 nt, Human
gagcacgauccgacccguc

SEQ ID NO: 67435 - RNA, 22 nt, Human
gccacgagcacgauccgacccg

SEQ ID NO: 67436 - RNA, 24 nt, Human
gccgcuggcgcuuauaccgaccug

SEQ ID NO: 67437 - RNA, 25 nt, Human
gcgguucccucucgaugcuucaggg

SEQ ID NO: 67438 - RNA, 22 nt, Human
ggaggaggagggugagcggucc

SEQ ID NO: 67439 - RNA, 22 nt, Human
ggaggagggugagcgguccagg

SEQ ID NO: 67440 - RNA, 22 nt, Human
ggggugagaggggaggaggagg

SEQ ID NO: 67441 - RNA, 27 nt, Human
gguggggacugguggggauggcggggu

SEQ ID NO: 67442 - RNA, 21 nt, Human
uaaaaaaaaguacacauauaa

SEQ ID NO: 67443 - RNA, 20 nt, Human
uaagcaggucagggugaugu

SEQ ID NO: 67444 - RNA, 23 nt, Human
uaccgaccuggcuccuguaacgc

SEQ ID NO: 67445 - RNA, 21 nt, Human
ucagcaagucacuugaugagu

SEQ ID NO: 67446 - RNA, 20 nt, Human
ucuccggagcgguccggccu

SEQ ID NO: 67447 - RNA, 22 nt, Human
ugacgggcggcgaggccgcugg

SEQ ID NO: 67448 - RNA, 25 nt, Human
ugacgggcggcgaggccgcuggcgc

SEQ ID NO: 67449 - RNA, 18 nt, Human
ugagaggggaggaggagg

SEQ ID NO: 67450 - RNA, 18 nt, Human
ugagaggggaggaggagg

SEQ ID NO: 67451 - RNA, 25 nt, Human
ugaggaggggggcaguugaagguga

SEQ ID NO: 67452 - RNA, 21 nt, Human
ugaggccagggauguggacag

SEQ ID NO: 67453 - RNA, 23 nt, Human
uggcggggugagaggggaggagg

SEQ ID NO: 67454 - RNA, 18 nt, Human
ugugauugaagaaaaucu

SEQ ID NO: 67455 - RNA, 18 nt, Human
uguggcgggcugaggcca

SEQ ID NO: 67456 - RNA, 23 nt, Human
uucacacccaaguuagccugagu

SEQ ID NO: 67457 - RNA, 20 nt, Human
aaauuugcuuagaugccuac

SEQ ID NO: 67458 - RNA, 21 nt, Human
auaaggcacugugcuaggagc

SEQ ID NO: 67459 - RNA, 22 nt, Human
cagaagagagaucaaaggaaau

SEQ ID NO: 67460 - RNA, 19 nt, Human
gcuguuuauuaagaauguu

SEQ ID NO: 67461 - RNA, 18 nt, Human
ggagcuuacagacuagca

SEQ ID NO: 67462 - RNA, 26 nt, Human
guacagaauucccuugaguggaagau

SEQ ID NO: 67463 - RNA, 20 nt, Human
uaagaaagguuuagaaaugu

SEQ ID NO: 67464 - RNA, 21 nt, Human
uaaggcacaacccuacucuua

SEQ ID NO: 67465 - RNA, 21 nt, Human
uauauagaaauaggaaacacu

SEQ ID NO: 67466 - RNA, 20 nt, Human
ucccuugaguggaguauauu

SEQ ID NO: 67467 - RNA, 18 nt, Human
ucugaauacaaaggcugu

SEQ ID NO: 67468 - RNA, 18 nt, Human
ugaauaaggcacaacccu

SEQ ID NO: 67469 - RNA, 22 nt, Human
uggaguauauuuuaauuuucug

SEQ ID NO: 67470 - RNA, 20 nt, Human
uguaaaugagacuuuaccaa

SEQ ID NO: 67471 - RNA, 18 nt, Human
uguauaauaaacuauaua

SEQ ID NO: 67472 - RNA, 21 nt, Human
uucagaagagagaucaaagga

SEQ ID NO: 67473 - RNA, 21 nt, Human
aaaaagaaaaaagaaauccaa

SEQ ID NO: 67474 - RNA, 21 nt, Human
aaaaagaaaaaagaaauccaa

SEQ ID NO: 67475 - RNA, 22 nt, Human
aaaaauauuuaaaguuaaccac

SEQ ID NO: 67476 - RNA, 23 nt, Human
aaaagaaaaaaaaauacacuaaa

SEQ ID NO: 67477 - RNA, 23 nt, Human
aaaagaaaaaaaaauacacuaaa

SEQ ID NO: 67478 - RNA, 22 nt, Human
aaacucaaaaguacugcuggca

SEQ ID NO: 67479 - RNA, 22 nt, Human
aaacucaaaaguacugcuggca

SEQ ID NO: 67480 - RNA, 23 nt, Human
aaacucaaaaguacugcuggcag

SEQ ID NO: 67481 - RNA, 23 nt, Human
aaacucaaaaguacugcuggcag

SEQ ID NO: 67482 - RNA, 26 nt, Human
aacaaaacaaaaaaaaaaacucaaaa

SEQ ID NO: 67483 - RNA, 25 nt, Human
aacaaaacaaaaaaaaaacucaaaa

SEQ ID NO: 67484 - RNA, 23 nt, Human
aacaacgagcaaauccaucuccc

SEQ ID NO: 67485 - RNA, 25 nt, Human
aagaaaaaaaaauacacuaaaaugc

SEQ ID NO: 67486 - RNA, 18 nt, Human
aagagcacugagcggucu

SEQ ID NO: 67487 - RNA, 18 nt, Human
aagagcacugagcggucu

SEQ ID NO: 67488 - RNA, 19 nt, Human
aagagcacugagcggucuc

SEQ ID NO: 67489 - RNA, 19 nt, Human
aagagcacugagcggucuc

SEQ ID NO: 67490 - RNA, 18 nt, Human
aagcaggaaggggaagga

SEQ ID NO: 67491 - RNA, 21 nt, Human
aagcaggaaggggaaggaggg

SEQ ID NO: 67492 - RNA, 18 nt, Human
aauugcuucacaagaucu

SEQ ID NO: 67493 - RNA, 20 nt, Human
aauugcuucacaagaucuau

SEQ ID NO: 67494 - RNA, 21 nt, Human
acaaaacaaaaaaaaaacuca

SEQ ID NO: 67495 - RNA, 21 nt, Human
acacaagucaguccaacaguu

SEQ ID NO: 67496 - RNA, 21 nt, Human
acacaagucaguccaacaguu

SEQ ID NO: 67497 - RNA, 21 nt, Human
acagggaagcaggaaggggaa

SEQ ID NO: 67498 - RNA, 18 nt, Human
acauaaauucagguaaga

SEQ ID NO: 67499 - RNA, 18 nt, Human
acauaaauucagguaaga

SEQ ID NO: 67500 - RNA, 24 nt, Human
accacugucggaaaaacacacaua

SEQ ID NO: 67501 - RNA, 24 nt, Human
accacugucggaaaaacacacaua

SEQ ID NO: 67502 - RNA, 24 nt, Human
agaaaaaaaaauacacuaaaaugc

SEQ ID NO: 67503 - RNA, 20 nt, Human
agaggagggaaggugguggc

SEQ ID NO: 67504 - RNA, 20 nt, Human
agaguuucccaagcuugcau

SEQ ID NO: 67505 - RNA, 19 nt, Human
agcccaaaauaaaccacca

SEQ ID NO: 67506 - RNA, 18 nt, Human
aggcugguccuccugugg

SEQ ID NO: 67507 - RNA, 25 nt, Human
auagugauaaaaauauagaaguauc

SEQ ID NO: 67508 - RNA, 25 nt, Human
auagugauaaaaauauagaaguauc

SEQ ID NO: 67509 - RNA, 26 nt, Human
auagugauaaaaauauagaaguaucu

SEQ ID NO: 67510 - RNA, 26 nt, Human
auagugauaaaaauauagaaguaucu

SEQ ID NO: 67511 - RNA, 21 nt, Human
augaauccucaacguccagag

SEQ ID NO: 67512 - RNA, 28 nt, Human
augcuaaaguaaaacaaaacaaaaaaaa

SEQ ID NO: 67513 - RNA, 18 nt, Human
caaaaaaaaaaacucaaa

SEQ ID NO: 67514 - RNA, 27 nt, Human
caaaagggacaugcaggaauguaacag

SEQ ID NO: 67515 - RNA, 27 nt, Human
caaaagggacaugcaggaauguaacag

SEQ ID NO: 67516 - RNA, 21 nt, Human
caaaaguacugcuggcaggcc

SEQ ID NO: 67517 - RNA, 21 nt, Human
caacgagcaaauccaucuccc

SEQ ID NO: 67518 - RNA, 22 nt, Human
cacacauaaauucagguaagac

SEQ ID NO: 67519 - RNA, 22 nt, Human
cacacauaaauucagguaagac

SEQ ID NO: 67520 - RNA, 22 nt, Human
cacccucaccaaucagagcaau

SEQ ID NO: 67521 - RNA, 23 nt, Human
cagaaaggcagccucucuccagu

SEQ ID NO: 67522 - RNA, 21 nt, Human
caggguaacauuuaaaaucuu

SEQ ID NO: 67523 - RNA, 23 nt, Human
ccaaaauaaaccacauuaaauaa

SEQ ID NO: 67524 - RNA, 19 nt, Human
ccaacaaaggcauuuuugc

SEQ ID NO: 67525 - RNA, 20 nt, Human
ccuccuguggugguaggggc

SEQ ID NO: 67526 - RNA, 21 nt, Human
ccuccuucagugcgcgggggu

SEQ ID NO: 67527 - RNA, 20 nt, Human
ccucucuccagaguuuccca

SEQ ID NO: 67528 - RNA, 18 nt, Human
cgacagcacagcuuuaga

SEQ ID NO: 67529 - RNA, 25 nt, Human
cucacaaaaagaaaaaagaaaucca

SEQ ID NO: 67530 - RNA, 25 nt, Human
cucacaaaaagaaaaaagaaaucca

SEQ ID NO: 67531 - RNA, 19 nt, Human
cugcucaguaauugcuuca

SEQ ID NO: 67532 - RNA, 19 nt, Human
cugcucaguaauugcuuca

SEQ ID NO: 67533 - RNA, 19 nt, Human
gaaaggcagccucucucca

SEQ ID NO: 67534 - RNA, 22 nt, Human
gagaaaacagggaagcaggaag

SEQ ID NO: 67535 - RNA, 19 nt, Human
gagccuggggaggugucca

SEQ ID NO: 67536 - RNA, 18 nt, Human
gagcuuuucacacauccu

SEQ ID NO: 67537 - RNA, 22 nt, Human
gaucuugaucugcucaguaauu

SEQ ID NO: 67538 - RNA, 22 nt, Human
gaucuugaucugcucaguaauu

SEQ ID NO: 67539 - RNA, 18 nt, Human
gcguaugguuaggcuggu

SEQ ID NO: 67540 - RNA, 18 nt, Human
gcguaugguuaggcuggu

SEQ ID NO: 67541 - RNA, 23 nt, Human
ggaaaaacacacauaaauucagg

SEQ ID NO: 67542 - RNA, 23 nt, Human
ggaaaaacacacauaaauucagg

SEQ ID NO: 67543 - RNA, 19 nt, Human
ggcuggagaggagggaagg

SEQ ID NO: 67544 - RNA, 18 nt, Human
gggaagcaggaaggggaa

SEQ ID NO: 67545 - RNA, 24 nt, Human
guaaaacaaaacaaaaaaaaaaac

SEQ ID NO: 67546 - RNA, 23 nt, Human
guaaaacaaaacaaaaaaaaaac

SEQ ID NO: 67547 - RNA, 24 nt, Human
guaaaacaaaacaaaaaaaaaacu

SEQ ID NO: 67548 - RNA, 20 nt, Human
guccagaguucuacaaaaau

SEQ ID NO: 67549 - RNA, 24 nt, Human
uaaaaagaaaaaaaaauacacuaa

SEQ ID NO: 67550 - RNA, 24 nt, Human
uaaaaagaaaaaaaaauacacuaa

SEQ ID NO: 67551 - RNA, 21 nt, Human
uaaaagcugucucacaaaaag

SEQ ID NO: 67552 - RNA, 22 nt, Human
uaaaagcugucucacaaaaagu

SEQ ID NO: 67553 - RNA, 21 nt, Human
uaaaaugccaguggacuauaa

SEQ ID NO: 67554 - RNA, 21 nt, Human
uaaaaugccaguggacuauaa

SEQ ID NO: 67555 - RNA, 19 nt, Human
uaaagcuaauguagaaauu

SEQ ID NO: 67556 - RNA, 19 nt, Human
uaaagcuaauguagaaauu

SEQ ID NO: 67557 - RNA, 19 nt, Human
uaacacaguguacacaagu

SEQ ID NO: 67558 - RNA, 19 nt, Human
uaacacaguguacacaagu

SEQ ID NO: 67559 - RNA, 25 nt, Human
uaacacaguguacacaagucagucc

SEQ ID NO: 67560 - RNA, 25 nt, Human
uaacacaguguacacaagucagucc

SEQ ID NO: 67561 - RNA, 25 nt, Human
uaacgucaaugaaaguauucaauau

SEQ ID NO: 67562 - RNA, 21 nt, Human
uaagaagaaaaucuucagugu

SEQ ID NO: 67563 - RNA, 23 nt, Human
uacacacccucaccaaucagagc

SEQ ID NO: 67564 - RNA, 21 nt, Human
uacauucaauggcuaauuuac

SEQ ID NO: 67565 - RNA, 21 nt, Human
uacuuuugcucauucaucagu

SEQ ID NO: 67566 - RNA, 19 nt, Human
uagaaagaaaaaggcucau

SEQ ID NO: 67567 - RNA, 22 nt, Human
uagaaguaucuuugauuuuaau

SEQ ID NO: 67568 - RNA, 22 nt, Human
uagaaguaucuuugauuuuaau

SEQ ID NO: 67569 - RNA, 20 nt, Human
uauacaacucaaaucuucac

SEQ ID NO: 67570 - RNA, 20 nt, Human
uauacaacucaaaucuucac

SEQ ID NO: 67571 - RNA, 24 nt, Human
ucaccuuaucuuaauguuaacaaa

SEQ ID NO: 67572 - RNA, 24 nt, Human
ucaccuuaucuuaauguuaacaaa

SEQ ID NO: 67573 - RNA, 21 nt, Human
ucagauauuuggaauucaaaa

SEQ ID NO: 67574 - RNA, 25 nt, Human
ucauucaucaguucuaugucacucc

SEQ ID NO: 67575 - RNA, 22 nt, Human
uccucaacguccagaguucuac

SEQ ID NO: 67576 - RNA, 22 nt, Human
ucgaguacccaugcaggacuca

SEQ ID NO: 67577 - RNA, 23 nt, Human
ucuaaaauuuaaacaaaugcuga

SEQ ID NO: 67578 - RNA, 25 nt, Human
ucuauagugauaaaaauauagaagu

SEQ ID NO: 67579 - RNA, 25 nt, Human
ucuauagugauaaaaauauagaagu

SEQ ID NO: 67580 - RNA, 19 nt, Human
ucuauccucacacccaagg

SEQ ID NO: 67581 - RNA, 18 nt, Human
ucucacaaaaagaaaaaa

SEQ ID NO: 67582 - RNA, 18 nt, Human
ucucacaaaaagaaaaaa

SEQ ID NO: 67583 - RNA, 25 nt, Human
ucuuauggcuuugcuuauaguugcu

SEQ ID NO: 67584 - RNA, 25 nt, Human
ucuuauggcuuugcuuauaguugcu

SEQ ID NO: 67585 - RNA, 18 nt, Human
ucuucaguguagaaagaa

SEQ ID NO: 67586 - RNA, 28 nt, Human
ugaacacuuaaagcuaauguagaaauuu

SEQ ID NO: 67587 - RNA, 28 nt, Human
ugaacacuuaaagcuaauguagaaauuu

SEQ ID NO: 67588 - RNA, 23 nt, Human
ugaauccucaacguccagaguuc

SEQ ID NO: 67589 - RNA, 24 nt, Human
ugaauccucaacguccagaguucu

SEQ ID NO: 67590 - RNA, 21 nt, Human
ugagcccaaaauaaaccacca

SEQ ID NO: 67591 - RNA, 20 nt, Human
ugagccuggggaggugucca

SEQ ID NO: 67592 - RNA, 22 nt, Human
ugaugugguagcuaccuucuuu

SEQ ID NO: 67593 - RNA, 22 nt, Human
ugaugugguagcuaccuucuuu

SEQ ID NO: 67594 - RNA, 27 nt, Human
ugcuaaaguaaaacaaaacaaaaaaaa

SEQ ID NO: 67595 - RNA, 20 nt, Human
uggagaggagggaagguggu

SEQ ID NO: 67596 - RNA, 22 nt, Human
uggagaggagggaagguggugg

SEQ ID NO: 67597 - RNA, 18 nt, Human
uggugguaggggcagucu

SEQ ID NO: 67598 - RNA, 18 nt, Human
uggugguaggggcagucu

SEQ ID NO: 67599 - RNA, 21 nt, Human
uguaaaaagaaaaaaaaauac

SEQ ID NO: 67600 - RNA, 19 nt, Human
uguagaaagaaaaaggcuc

SEQ ID NO: 67601 - RNA, 30 nt, Human
uguggugguaggggcagucuuuuugaagcu

SEQ ID NO: 67602 - RNA, 30 nt, Human; identical to SEQ ID NO: 67601

SEQ ID NO: 67603 - RNA, 20 nt, Human
uuaaucugaacacuuaaagc

SEQ ID NO: 67604 - RNA, 20 nt, Human
uuaaucugaacacuuaaagc

SEQ ID NO: 67605 - RNA, 18 nt, Human
uuacacaucgaguacccc

SEQ ID NO: 67606 - RNA, 20 nt, Human
uuccagguuuucauuacaca

SEQ ID NO: 67607 - RNA, 18 nt, Human
uuuacacacccucaccaa

SEQ ID NO: 67608 - RNA, 18 nt, Human
agcaggacuggcaggggu

SEQ ID NO: 67609 - RNA, 19 nt, Human
agcugccccccacccuucc

SEQ ID NO: 67610 - RNA, 22 nt, Human
agggggaccagggaacaaagcu

SEQ ID NO: 67611 - RNA, 24 nt, Human
caccgcagcugccccccacccuuc

SEQ ID NO: 67612 - RNA, 23 nt, Human
cacuacgcugccagccggggaga

SEQ ID NO: 67613 - RNA, 21 nt, Human
cagcugccccccacccuuccc

SEQ ID NO: 67614 - RNA, 27 nt, Human
caggcggcagagcaggacuggcagggg

SEQ ID NO: 67615 - RNA, 20 nt, Human
ccccaccgcagcugcccccc

SEQ ID NO: 67616 - RNA, 21 nt, Human
ccccaccgcagcugcccccca

SEQ ID NO: 67617 - RNA, 21 nt, Human
ccccacuacgcugccagccgg

SEQ ID NO: 67618 - RNA, 22 nt, Human
ccccacuacgcugccagccggg

SEQ ID NO: 67619 - RNA, 20 nt, Human
ccccccacccuucccuucga

SEQ ID NO: 67620 - RNA, 23 nt, Human
ccgcagcugccccccacccuucc

SEQ ID NO: 67621 - RNA, 22 nt, Human
cuccccaccgcagcugcccccc

SEQ ID NO: 67622 - RNA, 24 nt, Human
cuccccaccgcagcugccccccac

SEQ ID NO: 67623 - RNA, 21 nt, Human
cugccccccacccuucccuuc

SEQ ID NO: 67624 - RNA, 22 nt, Human
gcaggcuucagggggaccaggg

SEQ ID NO: 67625 - RNA, 23 nt, Human
uggaggcgugaguucccggcguc

SEQ ID NO: 67626 - RNA, 19 nt, Human
uggcaggcggcagagcagg

SEQ ID NO: 67627 - RNA, 18 nt, Human
ugggauuggaggcgugag

SEQ ID NO: 67628 - RNA, 24 nt, Human
ugggauuggaggcgugaguucccg

SEQ ID NO: 67629 - RNA, 25 nt, Human
ugggauuggaggcgugaguucccgg

SEQ ID NO: 67630 - RNA, 20 nt, Human
uggggccuggcagccccacu

SEQ ID NO: 67631 - RNA, 21 nt, Human
aaaaaaaccaauauagcucaa

SEQ ID NO: 67632 - RNA, 19 nt, Human
aaaaaaccaauauagcuca

SEQ ID NO: 67633 - RNA, 20 nt, Human
aaaaauccacagaccaaccc

SEQ ID NO: 67634 - RNA, 21 nt, Human
aaaaauccacagaccaaccca

SEQ ID NO: 67635 - RNA, 21 nt, Human
aaaacuagcaacacaagcaaa

SEQ ID NO: 67636 - RNA, 24 nt, Human
aaaagucagcagguugagaucaau

SEQ ID NO: 67637 - RNA, 23 nt, Human
aaacagaaggagaggguacagag

SEQ ID NO: 67638 - RNA, 24 nt, Human
aaacaggaggaagaaagucuuggg

SEQ ID NO: 67639 - RNA, 22 nt, Human
aaagucuuggggaaagaggagg

SEQ ID NO: 67640 - RNA, 21 nt, Human
aaaguguugaccccuccuggu

SEQ ID NO: 67641 - RNA, 23 nt, Human
aagaaaaccaggagacacagaca

SEQ ID NO: 67642 - RNA, 23 nt, Human
aagcaaauuuagcaaggugggga

SEQ ID NO: 67643 - RNA, 21 nt, Human
aaggccuaggaagaaaaccag

SEQ ID NO: 67644 - RNA, 19 nt, Human
aagguaagagguguggggg

SEQ ID NO: 67645 - RNA, 18 nt, Human
aaucaguggugcuucccu

SEQ ID NO: 67646 - RNA, 21 nt, Human
aaugaaagcugguuucaccuu

SEQ ID NO: 67647 - RNA, 20 nt, Human
acagugcacaagggauuuga

SEQ ID NO: 67648 - RNA, 21 nt, Human
acagugcacaagggauuugag

SEQ ID NO: 67649 - RNA, 21 nt, Human
accaucacccuuucuagccag

SEQ ID NO: 67650 - RNA, 20 nt, Human
accugcuucacccucucccu

SEQ ID NO: 67651 - RNA, 25 nt, Human
accugcuucacccucucccuggccu

SEQ ID NO: 67652 - RNA, 19 nt, Human
acugaaaacagaacugggu

SEQ ID NO: 67653 - RNA, 20 nt, Human
agaggaacuugggagacuga

SEQ ID NO: 67654 - RNA, 19 nt, Human
agcaaaccccaaaguaauc

SEQ ID NO: 67655 - RNA, 22 nt, Human
aggaaggaucucaaaacccaag

SEQ ID NO: 67656 - RNA, 25 nt, Human
aggaaugcuugaggguggggccugc

SEQ ID NO: 67657 - RNA, 25 nt, Human
aggagaggguacagaggagugacuc

SEQ ID NO: 67658 - RNA, 18 nt, Human
aggagccagucauaggag

SEQ ID NO: 67659 - RNA, 20 nt, Human
aggaggaagaaagucuuggg

SEQ ID NO: 67660 - RNA, 23 nt, Human
aggaucucaaaacccaaguggcc

SEQ ID NO: 67661 - RNA, 18 nt, Human
aggcaugguggcugaagg

SEQ ID NO: 67662 - RNA, 21 nt, Human
aggguggggaggagggccaug

SEQ ID NO: 67663 - RNA, 25 nt, Human
agucagcagguugagaucaauagug

SEQ ID NO: 67664 - RNA, 24 nt, Human
aguuguauaaccucucuuugccuc

SEQ ID NO: 67665 - RNA, 19 nt, Human
auagcacuuuccucaggag

SEQ ID NO: 67666 - RNA, 23 nt, Human
aucuuguucccucucaaagauca

SEQ ID NO: 67667 - RNA, 22 nt, Human
caaaacccaaguggcccacugg

SEQ ID NO: 67668 - RNA, 21 nt, Human
caacgagaaacaggaggaaga

SEQ ID NO: 67669 - RNA, 22 nt, Human
cacaagcaaauuuagcaaggug

SEQ ID NO: 67670 - RNA, 18 nt, Human
cacaagggauuugaggca

SEQ ID NO: 67671 - RNA, 24 nt, Human
cacccuccuuucacucaagcuuaa

SEQ ID NO: 67672 - RNA, 20 nt, Human
cacccuccuuucacucaagg

SEQ ID NO: 67673 - RNA, 18 nt, Human
cagggccaaggcucccag

SEQ ID NO: 67674 - RNA, 21 nt, Human
cauucuggcagcagcucccug

SEQ ID NO: 67675 - RNA, 19 nt, Human
cauugcuagucaacagggc

SEQ ID NO: 67676 - RNA, 20 nt, Human
ccaacagccugaaaucacac

SEQ ID NO: 67677 - RNA, 20 nt, Human
ccaacccagauggaucccuc

SEQ ID NO: 67678 - RNA, 19 nt, Human
ccaccauucaugaccaugc

SEQ ID NO: 67679 - RNA, 18 nt, Human
ccagaggucuuggggaca

SEQ ID NO: 67680 - RNA, 20 nt, Human
cccacuggggccuauaauga

SEQ ID NO: 67681 - RNA, 19 nt, Human
cccagauggaucccuccuc

SEQ ID NO: 67682 - RNA, 18 nt, Human
ccucguuuuccucaacac

SEQ ID NO: 67683 - RNA, 21 nt, Human
ccugaggaaugcuugagggug

SEQ ID NO: 67684 - RNA, 22 nt, Human
ccuguuggcugggccaccauuc

SEQ ID NO: 67685 - RNA, 18 nt, Human
cgccccuccuccuuccac

SEQ ID NO: 67686 - RNA, 22 nt, Human
cuccaaaggcuaagggcguacu

SEQ ID NO: 67687 - RNA, 20 nt, Human
cucccuggccugucaacucc

SEQ ID NO: 67688 - RNA, 23 nt, Human
cucuaaagaaauauggcacugca

SEQ ID NO: 67689 - RNA, 22 nt, Human
cucugcucccaguugcaauggg

SEQ ID NO: 67690 - RNA, 19 nt, Human
cuggaugggcagugaccau

SEQ ID NO: 67691 - RNA, 22 nt, Human
cuggcagauuucccaaucaugc

SEQ ID NO: 67692 - RNA, 19 nt, Human
cuggcagcagcucccuggc

SEQ ID NO: 67693 - RNA, 19 nt, Human
cugggcagguucccugugg

SEQ ID NO: 67694 - RNA, 22 nt, Human
cugggcccugucugauuggccu

SEQ ID NO: 67695 - RNA, 21 nt, Human
gaaagaaggagagaggagagu

SEQ ID NO: 67696 - RNA, 21 nt, Human
gaacagaaguuuuuugugauc

SEQ ID NO: 67697 - RNA, 21 nt, Human
gaagguagaggaacuugggag

SEQ ID NO: 67698 - RNA, 20 nt, Human
gacaagggccaccuuccuca

SEQ ID NO: 67699 - RNA, 22 nt, Human
gagcugggagaguguugguggg

SEQ ID NO: 67700 - RNA, 18 nt, Human
gagggccaugugcagugg

SEQ ID NO: 67701 - RNA, 18 nt, Human
gauaugaaaguguugacc

SEQ ID NO: 67702 - RNA, 21 nt, Human
gcccacuggggccuauaauga

SEQ ID NO: 67703 - RNA, 21 nt, Human
gcuugaggguggggccugcgg

SEQ ID NO: 67704 - RNA, 22 nt, Human
ggaaucucugaggcaggugcau

SEQ ID NO: 67705 - RNA, 24 nt, Human
ggacaugggagcugggagaguguu

SEQ ID NO: 67706 - RNA, 22 nt, Human
ggagcccuggucaaaggcaugg

SEQ ID NO: 67707 - RNA, 18 nt, Human
ggaguugugugcauugug

SEQ ID NO: 67708 - RNA, 24 nt, Human
ggccaaaaaaggagggucacagaa

SEQ ID NO: 67709 - RNA, 20 nt, Human
gggacagcuaaggccauugc

SEQ ID NO: 67710 - RNA, 19 nt, Human
gggcagguucccugugggg

SEQ ID NO: 67711 - RNA, 19 nt, Human
gggccaugugcaguggaac

SEQ ID NO: 67712 - RNA, 24 nt, Human
gucaauuguacaaccauccuaaga

SEQ ID NO: 67713 - RNA, 21 nt, Human
gucugauuggccugucacauc

SEQ ID NO: 67714 - RNA, 24 nt, Human
gugacucugauaccugcuucaccc

SEQ ID NO: 67715 - RNA, 18 nt, Human
guguguguguguguacau

SEQ ID NO: 67716 - RNA, 19 nt, Human
uaaaauaaaaacagaagga

SEQ ID NO: 67717 - RNA, 24 nt, Human
uaaaauggagacaagaauagcacu

SEQ ID NO: 67718 - RNA, 19 nt, Human
uaaguaggagccagucaua

SEQ ID NO: 67719 - RNA, 20 nt, Human
uacagaggagugacucugau

SEQ ID NO: 67720 - RNA, 21 nt, Human
uacagcaagcacucaauaaau

SEQ ID NO: 67721 - RNA, 22 nt, Human
uacagcaagcacucaauaaaug

SEQ ID NO: 67722 - RNA, 24 nt, Human
uaccuaaagugcuuacaucagcgc

SEQ ID NO: 67723 - RNA, 26 nt, Human
uagaaaaaaaaccaauauagcucaau

SEQ ID NO: 67724 - RNA, 19 nt, Human
uagcagcaaagagaugcuc

SEQ ID NO: 67725 - RNA, 22 nt, Human
uauaagcaccucccuuaagacc

SEQ ID NO: 67726 - RNA, 26 nt, Human
uauuaaaaauccacagaccaacccag

SEQ ID NO: 67727 - RNA, 21 nt, Human
uauuugccccuugaggcacuu

SEQ ID NO: 67728 - RNA, 18 nt, Human
ucaaaggcaugguggcug

SEQ ID NO: 67729 - RNA, 22 nt, Human
ucaacagggccuugccaggcuc

SEQ ID NO: 67730 - RNA, 21 nt, Human
ucagccucaucacaggcuucc

SEQ ID NO: 67731 - RNA, 23 nt, Human
ucaggccacugaguuguguggga

SEQ ID NO: 67732 - RNA, 22 nt, Human
ucaguggugcuucccuacacag

SEQ ID NO: 67733 - RNA, 21 nt, Human
ucauauguuuccagaugagga

SEQ ID NO: 67734 - RNA, 24 nt, Human
ucauucuggcagcagcucccuggc

SEQ ID NO: 67735 - RNA, 18 nt, Human
uccacagaccaacccaga

SEQ ID NO: 67736 - RNA, 22 nt, Human
uccacagaccaacccagaugga

SEQ ID NO: 67737 - RNA, 22 nt, Human
uccacugcacagaggacauguc

SEQ ID NO: 67738 - RNA, 23 nt, Human
uccaugccacagaugcuugggaa

SEQ ID NO: 67739 - RNA, 24 nt, Human
ucccacaucauccacuucugggca

SEQ ID NO: 67740 - RNA, 23 nt, Human
ucccagguagacuuuucugaagg

SEQ ID NO: 67741 - RNA, 19 nt, Human
ucggcagccucacccuccu

SEQ ID NO: 67742 - RNA, 22 nt, Human
ucucagccucaucacaggcuuc

SEQ ID NO: 67743 - RNA, 24 nt, Human
ucucugggcagguucccugugggg

SEQ ID NO: 67744 - RNA, 21 nt, Human
ucugcaguaguaaaguguuuu

SEQ ID NO: 67745 - RNA, 18 nt, Human
ugaaaggcugggcuuccu

SEQ ID NO: 67746 - RNA, 22 nt, Human
ugaguuacagugcacaagggaa

SEQ ID NO: 67747 - RNA, 19 nt, Human
ugcaaaacuagcaacacaa

SEQ ID NO: 67748 - RNA, 25 nt, Human
ugcacaagggauuugaggcaaguug

SEQ ID NO: 67749 - RNA, 19 nt, Human
ugccacagaugcuugggaa

SEQ ID NO: 67750 - RNA, 19 nt, Human
ugcccuggagaccaacagc

SEQ ID NO: 67751 - RNA, 22 nt, Human
ugccuacuuaauagacuuuuca

SEQ ID NO: 67752 - RNA, 21 nt, Human
ugcuagucaacagggccuugc

SEQ ID NO: 67753 - RNA, 21 nt, Human
ugcuucacccucucccuggcc

SEQ ID NO: 67754 - RNA, 20 nt, Human
uggaaagaaggagagaggag

SEQ ID NO: 67755 - RNA, 23 nt, Human
uggaacaaauuaauggcaaagca

SEQ ID NO: 67756 - RNA, 22 nt, Human
uggaacuaggggucccaagggu

SEQ ID NO: 67757 - RNA, 23 nt, Human
uggagacaagaauagcacuuucc

SEQ ID NO: 67758 - RNA, 20 nt, Human
uggagaccaacagccugaaa

SEQ ID NO: 67759 - RNA, 24 nt, Human
uggcagauuucccaaucaugcaga

SEQ ID NO: 67760 - RNA, 19 nt, Human
uggcagcagcucccuggcc

SEQ ID NO: 67761 - RNA, 18 nt, Human
uggcauacagcaagcacu

SEQ ID NO: 67762 - RNA, 21 nt, Human
uggcaucuuguucccucucaa

SEQ ID NO: 67763 - RNA, 25 nt, Human
ugggagcugggagaguguugguggg

SEQ ID NO: 67764 - RNA, 22 nt, Human
uggggccugcggcaggccuaac

SEQ ID NO: 67765 - RNA, 20 nt, Human
uggucaaaggcaugguggcu

SEQ ID NO: 67766 - RNA, 24 nt, Human
ugguggaauccuccugcuuauggu

SEQ ID NO: 67767 - RNA, 19 nt, Human
ugugcacacgugugugugu

SEQ ID NO: 67768 - RNA, 22 nt, Human
uguguacauacauacacacauu

SEQ ID NO: 67769 - RNA, 27 nt, Human
ugugugcacacguguguguguguguaa

SEQ ID NO: 67770 - RNA, 22 nt, Human
ugugugcauugugugugcacac

SEQ ID NO: 67771 - RNA, 18 nt, Human
uguguguacauacauaca

SEQ ID NO: 67772 - RNA, 19 nt, Human
ugugugugcacacgugugu

SEQ ID NO: 67773 - RNA, 20 nt, Human
ugugugugcacacgugugug

SEQ ID NO: 67774 - RNA, 21 nt, Human
ugugugugcacacgugugugu

SEQ ID NO: 67775 - RNA, 26 nt, Human
ugugugugcacacgugugugugugug

SEQ ID NO: 67776 - RNA, 18 nt, Human
uguguguguguacauaca

SEQ ID NO: 67777 - RNA, 25 nt, Human
uuaaaaauccacagaccaacccaga

SEQ ID NO: 67778 - RNA, 22 nt, Human
uucacucaagcuuaaaacaccg

SEQ ID NO: 67779 - RNA, 18 nt, Human
uucaguguuuggaaagaa

SEQ ID NO: 67780 - RNA, 25 nt, Human
uuccugaggaaugcuugaggguggg

SEQ ID NO: 67781 - RNA, 20 nt, Human
uuugccacaggugggacagc

SEQ ID NO: 67782 - RNA, 18 nt, Human
uuuggaaagaaggagaga

SEQ ID NO: 67783 - RNA, 25 nt, Human
uuuuuuaaaaaacaauaaacuccaa

SEQ ID NO: 67784 - RNA, 22 nt, Human
uuuuuugugaucaauaauagcu

SEQ ID NO: 67785 - RNA, 18 nt, Human
acaccaagccuccgcgca

SEQ ID NO: 67786 - RNA, 21 nt, Human
acccgagccccgagcucaccc

SEQ ID NO: 67787 - RNA, 23 nt, Human
acuugcagguccgggggccgcgc

SEQ ID NO: 67788 - RNA, 18 nt, Human
aggagcagggggcccgga

SEQ ID NO: 67789 - RNA, 25 nt, Human
aggcucggaccuggcacaccaagcc

SEQ ID NO: 67790 - RNA, 23 nt, Human
agggggcccggagacaggggagg

SEQ ID NO: 67791 - RNA, 19 nt, Human
agguggcucuggucaggag

SEQ ID NO: 67792 - RNA, 22 nt, Human
caccaagccuccgcgcaccucc

SEQ ID NO: 67793 - RNA, 19 nt, Human
cauuacacagcaacaaagc

SEQ ID NO: 67794 - RNA, 18 nt, Human
cauugcacccaguacgga

SEQ ID NO: 67795 - RNA, 25 nt, Human
cauugcacccaguacggaacagugg

SEQ ID NO: 67796 - RNA, 19 nt, Human
ccccgagcucacccacccc

SEQ ID NO: 67797 - RNA, 23 nt, Human
ccccgcugccgcucggcuccccg

SEQ ID NO: 67798 - RNA, 19 nt, Human
ccgagccccgagcucaccc

SEQ ID NO: 67799 - RNA, 21 nt, Human
ccgcccgcccggaaucgcuuu

SEQ ID NO: 67800 - RNA, 19 nt, Human
ccgccgccgccgccuccuc

SEQ ID NO: 67801 - RNA, 27 nt, Human
ccgccgccuccuccucuuccgccgccc

SEQ ID NO: 67802 - RNA, 21 nt, Human
ccgcgcccgcccgcccgcagg

SEQ ID NO: 67803 - RNA, 18 nt, Human
ccgcugccgcucggcucc

SEQ ID NO: 67804 - RNA, 19 nt, Human
ccugcccgccgccgccgcc

SEQ ID NO: 67805 - RNA, 24 nt, Human
ccugcccgccgccgccgccuccuc

SEQ ID NO: 67806 - RNA, 23 nt, Human
cgagccccgagcucacccacccc

SEQ ID NO: 67807 - RNA, 20 nt, Human
cgcaguuugcagcgcgcacc

SEQ ID NO: 67808 - RNA, 21 nt, Human
cgcccggggaaggggggcggg

SEQ ID NO: 67809 - RNA, 22 nt, Human
cgcgccgccaugcgcaacaacg

SEQ ID NO: 67810 - RNA, 24 nt, Human
cgcggcgcuggcguccgggucccc

SEQ ID NO: 67811 - RNA, 24 nt, Human
cggcggcgaccgcgcccgcccgcc

SEQ ID NO: 67812 - RNA, 21 nt, Human
cgggacgcggcggggauucac

SEQ ID NO: 67813 - RNA, 19 nt, Human
cgguaugcuccccaccucc

SEQ ID NO: 67814 - RNA, 22 nt, Human
cguccggguccccggccugccc

SEQ ID NO: 67815 - RNA, 20 nt, Human
cucacagccccgcugccgcu

SEQ ID NO: 67816 - RNA, 19 nt, Human
gagcucacccaccccaggc

SEQ ID NO: 67817 - RNA, 18 nt, Human
gaggggagcucauggugg

SEQ ID NO: 67818 - RNA, 20 nt, Human
gcagggcuggcggucggccc

SEQ ID NO: 67819 - RNA, 18 nt, Human
gccccgagcucacccacc

SEQ ID NO: 67820 - RNA, 19 nt, Human
gccgccgccgccuccuccu

SEQ ID NO: 67821 - RNA, 18 nt, Human
gcggggauucacccacgg

SEQ ID NO: 67822 - RNA, 19 nt, Human
gcucuggucaggagcaggg

SEQ ID NO: 67823 - RNA, 22 nt, Human
ggagacaggggaggggagcuca

SEQ ID NO: 67824 - RNA, 21 nt, Human
ggcggcgaccgcgcccgcccg

SEQ ID NO: 67825 - RNA, 22 nt, Human
gggcgcggcgcuggcguccggg

SEQ ID NO: 67826 - RNA, 18 nt, Human
gggcggggcggggggccu

SEQ ID NO: 67827 - RNA, 19 nt, Human
ggggaaggggggcgggcgg

SEQ ID NO: 67828 - RNA, 19 nt, Human
ggggcgggcggggcggggg

SEQ ID NO: 67829 - RNA, 21 nt, Human
guccccggagggagguccccg

SEQ ID NO: 67830 - RNA, 20 nt, Human
guuugcagcgcgcaccgccc

SEQ ID NO: 67831 - RNA, 18 nt, Human
uaaauucauuuguuugua

SEQ ID NO: 67832 - RNA, 19 nt, Human
uacacagcaacaaagcgga

SEQ ID NO: 67833 - RNA, 22 nt, Human
uacacagcaacaaagcggaagg

SEQ ID NO: 67834 - RNA, 23 nt, Human
uccaguggcacccgagccccgag

SEQ ID NO: 67835 - RNA, 19 nt, Human
uccccaccucccgcuggcc

SEQ ID NO: 67836 - RNA, 19 nt, Human
ugaaacucacagccccgcu

SEQ ID NO: 67837 - RNA, 19 nt, Human
ugcagguccgggggccgcg

SEQ ID NO: 67838 - RNA, 21 nt, Human
uggcguccggguccccggccu

SEQ ID NO: 67839 - RNA, 18 nt, Human
uggucaggagcagggggc

SEQ ID NO: 67840 - RNA, 18 nt, Human
uuguauuguucaucuuca

SEQ ID NO: 67841 - RNA, 22 nt, Human
aaccacagauuucgcauaaaug

SEQ ID NO: 67842 - RNA, 19 nt, Human
aaacccgcgccggccccag

SEQ ID NO: 67843 - RNA, 24 nt, Human
aaagcgcuccguccccacguccag

SEQ ID NO: 67844 - RNA, 22 nt, Human
aacccgcgccggccccaggagc

SEQ ID NO: 67845 - RNA, 25 nt, Human
aacccgcgccggccccaggagcaca

SEQ ID NO: 67846 - RNA, 20 nt, Human
acaagcacauugacgcuccu

SEQ ID NO: 67847 - RNA, 26 nt, Human
accaauccaaaacccgcgccggcccc

SEQ ID NO: 67848 - RNA, 19 nt, Human
acccugagggcgggggagg

SEQ ID NO: 67849 - RNA, 21 nt, Human
acccugagggcgggggaggag

SEQ ID NO: 67850 - RNA, 18 nt, Human
accuugcggggcucgggg

SEQ ID NO: 67851 - RNA, 23 nt, Human
aggccgcaccccaccaauccaaa

SEQ ID NO: 67852 - RNA, 24 nt, Human
aggggauucuuccaccggccgcca

SEQ ID NO: 67853 - RNA, 19 nt, Human
augcugccgcaggcacugc

SEQ ID NO: 67854 - RNA, 22 nt, Human
caaaacccgcgccggccccagg

SEQ ID NO: 67855 - RNA, 20 nt, Human
caagaggaaagcgcuccguc

SEQ ID NO: 67856 - RNA, 27 nt, Human
caagcacauugacgcuccugacuaucc

SEQ ID NO: 67857 - RNA, 24 nt, Human
caccgcccgcccuugacucacgcc

SEQ ID NO: 67858 - RNA, 22 nt, Human
cagcggccgcgccccgcccacc

SEQ ID NO: 67859 - RNA, 23 nt, Human
cagggcaguuguauuugccccuc

SEQ ID NO: 67860 - RNA, 22 nt, Human
caucuagagaaucgggaacagg

SEQ ID NO: 67861 - RNA, 24 nt, Human
caucuugguuccugcacguuucgu

SEQ ID NO: 67862 - RNA, 19 nt, Human
ccaauccaaaacccgcgcc

SEQ ID NO: 67863 - RNA, 26 nt, Human
cccaccaauccaaaacccgcgccggc

SEQ ID NO: 67864 - RNA, 21 nt, Human
ccccaccaauccaaaacccgc

SEQ ID NO: 67865 - RNA, 19 nt, Human
ccccuuggcggcaccgccc

SEQ ID NO: 67866 - RNA, 20 nt, Human
cccgcgccgccgcccugccg

SEQ ID NO: 67867 - RNA, 23 nt, Human
cccugccgccgccaucuugguuc

SEQ ID NO: 67868 - RNA, 21 nt, Human
cccuggccccaggccgcaccc

SEQ ID NO: 67869 - RNA, 24 nt, Human
cccuugacucacgcccgcgccgcc

SEQ ID NO: 67870 - RNA, 20 nt, Human
ccgcaccccaccaauccaaa

SEQ ID NO: 67871 - RNA, 21 nt, Human
ccgcaccccaccaauccaaaa

SEQ ID NO: 67872 - RNA, 23 nt, Human
ccgcaccccaccaauccaaaacc

SEQ ID NO: 67873 - RNA, 24 nt, Human
ccgcccaccgcccgcccuugacuc

SEQ ID NO: 67874 - RNA, 24 nt, Human
ccgcccugccgccgccaucuuggu

SEQ ID NO: 67875 - RNA, 25 nt, Human
ccgccgcccugccgccgccaucuug

SEQ ID NO: 67876 - RNA, 26 nt, Human
ccgcgccccgcccaccgcccgcccuu

SEQ ID NO: 67877 - RNA, 21 nt, Human
ccuggccccaggccgcacccc

SEQ ID NO: 67878 - RNA, 23 nt, Human
ccugggaccuugcggggcucggg

SEQ ID NO: 67879 - RNA, 19 nt, Human
ccuugcggggcucgggguc

SEQ ID NO: 67880 - RNA, 20 nt, Human
cgccaagaggaaagcgcucc

SEQ ID NO: 67881 - RNA, 20 nt, Human
cgccaugguggccguggacc

SEQ ID NO: 67882 - RNA, 26 nt, Human
cgccccgcccaccgcccgcccuugac

SEQ ID NO: 67883 - RNA, 20 nt, Human
cgcccgcgccgccgcccugc

SEQ ID NO: 67884 - RNA, 19 nt, Human
cgccgccgcccugccgccg

SEQ ID NO: 67885 - RNA, 19 nt, Human
cggccccaggagcacagcu

SEQ ID NO: 67886 - RNA, 18 nt, Human
cuagagaaucgggaacag

SEQ ID NO: 67887 - RNA, 18 nt, Human
cugcugccccuaauacgc

SEQ ID NO: 67888 - RNA, 20 nt, Human
cugcugccccuaauacgcca

SEQ ID NO: 67889 - RNA, 18 nt, Human
cuggaaucgaggaaugug

SEQ ID NO: 67890 - RNA, 23 nt, Human
cuugcggggcucgggguccgagg

SEQ ID NO: 67891 - RNA, 23 nt, Human
gaaugagaaucagaagccaacuc

SEQ ID NO: 67892 - RNA, 18 nt, Human
gacacccaagcaaagacc

SEQ ID NO: 67893 - RNA, 18 nt, Human
gcaaagaccacgcguccc

SEQ ID NO: 67894 - RNA, 19 nt, Human
gcacagcuggacgacccgc

SEQ ID NO: 67895 - RNA, 21 nt, Human
gccguggacccugagggcggg

SEQ ID NO: 67896 - RNA, 18 nt, Human
gcuguagggcuccugggg

SEQ ID NO: 67897 - RNA, 18 nt, Human
ggccguggacccugaggg

SEQ ID NO: 67898 - RNA, 21 nt, Human
gggcuccuggggaagcagucc

SEQ ID NO: 67899 - RNA, 19 nt, Human
ggggacacccaagcaaaga

SEQ ID NO: 67900 - RNA, 22 nt, Human
gguggccguggacccugagggc

SEQ ID NO: 67901 - RNA, 22 nt, Human
gguggccguggacccugagggc

SEQ ID NO: 67902 - RNA, 19 nt, Human
guacaagcacauugacgcu

SEQ ID NO: 67903 - RNA, 22 nt, Human
guacaagcacauugacgcuccu

SEQ ID NO: 67904 - RNA, 23 nt, Human
uccacaaaauggacgcucacgga

SEQ ID NO: 67905 - RNA, 22 nt, Human
ucguggggcaacagccaagacc

SEQ ID NO: 67906 - RNA, 24 nt, Human
ucugagaauuucauccuuccacuu

SEQ ID NO: 67907 - RNA, 22 nt, Human
ugagaagccugaaugagaauca

SEQ ID NO: 67908 - RNA, 21 nt, Human
ugcggggcucgggguccgagg

SEQ ID NO: 67909 - RNA, 19 nt, Human
uggccccaggccgcacccc

SEQ ID NO: 67910 - RNA, 22 nt, Human
ugggaccuugcggggcucgggg

SEQ ID NO: 67911 - RNA, 25 nt, Human
aaacgauccuccugccuuggccucc

SEQ ID NO: 67912 - RNA, 18 nt, Human
aaagugcugggauuacaa

SEQ ID NO: 67913 - RNA, 22 nt, Human
aagaaagaaggugggagcggag

SEQ ID NO: 67914 - RNA, 19 nt, Human
aagcucccagcugcuuccc

SEQ ID NO: 67915 - RNA, 19 nt, Human
aagugcugggauuacaagc

SEQ ID NO: 67916 - RNA, 21 nt, Human
aagugcugggauuacaagcau

SEQ ID NO: 67917 - RNA, 26 nt, Human
aagugcugggauuacaagcauaagcc

SEQ ID NO: 67918 - RNA, 19 nt, Human
aauagagacagggucuuac

SEQ ID NO: 67919 - RNA, 21 nt, Human
acacagccccucuccaacacc

SEQ ID NO: 67920 - RNA, 24 nt, Human
acccagacacagccccucuccaac

SEQ ID NO: 67921 - RNA, 25 nt, Human
acuauguugcccaggcugguauuga

SEQ ID NO: 67922 - RNA, 25 nt, Human
agaaggugggagcggagagcgcagg

SEQ ID NO: 67923 - RNA, 18 nt, Human
agacagggucuuacuaug

SEQ ID NO: 67924 - RNA, 23 nt, Human
agacagggucuuacuauguugcc

SEQ ID NO: 67925 - RNA, 23 nt, Human
agaggcugcaccagcagcuggca

SEQ ID NO: 67926 - RNA, 24 nt, Human
agcgcggagacgggccgggggcac

SEQ ID NO: 67927 - RNA, 18 nt, Human
aggcagggggaugaaggc

SEQ ID NO: 67928 - RNA, 18 nt, Human
aggcgaaaguggaagacu

SEQ ID NO: 67929 - RNA, 24 nt, Human
aggcggcggcggccucggcugaag

SEQ ID NO: 67930 - RNA, 19 nt, Human
aggcugcaccagcagcugg

SEQ ID NO: 67931 - RNA, 19 nt, Human
agguagaggcagggggaug

SEQ ID NO: 67932 - RNA, 24 nt, Human
agguagaggcagggggaugaaggc

SEQ ID NO: 67933 - RNA, 18 nt, Human
agugcugggauuacaagc

SEQ ID NO: 67934 - RNA, 20 nt, Human
aguggaagacuccauggcug

SEQ ID NO: 67935 - RNA, 23 nt, Human
auggcaacaggagaggcugcacc

SEQ ID NO: 67936 - RNA, 26 nt, Human
auuuuuuuuuuuuaauagagacaggg

SEQ ID NO: 67937 - RNA, 24 nt, Human
caaagugcugggauuacaagcaua

SEQ ID NO: 67938 - RNA, 21 nt, Human
caacaggagaggcugcaccag

SEQ ID NO: 67939 - RNA, 23 nt, Human
caaccaccuguaagaaaccaggu

SEQ ID NO: 67940 - RNA, 23 nt, Human
caacuacagcccugcccugcccc

SEQ ID NO: 67941 - RNA, 19 nt, Human
cacuccacccaccccagac

SEQ ID NO: 67942 - RNA, 22 nt, Human
cagcccccagaagccacacccc

SEQ ID NO: 67943 - RNA, 18 nt, Human
cagccccucuccaacacc

SEQ ID NO: 67944 - RNA, 20 nt, Human
cagcccugcccugccccucc

SEQ ID NO: 67945 - RNA, 20 nt, Human
caggagaggcugcaccagca

SEQ ID NO: 67946 - RNA, 24 nt, Human
caggcaccaaggcgaaaguggaag

SEQ ID NO: 67947 - RNA, 24 nt, Human
cagggucuuacuauguugcccagg

SEQ ID NO: 67948 - RNA, 21 nt, Human
caucccucacccagacacagc

SEQ ID NO: 67949 - RNA, 21 nt, Human
ccaaacauuucaugauuugga

SEQ ID NO: 67950 - RNA, 19 nt, Human
ccaaagugcugggauuaca

SEQ ID NO: 67951 - RNA, 24 nt, Human
ccaaagugcugggauuacaagcau

SEQ ID NO: 67952 - RNA, 28 nt, Human
ccaagcucccagcugcuucccugugggc

SEQ ID NO: 67953 - RNA, 19 nt, Human
ccaaggcgaaaguggaaga

SEQ ID NO: 67954 - RNA, 18 nt, Human
ccacugcacccggccgag

SEQ ID NO: 67955 - RNA, 20 nt, Human
ccacugcacccggccgagag

SEQ ID NO: 67956 - RNA, 22 nt, Human
ccacugcacccggccgagaggg

SEQ ID NO: 67957 - RNA, 21 nt, Human
ccacuggccugcucaucuucc

SEQ ID NO: 67958 - RNA, 23 nt, Human
cccaaaaaaaucaguaccccgcc

SEQ ID NO: 67959 - RNA, 18 nt, Human
cccaccccagacaaccac

SEQ ID NO: 67960 - RNA, 22 nt, Human
ccccagaagccacaccccugcc

SEQ ID NO: 67961 - RNA, 22 nt, Human
ccccagacaaccaccuguaaga

SEQ ID NO: 67962 - RNA, 23 nt, Human
ccccagacaaccaccuguaagaa

SEQ ID NO: 67963 - RNA, 24 nt, Human
cccccagaagccacaccccugccc

SEQ ID NO: 67964 - RNA, 18 nt, Human
ccccucuccaacaccuuc

SEQ ID NO: 67965 - RNA, 21 nt, Human
cccgccaucccucacccagac

SEQ ID NO: 67966 - RNA, 24 nt, Human
ccgggggcacaaaggggucgaggc

SEQ ID NO: 67967 - RNA, 23 nt, Human
ccucccaaaaaaaucaguacccc

SEQ ID NO: 67968 - RNA, 26 nt, Human
ccuccugccuuggccucccaaagugc

SEQ ID NO: 67969 - RNA, 18 nt, Human
ccuggccucaaacgaucc

SEQ ID NO: 67970 - RNA, 25 nt, Human
ccuucagcucuauccugucgccacu

SEQ ID NO: 67971 - RNA, 31 nt, Human
cgccagagcugaagaccagcccccagaagcc

SEQ ID NO: 67972 - RNA, 23 nt, Human
cuaaaaugaacacccagucacca

SEQ ID NO: 67973 - RNA, 19 nt, Human
cuaaggccaaacauuucau

SEQ ID NO: 67974 - RNA, 24 nt, Human
cucaaacgauccuccugccuuggc

SEQ ID NO: 67975 - RNA, 19 nt, Human
cugccccuccucccacugg

SEQ ID NO: 67976 - RNA, 23 nt, Human
cugccuuggccucccaaagugcu

SEQ ID NO: 67977 - RNA, 20 nt, Human
gaaggugggagcggagagcg

SEQ ID NO: 67978 - RNA, 19 nt, Human
gacgagaaaggagggaagg

SEQ ID NO: 67979 - RNA, 26 nt, Human
gacgagaaaggagggaaggagaucca

SEQ ID NO: 67980 - RNA, 24 nt, Human
gaggaguugggugguuuggugggg

SEQ ID NO: 67981 - RNA, 20 nt, Human
gagggguuuggaaugaaggu

SEQ ID NO: 67982 - RNA, 27 nt, Human
gauaagcagagacagaggauaaaagga

SEQ ID NO: 67983 - RNA, 23 nt, Human
gauuacaagcauaagccacugca

SEQ ID NO: 67984 - RNA, 19 nt, Human
gcccugccccuccucccac

SEQ ID NO: 67985 - RNA, 22 nt, Human
gccuuggccucccaaagugcug

SEQ ID NO: 67986 - RNA, 18 nt, Human
gcgaagacaggcaccaag

SEQ ID NO: 67987 - RNA, 23 nt, Human
gcgcaggcguggugagcgcggag

SEQ ID NO: 67988 - RNA, 24 nt, Human
gcgccagagcugaagaccagcccc

SEQ ID NO: 67989 - RNA, 23 nt, Human
gcuaaaaugaacacccagucacc

SEQ ID NO: 67990 - RNA, 22 nt, Human
gcugguauugaccuccuggccu

SEQ ID NO: 67991 - RNA, 25 nt, Human
ggaaggagauccagaaauacgcaag

SEQ ID NO: 67992 - RNA, 22 nt, Human
ggauuacaagcauaagccacug

SEQ ID NO: 67993 - RNA, 18 nt, Human
ggcggcggcggccucggc

SEQ ID NO: 67994 - RNA, 18 nt, Human
gggccgggggcacaaagg

SEQ ID NO: 67995 - RNA, 18 nt, Human
ggggcuacgcaggcagag

SEQ ID NO: 67996 - RNA, 18 nt, Human
gggugguuugguggggaa

SEQ ID NO: 67997 - RNA, 21 nt, Human
gguagaggcagggggaugaag

SEQ ID NO: 67998 - RNA, 19 nt, Human
ggugggcgaagacaggcac

SEQ ID NO: 67999 - RNA, 21 nt, Human
uaaaaugaacacccagucacc

SEQ ID NO: 68000 - RNA, 21 nt, Human
uaagcagagacagaggauaaa

SEQ ID NO: 68001 - RNA, 24 nt, Human
uaauagagacagggucuuacuaug

SEQ ID NO: 68002 - RNA, 23 nt, Human
uacaagcauaagccacugcaccc

SEQ ID NO: 68003 - RNA, 21 nt, Human
uacagcccugcccugccccuc

SEQ ID NO: 68004 - RNA, 21 nt, Human
uacuauguugcccaggcuggu

SEQ ID NO: 68005 - RNA, 26 nt, Human
uacuauguugcccaggcugguauuga

SEQ ID NO: 68006 - RNA, 22 nt, Human
uagagacagggucuuacuaugu

SEQ ID NO: 68007 - RNA, 19 nt, Human
uagagaggaguuggguggu

SEQ ID NO: 68008 - RNA, 19 nt, Human
uagaggcagggggaugaag

SEQ ID NO: 68009 - RNA, 27 nt, Human
uagccucccucccuuagcguagugucc

SEQ ID NO: 68010 - RNA, 21 nt, Human
uagugagaagagacugugauc

SEQ ID NO: 68011 - RNA, 23 nt, Human
uauggguccccuucucaaagccc

SEQ ID NO: 68012 - RNA, 18 nt, Human
uauguugcccaggcuggu

SEQ ID NO: 68013 - RNA, 19 nt, Human
uauguugcccaggcuggua

SEQ ID NO: 68014 - RNA, 23 nt, Human
uauguugcccaggcugguauuga

SEQ ID NO: 68015 - RNA, 25 nt, Human
uauuuuugcucauaaccucccaaaa

SEQ ID NO: 68016 - RNA, 18 nt, Human
ucaaagcccgcccugacu

SEQ ID NO: 68017 - RNA, 21 nt, Human
ucauaaccucccaaaaaaauc

SEQ ID NO: 68018 - RNA, 21 nt, Human
uccaagcucccagcugcuucc

SEQ ID NO: 68019 - RNA, 21 nt, Human
uccacccaccccagacaacca

SEQ ID NO: 68020 - RNA, 22 nt, Human
uccauggcugcagcaaggagag

SEQ ID NO: 68021 - RNA, 24 nt, Human
uccauggcugcagcaaggagaggc

SEQ ID NO: 68022 - RNA, 18 nt, Human
ucccaaagugcugggauu

SEQ ID NO: 68023 - RNA, 24 nt, Human
ucccaaagugcugggauuacaagc

SEQ ID NO: 68024 - RNA, 19 nt, Human
ucccaaggucaccuagccu

SEQ ID NO: 68025 - RNA, 22 nt, Human
ucccacuggccugcucaucuuc

SEQ ID NO: 68026 - RNA, 24 nt, Human
ucggugccucggcuguuaugugac

SEQ ID NO: 68027 - RNA, 22 nt, Human
ucuccaacaccuucacgaaaca

SEQ ID NO: 68028 - RNA, 19 nt, Human
ucuuacuauguugcccagg

SEQ ID NO: 68029 - RNA, 23 nt, Human
ucuuacuauguugcccaggcugg

SEQ ID NO: 68030 - RNA, 24 nt, Human
ucuuacuauguugcccaggcuggu

SEQ ID NO: 68031 - RNA, 26 nt, Human
ugaacacccagucaccaacuacagcc

SEQ ID NO: 68032 - RNA, 19 nt, Human
ugaagaaagaaggugggag

SEQ ID NO: 68033 - RNA, 21 nt, Human
ugaagaccagcccccagaagc

SEQ ID NO: 68034 - RNA, 21 nt, Human
ugauccgaggacagggaauga

SEQ ID NO: 68035 - RNA, 18 nt, Human
ugcccugccccuccuccc

SEQ ID NO: 68036 - RNA, 24 nt, Human
ugcccugccccuccucccacuggc

SEQ ID NO: 68037 - RNA, 23 nt, Human
ugccuguaggauauggguccccu

SEQ ID NO: 68038 - RNA, 27 nt, Human
ugcugggauuacaagcauaagccacug

SEQ ID NO: 68039 - RNA, 24 nt, Human
uggccucaaacgauccuccugccu

SEQ ID NO: 68040 - RNA, 21 nt, Human
uggccugcucaucuucccgca

SEQ ID NO: 68041 - RNA, 19 nt, Human
uggcugcagcaaggagagg

SEQ ID NO: 68042 - RNA, 25 nt, Human
ugggagcggagagcgcaggcguggu

SEQ ID NO: 68043 - RNA, 21 nt, Human
ugggauuacaagcauaagcca

SEQ ID NO: 68044 - RNA, 22 nt, Human
ugggauuacaagcauaagccac

SEQ ID NO: 68045 - RNA, 22 nt, Human
ugggauuacaagcauaagccac

SEQ ID NO: 68046 - RNA, 24 nt, Human
ugggauuacaagcauaagccacug

SEQ ID NO: 68047 - RNA, 24 nt, Human
ugggauuacaagcauaagccacug

SEQ ID NO: 68048 - RNA, 26 nt, Human
ugggauuacaagcauaagccacugca

SEQ ID NO: 68049 - RNA, 21 nt, Human
ugggcgaagacaggcaccaag

SEQ ID NO: 68050 - RNA, 20 nt, Human
uuagagcuaaaaugaacacc

SEQ ID NO: 68051 - RNA, 23 nt, Human
uucccgcacugcaaaccuggccg

SEQ ID NO: 68052 - RNA, 18 nt, Human
uuggccucccaaagugcu

SEQ ID NO: 68053 - RNA, 18 nt, Human
uuuugcucauaaccuccc

SEQ ID NO: 68054 - RNA, 28 nt, Human
uuuuuuuuuuuuaauagagacagggucu

SEQ ID NO: 68055 - RNA, 26 nt, Human
aaauucacuuuaugaaucaauaagug

SEQ ID NO: 68056 - RNA, 21 nt, Human
aacacuggaggaugcagggcu

SEQ ID NO: 68057 - RNA, 22 nt, Human
acaaguuccuucucccuggaac

SEQ ID NO: 68058 - RNA, 20 nt, Human
agaaagcagcauuuugcuca

SEQ ID NO: 68059 - RNA, 24 nt, Human
agaaagcagcauuuugcucaccug

SEQ ID NO: 68060 - RNA, 19 nt, Human
aggcagaaagcagcauuuu

SEQ ID NO: 68061 - RNA, 19 nt, Human
agugaaauggcaaaaagga

SEQ ID NO: 68062 - RNA, 20 nt, Human
auuuugcucaccugcucuuc

SEQ ID NO: 68063 - RNA, 28 nt, Human
ccaaggcagaaagcagcauuuugcucac

SEQ ID NO: 68064 - RNA, 22 nt, Human
gcagaaagcagcauuuugcuca

SEQ ID NO: 68065 - RNA, 21 nt, Human
gcucaguuuuccagcauagcu

SEQ ID NO: 68066 - RNA, 22 nt, Human
guucucugccugccaccaaggc

SEQ ID NO: 68067 - RNA, 19 nt, Human
uaaaagaagaugacuguuu

SEQ ID NO: 68068 - RNA, 21 nt, Human
uaaacacaaaaccaucacaga

SEQ ID NO: 68069 - RNA, 20 nt, Human
uaguaaagacaaacuacuuu

SEQ ID NO: 68070 - RNA, 24 nt, Human
uauuucuucuucuuuccuccuuga

SEQ ID NO: 68071 - RNA, 21 nt, Human
ucccacgcucaguuuuccagc

SEQ ID NO: 68072 - RNA, 19 nt, Human
ucccuggaacuccgugauu

SEQ ID NO: 68073 - RNA, 21 nt, Human
uccgugauuaauaucugggac

SEQ ID NO: 68074 - RNA, 21 nt, Human
ucucuugcaucugaauuccag

SEQ ID NO: 68075 - RNA, 23 nt, Human
ugccacugaagaaacauuguucu

SEQ ID NO: 68076 - RNA, 20 nt, Human
uggcaaaaaggagaggugga

SEQ ID NO: 68077 - RNA, 20 nt, Human
ugggacggcggcggcagggg

SEQ ID NO: 68078 - RNA, 18 nt, Human
uuccagcauagcugcagg

SEQ ID NO: 68079 - RNA, 19 nt, Human
uuuugcucaccugcucuuc

SEQ ID NO: 68080 - RNA, 23 nt, Human
aaaccuagaagugccaaggguua

SEQ ID NO: 68081 - RNA, 18 nt, Human
aaagaccccaccacuaca

SEQ ID NO: 68082 - RNA, 18 nt, Human
aacaaaggaaccucgaga

SEQ ID NO: 68083 - RNA, 20 nt, Human
aacaagcuuugaaauacuuu

SEQ ID NO: 68084 - RNA, 21 nt, Human
aaccccacccugggggaugau

SEQ ID NO: 68085 - RNA, 19 nt, Human
aagaaggagggaggggagg

SEQ ID NO: 68086 - RNA, 23 nt, Human
aagcaggagcagaaaaaugacca

SEQ ID NO: 68087 - RNA, 26 nt, Human
aagcaggagcagaaaaaugaccaaag

SEQ ID NO: 68088 - RNA, 18 nt, Human
acaacacacaauuccccc

SEQ ID NO: 68089 - RNA, 21 nt, Human
acaacacacaauuccccccac

SEQ ID NO: 68090 - RNA, 19 nt, Human
acacaauuccccccacccc

SEQ ID NO: 68091 - RNA, 24 nt, Human
acccugggggaugaucuaugaggc

SEQ ID NO: 68092 - RNA, 19 nt, Human
agaaggagggaggggagga

SEQ ID NO: 68093 - RNA, 20 nt, Human
agaaggagggaggggaggag

SEQ ID NO: 68094 - RNA, 26 nt, Human
agaaggagggaggggaggagacagaa

SEQ ID NO: 68095 - RNA, 22 nt, Human
agaguccccuacaugacagccu

SEQ ID NO: 68096 - RNA, 19 nt, Human
agccuccaggagggcugag

SEQ ID NO: 68097 - RNA, 18 nt, Human
agcuccuccuuucccccc

SEQ ID NO: 68098 - RNA, 23 nt, Human
aggaacaaaaagguaacagccac

SEQ ID NO: 68099 - RNA, 26 nt, Human
aggaacaaaaagguaacagccacggc

SEQ ID NO: 68100 - RNA, 25 nt, Human
agggacaaaaugagguacccaaaua

SEQ ID NO: 68101 - RNA, 31 nt, Human
auaaagcuuauggaaaaacuggaaaauacuu

SEQ ID NO: 68102 - RNA, 19 nt, Human
augaggcuccggggcuggg

SEQ ID NO: 68103 - RNA, 26 nt, Human
augguuaaacuaaagaaggagggagg

SEQ ID NO: 68104 - RNA, 24 nt, Human
auuaaggaagaggaaaaaggaaac

SEQ ID NO: 68105 - RNA, 20 nt, Human
auuucauauagcagagagga

SEQ ID NO: 68106 - RNA, 24 nt, Human
auuucauauagcagagaggagcgg

SEQ ID NO: 68107 - RNA, 19 nt, Human
caaaaugagguacccaaau

SEQ ID NO: 68108 - RNA, 24 nt, Human
caagcaaucuuuaauaauaaggcc

SEQ ID NO: 68109 - RNA, 20 nt, Human
caagcuuugaaauacuuugu

SEQ ID NO: 68110 - RNA, 20 nt, Human
cacacaauuccccccaccca

SEQ ID NO: 68111 - RNA, 23 nt, Human
caccacuacacuaaagucaaggg

SEQ ID NO: 68112 - RNA, 20 nt, Human
cagaagagacaggggcggua

SEQ ID NO: 68113 - RNA, 19 nt, Human
cagauucugggcccuuccc

SEQ ID NO: 68114 - RNA, 24 nt, Human
ccacuacacuaaagucaagggaca

SEQ ID NO: 68115 - RNA, 24 nt, Human
ccaucuggaaaggccuuuggcugu

SEQ ID NO: 68116 - RNA, 19 nt, Human
ccauguccaaggcagaugg

SEQ ID NO: 68117 - RNA, 21 nt, Human
cccauaucuguccauuacuca

SEQ ID NO: 68118 - RNA, 23 nt, Human
ccccaccacuacacuaaagucaa

SEQ ID NO: 68119 - RNA, 24 nt, Human
cccccacccauauugccaugucca

SEQ ID NO: 68120 - RNA, 18 nt, Human
cuccaggagggcugaguc

SEQ ID NO: 68121 - RNA, 21 nt, Human
cuggaaaauacugcuacuuca

SEQ ID NO: 68122 - RNA, 21 nt, Human
cuguccauuacucacaacaca

SEQ ID NO: 68123 - RNA, 21 nt, Human
cuuugaaauacuuuguuccug

SEQ ID NO: 68124 - RNA, 20 nt, Human
gaagagagacaggggcggua

SEQ ID NO: 68125 - RNA, 18 nt, Human
gagaaaccccaaaccuag

SEQ ID NO: 68126 - RNA, 27 nt, Human
gagaaaccccaaaccuagaagugccaa

SEQ ID NO: 68127 - RNA, 23 nt, Human
gcaggagcagaaaaaugaccaaa

SEQ ID NO: 68128 - RNA, 18 nt, Human
gcagguagagagaaggaa

SEQ ID NO: 68129 - RNA, 21 nt, Human
gcugugcaaauagaugaaaaa

SEQ ID NO: 68130 - RNA, 20 nt, Human
ggaaaggccuuuggcugugg

SEQ ID NO: 68131 - RNA, 22 nt, Human
gggcugggucagcggguaauau

SEQ ID NO: 68132 - RNA, 21 nt, Human
gguagagagaaggaauaaagc

SEQ ID NO: 68133 - RNA, 23 nt, Human
guagaacaaaggaaccucgagag

SEQ ID NO: 68134 - RNA, 30 nt, Human
guagaacaaaggaaccucgagaguccccuu

SEQ ID NO: 68135 - RNA, 21 nt, Human
gucagauucugggcccuuccc

SEQ ID NO: 68136 - RNA, 25 nt, Human
guuaaacuaaagaaggagggagggg

SEQ ID NO: 68137 - RNA, 19 nt, Human
uaaacuaaagaaggaggga

SEQ ID NO: 68138 - RNA, 21 nt, Human
uaaagcuuauggaaaaacugg

SEQ ID NO: 68139 - RNA, 19 nt, Human
uaacuugauggaacaagcu

SEQ ID NO: 68140 - RNA, 21 nt, Human
uaacuugauggaacaagcuuu

SEQ ID NO: 68141 - RNA, 18 nt, Human
uaagcagcuaugggagac

SEQ ID NO: 68142 - RNA, 19 nt, Human
uacacuaaagucaagggac

SEQ ID NO: 68143 - RNA, 24 nt, Human
uagugggaagagagggaacugaga

SEQ ID NO: 68144 - RNA, 21 nt, Human
uaugaggcuccggggcuggga

SEQ ID NO: 68145 - RNA, 22 nt, Human
uaugaggcuccggggcugggag

SEQ ID NO: 68146 - RNA, 26 nt, Human
uauggaaaaacuggaaaauacugcua

SEQ ID NO: 68147 - RNA, 22 nt, Human
ucacaacacacaauucccccca

SEQ ID NO: 68148 - RNA, 27 nt, Human
ucuccagcuccuccuuuccgggccgcc

SEQ ID NO: 68149 - RNA, 23 nt, Human
ucucucuuggcucuugggcgggc

SEQ ID NO: 68150 - RNA, 23 nt, Human
ucugcccugaugguuaaacuaaa

SEQ ID NO: 68151 - RNA, 21 nt, Human
ucuggcaggaaguggcaugcu

SEQ ID NO: 68152 - RNA, 19 nt, Human
ucuuucuuuuugguggcag

SEQ ID NO: 68153 - RNA, 20 nt, Human
ucuuucuuuuugguggcagg

SEQ ID NO: 68154 - RNA, 22 nt, Human
ugaaaaagaauuagaacucuug

SEQ ID NO: 68155 - RNA, 23 nt, Human
ugaccacauggcuaaaaagcccc

SEQ ID NO: 68156 - RNA, 21 nt, Human
ugaggguuucuuucuuuuugg

SEQ ID NO: 68157 - RNA, 23 nt, Human
ugagguugccaaggcuuaguggg

SEQ ID NO: 68158 - RNA, 21 nt, Human
ugaguccaugggguggcuggg

SEQ ID NO: 68159 - RNA, 21 nt, Human
ugauaggggaaugaagagaga

SEQ ID NO: 68160 - RNA, 24 nt, Human
ugaugguuaaacuaaagaaggagg

SEQ ID NO: 68161 - RNA, 24 nt, Human
uggaaaaacuggaaaauacugcua

SEQ ID NO: 68162 - RNA, 23 nt, Human
uggcuggggcugggucagcgggu

SEQ ID NO: 68163 - RNA, 20 nt, Human
ugggaggggauaagaugaca

SEQ ID NO: 68164 - RNA, 25 nt, Human
ugggcccuucccuuuucacuaccaa

SEQ ID NO: 68165 - RNA, 20 nt, Human
ugggguggcuggggcugggu

SEQ ID NO: 68166 - RNA, 18 nt, Human
ugggguggugggaaagac

SEQ ID NO: 68167 - RNA, 24 nt, Human
ugguaaggaacaaaaagguaacag

SEQ ID NO: 68168 - RNA, 23 nt, Human
uuaaucccuaacuugauggaaca

SEQ ID NO: 68169 - RNA, 24 nt, Human
uuccugucugcccugaugguuaaa

SEQ ID NO: 68170 - RNA, 18 nt, Human
aaaaaaacaggaagaaca

SEQ ID NO: 68171 - RNA, 23 nt, Human
aaaaaaacaggaagaacaggaua

SEQ ID NO: 68172 - RNA, 25 nt, Human
aaaacaaaacaaagcaaaaaaacag

SEQ ID NO: 68173 - RNA, 23 nt, Human
aaaacaaagcaaaaaaacaggaa

SEQ ID NO: 68174 - RNA, 18 nt, Human
aaaaccaacauucaaaaa

SEQ ID NO: 68175 - RNA, 23 nt, Human
aaaaccaacauucaaaaaaaccc

SEQ ID NO: 68176 - RNA, 23 nt, Human
aaaagaacaggauagguugggca

SEQ ID NO: 68177 - RNA, 22 nt, Human
aaacaaaacaaaacaaagcaaa

SEQ ID NO: 68178 - RNA, 18 nt, Human
aaacaaaacaaagcaaaa

SEQ ID NO: 68179 - RNA, 19 nt, Human
aaacaaaacaaagcaaaaa

SEQ ID NO: 68180 - RNA, 24 nt, Human
aaagugcugggauuacaggcguga

SEQ ID NO: 68181 - RNA, 24 nt, Human
aaagugcugggauuauagguguga

SEQ ID NO: 68182 - RNA, 19 nt, Human
aacaaaacaaaacaaagca

SEQ ID NO: 68183 - RNA, 27 nt, Human
aacaaagcaaaaaaacaggaagaacag

SEQ ID NO: 68184 - RNA, 18 nt, Human
aaccuguaaccucugccu

SEQ ID NO: 68185 - RNA, 21 nt, Human
aaccuguaaccucugccuccu

SEQ ID NO: 68186 - RNA, 20 nt, Human
aagaggaaaaaguaugaaaa

SEQ ID NO: 68187 - RNA, 22 nt, Human
aagcaaaaaaacaggaagaaca

SEQ ID NO: 68188 - RNA, 21 nt, Human
aagcagagauguuccuuaaga

SEQ ID NO: 68189 - RNA, 19 nt, Human
aagugcugggauuacaggc

SEQ ID NO: 68190 - RNA, 19 nt, Human
aagugcugggauuacaggc

SEQ ID NO: 68191 - RNA, 26 nt, Human
aagugcugggauuacaggcgugagcc

SEQ ID NO: 68192 - RNA, 18 nt, Human
aagugcugggauuauagg

SEQ ID NO: 68193 - RNA, 26 nt, Human
aagugcugggauuauaggugugagcu

SEQ ID NO: 68194 - RNA, 18 nt, Human
aauaagugaucaaucugc

SEQ ID NO: 68195 - RNA, 20 nt, Human
aauauggugaaaccccaccu

SEQ ID NO: 68196 - RNA, 22 nt, Human
acaaaacaaaacaaagcaaaaa

SEQ ID NO: 68197 - RNA, 23 nt, Human
acagagugagucuucgucucaaa

SEQ ID NO: 68198 - RNA, 24 nt, Human
acagagugagucuucgucucaaaa

SEQ ID NO: 68199 - RNA, 20 nt, Human
acaggguuucaccauacugg

SEQ ID NO: 68200 - RNA, 24 nt, Human
acaggguuucaccauacuggccag

SEQ ID NO: 68201 - RNA, 29 nt, Human
acaucauguugcccaggcuggucucuaac

SEQ ID NO: 68202 - RNA, 24 nt, Human
acccaggagguugaggaugcagug

SEQ ID NO: 68203 - RNA, 24 nt, Human
acccaggcuggagugcaauggcau

SEQ ID NO: 68204 - RNA, 19 nt, Human
acccugggcaauaugguga

SEQ ID NO: 68205 - RNA, 22 nt, Human
acccugggcaauauggugaaac

SEQ ID NO: 68206 - RNA, 24 nt, Human
accuugugauccgcucaccucggc

SEQ ID NO: 68207 - RNA, 21 nt, Human
acuacaggugcaugccacaau

SEQ ID NO: 68208 - RNA, 24 nt, Human
acugcacccagccugggcggacag

SEQ ID NO: 68209 - RNA, 24 nt, Human
agaaaauagaugacucaaagucca

SEQ ID NO: 68210 - RNA, 21 nt, Human
agauucuccugccucagccuc

SEQ ID NO: 68211 - RNA, 24 nt, Human
agccaaacaaggcccccuuaaucc

SEQ ID NO: 68212 - RNA, 21 nt, Human
aggcauggugguaugcuccug

SEQ ID NO: 68213 - RNA, 24 nt, Human
aggcugaggcugacaguucgcuug

SEQ ID NO: 68214 - RNA, 19 nt, Human
aggugugagcuaccacacc

SEQ ID NO: 68215 - RNA, 19 nt, Human
aggugugagcuaccacacc

SEQ ID NO: 68216 - RNA, 22 nt, Human
agguugggcauaguagcucaug

SEQ ID NO: 68217 - RNA, 22 nt, Human
aguagagacaggguuucaccau

SEQ ID NO: 68218 - RNA, 24 nt, Human
aguagcucaugccuguaaucccag

SEQ ID NO: 68219 - RNA, 18 nt, Human
aguagcugggacuacagg

SEQ ID NO: 68220 - RNA, 18 nt, Human
aguagcugggauuacagg

SEQ ID NO: 68221 - RNA, 18 nt, Human
aguagcugggauuacagg

SEQ ID NO: 68222 - RNA, 20 nt, Human
agucaggcauggugguaugc

SEQ ID NO: 68223 - RNA, 18 nt, Human
agugcugggauuacaggc

SEQ ID NO: 68224 - RNA, 21 nt, Human
aguguaguggcacaaucuuug

SEQ ID NO: 68225 - RNA, 24 nt, Human
aguuugagaccacccugggcaaua

SEQ ID NO: 68226 - RNA, 22 nt, Human
augcagugagccgugacugcac

SEQ ID NO: 68227 - RNA, 19 nt, Human
augccuguaaucccagcac

SEQ ID NO: 68228 - RNA, 20 nt, Human
auggugaaaccccaccucua

SEQ ID NO: 68229 - RNA, 24 nt, Human
auuuuuguauuuuuaguagagaca

SEQ ID NO: 68230 - RNA, 24 nt, Human
caaagugcugggauuacaggcgug

SEQ ID NO: 68231 - RNA, 24 nt, Human
caaagugcugggauuauaggugug

SEQ ID NO: 68232 - RNA, 22 nt, Human
caagagauucuccugccucagc

SEQ ID NO: 68233 - RNA, 20 nt, Human
caauauggugaaaccccacc

SEQ ID NO: 68234 - RNA, 22 nt, Human
caauauggugaaaccccaccuc

SEQ ID NO: 68235 - RNA, 22 nt, Human
cacagcaaccuucaccucccag

SEQ ID NO: 68236 - RNA, 19 nt, Human
caccauacuggccaggcug

SEQ ID NO: 68237 - RNA, 21 nt, Human
caccauacuggccaggcuggu

SEQ ID NO: 68238 - RNA, 24 nt, Human
caccauacuggccaggcuggucuc

SEQ ID NO: 68239 - RNA, 24 nt, Human
caccaugcucggcuaauuuuugua

SEQ ID NO: 68240 - RNA, 23 nt, Human
cacccagccugggcggacagagu

SEQ ID NO: 68241 - RNA, 20 nt, Human
caccucagccuccggaguag

SEQ ID NO: 68242 - RNA, 24 nt, Human
caccucggccucccaaagugcugg

SEQ ID NO: 68243 - RNA, 24 nt, Human
caccucuacaaaaaacacaaaaag

SEQ ID NO: 68244 - RNA, 22 nt, Human
cagaacacacaucacuguccuc

SEQ ID NO: 68245 - RNA, 20 nt, Human
cagcaaccuucaccucccag

SEQ ID NO: 68246 - RNA, 24 nt, Human
cagcaaccuucaccucccagguuc

SEQ ID NO: 68247 - RNA, 26 nt, Human
cagccaaacaaggcccccuuaauuca

SEQ ID NO: 68248 - RNA, 24 nt, Human
caggguuucaccauacuggccagg

SEQ ID NO: 68249 - RNA, 19 nt, Human
caggugcccgccaccaugc

SEQ ID NO: 68250 - RNA, 21 nt, Human
caggugcccgccaccaugcuc

SEQ ID NO: 68251 - RNA, 25 nt, Human
cagguuaaaaauaaaggcuaaaaua

SEQ ID NO: 68252 - RNA, 19 nt, Human
cagguucaagagauucucc

SEQ ID NO: 68253 - RNA, 19 nt, Human
cauacuggccaggcugguc

SEQ ID NO: 68254 - RNA, 24 nt, Human
caucauguugcccaggcuggucuc

SEQ ID NO: 68255 - RNA, 20 nt, Human
caucuuaaaaagcaaaauuc

SEQ ID NO: 68256 - RNA, 18 nt, Human
caugccacaaucccuggc

SEQ ID NO: 68257 - RNA, 20 nt, Human
caugccuguaaucccagcac

SEQ ID NO: 68258 - RNA, 24 nt, Human
caugccuguaaucccagcacacug

SEQ ID NO: 68259 - RNA, 19 nt, Human
cauguugcccaggcugguc

SEQ ID NO: 68260 - RNA, 24 nt, Human
cauguugcccaggcuggucucuaa

SEQ ID NO: 68261 - RNA, 20 nt, Human
ccaaagugcugggauuacag

SEQ ID NO: 68262 - RNA, 22 nt, Human
ccaaagugcugggauuacaggc

SEQ ID NO: 68263 - RNA, 22 nt, Human
ccaaagugcugggauuacaggc

SEQ ID NO: 68264 - RNA, 24 nt, Human
ccaaagugcugggauuacaggcgu

SEQ ID NO: 68265 - RNA, 21 nt, Human
ccaaagugcugggauuauagg

SEQ ID NO: 68266 - RNA, 24 nt, Human
ccaaagugcugggauuauaggugu

SEQ ID NO: 68267 - RNA, 21 nt, Human
ccaaauuucccacugauguau

SEQ ID NO: 68268 - RNA, 21 nt, Human
ccacagcaaccuucaccuccc

SEQ ID NO: 68269 - RNA, 24 nt, Human
ccacagcaaccuucaccucccagg

SEQ ID NO: 68270 - RNA, 19 nt, Human
ccacugauguauaacugcu

SEQ ID NO: 68271 - RNA, 25 nt, Human
ccaggaguuugagaccacccugggc

SEQ ID NO: 68272 - RNA, 22 nt, Human
cccacagcaaccuucaccuccc

SEQ ID NO: 68273 - RNA, 24 nt, Human
cccacagcaaccuucaccucccag

SEQ ID NO: 68274 - RNA, 23 nt, Human
cccaggcuggagugcaauggcau

SEQ ID NO: 68275 - RNA, 22 nt, Human
cccaggcuggaguguaguggca

SEQ ID NO: 68276 - RNA, 21 nt, Human
cccagguucaagagauucucc

SEQ ID NO: 68277 - RNA, 20 nt, Human
ccccagcuacccggcagggu

SEQ ID NO: 68278 - RNA, 19 nt, Human
ccgcugcgcccagcccgaa

SEQ ID NO: 68279 - RNA, 23 nt, Human
ccgcugcgcccagcccgaaugac

SEQ ID NO: 68280 - RNA, 18 nt, Human
ccucccaccucagccucc

SEQ ID NO: 68281 - RNA, 24 nt, Human
ccucccagguucaagagauucucc

SEQ ID NO: 68282 - RNA, 22 nt, Human
ccugggcaauauggugaaaccc

SEQ ID NO: 68283 - RNA, 24 nt, Human
ccugggcaauauggugaaacccca

SEQ ID NO: 68284 - RNA, 24 nt, Human
ccugggcucaagcaaucuaccuac

SEQ ID NO: 68285 - RNA, 19 nt, Human
ccuguaaucccagcacacu

SEQ ID NO: 68286 - RNA, 22 nt, Human
ccuguaaucccagcacacuggg

SEQ ID NO: 68287 - RNA, 24 nt, Human
ccuguagccccagcuacccggcag

SEQ ID NO: 68288 - RNA, 20 nt, Human
cgcagaucccgacuccucuc

SEQ ID NO: 68289 - RNA, 19 nt, Human
cgcccagcccgaaugacca

SEQ ID NO: 68290 - RNA, 24 nt, Human
cgcucugucucccaggcuggagug

SEQ ID NO: 68291 - RNA, 24 nt, Human
cgcucuugucacccaggcuggagu

SEQ ID NO: 68292 - RNA, 22 nt, Human
cuaagaggaaaaaguaugaaaa

SEQ ID NO: 68293 - RNA, 25 nt, Human
cucaaaacaaaacaaaacaaagcaa

SEQ ID NO: 68294 - RNA, 24 nt, Human
cucaagcaaucuaccuaccucaac

SEQ ID NO: 68295 - RNA, 24 nt, Human
cucagccucucgaguagcugggac

SEQ ID NO: 68296 - RNA, 24 nt, Human
cucagccucucgaguagcugggau

SEQ ID NO: 68297 - RNA, 23 nt, Human
cucaugccuguaaucccagcaca

SEQ ID NO: 68298 - RNA, 22 nt, Human
cuccugaccuugugauccgcuc

SEQ ID NO: 68299 - RNA, 22 nt, Human
cuccugccucagccucucgagu

SEQ ID NO: 68300 - RNA, 20 nt, Human
cuccugggcucaagcaaucu

SEQ ID NO: 68301 - RNA, 23 nt, Human
cucgaguagcugggacuacaggu

SEQ ID NO: 68302 - RNA, 24 nt, Human
cucgaguagcugggacuacaggug

SEQ ID NO: 68303 - RNA, 24 nt, Human
cucgaguagcugggauuacaggug

SEQ ID NO: 68304 - RNA, 24 nt, Human
cucgcucugucucccaggcuggag

SEQ ID NO: 68305 - RNA, 21 nt, Human
cucuacaaaaaacacaaaaaa

SEQ ID NO: 68306 - RNA, 21 nt, Human
cugaauuuuacucuugacuuu

SEQ ID NO: 68307 - RNA, 18 nt, Human
cugacaguucgcuugagc

SEQ ID NO: 68308 - RNA, 23 nt, Human
cugccucagccucucgaguagcu

SEQ ID NO: 68309 - RNA, 24 nt, Human
cuggagugcaauggcaugauuuug

SEQ ID NO: 68310 - RNA, 18 nt, Human
cugggaggcugaggcuga

SEQ ID NO: 68311 - RNA, 20 nt, Human
cugggaggcugaggcugaca

SEQ ID NO: 68312 - RNA, 20 nt, Human
cugggauuauaggugugagc

SEQ ID NO: 68313 - RNA, 23 nt, Human
cugguaauuuuucugccaaccaa

SEQ ID NO: 68314 - RNA, 18 nt, Human
cuguaaccucugccuccu

SEQ ID NO: 68315 - RNA, 18 nt, Human
cuuggccaggcuggucuc

SEQ ID NO: 68316 - RNA, 24 nt, Human
cuugucacccaggcuggagugcaa

SEQ ID NO: 68317 - RNA, 19 nt, Human
gaauucugucucaauuaca

SEQ ID NO: 68318 - RNA, 22 nt, Human
gaccuugugauccgcucaccuc

SEQ ID NO: 68319 - RNA, 22 nt, Human
gaccuugugauccgcucaccuc

SEQ ID NO: 68320 - RNA, 24 nt, Human
gaccuugugauccgcucaccucgg

SEQ ID NO: 68321 - RNA, 22 nt, Human
gacuacaggugcccgccaccau

SEQ ID NO: 68322 - RNA, 24 nt, Human
gagauucuccugccucagccucuc

SEQ ID NO: 68323 - RNA, 18 nt, Human
gauuacaggcgugagccg

SEQ ID NO: 68324 - RNA, 22 nt, Human
gauuacaggcgugagccgcugc

SEQ ID NO: 68325 - RNA, 22 nt, Human
gauuacaggcgugagccgcugc

SEQ ID NO: 68326 - RNA, 18 nt, Human
gauuacaggugcccgcca

SEQ ID NO: 68327 - RNA, 24 nt, Human
gauuacaggugcccgccaccaugc

SEQ ID NO: 68328 - RNA, 20 nt, Human
gauucuccugccucagccuc

SEQ ID NO: 68329 - RNA, 21 nt, Human
gauuuuggcccacagcaaccu

SEQ ID NO: 68330 - RNA, 22 nt, Human
gcaaccuucaccucccagguuc

SEQ ID NO: 68331 - RNA, 21 nt, Human
gcacacugggaggcugaggcu

SEQ ID NO: 68332 - RNA, 23 nt, Human
gcacucggaaggucaaaguagua

SEQ ID NO: 68333 - RNA, 21 nt, Human
gcgcaagccauccucccaccu

SEQ ID NO: 68334 - RNA, 24 nt, Human
gcucuugucacccaggcuggagug

SEQ ID NO: 68335 - RNA, 19 nt, Human
gcugacaguucgcuugagc

SEQ ID NO: 68336 - RNA, 19 nt, Human
gcuggagugcaauggcaug

SEQ ID NO: 68337 - RNA, 18 nt, Human
ggaagaacaggauagaaa

SEQ ID NO: 68338 - RNA, 23 nt, Human
ggaguuucgcucuugucacccag

SEQ ID NO: 68339 - RNA, 23 nt, Human
ggcauaguagcucaugccuguaa

SEQ ID NO: 68340 - RNA, 25 nt, Human
ggcauggugguaugcuccuguagcc

SEQ ID NO: 68341 - RNA, 21 nt, Human
ggccaggcuggucucuuggcc

SEQ ID NO: 68342 - RNA, 18 nt, Human
ggcugcagcgcagauccc

SEQ ID NO: 68343 - RNA, 23 nt, Human
ggcuggucucgaacuccugaccu

SEQ ID NO: 68344 - RNA, 24 nt, Human
gggcucaagcaaucuaccuaccuc

SEQ ID NO: 68345 - RNA, 20 nt, Human
ggucucgaacuccugaccuu

SEQ ID NO: 68346 - RNA, 18 nt, Human
guagcugggauuacaggu

SEQ ID NO: 68347 - RNA, 21 nt, Human
gucucaaaacaaaacaaaaca

SEQ ID NO: 68348 - RNA, 24 nt, Human
uaaaagaacaggauagguugggca

SEQ ID NO: 68349 - RNA, 21 nt, Human
uaaaauauaauuucuaaaggc

SEQ ID NO: 68350 - RNA, 24 nt, Human
uaaguaaauauaauagacaucuua

SEQ ID NO: 68351 - RNA, 24 nt, Human
uaauuuuuguauuuuuaguagaga

SEQ ID NO: 68352 - RNA, 22 nt, Human
uacaaaaaacacaaaaaauuag

SEQ ID NO: 68353 - RNA, 19 nt, Human
uacaggcgugagccgcugc

SEQ ID NO: 68354 - RNA, 23 nt, Human
uaccuaccucaaccucccaaagu

SEQ ID NO: 68355 - RNA, 24 nt, Human
uaccucaaccucccaaagugcugg

SEQ ID NO: 68356 - RNA, 23 nt, Human
uaccuuuuucuucuaugcagcca

SEQ ID NO: 68357 - RNA, 23 nt, Human
uacucuugacuuuauuugggaau

SEQ ID NO: 68358 - RNA, 20 nt, Human
uagagacaggguuucaccau

SEQ ID NO: 68359 - RNA, 24 nt, Human
uagaugacucaaaguccaagauuu

SEQ ID NO: 68360 - RNA, 24 nt, Human
uagcucaugccuguaaucccagca

SEQ ID NO: 68361 - RNA, 23 nt, Human
uaguagaaacgaggucugcuaug

SEQ ID NO: 68362 - RNA, 19 nt, Human
uaguagagacaggguuuca

SEQ ID NO: 68363 - RNA, 25 nt, Human
uaguagagacaggguuucaccauac

SEQ ID NO: 68364 - RNA, 26 nt, Human
uaguagagacaggguuucaccauacu

SEQ ID NO: 68365 - RNA, 24 nt, Human
uaguagcucaugccuguaauccca

SEQ ID NO: 68366 - RNA, 24 nt, Human
uauaggugugagcuaccacaccuu

SEQ ID NO: 68367 - RNA, 24 nt, Human
uaucugaauuuuacucuugacuuu

SEQ ID NO: 68368 - RNA, 20 nt, Human
uauguuucccaggcaaguag

SEQ ID NO: 68369 - RNA, 20 nt, Human
ucaaccgcggcgguggcugc

SEQ ID NO: 68370 - RNA, 18 nt, Human
ucacccaggcuggagugc

SEQ ID NO: 68371 - RNA, 20 nt, Human
ucagccucucgaguagcugg

SEQ ID NO: 68372 - RNA, 23 nt, Human
ucagccucucgaguagcugggac

SEQ ID NO: 68373 - RNA, 22 nt, Human
ucaugccuguaaucccagcaca

SEQ ID NO: 68374 - RNA, 24 nt, Human
ucccaaagugcugggauuacaggc

SEQ ID NO: 68375 - RNA, 23 nt, Human
ucccaaagugcugggauuauagg

SEQ ID NO: 68376 - RNA, 23 nt, Human
ucccaggcuggaguguaguggca

SEQ ID NO: 68377 - RNA, 21 nt, Human
ucccagguucaagagauucuc

SEQ ID NO: 68378 - RNA, 24 nt, Human
ucccagguucaagagauucuccug

SEQ ID NO: 68379 - RNA, 18 nt, Human
uccugggcucaagcaauc

SEQ ID NO: 68380 - RNA, 19 nt, Human
uccugggcucaagcaaucu

SEQ ID NO: 68381 - RNA, 22 nt, Human
ucgcucuugucacccaggcugg

SEQ ID NO: 68382 - RNA, 23 nt, Human
ucgcucuugucacccaggcugga

SEQ ID NO: 68383 - RNA, 18 nt, Human
ucggccucccaaagugcu

SEQ ID NO: 68384 - RNA, 21 nt, Human
ucuaccuaccucaaccuccca

SEQ ID NO: 68385 - RNA, 24 nt, Human
ucucccaggcuggaguguaguggc

SEQ ID NO: 68386 - RNA, 24 nt, Human
ucuccugccucagccucucgagua

SEQ ID NO: 68387 - RNA, 19 nt, Human
ucucgaacuccugaccuug

SEQ ID NO: 68388 - RNA, 23 nt, Human
ucucgaguagcugggacuacagg

SEQ ID NO: 68389 - RNA, 24 nt, Human
ucucgaguagcugggacuacaggu

SEQ ID NO: 68390 - RNA, 23 nt, Human
ucucgaguagcugggauuacagg

SEQ ID NO: 68391 - RNA, 21 nt, Human
ucucgcucugucucccaggcu

SEQ ID NO: 68392 - RNA, 23 nt, Human
ucucgcucugucucccaggcugg

SEQ ID NO: 68393 - RNA, 24 nt, Human
ucucgcucugucucccaggcugga

SEQ ID NO: 68394 - RNA, 23 nt, Human
ucucuaacuccugggcucaagca

SEQ ID NO: 68395 - RNA, 22 nt, Human
ucugccaaccaaauuucccacu

SEQ ID NO: 68396 - RNA, 19 nt, Human
ucugucucccaggcuggag

SEQ ID NO: 68397 - RNA, 22 nt, Human
ucugucucccaggcuggagugu

SEQ ID NO: 68398 - RNA, 24 nt, Human
ucugucucccaggcuggaguguag

SEQ ID NO: 68399 - RNA, 18 nt, Human
ucuugucacccaggcugg

SEQ ID NO: 68400 - RNA, 24 nt, Human
ugacaauaaacaaguaaauugaua

SEQ ID NO: 68401 - RNA, 18 nt, Human
ugacuguaaaagaaaaua

SEQ ID NO: 68402 - RNA, 23 nt, Human
ugagacaagagucucgcucuguc

SEQ ID NO: 68403 - RNA, 21 nt, Human
ugagacuacaggugcaugcca

SEQ ID NO: 68404 - RNA, 22 nt, Human
ugagcccaggaguuugagacca

SEQ ID NO: 68405 - RNA, 24 nt, Human
ugauccgcucaccucggccuccca

SEQ ID NO: 68406 - RNA, 23 nt, Human
ugcaagggcacaaaauuaaaaua

SEQ ID NO: 68407 - RNA, 22 nt, Human
ugcagugagccgugacugcacc

SEQ ID NO: 68408 - RNA, 21 nt, Human
ugcaugccacaaucccuggcu

SEQ ID NO: 68409 - RNA, 24 nt, Human
ugcccaggcuggucucuaacuccu

SEQ ID NO: 68410 - RNA, 28 nt, Human
ugcccaggcuggucucuaacuccugggc

SEQ ID NO: 68411 - RNA, 24 nt, Human
ugccucagccucucgaguagcugg

SEQ ID NO: 68412 - RNA, 24 nt, Human
ugccuguaaucccagcacacuggg

SEQ ID NO: 68413 - RNA, 18 nt, Human
ugcugggauuacaggcgu

SEQ ID NO: 68414 - RNA, 20 nt, Human
ugcugggauuacaggcguga

SEQ ID NO: 68415 - RNA, 19 nt, Human
uggagugcaauggcaugau

SEQ ID NO: 68416 - RNA, 24 nt, Human
uggagugcaauggcaugauuuugg

SEQ ID NO: 68417 - RNA, 18 nt, Human
uggaguguaguggcacaa

SEQ ID NO: 68418 - RNA, 22 nt, Human
uggaguguaguggcacaaucuu

SEQ ID NO: 68419 - RNA, 23 nt, Human
uggaguguaguggcacaaucuuu

SEQ ID NO: 68420 - RNA, 20 nt, Human
uggcacaaucuuugcucacu

SEQ ID NO: 68421 - RNA, 24 nt, Human
uggccaggcuggucucgaacuccu

SEQ ID NO: 68422 - RNA, 18 nt, Human
uggccaggcuggucucuu

SEQ ID NO: 68423 - RNA, 20 nt, Human
uggcuuauuuuuuuaaaaau

SEQ ID NO: 68424 - RNA, 21 nt, Human
ugggacuacaggugcccgcca

SEQ ID NO: 68425 - RNA, 22 nt, Human
ugggacuacaggugcccgccac

SEQ ID NO: 68426 - RNA, 24 nt, Human
ugggacuacaggugcccgccacca

SEQ ID NO: 68427 - RNA, 25 nt, Human
ugggacuacaggugcccgccaccau

SEQ ID NO: 68428 - RNA, 18 nt, Human
ugggaggcugaggcugac

SEQ ID NO: 68429 - RNA, 18 nt, Human
ugggauuacaggcgugag

SEQ ID NO: 68430 - RNA, 19 nt, Human
ugggauuacaggcgugagc

SEQ ID NO: 68431 - RNA, 20 nt, Human
ugggauuacaggcgugagcc

SEQ ID NO: 68432 - RNA, 20 nt, Human
ugggauuacaggcgugagcc

SEQ ID NO: 68433 - RNA, 20 nt, Human
ugggauuacaggcgugagcc

SEQ ID NO: 68434 - RNA, 21 nt, Human
ugggauuacaggcgugagccg

SEQ ID NO: 68435 - RNA, 21 nt, Human
ugggauuacaggcgugagccg

SEQ ID NO: 68436 - RNA, 24 nt, Human
ugggauuacaggcgugagccgcug

SEQ ID NO: 68437 - RNA, 24 nt, Human
ugggauuacaggcgugagccgcug

SEQ ID NO: 68438 - RNA, 21 nt, Human
ugggauuacaggugcccgcca

SEQ ID NO: 68439 - RNA, 22 nt, Human
ugggauuacaggugcccgccac

SEQ ID NO: 68440 - RNA, 24 nt, Human
ugggauuacaggugcccgccacca

SEQ ID NO: 68441 - RNA, 25 nt, Human
ugggauuacaggugcccgccaccau

SEQ ID NO: 68442 - RNA, 18 nt, Human
ugggauuauaggugugag

SEQ ID NO: 68443 - RNA, 19 nt, Human
ugggauuauaggugugagc

SEQ ID NO: 68444 - RNA, 22 nt, Human
ugggauuauaggugugagcuac

SEQ ID NO: 68445 - RNA, 23 nt, Human
ugggauuauaggugugagcuacc

SEQ ID NO: 68446 - RNA, 24 nt, Human
ugggauuauaggugugagcuacca

SEQ ID NO: 68447 - RNA, 22 nt, Human
ugggcaauauggugaaacccca

SEQ ID NO: 68448 - RNA, 22 nt, Human
ugggcauaguagcucaugccug

SEQ ID NO: 68449 - RNA, 24 nt, Human
uggucucuuggccaggcuggucuc

SEQ ID NO: 68450 - RNA, 26 nt, Human
uguagagauggguuuucacaucaugu

SEQ ID NO: 68451 - RNA, 20 nt, Human
ugucacccaggcuggagugc

SEQ ID NO: 68452 - RNA, 22 nt, Human
ugucacccaggcuggagugcaa

SEQ ID NO: 68453 - RNA, 24 nt, Human
uuaguagagacaggguuucaccau

SEQ ID NO: 68454 - RNA, 18 nt, Human
uucaagagauucuccugc

SEQ ID NO: 68455 - RNA, 23 nt, Human
uucaagagauucuccugccucag

SEQ ID NO: 68456 - RNA, 24 nt, Human
uucaccauacuggccaggcugguc

SEQ ID NO: 68457 - RNA, 24 nt, Human
uucgcucuugucacccaggcugga

SEQ ID NO: 68458 - RNA, 23 nt, Human
uucgcuugagcccaggaguuuga

SEQ ID NO: 68459 - RNA, 24 nt, Human
uucgcuugagcccaggaguuugag

SEQ ID NO: 68460 - RNA, 22 nt, Human
uucuucuaugcagccaaccugu

SEQ ID NO: 68461 - RNA, 25 nt, Human
uucuucuaugcagccaaccuguaga

SEQ ID NO: 68462 - RNA, 22 nt, Human
uugagcccaggaguuugagacc

SEQ ID NO: 68463 - RNA, 24 nt, Human
uuggccaggcuggucucgaacucc

SEQ ID NO: 68464 - RNA, 24 nt, Human
uuucacaucauguugcccaggcug

SEQ ID NO: 68465 - RNA, 24 nt, Human
uuucccacugauguauaacugcuc

SEQ ID NO: 68466 - RNA, 24 nt, Human
uuucgcucuugucacccaggcugg

SEQ ID NO: 68467 - RNA, 24 nt, Human
uuuuuaguagagacaggguuucac

SEQ ID NO: 68468 - RNA, 23 nt, Human
uuuuuguagagauggguuuucac

SEQ ID NO: 68469 - RNA, 20 nt, Human
uuuuuguauuuuuaguagag

SEQ ID NO: 68470 - RNA, 24 nt, Human
uuuuuuuuuuuugagacaagaguc

SEQ ID NO: 68471 - RNA, 26 nt, Human
uuuuuuuuuuuugagacaagagucuc

SEQ ID NO: 68472 - RNA, 27 nt, Human
uuuuuuuuuuuuuuuuuuuuuuugggg

SEQ ID NO: 68473 - RNA, 18 nt, Human
aggcagcggcgguguggc

SEQ ID NO: 68474 - RNA, 20 nt, Human
aggcagcggcgguguggccg

SEQ ID NO: 68475 - RNA, 21 nt, Human
auaggacaacugagggucucc

SEQ ID NO: 68476 - RNA, 22 nt, Human
cacccggauccuggccaugaag

SEQ ID NO: 68477 - RNA, 19 nt, Human
cacccggcaugacugccaa

SEQ ID NO: 68478 - RNA, 23 nt, Human
cagcagcgccucuccacccggau

SEQ ID NO: 68479 - RNA, 21 nt, Human
cauccugcccccuuuggucca

SEQ ID NO: 68480 - RNA, 21 nt, Human
ccauccugugggcugugggga

SEQ ID NO: 68481 - RNA, 18 nt, Human
ccuggccaugaaggccuc

SEQ ID NO: 68482 - RNA, 22 nt, Human
ccugugggcuguggggaccagg

SEQ ID NO: 68483 - RNA, 19 nt, Human
cgcacacgcgggucaccgu

SEQ ID NO: 68484 - RNA, 19 nt, Human
cggcggugucagcagcgcc

SEQ ID NO: 68485 - RNA, 19 nt, Human
cucgcacacgcgggucacc

SEQ ID NO: 68486 - RNA, 18 nt, Human
gcggcgguguggcggcgg

SEQ ID NO: 68487 - RNA, 21 nt, Human
ggcuguggggaccaggccccu

SEQ ID NO: 68488 - RNA, 18 nt, Human
gguccauccugugggcug

SEQ ID NO: 68489 - RNA, 20 nt, Human
guggcggcggugucagcagc

SEQ ID NO: 68490 - RNA, 21 nt, Human
guguggcggcggugucagcaa

SEQ ID NO: 68491 - RNA, 26 nt, Human
guguggcggcgguguggcggcgguga

SEQ ID NO: 68492 - RNA, 24 nt, Human
uccugugggcuguggggaccaggc

SEQ ID NO: 68493 - RNA, 23 nt, Human
ucuccgcaggaacacgaucaccc

SEQ ID NO: 68494 - RNA, 19 nt, Human
uggcggcgguguggcggcg

SEQ ID NO: 68495 - RNA, 19 nt, Human
ugucuggaagccagcggga

SEQ ID NO: 68496 - RNA, 20 nt, Human
aaaauacgacaccagggaug

SEQ ID NO: 68497 - RNA, 24 nt, Human
aaacaaaucguacugcuuguucuu

SEQ ID NO: 68498 - RNA, 20 nt, Human
aaagaggcccuaggucccuc

SEQ ID NO: 68499 - RNA, 23 nt, Human
aaaugccugcccggaacagaaug

SEQ ID NO: 68500 - RNA, 20 nt, Human
aacuaagaacuguuugacaa

SEQ ID NO: 68501 - RNA, 18 nt, Human
aacuggaaucaaaaucca

SEQ ID NO: 68502 - RNA, 22 nt, Human
aagcauccccgugaacagaggc

SEQ ID NO: 68503 - RNA, 23 nt, Human
aauaauaaacauaaauaauauua

SEQ ID NO: 68504 - RNA, 19 nt, Human
acacugucuuugcaaagug

SEQ ID NO: 68505 - RNA, 21 nt, Human
accaccccuuugucuccccau

SEQ ID NO: 68506 - RNA, 18 nt, Human
accccuuugucuccccau

SEQ ID NO: 68507 - RNA, 19 nt, Human
accucuccucccagcucca

SEQ ID NO: 68508 - RNA, 18 nt, Human
acucuguuuggaaugugg

SEQ ID NO: 68509 - RNA, 22 nt, Human
agaaagacauccucuggaaaga

SEQ ID NO: 68510 - RNA, 26 nt, Human
agaaauacaucucccuagaacucuuc

SEQ ID NO: 68511 - RNA, 18 nt, Human
agguggcaucaggcuggg

SEQ ID NO: 68512 - RNA, 20 nt, Human
caauauacucuacuuagaau

SEQ ID NO: 68513 - RNA, 18 nt, Human
caauuucugugacuugcg

SEQ ID NO: 68514 - RNA, 22 nt, Human
cacagccccggugccgagcaga

SEQ ID NO: 68515 - RNA, 24 nt, Human
caccagggauguaauaccuacaag

SEQ ID NO: 68516 - RNA, 26 nt, Human
caccagugguaacuggacacacuguc

SEQ ID NO: 68517 - RNA, 24 nt, Human
caccugccugcauuaaccaugagc

SEQ ID NO: 68518 - RNA, 20 nt, Human
cagaaugagccaugcuuucc

SEQ ID NO: 68519 - RNA, 20 nt, Human
cagagccagcaacuaagaac

SEQ ID NO: 68520 - RNA, 25 nt, Human
cagcaacuaagaacuguuugacaag

SEQ ID NO: 68521 - RNA, 24 nt, Human
caggacaaagcugucccugaaagc

SEQ ID NO: 68522 - RNA, 21 nt, Human
cagucacacauguugaagaaa

SEQ ID NO: 68523 - RNA, 18 nt, Human
cauguauuucucuaaacu

SEQ ID NO: 68524 - RNA, 23 nt, Human
ccacacagcagggaguacacccu

SEQ ID NO: 68525 - RNA, 20 nt, Human
ccaggacucuguuuggaaug

SEQ ID NO: 68526 - RNA, 23 nt, Human
cccccaccaccccuuugucuccc

SEQ ID NO: 68527 - RNA, 23 nt, Human
ccucagauccuaugcccucucug

SEQ ID NO: 68528 - RNA, 24 nt, Human
ccucccagcuccagcugggagucc

SEQ ID NO: 68529 - RNA, 20 nt, Human
ccucugggggccaugugcuc

SEQ ID NO: 68530 - RNA, 23 nt, Human
ccucugugucuucugaauaguga

SEQ ID NO: 68531 - RNA, 18 nt, Human
ccugcccuuccuuuucua

SEQ ID NO: 68532 - RNA, 19 nt, Human
ccuggacggcgaaacgacc

SEQ ID NO: 68533 - RNA, 19 nt, Human
ccuggacggcgaaacgacc

SEQ ID NO: 68534 - RNA, 19 nt, Human
ccuucgguccgaaaucacu

SEQ ID NO: 68535 - RNA, 26 nt, Human
ccuuggguuguuaucauuuccugccc

SEQ ID NO: 68536 - RNA, 22 nt, Human
cgcccggcuccuccgccgcuca

SEQ ID NO: 68537 - RNA, 19 nt, Human
cgccgcgcccggcuccucc

SEQ ID NO: 68538 - RNA, 19 nt, Human
cguccacucaugcagcagc

SEQ ID NO: 68539 - RNA, 20 nt, Human
cucagaagaugacaugccau

SEQ ID NO: 68540 - RNA, 23 nt, Human
cucaggacaaagcugucccugaa

SEQ ID NO: 68541 - RNA, 22 nt, Human
cucgcaaccauuaccuuaauuc

SEQ ID NO: 68542 - RNA, 22 nt, Human
cucuccucccagcuccagcugg

SEQ ID NO: 68543 - RNA, 20 nt, Human
cucugcucauuguuccccca

SEQ ID NO: 68544 - RNA, 18 nt, Human
cugaaaugccugcccgga

SEQ ID NO: 68545 - RNA, 23 nt, Human
cugccaucucugcucauuguucc

SEQ ID NO: 68546 - RNA, 19 nt, Human
cugggaugcacucaacugu

SEQ ID NO: 68547 - RNA, 24 nt, Human
cugggcaggguugggacggcuguc

SEQ ID NO: 68548 - RNA, 21 nt, Human
cuggugcagggugccauggug

SEQ ID NO: 68549 - RNA, 22 nt, Human
gaaaucacuggcugaagccccc

SEQ ID NO: 68550 - RNA, 20 nt, Human
gaaugaggugcaauuucugu

SEQ ID NO: 68551 - RNA, 18 nt, Human
gacuugcgauggcccaca

SEQ ID NO: 68552 - RNA, 18 nt, Human
gagcuccccgccugcucc

SEQ ID NO: 68553 - RNA, 19 nt, Human
gaggcugaggaaaccagga

SEQ ID NO: 68554 - RNA, 22 nt, Human
gauuguuauuguggauuuccau

SEQ ID NO: 68555 - RNA, 21 nt, Human
gcaaccauuaccuuaauucag

SEQ ID NO: 68556 - RNA, 27 nt, Human
gcccccaccaccccuuugucuccccau

SEQ ID NO: 68557 - RNA, 23 nt, Human
ggaagccucugggggccaugugc

SEQ ID NO: 68558 - RNA, 18 nt, Human
ggcaggguugggacggcu

SEQ ID NO: 68559 - RNA, 24 nt, Human
ggcccuaggucccucccacacagc

SEQ ID NO: 68560 - RNA, 20 nt, Human
ggccggcugugcagcagcuu

SEQ ID NO: 68561 - RNA, 21 nt, Human
ggcugggcaggguugggacgg

SEQ ID NO: 68562 - RNA, 21 nt, Human
gggaugcauauuccugaagcc

SEQ ID NO: 68563 - RNA, 22 nt, Human
gggugacuccagccaagcaucc

SEQ ID NO: 68564 - RNA, 21 nt, Human
gucaccuuccaaaggagauuc

SEQ ID NO: 68565 - RNA, 21 nt, Human
gucuuccuuuccuucaucugg

SEQ ID NO: 68566 - RNA, 22 nt, Human
gugcagcagcuuugguaugugc

SEQ ID NO: 68567 - RNA, 18 nt, Human
guggugcugauggccugg

SEQ ID NO: 68568 - RNA, 25 nt, Human
uaaaaaauaaacuuucuuuuuuggu

SEQ ID NO: 68569 - RNA, 19 nt, Human
uaaggcucuucuuuuucug

SEQ ID NO: 68570 - RNA, 22 nt, Human
uacaaaaaugccugaagaccgc

SEQ ID NO: 68571 - RNA, 18 nt, Human
uacacugagccugugccu

SEQ ID NO: 68572 - RNA, 23 nt, Human
ucaggacaaagcugucccugaaa

SEQ ID NO: 68573 - RNA, 25 nt, Human
ucagguauuaaucauuucauacacc

SEQ ID NO: 68574 - RNA, 20 nt, Human
ucauuacaaaaaugccugaa

SEQ ID NO: 68575 - RNA, 21 nt, Human
uccaaagaggcccuagguccc

SEQ ID NO: 68576 - RNA, 18 nt, Human
ucccagcuccagcuggga

SEQ ID NO: 68577 - RNA, 20 nt, Human
uccccgugaacagaggcaga

SEQ ID NO: 68578 - RNA, 21 nt, Human
ucccugaaagcugggagaaaa

SEQ ID NO: 68579 - RNA, 23 nt, Human
uccuaugcccucucugcauugcu

SEQ ID NO: 68580 - RNA, 19 nt, Human
ucgaagacagcauccaaag

SEQ ID NO: 68581 - RNA, 19 nt, Human
ucuaguuuuagagggacag

SEQ ID NO: 68582 - RNA, 24 nt, Human
ucuggaugaaguggagcccagccc

SEQ ID NO: 68583 - RNA, 19 nt, Human
ugaacagaggcagacucag

SEQ ID NO: 68584 - RNA, 19 nt, Human
ugaagccagcgccaagguc

SEQ ID NO: 68585 - RNA, 18 nt, Human
ugaaguggagcccagccu

SEQ ID NO: 68586 - RNA, 23 nt, Human
ugacuugcgauggcccacacuca

SEQ ID NO: 68587 - RNA, 24 nt, Human
ugcaaagugaaaguuguuuauugc

SEQ ID NO: 68588 - RNA, 24 nt, Human
ugcagaaugagccaugcuuuccug

SEQ ID NO: 68589 - RNA, 21 nt, Human
ugccugaagaccgcugagcuc

SEQ ID NO: 68590 - RNA, 24 nt, Human
ugcgcagucacacauguugaagaa

SEQ ID NO: 68591 - RNA, 19 nt, Human
uggaaagaagguagguugu

SEQ ID NO: 68592 - RNA, 21 nt, Human
uggaagcugggaaucuggaac

SEQ ID NO: 68593 - RNA, 22 nt, Human
uggaaucaaaauccaaaggauc

SEQ ID NO: 68594 - RNA, 20 nt, Human
uggcugaagcccccaccacc

SEQ ID NO: 68595 - RNA, 19 nt, Human
ugggaaucuggaacucuca

SEQ ID NO: 68596 - RNA, 20 nt, Human
ugggaugcacucaacuguga

SEQ ID NO: 68597 - RNA, 19 nt, Human
uggugcagggugccauggu

SEQ ID NO: 68598 - RNA, 24 nt, Human
ugugcaaauaauaaacauaaauaa

SEQ ID NO: 68599 - RNA, 19 nt, Human
uguuaaggcucuucuuuuu

SEQ ID NO: 68600 - RNA, 23 nt, Human
uuaaacuuuuauauauguuaagg

SEQ ID NO: 68601 - RNA, 20 nt, Human
uuacgauuuaacaggcaaaa

SEQ ID NO: 68602 - RNA, 25 nt, Human
uucauacaccagugguaacuggaca

SEQ ID NO: 68603 - RNA, 24 nt, Human
uucauagccucuaaaaggacuugc

SEQ ID NO: 68604 - RNA, 19 nt, Human
uuguuuccuguauuagccu

SEQ ID NO: 68605 - RNA, 23 nt, Human
uuugacaaaguagaaagaagggc

SEQ ID NO: 68606 - RNA, 23 nt, Human
aaaaugaaagcuuuaaaaaccua

SEQ ID NO: 68607 - RNA, 21 nt, Human
aaacagcuaugaaaauacuuc

SEQ ID NO: 68608 - RNA, 18 nt, Human
aaacauagaaagcagaug

SEQ ID NO: 68609 - RNA, 20 nt, Human
aaacgcacacaccauuguuu

SEQ ID NO: 68610 - RNA, 21 nt, Human
aaaugccaguacggagaacaa

SEQ ID NO: 68611 - RNA, 21 nt, Human
aacugcaguggugaugggaac

SEQ ID NO: 68612 - RNA, 24 nt, Human
aacugcaguggugaugggaacccc

SEQ ID NO: 68613 - RNA, 19 nt, Human
aagcagaugaaauugcaac

SEQ ID NO: 68614 - RNA, 18 nt, Human
aagcaggaaacagcagca

SEQ ID NO: 68615 - RNA, 22 nt, Human
aagcaggaaacagcagcaugug

SEQ ID NO: 68616 - RNA, 24 nt, Human
acacacagggcaggcgggcuugga

SEQ ID NO: 68617 - RNA, 24 nt, Human
acacagggcaggcgggcuuggacg

SEQ ID NO: 68618 - RNA, 18 nt, Human
acauguguguauaugugu

SEQ ID NO: 68619 - RNA, 26 nt, Human
accaccauggcuccaccucacccuag

SEQ ID NO: 68620 - RNA, 23 nt, Human
accauccaucacacgagcauucc

SEQ ID NO: 68621 - RNA, 23 nt, Human
accgccgaggaugggugggggcu

SEQ ID NO: 68622 - RNA, 19 nt, Human
acgcagagcccggcgggcg

SEQ ID NO: 68623 - RNA, 24 nt, Human
agaaaagaagagguguguguagag

SEQ ID NO: 68624 - RNA, 19 nt, Human
agcaaggaggcaggaugca

SEQ ID NO: 68625 - RNA, 21 nt, Human
agccuugcucacagagcagcu

SEQ ID NO: 68626 - RNA, 21 nt, Human
aggcagagcugggacccaacu

SEQ ID NO: 68627 - RNA, 18 nt, Human
aggcggccgagggacagg

SEQ ID NO: 68628 - RNA, 20 nt, Human
aggcgggcagaggugcggug

SEQ ID NO: 68629 - RNA, 21 nt, Human
aggggaagggccuuguccagg

SEQ ID NO: 68630 - RNA, 19 nt, Human
aggggacguggggacgagg

SEQ ID NO: 68631 - RNA, 22 nt, Human
agugacccggcccuucccacag

SEQ ID NO: 68632 - RNA, 26 nt, Human
agugcaaaggcaauuuuaagauuucu

SEQ ID NO: 68633 - RNA, 22 nt, Human
auguacacguguguguguguau

SEQ ID NO: 68634 - RNA, 23 nt, Human
auguguacgugugggagcucacg

SEQ ID NO: 68635 - RNA, 18 nt, Human
augugugugcaugugugu

SEQ ID NO: 68636 - RNA, 24 nt, Human
caaaaauaccuacugucgagcacc

SEQ ID NO: 68637 - RNA, 18 nt, Human
caacagggacuuccuauc

SEQ ID NO: 68638 - RNA, 20 nt, Human
caacagggacuuccuaucac

SEQ ID NO: 68639 - RNA, 24 nt, Human
caagccaguugcucgcuacccuca

SEQ ID NO: 68640 - RNA, 22 nt, Human
caaggggacgagaggacguggg

SEQ ID NO: 68641 - RNA, 23 nt, Human
caaguaucugucucccggcccuc

SEQ ID NO: 68642 - RNA, 20 nt, Human
cacacuaaaacuuguuguca

SEQ ID NO: 68643 - RNA, 26 nt, Human
cacagccaaguaucugucucccggcc

SEQ ID NO: 68644 - RNA, 20 nt, Human
cacaggggccccucagcaag

SEQ ID NO: 68645 - RNA, 22 nt, Human
caccucggaaacacccucuggg

SEQ ID NO: 68646 - RNA, 22 nt, Human
cacguggcacugccuucuccac

SEQ ID NO: 68647 - RNA, 20 nt, Human
cagagcccggcgggcggagc

SEQ ID NO: 68648 - RNA, 19 nt, Human
cagccaaguaucugucucc

SEQ ID NO: 68649 - RNA, 18 nt, Human
cagcgcuggacagauccu

SEQ ID NO: 68650 - RNA, 22 nt, Human
cauguacacgugugugugugua

SEQ ID NO: 68651 - RNA, 20 nt, Human
cauguguguauucacgccug

SEQ ID NO: 68652 - RNA, 19 nt, Human
ccaagccagggcggccaca

SEQ ID NO: 68653 - RNA, 23 nt, Human
ccacccagagcagcgcuggacag

SEQ ID NO: 68654 - RNA, 19 nt, Human
ccacuguguucacuguucu

SEQ ID NO: 68655 - RNA, 18 nt, Human
ccagguaacacgcaugca

SEQ ID NO: 68656 - RNA, 23 nt, Human
ccagugacagcaaaggccaauga

SEQ ID NO: 68657 - RNA, 23 nt, Human
cccggcccuucccacagcauccc

SEQ ID NO: 68658 - RNA, 24 nt, Human
cccguuccacagcguggcgcgggg

SEQ ID NO: 68659 - RNA, 21 nt, Human
ccuacugucgagcaccucgga

SEQ ID NO: 68660 - RNA, 21 nt, Human
cgaggggacguggggacgcag

SEQ ID NO: 68661 - RNA, 20 nt, Human
cgaggugacaggacaagggg

SEQ ID NO: 68662 - RNA, 18 nt, Human
cggcguggguguggccag

SEQ ID NO: 68663 - RNA, 20 nt, Human
cgugggcagggcugccaagc

SEQ ID NO: 68664 - RNA, 21 nt, Human
cuccuugccugcugggggcca

SEQ ID NO: 68665 - RNA, 21 nt, Human
cugcucugcaaagcccagaca

SEQ ID NO: 68666 - RNA, 19 nt, Human
cuguucaacuaaucacugc

SEQ ID NO: 68667 - RNA, 20 nt, Human
cuugccggagccccguucca

SEQ ID NO: 68668 - RNA, 20 nt, Human
gaagacacaggccuggggga

SEQ ID NO: 68669 - RNA, 19 nt, Human
gaagcugccggcguggccu

SEQ ID NO: 68670 - RNA, 19 nt, Human
gacgaggugacgggaugag

SEQ ID NO: 68671 - RNA, 23 nt, Human
gacgccugcggcuggccccucgg

SEQ ID NO: 68672 - RNA, 18 nt, Human
gacguggggaugaggaga

SEQ ID NO: 68673 - RNA, 23 nt, Human
gagcuugcacguuuguggugggu

SEQ ID NO: 68674 - RNA, 23 nt, Human
gaggaugggugggggcuccgugg

SEQ ID NO: 68675 - RNA, 19 nt, Human
gcaccaccauggcuccacc

SEQ ID NO: 68676 - RNA, 22 nt, Human
gcaccucggaaacacccucugg

SEQ ID NO: 68677 - RNA, 19 nt, Human
gcacggaugaggugcggcg

SEQ ID NO: 68678 - RNA, 20 nt, Human
gcaggguggcccuggggacg

SEQ ID NO: 68679 - RNA, 22 nt, Human
gcccacugugcgugucugagac

SEQ ID NO: 68680 - RNA, 22 nt, Human
gcccacugugcgugucugagac

SEQ ID NO: 68681 - RNA, 22 nt, Human
gcccacugugcgugucugagac

SEQ ID NO: 68682 - RNA, 22 nt, Human
gcgcggggcgggcgugagggcc

SEQ ID NO: 68683 - RNA, 22 nt, Human
gcuaacccacccagagcagcgc

SEQ ID NO: 68684 - RNA, 20 nt, Human
gcuccgugcccuggcgagug

SEQ ID NO: 68685 - RNA, 22 nt, Human
gcugccaagccagggcggccac

SEQ ID NO: 68686 - RNA, 20 nt, Human
gcuuccaaaaauaccuacug

SEQ ID NO: 68687 - RNA, 19 nt, Human
ggacgggacaaggggacga

SEQ ID NO: 68688 - RNA, 18 nt, Human
ggacguggggaugaggag

SEQ ID NO: 68689 - RNA, 20 nt, Human
ggcaaguaaauacuaacuac

SEQ ID NO: 68690 - RNA, 20 nt, Human
ggcauccacaugugggccac

SEQ ID NO: 68691 - RNA, 21 nt, Human
ggccgcggcccuucccagcug

SEQ ID NO: 68692 - RNA, 18 nt, Human
ggccugggggaauggccu

SEQ ID NO: 68693 - RNA, 20 nt, Human
ggcggagcugcagugcggga

SEQ ID NO: 68694 - RNA, 22 nt, Human
ggcguggguguggccaguccug

SEQ ID NO: 68695 - RNA, 18 nt, Human
ggcuggaagcugccggcg

SEQ ID NO: 68696 - RNA, 19 nt, Human
gggcaugggugguggccgg

SEQ ID NO: 68697 - RNA, 20 nt, Human
gggcaugggugguggccggg

SEQ ID NO: 68698 - RNA, 20 nt, Human
gggcuggaagcugccggcgu

SEQ ID NO: 68699 - RNA, 18 nt, Human
ggggacgggacaagggga

SEQ ID NO: 68700 - RNA, 21 nt, Human
gguggguacauguacauaugu

SEQ ID NO: 68701 - RNA, 21 nt, Human
guacacgugcauguucugcau

SEQ ID NO: 68702 - RNA, 19 nt, Human
gucaccuuauuuuauccca

SEQ ID NO: 68703 - RNA, 20 nt, Human
guccaggcggccagggugcc

SEQ ID NO: 68704 - RNA, 18 nt, Human
gugcauguguacgugugg

SEQ ID NO: 68705 - RNA, 21 nt, Human
guggagccaaaagccagguaa

SEQ ID NO: 68706 - RNA, 20 nt, Human
gugguguacacgugugugca

SEQ ID NO: 68707 - RNA, 24 nt, Human
guguggcucaacaaccacagugcu

SEQ ID NO: 68708 - RNA, 21 nt, Human
guguguguguguaugcgugua

SEQ ID NO: 68709 - RNA, 23 nt, Human
uacaaucaaauggugaaaucuga

SEQ ID NO: 68710 - RNA, 18 nt, Human
uacagagaaucugccccc

SEQ ID NO: 68711 - RNA, 20 nt, Human
uacgugugcgugugugugug

SEQ ID NO: 68712 - RNA, 18 nt, Human
uagaaagcagaugaaauu

SEQ ID NO: 68713 - RNA, 19 nt, Human
uagaaagcagaugaaauug

SEQ ID NO: 68714 - RNA, 22 nt, Human
uagaaagcagaugaaauugcaa

SEQ ID NO: 68715 - RNA, 23 nt, Human
uauagggcugagccgaggggagg

SEQ ID NO: 68716 - RNA, 22 nt, Human
uauaugugugugcaugugugua

SEQ ID NO: 68717 - RNA, 21 nt, Human
uaugugcauauguauugugua

SEQ ID NO: 68718 - RNA, 21 nt, Human
ucaaaacucucaccagaaucu

SEQ ID NO: 68719 - RNA, 18 nt, Human
ucacacugaaaugucuuc

SEQ ID NO: 68720 - RNA, 20 nt, Human
uccacaggcuuaggaccauc

SEQ ID NO: 68721 - RNA, 25 nt, Human
ucccaaccacuguguucacuguucu

SEQ ID NO: 68722 - RNA, 20 nt, Human
ucccacacgggaccuagggc

SEQ ID NO: 68723 - RNA, 22 nt, Human
ucccagugacagcaaaggccaa

SEQ ID NO: 68724 - RNA, 21 nt, Human
ucccuggacggcucuucucuc

SEQ ID NO: 68725 - RNA, 23 nt, Human
ucccuggacggcucuucucuccc

SEQ ID NO: 68726 - RNA, 21 nt, Human
uccuaagacgaaggagagccc

SEQ ID NO: 68727 - RNA, 21 nt, Human
uccuaucacagcagcccuggg

SEQ ID NO: 68728 - RNA, 20 nt, Human
ucucacacugaaaugucuuc

SEQ ID NO: 68729 - RNA, 24 nt, Human
ucugaaaauucgcauucaucagag

SEQ ID NO: 68730 - RNA, 19 nt, Human
ugagacggucuguggcagg

SEQ ID NO: 68731 - RNA, 19 nt, Human
ugagacggucuguggcagg

SEQ ID NO: 68732 - RNA, 19 nt, Human
ugagacggucuguggcagg

SEQ ID NO: 68733 - RNA, 21 nt, Human
ugagagugggagcuguaccag

SEQ ID NO: 68734 - RNA, 20 nt, Human
ugagcaggguacggcggugc

SEQ ID NO: 68735 - RNA, 21 nt, Human
ugagccgaaugcccagaggcc

SEQ ID NO: 68736 - RNA, 22 nt, Human
ugagcguggagccaaaagccag

SEQ ID NO: 68737 - RNA, 20 nt, Human
ugaggacgaggugacggggc

SEQ ID NO: 68738 - RNA, 18 nt, Human
ugagggccggcuccuccu

SEQ ID NO: 68739 - RNA, 25 nt, Human
ugagugauccugugugcaagccccc

SEQ ID NO: 68740 - RNA, 23 nt, Human
ugcaacgucauucacugaggauc

SEQ ID NO: 68741 - RNA, 22 nt, Human
ugcaguagaagcucauacgucu

SEQ ID NO: 68742 - RNA, 21 nt, Human
ugcaugacagcgcgcagggug

SEQ ID NO: 68743 - RNA, 19 nt, Human
ugcauguacacgugugugu

SEQ ID NO: 68744 - RNA, 21 nt, Human
ugcaugucuguaggucacaca

SEQ ID NO: 68745 - RNA, 26 nt, Human
ugcaugugugcaggagcuugcacguu

SEQ ID NO: 68746 - RNA, 18 nt, Human
ugcauguguguaucacac

SEQ ID NO: 68747 - RNA, 22 nt, Human
ugccaguacggagaacaacagg

SEQ ID NO: 68748 - RNA, 19 nt, Human
ugcccuggcgaguggcuga

SEQ ID NO: 68749 - RNA, 22 nt, Human
ugccggagccccguuccacagc

SEQ ID NO: 68750 - RNA, 20 nt, Human
ugcgggggcagcgugggcag

SEQ ID NO: 68751 - RNA, 20 nt, Human
ugcguacaugugcaugugua

SEQ ID NO: 68752 - RNA, 19 nt, Human
ugcgugugugugugcaugu

SEQ ID NO: 68753 - RNA, 21 nt, Human
ugcgugugugugugcaugugu

SEQ ID NO: 68754 - RNA, 22 nt, Human
ugcgugugugugugcaugugug

SEQ ID NO: 68755 - RNA, 18 nt, Human
ugcuaacccacccagagc

SEQ ID NO: 68756 - RNA, 23 nt, Human
ugcugccuguugggauccacccg

SEQ ID NO: 68757 - RNA, 19 nt, Human
ugcuguucaacuaaucacu

SEQ ID NO: 68758 - RNA, 21 nt, Human
uggcaggugggugaagacaca

SEQ ID NO: 68759 - RNA, 19 nt, Human
uggggaugggacgagggga

SEQ ID NO: 68760 - RNA, 20 nt, Human
uggguacauguacauaugug

SEQ ID NO: 68761 - RNA, 19 nt, Human
uggguccaggcggccaggg

SEQ ID NO: 68762 - RNA, 19 nt, Human
ugggugugaaucagugacc

SEQ ID NO: 68763 - RNA, 25 nt, Human
uggugcauguacacgugugugugug

SEQ ID NO: 68764 - RNA, 18 nt, Human
uguacacguuugugugca

SEQ ID NO: 68765 - RNA, 18 nt, Human
ugucugagacggucugug

SEQ ID NO: 68766 - RNA, 18 nt, Human
ugucugagacggucugug

SEQ ID NO: 68767 - RNA, 18 nt, Human
ugucugagacggucugug

SEQ ID NO: 68768 - RNA, 22 nt, Human
ugugcaugugugcaguagaagc

SEQ ID NO: 68769 - RNA, 20 nt, Human
uguggcacauguguguauau

SEQ ID NO: 68770 - RNA, 22 nt, Human
uguggcauccacaugugggcca

SEQ ID NO: 68771 - RNA, 18 nt, Human
uguggugcguacaugugc

SEQ ID NO: 68772 - RNA, 20 nt, Human
ugugguguacacaugaaugu

SEQ ID NO: 68773 - RNA, 20 nt, Human
ugugguguacacgugugugc

SEQ ID NO: 68774 - RNA, 21 nt, Human
uguguacacgugcauguucug

SEQ ID NO: 68775 - RNA, 18 nt, Human
uguguacgaugugugcac

SEQ ID NO: 68776 - RNA, 18 nt, Human
uguguacgaugugugcac

SEQ ID NO: 68777 - RNA, 23 nt, Human
uguguacgugugggagcucacau

SEQ ID NO: 68778 - RNA, 18 nt, Human
uguguauaugugugugca

SEQ ID NO: 68779 - RNA, 19 nt, Human
uguguauaugugugugcau

SEQ ID NO: 68780 - RNA, 19 nt, Human
ugugugcacguguguuuac

SEQ ID NO: 68781 - RNA, 18 nt, Human
ugugugcaugcaugugug

SEQ ID NO: 68782 - RNA, 20 nt, Human
ugugugcaugcaugugugca

SEQ ID NO: 68783 - RNA, 20 nt, Human
ugugugccacccccgucagc

SEQ ID NO: 68784 - RNA, 19 nt, Human
uguguguauaugugugugc

SEQ ID NO: 68785 - RNA, 21 nt, Human
uguguguauaugugugugcau

SEQ ID NO: 68786 - RNA, 23 nt, Human
uguguguauaugugugugcaugu

SEQ ID NO: 68787 - RNA, 18 nt, Human
ugugugugcaugugugca

SEQ ID NO: 68788 - RNA, 19 nt, Human
ugugugugugcaugugugc

SEQ ID NO: 68789 - RNA, 18 nt, Human
uguguguguguaugcgug

SEQ ID NO: 68790 - RNA, 19 nt, Human
uguguguguguaugcgugu

SEQ ID NO: 68791 - RNA, 20 nt, Human
uguguguguguaugcgugua

SEQ ID NO: 68792 - RNA, 19 nt, Human
uucacugaggaucuucuca

SEQ ID NO: 68793 - RNA, 19 nt, Human
uucuagaaauagaaaugcc

SEQ ID NO: 68794 - RNA, 20 nt, Human
uucuuuuuuaucucgugccc

SEQ ID NO: 68795 - RNA, 21 nt, Human
uuguugucagagguacauggu

SEQ ID NO: 68796 - RNA, 19 nt, Human
uuuguagugaauguacguu

SEQ ID NO: 68797 - RNA, 26 nt, Human
uuuguggcacauguguguauauuaca

SEQ ID NO: 68798 - RNA, 19 nt, Human
aaaacaaaaacaaaugaca

SEQ ID NO: 68799 - RNA, 20 nt, Human
aaacaaaugacaauacugaa

SEQ ID NO: 68800 - RNA, 23 nt, Human
aaacaccaacauggaagauucuc

SEQ ID NO: 68801 - RNA, 25 nt, Human
aaacacggucauguaaauguaaugc

SEQ ID NO: 68802 - RNA, 23 nt, Human
aacaaaaacaaaugacaauacug

SEQ ID NO: 68803 - RNA, 21 nt, Human
aaggggacacuuuccuuguga

SEQ ID NO: 68804 - RNA, 20 nt, Human
aauaacuuaauauccuuaca

SEQ ID NO: 68805 - RNA, 21 nt, Human
aaugguuggaaaugauucucc

SEQ ID NO: 68806 - RNA, 25 nt, Human
aaugucucuuuauucucaaauuuua

SEQ ID NO: 68807 - RNA, 20 nt, Human
acaggaaaaacaccaacaug

SEQ ID NO: 68808 - RNA, 22 nt, Human
acaggaaaaacaccaacaugga

SEQ ID NO: 68809 - RNA, 22 nt, Human
accaaaauuccucaguauucac

SEQ ID NO: 68810 - RNA, 19 nt, Human
accaaguauugcuacaaua

SEQ ID NO: 68811 - RNA, 21 nt, Human
acggaccugauuccugauuug

SEQ ID NO: 68812 - RNA, 18 nt, Human
agaugacauaaccugaaa

SEQ ID NO: 68813 - RNA, 19 nt, Human
agcaacagacugaaaugcc

SEQ ID NO: 68814 - RNA, 22 nt, Human
agcuuuagacccaagaaagagg

SEQ ID NO: 68815 - RNA, 21 nt, Human
aggcagggugcugagucacuu

SEQ ID NO: 68816 - RNA, 23 nt, Human
aguuaauuacaguaacauguacc

SEQ ID NO: 68817 - RNA, 18 nt, Human
auaaaguucuccuuaacu

SEQ ID NO: 68818 - RNA, 20 nt, Human
auaaaguucuccuuaacuaa

SEQ ID NO: 68819 - RNA, 28 nt, Human
auaaauauaacuucauaaacuuuaaaaa

SEQ ID NO: 68820 - RNA, 23 nt, Human
auagggccuggguguggcucagg

SEQ ID NO: 68821 - RNA, 21 nt, Human
aucacacuuuaagcaccauua

SEQ ID NO: 68822 - RNA, 18 nt, Human
aucaugaguuaugaucua

SEQ ID NO: 68823 - RNA, 24 nt, Human
aucuuccuaaauccagcuaugaaa

SEQ ID NO: 68824 - RNA, 24 nt, Human
augaaaaaugucucuuuauucuca

SEQ ID NO: 68825 - RNA, 23 nt, Human
augcagagaauuuuuaaaggauu

SEQ ID NO: 68826 - RNA, 23 nt, Human
auggaaguuagguuuugaagugc

SEQ ID NO: 68827 - RNA, 23 nt, Human
caaaaacaaaugacaauacugaa

SEQ ID NO: 68828 - RNA, 22 nt, Human
caaaauuccucaguauucacau

SEQ ID NO: 68829 - RNA, 25 nt, Human
caacacaggucacugagggaccaaa

SEQ ID NO: 68830 - RNA, 30 nt, Human
caagaaaauaauaguuuacaagcaaacaaa

SEQ ID NO: 68831 - RNA, 18 nt, Human
caaguauugcuacaauau

SEQ ID NO: 68832 - RNA, 18 nt, Human
cagaacucacuguauugu

SEQ ID NO: 68833 - RNA, 23 nt, Human
cagaaugcauuaaugaauuaaca

SEQ ID NO: 68834 - RNA, 23 nt, Human
caugcaaaagauccaaugauaaa

SEQ ID NO: 68835 - RNA, 19 nt, Human
cauuccacagccacaccug

SEQ ID NO: 68836 - RNA, 19 nt, Human
cauucuuuccccugccagu

SEQ ID NO: 68837 - RNA, 23 nt, Human
ccaacauggaagauucucccuuu

SEQ ID NO: 68838 - RNA, 21 nt, Human
ccaguccaauucuagaagccu

SEQ ID NO: 68839 - RNA, 23 nt, Human
ccauauccucccaccuaguacuc

SEQ ID NO: 68840 - RNA, 22 nt, Human
cccacaaaguacuacugccccu

SEQ ID NO: 68841 - RNA, 27 nt, Human
cccauaagcacaagggacaaaccagac

SEQ ID NO: 68842 - RNA, 18 nt, Human
cccugccaguccaauucu

SEQ ID NO: 68843 - RNA, 25 nt, Human
ccuggcccauacuuugguccccugg

SEQ ID NO: 68844 - RNA, 21 nt, Human
cggugaacggaccugauuccu

SEQ ID NO: 68845 - RNA, 19 nt, Human
cucccacaaaguacuacug

SEQ ID NO: 68846 - RNA, 27 nt, Human
cugccaguccaauucuagaagccuuau

SEQ ID NO: 68847 - RNA, 22 nt, Human
gaaaaacaccaacauggaagau

SEQ ID NO: 68848 - RNA, 24 nt, Human
gaaaagcuuuaaauauaacucuaa

SEQ ID NO: 68849 - RNA, 20 nt, Human
gaacucagaaugcauuaaug

SEQ ID NO: 68850 - RNA, 23 nt, Human
gcaaauaaacacggucauguaaa

SEQ ID NO: 68851 - RNA, 18 nt, Human
gccuggguguggcucagg

SEQ ID NO: 68852 - RNA, 31 nt, Human
ggaaaugauucuccuaauuugcucugugaaa

SEQ ID NO: 68853 - RNA, 19 nt, Human
ggaagagcaugucuaaguc

SEQ ID NO: 68854 - RNA, 21 nt, Human
gugaacggaccugauuccuga

SEQ ID NO: 68855 - RNA, 20 nt, Human
guguggcucaggucuggaag

SEQ ID NO: 68856 - RNA, 20 nt, Human
guuagaggaauugguauaaa

SEQ ID NO: 68857 - RNA, 21 nt, Human
uaaacaucaauuugaaguucg

SEQ ID NO: 68858 - RNA, 22 nt, Human
uaacaguucaggaugagcacac

SEQ ID NO: 68859 - RNA, 23 nt, Human
uaacuaacuucaaauggugagua

SEQ ID NO: 68860 - RNA, 20 nt, Human
uaacuuuucccaugaaaagc

SEQ ID NO: 68861 - RNA, 19 nt, Human
uaagcaccauuauaggcga

SEQ ID NO: 68862 - RNA, 20 nt, Human
uaauauguauacaaucauua

SEQ ID NO: 68863 - RNA, 22 nt, Human
uacagcccucagacgaggcaaa

SEQ ID NO: 68864 - RNA, 22 nt, Human
uaccaugauuacaaacauauca

SEQ ID NO: 68865 - RNA, 19 nt, Human
uaccccaaacugaucuuua

SEQ ID NO: 68866 - RNA, 18 nt, Human
uagaaaacuacugaaagc

SEQ ID NO: 68867 - RNA, 21 nt, Human
uagacagccacagugucucag

SEQ ID NO: 68868 - RNA, 20 nt, Human
uagaugacauaaccugaaaa

SEQ ID NO: 68869 - RNA, 18 nt, Human
uauaggaacaacauucaa

SEQ ID NO: 68870 - RNA, 23 nt, Human
ucaaggcaaacuuucagcauaau

SEQ ID NO: 68871 - RNA, 20 nt, Human
ucagaccauaaauucucccc

SEQ ID NO: 68872 - RNA, 18 nt, Human
ucagacgaggcaaaggga

SEQ ID NO: 68873 - RNA, 20 nt, Human
ucagauaaguucaaucucac

SEQ ID NO: 68874 - RNA, 20 nt, Human
ucaggucuggaagccuuugu

SEQ ID NO: 68875 - RNA, 21 nt, Human
ucaugaguuaugaucuauuuu

SEQ ID NO: 68876 - RNA, 24 nt, Human
uccagaauaacagaucuuccuaaa

SEQ ID NO: 68877 - RNA, 27 nt, Human
uccccauacugcaguaaauaaugguug

SEQ ID NO: 68878 - RNA, 21 nt, Human
uccuaggguugauuugccucu

SEQ ID NO: 68879 - RNA, 19 nt, Human
ucuaguggccuugacuccu

SEQ ID NO: 68880 - RNA, 21 nt, Human
ucucaacucgacagcaggucu

SEQ ID NO: 68881 - RNA, 22 nt, Human
ucugucucuaccauucuuuccc

SEQ ID NO: 68882 - RNA, 22 nt, Human
ugaaaugccauuaggaguccca

SEQ ID NO: 68883 - RNA, 21 nt, Human
ugacaauacugaacuacuuga

SEQ ID NO: 68884 - RNA, 22 nt, Human
ugacuuggugcuugccacuauc

SEQ ID NO: 68885 - RNA, 23 nt, Human
ugaguacagaaaauuacaucaau

SEQ ID NO: 68886 - RNA, 21 nt, Human
ugaguagcuguacaauaauau

SEQ ID NO: 68887 - RNA, 19 nt, Human
ugaguuaauuacaguaaca

SEQ ID NO: 68888 - RNA, 23 nt, Human
ugcacaauaaaucuccauaaagg

SEQ ID NO: 68889 - RNA, 18 nt, Human
ugcugcaguuggucauag

SEQ ID NO: 68890 - RNA, 19 nt, Human
uggaagauucucccuuuuc

SEQ ID NO: 68891 - RNA, 19 nt, Human
uuacauuccacagccacac

SEQ ID NO: 68892 - RNA, 22 nt, Human
uucaaguuauuucacauaaaac

SEQ ID NO: 68893 - RNA, 24 nt, Human
uucauuauuuccucuucuggaaca

SEQ ID NO: 68894 - RNA, 23 nt, Human
uuccuaaauccagcuaugaaaua

SEQ ID NO: 68895 - RNA, 24 nt, Human
uucuagaagccuuauauucaugaa

SEQ ID NO: 68896 - RNA, 22 nt, Human
uuguauucauuuaauuacccau

SEQ ID NO: 68897 - RNA, 22 nt, Human
uuuaagcaccauuauaggcgag

SEQ ID NO: 68898 - RNA, 19 nt, Human
uuuacuaagauuucucucu

SEQ ID NO: 68899 - RNA, 25 nt, Human
uuucagagcuaguguggccauuaac

SEQ ID NO: 68900 - RNA, 25 nt, Human
agaaaagaaaauccuauauaaagag

SEQ ID NO: 68901 - RNA, 18 nt, Human
caguggcaguggcugagg

SEQ ID NO: 68902 - RNA, 26 nt, Human
caugaaaauuuccucuuguaugaauu

SEQ ID NO: 68903 - RNA, 20 nt, Human
ccggcggcggcgcgggcccu

SEQ ID NO: 68904 - RNA, 22 nt, Human
ccugcacgcaccuccgcggccg

SEQ ID NO: 68905 - RNA, 23 nt, Human
ccugcacgcaccuccgcggccga

SEQ ID NO: 68906 - RNA, 18 nt, Human
gagagacauaggaaggga

SEQ ID NO: 68907 - RNA, 21 nt, Human
gcggcggagcgcacggugggg

SEQ ID NO: 68908 - RNA, 20 nt, Human
gcggcggcgcgggcccugca

SEQ ID NO: 68909 - RNA, 19 nt, Human
gcgggcugcgggcguggag

SEQ ID NO: 68910 - RNA, 18 nt, Human
gcugcugagagacauagg

SEQ ID NO: 68911 - RNA, 19 nt, Human
ggagauggagauagaaaag

SEQ ID NO: 68912 - RNA, 19 nt, Human
ggcggagcgcacggugggg

SEQ ID NO: 68913 - RNA, 23 nt, Human
guggcaguggcaguggcugaggu

SEQ ID NO: 68914 - RNA, 22 nt, Human
uaaagugcaaaacaucagugag

SEQ ID NO: 68915 - RNA, 19 nt, Human
ugagagacauaggaaggga

SEQ ID NO: 68916 - RNA, 22 nt, Human
ugagcauccugcauacagcuuu

SEQ ID NO: 68917 - RNA, 19 nt, Human
ugcauacagcuuucugcau

SEQ ID NO: 68918 - RNA, 21 nt, Human
ugccccaacgugcugcugaga

SEQ ID NO: 68919 - RNA, 28 nt, Human
ugugccccaacgugcugcuuggaggucc

SEQ ID NO: 68920 - RNA, 18 nt, Human
uuaaugaggagauggaga

SEQ ID NO: 68921 - RNA, 18 nt, Human
aaaaauccagauauaaaa

SEQ ID NO: 68922 - RNA, 24 nt, Human
accgcuguugccacgugucgcgcc

SEQ ID NO: 68923 - RNA, 22 nt, Human
agagaaaagcacagagcagcuc

SEQ ID NO: 68924 - RNA, 23 nt, Human
agccaaguggagggagcuagggc

SEQ ID NO: 68925 - RNA, 22 nt, Human
auggaugguuuucaggcagccc

SEQ ID NO: 68926 - RNA, 22 nt, Human
cagauggaugguuuucaggcag

SEQ ID NO: 68927 - RNA, 25 nt, Human
caggcagcccuccccccucccccca

SEQ ID NO: 68928 - RNA, 20 nt, Human
caggguagaguuccaaacuu

SEQ ID NO: 68929 - RNA, 23 nt, Human
cauaaaaaccuuccccgcuguca

SEQ ID NO: 68930 - RNA, 24 nt, Human
caucuuuauuuguaaaaauccaga

SEQ ID NO: 68931 - RNA, 21 nt, Human
cccccauagagcuacaugcuu

SEQ ID NO: 68932 - RNA, 20 nt, Human
ccccccuccccccauagagc

SEQ ID NO: 68933 - RNA, 19 nt, Human
ccgaugccgccgccgcugu

SEQ ID NO: 68934 - RNA, 22 nt, Human
ccgaugccgccgccgcuguugc

SEQ ID NO: 68935 - RNA, 24 nt, Human
ccgccgccgcuguugcugccgccg

SEQ ID NO: 68936 - RNA, 24 nt, Human
ccgccgcuguugcugccgccgccc

SEQ ID NO: 68937 - RNA, 20 nt, Human
ccgccuccucccgccgcugc

SEQ ID NO: 68938 - RNA, 23 nt, Human
ccgccuccucccgccgcugcucu

SEQ ID NO: 68939 - RNA, 19 nt, Human
ccucccgccgcugcucugc

SEQ ID NO: 68940 - RNA, 22 nt, Human
ccuccucccgccgcugcucugc

SEQ ID NO: 68941 - RNA, 20 nt, Human
cggcggcucgggccgaugcc

SEQ ID NO: 68942 - RNA, 19 nt, Human
cugcucugcgccccagccu

SEQ ID NO: 68943 - RNA, 18 nt, Human
cuggagaaucagagagaa

SEQ ID NO: 68944 - RNA, 22 nt, Human
cuguugcugccgccgcccgggc

SEQ ID NO: 68945 - RNA, 22 nt, Human
cuuccccgcugucauuuccaca

SEQ ID NO: 68946 - RNA, 22 nt, Human
gagcgggaccaggggagccaag

SEQ ID NO: 68947 - RNA, 22 nt, Human
gagggugggagggcggccggcg

SEQ ID NO: 68948 - RNA, 21 nt, Human
gcagcccuccccccucccccc

SEQ ID NO: 68949 - RNA, 29 nt, Human
gccgaugccgccgccgcuguugcugccgg

SEQ ID NO: 68950 - RNA, 21 nt, Human
gccgcugcucugcgccccagc

SEQ ID NO: 68951 - RNA, 23 nt, Human
gcugcucugcgccccagccucgu

SEQ ID NO: 68952 - RNA, 22 nt, Human
guaaaaauccagauauaaaaug

SEQ ID NO: 68953 - RNA, 24 nt, Human
guguguggccugaugcuccacggc

SEQ ID NO: 68954 - RNA, 18 nt, Human
uacaaaaacaaaaaggca

SEQ ID NO: 68955 - RNA, 19 nt, Human
uacaaaaacaaaaaggcac

SEQ ID NO: 68956 - RNA, 21 nt, Human
ucaggcagcccuccccccucc

SEQ ID NO: 68957 - RNA, 19 nt, Human
uccccacaugcugcggucg

SEQ ID NO: 68958 - RNA, 21 nt, Human
uccccccuccccccauagagc

SEQ ID NO: 68959 - RNA, 21 nt, Human
ucccggccgagcgagcgggac

SEQ ID NO: 68960 - RNA, 23 nt, Human
uccgccuccucccgccgcugcuc

SEQ ID NO: 68961 - RNA, 21 nt, Human
ucgggccgaugccgccgccgc

SEQ ID NO: 68962 - RNA, 18 nt, Human
uggagggagcuagggcug

SEQ ID NO: 68963 - RNA, 26 nt, Human
uggaugguuuucaggcagcccucccc

SEQ ID NO: 68964 - RNA, 18 nt, Human
uggccugaugcuccacgg

SEQ ID NO: 68965 - RNA, 22 nt, Human
uggccugaugcuccacggcgug

SEQ ID NO: 68966 - RNA, 25 nt, Human
uuacaaaaacaaaaaggcacauaaa

SEQ ID NO: 68967 - RNA, 21 nt, Human
uuccaggacgucuugcuuccc

SEQ ID NO: 68968 - RNA, 19 nt, Human
uugcugccgccgcccgggc

SEQ ID NO: 68969 - RNA, 22 nt, Human
uuuguaaaaauccagauauaaa

SEQ ID NO: 68970 - RNA, 21 nt, Human
uuuuuuuuuuuuuuuuccauu

SEQ ID NO: 68971 - RNA, 22 nt, Human
aaaauuccagugcaaugaaaug

SEQ ID NO: 68972 - RNA, 23 nt, Human
aaagggaauggaagaggcuggga

SEQ ID NO: 68973 - RNA, 24 nt, Human
aaagugcugggauuacaggcauga

SEQ ID NO: 68974 - RNA, 18 nt, Human
aacuuguggccaucccuu

SEQ ID NO: 68975 - RNA, 23 nt, Human
aagaaagcuaucuccuguaggaa

SEQ ID NO: 68976 - RNA, 19 nt, Human
aagugcugggauuacaggc

SEQ ID NO: 68977 - RNA, 21 nt, Human
aagugcugggauuacaggcau

SEQ ID NO: 68978 - RNA, 26 nt, Human
aagugcugggauuacaggcaugagcc

SEQ ID NO: 68979 - RNA, 26 nt, Human
aaguguggcauuucuggaagcucuug

SEQ ID NO: 68980 - RNA, 18 nt, Human
acaggguuucaccauguu

SEQ ID NO: 68981 - RNA, 21 nt, Human
acaggguuucaccauguuggc

SEQ ID NO: 68982 - RNA, 24 nt, Human
acaggguuucaccauguuggccag

SEQ ID NO: 68983 - RNA, 23 nt, Human
acccagaaaaagcaaaucucuua

SEQ ID NO: 68984 - RNA, 21 nt, Human
accccgcaacuuagccugcug

SEQ ID NO: 68985 - RNA, 27 nt, Human
acccuuucgcccaggcuggaguguaau

SEQ ID NO: 68986 - RNA, 19 nt, Human
accuccaucucccaccugu

SEQ ID NO: 68987 - RNA, 23 nt, Human
accuccaucucccaccugucugc

SEQ ID NO: 68988 - RNA, 19 nt, Human
accuuuuccagucucaggc

SEQ ID NO: 68989 - RNA, 23 nt, Human
acucuguggcacacaaguguggc

SEQ ID NO: 68990 - RNA, 18 nt, Human
agacaggaagguucaggg

SEQ ID NO: 68991 - RNA, 19 nt, Human
agauuacaggcgugugcca

SEQ ID NO: 68992 - RNA, 23 nt, Human
agccaccgcacccagaaaaagca

SEQ ID NO: 68993 - RNA, 24 nt, Human
agccuuugggaggugguuuauggg

SEQ ID NO: 68994 - RNA, 20 nt, Human
agcgaacuccuuuuccaggg

SEQ ID NO: 68995 - RNA, 26 nt, Human
aggaaccugaaaccaacucuccagcc

SEQ ID NO: 68996 - RNA, 20 nt, Human
aggaagugggguugaagggg

SEQ ID NO: 68997 - RNA, 19 nt, Human
aggucaccaauaaagaucc

SEQ ID NO: 68998 - RNA, 19 nt, Human
aggucuuccauuuuccuca

SEQ ID NO: 68999 - RNA, 19 nt, Human
aguagcugagauuacaggc

SEQ ID NO: 69000 - RNA, 23 nt, Human
aguagcugagauuacaggcgugu

SEQ ID NO: 69001 - RNA, 18 nt, Human
agugcugggauuacaggc

SEQ ID NO: 69002 - RNA, 20 nt, Human
agugggaaauggagugaggc

SEQ ID NO: 69003 - RNA, 21 nt, Human
agugucuaaucugauuguuca

SEQ ID NO: 69004 - RNA, 24 nt, Human
augauccaccugccucggccuccc

SEQ ID NO: 69005 - RNA, 18 nt, Human
augggucugacccaaugc

SEQ ID NO: 69006 - RNA, 24 nt, Human
caaagugcugggauuacaggcaug

SEQ ID NO: 69007 - RNA, 24 nt, Human
caaccucuuccucacagguucaag

SEQ ID NO: 69008 - RNA, 22 nt, Human
caagcaauucuccugccucagc

SEQ ID NO: 69009 - RNA, 22 nt, Human
cacaacaccuccagagcucccc

SEQ ID NO: 69010 - RNA, 19 nt, Human
caccauguuggccaggcuc

SEQ ID NO: 69011 - RNA, 22 nt, Human
caccauguuggccaggcucgcc

SEQ ID NO: 69012 - RNA, 31 nt, Human
caccauguuggccaggcucgccucgaacucc

SEQ ID NO: 69013 - RNA, 25 nt, Human
cacccaaugccacccguuauuucca

SEQ ID NO: 69014 - RNA, 18 nt, Human
cacccagaaaaagcaaau

SEQ ID NO: 69015 - RNA, 20 nt, Human
cacccguuauuuccaucccu

SEQ ID NO: 69016 - RNA, 22 nt, Human
cacccuuucgcccaggcuggag

SEQ ID NO: 69017 - RNA, 22 nt, Human
cacccuuucgcccaggcuggag

SEQ ID NO: 69018 - RNA, 19 nt, Human
caccgcacccagaaaaagc

SEQ ID NO: 69019 - RNA, 22 nt, Human
caccgcacccagaaaaagcaaa

SEQ ID NO: 69020 - RNA, 23 nt, Human
caccugccucggccucccaaagu

SEQ ID NO: 69021 - RNA, 18 nt, Human
caccugucugcccagcuc

SEQ ID NO: 69022 - RNA, 21 nt, Human
cacugcaaccucuuccucaca

SEQ ID NO: 69023 - RNA, 22 nt, Human
cacugcaaccucuuccucacag

SEQ ID NO: 69024 - RNA, 25 nt, Human
cagaaaaaauagacaacauagugga

SEQ ID NO: 69025 - RNA, 18 nt, Human
cagagcuccccaucuuuc

SEQ ID NO: 69026 - RNA, 19 nt, Human
cagagcuccccaucuuucc

SEQ ID NO: 69027 - RNA, 23 nt, Human
cagcccaggguaagugggcacaa

SEQ ID NO: 69028 - RNA, 20 nt, Human
cagccuccugaguagcugag

SEQ ID NO: 69029 - RNA, 21 nt, Human
cagggaacuucuccacccuga

SEQ ID NO: 69030 - RNA, 24 nt, Human
caggguuucaccauguuggccagg

SEQ ID NO: 69031 - RNA, 21 nt, Human
cagugccuucuaagccaggcu

SEQ ID NO: 69032 - RNA, 22 nt, Human
caucccucuccaucaccauccc

SEQ ID NO: 69033 - RNA, 20 nt, Human
caugaaaagaaagggaaugg

SEQ ID NO: 69034 - RNA, 22 nt, Human
caugagccaccgcacccagaaa

SEQ ID NO: 69035 - RNA, 23 nt, Human
ccaaagugcugggauuacaggca

SEQ ID NO: 69036 - RNA, 24 nt, Human
ccaaagugcugggauuacaggcau

SEQ ID NO: 69037 - RNA, 25 nt, Human
ccacccguuauuuccaucccucucc

SEQ ID NO: 69038 - RNA, 23 nt, Human
ccacuuagauucccaggcccaag

SEQ ID NO: 69039 - RNA, 24 nt, Human
cccaaagugcugggauuacaggca

SEQ ID NO: 69040 - RNA, 22 nt, Human
cccaaauguugccacccaaugc

SEQ ID NO: 69041 - RNA, 23 nt, Human
cccaauuuauauaccccgcaacu

SEQ ID NO: 69042 - RNA, 21 nt, Human
cccaugcacucgcugcuucua

SEQ ID NO: 69043 - RNA, 18 nt, Human
ccccacaacaccuccaga

SEQ ID NO: 69044 - RNA, 26 nt, Human
ccccacaacaccuccagagcucccca

SEQ ID NO: 69045 - RNA, 24 nt, Human
cccucuccaucaccauccccacaa

SEQ ID NO: 69046 - RNA, 20 nt, Human
cccugaugagaucugaguuu

SEQ ID NO: 69047 - RNA, 24 nt, Human
ccucacagguucaagcaauucucc

SEQ ID NO: 69048 - RNA, 19 nt, Human
ccugaccucaugauccacc

SEQ ID NO: 69049 - RNA, 19 nt, Human
ccugaguagcugagauuac

SEQ ID NO: 69050 - RNA, 23 nt, Human
ccugaguagcugagauuacaggc

SEQ ID NO: 69051 - RNA, 23 nt, Human
ccugaguagcugagauuacaggc

SEQ ID NO: 69052 - RNA, 18 nt, Human
ccugauucuagccaaugg

SEQ ID NO: 69053 - RNA, 20 nt, Human
ccugcaggaagcuaacgggg

SEQ ID NO: 69054 - RNA, 23 nt, Human
ccugccucagccuccugaguagc

SEQ ID NO: 69055 - RNA, 24 nt, Human
ccuuucgcccaggcuggaguguaa

SEQ ID NO: 69056 - RNA, 23 nt, Human
cgcacccagaaaaagcaaaucuc

SEQ ID NO: 69057 - RNA, 25 nt, Human
cucaaacuaaugucuuacaaaaggu

SEQ ID NO: 69058 - RNA, 19 nt, Human
cucacagguucaagcaauu

SEQ ID NO: 69059 - RNA, 19 nt, Human
cucacugcaaccucuuccu

SEQ ID NO: 69060 - RNA, 21 nt, Human
cuccccaucuuuccaugccug

SEQ ID NO: 69061 - RNA, 24 nt, Human
cuccugaccucaugauccaccugc

SEQ ID NO: 69062 - RNA, 21 nt, Human
cucuccaucaccauccccaca

SEQ ID NO: 69063 - RNA, 19 nt, Human
cucuuaguauuuuuccucu

SEQ ID NO: 69064 - RNA, 18 nt, Human
cugaguagcugagauuac

SEQ ID NO: 69065 - RNA, 22 nt, Human
cugaguagcugagauuacaggc

SEQ ID NO: 69066 - RNA, 24 nt, Human
cugaguagcugagauuacaggcgu

SEQ ID NO: 69067 - RNA, 18 nt, Human
cugauaaagcaaaauucc

SEQ ID NO: 69068 - RNA, 24 nt, Human
cugcaaccucuuccucacagguuc

SEQ ID NO: 69069 - RNA, 23 nt, Human
cugccucagccuccugaguagcu

SEQ ID NO: 69070 - RNA, 23 nt, Human
cugccucggccucccaaagugcu

SEQ ID NO: 69071 - RNA, 18 nt, Human
cugccucugcugcuaccc

SEQ ID NO: 69072 - RNA, 18 nt, Human
cugccucugcugcuaccc

SEQ ID NO: 69073 - RNA, 20 nt, Human
cugcugaguugccucauuau

SEQ ID NO: 69074 - RNA, 21 nt, Human
cuuagagaaugggcaaggcug

SEQ ID NO: 69075 - RNA, 18 nt, Human
cuuggggcagaguggcug

SEQ ID NO: 69076 - RNA, 24 nt, Human
cuuuuaguagagacaggguuucac

SEQ ID NO: 69077 - RNA, 22 nt, Human
gaccucaugauccaccugccuc

SEQ ID NO: 69078 - RNA, 22 nt, Human
gaccucaugauccaccugccuc

SEQ ID NO: 69079 - RNA, 24 nt, Human
gaccucaugauccaccugccucgg

SEQ ID NO: 69080 - RNA, 18 nt, Human
gaggaccccuaaccaagg

SEQ ID NO: 69081 - RNA, 20 nt, Human
gaguagcugagauuacaggc

SEQ ID NO: 69082 - RNA, 25 nt, Human
gaguagcugagauuacaggcgugug

SEQ ID NO: 69083 - RNA, 21 nt, Human
gagugggcagggugggguaac

SEQ ID NO: 69084 - RNA, 22 nt, Human
gaugggcaugaaaagaaaggga

SEQ ID NO: 69085 - RNA, 18 nt, Human
gauuacaggcaugagcca

SEQ ID NO: 69086 - RNA, 22 nt, Human
gauuacaggcaugagccaccgc

SEQ ID NO: 69087 - RNA, 23 nt, Human
gauuacaggcaugagccaccgca

SEQ ID NO: 69088 - RNA, 18 nt, Human
gauuacaggcgugugcca

SEQ ID NO: 69089 - RNA, 22 nt, Human
gcaaccucuuccucacagguuc

SEQ ID NO: 69090 - RNA, 23 nt, Human
gcccaggcuggaguguaauggca

SEQ ID NO: 69091 - RNA, 19 nt, Human
gccucauuaucucucccca

SEQ ID NO: 69092 - RNA, 18 nt, Human
gccucgaacuccugaccu

SEQ ID NO: 69093 - RNA, 26 nt, Human
gccucugcugcuacccugaugagauc

SEQ ID NO: 69094 - RNA, 23 nt, Human
gccuuugggaggugguuuauggg

SEQ ID NO: 69095 - RNA, 21 nt, Human
gcgaacuccuuuuccaggguu

SEQ ID NO: 69096 - RNA, 21 nt, Human
gcucacugcaaccucuuccuc

SEQ ID NO: 69097 - RNA, 20 nt, Human
gcuucugauaaagcaaaauu

SEQ ID NO: 69098 - RNA, 19 nt, Human
ggaagugggguugaaggga

SEQ ID NO: 69099 - RNA, 20 nt, Human
ggagacaggaagguucaggg

SEQ ID NO: 69100 - RNA, 18 nt, Human
ggagugggcagggugggg

SEQ ID NO: 69101 - RNA, 22 nt, Human
ggauuacaggcaugagccaccg

SEQ ID NO: 69102 - RNA, 19 nt, Human
gggaauggaagaggcuggg

SEQ ID NO: 69103 - RNA, 24 nt, Human
gggaauggaagaggcugggaaaga

SEQ ID NO: 69104 - RNA, 22 nt, Human
ggguuucaccauguuggccagg

SEQ ID NO: 69105 - RNA, 18 nt, Human
guagcugagauuacaggc

SEQ ID NO: 69106 - RNA, 24 nt, Human
uaauuuuuuguacuuuuaguagag

SEQ ID NO: 69107 - RNA, 25 nt, Human
uaauuuuuuguacuuuuaguagaga

SEQ ID NO: 69108 - RNA, 24 nt, Human
uacaggcaugagccaccgcaccca

SEQ ID NO: 69109 - RNA, 22 nt, Human
uagagacaggguuucaccaugu

SEQ ID NO: 69110 - RNA, 19 nt, Human
uaggaaccugaaaccaacu

SEQ ID NO: 69111 - RNA, 24 nt, Human
uaguagagacaggguuucaccaug

SEQ ID NO: 69112 - RNA, 26 nt, Human
uaguagagacaggguuucaccauguu

SEQ ID NO: 69113 - RNA, 21 nt, Human
uauuacagaaggugaaguguu

SEQ ID NO: 69114 - RNA, 21 nt, Human
ucacagguucaagcaauucuc

SEQ ID NO: 69115 - RNA, 24 nt, Human
ucacagguucaagcaauucuccug

SEQ ID NO: 69116 - RNA, 24 nt, Human
ucaccauccccacaacaccuccag

SEQ ID NO: 69117 - RNA, 24 nt, Human
ucacccuuucgcccaggcuggagu

SEQ ID NO: 69118 - RNA, 19 nt, Human
ucacugcaaccucuuccuc

SEQ ID NO: 69119 - RNA, 24 nt, Human
ucacugcaaccucuuccucacagg

SEQ ID NO: 69120 - RNA, 24 nt, Human
ucagcucacugcaaccucuuccuc

SEQ ID NO: 69121 - RNA, 24 nt, Human
ucccaaagugcugggauuacaggc

SEQ ID NO: 69122 - RNA, 22 nt, Human
ucccacuuagauucccaggccc

SEQ ID NO: 69123 - RNA, 23 nt, Human
ucccaggcccaaggcaaugacuc

SEQ ID NO: 69124 - RNA, 24 nt, Human
uccccaucuuuccaugccugguuc

SEQ ID NO: 69125 - RNA, 19 nt, Human
ucccucuccaucaccaucc

SEQ ID NO: 69126 - RNA, 21 nt, Human
uccucagaugucuuucucacu

SEQ ID NO: 69127 - RNA, 19 nt, Human
uccuccagccagcccuacc

SEQ ID NO: 69128 - RNA, 24 nt, Human
uccugaguagcugagauuacaggc

SEQ ID NO: 69129 - RNA, 18 nt, Human
ucggccucccaaagugcu

SEQ ID NO: 69130 - RNA, 24 nt, Human
ucucacccuuucgcccaggcugga

SEQ ID NO: 69131 - RNA, 21 nt, Human
ucucaggcucuugcacucacc

SEQ ID NO: 69132 - RNA, 21 nt, Human
ucuccccaaauguugccaccc

SEQ ID NO: 69133 - RNA, 24 nt, Human
ucuccugccucagccuccugagua

SEQ ID NO: 69134 - RNA, 20 nt, Human
ugaaaccaacucuccagccc

SEQ ID NO: 69135 - RNA, 21 nt, Human
ugacauccggaccuuguggac

SEQ ID NO: 69136 - RNA, 24 nt, Human
ugaccuaagcuugucccuggaagc

SEQ ID NO: 69137 - RNA, 18 nt, Human
ugagauuacaggcgugug

SEQ ID NO: 69138 - RNA, 21 nt, Human
ugagauuacaggcgugugcca

SEQ ID NO: 69139 - RNA, 22 nt, Human
ugagauuacaggcgugugccac

SEQ ID NO: 69140 - RNA, 24 nt, Human
ugagauuacaggcgugugccacca

SEQ ID NO: 69141 - RNA, 25 nt, Human
ugagauuacaggcgugugccaccau

SEQ ID NO: 69142 - RNA, 18 nt, Human
ugcaaugaaaugacagcc

SEQ ID NO: 69143 - RNA, 21 nt, Human
ugccacccaaugccacccguu

SEQ ID NO: 69144 - RNA, 24 nt, Human
ugccucagccuccugaguagcuga

SEQ ID NO: 69145 - RNA, 19 nt, Human
ugccucauuaucucucccc

SEQ ID NO: 69146 - RNA, 21 nt, Human
ugccucggccucccaaagugc

SEQ ID NO: 69147 - RNA, 24 nt, Human
ugccucggccucccaaagugcugg

SEQ ID NO: 69148 - RNA, 22 nt, Human
ugccugaaaaguauuguuuuug

SEQ ID NO: 69149 - RNA, 21 nt, Human
ugccuggagggaacagcccug

SEQ ID NO: 69150 - RNA, 22 nt, Human
ugccugguucuucuuccaaugg

SEQ ID NO: 69151 - RNA, 22 nt, Human
uggaagaggcugggaaagaacu

SEQ ID NO: 69152 - RNA, 23 nt, Human
uggaagaggcugggaaagaacuu

SEQ ID NO: 69153 - RNA, 18 nt, Human
uggaagugggaaauggag

SEQ ID NO: 69154 - RNA, 22 nt, Human
uggaagugggaaauggagugag

SEQ ID NO: 69155 - RNA, 20 nt, Human
uggaguguaauggcacgauc

SEQ ID NO: 69156 - RNA, 23 nt, Human
uggaguguaauggcacgaucuca

SEQ ID NO: 69157 - RNA, 24 nt, Human
uggaguguaauggcacgaucucag

SEQ ID NO: 69158 - RNA, 24 nt, Human
uggcacgaucucagcucacugcaa

SEQ ID NO: 69159 - RNA, 24 nt, Human
uggccaggcucgccucgaacuccu

SEQ ID NO: 69160 - RNA, 25 nt, Human
ugggagacaaguccaccuuuuccag

SEQ ID NO: 69161 - RNA, 22 nt, Human
ugggagacaggaagguucaggg

SEQ ID NO: 69162 - RNA, 20 nt, Human
ugggauggaaaaggaucugg

SEQ ID NO: 69163 - RNA, 18 nt, Human
ugggauuacaggcaugag

SEQ ID NO: 69164 - RNA, 19 nt, Human
ugggauuacaggcaugagc

SEQ ID NO: 69165 - RNA, 21 nt, Human
ugggauuacaggcaugagcca

SEQ ID NO: 69166 - RNA, 22 nt, Human
ugggauuacaggcaugagccac

SEQ ID NO: 69167 - RNA, 23 nt, Human
ugggauuacaggcaugagccacc

SEQ ID NO: 69168 - RNA, 24 nt, Human
ugggauuacaggcaugagccaccg

SEQ ID NO: 69169 - RNA, 24 nt, Human
ugggauuacaggcaugagccaccg

SEQ ID NO: 69170 - RNA, 26 nt, Human
ugggauuacaggcaugagccaccgca

SEQ ID NO: 69171 - RNA, 19 nt, Human
uggggcagaguggcugagg

SEQ ID NO: 69172 - RNA, 19 nt, Human
uggggugaucugagagggc

SEQ ID NO: 69173 - RNA, 23 nt, Human
ugucuuacaaaaggucaccaaua

SEQ ID NO: 69174 - RNA, 19 nt, Human
uuaggucuuccauuuuccu

SEQ ID NO: 69175 - RNA, 24 nt, Human
uuaguagagacaggguuucaccau

SEQ ID NO: 69176 - RNA, 21 nt, Human
uucaagcaauucuccugccuc

SEQ ID NO: 69177 - RNA, 24 nt, Human
uucaagcaauucuccugccucagc

SEQ ID NO: 69178 - RNA, 20 nt, Human
uucacaguuaggucuauggg

SEQ ID NO: 69179 - RNA, 22 nt, Human
uuuagauggguuccugcuuuug

SEQ ID NO: 69180 - RNA, 23 nt, Human
uuucaccauguuggccaggcucg

SEQ ID NO: 69181 - RNA, 21 nt, Human
uuuuuguacuuuuaguagaga

SEQ ID NO: 69182 - RNA, 24 nt, Human
uuuuuuguacuuuuaguagagaca

SEQ ID NO: 69183 - RNA, 24 nt, Human
aaaaaacaaaaaacaaacaaaaaa

SEQ ID NO: 69184 - RNA, 22 nt, Human
aaaaaaggaaaguaaaagaaaa

SEQ ID NO: 69185 - RNA, 21 nt, Human
aaaaaggaaaguaaaagaaaa

SEQ ID NO: 69186 - RNA, 21 nt, Human
aaaacaaaaaacaaacaaaaa

SEQ ID NO: 69187 - RNA, 26 nt, Human
aaaacaaacaaaaaaaaaaaauuacc

SEQ ID NO: 69188 - RNA, 20 nt, Human
aaaauaaaaauaaagaccua

SEQ ID NO: 69189 - RNA, 18 nt, Human
aaacagauacaauaaaac

SEQ ID NO: 69190 - RNA, 22 nt, Human
aaagagccaaaaaacaaaaaac

SEQ ID NO: 69191 - RNA, 26 nt, Human
aaagagccaaaaaacaaaaaacaaac

SEQ ID NO: 69192 - RNA, 27 nt, Human
aaauaaaaauaaagaccuaacaccaca

SEQ ID NO: 69193 - RNA, 21 nt, Human
aaauacacaaggcagcaauac

SEQ ID NO: 69194 - RNA, 22 nt, Human
aaaugggcacgucccaaggcuc

SEQ ID NO: 69195 - RNA, 18 nt, Human
aaauuguacaacugcaua

SEQ ID NO: 69196 - RNA, 20 nt, Human
aacacugcuuacuacaaggu

SEQ ID NO: 69197 - RNA, 21 nt, Human
aaggaaaaaaggaaaguaaaa

SEQ ID NO: 69198 - RNA, 24 nt, Human
aaggcucaauuuuucuuuuucuuu

SEQ ID NO: 69199 - RNA, 18 nt, Human
aauaaaauacacaaggca

SEQ ID NO: 69200 - RNA, 21 nt, Human
acaaggcaagagaugucaaga

SEQ ID NO: 69201 - RNA, 23 nt, Human
acagcagagacgcagccuuccag

SEQ ID NO: 69202 - RNA, 21 nt, Human
acauggcuugaaaaaugacca

SEQ ID NO: 69203 - RNA, 20 nt, Human
accacagcagagacgcagcc

SEQ ID NO: 69204 - RNA, 21 nt, Human
accacagcagagacgcagccu

SEQ ID NO: 69205 - RNA, 18 nt, Human
acccccaccccagccccc

SEQ ID NO: 69206 - RNA, 20 nt, Human
accuuugaaagagccaaaaa

SEQ ID NO: 69207 - RNA, 22 nt, Human
agaaaaaaauaaaauuguacaa

SEQ ID NO: 69208 - RNA, 20 nt, Human
agaaaacagauacaauaaaa

SEQ ID NO: 69209 - RNA, 22 nt, Human
agaaaacagauacaauaaaaca

SEQ ID NO: 69210 - RNA, 18 nt, Human
agagccaaaaaacaaaaa

SEQ ID NO: 69211 - RNA, 19 nt, Human
agccaaaaaacaaaaaaca

SEQ ID NO: 69212 - RNA, 24 nt, Human
agccaaaaaacaaaaaacaaacaa

SEQ ID NO: 69213 - RNA, 25 nt, Human
agccaaaaaacaaaaaacaaacaaa

SEQ ID NO: 69214 - RNA, 31 nt, Human
agccaaaaaacaaaaaacaaacaaaaaaaag

SEQ ID NO: 69215 - RNA, 21 nt, Human
agcccugucccuaggccaaag

SEQ ID NO: 69216 - RNA, 22 nt, Human
aggaaaaaaauaaaaauaaaga

SEQ ID NO: 69217 - RNA, 20 nt, Human
aggccaaagugaugggcaga

SEQ ID NO: 69218 - RNA, 25 nt, Human
aguucccccaugacaaacccccacc

SEQ ID NO: 69219 - RNA, 22 nt, Human
auaaagcaaauuaauuagcccu

SEQ ID NO: 69220 - RNA, 23 nt, Human
caaaaaacaaaaaacaaacaaaa

SEQ ID NO: 69221 - RNA, 21 nt, Human
caaacccccaccccagccccc

SEQ ID NO: 69222 - RNA, 22 nt, Human
caaacccccaccccagccccca

SEQ ID NO: 69223 - RNA, 22 nt, Human
caaacccccaccccagccccca

SEQ ID NO: 69224 - RNA, 19 nt, Human
caauacuuaggggccagaa

SEQ ID NO: 69225 - RNA, 25 nt, Human
cacagcuuuagaacauaccggagga

SEQ ID NO: 69226 - RNA, 21 nt, Human
caccacagcagagacgcagcc

SEQ ID NO: 69227 - RNA, 21 nt, Human
cagcagagacgcagccuucca

SEQ ID NO: 69228 - RNA, 18 nt, Human
cagcccccaggaaaaaaa

SEQ ID NO: 69229 - RNA, 20 nt, Human
caggaaaagacuauggagua

SEQ ID NO: 69230 - RNA, 19 nt, Human
cauaacacaacccaucacc

SEQ ID NO: 69231 - RNA, 23 nt, Human
caugacaaacccccaccccagcc

SEQ ID NO: 69232 - RNA, 24 nt, Human
caugacaaacccccaccccagccc

SEQ ID NO: 69233 - RNA, 27 nt, Human
caugacaaacccccaccccagccccca

SEQ ID NO: 69234 - RNA, 18 nt, Human
cauuacacuuuuucuugc

SEQ ID NO: 69235 - RNA, 28 nt, Human
ccaaaaaacaaaaaacaaacaaaaaaaa

SEQ ID NO: 69236 - RNA, 21 nt, Human
ccacaggaaaagacuauggag

SEQ ID NO: 69237 - RNA, 25 nt, Human
cccaggaaaaaaauaaaaauaaaga

SEQ ID NO: 69238 - RNA, 23 nt, Human
cccaugacaaacccccaccccag

SEQ ID NO: 69239 - RNA, 19 nt, Human
ccccagcccccaggaaaaa

SEQ ID NO: 69240 - RNA, 24 nt, Human
cccccaccccagcccccaggaaaa

SEQ ID NO: 69241 - RNA, 21 nt, Human
cccccaggaaaaaaauaaaaa

SEQ ID NO: 69242 - RNA, 22 nt, Human
cccccaugacaaacccccaccc

SEQ ID NO: 69243 - RNA, 21 nt, Human
cgggucagcagcugccgcggu

SEQ ID NO: 69244 - RNA, 22 nt, Human
cucacauaaaguagaaaacaga

SEQ ID NO: 69245 - RNA, 24 nt, Human
gcaauacuuaggggccagaaacac

SEQ ID NO: 69246 - RNA, 28 nt, Human
gcaguucccccaugacaaacccccaccc

SEQ ID NO: 69247 - RNA, 22 nt, Human
gcucaauuuuucuuuuucuuuu

SEQ ID NO: 69248 - RNA, 19 nt, Human
gggcacgucccaaggcuca

SEQ ID NO: 69249 - RNA, 21 nt, Human
guaaaagaaaauguauaaagc

SEQ ID NO: 69250 - RNA, 24 nt, Human
uaaaaaugcucaucgaugggccau

SEQ ID NO: 69251 - RNA, 22 nt, Human
uaaagcaaauuaauuagcccug

SEQ ID NO: 69252 - RNA, 31 nt, Human
uagaaaacagauacaauaaaacauggcuugg

SEQ ID NO: 69253 - RNA, 24 nt, Human
uagaacauaccggaggacaaggca

SEQ ID NO: 69254 - RNA, 19 nt, Human
uagcccugucccuaggcca

SEQ ID NO: 69255 - RNA, 19 nt, Human
uauuuacaccuuggacagc

SEQ ID NO: 69256 - RNA, 21 nt, Human
uccaccaugaaaaugguuaaa

SEQ ID NO: 69257 - RNA, 18 nt, Human
ucccccaugacaaacccc

SEQ ID NO: 69258 - RNA, 22 nt, Human
ucccuaggccaaagugaugggc

SEQ ID NO: 69259 - RNA, 21 nt, Human
uccggaggguggguggcugcg

SEQ ID NO: 69260 - RNA, 24 nt, Human
ucuaaccuauuaaaugcagaaagc

SEQ ID NO: 69261 - RNA, 25 nt, Human
ugaaagagccaaaaaacaaaaaaca

SEQ ID NO: 69262 - RNA, 20 nt, Human
ugacaaacccccaccccagc

SEQ ID NO: 69263 - RNA, 21 nt, Human
ugacaaacccccaccccagcc

SEQ ID NO: 69264 - RNA, 22 nt, Human
ugacugaauacaagaucaacaa

SEQ ID NO: 69265 - RNA, 22 nt, Human
uggcuugaaaaaugaccagagu

SEQ ID NO: 69266 - RNA, 20 nt, Human
uucauacauuacacuuuuuc

SEQ ID NO: 69267 - RNA, 22 nt, Human
uuuacaccuuggacagcaaacc

SEQ ID NO: 69268 - RNA, 24 nt, Human
aaaaaaaaaaaaaaaaagaaagaa

SEQ ID NO: 69269 - RNA, 19 nt, Human
aaaccagaacuagaaaggc

SEQ ID NO: 69270 - RNA, 20 nt, Human
aaaccagaacuagaaaggcu

SEQ ID NO: 69271 - RNA, 21 nt, Human
aaccagaacuagaaaggcucc

SEQ ID NO: 69272 - RNA, 25 nt, Human
aacuccaucucaaaaaaacaaagaa

SEQ ID NO: 69273 - RNA, 22 nt, Human
aagaaagaaagaaauuagccgg

SEQ ID NO: 69274 - RNA, 19 nt, Human
aagaagccagagaaaggau

SEQ ID NO: 69275 - RNA, 22 nt, Human
aaggggugcauuucagaggagg

SEQ ID NO: 69276 - RNA, 18 nt, Human
aaucgcuugaaccuggga

SEQ ID NO: 69277 - RNA, 21 nt, Human
aaugcaaaaaaaaaaaaaaaa

SEQ ID NO: 69278 - RNA, 18 nt, Human
acaaaggggugcauuuca

SEQ ID NO: 69279 - RNA, 19 nt, Human
acaagagcgaaacuccauc

SEQ ID NO: 69280 - RNA, 20 nt, Human
acaagagcgaaacuccaucu

SEQ ID NO: 69281 - RNA, 21 nt, Human
acaagagcgaaacuccaucuc

SEQ ID NO: 69282 - RNA, 18 nt, Human
accaagauggcgacugug

SEQ ID NO: 69283 - RNA, 22 nt, Human
accauugcacuccagccugggc

SEQ ID NO: 69284 - RNA, 18 nt, Human
acuuccagucccgcauuu

SEQ ID NO: 69285 - RNA, 19 nt, Human
agaaaguaugagagaucaa

SEQ ID NO: 69286 - RNA, 24 nt, Human
agaaguuggugggaaaggcgagug

SEQ ID NO: 69287 - RNA, 25 nt, Human
agacagggagaaaguaugagagauc

SEQ ID NO: 69288 - RNA, 18 nt, Human
agagauggggugggagga

SEQ ID NO: 69289 - RNA, 19 nt, Human
agaggaggagaagaccugc

SEQ ID NO: 69290 - RNA, 22 nt, Human
agcaaagagggaaaaggccaca

SEQ ID NO: 69291 - RNA, 20 nt, Human
agcccagcucccugucugac

SEQ ID NO: 69292 - RNA, 23 nt, Human
agccgggcaugguggcacaugcc

SEQ ID NO: 69293 - RNA, 24 nt, Human
aggaagaaacugaaggccaggcgc

SEQ ID NO: 69294 - RNA, 28 nt, Human
aggaaggaguuagugauuaacuaagggg

SEQ ID NO: 69295 - RNA, 18 nt, Human
aggagagagauggggugg

SEQ ID NO: 69296 - RNA, 20 nt, Human
aggaggagaagaccugccca

SEQ ID NO: 69297 - RNA, 23 nt, Human
aggauauucugggaaggcgaaug

SEQ ID NO: 69298 - RNA, 18 nt, Human
aggcagguggaucaccug

SEQ ID NO: 69299 - RNA, 22 nt, Human
aggcagguggaucaccugaggg

SEQ ID NO: 69300 - RNA, 22 nt, Human
aggcagguggaucaccugaggu

SEQ ID NO: 69301 - RNA, 21 nt, Human
aggccgaggcagguggaucac

SEQ ID NO: 69302 - RNA, 24 nt, Human
aggcgcgguggcucacgccuguaa

SEQ ID NO: 69303 - RNA, 22 nt, Human
aggcgggagaaucgcuugaacc

SEQ ID NO: 69304 - RNA, 24 nt, Human
aggcgggagaaucgcuugaaccug

SEQ ID NO: 69305 - RNA, 23 nt, Human
agggaauagggauggagaggagg

SEQ ID NO: 69306 - RNA, 20 nt, Human
agggagccauccauaaaaac

SEQ ID NO: 69307 - RNA, 24 nt, Human
augcaaaaaaaaaaaaaaaaagaa

SEQ ID NO: 69308 - RNA, 24 nt, Human
augcggaaguugcagugagcugag

SEQ ID NO: 69309 - RNA, 21 nt, Human
auggaaggagggagugccaca

SEQ ID NO: 69310 - RNA, 20 nt, Human
auucagaggcuagauuugga

SEQ ID NO: 69311 - RNA, 24 nt, Human
auugcaccauugcacuccagccug

SEQ ID NO: 69312 - RNA, 28 nt, Human
auugcaccauugcacuccagccugggca

SEQ ID NO: 69313 - RNA, 24 nt, Human
auugcacuccagccugggcaacaa

SEQ ID NO: 69314 - RNA, 25 nt, Human
auugcacuccagccugggcaacaag

SEQ ID NO: 69315 - RNA, 23 nt, Human
caaagccagccgauguuuccaag

SEQ ID NO: 69316 - RNA, 21 nt, Human
caacacaggccucacuuccag

SEQ ID NO: 69317 - RNA, 24 nt, Human
caacacuuugggaggccgaggcag

SEQ ID NO: 69318 - RNA, 25 nt, Human
caacacuuugggaggccgaggcagg

SEQ ID NO: 69319 - RNA, 18 nt, Human
caaccccgccccucuggg

SEQ ID NO: 69320 - RNA, 21 nt, Human
caccagagggugagaagcaga

SEQ ID NO: 69321 - RNA, 24 nt, Human
cacgccuguaaucccaacacuuug

SEQ ID NO: 69322 - RNA, 24 nt, Human
cacuccagccugggcaacaagagc

SEQ ID NO: 69323 - RNA, 25 nt, Human
cacuccagccugggcaacaagagcg

SEQ ID NO: 69324 - RNA, 23 nt, Human
cagcaaagagggaaaaggccaca

SEQ ID NO: 69325 - RNA, 24 nt, Human
cagccuaggucaaccccgccccuc

SEQ ID NO: 69326 - RNA, 18 nt, Human
cagcucacagagucacca

SEQ ID NO: 69327 - RNA, 24 nt, Human
cagguggaucaccugaggucggga

SEQ ID NO: 69328 - RNA, 23 nt, Human
caucucaaaaaaacaaagaaaga

SEQ ID NO: 69329 - RNA, 20 nt, Human
cauucaucucuggaagcaaa

SEQ ID NO: 69330 - RNA, 19 nt, Human
cauugcacuccagccuggg

SEQ ID NO: 69331 - RNA, 21 nt, Human
cauugcacuccagccugggca

SEQ ID NO: 69332 - RNA, 25 nt, Human
cauugcacuccagccugggcaacaa

SEQ ID NO: 69333 - RNA, 21 nt, Human
ccaacaaggagaaacccccau

SEQ ID NO: 69334 - RNA, 23 nt, Human
ccagagcucccugggaaguggaa

SEQ ID NO: 69335 - RNA, 18 nt, Human
ccauaaaaacaaagugga

SEQ ID NO: 69336 - RNA, 19 nt, Human
ccauccauaaaaacaaagu

SEQ ID NO: 69337 - RNA, 18 nt, Human
ccaucuuagcccagcucc

SEQ ID NO: 69338 - RNA, 20 nt, Human
ccauugcacuccagccuggg

SEQ ID NO: 69339 - RNA, 21 nt, Human
ccauugcacuccagccugggc

SEQ ID NO: 69340 - RNA, 23 nt, Human
ccauugcacuccagccugggcaa

SEQ ID NO: 69341 - RNA, 24 nt, Human
ccauugcacuccagccugggcaac

SEQ ID NO: 69342 - RNA, 25 nt, Human
ccauugcacuccagccugggcaaca

SEQ ID NO: 69343 - RNA, 24 nt, Human
cccagcuacucgggaaccugaggc

SEQ ID NO: 69344 - RNA, 18 nt, Human
ccccucuggguagcagcu

SEQ ID NO: 69345 - RNA, 18 nt, Human
ccgccccucccccagagc

SEQ ID NO: 69346 - RNA, 19 nt, Human
ccugaggcgggagaaucgc

SEQ ID NO: 69347 - RNA, 22 nt, Human
ccugaggucgggaguucgagac

SEQ ID NO: 69348 - RNA, 22 nt, Human
ccuguaaucccaacacuuuggg

SEQ ID NO: 69349 - RNA, 21 nt, Human
ccuguagucccagcuacucgg

SEQ ID NO: 69350 - RNA, 22 nt, Human
ccuguagucccagcuacucggg

SEQ ID NO: 69351 - RNA, 21 nt, Human
cgagaccagccugaccaacaa

SEQ ID NO: 69352 - RNA, 20 nt, Human
cgaggcagguggaucaccug

SEQ ID NO: 69353 - RNA, 19 nt, Human
cuacuaaaaaaugcaaaaa

SEQ ID NO: 69354 - RNA, 22 nt, Human
cucacgccuguaaucccaacac

SEQ ID NO: 69355 - RNA, 24 nt, Human
cucacgccuguaaucccaacacuu

SEQ ID NO: 69356 - RNA, 22 nt, Human
cucccccagagcucccugggaa

SEQ ID NO: 69357 - RNA, 25 nt, Human
cucuacuaaaaaaugcaaaaaaaaa

SEQ ID NO: 69358 - RNA, 19 nt, Human
cugaccaacaaggagaaac

SEQ ID NO: 69359 - RNA, 18 nt, Human
cuuagcccagcucccugu

SEQ ID NO: 69360 - RNA, 24 nt, Human
gaaggccaggcgcgguggcucacg

SEQ ID NO: 69361 - RNA, 19 nt, Human
gaagucgggggcugcuaga

SEQ ID NO: 69362 - RNA, 23 nt, Human
gaaguugcagugagcugagauug

SEQ ID NO: 69363 - RNA, 22 nt, Human
gaauagucccaaagccagccga

SEQ ID NO: 69364 - RNA, 19 nt, Human
gaauggaaggagggagugc

SEQ ID NO: 69365 - RNA, 22 nt, Human
gacugaucugagguugggagaa

SEQ ID NO: 69366 - RNA, 22 nt, Human
gacugcgugugcacguuugugu

SEQ ID NO: 69367 - RNA, 22 nt, Human
gagaaacccccaucucuacuaa

SEQ ID NO: 69368 - RNA, 20 nt, Human
gagauggggugggaggaagg

SEQ ID NO: 69369 - RNA, 23 nt, Human
gagauugcaccauugcacuccag

SEQ ID NO: 69370 - RNA, 19 nt, Human
gaggagaagaccugcccag

SEQ ID NO: 69371 - RNA, 22 nt, Human
gaggaggagaagaccugcccag

SEQ ID NO: 69372 - RNA, 23 nt, Human
gaggcagguggaucaccugaggu

SEQ ID NO: 69373 - RNA, 23 nt, Human
gagggaauagggauggagaggag

SEQ ID NO: 69374 - RNA, 18 nt, Human
gagggagggaucaggcag

SEQ ID NO: 69375 - RNA, 18 nt, Human
gaguuagugauuaguuga

SEQ ID NO: 69376 - RNA, 24 nt, Human
gaucaccugaggucgggaguucga

SEQ ID NO: 69377 - RNA, 20 nt, Human
gaucaggcagggucagggac

SEQ ID NO: 69378 - RNA, 23 nt, Human
gaucugggcucaggggaaggagg

SEQ ID NO: 69379 - RNA, 18 nt, Human
gcggaaguugcagugagc

SEQ ID NO: 69380 - RNA, 20 nt, Human
gcggaaguugcagugagcug

SEQ ID NO: 69381 - RNA, 22 nt, Human
gcggaaguugcagugagcugag

SEQ ID NO: 69382 - RNA, 23 nt, Human
gcgugugcacguuugugugugug

SEQ ID NO: 69383 - RNA, 22 nt, Human
ggaaaaggaugugaggcucaga

SEQ ID NO: 69384 - RNA, 20 nt, Human
ggaaggagggagugccacau

SEQ ID NO: 69385 - RNA, 22 nt, Human
ggaagggagccauccauaaaaa

SEQ ID NO: 69386 - RNA, 18 nt, Human
ggaaguugcagugagcug

SEQ ID NO: 69387 - RNA, 22 nt, Human
ggaaguugcagugagcugagau

SEQ ID NO: 69388 - RNA, 24 nt, Human
ggaaguugcagugagcugagauug

SEQ ID NO: 69389 - RNA, 18 nt, Human
ggcgagugacggaaccgc

SEQ ID NO: 69390 - RNA, 19 nt, Human
ggcgcggggcgaguccggg

SEQ ID NO: 69391 - RNA, 24 nt, Human
ggugacagaacggccuaggaagaa

SEQ ID NO: 69392 - RNA, 23 nt, Human
gguggcucacgccuguaauccca

SEQ ID NO: 69393 - RNA, 21 nt, Human
guaggugggugggugggucag

SEQ ID NO: 69394 - RNA, 22 nt, Human
guggcucacgccuguaauccca

SEQ ID NO: 69395 - RNA, 19 nt, Human
gugggaaaggcgagugacg

SEQ ID NO: 69396 - RNA, 22 nt, Human
guguagguggguggguggguca

SEQ ID NO: 69397 - RNA, 19 nt, Human
guugcagugagcugagauu

SEQ ID NO: 69398 - RNA, 27 nt, Human
uaaaagaagccagagaaaggauggugg

SEQ ID NO: 69399 - RNA, 24 nt, Human
uagcccagcucccugucugacuga

SEQ ID NO: 69400 - RNA, 24 nt, Human
uaggaagaaacugaaggccaggcg

SEQ ID NO: 69401 - RNA, 21 nt, Human
uaggugggugggugggucagu

SEQ ID NO: 69402 - RNA, 24 nt, Human
ucaggaagggucaacacaggccuc

SEQ ID NO: 69403 - RNA, 23 nt, Human
ucccugggaaguggaacuugaag

SEQ ID NO: 69404 - RNA, 26 nt, Human
uccucaauuacaaaggggugcauuuc

SEQ ID NO: 69405 - RNA, 21 nt, Human
ucgcuugaaccugggaugcgg

SEQ ID NO: 69406 - RNA, 25 nt, Human
ucgcuugaaccugggaugcggaagu

SEQ ID NO: 69407 - RNA, 24 nt, Human
ugaagagauggagccaagacauuc

SEQ ID NO: 69408 - RNA, 19 nt, Human
ugagaagcagaacgugcca

SEQ ID NO: 69409 - RNA, 20 nt, Human
ugagaagucaaggaaaagga

SEQ ID NO: 69410 - RNA, 24 nt, Human
ugaggcgggagaaucgcuugaacc

SEQ ID NO: 69411 - RNA, 19 nt, Human
ugcaaaaaaaaaaaaaaaa

SEQ ID NO: 69412 - RNA, 21 nt, Human
ugcaccauugcacuccagccu

SEQ ID NO: 69413 - RNA, 19 nt, Human
ugcacuccagccugggcaa

SEQ ID NO: 69414 - RNA, 21 nt, Human
ugcagaggaaaaggaaggagu

SEQ ID NO: 69415 - RNA, 23 nt, Human
ugccuguagucccagcuacucgg

SEQ ID NO: 69416 - RNA, 24 nt, Human
ugccuguagucccagcuacucggg

SEQ ID NO: 69417 - RNA, 21 nt, Human
ugcggaaguugcagugagcug

SEQ ID NO: 69418 - RNA, 21 nt, Human
ugcgugugcacguuugugugu

SEQ ID NO: 69419 - RNA, 27 nt, Human
ugcgugugcacguuugugugugugugu

SEQ ID NO: 69420 - RNA, 27 nt, Human
ugcgugugcacguuugugugugugugu

SEQ ID NO: 69421 - RNA, 28 nt, Human
ugcgugugcacguuugugugugugugug

SEQ ID NO: 69422 - RNA, 19 nt, Human
ugcugaagucgggggcugc

SEQ ID NO: 69423 - RNA, 24 nt, Human
uggaucaccugaggucgggaguuc

SEQ ID NO: 69424 - RNA, 24 nt, Human
uggccgccccucccccagagcucc

SEQ ID NO: 69425 - RNA, 21 nt, Human
uggcucacgccuguaauccca

SEQ ID NO: 69426 - RNA, 24 nt, Human
uggcucacgccuguaaucccaaca

SEQ ID NO: 69427 - RNA, 21 nt, Human
ugggaaaggcgagugacggaa

SEQ ID NO: 69428 - RNA, 22 nt, Human
ugggagaaguuggugggaaagg

SEQ ID NO: 69429 - RNA, 23 nt, Human
ugggagaaguuggugggaaaggc

SEQ ID NO: 69430 - RNA, 24 nt, Human
ugggaggccgaggcagguggauca

SEQ ID NO: 69431 - RNA, 20 nt, Human
ugggcucaggggaaggaggu

SEQ ID NO: 69432 - RNA, 19 nt, Human
uggggugggaggaaggggc

SEQ ID NO: 69433 - RNA, 20 nt, Human
uggggugggaggaaggggcc

SEQ ID NO: 69434 - RNA, 19 nt, Human
uggggugggugagggaggg

SEQ ID NO: 69435 - RNA, 24 nt, Human
ugguggcacaugccuguaguccca

SEQ ID NO: 69436 - RNA, 21 nt, Human
uguagguggguggguggguca

SEQ ID NO: 69437 - RNA, 18 nt, Human
uuagccgggcaugguggc

SEQ ID NO: 69438 - RNA, 22 nt, Human
uucaucucuggaagcaaagggg

SEQ ID NO: 69439 - RNA, 18 nt, Human
uugagaagucaaggaaaa

SEQ ID NO: 69440 - RNA, 23 nt, Human
uugcaccauugcacuccagccug

SEQ ID NO: 69441 - RNA, 19 nt, Human
uugcagugagcugagauug

SEQ ID NO: 69442 - RNA, 20 nt, Human
uugcagugagcugagauugc

SEQ ID NO: 69443 - RNA, 22 nt, Human
uugcagugagcugagauugcac

SEQ ID NO: 69444 - RNA, 25 nt, Human
uugggaggccgaggcagguggauca

SEQ ID NO: 69445 - RNA, 24 nt, Human
uuguguguguguguggcggggggu

SEQ ID NO: 69446 - RNA, 24 nt, Human
aagcaguaacaagauauuucacaa

SEQ ID NO: 69447 - RNA, 26 nt, Human
acacaacauuuacucuguggagauau

SEQ ID NO: 69448 - RNA, 20 nt, Human
acucuguggagauauccuac

SEQ ID NO: 69449 - RNA, 22 nt, Human
agaacuucuccacauaccacau

SEQ ID NO: 69450 - RNA, 21 nt, Human
agacacuuggcaauuaaacca

SEQ ID NO: 69451 - RNA, 22 nt, Human
agacagacaacacaacauuuac

SEQ ID NO: 69452 - RNA, 24 nt, Human
agccuaaaauaagaggcaguucca

SEQ ID NO: 69453 - RNA, 20 nt, Human
caacacaacauuuacucugu

SEQ ID NO: 69454 - RNA, 21 nt, Human
caacacuaaaaauuaauccca

SEQ ID NO: 69455 - RNA, 22 nt, Human
cacauaaaaagaggacaagacc

SEQ ID NO: 69456 - RNA, 19 nt, Human
cacugguucaaagggcagc

SEQ ID NO: 69457 - RNA, 22 nt, Human
cauaaaaagaggacaagacccc

SEQ ID NO: 69458 - RNA, 24 nt, Human
cauaaaaagaggacaagaccccca

SEQ ID NO: 69459 - RNA, 25 nt, Human
ccacauaaaaagaggacaagacccc

SEQ ID NO: 69460 - RNA, 18 nt, Human
cccccauccuacauguuu

SEQ ID NO: 69461 - RNA, 22 nt, Human
ggguaccauuuuaucccuaaaa

SEQ ID NO: 69462 - RNA, 23 nt, Human
uaaaaagaggacaagacccccau

SEQ ID NO: 69463 - RNA, 22 nt, Human
uaacaagauauuucacaaacua

SEQ ID NO: 69464 - RNA, 25 nt, Human
uaacaagauauuucacaaacuauug

SEQ ID NO: 69465 - RNA, 19 nt, Human
uaacccaaugucauguacc

SEQ ID NO: 69466 - RNA, 25 nt, Human
uaagucuuaugaauuuaaucucaua

SEQ ID NO: 69467 - RNA, 25 nt, Human
uacagccuaaaauaagaggcaguuc

SEQ ID NO: 69468 - RNA, 23 nt, Human
uaucccuaaaacucuguugacau

SEQ ID NO: 69469 - RNA, 18 nt, Human
uauuacaguccacagucu

SEQ ID NO: 69470 - RNA, 19 nt, Human
ucaaagggcagcagaggca

SEQ ID NO: 69471 - RNA, 22 nt, Human
ucacauacagaacuucuccaca

SEQ ID NO: 69472 - RNA, 20 nt, Human
ucacuugauguuggccgggu

SEQ ID NO: 69473 - RNA, 23 nt, Human
ucccaguuuuuuuuuuuacaugu

SEQ ID NO: 69474 - RNA, 24 nt, Human
ucugcuaaauaaaagcaguaacaa

SEQ ID NO: 69475 - RNA, 18 nt, Human
ugacaucaaaauaugaca

SEQ ID NO: 69476 - RNA, 23 nt, Human
uggaaucagguguucaccggucc

SEQ ID NO: 69477 - RNA, 19 nt, Human
uggcuaaccuaaaaaugcu

SEQ ID NO: 69478 - RNA, 22 nt, Human
uuagacacuuggcaauuaaacc

SEQ ID NO: 69479 - RNA, 22 nt, Human
aaagaaaccaaacuucucugga

SEQ ID NO: 69480 - RNA, 18 nt, Human
aagcuaacaaccccauug

SEQ ID NO: 69481 - RNA, 21 nt, Human
acgcucauuguuaccagcaca

SEQ ID NO: 69482 - RNA, 19 nt, Human
agcaaagaaaccaaacuuc

SEQ ID NO: 69483 - RNA, 23 nt, Human
auuacaauugaauacuguacauu

SEQ ID NO: 69484 - RNA, 19 nt, Human
cacacucagaaaauaacug

SEQ ID NO: 69485 - RNA, 18 nt, Human
cacagaaagaaacaaacu

SEQ ID NO: 69486 - RNA, 23 nt, Human
cagaaagaaacaaacugaucucu

SEQ ID NO: 69487 - RNA, 25 nt, Human
cagcaaagaaaccaaacuucucugg

SEQ ID NO: 69488 - RNA, 21 nt, Human
caucugucuacugcuucugau

SEQ ID NO: 69489 - RNA, 21 nt, Human
caugcacgcaaccgaacaccc

SEQ ID NO: 69490 - RNA, 19 nt, Human
cauuuuauuaagauaaaug

SEQ ID NO: 69491 - RNA, 18 nt, Human
ccagcacagaaagaaaca

SEQ ID NO: 69492 - RNA, 22 nt, Human
ccuacauuuuaaccauucaaca

SEQ ID NO: 69493 - RNA, 30 nt, Human
cgcaaccgaacacccuuacauuucugcaag

SEQ ID NO: 69494 - RNA, 23 nt, Human
cugaaaaugaacuggaggccuac

SEQ ID NO: 69495 - RNA, 21 nt, Human
cuugcagcaaagaaaccaaac

SEQ ID NO: 69496 - RNA, 20 nt, Human
gcaaaaugguuuaggaagcg

SEQ ID NO: 69497 - RNA, 27 nt, Human
gcagcaaagaaaccaaacuucucugga

SEQ ID NO: 69498 - RNA, 19 nt, Human
guuacagagccucauuccu

SEQ ID NO: 69499 - RNA, 20 nt, Human
guuacagagccucauuccuu

SEQ ID NO: 69500 - RNA, 22 nt, Human
guuccaaugucacuggagaggg

SEQ ID NO: 69501 - RNA, 20 nt, Human
uaacaaccccauugguaaua

SEQ ID NO: 69502 - RNA, 18 nt, Human
uaacacaaagugaguugg

SEQ ID NO: 69503 - RNA, 19 nt, Human
uaagauaaaugcaucacaa

SEQ ID NO: 69504 - RNA, 19 nt, Human
ucacaauauuuguauugca

SEQ ID NO: 69505 - RNA, 23 nt, Human
ucacuggagagggaucuggcuac

SEQ ID NO: 69506 - RNA, 21 nt, Human
ucagaaaauaacugaaaauga

SEQ ID NO: 69507 - RNA, 24 nt, Human
ucugcaaaaugguuuaggaagcgg

SEQ ID NO: 69508 - RNA, 23 nt, Human
ucuggagaggcuuucugauuaag

SEQ ID NO: 69509 - RNA, 21 nt, Human
ugaaaaugaacuggaggccua

SEQ ID NO: 69510 - RNA, 21 nt, Human
ugcacacucagaaaauaacug

SEQ ID NO: 69511 - RNA, 22 nt, Human
ugcacacucagaaaauaacuga

SEQ ID NO: 69512 - RNA, 22 nt, Human
ugcacaggguugguagaugugu

SEQ ID NO: 69513 - RNA, 20 nt, Human
ugcgcagugauaaauugaca

SEQ ID NO: 69514 - RNA, 26 nt, Human
uguguugcuaaaaacgcacaugcacg

SEQ ID NO: 69515 - RNA, 20 nt, Human
uuaaaagcuaacaaccccau

SEQ ID NO: 69516 - RNA, 18 nt, Human
aagcccaccaggcucaga

SEQ ID NO: 69517 - RNA, 19 nt, Human
aaucucugcaggcaccaga

SEQ ID NO: 69518 - RNA, 21 nt, Human
accagacucccugccuccccc

SEQ ID NO: 69519 - RNA, 23 nt, Human
acccggugggcaagugggcgagu

SEQ ID NO: 69520 - RNA, 19 nt, Human
agaaggaaguggggacaga

SEQ ID NO: 69521 - RNA, 22 nt, Human
agaccucccaggccaggacccu

SEQ ID NO: 69522 - RNA, 24 nt, Human
agagaccccaggacggggcccggg

SEQ ID NO: 69523 - RNA, 20 nt, Human
agagggaggaggggugaggc

SEQ ID NO: 69524 - RNA, 18 nt, Human
agaguccaggagacagga

SEQ ID NO: 69525 - RNA, 23 nt, Human
agcagggaacuucccaggagagu

SEQ ID NO: 69526 - RNA, 18 nt, Human
agcugcagagcagggaac

SEQ ID NO: 69527 - RNA, 23 nt, Human
aggccagaaggaaguggggacag

SEQ ID NO: 69528 - RNA, 20 nt, Human
aggcguaggggagggggccg

SEQ ID NO: 69529 - RNA, 19 nt, Human
aggcucagaggcccccagc

SEQ ID NO: 69530 - RNA, 20 nt, Human
agggagggagggagagcggg

SEQ ID NO: 69531 - RNA, 21 nt, Human
agggagggagggagagcgggu

SEQ ID NO: 69532 - RNA, 18 nt, Human
aggggccaagacauaggg

SEQ ID NO: 69533 - RNA, 22 nt, Human
aggucagagccgguaagaagga

SEQ ID NO: 69534 - RNA, 21 nt, Human
aguccaggaggcgcgcggggc

SEQ ID NO: 69535 - RNA, 18 nt, Human
augcugccagcuccggcu

SEQ ID NO: 69536 - RNA, 19 nt, Human
caaguuggaccucugcgug

SEQ ID NO: 69537 - RNA, 19 nt, Human
caccaggcucagaggcccc

SEQ ID NO: 69538 - RNA, 18 nt, Human
caccggagacuccacccu

SEQ ID NO: 69539 - RNA, 19 nt, Human
cagagaaucucugcaggca

SEQ ID NO: 69540 - RNA, 21 nt, Human
cagagccgguaagaaggaccc

SEQ ID NO: 69541 - RNA, 20 nt, Human
caggaaccugaggaugucgg

SEQ ID NO: 69542 - RNA, 26 nt, Human
caggacggggcccggggauggccauu

SEQ ID NO: 69543 - RNA, 22 nt, Human
cagguuucugcuaccccucgcu

SEQ ID NO: 69544 - RNA, 30 nt, Human
ccaccaggcucagaggcccccagcugugcu

SEQ ID NO: 69545 - RNA, 21 nt, Human
ccaggccagaaggaagugggg

SEQ ID NO: 69546 - RNA, 20 nt, Human
ccaucagaggccaucuuccu

SEQ ID NO: 69547 - RNA, 23 nt, Human
cccaccaggcucagaggccccca

SEQ ID NO: 69548 - RNA, 23 nt, Human
ccccaggaaagaagcagagaauc

SEQ ID NO: 69549 - RNA, 21 nt, Human
cccccagggcugacccagucc

SEQ ID NO: 69550 - RNA, 24 nt, Human
cccccagggcugacccagucccag

SEQ ID NO: 69551 - RNA, 23 nt, Human
cccccagucacacaaccuuuauu

SEQ ID NO: 69552 - RNA, 18 nt, Human
ccggggauggccauucug

SEQ ID NO: 69553 - RNA, 21 nt, Human
ccucccagccugcagcuccug

SEQ ID NO: 69554 - RNA, 24 nt, Human
ccucccagccugcagcuccugggc

SEQ ID NO: 69555 - RNA, 22 nt, Human
ccuccccaccuccccccaggaa

SEQ ID NO: 69556 - RNA, 21 nt, Human
ccugcuaagaccuccccaccu

SEQ ID NO: 69557 - RNA, 25 nt, Human
ccugcuaagaccuccccaccucccc

SEQ ID NO: 69558 - RNA, 26 nt, Human
ccugcuaagaccuccccaccuccccc

SEQ ID NO: 69559 - RNA, 21 nt, Human
ccugggccagagcugcagagc

SEQ ID NO: 69560 - RNA, 21 nt, Human
ccuuggugcagguuucugcua

SEQ ID NO: 69561 - RNA, 24 nt, Human
cucaugggugucguggggaggggg

SEQ ID NO: 69562 - RNA, 22 nt, Human
cucccaggccagaaggaagugg

SEQ ID NO: 69563 - RNA, 19 nt, Human
cuccugcuaagaccucccc

SEQ ID NO: 69564 - RNA, 19 nt, Human
cucgcuccgcccuccugcc

SEQ ID NO: 69565 - RNA, 25 nt, Human
cugacccagucccagaccaggcacg

SEQ ID NO: 69566 - RNA, 24 nt, Human
cugggcccagauggccccuucuga

SEQ ID NO: 69567 - RNA, 24 nt, Human
gaacguccagcuuccgaacaaggg

SEQ ID NO: 69568 - RNA, 19 nt, Human
gaagcagaguggaguggag

SEQ ID NO: 69569 - RNA, 23 nt, Human
gacccagucccagaccaggcacg

SEQ ID NO: 69570 - RNA, 24 nt, Human
gacuuuguggaagcagaguggagu

SEQ ID NO: 69571 - RNA, 18 nt, Human
gagagcgggugcccuugg

SEQ ID NO: 69572 - RNA, 23 nt, Human
gaugugggggacuaggaaaggga

SEQ ID NO: 69573 - RNA, 23 nt, Human
gcaaggagugaggccaagagucc

SEQ ID NO: 69574 - RNA, 18 nt, Human
gcacauauaaacagaagc

SEQ ID NO: 69575 - RNA, 19 nt, Human
gcagaguggaguggagggg

SEQ ID NO: 69576 - RNA, 23 nt, Human
gcagguuucugcuaccccucgcu

SEQ ID NO: 69577 - RNA, 24 nt, Human
gccaaaguagcaaaagcugaguua

SEQ ID NO: 69578 - RNA, 21 nt, Human
gcuaagaccuccccaccuccc

SEQ ID NO: 69579 - RNA, 22 nt, Human
gcucaggacggggaacccugag

SEQ ID NO: 69580 - RNA, 22 nt, Human
gcugaggcaguccagccaggcu

SEQ ID NO: 69581 - RNA, 27 nt, Human
ggaggaggggugaggcguaggggaggg

SEQ ID NO: 69582 - RNA, 21 nt, Human
ggaggcgaacacaugggcacc

SEQ ID NO: 69583 - RNA, 18 nt, Human
ggcaaguuggaccucugc

SEQ ID NO: 69584 - RNA, 19 nt, Human
ggcuggguagaagggcgcc

SEQ ID NO: 69585 - RNA, 18 nt, Human
ggcuucuuggcugccccc

SEQ ID NO: 69586 - RNA, 19 nt, Human
gggacagagaccccaggac

SEQ ID NO: 69587 - RNA, 24 nt, Human
gggccagagcugcagagcagggaa

SEQ ID NO: 69588 - RNA, 24 nt, Human
ggggagggggcaaggagugaggcc

SEQ ID NO: 69589 - RNA, 23 nt, Human
gggggugggggggccccggaucu

SEQ ID NO: 69590 - RNA, 20 nt, Human
gggugggggggccccggauc

SEQ ID NO: 69591 - RNA, 19 nt, Human
gguggcaaggguggggggc

SEQ ID NO: 69592 - RNA, 18 nt, Human
guagaagggcgccacggu

SEQ ID NO: 69593 - RNA, 19 nt, Human
guccaggaggcgcgcgggg

SEQ ID NO: 69594 - RNA, 21 nt, Human
gugagagggaggaggggugag

SEQ ID NO: 69595 - RNA, 21 nt, Human
gugguggcaaggguggggggc

SEQ ID NO: 69596 - RNA, 18 nt, Human
uaaaaucaucagucugca

SEQ ID NO: 69597 - RNA, 21 nt, Human
uaagaccuccccaccuccccc

SEQ ID NO: 69598 - RNA, 22 nt, Human
uaagaccuccccaccucccccc

SEQ ID NO: 69599 - RNA, 22 nt, Human
uaggaaagggaugugagucuug

SEQ ID NO: 69600 - RNA, 23 nt, Human
uaggaggggccaagacauaggga

SEQ ID NO: 69601 - RNA, 23 nt, Human
ucaccaagugaacguccagcuuu

SEQ ID NO: 69602 - RNA, 21 nt, Human
ucccagccugcagcuccuggg

SEQ ID NO: 69603 - RNA, 23 nt, Human
ucccagccugcagcuccugggcc

SEQ ID NO: 69604 - RNA, 20 nt, Human
ucccugccucccccacugcg

SEQ ID NO: 69605 - RNA, 21 nt, Human
uccuccgucagugcagaggca

SEQ ID NO: 69606 - RNA, 19 nt, Human
uccugcuaagaccucccca

SEQ ID NO: 69607 - RNA, 21 nt, Human
uccugcuaagaccuccccacc

SEQ ID NO: 69608 - RNA, 19 nt, Human
uccugggccagagcugcag

SEQ ID NO: 69609 - RNA, 18 nt, Human
uccuuggugcagguuucu

SEQ ID NO: 69610 - RNA, 25 nt, Human
ucgcuccgcccuccugccggcuccu

SEQ ID NO: 69611 - RNA, 21 nt, Human
ucgugauuugggggugggggg

SEQ ID NO: 69612 - RNA, 27 nt, Human
ucucuggguaugcugccagccgacuuc

SEQ ID NO: 69613 - RNA, 28 nt, Human
ucucuggguaugcugccagccgacuuuc

SEQ ID NO: 69614 - RNA, 22 nt, Human
ucucuggguaugcugccagcuc

SEQ ID NO: 69615 - RNA, 18 nt, Human
ucugcacacgcucuagga

SEQ ID NO: 69616 - RNA, 21 nt, Human
ugacccagucccagaccaggc

SEQ ID NO: 69617 - RNA, 21 nt, Human
ugacucugaacaucucccgag

SEQ ID NO: 69618 - RNA, 22 nt, Human
ugaucccccagggcugacccag

SEQ ID NO: 69619 - RNA, 19 nt, Human
ugcacauauaaacagaagc

SEQ ID NO: 69620 - RNA, 22 nt, Human
ugcagacagcgcggcggccgca

SEQ ID NO: 69621 - RNA, 18 nt, Human
ugcccuuggggaaucagc

SEQ ID NO: 69622 - RNA, 18 nt, Human
uggaagcagaguggagug

SEQ ID NO: 69623 - RNA, 22 nt, Human
uggaagcagaguggaguggagg

SEQ ID NO: 69624 - RNA, 24 nt, Human
uggaagcagaguggaguggagggg

SEQ ID NO: 69625 - RNA, 18 nt, Human
uggcaaggguggggggcg

SEQ ID NO: 69626 - RNA, 19 nt, Human
uggcaaguuggaccucugc

SEQ ID NO: 69627 - RNA, 19 nt, Human
uggcaaguuggaccucugc

SEQ ID NO: 69628 - RNA, 19 nt, Human
ugggcuggguagaagggcg

SEQ ID NO: 69629 - RNA, 18 nt, Human
uggggagggggcaaggag

SEQ ID NO: 69630 - RNA, 23 nt, Human
uggggagggggcaaggagugagg

SEQ ID NO: 69631 - RNA, 23 nt, Human
uggggggcggaggcgaacacaug

SEQ ID NO: 69632 - RNA, 26 nt, Human
uguggaagcagaguggaguggagggg

SEQ ID NO: 69633 - RNA, 22 nt, Human
ugugguggcaaggguggggggc

SEQ ID NO: 69634 - RNA, 22 nt, Human
uguguccgucucucugacccuu

SEQ ID NO: 69635 - RNA, 21 nt, Human
uugggggugggggggccccgg

SEQ ID NO: 69636 - RNA, 27 nt, Human
uuuacauauaaaaucaucagucugcag

SEQ ID NO: 69637 - RNA, 18 nt, Human
uuugggggugggggggcc

SEQ ID NO: 69638 - RNA, 23 nt, Human
aacaggaacaaaaaaaguaucua

SEQ ID NO: 69639 - RNA, 18 nt, Human
aagcagcaucagcagcaa

SEQ ID NO: 69640 - RNA, 23 nt, Human
acccucagucuggcagaaagcuu

SEQ ID NO: 69641 - RNA, 19 nt, Human
acuccucccucucucuccc

SEQ ID NO: 69642 - RNA, 20 nt, Human
acuccucccucucucuccca

SEQ ID NO: 69643 - RNA, 21 nt, Human
agcaguauuugaaggacuaau

SEQ ID NO: 69644 - RNA, 20 nt, Human
aggacugagauaaacuaaag

SEQ ID NO: 69645 - RNA, 26 nt, Human
aucuuucuuaaaccaaacacucauug

SEQ ID NO: 69646 - RNA, 24 nt, Human
caacagcagaaauuaaacuaucaa

SEQ ID NO: 69647 - RNA, 26 nt, Human
cagaaauuaaacuaucaauucaacga

SEQ ID NO: 69648 - RNA, 19 nt, Human
cagcagcaacauuucccag

SEQ ID NO: 69649 - RNA, 21 nt, Human
caguucauuucucccaccccc

SEQ ID NO: 69650 - RNA, 27 nt, Human
cccaguuuuacuccucccucucucucc

SEQ ID NO: 69651 - RNA, 23 nt, Human
cccccaaaaagcacccucagucu

SEQ ID NO: 69652 - RNA, 18 nt, Human
cccucucucucccaucca

SEQ ID NO: 69653 - RNA, 23 nt, Human
cuaaagcucugcuaauacacugu

SEQ ID NO: 69654 - RNA, 21 nt, Human
cucccaccccccaaaaagcac

SEQ ID NO: 69655 - RNA, 20 nt, Human
cugaguuacuguuuaucugu

SEQ ID NO: 69656 - RNA, 24 nt, Human
cuggcagaaagcuuugcuuuuuuu

SEQ ID NO: 69657 - RNA, 24 nt, Human
cuugcccaguuuuacuccucccuc

SEQ ID NO: 69658 - RNA, 24 nt, Human
guuuuacuccucccucucucuccc

SEQ ID NO: 69659 - RNA, 25 nt, Human
uaaguaugaaaaucuuucuuaaacc

SEQ ID NO: 69660 - RNA, 23 nt, Human
uaauccaaauuauuaacagccaa

SEQ ID NO: 69661 - RNA, 19 nt, Human
uaucagaaggaaaauguuu

SEQ ID NO: 69662 - RNA, 24 nt, Human
uaucagaaggaaaauguuucccaa

SEQ ID NO: 69663 - RNA, 30 nt, Human
uaugaacaggaacaaaaaaaguaucuacaa

SEQ ID NO: 69664 - RNA, 24 nt, Human
ucaguucauuucucccacccccca

SEQ ID NO: 69665 - RNA, 21 nt, Human
ucauuucucccaccccccaaa

SEQ ID NO: 69666 - RNA, 22 nt, Human
ucauuucucccaccccccaaaa

SEQ ID NO: 69667 - RNA, 21 nt, Human
uccacaggucacuuacgcuga

SEQ ID NO: 69668 - RNA, 24 nt, Human
uccaggacugagauaaacuaaagc

SEQ ID NO: 69669 - RNA, 20 nt, Human
ucccaucuaugaacaggaac

SEQ ID NO: 69670 - RNA, 24 nt, Human
uccucccucucucucccauccagg

SEQ ID NO: 69671 - RNA, 24 nt, Human
ucuacaaaccuuguaaacagaucu

SEQ ID NO: 69672 - RNA, 23 nt, Human
ugaacaggaacaaaaaaaguauc

SEQ ID NO: 69673 - RNA, 25 nt, Human
ugaacaggaacaaaaaaaguaucua

SEQ ID NO: 69674 - RNA, 20 nt, Human
ugagauaaacuaaagcucug

SEQ ID NO: 69675 - RNA, 22 nt, Human
uuacuccucccucucucuccca

SEQ ID NO: 69676 - RNA, 22 nt, Human
uucccaaaagaauuuaauuuuc

SEQ ID NO: 69677 - RNA, 27 nt, Human
uuuuacuccucccucucucucccaucc

SEQ ID NO: 69678 - RNA, 21 nt, Human
aaaaaccccuccccaaccccc

SEQ ID NO: 69679 - RNA, 25 nt, Human
aaaacaaacaaacaaacaaaaaccc

SEQ ID NO: 69680 - RNA, 21 nt, Human
aaacaaacaaaaaccccuccc

SEQ ID NO: 69681 - RNA, 27 nt, Human
aaacaaacaaacaaaaaccccucccca

SEQ ID NO: 69682 - RNA, 26 nt, Human
aaacaaacaaacaaacaaaaaccccu

SEQ ID NO: 69683 - RNA, 18 nt, Human
aaaccccuccccaacccc

SEQ ID NO: 69684 - RNA, 19 nt, Human
aaaccccuccccaaccccc

SEQ ID NO: 69685 - RNA, 18 nt, Human
aaaccugcgccggcuccg

SEQ ID NO: 69686 - RNA, 19 nt, Human
aaccccuccccaaccccca

SEQ ID NO: 69687 - RNA, 21 nt, Human
aaccccuccccaacccccaaa

SEQ ID NO: 69688 - RNA, 20 nt, Human
acaaacaaacaaacaaaaac

SEQ ID NO: 69689 - RNA, 22 nt, Human
acaaagaaauggauauaaccuu

SEQ ID NO: 69690 - RNA, 22 nt, Human
acaaggcaacaugccggcaaag

SEQ ID NO: 69691 - RNA, 23 nt, Human
accccuccccaacccccaaaaac

SEQ ID NO: 69692 - RNA, 23 nt, Human
acucccguaagcccccaguggag

SEQ ID NO: 69693 - RNA, 19 nt, Human
aggcgggcuggugacagug

SEQ ID NO: 69694 - RNA, 21 nt, Human
aggugucagggucuggaaacu

SEQ ID NO: 69695 - RNA, 19 nt, Human
agugguggugagcuccaag

SEQ ID NO: 69696 - RNA, 22 nt, Human
caaaaaccccuccccaaccccc

SEQ ID NO: 69697 - RNA, 19 nt, Human
caaacaaaaaccccucccc

SEQ ID NO: 69698 - RNA, 25 nt, Human
caaacaaaaaccccuccccaacccc

SEQ ID NO: 69699 - RNA, 27 nt, Human
caaacaaaaaccccuccccaaccccca

SEQ ID NO: 69700 - RNA, 22 nt, Human
caaacaaacaaaaaccccuccc

SEQ ID NO: 69701 - RNA, 30 nt, Human
caaacaaacaaacaaaaaccccuccccaag

SEQ ID NO: 69702 - RNA, 24 nt, Human
caaacaaggggaggauugaaagug

SEQ ID NO: 69703 - RNA, 24 nt, Human
caacugagaccaugcugugcaagc

SEQ ID NO: 69704 - RNA, 21 nt, Human
cacaguccacgcucuaaguac

SEQ ID NO: 69705 - RNA, 22 nt, Human
caccaggcggccgacuccgggu

SEQ ID NO: 69706 - RNA, 19 nt, Human
cagaccaguggauuggaua

SEQ ID NO: 69707 - RNA, 19 nt, Human
caugagggcgggcgggcag

SEQ ID NO: 69708 - RNA, 22 nt, Human
ccacgcucuaaguacagggaaa

SEQ ID NO: 69709 - RNA, 19 nt, Human
cccaugcugcucccuggaa

SEQ ID NO: 69710 - RNA, 21 nt, Human
ccccaacccccaaaaaccaaa

SEQ ID NO: 69711 - RNA, 23 nt, Human
cccccaaaaaccaaacaagggga

SEQ ID NO: 69712 - RNA, 21 nt, Human
ccccgcugcggcugcggcucc

SEQ ID NO: 69713 - RNA, 22 nt, Human
cccggcccggccccgcugcggc

SEQ ID NO: 69714 - RNA, 20 nt, Human
cccggcccggcccggccccc

SEQ ID NO: 69715 - RNA, 18 nt, Human
cccguaagcccccagugg

SEQ ID NO: 69716 - RNA, 18 nt, Human
ccgaggcgggcuggugac

SEQ ID NO: 69717 - RNA, 22 nt, Human
ccgccgccgcugccgcugccgc

SEQ ID NO: 69718 - RNA, 24 nt, Human
ccgccgcugccgcugccgcugccg

SEQ ID NO: 69719 - RNA, 18 nt, Human
ccgcucacucccguaagc

SEQ ID NO: 69720 - RNA, 21 nt, Human
ccgcugccgcugccgcugccg

SEQ ID NO: 69721 - RNA, 24 nt, Human
ccgcugccgcugccgcugccgcug

SEQ ID NO: 69722 - RNA, 21 nt, Human
ccgcugccgcugccgcuggug

SEQ ID NO: 69723 - RNA, 18 nt, Human
ccgcugccgcuggugcgc

SEQ ID NO: 69724 - RNA, 23 nt, Human
ccguaagcccccaguggagaucc

SEQ ID NO: 69725 - RNA, 18 nt, Human
ccuugaagugaaaaagag

SEQ ID NO: 69726 - RNA, 22 nt, Human
cgagagcgagaugcugccgccg

SEQ ID NO: 69727 - RNA, 19 nt, Human
cgagaugcugccgccgccg

SEQ ID NO: 69728 - RNA, 18 nt, Human
cgccccuugccuugaagu

SEQ ID NO: 69729 - RNA, 19 nt, Human
cgccggcuccgagagcgag

SEQ ID NO: 69730 - RNA, 23 nt, Human
cgccuaagaaaacaaacaaacaa

SEQ ID NO: 69731 - RNA, 24 nt, Human
cgccuaagaaaacaaacaaacaaa

SEQ ID NO: 69732 - RNA, 25 nt, Human
cgccuaagaaaacaaacaaacaaac

SEQ ID NO: 69733 - RNA, 22 nt, Human
cgcgcccggcccggcccggccc

SEQ ID NO: 69734 - RNA, 19 nt, Human
cggcccggccccgcugcgg

SEQ ID NO: 69735 - RNA, 18 nt, Human
cgggcuggugacaguggu

SEQ ID NO: 69736 - RNA, 24 nt, Human
cgggggacguggugacugggcggg

SEQ ID NO: 69737 - RNA, 23 nt, Human
cuaaguacagggaaaccugcgcc

SEQ ID NO: 69738 - RNA, 22 nt, Human
cuccccaacccccaaaaaccaa

SEQ ID NO: 69739 - RNA, 24 nt, Human
cucccguaagcccccaguggagau

SEQ ID NO: 69740 - RNA, 23 nt, Human
cucugcaauuucaaaaaguuauu

SEQ ID NO: 69741 - RNA, 19 nt, Human
cugccgcugccgcugccgc

SEQ ID NO: 69742 - RNA, 22 nt, Human
cugccgcugccgcugccgcugg

SEQ ID NO: 69743 - RNA, 23 nt, Human
cugggcccaagggucagcgcugg

SEQ ID NO: 69744 - RNA, 21 nt, Human
gccaggaagggcuuguuuugg

SEQ ID NO: 69745 - RNA, 22 nt, Human
gccgccgccgcugccgcugccg

SEQ ID NO: 69746 - RNA, 24 nt, Human
gccuaagaaaacaaacaaacaaac

SEQ ID NO: 69747 - RNA, 23 nt, Human
gcggccgacuccgggucccgggg

SEQ ID NO: 69748 - RNA, 20 nt, Human
gcucgggcugggcccaaggg

SEQ ID NO: 69749 - RNA, 20 nt, Human
gcugccgccgccgcugccgc

SEQ ID NO: 69750 - RNA, 18 nt, Human
gcugccgggugauggcug

SEQ ID NO: 69751 - RNA, 21 nt, Human
ggaaaaccgcucacucccgua

SEQ ID NO: 69752 - RNA, 19 nt, Human
ggcccaugucuugcuggcu

SEQ ID NO: 69753 - RNA, 22 nt, Human
ggcugccgggugauggcugcuc

SEQ ID NO: 69754 - RNA, 18 nt, Human
ggcugcggcuccucugcc

SEQ ID NO: 69755 - RNA, 19 nt, Human
ggggguggggguggccgag

SEQ ID NO: 69756 - RNA, 19 nt, Human
gggguggggguggccgagg

SEQ ID NO: 69757 - RNA, 21 nt, Human
ggucuguggguggaaacguug

SEQ ID NO: 69758 - RNA, 18 nt, Human
ggugacagugguggugag

SEQ ID NO: 69759 - RNA, 19 nt, Human
ggugauggcugcuuguggc

SEQ ID NO: 69760 - RNA, 20 nt, Human
ggugugggacgagguccagg

SEQ ID NO: 69761 - RNA, 18 nt, Human
guucuucgguuccauugg

SEQ ID NO: 69762 - RNA, 21 nt, Human
uaaaauagagcaauuuaagcg

SEQ ID NO: 69763 - RNA, 24 nt, Human
uaaauuaaucuauacaacugagac

SEQ ID NO: 69764 - RNA, 23 nt, Human
uaagaaaacaaacaaacaaacaa

SEQ ID NO: 69765 - RNA, 27 nt, Human
uaagaaaacaaacaaacaaacaaaaac

SEQ ID NO: 69766 - RNA, 24 nt, Human
uaagcccccaguggagaucccgcc

SEQ ID NO: 69767 - RNA, 26 nt, Human
uaagcccccaguggagaucccgcccc

SEQ ID NO: 69768 - RNA, 26 nt, Human
uaccuaucuauauggacguauacagu

SEQ ID NO: 69769 - RNA, 18 nt, Human
uauauauauauauauaua

SEQ ID NO: 69770 - RNA, 20 nt, Human
uauauauuuauauauauaua

SEQ ID NO: 69771 - RNA, 22 nt, Human
uauauuuauauauauauauaua

SEQ ID NO: 69772 - RNA, 21 nt, Human
ucacuggucagcuguggcacc

SEQ ID NO: 69773 - RNA, 21 nt, Human
ucagcuguggcaccaggcggc

SEQ ID NO: 69774 - RNA, 19 nt, Human
uccucugccgcggcugccc

SEQ ID NO: 69775 - RNA, 22 nt, Human
ucugggugggagccaggaaggg

SEQ ID NO: 69776 - RNA, 19 nt, Human
ugaaaaagaguucaaacag

SEQ ID NO: 69777 - RNA, 23 nt, Human
ugaaaaagaguucaaacagcauc

SEQ ID NO: 69778 - RNA, 18 nt, Human
ugacagcgggguccauga

SEQ ID NO: 69779 - RNA, 19 nt, Human
ugacagugguggugagcuc

SEQ ID NO: 69780 - RNA, 18 nt, Human
ugagugucuaugaaguuc

SEQ ID NO: 69781 - RNA, 20 nt, Human
ugagugucuaugaaguucuu

SEQ ID NO: 69782 - RNA, 25 nt, Human
ugcauggcugguccaugucugggug

SEQ ID NO: 69783 - RNA, 18 nt, Human
ugcccggaaagcggguga

SEQ ID NO: 69784 - RNA, 20 nt, Human
uggaaacguugguuuucucu

SEQ ID NO: 69785 - RNA, 18 nt, Human
uggaaacuggggcccaug

SEQ ID NO: 69786 - RNA, 19 nt, Human
uggacaagaggcugccggg

SEQ ID NO: 69787 - RNA, 22 nt, Human
uggcugcuuguggcuguccuca

SEQ ID NO: 69788 - RNA, 23 nt, Human
uggcuguccucagcacacccuca

SEQ ID NO: 69789 - RNA, 18 nt, Human
ugggagccaggaagggcu

SEQ ID NO: 69790 - RNA, 21 nt, Human
ugggagccaggaagggcuugu

SEQ ID NO: 69791 - RNA, 19 nt, Human
ugggugccuggauggaugg

SEQ ID NO: 69792 - RNA, 21 nt, Human
uggguggaaacguugguuuuc

SEQ ID NO: 69793 - RNA, 24 nt, Human
uggucaggggugguggcuccccuc

SEQ ID NO: 69794 - RNA, 30 nt, Human
uguauauauauuuauauauauauauauauu

SEQ ID NO: 69795 - RNA, 19 nt, Human
uuuauauauauauauauau

SEQ ID NO: 69796 - RNA, 20 nt, Human
uuuauauauauauauauauu

SEQ ID NO: 69797 - RNA, 22 nt, Human
acgaagaaccuucuccuccccc

SEQ ID NO: 69798 - RNA, 25 nt, Human
acgcuguggagcgggcucccgggac

SEQ ID NO: 69799 - RNA, 27 nt, Human
acgcuguggagcgggcucccgggacca

SEQ ID NO: 69800 - RNA, 23 nt, Human
agaaagcugcuaagcguggacac

SEQ ID NO: 69801 - RNA, 20 nt, Human
aggcaagguuuggcggcggu

SEQ ID NO: 69802 - RNA, 18 nt, Human
auggcguuguuguucugg

SEQ ID NO: 69803 - RNA, 20 nt, Human
auucugguuucuccaggccu

SEQ ID NO: 69804 - RNA, 21 nt, Human
cacaagugcaaucuuggcuca

SEQ ID NO: 69805 - RNA, 22 nt, Human
cacgcuguggagcgggcucccg

SEQ ID NO: 69806 - RNA, 18 nt, Human
cagcuagggacaggcggc

SEQ ID NO: 69807 - RNA, 18 nt, Human
cagugcccaggcaagguu

SEQ ID NO: 69808 - RNA, 21 nt, Human
cauaugugugugugcgugcau

SEQ ID NO: 69809 - RNA, 23 nt, Human
ccgggacuggaggaaaacacuga

SEQ ID NO: 69810 - RNA, 18 nt, Human
ccgugucgucaaugagcg

SEQ ID NO: 69811 - RNA, 18 nt, Human
ccuccucuuccuccuuuu

SEQ ID NO: 69812 - RNA, 19 nt, Human
ccuccucuuccuccuuuuc

SEQ ID NO: 69813 - RNA, 23 nt, Human
ccuccuuuuccuccucccugucc

SEQ ID NO: 69814 - RNA, 23 nt, Human
ccuuguugaauggauuugggucc

SEQ ID NO: 69815 - RNA, 19 nt, Human
cuccucccccuuuuugucc

SEQ ID NO: 69816 - RNA, 19 nt, Human
cucguucucguccacgucc

SEQ ID NO: 69817 - RNA, 23 nt, Human
cuucuccucccccuuuuuguccu

SEQ ID NO: 69818 - RNA, 23 nt, Human
gacuuggugacaugcguggucag

SEQ ID NO: 69819 - RNA, 19 nt, Human
gcagguccccauaugugug

SEQ ID NO: 69820 - RNA, 24 nt, Human
gcccugccagaaaggucuucagcc

SEQ ID NO: 69821 - RNA, 20 nt, Human
gcguuguuguucugguuggg

SEQ ID NO: 69822 - RNA, 23 nt, Human
ggaaaacacugaagagguagcug

SEQ ID NO: 69823 - RNA, 25 nt, Human
ggacaggcggccacccacgguccca

SEQ ID NO: 69824 - RNA, 24 nt, Human
ggauguuguggguguagucauuga

SEQ ID NO: 69825 - RNA, 22 nt, Human
ggccaugaaguugugaauggag

SEQ ID NO: 69826 - RNA, 18 nt, Human
ggggacgggggcgggggg

SEQ ID NO: 69827 - RNA, 23 nt, Human
ggggggcccggaggcgcuccucg

SEQ ID NO: 69828 - RNA, 23 nt, Human
gguuuggcggcggugagaaagcu

SEQ ID NO: 69829 - RNA, 20 nt, Human
gucuuggauucugguuucuc

SEQ ID NO: 69830 - RNA, 19 nt, Human
gugcgcagguccccauaug

SEQ ID NO: 69831 - RNA, 19 nt, Human
uaugugugugugcgugcau

SEQ ID NO: 69832 - RNA, 23 nt, Human
uaugugugugugcgugcaugugu

SEQ ID NO: 69833 - RNA, 22 nt, Human
ucagccaccuuaguuguucccu

SEQ ID NO: 69834 - RNA, 21 nt, Human
uccuccucuuccuccuuuucc

SEQ ID NO: 69835 - RNA, 24 nt, Human
uccuccuuuuccuccucccugucc

SEQ ID NO: 69836 - RNA, 21 nt, Human
uccucguucucguccacgucc

SEQ ID NO: 69837 - RNA, 23 nt, Human
ucucacaagugcaaucuuggcuc

SEQ ID NO: 69838 - RNA, 19 nt, Human
ugcccaggcaagguuuggc

SEQ ID NO: 69839 - RNA, 20 nt, Human
ugcccaggcaagguuuggcg

SEQ ID NO: 69840 - RNA, 19 nt, Human
ugcgugcaugugugcgugu

SEQ ID NO: 69841 - RNA, 21 nt, Human
ugcgugugacuucgugugagu

SEQ ID NO: 69842 - RNA, 22 nt, Human
uggauuuggguccuugcaaaug

SEQ ID NO: 69843 - RNA, 21 nt, Human
uguccucgucuuccucagucc

SEQ ID NO: 69844 - RNA, 18 nt, Human
ugugcgugugcgcaugug

SEQ ID NO: 69845 - RNA, 19 nt, Human
ugugugcgugcaugugugc

SEQ ID NO: 69846 - RNA, 20 nt, Human
ugugugcgugcaugugugcg

SEQ ID NO: 69847 - RNA, 24 nt, Human
ugugugcgugcaugugugcgugug

SEQ ID NO: 69848 - RNA, 24 nt, Human
ugugugugcgugcaugugugcgug

SEQ ID NO: 69849 - RNA, 20 nt, Human
ugugugugugcgugcaugug

SEQ ID NO: 69850 - RNA, 23 nt, Human
ugugugugugcgugcaugugugc

SEQ ID NO: 69851 - RNA, 22 nt, Human
aaagaaaaagggugcaggagag

SEQ ID NO: 69852 - RNA, 18 nt, Human
aaagucccaucaucaccu

SEQ ID NO: 69853 - RNA, 18 nt, Human
aacuuagcuuauaaaugg

SEQ ID NO: 69854 - RNA, 20 nt, Human
aaggccggggagugggcugg

SEQ ID NO: 69855 - RNA, 24 nt, Human
aaugaaagggcagaaagaguuaga

SEQ ID NO: 69856 - RNA, 24 nt, Human
accaaggaguagauucuaccauga

SEQ ID NO: 69857 - RNA, 18 nt, Human
accgcaacauauuucacu

SEQ ID NO: 69858 - RNA, 20 nt, Human
acgaaguucgugcccccccu

SEQ ID NO: 69859 - RNA, 20 nt, Human
acucucccuccggguuucca

SEQ ID NO: 69860 - RNA, 20 nt, Human
agaaagaguuagaggccuac

SEQ ID NO: 69861 - RNA, 23 nt, Human
agaaagaguuagaggccuacagg

SEQ ID NO: 69862 - RNA, 20 nt, Human
agacgaaaauggaaauaggu

SEQ ID NO: 69863 - RNA, 22 nt, Human
aggaggaggaagaggagagcuu

SEQ ID NO: 69864 - RNA, 25 nt, Human
aguagauucuaccaugaccugaaug

SEQ ID NO: 69865 - RNA, 22 nt, Human
aguuguccaggguagguagguu

SEQ ID NO: 69866 - RNA, 18 nt, Human
aucggggagaaugugggg

SEQ ID NO: 69867 - RNA, 22 nt, Human
caaaccccaagucaagcuuaag

SEQ ID NO: 69868 - RNA, 25 nt, Human
cacagcagcugacgugacaaugaaa

SEQ ID NO: 69869 - RNA, 23 nt, Human
ccccacgaaguucgugccccccc

SEQ ID NO: 69870 - RNA, 19 nt, Human
cccccccucccagccccca

SEQ ID NO: 69871 - RNA, 28 nt, Human
cccccccucccagcccccagcuuuggac

SEQ ID NO: 69872 - RNA, 22 nt, Human
cccccugccccuccaaugggaa

SEQ ID NO: 69873 - RNA, 24 nt, Human
ccucccagcccccagcuuuggacg

SEQ ID NO: 69874 - RNA, 23 nt, Human
ccucugaacccucaacuuagcuu

SEQ ID NO: 69875 - RNA, 23 nt, Human
ccucuucauggucagguagaggu

SEQ ID NO: 69876 - RNA, 21 nt, Human
ccugccucccugucucaacuu

SEQ ID NO: 69877 - RNA, 22 nt, Human
cgggugucucugaucuugcucu

SEQ ID NO: 69878 - RNA, 20 nt, Human
cucucucuuucuagcaaaga

SEQ ID NO: 69879 - RNA, 23 nt, Human
cuggcuuugcucucuugccuuuc

SEQ ID NO: 69880 - RNA, 25 nt, Human
cuucauggucagguagagguucacu

SEQ ID NO: 69881 - RNA, 18 nt, Human
cuucuugcuucucugggg

SEQ ID NO: 69882 - RNA, 18 nt, Human
cuuucuagcaaagauccg

SEQ ID NO: 69883 - RNA, 25 nt, Human
gagguucacuucacacacacugcug

SEQ ID NO: 69884 - RNA, 19 nt, Human
gcagaaagaguuagaggcc

SEQ ID NO: 69885 - RNA, 23 nt, Human
gcagaaagaguuagaggccuaca

SEQ ID NO: 69886 - RNA, 20 nt, Human
gcagagcuuucuuaagaaaa

SEQ ID NO: 69887 - RNA, 19 nt, Human
gcaggagagcugggcgggu

SEQ ID NO: 69888 - RNA, 20 nt, Human
gcccagaugaagguguaaac

SEQ ID NO: 69889 - RNA, 21 nt, Human
gcccccagcuuuggacgaucu

SEQ ID NO: 69890 - RNA, 19 nt, Human
gcuacaaaccccaagucaa

SEQ ID NO: 69891 - RNA, 21 nt, Human
ggaagaggagagcuuccugga

SEQ ID NO: 69892 - RNA, 20 nt, Human
ggauuuuauacauuccaucu

SEQ ID NO: 69893 - RNA, 24 nt, Human
ggggaacugaguggaagguggacu

SEQ ID NO: 69894 - RNA, 20 nt, Human
ggugaccacccaccagucuc

SEQ ID NO: 69895 - RNA, 20 nt, Human
guaggacaaaauccagaauu

SEQ ID NO: 69896 - RNA, 24 nt, Human
guaggguggggugaccacccaccu

SEQ ID NO: 69897 - RNA, 26 nt, Human
gucaggaggaggaagaggagagcuuc

SEQ ID NO: 69898 - RNA, 21 nt, Human
gugaccacccaccagucuccc

SEQ ID NO: 69899 - RNA, 24 nt, Human
guggaagguggacuccgugucacg

SEQ ID NO: 69900 - RNA, 22 nt, Human
uaagaaaaugcuugucauggca

SEQ ID NO: 69901 - RNA, 22 nt, Human
uagauugaauauaucuugugca

SEQ ID NO: 69902 - RNA, 20 nt, Human
uaggacaaaauccagaauuc

SEQ ID NO: 69903 - RNA, 20 nt, Human
uagguuccuagcuuagacca

SEQ ID NO: 69904 - RNA, 26 nt, Human
ucaccucauagaugggauagacgaaa

SEQ ID NO: 69905 - RNA, 19 nt, Human
uccagguuucuucaggcgg

SEQ ID NO: 69906 - RNA, 18 nt, Human
ucucugaucuugcucucu

SEQ ID NO: 69907 - RNA, 20 nt, Human
ugacaaugaaaagucccauc

SEQ ID NO: 69908 - RNA, 18 nt, Human
ugaccacccaccagucuc

SEQ ID NO: 69909 - RNA, 18 nt, Human
ugaguggaagguggacuc

SEQ ID NO: 69910 - RNA, 24 nt, Human
ugcauguuaccauggcagcaaccu

SEQ ID NO: 69911 - RNA, 21 nt, Human
ugcccagaugaagguguaaac

SEQ ID NO: 69912 - RNA, 18 nt, Human
uggcaacagcucuagcua

SEQ ID NO: 69913 - RNA, 20 nt, Human
uggcagcaaccuuagcaacu

SEQ ID NO: 69914 - RNA, 21 nt, Human
ugggcgggugucucugauccu

SEQ ID NO: 69915 - RNA, 20 nt, Human
ugggguuugacugggucccg

SEQ ID NO: 69916 - RNA, 21 nt, Human
ugggucuccucccccugcccc

SEQ ID NO: 69917 - RNA, 24 nt, Human
ugggucuccucccccugccccucc

SEQ ID NO: 69918 - RNA, 23 nt, Human
uuagcaacaaccagcaacuguag

SEQ ID NO: 69919 - RNA, 23 nt, Human
uuagcuuauaaauggcacagacu

SEQ ID NO: 69920 - RNA, 26 nt, Human
aaaaaacuugauacaaaaaugauagc

SEQ ID NO: 69921 - RNA, 21 nt, Human
aaagaaagaaaagaacaguga

SEQ ID NO: 69922 - RNA, 25 nt, Human
aagaaaaaggaaauacaguagcuga

SEQ ID NO: 69923 - RNA, 25 nt, Human
aagaaagaaaagaacagugaucuga

SEQ ID NO: 69924 - RNA, 25 nt, Human
aagccaauuuaaaucaaggaauaug

SEQ ID NO: 69925 - RNA, 18 nt, Human
aagcccccggaaucccag

SEQ ID NO: 69926 - RNA, 22 nt, Human
aaggaaauacaguagcugaaau

SEQ ID NO: 69927 - RNA, 23 nt, Human
acaaaaagaaagaaaagaacagu

SEQ ID NO: 69928 - RNA, 19 nt, Human
acaaggaagagaagccccc

SEQ ID NO: 69929 - RNA, 18 nt, Human
acaguagcugaaauaugg

SEQ ID NO: 69930 - RNA, 19 nt, Human
agcaucugcaagagaaacc

SEQ ID NO: 69931 - RNA, 24 nt, Human
auaaaguuucacucaaucacaaaa

SEQ ID NO: 69932 - RNA, 23 nt, Human
auacaaaaaugauagcacauggu

SEQ ID NO: 69933 - RNA, 20 nt, Human
caaaaagaaagaaaagaaca

SEQ ID NO: 69934 - RNA, 22 nt, Human
caaaagccaauuuaaaucaagg

SEQ ID NO: 69935 - RNA, 24 nt, Human
caagagaaaccaggagaagcggcg

SEQ ID NO: 69936 - RNA, 23 nt, Human
cacaaaaagaaagaaaagaacag

SEQ ID NO: 69937 - RNA, 19 nt, Human
cacccccgcucccggccac

SEQ ID NO: 69938 - RNA, 28 nt, Human
cacgcgucccacggcugcucccaccacc

SEQ ID NO: 69939 - RNA, 18 nt, Human
caguagcugaaauauggc

SEQ ID NO: 69940 - RNA, 19 nt, Human
caguagcugaaauauggca

SEQ ID NO: 69941 - RNA, 20 nt, Human
caguagcugaaauauggcac

SEQ ID NO: 69942 - RNA, 21 nt, Human
caguagcugaaauauggcacu

SEQ ID NO: 69943 - RNA, 23 nt, Human
cccacggcugcucccaccacccc

SEQ ID NO: 69944 - RNA, 19 nt, Human
cccccggaaucccaggcug

SEQ ID NO: 69945 - RNA, 23 nt, Human
cccccggaaucccaggcugucac

SEQ ID NO: 69946 - RNA, 24 nt, Human
ccccggaaucccaggcugucaccc

SEQ ID NO: 69947 - RNA, 18 nt, Human
ccggccacgcgucccacg

SEQ ID NO: 69948 - RNA, 22 nt, Human
cggaaucccaggcugucacccc

SEQ ID NO: 69949 - RNA, 21 nt, Human
cuaaaccaaauagaaugccuu

SEQ ID NO: 69950 - RNA, 21 nt, Human
cuaaaugauccucagacugca

SEQ ID NO: 69951 - RNA, 24 nt, Human
gaaaaaggaaauacaguagcugaa

SEQ ID NO: 69952 - RNA, 23 nt, Human
gaaucaacuucuaaaccaaauag

SEQ ID NO: 69953 - RNA, 23 nt, Human
gcugacgagaggcugaggaagga

SEQ ID NO: 69954 - RNA, 21 nt, Human
ggaaucccaggcugucacccc

SEQ ID NO: 69955 - RNA, 23 nt, Human
gucccacggcugcucccaccacc

SEQ ID NO: 69956 - RNA, 21 nt, Human
uaaaucaaggaauaugauauc

SEQ ID NO: 69957 - RNA, 21 nt, Human
uaaaucaaggaauaugauauc

SEQ ID NO: 69958 - RNA, 20 nt, Human
uaaaugauccucagacugca

SEQ ID NO: 69959 - RNA, 22 nt, Human
uaacugaccauaugcuuuauaa

SEQ ID NO: 69960 - RNA, 22 nt, Human
uaagucuuuaacauuaauguuc

SEQ ID NO: 69961 - RNA, 23 nt, Human
uaagucuuuaacauuaauguuca

SEQ ID NO: 69962 - RNA, 22 nt, Human
uaagugcagaaggugguucagg

SEQ ID NO: 69963 - RNA, 20 nt, Human
uacaagaaaaaggaaauaca

SEQ ID NO: 69964 - RNA, 22 nt, Human
uacaagaaaaaggaaauacagu

SEQ ID NO: 69965 - RNA, 22 nt, Human
uacaguagcugaaauauggcac

SEQ ID NO: 69966 - RNA, 22 nt, Human
uagugucagccacggccacacu

SEQ ID NO: 69967 - RNA, 25 nt, Human
ucaaucacaaaaagaaagaaaagaa

SEQ ID NO: 69968 - RNA, 21 nt, Human
ucacaaaaagaaagaaaagaa

SEQ ID NO: 69969 - RNA, 24 nt, Human
ucacaaaagccaauuuaaaucaag

SEQ ID NO: 69970 - RNA, 21 nt, Human
ucagccacggccacacuggga

SEQ ID NO: 69971 - RNA, 20 nt, Human
uccucagacugcaauuccua

SEQ ID NO: 69972 - RNA, 18 nt, Human
ucuaaaccaaauagaaug

SEQ ID NO: 69973 - RNA, 24 nt, Human
ugggaauagagaggagaggaggaa

SEQ ID NO: 69974 - RNA, 22 nt, Human
uguauuaguaagaaagccccac

SEQ ID NO: 69975 - RNA, 21 nt, Human
uucaaucacaaaaagaaagaa

SEQ ID NO: 69976 - RNA, 22 nt, Human
uucuaaaugauccucagacugc

SEQ ID NO: 69977 - RNA, 20 nt, Human
uugauggcuacaaagucuuu

SEQ ID NO: 69978 - RNA, 18 nt, Human
cacgugcccugcccccac

SEQ ID NO: 69979 - RNA, 19 nt, Human
cagaaacacccuccagaag

SEQ ID NO: 69980 - RNA, 18 nt, Human
cagaggacugcccaggcg

SEQ ID NO: 69981 - RNA, 21 nt, Human
cagccuggacuggaguccuaa

SEQ ID NO: 69982 - RNA, 24 nt, Human
ccaccgccaccacagguggcgggg

SEQ ID NO: 69983 - RNA, 18 nt, Human
ccagcccagaggacugcc

SEQ ID NO: 69984 - RNA, 18 nt, Human
ccagcccagaggacugcc

SEQ ID NO: 69985 - RNA, 20 nt, Human
cccaccgccaccacaggugg

SEQ ID NO: 69986 - RNA, 20 nt, Human
ccccaccgccaccacaggug

SEQ ID NO: 69987 - RNA, 24 nt, Human
cccgaggccagcccagaggacugc

SEQ ID NO: 69988 - RNA, 23 nt, Human
ccguccagccuggacuggagucc

SEQ ID NO: 69989 - RNA, 21 nt, Human
ccucaggcagccguccagccu

SEQ ID NO: 69990 - RNA, 23 nt, Human
ccugcuguggcaguugcagggau

SEQ ID NO: 69991 - RNA, 20 nt, Human
ccuggacuggaguccuaaga

SEQ ID NO: 69992 - RNA, 19 nt, Human
cguccagccuggacuggag

SEQ ID NO: 69993 - RNA, 24 nt, Human
gaaugggggaggggagugggcagg

SEQ ID NO: 69994 - RNA, 26 nt, Human
gcccaggacacaagcgugucuuuaac

SEQ ID NO: 69995 - RNA, 20 nt, Human
gcccggugccugugcuccca

SEQ ID NO: 69996 - RNA, 20 nt, Human
gcccugcccccaccugcugu

SEQ ID NO: 69997 - RNA, 23 nt, Human
gccuggacuggaguccuaagaac

SEQ ID NO: 69998 - RNA, 21 nt, Human
ggcggcuuucccgaggccagc

SEQ ID NO: 69999 - RNA, 25 nt, Human
gggcaggucccuccaaguuuggggu

SEQ ID NO: 70000 - RNA, 20 nt, Human
uaagaacagaaacacccucc

SEQ ID NO: 70001 - RNA, 21 nt, Human
uaagaacagaaacacccucca

SEQ ID NO: 70002 - RNA, 18 nt, Human
uaccaucgcccaggacac

SEQ ID NO: 70003 - RNA, 22 nt, Human
uaccaucgcccaggacacaagc

SEQ ID NO: 70004 - RNA, 21 nt, Human
ucagagccccaccgccaccac

SEQ ID NO: 70005 - RNA, 19 nt, Human
uccagagggucccacgugc

SEQ ID NO: 70006 - RNA, 19 nt, Human
ugcuguggcaguugcaggg

SEQ ID NO: 70007 - RNA, 18 nt, Human
ugggaaugggggagggga

SEQ ID NO: 70008 - RNA, 21 nt, Human
ugguggggcugggacucuugg

SEQ ID NO: 70009 - RNA, 19 nt, Human
uugggaaugggggagggga

SEQ ID NO: 70010 - RNA, 22 nt, Human
uuuuauuaccaucgcccaggac

SEQ ID NO: 70011 - RNA, 19 nt, Human
acaaauggaacuaauuuac

SEQ ID NO: 70012 - RNA, 19 nt, Human
aggaguaugagaguaaccc

SEQ ID NO: 70013 - RNA, 23 nt, Human
aguaugagaguaacccuuuuaca

SEQ ID NO: 70014 - RNA, 21 nt, Human
uagaacaaugacaaaacugaa

SEQ ID NO: 70015 - RNA, 24 nt, Human
uaugagaguaacccuuuuacaaau

SEQ ID NO: 70016 - RNA, 22 nt, Human
uccgcaggcgguacuucugcag

SEQ ID NO: 70017 - RNA, 18 nt, Human
ugaugugaauccacagga

SEQ ID NO: 70018 - RNA, 20 nt, Human
uuugcaguuacuccgcaggc

SEQ ID NO: 70019 - RNA, 19 nt, Human
aaacacagaguaaccacca

SEQ ID NO: 70020 - RNA, 21 nt, Human
aacacucauuuccaugaacuc

SEQ ID NO: 70021 - RNA, 22 nt, Human
aacaucguaaugcucacugcca

SEQ ID NO: 70022 - RNA, 21 nt, Human
aacuccagcaccaccaaaaag

SEQ ID NO: 70023 - RNA, 23 nt, Human
acaucguaaugcucacugccaac

SEQ ID NO: 70024 - RNA, 21 nt, Human
accagaauuuccugcucaaca

SEQ ID NO: 70025 - RNA, 21 nt, Human
agcuagcagaucgacaaccuu

SEQ ID NO: 70026 - RNA, 21 nt, Human
aguacagugguagcauccaaa

SEQ ID NO: 70027 - RNA, 18 nt, Human
agucccucaucaaacugg

SEQ ID NO: 70028 - RNA, 23 nt, Human
caaaaccagucuggucucccugc

SEQ ID NO: 70029 - RNA, 26 nt, Human
caacaccagcaaacacagaguaacca

SEQ ID NO: 70030 - RNA, 21 nt, Human
caauguugggauccaugauac

SEQ ID NO: 70031 - RNA, 18 nt, Human
caccagcaaacacagagu

SEQ ID NO: 70032 - RNA, 24 nt, Human
caccagcaaacacagaguaaccaa

SEQ ID NO: 70033 - RNA, 22 nt, Human
cacggguccucucaccaacacc

SEQ ID NO: 70034 - RNA, 19 nt, Human
cagaguaaccaccaugggc

SEQ ID NO: 70035 - RNA, 21 nt, Human
cagcaaacacagaguaaccac

SEQ ID NO: 70036 - RNA, 24 nt, Human
cagcucagcaauggcacgcgacag

SEQ ID NO: 70037 - RNA, 23 nt, Human
caucguaaugcucacugccaaca

SEQ ID NO: 70038 - RNA, 20 nt, Human
ccaaaaagcccaauuuugcc

SEQ ID NO: 70039 - RNA, 24 nt, Human
ccaaaaagcccaauuuugccaccc

SEQ ID NO: 70040 - RNA, 20 nt, Human
ccaaagucucaggaccaaca

SEQ ID NO: 70041 - RNA, 18 nt, Human
ccacgggcaacaucguaa

SEQ ID NO: 70042 - RNA, 24 nt, Human
ccagcaaacacagaguaaccacca

SEQ ID NO: 70043 - RNA, 19 nt, Human
cccacgggcaacaucguaa

SEQ ID NO: 70044 - RNA, 24 nt, Human
ccccggaggccggagcagcggcca

SEQ ID NO: 70045 - RNA, 18 nt, Human
cccgguggcggcgccugc

SEQ ID NO: 70046 - RNA, 22 nt, Human
ccgcaguaagagcugagcuggg

SEQ ID NO: 70047 - RNA, 26 nt, Human
ccgcaguaagagcugagcugggggca

SEQ ID NO: 70048 - RNA, 21 nt, Human
ccucucaccaacaccagcaaa

SEQ ID NO: 70049 - RNA, 23 nt, Human
ccugcaggaucuuuugcacccca

SEQ ID NO: 70050 - RNA, 25 nt, Human
cgcaaggccccggaggccggagcag

SEQ ID NO: 70051 - RNA, 24 nt, Human
cgccaaugaccgccacgaugcgcc

SEQ ID NO: 70052 - RNA, 23 nt, Human
cgccgcauagucccugacaggau

SEQ ID NO: 70053 - RNA, 19 nt, Human
cgggcacgagcaccaggug

SEQ ID NO: 70054 - RNA, 23 nt, Human
cucaacacucauuuccaugaacu

SEQ ID NO: 70055 - RNA, 21 nt, Human
cuccagcaccaccaaaaagcc

SEQ ID NO: 70056 - RNA, 22 nt, Human
cuccagcaccaccaaaaagccc

SEQ ID NO: 70057 - RNA, 24 nt, Human
cuccaugaucaguacagucuugcc

SEQ ID NO: 70058 - RNA, 24 nt, Human
cucucacccaaaugcugggccacc

SEQ ID NO: 70059 - RNA, 24 nt, Human
cugcucaacacucauuuccaugaa

SEQ ID NO: 70060 - RNA, 18 nt, Human
gaccucuuucaucaauag

SEQ ID NO: 70061 - RNA, 19 nt, Human
guaguagcaggggcagggu

SEQ ID NO: 70062 - RNA, 20 nt, Human
gugagucuccgcaaggcccc

SEQ ID NO: 70063 - RNA, 18 nt, Human
gugcaccagaauccagua

SEQ ID NO: 70064 - RNA, 18 nt, Human
guuuugaugggaccucuu

SEQ ID NO: 70065 - RNA, 21 nt, Human
uagcagaucgacaaccuugau

SEQ ID NO: 70066 - RNA, 20 nt, Human
ucagcccagucagagcuacc

SEQ ID NO: 70067 - RNA, 19 nt, Human
uccaugauacgagaggugg

SEQ ID NO: 70068 - RNA, 19 nt, Human
uccgcaaggccccggaggc

SEQ ID NO: 70069 - RNA, 22 nt, Human
uccgcaaggccccggaggccgg

SEQ ID NO: 70070 - RNA, 21 nt, Human
ucuccgcaaggccccggaggc

SEQ ID NO: 70071 - RNA, 18 nt, Human
ucucugaaguauucagcc

SEQ ID NO: 70072 - RNA, 19 nt, Human
ugauucugcccaaagucuc

SEQ ID NO: 70073 - RNA, 18 nt, Human
ugcccagcucagcaaugg

SEQ ID NO: 70074 - RNA, 24 nt, Human
ugccuugcacuuccagggcauuua

SEQ ID NO: 70075 - RNA, 18 nt, Human
uggccucuaaccaagccu

SEQ ID NO: 70076 - RNA, 19 nt, Human
uggccucuaaccaagccuu

SEQ ID NO: 70077 - RNA, 19 nt, Human
ugggggcagcgacgcugaa

SEQ ID NO: 70078 - RNA, 22 nt, Human
uguuugguuuugaugggaccuc

SEQ ID NO: 70079 - RNA, 21 nt, Human
uuacugugcucucacccaaau

SEQ ID NO: 70080 - RNA, 23 nt, Human
uuccagggcauuuagaauuggug

SEQ ID NO: 70081 - RNA, 22 nt, Human
uuucaugguauaaaucauugcc

SEQ ID NO: 70082 - RNA, 19 nt, Human
uuugaugggaccucuuuca

SEQ ID NO: 70083 - RNA, 22 nt, Human
uuuggcgaaggagauguuugcg

SEQ ID NO: 70084 - RNA, 19 nt, Human
aggcagcaguaagcuaaaa

SEQ ID NO: 70085 - RNA, 22 nt, Human
cagcaguaagcuaaaaacaaaa

SEQ ID NO: 70086 - RNA, 22 nt, Human
caguaagcuaaaaacaaaauca

SEQ ID NO: 70087 - RNA, 18 nt, Human
cuaaaaacaaaaucaacu

SEQ ID NO: 70088 - RNA, 23 nt, Human
guaagcuaaaaacaaaaucaacu

SEQ ID NO: 70089 - RNA, 25 nt, Human
uaaguuguuuauuuuaagauaauuu

SEQ ID NO: 70090 - RNA, 19 nt, Human
uaauggaggaacaguuucu

SEQ ID NO: 70091 - RNA, 18 nt, Human
uggcugaauuuuccuucu

SEQ ID NO: 70092 - RNA, 18 nt, Human
auggaaugagauccuuuu

SEQ ID NO: 70093 - RNA, 19 nt, Human
auuuuuuuuuuucccaugg

SEQ ID NO: 70094 - RNA, 23 nt, Human
ugagauccuuuucaaucugccau

SEQ ID NO: 70095 - RNA, 26 nt, Human
ugagauccuuuucaaucuuccacagg

SEQ ID NO: 70096 - RNA, 19 nt, Human
ugccauaacaugugcccac

SEQ ID NO: 70097 - RNA, 19 nt, Human
ugccauaacaugugcccac

SEQ ID NO: 70098 - RNA, 19 nt, Human
uggaaugagauccuuuuca

SEQ ID NO: 70099 - RNA, 26 nt, Human
uggaaugagauccuuuucaaucugcc

SEQ ID NO: 70100 - RNA, 22 nt, Human
uucaauuuauugacauugucaa

SEQ ID NO: 70101 - RNA, 20 nt, Human
aacacaccccagcaccaaga

SEQ ID NO: 70102 - RNA, 18 nt, Human
acacaccccagcaccaag

SEQ ID NO: 70103 - RNA, 19 nt, Human
acugcccugcaaccccugc

SEQ ID NO: 70104 - RNA, 25 nt, Human
cccagcuuuagcccuuggucucagc

SEQ ID NO: 70105 - RNA, 28 nt, Human
ccucccagcuuuagcccuuggucuccug

SEQ ID NO: 70106 - RNA, 24 nt, Human
ccuuggucucagcccucagcuucc

SEQ ID NO: 70107 - RNA, 21 nt, Human
cugcaaccccugcuuggccca

SEQ ID NO: 70108 - RNA, 20 nt, Human
cuuggucucagcccucagcc

SEQ ID NO: 70109 - RNA, 23 nt, Human
ucaaggugacagacucaccuccc

SEQ ID NO: 70110 - RNA, 26 nt, Human
ugcccugcaaccccugcuuggcccac

SEQ ID NO: 70111 - RNA, 21 nt, Human
ugguaaagcuuaacacacccc

SEQ ID NO: 70112 - RNA, 22 nt, Human
uggucucagcccucagcuuccc

SEQ ID NO: 70113 - RNA, 23 nt, Human
uuaacacaccccagcaccaagaa

SEQ ID NO: 70114 - RNA, 18 nt, Human
uugcaguagcaacaggcc

SEQ ID NO: 70115 - RNA, 18 nt, Human
agcuguggcaggagagcu

SEQ ID NO: 70116 - RNA, 19 nt, Human
cgaaggcacucagccaacu

SEQ ID NO: 70117 - RNA, 19 nt, Human
cucacgaaggcacucagcc

SEQ ID NO: 70118 - RNA, 21 nt, Human
cucacgaaggcacucagccaa

SEQ ID NO: 70119 - RNA, 20 nt, Human
gaaaagaaauauacacagga

SEQ ID NO: 70120 - RNA, 25 nt, Human
gagaacuaugggagguggagacggc

SEQ ID NO: 70121 - RNA, 21 nt, Human
gaggagcuguggcaggagagc

SEQ ID NO: 70122 - RNA, 20 nt, Human
gagguauaggaaaaggaaca

SEQ ID NO: 70123 - RNA, 21 nt, Human
ggaaaagaaauauacacagga

SEQ ID NO: 70124 - RNA, 22 nt, Human
ggagguauaggaaaaggaacac

SEQ ID NO: 70125 - RNA, 18 nt, Human
uccccaggcugccugggg

SEQ ID NO: 70126 - RNA, 23 nt, Human
ugaggagcuguggcaggagagcu

SEQ ID NO: 70127 - RNA, 19 nt, Human
ugccuggggagguauagga

SEQ ID NO: 70128 - RNA, 22 nt, Human
uggaaaagaaauauacacagga

SEQ ID NO: 70129 - RNA, 21 nt, Human
uggcaggagagcugcucccac

SEQ ID NO: 70130 - RNA, 18 nt, Human
ugggagguggagacggcu

SEQ ID NO: 70131 - RNA, 25 nt, Human
ugucaaacccugagccaaccggcgc

SEQ ID NO: 70132 - RNA, 21 nt, Human
ugucuuuucucugucaaaccc

SEQ ID NO: 70133 - RNA, 20 nt, Human
uuccccaggcugccugggga

SEQ ID NO: 70134 - RNA, 19 nt, Human
uucucugucaaacccugag

SEQ ID NO: 70135 - RNA, 18 nt, Human
aagugcccuccaggggcc

SEQ ID NO: 70136 - RNA, 18 nt, Human
acacagaauuacauccgu

SEQ ID NO: 70137 - RNA, 18 nt, Human
acuacaguuuucggaguc

SEQ ID NO: 70138 - RNA, 25 nt, Human
aggcucccgugcacgccgucagcuu

SEQ ID NO: 70139 - RNA, 22 nt, Human
caagugcccuccaggggccugu

SEQ ID NO: 70140 - RNA, 21 nt, Human
caggcgacgugggcuccucuc

SEQ ID NO: 70141 - RNA, 18 nt, Human
caugacaccaauacuaca

SEQ ID NO: 70142 - RNA, 24 nt, Human
ccacccaggcuccgcaggcucccg

SEQ ID NO: 70143 - RNA, 22 nt, Human
cccagugaggcgccggcacaau

SEQ ID NO: 70144 - RNA, 18 nt, Human
cccgugcacgccgucagc

SEQ ID NO: 70145 - RNA, 21 nt, Human
cccgugcacgccgucagcuug

SEQ ID NO: 70146 - RNA, 22 nt, Human
ccuggccaggccggggaauucc

SEQ ID NO: 70147 - RNA, 23 nt, Human
ccuggccaggccggggaauuccg

SEQ ID NO: 70148 - RNA, 20 nt, Human
cgugggcuccucucccgcuu

SEQ ID NO: 70149 - RNA, 21 nt, Human
cugggcgccgcuccgcccugg

SEQ ID NO: 70150 - RNA, 19 nt, Human
gaggaaaagaggcuuaagg

SEQ ID NO: 70151 - RNA, 24 nt, Human
ggaaauaacguacauucccaugac

SEQ ID NO: 70152 - RNA, 23 nt, Human
ucccuacugggcgccgcuccgcc

SEQ ID NO: 70153 - RNA, 19 nt, Human
aaacaggaggaggaagugg

SEQ ID NO: 70154 - RNA, 23 nt, Human
aaacaggaggaggaaguggaggg

SEQ ID NO: 70155 - RNA, 19 nt, Human
aagcgucucggagacaguc

SEQ ID NO: 70156 - RNA, 24 nt, Human
aagcuccccuccgagucagcgucc

SEQ ID NO: 70157 - RNA, 22 nt, Human
aaggugccugggaggcgggagg

SEQ ID NO: 70158 - RNA, 25 nt, Human
acccggagagacgcugcacguggag

SEQ ID NO: 70159 - RNA, 19 nt, Human
acgcugcacguggagcccu

SEQ ID NO: 70160 - RNA, 18 nt, Human
agacagaagccaaacagg

SEQ ID NO: 70161 - RNA, 25 nt, Human
agacagaagccaaacaggaggagga

SEQ ID NO: 70162 - RNA, 24 nt, Human
agagacgcugcacguggagcccuc

SEQ ID NO: 70163 - RNA, 21 nt, Human
aggcgggagggggguuggggc

SEQ ID NO: 70164 - RNA, 22 nt, Human
auaaaggugcagggaaagugag

SEQ ID NO: 70165 - RNA, 21 nt, Human
cccacaagggcccccccgcgg

SEQ ID NO: 70166 - RNA, 18 nt, Human
ccccacaagggccccccc

SEQ ID NO: 70167 - RNA, 18 nt, Human
cccuccgagucagcgucc

SEQ ID NO: 70168 - RNA, 21 nt, Human
ccgccggggaggaggggagcg

SEQ ID NO: 70169 - RNA, 19 nt, Human
ccguucucagccggcucug

SEQ ID NO: 70170 - RNA, 20 nt, Human
ccuccguugccuugggcggu

SEQ ID NO: 70171 - RNA, 26 nt, Human
ccuccuugaaaccuugcuccucaccg

SEQ ID NO: 70172 - RNA, 21 nt, Human
ccucgugagccuccguugccu

SEQ ID NO: 70173 - RNA, 20 nt, Human
ccugggaggcgggagggggg

SEQ ID NO: 70174 - RNA, 21 nt, Human
cgaccggacgggucuagguga

SEQ ID NO: 70175 - RNA, 22 nt, Human
cgggccggccucguuccggggc

SEQ ID NO: 70176 - RNA, 23 nt, Human
gaacauuugacaguuaugaaaug

SEQ ID NO: 70177 - RNA, 19 nt, Human
gacagaagccaaacaggag

SEQ ID NO: 70178 - RNA, 24 nt, Human
gcccucgccgcugccguucucagc

SEQ ID NO: 70179 - RNA, 23 nt, Human
gccugggaggcgggagggggguu

SEQ ID NO: 70180 - RNA, 20 nt, Human
gcugcacguggagcccucgc

SEQ ID NO: 70181 - RNA, 25 nt, Human
ggagagacgcugcacguggagcccu

SEQ ID NO: 70182 - RNA, 18 nt, Human
ggaggaaguggaggguaa

SEQ ID NO: 70183 - RNA, 22 nt, Human
ggauuggggcguugugcuuccu

SEQ ID NO: 70184 - RNA, 19 nt, Human
gggaagggcccugggaccu

SEQ ID NO: 70185 - RNA, 18 nt, Human
ggguccccuggcacagcc

SEQ ID NO: 70186 - RNA, 18 nt, Human
gugagacagaagccaaac

SEQ ID NO: 70187 - RNA, 18 nt, Human
uaccucgugagccuccgu

SEQ ID NO: 70188 - RNA, 21 nt, Human
uccgccaucuuuucuucgccu

SEQ ID NO: 70189 - RNA, 19 nt, Human
uccuggacccgaaggugcc

SEQ ID NO: 70190 - RNA, 23 nt, Human
uccuuguaccucgugagccuccg

SEQ ID NO: 70191 - RNA, 18 nt, Human
ucuuugaguggccuuucc

SEQ ID NO: 70192 - RNA, 26 nt, Human
ucuuugaguggccuuuccccuaguuc

SEQ ID NO: 70193 - RNA, 19 nt, Human
ugacccguucuuuuucccc

SEQ ID NO: 70194 - RNA, 19 nt, Human
ugaguggccuuuccccuag

SEQ ID NO: 70195 - RNA, 24 nt, Human
ugcucuguacgcaugcgcucuuug

SEQ ID NO: 70196 - RNA, 23 nt, Human
uggagcccucgccgcugccguuc

SEQ ID NO: 70197 - RNA, 23 nt, Human
uggaggguaagugcuuccggguc

SEQ ID NO: 70198 - RNA, 24 nt, Human
uggcacagccuccgccaucuuuuc

SEQ ID NO: 70199 - RNA, 18 nt, Human
ugggaggcgggagggggg

SEQ ID NO: 70200 - RNA, 24 nt, Human
ugggaggcgggagggggguugggg

SEQ ID NO: 70201 - RNA, 20 nt, Human
uguauaaaggugcagggaaa

SEQ ID NO: 70202 - RNA, 24 nt, Human
uuaaaagaacauuugacaguuaug

SEQ ID NO: 70203 - RNA, 23 nt, Human
uuaccagauuaauuuuacuuuau

SEQ ID NO: 70204 - RNA, 19 nt, Human
uuccccuaguucaagcucc

SEQ ID NO: 70205 - RNA, 19 nt, Human
uuccggagugggugagugc

SEQ ID NO: 70206 - RNA, 24 nt, Human
uugcucuguacgcaugcgcucuuu

SEQ ID NO: 70207 - RNA, 19 nt, Human
uuuuccccuccuugaaacc

SEQ ID NO: 70208 - RNA, 21 nt, Human
cuuuuuauuguugcuccaagu

SEQ ID NO: 70209 - RNA, 21 nt, Human
ucccgggcgguuguaggccuc

SEQ ID NO: 70210 - RNA, 18 nt, Human
uuugaucuguucuggaag

SEQ ID NO: 70211 - RNA, 18 nt, Human
uuuuuuuuuuuuuuuuug

SEQ ID NO: 70212 - RNA, 20 nt, Human
aaagcaacaacacggacacu

SEQ ID NO: 70213 - RNA, 18 nt, Human
aaagcacuauccacagcc

SEQ ID NO: 70214 - RNA, 21 nt, Human
aaccaagcaccccaugcuccu

SEQ ID NO: 70215 - RNA, 24 nt, Human
aacgauaacgacagccaagcagga

SEQ ID NO: 70216 - RNA, 21 nt, Human
aagaaagcuccucagcgggcu

SEQ ID NO: 70217 - RNA, 22 nt, Human
aagcaccccaugcuccugcccg

SEQ ID NO: 70218 - RNA, 18 nt, Human
accaagcaccccaugcuc

SEQ ID NO: 70219 - RNA, 20 nt, Human
accaagcaccccaugcuccu

SEQ ID NO: 70220 - RNA, 23 nt, Human
accgucccacccucaaccccccc

SEQ ID NO: 70221 - RNA, 23 nt, Human
agagaugggggcagcccaagaaa

SEQ ID NO: 70222 - RNA, 18 nt, Human
agagggagcaagaugggc

SEQ ID NO: 70223 - RNA, 23 nt, Human
agcacuauccacagccagggaug

SEQ ID NO: 70224 - RNA, 18 nt, Human
aggagaaaggagacccua

SEQ ID NO: 70225 - RNA, 21 nt, Human
aggagaaaggagacccuagaa

SEQ ID NO: 70226 - RNA, 19 nt, Human
agggagcaagaugggcuga

SEQ ID NO: 70227 - RNA, 20 nt, Human
caaaagcacuauccacagcc

SEQ ID NO: 70228 - RNA, 28 nt, Human
caaacagccggcgaucgcacccagccca

SEQ ID NO: 70229 - RNA, 22 nt, Human
caacaacacggacaccguccca

SEQ ID NO: 70230 - RNA, 23 nt, Human
caacaucaccagaaaacgauaac

SEQ ID NO: 70231 - RNA, 19 nt, Human
caagaauaaauaaggagaa

SEQ ID NO: 70232 - RNA, 22 nt, Human
caagcaccccaugcuccugccc

SEQ ID NO: 70233 - RNA, 24 nt, Human
caccuuguugggagagaugggggc

SEQ ID NO: 70234 - RNA, 23 nt, Human
cagaaaacgauaacgacagccaa

SEQ ID NO: 70235 - RNA, 24 nt, Human
cagcccaagaaagcuccucagcgg

SEQ ID NO: 70236 - RNA, 20 nt, Human
caugucccuuacgccucaca

SEQ ID NO: 70237 - RNA, 26 nt, Human
ccacagaaauaaacccguuguccgga

SEQ ID NO: 70238 - RNA, 20 nt, Human
cccacccucaacccccccac

SEQ ID NO: 70239 - RNA, 21 nt, Human
cccacccucaacccccccacu

SEQ ID NO: 70240 - RNA, 24 nt, Human
cccacccucaacccccccacuggc

SEQ ID NO: 70241 - RNA, 23 nt, Human
cccagcccaccugucguggaggu

SEQ ID NO: 70242 - RNA, 20 nt, Human
cccucaacccccccacuggc

SEQ ID NO: 70243 - RNA, 21 nt, Human
cccucaacccccccacuggca

SEQ ID NO: 70244 - RNA, 21 nt, Human
cccugggaagcugguuggucu

SEQ ID NO: 70245 - RNA, 18 nt, Human
ccucacagcgacgaaccc

SEQ ID NO: 70246 - RNA, 21 nt, Human
ccucacagcgacgaacccugg

SEQ ID NO: 70247 - RNA, 18 nt, Human
cgacgaacccugggaagc

SEQ ID NO: 70248 - RNA, 23 nt, Human
cuacacaaaagcacuauccacag

SEQ ID NO: 70249 - RNA, 19 nt, Human
cucccaaacucagggagcc

SEQ ID NO: 70250 - RNA, 19 nt, Human
cucccggugggaacaugcc

SEQ ID NO: 70251 - RNA, 22 nt, Human
cugcagggugggaaagcaacaa

SEQ ID NO: 70252 - RNA, 20 nt, Human
gaagagggagcaagaugggc

SEQ ID NO: 70253 - RNA, 26 nt, Human
gagaaaggagacccuagaauucaugu

SEQ ID NO: 70254 - RNA, 19 nt, Human
gagagaugggggcagccca

SEQ ID NO: 70255 - RNA, 24 nt, Human
gagcaagaugggcugaggggagcu

SEQ ID NO: 70256 - RNA, 18 nt, Human
gagggagcaagaugggcu

SEQ ID NO: 70257 - RNA, 23 nt, Human
gggcugaggggagcuugcaguuc

SEQ ID NO: 70258 - RNA, 21 nt, Human
gucccacccucaaccccccca

SEQ ID NO: 70259 - RNA, 20 nt, Human
guugggagagaugggggcag

SEQ ID NO: 70260 - RNA, 18 nt, Human
uaaggagaaaggagaccc

SEQ ID NO: 70261 - RNA, 20 nt, Human
uaaggagaaaggagacccua

SEQ ID NO: 70262 - RNA, 19 nt, Human
uacuuccacacucccaaac

SEQ ID NO: 70263 - RNA, 21 nt, Human
uagcacaacaucaccagaaaa

SEQ ID NO: 70264 - RNA, 26 nt, Human
uaggaaggaaacaaccaagcacccca

SEQ ID NO: 70265 - RNA, 20 nt, Human
ucagcgggcugaagagggag

SEQ ID NO: 70266 - RNA, 21 nt, Human
ucaggccacagaaauaaaccc

SEQ ID NO: 70267 - RNA, 23 nt, Human
ucaguccagugcgcugcagggug

SEQ ID NO: 70268 - RNA, 19 nt, Human
ucccaaacucagggagccc

SEQ ID NO: 70269 - RNA, 22 nt, Human
ucccacccucaacccccccacu

SEQ ID NO: 70270 - RNA, 22 nt, Human
ucccuuccuucucaggccacag

SEQ ID NO: 70271 - RNA, 23 nt, Human
ugaggggagcuugcaguucaugc

SEQ ID NO: 70272 - RNA, 20 nt, Human
ugcuccugcccggcacuccc

SEQ ID NO: 70273 - RNA, 24 nt, Human
ugggaaagcaacaacacggacacc

SEQ ID NO: 70274 - RNA, 25 nt, Human
ugggaacaugccaaacagccggcga

SEQ ID NO: 70275 - RNA, 18 nt, Human
ugggagagaugggggcag

SEQ ID NO: 70276 - RNA, 22 nt, Human
uguagccacaagaauaaauaag

SEQ ID NO: 70277 - RNA, 18 nt, Human
ugucguggaggucccuuc

SEQ ID NO: 70278 - RNA, 21 nt, Human
uucaugcugcaguaggaagag

SEQ ID NO: 70279 - RNA, 25 nt, Human
uuuauuuuauuaggaaggaaacaac

SEQ ID NO: 70280 - RNA, 20 nt, Human
aagagccaggaggcagcucu

SEQ ID NO: 70281 - RNA, 20 nt, Human
aauccgcagguggcuucccc

SEQ ID NO: 70282 - RNA, 18 nt, Human
acaauaucacuugccaaa

SEQ ID NO: 70283 - RNA, 23 nt, Human
accggcucaccugcaccgggcac

SEQ ID NO: 70284 - RNA, 25 nt, Human
agacaauaucacuugccaaaguccu

SEQ ID NO: 70285 - RNA, 22 nt, Human
agcaugcagcgccuccccgcug

SEQ ID NO: 70286 - RNA, 21 nt, Human
agcgccuccccgcugccaccc

SEQ ID NO: 70287 - RNA, 20 nt, Human
aggcacucggcacaacuccg

SEQ ID NO: 70288 - RNA, 20 nt, Human
auccucagccuggccuuugc

SEQ ID NO: 70289 - RNA, 20 nt, Human
aucuguuuagcauucucccc

SEQ ID NO: 70290 - RNA, 21 nt, Human
caccgggcacucagcacagcc

SEQ ID NO: 70291 - RNA, 21 nt, Human
cagagaaaagcugcuuuacau

SEQ ID NO: 70292 - RNA, 19 nt, Human
cagccucggucugcagcag

SEQ ID NO: 70293 - RNA, 19 nt, Human
cagccuggccuuugccucc

SEQ ID NO: 70294 - RNA, 22 nt, Human
caggcugacguccaaauaauac

SEQ ID NO: 70295 - RNA, 24 nt, Human
cagugaauccgcagguggcuuccc

SEQ ID NO: 70296 - RNA, 22 nt, Human
caugcuucaggugagccaagaa

SEQ ID NO: 70297 - RNA, 19 nt, Human
ccaagaacaaccuucccau

SEQ ID NO: 70298 - RNA, 24 nt, Human
cccagccucggucuuggcuguguc

SEQ ID NO: 70299 - RNA, 18 nt, Human
cccagcuuccuccaggcg

SEQ ID NO: 70300 - RNA, 24 nt, Human
cccaggcucccaaagagccaggag

SEQ ID NO: 70301 - RNA, 18 nt, Human
ccccgcagcgccccuccc

SEQ ID NO: 70302 - RNA, 21 nt, Human
cccgcugccacccgggccacc

SEQ ID NO: 70303 - RNA, 19 nt, Human
cccucccggcuccuucucc

SEQ ID NO: 70304 - RNA, 18 nt, Human
ccucccggcuccuucucc

SEQ ID NO: 70305 - RNA, 26 nt, Human
ccucccggcuccuucuccucccaggc

SEQ ID NO: 70306 - RNA, 22 nt, Human
ccucggucccagcuuccuccag

SEQ ID NO: 70307 - RNA, 20 nt, Human
ccuggccuuugccucccucc

SEQ ID NO: 70308 - RNA, 27 nt, Human
ccuggccuuugccucccuccacucggc

SEQ ID NO: 70309 - RNA, 19 nt, Human
ccugggucagggucugggg

SEQ ID NO: 70310 - RNA, 22 nt, Human
ccuuugccucccuccacucggc

SEQ ID NO: 70311 - RNA, 23 nt, Human
cggcuccuucuccucccaggcuc

SEQ ID NO: 70312 - RNA, 23 nt, Human
cuagcaguccugggcggagcagc

SEQ ID NO: 70313 - RNA, 22 nt, Human
cuccagcaugcagcgccucccc

SEQ ID NO: 70314 - RNA, 30 nt, Human
cuccccgcugccacccgggccacccugauu

SEQ ID NO: 70315 - RNA, 24 nt, Human
cuggcagcccuccgugcuugcuag

SEQ ID NO: 70316 - RNA, 18 nt, Human
cugggucagggucugggg

SEQ ID NO: 70317 - RNA, 23 nt, Human
cuuggcccagccucggucccagc

SEQ ID NO: 70318 - RNA, 24 nt, Human
cuuggcccagccucggucugcagc

SEQ ID NO: 70319 - RNA, 23 nt, Human
cuuggcccagccucggucuuggc

SEQ ID NO: 70320 - RNA, 24 nt, Human
cuuucauuccugucuucacuugcc

SEQ ID NO: 70321 - RNA, 24 nt, Human
gacaauaucacuugccaaaguccu

SEQ ID NO: 70322 - RNA, 26 nt, Human
gagcagcagccagugaaaagggcgcc

SEQ ID NO: 70323 - RNA, 24 nt, Human
gagcagcagccagugaauccgcag

SEQ ID NO: 70324 - RNA, 19 nt, Human
gagccccaggucuggcagc

SEQ ID NO: 70325 - RNA, 23 nt, Human
gauaucaaagacaagacugaacu

SEQ ID NO: 70326 - RNA, 18 nt, Human
gauguuuauuuucucaaa

SEQ ID NO: 70327 - RNA, 19 nt, Human
gccaagaacaaccuuccca

SEQ ID NO: 70328 - RNA, 19 nt, Human
gccucggucuuggcugugu

SEQ ID NO: 70329 - RNA, 21 nt, Human
gccuggccuuugccucccucc

SEQ ID NO: 70330 - RNA, 19 nt, Human
gcugugucucucucucuuc

SEQ ID NO: 70331 - RNA, 18 nt, Human
ggaggaacuggaaaugag

SEQ ID NO: 70332 - RNA, 23 nt, Human
gggagccccaggucuggcagccc

SEQ ID NO: 70333 - RNA, 20 nt, Human
gggucuggggcagacggugg

SEQ ID NO: 70334 - RNA, 24 nt, Human
ggugaccaccgugggaggugcagc

SEQ ID NO: 70335 - RNA, 24 nt, Human
gucucucucucuucuucucuucag

SEQ ID NO: 70336 - RNA, 20 nt, Human
uacacaguuucaugcuucag

SEQ ID NO: 70337 - RNA, 24 nt, Human
ucaaauccacaggcugacguccaa

SEQ ID NO: 70338 - RNA, 20 nt, Human
ucccaggcucccaaagagcc

SEQ ID NO: 70339 - RNA, 19 nt, Human
uccccaaccugacgcacgg

SEQ ID NO: 70340 - RNA, 20 nt, Human
ucuccucccaggcucccaaa

SEQ ID NO: 70341 - RNA, 21 nt, Human
ucuccucccaggcucccaaag

SEQ ID NO: 70342 - RNA, 26 nt, Human
ucucucucucuucuucucuucagaga

SEQ ID NO: 70343 - RNA, 21 nt, Human
ugagcgccuugcaggggcuga

SEQ ID NO: 70344 - RNA, 24 nt, Human
ugauaucaaagacaagacugaacu

SEQ ID NO: 70345 - RNA, 19 nt, Human
uggaaaugagacugcagca

SEQ ID NO: 70346 - RNA, 20 nt, Human
uggaaaugagacugcagcag

SEQ ID NO: 70347 - RNA, 20 nt, Human
uuagcauucuccccucauuu

SEQ ID NO: 70348 - RNA, 22 nt, Human
uuggcccagccucggucccagc

SEQ ID NO: 70349 - RNA, 18 nt, Human
uuuuuuuuuuuuuuuuug

SEQ ID NO: 70350 - RNA, 28 nt, Human
acacagcuccagcugucccaggaaaacc

SEQ ID NO: 70351 - RNA, 24 nt, Human
acgcagcaagaggggagugcaggg

SEQ ID NO: 70352 - RNA, 25 nt, Human
acgcagcaagaggggagugcaggga

SEQ ID NO: 70353 - RNA, 18 nt, Human
agaggggagugcagggag

SEQ ID NO: 70354 - RNA, 21 nt, Human
caagccucugaaaggcuaagg

SEQ ID NO: 70355 - RNA, 18 nt, Human
cacgcagcaagaggggag

SEQ ID NO: 70356 - RNA, 23 nt, Human
cagcugcacagagucagcagcag

SEQ ID NO: 70357 - RNA, 18 nt, Human
cccagcguccaccguccg

SEQ ID NO: 70358 - RNA, 19 nt, Human
cccgcacugaggacucggc

SEQ ID NO: 70359 - RNA, 18 nt, Human
cccugaacaccaagccuc

SEQ ID NO: 70360 - RNA, 22 nt, Human
cccugaacaccaagccucugaa

SEQ ID NO: 70361 - RNA, 22 nt, Human
ccuggacugcagugccuccaaa

SEQ ID NO: 70362 - RNA, 21 nt, Human
cggcggcgggggucggaacgg

SEQ ID NO: 70363 - RNA, 21 nt, Human
cggcgggggucggaacggcgg

SEQ ID NO: 70364 - RNA, 20 nt, Human
gaggcacggccccacccaca

SEQ ID NO: 70365 - RNA, 18 nt, Human
gaggguggagguggggga

SEQ ID NO: 70366 - RNA, 18 nt, Human
gagucagcagcagcagcc

SEQ ID NO: 70367 - RNA, 24 nt, Human
gcagcagcagccugcuccccgcac

SEQ ID NO: 70368 - RNA, 20 nt, Human
ggagcuacaaacgcguccca

SEQ ID NO: 70369 - RNA, 20 nt, Human
ggggagugcagggagggccc

SEQ ID NO: 70370 - RNA, 19 nt, Human
gggggucggaacggcgggg

SEQ ID NO: 70371 - RNA, 20 nt, Human
uccagcugucccaggaaaac

SEQ ID NO: 70372 - RNA, 23 nt, Human
uccccgcacugaggacucggccu

SEQ ID NO: 70373 - RNA, 22 nt, Human
ucggccuggacugcagugccuc

SEQ ID NO: 70374 - RNA, 20 nt, Human
ugaaaggcuaagggacacag

SEQ ID NO: 70375 - RNA, 25 nt, Human
ugaaaggcuaagggacacagcucca

SEQ ID NO: 70376 - RNA, 22 nt, Human
ugaggacucggccuggacugca

SEQ ID NO: 70377 - RNA, 24 nt, Human
ugaggguggaggugggggacacag

SEQ ID NO: 70378 - RNA, 20 nt, Human
ugggggacacaggugcgcag

SEQ ID NO: 70379 - RNA, 21 nt, Human
uggguugaggguggagguggg

SEQ ID NO: 70380 - RNA, 22 nt, Human
uugaggguggaggugggggaca

SEQ ID NO: 70381 - RNA, 22 nt, Human
acggcacggggcgggcgggggc

SEQ ID NO: 70382 - RNA, 18 nt, Human
aguaaagagaaaugacaa

SEQ ID NO: 70383 - RNA, 18 nt, Human
cacggcacggggcgggcg

SEQ ID NO: 70384 - RNA, 21 nt, Human
caggaacccacaaggcgacac

SEQ ID NO: 70385 - RNA, 24 nt, Human
ccggcggugagggcggcuccaucc

SEQ ID NO: 70386 - RNA, 21 nt, Human
cgcgcagggccacgggcccgg

SEQ ID NO: 70387 - RNA, 22 nt, Human
cuccgcgcagggccacgggccc

SEQ ID NO: 70388 - RNA, 20 nt, Human
gcaacaggaacccacaaggc

SEQ ID NO: 70389 - RNA, 23 nt, Human
gccgcuccgcagacgcaggaaca

SEQ ID NO: 70390 - RNA, 23 nt, Human
gcgcagggccacgggcccggcgg

SEQ ID NO: 70391 - RNA, 23 nt, Human
gcggcggccccgugcguaugugu

SEQ ID NO: 70392 - RNA, 20 nt, Human
gcgggcgggggcaaggccgg

SEQ ID NO: 70393 - RNA, 19 nt, Human
gcugggagacaagggccgc

SEQ ID NO: 70394 - RNA, 23 nt, Human
ggacacagcuccgcgcagggcca

SEQ ID NO: 70395 - RNA, 19 nt, Human
ggcggcuccauccaggaag

SEQ ID NO: 70396 - RNA, 19 nt, Human
ggcgggcgggggcaaggcc

SEQ ID NO: 70397 - RNA, 23 nt, Human
gggccacgggcccggcggugagg

SEQ ID NO: 70398 - RNA, 19 nt, Human
ggggguggggcgccggggg

SEQ ID NO: 70399 - RNA, 18 nt, Human
ggguggggcgccgggggc

SEQ ID NO: 70400 - RNA, 20 nt, Human
ggucuuuacauaauauucug

SEQ ID NO: 70401 - RNA, 18 nt, Human
guacaagaccaacuacug

SEQ ID NO: 70402 - RNA, 20 nt, Human
guggggcgccgggggccugg

SEQ ID NO: 70403 - RNA, 18 nt, Human
uaacauccaguaaagaga

SEQ ID NO: 70404 - RNA, 20 nt, Human
uacaagaccaacuacugggg

SEQ ID NO: 70405 - RNA, 21 nt, Human
uacaagaccaacuacuggggg

SEQ ID NO: 70406 - RNA, 22 nt, Human
uaggggguggggcgccgggggc

SEQ ID NO: 70407 - RNA, 18 nt, Human
ucagcaacaggaacccac

SEQ ID NO: 70408 - RNA, 25 nt, Human
uccacggcacggggcgggcgggggc

SEQ ID NO: 70409 - RNA, 22 nt, Human
uccgcagacgcaggaacaggcc

SEQ ID NO: 70410 - RNA, 22 nt, Human
ugagggcggcuccauccaggaa

SEQ ID NO: 70411 - RNA, 19 nt, Human
ugccgguaccgcucuuggc

SEQ ID NO: 70412 - RNA, 19 nt, Human
aaacugcccccaggcccca

SEQ ID NO: 70413 - RNA, 19 nt, Human
aaccaggaccggccggcac

SEQ ID NO: 70414 - RNA, 21 nt, Human
acacacacacacacacacaca

SEQ ID NO: 70415 - RNA, 22 nt, Human
acacucuguccuucccaugggc

SEQ ID NO: 70416 - RNA, 31 nt, Human
acagaccacauacacacacacgcacacacag

SEQ ID NO: 70417 - RNA, 18 nt, Human
acaggcuugucacagacc

SEQ ID NO: 70418 - RNA, 26 nt, Human
accacauacacacacacgcacacaca

SEQ ID NO: 70419 - RNA, 25 nt, Human
acgcacacacacgcgcacacacaca

SEQ ID NO: 70420 - RNA, 26 nt, Human
acgcacacacacgcgcacacacacac

SEQ ID NO: 70421 - RNA, 19 nt, Human
acuacaccccggacaggca

SEQ ID NO: 70422 - RNA, 23 nt, Human
agaggggcagggcugagggaggg

SEQ ID NO: 70423 - RNA, 18 nt, Human
aggcaggugagccacagg

SEQ ID NO: 70424 - RNA, 23 nt, Human
auacacacacacgcacacacacg

SEQ ID NO: 70425 - RNA, 22 nt, Human
auccccccaggccccaaggaca

SEQ ID NO: 70426 - RNA, 23 nt, Human
cacacacacacacaaagagugca

SEQ ID NO: 70427 - RNA, 23 nt, Human
cacacacacacacacaaagagug

SEQ ID NO: 70428 - RNA, 18 nt, Human
cacacacacacacacaca

SEQ ID NO: 70429 - RNA, 20 nt, Human
cacacacacacacacacaca

SEQ ID NO: 70430 - RNA, 20 nt, Human
cacacacacacacacacaca

SEQ ID NO: 70431 - RNA, 26 nt, Human
cacacacacgcacacacacgcgcaca

SEQ ID NO: 70432 - RNA, 22 nt, Human
cacacacacgcgcacacacaca

SEQ ID NO: 70433 - RNA, 33 nt, Human
cacacacacgcgcacacacacacacacacagug

SEQ ID NO: 70434 - RNA, 19 nt, Human
cacacacacucuguccuuc

SEQ ID NO: 70435 - RNA, 25 nt, Human
cacacgcacacacacgcgcacacac

SEQ ID NO: 70436 - RNA, 25 nt, Human
cacgcacacacacgcgcacacacac

SEQ ID NO: 70437 - RNA, 23 nt, Human
cacucuguccuucccaugggcca

SEQ ID NO: 70438 - RNA, 22 nt, Human
cagcggcuguaaccacagggcu

SEQ ID NO: 70439 - RNA, 27 nt, Human
caggccccaggguucucaggucaggga

SEQ ID NO: 70440 - RNA, 28 nt, Human
cauacacacacacgcacacacacgcgca

SEQ ID NO: 70441 - RNA, 20 nt, Human
caugggccauggcucuggga

SEQ ID NO: 70442 - RNA, 25 nt, Human
ccacagaagggagaggaggcucaaa

SEQ ID NO: 70443 - RNA, 25 nt, Human
ccaggccccaaggacacacacacuc

SEQ ID NO: 70444 - RNA, 24 nt, Human
cccagccccuuuucaggccuaaga

SEQ ID NO: 70445 - RNA, 22 nt, Human
cccaggccccaggguucucagg

SEQ ID NO: 70446 - RNA, 20 nt, Human
cccaggucagcugacgcugc

SEQ ID NO: 70447 - RNA, 20 nt, Human
ccccaggccccaggguucuc

SEQ ID NO: 70448 - RNA, 22 nt, Human
ccccaggguucucaggucagga

SEQ ID NO: 70449 - RNA, 22 nt, Human
ccccaggguucucaggucaggg

SEQ ID NO: 70450 - RNA, 22 nt, Human
ccccaggucagcugacgcugcc

SEQ ID NO: 70451 - RNA, 19 nt, Human
ccccccaggccccaaggac

SEQ ID NO: 70452 - RNA, 20 nt, Human
ccgcuaggacagcguacuac

SEQ ID NO: 70453 - RNA, 25 nt, Human
cgcgcacacacacacacacacacac

SEQ ID NO: 70454 - RNA, 20 nt, Human
cgggagcggcgggaccggag

SEQ ID NO: 70455 - RNA, 23 nt, Human
gaaccaggaccggccggcacgaa

SEQ ID NO: 70456 - RNA, 21 nt, Human
gaguuagggaggaacaugaaa

SEQ ID NO: 70457 - RNA, 23 nt, Human
gcgcacacacacacacacacaca

SEQ ID NO: 70458 - RNA, 22 nt, Human
gcucaaacugcccccaggcccc

SEQ ID NO: 70459 - RNA, 21 nt, Human
ggacacacacacucuguccuu

SEQ ID NO: 70460 - RNA, 22 nt, Human
ggacacacacacucuguccuuc

SEQ ID NO: 70461 - RNA, 19 nt, Human
gggagcgacccacagaagg

SEQ ID NO: 70462 - RNA, 21 nt, Human
ggggggggugcccagccccuu

SEQ ID NO: 70463 - RNA, 20 nt, Human
uaaccacagggcugaggggg

SEQ ID NO: 70464 - RNA, 21 nt, Human
uaggacagcguacuacacccc

SEQ ID NO: 70465 - RNA, 19 nt, Human
ucaggucagggaguuaggg

SEQ ID NO: 70466 - RNA, 21 nt, Human
uccccaggucagcugacgcug

SEQ ID NO: 70467 - RNA, 20 nt, Human
uccuuggugggggggggugc

SEQ ID NO: 70468 - RNA, 20 nt, Human
ugagagccuugggccaggac

SEQ ID NO: 70469 - RNA, 22 nt, Human
ugagccacaggcuugucacaga

SEQ ID NO: 70470 - RNA, 21 nt, Human
ugcccccaggccccaggguuc

SEQ ID NO: 70471 - RNA, 22 nt, Human
uggugggggggggugcccagcc

SEQ ID NO: 70472 - RNA, 22 nt, Human
uucuuagauacaucagcggcug

SEQ ID NO: 70473 - RNA, 22 nt, Human
uuuuuuuuuuuuuuuuugccuu

SEQ ID NO: 70474 - RNA, 26 nt, Human
uuuuuuuuuuuuuuuuuuugccuuag

SEQ ID NO: 70475 - RNA, 27 nt, Human
uuuuuuuuuuuuuuuuuuuuuuugggg

SEQ ID NO: 70476 - RNA, 18 nt, Human
aaaggaaaacacgcugca

SEQ ID NO: 70477 - RNA, 20 nt, Human
aaccccuaccccgucgccuc

SEQ ID NO: 70478 - RNA, 18 nt, Human
aagugucaauagcugacc

SEQ ID NO: 70479 - RNA, 23 nt, Human
aggaggaaaauauuuauuccaaa

SEQ ID NO: 70480 - RNA, 24 nt, Human
aggcaggagccaucuucaaaucca

SEQ ID NO: 70481 - RNA, 19 nt, Human
caaaaaaggcaaaggaaaa

SEQ ID NO: 70482 - RNA, 26 nt, Human
caaagugcaaaaaaggcaaaggaaaa

SEQ ID NO: 70483 - RNA, 18 nt, Human
caccaaagugcaaaaaag

SEQ ID NO: 70484 - RNA, 23 nt, Human
caucuucaaauccacagauucca

SEQ ID NO: 70485 - RNA, 23 nt, Human
ccaaccccuaccccgucgccuca

SEQ ID NO: 70486 - RNA, 24 nt, Human
cccuaccccgucgccucacucgga

SEQ ID NO: 70487 - RNA, 21 nt, Human
ccgccugagcgccaaccccua

SEQ ID NO: 70488 - RNA, 21 nt, Human
cgccaaccccuaccccgucgc

SEQ ID NO: 70489 - RNA, 23 nt, Human
cgccugagcgccaaccccuaccc

SEQ ID NO: 70490 - RNA, 24 nt, Human
cuaaacacuucacugauucccacg

SEQ ID NO: 70491 - RNA, 20 nt, Human
cucaaagacugagcacugua

SEQ ID NO: 70492 - RNA, 19 nt, Human
cugagcgccaaccccuacc

SEQ ID NO: 70493 - RNA, 19 nt, Human
ggccaaaacaggcaaguca

SEQ ID NO: 70494 - RNA, 19 nt, Human
guaauucaccaaagugcaa

SEQ ID NO: 70495 - RNA, 20 nt, Human
uagaaaggaggaaaauauuu

SEQ ID NO: 70496 - RNA, 20 nt, Human
uauuuauuccaaaagauggc

SEQ ID NO: 70497 - RNA, 19 nt, Human
ucaaauccacagauuccaa

SEQ ID NO: 70498 - RNA, 22 nt, Human
uccaaaagauggcagaaagaag

SEQ ID NO: 70499 - RNA, 23 nt, Human
ucggaucccaccaggaaguguca

SEQ ID NO: 70500 - RNA, 22 nt, Human
ucucucagaagaacagcaucuu

SEQ ID NO: 70501 - RNA, 21 nt, Human
ucuguugagauggcucuuccc

SEQ ID NO: 70502 - RNA, 21 nt, Human
ugagaaggcaggagccaucuu

SEQ ID NO: 70503 - RNA, 18 nt, Human
uggaggugauuuugcauc

SEQ ID NO: 70504 - RNA, 19 nt, Human
uggcagaaagaagaaauuc

SEQ ID NO: 70505 - RNA, 21 nt, Human
ugucuugcagcaguuucuaaa

SEQ ID NO: 70506 - RNA, 21 nt, Human
uucaccaaagugcaaaaaagg

SEQ ID NO: 70507 - RNA, 23 nt, Human
uucccacgugagaaggcaggagc

SEQ ID NO: 70508 - RNA, 18 nt, Human
uucuguugagauggcucu

SEQ ID NO: 70509 - RNA, 22 nt, Human
aaaaaaaaaauaauaaaaaaaa

SEQ ID NO: 70510 - RNA, 24 nt, Human
aaaaaaacagggaaacaaauaaca

SEQ ID NO: 70511 - RNA, 23 nt, Human
aaaaauucaacaagcaaacaaac

SEQ ID NO: 70512 - RNA, 24 nt, Human
aaaacaaauuuggucaaacuuucu

SEQ ID NO: 70513 - RNA, 23 nt, Human
aaaacaacaacaacaacaaaaaa

SEQ ID NO: 70514 - RNA, 23 nt, Human
aaacaaacaugcaaacaugugac

SEQ ID NO: 70515 - RNA, 23 nt, Human
aaaguuauagaaaccuggccuuc

SEQ ID NO: 70516 - RNA, 18 nt, Human
aaauacauacuaucagug

SEQ ID NO: 70517 - RNA, 23 nt, Human
aacaacaacaacaaaaaaacaaa

SEQ ID NO: 70518 - RNA, 23 nt, Human
aagaucacgccauugcacuccag

SEQ ID NO: 70519 - RNA, 21 nt, Human
aagcaaacaaacaugcaaaca

SEQ ID NO: 70520 - RNA, 18 nt, Human
aaggcugcagugagccaa

SEQ ID NO: 70521 - RNA, 19 nt, Human
aaguauguaauaguccuug

SEQ ID NO: 70522 - RNA, 23 nt, Human
aaucacuugaacccgggaggcga

SEQ ID NO: 70523 - RNA, 21 nt, Human
aaucugcaagaauuuaaacaa

SEQ ID NO: 70524 - RNA, 24 nt, Human
aauuauacacaacuuuuaacauaa

SEQ ID NO: 70525 - RNA, 19 nt, Human
aauuccuuugcaaaaugcu

SEQ ID NO: 70526 - RNA, 23 nt, Human
acaaaaaaacaaauuuggucaaa

SEQ ID NO: 70527 - RNA, 20 nt, Human
acaaacaugcaaacauguga

SEQ ID NO: 70528 - RNA, 24 nt, Human
acaacaacaacaacaaaaaaacaa

SEQ ID NO: 70529 - RNA, 18 nt, Human
acaauaaagaagcaaagg

SEQ ID NO: 70530 - RNA, 19 nt, Human
acaauuuaauagagaugag

SEQ ID NO: 70531 - RNA, 20 nt, Human
acacucauacauaaacauuc

SEQ ID NO: 70532 - RNA, 21 nt, Human
accaauauggugaaaccccgu

SEQ ID NO: 70533 - RNA, 24 nt, Human
accccguuucuacuaaaaauacaa

SEQ ID NO: 70534 - RNA, 18 nt, Human
acuagucucaaagcugca

SEQ ID NO: 70535 - RNA, 24 nt, Human
acuccguccccaaaaaaaaaauaa

SEQ ID NO: 70536 - RNA, 18 nt, Human
agagaugaggaaagggua

SEQ ID NO: 70537 - RNA, 20 nt, Human
agcaaacaaacaugcaaaca

SEQ ID NO: 70538 - RNA, 24 nt, Human
agcaguuugggaggccgagguggg

SEQ ID NO: 70539 - RNA, 24 nt, Human
agccugaccaauauggugaaaccc

SEQ ID NO: 70540 - RNA, 23 nt, Human
agcugggcaugguggagcaugcc

SEQ ID NO: 70541 - RNA, 23 nt, Human
aggaagagggaggcccuucacaa

SEQ ID NO: 70542 - RNA, 18 nt, Human
aggcaggagaaucacuug

SEQ ID NO: 70543 - RNA, 24 nt, Human
aggcaggagaaucacuugaacccg

SEQ ID NO: 70544 - RNA, 21 nt, Human
aggccgaggugggcggaucac

SEQ ID NO: 70545 - RNA, 19 nt, Human
aggcgaaggcugcagugag

SEQ ID NO: 70546 - RNA, 24 nt, Human
aggcgaaggcugcagugagccaag

SEQ ID NO: 70547 - RNA, 24 nt, Human
aggcgcgguggcucacgccuguaa

SEQ ID NO: 70548 - RNA, 24 nt, Human
aggcugaggcaggagaaucacuug

SEQ ID NO: 70549 - RNA, 18 nt, Human
aggugcagagacuguacc

SEQ ID NO: 70550 - RNA, 22 nt, Human
aggugggcggaucaccugaggu

SEQ ID NO: 70551 - RNA, 21 nt, Human
aguucccaaugguuucucaca

SEQ ID NO: 70552 - RNA, 24 nt, Human
aucacgccauugcacuccagccug

SEQ ID NO: 70553 - RNA, 20 nt, Human
auggugaaaccccguuucua

SEQ ID NO: 70554 - RNA, 24 nt, Human
auugcacuccagccugggcaacaa

SEQ ID NO: 70555 - RNA, 25 nt, Human
auugcacuccagccugggcaacaag

SEQ ID NO: 70556 - RNA, 18 nt, Human
auuucauuccuauuagga

SEQ ID NO: 70557 - RNA, 21 nt, Human
auuucauuccuauuaggaugg

SEQ ID NO: 70558 - RNA, 22 nt, Human
caaaacaacaacaacaacaaaa

SEQ ID NO: 70559 - RNA, 24 nt, Human
caaaaugcuaagcugccaaugagc

SEQ ID NO: 70560 - RNA, 19 nt, Human
caaaauuagcugggcaugg

SEQ ID NO: 70561 - RNA, 24 nt, Human
caaauucaaaacaacaacaacaac

SEQ ID NO: 70562 - RNA, 22 nt, Human
caacaacaacaacaaaaaaaca

SEQ ID NO: 70563 - RNA, 21 nt, Human
caacaagcaaacaaacaugca

SEQ ID NO: 70564 - RNA, 22 nt, Human
caacaagcaaacaaacaugcaa

SEQ ID NO: 70565 - RNA, 24 nt, Human
caauagaaauugagucauuucaca

SEQ ID NO: 70566 - RNA, 20 nt, Human
cacaacacuagaacaaagga

SEQ ID NO: 70567 - RNA, 22 nt, Human
cacacccuuuccucuucccaaa

SEQ ID NO: 70568 - RNA, 23 nt, Human
cacacccuuuccucuucccaaag

SEQ ID NO: 70569 - RNA, 23 nt, Human
cacacucauacauaaacauucuu

SEQ ID NO: 70570 - RNA, 21 nt, Human
cacccuacauacaaguuuaca

SEQ ID NO: 70571 - RNA, 22 nt, Human
caccugaggucuggaguucgag

SEQ ID NO: 70572 - RNA, 24 nt, Human
cacgccuguaaucccagcaguuug

SEQ ID NO: 70573 - RNA, 18 nt, Human
cagaagcuuaggcuucca

SEQ ID NO: 70574 - RNA, 24 nt, Human
cagcaguuugggaggccgaggugg

SEQ ID NO: 70575 - RNA, 24 nt, Human
cagcuacucgggaggcugaggcag

SEQ ID NO: 70576 - RNA, 23 nt, Human
cauaggcacuagucucaaagcug

SEQ ID NO: 70577 - RNA, 24 nt, Human
cauguucacacacccuuuccucuu

SEQ ID NO: 70578 - RNA, 18 nt, Human
cauugcacuccagccugg

SEQ ID NO: 70579 - RNA, 19 nt, Human
cauugcacuccagccuggg

SEQ ID NO: 70580 - RNA, 21 nt, Human
cauugcacuccagccugggca

SEQ ID NO: 70581 - RNA, 24 nt, Human
cauugcacuccagccugggcaaca

SEQ ID NO: 70582 - RNA, 22 nt, Human
cauugcuaucacaauccuaguu

SEQ ID NO: 70583 - RNA, 22 nt, Human
ccagcugguccuuaaaggugca

SEQ ID NO: 70584 - RNA, 20 nt, Human
ccauugcacuccagccuggg

SEQ ID NO: 70585 - RNA, 21 nt, Human
ccauugcacuccagccugggc

SEQ ID NO: 70586 - RNA, 23 nt, Human
ccauugcacuccagccugggcaa

SEQ ID NO: 70587 - RNA, 24 nt, Human
ccauugcacuccagccugggcaac

SEQ ID NO: 70588 - RNA, 20 nt, Human
cccaaaaaaaaaauaauaaa

SEQ ID NO: 70589 - RNA, 18 nt, Human
cccaucacacuugccaca

SEQ ID NO: 70590 - RNA, 21 nt, Human
ccccaggaaucacuacagccc

SEQ ID NO: 70591 - RNA, 22 nt, Human
ccgggaggcgaaggcugcagug

SEQ ID NO: 70592 - RNA, 22 nt, Human
ccuaguaaugaaguauguaaua

SEQ ID NO: 70593 - RNA, 18 nt, Human
ccucuugaguaggccacu

SEQ ID NO: 70594 - RNA, 23 nt, Human
ccugaccaauauggugaaacccc

SEQ ID NO: 70595 - RNA, 24 nt, Human
ccugaccaauauggugaaaccccg

SEQ ID NO: 70596 - RNA, 22 nt, Human
ccugcuggggcgcgaggugcag

SEQ ID NO: 70597 - RNA, 24 nt, Human
ccuggccaggcgcgguggcucacg

SEQ ID NO: 70598 - RNA, 22 nt, Human
ccuguaaucccagcaguuuggg

SEQ ID NO: 70599 - RNA, 21 nt, Human
ccuguaaucccagcuacucgg

SEQ ID NO: 70600 - RNA, 24 nt, Human
cgagaccagccugaccaauauggu

SEQ ID NO: 70601 - RNA, 24 nt, Human
cgaggugggcggaucaccugaggu

SEQ ID NO: 70602 - RNA, 24 nt, Human
cgccauugcacuccagccugggca

SEQ ID NO: 70603 - RNA, 24 nt, Human
cggaucaccugaggucuggaguuc

SEQ ID NO: 70604 - RNA, 21 nt, Human
cucacgccuguaaucccagca

SEQ ID NO: 70605 - RNA, 21 nt, Human
cucacgccuguaaucccagca

SEQ ID NO: 70606 - RNA, 23 nt, Human
cucuaaguuugaccgccugauuu

SEQ ID NO: 70607 - RNA, 21 nt, Human
cugaaacucuguaacagguga

SEQ ID NO: 70608 - RNA, 21 nt, Human
cugcacaauaaagaagcaaag

SEQ ID NO: 70609 - RNA, 22 nt, Human
gaaccaaaaaccauaugaaaga

SEQ ID NO: 70610 - RNA, 23 nt, Human
gagaaucacuugaacccgggagg

SEQ ID NO: 70611 - RNA, 18 nt, Human
gagauucaacacuggaaa

SEQ ID NO: 70612 - RNA, 22 nt, Human
gagauucaacacuggaaaaaua

SEQ ID NO: 70613 - RNA, 20 nt, Human
gaggcaauauauauggccuc

SEQ ID NO: 70614 - RNA, 18 nt, Human
gaucaccugaggucugga

SEQ ID NO: 70615 - RNA, 24 nt, Human
gaucaccugaggucuggaguucga

SEQ ID NO: 70616 - RNA, 20 nt, Human
gcaauuccuuugcaaaaugc

SEQ ID NO: 70617 - RNA, 23 nt, Human
gcaggagaaucacuugaacccgg

SEQ ID NO: 70618 - RNA, 25 nt, Human
gcaggccacuguaaaaacauguaau

SEQ ID NO: 70619 - RNA, 22 nt, Human
gccauugcacuccagccugggc

SEQ ID NO: 70620 - RNA, 24 nt, Human
gccauugcacuccagccugggcaa

SEQ ID NO: 70621 - RNA, 19 nt, Human
ggaaaucacaguuguaauc

SEQ ID NO: 70622 - RNA, 24 nt, Human
ggaagugaugcauaauuggaacau

SEQ ID NO: 70623 - RNA, 24 nt, Human
ggacacuccguccccaaaaaaaaa

SEQ ID NO: 70624 - RNA, 22 nt, Human
ggagcaugccuguaaucccagc

SEQ ID NO: 70625 - RNA, 23 nt, Human
ggaucaccugaggucuggaguuc

SEQ ID NO: 70626 - RNA, 23 nt, Human
ggcaugguggagcaugccuguaa

SEQ ID NO: 70627 - RNA, 21 nt, Human
ggcucacgccuguaaucccag

SEQ ID NO: 70628 - RNA, 20 nt, Human
gggaggccgaggugggcgga

SEQ ID NO: 70629 - RNA, 23 nt, Human
gggaggcugaggcaggagaauca

SEQ ID NO: 70630 - RNA, 24 nt, Human
gguggagcaugccuguaaucccag

SEQ ID NO: 70631 - RNA, 23 nt, Human
gguggcucacgccuguaauccca

SEQ ID NO: 70632 - RNA, 24 nt, Human
gguggcucacgccuguaaucccag

SEQ ID NO: 70633 - RNA, 22 nt, Human
ggugugauguggaucaaguuuu

SEQ ID NO: 70634 - RNA, 22 nt, Human
guaaaaacauguaaucugcaag

SEQ ID NO: 70635 - RNA, 25 nt, Human
guccccaaaaaaaaaauaauaaaaa

SEQ ID NO: 70636 - RNA, 20 nt, Human
guggagcaugccuguaaucc

SEQ ID NO: 70637 - RNA, 23 nt, Human
guggcucacgccuguaaucccag

SEQ ID NO: 70638 - RNA, 21 nt, Human
guuugggaggccgaggugggc

SEQ ID NO: 70639 - RNA, 18 nt, Human
uaaaaauacaaaauuagc

SEQ ID NO: 70640 - RNA, 19 nt, Human
uaaaaauacaaaauuagcu

SEQ ID NO: 70641 - RNA, 23 nt, Human
uaacacacauaggcacuagucuc

SEQ ID NO: 70642 - RNA, 20 nt, Human
uaauuucugucaauguucuc

SEQ ID NO: 70643 - RNA, 19 nt, Human
uacagcccagcugguccuu

SEQ ID NO: 70644 - RNA, 25 nt, Human
uaggaccagacacagcacaauaaau

SEQ ID NO: 70645 - RNA, 21 nt, Human
uagggccucuugaguaggcca

SEQ ID NO: 70646 - RNA, 20 nt, Human
uaguuugcugguagguuuaa

SEQ ID NO: 70647 - RNA, 21 nt, Human
uaucaguagauacaaaauuaa

SEQ ID NO: 70648 - RNA, 21 nt, Human
uauuucauauauugugugagc

SEQ ID NO: 70649 - RNA, 23 nt, Human
ucaaaacaacaacaacaacaaaa

SEQ ID NO: 70650 - RNA, 19 nt, Human
ucaaauucaaaacaacaac

SEQ ID NO: 70651 - RNA, 23 nt, Human
ucacgccauugcacuccagccug

SEQ ID NO: 70652 - RNA, 18 nt, Human
ucacuacagcccagcugg

SEQ ID NO: 70653 - RNA, 21 nt, Human
ucagauaaaggaagagggagg

SEQ ID NO: 70654 - RNA, 22 nt, Human
ucaggauggaaggaaauuuuca

SEQ ID NO: 70655 - RNA, 18 nt, Human
uccaaauucacugcaaag

SEQ ID NO: 70656 - RNA, 19 nt, Human
uccaagauguuuaaggaaa

SEQ ID NO: 70657 - RNA, 25 nt, Human
ucgggaggcugaggcaggagaauca

SEQ ID NO: 70658 - RNA, 19 nt, Human
ucguuauucaggauggaag

SEQ ID NO: 70659 - RNA, 22 nt, Human
ucuauucguuauucaggaugga

SEQ ID NO: 70660 - RNA, 18 nt, Human
ucucugguauuuuacugc

SEQ ID NO: 70661 - RNA, 22 nt, Human
ucugagaaaccucuuaagccag

SEQ ID NO: 70662 - RNA, 21 nt, Human
ucuguaacaggugaagggaga

SEQ ID NO: 70663 - RNA, 27 nt, Human
ugaaauaaacuaugcuuuaauaagaca

SEQ ID NO: 70664 - RNA, 23 nt, Human
ugaccaauauggugaaaccccgu

SEQ ID NO: 70665 - RNA, 25 nt, Human
ugacccagauucuguuaucaguagg

SEQ ID NO: 70666 - RNA, 18 nt, Human
ugagcuuaccacaauaga

SEQ ID NO: 70667 - RNA, 20 nt, Human
ugaggcaggagaaucacuug

SEQ ID NO: 70668 - RNA, 24 nt, Human
ugaggcaggagaaucacuugaacc

SEQ ID NO: 70669 - RNA, 25 nt, Human
ugaggcaggagaaucacuugaaccc

SEQ ID NO: 70670 - RNA, 21 nt, Human
ugcacaauaaagaagcaaagg

SEQ ID NO: 70671 - RNA, 19 nt, Human
ugcacuccagccugggcaa

SEQ ID NO: 70672 - RNA, 23 nt, Human
ugccuguaaucccagcuacucgg

SEQ ID NO: 70673 - RNA, 24 nt, Human
ugccuguaaucccagcuacucggg

SEQ ID NO: 70674 - RNA, 24 nt, Human
uggccaggcgcgguggcucacgcc

SEQ ID NO: 70675 - RNA, 24 nt, Human
uggcucacgccuguaaucccagca

SEQ ID NO: 70676 - RNA, 19 nt, Human
ugggaggccgaggugggcg

SEQ ID NO: 70677 - RNA, 24 nt, Human
ugggaggccgaggugggcggauca

SEQ ID NO: 70678 - RNA, 24 nt, Human
ugggcggaucaccugaggucugga

SEQ ID NO: 70679 - RNA, 24 nt, Human
ugguggagcaugccuguaauccca

SEQ ID NO: 70680 - RNA, 18 nt, Human
ugugagauucaacacugg

SEQ ID NO: 70681 - RNA, 20 nt, Human
uguucacacacccuuuccuc

SEQ ID NO: 70682 - RNA, 25 nt, Human
uguuuaaggaaaauaaacaggguga

SEQ ID NO: 70683 - RNA, 20 nt, Human
uuagcugggcaugguggagc

SEQ ID NO: 70684 - RNA, 24 nt, Human
uuagcugggcaugguggagcaugc

SEQ ID NO: 70685 - RNA, 25 nt, Human
uucaaaacaacaacaacaacaaaaa

SEQ ID NO: 70686 - RNA, 20 nt, Human
uucaacacuggaaaaauaca

SEQ ID NO: 70687 - RNA, 21 nt, Human
uucccaaagaggaagcaacgg

SEQ ID NO: 70688 - RNA, 21 nt, Human
uugcugguagguuuaagaaag

SEQ ID NO: 70689 - RNA, 25 nt, Human
uugggaggccgaggugggcggauca

SEQ ID NO: 70690 - RNA, 22 nt, Human
uuuaacacauucuuacuaaaga

SEQ ID NO: 70691 - RNA, 25 nt, Human
uuuacaguaguguaaccagaaugua

SEQ ID NO: 70692 - RNA, 20 nt, Human
uuucuacuaaaaauacaaaa

SEQ ID NO: 70693 - RNA, 23 nt, Human
aaaacuggcucuauucuuaauua

SEQ ID NO: 70694 - RNA, 20 nt, Human
aagcaagcaaaggauacuag

SEQ ID NO: 70695 - RNA, 20 nt, Human
aagcagcauagcaagugagc

SEQ ID NO: 70696 - RNA, 21 nt, Human
aagcagcauagcaagugagcu

SEQ ID NO: 70697 - RNA, 26 nt, Human
aagucaucuucaaauuuguguucuga

SEQ ID NO: 70698 - RNA, 18 nt, Human
acaccauuccccugugaa

SEQ ID NO: 70699 - RNA, 23 nt, Human
acgaaagucagacaacacaaaug

SEQ ID NO: 70700 - RNA, 22 nt, Human
acucugauuuuuuuaguacaca

SEQ ID NO: 70701 - RNA, 21 nt, Human
agaagcaagcaaaggauacua

SEQ ID NO: 70702 - RNA, 18 nt, Human
agaccuaaaauucuagug

SEQ ID NO: 70703 - RNA, 24 nt, Human
aguacgaccauacugcaacuuauu

SEQ ID NO: 70704 - RNA, 24 nt, Human
augauaucaauaaggaagagaccu

SEQ ID NO: 70705 - RNA, 19 nt, Human
caauaaaaagaaacuauau

SEQ ID NO: 70706 - RNA, 21 nt, Human
cacauauucuuuacaucauga

SEQ ID NO: 70707 - RNA, 23 nt, Human
caccacaauacaccuuugcacag

SEQ ID NO: 70708 - RNA, 21 nt, Human
caccuuugcacagguaauuuu

SEQ ID NO: 70709 - RNA, 19 nt, Human
cagguaccgaggcagacag

SEQ ID NO: 70710 - RNA, 19 nt, Human
caguaacuauucaacaguu

SEQ ID NO: 70711 - RNA, 22 nt, Human
cauacgaaagucagacaacaca

SEQ ID NO: 70712 - RNA, 18 nt, Human
ccuggaagcagcauagca

SEQ ID NO: 70713 - RNA, 22 nt, Human
cgaggcagacagccuagcggac

SEQ ID NO: 70714 - RNA, 24 nt, Human
cgaggcagacagccuagcggacgc

SEQ ID NO: 70715 - RNA, 23 nt, Human
cuauauauauauauuuuuuccuu

SEQ ID NO: 70716 - RNA, 22 nt, Human
gacaacacaaaugguuacaccu

SEQ ID NO: 70717 - RNA, 20 nt, Human
gagaauucaccuaggaaagg

SEQ ID NO: 70718 - RNA, 22 nt, Human
gcacaauaguaacaaauggaau

SEQ ID NO: 70719 - RNA, 18 nt, Human
gcaguaacagguaccgag

SEQ ID NO: 70720 - RNA, 22 nt, Human
uaaacucugauuuuuuuaguac

SEQ ID NO: 70721 - RNA, 20 nt, Human
uaaauacccaucauauacug

SEQ ID NO: 70722 - RNA, 23 nt, Human
uaacaaauggaauuaaugcauac

SEQ ID NO: 70723 - RNA, 21 nt, Human
uaacucucaaacagaacugua

SEQ ID NO: 70724 - RNA, 23 nt, Human
uaagaagcaagcaaaggauacua

SEQ ID NO: 70725 - RNA, 19 nt, Human
uacacacaccacaauacac

SEQ ID NO: 70726 - RNA, 22 nt, Human
uacccaucauauacugaaaagu

SEQ ID NO: 70727 - RNA, 18 nt, Human
uacugaaaagucaucuuc

SEQ ID NO: 70728 - RNA, 21 nt, Human
uagcacacacaaacacaagga

SEQ ID NO: 70729 - RNA, 23 nt, Human
uagcagcaguaacagguaccgag

SEQ ID NO: 70730 - RNA, 23 nt, Human
uaggaaaggggguaagaagcaag

SEQ ID NO: 70731 - RNA, 19 nt, Human
uauaacaaaauccuggaag

SEQ ID NO: 70732 - RNA, 18 nt, Human
ucagcgauccaucccuuc

SEQ ID NO: 70733 - RNA, 19 nt, Human
ugaaacguucagaaauccc

SEQ ID NO: 70734 - RNA, 21 nt, Human
ugaaacguucagaaaucccau

SEQ ID NO: 70735 - RNA, 20 nt, Human
ugagauacagaccacugugg

SEQ ID NO: 70736 - RNA, 25 nt, Human
ugugcacaauaguaacaaauggaau

SEQ ID NO: 70737 - RNA, 21 nt, Human
uguucugacccaaauuuggcu

SEQ ID NO: 70738 - RNA, 23 nt, Human
uuacacacaccacaauacaccuu

SEQ ID NO: 70739 - RNA, 24 nt, Human
uuccccugugaacagggcuuuugu

SEQ ID NO: 70740 - RNA, 23 nt, Human
aauacuggggcagugaagaggaa

SEQ ID NO: 70741 - RNA, 23 nt, Human
acaguaaagcgacuacugcugga

SEQ ID NO: 70742 - RNA, 18 nt, Human
acugcagggccaaacacc

SEQ ID NO: 70743 - RNA, 21 nt, Human
agacccaggaagcccaugcaa

SEQ ID NO: 70744 - RNA, 20 nt, Human
aggcaugagugacagagggg

SEQ ID NO: 70745 - RNA, 24 nt, Human
agggaaaacuucuaggccuaaaca

SEQ ID NO: 70746 - RNA, 19 nt, Human
caagaguggggacugcagg

SEQ ID NO: 70747 - RNA, 21 nt, Human
cacuuucagaagaacuggagg

SEQ ID NO: 70748 - RNA, 20 nt, Human
caggaagcccaugcaaccac

SEQ ID NO: 70749 - RNA, 21 nt, Human
cauaacucuuuuaauaaauaa

SEQ ID NO: 70750 - RNA, 23 nt, Human
caugcaaccaccaucugcccccu

SEQ ID NO: 70751 - RNA, 22 nt, Human
cccaggaagcccaugcaaccac

SEQ ID NO: 70752 - RNA, 20 nt, Human
ccuuaagccucaagaguggg

SEQ ID NO: 70753 - RNA, 24 nt, Human
cgacuacugcuggaaggaguggug

SEQ ID NO: 70754 - RNA, 18 nt, Human
cuacugcuggaaggagug

SEQ ID NO: 70755 - RNA, 22 nt, Human
ggagacccaggaagcccaugca

SEQ ID NO: 70756 - RNA, 23 nt, Human
ggugagagaaaucggcaaaggga

SEQ ID NO: 70757 - RNA, 21 nt, Human
uacagagacauucguguuucu

SEQ ID NO: 70758 - RNA, 21 nt, Human
uacagagcaauacuggggcag

SEQ ID NO: 70759 - RNA, 19 nt, Human
uacaugaagcuuuccacca

SEQ ID NO: 70760 - RNA, 18 nt, Human
uacugcuggaaggagugg

SEQ ID NO: 70761 - RNA, 24 nt, Human
uacuuuauaaccgcggguuccggu

SEQ ID NO: 70762 - RNA, 25 nt, Human
uaggcaaggcaugaguggcgaacac

SEQ ID NO: 70763 - RNA, 21 nt, Human
ucagaagcuuccacaucacag

SEQ ID NO: 70764 - RNA, 19 nt, Human
ugacagaggggcaucgcug

SEQ ID NO: 70765 - RNA, 21 nt, Human
ugcaaccaccaucugcccccu

SEQ ID NO: 70766 - RNA, 24 nt, Human
ugcagggccaaacaccaaauacau

SEQ ID NO: 70767 - RNA, 21 nt, Human
uggacacugucacacuuucag

SEQ ID NO: 70768 - RNA, 23 nt, Human
uggagacccaggaagcccaugca

SEQ ID NO: 70769 - RNA, 24 nt, Human
uggcuuagauuuuaaaucacauuu

SEQ ID NO: 70770 - RNA, 23 nt, Human
uggggcagugaagaggaagcuac

SEQ ID NO: 70771 - RNA, 19 nt, Human
aaaaacaaagagaggcuac

SEQ ID NO: 70772 - RNA, 26 nt, Human
aaagaaaaacaaagagaggcuacaaa

SEQ ID NO: 70773 - RNA, 21 nt, Human
aaagaacaacaaggagauuca

SEQ ID NO: 70774 - RNA, 22 nt, Human
aaagaacaacaaggagauucag

SEQ ID NO: 70775 - RNA, 20 nt, Human
aaagacaaagaucagcaaaa

SEQ ID NO: 70776 - RNA, 24 nt, Human
aaagacaaagaucagcaaaagaaa

SEQ ID NO: 70777 - RNA, 23 nt, Human
aaagaucagcaaaagaaaaacaa

SEQ ID NO: 70778 - RNA, 23 nt, Human
aaaugcaguuaucuaccuggaau

SEQ ID NO: 70779 - RNA, 25 nt, Human
aagaaaaacaaagagaggcuacaaa

SEQ ID NO: 70780 - RNA, 26 nt, Human
aagaaaaacaaagagaggcuacaaaa

SEQ ID NO: 70781 - RNA, 21 nt, Human
aagaagacagggauuauggug

SEQ ID NO: 70782 - RNA, 24 nt, Human
aagacaaagaucagcaaaagaaaa

SEQ ID NO: 70783 - RNA, 28 nt, Human
aagaucagcaaaagaaaaaccgguaccc

SEQ ID NO: 70784 - RNA, 23 nt, Human
aagugacagggucaagagaggga

SEQ ID NO: 70785 - RNA, 18 nt, Human
acaaagagaggcuacaaa

SEQ ID NO: 70786 - RNA, 18 nt, Human
acaaauuucacagagggu

SEQ ID NO: 70787 - RNA, 21 nt, Human
acccaaaggggccgccuggga

SEQ ID NO: 70788 - RNA, 22 nt, Human
accccugggucuuagugcuccc

SEQ ID NO: 70789 - RNA, 22 nt, Human
acugaagucaggauguuuucca

SEQ ID NO: 70790 - RNA, 24 nt, Human
agaaaaacaaagagaggcuacaaa

SEQ ID NO: 70791 - RNA, 22 nt, Human
agagaccaggcccaaagcugcg

SEQ ID NO: 70792 - RNA, 22 nt, Human
agagaggggcuaaauguaguca

SEQ ID NO: 70793 - RNA, 22 nt, Human
agcaaaagaaaaacaaagagag

SEQ ID NO: 70794 - RNA, 22 nt, Human
agcagcagagaccaggcccaaa

SEQ ID NO: 70795 - RNA, 18 nt, Human
agccagcaagugacaggg

SEQ ID NO: 70796 - RNA, 20 nt, Human
aggaaaggaggaaaaucuaa

SEQ ID NO: 70797 - RNA, 18 nt, Human
aggaagggcaugcauaug

SEQ ID NO: 70798 - RNA, 22 nt, Human
agugacagggucaagagaggga

SEQ ID NO: 70799 - RNA, 23 nt, Human
auuacaaauuucacagaggguuu

SEQ ID NO: 70800 - RNA, 18 nt, Human
auuggaggauuucuuuga

SEQ ID NO: 70801 - RNA, 24 nt, Human
caaaagaaaaacaaagagaggcua

SEQ ID NO: 70802 - RNA, 25 nt, Human
caaaagaaaaacaaagagaggcuac

SEQ ID NO: 70803 - RNA, 23 nt, Human
caagguaggcauuauuaucaucc

SEQ ID NO: 70804 - RNA, 21 nt, Human
cacagaggguuuaggugagaa

SEQ ID NO: 70805 - RNA, 19 nt, Human
cacucagccuccugcaccg

SEQ ID NO: 70806 - RNA, 21 nt, Human
cacugcuacaacaugcaagga

SEQ ID NO: 70807 - RNA, 24 nt, Human
cagaaggagucaggcccuacggug

SEQ ID NO: 70808 - RNA, 22 nt, Human
cagaaugauuccuaaucauuga

SEQ ID NO: 70809 - RNA, 24 nt, Human
cagcaaaagaaaaacaaagagagg

SEQ ID NO: 70810 - RNA, 20 nt, Human
cagcagagaccaggcccaaa

SEQ ID NO: 70811 - RNA, 20 nt, Human
caucggccagacacugaagu

SEQ ID NO: 70812 - RNA, 22 nt, Human
ccccaccgcuuacuucuccucc

SEQ ID NO: 70813 - RNA, 20 nt, Human
ccccccaccgcuuacuucuc

SEQ ID NO: 70814 - RNA, 18 nt, Human
ccccugggucuuagugcu

SEQ ID NO: 70815 - RNA, 18 nt, Human
cccugggucuuagugcuc

SEQ ID NO: 70816 - RNA, 20 nt, Human
ccugcaccgagugucucucc

SEQ ID NO: 70817 - RNA, 19 nt, Human
cgagugucucucccaaucu

SEQ ID NO: 70818 - RNA, 19 nt, Human
cgugaggaaacagcugugu

SEQ ID NO: 70819 - RNA, 24 nt, Human
cuaccccugggucuuagugcuccc

SEQ ID NO: 70820 - RNA, 22 nt, Human
cuauugaugacugguccuccuc

SEQ ID NO: 70821 - RNA, 29 nt, Human
cuccagcacuucuugcucaggcaguaccc

SEQ ID NO: 70822 - RNA, 22 nt, Human
cuccuccuuugccugcuucagu

SEQ ID NO: 70823 - RNA, 21 nt, Human
cuccucuccagcacuucuugc

SEQ ID NO: 70824 - RNA, 20 nt, Human
cucucccaaucucauccucc

SEQ ID NO: 70825 - RNA, 22 nt, Human
cucucccaaucucauccuccua

SEQ ID NO: 70826 - RNA, 18 nt, Human
cugugccuccuccuuugc

SEQ ID NO: 70827 - RNA, 21 nt, Human
cuuugagggagggaacuggca

SEQ ID NO: 70828 - RNA, 23 nt, Human
cuuuggggaaauaggaaaggagg

SEQ ID NO: 70829 - RNA, 22 nt, Human
gaacuggcagaaggagucaggc

SEQ ID NO: 70830 - RNA, 21 nt, Human
gaauuauaagagaggggcuaa

SEQ ID NO: 70831 - RNA, 23 nt, Human
gagcagcagagaccaggcccaaa

SEQ ID NO: 70832 - RNA, 18 nt, Human
gaucagcaaaagaaaaac

SEQ ID NO: 70833 - RNA, 21 nt, Human
gcaaaagaaaaacaaagagag

SEQ ID NO: 70834 - RNA, 24 nt, Human
gcaccgagugucucucccaaucuc

SEQ ID NO: 70835 - RNA, 19 nt, Human
gcagagaccaggcccaaag

SEQ ID NO: 70836 - RNA, 22 nt, Human
gcagcagagaccaggcccaaag

SEQ ID NO: 70837 - RNA, 19 nt, Human
gcaguuaucuaccuggaau

SEQ ID NO: 70838 - RNA, 22 nt, Human
gcuacuuacugaaucacugcua

SEQ ID NO: 70839 - RNA, 22 nt, Human
gcugcaguccuccacuaccccu

SEQ ID NO: 70840 - RNA, 23 nt, Human
gcugcaguccuccacuaccccug

SEQ ID NO: 70841 - RNA, 18 nt, Human
gcuuacuucuccuccucc

SEQ ID NO: 70842 - RNA, 23 nt, Human
ggaaaaucuaauaaagacaaaga

SEQ ID NO: 70843 - RNA, 19 nt, Human
ggcuacaaaaugcaguuau

SEQ ID NO: 70844 - RNA, 22 nt, Human
ggugucaaggauauagaaagga

SEQ ID NO: 70845 - RNA, 21 nt, Human
gucaggauguuuuccacauuc

SEQ ID NO: 70846 - RNA, 21 nt, Human
uaauaaagacaaagaucagca

SEQ ID NO: 70847 - RNA, 19 nt, Human
uacaaugggaaaguaaggu

SEQ ID NO: 70848 - RNA, 22 nt, Human
uaccaaguuaaguagcuugucc

SEQ ID NO: 70849 - RNA, 22 nt, Human
uaccagauggcucccacccccc

SEQ ID NO: 70850 - RNA, 19 nt, Human
uauaagugucacaggaaaa

SEQ ID NO: 70851 - RNA, 22 nt, Human
ucacagaggguuuaggugagaa

SEQ ID NO: 70852 - RNA, 22 nt, Human
ucagaaaauaacuagggucaca

SEQ ID NO: 70853 - RNA, 25 nt, Human
ucagcaaaagaaaaacaaagagagg

SEQ ID NO: 70854 - RNA, 22 nt, Human
uccacauuccuacuuccccaua

SEQ ID NO: 70855 - RNA, 19 nt, Human
ucccaccccccaccgcuua

SEQ ID NO: 70856 - RNA, 20 nt, Human
ugaggaaacagcuguguagg

SEQ ID NO: 70857 - RNA, 18 nt, Human
ugaugacugguccuccuc

SEQ ID NO: 70858 - RNA, 23 nt, Human
ugccuccuccuuugccugcuuca

SEQ ID NO: 70859 - RNA, 23 nt, Human
uggaauuauaagagaggggcuaa

SEQ ID NO: 70860 - RNA, 21 nt, Human
uggagaucagaaggucucugg

SEQ ID NO: 70861 - RNA, 19 nt, Human
ugggaaaagagaagaacca

SEQ ID NO: 70862 - RNA, 21 nt, Human
ugggagcagcagagaccaggc

SEQ ID NO: 70863 - RNA, 18 nt, Human
uggugggaggugauuuug

SEQ ID NO: 70864 - RNA, 19 nt, Human
ugucaaaguaccagauggc

SEQ ID NO: 70865 - RNA, 18 nt, Human
ugucaaggauauagaaag

SEQ ID NO: 70866 - RNA, 22 nt, Human
ugucaaggauauagaaaggaag

SEQ ID NO: 70867 - RNA, 23 nt, Human
uguccugguuucacagccagcaa

SEQ ID NO: 70868 - RNA, 19 nt, Human
uucacagccagcaagugac

SEQ ID NO: 70869 - RNA, 21 nt, Human
uugauuggaggauuucuuuga

SEQ ID NO: 70870 - RNA, 23 nt, Human
uuuugaaugcugucaaaguacca

SEQ ID NO: 70871 - RNA, 22 nt, Human
aaaaaacaaaauggaguaaaau

SEQ ID NO: 70872 - RNA, 21 nt, Human
aaaaaauucucuuaacauaca

SEQ ID NO: 70873 - RNA, 23 nt, Human
aaaacaaacaaaaacccaaaagg

SEQ ID NO: 70874 - RNA, 19 nt, Human
aaaagcaccugcaaggaca

SEQ ID NO: 70875 - RNA, 22 nt, Human
aaacaaaacaaacaaaaaccca

SEQ ID NO: 70876 - RNA, 23 nt, Human
aaacaaaacaaacaaaaacccaa

SEQ ID NO: 70877 - RNA, 30 nt, Human
aaacaagacucugucucaacaacaacaacc

SEQ ID NO: 70878 - RNA, 25 nt, Human
aaagaaacaaaacaaacaaaaaccc

SEQ ID NO: 70879 - RNA, 28 nt, Human
aaagaaacaaaacaaacaaaaacccaag

SEQ ID NO: 70880 - RNA, 21 nt, Human
aaaggauaaaagagaaaaggg

SEQ ID NO: 70881 - RNA, 21 nt, Human
aacaacaacaacaacaacaaa

SEQ ID NO: 70882 - RNA, 24 nt, Human
aacaacaacaacaacaacaacaac

SEQ ID NO: 70883 - RNA, 27 nt, Human
aacaacaacaacaacaacaacaacaac

SEQ ID NO: 70884 - RNA, 19 nt, Human
aacauggcgaaaccccguc

SEQ ID NO: 70885 - RNA, 20 nt, Human
aacauggcgaaaccccgucu

SEQ ID NO: 70886 - RNA, 21 nt, Human
aacauggcgaaaccccgucuc

SEQ ID NO: 70887 - RNA, 18 nt, Human
aacccaaaaggagugauu

SEQ ID NO: 70888 - RNA, 18 nt, Human
aacucaugcuugugcucu

SEQ ID NO: 70889 - RNA, 19 nt, Human
aacugcuugaggugggugg

SEQ ID NO: 70890 - RNA, 22 nt, Human
aagaaaaaucauuuuaaagcau

SEQ ID NO: 70891 - RNA, 20 nt, Human
aagaacucaugcuugugcuc

SEQ ID NO: 70892 - RNA, 22 nt, Human
aagaaguccauccccuaccccc

SEQ ID NO: 70893 - RNA, 20 nt, Human
aagacauauuggagcaucua

SEQ ID NO: 70894 - RNA, 19 nt, Human
aagagcaugagaaaaaucc

SEQ ID NO: 70895 - RNA, 21 nt, Human
aagcaccugcaaggacaagga

SEQ ID NO: 70896 - RNA, 19 nt, Human
aagcaugaauaucuucaug

SEQ ID NO: 70897 - RNA, 19 nt, Human
aaggagcaaaauauuagaa

SEQ ID NO: 70898 - RNA, 25 nt, Human
aauaaauaauaaaacucaaacugaa

SEQ ID NO: 70899 - RNA, 21 nt, Human
acaaaacaaacaaaaacccaa

SEQ ID NO: 70900 - RNA, 23 nt, Human
acaaaacaaacaaaaacccaaaa

SEQ ID NO: 70901 - RNA, 24 nt, Human
acaaaacaaacaaaaacccaaaag

SEQ ID NO: 70902 - RNA, 23 nt, Human
acaaaagaagacauauuggagca

SEQ ID NO: 70903 - RNA, 24 nt, Human
acaaacaaaaacccaaaaggagug

SEQ ID NO: 70904 - RNA, 18 nt, Human
acaaauuuaggcugggca

SEQ ID NO: 70905 - RNA, 26 nt, Human
acaacaacaacaacaaacaaauuuag

SEQ ID NO: 70906 - RNA, 19 nt, Human
acaacaacaacaacaacaa

SEQ ID NO: 70907 - RNA, 19 nt, Human
acaacaacaacaacaacaa

SEQ ID NO: 70908 - RNA, 19 nt, Human
acaacaacaacaacaacaa

SEQ ID NO: 70909 - RNA, 19 nt, Human
acaacaacaacaacaacaa

SEQ ID NO: 70910 - RNA, 19 nt, Human
acaacaacaacaacaacaa

SEQ ID NO: 70911 - RNA, 19 nt, Human
acaacaacaacaacaacaa

SEQ ID NO: 70912 - RNA, 23 nt, Human
acaacaacaacaacaacaaacaa

SEQ ID NO: 70913 - RNA, 22 nt, Human
acaacaacaacaacaacaacaa

SEQ ID NO: 70914 - RNA, 22 nt, Human
acaacaacaacaacaacaacaa

SEQ ID NO: 70915 - RNA, 22 nt, Human
acaacaacaacaacaacaacaa

SEQ ID NO: 70916 - RNA, 23 nt, Human
acaagacucugucucaacaacaa

SEQ ID NO: 70917 - RNA, 20 nt, Human
acaagcuccuaaauuugcca

SEQ ID NO: 70918 - RNA, 20 nt, Human
acaguagcugcggcugcggc

SEQ ID NO: 70919 - RNA, 24 nt, Human
accaaacaaucaauguucaacagc

SEQ ID NO: 70920 - RNA, 19 nt, Human
accccgucucuacugaaaa

SEQ ID NO: 70921 - RNA, 21 nt, Human
acugaagaacaagaacucaug

SEQ ID NO: 70922 - RNA, 18 nt, Human
acugcacuccagccuggg

SEQ ID NO: 70923 - RNA, 23 nt, Human
acugcacuccagccugggcugca

SEQ ID NO: 70924 - RNA, 19 nt, Human
acugcagaaaguuagugua

SEQ ID NO: 70925 - RNA, 24 nt, Human
agaaaaaaacaaaauggaguaaaa

SEQ ID NO: 70926 - RNA, 26 nt, Human
agaaaaaauucucuuaacauacauuu

SEQ ID NO: 70927 - RNA, 18 nt, Human
agagguugcagugagcca

SEQ ID NO: 70928 - RNA, 20 nt, Human
agagguugcagugagccaag

SEQ ID NO: 70929 - RNA, 22 nt, Human
agagguugcagugagccaagau

SEQ ID NO: 70930 - RNA, 24 nt, Human
agagguugcagugagccaagaugg

SEQ ID NO: 70931 - RNA, 22 nt, Human
agauggugccacugcacuccag

SEQ ID NO: 70932 - RNA, 20 nt, Human
agccugggcugcaaaacaag

SEQ ID NO: 70933 - RNA, 24 nt, Human
agccugggcugcaaaacaagacuc

SEQ ID NO: 70934 - RNA, 20 nt, Human
aggcagagguugcagugagc

SEQ ID NO: 70935 - RNA, 24 nt, Human
aggcagagguugcagugagccaag

SEQ ID NO: 70936 - RNA, 21 nt, Human
aggccaaggcggguggaucac

SEQ ID NO: 70937 - RNA, 22 nt, Human
aggcggguggaucaccugaggg

SEQ ID NO: 70938 - RNA, 22 nt, Human
aggcggguggaucaccugaggu

SEQ ID NO: 70939 - RNA, 25 nt, Human
aggcugaggcagggagaauuccuug

SEQ ID NO: 70940 - RNA, 19 nt, Human
aguagauggauauugcaca

SEQ ID NO: 70941 - RNA, 24 nt, Human
agugaaaaaacaaaaauauacugg

SEQ ID NO: 70942 - RNA, 21 nt, Human
auacuacuacucuagcugugu

SEQ ID NO: 70943 - RNA, 24 nt, Human
auauauguguguauauauauaugu

SEQ ID NO: 70944 - RNA, 18 nt, Human
auauguauguauguguau

SEQ ID NO: 70945 - RNA, 22 nt, Human
auauguguguauauauauaugu

SEQ ID NO: 70946 - RNA, 20 nt, Human
aucaccugagguuaggaguu

SEQ ID NO: 70947 - RNA, 22 nt, Human
aucccagcacuuugggaggcca

SEQ ID NO: 70948 - RNA, 22 nt, Human
augggaggcagggaacccuaca

SEQ ID NO: 70949 - RNA, 24 nt, Human
auggugccacugcacuccagccug

SEQ ID NO: 70950 - RNA, 23 nt, Human
auguguauguacauauauaugug

SEQ ID NO: 70951 - RNA, 19 nt, Human
auuacauuccugguuucuc

SEQ ID NO: 70952 - RNA, 22 nt, Human
caaaacaagacucugucucaac

SEQ ID NO: 70953 - RNA, 22 nt, Human
caaaagaagacauauuggagca

SEQ ID NO: 70954 - RNA, 20 nt, Human
caaacaaaaacccaaaagga

SEQ ID NO: 70955 - RNA, 19 nt, Human
caaaguguuauacucaauu

SEQ ID NO: 70956 - RNA, 27 nt, Human
caacaacaacaacaaacaaauuuagug

SEQ ID NO: 70957 - RNA, 18 nt, Human
caacaacaacaacaacaa

SEQ ID NO: 70958 - RNA, 18 nt, Human
caacaacaacaacaacaa

SEQ ID NO: 70959 - RNA, 24 nt, Human
caacaacaacaacaacaacaaaca

SEQ ID NO: 70960 - RNA, 23 nt, Human
caacaacaacaacaacaacaaca

SEQ ID NO: 70961 - RNA, 23 nt, Human
caacaacaacaacaacaacaaca

SEQ ID NO: 70962 - RNA, 23 nt, Human
caacaacaacaacaacaacaaca

SEQ ID NO: 70963 - RNA, 25 nt, Human
caacaacaacaacaacaacaacaac

SEQ ID NO: 70964 - RNA, 24 nt, Human
caacauggcgaaaccccgucucua

SEQ ID NO: 70965 - RNA, 24 nt, Human
caacuuggcaggagugaacugaaa

SEQ ID NO: 70966 - RNA, 21 nt, Human
caagaccaagaggaugacucc

SEQ ID NO: 70967 - RNA, 21 nt, Human
caagauugccaaaaagacuug

SEQ ID NO: 70968 - RNA, 20 nt, Human
caaggaugcagggagaaugg

SEQ ID NO: 70969 - RNA, 21 nt, Human
caaggcggguggaucaccuga

SEQ ID NO: 70970 - RNA, 24 nt, Human
caaggcggguggaucaccugaggu

SEQ ID NO: 70971 - RNA, 22 nt, Human
caauaugaauacaagaccaaga

SEQ ID NO: 70972 - RNA, 18 nt, Human
cacaaucggagaagucac

SEQ ID NO: 70973 - RNA, 24 nt, Human
cacaccuguaaucccagcacuuug

SEQ ID NO: 70974 - RNA, 21 nt, Human
cacaguagcugcggcugcggc

SEQ ID NO: 70975 - RNA, 23 nt, Human
caccuguaaucccagcacuuugg

SEQ ID NO: 70976 - RNA, 24 nt, Human
caccuguaaucccagcacuuuggg

SEQ ID NO: 70977 - RNA, 24 nt, Human
caccuguaauccuagcuacucagg

SEQ ID NO: 70978 - RNA, 18 nt, Human
cacugcacuccagccugg

SEQ ID NO: 70979 - RNA, 19 nt, Human
cacugcacuccagccuggg

SEQ ID NO: 70980 - RNA, 24 nt, Human
cacugcacuccagccugggcugca

SEQ ID NO: 70981 - RNA, 27 nt, Human
cacugcacuccagccugggcugcaaaa

SEQ ID NO: 70982 - RNA, 21 nt, Human
cagagaaaaaaacaaaaugga

SEQ ID NO: 70983 - RNA, 21 nt, Human
cagauaaacgcaacucaaaua

SEQ ID NO: 70984 - RNA, 24 nt, Human
cagcacuuugggaggccaaggcgg

SEQ ID NO: 70985 - RNA, 21 nt, Human
caguaaccagaugccucaccc

SEQ ID NO: 70986 - RNA, 18 nt, Human
cauaaguaauagaaaaaa

SEQ ID NO: 70987 - RNA, 25 nt, Human
cauaugaauaaagaauacuuuuuaa

SEQ ID NO: 70988 - RNA, 19 nt, Human
caucuaaaaaagcaccugc

SEQ ID NO: 70989 - RNA, 21 nt, Human
cauguguauauaugaaaggau

SEQ ID NO: 70990 - RNA, 24 nt, Human
cauucuauacauaugaauaaagaa

SEQ ID NO: 70991 - RNA, 18 nt, Human
cauugcuccccagugggc

SEQ ID NO: 70992 - RNA, 19 nt, Human
cauuuuugauuuuaagccu

SEQ ID NO: 70993 - RNA, 20 nt, Human
ccacugcacuccagccuggg

SEQ ID NO: 70994 - RNA, 21 nt, Human
ccacugcacuccagccugggc

SEQ ID NO: 70995 - RNA, 21 nt, Human
ccacugcacuccagccugggc

SEQ ID NO: 70996 - RNA, 21 nt, Human
ccacugcacuccagccugggc

SEQ ID NO: 70997 - RNA, 24 nt, Human
ccacugcacuccagccugggcugc

SEQ ID NO: 70998 - RNA, 24 nt, Human
ccgucucuacugaaaaauaugaaa

SEQ ID NO: 70999 - RNA, 21 nt, Human
ccuaauauaagagcaugagaa

SEQ ID NO: 71000 - RNA, 22 nt, Human
ccuaugguuaaaccucuggaac

SEQ ID NO: 71001 - RNA, 21 nt, Human
ccugacuaaaagcuagcuacu

SEQ ID NO: 71002 - RNA, 22 nt, Human
ccugagguuaggaguuuaagac

SEQ ID NO: 71003 - RNA, 24 nt, Human
ccugcaauaaauaaggcacaucua

SEQ ID NO: 71004 - RNA, 24 nt, Human
ccugcaauaaauaaggccgggguc

SEQ ID NO: 71005 - RNA, 24 nt, Human
cggguggaucaccugagguuagga

SEQ ID NO: 71006 - RNA, 21 nt, Human
cuacaauacuacuacucuagc

SEQ ID NO: 71007 - RNA, 26 nt, Human
cuauuuuuaaacaguuucaacuguuu

SEQ ID NO: 71008 - RNA, 22 nt, Human
cucacaccuguaaucccagcac

SEQ ID NO: 71009 - RNA, 24 nt, Human
cucacaccuguaaucccagcacuu

SEQ ID NO: 71010 - RNA, 19 nt, Human
cuccccagugggcagggau

SEQ ID NO: 71011 - RNA, 23 nt, Human
cugggcauggaggcucacaccug

SEQ ID NO: 71012 - RNA, 21 nt, Human
cuguaauccuagcuacucagg

SEQ ID NO: 71013 - RNA, 25 nt, Human
cuucaaauuuuucauuuucuucuuc

SEQ ID NO: 71014 - RNA, 19 nt, Human
gaaaccccgucucuacuga

SEQ ID NO: 71015 - RNA, 28 nt, Human
gaacaagcuccuaaauuugccaaccaca

SEQ ID NO: 71016 - RNA, 24 nt, Human
gaaguccauccccuacccccaccu

SEQ ID NO: 71017 - RNA, 18 nt, Human
gaccuuuaaggucuuuug

SEQ ID NO: 71018 - RNA, 20 nt, Human
gagaaggaggcaugcuucuu

SEQ ID NO: 71019 - RNA, 20 nt, Human
gagcaucuaaaaaagcaccu

SEQ ID NO: 71020 - RNA, 21 nt, Human
gaucaccugagguuaggaguu

SEQ ID NO: 71021 - RNA, 23 nt, Human
gaucaccugagguuaggaguuua

SEQ ID NO: 71022 - RNA, 24 nt, Human
gaucaccugagguuaggaguuuaa

SEQ ID NO: 71023 - RNA, 21 nt, Human
gauucccuccauaaucaccuc

SEQ ID NO: 71024 - RNA, 24 nt, Human
gccaacauggcgaaaccccgucuc

SEQ ID NO: 71025 - RNA, 22 nt, Human
gccacugcacuccagccugggc

SEQ ID NO: 71026 - RNA, 22 nt, Human
gcuaaaaagcgucauaaccuag

SEQ ID NO: 71027 - RNA, 20 nt, Human
gcuccaacaaagcucacaca

SEQ ID NO: 71028 - RNA, 19 nt, Human
gcuguguucaacugcuuga

SEQ ID NO: 71029 - RNA, 24 nt, Human
ggaggcucacaccuguaaucccag

SEQ ID NO: 71030 - RNA, 23 nt, Human
ggcauggaggcucacaccuguaa

SEQ ID NO: 71031 - RNA, 21 nt, Human
ggcucacaccuguaaucccag

SEQ ID NO: 71032 - RNA, 23 nt, Human
ggcucacaccuguaaucccagca

SEQ ID NO: 71033 - RNA, 24 nt, Human
gguggcaggcaccuguaauccuag

SEQ ID NO: 71034 - RNA, 23 nt, Human
ggugugguggcaggcaccuguaa

SEQ ID NO: 71035 - RNA, 18 nt, Human
gucaaauaaaaaaaaaau

SEQ ID NO: 71036 - RNA, 25 nt, Human
gugaaaaaacaaaaauauacuggaa

SEQ ID NO: 71037 - RNA, 23 nt, Human
guggcagcgauaaauccacguac

SEQ ID NO: 71038 - RNA, 19 nt, Human
guguauguacauauauaug

SEQ ID NO: 71039 - RNA, 22 nt, Human
uaaaaaagcaccugcaaggaca

SEQ ID NO: 71040 - RNA, 20 nt, Human
uaaaaaauuaaagcacaaua

SEQ ID NO: 71041 - RNA, 21 nt, Human
uaaaauaaccaguaaccagau

SEQ ID NO: 71042 - RNA, 23 nt, Human
uaaacgcaacucaaauagaaucc

SEQ ID NO: 71043 - RNA, 19 nt, Human
uaaacugguuagcucgaaa

SEQ ID NO: 71044 - RNA, 23 nt, Human
uaaauagucuuacaaguaccaac

SEQ ID NO: 71045 - RNA, 19 nt, Human
uaacugaagaacaagaacu

SEQ ID NO: 71046 - RNA, 20 nt, Human
uaacugaagaacaagaacuc

SEQ ID NO: 71047 - RNA, 19 nt, Human
uaaggugccacauagguga

SEQ ID NO: 71048 - RNA, 18 nt, Human
uaagguugagacgccugg

SEQ ID NO: 71049 - RNA, 21 nt, Human
uaauaauggaagaauaacugg

SEQ ID NO: 71050 - RNA, 21 nt, Human
uacaaaaggcauuuguuauca

SEQ ID NO: 71051 - RNA, 21 nt, Human
uacaagcugcuauucccacug

SEQ ID NO: 71052 - RNA, 21 nt, Human
uacauauauauguguguauau

SEQ ID NO: 71053 - RNA, 23 nt, Human
uacaucuugagacuacaauacua

SEQ ID NO: 71054 - RNA, 21 nt, Human
uaccaaacaaucaauguucaa

SEQ ID NO: 71055 - RNA, 26 nt, Human
uaccaggcacucacaagggaauuucu

SEQ ID NO: 71056 - RNA, 20 nt, Human
uacugaaaaauaugaaaauu

SEQ ID NO: 71057 - RNA, 19 nt, Human
uacuuaaaaauguagaaaa

SEQ ID NO: 71058 - RNA, 25 nt, Human
uagaaaagaaacaaaacaaacaaaa

SEQ ID NO: 71059 - RNA, 23 nt, Human
uagaaucccuaauauaagagcau

SEQ ID NO: 71060 - RNA, 22 nt, Human
uagcagcagcuuugcuucuggu

SEQ ID NO: 71061 - RNA, 24 nt, Human
uagcuacucaggaggcugaggcag

SEQ ID NO: 71062 - RNA, 21 nt, Human
uagcucgaaagaaaauaacaa

SEQ ID NO: 71063 - RNA, 22 nt, Human
uauauacuagcaaaguguuaua

SEQ ID NO: 71064 - RNA, 18 nt, Human
uauauauauauguaugug

SEQ ID NO: 71065 - RNA, 24 nt, Human
uauauauauguaugugaauacaca

SEQ ID NO: 71066 - RNA, 22 nt, Human
uauauauguguguauauauaua

SEQ ID NO: 71067 - RNA, 20 nt, Human
uauauguguguauauauaua

SEQ ID NO: 71068 - RNA, 30 nt, Human
uaucaagaaaaaucauuuuaaagcaugauu

SEQ ID NO: 71069 - RNA, 23 nt, Human
uaucuucaauauuuugaguucaa

SEQ ID NO: 71070 - RNA, 22 nt, Human
uaucuucagacuaagggcaugg

SEQ ID NO: 71071 - RNA, 28 nt, Human
uauguacauauauauguguguauauaau

SEQ ID NO: 71072 - RNA, 18 nt, Human
uauguauguauguguaug

SEQ ID NO: 71073 - RNA, 20 nt, Human
uauguauguauguguaugua

SEQ ID NO: 71074 - RNA, 24 nt, Human
uauguauguauguguauguacaua

SEQ ID NO: 71075 - RNA, 24 nt, Human
uauguauguguauguacauauaua

SEQ ID NO: 71076 - RNA, 20 nt, Human
uauguguauguacauauaua

SEQ ID NO: 71077 - RNA, 22 nt, Human
uauguguguauauauauaugua

SEQ ID NO: 71078 - RNA, 23 nt, Human
uauguguguauauauauauguau

SEQ ID NO: 71079 - RNA, 26 nt, Human
uauuaaauuauauauacuagcaaagu

SEQ ID NO: 71080 - RNA, 19 nt, Human
ucaacaacaacaacaacaa

SEQ ID NO: 71081 - RNA, 21 nt, Human
ucaaugaaaaaccacccuaaa

SEQ ID NO: 71082 - RNA, 25 nt, Human
ucagugaaauggguuugccuuucua

SEQ ID NO: 71083 - RNA, 18 nt, Human
ucauaccagauggaggga

SEQ ID NO: 71084 - RNA, 25 nt, Human
uccacugcuguuuucgguaccaaac

SEQ ID NO: 71085 - RNA, 21 nt, Human
uccgguaggcagagguugcag

SEQ ID NO: 71086 - RNA, 20 nt, Human
uccuugaauccgguaggcag

SEQ ID NO: 71087 - RNA, 24 nt, Human
ucuccuguaaagacagcuucucuu

SEQ ID NO: 71088 - RNA, 22 nt, Human
ucugaccaguguauuagcuacc

SEQ ID NO: 71089 - RNA, 22 nt, Human
ugaaaaaacaaaaauauacugg

SEQ ID NO: 71090 - RNA, 23 nt, Human
ugaaaaaacaaaaauauacugga

SEQ ID NO: 71091 - RNA, 22 nt, Human
ugaaaauuagccggguguggug

SEQ ID NO: 71092 - RNA, 20 nt, Human
ugaaagacagcauggaauaa

SEQ ID NO: 71093 - RNA, 21 nt, Human
ugaaagacagcauggaauaag

SEQ ID NO: 71094 - RNA, 19 nt, Human
ugaaagcauggaggauggc

SEQ ID NO: 71095 - RNA, 21 nt, Human
ugaaggcacauccuuggcaga

SEQ ID NO: 71096 - RNA, 18 nt, Human
ugaauacacagaaauaca

SEQ ID NO: 71097 - RNA, 23 nt, Human
ugaauacagaagagugauaaaug

SEQ ID NO: 71098 - RNA, 22 nt, Human
ugaaugcugugucagugcauga

SEQ ID NO: 71099 - RNA, 27 nt, Human
ugacaaguuaaacuggcagcacucucc

SEQ ID NO: 71100 - RNA, 18 nt, Human
ugaccaguguauuagcua

SEQ ID NO: 71101 - RNA, 19 nt, Human
ugagcagaaaaggcucaua

SEQ ID NO: 71102 - RNA, 23 nt, Human
ugagcagaaaaggcucauaaugu

SEQ ID NO: 71103 - RNA, 21 nt, Human
ugaggcagggagaauuccuug

SEQ ID NO: 71104 - RNA, 26 nt, Human
ugaggcagggagaauuccuugaaucc

SEQ ID NO: 71105 - RNA, 21 nt, Human
ugauucccuccauaaucaccu

SEQ ID NO: 71106 - RNA, 22 nt, Human
ugauucccuccauaaucaccuc

SEQ ID NO: 71107 - RNA, 24 nt, Human
ugauuuuaagccuguauacagaaa

SEQ ID NO: 71108 - RNA, 22 nt, Human
ugcaaaacaagacucugucuca

SEQ ID NO: 71109 - RNA, 23 nt, Human
ugcaaaacaagacucugucucaa

SEQ ID NO: 71110 - RNA, 18 nt, Human
ugccagauguuggguuag

SEQ ID NO: 71111 - RNA, 23 nt, Human
ugcucuagaaaaaugauuuuuuu

SEQ ID NO: 71112 - RNA, 19 nt, Human
uggaaacaucuugucuaca

SEQ ID NO: 71113 - RNA, 24 nt, Human
uggaggauggcauaggcauugguc

SEQ ID NO: 71114 - RNA, 24 nt, Human
uggaggcucacaccuguaauccca

SEQ ID NO: 71115 - RNA, 23 nt, Human
uggaucaccugagguuaggaguu

SEQ ID NO: 71116 - RNA, 24 nt, Human
uggaucaccugagguuaggaguuu

SEQ ID NO: 71117 - RNA, 24 nt, Human
uggcaggagugaacugaaacugag

SEQ ID NO: 71118 - RNA, 21 nt, Human
uggcuacauauuacuuaaagc

SEQ ID NO: 71119 - RNA, 24 nt, Human
ugggaggccaaggcggguggauca

SEQ ID NO: 71120 - RNA, 20 nt, Human
ugggcauggaggcucacacc

SEQ ID NO: 71121 - RNA, 22 nt, Human
ugggugggagggagaaggaggc

SEQ ID NO: 71122 - RNA, 21 nt, Human
ugguagaggauucaaaugugg

SEQ ID NO: 71123 - RNA, 22 nt, Human
ugguggcaggcaccuguaaucc

SEQ ID NO: 71124 - RNA, 19 nt, Human
uguagaaaagaaacaaaac

SEQ ID NO: 71125 - RNA, 19 nt, Human
uguauauauauauguaugu

SEQ ID NO: 71126 - RNA, 19 nt, Human
uguauguacauauauaugu

SEQ ID NO: 71127 - RNA, 18 nt, Human
uguauguauguguaugua

SEQ ID NO: 71128 - RNA, 21 nt, Human
uguauguauguguauguacau

SEQ ID NO: 71129 - RNA, 20 nt, Human
uguauguguauguacauaua

SEQ ID NO: 71130 - RNA, 27 nt, Human
uguauguguauguacauauauaugugu

SEQ ID NO: 71131 - RNA, 22 nt, Human
ugugccagauguuggguuagcc

SEQ ID NO: 71132 - RNA, 19 nt, Human
uguguauauauauauguau

SEQ ID NO: 71133 - RNA, 19 nt, Human
uguguauauauauauguau

SEQ ID NO: 71134 - RNA, 25 nt, Human
uguguauauauauauguaugugaau

SEQ ID NO: 71135 - RNA, 18 nt, Human
uguguauguacauauaua

SEQ ID NO: 71136 - RNA, 18 nt, Human
uguguauguacauauaua

SEQ ID NO: 71137 - RNA, 23 nt, Human
uguguauguacauauauaugugu

SEQ ID NO: 71138 - RNA, 23 nt, Human
uguguauguacauauauaugugu

SEQ ID NO: 71139 - RNA, 21 nt, Human
uguguguauauauauauguau

SEQ ID NO: 71140 - RNA, 23 nt, Human
uguguguauauauauauguaugu

SEQ ID NO: 71141 - RNA, 19 nt, Human
uuaaaguuuuggaaacauc

SEQ ID NO: 71142 - RNA, 22 nt, Human
uuaccgaguacaaauccuaugu

SEQ ID NO: 71143 - RNA, 18 nt, Human
uuagccgggugugguggc

SEQ ID NO: 71144 - RNA, 24 nt, Human
uuagccgggugugguggcaggcac

SEQ ID NO: 71145 - RNA, 19 nt, Human
uucacaaaugacacaccau

SEQ ID NO: 71146 - RNA, 19 nt, Human
uucacaaaugacacaccau

SEQ ID NO: 71147 - RNA, 20 nt, Human
uuccucauuacauuccuggu

SEQ ID NO: 71148 - RNA, 24 nt, Human
uucuguucuuguuguaagagcuga

SEQ ID NO: 71149 - RNA, 20 nt, Human
uugaaggcacauccuuggca

SEQ ID NO: 71150 - RNA, 22 nt, Human
uugagacgccugguuuuggcua

SEQ ID NO: 71151 - RNA, 22 nt, Human
uugcagugagccaagauggugc

SEQ ID NO: 71152 - RNA, 19 nt, Human
uuuacccuaucagcucugu

SEQ ID NO: 71153 - RNA, 24 nt, Human
uuuuucuauuuuguaaaauaauac

SEQ ID NO: 71154 - RNA, 25 nt, Human
aaaaaagaacucuccucaacuugaa

SEQ ID NO: 71155 - RNA, 22 nt, Human
aaaacccugcaaaaacuauaug

SEQ ID NO: 71156 - RNA, 23 nt, Human
aaagaacucuccucaacuugaag

SEQ ID NO: 71157 - RNA, 22 nt, Human
aaagcuggaggcuagcucagcc

SEQ ID NO: 71158 - RNA, 19 nt, Human
aaaggaacagacuaugcag

SEQ ID NO: 71159 - RNA, 23 nt, Human
aacacucuauugagaagccaaca

SEQ ID NO: 71160 - RNA, 25 nt, Human
aaccaacuucagagucuaaaacuga

SEQ ID NO: 71161 - RNA, 26 nt, Human
aaccauccaaggugaaggucagauga

SEQ ID NO: 71162 - RNA, 26 nt, Human
aacccugcaaaaacuauauguaaaaa

SEQ ID NO: 71163 - RNA, 21 nt, Human
aacuauauguaaaaagugaaa

SEQ ID NO: 71164 - RNA, 19 nt, Human
aagaguguggcaagcuccc

SEQ ID NO: 71165 - RNA, 21 nt, Human
aagcaaaaaagaacucuccuc

SEQ ID NO: 71166 - RNA, 22 nt, Human
aagcagaggucugugaggaggg

SEQ ID NO: 71167 - RNA, 24 nt, Human
aagcagguucaagcugaaaugcac

SEQ ID NO: 71168 - RNA, 24 nt, Human
aagcugaaaugcacacuccagagc

SEQ ID NO: 71169 - RNA, 23 nt, Human
aagugcauucugaguugaaacaa

SEQ ID NO: 71170 - RNA, 26 nt, Human
aauggacaaugaaaaaaaucacuaaa

SEQ ID NO: 71171 - RNA, 21 nt, Human
acaaggaaaacacaaucaaca

SEQ ID NO: 71172 - RNA, 21 nt, Human
acaaugaauagaucaccuggu

SEQ ID NO: 71173 - RNA, 18 nt, Human
acacaacguuuauggucc

SEQ ID NO: 71174 - RNA, 20 nt, Human
acacuccagagcauuggaga

SEQ ID NO: 71175 - RNA, 19 nt, Human
acccugcugguugguuggg

SEQ ID NO: 71176 - RNA, 29 nt, Human
accugagguaaacuguggucucagaaacc

SEQ ID NO: 71177 - RNA, 25 nt, Human
acuagaguccaagacaaagcccagu

SEQ ID NO: 71178 - RNA, 21 nt, Human
acuaugcaggaagaaagcaac

SEQ ID NO: 71179 - RNA, 21 nt, Human
agaacucuccucaacuugaag

SEQ ID NO: 71180 - RNA, 24 nt, Human
agacuauguacgaagaaaggaaca

SEQ ID NO: 71181 - RNA, 24 nt, Human
agcaagcauaaagagaggacacaa

SEQ ID NO: 71182 - RNA, 21 nt, Human
agccaaggacuagaguccaag

SEQ ID NO: 71183 - RNA, 23 nt, Human
agguaaacuguggucucagaaac

SEQ ID NO: 71184 - RNA, 21 nt, Human
aguaauggacaaugaaaaaaa

SEQ ID NO: 71185 - RNA, 18 nt, Human
auaaaacccugcaaaaac

SEQ ID NO: 71186 - RNA, 24 nt, Human
auaaaauaaaacccugcaaaaacu

SEQ ID NO: 71187 - RNA, 21 nt, Human
augguccuaaaaguuuuaaaa

SEQ ID NO: 71188 - RNA, 21 nt, Human
caaaagugcugcuaaaacugc

SEQ ID NO: 71189 - RNA, 19 nt, Human
caagacaaagcccaugcug

SEQ ID NO: 71190 - RNA, 21 nt, Human
caagacaaagcccaugcugac

SEQ ID NO: 71191 - RNA, 22 nt, Human
caagcaccacaggcugggcagg

SEQ ID NO: 71192 - RNA, 18 nt, Human
caaguaauggacaaugaa

SEQ ID NO: 71193 - RNA, 19 nt, Human
cacaaccaacuucagaguc

SEQ ID NO: 71194 - RNA, 23 nt, Human
cacacauacguuucccauggggc

SEQ ID NO: 71195 - RNA, 21 nt, Human
caccgaauucuucucugaucu

SEQ ID NO: 71196 - RNA, 20 nt, Human
cacugacaagcacacaggag

SEQ ID NO: 71197 - RNA, 20 nt, Human
cacugccagguaaauagaug

SEQ ID NO: 71198 - RNA, 22 nt, Human
cagcagcaaagaccacaaggac

SEQ ID NO: 71199 - RNA, 24 nt, Human
cagcagcaaagaccacaaggacau

SEQ ID NO: 71200 - RNA, 23 nt, Human
cagugaggucugcaguucucugg

SEQ ID NO: 71201 - RNA, 23 nt, Human
ccaagcccagcugcacccagaca

SEQ ID NO: 71202 - RNA, 21 nt, Human
ccauuggcuaugucauccugg

SEQ ID NO: 71203 - RNA, 19 nt, Human
cccacugacaagcacacag

SEQ ID NO: 71204 - RNA, 19 nt, Human
ccccuugggccgugcaggg

SEQ ID NO: 71205 - RNA, 21 nt, Human
cccguucugcugcucugagag

SEQ ID NO: 71206 - RNA, 23 nt, Human
ccucccaggugacaggcaggguu

SEQ ID NO: 71207 - RNA, 21 nt, Human
ccugcacacauacguuuccca

SEQ ID NO: 71208 - RNA, 18 nt, Human
cuaaagcaaacagggguc

SEQ ID NO: 71209 - RNA, 21 nt, Human
cuaauauugcaugaaauguuu

SEQ ID NO: 71210 - RNA, 21 nt, Human
cuccagcuggucagcaacaac

SEQ ID NO: 71211 - RNA, 21 nt, Human
cugaaucgcgagaaccuacac

SEQ ID NO: 71212 - RNA, 23 nt, Human
cuucacagcugacagacacugcu

SEQ ID NO: 71213 - RNA, 24 nt, Human
cuucacagcugacagacacugcuu

SEQ ID NO: 71214 - RNA, 25 nt, Human
gaggcuguguuuuccuccuauuugg

SEQ ID NO: 71215 - RNA, 19 nt, Human
gcagcagcaaagaccacaa

SEQ ID NO: 71216 - RNA, 22 nt, Human
gcagcagcaaagaccacaagga

SEQ ID NO: 71217 - RNA, 24 nt, Human
gcuacccugcugguugguugggag

SEQ ID NO: 71218 - RNA, 22 nt, Human
gcugcacccagacaaggccgcg

SEQ ID NO: 71219 - RNA, 21 nt, Human
gcuggucagcaacaacacucu

SEQ ID NO: 71220 - RNA, 22 nt, Human
gcuguguuuuccuccuauuugg

SEQ ID NO: 71221 - RNA, 20 nt, Human
ggagaggaggcgcagagugu

SEQ ID NO: 71222 - RNA, 19 nt, Human
ggccaagaggcaggcaggg

SEQ ID NO: 71223 - RNA, 23 nt, Human
ggcugaaaacaaggaaaacacaa

SEQ ID NO: 71224 - RNA, 20 nt, Human
ggcuggggaugugugagcca

SEQ ID NO: 71225 - RNA, 21 nt, Human
gggaggcuguguuuuccuccu

SEQ ID NO: 71226 - RNA, 18 nt, Human
ggucccgugaggccaaga

SEQ ID NO: 71227 - RNA, 19 nt, Human
guaaauagaugcucccuuc

SEQ ID NO: 71228 - RNA, 27 nt, Human
guccugaaucgcgagaaccuacacccc

SEQ ID NO: 71229 - RNA, 21 nt, Human
uaaaacccugcaaaaacuaua

SEQ ID NO: 71230 - RNA, 21 nt, Human
uaaaauaaaacccugcaaaaa

SEQ ID NO: 71231 - RNA, 22 nt, Human
uaaaauaaaacccugcaaaaac

SEQ ID NO: 71232 - RNA, 18 nt, Human
uacaguccagccaaggac

SEQ ID NO: 71233 - RNA, 19 nt, Human
uagaguccaagacaaagcc

SEQ ID NO: 71234 - RNA, 20 nt, Human
uauaaaauaaaacccugcaa

SEQ ID NO: 71235 - RNA, 22 nt, Human
ucaaucacaaccaacuucagag

SEQ ID NO: 71236 - RNA, 18 nt, Human
ucccauggggcaaacguu

SEQ ID NO: 71237 - RNA, 18 nt, Human
uccccaaagcuggaggcu

SEQ ID NO: 71238 - RNA, 19 nt, Human
uccccaagcaagcauaaag

SEQ ID NO: 71239 - RNA, 21 nt, Human
uccugaaucgcgagaaccuac

SEQ ID NO: 71240 - RNA, 20 nt, Human
ucuaaagcaaacaggggucc

SEQ ID NO: 71241 - RNA, 23 nt, Human
ucucaggucaggcucugaggccc

SEQ ID NO: 71242 - RNA, 19 nt, Human
ugaauagaucaccugguag

SEQ ID NO: 71243 - RNA, 20 nt, Human
ugacaagcacacaggagaga

SEQ ID NO: 71244 - RNA, 21 nt, Human
ugacaagcacacaggagagaa

SEQ ID NO: 71245 - RNA, 19 nt, Human
ugagagcagcagcaaagac

SEQ ID NO: 71246 - RNA, 21 nt, Human
ugagagcagcagcaaagacca

SEQ ID NO: 71247 - RNA, 25 nt, Human
ugagagcagcagcaaagaccacaag

SEQ ID NO: 71248 - RNA, 21 nt, Human
ugagccaggaagcagguucaa

SEQ ID NO: 71249 - RNA, 20 nt, Human
ugaguggaggcaagucccug

SEQ ID NO: 71250 - RNA, 21 nt, Human
ugccagguaaauagaugcucc

SEQ ID NO: 71251 - RNA, 28 nt, Human
ugccagguaaauagaugcucccuucuuu

SEQ ID NO: 71252 - RNA, 19 nt, Human
ugccccgggccgccugccu

SEQ ID NO: 71253 - RNA, 22 nt, Human
uggccacuccuuuucugaagcc

SEQ ID NO: 71254 - RNA, 24 nt, Human
uggcucagagcaaaaggucaccug

SEQ ID NO: 71255 - RNA, 20 nt, Human
ugguccuaaaaguuuuaaaa

SEQ ID NO: 71256 - RNA, 19 nt, Human
uuagauucuuuagauaaug

SEQ ID NO: 71257 - RNA, 22 nt, Human
uuauauaaauauuuccaugucc

SEQ ID NO: 71258 - RNA, 21 nt, Human
uucagagucuaaaacugaacc

SEQ ID NO: 71259 - RNA, 19 nt, Human
uugaagaagaguguggcaa

SEQ ID NO: 71260 - RNA, 21 nt, Human
uuuucugaagccccugggcag

SEQ ID NO: 71261 - RNA, 22 nt, Human
aaaaaauaaaugaaggguacaa

SEQ ID NO: 71262 - RNA, 20 nt, Human
aaaaccccaaacaaacacaa

SEQ ID NO: 71263 - RNA, 21 nt, Human
aaaauccaaaacaugcucucc

SEQ ID NO: 71264 - RNA, 20 nt, Human
aaacaaaaguuaggcuaagc

SEQ ID NO: 71265 - RNA, 18 nt, Human
aaacaaacacaaacacac

SEQ ID NO: 71266 - RNA, 24 nt, Human
aaacagcacuccucgccccaaagc

SEQ ID NO: 71267 - RNA, 22 nt, Human
aaaucacucauagccaacaaau

SEQ ID NO: 71268 - RNA, 22 nt, Human
aacaaauggaaauuacagacua

SEQ ID NO: 71269 - RNA, 18 nt, Human
aagaaccaaaaccaaacc

SEQ ID NO: 71270 - RNA, 21 nt, Human
aagguguuucccugaaauguu

SEQ ID NO: 71271 - RNA, 21 nt, Human
aagugugcccugcuccaauua

SEQ ID NO: 71272 - RNA, 18 nt, Human
aagugugggacucugcag

SEQ ID NO: 71273 - RNA, 22 nt, Human
aaucacucauagccaacaaauu

SEQ ID NO: 71274 - RNA, 26 nt, Human
acaaaaaccccaaacaaacacaaaca

SEQ ID NO: 71275 - RNA, 18 nt, Human
acaaaugacacagccccu

SEQ ID NO: 71276 - RNA, 18 nt, Human
accaaaaccaaacccaac

SEQ ID NO: 71277 - RNA, 25 nt, Human
accagagcagagaacagggcuccag

SEQ ID NO: 71278 - RNA, 24 nt, Human
acugggcugucuguacacagcagu

SEQ ID NO: 71279 - RNA, 18 nt, Human
agauugucacuugaaaau

SEQ ID NO: 71280 - RNA, 20 nt, Human
agcugagcucucccaaagcc

SEQ ID NO: 71281 - RNA, 24 nt, Human
aggagaugaagacuacauuucaaa

SEQ ID NO: 71282 - RNA, 21 nt, Human
aggcagguuguuuaguaaggg

SEQ ID NO: 71283 - RNA, 24 nt, Human
aggcuucaaguucaagacagagcu

SEQ ID NO: 71284 - RNA, 20 nt, Human
agggaggggguuuuaacugu

SEQ ID NO: 71285 - RNA, 21 nt, Human
agggcaaagauagcuuccccu

SEQ ID NO: 71286 - RNA, 18 nt, Human
aguccaguccacccugcc

SEQ ID NO: 71287 - RNA, 22 nt, Human
auaaaugaaggguacaacacau

SEQ ID NO: 71288 - RNA, 24 nt, Human
auacaccuguauccuuaaauccca

SEQ ID NO: 71289 - RNA, 23 nt, Human
auaggacaaaugacacagccccu

SEQ ID NO: 71290 - RNA, 18 nt, Human
aucauuuccaugcccagu

SEQ ID NO: 71291 - RNA, 20 nt, Human
auggaucccaggagaugaag

SEQ ID NO: 71292 - RNA, 21 nt, Human
auucaccuauaaaccacauau

SEQ ID NO: 71293 - RNA, 19 nt, Human
auugauucaccuauaaacc

SEQ ID NO: 71294 - RNA, 20 nt, Human
caaacaaacacaaacacaca

SEQ ID NO: 71295 - RNA, 24 nt, Human
caaacaaacacaaacacacacuua

SEQ ID NO: 71296 - RNA, 22 nt, Human
caaacacacacuuaaauacaua

SEQ ID NO: 71297 - RNA, 21 nt, Human
caaagcccagguucacuucuc

SEQ ID NO: 71298 - RNA, 21 nt, Human
caaaggcccagcagucuggau

SEQ ID NO: 71299 - RNA, 19 nt, Human
caaccagagcagagaacag

SEQ ID NO: 71300 - RNA, 19 nt, Human
caagagaauaggaaaauac

SEQ ID NO: 71301 - RNA, 18 nt, Human
caauuuuacacacaaaac

SEQ ID NO: 71302 - RNA, 23 nt, Human
cacacaaaacaggaaucaaagcc

SEQ ID NO: 71303 - RNA, 20 nt, Human
cacaucagcuccacuccuaa

SEQ ID NO: 71304 - RNA, 20 nt, Human
cacccccccgcauuuuucac

SEQ ID NO: 71305 - RNA, 21 nt, Human
cacugcaaauauuguuuaguc

SEQ ID NO: 71306 - RNA, 21 nt, Human
cacugggugcaacaaacugaa

SEQ ID NO: 71307 - RNA, 20 nt, Human
cagaacuaagcccacaguac

SEQ ID NO: 71308 - RNA, 23 nt, Human
cagaauucucagcugagcucucc

SEQ ID NO: 71309 - RNA, 19 nt, Human
cagaguauucauccagacu

SEQ ID NO: 71310 - RNA, 18 nt, Human
cagaguggauaucucaaa

SEQ ID NO: 71311 - RNA, 20 nt, Human
cagaucauauuuuaaaucau

SEQ ID NO: 71312 - RNA, 21 nt, Human
caggauaugccguauucugau

SEQ ID NO: 71313 - RNA, 18 nt, Human
caggauggaaaaauggcu

SEQ ID NO: 71314 - RNA, 19 nt, Human
caguagguuguagauuucu

SEQ ID NO: 71315 - RNA, 20 nt, Human
ccaguaacaguugcccacaa

SEQ ID NO: 71316 - RNA, 22 nt, Human
cccaaacaaacacaaacacaca

SEQ ID NO: 71317 - RNA, 21 nt, Human
ccccaaacaaacacaaacaca

SEQ ID NO: 71318 - RNA, 20 nt, Human
cccguucugaucagcacaga

SEQ ID NO: 71319 - RNA, 20 nt, Human
cccucaccuccgaaaccccu

SEQ ID NO: 71320 - RNA, 18 nt, Human
cccucaggcccucucugc

SEQ ID NO: 71321 - RNA, 18 nt, Human
cccuuggaacagagguac

SEQ ID NO: 71322 - RNA, 20 nt, Human
cccuuuucuccucacucagg

SEQ ID NO: 71323 - RNA, 24 nt, Human
ccgcauuuuucacugcuucuugac

SEQ ID NO: 71324 - RNA, 19 nt, Human
ccuaggcucuuuccacccc

SEQ ID NO: 71325 - RNA, 22 nt, Human
ccuccgaaaccccucaaaaacc

SEQ ID NO: 71326 - RNA, 22 nt, Human
ccucucagugucuccguguccu

SEQ ID NO: 71327 - RNA, 27 nt, Human
ccuuaaaucccagaaaauaugaacucc

SEQ ID NO: 71328 - RNA, 21 nt, Human
ccuuggggagaaagaaauggc

SEQ ID NO: 71329 - RNA, 25 nt, Human
cuaauccacucuuuccaaauaggcu

SEQ ID NO: 71330 - RNA, 22 nt, Human
cuacucugcucuccugauacgu

SEQ ID NO: 71331 - RNA, 19 nt, Human
cuccugauacguguuuucc

SEQ ID NO: 71332 - RNA, 18 nt, Human
cuccuuucccuuucuccc

SEQ ID NO: 71333 - RNA, 21 nt, Human
cucgcccuucuuuucugcucc

SEQ ID NO: 71334 - RNA, 20 nt, Human
cucucagugucuccgugucc

SEQ ID NO: 71335 - RNA, 24 nt, Human
cucucucccucuuuccggccuuuu

SEQ ID NO: 71336 - RNA, 31 nt, Human
cugaggcaggacagacacaucagcuccacuu

SEQ ID NO: 71337 - RNA, 18 nt, Human
cugagucugcaguggaac

SEQ ID NO: 71338 - RNA, 18 nt, Human
cugauagguaccuguguc

SEQ ID NO: 71339 - RNA, 22 nt, Human
cugcaaucaagaaguuuaugcc

SEQ ID NO: 71340 - RNA, 20 nt, Human
cugcacuccagguuugcgag

SEQ ID NO: 71341 - RNA, 18 nt, Human
cugccaguuuagcucaau

SEQ ID NO: 71342 - RNA, 23 nt, Human
cuguucacauuuuuuuauggauc

SEQ ID NO: 71343 - RNA, 20 nt, Human
cuucugugugcgucugucau

SEQ ID NO: 71344 - RNA, 22 nt, Human
cuugacccccaaguuuccuggg

SEQ ID NO: 71345 - RNA, 23 nt, Human
cuugagccaaugaagaaccaaaa

SEQ ID NO: 71346 - RNA, 19 nt, Human
cuuucuucuuccucuuucu

SEQ ID NO: 71347 - RNA, 21 nt, Human
gaaaauccaaaacaugcucuc

SEQ ID NO: 71348 - RNA, 23 nt, Human
gaacugccuaugggcuaaucuug

SEQ ID NO: 71349 - RNA, 20 nt, Human
gaacugugugugaaggucuu

SEQ ID NO: 71350 - RNA, 20 nt, Human
gaagaaccaaaaccaaaccc

SEQ ID NO: 71351 - RNA, 18 nt, Human
gaagacaucuagguucug

SEQ ID NO: 71352 - RNA, 21 nt, Human
gacagacacaucagcuccacu

SEQ ID NO: 71353 - RNA, 24 nt, Human
gacucuuccagggcaucaguuggu

SEQ ID NO: 71354 - RNA, 24 nt, Human
gagcgugaccugccagcccgugag

SEQ ID NO: 71355 - RNA, 21 nt, Human
gagugcaccuggagagggugc

SEQ ID NO: 71356 - RNA, 22 nt, Human
gaguucgcagccugcucucugg

SEQ ID NO: 71357 - RNA, 19 nt, Human
gcccugcuccaauuacaca

SEQ ID NO: 71358 - RNA, 19 nt, Human
gccugaccacggcugggag

SEQ ID NO: 71359 - RNA, 21 nt, Human
gcgcgggggagcucgcccuuc

SEQ ID NO: 71360 - RNA, 19 nt, Human
ggaaacccagaacuaagcc

SEQ ID NO: 71361 - RNA, 21 nt, Human
ggaaacccagaacuaagccca

SEQ ID NO: 71362 - RNA, 19 nt, Human
ggaaagaaaaugucaacag

SEQ ID NO: 71363 - RNA, 23 nt, Human
ggaaaggcgcggguuuggguugg

SEQ ID NO: 71364 - RNA, 25 nt, Human
ggacagacacaucagcuccacuccu

SEQ ID NO: 71365 - RNA, 21 nt, Human
ggacugggcugucuguacaca

SEQ ID NO: 71366 - RNA, 22 nt, Human
ggacugggcugucuguacacag

SEQ ID NO: 71367 - RNA, 23 nt, Human
ggacugggcugucuguacacagc

SEQ ID NO: 71368 - RNA, 26 nt, Human
ggagagggugcggaagacucuuccag

SEQ ID NO: 71369 - RNA, 18 nt, Human
ggcacauuuuguguuaga

SEQ ID NO: 71370 - RNA, 21 nt, Human
ggcauuuuugcugagcugaca

SEQ ID NO: 71371 - RNA, 22 nt, Human
ggcgcgggggagcucgcccuuc

SEQ ID NO: 71372 - RNA, 22 nt, Human
ggcuaaucuugagagcauguuu

SEQ ID NO: 71373 - RNA, 18 nt, Human
gggcucucucccucuuuc

SEQ ID NO: 71374 - RNA, 20 nt, Human
guaagaaacaaaaaccccaa

SEQ ID NO: 71375 - RNA, 21 nt, Human
guaagaaacaaaaaccccaaa

SEQ ID NO: 71376 - RNA, 19 nt, Human
guauccuuaaaucccagaa

SEQ ID NO: 71377 - RNA, 19 nt, Human
guguguguugggagauggg

SEQ ID NO: 71378 - RNA, 22 nt, Human
uaacaggggaugccauguuuug

SEQ ID NO: 71379 - RNA, 20 nt, Human
uaaccgagcgugaccugcca

SEQ ID NO: 71380 - RNA, 18 nt, Human
uaacucaacaggaagcaa

SEQ ID NO: 71381 - RNA, 18 nt, Human
uaaguggaugccaaaggc

SEQ ID NO: 71382 - RNA, 22 nt, Human
uacacacaaaacaggaaucaaa

SEQ ID NO: 71383 - RNA, 18 nt, Human
uacacacugggcugauca

SEQ ID NO: 71384 - RNA, 19 nt, Human
uacaugaagaaaacauuuc

SEQ ID NO: 71385 - RNA, 19 nt, Human
uacucauccucugacucua

SEQ ID NO: 71386 - RNA, 22 nt, Human
uacuuugagacgaugacccugg

SEQ ID NO: 71387 - RNA, 23 nt, Human
uagaacugugugugaaggucuug

SEQ ID NO: 71388 - RNA, 25 nt, Human
uagaacugugugugaaggucuuguu

SEQ ID NO: 71389 - RNA, 24 nt, Human
uaucaggcuaucucuuaagaauac

SEQ ID NO: 71390 - RNA, 19 nt, Human
uauuucagaguuucuacug

SEQ ID NO: 71391 - RNA, 22 nt, Human
ucaaaaacccuucuaauagucc

SEQ ID NO: 71392 - RNA, 22 nt, Human
ucaagaaugccuaaugauguca

SEQ ID NO: 71393 - RNA, 18 nt, Human
ucaauccagagucaggcc

SEQ ID NO: 71394 - RNA, 18 nt, Human
ucaauccagagucaggcc

SEQ ID NO: 71395 - RNA, 18 nt, Human
ucacaccucacagagcac

SEQ ID NO: 71396 - RNA, 23 nt, Human
ucacacguucaaaacuaaagacc

SEQ ID NO: 71397 - RNA, 19 nt, Human
ucagagguuaacacuggau

SEQ ID NO: 71398 - RNA, 19 nt, Human
ucagguaaggugaagggga

SEQ ID NO: 71399 - RNA, 18 nt, Human
ucaguugggagagccgag

SEQ ID NO: 71400 - RNA, 23 nt, Human
ucauaggcacauuuugaggaacc

SEQ ID NO: 71401 - RNA, 19 nt, Human
uccaggagaagagagacuc

SEQ ID NO: 71402 - RNA, 20 nt, Human
ucccaaagcccagguucacu

SEQ ID NO: 71403 - RNA, 21 nt, Human
uccgaaaccccucaaaaaccc

SEQ ID NO: 71404 - RNA, 22 nt, Human
uccucucagugucuccgugucc

SEQ ID NO: 71405 - RNA, 20 nt, Human
uccuucuuggccuucaggau

SEQ ID NO: 71406 - RNA, 18 nt, Human
ucucagguugaccacccc

SEQ ID NO: 71407 - RNA, 21 nt, Human
ucucccaaagcccagguucac

SEQ ID NO: 71408 - RNA, 26 nt, Human
ucucccucuuuccggccuuuucucuu

SEQ ID NO: 71409 - RNA, 21 nt, Human
ucugcacuccagguuugcgag

SEQ ID NO: 71410 - RNA, 24 nt, Human
ucuguguccuccucucagugucuc

SEQ ID NO: 71411 - RNA, 26 nt, Human
ugaagaaccaaaaccaaacccaacug

SEQ ID NO: 71412 - RNA, 22 nt, Human
ugacaaagaauucaauuucuaa

SEQ ID NO: 71413 - RNA, 22 nt, Human
ugagaaaaaaaaauaaaugaag

SEQ ID NO: 71414 - RNA, 24 nt, Human
ugagaaaaaaaaauaaaugaaggg

SEQ ID NO: 71415 - RNA, 20 nt, Human
ugagagcauguuuuucuugg

SEQ ID NO: 71416 - RNA, 21 nt, Human
ugagucugcaguggaacaagg

SEQ ID NO: 71417 - RNA, 18 nt, Human
ugagugguguggccagcc

SEQ ID NO: 71418 - RNA, 24 nt, Human
ugaguuaacucaacaggaagcaag

SEQ ID NO: 71419 - RNA, 21 nt, Human
ugcuccuucgcugcacaguca

SEQ ID NO: 71420 - RNA, 23 nt, Human
uggaaaaauggcuagaaugaggu

SEQ ID NO: 71421 - RNA, 23 nt, Human
uggaaacccagaacuaagcccac

SEQ ID NO: 71422 - RNA, 20 nt, Human
uggcggagugacaagcccca

SEQ ID NO: 71423 - RNA, 18 nt, Human
uggcuaagagguucaaau

SEQ ID NO: 71424 - RNA, 21 nt, Human
ugggaugcugagaaaaaaaaa

SEQ ID NO: 71425 - RNA, 23 nt, Human
ugggcugucuguacacagcagua

SEQ ID NO: 71426 - RNA, 22 nt, Human
uguaaaaagaaucccucuuuuc

SEQ ID NO: 71427 - RNA, 20 nt, Human
ugugcaguccuuucacacgu

SEQ ID NO: 71428 - RNA, 23 nt, Human
uguggccagccaugcagcaggug

SEQ ID NO: 71429 - RNA, 19 nt, Human
uguguguugggagaugggu

SEQ ID NO: 71430 - RNA, 23 nt, Human
uguuaacacugggugcaacaaac

SEQ ID NO: 71431 - RNA, 24 nt, Human
uuaaaaaauucaaccuuaaauccu

SEQ ID NO: 71432 - RNA, 18 nt, Human
uuagaguuccugcaugac

SEQ ID NO: 71433 - RNA, 20 nt, Human
uuagccaccauuucccuguu

SEQ ID NO: 71434 - RNA, 24 nt, Human
uucacacguucaaaacuaaaggaa

SEQ ID NO: 71435 - RNA, 18 nt, Human
uucacugcuucuugacaa

SEQ ID NO: 71436 - RNA, 20 nt, Human
uucaugugugcaugugugug

SEQ ID NO: 71437 - RNA, 18 nt, Human
uuccuucgcugugcaggc

SEQ ID NO: 71438 - RNA, 23 nt, Human
uuccuugucuuagauaauucagg

SEQ ID NO: 71439 - RNA, 18 nt, Human
uuuacauacauaugcauu

SEQ ID NO: 71440 - RNA, 22 nt, Human
uuuuacacacaaaacaggaauc

SEQ ID NO: 71441 - RNA, 20 nt, Human
uuuuucgcaucuguaucuga

SEQ ID NO: 71442 - RNA, 22 nt, Human
aaaaaaagaaaaaaagaaaaag

SEQ ID NO: 71443 - RNA, 23 nt, Human
aaaaaaagacaaaaccaaacugg

SEQ ID NO: 71444 - RNA, 21 nt, Human
aaaaagaaaaaaagaaaaaga

SEQ ID NO: 71445 - RNA, 18 nt, Human
aaaaagaaaaaagaaaag

SEQ ID NO: 71446 - RNA, 21 nt, Human
aaaaagacaaaaccaaacugg

SEQ ID NO: 71447 - RNA, 21 nt, Human
aaaagaaaaaaagaaaaagaa

SEQ ID NO: 71448 - RNA, 25 nt, Human
aaaagaaaaagaaaaaagaaaagaa

SEQ ID NO: 71449 - RNA, 18 nt, Human
aaaccaggaauccaaaaa

SEQ ID NO: 71450 - RNA, 18 nt, Human
aaacccuccuuuacacuc

SEQ ID NO: 71451 - RNA, 18 nt, Human
aaacgagagagaaccaaa

SEQ ID NO: 71452 - RNA, 20 nt, Human
aaagaugaccagcccgaagc

SEQ ID NO: 71453 - RNA, 21 nt, Human
aaagccuccuccacuugccaa

SEQ ID NO: 71454 - RNA, 23 nt, Human
aaagucacauaaaagccuccucc

SEQ ID NO: 71455 - RNA, 20 nt, Human
aacaucuucuuaucccaguu

SEQ ID NO: 71456 - RNA, 19 nt, Human
aacauggugaaacaucucu

SEQ ID NO: 71457 - RNA, 23 nt, Human
aaccaagcgugguggugugugcc

SEQ ID NO: 71458 - RNA, 18 nt, Human
aaccaggacagggaagag

SEQ ID NO: 71459 - RNA, 19 nt, Human
aagaaaaagaaaaaagaaa

SEQ ID NO: 71460 - RNA, 19 nt, Human
aagaagaggaaaggauucu

SEQ ID NO: 71461 - RNA, 21 nt, Human
aagaaggcacuguccacugcc

SEQ ID NO: 71462 - RNA, 20 nt, Human
aagacaaaaccaaacuggaa

SEQ ID NO: 71463 - RNA, 22 nt, Human
aagaggaaaggauucuucucaa

SEQ ID NO: 71464 - RNA, 24 nt, Human
aagaugaccagcccgaagcaccac

SEQ ID NO: 71465 - RNA, 24 nt, Human
aagcgugguggugugugccuguaa

SEQ ID NO: 71466 - RNA, 24 nt, Human
aaguguuggcaacuuccuggaacu

SEQ ID NO: 71467 - RNA, 24 nt, Human
aaucgcuugaacccaggaggugga

SEQ ID NO: 71468 - RNA, 23 nt, Human
aauucccguuccagccucaucuc

SEQ ID NO: 71469 - RNA, 18 nt, Human
acaccaaccacaacauaa

SEQ ID NO: 71470 - RNA, 21 nt, Human
acagacagacaugauacuggg

SEQ ID NO: 71471 - RNA, 23 nt, Human
acagcccauggggcucacugcug

SEQ ID NO: 71472 - RNA, 19 nt, Human
acaggaaguaaguguuggc

SEQ ID NO: 71473 - RNA, 23 nt, Human
accaaauuucagacccagcuuua

SEQ ID NO: 71474 - RNA, 21 nt, Human
accaagccaggcacuggccug

SEQ ID NO: 71475 - RNA, 22 nt, Human
accacaacauaaaagucacaua

SEQ ID NO: 71476 - RNA, 24 nt, Human
acccaggagguggagguugcagug

SEQ ID NO: 71477 - RNA, 19 nt, Human
acugaagaagggagcagag

SEQ ID NO: 71478 - RNA, 21 nt, Human
acugaugucucccaauucuga

SEQ ID NO: 71479 - RNA, 18 nt, Human
acuggccugggccugguu

SEQ ID NO: 71480 - RNA, 21 nt, Human
agaaaaaaagaaaaagaaaaa

SEQ ID NO: 71481 - RNA, 20 nt, Human
agaaaaaagaaaagaaaacu

SEQ ID NO: 71482 - RNA, 24 nt, Human
agaaaagaaaacuaccccucccca

SEQ ID NO: 71483 - RNA, 20 nt, Human
agaacucaugcguguggggg

SEQ ID NO: 71484 - RNA, 18 nt, Human
agaagggagcagagaggc

SEQ ID NO: 71485 - RNA, 19 nt, Human
agagggaggcgccugggcc

SEQ ID NO: 71486 - RNA, 24 nt, Human
agagucuaccggggggacgggaag

SEQ ID NO: 71487 - RNA, 22 nt, Human
agagugagacuccaucucaaaa

SEQ ID NO: 71488 - RNA, 24 nt, Human
agcacuuugggagguugagguggg

SEQ ID NO: 71489 - RNA, 24 nt, Human
agccgacauggauccucccaaacc

SEQ ID NO: 71490 - RNA, 24 nt, Human
agccgcucagaggggagccccagc

SEQ ID NO: 71491 - RNA, 22 nt, Human
agccuggccaacauggugaaac

SEQ ID NO: 71492 - RNA, 19 nt, Human
agcugggugugguggcuca

SEQ ID NO: 71493 - RNA, 22 nt, Human
agcugggugugguggcucacgc

SEQ ID NO: 71494 - RNA, 23 nt, Human
aggaagccagagaagaaggcacu

SEQ ID NO: 71495 - RNA, 21 nt, Human
aggaauccaaaaauccagagc

SEQ ID NO: 71496 - RNA, 23 nt, Human
aggaauucaagacuagccuggcc

SEQ ID NO: 71497 - RNA, 20 nt, Human
aggagaagucaacagguuca

SEQ ID NO: 71498 - RNA, 21 nt, Human
aggaucacccccaugcaaacc

SEQ ID NO: 71499 - RNA, 30 nt, Human
aggaucacccccaugcaaaccaggaauccu

SEQ ID NO: 71500 - RNA, 23 nt, Human
aggcaggagaaucgcuugaaccc

SEQ ID NO: 71501 - RNA, 24 nt, Human
aggcaggagaaucgcuugaaccca

SEQ ID NO: 71502 - RNA, 20 nt, Human
aggcugaggcaggagaaucg

SEQ ID NO: 71503 - RNA, 24 nt, Human
aggcugaggcaggagaaucgcuug

SEQ ID NO: 71504 - RNA, 24 nt, Human
agguggagguugcagugagcugag

SEQ ID NO: 71505 - RNA, 24 nt, Human
aggugggcaggucaggaggucagg

SEQ ID NO: 71506 - RNA, 18 nt, Human
agguugaggugggcaggu

SEQ ID NO: 71507 - RNA, 23 nt, Human
agucaacagguucaggccucucu

SEQ ID NO: 71508 - RNA, 24 nt, Human
auaaaagccuccuccacuugccaa

SEQ ID NO: 71509 - RNA, 18 nt, Human
aucacuucaccgucaaac

SEQ ID NO: 71510 - RNA, 23 nt, Human
aucacuucaccgucaaacuuggc

SEQ ID NO: 71511 - RNA, 18 nt, Human
augaaguagcuguggccc

SEQ ID NO: 71512 - RNA, 20 nt, Human
augacacagggaaaggaggc

SEQ ID NO: 71513 - RNA, 19 nt, Human
auggagcacuuguugaaaa

SEQ ID NO: 71514 - RNA, 18 nt, Human
auugcacucuugccuagg

SEQ ID NO: 71515 - RNA, 18 nt, Human
auuguacuuggaggucuu

SEQ ID NO: 71516 - RNA, 23 nt, Human
caaacuggacacaacacaaauca

SEQ ID NO: 71517 - RNA, 22 nt, Human
caaagggaggucaaaagggagu

SEQ ID NO: 71518 - RNA, 26 nt, Human
caacauaaaagucacauaaaagccuc

SEQ ID NO: 71519 - RNA, 21 nt, Human
caacauggugaaacaucucua

SEQ ID NO: 71520 - RNA, 25 nt, Human
caaccacaacauaaaagucacauaa

SEQ ID NO: 71521 - RNA, 23 nt, Human
caagaaagcaccagauggggagg

SEQ ID NO: 71522 - RNA, 23 nt, Human
caagaaccaaaggcacaauggug

SEQ ID NO: 71523 - RNA, 24 nt, Human
caagacuagccuggccaacauggu

SEQ ID NO: 71524 - RNA, 24 nt, Human
caauggccaggaucacccccaugc

SEQ ID NO: 71525 - RNA, 20 nt, Human
cacaacacaaaucaaggaga

SEQ ID NO: 71526 - RNA, 21 nt, Human
cacagccggccaggcugcggc

SEQ ID NO: 71527 - RNA, 19 nt, Human
caccagauggggaggcaaa

SEQ ID NO: 71528 - RNA, 20 nt, Human
caccccacagccggccaggc

SEQ ID NO: 71529 - RNA, 23 nt, Human
cacccgcagcccaggccauccuc

SEQ ID NO: 71530 - RNA, 26 nt, Human
caccucacugcagcccauccaguucc

SEQ ID NO: 71531 - RNA, 24 nt, Human
cacgccuguaaucucagcacuuug

SEQ ID NO: 71532 - RNA, 23 nt, Human
cagaucacuucaccgucaaacuu

SEQ ID NO: 71533 - RNA, 24 nt, Human
cagcacuuugggagguugaggugg

SEQ ID NO: 71534 - RNA, 20 nt, Human
cagcaggacagagucuaccg

SEQ ID NO: 71535 - RNA, 18 nt, Human
cagcccaggccauccucc

SEQ ID NO: 71536 - RNA, 20 nt, Human
cagcccgaagcaccacucgg

SEQ ID NO: 71537 - RNA, 19 nt, Human
cagccggccaggcugcggc

SEQ ID NO: 71538 - RNA, 19 nt, Human
cagccuccagcaggcuggg

SEQ ID NO: 71539 - RNA, 24 nt, Human
cagcuacucaggaggcugaggcag

SEQ ID NO: 71540 - RNA, 24 nt, Human
cagcucaaugcaacuugguacuuu

SEQ ID NO: 71541 - RNA, 21 nt, Human
cagcuccaaaccauuccugaa

SEQ ID NO: 71542 - RNA, 23 nt, Human
caggagaguuaagacaccaacca

SEQ ID NO: 71543 - RNA, 29 nt, Human
caggagguggagguugcagugacaacggu

SEQ ID NO: 71544 - RNA, 22 nt, Human
caggucaggaggucaggaauuc

SEQ ID NO: 71545 - RNA, 22 nt, Human
cauccacugcuccugcuggagg

SEQ ID NO: 71546 - RNA, 19 nt, Human
cauccagaccaagccaggc

SEQ ID NO: 71547 - RNA, 24 nt, Human
caucgacggggcggcuccccgggg

SEQ ID NO: 71548 - RNA, 19 nt, Human
cauugcacucuugccuagg

SEQ ID NO: 71549 - RNA, 23 nt, Human
cauugcacucuugccuaggugac

SEQ ID NO: 71550 - RNA, 24 nt, Human
cauugcacucuugccuaggugaca

SEQ ID NO: 71551 - RNA, 25 nt, Human
cauugcacucuugccuaggugacaa

SEQ ID NO: 71552 - RNA, 19 nt, Human
cauuuaaaaucccccuacc

SEQ ID NO: 71553 - RNA, 18 nt, Human
ccaaaccauuccugaaga

SEQ ID NO: 71554 - RNA, 20 nt, Human
ccaagccaggcacuggccug

SEQ ID NO: 71555 - RNA, 26 nt, Human
ccaaggccagcaggacuaaggaaucc

SEQ ID NO: 71556 - RNA, 18 nt, Human
ccaauggccaggaucacc

SEQ ID NO: 71557 - RNA, 18 nt, Human
ccacccgcccccaccuca

SEQ ID NO: 71558 - RNA, 19 nt, Human
ccagaaggagaggaagcca

SEQ ID NO: 71559 - RNA, 18 nt, Human
ccagcaggcugggguccc

SEQ ID NO: 71560 - RNA, 19 nt, Human
ccagccgucgggcgcgcgc

SEQ ID NO: 71561 - RNA, 21 nt, Human
ccaggacgucaaacacaucac

SEQ ID NO: 71562 - RNA, 23 nt, Human
ccaggacgucaaacacaucacca

SEQ ID NO: 71563 - RNA, 22 nt, Human
ccaugcaaaccaggaauccaaa

SEQ ID NO: 71564 - RNA, 19 nt, Human
ccauugcacucuugccuag

SEQ ID NO: 71565 - RNA, 24 nt, Human
ccauugcacucuugccuaggugac

SEQ ID NO: 71566 - RNA, 20 nt, Human
cccaaaccaccccacagccg

SEQ ID NO: 71567 - RNA, 27 nt, Human
cccacagagcacuggucacugcaggca

SEQ ID NO: 71568 - RNA, 21 nt, Human
cccaggagguggagguugcag

SEQ ID NO: 71569 - RNA, 22 nt, Human
cccauccaguuccuuuggggcu

SEQ ID NO: 71570 - RNA, 18 nt, Human
ccccaagagggcuucuuu

SEQ ID NO: 71571 - RNA, 19 nt, Human
ccccaugcaaaccaggaau

SEQ ID NO: 71572 - RNA, 21 nt, Human
ccccaugcaaaccaggaaucc

SEQ ID NO: 71573 - RNA, 24 nt, Human
cccccaugcaaaccaggaauccaa

SEQ ID NO: 71574 - RNA, 20 nt, Human
ccccgugccucagccucugc

SEQ ID NO: 71575 - RNA, 19 nt, Human
ccccuccccacugaccaaa

SEQ ID NO: 71576 - RNA, 25 nt, Human
cccgcccccaccucacugcagccca

SEQ ID NO: 71577 - RNA, 28 nt, Human
cccgugccucagccucugcucugcccuu

SEQ ID NO: 71578 - RNA, 22 nt, Human
cccuacccacucccagcuccaa

SEQ ID NO: 71579 - RNA, 22 nt, Human
cccuccuuucuucuucuguccc

SEQ ID NO: 71580 - RNA, 18 nt, Human
cccugcccacccgccccc

SEQ ID NO: 71581 - RNA, 21 nt, Human
cccugcccacccgcccccacc

SEQ ID NO: 71582 - RNA, 25 nt, Human
ccuacccacucccagcuccaaacca

SEQ ID NO: 71583 - RNA, 20 nt, Human
ccuaggcuccagcccaaggc

SEQ ID NO: 71584 - RNA, 23 nt, Human
ccuaggugacaagagugagacuc

SEQ ID NO: 71585 - RNA, 20 nt, Human
ccucagccucugcucugccc

SEQ ID NO: 71586 - RNA, 22 nt, Human
ccuccucuacuacccggcacaa

SEQ ID NO: 71587 - RNA, 22 nt, Human
ccucucccauucccugcccacc

SEQ ID NO: 71588 - RNA, 24 nt, Human
ccugccaagacuuccccucuccca

SEQ ID NO: 71589 - RNA, 21 nt, Human
ccugcccacccgcccccaccu

SEQ ID NO: 71590 - RNA, 19 nt, Human
ccuggccaacauggugaaa

SEQ ID NO: 71591 - RNA, 20 nt, Human
ccuggccaacauggugaaac

SEQ ID NO: 71592 - RNA, 21 nt, Human
ccuggccaacauggugaaaca

SEQ ID NO: 71593 - RNA, 19 nt, Human
ccuguaaucccagcuacuc

SEQ ID NO: 71594 - RNA, 21 nt, Human
ccuguaaucccagcuacucag

SEQ ID NO: 71595 - RNA, 23 nt, Human
ccugugggucccaggcagggcag

SEQ ID NO: 71596 - RNA, 23 nt, Human
ccuugagagacacacagacagac

SEQ ID NO: 71597 - RNA, 20 nt, Human
cgacuaacuugggaaaugcc

SEQ ID NO: 71598 - RNA, 21 nt, Human
cgcagcccaggccauccuccc

SEQ ID NO: 71599 - RNA, 24 nt, Human
cgccuguaaucucagcacuuuggg

SEQ ID NO: 71600 - RNA, 19 nt, Human
cgcgccccacccgcagccc

SEQ ID NO: 71601 - RNA, 19 nt, Human
cgcgcgccccacccgcagc

SEQ ID NO: 71602 - RNA, 21 nt, Human
cgggcaucuccuuggggaccg

SEQ ID NO: 71603 - RNA, 24 nt, Human
cuaaaaaacgagagagaaccaaaa

SEQ ID NO: 71604 - RNA, 23 nt, Human
cuacagcugggaacagauguccc

SEQ ID NO: 71605 - RNA, 21 nt, Human
cuacccacucccagcuccaaa

SEQ ID NO: 71606 - RNA, 23 nt, Human
cuaccccuccccacugaccaaau

SEQ ID NO: 71607 - RNA, 22 nt, Human
cuacccggcacaaggauuccac

SEQ ID NO: 71608 - RNA, 22 nt, Human
cucacgccuguaaucucagcac

SEQ ID NO: 71609 - RNA, 24 nt, Human
cucacgccuguaaucucagcacuu

SEQ ID NO: 71610 - RNA, 23 nt, Human
cuccaaaccauuccugaagaauc

SEQ ID NO: 71611 - RNA, 18 nt, Human
cuccaagagggaggcgcc

SEQ ID NO: 71612 - RNA, 19 nt, Human
cuccaucucaaaaaaaaaa

SEQ ID NO: 71613 - RNA, 22 nt, Human
cucccagcuccaaaccauuccu

SEQ ID NO: 71614 - RNA, 25 nt, Human
cucccucuagcuccccagcuggugg

SEQ ID NO: 71615 - RNA, 19 nt, Human
cuccugcuggaggauucca

SEQ ID NO: 71616 - RNA, 24 nt, Human
cuggcuccccgugccucagccucu

SEQ ID NO: 71617 - RNA, 19 nt, Human
cuucaugcagaacaucuuc

SEQ ID NO: 71618 - RNA, 24 nt, Human
cuuguuuuugguuccacuucuggu

SEQ ID NO: 71619 - RNA, 21 nt, Human
gaaaaagaaaaaagaaaagaa

SEQ ID NO: 71620 - RNA, 24 nt, Human
gaaaagaaaacuaccccuccccac

SEQ ID NO: 71621 - RNA, 19 nt, Human
gaaccaggacagggaagag

SEQ ID NO: 71622 - RNA, 18 nt, Human
gacaccaaccacaacaua

SEQ ID NO: 71623 - RNA, 21 nt, Human
gacccagcuuuagcucacuaa

SEQ ID NO: 71624 - RNA, 23 nt, Human
gagaaucgcuugaacccaggagg

SEQ ID NO: 71625 - RNA, 21 nt, Human
gaggaagcagacaggaccaaa

SEQ ID NO: 71626 - RNA, 21 nt, Human
gaggcgccugggcccgggccc

SEQ ID NO: 71627 - RNA, 24 nt, Human
gaggcugggccugaggggcggggc

SEQ ID NO: 71628 - RNA, 21 nt, Human
gagguggagguugcagugagc

SEQ ID NO: 71629 - RNA, 21 nt, Human
gagguugcagugagcugagau

SEQ ID NO: 71630 - RNA, 23 nt, Human
gagguugcagugagcugagauug

SEQ ID NO: 71631 - RNA, 18 nt, Human
gauccgccgccacaaacu

SEQ ID NO: 71632 - RNA, 21 nt, Human
gaugauguaggaccagaagga

SEQ ID NO: 71633 - RNA, 19 nt, Human
gcaggacagagucuaccgg

SEQ ID NO: 71634 - RNA, 22 nt, Human
gcaggagaaucgcuugaaccca

SEQ ID NO: 71635 - RNA, 21 nt, Human
gcagguagaccuggaaacgca

SEQ ID NO: 71636 - RNA, 22 nt, Human
gccugaggggcggggcuccuug

SEQ ID NO: 71637 - RNA, 21 nt, Human
gcugugauggugaggacaaga

SEQ ID NO: 71638 - RNA, 24 nt, Human
ggaaaggauucuucucaaggcuga

SEQ ID NO: 71639 - RNA, 22 nt, Human
ggaagagaucugggggaucaac

SEQ ID NO: 71640 - RNA, 22 nt, Human
ggacagggaagagaucuggggg

SEQ ID NO: 71641 - RNA, 23 nt, Human
ggaccaaacccuccuuuacacuc

SEQ ID NO: 71642 - RNA, 20 nt, Human
ggaggucaaaagggagucug

SEQ ID NO: 71643 - RNA, 18 nt, Human
ggagguugaggugggcag

SEQ ID NO: 71644 - RNA, 22 nt, Human
ggagguugaggugggcagguca

SEQ ID NO: 71645 - RNA, 22 nt, Human
ggagguugcagugagcugagau

SEQ ID NO: 71646 - RNA, 24 nt, Human
ggagguugcagugagcugagauug

SEQ ID NO: 71647 - RNA, 22 nt, Human
ggauccucccaaaccaccccac

SEQ ID NO: 71648 - RNA, 22 nt, Human
ggcaaagggaggucaaaaggga

SEQ ID NO: 71649 - RNA, 23 nt, Human
ggcaggucaggaggucaggaauu

SEQ ID NO: 71650 - RNA, 19 nt, Human
ggccugaggggcggggcuc

SEQ ID NO: 71651 - RNA, 21 nt, Human
ggcucacgccuguaaucucag

SEQ ID NO: 71652 - RNA, 24 nt, Human
ggcuucugcaggcguccgcuucuu

SEQ ID NO: 71653 - RNA, 22 nt, Human
gggaccagcaggacagagucua

SEQ ID NO: 71654 - RNA, 23 nt, Human
gggcaggggcagacacaaucucu

SEQ ID NO: 71655 - RNA, 19 nt, Human
ggggacgggaagcaaggaa

SEQ ID NO: 71656 - RNA, 23 nt, Human
ggggagccccagccgucgggcgc

SEQ ID NO: 71657 - RNA, 21 nt, Human
ggggagggcagaccgucuaua

SEQ ID NO: 71658 - RNA, 24 nt, Human
gggugugguggcucacgccuguaa

SEQ ID NO: 71659 - RNA, 19 nt, Human
ggugaggaagcagacagga

SEQ ID NO: 71660 - RNA, 24 nt, Human
ggugaggacaagaaccaaaggcac

SEQ ID NO: 71661 - RNA, 19 nt, Human
gguggagguugcagugagc

SEQ ID NO: 71662 - RNA, 24 nt, Human
gguggcucacgccuguaaucucag

SEQ ID NO: 71663 - RNA, 24 nt, Human
gguggugugugccuguaaucccag

SEQ ID NO: 71664 - RNA, 21 nt, Human
guaaaggacaggcuguggcca

SEQ ID NO: 71665 - RNA, 22 nt, Human
gucaaaagggagucugccaaua

SEQ ID NO: 71666 - RNA, 23 nt, Human
guggaagggccuacagcugggaa

SEQ ID NO: 71667 - RNA, 20 nt, Human
guggagguugcagugagcug

SEQ ID NO: 71668 - RNA, 21 nt, Human
guggugcgggcuucugcaggc

SEQ ID NO: 71669 - RNA, 28 nt, Human
guggugcgggcuucugcaggcguccgcu

SEQ ID NO: 71670 - RNA, 23 nt, Human
guggugugugccuguaaucccag

SEQ ID NO: 71671 - RNA, 24 nt, Human
guggugugugccuguaaucccagc

SEQ ID NO: 71672 - RNA, 20 nt, Human
gugugccuguaaucccagcu

SEQ ID NO: 71673 - RNA, 20 nt, Human
guucaggccucucucuccca

SEQ ID NO: 71674 - RNA, 23 nt, Human
guucaggccucucucucccaauu

SEQ ID NO: 71675 - RNA, 24 nt, Human
guugcagugagcugagauugugcc

SEQ ID NO: 71676 - RNA, 22 nt, Human
uaaaaaaagacaaaaccaaacu

SEQ ID NO: 71677 - RNA, 24 nt, Human
uaaaaaaagacaaaaccaaacugg

SEQ ID NO: 71678 - RNA, 19 nt, Human
uaaaaaacgagagagaacc

SEQ ID NO: 71679 - RNA, 20 nt, Human
uaaaaaacgagagagaacca

SEQ ID NO: 71680 - RNA, 21 nt, Human
uaaaaaacgagagagaaccaa

SEQ ID NO: 71681 - RNA, 23 nt, Human
uaaaaaacgagagagaaccaaaa

SEQ ID NO: 71682 - RNA, 21 nt, Human
uaaaaauacaaaaauuaacca

SEQ ID NO: 71683 - RNA, 22 nt, Human
uaaaagucacauaaaagccucc

SEQ ID NO: 71684 - RNA, 22 nt, Human
uaaaaucccccuacccacuccc

SEQ ID NO: 71685 - RNA, 25 nt, Human
uaagacaccaaccacaacauaaaag

SEQ ID NO: 71686 - RNA, 22 nt, Human
uacacucucccacuacccucug

SEQ ID NO: 71687 - RNA, 22 nt, Human
uacccacucccagcuccaaacc

SEQ ID NO: 71688 - RNA, 21 nt, Human
uacuggguuuguaaacugugu

SEQ ID NO: 71689 - RNA, 20 nt, Human
uagaccuggaaacgcauccc

SEQ ID NO: 71690 - RNA, 18 nt, Human
uagccuggccaacauggu

SEQ ID NO: 71691 - RNA, 21 nt, Human
uaggcuccagcccaaggccag

SEQ ID NO: 71692 - RNA, 18 nt, Human
uagguagcgacuaacuug

SEQ ID NO: 71693 - RNA, 19 nt, Human
uaguggcaucgacggggcg

SEQ ID NO: 71694 - RNA, 20 nt, Human
uauauaacuguauauauaua

SEQ ID NO: 71695 - RNA, 18 nt, Human
uaucaaagaagaggaaag

SEQ ID NO: 71696 - RNA, 21 nt, Human
uaucaaagaagaggaaaggau

SEQ ID NO: 71697 - RNA, 25 nt, Human
uaucaaagaagaggaaaggauucuu

SEQ ID NO: 71698 - RNA, 21 nt, Human
uauuguacuuggaggucuuga

SEQ ID NO: 71699 - RNA, 18 nt, Human
ucaaagaagaggaaagga

SEQ ID NO: 71700 - RNA, 22 nt, Human
ucaaagagguugacaggcagga

SEQ ID NO: 71701 - RNA, 19 nt, Human
ucacugcagcccauccagu

SEQ ID NO: 71702 - RNA, 19 nt, Human
ucagccucugcucugcccu

SEQ ID NO: 71703 - RNA, 24 nt, Human
ucaggaggucaggaauucaagacu

SEQ ID NO: 71704 - RNA, 21 nt, Human
ucaguggcaucuuuaacagcu

SEQ ID NO: 71705 - RNA, 23 nt, Human
ucauggguaccucccucccuggu

SEQ ID NO: 71706 - RNA, 18 nt, Human
uccaccuggcccagcucc

SEQ ID NO: 71707 - RNA, 19 nt, Human
uccaucucaaaaaaaaaaa

SEQ ID NO: 71708 - RNA, 25 nt, Human
uccaucucaaaaaaaaaaagaaaaa

SEQ ID NO: 71709 - RNA, 20 nt, Human
uccauugaucagcaccugaa

SEQ ID NO: 71710 - RNA, 19 nt, Human
ucccagauggcauugccaa

SEQ ID NO: 71711 - RNA, 19 nt, Human
ucccagcuccaaaccauuc

SEQ ID NO: 71712 - RNA, 23 nt, Human
uccccagcugguggaagggccua

SEQ ID NO: 71713 - RNA, 25 nt, Human
ucccccuacccacucccagcuccaa

SEQ ID NO: 71714 - RNA, 21 nt, Human
ucccccugcagccccaccaca

SEQ ID NO: 71715 - RNA, 19 nt, Human
uccccgaguggggcuggcu

SEQ ID NO: 71716 - RNA, 20 nt, Human
uccccgaucuugacagccuc

SEQ ID NO: 71717 - RNA, 22 nt, Human
uccccgaucuugacagccucca

SEQ ID NO: 71718 - RNA, 20 nt, Human
uccccgugccucagccucug

SEQ ID NO: 71719 - RNA, 23 nt, Human
uccccgugccucagccucugcuc

SEQ ID NO: 71720 - RNA, 18 nt, Human
ucccugagcugggugugg

SEQ ID NO: 71721 - RNA, 21 nt, Human
uccucccaaaccaccccacag

SEQ ID NO: 71722 - RNA, 24 nt, Human
ucgcuugaacccaggagguggagg

SEQ ID NO: 71723 - RNA, 19 nt, Human
ucucccugugggucccagg

SEQ ID NO: 71724 - RNA, 23 nt, Human
ucucuacuaaaaauacaaaaauu

SEQ ID NO: 71725 - RNA, 27 nt, Human
ucucucacaguuuuuucuuguuuuugg

SEQ ID NO: 71726 - RNA, 22 nt, Human
ucugccgcuguuuugcaucagc

SEQ ID NO: 71727 - RNA, 23 nt, Human
ugaaacaucucuacuaaaaauac

SEQ ID NO: 71728 - RNA, 19 nt, Human
ugaagaagggagcagagag

SEQ ID NO: 71729 - RNA, 21 nt, Human
ugaaguagcuguggcccagac

SEQ ID NO: 71730 - RNA, 21 nt, Human
ugacaggcaggaaggugagaa

SEQ ID NO: 71731 - RNA, 21 nt, Human
ugagcugggugugguggcuca

SEQ ID NO: 71732 - RNA, 23 nt, Human
ugagcugggugugguggcucacg

SEQ ID NO: 71733 - RNA, 19 nt, Human
ugaggaagcagacaggacc

SEQ ID NO: 71734 - RNA, 25 nt, Human
ugaggaagcagacaggaccaaaccc

SEQ ID NO: 71735 - RNA, 20 nt, Human
ugaggcaggagaaucgcuug

SEQ ID NO: 71736 - RNA, 24 nt, Human
ugaggcaggagaaucgcuugaacc

SEQ ID NO: 71737 - RNA, 25 nt, Human
ugaggcaggagaaucgcuugaaccc

SEQ ID NO: 71738 - RNA, 22 nt, Human
ugaggugggcaggucaggaggu

SEQ ID NO: 71739 - RNA, 24 nt, Human
ugaggugggcaggucaggagguca

SEQ ID NO: 71740 - RNA, 21 nt, Human
ugagugggggagggcagaccg

SEQ ID NO: 71741 - RNA, 23 nt, Human
ugaucagcaccugagacuggcgg

SEQ ID NO: 71742 - RNA, 18 nt, Human
ugcaucagcuuagugucg

SEQ ID NO: 71743 - RNA, 19 nt, Human
ugccgcuguuuugcaucag

SEQ ID NO: 71744 - RNA, 22 nt, Human
ugccuaggugacaagagugaga

SEQ ID NO: 71745 - RNA, 24 nt, Human
ugccuguaaucccagcuacucagg

SEQ ID NO: 71746 - RNA, 23 nt, Human
ugcucccagauggcauugccaau

SEQ ID NO: 71747 - RNA, 19 nt, Human
ugcuuacugaagaagggag

SEQ ID NO: 71748 - RNA, 18 nt, Human
uggaacauuuaaaauccc

SEQ ID NO: 71749 - RNA, 19 nt, Human
uggaacauuuaaaaucccc

SEQ ID NO: 71750 - RNA, 22 nt, Human
uggaugaaguaaaggacaggcu

SEQ ID NO: 71751 - RNA, 21 nt, Human
uggccaacauggugaaacauc

SEQ ID NO: 71752 - RNA, 20 nt, Human
uggcccagacggaugaccuc

SEQ ID NO: 71753 - RNA, 24 nt, Human
uggcucacgccuguaaucucagca

SEQ ID NO: 71754 - RNA, 23 nt, Human
uggcuccccgugccucagccucu

SEQ ID NO: 71755 - RNA, 20 nt, Human
ugggagguucacagaucacu

SEQ ID NO: 71756 - RNA, 20 nt, Human
ugggagguugaggugggcag

SEQ ID NO: 71757 - RNA, 19 nt, Human
ugggggcagagggcagcac

SEQ ID NO: 71758 - RNA, 27 nt, Human
uggguaccucccucccuggucagcucc

SEQ ID NO: 71759 - RNA, 27 nt, Human
uggugaggacaagaaccaaaggcacaa

SEQ ID NO: 71760 - RNA, 24 nt, Human
ugguggcucacgccuguaaucuca

SEQ ID NO: 71761 - RNA, 18 nt, Human
ugguggugcgggcuucug

SEQ ID NO: 71762 - RNA, 24 nt, Human
ugguggugugugccuguaauccca

SEQ ID NO: 71763 - RNA, 21 nt, Human
uggugugugccuguaauccca

SEQ ID NO: 71764 - RNA, 20 nt, Human
uguccuuggccuuaguggca

SEQ ID NO: 71765 - RNA, 22 nt, Human
uguggaugaaguaaaggacagg

SEQ ID NO: 71766 - RNA, 22 nt, Human
uguggugggaccagcaggacag

SEQ ID NO: 71767 - RNA, 23 nt, Human
uguguguugggggcagagggcag

SEQ ID NO: 71768 - RNA, 21 nt, Human
uguguugggggcagagggcag

SEQ ID NO: 71769 - RNA, 24 nt, Human
uuaaccaagcgugguggugugugc

SEQ ID NO: 71770 - RNA, 19 nt, Human
uuacucgcauacuggaauu

SEQ ID NO: 71771 - RNA, 22 nt, Human
uuauagucucccuguggguccc

SEQ ID NO: 71772 - RNA, 20 nt, Human
uucacagaucacuucaccgu

SEQ ID NO: 71773 - RNA, 18 nt, Human
uuccuggaacugcucaaa

SEQ ID NO: 71774 - RNA, 24 nt, Human
uugaacccaggagguggagguugc

SEQ ID NO: 71775 - RNA, 19 nt, Human
uugcagugagcugagauug

SEQ ID NO: 71776 - RNA, 22 nt, Human
uugcagugagcugagauugugc

SEQ ID NO: 71777 - RNA, 23 nt, Human
uuuaaaaucccccuacccacucc

SEQ ID NO: 71778 - RNA, 18 nt, Human
uuugcccuuauccuccuc

SEQ ID NO: 71779 - RNA, 22 nt, Human
agaaagcaguuuauuucuuaau

SEQ ID NO: 71780 - RNA, 23 nt, Human
gagaaauaacaguugcugagaac

SEQ ID NO: 71781 - RNA, 19 nt, Human
uauaauuaaugaucagaga

SEQ ID NO: 71782 - RNA, 20 nt, Human
aaaacugguccuuugaacaa

SEQ ID NO: 71783 - RNA, 19 nt, Human
aaaaugccucuucccacca

SEQ ID NO: 71784 - RNA, 22 nt, Human
aaacuaagcuugaauccaaaca

SEQ ID NO: 71785 - RNA, 23 nt, Human
aaacuaagcuugaauccaaacaa

SEQ ID NO: 71786 - RNA, 25 nt, Human
aaauaacuauaaaacaaaaacauuu

SEQ ID NO: 71787 - RNA, 23 nt, Human
aacacaauuuccaagcagugccc

SEQ ID NO: 71788 - RNA, 22 nt, Human
aacauuuccagagccagaauua

SEQ ID NO: 71789 - RNA, 24 nt, Human
acaaacgaaaucguaaauaacuau

SEQ ID NO: 71790 - RNA, 25 nt, Human
acacaauggggaugcguuucuuggg

SEQ ID NO: 71791 - RNA, 19 nt, Human
acaggcccuggugugugau

SEQ ID NO: 71792 - RNA, 20 nt, Human
acauacacacacaccgcacg

SEQ ID NO: 71793 - RNA, 22 nt, Human
accaccaucucccaaggaagug

SEQ ID NO: 71794 - RNA, 23 nt, Human
accccagccugagaaugaaccac

SEQ ID NO: 71795 - RNA, 25 nt, Human
accuguaauuaaaucaaguauuucc

SEQ ID NO: 71796 - RNA, 18 nt, Human
agacagucccaagaacaa

SEQ ID NO: 71797 - RNA, 22 nt, Human
agagcaccaagaggcugccaga

SEQ ID NO: 71798 - RNA, 24 nt, Human
agagcaccauaaauggggaaaaca

SEQ ID NO: 71799 - RNA, 20 nt, Human
agaugcucucugauccaggg

SEQ ID NO: 71800 - RNA, 22 nt, Human
agccaccaccuuggucugagag

SEQ ID NO: 71801 - RNA, 19 nt, Human
agccugagaaugaaccaca

SEQ ID NO: 71802 - RNA, 19 nt, Human
agcgccucuuacucccugc

SEQ ID NO: 71803 - RNA, 18 nt, Human
aggaagugaaucagcccc

SEQ ID NO: 71804 - RNA, 18 nt, Human
aggauuugcacuggaagg

SEQ ID NO: 71805 - RNA, 23 nt, Human
agggauggcaggaggcacacagg

SEQ ID NO: 71806 - RNA, 24 nt, Human
agggcaugcccugaggccaggagg

SEQ ID NO: 71807 - RNA, 21 nt, Human
aguuuacauucaaaguaacac

SEQ ID NO: 71808 - RNA, 20 nt, Human
auaacuauaaaacaaaaaca

SEQ ID NO: 71809 - RNA, 19 nt, Human
aucagcucaucccuggacc

SEQ ID NO: 71810 - RNA, 26 nt, Human
aucccuuccccuuccccccaccccac

SEQ ID NO: 71811 - RNA, 20 nt, Human
augcaauuauguaaaaacuu

SEQ ID NO: 71812 - RNA, 19 nt, Human
auuuggcagaguuuucccu

SEQ ID NO: 71813 - RNA, 23 nt, Human
caaaggagaagcagguggauuca

SEQ ID NO: 71814 - RNA, 23 nt, Human
caacacugccagaugacaaccaa

SEQ ID NO: 71815 - RNA, 28 nt, Human
caagggcagcggcagggacuggagaccc

SEQ ID NO: 71816 - RNA, 21 nt, Human
cacaaacucgagcauugcugu

SEQ ID NO: 71817 - RNA, 19 nt, Human
cacacacaccgcacggccg

SEQ ID NO: 71818 - RNA, 26 nt, Human
cacacaggaguccaggguaugucaaa

SEQ ID NO: 71819 - RNA, 25 nt, Human
cacauacacacacaccgcacggccg

SEQ ID NO: 71820 - RNA, 20 nt, Human
caccgcacggccggcuccgc

SEQ ID NO: 71821 - RNA, 22 nt, Human
cacugcaggcgccaugggugcu

SEQ ID NO: 71822 - RNA, 19 nt, Human
cacuugcuccuuccuuccu

SEQ ID NO: 71823 - RNA, 20 nt, Human
cagagcaccaagaggcugcc

SEQ ID NO: 71824 - RNA, 24 nt, Human
cagccccuggccccaguacacccc

SEQ ID NO: 71825 - RNA, 22 nt, Human
caggacacacagaugcucucug

SEQ ID NO: 71826 - RNA, 21 nt, Human
caggcuccgagcccagcgccu

SEQ ID NO: 71827 - RNA, 24 nt, Human
caggggccucccuuuggccuugcu

SEQ ID NO: 71828 - RNA, 20 nt, Human
cagugcccugcucuuuuuau

SEQ ID NO: 71829 - RNA, 23 nt, Human
caugugcacaacaugcagguuug

SEQ ID NO: 71830 - RNA, 19 nt, Human
cauugcuguccagcggucc

SEQ ID NO: 71831 - RNA, 19 nt, Human
ccaaggaagugaaucagcc

SEQ ID NO: 71832 - RNA, 19 nt, Human
ccacacggggaggcacagg

SEQ ID NO: 71833 - RNA, 18 nt, Human
ccaccagcagugcccugc

SEQ ID NO: 71834 - RNA, 18 nt, Human
ccagcagugcccugcucu

SEQ ID NO: 71835 - RNA, 25 nt, Human
ccaggggccucccuuuggccuugau

SEQ ID NO: 71836 - RNA, 19 nt, Human
cccaagaacaguuuuccac

SEQ ID NO: 71837 - RNA, 20 nt, Human
cccaaggaagugaaucagcc

SEQ ID NO: 71838 - RNA, 24 nt, Human
cccagcgccucuuacucccugcca

SEQ ID NO: 71839 - RNA, 22 nt, Human
ccccaguacaccccauuaaauc

SEQ ID NO: 71840 - RNA, 21 nt, Human
cccccaccccacaacaggccc

SEQ ID NO: 71841 - RNA, 20 nt, Human
ccccccaccccacaacaggc

SEQ ID NO: 71842 - RNA, 20 nt, Human
ccccuggccccaguacaccc

SEQ ID NO: 71843 - RNA, 28 nt, Human
ccccuuccccccaccccacaacaggccc

SEQ ID NO: 71844 - RNA, 27 nt, Human
cccuaaugcuaucccuuccccuucccc

SEQ ID NO: 71845 - RNA, 22 nt, Human
cccuggaagagagauaauugcc

SEQ ID NO: 71846 - RNA, 18 nt, Human
cccuuuccuggcaucuga

SEQ ID NO: 71847 - RNA, 22 nt, Human
ccgagcccagcgccucuuacuc

SEQ ID NO: 71848 - RNA, 26 nt, Human
ccuaaugcuaucccuuccccuucccc

SEQ ID NO: 71849 - RNA, 20 nt, Human
ccuccagcaaccaucagcuc

SEQ ID NO: 71850 - RNA, 18 nt, Human
ccuggccccaguacaccc

SEQ ID NO: 71851 - RNA, 20 nt, Human
ccuggccccaguacacccca

SEQ ID NO: 71852 - RNA, 24 nt, Human
ccuucugcugacagucuucugucc

SEQ ID NO: 71853 - RNA, 25 nt, Human
cgaacacauacacacacaccgcacg

SEQ ID NO: 71854 - RNA, 19 nt, Human
cgccacgcccuucccugca

SEQ ID NO: 71855 - RNA, 20 nt, Human
cgccaugggugcuguguucu

SEQ ID NO: 71856 - RNA, 22 nt, Human
cgcgaacacauacacacagugu

SEQ ID NO: 71857 - RNA, 30 nt, Human
cucacuacccagagcaccaagaggcugccu

SEQ ID NO: 71858 - RNA, 19 nt, Human
cucuacacuggccuccucc

SEQ ID NO: 71859 - RNA, 24 nt, Human
cugcacccauuaacucgucauuua

SEQ ID NO: 71860 - RNA, 21 nt, Human
cugcauaaugccagaauacag

SEQ ID NO: 71861 - RNA, 20 nt, Human
cugccguccuggcugugucc

SEQ ID NO: 71862 - RNA, 20 nt, Human
cugccguccuggcugugucc

SEQ ID NO: 71863 - RNA, 24 nt, Human
cuggucuuuaacaguaaugugaaa

SEQ ID NO: 71864 - RNA, 22 nt, Human
cuuccccuuccccccaccccac

SEQ ID NO: 71865 - RNA, 24 nt, Human
cuucuccccaggcugugugcaggg

SEQ ID NO: 71866 - RNA, 26 nt, Human
cuuuuggaaagucugauugcuacagg

SEQ ID NO: 71867 - RNA, 20 nt, Human
cuuuuguuuuuugcacaguu

SEQ ID NO: 71868 - RNA, 23 nt, Human
gaaaacaccaccaucucccaagg

SEQ ID NO: 71869 - RNA, 18 nt, Human
gacaagacuggucauccc

SEQ ID NO: 71870 - RNA, 20 nt, Human
gaggcugucccuuuccuggc

SEQ ID NO: 71871 - RNA, 20 nt, Human
gagggugggugggucgagcc

SEQ ID NO: 71872 - RNA, 23 nt, Human
gaugcaucugaacacaucacaca

SEQ ID NO: 71873 - RNA, 21 nt, Human
gccagaauacagagcaccaua

SEQ ID NO: 71874 - RNA, 24 nt, Human
gccagaugcaucugaacacaucac

SEQ ID NO: 71875 - RNA, 18 nt, Human
gccauguuggugugcugc

SEQ ID NO: 71876 - RNA, 20 nt, Human
gcggcagggacgccucugcu

SEQ ID NO: 71877 - RNA, 23 nt, Human
gcuccuuccuuccuuuuuaaaaa

SEQ ID NO: 71878 - RNA, 19 nt, Human
ggagggugagauggagaag

SEQ ID NO: 71879 - RNA, 23 nt, Human
ggaucugggguugccuucucucc

SEQ ID NO: 71880 - RNA, 20 nt, Human
ggccuggcgagaaccuggau

SEQ ID NO: 71881 - RNA, 20 nt, Human
ggcugcaggacacacagaug

SEQ ID NO: 71882 - RNA, 23 nt, Human
gggaggcacaggcuucuccccag

SEQ ID NO: 71883 - RNA, 23 nt, Human
gggaggcugcugcauaaugccag

SEQ ID NO: 71884 - RNA, 25 nt, Human
gggagugggguuaguguuggggaaa

SEQ ID NO: 71885 - RNA, 24 nt, Human
gggaugacaggggugugaggacuu

SEQ ID NO: 71886 - RNA, 22 nt, Human
gggcaugcccugaggccaggag

SEQ ID NO: 71887 - RNA, 24 nt, Human
gggggccugugggaauuaaggggc

SEQ ID NO: 71888 - RNA, 20 nt, Human
gggggugggggcagggggcg

SEQ ID NO: 71889 - RNA, 22 nt, Human
gucuuuaacaguaaugugaaaa

SEQ ID NO: 71890 - RNA, 19 nt, Human
gugcuugcagggccaaggg

SEQ ID NO: 71891 - RNA, 20 nt, Human
uaaaacaaaaacauuuccag

SEQ ID NO: 71892 - RNA, 27 nt, Human
uaacaaacuaagcuugaauccaaacaa

SEQ ID NO: 71893 - RNA, 21 nt, Human
uaacauggggaagagacuucu

SEQ ID NO: 71894 - RNA, 22 nt, Human
uacacuggccuccuccagcaac

SEQ ID NO: 71895 - RNA, 30 nt, Human
uaccuauuauaccaguuuacauucaaaguu

SEQ ID NO: 71896 - RNA, 22 nt, Human
uagaaaaaaagcagauugccaa

SEQ ID NO: 71897 - RNA, 18 nt, Human
uagacaaaacuacaaaaa

SEQ ID NO: 71898 - RNA, 22 nt, Human
uagaucaaauguuccuugggug

SEQ ID NO: 71899 - RNA, 26 nt, Human
uagcacaucuuuuaaaaaagauagca

SEQ ID NO: 71900 - RNA, 19 nt, Human
uagcagggaugggggagcu

SEQ ID NO: 71901 - RNA, 20 nt, Human
uagcucaggggaucuggggu

SEQ ID NO: 71902 - RNA, 21 nt, Human
uagcucccuacucccaccccc

SEQ ID NO: 71903 - RNA, 20 nt, Human
uaugagaggugagucucaaa

SEQ ID NO: 71904 - RNA, 25 nt, Human
uauguacaagugcaaggucaguguu

SEQ ID NO: 71905 - RNA, 23 nt, Human
uauguguuuguguguguaugugu

SEQ ID NO: 71906 - RNA, 19 nt, Human
ucaaaguaacacugcugac

SEQ ID NO: 71907 - RNA, 22 nt, Human
ucaugagaggaggggucuuuuc

SEQ ID NO: 71908 - RNA, 19 nt, Human
uccagagccagaauuaguu

SEQ ID NO: 71909 - RNA, 21 nt, Human
uccaggcuuugggcagcuucu

SEQ ID NO: 71910 - RNA, 22 nt, Human
ucccaagaacaguuuuccacag

SEQ ID NO: 71911 - RNA, 18 nt, Human
uccccccaccccacaaca

SEQ ID NO: 71912 - RNA, 22 nt, Human
uccccuuccccccaccccacaa

SEQ ID NO: 71913 - RNA, 20 nt, Human
ucccugcugcuagaucaaau

SEQ ID NO: 71914 - RNA, 18 nt, Human
ucccuggaagagagauaa

SEQ ID NO: 71915 - RNA, 19 nt, Human
ucccuuccccuucccccca

SEQ ID NO: 71916 - RNA, 21 nt, Human
ucccuuccccuuccccccacc

SEQ ID NO: 71917 - RNA, 20 nt, Human
uccucauccauuuuuuucca

SEQ ID NO: 71918 - RNA, 19 nt, Human
ucucacagaaaccaccaca

SEQ ID NO: 71919 - RNA, 23 nt, Human
ucuccaaauucacaaacucgagc

SEQ ID NO: 71920 - RNA, 18 nt, Human
ucucuuggugggccuggc

SEQ ID NO: 71921 - RNA, 21 nt, Human
ucugggguugccuucucucca

SEQ ID NO: 71922 - RNA, 19 nt, Human
ucuucaugggagugggguu

SEQ ID NO: 71923 - RNA, 21 nt, Human
ucuucuguccaggacugccuu

SEQ ID NO: 71924 - RNA, 18 nt, Human
ugaaaacaccaccaucuc

SEQ ID NO: 71925 - RNA, 20 nt, Human
ugaaaacaccaccaucuccc

SEQ ID NO: 71926 - RNA, 21 nt, Human
ugaaaacaccaccaucuccca

SEQ ID NO: 71927 - RNA, 22 nt, Human
ugaaauggaaggaucaaagaug

SEQ ID NO: 71928 - RNA, 24 nt, Human
ugaauccaaacaaacgaaaucgua

SEQ ID NO: 71929 - RNA, 18 nt, Human
ugacaaccaauuccuucu

SEQ ID NO: 71930 - RNA, 21 nt, Human
ugacaaugggaggcugucccu

SEQ ID NO: 71931 - RNA, 19 nt, Human
ugacacgggggugggggca

SEQ ID NO: 71932 - RNA, 20 nt, Human
ugagaaaauucuuuccuggc

SEQ ID NO: 71933 - RNA, 22 nt, Human
ugagaggugagucucaaaguag

SEQ ID NO: 71934 - RNA, 20 nt, Human
ugagauggagaaggagaggg

SEQ ID NO: 71935 - RNA, 21 nt, Human
ugagauggagaaggagaggga

SEQ ID NO: 71936 - RNA, 21 nt, Human
ugauaauaaaaacaggagcuu

SEQ ID NO: 71937 - RNA, 19 nt, Human
ugcacaguugagacagucc

SEQ ID NO: 71938 - RNA, 21 nt, Human
ugcaggacacacagaugcucu

SEQ ID NO: 71939 - RNA, 25 nt, Human
ugcaggugagucagaugcuuugagg

SEQ ID NO: 71940 - RNA, 21 nt, Human
ugcagguuuguuacauaugua

SEQ ID NO: 71941 - RNA, 24 nt, Human
ugccagaauacagagcaccauaaa

SEQ ID NO: 71942 - RNA, 19 nt, Human
ugccauguuggugugcugc

SEQ ID NO: 71943 - RNA, 21 nt, Human
ugcugacagucuucuguccag

SEQ ID NO: 71944 - RNA, 18 nt, Human
ugcugcaguuuuagcucu

SEQ ID NO: 71945 - RNA, 18 nt, Human
ugcugcccuccucacagc

SEQ ID NO: 71946 - RNA, 19 nt, Human
uggaaacaggcuccgagcc

SEQ ID NO: 71947 - RNA, 22 nt, Human
uggaagguaaaaugccucuucc

SEQ ID NO: 71948 - RNA, 22 nt, Human
uggcagaguuuucccuccucau

SEQ ID NO: 71949 - RNA, 19 nt, Human
uggcaucugaguccacccc

SEQ ID NO: 71950 - RNA, 21 nt, Human
uggccuaggaaaacugguccu

SEQ ID NO: 71951 - RNA, 18 nt, Human
ugggagaggagcagggga

SEQ ID NO: 71952 - RNA, 21 nt, Human
ugggagaggagcaggggacug

SEQ ID NO: 71953 - RNA, 21 nt, Human
ugggaggcugucccuuuccug

SEQ ID NO: 71954 - RNA, 23 nt, Human
ugggagugggguuaguguugggg

SEQ ID NO: 71955 - RNA, 24 nt, Human
uggggaaaacacaauuuccaagca

SEQ ID NO: 71956 - RNA, 20 nt, Human
ugggggaaagagggcaaaca

SEQ ID NO: 71957 - RNA, 24 nt, Human
ugggggaaagagggcaaacaaguc

SEQ ID NO: 71958 - RNA, 23 nt, Human
ugggggcagggggcgccuucuug

SEQ ID NO: 71959 - RNA, 22 nt, Human
uggucugagagggagggugggu

SEQ ID NO: 71960 - RNA, 18 nt, Human
uguauguauaacacccac

SEQ ID NO: 71961 - RNA, 20 nt, Human
ugugacgcgcaacacugcca

SEQ ID NO: 71962 - RNA, 19 nt, Human
ugugagagagggaggguga

SEQ ID NO: 71963 - RNA, 19 nt, Human
uguguauguguuugugugu

SEQ ID NO: 71964 - RNA, 23 nt, Human
uguguauguguuuguguguguau

SEQ ID NO: 71965 - RNA, 23 nt, Human
uguguauguguuuguguguguau

SEQ ID NO: 71966 - RNA, 24 nt, Human
uguguguauguguuugugugugua

SEQ ID NO: 71967 - RNA, 18 nt, Human
uguuacauauguauacau

SEQ ID NO: 71968 - RNA, 19 nt, Human
uguuacauauguauacaua

SEQ ID NO: 71969 - RNA, 23 nt, Human
uguuggugugcugcacccauuaa

SEQ ID NO: 71970 - RNA, 24 nt, Human
uuaaaagaccauguucaagaacaa

SEQ ID NO: 71971 - RNA, 26 nt, Human
uuaauucaucugacuaguuuuuaaaa

SEQ ID NO: 71972 - RNA, 24 nt, Human
uuacaauacaaaaaauaccaaaaa

SEQ ID NO: 71973 - RNA, 24 nt, Human
uucaaaacaucuccuuguaggcag

SEQ ID NO: 71974 - RNA, 20 nt, Human
uucacaaacucgagcauugc

SEQ ID NO: 71975 - RNA, 22 nt, Human
uucauccuugucagcauuugcu

SEQ ID NO: 71976 - RNA, 19 nt, Human
uucaugaaaacaccaccau

SEQ ID NO: 71977 - RNA, 25 nt, Human
uugccuucucuccacacggggaggc

SEQ ID NO: 71978 - RNA, 20 nt, Human
uugcuccuuccuuccuuuuu

SEQ ID NO: 71979 - RNA, 25 nt, Human
uuuaaagucuaggcacuuaguguug

SEQ ID NO: 71980 - RNA, 20 nt, Human
uuuaagaaauaccuaauugg

SEQ ID NO: 71981 - RNA, 25 nt, Human
uuucccuccucauccauuuuuuucc

SEQ ID NO: 71982 - RNA, 19 nt, Human
uuuggccuugcuggggggg

SEQ ID NO: 71983 - RNA, 22 nt, Human
uuuuccaugugcuuuucauccu

SEQ ID NO: 71984 - RNA, 22 nt, Human
uuuucccuccucauccauuuuu

SEQ ID NO: 71985 - RNA, 19 nt, Human
uuuucuuuuuuuuuuuuua

SEQ ID NO: 71986 - RNA, 22 nt, Human
uuuucuuuuuuuuuuuuuaauu

SEQ ID NO: 71987 - RNA, 23 nt, Human
aaaaaaaaacaaacucugaaaca

SEQ ID NO: 71988 - RNA, 23 nt, Human
aaaaaaaacaaacucugaaacaa

SEQ ID NO: 71989 - RNA, 28 nt, Human
aaaagcagucuaacagaaacaaaggcaa

SEQ ID NO: 71990 - RNA, 18 nt, Human
aaacaaauauaaaaauga

SEQ ID NO: 71991 - RNA, 22 nt, Human
aacaaacucugaaacaauuuaa

SEQ ID NO: 71992 - RNA, 18 nt, Human
aacauauacaauaucaca

SEQ ID NO: 71993 - RNA, 28 nt, Human
aacccaguuuucuuuuuuuuuuuuuuuu

SEQ ID NO: 71994 - RNA, 22 nt, Human
aacugggacaaaacauauacaa

SEQ ID NO: 71995 - RNA, 24 nt, Human
aacuuguuucuucagauucuucug

SEQ ID NO: 71996 - RNA, 24 nt, Human
aagcaaaaacgcuuuacacccaaa

SEQ ID NO: 71997 - RNA, 24 nt, Human
aauggcagaaggacuaaagaagaa

SEQ ID NO: 71998 - RNA, 24 nt, Human
acaaaacagccuuaaaggaagaag

SEQ ID NO: 71999 - RNA, 19 nt, Human
acagaaacaaaggcaaguc

SEQ ID NO: 72000 - RNA, 18 nt, Human
acccaaagaaauaaaaca

SEQ ID NO: 72001 - RNA, 23 nt, Human
acuaaaaaaaaaacaaacucuga

SEQ ID NO: 72002 - RNA, 26 nt, Human
acuaaaaugcuagaacuugauuuucu

SEQ ID NO: 72003 - RNA, 21 nt, Human
agaagauucuaggcaacauca

SEQ ID NO: 72004 - RNA, 21 nt, Human
agacaauaaagcaggagccca

SEQ ID NO: 72005 - RNA, 21 nt, Human
agagaaaagaagcgcauagaa

SEQ ID NO: 72006 - RNA, 18 nt, Human
agagaggaaaucugugga

SEQ ID NO: 72007 - RNA, 20 nt, Human
agaggaaaucuguggaguug

SEQ ID NO: 72008 - RNA, 22 nt, Human
agaguuacuuccagaaccacug

SEQ ID NO: 72009 - RNA, 23 nt, Human
agcaaaaacgcuuuacacccaaa

SEQ ID NO: 72010 - RNA, 24 nt, Human
agcacuccgcguuuuuugagauuu

SEQ ID NO: 72011 - RNA, 23 nt, Human
agccgcggaaacaaagcgacacc

SEQ ID NO: 72012 - RNA, 23 nt, Human
aggacuuguuuucacugaaaaca

SEQ ID NO: 72013 - RNA, 22 nt, Human
agugcucuuggauguuuuacca

SEQ ID NO: 72014 - RNA, 20 nt, Human
aguuuucuuuuuuuuuuuuu

SEQ ID NO: 72015 - RNA, 20 nt, Human
aucagaguuacuuccagaac

SEQ ID NO: 72016 - RNA, 22 nt, Human
aucagaguuacuuccagaacca

SEQ ID NO: 72017 - RNA, 23 nt, Human
augaagcauuagcacuggcacca

SEQ ID NO: 72018 - RNA, 22 nt, Human
caaaacauauacaauaucacaa

SEQ ID NO: 72019 - RNA, 20 nt, Human
caaagcccaaacccaguuuu

SEQ ID NO: 72020 - RNA, 18 nt, Human
caaauauaaggauaucac

SEQ ID NO: 72021 - RNA, 23 nt, Human
caaucucuuaaucauccaaacaa

SEQ ID NO: 72022 - RNA, 24 nt, Human
cacaaggaaucaaauauaaggaua

SEQ ID NO: 72023 - RNA, 20 nt, Human
cacaccugccccacccaauu

SEQ ID NO: 72024 - RNA, 18 nt, Human
caccugccccacccaauu

SEQ ID NO: 72025 - RNA, 20 nt, Human
cacugccaccgccgcaggag

SEQ ID NO: 72026 - RNA, 21 nt, Human
cacugccaccgccgcaggagc

SEQ ID NO: 72027 - RNA, 19 nt, Human
cagcagccaaagcuggaug

SEQ ID NO: 72028 - RNA, 21 nt, Human
cagcucaaaggccgcuaccac

SEQ ID NO: 72029 - RNA, 20 nt, Human
caggagccgcggaaacaaag

SEQ ID NO: 72030 - RNA, 19 nt, Human
caguuuucauuuuacuucu

SEQ ID NO: 72031 - RNA, 19 nt, Human
caguuuucuuuuuuuuuuu

SEQ ID NO: 72032 - RNA, 23 nt, Human
caucauaucagaguuacuuccag

SEQ ID NO: 72033 - RNA, 20 nt, Human
caucauccaaagguuuuuca

SEQ ID NO: 72034 - RNA, 21 nt, Human
cauuuuacuucugcuucuaaa

SEQ ID NO: 72035 - RNA, 22 nt, Human
ccaaagguuuuucaucaucuga

SEQ ID NO: 72036 - RNA, 26 nt, Human
ccacaacccugaaauuuuaccaguaa

SEQ ID NO: 72037 - RNA, 22 nt, Human
ccacccaauuaaauaaaucuga

SEQ ID NO: 72038 - RNA, 27 nt, Human
ccacugccaccgccgcaggagccgcgg

SEQ ID NO: 72039 - RNA, 24 nt, Human
ccauagucaaaaacaauguuuucu

SEQ ID NO: 72040 - RNA, 18 nt, Human
ccauggugaaaagauuua

SEQ ID NO: 72041 - RNA, 22 nt, Human
cccacagcucaaaggccgcuac

SEQ ID NO: 72042 - RNA, 23 nt, Human
cccgcgcccgguuacgauagaaa

SEQ ID NO: 72043 - RNA, 21 nt, Human
cccucaguuucuaacuuucag

SEQ ID NO: 72044 - RNA, 21 nt, Human
cccucuuccuugcuguuuucc

SEQ ID NO: 72045 - RNA, 18 nt, Human
ccgcggaaacaaagcgac

SEQ ID NO: 72046 - RNA, 23 nt, Human
cgccgaucugcgcucccccgcgc

SEQ ID NO: 72047 - RNA, 21 nt, Human
cgcuuuacacccaaagaaaua

SEQ ID NO: 72048 - RNA, 22 nt, Human
cguggauccaccaaaccucaca

SEQ ID NO: 72049 - RNA, 23 nt, Human
cucacaaucccaugaagcccauc

SEQ ID NO: 72050 - RNA, 19 nt, Human
cucuuaaucauccaaacaa

SEQ ID NO: 72051 - RNA, 24 nt, Human
cugaaaagcagucuaacagaaaca

SEQ ID NO: 72052 - RNA, 21 nt, Human
cugcuucuaaauucaggcccu

SEQ ID NO: 72053 - RNA, 22 nt, Human
cuggaaccuccccacagcucaa

SEQ ID NO: 72054 - RNA, 23 nt, Human
cuucuccaacuuuuagagcagua

SEQ ID NO: 72055 - RNA, 18 nt, Human
gaaaagcagucuaacaga

SEQ ID NO: 72056 - RNA, 20 nt, Human
gaaauaaaacagguuacaaa

SEQ ID NO: 72057 - RNA, 18 nt, Human
gagacaauaaagcaggag

SEQ ID NO: 72058 - RNA, 20 nt, Human
gaggagaacuuguuucuuca

SEQ ID NO: 72059 - RNA, 22 nt, Human
gcccuauuuaaaaaaaaaaaaa

SEQ ID NO: 72060 - RNA, 22 nt, Human
gccgaucugcgcucccccgcgc

SEQ ID NO: 72061 - RNA, 19 nt, Human
gccgcggaaacaaagcgac

SEQ ID NO: 72062 - RNA, 19 nt, Human
gcucaaaggccgcuaccac

SEQ ID NO: 72063 - RNA, 21 nt, Human
gcugcugcuggaaccucccca

SEQ ID NO: 72064 - RNA, 21 nt, Human
ggaagaaaugguaugcccuau

SEQ ID NO: 72065 - RNA, 21 nt, Human
ggcagaaggacuaaagaagaa

SEQ ID NO: 72066 - RNA, 22 nt, Human
ggcauaaaaauuuagagaggaa

SEQ ID NO: 72067 - RNA, 20 nt, Human
ggggagaggggcguggaucc

SEQ ID NO: 72068 - RNA, 22 nt, Human
gugcacaaggaaucaaauauaa

SEQ ID NO: 72069 - RNA, 19 nt, Human
uaaaaacacaauuccaguc

SEQ ID NO: 72070 - RNA, 20 nt, Human
uaaaaacacaauuccagucc

SEQ ID NO: 72071 - RNA, 18 nt, Human
uaaagcaaagcccaaacc

SEQ ID NO: 72072 - RNA, 23 nt, Human
uaaagcaaagcccaaacccaguu

SEQ ID NO: 72073 - RNA, 24 nt, Human
uaaauacacaccugccccacccaa

SEQ ID NO: 72074 - RNA, 22 nt, Human
uaaauacacaccugccccaguu

SEQ ID NO: 72075 - RNA, 18 nt, Human
uaacagaaacaaaggcaa

SEQ ID NO: 72076 - RNA, 21 nt, Human
uaacagaaacaaaggcaaguc

SEQ ID NO: 72077 - RNA, 19 nt, Human
uaacugcaagacuucucca

SEQ ID NO: 72078 - RNA, 21 nt, Human
uaacuuucagucacagagaca

SEQ ID NO: 72079 - RNA, 22 nt, Human
uaacuuucagucacagagacaa

SEQ ID NO: 72080 - RNA, 24 nt, Human
uaagaauauugcacacaauucugu

SEQ ID NO: 72081 - RNA, 19 nt, Human
uaagauacucaauacagaa

SEQ ID NO: 72082 - RNA, 20 nt, Human
uaagauacucaauacagaac

SEQ ID NO: 72083 - RNA, 23 nt, Human
uaagcaaaaacgcuuuacaccca

SEQ ID NO: 72084 - RNA, 21 nt, Human
uaaguccacaucccacugcca

SEQ ID NO: 72085 - RNA, 21 nt, Human
uaaguuucaacuacuaaacag

SEQ ID NO: 72086 - RNA, 19 nt, Human
uaauauggaagauuggcau

SEQ ID NO: 72087 - RNA, 25 nt, Human
uacaacugggacaaaaccggggucc

SEQ ID NO: 72088 - RNA, 24 nt, Human
uacaauaucacaauacuaagcaaa

SEQ ID NO: 72089 - RNA, 19 nt, Human
uaccuaaagcaaagcccaa

SEQ ID NO: 72090 - RNA, 21 nt, Human
uaccuaaagcaaagcccaaac

SEQ ID NO: 72091 - RNA, 24 nt, Human
uaccuaaagcaaagcccaaaccca

SEQ ID NO: 72092 - RNA, 21 nt, Human
uacgauagaaaugcacuggag

SEQ ID NO: 72093 - RNA, 23 nt, Human
uacuauacaacugggacaaaaca

SEQ ID NO: 72094 - RNA, 18 nt, Human
uagguaauucuuuggaga

SEQ ID NO: 72095 - RNA, 23 nt, Human
uauaaaacagggugugaaccuaa

SEQ ID NO: 72096 - RNA, 23 nt, Human
uaugugcuuuggugcauacagug

SEQ ID NO: 72097 - RNA, 24 nt, Human
ucaaagauaacccucaguuucuaa

SEQ ID NO: 72098 - RNA, 21 nt, Human
ucacuguaccuuuuggcaagc

SEQ ID NO: 72099 - RNA, 23 nt, Human
ucagucaaaagaacauuaaaacc

SEQ ID NO: 72100 - RNA, 23 nt, Human
ucaguuucuaacuuucagucaca

SEQ ID NO: 72101 - RNA, 23 nt, Human
ucauaucagaguuacuuccagaa

SEQ ID NO: 72102 - RNA, 21 nt, Human
ucauccaaagguuuuucauca

SEQ ID NO: 72103 - RNA, 19 nt, Human
uccacaucccacugccagc

SEQ ID NO: 72104 - RNA, 20 nt, Human
uccucaugugaaccuaaagu

SEQ ID NO: 72105 - RNA, 23 nt, Human
ucuaaaacaaauauaaaaaugag

SEQ ID NO: 72106 - RNA, 24 nt, Human
ucuaaauucaggcccuuuaaaauc

SEQ ID NO: 72107 - RNA, 22 nt, Human
ucuaaguccacaucccacugcc

SEQ ID NO: 72108 - RNA, 19 nt, Human
ucuaugauuuuaacaaucc

SEQ ID NO: 72109 - RNA, 23 nt, Human
ucuguacucagcguguguaagaa

SEQ ID NO: 72110 - RNA, 18 nt, Human
ucuguguuuugauucauu

SEQ ID NO: 72111 - RNA, 24 nt, Human
ucuuuauucuuuccuaaauuuauu

SEQ ID NO: 72112 - RNA, 23 nt, Human
ugaaaagcagucuaacagaaaca

SEQ ID NO: 72113 - RNA, 22 nt, Human
ugaaauaucuucuguacucagc

SEQ ID NO: 72114 - RNA, 19 nt, Human
ugaagcauuagcacuggca

SEQ ID NO: 72115 - RNA, 19 nt, Human
ugacaaaugucaggaagaa

SEQ ID NO: 72116 - RNA, 22 nt, Human
ugagaagaguguauacaaagug

SEQ ID NO: 72117 - RNA, 24 nt, Human
ugagaagaguguauacaaaguggu

SEQ ID NO: 72118 - RNA, 21 nt, Human
ugccaggagagagaaaauuca

SEQ ID NO: 72119 - RNA, 23 nt, Human
ugccaggagagagaaaauucaug

SEQ ID NO: 72120 - RNA, 21 nt, Human
ugcugcuggaaccuccccaca

SEQ ID NO: 72121 - RNA, 19 nt, Human
uggaagauaauccacaacc

SEQ ID NO: 72122 - RNA, 22 nt, Human
ugggacaaaacauauacaauau

SEQ ID NO: 72123 - RNA, 22 nt, Human
ugggggagaggggcguggaucc

SEQ ID NO: 72124 - RNA, 22 nt, Human
uggucacuuuauuaaaugacau

SEQ ID NO: 72125 - RNA, 21 nt, Human
uggugaaaagauuuagaaggu

SEQ ID NO: 72126 - RNA, 21 nt, Human
ugugucaaagauaacccucag

SEQ ID NO: 72127 - RNA, 21 nt, Human
uguguggaagauaauccacaa

SEQ ID NO: 72128 - RNA, 21 nt, Human
uuaaaaucaucuuugucuuca

SEQ ID NO: 72129 - RNA, 18 nt, Human
uuaaucauccaaacaacu

SEQ ID NO: 72130 - RNA, 23 nt, Human
uuagaccauguugaaaauuccca

SEQ ID NO: 72131 - RNA, 19 nt, Human
uucagcacuggcucuggcu

SEQ ID NO: 72132 - RNA, 24 nt, Human
uucagucaaaagaacauuaaaacc

SEQ ID NO: 72133 - RNA, 28 nt, Human
uucuaugugcuuuggugcauacaucgcu

SEQ ID NO: 72134 - RNA, 22 nt, Human
uugaauggugaaaacacagaua

SEQ ID NO: 72135 - RNA, 20 nt, Human
uuuaaaaaaaaaaaaaaguu

SEQ ID NO: 72136 - RNA, 19 nt, Human
uuuaaaauauucugaacuu

SEQ ID NO: 72137 - RNA, 21 nt, Human
uuucagaggaauuauuucaca

SEQ ID NO: 72138 - RNA, 20 nt, Human
uuugaaauaucuucuguacu

SEQ ID NO: 72139 - RNA, 23 nt, Human
uuuuacuucugcuucuaaauuca

SEQ ID NO: 72140 - RNA, 22 nt, Human
uuuucaguuuucauuuuacuuc

SEQ ID NO: 72141 - RNA, 23 nt, Human
uuuuuugucuuuaaauauuuguu

SEQ ID NO: 72142 - RNA, 18 nt, Human
uuuuuuuuuuuuuuuuug

SEQ ID NO: 72143 - RNA, 19 nt, Human
aaagggacaccgcagaugc

SEQ ID NO: 72144 - RNA, 18 nt, Human
aacaaagagaggaaaguc

SEQ ID NO: 72145 - RNA, 19 nt, Human
aacaaagggacaccgcaga

SEQ ID NO: 72146 - RNA, 26 nt, Human
aaccaccaagccagccaccccaucag

SEQ ID NO: 72147 - RNA, 23 nt, Human
aaccugugcccuuggccccccca

SEQ ID NO: 72148 - RNA, 25 nt, Human
aagagaccaaaucgaccugugggug

SEQ ID NO: 72149 - RNA, 19 nt, Human
aagaggcugcgccacagcc

SEQ ID NO: 72150 - RNA, 22 nt, Human
aauaaccaccaagccagccacc

SEQ ID NO: 72151 - RNA, 18 nt, Human
acacccccccacucuccc

SEQ ID NO: 72152 - RNA, 25 nt, Human
acaggacagacgaggaugagggagg

SEQ ID NO: 72153 - RNA, 22 nt, Human
acauacacccaggacccaugug

SEQ ID NO: 72154 - RNA, 21 nt, Human
accaaagacacccccccacuc

SEQ ID NO: 72155 - RNA, 23 nt, Human
accccgcucccuccugguccccg

SEQ ID NO: 72156 - RNA, 24 nt, Human
acgcacagccucugcugggagcac

SEQ ID NO: 72157 - RNA, 19 nt, Human
acucacuccauuucucgcc

SEQ ID NO: 72158 - RNA, 21 nt, Human
agagaugugcguucucccucc

SEQ ID NO: 72159 - RNA, 23 nt, Human
agaggaacucacaccacccucca

SEQ ID NO: 72160 - RNA, 19 nt, Human
aggaugagggaggggaugg

SEQ ID NO: 72161 - RNA, 20 nt, Human
aggcauuagaaauaaauacu

SEQ ID NO: 72162 - RNA, 20 nt, Human
aggcugcgccacagcccucg

SEQ ID NO: 72163 - RNA, 20 nt, Human
agggaggggaugggcugggc

SEQ ID NO: 72164 - RNA, 21 nt, Human
caagaagaacugacacgcaca

SEQ ID NO: 72165 - RNA, 18 nt, Human
cacagccugggugccguc

SEQ ID NO: 72166 - RNA, 22 nt, Human
caccaagccagccacccuccau

SEQ ID NO: 72167 - RNA, 21 nt, Human
caccacccuacccugaugguc

SEQ ID NO: 72168 - RNA, 19 nt, Human
cacccccccacucucccac

SEQ ID NO: 72169 - RNA, 24 nt, Human
cacgcagucccagagucugcacac

SEQ ID NO: 72170 - RNA, 18 nt, Human
cacuccaggaggcaggau

SEQ ID NO: 72171 - RNA, 24 nt, Human
cagacuucaggcaccaaagacacc

SEQ ID NO: 72172 - RNA, 21 nt, Human
cagagccgagugucaccccuc

SEQ ID NO: 72173 - RNA, 19 nt, Human
cagcagcaaagagcuccuu

SEQ ID NO: 72174 - RNA, 24 nt, Human
cagcagcaaagagcuccuugaaga

SEQ ID NO: 72175 - RNA, 26 nt, Human
caggcgauacacccgugugcuagccc

SEQ ID NO: 72176 - RNA, 18 nt, Human
caucucagagccagagcc

SEQ ID NO: 72177 - RNA, 21 nt, Human
ccacucucccacacauacacc

SEQ ID NO: 72178 - RNA, 24 nt, Human
ccagacccgauguaacugcuccca

SEQ ID NO: 72179 - RNA, 18 nt, Human
ccagagcacauucugcaa

SEQ ID NO: 72180 - RNA, 18 nt, Human
cccaggacccauguggcc

SEQ ID NO: 72181 - RNA, 23 nt, Human
ccccaccccaugggauuuucuca

SEQ ID NO: 72182 - RNA, 21 nt, Human
ccccacucucccacacauaca

SEQ ID NO: 72183 - RNA, 25 nt, Human
ccccacucucccacacauacaccca

SEQ ID NO: 72184 - RNA, 28 nt, Human
cccccguaaccugugcccuuggcccccc

SEQ ID NO: 72185 - RNA, 26 nt, Human
ccccuggggggucgacccggucgugg

SEQ ID NO: 72186 - RNA, 20 nt, Human
cccuccauugccgaccgacc

SEQ ID NO: 72187 - RNA, 20 nt, Human
cccugaauuccgaucuuccc

SEQ ID NO: 72188 - RNA, 18 nt, Human
cccugcccugccuguccc

SEQ ID NO: 72189 - RNA, 19 nt, Human
ccgaccaggauacccccac

SEQ ID NO: 72190 - RNA, 26 nt, Human
ccgaccccgcucccuccugguccccg

SEQ ID NO: 72191 - RNA, 23 nt, Human
ccgaccgaccaggauacccccac

SEQ ID NO: 72192 - RNA, 20 nt, Human
ccgcccaggacagaucacag

SEQ ID NO: 72193 - RNA, 19 nt, Human
ccuccaugccgcgcagacu

SEQ ID NO: 72194 - RNA, 19 nt, Human
ccugugcccuuggcccccc

SEQ ID NO: 72195 - RNA, 24 nt, Human
cgaccgaccaggauacccccaccc

SEQ ID NO: 72196 - RNA, 19 nt, Human
cucacagaaacucucugcc

SEQ ID NO: 72197 - RNA, 20 nt, Human
cucacagaaacucucugccc

SEQ ID NO: 72198 - RNA, 21 nt, Human
cucccacacauacacccagga

SEQ ID NO: 72199 - RNA, 22 nt, Human
cucccuaggccucuggacauga

SEQ ID NO: 72200 - RNA, 19 nt, Human
cuccucgcaguagugggag

SEQ ID NO: 72201 - RNA, 19 nt, Human
cucucccacacauacaccc

SEQ ID NO: 72202 - RNA, 18 nt, Human
cugcccugccugucccua

SEQ ID NO: 72203 - RNA, 22 nt, Human
cugccggaacucuucuuggagu

SEQ ID NO: 72204 - RNA, 24 nt, Human
cuggcaugggcguccccugggggg

SEQ ID NO: 72205 - RNA, 18 nt, Human
cugguccagacagcuccu

SEQ ID NO: 72206 - RNA, 20 nt, Human
cuuccuggucucaacccacc

SEQ ID NO: 72207 - RNA, 21 nt, Human
cuuggcccccccagccucucc

SEQ ID NO: 72208 - RNA, 22 nt, Human
gaagaggcugcgccacagcccu

SEQ ID NO: 72209 - RNA, 21 nt, Human
gacagcacgcagucccagagu

SEQ ID NO: 72210 - RNA, 24 nt, Human
gaccgaccaggauacccccacccc

SEQ ID NO: 72211 - RNA, 19 nt, Human
gacgaggaugagggagggg

SEQ ID NO: 72212 - RNA, 18 nt, Human
gagaggggcugggcggca

SEQ ID NO: 72213 - RNA, 18 nt, Human
gagggaggggaugggcug

SEQ ID NO: 72214 - RNA, 22 nt, Human
gaugcagcagcaaagagcuccu

SEQ ID NO: 72215 - RNA, 24 nt, Human
gcacgcagucccagagucugcaca

SEQ ID NO: 72216 - RNA, 24 nt, Human
gcccugccugucccuagcaggcuu

SEQ ID NO: 72217 - RNA, 21 nt, Human
ggaacaaacaggguggaggug

SEQ ID NO: 72218 - RNA, 21 nt, Human
ggaacaaagagaggaaagucu

SEQ ID NO: 72219 - RNA, 20 nt, Human
ggagaagccuggggcccagg

SEQ ID NO: 72220 - RNA, 19 nt, Human
ggaggggaugggcugggcc

SEQ ID NO: 72221 - RNA, 24 nt, Human
ggcccuaaaaccucccuaggccuc

SEQ ID NO: 72222 - RNA, 19 nt, Human
gggaggggaugggcugggc

SEQ ID NO: 72223 - RNA, 20 nt, Human
ggugacaggacagacgagga

SEQ ID NO: 72224 - RNA, 22 nt, Human
guccggagacagcacgcagucc

SEQ ID NO: 72225 - RNA, 18 nt, Human
guggguggggagggcccu

SEQ ID NO: 72226 - RNA, 21 nt, Human
uaaaaagagaccaaaucgacc

SEQ ID NO: 72227 - RNA, 23 nt, Human
uaaaaagagaccaaaucgaccug

SEQ ID NO: 72228 - RNA, 25 nt, Human
uaaaaagagaccaaaucgaccugug

SEQ ID NO: 72229 - RNA, 21 nt, Human
uacccccaccccaugggauuu

SEQ ID NO: 72230 - RNA, 24 nt, Human
uaccuugacucacuccauuucucg

SEQ ID NO: 72231 - RNA, 21 nt, Human
uagaacggcagcaagaacccc

SEQ ID NO: 72232 - RNA, 22 nt, Human
uaggccucuggacaugacuccu

SEQ ID NO: 72233 - RNA, 24 nt, Human
uaguuaauuuccgaguugacuguu

SEQ ID NO: 72234 - RNA, 22 nt, Human
ucacaccacccuccaugccgcg

SEQ ID NO: 72235 - RNA, 22 nt, Human
ucacaccacccuccaugccgcg

SEQ ID NO: 72236 - RNA, 26 nt, Human
ucaccccucacccuuuccuggggaaa

SEQ ID NO: 72237 - RNA, 18 nt, Human
ucagugggacucacagaa

SEQ ID NO: 72238 - RNA, 27 nt, Human
uccaccagagcacauucugcaagaaga

SEQ ID NO: 72239 - RNA, 22 nt, Human
ucccacacauacacccaggacc

SEQ ID NO: 72240 - RNA, 19 nt, Human
ucccagagucugcacacug

SEQ ID NO: 72241 - RNA, 18 nt, Human
uccccgggccuggcaugg

SEQ ID NO: 72242 - RNA, 19 nt, Human
uccccgggccuggcauggg

SEQ ID NO: 72243 - RNA, 19 nt, Human
uccccuggggggucgaccc

SEQ ID NO: 72244 - RNA, 24 nt, Human
ucccuccugguccccgcccaggac

SEQ ID NO: 72245 - RNA, 20 nt, Human
uccucagguggccgcccaga

SEQ ID NO: 72246 - RNA, 19 nt, Human
ucucgccgcagcugaagag

SEQ ID NO: 72247 - RNA, 25 nt, Human
ugacaggacagacgaggaugaggga

SEQ ID NO: 72248 - RNA, 24 nt, Human
ugaccagacucucagcuuggggcu

SEQ ID NO: 72249 - RNA, 20 nt, Human
ugacuuccuggucucaaccc

SEQ ID NO: 72250 - RNA, 22 nt, Human
ugcaagaagaacugacacgcac

SEQ ID NO: 72251 - RNA, 21 nt, Human
ugcccuuggcccccccagccu

SEQ ID NO: 72252 - RNA, 22 nt, Human
ugcccuuggcccccccagccuc

SEQ ID NO: 72253 - RNA, 19 nt, Human
ugccggaacucuucuugga

SEQ ID NO: 72254 - RNA, 22 nt, Human
ugcugggagcacagcuggucgu

SEQ ID NO: 72255 - RNA, 20 nt, Human
uggacaugacuccuaugacc

SEQ ID NO: 72256 - RNA, 19 nt, Human
uggcacagguccccgggcc

SEQ ID NO: 72257 - RNA, 20 nt, Human
uggcaggagaggggcugggc

SEQ ID NO: 72258 - RNA, 22 nt, Human
uggcaggagaggggcugggcgg

SEQ ID NO: 72259 - RNA, 27 nt, Human
uggcaggugaucccgaccccgcucccu

SEQ ID NO: 72260 - RNA, 23 nt, Human
uggcaugggcguccccugggggg

SEQ ID NO: 72261 - RNA, 20 nt, Human
uggggcccaggcgauacacc

SEQ ID NO: 72262 - RNA, 18 nt, Human
uggguguggguggggagg

SEQ ID NO: 72263 - RNA, 20 nt, Human
uggguguggguggggagggc

SEQ ID NO: 72264 - RNA, 21 nt, Human
ugucccugcccugccuguccc

SEQ ID NO: 72265 - RNA, 21 nt, Human
uguggcacagguccccgggcc

SEQ ID NO: 72266 - RNA, 22 nt, Human
uuccuggucucaacccaccacc

SEQ ID NO: 72267 - RNA, 23 nt, Human
uugagcuaaaaagagaccaaauc

SEQ ID NO: 72268 - RNA, 19 nt, Human
uuggcccccccagccucuc

SEQ ID NO: 72269 - RNA, 27 nt, Human
cacccacccauccagccuguugugagu

SEQ ID NO: 72270 - RNA, 23 nt, Human
cauccuucccuuuuuaccaccca

SEQ ID NO: 72271 - RNA, 24 nt, Human
cauuuucgcgcccaggcgcagggg

SEQ ID NO: 72272 - RNA, 25 nt, Human
ccgccgccgccauuuucgcgcccag

SEQ ID NO: 72273 - RNA, 18 nt, Human
ccgucgccgccgccgcca

SEQ ID NO: 72274 - RNA, 28 nt, Human
ccucauccuucccuuuuuaccacccacc

SEQ ID NO: 72275 - RNA, 18 nt, Human
ccugcggcucugggugcc

SEQ ID NO: 72276 - RNA, 23 nt, Human
ccuguugugaguugggugagggc

SEQ ID NO: 72277 - RNA, 22 nt, Human
cgcccggccgucgccgccgccg

SEQ ID NO: 72278 - RNA, 19 nt, Human
cggcucugggugccauccu

SEQ ID NO: 72279 - RNA, 19 nt, Human
gcggcucugggugccaucc

SEQ ID NO: 72280 - RNA, 20 nt, Human
guugggugagggcugccccc

SEQ ID NO: 72281 - RNA, 25 nt, Human
uccagccuguugugaguugggugag

SEQ ID NO: 72282 - RNA, 18 nt, Human
uccguccugcggcucugg

SEQ ID NO: 72283 - RNA, 18 nt, Human
ugacauugggggagccuu

SEQ ID NO: 72284 - RNA, 26 nt, Human
ugcccccagucuccguccugcggcuc

SEQ ID NO: 72285 - RNA, 23 nt, Human
ugugacauugggggagccucauc

SEQ ID NO: 72286 - RNA, 18 nt, Human
uuuuuuuuuuuuuuuuug

SEQ ID NO: 72287 - RNA, 18 nt, Human
aagaggaaccgaggggcu

SEQ ID NO: 72288 - RNA, 24 nt, Human
acaagauaagggaccaagaacagc

SEQ ID NO: 72289 - RNA, 23 nt, Human
acacccccgcacccccauagagc

SEQ ID NO: 72290 - RNA, 21 nt, Human
acaugacacccccgcaccccc

SEQ ID NO: 72291 - RNA, 25 nt, Human
agacgcggccgccacccccucccca

SEQ ID NO: 72292 - RNA, 20 nt, Human
agacuggggggucaccugga

SEQ ID NO: 72293 - RNA, 20 nt, Human
agacuggggggucaccugga

SEQ ID NO: 72294 - RNA, 18 nt, Human
agagcgcggugggggcag

SEQ ID NO: 72295 - RNA, 21 nt, Human
aggcagccgccgucguggagu

SEQ ID NO: 72296 - RNA, 22 nt, Human
aggcagccgccgucguggaguc

SEQ ID NO: 72297 - RNA, 23 nt, Human
aggcccuggccuaggagcugugg

SEQ ID NO: 72298 - RNA, 23 nt, Human
agggacagacuggggggucaccc

SEQ ID NO: 72299 - RNA, 24 nt, Human
agggagagggacagacuggggggu

SEQ ID NO: 72300 - RNA, 23 nt, Human
agggggguggcagguugcugggg

SEQ ID NO: 72301 - RNA, 22 nt, Human
aggguaagaggaaccgaggggc

SEQ ID NO: 72302 - RNA, 24 nt, Human
caagaagaggguaagaggaaccga

SEQ ID NO: 72303 - RNA, 27 nt, Human
cagcacaagcccagaguggugaggaca

SEQ ID NO: 72304 - RNA, 22 nt, Human
cagcgcucuggauucagggaga

SEQ ID NO: 72305 - RNA, 22 nt, Human
ccaguggcuccccaggagccca

SEQ ID NO: 72306 - RNA, 20 nt, Human
ccauagagcagggcaugggg

SEQ ID NO: 72307 - RNA, 21 nt, Human
cccacggccgccaggucccca

SEQ ID NO: 72308 - RNA, 20 nt, Human
cccccgcacccccauagagc

SEQ ID NO: 72309 - RNA, 19 nt, Human
ccccgcacccccauagagc

SEQ ID NO: 72310 - RNA, 18 nt, Human
ccgccagguccccagccg

SEQ ID NO: 72311 - RNA, 21 nt, Human
cguggaggcgagacgcggccg

SEQ ID NO: 72312 - RNA, 21 nt, Human
cuccccaguggcuccccagga

SEQ ID NO: 72313 - RNA, 25 nt, Human
cuccccaguggcuccccaggagccc

SEQ ID NO: 72314 - RNA, 21 nt, Human
cucugugcugcugccucugcu

SEQ ID NO: 72315 - RNA, 19 nt, Human
cugcaccagagaugagaau

SEQ ID NO: 72316 - RNA, 18 nt, Human
cugcugccucugcuggcu

SEQ ID NO: 72317 - RNA, 22 nt, Human
cugcugccucugcuggcugccu

SEQ ID NO: 72318 - RNA, 22 nt, Human
cuggccuaggagcuguggggca

SEQ ID NO: 72319 - RNA, 21 nt, Human
gacaugacacccccgcacccc

SEQ ID NO: 72320 - RNA, 25 nt, Human
gagcccacggccgccagguccccag

SEQ ID NO: 72321 - RNA, 20 nt, Human
gaggguaagaggaaccgagg

SEQ ID NO: 72322 - RNA, 22 nt, Human
gccacccccuccccaguggcuc

SEQ ID NO: 72323 - RNA, 18 nt, Human
gcccugugacaacaagau

SEQ ID NO: 72324 - RNA, 18 nt, Human
gccgccacccccucccca

SEQ ID NO: 72325 - RNA, 18 nt, Human
gcgggcggaagagcgcgg

SEQ ID NO: 72326 - RNA, 19 nt, Human
gcucugugcugcugccucu

SEQ ID NO: 72327 - RNA, 25 nt, Human
gcugcaccagagaugagaaucccug

SEQ ID NO: 72328 - RNA, 18 nt, Human
gcugcaggggcgggcgga

SEQ ID NO: 72329 - RNA, 19 nt, Human
gcugcugccucugcuggcu

SEQ ID NO: 72330 - RNA, 19 nt, Human
ggaagagcgcggugggggc

SEQ ID NO: 72331 - RNA, 20 nt, Human
ggacaaggcagccgccgucg

SEQ ID NO: 72332 - RNA, 20 nt, Human
ggacacagaaugagaggggc

SEQ ID NO: 72333 - RNA, 23 nt, Human
ggaccaagaacagcacaagccca

SEQ ID NO: 72334 - RNA, 18 nt, Human
ggagucaagggacacaga

SEQ ID NO: 72335 - RNA, 18 nt, Human
ggcaggggacagccaggu

SEQ ID NO: 72336 - RNA, 19 nt, Human
ggcaggggacagccaggug

SEQ ID NO: 72337 - RNA, 18 nt, Human
gggcggaagagcgcggug

SEQ ID NO: 72338 - RNA, 25 nt, Human
gugcugcugccucugcuggcugccu

SEQ ID NO: 72339 - RNA, 20 nt, Human
guggcagguugcuggggaaa

SEQ ID NO: 72340 - RNA, 20 nt, Human
guggcucugugcugcugccu

SEQ ID NO: 72341 - RNA, 22 nt, Human
guggggcaggggacagccaggu

SEQ ID NO: 72342 - RNA, 23 nt, Human
ucaccuggagaccaucucugagc

SEQ ID NO: 72343 - RNA, 26 nt, Human
uccccaguggcuccccaggagcccac

SEQ ID NO: 72344 - RNA, 24 nt, Human
uccgugcugcaggggcgggcggaa

SEQ ID NO: 72345 - RNA, 19 nt, Human
ucugugcugcugccucugc

SEQ ID NO: 72346 - RNA, 23 nt, Human
ugcacacagguggaccccguaug

SEQ ID NO: 72347 - RNA, 21 nt, Human
ugccucguggacaaggcagcc

SEQ ID NO: 72348 - RNA, 22 nt, Human
ugccucugcuggcugccuauuc

SEQ ID NO: 72349 - RNA, 21 nt, Human
ugcguguuaggggcagggaca

SEQ ID NO: 72350 - RNA, 18 nt, Human
uggaggcgagacgcggcc

SEQ ID NO: 72351 - RNA, 18 nt, Human
uggagucaagggacacag

SEQ ID NO: 72352 - RNA, 24 nt, Human
uggcguaggguccaagaagagggu

SEQ ID NO: 72353 - RNA, 18 nt, Human
uguggggaggguuagccc

SEQ ID NO: 72354 - RNA, 24 nt, Human
uguuaggggcagggacaggcccug

SEQ ID NO: 72355 - RNA, 26 nt, Human
uucagggagagggacagacugggggg

SEQ ID NO: 72356 - RNA, 22 nt, Human
uugcuggggaaagugcaagaca

SEQ ID NO: 72357 - RNA, 19 nt, Human
uuguccgugcugcaggggc

SEQ ID NO: 72358 - RNA, 22 nt, Human
uuguccgugcugcaggggcggg

SEQ ID NO: 72359 - RNA, 21 nt, Human
aaacaaccaccuaccuaguaa

SEQ ID NO: 72360 - RNA, 23 nt, Human
aaaguuaccauuuugaaaugcaa

SEQ ID NO: 72361 - RNA, 19 nt, Human
aaugaaaggaccugccuuu

SEQ ID NO: 72362 - RNA, 23 nt, Human
acaagaaucaaguugcaugaaug

SEQ ID NO: 72363 - RNA, 18 nt, Human
acaaggaagaaaggaagc

SEQ ID NO: 72364 - RNA, 22 nt, Human
accaccugucuggaaaaaaucc

SEQ ID NO: 72365 - RNA, 22 nt, Human
accccaggcacuuguacuccua

SEQ ID NO: 72366 - RNA, 25 nt, Human
agaaagaggcaaucucaaagagagg

SEQ ID NO: 72367 - RNA, 19 nt, Human
agaaaugcgaucucccucc

SEQ ID NO: 72368 - RNA, 22 nt, Human
agccaaaaagucaaucacaaga

SEQ ID NO: 72369 - RNA, 20 nt, Human
aggaagccguuucugcaguu

SEQ ID NO: 72370 - RNA, 25 nt, Human
aggcaaaaaaugcaaaagagggacc

SEQ ID NO: 72371 - RNA, 26 nt, Human
aggcagaagauugaaaugguucaggg

SEQ ID NO: 72372 - RNA, 19 nt, Human
aggcagugcuguccagggc

SEQ ID NO: 72373 - RNA, 25 nt, Human
aguaggugggaucguggcgcuuucc

SEQ ID NO: 72374 - RNA, 22 nt, Human
aguccugcuuccuguggcuaga

SEQ ID NO: 72375 - RNA, 23 nt, Human
aguccugcuuccuguggcuagau

SEQ ID NO: 72376 - RNA, 18 nt, Human
auaauuucucugaaguuu

SEQ ID NO: 72377 - RNA, 24 nt, Human
augcgaucucccucagcucuguuu

SEQ ID NO: 72378 - RNA, 23 nt, Human
caaaaagucaaucacaagaauca

SEQ ID NO: 72379 - RNA, 19 nt, Human
caacaggcacgcuaagcgc

SEQ ID NO: 72380 - RNA, 19 nt, Human
caagaaucaaguugcauga

SEQ ID NO: 72381 - RNA, 19 nt, Human
caauucagcuaaugagcca

SEQ ID NO: 72382 - RNA, 19 nt, Human
cacgcaccggcguccacgc

SEQ ID NO: 72383 - RNA, 20 nt, Human
cacgcaccggcguccacgca

SEQ ID NO: 72384 - RNA, 22 nt, Human
cagaccaccugucuggaaaaaa

SEQ ID NO: 72385 - RNA, 22 nt, Human
cagcauagcacaggauacccuu

SEQ ID NO: 72386 - RNA, 24 nt, Human
cagcucuguuuuaacguuggugaa

SEQ ID NO: 72387 - RNA, 25 nt, Human
cagggcaagggacagaaaacccgcc

SEQ ID NO: 72388 - RNA, 18 nt, Human
caguggcugcugugccug

SEQ ID NO: 72389 - RNA, 22 nt, Human
caucacuuucaggccccagugg

SEQ ID NO: 72390 - RNA, 22 nt, Human
ccacgcaucuagcuccugcacc

SEQ ID NO: 72391 - RNA, 18 nt, Human
ccccaguggcugcugugc

SEQ ID NO: 72392 - RNA, 20 nt, Human
ccccaguggcugcugugccu

SEQ ID NO: 72393 - RNA, 23 nt, Human
cccucccgcccuauugccggaag

SEQ ID NO: 72394 - RNA, 24 nt, Human
cccucucccugcucugccuuuuuu

SEQ ID NO: 72395 - RNA, 20 nt, Human
ccggaagacugcugguugcc

SEQ ID NO: 72396 - RNA, 20 nt, Human
ccucacuagccuuccucgcu

SEQ ID NO: 72397 - RNA, 20 nt, Human
ccucagaaaaauaucacccu

SEQ ID NO: 72398 - RNA, 22 nt, Human
ccucgacggacagcaaggggga

SEQ ID NO: 72399 - RNA, 18 nt, Human
ccuggacacuguuuaagg

SEQ ID NO: 72400 - RNA, 18 nt, Human
ccuguauucacagcgggg

SEQ ID NO: 72401 - RNA, 19 nt, Human
cgacgggaagaacgcacuc

SEQ ID NO: 72402 - RNA, 24 nt, Human
cgcuaagcgcgguaccuggaaacc

SEQ ID NO: 72403 - RNA, 21 nt, Human
cggagcagcgucccgccugcc

SEQ ID NO: 72404 - RNA, 25 nt, Human
cgggaaaagccugauucccacagcg

SEQ ID NO: 72405 - RNA, 23 nt, Human
cgggguuuggggggagugucucc

SEQ ID NO: 72406 - RNA, 19 nt, Human
cucauuacaccccaggcac

SEQ ID NO: 72407 - RNA, 21 nt, Human
cucccgcccuauugccggaag

SEQ ID NO: 72408 - RNA, 24 nt, Human
cucgcagcuugccgggcucugcga

SEQ ID NO: 72409 - RNA, 20 nt, Human
cugcagggcgggagggaggc

SEQ ID NO: 72410 - RNA, 22 nt, Human
cugccaguuguaaaguuaccau

SEQ ID NO: 72411 - RNA, 20 nt, Human
cugcugguugccuacucccc

SEQ ID NO: 72412 - RNA, 26 nt, Human
cuggaaaccuccaguccacgcaccgg

SEQ ID NO: 72413 - RNA, 19 nt, Human
cuucucaccgagcucaccc

SEQ ID NO: 72414 - RNA, 25 nt, Human
cuugccgggcucugcgaucccucca

SEQ ID NO: 72415 - RNA, 26 nt, Human
gacacuguuuaaggcugcauuuucug

SEQ ID NO: 72416 - RNA, 19 nt, Human
gaccugcauauuuuaguac

SEQ ID NO: 72417 - RNA, 18 nt, Human
gacggacagcaaggggga

SEQ ID NO: 72418 - RNA, 19 nt, Human
gacucgcagauuccuccuc

SEQ ID NO: 72419 - RNA, 20 nt, Human
gcgggguuuggggggagugu

SEQ ID NO: 72420 - RNA, 21 nt, Human
gcuggccccucucccugcucu

SEQ ID NO: 72421 - RNA, 22 nt, Human
gcuuucccgcuuuucccuucca

SEQ ID NO: 72422 - RNA, 20 nt, Human
ggaaaaaauccuucaagcaa

SEQ ID NO: 72423 - RNA, 19 nt, Human
ggaggggguggagcuggga

SEQ ID NO: 72424 - RNA, 24 nt, Human
ggguuuucugcgggaaaagccuga

SEQ ID NO: 72425 - RNA, 18 nt, Human
gguugccuacuccccgcu

SEQ ID NO: 72426 - RNA, 20 nt, Human
guccacgcaccggcguccac

SEQ ID NO: 72427 - RNA, 21 nt, Human
gucuccugguuuucucuaugg

SEQ ID NO: 72428 - RNA, 19 nt, Human
gugcgucuuauaaauggaa

SEQ ID NO: 72429 - RNA, 24 nt, Human
guuacuacugagucguggggacau

SEQ ID NO: 72430 - RNA, 24 nt, Human
uaaaagaaacuaacaacaaaauau

SEQ ID NO: 72431 - RNA, 21 nt, Human
uaagcgcgguaccuggaaacc

SEQ ID NO: 72432 - RNA, 20 nt, Human
uacagcauguuuccauuaau

SEQ ID NO: 72433 - RNA, 20 nt, Human
uagcuccugcaccugaaccu

SEQ ID NO: 72434 - RNA, 20 nt, Human
uagcuucuaauagaacucuu

SEQ ID NO: 72435 - RNA, 19 nt, Human
uaggcaaaaaaugcaaaag

SEQ ID NO: 72436 - RNA, 26 nt, Human
uauaacuucuguuguauuucugggaa

SEQ ID NO: 72437 - RNA, 23 nt, Human
uaugcggugcuuguuuccuuggg

SEQ ID NO: 72438 - RNA, 19 nt, Human
uauggagacuagggacuua

SEQ ID NO: 72439 - RNA, 23 nt, Human
uauugccggaagacugcugguug

SEQ ID NO: 72440 - RNA, 22 nt, Human
ucaagucuuacuuauguuagaa

SEQ ID NO: 72441 - RNA, 21 nt, Human
ucacaguaggugggaucgugg

SEQ ID NO: 72442 - RNA, 26 nt, Human
ucacuagccuuccucgcuagccuccu

SEQ ID NO: 72443 - RNA, 18 nt, Human
ucacuguggagggggugg

SEQ ID NO: 72444 - RNA, 23 nt, Human
uccaaaaacuuggacaacugacg

SEQ ID NO: 72445 - RNA, 22 nt, Human
uccaagagaaaguccagaguac

SEQ ID NO: 72446 - RNA, 23 nt, Human
uccacaagcuucccucacuagcc

SEQ ID NO: 72447 - RNA, 19 nt, Human
uccacuuuacuauccaguc

SEQ ID NO: 72448 - RNA, 22 nt, Human
uccccgcucccuggaguuuuau

SEQ ID NO: 72449 - RNA, 20 nt, Human
ucccggggcaaacauuucuc

SEQ ID NO: 72450 - RNA, 24 nt, Human
ucccucagcucuguuuuuccucgg

SEQ ID NO: 72451 - RNA, 18 nt, Human
ucgcggcgcgcucccucc

SEQ ID NO: 72452 - RNA, 22 nt, Human
ucgcuagccuccuuaaccaugc

SEQ ID NO: 72453 - RNA, 20 nt, Human
ucucagcagggugagcuggc

SEQ ID NO: 72454 - RNA, 28 nt, Human
ucugcgaucccuccagugggcgucuccc

SEQ ID NO: 72455 - RNA, 22 nt, Human
ucuuuguucagaaauagugccg

SEQ ID NO: 72456 - RNA, 23 nt, Human
ugaaacguaggcaaaaaaugcaa

SEQ ID NO: 72457 - RNA, 19 nt, Human
ugagaugcuggacuugaaa

SEQ ID NO: 72458 - RNA, 22 nt, Human
ugagcagcucucagcaggguga

SEQ ID NO: 72459 - RNA, 21 nt, Human
ugccuguauucacagcggggu

SEQ ID NO: 72460 - RNA, 18 nt, Human
ugcgacgggaagaacgca

SEQ ID NO: 72461 - RNA, 21 nt, Human
ugcggugcuuguuuccuugga

SEQ ID NO: 72462 - RNA, 22 nt, Human
uggacaaagagcagcugccgga

SEQ ID NO: 72463 - RNA, 19 nt, Human
uggagccccucugcagggc

SEQ ID NO: 72464 - RNA, 20 nt, Human
uggccagucaacauuuccuc

SEQ ID NO: 72465 - RNA, 22 nt, Human
uggcucucgaccucaccuccuc

SEQ ID NO: 72466 - RNA, 19 nt, Human
ugguugccuacuccccgcu

SEQ ID NO: 72467 - RNA, 22 nt, Human
ugugccuguauucacagcgggg

SEQ ID NO: 72468 - RNA, 22 nt, Human
uguucagaaauagugccgcauu

SEQ ID NO: 72469 - RNA, 23 nt, Human
uguuguugaggucaucgggaaga

SEQ ID NO: 72470 - RNA, 19 nt, Human
uucagggauggaagguaau

SEQ ID NO: 72471 - RNA, 21 nt, Human
uuccccaggcaaauuuucccg

SEQ ID NO: 72472 - RNA, 22 nt, Human
uuccccaggcaaauuuucccgg

SEQ ID NO: 72473 - RNA, 21 nt, Human
uucccggggcaaacauuucuc

SEQ ID NO: 72474 - RNA, 18 nt, Human
uuccggaagcacuggguu

SEQ ID NO: 72475 - RNA, 19 nt, Human
uuccuccucacaguaggug

SEQ ID NO: 72476 - RNA, 21 nt, Human
uuggacaacugacgagucaug

SEQ ID NO: 72477 - RNA, 21 nt, Human
uuggccagucaacauuuccuc

SEQ ID NO: 72478 - RNA, 19 nt, Human
uuuucaggcaauuuuacaa

SEQ ID NO: 72479 - RNA, 24 nt, Human
uuuuggguggacaaagagcagcug

SEQ ID NO: 72480 - RNA, 22 nt, Human
aaaggcggagacaggaaggucc

SEQ ID NO: 72481 - RNA, 23 nt, Human
aaggagaccccuugccaugugga

SEQ ID NO: 72482 - RNA, 26 nt, Human
agacagacggaugcacagaacccagg

SEQ ID NO: 72483 - RNA, 25 nt, Human
agacggaugcacagaacccaggauc

SEQ ID NO: 72484 - RNA, 18 nt, Human
agccccuccuacacccag

SEQ ID NO: 72485 - RNA, 22 nt, Human
aggagcaaguucaauggcccag

SEQ ID NO: 72486 - RNA, 19 nt, Human
aggcaagacacccaacagc

SEQ ID NO: 72487 - RNA, 20 nt, Human
aggcaggggcuguggcuugu

SEQ ID NO: 72488 - RNA, 21 nt, Human
aggccccugggaccgcugucu

SEQ ID NO: 72489 - RNA, 25 nt, Human
agggagagaaugaggagggagggau

SEQ ID NO: 72490 - RNA, 19 nt, Human
aggggcuguggcuugucca

SEQ ID NO: 72491 - RNA, 26 nt, Human
cacacagugucccagccucggggccu

SEQ ID NO: 72492 - RNA, 22 nt, Human
cacaggcucuggccaauucucc

SEQ ID NO: 72493 - RNA, 18 nt, Human
caccugcucccucuuucc

SEQ ID NO: 72494 - RNA, 20 nt, Human
caccugcucccucuuuccug

SEQ ID NO: 72495 - RNA, 18 nt, Human
caccugggggcaccugcu

SEQ ID NO: 72496 - RNA, 19 nt, Human
cagcugagcuucucaaagc

SEQ ID NO: 72497 - RNA, 23 nt, Human
caggaaggcagcugagcuucuca

SEQ ID NO: 72498 - RNA, 23 nt, Human
cagggucucuggacuggagcccu

SEQ ID NO: 72499 - RNA, 23 nt, Human
cagguguucugagggccuggagg

SEQ ID NO: 72500 - RNA, 21 nt, Human
cagugagcugaccugaggggc

SEQ ID NO: 72501 - RNA, 23 nt, Human
ccaauucuccacgggucccccuc

SEQ ID NO: 72502 - RNA, 25 nt, Human
ccacgggucccccucccaguggcuc

SEQ ID NO: 72503 - RNA, 23 nt, Human
ccagcucagugagcugaccugag

SEQ ID NO: 72504 - RNA, 22 nt, Human
ccccugggaccgcugucucacc

SEQ ID NO: 72505 - RNA, 23 nt, Human
ccucaggccucugcugcagcccc

SEQ ID NO: 72506 - RNA, 24 nt, Human
ccuccuacacccagcucagugagc

SEQ ID NO: 72507 - RNA, 22 nt, Human
ccugccacuccucaggccucug

SEQ ID NO: 72508 - RNA, 19 nt, Human
ccuuccuuuucaggccccu

SEQ ID NO: 72509 - RNA, 20 nt, Human
cuccucaggccucugcugca

SEQ ID NO: 72510 - RNA, 20 nt, Human
cugcagccccuccuacaccc

SEQ ID NO: 72511 - RNA, 21 nt, Human
cugcagccccuccuacaccca

SEQ ID NO: 72512 - RNA, 22 nt, Human
cuggccccagccugguccuucc

SEQ ID NO: 72513 - RNA, 20 nt, Human
cuggggcagguguucugagg

SEQ ID NO: 72514 - RNA, 21 nt, Human
cuggggccugaagcucuccuc

SEQ ID NO: 72515 - RNA, 21 nt, Human
cugggggcaccugcucccucu

SEQ ID NO: 72516 - RNA, 22 nt, Human
gccaauucuccacggguccccc

SEQ ID NO: 72517 - RNA, 19 nt, Human
gccauguggaaaagagcuc

SEQ ID NO: 72518 - RNA, 18 nt, Human
gccccuccuacacccagc

SEQ ID NO: 72519 - RNA, 18 nt, Human
gcggagacaggaaggucc

SEQ ID NO: 72520 - RNA, 22 nt, Human
ggagacaggaagguccccuggc

SEQ ID NO: 72521 - RNA, 21 nt, Human
ggcaccugcucccucuuuccu

SEQ ID NO: 72522 - RNA, 19 nt, Human
ggccuggaggugaugugcg

SEQ ID NO: 72523 - RNA, 22 nt, Human
ggcuggggcagguguucugagg

SEQ ID NO: 72524 - RNA, 19 nt, Human
gggagagaaugaggaggga

SEQ ID NO: 72525 - RNA, 18 nt, Human
gggcagggaagauugaga

SEQ ID NO: 72526 - RNA, 23 nt, Human
gggcuggggcagguguucugagg

SEQ ID NO: 72527 - RNA, 21 nt, Human
ggggcagguguucugagggcc

SEQ ID NO: 72528 - RNA, 21 nt, Human
ggggcagguguucugagggcc

SEQ ID NO: 72529 - RNA, 20 nt, Human
guggagacccaggcaggggc

SEQ ID NO: 72530 - RNA, 22 nt, Human
uauagagaugccagcauggcag

SEQ ID NO: 72531 - RNA, 18 nt, Human
uauuagggagagaaugag

SEQ ID NO: 72532 - RNA, 21 nt, Human
uauuagggagagaaugaggag

SEQ ID NO: 72533 - RNA, 21 nt, Human
ucaccugggggcaccugcucc

SEQ ID NO: 72534 - RNA, 18 nt, Human
ucaggccucugcugcagc

SEQ ID NO: 72535 - RNA, 18 nt, Human
ucagugagcugaccugag

SEQ ID NO: 72536 - RNA, 19 nt, Human
uccaauuuuuauuagggag

SEQ ID NO: 72537 - RNA, 22 nt, Human
uccccuggccccagccuggucc

SEQ ID NO: 72538 - RNA, 22 nt, Human
uccuggggccugaagcucuccu

SEQ ID NO: 72539 - RNA, 21 nt, Human
ucucaaagccucuagaggcaa

SEQ ID NO: 72540 - RNA, 23 nt, Human
ugagcugaccugaggggccccca

SEQ ID NO: 72541 - RNA, 24 nt, Human
ugaggagggagggauuagaaaggc

SEQ ID NO: 72542 - RNA, 20 nt, Human
ugccugaggagcaaguucaa

SEQ ID NO: 72543 - RNA, 22 nt, Human
ugccuguuggcgugugucgugu

SEQ ID NO: 72544 - RNA, 22 nt, Human
uggcaguauggccaguccuggg

SEQ ID NO: 72545 - RNA, 21 nt, Human
uggcgugugugcacgugugcg

SEQ ID NO: 72546 - RNA, 20 nt, Human
uggcucccaggaccagcccc

SEQ ID NO: 72547 - RNA, 22 nt, Human
ugggcagggaagauugagaggg

SEQ ID NO: 72548 - RNA, 23 nt, Human
uggggcagguguucugagggccu

SEQ ID NO: 72549 - RNA, 20 nt, Human
uuccugccacuccucaggcc

SEQ ID NO: 72550 - RNA, 24 nt, Human
uugccauguggaaaagagcuccaa

SEQ ID NO: 72551 - RNA, 21 nt, Human
aaacaccaccccacagucaaa

SEQ ID NO: 72552 - RNA, 18 nt, Human
aagugucaucgcaugaaa

SEQ ID NO: 72553 - RNA, 24 nt, Human
acacaguggcaggcaagagacaag

SEQ ID NO: 72554 - RNA, 18 nt, Human
acccgugcccgccaaggg

SEQ ID NO: 72555 - RNA, 23 nt, Human
agacaagcuguguugaaggcacu

SEQ ID NO: 72556 - RNA, 25 nt, Human
agaggugggagggcugcacggaggu

SEQ ID NO: 72557 - RNA, 21 nt, Human
agccuaucaguccaccuucuc

SEQ ID NO: 72558 - RNA, 19 nt, Human
agcggcagcgcggcgggcg

SEQ ID NO: 72559 - RNA, 18 nt, Human
aggcaccuggcaccucgg

SEQ ID NO: 72560 - RNA, 20 nt, Human
aggcgacuggcggccaggug

SEQ ID NO: 72561 - RNA, 19 nt, Human
agggaggugccgggggaug

SEQ ID NO: 72562 - RNA, 23 nt, Human
auccuccgaggcaccuggcaccu

SEQ ID NO: 72563 - RNA, 24 nt, Human
auugcuaugaggagugguccaggc

SEQ ID NO: 72564 - RNA, 24 nt, Human
cacagcggggcgggaaguggugcc

SEQ ID NO: 72565 - RNA, 19 nt, Human
caccagggugcgguagggg

SEQ ID NO: 72566 - RNA, 23 nt, Human
caccugaagcuggcagcagggac

SEQ ID NO: 72567 - RNA, 23 nt, Human
caccugcuccuugggccgggcug

SEQ ID NO: 72568 - RNA, 20 nt, Human
cacgccacgcccaccuuccc

SEQ ID NO: 72569 - RNA, 18 nt, Human
cacgcccaccuucccacu

SEQ ID NO: 72570 - RNA, 21 nt, Human
cacggcccugggggcccugac

SEQ ID NO: 72571 - RNA, 19 nt, Human
cacuuugccgaugaucuuc

SEQ ID NO: 72572 - RNA, 23 nt, Human
cagacucgggcagccccugcugg

SEQ ID NO: 72573 - RNA, 20 nt, Human
cagaggcccugcaggccucu

SEQ ID NO: 72574 - RNA, 18 nt, Human
cagccgccagcucccacc

SEQ ID NO: 72575 - RNA, 19 nt, Human
cagccuucuuggcauuucu

SEQ ID NO: 72576 - RNA, 18 nt, Human
cagcggcagcgcggcggg

SEQ ID NO: 72577 - RNA, 19 nt, Human
cagcggcagcgcggcgggc

SEQ ID NO: 72578 - RNA, 26 nt, Human
caggccccaggcgaagcugcucuggg

SEQ ID NO: 72579 - RNA, 18 nt, Human
ccacaacgaugcugucac

SEQ ID NO: 72580 - RNA, 25 nt, Human
cccaccuuccucugcgaucuugucc

SEQ ID NO: 72581 - RNA, 26 nt, Human
cccaccuuccucugcgaucuuguccu

SEQ ID NO: 72582 - RNA, 20 nt, Human
cccauguccacacagcgggg

SEQ ID NO: 72583 - RNA, 22 nt, Human
ccccacagucaaacucgucgcu

SEQ ID NO: 72584 - RNA, 23 nt, Human
ccccacagucaaacucgucgcuc

SEQ ID NO: 72585 - RNA, 19 nt, Human
cccggagcccggcacagcc

SEQ ID NO: 72586 - RNA, 19 nt, Human
cccucagaaaggaggaccc

SEQ ID NO: 72587 - RNA, 23 nt, Human
ccgccagcucccacccgcccgcu

SEQ ID NO: 72588 - RNA, 20 nt, Human
ccgcccaccuuccucugcga

SEQ ID NO: 72589 - RNA, 21 nt, Human
ccggcggcuggaggcaggugc

SEQ ID NO: 72590 - RNA, 18 nt, Human
ccgggggauggggggggg

SEQ ID NO: 72591 - RNA, 23 nt, Human
ccgggggaugggggggggucacc

SEQ ID NO: 72592 - RNA, 20 nt, Human
ccgugacacccgugcccgcc

SEQ ID NO: 72593 - RNA, 24 nt, Human
cgccccugacuuggguacgugcuu

SEQ ID NO: 72594 - RNA, 21 nt, Human
cgcggggcaggccgcgggggc

SEQ ID NO: 72595 - RNA, 23 nt, Human
cggcagcgcggcgggcgggaccc

SEQ ID NO: 72596 - RNA, 18 nt, Human
cggccccucaccagggug

SEQ ID NO: 72597 - RNA, 20 nt, Human
cggcccggaggcggacgcgg

SEQ ID NO: 72598 - RNA, 18 nt, Human
cggcccggggcggccccc

SEQ ID NO: 72599 - RNA, 18 nt, Human
cggcggcagcggccacga

SEQ ID NO: 72600 - RNA, 22 nt, Human
cggcucggcggcccggaggcgg

SEQ ID NO: 72601 - RNA, 20 nt, Human
cgggccugggccccacccag

SEQ ID NO: 72602 - RNA, 23 nt, Human
cuccagcuggguuaggggguugg

SEQ ID NO: 72603 - RNA, 24 nt, Human
cuccgcauccuccgaggcaccugg

SEQ ID NO: 72604 - RNA, 20 nt, Human
cuccgcguggacgcggcucc

SEQ ID NO: 72605 - RNA, 20 nt, Human
cucggcggcccggaggcgga

SEQ ID NO: 72606 - RNA, 23 nt, Human
cucgucgcucacuuucuugaagu

SEQ ID NO: 72607 - RNA, 21 nt, Human
cugcggguggccucggccucc

SEQ ID NO: 72608 - RNA, 20 nt, Human
cuggcaccucggugcuggcg

SEQ ID NO: 72609 - RNA, 23 nt, Human
cuggcaccucggugcuggcgcuc

SEQ ID NO: 72610 - RNA, 20 nt, Human
cuggcagcagggaccucggc

SEQ ID NO: 72611 - RNA, 25 nt, Human
cuggccuagccugagaaauguacau

SEQ ID NO: 72612 - RNA, 24 nt, Human
cuggcggcggcagcggccacgauc

SEQ ID NO: 72613 - RNA, 20 nt, Human
cugggcccugcggguggccu

SEQ ID NO: 72614 - RNA, 24 nt, Human
cugggcccugcggguggccucggc

SEQ ID NO: 72615 - RNA, 21 nt, Human
cugggugggguggcauggugg

SEQ ID NO: 72616 - RNA, 18 nt, Human
gacucagccuucuuggca

SEQ ID NO: 72617 - RNA, 25 nt, Human
gagcugggugggguggcaugguggg

SEQ ID NO: 72618 - RNA, 27 nt, Human
gaggcaggugcagugcuccccaagggg

SEQ ID NO: 72619 - RNA, 25 nt, Human
gcccaccuuccucugcgaucuuguc

SEQ ID NO: 72620 - RNA, 18 nt, Human
gccccaggcgaagcugcu

SEQ ID NO: 72621 - RNA, 24 nt, Human
gccgggggaugggggggggucacc

SEQ ID NO: 72622 - RNA, 23 nt, Human
gccguccucaccuuccuccucca

SEQ ID NO: 72623 - RNA, 22 nt, Human
gcugcccuuuuuggucagcagc

SEQ ID NO: 72624 - RNA, 19 nt, Human
gcuuccucguccccgaaga

SEQ ID NO: 72625 - RNA, 18 nt, Human
ggacccaggacugcacag

SEQ ID NO: 72626 - RNA, 18 nt, Human
ggaugggggggggucacc

SEQ ID NO: 72627 - RNA, 24 nt, Human
ggcuccugaguacgaggucaucug

SEQ ID NO: 72628 - RNA, 18 nt, Human
gggaugggggggggucac

SEQ ID NO: 72629 - RNA, 25 nt, Human
gggcgggaaguggugccaagcgggg

SEQ ID NO: 72630 - RNA, 24 nt, Human
gguggcaugguggggucuuggaug

SEQ ID NO: 72631 - RNA, 21 nt, Human
guccucaccuuccuccuccau

SEQ ID NO: 72632 - RNA, 26 nt, Human
gugacagcgcggccccucaccagggu

SEQ ID NO: 72633 - RNA, 20 nt, Human
guggccgguccugcggugcc

SEQ ID NO: 72634 - RNA, 21 nt, Human
guggcuuccucguccccgaag

SEQ ID NO: 72635 - RNA, 23 nt, Human
uacgugggcaaaucccagaggga

SEQ ID NO: 72636 - RNA, 20 nt, Human
uagccucgggaccuugcccc

SEQ ID NO: 72637 - RNA, 25 nt, Human
ucaaugauccacugcaugauuuucu

SEQ ID NO: 72638 - RNA, 23 nt, Human
ucagaaaggaggacccaggacug

SEQ ID NO: 72639 - RNA, 21 nt, Human
uccacacagcggggcgggaag

SEQ ID NO: 72640 - RNA, 18 nt, Human
uccagcuucgccccugac

SEQ ID NO: 72641 - RNA, 22 nt, Human
ucccagcacacgugcccaaggg

SEQ ID NO: 72642 - RNA, 24 nt, Human
uccccgaagacccguggccggucc

SEQ ID NO: 72643 - RNA, 18 nt, Human
ucccgccgcccaccuucc

SEQ ID NO: 72644 - RNA, 22 nt, Human
ucccgccgcccaccuuccucug

SEQ ID NO: 72645 - RNA, 21 nt, Human
ucccggagcccggcacagccc

SEQ ID NO: 72646 - RNA, 22 nt, Human
ucccgugccccgaggcggcacc

SEQ ID NO: 72647 - RNA, 19 nt, Human
uccucaccuuccuccucca

SEQ ID NO: 72648 - RNA, 21 nt, Human
uccucaccuuccuccuccaug

SEQ ID NO: 72649 - RNA, 20 nt, Human
uccuuuucccccucaaugau

SEQ ID NO: 72650 - RNA, 21 nt, Human
ucucgaaccuccucaaacacc

SEQ ID NO: 72651 - RNA, 20 nt, Human
ucucuuuucuuccuccucca

SEQ ID NO: 72652 - RNA, 21 nt, Human
ucugcuuggagggugcucggc

SEQ ID NO: 72653 - RNA, 23 nt, Human
ucugguucuucuccgcauccucc

SEQ ID NO: 72654 - RNA, 19 nt, Human
ucuuuugcacgccacgccc

SEQ ID NO: 72655 - RNA, 18 nt, Human
ugaacuggcccaggguga

SEQ ID NO: 72656 - RNA, 23 nt, Human
ugacagaggcccugcaggccucu

SEQ ID NO: 72657 - RNA, 19 nt, Human
ugcacagccggcggcugga

SEQ ID NO: 72658 - RNA, 19 nt, Human
ugcaggccggccgcgucca

SEQ ID NO: 72659 - RNA, 20 nt, Human
ugccgggggaugggggggga

SEQ ID NO: 72660 - RNA, 20 nt, Human
ugccgggggauggggggggg

SEQ ID NO: 72661 - RNA, 22 nt, Human
ugccgggggauggggggggguc

SEQ ID NO: 72662 - RNA, 21 nt, Human
ugcggugccugcugaucuccu

SEQ ID NO: 72663 - RNA, 21 nt, Human
uggacgugucggugguggugc

SEQ ID NO: 72664 - RNA, 22 nt, Human
uggaguucucauggggcugugg

SEQ ID NO: 72665 - RNA, 19 nt, Human
uggccaggcccaggcgacu

SEQ ID NO: 72666 - RNA, 20 nt, Human
uggcccagggugacagcgcg

SEQ ID NO: 72667 - RNA, 19 nt, Human
ugggggcaggacagaagcu

SEQ ID NO: 72668 - RNA, 20 nt, Human
ugggggcaggacagaagcuu

SEQ ID NO: 72669 - RNA, 24 nt, Human
ugguggggucuuggaugaagaggu

SEQ ID NO: 72670 - RNA, 18 nt, Human
uggugguggacgugucgg

SEQ ID NO: 72671 - RNA, 24 nt, Human
ugguuccaggccccaggcgaagcu

SEQ ID NO: 72672 - RNA, 21 nt, Human
uguacauauuuacacgggccc

SEQ ID NO: 72673 - RNA, 19 nt, Human
ugugugguuccaggcccca

SEQ ID NO: 72674 - RNA, 21 nt, Human
uucacacaguggcaggcaaga

SEQ ID NO: 72675 - RNA, 20 nt, Human
uucuuuugcacgccacgccc

SEQ ID NO: 72676 - RNA, 21 nt, Human
uuggaugaagaggugggaggg

SEQ ID NO: 72677 - RNA, 24 nt, Human
uuggguacgugcuucccgugcccc

SEQ ID NO: 72678 - RNA, 22 nt, Human
uuugccgaugaucuucuccuca

SEQ ID NO: 72679 - RNA, 19 nt, Human
aaccuccccccgcccuccc

SEQ ID NO: 72680 - RNA, 26 nt, Human
aagcccacuggccgauucuuccuuag

SEQ ID NO: 72681 - RNA, 19 nt, Human
agccaagacaguucacaag

SEQ ID NO: 72682 - RNA, 21 nt, Human
ccccccgcccucccgaagccc

SEQ ID NO: 72683 - RNA, 22 nt, Human
ccccccgcccucccgaagccca

SEQ ID NO: 72684 - RNA, 21 nt, Human
cccucccgaagcccacuggcc

SEQ ID NO: 72685 - RNA, 22 nt, Human
ccucucagcaaucggcgugguc

SEQ ID NO: 72686 - RNA, 22 nt, Human
cggcguggucucucugucucuc

SEQ ID NO: 72687 - RNA, 21 nt, Human
cucccgaagcccacuggccga

SEQ ID NO: 72688 - RNA, 22 nt, Human
cuucgggcuccaacaguucacc

SEQ ID NO: 72689 - RNA, 23 nt, Human
gaaaaucaaccuccccccgcccu

SEQ ID NO: 72690 - RNA, 18 nt, Human
gggaaaucaacuguucua

SEQ ID NO: 72691 - RNA, 21 nt, Human
uaaagcagcauauccauaaac

SEQ ID NO: 72692 - RNA, 20 nt, Human
ucaaccuccccccgcccucc

SEQ ID NO: 72693 - RNA, 23 nt, Human
ucagcaaucggcguggucucucu

SEQ ID NO: 72694 - RNA, 23 nt, Human
ugaaucaugaaaaucaaccuccc

SEQ ID NO: 72695 - RNA, 24 nt, Human
ugguuuaauuuuccuucaaaaugu

SEQ ID NO: 72696 - RNA, 25 nt, Human
uuaauaaauaguucaggcuuuucuu

SEQ ID NO: 72697 - RNA, 19 nt, Human
uuucuucuuccaguuccuc

SEQ ID NO: 72698 - RNA, 27 nt, Human
aaaaaaaaaaaaaaguaggccuuagaa

SEQ ID NO: 72699 - RNA, 20 nt, Human
aaaaaaaaguaggccuuaga

SEQ ID NO: 72700 - RNA, 21 nt, Human
aaaaaaaaguaggccuuagaa

SEQ ID NO: 72701 - RNA, 24 nt, Human
aaacauuccuccagaacuccacuc

SEQ ID NO: 72702 - RNA, 20 nt, Human
aacauggugaaacccugucu

SEQ ID NO: 72703 - RNA, 21 nt, Human
aacauggugaaacccugucuc

SEQ ID NO: 72704 - RNA, 22 nt, Human
aacauuagaaauuauuagaacu

SEQ ID NO: 72705 - RNA, 19 nt, Human
aacccuuucuccgccccug

SEQ ID NO: 72706 - RNA, 19 nt, Human
aagaaccuaaaggugucca

SEQ ID NO: 72707 - RNA, 22 nt, Human
aaggcaggaaaaucacuugaac

SEQ ID NO: 72708 - RNA, 23 nt, Human
aagguugcagugaggcgagauug

SEQ ID NO: 72709 - RNA, 27 nt, Human
aaucaucuagaaucuuggagcaucuga

SEQ ID NO: 72710 - RNA, 21 nt, Human
acaaaguuuuaugugaccuga

SEQ ID NO: 72711 - RNA, 24 nt, Human
acacagugagacucuaucgcaaaa

SEQ ID NO: 72712 - RNA, 26 nt, Human
acagcggcaggggaggcccuugccac

SEQ ID NO: 72713 - RNA, 19 nt, Human
acagggcugcaagugggga

SEQ ID NO: 72714 - RNA, 20 nt, Human
acagggcugcaaguggggau

SEQ ID NO: 72715 - RNA, 19 nt, Human
accacugcacuccagccug

SEQ ID NO: 72716 - RNA, 24 nt, Human
accacugcacuccagccuggguga

SEQ ID NO: 72717 - RNA, 20 nt, Human
accaggccagagccaggggc

SEQ ID NO: 72718 - RNA, 24 nt, Human
acccugucucuacuaaaaauauaa

SEQ ID NO: 72719 - RNA, 18 nt, Human
acugcacuccagccuggg

SEQ ID NO: 72720 - RNA, 26 nt, Human
acugcacuccagccugggugacacag

SEQ ID NO: 72721 - RNA, 23 nt, Human
acuugggcaacccuuucuccgcc

SEQ ID NO: 72722 - RNA, 24 nt, Human
acuuugggaggcugaggugggcag

SEQ ID NO: 72723 - RNA, 21 nt, Human
agaaaaucuaaaaccacauaa

SEQ ID NO: 72724 - RNA, 30 nt, Human
agaaaaucuaaaaccacauaaugucagagg

SEQ ID NO: 72725 - RNA, 22 nt, Human
agaaauguggauucuuggacuc

SEQ ID NO: 72726 - RNA, 21 nt, Human
agaaccagaaaaucuaaaacc

SEQ ID NO: 72727 - RNA, 18 nt, Human
agaaugcagcaaagaacc

SEQ ID NO: 72728 - RNA, 22 nt, Human
agaccagccuggccaacauggu

SEQ ID NO: 72729 - RNA, 22 nt, Human
agagaaucuaagaucuuagagu

SEQ ID NO: 72730 - RNA, 23 nt, Human
agagccaggggccaccuggacaa

SEQ ID NO: 72731 - RNA, 22 nt, Human
agaucacuugaggucaggaguu

SEQ ID NO: 72732 - RNA, 23 nt, Human
agcaaagaaccuaaaggugucca

SEQ ID NO: 72733 - RNA, 21 nt, Human
agcaaugauagcuaagaagga

SEQ ID NO: 72734 - RNA, 24 nt, Human
agcacuuugggaggcugagguggg

SEQ ID NO: 72735 - RNA, 19 nt, Human
agcagccgccuucucagca

SEQ ID NO: 72736 - RNA, 19 nt, Human
agccaggggccaccuggac

SEQ ID NO: 72737 - RNA, 23 nt, Human
agccgggugugguggcacacacc

SEQ ID NO: 72738 - RNA, 22 nt, Human
agccuggccaacauggugaaac

SEQ ID NO: 72739 - RNA, 24 nt, Human
agccuggccaacauggugaaaccc

SEQ ID NO: 72740 - RNA, 22 nt, Human
agccugggugacacagugagac

SEQ ID NO: 72741 - RNA, 24 nt, Human
agccugggugacacagugagacuc

SEQ ID NO: 72742 - RNA, 19 nt, Human
agcgggggagggggcaggg

SEQ ID NO: 72743 - RNA, 20 nt, Human
agcgggggagggggcagggc

SEQ ID NO: 72744 - RNA, 18 nt, Human
aggaagacagggcugcaa

SEQ ID NO: 72745 - RNA, 23 nt, Human
aggagggggaaggggacccuggu

SEQ ID NO: 72746 - RNA, 23 nt, Human
aggcagaaugcagcaaaggggac

SEQ ID NO: 72747 - RNA, 18 nt, Human
aggcaggaaaaucacuug

SEQ ID NO: 72748 - RNA, 24 nt, Human
aggcaggaaaaucacuugaacucg

SEQ ID NO: 72749 - RNA, 25 nt, Human
aggccagagccaggggccaccugga

SEQ ID NO: 72750 - RNA, 21 nt, Human
aggcugaggugggcagaucac

SEQ ID NO: 72751 - RNA, 24 nt, Human
aggcugaggugggcagaucacuug

SEQ ID NO: 72752 - RNA, 23 nt, Human
agggguuaacucaagagaggaga

SEQ ID NO: 72753 - RNA, 19 nt, Human
agguaggaagacagggcug

SEQ ID NO: 72754 - RNA, 21 nt, Human
agguaggaagacagggcugca

SEQ ID NO: 72755 - RNA, 19 nt, Human
aggugaagguugcagugag

SEQ ID NO: 72756 - RNA, 24 nt, Human
aggugaagguugcagugaggcgag

SEQ ID NO: 72757 - RNA, 22 nt, Human
aggugggcagaucacuugaggu

SEQ ID NO: 72758 - RNA, 23 nt, Human
aggugggcagaucacuugagguc

SEQ ID NO: 72759 - RNA, 26 nt, Human
aggugggcagaucacuugaggucagg

SEQ ID NO: 72760 - RNA, 19 nt, Human
agugagacucuaucgcaaa

SEQ ID NO: 72761 - RNA, 23 nt, Human
agugcaguggcucaugccuguaa

SEQ ID NO: 72762 - RNA, 23 nt, Human
aguggcucaugccuguaaucuca

SEQ ID NO: 72763 - RNA, 24 nt, Human
aguggcucaugccuguaaucucag

SEQ ID NO: 72764 - RNA, 20 nt, Human
aucacuugaggucaggaguu

SEQ ID NO: 72765 - RNA, 22 nt, Human
aucccagcuacuugggaggcca

SEQ ID NO: 72766 - RNA, 19 nt, Human
aucuuugaaaccuagaacc

SEQ ID NO: 72767 - RNA, 19 nt, Human
augccuguaaucucagcac

SEQ ID NO: 72768 - RNA, 20 nt, Human
auuccuccagaacuccacuc

SEQ ID NO: 72769 - RNA, 24 nt, Human
auugcaccacugcacuccagccug

SEQ ID NO: 72770 - RNA, 25 nt, Human
auugcagauucuagagcuuucgacc

SEQ ID NO: 72771 - RNA, 20 nt, Human
caaaguuuuaugugaccuga

SEQ ID NO: 72772 - RNA, 24 nt, Human
caacauggugaaacccugucucua

SEQ ID NO: 72773 - RNA, 24 nt, Human
cacaccuguaaucccagcuacuug

SEQ ID NO: 72774 - RNA, 26 nt, Human
caccacugcacuccagccugggugac

SEQ ID NO: 72775 - RNA, 21 nt, Human
caccaggccagagccaggggc

SEQ ID NO: 72776 - RNA, 20 nt, Human
caccccugccuccuucccuc

SEQ ID NO: 72777 - RNA, 19 nt, Human
caccuaauagucuagaccu

SEQ ID NO: 72778 - RNA, 23 nt, Human
caccuguaaucccagcuacuugg

SEQ ID NO: 72779 - RNA, 24 nt, Human
caccuguaaucccagcuacuuggg

SEQ ID NO: 72780 - RNA, 22 nt, Human
cacuccagccugggugacacag

SEQ ID NO: 72781 - RNA, 22 nt, Human
cacuccagccugggugacacag

SEQ ID NO: 72782 - RNA, 23 nt, Human
cacuccagccugggugacacagu

SEQ ID NO: 72783 - RNA, 24 nt, Human
cacuccagccugggugacacagug

SEQ ID NO: 72784 - RNA, 19 nt, Human
cacugcacuccagccuggg

SEQ ID NO: 72785 - RNA, 19 nt, Human
cacugcacuccagccuggg

SEQ ID NO: 72786 - RNA, 19 nt, Human
cacugcacuccagccuggg

SEQ ID NO: 72787 - RNA, 21 nt, Human
cacugcacuccagccugggug

SEQ ID NO: 72788 - RNA, 22 nt, Human
cacugcacuccagccuggguga

SEQ ID NO: 72789 - RNA, 23 nt, Human
cacugcacuccagccugggugac

SEQ ID NO: 72790 - RNA, 24 nt, Human
cacugcacuccagccugggugaca

SEQ ID NO: 72791 - RNA, 21 nt, Human
cacuugaggucaggaguuuua

SEQ ID NO: 72792 - RNA, 21 nt, Human
cagaaguugcugggcucccag

SEQ ID NO: 72793 - RNA, 21 nt, Human
cagaaugcagcaaagaaccua

SEQ ID NO: 72794 - RNA, 24 nt, Human
cagaucacuugaggucaggaguuu

SEQ ID NO: 72795 - RNA, 27 nt, Human
cagaucacuugaggucaggaguuuuag

SEQ ID NO: 72796 - RNA, 24 nt, Human
cagcaaagaaccuaaaggugucuu

SEQ ID NO: 72797 - RNA, 24 nt, Human
cagcacuuugggaggcugaggugg

SEQ ID NO: 72798 - RNA, 19 nt, Human
cagcucuuucuuaaagggg

SEQ ID NO: 72799 - RNA, 24 nt, Human
caugccuguaaucucagcacuuug

SEQ ID NO: 72800 - RNA, 19 nt, Human
caugguccuagagaggcag

SEQ ID NO: 72801 - RNA, 20 nt, Human
ccacugcacuccagccuggg

SEQ ID NO: 72802 - RNA, 20 nt, Human
ccacugcacuccagccuggg

SEQ ID NO: 72803 - RNA, 20 nt, Human
ccacugcacuccagccuggg

SEQ ID NO: 72804 - RNA, 21 nt, Human
ccacugcacuccagccugggu

SEQ ID NO: 72805 - RNA, 21 nt, Human
ccacugcacuccagccugggu

SEQ ID NO: 72806 - RNA, 23 nt, Human
ccacugcacuccagccuggguga

SEQ ID NO: 72807 - RNA, 23 nt, Human
ccacugcacuccagccuggguga

SEQ ID NO: 72808 - RNA, 24 nt, Human
ccacugcacuccagccugggugac

SEQ ID NO: 72809 - RNA, 25 nt, Human
ccacugcacuccagccugggugaca

SEQ ID NO: 72810 - RNA, 26 nt, Human
ccagcagccgccuucucagcaccccu

SEQ ID NO: 72811 - RNA, 21 nt, Human
ccaggccagagccaggggccc

SEQ ID NO: 72812 - RNA, 19 nt, Human
ccaggggccaccuggacaa

SEQ ID NO: 72813 - RNA, 21 nt, Human
ccagugaggccgugucucucu

SEQ ID NO: 72814 - RNA, 23 nt, Human
cccacaguuggggaggaggaagc

SEQ ID NO: 72815 - RNA, 22 nt, Human
cccaccaggccagagccagggg

SEQ ID NO: 72816 - RNA, 23 nt, Human
ccccagcuccaggcuccccggau

SEQ ID NO: 72817 - RNA, 22 nt, Human
ccccaguggcagugcuuagcuu

SEQ ID NO: 72818 - RNA, 23 nt, Human
ccccuggcucccccuuugccucc

SEQ ID NO: 72819 - RNA, 21 nt, Human
cccggcccuccccccagcucc

SEQ ID NO: 72820 - RNA, 21 nt, Human
ccucagaaguugcugggcucc

SEQ ID NO: 72821 - RNA, 18 nt, Human
ccuccuucccucacuccc

SEQ ID NO: 72822 - RNA, 22 nt, Human
ccuccuucccucacucccagac

SEQ ID NO: 72823 - RNA, 26 nt, Human
ccucugggcucugugucugguaaaca

SEQ ID NO: 72824 - RNA, 23 nt, Human
ccugagagggaguaccaggugga

SEQ ID NO: 72825 - RNA, 22 nt, Human
ccuggccaacauggugaaaccc

SEQ ID NO: 72826 - RNA, 24 nt, Human
ccuggccaacauggugaaacccug

SEQ ID NO: 72827 - RNA, 21 nt, Human
ccuggcucccccuuugccucc

SEQ ID NO: 72828 - RNA, 20 nt, Human
ccugggugacacagugagac

SEQ ID NO: 72829 - RNA, 22 nt, Human
ccugggugacacagugagacuc

SEQ ID NO: 72830 - RNA, 21 nt, Human
ccuguaaucccagcuacuugg

SEQ ID NO: 72831 - RNA, 20 nt, Human
ccuguaaucucagcacuuug

SEQ ID NO: 72832 - RNA, 22 nt, Human
ccuguaaucucagcacuuuggg

SEQ ID NO: 72833 - RNA, 24 nt, Human
ccuuuagaaucuuagaaacuuaga

SEQ ID NO: 72834 - RNA, 22 nt, Human
cgcaaaaaaaaaaaaaaaaaaa

SEQ ID NO: 72835 - RNA, 22 nt, Human
cggcaggggaggcccuugccac

SEQ ID NO: 72836 - RNA, 19 nt, Human
cggcccuccccccagcucc

SEQ ID NO: 72837 - RNA, 24 nt, Human
cgggggagggggcagggccgggcu

SEQ ID NO: 72838 - RNA, 19 nt, Human
cgguaggugaagguugcag

SEQ ID NO: 72839 - RNA, 19 nt, Human
cuacugcacagagaagggg

SEQ ID NO: 72840 - RNA, 21 nt, Human
cuagagaggcagaaugcagca

SEQ ID NO: 72841 - RNA, 21 nt, Human
cuagagucuuggaauguuaac

SEQ ID NO: 72842 - RNA, 24 nt, Human
cucaugccuguaaucucagcacuu

SEQ ID NO: 72843 - RNA, 18 nt, Human
cuccccccagcuccaggc

SEQ ID NO: 72844 - RNA, 18 nt, Human
cuccgccccuggcucccc

SEQ ID NO: 72845 - RNA, 24 nt, Human
cucuaucgcaaaaaaaaaaaaaaa

SEQ ID NO: 72846 - RNA, 27 nt, Human
cucuaucgcaaaaaaaaaaaaaaaaaa

SEQ ID NO: 72847 - RNA, 19 nt, Human
cugaucuagaaucuuagac

SEQ ID NO: 72848 - RNA, 21 nt, Human
cugaucuagaaucuuagacac

SEQ ID NO: 72849 - RNA, 27 nt, Human
cuggcacagcggcaggggaggcccuuu

SEQ ID NO: 72850 - RNA, 24 nt, Human
cuggccaacauggugaaacccugu

SEQ ID NO: 72851 - RNA, 21 nt, Human
cugggcgcugucccucugggc

SEQ ID NO: 72852 - RNA, 25 nt, Human
cugggcucugggcgcugucccucug

SEQ ID NO: 72853 - RNA, 23 nt, Human
cugggugacacagugagacucua

SEQ ID NO: 72854 - RNA, 21 nt, Human
cuguaaucccagcuacuuggg

SEQ ID NO: 72855 - RNA, 21 nt, Human
cuuagaacaccggaccuuaga

SEQ ID NO: 72856 - RNA, 21 nt, Human
cuuucuuaaaggggccaggga

SEQ ID NO: 72857 - RNA, 23 nt, Human
cuuugggaggcugaggugggcag

SEQ ID NO: 72858 - RNA, 19 nt, Human
gaaacccugucucuacuaa

SEQ ID NO: 72859 - RNA, 22 nt, Human
gaaccagaaaaucuaaaaccac

SEQ ID NO: 72860 - RNA, 22 nt, Human
gaagguugcagugaggcgagau

SEQ ID NO: 72861 - RNA, 24 nt, Human
gaagguugcagugaggcgagauug

SEQ ID NO: 72862 - RNA, 23 nt, Human
gagauugcaccacugcacuccag

SEQ ID NO: 72863 - RNA, 21 nt, Human
gaggcagaaugcagcaaagaa

SEQ ID NO: 72864 - RNA, 23 nt, Human
gaggugggcagaucacuugaggu

SEQ ID NO: 72865 - RNA, 24 nt, Human
gaucacuugaggucaggaguuuua

SEQ ID NO: 72866 - RNA, 24 nt, Human
gaucacuugaggucaggaguuuua

SEQ ID NO: 72867 - RNA, 25 nt, Human
gaucacuugaggucaggaguuuuag

SEQ ID NO: 72868 - RNA, 25 nt, Human
gaucacuugaggucaggaguuuuag

SEQ ID NO: 72869 - RNA, 20 nt, Human
gcaaaaaaaaaaaaaaaaaa

SEQ ID NO: 72870 - RNA, 18 nt, Human
gcaacauggcccgaaagg

SEQ ID NO: 72871 - RNA, 23 nt, Human
gcaggaaaaucacuugaacucgg

SEQ ID NO: 72872 - RNA, 24 nt, Human
gccaacauggugaaacccugucuc

SEQ ID NO: 72873 - RNA, 22 nt, Human
gcccaccaggccagagccaggg

SEQ ID NO: 72874 - RNA, 22 nt, Human
ggaccugucugggauggaggug

SEQ ID NO: 72875 - RNA, 23 nt, Human
ggagggagcugaggagggggaag

SEQ ID NO: 72876 - RNA, 21 nt, Human
ggcacacaccuguaaucccag

SEQ ID NO: 72877 - RNA, 25 nt, Human
ggcagaucacuugaggucaggaguu

SEQ ID NO: 72878 - RNA, 18 nt, Human
ggcccuccccccagcucc

SEQ ID NO: 72879 - RNA, 22 nt, Human
ggcccuugccaccggcucugcc

SEQ ID NO: 72880 - RNA, 23 nt, Human
gggaaaggaggcaucccuaaugc

SEQ ID NO: 72881 - RNA, 20 nt, Human
gggaaggggacccuggugcu

SEQ ID NO: 72882 - RNA, 26 nt, Human
gggcagaucacuugaggucaggaguu

SEQ ID NO: 72883 - RNA, 18 nt, Human
ggggaggaggaagcaaug

SEQ ID NO: 72884 - RNA, 19 nt, Human
ggggcaacauggcccgaaa

SEQ ID NO: 72885 - RNA, 21 nt, Human
ggggcaacauggcccgaaagg

SEQ ID NO: 72886 - RNA, 18 nt, Human
gggggagggggcagggcc

SEQ ID NO: 72887 - RNA, 23 nt, Human
ggugugguggcacacaccuguaa

SEQ ID NO: 72888 - RNA, 18 nt, Human
gguugagugcaguggcuc

SEQ ID NO: 72889 - RNA, 20 nt, Human
guaaacauuccuccagaacu

SEQ ID NO: 72890 - RNA, 23 nt, Human
guaaacauuccuccagaacucca

SEQ ID NO: 72891 - RNA, 24 nt, Human
guaaacauuccuccagaacuccac

SEQ ID NO: 72892 - RNA, 21 nt, Human
gugaaacccugucucuacuaa

SEQ ID NO: 72893 - RNA, 22 nt, Human
guggaguuuuccccaguggcag

SEQ ID NO: 72894 - RNA, 20 nt, Human
guggggugggaaagugggaa

SEQ ID NO: 72895 - RNA, 23 nt, Human
uaaggcguggggugggaaagugg

SEQ ID NO: 72896 - RNA, 24 nt, Human
uaagguugagugcaguggcucaug

SEQ ID NO: 72897 - RNA, 19 nt, Human
uacaguauaggguuagaac

SEQ ID NO: 72898 - RNA, 18 nt, Human
uacugcuuucaaggugau

SEQ ID NO: 72899 - RNA, 19 nt, Human
uagaaacuccaucuuuaga

SEQ ID NO: 72900 - RNA, 19 nt, Human
uagaaccuugaaauugcac

SEQ ID NO: 72901 - RNA, 23 nt, Human
uagaacuacagugccuagaacua

SEQ ID NO: 72902 - RNA, 24 nt, Human
uagaauccuaggccuuagaaccuc

SEQ ID NO: 72903 - RNA, 21 nt, Human
uagaaucuuggagcaucugau

SEQ ID NO: 72904 - RNA, 19 nt, Human
uagaccagccuggccaaca

SEQ ID NO: 72905 - RNA, 19 nt, Human
uagccgggugugguggcac

SEQ ID NO: 72906 - RNA, 22 nt, Human
uagcuaagaaggagaggggcac

SEQ ID NO: 72907 - RNA, 22 nt, Human
uagcuccuaaaaucagaaucuu

SEQ ID NO: 72908 - RNA, 18 nt, Human
uagguaggaagacagggc

SEQ ID NO: 72909 - RNA, 18 nt, Human
uauaagauuuuagaaaug

SEQ ID NO: 72910 - RNA, 21 nt, Human
uauacaagagaaucuauuauc

SEQ ID NO: 72911 - RNA, 19 nt, Human
uaucauaaagccucagaaa

SEQ ID NO: 72912 - RNA, 21 nt, Human
ucagguccuuagaaccaaaga

SEQ ID NO: 72913 - RNA, 19 nt, Human
uccaaccccuuccuuuuac

SEQ ID NO: 72914 - RNA, 23 nt, Human
uccagccugggugacacagugag

SEQ ID NO: 72915 - RNA, 24 nt, Human
uccagccugggugacacagugaga

SEQ ID NO: 72916 - RNA, 20 nt, Human
uccccccagcuccaggcucc

SEQ ID NO: 72917 - RNA, 19 nt, Human
uccuuagaaccaaagacuc

SEQ ID NO: 72918 - RNA, 18 nt, Human
uccuucccucacucccag

SEQ ID NO: 72919 - RNA, 21 nt, Human
ucuccgccccuggcucccccu

SEQ ID NO: 72920 - RNA, 21 nt, Human
ucucuacuaaaaauauaaaaa

SEQ ID NO: 72921 - RNA, 23 nt, Human
ucucuacuaaaaauauaaaaauu

SEQ ID NO: 72922 - RNA, 18 nt, Human
ucuuagaacaccggaccu

SEQ ID NO: 72923 - RNA, 23 nt, Human
ucuuggaccaauggaaucuagag

SEQ ID NO: 72924 - RNA, 20 nt, Human
ugaaacagaacagaccguua

SEQ ID NO: 72925 - RNA, 22 nt, Human
ugaccugagccccucuggaggc

SEQ ID NO: 72926 - RNA, 21 nt, Human
ugaggagggggaaggggaccc

SEQ ID NO: 72927 - RNA, 24 nt, Human
ugaggagggggaaggggacccugg

SEQ ID NO: 72928 - RNA, 24 nt, Human
ugaggugggcagaucacuugaggu

SEQ ID NO: 72929 - RNA, 26 nt, Human
ugaggugggcagaucacuugagguca

SEQ ID NO: 72930 - RNA, 18 nt, Human
ugcaaguggggauaaggc

SEQ ID NO: 72931 - RNA, 22 nt, Human
ugcacaggcuugaagggggcac

SEQ ID NO: 72932 - RNA, 23 nt, Human
ugcacaggcuugaagggggcaca

SEQ ID NO: 72933 - RNA, 21 nt, Human
ugcaccacugcacuccagccu

SEQ ID NO: 72934 - RNA, 21 nt, Human
ugccugccuggcacagcggca

SEQ ID NO: 72935 - RNA, 23 nt, Human
ugccuguaaucucagcacuuugg

SEQ ID NO: 72936 - RNA, 23 nt, Human
ugccuguaaucucagcacuuugg

SEQ ID NO: 72937 - RNA, 24 nt, Human
ugccuguaaucucagcacuuuggg

SEQ ID NO: 72938 - RNA, 22 nt, Human
uggcacacaccuguaaucccag

SEQ ID NO: 72939 - RNA, 18 nt, Human
uggcacugccugccuggc

SEQ ID NO: 72940 - RNA, 23 nt, Human
uggcagugcuuagcuuggauccu

SEQ ID NO: 72941 - RNA, 24 nt, Human
uggccaacauggugaaacccuguc

SEQ ID NO: 72942 - RNA, 24 nt, Human
uggcucaugccuguaaucucagca

SEQ ID NO: 72943 - RNA, 24 nt, Human
ugggaggccaaggcaggaaaauca

SEQ ID NO: 72944 - RNA, 19 nt, Human
ugggaggcugaggugggca

SEQ ID NO: 72945 - RNA, 20 nt, Human
ugggaggcugaggugggcag

SEQ ID NO: 72946 - RNA, 24 nt, Human
ugggaggcugaggugggcagauca

SEQ ID NO: 72947 - RNA, 19 nt, Human
ugggauggaggugggauag

SEQ ID NO: 72948 - RNA, 24 nt, Human
ugggauggaggugggauagguagg

SEQ ID NO: 72949 - RNA, 24 nt, Human
ugggcagaucacuugaggucagga

SEQ ID NO: 72950 - RNA, 20 nt, Human
uggggaggaggaagcaauga

SEQ ID NO: 72951 - RNA, 23 nt, Human
ugguggcacacaccuguaauccc

SEQ ID NO: 72952 - RNA, 24 nt, Human
ugguggcacacaccuguaauccca

SEQ ID NO: 72953 - RNA, 24 nt, Human
uguccccggcccuccccccagcuc

SEQ ID NO: 72954 - RNA, 18 nt, Human
ugucugggauggaggugg

SEQ ID NO: 72955 - RNA, 27 nt, Human
uuaaucaucuagaaucuuggagcauug

SEQ ID NO: 72956 - RNA, 28 nt, Human
uuaaucaucuagaaucuuggagcauugu

SEQ ID NO: 72957 - RNA, 23 nt, Human
uuagaacaccggaccuuagaaac

SEQ ID NO: 72958 - RNA, 23 nt, Human
uuagaaccagaaaaucuaaaacc

SEQ ID NO: 72959 - RNA, 18 nt, Human
uuagccgggugugguggc

SEQ ID NO: 72960 - RNA, 20 nt, Human
uuagccgggugugguggcac

SEQ ID NO: 72961 - RNA, 23 nt, Human
uuagucacaacugagugugagag

SEQ ID NO: 72962 - RNA, 23 nt, Human
uuauacaagagaaucuauuauca

SEQ ID NO: 72963 - RNA, 23 nt, Human
uugcaccacugcacuccagccug

SEQ ID NO: 72964 - RNA, 22 nt, Human
uugcagugaggcgagauugcac

SEQ ID NO: 72965 - RNA, 25 nt, Human
uugggaggcugaggugggcagauca

SEQ ID NO: 72966 - RNA, 18 nt, Human
uuuuaaggacucugaacu

SEQ ID NO: 72967 - RNA, 22 nt, Human
uuuuacagauggugaugcuacu

SEQ ID NO: 72968 - RNA, 18 nt, Human
aaacccucaggagccacc

SEQ ID NO: 72969 - RNA, 20 nt, Human
aaagcccaggcagggcaagg

SEQ ID NO: 72970 - RNA, 18 nt, Human
aaagccuccucaaucucc

SEQ ID NO: 72971 - RNA, 18 nt, Human
aaauaaauuauggaaaua

SEQ ID NO: 72972 - RNA, 23 nt, Human
aagaccgaaaaguggucugccaa

SEQ ID NO: 72973 - RNA, 24 nt, Human
aaggcuguggccuuugggaagggg

SEQ ID NO: 72974 - RNA, 26 nt, Human
acacaggcuggcaaggccuccugggc

SEQ ID NO: 72975 - RNA, 24 nt, Human
acaggcuggcaaggccuccugggc

SEQ ID NO: 72976 - RNA, 22 nt, Human
acccaccagccaaagaagugca

SEQ ID NO: 72977 - RNA, 23 nt, Human
accccuggcauuacccaccagcc

SEQ ID NO: 72978 - RNA, 18 nt, Human
acccucaggagccacccc

SEQ ID NO: 72979 - RNA, 24 nt, Human
agagggcaggaaguggagggggca

SEQ ID NO: 72980 - RNA, 24 nt, Human
agauagaagagcaagcugugggug

SEQ ID NO: 72981 - RNA, 19 nt, Human
agcccccucccccuagucc

SEQ ID NO: 72982 - RNA, 18 nt, Human
aggaaguggagggggcag

SEQ ID NO: 72983 - RNA, 21 nt, Human
aggcagcagacauagaucaca

SEQ ID NO: 72984 - RNA, 19 nt, Human
aggcagggcaagguguagg

SEQ ID NO: 72985 - RNA, 23 nt, Human
agggcucaggguggcagaagcca

SEQ ID NO: 72986 - RNA, 18 nt, Human
aggguauaaaaacccuca

SEQ ID NO: 72987 - RNA, 24 nt, Human
agugcaaccaaagccuccucaauc

SEQ ID NO: 72988 - RNA, 21 nt, Human
caaagaagugcaaccaaagcc

SEQ ID NO: 72989 - RNA, 22 nt, Human
caagaaagcagcaacaggucuc

SEQ ID NO: 72990 - RNA, 22 nt, Human
caaggcaaaaggggcucuugag

SEQ ID NO: 72991 - RNA, 25 nt, Human
cacaguccaguggauuuagccaccc

SEQ ID NO: 72992 - RNA, 20 nt, Human
caccaaagcccaggcagggc

SEQ ID NO: 72993 - RNA, 21 nt, Human
caccagccaaagaagugcaac

SEQ ID NO: 72994 - RNA, 27 nt, Human
caccagccaaagaagugcaaccaaagc

SEQ ID NO: 72995 - RNA, 21 nt, Human
cagaagccaccugauuucagc

SEQ ID NO: 72996 - RNA, 21 nt, Human
cagacucuggggagccccaua

SEQ ID NO: 72997 - RNA, 21 nt, Human
cagagcucaaauccacaccua

SEQ ID NO: 72998 - RNA, 23 nt, Human
cagagcucaaauccacaccuagu

SEQ ID NO: 72999 - RNA, 24 nt, Human
cagcaacaggucucuuggggcugg

SEQ ID NO: 73000 - RNA, 20 nt, Human
cagcacagaaaaguuaaaac

SEQ ID NO: 73001 - RNA, 26 nt, Human
cagcacagaaaaguuaaaacaaauaa

SEQ ID NO: 73002 - RNA, 19 nt, Human
cagcggcggcggcggcggg

SEQ ID NO: 73003 - RNA, 19 nt, Human
caggagugugcacauggca

SEQ ID NO: 73004 - RNA, 24 nt, Human
ccaacuggccucagggcaugggca

SEQ ID NO: 73005 - RNA, 30 nt, Human
ccaccagccaaagaagugcaaccaaagcug

SEQ ID NO: 73006 - RNA, 23 nt, Human
cccaccagccaaagaagugcaac

SEQ ID NO: 73007 - RNA, 20 nt, Human
cccaggcucucccccugccu

SEQ ID NO: 73008 - RNA, 21 nt, Human
cccccuccuacaucccugggc

SEQ ID NO: 73009 - RNA, 22 nt, Human
cccccuccuacaucccugggcc

SEQ ID NO: 73010 - RNA, 19 nt, Human
ccccucgcucugcgcgucc

SEQ ID NO: 73011 - RNA, 18 nt, Human
cccgcgucccggccgggg

SEQ ID NO: 73012 - RNA, 19 nt, Human
ccgcgucccggccggggac

SEQ ID NO: 73013 - RNA, 21 nt, Human
ccggcagcggcggcggcggcg

SEQ ID NO: 73014 - RNA, 24 nt, Human
ccugcccgcagagccaucuaggag

SEQ ID NO: 73015 - RNA, 22 nt, Human
ccuguuuccuccuucccccucc

SEQ ID NO: 73016 - RNA, 26 nt, Human
cugaaaggggaagcccccucccccua

SEQ ID NO: 73017 - RNA, 23 nt, Human
gaagggggaagauggaacagagg

SEQ ID NO: 73018 - RNA, 21 nt, Human
gaagugcaaccaaagccuccu

SEQ ID NO: 73019 - RNA, 20 nt, Human
gaaguggagggggcagggug

SEQ ID NO: 73020 - RNA, 24 nt, Human
gagggcaggaaguggagggggcag

SEQ ID NO: 73021 - RNA, 28 nt, Human
gagggcaggaaguggagggggcagggug

SEQ ID NO: 73022 - RNA, 22 nt, Human
gccccucgcucugcgcguccgg

SEQ ID NO: 73023 - RNA, 19 nt, Human
gccuccugggcaaggggca

SEQ ID NO: 73024 - RNA, 26 nt, Human
gcgacccgcgucccggccggggacgc

SEQ ID NO: 73025 - RNA, 21 nt, Human
gcucuggggucuggggacaga

SEQ ID NO: 73026 - RNA, 22 nt, Human
gcucuggggucuggggacagac

SEQ ID NO: 73027 - RNA, 18 nt, Human
gcugaagugcagugccca

SEQ ID NO: 73028 - RNA, 18 nt, Human
ggagggggcagggugggg

SEQ ID NO: 73029 - RNA, 19 nt, Human
ggcagcggcggcggcggcg

SEQ ID NO: 73030 - RNA, 20 nt, Human
ggcagcggcggcggcggcgg

SEQ ID NO: 73031 - RNA, 23 nt, Human
ggcaggaaguggagggggcaggg

SEQ ID NO: 73032 - RNA, 19 nt, Human
ggcaggaaguggagggggg

SEQ ID NO: 73033 - RNA, 22 nt, Human
ggccugugcccaccccaccccu

SEQ ID NO: 73034 - RNA, 19 nt, Human
ggcggcggcggcgggagac

SEQ ID NO: 73035 - RNA, 21 nt, Human
ggcggcggcggcgggagacug

SEQ ID NO: 73036 - RNA, 19 nt, Human
gggcaagguguaggacuac

SEQ ID NO: 73037 - RNA, 22 nt, Human
ggggcaggguggggcagaaggg

SEQ ID NO: 73038 - RNA, 22 nt, Human
gggggaagauggaacagagggc

SEQ ID NO: 73039 - RNA, 20 nt, Human
gugcacauggcaccuguggg

SEQ ID NO: 73040 - RNA, 24 nt, Human
gugggugagccagccagugggaga

SEQ ID NO: 73041 - RNA, 20 nt, Human
uaagcucagguacaaggugu

SEQ ID NO: 73042 - RNA, 19 nt, Human
uauaguucugacacucagg

SEQ ID NO: 73043 - RNA, 23 nt, Human
ucagcccaggcucucccccugcc

SEQ ID NO: 73044 - RNA, 22 nt, Human
ucccugggccuggaauaaaggc

SEQ ID NO: 73045 - RNA, 22 nt, Human
uccugggcaaggggcaggccca

SEQ ID NO: 73046 - RNA, 19 nt, Human
ucuuggcacagacacagag

SEQ ID NO: 73047 - RNA, 19 nt, Human
ugcccagaaagcccugaga

SEQ ID NO: 73048 - RNA, 19 nt, Human
ugccggacgugcucugggg

SEQ ID NO: 73049 - RNA, 23 nt, Human
uggaauaaauuauaguucugaca

SEQ ID NO: 73050 - RNA, 20 nt, Human
uggcagaagccaccugauuu

SEQ ID NO: 73051 - RNA, 24 nt, Human
uggccagcaccugcccgcagagcc

SEQ ID NO: 73052 - RNA, 18 nt, Human
ugggaaaagacauccugg

SEQ ID NO: 73053 - RNA, 18 nt, Human
ugggaagggggaagaugg

SEQ ID NO: 73054 - RNA, 21 nt, Human
ugggccuggaauaaaggcugu

SEQ ID NO: 73055 - RNA, 18 nt, Human
ugggugagccagccagug

SEQ ID NO: 73056 - RNA, 21 nt, Human
uggguguggggggccgggcag

SEQ ID NO: 73057 - RNA, 24 nt, Human
uggucacagcuguucagcccaggc

SEQ ID NO: 73058 - RNA, 22 nt, Human
uggugccggacgugcucugggg

SEQ ID NO: 73059 - RNA, 19 nt, Human
ugugcacauggcaccugug

SEQ ID NO: 73060 - RNA, 19 nt, Human
uugcccucucugggcuucc

SEQ ID NO: 73061 - RNA, 19 nt, Human
uugguaccuguaagcucag

SEQ ID NO: 73062 - RNA, 20 nt, Human
uuucuuggcacagacacagg

SEQ ID NO: 73063 - RNA, 20 nt, Human
uuuuuuuuuaaaaauaaagc

SEQ ID NO: 73064 - RNA, 25 nt, Human
aaaaaaaaacaaaaaaacgcuuaag

SEQ ID NO: 73065 - RNA, 25 nt, Human
aaaaaaaaacaaaacaacaacaaaa

SEQ ID NO: 73066 - RNA, 24 nt, Human
aaaaaaaacaaaacaacaacaaaa

SEQ ID NO: 73067 - RNA, 21 nt, Human
aaaaagcugagaaauaagcac

SEQ ID NO: 73068 - RNA, 20 nt, Human
aaacaaaacaacaacaaaaa

SEQ ID NO: 73069 - RNA, 25 nt, Human
aaacaaaacaacaacaaaaaaaaaa

SEQ ID NO: 73070 - RNA, 19 nt, Human
aaguauucuccuaagccuc

SEQ ID NO: 73071 - RNA, 20 nt, Human
aaucuauauacacuuggaau

SEQ ID NO: 73072 - RNA, 24 nt, Human
acaaaacaacaacaaaaaaaaaac

SEQ ID NO: 73073 - RNA, 28 nt, Human
acaaaacaacaacaaaaaaaaaacaaaa

SEQ ID NO: 73074 - RNA, 30 nt, Human
acaaaacaacaacaaaaaaaaaacaaaaaa

SEQ ID NO: 73075 - RNA, 19 nt, Human
accggagcccguuccugac

SEQ ID NO: 73076 - RNA, 20 nt, Human
agaaagaaaaagcugagaaa

SEQ ID NO: 73077 - RNA, 20 nt, Human
agauaaaacaggggaacaug

SEQ ID NO: 73078 - RNA, 24 nt, Human
agcaaauacacuaaaaaaaaacaa

SEQ ID NO: 73079 - RNA, 22 nt, Human
agccaaagaugccccugcaagc

SEQ ID NO: 73080 - RNA, 21 nt, Human
aggcaagcagugagaagaggc

SEQ ID NO: 73081 - RNA, 19 nt, Human
aggcggcugccacgugaug

SEQ ID NO: 73082 - RNA, 26 nt, Human
auacagaaccauuucccugcugcucu

SEQ ID NO: 73083 - RNA, 21 nt, Human
auagaacuuacaaaaagcacu

SEQ ID NO: 73084 - RNA, 25 nt, Human
augaacuuaagaaagaaaaagcuga

SEQ ID NO: 73085 - RNA, 25 nt, Human
caaaacaacaacaaaaaaaaaacaa

SEQ ID NO: 73086 - RNA, 22 nt, Human
caacaaaaaaaaaacaaaaaaa

SEQ ID NO: 73087 - RNA, 28 nt, Human
caacaacaaaaaaaaaacaaaaaaacgc

SEQ ID NO: 73088 - RNA, 25 nt, Human
cacuaaaaaaaaacaaaacaacaac

SEQ ID NO: 73089 - RNA, 24 nt, Human
cagcccugaauuccuuugcuuccc

SEQ ID NO: 73090 - RNA, 25 nt, Human
cagugagauaaaacaggggaacagu

SEQ ID NO: 73091 - RNA, 21 nt, Human
cccacgccaugcugagguguu

SEQ ID NO: 73092 - RNA, 23 nt, Human
ccccuccuucuucccucaugcca

SEQ ID NO: 73093 - RNA, 22 nt, Human
cccucuuucccauuacaauccc

SEQ ID NO: 73094 - RNA, 20 nt, Human
ccucuuucccauuacaaucc

SEQ ID NO: 73095 - RNA, 20 nt, Human
ccuucuccuugcugugauuu

SEQ ID NO: 73096 - RNA, 21 nt, Human
ccuugcugugauuuccccucc

SEQ ID NO: 73097 - RNA, 21 nt, Human
cucccagcacccucuuuccca

SEQ ID NO: 73098 - RNA, 19 nt, Human
cuggggaaaguuaccuaau

SEQ ID NO: 73099 - RNA, 27 nt, Human
cuugcugugauuuccccuccuucuucc

SEQ ID NO: 73100 - RNA, 24 nt, Human
gaauuccagcuccacuguuuacug

SEQ ID NO: 73101 - RNA, 19 nt, Human
gaguauuaaaaauaaaagc

SEQ ID NO: 73102 - RNA, 20 nt, Human
gaugaucuugaaagcaauga

SEQ ID NO: 73103 - RNA, 21 nt, Human
gcacucauacagaaccauuuc

SEQ ID NO: 73104 - RNA, 19 nt, Human
ggggaggaaaugaaauaag

SEQ ID NO: 73105 - RNA, 21 nt, Human
ggguaguagccaaaugugaug

SEQ ID NO: 73106 - RNA, 20 nt, Human
uaaaacaggggaacaugaug

SEQ ID NO: 73107 - RNA, 23 nt, Human
uaaauagaacuuacaaaaagcac

SEQ ID NO: 73108 - RNA, 22 nt, Human
uaacaaguauucuccuaagccu

SEQ ID NO: 73109 - RNA, 21 nt, Human
uaacuaggauugaucaccaaa

SEQ ID NO: 73110 - RNA, 24 nt, Human
uaagugaaagcagucuagaauuuu

SEQ ID NO: 73111 - RNA, 23 nt, Human
uacacuaaaaaaaaacaaaacaa

SEQ ID NO: 73112 - RNA, 22 nt, Human
uagcaaauacacuaaaaaaaaa

SEQ ID NO: 73113 - RNA, 19 nt, Human
uagccaaaugugaugacuc

SEQ ID NO: 73114 - RNA, 23 nt, Human
uaucaauagcaaauacacuaaaa

SEQ ID NO: 73115 - RNA, 25 nt, Human
uaucaugagccugaggauuuucaac

SEQ ID NO: 73116 - RNA, 21 nt, Human
uauuuuugccuuugauugcuc

SEQ ID NO: 73117 - RNA, 20 nt, Human
ucucccagcacccucuuucc

SEQ ID NO: 73118 - RNA, 22 nt, Human
ugaauuguaagcacucgguguu

SEQ ID NO: 73119 - RNA, 24 nt, Human
ugccuuugauugcucucccagcac

SEQ ID NO: 73120 - RNA, 25 nt, Human
uggccaacuuuaaauaaaucuuggc

SEQ ID NO: 73121 - RNA, 20 nt, Human
uggggaggaaaugaaauaag

SEQ ID NO: 73122 - RNA, 18 nt, Human
uugauugcucucccagca

SEQ ID NO: 73123 - RNA, 18 nt, Human
aaaaagcaagcaagcaga

SEQ ID NO: 73124 - RNA, 18 nt, Human
aaccagauuaaccacaac

SEQ ID NO: 73125 - RNA, 22 nt, Human
aaguugccagcccuccuagagc

SEQ ID NO: 73126 - RNA, 23 nt, Human
acaaaaauaaaccagauuaacca

SEQ ID NO: 73127 - RNA, 24 nt, Human
accacaaccaugccuuacuuuauc

SEQ ID NO: 73128 - RNA, 22 nt, Human
agcaagcaagcagaauuuggaa

SEQ ID NO: 73129 - RNA, 18 nt, Human
aucaaauguauaagaagu

SEQ ID NO: 73130 - RNA, 21 nt, Human
caaaugcggcaucuucaaacc

SEQ ID NO: 73131 - RNA, 20 nt, Human
caauauuaaaaagcaagcaa

SEQ ID NO: 73132 - RNA, 21 nt, Human
caccucuaaguugccagcccu

SEQ ID NO: 73133 - RNA, 26 nt, Human
ccaauaauccugucaauuauauuucu

SEQ ID NO: 73134 - RNA, 23 nt, Human
ccaauccaaaugcggcaucuuca

SEQ ID NO: 73135 - RNA, 22 nt, Human
ccaccucuaaguugccagcccu

SEQ ID NO: 73136 - RNA, 21 nt, Human
ccagcccuccuagagcuaccu

SEQ ID NO: 73137 - RNA, 19 nt, Human
cccccaaauucuaagcaga

SEQ ID NO: 73138 - RNA, 18 nt, Human
ccucuaaguugccagccc

SEQ ID NO: 73139 - RNA, 21 nt, Human
cucaaaguagaauuauaaaga

SEQ ID NO: 73140 - RNA, 20 nt, Human
cucugcuccccaccucuaag

SEQ ID NO: 73141 - RNA, 24 nt, Human
cuuaacuaucuuaacaagcuuuga

SEQ ID NO: 73142 - RNA, 22 nt, Human
gagaauucucugcuccccaccu

SEQ ID NO: 73143 - RNA, 20 nt, Human
uaaaaagcaagcaagcagaa

SEQ ID NO: 73144 - RNA, 28 nt, Human
uaaaccagauuaaccacaaccaugccuu

SEQ ID NO: 73145 - RNA, 22 nt, Human
uaacuuaugcacgcuuaacuau

SEQ ID NO: 73146 - RNA, 22 nt, Human
uaagaaguaaauaugaaucuua

SEQ ID NO: 73147 - RNA, 24 nt, Human
ucaaaguagaauuauaaagaagau

SEQ ID NO: 73148 - RNA, 19 nt, Human
uccaauccaaaugcggcau

SEQ ID NO: 73149 - RNA, 20 nt, Human
ugagugcaagagauugaaga

SEQ ID NO: 73150 - RNA, 24 nt, Human
ugagugcaagagauugaagaguuc

SEQ ID NO: 73151 - RNA, 25 nt, Human
ugcucagauacaucaaacauggagg

SEQ ID NO: 73152 - RNA, 22 nt, Human
uucuaaauuuucccccaaauuc

SEQ ID NO: 73153 - RNA, 20 nt, Human
aaaaauguuuucuucuccuu

SEQ ID NO: 73154 - RNA, 22 nt, Human
aaaagaaaguauuaauaaaaga

SEQ ID NO: 73155 - RNA, 28 nt, Human
aaagaauaggauuuaccucucuucuuuc

SEQ ID NO: 73156 - RNA, 18 nt, Human
aacagaagacuugaacca

SEQ ID NO: 73157 - RNA, 18 nt, Human
aacugcaccugcacucuu

SEQ ID NO: 73158 - RNA, 20 nt, Human
aacugcauugaugaaacauc

SEQ ID NO: 73159 - RNA, 24 nt, Human
aagaaagaaauaggugccauaaaa

SEQ ID NO: 73160 - RNA, 20 nt, Human
aaugaaggaucuuuugacug

SEQ ID NO: 73161 - RNA, 21 nt, Human
acagaagacuugaaccauuga

SEQ ID NO: 73162 - RNA, 20 nt, Human
acagaaucuccuuauacagu

SEQ ID NO: 73163 - RNA, 22 nt, Human
acccuaaaauaggucaaaaaau

SEQ ID NO: 73164 - RNA, 22 nt, Human
aggauuaugcccacugaaaaua

SEQ ID NO: 73165 - RNA, 19 nt, Human
auacuuuuggcacgccauc

SEQ ID NO: 73166 - RNA, 24 nt, Human
auggguccuagucuucugaaauuu

SEQ ID NO: 73167 - RNA, 23 nt, Human
auucuuuggcaaucauuuucuaa

SEQ ID NO: 73168 - RNA, 25 nt, Human
ccacugaaaauacuuuuggcacgcc

SEQ ID NO: 73169 - RNA, 19 nt, Human
ccagagcuaaaauguagug

SEQ ID NO: 73170 - RNA, 20 nt, Human
cccuaaaauaggucaaaaaa

SEQ ID NO: 73171 - RNA, 21 nt, Human
cgcacaucccccaacagucug

SEQ ID NO: 73172 - RNA, 22 nt, Human
cuucaguuguauuggaaaagaa

SEQ ID NO: 73173 - RNA, 21 nt, Human
cuugaaccauugauuuaugca

SEQ ID NO: 73174 - RNA, 22 nt, Human
cuugaauuucuuuaugugauga

SEQ ID NO: 73175 - RNA, 26 nt, Human
cuuguagucauucuccuuggucaggc

SEQ ID NO: 73176 - RNA, 23 nt, Human
gcagauacauuuuauuggccccc

SEQ ID NO: 73177 - RNA, 21 nt, Human
guaaagcagccagagcuaaaa

SEQ ID NO: 73178 - RNA, 24 nt, Human
uaaaaaguaaauacuuucgugaga

SEQ ID NO: 73179 - RNA, 20 nt, Human
uaaaauguagugcuucaguu

SEQ ID NO: 73180 - RNA, 19 nt, Human
uaacacugagcugcaaugu

SEQ ID NO: 73181 - RNA, 20 nt, Human
uacacagaaucuccuuauac

SEQ ID NO: 73182 - RNA, 22 nt, Human
uacacagaaucuccuuauacag

SEQ ID NO: 73183 - RNA, 21 nt, Human
uaccucucuucuuucguuguu

SEQ ID NO: 73184 - RNA, 20 nt, Human
uagaacccuaaaauagguca

SEQ ID NO: 73185 - RNA, 22 nt, Human
uagaacccuaaaauaggucaaa

SEQ ID NO: 73186 - RNA, 24 nt, Human
uauacaguuuuuuaaauagauugu

SEQ ID NO: 73187 - RNA, 23 nt, Human
uauuucuacuaauaacacugagc

SEQ ID NO: 73188 - RNA, 20 nt, Human
ucaaaaaauuuauccuuugc

SEQ ID NO: 73189 - RNA, 21 nt, Human
ucaguuauuuuuaaaaaguaa

SEQ ID NO: 73190 - RNA, 22 nt, Human
ucauugaaauaggaguuugguu

SEQ ID NO: 73191 - RNA, 19 nt, Human
uccaguagugguauaugag

SEQ ID NO: 73192 - RNA, 19 nt, Human
uccaucugucugcuugucu

SEQ ID NO: 73193 - RNA, 22 nt, Human
ucccucccaaaaagguuuuuaa

SEQ ID NO: 73194 - RNA, 22 nt, Human
uccuuugcacaauuaaaaaguu

SEQ ID NO: 73195 - RNA, 22 nt, Human
ucuaaaaugaaggaucuuuuga

SEQ ID NO: 73196 - RNA, 26 nt, Human
ucugaaauuuucccuuucuuucauau

SEQ ID NO: 73197 - RNA, 21 nt, Human
ucuucccgacaguugaugcau

SEQ ID NO: 73198 - RNA, 23 nt, Human
ucuugaauuucuuuaugugauga

SEQ ID NO: 73199 - RNA, 25 nt, Human
ugaaaagcuuaaucuaaaaugaagg

SEQ ID NO: 73200 - RNA, 23 nt, Human
ugaaaauacuuuuggcacgccau

SEQ ID NO: 73201 - RNA, 24 nt, Human
ugaugaguuuuaacuaaaacuugu

SEQ ID NO: 73202 - RNA, 19 nt, Human
ugcaauguaaagcagccag

SEQ ID NO: 73203 - RNA, 19 nt, Human
ugcuucaguuguauuggaa

SEQ ID NO: 73204 - RNA, 23 nt, Human
uggaauaacucaacuaaaucuua

SEQ ID NO: 73205 - RNA, 21 nt, Human
uggcacgccaucacuucagca

SEQ ID NO: 73206 - RNA, 22 nt, Human
uggcacgccaucacuucagcaa

SEQ ID NO: 73207 - RNA, 19 nt, Human
uguaaagcagccagagcua

SEQ ID NO: 73208 - RNA, 18 nt, Human
ugucaaacguuuguaguu

SEQ ID NO: 73209 - RNA, 18 nt, Human
uguguacaccugcuguca

SEQ ID NO: 73210 - RNA, 19 nt, Human
uuaaauuauauauuaaaau

SEQ ID NO: 73211 - RNA, 19 nt, Human
uucguuguugccuggcagc

SEQ ID NO: 73212 - RNA, 24 nt, Human
uucucgucucaguauccauauuuc

SEQ ID NO: 73213 - RNA, 21 nt, Human
uugaagcuuuuuacaucugcu

SEQ ID NO: 73214 - RNA, 22 nt, Human
uugaaugaaacugcaccugcac

SEQ ID NO: 73215 - RNA, 21 nt, Human
uugagccugagacacauuagu

SEQ ID NO: 73216 - RNA, 22 nt, Human
uuguagucauucuccuugguca

SEQ ID NO: 73217 - RNA, 20 nt, Human
uuguauacauuguucauccu

SEQ ID NO: 73218 - RNA, 24 nt, Human
uuuagaacccuaaaauaggucaaa

SEQ ID NO: 73219 - RNA, 24 nt, Human
uuuucaacaguacauccuauuugu

SEQ ID NO: 73220 - RNA, 25 nt, Human
aaacagaaaaaaagacaugguuugg

SEQ ID NO: 73221 - RNA, 25 nt, Human
aaacagaaaaaaagacaugguuugg

SEQ ID NO: 73222 - RNA, 24 nt, Human
aaacucuaaaaagaaaacugcaua

SEQ ID NO: 73223 - RNA, 19 nt, Human
aaaguauccuguccuucua

SEQ ID NO: 73224 - RNA, 21 nt, Human
aaaucacaaguguaacccucc

SEQ ID NO: 73225 - RNA, 18 nt, Human
aacaggucaaccgggucc

SEQ ID NO: 73226 - RNA, 18 nt, Human
aacaggucaaccgggucc

SEQ ID NO: 73227 - RNA, 18 nt, Human
aacaggucaaccgggucc

SEQ ID NO: 73228 - RNA, 25 nt, Human
aacuacucugaaaacagaaaaaaag

SEQ ID NO: 73229 - RNA, 25 nt, Human
aacuacucugaaaacagaaaaaaag

SEQ ID NO: 73230 - RNA, 24 nt, Human
aacuacucugaaacagaaaaaaag

SEQ ID NO: 73231 - RNA, 20 nt, Human
aagaaaacugcauaaaccca

SEQ ID NO: 73232 - RNA, 20 nt, Human
aagaaauucuagucuacaga

SEQ ID NO: 73233 - RNA, 21 nt, Human
aagaacgugacuccuauaugg

SEQ ID NO: 73234 - RNA, 20 nt, Human
aagauauacacaaaaccuuc

SEQ ID NO: 73235 - RNA, 21 nt, Human
aaggaaaaaacacagggcaga

SEQ ID NO: 73236 - RNA, 25 nt, Human
aaggaaaaaacacagggcagauuaa

SEQ ID NO: 73237 - RNA, 24 nt, Human
acaauacuucagauuuucuugcuu

SEQ ID NO: 73238 - RNA, 20 nt, Human
acacaaaccggugucauuua

SEQ ID NO: 73239 - RNA, 19 nt, Human
acaccagcaucuccacaga

SEQ ID NO: 73240 - RNA, 21 nt, Human
acgcagccaccuccuaaacgc

SEQ ID NO: 73241 - RNA, 21 nt, Human
acgcagccaccuccuaaacgc

SEQ ID NO: 73242 - RNA, 20 nt, Human
agaaaaaaagacaugguuug

SEQ ID NO: 73243 - RNA, 21 nt, Human
agaaaaaaagacaugguuugg

SEQ ID NO: 73244 - RNA, 22 nt, Human
agaaacucauaacagcagcagc

SEQ ID NO: 73245 - RNA, 20 nt, Human
agcagccagcgggaagagac

SEQ ID NO: 73246 - RNA, 20 nt, Human
aggaaaaaacacagggcaga

SEQ ID NO: 73247 - RNA, 20 nt, Human
aucacaaguguaacccucca

SEQ ID NO: 73248 - RNA, 19 nt, Human
caaaguauccuguccuucu

SEQ ID NO: 73249 - RNA, 27 nt, Human
caaauuaagugacuucuauaaacacuu

SEQ ID NO: 73250 - RNA, 21 nt, Human
caagaaaugauauaucaccac

SEQ ID NO: 73251 - RNA, 22 nt, Human
caaggagugcuccccuuugacc

SEQ ID NO: 73252 - RNA, 19 nt, Human
cacccagcucggaagcggg

SEQ ID NO: 73253 - RNA, 22 nt, Human
caccgaaaacacauuuucaaaa

SEQ ID NO: 73254 - RNA, 18 nt, Human
caccgcugcaaacgcccc

SEQ ID NO: 73255 - RNA, 18 nt, Human
cagcagcucagaagcacg

SEQ ID NO: 73256 - RNA, 18 nt, Human
cagcagcucagaagcacg

SEQ ID NO: 73257 - RNA, 18 nt, Human
cagcagcucagaagcacg

SEQ ID NO: 73258 - RNA, 18 nt, Human
cagcucagaagcacgcga

SEQ ID NO: 73259 - RNA, 18 nt, Human
cagcucagaagcacgcga

SEQ ID NO: 73260 - RNA, 18 nt, Human
cagcucagaagcacgcga

SEQ ID NO: 73261 - RNA, 21 nt, Human
caugguuuggcaauuucuucc

SEQ ID NO: 73262 - RNA, 21 nt, Human
caugguuuggcaauuucuucc

SEQ ID NO: 73263 - RNA, 24 nt, Human
ccaccuccuaaacgcaggcaaucu

SEQ ID NO: 73264 - RNA, 21 nt, Human
ccacuugcccuauauaaacuc

SEQ ID NO: 73265 - RNA, 23 nt, Human
cccacaacgcagccaccuccuaa

SEQ ID NO: 73266 - RNA, 23 nt, Human
cccacaacgcagccaccuccuaa

SEQ ID NO: 73267 - RNA, 21 nt, Human
ccuccagucuccagucugggu

SEQ ID NO: 73268 - RNA, 21 nt, Human
ccuguaauucagagaaaaaga

SEQ ID NO: 73269 - RNA, 23 nt, Human
ccuguaauucagagaaaaagaac

SEQ ID NO: 73270 - RNA, 22 nt, Human
ccugugcucggcgcgcacccag

SEQ ID NO: 73271 - RNA, 18 nt, Human
cgggaagagaccaacagg

SEQ ID NO: 73272 - RNA, 24 nt, Human
cuauaaacacuaggaacuguauuu

SEQ ID NO: 73273 - RNA, 20 nt, Human
cuccccaugaauuuuccaca

SEQ ID NO: 73274 - RNA, 21 nt, Human
cucucccuucuuuucugccuu

SEQ ID NO: 73275 - RNA, 21 nt, Human
gcagccuccccgcauccgcac

SEQ ID NO: 73276 - RNA, 21 nt, Human
gcauucuacauuauuccuaau

SEQ ID NO: 73277 - RNA, 18 nt, Human
ggagcuaagaaaacugug

SEQ ID NO: 73278 - RNA, 18 nt, Human
ggagcuaagaaaacugug

SEQ ID NO: 73279 - RNA, 18 nt, Human
ggagcuaagaaaacugug

SEQ ID NO: 73280 - RNA, 20 nt, Human
ggcaccgcugcaaacgcccc

SEQ ID NO: 73281 - RNA, 21 nt, Human
guaaaauuuuguucaguauaa

SEQ ID NO: 73282 - RNA, 21 nt, Human
gugaacuacucugaaacagaa

SEQ ID NO: 73283 - RNA, 22 nt, Human
uaaaacaucaugaggcaauaga

SEQ ID NO: 73284 - RNA, 21 nt, Human
uaaaagcacaaaauuuaaauc

SEQ ID NO: 73285 - RNA, 18 nt, Human
uaaacccaggaacagggg

SEQ ID NO: 73286 - RNA, 18 nt, Human
uaaacucuaaaaagaaaa

SEQ ID NO: 73287 - RNA, 26 nt, Human
uaaagaacgugacuccuauauggaag

SEQ ID NO: 73288 - RNA, 23 nt, Human
uaaaucacaaguguaacccucca

SEQ ID NO: 73289 - RNA, 24 nt, Human
uaacaccguucccguccucuuccu

SEQ ID NO: 73290 - RNA, 20 nt, Human
uaacagcagcagcucaaacu

SEQ ID NO: 73291 - RNA, 22 nt, Human
uaaccaugccacaaaaauaacu

SEQ ID NO: 73292 - RNA, 26 nt, Human
uaacuucagugaagaaguuuuuugac

SEQ ID NO: 73293 - RNA, 29 nt, Human
uaacuucagugaagaaguuuuuugacacu

SEQ ID NO: 73294 - RNA, 21 nt, Human
uaagauauacacaaaaccuuc

SEQ ID NO: 73295 - RNA, 23 nt, Human
uaagauauacacaaaaccuucaa

SEQ ID NO: 73296 - RNA, 21 nt, Human
uaagugacuucuauaaacacu

SEQ ID NO: 73297 - RNA, 27 nt, Human
uacacaaaccggugucauuuauuguca

SEQ ID NO: 73298 - RNA, 23 nt, Human
uaccacaguaaaauauuuaacaa

SEQ ID NO: 73299 - RNA, 23 nt, Human
uaccacaguaaaauauuuaacaa

SEQ ID NO: 73300 - RNA, 22 nt, Human
uagagcagccagcgggaagagc

SEQ ID NO: 73301 - RNA, 22 nt, Human
uagagcagccagcgggaagagc

SEQ ID NO: 73302 - RNA, 21 nt, Human
uagcaaaaaccuccaauuccu

SEQ ID NO: 73303 - RNA, 19 nt, Human
uauuuuuuaaaaacaagac

SEQ ID NO: 73304 - RNA, 21 nt, Human
ucaaaugcuggaauaugacaa

SEQ ID NO: 73305 - RNA, 19 nt, Human
ucagagaaaaagaaccacu

SEQ ID NO: 73306 - RNA, 21 nt, Human
ucagaguccuuuccaaaagga

SEQ ID NO: 73307 - RNA, 19 nt, Human
uccaaaaggaaauuacugc

SEQ ID NO: 73308 - RNA, 21 nt, Human
uccaagaaaugauauaucacc

SEQ ID NO: 73309 - RNA, 20 nt, Human
uccagguggaaaaaugagac

SEQ ID NO: 73310 - RNA, 19 nt, Human
uccccaugaauuuuccaca

SEQ ID NO: 73311 - RNA, 23 nt, Human
ucccuucuuuucugccuucagag

SEQ ID NO: 73312 - RNA, 20 nt, Human
ucggagagcaccacgugaua

SEQ ID NO: 73313 - RNA, 20 nt, Human
ucggagagcaccacgugaua

SEQ ID NO: 73314 - RNA, 19 nt, Human
ucuagucuacagaaugaca

SEQ ID NO: 73315 - RNA, 18 nt, Human
ucucccuucuuuucugcc

SEQ ID NO: 73316 - RNA, 25 nt, Human
ucugaaaacagaaaaaaagacaugg

SEQ ID NO: 73317 - RNA, 25 nt, Human
ucugaaaacagaaaaaaagacaugg

SEQ ID NO: 73318 - RNA, 19 nt, Human
ucugcaaaaccagucaaau

SEQ ID NO: 73319 - RNA, 18 nt, Human
ucugucuuaaagaacgug

SEQ ID NO: 73320 - RNA, 21 nt, Human
ucuguugugaacuacucugaa

SEQ ID NO: 73321 - RNA, 21 nt, Human
ucuguugugaacuacucugaa

SEQ ID NO: 73322 - RNA, 21 nt, Human
ucuguugugaacuacucugaa

SEQ ID NO: 73323 - RNA, 20 nt, Human
ugaaaacagaaaaaaagaca

SEQ ID NO: 73324 - RNA, 20 nt, Human
ugaaaacagaaaaaaagaca

SEQ ID NO: 73325 - RNA, 18 nt, Human
ugaaacagaaaaaaagac

SEQ ID NO: 73326 - RNA, 24 nt, Human
ugaacuacucugaaacagaaaaaa

SEQ ID NO: 73327 - RNA, 22 nt, Human
ugacuucuauaaacacuaggaa

SEQ ID NO: 73328 - RNA, 21 nt, Human
ugagcuuauaacucaguaaca

SEQ ID NO: 73329 - RNA, 21 nt, Human
ugagcuuauaauucaguaaca

SEQ ID NO: 73330 - RNA, 21 nt, Human
ugaggcaauagauuuucugcu

SEQ ID NO: 73331 - RNA, 21 nt, Human
ugcaaaaccagucaaaucuaa

SEQ ID NO: 73332 - RNA, 22 nt, Human
ugcuguacuuuuauacaacugg

SEQ ID NO: 73333 - RNA, 23 nt, Human
uggaaaauguuugcauguaaaga

SEQ ID NO: 73334 - RNA, 23 nt, Human
uggaaaauguuugcauguaaaga

SEQ ID NO: 73335 - RNA, 20 nt, Human
uggaucuucacucuucucuu

SEQ ID NO: 73336 - RNA, 19 nt, Human
uggcaguguaguagguuug

SEQ ID NO: 73337 - RNA, 26 nt, Human
ugggaccacuauuguauaugucauua

SEQ ID NO: 73338 - RNA, 23 nt, Human
uguccaaauuguuugguccuauu

SEQ ID NO: 73339 - RNA, 23 nt, Human
uguuaaaaggaaaaaacacaggg

SEQ ID NO: 73340 - RNA, 19 nt, Human
uguuguuuucuguauucca

SEQ ID NO: 73341 - RNA, 19 nt, Human
uguuguuuucuguauucca

SEQ ID NO: 73342 - RNA, 19 nt, Human
uguuguuuucuguauucca

SEQ ID NO: 73343 - RNA, 21 nt, Human
uuacaccagcaucuccacaga

SEQ ID NO: 73344 - RNA, 25 nt, Human
uuaccacaguaaaauauuuaacaaa

SEQ ID NO: 73345 - RNA, 25 nt, Human
uuaccacaguaaaauauuuaacaaa

SEQ ID NO: 73346 - RNA, 27 nt, Human
uuccacaccgaaaacacauuuucaaaa

SEQ ID NO: 73347 - RNA, 21 nt, Human
uucuuuagcaaaaaccuccaa

SEQ ID NO: 73348 - RNA, 21 nt, Human
uuuaagaaauucuagucuaca

SEQ ID NO: 73349 - RNA, 23 nt, Human
uuuaagaaauucuagucuacaga

SEQ ID NO: 73350 - RNA, 20 nt, Human
uuucccacaacgcagccacc

SEQ ID NO: 73351 - RNA, 20 nt, Human
uuucccacaacgcagccacc

SEQ ID NO: 73352 - RNA, 23 nt, Human
uuuuuuuuuuuuuuuuuugcuuu

SEQ ID NO: 73353 - RNA, 27 nt, Human
uuuuuuuuuuuuuuuuuuuugcuuuaa

SEQ ID NO: 73354 - RNA, 27 nt, Human
uuuuuuuuuuuuuuuuuuuuuuugggg

SEQ ID NO: 73355 - RNA, 19 nt, Human
aaaauccaaugauuagacc

SEQ ID NO: 73356 - RNA, 23 nt, Human
aaacagcaaaccacaaaguucag

SEQ ID NO: 73357 - RNA, 20 nt, Human
aaagcucccagaaucccaca

SEQ ID NO: 73358 - RNA, 22 nt, Human
aaaggccugagaacccagaaac

SEQ ID NO: 73359 - RNA, 24 nt, Human
aacagcauccucugucccgccccc

SEQ ID NO: 73360 - RNA, 20 nt, Human
aacugaauucccagaaagcu

SEQ ID NO: 73361 - RNA, 21 nt, Human
aagccacaguguaaaugccaa

SEQ ID NO: 73362 - RNA, 21 nt, Human
aagccacaguguaaaugccaa

SEQ ID NO: 73363 - RNA, 19 nt, Human
aagcucccagaaucccaca

SEQ ID NO: 73364 - RNA, 21 nt, Human
aagcugcaggucuggaaacca

SEQ ID NO: 73365 - RNA, 21 nt, Human
aaggagcuggggugaauuugg

SEQ ID NO: 73366 - RNA, 22 nt, Human
aaggagcuggggugaauuuggu

SEQ ID NO: 73367 - RNA, 21 nt, Human
aaggccaaaggccugagaacc

SEQ ID NO: 73368 - RNA, 27 nt, Human
aaggccugagaacccagaaaccugcuu

SEQ ID NO: 73369 - RNA, 24 nt, Human
aauuaagcagcauuccugcuccca

SEQ ID NO: 73370 - RNA, 19 nt, Human
acaacccugcaacacaggc

SEQ ID NO: 73371 - RNA, 18 nt, Human
acagcaaaccacaaaguu

SEQ ID NO: 73372 - RNA, 23 nt, Human
acagcauccucugucccgccccc

SEQ ID NO: 73373 - RNA, 19 nt, Human
acaggaaucacuccaaaca

SEQ ID NO: 73374 - RNA, 22 nt, Human
accaggucccucacucgguccu

SEQ ID NO: 73375 - RNA, 29 nt, Human
agaacucuguccagagcuggguguucccc

SEQ ID NO: 73376 - RNA, 23 nt, Human
agagagcagcagauggcucagaa

SEQ ID NO: 73377 - RNA, 21 nt, Human
agagcagcagauggcucagaa

SEQ ID NO: 73378 - RNA, 22 nt, Human
agcagagaaagaggaauucaca

SEQ ID NO: 73379 - RNA, 18 nt, Human
agccacaguguaaaugcc

SEQ ID NO: 73380 - RNA, 18 nt, Human
agccacaguguaaaugcc

SEQ ID NO: 73381 - RNA, 18 nt, Human
agccacaguguaaaugcc

SEQ ID NO: 73382 - RNA, 22 nt, Human
agcccgagggguccuugagagc

SEQ ID NO: 73383 - RNA, 18 nt, Human
agcuccagcagagaaaga

SEQ ID NO: 73384 - RNA, 21 nt, Human
aggaaucacuccaaacacauc

SEQ ID NO: 73385 - RNA, 20 nt, Human
aggaccacccugcuucacca

SEQ ID NO: 73386 - RNA, 18 nt, Human
aggacugggagcugaggu

SEQ ID NO: 73387 - RNA, 22 nt, Human
aggagaagaagaauaucccagc

SEQ ID NO: 73388 - RNA, 19 nt, Human
aggcagcacgugggagugg

SEQ ID NO: 73389 - RNA, 20 nt, Human
aggcaggucagcaguguggg

SEQ ID NO: 73390 - RNA, 19 nt, Human
aggcuaaacagcaaaccac

SEQ ID NO: 73391 - RNA, 23 nt, Human
aguccaaggccaaaggccugaga

SEQ ID NO: 73392 - RNA, 19 nt, Human
aguguaaaugccaagagga

SEQ ID NO: 73393 - RNA, 19 nt, Human
aguguaaaugccaagagga

SEQ ID NO: 73394 - RNA, 19 nt, Human
aguguaaaugccaagagga

SEQ ID NO: 73395 - RNA, 19 nt, Human
aguguccccuccuaaggga

SEQ ID NO: 73396 - RNA, 20 nt, Human
auaaauccucggguccaaag

SEQ ID NO: 73397 - RNA, 23 nt, Human
augaagagugugcgugcccaaga

SEQ ID NO: 73398 - RNA, 25 nt, Human
augcagugguuucugagccuaauuu

SEQ ID NO: 73399 - RNA, 22 nt, Human
caaaaucuagcaaaaacuaucc

SEQ ID NO: 73400 - RNA, 23 nt, Human
caaaggccugagaacccagaaac

SEQ ID NO: 73401 - RNA, 21 nt, Human
caacugaauucccagaaagcu

SEQ ID NO: 73402 - RNA, 21 nt, Human
caagaccaagagccucagaac

SEQ ID NO: 73403 - RNA, 24 nt, Human
caagaccaagagccucagaaccag

SEQ ID NO: 73404 - RNA, 25 nt, Human
caagaccaagagccucagaaccaga

SEQ ID NO: 73405 - RNA, 21 nt, Human
cacaucuagaccaccaggcug

SEQ ID NO: 73406 - RNA, 20 nt, Human
cagaaaaaagcaaguccagu

SEQ ID NO: 73407 - RNA, 19 nt, Human
cagaaagcucccagaaucc

SEQ ID NO: 73408 - RNA, 21 nt, Human
cagcaaaacaagcugcagguc

SEQ ID NO: 73409 - RNA, 23 nt, Human
cagcagagaaagaggaauucaca

SEQ ID NO: 73410 - RNA, 22 nt, Human
cagcuccagcagagaaagagga

SEQ ID NO: 73411 - RNA, 23 nt, Human
cagcuccagcagagaaagaggaa

SEQ ID NO: 73412 - RNA, 24 nt, Human
cagcucugcccuucuaugacucca

SEQ ID NO: 73413 - RNA, 21 nt, Human
caggaccacccugcuucacca

SEQ ID NO: 73414 - RNA, 23 nt, Human
caggagaagaagaauaucccagc

SEQ ID NO: 73415 - RNA, 19 nt, Human
caucugaguucaacugucc

SEQ ID NO: 73416 - RNA, 23 nt, Human
cauggacucaaucccagcuacau

SEQ ID NO: 73417 - RNA, 22 nt, Human
cauuccugcucccagaaaaaag

SEQ ID NO: 73418 - RNA, 23 nt, Human
ccaaaggccagagagccugcagc

SEQ ID NO: 73419 - RNA, 30 nt, Human
ccaaaggccugagaacccagaaaccugcuu

SEQ ID NO: 73420 - RNA, 21 nt, Human
ccaaaugagacauucaaugaa

SEQ ID NO: 73421 - RNA, 19 nt, Human
ccagaaaaaagcaagucca

SEQ ID NO: 73422 - RNA, 21 nt, Human
ccagaaucccacaugaacccc

SEQ ID NO: 73423 - RNA, 22 nt, Human
ccagauaugccaaugguguaac

SEQ ID NO: 73424 - RNA, 22 nt, Human
cccagaaucccacaugaacccc

SEQ ID NO: 73425 - RNA, 23 nt, Human
cccagaaucccacaugaaccccc

SEQ ID NO: 73426 - RNA, 23 nt, Human
cccauugaucaaaaacaagggac

SEQ ID NO: 73427 - RNA, 23 nt, Human
ccccucuuccaaaaucuagcaaa

SEQ ID NO: 73428 - RNA, 18 nt, Human
cccgagggguccuugaga

SEQ ID NO: 73429 - RNA, 19 nt, Human
cccgucucugcuauccucg

SEQ ID NO: 73430 - RNA, 22 nt, Human
cccuucuaugacuccaugauga

SEQ ID NO: 73431 - RNA, 19 nt, Human
ccucacucgguccuccagc

SEQ ID NO: 73432 - RNA, 18 nt, Human
ccucggaugaaacuuggg

SEQ ID NO: 73433 - RNA, 18 nt, Human
ccucucgcagcugcugug

SEQ ID NO: 73434 - RNA, 19 nt, Human
ccugaaaugcaaaaaucca

SEQ ID NO: 73435 - RNA, 22 nt, Human
ccugcaacacaggcucgcacaa

SEQ ID NO: 73436 - RNA, 22 nt, Human
ccuucaguuugaacugagagcc

SEQ ID NO: 73437 - RNA, 21 nt, Human
cgcccccucuuccaaaaucua

SEQ ID NO: 73438 - RNA, 24 nt, Human
cuaaagccacaguguaaaugccaa

SEQ ID NO: 73439 - RNA, 18 nt, Human
cuccuggggcaguggcug

SEQ ID NO: 73440 - RNA, 18 nt, Human
cucugaguacaaaguaaa

SEQ ID NO: 73441 - RNA, 22 nt, Human
cucugucccgcccccucuucca

SEQ ID NO: 73442 - RNA, 24 nt, Human
cucugucccgcccccucuuccaaa

SEQ ID NO: 73443 - RNA, 21 nt, Human
cugaagaacagcauccucugu

SEQ ID NO: 73444 - RNA, 22 nt, Human
cugaaggcuaaacagcaaacca

SEQ ID NO: 73445 - RNA, 18 nt, Human
cugucaguguagaaugcu

SEQ ID NO: 73446 - RNA, 18 nt, Human
cugucaguguagaaugcu

SEQ ID NO: 73447 - RNA, 26 nt, Human
cuucaaauucugucucugccagaauu

SEQ ID NO: 73448 - RNA, 22 nt, Human
gaacagcauccucugucccgcc

SEQ ID NO: 73449 - RNA, 20 nt, Human
gaccucaucaucaguguccc

SEQ ID NO: 73450 - RNA, 19 nt, Human
gagaaagaggaauucacau

SEQ ID NO: 73451 - RNA, 24 nt, Human
gagaggagacccguguuuuggaaa

SEQ ID NO: 73452 - RNA, 21 nt, Human
gagccgauaacauggacucaa

SEQ ID NO: 73453 - RNA, 23 nt, Human
gagcuggggugaauuuggucauc

SEQ ID NO: 73454 - RNA, 22 nt, Human
gaggagacccguguuuuggaaa

SEQ ID NO: 73455 - RNA, 19 nt, Human
gagggguccuugagagcau

SEQ ID NO: 73456 - RNA, 22 nt, Human
gagguggaggggacucgacagg

SEQ ID NO: 73457 - RNA, 26 nt, Human
gcagcaaaacaagcugcaggucugga

SEQ ID NO: 73458 - RNA, 19 nt, Human
gcccgagggguccuugaga

SEQ ID NO: 73459 - RNA, 21 nt, Human
gcccgagggguccuugagagc

SEQ ID NO: 73460 - RNA, 27 nt, Human
gcccugugaaugaaggagcugggguga

SEQ ID NO: 73461 - RNA, 19 nt, Human
gcuaggaggcugagguggg

SEQ ID NO: 73462 - RNA, 19 nt, Human
ggaaucacuccaaacacau

SEQ ID NO: 73463 - RNA, 23 nt, Human
ggagaagaagaauaucccagcuc

SEQ ID NO: 73464 - RNA, 19 nt, Human
ggaguguggcucaguccaa

SEQ ID NO: 73465 - RNA, 18 nt, Human
ggcaccaagugggaacua

SEQ ID NO: 73466 - RNA, 18 nt, Human
gucaggguucucgugaca

SEQ ID NO: 73467 - RNA, 20 nt, Human
gucaggguucucgugacagg

SEQ ID NO: 73468 - RNA, 18 nt, Human
guguccccuccuaaggga

SEQ ID NO: 73469 - RNA, 20 nt, Human
uagaaugcuccauaauuauc

SEQ ID NO: 73470 - RNA, 20 nt, Human
uagaaugcuccauaauuauc

SEQ ID NO: 73471 - RNA, 20 nt, Human
uagaaugcuccauaauuauc

SEQ ID NO: 73472 - RNA, 19 nt, Human
uaggagcaagauuacuuug

SEQ ID NO: 73473 - RNA, 19 nt, Human
uaggaggcugaggugggag

SEQ ID NO: 73474 - RNA, 20 nt, Human
uaggauacugaccccugaaa

SEQ ID NO: 73475 - RNA, 19 nt, Human
uagggcucugagcccgagg

SEQ ID NO: 73476 - RNA, 20 nt, Human
uagggcucugagcccgaggg

SEQ ID NO: 73477 - RNA, 22 nt, Human
uaucagguucugggcuugguuu

SEQ ID NO: 73478 - RNA, 22 nt, Human
uaucagguucugggcuugguuu

SEQ ID NO: 73479 - RNA, 22 nt, Human
uaucagguucugggcuugguuu

SEQ ID NO: 73480 - RNA, 18 nt, Human
uaugccuacuggcuguga

SEQ ID NO: 73481 - RNA, 21 nt, Human
uaugcuaggaggcugaggugg

SEQ ID NO: 73482 - RNA, 19 nt, Human
uaugugacacagccaugug

SEQ ID NO: 73483 - RNA, 19 nt, Human
ucaaacacuuaguaugaag

SEQ ID NO: 73484 - RNA, 25 nt, Human
ucaauaacggaauggcaguuucucc

SEQ ID NO: 73485 - RNA, 21 nt, Human
ucaguccaagaccaagagccu

SEQ ID NO: 73486 - RNA, 20 nt, Human
ucagugacuucaugaacacc

SEQ ID NO: 73487 - RNA, 24 nt, Human
uccaaaaucuagcaaaaacuaucc

SEQ ID NO: 73488 - RNA, 22 nt, Human
uccaaacacaucuagaccacca

SEQ ID NO: 73489 - RNA, 18 nt, Human
uccaaaggccagagagcc

SEQ ID NO: 73490 - RNA, 19 nt, Human
uccaaaggccagagagccu

SEQ ID NO: 73491 - RNA, 22 nt, Human
uccaaggccaaaggccugagaa

SEQ ID NO: 73492 - RNA, 22 nt, Human
uccaaggccaaaggccugagaa

SEQ ID NO: 73493 - RNA, 23 nt, Human
uccagcagauucugcacuccagg

SEQ ID NO: 73494 - RNA, 26 nt, Human
uccagcagauucugcacuccaggugu

SEQ ID NO: 73495 - RNA, 18 nt, Human
uccagguguauuagucag

SEQ ID NO: 73496 - RNA, 22 nt, Human
uccagguguauuagucaggguu

SEQ ID NO: 73497 - RNA, 23 nt, Human
uccaugaugaagcgcagcaaaac

SEQ ID NO: 73498 - RNA, 21 nt, Human
ucccagaaaaaagcaagucca

SEQ ID NO: 73499 - RNA, 21 nt, Human
ucccagaaagcucccagaacc

SEQ ID NO: 73500 - RNA, 22 nt, Human
ucccagaaagcucccagaaucc

SEQ ID NO: 73501 - RNA, 22 nt, Human
ucccagaaucccacaugaaccc

SEQ ID NO: 73502 - RNA, 21 nt, Human
ucccucacucgguccuccagc

SEQ ID NO: 73503 - RNA, 18 nt, Human
uccucggguccaaaggcc

SEQ ID NO: 73504 - RNA, 24 nt, Human
ucuauaauuaggagcaagauuacu

SEQ ID NO: 73505 - RNA, 19 nt, Human
ucucugaguacaaaguaaa

SEQ ID NO: 73506 - RNA, 26 nt, Human
ucucugaucugauucuuuccuguucu

SEQ ID NO: 73507 - RNA, 21 nt, Human
ucugacaggaaucacgugaca

SEQ ID NO: 73508 - RNA, 22 nt, Human
ucugacaggaaucacgugacag

SEQ ID NO: 73509 - RNA, 24 nt, Human
ucugacaggaaucacgugacaggc

SEQ ID NO: 73510 - RNA, 21 nt, Human
ucugacaggaaucacuccaaa

SEQ ID NO: 73511 - RNA, 20 nt, Human
ucugaucuaauuaagcagca

SEQ ID NO: 73512 - RNA, 21 nt, Human
ucugaucuaauuaagcagcau

SEQ ID NO: 73513 - RNA, 24 nt, Human
ucugaucugauucuuuccuguucu

SEQ ID NO: 73514 - RNA, 18 nt, Human
ucuggguaggaggcagcg

SEQ ID NO: 73515 - RNA, 19 nt, Human
ugaaaggaacaaaauccaa

SEQ ID NO: 73516 - RNA, 21 nt, Human
ugaaaggaacaaaauccaaug

SEQ ID NO: 73517 - RNA, 22 nt, Human
ugaagagugugcgugcccaaga

SEQ ID NO: 73518 - RNA, 22 nt, Human
ugaagcgcagcaaaacaagcug

SEQ ID NO: 73519 - RNA, 19 nt, Human
ugacacagccaugugaggc

SEQ ID NO: 73520 - RNA, 18 nt, Human
ugacaggaaucacuccaa

SEQ ID NO: 73521 - RNA, 18 nt, Human
ugaccauggcugaauggg

SEQ ID NO: 73522 - RNA, 19 nt, Human
ugagagagcagcagauggc

SEQ ID NO: 73523 - RNA, 26 nt, Human
ugagagcauccugacuugacuccaac

SEQ ID NO: 73524 - RNA, 21 nt, Human
ugccaagaggaaauuugucuc

SEQ ID NO: 73525 - RNA, 21 nt, Human
ugccaagaggaaauuugucuc

SEQ ID NO: 73526 - RNA, 21 nt, Human
ugccaagaggaaauuugucuc

SEQ ID NO: 73527 - RNA, 21 nt, Human
uggacgcaggaccacccugcu

SEQ ID NO: 73528 - RNA, 21 nt, Human
uggacucaaucccagcuacau

SEQ ID NO: 73529 - RNA, 23 nt, Human
uggcaccaggucccucacucggu

SEQ ID NO: 73530 - RNA, 21 nt, Human
uggcucaguccaagaccaaga

SEQ ID NO: 73531 - RNA, 20 nt, Human
ugggcaaaacuaacgaagua

SEQ ID NO: 73532 - RNA, 21 nt, Human
uguauggaccacuugcauucu

SEQ ID NO: 73533 - RNA, 21 nt, Human
ugucccgcccccucuuccaaa

SEQ ID NO: 73534 - RNA, 18 nt, Human
uguccggaugugccucug

SEQ ID NO: 73535 - RNA, 21 nt, Human
uguccuugccuguaaaauuag

SEQ ID NO: 73536 - RNA, 19 nt, Human
ugucucaaagaacugucag

SEQ ID NO: 73537 - RNA, 19 nt, Human
ugucucaaagaacugucag

SEQ ID NO: 73538 - RNA, 19 nt, Human
ugucucaaagaacugucag

SEQ ID NO: 73539 - RNA, 23 nt, Human
ugugcgugcccaagagacgggcc

SEQ ID NO: 73540 - RNA, 23 nt, Human
uguucugcccacccgucucugcu

SEQ ID NO: 73541 - RNA, 18 nt, Human
uuaaguuacuuuuuacag

SEQ ID NO: 73542 - RNA, 22 nt, Human
uuaugcuaggaggcugaggugg

SEQ ID NO: 73543 - RNA, 19 nt, Human
uucuaugacuccaugauga

SEQ ID NO: 73544 - RNA, 19 nt, Human
uucuccagcagauucugca

SEQ ID NO: 73545 - RNA, 20 nt, Human
uucuccagcagauucugcac

SEQ ID NO: 73546 - RNA, 19 nt, Human
uugagagcauccugacuug

SEQ ID NO: 73547 - RNA, 19 nt, Human
uuuuaugcuaggaggcuga

SEQ ID NO: 73548 - RNA, 22 nt, Human
aaaagaacaggcaugggccggg

SEQ ID NO: 73549 - RNA, 23 nt, Human
aaaaugcccacacauaagcucag

SEQ ID NO: 73550 - RNA, 19 nt, Human
aaaggaagaggggccggag

SEQ ID NO: 73551 - RNA, 19 nt, Human
aaaggaagaggggccggag

SEQ ID NO: 73552 - RNA, 24 nt, Human
aauggcccucagaccucuccuggu

SEQ ID NO: 73553 - RNA, 24 nt, Human
aauggcccucagaccucuccuggu

SEQ ID NO: 73554 - RNA, 23 nt, Human
acagccuuaugcucuguaaaggu

SEQ ID NO: 73555 - RNA, 21 nt, Human
accagccaagcugaccuuggc

SEQ ID NO: 73556 - RNA, 23 nt, Human
acccauugcggaagcagguuugg

SEQ ID NO: 73557 - RNA, 18 nt, Human
acccucaccccagccucu

SEQ ID NO: 73558 - RNA, 24 nt, Human
acccugggggguggacaccugcgg

SEQ ID NO: 73559 - RNA, 21 nt, Human
acuccugugugguggggcuug

SEQ ID NO: 73560 - RNA, 21 nt, Human
acuccugugugguggggcuug

SEQ ID NO: 73561 - RNA, 23 nt, Human
acuggagucugagaaggggucgc

SEQ ID NO: 73562 - RNA, 22 nt, Human
agaauagaaaggagggugaugg

SEQ ID NO: 73563 - RNA, 26 nt, Human
agagaacaacaggucugggauuucug

SEQ ID NO: 73564 - RNA, 24 nt, Human
agagcccuuuccagugggcccuuc

SEQ ID NO: 73565 - RNA, 22 nt, Human
aggaacccugggggguggacac

SEQ ID NO: 73566 - RNA, 20 nt, Human
aggagggaguuagggaaugg

SEQ ID NO: 73567 - RNA, 20 nt, Human
aggagggaguuagggaaugg

SEQ ID NO: 73568 - RNA, 20 nt, Human
aggcacacuguucuuucucc

SEQ ID NO: 73569 - RNA, 20 nt, Human
aggcacacuguucuuucucc

SEQ ID NO: 73570 - RNA, 26 nt, Human
aggccaagaacagggucugaggagga

SEQ ID NO: 73571 - RNA, 19 nt, Human
aggcgcuuucccuccccag

SEQ ID NO: 73572 - RNA, 19 nt, Human
aggcgcuuucccuccccag

SEQ ID NO: 73573 - RNA, 19 nt, Human
agggagggccaugcuccac

SEQ ID NO: 73574 - RNA, 20 nt, Human
agggagggccaugcuccacu

SEQ ID NO: 73575 - RNA, 21 nt, Human
aggggcaggggucaggaaccc

SEQ ID NO: 73576 - RNA, 21 nt, Human
aggggcggccacgggcggcgg

SEQ ID NO: 73577 - RNA, 19 nt, Human
aggugcgcuggagcaccag

SEQ ID NO: 73578 - RNA, 21 nt, Human
aggugggcgguggggaggcag

SEQ ID NO: 73579 - RNA, 22 nt, Human
aggugggcgguggggaggcagu

SEQ ID NO: 73580 - RNA, 23 nt, Human
aggugggcgguggggaggcagug

SEQ ID NO: 73581 - RNA, 23 nt, Human
aggugggcgguggggaggcagug

SEQ ID NO: 73582 - RNA, 21 nt, Human
augcagggcugggugccuguu

SEQ ID NO: 73583 - RNA, 19 nt, Human
caaagcagugugcucaggc

SEQ ID NO: 73584 - RNA, 19 nt, Human
caaagcagugugcucaggc

SEQ ID NO: 73585 - RNA, 20 nt, Human
caaagcagugugcucaggcc

SEQ ID NO: 73586 - RNA, 24 nt, Human
caaagcagugugcucaggccuccc

SEQ ID NO: 73587 - RNA, 24 nt, Human
caaagcagugugcucaggccuccc

SEQ ID NO: 73588 - RNA, 20 nt, Human
caauaaagaugaaggcugca

SEQ ID NO: 73589 - RNA, 20 nt, Human
caauaaagaugaaggcugca

SEQ ID NO: 73590 - RNA, 18 nt, Human
cacagccugagguacagg

SEQ ID NO: 73591 - RNA, 18 nt, Human
cacagccugagguacagg

SEQ ID NO: 73592 - RNA, 20 nt, Human
caccuugcccaccacccacc

SEQ ID NO: 73593 - RNA, 20 nt, Human
caccuugcccaccacccacc

SEQ ID NO: 73594 - RNA, 24 nt, Human
cacuagagagcccggcugggccag

SEQ ID NO: 73595 - RNA, 18 nt, Human
cagaauagaaaggagggu

SEQ ID NO: 73596 - RNA, 27 nt, Human
cagaauagaaaggagggugauggugaa

SEQ ID NO: 73597 - RNA, 19 nt, Human
cagcacaggggagaaaaga

SEQ ID NO: 73598 - RNA, 18 nt, Human
cagcagccccugcccccu

SEQ ID NO: 73599 - RNA, 18 nt, Human
cagcagccccugcccccu

SEQ ID NO: 73600 - RNA, 22 nt, Human
cagcgggccccagaggccuggg

SEQ ID NO: 73601 - RNA, 19 nt, Human
cagcugccugggugccacc

SEQ ID NO: 73602 - RNA, 19 nt, Human
cagcugccugggugccacc

SEQ ID NO: 73603 - RNA, 23 nt, Human
caggaacccugggggguggacac

SEQ ID NO: 73604 - RNA, 20 nt, Human
cagggacagggagccaggga

SEQ ID NO: 73605 - RNA, 21 nt, Human
cagggagggccaugcuccacu

SEQ ID NO: 73606 - RNA, 22 nt, Human
cagugggccccagaggccuggg

SEQ ID NO: 73607 - RNA, 21 nt, Human
ccaaagcagugugcucaggcc

SEQ ID NO: 73608 - RNA, 18 nt, Human
ccaccacccaccgccuug

SEQ ID NO: 73609 - RNA, 18 nt, Human
ccaccacccaccgccuug

SEQ ID NO: 73610 - RNA, 18 nt, Human
ccaccacccaccgccuug

SEQ ID NO: 73611 - RNA, 20 nt, Human
ccaccacccaccgccuugcc

SEQ ID NO: 73612 - RNA, 20 nt, Human
ccaccacccaccgccuugcc

SEQ ID NO: 73613 - RNA, 21 nt, Human
ccaccacccaccgccuugccc

SEQ ID NO: 73614 - RNA, 21 nt, Human
ccaccacccaccgccuugccc

SEQ ID NO: 73615 - RNA, 21 nt, Human
ccaccacccaccgccuugccc

SEQ ID NO: 73616 - RNA, 24 nt, Human
ccaccacccaccgccuugcccacc

SEQ ID NO: 73617 - RNA, 21 nt, Human
ccacccacccacccacucagg

SEQ ID NO: 73618 - RNA, 21 nt, Human
ccacccacccacccacucagg

SEQ ID NO: 73619 - RNA, 20 nt, Human
ccacccauugcggaagcagg

SEQ ID NO: 73620 - RNA, 22 nt, Human
ccaccgccuugcccaccaccca

SEQ ID NO: 73621 - RNA, 22 nt, Human
ccacugcaccugcuccugcagc

SEQ ID NO: 73622 - RNA, 24 nt, Human
ccagagucccuccuccucaaacca

SEQ ID NO: 73623 - RNA, 24 nt, Human
ccagagucccuccuccucagacca

SEQ ID NO: 73624 - RNA, 19 nt, Human
ccagcagccccugcccccu

SEQ ID NO: 73625 - RNA, 19 nt, Human
ccagcagccccugcccccu

SEQ ID NO: 73626 - RNA, 20 nt, Human
ccagccaagcugaccuuggc

SEQ ID NO: 73627 - RNA, 23 nt, Human
ccagcgggccccagaggccuggg

SEQ ID NO: 73628 - RNA, 18 nt, Human
ccagggggucagagcccu

SEQ ID NO: 73629 - RNA, 18 nt, Human
ccagggggucagagcccu

SEQ ID NO: 73630 - RNA, 23 nt, Human
ccagugggccccagaggccuggg

SEQ ID NO: 73631 - RNA, 23 nt, Human
ccaugcagggcugggugccuguu

SEQ ID NO: 73632 - RNA, 23 nt, Human
ccaugcagggcugggugccuguu

SEQ ID NO: 73633 - RNA, 22 nt, Human
cccaccacccaccgccuugccc

SEQ ID NO: 73634 - RNA, 22 nt, Human
cccaccacccaccgccuugccc

SEQ ID NO: 73635 - RNA, 22 nt, Human
cccaccacccaccgccuugccc

SEQ ID NO: 73636 - RNA, 24 nt, Human
cccacccacccacccacucaggag

SEQ ID NO: 73637 - RNA, 24 nt, Human
cccacccacccacccacucaggag

SEQ ID NO: 73638 - RNA, 22 nt, Human
cccaccgccuugcccacugccc

SEQ ID NO: 73639 - RNA, 22 nt, Human
cccaccgccuugcccacugccc

SEQ ID NO: 73640 - RNA, 18 nt, Human
cccaccuccucccuucuc

SEQ ID NO: 73641 - RNA, 18 nt, Human
cccaccuccucccuucuc

SEQ ID NO: 73642 - RNA, 23 nt, Human
cccaccuccucccuucucuccca

SEQ ID NO: 73643 - RNA, 23 nt, Human
cccaccuccucccuucucuccca

SEQ ID NO: 73644 - RNA, 20 nt, Human
cccaggcuccccccaugcag

SEQ ID NO: 73645 - RNA, 20 nt, Human
cccaggcuccccccaugcag

SEQ ID NO: 73646 - RNA, 24 nt, Human
ccccggccccggcgccccuagacc

SEQ ID NO: 73647 - RNA, 19 nt, Human
ccccuacgccccggccccg

SEQ ID NO: 73648 - RNA, 19 nt, Human
ccccugcccccucuuuccc

SEQ ID NO: 73649 - RNA, 19 nt, Human
ccccugcccccucuuuccc

SEQ ID NO: 73650 - RNA, 20 nt, Human
ccccugcccccucuuuccca

SEQ ID NO: 73651 - RNA, 20 nt, Human
ccccugcccccucuuuccca

SEQ ID NO: 73652 - RNA, 20 nt, Human
cccggccccggcgccccuag

SEQ ID NO: 73653 - RNA, 19 nt, Human
cccuacgccccggccccgg

SEQ ID NO: 73654 - RNA, 18 nt, Human
cccuagaccgcugcccug

SEQ ID NO: 73655 - RNA, 20 nt, Human
cccucugcuacuccagaguc

SEQ ID NO: 73656 - RNA, 20 nt, Human
cccucugcuacuccagaguc

SEQ ID NO: 73657 - RNA, 20 nt, Human
cccugggccgcgugcggcuc

SEQ ID NO: 73658 - RNA, 23 nt, Human
cccugggggguggacaccugcgg

SEQ ID NO: 73659 - RNA, 23 nt, Human
cccuuuccuuuuccuccacuugg

SEQ ID NO: 73660 - RNA, 23 nt, Human
cccuuuccuuuuccuccacuugg

SEQ ID NO: 73661 - RNA, 19 nt, Human
ccgcugcccugggccgcgu

SEQ ID NO: 73662 - RNA, 19 nt, Human
ccuacgccccggccccggc

SEQ ID NO: 73663 - RNA, 24 nt, Human
ccuagccccuggccucacuccugu

SEQ ID NO: 73664 - RNA, 24 nt, Human
ccuagccccuggccucacuccugu

SEQ ID NO: 73665 - RNA, 24 nt, Human
ccucagaccagccaagcugaccuu

SEQ ID NO: 73666 - RNA, 24 nt, Human
ccucagaccagccaagcugaccuu

SEQ ID NO: 73667 - RNA, 23 nt, Human
ccuccuccucagaccaggggcag

SEQ ID NO: 73668 - RNA, 25 nt, Human
ccuggccucacuccugguccccugg

SEQ ID NO: 73669 - RNA, 25 nt, Human
ccuggccucacuccugguccccugg

SEQ ID NO: 73670 - RNA, 22 nt, Human
ccuugcccaccacccaccgccu

SEQ ID NO: 73671 - RNA, 22 nt, Human
ccuugcccaccacccaccgccu

SEQ ID NO: 73672 - RNA, 22 nt, Human
ccuugcccaccacccaccgccu

SEQ ID NO: 73673 - RNA, 24 nt, Human
ccuuuguucuggcaucaggcuggg

SEQ ID NO: 73674 - RNA, 19 nt, Human
cgccccuagaccgcugccc

SEQ ID NO: 73675 - RNA, 23 nt, Human
cggcagcacaggggagaaaagaa

SEQ ID NO: 73676 - RNA, 21 nt, Human
cggccccuacgccccggcccc

SEQ ID NO: 73677 - RNA, 18 nt, Human
cggcggcagcacagggga

SEQ ID NO: 73678 - RNA, 21 nt, Human
cggcuccucauuaccagcacu

SEQ ID NO: 73679 - RNA, 19 nt, Human
cgggccccagaggccuggg

SEQ ID NO: 73680 - RNA, 23 nt, Human
cgggccccagaggccuggggagg

SEQ ID NO: 73681 - RNA, 20 nt, Human
cgguggggaggcagugugug

SEQ ID NO: 73682 - RNA, 20 nt, Human
cgguggggaggcagugugug

SEQ ID NO: 73683 - RNA, 18 nt, Human
cuacgccccggccccggc

SEQ ID NO: 73684 - RNA, 26 nt, Human
cuagaccgcugcccugggccgcgugc

SEQ ID NO: 73685 - RNA, 21 nt, Human
cuagccccuggccucacuccu

SEQ ID NO: 73686 - RNA, 21 nt, Human
cuagccccuggccucacuccu

SEQ ID NO: 73687 - RNA, 21 nt, Human
cucaccaccugugcccaccuc

SEQ ID NO: 73688 - RNA, 21 nt, Human
cucaccaccugugcccaccuc

SEQ ID NO: 73689 - RNA, 20 nt, Human
cucauuaccagcacucacaa

SEQ ID NO: 73690 - RNA, 26 nt, Human
cucauuaccagcacucacaacccacc

SEQ ID NO: 73691 - RNA, 24 nt, Human
cucccgccacagccugagguacag

SEQ ID NO: 73692 - RNA, 24 nt, Human
cucccgccacagccugagguacag

SEQ ID NO: 73693 - RNA, 20 nt, Human
cuccugcagccccgucagug

SEQ ID NO: 73694 - RNA, 22 nt, Human
cugagcccagggacagggagcc

SEQ ID NO: 73695 - RNA, 24 nt, Human
cugcacccacggcuccucauuacc

SEQ ID NO: 73696 - RNA, 24 nt, Human
cugcacccacggcuccucauuacc

SEQ ID NO: 73697 - RNA, 21 nt, Human
cugcccccucuuucccagccc

SEQ ID NO: 73698 - RNA, 21 nt, Human
cugcccccucuuucccagccc

SEQ ID NO: 73699 - RNA, 22 nt, Human
cugcccccucuuucccagcccc

SEQ ID NO: 73700 - RNA, 22 nt, Human
cugcccccucuuucccagcccc

SEQ ID NO: 73701 - RNA, 23 nt, Human
cugcccugggccgcgugcggcuc

SEQ ID NO: 73702 - RNA, 21 nt, Human
cuggagcaccagcuuggcugg

SEQ ID NO: 73703 - RNA, 22 nt, Human
cuggagucugagaaggggucgc

SEQ ID NO: 73704 - RNA, 21 nt, Human
cuggcucuagagccuaccccu

SEQ ID NO: 73705 - RNA, 21 nt, Human
cuggcucuagagccuaccccu

SEQ ID NO: 73706 - RNA, 23 nt, Human
cuguucuuagaacuccuagcccc

SEQ ID NO: 73707 - RNA, 23 nt, Human
cuguucuuagaacuccuagcccc

SEQ ID NO: 73708 - RNA, 19 nt, Human
cuucagaauucccuggcug

SEQ ID NO: 73709 - RNA, 23 nt, Human
cuuuguucuggcaucaggcuggg

SEQ ID NO: 73710 - RNA, 20 nt, Human
gaacagacuggguuuggaaa

SEQ ID NO: 73711 - RNA, 20 nt, Human
gaacagacuggguuuggaaa

SEQ ID NO: 73712 - RNA, 22 nt, Human
gacagcuggacaugaggugggc

SEQ ID NO: 73713 - RNA, 22 nt, Human
gacagcuggacaugaggugggc

SEQ ID NO: 73714 - RNA, 18 nt, Human
gaccuagcaucugcccaa

SEQ ID NO: 73715 - RNA, 18 nt, Human
gaccuagcaucugcccaa

SEQ ID NO: 73716 - RNA, 27 nt, Human
gaccuagcaucugcccaaagaaguccc

SEQ ID NO: 73717 - RNA, 27 nt, Human
gaccuagcaucugcccaaagaaguccc

SEQ ID NO: 73718 - RNA, 20 nt, Human
gagaggggcggccacgggcg

SEQ ID NO: 73719 - RNA, 20 nt, Human
gagcccagggacagggagcc

SEQ ID NO: 73720 - RNA, 18 nt, Human
gaggaggcuccugcaucc

SEQ ID NO: 73721 - RNA, 21 nt, Human
gagucuuaauggggugggagg

SEQ ID NO: 73722 - RNA, 21 nt, Human
gagucuuaauggggugggagg

SEQ ID NO: 73723 - RNA, 21 nt, Human
gcagagcgcucgugaugcccg

SEQ ID NO: 73724 - RNA, 19 nt, Human
gcagccccgucagugcggg

SEQ ID NO: 73725 - RNA, 18 nt, Human
gcagggccagugugggcg

SEQ ID NO: 73726 - RNA, 25 nt, Human
gccacgggcggcggcagcacagggg

SEQ ID NO: 73727 - RNA, 18 nt, Human
gcccagggacagggagcc

SEQ ID NO: 73728 - RNA, 22 nt, Human
gccccuagaccgcugcccuggg

SEQ ID NO: 73729 - RNA, 18 nt, Human
gccuuggccucccuccuc

SEQ ID NO: 73730 - RNA, 18 nt, Human
gccuuggccucccuccuc

SEQ ID NO: 73731 - RNA, 22 nt, Human
gcggggagcucuggggaggugc

SEQ ID NO: 73732 - RNA, 20 nt, Human
gcugaccuuggcacuuggcc

SEQ ID NO: 73733 - RNA, 20 nt, Human
gcugaccuuggcacuuggcc

SEQ ID NO: 73734 - RNA, 19 nt, Human
gcuggaggagaagggguaa

SEQ ID NO: 73735 - RNA, 19 nt, Human
gcuggaggagaagggguaa

SEQ ID NO: 73736 - RNA, 21 nt, Human
gcuggggcccuuuccuuuucc

SEQ ID NO: 73737 - RNA, 19 nt, Human
ggacagggagccagggagg

SEQ ID NO: 73738 - RNA, 18 nt, Human
ggagcagggaacagacug

SEQ ID NO: 73739 - RNA, 20 nt, Human
ggaucaccacuagagagccc

SEQ ID NO: 73740 - RNA, 20 nt, Human
ggaucaccacuagagagccc

SEQ ID NO: 73741 - RNA, 23 nt, Human
ggcaggagggaguuagggaaugg

SEQ ID NO: 73742 - RNA, 23 nt, Human
ggcaggagggaguuagggaaugg

SEQ ID NO: 73743 - RNA, 22 nt, Human
ggcaggggucaggaacccuggg

SEQ ID NO: 73744 - RNA, 24 nt, Human
ggcaggggucaggaacccuggggg

SEQ ID NO: 73745 - RNA, 20 nt, Human
ggccccuacgccccggcccc

SEQ ID NO: 73746 - RNA, 18 nt, Human
ggcgguggggaggcagug

SEQ ID NO: 73747 - RNA, 18 nt, Human
ggcgguggggaggcagug

SEQ ID NO: 73748 - RNA, 20 nt, Human
gggacagggagccagggagg

SEQ ID NO: 73749 - RNA, 21 nt, Human
gggagcagggaacagacuggg

SEQ ID NO: 73750 - RNA, 18 nt, Human
gggagggcaggaguuuga

SEQ ID NO: 73751 - RNA, 18 nt, Human
gggagggcaggaguuuga

SEQ ID NO: 73752 - RNA, 20 nt, Human
gggcaggggucaggaacccu

SEQ ID NO: 73753 - RNA, 23 nt, Human
gggcaggggucaggaacccuggg

SEQ ID NO: 73754 - RNA, 19 nt, Human
gggccaugcuccacuugac

SEQ ID NO: 73755 - RNA, 19 nt, Human
gggcccaggagaggagcag

SEQ ID NO: 73756 - RNA, 24 nt, Human
gggcccuuuccuuuuccuccacuu

SEQ ID NO: 73757 - RNA, 24 nt, Human
gggcggccacgggcggcggcagca

SEQ ID NO: 73758 - RNA, 25 nt, Human
ggggcccuuuccuuuuccuccacuu

SEQ ID NO: 73759 - RNA, 21 nt, Human
gggugccuguugggauccaag

SEQ ID NO: 73760 - RNA, 21 nt, Human
gggugccuguugggauccaag

SEQ ID NO: 73761 - RNA, 22 nt, Human
gguaugucugauuugggggcag

SEQ ID NO: 73762 - RNA, 19 nt, Human
ggucaggaacccugggggg

SEQ ID NO: 73763 - RNA, 19 nt, Human
ggucaggaacccugggggg

SEQ ID NO: 73764 - RNA, 24 nt, Human
ggucccaccuugcccaccacccac

SEQ ID NO: 73765 - RNA, 24 nt, Human
ggucccaccuugcccaccacccac

SEQ ID NO: 73766 - RNA, 20 nt, Human
gguucuuaguccaggucagg

SEQ ID NO: 73767 - RNA, 20 nt, Human
gguucuuaguccaggucagg

SEQ ID NO: 73768 - RNA, 20 nt, Human
gucaggcagugaccugugcu

SEQ ID NO: 73769 - RNA, 20 nt, Human
guccugaaaaugaacccuag

SEQ ID NO: 73770 - RNA, 20 nt, Human
guccugaaaaugaacccuag

SEQ ID NO: 73771 - RNA, 26 nt, Human
gugaugcccgugggcugcucucuggu

SEQ ID NO: 73772 - RNA, 19 nt, Human
gugcuggacaccccacccu

SEQ ID NO: 73773 - RNA, 22 nt, Human
uaaaaugcccacacauaagcuc

SEQ ID NO: 73774 - RNA, 27 nt, Human
uaccccuuugccacugcuggaggagaa

SEQ ID NO: 73775 - RNA, 27 nt, Human
uaccccuuugccacugcuggaggagaa

SEQ ID NO: 73776 - RNA, 21 nt, Human
uagaaaggagggugaugguga

SEQ ID NO: 73777 - RNA, 18 nt, Human
uagaauaauuuccaaagc

SEQ ID NO: 73778 - RNA, 18 nt, Human
uagaauaauuuccaaagc

SEQ ID NO: 73779 - RNA, 22 nt, Human
uagagugcccacacauaagcuc

SEQ ID NO: 73780 - RNA, 23 nt, Human
uagggagaaauaacauuuucuuu

SEQ ID NO: 73781 - RNA, 23 nt, Human
uagggagaaauaacauuuucuuu

SEQ ID NO: 73782 - RNA, 19 nt, Human
ucaggcagugaccugugcu

SEQ ID NO: 73783 - RNA, 19 nt, Human
ucaggcagugaccugugcu

SEQ ID NO: 73784 - RNA, 19 nt, Human
ucaggcagugaccugugcu

SEQ ID NO: 73785 - RNA, 21 nt, Human
ucaguaggcuggggcccuuuc

SEQ ID NO: 73786 - RNA, 24 nt, Human
ucauucccaauaaagaugaaggcu

SEQ ID NO: 73787 - RNA, 20 nt, Human
uccaaagcagugugcucagg

SEQ ID NO: 73788 - RNA, 20 nt, Human
uccaaagcagugugcucagg

SEQ ID NO: 73789 - RNA, 22 nt, Human
uccaaagcagugugcucaggcc

SEQ ID NO: 73790 - RNA, 22 nt, Human
uccaaagcagugugcucaggcc

SEQ ID NO: 73791 - RNA, 22 nt, Human
uccacccugaggucuguggcuc

SEQ ID NO: 73792 - RNA, 22 nt, Human
uccacccugaggucuguggcuc

SEQ ID NO: 73793 - RNA, 25 nt, Human
uccaguccaggcgaggggccuagca

SEQ ID NO: 73794 - RNA, 25 nt, Human
uccaguccaggcgaggggccuagca

SEQ ID NO: 73795 - RNA, 24 nt, Human
uccagugggccccagaggccuggg

SEQ ID NO: 73796 - RNA, 20 nt, Human
ucccaauaaagaugaaggcu

SEQ ID NO: 73797 - RNA, 18 nt, Human
ucccacccacccacccac

SEQ ID NO: 73798 - RNA, 18 nt, Human
ucccacccacccacccac

SEQ ID NO: 73799 - RNA, 26 nt, Human
ucccaccuugcccaccacccaccgcc

SEQ ID NO: 73800 - RNA, 26 nt, Human
ucccaccuugcccaccacccaccgcc

SEQ ID NO: 73801 - RNA, 22 nt, Human
ucccagcagccccugcccccuc

SEQ ID NO: 73802 - RNA, 22 nt, Human
ucccagcagccccugcccccuc

SEQ ID NO: 73803 - RNA, 24 nt, Human
ucccuccucuuuccaggcugcagg

SEQ ID NO: 73804 - RNA, 24 nt, Human
ucccuccucuuuccaggcugcagg

SEQ ID NO: 73805 - RNA, 19 nt, Human
uccucuuuccaggcugcag

SEQ ID NO: 73806 - RNA, 19 nt, Human
uccucuuuccaggcugcag

SEQ ID NO: 73807 - RNA, 21 nt, Human
ucgcuguccaggggcaggggu

SEQ ID NO: 73808 - RNA, 19 nt, Human
ucgggcccuggucacgcug

SEQ ID NO: 73809 - RNA, 24 nt, Human
ucucuggacugagucccacccacc

SEQ ID NO: 73810 - RNA, 24 nt, Human
ucucuggacugagucccacccacc

SEQ ID NO: 73811 - RNA, 24 nt, Human
ucucuggucuucagaauucccugg

SEQ ID NO: 73812 - RNA, 20 nt, Human
ucugugaggcaguaaaaugc

SEQ ID NO: 73813 - RNA, 20 nt, Human
ucuucagaauucccuggcug

SEQ ID NO: 73814 - RNA, 19 nt, Human
ugaauggcccucagaccuc

SEQ ID NO: 73815 - RNA, 19 nt, Human
ugaauggcccucagaccuc

SEQ ID NO: 73816 - RNA, 22 nt, Human
ugaauggcccucagaccucucc

SEQ ID NO: 73817 - RNA, 22 nt, Human
ugaauggcccucagaccucucc

SEQ ID NO: 73818 - RNA, 24 nt, Human
ugaauggcccucagaccucuccug

SEQ ID NO: 73819 - RNA, 24 nt, Human
ugaauggcccucagaccucuccug

SEQ ID NO: 73820 - RNA, 19 nt, Human
ugacauccaggguguaaga

SEQ ID NO: 73821 - RNA, 19 nt, Human
ugacauccaggguguaaga

SEQ ID NO: 73822 - RNA, 26 nt, Human
ugacuuagggagaaauaacauuuucu

SEQ ID NO: 73823 - RNA, 26 nt, Human
ugacuuagggagaaauaacauuuucu

SEQ ID NO: 73824 - RNA, 23 nt, Human
ugagcccagggacagggagccag

SEQ ID NO: 73825 - RNA, 21 nt, Human
ugaggugggcuagcucugcau

SEQ ID NO: 73826 - RNA, 21 nt, Human
ugaggugggcuagcucugcau

SEQ ID NO: 73827 - RNA, 19 nt, Human
ugcagggcugggugccugu

SEQ ID NO: 73828 - RNA, 21 nt, Human
ugccagcgagggagcagggaa

SEQ ID NO: 73829 - RNA, 21 nt, Human
ugccagcgagggagcagggaa

SEQ ID NO: 73830 - RNA, 27 nt, Human
ugcccaccuccucccuucucucccaac

SEQ ID NO: 73831 - RNA, 27 nt, Human
ugcccaccuccucccuucucucccaac

SEQ ID NO: 73832 - RNA, 21 nt, Human
ugcccccucuuucccagcccc

SEQ ID NO: 73833 - RNA, 21 nt, Human
ugcccccucuuucccagcccc

SEQ ID NO: 73834 - RNA, 20 nt, Human
ugcgcuggagcaccagcuug

SEQ ID NO: 73835 - RNA, 19 nt, Human
ugcucuguaaacgugaacc

SEQ ID NO: 73836 - RNA, 19 nt, Human
ugcuuaaauucucuguccu

SEQ ID NO: 73837 - RNA, 22 nt, Human
uggaggagaagggguaaaggaa

SEQ ID NO: 73838 - RNA, 22 nt, Human
uggaggagaagggguaaaggaa

SEQ ID NO: 73839 - RNA, 19 nt, Human
uggcccucagaccucuccu

SEQ ID NO: 73840 - RNA, 19 nt, Human
uggcccucagaccucuccu

SEQ ID NO: 73841 - RNA, 19 nt, Human
ugggccccagaggccuggg

SEQ ID NO: 73842 - RNA, 20 nt, Human
uggggugggaggcuguuagu

SEQ ID NO: 73843 - RNA, 20 nt, Human
uggggugggaggcuguuagu

SEQ ID NO: 73844 - RNA, 23 nt, Human
ugugcuuaaauucucuguccuuu

SEQ ID NO: 73845 - RNA, 23 nt, Human
uguucauuaucaaaguccugaaa

SEQ ID NO: 73846 - RNA, 23 nt, Human
uguucauuaucaaaguccugaaa

SEQ ID NO: 73847 - RNA, 18 nt, Human
uuaauggggugggaggcu

SEQ ID NO: 73848 - RNA, 18 nt, Human
uuaauggggugggaggcu

SEQ ID NO: 73849 - RNA, 20 nt, Human
uuaguuaaaaaauaaacacc

SEQ ID NO: 73850 - RNA, 20 nt, Human
uuaguuaaaaaauaaacacc

SEQ ID NO: 73851 - RNA, 22 nt, Human
uucccagccccucugcuacucc

SEQ ID NO: 73852 - RNA, 22 nt, Human
uucccagccccucugcuacucc

SEQ ID NO: 73853 - RNA, 19 nt, Human
uucccuuuuuuguguuuag

SEQ ID NO: 73854 - RNA, 19 nt, Human
uucccuuuuuuguguuuag

SEQ ID NO: 73855 - RNA, 19 nt, Human
uugcggaagcagguuugga

SEQ ID NO: 73856 - RNA, 22 nt, Human
uuggagaguccggcccaacugg

SEQ ID NO: 73857 - RNA, 20 nt, Human
uuguucuggcaucaggcugg

SEQ ID NO: 73858 - RNA, 24 nt, Human
uuucugauuuauaacaaacucauu

SEQ ID NO: 73859 - RNA, 24 nt, Human
uuucugauuuauaacaaacucauu

SEQ ID NO: 73860 - RNA, 22 nt, Human
uuuuuuguguuuagaauaauuu

SEQ ID NO: 73861 - RNA, 22 nt, Human
uuuuuuguguuuagaauaauuu

SEQ ID NO: 73862 - RNA, 18 nt, Human
uuuuuuuuuuuuuuuuug

SEQ ID NO: 73863 - RNA, 22 nt, Human
aaccucaaaccuucccuggcac

SEQ ID NO: 73864 - RNA, 24 nt, Human
aagaugcuggaacaguaccaggug

SEQ ID NO: 73865 - RNA, 21 nt, Human
acagucccgccucugccccuc

SEQ ID NO: 73866 - RNA, 23 nt, Human
accaccucucugguaucccccca

SEQ ID NO: 73867 - RNA, 23 nt, Human
accccagaaacucugagcucucu

SEQ ID NO: 73868 - RNA, 23 nt, Human
accugaaucucucccuucuccag

SEQ ID NO: 73869 - RNA, 19 nt, Human
agacacugaggccugaagc

SEQ ID NO: 73870 - RNA, 27 nt, Human
agacccaggaaaggguuaagaucagga

SEQ ID NO: 73871 - RNA, 19 nt, Human
agcugggggcugcaggggg

SEQ ID NO: 73872 - RNA, 18 nt, Human
aggacacuugccucccuc

SEQ ID NO: 73873 - RNA, 21 nt, Human
aggcugccccaucacaaugcc

SEQ ID NO: 73874 - RNA, 19 nt, Human
aguaggugagagcagggaa

SEQ ID NO: 73875 - RNA, 25 nt, Human
caccuccaccauuacagcauuugau

SEQ ID NO: 73876 - RNA, 20 nt, Human
caggaaaggguuaagaucag

SEQ ID NO: 73877 - RNA, 24 nt, Human
ccaccucucugguauccccccaac

SEQ ID NO: 73878 - RNA, 20 nt, Human
cccacaaguaaggagggggc

SEQ ID NO: 73879 - RNA, 21 nt, Human
cccagugcuguucucugaauu

SEQ ID NO: 73880 - RNA, 20 nt, Human
ccccagaaacucugagcucu

SEQ ID NO: 73881 - RNA, 22 nt, Human
ccccagaaacucugagcucuca

SEQ ID NO: 73882 - RNA, 25 nt, Human
ccccagaaacucugagcucucacaa

SEQ ID NO: 73883 - RNA, 19 nt, Human
ccccagacgacagucccgc

SEQ ID NO: 73884 - RNA, 25 nt, Human
cccccagacgacagucccgccucug

SEQ ID NO: 73885 - RNA, 22 nt, Human
cccccguaaucuguaaaacaua

SEQ ID NO: 73886 - RNA, 18 nt, Human
cccuccucugcccacacc

SEQ ID NO: 73887 - RNA, 21 nt, Human
ccuaaugaggaccccagaaac

SEQ ID NO: 73888 - RNA, 18 nt, Human
ccucugccccucuaccug

SEQ ID NO: 73889 - RNA, 23 nt, Human
ccuguuggccuugggcccauuaa

SEQ ID NO: 73890 - RNA, 20 nt, Human
cucccuccucugcccacacc

SEQ ID NO: 73891 - RNA, 19 nt, Human
cuccucugcccacaccucc

SEQ ID NO: 73892 - RNA, 23 nt, Human
cucugccccucuaccugcuccuc

SEQ ID NO: 73893 - RNA, 19 nt, Human
cugccccucuaccugcucc

SEQ ID NO: 73894 - RNA, 19 nt, Human
cugcuccucucagcucgcg

SEQ ID NO: 73895 - RNA, 23 nt, Human
cuucugaguugucugagacccag

SEQ ID NO: 73896 - RNA, 22 nt, Human
cuucugccauuagcagccacaa

SEQ ID NO: 73897 - RNA, 24 nt, Human
gcccacaccuccaccauuacagca

SEQ ID NO: 73898 - RNA, 18 nt, Human
gcccagaggcuggggacc

SEQ ID NO: 73899 - RNA, 19 nt, Human
gcuguucucugaauucuug

SEQ ID NO: 73900 - RNA, 18 nt, Human
ggaguuccuccagccauc

SEQ ID NO: 73901 - RNA, 21 nt, Human
gggaugggggcuccuaaugag

SEQ ID NO: 73902 - RNA, 21 nt, Human
gugaggcauaugccuguuggc

SEQ ID NO: 73903 - RNA, 23 nt, Human
guguaggaguucgccagccagaa

SEQ ID NO: 73904 - RNA, 20 nt, Human
guuaagaucaggaccccucu

SEQ ID NO: 73905 - RNA, 21 nt, Human
uaagaucaggaccccucucuc

SEQ ID NO: 73906 - RNA, 20 nt, Human
uauucacucaucaaaccuca

SEQ ID NO: 73907 - RNA, 30 nt, Human
uauuccaccaccucucugguauccccccaa

SEQ ID NO: 73908 - RNA, 20 nt, Human
ucccuggcacucccuuaugc

SEQ ID NO: 73909 - RNA, 20 nt, Human
uccuauggaaacaggagcug

SEQ ID NO: 73910 - RNA, 21 nt, Human
uccuauuccaccaccucucug

SEQ ID NO: 73911 - RNA, 18 nt, Human
ugaggaccccagaaacuc

SEQ ID NO: 73912 - RNA, 23 nt, Human
ugccccucuaccugcuccucuca

SEQ ID NO: 73913 - RNA, 22 nt, Human
ugccucccuccucugcccacac

SEQ ID NO: 73914 - RNA, 21 nt, Human
uggaaacaggagcccagaggc

SEQ ID NO: 73915 - RNA, 22 nt, Human
uggaacucuagcacaggcacuu

SEQ ID NO: 73916 - RNA, 18 nt, Human
ugggggcugcaggggguc

SEQ ID NO: 73917 - RNA, 18 nt, Human
ugguauccccccaaccuu

SEQ ID NO: 73918 - RNA, 21 nt, Human
uuaaagaucauuccagcccca

SEQ ID NO: 73919 - RNA, 28 nt, Human
uuccagccccagugcuguucucugaauu

SEQ ID NO: 73920 - RNA, 19 nt, Human
uucuggcuggccuggaacu

SEQ ID NO: 73921 - RNA, 22 nt, Human
uugacuggcagacacugaggcc

SEQ ID NO: 73922 - RNA, 25 nt, Human
uugggcccauuaaagaucauuccag

SEQ ID NO: 73923 - RNA, 22 nt, Human
uuucaaaggacacuugccuccc

SEQ ID NO: 73924 - RNA, 21 nt, Human
acacugaguccacucucaggc

SEQ ID NO: 73925 - RNA, 18 nt, Human
aggaugccgggcggcggc

SEQ ID NO: 73926 - RNA, 26 nt, Human
aggaugccgggcggcggcggcggcgg

SEQ ID NO: 73927 - RNA, 21 nt, Human
augccgggcggcggcggcggc

SEQ ID NO: 73928 - RNA, 19 nt, Human
ccgggcggcggcggcggcg

SEQ ID NO: 73929 - RNA, 24 nt, Human
ccgggcggcggcggcggcgggguc

SEQ ID NO: 73930 - RNA, 18 nt, Human
cucucaggcuguugccca

SEQ ID NO: 73931 - RNA, 26 nt, Human
gcggcggcggcggcggggucgaagcg

SEQ ID NO: 73932 - RNA, 21 nt, Human
ggagacugucuccgugcucag

SEQ ID NO: 73933 - RNA, 18 nt, Human
ggcggcggcggcggcggg

SEQ ID NO: 73934 - RNA, 22 nt, Human
ugcucaggaugccgggcggcgg

SEQ ID NO: 73935 - RNA, 26 nt, Human
aaaaaaaaaaaaaaaaaaaacaagaa

SEQ ID NO: 73936 - RNA, 25 nt, Human
aaaaaaaaaaaaaaaaacaagaaaa

SEQ ID NO: 73937 - RNA, 22 nt, Human
aaaaaaaaaaaacaagaaaagg

SEQ ID NO: 73938 - RNA, 21 nt, Human
aaaaaaaacacaacaacuuua

SEQ ID NO: 73939 - RNA, 23 nt, Human
aaaaacacaacaacuuuacauuc

SEQ ID NO: 73940 - RNA, 19 nt, Human
aaaaaugcucaauaccccu

SEQ ID NO: 73941 - RNA, 24 nt, Human
aaacaagaaaagguagaguuuggg

SEQ ID NO: 73942 - RNA, 18 nt, Human
aaacaccagaauaaaaau

SEQ ID NO: 73943 - RNA, 19 nt, Human
aaacaccuugcagagcuaa

SEQ ID NO: 73944 - RNA, 25 nt, Human
aaacaccuugcagagcuaagaauuc

SEQ ID NO: 73945 - RNA, 22 nt, Human
aaacagaaaagggcacggcaca

SEQ ID NO: 73946 - RNA, 24 nt, Human
aaacagaaaagggcacggcacaug

SEQ ID NO: 73947 - RNA, 21 nt, Human
aaauacacagcacaacagguc

SEQ ID NO: 73948 - RNA, 21 nt, Human
aacacagaaguuaccacucag

SEQ ID NO: 73949 - RNA, 20 nt, Human
aacacaucaagaaacccgca

SEQ ID NO: 73950 - RNA, 22 nt, Human
aaccaaaaaaaaaaaaaaaaaa

SEQ ID NO: 73951 - RNA, 21 nt, Human
aacuaccaaaaagaugacacc

SEQ ID NO: 73952 - RNA, 20 nt, Human
aagaaccaaguuagcaucug

SEQ ID NO: 73953 - RNA, 21 nt, Human
aagaaggggguggggggagga

SEQ ID NO: 73954 - RNA, 22 nt, Human
aagaaggggguggggggaggac

SEQ ID NO: 73955 - RNA, 20 nt, Human
aaugguaaauacacacauuu

SEQ ID NO: 73956 - RNA, 25 nt, Human
acagaaaagggcacggcacaugaca

SEQ ID NO: 73957 - RNA, 21 nt, Human
acagaaagagaggcuuucauu

SEQ ID NO: 73958 - RNA, 22 nt, Human
acagcagagacccuguccaggc

SEQ ID NO: 73959 - RNA, 22 nt, Human
acaggcaagaggcaaaggaaca

SEQ ID NO: 73960 - RNA, 23 nt, Human
acaugccgagccaaguugggggc

SEQ ID NO: 73961 - RNA, 19 nt, Human
accuugcagagcuaagaau

SEQ ID NO: 73962 - RNA, 18 nt, Human
agaaggggguggggggag

SEQ ID NO: 73963 - RNA, 24 nt, Human
agaggaaggaggaagaacugggag

SEQ ID NO: 73964 - RNA, 18 nt, Human
aggaaaucaaaauacaca

SEQ ID NO: 73965 - RNA, 22 nt, Human
aggaagaacugguaacaaaggg

SEQ ID NO: 73966 - RNA, 26 nt, Human
aggcaaaaauacaguucuguuuugaa

SEQ ID NO: 73967 - RNA, 21 nt, Human
aggcaaaagguccagggcuca

SEQ ID NO: 73968 - RNA, 23 nt, Human
aggcaagaggcaaaggaacaaaa

SEQ ID NO: 73969 - RNA, 24 nt, Human
aggcagcacagcaucuccuuuacu

SEQ ID NO: 73970 - RNA, 21 nt, Human
aggcuggcaccuggacaaagg

SEQ ID NO: 73971 - RNA, 19 nt, Human
aggugcagaggcuucuguc

SEQ ID NO: 73972 - RNA, 24 nt, Human
aguacagcagagacccuguccagg

SEQ ID NO: 73973 - RNA, 21 nt, Human
aguggagaguucugcacagua

SEQ ID NO: 73974 - RNA, 19 nt, Human
aguucugacucuuggguga

SEQ ID NO: 73975 - RNA, 27 nt, Human
auacaaagccuucuggaaaaagaacca

SEQ ID NO: 73976 - RNA, 23 nt, Human
aucucacggaccaggcaaacauc

SEQ ID NO: 73977 - RNA, 18 nt, Human
augagccaaggggagcug

SEQ ID NO: 73978 - RNA, 19 nt, Human
caaaauaucccaccugucc

SEQ ID NO: 73979 - RNA, 22 nt, Human
caaaggccaguucacacagagu

SEQ ID NO: 73980 - RNA, 24 nt, Human
caacacaaaaucaagcuagaucca

SEQ ID NO: 73981 - RNA, 19 nt, Human
caauaccccuccccauauu

SEQ ID NO: 73982 - RNA, 19 nt, Human
cacacagagucaccagcaa

SEQ ID NO: 73983 - RNA, 19 nt, Human
cacagaaacagaaaagggc

SEQ ID NO: 73984 - RNA, 22 nt, Human
cacagcacaacaggucucuggg

SEQ ID NO: 73985 - RNA, 19 nt, Human
caccaagaucagacacagc

SEQ ID NO: 73986 - RNA, 21 nt, Human
caccagaacagaggcucccuc

SEQ ID NO: 73987 - RNA, 20 nt, Human
cacuuuggaaaagucaggag

SEQ ID NO: 73988 - RNA, 21 nt, Human
cagagcuaagaauucacaugc

SEQ ID NO: 73989 - RNA, 22 nt, Human
cagcagauuggcagagacacac

SEQ ID NO: 73990 - RNA, 19 nt, Human
cagcucagccuccacacug

SEQ ID NO: 73991 - RNA, 20 nt, Human
cauccaggccuaacugugcc

SEQ ID NO: 73992 - RNA, 22 nt, Human
ccaaaaaaaaaaaaaaaaaaaa

SEQ ID NO: 73993 - RNA, 23 nt, Human
ccaaaaaaaaaaaaaaaaaaaaa

SEQ ID NO: 73994 - RNA, 19 nt, Human
ccacauacuugacaugaau

SEQ ID NO: 73995 - RNA, 21 nt, Human
ccaccucugccucucugaucu

SEQ ID NO: 73996 - RNA, 20 nt, Human
ccagcagauuggcagagaca

SEQ ID NO: 73997 - RNA, 19 nt, Human
ccagcucagccuccacacu

SEQ ID NO: 73998 - RNA, 26 nt, Human
ccaggcaccagcucagccuccacacu

SEQ ID NO: 73999 - RNA, 25 nt, Human
ccagggcucaaguuuuaaauccuuc

SEQ ID NO: 74000 - RNA, 18 nt, Human
cccacaacucccucucaa

SEQ ID NO: 74001 - RNA, 20 nt, Human
ccccauauuuaaaacaccag

SEQ ID NO: 74002 - RNA, 19 nt, Human
cccccagcccugaaauccc

SEQ ID NO: 74003 - RNA, 20 nt, Human
cccgcccgcggcgccgcagg

SEQ ID NO: 74004 - RNA, 18 nt, Human
cccgcggcgccgcaggcg

SEQ ID NO: 74005 - RNA, 18 nt, Human
ccucucugaucuuuccca

SEQ ID NO: 74006 - RNA, 20 nt, Human
ccugaacccccagcccugaa

SEQ ID NO: 74007 - RNA, 21 nt, Human
ccuguccuggucaucuggaaa

SEQ ID NO: 74008 - RNA, 21 nt, Human
ccugugaaaaccugaggugga

SEQ ID NO: 74009 - RNA, 21 nt, Human
cgucagcaaauggggggagca

SEQ ID NO: 74010 - RNA, 23 nt, Human
cucacggaccaggcaaacaucca

SEQ ID NO: 74011 - RNA, 20 nt, Human
cucccuccgcccugcccacc

SEQ ID NO: 74012 - RNA, 21 nt, Human
cugaugcuagaguugcccugg

SEQ ID NO: 74013 - RNA, 19 nt, Human
cuggucaucuggaaagcca

SEQ ID NO: 74014 - RNA, 18 nt, Human
cuucccgccgccgcuuuu

SEQ ID NO: 74015 - RNA, 22 nt, Human
gaaaagacauaugacacauuga

SEQ ID NO: 74016 - RNA, 21 nt, Human
gaaccugagcccaggcuggca

SEQ ID NO: 74017 - RNA, 23 nt, Human
gaaguucuugggagggaguuggg

SEQ ID NO: 74018 - RNA, 21 nt, Human
gaccagcccagcagauuggca

SEQ ID NO: 74019 - RNA, 23 nt, Human
gaucauaauuagaacucgaucug

SEQ ID NO: 74020 - RNA, 24 nt, Human
gcaaagcaguaaaggcacagauaa

SEQ ID NO: 74021 - RNA, 21 nt, Human
gcaaaggcauaaacaccuugc

SEQ ID NO: 74022 - RNA, 19 nt, Human
gcaguaaaggcacagauaa

SEQ ID NO: 74023 - RNA, 24 nt, Human
gccaagaaaaauaaauugucauga

SEQ ID NO: 74024 - RNA, 18 nt, Human
gcgguacauaacucccag

SEQ ID NO: 74025 - RNA, 22 nt, Human
ggcaaaagguccagggcucaag

SEQ ID NO: 74026 - RNA, 22 nt, Human
ggcaagaggcaaaggaacaaaa

SEQ ID NO: 74027 - RNA, 22 nt, Human
ggccugaggggucagucuaagg

SEQ ID NO: 74028 - RNA, 25 nt, Human
ggcugguaccaggagggcagugguu

SEQ ID NO: 74029 - RNA, 18 nt, Human
gggagguggcccccacca

SEQ ID NO: 74030 - RNA, 22 nt, Human
gggccagagggugauuuugcuc

SEQ ID NO: 74031 - RNA, 23 nt, Human
gggggcaaaauaucccaccuguc

SEQ ID NO: 74032 - RNA, 20 nt, Human
gguaccaggagggcaguggu

SEQ ID NO: 74033 - RNA, 22 nt, Human
ggugugggcuacaggaggggag

SEQ ID NO: 74034 - RNA, 23 nt, Human
gucagucuaaggaggcugaggcu

SEQ ID NO: 74035 - RNA, 20 nt, Human
gugccaccucugccucucug

SEQ ID NO: 74036 - RNA, 23 nt, Human
uaaaaaaugcucaauaccccucc

SEQ ID NO: 74037 - RNA, 24 nt, Human
uaaaaaaugcucaauaccccuccc

SEQ ID NO: 74038 - RNA, 24 nt, Human
uaaaaaaugcucaauaccccuccc

SEQ ID NO: 74039 - RNA, 19 nt, Human
uaaaggcacagauaagacu

SEQ ID NO: 74040 - RNA, 20 nt, Human
uaaauccuuuugcuaagaaa

SEQ ID NO: 74041 - RNA, 23 nt, Human
uaacacagaaguuaccacucagg

SEQ ID NO: 74042 - RNA, 18 nt, Human
uacaacuaccaaaaagau

SEQ ID NO: 74043 - RNA, 18 nt, Human
uacacagcacaacagguc

SEQ ID NO: 74044 - RNA, 22 nt, Human
uacacaggaaaucaaaauacac

SEQ ID NO: 74045 - RNA, 25 nt, Human
uacacaggaaaucaaaauacacagc

SEQ ID NO: 74046 - RNA, 23 nt, Human
uaccaaaaagaugacaccaaucc

SEQ ID NO: 74047 - RNA, 23 nt, Human
uaccaggagggcagugguuuggg

SEQ ID NO: 74048 - RNA, 21 nt, Human
uauauuuauuuuucucccuaa

SEQ ID NO: 74049 - RNA, 22 nt, Human
uauuucccacaacucccucuca

SEQ ID NO: 74050 - RNA, 20 nt, Human
ucaagaaacccgcaaaggca

SEQ ID NO: 74051 - RNA, 21 nt, Human
ucaccgggaauguguuccacg

SEQ ID NO: 74052 - RNA, 20 nt, Human
ucccaacagagguggguuug

SEQ ID NO: 74053 - RNA, 22 nt, Human
ucccaggaaaaggaaaugcucc

SEQ ID NO: 74054 - RNA, 21 nt, Human
uccccauauuuaaaacaccag

SEQ ID NO: 74055 - RNA, 21 nt, Human
ucccucucaaugcagucauuu

SEQ ID NO: 74056 - RNA, 18 nt, Human
ucccugaacccccagccc

SEQ ID NO: 74057 - RNA, 18 nt, Human
ucucccagguauccuccc

SEQ ID NO: 74058 - RNA, 18 nt, Human
ucugcacaguaggugcag

SEQ ID NO: 74059 - RNA, 19 nt, Human
ucugccucucugaucuuuc

SEQ ID NO: 74060 - RNA, 21 nt, Human
ucugcggacagaaagagaggc

SEQ ID NO: 74061 - RNA, 18 nt, Human
ucuugagaaaaccuggcc

SEQ ID NO: 74062 - RNA, 19 nt, Human
ucuugggagggaguugggg

SEQ ID NO: 74063 - RNA, 21 nt, Human
ugaaagaagggggugggggga

SEQ ID NO: 74064 - RNA, 23 nt, Human
ugaaagaaggggguggggggagg

SEQ ID NO: 74065 - RNA, 27 nt, Human
ugaacccccagcccugaaauccccagg

SEQ ID NO: 74066 - RNA, 25 nt, Human
ugacaugaaugagaagguaaccaaa

SEQ ID NO: 74067 - RNA, 18 nt, Human
ugaccgggaggccuuacc

SEQ ID NO: 74068 - RNA, 24 nt, Human
ugagaaaaccuggccugccagcua

SEQ ID NO: 74069 - RNA, 19 nt, Human
ugagagggaccagcccagc

SEQ ID NO: 74070 - RNA, 23 nt, Human
ugagccaaggggagcugucacuc

SEQ ID NO: 74071 - RNA, 23 nt, Human
ugcaauagaaaauaauuuuuaac

SEQ ID NO: 74072 - RNA, 19 nt, Human
ugcacaguaggugcagagg

SEQ ID NO: 74073 - RNA, 19 nt, Human
ugcccuggaauccacacac

SEQ ID NO: 74074 - RNA, 19 nt, Human
ugccgagccaaguuggggg

SEQ ID NO: 74075 - RNA, 20 nt, Human
ugccuugggcccaggugagc

SEQ ID NO: 74076 - RNA, 21 nt, Human
ugcucaauaccccuccccaua

SEQ ID NO: 74077 - RNA, 21 nt, Human
uggcagagacacacagcagag

SEQ ID NO: 74078 - RNA, 21 nt, Human
uggcagagacacacagcagag

SEQ ID NO: 74079 - RNA, 23 nt, Human
uggcuaugcagagcccccgcccc

SEQ ID NO: 74080 - RNA, 21 nt, Human
uggcucaauagcucccaacag

SEQ ID NO: 74081 - RNA, 18 nt, Human
ugggagggaguuggggug

SEQ ID NO: 74082 - RNA, 18 nt, Human
ugggcccaggugagccca

SEQ ID NO: 74083 - RNA, 21 nt, Human
uggggaggguuggggaagugg

SEQ ID NO: 74084 - RNA, 18 nt, Human
ugguaaaaaugagaggga

SEQ ID NO: 74085 - RNA, 19 nt, Human
ugguaaacaaccugacugc

SEQ ID NO: 74086 - RNA, 18 nt, Human
ugguaacaaagggugggc

SEQ ID NO: 74087 - RNA, 21 nt, Human
ugucuugugucaucucauccc

SEQ ID NO: 74088 - RNA, 23 nt, Human
ugugggcuacaggaggggaggcg

SEQ ID NO: 74089 - RNA, 22 nt, Human
uucuaaccuauuucacgacaau

SEQ ID NO: 74090 - RNA, 19 nt, Human
uugcaugagucacagcugc

SEQ ID NO: 74091 - RNA, 22 nt, Human
uugcccuggaauccacacacau

SEQ ID NO: 74092 - RNA, 25 nt, Human
uuucuaguuuuaauaauauccuugg

SEQ ID NO: 74093 - RNA, 18 nt, Human
uuugcucugaugcuagag

SEQ ID NO: 74094 - RNA, 18 nt, Human
uuugugacagacagaccu

SEQ ID NO: 74095 - RNA, 23 nt, Human
uuugugacagacagaccugugug

SEQ ID NO: 74096 - RNA, 19 nt, Human
uuuugcucugaugcuagag

SEQ ID NO: 74097 - RNA, 23 nt, Human
aagaccugguaccgcacugaccc

SEQ ID NO: 74098 - RNA, 22 nt, Human
aagaucccaggcagcgacacag

SEQ ID NO: 74099 - RNA, 22 nt, Human
aagaucccaggcagcgacacag

SEQ ID NO: 74100 - RNA, 28 nt, Human
aaguagccagcauagggaagccggaagc

SEQ ID NO: 74101 - RNA, 21 nt, Human
aaucuucggcaccgagagccu

SEQ ID NO: 74102 - RNA, 21 nt, Human
aaucuucggcaccgagagccu

SEQ ID NO: 74103 - RNA, 23 nt, Human
acacagcauccccucuggucccc

SEQ ID NO: 74104 - RNA, 24 nt, Human
accccaagaucccaggcagcgaca

SEQ ID NO: 74105 - RNA, 24 nt, Human
accccaagaucccaggcagcgaca

SEQ ID NO: 74106 - RNA, 21 nt, Human
acucaagggggggaaacugag

SEQ ID NO: 74107 - RNA, 21 nt, Human
acucaagggggggaaacugag

SEQ ID NO: 74108 - RNA, 29 nt, Human
acuccaaagagggccacacuugaagaggg

SEQ ID NO: 74109 - RNA, 20 nt, Human
agccauugauucucagaaac

SEQ ID NO: 74110 - RNA, 21 nt, Human
agccauugauucucagaaacu

SEQ ID NO: 74111 - RNA, 18 nt, Human
agcgcagccgcugccgcc

SEQ ID NO: 74112 - RNA, 18 nt, Human
agcgcagccgcugccgcc

SEQ ID NO: 74113 - RNA, 20 nt, Human
aggcaggaggccccccaaag

SEQ ID NO: 74114 - RNA, 24 nt, Human
aggccaaccccaagaucccaggca

SEQ ID NO: 74115 - RNA, 24 nt, Human
aggccaaccccaagaucccaggca

SEQ ID NO: 74116 - RNA, 20 nt, Human
aguccucuggcaggcaaucu

SEQ ID NO: 74117 - RNA, 20 nt, Human
aguccucuggcaggcaaucu

SEQ ID NO: 74118 - RNA, 21 nt, Human
auccucgccaccccagcccca

SEQ ID NO: 74119 - RNA, 20 nt, Human
aucuucaucccagucaggga

SEQ ID NO: 74120 - RNA, 18 nt, Human
aucuucggcaccgagagc

SEQ ID NO: 74121 - RNA, 18 nt, Human
aucuucggcaccgagagc

SEQ ID NO: 74122 - RNA, 18 nt, Human
auggucagcuucguguuu

SEQ ID NO: 74123 - RNA, 22 nt, Human
caaaguagccagcauagggaag

SEQ ID NO: 74124 - RNA, 27 nt, Human
caccccagccccaguacucauugggga

SEQ ID NO: 74125 - RNA, 21 nt, Human
cagagcagcugccagccaggc

SEQ ID NO: 74126 - RNA, 21 nt, Human
cagagcagcugccagccaggc

SEQ ID NO: 74127 - RNA, 21 nt, Human
cagcugccagccaggcugugg

SEQ ID NO: 74128 - RNA, 21 nt, Human
cagcugccagccaggcugugg

SEQ ID NO: 74129 - RNA, 21 nt, Human
caggcaggaggccccccaaag

SEQ ID NO: 74130 - RNA, 22 nt, Human
caggccugacacaccuccaaag

SEQ ID NO: 74131 - RNA, 20 nt, Human
caggcggccacuggcccgcc

SEQ ID NO: 74132 - RNA, 20 nt, Human
caggcggccacuggcccgcc

SEQ ID NO: 74133 - RNA, 20 nt, Human
caguccucuggcaggcaauc

SEQ ID NO: 74134 - RNA, 24 nt, Human
ccaagccccaccugccucccaugc

SEQ ID NO: 74135 - RNA, 24 nt, Human
ccaagccccaccugccucccaugc

SEQ ID NO: 74136 - RNA, 20 nt, Human
ccaccugccucccaugcaaa

SEQ ID NO: 74137 - RNA, 21 nt, Human
cccaccugccucccaugcaaa

SEQ ID NO: 74138 - RNA, 23 nt, Human
cccaggcaggaggccccccaaag

SEQ ID NO: 74139 - RNA, 23 nt, Human
cccaggcaggaggccccccaaag

SEQ ID NO: 74140 - RNA, 20 nt, Human
ccccagccccaguacucauu

SEQ ID NO: 74141 - RNA, 24 nt, Human
ccccugggagcaaggggguuccca

SEQ ID NO: 74142 - RNA, 24 nt, Human
ccccugggagcaaggggguuccca

SEQ ID NO: 74143 - RNA, 19 nt, Human
cccuggggcuccugccucc

SEQ ID NO: 74144 - RNA, 19 nt, Human
cccuggggcuccugccucc

SEQ ID NO: 74145 - RNA, 18 nt, Human
ccgccucaagauggggug

SEQ ID NO: 74146 - RNA, 24 nt, Human
ccggcggcugcggacgguucccuc

SEQ ID NO: 74147 - RNA, 22 nt, Human
ccuagcccaggccacucugcga

SEQ ID NO: 74148 - RNA, 22 nt, Human
ccuagcccaggccacucugcga

SEQ ID NO: 74149 - RNA, 21 nt, Human
ccuaggggacucaaggggggg

SEQ ID NO: 74150 - RNA, 21 nt, Human
ccuaggggacucaaggggggg

SEQ ID NO: 74151 - RNA, 22 nt, Human
ccucccacccuuccaggcccua

SEQ ID NO: 74152 - RNA, 22 nt, Human
ccucccacccuuccaggcccua

SEQ ID NO: 74153 - RNA, 25 nt, Human
ccucccaugcaaaggccaaccccaa

SEQ ID NO: 74154 - RNA, 25 nt, Human
ccucccaugcaaaggccaaccccaa

SEQ ID NO: 74155 - RNA, 26 nt, Human
ccucucucagacagggaggcgggaac

SEQ ID NO: 74156 - RNA, 26 nt, Human
ccucucucagacagggaggcgggaac

SEQ ID NO: 74157 - RNA, 25 nt, Human
ccuggagguccuccacagagcagcu

SEQ ID NO: 74158 - RNA, 25 nt, Human
ccuggagguccuccacagagcagcu

SEQ ID NO: 74159 - RNA, 23 nt, Human
cgagggggccacgacggaggccg

SEQ ID NO: 74160 - RNA, 24 nt, Human
cgcaccaaagcuugcccccuacaa

SEQ ID NO: 74161 - RNA, 21 nt, Human
cgggaaggaggguugacuccc

SEQ ID NO: 74162 - RNA, 21 nt, Human
cgguugaagguguccucacca

SEQ ID NO: 74163 - RNA, 25 nt, Human
cucaggccugacacaccuccaaagu

SEQ ID NO: 74164 - RNA, 20 nt, Human
cuccaagaccugguaccgca

SEQ ID NO: 74165 - RNA, 22 nt, Human
cucccggcuccggcggcugcgg

SEQ ID NO: 74166 - RNA, 18 nt, Human
cugggcuagggggagggg

SEQ ID NO: 74167 - RNA, 18 nt, Human
cugggcuagggggagggg

SEQ ID NO: 74168 - RNA, 23 nt, Human
gacacagcauccccucugguccc

SEQ ID NO: 74169 - RNA, 23 nt, Human
gacacagcauccccucugguccc

SEQ ID NO: 74170 - RNA, 24 nt, Human
gacacagcauccccucuggucccc

SEQ ID NO: 74171 - RNA, 23 nt, Human
gacuggggcugggcuagggggag

SEQ ID NO: 74172 - RNA, 24 nt, Human
gcaaaggccaaccccaagauccca

SEQ ID NO: 74173 - RNA, 24 nt, Human
gcaaaggccaaccccaagauccca

SEQ ID NO: 74174 - RNA, 23 nt, Human
gcaccaaagcuugcccccuacaa

SEQ ID NO: 74175 - RNA, 19 nt, Human
gcagcuuggcccgguugaa

SEQ ID NO: 74176 - RNA, 25 nt, Human
gcuagggggagggggucgggaagga

SEQ ID NO: 74177 - RNA, 25 nt, Human
gcuagggggagggggucgggaagga

SEQ ID NO: 74178 - RNA, 18 nt, Human
gcuagggggccuagugaa

SEQ ID NO: 74179 - RNA, 18 nt, Human
gcuccugccuccucucuc

SEQ ID NO: 74180 - RNA, 18 nt, Human
gcuccugccuccucucuc

SEQ ID NO: 74181 - RNA, 20 nt, Human
ggaaaacagagcccagucuc

SEQ ID NO: 74182 - RNA, 20 nt, Human
ggaaaacagagcccagucuc

SEQ ID NO: 74183 - RNA, 20 nt, Human
ggcuagggggagggggucgg

SEQ ID NO: 74184 - RNA, 20 nt, Human
ggcuagggggagggggucgg

SEQ ID NO: 74185 - RNA, 19 nt, Human
gggaaggaggguugacucc

SEQ ID NO: 74186 - RNA, 19 nt, Human
gggaaggaggguugacucc

SEQ ID NO: 74187 - RNA, 19 nt, Human
ggggaaacugaggcacaga

SEQ ID NO: 74188 - RNA, 18 nt, Human
gggggagggggucgggaa

SEQ ID NO: 74189 - RNA, 18 nt, Human
gggggagggggucgggaa

SEQ ID NO: 74190 - RNA, 22 nt, Human
gucaguccucuggcaggcaauc

SEQ ID NO: 74191 - RNA, 24 nt, Human
guguagcuagggggccuagugaag

SEQ ID NO: 74192 - RNA, 18 nt, Human
guugccgagacaccucca

SEQ ID NO: 74193 - RNA, 22 nt, Human
uacugauccaagccccaccugc

SEQ ID NO: 74194 - RNA, 22 nt, Human
uacugauccaagccccaccugc

SEQ ID NO: 74195 - RNA, 20 nt, Human
uagcccaggccacucugcga

SEQ ID NO: 74196 - RNA, 20 nt, Human
uagcccaggccacucugcga

SEQ ID NO: 74197 - RNA, 23 nt, Human
uccauuagugucagccccgaggg

SEQ ID NO: 74198 - RNA, 20 nt, Human
uccccuccccugggagcaag

SEQ ID NO: 74199 - RNA, 20 nt, Human
uccccuccccugggagcaag

SEQ ID NO: 74200 - RNA, 26 nt, Human
uccccugggagcaaggggguucccaa

SEQ ID NO: 74201 - RNA, 26 nt, Human
uccccugggagcaaggggguucccaa

SEQ ID NO: 74202 - RNA, 21 nt, Human
uccucgccaccccagccccag

SEQ ID NO: 74203 - RNA, 22 nt, Human
ucgcugaagaugaagcagucau

SEQ ID NO: 74204 - RNA, 18 nt, Human
ugaaaaagguuuccccuc

SEQ ID NO: 74205 - RNA, 18 nt, Human
ugaaaaagguuuccccuc

SEQ ID NO: 74206 - RNA, 21 nt, Human
ugaagacccuuggaaaacaga

SEQ ID NO: 74207 - RNA, 21 nt, Human
ugaagacccuuggaaaacaga

SEQ ID NO: 74208 - RNA, 25 nt, Human
ugacacaccuccaaaguagccagca

SEQ ID NO: 74209 - RNA, 23 nt, Human
ugacuggggcugggcuaggggga

SEQ ID NO: 74210 - RNA, 24 nt, Human
ugacuggggcugggcuagggggag

SEQ ID NO: 74211 - RNA, 18 nt, Human
ugauccaagccccaccug

SEQ ID NO: 74212 - RNA, 18 nt, Human
ugauccaagccccaccug

SEQ ID NO: 74213 - RNA, 22 nt, Human
ugcaggggcuggcccgacccug

SEQ ID NO: 74214 - RNA, 22 nt, Human
ugcaggggcuggcccgacccug

SEQ ID NO: 74215 - RNA, 21 nt, Human
ugcccccuagacauaccuccc

SEQ ID NO: 74216 - RNA, 21 nt, Human
ugcccccuagacauaccuccc

SEQ ID NO: 74217 - RNA, 21 nt, Human
uggagccaguagcgcaggugg

SEQ ID NO: 74218 - RNA, 23 nt, Human
uggagccaguagcgcagguggug

SEQ ID NO: 74219 - RNA, 18 nt, Human
uggcccgacccugacagg

SEQ ID NO: 74220 - RNA, 18 nt, Human
uggcccgacccugacagg

SEQ ID NO: 74221 - RNA, 21 nt, Human
ugggagcaaggggguucccaa

SEQ ID NO: 74222 - RNA, 21 nt, Human
ugggagcaaggggguucccaa

SEQ ID NO: 74223 - RNA, 18 nt, Human
ugggcuagggggaggggg

SEQ ID NO: 74224 - RNA, 18 nt, Human
ugggcuagggggaggggg

SEQ ID NO: 74225 - RNA, 19 nt, Human
ugggcuagggggagggggu

SEQ ID NO: 74226 - RNA, 19 nt, Human
ugggcuagggggagggggu

SEQ ID NO: 74227 - RNA, 19 nt, Human
uggggcugcuccucagcag

SEQ ID NO: 74228 - RNA, 19 nt, Human
uggggcugcuccucagcag

SEQ ID NO: 74229 - RNA, 18 nt, Human
uggggcugggcuaggggg

SEQ ID NO: 74230 - RNA, 18 nt, Human
uggggcugggcuaggggg

SEQ ID NO: 74231 - RNA, 22 nt, Human
uuuuuuuuuuuuuuuuuccauu

SEQ ID NO: 74232 - RNA, 24 nt, Human
aaaucccagcccccugagccagga

SEQ ID NO: 74233 - RNA, 19 nt, Human
aacaacuucccgggaacca

SEQ ID NO: 74234 - RNA, 21 nt, Human
agagaaaggcuccauccagca

SEQ ID NO: 74235 - RNA, 24 nt, Human
agagggaccccucaggucuacagg

SEQ ID NO: 74236 - RNA, 18 nt, Human
agagggaggggcuugggg

SEQ ID NO: 74237 - RNA, 27 nt, Human
agagggcagagaaaggcuccccccgag

SEQ ID NO: 74238 - RNA, 18 nt, Human
aggcagaaaaugcccagg

SEQ ID NO: 74239 - RNA, 24 nt, Human
aggcauuaucuaaaauuggaaaug

SEQ ID NO: 74240 - RNA, 18 nt, Human
auagaauaaauauucaca

SEQ ID NO: 74241 - RNA, 21 nt, Human
aucaaaaucccagcccccuga

SEQ ID NO: 74242 - RNA, 18 nt, Human
cagcagcgaaucugggac

SEQ ID NO: 74243 - RNA, 20 nt, Human
cagcccccugagccaggacc

SEQ ID NO: 74244 - RNA, 23 nt, Human
cagcccccugagccaggaccaga

SEQ ID NO: 74245 - RNA, 23 nt, Human
cagcccugcuccuacucuagggg

SEQ ID NO: 74246 - RNA, 23 nt, Human
ccaccccaacagccgggcaggca

SEQ ID NO: 74247 - RNA, 23 nt, Human
ccauccagcacuccagcagcgaa

SEQ ID NO: 74248 - RNA, 24 nt, Human
cccaacagccgggcaggcaucgcu

SEQ ID NO: 74249 - RNA, 22 nt, Human
cccucaggucuacaggagccca

SEQ ID NO: 74250 - RNA, 23 nt, Human
cccucaggucuacaggagcccag

SEQ ID NO: 74251 - RNA, 19 nt, Human
ccgccaucuuggaagcggg

SEQ ID NO: 74252 - RNA, 26 nt, Human
cugccugucgucaccgccaccccaac

SEQ ID NO: 74253 - RNA, 21 nt, Human
cugggaccagcuggucuuuug

SEQ ID NO: 74254 - RNA, 26 nt, Human
gaaaauauaucaaaaucccagccccc

SEQ ID NO: 74255 - RNA, 22 nt, Human
gaaaggcuccauccagcacucc

SEQ ID NO: 74256 - RNA, 19 nt, Human
gaagagggaggggcuuggg

SEQ ID NO: 74257 - RNA, 23 nt, Human
gagccaggaccagaagagggagc

SEQ ID NO: 74258 - RNA, 22 nt, Human
gaucacucuucucuccauggaa

SEQ ID NO: 74259 - RNA, 20 nt, Human
gcuccuacucuaggggcagg

SEQ ID NO: 74260 - RNA, 21 nt, Human
gcuugggguccagcccugcuc

SEQ ID NO: 74261 - RNA, 19 nt, Human
ggaagcgggcgcugcgggg

SEQ ID NO: 74262 - RNA, 21 nt, Human
ggaagcgggcgcugcgggggc

SEQ ID NO: 74263 - RNA, 23 nt, Human
ggaccagcuggucuuuugcugcc

SEQ ID NO: 74264 - RNA, 21 nt, Human
uaaaauuggaaaugucacaga

SEQ ID NO: 74265 - RNA, 18 nt, Human
uaaauauucacagagguc

SEQ ID NO: 74266 - RNA, 19 nt, Human
uacucuaggggcagggacu

SEQ ID NO: 74267 - RNA, 18 nt, Human
uauaucaaaaucccagcc

SEQ ID NO: 74268 - RNA, 22 nt, Human
ucaccgccaccccaacagccgg

SEQ ID NO: 74269 - RNA, 23 nt, Human
ucaccgccaccccaacagccggg

SEQ ID NO: 74270 - RNA, 25 nt, Human
ucgcugccgccaucuuggaagcggg

SEQ ID NO: 74271 - RNA, 21 nt, Human
ucuuuugcugccugucgucac

SEQ ID NO: 74272 - RNA, 22 nt, Human
ugagccaggaccagaagaggga

SEQ ID NO: 74273 - RNA, 24 nt, Human
ugcuccuacucuaggggcagggac

SEQ ID NO: 74274 - RNA, 18 nt, Human
uggaagagggaggggcuu

SEQ ID NO: 74275 - RNA, 23 nt, Human
uuggaagcgggcgcugcgggggc

SEQ ID NO: 74276 - RNA, 25 nt, Human
aaacugcuaauucauauccuacuug

SEQ ID NO: 74277 - RNA, 18 nt, Human
aaacuuguaaacugcuaa

SEQ ID NO: 74278 - RNA, 22 nt, Human
aaaguccuucaaguauccauau

SEQ ID NO: 74279 - RNA, 18 nt, Human
aacaacucugguucucuc

SEQ ID NO: 74280 - RNA, 20 nt, Human
aaccggaguccucaaauagc

SEQ ID NO: 74281 - RNA, 21 nt, Human
aauacaaaaaggaaaaauuca

SEQ ID NO: 74282 - RNA, 24 nt, Human
acaaagaaucagucuuccaaacau

SEQ ID NO: 74283 - RNA, 22 nt, Human
acgugaauaauaucuaucucuc

SEQ ID NO: 74284 - RNA, 24 nt, Human
agagaauguauucucuggugggca

SEQ ID NO: 74285 - RNA, 20 nt, Human
agugauacuucuccuuggcu

SEQ ID NO: 74286 - RNA, 23 nt, Human
agugauacuucuccuuggcuugg

SEQ ID NO: 74287 - RNA, 23 nt, Human
auauaaaguccuucaaguaucca

SEQ ID NO: 74288 - RNA, 23 nt, Human
augacaacugaagauacaaugcc

SEQ ID NO: 74289 - RNA, 18 nt, Human
auuuuauccuuuggaguc

SEQ ID NO: 74290 - RNA, 27 nt, Human
caaacaaagaaucagucuuccaaaagg

SEQ ID NO: 74291 - RNA, 18 nt, Human
caaagugccacugcguga

SEQ ID NO: 74292 - RNA, 19 nt, Human
caccugcaaccagcucagc

SEQ ID NO: 74293 - RNA, 25 nt, Human
cacuccacccuccugcuaccucuuc

SEQ ID NO: 74294 - RNA, 18 nt, Human
caucaccaggagcucugc

SEQ ID NO: 74295 - RNA, 18 nt, Human
ccuccugcuaccucuuca

SEQ ID NO: 74296 - RNA, 23 nt, Human
ccugacaccaccacuucacagau

SEQ ID NO: 74297 - RNA, 25 nt, Human
cucugcuaagaaaauacaaaaagga

SEQ ID NO: 74298 - RNA, 20 nt, Human
cugcuaagaaaauacaaaaa

SEQ ID NO: 74299 - RNA, 18 nt, Human
cugggcagguccuccccu

SEQ ID NO: 74300 - RNA, 21 nt, Human
cuucaaguauccauauuacaa

SEQ ID NO: 74301 - RNA, 25 nt, Human
cuucaaguugagcuuuuccaaucug

SEQ ID NO: 74302 - RNA, 19 nt, Human
cuuuucuccccucuuuugu

SEQ ID NO: 74303 - RNA, 24 nt, Human
cuuuuggucacacccacugccuug

SEQ ID NO: 74304 - RNA, 18 nt, Human
gaaggcauaccugggcag

SEQ ID NO: 74305 - RNA, 24 nt, Human
ggcuuggggaggaaguguugcgug

SEQ ID NO: 74306 - RNA, 27 nt, Human
uaaauaaaucuccuucaaccggagucc

SEQ ID NO: 74307 - RNA, 18 nt, Human
uaagaaaauacaaaaagg

SEQ ID NO: 74308 - RNA, 25 nt, Human
uaauaucuaucucucugcuucacug

SEQ ID NO: 74309 - RNA, 27 nt, Human
uaccugggcagguccuccccugaaggc

SEQ ID NO: 74310 - RNA, 21 nt, Human
uaggccaaaauuauugcaaac

SEQ ID NO: 74311 - RNA, 20 nt, Human
uauguaaacuuguaaacugc

SEQ ID NO: 74312 - RNA, 23 nt, Human
ucaaguugagcuuuuccaaucug

SEQ ID NO: 74313 - RNA, 24 nt, Human
ucacacccacugccuuccgcuccu

SEQ ID NO: 74314 - RNA, 23 nt, Human
uccuuggcuuggggaggaagugu

SEQ ID NO: 74315 - RNA, 19 nt, Human
ucuuguuacaacuguuuua

SEQ ID NO: 74316 - RNA, 21 nt, Human
ucuuuuguggacgccuucuca

SEQ ID NO: 74317 - RNA, 22 nt, Human
ugauucgucgccuuuucucccc

SEQ ID NO: 74318 - RNA, 22 nt, Human
ugcagccgacacuccacccucc

SEQ ID NO: 74319 - RNA, 18 nt, Human
ugccugguuuuucucagu

SEQ ID NO: 74320 - RNA, 18 nt, Human
ugcuaauucauauccuac

SEQ ID NO: 74321 - RNA, 24 nt, Human
uggggaggaaguguugcguggccu

SEQ ID NO: 74322 - RNA, 27 nt, Human
uguacaaaaucauuuuacaaaaacucu

SEQ ID NO: 74323 - RNA, 26 nt, Human
uguccugauucgucgccuuuucuccc

SEQ ID NO: 74324 - RNA, 19 nt, Human
uucacauuuuacuacagag

SEQ ID NO: 74325 - RNA, 20 nt, Human
uuuguggacgccuucucacc

SEQ ID NO: 74326 - RNA, 21 nt, Human
uuuuuuuuuuuuuuugcuuuu

SEQ ID NO: 74327 - RNA, 22 nt, Human
uuuuuuuuuuuuuuugcuuuuu

SEQ ID NO: 74328 - RNA, 24 nt, Human
aaaaaacaaaacaaaaaauaauau

SEQ ID NO: 74329 - RNA, 20 nt, Human
aaaaagcccuaacccacaca

SEQ ID NO: 74330 - RNA, 21 nt, Human
aaaaaggcauuuuacauggcu

SEQ ID NO: 74331 - RNA, 18 nt, Human
aaaaaguaagagggggag

SEQ ID NO: 74332 - RNA, 22 nt, Human
aaaaauguaccccuggcaccuc

SEQ ID NO: 74333 - RNA, 19 nt, Human
aaaagccaaggcagggaca

SEQ ID NO: 74334 - RNA, 21 nt, Human
aaacaaacaaaacaaggccug

SEQ ID NO: 74335 - RNA, 19 nt, Human
aaacacccuccccuccacc

SEQ ID NO: 74336 - RNA, 22 nt, Human
aaacacccuccccuccacccuc

SEQ ID NO: 74337 - RNA, 24 nt, Human
aaagaaucuuuccagaaaccaaaa

SEQ ID NO: 74338 - RNA, 23 nt, Human
aaagacagaacacgaagccugga

SEQ ID NO: 74339 - RNA, 21 nt, Human
aacaaacaaacaaacaaaaca

SEQ ID NO: 74340 - RNA, 18 nt, Human
aaccaaagagaacaccag

SEQ ID NO: 74341 - RNA, 21 nt, Human
aagaucgccugacaacacugc

SEQ ID NO: 74342 - RNA, 22 nt, Human
aagaucgccugacaacacugcc

SEQ ID NO: 74343 - RNA, 19 nt, Human
aagcaacucacagccuuca

SEQ ID NO: 74344 - RNA, 18 nt, Human
aagcagccugcucuaaca

SEQ ID NO: 74345 - RNA, 18 nt, Human
aagggcgggggaggaaaa

SEQ ID NO: 74346 - RNA, 27 nt, Human
aaggggccacccaucagucgaccuggu

SEQ ID NO: 74347 - RNA, 23 nt, Human
aauccggucuuaccuggauccca

SEQ ID NO: 74348 - RNA, 28 nt, Human
aauggcucacacccgcccauaaucccag

SEQ ID NO: 74349 - RNA, 24 nt, Human
acaaacaaacaaacaaaacaaggc

SEQ ID NO: 74350 - RNA, 18 nt, Human
acacaaacaaacaaacaa

SEQ ID NO: 74351 - RNA, 23 nt, Human
acacacacacaccccuacacaca

SEQ ID NO: 74352 - RNA, 21 nt, Human
acacagacaugaccgcaaagg

SEQ ID NO: 74353 - RNA, 18 nt, Human
acacccuccccuccaccc

SEQ ID NO: 74354 - RNA, 22 nt, Human
acagaaccaucacaugcaacga

SEQ ID NO: 74355 - RNA, 22 nt, Human
acagcaugaacaaacggggaca

SEQ ID NO: 74356 - RNA, 26 nt, Human
accacacuccagcuuaggacaucggg

SEQ ID NO: 74357 - RNA, 24 nt, Human
accacucuauucuucaaaagaaca

SEQ ID NO: 74358 - RNA, 20 nt, Human
accagcucccuggcuccugg

SEQ ID NO: 74359 - RNA, 22 nt, Human
acccccccaccccccaaaacag

SEQ ID NO: 74360 - RNA, 23 nt, Human
accuguagucccagcuacucggg

SEQ ID NO: 74361 - RNA, 20 nt, Human
acgaaguacucuucagaaag

SEQ ID NO: 74362 - RNA, 19 nt, Human
agaagccgacagagacuac

SEQ ID NO: 74363 - RNA, 22 nt, Human
agagaaaaaguaagagggggag

SEQ ID NO: 74364 - RNA, 18 nt, Human
agagagccaggcccgggg

SEQ ID NO: 74365 - RNA, 18 nt, Human
agaucuagaagaauggug

SEQ ID NO: 74366 - RNA, 20 nt, Human
agauggaggcugcagugagc

SEQ ID NO: 74367 - RNA, 24 nt, Human
agcacuuugggaagucaagguggg

SEQ ID NO: 74368 - RNA, 23 nt, Human
agccaggugugguggugugcacc

SEQ ID NO: 74369 - RNA, 26 nt, Human
agccagugcugacgaaggaagucccc

SEQ ID NO: 74370 - RNA, 18 nt, Human
agccccgaagggccugcu

SEQ ID NO: 74371 - RNA, 25 nt, Human
agccugggcaacauggaagaaaccc

SEQ ID NO: 74372 - RNA, 19 nt, Human
agccuugaagauuuucagc

SEQ ID NO: 74373 - RNA, 24 nt, Human
agcuacucgggaggcugagguggg

SEQ ID NO: 74374 - RNA, 21 nt, Human
agcucacucccucaguuccag

SEQ ID NO: 74375 - RNA, 20 nt, Human
aggaaguccccaagcucacu

SEQ ID NO: 74376 - RNA, 18 nt, Human
aggaccacggcaggacca

SEQ ID NO: 74377 - RNA, 23 nt, Human
aggaguucgagaccagccugggc

SEQ ID NO: 74378 - RNA, 21 nt, Human
aggcagggacaaaggcccggu

SEQ ID NO: 74379 - RNA, 24 nt, Human
aggcugaggugggaaaauggcuug

SEQ ID NO: 74380 - RNA, 19 nt, Human
agggcaagacucguggggg

SEQ ID NO: 74381 - RNA, 19 nt, Human
aggugggaaaauggcuuga

SEQ ID NO: 74382 - RNA, 24 nt, Human
aggugugguggugugcaccuguag

SEQ ID NO: 74383 - RNA, 21 nt, Human
auaaaacaaaggaaaaccaaa

SEQ ID NO: 74384 - RNA, 22 nt, Human
auacauaaauccucaauuugaa

SEQ ID NO: 74385 - RNA, 19 nt, Human
aucacugaagccagcuggu

SEQ ID NO: 74386 - RNA, 20 nt, Human
augacauucuucaacugcau

SEQ ID NO: 74387 - RNA, 23 nt, Human
auucuacacucaucagacacaga

SEQ ID NO: 74388 - RNA, 24 nt, Human
auugcuugaguccaggaguucgag

SEQ ID NO: 74389 - RNA, 22 nt, Human
caaaaacacaaacaaacaaaca

SEQ ID NO: 74390 - RNA, 26 nt, Human
caaaaacacaaacaaacaaacaaaca

SEQ ID NO: 74391 - RNA, 25 nt, Human
caaaagaacaaaaacacaaacaaac

SEQ ID NO: 74392 - RNA, 27 nt, Human
caaaagaacaaaaacacaaacaaacaa

SEQ ID NO: 74393 - RNA, 18 nt, Human
caaacaaacaaacaaaac

SEQ ID NO: 74394 - RNA, 21 nt, Human
caaacaaacaaacaaaacaag

SEQ ID NO: 74395 - RNA, 22 nt, Human
caaacaaacaaacaaacaaaac

SEQ ID NO: 74396 - RNA, 23 nt, Human
caaacaaacaaacaaacaaaaca

SEQ ID NO: 74397 - RNA, 21 nt, Human
caaacacccuccccuccaccc

SEQ ID NO: 74398 - RNA, 23 nt, Human
caaacacccuccccuccacccuc

SEQ ID NO: 74399 - RNA, 26 nt, Human
caaagagaacaccagagaucuagaag

SEQ ID NO: 74400 - RNA, 24 nt, Human
caacauggaagaaaccccugucuc

SEQ ID NO: 74401 - RNA, 23 nt, Human
caacgaaaaaagcccuaacccac

SEQ ID NO: 74402 - RNA, 22 nt, Human
caagcucaaaaacacguaguga

SEQ ID NO: 74403 - RNA, 19 nt, Human
caaggcagggacaaaggcc

SEQ ID NO: 74404 - RNA, 24 nt, Human
caaggcugggcgcaauggcucaca

SEQ ID NO: 74405 - RNA, 23 nt, Human
caaggugggcggauugcuugagu

SEQ ID NO: 74406 - RNA, 22 nt, Human
cacacacauacacacacacacc

SEQ ID NO: 74407 - RNA, 21 nt, Human
cacacaccccuacacacaccc

SEQ ID NO: 74408 - RNA, 24 nt, Human
cacacauacacacacacaccccua

SEQ ID NO: 74409 - RNA, 23 nt, Human
cacacccccgccccccgcccccc

SEQ ID NO: 74410 - RNA, 26 nt, Human
cacacccccgccccccgccccccgcc

SEQ ID NO: 74411 - RNA, 19 nt, Human
cacaccccuacacacaccc

SEQ ID NO: 74412 - RNA, 28 nt, Human
cacacccgcccauaaucccagcacuuug

SEQ ID NO: 74413 - RNA, 23 nt, Human
cacagaaccaucacaugcaacga

SEQ ID NO: 74414 - RNA, 19 nt, Human
cacagcaaucaaagacaag

SEQ ID NO: 74415 - RNA, 18 nt, Human
cacauuugguuccuguuu

SEQ ID NO: 74416 - RNA, 19 nt, Human
cacauuugguuccuguuuu

SEQ ID NO: 74417 - RNA, 24 nt, Human
caccacacuccagcuuaggcgaca

SEQ ID NO: 74418 - RNA, 18 nt, Human
cacccucaauccccaccc

SEQ ID NO: 74419 - RNA, 22 nt, Human
cacccucaauccccacccaaag

SEQ ID NO: 74420 - RNA, 19 nt, Human
cacccuccccuccacccuc

SEQ ID NO: 74421 - RNA, 30 nt, Human
cacccuccccuccacccucaauccccaccu

SEQ ID NO: 74422 - RNA, 23 nt, Human
caccuguagucccagcuacucgg

SEQ ID NO: 74423 - RNA, 24 nt, Human
caccuguagucccagcuacucggg

SEQ ID NO: 74424 - RNA, 22 nt, Human
cacggcaggaccacggcaggac

SEQ ID NO: 74425 - RNA, 23 nt, Human
cacuccagcuuaggcgacagagc

SEQ ID NO: 74426 - RNA, 22 nt, Human
cagaacacgaagccuggagagc

SEQ ID NO: 74427 - RNA, 21 nt, Human
cagcacacgggccuggcugua

SEQ ID NO: 74428 - RNA, 24 nt, Human
cagcacuuugggaagucaaggugg

SEQ ID NO: 74429 - RNA, 22 nt, Human
cagcaugaacaaacggggacac

SEQ ID NO: 74430 - RNA, 21 nt, Human
cagccuucagugaggaaaggg

SEQ ID NO: 74431 - RNA, 21 nt, Human
cagcuacucgggaggcugagg

SEQ ID NO: 74432 - RNA, 24 nt, Human
cagcuacucgggaggcugaggugg

SEQ ID NO: 74433 - RNA, 23 nt, Human
cagcucccuggcuccuggcuccc

SEQ ID NO: 74434 - RNA, 20 nt, Human
cagugcaccugggcucuugc

SEQ ID NO: 74435 - RNA, 25 nt, Human
caucacaugcaacgaaaaaagcccu

SEQ ID NO: 74436 - RNA, 21 nt, Human
caugaacaaacggggacaccu

SEQ ID NO: 74437 - RNA, 20 nt, Human
caugcccuauauccacuccc

SEQ ID NO: 74438 - RNA, 21 nt, Human
caugcgcggccgacagggaag

SEQ ID NO: 74439 - RNA, 27 nt, Human
cauucuucaacugcauuuuaacugagu

SEQ ID NO: 74440 - RNA, 21 nt, Human
ccaaccaaguaaguggccuaa

SEQ ID NO: 74441 - RNA, 21 nt, Human
ccacacacauacacacacaca

SEQ ID NO: 74442 - RNA, 18 nt, Human
ccacucuauucuucaaaa

SEQ ID NO: 74443 - RNA, 19 nt, Human
ccagcugccccacagcaca

SEQ ID NO: 74444 - RNA, 25 nt, Human
ccaggaguucgagaccagccugggc

SEQ ID NO: 74445 - RNA, 18 nt, Human
ccagugcugacgaaggaa

SEQ ID NO: 74446 - RNA, 23 nt, Human
ccauaaaacaaaggaaaaccaaa

SEQ ID NO: 74447 - RNA, 19 nt, Human
cccaaacacccuccccucc

SEQ ID NO: 74448 - RNA, 21 nt, Human
cccaaacacccuccccuccac

SEQ ID NO: 74449 - RNA, 20 nt, Human
cccacacacauacacacaca

SEQ ID NO: 74450 - RNA, 22 nt, Human
cccacacacauacacacacaca

SEQ ID NO: 74451 - RNA, 25 nt, Human
cccacacacauacacacacacaccc

SEQ ID NO: 74452 - RNA, 22 nt, Human
cccauacacacccccgcccccc

SEQ ID NO: 74453 - RNA, 22 nt, Human
cccauacacacccccgcccccc

SEQ ID NO: 74454 - RNA, 23 nt, Human
cccauacacacccccgccccccg

SEQ ID NO: 74455 - RNA, 18 nt, Human
ccccaaaacagcaugaac

SEQ ID NO: 74456 - RNA, 20 nt, Human
cccccaccccccaaaacagc

SEQ ID NO: 74457 - RNA, 20 nt, Human
ccccccaccccccaaaacag

SEQ ID NO: 74458 - RNA, 24 nt, Human
cccccgccccccgccccccgcccc

SEQ ID NO: 74459 - RNA, 20 nt, Human
cccccgccccccgccccgcc

SEQ ID NO: 74460 - RNA, 18 nt, Human
ccccgccccccgcccccc

SEQ ID NO: 74461 - RNA, 20 nt, Human
ccccuccacccucaaucccc

SEQ ID NO: 74462 - RNA, 19 nt, Human
ccccugaacucugugaucc

SEQ ID NO: 74463 - RNA, 24 nt, Human
ccccugucucuacuaaaaauacaa

SEQ ID NO: 74464 - RNA, 18 nt, Human
cccgcagcuccccguccg

SEQ ID NO: 74465 - RNA, 24 nt, Human
cccgccccccgccccccgccccgc

SEQ ID NO: 74466 - RNA, 24 nt, Human
cccgccccgccaugcugaugaaaa

SEQ ID NO: 74467 - RNA, 20 nt, Human
cccucaauccccacccaaag

SEQ ID NO: 74468 - RNA, 19 nt, Human
cccuccccuccacccucaa

SEQ ID NO: 74469 - RNA, 20 nt, Human
ccgccaccgccugggccucg

SEQ ID NO: 74470 - RNA, 19 nt, Human
ccgccgccaccgccugggc

SEQ ID NO: 74471 - RNA, 21 nt, Human
ccgccgccgccaccgccuggg

SEQ ID NO: 74472 - RNA, 23 nt, Human
ccgccgccgccaccgccugggcc

SEQ ID NO: 74473 - RNA, 20 nt, Human
ccgccgccuccugggccgcc

SEQ ID NO: 74474 - RNA, 19 nt, Human
ccuccaaaaaaaaaucuca

SEQ ID NO: 74475 - RNA, 18 nt, Human
ccuggaucccagcugccc

SEQ ID NO: 74476 - RNA, 21 nt, Human
ccuguagucccagcuacucgg

SEQ ID NO: 74477 - RNA, 19 nt, Human
ccuuccaaaugacaucaua

SEQ ID NO: 74478 - RNA, 21 nt, Human
cgaaaaaagcccuaacccaca

SEQ ID NO: 74479 - RNA, 23 nt, Human
cgccccccgccccccgccccgcc

SEQ ID NO: 74480 - RNA, 24 nt, Human
cggauugcuugaguccaggaguuc

SEQ ID NO: 74481 - RNA, 25 nt, Human
cuaacccacacacauacacacacac

SEQ ID NO: 74482 - RNA, 22 nt, Human
cuauaugcaccauaaaacaaag

SEQ ID NO: 74483 - RNA, 19 nt, Human
cucacacccgcccauaauc

SEQ ID NO: 74484 - RNA, 28 nt, Human
cucacacccgcccauaaucccagcacuu

SEQ ID NO: 74485 - RNA, 20 nt, Human
cuccaaaaaaaaaucucauc

SEQ ID NO: 74486 - RNA, 20 nt, Human
cuccacccucaauccccacc

SEQ ID NO: 74487 - RNA, 24 nt, Human
cuccccguccgccgccuccugggc

SEQ ID NO: 74488 - RNA, 20 nt, Human
cuccccuccacccucaaucc

SEQ ID NO: 74489 - RNA, 23 nt, Human
cuccccuccacccucaaucccca

SEQ ID NO: 74490 - RNA, 20 nt, Human
cugcagaagccgacagagac

SEQ ID NO: 74491 - RNA, 22 nt, Human
cugcagugagcugugaucgugc

SEQ ID NO: 74492 - RNA, 21 nt, Human
cuggccaaucacucccacagu

SEQ ID NO: 74493 - RNA, 18 nt, Human
cuugcaaauaccccccca

SEQ ID NO: 74494 - RNA, 23 nt, Human
cuugcaaauacccccccaccccc

SEQ ID NO: 74495 - RNA, 20 nt, Human
gaaaaaagcccuaacccaca

SEQ ID NO: 74496 - RNA, 20 nt, Human
gaaaagacagaacacgaagg

SEQ ID NO: 74497 - RNA, 19 nt, Human
gaaacuguggccaaguucc

SEQ ID NO: 74498 - RNA, 20 nt, Human
gaacaaaaacacaaacaaac

SEQ ID NO: 74499 - RNA, 18 nt, Human
gaaccaucacaugcaacg

SEQ ID NO: 74500 - RNA, 20 nt, Human
gacaggaugugggguaggag

SEQ ID NO: 74501 - RNA, 20 nt, Human
gacgaaggaaguccccaagc

SEQ ID NO: 74502 - RNA, 24 nt, Human
gacugcuuucuugguggcgguggg

SEQ ID NO: 74503 - RNA, 23 nt, Human
gagaccagccugggcaacaugga

SEQ ID NO: 74504 - RNA, 18 nt, Human
gagcaagcucaaaaacaa

SEQ ID NO: 74505 - RNA, 21 nt, Human
gagggcuuugguuuggggaaa

SEQ ID NO: 74506 - RNA, 18 nt, Human
gauucccauacacacccc

SEQ ID NO: 74507 - RNA, 23 nt, Human
gcaaauacccccccaccccccaa

SEQ ID NO: 74508 - RNA, 24 nt, Human
gcaaauacccccccaccccccaaa

SEQ ID NO: 74509 - RNA, 20 nt, Human
gcacacagcaaucaaagaca

SEQ ID NO: 74510 - RNA, 20 nt, Human
gcagggacaaaggcccggug

SEQ ID NO: 74511 - RNA, 21 nt, Human
gcccuaacccacacacauaca

SEQ ID NO: 74512 - RNA, 24 nt, Human
gccuaggagauggaggcugcagug

SEQ ID NO: 74513 - RNA, 22 nt, Human
gccuggccaaucacucccacag

SEQ ID NO: 74514 - RNA, 25 nt, Human
gccuucagugaggaaaggggagagg

SEQ ID NO: 74515 - RNA, 20 nt, Human
gcggccgacagggaagagug

SEQ ID NO: 74516 - RNA, 20 nt, Human
gcucacacccgcccauaauc

SEQ ID NO: 74517 - RNA, 20 nt, Human
gcugaugaaaagacagaaca

SEQ ID NO: 74518 - RNA, 20 nt, Human
gcugcccugugguggguuug

SEQ ID NO: 74519 - RNA, 20 nt, Human
gcugugaucgugccaccaca

SEQ ID NO: 74520 - RNA, 22 nt, Human
gcuugagccuaggagauggagg

SEQ ID NO: 74521 - RNA, 22 nt, Human
gcuugaguccaggaguucgaga

SEQ ID NO: 74522 - RNA, 22 nt, Human
ggagaugacauucuucaacugc

SEQ ID NO: 74523 - RNA, 18 nt, Human
ggaggcugcagugagcug

SEQ ID NO: 74524 - RNA, 24 nt, Human
ggaggcugcagugagcugugaucg

SEQ ID NO: 74525 - RNA, 19 nt, Human
ggaugugggguaggagaug

SEQ ID NO: 74526 - RNA, 23 nt, Human
ggauugcuugaguccaggaguuc

SEQ ID NO: 74527 - RNA, 22 nt, Human
gggaaaaacaaagaggcacaaa

SEQ ID NO: 74528 - RNA, 18 nt, Human
gggagaaaagccaaggca

SEQ ID NO: 74529 - RNA, 21 nt, Human
gggaggcugaggugggaaaau

SEQ ID NO: 74530 - RNA, 19 nt, Human
ggggauggggguugcaggg

SEQ ID NO: 74531 - RNA, 22 nt, Human
ggggauggggguugcagggugg

SEQ ID NO: 74532 - RNA, 26 nt, Human
guaaagcaaacguacauucucuccuc

SEQ ID NO: 74533 - RNA, 18 nt, Human
guagacccuccccccucc

SEQ ID NO: 74534 - RNA, 22 nt, Human
guagacccuccccccuccaaaa

SEQ ID NO: 74535 - RNA, 21 nt, Human
gugggcggauugcuugagucc

SEQ ID NO: 74536 - RNA, 23 nt, Human
guggugugcaccuguagucccag

SEQ ID NO: 74537 - RNA, 19 nt, Human
guucuugaauauguauuuu

SEQ ID NO: 74538 - RNA, 23 nt, Human
uaaaaaacauaugcuauagcuua

SEQ ID NO: 74539 - RNA, 23 nt, Human
uaaaacaaaggaaaaccaaauga

SEQ ID NO: 74540 - RNA, 20 nt, Human
uaaaacaucuuuagauuuca

SEQ ID NO: 74541 - RNA, 20 nt, Human
uaacagcacacgggccuggc

SEQ ID NO: 74542 - RNA, 21 nt, Human
uaagagcaagcucaaaaacac

SEQ ID NO: 74543 - RNA, 19 nt, Human
uaaggggccacccaucagu

SEQ ID NO: 74544 - RNA, 18 nt, Human
uacccccccaccccccaa

SEQ ID NO: 74545 - RNA, 19 nt, Human
uacccccccaccccccaaa

SEQ ID NO: 74546 - RNA, 21 nt, Human
uacccccccaccccccaaaac

SEQ ID NO: 74547 - RNA, 19 nt, Human
uacgaaguacucuucagaa

SEQ ID NO: 74548 - RNA, 21 nt, Human
uacggcacccaggacucagaa

SEQ ID NO: 74549 - RNA, 23 nt, Human
uacggcacccaggacucagaauc

SEQ ID NO: 74550 - RNA, 20 nt, Human
uaggagauggaggcugcagu

SEQ ID NO: 74551 - RNA, 21 nt, Human
uauauccacucccucgccaaa

SEQ ID NO: 74552 - RNA, 20 nt, Human
uauuaugucaaaaugaguau

SEQ ID NO: 74553 - RNA, 19 nt, Human
uauuuuguucuuuugugac

SEQ ID NO: 74554 - RNA, 27 nt, Human
ucaaagcuucaauccggucuuacuguc

SEQ ID NO: 74555 - RNA, 25 nt, Human
ucaagggcaggaaccugcucucuca

SEQ ID NO: 74556 - RNA, 23 nt, Human
ucacaugcaacgaaaaaagcccu

SEQ ID NO: 74557 - RNA, 18 nt, Human
ucagaaaguacuccucau

SEQ ID NO: 74558 - RNA, 19 nt, Human
ucagacacagacaugaccg

SEQ ID NO: 74559 - RNA, 18 nt, Human
ucaucauggguucuggag

SEQ ID NO: 74560 - RNA, 20 nt, Human
uccaaggucauguguaggga

SEQ ID NO: 74561 - RNA, 21 nt, Human
uccacaagagaaaaaguaaga

SEQ ID NO: 74562 - RNA, 24 nt, Human
uccacggcaggaccacggcaggac

SEQ ID NO: 74563 - RNA, 22 nt, Human
uccacucccucgccaaagugac

SEQ ID NO: 74564 - RNA, 24 nt, Human
uccagcuuaggcgacagagccaga

SEQ ID NO: 74565 - RNA, 18 nt, Human
ucccaaacacccuccccu

SEQ ID NO: 74566 - RNA, 22 nt, Human
uccccccuccaaaaaaaaaucu

SEQ ID NO: 74567 - RNA, 21 nt, Human
ucccccugaacucugugaucc

SEQ ID NO: 74568 - RNA, 24 nt, Human
ucucuacuaaaaauacaaaaaauu

SEQ ID NO: 74569 - RNA, 26 nt, Human
ucuugcaaauacccccccacccccca

SEQ ID NO: 74570 - RNA, 20 nt, Human
ucuugcugucuggagcuuug

SEQ ID NO: 74571 - RNA, 19 nt, Human
ugaaaaaagaccuuuccuu

SEQ ID NO: 74572 - RNA, 22 nt, Human
ugaaaaaaucauucauaaauua

SEQ ID NO: 74573 - RNA, 19 nt, Human
ugaaaacagaaagccagug

SEQ ID NO: 74574 - RNA, 23 nt, Human
ugaaaagacagaacacgaagccu

SEQ ID NO: 74575 - RNA, 23 nt, Human
ugacaugcccuauauccacuccc

SEQ ID NO: 74576 - RNA, 21 nt, Human
ugacugacagugcacauccag

SEQ ID NO: 74577 - RNA, 26 nt, Human
ugacuucaaggcugggcgcaauggcu

SEQ ID NO: 74578 - RNA, 20 nt, Human
ugagaaggggagaaaagcca

SEQ ID NO: 74579 - RNA, 24 nt, Human
ugagccuaggagauggaggcugca

SEQ ID NO: 74580 - RNA, 19 nt, Human
ugagcugugaucgugccac

SEQ ID NO: 74581 - RNA, 19 nt, Human
ugaggaaaggggagaggag

SEQ ID NO: 74582 - RNA, 18 nt, Human
ugaggugggaaaauggcu

SEQ ID NO: 74583 - RNA, 23 nt, Human
ugcaaauacccccccacccccca

SEQ ID NO: 74584 - RNA, 26 nt, Human
ugcagccaggcggccgcuagagagcc

SEQ ID NO: 74585 - RNA, 21 nt, Human
ugcaggguggaggggggucuu

SEQ ID NO: 74586 - RNA, 20 nt, Human
ugcuuuaggcaggaagcagc

SEQ ID NO: 74587 - RNA, 28 nt, Human
uggcucacacccgcccauaaucccagca

SEQ ID NO: 74588 - RNA, 21 nt, Human
ugggaagucaaggugggcgga

SEQ ID NO: 74589 - RNA, 22 nt, Human
ugggcucuugcugucuggagcu

SEQ ID NO: 74590 - RNA, 22 nt, Human
uggggagagagcagcgggacag

SEQ ID NO: 74591 - RNA, 24 nt, Human
ugguggugugcaccuguaguccca

SEQ ID NO: 74592 - RNA, 22 nt, Human
uggugugcaccuguagucccag

SEQ ID NO: 74593 - RNA, 21 nt, Human
ugguuuggggaaaaacaaaga

SEQ ID NO: 74594 - RNA, 18 nt, Human
uguagggacaggcuccac

SEQ ID NO: 74595 - RNA, 26 nt, Human
uguagggacaggcuccacggcaggac

SEQ ID NO: 74596 - RNA, 22 nt, Human
ugucaccagcucccuggcuccu

SEQ ID NO: 74597 - RNA, 22 nt, Human
uguccuggcaaauccuuccaaa

SEQ ID NO: 74598 - RNA, 22 nt, Human
ugugguagaggaucucugacaa

SEQ ID NO: 74599 - RNA, 18 nt, Human
uuaaagcaugaaaugcuu

SEQ ID NO: 74600 - RNA, 22 nt, Human
uuaacaugacaauuucacacua

SEQ ID NO: 74601 - RNA, 23 nt, Human
uuagaacaugacuucaaggcugg

SEQ ID NO: 74602 - RNA, 20 nt, Human
uucuucaaaagaacaaaaac

SEQ ID NO: 74603 - RNA, 21 nt, Human
uucuugguggcgguggguaaa

SEQ ID NO: 74604 - RNA, 22 nt, Human
uugaguccaggaguucgagacc

SEQ ID NO: 74605 - RNA, 23 nt, Human
uugcaaauacccccccacccccc

SEQ ID NO: 74606 - RNA, 21 nt, Human
uugcuugaguccaggaguucg

SEQ ID NO: 74607 - RNA, 20 nt, Human
uuucaagggcaggaaccugc

SEQ ID NO: 74608 - RNA, 21 nt, Human
uuuccagaauucugcagaagc

SEQ ID NO: 74609 - RNA, 23 nt, Human
uuucccaaacacccuccccucca

SEQ ID NO: 74610 - RNA, 19 nt, Human
aaaacaaacaaacaaaaag

SEQ ID NO: 74611 - RNA, 19 nt, Human
aaaaucccugacacaccag

SEQ ID NO: 74612 - RNA, 22 nt, Human
aaacaaaaagcaaacgaggugg

SEQ ID NO: 74613 - RNA, 21 nt, Human
aaacaaaaauuaacaucagac

SEQ ID NO: 74614 - RNA, 18 nt, Human
aaacaaacaaacaaaaag

SEQ ID NO: 74615 - RNA, 19 nt, Human
aaacaaacaaacaaaaagc

SEQ ID NO: 74616 - RNA, 20 nt, Human
aaacaaacaaacaaaaagca

SEQ ID NO: 74617 - RNA, 19 nt, Human
aaacuauauuucaaaacug

SEQ ID NO: 74618 - RNA, 25 nt, Human
aaagaauacuguucggcuuuacugu

SEQ ID NO: 74619 - RNA, 18 nt, Human
aaagcaaacgaggugguu

SEQ ID NO: 74620 - RNA, 19 nt, Human
aacaaauguuaacauucuc

SEQ ID NO: 74621 - RNA, 18 nt, Human
aaccauaguucuguuuua

SEQ ID NO: 74622 - RNA, 19 nt, Human
aagcaaaacaaacaaacaa

SEQ ID NO: 74623 - RNA, 26 nt, Human
aagcaaaacaaacaaacaaaaagcaa

SEQ ID NO: 74624 - RNA, 23 nt, Human
aagcccugacacucaugcaaaca

SEQ ID NO: 74625 - RNA, 22 nt, Human
aagcucaaaacuaguauaacag

SEQ ID NO: 74626 - RNA, 25 nt, Human
acaaaaggcugaggucuaaagcuca

SEQ ID NO: 74627 - RNA, 20 nt, Human
acaaaaucccugacacacca

SEQ ID NO: 74628 - RNA, 23 nt, Human
acaaacaaaaagcaaacgaggug

SEQ ID NO: 74629 - RNA, 21 nt, Human
acacaccagagguacauggaa

SEQ ID NO: 74630 - RNA, 26 nt, Human
acacuaaaaaagcaaaacaaacaaac

SEQ ID NO: 74631 - RNA, 19 nt, Human
accccgagacugcagcggg

SEQ ID NO: 74632 - RNA, 23 nt, Human
acuaaaaaagcaaaacaaacaaa

SEQ ID NO: 74633 - RNA, 21 nt, Human
acugaccuccacuaagagcgc

SEQ ID NO: 74634 - RNA, 22 nt, Human
acuuccauaaaugugcugagaa

SEQ ID NO: 74635 - RNA, 21 nt, Human
agagauccuuuauaucauguc

SEQ ID NO: 74636 - RNA, 21 nt, Human
agagguggaggggggagaggg

SEQ ID NO: 74637 - RNA, 21 nt, Human
agauaaacgggcacagcucug

SEQ ID NO: 74638 - RNA, 21 nt, Human
agcaaaacaaacaaacaaaaa

SEQ ID NO: 74639 - RNA, 23 nt, Human
aggcaaaaauaauuuuaggucua

SEQ ID NO: 74640 - RNA, 19 nt, Human
aggcucuggggagagggcc

SEQ ID NO: 74641 - RNA, 23 nt, Human
aggggggagaggggacugggggc

SEQ ID NO: 74642 - RNA, 24 nt, Human
aggggggagaggggacugggggcu

SEQ ID NO: 74643 - RNA, 19 nt, Human
aguucuguuuuagguaaac

SEQ ID NO: 74644 - RNA, 21 nt, Human
auacuuuuuuuuggcucuucu

SEQ ID NO: 74645 - RNA, 20 nt, Human
augaaguacaaauaucauaa

SEQ ID NO: 74646 - RNA, 22 nt, Human
caaaacaaacaaacaaaaagca

SEQ ID NO: 74647 - RNA, 20 nt, Human
caacaaauguuaacauucuc

SEQ ID NO: 74648 - RNA, 18 nt, Human
caagagguggagggggga

SEQ ID NO: 74649 - RNA, 18 nt, Human
caccaaauaacucaucac

SEQ ID NO: 74650 - RNA, 21 nt, Human
cacucucacagaaacauauua

SEQ ID NO: 74651 - RNA, 20 nt, Human
cagaaaaugaacuaauacac

SEQ ID NO: 74652 - RNA, 18 nt, Human
caugcaaaacugcaacac

SEQ ID NO: 74653 - RNA, 19 nt, Human
ccauaaaaaugacacuuca

SEQ ID NO: 74654 - RNA, 20 nt, Human
ccuuuauaucaugucacauc

SEQ ID NO: 74655 - RNA, 23 nt, Human
cggaaauaaaagcauucucuuga

SEQ ID NO: 74656 - RNA, 18 nt, Human
cggaaugaaugggaggcc

SEQ ID NO: 74657 - RNA, 22 nt, Human
cggcaggacggaagaaagccgg

SEQ ID NO: 74658 - RNA, 18 nt, Human
cuacacuaaaaaagcaaa

SEQ ID NO: 74659 - RNA, 19 nt, Human
cuaguaguacuaaguuuuc

SEQ ID NO: 74660 - RNA, 24 nt, Human
cucaaaacuaguauaacaguuuac

SEQ ID NO: 74661 - RNA, 19 nt, Human
cugagaaccccgagacugc

SEQ ID NO: 74662 - RNA, 19 nt, Human
cuuaagaaaauaaggcaga

SEQ ID NO: 74663 - RNA, 20 nt, Human
gaccuuuuuucagagaacag

SEQ ID NO: 74664 - RNA, 19 nt, Human
gagucgggggaggggaggc

SEQ ID NO: 74665 - RNA, 21 nt, Human
gcaauaugcauaaacaauaug

SEQ ID NO: 74666 - RNA, 24 nt, Human
gcggugcucgccacaggggugugu

SEQ ID NO: 74667 - RNA, 20 nt, Human
ggacugggggcuaggggccc

SEQ ID NO: 74668 - RNA, 18 nt, Human
ggggacggcaggacggaa

SEQ ID NO: 74669 - RNA, 19 nt, Human
ggggacugggggcuagggg

SEQ ID NO: 74670 - RNA, 21 nt, Human
ggggacugggggcuaggggcc

SEQ ID NO: 74671 - RNA, 20 nt, Human
ggggagaggggacugggggc

SEQ ID NO: 74672 - RNA, 21 nt, Human
ggggaggcucuggggagaggg

SEQ ID NO: 74673 - RNA, 19 nt, Human
guggaaaaauucauccaaa

SEQ ID NO: 74674 - RNA, 20 nt, Human
uaaaaaaacugaaauauaaa

SEQ ID NO: 74675 - RNA, 18 nt, Human
uaaaaaagcaaaacaaac

SEQ ID NO: 74676 - RNA, 22 nt, Human
uaaaaaaugucuauaaaagucc

SEQ ID NO: 74677 - RNA, 27 nt, Human
uaaagcucaaaacuaguauaacaguuu

SEQ ID NO: 74678 - RNA, 18 nt, Human
uaacuggacaaagcccug

SEQ ID NO: 74679 - RNA, 22 nt, Human
uaacuggacaaagcccugacac

SEQ ID NO: 74680 - RNA, 20 nt, Human
uaagaccuuuuuucagagaa

SEQ ID NO: 74681 - RNA, 22 nt, Human
uaauuuuuaaacaauuugcaca

SEQ ID NO: 74682 - RNA, 19 nt, Human
uacaaugaagauaaacggg

SEQ ID NO: 74683 - RNA, 18 nt, Human
uagaaacagaaaaugaac

SEQ ID NO: 74684 - RNA, 24 nt, Human
uagaagacauuauaauaucagcgc

SEQ ID NO: 74685 - RNA, 24 nt, Human
uagaucauucuuuuaaaaaaacug

SEQ ID NO: 74686 - RNA, 27 nt, Human
uauaaccgauuacaugcaaaacugcaa

SEQ ID NO: 74687 - RNA, 20 nt, Human
uauauuauaaguacuauugg

SEQ ID NO: 74688 - RNA, 23 nt, Human
ucacaacuuuuaagauuuuucuu

SEQ ID NO: 74689 - RNA, 23 nt, Human
ucacuccugaaacaaaaauuaac

SEQ ID NO: 74690 - RNA, 18 nt, Human
ucagaagguuugauuuuu

SEQ ID NO: 74691 - RNA, 22 nt, Human
ucaucauuguuguugaacauuc

SEQ ID NO: 74692 - RNA, 19 nt, Human
uccaaguuuaugauccagc

SEQ ID NO: 74693 - RNA, 20 nt, Human
uccacacaaaaggcugaggu

SEQ ID NO: 74694 - RNA, 22 nt, Human
uccauaaaugugcugagaaccc

SEQ ID NO: 74695 - RNA, 24 nt, Human
ucuagcaaaaucagaugagauugc

SEQ ID NO: 74696 - RNA, 19 nt, Human
ucuauaaaaguccaauaaa

SEQ ID NO: 74697 - RNA, 21 nt, Human
ucuguaaacacuguggacugc

SEQ ID NO: 74698 - RNA, 27 nt, Human
ugaagauacuuuuuuuuggcucuuccc

SEQ ID NO: 74699 - RNA, 18 nt, Human
ugagagaagggugacugu

SEQ ID NO: 74700 - RNA, 23 nt, Human
ugcaauguauuuguuaaucuuua

SEQ ID NO: 74701 - RNA, 23 nt, Human
uggaaaaauucauccaaaauuaa

SEQ ID NO: 74702 - RNA, 23 nt, Human
uggaaagacauuuaacauaaaga

SEQ ID NO: 74703 - RNA, 22 nt, Human
uggacagcuccacauugaucaa

SEQ ID NO: 74704 - RNA, 18 nt, Human
uggaggggggagagggga

SEQ ID NO: 74705 - RNA, 23 nt, Human
uggaggggggagaggggacuggg

SEQ ID NO: 74706 - RNA, 18 nt, Human
ugggggcuaggggcccgg

SEQ ID NO: 74707 - RNA, 19 nt, Human
ugggggcuaggggcccggg

SEQ ID NO: 74708 - RNA, 18 nt, Human
uguaauagaaacagaaaa

SEQ ID NO: 74709 - RNA, 21 nt, Human
ugucacucucacagaaacaua

SEQ ID NO: 74710 - RNA, 22 nt, Human
ugucucagagcagggaggacgg

SEQ ID NO: 74711 - RNA, 19 nt, Human
uguugaacauucacuuuau

SEQ ID NO: 74712 - RNA, 27 nt, Human
uuaucaauauugccauaaaaaugacac

SEQ ID NO: 74713 - RNA, 20 nt, Human
uucacaggaugacaaacuau

SEQ ID NO: 74714 - RNA, 18 nt, Human
uuggcucuucugaacugg

SEQ ID NO: 74715 - RNA, 19 nt, Human
uuuaaagccuaagaaagcu

SEQ ID NO: 74716 - RNA, 21 nt, Human
uuuaagacaaugcuauuaaau

SEQ ID NO: 74717 - RNA, 18 nt, Human
uuuaaguccuuccuucuu

SEQ ID NO: 74718 - RNA, 18 nt, Human
uuuuuuuggcucuucuga

SEQ ID NO: 74719 - RNA, 23 nt, Human
uuuuuuuggcucuucugaacugg

SEQ ID NO: 74720 - RNA, 19 nt, Human
aacccucaccaggcccaac

SEQ ID NO: 74721 - RNA, 24 nt, Human
aagugggggugaugagagguuguc

SEQ ID NO: 74722 - RNA, 23 nt, Human
aauccagcauucuaguuucuuuc

SEQ ID NO: 74723 - RNA, 23 nt, Human
acccucaccaggcccaacugcca

SEQ ID NO: 74724 - RNA, 19 nt, Human
agcccagcaggaaggaaca

SEQ ID NO: 74725 - RNA, 19 nt, Human
agccugagcaauauggccu

SEQ ID NO: 74726 - RNA, 18 nt, Human
agcugcauggccccuaca

SEQ ID NO: 74727 - RNA, 21 nt, Human
agcuugcugucuugguccugg

SEQ ID NO: 74728 - RNA, 21 nt, Human
aggcagggggggucccggaca

SEQ ID NO: 74729 - RNA, 23 nt, Human
auggcaagcagcgucccaggcac

SEQ ID NO: 74730 - RNA, 19 nt, Human
cacaccccagccucucucu

SEQ ID NO: 74731 - RNA, 22 nt, Human
caccccagccucucucugaggu

SEQ ID NO: 74732 - RNA, 22 nt, Human
cagcccaagccugccuuggcgg

SEQ ID NO: 74733 - RNA, 18 nt, Human
caggaaggaacaaaagug

SEQ ID NO: 74734 - RNA, 23 nt, Human
ccaagccugccuuggcggccggg

SEQ ID NO: 74735 - RNA, 20 nt, Human
ccaggcaccccacguguccu

SEQ ID NO: 74736 - RNA, 21 nt, Human
ccaggcccaacugccaccuac

SEQ ID NO: 74737 - RNA, 18 nt, Human
cccacaggccugggcacg

SEQ ID NO: 74738 - RNA, 21 nt, Human
cccacguguccuggcccagcc

SEQ ID NO: 74739 - RNA, 18 nt, Human
ccccacuacccacaggcc

SEQ ID NO: 74740 - RNA, 19 nt, Human
ccccacuacccacaggccu

SEQ ID NO: 74741 - RNA, 24 nt, Human
ccccacuacccacaggccugggca

SEQ ID NO: 74742 - RNA, 22 nt, Human
cccuccccacuacccacaggcc

SEQ ID NO: 74743 - RNA, 21 nt, Human
ccuaacccucaccaggcccaa

SEQ ID NO: 74744 - RNA, 22 nt, Human
ccuaacccucaccaggcccaac

SEQ ID NO: 74745 - RNA, 23 nt, Human
ccuacgccagcugcauggccccu

SEQ ID NO: 74746 - RNA, 18 nt, Human
ccuggcccagcccaagcc

SEQ ID NO: 74747 - RNA, 19 nt, Human
ccuuguccugagccugagc

SEQ ID NO: 74748 - RNA, 26 nt, Human
cuagagcggugcuggcuguucccccu

SEQ ID NO: 74749 - RNA, 22 nt, Human
cugccuuggcggccggguggcu

SEQ ID NO: 74750 - RNA, 19 nt, Human
cuugcugucuugguccugg

SEQ ID NO: 74751 - RNA, 21 nt, Human
cuugcugucuugguccuggcc

SEQ ID NO: 74752 - RNA, 22 nt, Human
gaccugaggccuuguccugagc

SEQ ID NO: 74753 - RNA, 24 nt, Human
gagaggcggcggcgcauggggcag

SEQ ID NO: 74754 - RNA, 24 nt, Human
gaggccuuguccugagccugagca

SEQ ID NO: 74755 - RNA, 18 nt, Human
gcagcgucccaggcaccc

SEQ ID NO: 74756 - RNA, 19 nt, Human
gcagcgucccaggcacccc

SEQ ID NO: 74757 - RNA, 22 nt, Human
gccagcugcauggccccuacac

SEQ ID NO: 74758 - RNA, 20 nt, Human
gcccaacugccaccuacgcc

SEQ ID NO: 74759 - RNA, 21 nt, Human
gcgcauggggcaggcgcucgc

SEQ ID NO: 74760 - RNA, 21 nt, Human
ggcagggggggucccggacag

SEQ ID NO: 74761 - RNA, 26 nt, Human
gggugagcaggaaggcaggggggguc

SEQ ID NO: 74762 - RNA, 20 nt, Human
guccuguucagcccucccca

SEQ ID NO: 74763 - RNA, 21 nt, Human
gugggggugaugagagguugu

SEQ ID NO: 74764 - RNA, 23 nt, Human
gugggggugaugagagguugucc

SEQ ID NO: 74765 - RNA, 26 nt, Human
ucaccaggcccaacugccaccuacgc

SEQ ID NO: 74766 - RNA, 19 nt, Human
ucagagcugggcccacgac

SEQ ID NO: 74767 - RNA, 22 nt, Human
ucccaggcaccccacguguccu

SEQ ID NO: 74768 - RNA, 21 nt, Human
ucugcacgaggcagcccagca

SEQ ID NO: 74769 - RNA, 23 nt, Human
ugagcaauauggccuguagguac

SEQ ID NO: 74770 - RNA, 24 nt, Human
ugcguagcuugcugucuugguccu

SEQ ID NO: 74771 - RNA, 21 nt, Human
uggcaagcagcgucccaggca

SEQ ID NO: 74772 - RNA, 21 nt, Human
uggcugcaauugcguagcuug

SEQ ID NO: 74773 - RNA, 24 nt, Human
ugggggugaugagagguuguccug

SEQ ID NO: 74774 - RNA, 25 nt, Human
uguccuguucagcccuccccacuac

SEQ ID NO: 74775 - RNA, 19 nt, Human
uuggcggccggguggcugc

SEQ ID NO: 74776 - RNA, 22 nt, Human
uuggcggccggguggcugcaau

SEQ ID NO: 74777 - RNA, 21 nt, Human
acuugggccgcgggagaccuc

SEQ ID NO: 74778 - RNA, 24 nt, Human
ccgcggagaccucggggcgcggag

SEQ ID NO: 74779 - RNA, 19 nt, Human
ccucgggccgcggagaccu

SEQ ID NO: 74780 - RNA, 19 nt, Human
ccucggggcgcggagaccu

SEQ ID NO: 74781 - RNA, 24 nt, Human
gcgcggagaccucggggcgcggag

SEQ ID NO: 74782 - RNA, 24 nt, Human
ggagaccucgggccgcggagaccu

SEQ ID NO: 74783 - RNA, 18 nt, Human
ugcauagagaacacaguc

SEQ ID NO: 74784 - RNA, 18 nt, Human
aaaaugaaggaaggaaag

SEQ ID NO: 74785 - RNA, 21 nt, Human
aaaauugcaaugucuagcuga

SEQ ID NO: 74786 - RNA, 21 nt, Human
aaacagagacacuuucuuaag

SEQ ID NO: 74787 - RNA, 22 nt, Human
aaagaaucacaaaaugaugaag

SEQ ID NO: 74788 - RNA, 23 nt, Human
aaagagacaaacugaacugcaca

SEQ ID NO: 74789 - RNA, 24 nt, Human
aaaugaugaagguuuagaaaaacu

SEQ ID NO: 74790 - RNA, 23 nt, Human
aacaaggauaacaaggaguuuuc

SEQ ID NO: 74791 - RNA, 24 nt, Human
aagaagacaagcaaagggaacugg

SEQ ID NO: 74792 - RNA, 19 nt, Human
aagaaguccaucugcccuu

SEQ ID NO: 74793 - RNA, 18 nt, Human
aaggucccaacaaaucag

SEQ ID NO: 74794 - RNA, 22 nt, Human
aagugaccccgguagagaggga

SEQ ID NO: 74795 - RNA, 21 nt, Human
aaugaugaagguuuagaaaaa

SEQ ID NO: 74796 - RNA, 25 nt, Human
acaaagcacauccccagggagaaag

SEQ ID NO: 74797 - RNA, 20 nt, Human
acaaagcuguaaagagaagc

SEQ ID NO: 74798 - RNA, 19 nt, Human
acaccucccaaagacaugc

SEQ ID NO: 74799 - RNA, 24 nt, Human
acagacaccucccaaagacaugcc

SEQ ID NO: 74800 - RNA, 18 nt, Human
accucauuucuaaugcag

SEQ ID NO: 74801 - RNA, 24 nt, Human
acuauguuacauaaacauaacacc

SEQ ID NO: 74802 - RNA, 22 nt, Human
agaaaaugcauuccuacuuuuc

SEQ ID NO: 74803 - RNA, 22 nt, Human
agaaacaaagcuguaaagagaa

SEQ ID NO: 74804 - RNA, 22 nt, Human
agaagccacaaagcacaucccc

SEQ ID NO: 74805 - RNA, 19 nt, Human
agacaagcaaagggaacug

SEQ ID NO: 74806 - RNA, 19 nt, Human
agacagucaagaagacaag

SEQ ID NO: 74807 - RNA, 22 nt, Human
agcauggugacauuaaggacug

SEQ ID NO: 74808 - RNA, 21 nt, Human
aggaaaaaugacacuacccac

SEQ ID NO: 74809 - RNA, 21 nt, Human
aggcucagaaggucccaacaa

SEQ ID NO: 74810 - RNA, 22 nt, Human
auugacacaaacuuugcaauga

SEQ ID NO: 74811 - RNA, 20 nt, Human
caaacugaacugcacauuug

SEQ ID NO: 74812 - RNA, 23 nt, Human
caacaugcagcagugaacugaug

SEQ ID NO: 74813 - RNA, 23 nt, Human
caauauguggguuuagaguugga

SEQ ID NO: 74814 - RNA, 18 nt, Human
caauauuuaaaaugaagg

SEQ ID NO: 74815 - RNA, 20 nt, Human
cacgacuaaccagaccccaa

SEQ ID NO: 74816 - RNA, 20 nt, Human
cagccccggaggcgcagccc

SEQ ID NO: 74817 - RNA, 19 nt, Human
cagguaugacugcuucaca

SEQ ID NO: 74818 - RNA, 25 nt, Human
cauguuaacaauccuugaaaaauua

SEQ ID NO: 74819 - RNA, 22 nt, Human
ccacaugucucuggaucaucuc

SEQ ID NO: 74820 - RNA, 20 nt, Human
ccagaaaaugcauuccuacu

SEQ ID NO: 74821 - RNA, 19 nt, Human
cccgcccgcgcugcagccg

SEQ ID NO: 74822 - RNA, 21 nt, Human
cccgcccgcgcugcagccgcg

SEQ ID NO: 74823 - RNA, 22 nt, Human
cccgcgcugcagccgcgcggag

SEQ ID NO: 74824 - RNA, 19 nt, Human
ccgcccgcgcugcagccgc

SEQ ID NO: 74825 - RNA, 18 nt, Human
ccuaguuuaagacacaaa

SEQ ID NO: 74826 - RNA, 18 nt, Human
ccuccugcgccgcgggag

SEQ ID NO: 74827 - RNA, 21 nt, Human
cgcguccccgcucccgcccgc

SEQ ID NO: 74828 - RNA, 23 nt, Human
cggcgacaucgcguccccgcucc

SEQ ID NO: 74829 - RNA, 20 nt, Human
cucuccuacgcaguguucaa

SEQ ID NO: 74830 - RNA, 23 nt, Human
cugcuucacagacaccucccaaa

SEQ ID NO: 74831 - RNA, 20 nt, Human
cuuugaugggauccagugcc

SEQ ID NO: 74832 - RNA, 20 nt, Human
gacaauauuuaaaaugaagg

SEQ ID NO: 74833 - RNA, 19 nt, Human
gagcagguaugacugcuuc

SEQ ID NO: 74834 - RNA, 26 nt, Human
gaugcagaaacaaagcuguaaagaga

SEQ ID NO: 74835 - RNA, 21 nt, Human
gaugcauuuuuagucacaugg

SEQ ID NO: 74836 - RNA, 23 nt, Human
gcagcagugaacugaugcagaaa

SEQ ID NO: 74837 - RNA, 21 nt, Human
gccaauggaaggaaggaagga

SEQ ID NO: 74838 - RNA, 18 nt, Human
gccccggaggcgcagccc

SEQ ID NO: 74839 - RNA, 22 nt, Human
gcgcagccccggcccgcaagga

SEQ ID NO: 74840 - RNA, 19 nt, Human
gcgcugcagccgcgcggag

SEQ ID NO: 74841 - RNA, 24 nt, Human
gcgcugcagccgcgcggagcuccu

SEQ ID NO: 74842 - RNA, 27 nt, Human
gcucagccccggaggcgcagccccggc

SEQ ID NO: 74843 - RNA, 21 nt, Human
gcucuggcggcggcucagccc

SEQ ID NO: 74844 - RNA, 19 nt, Human
ggaaggaaaaaugacacua

SEQ ID NO: 74845 - RNA, 18 nt, Human
ggagcgcccagcggcugc

SEQ ID NO: 74846 - RNA, 19 nt, Human
ggauggacauuuaauguuu

SEQ ID NO: 74847 - RNA, 23 nt, Human
ggggagggccagaucaugugccc

SEQ ID NO: 74848 - RNA, 18 nt, Human
gguagagagggaagacag

SEQ ID NO: 74849 - RNA, 19 nt, Human
guccuaucuuucccaaucc

SEQ ID NO: 74850 - RNA, 21 nt, Human
guguacagagaggccaagggg

SEQ ID NO: 74851 - RNA, 18 nt, Human
uaaagagaagccacaaag

SEQ ID NO: 74852 - RNA, 18 nt, Human
uaaagucuuguacauuga

SEQ ID NO: 74853 - RNA, 23 nt, Human
uaacaauugcaagugaccccggu

SEQ ID NO: 74854 - RNA, 26 nt, Human
uaaccagaccccaaaucccucaacau

SEQ ID NO: 74855 - RNA, 21 nt, Human
uaaguagaaggcucagaaggu

SEQ ID NO: 74856 - RNA, 19 nt, Human
uaaugcagugcacaucaau

SEQ ID NO: 74857 - RNA, 23 nt, Human
uaaugccaguggggacauaugaa

SEQ ID NO: 74858 - RNA, 19 nt, Human
uacaggaguugcaaagaga

SEQ ID NO: 74859 - RNA, 25 nt, Human
uacauacaugaaaaaguagccagau

SEQ ID NO: 74860 - RNA, 18 nt, Human
uaccuggcacaggaugga

SEQ ID NO: 74861 - RNA, 25 nt, Human
uacgcaguguucaaucuuugauuaa

SEQ ID NO: 74862 - RNA, 23 nt, Human
uagcacuaaggugugacucuuuc

SEQ ID NO: 74863 - RNA, 22 nt, Human
uagcugagcccugagggguauc

SEQ ID NO: 74864 - RNA, 21 nt, Human
uauaaaacagagacacuuucu

SEQ ID NO: 74865 - RNA, 22 nt, Human
uauuacaggaguugcaaagaga

SEQ ID NO: 74866 - RNA, 24 nt, Human
ucacaugguuuaacuucugguugc

SEQ ID NO: 74867 - RNA, 22 nt, Human
ucccgcccgcgcugcagccgcg

SEQ ID NO: 74868 - RNA, 19 nt, Human
ucuaaagugauuccuuugc

SEQ ID NO: 74869 - RNA, 19 nt, Human
ucuauauaaaacagagaca

SEQ ID NO: 74870 - RNA, 18 nt, Human
ugaacugaugcagaaaca

SEQ ID NO: 74871 - RNA, 22 nt, Human
ugaaggacacugaagaagucca

SEQ ID NO: 74872 - RNA, 27 nt, Human
ugaauaaauauacaaucugccaaugga

SEQ ID NO: 74873 - RNA, 18 nt, Human
ugcagaaacaaagcugua

SEQ ID NO: 74874 - RNA, 19 nt, Human
ugcguaucugacuuuugac

SEQ ID NO: 74875 - RNA, 22 nt, Human
ugggcaguggguuggugcaugg

SEQ ID NO: 74876 - RNA, 26 nt, Human
ugggggcuccugcugaguaaugccag

SEQ ID NO: 74877 - RNA, 21 nt, Human
uguaaugacaauauuuaaaau

SEQ ID NO: 74878 - RNA, 18 nt, Human
uguacagagaggccaagg

SEQ ID NO: 74879 - RNA, 20 nt, Human
ugucuagcugagcccugagg

SEQ ID NO: 74880 - RNA, 23 nt, Human
uguuaaaaacauuuuuuagaaca

SEQ ID NO: 74881 - RNA, 24 nt, Human
uuauugacacaaacuuugcaauga

SEQ ID NO: 74882 - RNA, 26 nt, Human
uugaagaauaacagaguuagcagaua

SEQ ID NO: 74883 - RNA, 18 nt, Human
uuggcacaacuuuagucc

SEQ ID NO: 74884 - RNA, 22 nt, Human
uuggcagcugggggcuccugcu

SEQ ID NO: 74885 - RNA, 18 nt, Human
uuuaaaaugaaggaagga

SEQ ID NO: 74886 - RNA, 27 nt, Human
uuuagaacauaaaguuccuaaaagccc

SEQ ID NO: 74887 - RNA, 23 nt, Human
uuugcagaugccaaaaugacagu

SEQ ID NO: 74888 - RNA, 21 nt, Human
aaagagaaagaguacaaagag

SEQ ID NO: 74889 - RNA, 21 nt, Human
acaaagagaggaauuuacagc

SEQ ID NO: 74890 - RNA, 26 nt, Human
agagauuugcuucuuuauuuucuagg

SEQ ID NO: 74891 - RNA, 21 nt, Human
agcaaaaccucaaaaccuagc

SEQ ID NO: 74892 - RNA, 23 nt, Human
agcaagagaaccugcccccaaaa

SEQ ID NO: 74893 - RNA, 19 nt, Human
aggaauuuacagcugggcu

SEQ ID NO: 74894 - RNA, 24 nt, Human
aguguggcaccugggaugauucuu

SEQ ID NO: 74895 - RNA, 23 nt, Human
cagcaaaaccucaaaaccuagca

SEQ ID NO: 74896 - RNA, 24 nt, Human
cagcaaaaccucaaaaccuagcaa

SEQ ID NO: 74897 - RNA, 23 nt, Human
cauuccgccaugaaaauugagag

SEQ ID NO: 74898 - RNA, 21 nt, Human
cccccaaaauuucagcguagg

SEQ ID NO: 74899 - RNA, 21 nt, Human
ccucaaaaccuagcaagagaa

SEQ ID NO: 74900 - RNA, 21 nt, Human
gaauuuacagcugggcuccgg

SEQ ID NO: 74901 - RNA, 21 nt, Human
gagagaaggucccgguaaaga

SEQ ID NO: 74902 - RNA, 21 nt, Human
gauucuucaggaauaucuuca

SEQ ID NO: 74903 - RNA, 22 nt, Human
gcaaaaccucaaaaccuagcaa

SEQ ID NO: 74904 - RNA, 25 nt, Human
gcaaaaccucaaaaccuagcaagag

SEQ ID NO: 74905 - RNA, 26 nt, Human
gcaaaaccucaaaaccuagcaagaga

SEQ ID NO: 74906 - RNA, 19 nt, Human
gucugagaaauaaagagaa

SEQ ID NO: 74907 - RNA, 22 nt, Human
uacaaagagaggaauuuacagc

SEQ ID NO: 74908 - RNA, 20 nt, Human
uagcaagagaaccugccccc

SEQ ID NO: 74909 - RNA, 18 nt, Human
ucaccauguccaguuugg

SEQ ID NO: 74910 - RNA, 23 nt, Human
ucagcguagguucuauuuucccu

SEQ ID NO: 74911 - RNA, 20 nt, Human
ucagguuuuuacccuaugcu

SEQ ID NO: 74912 - RNA, 21 nt, Human
ucccuaagugucggcuggucu

SEQ ID NO: 74913 - RNA, 25 nt, Human
ugagaaauaaagagaaagaguacaa

SEQ ID NO: 74914 - RNA, 19 nt, Human
uggcaccugggaugauucu

SEQ ID NO: 74915 - RNA, 27 nt, Human
uuaaucauuaaaauuaauacaaaaugu

SEQ ID NO: 74916 - RNA, 18 nt, Human
uuucuaggaauaucuagu

SEQ ID NO: 74917 - RNA, 20 nt, Human
uuucuaggaauaucuagucu

SEQ ID NO: 74918 - RNA, 19 nt, Human
aaacaagugcaaguuuucu

SEQ ID NO: 74919 - RNA, 21 nt, Human
aaaggccccaaaugcagugag

SEQ ID NO: 74920 - RNA, 20 nt, Human
aaauccuuugaagccaaagg

SEQ ID NO: 74921 - RNA, 25 nt, Human
aacaacacccaucuucugagauggg

SEQ ID NO: 74922 - RNA, 23 nt, Human
aacauaaccaggucccaauuccu

SEQ ID NO: 74923 - RNA, 20 nt, Human
aacccagcucuucccacuaa

SEQ ID NO: 74924 - RNA, 23 nt, Human
aacccagcucuucccacuaacac

SEQ ID NO: 74925 - RNA, 21 nt, Human
aagaaccagccuggguaccca

SEQ ID NO: 74926 - RNA, 18 nt, Human
aaggaaggggugaggagg

SEQ ID NO: 74927 - RNA, 20 nt, Human
aaggaaggggugaggagggg

SEQ ID NO: 74928 - RNA, 19 nt, Human
aaggccccaaaugcaguga

SEQ ID NO: 74929 - RNA, 24 nt, Human
aauccuuugaagccaaaggaguaa

SEQ ID NO: 74930 - RNA, 21 nt, Human
aauuauguaaagaucuugcua

SEQ ID NO: 74931 - RNA, 22 nt, Human
acaaccaaguuguuuggugacc

SEQ ID NO: 74932 - RNA, 20 nt, Human
accaaugggaaaggccccaa

SEQ ID NO: 74933 - RNA, 18 nt, Human
accaggaagacagagccc

SEQ ID NO: 74934 - RNA, 19 nt, Human
acggaggugugguccaggg

SEQ ID NO: 74935 - RNA, 24 nt, Human
acucccucuccuucuccucuuucc

SEQ ID NO: 74936 - RNA, 21 nt, Human
acucuuuuccuucuuugucuu

SEQ ID NO: 74937 - RNA, 21 nt, Human
agaaaagaagaauacuuuggg

SEQ ID NO: 74938 - RNA, 21 nt, Human
agaacccagauaaaaaacuga

SEQ ID NO: 74939 - RNA, 23 nt, Human
agacagagcccagcccugcuaua

SEQ ID NO: 74940 - RNA, 24 nt, Human
agagugcuucuuucuucucuuuuc

SEQ ID NO: 74941 - RNA, 19 nt, Human
agauuugggggaaagagug

SEQ ID NO: 74942 - RNA, 19 nt, Human
agcagagugcuucuuucuu

SEQ ID NO: 74943 - RNA, 21 nt, Human
agccaaagcagcaccaagugc

SEQ ID NO: 74944 - RNA, 24 nt, Human
agccugggcagcgggcgcgggcuc

SEQ ID NO: 74945 - RNA, 22 nt, Human
agcugauuuuuuuuuccauucu

SEQ ID NO: 74946 - RNA, 23 nt, Human
agcugauuuuuuuuuccauucuu

SEQ ID NO: 74947 - RNA, 19 nt, Human
aggaacaccagaggcccuc

SEQ ID NO: 74948 - RNA, 19 nt, Human
aggaaggaaguaacuguaa

SEQ ID NO: 74949 - RNA, 18 nt, Human
aggaaggcagugaaacca

SEQ ID NO: 74950 - RNA, 23 nt, Human
aggaaggggugaggagggggcuu

SEQ ID NO: 74951 - RNA, 25 nt, Human
aggcagaggcauuuggugggugggg

SEQ ID NO: 74952 - RNA, 25 nt, Human
aggcagugaaaccacucugaauuau

SEQ ID NO: 74953 - RNA, 18 nt, Human
aggggcaagggcuccggg

SEQ ID NO: 74954 - RNA, 22 nt, Human
auagcugauuuuuuuuuccauu

SEQ ID NO: 74955 - RNA, 24 nt, Human
augguggacaaagguucagggcug

SEQ ID NO: 74956 - RNA, 22 nt, Human
auuguacuucuuaauuuuaggu

SEQ ID NO: 74957 - RNA, 22 nt, Human
caaaauccuuugaagccaaagg

SEQ ID NO: 74958 - RNA, 19 nt, Human
caaagguucagggcugaag

SEQ ID NO: 74959 - RNA, 22 nt, Human
caaccacagaaaagaaaacauu

SEQ ID NO: 74960 - RNA, 23 nt, Human
caagaaccagccuggguacccac

SEQ ID NO: 74961 - RNA, 24 nt, Human
caaugauaaaagacaugcagaccu

SEQ ID NO: 74962 - RNA, 23 nt, Human
cacaaccaaguuguuuggugacc

SEQ ID NO: 74963 - RNA, 22 nt, Human
cacagauggauucuuccucauu

SEQ ID NO: 74964 - RNA, 23 nt, Human
caccuugccagccuuuuccuucu

SEQ ID NO: 74965 - RNA, 21 nt, Human
cacggcggcggccagccuggg

SEQ ID NO: 74966 - RNA, 20 nt, Human
cacucuugcaggaggauaag

SEQ ID NO: 74967 - RNA, 22 nt, Human
cacucuugcaggaggauaagug

SEQ ID NO: 74968 - RNA, 26 nt, Human
cacuggcccacguccgucccuggcgc

SEQ ID NO: 74969 - RNA, 20 nt, Human
cacugugugaugcuuuaguc

SEQ ID NO: 74970 - RNA, 23 nt, Human
cagaaauuagcacaacccacagg

SEQ ID NO: 74971 - RNA, 23 nt, Human
cagaccaaugggaaaggccccaa

SEQ ID NO: 74972 - RNA, 21 nt, Human
cagaggcauuugguggguggg

SEQ ID NO: 74973 - RNA, 21 nt, Human
cagauaaaaaacugacucagu

SEQ ID NO: 74974 - RNA, 18 nt, Human
cagccaaagcagcaccaa

SEQ ID NO: 74975 - RNA, 22 nt, Human
cagcucccgggcgggcugggga

SEQ ID NO: 74976 - RNA, 21 nt, Human
caggaacuagaucauuuucca

SEQ ID NO: 74977 - RNA, 23 nt, Human
caggauaggggaaaaagaugacc

SEQ ID NO: 74978 - RNA, 20 nt, Human
cagggaaacaagcuuggucu

SEQ ID NO: 74979 - RNA, 21 nt, Human
cagggaauggccucagcuccc

SEQ ID NO: 74980 - RNA, 21 nt, Human
cagggcccugggccagccccc

SEQ ID NO: 74981 - RNA, 23 nt, Human
cagucuccagucuuccugucaga

SEQ ID NO: 74982 - RNA, 21 nt, Human
cagugcugccuaucauaugua

SEQ ID NO: 74983 - RNA, 18 nt, Human
cauccucuccuacugacu

SEQ ID NO: 74984 - RNA, 23 nt, Human
cauugaaaacaacacccaucuuc

SEQ ID NO: 74985 - RNA, 24 nt, Human
ccacagaaaagaaaacauugaaaa

SEQ ID NO: 74986 - RNA, 18 nt, Human
ccagaggaagauuugggg

SEQ ID NO: 74987 - RNA, 19 nt, Human
ccagucagccaaagcagca

SEQ ID NO: 74988 - RNA, 19 nt, Human
ccccacuaccuagcccaag

SEQ ID NO: 74989 - RNA, 18 nt, Human
cccccggguccgggcugg

SEQ ID NO: 74990 - RNA, 18 nt, Human
ccccuguucucccuucuc

SEQ ID NO: 74991 - RNA, 19 nt, Human
cccuauuuucuggacagaa

SEQ ID NO: 74992 - RNA, 21 nt, Human
cccuauuuucuggacagaaau

SEQ ID NO: 74993 - RNA, 21 nt, Human
cccuguucucccuucucccuc

SEQ ID NO: 74994 - RNA, 24 nt, Human
cccuucccaucucacuuuugguca

SEQ ID NO: 74995 - RNA, 21 nt, Human
ccuacagguacagucccugga

SEQ ID NO: 74996 - RNA, 22 nt, Human
ccuaugaccaggaagacagagc

SEQ ID NO: 74997 - RNA, 21 nt, Human
ccucuccccucaacuuuacag

SEQ ID NO: 74998 - RNA, 19 nt, Human
ccuuugauacucuuuuccu

SEQ ID NO: 74999 - RNA, 23 nt, Human
cgccagggccugcagggcccugg

SEQ ID NO: 75000 - RNA, 20 nt, Human
cggauagcaaagacuuuucc

SEQ ID NO: 75001 - RNA, 21 nt, Human
cggccuucgggcccucugggc

SEQ ID NO: 75002 - RNA, 24 nt, Human
cggcgcgggcaggggcaagggcuc

SEQ ID NO: 75003 - RNA, 24 nt, Human
cggcggcggccagccugggcagcg

SEQ ID NO: 75004 - RNA, 21 nt, Human
cgggagcaggggagaggcugg

SEQ ID NO: 75005 - RNA, 24 nt, Human
cuaaaaugcuuacagguacuagca

SEQ ID NO: 75006 - RNA, 19 nt, Human
cuaaaugaucuccuuucug

SEQ ID NO: 75007 - RNA, 22 nt, Human
cuagaucauuuuccaccucugc

SEQ ID NO: 75008 - RNA, 20 nt, Human
cuccagaggaagauuugggg

SEQ ID NO: 75009 - RNA, 20 nt, Human
cucgcagcucccgggcgggc

SEQ ID NO: 75010 - RNA, 21 nt, Human
cucgcagcucccgggcgggcu

SEQ ID NO: 75011 - RNA, 24 nt, Human
cucuuuccagccgcccccauuugu

SEQ ID NO: 75012 - RNA, 22 nt, Human
cuggacagaaauuagcacaacc

SEQ ID NO: 75013 - RNA, 18 nt, Human
cuggcccacguccguccc

SEQ ID NO: 75014 - RNA, 22 nt, Human
cuggggugaggagaugucugug

SEQ ID NO: 75015 - RNA, 22 nt, Human
cuucccacuaacacugguaccg

SEQ ID NO: 75016 - RNA, 21 nt, Human
cuuccugggaccuccuuggca

SEQ ID NO: 75017 - RNA, 18 nt, Human
cuucugcccaugggccuc

SEQ ID NO: 75018 - RNA, 22 nt, Human
cuuggucucuucucugccaggg

SEQ ID NO: 75019 - RNA, 18 nt, Human
cuuuguacucccucuccu

SEQ ID NO: 75020 - RNA, 22 nt, Human
cuuuuccuauccuuuuaucuuu

SEQ ID NO: 75021 - RNA, 22 nt, Human
gaaaaaaggaaggggugaggag

SEQ ID NO: 75022 - RNA, 18 nt, Human
gaaaagaagaauacuuug

SEQ ID NO: 75023 - RNA, 19 nt, Human
gaaggggugaggagggggc

SEQ ID NO: 75024 - RNA, 18 nt, Human
gaaguuucaagcagcaga

SEQ ID NO: 75025 - RNA, 21 nt, Human
gaaugaagagaacccagauaa

SEQ ID NO: 75026 - RNA, 18 nt, Human
gaccaggaagacagagcc

SEQ ID NO: 75027 - RNA, 21 nt, Human
gagcacgggagcaggggagag

SEQ ID NO: 75028 - RNA, 21 nt, Human
gaggggcgggcauggcgggcc

SEQ ID NO: 75029 - RNA, 18 nt, Human
gaggguccugaggugcuc

SEQ ID NO: 75030 - RNA, 19 nt, Human
gaggugugguccaggggaa

SEQ ID NO: 75031 - RNA, 19 nt, Human
gaucauuuuccaccucugc

SEQ ID NO: 75032 - RNA, 28 nt, Human
gcaaagcuccagaggaagagggaacgcc

SEQ ID NO: 75033 - RNA, 19 nt, Human
gcagagcacgggagcaggg

SEQ ID NO: 75034 - RNA, 24 nt, Human
gcaggggagaggcugggauccgga

SEQ ID NO: 75035 - RNA, 19 nt, Human
gcagugaguggagaauggg

SEQ ID NO: 75036 - RNA, 19 nt, Human
gccaacauugugaaguccu

SEQ ID NO: 75037 - RNA, 22 nt, Human
gcccugggccagcccccggguc

SEQ ID NO: 75038 - RNA, 18 nt, Human
gcggccagccugggcagc

SEQ ID NO: 75039 - RNA, 20 nt, Human
gcggcggcgcgggcaggggc

SEQ ID NO: 75040 - RNA, 21 nt, Human
gcggcggcgcgggcaggggca

SEQ ID NO: 75041 - RNA, 26 nt, Human
gcggcggcgcgggcaggggcaagggc

SEQ ID NO: 75042 - RNA, 20 nt, Human
gcgggcaggggcaagggcuc

SEQ ID NO: 75043 - RNA, 23 nt, Human
gcgggcgcgggcucccggcgggg

SEQ ID NO: 75044 - RNA, 19 nt, Human
gcgucaguuuaaggagcug

SEQ ID NO: 75045 - RNA, 19 nt, Human
gcuucuuucuucucuuuuc

SEQ ID NO: 75046 - RNA, 24 nt, Human
ggaaaacccagcucuucccacuaa

SEQ ID NO: 75047 - RNA, 21 nt, Human
ggaagaacaggauaggggaaa

SEQ ID NO: 75048 - RNA, 18 nt, Human
ggaaggaaguaacuguaa

SEQ ID NO: 75049 - RNA, 24 nt, Human
ggaaugguggacaaagguucaggg

SEQ ID NO: 75050 - RNA, 22 nt, Human
ggaccuaaaaugcuuacaggua

SEQ ID NO: 75051 - RNA, 18 nt, Human
ggagcaggggagaggcug

SEQ ID NO: 75052 - RNA, 22 nt, Human
ggagguaaugaacuuggucccc

SEQ ID NO: 75053 - RNA, 23 nt, Human
ggaggugugguccaggggaaucu

SEQ ID NO: 75054 - RNA, 20 nt, Human
ggcacggcggcggccagccc

SEQ ID NO: 75055 - RNA, 22 nt, Human
ggcagcuggcugaggccaggaa

SEQ ID NO: 75056 - RNA, 18 nt, Human
ggcaggaaggaaguaacu

SEQ ID NO: 75057 - RNA, 20 nt, Human
ggcaggggcaagggcuccgg

SEQ ID NO: 75058 - RNA, 19 nt, Human
ggccagcagggaaacaagc

SEQ ID NO: 75059 - RNA, 19 nt, Human
gggaaucucuaucuucugc

SEQ ID NO: 75060 - RNA, 23 nt, Human
gggcauggcgggccgguggcggc

SEQ ID NO: 75061 - RNA, 19 nt, Human
gggcccugggccagccccc

SEQ ID NO: 75062 - RNA, 22 nt, Human
gggcccugggccagcccccggg

SEQ ID NO: 75063 - RNA, 21 nt, Human
gggcggcggcgcgggcagggg

SEQ ID NO: 75064 - RNA, 24 nt, Human
gggcggcggcgcgggcaggggcaa

SEQ ID NO: 75065 - RNA, 19 nt, Human
ggggcgggcauggcgggcc

SEQ ID NO: 75066 - RNA, 21 nt, Human
ggguggggaggguccugaggu

SEQ ID NO: 75067 - RNA, 18 nt, Human
gguggugcugguggcuuc

SEQ ID NO: 75068 - RNA, 19 nt, Human
gucaccucacagauggauu

SEQ ID NO: 75069 - RNA, 23 nt, Human
gucccaauuccuccauguacccc

SEQ ID NO: 75070 - RNA, 20 nt, Human
gucuggguggugcugguggc

SEQ ID NO: 75071 - RNA, 18 nt, Human
uaaaaaaacugacuccag

SEQ ID NO: 75072 - RNA, 21 nt, Human
uaaaaaaacugacuccaggga

SEQ ID NO: 75073 - RNA, 24 nt, Human
uacagucccugucucuaaagcaaa

SEQ ID NO: 75074 - RNA, 19 nt, Human
uaccacagggacacacgcc

SEQ ID NO: 75075 - RNA, 21 nt, Human
uaccccacaagcuucugucca

SEQ ID NO: 75076 - RNA, 21 nt, Human
uacuugugaccaaagugaacc

SEQ ID NO: 75077 - RNA, 20 nt, Human
uagaucauuuuccaccucug

SEQ ID NO: 75078 - RNA, 18 nt, Human
uagcacaacccacagguu

SEQ ID NO: 75079 - RNA, 23 nt, Human
uagcaggucccauaccuggaagc

SEQ ID NO: 75080 - RNA, 21 nt, Human
uagcuaaucccccucccccag

SEQ ID NO: 75081 - RNA, 19 nt, Human
uaggagcggggaggggaag

SEQ ID NO: 75082 - RNA, 19 nt, Human
uagggcaucagcuguugaa

SEQ ID NO: 75083 - RNA, 19 nt, Human
uaggggauucguuuuuuau

SEQ ID NO: 75084 - RNA, 20 nt, Human
uagguuuacagaauauucug

SEQ ID NO: 75085 - RNA, 23 nt, Human
uauaaaucacuugcucugugggu

SEQ ID NO: 75086 - RNA, 21 nt, Human
uauacagucccugucucuaaa

SEQ ID NO: 75087 - RNA, 24 nt, Human
uauauuaccaauagcugauuuuuu

SEQ ID NO: 75088 - RNA, 20 nt, Human
uaucaggaacuagaucauuu

SEQ ID NO: 75089 - RNA, 23 nt, Human
uaucagguaauuccacacuuagc

SEQ ID NO: 75090 - RNA, 19 nt, Human
uaugaccaggaagacagag

SEQ ID NO: 75091 - RNA, 21 nt, Human
uaugcccuggaaagggcuggg

SEQ ID NO: 75092 - RNA, 18 nt, Human
uauggcagaaauucaugu

SEQ ID NO: 75093 - RNA, 19 nt, Human
ucaaauaaauggaggggcc

SEQ ID NO: 75094 - RNA, 20 nt, Human
ucacagauggauucuuccuc

SEQ ID NO: 75095 - RNA, 20 nt, Human
ucaggaacuagaucauuuuc

SEQ ID NO: 75096 - RNA, 20 nt, Human
ucaggagagggagcuugggg

SEQ ID NO: 75097 - RNA, 22 nt, Human
uccaaaauccuuugaagccaaa

SEQ ID NO: 75098 - RNA, 21 nt, Human
uccccacuaccuagcccaaga

SEQ ID NO: 75099 - RNA, 22 nt, Human
uccccacuaccuagcccaagaa

SEQ ID NO: 75100 - RNA, 19 nt, Human
ucccccucccccagaaggu

SEQ ID NO: 75101 - RNA, 19 nt, Human
ucccucuguccacuggccu

SEQ ID NO: 75102 - RNA, 20 nt, Human
ucccucuguccacuggccuc

SEQ ID NO: 75103 - RNA, 19 nt, Human
ucccuggaacccaccuugc

SEQ ID NO: 75104 - RNA, 19 nt, Human
ucccugguccccccggcgg

SEQ ID NO: 75105 - RNA, 18 nt, Human
ucccugucucuaaagcaa

SEQ ID NO: 75106 - RNA, 18 nt, Human
uccgcagagcacgggagc

SEQ ID NO: 75107 - RNA, 21 nt, Human
uccuuguauuucccucucccu

SEQ ID NO: 75108 - RNA, 22 nt, Human
ucggcacggcggcggccagccu

SEQ ID NO: 75109 - RNA, 24 nt, Human
ucuaaagcaaauagcaaacugugc

SEQ ID NO: 75110 - RNA, 22 nt, Human
ucuccaggcagccuugauacug

SEQ ID NO: 75111 - RNA, 20 nt, Human
ucucccuucucccucugucc

SEQ ID NO: 75112 - RNA, 21 nt, Human
ucucuaaagcaaauagcaaac

SEQ ID NO: 75113 - RNA, 20 nt, Human
ucuuauugaauauuuuacug

SEQ ID NO: 75114 - RNA, 20 nt, Human
ucuucucuuuucuguuuccu

SEQ ID NO: 75115 - RNA, 24 nt, Human
ucuucugagaugggaugcuaucuu

SEQ ID NO: 75116 - RNA, 21 nt, Human
ucuugugguggaggacauaag

SEQ ID NO: 75117 - RNA, 23 nt, Human
ucuuucuucucuuuucuguuucc

SEQ ID NO: 75118 - RNA, 19 nt, Human
ucuuuggcuagauaagccc

SEQ ID NO: 75119 - RNA, 18 nt, Human
ucuuugguuaaugaaaug

SEQ ID NO: 75120 - RNA, 23 nt, Human
ugaaaacaacacccaucuucuga

SEQ ID NO: 75121 - RNA, 19 nt, Human
ugaaguuucaagcagcaga

SEQ ID NO: 75122 - RNA, 24 nt, Human
ugaccaagaguauucccgccagca

SEQ ID NO: 75123 - RNA, 18 nt, Human
ugaccaggaagacagagc

SEQ ID NO: 75124 - RNA, 21 nt, Human
ugagcuccagacaggcacugg

SEQ ID NO: 75125 - RNA, 19 nt, Human
ugaggugcucuggccacag

SEQ ID NO: 75126 - RNA, 21 nt, Human
ugaucuugggaugcuggauuu

SEQ ID NO: 75127 - RNA, 21 nt, Human
ugccugucaccucacagaugg

SEQ ID NO: 75128 - RNA, 20 nt, Human
ugcucuggccacaggugcca

SEQ ID NO: 75129 - RNA, 22 nt, Human
uggaaagcccacucuugcagga

SEQ ID NO: 75130 - RNA, 18 nt, Human
uggcaaaauggaagacca

SEQ ID NO: 75131 - RNA, 21 nt, Human
uggcccacguccgucccuggc

SEQ ID NO: 75132 - RNA, 20 nt, Human
uggccugaguacucagcucu

SEQ ID NO: 75133 - RNA, 21 nt, Human
uggccugaguacucagcucuu

SEQ ID NO: 75134 - RNA, 23 nt, Human
uggcugcaaagcuccagaggaag

SEQ ID NO: 75135 - RNA, 20 nt, Human
uggcuucuaaucaagcucuu

SEQ ID NO: 75136 - RNA, 20 nt, Human
ugggaaaaauggagaccaaa

SEQ ID NO: 75137 - RNA, 23 nt, Human
ugggaaugaagagaacccagaua

SEQ ID NO: 75138 - RNA, 24 nt, Human
ugggacagucauuuuucaggagca

SEQ ID NO: 75139 - RNA, 20 nt, Human
ugggaggggcgggcauggcg

SEQ ID NO: 75140 - RNA, 19 nt, Human
ugggaugcuggauuuuaau

SEQ ID NO: 75141 - RNA, 23 nt, Human
ugggcagcuggcugaggccagga

SEQ ID NO: 75142 - RNA, 19 nt, Human
ugguggguggggagggucc

SEQ ID NO: 75143 - RNA, 18 nt, Human
uguagaauaaaggguggu

SEQ ID NO: 75144 - RNA, 21 nt, Human
ugucuuuguacucccucuccu

SEQ ID NO: 75145 - RNA, 19 nt, Human
ugugguccaggggaaucuc

SEQ ID NO: 75146 - RNA, 24 nt, Human
uguugaaugaauguucaacauuau

SEQ ID NO: 75147 - RNA, 24 nt, Human
uuccaaaauccuuugaagccaaag

SEQ ID NO: 75148 - RNA, 20 nt, Human
uuccagccgcccccauuugu

SEQ ID NO: 75149 - RNA, 19 nt, Human
uuccuccauguaccccaca

SEQ ID NO: 75150 - RNA, 22 nt, Human
uuccugggaccuccuuggcauc

SEQ ID NO: 75151 - RNA, 21 nt, Human
uucuguuuccuacagguacag

SEQ ID NO: 75152 - RNA, 22 nt, Human
uugccugucaccucacagaugg

SEQ ID NO: 75153 - RNA, 18 nt, Human
uugcugccacugucuugg

SEQ ID NO: 75154 - RNA, 22 nt, Human
uuggagaguugugcaugggagc

SEQ ID NO: 75155 - RNA, 20 nt, Human
uuggcuagauaagcccuucc

SEQ ID NO: 75156 - RNA, 20 nt, Human
uuuaaaaaaacugacuccag

SEQ ID NO: 75157 - RNA, 20 nt, Human
uuuccaaaauccuuugaagc

SEQ ID NO: 75158 - RNA, 20 nt, Human
uuuccuauccuuuuaucuuu

SEQ ID NO: 75159 - RNA, 20 nt, Human
uuugucuuucauccuugccu

SEQ ID NO: 75160 - RNA, 18 nt, Human
aaagacugagcggggaca

SEQ ID NO: 75161 - RNA, 19 nt, Human
aaagcuugaaaaucaagaa

SEQ ID NO: 75162 - RNA, 18 nt, Human
aaaggccuuccaucuuca

SEQ ID NO: 75163 - RNA, 18 nt, Human
aaaggccuuccaucuuca

SEQ ID NO: 75164 - RNA, 19 nt, Human
aaaugggcucgcucaaaga

SEQ ID NO: 75165 - RNA, 18 nt, Human
aagacagugaaucuagaa

SEQ ID NO: 75166 - RNA, 20 nt, Human
aagcgccaccaucgaucccg

SEQ ID NO: 75167 - RNA, 20 nt, Human
aagcgccaccaucgaucccg

SEQ ID NO: 75168 - RNA, 20 nt, Human
acaaaaagcuuccuguaagc

SEQ ID NO: 75169 - RNA, 20 nt, Human
acaaaaagcuuccuguaagc

SEQ ID NO: 75170 - RNA, 19 nt, Human
accugcgccugcccucccc

SEQ ID NO: 75171 - RNA, 24 nt, Human
agagauugaagacgggugggcaca

SEQ ID NO: 75172 - RNA, 24 nt, Human
agagauugaagacgggugggcaca

SEQ ID NO: 75173 - RNA, 18 nt, Human
agcaagaguaagcauaug

SEQ ID NO: 75174 - RNA, 18 nt, Human
agcaagaguaagcauaug

SEQ ID NO: 75175 - RNA, 20 nt, Human
agccccucccccgcggccaa

SEQ ID NO: 75176 - RNA, 23 nt, Human
aggacccugggcaaagucucaaa

SEQ ID NO: 75177 - RNA, 18 nt, Human
aggcucgcgggaggggag

SEQ ID NO: 75178 - RNA, 18 nt, Human
aggcucgcgggaggggag

SEQ ID NO: 75179 - RNA, 19 nt, Human
auaggacacaauccacaaa

SEQ ID NO: 75180 - RNA, 22 nt, Human
auuaagacaaggaggauggcuc

SEQ ID NO: 75181 - RNA, 22 nt, Human
caaaagacagugaaucuagaaa

SEQ ID NO: 75182 - RNA, 21 nt, Human
caagaguaagcauaugugaua

SEQ ID NO: 75183 - RNA, 21 nt, Human
caagaguaagcauaugugaua

SEQ ID NO: 75184 - RNA, 20 nt, Human
cacaaaaugggcucgcucaa

SEQ ID NO: 75185 - RNA, 18 nt, Human
cacagagaaacccacaaa

SEQ ID NO: 75186 - RNA, 18 nt, Human
cacagagaaacccacaaa

SEQ ID NO: 75187 - RNA, 26 nt, Human
cacaggacccugggcaaagucucaaa

SEQ ID NO: 75188 - RNA, 26 nt, Human
cacaggacccugggcaaagucucaaa

SEQ ID NO: 75189 - RNA, 24 nt, Human
cacaguucagcaccuguugggucu

SEQ ID NO: 75190 - RNA, 24 nt, Human
cacaguucagcaccuguugggucu

SEQ ID NO: 75191 - RNA, 19 nt, Human
caccaacaauacaacauaa

SEQ ID NO: 75192 - RNA, 19 nt, Human
caccaacaauacaacauaa

SEQ ID NO: 75193 - RNA, 20 nt, Human
caccggaacggcagcagcag

SEQ ID NO: 75194 - RNA, 23 nt, Human
caccugcgccugcccuccccacc

SEQ ID NO: 75195 - RNA, 24 nt, Human
cagagauugaagacgggugggcac

SEQ ID NO: 75196 - RNA, 24 nt, Human
cagagauugaagacgggugggcac

SEQ ID NO: 75197 - RNA, 21 nt, Human
ccaccaucgaucccggcugcu

SEQ ID NO: 75198 - RNA, 23 nt, Human
ccagccccucccccgcggccaag

SEQ ID NO: 75199 - RNA, 21 nt, Human
ccaggggaggaggcucgcggg

SEQ ID NO: 75200 - RNA, 22 nt, Human
cccacggcggggcccggggggc

SEQ ID NO: 75201 - RNA, 23 nt, Human
cccagccccucccccgcggccaa

SEQ ID NO: 75202 - RNA, 22 nt, Human
ccccaggccccaggcugauucu

SEQ ID NO: 75203 - RNA, 22 nt, Human
ccccaggccccaggcugauucu

SEQ ID NO: 75204 - RNA, 18 nt, Human
ccccaggcugauucuccu

SEQ ID NO: 75205 - RNA, 18 nt, Human
ccccaggcugauucuccu

SEQ ID NO: 75206 - RNA, 20 nt, Human
ccccaggcugauucuccugc

SEQ ID NO: 75207 - RNA, 22 nt, Human
ccccaggcugauucuccugcca

SEQ ID NO: 75208 - RNA, 22 nt, Human
ccccaggcugauucuccugcca

SEQ ID NO: 75209 - RNA, 24 nt, Human
ccccaggcugauucuccugccauc

SEQ ID NO: 75210 - RNA, 24 nt, Human
ccccaggcugauucuccugccauc

SEQ ID NO: 75211 - RNA, 19 nt, Human
cccccauccaggcacagga

SEQ ID NO: 75212 - RNA, 19 nt, Human
cccccauccaggcacagga

SEQ ID NO: 75213 - RNA, 22 nt, Human
cccgaauuuccucggaaagcgc

SEQ ID NO: 75214 - RNA, 23 nt, Human
cccgcagcggcccagccccuccc

SEQ ID NO: 75215 - RNA, 18 nt, Human
cccuccccacccucgccg

SEQ ID NO: 75216 - RNA, 19 nt, Human
cccucccccgcggccaagg

SEQ ID NO: 75217 - RNA, 20 nt, Human
ccgcugcccccucuggcggc

SEQ ID NO: 75218 - RNA, 18 nt, Human
ccggcgcgcggggcugcg

SEQ ID NO: 75219 - RNA, 19 nt, Human
ccucuggcggccgcgacug

SEQ ID NO: 75220 - RNA, 21 nt, Human
cgcaccaacaauacaacauaa

SEQ ID NO: 75221 - RNA, 21 nt, Human
cgcaccaacaauacaacauaa

SEQ ID NO: 75222 - RNA, 23 nt, Human
cgccaccaucgaucccggcugcu

SEQ ID NO: 75223 - RNA, 21 nt, Human
cgcgcccagccuagccggucc

SEQ ID NO: 75224 - RNA, 20 nt, Human
cgcggggcugcgggcaggga

SEQ ID NO: 75225 - RNA, 24 nt, Human
cgggaggagggcccaggggaggag

SEQ ID NO: 75226 - RNA, 22 nt, Human
cgggaggggagaaggcggaggc

SEQ ID NO: 75227 - RNA, 23 nt, Human
cggggcugcgggcagggaugggc

SEQ ID NO: 75228 - RNA, 24 nt, Human
cggggcugcgggcagggaugggcg

SEQ ID NO: 75229 - RNA, 22 nt, Human
cguggucaaggcugccugcacc

SEQ ID NO: 75230 - RNA, 22 nt, Human
cguggucaaggcugccugcacc

SEQ ID NO: 75231 - RNA, 23 nt, Human
cugcacccccauccaggcacagg

SEQ ID NO: 75232 - RNA, 23 nt, Human
cugcacccccauccaggcacagg

SEQ ID NO: 75233 - RNA, 18 nt, Human
cugcccccucuggcggcc

SEQ ID NO: 75234 - RNA, 20 nt, Human
cuggcggccgcgacugcccc

SEQ ID NO: 75235 - RNA, 18 nt, Human
cuguaccacuuugaccca

SEQ ID NO: 75236 - RNA, 18 nt, Human
cuguaccacuuugaccca

SEQ ID NO: 75237 - RNA, 23 nt, Human
cuguggcucugguuccaggucuc

SEQ ID NO: 75238 - RNA, 23 nt, Human
cuguggcucugguuccaggucuc

SEQ ID NO: 75239 - RNA, 21 nt, Human
cuguugggucuuggcuguugg

SEQ ID NO: 75240 - RNA, 21 nt, Human
cuguugggucuuggcuguugg

SEQ ID NO: 75241 - RNA, 24 nt, Human
gagccaaggcuugguuuuguuuua

SEQ ID NO: 75242 - RNA, 24 nt, Human
gagccaaggcuugguuuuguuuua

SEQ ID NO: 75243 - RNA, 19 nt, Human
gagccgccccagcccgcgc

SEQ ID NO: 75244 - RNA, 21 nt, Human
gaguucaugguugcuugaggu

SEQ ID NO: 75245 - RNA, 21 nt, Human
gaguucaugguugcuugaggu

SEQ ID NO: 75246 - RNA, 18 nt, Human
gcccagccuagccggucc

SEQ ID NO: 75247 - RNA, 21 nt, Human
gccccgcagcggcccagcccc

SEQ ID NO: 75248 - RNA, 19 nt, Human
gcccuccccacccucgccg

SEQ ID NO: 75249 - RNA, 22 nt, Human
gccugcccuccccacccucgcc

SEQ ID NO: 75250 - RNA, 21 nt, Human
gcggcggcggggaggacggga

SEQ ID NO: 75251 - RNA, 22 nt, Human
gcggggcugcgggcagggaugg

SEQ ID NO: 75252 - RNA, 24 nt, Human
gcugcugcccuggaaaugugauuu

SEQ ID NO: 75253 - RNA, 24 nt, Human
gcugcugcccuggaaaugugauuu

SEQ ID NO: 75254 - RNA, 25 nt, Human
ggacacaauccacaaaaugggcucg

SEQ ID NO: 75255 - RNA, 19 nt, Human
ggaggaggcucgcgggagg

SEQ ID NO: 75256 - RNA, 28 nt, Human
ggaggggaggaggcucgcgggagggggg

SEQ ID NO: 75257 - RNA, 24 nt, Human
ggcggcggcggggaggacgggagg

SEQ ID NO: 75258 - RNA, 21 nt, Human
gggaggggagaaggcggaggc

SEQ ID NO: 75259 - RNA, 21 nt, Human
gggcagggaugggcgcgcacc

SEQ ID NO: 75260 - RNA, 24 nt, Human
ggugaggggaacagccguggucaa

SEQ ID NO: 75261 - RNA, 24 nt, Human
ggugaggggaacagccguggucaa

SEQ ID NO: 75262 - RNA, 24 nt, Human
gguugcuugaggucaggccuggcu

SEQ ID NO: 75263 - RNA, 24 nt, Human
gguugcuugaggucaggccuggcu

SEQ ID NO: 75264 - RNA, 21 nt, Human
guccaccugcgccugcccucc

SEQ ID NO: 75265 - RNA, 19 nt, Human
gugaauucuggcucccauu

SEQ ID NO: 75266 - RNA, 19 nt, Human
gugaauucuggcucccauu

SEQ ID NO: 75267 - RNA, 21 nt, Human
guggucaaggcugccugcacc

SEQ ID NO: 75268 - RNA, 21 nt, Human
guggucaaggcugccugcacc

SEQ ID NO: 75269 - RNA, 20 nt, Human
guucaugguugcuugagguc

SEQ ID NO: 75270 - RNA, 20 nt, Human
guucaugguugcuugagguc

SEQ ID NO: 75271 - RNA, 22 nt, Human
uaauagcugaguucaugguugc

SEQ ID NO: 75272 - RNA, 22 nt, Human
uaauagcugaguucaugguugc

SEQ ID NO: 75273 - RNA, 24 nt, Human
uacaaaaagcuuccuguaagcuaa

SEQ ID NO: 75274 - RNA, 24 nt, Human
uacaaaaagcuuccuguaagcuaa

SEQ ID NO: 75275 - RNA, 23 nt, Human
uagcugaguucaugguugcuuga

SEQ ID NO: 75276 - RNA, 23 nt, Human
uagcugaguucaugguugcuuga

SEQ ID NO: 75277 - RNA, 21 nt, Human
ucagagcacagagaaacccac

SEQ ID NO: 75278 - RNA, 21 nt, Human
ucagagcacagagaaacccac

SEQ ID NO: 75279 - RNA, 20 nt, Human
uccaccugcgccugcccucc

SEQ ID NO: 75280 - RNA, 21 nt, Human
uccaggucucaaggguacagc

SEQ ID NO: 75281 - RNA, 21 nt, Human
uccaggucucaaggguacagc

SEQ ID NO: 75282 - RNA, 23 nt, Human
ucccccgcggccaaggucacagc

SEQ ID NO: 75283 - RNA, 23 nt, Human
ucgaucccggcugcugcccugga

SEQ ID NO: 75284 - RNA, 23 nt, Human
ucgaucccggcugcugcccugga

SEQ ID NO: 75285 - RNA, 19 nt, Human
ucgccgggcucaggccgcg

SEQ ID NO: 75286 - RNA, 24 nt, Human
ucgccgggcucaggccgcgccucu

SEQ ID NO: 75287 - RNA, 19 nt, Human
ucgcucaaagacugagcgg

SEQ ID NO: 75288 - RNA, 18 nt, Human
ucucaaggguacagcuug

SEQ ID NO: 75289 - RNA, 20 nt, Human
ucucaaggguacagcuuggu

SEQ ID NO: 75290 - RNA, 18 nt, Human
ucugaccagagaggacuc

SEQ ID NO: 75291 - RNA, 20 nt, Human
ucuuccccgggaaacucgag

SEQ ID NO: 75292 - RNA, 20 nt, Human
ugaagagagaagagaacgag

SEQ ID NO: 75293 - RNA, 20 nt, Human
ugaagagagaagagaacgag

SEQ ID NO: 75294 - RNA, 20 nt, Human
ugaccuccuagugaauucuu

SEQ ID NO: 75295 - RNA, 20 nt, Human
ugaccuccuagugaauucuu

SEQ ID NO: 75296 - RNA, 22 nt, Human
ugaguucaugguugcuugaggu

SEQ ID NO: 75297 - RNA, 20 nt, Human
uggaaaugugauuuucuuaa

SEQ ID NO: 75298 - RNA, 20 nt, Human
uggaaaugugauuuucuuaa

SEQ ID NO: 75299 - RNA, 22 nt, Human
uggcacauguagacacuuuggc

SEQ ID NO: 75300 - RNA, 22 nt, Human
uggcacauguagacacuuuggc

SEQ ID NO: 75301 - RNA, 21 nt, Human
ugggcgcgcaccgggaccggc

SEQ ID NO: 75302 - RNA, 21 nt, Human
ugggucuuggcuguugggaug

SEQ ID NO: 75303 - RNA, 21 nt, Human
ugggucuuggcuguugggaug

SEQ ID NO: 75304 - RNA, 25 nt, Human
uuaagacaaggaggauggcuccaca

SEQ ID NO: 75305 - RNA, 21 nt, Human
uucagaagaggcuugugagga

SEQ ID NO: 75306 - RNA, 20 nt, Human
uucagagcacagagaaaccc

SEQ ID NO: 75307 - RNA, 20 nt, Human
uucagagcacagagaaaccc

SEQ ID NO: 75308 - RNA, 23 nt, Human
uucagagcacagagaaacccaca

SEQ ID NO: 75309 - RNA, 24 nt, Human
uucagagcacagagaaacccacaa

SEQ ID NO: 75310 - RNA, 21 nt, Human
uuccugguugaugcacaguuc

SEQ ID NO: 75311 - RNA, 21 nt, Human
uuccugguugaugcacaguuc

SEQ ID NO: 75312 - RNA, 21 nt, Human
uucuuggaaguagggaggauu

SEQ ID NO: 75313 - RNA, 21 nt, Human
uucuuggaaguagggaggauu

SEQ ID NO: 75314 - RNA, 21 nt, Human
uugguuuuguuuuauguuggu

SEQ ID NO: 75315 - RNA, 21 nt, Human
uugguuuuguuuuauguuggu

SEQ ID NO: 75316 - RNA, 20 nt, Human
uuucuuggaaguagggagga

SEQ ID NO: 75317 - RNA, 20 nt, Human
uuucuuggaaguagggagga

SEQ ID NO: 75318 - RNA, 22 nt, Human
aaaaguaagcaacauucuuucc

SEQ ID NO: 75319 - RNA, 24 nt, Human
aaaucuucccaauguagcuuaaag

SEQ ID NO: 75320 - RNA, 21 nt, Human
aaaugccaggaaauaggaagu

SEQ ID NO: 75321 - RNA, 19 nt, Human
aaauucccuugugguaaac

SEQ ID NO: 75322 - RNA, 18 nt, Human
aacacaucuaaccccagc

SEQ ID NO: 75323 - RNA, 18 nt, Human
aacagcuuuacauguugg

SEQ ID NO: 75324 - RNA, 21 nt, Human
aacauuuaaaauauuuacaga

SEQ ID NO: 75325 - RNA, 20 nt, Human
aaccaagugcuuuacaaauu

SEQ ID NO: 75326 - RNA, 23 nt, Human
aaccacugaaaauauacuagcaa

SEQ ID NO: 75327 - RNA, 27 nt, Human
aaccugcuuuucaaaugcaaacccagu

SEQ ID NO: 75328 - RNA, 22 nt, Human
aacuacuaaaggaaaaaaacag

SEQ ID NO: 75329 - RNA, 23 nt, Human
aagcagcccccgucuuaggccaa

SEQ ID NO: 75330 - RNA, 21 nt, Human
aagccugauuuuaggagccga

SEQ ID NO: 75331 - RNA, 18 nt, Human
aagcggggggcagggagg

SEQ ID NO: 75332 - RNA, 22 nt, Human
aaugccaggaaauaggaagucc

SEQ ID NO: 75333 - RNA, 18 nt, Human
aauguuauuuuacugaau

SEQ ID NO: 75334 - RNA, 23 nt, Human
acacacacacacacacacacaca

SEQ ID NO: 75335 - RNA, 23 nt, Human
acacacacacacacacacacaca

SEQ ID NO: 75336 - RNA, 21 nt, Human
acacauacacacacacacaca

SEQ ID NO: 75337 - RNA, 27 nt, Human
acuaaaucuucccaauguagcuuaaag

SEQ ID NO: 75338 - RNA, 19 nt, Human
acugaagcgagagcgcccg

SEQ ID NO: 75339 - RNA, 23 nt, Human
acugaguguccacaugcaaccug

SEQ ID NO: 75340 - RNA, 19 nt, Human
agaacauacaaaccacuga

SEQ ID NO: 75341 - RNA, 23 nt, Human
agagagaacauacaaaccacuga

SEQ ID NO: 75342 - RNA, 25 nt, Human
agucagugacagagagaacauacaa

SEQ ID NO: 75343 - RNA, 24 nt, Human
auaggugcucaguuaucuauuuug

SEQ ID NO: 75344 - RNA, 25 nt, Human
auggagaaccaagacuguauccaca

SEQ ID NO: 75345 - RNA, 18 nt, Human
caaaagacaaacguaaaa

SEQ ID NO: 75346 - RNA, 26 nt, Human
caaacguaaaaucuuuuuuaucuguc

SEQ ID NO: 75347 - RNA, 21 nt, Human
caaagcccuaagauucaggua

SEQ ID NO: 75348 - RNA, 20 nt, Human
cacacacacacacacacaca

SEQ ID NO: 75349 - RNA, 20 nt, Human
cacacacacacacacacaca

SEQ ID NO: 75350 - RNA, 20 nt, Human
cacacacacacacacacaca

SEQ ID NO: 75351 - RNA, 20 nt, Human
cacacacacacacacacaca

SEQ ID NO: 75352 - RNA, 20 nt, Human
cacacacacacacacacaca

SEQ ID NO: 75353 - RNA, 22 nt, Human
cacacacacacacacacacaca

SEQ ID NO: 75354 - RNA, 22 nt, Human
cacacacacacacacacacaca

SEQ ID NO: 75355 - RNA, 18 nt, Human
cacuuauggccaaaagac

SEQ ID NO: 75356 - RNA, 24 nt, Human
cagaaaacuuucccacuuauggcc

SEQ ID NO: 75357 - RNA, 22 nt, Human
cauacacaaacugauacaacca

SEQ ID NO: 75358 - RNA, 22 nt, Human
caugaaggaaaaggcauacacu

SEQ ID NO: 75359 - RNA, 18 nt, Human
cauguugguaagcucucc

SEQ ID NO: 75360 - RNA, 21 nt, Human
cccuaagauucagguaagacc

SEQ ID NO: 75361 - RNA, 20 nt, Human
ccucccccuacacccugauc

SEQ ID NO: 75362 - RNA, 19 nt, Human
cgaagaacaaagcccuaag

SEQ ID NO: 75363 - RNA, 22 nt, Human
cggcagccucaaaaaaaauauu

SEQ ID NO: 75364 - RNA, 21 nt, Human
cucauaauccugucauuuguc

SEQ ID NO: 75365 - RNA, 23 nt, Human
cucccccuacacccugaucaaaa

SEQ ID NO: 75366 - RNA, 21 nt, Human
cuggcauuggugacccacggu

SEQ ID NO: 75367 - RNA, 22 nt, Human
gagagcaaggauucaaccugcu

SEQ ID NO: 75368 - RNA, 18 nt, Human
gcaaaaucauuucuuugu

SEQ ID NO: 75369 - RNA, 23 nt, Human
gcagccucaaaaaaaagggaacc

SEQ ID NO: 75370 - RNA, 21 nt, Human
gccacuguauucugaguccua

SEQ ID NO: 75371 - RNA, 20 nt, Human
gcggcccgacugacugaagc

SEQ ID NO: 75372 - RNA, 23 nt, Human
ggagaaaucaugguugacuuaaa

SEQ ID NO: 75373 - RNA, 23 nt, Human
ggagaagcagcccccgucuuagg

SEQ ID NO: 75374 - RNA, 22 nt, Human
gggcaaggccaacuugcuucag

SEQ ID NO: 75375 - RNA, 20 nt, Human
gugggugguggcugcccaca

SEQ ID NO: 75376 - RNA, 24 nt, Human
uaaaauuacaaguaucaaagaaau

SEQ ID NO: 75377 - RNA, 23 nt, Human
uaagaaauuacacuuggccaaua

SEQ ID NO: 75378 - RNA, 21 nt, Human
uacaaaaauauucccaguagc

SEQ ID NO: 75379 - RNA, 22 nt, Human
uacaaaccacugaaaauauacu

SEQ ID NO: 75380 - RNA, 22 nt, Human
uacaaguaucaaagaaauaccu

SEQ ID NO: 75381 - RNA, 20 nt, Human
uacacacacacacacacaca

SEQ ID NO: 75382 - RNA, 21 nt, Human
uacaguagcaauuaaagcaaa

SEQ ID NO: 75383 - RNA, 25 nt, Human
uagaaaaaacuucuuuagaaguuaa

SEQ ID NO: 75384 - RNA, 20 nt, Human
uagcaauauccucccccuac

SEQ ID NO: 75385 - RNA, 29 nt, Human
uagcaauauccucccccuacacccugauu

SEQ ID NO: 75386 - RNA, 21 nt, Human
uauagcaaacuguuaaaaaaa

SEQ ID NO: 75387 - RNA, 23 nt, Human
uauaugcauuuuuuuuaauugcu

SEQ ID NO: 75388 - RNA, 21 nt, Human
uauucccaguagcugacaccc

SEQ ID NO: 75389 - RNA, 23 nt, Human
ucaaagcaaguacaguagcaauu

SEQ ID NO: 75390 - RNA, 22 nt, Human
ucaacacuauaaacuacuccuc

SEQ ID NO: 75391 - RNA, 19 nt, Human
ucacauggauuuuucugaa

SEQ ID NO: 75392 - RNA, 22 nt, Human
ucagugacagagagaacauaca

SEQ ID NO: 75393 - RNA, 21 nt, Human
ucauaauccugucauuugucu

SEQ ID NO: 75394 - RNA, 20 nt, Human
uccaaagggacaaaaaugcc

SEQ ID NO: 75395 - RNA, 18 nt, Human
uccaggaggcaaaaucau

SEQ ID NO: 75396 - RNA, 19 nt, Human
ucuggcauuggugacccac

SEQ ID NO: 75397 - RNA, 23 nt, Human
ucuuucagcccucugauuuuggu

SEQ ID NO: 75398 - RNA, 21 nt, Human
ugaaaacauuucaaaauucug

SEQ ID NO: 75399 - RNA, 18 nt, Human
ugaagaggagaagcagcc

SEQ ID NO: 75400 - RNA, 22 nt, Human
ugaagaggagaagcagcccccg

SEQ ID NO: 75401 - RNA, 24 nt, Human
ugaagcugaaauuuaaaauuacaa

SEQ ID NO: 75402 - RNA, 25 nt, Human
ugaauucaacauaacagcuuuuaaa

SEQ ID NO: 75403 - RNA, 22 nt, Human
ugacagagagaacauacaaacc

SEQ ID NO: 75404 - RNA, 23 nt, Human
ugacuuaaaggaaauucccuugu

SEQ ID NO: 75405 - RNA, 18 nt, Human
ugagaaggccaguucaua

SEQ ID NO: 75406 - RNA, 22 nt, Human
ugagguaggaaaucaaggguuc

SEQ ID NO: 75407 - RNA, 22 nt, Human
ugccaaaacuucaggagaaaau

SEQ ID NO: 75408 - RNA, 20 nt, Human
ugccaggaaauaggaagucc

SEQ ID NO: 75409 - RNA, 22 nt, Human
ugcugagaagauccauagcuuu

SEQ ID NO: 75410 - RNA, 20 nt, Human
ugcuugggaagaaauuuucu

SEQ ID NO: 75411 - RNA, 18 nt, Human
uggccaaaagacaaacgu

SEQ ID NO: 75412 - RNA, 18 nt, Human
uggcuuaagauuuuacau

SEQ ID NO: 75413 - RNA, 20 nt, Human
ugguaagcucuccagauucu

SEQ ID NO: 75414 - RNA, 21 nt, Human
ugguagagacugaagcggggg

SEQ ID NO: 75415 - RNA, 23 nt, Human
ugugacugaguguccacaugcaa

SEQ ID NO: 75416 - RNA, 20 nt, Human
uguuaugcgauaggugcuca

SEQ ID NO: 75417 - RNA, 21 nt, Human
uucacaaaccugcagaguugc

SEQ ID NO: 75418 - RNA, 19 nt, Human
uugagaaggccaguucaua

SEQ ID NO: 75419 - RNA, 18 nt, Human
uugagcaacagaugguca

SEQ ID NO: 75420 - RNA, 21 nt, Human
uuguuuugaauaugacaauuu

SEQ ID NO: 75421 - RNA, 18 nt, Human
uuuaucuguccaucugca

SEQ ID NO: 75422 - RNA, 21 nt, Human
aaaaaacaaaaacccagaggc

SEQ ID NO: 75423 - RNA, 25 nt, Human
aaaaaauaaggacaagccuaagaac

SEQ ID NO: 75424 - RNA, 19 nt, Human
aaaaacaaacaaaaccccc

SEQ ID NO: 75425 - RNA, 19 nt, Human
aaaaagcuuccaacacuga

SEQ ID NO: 75426 - RNA, 22 nt, Human
aaaacaaaaacaaaaacaaaaa

SEQ ID NO: 75427 - RNA, 23 nt, Human
aaaacaaaaacaaaaacaaaaaa

SEQ ID NO: 75428 - RNA, 22 nt, Human
aaaacaaacaaaaccccccaaa

SEQ ID NO: 75429 - RNA, 23 nt, Human
aaaaccaaaccaaacgaaaaaga

SEQ ID NO: 75430 - RNA, 23 nt, Human
aaaaccccccaaacaaacaaaaa

SEQ ID NO: 75431 - RNA, 26 nt, Human
aaacaaaaaacaccuuguucuuuagu

SEQ ID NO: 75432 - RNA, 24 nt, Human
aaacaaaaacaaaaacaaaaaaca

SEQ ID NO: 75433 - RNA, 26 nt, Human
aaacaaaaacaaaaacaaaaacaaac

SEQ ID NO: 75434 - RNA, 24 nt, Human
aaacaaaaacaaaaacaaacaaaa

SEQ ID NO: 75435 - RNA, 26 nt, Human
aaacaaaaacaaacaaaaccccccaa

SEQ ID NO: 75436 - RNA, 18 nt, Human
aaacaaaaccccccaaac

SEQ ID NO: 75437 - RNA, 19 nt, Human
aaacaaaaccccccaaacc

SEQ ID NO: 75438 - RNA, 22 nt, Human
aaacaaacaaaaccccccaaac

SEQ ID NO: 75439 - RNA, 23 nt, Human
aaacaaacaaaaccccccaaaca

SEQ ID NO: 75440 - RNA, 19 nt, Human
aaacaaagucaaccaucua

SEQ ID NO: 75441 - RNA, 22 nt, Human
aaacaagaaaaaacaaaaaccc

SEQ ID NO: 75442 - RNA, 23 nt, Human
aaacaagaaaaaacaaaaaccca

SEQ ID NO: 75443 - RNA, 24 nt, Human
aaacaagaaaaaacaaaaacccag

SEQ ID NO: 75444 - RNA, 22 nt, Human
aaacagcccgugguuggagggu

SEQ ID NO: 75445 - RNA, 20 nt, Human
aaacauacacuuucaacaca

SEQ ID NO: 75446 - RNA, 19 nt, Human
aaaccaaaccaaacgaaaa

SEQ ID NO: 75447 - RNA, 26 nt, Human
aaaccacgagaaaaaccacaaucacu

SEQ ID NO: 75448 - RNA, 26 nt, Human
aaaccccccaaacaaacaaaaaacaa

SEQ ID NO: 75449 - RNA, 19 nt, Human
aaagacacacacacaucac

SEQ ID NO: 75450 - RNA, 19 nt, Human
aacaaaaacaaaaaacacc

SEQ ID NO: 75451 - RNA, 23 nt, Human
aacaaaaacaaaaacaaacaaaa

SEQ ID NO: 75452 - RNA, 24 nt, Human
aacagaaauggugucuagacaaaa

SEQ ID NO: 75453 - RNA, 21 nt, Human
aaccaaacgaaaaagaaaucu

SEQ ID NO: 75454 - RNA, 25 nt, Human
aaccaaguggguauucuucacaaaa

SEQ ID NO: 75455 - RNA, 23 nt, Human
aaccacagaaaccugaggaaaug

SEQ ID NO: 75456 - RNA, 23 nt, Human
aacccagaggcagguuuuaaaag

SEQ ID NO: 75457 - RNA, 23 nt, Human
aaccccccaaacaaacaaaaaac

SEQ ID NO: 75458 - RNA, 25 nt, Human
aaccucagaagaaaacuccaagccu

SEQ ID NO: 75459 - RNA, 19 nt, Human
aaccugaggaaauggaugg

SEQ ID NO: 75460 - RNA, 24 nt, Human
aacucagugcaaguggcaaaguug

SEQ ID NO: 75461 - RNA, 19 nt, Human
aacuucacacugugcacac

SEQ ID NO: 75462 - RNA, 21 nt, Human
aagaaaaaacaaaaacccaga

SEQ ID NO: 75463 - RNA, 21 nt, Human
aagaggaagaaaagcaaggca

SEQ ID NO: 75464 - RNA, 20 nt, Human
aagcaagaaaaaugaccacg

SEQ ID NO: 75465 - RNA, 23 nt, Human
aagcaggacaaaggcagauccaa

SEQ ID NO: 75466 - RNA, 22 nt, Human
aagcaugcuuucuucuggcuuu

SEQ ID NO: 75467 - RNA, 20 nt, Human
aauguaaggauuacaucccg

SEQ ID NO: 75468 - RNA, 22 nt, Human
acaaaaaacaccuuguucuuua

SEQ ID NO: 75469 - RNA, 19 nt, Human
acaaaaacaaaaaacaccu

SEQ ID NO: 75470 - RNA, 18 nt, Human
acaaaaacaaaaacaaaa

SEQ ID NO: 75471 - RNA, 18 nt, Human
acaaacaaaaccccccaa

SEQ ID NO: 75472 - RNA, 25 nt, Human
acaaacaagaaaaaacaaaaaccca

SEQ ID NO: 75473 - RNA, 25 nt, Human
acaaaggcaaaccucauggugaagc

SEQ ID NO: 75474 - RNA, 24 nt, Human
acaagacacuggcagaaaaaccuc

SEQ ID NO: 75475 - RNA, 24 nt, Human
acacacacaaacaagaaaaaacaa

SEQ ID NO: 75476 - RNA, 21 nt, Human
acacacacacaaacaagaaaa

SEQ ID NO: 75477 - RNA, 23 nt, Human
acacacacacacacacacacaca

SEQ ID NO: 75478 - RNA, 23 nt, Human
acacacacacacacacacacaca

SEQ ID NO: 75479 - RNA, 23 nt, Human
acacacacacacacacacacaca

SEQ ID NO: 75480 - RNA, 23 nt, Human
acacacacacacacacacacaca

SEQ ID NO: 75481 - RNA, 23 nt, Human
acacacacacacacacacacaca

SEQ ID NO: 75482 - RNA, 23 nt, Human
acacacacacacacacacacaca

SEQ ID NO: 75483 - RNA, 23 nt, Human
acacacacacacacacacacaca

SEQ ID NO: 75484 - RNA, 23 nt, Human
acacacacacacacacacacaca

SEQ ID NO: 75485 - RNA, 23 nt, Human
acacacacacacacacacacaca

SEQ ID NO: 75486 - RNA, 19 nt, Human
acaccacuuggaggugcca

SEQ ID NO: 75487 - RNA, 19 nt, Human
acagacagugucaucacug

SEQ ID NO: 75488 - RNA, 19 nt, Human
accacgagaaaaaccacaa

SEQ ID NO: 75489 - RNA, 18 nt, Human
accagaaauugcacuucc

SEQ ID NO: 75490 - RNA, 19 nt, Human
accccauccccacaucaaa

SEQ ID NO: 75491 - RNA, 25 nt, Human
accccccaaacaaacaaaaaacaaa

SEQ ID NO: 75492 - RNA, 21 nt, Human
accugaagcucccaaaugcau

SEQ ID NO: 75493 - RNA, 18 nt, Human
accuugggaaaaagcuuc

SEQ ID NO: 75494 - RNA, 22 nt, Human
acucaccuccacuggcucugcc

SEQ ID NO: 75495 - RNA, 18 nt, Human
acugaaccacagaaaccu

SEQ ID NO: 75496 - RNA, 18 nt, Human
acuggagcgagggagcug

SEQ ID NO: 75497 - RNA, 25 nt, Human
agaaaacaaaaacaaaaacaaaaaa

SEQ ID NO: 75498 - RNA, 23 nt, Human
agaaacaaagucaaccaucuauu

SEQ ID NO: 75499 - RNA, 20 nt, Human
agaaagaaugugucagccug

SEQ ID NO: 75500 - RNA, 20 nt, Human
agaaagcaugcuuucuucug

SEQ ID NO: 75501 - RNA, 22 nt, Human
agaagauaaauagcaggauggc

SEQ ID NO: 75502 - RNA, 22 nt, Human
agacacuggcagaaaaaccuca

SEQ ID NO: 75503 - RNA, 20 nt, Human
agagaaacaaacacauacag

SEQ ID NO: 75504 - RNA, 24 nt, Human
agagaaacaaacacauacagcaaa

SEQ ID NO: 75505 - RNA, 26 nt, Human
agagcuguuuauccauugcuugacag

SEQ ID NO: 75506 - RNA, 27 nt, Human
agagcuguuuauccauugcuugacagc

SEQ ID NO: 75507 - RNA, 24 nt, Human
agaggaagaaaagcaaggcagggg

SEQ ID NO: 75508 - RNA, 21 nt, Human
agaggagaggucacuuggaaa

SEQ ID NO: 75509 - RNA, 19 nt, Human
agccaaauagggacuugag

SEQ ID NO: 75510 - RNA, 18 nt, Human
agcucguucccagccccc

SEQ ID NO: 75511 - RNA, 19 nt, Human
agcucguucccagcccccc

SEQ ID NO: 75512 - RNA, 19 nt, Human
agcugacuccacuguaacc

SEQ ID NO: 75513 - RNA, 21 nt, Human
aggaagaaaagcaaggcaggg

SEQ ID NO: 75514 - RNA, 22 nt, Human
aggacaaaggcagauccaaggg

SEQ ID NO: 75515 - RNA, 24 nt, Human
aggagaaagaaugugucagccugu

SEQ ID NO: 75516 - RNA, 20 nt, Human
aggagccaaugccugcugag

SEQ ID NO: 75517 - RNA, 23 nt, Human
aggcaaagaugaucaacagcaac

SEQ ID NO: 75518 - RNA, 24 nt, Human
aggcagauccaaggggaggacugg

SEQ ID NO: 75519 - RNA, 18 nt, Human
aggcaggaccuucggggc

SEQ ID NO: 75520 - RNA, 22 nt, Human
aggcaggaccuucggggcugug

SEQ ID NO: 75521 - RNA, 22 nt, Human
aggcagguuuuaaaaguggaac

SEQ ID NO: 75522 - RNA, 20 nt, Human
agggaaagguggggaggagg

SEQ ID NO: 75523 - RNA, 20 nt, Human
agggagagaugagaaggcuc

SEQ ID NO: 75524 - RNA, 18 nt, Human
agggaugggagcaaggga

SEQ ID NO: 75525 - RNA, 18 nt, Human
agggggaggggaaggggc

SEQ ID NO: 75526 - RNA, 24 nt, Human
aggguggagagaaauaaagaggcc

SEQ ID NO: 75527 - RNA, 20 nt, Human
aggugaggucugaguuaggg

SEQ ID NO: 75528 - RNA, 20 nt, Human
aggugcacuugcaucagacu

SEQ ID NO: 75529 - RNA, 18 nt, Human
agguggugcuugccuuga

SEQ ID NO: 75530 - RNA, 21 nt, Human
aggugugcggacugggaggca

SEQ ID NO: 75531 - RNA, 18 nt, Human
aguggaacuguuuaaaaa

SEQ ID NO: 75532 - RNA, 19 nt, Human
aguuaggguggagagaaau

SEQ ID NO: 75533 - RNA, 23 nt, Human
auaaaaaccacgagaaaaaccac

SEQ ID NO: 75534 - RNA, 24 nt, Human
auagugcaucuuaaaagcagcaaa

SEQ ID NO: 75535 - RNA, 24 nt, Human
auauggauauauauauauauauau

SEQ ID NO: 75536 - RNA, 21 nt, Human
aucaaggcacccccagguaac

SEQ ID NO: 75537 - RNA, 24 nt, Human
aucauuuucaaaccuuugucuguu

SEQ ID NO: 75538 - RNA, 20 nt, Human
aucuuccugaucacucacua

SEQ ID NO: 75539 - RNA, 19 nt, Human
augaauaccaacuccacac

SEQ ID NO: 75540 - RNA, 24 nt, Human
augagacuuuucuauguacaaaug

SEQ ID NO: 75541 - RNA, 18 nt, Human
augcacugauauucauuu

SEQ ID NO: 75542 - RNA, 19 nt, Human
auggggugaaggcaggacc

SEQ ID NO: 75543 - RNA, 26 nt, Human
caaaaaacaaaccuacaaugcucaaa

SEQ ID NO: 75544 - RNA, 25 nt, Human
caaaaacaaaaaacaccuuguucuu

SEQ ID NO: 75545 - RNA, 22 nt, Human
caaaaacaaaaacaaaaaacac

SEQ ID NO: 75546 - RNA, 26 nt, Human
caaaaacaaaaacaaacaaaaccccc

SEQ ID NO: 75547 - RNA, 22 nt, Human
caaaaacaaacaaaacccccca

SEQ ID NO: 75548 - RNA, 24 nt, Human
caaaaacaaacaaaaccccccaaa

SEQ ID NO: 75549 - RNA, 19 nt, Human
caaaaaccagcagcuccaa

SEQ ID NO: 75550 - RNA, 21 nt, Human
caaaaccccccaaacaaacaa

SEQ ID NO: 75551 - RNA, 23 nt, Human
caaacaaaaccccccaaacaaac

SEQ ID NO: 75552 - RNA, 22 nt, Human
caaacaagaaaaaacaaaaacc

SEQ ID NO: 75553 - RNA, 22 nt, Human
caaagucaaccaucuauucccc

SEQ ID NO: 75554 - RNA, 24 nt, Human
caaaugacaccacuuggaggugcc

SEQ ID NO: 75555 - RNA, 24 nt, Human
caacacacaaugccucgugcacac

SEQ ID NO: 75556 - RNA, 18 nt, Human
caacacggcccccagagc

SEQ ID NO: 75557 - RNA, 21 nt, Human
caacacggcccccagagccaa

SEQ ID NO: 75558 - RNA, 28 nt, Human
caaccauaacaaaaaccagcagcuccaa

SEQ ID NO: 75559 - RNA, 22 nt, Human
caacuucccaggcaaagaugau

SEQ ID NO: 75560 - RNA, 24 nt, Human
caacuugaaaagagguugccugga

SEQ ID NO: 75561 - RNA, 20 nt, Human
caagaaauuccaacaaccau

SEQ ID NO: 75562 - RNA, 23 nt, Human
caagccgaggccucaggacgugu

SEQ ID NO: 75563 - RNA, 22 nt, Human
caagccugggcaggaaagccag

SEQ ID NO: 75564 - RNA, 22 nt, Human
caaggaaaacaaaaacaaaaac

SEQ ID NO: 75565 - RNA, 31 nt, Human
caaggaaaacaaaaacaaaaacaaaaacaaa

SEQ ID NO: 75566 - RNA, 18 nt, Human
cacaaacaagaaaaaaca

SEQ ID NO: 75567 - RNA, 23 nt, Human
cacaaacaagaaaaaacaaaaac

SEQ ID NO: 75568 - RNA, 22 nt, Human
cacaaauaaagaaacaaaguca

SEQ ID NO: 75569 - RNA, 21 nt, Human
cacacacaaacaagaaaaaac

SEQ ID NO: 75570 - RNA, 24 nt, Human
cacacacacacaaacaagaaaaaa

SEQ ID NO: 75571 - RNA, 21 nt, Human
cacacacacacacaaacaaga

SEQ ID NO: 75572 - RNA, 20 nt, Human
cacacacacacacacacaca

SEQ ID NO: 75573 - RNA, 20 nt, Human
cacacacacacacacacaca

SEQ ID NO: 75574 - RNA, 20 nt, Human
cacacacacacacacacaca

SEQ ID NO: 75575 - RNA, 20 nt, Human
cacacacacacacacacaca

SEQ ID NO: 75576 - RNA, 20 nt, Human
cacacacacacacacacaca

SEQ ID NO: 75577 - RNA, 20 nt, Human
cacacacacacacacacaca

SEQ ID NO: 75578 - RNA, 20 nt, Human
cacacacacacacacacaca

SEQ ID NO: 75579 - RNA, 20 nt, Human
cacacacacacacacacaca

SEQ ID NO: 75580 - RNA, 20 nt, Human
cacacacacacacacacaca

SEQ ID NO: 75581 - RNA, 20 nt, Human
cacacacacacacacacaca

SEQ ID NO: 75582 - RNA, 20 nt, Human
cacacacacacacacacaca

SEQ ID NO: 75583 - RNA, 20 nt, Human
cacacacacacacacacaca

SEQ ID NO: 75584 - RNA, 20 nt, Human
cacacacacacacacacaca

SEQ ID NO: 75585 - RNA, 20 nt, Human
cacacacacacacacacaca

SEQ ID NO: 75586 - RNA, 20 nt, Human
cacacacacacacacacaca

SEQ ID NO: 75587 - RNA, 22 nt, Human
cacacacacacacacacacaca

SEQ ID NO: 75588 - RNA, 22 nt, Human
cacacacacacacacacacaca

SEQ ID NO: 75589 - RNA, 22 nt, Human
cacacacacacacacacacaca

SEQ ID NO: 75590 - RNA, 22 nt, Human
cacacacacacacacacacaca

SEQ ID NO: 75591 - RNA, 22 nt, Human
cacacacacacacacacacaca

SEQ ID NO: 75592 - RNA, 22 nt, Human
cacacacacacacacacacaca

SEQ ID NO: 75593 - RNA, 22 nt, Human
cacacacacacacacacacaca

SEQ ID NO: 75594 - RNA, 22 nt, Human
cacacacacacacacacacaca

SEQ ID NO: 75595 - RNA, 26 nt, Human
cacacacacacacacacacacacaaa

SEQ ID NO: 75596 - RNA, 26 nt, Human
cacacacacacacacacacacacaca

SEQ ID NO: 75597 - RNA, 26 nt, Human
cacacacacacacacacacacacaca

SEQ ID NO: 75598 - RNA, 26 nt, Human
cacacacacacacacacacacacaca

SEQ ID NO: 75599 - RNA, 26 nt, Human
cacacacacacacacacacacacaca

SEQ ID NO: 75600 - RNA, 26 nt, Human
cacacacacacacacacacacacaca

SEQ ID NO: 75601 - RNA, 26 nt, Human
cacacacacacacacacacacacaca

SEQ ID NO: 75602 - RNA, 26 nt, Human
cacacacacacacacacacacacaca

SEQ ID NO: 75603 - RNA, 26 nt, Human
cacacacacacacacacacacacaca

SEQ ID NO: 75604 - RNA, 25 nt, Human
cacacacaucacaugaacaacugca

SEQ ID NO: 75605 - RNA, 21 nt, Human
cacaccacuuccaagagcaag

SEQ ID NO: 75606 - RNA, 20 nt, Human
cacauggcagcucguuccca

SEQ ID NO: 75607 - RNA, 21 nt, Human
caccaccccauccccacauca

SEQ ID NO: 75608 - RNA, 21 nt, Human
cacccccagguaacgcagaga

SEQ ID NO: 75609 - RNA, 18 nt, Human
caccuccacuggcucugc

SEQ ID NO: 75610 - RNA, 26 nt, Human
cacucuuaucugcugugcuucaaggg

SEQ ID NO: 75611 - RNA, 24 nt, Human
cacuuaggaaucugaacauccagc

SEQ ID NO: 75612 - RNA, 22 nt, Human
cacuuggaaaggcaacaauaga

SEQ ID NO: 75613 - RNA, 21 nt, Human
cagaagaaauuccugagauag

SEQ ID NO: 75614 - RNA, 26 nt, Human
cagacacacagagucagguuuuccac

SEQ ID NO: 75615 - RNA, 19 nt, Human
cagauuuccuguaugaaua

SEQ ID NO: 75616 - RNA, 21 nt, Human
cagcucuuccucauuuugaga

SEQ ID NO: 75617 - RNA, 21 nt, Human
cagcugacuccacuguaacac

SEQ ID NO: 75618 - RNA, 20 nt, Human
caggcuuaucauuuucaaac

SEQ ID NO: 75619 - RNA, 22 nt, Human
caggggugggugggaggaaggu

SEQ ID NO: 75620 - RNA, 20 nt, Human
caggguaaaccucaugccaa

SEQ ID NO: 75621 - RNA, 22 nt, Human
caguacuauaaacauacacuuu

SEQ ID NO: 75622 - RNA, 18 nt, Human
caguggcugguuggcccc

SEQ ID NO: 75623 - RNA, 25 nt, Human
cauacacuuucaacacacaaugccu

SEQ ID NO: 75624 - RNA, 20 nt, Human
cauauggauauauauauaua

SEQ ID NO: 75625 - RNA, 23 nt, Human
cauauggauauauauauauauau

SEQ ID NO: 75626 - RNA, 23 nt, Human
cauauguuacuaugauuucacuu

SEQ ID NO: 75627 - RNA, 26 nt, Human
caucaacucugaacucucuaucugcg

SEQ ID NO: 75628 - RNA, 19 nt, Human
caucuuaaaagcagcaaac

SEQ ID NO: 75629 - RNA, 21 nt, Human
cauugcuugacagcaaaaugc

SEQ ID NO: 75630 - RNA, 19 nt, Human
ccaaaagguaaaauucuua

SEQ ID NO: 75631 - RNA, 19 nt, Human
ccaaaccaaacgaaaaaga

SEQ ID NO: 75632 - RNA, 21 nt, Human
ccacugcccaccaccccaucc

SEQ ID NO: 75633 - RNA, 22 nt, Human
ccacugcccaccaccccauccc

SEQ ID NO: 75634 - RNA, 22 nt, Human
ccacugcccaccaccccauccc

SEQ ID NO: 75635 - RNA, 18 nt, Human
ccagccccccgagugcgc

SEQ ID NO: 75636 - RNA, 20 nt, Human
ccagguccugugcugccuuc

SEQ ID NO: 75637 - RNA, 18 nt, Human
ccauuuggagacccaagc

SEQ ID NO: 75638 - RNA, 18 nt, Human
cccaagcaggcauccucc

SEQ ID NO: 75639 - RNA, 21 nt, Human
cccacgaguuuuccacaaagg

SEQ ID NO: 75640 - RNA, 22 nt, Human
cccagcaaguccucccuuugaa

SEQ ID NO: 75641 - RNA, 18 nt, Human
cccauggcagaaguuagg

SEQ ID NO: 75642 - RNA, 22 nt, Human
ccccacaucaaaccguucagga

SEQ ID NO: 75643 - RNA, 18 nt, Human
ccccagcaaguccucccu

SEQ ID NO: 75644 - RNA, 18 nt, Human
ccccagcaaguccucccu

SEQ ID NO: 75645 - RNA, 20 nt, Human
cccccaaacaaacaaaaaac

SEQ ID NO: 75646 - RNA, 21 nt, Human
cccccaaacaaacaaaaaaca

SEQ ID NO: 75647 - RNA, 23 nt, Human
ccccccaaacaaacaaaaaacaa

SEQ ID NO: 75648 - RNA, 18 nt, Human
ccuccucuuccccgcguc

SEQ ID NO: 75649 - RNA, 18 nt, Human
ccugaagcucccaaaugc

SEQ ID NO: 75650 - RNA, 24 nt, Human
ccuugggaaaaagcuuccaacacu

SEQ ID NO: 75651 - RNA, 21 nt, Human
ccuugugacaggucagugagu

SEQ ID NO: 75652 - RNA, 19 nt, Human
cgaagggagagaugagaag

SEQ ID NO: 75653 - RNA, 23 nt, Human
cgaggugggcaguucguggguca

SEQ ID NO: 75654 - RNA, 25 nt, Human
cggacccaaggccacuggagcgagg

SEQ ID NO: 75655 - RNA, 22 nt, Human
cggcccccagagccaagggaag

SEQ ID NO: 75656 - RNA, 21 nt, Human
cucaugauacaacgaacagcu

SEQ ID NO: 75657 - RNA, 26 nt, Human
cucaugccaagaagcuggguuggacc

SEQ ID NO: 75658 - RNA, 27 nt, Human
cucaugccaagaagcuggguuggaccu

SEQ ID NO: 75659 - RNA, 21 nt, Human
cuccacuguaacacacgccug

SEQ ID NO: 75660 - RNA, 20 nt, Human
cucgcagcccccucccggca

SEQ ID NO: 75661 - RNA, 23 nt, Human
cucgcagcccccucccggcagcc

SEQ ID NO: 75662 - RNA, 19 nt, Human
cucuccccacuuaggaauc

SEQ ID NO: 75663 - RNA, 23 nt, Human
cugaagcucccaaaugcauaugg

SEQ ID NO: 75664 - RNA, 19 nt, Human
cugcacaccacuuccaaga

SEQ ID NO: 75665 - RNA, 22 nt, Human
cugcagccccuugcauacacug

SEQ ID NO: 75666 - RNA, 20 nt, Human
cugcucucucccaauggggu

SEQ ID NO: 75667 - RNA, 19 nt, Human
cuggaucugagacuccucc

SEQ ID NO: 75668 - RNA, 22 nt, Human
cuggaugggagaggugugcgga

SEQ ID NO: 75669 - RNA, 21 nt, Human
cugguucuggaacaaauuguc

SEQ ID NO: 75670 - RNA, 31 nt, Human
cuguuucagacacacacacacacacacacag

SEQ ID NO: 75671 - RNA, 26 nt, Human
cuuagaaaacaaaaacaaaaacaaaa

SEQ ID NO: 75672 - RNA, 20 nt, Human
cuucacacugugcacacuuc

SEQ ID NO: 75673 - RNA, 21 nt, Human
cuucaguagguggcgaaaugu

SEQ ID NO: 75674 - RNA, 23 nt, Human
cuuccaacacugaauuuugucca

SEQ ID NO: 75675 - RNA, 20 nt, Human
cuucuggcuuuaucauucaa

SEQ ID NO: 75676 - RNA, 20 nt, Human
cuugaagauucuccucauuc

SEQ ID NO: 75677 - RNA, 19 nt, Human
cuugauucuugcuccuucu

SEQ ID NO: 75678 - RNA, 24 nt, Human
cuuggugcacacuucugcuucuaa

SEQ ID NO: 75679 - RNA, 25 nt, Human
gaaaaaacaaaaacccagaggcagg

SEQ ID NO: 75680 - RNA, 22 nt, Human
gaaaaagaaaucugaaauaaaa

SEQ ID NO: 75681 - RNA, 24 nt, Human
gaaaacaaaaacaaaaacaaaaac

SEQ ID NO: 75682 - RNA, 21 nt, Human
gaaauggauggaaugugguca

SEQ ID NO: 75683 - RNA, 20 nt, Human
gaauguggucaagacuacca

SEQ ID NO: 75684 - RNA, 19 nt, Human
gacacacacacaucacaug

SEQ ID NO: 75685 - RNA, 23 nt, Human
gacacacagagucagguuuucca

SEQ ID NO: 75686 - RNA, 21 nt, Human
gacacuggcagaaaaaccuca

SEQ ID NO: 75687 - RNA, 24 nt, Human
gacaugucacagugcgaggaaguu

SEQ ID NO: 75688 - RNA, 18 nt, Human
gacgcuggggucaugaga

SEQ ID NO: 75689 - RNA, 21 nt, Human
gagaacuuugcguccuuuucc

SEQ ID NO: 75690 - RNA, 24 nt, Human
gagaggugugcggacugaccuucg

SEQ ID NO: 75691 - RNA, 18 nt, Human
gaggaagagaagaggggc

SEQ ID NO: 75692 - RNA, 19 nt, Human
gaggagaggucacuuggaa

SEQ ID NO: 75693 - RNA, 24 nt, Human
gcaagccaaccaguuuugcagcaa

SEQ ID NO: 75694 - RNA, 23 nt, Human
gcaauguaaggauuacaucccga

SEQ ID NO: 75695 - RNA, 20 nt, Human
gcacaauaguguauuuacaa

SEQ ID NO: 75696 - RNA, 18 nt, Human
gcagaugccaggaugccc

SEQ ID NO: 75697 - RNA, 19 nt, Human
gcaggacaaaggcagaucc

SEQ ID NO: 75698 - RNA, 19 nt, Human
gcaggauggccucguaacu

SEQ ID NO: 75699 - RNA, 20 nt, Human
gcaguacuauaaacauacac

SEQ ID NO: 75700 - RNA, 18 nt, Human
gcaugcaggacuuuugca

SEQ ID NO: 75701 - RNA, 21 nt, Human
gccgggaagggggaggggaag

SEQ ID NO: 75702 - RNA, 19 nt, Human
gcggcggcgggagugggca

SEQ ID NO: 75703 - RNA, 20 nt, Human
gcggcgggagugggcaggcg

SEQ ID NO: 75704 - RNA, 23 nt, Human
gcugacuccacuguaacacacgc

SEQ ID NO: 75705 - RNA, 21 nt, Human
gcugcagccccuugcauacac

SEQ ID NO: 75706 - RNA, 20 nt, Human
gcugguuggccccguccuuc

SEQ ID NO: 75707 - RNA, 18 nt, Human
ggaaagguggggaggagg

SEQ ID NO: 75708 - RNA, 20 nt, Human
ggacugggaggcagagccga

SEQ ID NO: 75709 - RNA, 18 nt, Human
ggagagaugagaaggcuc

SEQ ID NO: 75710 - RNA, 21 nt, Human
ggagccaaugccugcugaguu

SEQ ID NO: 75711 - RNA, 22 nt, Human
ggaugaauucauuauuuggcaa

SEQ ID NO: 75712 - RNA, 19 nt, Human
ggccucugcaaccaagugg

SEQ ID NO: 75713 - RNA, 19 nt, Human
ggcggcggcgggagugggc

SEQ ID NO: 75714 - RNA, 20 nt, Human
ggcuagguuuuaaaauucca

SEQ ID NO: 75715 - RNA, 18 nt, Human
gggaacugggcgaaggga

SEQ ID NO: 75716 - RNA, 20 nt, Human
gggcgaggggaggccggggg

SEQ ID NO: 75717 - RNA, 20 nt, Human
gggcggcggcgggagugggc

SEQ ID NO: 75718 - RNA, 18 nt, Human
ggggaggaagagaagagg

SEQ ID NO: 75719 - RNA, 19 nt, Human
ggggcggcggcgggagugg

SEQ ID NO: 75720 - RNA, 19 nt, Human
gggguggcgagggcggcgg

SEQ ID NO: 75721 - RNA, 20 nt, Human
gggucacucaccuccacugg

SEQ ID NO: 75722 - RNA, 19 nt, Human
gggugggugggaggaaggu

SEQ ID NO: 75723 - RNA, 18 nt, Human
ggugggaggaaggugagg

SEQ ID NO: 75724 - RNA, 18 nt, Human
ggugggugggaggaaggu

SEQ ID NO: 75725 - RNA, 19 nt, Human
ggugggugggaggaaggug

SEQ ID NO: 75726 - RNA, 27 nt, Human
guaucugcaaggaaaacaaaaacaaaa

SEQ ID NO: 75727 - RNA, 18 nt, Human
guccugugcugccuucga

SEQ ID NO: 75728 - RNA, 19 nt, Human
guccuuuuccgccuccucu

SEQ ID NO: 75729 - RNA, 22 nt, Human
gugcacacagauuuccuguaug

SEQ ID NO: 75730 - RNA, 31 nt, Human
guuucagacacacacacacacacacacacag

SEQ ID NO: 75731 - RNA, 26 nt, Human
uaaaagcaaagaauauacaguauacu

SEQ ID NO: 75732 - RNA, 22 nt, Human
uaaaagcagcaaaccuuuagaa

SEQ ID NO: 75733 - RNA, 27 nt, Human
uaaaagcagcaaaccuuuagaaagaca

SEQ ID NO: 75734 - RNA, 23 nt, Human
uaaaccucaugccaagaagcugg

SEQ ID NO: 75735 - RNA, 21 nt, Human
uaagaaaagagccuuaagaac

SEQ ID NO: 75736 - RNA, 18 nt, Human
uaagaaaauagguuugac

SEQ ID NO: 75737 - RNA, 20 nt, Human
uaagacagcuccuaguuuaa

SEQ ID NO: 75738 - RNA, 24 nt, Human
uacaacuucauuuaagaaaauagg

SEQ ID NO: 75739 - RNA, 23 nt, Human
uacaauaaaaaccacgagaaaaa

SEQ ID NO: 75740 - RNA, 22 nt, Human
uacagagaauaagcaucaacag

SEQ ID NO: 75741 - RNA, 18 nt, Human
uacagcaaaucacucacc

SEQ ID NO: 75742 - RNA, 24 nt, Human
uacagcaaaucacucaccugucca

SEQ ID NO: 75743 - RNA, 19 nt, Human
uacaguaucugcaaggaaa

SEQ ID NO: 75744 - RNA, 21 nt, Human
uacaguaucugcaaggaaaac

SEQ ID NO: 75745 - RNA, 18 nt, Human
uaccaguugcacaugagu

SEQ ID NO: 75746 - RNA, 19 nt, Human
uaccccagccauuuggaga

SEQ ID NO: 75747 - RNA, 23 nt, Human
uaccccagccauuuggagaccca

SEQ ID NO: 75748 - RNA, 19 nt, Human
uagaaaaaaauaaggacaa

SEQ ID NO: 75749 - RNA, 18 nt, Human
uagagaaguagguagcca

SEQ ID NO: 75750 - RNA, 22 nt, Human
uaggaaaaccccucuuugucca

SEQ ID NO: 75751 - RNA, 21 nt, Human
uaggaugagaaaguugaggca

SEQ ID NO: 75752 - RNA, 27 nt, Human
uaggccaagaaauuccaacaaccauaa

SEQ ID NO: 75753 - RNA, 19 nt, Human
uaggguaugugugugauuc

SEQ ID NO: 75754 - RNA, 23 nt, Human
uagugugcaccaaauguguucuc

SEQ ID NO: 75755 - RNA, 19 nt, Human
uauauauauauauauauau

SEQ ID NO: 75756 - RNA, 23 nt, Human
uauauauauauuauauauaauau

SEQ ID NO: 75757 - RNA, 19 nt, Human
uaucaucucccagggugga

SEQ ID NO: 75758 - RNA, 21 nt, Human
uaugaauaccaacuccacaca

SEQ ID NO: 75759 - RNA, 24 nt, Human
uauggauauauauauauauauaua

SEQ ID NO: 75760 - RNA, 23 nt, Human
uauguacaaaugcuauuugcaca

SEQ ID NO: 75761 - RNA, 23 nt, Human
ucaaauccccucaggccagaugu

SEQ ID NO: 75762 - RNA, 24 nt, Human
ucaagcagcuucacgggacaggag

SEQ ID NO: 75763 - RNA, 23 nt, Human
ucaauaaacuggaaugagaauga

SEQ ID NO: 75764 - RNA, 18 nt, Human
ucaggcaguacuauaaac

SEQ ID NO: 75765 - RNA, 24 nt, Human
ucagugaguguccaccuuguucau

SEQ ID NO: 75766 - RNA, 21 nt, Human
ucaugcugcagggaugggagc

SEQ ID NO: 75767 - RNA, 23 nt, Human
uccaacacagagcuuuaucaaga

SEQ ID NO: 75768 - RNA, 19 nt, Human
uccacuggcucugccccaa

SEQ ID NO: 75769 - RNA, 19 nt, Human
uccaucuguaggaaaaccc

SEQ ID NO: 75770 - RNA, 18 nt, Human
ucccaaaugaugucuuca

SEQ ID NO: 75771 - RNA, 24 nt, Human
uccccagcaaguccucccuuugaa

SEQ ID NO: 75772 - RNA, 21 nt, Human
ucccggcagccggcgaggugg

SEQ ID NO: 75773 - RNA, 26 nt, Human
uccgccuccucuuccccgcgucuucc

SEQ ID NO: 75774 - RNA, 22 nt, Human
uccugcucgagaagaggagagg

SEQ ID NO: 75775 - RNA, 19 nt, Human
uccuucuggaucugagacu

SEQ ID NO: 75776 - RNA, 21 nt, Human
ucgcagcccccucccggcagc

SEQ ID NO: 75777 - RNA, 18 nt, Human
ucgcggaggggacgcgca

SEQ ID NO: 75778 - RNA, 20 nt, Human
ucgcggaggggacgcgcauc

SEQ ID NO: 75779 - RNA, 24 nt, Human
ucgugcacacagauuuccuguaug

SEQ ID NO: 75780 - RNA, 20 nt, Human
ucgugggucaccgaaagcuc

SEQ ID NO: 75781 - RNA, 22 nt, Human
ucuaaaugagaaauaaguuucc

SEQ ID NO: 75782 - RNA, 22 nt, Human
ucuagcaucagagacaaaagaa

SEQ ID NO: 75783 - RNA, 19 nt, Human
ucucacugucacccacgag

SEQ ID NO: 75784 - RNA, 24 nt, Human
ucucuggguugcaagccaaccagu

SEQ ID NO: 75785 - RNA, 19 nt, Human
ucuggggcacaccuuccug

SEQ ID NO: 75786 - RNA, 20 nt, Human
ucuuaaaagcagcaaaccuu

SEQ ID NO: 75787 - RNA, 25 nt, Human
ucuuagaaaacaaaaacaaaaacaa

SEQ ID NO: 75788 - RNA, 19 nt, Human
ucuucaguuuggggaagaa

SEQ ID NO: 75789 - RNA, 19 nt, Human
ucuuccccagccgggcugg

SEQ ID NO: 75790 - RNA, 19 nt, Human
ucuuccccagccgggcugg

SEQ ID NO: 75791 - RNA, 22 nt, Human
ucuuccccagccgggcuggagu

SEQ ID NO: 75792 - RNA, 19 nt, Human
ugaaaugaauggucuuggu

SEQ ID NO: 75793 - RNA, 24 nt, Human
ugaacagugccacaggcugacuga

SEQ ID NO: 75794 - RNA, 21 nt, Human
ugaaccacagaaaccugagga

SEQ ID NO: 75795 - RNA, 18 nt, Human
ugaagcacagaacugucc

SEQ ID NO: 75796 - RNA, 24 nt, Human
ugaagcucccaaaugcauauggaa

SEQ ID NO: 75797 - RNA, 21 nt, Human
ugaaucaacccagaaauaauu

SEQ ID NO: 75798 - RNA, 27 nt, Human
ugaauuaaauuacauuaaucgcauaga

SEQ ID NO: 75799 - RNA, 26 nt, Human
ugacaagcacauaguucugaauagga

SEQ ID NO: 75800 - RNA, 21 nt, Human
ugacagagggaucccagggaa

SEQ ID NO: 75801 - RNA, 22 nt, Human
ugacaugggccacugagaaaaa

SEQ ID NO: 75802 - RNA, 20 nt, Human
ugaccacguuaacaguuacc

SEQ ID NO: 75803 - RNA, 20 nt, Human
ugacccaaaacucagugcaa

SEQ ID NO: 75804 - RNA, 18 nt, Human
ugacugaagaacgccugg

SEQ ID NO: 75805 - RNA, 18 nt, Human
ugagaagacccuguuuug

SEQ ID NO: 75806 - RNA, 20 nt, Human
ugagaagacccuguuuugaa

SEQ ID NO: 75807 - RNA, 19 nt, Human
ugagaaugaaagucagagc

SEQ ID NO: 75808 - RNA, 21 nt, Human
ugagacccggacccaaggcca

SEQ ID NO: 75809 - RNA, 22 nt, Human
ugagauaggguuugugacaugg

SEQ ID NO: 75810 - RNA, 18 nt, Human
ugagauggcucaggcagu

SEQ ID NO: 75811 - RNA, 20 nt, Human
ugagccacagacagacagug

SEQ ID NO: 75812 - RNA, 24 nt, Human
ugaggguaggguaugugugugauu

SEQ ID NO: 75813 - RNA, 24 nt, Human
ugaguaaaugaaguuccaauucca

SEQ ID NO: 75814 - RNA, 18 nt, Human
ugcacaccacuuccaaga

SEQ ID NO: 75815 - RNA, 19 nt, Human
ugcacaccacuuccaagag

SEQ ID NO: 75816 - RNA, 20 nt, Human
ugcauauggauauauauaua

SEQ ID NO: 75817 - RNA, 19 nt, Human
ugccaggaugcccugcucu

SEQ ID NO: 75818 - RNA, 22 nt, Human
ugccugagucauugcugggaac

SEQ ID NO: 75819 - RNA, 19 nt, Human
ugccuggauacacaagcag

SEQ ID NO: 75820 - RNA, 18 nt, Human
ugcucgagaagaggagag

SEQ ID NO: 75821 - RNA, 19 nt, Human
uggauauauauauauauau

SEQ ID NO: 75822 - RNA, 19 nt, Human
uggcagaaguuagguuggg

SEQ ID NO: 75823 - RNA, 19 nt, Human
uggcgaaauguuaaaacug

SEQ ID NO: 75824 - RNA, 19 nt, Human
uggcugguuggccccgucc

SEQ ID NO: 75825 - RNA, 19 nt, Human
ugggagaggugugcggacu

SEQ ID NO: 75826 - RNA, 27 nt, Human
ugggagcaagggaucagaaccacgagg

SEQ ID NO: 75827 - RNA, 21 nt, Human
ugggagcaagggaucagacau

SEQ ID NO: 75828 - RNA, 20 nt, Human
ugggaggccaagccugggca

SEQ ID NO: 75829 - RNA, 19 nt, Human
ugggauguucauuagucuc

SEQ ID NO: 75830 - RNA, 20 nt, Human
ugggauguucauuagucuca

SEQ ID NO: 75831 - RNA, 21 nt, Human
ugggcaggaaagccaguggcu

SEQ ID NO: 75832 - RNA, 19 nt, Human
uggggcacaccuuccugua

SEQ ID NO: 75833 - RNA, 21 nt, Human
uggggccuagagguguuguag

SEQ ID NO: 75834 - RNA, 20 nt, Human
ugggggaagaggaagaaaag

SEQ ID NO: 75835 - RNA, 18 nt, Human
ugggugggaggaagguga

SEQ ID NO: 75836 - RNA, 20 nt, Human
ugggugggaggaaggugagg

SEQ ID NO: 75837 - RNA, 20 nt, Human
uggguugcaagccaaccagu

SEQ ID NO: 75838 - RNA, 22 nt, Human
uggucaagacuaccaguugcac

SEQ ID NO: 75839 - RNA, 20 nt, Human
ugguuggccccguccuucag

SEQ ID NO: 75840 - RNA, 23 nt, Human
uguacaaaugcuauuugcacaca

SEQ ID NO: 75841 - RNA, 19 nt, Human
uguaugaauaccaacucca

SEQ ID NO: 75842 - RNA, 22 nt, Human
ugucacaacauuaaaucaaagc

SEQ ID NO: 75843 - RNA, 20 nt, Human
uguccaaagccucagaauga

SEQ ID NO: 75844 - RNA, 19 nt, Human
uguccugggaggccaagcc

SEQ ID NO: 75845 - RNA, 18 nt, Human
ugucuagacaaaauucag

SEQ ID NO: 75846 - RNA, 22 nt, Human
ugugaagcaagaaaaaugacca

SEQ ID NO: 75847 - RNA, 18 nt, Human
ugugacaggucagugagu

SEQ ID NO: 75848 - RNA, 23 nt, Human
uguucucgguuucuucgggacag

SEQ ID NO: 75849 - RNA, 23 nt, Human
uuacagagaauaagcaucaacag

SEQ ID NO: 75850 - RNA, 21 nt, Human
uuaggaaucugaacauccagc

SEQ ID NO: 75851 - RNA, 21 nt, Human
uucacaaaauggcagcaucgu

SEQ ID NO: 75852 - RNA, 24 nt, Human
uucagaagaaauuccugagauagg

SEQ ID NO: 75853 - RNA, 31 nt, Human
uucagacacacacacacacacacacacacag

SEQ ID NO: 75854 - RNA, 18 nt, Human
uuccagguccugugcugc

SEQ ID NO: 75855 - RNA, 21 nt, Human
uuccccacugcccaccacccc

SEQ ID NO: 75856 - RNA, 24 nt, Human
uuccccuuuuacaugcagcuuuaa

SEQ ID NO: 75857 - RNA, 18 nt, Human
uuccucauuuugagagga

SEQ ID NO: 75858 - RNA, 24 nt, Human
uuccuguaugaauaccaacuccac

SEQ ID NO: 75859 - RNA, 22 nt, Human
uuccuguuuuucugauguacuu

SEQ ID NO: 75860 - RNA, 20 nt, Human
uuccuucuuuuucuucuucu

SEQ ID NO: 75861 - RNA, 23 nt, Human
uugaagauucuccucauuccugg

SEQ ID NO: 75862 - RNA, 26 nt, Human
uugcauauggauauauauauauauau

SEQ ID NO: 75863 - RNA, 22 nt, Human
uugcugcuaagaccgcuguagu

SEQ ID NO: 75864 - RNA, 24 nt, Human
uuggaaccuguuucuaaaugagaa

SEQ ID NO: 75865 - RNA, 21 nt, Human
uuggccucugcaaccaagugg

SEQ ID NO: 75866 - RNA, 21 nt, Human
uugggggaagaggaagaaaag

SEQ ID NO: 75867 - RNA, 28 nt, Human
uuguggacugacucaccagaaauugcac

SEQ ID NO: 75868 - RNA, 24 nt, Human
uuuacagucauuugaggaccaaac

SEQ ID NO: 75869 - RNA, 18 nt, Human
uuuggagaaggaaaggag

SEQ ID NO: 75870 - RNA, 23 nt, Human
uuuuggacgcuggggucaugaga

SEQ ID NO: 75871 - RNA, 22 nt, Human
uuuuuuuuauccuacugcauga

SEQ ID NO: 75872 - RNA, 20 nt, Human
cagcagcccugaagaaauca

SEQ ID NO: 75873 - RNA, 19 nt, Human
cccccagcagcccugaaga

SEQ ID NO: 75874 - RNA, 22 nt, Human
ccgcccagcgauggaagcugag

SEQ ID NO: 75875 - RNA, 19 nt, Human
cucacaaccccgcccgacu

SEQ ID NO: 75876 - RNA, 23 nt, Human
cugagcgcggcgucucacaaccc

SEQ ID NO: 75877 - RNA, 18 nt, Human
cugguggcgccauucuuc

SEQ ID NO: 75878 - RNA, 21 nt, Human
guugcccccagcagcccugaa

SEQ ID NO: 75879 - RNA, 22 nt, Human
ucagggcagcacagccuuuuuc

SEQ ID NO: 75880 - RNA, 23 nt, Human
ucauugagaaccagugugagagu

SEQ ID NO: 75881 - RNA, 21 nt, Human
ugagcgcggcgucucacaacc

SEQ ID NO: 75882 - RNA, 20 nt, Human
uggaagcugagcgcggcguc

SEQ ID NO: 75883 - RNA, 22 nt, Human
uggcaaauggccaguugccccc

SEQ ID NO: 75884 - RNA, 22 nt, Human
uggcgccauucuucagggcagc

SEQ ID NO: 75885 - RNA, 23 nt, Human
uucuucagggcagcacagccuuu

SEQ ID NO: 75886 - RNA, 20 nt, Human
aacugcgcacaaccugagcc

SEQ ID NO: 75887 - RNA, 19 nt, Human
acaggagggcacugucagu

SEQ ID NO: 75888 - RNA, 22 nt, Human
agaaacaaggaagggcccuggg

SEQ ID NO: 75889 - RNA, 19 nt, Human
agagggagagaaaggggcg

SEQ ID NO: 75890 - RNA, 22 nt, Human
agagggagagaaaggggcggag

SEQ ID NO: 75891 - RNA, 26 nt, Human
aggagcgggggccggcgcuggcgggg

SEQ ID NO: 75892 - RNA, 21 nt, Human
caacaaaguuccccucccccc

SEQ ID NO: 75893 - RNA, 18 nt, Human
cagcagcaggagcggggg

SEQ ID NO: 75894 - RNA, 20 nt, Human
cagcaggagcgggggccggc

SEQ ID NO: 75895 - RNA, 19 nt, Human
cagccagugugccaggaac

SEQ ID NO: 75896 - RNA, 21 nt, Human
cagcccgggacagggacggac

SEQ ID NO: 75897 - RNA, 18 nt, Human
ccaacaaaguuccccucc

SEQ ID NO: 75898 - RNA, 19 nt, Human
ccaagccauguccggcucc

SEQ ID NO: 75899 - RNA, 19 nt, Human
cccaacaaaguuccccucc

SEQ ID NO: 75900 - RNA, 22 nt, Human
cccccagccuggcugaguccac

SEQ ID NO: 75901 - RNA, 21 nt, Human
ccccccuccccagcccgggac

SEQ ID NO: 75902 - RNA, 23 nt, Human
ccuccccagcccgggacagggac

SEQ ID NO: 75903 - RNA, 23 nt, Human
ccucccugcccagcccucgggag

SEQ ID NO: 75904 - RNA, 21 nt, Human
ccuggccgggcgcaggguagg

SEQ ID NO: 75905 - RNA, 25 nt, Human
ccuugcccauccaaccuguauucuc

SEQ ID NO: 75906 - RNA, 18 nt, Human
cgcgcggagggccgaggc

SEQ ID NO: 75907 - RNA, 20 nt, Human
cggacaggcugggcugaaga

SEQ ID NO: 75908 - RNA, 27 nt, Human
cggacaggcugggcugaagaugggguu

SEQ ID NO: 75909 - RNA, 20 nt, Human
cuccauaacucuugcucucc

SEQ ID NO: 75910 - RNA, 20 nt, Human
cucugagaaacaaggaaggg

SEQ ID NO: 75911 - RNA, 18 nt, Human
gaccccaggccaagccau

SEQ ID NO: 75912 - RNA, 20 nt, Human
gagugugaaaauagagagau

SEQ ID NO: 75913 - RNA, 19 nt, Human
gccggcgcuggcgggggcg

SEQ ID NO: 75914 - RNA, 18 nt, Human
gggaccuggccgggcgca

SEQ ID NO: 75915 - RNA, 25 nt, Human
gggagaggggagagggcgcuggcuc

SEQ ID NO: 75916 - RNA, 21 nt, Human
uaacucuugcucuccaucccc

SEQ ID NO: 75917 - RNA, 22 nt, Human
uagguagcugcagccgcgcgga

SEQ ID NO: 75918 - RNA, 22 nt, Human
ucaccgcguaaucuugcuuuac

SEQ ID NO: 75919 - RNA, 19 nt, Human
uccaaaguggagugugaaa

SEQ ID NO: 75920 - RNA, 20 nt, Human
uccacggcgccucccugccc

SEQ ID NO: 75921 - RNA, 22 nt, Human
uccccuccccccuccccagccc

SEQ ID NO: 75922 - RNA, 19 nt, Human
ugagaaacaaggaagggcc

SEQ ID NO: 75923 - RNA, 20 nt, Human
ugaguccacggcgccucccu

SEQ ID NO: 75924 - RNA, 23 nt, Human
ugaguccacggcgccucccugcc

SEQ ID NO: 75925 - RNA, 20 nt, Human
uggcuccuggguaguuccuc

SEQ ID NO: 75926 - RNA, 18 nt, Human
uuccaguggcugaggggc

SEQ ID NO: 75927 - RNA, 19 nt, Human
uuccccuccccccucccca

SEQ ID NO: 75928 - RNA, 18 nt, Human
aaaacuaaaccauaugaa

SEQ ID NO: 75929 - RNA, 24 nt, Human
agauagaaaugucaggcuucccaa

SEQ ID NO: 75930 - RNA, 23 nt, Human
auaaacuuuaaaaacugcauaaa

SEQ ID NO: 75931 - RNA, 24 nt, Human
gaaagcuucucagagcuuucuaga

SEQ ID NO: 75932 - RNA, 22 nt, Human
gcagcagagaaagcuucucaga

SEQ ID NO: 75933 - RNA, 18 nt, Human
guaauggccaaacagacu

SEQ ID NO: 75934 - RNA, 21 nt, Human
guuacaacaugaaucguugcu

SEQ ID NO: 75935 - RNA, 21 nt, Human
guuauaaacuuuaaaaacugc

SEQ ID NO: 75936 - RNA, 23 nt, Human
uaccauaugaaaacaccacugac

SEQ ID NO: 75937 - RNA, 21 nt, Human
uauaaaagugagauuauuacu

SEQ ID NO: 75938 - RNA, 24 nt, Human
ugacaaaaacuuugcuuuuauauu

SEQ ID NO: 75939 - RNA, 20 nt, Human
uguaguaauggccaaacaga

SEQ ID NO: 75940 - RNA, 24 nt, Human
uuacuuuauugcauuuaaagcaau

SEQ ID NO: 75941 - RNA, 24 nt, Human
uuuaaagcaaugaagaauguagcu

SEQ ID NO: 75942 - RNA, 18 nt, Human
aagcuggccacagugagc

SEQ ID NO: 75943 - RNA, 22 nt, Human
acacaccagacagacacggcca

SEQ ID NO: 75944 - RNA, 24 nt, Human
accagcugcccaccgcccacccag

SEQ ID NO: 75945 - RNA, 18 nt, Human
acccagggccggggagcc

SEQ ID NO: 75946 - RNA, 24 nt, Human
acucaccugcccuuugcauccccu

SEQ ID NO: 75947 - RNA, 22 nt, Human
agaaaaucuagagacaugaggg

SEQ ID NO: 75948 - RNA, 18 nt, Human
agagcacagccacucacu

SEQ ID NO: 75949 - RNA, 22 nt, Human
caaaugaagcugcaggccaaga

SEQ ID NO: 75950 - RNA, 22 nt, Human
caagcccgcucuggccugcacu

SEQ ID NO: 75951 - RNA, 19 nt, Human
cacagcacacaccagacag

SEQ ID NO: 75952 - RNA, 23 nt, Human
cacagcacacaccagacagacac

SEQ ID NO: 75953 - RNA, 20 nt, Human
cacaggaggggcgccguggg

SEQ ID NO: 75954 - RNA, 19 nt, Human
cacccagggccggggagcc

SEQ ID NO: 75955 - RNA, 18 nt, Human
cacccuuuucacucccca

SEQ ID NO: 75956 - RNA, 22 nt, Human
cacggccagggcgguaggcgcc

SEQ ID NO: 75957 - RNA, 23 nt, Human
cagcacaggaggggcgccguggg

SEQ ID NO: 75958 - RNA, 19 nt, Human
cagcugcccaccgcccacc

SEQ ID NO: 75959 - RNA, 24 nt, Human
cagcugcccaccgcccacccaggg

SEQ ID NO: 75960 - RNA, 21 nt, Human
cagggccggggagcccaagga

SEQ ID NO: 75961 - RNA, 23 nt, Human
caggucucagguggccacggaua

SEQ ID NO: 75962 - RNA, 22 nt, Human
ccagggccggggagcccaagga

SEQ ID NO: 75963 - RNA, 24 nt, Human
ccaguggcacccuuuucacucccc

SEQ ID NO: 75964 - RNA, 21 nt, Human
ccugcacuguguccugggcag

SEQ ID NO: 75965 - RNA, 23 nt, Human
ccugcacuguguccugggcagcu

SEQ ID NO: 75966 - RNA, 20 nt, Human
ccuugggugacgucccuggc

SEQ ID NO: 75967 - RNA, 22 nt, Human
ccuugggugacgucccuggccu

SEQ ID NO: 75968 - RNA, 22 nt, Human
cggagcccuucacacugaccac

SEQ ID NO: 75969 - RNA, 19 nt, Human
cggccagggcgguaggcgc

SEQ ID NO: 75970 - RNA, 23 nt, Human
cgucccuggccucagagugaccu

SEQ ID NO: 75971 - RNA, 18 nt, Human
cucgcaaaugaagcugca

SEQ ID NO: 75972 - RNA, 22 nt, Human
cucgcaaaugaagcugcaggcc

SEQ ID NO: 75973 - RNA, 18 nt, Human
cugccucggcgcucucgc

SEQ ID NO: 75974 - RNA, 19 nt, Human
cuggccaaguccugccaag

SEQ ID NO: 75975 - RNA, 20 nt, Human
cuucacacugaccaccagcc

SEQ ID NO: 75976 - RNA, 18 nt, Human
gaagcgggcagggaggcc

SEQ ID NO: 75977 - RNA, 20 nt, Human
gacacacacgucacagcaca

SEQ ID NO: 75978 - RNA, 18 nt, Human
gagggacauaaaugggcc

SEQ ID NO: 75979 - RNA, 24 nt, Human
gcacggagcccuucacacugacca

SEQ ID NO: 75980 - RNA, 22 nt, Human
gcgccgugggcccugguugcac

SEQ ID NO: 75981 - RNA, 20 nt, Human
ggcagggaggcccaccaggu

SEQ ID NO: 75982 - RNA, 22 nt, Human
ggcagggaggcccaccaggugg

SEQ ID NO: 75983 - RNA, 18 nt, Human
ggccaaguccugccaagu

SEQ ID NO: 75984 - RNA, 23 nt, Human
ggccagggccggggcuggcagcu

SEQ ID NO: 75985 - RNA, 20 nt, Human
ggccugcacuguguccuggg

SEQ ID NO: 75986 - RNA, 18 nt, Human
gggaggcccaccaggugg

SEQ ID NO: 75987 - RNA, 20 nt, Human
gggcagggaggcccaccagg

SEQ ID NO: 75988 - RNA, 23 nt, Human
gggcagggaggcccaccaggugg

SEQ ID NO: 75989 - RNA, 26 nt, Human
gggccagggccggggcuggcagcuga

SEQ ID NO: 75990 - RNA, 22 nt, Human
gggccggggagcccaaggaagc

SEQ ID NO: 75991 - RNA, 20 nt, Human
gggccuggggaaggguuggg

SEQ ID NO: 75992 - RNA, 18 nt, Human
gggcgccgugggcccugg

SEQ ID NO: 75993 - RNA, 23 nt, Human
ggggagcccaaggaagcgggcag

SEQ ID NO: 75994 - RNA, 21 nt, Human
ggugacgagaaaaucuagaga

SEQ ID NO: 75995 - RNA, 26 nt, Human
gugcagggguucacagcacacaccag

SEQ ID NO: 75996 - RNA, 23 nt, Human
gugggguugggugcagggguuca

SEQ ID NO: 75997 - RNA, 26 nt, Human
ucacagcacacaccagacagacacgg

SEQ ID NO: 75998 - RNA, 19 nt, Human
uccccucuguggguggagg

SEQ ID NO: 75999 - RNA, 20 nt, Human
ucccuggagaccagcugccc

SEQ ID NO: 76000 - RNA, 24 nt, Human
ucuggaccauccacccaguggugc

SEQ ID NO: 76001 - RNA, 21 nt, Human
ucuguuuuucacacugggccu

SEQ ID NO: 76002 - RNA, 23 nt, Human
ugaccaccagccuugggugacgu

SEQ ID NO: 76003 - RNA, 21 nt, Human
ugacgucccuggccucagagu

SEQ ID NO: 76004 - RNA, 21 nt, Human
ugagcuguccggguucucccc

SEQ ID NO: 76005 - RNA, 22 nt, Human
ugagggacauaaaugggccugg

SEQ ID NO: 76006 - RNA, 18 nt, Human
ugcaggccaagaagcccc

SEQ ID NO: 76007 - RNA, 20 nt, Human
ugccuggaagggucguggag

SEQ ID NO: 76008 - RNA, 27 nt, Human
ugcgguucuugacucaccugcccuuug

SEQ ID NO: 76009 - RNA, 19 nt, Human
uggaggaugcuucagggaa

SEQ ID NO: 76010 - RNA, 19 nt, Human
uggcaggacugagcugucc

SEQ ID NO: 76011 - RNA, 21 nt, Human
uggcaggacugagcuguccgg

SEQ ID NO: 76012 - RNA, 19 nt, Human
uggccaaguccugccaagu

SEQ ID NO: 76013 - RNA, 24 nt, Human
ugggcagcugcuggccaaguccug

SEQ ID NO: 76014 - RNA, 19 nt, Human
uggggugggggccagggcc

SEQ ID NO: 76015 - RNA, 25 nt, Human
uggggugggggccagggccggggcu

SEQ ID NO: 76016 - RNA, 26 nt, Human
uggggugggggccagggccggggcug

SEQ ID NO: 76017 - RNA, 23 nt, Human
uggucaagcccgcucuggccugc

SEQ ID NO: 76018 - RNA, 19 nt, Human
ugugcagagagcacagcca

SEQ ID NO: 76019 - RNA, 20 nt, Human
uuccccggccugggagcccc

SEQ ID NO: 76020 - RNA, 21 nt, Human
uuuucacuccccagcugugau

SEQ ID NO: 76021 - RNA, 19 nt, Human
aacagaguucaaguauuca

SEQ ID NO: 76022 - RNA, 18 nt, Human
aacccuccagaugaacuc

SEQ ID NO: 76023 - RNA, 22 nt, Human
aacuucuccccccugaccccca

SEQ ID NO: 76024 - RNA, 23 nt, Human
aaggcacugucaccccccacccu

SEQ ID NO: 76025 - RNA, 19 nt, Human
accccacaccccaagccca

SEQ ID NO: 76026 - RNA, 21 nt, Human
accccacaccccaagcccaga

SEQ ID NO: 76027 - RNA, 18 nt, Human
accccaccccacacccca

SEQ ID NO: 76028 - RNA, 19 nt, Human
accccaccccacaccccaa

SEQ ID NO: 76029 - RNA, 23 nt, Human
agaacuucuccccccugaccccc

SEQ ID NO: 76030 - RNA, 18 nt, Human
agaagcagagggcagggc

SEQ ID NO: 76031 - RNA, 20 nt, Human
agacccuaggcugugcccaa

SEQ ID NO: 76032 - RNA, 22 nt, Human
agagaggaagggagagaacuga

SEQ ID NO: 76033 - RNA, 23 nt, Human
agaggaagggagagaacugagag

SEQ ID NO: 76034 - RNA, 18 nt, Human
agagggcagggcaggcuc

SEQ ID NO: 76035 - RNA, 21 nt, Human
agcaggaccuuggccccccuc

SEQ ID NO: 76036 - RNA, 23 nt, Human
agcgccuagcagacagggcuaag

SEQ ID NO: 76037 - RNA, 18 nt, Human
agcugaauccuggggaac

SEQ ID NO: 76038 - RNA, 22 nt, Human
aggaaugggagcagggguagag

SEQ ID NO: 76039 - RNA, 24 nt, Human
aggcaaagacuucgcuuaagucca

SEQ ID NO: 76040 - RNA, 21 nt, Human
aggcuucugacacgugaguuc

SEQ ID NO: 76041 - RNA, 23 nt, Human
aucuuccagaauagcugaauccu

SEQ ID NO: 76042 - RNA, 22 nt, Human
caagacccuaggcugugcccaa

SEQ ID NO: 76043 - RNA, 21 nt, Human
caaggguauuauaaaaagcua

SEQ ID NO: 76044 - RNA, 23 nt, Human
cacaccccaagcccagaaucccu

SEQ ID NO: 76045 - RNA, 22 nt, Human
caccccaagcccagaaucccug

SEQ ID NO: 76046 - RNA, 23 nt, Human
caccccacaccccaagcccagaa

SEQ ID NO: 76047 - RNA, 23 nt, Human
caccccaccccacaccccaagcc

SEQ ID NO: 76048 - RNA, 22 nt, Human
caccccuucagccuccuguucc

SEQ ID NO: 76049 - RNA, 19 nt, Human
cagacagcucuggucugcg

SEQ ID NO: 76050 - RNA, 23 nt, Human
cagaugaacucccuacuccuuuu

SEQ ID NO: 76051 - RNA, 23 nt, Human
cagccccugggcccagagagagg

SEQ ID NO: 76052 - RNA, 19 nt, Human
cagcccgagggacccgcga

SEQ ID NO: 76053 - RNA, 24 nt, Human
cagccugccgggauccuggcccaa

SEQ ID NO: 76054 - RNA, 19 nt, Human
caguucccccaucuacacc

SEQ ID NO: 76055 - RNA, 26 nt, Human
cauagacccaccaauccccacacccc

SEQ ID NO: 76056 - RNA, 22 nt, Human
ccaagacccuaggcugugccca

SEQ ID NO: 76057 - RNA, 19 nt, Human
ccaccccacaccccaagcc

SEQ ID NO: 76058 - RNA, 18 nt, Human
ccaccccaccccacaccc

SEQ ID NO: 76059 - RNA, 23 nt, Human
ccaccccaccccacaccccaagc

SEQ ID NO: 76060 - RNA, 18 nt, Human
ccagcgccuagcagacag

SEQ ID NO: 76061 - RNA, 18 nt, Human
cccacaccccaagcccag

SEQ ID NO: 76062 - RNA, 24 nt, Human
cccacaccccaagcccagaauccc

SEQ ID NO: 76063 - RNA, 18 nt, Human
cccacaccccagacgucc

SEQ ID NO: 76064 - RNA, 22 nt, Human
cccacgcaggggcccuccgaag

SEQ ID NO: 76065 - RNA, 23 nt, Human
cccagagagagggcccacuagca

SEQ ID NO: 76066 - RNA, 18 nt, Human
ccccacaccccaagccca

SEQ ID NO: 76067 - RNA, 21 nt, Human
ccccaccccacaccccaagcc

SEQ ID NO: 76068 - RNA, 24 nt, Human
ccccaccccacaccccaagcccag

SEQ ID NO: 76069 - RNA, 25 nt, Human
ccccaccccacaccccaagcccaga

SEQ ID NO: 76070 - RNA, 19 nt, Human
ccccacgcaggggcccucc

SEQ ID NO: 76071 - RNA, 25 nt, Human
ccccccacccugaggagaccuagac

SEQ ID NO: 76072 - RNA, 25 nt, Human
cccccugacccccaagacccuaggc

SEQ ID NO: 76073 - RNA, 22 nt, Human
ccccucccugcauuuggcugaa

SEQ ID NO: 76074 - RNA, 24 nt, Human
ccccucuccuaguagguccugcuc

SEQ ID NO: 76075 - RNA, 20 nt, Human
ccccuucagccuccuguucc

SEQ ID NO: 76076 - RNA, 24 nt, Human
cccgcgagacuccagugaucauag

SEQ ID NO: 76077 - RNA, 23 nt, Human
cccugggcccagagagagggccc

SEQ ID NO: 76078 - RNA, 20 nt, Human
ccugccgggauccuggccca

SEQ ID NO: 76079 - RNA, 19 nt, Human
ccuggcccaacccgggugg

SEQ ID NO: 76080 - RNA, 24 nt, Human
ccuguagucugggcaaggaggagc

SEQ ID NO: 76081 - RNA, 18 nt, Human
cgacuccaccccacccca

SEQ ID NO: 76082 - RNA, 19 nt, Human
cgggauccuggcccaaccc

SEQ ID NO: 76083 - RNA, 22 nt, Human
cucacccaaggcccccagggau

SEQ ID NO: 76084 - RNA, 18 nt, Human
cuccccccugacccccaa

SEQ ID NO: 76085 - RNA, 26 nt, Human
cuuagaacccuccagaugaacucccu

SEQ ID NO: 76086 - RNA, 18 nt, Human
cuucucccacuuagaacc

SEQ ID NO: 76087 - RNA, 23 nt, Human
cuugccccgaagccauuuuucag

SEQ ID NO: 76088 - RNA, 19 nt, Human
cuuggccccccucuccuag

SEQ ID NO: 76089 - RNA, 23 nt, Human
gaacauagacccaccaaucccca

SEQ ID NO: 76090 - RNA, 19 nt, Human
gaaccgggaccccaaaggg

SEQ ID NO: 76091 - RNA, 22 nt, Human
gacccaccaauccccacacccc

SEQ ID NO: 76092 - RNA, 23 nt, Human
gacuccaccccaccccacacccc

SEQ ID NO: 76093 - RNA, 22 nt, Human
gagaaggcacugucacccccca

SEQ ID NO: 76094 - RNA, 23 nt, Human
gagaaggcacugucaccccccac

SEQ ID NO: 76095 - RNA, 21 nt, Human
gagcaggaccuuggccccccu

SEQ ID NO: 76096 - RNA, 25 nt, Human
gaggauaggggguggccuauggggg

SEQ ID NO: 76097 - RNA, 24 nt, Human
gaggucccgaggggcuggcggcug

SEQ ID NO: 76098 - RNA, 19 nt, Human
gaggugccagcggcacccg

SEQ ID NO: 76099 - RNA, 19 nt, Human
gcacaguuuauuuccaaac

SEQ ID NO: 76100 - RNA, 18 nt, Human
gcagaagcagagggcagg

SEQ ID NO: 76101 - RNA, 22 nt, Human
gcagccugacuggcccccacgc

SEQ ID NO: 76102 - RNA, 20 nt, Human
gcccaguuuccaggaauggg

SEQ ID NO: 76103 - RNA, 21 nt, Human
gcccccagggaugggggugag

SEQ ID NO: 76104 - RNA, 25 nt, Human
gccccgaagccauuuuucaggucuc

SEQ ID NO: 76105 - RNA, 22 nt, Human
gccgggauccuggcccaacccg

SEQ ID NO: 76106 - RNA, 18 nt, Human
gcuccugggacacaugcu

SEQ ID NO: 76107 - RNA, 20 nt, Human
ggacccgcgagacuccagug

SEQ ID NO: 76108 - RNA, 19 nt, Human
ggagggugggggaacagag

SEQ ID NO: 76109 - RNA, 23 nt, Human
ggcuggcggcugcugcucccagg

SEQ ID NO: 76110 - RNA, 21 nt, Human
gggaacagagaaggcaaagac

SEQ ID NO: 76111 - RNA, 24 nt, Human
gucugggcaaggaggagccuuagc

SEQ ID NO: 76112 - RNA, 18 nt, Human
gugccagagccaugaggg

SEQ ID NO: 76113 - RNA, 18 nt, Human
uaacaaaccaaguccuaa

SEQ ID NO: 76114 - RNA, 19 nt, Human
uaaggagagaggaagggag

SEQ ID NO: 76115 - RNA, 21 nt, Human
uaaggugaccaucucuggguc

SEQ ID NO: 76116 - RNA, 22 nt, Human
uagaacccuccagaugaacucc

SEQ ID NO: 76117 - RNA, 18 nt, Human
uagaauggugggaauggg

SEQ ID NO: 76118 - RNA, 20 nt, Human
uagggugcugaucuuccaga

SEQ ID NO: 76119 - RNA, 27 nt, Human
uaguccuucucccacuuagaacccucc

SEQ ID NO: 76120 - RNA, 24 nt, Human
ucaagaacuucuccccccugaccc

SEQ ID NO: 76121 - RNA, 21 nt, Human
ucaguggaggacgggaucagc

SEQ ID NO: 76122 - RNA, 24 nt, Human
ucaguggaggacgggaucagccug

SEQ ID NO: 76123 - RNA, 21 nt, Human
uccaacugcaaaggcaguaug

SEQ ID NO: 76124 - RNA, 22 nt, Human
ucccaccucugggauuccuagu

SEQ ID NO: 76125 - RNA, 21 nt, Human
uccccacaccccagacguccu

SEQ ID NO: 76126 - RNA, 22 nt, Human
ucccugauauaacaaaccaagu

SEQ ID NO: 76127 - RNA, 24 nt, Human
uccuggggaacauagacccaccaa

SEQ ID NO: 76128 - RNA, 23 nt, Human
ucggcaggggcagccaccccuuc

SEQ ID NO: 76129 - RNA, 22 nt, Human
ucucugggucggcaggggcagc

SEQ ID NO: 76130 - RNA, 23 nt, Human
ucucugggucggcaggggcagcc

SEQ ID NO: 76131 - RNA, 23 nt, Human
ucugaaccgggaccccaaagggc

SEQ ID NO: 76132 - RNA, 20 nt, Human
ucugcagccugacuggcccc

SEQ ID NO: 76133 - RNA, 22 nt, Human
ucugccuccccucccugcauuu

SEQ ID NO: 76134 - RNA, 24 nt, Human
ucuuccagaauagcugaauccugg

SEQ ID NO: 76135 - RNA, 20 nt, Human
ugagagccuucaccuguagu

SEQ ID NO: 76136 - RNA, 19 nt, Human
ugaggagaccuagacaggu

SEQ ID NO: 76137 - RNA, 20 nt, Human
ugagggaggagacggccaca

SEQ ID NO: 76138 - RNA, 18 nt, Human
ugaguucagacagcucug

SEQ ID NO: 76139 - RNA, 23 nt, Human
ugcagaagcagagggcagggcag

SEQ ID NO: 76140 - RNA, 19 nt, Human
ugccugggaggaccugggc

SEQ ID NO: 76141 - RNA, 23 nt, Human
ugcgacuccaccccaccccacac

SEQ ID NO: 76142 - RNA, 19 nt, Human
ugcugcucccaggggcuga

SEQ ID NO: 76143 - RNA, 19 nt, Human
uggagggugggggaacaga

SEQ ID NO: 76144 - RNA, 19 nt, Human
uggccggagggaggaaugg

SEQ ID NO: 76145 - RNA, 27 nt, Human
uggccuaugggcuccaucugccucccu

SEQ ID NO: 76146 - RNA, 23 nt, Human
uggcucccagucucuugccuccc

SEQ ID NO: 76147 - RNA, 22 nt, Human
ugggaaugggcucucacaaggg

SEQ ID NO: 76148 - RNA, 23 nt, Human
uggggagaaguggcucccagucu

SEQ ID NO: 76149 - RNA, 21 nt, Human
ugucccugugcagcccgaggg

SEQ ID NO: 76150 - RNA, 23 nt, Human
uguugauaguccuucucccacuu

SEQ ID NO: 76151 - RNA, 18 nt, Human
uucacaguucccccaucu

SEQ ID NO: 76152 - RNA, 18 nt, Human
uucccccaucuacacccc

SEQ ID NO: 76153 - RNA, 21 nt, Human
uuuccaggaaugggcgucagu

SEQ ID NO: 76154 - RNA, 19 nt, Human
aaaggggaaguggggcagg

SEQ ID NO: 76155 - RNA, 24 nt, Human
aaaggggaaguggggcagggaagg

SEQ ID NO: 76156 - RNA, 20 nt, Human
aacacugaaggcgaagagcc

SEQ ID NO: 76157 - RNA, 19 nt, Human
aacccugucucugcuaccc

SEQ ID NO: 76158 - RNA, 25 nt, Human
aagaggaaugaagagagaagaccug

SEQ ID NO: 76159 - RNA, 20 nt, Human
aagcauagucagguaggaac

SEQ ID NO: 76160 - RNA, 23 nt, Human
acccaggcccccagcuaggaccc

SEQ ID NO: 76161 - RNA, 18 nt, Human
acccuacucccaacccag

SEQ ID NO: 76162 - RNA, 21 nt, Human
accugggcccaccaggacagc

SEQ ID NO: 76163 - RNA, 21 nt, Human
acuggaguagcaggaagagcu

SEQ ID NO: 76164 - RNA, 22 nt, Human
agaacaaggaagacaguucaca

SEQ ID NO: 76165 - RNA, 23 nt, Human
agagcagcagggcccagagccca

SEQ ID NO: 76166 - RNA, 25 nt, Human
agagcagcagggcccagagcccagg

SEQ ID NO: 76167 - RNA, 21 nt, Human
agagcccagggcccacccagg

SEQ ID NO: 76168 - RNA, 28 nt, Human
agaggcagcugccacacuucccaagggg

SEQ ID NO: 76169 - RNA, 23 nt, Human
agcagccugcucaccccaacccc

SEQ ID NO: 76170 - RNA, 19 nt, Human
aggaagacaguucacaggc

SEQ ID NO: 76171 - RNA, 25 nt, Human
aggaagacaguucacaggccacuga

SEQ ID NO: 76172 - RNA, 22 nt, Human
aggaagagcugaguggugccag

SEQ ID NO: 76173 - RNA, 23 nt, Human
aggaagcugcaguaccucgcugu

SEQ ID NO: 76174 - RNA, 18 nt, Human
agggacagagaccuagag

SEQ ID NO: 76175 - RNA, 18 nt, Human
agggcacgauggaaggaa

SEQ ID NO: 76176 - RNA, 21 nt, Human
aggggcuagaggggucaagcu

SEQ ID NO: 76177 - RNA, 21 nt, Human
augauacaaggaccugggccc

SEQ ID NO: 76178 - RNA, 23 nt, Human
augauacaaggaccugggcccac

SEQ ID NO: 76179 - RNA, 20 nt, Human
auggagagcagucuugaaca

SEQ ID NO: 76180 - RNA, 21 nt, Human
caacuccagaugcugccuccu

SEQ ID NO: 76181 - RNA, 20 nt, Human
cacaacacugaaggcgaaga

SEQ ID NO: 76182 - RNA, 19 nt, Human
caccaggacagcuccuagg

SEQ ID NO: 76183 - RNA, 18 nt, Human
caccccccacucagucac

SEQ ID NO: 76184 - RNA, 20 nt, Human
cacccuacucccaacccagc

SEQ ID NO: 76185 - RNA, 21 nt, Human
caccgcugcccccaccgggag

SEQ ID NO: 76186 - RNA, 21 nt, Human
cacuugccagcaccccccacu

SEQ ID NO: 76187 - RNA, 25 nt, Human
cagagcccagggcccacccaggccc

SEQ ID NO: 76188 - RNA, 19 nt, Human
caggacagcuccuaggaga

SEQ ID NO: 76189 - RNA, 28 nt, Human
caggcccucccuccccaccgcugccccc

SEQ ID NO: 76190 - RNA, 18 nt, Human
cagggaaggacccuggug

SEQ ID NO: 76191 - RNA, 23 nt, Human
cagggcccacccaggcccccagc

SEQ ID NO: 76192 - RNA, 19 nt, Human
caguaccucgcugugcccc

SEQ ID NO: 76193 - RNA, 23 nt, Human
caguauuuacaggggcuagaggg

SEQ ID NO: 76194 - RNA, 22 nt, Human
cagucccacacacagacaacgg

SEQ ID NO: 76195 - RNA, 18 nt, Human
caugggaucccagcagcc

SEQ ID NO: 76196 - RNA, 22 nt, Human
ccacacuugccagcacccccca

SEQ ID NO: 76197 - RNA, 18 nt, Human
ccacaugcucugcucagg

SEQ ID NO: 76198 - RNA, 26 nt, Human
ccacugggacacccuacucccaaccc

SEQ ID NO: 76199 - RNA, 22 nt, Human
ccagcuuccuauaagcaacccu

SEQ ID NO: 76200 - RNA, 21 nt, Human
ccaggcagaagggccaggucc

SEQ ID NO: 76201 - RNA, 23 nt, Human
cccacugggacacccuacuccca

SEQ ID NO: 76202 - RNA, 24 nt, Human
ccccaccgcccccggggccccucc

SEQ ID NO: 76203 - RNA, 18 nt, Human
cccccaccgcccccgggg

SEQ ID NO: 76204 - RNA, 18 nt, Human
cccccaccgggagccccc

SEQ ID NO: 76205 - RNA, 19 nt, Human
cccccggggccccucaguc

SEQ ID NO: 76206 - RNA, 20 nt, Human
cccccggggccccucagucc

SEQ ID NO: 76207 - RNA, 24 nt, Human
ccccggggccccucagucccacac

SEQ ID NO: 76208 - RNA, 23 nt, Human
ccccuuggcaucagguccucugg

SEQ ID NO: 76209 - RNA, 27 nt, Human
ccgcugcccccaccgggagcccccacc

SEQ ID NO: 76210 - RNA, 19 nt, Human
ccgggagcccccaccgccc

SEQ ID NO: 76211 - RNA, 23 nt, Human
ccucagcgccauguccaggcccu

SEQ ID NO: 76212 - RNA, 19 nt, Human
ccucagggcacgauggaag

SEQ ID NO: 76213 - RNA, 23 nt, Human
ccucccauucccagggccuggac

SEQ ID NO: 76214 - RNA, 18 nt, Human
ccugcucaccccaacccc

SEQ ID NO: 76215 - RNA, 21 nt, Human
ccugcugcuccacagccggcu

SEQ ID NO: 76216 - RNA, 19 nt, Human
ccuguaguugggaccgugg

SEQ ID NO: 76217 - RNA, 23 nt, Human
ccugucucugcuaccccugagag

SEQ ID NO: 76218 - RNA, 21 nt, Human
cggcaagagugggcugcagag

SEQ ID NO: 76219 - RNA, 19 nt, Human
cuagagcccaauuuaggcc

SEQ ID NO: 76220 - RNA, 22 nt, Human
cuaggagagaaagcauagucag

SEQ ID NO: 76221 - RNA, 22 nt, Human
cuccagaggcacugcugggccc

SEQ ID NO: 76222 - RNA, 18 nt, Human
cugcagagucagggccag

SEQ ID NO: 76223 - RNA, 25 nt, Human
cugcaguaccucgcugugccccaac

SEQ ID NO: 76224 - RNA, 29 nt, Human
cugcugcuccacagccggcuggugaccac

SEQ ID NO: 76225 - RNA, 18 nt, Human
cuguguuggggccugggc

SEQ ID NO: 76226 - RNA, 21 nt, Human
cuugccagcaccccccacuca

SEQ ID NO: 76227 - RNA, 23 nt, Human
gaacagccuggcuagaacaagga

SEQ ID NO: 76228 - RNA, 20 nt, Human
gacaggcugguggcuggggc

SEQ ID NO: 76229 - RNA, 18 nt, Human
gagagaaagcauagucag

SEQ ID NO: 76230 - RNA, 19 nt, Human
gagcccagggcccacccag

SEQ ID NO: 76231 - RNA, 20 nt, Human
gauccugcugucccccaccc

SEQ ID NO: 76232 - RNA, 20 nt, Human
gcagaggcugaggaaacugg

SEQ ID NO: 76233 - RNA, 22 nt, Human
gcagaggcugaggaaacuggag

SEQ ID NO: 76234 - RNA, 18 nt, Human
gcaguaccucgcugugcc

SEQ ID NO: 76235 - RNA, 23 nt, Human
gcccagagcccagggcccacccc

SEQ ID NO: 76236 - RNA, 21 nt, Human
gcccagugcugggucccugag

SEQ ID NO: 76237 - RNA, 21 nt, Human
gccgugucaggccucagggca

SEQ ID NO: 76238 - RNA, 19 nt, Human
gcuagagcagcagggccca

SEQ ID NO: 76239 - RNA, 22 nt, Human
gcugugcucagcccagaggcag

SEQ ID NO: 76240 - RNA, 21 nt, Human
ggaaggacccuggugagggcc

SEQ ID NO: 76241 - RNA, 19 nt, Human
ggacagagaccuagagccc

SEQ ID NO: 76242 - RNA, 22 nt, Human
ggacaggcugguggcuggggcu

SEQ ID NO: 76243 - RNA, 19 nt, Human
ggcagggaaggacccuggu

SEQ ID NO: 76244 - RNA, 21 nt, Human
ggccaugggaucccagcagcc

SEQ ID NO: 76245 - RNA, 20 nt, Human
ggccugggcuccagaggcac

SEQ ID NO: 76246 - RNA, 23 nt, Human
ggcugguggcuggggcuagagca

SEQ ID NO: 76247 - RNA, 24 nt, Human
gggaaaaggggaaguggggcaggg

SEQ ID NO: 76248 - RNA, 21 nt, Human
gggcuguguuggggccugggc

SEQ ID NO: 76249 - RNA, 24 nt, Human
ggggccugggcuccagaggcacug

SEQ ID NO: 76250 - RNA, 24 nt, Human
guaauacugaggggcuggacagag

SEQ ID NO: 76251 - RNA, 19 nt, Human
guggcuggggcuagagcag

SEQ ID NO: 76252 - RNA, 22 nt, Human
uaaaauauauauucugcugccc

SEQ ID NO: 76253 - RNA, 19 nt, Human
uaccucgcugugccccaac

SEQ ID NO: 76254 - RNA, 22 nt, Human
uaccucgcugugccccaacucc

SEQ ID NO: 76255 - RNA, 19 nt, Human
uauucugcugcccaggcag

SEQ ID NO: 76256 - RNA, 18 nt, Human
ucacaggccacugaacag

SEQ ID NO: 76257 - RNA, 20 nt, Human
ucagcccagaggcagcugcc

SEQ ID NO: 76258 - RNA, 18 nt, Human
ucaggccaugggauccca

SEQ ID NO: 76259 - RNA, 19 nt, Human
ucagguccucuggaacaca

SEQ ID NO: 76260 - RNA, 19 nt, Human
ucagucccacacacagaca

SEQ ID NO: 76261 - RNA, 25 nt, Human
ucccaacccagcccagugcuggguc

SEQ ID NO: 76262 - RNA, 19 nt, Human
ucccagggccuggacucuc

SEQ ID NO: 76263 - RNA, 20 nt, Human
ucccagggccuggacucucc

SEQ ID NO: 76264 - RNA, 23 nt, Human
ucccgcggggcggccccucagcg

SEQ ID NO: 76265 - RNA, 23 nt, Human
ucccuccccaccgcugcccccac

SEQ ID NO: 76266 - RNA, 26 nt, Human
ucccuccccaccgcugcccccaccgg

SEQ ID NO: 76267 - RNA, 19 nt, Human
uccugcugcuccacagccg

SEQ ID NO: 76268 - RNA, 18 nt, Human
ucugccgugucaggccuc

SEQ ID NO: 76269 - RNA, 20 nt, Human
ucuggaacacaggggcucca

SEQ ID NO: 76270 - RNA, 18 nt, Human
ugaagagagaagaccugg

SEQ ID NO: 76271 - RNA, 20 nt, Human
ugaagagagaagaccuggcu

SEQ ID NO: 76272 - RNA, 19 nt, Human
ugaggaaacuggaguagca

SEQ ID NO: 76273 - RNA, 24 nt, Human
ugaggaaacuggaguagcaggaag

SEQ ID NO: 76274 - RNA, 21 nt, Human
ugagugccuugcagaggcuga

SEQ ID NO: 76275 - RNA, 21 nt, Human
ugccagcaccccccacucagu

SEQ ID NO: 76276 - RNA, 23 nt, Human
ugccccaacuccagaugcugccu

SEQ ID NO: 76277 - RNA, 18 nt, Human
ugccuugcagaggcugag

SEQ ID NO: 76278 - RNA, 22 nt, Human
ugcuauggagagcagucuugaa

SEQ ID NO: 76279 - RNA, 18 nt, Human
uggcagaggccauggggc

SEQ ID NO: 76280 - RNA, 21 nt, Human
uggcuagaacaaggaagacag

SEQ ID NO: 76281 - RNA, 26 nt, Human
ugggaucccagcagccugcucacccc

SEQ ID NO: 76282 - RNA, 22 nt, Human
uggggcuguguuggggccuggg

SEQ ID NO: 76283 - RNA, 26 nt, Human
uggguuggagcccagaaaaauagaug

SEQ ID NO: 76284 - RNA, 19 nt, Human
uggugagggccacacggca

SEQ ID NO: 76285 - RNA, 18 nt, Human
ugguggcuggggcuagag

SEQ ID NO: 76286 - RNA, 23 nt, Human
uguccaggcccucccuccccacc

SEQ ID NO: 76287 - RNA, 22 nt, Human
uucacaggccacugaacaguuc

SEQ ID NO: 76288 - RNA, 23 nt, Human
uuuuuuuuuuuuuuuuucucagg

SEQ ID NO: 76289 - RNA, 18 nt, Human
aaaaccccacccccaggc

SEQ ID NO: 76290 - RNA, 23 nt, Human
aaagaaaaaauacagcgaauaga

SEQ ID NO: 76291 - RNA, 24 nt, Human
aaagugcgacacgucuuaaccucc

SEQ ID NO: 76292 - RNA, 22 nt, Human
aagaaaaaauacagcgaauaga

SEQ ID NO: 76293 - RNA, 25 nt, Human
aagaaaccaaggaaaguuuccgcag

SEQ ID NO: 76294 - RNA, 20 nt, Human
acaaauaaaaagaaaccaag

SEQ ID NO: 76295 - RNA, 21 nt, Human
acagcgaauagagcuuccaaa

SEQ ID NO: 76296 - RNA, 20 nt, Human
accaugaacuaguguggccu

SEQ ID NO: 76297 - RNA, 19 nt, Human
acccccacccuagcucuga

SEQ ID NO: 76298 - RNA, 21 nt, Human
acucgcugccucagcccaagc

SEQ ID NO: 76299 - RNA, 22 nt, Human
aggaagauguggagacccccgg

SEQ ID NO: 76300 - RNA, 21 nt, Human
aggagggguggagcagagggc

SEQ ID NO: 76301 - RNA, 23 nt, Human
aggaguugccgcucagggaaaac

SEQ ID NO: 76302 - RNA, 22 nt, Human
aggcagacauauucgaaucaaa

SEQ ID NO: 76303 - RNA, 18 nt, Human
aggcaggugggcgaucag

SEQ ID NO: 76304 - RNA, 18 nt, Human
aggcgcccccucagggca

SEQ ID NO: 76305 - RNA, 20 nt, Human
agggguggagcagagggccu

SEQ ID NO: 76306 - RNA, 23 nt, Human
aguccuggcuaacgggagcugga

SEQ ID NO: 76307 - RNA, 20 nt, Human
auucacauugaguagaaaaa

SEQ ID NO: 76308 - RNA, 24 nt, Human
caaguccuggcuaacgggagcugg

SEQ ID NO: 76309 - RNA, 23 nt, Human
cacagugccauuaaggaggcgaa

SEQ ID NO: 76310 - RNA, 19 nt, Human
cacuggagucgcagagggc

SEQ ID NO: 76311 - RNA, 24 nt, Human
cagaaagcucccagcaggccugaa

SEQ ID NO: 76312 - RNA, 21 nt, Human
cagagggcggaagguagacac

SEQ ID NO: 76313 - RNA, 23 nt, Human
cagcacccgaaucgggcaccccc

SEQ ID NO: 76314 - RNA, 18 nt, Human
cagcgaauagagcuucca

SEQ ID NO: 76315 - RNA, 19 nt, Human
cagcggcacugcggugggc

SEQ ID NO: 76316 - RNA, 23 nt, Human
cauucagcacccgaaucgggcac

SEQ ID NO: 76317 - RNA, 21 nt, Human
cccaggcagacauauucgaau

SEQ ID NO: 76318 - RNA, 20 nt, Human
cccccaggcagacauauucg

SEQ ID NO: 76319 - RNA, 18 nt, Human
ccccggcuugcaccacac

SEQ ID NO: 76320 - RNA, 22 nt, Human
ccccuaggccauagggugccuc

SEQ ID NO: 76321 - RNA, 19 nt, Human
ccccucagggcagacucag

SEQ ID NO: 76322 - RNA, 22 nt, Human
ccccuccuuacauucagcaccc

SEQ ID NO: 76323 - RNA, 21 nt, Human
cccuaggccauagggugccuc

SEQ ID NO: 76324 - RNA, 20 nt, Human
ccuccuuacauucagcaccc

SEQ ID NO: 76325 - RNA, 20 nt, Human
ccuccuuccggggcucccag

SEQ ID NO: 76326 - RNA, 22 nt, Human
ccuccuuccggggcucccaggc

SEQ ID NO: 76327 - RNA, 18 nt, Human
cgaaucgggcacccccac

SEQ ID NO: 76328 - RNA, 24 nt, Human
cgacacgucuuaaccuccuuuaca

SEQ ID NO: 76329 - RNA, 22 nt, Human
cgccguggaaaggcuggccagg

SEQ ID NO: 76330 - RNA, 18 nt, Human
cuccuccuuccggggcuc

SEQ ID NO: 76331 - RNA, 18 nt, Human
cugggugugcgcucuccu

SEQ ID NO: 76332 - RNA, 20 nt, Human
cuuccggggcucccaggcgc

SEQ ID NO: 76333 - RNA, 23 nt, Human
cuuccggggcucccaggcgcuuc

SEQ ID NO: 76334 - RNA, 21 nt, Human
gaaaagcggcgagguugacaa

SEQ ID NO: 76335 - RNA, 18 nt, Human
gacaagacaggugggauc

SEQ ID NO: 76336 - RNA, 21 nt, Human
gcacugcggugggcgccgugg

SEQ ID NO: 76337 - RNA, 21 nt, Human
gcaggugggcgaucagggccc

SEQ ID NO: 76338 - RNA, 18 nt, Human
gccuagugcagaaagcuc

SEQ ID NO: 76339 - RNA, 25 nt, Human
gcucccagcaggccugaaauucuga

SEQ ID NO: 76340 - RNA, 25 nt, Human
ggccccuaggccauagggugccucu

SEQ ID NO: 76341 - RNA, 21 nt, Human
gggcacccccacccuagcucu

SEQ ID NO: 76342 - RNA, 23 nt, Human
gguccggagccggagcgcgggaa

SEQ ID NO: 76343 - RNA, 21 nt, Human
ggugccucuguucaaauuaga

SEQ ID NO: 76344 - RNA, 25 nt, Human
gucaugauaauaaauagagcccagg

SEQ ID NO: 76345 - RNA, 25 nt, Human
uaaaaagaaaccaaggaaaguuucc

SEQ ID NO: 76346 - RNA, 18 nt, Human
uaaauagagcccaggggc

SEQ ID NO: 76347 - RNA, 25 nt, Human
uaauaaauagagcccaggggcuucc

SEQ ID NO: 76348 - RNA, 21 nt, Human
uagcauggauaccaugaacua

SEQ ID NO: 76349 - RNA, 19 nt, Human
uagggugccucuguucaaa

SEQ ID NO: 76350 - RNA, 22 nt, Human
uccggggcucccaggcgcuucc

SEQ ID NO: 76351 - RNA, 21 nt, Human
ucuguucaaauuagaaaaagg

SEQ ID NO: 76352 - RNA, 21 nt, Human
ugcggugggcgccguggaaag

SEQ ID NO: 76353 - RNA, 22 nt, Human
ugcugccugggacugccagggu

SEQ ID NO: 76354 - RNA, 19 nt, Human
uggagcagagggccugaaa

SEQ ID NO: 76355 - RNA, 19 nt, Human
uggagcuggguuucaccuc

SEQ ID NO: 76356 - RNA, 21 nt, Human
ugggcgccguggaaaggcugg

SEQ ID NO: 76357 - RNA, 22 nt, Human
ugugcgcucuccuccuuccggg

SEQ ID NO: 76358 - RNA, 18 nt, Human
uugaauacaaacaacuga

SEQ ID NO: 76359 - RNA, 22 nt, Human
caaaccgugcaaauucaauuug

SEQ ID NO: 76360 - RNA, 19 nt, Human
cgggaagcaaggaagccuc

SEQ ID NO: 76361 - RNA, 23 nt, Human
ucaaagacaaauaugaaugacuc

SEQ ID NO: 76362 - RNA, 18 nt, Human
aaaaagagagaacccggg

SEQ ID NO: 76363 - RNA, 21 nt, Human
aaaggcgggcggaaggggcca

SEQ ID NO: 76364 - RNA, 20 nt, Human
aacccgggccuggcugcccc

SEQ ID NO: 76365 - RNA, 19 nt, Human
aagcccccuuggccccuuc

SEQ ID NO: 76366 - RNA, 18 nt, Human
agacggggcuccgcacuc

SEQ ID NO: 76367 - RNA, 20 nt, Human
agagaggacgccgagggggg

SEQ ID NO: 76368 - RNA, 24 nt, Human
agcguagaaggggcgugggagaga

SEQ ID NO: 76369 - RNA, 19 nt, Human
aggaggccccggagccgac

SEQ ID NO: 76370 - RNA, 22 nt, Human
aggggcgugggagagagcgaag

SEQ ID NO: 76371 - RNA, 24 nt, Human
cacaggccacagacucacuaaucc

SEQ ID NO: 76372 - RNA, 21 nt, Human
cacccgcuccuggggagaaag

SEQ ID NO: 76373 - RNA, 24 nt, Human
cauuuaaaaaagagagaacccggg

SEQ ID NO: 76374 - RNA, 21 nt, Human
cccgcgggaggaggccccgga

SEQ ID NO: 76375 - RNA, 21 nt, Human
cccggaccggggcugaggcug

SEQ ID NO: 76376 - RNA, 23 nt, Human
ccgcgagagaggacgccgagggg

SEQ ID NO: 76377 - RNA, 22 nt, Human
ccggggcugaggcugggggcug

SEQ ID NO: 76378 - RNA, 18 nt, Human
ccucagaaaggcgggcgg

SEQ ID NO: 76379 - RNA, 19 nt, Human
ccucagaaaggcgggcgga

SEQ ID NO: 76380 - RNA, 18 nt, Human
ccuggcgggggcgcgggg

SEQ ID NO: 76381 - RNA, 21 nt, Human
ccuuccugccccgccugggag

SEQ ID NO: 76382 - RNA, 24 nt, Human
cgcuggcccaggugcucgaggggu

SEQ ID NO: 76383 - RNA, 19 nt, Human
cuccuggggagaaaggggu

SEQ ID NO: 76384 - RNA, 25 nt, Human
cugggcuggggcgccagggagggcc

SEQ ID NO: 76385 - RNA, 22 nt, Human
cugggggcuggggucggggugg

SEQ ID NO: 76386 - RNA, 23 nt, Human
gaccggggcugaggcugggggcu

SEQ ID NO: 76387 - RNA, 23 nt, Human
gagcggccgcgagagaggacgcc

SEQ ID NO: 76388 - RNA, 18 nt, Human
gccuggucauuuguaaga

SEQ ID NO: 76389 - RNA, 22 nt, Human
gcucagccgcuggcccaggugc

SEQ ID NO: 76390 - RNA, 21 nt, Human
ggagagagcgaagccuggggg

SEQ ID NO: 76391 - RNA, 21 nt, Human
ggcuggggagacgcaguccgg

SEQ ID NO: 76392 - RNA, 20 nt, Human
gggagaaagggguugccuag

SEQ ID NO: 76393 - RNA, 19 nt, Human
gggaguggggagggcacag

SEQ ID NO: 76394 - RNA, 21 nt, Human
gggcagggcccccucccggga

SEQ ID NO: 76395 - RNA, 23 nt, Human
gggcagggcccccucccgggaaa

SEQ ID NO: 76396 - RNA, 19 nt, Human
gggcgcggggagaggggcu

SEQ ID NO: 76397 - RNA, 22 nt, Human
gggcuggggcgccagggagggc

SEQ ID NO: 76398 - RNA, 21 nt, Human
ggggagaaagggguugccuag

SEQ ID NO: 76399 - RNA, 23 nt, Human
ggggagccggcagaggcuggggg

SEQ ID NO: 76400 - RNA, 21 nt, Human
ggggcuggggucggggugggu

SEQ ID NO: 76401 - RNA, 19 nt, Human
ggggucggggugggugggc

SEQ ID NO: 76402 - RNA, 18 nt, Human
ggggugggugggcaagcc

SEQ ID NO: 76403 - RNA, 22 nt, Human
gggugggcaagcccccuuggcc

SEQ ID NO: 76404 - RNA, 20 nt, Human
uacagcucagccgcuggccc

SEQ ID NO: 76405 - RNA, 18 nt, Human
ucggggggcacugggcug

SEQ ID NO: 76406 - RNA, 21 nt, Human
ugccuaggggagccggcagag

SEQ ID NO: 76407 - RNA, 20 nt, Human
uggcagagacgcguauguac

SEQ ID NO: 76408 - RNA, 22 nt, Human
uggcgggggcgcggggagaggg

SEQ ID NO: 76409 - RNA, 20 nt, Human
ugggaguggggagggcacag

SEQ ID NO: 76410 - RNA, 20 nt, Human
uggggcgccagggagggccg

SEQ ID NO: 76411 - RNA, 21 nt, Human
uggggcgccagggagggccgg

SEQ ID NO: 76412 - RNA, 18 nt, Human
uggggguggggaguggca

SEQ ID NO: 76413 - RNA, 19 nt, Human
uggggguggggaguggcag

SEQ ID NO: 76414 - RNA, 20 nt, Human
uggggucggggugggugggc

SEQ ID NO: 76415 - RNA, 24 nt, Human
uuccugccccgccugggagugggg

SEQ ID NO: 76416 - RNA, 22 nt, Human
aaccgcuggguccccgacgucc

SEQ ID NO: 76417 - RNA, 26 nt, Human
aagcgcgcggccgccggcucccccgg

SEQ ID NO: 76418 - RNA, 22 nt, Human
aaguaaacuucuuggacgcgga

SEQ ID NO: 76419 - RNA, 24 nt, Human
agcgacaucggggacccggccucc

SEQ ID NO: 76420 - RNA, 20 nt, Human
aggaaguaaacuucuuggac

SEQ ID NO: 76421 - RNA, 22 nt, Human
aggcugcggccggugguccggc

SEQ ID NO: 76422 - RNA, 18 nt, Human
cagcucgggggccggcgg

SEQ ID NO: 76423 - RNA, 21 nt, Human
caggccccagacggggugggg

SEQ ID NO: 76424 - RNA, 22 nt, Human
caggccccagacgggguggggg

SEQ ID NO: 76425 - RNA, 24 nt, Human
cagguuagagcccagaagcgcgcu

SEQ ID NO: 76426 - RNA, 23 nt, Human
ccagaagcgcgcugggaccuggg

SEQ ID NO: 76427 - RNA, 21 nt, Human
cccagguuagagcccagaagc

SEQ ID NO: 76428 - RNA, 22 nt, Human
ccccggggcaaucucaggccgu

SEQ ID NO: 76429 - RNA, 27 nt, Human
ccccggggcaaucucaggccguugugg

SEQ ID NO: 76430 - RNA, 23 nt, Human
cccgcgguuuggcggcggcggcg

SEQ ID NO: 76431 - RNA, 19 nt, Human
ccgccggcucccccggccg

SEQ ID NO: 76432 - RNA, 19 nt, Human
ccggccgggcggaggcgca

SEQ ID NO: 76433 - RNA, 21 nt, Human
ccggcucgcggguuuccgccg

SEQ ID NO: 76434 - RNA, 20 nt, Human
cucccccggccgcugcaucc

SEQ ID NO: 76435 - RNA, 21 nt, Human
cugcggguggcgcgggcaucc

SEQ ID NO: 76436 - RNA, 18 nt, Human
gacggggugggggugcag

SEQ ID NO: 76437 - RNA, 19 nt, Human
gacggggugggggugcagg

SEQ ID NO: 76438 - RNA, 25 nt, Human
gcggcggcggcgacggcuuggcucc

SEQ ID NO: 76439 - RNA, 21 nt, Human
gcgguuuggcggcggcggcgg

SEQ ID NO: 76440 - RNA, 26 nt, Human
gcgguuuggcggcggcggcggcgacg

SEQ ID NO: 76441 - RNA, 25 nt, Human
ggccugagcccaaccgcuggguccc

SEQ ID NO: 76442 - RNA, 18 nt, Human
ggcggaggcgcaggggcc

SEQ ID NO: 76443 - RNA, 18 nt, Human
gggaccugggucuggcuu

SEQ ID NO: 76444 - RNA, 22 nt, Human
ggggcugcggguggcgcgggca

SEQ ID NO: 76445 - RNA, 19 nt, Human
gggggugcaggcgaggagc

SEQ ID NO: 76446 - RNA, 19 nt, Human
guccccgacguccagaagc

SEQ ID NO: 76447 - RNA, 19 nt, Human
guggagcgcucugcgcacc

SEQ ID NO: 76448 - RNA, 25 nt, Human
guggcgcgggcaucccaggccccgc

SEQ ID NO: 76449 - RNA, 21 nt, Human
uccccgacguccagaagcggg

SEQ ID NO: 76450 - RNA, 22 nt, Human
uccccgcggccggccgggcgga

SEQ ID NO: 76451 - RNA, 25 nt, Human
uccccgcggccggccgggcggaggc

SEQ ID NO: 76452 - RNA, 19 nt, Human
ucgggggccggcgggcgcc

SEQ ID NO: 76453 - RNA, 20 nt, Human
ucugcgcaccggagcucagg

SEQ ID NO: 76454 - RNA, 22 nt, Human
ucuggcuuuugggucugugucc

SEQ ID NO: 76455 - RNA, 23 nt, Human
ucuucgcaacaggggguaggggc

SEQ ID NO: 76456 - RNA, 19 nt, Human
ugccuggaggcuccccggc

SEQ ID NO: 76457 - RNA, 18 nt, Human
uggaaaaaaagucaccgu

SEQ ID NO: 76458 - RNA, 19 nt, Human
uggcggcggcggcggcgac

SEQ ID NO: 76459 - RNA, 21 nt, Human
uggcggcggcggcggcgacgg

SEQ ID NO: 76460 - RNA, 21 nt, Human
uggcuuuugggucuguguccu

SEQ ID NO: 76461 - RNA, 22 nt, Human
uggcuuuugggucuguguccuu

SEQ ID NO: 76462 - RNA, 18 nt, Human
ugggaccugggucuggcu

SEQ ID NO: 76463 - RNA, 23 nt, Human
ugggaccugggucuggcuuuugg

SEQ ID NO: 76464 - RNA, 23 nt, Human
aaaacuacagaaauaagugcuga

SEQ ID NO: 76465 - RNA, 23 nt, Human
acccucacccccccaaaaaaaua

SEQ ID NO: 76466 - RNA, 27 nt, Human
acucucccugccuucucucuuuucccu

SEQ ID NO: 76467 - RNA, 22 nt, Human
acugugggagggagggagacgg

SEQ ID NO: 76468 - RNA, 22 nt, Human
agacaagcaagucuuugucaaa

SEQ ID NO: 76469 - RNA, 21 nt, Human
aggaggugacaggcccaagac

SEQ ID NO: 76470 - RNA, 23 nt, Human
aggaggugacaggcccaagacaa

SEQ ID NO: 76471 - RNA, 18 nt, Human
aggcccaagacaagcaag

SEQ ID NO: 76472 - RNA, 23 nt, Human
aggugacaggcccaagacaagca

SEQ ID NO: 76473 - RNA, 20 nt, Human
cacccccccaaaaaaauaca

SEQ ID NO: 76474 - RNA, 24 nt, Human
cacccccccaaaaaaauacaacca

SEQ ID NO: 76475 - RNA, 19 nt, Human
cacccucacccccccaaaa

SEQ ID NO: 76476 - RNA, 18 nt, Human
cagcaaggaaccugggca

SEQ ID NO: 76477 - RNA, 22 nt, Human
cagcuccuaggcgcucucuccc

SEQ ID NO: 76478 - RNA, 19 nt, Human
caggcccaagacaagcaag

SEQ ID NO: 76479 - RNA, 20 nt, Human
ccccaaaaaaauacaaccaa

SEQ ID NO: 76480 - RNA, 19 nt, Human
ccccagcuggggcaggcag

SEQ ID NO: 76481 - RNA, 21 nt, Human
ccccagcuggggcaggcagcu

SEQ ID NO: 76482 - RNA, 24 nt, Human
cccccaaaaaaauacaaccaaaaa

SEQ ID NO: 76483 - RNA, 24 nt, Human
cccuacucucccugccuucucucu

SEQ ID NO: 76484 - RNA, 19 nt, Human
cccucacccccccaaaaaa

SEQ ID NO: 76485 - RNA, 20 nt, Human
cccucacccccccaaaaaaa

SEQ ID NO: 76486 - RNA, 24 nt, Human
cccucacccccccaaaaaaauaca

SEQ ID NO: 76487 - RNA, 19 nt, Human
cccugccuucucucuuuuc

SEQ ID NO: 76488 - RNA, 19 nt, Human
cccugccuucucucuuuuc

SEQ ID NO: 76489 - RNA, 23 nt, Human
ccgcuggggccgcggggcuggcg

SEQ ID NO: 76490 - RNA, 24 nt, Human
ccucacccccccaaaaaaauacaa

SEQ ID NO: 76491 - RNA, 19 nt, Human
cgcuggggccgcggggcug

SEQ ID NO: 76492 - RNA, 20 nt, Human
cggcccgagcgcggcugcga

SEQ ID NO: 76493 - RNA, 23 nt, Human
cuggaagguuuucucucccuacu

SEQ ID NO: 76494 - RNA, 19 nt, Human
cugggcugcuggaagguuu

SEQ ID NO: 76495 - RNA, 22 nt, Human
cuuaaucaagggcauccacagc

SEQ ID NO: 76496 - RNA, 22 nt, Human
gagugcccggcccgcuggggcc

SEQ ID NO: 76497 - RNA, 23 nt, Human
gcagccuuucaggaggugacagg

SEQ ID NO: 76498 - RNA, 18 nt, Human
gcugcccagaggucagga

SEQ ID NO: 76499 - RNA, 20 nt, Human
ggagggagggagacggguag

SEQ ID NO: 76500 - RNA, 22 nt, Human
ggcccgcuggggccgcggggcu

SEQ ID NO: 76501 - RNA, 19 nt, Human
gggcaggcagcuccuaggc

SEQ ID NO: 76502 - RNA, 20 nt, Human
gggcaggcagcuccuaggcg

SEQ ID NO: 76503 - RNA, 18 nt, Human
uaaaacuacagaaauaag

SEQ ID NO: 76504 - RNA, 23 nt, Human
uaaaacuacagaaauaagugcug

SEQ ID NO: 76505 - RNA, 18 nt, Human
uaagcacuuuccacugca

SEQ ID NO: 76506 - RNA, 19 nt, Human
uaggcgcucucucccuuaa

SEQ ID NO: 76507 - RNA, 21 nt, Human
ucaggaggugacaggcccaag

SEQ ID NO: 76508 - RNA, 22 nt, Human
uccacagcuaaagcagccuuuc

SEQ ID NO: 76509 - RNA, 20 nt, Human
ucccucuucccucaaaaggg

SEQ ID NO: 76510 - RNA, 19 nt, Human
ugcaugcuaggauauaggg

SEQ ID NO: 76511 - RNA, 23 nt, Human
ugcccacccucacccccccaaaa

SEQ ID NO: 76512 - RNA, 19 nt, Human
uucccucaaaaggguuuua

SEQ ID NO: 76513 - RNA, 24 nt, Human
uuuccacugcaugcuaggauauag

SEQ ID NO: 76514 - RNA, 23 nt, Human
uuuugcccacccucaccccccca

SEQ ID NO: 76515 - RNA, 18 nt, Human
aaaaagaaaacacagaaa

SEQ ID NO: 76516 - RNA, 19 nt, Human
aaaaagaaaacacagaaaa

SEQ ID NO: 76517 - RNA, 19 nt, Human
aaaaagaaaacacagaaaa

SEQ ID NO: 76518 - RNA, 21 nt, Human
aaaaagaaaacacagaaaaua

SEQ ID NO: 76519 - RNA, 26 nt, Human
aaacagaacuacaggugcacccaacc

SEQ ID NO: 76520 - RNA, 26 nt, Human
aaagaaaacacagaaaauacugcucu

SEQ ID NO: 76521 - RNA, 18 nt, Human
acccaaccacggacaugc

SEQ ID NO: 76522 - RNA, 21 nt, Human
acccaaccacggacaugcauu

SEQ ID NO: 76523 - RNA, 25 nt, Human
acucccaaaaauaucuggagaggaa

SEQ ID NO: 76524 - RNA, 21 nt, Human
agaaaacacagaaaauacugc

SEQ ID NO: 76525 - RNA, 21 nt, Human
agaacuacaggugcacccaac

SEQ ID NO: 76526 - RNA, 23 nt, Human
agaacuacaggugcacccaacca

SEQ ID NO: 76527 - RNA, 24 nt, Human
agaaucaaacgcaucacucccaac

SEQ ID NO: 76528 - RNA, 22 nt, Human
agagagagaggagauuguuuua

SEQ ID NO: 76529 - RNA, 26 nt, Human
agagaggagauagagagaggggaccc

SEQ ID NO: 76530 - RNA, 19 nt, Human
aggaagaauggaggauugg

SEQ ID NO: 76531 - RNA, 18 nt, Human
agguaggcuaaguaggau

SEQ ID NO: 76532 - RNA, 18 nt, Human
aguauaggagagagagag

SEQ ID NO: 76533 - RNA, 21 nt, Human
agugggcucugucugaaagcu

SEQ ID NO: 76534 - RNA, 21 nt, Human
auaagaaaggcuguaaauuaa

SEQ ID NO: 76535 - RNA, 18 nt, Human
auguuugucacucccaaa

SEQ ID NO: 76536 - RNA, 22 nt, Human
caacucccauugcagaagaaaa

SEQ ID NO: 76537 - RNA, 22 nt, Human
caauaaacagaacuacaggugc

SEQ ID NO: 76538 - RNA, 21 nt, Human
cacagaaaauacugcucucau

SEQ ID NO: 76539 - RNA, 19 nt, Human
cagaaaauacugcucucau

SEQ ID NO: 76540 - RNA, 20 nt, Human
cagaagaaaagcuauucaac

SEQ ID NO: 76541 - RNA, 23 nt, Human
ccaggacuucuugguaaaguuga

SEQ ID NO: 76542 - RNA, 23 nt, Human
cugaccaauaaacagaacuacag

SEQ ID NO: 76543 - RNA, 21 nt, Human
gaaagcuggcauucauccaca

SEQ ID NO: 76544 - RNA, 18 nt, Human
gagaggagagauaggaga

SEQ ID NO: 76545 - RNA, 21 nt, Human
gagaggagagauaggagagga

SEQ ID NO: 76546 - RNA, 20 nt, Human
ggaggagugcauguggcggc

SEQ ID NO: 76547 - RNA, 19 nt, Human
ggauucucccacccccucc

SEQ ID NO: 76548 - RNA, 20 nt, Human
uaaaaagaaaacacagaaaa

SEQ ID NO: 76549 - RNA, 24 nt, Human
uaaacagaacuacaggugcaccca

SEQ ID NO: 76550 - RNA, 22 nt, Human
uaucuggagaggaagaauggag

SEQ ID NO: 76551 - RNA, 25 nt, Human
uauuuggauucucccacccccuccc

SEQ ID NO: 76552 - RNA, 30 nt, Human
ucaaaauaagaaaggcuguaaauuaaaaaa

SEQ ID NO: 76553 - RNA, 23 nt, Human
ucagcgguggaggagugcaugug

SEQ ID NO: 76554 - RNA, 25 nt, Human
ucagguacaaacgauguacugcacu

SEQ ID NO: 76555 - RNA, 19 nt, Human
ucccacccccucccucccu

SEQ ID NO: 76556 - RNA, 19 nt, Human
ucccacccccucccucccu

SEQ ID NO: 76557 - RNA, 23 nt, Human
ugaccaauaaacagaacuacagg

SEQ ID NO: 76558 - RNA, 22 nt, Human
ugacugaagguauauuagauau

SEQ ID NO: 76559 - RNA, 18 nt, Human
ugagaaaucuagguaggc

SEQ ID NO: 76560 - RNA, 19 nt, Human
uggaggagugcauguggcg

SEQ ID NO: 76561 - RNA, 18 nt, Human
uggaggauuggcauugag

SEQ ID NO: 76562 - RNA, 21 nt, Human
uguggcggcaguuucagguac

SEQ ID NO: 76563 - RNA, 21 nt, Human
uuaaaaagaaaacacagaaaa

SEQ ID NO: 76564 - RNA, 22 nt, Human
uugggcaauacauaucauuacu

SEQ ID NO: 76565 - RNA, 22 nt, Human
aaacaaggggugaagaguaggg

SEQ ID NO: 76566 - RNA, 19 nt, Human
accggaaacagggccuucc

SEQ ID NO: 76567 - RNA, 22 nt, Human
acuuccgguugcaggcuucccu

SEQ ID NO: 76568 - RNA, 21 nt, Human
agaagggaagggggaucugga

SEQ ID NO: 76569 - RNA, 19 nt, Human
agacacauguguuucauuu

SEQ ID NO: 76570 - RNA, 22 nt, Human
agcaacagcgacgaaggaggga

SEQ ID NO: 76571 - RNA, 18 nt, Human
agccauggggugggggcu

SEQ ID NO: 76572 - RNA, 22 nt, Human
agggaagggggaucuggauggg

SEQ ID NO: 76573 - RNA, 22 nt, Human
agggagagcgcguauggcggca

SEQ ID NO: 76574 - RNA, 24 nt, Human
auggcggcagcaacagcgacgaag

SEQ ID NO: 76575 - RNA, 22 nt, Human
caaggggugaagaguaggggau

SEQ ID NO: 76576 - RNA, 22 nt, Human
cagaagagcuaaacagggagag

SEQ ID NO: 76577 - RNA, 23 nt, Human
cagcaacagcgacgaaggaggga

SEQ ID NO: 76578 - RNA, 20 nt, Human
cagggagagcgcguauggcg

SEQ ID NO: 76579 - RNA, 19 nt, Human
caguagugucuccuucacc

SEQ ID NO: 76580 - RNA, 21 nt, Human
caguagugucuccuucacccu

SEQ ID NO: 76581 - RNA, 25 nt, Human
ccauggggugggggcugucaggggu

SEQ ID NO: 76582 - RNA, 26 nt, Human
ccauggggugggggcugucaggggug

SEQ ID NO: 76583 - RNA, 18 nt, Human
ccgguugcaggcuucccu

SEQ ID NO: 76584 - RNA, 20 nt, Human
cgcaaaauaggugaaaacaa

SEQ ID NO: 76585 - RNA, 22 nt, Human
cggcagcaacagcgacgaagga

SEQ ID NO: 76586 - RNA, 23 nt, Human
cggcagcaacagcgacgaaggag

SEQ ID NO: 76587 - RNA, 18 nt, Human
cuccagccucccgccuuc

SEQ ID NO: 76588 - RNA, 23 nt, Human
cucuacuccagccucccgccuuc

SEQ ID NO: 76589 - RNA, 22 nt, Human
cugggccggcaggggaagaagg

SEQ ID NO: 76590 - RNA, 18 nt, Human
cugguguccucuccugaa

SEQ ID NO: 76591 - RNA, 23 nt, Human
gaagggggaucuggauggguucu

SEQ ID NO: 76592 - RNA, 24 nt, Human
gaggaacagcaaaggaaaacaaag

SEQ ID NO: 76593 - RNA, 28 nt, Human
gaggaacagcaaaggaaaaccgguaccc

SEQ ID NO: 76594 - RNA, 22 nt, Human
gcagcaacagcgacgaaggagg

SEQ ID NO: 76595 - RNA, 24 nt, Human
gcaggcuucccucuacuccagccu

SEQ ID NO: 76596 - RNA, 21 nt, Human
gcggcagcaacagcgacgaag

SEQ ID NO: 76597 - RNA, 20 nt, Human
gcugucaggggugggggcag

SEQ ID NO: 76598 - RNA, 18 nt, Human
ggaagaagggaaggggga

SEQ ID NO: 76599 - RNA, 21 nt, Human
gggaagaagggaagggggauc

SEQ ID NO: 76600 - RNA, 21 nt, Human
gggaagggggaucuggauggg

SEQ ID NO: 76601 - RNA, 23 nt, Human
ggggaagaagggaagggggaucu

SEQ ID NO: 76602 - RNA, 18 nt, Human
ggggugggggcugucagg

SEQ ID NO: 76603 - RNA, 18 nt, Human
gguggugaugcaaaagau

SEQ ID NO: 76604 - RNA, 19 nt, Human
gugggggcugucaggggug

SEQ ID NO: 76605 - RNA, 19 nt, Human
ucacuuccgguugcaggcu

SEQ ID NO: 76606 - RNA, 25 nt, Human
ucaggagugguggugaugcaaaagg

SEQ ID NO: 76607 - RNA, 19 nt, Human
uccgguugcaggcuucccu

SEQ ID NO: 76608 - RNA, 21 nt, Human
ucugccuucacuuccgguugc

SEQ ID NO: 76609 - RNA, 21 nt, Human
ugccuuuggaaaaugccuguc

SEQ ID NO: 76610 - RNA, 20 nt, Human
uggggguucaggaguggugg

SEQ ID NO: 76611 - RNA, 23 nt, Human
uggggugggggcugucaggggug

SEQ ID NO: 76612 - RNA, 25 nt, Human
uggggugggggcugucagggguggg

SEQ ID NO: 76613 - RNA, 24 nt, Human
ugguggugaugcaaaagauggaag

SEQ ID NO: 76614 - RNA, 20 nt, Human
uucacuuccgguugcaggcu

SEQ ID NO: 76615 - RNA, 26 nt, Human
aaacagccccagggacaggggaccag

SEQ ID NO: 76616 - RNA, 21 nt, Human
aagugaggccccagccccaca

SEQ ID NO: 76617 - RNA, 26 nt, Human
accaggggaagggggaggaggggaag

SEQ ID NO: 76618 - RNA, 25 nt, Human
agggggaggaggggaagugaggccc

SEQ ID NO: 76619 - RNA, 27 nt, Human
caaacagccccagggacaggggaccag

SEQ ID NO: 76620 - RNA, 21 nt, Human
caaccccuccccgcccacccc

SEQ ID NO: 76621 - RNA, 22 nt, Human
caaccccuccccgcccaccccu

SEQ ID NO: 76622 - RNA, 23 nt, Human
cagggacaggggaccaggggaag

SEQ ID NO: 76623 - RNA, 19 nt, Human
cccacaaccccuccccgcc

SEQ ID NO: 76624 - RNA, 21 nt, Human
cccacaaccccuccccgccca

SEQ ID NO: 76625 - RNA, 19 nt, Human
ccccacaaccccuccccgc

SEQ ID NO: 76626 - RNA, 23 nt, Human
ccccagccccacaaccccucccc

SEQ ID NO: 76627 - RNA, 18 nt, Human
ccccagggacaggggacc

SEQ ID NO: 76628 - RNA, 19 nt, Human
ccccagggacaggggacca

SEQ ID NO: 76629 - RNA, 21 nt, Human
cccccaaaacgugccagagcc

SEQ ID NO: 76630 - RNA, 21 nt, Human
ccccgcccaccccuuuccccc

SEQ ID NO: 76631 - RNA, 18 nt, Human
ccccuccccgcccacccc

SEQ ID NO: 76632 - RNA, 23 nt, Human
cccuccccgcccaccccuuuccc

SEQ ID NO: 76633 - RNA, 21 nt, Human
ccugcaggcaccucccccaaa

SEQ ID NO: 76634 - RNA, 22 nt, Human
gaagugaggccccagccccaca

SEQ ID NO: 76635 - RNA, 21 nt, Human
gaggccccagccccacaaccc

SEQ ID NO: 76636 - RNA, 25 nt, Human
gccccacaaccccuccccgcccacc

SEQ ID NO: 76637 - RNA, 20 nt, Human
gccccagccccacaaccccu

SEQ ID NO: 76638 - RNA, 19 nt, Human
gggauccgggacccgggcc

SEQ ID NO: 76639 - RNA, 21 nt, Human
ggggaagggggaggaggggaa

SEQ ID NO: 76640 - RNA, 20 nt, Human
ggggauccgggacccgggcc

SEQ ID NO: 76641 - RNA, 25 nt, Human
gugaggccccagccccacaaccccu

SEQ ID NO: 76642 - RNA, 19 nt, Human
uauaaucuauauacaagcc

SEQ ID NO: 76643 - RNA, 20 nt, Human
uccccgcccaccccuuuccc

SEQ ID NO: 76644 - RNA, 19 nt, Human
ugcgcuggaagcucauuga

SEQ ID NO: 76645 - RNA, 20 nt, Human
uggccgggugcgcggggauc

SEQ ID NO: 76646 - RNA, 19 nt, Human
uggguccugcaggcaccuc

SEQ ID NO: 76647 - RNA, 22 nt, Human
accugccaccgacggccacuuc

SEQ ID NO: 76648 - RNA, 21 nt, Human
agaaaguccgcagccccaaac

SEQ ID NO: 76649 - RNA, 18 nt, Human
aggaagggccauagagca

SEQ ID NO: 76650 - RNA, 25 nt, Human
agucgggccggggccggccuaggug

SEQ ID NO: 76651 - RNA, 22 nt, Human
cccaaacagugaguuucugagg

SEQ ID NO: 76652 - RNA, 20 nt, Human
ccccaaacagugaguuucug

SEQ ID NO: 76653 - RNA, 20 nt, Human
cccccaaaccugccaccgac

SEQ ID NO: 76654 - RNA, 18 nt, Human
ccccgaggagccgccacc

SEQ ID NO: 76655 - RNA, 18 nt, Human
ccgcagccccaaacagug

SEQ ID NO: 76656 - RNA, 22 nt, Human
cgagaaaguccgcagccccaaa

SEQ ID NO: 76657 - RNA, 22 nt, Human
cgaggagccgccaccgcugucg

SEQ ID NO: 76658 - RNA, 21 nt, Human
gagaaaguccgcagccccaaa

SEQ ID NO: 76659 - RNA, 19 nt, Human
gaggaagggccauagagca

SEQ ID NO: 76660 - RNA, 24 nt, Human
gagucgggccggggccggccuagg

SEQ ID NO: 76661 - RNA, 23 nt, Human
gaguuucugagggcgagucgggc

SEQ ID NO: 76662 - RNA, 21 nt, Human
gccccaaacagugaguuucug

SEQ ID NO: 76663 - RNA, 18 nt, Human
ggccggggccggccuagg

SEQ ID NO: 76664 - RNA, 23 nt, Human
uacuuccggcuccccccaggucc

SEQ ID NO: 76665 - RNA, 27 nt, Human
ucacuuccggucucccccaaaccugcc

SEQ ID NO: 76666 - RNA, 20 nt, Human
ucccccaaaccugccaccga

SEQ ID NO: 76667 - RNA, 23 nt, Human
ugaaggaagaggggggaaacggu

SEQ ID NO: 76668 - RNA, 22 nt, Human
ugccagaaaaauccgacuuuua

SEQ ID NO: 76669 - RNA, 22 nt, Human
ugggagggagccgagcaccccg

SEQ ID NO: 76670 - RNA, 18 nt, Human
uuccggcuccccccaggu

SEQ ID NO: 76671 - RNA, 18 nt, Human
uuuuuuuuuuuuuuuuug

SEQ ID NO: 76672 - RNA, 22 nt, Human
uuuuuuuuuuuuuuuuugccag

SEQ ID NO: 76673 - RNA, 25 nt, Human
aaaaaaaucagccuggcccuuuaag

SEQ ID NO: 76674 - RNA, 22 nt, Human
aaaccacaacccacauuacuug

SEQ ID NO: 76675 - RNA, 22 nt, Human
aaauagccacacggcacgaaga

SEQ ID NO: 76676 - RNA, 19 nt, Human
aacaaaaauagauggguca

SEQ ID NO: 76677 - RNA, 24 nt, Human
aagcccauuuucuggagccaggaa

SEQ ID NO: 76678 - RNA, 20 nt, Human
aagcccauuuucuggagccg

SEQ ID NO: 76679 - RNA, 20 nt, Human
aagggcccaggucagaggcc

SEQ ID NO: 76680 - RNA, 19 nt, Human
aauagaugggucacucccu

SEQ ID NO: 76681 - RNA, 22 nt, Human
acaacaacaaaaaccacaaccc

SEQ ID NO: 76682 - RNA, 22 nt, Human
accacagccucagagaccagua

SEQ ID NO: 76683 - RNA, 18 nt, Human
agaagccguguaaugaaa

SEQ ID NO: 76684 - RNA, 26 nt, Human
agagaccaguaggaaaaaaaaaucag

SEQ ID NO: 76685 - RNA, 23 nt, Human
agaggcccaaguucagacuucag

SEQ ID NO: 76686 - RNA, 22 nt, Human
agcccgucucucacgaagacag

SEQ ID NO: 76687 - RNA, 22 nt, Human
caacaacaaaaaccacaaccca

SEQ ID NO: 76688 - RNA, 23 nt, Human
caacaacaaaaaccacaacccac

SEQ ID NO: 76689 - RNA, 21 nt, Human
caacaacaacaaaaaccacaa

SEQ ID NO: 76690 - RNA, 23 nt, Human
caacaacaacaaaaaccacaacc

SEQ ID NO: 76691 - RNA, 19 nt, Human
cacaacccacauuacuuga

SEQ ID NO: 76692 - RNA, 19 nt, Human
cacaaucaaauagccacac

SEQ ID NO: 76693 - RNA, 25 nt, Human
cacacggcacgaagacgcaugcgug

SEQ ID NO: 76694 - RNA, 19 nt, Human
cacgaagacgcaugcgugg

SEQ ID NO: 76695 - RNA, 27 nt, Human
cagaucccaggaaggggaagucaaagg

SEQ ID NO: 76696 - RNA, 27 nt, Human
ccacaaaugguugauuuauuucugacu

SEQ ID NO: 76697 - RNA, 26 nt, Human
ccacagccucagagaccaguaggaaa

SEQ ID NO: 76698 - RNA, 18 nt, Human
ccaguaggaaaaaaaaau

SEQ ID NO: 76699 - RNA, 18 nt, Human
cccacaaugcccuucgcc

SEQ ID NO: 76700 - RNA, 23 nt, Human
cguggcgacaacaacaacaaaaa

SEQ ID NO: 76701 - RNA, 18 nt, Human
cuggagccaggaauccac

SEQ ID NO: 76702 - RNA, 22 nt, Human
cuuccguaccgcaaaauggcgc

SEQ ID NO: 76703 - RNA, 26 nt, Human
cuuuaagucuuccgcgaucccauuuc

SEQ ID NO: 76704 - RNA, 22 nt, Human
cuuuuacauaacgcccccacaa

SEQ ID NO: 76705 - RNA, 22 nt, Human
gacaacaacaacaaaaaccaca

SEQ ID NO: 76706 - RNA, 23 nt, Human
gacaacaacaacaaaaaccacaa

SEQ ID NO: 76707 - RNA, 18 nt, Human
gcccccacaaugcccuuc

SEQ ID NO: 76708 - RNA, 19 nt, Human
ggaaaaaaaaaucagccug

SEQ ID NO: 76709 - RNA, 18 nt, Human
ggaagucaaagggcccag

SEQ ID NO: 76710 - RNA, 24 nt, Human
ggaucugucgguugggguccuacu

SEQ ID NO: 76711 - RNA, 20 nt, Human
ggcgacaacaacaacaaaaa

SEQ ID NO: 76712 - RNA, 28 nt, Human
ggcgacaacaacaacaaaaaccacaacc

SEQ ID NO: 76713 - RNA, 20 nt, Human
gggaagucaaagggcccagg

SEQ ID NO: 76714 - RNA, 19 nt, Human
guaaacgagcaaagcuccg

SEQ ID NO: 76715 - RNA, 21 nt, Human
guggcgacaacaacaacaaaa

SEQ ID NO: 76716 - RNA, 25 nt, Human
guggugacccuguagcaaccacagc

SEQ ID NO: 76717 - RNA, 22 nt, Human
ucaaauagccacacggcacgaa

SEQ ID NO: 76718 - RNA, 24 nt, Human
ucaauaguaaacgagcaaagcucc

SEQ ID NO: 76719 - RNA, 22 nt, Human
uccguaccgcaaaauggcgcca

SEQ ID NO: 76720 - RNA, 21 nt, Human
ugacacaaucaaauagccaca

SEQ ID NO: 76721 - RNA, 26 nt, Human
ugaccaaaaacuucaggaucugcauc

SEQ ID NO: 76722 - RNA, 18 nt, Human
uggcgacaacaacaacaa

SEQ ID NO: 76723 - RNA, 21 nt, Human
uggcgacaacaacaacaaaaa

SEQ ID NO: 76724 - RNA, 22 nt, Human
ugggagaacugagaaaaugaua

SEQ ID NO: 76725 - RNA, 21 nt, Human
uggugacccuguagcaaccac

SEQ ID NO: 76726 - RNA, 25 nt, Human
uuacauaacgcccccacaaugcccu

SEQ ID NO: 76727 - RNA, 26 nt, Human
uuuacauaacgcccccacaaugcccu

SEQ ID NO: 76728 - RNA, 21 nt, Human
uuuuuaaaccacaaaugguug

SEQ ID NO: 76729 - RNA, 22 nt, Human
uuuuuuaaaccacaaaugguug

SEQ ID NO: 76730 - RNA, 18 nt, Human
aaacuauaaacagcaaca

SEQ ID NO: 76731 - RNA, 25 nt, Human
aaugaggggaaacgugcaagaggaa

SEQ ID NO: 76732 - RNA, 27 nt, Human
agcaacaugaacacagagaaucacaaa

SEQ ID NO: 76733 - RNA, 23 nt, Human
agggucuuuccucaugucuccuc

SEQ ID NO: 76734 - RNA, 20 nt, Human
cauguaaugcaggauguaug

SEQ ID NO: 76735 - RNA, 18 nt, Human
cucgggccgcugcucuuc

SEQ ID NO: 76736 - RNA, 20 nt, Human
ggggauggucccccacuuuc

SEQ ID NO: 76737 - RNA, 18 nt, Human
guaaugcaggauguaugu

SEQ ID NO: 76738 - RNA, 19 nt, Human
gucuccucucaccccauuc

SEQ ID NO: 76739 - RNA, 23 nt, Human
ugaacacagagaaucacaaauaa

SEQ ID NO: 76740 - RNA, 19 nt, Human
ugagaagggggaugguccc

SEQ ID NO: 76741 - RNA, 21 nt, Human
aaaaacacaguccaaggcagc

SEQ ID NO: 76742 - RNA, 21 nt, Human
aaaaacacaguccaaggcagc

SEQ ID NO: 76743 - RNA, 23 nt, Human
aaaaugcccaugucccccaaucc

SEQ ID NO: 76744 - RNA, 23 nt, Human
aaaaugcccaugucccccaaucc

SEQ ID NO: 76745 - RNA, 24 nt, Human
aaaaugcccaugucccccaauccc

SEQ ID NO: 76746 - RNA, 24 nt, Human
aagaccacucuuccccacaccccc

SEQ ID NO: 76747 - RNA, 21 nt, Human
accacucuuccccacaccccc

SEQ ID NO: 76748 - RNA, 21 nt, Human
accacucuuccccacaccccc

SEQ ID NO: 76749 - RNA, 19 nt, Human
agaaaaaugcccauguccc

SEQ ID NO: 76750 - RNA, 19 nt, Human
agaaaaaugcccauguccc

SEQ ID NO: 76751 - RNA, 21 nt, Human
agaaaaaugcccauguccccc

SEQ ID NO: 76752 - RNA, 21 nt, Human
agaaaaaugcccauguccccc

SEQ ID NO: 76753 - RNA, 19 nt, Human
aggaaaaacacaguccaag

SEQ ID NO: 76754 - RNA, 19 nt, Human
aggaaaaacacaguccaag

SEQ ID NO: 76755 - RNA, 20 nt, Human
aggcaguggaggcuccaggg

SEQ ID NO: 76756 - RNA, 23 nt, Human
auggugagcgaggcggugagcac

SEQ ID NO: 76757 - RNA, 20 nt, Human
caagucaaggucacagugag

SEQ ID NO: 76758 - RNA, 21 nt, Human
caauccccaccccucccagaa

SEQ ID NO: 76759 - RNA, 21 nt, Human
caauccccaccccucccagaa

SEQ ID NO: 76760 - RNA, 18 nt, Human
cacaccccccaauaauua

SEQ ID NO: 76761 - RNA, 23 nt, Human
caccgccgcucccgccgccgccu

SEQ ID NO: 76762 - RNA, 18 nt, Human
cacugggaggucagcagg

SEQ ID NO: 76763 - RNA, 20 nt, Human
cacugggaggucagcagggu

SEQ ID NO: 76764 - RNA, 21 nt, Human
cagcccaacagccgcucccgg

SEQ ID NO: 76765 - RNA, 18 nt, Human
ccaccccucccagaaaaa

SEQ ID NO: 76766 - RNA, 19 nt, Human
ccaccccucccagaaaaau

SEQ ID NO: 76767 - RNA, 19 nt, Human
ccaccccucccagaaaaau

SEQ ID NO: 76768 - RNA, 21 nt, Human
ccacucuuccccacacccccc

SEQ ID NO: 76769 - RNA, 21 nt, Human
ccacucuuccccacacccccc

SEQ ID NO: 76770 - RNA, 19 nt, Human
ccagggagggcagaaggca

SEQ ID NO: 76771 - RNA, 20 nt, Human
ccccaauccccaccccuccc

SEQ ID NO: 76772 - RNA, 20 nt, Human
ccccaauccccaccccuccc

SEQ ID NO: 76773 - RNA, 21 nt, Human
ccccaauccccaccccuccca

SEQ ID NO: 76774 - RNA, 21 nt, Human
ccccaauccccaccccuccca

SEQ ID NO: 76775 - RNA, 23 nt, Human
ccccaauccccaccccucccaga

SEQ ID NO: 76776 - RNA, 23 nt, Human
ccccaauccccaccccucccaga

SEQ ID NO: 76777 - RNA, 24 nt, Human
cccccaauccccaccccucccaga

SEQ ID NO: 76778 - RNA, 24 nt, Human
cccccaauccccaccccucccaga

SEQ ID NO: 76779 - RNA, 20 nt, Human
ccgccgcucccgccgccgcc

SEQ ID NO: 76780 - RNA, 20 nt, Human
ccgcucccgccgccgccucu

SEQ ID NO: 76781 - RNA, 20 nt, Human
ccgcucccgccgccgccucu

SEQ ID NO: 76782 - RNA, 20 nt, Human
ccucaagaccacucuucccc

SEQ ID NO: 76783 - RNA, 20 nt, Human
ccucaagaccacucuucccc

SEQ ID NO: 76784 - RNA, 20 nt, Human
ccucaagaccacucuucccc

SEQ ID NO: 76785 - RNA, 20 nt, Human
ccucaagaccacucuucccc

SEQ ID NO: 76786 - RNA, 18 nt, Human
cggaggaaguccaauguc

SEQ ID NO: 76787 - RNA, 21 nt, Human
cuccagggagggcagaaggca

SEQ ID NO: 76788 - RNA, 19 nt, Human
cucccgccgccgccucucg

SEQ ID NO: 76789 - RNA, 20 nt, Human
cuuggauccagcccaacagc

SEQ ID NO: 76790 - RNA, 20 nt, Human
gaaaaaugcccauguccccc

SEQ ID NO: 76791 - RNA, 20 nt, Human
gaaaaaugcccauguccccc

SEQ ID NO: 76792 - RNA, 21 nt, Human
gaccacucuuccccacacccc

SEQ ID NO: 76793 - RNA, 21 nt, Human
gaccacucuuccccacacccc

SEQ ID NO: 76794 - RNA, 19 nt, Human
gagcacucccgccacaaag

SEQ ID NO: 76795 - RNA, 18 nt, Human
gcccaugucccccaaucc

SEQ ID NO: 76796 - RNA, 18 nt, Human
gcccaugucccccaaucc

SEQ ID NO: 76797 - RNA, 21 nt, Human
gcccaugucccccaaucccca

SEQ ID NO: 76798 - RNA, 21 nt, Human
gcccaugucccccaaucccca

SEQ ID NO: 76799 - RNA, 27 nt, Human
ggaaaaacacaguccaaggcagcuggg

SEQ ID NO: 76800 - RNA, 27 nt, Human
ggaaaaacacaguccaaggcagcuggg

SEQ ID NO: 76801 - RNA, 21 nt, Human
ggaggaaaaacacaguccaag

SEQ ID NO: 76802 - RNA, 21 nt, Human
ggaggaaaaacacaguccaag

SEQ ID NO: 76803 - RNA, 24 nt, Human
ggucagagggucaucaaugaacuu

SEQ ID NO: 76804 - RNA, 23 nt, Human
guccaaggcagcugggggccuca

SEQ ID NO: 76805 - RNA, 24 nt, Human
guccaaggcagcugggggccucag

SEQ ID NO: 76806 - RNA, 20 nt, Human
uacaaaaguaagaaaaaugc

SEQ ID NO: 76807 - RNA, 20 nt, Human
uacaaaaguaagaaaaaugc

SEQ ID NO: 76808 - RNA, 19 nt, Human
uccagauggugagcgaggc

SEQ ID NO: 76809 - RNA, 23 nt, Human
ucccaaaguaggagaggaggccg

SEQ ID NO: 76810 - RNA, 26 nt, Human
ugcccaugucccccaauccccacccc

SEQ ID NO: 76811 - RNA, 26 nt, Human
ugcccaugucccccaauccccacccc

SEQ ID NO: 76812 - RNA, 21 nt, Human
ugucccccaauccccaccccu

SEQ ID NO: 76813 - RNA, 21 nt, Human
ugucccccaauccccaccccu

SEQ ID NO: 76814 - RNA, 19 nt, Human
uugagcaauuccagaggca

SEQ ID NO: 76815 - RNA, 19 nt, Human
uuuuuuuuuuuuuuugugu

SEQ ID NO: 76816 - RNA, 18 nt, Human
uuuuuuuuuuuuuuuuug

SEQ ID NO: 76817 - RNA, 19 nt, Human
uuuuuuuuuuuuuuuuugu

SEQ ID NO: 76818 - RNA, 19 nt, Human
uuuuuuuuuuuuuuuuugu

SEQ ID NO: 76819 - RNA, 27 nt, Human
uuuuuuuuuuuuuuuuuuuuuuugggg

SEQ ID NO: 76820 - RNA, 21 nt, Human
auaaacacauggcuaacaaag

SEQ ID NO: 76821 - RNA, 19 nt, Human
ccuucaagucuggcacaga

SEQ ID NO: 76822 - RNA, 22 nt, Human
cuucaagucuggcacagacucu

SEQ ID NO: 76823 - RNA, 22 nt, Human
uaaacacauggcuaacaaagua

SEQ ID NO: 76824 - RNA, 23 nt, Human
aaaaaaaaaaaacaacaacaaac

SEQ ID NO: 76825 - RNA, 28 nt, Human
aaacaacaacaaacaauucaggugucac

SEQ ID NO: 76826 - RNA, 18 nt, Human
aaagaccacaacuguuuu

SEQ ID NO: 76827 - RNA, 18 nt, Human
aaauucuuccugcuuuuc

SEQ ID NO: 76828 - RNA, 24 nt, Human
aacacauuaucauagaaacuguac

SEQ ID NO: 76829 - RNA, 23 nt, Human
aagacaauaaaaaaaaaaaacaa

SEQ ID NO: 76830 - RNA, 24 nt, Human
aaguacaugagguuuauuugaaau

SEQ ID NO: 76831 - RNA, 25 nt, Human
aauaaaaaaaaaaaacaacaacaaa

SEQ ID NO: 76832 - RNA, 23 nt, Human
aaugagccuccaacccaacugcc

SEQ ID NO: 76833 - RNA, 20 nt, Human
acacaauucuguauggcacu

SEQ ID NO: 76834 - RNA, 22 nt, Human
acacagcacugcccugcucccc

SEQ ID NO: 76835 - RNA, 20 nt, Human
acaccgccgcgccucccagc

SEQ ID NO: 76836 - RNA, 24 nt, Human
acagcacugcccugcucccccucc

SEQ ID NO: 76837 - RNA, 22 nt, Human
acuaggccccgcggcccggagc

SEQ ID NO: 76838 - RNA, 19 nt, Human
agaguggaugggcugaagg

SEQ ID NO: 76839 - RNA, 20 nt, Human
aggcaggggaagcuggcggu

SEQ ID NO: 76840 - RNA, 21 nt, Human
aggggaagcuggcgguggugg

SEQ ID NO: 76841 - RNA, 22 nt, Human
aggugauaaaaaagaaaaaccc

SEQ ID NO: 76842 - RNA, 22 nt, Human
auucaaaggugauaaaaaagaa

SEQ ID NO: 76843 - RNA, 26 nt, Human
caacucaaaagaccacaacuguuuua

SEQ ID NO: 76844 - RNA, 21 nt, Human
caagaucaacucaaaagacca

SEQ ID NO: 76845 - RNA, 18 nt, Human
caagcaacuuuuaauaac

SEQ ID NO: 76846 - RNA, 20 nt, Human
caaguacaugagguuuauuu

SEQ ID NO: 76847 - RNA, 23 nt, Human
caaguacaugagguuuauuugaa

SEQ ID NO: 76848 - RNA, 18 nt, Human
cacuaggccccgcggccc

SEQ ID NO: 76849 - RNA, 22 nt, Human
cagcagccccccgccgaccucc

SEQ ID NO: 76850 - RNA, 22 nt, Human
cagccccccgccgaccuccgcu

SEQ ID NO: 76851 - RNA, 27 nt, Human
caucaaaguaaagguuauaugcaugau

SEQ ID NO: 76852 - RNA, 18 nt, Human
cauguucuaggagcugca

SEQ ID NO: 76853 - RNA, 18 nt, Human
ccccccgccgaccuccgc

SEQ ID NO: 76854 - RNA, 22 nt, Human
cccgcgcacaccgccgcgccuc

SEQ ID NO: 76855 - RNA, 24 nt, Human
cccgcgcacaccgccgcgccuccc

SEQ ID NO: 76856 - RNA, 19 nt, Human
cccgcggcccggagcgagc

SEQ ID NO: 76857 - RNA, 22 nt, Human
ccgccgcgccucccagcagccc

SEQ ID NO: 76858 - RNA, 21 nt, Human
ccgcucucuccucccaccccc

SEQ ID NO: 76859 - RNA, 28 nt, Human
ccggcggccggcagucacgacuccuccu

SEQ ID NO: 76860 - RNA, 24 nt, Human
ccucccaccccccaccgacacuga

SEQ ID NO: 76861 - RNA, 28 nt, Human
ccucuuugaagacaauaaaaaaaaaaaa

SEQ ID NO: 76862 - RNA, 23 nt, Human
ccuuuaauggggcccuuccucuu

SEQ ID NO: 76863 - RNA, 18 nt, Human
cgcccggggguggggugg

SEQ ID NO: 76864 - RNA, 21 nt, Human
cgccgcgccucccagcagccc

SEQ ID NO: 76865 - RNA, 24 nt, Human
cggaacgccacggcgcagaguucc

SEQ ID NO: 76866 - RNA, 20 nt, Human
cggaggaagcagaggccaca

SEQ ID NO: 76867 - RNA, 20 nt, Human
cggcccggagcgagcgccag

SEQ ID NO: 76868 - RNA, 19 nt, Human
cggcggcggcggugggacu

SEQ ID NO: 76869 - RNA, 18 nt, Human
cuaaagcaagaugucagg

SEQ ID NO: 76870 - RNA, 18 nt, Human
cucacugauacugucacc

SEQ ID NO: 76871 - RNA, 20 nt, Human
cucccaccccccaccgacac

SEQ ID NO: 76872 - RNA, 23 nt, Human
cucucuccucccaccccccaccg

SEQ ID NO: 76873 - RNA, 19 nt, Human
cugcccugcucccccucca

SEQ ID NO: 76874 - RNA, 19 nt, Human
cugccgcucucuccuccca

SEQ ID NO: 76875 - RNA, 18 nt, Human
cuugaggaguuccaaggc

SEQ ID NO: 76876 - RNA, 24 nt, Human
cuuuaaauagguacagaagagcuu

SEQ ID NO: 76877 - RNA, 19 nt, Human
gaagcuggcgguggugggg

SEQ ID NO: 76878 - RNA, 21 nt, Human
gaagcugugaugucagugcca

SEQ ID NO: 76879 - RNA, 20 nt, Human
gaagggaggggugagagggc

SEQ ID NO: 76880 - RNA, 19 nt, Human
gagaguggaugggcugaag

SEQ ID NO: 76881 - RNA, 22 nt, Human
gagcaaacacauuaucauagaa

SEQ ID NO: 76882 - RNA, 19 nt, Human
gaguucccgcgcacaccgc

SEQ ID NO: 76883 - RNA, 24 nt, Human
gcagccccccgccgaccuccgcuu

SEQ ID NO: 76884 - RNA, 19 nt, Human
gcaggaggacggaggaagc

SEQ ID NO: 76885 - RNA, 23 nt, Human
gccaggcgcccggggguggggug

SEQ ID NO: 76886 - RNA, 18 nt, Human
gccgcgccucccagcagc

SEQ ID NO: 76887 - RNA, 22 nt, Human
gcggcgcagcacuaggccccgc

SEQ ID NO: 76888 - RNA, 23 nt, Human
gcggcggcggcggugggacuggc

SEQ ID NO: 76889 - RNA, 18 nt, Human
gcggugggacuggcggcu

SEQ ID NO: 76890 - RNA, 22 nt, Human
gcucucuccucccaccccccac

SEQ ID NO: 76891 - RNA, 18 nt, Human
ggaaguuagagcaaacac

SEQ ID NO: 76892 - RNA, 19 nt, Human
ggaaucuucagguucuuga

SEQ ID NO: 76893 - RNA, 21 nt, Human
ggagaagccagggaaguuaga

SEQ ID NO: 76894 - RNA, 19 nt, Human
ggccagauccaucaaagua

SEQ ID NO: 76895 - RNA, 21 nt, Human
ggcccggagcgagcgccaggc

SEQ ID NO: 76896 - RNA, 21 nt, Human
ggcgcggccgcgcgacaguca

SEQ ID NO: 76897 - RNA, 19 nt, Human
gggcaugggaggcagcaga

SEQ ID NO: 76898 - RNA, 25 nt, Human
gggcugaaggagaagccagggaagu

SEQ ID NO: 76899 - RNA, 27 nt, Human
gggggggugggaggagcugucacaaag

SEQ ID NO: 76900 - RNA, 19 nt, Human
ggggugggggaagggaggg

SEQ ID NO: 76901 - RNA, 20 nt, Human
gggguggggugggggaaggg

SEQ ID NO: 76902 - RNA, 19 nt, Human
gggugggggaagggagggg

SEQ ID NO: 76903 - RNA, 23 nt, Human
ggguggggugggggaagggaggg

SEQ ID NO: 76904 - RNA, 24 nt, Human
ggguggggugggggaagggagggg

SEQ ID NO: 76905 - RNA, 18 nt, Human
gguaaacuacccagcagc

SEQ ID NO: 76906 - RNA, 18 nt, Human
gucagaacgggcauggga

SEQ ID NO: 76907 - RNA, 23 nt, Human
gucauggagcggaacgccacggc

SEQ ID NO: 76908 - RNA, 22 nt, Human
guuuuguuuuuuuguuuuuugu

SEQ ID NO: 76909 - RNA, 20 nt, Human
uaaauagguacagaagagcu

SEQ ID NO: 76910 - RNA, 23 nt, Human
uacaauaucacugcugaaacaag

SEQ ID NO: 76911 - RNA, 19 nt, Human
uacacaauucuguauggca

SEQ ID NO: 76912 - RNA, 23 nt, Human
uacuguacaugugcuaaagcaag

SEQ ID NO: 76913 - RNA, 19 nt, Human
uaggaggcaggggaagcug

SEQ ID NO: 76914 - RNA, 25 nt, Human
ucaaaagaccacaacuguuuuauga

SEQ ID NO: 76915 - RNA, 22 nt, Human
uccaaauucaaaggugauaaaa

SEQ ID NO: 76916 - RNA, 18 nt, Human
uccaacaccccucuggcc

SEQ ID NO: 76917 - RNA, 23 nt, Human
uccaacaccccucuggccagauc

SEQ ID NO: 76918 - RNA, 24 nt, Human
uccaacaccccucuggccagaucc

SEQ ID NO: 76919 - RNA, 28 nt, Human
uccaaggcugaggucagaaccggggucc

SEQ ID NO: 76920 - RNA, 25 nt, Human
uccuugggcaggaggacggaggaag

SEQ ID NO: 76921 - RNA, 19 nt, Human
ucucacuaugaacaagaac

SEQ ID NO: 76922 - RNA, 28 nt, Human
ucucacuaugaacaagaacagacuggau

SEQ ID NO: 76923 - RNA, 24 nt, Human
ucucuaagugaagugccuuaguuu

SEQ ID NO: 76924 - RNA, 21 nt, Human
ucucugccgcucucuccuccc

SEQ ID NO: 76925 - RNA, 19 nt, Human
ucugccgcucucuccuccc

SEQ ID NO: 76926 - RNA, 23 nt, Human
ugaagacaauaaaaaaaaaaaac

SEQ ID NO: 76927 - RNA, 22 nt, Human
ugaagcugugaugucagugcca

SEQ ID NO: 76928 - RNA, 23 nt, Human
ugacugguaugugggugggcugg

SEQ ID NO: 76929 - RNA, 22 nt, Human
ugagccuccaacccaacugcuc

SEQ ID NO: 76930 - RNA, 25 nt, Human
ugagccuccaacccaacugcucuag

SEQ ID NO: 76931 - RNA, 18 nt, Human
ugaggaguuccaaggcug

SEQ ID NO: 76932 - RNA, 20 nt, Human
ugauuauaagcaggacucca

SEQ ID NO: 76933 - RNA, 18 nt, Human
ugcucaaaauuuccaaau

SEQ ID NO: 76934 - RNA, 19 nt, Human
uggaugggcugaaggagaa

SEQ ID NO: 76935 - RNA, 24 nt, Human
uggaugggcugaaggagaagccag

SEQ ID NO: 76936 - RNA, 18 nt, Human
uggauguaggaggcagga

SEQ ID NO: 76937 - RNA, 21 nt, Human
ugggaggcagcagacacagca

SEQ ID NO: 76938 - RNA, 20 nt, Human
ugggcugaaggagaagccag

SEQ ID NO: 76939 - RNA, 26 nt, Human
ugggcugaaggagaagccagggaagu

SEQ ID NO: 76940 - RNA, 18 nt, Human
ugggggaagggaggggug

SEQ ID NO: 76941 - RNA, 24 nt, Human
ugggggaagggaggggugagaggg

SEQ ID NO: 76942 - RNA, 20 nt, Human
uggggugggggaagggaggg

SEQ ID NO: 76943 - RNA, 18 nt, Human
ugggugggcugggcucca

SEQ ID NO: 76944 - RNA, 22 nt, Human
ugguaugugggugggcugggcu

SEQ ID NO: 76945 - RNA, 26 nt, Human
ugucacaaagaaggggagauucagga

SEQ ID NO: 76946 - RNA, 24 nt, Human
ugucacugaagugggaacacagga

SEQ ID NO: 76947 - RNA, 26 nt, Human
ugugguuuuuuuauuuuuuggggggg

SEQ ID NO: 76948 - RNA, 19 nt, Human
uguugugggggaaggggcu

SEQ ID NO: 76949 - RNA, 19 nt, Human
uuaaauagguacagaagag

SEQ ID NO: 76950 - RNA, 26 nt, Human
uuaguuuuguuuuuuuguuuuuugug

SEQ ID NO: 76951 - RNA, 26 nt, Human
uucaaaggugauaaaaaagaaaaacc

SEQ ID NO: 76952 - RNA, 19 nt, Human
uucccgcgcacaccgccgc

SEQ ID NO: 76953 - RNA, 20 nt, Human
uucucacuaugaacaagaac

SEQ ID NO: 76954 - RNA, 18 nt, Human
uuguugugggggaagggg

SEQ ID NO: 76955 - RNA, 18 nt, Human
uuuuuguuuuuugugguu

SEQ ID NO: 76956 - RNA, 22 nt, Human
aaaaagugaugguuuuaaacaa

SEQ ID NO: 76957 - RNA, 19 nt, Human
aaaauccaccuagcucaag

SEQ ID NO: 76958 - RNA, 24 nt, Human
aaaccugcuuucccuaccaaauac

SEQ ID NO: 76959 - RNA, 21 nt, Human
aaagcaaaaaaaaaucucaaa

SEQ ID NO: 76960 - RNA, 20 nt, Human
aaaggaauaaaggggcugcc

SEQ ID NO: 76961 - RNA, 23 nt, Human
aaauaaccccagaaugcuggggc

SEQ ID NO: 76962 - RNA, 20 nt, Human
aacauuucuuggaugccuca

SEQ ID NO: 76963 - RNA, 23 nt, Human
aaccccuccucccuacucuccug

SEQ ID NO: 76964 - RNA, 20 nt, Human
aaccuggaggauggaaaggu

SEQ ID NO: 76965 - RNA, 26 nt, Human
aagaaagacagcgagaagcagggaag

SEQ ID NO: 76966 - RNA, 20 nt, Human
aagacagggaccucugaacc

SEQ ID NO: 76967 - RNA, 21 nt, Human
aagaugcacagucugaagagg

SEQ ID NO: 76968 - RNA, 18 nt, Human
aagcacuuuucuacagcu

SEQ ID NO: 76969 - RNA, 18 nt, Human
aagcagggaagggacuga

SEQ ID NO: 76970 - RNA, 25 nt, Human
aagcagggggccaagugcccauggc

SEQ ID NO: 76971 - RNA, 22 nt, Human
aaggacuccucucugcaccucu

SEQ ID NO: 76972 - RNA, 22 nt, Human
aaggcagugauggacccagaac

SEQ ID NO: 76973 - RNA, 24 nt, Human
aaucacugaaacccaagaggcaga

SEQ ID NO: 76974 - RNA, 20 nt, Human
aaugcuggggcacguacagg

SEQ ID NO: 76975 - RNA, 19 nt, Human
aauuucacucccccaucca

SEQ ID NO: 76976 - RNA, 23 nt, Human
acaaaaaugaccaggagagagac

SEQ ID NO: 76977 - RNA, 23 nt, Human
acacacacacacacacacacaca

SEQ ID NO: 76978 - RNA, 23 nt, Human
acacacacacacacacacacaca

SEQ ID NO: 76979 - RNA, 23 nt, Human
acacacacacacacacacacaca

SEQ ID NO: 76980 - RNA, 23 nt, Human
acacacacacacacacacacaca

SEQ ID NO: 76981 - RNA, 21 nt, Human
acacacacacacacacacggc

SEQ ID NO: 76982 - RNA, 25 nt, Human
acacacacacacacauacacacaca

SEQ ID NO: 76983 - RNA, 23 nt, Human
acacacacacauacacacacaca

SEQ ID NO: 76984 - RNA, 23 nt, Human
acacacacauacacacacacaca

SEQ ID NO: 76985 - RNA, 20 nt, Human
acccguaaucucugaaggga

SEQ ID NO: 76986 - RNA, 23 nt, Human
accuagcucaagggggcagugag

SEQ ID NO: 76987 - RNA, 18 nt, Human
acucccccauccaccuca

SEQ ID NO: 76988 - RNA, 19 nt, Human
acucccccauccaccucac

SEQ ID NO: 76989 - RNA, 22 nt, Human
agaaaaaucacugaaacccaag

SEQ ID NO: 76990 - RNA, 21 nt, Human
agaaaauccaccuagcucaag

SEQ ID NO: 76991 - RNA, 24 nt, Human
agaaaaucugaaaacuggggggug

SEQ ID NO: 76992 - RNA, 28 nt, Human
agaaagaaauaaauuuaaauucacaaaa

SEQ ID NO: 76993 - RNA, 21 nt, Human
agaaagacagcgagaagcagg

SEQ ID NO: 76994 - RNA, 22 nt, Human
agaagacagggaccucugaaca

SEQ ID NO: 76995 - RNA, 26 nt, Human
agacacacacacacacacacagcgcg

SEQ ID NO: 76996 - RNA, 18 nt, Human
agagaaaauccaccuagc

SEQ ID NO: 76997 - RNA, 22 nt, Human
agagaaaaucugaaaacugggg

SEQ ID NO: 76998 - RNA, 24 nt, Human
agaggagggaagggagaaagggau

SEQ ID NO: 76999 - RNA, 19 nt, Human
agcagcuuuccucucgugu

SEQ ID NO: 77000 - RNA, 22 nt, Human
agcaggaaaagcagggggccaa

SEQ ID NO: 77001 - RNA, 19 nt, Human
agccagcagccaccucccc

SEQ ID NO: 77002 - RNA, 24 nt, Human
agccugggcaauaagaagaaaucu

SEQ ID NO: 77003 - RNA, 19 nt, Human
agcuccaggcugggaccac

SEQ ID NO: 77004 - RNA, 20 nt, Human
agcuggugauggucccauua

SEQ ID NO: 77005 - RNA, 20 nt, Human
aggaagcacggaggaggaag

SEQ ID NO: 77006 - RNA, 20 nt, Human
aggagggaagggagaaaggg

SEQ ID NO: 77007 - RNA, 23 nt, Human
aggcagagguugaguaagcugag

SEQ ID NO: 77008 - RNA, 18 nt, Human
aggcaggaccuggaugca

SEQ ID NO: 77009 - RNA, 20 nt, Human
aggcugggaccacccagcuc

SEQ ID NO: 77010 - RNA, 20 nt, Human
agggggcagugaagaugagg

SEQ ID NO: 77011 - RNA, 18 nt, Human
auccuaucaaacaauaca

SEQ ID NO: 77012 - RNA, 23 nt, Human
augacccuuuccaucccacacag

SEQ ID NO: 77013 - RNA, 20 nt, Human
auucaacaacugacaagcac

SEQ ID NO: 77014 - RNA, 18 nt, Human
auugcacucaagccuggg

SEQ ID NO: 77015 - RNA, 24 nt, Human
auugcacucaagccugggcaauaa

SEQ ID NO: 77016 - RNA, 23 nt, Human
auuuuuuucuuucuuuuuuuggc

SEQ ID NO: 77017 - RNA, 19 nt, Human
caaauaaaacagaaaagaa

SEQ ID NO: 77018 - RNA, 21 nt, Human
caaauaaaacagaaaagaaaa

SEQ ID NO: 77019 - RNA, 18 nt, Human
caacagaaggugcagacc

SEQ ID NO: 77020 - RNA, 19 nt, Human
caacauucuauaacugaua

SEQ ID NO: 77021 - RNA, 21 nt, Human
caagggaaaauugccaggggg

SEQ ID NO: 77022 - RNA, 21 nt, Human
caagggggcagugaagaugag

SEQ ID NO: 77023 - RNA, 21 nt, Human
caauuucacucccccauccac

SEQ ID NO: 77024 - RNA, 18 nt, Human
cacacacacacacacaca

SEQ ID NO: 77025 - RNA, 20 nt, Human
cacacacacacacacacaca

SEQ ID NO: 77026 - RNA, 20 nt, Human
cacacacacacacacacaca

SEQ ID NO: 77027 - RNA, 20 nt, Human
cacacacacacacacacaca

SEQ ID NO: 77028 - RNA, 20 nt, Human
cacacacacacacacacaca

SEQ ID NO: 77029 - RNA, 20 nt, Human
cacacacacacacacacaca

SEQ ID NO: 77030 - RNA, 20 nt, Human
cacacacacacacacacaca

SEQ ID NO: 77031 - RNA, 20 nt, Human
cacacacacacacacacaca

SEQ ID NO: 77032 - RNA, 20 nt, Human
cacacacacacacacacaca

SEQ ID NO: 77033 - RNA, 20 nt, Human
cacacacacacacacacaca

SEQ ID NO: 77034 - RNA, 22 nt, Human
cacacacacacacacacacaca

SEQ ID NO: 77035 - RNA, 22 nt, Human
cacacacacacacacacacaca

SEQ ID NO: 77036 - RNA, 22 nt, Human
cacacacacacacacacacaca

SEQ ID NO: 77037 - RNA, 27 nt, Human
cacacacacacacacacacacugcgcg

SEQ ID NO: 77038 - RNA, 26 nt, Human
cacacacacacacagcgcguugugug

SEQ ID NO: 77039 - RNA, 24 nt, Human
cacacacacacauacacacacaca

SEQ ID NO: 77040 - RNA, 24 nt, Human
cacacacacacugcgcgcugugug

SEQ ID NO: 77041 - RNA, 22 nt, Human
cacacauacacacacacacaca

SEQ ID NO: 77042 - RNA, 20 nt, Human
cacacugcgcgcugugugug

SEQ ID NO: 77043 - RNA, 24 nt, Human
cacagcuccaggcugggaccaccc

SEQ ID NO: 77044 - RNA, 19 nt, Human
cacauggcaaaaacaggag

SEQ ID NO: 77045 - RNA, 19 nt, Human
cacccucuccucuuccacc

SEQ ID NO: 77046 - RNA, 21 nt, Human
caccuggcacccccacccccc

SEQ ID NO: 77047 - RNA, 18 nt, Human
cacugccaagggcaaggu

SEQ ID NO: 77048 - RNA, 18 nt, Human
cagaaacuuguugguguu

SEQ ID NO: 77049 - RNA, 24 nt, Human
cagaaccccuccucccuacucucc

SEQ ID NO: 77050 - RNA, 29 nt, Human
cagaaggugcagaccguguugguggcgac

SEQ ID NO: 77051 - RNA, 22 nt, Human
cagccagcagccaccuccccag

SEQ ID NO: 77052 - RNA, 24 nt, Human
caggaggccgaggcagaaaaauca

SEQ ID NO: 77053 - RNA, 21 nt, Human
caggcuggcacagcuccaggc

SEQ ID NO: 77054 - RNA, 24 nt, Human
cagggaccucugaacauuuuuuuu

SEQ ID NO: 77055 - RNA, 24 nt, Human
cagugauggacccagaaccccucc

SEQ ID NO: 77056 - RNA, 25 nt, Human
cagugcugccagaauacaaggaaug

SEQ ID NO: 77057 - RNA, 23 nt, Human
caugaagagaaaauccaccuagc

SEQ ID NO: 77058 - RNA, 18 nt, Human
cauugcacucaagccugg

SEQ ID NO: 77059 - RNA, 19 nt, Human
cauugcacucaagccuggg

SEQ ID NO: 77060 - RNA, 19 nt, Human
cauugcacucaagccuggg

SEQ ID NO: 77061 - RNA, 19 nt, Human
cauugcacucaagccuggg

SEQ ID NO: 77062 - RNA, 22 nt, Human
cauugcacucaagccugggcaa

SEQ ID NO: 77063 - RNA, 22 nt, Human
cauugcacucaagccugggcaa

SEQ ID NO: 77064 - RNA, 23 nt, Human
cauugcacucaagccugggcaau

SEQ ID NO: 77065 - RNA, 24 nt, Human
cauugcacucaagccugggcaaua

SEQ ID NO: 77066 - RNA, 22 nt, Human
cauuucuuggaugccucagcuc

SEQ ID NO: 77067 - RNA, 24 nt, Human
ccaaccccgcuccagcccccacug

SEQ ID NO: 77068 - RNA, 20 nt, Human
ccaccuagcucaagggggca

SEQ ID NO: 77069 - RNA, 24 nt, Human
ccaccucuuaaaagcaaaaaaaaa

SEQ ID NO: 77070 - RNA, 21 nt, Human
ccagacauuuaggcgggagca

SEQ ID NO: 77071 - RNA, 21 nt, Human
ccauaugagugccuggucccu

SEQ ID NO: 77072 - RNA, 22 nt, Human
ccccaaccccgcuccagccccc

SEQ ID NO: 77073 - RNA, 22 nt, Human
ccccaggaccuacacugccccu

SEQ ID NO: 77074 - RNA, 24 nt, Human
ccccccuuugcuuccagcaacuca

SEQ ID NO: 77075 - RNA, 18 nt, Human
ccccuuccacccucuccu

SEQ ID NO: 77076 - RNA, 21 nt, Human
cccugagccucaagacaccuc

SEQ ID NO: 77077 - RNA, 22 nt, Human
ccucacuguccuugggccucca

SEQ ID NO: 77078 - RNA, 19 nt, Human
ccuccccagugcaaguacc

SEQ ID NO: 77079 - RNA, 23 nt, Human
cgagaagcagggaagggacugaa

SEQ ID NO: 77080 - RNA, 24 nt, Human
cgaggcagaaaaaucacugaaacc

SEQ ID NO: 77081 - RNA, 22 nt, Human
cuaccacccccaaccccgcucc

SEQ ID NO: 77082 - RNA, 22 nt, Human
cuagcaagaaucaaaaagccag

SEQ ID NO: 77083 - RNA, 24 nt, Human
cucaagacuccucccuuagcuacu

SEQ ID NO: 77084 - RNA, 24 nt, Human
cucacaauuucacucccccaucca

SEQ ID NO: 77085 - RNA, 20 nt, Human
cuccaccucaccuggcaccc

SEQ ID NO: 77086 - RNA, 23 nt, Human
cuccagggucucugcugcugggg

SEQ ID NO: 77087 - RNA, 23 nt, Human
cucccaaacugugagcugggaac

SEQ ID NO: 77088 - RNA, 18 nt, Human
cucccugcccucucccca

SEQ ID NO: 77089 - RNA, 18 nt, Human
cuccugugcuccaggguc

SEQ ID NO: 77090 - RNA, 22 nt, Human
cucucugugaggccggccccau

SEQ ID NO: 77091 - RNA, 18 nt, Human
cugccccuacccccuuca

SEQ ID NO: 77092 - RNA, 23 nt, Human
cuguccuugggccuccacuucac

SEQ ID NO: 77093 - RNA, 18 nt, Human
cuugaggagcaagaggag

SEQ ID NO: 77094 - RNA, 19 nt, Human
gaagagagggaguuccugc

SEQ ID NO: 77095 - RNA, 21 nt, Human
gaagaugaauacacagagucu

SEQ ID NO: 77096 - RNA, 19 nt, Human
gaauccccccuuugcuucc

SEQ ID NO: 77097 - RNA, 21 nt, Human
gacccagggcagcaucagcag

SEQ ID NO: 77098 - RNA, 18 nt, Human
gacuccucucugcaccuc

SEQ ID NO: 77099 - RNA, 18 nt, Human
gagaagcagggaagggac

SEQ ID NO: 77100 - RNA, 21 nt, Human
gagaggaagcacggaggagga

SEQ ID NO: 77101 - RNA, 18 nt, Human
gagcauccaacaucauac

SEQ ID NO: 77102 - RNA, 26 nt, Human
gaggggcucugcugagcaggaaaagc

SEQ ID NO: 77103 - RNA, 21 nt, Human
gaguucccaagaggguuuggg

SEQ ID NO: 77104 - RNA, 19 nt, Human
gauuucacucccccaucca

SEQ ID NO: 77105 - RNA, 24 nt, Human
gcaccucuuacuugaggagcaaga

SEQ ID NO: 77106 - RNA, 22 nt, Human
gcagaaaaaucacugaaaccca

SEQ ID NO: 77107 - RNA, 18 nt, Human
gcaggaccuggaugcacu

SEQ ID NO: 77108 - RNA, 24 nt, Human
gccagaauacaaggaaugcuccag

SEQ ID NO: 77109 - RNA, 18 nt, Human
ggaaaagcagggggccaa

SEQ ID NO: 77110 - RNA, 18 nt, Human
ggaaagagauggagcugg

SEQ ID NO: 77111 - RNA, 20 nt, Human
ggaaagagauggagcuggga

SEQ ID NO: 77112 - RNA, 25 nt, Human
ggaaagagauggagcugggagagga

SEQ ID NO: 77113 - RNA, 18 nt, Human
ggaaggagguggggaagg

SEQ ID NO: 77114 - RNA, 23 nt, Human
ggaggaaguagggacgacuuucc

SEQ ID NO: 77115 - RNA, 18 nt, Human
ggcuggaaacucagcaug

SEQ ID NO: 77116 - RNA, 26 nt, Human
gggaaagagauggagcugggagagga

SEQ ID NO: 77117 - RNA, 21 nt, Human
gggaagcaaaagggcaggggg

SEQ ID NO: 77118 - RNA, 19 nt, Human
gggaaggagguggggaagg

SEQ ID NO: 77119 - RNA, 23 nt, Human
gggaaggagguggggaaggaggu

SEQ ID NO: 77120 - RNA, 26 nt, Human
gggaaggagguggggaaggagguugg

SEQ ID NO: 77121 - RNA, 18 nt, Human
ggggaagggguccugggg

SEQ ID NO: 77122 - RNA, 18 nt, Human
gggggugggaggugggaa

SEQ ID NO: 77123 - RNA, 23 nt, Human
gucaggcuggcacagcuccaggc

SEQ ID NO: 77124 - RNA, 24 nt, Human
gucauugcacucaagccugggcaa

SEQ ID NO: 77125 - RNA, 19 nt, Human
gugaaacuuuaaaaaacag

SEQ ID NO: 77126 - RNA, 20 nt, Human
guggaacaucacauggcaaa

SEQ ID NO: 77127 - RNA, 21 nt, Human
uaaaaggaacacagaaacuug

SEQ ID NO: 77128 - RNA, 18 nt, Human
uaaccccagaaugcuggg

SEQ ID NO: 77129 - RNA, 23 nt, Human
uaagaggauguggggcacugcca

SEQ ID NO: 77130 - RNA, 27 nt, Human
uaagaggauguggggcacugccaaggg

SEQ ID NO: 77131 - RNA, 27 nt, Human
uaagcugagaacaggucauugcacuca

SEQ ID NO: 77132 - RNA, 20 nt, Human
uaaucucaagacuccucccu

SEQ ID NO: 77133 - RNA, 20 nt, Human
uacacacacacacacacaca

SEQ ID NO: 77134 - RNA, 19 nt, Human
uacacugccccuacccccu

SEQ ID NO: 77135 - RNA, 24 nt, Human
uacagcgcaguuauuuagauaaaa

SEQ ID NO: 77136 - RNA, 22 nt, Human
uaccgagaagagagggaguucc

SEQ ID NO: 77137 - RNA, 18 nt, Human
uacucuugucaugaagag

SEQ ID NO: 77138 - RNA, 21 nt, Human
uacuucacaggugaaacuuua

SEQ ID NO: 77139 - RNA, 20 nt, Human
uacuuggccuccaucuuugg

SEQ ID NO: 77140 - RNA, 18 nt, Human
uacuuggggaaacugaau

SEQ ID NO: 77141 - RNA, 20 nt, Human
uagcaaauaaaacagaaaag

SEQ ID NO: 77142 - RNA, 20 nt, Human
uagcaagaaucaaaaagcca

SEQ ID NO: 77143 - RNA, 21 nt, Human
uagcaagaaucaaaaagccag

SEQ ID NO: 77144 - RNA, 24 nt, Human
uagcuacucaggaggccgaggcag

SEQ ID NO: 77145 - RNA, 24 nt, Human
uaucccaacgccgucucccccuca

SEQ ID NO: 77146 - RNA, 21 nt, Human
uaugagggagaaggggcauaa

SEQ ID NO: 77147 - RNA, 24 nt, Human
ucaaaaagucacuaaaacaccaca

SEQ ID NO: 77148 - RNA, 26 nt, Human
ucacaaaaaacuguacaacgggggcg

SEQ ID NO: 77149 - RNA, 21 nt, Human
ucacacacacacacacauaca

SEQ ID NO: 77150 - RNA, 21 nt, Human
ucaccuggcacccccaccccc

SEQ ID NO: 77151 - RNA, 24 nt, Human
ucaccuggcacccccaccccccaa

SEQ ID NO: 77152 - RNA, 20 nt, Human
ucaguggcucuucagugcug

SEQ ID NO: 77153 - RNA, 24 nt, Human
ucauugcacucaagccugggcaau

SEQ ID NO: 77154 - RNA, 20 nt, Human
uccacccuccguggaugaua

SEQ ID NO: 77155 - RNA, 19 nt, Human
uccacccucuccucuucca

SEQ ID NO: 77156 - RNA, 22 nt, Human
uccaccucaccuggcaccccca

SEQ ID NO: 77157 - RNA, 18 nt, Human
uccacuuuacuggccguc

SEQ ID NO: 77158 - RNA, 19 nt, Human
uccacuuuacuggccguca

SEQ ID NO: 77159 - RNA, 22 nt, Human
uccagggucucugcugcugggg

SEQ ID NO: 77160 - RNA, 22 nt, Human
ucccaacgccgucucccccuca

SEQ ID NO: 77161 - RNA, 19 nt, Human
ucccccauccaccucacaa

SEQ ID NO: 77162 - RNA, 19 nt, Human
ucccccauccaccucacaa

SEQ ID NO: 77163 - RNA, 20 nt, Human
ucccuaccacccccaacccc

SEQ ID NO: 77164 - RNA, 22 nt, Human
uccggccgcgacacacuuggga

SEQ ID NO: 77165 - RNA, 18 nt, Human
ucggcaguacucagugga

SEQ ID NO: 77166 - RNA, 22 nt, Human
ucuacagcugcacuuguggaac

SEQ ID NO: 77167 - RNA, 25 nt, Human
ucucaagacuccucccuuagcuacu

SEQ ID NO: 77168 - RNA, 18 nt, Human
ucuuggaugccucagcuc

SEQ ID NO: 77169 - RNA, 20 nt, Human
ucuuggaugccucagcucuc

SEQ ID NO: 77170 - RNA, 18 nt, Human
ucuuucuuuuuuuggcuu

SEQ ID NO: 77171 - RNA, 19 nt, Human
ugaaaacauucccuuucuu

SEQ ID NO: 77172 - RNA, 23 nt, Human
ugaaaagaugcacagucugaaga

SEQ ID NO: 77173 - RNA, 20 nt, Human
ugacaggaacacagaggugg

SEQ ID NO: 77174 - RNA, 21 nt, Human
ugacuugagucuggacccagg

SEQ ID NO: 77175 - RNA, 19 nt, Human
ugagaacaggucauugcac

SEQ ID NO: 77176 - RNA, 25 nt, Human
ugagaacaggucauugcacucaagc

SEQ ID NO: 77177 - RNA, 20 nt, Human
ugagacacacacacacacac

SEQ ID NO: 77178 - RNA, 22 nt, Human
ugagagaaaaucugaaaacugg

SEQ ID NO: 77179 - RNA, 22 nt, Human
ugaggagcaagaggagggaagg

SEQ ID NO: 77180 - RNA, 24 nt, Human
ugaggaguucccaagaggguuugg

SEQ ID NO: 77181 - RNA, 23 nt, Human
ugaguaagcugagaacaggucau

SEQ ID NO: 77182 - RNA, 18 nt, Human
ugauggugugguuucuuc

SEQ ID NO: 77183 - RNA, 21 nt, Human
ugcacugaauccccccuuugc

SEQ ID NO: 77184 - RNA, 23 nt, Human
ugccagaauacaaggaaugcucc

SEQ ID NO: 77185 - RNA, 22 nt, Human
ugccccuacccccuucaguggc

SEQ ID NO: 77186 - RNA, 25 nt, Human
ugccucagcucucugcuugggccag

SEQ ID NO: 77187 - RNA, 25 nt, Human
ugcuccaccucaccuggcaccccca

SEQ ID NO: 77188 - RNA, 20 nt, Human
ugcuccagggucucugcugc

SEQ ID NO: 77189 - RNA, 20 nt, Human
ugcuugggccagccagcagc

SEQ ID NO: 77190 - RNA, 25 nt, Human
ugcuugggccagccagcagccaccu

SEQ ID NO: 77191 - RNA, 20 nt, Human
uggaacaucacauggcaaaa

SEQ ID NO: 77192 - RNA, 24 nt, Human
uggaacaucacauggcaaaaacag

SEQ ID NO: 77193 - RNA, 21 nt, Human
uggaagggugauauuaugaca

SEQ ID NO: 77194 - RNA, 24 nt, Human
uggaagguggggggagaugccaca

SEQ ID NO: 77195 - RNA, 24 nt, Human
uggaugagagaaaaucugaaaacu

SEQ ID NO: 77196 - RNA, 22 nt, Human
ugggaaaaaugggaaugaaaac

SEQ ID NO: 77197 - RNA, 20 nt, Human
ugggaacuagcaagaaucaa

SEQ ID NO: 77198 - RNA, 21 nt, Human
ugggaaggagguggggaagga

SEQ ID NO: 77199 - RNA, 22 nt, Human
ugggaaggagguggggaaggag

SEQ ID NO: 77200 - RNA, 23 nt, Human
ugggaccacccagcuccucacug

SEQ ID NO: 77201 - RNA, 19 nt, Human
ugggagaagagaaaaggag

SEQ ID NO: 77202 - RNA, 22 nt, Human
ugggagaagagaaaaggaggga

SEQ ID NO: 77203 - RNA, 25 nt, Human
ugggagaagagaaaaggagggagga

SEQ ID NO: 77204 - RNA, 19 nt, Human
ugggagggaagcaaaaggg

SEQ ID NO: 77205 - RNA, 21 nt, Human
ugggagggaagcaaaagggca

SEQ ID NO: 77206 - RNA, 23 nt, Human
ugggagggaagcaaaagggcagg

SEQ ID NO: 77207 - RNA, 23 nt, Human
uggggaaggagguuggaaggccc

SEQ ID NO: 77208 - RNA, 18 nt, Human
uggggggugggagguggg

SEQ ID NO: 77209 - RNA, 19 nt, Human
uggggggugggagguggga

SEQ ID NO: 77210 - RNA, 20 nt, Human
uguaggaauaagaggaugug

SEQ ID NO: 77211 - RNA, 19 nt, Human
ugucaugaagagaaaaucc

SEQ ID NO: 77212 - RNA, 19 nt, Human
uguccagggcccggugucc

SEQ ID NO: 77213 - RNA, 22 nt, Human
ugucuuauccgugagugggaag

SEQ ID NO: 77214 - RNA, 22 nt, Human
ugugcuccagggucucugcugc

SEQ ID NO: 77215 - RNA, 20 nt, Human
uuaggaagcuggggccacau

SEQ ID NO: 77216 - RNA, 22 nt, Human
uuccugcugaaaagaugcacag

SEQ ID NO: 77217 - RNA, 24 nt, Human
uucuauaacugauaacucccugag

SEQ ID NO: 77218 - RNA, 20 nt, Human
uuggaagguggggggagaua

SEQ ID NO: 77219 - RNA, 20 nt, Human
uugguccuaaaaauauagaa

SEQ ID NO: 77220 - RNA, 21 nt, Human
uugguccuaaaaauauagaaa

SEQ ID NO: 77221 - RNA, 18 nt, Human
uuucuuggaugccucagc

SEQ ID NO: 77222 - RNA, 19 nt, Human
aaaaaagaaugcuaccuuu

SEQ ID NO: 77223 - RNA, 18 nt, Human
aaaaauggaaaacuaaua

SEQ ID NO: 77224 - RNA, 23 nt, Human
aaacuaauauccccuacacccug

SEQ ID NO: 77225 - RNA, 19 nt, Human
aaacuaugaaauugacagg

SEQ ID NO: 77226 - RNA, 20 nt, Human
aaaggcaggcacuaccaaga

SEQ ID NO: 77227 - RNA, 24 nt, Human
aaaugaggcugggugccguggcuc

SEQ ID NO: 77228 - RNA, 23 nt, Human
aacacacaguagauaaaacacag

SEQ ID NO: 77229 - RNA, 18 nt, Human
aacacuccuaaaaaaaga

SEQ ID NO: 77230 - RNA, 18 nt, Human
aacagcaaaugaggcugg

SEQ ID NO: 77231 - RNA, 22 nt, Human
aacaguuuaacuuggcuuuguu

SEQ ID NO: 77232 - RNA, 23 nt, Human
aacuacacaagugaugcagcaac

SEQ ID NO: 77233 - RNA, 23 nt, Human
aacuugaagcaguaguggauagu

SEQ ID NO: 77234 - RNA, 24 nt, Human
aauaaaaugcuacaauccucuaag

SEQ ID NO: 77235 - RNA, 22 nt, Human
acagcaaaugaggcugggugcc

SEQ ID NO: 77236 - RNA, 24 nt, Human
agacgaaaauaaaaugcuacaauc

SEQ ID NO: 77237 - RNA, 18 nt, Human
agacgccacaguguuggu

SEQ ID NO: 77238 - RNA, 23 nt, Human
agauaaaacacagugguuacaaa

SEQ ID NO: 77239 - RNA, 23 nt, Human
agcacuuugggaggccgaggagg

SEQ ID NO: 77240 - RNA, 20 nt, Human
aggaagaaaaaggugacuca

SEQ ID NO: 77241 - RNA, 23 nt, Human
aggagguggaucacaaggucagg

SEQ ID NO: 77242 - RNA, 18 nt, Human
aggcaggcacuaccaaga

SEQ ID NO: 77243 - RNA, 19 nt, Human
aggccgaggagguggauca

SEQ ID NO: 77244 - RNA, 24 nt, Human
agguggaucacaaggucaggagau

SEQ ID NO: 77245 - RNA, 25 nt, Human
augcagcaacauauauauauaaaug

SEQ ID NO: 77246 - RNA, 19 nt, Human
augccuguaaucccagcac

SEQ ID NO: 77247 - RNA, 21 nt, Human
caacacacaguagauaaaaca

SEQ ID NO: 77248 - RNA, 24 nt, Human
caacaggccaccacaacacacagu

SEQ ID NO: 77249 - RNA, 20 nt, Human
caaggcaaaugggagggaaa

SEQ ID NO: 77250 - RNA, 23 nt, Human
cacauagugaaaaauaacacucc

SEQ ID NO: 77251 - RNA, 20 nt, Human
cacccuguuucaaaggcagg

SEQ ID NO: 77252 - RNA, 18 nt, Human
cacuauaacacccuuucc

SEQ ID NO: 77253 - RNA, 28 nt, Human
cagaugauguauuacuuccccugaaagg

SEQ ID NO: 77254 - RNA, 25 nt, Human
cagcacuuugggaggccgaggaggu

SEQ ID NO: 77255 - RNA, 26 nt, Human
cagcacuuugggaggccgaggaggug

SEQ ID NO: 77256 - RNA, 18 nt, Human
caguauauacaugucaau

SEQ ID NO: 77257 - RNA, 24 nt, Human
caugccuguaaucccagcacuuug

SEQ ID NO: 77258 - RNA, 19 nt, Human
ccuaaaaaaagaaugcuac

SEQ ID NO: 77259 - RNA, 22 nt, Human
ccuguaaucccagcacuuuggg

SEQ ID NO: 77260 - RNA, 26 nt, Human
ccuuguauuuucaagauuuaaagcaa

SEQ ID NO: 77261 - RNA, 23 nt, Human
cgaggagguggaucacaagguca

SEQ ID NO: 77262 - RNA, 24 nt, Human
cguggcucaugccuguaaucccag

SEQ ID NO: 77263 - RNA, 24 nt, Human
cucaugccuguaaucccagcacuu

SEQ ID NO: 77264 - RNA, 21 nt, Human
cugaggcaaggcaaaugggag

SEQ ID NO: 77265 - RNA, 22 nt, Human
cuuuuccacaacauuuuauuuu

SEQ ID NO: 77266 - RNA, 23 nt, Human
gaaaauaaaaugcuacaauccuc

SEQ ID NO: 77267 - RNA, 21 nt, Human
gaaaggagaaccauuucccac

SEQ ID NO: 77268 - RNA, 18 nt, Human
gagacgccacaguguugg

SEQ ID NO: 77269 - RNA, 22 nt, Human
gagagggaaaggagaaccauuu

SEQ ID NO: 77270 - RNA, 21 nt, Human
ggcucaugccuguaaucccag

SEQ ID NO: 77271 - RNA, 23 nt, Human
ggcugggugccguggcucaugcc

SEQ ID NO: 77272 - RNA, 23 nt, Human
gggaaaggagaaccauuucccac

SEQ ID NO: 77273 - RNA, 23 nt, Human
ggugccguggcucaugccuguaa

SEQ ID NO: 77274 - RNA, 22 nt, Human
guggcucaugccuguaauccca

SEQ ID NO: 77275 - RNA, 24 nt, Human
guuaggguaaauaaaaacacacaa

SEQ ID NO: 77276 - RNA, 22 nt, Human
uaaaacaagacuuaauauaaac

SEQ ID NO: 77277 - RNA, 18 nt, Human
uaaaaugcuacaauccuc

SEQ ID NO: 77278 - RNA, 23 nt, Human
uaaaucacacaaaccaauaaccg

SEQ ID NO: 77279 - RNA, 24 nt, Human
uaaaucacacaaaccaauaaccga

SEQ ID NO: 77280 - RNA, 21 nt, Human
uaaccgagggccuugguuguc

SEQ ID NO: 77281 - RNA, 21 nt, Human
uacaaaguaaaaaaaugaaaa

SEQ ID NO: 77282 - RNA, 22 nt, Human
uacacccuguuucaaaggcagg

SEQ ID NO: 77283 - RNA, 19 nt, Human
uagaaaaauggaaaacuaa

SEQ ID NO: 77284 - RNA, 18 nt, Human
uagaggauaauuacugua

SEQ ID NO: 77285 - RNA, 21 nt, Human
uagauaaaacacagugguuac

SEQ ID NO: 77286 - RNA, 20 nt, Human
uagguacaaaaaaaaucuga

SEQ ID NO: 77287 - RNA, 24 nt, Human
uauacacauaauacauauuuaaaa

SEQ ID NO: 77288 - RNA, 20 nt, Human
uauauacacauaauacauag

SEQ ID NO: 77289 - RNA, 18 nt, Human
ucacaaggucaggagauc

SEQ ID NO: 77290 - RNA, 24 nt, Human
ucacaaggucaggagaucgagacc

SEQ ID NO: 77291 - RNA, 23 nt, Human
ucacuaaaaaauaaacuacaaag

SEQ ID NO: 77292 - RNA, 22 nt, Human
ucaugccuguaaucccagcacu

SEQ ID NO: 77293 - RNA, 23 nt, Human
ugaaaaauagauauuuauugaga

SEQ ID NO: 77294 - RNA, 23 nt, Human
ugaaauacaauuuaacuacacaa

SEQ ID NO: 77295 - RNA, 19 nt, Human
ugaggcugggugccguggc

SEQ ID NO: 77296 - RNA, 19 nt, Human
ugcagcaacauauauauau

SEQ ID NO: 77297 - RNA, 26 nt, Human
ugcagcaacauauauauauaaaugua

SEQ ID NO: 77298 - RNA, 23 nt, Human
ugccuguaaucccagcacuuugg

SEQ ID NO: 77299 - RNA, 23 nt, Human
ugccuguaaucccagcacuuugg

SEQ ID NO: 77300 - RNA, 19 nt, Human
ugcuaccuuuuccacaaca

SEQ ID NO: 77301 - RNA, 18 nt, Human
uggaaaacuaauaucccc

SEQ ID NO: 77302 - RNA, 22 nt, Human
uggcucaugccuguaaucccag

SEQ ID NO: 77303 - RNA, 24 nt, Human
uggcucaugccuguaaucccagca

SEQ ID NO: 77304 - RNA, 18 nt, Human
ugggaggccgaggaggug

SEQ ID NO: 77305 - RNA, 23 nt, Human
ugggaggccgaggagguggauca

SEQ ID NO: 77306 - RNA, 23 nt, Human
ugggagggaaauguuucuaugaa

SEQ ID NO: 77307 - RNA, 18 nt, Human
uguaaauacaguucacau

SEQ ID NO: 77308 - RNA, 23 nt, Human
ugugaggaagaaaaaggugacuc

SEQ ID NO: 77309 - RNA, 20 nt, Human
uuaaaacauuccuuguauuu

SEQ ID NO: 77310 - RNA, 21 nt, Human
uuaaggaaaaagaaagucauu

SEQ ID NO: 77311 - RNA, 23 nt, Human
uuauacuuaaggaaaaagaaagu

SEQ ID NO: 77312 - RNA, 23 nt, Human
uuauugagagggaaaggagaacc

SEQ ID NO: 77313 - RNA, 21 nt, Human
uucauaaaauuaaauacauuc

SEQ ID NO: 77314 - RNA, 20 nt, Human
uucuaugaaaaaauacugug

SEQ ID NO: 77315 - RNA, 21 nt, Human
uucuuugggugugcuucccug

SEQ ID NO: 77316 - RNA, 24 nt, Human
uugggaggccgaggagguggauca

SEQ ID NO: 77317 - RNA, 25 nt, Human
uuuagaaggaaaaaaauaaagagau

SEQ ID NO: 77318 - RNA, 19 nt, Human
uuucacagaaaacgaagau

SEQ ID NO: 77319 - RNA, 22 nt, Human
uuugaaauacaauuuaacuaca

SEQ ID NO: 77320 - RNA, 20 nt, Human
aaagaguacucuugugagag

SEQ ID NO: 77321 - RNA, 19 nt, Human
aaggcuuauuugaagaaau

SEQ ID NO: 77322 - RNA, 23 nt, Human
agaaaggaugcuuuauuugcaaa

SEQ ID NO: 77323 - RNA, 22 nt, Human
aggaaauuauauguaaaucaca

SEQ ID NO: 77324 - RNA, 25 nt, Human
cuaccugcaaguaaagaaacuguca

SEQ ID NO: 77325 - RNA, 21 nt, Human
cugcaaguaaagaaacuguca

SEQ ID NO: 77326 - RNA, 21 nt, Human
uagagcaggcaugcaacagag

SEQ ID NO: 77327 - RNA, 19 nt, Human
uggagauacucauauaugg

SEQ ID NO: 77328 - RNA, 19 nt, Human
uuuuuuuuuugaagcaugu

SEQ ID NO: 77329 - RNA, 20 nt, Human
aaaagcauucauccuauucc

SEQ ID NO: 77330 - RNA, 18 nt, Human
aagcgcagcggagcuggc

SEQ ID NO: 77331 - RNA, 23 nt, Human
accugcgcggccccagccgccuc

SEQ ID NO: 77332 - RNA, 22 nt, Human
agcaaaauuggacucugaagcc

SEQ ID NO: 77333 - RNA, 19 nt, Human
aggggaggagggcuggaag

SEQ ID NO: 77334 - RNA, 22 nt, Human
auagaaagcaagucuaucuuca

SEQ ID NO: 77335 - RNA, 24 nt, Human
auauaccauaaauaagcaaaauug

SEQ ID NO: 77336 - RNA, 23 nt, Human
caacaguacuacuacugauuuaa

SEQ ID NO: 77337 - RNA, 19 nt, Human
cacccgggguucaccaggg

SEQ ID NO: 77338 - RNA, 18 nt, Human
cagaggcuuccccuucuu

SEQ ID NO: 77339 - RNA, 21 nt, Human
cagcccgggacgaacccgucc

SEQ ID NO: 77340 - RNA, 24 nt, Human
cagggugugauccaaagcaaaccu

SEQ ID NO: 77341 - RNA, 21 nt, Human
ccuacaugcucagcccagagg

SEQ ID NO: 77342 - RNA, 20 nt, Human
ccugcggguugaacucuacu

SEQ ID NO: 77343 - RNA, 18 nt, Human
ccuucuagcaccacaucc

SEQ ID NO: 77344 - RNA, 21 nt, Human
ccuucuguggcugcgcggugg

SEQ ID NO: 77345 - RNA, 24 nt, Human
cgcccgggcaagaagugcagggac

SEQ ID NO: 77346 - RNA, 22 nt, Human
cgccugcuccuccugcggcggc

SEQ ID NO: 77347 - RNA, 22 nt, Human
cggacgcgaaacagcccgggac

SEQ ID NO: 77348 - RNA, 25 nt, Human
cguccgcucuuuuugcggcugcgcg

SEQ ID NO: 77349 - RNA, 20 nt, Human
cugcggcggcgcagacccgu

SEQ ID NO: 77350 - RNA, 25 nt, Human
gaggcuuccccuucuagcaccacau

SEQ ID NO: 77351 - RNA, 26 nt, Human
gccucaggccggacgcgaaacagccc

SEQ ID NO: 77352 - RNA, 18 nt, Human
gcgcggccccagccgccu

SEQ ID NO: 77353 - RNA, 19 nt, Human
gcugcgcgguggagccucg

SEQ ID NO: 77354 - RNA, 19 nt, Human
gcugcgcgguggagccucg

SEQ ID NO: 77355 - RNA, 20 nt, Human
ggcggcggcuuaggggagga

SEQ ID NO: 77356 - RNA, 21 nt, Human
ggcuggaagcuggagacaagc

SEQ ID NO: 77357 - RNA, 23 nt, Human
uagcacccgggguucaccagggu

SEQ ID NO: 77358 - RNA, 23 nt, Human
uauauaccauaaauaagcaaaau

SEQ ID NO: 77359 - RNA, 22 nt, Human
ucagcaacaguacuacuacuga

SEQ ID NO: 77360 - RNA, 24 nt, Human
ucaggccggacgcgaaacagcccg

SEQ ID NO: 77361 - RNA, 18 nt, Human
ucugaagcccuaauacuu

SEQ ID NO: 77362 - RNA, 21 nt, Human
ucuguggcugcgcgguggagc

SEQ ID NO: 77363 - RNA, 24 nt, Human
uggaagcuggagacaagcgcagcg

SEQ ID NO: 77364 - RNA, 27 nt, Human
uggcggcggcuuaggggaggggugcuc

SEQ ID NO: 77365 - RNA, 24 nt, Human
uuauauaccauaaauaagcaaaau

SEQ ID NO: 77366 - RNA, 21 nt, Human
uugccaggaacuucaugaccu

SEQ ID NO: 77367 - RNA, 23 nt, Human
uuuugcggcugcgcaguggaacc

SEQ ID NO: 77368 - RNA, 23 nt, Human
aaaaaggacacauaguguauuga

SEQ ID NO: 77369 - RNA, 25 nt, Human
aaccucacaaccugaggaucaccuc

SEQ ID NO: 77370 - RNA, 18 nt, Human
aagaacaaaauacaggga

SEQ ID NO: 77371 - RNA, 22 nt, Human
acagggagggacuuguucugga

SEQ ID NO: 77372 - RNA, 19 nt, Human
accagguagguagaaggac

SEQ ID NO: 77373 - RNA, 23 nt, Human
accucaguuaaaccaaggcuuug

SEQ ID NO: 77374 - RNA, 19 nt, Human
aggaucaccucaguuaaac

SEQ ID NO: 77375 - RNA, 20 nt, Human
aggaucaccucaguuaaacc

SEQ ID NO: 77376 - RNA, 22 nt, Human
aucacagagcuacucagcagag

SEQ ID NO: 77377 - RNA, 20 nt, Human
auccucgcccaagaaaaccc

SEQ ID NO: 77378 - RNA, 21 nt, Human
augucaccuuuccuaauccag

SEQ ID NO: 77379 - RNA, 19 nt, Human
caagaacaaaauacaggga

SEQ ID NO: 77380 - RNA, 22 nt, Human
caagcccugggcugcugcuccu

SEQ ID NO: 77381 - RNA, 18 nt, Human
cacaaccugaggaucacc

SEQ ID NO: 77382 - RNA, 19 nt, Human
cccugggcugcugcuccuc

SEQ ID NO: 77383 - RNA, 21 nt, Human
cuaauaaaccucacaaccuga

SEQ ID NO: 77384 - RNA, 21 nt, Human
cuaauccagcacauccucgcc

SEQ ID NO: 77385 - RNA, 21 nt, Human
cucagcaggcuuggccucaac

SEQ ID NO: 77386 - RNA, 21 nt, Human
cugaccccucucaagaacaaa

SEQ ID NO: 77387 - RNA, 18 nt, Human
cugacucagcuacauaca

SEQ ID NO: 77388 - RNA, 20 nt, Human
cugcugcuccucauccuggu

SEQ ID NO: 77389 - RNA, 21 nt, Human
cuggcuuauggggcaguagag

SEQ ID NO: 77390 - RNA, 21 nt, Human
cuuggccucaacuuccagggc

SEQ ID NO: 77391 - RNA, 23 nt, Human
gaauaacaauuuuccccaaagga

SEQ ID NO: 77392 - RNA, 28 nt, Human
gggagggacuuguucuggauucccuuug

SEQ ID NO: 77393 - RNA, 19 nt, Human
gugguuaucacugacuauc

SEQ ID NO: 77394 - RNA, 22 nt, Human
uaccagguagguagaaggaccu

SEQ ID NO: 77395 - RNA, 19 nt, Human
uagcaucuggucagugguu

SEQ ID NO: 77396 - RNA, 20 nt, Human
uagcuucuagacugaccccu

SEQ ID NO: 77397 - RNA, 24 nt, Human
uagguagaaggaccuuaggcucaa

SEQ ID NO: 77398 - RNA, 20 nt, Human
ucccuuugggcaaaugcagc

SEQ ID NO: 77399 - RNA, 19 nt, Human
uccgaccucaaaugccaau

SEQ ID NO: 77400 - RNA, 22 nt, Human
uccucgcccaagaaaacccuau

SEQ ID NO: 77401 - RNA, 21 nt, Human
ucguuggugcugauccagaca

SEQ ID NO: 77402 - RNA, 23 nt, Human
ucuagacugaccccucucaagaa

SEQ ID NO: 77403 - RNA, 21 nt, Human
ugaauaacaauuuuccccaaa

SEQ ID NO: 77404 - RNA, 19 nt, Human
ugccaguucuuaaaggaac

SEQ ID NO: 77405 - RNA, 21 nt, Human
ugccaguucuuaaaggaacug

SEQ ID NO: 77406 - RNA, 25 nt, Human
uguucuggauucccuuugggcaaau

SEQ ID NO: 77407 - RNA, 26 nt, Human
uguucuggauucccuuugggcaaaug

SEQ ID NO: 77408 - RNA, 20 nt, Human
uuccagggcuuuuguuuucu

SEQ ID NO: 77409 - RNA, 20 nt, Human
uuccuggcuuauggggcagg

SEQ ID NO: 77410 - RNA, 21 nt, Human
uugauagcaucuggucagugg

SEQ ID NO: 77411 - RNA, 18 nt, Human
uugcugccaguucuuaaa

SEQ ID NO: 77412 - RNA, 23 nt, Human
accccuccccugccucccuccug

SEQ ID NO: 77413 - RNA, 21 nt, Human
acccucacacuccagccccgu

SEQ ID NO: 77414 - RNA, 21 nt, Human
aggcauggccccacacccugc

SEQ ID NO: 77415 - RNA, 24 nt, Human
agucaaaugauuggaaaaccaaua

SEQ ID NO: 77416 - RNA, 22 nt, Human
auggccccacacccugcccggc

SEQ ID NO: 77417 - RNA, 19 nt, Human
caccaaacugcacuggccc

SEQ ID NO: 77418 - RNA, 20 nt, Human
caccgagcugcccgggccgc

SEQ ID NO: 77419 - RNA, 23 nt, Human
ccaauaacgaaaaauaguucuuc

SEQ ID NO: 77420 - RNA, 21 nt, Human
ccacuggccggccccugggcu

SEQ ID NO: 77421 - RNA, 21 nt, Human
ccaggaccgacgcagagcugg

SEQ ID NO: 77422 - RNA, 18 nt, Human
cccacacccugcccggcc

SEQ ID NO: 77423 - RNA, 18 nt, Human
ccccacacccugcccggc

SEQ ID NO: 77424 - RNA, 22 nt, Human
cccucggggcuccgagcgcgcc

SEQ ID NO: 77425 - RNA, 24 nt, Human
ccgcaccccuccccugccuccccc

SEQ ID NO: 77426 - RNA, 18 nt, Human
ccgcagccgccccggugc

SEQ ID NO: 77427 - RNA, 21 nt, Human
ccgccgcaccccuccccugcc

SEQ ID NO: 77428 - RNA, 22 nt, Human
ccgccgcaccccuccccugccu

SEQ ID NO: 77429 - RNA, 19 nt, Human
ccgccgcgcagcugccgcc

SEQ ID NO: 77430 - RNA, 22 nt, Human
ccggccccugggcuucggcucc

SEQ ID NO: 77431 - RNA, 22 nt, Human
ccgggcccguggugcaugcugg

SEQ ID NO: 77432 - RNA, 21 nt, Human
ccggugccgccgcgcagcugc

SEQ ID NO: 77433 - RNA, 21 nt, Human
ccucccuccuggggucaccac

SEQ ID NO: 77434 - RNA, 21 nt, Human
ccugucccuaagccuguggca

SEQ ID NO: 77435 - RNA, 24 nt, Human
cggccauaaauauauacagauucc

SEQ ID NO: 77436 - RNA, 22 nt, Human
cggccccugggcuucggcuccu

SEQ ID NO: 77437 - RNA, 18 nt, Human
cuccagccccgucuggug

SEQ ID NO: 77438 - RNA, 22 nt, Human
cuggugacccaacccgggcccg

SEQ ID NO: 77439 - RNA, 18 nt, Human
gaccaggcucagcccucg

SEQ ID NO: 77440 - RNA, 21 nt, Human
gccccugggcuucggcuccug

SEQ ID NO: 77441 - RNA, 18 nt, Human
ggaaggccacuggccggc

SEQ ID NO: 77442 - RNA, 20 nt, Human
ggaggacacaccaaacugca

SEQ ID NO: 77443 - RNA, 18 nt, Human
ggccuggggccccggcuc

SEQ ID NO: 77444 - RNA, 19 nt, Human
ggcgcacaccgagcugccc

SEQ ID NO: 77445 - RNA, 21 nt, Human
ggcggaggacacaccaaacug

SEQ ID NO: 77446 - RNA, 22 nt, Human
ggcuccgagcgcgccgcagccc

SEQ ID NO: 77447 - RNA, 19 nt, Human
gggaccgccgcaccccucc

SEQ ID NO: 77448 - RNA, 22 nt, Human
uaagccuguggcacagcgacuc

SEQ ID NO: 77449 - RNA, 22 nt, Human
uagucaaaugauuggaaaacca

SEQ ID NO: 77450 - RNA, 18 nt, Human
uccccugccucccuccug

SEQ ID NO: 77451 - RNA, 19 nt, Human
ucccuccuggggucaccac

SEQ ID NO: 77452 - RNA, 19 nt, Human
uccgagcgcgccgcagccg

SEQ ID NO: 77453 - RNA, 20 nt, Human
ugauuggaaaaccaauaacg

SEQ ID NO: 77454 - RNA, 19 nt, Human
uggcacgagguccugcagg

SEQ ID NO: 77455 - RNA, 19 nt, Human
ugggagccagggagcuggg

SEQ ID NO: 77456 - RNA, 23 nt, Human
ugucaggggacacggcacccucg

SEQ ID NO: 77457 - RNA, 19 nt, Human
uguggcacagcgacucuug

SEQ ID NO: 77458 - RNA, 20 nt, Human
aaagugcugagauuacaggc

SEQ ID NO: 77459 - RNA, 22 nt, Human
aaagugcugagauuacaggcga

SEQ ID NO: 77460 - RNA, 26 nt, Human
aagugcugagauuacaggcgagagcc

SEQ ID NO: 77461 - RNA, 23 nt, Human
acaaggacccuauuugaaaaaca

SEQ ID NO: 77462 - RNA, 19 nt, Human
acaggcgagagccaccacg

SEQ ID NO: 77463 - RNA, 18 nt, Human
acgggguuucaugauguu

SEQ ID NO: 77464 - RNA, 19 nt, Human
acgggguuucaugauguug

SEQ ID NO: 77465 - RNA, 20 nt, Human
acgggguuucaugauguugg

SEQ ID NO: 77466 - RNA, 24 nt, Human
acgggguuucaugauguuggccag

SEQ ID NO: 77467 - RNA, 21 nt, Human
acuacaggugugugccaccau

SEQ ID NO: 77468 - RNA, 19 nt, Human
acuguuauuugccagaaaa

SEQ ID NO: 77469 - RNA, 19 nt, Human
agauuacaggcgagagcca

SEQ ID NO: 77470 - RNA, 21 nt, Human
agcugcuccugcacagggucc

SEQ ID NO: 77471 - RNA, 18 nt, Human
agcuuagaggaugagcac

SEQ ID NO: 77472 - RNA, 23 nt, Human
aguagcugggacuacaggugugu

SEQ ID NO: 77473 - RNA, 24 nt, Human
agugcaauggugcaacuucggcuc

SEQ ID NO: 77474 - RNA, 22 nt, Human
aucuuugccguugucacugagc

SEQ ID NO: 77475 - RNA, 19 nt, Human
auguuggccaggcuagucu

SEQ ID NO: 77476 - RNA, 24 nt, Human
auuuuuguauuuuuaguagagacg

SEQ ID NO: 77477 - RNA, 27 nt, Human
caaagugcugagauuacaggcgagagc

SEQ ID NO: 77478 - RNA, 23 nt, Human
caaaucauuuuaagcccucccca

SEQ ID NO: 77479 - RNA, 23 nt, Human
caacacagcccggguucucccuc

SEQ ID NO: 77480 - RNA, 23 nt, Human
caaccuccaccuccuggguacaa

SEQ ID NO: 77481 - RNA, 19 nt, Human
caacuaggugaccugcuaa

SEQ ID NO: 77482 - RNA, 23 nt, Human
caacuaggugaccugcuaaacca

SEQ ID NO: 77483 - RNA, 19 nt, Human
caagcgguucucgugcguu

SEQ ID NO: 77484 - RNA, 20 nt, Human
caauauacaacagcucgggc

SEQ ID NO: 77485 - RNA, 24 nt, Human
caccaugccuggcuaauuuuugua

SEQ ID NO: 77486 - RNA, 23 nt, Human
caccugccucggccucccaaagu

SEQ ID NO: 77487 - RNA, 21 nt, Human
cacugcaaccuccaccuccug

SEQ ID NO: 77488 - RNA, 23 nt, Human
cacugcaaccuccaccuccuggg

SEQ ID NO: 77489 - RNA, 18 nt, Human
cagaaaagacuggaccag

SEQ ID NO: 77490 - RNA, 21 nt, Human
cagaaaagacuggaccagaga

SEQ ID NO: 77491 - RNA, 18 nt, Human
caggcuagucuugaacuc

SEQ ID NO: 77492 - RNA, 22 nt, Human
caggugauccaccugccucggc

SEQ ID NO: 77493 - RNA, 25 nt, Human
caggugugugccaccaugccuggcu

SEQ ID NO: 77494 - RNA, 22 nt, Human
ccaaagugcugagauuacaggc

SEQ ID NO: 77495 - RNA, 23 nt, Human
ccaaagugcugagauuacaggcg

SEQ ID NO: 77496 - RNA, 23 nt, Human
ccaaaucauuuuaagcccucccc

SEQ ID NO: 77497 - RNA, 23 nt, Human
cccgaguagcugggacuacaggu

SEQ ID NO: 77498 - RNA, 24 nt, Human
cccgaguagcugggacuacaggug

SEQ ID NO: 77499 - RNA, 19 nt, Human
ccucuauucccucccuuuc

SEQ ID NO: 77500 - RNA, 20 nt, Human
ccucuauucccucccuuucc

SEQ ID NO: 77501 - RNA, 21 nt, Human
ccugaccucaggugauccacc

SEQ ID NO: 77502 - RNA, 23 nt, Human
ccugaccucaggugauccaccug

SEQ ID NO: 77503 - RNA, 23 nt, Human
ccugaccucaggugauccaccug

SEQ ID NO: 77504 - RNA, 20 nt, Human
cgugucacccggagcugcuc

SEQ ID NO: 77505 - RNA, 24 nt, Human
cucacugcaaccuccaccuccugg

SEQ ID NO: 77506 - RNA, 27 nt, Human
cucacugcaaccuccaccuccugggua

SEQ ID NO: 77507 - RNA, 21 nt, Human
cucccaaagugcugagauuac

SEQ ID NO: 77508 - RNA, 21 nt, Human
cuccuggguacaagcgguucu

SEQ ID NO: 77509 - RNA, 18 nt, Human
cucugucgcccagggugg

SEQ ID NO: 77510 - RNA, 23 nt, Human
cugccucggccucccaaagugcu

SEQ ID NO: 77511 - RNA, 30 nt, Human
cuuacuugccacugccuuuuuuuuuugauu

SEQ ID NO: 77512 - RNA, 22 nt, Human
cuucaagcuuagaggaugagca

SEQ ID NO: 77513 - RNA, 24 nt, Human
gaccucaggugauccaccugccuc

SEQ ID NO: 77514 - RNA, 24 nt, Human
gacuacaggugugugccaccaugc

SEQ ID NO: 77515 - RNA, 26 nt, Human
gaguagcugggacuacaggugugugc

SEQ ID NO: 77516 - RNA, 22 nt, Human
gaucaucgacucuucugaccca

SEQ ID NO: 77517 - RNA, 18 nt, Human
gauuacaggcgagagcca

SEQ ID NO: 77518 - RNA, 20 nt, Human
gcaaccuccaccuccugggu

SEQ ID NO: 77519 - RNA, 23 nt, Human
gccaccacugccauuuucaucac

SEQ ID NO: 77520 - RNA, 23 nt, Human
gcuagucuugaacuccugaccuc

SEQ ID NO: 77521 - RNA, 18 nt, Human
gcugcccagugccuggcu

SEQ ID NO: 77522 - RNA, 24 nt, Human
ggacuacaggugugugccaccaug

SEQ ID NO: 77523 - RNA, 18 nt, Human
ggaggagauggaguaagg

SEQ ID NO: 77524 - RNA, 24 nt, Human
ggcuagucuugaacuccugaccuc

SEQ ID NO: 77525 - RNA, 23 nt, Human
gggguuucaugauguuggccagg

SEQ ID NO: 77526 - RNA, 22 nt, Human
ggguuucaugauguuggccagg

SEQ ID NO: 77527 - RNA, 19 nt, Human
guagagacgggguuucaug

SEQ ID NO: 77528 - RNA, 24 nt, Human
gugauccaccugccucggccuccc

SEQ ID NO: 77529 - RNA, 24 nt, Human
uaaacaaauggauuuucgucuccc

SEQ ID NO: 77530 - RNA, 21 nt, Human
uaauuucuaggcagaauuuca

SEQ ID NO: 77531 - RNA, 24 nt, Human
uaauuuuuguauuuuuaguagaga

SEQ ID NO: 77532 - RNA, 23 nt, Human
uacaggcgagagccaccacgccc

SEQ ID NO: 77533 - RNA, 24 nt, Human
uagaaucuugcucugucgcccagg

SEQ ID NO: 77534 - RNA, 25 nt, Human
uagcagcauuucucuucuauaacuu

SEQ ID NO: 77535 - RNA, 19 nt, Human
uaguagagacgggguuuca

SEQ ID NO: 77536 - RNA, 24 nt, Human
uaguagagacgggguuucaugaug

SEQ ID NO: 77537 - RNA, 23 nt, Human
ucacugcaaccuccaccuccugg

SEQ ID NO: 77538 - RNA, 23 nt, Human
ucacugcaaccuccaccuccugg

SEQ ID NO: 77539 - RNA, 24 nt, Human
ucacugcaaccuccaccuccuggg

SEQ ID NO: 77540 - RNA, 27 nt, Human
ucacugcaaccuccaccuccuggguac

SEQ ID NO: 77541 - RNA, 21 nt, Human
ucaggugauccaccugccucg

SEQ ID NO: 77542 - RNA, 19 nt, Human
ucaguccccucgugucacc

SEQ ID NO: 77543 - RNA, 24 nt, Human
ucccaaagugcugagauuacaggc

SEQ ID NO: 77544 - RNA, 23 nt, Human
ucccgaguagcugggacuacagg

SEQ ID NO: 77545 - RNA, 24 nt, Human
ucccgaguagcugggacuacaggu

SEQ ID NO: 77546 - RNA, 18 nt, Human
ucgcccaggguggagugc

SEQ ID NO: 77547 - RNA, 18 nt, Human
ucggccucccaaagugcu

SEQ ID NO: 77548 - RNA, 21 nt, Human
ucgugucacccggagcugcuc

SEQ ID NO: 77549 - RNA, 24 nt, Human
ucugucgcccaggguggagugcaa

SEQ ID NO: 77550 - RNA, 23 nt, Human
ucuugaacuccugaccucaggug

SEQ ID NO: 77551 - RNA, 20 nt, Human
ucuugcucugucgcccaggg

SEQ ID NO: 77552 - RNA, 24 nt, Human
ucuugcucugucgcccagggugga

SEQ ID NO: 77553 - RNA, 24 nt, Human
ugaccucaggugauccaccugccu

SEQ ID NO: 77554 - RNA, 21 nt, Human
ugagauuacaggcgagagcca

SEQ ID NO: 77555 - RNA, 22 nt, Human
ugagauuacaggcgagagccac

SEQ ID NO: 77556 - RNA, 24 nt, Human
ugagauuacaggcgagagccacca

SEQ ID NO: 77557 - RNA, 20 nt, Human
ugcaauggugcaacuucggc

SEQ ID NO: 77558 - RNA, 19 nt, Human
ugccagaaaagacuggacc

SEQ ID NO: 77559 - RNA, 21 nt, Human
ugccagaaaagacuggaccag

SEQ ID NO: 77560 - RNA, 24 nt, Human
ugcccagugccuggcugguccgag

SEQ ID NO: 77561 - RNA, 25 nt, Human
ugcccagugccuggcugguccgagg

SEQ ID NO: 77562 - RNA, 21 nt, Human
ugccucggccucccaaagugc

SEQ ID NO: 77563 - RNA, 24 nt, Human
ugccucggccucccaaagugcuga

SEQ ID NO: 77564 - RNA, 24 nt, Human
ugcucugucgcccaggguggagug

SEQ ID NO: 77565 - RNA, 24 nt, Human
ugcugagauuacaggcgagagcca

SEQ ID NO: 77566 - RNA, 19 nt, Human
ugcugcccagugccuggcu

SEQ ID NO: 77567 - RNA, 19 nt, Human
uggagugcaauggugcaac

SEQ ID NO: 77568 - RNA, 23 nt, Human
uggagugcaauggugcaacuucg

SEQ ID NO: 77569 - RNA, 24 nt, Human
uggagugcaauggugcaacuucgg

SEQ ID NO: 77570 - RNA, 24 nt, Human
uggccaggcuagucuugaacuccu

SEQ ID NO: 77571 - RNA, 18 nt, Human
ugggacuacaggugugug

SEQ ID NO: 77572 - RNA, 21 nt, Human
ugggacuacaggugugugcca

SEQ ID NO: 77573 - RNA, 22 nt, Human
ugggacuacaggugugugccac

SEQ ID NO: 77574 - RNA, 24 nt, Human
ugggacuacaggugugugccacca

SEQ ID NO: 77575 - RNA, 25 nt, Human
ugggacuacaggugugugccaccau

SEQ ID NO: 77576 - RNA, 21 nt, Human
uggggaggagauggaguaagg

SEQ ID NO: 77577 - RNA, 21 nt, Human
uguauuuuuaguagagacggg

SEQ ID NO: 77578 - RNA, 20 nt, Human
ugugggaguaucuucagucc

SEQ ID NO: 77579 - RNA, 18 nt, Human
uuaguagagacgggguuu

SEQ ID NO: 77580 - RNA, 20 nt, Human
uuaguagagacgggguuuca

SEQ ID NO: 77581 - RNA, 21 nt, Human
uuaguagagacgggguuucau

SEQ ID NO: 77582 - RNA, 24 nt, Human
uuaguagagacgggguuucaugau

SEQ ID NO: 77583 - RNA, 23 nt, Human
uucucgugcguugggcucccgag

SEQ ID NO: 77584 - RNA, 23 nt, Human
uugggcucccgaguagcugggac

SEQ ID NO: 77585 - RNA, 21 nt, Human
uuggggaggagauggaguaag

SEQ ID NO: 77586 - RNA, 23 nt, Human
uuguauuuuuaguagagacgggg

SEQ ID NO: 77587 - RNA, 21 nt, Human
uuucaugauguuggccaggcu

SEQ ID NO: 77588 - RNA, 22 nt, Human
uuuucuauaccccacacauucc

SEQ ID NO: 77589 - RNA, 24 nt, Human
uuuuuaguagagacgggguuucau

SEQ ID NO: 77590 - RNA, 20 nt, Human
uuuuuguauuuuuaguagag

SEQ ID NO: 77591 - RNA, 19 nt, Human
aaagcuuuaaauaaggauc

SEQ ID NO: 77592 - RNA, 20 nt, Human
aagaauguguuuagaacuau

SEQ ID NO: 77593 - RNA, 26 nt, Human
aagaugcuguuguccuucacaguuca

SEQ ID NO: 77594 - RNA, 21 nt, Human
accaaaaauuuccaacuuccu

SEQ ID NO: 77595 - RNA, 21 nt, Human
accaaauaauuuuuauucaca

SEQ ID NO: 77596 - RNA, 24 nt, Human
acgaugaugaugauaaugauaacu

SEQ ID NO: 77597 - RNA, 19 nt, Human
acugucuuucugaaguugu

SEQ ID NO: 77598 - RNA, 21 nt, Human
agacaaagucauaaaccaaaa

SEQ ID NO: 77599 - RNA, 20 nt, Human
agcccaacuuuucuucuacc

SEQ ID NO: 77600 - RNA, 22 nt, Human
agucauaaaccaaaaauuucca

SEQ ID NO: 77601 - RNA, 21 nt, Human
agucauccuuauuuugaaagc

SEQ ID NO: 77602 - RNA, 24 nt, Human
cacaauauuauucuaaagucaucc

SEQ ID NO: 77603 - RNA, 18 nt, Human
cauccuuauuuugaaagc

SEQ ID NO: 77604 - RNA, 25 nt, Human
cauccuuauuuugaaagccuaaaga

SEQ ID NO: 77605 - RNA, 20 nt, Human
ccacagcagccuacaccuuc

SEQ ID NO: 77606 - RNA, 18 nt, Human
cugcguuuucugcgucug

SEQ ID NO: 77607 - RNA, 19 nt, Human
uaaaccaaaaauuuccaac

SEQ ID NO: 77608 - RNA, 18 nt, Human
uaccacagcagccuacac

SEQ ID NO: 77609 - RNA, 21 nt, Human
uaccacagcagccuacaccuu

SEQ ID NO: 77610 - RNA, 24 nt, Human
uaccaccaagcuagacauuuuaau

SEQ ID NO: 77611 - RNA, 21 nt, Human
uagacaaagucauaaaccaaa

SEQ ID NO: 77612 - RNA, 25 nt, Human
ucuaugacacaauauuauucuaaag

SEQ ID NO: 77613 - RNA, 25 nt, Human
uguacagucacugucuuucugaagu

SEQ ID NO: 77614 - RNA, 24 nt, Human
uuuuauggcuauaaaaauaccacc

SEQ ID NO: 77615 - RNA, 20 nt, Human
aaaacacuuucuguggauaa

SEQ ID NO: 77616 - RNA, 23 nt, Human
aaaacagauauuuaccuuaacac

SEQ ID NO: 77617 - RNA, 21 nt, Human
aaacagaguauaaaaaucaga

SEQ ID NO: 77618 - RNA, 18 nt, Human
aaagaacagcuucuccca

SEQ ID NO: 77619 - RNA, 18 nt, Human
aaccugauuccuuaacaa

SEQ ID NO: 77620 - RNA, 20 nt, Human
aaugcacagaguaugcucag

SEQ ID NO: 77621 - RNA, 23 nt, Human
accacaaaggauacaauuuuaac

SEQ ID NO: 77622 - RNA, 24 nt, Human
accauuuacugaguaccuacuaua

SEQ ID NO: 77623 - RNA, 19 nt, Human
acccauaguagcucucccu

SEQ ID NO: 77624 - RNA, 21 nt, Human
agaaaagagcaccugcaaaaa

SEQ ID NO: 77625 - RNA, 18 nt, Human
agacacuaaggcugcucc

SEQ ID NO: 77626 - RNA, 20 nt, Human
agagcaccucaggccugaaa

SEQ ID NO: 77627 - RNA, 26 nt, Human
agagcaccugcaaaaacagcgaaguc

SEQ ID NO: 77628 - RNA, 18 nt, Human
agccagccagcuacaaca

SEQ ID NO: 77629 - RNA, 20 nt, Human
agccccuggccguguggacc

SEQ ID NO: 77630 - RNA, 22 nt, Human
agcgcccagacccgagccucac

SEQ ID NO: 77631 - RNA, 19 nt, Human
aggaagacacuaaggcugc

SEQ ID NO: 77632 - RNA, 23 nt, Human
aggaggaaauaaacagaucagag

SEQ ID NO: 77633 - RNA, 22 nt, Human
aggaggcacuaaaaucauugag

SEQ ID NO: 77634 - RNA, 23 nt, Human
agguagaaaaaaccugauuccuu

SEQ ID NO: 77635 - RNA, 20 nt, Human
aguaugccucuuuguuuucu

SEQ ID NO: 77636 - RNA, 25 nt, Human
auaaaaaucagaguaugccucuuug

SEQ ID NO: 77637 - RNA, 18 nt, Human
auaaggcacaagacccuc

SEQ ID NO: 77638 - RNA, 19 nt, Human
augcugccacugagcugac

SEQ ID NO: 77639 - RNA, 23 nt, Human
caaacacacacaaaaaauugcug

SEQ ID NO: 77640 - RNA, 18 nt, Human
caacauaauguggaaagg

SEQ ID NO: 77641 - RNA, 18 nt, Human
caccugcaaaaacagagu

SEQ ID NO: 77642 - RNA, 20 nt, Human
cacuucuauagaagcaaaau

SEQ ID NO: 77643 - RNA, 21 nt, Human
cagaucaccaauuaaaagccc

SEQ ID NO: 77644 - RNA, 19 nt, Human
cagcaggaagacacuaagg

SEQ ID NO: 77645 - RNA, 21 nt, Human
caggcugugacaucaggaaga

SEQ ID NO: 77646 - RNA, 20 nt, Human
cagucaagagcaccucaggc

SEQ ID NO: 77647 - RNA, 18 nt, Human
ccagacccgagccucacu

SEQ ID NO: 77648 - RNA, 19 nt, Human
cgaaagcacacccuuagaa

SEQ ID NO: 77649 - RNA, 22 nt, Human
cguauccgaguguggggaugcc

SEQ ID NO: 77650 - RNA, 23 nt, Human
cgucaucacuggcuccugcccac

SEQ ID NO: 77651 - RNA, 19 nt, Human
cucuaaugacuuaguagcu

SEQ ID NO: 77652 - RNA, 21 nt, Human
cugagggaaaccaaaauacaa

SEQ ID NO: 77653 - RNA, 24 nt, Human
cugcaauuaaacaaauagugcaca

SEQ ID NO: 77654 - RNA, 21 nt, Human
cuggccguguggaccgggucu

SEQ ID NO: 77655 - RNA, 23 nt, Human
cuuaacaagacuucucagucacu

SEQ ID NO: 77656 - RNA, 22 nt, Human
cuuacauuaauguuuuucuagg

SEQ ID NO: 77657 - RNA, 22 nt, Human
cuuccugcuguguggcccaugg

SEQ ID NO: 77658 - RNA, 18 nt, Human
cuugcucaucaaaucucc

SEQ ID NO: 77659 - RNA, 21 nt, Human
cuuguuucucuuucccuuuca

SEQ ID NO: 77660 - RNA, 22 nt, Human
cuuucccuuucacuuuuccuuu

SEQ ID NO: 77661 - RNA, 22 nt, Human
gaaauaaacagaucagagguca

SEQ ID NO: 77662 - RNA, 19 nt, Human
gaaauuuuuccaaugcauu

SEQ ID NO: 77663 - RNA, 19 nt, Human
gaagcuccucaauggcccu

SEQ ID NO: 77664 - RNA, 18 nt, Human
gacccuauggcuaaaagu

SEQ ID NO: 77665 - RNA, 24 nt, Human
gaccuagcggauugcaucagcagg

SEQ ID NO: 77666 - RNA, 22 nt, Human
gaccuggggcagugcccgaggc

SEQ ID NO: 77667 - RNA, 20 nt, Human
gagccagcgcccagacccga

SEQ ID NO: 77668 - RNA, 21 nt, Human
gaguaugccucuuuguuuucu

SEQ ID NO: 77669 - RNA, 19 nt, Human
gaugaaaagggcuuaaaaa

SEQ ID NO: 77670 - RNA, 25 nt, Human
gauggcaaauaaauaauucucauuu

SEQ ID NO: 77671 - RNA, 19 nt, Human
gcacagguagccaaagaaa

SEQ ID NO: 77672 - RNA, 25 nt, Human
gcggcggcgaguacacguggcgggc

SEQ ID NO: 77673 - RNA, 24 nt, Human
ggaaauaaacagaucagaggucaa

SEQ ID NO: 77674 - RNA, 21 nt, Human
ggaagacaauuuuuccacaga

SEQ ID NO: 77675 - RNA, 22 nt, Human
ggacaauggugggaaaugcacu

SEQ ID NO: 77676 - RNA, 20 nt, Human
ggagacgucaaggaggagga

SEQ ID NO: 77677 - RNA, 23 nt, Human
ggagucucucccagcccgaagau

SEQ ID NO: 77678 - RNA, 18 nt, Human
ggccguguggaccggguc

SEQ ID NO: 77679 - RNA, 19 nt, Human
ggcugcucccccaggccgc

SEQ ID NO: 77680 - RNA, 19 nt, Human
gggcagugcccgaggcggc

SEQ ID NO: 77681 - RNA, 20 nt, Human
gggguugggguccccugcuc

SEQ ID NO: 77682 - RNA, 21 nt, Human
guauccgaguguggggaugcc

SEQ ID NO: 77683 - RNA, 21 nt, Human
gucgccugacagccagccagc

SEQ ID NO: 77684 - RNA, 21 nt, Human
guggaagacaauuuuuccaca

SEQ ID NO: 77685 - RNA, 24 nt, Human
uaaaaaaaagaaaacacuuucugu

SEQ ID NO: 77686 - RNA, 18 nt, Human
uacacguggcgggcugga

SEQ ID NO: 77687 - RNA, 25 nt, Human
uaccagguagaaaaaaccugauucc

SEQ ID NO: 77688 - RNA, 20 nt, Human
uacuacuaccaaguuaugaa

SEQ ID NO: 77689 - RNA, 25 nt, Human
uagccauaaauacagaugaagcucc

SEQ ID NO: 77690 - RNA, 19 nt, Human
uauaaaagacccuauggcu

SEQ ID NO: 77691 - RNA, 20 nt, Human
uauaaaagacccuauggcua

SEQ ID NO: 77692 - RNA, 23 nt, Human
uaugcaaauaucagcaacaauau

SEQ ID NO: 77693 - RNA, 23 nt, Human
uauggcuaaaaguuuuggaaaag

SEQ ID NO: 77694 - RNA, 23 nt, Human
ucaauggcccaccacucaccucu

SEQ ID NO: 77695 - RNA, 20 nt, Human
ucacuggcuccugcccaccu

SEQ ID NO: 77696 - RNA, 22 nt, Human
ucacuggcuccugcccaccucc

SEQ ID NO: 77697 - RNA, 23 nt, Human
ucccggggugcagggcagaggug

SEQ ID NO: 77698 - RNA, 23 nt, Human
uccuaaacuaacuaugcuucaga

SEQ ID NO: 77699 - RNA, 21 nt, Human
uccuaugagaaucuaaugcug

SEQ ID NO: 77700 - RNA, 19 nt, Human
uccucaauggcccaccacu

SEQ ID NO: 77701 - RNA, 18 nt, Human
uccugcccaccucccuac

SEQ ID NO: 77702 - RNA, 21 nt, Human
ucuaacuuucacaauggacaa

SEQ ID NO: 77703 - RNA, 18 nt, Human
ucuaaugacuuaguagcu

SEQ ID NO: 77704 - RNA, 22 nt, Human
ucuaaugcugccacugagccga

SEQ ID NO: 77705 - RNA, 22 nt, Human
ucuaccaaaaaaaaaaaaaaaa

SEQ ID NO: 77706 - RNA, 22 nt, Human
ucuaccaaaaaaaaaaaaaaaa

SEQ ID NO: 77707 - RNA, 28 nt, Human
ucuaccaaaaaaaaaaaaaaaagauuua

SEQ ID NO: 77708 - RNA, 20 nt, Human
ucucccagcccgaagauucg

SEQ ID NO: 77709 - RNA, 22 nt, Human
ucucgccacaauaaauuuggag

SEQ ID NO: 77710 - RNA, 25 nt, Human
ucucugaagucaacucuucuuuugg

SEQ ID NO: 77711 - RNA, 19 nt, Human
ucucuuucccuuucacuuu

SEQ ID NO: 77712 - RNA, 26 nt, Human
ucugcaauuaacacuugacauaaaac

SEQ ID NO: 77713 - RNA, 21 nt, Human
ugaaaagaacagcuucuccca

SEQ ID NO: 77714 - RNA, 19 nt, Human
ugaaacuguuacaccucag

SEQ ID NO: 77715 - RNA, 22 nt, Human
ugaaagaaaugauacaaacaua

SEQ ID NO: 77716 - RNA, 21 nt, Human
ugaaaggaagagaacaugcaa

SEQ ID NO: 77717 - RNA, 22 nt, Human
ugaagaaacaaucacucuugua

SEQ ID NO: 77718 - RNA, 21 nt, Human
ugacaagagguggaguucagg

SEQ ID NO: 77719 - RNA, 20 nt, Human
ugaccucucucuagagcagu

SEQ ID NO: 77720 - RNA, 18 nt, Human
ugacugccacaaagaaaa

SEQ ID NO: 77721 - RNA, 18 nt, Human
ugagaaucuaaugcugcc

SEQ ID NO: 77722 - RNA, 18 nt, Human
ugaggacugagggaaacc

SEQ ID NO: 77723 - RNA, 22 nt, Human
ugaucaacccaauuaaacauua

SEQ ID NO: 77724 - RNA, 22 nt, Human
ugauggcaaauaaauaauucuc

SEQ ID NO: 77725 - RNA, 23 nt, Human
ugcaacuuuuuccuagacuacua

SEQ ID NO: 77726 - RNA, 21 nt, Human
ugcaauuaacacuugacauaa

SEQ ID NO: 77727 - RNA, 22 nt, Human
ugccacaaagaaaauuucuaac

SEQ ID NO: 77728 - RNA, 24 nt, Human
ugccacaaagaaaauuucuaacag

SEQ ID NO: 77729 - RNA, 19 nt, Human
ugcguauccgagugugggg

SEQ ID NO: 77730 - RNA, 21 nt, Human
ugcuguguggcccauggccug

SEQ ID NO: 77731 - RNA, 23 nt, Human
uggcaccagggaccaguuuugug

SEQ ID NO: 77732 - RNA, 25 nt, Human
uggcaccagggaccaguuuugugga

SEQ ID NO: 77733 - RNA, 18 nt, Human
uggcaugaagaaacaauc

SEQ ID NO: 77734 - RNA, 23 nt, Human
ugggaaguagccauaaauacaga

SEQ ID NO: 77735 - RNA, 21 nt, Human
uggggguugggguccccugcu

SEQ ID NO: 77736 - RNA, 22 nt, Human
uggggguugggguccccugcuc

SEQ ID NO: 77737 - RNA, 19 nt, Human
ugguugguaugauaucaug

SEQ ID NO: 77738 - RNA, 21 nt, Human
uguggcccauggccugggggu

SEQ ID NO: 77739 - RNA, 22 nt, Human
uguuauauggcuuacauuaaug

SEQ ID NO: 77740 - RNA, 25 nt, Human
uguucuccuuaucaggagaccucca

SEQ ID NO: 77741 - RNA, 19 nt, Human
uuaacacuugacauaaaac

SEQ ID NO: 77742 - RNA, 18 nt, Human
uucaaagaaaagagcacc

SEQ ID NO: 77743 - RNA, 22 nt, Human
uucaaagaaaagagcaccugca

SEQ ID NO: 77744 - RNA, 18 nt, Human
uucacuuuuccuuugugc

SEQ ID NO: 77745 - RNA, 19 nt, Human
uucacuuuuccuuugugcc

SEQ ID NO: 77746 - RNA, 20 nt, Human
uugauuuaaaaaaaagaaaa

SEQ ID NO: 77747 - RNA, 20 nt, Human
uugcuguauuaauccacugc

SEQ ID NO: 77748 - RNA, 26 nt, Human
uuuccuagacuacuauaugaagaaug

SEQ ID NO: 77749 - RNA, 19 nt, Human
aaaaucaacggcagcacca

SEQ ID NO: 77750 - RNA, 18 nt, Human
aagaugccugggucggcc

SEQ ID NO: 77751 - RNA, 22 nt, Human
agacagagaaaaaaaaaucaac

SEQ ID NO: 77752 - RNA, 20 nt, Human
agcaaagacagagaaaaaaa

SEQ ID NO: 77753 - RNA, 19 nt, Human
cagagacccagacgccgcc

SEQ ID NO: 77754 - RNA, 21 nt, Human
caugggggcgccagagaccca

SEQ ID NO: 77755 - RNA, 22 nt, Human
cccgcgacgaggggcugggggc

SEQ ID NO: 77756 - RNA, 18 nt, Human
ccugaacccgcgacgagg

SEQ ID NO: 77757 - RNA, 21 nt, Human
gaacccgcgacgaggggcugg

SEQ ID NO: 77758 - RNA, 23 nt, Human
gcaaagacagagaaaaaaaaauc

SEQ ID NO: 77759 - RNA, 23 nt, Human
gcaaccacaugggggcgccagag

SEQ ID NO: 77760 - RNA, 20 nt, Human
gcagcaaagacagagaaaaa

SEQ ID NO: 77761 - RNA, 22 nt, Human
uaaugggcggaccugaacccgc

SEQ ID NO: 77762 - RNA, 19 nt, Human
uauugcacuucaggugagu

SEQ ID NO: 77763 - RNA, 20 nt, Human
ucaaaauugcagcaaagaca

SEQ ID NO: 77764 - RNA, 24 nt, Human
ugaacccgcgacgaggggcugggg

SEQ ID NO: 77765 - RNA, 21 nt, Human
ugaccgcacgacaaggaguaa

SEQ ID NO: 77766 - RNA, 22 nt, Human
uggcgugacgagaugcuacggg

SEQ ID NO: 77767 - RNA, 20 nt, Human
ugggggccaagaugccuggg

SEQ ID NO: 77768 - RNA, 27 nt, Human
uugcacuucaggugagucauugguaac

SEQ ID NO: 77769 - RNA, 21 nt, Human
aaaauacacgugacuaaaagc

SEQ ID NO: 77770 - RNA, 22 nt, Human
aaagaaagaaauugaaccaggc

SEQ ID NO: 77771 - RNA, 23 nt, Human
aaagaugguaaaguuugcaagga

SEQ ID NO: 77772 - RNA, 23 nt, Human
aggaaagaaagaaauugaaccag

SEQ ID NO: 77773 - RNA, 20 nt, Human
cgugacuaaaagcagagcac

SEQ ID NO: 77774 - RNA, 25 nt, Human
cuccagccuguaaauuggacugcac

SEQ ID NO: 77775 - RNA, 21 nt, Human
ggaaaauauguucuauaaagg

SEQ ID NO: 77776 - RNA, 18 nt, Human
ggcauuuuuguuucagcu

SEQ ID NO: 77777 - RNA, 18 nt, Human
ggggggaaaaaacuuaaa

SEQ ID NO: 77778 - RNA, 25 nt, Human
uaaauuuauuaaggaaagaaagaaa

SEQ ID NO: 77779 - RNA, 22 nt, Human
uacacgugacuaaaagcagagc

SEQ ID NO: 77780 - RNA, 21 nt, Human
uauuguaaacuaugguguaca

SEQ ID NO: 77781 - RNA, 22 nt, Human
uauuuuugccuugaucuaaagg

SEQ ID NO: 77782 - RNA, 24 nt, Human
ugaaaauacacgugacuaaaagca

SEQ ID NO: 77783 - RNA, 27 nt, Human
uuaacuguagaacuuuauauugugaaa

SEQ ID NO: 77784 - RNA, 27 nt, Human
uucaauucuuauuuuaauuaggaaaca

SEQ ID NO: 77785 - RNA, 19 nt, Human
uuuaauuaggaaacauaau

SEQ ID NO: 77786 - RNA, 20 nt, Human
uuuuggggggaaaaaacuua

SEQ ID NO: 77787 - RNA, 19 nt, Human
acuggggaagacaguggug

SEQ ID NO: 77788 - RNA, 24 nt, Human
agagagccaggcgcagagaugcag

SEQ ID NO: 77789 - RNA, 23 nt, Human
agcugaggauggguggggguggg

SEQ ID NO: 77790 - RNA, 25 nt, Human
agggagcugacuggggaagacagug

SEQ ID NO: 77791 - RNA, 24 nt, Human
cacccagccccugggagaaggcac

SEQ ID NO: 77792 - RNA, 23 nt, Human
caggcugaccugccauguccacc

SEQ ID NO: 77793 - RNA, 18 nt, Human
caggugaagagggggcug

SEQ ID NO: 77794 - RNA, 21 nt, Human
ccacaggcugaccugccaugu

SEQ ID NO: 77795 - RNA, 21 nt, Human
ccauguccaccccaugcccag

SEQ ID NO: 77796 - RNA, 21 nt, Human
ccuuagaguggggcuaccucu

SEQ ID NO: 77797 - RNA, 26 nt, Human
cuucuaguccugaaugugcccucacc

SEQ ID NO: 77798 - RNA, 22 nt, Human
gaccugccauguccaccccuuu

SEQ ID NO: 77799 - RNA, 22 nt, Human
gcccagaggggcuucuaguccu

SEQ ID NO: 77800 - RNA, 23 nt, Human
gcugaguauuuuagagggagcug

SEQ ID NO: 77801 - RNA, 23 nt, Human
ggaagacaguggugugcugucag

SEQ ID NO: 77802 - RNA, 24 nt, Human
gggugggggugggcugagcagguc

SEQ ID NO: 77803 - RNA, 24 nt, Human
uagcugaggauggguggggguggg

SEQ ID NO: 77804 - RNA, 20 nt, Human
uccacaggcugaccugccau

SEQ ID NO: 77805 - RNA, 19 nt, Human
uccaccccaugcccagagg

SEQ ID NO: 77806 - RNA, 23 nt, Human
uccccugacaauguaacagccgg

SEQ ID NO: 77807 - RNA, 22 nt, Human
ugccauguccaccccaugccca

SEQ ID NO: 77808 - RNA, 26 nt, Human
ugcccagaggggcuucuaaccucaag

SEQ ID NO: 77809 - RNA, 19 nt, Human
ugcccagaggggcuucuag

SEQ ID NO: 77810 - RNA, 20 nt, Human
ugggagaaggcacuguaaca

SEQ ID NO: 77811 - RNA, 24 nt, Human
uuuauucgugaccucugcuggcca

SEQ ID NO: 77812 - RNA, 22 nt, Human
aaaaagagguaagucggaggaa

SEQ ID NO: 77813 - RNA, 22 nt, Human
aaacucucuuuucaaaaagagg

SEQ ID NO: 77814 - RNA, 24 nt, Human
agauguaauuaaacagaauuuaua

SEQ ID NO: 77815 - RNA, 26 nt, Human
cacauaauauuuacagauguaauuaa

SEQ ID NO: 77816 - RNA, 22 nt, Human
gaugguucauuuaauaaaaacu

SEQ ID NO: 77817 - RNA, 22 nt, Human
ucacacacauaauauuuacaga

SEQ ID NO: 77818 - RNA, 27 nt, Human
ucucaggcuaugcagccgcacgccgcc

SEQ ID NO: 77819 - RNA, 19 nt, Human
ugaauacuaucacacacau

SEQ ID NO: 77820 - RNA, 26 nt, Human
uuuuuuuuuuuuuuuuuuuuuugggg

SEQ ID NO: 77821 - RNA, 23 nt, Human
aaaaaaaaaaaaagaaaaaagga

SEQ ID NO: 77822 - RNA, 21 nt, Human
aaaaaggaaaaaauaccucau

SEQ ID NO: 77823 - RNA, 20 nt, Human
aaaaauaccucaucaaauua

SEQ ID NO: 77824 - RNA, 18 nt, Human
aaaaaugacaggaggacc

SEQ ID NO: 77825 - RNA, 25 nt, Human
aaaauagaaaauauuuaaaaaagua

SEQ ID NO: 77826 - RNA, 19 nt, Human
aaacaaacagugagagcau

SEQ ID NO: 77827 - RNA, 26 nt, Human
aaaucagucuuaaaauagaaaauauu

SEQ ID NO: 77828 - RNA, 21 nt, Human
aaaugaauuuuggcaaaccga

SEQ ID NO: 77829 - RNA, 20 nt, Human
aacauggcaaaacaccgucu

SEQ ID NO: 77830 - RNA, 21 nt, Human
aagaggcuguuuacaugccua

SEQ ID NO: 77831 - RNA, 23 nt, Human
aagaggcuguuuacaugccuaua

SEQ ID NO: 77832 - RNA, 24 nt, Human
aaugacaggaggaccaaggagaaa

SEQ ID NO: 77833 - RNA, 24 nt, Human
aaugcgccacugcacuccagccug

SEQ ID NO: 77834 - RNA, 21 nt, Human
acaacaaaaagacaaaucugg

SEQ ID NO: 77835 - RNA, 24 nt, Human
acaggaacagcuuaaugcugaaaa

SEQ ID NO: 77836 - RNA, 24 nt, Human
acugcacuccagccugggcgauag

SEQ ID NO: 77837 - RNA, 26 nt, Human
acugcacuccagccugggcgauagag

SEQ ID NO: 77838 - RNA, 22 nt, Human
agaaacgggaaagcaaaaaaaa

SEQ ID NO: 77839 - RNA, 20 nt, Human
agaaguugcagugagccuag

SEQ ID NO: 77840 - RNA, 22 nt, Human
agaaugcgccacugcacuccag

SEQ ID NO: 77841 - RNA, 22 nt, Human
agagaaugaaaaguacagagaa

SEQ ID NO: 77842 - RNA, 23 nt, Human
agaggcugaggugagaggaucac

SEQ ID NO: 77843 - RNA, 21 nt, Human
agcacaaaugcacugaggaaa

SEQ ID NO: 77844 - RNA, 24 nt, Human
agcacuuugggaggccacgcuggg

SEQ ID NO: 77845 - RNA, 18 nt, Human
agccuggccaacauggca

SEQ ID NO: 77846 - RNA, 21 nt, Human
agccuuucggguggcuccgcc

SEQ ID NO: 77847 - RNA, 20 nt, Human
agcgggcguuuccucaagcc

SEQ ID NO: 77848 - RNA, 25 nt, Human
aggaaaaaaagaaauuacuaaaaag

SEQ ID NO: 77849 - RNA, 20 nt, Human
aggaggaccaaggagaaacu

SEQ ID NO: 77850 - RNA, 19 nt, Human
aggcagaaguugcagugag

SEQ ID NO: 77851 - RNA, 21 nt, Human
aggcagaaguugcagugagcc

SEQ ID NO: 77852 - RNA, 23 nt, Human
aggcagaaguugcagugagccua

SEQ ID NO: 77853 - RNA, 22 nt, Human
aggcugaggugagaggaucacg

SEQ ID NO: 77854 - RNA, 24 nt, Human
aguacugaaagaccuuaaaaagga

SEQ ID NO: 77855 - RNA, 19 nt, Human
aguccaggaguucaagacc

SEQ ID NO: 77856 - RNA, 22 nt, Human
aucccagcacuuugggaggcca

SEQ ID NO: 77857 - RNA, 21 nt, Human
augcuuuuuuaauucuaaaaa

SEQ ID NO: 77858 - RNA, 20 nt, Human
caaaaagaggcuguuuacau

SEQ ID NO: 77859 - RNA, 26 nt, Human
caaaccgagaucuuagguggcucaca

SEQ ID NO: 77860 - RNA, 19 nt, Human
caaaugcacugaggaaaaa

SEQ ID NO: 77861 - RNA, 23 nt, Human
caaauguaaacaaaugauuacag

SEQ ID NO: 77862 - RNA, 19 nt, Human
caaauuacauguaauaacu

SEQ ID NO: 77863 - RNA, 24 nt, Human
caacaaaaagacaaaucuggcuaa

SEQ ID NO: 77864 - RNA, 18 nt, Human
cacggcgaggcgcguccc

SEQ ID NO: 77865 - RNA, 23 nt, Human
cacuccagccugggcgauagagc

SEQ ID NO: 77866 - RNA, 19 nt, Human
cacugcacuccagccuggg

SEQ ID NO: 77867 - RNA, 21 nt, Human
cacugcacuccagccugggcg

SEQ ID NO: 77868 - RNA, 22 nt, Human
cacugcacuccagccugggcga

SEQ ID NO: 77869 - RNA, 23 nt, Human
cacugcacuccagccugggcgau

SEQ ID NO: 77870 - RNA, 24 nt, Human
cacugcacuccagccugggcgaua

SEQ ID NO: 77871 - RNA, 27 nt, Human
cacugcacuccagccugggcgauagag

SEQ ID NO: 77872 - RNA, 22 nt, Human
cagaauugucacacacaccaaa

SEQ ID NO: 77873 - RNA, 20 nt, Human
cagcacuuugggaggccacg

SEQ ID NO: 77874 - RNA, 25 nt, Human
cagcacuuugggaggccacgcuggg

SEQ ID NO: 77875 - RNA, 25 nt, Human
caguaucaaaaagaggcuguuuaca

SEQ ID NO: 77876 - RNA, 22 nt, Human
cauuaaaaacagaauugucaca

SEQ ID NO: 77877 - RNA, 30 nt, Human
cauuuuuugucaucauuaaaaauuaaaagg

SEQ ID NO: 77878 - RNA, 20 nt, Human
ccacugcacuccagccuggg

SEQ ID NO: 77879 - RNA, 20 nt, Human
ccacugcacuccagccuggg

SEQ ID NO: 77880 - RNA, 21 nt, Human
ccacugcacuccagccugggc

SEQ ID NO: 77881 - RNA, 21 nt, Human
ccacugcacuccagccugggc

SEQ ID NO: 77882 - RNA, 21 nt, Human
ccacugcacuccagccugggc

SEQ ID NO: 77883 - RNA, 22 nt, Human
ccacugcacuccagccugggcg

SEQ ID NO: 77884 - RNA, 23 nt, Human
ccacugcacuccagccugggcga

SEQ ID NO: 77885 - RNA, 23 nt, Human
ccacugcacuccagccugggcga

SEQ ID NO: 77886 - RNA, 18 nt, Human
cccuggcugggggcuucg

SEQ ID NO: 77887 - RNA, 20 nt, Human
ccgcgggccgauccuguucc

SEQ ID NO: 77888 - RNA, 22 nt, Human
ccgcgggccgauccuguucccg

SEQ ID NO: 77889 - RNA, 18 nt, Human
ccuauacgacaauggagu

SEQ ID NO: 77890 - RNA, 22 nt, Human
ccugagaaguguggaugaaaag

SEQ ID NO: 77891 - RNA, 19 nt, Human
cgacaauggaguggaaaag

SEQ ID NO: 77892 - RNA, 19 nt, Human
cgagaguagauaaaaauga

SEQ ID NO: 77893 - RNA, 22 nt, Human
cgggaaagcaaaaaaaaaaaaa

SEQ ID NO: 77894 - RNA, 23 nt, Human
cgggaaagcaaaaaaaaaaaaaa

SEQ ID NO: 77895 - RNA, 24 nt, Human
cgugucuguaaucccagcacuuug

SEQ ID NO: 77896 - RNA, 19 nt, Human
cuagcacaaaugcacugag

SEQ ID NO: 77897 - RNA, 18 nt, Human
cucaaaaaaaaaaaaaag

SEQ ID NO: 77898 - RNA, 26 nt, Human
cucaaaaaaaaaaaaaagaaaaaagg

SEQ ID NO: 77899 - RNA, 24 nt, Human
cucgugucuguaaucccagcacuu

SEQ ID NO: 77900 - RNA, 26 nt, Human
cugaaaauuugcugcugaaugacugg

SEQ ID NO: 77901 - RNA, 21 nt, Human
cuguaaucccagcacuuuggg

SEQ ID NO: 77902 - RNA, 21 nt, Human
cugucucaaaaaaaaaaaaaa

SEQ ID NO: 77903 - RNA, 22 nt, Human
cugucucaaaaaaaaaaaaaag

SEQ ID NO: 77904 - RNA, 19 nt, Human
cuuccggccccgccucuga

SEQ ID NO: 77905 - RNA, 22 nt, Human
gaagaaggagaggaggcggagc

SEQ ID NO: 77906 - RNA, 21 nt, Human
gacaauggaguggaaaagaga

SEQ ID NO: 77907 - RNA, 18 nt, Human
gaccggagccuuucgggu

SEQ ID NO: 77908 - RNA, 27 nt, Human
gagcaagacugucucaaaaaaaaaaaa

SEQ ID NO: 77909 - RNA, 18 nt, Human
gagcgggucgggagaaag

SEQ ID NO: 77910 - RNA, 19 nt, Human
gagcucgggcugcgccgcc

SEQ ID NO: 77911 - RNA, 23 nt, Human
gauagagcaagacugucucaaaa

SEQ ID NO: 77912 - RNA, 24 nt, Human
gcaaaacaccgucucuacaaaaau

SEQ ID NO: 77913 - RNA, 22 nt, Human
gcaaaauuuccauuucuauguu

SEQ ID NO: 77914 - RNA, 24 nt, Human
gcacuccagccugggcgauagagc

SEQ ID NO: 77915 - RNA, 21 nt, Human
gcaggcaccgccccacggcga

SEQ ID NO: 77916 - RNA, 22 nt, Human
gccacugcacuccagccugggc

SEQ ID NO: 77917 - RNA, 24 nt, Human
gccacugcacuccagccugggcga

SEQ ID NO: 77918 - RNA, 23 nt, Human
gcccacagcgggcguuuccucaa

SEQ ID NO: 77919 - RNA, 19 nt, Human
gcccacuuguucaaauagc

SEQ ID NO: 77920 - RNA, 21 nt, Human
gcgcuucuuccggguccggga

SEQ ID NO: 77921 - RNA, 22 nt, Human
gcugcgccgccccgcccuggcu

SEQ ID NO: 77922 - RNA, 22 nt, Human
gcuugaguccaggaguucaaga

SEQ ID NO: 77923 - RNA, 22 nt, Human
ggaaacagauaaaauuguaauu

SEQ ID NO: 77924 - RNA, 24 nt, Human
ggagccuuucggguggcuccgccc

SEQ ID NO: 77925 - RNA, 18 nt, Human
ggcucaggcgcaggcacc

SEQ ID NO: 77926 - RNA, 19 nt, Human
gggaaagcaaaaaaaaaaa

SEQ ID NO: 77927 - RNA, 18 nt, Human
gggaacagagggacucgg

SEQ ID NO: 77928 - RNA, 24 nt, Human
gggccgauccuguucccgcccccg

SEQ ID NO: 77929 - RNA, 23 nt, Human
gguggcucgugucuguaauccca

SEQ ID NO: 77930 - RNA, 24 nt, Human
gguggcucgugucuguaaucccag

SEQ ID NO: 77931 - RNA, 24 nt, Human
gguugcuugaguccaggaguucaa

SEQ ID NO: 77932 - RNA, 20 nt, Human
gucucaaaaaaaaaaaaaag

SEQ ID NO: 77933 - RNA, 19 nt, Human
gugucuguaaucccagcac

SEQ ID NO: 77934 - RNA, 22 nt, Human
guugcagugagccuagaaugcg

SEQ ID NO: 77935 - RNA, 24 nt, Human
guugcuugaguccaggaguucaag

SEQ ID NO: 77936 - RNA, 23 nt, Human
uaaaaaaguacugaaagaccuua

SEQ ID NO: 77937 - RNA, 24 nt, Human
uaagaaacgggaaagcaaaaaaaa

SEQ ID NO: 77938 - RNA, 28 nt, Human
uaagaaacgggaaagcaaaaaaaaaaaa

SEQ ID NO: 77939 - RNA, 22 nt, Human
uacagguagagcccugggccca

SEQ ID NO: 77940 - RNA, 21 nt, Human
uacgacaauggaguggaaaag

SEQ ID NO: 77941 - RNA, 20 nt, Human
uagaaugcgccacugcacuc

SEQ ID NO: 77942 - RNA, 20 nt, Human
uagcacaaaugcacugagga

SEQ ID NO: 77943 - RNA, 24 nt, Human
uagcauuaaaaacagaauugucac

SEQ ID NO: 77944 - RNA, 24 nt, Human
uagguugcuugaguccaggaguuc

SEQ ID NO: 77945 - RNA, 22 nt, Human
uaguaagggucuauucucaaau

SEQ ID NO: 77946 - RNA, 27 nt, Human
uauuucaacuguacauugguccucauu

SEQ ID NO: 77947 - RNA, 21 nt, Human
ucacguaagcaugggaggcag

SEQ ID NO: 77948 - RNA, 23 nt, Human
ucaggcgcaggcaccgccccacg

SEQ ID NO: 77949 - RNA, 24 nt, Human
uccagccugggcgauagagcaaga

SEQ ID NO: 77950 - RNA, 19 nt, Human
ucccuuagcagagcccgcc

SEQ ID NO: 77951 - RNA, 21 nt, Human
ucgggagaaagacggccgccc

SEQ ID NO: 77952 - RNA, 22 nt, Human
ucgugucuguaaucccagcacu

SEQ ID NO: 77953 - RNA, 21 nt, Human
ugaaagaccuuaaaaaggaaa

SEQ ID NO: 77954 - RNA, 21 nt, Human
ugaacaggaacagcuuaaugc

SEQ ID NO: 77955 - RNA, 21 nt, Human
ugacaggaggaccaaggagaa

SEQ ID NO: 77956 - RNA, 24 nt, Human
ugagagcauaagauuuauaaacau

SEQ ID NO: 77957 - RNA, 24 nt, Human
ugagaggcugaggugagaggauca

SEQ ID NO: 77958 - RNA, 20 nt, Human
ugaggugagaggaucacgua

SEQ ID NO: 77959 - RNA, 24 nt, Human
uggcucgugucuguaaucccagca

SEQ ID NO: 77960 - RNA, 24 nt, Human
ugggaggcagaaguugcagugagc

SEQ ID NO: 77961 - RNA, 23 nt, Human
ugguggcacacacuuguagucuc

SEQ ID NO: 77962 - RNA, 19 nt, Human
uguaaaauuagucaaauuu

SEQ ID NO: 77963 - RNA, 23 nt, Human
ugucuguaaucccagcacuuugg

SEQ ID NO: 77964 - RNA, 23 nt, Human
ugucuguaaucccagcacuuugg

SEQ ID NO: 77965 - RNA, 24 nt, Human
uuaaaagacaugcaucaaauguaa

SEQ ID NO: 77966 - RNA, 20 nt, Human
uuccucaagccacgccugcc

SEQ ID NO: 77967 - RNA, 25 nt, Human
uugagaggcugaggugagaggauca

SEQ ID NO: 77968 - RNA, 22 nt, Human
uugaguccaggaguucaagacc

SEQ ID NO: 77969 - RNA, 20 nt, Human
uuugcaauuaauaauagaaa

SEQ ID NO: 77970 - RNA, 27 nt, Human
uuuuuuuuuuuuuuuuuuuuacuuuaa

SEQ ID NO: 77971 - RNA, 26 nt, Human
aaaaaaacaggugugcuggugacaag

SEQ ID NO: 77972 - RNA, 22 nt, Human
aaaaaaauccuugcacuguaga

SEQ ID NO: 77973 - RNA, 18 nt, Human
aaaaaagaaaaagaaaaa

SEQ ID NO: 77974 - RNA, 18 nt, Human
aaaaagaaaaaagaaaaa

SEQ ID NO: 77975 - RNA, 24 nt, Human
aaaaagccagguuguaaugaccuu

SEQ ID NO: 77976 - RNA, 22 nt, Human
aaaaagguacauugauaccuuu

SEQ ID NO: 77977 - RNA, 24 nt, Human
aaaagaaaaaagaaaaagaaaaag

SEQ ID NO: 77978 - RNA, 23 nt, Human
aaaagaaaaagaaaaagaaaaaa

SEQ ID NO: 77979 - RNA, 20 nt, Human
aaaagacaacauagaaugua

SEQ ID NO: 77980 - RNA, 21 nt, Human
aaaagacaacauagaauguau

SEQ ID NO: 77981 - RNA, 25 nt, Human
aaaagaccauaaauguauuuuagca

SEQ ID NO: 77982 - RNA, 23 nt, Human
aaaagccagguuguaaugaccuu

SEQ ID NO: 77983 - RNA, 24 nt, Human
aaacaaauacaauaaaaagccagg

SEQ ID NO: 77984 - RNA, 18 nt, Human
aaacagguacagaaguac

SEQ ID NO: 77985 - RNA, 20 nt, Human
aaagaacaagcaaacaccac

SEQ ID NO: 77986 - RNA, 19 nt, Human
aaagaacaagcaaacaccc

SEQ ID NO: 77987 - RNA, 21 nt, Human
aaagauggcgcagggaagaug

SEQ ID NO: 77988 - RNA, 28 nt, Human
aaauaaaaaaaaaaauaaaaacaaagaa

SEQ ID NO: 77989 - RNA, 22 nt, Human
aacaaguagaaagaaccaucga

SEQ ID NO: 77990 - RNA, 22 nt, Human
aacugccaaaaaaacacagaca

SEQ ID NO: 77991 - RNA, 19 nt, Human
aagaaggagacuccagaga

SEQ ID NO: 77992 - RNA, 23 nt, Human
aagcaaacaccaccuaaagcucc

SEQ ID NO: 77993 - RNA, 21 nt, Human
aagcauuaaaaauuaaagaac

SEQ ID NO: 77994 - RNA, 26 nt, Human
aagcgggcuuucucuuuaauaugcuu

SEQ ID NO: 77995 - RNA, 20 nt, Human
aaggacucugcaggacucug

SEQ ID NO: 77996 - RNA, 22 nt, Human
aaggggaguggugaaaaagggg

SEQ ID NO: 77997 - RNA, 24 nt, Human
acaaaaaaggauauguacaacccc

SEQ ID NO: 77998 - RNA, 22 nt, Human
acaagcaaacaccaccuaaagc

SEQ ID NO: 77999 - RNA, 18 nt, Human
acaccaccuaaagcucca

SEQ ID NO: 78000 - RNA, 20 nt, Human
acacuacauaacaaaccaac

SEQ ID NO: 78001 - RNA, 19 nt, Human
acagaaaaaagaccauaaa

SEQ ID NO: 78002 - RNA, 18 nt, Human
accuaaagcuccaacauu

SEQ ID NO: 78003 - RNA, 20 nt, Human
agaaaaaaauccuacaggga

SEQ ID NO: 78004 - RNA, 20 nt, Human
agaaaaaagaccauaaaugu

SEQ ID NO: 78005 - RNA, 18 nt, Human
agaaaaagaaaaaaaaca

SEQ ID NO: 78006 - RNA, 19 nt, Human
agaaaaagaaaaaaaacag

SEQ ID NO: 78007 - RNA, 21 nt, Human
agaaaaagaaaaagaaaaaaa

SEQ ID NO: 78008 - RNA, 19 nt, Human
agaaauaauacaaagaugg

SEQ ID NO: 78009 - RNA, 20 nt, Human
agaaauaauacaaagauggc

SEQ ID NO: 78010 - RNA, 24 nt, Human
agaacuuaacaaagaccagaaaca

SEQ ID NO: 78011 - RNA, 19 nt, Human
agaaggaaagggacaaaaa

SEQ ID NO: 78012 - RNA, 22 nt, Human
agacauauauacugcuacucuu

SEQ ID NO: 78013 - RNA, 18 nt, Human
agaccacgcugacgucga

SEQ ID NO: 78014 - RNA, 24 nt, Human
agcacacuacauaacaaaccaacg

SEQ ID NO: 78015 - RNA, 19 nt, Human
agcauggucuuuuucucuc

SEQ ID NO: 78016 - RNA, 23 nt, Human
agccagaagguggauagguagga

SEQ ID NO: 78017 - RNA, 25 nt, Human
aggaaaaaaaaaaaaaaggaaaaag

SEQ ID NO: 78018 - RNA, 22 nt, Human
aggaaaaagaaaaaagaaaaag

SEQ ID NO: 78019 - RNA, 19 nt, Human
aggacauaaugggucaucu

SEQ ID NO: 78020 - RNA, 23 nt, Human
aggcucccccaaaccgccauuau

SEQ ID NO: 78021 - RNA, 24 nt, Human
agggaagaugaauugugggagagc

SEQ ID NO: 78022 - RNA, 25 nt, Human
agggacaaaauggguguaugaacag

SEQ ID NO: 78023 - RNA, 18 nt, Human
agggaguggggcuggagg

SEQ ID NO: 78024 - RNA, 21 nt, Human
aggggaguggugaaaaagggg

SEQ ID NO: 78025 - RNA, 30 nt, Human
auaagcauuaaaaauuaaagaacaagcaag

SEQ ID NO: 78026 - RNA, 22 nt, Human
auagagcauugcugugauuguc

SEQ ID NO: 78027 - RNA, 20 nt, Human
auccaaaauaaauuagaaau

SEQ ID NO: 78028 - RNA, 21 nt, Human
augauauguauuacagaaugu

SEQ ID NO: 78029 - RNA, 24 nt, Human
auguuguuucuaauucucuucugg

SEQ ID NO: 78030 - RNA, 23 nt, Human
auugcuaugauuuauucccaagu

SEQ ID NO: 78031 - RNA, 22 nt, Human
auuugcuauguuguuucuaauu

SEQ ID NO: 78032 - RNA, 25 nt, Human
caaacugagaaaaguucugugcaaa

SEQ ID NO: 78033 - RNA, 20 nt, Human
caaagaccagaaacaaauac

SEQ ID NO: 78034 - RNA, 23 nt, Human
caaauagcacacaguguauggaa

SEQ ID NO: 78035 - RNA, 23 nt, Human
caaauuaaaaaaauauacugugg

SEQ ID NO: 78036 - RNA, 23 nt, Human
caacaguuaaaaauacaagcuuc

SEQ ID NO: 78037 - RNA, 24 nt, Human
caagcaaacaccaccuaaagcucc

SEQ ID NO: 78038 - RNA, 25 nt, Human
caagcaaacaccaccuaaagcuccu

SEQ ID NO: 78039 - RNA, 24 nt, Human
cacccaaugcugaauuaagcuaca

SEQ ID NO: 78040 - RNA, 22 nt, Human
cagacaacugccaaaaaaacac

SEQ ID NO: 78041 - RNA, 22 nt, Human
cagaccacgcugacgucgacug

SEQ ID NO: 78042 - RNA, 25 nt, Human
cagagucaagugcuauuugaacacc

SEQ ID NO: 78043 - RNA, 18 nt, Human
cagcaggaaaaaggaaca

SEQ ID NO: 78044 - RNA, 19 nt, Human
cagcauggucuuuuucucu

SEQ ID NO: 78045 - RNA, 22 nt, Human
cagcauuaauaaacagcaauau

SEQ ID NO: 78046 - RNA, 21 nt, Human
cauccaaaauaaauuagaaau

SEQ ID NO: 78047 - RNA, 21 nt, Human
caugugacauucuagcaggcu

SEQ ID NO: 78048 - RNA, 19 nt, Human
ccaagcaguaaaaaauacc

SEQ ID NO: 78049 - RNA, 21 nt, Human
ccagaaagaauuuuuaccacc

SEQ ID NO: 78050 - RNA, 21 nt, Human
ccccacuuagguucacggccu

SEQ ID NO: 78051 - RNA, 25 nt, Human
cccccaaaccgccauuauauggcuu

SEQ ID NO: 78052 - RNA, 20 nt, Human
cccccucuaaaaucugcccc

SEQ ID NO: 78053 - RNA, 20 nt, Human
cccccucuaaaaucugcccc

SEQ ID NO: 78054 - RNA, 26 nt, Human
ccuaaaaugcaguuccccccuaaaca

SEQ ID NO: 78055 - RNA, 23 nt, Human
ccuaagcuaaauuaaaagacaaa

SEQ ID NO: 78056 - RNA, 25 nt, Human
ccuccuauaauuuccccccucuaaa

SEQ ID NO: 78057 - RNA, 22 nt, Human
ccucuaaaaucugccccaaauu

SEQ ID NO: 78058 - RNA, 21 nt, Human
cgacaaacagcuuucauuaca

SEQ ID NO: 78059 - RNA, 20 nt, Human
cgggcggcggcggcggcggc

SEQ ID NO: 78060 - RNA, 23 nt, Human
cuaacacuagaugaacauuuaau

SEQ ID NO: 78061 - RNA, 22 nt, Human
cuaagcuaaauuaaaagacaaa

SEQ ID NO: 78062 - RNA, 23 nt, Human
cuaguuccccuccuacaucuccu

SEQ ID NO: 78063 - RNA, 23 nt, Human
cuccuacaucuccugcccauuuc

SEQ ID NO: 78064 - RNA, 21 nt, Human
cuuuagagacagacauuuagc

SEQ ID NO: 78065 - RNA, 22 nt, Human
cuuuuuuuuuuccacuaccaaa

SEQ ID NO: 78066 - RNA, 22 nt, Human
gaacaagcaaacaccaccuaaa

SEQ ID NO: 78067 - RNA, 24 nt, Human
gaagagcgguguguauccaaggca

SEQ ID NO: 78068 - RNA, 18 nt, Human
gaaggggaguggugaaaa

SEQ ID NO: 78069 - RNA, 24 nt, Human
gaauccucuuccauguuaacacaa

SEQ ID NO: 78070 - RNA, 21 nt, Human
gacaagcacucucauauucuu

SEQ ID NO: 78071 - RNA, 24 nt, Human
gacaguuaggaaaaccacacuuca

SEQ ID NO: 78072 - RNA, 24 nt, Human
gacauccaaaauaaauuagaaaua

SEQ ID NO: 78073 - RNA, 18 nt, Human
gcaaaaaaaaaaaaaaaa

SEQ ID NO: 78074 - RNA, 19 nt, Human
gcaauaguauugccccaua

SEQ ID NO: 78075 - RNA, 23 nt, Human
gcaguaaaaaauaccaaacugag

SEQ ID NO: 78076 - RNA, 22 nt, Human
gccagaaagaauuuuuaccacc

SEQ ID NO: 78077 - RNA, 23 nt, Human
gccauaacauaccauacaugcug

SEQ ID NO: 78078 - RNA, 19 nt, Human
gccuaggcuggaaggacuc

SEQ ID NO: 78079 - RNA, 20 nt, Human
gcggcggcggcggcggcggc

SEQ ID NO: 78080 - RNA, 20 nt, Human
gcggcggcggcggcggcggc

SEQ ID NO: 78081 - RNA, 20 nt, Human
gcggcggcggcggcggcggc

SEQ ID NO: 78082 - RNA, 20 nt, Human
gcggcggcggcggcggcggc

SEQ ID NO: 78083 - RNA, 23 nt, Human
gcggcggcggcggcggcggcggc

SEQ ID NO: 78084 - RNA, 23 nt, Human
gcggcggcggcggcggcggcggc

SEQ ID NO: 78085 - RNA, 24 nt, Human
gcggcggcggcggcggcggcggcg

SEQ ID NO: 78086 - RNA, 24 nt, Human
gcggcggcggcggcggcggcggcg

SEQ ID NO: 78087 - RNA, 21 nt, Human
gcggcggcggcggcggcgggc

SEQ ID NO: 78088 - RNA, 18 nt, Human
gcuaucuuuucacuaagc

SEQ ID NO: 78089 - RNA, 21 nt, Human
ggaaggggaguggugaaaaag

SEQ ID NO: 78090 - RNA, 20 nt, Human
ggacugauucacuguuccaa

SEQ ID NO: 78091 - RNA, 23 nt, Human
ggcggcggcggcggcggcggcgg

SEQ ID NO: 78092 - RNA, 23 nt, Human
ggcggcggcggcggcggcggcgg

SEQ ID NO: 78093 - RNA, 25 nt, Human
ggcgggcggcggcggcggcggcggg

SEQ ID NO: 78094 - RNA, 24 nt, Human
gggaaggggaguggugaaaaaggg

SEQ ID NO: 78095 - RNA, 19 nt, Human
gggcgauggggaaggggag

SEQ ID NO: 78096 - RNA, 19 nt, Human
gggcggcggcggcggcggc

SEQ ID NO: 78097 - RNA, 24 nt, Human
gggcggcggcggcggcggcggcgg

SEQ ID NO: 78098 - RNA, 18 nt, Human
ggggaguggugaaaaagg

SEQ ID NO: 78099 - RNA, 21 nt, Human
gggugucaggugggagugagg

SEQ ID NO: 78100 - RNA, 23 nt, Human
guaaaaugcaauaguauugcccc

SEQ ID NO: 78101 - RNA, 21 nt, Human
guaaauuauugcacaagagaa

SEQ ID NO: 78102 - RNA, 24 nt, Human
guaugaacagguuaaugcagacaa

SEQ ID NO: 78103 - RNA, 24 nt, Human
guauggcagcaggaaaaaggaaca

SEQ ID NO: 78104 - RNA, 18 nt, Human
gucaaguaaauggcuggc

SEQ ID NO: 78105 - RNA, 22 nt, Human
guccaccccaccccugggggcu

SEQ ID NO: 78106 - RNA, 23 nt, Human
gugacaagcacucucauauucuu

SEQ ID NO: 78107 - RNA, 22 nt, Human
gugcuauuugaacaccaacugg

SEQ ID NO: 78108 - RNA, 21 nt, Human
guuccaaugugggucuguuuu

SEQ ID NO: 78109 - RNA, 20 nt, Human
uaaaagacaaauucaaaucc

SEQ ID NO: 78110 - RNA, 24 nt, Human
uaaaaugcaguuccccccuaaaca

SEQ ID NO: 78111 - RNA, 21 nt, Human
uaaagaacaagcaaacaccac

SEQ ID NO: 78112 - RNA, 22 nt, Human
uaaagaacaagcaaacaccacc

SEQ ID NO: 78113 - RNA, 25 nt, Human
uaaagaacaagcaaacaccaccuaa

SEQ ID NO: 78114 - RNA, 24 nt, Human
uaaagcaaauaucuucauaaaaug

SEQ ID NO: 78115 - RNA, 21 nt, Human
uaacaaaccaacguuauuagc

SEQ ID NO: 78116 - RNA, 22 nt, Human
uaacaagucuuguaacaccacc

SEQ ID NO: 78117 - RNA, 23 nt, Human
uaacaagucuuguaacaccacca

SEQ ID NO: 78118 - RNA, 20 nt, Human
uaagaugcuggaauguaggg

SEQ ID NO: 78119 - RNA, 21 nt, Human
uaauaagaaacuacugacauu

SEQ ID NO: 78120 - RNA, 19 nt, Human
uaaucuuaaaccuuucccc

SEQ ID NO: 78121 - RNA, 22 nt, Human
uaaugguaugcaaauuauaagu

SEQ ID NO: 78122 - RNA, 24 nt, Human
uacaaaaaaguauugacuaaagcg

SEQ ID NO: 78123 - RNA, 21 nt, Human
uacagcacacaggugucugag

SEQ ID NO: 78124 - RNA, 22 nt, Human
uacagcacacaggugucugagg

SEQ ID NO: 78125 - RNA, 20 nt, Human
uaccaaaaaagguacauuga

SEQ ID NO: 78126 - RNA, 21 nt, Human
uacuaaagaaguuuuauguuu

SEQ ID NO: 78127 - RNA, 24 nt, Human
uagaaagaaggagacuccagagaa

SEQ ID NO: 78128 - RNA, 21 nt, Human
uagaaauaauacaaagauggc

SEQ ID NO: 78129 - RNA, 18 nt, Human
uagaagcgaaagcaauca

SEQ ID NO: 78130 - RNA, 24 nt, Human
uagaccuguaaacugggaaaauug

SEQ ID NO: 78131 - RNA, 18 nt, Human
uagcacacaguguaugga

SEQ ID NO: 78132 - RNA, 23 nt, Human
uagcacacaguguauggaaaaga

SEQ ID NO: 78133 - RNA, 22 nt, Human
uagcaggaugacagaccacgcu

SEQ ID NO: 78134 - RNA, 19 nt, Human
uagcaggcucccccaaacc

SEQ ID NO: 78135 - RNA, 20 nt, Human
uagccauaacauaccauaca

SEQ ID NO: 78136 - RNA, 22 nt, Human
uauaaaauaaaacuguacauga

SEQ ID NO: 78137 - RNA, 21 nt, Human
uauaaauaaaauggcgcugca

SEQ ID NO: 78138 - RNA, 21 nt, Human
uauggaaaagaaaugaaguac

SEQ ID NO: 78139 - RNA, 20 nt, Human
uauuacagaauguaugcagc

SEQ ID NO: 78140 - RNA, 19 nt, Human
ucaaugagauuguguucaa

SEQ ID NO: 78141 - RNA, 22 nt, Human
ucaauuuuuuuucagcauucuu

SEQ ID NO: 78142 - RNA, 23 nt, Human
ucaauuuuuuuucagcauucuug

SEQ ID NO: 78143 - RNA, 22 nt, Human
ucacaggcagagucaagugcua

SEQ ID NO: 78144 - RNA, 24 nt, Human
ucagcauuaauaaacagcaauauu

SEQ ID NO: 78145 - RNA, 25 nt, Human
ucagcauuaauaaacagcaauauua

SEQ ID NO: 78146 - RNA, 24 nt, Human
ucagccucuuccuuucaauauggu

SEQ ID NO: 78147 - RNA, 21 nt, Human
uccaccccaccccugggggcu

SEQ ID NO: 78148 - RNA, 18 nt, Human
uccacuaccaaaaaaggu

SEQ ID NO: 78149 - RNA, 18 nt, Human
uccuacagggaguggggc

SEQ ID NO: 78150 - RNA, 21 nt, Human
ucuaaaaucugccccaaauuu

SEQ ID NO: 78151 - RNA, 24 nt, Human
ucuccaagcaguaaaaaauaccaa

SEQ ID NO: 78152 - RNA, 20 nt, Human
ucuccugcccauuucucaaa

SEQ ID NO: 78153 - RNA, 18 nt, Human
ucuucauaaaaugaacuc

SEQ ID NO: 78154 - RNA, 25 nt, Human
ucuucuggaucuccaagcaguaaaa

SEQ ID NO: 78155 - RNA, 18 nt, Human
ugaaaaacaggauucggc

SEQ ID NO: 78156 - RNA, 20 nt, Human
ugaaaaacaggauucggcgu

SEQ ID NO: 78157 - RNA, 24 nt, Human
ugaaucuacagcacacaggugucu

SEQ ID NO: 78158 - RNA, 21 nt, Human
ugacaagcacucucauauucu

SEQ ID NO: 78159 - RNA, 18 nt, Human
ugagaaauacaauauaga

SEQ ID NO: 78160 - RNA, 21 nt, Human
ugauaagcgguaaccuaguuc

SEQ ID NO: 78161 - RNA, 24 nt, Human
ugauagaauaaacuuguucuguuu

SEQ ID NO: 78162 - RNA, 19 nt, Human
ugauauguauuacagaaug

SEQ ID NO: 78163 - RNA, 19 nt, Human
ugccucuguuuugaacagg

SEQ ID NO: 78164 - RNA, 21 nt, Human
uggaauguagggugauagaag

SEQ ID NO: 78165 - RNA, 22 nt, Human
uggaucuauuucuuuuggugcc

SEQ ID NO: 78166 - RNA, 23 nt, Human
uggcagcaggaaaaaggaacaaa

SEQ ID NO: 78167 - RNA, 19 nt, Human
ugggacuagaaaaaaaucc

SEQ ID NO: 78168 - RNA, 22 nt, Human
ugggacuagaaaaaaauccuac

SEQ ID NO: 78169 - RNA, 18 nt, Human
ugugguuuuaauagaucc

SEQ ID NO: 78170 - RNA, 20 nt, Human
ugugguuuuaauagauccaa

SEQ ID NO: 78171 - RNA, 18 nt, Human
uguuccaaugugggucug

SEQ ID NO: 78172 - RNA, 24 nt, Human
uuaacacaaauagcacacagugua

SEQ ID NO: 78173 - RNA, 19 nt, Human
uuaauaaacagcaauauua

SEQ ID NO: 78174 - RNA, 22 nt, Human
uuacuaguguauuuaauugcgu

SEQ ID NO: 78175 - RNA, 19 nt, Human
uuagagacagacauuuagc

SEQ ID NO: 78176 - RNA, 22 nt, Human
uuccuaagcuaaauuaaaagac

SEQ ID NO: 78177 - RNA, 20 nt, Human
uugcuauguuguuucuaauu

SEQ ID NO: 78178 - RNA, 21 nt, Human
uugcugugauugucuguucug

SEQ ID NO: 78179 - RNA, 20 nt, Human
uugucuuauaagcauuaaaa

SEQ ID NO: 78180 - RNA, 19 nt, Human
uuuaccaccuguuuguaga

SEQ ID NO: 78181 - RNA, 19 nt, Human
uuuagagacagacauuuag

SEQ ID NO: 78182 - RNA, 21 nt, Human
uuucagaagggccagggcauc

SEQ ID NO: 78183 - RNA, 24 nt, Human
uuuccccacuuagguucacggccu

SEQ ID NO: 78184 - RNA, 24 nt, Human
uuucuuuuggugccaguauuuuua

SEQ ID NO: 78185 - RNA, 19 nt, Human
uuuuuuccuuuuuuuuucu

SEQ ID NO: 78186 - RNA, 19 nt, Human
uuuuuuccuuuuuuuuucu

SEQ ID NO: 78187 - RNA, 22 nt, Human
aaaaaaaaaauaaaaaccuggg

SEQ ID NO: 78188 - RNA, 21 nt, Human
aaaaaaacaaagaagggaugg

SEQ ID NO: 78189 - RNA, 22 nt, Human
aaaaagaaaaaaaagggaagaa

SEQ ID NO: 78190 - RNA, 24 nt, Human
aaaaagaaaaaaaagggaagaaaa

SEQ ID NO: 78191 - RNA, 28 nt, Human
aaaaagaaaaaaaagggaagaaaagcaa

SEQ ID NO: 78192 - RNA, 23 nt, Human
aaaaaggcagaaaguuguaucua

SEQ ID NO: 78193 - RNA, 27 nt, Human
aaaacaaaaaccaaaaaaaaaauuaaa

SEQ ID NO: 78194 - RNA, 26 nt, Human
aaaagaaaaaaaagggaagaaaagca

SEQ ID NO: 78195 - RNA, 23 nt, Human
aaaaguaccugcacaugccaaaa

SEQ ID NO: 78196 - RNA, 21 nt, Human
aaagcagcaaagcagggaaga

SEQ ID NO: 78197 - RNA, 18 nt, Human
aaaguaccugcacaugcc

SEQ ID NO: 78198 - RNA, 19 nt, Human
aaaguaccugcacaugccc

SEQ ID NO: 78199 - RNA, 21 nt, Human
aaauuuuacugcaacauuuuc

SEQ ID NO: 78200 - RNA, 23 nt, Human
aacaaacuugguuuugaacaagc

SEQ ID NO: 78201 - RNA, 25 nt, Human
aacaagaacaaauuuauagacccac

SEQ ID NO: 78202 - RNA, 23 nt, Human
aagaaaaaaaaaggaccaaugga

SEQ ID NO: 78203 - RNA, 21 nt, Human
aagaaaaaaaagggaagaaaa

SEQ ID NO: 78204 - RNA, 23 nt, Human
aagcagcaccaccccucccccca

SEQ ID NO: 78205 - RNA, 22 nt, Human
aagcagcguugucccaaaaaca

SEQ ID NO: 78206 - RNA, 21 nt, Human
aaggaacaauaaauauuuuac

SEQ ID NO: 78207 - RNA, 18 nt, Human
aaggguauuuuuuuucuu

SEQ ID NO: 78208 - RNA, 22 nt, Human
aagguaauaaaaauauuuugcc

SEQ ID NO: 78209 - RNA, 21 nt, Human
aauaaguaauagaaaagguaa

SEQ ID NO: 78210 - RNA, 20 nt, Human
acaaaacagaagcaaaauuc

SEQ ID NO: 78211 - RNA, 19 nt, Human
acaaaaccuccaaguaaac

SEQ ID NO: 78212 - RNA, 22 nt, Human
acaauaaauauuuuacuaagcc

SEQ ID NO: 78213 - RNA, 21 nt, Human
acaccccccaccccaaaaaca

SEQ ID NO: 78214 - RNA, 20 nt, Human
accaauauauccauuccaga

SEQ ID NO: 78215 - RNA, 27 nt, Human
accccaaaaacaaaaaccaaaaaaaaa

SEQ ID NO: 78216 - RNA, 20 nt, Human
accccagggcacaccaacag

SEQ ID NO: 78217 - RNA, 26 nt, Human
acccucuaaugccaaguggcagguuc

SEQ ID NO: 78218 - RNA, 22 nt, Human
acgcggggugcgggguggcggu

SEQ ID NO: 78219 - RNA, 22 nt, Human
agaaaaauaaguacaggucaga

SEQ ID NO: 78220 - RNA, 20 nt, Human
agaauauaaacuccaaaaag

SEQ ID NO: 78221 - RNA, 23 nt, Human
agaaugcugucgggccauuuccc

SEQ ID NO: 78222 - RNA, 21 nt, Human
agagagaagcccaacacgaac

SEQ ID NO: 78223 - RNA, 21 nt, Human
agcagcaccaccccucccccc

SEQ ID NO: 78224 - RNA, 24 nt, Human
aggaacaauaaauauuuuacuaag

SEQ ID NO: 78225 - RNA, 22 nt, Human
aggccaacacucuccauggcac

SEQ ID NO: 78226 - RNA, 24 nt, Human
aggccaccccaucuccccaaaaag

SEQ ID NO: 78227 - RNA, 18 nt, Human
aggcugauuuccuuacuu

SEQ ID NO: 78228 - RNA, 25 nt, Human
aggucagcauucucucgguuggcaa

SEQ ID NO: 78229 - RNA, 21 nt, Human
agguuagguuggagugccgcc

SEQ ID NO: 78230 - RNA, 24 nt, Human
aguaaacaacaaaagcucauacaa

SEQ ID NO: 78231 - RNA, 23 nt, Human
aguguuggcuucuucacaagaaa

SEQ ID NO: 78232 - RNA, 24 nt, Human
auaaaaaaugaaagaaaaaaaaaa

SEQ ID NO: 78233 - RNA, 23 nt, Human
auaauaauaaaaaguaccugcac

SEQ ID NO: 78234 - RNA, 28 nt, Human
auaauaauaaaaaguaccugcacaugcc

SEQ ID NO: 78235 - RNA, 20 nt, Human
auaauauauacuaaaacccc

SEQ ID NO: 78236 - RNA, 25 nt, Human
auagcagccauggcaccccagggca

SEQ ID NO: 78237 - RNA, 24 nt, Human
auauaauauauacuaaaaccccgu

SEQ ID NO: 78238 - RNA, 24 nt, Human
auccacaccccccaccccaaaaac

SEQ ID NO: 78239 - RNA, 24 nt, Human
augagugaauucaaacagaaaaaa

SEQ ID NO: 78240 - RNA, 23 nt, Human
augccaaaaaaauuacaaaaccc

SEQ ID NO: 78241 - RNA, 18 nt, Human
auucccucauccaaaaga

SEQ ID NO: 78242 - RNA, 21 nt, Human
caaaaagaaaaaaaagggaag

SEQ ID NO: 78243 - RNA, 20 nt, Human
caaaaagguacccucagccc

SEQ ID NO: 78244 - RNA, 18 nt, Human
caaaacagaagcaaaauu

SEQ ID NO: 78245 - RNA, 18 nt, Human
caaaacccaauaaauaca

SEQ ID NO: 78246 - RNA, 30 nt, Human
caaaaccuccaaguaaacaacaaaagcucu

SEQ ID NO: 78247 - RNA, 19 nt, Human
caaacaacccuuuuucucc

SEQ ID NO: 78248 - RNA, 23 nt, Human
caaaggcaacagcagccccugga

SEQ ID NO: 78249 - RNA, 24 nt, Human
caacuaaaugauuugugaaccaaa

SEQ ID NO: 78250 - RNA, 18 nt, Human
caagccagaaaacgccua

SEQ ID NO: 78251 - RNA, 21 nt, Human
caaguuucuauacauuuuuuu

SEQ ID NO: 78252 - RNA, 26 nt, Human
cacaaauaauuucccaucuggucugc

SEQ ID NO: 78253 - RNA, 23 nt, Human
cacaccccccaccccaaaaacaa

SEQ ID NO: 78254 - RNA, 24 nt, Human
cacaccccccaccccaaaaacaaa

SEQ ID NO: 78255 - RNA, 24 nt, Human
cacaugccaaaaaaauuacaaaac

SEQ ID NO: 78256 - RNA, 19 nt, Human
caccauuuaaauuuuacug

SEQ ID NO: 78257 - RNA, 21 nt, Human
caccccaaaaacaaaaaccaa

SEQ ID NO: 78258 - RNA, 20 nt, Human
caccccccaccccaaaaaca

SEQ ID NO: 78259 - RNA, 22 nt, Human
caccccccaccccaaaaacaaa

SEQ ID NO: 78260 - RNA, 19 nt, Human
cacgcggccacuguggcau

SEQ ID NO: 78261 - RNA, 22 nt, Human
cagaaaacgccuaaaagaacac

SEQ ID NO: 78262 - RNA, 24 nt, Human
cagacacagguuagguuggagugc

SEQ ID NO: 78263 - RNA, 23 nt, Human
cagcuuucucucccauucccucc

SEQ ID NO: 78264 - RNA, 20 nt, Human
caggagugaugguagagaag

SEQ ID NO: 78265 - RNA, 24 nt, Human
caguacaaaugcaaacaacuuaaa

SEQ ID NO: 78266 - RNA, 21 nt, Human
caucgaacagaaaagcuucug

SEQ ID NO: 78267 - RNA, 24 nt, Human
caugccaaaaaaauuacaaaaccc

SEQ ID NO: 78268 - RNA, 20 nt, Human
ccaaaagaaaacaauauaca

SEQ ID NO: 78269 - RNA, 19 nt, Human
ccaacacacauacacacaa

SEQ ID NO: 78270 - RNA, 21 nt, Human
ccaagcaauaauaaauaguuc

SEQ ID NO: 78271 - RNA, 19 nt, Human
ccacaccccccaccccaaa

SEQ ID NO: 78272 - RNA, 20 nt, Human
ccacaccccccaccccaaaa

SEQ ID NO: 78273 - RNA, 20 nt, Human
ccacaccccccaccccaaaa

SEQ ID NO: 78274 - RNA, 24 nt, Human
ccacaccccccaccccaaaaacaa

SEQ ID NO: 78275 - RNA, 24 nt, Human
ccaccccaucuccccaaaaaggua

SEQ ID NO: 78276 - RNA, 19 nt, Human
ccauauugaaaugaccucc

SEQ ID NO: 78277 - RNA, 20 nt, Human
cccaccccaaaaacaaaaac

SEQ ID NO: 78278 - RNA, 22 nt, Human
cccagaggagcccuccaaaaac

SEQ ID NO: 78279 - RNA, 24 nt, Human
cccagcaccaccacucaagguuuc

SEQ ID NO: 78280 - RNA, 18 nt, Human
cccagggcacaccaacag

SEQ ID NO: 78281 - RNA, 18 nt, Human
cccaucuggucugcugug

SEQ ID NO: 78282 - RNA, 18 nt, Human
ccccaaaaagguacccuc

SEQ ID NO: 78283 - RNA, 18 nt, Human
ccccaccccacccauccc

SEQ ID NO: 78284 - RNA, 23 nt, Human
ccccaccccacccaucccuacaa

SEQ ID NO: 78285 - RNA, 23 nt, Human
ccccagcaccaccacucaagguu

SEQ ID NO: 78286 - RNA, 21 nt, Human
cccccaccccaaaaacaaaaa

SEQ ID NO: 78287 - RNA, 20 nt, Human
ccccgucaccaaaagaaaac

SEQ ID NO: 78288 - RNA, 27 nt, Human
cccggggacacgcggggugcggggugg

SEQ ID NO: 78289 - RNA, 18 nt, Human
cccgucaccaaaagaaaa

SEQ ID NO: 78290 - RNA, 20 nt, Human
cccucucuuccuccucuucu

SEQ ID NO: 78291 - RNA, 23 nt, Human
ccgccgcaccuccuccucugccc

SEQ ID NO: 78292 - RNA, 21 nt, Human
ccgccgccgcaccuccuccuc

SEQ ID NO: 78293 - RNA, 18 nt, Human
ccgccgccgccgccgccg

SEQ ID NO: 78294 - RNA, 18 nt, Human
ccgccgccgccgccgccg

SEQ ID NO: 78295 - RNA, 23 nt, Human
ccgccgccgcgccgcugccgccg

SEQ ID NO: 78296 - RNA, 19 nt, Human
ccgccgcgccgcugccgcc

SEQ ID NO: 78297 - RNA, 21 nt, Human
ccgccgcgccgcugccgccgc

SEQ ID NO: 78298 - RNA, 18 nt, Human
ccgccgcugccgccgccg

SEQ ID NO: 78299 - RNA, 24 nt, Human
ccgccgcugccgccgccgccgccg

SEQ ID NO: 78300 - RNA, 21 nt, Human
ccgcgccgcugccgccgcugc

SEQ ID NO: 78301 - RNA, 18 nt, Human
ccgcugccgccgccgccg

SEQ ID NO: 78302 - RNA, 24 nt, Human
ccgcugccgccgccgccgccgccg

SEQ ID NO: 78303 - RNA, 18 nt, Human
ccgcugccgccgcugccg

SEQ ID NO: 78304 - RNA, 24 nt, Human
ccgcugccgccgcugccgccgccg

SEQ ID NO: 78305 - RNA, 20 nt, Human
ccggucucaacagcagguca

SEQ ID NO: 78306 - RNA, 20 nt, Human
ccucucuuucccucucuucc

SEQ ID NO: 78307 - RNA, 18 nt, Human
ccucuucuucuucuuuau

SEQ ID NO: 78308 - RNA, 21 nt, Human
cgaacagaaaagcuucugcau

SEQ ID NO: 78309 - RNA, 20 nt, Human
cgcaccuccuccucugcccg

SEQ ID NO: 78310 - RNA, 24 nt, Human
cgccgcugccgccgcugccgccgg

SEQ ID NO: 78311 - RNA, 21 nt, Human
cgcuguacauccacacccccc

SEQ ID NO: 78312 - RNA, 27 nt, Human
cgcuguacauccacaccccccacccca

SEQ ID NO: 78313 - RNA, 19 nt, Human
cggcgcugagucugugggg

SEQ ID NO: 78314 - RNA, 18 nt, Human
cggcugggucacccaugc

SEQ ID NO: 78315 - RNA, 19 nt, Human
cggguugguguuuuuuuuc

SEQ ID NO: 78316 - RNA, 20 nt, Human
cuaaaacuccgacuuuacag

SEQ ID NO: 78317 - RNA, 19 nt, Human
cuauucuggcaucgcccgg

SEQ ID NO: 78318 - RNA, 24 nt, Human
cucauccccugcuuuuucaguaaa

SEQ ID NO: 78319 - RNA, 20 nt, Human
cucccccagcaccaccacuc

SEQ ID NO: 78320 - RNA, 20 nt, Human
cugcagguaggaaacugcag

SEQ ID NO: 78321 - RNA, 25 nt, Human
cuguacauccacaccccccacccca

SEQ ID NO: 78322 - RNA, 23 nt, Human
cuucaccuggacccagcugaauc

SEQ ID NO: 78323 - RNA, 23 nt, Human
cuuccucucuuucccucucuucc

SEQ ID NO: 78324 - RNA, 18 nt, Human
gaaagaaaaaaaaaggac

SEQ ID NO: 78325 - RNA, 19 nt, Human
gaccaauggaggaugaagg

SEQ ID NO: 78326 - RNA, 23 nt, Human
gaccccuuguagcaacauaggaa

SEQ ID NO: 78327 - RNA, 24 nt, Human
gagauggccucuuagagaaaggga

SEQ ID NO: 78328 - RNA, 18 nt, Human
gagugaauucaaacagaa

SEQ ID NO: 78329 - RNA, 21 nt, Human
gauccccaccccacccauccc

SEQ ID NO: 78330 - RNA, 21 nt, Human
gcaaagcagcaaagcagggaa

SEQ ID NO: 78331 - RNA, 24 nt, Human
gcacaaccucagaaugcugucggg

SEQ ID NO: 78332 - RNA, 19 nt, Human
gcacgaaagguccuggcug

SEQ ID NO: 78333 - RNA, 21 nt, Human
gcagggcugaguuacaaggag

SEQ ID NO: 78334 - RNA, 21 nt, Human
gccaguacaaaugcaaacaac

SEQ ID NO: 78335 - RNA, 22 nt, Human
gccgccgccgccgccgccgccg

SEQ ID NO: 78336 - RNA, 22 nt, Human
gccgccgcugccgccgccgccg

SEQ ID NO: 78337 - RNA, 22 nt, Human
gccgcgccgcugccgccgcugc

SEQ ID NO: 78338 - RNA, 19 nt, Human
gcggggcgccggggcccgc

SEQ ID NO: 78339 - RNA, 22 nt, Human
gcugggucacccaugcuagagg

SEQ ID NO: 78340 - RNA, 20 nt, Human
gcuuugggauggcuuagucc

SEQ ID NO: 78341 - RNA, 23 nt, Human
ggagaucaaguuaaauguccaau

SEQ ID NO: 78342 - RNA, 19 nt, Human
ggaggaugaaggauggaga

SEQ ID NO: 78343 - RNA, 23 nt, Human
gggcgggagagguggugguggug

SEQ ID NO: 78344 - RNA, 19 nt, Human
ggggggagccgggggaggg

SEQ ID NO: 78345 - RNA, 21 nt, Human
gggugcgggguggcggugaca

SEQ ID NO: 78346 - RNA, 24 nt, Human
guaauagaaaagguaauaaaaaua

SEQ ID NO: 78347 - RNA, 21 nt, Human
gucaagccagaaaacgccuaa

SEQ ID NO: 78348 - RNA, 23 nt, Human
gucacccaccagaauauaaacuc

SEQ ID NO: 78349 - RNA, 23 nt, Human
guucauugcuguacccagccacu

SEQ ID NO: 78350 - RNA, 18 nt, Human
guugucccaaaaacaaaa

SEQ ID NO: 78351 - RNA, 22 nt, Human
uaaaaaaaaaacugcaugccac

SEQ ID NO: 78352 - RNA, 22 nt, Human
uaaaaaaagagagaagccguca

SEQ ID NO: 78353 - RNA, 19 nt, Human
uaaaauagaggauuagggg

SEQ ID NO: 78354 - RNA, 20 nt, Human
uaaaaugcccaggcauucuc

SEQ ID NO: 78355 - RNA, 19 nt, Human
uaaacacaaaacagaagca

SEQ ID NO: 78356 - RNA, 22 nt, Human
uaaacacaaaacagaagcaaaa

SEQ ID NO: 78357 - RNA, 18 nt, Human
uaaagcagcucaguuugc

SEQ ID NO: 78358 - RNA, 24 nt, Human
uaacaagaacaaauuuauagaccc

SEQ ID NO: 78359 - RNA, 22 nt, Human
uaacuucaauuaauuagggcau

SEQ ID NO: 78360 - RNA, 23 nt, Human
uaaggaaaaaaagaggcccaaaa

SEQ ID NO: 78361 - RNA, 21 nt, Human
uaauaaaaaguaccugcacau

SEQ ID NO: 78362 - RNA, 18 nt, Human
uaauaauaaaaaguaccu

SEQ ID NO: 78363 - RNA, 20 nt, Human
uaauaauaaaaaguaccugc

SEQ ID NO: 78364 - RNA, 21 nt, Human
uacaaaaacugauuuuuuucc

SEQ ID NO: 78365 - RNA, 22 nt, Human
uacaaaacccaauaaauacaga

SEQ ID NO: 78366 - RNA, 21 nt, Human
uacaaggagcaccaaaaucac

SEQ ID NO: 78367 - RNA, 19 nt, Human
uacaaguuucuauacauuu

SEQ ID NO: 78368 - RNA, 26 nt, Human
uacuguaacaagaacaaauuuauaga

SEQ ID NO: 78369 - RNA, 21 nt, Human
uagaacaauaauugccacaga

SEQ ID NO: 78370 - RNA, 22 nt, Human
uagaacaauaauugccacagaa

SEQ ID NO: 78371 - RNA, 20 nt, Human
uagcaauacugacacucaau

SEQ ID NO: 78372 - RNA, 21 nt, Human
uauacuaaaaccccgucacca

SEQ ID NO: 78373 - RNA, 21 nt, Human
uauccgcuguacauccacacc

SEQ ID NO: 78374 - RNA, 23 nt, Human
uaucuuaaagcuacuuggcuuua

SEQ ID NO: 78375 - RNA, 18 nt, Human
ucaaaaaagcagcaccac

SEQ ID NO: 78376 - RNA, 21 nt, Human
ucaaaaaagcagcaccacccc

SEQ ID NO: 78377 - RNA, 20 nt, Human
ucaaauaggaagaucaguuu

SEQ ID NO: 78378 - RNA, 21 nt, Human
ucagcccauuuuauguagccu

SEQ ID NO: 78379 - RNA, 21 nt, Human
ucaggacaaaaaaaaggaagg

SEQ ID NO: 78380 - RNA, 23 nt, Human
ucagucuccuucucuccccauga

SEQ ID NO: 78381 - RNA, 18 nt, Human
uccaaaaacccuaucucu

SEQ ID NO: 78382 - RNA, 26 nt, Human
uccaaaaacccuaucucuggcggcgc

SEQ ID NO: 78383 - RNA, 18 nt, Human
uccacaauuuguacugcc

SEQ ID NO: 78384 - RNA, 24 nt, Human
uccacaccccccaccccaaaaaca

SEQ ID NO: 78385 - RNA, 21 nt, Human
uccauggcacgaaagguccug

SEQ ID NO: 78386 - RNA, 21 nt, Human
ucccaaaaacaaaaggggcug

SEQ ID NO: 78387 - RNA, 19 nt, Human
uccccaccccacccauccc

SEQ ID NO: 78388 - RNA, 21 nt, Human
ucccucauccaaaagaccacc

SEQ ID NO: 78389 - RNA, 20 nt, Human
uccucuucuucuucuuuauu

SEQ ID NO: 78390 - RNA, 21 nt, Human
uccucuucuucuucuuuauuu

SEQ ID NO: 78391 - RNA, 19 nt, Human
ucuacauacuuuuucuaca

SEQ ID NO: 78392 - RNA, 18 nt, Human
ucuauucuggcaucgccc

SEQ ID NO: 78393 - RNA, 22 nt, Human
ucuccuucucuccccaugaaag

SEQ ID NO: 78394 - RNA, 18 nt, Human
ucucucgggaucaucugc

SEQ ID NO: 78395 - RNA, 22 nt, Human
ucugcuguggccacaccaagga

SEQ ID NO: 78396 - RNA, 21 nt, Human
ugaaaaaguaaacaacuuuaa

SEQ ID NO: 78397 - RNA, 21 nt, Human
ugaaaccagaacaaacuuggu

SEQ ID NO: 78398 - RNA, 22 nt, Human
ugaaauggcagacacaugcuga

SEQ ID NO: 78399 - RNA, 19 nt, Human
ugaacaaaguuguggcagu

SEQ ID NO: 78400 - RNA, 21 nt, Human
ugaaugaaugagugaauucaa

SEQ ID NO: 78401 - RNA, 22 nt, Human
ugaaugaaugagugaauucaaa

SEQ ID NO: 78402 - RNA, 21 nt, Human
ugaauuguuuuuguuuugcuu

SEQ ID NO: 78403 - RNA, 22 nt, Human
ugaccuccugucaucucaacau

SEQ ID NO: 78404 - RNA, 19 nt, Human
ugagagaacacuaacuuca

SEQ ID NO: 78405 - RNA, 19 nt, Human
ugagauaggaaaaaaaaaa

SEQ ID NO: 78406 - RNA, 19 nt, Human
ugcaaaaagaaaaaaaagg

SEQ ID NO: 78407 - RNA, 21 nt, Human
ugcaaaaagaaaaaaaaggga

SEQ ID NO: 78408 - RNA, 22 nt, Human
ugcaagauccccaccccaccca

SEQ ID NO: 78409 - RNA, 21 nt, Human
ugcacagaguugugccugaag

SEQ ID NO: 78410 - RNA, 26 nt, Human
ugcaggccaccccaucuccccaaaaa

SEQ ID NO: 78411 - RNA, 19 nt, Human
ugccacagaauuuuaacaa

SEQ ID NO: 78412 - RNA, 20 nt, Human
ugccccggcaucuauucugg

SEQ ID NO: 78413 - RNA, 21 nt, Human
ugcgggguggcggugacacgg

SEQ ID NO: 78414 - RNA, 25 nt, Human
uggagaggaaacgcaggggaaggag

SEQ ID NO: 78415 - RNA, 23 nt, Human
uggaugaccccuuguagcaacau

SEQ ID NO: 78416 - RNA, 19 nt, Human
uggcaaggaggaaagagug

SEQ ID NO: 78417 - RNA, 22 nt, Human
uggcaguagaaaaacuguccuu

SEQ ID NO: 78418 - RNA, 21 nt, Human
ugggacuuugcuuugcagggc

SEQ ID NO: 78419 - RNA, 18 nt, Human
uggggggagccgggggag

SEQ ID NO: 78420 - RNA, 21 nt, Human
ugguaagggcgggagaggugg

SEQ ID NO: 78421 - RNA, 19 nt, Human
ugguagagaaggaagaugu

SEQ ID NO: 78422 - RNA, 22 nt, Human
ugguagagaaggaagauguucu

SEQ ID NO: 78423 - RNA, 21 nt, Human
uguacauccacaccccccacc

SEQ ID NO: 78424 - RNA, 23 nt, Human
uguacauccacaccccccacccc

SEQ ID NO: 78425 - RNA, 23 nt, Human
ugucucaagagacucaaauagga

SEQ ID NO: 78426 - RNA, 24 nt, Human
uuaaaaaaaaaacaaagaagggau

SEQ ID NO: 78427 - RNA, 24 nt, Human
uuaacuacuuccuuuuguuucuuu

SEQ ID NO: 78428 - RNA, 18 nt, Human
uuauacuuucauaaccug

SEQ ID NO: 78429 - RNA, 18 nt, Human
uuccuccucuucuucuuc

SEQ ID NO: 78430 - RNA, 24 nt, Human
uuccuccucuucuucuucuuuaag

SEQ ID NO: 78431 - RNA, 22 nt, Human
uuccugaaauaaaaaauggcuu

SEQ ID NO: 78432 - RNA, 21 nt, Human
uuccugaauuguuuuuguuuu

SEQ ID NO: 78433 - RNA, 20 nt, Human
uuggagugccgccuccccug

SEQ ID NO: 78434 - RNA, 24 nt, Human
uugguuuuuuaaacacaaaacaga

SEQ ID NO: 78435 - RNA, 18 nt, Human
uuguguuuguuucacaau

SEQ ID NO: 78436 - RNA, 24 nt, Human
uuuaacccaccucugggccaaaga

SEQ ID NO: 78437 - RNA, 21 nt, Human
uuucacaauuucucaaggacu

SEQ ID NO: 78438 - RNA, 21 nt, Human
uuucccaucuggucugcugug

SEQ ID NO: 78439 - RNA, 20 nt, Human
uuugcaagauccccacccca

SEQ ID NO: 78440 - RNA, 19 nt, Human
uuugcucuuucuucuaugc

SEQ ID NO: 78441 - RNA, 24 nt, Human
uuugcucuuucuucuaugcuguuu

SEQ ID NO: 78442 - RNA, 21 nt, Human
uuuuacuuuuuuaaaaagucu

SEQ ID NO: 78443 - RNA, 20 nt, Human
aaaaucccugaaagauccaa

SEQ ID NO: 78444 - RNA, 24 nt, Human
aaaaugcuuuucucggcacaauug

SEQ ID NO: 78445 - RNA, 21 nt, Human
aaacaaaaccaccaaaagaaa

SEQ ID NO: 78446 - RNA, 24 nt, Human
aaauaaauaaaucuuuuuuucuua

SEQ ID NO: 78447 - RNA, 20 nt, Human
aaauugcuaaaaugcuuuuc

SEQ ID NO: 78448 - RNA, 27 nt, Human
aacaaaaauaaccccaguaacucaaaa

SEQ ID NO: 78449 - RNA, 18 nt, Human
aacagaagacaaaacagg

SEQ ID NO: 78450 - RNA, 19 nt, Human
aaccagguaacaaaacccc

SEQ ID NO: 78451 - RNA, 20 nt, Human
aaccagguaacaaaacccca

SEQ ID NO: 78452 - RNA, 20 nt, Human
aacugcaaaauaauuagaua

SEQ ID NO: 78453 - RNA, 24 nt, Human
aagucauuuaaagccuugcuuuaa

SEQ ID NO: 78454 - RNA, 19 nt, Human
aagugcagccacaauacug

SEQ ID NO: 78455 - RNA, 23 nt, Human
aaucaagagauaaaaaucucaaa

SEQ ID NO: 78456 - RNA, 20 nt, Human
aaugaaaaaaaagaagagga

SEQ ID NO: 78457 - RNA, 28 nt, Human
aaugcaauccacugucacuuugcgugca

SEQ ID NO: 78458 - RNA, 20 nt, Human
acaaaaauaaccccaguaac

SEQ ID NO: 78459 - RNA, 21 nt, Human
acaaaaccaccaaaagaaagc

SEQ ID NO: 78460 - RNA, 22 nt, Human
acaaaaccccacagcaaaaggc

SEQ ID NO: 78461 - RNA, 20 nt, Human
acaacagaagacaaaacagg

SEQ ID NO: 78462 - RNA, 21 nt, Human
acaacagaagacaaaacaggc

SEQ ID NO: 78463 - RNA, 19 nt, Human
acacagccaacgugccaug

SEQ ID NO: 78464 - RNA, 21 nt, Human
accaggccuccaagcugggac

SEQ ID NO: 78465 - RNA, 23 nt, Human
accccacggcccccagagaaaga

SEQ ID NO: 78466 - RNA, 22 nt, Human
acccccauauuccacaccugga

SEQ ID NO: 78467 - RNA, 18 nt, Human
accuucuccccagccucc

SEQ ID NO: 78468 - RNA, 25 nt, Human
agaaagaagaggaguuauaauccag

SEQ ID NO: 78469 - RNA, 19 nt, Human
agaaagcuuccccaaaaga

SEQ ID NO: 78470 - RNA, 24 nt, Human
agagaaagaagaggaguuauaauc

SEQ ID NO: 78471 - RNA, 21 nt, Human
agaggagaaaaaaaugacuag

SEQ ID NO: 78472 - RNA, 21 nt, Human
aggaaaaugcaacaucaacua

SEQ ID NO: 78473 - RNA, 24 nt, Human
aggaacccucccucuguuaauauc

SEQ ID NO: 78474 - RNA, 23 nt, Human
aggaagacccugaaggacagcca

SEQ ID NO: 78475 - RNA, 19 nt, Human
aggagaaaaaaaugacuag

SEQ ID NO: 78476 - RNA, 23 nt, Human
aggaggccagugagggccccggc

SEQ ID NO: 78477 - RNA, 20 nt, Human
aggagggcaggagggcucug

SEQ ID NO: 78478 - RNA, 19 nt, Human
auaucacagcccccagggc

SEQ ID NO: 78479 - RNA, 26 nt, Human
aucagcuuccagacauucggagacca

SEQ ID NO: 78480 - RNA, 21 nt, Human
auccagcuugaaauuuauacc

SEQ ID NO: 78481 - RNA, 22 nt, Human
auguaaaccuuucauaaaauaa

SEQ ID NO: 78482 - RNA, 25 nt, Human
caaaaauaaccccaguaacucaaaa

SEQ ID NO: 78483 - RNA, 18 nt, Human
caaacagaaaacgaucac

SEQ ID NO: 78484 - RNA, 20 nt, Human
caacaacacaaacaaagugc

SEQ ID NO: 78485 - RNA, 18 nt, Human
caacacaaacaaagugcc

SEQ ID NO: 78486 - RNA, 20 nt, Human
caacacaaacaaagugccau

SEQ ID NO: 78487 - RNA, 20 nt, Human
caagaggcugggcacauuua

SEQ ID NO: 78488 - RNA, 22 nt, Human
cacaagguucuucgcagaggca

SEQ ID NO: 78489 - RNA, 23 nt, Human
cacagcauuaaacauugaacaga

SEQ ID NO: 78490 - RNA, 18 nt, Human
caccccucuacugcucuu

SEQ ID NO: 78491 - RNA, 20 nt, Human
caccccucuacugcucuuuc

SEQ ID NO: 78492 - RNA, 24 nt, Human
caccgaaauguucacuuccucaag

SEQ ID NO: 78493 - RNA, 21 nt, Human
cacugcauuucaggaagaccc

SEQ ID NO: 78494 - RNA, 20 nt, Human
cagaaagccagcuuccccaa

SEQ ID NO: 78495 - RNA, 24 nt, Human
cagaacauccagguggagccacac

SEQ ID NO: 78496 - RNA, 21 nt, Human
cagaauagaauuucaacugac

SEQ ID NO: 78497 - RNA, 18 nt, Human
cagaauaucagccaccuc

SEQ ID NO: 78498 - RNA, 26 nt, Human
cagaaugauucacuggguaagacuaa

SEQ ID NO: 78499 - RNA, 18 nt, Human
cagcagccagaaagccag

SEQ ID NO: 78500 - RNA, 19 nt, Human
cagccacaccccucuacug

SEQ ID NO: 78501 - RNA, 24 nt, Human
cagccagaaagccagcuuccccaa

SEQ ID NO: 78502 - RNA, 28 nt, Human
cagccucccauugcccaggagcccaccc

SEQ ID NO: 78503 - RNA, 22 nt, Human
caggaccaggccuccaagcugg

SEQ ID NO: 78504 - RNA, 22 nt, Human
ccaaggccacacagccaacgug

SEQ ID NO: 78505 - RNA, 19 nt, Human
ccacaccccucuacugcuc

SEQ ID NO: 78506 - RNA, 24 nt, Human
ccacacugcccuguugaucauccc

SEQ ID NO: 78507 - RNA, 24 nt, Human
ccacccgcacuccaacccccgauc

SEQ ID NO: 78508 - RNA, 19 nt, Human
ccacugcauuucaggaaga

SEQ ID NO: 78509 - RNA, 19 nt, Human
ccagcagccagaaagccag

SEQ ID NO: 78510 - RNA, 20 nt, Human
ccagccuccagcagccagaa

SEQ ID NO: 78511 - RNA, 23 nt, Human
cccacaggaacccucccucuguu

SEQ ID NO: 78512 - RNA, 22 nt, Human
cccaccccacggcccccagaga

SEQ ID NO: 78513 - RNA, 27 nt, Human
cccauugcccaggagcccacccgcacu

SEQ ID NO: 78514 - RNA, 20 nt, Human
ccccaaaagaaaugcaaucc

SEQ ID NO: 78515 - RNA, 23 nt, Human
ccccaauacagguccuucauacc

SEQ ID NO: 78516 - RNA, 21 nt, Human
ccccacaggaacccucccucu

SEQ ID NO: 78517 - RNA, 19 nt, Human
ccccagccuccagcagccg

SEQ ID NO: 78518 - RNA, 18 nt, Human
cccucuacugcucuuucc

SEQ ID NO: 78519 - RNA, 21 nt, Human
cccucuguuaauaucacagcc

SEQ ID NO: 78520 - RNA, 21 nt, Human
ccgauggccauagacccuguc

SEQ ID NO: 78521 - RNA, 19 nt, Human
ccucccaccccuccaacaa

SEQ ID NO: 78522 - RNA, 19 nt, Human
ccucccauugcccaggagc

SEQ ID NO: 78523 - RNA, 23 nt, Human
ccucccauugcccaggagcccac

SEQ ID NO: 78524 - RNA, 18 nt, Human
ccucccucccaccccucc

SEQ ID NO: 78525 - RNA, 18 nt, Human
ccuggagggccccagggu

SEQ ID NO: 78526 - RNA, 25 nt, Human
cgccccagcucccaccccacggccc

SEQ ID NO: 78527 - RNA, 19 nt, Human
cggaaggagggcaggaggg

SEQ ID NO: 78528 - RNA, 20 nt, Human
cggcccccagagaaagaaga

SEQ ID NO: 78529 - RNA, 20 nt, Human
cgggaagcaacaacucugau

SEQ ID NO: 78530 - RNA, 24 nt, Human
cguaaagcaacucucuaaagguca

SEQ ID NO: 78531 - RNA, 18 nt, Human
cguaagcaccacugcauu

SEQ ID NO: 78532 - RNA, 18 nt, Human
cguggcucccaugcucca

SEQ ID NO: 78533 - RNA, 23 nt, Human
cguucuucauuguuacuucuaaa

SEQ ID NO: 78534 - RNA, 21 nt, Human
cucaaacagaaaacgaucacc

SEQ ID NO: 78535 - RNA, 19 nt, Human
cucacaggugggccaaggc

SEQ ID NO: 78536 - RNA, 21 nt, Human
cuccacagccucccauugccc

SEQ ID NO: 78537 - RNA, 23 nt, Human
cucccaccccuccaacaaauguc

SEQ ID NO: 78538 - RNA, 19 nt, Human
cuccccagccuccagcagc

SEQ ID NO: 78539 - RNA, 28 nt, Human
cucccucccaccccuccaacaaaugucc

SEQ ID NO: 78540 - RNA, 24 nt, Human
cucccucuguuaauaucacagccc

SEQ ID NO: 78541 - RNA, 20 nt, Human
cucgccccagcucccacccc

SEQ ID NO: 78542 - RNA, 21 nt, Human
cucgccccagcucccaccccc

SEQ ID NO: 78543 - RNA, 18 nt, Human
cugaaaacuuccaacucc

SEQ ID NO: 78544 - RNA, 19 nt, Human
cugaaggacagccaugaga

SEQ ID NO: 78545 - RNA, 19 nt, Human
cugccccugccaaaucuuc

SEQ ID NO: 78546 - RNA, 24 nt, Human
cuuagguagcugagacucagggcu

SEQ ID NO: 78547 - RNA, 23 nt, Human
cuuauuuuuauuuaaaacaaaaa

SEQ ID NO: 78548 - RNA, 23 nt, Human
gaaaagcaacgggggccaacggc

SEQ ID NO: 78549 - RNA, 20 nt, Human
gaaaaguaacgggggccaac

SEQ ID NO: 78550 - RNA, 21 nt, Human
gaaaugagcuaucuggagggc

SEQ ID NO: 78551 - RNA, 18 nt, Human
gaaggagggcaggagggc

SEQ ID NO: 78552 - RNA, 21 nt, Human
gacaagauaauguuuuacaug

SEQ ID NO: 78553 - RNA, 18 nt, Human
gacacaggcagguucugc

SEQ ID NO: 78554 - RNA, 20 nt, Human
gacccugucagcugucauuc

SEQ ID NO: 78555 - RNA, 18 nt, Human
gagaauguuggcgucuug

SEQ ID NO: 78556 - RNA, 21 nt, Human
gagcccacccgcacuccaacc

SEQ ID NO: 78557 - RNA, 24 nt, Human
gaggucuggcuucauaccacaggu

SEQ ID NO: 78558 - RNA, 19 nt, Human
gauuuauaaucacuuccua

SEQ ID NO: 78559 - RNA, 26 nt, Human
gcaggagggcucugggugggucugug

SEQ ID NO: 78560 - RNA, 18 nt, Human
gcagguucugcggacuuc

SEQ ID NO: 78561 - RNA, 21 nt, Human
gccccagcucccaccccacgg

SEQ ID NO: 78562 - RNA, 21 nt, Human
gccguggccauugccucuccu

SEQ ID NO: 78563 - RNA, 19 nt, Human
ggagccacacgaagcggug

SEQ ID NO: 78564 - RNA, 22 nt, Human
ggagggcucugggugggucugu

SEQ ID NO: 78565 - RNA, 24 nt, Human
ggauugcccugauuauuuacauuu

SEQ ID NO: 78566 - RNA, 24 nt, Human
ggcaggagggcucugggugggucu

SEQ ID NO: 78567 - RNA, 18 nt, Human
ggcuuaucucaccuucuc

SEQ ID NO: 78568 - RNA, 18 nt, Human
gggcaggagggcucuggg

SEQ ID NO: 78569 - RNA, 18 nt, Human
guggagcauacugcaaac

SEQ ID NO: 78570 - RNA, 24 nt, Human
guugaucaucccuggaggaggcca

SEQ ID NO: 78571 - RNA, 21 nt, Human
uaaaaacaaaaaaacgcugag

SEQ ID NO: 78572 - RNA, 25 nt, Human
uaaaaacaaaaaaacgcugagaugc

SEQ ID NO: 78573 - RNA, 19 nt, Human
uaaaaagagccauggaagg

SEQ ID NO: 78574 - RNA, 27 nt, Human
uaaaaccaaacuacagugacaagauaa

SEQ ID NO: 78575 - RNA, 23 nt, Human
uaaaaguaucaaucuuaaaaaga

SEQ ID NO: 78576 - RNA, 18 nt, Human
uaaacaaaaccaccaaaa

SEQ ID NO: 78577 - RNA, 18 nt, Human
uaaagagcaguuaagaug

SEQ ID NO: 78578 - RNA, 25 nt, Human
uaaaugguauauaaugcaauaaugc

SEQ ID NO: 78579 - RNA, 21 nt, Human
uaacaaaaccccacagcaaaa

SEQ ID NO: 78580 - RNA, 24 nt, Human
uaacaauaaggaaaaugcaacauc

SEQ ID NO: 78581 - RNA, 22 nt, Human
uaagaugcagaugugaaucccu

SEQ ID NO: 78582 - RNA, 21 nt, Human
uacaauuaaaaacaaaaaaac

SEQ ID NO: 78583 - RNA, 23 nt, Human
uaccaugaauuaaaugcggaauu

SEQ ID NO: 78584 - RNA, 21 nt, Human
uagaaacagaugucccuacca

SEQ ID NO: 78585 - RNA, 24 nt, Human
uagauauaaugaaaaaaaagaaga

SEQ ID NO: 78586 - RNA, 26 nt, Human
uagcuuaaaaaaauacuuuccuauga

SEQ ID NO: 78587 - RNA, 25 nt, Human
uaggugcauggauuuacucaguauc

SEQ ID NO: 78588 - RNA, 24 nt, Human
uaguuccccaccauugauuuuuuu

SEQ ID NO: 78589 - RNA, 19 nt, Human
ucaaauaaaaccaaacuac

SEQ ID NO: 78590 - RNA, 21 nt, Human
ucaaccacagcauuaaacauu

SEQ ID NO: 78591 - RNA, 19 nt, Human
ucaaucuuaaaaagagcca

SEQ ID NO: 78592 - RNA, 19 nt, Human
ucacuuccucaaguuccag

SEQ ID NO: 78593 - RNA, 18 nt, Human
ucagauggugauccggcc

SEQ ID NO: 78594 - RNA, 19 nt, Human
ucaggccagggaggcaugg

SEQ ID NO: 78595 - RNA, 19 nt, Human
ucagguccuuuuuccaucc

SEQ ID NO: 78596 - RNA, 22 nt, Human
ucauggguuuaaccaaacaugc

SEQ ID NO: 78597 - RNA, 23 nt, Human
uccaaagacaggaguuuugaugg

SEQ ID NO: 78598 - RNA, 24 nt, Human
uccaaggucaugguuguccaaaga

SEQ ID NO: 78599 - RNA, 18 nt, Human
uccagaggauucuguuuc

SEQ ID NO: 78600 - RNA, 23 nt, Human
uccauccuccaccaguguuccca

SEQ ID NO: 78601 - RNA, 21 nt, Human
ucccaccccacggcccccaga

SEQ ID NO: 78602 - RNA, 18 nt, Human
ucccauugcccaggagcc

SEQ ID NO: 78603 - RNA, 19 nt, Human
ucccugaggcccgccgggg

SEQ ID NO: 78604 - RNA, 19 nt, Human
uccucaguggccagugaca

SEQ ID NO: 78605 - RNA, 19 nt, Human
uccugaugcggaagucacc

SEQ ID NO: 78606 - RNA, 21 nt, Human
ucucgccccagcucccacccc

SEQ ID NO: 78607 - RNA, 18 nt, Human
ucugacccuggccagugu

SEQ ID NO: 78608 - RNA, 24 nt, Human
ucugauaggaagggcccagggccu

SEQ ID NO: 78609 - RNA, 26 nt, Human
ucugugugugugauguuuauaugugu

SEQ ID NO: 78610 - RNA, 23 nt, Human
ucuuagguagcugagacucaggg

SEQ ID NO: 78611 - RNA, 22 nt, Human
ugaaaaaaaagaagaggagaaa

SEQ ID NO: 78612 - RNA, 23 nt, Human
ugaacaccuucuccccagccucc

SEQ ID NO: 78613 - RNA, 23 nt, Human
ugaaccuuuugcauauuuguuug

SEQ ID NO: 78614 - RNA, 19 nt, Human
ugacaggcccagccacacc

SEQ ID NO: 78615 - RNA, 18 nt, Human
ugacuccauuaaaaugau

SEQ ID NO: 78616 - RNA, 19 nt, Human
ugagaugcauauuucauga

SEQ ID NO: 78617 - RNA, 20 nt, Human
ugaggcccgccggggagguc

SEQ ID NO: 78618 - RNA, 22 nt, Human
ugaugcggaagucaccgaaaug

SEQ ID NO: 78619 - RNA, 22 nt, Human
ugcaagugaaugaacaccuucu

SEQ ID NO: 78620 - RNA, 23 nt, Human
ugccaaacggagcugcacuuuga

SEQ ID NO: 78621 - RNA, 21 nt, Human
ugcccaggagcccacccgcac

SEQ ID NO: 78622 - RNA, 18 nt, Human
ugcccugauuauuuacau

SEQ ID NO: 78623 - RNA, 21 nt, Human
ugcggaauugcccagggacga

SEQ ID NO: 78624 - RNA, 20 nt, Human
ugcuuuagugaaccuuuugc

SEQ ID NO: 78625 - RNA, 26 nt, Human
uggcaaugugacuuuuuccaacaacc

SEQ ID NO: 78626 - RNA, 19 nt, Human
ugggacacaggcagguucu

SEQ ID NO: 78627 - RNA, 22 nt, Human
uguacaguucuggggccaagag

SEQ ID NO: 78628 - RNA, 21 nt, Human
uguccagaggaggagguaggg

SEQ ID NO: 78629 - RNA, 22 nt, Human
ugugugauguuuauaugugugu

SEQ ID NO: 78630 - RNA, 21 nt, Human
ugugugugucugucugugugu

SEQ ID NO: 78631 - RNA, 19 nt, Human
ugugugugugugucugucu

SEQ ID NO: 78632 - RNA, 27 nt, Human
ugugugugugugugucugucugugugu

SEQ ID NO: 78633 - RNA, 21 nt, Human
uuaaaaaguguguaaccacau

SEQ ID NO: 78634 - RNA, 22 nt, Human
uuaaaaccagguaacaaaaccc

SEQ ID NO: 78635 - RNA, 24 nt, Human
uuaaauauccuguuaguuaaaacu

SEQ ID NO: 78636 - RNA, 21 nt, Human
uucaaugcuucuuuuaggauu

SEQ ID NO: 78637 - RNA, 18 nt, Human
uuccaaaguuaauacaga

SEQ ID NO: 78638 - RNA, 21 nt, Human
uucccagaggaaaagcaacgg

SEQ ID NO: 78639 - RNA, 21 nt, Human
uucccagaggaaaaguaacgg

SEQ ID NO: 78640 - RNA, 24 nt, Human
uucccagccuucaccauguccuuc

SEQ ID NO: 78641 - RNA, 24 nt, Human
uucuucacaauauuaacuagacag

SEQ ID NO: 78642 - RNA, 21 nt, Human
uugaacaacaacagaagacaa

SEQ ID NO: 78643 - RNA, 19 nt, Human
uugcugaagaugucacuuc

SEQ ID NO: 78644 - RNA, 24 nt, Human
uuggcaguaaauagcugauucgac

SEQ ID NO: 78645 - RNA, 19 nt, Human
uuuccuguuuuucucugau

SEQ ID NO: 78646 - RNA, 18 nt, Human
uuugaacaacaacagaag

SEQ ID NO: 78647 - RNA, 23 nt, Human
uuuguuuggggcaggcauguuga

SEQ ID NO: 78648 - RNA, 18 nt, Human
uuuuccauccgucugcuc

SEQ ID NO: 78649 - RNA, 23 nt, Human
uuuucugccccugccaaaucuuc

SEQ ID NO: 78650 - RNA, 21 nt, Human
aaguauguguuggcaaucguu

SEQ ID NO: 78651 - RNA, 23 nt, Human
aucaaaguuguuuauuuaaaagu

SEQ ID NO: 78652 - RNA, 19 nt, Human
cacaauauggaguguccuu

SEQ ID NO: 78653 - RNA, 19 nt, Human
gucaaguuacaucaucaaa

SEQ ID NO: 78654 - RNA, 21 nt, Human
uacauggaggcugguggaauu

SEQ ID NO: 78655 - RNA, 28 nt, Human
uagaaguauguguuggcaaucguuucca

SEQ ID NO: 78656 - RNA, 27 nt, Human
uggagagcaaagucuugagcuggcuca

SEQ ID NO: 78657 - RNA, 23 nt, Human
uggggacaaaauuuccauaacuc

SEQ ID NO: 78658 - RNA, 18 nt, Human
uuaugacacaugaugaua

SEQ ID NO: 78659 - RNA, 20 nt, Human
uucuguuugcaucacuuuau

SEQ ID NO: 78660 - RNA, 21 nt, Human
uuucacaauauggaguguccu

SEQ ID NO: 78661 - RNA, 23 nt, Human
uuugcaucacuuuauaauauccu

SEQ ID NO: 78662 - RNA, 22 nt, Human
aacacuggccaaaucaccaccu

SEQ ID NO: 78663 - RNA, 18 nt, Human
aaggaagagccauuugca

SEQ ID NO: 78664 - RNA, 22 nt, Human
acaaguuaaaacacuggccaaa

SEQ ID NO: 78665 - RNA, 24 nt, Human
cuggggggccgggccuucgcuggu

SEQ ID NO: 78666 - RNA, 23 nt, Human
gugggggaaggugcuuucccuca

SEQ ID NO: 78667 - RNA, 22 nt, Human
ucacaaguuaaaacacuggcca

SEQ ID NO: 78668 - RNA, 19 nt, Human
ucgcugguuuucuuggccc

SEQ ID NO: 78669 - RNA, 19 nt, Human
uggggggccgggccuucgc

SEQ ID NO: 78670 - RNA, 20 nt, Human
uggggggccgggccuucgcu

SEQ ID NO: 78671 - RNA, 21 nt, Human
cacagcuccgucucaaacgcu

SEQ ID NO: 78672 - RNA, 18 nt, Human
ccucucucaccuccuccu

SEQ ID NO: 78673 - RNA, 19 nt, Human
cucaaacgcuuccccacug

SEQ ID NO: 78674 - RNA, 18 nt, Human
cucauggaagcuggguga

SEQ ID NO: 78675 - RNA, 20 nt, Human
cugcagguucagccugccuc

SEQ ID NO: 78676 - RNA, 20 nt, Human
cugcagguucagccugccuc

SEQ ID NO: 78677 - RNA, 22 nt, Human
ggaagcugggugauggagcugu

SEQ ID NO: 78678 - RNA, 20 nt, Human
uccccacugcccuuaagugg

SEQ ID NO: 78679 - RNA, 22 nt, Human
uccccacugcccuuaaguggac

SEQ ID NO: 78680 - RNA, 19 nt, Human
ucguaagauaaccauucgu

SEQ ID NO: 78681 - RNA, 19 nt, Human
ucguaagauaaccauucgu

SEQ ID NO: 78682 - RNA, 19 nt, Human
ucguaagauaaccauucgu

SEQ ID NO: 78683 - RNA, 19 nt, Human
ucguaagauaaccauucgu

SEQ ID NO: 78684 - RNA, 24 nt, Human
ucucaaacgcuuccccacugcccu

SEQ ID NO: 78685 - RNA, 20 nt, Human
ucucucaccuccuccuucaa

SEQ ID NO: 78686 - RNA, 21 nt, Human
ugaauacaugacaacuacacg

SEQ ID NO: 78687 - RNA, 22 nt, Human
uggguggucuucggcugcuugg

SEQ ID NO: 78688 - RNA, 22 nt, Human
uggguggucuucggcugcuugg

SEQ ID NO: 78689 - RNA, 22 nt, Human
uggguggucuucggcugcuugg

SEQ ID NO: 78690 - RNA, 22 nt, Human
uggguggucuucggcugcuugg

SEQ ID NO: 78691 - RNA, 20 nt, Human
aacaaggccagcugcagaac

SEQ ID NO: 78692 - RNA, 23 nt, Human
aaccccucuccuccuacuuaauc

SEQ ID NO: 78693 - RNA, 22 nt, Human
aaccuggccauggucccugcag

SEQ ID NO: 78694 - RNA, 20 nt, Human
aagaaaaagccauaaucuga

SEQ ID NO: 78695 - RNA, 18 nt, Human
aagaaaccccucuccucc

SEQ ID NO: 78696 - RNA, 21 nt, Human
aagcagaagucuggacucaac

SEQ ID NO: 78697 - RNA, 22 nt, Human
aagcagaagucuggacucaaca

SEQ ID NO: 78698 - RNA, 24 nt, Human
aagcagcagagcccucggucugga

SEQ ID NO: 78699 - RNA, 18 nt, Human
aaggcaucaacagucuca

SEQ ID NO: 78700 - RNA, 24 nt, Human
aaguuccaggucguuucaugugcc

SEQ ID NO: 78701 - RNA, 18 nt, Human
acaccuagccccaccugg

SEQ ID NO: 78702 - RNA, 19 nt, Human
acagaagagucucuggggu

SEQ ID NO: 78703 - RNA, 22 nt, Human
acagacaaguaacacccaugca

SEQ ID NO: 78704 - RNA, 18 nt, Human
acaggcaggguucuagag

SEQ ID NO: 78705 - RNA, 24 nt, Human
accaagugaaaaucuccaagaaga

SEQ ID NO: 78706 - RNA, 18 nt, Human
accccccaccccaacugc

SEQ ID NO: 78707 - RNA, 19 nt, Human
accuauaggcgugaucccu

SEQ ID NO: 78708 - RNA, 18 nt, Human
agaaccccuaagcuucca

SEQ ID NO: 78709 - RNA, 24 nt, Human
agccuccacccauccaggcucaac

SEQ ID NO: 78710 - RNA, 19 nt, Human
agccucucuuuccacccag

SEQ ID NO: 78711 - RNA, 19 nt, Human
agcuaaucccaaggaacua

SEQ ID NO: 78712 - RNA, 24 nt, Human
agcuccucuuggcuaaaggucccg

SEQ ID NO: 78713 - RNA, 23 nt, Human
aggaaacuucagggcucugccaa

SEQ ID NO: 78714 - RNA, 19 nt, Human
aggagcugggagggaggga

SEQ ID NO: 78715 - RNA, 23 nt, Human
agggccccaauuuagaguuucag

SEQ ID NO: 78716 - RNA, 22 nt, Human
agugcucaggaccacaggcagg

SEQ ID NO: 78717 - RNA, 22 nt, Human
auaaaaucuuacccugaacccc

SEQ ID NO: 78718 - RNA, 24 nt, Human
aucacccucacacccaugggauuc

SEQ ID NO: 78719 - RNA, 19 nt, Human
aucccucccaccuccccca

SEQ ID NO: 78720 - RNA, 24 nt, Human
aucccucccaccucccccagcccu

SEQ ID NO: 78721 - RNA, 19 nt, Human
aucuaauggaauacagcug

SEQ ID NO: 78722 - RNA, 18 nt, Human
augcacaccagcaugcgu

SEQ ID NO: 78723 - RNA, 19 nt, Human
augcccacccauccaccaa

SEQ ID NO: 78724 - RNA, 21 nt, Human
caaggcaucaacagucucacu

SEQ ID NO: 78725 - RNA, 23 nt, Human
caagugcauaaugcacaaggaag

SEQ ID NO: 78726 - RNA, 19 nt, Human
cacaaaaauaaaagucaaa

SEQ ID NO: 78727 - RNA, 23 nt, Human
cacaccuagccccaccuggcccu

SEQ ID NO: 78728 - RNA, 21 nt, Human
cacccauccaccaacuccacu

SEQ ID NO: 78729 - RNA, 21 nt, Human
cacccccuucaucuccccaag

SEQ ID NO: 78730 - RNA, 18 nt, Human
cacccucacacccauggg

SEQ ID NO: 78731 - RNA, 24 nt, Human
caccuuggaaagugcagcagugag

SEQ ID NO: 78732 - RNA, 22 nt, Human
cacguucuggcgagcacaacua

SEQ ID NO: 78733 - RNA, 23 nt, Human
cacuuaugcccacaaccucaaaa

SEQ ID NO: 78734 - RNA, 24 nt, Human
cagaaaacagccucucuuuccagu

SEQ ID NO: 78735 - RNA, 23 nt, Human
cagaaaguuagcauuggagagca

SEQ ID NO: 78736 - RNA, 18 nt, Human
cagacaaguaacacccau

SEQ ID NO: 78737 - RNA, 20 nt, Human
cagagaacugccccuaguuc

SEQ ID NO: 78738 - RNA, 18 nt, Human
cagccacaccuagcccca

SEQ ID NO: 78739 - RNA, 20 nt, Human
cagcccacuguuaacagcca

SEQ ID NO: 78740 - RNA, 19 nt, Human
cagccuaccaccuccccua

SEQ ID NO: 78741 - RNA, 18 nt, Human
cagccugcucagcucccc

SEQ ID NO: 78742 - RNA, 24 nt, Human
cagcuccccacccccuucaucucc

SEQ ID NO: 78743 - RNA, 22 nt, Human
caggugucaaggcuucagagca

SEQ ID NO: 78744 - RNA, 21 nt, Human
cagugugggacccagacugua

SEQ ID NO: 78745 - RNA, 19 nt, Human
cauacucacaacaagacca

SEQ ID NO: 78746 - RNA, 19 nt, Human
caucucaaggcaucaacag

SEQ ID NO: 78747 - RNA, 21 nt, Human
caugguagguacucuagaacc

SEQ ID NO: 78748 - RNA, 24 nt, Human
ccaaucgccuaccuggccuacuca

SEQ ID NO: 78749 - RNA, 19 nt, Human
ccacccauccaggcucaac

SEQ ID NO: 78750 - RNA, 22 nt, Human
ccagccacaccuagccccaccu

SEQ ID NO: 78751 - RNA, 21 nt, Human
cccacccauccaccaacucca

SEQ ID NO: 78752 - RNA, 21 nt, Human
cccacccccuucaucucccca

SEQ ID NO: 78753 - RNA, 22 nt, Human
cccacguucuggcgagcacaac

SEQ ID NO: 78754 - RNA, 22 nt, Human
cccacucaucuaauggaauaca

SEQ ID NO: 78755 - RNA, 18 nt, Human
cccagccugcucagcucc

SEQ ID NO: 78756 - RNA, 20 nt, Human
cccaugcaaacaguguggcu

SEQ ID NO: 78757 - RNA, 19 nt, Human
ccccaaggacuccugaggc

SEQ ID NO: 78758 - RNA, 25 nt, Human
ccccaaggacuccugaggcaacccc

SEQ ID NO: 78759 - RNA, 23 nt, Human
ccccacccccuucaucuccccaa

SEQ ID NO: 78760 - RNA, 22 nt, Human
ccccagccacaccuagccccac

SEQ ID NO: 78761 - RNA, 20 nt, Human
ccccagcccuggaacgacua

SEQ ID NO: 78762 - RNA, 25 nt, Human
cccccaccccaacugcuugccacaa

SEQ ID NO: 78763 - RNA, 24 nt, Human
cccccagccacaccuagccccacc

SEQ ID NO: 78764 - RNA, 27 nt, Human
ccccccaccccaacugccggguccuuc

SEQ ID NO: 78765 - RNA, 18 nt, Human
ccccuccccucugugucc

SEQ ID NO: 78766 - RNA, 25 nt, Human
ccccucuccuccuacuuaaucuuug

SEQ ID NO: 78767 - RNA, 25 nt, Human
cccuaaacuugccaaaacauucccc

SEQ ID NO: 78768 - RNA, 21 nt, Human
cccuaaaucccacucaucuaa

SEQ ID NO: 78769 - RNA, 22 nt, Human
cccuacuuccgcuccuuccuug

SEQ ID NO: 78770 - RNA, 18 nt, Human
cccucuccuccuacuuaa

SEQ ID NO: 78771 - RNA, 20 nt, Human
cccucuguguccugcucacu

SEQ ID NO: 78772 - RNA, 19 nt, Human
ccgaaccaaagcccacaac

SEQ ID NO: 78773 - RNA, 24 nt, Human
ccucagggcugugaagcaaguucc

SEQ ID NO: 78774 - RNA, 23 nt, Human
ccucccaccucccccagcccugg

SEQ ID NO: 78775 - RNA, 20 nt, Human
ccucucccuaucaccugaga

SEQ ID NO: 78776 - RNA, 21 nt, Human
ccucucccuaucaccugagaa

SEQ ID NO: 78777 - RNA, 19 nt, Human
ccugagugggagaggaggg

SEQ ID NO: 78778 - RNA, 23 nt, Human
ccugcucacucuuccaaucgccu

SEQ ID NO: 78779 - RNA, 18 nt, Human
ccugcucagcuccccacc

SEQ ID NO: 78780 - RNA, 23 nt, Human
ccuggcccccagccacaccuagc

SEQ ID NO: 78781 - RNA, 19 nt, Human
cgugaucccucccaccucc

SEQ ID NO: 78782 - RNA, 21 nt, Human
cgugaucccucccaccucccc

SEQ ID NO: 78783 - RNA, 24 nt, Human
cuccacuucuuccaagggcauuuc

SEQ ID NO: 78784 - RNA, 22 nt, Human
cucccuaucaccugagaacccc

SEQ ID NO: 78785 - RNA, 24 nt, Human
cucuagaacccauaugccuggccc

SEQ ID NO: 78786 - RNA, 18 nt, Human
cucugcccauccuguucc

SEQ ID NO: 78787 - RNA, 22 nt, Human
cucuguguccugcucacucuuc

SEQ ID NO: 78788 - RNA, 22 nt, Human
cucuguucuguuccugcucucc

SEQ ID NO: 78789 - RNA, 23 nt, Human
cuggaguacccaucacccucaca

SEQ ID NO: 78790 - RNA, 24 nt, Human
cuggcccccagccacaccuagccc

SEQ ID NO: 78791 - RNA, 19 nt, Human
cugguggcaaggagccccc

SEQ ID NO: 78792 - RNA, 24 nt, Human
cuuacccugaaccccaaagguuuc

SEQ ID NO: 78793 - RNA, 21 nt, Human
cuucagagcagggcauuuugg

SEQ ID NO: 78794 - RNA, 25 nt, Human
cuucuuggccaagagcuaaucccaa

SEQ ID NO: 78795 - RNA, 18 nt, Human
cuugccaaaacauucccc

SEQ ID NO: 78796 - RNA, 21 nt, Human
gaaaccccucuccuccuacuu

SEQ ID NO: 78797 - RNA, 20 nt, Human
gaaaggagggguugggagga

SEQ ID NO: 78798 - RNA, 22 nt, Human
gaccaagugaaaaucuccaaga

SEQ ID NO: 78799 - RNA, 21 nt, Human
gaccaaguggcacaugcagcc

SEQ ID NO: 78800 - RNA, 19 nt, Human
gacuguauucuagaucagc

SEQ ID NO: 78801 - RNA, 22 nt, Human
gagcaagucagagaccccccac

SEQ ID NO: 78802 - RNA, 21 nt, Human
gagcccaggaggcagcagcaa

SEQ ID NO: 78803 - RNA, 24 nt, Human
gagugugcuccauaccuggggaag

SEQ ID NO: 78804 - RNA, 26 nt, Human
gcagaacugcucuucucuccaaagga

SEQ ID NO: 78805 - RNA, 27 nt, Human
gcagaacugcucuucucuccaaaggaa

SEQ ID NO: 78806 - RNA, 19 nt, Human
gcagccuaccaccuccccu

SEQ ID NO: 78807 - RNA, 21 nt, Human
gcccacccauccaccaacucc

SEQ ID NO: 78808 - RNA, 24 nt, Human
gccgaaccaaagcccacaacacag

SEQ ID NO: 78809 - RNA, 18 nt, Human
gccuacucagcucccuca

SEQ ID NO: 78810 - RNA, 19 nt, Human
gccugcucagcuccccacc

SEQ ID NO: 78811 - RNA, 18 nt, Human
ggaaacacuuuaggcacc

SEQ ID NO: 78812 - RNA, 20 nt, Human
ggacuccugaggcaaccccu

SEQ ID NO: 78813 - RNA, 19 nt, Human
ggagcugggagggagggag

SEQ ID NO: 78814 - RNA, 21 nt, Human
ggagggagggagagagggagc

SEQ ID NO: 78815 - RNA, 19 nt, Human
ggagggguugggaggaggg

SEQ ID NO: 78816 - RNA, 24 nt, Human
ggcgugaucccucccaccuccccc

SEQ ID NO: 78817 - RNA, 20 nt, Human
ggguagggugaagagugugc

SEQ ID NO: 78818 - RNA, 18 nt, Human
ggugcaggagcugggagg

SEQ ID NO: 78819 - RNA, 19 nt, Human
ggugcaggagcugggaggg

SEQ ID NO: 78820 - RNA, 21 nt, Human
gucccagagauuggaaacacu

SEQ ID NO: 78821 - RNA, 19 nt, Human
gugcaggagcugggaggga

SEQ ID NO: 78822 - RNA, 19 nt, Human
guuugagggcaaauugccc

SEQ ID NO: 78823 - RNA, 19 nt, Human
uaaaagucaaaugaacuug

SEQ ID NO: 78824 - RNA, 22 nt, Human
uaaagccgaaccaaagcccaca

SEQ ID NO: 78825 - RNA, 23 nt, Human
uaagacacagcacugguggcaag

SEQ ID NO: 78826 - RNA, 19 nt, Human
uaagacagcuacaagggga

SEQ ID NO: 78827 - RNA, 19 nt, Human
uaagccuccacccauccag

SEQ ID NO: 78828 - RNA, 23 nt, Human
uaauacgaucauuacauauuaca

SEQ ID NO: 78829 - RNA, 23 nt, Human
uaccaccuccccuagaaauacca

SEQ ID NO: 78830 - RNA, 24 nt, Human
uaccuggccuacucagcucccuca

SEQ ID NO: 78831 - RNA, 18 nt, Human
uagccccaccuggcccug

SEQ ID NO: 78832 - RNA, 18 nt, Human
ucaaaagaaaaagccaua

SEQ ID NO: 78833 - RNA, 25 nt, Human
ucaaaagcagaagucuggacucaac

SEQ ID NO: 78834 - RNA, 25 nt, Human
ucaacagcccugcccuucuaucaga

SEQ ID NO: 78835 - RNA, 21 nt, Human
ucacaacaagaccaaguggca

SEQ ID NO: 78836 - RNA, 21 nt, Human
ucagccuucuuggccaagagc

SEQ ID NO: 78837 - RNA, 18 nt, Human
ucaugugcccacaccuau

SEQ ID NO: 78838 - RNA, 25 nt, Human
uccaaagccuugccaaucacuuucu

SEQ ID NO: 78839 - RNA, 21 nt, Human
uccaccaacuccacuucuucc

SEQ ID NO: 78840 - RNA, 19 nt, Human
uccaccuuccucagggcug

SEQ ID NO: 78841 - RNA, 23 nt, Human
uccaggcucaacagcccugcccu

SEQ ID NO: 78842 - RNA, 21 nt, Human
uccauaccuggggaaggaagc

SEQ ID NO: 78843 - RNA, 24 nt, Human
ucccaccaccaccagauuugccag

SEQ ID NO: 78844 - RNA, 30 nt, Human
ucccagagauuggaaacacuuuaggcaccu

SEQ ID NO: 78845 - RNA, 22 nt, Human
uccccacccccuucaucucccc

SEQ ID NO: 78846 - RNA, 28 nt, Human
uccccuagaaauaccaugaaaaagugca

SEQ ID NO: 78847 - RNA, 21 nt, Human
ucccugacagaagagucucug

SEQ ID NO: 78848 - RNA, 19 nt, Human
ucccugcagcuccucuugg

SEQ ID NO: 78849 - RNA, 19 nt, Human
uccuggaguacccaucacc

SEQ ID NO: 78850 - RNA, 18 nt, Human
ucuagaggacugcgaguu

SEQ ID NO: 78851 - RNA, 23 nt, Human
ucucuaagccuugaggcaucagg

SEQ ID NO: 78852 - RNA, 19 nt, Human
ucucuccaaagccuugcca

SEQ ID NO: 78853 - RNA, 20 nt, Human
ucugaaauggucaucucaag

SEQ ID NO: 78854 - RNA, 20 nt, Human
ucugggguuucccuucaagc

SEQ ID NO: 78855 - RNA, 22 nt, Human
ugaaggaacaaggccagcugca

SEQ ID NO: 78856 - RNA, 23 nt, Human
ugagacacagugugggacccaga

SEQ ID NO: 78857 - RNA, 21 nt, Human
ugaucagugcucaggaccaca

SEQ ID NO: 78858 - RNA, 23 nt, Human
ugcagcccucucucaaaagcaga

SEQ ID NO: 78859 - RNA, 23 nt, Human
ugcagccuaccaccuccccuaga

SEQ ID NO: 78860 - RNA, 23 nt, Human
ugcauaaugcacaaggaaggggg

SEQ ID NO: 78861 - RNA, 21 nt, Human
ugccaagcaguuugaaaacca

SEQ ID NO: 78862 - RNA, 19 nt, Human
ugcucaggaccacaggcag

SEQ ID NO: 78863 - RNA, 19 nt, Human
uggaaagaagcagcagagc

SEQ ID NO: 78864 - RNA, 19 nt, Human
uggaaagugcagcagugag

SEQ ID NO: 78865 - RNA, 19 nt, Human
uggcaaggagcccccagcu

SEQ ID NO: 78866 - RNA, 21 nt, Human
uggcaaggagcccccagcugg

SEQ ID NO: 78867 - RNA, 18 nt, Human
uggccaagagcuaauccc

SEQ ID NO: 78868 - RNA, 18 nt, Human
uggcccccagccacaccu

SEQ ID NO: 78869 - RNA, 19 nt, Human
uggccuaaacaaagucccu

SEQ ID NO: 78870 - RNA, 20 nt, Human
uggcucuagaagagaguccc

SEQ ID NO: 78871 - RNA, 23 nt, Human
uggcuucaaauaaaucauaaaug

SEQ ID NO: 78872 - RNA, 18 nt, Human
ugggaaccauacucagcc

SEQ ID NO: 78873 - RNA, 20 nt, Human
ugggagggagggagagaggg

SEQ ID NO: 78874 - RNA, 21 nt, Human
uggggaaggaagcacagacuc

SEQ ID NO: 78875 - RNA, 22 nt, Human
uggggagugggauuaauaaucg

SEQ ID NO: 78876 - RNA, 19 nt, Human
uggggccuuucauccuccu

SEQ ID NO: 78877 - RNA, 18 nt, Human
uggugcaggagcugggag

SEQ ID NO: 78878 - RNA, 18 nt, Human
uguaagacagcuacaagg

SEQ ID NO: 78879 - RNA, 23 nt, Human
uguaagacagcuacaaggggagc

SEQ ID NO: 78880 - RNA, 19 nt, Human
ugugccccuaaacuugcca

SEQ ID NO: 78881 - RNA, 20 nt, Human
ugugccccuaaacuugccaa

SEQ ID NO: 78882 - RNA, 22 nt, Human
uuccaacuuuuuuucagcagca

SEQ ID NO: 78883 - RNA, 23 nt, Human
uucccugacagaagagucucugg

SEQ ID NO: 78884 - RNA, 24 nt, Human
uucuagaucagcacuuaugcccac

SEQ ID NO: 78885 - RNA, 19 nt, Human
uugccaaaacauuccccuc

SEQ ID NO: 78886 - RNA, 21 nt, Human
uuuaggcaccauugugccuga

SEQ ID NO: 78887 - RNA, 23 nt, Human
uuugucccuuugggcucuggaga

SEQ ID NO: 78888 - RNA, 19 nt, Human
uuuugguaaccuggccaug

SEQ ID NO: 78889 - RNA, 22 nt, Human
uuuuucagcagcaaaccccuua

SEQ ID NO: 78890 - RNA, 21 nt, Human
aagaggggguguauggguagg

SEQ ID NO: 78891 - RNA, 19 nt, Human
aauccaaccaaaaugcuua

SEQ ID NO: 78892 - RNA, 26 nt, Human
agaaugcuggggucagaguccuggga

SEQ ID NO: 78893 - RNA, 19 nt, Human
aucugcccccccauccccc

SEQ ID NO: 78894 - RNA, 23 nt, Human
augguacaaaaauaguuuauuac

SEQ ID NO: 78895 - RNA, 23 nt, Human
caaaaugcuuaauaauuuacauc

SEQ ID NO: 78896 - RNA, 23 nt, Human
caugaguccaagaucugcccccc

SEQ ID NO: 78897 - RNA, 19 nt, Human
ccccucugggcaggggggc

SEQ ID NO: 78898 - RNA, 21 nt, Human
cccucugggcaggggggcccc

SEQ ID NO: 78899 - RNA, 18 nt, Human
cccuggguccaccagcuc

SEQ ID NO: 78900 - RNA, 20 nt, Human
cccuggguccaccagcucug

SEQ ID NO: 78901 - RNA, 19 nt, Human
cggcccaccucuccccucc

SEQ ID NO: 78902 - RNA, 23 nt, Human
cggcccaccucuccccuccucag

SEQ ID NO: 78903 - RNA, 18 nt, Human
ggaggggaguggcuguuc

SEQ ID NO: 78904 - RNA, 25 nt, Human
ggcccaccucuccccuccucaguua

SEQ ID NO: 78905 - RNA, 20 nt, Human
gggcauggggccgccgggga

SEQ ID NO: 78906 - RNA, 18 nt, Human
gggcgaagucagaucuuc

SEQ ID NO: 78907 - RNA, 24 nt, Human
ggggggggggggggcgaagucaga

SEQ ID NO: 78908 - RNA, 19 nt, Human
gguagagaguggaggggag

SEQ ID NO: 78909 - RNA, 19 nt, Human
guggcuguucccugggucc

SEQ ID NO: 78910 - RNA, 19 nt, Human
ucagaguccugggagggag

SEQ ID NO: 78911 - RNA, 21 nt, Human
uccaagaucugcccccccauc

SEQ ID NO: 78912 - RNA, 22 nt, Human
uccaagaucugcccccccaucc

SEQ ID NO: 78913 - RNA, 19 nt, Human
uccuggucccgaagauggg

SEQ ID NO: 78914 - RNA, 22 nt, Human
ugagaaugcuggggucagaguc

SEQ ID NO: 78915 - RNA, 23 nt, Human
ugcucagaagaggggguguaugg

SEQ ID NO: 78916 - RNA, 22 nt, Human
uggcauuccggacagggacugg

SEQ ID NO: 78917 - RNA, 18 nt, Human
uucccuggguccaccagc

SEQ ID NO: 78918 - RNA, 25 nt, Human
aaaaaaauacaaauacacugaggca

SEQ ID NO: 78919 - RNA, 21 nt, Human
aaaaaaggcaccgugaggaca

SEQ ID NO: 78920 - RNA, 19 nt, Human
aaaagaaagcugaagacac

SEQ ID NO: 78921 - RNA, 18 nt, Human
aaaagaaccuaucuccuc

SEQ ID NO: 78922 - RNA, 25 nt, Human
aaacauauacauuccucauuuugca

SEQ ID NO: 78923 - RNA, 22 nt, Human
aaagaaccuaucuccuccucuc

SEQ ID NO: 78924 - RNA, 19 nt, Human
aaagccacaagauuuuuuc

SEQ ID NO: 78925 - RNA, 25 nt, Human
aaccaaacacucugacauuucucug

SEQ ID NO: 78926 - RNA, 26 nt, Human
aaccaaaugagcacucuaaaaugaga

SEQ ID NO: 78927 - RNA, 21 nt, Human
aaccuaucuccuccucucccc

SEQ ID NO: 78928 - RNA, 22 nt, Human
aaccuaucuccuccucucccca

SEQ ID NO: 78929 - RNA, 24 nt, Human
aagacaaaagaaccuaucuccucc

SEQ ID NO: 78930 - RNA, 22 nt, Human
aagcaugacgcagaaugggaug

SEQ ID NO: 78931 - RNA, 21 nt, Human
acccccaccacccccaacccc

SEQ ID NO: 78932 - RNA, 22 nt, Human
accuaucuccuccucuccccag

SEQ ID NO: 78933 - RNA, 22 nt, Human
acuuaaaaacuuuccucucuuc

SEQ ID NO: 78934 - RNA, 18 nt, Human
agaaaaagacaaaagaac

SEQ ID NO: 78935 - RNA, 19 nt, Human
agcgucucggauuuggagg

SEQ ID NO: 78936 - RNA, 24 nt, Human
agcuaugauuugcacuaguggaug

SEQ ID NO: 78937 - RNA, 18 nt, Human
agcugcugcggcucccag

SEQ ID NO: 78938 - RNA, 25 nt, Human
agggagaagacagaaaaagacaaaa

SEQ ID NO: 78939 - RNA, 20 nt, Human
agggauggugcacgcucgcc

SEQ ID NO: 78940 - RNA, 19 nt, Human
agguccucauaagcagagc

SEQ ID NO: 78941 - RNA, 22 nt, Human
aguccaaaauuuugcucaaaac

SEQ ID NO: 78942 - RNA, 22 nt, Human
aguccaaaauuuugcucaaaac

SEQ ID NO: 78943 - RNA, 22 nt, Human
agucccccaggccccgaccccc

SEQ ID NO: 78944 - RNA, 22 nt, Human
auacagaugcaauacuuaaaau

SEQ ID NO: 78945 - RNA, 18 nt, Human
aucuccuccucuccccag

SEQ ID NO: 78946 - RNA, 21 nt, Human
auggaagggauccucaaacac

SEQ ID NO: 78947 - RNA, 23 nt, Human
auuuggagguuccgguucgaggc

SEQ ID NO: 78948 - RNA, 19 nt, Human
auuuuauauauauauauau

SEQ ID NO: 78949 - RNA, 25 nt, Human
auuuucuccuuugcaaaagaaagcu

SEQ ID NO: 78950 - RNA, 26 nt, Human
caaaaaaauacaaauacacugaggca

SEQ ID NO: 78951 - RNA, 22 nt, Human
caaaagaaacaucuguucccac

SEQ ID NO: 78952 - RNA, 19 nt, Human
caaaagaaccuaucuccuc

SEQ ID NO: 78953 - RNA, 24 nt, Human
caacucgagauaggcaaagagaga

SEQ ID NO: 78954 - RNA, 18 nt, Human
cacagccaaacccugucu

SEQ ID NO: 78955 - RNA, 25 nt, Human
cacauaggagaagaagcaauaugau

SEQ ID NO: 78956 - RNA, 25 nt, Human
cacccccaacccccagcuaugauuu

SEQ ID NO: 78957 - RNA, 19 nt, Human
cacuacaucaugggaugaa

SEQ ID NO: 78958 - RNA, 23 nt, Human
cagucccccaggccccgaccccc

SEQ ID NO: 78959 - RNA, 26 nt, Human
ccaaccaaaagcccucaaagccacaa

SEQ ID NO: 78960 - RNA, 21 nt, Human
ccaccacccccaacccccagc

SEQ ID NO: 78961 - RNA, 29 nt, Human
ccaggccccgacccccaccacccccaacc

SEQ ID NO: 78962 - RNA, 23 nt, Human
cccaagugccagucacucaaucc

SEQ ID NO: 78963 - RNA, 26 nt, Human
cccacaaaacauauacauuccucauu

SEQ ID NO: 78964 - RNA, 21 nt, Human
cccagucccccaggccccgac

SEQ ID NO: 78965 - RNA, 21 nt, Human
ccccaccacccccaaccccca

SEQ ID NO: 78966 - RNA, 23 nt, Human
ccccaccacccccaacccccagc

SEQ ID NO: 78967 - RNA, 21 nt, Human
cccccaggccccgacccccac

SEQ ID NO: 78968 - RNA, 26 nt, Human
cccccaggccccgacccccaccaccu

SEQ ID NO: 78969 - RNA, 18 nt, Human
ccccgacccccaccaccc

SEQ ID NO: 78970 - RNA, 25 nt, Human
ccccgacccccaccacccccaaccc

SEQ ID NO: 78971 - RNA, 21 nt, Human
ccccuggccaaccaaaagccc

SEQ ID NO: 78972 - RNA, 24 nt, Human
cccgacccccaccacccccaaccc

SEQ ID NO: 78973 - RNA, 27 nt, Human
cccgacccccaccacccccaaccccca

SEQ ID NO: 78974 - RNA, 23 nt, Human
ccgacccccaccacccccaaccc

SEQ ID NO: 78975 - RNA, 20 nt, Human
ccgugaaaaaaggcaccgug

SEQ ID NO: 78976 - RNA, 21 nt, Human
cgacccccaccacccccaacc

SEQ ID NO: 78977 - RNA, 22 nt, Human
cgacccccaccacccccaaccc

SEQ ID NO: 78978 - RNA, 23 nt, Human
cgacccccaccacccccaacccc

SEQ ID NO: 78979 - RNA, 19 nt, Human
cgagauaggcaaagagaga

SEQ ID NO: 78980 - RNA, 23 nt, Human
cggcucccagucccccaggcccc

SEQ ID NO: 78981 - RNA, 19 nt, Human
cguuguacggguauauaca

SEQ ID NO: 78982 - RNA, 21 nt, Human
cucaaacacuucuggaauacc

SEQ ID NO: 78983 - RNA, 18 nt, Human
cuccuccucuccccagcc

SEQ ID NO: 78984 - RNA, 21 nt, Human
cucgagauaggcaaagagaga

SEQ ID NO: 78985 - RNA, 19 nt, Human
cucuuugacaacauacuga

SEQ ID NO: 78986 - RNA, 27 nt, Human
cuggagggaaggaaguggggaagggag

SEQ ID NO: 78987 - RNA, 23 nt, Human
cuggccaaccaaaagcccucaaa

SEQ ID NO: 78988 - RNA, 18 nt, Human
cugguguccggccuuucc

SEQ ID NO: 78989 - RNA, 22 nt, Human
cuuaaaaacuuuccucucuucc

SEQ ID NO: 78990 - RNA, 23 nt, Human
cuuaaaaacuuuccucucuuccu

SEQ ID NO: 78991 - RNA, 24 nt, Human
cuucuugcaucaccacuucuaaga

SEQ ID NO: 78992 - RNA, 23 nt, Human
gaaacaucuguucccacaaaaca

SEQ ID NO: 78993 - RNA, 21 nt, Human
gacacagccaaacccugucuc

SEQ ID NO: 78994 - RNA, 18 nt, Human
gacacaugggagugggag

SEQ ID NO: 78995 - RNA, 22 nt, Human
gacccccaccacccccaacccc

SEQ ID NO: 78996 - RNA, 21 nt, Human
gacgcagaaugggaugagaca

SEQ ID NO: 78997 - RNA, 20 nt, Human
gagcacucuaaaaugagagg

SEQ ID NO: 78998 - RNA, 22 nt, Human
gaggacuuggugucagcucucc

SEQ ID NO: 78999 - RNA, 21 nt, Human
gaguaguuauaacacaagcau

SEQ ID NO: 79000 - RNA, 19 nt, Human
gccccgacccccaccaccc

SEQ ID NO: 79001 - RNA, 21 nt, Human
gcgguaaugcaguuuagacac

SEQ ID NO: 79002 - RNA, 23 nt, Human
ggagaagacagaaaaagacaaaa

SEQ ID NO: 79003 - RNA, 21 nt, Human
gggagcugcugcggcucccag

SEQ ID NO: 79004 - RNA, 22 nt, Human
ggucuuuaccaaacuucaagga

SEQ ID NO: 79005 - RNA, 18 nt, Human
guggcaggggaggacuug

SEQ ID NO: 79006 - RNA, 21 nt, Human
guggcaggggaggacuuggug

SEQ ID NO: 79007 - RNA, 22 nt, Human
guuagugugugcaugugaguga

SEQ ID NO: 79008 - RNA, 23 nt, Human
uaaaaacuuuccucucuuccuuc

SEQ ID NO: 79009 - RNA, 24 nt, Human
uaaaauauucucuuaagugcucuu

SEQ ID NO: 79010 - RNA, 26 nt, Human
uaacacaagcaugacgcagaauggga

SEQ ID NO: 79011 - RNA, 27 nt, Human
uaacacaagcaugacgcagaaugggau

SEQ ID NO: 79012 - RNA, 23 nt, Human
uaaccaaacacucugacauuucu

SEQ ID NO: 79013 - RNA, 25 nt, Human
uaacucggucuuuaccaaacuucaa

SEQ ID NO: 79014 - RNA, 25 nt, Human
uaagaaccccaguucuaagaaucaa

SEQ ID NO: 79015 - RNA, 22 nt, Human
uacaaacugaaaacuagaacaa

SEQ ID NO: 79016 - RNA, 24 nt, Human
uacaacucugccauauauuccuuc

SEQ ID NO: 79017 - RNA, 22 nt, Human
uacacauaggagaagaagcaau

SEQ ID NO: 79018 - RNA, 21 nt, Human
uacaguauccuuuggguagau

SEQ ID NO: 79019 - RNA, 20 nt, Human
uauaacacaagcaugacgca

SEQ ID NO: 79020 - RNA, 26 nt, Human
uauauuuauuuuauauauauauauau

SEQ ID NO: 79021 - RNA, 21 nt, Human
uaucuccuccucuccccagcc

SEQ ID NO: 79022 - RNA, 22 nt, Human
uaucuccuccucuccccagccc

SEQ ID NO: 79023 - RNA, 23 nt, Human
ucaacagagcucaauucucggaa

SEQ ID NO: 79024 - RNA, 20 nt, Human
ucacucaaucccaucggcuc

SEQ ID NO: 79025 - RNA, 19 nt, Human
ucccaaagagaguuuaguu

SEQ ID NO: 79026 - RNA, 20 nt, Human
ucccugugucugccuacacu

SEQ ID NO: 79027 - RNA, 25 nt, Human
uccucauaagcagagcgucucggau

SEQ ID NO: 79028 - RNA, 22 nt, Human
ucugccauauauuccuucaccu

SEQ ID NO: 79029 - RNA, 18 nt, Human
ugaaaaaaggcaccguga

SEQ ID NO: 79030 - RNA, 18 nt, Human
ugaagacacaugggagug

SEQ ID NO: 79031 - RNA, 21 nt, Human
ugaagucuugucuuuuaaaag

SEQ ID NO: 79032 - RNA, 18 nt, Human
ugagaaggggcuggagac

SEQ ID NO: 79033 - RNA, 21 nt, Human
ugcacuaguggaugaaagagg

SEQ ID NO: 79034 - RNA, 21 nt, Human
ugccccuggccaaccaaaagc

SEQ ID NO: 79035 - RNA, 23 nt, Human
ugcuuugacauauaaaaugauuu

SEQ ID NO: 79036 - RNA, 23 nt, Human
uggagggaaggaaguggggaagg

SEQ ID NO: 79037 - RNA, 20 nt, Human
uggugcacgcucgcccauca

SEQ ID NO: 79038 - RNA, 22 nt, Human
uggugucagcucuccgagauuu

SEQ ID NO: 79039 - RNA, 19 nt, Human
ugucagcucuccgagauuu

SEQ ID NO: 79040 - RNA, 19 nt, Human
ugugagugaguggggacug

SEQ ID NO: 79041 - RNA, 22 nt, Human
uguuacaguauccuuuggguag

SEQ ID NO: 79042 - RNA, 22 nt, Human
uguucccacaaaacauauacau

SEQ ID NO: 79043 - RNA, 21 nt, Human
uucacaguccaaaauuuugcu

SEQ ID NO: 79044 - RNA, 21 nt, Human
uucacaguccaaaauuuugcu

SEQ ID NO: 79045 - RNA, 23 nt, Human
uuccgguucgaggcucgaggggc

SEQ ID NO: 79046 - RNA, 24 nt, Human
uugcaaaagaaagcugaagacaca

SEQ ID NO: 79047 - RNA, 23 nt, Human
uuguacagcuauauuuuacaacg

SEQ ID NO: 79048 - RNA, 22 nt, Human
uuuuuuuguucuuuuuguuuuu

SEQ ID NO: 79049 - RNA, 23 nt, Human
aaaaacaacaaaacccaugaccc

SEQ ID NO: 79050 - RNA, 25 nt, Human
aaaaacaacaaaacccaugacccca

SEQ ID NO: 79051 - RNA, 22 nt, Human
aaaaauucuugaaaggggaaaa

SEQ ID NO: 79052 - RNA, 22 nt, Human
aaaacaacaaaacccaugaccc

SEQ ID NO: 79053 - RNA, 20 nt, Human
aaaacccaugaccccacccc

SEQ ID NO: 79054 - RNA, 21 nt, Human
aaaacccaugaccccaccccc

SEQ ID NO: 79055 - RNA, 19 nt, Human
aaaaggucuuuaugccucu

SEQ ID NO: 79056 - RNA, 25 nt, Human
aaacagagaaggaaauaaauaucca

SEQ ID NO: 79057 - RNA, 24 nt, Human
aaaccauaucuacugauggaauaa

SEQ ID NO: 79058 - RNA, 24 nt, Human
aaacccaugaccccaccccacccc

SEQ ID NO: 79059 - RNA, 18 nt, Human
aaacuugaaacguuagua

SEQ ID NO: 79060 - RNA, 23 nt, Human
aacccaugaccccaccccacccc

SEQ ID NO: 79061 - RNA, 21 nt, Human
aacugacugccuaaggggcaa

SEQ ID NO: 79062 - RNA, 21 nt, Human
aagauggaguuucgcugcaaa

SEQ ID NO: 79063 - RNA, 19 nt, Human
aagcagugauggggguggu

SEQ ID NO: 79064 - RNA, 22 nt, Human
aaggcacaaaaaaagaaagcgg

SEQ ID NO: 79065 - RNA, 18 nt, Human
aagggcuuugcacgucca

SEQ ID NO: 79066 - RNA, 28 nt, Human
aauaaauaagugaaaaauuauacugcug

SEQ ID NO: 79067 - RNA, 21 nt, Human
aauaugcaccaauuagccccc

SEQ ID NO: 79068 - RNA, 19 nt, Human
aaugaaacaauuguacauu

SEQ ID NO: 79069 - RNA, 24 nt, Human
acaaaacccaugaccccaccccuu

SEQ ID NO: 79070 - RNA, 23 nt, Human
acacacacacacacacacacaca

SEQ ID NO: 79071 - RNA, 23 nt, Human
acacacacacacacacacacaca

SEQ ID NO: 79072 - RNA, 23 nt, Human
acacacacacacacacacacagu

SEQ ID NO: 79073 - RNA, 23 nt, Human
acacacacacacacacacacaua

SEQ ID NO: 79074 - RNA, 23 nt, Human
acacacacacacacacacauaca

SEQ ID NO: 79075 - RNA, 23 nt, Human
acacacacacacacauacacaca

SEQ ID NO: 79076 - RNA, 25 nt, Human
acacacacacacacauacacacaca

SEQ ID NO: 79077 - RNA, 23 nt, Human
acacacacacauacacacacaca

SEQ ID NO: 79078 - RNA, 29 nt, Human
acacaguucucaacaaaacugacugccuu

SEQ ID NO: 79079 - RNA, 29 nt, Human
acacgcacacacucucacacacacacaca

SEQ ID NO: 79080 - RNA, 33 nt, Human
acacgcacacacucucacacacacacacacagu

SEQ ID NO: 79081 - RNA, 21 nt, Human
acagccuuccggguugugggu

SEQ ID NO: 79082 - RNA, 21 nt, Human
acaguggaaagccccgccaaa

SEQ ID NO: 79083 - RNA, 22 nt, Human
accaauuagcccccaaaaacaa

SEQ ID NO: 79084 - RNA, 18 nt, Human
accacagagacucucgac

SEQ ID NO: 79085 - RNA, 22 nt, Human
accccaccccacccccaguaac

SEQ ID NO: 79086 - RNA, 22 nt, Human
accccacccccaguaacacaca

SEQ ID NO: 79087 - RNA, 24 nt, Human
accccacccccaguaacacacaac

SEQ ID NO: 79088 - RNA, 23 nt, Human
acccucagaaacucuuagaaaau

SEQ ID NO: 79089 - RNA, 18 nt, Human
accugcgccaacuccccu

SEQ ID NO: 79090 - RNA, 23 nt, Human
acgcacacacucucacacacaca

SEQ ID NO: 79091 - RNA, 31 nt, Human
acgcacacacucucacacacacacacacaca

SEQ ID NO: 79092 - RNA, 22 nt, Human
agaaaauuccaagggcuuugca

SEQ ID NO: 79093 - RNA, 22 nt, Human
agcagcaacacaaauggaaucc

SEQ ID NO: 79094 - RNA, 18 nt, Human
agcccuugaggccacggg

SEQ ID NO: 79095 - RNA, 19 nt, Human
agccugagaauaggaaagc

SEQ ID NO: 79096 - RNA, 18 nt, Human
aggaaggugcuggugcca

SEQ ID NO: 79097 - RNA, 19 nt, Human
aggcugcaggugccgaggg

SEQ ID NO: 79098 - RNA, 22 nt, Human
aggcuggggcgucgggggaggc

SEQ ID NO: 79099 - RNA, 21 nt, Human
agggaaggaagcacaucggau

SEQ ID NO: 79100 - RNA, 23 nt, Human
agggaaggaagcacaucggauuu

SEQ ID NO: 79101 - RNA, 22 nt, Human
agggaggagagcggugaguagg

SEQ ID NO: 79102 - RNA, 19 nt, Human
auauccaaauucaucucuc

SEQ ID NO: 79103 - RNA, 19 nt, Human
augaccccaccccaccccc

SEQ ID NO: 79104 - RNA, 27 nt, Human
caaaaacaacaaaacccaugaccccac

SEQ ID NO: 79105 - RNA, 23 nt, Human
caaaacccaugaccccaccccac

SEQ ID NO: 79106 - RNA, 21 nt, Human
caacaaaacccaugaccccac

SEQ ID NO: 79107 - RNA, 22 nt, Human
caacacaccaaaaaaaaaaaaa

SEQ ID NO: 79108 - RNA, 23 nt, Human
caacacaccaaaaaaaaaaaaaa

SEQ ID NO: 79109 - RNA, 18 nt, Human
caacucaaagggagucag

SEQ ID NO: 79110 - RNA, 24 nt, Human
cacaaaaaaagaaagcggaaggaa

SEQ ID NO: 79111 - RNA, 24 nt, Human
cacaaauggaauccuggcuuccga

SEQ ID NO: 79112 - RNA, 20 nt, Human
cacacacaaagcccggggcc

SEQ ID NO: 79113 - RNA, 20 nt, Human
cacacacacacacacacaca

SEQ ID NO: 79114 - RNA, 20 nt, Human
cacacacacacacacacaca

SEQ ID NO: 79115 - RNA, 20 nt, Human
cacacacacacacacacaca

SEQ ID NO: 79116 - RNA, 20 nt, Human
cacacacacacacacacaca

SEQ ID NO: 79117 - RNA, 20 nt, Human
cacacacacacacacacaca

SEQ ID NO: 79118 - RNA, 22 nt, Human
cacacacacacacacacacaca

SEQ ID NO: 79119 - RNA, 22 nt, Human
cacacacacacacacacacaca

SEQ ID NO: 79120 - RNA, 26 nt, Human
cacacacacacacacacacacacaca

SEQ ID NO: 79121 - RNA, 26 nt, Human
cacacacacacacacacacacacaca

SEQ ID NO: 79122 - RNA, 25 nt, Human
cacacacacacacacacacacauac

SEQ ID NO: 79123 - RNA, 22 nt, Human
cacacacacacacacacacaua

SEQ ID NO: 79124 - RNA, 26 nt, Human
cacacacacacacacacacauacaca

SEQ ID NO: 79125 - RNA, 20 nt, Human
cacacacacacacacacaua

SEQ ID NO: 79126 - RNA, 19 nt, Human
cacacacacacacacauac

SEQ ID NO: 79127 - RNA, 24 nt, Human
cacacacacacauacacacacaca

SEQ ID NO: 79128 - RNA, 32 nt, Human
cacacacacauacacacacacaaagcccggug

SEQ ID NO: 79129 - RNA, 22 nt, Human
cacacacucucacacacacaca

SEQ ID NO: 79130 - RNA, 19 nt, Human
cacacgcacacacucucac

SEQ ID NO: 79131 - RNA, 19 nt, Human
cacacgcacacacucucac

SEQ ID NO: 79132 - RNA, 23 nt, Human
caccaauuagcccccaaaaacaa

SEQ ID NO: 79133 - RNA, 18 nt, Human
caccacccuagaggaauc

SEQ ID NO: 79134 - RNA, 23 nt, Human
cacccccaguaacacacaacuca

SEQ ID NO: 79135 - RNA, 23 nt, Human
caccugcgccaacuccccuugcc

SEQ ID NO: 79136 - RNA, 21 nt, Human
cacuccugagcugucagcccc

SEQ ID NO: 79137 - RNA, 31 nt, Human
cacucucacacacacacacacacacacacag

SEQ ID NO: 79138 - RNA, 21 nt, Human
cagaggucaccucaagggcac

SEQ ID NO: 79139 - RNA, 22 nt, Human
cagccgccgcccgaaccaaacc

SEQ ID NO: 79140 - RNA, 18 nt, Human
cagccuuccggguugugg

SEQ ID NO: 79141 - RNA, 20 nt, Human
cagcugccccugcccagccc

SEQ ID NO: 79142 - RNA, 20 nt, Human
caggacacaguucucaacaa

SEQ ID NO: 79143 - RNA, 22 nt, Human
cagggacucuuccucccgcccc

SEQ ID NO: 79144 - RNA, 18 nt, Human
cagucagccagagaagcc

SEQ ID NO: 79145 - RNA, 21 nt, Human
cagucccuuaaagguuugagu

SEQ ID NO: 79146 - RNA, 22 nt, Human
cagugauggggguggugguggu

SEQ ID NO: 79147 - RNA, 27 nt, Human
cauacacacacacaaagcccggggccg

SEQ ID NO: 79148 - RNA, 20 nt, Human
caucggauuuuugcagucuu

SEQ ID NO: 79149 - RNA, 21 nt, Human
caucggauuuuugcagucuug

SEQ ID NO: 79150 - RNA, 23 nt, Human
caugaccccaccccacccccagu

SEQ ID NO: 79151 - RNA, 25 nt, Human
cauuccaaaccaugacaccguuugc

SEQ ID NO: 79152 - RNA, 25 nt, Human
ccaaaaacaacaaaacccaugaccc

SEQ ID NO: 79153 - RNA, 24 nt, Human
ccaauuagcccccaaaaacaacaa

SEQ ID NO: 79154 - RNA, 21 nt, Human
ccagaggaccacgauuucacc

SEQ ID NO: 79155 - RNA, 20 nt, Human
ccagcccagcugccccugcc

SEQ ID NO: 79156 - RNA, 22 nt, Human
ccagccugauccaaggggccga

SEQ ID NO: 79157 - RNA, 18 nt, Human
ccagcugccccugcccag

SEQ ID NO: 79158 - RNA, 18 nt, Human
ccaggcagaccacagaga

SEQ ID NO: 79159 - RNA, 19 nt, Human
ccaguccuaaacgccccaa

SEQ ID NO: 79160 - RNA, 19 nt, Human
cccaaaaacaacaaaaccc

SEQ ID NO: 79161 - RNA, 21 nt, Human
cccaaaaacaacaaaacccau

SEQ ID NO: 79162 - RNA, 23 nt, Human
cccaaaaacaacaaaacccauga

SEQ ID NO: 79163 - RNA, 20 nt, Human
cccaaaaacagagaaggaaa

SEQ ID NO: 79164 - RNA, 22 nt, Human
cccaccccacccccaguaacac

SEQ ID NO: 79165 - RNA, 23 nt, Human
cccaccccacccccaguaacaca

SEQ ID NO: 79166 - RNA, 23 nt, Human
cccaccccacccccaguaacacc

SEQ ID NO: 79167 - RNA, 22 nt, Human
cccacccccaguaacacacaac

SEQ ID NO: 79168 - RNA, 21 nt, Human
cccagccugauccaaggggcc

SEQ ID NO: 79169 - RNA, 18 nt, Human
cccagcugccccugccca

SEQ ID NO: 79170 - RNA, 23 nt, Human
cccaugaccccaccccaccccca

SEQ ID NO: 79171 - RNA, 18 nt, Human
ccccaaaaacaacaaaac

SEQ ID NO: 79172 - RNA, 19 nt, Human
ccccaacaccugcgcgucc

SEQ ID NO: 79173 - RNA, 30 nt, Human
ccccaacaccugcgcguccuugggcccugg

SEQ ID NO: 79174 - RNA, 20 nt, Human
ccccaccccacccccaguaa

SEQ ID NO: 79175 - RNA, 19 nt, Human
cccccaaaaacaacaaaac

SEQ ID NO: 79176 - RNA, 23 nt, Human
cccccaaaaacaacaaaacccau

SEQ ID NO: 79177 - RNA, 21 nt, Human
cccccgggccucgcgucgccc

SEQ ID NO: 79178 - RNA, 20 nt, Human
ccccgccaaaaagcguuccu

SEQ ID NO: 79179 - RNA, 25 nt, Human
ccccgcccccuggcucgaagcugaa

SEQ ID NO: 79180 - RNA, 20 nt, Human
ccccgggccucgcgucgccc

SEQ ID NO: 79181 - RNA, 19 nt, Human
cccgccugccuccccaagg

SEQ ID NO: 79182 - RNA, 21 nt, Human
cccuggugccuggugcuuggg

SEQ ID NO: 79183 - RNA, 23 nt, Human
cccuugaggccacggggccugau

SEQ ID NO: 79184 - RNA, 19 nt, Human
ccgcagcgcccccgggccu

SEQ ID NO: 79185 - RNA, 18 nt, Human
ccgccgccgccggagugc

SEQ ID NO: 79186 - RNA, 18 nt, Human
ccgccgccggagugcggc

SEQ ID NO: 79187 - RNA, 23 nt, Human
ccgcgcgccuggcccagcgcaag

SEQ ID NO: 79188 - RNA, 24 nt, Human
ccgcggccaccgcagcgcccccgg

SEQ ID NO: 79189 - RNA, 21 nt, Human
ccggccacacucgcgcccgcc

SEQ ID NO: 79190 - RNA, 21 nt, Human
ccggucugcggggcgcggggg

SEQ ID NO: 79191 - RNA, 23 nt, Human
ccuagaggaaucgguccacagcc

SEQ ID NO: 79192 - RNA, 23 nt, Human
ccucaccugcgccaacuccccuu

SEQ ID NO: 79193 - RNA, 24 nt, Human
ccucaccugcgccaacuccccuug

SEQ ID NO: 79194 - RNA, 18 nt, Human
cgccccggacgcccuccc

SEQ ID NO: 79195 - RNA, 20 nt, Human
cgccggguccaugcucgcgc

SEQ ID NO: 79196 - RNA, 20 nt, Human
cgcgcacagacacucgcacu

SEQ ID NO: 79197 - RNA, 18 nt, Human
cgcgcggugggggcgggg

SEQ ID NO: 79198 - RNA, 21 nt, Human
cggcggggagacggaggcugg

SEQ ID NO: 79199 - RNA, 19 nt, Human
cgggccucgcgucgcccag

SEQ ID NO: 79200 - RNA, 18 nt, Human
cgggucucuugacuucuc

SEQ ID NO: 79201 - RNA, 19 nt, Human
cgucgggggaggcaaaggg

SEQ ID NO: 79202 - RNA, 21 nt, Human
cucacacacacacacacacac

SEQ ID NO: 79203 - RNA, 22 nt, Human
cucacccucagaaacucuuaga

SEQ ID NO: 79204 - RNA, 18 nt, Human
cucccagccuccccggcc

SEQ ID NO: 79205 - RNA, 18 nt, Human
cuccgcgccgcggccacc

SEQ ID NO: 79206 - RNA, 18 nt, Human
cuggccccaggcuuuucc

SEQ ID NO: 79207 - RNA, 19 nt, Human
cuggccccaggcuuuuccu

SEQ ID NO: 79208 - RNA, 21 nt, Human
cuggccccaggcuuuuccuuu

SEQ ID NO: 79209 - RNA, 18 nt, Human
cuguacaacacaccaaaa

SEQ ID NO: 79210 - RNA, 21 nt, Human
gaacaguggaaagccccgcca

SEQ ID NO: 79211 - RNA, 21 nt, Human
gacgcccaguccuaaacgccc

SEQ ID NO: 79212 - RNA, 21 nt, Human
gagaagugacgccguucuggg

SEQ ID NO: 79213 - RNA, 20 nt, Human
gagcacagcgagugcccagc

SEQ ID NO: 79214 - RNA, 20 nt, Human
gaggccggccaucaaggcca

SEQ ID NO: 79215 - RNA, 20 nt, Human
gaggggugcagggugggugg

SEQ ID NO: 79216 - RNA, 19 nt, Human
gauccugccucuccggggc

SEQ ID NO: 79217 - RNA, 22 nt, Human
gauguaagaaccaccaggauac

SEQ ID NO: 79218 - RNA, 23 nt, Human
gcaagcccgggcggcagcugcac

SEQ ID NO: 79219 - RNA, 22 nt, Human
gcaauagagaggaagugccaga

SEQ ID NO: 79220 - RNA, 18 nt, Human
gcacagacacucgcacuc

SEQ ID NO: 79221 - RNA, 23 nt, Human
gcaggacacaguucucaacaaaa

SEQ ID NO: 79222 - RNA, 20 nt, Human
gcaguaaagaaagcuuagga

SEQ ID NO: 79223 - RNA, 19 nt, Human
gcagugauggggguggugg

SEQ ID NO: 79224 - RNA, 18 nt, Human
gcccaguccuaaacgccc

SEQ ID NO: 79225 - RNA, 22 nt, Human
gcccgaaccaaaccaagagggc

SEQ ID NO: 79226 - RNA, 20 nt, Human
gcccuggugccuggugcuuc

SEQ ID NO: 79227 - RNA, 20 nt, Human
gccgccgcccgaaccaaacc

SEQ ID NO: 79228 - RNA, 21 nt, Human
gccggucugcggggcgcgggg

SEQ ID NO: 79229 - RNA, 18 nt, Human
gccgugguggggcccagc

SEQ ID NO: 79230 - RNA, 18 nt, Human
gccgugguggggcccagc

SEQ ID NO: 79231 - RNA, 22 nt, Human
gcggggagacggaggcugggga

SEQ ID NO: 79232 - RNA, 20 nt, Human
ggagaaagcagugauggggg

SEQ ID NO: 79233 - RNA, 20 nt, Human
ggagcuccuucgcuccaccc

SEQ ID NO: 79234 - RNA, 25 nt, Human
ggagcuccuucgcuccacccugccu

SEQ ID NO: 79235 - RNA, 19 nt, Human
ggagggaggggagauugcg

SEQ ID NO: 79236 - RNA, 18 nt, Human
ggcagggaggagagcggu

SEQ ID NO: 79237 - RNA, 19 nt, Human
ggcauguucuggggaugag

SEQ ID NO: 79238 - RNA, 21 nt, Human
ggcgauaaugaacauuccaaa

SEQ ID NO: 79239 - RNA, 19 nt, Human
ggcgcuuugccuggcgugg

SEQ ID NO: 79240 - RNA, 21 nt, Human
gggagaaagcagugauggggg

SEQ ID NO: 79241 - RNA, 18 nt, Human
gggggugguggugguggg

SEQ ID NO: 79242 - RNA, 18 nt, Human
gggguggugguggugggg

SEQ ID NO: 79243 - RNA, 23 nt, Human
gggugcaggguggguggggggca

SEQ ID NO: 79244 - RNA, 23 nt, Human
gggugcggacacgcgcgcugacc

SEQ ID NO: 79245 - RNA, 21 nt, Human
guagguucugcgccaggaugc

SEQ ID NO: 79246 - RNA, 21 nt, Human
gugcagggcugcuggcgcuuu

SEQ ID NO: 79247 - RNA, 22 nt, Human
gugcccagccugauccaagggg

SEQ ID NO: 79248 - RNA, 22 nt, Human
guggaaggccuucuuggccagc

SEQ ID NO: 79249 - RNA, 20 nt, Human
guggggggcagcggcucgag

SEQ ID NO: 79250 - RNA, 20 nt, Human
guggugggggcaauagagag

SEQ ID NO: 79251 - RNA, 22 nt, Human
uaaaaaaaaaauaagagccuca

SEQ ID NO: 79252 - RNA, 25 nt, Human
uaaagaguuuucucagcaaaagcuc

SEQ ID NO: 79253 - RNA, 23 nt, Human
uacaaaccauaucuacugaugga

SEQ ID NO: 79254 - RNA, 23 nt, Human
uacagcagcaacacaaauggaau

SEQ ID NO: 79255 - RNA, 19 nt, Human
uagcccccaaaaacaacaa

SEQ ID NO: 79256 - RNA, 23 nt, Human
uaggaaggugcuggugccaggca

SEQ ID NO: 79257 - RNA, 22 nt, Human
uaguucuguucgcacccaagag

SEQ ID NO: 79258 - RNA, 21 nt, Human
ucacacacacacacacacaca

SEQ ID NO: 79259 - RNA, 22 nt, Human
ucagagucagaacagccugaga

SEQ ID NO: 79260 - RNA, 21 nt, Human
uccaagggcuuugcacgucca

SEQ ID NO: 79261 - RNA, 21 nt, Human
ucccuuaaaaaaaaaauaaga

SEQ ID NO: 79262 - RNA, 21 nt, Human
uccgcgccgcggccaccgcag

SEQ ID NO: 79263 - RNA, 22 nt, Human
uccugagcugucagccccgccu

SEQ ID NO: 79264 - RNA, 18 nt, Human
uccuggggcagggaggag

SEQ ID NO: 79265 - RNA, 19 nt, Human
uccuugggcccuggugccu

SEQ ID NO: 79266 - RNA, 21 nt, Human
ucuacugauggaauaaauaag

SEQ ID NO: 79267 - RNA, 19 nt, Human
ucucaacaaaacugacugc

SEQ ID NO: 79268 - RNA, 21 nt, Human
ucucacacacacacacacaca

SEQ ID NO: 79269 - RNA, 21 nt, Human
ucucugguggcccgcggcccu

SEQ ID NO: 79270 - RNA, 19 nt, Human
ucugcgccaggaugcagga

SEQ ID NO: 79271 - RNA, 21 nt, Human
ucugcggggcgcggggggguc

SEQ ID NO: 79272 - RNA, 20 nt, Human
ucuggagguaacgccgccuc

SEQ ID NO: 79273 - RNA, 21 nt, Human
ucuggagguaacgccgccucg

SEQ ID NO: 79274 - RNA, 22 nt, Human
ucugggucuucuuggauuugca

SEQ ID NO: 79275 - RNA, 19 nt, Human
ucuguggugggggggaggg

SEQ ID NO: 79276 - RNA, 23 nt, Human
ucuguucgcacccaagaggaauc

SEQ ID NO: 79277 - RNA, 24 nt, Human
ugaaaugaaacaauuguacauugu

SEQ ID NO: 79278 - RNA, 19 nt, Human
ugacaccguuugcuaaugg

SEQ ID NO: 79279 - RNA, 19 nt, Human
ugacucuaacucuacggaa

SEQ ID NO: 79280 - RNA, 24 nt, Human
ugacucuaacucuacggaaucugg

SEQ ID NO: 79281 - RNA, 19 nt, Human
ugagcugucagccccgccu

SEQ ID NO: 79282 - RNA, 18 nt, Human
ugaguguuuugcuucaca

SEQ ID NO: 79283 - RNA, 20 nt, Human
ugaugggggugguggugguc

SEQ ID NO: 79284 - RNA, 23 nt, Human
ugauggggguggugguggugggg

SEQ ID NO: 79285 - RNA, 21 nt, Human
ugauuugaaauuuuuauuuuc

SEQ ID NO: 79286 - RNA, 19 nt, Human
ugcaaguuucuugcggguc

SEQ ID NO: 79287 - RNA, 21 nt, Human
ugcacuugguaaacuugaaac

SEQ ID NO: 79288 - RNA, 21 nt, Human
ugcccagccugauccaagggg

SEQ ID NO: 79289 - RNA, 21 nt, Human
ugccccugcccagcccccagc

SEQ ID NO: 79290 - RNA, 21 nt, Human
ugcccugggagcccuugaggc

SEQ ID NO: 79291 - RNA, 24 nt, Human
ugcccugggagcccuugaggccac

SEQ ID NO: 79292 - RNA, 20 nt, Human
ugccuaaggucccccugcac

SEQ ID NO: 79293 - RNA, 19 nt, Human
ugcgccaacuccccuugcc

SEQ ID NO: 79294 - RNA, 21 nt, Human
ugcgucucuccuuucuggagg

SEQ ID NO: 79295 - RNA, 24 nt, Human
ugcguggagaggaaccgcaucagg

SEQ ID NO: 79296 - RNA, 23 nt, Human
ugcucuuggaaagaguugggcau

SEQ ID NO: 79297 - RNA, 18 nt, Human
uggaaggccuucuuggcc

SEQ ID NO: 79298 - RNA, 22 nt, Human
uggaaggccuucuuggccagcg

SEQ ID NO: 79299 - RNA, 26 nt, Human
uggagggugugcaaaucuuuccaauu

SEQ ID NO: 79300 - RNA, 19 nt, Human
uggcucagagucagaacag

SEQ ID NO: 79301 - RNA, 19 nt, Human
uggcucgaagcugaaaggu

SEQ ID NO: 79302 - RNA, 21 nt, Human
ugggagaaagcagugaugggg

SEQ ID NO: 79303 - RNA, 23 nt, Human
ugggagcccuugaggccacgggg

SEQ ID NO: 79304 - RNA, 20 nt, Human
ugggagggaggggagauugc

SEQ ID NO: 79305 - RNA, 21 nt, Human
ugggcccuggugccuggugcu

SEQ ID NO: 79306 - RNA, 18 nt, Human
uggggcccagcugguccc

SEQ ID NO: 79307 - RNA, 22 nt, Human
ugggggcggggugcggacacgc

SEQ ID NO: 79308 - RNA, 20 nt, Human
uggggguggugguggugggg

SEQ ID NO: 79309 - RNA, 22 nt, Human
uggggguggugguggugggggc

SEQ ID NO: 79310 - RNA, 22 nt, Human
ugguggugggggcaauagagag

SEQ ID NO: 79311 - RNA, 21 nt, Human
ugguuuuuuuuuuuuuucccu

SEQ ID NO: 79312 - RNA, 21 nt, Human
uguagccucucguuucccaaa

SEQ ID NO: 79313 - RNA, 21 nt, Human
uguggugggggggagggcgag

SEQ ID NO: 79314 - RNA, 24 nt, Human
uguggugggggggagggcgagggg

SEQ ID NO: 79315 - RNA, 24 nt, Human
ugugguuuuuuuuuuuuuucccuu

SEQ ID NO: 79316 - RNA, 24 nt, Human
uguuuugcuucacagcagaguucu

SEQ ID NO: 79317 - RNA, 20 nt, Human
uuagcccccaaaaacaacaa

SEQ ID NO: 79318 - RNA, 19 nt, Human
uucauucuccuucagcugu

SEQ ID NO: 79319 - RNA, 24 nt, Human
uucgcugaguucaccagaggacca

SEQ ID NO: 79320 - RNA, 20 nt, Human
uucuuggccagcguggagug

SEQ ID NO: 79321 - RNA, 20 nt, Human
uugauucuucucgaagugca

SEQ ID NO: 79322 - RNA, 24 nt, Human
uuucaccuuaagccauuccugacu

SEQ ID NO: 79323 - RNA, 23 nt, Human
uuuccaauuccucgacgccuugu

SEQ ID NO: 79324 - RNA, 22 nt, Human
aagaaaagggagcuuucuagaa

SEQ ID NO: 79325 - RNA, 18 nt, Human
aagcccuucccuucccuc

SEQ ID NO: 79326 - RNA, 18 nt, Human
aaguagacacaggugcca

SEQ ID NO: 79327 - RNA, 19 nt, Human
aauagaggcagggccagga

SEQ ID NO: 79328 - RNA, 24 nt, Human
accucaaauucuugcuggggcagu

SEQ ID NO: 79329 - RNA, 23 nt, Human
aggcagggccaggaggcggaggg

SEQ ID NO: 79330 - RNA, 19 nt, Human
aggcucuugaccccagugc

SEQ ID NO: 79331 - RNA, 24 nt, Human
aggugccuuccacaucucucucuu

SEQ ID NO: 79332 - RNA, 22 nt, Human
caaauucuugcuggggcaguuu

SEQ ID NO: 79333 - RNA, 23 nt, Human
caacagcagccuacagggccccc

SEQ ID NO: 79334 - RNA, 25 nt, Human
caacagcagccuacagggcccccag

SEQ ID NO: 79335 - RNA, 23 nt, Human
caacaugcagauuucaaagaaaa

SEQ ID NO: 79336 - RNA, 24 nt, Human
caaguaaccugaggcacgcucucu

SEQ ID NO: 79337 - RNA, 23 nt, Human
caaguucaaguaaccugaggcac

SEQ ID NO: 79338 - RNA, 22 nt, Human
cagaaugcaauaaauagaggca

SEQ ID NO: 79339 - RNA, 22 nt, Human
cagcaacgcggcgcggccagaa

SEQ ID NO: 79340 - RNA, 19 nt, Human
cagggccaggaggcggagg

SEQ ID NO: 79341 - RNA, 20 nt, Human
cagggccaggaggcggaggg

SEQ ID NO: 79342 - RNA, 23 nt, Human
ccaaugucucuacccaguccucc

SEQ ID NO: 79343 - RNA, 22 nt, Human
ccacaucucucucuucucgcag

SEQ ID NO: 79344 - RNA, 18 nt, Human
ccagcccggaaggcucau

SEQ ID NO: 79345 - RNA, 21 nt, Human
ccccagcaacgcggcgcggcc

SEQ ID NO: 79346 - RNA, 21 nt, Human
cccuuguguggagaaaagccc

SEQ ID NO: 79347 - RNA, 26 nt, Human
ccgcagcgucacagcggccgucgccc

SEQ ID NO: 79348 - RNA, 19 nt, Human
ccguccagagauucuggag

SEQ ID NO: 79349 - RNA, 22 nt, Human
ccuacagggcccccaguccuag

SEQ ID NO: 79350 - RNA, 21 nt, Human
ccuccaacagcagccuacagg

SEQ ID NO: 79351 - RNA, 23 nt, Human
ccuccaaugucucuacccagucc

SEQ ID NO: 79352 - RNA, 23 nt, Human
ccuuccacaucucucucuucucg

SEQ ID NO: 79353 - RNA, 25 nt, Human
cgccgccgcccgcccgccgccgccg

SEQ ID NO: 79354 - RNA, 18 nt, Human
cuacagggcccccagucc

SEQ ID NO: 79355 - RNA, 18 nt, Human
cuagaaacugagcugaag

SEQ ID NO: 79356 - RNA, 20 nt, Human
cucuugaccccagugcuugc

SEQ ID NO: 79357 - RNA, 23 nt, Human
cuuucuagaaacugagcugaagg

SEQ ID NO: 79358 - RNA, 22 nt, Human
gagcuggcaggacagcaagaaa

SEQ ID NO: 79359 - RNA, 24 nt, Human
gaggugagaacaaagcugcgugug

SEQ ID NO: 79360 - RNA, 22 nt, Human
gcaggacagcaagaaaucuagg

SEQ ID NO: 79361 - RNA, 19 nt, Human
gcucaugugugcaggcucu

SEQ ID NO: 79362 - RNA, 20 nt, Human
gggcaggggauggggacggc

SEQ ID NO: 79363 - RNA, 23 nt, Human
ggggauggggacggcggccacaa

SEQ ID NO: 79364 - RNA, 20 nt, Human
gguagaggugagaacaaagc

SEQ ID NO: 79365 - RNA, 20 nt, Human
guccagagauucuggagcag

SEQ ID NO: 79366 - RNA, 21 nt, Human
gugcagaugugugugcugagg

SEQ ID NO: 79367 - RNA, 18 nt, Human
uacagccccaaguccuac

SEQ ID NO: 79368 - RNA, 20 nt, Human
uagacggacucucugcccuu

SEQ ID NO: 79369 - RNA, 20 nt, Human
uagaggcagggccaggaggc

SEQ ID NO: 79370 - RNA, 21 nt, Human
uagaggcagggccaggaggcg

SEQ ID NO: 79371 - RNA, 19 nt, Human
uccacaucucucucuucuc

SEQ ID NO: 79372 - RNA, 21 nt, Human
uccacaucucucucuucucgc

SEQ ID NO: 79373 - RNA, 22 nt, Human
uccuaggggaaaguccgggagu

SEQ ID NO: 79374 - RNA, 20 nt, Human
ucgggagcaaguagacacag

SEQ ID NO: 79375 - RNA, 18 nt, Human
ugaagggguacugugggg

SEQ ID NO: 79376 - RNA, 24 nt, Human
ugacaagaggcagggaugcuggaa

SEQ ID NO: 79377 - RNA, 18 nt, Human
ugacagguagaggugaga

SEQ ID NO: 79378 - RNA, 18 nt, Human
ugcccauuuccauuuucu

SEQ ID NO: 79379 - RNA, 18 nt, Human
ugcccuuaccccagcaac

SEQ ID NO: 79380 - RNA, 22 nt, Human
ugcgugugugcagaugugugug

SEQ ID NO: 79381 - RNA, 24 nt, Human
ugcugccuggaggucacagaugaa

SEQ ID NO: 79382 - RNA, 18 nt, Human
ugcuugcccuuaccccag

SEQ ID NO: 79383 - RNA, 19 nt, Human
uggaaugacagguagaggu

SEQ ID NO: 79384 - RNA, 24 nt, Human
uggcaggacagcaagaaaucuaga

SEQ ID NO: 79385 - RNA, 22 nt, Human
ugggcagagcuggcaggacagc

SEQ ID NO: 79386 - RNA, 22 nt, Human
ugggggauggguacuguuguca

SEQ ID NO: 79387 - RNA, 22 nt, Human
uggguacuguugucagaaccuc

SEQ ID NO: 79388 - RNA, 26 nt, Human
uguggagaaaagcccuucccuucccu

SEQ ID NO: 79389 - RNA, 22 nt, Human
uucacucacuguugcccauuuc

SEQ ID NO: 79390 - RNA, 25 nt, Human
uuuucauauuucaaacaguuuaauu

SEQ ID NO: 79391 - RNA, 24 nt, Human
uuuuuuuuuuuuuuuuucauauuu

SEQ ID NO: 79392 - RNA, 26 nt, Human
aaaaagccaaaggggccccuggggca

SEQ ID NO: 79393 - RNA, 23 nt, Human
aaaagggucuuuauuuguaaaaa

SEQ ID NO: 79394 - RNA, 18 nt, Human
aaaggggccccuggggca

SEQ ID NO: 79395 - RNA, 18 nt, Human
caggacaggcaggccggc

SEQ ID NO: 79396 - RNA, 18 nt, Human
ccaggcccgggcgccgcg

SEQ ID NO: 79397 - RNA, 19 nt, Human
ccgcgccaggcccgggcgc

SEQ ID NO: 79398 - RNA, 24 nt, Human
cgccgcgcucucggccugccgucc

SEQ ID NO: 79399 - RNA, 22 nt, Human
cgcggcggggccgccucccguc

SEQ ID NO: 79400 - RNA, 21 nt, Human
cugccguccccccuggaguug

SEQ ID NO: 79401 - RNA, 21 nt, Human
gagcccgcggcggggccgccu

SEQ ID NO: 79402 - RNA, 25 nt, Human
gcgccgcgcucucggccugccgucc

SEQ ID NO: 79403 - RNA, 22 nt, Human
gcgggcucaggcuccgcgccag

SEQ ID NO: 79404 - RNA, 19 nt, Human
ggccggggccgagcccgcg

SEQ ID NO: 79405 - RNA, 23 nt, Human
ggccggggccgagcccgcggcgg

SEQ ID NO: 79406 - RNA, 19 nt, Human
ggucuuuauuuguaaaaag

SEQ ID NO: 79407 - RNA, 19 nt, Human
uaaaaagccaaaggggccc

SEQ ID NO: 79408 - RNA, 19 nt, Human
ucaggcuccgcgccaggcc

SEQ ID NO: 79409 - RNA, 21 nt, Human
ucaggcuccgcgccaggcccg

SEQ ID NO: 79410 - RNA, 26 nt, Human
uuuuuuuuuuuuuuuuuacaaaaggg

SEQ ID NO: 79411 - RNA, 27 nt, Human
uuuuuuuuuuuuuuuuuuuuuacaaaa

SEQ ID NO: 79412 - RNA, 24 nt, Human
aaaaaagacagagaagcaucccag

SEQ ID NO: 79413 - RNA, 26 nt, Human
aaaaaucuccccccuccccccacccc

SEQ ID NO: 79414 - RNA, 19 nt, Human
aaaacaaacagaaacaaaa

SEQ ID NO: 79415 - RNA, 23 nt, Human
aaaagacccuuuucccgcaaucc

SEQ ID NO: 79416 - RNA, 20 nt, Human
aaacaaaaacagaaaagaau

SEQ ID NO: 79417 - RNA, 25 nt, Human
aaacaaaaacagaaaagaauccugg

SEQ ID NO: 79418 - RNA, 23 nt, Human
aaacacuuaacugaggagacaga

SEQ ID NO: 79419 - RNA, 19 nt, Human
aaacagaaacaaaauccug

SEQ ID NO: 79420 - RNA, 22 nt, Human
aaacagaaacaaaauccuggaa

SEQ ID NO: 79421 - RNA, 19 nt, Human
aaagcagcucucaggaccu

SEQ ID NO: 79422 - RNA, 22 nt, Human
aaagcagcucucaggaccugga

SEQ ID NO: 79423 - RNA, 23 nt, Human
aacccccuucucaaagaugaccc

SEQ ID NO: 79424 - RNA, 18 nt, Human
aacugggcccacauucag

SEQ ID NO: 79425 - RNA, 25 nt, Human
aagacaccaggacaacaucaaagca

SEQ ID NO: 79426 - RNA, 19 nt, Human
aagagagagggaagcagag

SEQ ID NO: 79427 - RNA, 26 nt, Human
aagcagaaugacgccaacugggccca

SEQ ID NO: 79428 - RNA, 25 nt, Human
aagcagagggucaccagcggggggc

SEQ ID NO: 79429 - RNA, 18 nt, Human
aagcagcccucgggucuc

SEQ ID NO: 79430 - RNA, 26 nt, Human
aaggaaccacaaaauuuaaaacaaac

SEQ ID NO: 79431 - RNA, 26 nt, Human
aaguggguccuuuccccuugcagcuc

SEQ ID NO: 79432 - RNA, 20 nt, Human
aaucuccccccuccccccac

SEQ ID NO: 79433 - RNA, 20 nt, Human
acacggaagaacuuuccaaa

SEQ ID NO: 79434 - RNA, 23 nt, Human
acagauucccaaaaguaggugcc

SEQ ID NO: 79435 - RNA, 23 nt, Human
accacaaaauuuaaaacaaacag

SEQ ID NO: 79436 - RNA, 24 nt, Human
acccaaguccacaaaaauaauuuu

SEQ ID NO: 79437 - RNA, 20 nt, Human
agacaagacagugcugaaga

SEQ ID NO: 79438 - RNA, 25 nt, Human
agacaccaggacaacaucaaagcaa

SEQ ID NO: 79439 - RNA, 21 nt, Human
agacagagaagcaucccagga

SEQ ID NO: 79440 - RNA, 25 nt, Human
agagagggaagcagagggucaccag

SEQ ID NO: 79441 - RNA, 23 nt, Human
agcccucgggucucuguucuccu

SEQ ID NO: 79442 - RNA, 19 nt, Human
aggaacccccuucucaaag

SEQ ID NO: 79443 - RNA, 25 nt, Human
aggaacccccuucucaaagaugacc

SEQ ID NO: 79444 - RNA, 21 nt, Human
agggcauacaaaaccccaagg

SEQ ID NO: 79445 - RNA, 22 nt, Human
agugcugaagagcacuugaacu

SEQ ID NO: 79446 - RNA, 23 nt, Human
auaaaucuuaaaaaaaacacacc

SEQ ID NO: 79447 - RNA, 20 nt, Human
auacaaaaccccaaggguca

SEQ ID NO: 79448 - RNA, 19 nt, Human
auagcuuuuagcaucuguu

SEQ ID NO: 79449 - RNA, 27 nt, Human
augacgccaacugggcccacauucagu

SEQ ID NO: 79450 - RNA, 23 nt, Human
augcccacgucagcagccaugcc

SEQ ID NO: 79451 - RNA, 21 nt, Human
augggaaagagaaagacuuag

SEQ ID NO: 79452 - RNA, 25 nt, Human
auucucgaguuccccccucccccaa

SEQ ID NO: 79453 - RNA, 23 nt, Human
caaaaccccaagggucacgacac

SEQ ID NO: 79454 - RNA, 24 nt, Human
caaaaccccaagggucacgacacu

SEQ ID NO: 79455 - RNA, 18 nt, Human
caaagcagcucucaggac

SEQ ID NO: 79456 - RNA, 28 nt, Human
caacaucaaagcaacuuagggggaacac

SEQ ID NO: 79457 - RNA, 22 nt, Human
caagacagugcugaagagcacu

SEQ ID NO: 79458 - RNA, 22 nt, Human
cacaaaauuuaaaacaaacaga

SEQ ID NO: 79459 - RNA, 23 nt, Human
cacagaaaaaaauaaagcccaaa

SEQ ID NO: 79460 - RNA, 19 nt, Human
cagaaaacaagguggggca

SEQ ID NO: 79461 - RNA, 19 nt, Human
cagaaaacaagguggggca

SEQ ID NO: 79462 - RNA, 21 nt, Human
cagaaaacaagguggggcagg

SEQ ID NO: 79463 - RNA, 26 nt, Human
cagaaaagaauccugggagaagccag

SEQ ID NO: 79464 - RNA, 24 nt, Human
cagagggucaccagcggggggcac

SEQ ID NO: 79465 - RNA, 24 nt, Human
caucaaagcaacuuagggggaaca

SEQ ID NO: 79466 - RNA, 22 nt, Human
ccaaagggaaagagagagggaa

SEQ ID NO: 79467 - RNA, 21 nt, Human
ccacaaaauuuaaaacaaaca

SEQ ID NO: 79468 - RNA, 23 nt, Human
ccagggcauacaaaaccccaagg

SEQ ID NO: 79469 - RNA, 24 nt, Human
ccaugcccacgucagcagccaugc

SEQ ID NO: 79470 - RNA, 24 nt, Human
cccaugcccacgucagcagccaug

SEQ ID NO: 79471 - RNA, 21 nt, Human
ccccaaagacuaaagucucug

SEQ ID NO: 79472 - RNA, 23 nt, Human
ccccaaagacuaaagucucugcu

SEQ ID NO: 79473 - RNA, 26 nt, Human
cccccaaagcagcccucgggucucug

SEQ ID NO: 79474 - RNA, 22 nt, Human
ccccccucccccaaagcagccc

SEQ ID NO: 79475 - RNA, 19 nt, Human
cccccuccccccaccccuc

SEQ ID NO: 79476 - RNA, 18 nt, Human
cccgcaaucccuggccuc

SEQ ID NO: 79477 - RNA, 20 nt, Human
ccggggccucaucugugggg

SEQ ID NO: 79478 - RNA, 23 nt, Human
ccucaaagcagcucucaggaccc

SEQ ID NO: 79479 - RNA, 23 nt, Human
ccuccugcugccagaggaaaauc

SEQ ID NO: 79480 - RNA, 18 nt, Human
ccucgggucucuguucuc

SEQ ID NO: 79481 - RNA, 22 nt, Human
ccucucggguugcagcagaaac

SEQ ID NO: 79482 - RNA, 20 nt, Human
ccucuugcugcggugacacu

SEQ ID NO: 79483 - RNA, 18 nt, Human
cggcacaucccaucuuag

SEQ ID NO: 79484 - RNA, 18 nt, Human
cuaaauccacccaugccc

SEQ ID NO: 79485 - RNA, 18 nt, Human
cucgcugccuguaugccu

SEQ ID NO: 79486 - RNA, 21 nt, Human
cucuugccccaaagacuaaag

SEQ ID NO: 79487 - RNA, 24 nt, Human
cugccaaagggaaagagagaggga

SEQ ID NO: 79488 - RNA, 22 nt, Human
cugccuguaugccuuuuuccuu

SEQ ID NO: 79489 - RNA, 20 nt, Human
cugggugcgugccuccugcu

SEQ ID NO: 79490 - RNA, 24 nt, Human
cuuagggggaaaaaagacagagaa

SEQ ID NO: 79491 - RNA, 24 nt, Human
gaaaaaucuccccccuccccccac

SEQ ID NO: 79492 - RNA, 20 nt, Human
gaaagagagagggaagcaga

SEQ ID NO: 79493 - RNA, 21 nt, Human
gaaugaagacaaaaaagaccc

SEQ ID NO: 79494 - RNA, 19 nt, Human
gaggagaaauucuggagaa

SEQ ID NO: 79495 - RNA, 19 nt, Human
gaggagaaauucuggagaa

SEQ ID NO: 79496 - RNA, 21 nt, Human
gaggagaaauucuggagaauc

SEQ ID NO: 79497 - RNA, 23 nt, Human
gcacagcuacagauucccaaaag

SEQ ID NO: 79498 - RNA, 23 nt, Human
gcaugggagggggaggaaaggga

SEQ ID NO: 79499 - RNA, 21 nt, Human
gcucgcugccuguaugccuuu

SEQ ID NO: 79500 - RNA, 23 nt, Human
gcuuggucugaucuguuuuucuu

SEQ ID NO: 79501 - RNA, 21 nt, Human
ggaagcagagggucaccagcg

SEQ ID NO: 79502 - RNA, 21 nt, Human
ggacaggcucaccgaguuccu

SEQ ID NO: 79503 - RNA, 26 nt, Human
ggagaagccaguccaaaggacguaaa

SEQ ID NO: 79504 - RNA, 22 nt, Human
ggcccaggcauucaugccaagu

SEQ ID NO: 79505 - RNA, 19 nt, Human
ggcucaccgaguuccucuc

SEQ ID NO: 79506 - RNA, 20 nt, Human
gggaagcagagggucaccag

SEQ ID NO: 79507 - RNA, 26 nt, Human
gggaagcagagggucaccagcggggg

SEQ ID NO: 79508 - RNA, 21 nt, Human
ggggcagggaaggguaugaug

SEQ ID NO: 79509 - RNA, 21 nt, Human
guaugaugggaaagagaaaga

SEQ ID NO: 79510 - RNA, 23 nt, Human
gucugaagauggauucuccaccu

SEQ ID NO: 79511 - RNA, 25 nt, Human
guggaaguggguccuuuccccacug

SEQ ID NO: 79512 - RNA, 23 nt, Human
uaaaacaaacagaaacaaaaucc

SEQ ID NO: 79513 - RNA, 30 nt, Human
uaaaacaaacagaaacaaaauccuggauag

SEQ ID NO: 79514 - RNA, 23 nt, Human
uaaagcccaaaucaaaaaaacaa

SEQ ID NO: 79515 - RNA, 23 nt, Human
uaaaguaaacagcccagcauucc

SEQ ID NO: 79516 - RNA, 22 nt, Human
uacacagaaaaaaauaaagccc

SEQ ID NO: 79517 - RNA, 23 nt, Human
uacacagaaaaaaauaaagccuu

SEQ ID NO: 79518 - RNA, 21 nt, Human
uacagagaacggugcaacaca

SEQ ID NO: 79519 - RNA, 23 nt, Human
uacaguacacagaaaaaaauaaa

SEQ ID NO: 79520 - RNA, 25 nt, Human
uacaguacacagaaaaaaauaaagc

SEQ ID NO: 79521 - RNA, 21 nt, Human
uaggucaaagcagaaugacgc

SEQ ID NO: 79522 - RNA, 25 nt, Human
ucaaaagaaaaaucuccccccuccc

SEQ ID NO: 79523 - RNA, 31 nt, Human
ucaaaagaaaaaucuccccccuccccccaau

SEQ ID NO: 79524 - RNA, 25 nt, Human
ucaccagcggggggcacaaaggaag

SEQ ID NO: 79525 - RNA, 18 nt, Human
ucacuugggaauuccuaa

SEQ ID NO: 79526 - RNA, 22 nt, Human
ucagaugggaauguuuagguca

SEQ ID NO: 79527 - RNA, 21 nt, Human
ucagcagccaugccccggggc

SEQ ID NO: 79528 - RNA, 18 nt, Human
ucccaaaaguaggugccu

SEQ ID NO: 79529 - RNA, 19 nt, Human
uccccaaaauaacacugug

SEQ ID NO: 79530 - RNA, 18 nt, Human
uccccccucccccaaagc

SEQ ID NO: 79531 - RNA, 19 nt, Human
uccccccuccccccacccc

SEQ ID NO: 79532 - RNA, 20 nt, Human
ucccuuagcgcucgcugccu

SEQ ID NO: 79533 - RNA, 19 nt, Human
uccugggagaagccagucc

SEQ ID NO: 79534 - RNA, 23 nt, Human
uccugggagaagccaguccaaag

SEQ ID NO: 79535 - RNA, 19 nt, Human
uccuggguugccagguccu

SEQ ID NO: 79536 - RNA, 23 nt, Human
ucgggacacggaagaacuuucca

SEQ ID NO: 79537 - RNA, 23 nt, Human
ucuacaucgggacacggaagaac

SEQ ID NO: 79538 - RNA, 21 nt, Human
ucuccagggcauacaaaaccc

SEQ ID NO: 79539 - RNA, 19 nt, Human
ucucugcuguggaaguggg

SEQ ID NO: 79540 - RNA, 24 nt, Human
ucucugggugcgugccuccugcug

SEQ ID NO: 79541 - RNA, 18 nt, Human
ucuugccccaaagacuaa

SEQ ID NO: 79542 - RNA, 19 nt, Human
ugaaagaaaauaguccaaa

SEQ ID NO: 79543 - RNA, 24 nt, Human
ugacgccaacugggcccacauuca

SEQ ID NO: 79544 - RNA, 19 nt, Human
ugaucucugccacccaauc

SEQ ID NO: 79545 - RNA, 20 nt, Human
ugcagcuccagcauucucug

SEQ ID NO: 79546 - RNA, 21 nt, Human
ugcagugcucauccuggaggu

SEQ ID NO: 79547 - RNA, 23 nt, Human
ugcagugcucauccuggagguga

SEQ ID NO: 79548 - RNA, 24 nt, Human
ugccuguaugccuuuuuccucuuu

SEQ ID NO: 79549 - RNA, 18 nt, Human
ugcuaaaaucccuuuuac

SEQ ID NO: 79550 - RNA, 18 nt, Human
ugcuauuucuucuacauc

SEQ ID NO: 79551 - RNA, 23 nt, Human
ugcugggggcaguggcacuggcc

SEQ ID NO: 79552 - RNA, 24 nt, Human
ugcuuggucugaucuguuuuucuu

SEQ ID NO: 79553 - RNA, 18 nt, Human
uggccuccugguaucaag

SEQ ID NO: 79554 - RNA, 23 nt, Human
ugggagggggaggaaagggaagg

SEQ ID NO: 79555 - RNA, 21 nt, Human
uggggcagggaaggguaugau

SEQ ID NO: 79556 - RNA, 18 nt, Human
ugugcuuuucauuaauac

SEQ ID NO: 79557 - RNA, 21 nt, Human
ugugcuuuucauuaauacucu

SEQ ID NO: 79558 - RNA, 24 nt, Human
uuagcagcuuaaaacaucauguuu

SEQ ID NO: 79559 - RNA, 21 nt, Human
uuaguuccuuuuuuugugcuu

SEQ ID NO: 79560 - RNA, 23 nt, Human
uuccaaaaaugaucucugccacc

SEQ ID NO: 79561 - RNA, 23 nt, Human
uuccucuuuguuuuucucugcug

SEQ ID NO: 79562 - RNA, 24 nt, Human
uucuucugacucccccucuugcug

SEQ ID NO: 79563 - RNA, 23 nt, Human
uugggagacaagacagugcugaa

SEQ ID NO: 79564 - RNA, 21 nt, Human
uuugcuagauuuauuucccca

SEQ ID NO: 79565 - RNA, 22 nt, Human
uuuucugacaccacagcucugg

SEQ ID NO: 79566 - RNA, 21 nt, Human
aaaauaaauaguacuagaaac

SEQ ID NO: 79567 - RNA, 21 nt, Human
aaaauaaauaguacuagaaac

SEQ ID NO: 79568 - RNA, 18 nt, Human
aaacaacaucaccacuua

SEQ ID NO: 79569 - RNA, 18 nt, Human
aaacaacaucaccacuua

SEQ ID NO: 79570 - RNA, 22 nt, Human
aaacacaugcacaguuuaucuu

SEQ ID NO: 79571 - RNA, 22 nt, Human
aaacacaugcacaguuuaucuu

SEQ ID NO: 79572 - RNA, 21 nt, Human
aaacggaaguggaaacaggga

SEQ ID NO: 79573 - RNA, 21 nt, Human
aaacggaaguggaaacaggga

SEQ ID NO: 79574 - RNA, 22 nt, Human
aaccaggaauucccaugcuggc

SEQ ID NO: 79575 - RNA, 19 nt, Human
aagacucagguaguuuaga

SEQ ID NO: 79576 - RNA, 20 nt, Human
aagcccugagcuuugaccuc

SEQ ID NO: 79577 - RNA, 22 nt, Human
acaacaguuaccucuccaaaca

SEQ ID NO: 79578 - RNA, 19 nt, Human
acaguuaccucuccaaaca

SEQ ID NO: 79579 - RNA, 18 nt, Human
accacaaagaaugaggaa

SEQ ID NO: 79580 - RNA, 22 nt, Human
accccaaguguaguuuaaaaau

SEQ ID NO: 79581 - RNA, 22 nt, Human
accccaaguguaguuuaaaaau

SEQ ID NO: 79582 - RNA, 19 nt, Human
accugagucucucuccacg

SEQ ID NO: 79583 - RNA, 24 nt, Human
agacaacaguuaccucuccaaaca

SEQ ID NO: 79584 - RNA, 24 nt, Human
agacaacaguuaccucuccaaaca

SEQ ID NO: 79585 - RNA, 22 nt, Human
agacagaaguucauucuuuagc

SEQ ID NO: 79586 - RNA, 21 nt, Human
aggaauaaugguuuugaaaac

SEQ ID NO: 79587 - RNA, 21 nt, Human
aggaauaaugguuuugaaaac

SEQ ID NO: 79588 - RNA, 21 nt, Human
aggacucugaucucaaaccag

SEQ ID NO: 79589 - RNA, 18 nt, Human
aggcacagacaacaguua

SEQ ID NO: 79590 - RNA, 18 nt, Human
aggcacagacaacaguua

SEQ ID NO: 79591 - RNA, 19 nt, Human
aggcaggaugaugguaucu

SEQ ID NO: 79592 - RNA, 19 nt, Human
aggcaggaugaugguaucu

SEQ ID NO: 79593 - RNA, 23 nt, Human
aggcaggaugaugguaucuguuc

SEQ ID NO: 79594 - RNA, 23 nt, Human
aggcaggaugaugguaucuguuc

SEQ ID NO: 79595 - RNA, 21 nt, Human
agguaguuuagagccccaggc

SEQ ID NO: 79596 - RNA, 28 nt, Human
auaccugagucucucuccaaccggaggg

SEQ ID NO: 79597 - RNA, 20 nt, Human
aucuguaacgcacuuucccu

SEQ ID NO: 79598 - RNA, 20 nt, Human
aucuguaacgcacuuucccu

SEQ ID NO: 79599 - RNA, 19 nt, Human
augaugcugcuacauuuua

SEQ ID NO: 79600 - RNA, 19 nt, Human
augaugcugcuacauuuua

SEQ ID NO: 79601 - RNA, 22 nt, Human
auuucuucugcuucaggucagg

SEQ ID NO: 79602 - RNA, 21 nt, Human
caaaagaauaagcacucagua

SEQ ID NO: 79603 - RNA, 22 nt, Human
caaaagaauaagcacucaguac

SEQ ID NO: 79604 - RNA, 28 nt, Human
caaagaguauuccugaugaccggggccc

SEQ ID NO: 79605 - RNA, 28 nt, Human
caaagaguauuccugaugaccggggccc

SEQ ID NO: 79606 - RNA, 25 nt, Human
caaagcccaggacccuguuccgagg

SEQ ID NO: 79607 - RNA, 21 nt, Human
caaggaauucucugggggucu

SEQ ID NO: 79608 - RNA, 19 nt, Human
cacgaggcagacagaaguu

SEQ ID NO: 79609 - RNA, 25 nt, Human
cagcuguguacaaaagaauaagcaa

SEQ ID NO: 79610 - RNA, 26 nt, Human
ccaucugccuuguacguuguaaucuc

SEQ ID NO: 79611 - RNA, 26 nt, Human
ccaucugccuuguacguuguaaucuc

SEQ ID NO: 79612 - RNA, 23 nt, Human
cccaaguauuuuuucccauccac

SEQ ID NO: 79613 - RNA, 19 nt, Human
ccucuccaaacaaauggau

SEQ ID NO: 79614 - RNA, 19 nt, Human
ccucuccaaacaaauggau

SEQ ID NO: 79615 - RNA, 18 nt, Human
ccucuccagucacaggaa

SEQ ID NO: 79616 - RNA, 18 nt, Human
ccucuccagucacaggaa

SEQ ID NO: 79617 - RNA, 18 nt, Human
ccuguaguccaucugagg

SEQ ID NO: 79618 - RNA, 18 nt, Human
ccuguaguccaucugagg

SEQ ID NO: 79619 - RNA, 19 nt, Human
ccuguaguccaucugaggc

SEQ ID NO: 79620 - RNA, 19 nt, Human
ccuguaguccaucugaggc

SEQ ID NO: 79621 - RNA, 21 nt, Human
ccuugggaagaagaggugugg

SEQ ID NO: 79622 - RNA, 22 nt, Human
ccuugggaagaagagguguggu

SEQ ID NO: 79623 - RNA, 18 nt, Human
cguuuggaaagacucagg

SEQ ID NO: 79624 - RNA, 18 nt, Human
cuagguauuaggccaccu

SEQ ID NO: 79625 - RNA, 19 nt, Human
cucaggacucugaucucaa

SEQ ID NO: 79626 - RNA, 21 nt, Human
cuccagcuugggcaguggugu

SEQ ID NO: 79627 - RNA, 19 nt, Human
cugaacguuugaaacaaca

SEQ ID NO: 79628 - RNA, 20 nt, Human
cugaacguuugaaacaacaa

SEQ ID NO: 79629 - RNA, 20 nt, Human
cugaacguuugaaacaacaa

SEQ ID NO: 79630 - RNA, 21 nt, Human
cugaucucaaaccaggaauuc

SEQ ID NO: 79631 - RNA, 25 nt, Human
cugauucuccccugggguccacacu

SEQ ID NO: 79632 - RNA, 18 nt, Human
cuguaguccaucugaggc

SEQ ID NO: 79633 - RNA, 28 nt, Human
cuuucagguacuuggugccaaagcccag

SEQ ID NO: 79634 - RNA, 24 nt, Human
gaccacaguagacaaagaguauuc

SEQ ID NO: 79635 - RNA, 25 nt, Human
gaccacaguagacaaagaguauucc

SEQ ID NO: 79636 - RNA, 25 nt, Human
gaccacaguagacaaagaguauucc

SEQ ID NO: 79637 - RNA, 18 nt, Human
gagguacucaggacucug

SEQ ID NO: 79638 - RNA, 23 nt, Human
gauggucuugaaaacagaguagg

SEQ ID NO: 79639 - RNA, 18 nt, Human
gcaaacaaugaaaaagca

SEQ ID NO: 79640 - RNA, 22 nt, Human
gcaaacaaugaaaaagcagugc

SEQ ID NO: 79641 - RNA, 24 nt, Human
gcagccuuaaagcccugagcuuug

SEQ ID NO: 79642 - RNA, 19 nt, Human
gcugcuacauuuuaugagc

SEQ ID NO: 79643 - RNA, 19 nt, Human
gcugcuacauuuuaugagc

SEQ ID NO: 79644 - RNA, 23 nt, Human
gcugugaguccagagaugguagu

SEQ ID NO: 79645 - RNA, 19 nt, Human
ggaccuugggaagaagagg

SEQ ID NO: 79646 - RNA, 19 nt, Human
ggaccuugggaagaagagg

SEQ ID NO: 79647 - RNA, 19 nt, Human
ggccuggucuggaagcugu

SEQ ID NO: 79648 - RNA, 18 nt, Human
gguggaagcugugagucc

SEQ ID NO: 79649 - RNA, 19 nt, Human
gguggaagcugugagucca

SEQ ID NO: 79650 - RNA, 23 nt, Human
gguggcaguaaggauauuucuau

SEQ ID NO: 79651 - RNA, 20 nt, Human
ggugucccuggccacggaau

SEQ ID NO: 79652 - RNA, 24 nt, Human
gucccugagaaaaggguugagggg

SEQ ID NO: 79653 - RNA, 24 nt, Human
gucccugagaaaaggguugagggg

SEQ ID NO: 79654 - RNA, 20 nt, Human
gugcucucucucugccgggu

SEQ ID NO: 79655 - RNA, 20 nt, Human
guguacaaaagaauaagcac

SEQ ID NO: 79656 - RNA, 27 nt, Human
uaccacaaagaaugaggaagucccaac

SEQ ID NO: 79657 - RNA, 27 nt, Human
uaccacaaagaaugaggaagucccaac

SEQ ID NO: 79658 - RNA, 23 nt, Human
uaccugagucucucuccacgaaa

SEQ ID NO: 79659 - RNA, 18 nt, Human
uagcaacaucuuccuagg

SEQ ID NO: 79660 - RNA, 18 nt, Human
uagcaacaucuuccuagg

SEQ ID NO: 79661 - RNA, 22 nt, Human
uagcaguaaaccuaagaguuuc

SEQ ID NO: 79662 - RNA, 22 nt, Human
uagcaguaaaccuaagaguuuc

SEQ ID NO: 79663 - RNA, 26 nt, Human
uaucccaaguauuuuuucccauccac

SEQ ID NO: 79664 - RNA, 18 nt, Human
ucaaaaaggcacagacaa

SEQ ID NO: 79665 - RNA, 18 nt, Human
ucaaaaaggcacagacaa

SEQ ID NO: 79666 - RNA, 19 nt, Human
ucaaaccaggaauucccau

SEQ ID NO: 79667 - RNA, 18 nt, Human
ucaaugcuccaucugccu

SEQ ID NO: 79668 - RNA, 18 nt, Human
ucaaugcuccaucugccu

SEQ ID NO: 79669 - RNA, 21 nt, Human
uccacgaggcagacagaaguu

SEQ ID NO: 79670 - RNA, 18 nt, Human
uccccugggguccacacc

SEQ ID NO: 79671 - RNA, 23 nt, Human
ucccuacagcagcuaacaaaggc

SEQ ID NO: 79672 - RNA, 23 nt, Human
ucccuacagcagcuaacaaaggc

SEQ ID NO: 79673 - RNA, 23 nt, Human
ucccugaauccucguggucucca

SEQ ID NO: 79674 - RNA, 20 nt, Human
uccuguaguccaucugaggc

SEQ ID NO: 79675 - RNA, 25 nt, Human
ucuacuucuucaugugauaucccaa

SEQ ID NO: 79676 - RNA, 21 nt, Human
ucuccagcuugggcaguggug

SEQ ID NO: 79677 - RNA, 18 nt, Human
ucuccugaugccucucca

SEQ ID NO: 79678 - RNA, 18 nt, Human
ucuccugaugccucucca

SEQ ID NO: 79679 - RNA, 18 nt, Human
ucuguaacgcacuuuccc

SEQ ID NO: 79680 - RNA, 22 nt, Human
ucuguaacgcacuuucccuaca

SEQ ID NO: 79681 - RNA, 22 nt, Human
ucuguaacgcacuuucccuaca

SEQ ID NO: 79682 - RNA, 23 nt, Human
ucuguaacgcacuuucccuacag

SEQ ID NO: 79683 - RNA, 23 nt, Human
ucuguaacgcacuuucccuacag

SEQ ID NO: 79684 - RNA, 18 nt, Human
ucuuggcuugucguuugg

SEQ ID NO: 79685 - RNA, 21 nt, Human
ugaaaacagaguaggacagcc

SEQ ID NO: 79686 - RNA, 19 nt, Human
ugaauagcaacaucuuccu

SEQ ID NO: 79687 - RNA, 19 nt, Human
ugaauagcaacaucuuccu

SEQ ID NO: 79688 - RNA, 18 nt, Human
ugaauccucguggucucc

SEQ ID NO: 79689 - RNA, 23 nt, Human
ugacagcagugcaaacaaugaaa

SEQ ID NO: 79690 - RNA, 18 nt, Human
ugaccucugauucucccc

SEQ ID NO: 79691 - RNA, 19 nt, Human
ugaccucugauucuccccu

SEQ ID NO: 79692 - RNA, 18 nt, Human
ugcaaacaaugaaaaagc

SEQ ID NO: 79693 - RNA, 21 nt, Human
uggaaguuuuucaaaaaggca

SEQ ID NO: 79694 - RNA, 21 nt, Human
uggaaguuuuucaaaaaggca

SEQ ID NO: 79695 - RNA, 22 nt, Human
uggaaguuuuucaaaaaggcac

SEQ ID NO: 79696 - RNA, 22 nt, Human
uggaaguuuuucaaaaaggcac

SEQ ID NO: 79697 - RNA, 22 nt, Human
uggagacgaacgagaccucucc

SEQ ID NO: 79698 - RNA, 22 nt, Human
uggagacgaacgagaccucucc

SEQ ID NO: 79699 - RNA, 18 nt, Human
uggauguagcaguaaacc

SEQ ID NO: 79700 - RNA, 18 nt, Human
uggauguagcaguaaacc

SEQ ID NO: 79701 - RNA, 27 nt, Human
uggcuccacgaggcagacaggggaacc

SEQ ID NO: 79702 - RNA, 21 nt, Human
ugggccuggucuggaagcugu

SEQ ID NO: 79703 - RNA, 21 nt, Human
uguacaaaagaauaagcacuc

SEQ ID NO: 79704 - RNA, 20 nt, Human
ugugauggucuugaaaacag

SEQ ID NO: 79705 - RNA, 23 nt, Human
ugugccuuagacucaaggaauuc

SEQ ID NO: 79706 - RNA, 25 nt, Human
uuaaagccuaaucuacuuucucugu

SEQ ID NO: 79707 - RNA, 24 nt, Human
uucccuacagcagcuaacaaaggc

SEQ ID NO: 79708 - RNA, 23 nt, Human
uucucugggggucuagaccuccu

SEQ ID NO: 79709 - RNA, 18 nt, Human
uugaccucugauucuccc

SEQ ID NO: 79710 - RNA, 18 nt, Human
uugaggggguguuggagu

SEQ ID NO: 79711 - RNA, 18 nt, Human
uugaggggguguuggagu

SEQ ID NO: 79712 - RNA, 22 nt, Human
uugggcaguggugucccuggcc

SEQ ID NO: 79713 - RNA, 23 nt, Human
uuggggcuuuuggacaccuuggg

SEQ ID NO: 79714 - RNA, 24 nt, Human
uuucaaaaaggcacagacaacagu

SEQ ID NO: 79715 - RNA, 24 nt, Human
uuucaaaaaggcacagacaacagu

SEQ ID NO: 79716 - RNA, 24 nt, Human
uuugaaaacgucaaugcuccaucu

SEQ ID NO: 79717 - RNA, 24 nt, Human
uuugaaaacgucaaugcuccaucu

SEQ ID NO: 79718 - RNA, 23 nt, Human
uuuuuuucuuuucacuucuauua

SEQ ID NO: 79719 - RNA, 22 nt, Human
uuuuuuuuuuuuuuuuugacag

SEQ ID NO: 79720 - RNA, 27 nt, Human
uuuuuuuuuuuuuuuuuuuuuuugggg

SEQ ID NO: 79721 - RNA, 20 nt, Human
aagcagcagcguuuauucaa

SEQ ID NO: 79722 - RNA, 20 nt, Human
aagcagcagcguuuauucaa

SEQ ID NO: 79723 - RNA, 24 nt, Human
aaugcccgcccacucccugguggc

SEQ ID NO: 79724 - RNA, 24 nt, Human
aaugcccgcccacucccugguggc

SEQ ID NO: 79725 - RNA, 20 nt, Human
acauaaaaaaccacagucug

SEQ ID NO: 79726 - RNA, 18 nt, Human
agagguuuccaggccauc

SEQ ID NO: 79727 - RNA, 22 nt, Human
agggcgggggggcccccugggg

SEQ ID NO: 79728 - RNA, 24 nt, Human
auaaaaaaccacagucugaggcca

SEQ ID NO: 79729 - RNA, 21 nt, Human
caccgccccaccagccccgcc

SEQ ID NO: 79730 - RNA, 21 nt, Human
cagcguuuauucaagauacaa

SEQ ID NO: 79731 - RNA, 21 nt, Human
cagcguuuauucaagauacaa

SEQ ID NO: 79732 - RNA, 25 nt, Human
cauaaaaaaccacagucugaggcca

SEQ ID NO: 79733 - RNA, 22 nt, Human
ccacauaaaaaaccacagucug

SEQ ID NO: 79734 - RNA, 18 nt, Human
ccaucugucugccuccag

SEQ ID NO: 79735 - RNA, 23 nt, Human
cccacagccccgccgccgccgcu

SEQ ID NO: 79736 - RNA, 21 nt, Human
ccccacagccccgccgccgcc

SEQ ID NO: 79737 - RNA, 19 nt, Human
ccccaccagccccgccgcc

SEQ ID NO: 79738 - RNA, 18 nt, Human
ccccauggccccgcgcgg

SEQ ID NO: 79739 - RNA, 18 nt, Human
ccccauggccccgcgcgg

SEQ ID NO: 79740 - RNA, 24 nt, Human
cccccaucgagccgccacccuccc

SEQ ID NO: 79741 - RNA, 18 nt, Human
ccccgccgccgccgcugc

SEQ ID NO: 79742 - RNA, 18 nt, Human
ccccgccgccgccgcugc

SEQ ID NO: 79743 - RNA, 19 nt, Human
ccccgccgccgccgcugcc

SEQ ID NO: 79744 - RNA, 19 nt, Human
ccccgccgccgccgcugcc

SEQ ID NO: 79745 - RNA, 21 nt, Human
ccccgccgccgccgcugccgc

SEQ ID NO: 79746 - RNA, 21 nt, Human
ccccgccgccgccgcugccgc

SEQ ID NO: 79747 - RNA, 21 nt, Human
ccccgcgcggcggcggcggcg

SEQ ID NO: 79748 - RNA, 21 nt, Human
ccccgcgcggcggcggcggcg

SEQ ID NO: 79749 - RNA, 20 nt, Human
ccccgggcgccgggcggccc

SEQ ID NO: 79750 - RNA, 20 nt, Human
ccccgggcgccgggcggccc

SEQ ID NO: 79751 - RNA, 21 nt, Human
ccccgggcgccgggcggcccc

SEQ ID NO: 79752 - RNA, 21 nt, Human
ccccgggcgccgggcggcccc

SEQ ID NO: 79753 - RNA, 18 nt, Human
ccgcaccgccccaccagc

SEQ ID NO: 79754 - RNA, 24 nt, Human
ccgcccggcccacacucaucgccc

SEQ ID NO: 79755 - RNA, 20 nt, Human
ccgccgccgccgccgccucc

SEQ ID NO: 79756 - RNA, 20 nt, Human
ccgccgccgccgccgccucc

SEQ ID NO: 79757 - RNA, 18 nt, Human
ccgccgccgccgcugccg

SEQ ID NO: 79758 - RNA, 18 nt, Human
ccgccgccgccgcugccg

SEQ ID NO: 79759 - RNA, 21 nt, Human
ccgccgccgccgcugccgccg

SEQ ID NO: 79760 - RNA, 24 nt, Human
ccgccgccgccgcugccgccgccg

SEQ ID NO: 79761 - RNA, 24 nt, Human
ccgccgccgccgcugccgccgccg

SEQ ID NO: 79762 - RNA, 22 nt, Human
ccgccgccgccgcugccgccgg

SEQ ID NO: 79763 - RNA, 18 nt, Human
ccgccgccgcugccgccg

SEQ ID NO: 79764 - RNA, 18 nt, Human
ccgccgccgcugccgccg

SEQ ID NO: 79765 - RNA, 24 nt, Human
ccgccgccgcugccgccgccgccg

SEQ ID NO: 79766 - RNA, 24 nt, Human
ccgccgccgcugccgccgccgccg

SEQ ID NO: 79767 - RNA, 18 nt, Human
ccgccgcugccgccgccg

SEQ ID NO: 79768 - RNA, 18 nt, Human
ccgccgcugccgccgccg

SEQ ID NO: 79769 - RNA, 24 nt, Human
ccgccgcugccgccgccgccgccg

SEQ ID NO: 79770 - RNA, 24 nt, Human
ccgccgcugccgccgccgccgccg

SEQ ID NO: 79771 - RNA, 18 nt, Human
ccgcgccgugggcacagg

SEQ ID NO: 79772 - RNA, 24 nt, Human
ccgcgcggcggcggcggcggcuuu

SEQ ID NO: 79773 - RNA, 18 nt, Human
ccgcugccgccgccgccg

SEQ ID NO: 79774 - RNA, 18 nt, Human
ccgcugccgccgccgccg

SEQ ID NO: 79775 - RNA, 24 nt, Human
ccgcugccgccgccgccgccgccg

SEQ ID NO: 79776 - RNA, 24 nt, Human
ccgcugccgccgccgccgccgccg

SEQ ID NO: 79777 - RNA, 27 nt, Human
ccgcugccgccgccgccgccgccgccu

SEQ ID NO: 79778 - RNA, 27 nt, Human
ccgcugccgccgccgccgccgccgccu

SEQ ID NO: 79779 - RNA, 18 nt, Human
ccggcccgcacucugcgc

SEQ ID NO: 79780 - RNA, 18 nt, Human
cgcaccgccccaccagcc

SEQ ID NO: 79781 - RNA, 23 nt, Human
cgcaggaagggagggccgggggg

SEQ ID NO: 79782 - RNA, 21 nt, Human
cgccaggccgccgccagacuc

SEQ ID NO: 79783 - RNA, 21 nt, Human
cgccaggccgccgccagacuc

SEQ ID NO: 79784 - RNA, 21 nt, Human
cgcccggcccacacucaucgc

SEQ ID NO: 79785 - RNA, 21 nt, Human
cgcgcgccgcuauugugugcg

SEQ ID NO: 79786 - RNA, 21 nt, Human
cgcggcggccucgccaggccc

SEQ ID NO: 79787 - RNA, 21 nt, Human
cgcggcggccucgccaggccc

SEQ ID NO: 79788 - RNA, 22 nt, Human
cgcggcggcggcggcggcgaac

SEQ ID NO: 79789 - RNA, 23 nt, Human
cgcggggcccgucucagcggcgg

SEQ ID NO: 79790 - RNA, 23 nt, Human
cgcggggcccgucucagcggcgg

SEQ ID NO: 79791 - RNA, 19 nt, Human
cgcuaagccagccggcucg

SEQ ID NO: 79792 - RNA, 21 nt, Human
cggagcggggcgcucggcgcg

SEQ ID NO: 79793 - RNA, 21 nt, Human
cggagcggggcgcucggcgcg

SEQ ID NO: 79794 - RNA, 21 nt, Human
cggcggcggcggcgaacaaug

SEQ ID NO: 79795 - RNA, 21 nt, Human
cggcggcggcggcgaacaaug

SEQ ID NO: 79796 - RNA, 22 nt, Human
cggguggccacauaaaaaacca

SEQ ID NO: 79797 - RNA, 22 nt, Human
cggguggccacauaaaaaacca

SEQ ID NO: 79798 - RNA, 21 nt, Human
cucccuucacccugucuccca

SEQ ID NO: 79799 - RNA, 21 nt, Human
cucccuucacccugucuccca

SEQ ID NO: 79800 - RNA, 18 nt, Human
cucgccaggcccggcccc

SEQ ID NO: 79801 - RNA, 18 nt, Human
cucgccaggcccggcccc

SEQ ID NO: 79802 - RNA, 19 nt, Human
cugaggccagccuggggcu

SEQ ID NO: 79803 - RNA, 19 nt, Human
cugaggccagcuuggggcu

SEQ ID NO: 79804 - RNA, 21 nt, Human
cugccgccgccgccgccgccg

SEQ ID NO: 79805 - RNA, 21 nt, Human
cugccgccgccgccgccgccg

SEQ ID NO: 79806 - RNA, 18 nt, Human
cuguccuucggcuuuggg

SEQ ID NO: 79807 - RNA, 18 nt, Human
gacucuggccacggcccg

SEQ ID NO: 79808 - RNA, 18 nt, Human
gacucuggccacggcccg

SEQ ID NO: 79809 - RNA, 18 nt, Human
gagccgccacccuccccc

SEQ ID NO: 79810 - RNA, 21 nt, Human
gccgccgccgccgccgccgcc

SEQ ID NO: 79811 - RNA, 21 nt, Human
gccgccgccgccgccgccgcc

SEQ ID NO: 79812 - RNA, 18 nt, Human
gccgccgccgccuccucg

SEQ ID NO: 79813 - RNA, 20 nt, Human
gcgcgccgcuauugugugcg

SEQ ID NO: 79814 - RNA, 18 nt, Human
gcuuggggcgcccucggg

SEQ ID NO: 79815 - RNA, 18 nt, Human
gcuuggggcgcccucggg

SEQ ID NO: 79816 - RNA, 23 nt, Human
ggccacggcccgcgcgcuccucg

SEQ ID NO: 79817 - RNA, 23 nt, Human
ggccacggcccgcgcgcuccucg

SEQ ID NO: 79818 - RNA, 24 nt, Human
ggccccgcgcggcggcggcggcgg

SEQ ID NO: 79819 - RNA, 24 nt, Human
ggccccgcgcggcggcggcggcgg

SEQ ID NO: 79820 - RNA, 18 nt, Human
ggcccgucucagcggcgg

SEQ ID NO: 79821 - RNA, 22 nt, Human
ggccggggggaggcggccgcga

SEQ ID NO: 79822 - RNA, 22 nt, Human
ggcggcggcggcgaacaaugcc

SEQ ID NO: 79823 - RNA, 22 nt, Human
ggcggcggcggcgaacaaugcc

SEQ ID NO: 79824 - RNA, 19 nt, Human
gggcccgucucagcggcgg

SEQ ID NO: 79825 - RNA, 18 nt, Human
gggcgccgggcggccccc

SEQ ID NO: 79826 - RNA, 18 nt, Human
gggcgccgggcggccccc

SEQ ID NO: 79827 - RNA, 25 nt, Human
uacaacagugagggaauccggucac

SEQ ID NO: 79828 - RNA, 25 nt, Human
uacaacagugagggaauccggucac

SEQ ID NO: 79829 - RNA, 19 nt, Human
uagccagagguuuccaggc

SEQ ID NO: 79830 - RNA, 26 nt, Human
uauucaagauacaacagugagggaau

SEQ ID NO: 79831 - RNA, 26 nt, Human
uauucaagauacaacagugagggaau

SEQ ID NO: 79832 - RNA, 18 nt, Human
ucagcggcggcgcggcgg

SEQ ID NO: 79833 - RNA, 22 nt, Human
ucagcggcggcgcggcggccuc

SEQ ID NO: 79834 - RNA, 23 nt, Human
ucauaaaaaucacucccuucacc

SEQ ID NO: 79835 - RNA, 23 nt, Human
ucauaaaaaucacucccuucacc

SEQ ID NO: 79836 - RNA, 21 nt, Human
uccaggagauggacugggacc

SEQ ID NO: 79837 - RNA, 24 nt, Human
uccuucggcuuugggucgcugucu

SEQ ID NO: 79838 - RNA, 20 nt, Human
ucggcuuugggucgcugucu

SEQ ID NO: 79839 - RNA, 30 nt, Human
ucggcuuugggucgcugucucuuggcagaa

SEQ ID NO: 79840 - RNA, 20 nt, Human
ucucuuggcagauggcccaa

SEQ ID NO: 79841 - RNA, 23 nt, Human
ugaacuggcuuggggcgcccucg

SEQ ID NO: 79842 - RNA, 23 nt, Human
ugaacuggcuuggggcgcccucg

SEQ ID NO: 79843 - RNA, 23 nt, Human
ugaggccagccuggggcucccag

SEQ ID NO: 79844 - RNA, 21 nt, Human
uggagcggagccaggcgggcc

SEQ ID NO: 79845 - RNA, 19 nt, Human
uggccacauaaaaaaccac

SEQ ID NO: 79846 - RNA, 19 nt, Human
uggccacauaaaaaaccac

SEQ ID NO: 79847 - RNA, 19 nt, Human
uggcccaaggacaccucag

SEQ ID NO: 79848 - RNA, 21 nt, Human
uggcuuggggcgcccucgggu

SEQ ID NO: 79849 - RNA, 21 nt, Human
uggcuuggggcgcccucgggu

SEQ ID NO: 79850 - RNA, 25 nt, Human
uuccaggccaucugucugccuccag

SEQ ID NO: 79851 - RNA, 18 nt, Human
uugaagcagcagcguuua

SEQ ID NO: 79852 - RNA, 19 nt, Human
uuuccaggccaucugucug

SEQ ID NO: 79853 - RNA, 24 nt, Human
aaaaauucuuuuuuauaguauguc

SEQ ID NO: 79854 - RNA, 19 nt, Human
aaaagaguuuaggcaaagg

SEQ ID NO: 79855 - RNA, 20 nt, Human
aacacagcacaagccaaugg

SEQ ID NO: 79856 - RNA, 21 nt, Human
aacaccuauggcauguaaaca

SEQ ID NO: 79857 - RNA, 18 nt, Human
aacaggcacccaucaucc

SEQ ID NO: 79858 - RNA, 22 nt, Human
aacccccccacccccagugccu

SEQ ID NO: 79859 - RNA, 21 nt, Human
aacuaccaaguagcuaguucc

SEQ ID NO: 79860 - RNA, 21 nt, Human
aagaaucuguuaccuugagau

SEQ ID NO: 79861 - RNA, 24 nt, Human
aagagaaacacacacugagugauc

SEQ ID NO: 79862 - RNA, 20 nt, Human
aagcaaauguaaaaugacua

SEQ ID NO: 79863 - RNA, 19 nt, Human
aagcauagucacaaacuuc

SEQ ID NO: 79864 - RNA, 18 nt, Human
aagugcuaaaccucucau

SEQ ID NO: 79865 - RNA, 22 nt, Human
acaacccuucauagauaaccga

SEQ ID NO: 79866 - RNA, 22 nt, Human
acaacucacuggcagcacaacc

SEQ ID NO: 79867 - RNA, 19 nt, Human
acacacacuccuucaucuc

SEQ ID NO: 79868 - RNA, 22 nt, Human
acacacccccaugcuacacaca

SEQ ID NO: 79869 - RNA, 22 nt, Human
accaaguucugcauuugggaau

SEQ ID NO: 79870 - RNA, 23 nt, Human
accccagccgcauuacacacacc

SEQ ID NO: 79871 - RNA, 23 nt, Human
acccgguaagcugagccuaggau

SEQ ID NO: 79872 - RNA, 22 nt, Human
acuugccccaagccaacaacuu

SEQ ID NO: 79873 - RNA, 21 nt, Human
acuuuuguagcuuuuuguuuu

SEQ ID NO: 79874 - RNA, 18 nt, Human
agaaaggagucacuuggg

SEQ ID NO: 79875 - RNA, 25 nt, Human
agacaaacaagagacucucagcuua

SEQ ID NO: 79876 - RNA, 18 nt, Human
agagaaaacauggaagau

SEQ ID NO: 79877 - RNA, 26 nt, Human
agcuggaaaauagagagaaaugauuu

SEQ ID NO: 79878 - RNA, 19 nt, Human
aggaaaaaaacauaagagg

SEQ ID NO: 79879 - RNA, 24 nt, Human
aggcacccaucauccagaccagaa

SEQ ID NO: 79880 - RNA, 25 nt, Human
aggcaccuugacagacaaacaagag

SEQ ID NO: 79881 - RNA, 23 nt, Human
agugguuccugccagguuuccag

SEQ ID NO: 79882 - RNA, 20 nt, Human
auauacacaagagaagaguu

SEQ ID NO: 79883 - RNA, 21 nt, Human
augcaggaaaaaaacauaaga

SEQ ID NO: 79884 - RNA, 23 nt, Human
auuaaggcuuuuaacaugaaaag

SEQ ID NO: 79885 - RNA, 22 nt, Human
caaaaucucuggagaugagggu

SEQ ID NO: 79886 - RNA, 19 nt, Human
caaaauuucaggcccuggu

SEQ ID NO: 79887 - RNA, 27 nt, Human
caaacaagagacucucagcuuauuaaa

SEQ ID NO: 79888 - RNA, 21 nt, Human
caacccuucauagauaaccga

SEQ ID NO: 79889 - RNA, 24 nt, Human
caagauaucuggucauucccagac

SEQ ID NO: 79890 - RNA, 18 nt, Human
caccaggcacaucuucuc

SEQ ID NO: 79891 - RNA, 26 nt, Human
cacccaucauccagaccagaacaccu

SEQ ID NO: 79892 - RNA, 26 nt, Human
caccuauaacaacuacuuuaguagcc

SEQ ID NO: 79893 - RNA, 27 nt, Human
cagaagacuuaagacuaaugggaacca

SEQ ID NO: 79894 - RNA, 20 nt, Human
cagcaggacaggccuuccuc

SEQ ID NO: 79895 - RNA, 22 nt, Human
cagcauaaaucuacaacucacu

SEQ ID NO: 79896 - RNA, 18 nt, Human
cagcgcagccaaugggcu

SEQ ID NO: 79897 - RNA, 19 nt, Human
caggagucauaagccagag

SEQ ID NO: 79898 - RNA, 21 nt, Human
caguguuuucauaccccagcc

SEQ ID NO: 79899 - RNA, 20 nt, Human
cauuaaaugcucaauaaaga

SEQ ID NO: 79900 - RNA, 22 nt, Human
cauuucuugccaguauucugcc

SEQ ID NO: 79901 - RNA, 21 nt, Human
ccaaucugauuacaaauccaa

SEQ ID NO: 79902 - RNA, 22 nt, Human
ccacaaccauagacacaaaauc

SEQ ID NO: 79903 - RNA, 20 nt, Human
ccagacccacaaccauagac

SEQ ID NO: 79904 - RNA, 21 nt, Human
ccaguuccagcaggacaggcc

SEQ ID NO: 79905 - RNA, 22 nt, Human
ccauagacacaaaaucucugga

SEQ ID NO: 79906 - RNA, 22 nt, Human
cccaacaccuucugacuccuaa

SEQ ID NO: 79907 - RNA, 30 nt, Human
cccaacaccuucugacuccuaauagaccuu

SEQ ID NO: 79908 - RNA, 19 nt, Human
cccaucauccagaccagaa

SEQ ID NO: 79909 - RNA, 19 nt, Human
ccccaacaccuucugacuc

SEQ ID NO: 79910 - RNA, 24 nt, Human
ccccaacaccuucugacuccuaau

SEQ ID NO: 79911 - RNA, 21 nt, Human
ccccaagccaacaacuuaacu

SEQ ID NO: 79912 - RNA, 23 nt, Human
ccccaugcuacacacacuccuuc

SEQ ID NO: 79913 - RNA, 22 nt, Human
cccccacccccagugccugaau

SEQ ID NO: 79914 - RNA, 23 nt, Human
cccccacccccagugccugaauu

SEQ ID NO: 79915 - RNA, 18 nt, Human
ccccccacccccagugcc

SEQ ID NO: 79916 - RNA, 21 nt, Human
cccucccuacaccaaucccag

SEQ ID NO: 79917 - RNA, 21 nt, Human
ccgcauuacacacaccaggca

SEQ ID NO: 79918 - RNA, 20 nt, Human
ccgccgccccucccucggcc

SEQ ID NO: 79919 - RNA, 27 nt, Human
ccgccgccgccgccgcucgcgccgccg

SEQ ID NO: 79920 - RNA, 19 nt, Human
ccgccgccgccgcucgcgc

SEQ ID NO: 79921 - RNA, 27 nt, Human
ccgccgccgccgcucgcgccgccgccc

SEQ ID NO: 79922 - RNA, 23 nt, Human
ccgccgcucgcgccgccgccccu

SEQ ID NO: 79923 - RNA, 19 nt, Human
ccugaauucauccacaucu

SEQ ID NO: 79924 - RNA, 20 nt, Human
ccuuugagaagucagaagag

SEQ ID NO: 79925 - RNA, 22 nt, Human
cgcacacgugccauugugcgua

SEQ ID NO: 79926 - RNA, 24 nt, Human
cuagcucuauuuuauggccuucau

SEQ ID NO: 79927 - RNA, 21 nt, Human
cucacuggcagcacaaccuga

SEQ ID NO: 79928 - RNA, 22 nt, Human
cuccccaacaccuucugacucc

SEQ ID NO: 79929 - RNA, 19 nt, Human
cuccucacuaagcuucuuc

SEQ ID NO: 79930 - RNA, 18 nt, Human
cuccuucaucuccuucuc

SEQ ID NO: 79931 - RNA, 24 nt, Human
cucucucuuccucauuucuugcca

SEQ ID NO: 79932 - RNA, 18 nt, Human
cuucauaggcagccuccc

SEQ ID NO: 79933 - RNA, 23 nt, Human
cuugagaugccuacugcucugca

SEQ ID NO: 79934 - RNA, 21 nt, Human
cuugggcuuauaaaaccagca

SEQ ID NO: 79935 - RNA, 22 nt, Human
gaagauauguauccgauugucc

SEQ ID NO: 79936 - RNA, 20 nt, Human
gacaaacaagagacucucag

SEQ ID NO: 79937 - RNA, 20 nt, Human
gaccugccacuuaaaacuuu

SEQ ID NO: 79938 - RNA, 18 nt, Human
gacugcaacgcugaaaau

SEQ ID NO: 79939 - RNA, 20 nt, Human
gcccucccuacaccaauccc

SEQ ID NO: 79940 - RNA, 18 nt, Human
gcugaaggccuguuucca

SEQ ID NO: 79941 - RNA, 22 nt, Human
gcuggaaccgccgccgccgccg

SEQ ID NO: 79942 - RNA, 19 nt, Human
ggcacaucuucucuuucac

SEQ ID NO: 79943 - RNA, 18 nt, Human
gggaaccaggagucauaa

SEQ ID NO: 79944 - RNA, 21 nt, Human
uaaaaggaaggucuuaugaga

SEQ ID NO: 79945 - RNA, 21 nt, Human
uaaauaacccccccaccccca

SEQ ID NO: 79946 - RNA, 21 nt, Human
uaaaucaagcauagucacaaa

SEQ ID NO: 79947 - RNA, 19 nt, Human
uaacaugaaaagaccaagu

SEQ ID NO: 79948 - RNA, 27 nt, Human
uaaccagaauaaacucugauuucucuu

SEQ ID NO: 79949 - RNA, 22 nt, Human
uaacccccccacccccagugcc

SEQ ID NO: 79950 - RNA, 20 nt, Human
uaagccagagacuccucccc

SEQ ID NO: 79951 - RNA, 24 nt, Human
uaauacauuuuggaaaagcaaaug

SEQ ID NO: 79952 - RNA, 19 nt, Human
uacacacaccaggcacauc

SEQ ID NO: 79953 - RNA, 22 nt, Human
uaccaaguagcuaguucccaag

SEQ ID NO: 79954 - RNA, 19 nt, Human
uacccaaaugagauuaagg

SEQ ID NO: 79955 - RNA, 22 nt, Human
uaccuugagaugccuacugcuc

SEQ ID NO: 79956 - RNA, 24 nt, Human
uagaauaaaauaaaggacugggug

SEQ ID NO: 79957 - RNA, 22 nt, Human
uagaccuacucaauaagaaucu

SEQ ID NO: 79958 - RNA, 19 nt, Human
uagagaaucauuaacaaaa

SEQ ID NO: 79959 - RNA, 25 nt, Human
uaucuccuuuuggcuuaaaccaacc

SEQ ID NO: 79960 - RNA, 21 nt, Human
uauuguuuuucucucucuucc

SEQ ID NO: 79961 - RNA, 21 nt, Human
ucaggcccugguuucaugugc

SEQ ID NO: 79962 - RNA, 21 nt, Human
ucauccagaccagaacaccua

SEQ ID NO: 79963 - RNA, 24 nt, Human
ucaugugugugucuuauggggccu

SEQ ID NO: 79964 - RNA, 19 nt, Human
uccaaauaguucuugaucu

SEQ ID NO: 79965 - RNA, 21 nt, Human
uccacagagccuugcgcggca

SEQ ID NO: 79966 - RNA, 23 nt, Human
ucuacaacucacuggcagcacaa

SEQ ID NO: 79967 - RNA, 21 nt, Human
ucuccagcgcagccaaugggc

SEQ ID NO: 79968 - RNA, 20 nt, Human
ucuggagaugaggguggagg

SEQ ID NO: 79969 - RNA, 19 nt, Human
ucuuccagcauaaaucuac

SEQ ID NO: 79970 - RNA, 19 nt, Human
ugacugcaacgcugaaaau

SEQ ID NO: 79971 - RNA, 21 nt, Human
ugagaacaccacagccucuau

SEQ ID NO: 79972 - RNA, 24 nt, Human
ugagaacaccacagccucuaucaa

SEQ ID NO: 79973 - RNA, 27 nt, Human
ugagaacaccacagccucuaucaacug

SEQ ID NO: 79974 - RNA, 19 nt, Human
ugagaaggagguaaggcuu

SEQ ID NO: 79975 - RNA, 18 nt, Human
ugaggccacacuagucag

SEQ ID NO: 79976 - RNA, 26 nt, Human
ugccauugugcguacacaagaacaag

SEQ ID NO: 79977 - RNA, 21 nt, Human
ugcuaaaccucucauuagcau

SEQ ID NO: 79978 - RNA, 21 nt, Human
uggaaaauagagagaaaugau

SEQ ID NO: 79979 - RNA, 22 nt, Human
uggcaaaaaguacaaauucaua

SEQ ID NO: 79980 - RNA, 20 nt, Human
uggccagcuagacauucaga

SEQ ID NO: 79981 - RNA, 18 nt, Human
uggcuucucaaguuaacc

SEQ ID NO: 79982 - RNA, 19 nt, Human
ugguuaaagucuguuaucc

SEQ ID NO: 79983 - RNA, 24 nt, Human
uguguuuauaaauaacccccccac

SEQ ID NO: 79984 - RNA, 24 nt, Human
uguuaaguuguacacacccccaug

SEQ ID NO: 79985 - RNA, 18 nt, Human
uguuuugcacaacccuuc

SEQ ID NO: 79986 - RNA, 18 nt, Human
uuacagaaucacuuuccc

SEQ ID NO: 79987 - RNA, 23 nt, Human
uuaggaucuagcaccuaacuggu

SEQ ID NO: 79988 - RNA, 24 nt, Human
uucucaguguuuucauacccccuu

SEQ ID NO: 79989 - RNA, 18 nt, Human
uucucuuucacagagcuu

SEQ ID NO: 79990 - RNA, 23 nt, Human
uugccccaagccaacaacuuaac

SEQ ID NO: 79991 - RNA, 20 nt, Human
uuguaacuaccaaguagcua

SEQ ID NO: 79992 - RNA, 20 nt, Human
uuuaacaggcacccaucauc

SEQ ID NO: 79993 - RNA, 22 nt, Human
uuuaguagccugagcacaaagc

SEQ ID NO: 79994 - RNA, 24 nt, Human
uuuauaaauaacccccccaccccc

SEQ ID NO: 79995 - RNA, 18 nt, Human
uuucaggcccugguuuca

SEQ ID NO: 79996 - RNA, 20 nt, Human
uuucucacccugcucaugug

SEQ ID NO: 79997 - RNA, 21 nt, Human
uuugcaaacagugaaauuuau

SEQ ID NO: 79998 - RNA, 21 nt, Human
aacaaguaagcaaccucccaa

SEQ ID NO: 79999 - RNA, 18 nt, Human
aagcaaccucccaacucc

SEQ ID NO: 80000 - RNA, 23 nt, Human
agacaauaagauccgccgugacc

SEQ ID NO: 80001 - RNA, 22 nt, Human
caccaaaccuuacaggcccugg

SEQ ID NO: 80002 - RNA, 25 nt, Human
cccguucuuuucucccucauucucc

SEQ ID NO: 80003 - RNA, 24 nt, Human
ccuaacacuaccuguuuagcaaau

SEQ ID NO: 80004 - RNA, 19 nt, Human
cuccccaaaugaaaaucug

SEQ ID NO: 80005 - RNA, 23 nt, Human
gaaaaccuuucauggauuagcuc

SEQ ID NO: 80006 - RNA, 21 nt, Human
gagagcugagcugagcccagc

SEQ ID NO: 80007 - RNA, 23 nt, Human
gcagugcucuuggcucggaaugc

SEQ ID NO: 80008 - RNA, 18 nt, Human
uagcuccuaacacuaccu

SEQ ID NO: 80009 - RNA, 19 nt, Human
uauugagcuagaggaggag

SEQ ID NO: 80010 - RNA, 22 nt, Human
ucauucuccccaaaugaaaauc

SEQ ID NO: 80011 - RNA, 21 nt, Human
uccccaaaugaaaaucugccc

SEQ ID NO: 80012 - RNA, 23 nt, Human
uccccaaaugaaaaucugcccau

SEQ ID NO: 80013 - RNA, 22 nt, Human
ugagcuagaggaggagagcuga

SEQ ID NO: 80014 - RNA, 22 nt, Human
ugagcuagaggaggagagcugg

SEQ ID NO: 80015 - RNA, 21 nt, Human
ugcccguucuuuucucccuca

SEQ ID NO: 80016 - RNA, 18 nt, Human
uucucccucauucucccc

SEQ ID NO: 80017 - RNA, 19 nt, Human
uucucccucauucucccca

SEQ ID NO: 80018 - RNA, 18 nt, Human
acugcacuucagucuggg

SEQ ID NO: 80019 - RNA, 25 nt, Human
acugcacuucagucugggccgacgg

SEQ ID NO: 80020 - RNA, 24 nt, Human
agcaacucgagaggcugagguggg

SEQ ID NO: 80021 - RNA, 24 nt, Human
agcugcuuuuggaggaguuuucuc

SEQ ID NO: 80022 - RNA, 20 nt, Human
aggcugaggugggagaaucg

SEQ ID NO: 80023 - RNA, 19 nt, Human
aggucgaggcugcagcgag

SEQ ID NO: 80024 - RNA, 24 nt, Human
aggugggagaaucguuuaagccug

SEQ ID NO: 80025 - RNA, 24 nt, Human
auugugccacugcacuucagucug

SEQ ID NO: 80026 - RNA, 18 nt, Human
cacugcacuucagucugg

SEQ ID NO: 80027 - RNA, 19 nt, Human
cacugcacuucagucuggg

SEQ ID NO: 80028 - RNA, 22 nt, Human
cacugcacuucagucugggccg

SEQ ID NO: 80029 - RNA, 21 nt, Human
cagcaacucgagaggcugagg

SEQ ID NO: 80030 - RNA, 24 nt, Human
cagcaacucgagaggcugaggugg

SEQ ID NO: 80031 - RNA, 18 nt, Human
ccacugcacuucagucug

SEQ ID NO: 80032 - RNA, 20 nt, Human
ccacugcacuucagucuggg

SEQ ID NO: 80033 - RNA, 20 nt, Human
ccacugcacuucagucuggg

SEQ ID NO: 80034 - RNA, 21 nt, Human
ccacugcacuucagucugggc

SEQ ID NO: 80035 - RNA, 21 nt, Human
ccacugcacuucagucugggc

SEQ ID NO: 80036 - RNA, 25 nt, Human
ccacugcacuucagucugggccgac

SEQ ID NO: 80037 - RNA, 21 nt, Human
cugauagugagagcugcuuuu

SEQ ID NO: 80038 - RNA, 23 nt, Human
ggacugagaccucaggcagaaaa

SEQ ID NO: 80039 - RNA, 24 nt, Human
uaugauugugccacugcacuucag

SEQ ID NO: 80040 - RNA, 18 nt, Human
ugaccuguggucccagca

SEQ ID NO: 80041 - RNA, 24 nt, Human
uggucccagcaacucgagaggcug

SEQ ID NO: 80042 - RNA, 18 nt, Human
uuuuuuuuuuuuuucuug

SEQ ID NO: 80043 - RNA, 21 nt, Human
uuuuuuuuuuuuuucuugguu

SEQ ID NO: 80044 - RNA, 25 nt, Human
uuuuuuuuuuuuuuuuuucuugguu

SEQ ID NO: 80045 - RNA, 23 nt, Human
uuuuuuuuuuuuuuuuuuuucuu

SEQ ID NO: 80046 - RNA, 24 nt, Human
aaaugcuagagcuaugcaaaaacc

SEQ ID NO: 80047 - RNA, 18 nt, Human
aaccuuggucucccccuu

SEQ ID NO: 80048 - RNA, 19 nt, Human
aacucauuucccaaggucg

SEQ ID NO: 80049 - RNA, 23 nt, Human
aagaaacccagggcaacaacuca

SEQ ID NO: 80050 - RNA, 21 nt, Human
aagcuuggagaccacugaucu

SEQ ID NO: 80051 - RNA, 18 nt, Human
aaggagcaggcuggcuca

SEQ ID NO: 80052 - RNA, 19 nt, Human
acaggaacaaucccuuggu

SEQ ID NO: 80053 - RNA, 22 nt, Human
acaugccagaagccuguuaaca

SEQ ID NO: 80054 - RNA, 25 nt, Human
acauggccuucucuccaaaugcucc

SEQ ID NO: 80055 - RNA, 21 nt, Human
acugcggggcagccugauguc

SEQ ID NO: 80056 - RNA, 21 nt, Human
agacaggaacagucccugagc

SEQ ID NO: 80057 - RNA, 23 nt, Human
agcaggcuggcucaggucggacc

SEQ ID NO: 80058 - RNA, 21 nt, Human
agcccuccagguucuagcccu

SEQ ID NO: 80059 - RNA, 30 nt, Human
agcuucuagcucagguuuuagcuucucuag

SEQ ID NO: 80060 - RNA, 18 nt, Human
aggcagaggagagugggu

SEQ ID NO: 80061 - RNA, 18 nt, Human
aggcagggacaggugguu

SEQ ID NO: 80062 - RNA, 27 nt, Human
agggaccaaacucggggguuucgggag

SEQ ID NO: 80063 - RNA, 27 nt, Human
aggguggugggaaugacagguggaaaa

SEQ ID NO: 80064 - RNA, 20 nt, Human
agguucuagcccuucuuggu

SEQ ID NO: 80065 - RNA, 23 nt, Human
aguauacauacuggguaugcaua

SEQ ID NO: 80066 - RNA, 22 nt, Human
augcuuccuguuuacaacauaa

SEQ ID NO: 80067 - RNA, 25 nt, Human
caacauaacagcucauugagucuuu

SEQ ID NO: 80068 - RNA, 24 nt, Human
cacacucuucuagggcucauacug

SEQ ID NO: 80069 - RNA, 25 nt, Human
caccccuucccaaaggcuucugagu

SEQ ID NO: 80070 - RNA, 23 nt, Human
cacgugcucuggugcugaaugac

SEQ ID NO: 80071 - RNA, 22 nt, Human
cacuccucucccugcccccaac

SEQ ID NO: 80072 - RNA, 21 nt, Human
cacugugauccucugggcaag

SEQ ID NO: 80073 - RNA, 22 nt, Human
cagcaaauaagaacaguaaugc

SEQ ID NO: 80074 - RNA, 22 nt, Human
cagcagcccugcuggcguuugc

SEQ ID NO: 80075 - RNA, 19 nt, Human
cagccaugcucccugcaaa

SEQ ID NO: 80076 - RNA, 22 nt, Human
cagcccuccagguucuagcccu

SEQ ID NO: 80077 - RNA, 22 nt, Human
cagcccuccagguucuaguccu

SEQ ID NO: 80078 - RNA, 23 nt, Human
cagggaccaaacucggggguuuc

SEQ ID NO: 80079 - RNA, 18 nt, Human
caggguggugggaaugac

SEQ ID NO: 80080 - RNA, 18 nt, Human
cauaucacccacagcacc

SEQ ID NO: 80081 - RNA, 19 nt, Human
caucuacaccaugcauagg

SEQ ID NO: 80082 - RNA, 20 nt, Human
cauggccuucucuccaaaug

SEQ ID NO: 80083 - RNA, 26 nt, Human
ccaaugagcaccuacugugugccaga

SEQ ID NO: 80084 - RNA, 20 nt, Human
ccacagcacccugcucgacu

SEQ ID NO: 80085 - RNA, 23 nt, Human
ccagguucuagccugccggguuc

SEQ ID NO: 80086 - RNA, 23 nt, Human
ccagguucuagcuugccagguuc

SEQ ID NO: 80087 - RNA, 20 nt, Human
ccauaucacccacagcaccc

SEQ ID NO: 80088 - RNA, 21 nt, Human
cccacagcacccugcucgacc

SEQ ID NO: 80089 - RNA, 19 nt, Human
cccaggccuccuccacucc

SEQ ID NO: 80090 - RNA, 20 nt, Human
ccccacauggccauugcggc

SEQ ID NO: 80091 - RNA, 26 nt, Human
ccccacauggccauugcggcagagcu

SEQ ID NO: 80092 - RNA, 20 nt, Human
cccccaggccuccuccacuc

SEQ ID NO: 80093 - RNA, 21 nt, Human
cccuccagguucuagcccuuc

SEQ ID NO: 80094 - RNA, 21 nt, Human
cccuccagguucuagcccuuc

SEQ ID NO: 80095 - RNA, 21 nt, Human
cccuccagguucuagcccuuc

SEQ ID NO: 80096 - RNA, 21 nt, Human
cccuccagguucuagcccuuc

SEQ ID NO: 80097 - RNA, 21 nt, Human
cccuccagguucuggcucucc

SEQ ID NO: 80098 - RNA, 20 nt, Human
ccuccuccacuccugggaag

SEQ ID NO: 80099 - RNA, 22 nt, Human
ccugccagguucuagcccucca

SEQ ID NO: 80100 - RNA, 22 nt, Human
ccugccggguucuagcucucca

SEQ ID NO: 80101 - RNA, 22 nt, Human
ccuguguguguggcgguugggg

SEQ ID NO: 80102 - RNA, 19 nt, Human
cgcagacucaguugccccu

SEQ ID NO: 80103 - RNA, 22 nt, Human
cggcaugggcacuucaagucgc

SEQ ID NO: 80104 - RNA, 25 nt, Human
cuagcucuccagauuccagcccucc

SEQ ID NO: 80105 - RNA, 19 nt, Human
cucacauguacguagcacc

SEQ ID NO: 80106 - RNA, 21 nt, Human
cucaguugccccucagaccag

SEQ ID NO: 80107 - RNA, 18 nt, Human
cuccagauuccagcccuc

SEQ ID NO: 80108 - RNA, 18 nt, Human
cuccagauuccagcccuc

SEQ ID NO: 80109 - RNA, 18 nt, Human
cuccagauuccagcccuc

SEQ ID NO: 80110 - RNA, 18 nt, Human
cuccagauucuagcccuc

SEQ ID NO: 80111 - RNA, 18 nt, Human
cuccagauucuagcccuc

SEQ ID NO: 80112 - RNA, 19 nt, Human
cucccugcccccaggccuc

SEQ ID NO: 80113 - RNA, 21 nt, Human
cucuccagguucuagcccuuc

SEQ ID NO: 80114 - RNA, 18 nt, Human
cucuuucuucccucuugc

SEQ ID NO: 80115 - RNA, 23 nt, Human
cugauucugcuccacggagcuau

SEQ ID NO: 80116 - RNA, 25 nt, Human
cugcccccaggccuccuccacuccu

SEQ ID NO: 80117 - RNA, 19 nt, Human
cuggaaccuuggucucccc

SEQ ID NO: 80118 - RNA, 19 nt, Human
cugugcgugaguucacccc

SEQ ID NO: 80119 - RNA, 20 nt, Human
cuguguguguggcgguuggg

SEQ ID NO: 80120 - RNA, 22 nt, Human
cuucccagguaccggcuggugg

SEQ ID NO: 80121 - RNA, 20 nt, Human
cuuccuccagauacuuacug

SEQ ID NO: 80122 - RNA, 18 nt, Human
cuucucccgcagacucag

SEQ ID NO: 80123 - RNA, 19 nt, Human
cuuggucucccccuucugg

SEQ ID NO: 80124 - RNA, 18 nt, Human
gacagauguucuuuauca

SEQ ID NO: 80125 - RNA, 18 nt, Human
gcaccccuucccaaaggc

SEQ ID NO: 80126 - RNA, 22 nt, Human
gcccagucguucccacuugagu

SEQ ID NO: 80127 - RNA, 21 nt, Human
gcggggcagccugaugucccc

SEQ ID NO: 80128 - RNA, 23 nt, Human
ggaacugaggcagggacaggugg

SEQ ID NO: 80129 - RNA, 22 nt, Human
ggaccguccccaccccuccucg

SEQ ID NO: 80130 - RNA, 21 nt, Human
ggccaccuuccaauaaaccau

SEQ ID NO: 80131 - RNA, 19 nt, Human
ggguggugggaaaaaagag

SEQ ID NO: 80132 - RNA, 18 nt, Human
ggguuggggguaaggagg

SEQ ID NO: 80133 - RNA, 21 nt, Human
gguggaagggagccaaugagc

SEQ ID NO: 80134 - RNA, 19 nt, Human
gguugagcuggaaccuugg

SEQ ID NO: 80135 - RNA, 21 nt, Human
gucugcguaaugaugccucac

SEQ ID NO: 80136 - RNA, 25 nt, Human
gugcugcccuggcacugccgauggu

SEQ ID NO: 80137 - RNA, 24 nt, Human
guguguguggcgguuggggccuca

SEQ ID NO: 80138 - RNA, 20 nt, Human
guuacagaagagggaacuga

SEQ ID NO: 80139 - RNA, 21 nt, Human
uaaaauucagaguuggauugg

SEQ ID NO: 80140 - RNA, 24 nt, Human
uaacaaaugcuagagcuaugcaaa

SEQ ID NO: 80141 - RNA, 22 nt, Human
uaaccugccagguucuagcccu

SEQ ID NO: 80142 - RNA, 20 nt, Human
uaaugaugccucacauguac

SEQ ID NO: 80143 - RNA, 24 nt, Human
uacagaagagggaacugaggcagg

SEQ ID NO: 80144 - RNA, 21 nt, Human
uagcccuccagguucauuccc

SEQ ID NO: 80145 - RNA, 22 nt, Human
uagcccuccagguucuagcccu

SEQ ID NO: 80146 - RNA, 22 nt, Human
uagcccuccagguucuagcccu

SEQ ID NO: 80147 - RNA, 22 nt, Human
uagcccuccagguucuagcccu

SEQ ID NO: 80148 - RNA, 22 nt, Human
uagcccuccagguucuagcccu

SEQ ID NO: 80149 - RNA, 22 nt, Human
uagcucuccagauuccagcccu

SEQ ID NO: 80150 - RNA, 22 nt, Human
uagcucuccagauuccagcccu

SEQ ID NO: 80151 - RNA, 22 nt, Human
uagcucuccagauuccagcccu

SEQ ID NO: 80152 - RNA, 24 nt, Human
uagcucuccagauuccagcccucc

SEQ ID NO: 80153 - RNA, 24 nt, Human
uagcucuccagauuccagcccucc

SEQ ID NO: 80154 - RNA, 22 nt, Human
uagcucuccagauucuagcccu

SEQ ID NO: 80155 - RNA, 22 nt, Human
uagcucuccagauucuagcccu

SEQ ID NO: 80156 - RNA, 22 nt, Human
uagcucuccagguucuagcccu

SEQ ID NO: 80157 - RNA, 21 nt, Human
uagcuugccagguucuagccu

SEQ ID NO: 80158 - RNA, 20 nt, Human
uaucagggaccccucagggc

SEQ ID NO: 80159 - RNA, 21 nt, Human
uauucauuuaucaagugaaug

SEQ ID NO: 80160 - RNA, 20 nt, Human
ucacuccucucccugccccc

SEQ ID NO: 80161 - RNA, 24 nt, Human
ucagaccagguguggauccccaca

SEQ ID NO: 80162 - RNA, 19 nt, Human
ucagaccaucacgugcucu

SEQ ID NO: 80163 - RNA, 21 nt, Human
ucaggguggugggaaugacag

SEQ ID NO: 80164 - RNA, 22 nt, Human
ucagucacuccucucccugccc

SEQ ID NO: 80165 - RNA, 20 nt, Human
ucccucaauccuuacacaaa

SEQ ID NO: 80166 - RNA, 19 nt, Human
ucccugcaaaauugggcag

SEQ ID NO: 80167 - RNA, 22 nt, Human
ucccugguacugcggggcagcc

SEQ ID NO: 80168 - RNA, 22 nt, Human
uccuccagcuucuagcucaggu

SEQ ID NO: 80169 - RNA, 25 nt, Human
ucuagcccuccagguucuagcucuc

SEQ ID NO: 80170 - RNA, 25 nt, Human
ucuagcccuccagguucuagcucuc

SEQ ID NO: 80171 - RNA, 25 nt, Human
ucuagcccuccagguucuagcucuc

SEQ ID NO: 80172 - RNA, 25 nt, Human
ucuagcccuccagguucuagcucuc

SEQ ID NO: 80173 - RNA, 25 nt, Human
ucuagcccuccagguucuagcucuc

SEQ ID NO: 80174 - RNA, 25 nt, Human
ucuagcccuccagguucuaguucuc

SEQ ID NO: 80175 - RNA, 25 nt, Human
ucuagcccuccagguucuggcucuc

SEQ ID NO: 80176 - RNA, 26 nt, Human
ucuagcccuucuagguucuagcucuc

SEQ ID NO: 80177 - RNA, 24 nt, Human
ucuagguucuaaccugccagguuc

SEQ ID NO: 80178 - RNA, 19 nt, Human
ucuccagguucuagccucu

SEQ ID NO: 80179 - RNA, 18 nt, Human
ucuccagguucuagcucu

SEQ ID NO: 80180 - RNA, 18 nt, Human
ucucccggagcaagcggc

SEQ ID NO: 80181 - RNA, 25 nt, Human
ucuuucuuaaauuucuacugguuga

SEQ ID NO: 80182 - RNA, 21 nt, Human
ugaaaagcaacugucccucag

SEQ ID NO: 80183 - RNA, 24 nt, Human
ugaauagcaccccuucccaaaggc

SEQ ID NO: 80184 - RNA, 22 nt, Human
ugaggcagaggagagugggugg

SEQ ID NO: 80185 - RNA, 25 nt, Human
ugaggggagccauaaaauccugguc

SEQ ID NO: 80186 - RNA, 23 nt, Human
ugauuuuggaguccuuggcugug

SEQ ID NO: 80187 - RNA, 21 nt, Human
ugccagguucuagcccuccag

SEQ ID NO: 80188 - RNA, 19 nt, Human
ugccagguucuagccugcc

SEQ ID NO: 80189 - RNA, 19 nt, Human
ugcccccaggccuccucca

SEQ ID NO: 80190 - RNA, 20 nt, Human
ugcccccaggccuccuccac

SEQ ID NO: 80191 - RNA, 27 nt, Human
ugcguaaugaugccucacauguacgua

SEQ ID NO: 80192 - RNA, 18 nt, Human
ugcugcccuggcacugcc

SEQ ID NO: 80193 - RNA, 20 nt, Human
ugcuggggcagggacggaga

SEQ ID NO: 80194 - RNA, 18 nt, Human
uggaagggagccaaugag

SEQ ID NO: 80195 - RNA, 20 nt, Human
uggcucagguguggcagcaa

SEQ ID NO: 80196 - RNA, 22 nt, Human
uggcucuccagguucuagcccu

SEQ ID NO: 80197 - RNA, 23 nt, Human
ugggaaugacagguggaagggag

SEQ ID NO: 80198 - RNA, 20 nt, Human
uggggguaaggagggaaucu

SEQ ID NO: 80199 - RNA, 19 nt, Human
uggguuggggguaaggagg

SEQ ID NO: 80200 - RNA, 20 nt, Human
ugguggggggucucagcacu

SEQ ID NO: 80201 - RNA, 22 nt, Human
ugguggggggucucagcacugu

SEQ ID NO: 80202 - RNA, 19 nt, Human
uggugguggggggucucag

SEQ ID NO: 80203 - RNA, 19 nt, Human
ugugauuuuggaguccuug

SEQ ID NO: 80204 - RNA, 20 nt, Human
uguggcgguuggggccucag

SEQ ID NO: 80205 - RNA, 18 nt, Human
uguguggcacaguuugac

SEQ ID NO: 80206 - RNA, 19 nt, Human
uuacugccuuuaacccuca

SEQ ID NO: 80207 - RNA, 22 nt, Human
uucaccccauccucacagccau

SEQ ID NO: 80208 - RNA, 24 nt, Human
uuccuccagauacuuacugaggca

SEQ ID NO: 80209 - RNA, 24 nt, Human
uucuaguucuccagguucuagccu

SEQ ID NO: 80210 - RNA, 24 nt, Human
uucuggcucuccagguucuagccc

SEQ ID NO: 80211 - RNA, 19 nt, Human
uugaguuccuucaagaugg

SEQ ID NO: 80212 - RNA, 24 nt, Human
uugccagguucuagccugccgggu

SEQ ID NO: 80213 - RNA, 18 nt, Human
uuggcacagaccuccuug

SEQ ID NO: 80214 - RNA, 24 nt, Human
uuuacaugauuuucucguuuggau

SEQ ID NO: 80215 - RNA, 21 nt, Human
uuuuugacgcuuuugcuuuaa

SEQ ID NO: 80216 - RNA, 19 nt, Human
agcaggagguggagggggg

SEQ ID NO: 80217 - RNA, 21 nt, Human
agcgggcgggugcgcccgggc

SEQ ID NO: 80218 - RNA, 22 nt, Human
caacauuaucaaggaauguaau

SEQ ID NO: 80219 - RNA, 20 nt, Human
cacaaaccucacgggucccc

SEQ ID NO: 80220 - RNA, 21 nt, Human
cacaaaccucacggguccccg

SEQ ID NO: 80221 - RNA, 26 nt, Human
caccgggcuggcuccucucccccugg

SEQ ID NO: 80222 - RNA, 18 nt, Human
caccugguggaacucggg

SEQ ID NO: 80223 - RNA, 29 nt, Human
cccagccccgguccccgucgccgguuccg

SEQ ID NO: 80224 - RNA, 20 nt, Human
ccccccgagcaggaggugga

SEQ ID NO: 80225 - RNA, 19 nt, Human
ccccgccggccccacagca

SEQ ID NO: 80226 - RNA, 22 nt, Human
ccccgucgcggugcugcucccc

SEQ ID NO: 80227 - RNA, 18 nt, Human
cccgccggccccacagca

SEQ ID NO: 80228 - RNA, 20 nt, Human
ccgauucuggcuccagcgcc

SEQ ID NO: 80229 - RNA, 18 nt, Human
ccggccccacagcagcgg

SEQ ID NO: 80230 - RNA, 18 nt, Human
gagcccgaggcgcuacgg

SEQ ID NO: 80231 - RNA, 19 nt, Human
gaggggcgcaccgggcugg

SEQ ID NO: 80232 - RNA, 23 nt, Human
gcgggacagcgagcgggcgggug

SEQ ID NO: 80233 - RNA, 18 nt, Human
gggacagcgagcgggcgg

SEQ ID NO: 80234 - RNA, 22 nt, Human
gugggugucucauuaaagcccc

SEQ ID NO: 80235 - RNA, 26 nt, Human
uagaaccacuguacuguauaaacuuc

SEQ ID NO: 80236 - RNA, 18 nt, Human
uauguauauauacaaaua

SEQ ID NO: 80237 - RNA, 24 nt, Human
ucaguucuuggcaacggcaacaaa

SEQ ID NO: 80238 - RNA, 22 nt, Human
uccacacaaaccucacgggucc

SEQ ID NO: 80239 - RNA, 20 nt, Human
ucuggucauggacaugucca

SEQ ID NO: 80240 - RNA, 22 nt, Human
uggcaacggcaacaaaccacaa

SEQ ID NO: 80241 - RNA, 23 nt, Human
ugucucaauauaaucuaaucuau

SEQ ID NO: 80242 - RNA, 24 nt, Human
aaaaaaaaaagaagaaauaaagaa

SEQ ID NO: 80243 - RNA, 25 nt, Human
aaaaaaaagaagaaauaaagaaaaa

SEQ ID NO: 80244 - RNA, 25 nt, Human
aaaggggauuaggaacuacgcccuc

SEQ ID NO: 80245 - RNA, 23 nt, Human
aacuacgcccuccccacaaagcc

SEQ ID NO: 80246 - RNA, 21 nt, Human
aagaagaaauaaagaaaaaug

SEQ ID NO: 80247 - RNA, 23 nt, Human
aagauaaaagaggugaaguuuau

SEQ ID NO: 80248 - RNA, 24 nt, Human
acugcacucuugccugggcaacag

SEQ ID NO: 80249 - RNA, 23 nt, Human
agaacaagacugucuccaaaaaa

SEQ ID NO: 80250 - RNA, 23 nt, Human
agaggcugcagugagcugagauc

SEQ ID NO: 80251 - RNA, 24 nt, Human
agaggcugcagugagcugagauca

SEQ ID NO: 80252 - RNA, 24 nt, Human
agccucacggccgcucacagcccc

SEQ ID NO: 80253 - RNA, 19 nt, Human
aggagaaucuguugaaucu

SEQ ID NO: 80254 - RNA, 20 nt, Human
aggcaggagaaucuguugaa

SEQ ID NO: 80255 - RNA, 24 nt, Human
aggcaggagaaucuguugaaucug

SEQ ID NO: 80256 - RNA, 24 nt, Human
agggggcccggggaggcagccuca

SEQ ID NO: 80257 - RNA, 24 nt, Human
aucauaccacugcacucuugccug

SEQ ID NO: 80258 - RNA, 24 nt, Human
caacagaacaagacugucuccaaa

SEQ ID NO: 80259 - RNA, 20 nt, Human
cacagccccgagccccggcc

SEQ ID NO: 80260 - RNA, 23 nt, Human
cacugcacucuugccugggcaac

SEQ ID NO: 80261 - RNA, 24 nt, Human
cacugcacucuugccugggcaaca

SEQ ID NO: 80262 - RNA, 18 nt, Human
cacugccccgccgccgcc

SEQ ID NO: 80263 - RNA, 23 nt, Human
cagccucacggccgcucacagcc

SEQ ID NO: 80264 - RNA, 24 nt, Human
caggccgaggcaggagaaucuguu

SEQ ID NO: 80265 - RNA, 23 nt, Human
ccacaccaccagcucagggggca

SEQ ID NO: 80266 - RNA, 20 nt, Human
ccacugcacucuugccuggg

SEQ ID NO: 80267 - RNA, 21 nt, Human
ccacugcacucuugccugggc

SEQ ID NO: 80268 - RNA, 24 nt, Human
ccacugcacucuugccugggcaac

SEQ ID NO: 80269 - RNA, 19 nt, Human
ccccacaaagccacaccac

SEQ ID NO: 80270 - RNA, 22 nt, Human
ccccgagccccggcggcugccc

SEQ ID NO: 80271 - RNA, 25 nt, Human
cccgagccccggcggcugcccggaa

SEQ ID NO: 80272 - RNA, 19 nt, Human
cccgccgccgccuccuccu

SEQ ID NO: 80273 - RNA, 19 nt, Human
ccgccgccgccuccuccuc

SEQ ID NO: 80274 - RNA, 20 nt, Human
ccucacggccgcucacagcc

SEQ ID NO: 80275 - RNA, 21 nt, Human
ccuguagucccagcuacccgg

SEQ ID NO: 80276 - RNA, 24 nt, Human
ccuguagucccagcuacccggcag

SEQ ID NO: 80277 - RNA, 23 nt, Human
cuccccacaaagccacaccacca

SEQ ID NO: 80278 - RNA, 26 nt, Human
cucucccgccgccgccgcuuuuucau

SEQ ID NO: 80279 - RNA, 19 nt, Human
cugcagugagcugagauca

SEQ ID NO: 80280 - RNA, 20 nt, Human
cugcagugagcugagaucau

SEQ ID NO: 80281 - RNA, 19 nt, Human
cugccccgccgccgccucc

SEQ ID NO: 80282 - RNA, 18 nt, Human
cuggguggcagaggcugc

SEQ ID NO: 80283 - RNA, 19 nt, Human
gaacaagacugucuccaaa

SEQ ID NO: 80284 - RNA, 28 nt, Human
gaacaagacugucuccaaaaaaaaaaga

SEQ ID NO: 80285 - RNA, 25 nt, Human
gcaacagaacaagacugucuccaaa

SEQ ID NO: 80286 - RNA, 24 nt, Human
gccccgagccccggcggcugcccg

SEQ ID NO: 80287 - RNA, 20 nt, Human
gcugagaucauaccacugca

SEQ ID NO: 80288 - RNA, 19 nt, Human
ggcagaggcugcagugagc

SEQ ID NO: 80289 - RNA, 18 nt, Human
ggccgaggcaggagaauc

SEQ ID NO: 80290 - RNA, 18 nt, Human
gguggcagaggcugcagu

SEQ ID NO: 80291 - RNA, 20 nt, Human
gguggcagaggcugcaguga

SEQ ID NO: 80292 - RNA, 22 nt, Human
gucuccaaaaaaaaaagaagaa

SEQ ID NO: 80293 - RNA, 18 nt, Human
uaaaagaggugaaguuua

SEQ ID NO: 80294 - RNA, 28 nt, Human
uaccuuuuuuuuuuuuaaauggaggaaa

SEQ ID NO: 80295 - RNA, 18 nt, Human
uaggaacuacgcccuccc

SEQ ID NO: 80296 - RNA, 23 nt, Human
uaggaacuacgcccuccccacaa

SEQ ID NO: 80297 - RNA, 22 nt, Human
ucacggccgcucacagccccga

SEQ ID NO: 80298 - RNA, 22 nt, Human
uccaaaaaaaaaagaagaaaua

SEQ ID NO: 80299 - RNA, 26 nt, Human
uccaaaaaaaaaagaagaaauaaaga

SEQ ID NO: 80300 - RNA, 22 nt, Human
ucuccaaaaaaaaaagaagaaa

SEQ ID NO: 80301 - RNA, 20 nt, Human
ugcccggaaaggggauuagg

SEQ ID NO: 80302 - RNA, 23 nt, Human
ugccuguagucccagcuacccgg

SEQ ID NO: 80303 - RNA, 19 nt, Human
uucacugccccgccgccgc

SEQ ID NO: 80304 - RNA, 23 nt, Human
aaaagaaaagcaaauuuaaauua

SEQ ID NO: 80305 - RNA, 22 nt, Human
aaacaaaacaaaauuaaaagcc

SEQ ID NO: 80306 - RNA, 21 nt, Human
aaauuaguuuuuuucagagaa

SEQ ID NO: 80307 - RNA, 18 nt, Human
aaugucucaaacaguauc

SEQ ID NO: 80308 - RNA, 22 nt, Human
acaaaacaaaauuaaaagccuu

SEQ ID NO: 80309 - RNA, 18 nt, Human
agagaagaaagggaaagg

SEQ ID NO: 80310 - RNA, 20 nt, Human
agcaucugaucacaucacau

SEQ ID NO: 80311 - RNA, 18 nt, Human
agcccggagcccgucacc

SEQ ID NO: 80312 - RNA, 20 nt, Human
agcccgucacccaaguccgg

SEQ ID NO: 80313 - RNA, 18 nt, Human
aggcacuguggccucggg

SEQ ID NO: 80314 - RNA, 21 nt, Human
agugcaggaaguugagagaga

SEQ ID NO: 80315 - RNA, 22 nt, Human
caaacaaaacaaaauuaaaagc

SEQ ID NO: 80316 - RNA, 22 nt, Human
cagcccccgaugcucuucaccu

SEQ ID NO: 80317 - RNA, 27 nt, Human
caguaaagacaaaaguuucuauuucau

SEQ ID NO: 80318 - RNA, 20 nt, Human
ccuccagaacuaccaucgcu

SEQ ID NO: 80319 - RNA, 21 nt, Human
cuccagaacuaccaucgcucu

SEQ ID NO: 80320 - RNA, 22 nt, Human
cuuuuguggauuuuuucuuuuu

SEQ ID NO: 80321 - RNA, 21 nt, Human
gugaccagguaaagcuuagau

SEQ ID NO: 80322 - RNA, 23 nt, Human
uaagaaccaagugaaaaguguua

SEQ ID NO: 80323 - RNA, 24 nt, Human
uaagaaccaagugaaaaguguuaa

SEQ ID NO: 80324 - RNA, 24 nt, Human
ucaacucaguuaaaaaaaagaaaa

SEQ ID NO: 80325 - RNA, 18 nt, Human
ucagagaagaaagggaaa

SEQ ID NO: 80326 - RNA, 20 nt, Human
ucaguuaaaaaaaagaaaag

SEQ ID NO: 80327 - RNA, 23 nt, Human
ucaguuaaaaaaaagaaaagcaa

SEQ ID NO: 80328 - RNA, 23 nt, Human
ucggccccggagcgaggccucca

SEQ ID NO: 80329 - RNA, 21 nt, Human
ucucaaacaguaucaaacacc

SEQ ID NO: 80330 - RNA, 24 nt, Human
ugaaaacacaucaaucucaauuca

SEQ ID NO: 80331 - RNA, 22 nt, Human
ugagagagauaaaaauccagug

SEQ ID NO: 80332 - RNA, 22 nt, Human
uucagagaagaaagggaaagga

SEQ ID NO: 80333 - RNA, 24 nt, Human
uuuuuuuuuuuuuuuuucaguuuu

SEQ ID NO: 80334 - RNA, 22 nt, Human
uuuuuuuuuuuuuuuuuuucag

SEQ ID NO: 80335 - RNA, 22 nt, Human
acuccagaccuagaccugguca

SEQ ID NO: 80336 - RNA, 21 nt, Human
aggcaggagagaagcugggcc

SEQ ID NO: 80337 - RNA, 23 nt, Human
aggcaggagagaagcugggccug

SEQ ID NO: 80338 - RNA, 24 nt, Human
aggcaggagagaagcugggccugg

SEQ ID NO: 80339 - RNA, 21 nt, Human
ccagaccuagaccuggucaca

SEQ ID NO: 80340 - RNA, 21 nt, Human
cccacgccccuguccagcagg

SEQ ID NO: 80341 - RNA, 22 nt, Human
ggcaggaugguguguccuggcu

SEQ ID NO: 80342 - RNA, 19 nt, Human
ggcucaguguccaagcuga

SEQ ID NO: 80343 - RNA, 22 nt, Human
ucaguguccaagcugaaacucc

SEQ ID NO: 80344 - RNA, 19 nt, Human
uccaagcugaaacuccaga

SEQ ID NO: 80345 - RNA, 21 nt, Human
ugcuuugcuugucugcuuggc

SEQ ID NO: 80346 - RNA, 19 nt, Human
uggaaggcaggagagaagc

SEQ ID NO: 80347 - RNA, 18 nt, Human
uggcuugcuuugcuuguc

SEQ ID NO: 80348 - RNA, 18 nt, Human
uggcuugcuuugcuuguc

SEQ ID NO: 80349 - RNA, 22 nt, Human
uguccaagcugaaacuccagac

SEQ ID NO: 80350 - RNA, 23 nt, Human
aagaaaacauuuuaaugaaggcu

SEQ ID NO: 80351 - RNA, 18 nt, Human
aagcaaagaaaacauuuu

SEQ ID NO: 80352 - RNA, 24 nt, Human
caagcaaagaaaacauuuuaauga

SEQ ID NO: 80353 - RNA, 22 nt, Human
cauuuuaucccaucaagccugg

SEQ ID NO: 80354 - RNA, 21 nt, Human
uaccccuacaguggccccaaa

SEQ ID NO: 80355 - RNA, 23 nt, Human
ucuaauccaaacaggaacccuca

SEQ ID NO: 80356 - RNA, 24 nt, Human
uuaccccuacaguggccccaaaua

SEQ ID NO: 80357 - RNA, 20 nt, Human
uucguuggcaaugccagaug

SEQ ID NO: 80358 - RNA, 18 nt, Human
aagcaacuucuuggguca

SEQ ID NO: 80359 - RNA, 22 nt, Human
cagcagggacuggagcucagga

SEQ ID NO: 80360 - RNA, 24 nt, Human
cccuguggccuggucacgggccuc

SEQ ID NO: 80361 - RNA, 19 nt, Human
gagauugcucaagcuacag

SEQ ID NO: 80362 - RNA, 25 nt, Human
uaaacuggacgcugcgcacaaagca

SEQ ID NO: 80363 - RNA, 22 nt, Human
uaaagcagaaggauccucucca

SEQ ID NO: 80364 - RNA, 19 nt, Human
uaaccagggaauccagcag

SEQ ID NO: 80365 - RNA, 21 nt, Human
ucacgggccucucuggaaucu

SEQ ID NO: 80366 - RNA, 24 nt, Human
ucccuguggccuggucacgggccu

SEQ ID NO: 80367 - RNA, 20 nt, Human
uucaugaaaaagaggaaguu

SEQ ID NO: 80368 - RNA, 22 nt, Human
uuuuuuuuuuuuuuaaacugga

SEQ ID NO: 80369 - RNA, 23 nt, Human
uuuuuuuuuuuuuuuuaaacugg

SEQ ID NO: 80370 - RNA, 22 nt, Human
aagaggaaagaagggugccugg

SEQ ID NO: 80371 - RNA, 25 nt, Human
agaggaaagaagggugccuggagag

SEQ ID NO: 80372 - RNA, 20 nt, Human
aggagcagaacugggguugc

SEQ ID NO: 80373 - RNA, 19 nt, Human
ccggccaggccagcagagc

SEQ ID NO: 80374 - RNA, 23 nt, Human
cuggagaggagcagaacuggggu

SEQ ID NO: 80375 - RNA, 20 nt, Human
ggagaggagcagaacugggg

SEQ ID NO: 80376 - RNA, 19 nt, Human
ugccuggagaggagcagaa

SEQ ID NO: 80377 - RNA, 21 nt, Human
ugccuggagaggagcagaacu

SEQ ID NO: 80378 - RNA, 21 nt, Human
uggagaggagcagaacugggg

SEQ ID NO: 80379 - RNA, 22 nt, Human
uggagaggagcagaacuggggu

SEQ ID NO: 80380 - RNA, 22 nt, Human
uggggaccccacauccauaggg

SEQ ID NO: 80381 - RNA, 24 nt, Human
aaaaagcuucauggggugccucuu

SEQ ID NO: 80382 - RNA, 19 nt, Human
aagacacacacacacacac

SEQ ID NO: 80383 - RNA, 19 nt, Human
aagcacaagacacacacac

SEQ ID NO: 80384 - RNA, 19 nt, Human
aagggaacaugugaugggg

SEQ ID NO: 80385 - RNA, 31 nt, Human
acaagacacacacacacacacacacacacag

SEQ ID NO: 80386 - RNA, 19 nt, Human
acacacacacacacacaca

SEQ ID NO: 80387 - RNA, 23 nt, Human
acacacacacacacacacacaca

SEQ ID NO: 80388 - RNA, 23 nt, Human
acacacacacacacacacacaca

SEQ ID NO: 80389 - RNA, 23 nt, Human
acacacacacacacacacacaca

SEQ ID NO: 80390 - RNA, 23 nt, Human
acacacacacacacacacacaca

SEQ ID NO: 80391 - RNA, 23 nt, Human
acacacacacacacacacacaca

SEQ ID NO: 80392 - RNA, 23 nt, Human
acacacacacacacacacacaca

SEQ ID NO: 80393 - RNA, 23 nt, Human
acacacacacacacacacacaca

SEQ ID NO: 80394 - RNA, 23 nt, Human
acacacacacacacacacacaca

SEQ ID NO: 80395 - RNA, 23 nt, Human
acacacacacacacacacacaca

SEQ ID NO: 80396 - RNA, 23 nt, Human
acacacacacacacacacacaca

SEQ ID NO: 80397 - RNA, 23 nt, Human
acacacacacacacacacacaca

SEQ ID NO: 80398 - RNA, 23 nt, Human
acacacacacacacacacacaca

SEQ ID NO: 80399 - RNA, 24 nt, Human
acaggccaccaagcucagaagcga

SEQ ID NO: 80400 - RNA, 19 nt, Human
agaaagcagucccagcuca

SEQ ID NO: 80401 - RNA, 19 nt, Human
agagaggaaggacggggaa

SEQ ID NO: 80402 - RNA, 21 nt, Human
agaggaaggacggggaaagag

SEQ ID NO: 80403 - RNA, 30 nt, Human
agcacaagacacacacacacacacacacag

SEQ ID NO: 80404 - RNA, 18 nt, Human
agcagccccuccuugcgc

SEQ ID NO: 80405 - RNA, 24 nt, Human
agcagcuacucacuccugggcagu

SEQ ID NO: 80406 - RNA, 25 nt, Human
agccaccgaccucagaagcagcccc

SEQ ID NO: 80407 - RNA, 20 nt, Human
agccuuggacacuuggguuu

SEQ ID NO: 80408 - RNA, 22 nt, Human
aggcgaagccagguucggagag

SEQ ID NO: 80409 - RNA, 29 nt, Human
aggcggugauggggcaucgagcugggguc

SEQ ID NO: 80410 - RNA, 18 nt, Human
agggacccgagguggggg

SEQ ID NO: 80411 - RNA, 19 nt, Human
agggagaggcggugauggg

SEQ ID NO: 80412 - RNA, 21 nt, Human
agucggggaggguugaaaggc

SEQ ID NO: 80413 - RNA, 21 nt, Human
auggagggaacaggccaccaa

SEQ ID NO: 80414 - RNA, 20 nt, Human
cacacacacacacacacaca

SEQ ID NO: 80415 - RNA, 20 nt, Human
cacacacacacacacacaca

SEQ ID NO: 80416 - RNA, 20 nt, Human
cacacacacacacacacaca

SEQ ID NO: 80417 - RNA, 20 nt, Human
cacacacacacacacacaca

SEQ ID NO: 80418 - RNA, 20 nt, Human
cacacacacacacacacaca

SEQ ID NO: 80419 - RNA, 20 nt, Human
cacacacacacacacacaca

SEQ ID NO: 80420 - RNA, 20 nt, Human
cacacacacacacacacaca

SEQ ID NO: 80421 - RNA, 20 nt, Human
cacacacacacacacacaca

SEQ ID NO: 80422 - RNA, 20 nt, Human
cacacacacacacacacaca

SEQ ID NO: 80423 - RNA, 20 nt, Human
cacacacacacacacacaca

SEQ ID NO: 80424 - RNA, 20 nt, Human
cacacacacacacacacaca

SEQ ID NO: 80425 - RNA, 20 nt, Human
cacacacacacacacacaca

SEQ ID NO: 80426 - RNA, 20 nt, Human
cacacacacacacacacaca

SEQ ID NO: 80427 - RNA, 20 nt, Human
cacacacacacacacacaca

SEQ ID NO: 80428 - RNA, 20 nt, Human
cacacacacacacacacaca

SEQ ID NO: 80429 - RNA, 20 nt, Human
cacacacacacacacacaca

SEQ ID NO: 80430 - RNA, 22 nt, Human
cacacacacacacacacacaca

SEQ ID NO: 80431 - RNA, 22 nt, Human
cacacacacacacacacacaca

SEQ ID NO: 80432 - RNA, 22 nt, Human
cacacacacacacacacacaca

SEQ ID NO: 80433 - RNA, 22 nt, Human
cacacacacacacacacacaca

SEQ ID NO: 80434 - RNA, 22 nt, Human
cacacacacacacacacacaca

SEQ ID NO: 80435 - RNA, 22 nt, Human
cacacacacacacacacacaca

SEQ ID NO: 80436 - RNA, 22 nt, Human
cacacacacacacacacacaca

SEQ ID NO: 80437 - RNA, 22 nt, Human
cacacacacacacacacacaca

SEQ ID NO: 80438 - RNA, 26 nt, Human
cacacacacacacacacacacacaca

SEQ ID NO: 80439 - RNA, 26 nt, Human
cacacacacacacacacacacacaca

SEQ ID NO: 80440 - RNA, 26 nt, Human
cacacacacacacacacacacacaca

SEQ ID NO: 80441 - RNA, 26 nt, Human
cacacacacacacacacacacacaca

SEQ ID NO: 80442 - RNA, 26 nt, Human
cacacacacacacacacacacacaca

SEQ ID NO: 80443 - RNA, 26 nt, Human
cacacacacacacacacacacacaca

SEQ ID NO: 80444 - RNA, 26 nt, Human
cacacacacacacacacacacacaca

SEQ ID NO: 80445 - RNA, 23 nt, Human
cacacacacacacacacacacag

SEQ ID NO: 80446 - RNA, 22 nt, Human
caccucccaaccuccuccggga

SEQ ID NO: 80447 - RNA, 21 nt, Human
cagagacccccacugaggccc

SEQ ID NO: 80448 - RNA, 21 nt, Human
cagcucaaggcagaaggccag

SEQ ID NO: 80449 - RNA, 20 nt, Human
ccaccaagcucagaagcgag

SEQ ID NO: 80450 - RNA, 24 nt, Human
ccaccaagcucagaagcgagaaag

SEQ ID NO: 80451 - RNA, 19 nt, Human
ccaucaggaugucuggcug

SEQ ID NO: 80452 - RNA, 19 nt, Human
cccaccugcacccuuggga

SEQ ID NO: 80453 - RNA, 22 nt, Human
cccagagacccccacugaggcc

SEQ ID NO: 80454 - RNA, 19 nt, Human
cccagcucaaggcagaagg

SEQ ID NO: 80455 - RNA, 18 nt, Human
ccccacugaggccccgcg

SEQ ID NO: 80456 - RNA, 20 nt, Human
ccccagagacccccacugag

SEQ ID NO: 80457 - RNA, 21 nt, Human
ccccagagacccccacugagg

SEQ ID NO: 80458 - RNA, 25 nt, Human
ccccagagacccccacugaggcccc

SEQ ID NO: 80459 - RNA, 27 nt, Human
cccgcgguggcugcagcugccguacac

SEQ ID NO: 80460 - RNA, 18 nt, Human
cccuugggagccagggag

SEQ ID NO: 80461 - RNA, 21 nt, Human
ccgccuccuggcugcugaccc

SEQ ID NO: 80462 - RNA, 18 nt, Human
ccucagaagcagccccuc

SEQ ID NO: 80463 - RNA, 18 nt, Human
ccuggcugcugacccagg

SEQ ID NO: 80464 - RNA, 18 nt, Human
ccuggcugcugacccagg

SEQ ID NO: 80465 - RNA, 19 nt, Human
ccuggcugcugacccaggg

SEQ ID NO: 80466 - RNA, 20 nt, Human
ccuggcuuagcuuccuggcc

SEQ ID NO: 80467 - RNA, 19 nt, Human
ccugggcaguuuguggaga

SEQ ID NO: 80468 - RNA, 22 nt, Human
ccuuggacacuuggguuuggga

SEQ ID NO: 80469 - RNA, 24 nt, Human
cggacagacagaaagcagucccag

SEQ ID NO: 80470 - RNA, 21 nt, Human
cggaccgaaagcagcuacuca

SEQ ID NO: 80471 - RNA, 21 nt, Human
cggugauggggcaucgagcug

SEQ ID NO: 80472 - RNA, 23 nt, Human
cggugauggggcaucgagcuggg

SEQ ID NO: 80473 - RNA, 18 nt, Human
cuggguuggacgcagcug

SEQ ID NO: 80474 - RNA, 19 nt, Human
cuguggugggagagcaggg

SEQ ID NO: 80475 - RNA, 21 nt, Human
cuuccuggcucugccucccca

SEQ ID NO: 80476 - RNA, 20 nt, Human
cuucuaggaaaaccgguguc

SEQ ID NO: 80477 - RNA, 20 nt, Human
gaaaggcuggaaaugcauga

SEQ ID NO: 80478 - RNA, 20 nt, Human
gacacuuggguuugggagug

SEQ ID NO: 80479 - RNA, 22 nt, Human
gaccuagccaccagugggccag

SEQ ID NO: 80480 - RNA, 18 nt, Human
gaccuggagaggggaggc

SEQ ID NO: 80481 - RNA, 19 nt, Human
gagaacagaagggaggacc

SEQ ID NO: 80482 - RNA, 22 nt, Human
gagaccuagccaccagugggcc

SEQ ID NO: 80483 - RNA, 21 nt, Human
gagaggggaggcgccaggcgc

SEQ ID NO: 80484 - RNA, 18 nt, Human
gagccuuggacacuuggg

SEQ ID NO: 80485 - RNA, 18 nt, Human
gagcuggggucagggacc

SEQ ID NO: 80486 - RNA, 27 nt, Human
gagcuggggucagggacccgagguggg

SEQ ID NO: 80487 - RNA, 19 nt, Human
gaggaacagaacaugugug

SEQ ID NO: 80488 - RNA, 23 nt, Human
gaggguugaaaggcuggaaaugc

SEQ ID NO: 80489 - RNA, 31 nt, Human
gcacaagacacacacacacacacacacacag

SEQ ID NO: 80490 - RNA, 19 nt, Human
gcacccuugggagccaggg

SEQ ID NO: 80491 - RNA, 22 nt, Human
gcagcucugaggccaagggaac

SEQ ID NO: 80492 - RNA, 21 nt, Human
gcaggggcagcucugaggcca

SEQ ID NO: 80493 - RNA, 24 nt, Human
gccaagggaacaugugaugggggc

SEQ ID NO: 80494 - RNA, 18 nt, Human
gccuccaccucccaaccu

SEQ ID NO: 80495 - RNA, 27 nt, Human
gccuccaccucccaaccuccuccggga

SEQ ID NO: 80496 - RNA, 23 nt, Human
gccuuggacacuuggguuuggga

SEQ ID NO: 80497 - RNA, 20 nt, Human
gcuguggugggagagcaggg

SEQ ID NO: 80498 - RNA, 22 nt, Human
gcuuagcuuccuggcucugccu

SEQ ID NO: 80499 - RNA, 23 nt, Human
ggacaggugcggcagcccuggca

SEQ ID NO: 80500 - RNA, 20 nt, Human
ggaccuggagaggggaggcg

SEQ ID NO: 80501 - RNA, 22 nt, Human
ggagagcaggggcagcucugag

SEQ ID NO: 80502 - RNA, 21 nt, Human
ggagccgcagagucggggagg

SEQ ID NO: 80503 - RNA, 24 nt, Human
ggaggguugaaaggcuggaaaugc

SEQ ID NO: 80504 - RNA, 20 nt, Human
ggcaggcuggggagaccgcu

SEQ ID NO: 80505 - RNA, 23 nt, Human
ggcaggggcugggugcaggccgg

SEQ ID NO: 80506 - RNA, 20 nt, Human
ggccuccaccucccaaccuc

SEQ ID NO: 80507 - RNA, 21 nt, Human
ggcgggcugggguggugggcc

SEQ ID NO: 80508 - RNA, 20 nt, Human
ggcuggguuggacgcagcug

SEQ ID NO: 80509 - RNA, 18 nt, Human
gggaacaugugauggggg

SEQ ID NO: 80510 - RNA, 21 nt, Human
gggcagcucugaggccaaggg

SEQ ID NO: 80511 - RNA, 22 nt, Human
gggcaggggcugggugcaggcc

SEQ ID NO: 80512 - RNA, 19 nt, Human
gggcugggguggugggccg

SEQ ID NO: 80513 - RNA, 23 nt, Human
gggcuggguuggacgcagcuggg

SEQ ID NO: 80514 - RNA, 18 nt, Human
ggggggcuggguuggacg

SEQ ID NO: 80515 - RNA, 19 nt, Human
ggucugggagggacaggcc

SEQ ID NO: 80516 - RNA, 21 nt, Human
gugaacgagaaaaaagcuuca

SEQ ID NO: 80517 - RNA, 22 nt, Human
uagcuuccuggcucugccuccc

SEQ ID NO: 80518 - RNA, 19 nt, Human
uaggaaaaccggugucugg

SEQ ID NO: 80519 - RNA, 19 nt, Human
ucacguugcacgguguuuc

SEQ ID NO: 80520 - RNA, 26 nt, Human
uccccagagacccccacugaggcccc

SEQ ID NO: 80521 - RNA, 20 nt, Human
uccuggcugcugacccaggg

SEQ ID NO: 80522 - RNA, 19 nt, Human
ucuggcuguguuccccaga

SEQ ID NO: 80523 - RNA, 18 nt, Human
ugaaaggcuggaaaugca

SEQ ID NO: 80524 - RNA, 24 nt, Human
ugaaaggcuggaaaugcaugagga

SEQ ID NO: 80525 - RNA, 20 nt, Human
ugacccagggacuguucucc

SEQ ID NO: 80526 - RNA, 24 nt, Human
ugacuaguuggcgggccgucaccg

SEQ ID NO: 80527 - RNA, 22 nt, Human
ugaggccaagggaacaugugau

SEQ ID NO: 80528 - RNA, 22 nt, Human
ugaggggagccgcagagucggg

SEQ ID NO: 80529 - RNA, 19 nt, Human
ugauggggcaucgagcugg

SEQ ID NO: 80530 - RNA, 24 nt, Human
ugcaugaggaggaggaacagaaca

SEQ ID NO: 80531 - RNA, 19 nt, Human
uggaaagacagccaccgac

SEQ ID NO: 80532 - RNA, 18 nt, Human
uggcgggcugggguggug

SEQ ID NO: 80533 - RNA, 19 nt, Human
uggcgggcugggguggugg

SEQ ID NO: 80534 - RNA, 19 nt, Human
uggcuguguuccccagaga

SEQ ID NO: 80535 - RNA, 18 nt, Human
ugggagggacaggccaug

SEQ ID NO: 80536 - RNA, 21 nt, Human
ugggccagugggggugagggg

SEQ ID NO: 80537 - RNA, 18 nt, Human
ugggccuccaccucccaa

SEQ ID NO: 80538 - RNA, 18 nt, Human
ugggggcaaggccugagc

SEQ ID NO: 80539 - RNA, 23 nt, Human
uggggggcuggguuggacgcagc

SEQ ID NO: 80540 - RNA, 18 nt, Human
uggguggcugugguggga

SEQ ID NO: 80541 - RNA, 22 nt, Human
uuccuggcucugccuccccauc

SEQ ID NO: 80542 - RNA, 21 nt, Human
uucuccuaggacuggagccuu

SEQ ID NO: 80543 - RNA, 20 nt, Human
uuuuuuuuuuuuuuuuucac

SEQ ID NO: 80544 - RNA, 23 nt, Human
uuuuuuuuuuuuuuuuucacguu

SEQ ID NO: 80545 - RNA, 29 nt, Human
uuuuuuuuuuuuuuuuuucacguugauua

SEQ ID NO: 80546 - RNA, 20 nt, Human
aaacaggaacuccgaaugua

SEQ ID NO: 80547 - RNA, 19 nt, Human
aaagcugaacauuagaaaa

SEQ ID NO: 80548 - RNA, 24 nt, Human
aacagcagcagcaaaugcaccaaa

SEQ ID NO: 80549 - RNA, 20 nt, Human
aacuauguacauaagagcca

SEQ ID NO: 80550 - RNA, 22 nt, Human
aagaaauuaagaugaguccauu

SEQ ID NO: 80551 - RNA, 18 nt, Human
aagagccaccuuguaggc

SEQ ID NO: 80552 - RNA, 28 nt, Human
aagccagagccuggaggcuugcaagaga

SEQ ID NO: 80553 - RNA, 20 nt, Human
aagcuuucuuugugauuauc

SEQ ID NO: 80554 - RNA, 21 nt, Human
aagcuuucuuugugauuaucu

SEQ ID NO: 80555 - RNA, 22 nt, Human
aaugacaaaaaaaagguguaaa

SEQ ID NO: 80556 - RNA, 19 nt, Human
acaaaaauagcaugucaga

SEQ ID NO: 80557 - RNA, 24 nt, Human
acaguagcaacagcagcagcaaaa

SEQ ID NO: 80558 - RNA, 23 nt, Human
accugcuguuccaugucaacucc

SEQ ID NO: 80559 - RNA, 24 nt, Human
acuagaauauaaagguaauuucua

SEQ ID NO: 80560 - RNA, 19 nt, Human
agaaacugcauccucacuu

SEQ ID NO: 80561 - RNA, 18 nt, Human
agcaacagcagcagcaaa

SEQ ID NO: 80562 - RNA, 18 nt, Human
agcugguuucucacagac

SEQ ID NO: 80563 - RNA, 21 nt, Human
aggauauaucaguuuggacuu

SEQ ID NO: 80564 - RNA, 19 nt, Human
aggaucuuuuacagcuggu

SEQ ID NO: 80565 - RNA, 26 nt, Human
aggcaaacaguagcaacagcagcagc

SEQ ID NO: 80566 - RNA, 23 nt, Human
auccaucuccuucccugacuuag

SEQ ID NO: 80567 - RNA, 21 nt, Human
auucuggccuucucauccauc

SEQ ID NO: 80568 - RNA, 20 nt, Human
caaaacaggaacuccgaaug

SEQ ID NO: 80569 - RNA, 23 nt, Human
caccaaacugacgaaaagaccca

SEQ ID NO: 80570 - RNA, 23 nt, Human
cagagccuggaggcuugcaagag

SEQ ID NO: 80571 - RNA, 21 nt, Human
cauggccuaaaagggggcaaa

SEQ ID NO: 80572 - RNA, 20 nt, Human
caugucaacuccaaagacgu

SEQ ID NO: 80573 - RNA, 20 nt, Human
ccccgggguucaccuagcuc

SEQ ID NO: 80574 - RNA, 24 nt, Human
ccuauaguuauagauaucuuaaaa

SEQ ID NO: 80575 - RNA, 20 nt, Human
ccucccuuaaagaccuuaag

SEQ ID NO: 80576 - RNA, 18 nt, Human
cucacagacaguauuuaa

SEQ ID NO: 80577 - RNA, 22 nt, Human
cucauagucagacuguuguguc

SEQ ID NO: 80578 - RNA, 22 nt, Human
cucuguacaauaaucuguggga

SEQ ID NO: 80579 - RNA, 27 nt, Human
cugaaaauacuagaauauaaagguaau

SEQ ID NO: 80580 - RNA, 21 nt, Human
cugaacauuagaaaauacuga

SEQ ID NO: 80581 - RNA, 24 nt, Human
gacaaaaaaaagguguaaaucuga

SEQ ID NO: 80582 - RNA, 18 nt, Human
gacccagauauuuuccuc

SEQ ID NO: 80583 - RNA, 26 nt, Human
gacuuagaagaaauuaagaugagucc

SEQ ID NO: 80584 - RNA, 22 nt, Human
gcugaacauuagaaaauacuga

SEQ ID NO: 80585 - RNA, 19 nt, Human
gcuugaaccuccguccuuc

SEQ ID NO: 80586 - RNA, 19 nt, Human
ggaucugugcgucuccagu

SEQ ID NO: 80587 - RNA, 21 nt, Human
ggcagcuuugagaacuagcuc

SEQ ID NO: 80588 - RNA, 21 nt, Human
gggggaucugugcgucuccag

SEQ ID NO: 80589 - RNA, 19 nt, Human
gguggggggaagaaaggga

SEQ ID NO: 80590 - RNA, 21 nt, Human
uaaaaagagccucaaucuguu

SEQ ID NO: 80591 - RNA, 22 nt, Human
uaagagauaccauuuaaaccac

SEQ ID NO: 80592 - RNA, 18 nt, Human
uaagagccaccuuguagg

SEQ ID NO: 80593 - RNA, 20 nt, Human
uacauugggaacgagcaggu

SEQ ID NO: 80594 - RNA, 23 nt, Human
uaccaagcauaagcauuguaaca

SEQ ID NO: 80595 - RNA, 22 nt, Human
uagaaaauacugaagaguaaau

SEQ ID NO: 80596 - RNA, 23 nt, Human
uagaugcacuugagauguguaug

SEQ ID NO: 80597 - RNA, 22 nt, Human
uagguaauagaauuuauggagu

SEQ ID NO: 80598 - RNA, 23 nt, Human
ucaacugcuguucguuuccucug

SEQ ID NO: 80599 - RNA, 20 nt, Human
ucuagacaaggucuugguuu

SEQ ID NO: 80600 - RNA, 21 nt, Human
ucucucgcucucccucuucag

SEQ ID NO: 80601 - RNA, 24 nt, Human
ugaaaauacuagaauauaaaggua

SEQ ID NO: 80602 - RNA, 21 nt, Human
ugacgaaaagacccagauauu

SEQ ID NO: 80603 - RNA, 24 nt, Human
ugcaccaaacugacgaaaagaccc

SEQ ID NO: 80604 - RNA, 19 nt, Human
uggagggugggguggugcg

SEQ ID NO: 80605 - RNA, 24 nt, Human
ugggggauuaaaaaaaagagccag

SEQ ID NO: 80606 - RNA, 19 nt, Human
ugggguggugcgggaugag

SEQ ID NO: 80607 - RNA, 21 nt, Human
ugguaucugguuuggucucca

SEQ ID NO: 80608 - RNA, 20 nt, Human
uguaaaucugagaacuguag

SEQ ID NO: 80609 - RNA, 22 nt, Human
uguauguauagauaccuaucua

SEQ ID NO: 80610 - RNA, 23 nt, Human
uguuguucuuguuuaugccuguc

SEQ ID NO: 80611 - RNA, 20 nt, Human
uguuguuguuuuuuguuuuc

SEQ ID NO: 80612 - RNA, 24 nt, Human
uguuucgauuuuuggggcucugua

SEQ ID NO: 80613 - RNA, 20 nt, Human
uuagaaaauacugaagagua

SEQ ID NO: 80614 - RNA, 19 nt, Human
uuaguguguggaggguggg

SEQ ID NO: 80615 - RNA, 18 nt, Human
uucauggucaauuucuca

SEQ ID NO: 80616 - RNA, 19 nt, Human
uucauggucaauuucucaa

SEQ ID NO: 80617 - RNA, 22 nt, Human
uuggggcucuguacaauaaucu

SEQ ID NO: 80618 - RNA, 21 nt, Human
uugguuuaagccuuauuaaaa

SEQ ID NO: 80619 - RNA, 19 nt, Human
uuguuuuuuguuuuguuuu

SEQ ID NO: 80620 - RNA, 24 nt, Human
uuuaaacacagcguuugaggcaaa

SEQ ID NO: 80621 - RNA, 24 nt, Human
uuuucagcaaauccuccccaaaag

SEQ ID NO: 80622 - RNA, 24 nt, Human
uuuuuuuuuuuuuuuuuuaauugg

SEQ ID NO: 80623 - RNA, 19 nt, Human
aaagugcugggauugcagg

SEQ ID NO: 80624 - RNA, 20 nt, Human
aaagugcugggauugcaggu

SEQ ID NO: 80625 - RNA, 24 nt, Human
aaagugcugggauugcagguguga

SEQ ID NO: 80626 - RNA, 18 nt, Human
aacgguuccaggucaggc

SEQ ID NO: 80627 - RNA, 18 nt, Human
aagugcugggauugcagg

SEQ ID NO: 80628 - RNA, 19 nt, Human
aagugcugggauugcaggu

SEQ ID NO: 80629 - RNA, 24 nt, Human
aauuuuuguauuuugguagagaca

SEQ ID NO: 80630 - RNA, 20 nt, Human
acaggguuucaccauguugg

SEQ ID NO: 80631 - RNA, 21 nt, Human
acaggguuucaccauguuggu

SEQ ID NO: 80632 - RNA, 24 nt, Human
acaggguuucaccauguuggucag

SEQ ID NO: 80633 - RNA, 24 nt, Human
accauguuggucaggcuggucuug

SEQ ID NO: 80634 - RNA, 22 nt, Human
accucagcugcucagcagcugg

SEQ ID NO: 80635 - RNA, 18 nt, Human
acucugucacccaggcug

SEQ ID NO: 80636 - RNA, 26 nt, Human
acucugucacccaggcugaagugcaa

SEQ ID NO: 80637 - RNA, 20 nt, Human
acugcaagcuccgccuccug

SEQ ID NO: 80638 - RNA, 24 nt, Human
agcgauucuccugccucagccucc

SEQ ID NO: 80639 - RNA, 18 nt, Human
agcuccgccuccuggguu

SEQ ID NO: 80640 - RNA, 24 nt, Human
aggcugaagugcaauggccugauc

SEQ ID NO: 80641 - RNA, 24 nt, Human
aggugauccgcccgccucggccuc

SEQ ID NO: 80642 - RNA, 23 nt, Human
aggugugagucacuucgccuggc

SEQ ID NO: 80643 - RNA, 18 nt, Human
aguagcugggauuacagg

SEQ ID NO: 80644 - RNA, 24 nt, Human
agugcaauggccugaucucggcuc

SEQ ID NO: 80645 - RNA, 22 nt, Human
auuucaggguuuucuuucacua

SEQ ID NO: 80646 - RNA, 24 nt, Human
auuuugguagagacaggguuucac

SEQ ID NO: 80647 - RNA, 24 nt, Human
caaagugcugggauugcaggugug

SEQ ID NO: 80648 - RNA, 22 nt, Human
caagcgauucuccugccucagc

SEQ ID NO: 80649 - RNA, 19 nt, Human
caaguaucuagcuuaguca

SEQ ID NO: 80650 - RNA, 21 nt, Human
caccauguuggucaggcuggu

SEQ ID NO: 80651 - RNA, 24 nt, Human
caccauguuggucaggcuggucuu

SEQ ID NO: 80652 - RNA, 23 nt, Human
cacccaggcugaagugcaauggc

SEQ ID NO: 80653 - RNA, 23 nt, Human
cacucugucacccaggcugaagu

SEQ ID NO: 80654 - RNA, 24 nt, Human
cacucugucacccaggcugaagug

SEQ ID NO: 80655 - RNA, 23 nt, Human
cagcaggagcucaauaugcacag

SEQ ID NO: 80656 - RNA, 24 nt, Human
caggguuucaccauguuggucagg

SEQ ID NO: 80657 - RNA, 21 nt, Human
caugcccggcuaauuuuugua

SEQ ID NO: 80658 - RNA, 24 nt, Human
cauguuggucaggcuggucuugaa

SEQ ID NO: 80659 - RNA, 20 nt, Human
ccaaagugcugggauugcag

SEQ ID NO: 80660 - RNA, 21 nt, Human
ccaaagugcugggauugcagg

SEQ ID NO: 80661 - RNA, 24 nt, Human
ccaaagugcugggauugcaggugu

SEQ ID NO: 80662 - RNA, 23 nt, Human
cccgaguagcugggauuacaggc

SEQ ID NO: 80663 - RNA, 24 nt, Human
cccgaguagcugggauuacaggca

SEQ ID NO: 80664 - RNA, 23 nt, Human
ccgaguagcugggauuacaggca

SEQ ID NO: 80665 - RNA, 24 nt, Human
ccgccuccuggguucaagcgauuc

SEQ ID NO: 80666 - RNA, 23 nt, Human
ccuggguucaagcgauucuccug

SEQ ID NO: 80667 - RNA, 23 nt, Human
cucagccucccgaguagcuggga

SEQ ID NO: 80668 - RNA, 21 nt, Human
cuccuggguucaagcgauucu

SEQ ID NO: 80669 - RNA, 22 nt, Human
cucucgcuucucuuugcaucuc

SEQ ID NO: 80670 - RNA, 21 nt, Human
cugaccucaggugauccgccc

SEQ ID NO: 80671 - RNA, 23 nt, Human
cugccucagccucccgaguagcu

SEQ ID NO: 80672 - RNA, 26 nt, Human
cugcugaccucaggugauccgcccgc

SEQ ID NO: 80673 - RNA, 20 nt, Human
cuggaagggaaggggcugca

SEQ ID NO: 80674 - RNA, 24 nt, Human
gaccucaggugauccgcccgccuc

SEQ ID NO: 80675 - RNA, 25 nt, Human
gaguagcugggauuacaggcacccg

SEQ ID NO: 80676 - RNA, 22 nt, Human
gauuacaggcacccgccaucau

SEQ ID NO: 80677 - RNA, 24 nt, Human
gauugcaggugugagucacuucgc

SEQ ID NO: 80678 - RNA, 20 nt, Human
gcacacacuugugggcugga

SEQ ID NO: 80679 - RNA, 21 nt, Human
gcagcaccucagcugcucagc

SEQ ID NO: 80680 - RNA, 22 nt, Human
gcccggcuaauuuuuguauuuu

SEQ ID NO: 80681 - RNA, 20 nt, Human
gccucagccucccgaguagc

SEQ ID NO: 80682 - RNA, 25 nt, Human
gccuccuggguucaagcgauucucc

SEQ ID NO: 80683 - RNA, 23 nt, Human
gccucggccucccaaagugcugg

SEQ ID NO: 80684 - RNA, 24 nt, Human
gcgauucuccugccucagccuccc

SEQ ID NO: 80685 - RNA, 19 nt, Human
gcugaagugcaauggccug

SEQ ID NO: 80686 - RNA, 24 nt, Human
ggauuacaggcacccgccaucaug

SEQ ID NO: 80687 - RNA, 18 nt, Human
ggauugccuuuggaguca

SEQ ID NO: 80688 - RNA, 19 nt, Human
ggcauggugaggaugaagg

SEQ ID NO: 80689 - RNA, 24 nt, Human
ggcuggucuugaacugcugaccuc

SEQ ID NO: 80690 - RNA, 18 nt, Human
gggcauggugaggaugaa

SEQ ID NO: 80691 - RNA, 18 nt, Human
gggcuggaagggaagggg

SEQ ID NO: 80692 - RNA, 22 nt, Human
ggguuucaccauguuggucagg

SEQ ID NO: 80693 - RNA, 19 nt, Human
ggucuugaacugcugaccu

SEQ ID NO: 80694 - RNA, 21 nt, Human
guagagacaggguuucaccau

SEQ ID NO: 80695 - RNA, 22 nt, Human
guagagacaggguuucaccaug

SEQ ID NO: 80696 - RNA, 23 nt, Human
gugaggaacgguuccaggucagg

SEQ ID NO: 80697 - RNA, 24 nt, Human
gugauccgcccgccucggccuccc

SEQ ID NO: 80698 - RNA, 18 nt, Human
uaaaaaaagcagacucau

SEQ ID NO: 80699 - RNA, 23 nt, Human
uaauuuuuguauuuugguagaga

SEQ ID NO: 80700 - RNA, 23 nt, Human
uacaggcacccgccaucaugccc

SEQ ID NO: 80701 - RNA, 22 nt, Human
uagagacaggguuucaccaugu

SEQ ID NO: 80702 - RNA, 18 nt, Human
uagcagggcauggugagg

SEQ ID NO: 80703 - RNA, 18 nt, Human
uauuuugguagagacagg

SEQ ID NO: 80704 - RNA, 19 nt, Human
ucaagcgauucuccugccu

SEQ ID NO: 80705 - RNA, 18 nt, Human
ucacugcaagcuccgccu

SEQ ID NO: 80706 - RNA, 23 nt, Human
ucacugcaagcuccgccuccugg

SEQ ID NO: 80707 - RNA, 24 nt, Human
ucacugcaagcuccgccuccuggg

SEQ ID NO: 80708 - RNA, 27 nt, Human
ucacugcaagcuccgccuccuggguuc

SEQ ID NO: 80709 - RNA, 23 nt, Human
ucagcagcuggagauagcagggc

SEQ ID NO: 80710 - RNA, 20 nt, Human
ucagccucccgaguagcugg

SEQ ID NO: 80711 - RNA, 23 nt, Human
ucccaaagugcugggauugcagg

SEQ ID NO: 80712 - RNA, 24 nt, Human
ucccgaguagcugggauuacaggc

SEQ ID NO: 80713 - RNA, 21 nt, Human
uccuggguucaagcgauucuc

SEQ ID NO: 80714 - RNA, 24 nt, Human
uccuggguucaagcgauucuccug

SEQ ID NO: 80715 - RNA, 18 nt, Human
ucggccucccaaagugcu

SEQ ID NO: 80716 - RNA, 19 nt, Human
ucucacucugucacccagg

SEQ ID NO: 80717 - RNA, 24 nt, Human
ucucacucugucacccaggcugaa

SEQ ID NO: 80718 - RNA, 26 nt, Human
ucucacucugucacccaggcugaagu

SEQ ID NO: 80719 - RNA, 27 nt, Human
ucucacucugucacccaggcugaagug

SEQ ID NO: 80720 - RNA, 24 nt, Human
ucuccugccucagccucccgagua

SEQ ID NO: 80721 - RNA, 24 nt, Human
ucugucacccaggcugaagugcaa

SEQ ID NO: 80722 - RNA, 22 nt, Human
ucuuuucuuugggauugccuuu

SEQ ID NO: 80723 - RNA, 19 nt, Human
ugaagugcaauggccugau

SEQ ID NO: 80724 - RNA, 18 nt, Human
ugaccucaggugauccgc

SEQ ID NO: 80725 - RNA, 20 nt, Human
ugaccucaggugauccgccc

SEQ ID NO: 80726 - RNA, 24 nt, Human
ugaccucaggugauccgcccgccu

SEQ ID NO: 80727 - RNA, 22 nt, Human
ugagauggagucucacucuguc

SEQ ID NO: 80728 - RNA, 23 nt, Human
ugcccggcuaauuuuuguauuuu

SEQ ID NO: 80729 - RNA, 24 nt, Human
ugccucagccucccgaguagcugg

SEQ ID NO: 80730 - RNA, 19 nt, Human
ugcuaccauugcucaaaac

SEQ ID NO: 80731 - RNA, 19 nt, Human
ugggauuacaggcacccgc

SEQ ID NO: 80732 - RNA, 21 nt, Human
ugggauuacaggcacccgcca

SEQ ID NO: 80733 - RNA, 21 nt, Human
ugggauuacaggcacccgcca

SEQ ID NO: 80734 - RNA, 22 nt, Human
ugggauuacaggcacccgccau

SEQ ID NO: 80735 - RNA, 24 nt, Human
ugggauuacaggcacccgccauca

SEQ ID NO: 80736 - RNA, 18 nt, Human
ugggauugcaggugugag

SEQ ID NO: 80737 - RNA, 21 nt, Human
ugggauugcaggugugaguca

SEQ ID NO: 80738 - RNA, 23 nt, Human
uggguucaagcgauucuccugcc

SEQ ID NO: 80739 - RNA, 24 nt, Human
uggguucaagcgauucuccugccu

SEQ ID NO: 80740 - RNA, 23 nt, Human
ugguagagacaggguuucaccau

SEQ ID NO: 80741 - RNA, 24 nt, Human
ugguagagacaggguuucaccaug

SEQ ID NO: 80742 - RNA, 24 nt, Human
uggucaggcuggucuugaacugcu

SEQ ID NO: 80743 - RNA, 22 nt, Human
ugugggcuggaagggaaggggc

SEQ ID NO: 80744 - RNA, 19 nt, Human
uuacaggcacccgccauca

SEQ ID NO: 80745 - RNA, 21 nt, Human
uucaagcgauucuccugccuc

SEQ ID NO: 80746 - RNA, 23 nt, Human
uucaagcgauucuccugccucag

SEQ ID NO: 80747 - RNA, 24 nt, Human
uucaagcgauucuccugccucagc

SEQ ID NO: 80748 - RNA, 21 nt, Human
uugaaaguaaucacuuuggau

SEQ ID NO: 80749 - RNA, 24 nt, Human
uugguagagacaggguuucaccau

SEQ ID NO: 80750 - RNA, 24 nt, Human
uuucaccauguuggucaggcuggu

SEQ ID NO: 80751 - RNA, 19 nt, Human
uuuuuguauuuugguagag

SEQ ID NO: 80752 - RNA, 26 nt, Human
uuuuuuuuuuuugagauggagucuca

SEQ ID NO: 80753 - RNA, 22 nt, Human
uuuuuuuuuuuuuugagaugga

SEQ ID NO: 80754 - RNA, 19 nt, Human
aggcaggaggggguuacgg

SEQ ID NO: 80755 - RNA, 20 nt, Human
aggcaggaggggguuacggg

SEQ ID NO: 80756 - RNA, 21 nt, Human
aggcaggaggggguuacgggg

SEQ ID NO: 80757 - RNA, 21 nt, Human
aggcaggaggggguuacgggg

SEQ ID NO: 80758 - RNA, 23 nt, Human
aggcaggaggggguuacggggug

SEQ ID NO: 80759 - RNA, 24 nt, Human
aggcaggaggggguuacggggugg

SEQ ID NO: 80760 - RNA, 21 nt, Human
aucugugacucagagaaacca

SEQ ID NO: 80761 - RNA, 22 nt, Human
augcgaagcuggcggggaaagg

SEQ ID NO: 80762 - RNA, 22 nt, Human
caaccgagaagaaaacacccgc

SEQ ID NO: 80763 - RNA, 23 nt, Human
cacaucagggucugugcuucgug

SEQ ID NO: 80764 - RNA, 20 nt, Human
gcgaagcuggcggggaaagg

SEQ ID NO: 80765 - RNA, 22 nt, Human
gcuacaaaacuuccaccccaga

SEQ ID NO: 80766 - RNA, 21 nt, Human
ggaggcaggaggggguuacgg

SEQ ID NO: 80767 - RNA, 21 nt, Human
gggcaguauccuguguguggc

SEQ ID NO: 80768 - RNA, 18 nt, Human
ggggaaagggagaaggaa

SEQ ID NO: 80769 - RNA, 23 nt, Human
guacaucuaacaaccgagaagaa

SEQ ID NO: 80770 - RNA, 21 nt, Human
uaacaaccgagaagaaaacac

SEQ ID NO: 80771 - RNA, 19 nt, Human
ugacucagagaaaccacaa

SEQ ID NO: 80772 - RNA, 21 nt, Human
uuugauggcagaaguuuaucu

SEQ ID NO: 80773 - RNA, 18 nt, Human
aacgcuguugacaugcca

SEQ ID NO: 80774 - RNA, 19 nt, Human
accacccuccagccgcggg

SEQ ID NO: 80775 - RNA, 22 nt, Human
agaagucacagcuaucuuccag

SEQ ID NO: 80776 - RNA, 22 nt, Human
aggcagcgucucccaggcgcgc

SEQ ID NO: 80777 - RNA, 19 nt, Human
caagcuuuagccagucaca

SEQ ID NO: 80778 - RNA, 19 nt, Human
cacacuucuggaacugucc

SEQ ID NO: 80779 - RNA, 23 nt, Human
cacuccugguucacaguguccca

SEQ ID NO: 80780 - RNA, 20 nt, Human
cagcgcggcagcuccgacuc

SEQ ID NO: 80781 - RNA, 22 nt, Human
cagcuauacagcugugaccaca

SEQ ID NO: 80782 - RNA, 23 nt, Human
cagcuccgacucacuccugguuc

SEQ ID NO: 80783 - RNA, 24 nt, Human
cccaguggcgaccacccuccagcc

SEQ ID NO: 80784 - RNA, 18 nt, Human
ccgggccgaggcagcguc

SEQ ID NO: 80785 - RNA, 22 nt, Human
cugcacaguggaaauaaaggca

SEQ ID NO: 80786 - RNA, 22 nt, Human
cugcuuuccaauuuaauuuuua

SEQ ID NO: 80787 - RNA, 22 nt, Human
gaagcagcuauacagcugugac

SEQ ID NO: 80788 - RNA, 22 nt, Human
ggccugggcagcgcggcagcuc

SEQ ID NO: 80789 - RNA, 22 nt, Human
gucacagcuaucuuccagccug

SEQ ID NO: 80790 - RNA, 21 nt, Human
ucauguguggaugauaugaag

SEQ ID NO: 80791 - RNA, 19 nt, Human
uccgggccgaggcagcguc

SEQ ID NO: 80792 - RNA, 21 nt, Human
ugaccacaucaagcuuuagcc

SEQ ID NO: 80793 - RNA, 21 nt, Human
uggaaauaaaggcaccgugug

SEQ ID NO: 80794 - RNA, 23 nt, Human
uggacauuuucauucaaguauau

SEQ ID NO: 80795 - RNA, 18 nt, Human
ugguucacagugucccag

SEQ ID NO: 80796 - RNA, 19 nt, Human
uguaaauggacauuuucau

SEQ ID NO: 80797 - RNA, 24 nt, Human
uguguagauuuacagaugugcaga

SEQ ID NO: 80798 - RNA, 18 nt, Human
uguguggaugauaugaag

SEQ ID NO: 80799 - RNA, 20 nt, Human
uguuucuacuuccuugaaac

SEQ ID NO: 80800 - RNA, 22 nt, Human
uuaaaauagaagucacagcuau

SEQ ID NO: 80801 - RNA, 18 nt, Human
aaaaagaaaguuccaccc

SEQ ID NO: 80802 - RNA, 24 nt, Human
aaaaagggcaaaacuaaaaauccc

SEQ ID NO: 80803 - RNA, 23 nt, Human
aaaagaaaagaaaaugacagcaa

SEQ ID NO: 80804 - RNA, 20 nt, Human
aaaccucagcuccagcgucc

SEQ ID NO: 80805 - RNA, 23 nt, Human
aacacacaaaauccaccagcacu

SEQ ID NO: 80806 - RNA, 21 nt, Human
aagccccaccacccaaaagaa

SEQ ID NO: 80807 - RNA, 25 nt, Human
aauaaagaaaacagugcaggaagaa

SEQ ID NO: 80808 - RNA, 24 nt, Human
aaucaccaccuaccaaaaagggca

SEQ ID NO: 80809 - RNA, 24 nt, Human
acaaucuugucuuuuaaccaucag

SEQ ID NO: 80810 - RNA, 23 nt, Human
accacccaaaagaaaagaaaaug

SEQ ID NO: 80811 - RNA, 19 nt, Human
accaccuaccaaaaagggc

SEQ ID NO: 80812 - RNA, 19 nt, Human
acccaaaagaaaagaaaau

SEQ ID NO: 80813 - RNA, 22 nt, Human
acccaaaagaaaagaaaaugac

SEQ ID NO: 80814 - RNA, 21 nt, Human
acuuccacaccugccaaaaac

SEQ ID NO: 80815 - RNA, 18 nt, Human
agaagagagaaaggagag

SEQ ID NO: 80816 - RNA, 22 nt, Human
agaggggguggaggugggggau

SEQ ID NO: 80817 - RNA, 22 nt, Human
agggcaaaacuaaaaaucccua

SEQ ID NO: 80818 - RNA, 21 nt, Human
aucccuauaaaauaaaaaaga

SEQ ID NO: 80819 - RNA, 25 nt, Human
caaaaagggcaaaacuaaaaauccc

SEQ ID NO: 80820 - RNA, 22 nt, Human
caaaagaaaagaaaaugacagc

SEQ ID NO: 80821 - RNA, 20 nt, Human
caaaauccaccagcacuaaa

SEQ ID NO: 80822 - RNA, 22 nt, Human
caaaauccaccagcacuaaaag

SEQ ID NO: 80823 - RNA, 24 nt, Human
caacaugaggccaauauaacacac

SEQ ID NO: 80824 - RNA, 24 nt, Human
caagccccaccacccaaaagaaaa

SEQ ID NO: 80825 - RNA, 25 nt, Human
cacacaaaauccaccagcacuaaaa

SEQ ID NO: 80826 - RNA, 21 nt, Human
caucaagccccaccacccaaa

SEQ ID NO: 80827 - RNA, 19 nt, Human
caucuuuaccaguaacuca

SEQ ID NO: 80828 - RNA, 26 nt, Human
ccaucugaaaaaauuuucuacaucca

SEQ ID NO: 80829 - RNA, 25 nt, Human
ccucaaaaucaccaccuaccaaaaa

SEQ ID NO: 80830 - RNA, 19 nt, Human
cucaaaaucaccaccuacc

SEQ ID NO: 80831 - RNA, 20 nt, Human
cucguccgacccgcggcucc

SEQ ID NO: 80832 - RNA, 28 nt, Human
gaaaacagugcaggaagaaccgguaccc

SEQ ID NO: 80833 - RNA, 24 nt, Human
gacacuguuuaaacaggcuuucug

SEQ ID NO: 80834 - RNA, 19 nt, Human
gagaagagagaaaggagag

SEQ ID NO: 80835 - RNA, 22 nt, Human
gagaagagagaaaggagagggg

SEQ ID NO: 80836 - RNA, 22 nt, Human
gagaagagagaaaggagagggg

SEQ ID NO: 80837 - RNA, 23 nt, Human
gagaagagagaaaggagaggggg

SEQ ID NO: 80838 - RNA, 24 nt, Human
gagcacaauucacaguaugaauac

SEQ ID NO: 80839 - RNA, 23 nt, Human
gagugugcaaaaaucuucagaau

SEQ ID NO: 80840 - RNA, 24 nt, Human
gcaaaaaucuucagaauaagaaua

SEQ ID NO: 80841 - RNA, 20 nt, Human
ggcuggaggggaggaggagg

SEQ ID NO: 80842 - RNA, 27 nt, Human
ggcuggaggggaggaggaggagaggaa

SEQ ID NO: 80843 - RNA, 20 nt, Human
gggaggaggaggagaggaag

SEQ ID NO: 80844 - RNA, 19 nt, Human
ggggauuggaggcguggag

SEQ ID NO: 80845 - RNA, 21 nt, Human
guaaaaucuacaucaagcccc

SEQ ID NO: 80846 - RNA, 23 nt, Human
guggaggugggggauuggaggcg

SEQ ID NO: 80847 - RNA, 22 nt, Human
uaacucagacacugcaauccag

SEQ ID NO: 80848 - RNA, 19 nt, Human
uaagaaaauaaagaaaaca

SEQ ID NO: 80849 - RNA, 22 nt, Human
uaagaauaccauaguugcuaaa

SEQ ID NO: 80850 - RNA, 24 nt, Human
uaccaaaaagggcaaaacuaaaaa

SEQ ID NO: 80851 - RNA, 28 nt, Human
uaccaaaaagggcaaaacuaaaaauccc

SEQ ID NO: 80852 - RNA, 23 nt, Human
ucaaaaucaccaccuaccaaaaa

SEQ ID NO: 80853 - RNA, 21 nt, Human
ucaagccccaccacccaaaag

SEQ ID NO: 80854 - RNA, 18 nt, Human
ucagacacugcaauccag

SEQ ID NO: 80855 - RNA, 18 nt, Human
ucagagcacaauucacag

SEQ ID NO: 80856 - RNA, 26 nt, Human
uccaccagcacuaaaagggacuggag

SEQ ID NO: 80857 - RNA, 24 nt, Human
uccuucaaaauacagcucucccug

SEQ ID NO: 80858 - RNA, 22 nt, Human
ucggccacaacagcuucugggc

SEQ ID NO: 80859 - RNA, 22 nt, Human
ucuaaccuccgcaaaccaugcc

SEQ ID NO: 80860 - RNA, 19 nt, Human
ucuaagcaucuuuaccagu

SEQ ID NO: 80861 - RNA, 22 nt, Human
ucuacaucaagccccaccaccc

SEQ ID NO: 80862 - RNA, 24 nt, Human
ugaacaauaauuucuucuucucuc

SEQ ID NO: 80863 - RNA, 23 nt, Human
ugccaaaaacguggggcuuuucc

SEQ ID NO: 80864 - RNA, 24 nt, Human
ugccaaaaacguggggcuuuuccu

SEQ ID NO: 80865 - RNA, 22 nt, Human
uggaggugggggauuggaggcg

SEQ ID NO: 80866 - RNA, 23 nt, Human
uguacagaauuuuuuacauagaa

SEQ ID NO: 80867 - RNA, 24 nt, Human
uuacagccucaaaaucaccaccua

SEQ ID NO: 80868 - RNA, 20 nt, Human
uuacaucuguaccauauaca

SEQ ID NO: 80869 - RNA, 19 nt, Human
uuauaaacauuuuauccuu

SEQ ID NO: 80870 - RNA, 18 nt, Human
uucaaguuuugguccaua

SEQ ID NO: 80871 - RNA, 20 nt, Human
uuucuucuucucuccccacu

SEQ ID NO: 80872 - RNA, 20 nt, Human
uuuucuacauccacuguuaa

SEQ ID NO: 80873 - RNA, 19 nt, Human
uuuuuauauuacagaccug

SEQ ID NO: 80874 - RNA, 18 nt, Human
uuuuuuauaauucaaaaa

SEQ ID NO: 80875 - RNA, 22 nt, Human
aaaagaugaaaaacgaaaacaa

SEQ ID NO: 80876 - RNA, 19 nt, Human
aacaaaacaaaaaaaagaa

SEQ ID NO: 80877 - RNA, 23 nt, Human
aacgaaaacaaaacaaaaaaaag

SEQ ID NO: 80878 - RNA, 21 nt, Human
aagcaugguggcucggcagcc

SEQ ID NO: 80879 - RNA, 20 nt, Human
acaaaacaaaaaaaagaacc

SEQ ID NO: 80880 - RNA, 21 nt, Human
acaaaacaaaaaaaagaacca

SEQ ID NO: 80881 - RNA, 23 nt, Human
acaaaacaaaaaaaagaaccaca

SEQ ID NO: 80882 - RNA, 22 nt, Human
acccgacagcggagccaacuga

SEQ ID NO: 80883 - RNA, 24 nt, Human
agagggagggagaggggaggggcc

SEQ ID NO: 80884 - RNA, 22 nt, Human
agauuuauuuucaaacagcaca

SEQ ID NO: 80885 - RNA, 20 nt, Human
agcaugguggcucggcagcc

SEQ ID NO: 80886 - RNA, 18 nt, Human
agcccccagccccgcccu

SEQ ID NO: 80887 - RNA, 23 nt, Human
agcuucaggcaagcaugguggcu

SEQ ID NO: 80888 - RNA, 19 nt, Human
aggaacacuggugaauucc

SEQ ID NO: 80889 - RNA, 18 nt, Human
aggcaagcaugguggcuc

SEQ ID NO: 80890 - RNA, 18 nt, Human
agggagaggggaggggcc

SEQ ID NO: 80891 - RNA, 21 nt, Human
agggagaggggaggggccggg

SEQ ID NO: 80892 - RNA, 23 nt, Human
agggagaggggaggggccgggcc

SEQ ID NO: 80893 - RNA, 28 nt, Human
augaaaaacgaaaacaaaacaaaaaaaa

SEQ ID NO: 80894 - RNA, 22 nt, Human
caaaacaaaaaaaagaaccaca

SEQ ID NO: 80895 - RNA, 19 nt, Human
cacagcagcugccaggaaa

SEQ ID NO: 80896 - RNA, 18 nt, Human
cagcagcugccaggaaaa

SEQ ID NO: 80897 - RNA, 19 nt, Human
cagcccccagccccgcccu

SEQ ID NO: 80898 - RNA, 20 nt, Human
cagcccccagccccgcccug

SEQ ID NO: 80899 - RNA, 26 nt, Human
cagcccccagccccggccgcgcgucc

SEQ ID NO: 80900 - RNA, 22 nt, Human
ccagaccggcugccgcuccacg

SEQ ID NO: 80901 - RNA, 23 nt, Human
ccagcccccagccccggccgcgc

SEQ ID NO: 80902 - RNA, 22 nt, Human
ccagccccgcccugcggccagg

SEQ ID NO: 80903 - RNA, 22 nt, Human
ccaggcacacaugcgggcacag

SEQ ID NO: 80904 - RNA, 18 nt, Human
ccaggcuaggcugguguc

SEQ ID NO: 80905 - RNA, 24 nt, Human
cccacccacagcagcugccaggaa

SEQ ID NO: 80906 - RNA, 22 nt, Human
cccagcccccagccccggccgc

SEQ ID NO: 80907 - RNA, 20 nt, Human
cccagccccgcccugcggcc

SEQ ID NO: 80908 - RNA, 26 nt, Human
cccagccccggccgcgcguccagacc

SEQ ID NO: 80909 - RNA, 22 nt, Human
ccccccgcccgcccccuccgga

SEQ ID NO: 80910 - RNA, 19 nt, Human
cccccgcccgcccccuccc

SEQ ID NO: 80911 - RNA, 20 nt, Human
cccccuccggacaauaagcu

SEQ ID NO: 80912 - RNA, 21 nt, Human
cccuugcccggguggcgcggc

SEQ ID NO: 80913 - RNA, 23 nt, Human
cccuugcccggguggcgcggccg

SEQ ID NO: 80914 - RNA, 21 nt, Human
ccgguggcaggggccgcucuc

SEQ ID NO: 80915 - RNA, 25 nt, Human
ccugcggccaggcacacaugcgggc

SEQ ID NO: 80916 - RNA, 23 nt, Human
cgaaaacaaaacaaaaaaaagaa

SEQ ID NO: 80917 - RNA, 21 nt, Human
cgacgcggggacagagggagg

SEQ ID NO: 80918 - RNA, 21 nt, Human
cgagcgacgcggggacagagg

SEQ ID NO: 80919 - RNA, 19 nt, Human
cgcggucggcgccccccgc

SEQ ID NO: 80920 - RNA, 18 nt, Human
cgggcgccggcaccgcca

SEQ ID NO: 80921 - RNA, 21 nt, Human
cggggcagagccaggcuaggc

SEQ ID NO: 80922 - RNA, 21 nt, Human
cguccagaccggcugccgcuc

SEQ ID NO: 80923 - RNA, 18 nt, Human
cucccagcccccagcccc

SEQ ID NO: 80924 - RNA, 18 nt, Human
cucugccugggggucucc

SEQ ID NO: 80925 - RNA, 23 nt, Human
cuucaggaacacuggugaauucc

SEQ ID NO: 80926 - RNA, 21 nt, Human
gacacagcagcuucaggaaca

SEQ ID NO: 80927 - RNA, 22 nt, Human
gacgcggggacagagggaggga

SEQ ID NO: 80928 - RNA, 20 nt, Human
gagaggggaggggccgggcc

SEQ ID NO: 80929 - RNA, 19 nt, Human
gcccugcggccaggcacac

SEQ ID NO: 80930 - RNA, 19 nt, Human
gccgcgcguccagaccggc

SEQ ID NO: 80931 - RNA, 18 nt, Human
gcggccaggcacacaugc

SEQ ID NO: 80932 - RNA, 18 nt, Human
gcggucggcgccccccgc

SEQ ID NO: 80933 - RNA, 22 nt, Human
gcucccagcccccagccccggc

SEQ ID NO: 80934 - RNA, 20 nt, Human
gcugccaggaaaagaggacc

SEQ ID NO: 80935 - RNA, 18 nt, Human
ggaacacuggugaauucc

SEQ ID NO: 80936 - RNA, 20 nt, Human
ggcaccgccagguccgcgag

SEQ ID NO: 80937 - RNA, 20 nt, Human
ggcucggcagcccccagccc

SEQ ID NO: 80938 - RNA, 23 nt, Human
gggcgccagaaacucaacuagag

SEQ ID NO: 80939 - RNA, 19 nt, Human
ggggaggggccgggccuca

SEQ ID NO: 80940 - RNA, 20 nt, Human
gugucugggccccacccaca

SEQ ID NO: 80941 - RNA, 22 nt, Human
ucaggcaagcaugguggcucgg

SEQ ID NO: 80942 - RNA, 23 nt, Human
ucaggcaagcaugguggcucggc

SEQ ID NO: 80943 - RNA, 21 nt, Human
ucccuuugcucuucaaaagau

SEQ ID NO: 80944 - RNA, 21 nt, Human
ugauuucccuuugcucuucaa

SEQ ID NO: 80945 - RNA, 20 nt, Human
ugcggccaggcacacaugcg

SEQ ID NO: 80946 - RNA, 24 nt, Human
ugggccccacccacagcagcugcc

SEQ ID NO: 80947 - RNA, 22 nt, Human
uucaaaagaugaaaaacgaaaa

SEQ ID NO: 80948 - RNA, 23 nt, Human
uugcgcgccgcgcucccagcccc

SEQ ID NO: 80949 - RNA, 23 nt, Human
uuuuuuuuugagaguuuuuauca

SEQ ID NO: 80950 - RNA, 18 nt, Human
uuuuuuuuuuuuuuuuug

SEQ ID NO: 80951 - RNA, 25 nt, Human
agccugccucccuccaucccucccg

SEQ ID NO: 80952 - RNA, 19 nt, Human
auccucugagugugugugg

SEQ ID NO: 80953 - RNA, 23 nt, Human
cccucccguaaggcugcuccucc

SEQ ID NO: 80954 - RNA, 23 nt, Human
ccuacugagaacccagggaugga

SEQ ID NO: 80955 - RNA, 22 nt, Human
cuccccagccugccucccucca

SEQ ID NO: 80956 - RNA, 20 nt, Human
cucccguaaggcugcuccuc

SEQ ID NO: 80957 - RNA, 22 nt, Human
cuggcgagguuuggggcaggag

SEQ ID NO: 80958 - RNA, 18 nt, Human
gagugugugugguuaugu

SEQ ID NO: 80959 - RNA, 23 nt, Human
gguuuggggcaggaggagucuug

SEQ ID NO: 80960 - RNA, 24 nt, Human
uacuuuugcuuuuuauagugauua

SEQ ID NO: 80961 - RNA, 18 nt, Human
ucccucugaccuauaccc

SEQ ID NO: 80962 - RNA, 18 nt, Human
ucccugggggccgccgcc

SEQ ID NO: 80963 - RNA, 19 nt, Human
ucccugggggccgccgccc

SEQ ID NO: 80964 - RNA, 25 nt, Human
ucccugggggccgccgcccuggccc

SEQ ID NO: 80965 - RNA, 19 nt, Human
uccuacugagaacccaggg

SEQ ID NO: 80966 - RNA, 21 nt, Human
ucuaauguucucuucucccca

SEQ ID NO: 80967 - RNA, 21 nt, Human
uggggcaggaggagucuuggu

SEQ ID NO: 80968 - RNA, 21 nt, Human
uucccugagucuaauguucuc

SEQ ID NO: 80969 - RNA, 19 nt, Human
uucucuggcgagguuuggg

SEQ ID NO: 80970 - RNA, 22 nt, Human
uuuggggcaggaggagucuugg

SEQ ID NO: 80971 - RNA, 22 nt, Human
uuuuuuuuuagucagaaucaga

SEQ ID NO: 80972 - RNA, 25 nt, Human
aaacaaacugagaguguguccucca

SEQ ID NO: 80973 - RNA, 21 nt, Human
aaaccaaagucaaaaacaaac

SEQ ID NO: 80974 - RNA, 24 nt, Human
aaacugagaguguguccuccacag

SEQ ID NO: 80975 - RNA, 19 nt, Human
aaccaaagucaaaaacaaa

SEQ ID NO: 80976 - RNA, 21 nt, Human
accaaagucaaaaacaaacug

SEQ ID NO: 80977 - RNA, 19 nt, Human
agaaaaaagagguuuugaa

SEQ ID NO: 80978 - RNA, 20 nt, Human
cacagcucuuccuacucucc

SEQ ID NO: 80979 - RNA, 19 nt, Human
cacaggguucagggccucu

SEQ ID NO: 80980 - RNA, 18 nt, Human
caccccuggcaugcuggg

SEQ ID NO: 80981 - RNA, 25 nt, Human
caccucuguccccagccugugagag

SEQ ID NO: 80982 - RNA, 24 nt, Human
cagagggcuccccaggaugggucu

SEQ ID NO: 80983 - RNA, 25 nt, Human
caggaagagucauucauugcaaagg

SEQ ID NO: 80984 - RNA, 22 nt, Human
caggaugggucuuuuggaggua

SEQ ID NO: 80985 - RNA, 19 nt, Human
caggcccaggaagggguuu

SEQ ID NO: 80986 - RNA, 24 nt, Human
cagggccaccucuguccccagccu

SEQ ID NO: 80987 - RNA, 18 nt, Human
ccaaccacuuagguccca

SEQ ID NO: 80988 - RNA, 19 nt, Human
ccaacgaagcccauggccu

SEQ ID NO: 80989 - RNA, 23 nt, Human
ccagauacucaggugagacacaa

SEQ ID NO: 80990 - RNA, 18 nt, Human
cccugagaagggcaagga

SEQ ID NO: 80991 - RNA, 22 nt, Human
ccgcacaggguucagggccucu

SEQ ID NO: 80992 - RNA, 21 nt, Human
ccuagggcuccuggugccagg

SEQ ID NO: 80993 - RNA, 23 nt, Human
ccucgggaaccccaaccacuuag

SEQ ID NO: 80994 - RNA, 21 nt, Human
ccugcuggagggugcugcugc

SEQ ID NO: 80995 - RNA, 21 nt, Human
cgcuccagaaggugggccagg

SEQ ID NO: 80996 - RNA, 22 nt, Human
cugccagggcuggaggaccagc

SEQ ID NO: 80997 - RNA, 18 nt, Human
gaggggccagagggcucc

SEQ ID NO: 80998 - RNA, 23 nt, Human
gcaaagggccggcaagugaacca

SEQ ID NO: 80999 - RNA, 21 nt, Human
gcccauggccucagaagggcu

SEQ ID NO: 81000 - RNA, 19 nt, Human
gccggcaagugaaccaggg

SEQ ID NO: 81001 - RNA, 19 nt, Human
gccucagaagggcugcagc

SEQ ID NO: 81002 - RNA, 18 nt, Human
gcuccuggugccaggcuc

SEQ ID NO: 81003 - RNA, 20 nt, Human
ggccagggccggggaggugc

SEQ ID NO: 81004 - RNA, 20 nt, Human
ggccggcaagugaaccaggg

SEQ ID NO: 81005 - RNA, 20 nt, Human
ggccucagaagggcugcagc

SEQ ID NO: 81006 - RNA, 23 nt, Human
gggaaccccaaccacuuaggucc

SEQ ID NO: 81007 - RNA, 20 nt, Human
gggccaggaugcaugcugga

SEQ ID NO: 81008 - RNA, 21 nt, Human
gggcuggaggaccagcucucc

SEQ ID NO: 81009 - RNA, 18 nt, Human
ggggcugugaguggggag

SEQ ID NO: 81010 - RNA, 25 nt, Human
gugcugcugcuccguggagggcagc

SEQ ID NO: 81011 - RNA, 20 nt, Human
uaagacccccaacuuagcca

SEQ ID NO: 81012 - RNA, 21 nt, Human
uaagacccccaacuuagccaa

SEQ ID NO: 81013 - RNA, 24 nt, Human
uaagacccccaacuuagccaacga

SEQ ID NO: 81014 - RNA, 18 nt, Human
uaaguuacagcacaauac

SEQ ID NO: 81015 - RNA, 23 nt, Human
uacucaggugagacacaaaccca

SEQ ID NO: 81016 - RNA, 20 nt, Human
uaggucccaaagccacaagg

SEQ ID NO: 81017 - RNA, 21 nt, Human
uaggucccaaagccacaaggg

SEQ ID NO: 81018 - RNA, 22 nt, Human
ucaggugagacacaaacccacu

SEQ ID NO: 81019 - RNA, 19 nt, Human
ucccgagguaccaguccuc

SEQ ID NO: 81020 - RNA, 23 nt, Human
ucccgagguaccaguccucagug

SEQ ID NO: 81021 - RNA, 21 nt, Human
uccucagugaccucgggaacc

SEQ ID NO: 81022 - RNA, 21 nt, Human
ugaauucuugugggacaguuc

SEQ ID NO: 81023 - RNA, 23 nt, Human
ugaauucuugugggacaguucca

SEQ ID NO: 81024 - RNA, 21 nt, Human
ugccaggcucaggaagaguca

SEQ ID NO: 81025 - RNA, 19 nt, Human
ugccagggcuggaggacca

SEQ ID NO: 81026 - RNA, 27 nt, Human
ugccagggcuggaggaccagcucuccc

SEQ ID NO: 81027 - RNA, 19 nt, Human
ugccuagggcuccuggugc

SEQ ID NO: 81028 - RNA, 19 nt, Human
ugccugcuggagggugcug

SEQ ID NO: 81029 - RNA, 22 nt, Human
uggacguuucauugaaaauuuu

SEQ ID NO: 81030 - RNA, 18 nt, Human
uggaggaccagcucuccc

SEQ ID NO: 81031 - RNA, 22 nt, Human
uggagggcagcaggcccaggaa

SEQ ID NO: 81032 - RNA, 21 nt, Human
uggcaugcugggcugccugcu

SEQ ID NO: 81033 - RNA, 18 nt, Human
uugcccgcgugcccuccc

SEQ ID NO: 81034 - RNA, 24 nt, Human
uuuuaaauaaaccaaagucaaaaa

SEQ ID NO: 81035 - RNA, 26 nt, Human
uuuuuuuuuuuuuuuggcuuguuuuu

SEQ ID NO: 81036 - RNA, 20 nt, Human
uuuuuuuuuuuuuuuuuugg

SEQ ID NO: 81037 - RNA, 28 nt, Human
aaacagguacaguuaagccaucccccac

SEQ ID NO: 81038 - RNA, 22 nt, Human
aaucucagaauaugcccagcug

SEQ ID NO: 81039 - RNA, 21 nt, Human
accagguuugcagcagaaaug

SEQ ID NO: 81040 - RNA, 21 nt, Human
acucugcagcccaccuggccg

SEQ ID NO: 81041 - RNA, 21 nt, Human
agaacacaguccagaacaggc

SEQ ID NO: 81042 - RNA, 22 nt, Human
agaacacaguccagaacaggca

SEQ ID NO: 81043 - RNA, 23 nt, Human
agaacaggcagagaggggcaggg

SEQ ID NO: 81044 - RNA, 19 nt, Human
agacacccugggaggggag

SEQ ID NO: 81045 - RNA, 23 nt, Human
agaggggcagggagcccacucug

SEQ ID NO: 81046 - RNA, 21 nt, Human
agcaggcccagaacacagucc

SEQ ID NO: 81047 - RNA, 21 nt, Human
aucucagaauaugcccagcug

SEQ ID NO: 81048 - RNA, 21 nt, Human
cacaggccugccaccagacac

SEQ ID NO: 81049 - RNA, 19 nt, Human
cacccuggggacagcaggg

SEQ ID NO: 81050 - RNA, 21 nt, Human
cacucugcagcccaccuggcc

SEQ ID NO: 81051 - RNA, 19 nt, Human
cagcagaaaugggggcuga

SEQ ID NO: 81052 - RNA, 19 nt, Human
cagcagggauaggcacagg

SEQ ID NO: 81053 - RNA, 21 nt, Human
cagcuggcccuucuggagcuc

SEQ ID NO: 81054 - RNA, 19 nt, Human
caggccugccaccagacac

SEQ ID NO: 81055 - RNA, 23 nt, Human
cccccggggcccacccuggggac

SEQ ID NO: 81056 - RNA, 24 nt, Human
cccccggggcccacccuggggacc

SEQ ID NO: 81057 - RNA, 19 nt, Human
ccccggggcccacccuggg

SEQ ID NO: 81058 - RNA, 21 nt, Human
cccggggcccacccuggggac

SEQ ID NO: 81059 - RNA, 20 nt, Human
ccuccagggaaaacccacuu

SEQ ID NO: 81060 - RNA, 19 nt, Human
ccuccuucuccacccuggg

SEQ ID NO: 81061 - RNA, 23 nt, Human
ccuccuucuccacccugggcggu

SEQ ID NO: 81062 - RNA, 25 nt, Human
ccugacccccggggcccacccuggg

SEQ ID NO: 81063 - RNA, 26 nt, Human
ccugacccccggggcccacccugggg

SEQ ID NO: 81064 - RNA, 22 nt, Human
cgccaagcaagggccuccuucu

SEQ ID NO: 81065 - RNA, 20 nt, Human
ggauggacaccagcucugcc

SEQ ID NO: 81066 - RNA, 20 nt, Human
ggcagagaggggcagggagc

SEQ ID NO: 81067 - RNA, 19 nt, Human
uacaguuaagccauccccc

SEQ ID NO: 81068 - RNA, 20 nt, Human
ucagcaggcccagaacacag

SEQ ID NO: 81069 - RNA, 23 nt, Human
ucagcaggcccagaacacagucc

SEQ ID NO: 81070 - RNA, 22 nt, Human
ucagugcuggauggacaccagc

SEQ ID NO: 81071 - RNA, 21 nt, Human
ucccccacgccaagcaagggc

SEQ ID NO: 81072 - RNA, 23 nt, Human
ugacccccggggcccacccuggg

SEQ ID NO: 81073 - RNA, 18 nt, Human
uggagcuccugacccccg

SEQ ID NO: 81074 - RNA, 18 nt, Human
uugcagcagaaauggggg

SEQ ID NO: 81075 - RNA, 18 nt, Human
aacagggaaccucugagc

SEQ ID NO: 81076 - RNA, 22 nt, Human
aaccauggguugucaaccaucc

SEQ ID NO: 81077 - RNA, 21 nt, Human
aagagaaaccccuguccccca

SEQ ID NO: 81078 - RNA, 23 nt, Human
aagagccaggauaugagaagaug

SEQ ID NO: 81079 - RNA, 22 nt, Human
aagccagguuaccaacagggaa

SEQ ID NO: 81080 - RNA, 24 nt, Human
aauaaaaaguuugauggagucaga

SEQ ID NO: 81081 - RNA, 18 nt, Human
aauacuccagagcuuuuc

SEQ ID NO: 81082 - RNA, 19 nt, Human
aauccagaaccucccaggc

SEQ ID NO: 81083 - RNA, 18 nt, Human
aaucuugggggaagguga

SEQ ID NO: 81084 - RNA, 19 nt, Human
acagccaaaauccagaacc

SEQ ID NO: 81085 - RNA, 19 nt, Human
accacugucgaaaugaggu

SEQ ID NO: 81086 - RNA, 19 nt, Human
agagaaaccccuguccccc

SEQ ID NO: 81087 - RNA, 22 nt, Human
agagggaagguccuuggacagg

SEQ ID NO: 81088 - RNA, 23 nt, Human
agcacuuuguguuuuuuuggugg

SEQ ID NO: 81089 - RNA, 20 nt, Human
agccaaaauccagaaccucc

SEQ ID NO: 81090 - RNA, 22 nt, Human
agcugcuuugaucugagguggg

SEQ ID NO: 81091 - RNA, 20 nt, Human
aggaccauggugauuuccag

SEQ ID NO: 81092 - RNA, 22 nt, Human
aggaucugggaacaaucgagug

SEQ ID NO: 81093 - RNA, 23 nt, Human
aggcaccaguuaugucccagagc

SEQ ID NO: 81094 - RNA, 22 nt, Human
aggcagggaggaucugggaaca

SEQ ID NO: 81095 - RNA, 20 nt, Human
aggcauguggccugacugua

SEQ ID NO: 81096 - RNA, 22 nt, Human
agggaggaucugggaacaaucg

SEQ ID NO: 81097 - RNA, 18 nt, Human
agguggggcccuggagau

SEQ ID NO: 81098 - RNA, 20 nt, Human
agugaucaauacuccagagc

SEQ ID NO: 81099 - RNA, 20 nt, Human
aucaagacuggauugaggcc

SEQ ID NO: 81100 - RNA, 24 nt, Human
aucauucaggggcagaauguauuu

SEQ ID NO: 81101 - RNA, 23 nt, Human
augcagcgcccucaaucaauauu

SEQ ID NO: 81102 - RNA, 19 nt, Human
auggagucagagugaccuc

SEQ ID NO: 81103 - RNA, 23 nt, Human
augggugacucagaguuccucua

SEQ ID NO: 81104 - RNA, 20 nt, Human
caaaacggugcccaucucaa

SEQ ID NO: 81105 - RNA, 25 nt, Human
caaaauccagaaccucccaggccga

SEQ ID NO: 81106 - RNA, 24 nt, Human
caagaaauguacccagcacaugca

SEQ ID NO: 81107 - RNA, 24 nt, Human
cacccuggggaaaauaguacuuca

SEQ ID NO: 81108 - RNA, 27 nt, Human
cagaaagagaaaccccugucccccacu

SEQ ID NO: 81109 - RNA, 23 nt, Human
cagggaacugggggagaagaggg

SEQ ID NO: 81110 - RNA, 21 nt, Human
cagucucaaugcucauuagca

SEQ ID NO: 81111 - RNA, 20 nt, Human
ccagaaaaaauccaguuaca

SEQ ID NO: 81112 - RNA, 24 nt, Human
cccacaaauccaccagggcucauu

SEQ ID NO: 81113 - RNA, 23 nt, Human
cccagaaaaaauccaguuacacc

SEQ ID NO: 81114 - RNA, 19 nt, Human
cccaggcugcuccuucgag

SEQ ID NO: 81115 - RNA, 22 nt, Human
ccccaccucucacuuucaccua

SEQ ID NO: 81116 - RNA, 23 nt, Human
ccccagaaaaaauccaguuacac

SEQ ID NO: 81117 - RNA, 20 nt, Human
ccucaguacccuuucucuca

SEQ ID NO: 81118 - RNA, 23 nt, Human
ccugagcugagcugcuuuucuug

SEQ ID NO: 81119 - RNA, 20 nt, Human
ccugcuguugggcugugggg

SEQ ID NO: 81120 - RNA, 23 nt, Human
ccuuaggccagaaagagaaaccc

SEQ ID NO: 81121 - RNA, 21 nt, Human
ccuuggacuauuaaugucccc

SEQ ID NO: 81122 - RNA, 20 nt, Human
cucaguacccuuucucucca

SEQ ID NO: 81123 - RNA, 21 nt, Human
cuccacccucacucccagauc

SEQ ID NO: 81124 - RNA, 21 nt, Human
cugacauccuagguggggaga

SEQ ID NO: 81125 - RNA, 21 nt, Human
cuggggcugaagcugaugcug

SEQ ID NO: 81126 - RNA, 21 nt, Human
cugugcugauccuuuguccaa

SEQ ID NO: 81127 - RNA, 20 nt, Human
gaaaccccugucccccaccu

SEQ ID NO: 81128 - RNA, 18 nt, Human
gacagccaaaauccagaa

SEQ ID NO: 81129 - RNA, 20 nt, Human
gaccuuuucuuacagcaaug

SEQ ID NO: 81130 - RNA, 22 nt, Human
gagaacuuccaguguccuggau

SEQ ID NO: 81131 - RNA, 19 nt, Human
gaggccccagaaaaaaucc

SEQ ID NO: 81132 - RNA, 21 nt, Human
gaggccccagaaaaaauccag

SEQ ID NO: 81133 - RNA, 24 nt, Human
gauggcugcccaggcugcuccuuc

SEQ ID NO: 81134 - RNA, 27 nt, Human
gccaggauaugagaagaugggagaggg

SEQ ID NO: 81135 - RNA, 19 nt, Human
gcccaggcugcuccuucga

SEQ ID NO: 81136 - RNA, 20 nt, Human
gcugcccaggcugcuccuuc

SEQ ID NO: 81137 - RNA, 20 nt, Human
gcugcccaggcugcuccuuc

SEQ ID NO: 81138 - RNA, 20 nt, Human
gcuggagcgugaggaaagac

SEQ ID NO: 81139 - RNA, 20 nt, Human
ggaagacucauccugagcug

SEQ ID NO: 81140 - RNA, 22 nt, Human
ggagaacuuccaguguccugga

SEQ ID NO: 81141 - RNA, 23 nt, Human
ggagauugaagccacccugggga

SEQ ID NO: 81142 - RNA, 19 nt, Human
ggaggugugaaacgugcug

SEQ ID NO: 81143 - RNA, 20 nt, Human
ggaucuggauccuggagaac

SEQ ID NO: 81144 - RNA, 25 nt, Human
ggccagaaagagaaaccccuguccc

SEQ ID NO: 81145 - RNA, 19 nt, Human
ggccgaguggaugcacggg

SEQ ID NO: 81146 - RNA, 21 nt, Human
ggccugacuguagguggcagg

SEQ ID NO: 81147 - RNA, 23 nt, Human
gggugagagaaacugugaaccuu

SEQ ID NO: 81148 - RNA, 19 nt, Human
guacuucaaacccaccccu

SEQ ID NO: 81149 - RNA, 22 nt, Human
guccaaggugaagugauugccc

SEQ ID NO: 81150 - RNA, 20 nt, Human
gucucacagaagcacuuugu

SEQ ID NO: 81151 - RNA, 21 nt, Human
gugaaacgugcuggugcuucc

SEQ ID NO: 81152 - RNA, 19 nt, Human
uaaguguuuuuccaguagu

SEQ ID NO: 81153 - RNA, 22 nt, Human
uacaaaccacugucgaaaugag

SEQ ID NO: 81154 - RNA, 19 nt, Human
uaccuuugagggcccauga

SEQ ID NO: 81155 - RNA, 19 nt, Human
uacuucaaacccaccccug

SEQ ID NO: 81156 - RNA, 24 nt, Human
uagagccuaggacucaggcuggag

SEQ ID NO: 81157 - RNA, 20 nt, Human
uagagugccucaguacccuu

SEQ ID NO: 81158 - RNA, 23 nt, Human
uaguccaggcaucaguucauauu

SEQ ID NO: 81159 - RNA, 26 nt, Human
uauccagaccauaaacucucaaaggc

SEQ ID NO: 81160 - RNA, 23 nt, Human
uccaguguccuggauggaauguu

SEQ ID NO: 81161 - RNA, 24 nt, Human
ucccaagugccaagaaauguaccc

SEQ ID NO: 81162 - RNA, 20 nt, Human
ucccccaccucucacuuuca

SEQ ID NO: 81163 - RNA, 22 nt, Human
ucucuggagaggcaggcaaacu

SEQ ID NO: 81164 - RNA, 24 nt, Human
ucuggauccuggagaacuuccagu

SEQ ID NO: 81165 - RNA, 22 nt, Human
ucuuacagcaaugccuuggccc

SEQ ID NO: 81166 - RNA, 23 nt, Human
ugaacucugauuaccugaaaguc

SEQ ID NO: 81167 - RNA, 23 nt, Human
ugacagguugaguggccauggac

SEQ ID NO: 81168 - RNA, 19 nt, Human
ugagagaaacugugaaccu

SEQ ID NO: 81169 - RNA, 22 nt, Human
ugaggccccagaaaaaagggag

SEQ ID NO: 81170 - RNA, 20 nt, Human
ugagguggggcccuggagau

SEQ ID NO: 81171 - RNA, 23 nt, Human
ugaucaauacuccagagcuuuuc

SEQ ID NO: 81172 - RNA, 23 nt, Human
ugcaagaacguccuguuggcugg

SEQ ID NO: 81173 - RNA, 24 nt, Human
ugcaauuuaccuuugagggcccau

SEQ ID NO: 81174 - RNA, 21 nt, Human
ugcagcgcccucaaucaauau

SEQ ID NO: 81175 - RNA, 19 nt, Human
ugcccagagaagagccagg

SEQ ID NO: 81176 - RNA, 19 nt, Human
ugcuuggcucaucuugccc

SEQ ID NO: 81177 - RNA, 20 nt, Human
ugcuuuucuugaaguuguga

SEQ ID NO: 81178 - RNA, 18 nt, Human
uggacuauuaaugucccc

SEQ ID NO: 81179 - RNA, 22 nt, Human
uggagaacuuccaguguccugg

SEQ ID NO: 81180 - RNA, 24 nt, Human
uggagggagagcugcaggucccau

SEQ ID NO: 81181 - RNA, 23 nt, Human
uggcccucaggaagcaucagauc

SEQ ID NO: 81182 - RNA, 18 nt, Human
ugggagagggaaggggga

SEQ ID NO: 81183 - RNA, 19 nt, Human
ugggagagggaagggggag

SEQ ID NO: 81184 - RNA, 20 nt, Human
ugggagagggaagggggagg

SEQ ID NO: 81185 - RNA, 19 nt, Human
ugggcuguggggucuuugu

SEQ ID NO: 81186 - RNA, 18 nt, Human
ugggggagaagagggaag

SEQ ID NO: 81187 - RNA, 19 nt, Human
ugggugacucagaguuccu

SEQ ID NO: 81188 - RNA, 19 nt, Human
uguggagggagagcugcag

SEQ ID NO: 81189 - RNA, 18 nt, Human
ugugggaaagggaugaga

SEQ ID NO: 81190 - RNA, 18 nt, Human
uguucugcuuggcucauc

SEQ ID NO: 81191 - RNA, 18 nt, Human
uguuguggugugacuuac

SEQ ID NO: 81192 - RNA, 22 nt, Human
uuaucaagacuggauugaggcc

SEQ ID NO: 81193 - RNA, 18 nt, Human
uucaauaccucuuuccuc

SEQ ID NO: 81194 - RNA, 22 nt, Human
uuccaggcaccaguuauguccc

SEQ ID NO: 81195 - RNA, 24 nt, Human
uuccaguguccuggauggaauguu

SEQ ID NO: 81196 - RNA, 18 nt, Human
uuccuuggugccaguugg

SEQ ID NO: 81197 - RNA, 19 nt, Human
uuccuuggugccaguuggu

SEQ ID NO: 81198 - RNA, 21 nt, Human
uugaaaaugaauguggcagau

SEQ ID NO: 81199 - RNA, 19 nt, Human
uugaaguugugcaagaacg

SEQ ID NO: 81200 - RNA, 23 nt, Human
uugaguggccauggacccuguuc

SEQ ID NO: 81201 - RNA, 20 nt, Human
uuuccuggccacugugcugg

SEQ ID NO: 81202 - RNA, 26 nt, Human
uuucuagacagaaucauucaggggca

SEQ ID NO: 81203 - RNA, 20 nt, Human
uuucucuggagaggcaggca

SEQ ID NO: 81204 - RNA, 22 nt, Human
aacgagcaacuuccaacaccau

SEQ ID NO: 81205 - RNA, 19 nt, Human
aagccccgcagugcuggag

SEQ ID NO: 81206 - RNA, 24 nt, Human
aagcugccucugcccacuggauuc

SEQ ID NO: 81207 - RNA, 23 nt, Human
acaccauccuaaagcaaaagcca

SEQ ID NO: 81208 - RNA, 25 nt, Human
acgcagggcgcagaggcggggacgg

SEQ ID NO: 81209 - RNA, 21 nt, Human
agaggugggcacggggcgcag

SEQ ID NO: 81210 - RNA, 26 nt, Human
aggcuccuagcgacaacgagcaacuu

SEQ ID NO: 81211 - RNA, 23 nt, Human
auccuaaagcaaaagccaguccc

SEQ ID NO: 81212 - RNA, 21 nt, Human
auggcacggaagucggggucg

SEQ ID NO: 81213 - RNA, 20 nt, Human
caacaccauccuaaagcaaa

SEQ ID NO: 81214 - RNA, 19 nt, Human
caccccgccuucgcggccc

SEQ ID NO: 81215 - RNA, 23 nt, Human
cacuguuacagcccucuacaaau

SEQ ID NO: 81216 - RNA, 21 nt, Human
cagccuaggcugggguugccc

SEQ ID NO: 81217 - RNA, 23 nt, Human
ccgcgggacccagucuggcuucu

SEQ ID NO: 81218 - RNA, 18 nt, Human
ccgcguaacucgcccggg

SEQ ID NO: 81219 - RNA, 18 nt, Human
ccugaacaccuuacuggg

SEQ ID NO: 81220 - RNA, 19 nt, Human
ccugaacaccuuacugggg

SEQ ID NO: 81221 - RNA, 20 nt, Human
cgaggucacuguuacagccc

SEQ ID NO: 81222 - RNA, 23 nt, Human
cgcagccuaggcugggguugccc

SEQ ID NO: 81223 - RNA, 22 nt, Human
cgcggccagcacggggggugcc

SEQ ID NO: 81224 - RNA, 22 nt, Human
cggcacagagaggccgcguaac

SEQ ID NO: 81225 - RNA, 21 nt, Human
cggggggugcccagcacgggg

SEQ ID NO: 81226 - RNA, 22 nt, Human
cuagcgacaacgagcaacuucc

SEQ ID NO: 81227 - RNA, 27 nt, Human
cuagcgacaacgagcaacuuccaacac

SEQ ID NO: 81228 - RNA, 21 nt, Human
cuccuagcgacaacgagcaac

SEQ ID NO: 81229 - RNA, 19 nt, Human
cuucagaucccgacacccu

SEQ ID NO: 81230 - RNA, 18 nt, Human
gcaaaagccagucccaga

SEQ ID NO: 81231 - RNA, 24 nt, Human
gcagugcuggagcgcagccuaggc

SEQ ID NO: 81232 - RNA, 20 nt, Human
gcguccgcgggacccagucu

SEQ ID NO: 81233 - RNA, 19 nt, Human
ggcacaggcgacaccccgc

SEQ ID NO: 81234 - RNA, 19 nt, Human
ggcgcaggcgggcgcggcc

SEQ ID NO: 81235 - RNA, 24 nt, Human
ggcuuguggcuuucugccggcagc

SEQ ID NO: 81236 - RNA, 20 nt, Human
gggcgcaggcgggcgcggcc

SEQ ID NO: 81237 - RNA, 22 nt, Human
gggggccuuacuugaugacagu

SEQ ID NO: 81238 - RNA, 23 nt, Human
gguguuucaccauagcucuucag

SEQ ID NO: 81239 - RNA, 19 nt, Human
guagcggggcagggcgggg

SEQ ID NO: 81240 - RNA, 20 nt, Human
guccugaacaccuuacuggg

SEQ ID NO: 81241 - RNA, 19 nt, Human
gucgcuuaccaguccugaa

SEQ ID NO: 81242 - RNA, 25 nt, Human
gugguguuucaccauagcucuucag

SEQ ID NO: 81243 - RNA, 19 nt, Human
ucaaucaguuuucauggcu

SEQ ID NO: 81244 - RNA, 23 nt, Human
uggcaaugcuucagugguguuuc

SEQ ID NO: 81245 - RNA, 22 nt, Human
uggcagcacccccggucugcga

SEQ ID NO: 81246 - RNA, 25 nt, Human
uggcagcacccccggucugcgauug

SEQ ID NO: 81247 - RNA, 20 nt, Human
ugggcacggggcgcaggcgg

SEQ ID NO: 81248 - RNA, 19 nt, Human
uuacuggggcuuaguacuc

SEQ ID NO: 81249 - RNA, 18 nt, Human
aaacaagaaagagggucu

SEQ ID NO: 81250 - RNA, 18 nt, Human
aaacaagaaagagggucu

SEQ ID NO: 81251 - RNA, 21 nt, Human
cccgcgccgcaaccacggccg

SEQ ID NO: 81252 - RNA, 21 nt, Human
cggaaccaggauccaaacuuc

SEQ ID NO: 81253 - RNA, 27 nt, Human
cuuuauagucacagauggucagaugcu

SEQ ID NO: 81254 - RNA, 20 nt, Human
gagggucuauguacauugag

SEQ ID NO: 81255 - RNA, 18 nt, Human
gccgcaaccacggccgcc

SEQ ID NO: 81256 - RNA, 23 nt, Human
uuuauagucacagauggucagau

SEQ ID NO: 81257 - RNA, 20 nt, Human
uuuuuuuuuuuuuuuuuggu

SEQ ID NO: 81258 - RNA, 25 nt, Human
uuuuuuuuuuuuuuuuuuuuugggg

SEQ ID NO: 81259 - RNA, 20 nt, Human
aaaacacagacacagaacca

SEQ ID NO: 81260 - RNA, 21 nt, Human
aaaacacagacacagaaccaa

SEQ ID NO: 81261 - RNA, 21 nt, Human
acacagacacagaaccaaacu

SEQ ID NO: 81262 - RNA, 27 nt, Human
acucuuaggccacccucccuccacucu

SEQ ID NO: 81263 - RNA, 22 nt, Human
aggaaagagcuggagggcagua

SEQ ID NO: 81264 - RNA, 19 nt, Human
auccugagcuguuagagau

SEQ ID NO: 81265 - RNA, 22 nt, Human
ccacucuacucuaggaacaagg

SEQ ID NO: 81266 - RNA, 20 nt, Human
cccuccacucuacucuagga

SEQ ID NO: 81267 - RNA, 23 nt, Human
ccggcgggguaacgguagcuucc

SEQ ID NO: 81268 - RNA, 24 nt, Human
ccucccuccacucuacucuaggaa

SEQ ID NO: 81269 - RNA, 24 nt, Human
ccugaucuuccccccucuuuuuuu

SEQ ID NO: 81270 - RNA, 19 nt, Human
cgccgggauugcgcugcgg

SEQ ID NO: 81271 - RNA, 20 nt, Human
cugaucuuccccccucuuuu

SEQ ID NO: 81272 - RNA, 18 nt, Human
cuuuuuuuuccuuuaaca

SEQ ID NO: 81273 - RNA, 23 nt, Human
gagcauuaggucuguuuucucuc

SEQ ID NO: 81274 - RNA, 23 nt, Human
gccacccucccuccacucuacuc

SEQ ID NO: 81275 - RNA, 18 nt, Human
gcgccgggauugcgcugc

SEQ ID NO: 81276 - RNA, 21 nt, Human
gguccuugggcgagcgccggg

SEQ ID NO: 81277 - RNA, 18 nt, Human
uaaaacacagacacagaa

SEQ ID NO: 81278 - RNA, 21 nt, Human
uaaaacacagacacagaacca

SEQ ID NO: 81279 - RNA, 22 nt, Human
uaaaacacagacacagaaccaa

SEQ ID NO: 81280 - RNA, 20 nt, Human
uaacaguauucuguuucagc

SEQ ID NO: 81281 - RNA, 19 nt, Human
uaggaaagacagugauacu

SEQ ID NO: 81282 - RNA, 21 nt, Human
uaggaaagacagugauacugu

SEQ ID NO: 81283 - RNA, 18 nt, Human
uaggccacccucccucca

SEQ ID NO: 81284 - RNA, 22 nt, Human
uccacucuacucuaggaacaag

SEQ ID NO: 81285 - RNA, 18 nt, Human
ucccuccacucuacucua

SEQ ID NO: 81286 - RNA, 27 nt, Human
uccuuuaacaguauucuguuucagcau

SEQ ID NO: 81287 - RNA, 19 nt, Human
ucugaagagguuccuggug

SEQ ID NO: 81288 - RNA, 23 nt, Human
ugaccugaucuuccccccucuuu

SEQ ID NO: 81289 - RNA, 25 nt, Human
ugaccugaucuuccccccucuuuuu

SEQ ID NO: 81290 - RNA, 19 nt, Human
ugcauaacuuuggcuucag

SEQ ID NO: 81291 - RNA, 23 nt, Human
uuaggccacccucccuccacucu

SEQ ID NO: 81292 - RNA, 19 nt, Human
uucucuccauacaccucaa

SEQ ID NO: 81293 - RNA, 21 nt, Human
uugcauaacuuuggcuucagu

SEQ ID NO: 81294 - RNA, 19 nt, Human
aagagacacgaauaacugu

SEQ ID NO: 81295 - RNA, 19 nt, Human
aaggagaaacuuugggaaa

SEQ ID NO: 81296 - RNA, 20 nt, Human
aaggagaaacuuugggaaag

SEQ ID NO: 81297 - RNA, 21 nt, Human
aaggagaaacuuugggaaagu

SEQ ID NO: 81298 - RNA, 19 nt, Human
aggcaauagaacaagucca

SEQ ID NO: 81299 - RNA, 21 nt, Human
caccagauauuaacaguucau

SEQ ID NO: 81300 - RNA, 18 nt, Human
cagcaugguaagccucug

SEQ ID NO: 81301 - RNA, 21 nt, Human
caguucaucaggucaggcaau

SEQ ID NO: 81302 - RNA, 21 nt, Human
caugauaacucaaccucacca

SEQ ID NO: 81303 - RNA, 26 nt, Human
cugaagcaaugguauugaucuuuuuu

SEQ ID NO: 81304 - RNA, 23 nt, Human
gaacaaguccacaugagcuucuu

SEQ ID NO: 81305 - RNA, 24 nt, Human
guccaguggucacgucagcaguuc

SEQ ID NO: 81306 - RNA, 19 nt, Human
ucaaaaggagaaacuuugg

SEQ ID NO: 81307 - RNA, 18 nt, Human
ucaaggguuccggccacu

SEQ ID NO: 81308 - RNA, 19 nt, Human
ucagcaguuccuggcccuc

SEQ ID NO: 81309 - RNA, 20 nt, Human
ucagcaguuccuggcccucc

SEQ ID NO: 81310 - RNA, 23 nt, Human
uuaguagcaugauaacucaaccu

SEQ ID NO: 81311 - RNA, 18 nt, Human
uuccuggcccuccuaggg

SEQ ID NO: 81312 - RNA, 23 nt, Human
uuugggacuuuuucucaaaagga

SEQ ID NO: 81313 - RNA, 22 nt, Human
aaacagcacaagcugaaguggg

SEQ ID NO: 81314 - RNA, 18 nt, Human
aaacaggcauaaaguccu

SEQ ID NO: 81315 - RNA, 19 nt, Human
aaacaggcauaaaguccuc

SEQ ID NO: 81316 - RNA, 20 nt, Human
aaaguccucaccccaggcug

SEQ ID NO: 81317 - RNA, 22 nt, Human
aacacaacuccuucuuggaacc

SEQ ID NO: 81318 - RNA, 18 nt, Human
aaccaugaagaggcccca

SEQ ID NO: 81319 - RNA, 23 nt, Human
aagacaagaaaggaaaggaugag

SEQ ID NO: 81320 - RNA, 19 nt, Human
aagcagagcuugagcuaag

SEQ ID NO: 81321 - RNA, 26 nt, Human
aagcagagcuugagcuaagggcuugg

SEQ ID NO: 81322 - RNA, 23 nt, Human
aagcagcccucuccucuuggaaa

SEQ ID NO: 81323 - RNA, 18 nt, Human
aagcaggauugggggccu

SEQ ID NO: 81324 - RNA, 21 nt, Human
acacaacuccuucuuggaacc

SEQ ID NO: 81325 - RNA, 22 nt, Human
agacaagaaaggaaaggaugag

SEQ ID NO: 81326 - RNA, 21 nt, Human
agagcugggggaagggaaaag

SEQ ID NO: 81327 - RNA, 19 nt, Human
agaggguaagacaagaaug

SEQ ID NO: 81328 - RNA, 23 nt, Human
agccagaacuugagguugcuugg

SEQ ID NO: 81329 - RNA, 21 nt, Human
agccccuggccuccuaccucc

SEQ ID NO: 81330 - RNA, 18 nt, Human
aggcauaaaguccucacc

SEQ ID NO: 81331 - RNA, 18 nt, Human
aguaacagccagaacuug

SEQ ID NO: 81332 - RNA, 19 nt, Human
aucccucccccagcucugg

SEQ ID NO: 81333 - RNA, 21 nt, Human
auccugguccugcuucuguuc

SEQ ID NO: 81334 - RNA, 18 nt, Human
caaaacuggauggugggg

SEQ ID NO: 81335 - RNA, 19 nt, Human
caacagacagugagagaga

SEQ ID NO: 81336 - RNA, 19 nt, Human
caagaugaggcucauccug

SEQ ID NO: 81337 - RNA, 18 nt, Human
cacagaucuacuuaccaa

SEQ ID NO: 81338 - RNA, 21 nt, Human
cacuccacccucagggcucuc

SEQ ID NO: 81339 - RNA, 24 nt, Human
cacuccacccucagggcucucacc

SEQ ID NO: 81340 - RNA, 19 nt, Human
cagagcuugagcuaagggc

SEQ ID NO: 81341 - RNA, 27 nt, Human
cagcucuggccccaauccucccagccc

SEQ ID NO: 81342 - RNA, 19 nt, Human
ccaauccucccagcccacc

SEQ ID NO: 81343 - RNA, 21 nt, Human
ccaggcugcaccaggauacaa

SEQ ID NO: 81344 - RNA, 22 nt, Human
cccaccugccuuauccuugccu

SEQ ID NO: 81345 - RNA, 27 nt, Human
cccagcucuggccccaauccucccagc

SEQ ID NO: 81346 - RNA, 21 nt, Human
ccccaggcugucacuaucucu

SEQ ID NO: 81347 - RNA, 19 nt, Human
ccccauucuagcacaucug

SEQ ID NO: 81348 - RNA, 18 nt, Human
ccccuccuucuuugucca

SEQ ID NO: 81349 - RNA, 19 nt, Human
cccugcucccagucaguug

SEQ ID NO: 81350 - RNA, 22 nt, Human
ccuaccuccucccaccucuugc

SEQ ID NO: 81351 - RNA, 23 nt, Human
ccucagggcucucaccgggcugu

SEQ ID NO: 81352 - RNA, 21 nt, Human
ccuccuuacuucccugcagcc

SEQ ID NO: 81353 - RNA, 22 nt, Human
ccuccuucccagagcucagugg

SEQ ID NO: 81354 - RNA, 18 nt, Human
ccugcagccugccucuuu

SEQ ID NO: 81355 - RNA, 22 nt, Human
ccugccucuuuucugccuggga

SEQ ID NO: 81356 - RNA, 19 nt, Human
ccugggccucuccuggggc

SEQ ID NO: 81357 - RNA, 21 nt, Human
ccuggggccccucccucaccc

SEQ ID NO: 81358 - RNA, 21 nt, Human
ccuucaguaggccuugggaac

SEQ ID NO: 81359 - RNA, 22 nt, Human
ccuugccaggaaacagcacaag

SEQ ID NO: 81360 - RNA, 19 nt, Human
cgcacccaggcguccaggc

SEQ ID NO: 81361 - RNA, 19 nt, Human
cucauccugggccucuccu

SEQ ID NO: 81362 - RNA, 18 nt, Human
cucccagcccaccuucug

SEQ ID NO: 81363 - RNA, 19 nt, Human
cucccagucaguugaccug

SEQ ID NO: 81364 - RNA, 19 nt, Human
cucccccagcucuggcccc

SEQ ID NO: 81365 - RNA, 24 nt, Human
cucccccagcucuggccccaaucc

SEQ ID NO: 81366 - RNA, 22 nt, Human
cuccucccaccucuugccucag

SEQ ID NO: 81367 - RNA, 18 nt, Human
cuccucuagucuggcccc

SEQ ID NO: 81368 - RNA, 22 nt, Human
cuccuggggccccucccucacc

SEQ ID NO: 81369 - RNA, 24 nt, Human
cuccuucccaucaccaacgcaccc

SEQ ID NO: 81370 - RNA, 21 nt, Human
cuggagaagcugaaagguuaa

SEQ ID NO: 81371 - RNA, 20 nt, Human
cuggccuccuucccagagcu

SEQ ID NO: 81372 - RNA, 18 nt, Human
gaaauaggaggacucugc

SEQ ID NO: 81373 - RNA, 20 nt, Human
gaauccugguccugcuucug

SEQ ID NO: 81374 - RNA, 21 nt, Human
gaggacccagaccccaccucu

SEQ ID NO: 81375 - RNA, 24 nt, Human
gauggauagagcugggggaaggga

SEQ ID NO: 81376 - RNA, 18 nt, Human
gcaguaagauucccuggu

SEQ ID NO: 81377 - RNA, 21 nt, Human
gcauggugcuagguuccagga

SEQ ID NO: 81378 - RNA, 21 nt, Human
gccagaacuugagguugcuug

SEQ ID NO: 81379 - RNA, 21 nt, Human
gcucuggccccaauccuccca

SEQ ID NO: 81380 - RNA, 21 nt, Human
gcugcaccaggauacaagaca

SEQ ID NO: 81381 - RNA, 23 nt, Human
ggaaaagucaagcaaaacuugga

SEQ ID NO: 81382 - RNA, 22 nt, Human
ggauggugggguguaaagggac

SEQ ID NO: 81383 - RNA, 20 nt, Human
ggcagauggauagagcuggg

SEQ ID NO: 81384 - RNA, 21 nt, Human
ggccuggcagauggauagagc

SEQ ID NO: 81385 - RNA, 22 nt, Human
gggccccucccucacccugcuc

SEQ ID NO: 81386 - RNA, 18 nt, Human
gggcugucaaugacagcu

SEQ ID NO: 81387 - RNA, 21 nt, Human
ggugcuagguuccaggaggaa

SEQ ID NO: 81388 - RNA, 21 nt, Human
guaaaacaagagagaggaaag

SEQ ID NO: 81389 - RNA, 21 nt, Human
uaaaacaagagagaggaaagc

SEQ ID NO: 81390 - RNA, 22 nt, Human
uaaacaggcauaaaguccucac

SEQ ID NO: 81391 - RNA, 21 nt, Human
uaagggcuuggguacagguga

SEQ ID NO: 81392 - RNA, 21 nt, Human
uaagggcuuggguacagguga

SEQ ID NO: 81393 - RNA, 21 nt, Human
uaagguaaaacaagagagagg

SEQ ID NO: 81394 - RNA, 19 nt, Human
uacagcguauccucacaac

SEQ ID NO: 81395 - RNA, 21 nt, Human
uaccaagcugggagcaagcag

SEQ ID NO: 81396 - RNA, 18 nt, Human
uacuaagaagcagcccuc

SEQ ID NO: 81397 - RNA, 21 nt, Human
uacuucccugcagccugccuc

SEQ ID NO: 81398 - RNA, 22 nt, Human
uacuucccugcagccugccucu

SEQ ID NO: 81399 - RNA, 23 nt, Human
uaggaggacucugcugaauccug

SEQ ID NO: 81400 - RNA, 23 nt, Human
uaucucuaccaccacuccucuag

SEQ ID NO: 81401 - RNA, 21 nt, Human
uauuugguucagggccagggc

SEQ ID NO: 81402 - RNA, 21 nt, Human
ucaguaggccuugggaaccuc

SEQ ID NO: 81403 - RNA, 19 nt, Human
uccaaagcauuuauuagga

SEQ ID NO: 81404 - RNA, 20 nt, Human
uccacgaggacccagacccc

SEQ ID NO: 81405 - RNA, 22 nt, Human
ucccagagcucagugguaaaca

SEQ ID NO: 81406 - RNA, 18 nt, Human
ucccugcagccugccucu

SEQ ID NO: 81407 - RNA, 23 nt, Human
ucccuucaguaggccuugggaac

SEQ ID NO: 81408 - RNA, 22 nt, Human
uccugggccucuccuggggccc

SEQ ID NO: 81409 - RNA, 23 nt, Human
uccugggccucuccuggggcccc

SEQ ID NO: 81410 - RNA, 26 nt, Human
uccugggccucuccuggggccccucc

SEQ ID NO: 81411 - RNA, 22 nt, Human
uccuggggccccucccucaccc

SEQ ID NO: 81412 - RNA, 19 nt, Human
uccugguccggcugagccc

SEQ ID NO: 81413 - RNA, 18 nt, Human
ucucuggccugcagaggu

SEQ ID NO: 81414 - RNA, 21 nt, Human
ugaauccugguccugcuucug

SEQ ID NO: 81415 - RNA, 20 nt, Human
ugacacacaaccaugaagag

SEQ ID NO: 81416 - RNA, 21 nt, Human
ugacacacaaccaugaagagg

SEQ ID NO: 81417 - RNA, 24 nt, Human
ugagaaaaguauagauugcccaag

SEQ ID NO: 81418 - RNA, 20 nt, Human
ugccaggaaacagcacaagc

SEQ ID NO: 81419 - RNA, 22 nt, Human
ugccuuauccuugccuguuucc

SEQ ID NO: 81420 - RNA, 18 nt, Human
uggaaaugaagagauuug

SEQ ID NO: 81421 - RNA, 21 nt, Human
uggaacccagauccccugcuc

SEQ ID NO: 81422 - RNA, 18 nt, Human
uggaaggaaauaggagga

SEQ ID NO: 81423 - RNA, 19 nt, Human
uggcagauggauagagcug

SEQ ID NO: 81424 - RNA, 19 nt, Human
ugggcaaaacuggauggug

SEQ ID NO: 81425 - RNA, 21 nt, Human
uggggagggacaagaugaggc

SEQ ID NO: 81426 - RNA, 22 nt, Human
ugggggaagggaaaagaaaggc

SEQ ID NO: 81427 - RNA, 21 nt, Human
ugguccggcugagccccuggc

SEQ ID NO: 81428 - RNA, 19 nt, Human
uggugcuagguuccaggag

SEQ ID NO: 81429 - RNA, 18 nt, Human
uggugggguguaaaggga

SEQ ID NO: 81430 - RNA, 23 nt, Human
uucccagagcucagugguaaaca

SEQ ID NO: 81431 - RNA, 21 nt, Human
uucugcaguguguauguugcc

SEQ ID NO: 81432 - RNA, 22 nt, Human
uucuguucucaucccuccccca

SEQ ID NO: 81433 - RNA, 24 nt, Human
uugcccaagacaaaagacuggcag

SEQ ID NO: 81434 - RNA, 19 nt, Human
uuggggagggcaccaggag

SEQ ID NO: 81435 - RNA, 20 nt, Human
agaaccaaaugcuggugcca

SEQ ID NO: 81436 - RNA, 18 nt, Human
cuuggucucuuccuucgg

SEQ ID NO: 81437 - RNA, 24 nt, Human
gagaagaaccaaaugcuggugcca

SEQ ID NO: 81438 - RNA, 22 nt, Human
gucaacucuugagaagaaccaa

SEQ ID NO: 81439 - RNA, 22 nt, Human
ugagaagaaccaaaugcuggug

SEQ ID NO: 81440 - RNA, 24 nt, Human
uggaagugcuacaucaccuccucc

SEQ ID NO: 81441 - RNA, 23 nt, Human
cauguccagaaugccacccuccc

SEQ ID NO: 81442 - RNA, 18 nt, Human
ccacuggcugcugggcgg

SEQ ID NO: 81443 - RNA, 19 nt, Human
ccucagagucucggcacgc

SEQ ID NO: 81444 - RNA, 19 nt, Human
ccucccagauggggacaga

SEQ ID NO: 81445 - RNA, 20 nt, Human
cucauguccagaaugccacc

SEQ ID NO: 81446 - RNA, 21 nt, Human
cucucugcccccaucugggag

SEQ ID NO: 81447 - RNA, 18 nt, Human
cucugcccccaucuggga

SEQ ID NO: 81448 - RNA, 20 nt, Human
gaagcucuuggcucaacauu

SEQ ID NO: 81449 - RNA, 19 nt, Human
ugcccccuuccuuugcucc

SEQ ID NO: 81450 - RNA, 24 nt, Human
ugggcggugcucucugcccccauc

SEQ ID NO: 81451 - RNA, 19 nt, Human
uuugcuccucauguccaga

SEQ ID NO: 81452 - RNA, 19 nt, Human
aaagaagucaaacugcagg

SEQ ID NO: 81453 - RNA, 19 nt, Human
aaagaagucaaacugcagg

SEQ ID NO: 81454 - RNA, 21 nt, Human
aaagcaguucagggaggggcg

SEQ ID NO: 81455 - RNA, 19 nt, Human
aagcagcugcggggacaag

SEQ ID NO: 81456 - RNA, 21 nt, Human
aagcagcugcggggacaagga

SEQ ID NO: 81457 - RNA, 21 nt, Human
aagcggccugaagucucgcag

SEQ ID NO: 81458 - RNA, 19 nt, Human
acaagcagccucacagcgg

SEQ ID NO: 81459 - RNA, 20 nt, Human
acagcugcacuuguagcugc

SEQ ID NO: 81460 - RNA, 21 nt, Human
acaguggggagaagagagcac

SEQ ID NO: 81461 - RNA, 21 nt, Human
acaguggggagaagagagcac

SEQ ID NO: 81462 - RNA, 19 nt, Human
acccaauugcugcugcugc

SEQ ID NO: 81463 - RNA, 19 nt, Human
accucauacuuggggacaa

SEQ ID NO: 81464 - RNA, 28 nt, Human
acuggaaugugaggcccacguggaagcc

SEQ ID NO: 81465 - RNA, 20 nt, Human
acugggaggugaugaccucg

SEQ ID NO: 81466 - RNA, 20 nt, Human
acugggaggugaugaccucg

SEQ ID NO: 81467 - RNA, 21 nt, Human
acugugguggaaugggggcuc

SEQ ID NO: 81468 - RNA, 19 nt, Human
agaaccacagaacuugcca

SEQ ID NO: 81469 - RNA, 19 nt, Human
agaaccacagaacuugcca

SEQ ID NO: 81470 - RNA, 21 nt, Human
agacacuugugccccaggaaa

SEQ ID NO: 81471 - RNA, 19 nt, Human
agagaggaaugaugacuuc

SEQ ID NO: 81472 - RNA, 18 nt, Human
agccauugggguauucag

SEQ ID NO: 81473 - RNA, 21 nt, Human
agccauugggguauucaggag

SEQ ID NO: 81474 - RNA, 20 nt, Human
agcucugcucccuggcccca

SEQ ID NO: 81475 - RNA, 23 nt, Human
aggaaacugugguggaauggggg

SEQ ID NO: 81476 - RNA, 21 nt, Human
aggaaaugucacagacaccau

SEQ ID NO: 81477 - RNA, 21 nt, Human
aggaaaugucacagacaccau

SEQ ID NO: 81478 - RNA, 23 nt, Human
aggaagaugccccuggagaaugu

SEQ ID NO: 81479 - RNA, 18 nt, Human
aggagugggggagcuaag

SEQ ID NO: 81480 - RNA, 23 nt, Human
aggggugggccuguagggaggag

SEQ ID NO: 81481 - RNA, 20 nt, Human
agucauaggucucccccagg

SEQ ID NO: 81482 - RNA, 22 nt, Human
aucggcuccccacgguggcucc

SEQ ID NO: 81483 - RNA, 21 nt, Human
caaaugaacaggccaaggucc

SEQ ID NO: 81484 - RNA, 21 nt, Human
caacccagaggcggcugucag

SEQ ID NO: 81485 - RNA, 19 nt, Human
caccgaagcccccauccca

SEQ ID NO: 81486 - RNA, 19 nt, Human
caccgaagcccccauccca

SEQ ID NO: 81487 - RNA, 21 nt, Human
caccuccuauggacagucuca

SEQ ID NO: 81488 - RNA, 22 nt, Human
cacguggaagcccucagacacc

SEQ ID NO: 81489 - RNA, 20 nt, Human
cacugcgcaccuccacgaag

SEQ ID NO: 81490 - RNA, 20 nt, Human
cacugcgcaccuccacgaag

SEQ ID NO: 81491 - RNA, 22 nt, Human
cagaagccaucucggaccucca

SEQ ID NO: 81492 - RNA, 18 nt, Human
cagacaccaucaaaaugg

SEQ ID NO: 81493 - RNA, 18 nt, Human
cagacaccaucaaaaugg

SEQ ID NO: 81494 - RNA, 27 nt, Human
cagccccuugcugguggggguuugugg

SEQ ID NO: 81495 - RNA, 19 nt, Human
cagcucgggggcacagcag

SEQ ID NO: 81496 - RNA, 22 nt, Human
caggaaaugucacagacaccau

SEQ ID NO: 81497 - RNA, 22 nt, Human
caggaaaugucacagacaccau

SEQ ID NO: 81498 - RNA, 18 nt, Human
caggccauuggcccugca

SEQ ID NO: 81499 - RNA, 20 nt, Human
caggccucacuggggggucc

SEQ ID NO: 81500 - RNA, 20 nt, Human
cagggaccugugucuggucc

SEQ ID NO: 81501 - RNA, 18 nt, Human
caggggaggagaaguugc

SEQ ID NO: 81502 - RNA, 21 nt, Human
cagguccuggggccuggggga

SEQ ID NO: 81503 - RNA, 19 nt, Human
cagugcaugugagcagagu

SEQ ID NO: 81504 - RNA, 18 nt, Human
caguucagggaggggcgg

SEQ ID NO: 81505 - RNA, 19 nt, Human
caguucuguccggccagag

SEQ ID NO: 81506 - RNA, 19 nt, Human
caguucuguccggccagag

SEQ ID NO: 81507 - RNA, 20 nt, Human
caucggcuccccacgguggc

SEQ ID NO: 81508 - RNA, 21 nt, Human
caugcacagacacuugugccc

SEQ ID NO: 81509 - RNA, 19 nt, Human
ccaaaucgaggcuggagca

SEQ ID NO: 81510 - RNA, 20 nt, Human
ccagcacaggcggcugcggu

SEQ ID NO: 81511 - RNA, 20 nt, Human
ccaggcagggcccccuaaga

SEQ ID NO: 81512 - RNA, 18 nt, Human
ccccaaggcucagggacc

SEQ ID NO: 81513 - RNA, 19 nt, Human
ccccagggacuccaccucc

SEQ ID NO: 81514 - RNA, 23 nt, Human
ccccagggacuccaccuccugag

SEQ ID NO: 81515 - RNA, 22 nt, Human
cccccagggacuccaccuccug

SEQ ID NO: 81516 - RNA, 19 nt, Human
ccccggaagguggcagggg

SEQ ID NO: 81517 - RNA, 20 nt, Human
ccccuugcugagccgugucc

SEQ ID NO: 81518 - RNA, 19 nt, Human
cccgcgguugggccgagag

SEQ ID NO: 81519 - RNA, 20 nt, Human
cccugcagguccuggggccu

SEQ ID NO: 81520 - RNA, 19 nt, Human
cccuugcugguggggguuu

SEQ ID NO: 81521 - RNA, 22 nt, Human
ccgaagcccccaucccauuccg

SEQ ID NO: 81522 - RNA, 23 nt, Human
ccgaagcccccaucccauuccgu

SEQ ID NO: 81523 - RNA, 23 nt, Human
ccgaagcccccaucccauuccgu

SEQ ID NO: 81524 - RNA, 23 nt, Human
ccgaagcccccaucccauuccgu

SEQ ID NO: 81525 - RNA, 19 nt, Human
ccgcccacccccacuaucc

SEQ ID NO: 81526 - RNA, 21 nt, Human
ccggaguccaguucccccacc

SEQ ID NO: 81527 - RNA, 25 nt, Human
ccggugauacacaauacagcgugua

SEQ ID NO: 81528 - RNA, 24 nt, Human
ccgucagagacgaacuugagccag

SEQ ID NO: 81529 - RNA, 23 nt, Human
ccuacagguccaaaugccccgga

SEQ ID NO: 81530 - RNA, 22 nt, Human
ccuccagaagccaucucggacc

SEQ ID NO: 81531 - RNA, 22 nt, Human
ccuggcaggccucacugggggg

SEQ ID NO: 81532 - RNA, 22 nt, Human
ccuggccaguguugggcccucg

SEQ ID NO: 81533 - RNA, 20 nt, Human
ccuggccccagccccuugcc

SEQ ID NO: 81534 - RNA, 20 nt, Human
cgcauguuguuguacuggga

SEQ ID NO: 81535 - RNA, 20 nt, Human
cgcauguuguuguacuggga

SEQ ID NO: 81536 - RNA, 23 nt, Human
cgcccacccccacuauccagucu

SEQ ID NO: 81537 - RNA, 24 nt, Human
cgcccacccccacuauccagucua

SEQ ID NO: 81538 - RNA, 21 nt, Human
cggcuccccacgguggcuccu

SEQ ID NO: 81539 - RNA, 18 nt, Human
cggcuggacgugcucuug

SEQ ID NO: 81540 - RNA, 19 nt, Human
cgggaggaggcaggguggc

SEQ ID NO: 81541 - RNA, 21 nt, Human
cuaggcgaccaagggcagcug

SEQ ID NO: 81542 - RNA, 22 nt, Human
cucauagccacaguagcgccuu

SEQ ID NO: 81543 - RNA, 21 nt, Human
cuccaccuccugaggcuccau

SEQ ID NO: 81544 - RNA, 24 nt, Human
cuccagaagccaucucggaccucc

SEQ ID NO: 81545 - RNA, 23 nt, Human
cuccccaaggcucagggaccugu

SEQ ID NO: 81546 - RNA, 18 nt, Human
cucccuggccccagcccc

SEQ ID NO: 81547 - RNA, 22 nt, Human
cuccuggcucccauaccagguu

SEQ ID NO: 81548 - RNA, 19 nt, Human
cuccuugggccagcccggg

SEQ ID NO: 81549 - RNA, 19 nt, Human
cuccuugggccagcccggg

SEQ ID NO: 81550 - RNA, 20 nt, Human
cuccuugggccagcccgggc

SEQ ID NO: 81551 - RNA, 20 nt, Human
cuccuugggccagcccgggc

SEQ ID NO: 81552 - RNA, 26 nt, Human
cugcaaaugaacaggccaagguccuc

SEQ ID NO: 81553 - RNA, 19 nt, Human
cugcagagcuggccucuuu

SEQ ID NO: 81554 - RNA, 19 nt, Human
cugcagagcuggccucuuu

SEQ ID NO: 81555 - RNA, 20 nt, Human
cugcagguccuggggccugg

SEQ ID NO: 81556 - RNA, 21 nt, Human
cugggggguccgguuucuuuu

SEQ ID NO: 81557 - RNA, 21 nt, Human
cugggggguccgguuucuuuu

SEQ ID NO: 81558 - RNA, 24 nt, Human
cuggugauggagccguugagcuug

SEQ ID NO: 81559 - RNA, 24 nt, Human
cuggugauggagccguugagcuug

SEQ ID NO: 81560 - RNA, 21 nt, Human
cugguggggguuuguggggaa

SEQ ID NO: 81561 - RNA, 25 nt, Human
cugucuuguuucuccauccccuccc

SEQ ID NO: 81562 - RNA, 19 nt, Human
cuugcugagccguguccuu

SEQ ID NO: 81563 - RNA, 19 nt, Human
cuugugccccaggaaacug

SEQ ID NO: 81564 - RNA, 20 nt, Human
cuuguggaagcucugcuccc

SEQ ID NO: 81565 - RNA, 20 nt, Human
cuuguggaagcucugcuccc

SEQ ID NO: 81566 - RNA, 26 nt, Human
gaagaugccccuggagaauguguucc

SEQ ID NO: 81567 - RNA, 20 nt, Human
gacuggaaugugaggcccac

SEQ ID NO: 81568 - RNA, 26 nt, Human
gagaauguguuccgagcguaaugcau

SEQ ID NO: 81569 - RNA, 19 nt, Human
gaggcuggagcaggggugg

SEQ ID NO: 81570 - RNA, 18 nt, Human
gaguaacaagggguccgg

SEQ ID NO: 81571 - RNA, 18 nt, Human
gaguaacaagggguccgg

SEQ ID NO: 81572 - RNA, 21 nt, Human
gcaaaugaacaggccaagguc

SEQ ID NO: 81573 - RNA, 19 nt, Human
gcaccgaagcccccauccc

SEQ ID NO: 81574 - RNA, 19 nt, Human
gcaccgaagcccccauccc

SEQ ID NO: 81575 - RNA, 22 nt, Human
gcacucggaauuugagcuggug

SEQ ID NO: 81576 - RNA, 22 nt, Human
gcacucggaauuugagcuggug

SEQ ID NO: 81577 - RNA, 22 nt, Human
gcacucggaauuugagcuggug

SEQ ID NO: 81578 - RNA, 22 nt, Human
gcacucggaauuugagcuggug

SEQ ID NO: 81579 - RNA, 25 nt, Human
gcagugcaugugagcagaagggccc

SEQ ID NO: 81580 - RNA, 20 nt, Human
gccaugggcugagagaagcc

SEQ ID NO: 81581 - RNA, 20 nt, Human
gcccaggguguugaggcacc

SEQ ID NO: 81582 - RNA, 20 nt, Human
gcccccuaagagaggaauga

SEQ ID NO: 81583 - RNA, 18 nt, Human
gccccuugcugguggggg

SEQ ID NO: 81584 - RNA, 24 nt, Human
gccccuugcugguggggguuugug

SEQ ID NO: 81585 - RNA, 21 nt, Human
gcccgggcuggugauggagcc

SEQ ID NO: 81586 - RNA, 21 nt, Human
gcccgggcuggugauggagcc

SEQ ID NO: 81587 - RNA, 20 nt, Human
gccucuuuucugagaagaag

SEQ ID NO: 81588 - RNA, 22 nt, Human
gcgccuuccuccagaagccauc

SEQ ID NO: 81589 - RNA, 18 nt, Human
gcggugcccugguguggc

SEQ ID NO: 81590 - RNA, 18 nt, Human
gcuccaguccccgccccu

SEQ ID NO: 81591 - RNA, 18 nt, Human
gcucuuucuucuccuucu

SEQ ID NO: 81592 - RNA, 22 nt, Human
ggaaaugaacauuacaaugaaa

SEQ ID NO: 81593 - RNA, 20 nt, Human
ggaauggcagaguggaggug

SEQ ID NO: 81594 - RNA, 20 nt, Human
ggaauggcagaguggaggug

SEQ ID NO: 81595 - RNA, 19 nt, Human
ggacgggaggaggcagggu

SEQ ID NO: 81596 - RNA, 18 nt, Human
ggacgggcacagugggga

SEQ ID NO: 81597 - RNA, 18 nt, Human
ggacuccccaaggcucag

SEQ ID NO: 81598 - RNA, 24 nt, Human
ggagaagagagcaccaguucuguc

SEQ ID NO: 81599 - RNA, 24 nt, Human
ggagaagagagcaccaguucuguc

SEQ ID NO: 81600 - RNA, 24 nt, Human
ggagcagcucgggggcacagcagg

SEQ ID NO: 81601 - RNA, 20 nt, Human
ggaggagugggggagcuaag

SEQ ID NO: 81602 - RNA, 22 nt, Human
ggaggggcgguccugggaggug

SEQ ID NO: 81603 - RNA, 20 nt, Human
ggaggggguagggcacgggg

SEQ ID NO: 81604 - RNA, 20 nt, Human
ggaggggguagggcacgggg

SEQ ID NO: 81605 - RNA, 20 nt, Human
ggaggugcaggaaagggagc

SEQ ID NO: 81606 - RNA, 20 nt, Human
ggccaaugggagguuucacc

SEQ ID NO: 81607 - RNA, 20 nt, Human
ggccaguguugggcccucgg

SEQ ID NO: 81608 - RNA, 20 nt, Human
ggccuggguguccucagggg

SEQ ID NO: 81609 - RNA, 24 nt, Human
gggaaagcaguucagggaggggcg

SEQ ID NO: 81610 - RNA, 21 nt, Human
gggaagggcugagaugugggc

SEQ ID NO: 81611 - RNA, 18 nt, Human
gggccgagagcacucguc

SEQ ID NO: 81612 - RNA, 21 nt, Human
gggccugggggagagggaugg

SEQ ID NO: 81613 - RNA, 22 nt, Human
ggggccugggggagagggaugg

SEQ ID NO: 81614 - RNA, 19 nt, Human
ggggguagggcacggggaa

SEQ ID NO: 81615 - RNA, 18 nt, Human
gggguagggcacggggaa

SEQ ID NO: 81616 - RNA, 26 nt, Human
gggguccgguuucuuuucugcacucg

SEQ ID NO: 81617 - RNA, 26 nt, Human
gggguccgguuucuuuucugcacucg

SEQ ID NO: 81618 - RNA, 21 nt, Human
gguggcuccugggggacaugc

SEQ ID NO: 81619 - RNA, 21 nt, Human
guagggcacggggaagggucc

SEQ ID NO: 81620 - RNA, 21 nt, Human
guagggcacggggaagggucc

SEQ ID NO: 81621 - RNA, 19 nt, Human
guccucaggggugggccug

SEQ ID NO: 81622 - RNA, 19 nt, Human
gugaguccacugcgcaccu

SEQ ID NO: 81623 - RNA, 19 nt, Human
gugaguccacugcgcaccu

SEQ ID NO: 81624 - RNA, 21 nt, Human
guuccgcccacccccacuauc

SEQ ID NO: 81625 - RNA, 21 nt, Human
uacaaugaaaauaaugccccc

SEQ ID NO: 81626 - RNA, 20 nt, Human
uagcugcccaggguguugag

SEQ ID NO: 81627 - RNA, 21 nt, Human
uaggcgaccaagggcagcagg

SEQ ID NO: 81628 - RNA, 23 nt, Human
ucaggaugaucuucuccccgggu

SEQ ID NO: 81629 - RNA, 20 nt, Human
ucauaggucucccccaggga

SEQ ID NO: 81630 - RNA, 20 nt, Human
uccccaaggcucagggaccu

SEQ ID NO: 81631 - RNA, 18 nt, Human
uccccaucggcuccccac

SEQ ID NO: 81632 - RNA, 19 nt, Human
ucccccagggacuccaccu

SEQ ID NO: 81633 - RNA, 22 nt, Human
ucccuggccaguguugggcccu

SEQ ID NO: 81634 - RNA, 24 nt, Human
uccgccacaagcagcugcggggac

SEQ ID NO: 81635 - RNA, 19 nt, Human
uccuccaagagggagugag

SEQ ID NO: 81636 - RNA, 18 nt, Human
uccugaggcuccaucuuc

SEQ ID NO: 81637 - RNA, 20 nt, Human
uccuugggccagcccgggcu

SEQ ID NO: 81638 - RNA, 20 nt, Human
uccuugggccagcccgggcu

SEQ ID NO: 81639 - RNA, 21 nt, Human
uccuugggccagcccgggcug

SEQ ID NO: 81640 - RNA, 21 nt, Human
uccuugggccagcccgggcug

SEQ ID NO: 81641 - RNA, 21 nt, Human
uccuuuggccaaugggagguu

SEQ ID NO: 81642 - RNA, 20 nt, Human
ucggccuagugagcuggagc

SEQ ID NO: 81643 - RNA, 21 nt, Human
ucucauagccacaguagcgcc

SEQ ID NO: 81644 - RNA, 24 nt, Human
ucuccccgggugugacagagauug

SEQ ID NO: 81645 - RNA, 22 nt, Human
ucucuccacaggcugggcacuu

SEQ ID NO: 81646 - RNA, 21 nt, Human
ucucugcaaaugaacaggcca

SEQ ID NO: 81647 - RNA, 19 nt, Human
ucugcggggagccccugcc

SEQ ID NO: 81648 - RNA, 20 nt, Human
ucuugaugucaucaggcuuc

SEQ ID NO: 81649 - RNA, 18 nt, Human
ugagcagaguagccauug

SEQ ID NO: 81650 - RNA, 18 nt, Human
ugaugacuucgaaauguu

SEQ ID NO: 81651 - RNA, 23 nt, Human
ugcaguaaggagaagauggggag

SEQ ID NO: 81652 - RNA, 24 nt, Human
ugccugugcugucuugcagggucu

SEQ ID NO: 81653 - RNA, 22 nt, Human
ugcgccacacgcagugcaugug

SEQ ID NO: 81654 - RNA, 21 nt, Human
ugcggaauucaacccagaggc

SEQ ID NO: 81655 - RNA, 20 nt, Human
ugcggggacaaggaaggugg

SEQ ID NO: 81656 - RNA, 21 nt, Human
ugcugagccguguccuuuggc

SEQ ID NO: 81657 - RNA, 22 nt, Human
ugcugcggaauucaacccagag

SEQ ID NO: 81658 - RNA, 23 nt, Human
uggacagucucaccaggccauug

SEQ ID NO: 81659 - RNA, 22 nt, Human
uggaggugggggguuggugggc

SEQ ID NO: 81660 - RNA, 22 nt, Human
uggaggugggggguuggugggc

SEQ ID NO: 81661 - RNA, 18 nt, Human
uggcagaguggagguggg

SEQ ID NO: 81662 - RNA, 18 nt, Human
uggcagaguggagguggg

SEQ ID NO: 81663 - RNA, 25 nt, Human
uggccaguguugggcccucggaggg

SEQ ID NO: 81664 - RNA, 22 nt, Human
uggccucuuuucugagaagaag

SEQ ID NO: 81665 - RNA, 20 nt, Human
ugggaggggguagggcacgg

SEQ ID NO: 81666 - RNA, 20 nt, Human
ugggaggggguagggcacgg

SEQ ID NO: 81667 - RNA, 24 nt, Human
uggggagaagagagcaccaguucu

SEQ ID NO: 81668 - RNA, 24 nt, Human
uggggagaagagagcaccaguucu

SEQ ID NO: 81669 - RNA, 20 nt, Human
uggggccagcucguacccgg

SEQ ID NO: 81670 - RNA, 23 nt, Human
uggggccagcucguacccggggu

SEQ ID NO: 81671 - RNA, 22 nt, Human
uggggggguacuccuugggcca

SEQ ID NO: 81672 - RNA, 22 nt, Human
uggggggguacuccuugggcca

SEQ ID NO: 81673 - RNA, 22 nt, Human
uguagcugcccaggguguugag

SEQ ID NO: 81674 - RNA, 24 nt, Human
ugucacagacaccaucaaaauggg

SEQ ID NO: 81675 - RNA, 24 nt, Human
ugucacagacaccaucaaaauggg

SEQ ID NO: 81676 - RNA, 22 nt, Human
ugucccccuugcugagccgugu

SEQ ID NO: 81677 - RNA, 22 nt, Human
ugugccccaggaaacuguggug

SEQ ID NO: 81678 - RNA, 18 nt, Human
uguuucuccauccccucc

SEQ ID NO: 81679 - RNA, 21 nt, Human
uucuccauccccuccccaucg

SEQ ID NO: 81680 - RNA, 20 nt, Human
uugccugugcugucuugcag

SEQ ID NO: 81681 - RNA, 21 nt, Human
uugccugugcugucuugcagg

SEQ ID NO: 81682 - RNA, 21 nt, Human
uuuuacuucacaacaggaaau

SEQ ID NO: 81683 - RNA, 21 nt, Human
uuuuacuucacaacaggaaau

SEQ ID NO: 81684 - RNA, 22 nt, Human
aggcuccgcuggggcaaaggca

SEQ ID NO: 81685 - RNA, 19 nt, Human
caaaggcaccggcgcaaag

SEQ ID NO: 81686 - RNA, 21 nt, Human
ccgcuggggcaaaggcaccgg

SEQ ID NO: 81687 - RNA, 19 nt, Human
ccggccgcgcagucucucu

SEQ ID NO: 81688 - RNA, 21 nt, Human
ccguuccuuuucuuugccucc

SEQ ID NO: 81689 - RNA, 21 nt, Human
cgcaaguuauucucccugcaa

SEQ ID NO: 81690 - RNA, 18 nt, Human
cguccacauggaaaaacu

SEQ ID NO: 81691 - RNA, 25 nt, Human
cguccauugaaagagcguccacaug

SEQ ID NO: 81692 - RNA, 18 nt, Human
cucccugcaaguucaaga

SEQ ID NO: 81693 - RNA, 19 nt, Human
cucccugcaaguucaagaa

SEQ ID NO: 81694 - RNA, 21 nt, Human
ggaguggaggggcgguggggc

SEQ ID NO: 81695 - RNA, 19 nt, Human
gucuaagaagcacgcgggg

SEQ ID NO: 81696 - RNA, 21 nt, Human
uccacauggaaaaacucuggu

SEQ ID NO: 81697 - RNA, 21 nt, Human
uccuuuucuuugccuccuccu

SEQ ID NO: 81698 - RNA, 19 nt, Human
acuccgaaggcgcaaggag

SEQ ID NO: 81699 - RNA, 19 nt, Human
agagcuguaggucgcggcg

SEQ ID NO: 81700 - RNA, 21 nt, Human
agccggcggcggagccgaggg

SEQ ID NO: 81701 - RNA, 23 nt, Human
cacccgcgcagggcgcugcgggc

SEQ ID NO: 81702 - RNA, 18 nt, Human
cagccccacuugcugcgc

SEQ ID NO: 81703 - RNA, 18 nt, Human
ccggcggcggagccgagg

SEQ ID NO: 81704 - RNA, 22 nt, Human
cgagauagcggccagccccacu

SEQ ID NO: 81705 - RNA, 22 nt, Human
cgcggaccucacccgcgcaggg

SEQ ID NO: 81706 - RNA, 20 nt, Human
cggccagccccacuugcugc

SEQ ID NO: 81707 - RNA, 23 nt, Human
cgucuccacuccaacgcugagaa

SEQ ID NO: 81708 - RNA, 24 nt, Human
gagccggcggcggagccgaggguu

SEQ ID NO: 81709 - RNA, 20 nt, Human
ggcguguguggcccgggugu

SEQ ID NO: 81710 - RNA, 23 nt, Human
gggcgccgucuccacuccaacgc

SEQ ID NO: 81711 - RNA, 23 nt, Human
uccccagcagcugcgcggaccuc

SEQ ID NO: 81712 - RNA, 22 nt, Human
ugacaggugggcucuuccccag

SEQ ID NO: 81713 - RNA, 21 nt, Human
ugacccagcgcagccugacag

SEQ ID NO: 81714 - RNA, 25 nt, Human
ugagaaagagcuguaggucgcggcg

SEQ ID NO: 81715 - RNA, 20 nt, Human
uugcugcgcugacccagcgc

SEQ ID NO: 81716 - RNA, 22 nt, Human
aagcugcagcagugcguugcuc

SEQ ID NO: 81717 - RNA, 22 nt, Human
aagcugcagcagugcguugcuc

SEQ ID NO: 81718 - RNA, 22 nt, Human
aagcugcagcagugcguugcuc

SEQ ID NO: 81719 - RNA, 24 nt, Human
accaccaccacacuccuucccccg

SEQ ID NO: 81720 - RNA, 18 nt, Human
acucagccggagcagcag

SEQ ID NO: 81721 - RNA, 18 nt, Human
agcuuccgggccgggcuc

SEQ ID NO: 81722 - RNA, 20 nt, Human
aggcucagggaagcugcagc

SEQ ID NO: 81723 - RNA, 21 nt, Human
agucgagaaaacggugaacag

SEQ ID NO: 81724 - RNA, 18 nt, Human
auuuuuuccauuuuuuuu

SEQ ID NO: 81725 - RNA, 20 nt, Human
caccacacuccuucccccgc

SEQ ID NO: 81726 - RNA, 19 nt, Human
cagcuuucggccugcgcuc

SEQ ID NO: 81727 - RNA, 18 nt, Human
ccccggcggccccucccu

SEQ ID NO: 81728 - RNA, 26 nt, Human
cccucagcucggaugccacacucacc

SEQ ID NO: 81729 - RNA, 21 nt, Human
ccggagcagcagcggcgucuc

SEQ ID NO: 81730 - RNA, 19 nt, Human
ccuccucuuucccucccuc

SEQ ID NO: 81731 - RNA, 19 nt, Human
ccucgcuuucuuucuuucc

SEQ ID NO: 81732 - RNA, 21 nt, Human
ccuucccccgccacuuccuuc

SEQ ID NO: 81733 - RNA, 18 nt, Human
ccuuccuccuccucuucc

SEQ ID NO: 81734 - RNA, 23 nt, Human
ccuucucgcaucuuccuuccucc

SEQ ID NO: 81735 - RNA, 18 nt, Human
cgggcucgccagcagcag

SEQ ID NO: 81736 - RNA, 23 nt, Human
cugcgucugcgucucucucgccu

SEQ ID NO: 81737 - RNA, 22 nt, Human
gagcagcagcggcgucucaggc

SEQ ID NO: 81738 - RNA, 24 nt, Human
gcagcagcggcgucucaggcucgc

SEQ ID NO: 81739 - RNA, 19 nt, Human
gcgucucucucgccucggc

SEQ ID NO: 81740 - RNA, 22 nt, Human
ggccggggacuguggcgcugca

SEQ ID NO: 81741 - RNA, 18 nt, Human
ggcucagggaagcugcag

SEQ ID NO: 81742 - RNA, 18 nt, Human
ggcucagggaagcugcag

SEQ ID NO: 81743 - RNA, 20 nt, Human
gggccggggacuguggcgcu

SEQ ID NO: 81744 - RNA, 20 nt, Human
gggcucgccagcagcagcuc

SEQ ID NO: 81745 - RNA, 19 nt, Human
ggugaguggaugggaacgu

SEQ ID NO: 81746 - RNA, 23 nt, Human
gguguauguggugugugugugug

SEQ ID NO: 81747 - RNA, 19 nt, Human
gguguguguguguggugug

SEQ ID NO: 81748 - RNA, 20 nt, Human
gguguguguguguggugugu

SEQ ID NO: 81749 - RNA, 22 nt, Human
guggcgcugcaggcucgagaua

SEQ ID NO: 81750 - RNA, 19 nt, Human
guguauguggugugugugu

SEQ ID NO: 81751 - RNA, 21 nt, Human
guguguauaucugucuauccu

SEQ ID NO: 81752 - RNA, 20 nt, Human
guguguguguguggugugua

SEQ ID NO: 81753 - RNA, 22 nt, Human
uaaauaaaaguccagcuauaag

SEQ ID NO: 81754 - RNA, 18 nt, Human
uauggucaaaacauuugc

SEQ ID NO: 81755 - RNA, 20 nt, Human
uauggucaaaacauuugcac

SEQ ID NO: 81756 - RNA, 26 nt, Human
uauuuuuuucuuuuaauacguaguua

SEQ ID NO: 81757 - RNA, 18 nt, Human
uccccggagucgagaaaa

SEQ ID NO: 81758 - RNA, 18 nt, Human
uccccggcggccccuccc

SEQ ID NO: 81759 - RNA, 20 nt, Human
uccccggcggccccucccuc

SEQ ID NO: 81760 - RNA, 21 nt, Human
ucccuccuccucugccuucuc

SEQ ID NO: 81761 - RNA, 20 nt, Human
uccuccucugccuucucgca

SEQ ID NO: 81762 - RNA, 20 nt, Human
ucugccuucucgcaucuucc

SEQ ID NO: 81763 - RNA, 22 nt, Human
ugaacagcuuucggccugcgcu

SEQ ID NO: 81764 - RNA, 19 nt, Human
ugcagugaaccugggcgag

SEQ ID NO: 81765 - RNA, 18 nt, Human
uggacgggaaucccaucg

SEQ ID NO: 81766 - RNA, 20 nt, Human
uggcuccuagcuuccgggcc

SEQ ID NO: 81767 - RNA, 21 nt, Human
ugggugaguggaugggaacgu

SEQ ID NO: 81768 - RNA, 21 nt, Human
ugguguauguggugugugugu

SEQ ID NO: 81769 - RNA, 20 nt, Human
uguauguggugugugugugu

SEQ ID NO: 81770 - RNA, 19 nt, Human
ugucuauccucaaggacug

SEQ ID NO: 81771 - RNA, 26 nt, Human
ugugguguauguggugugugugugug

SEQ ID NO: 81772 - RNA, 22 nt, Human
ugugguguguguguguggugug

SEQ ID NO: 81773 - RNA, 20 nt, Human
ugugugguguguauaucugu

SEQ ID NO: 81774 - RNA, 19 nt, Human
ugugugugugguguguaua

SEQ ID NO: 81775 - RNA, 19 nt, Human
uuccccggcggccccuccc

SEQ ID NO: 81776 - RNA, 21 nt, Human
uugaacaaacuugcuggaaag

SEQ ID NO: 81777 - RNA, 21 nt, Human
uugaacaaacuugcuggaaag

SEQ ID NO: 81778 - RNA, 21 nt, Human
uugaacaaacuugcuggaaag

SEQ ID NO: 81779 - RNA, 21 nt, Human
uuuccuuccuccuccucuucc

SEQ ID NO: 81780 - RNA, 26 nt, Human
uuuuuuccauuuuuuuuuuuuuuuuu

SEQ ID NO: 81781 - RNA, 27 nt, Human
aaaaaaaaaaaaccuaagguucuagga

SEQ ID NO: 81782 - RNA, 25 nt, Human
aaaaaaccuaagguucuaggaggua

SEQ ID NO: 81783 - RNA, 23 nt, Human
aaucacagaucuaugcugaucug

SEQ ID NO: 81784 - RNA, 23 nt, Human
aucccuuucuccuucuuacuguu

SEQ ID NO: 81785 - RNA, 23 nt, Human
augacagugacauuucugagcac

SEQ ID NO: 81786 - RNA, 22 nt, Human
caaaacaaauccugauuucuga

SEQ ID NO: 81787 - RNA, 23 nt, Human
cacagaucuaugcugaucugcac

SEQ ID NO: 81788 - RNA, 24 nt, Human
cagccauaaaccuuaauacagauc

SEQ ID NO: 81789 - RNA, 23 nt, Human
cucuuaaaaaaaaaaaaaccuaa

SEQ ID NO: 81790 - RNA, 24 nt, Human
cuuaaaaaaaaaaaaaccuaaggu

SEQ ID NO: 81791 - RNA, 20 nt, Human
cuuccuguaaguccauucaa

SEQ ID NO: 81792 - RNA, 20 nt, Human
cuuuccaaaacaaauccuga

SEQ ID NO: 81793 - RNA, 27 nt, Human
cuuuuuauugcagccauaaaccuuaau

SEQ ID NO: 81794 - RNA, 21 nt, Human
guccucuuaaaaaaaaaaaaa

SEQ ID NO: 81795 - RNA, 19 nt, Human
uaguccuucuuguccucuu

SEQ ID NO: 81796 - RNA, 24 nt, Human
ucaacccuugagcucuuuccaaaa

SEQ ID NO: 81797 - RNA, 20 nt, Human
ucagauuuccaauuauccac

SEQ ID NO: 81798 - RNA, 21 nt, Human
ucccugaauuuacuugaaauc

SEQ ID NO: 81799 - RNA, 23 nt, Human
ucccuuucuccuucuuacuguua

SEQ ID NO: 81800 - RNA, 20 nt, Human
uccucuuaaaaaaaaaaaaa

SEQ ID NO: 81801 - RNA, 19 nt, Human
ucuaugcugaucugcaccu

SEQ ID NO: 81802 - RNA, 21 nt, Human
ucugagcacaacauccucacc

SEQ ID NO: 81803 - RNA, 22 nt, Human
ucuucacuugcuuuugaguucu

SEQ ID NO: 81804 - RNA, 30 nt, Human
ucuuuuuguuauuaucaauauuauuuaauu

SEQ ID NO: 81805 - RNA, 21 nt, Human
ugaaauccuuccuguaagucc

SEQ ID NO: 81806 - RNA, 21 nt, Human
ugacagugacauuucugagca

SEQ ID NO: 81807 - RNA, 19 nt, Human
ugagcacaacauccucacc

SEQ ID NO: 81808 - RNA, 20 nt, Human
ugagcacaacauccucaccg

SEQ ID NO: 81809 - RNA, 24 nt, Human
ugagcucuuuccaaaacaaauccu

SEQ ID NO: 81810 - RNA, 26 nt, Human
ugaucagaugaccuaugcuguaauga

SEQ ID NO: 81811 - RNA, 20 nt, Human
ugcugaucugcaccuuggug

SEQ ID NO: 81812 - RNA, 18 nt, Human
uggaauaugucaagagua

SEQ ID NO: 81813 - RNA, 23 nt, Human
uguuaagaguuuuugcugcauug

SEQ ID NO: 81814 - RNA, 22 nt, Human
uucaaucccuuucuccuucuua

SEQ ID NO: 81815 - RNA, 23 nt, Human
uucaaucccuuucuccuucuuac

SEQ ID NO: 81816 - RNA, 19 nt, Human
uucccugaauuuacuugaa

SEQ ID NO: 81817 - RNA, 22 nt, Human
uugaguucuucucaacccuuga

SEQ ID NO: 81818 - RNA, 23 nt, Human
uugguguuggaauauauaucugu

SEQ ID NO: 81819 - RNA, 25 nt, Human
uuguccucuuaaaaaaaaaaaaacc

SEQ ID NO: 81820 - RNA, 24 nt, Human
uuuugaguucuucucaacccuuga

SEQ ID NO: 81821 - RNA, 19 nt, Human
uuuuuuuucuguuugucug

SEQ ID NO: 81822 - RNA, 18 nt, Human
aaacaaaccccccccccc

SEQ ID NO: 81823 - RNA, 23 nt, Human
aaacaaacccccccccccaaaag

SEQ ID NO: 81824 - RNA, 27 nt, Human
aaacaaacccccccccccaaaagcccg

SEQ ID NO: 81825 - RNA, 26 nt, Human
aaacagauauaaaauagacaauaaau

SEQ ID NO: 81826 - RNA, 28 nt, Human
aaagcccggccccccccccaacgccacu

SEQ ID NO: 81827 - RNA, 24 nt, Human
aacaaacccccccccccaaaagcc

SEQ ID NO: 81828 - RNA, 20 nt, Human
aacagcaaugacugagacaa

SEQ ID NO: 81829 - RNA, 22 nt, Human
aacccccccccccaaaagcccg

SEQ ID NO: 81830 - RNA, 26 nt, Human
aagcccggccccccccccaacgccac

SEQ ID NO: 81831 - RNA, 25 nt, Human
acaccacgacaccccccaaacaaac

SEQ ID NO: 81832 - RNA, 18 nt, Human
acaccccccaaacaaacc

SEQ ID NO: 81833 - RNA, 19 nt, Human
acaccccccaaacaaaccc

SEQ ID NO: 81834 - RNA, 18 nt, Human
auguuucugcaguuacca

SEQ ID NO: 81835 - RNA, 19 nt, Human
caaacaaaccccccccccc

SEQ ID NO: 81836 - RNA, 19 nt, Human
caaacaaaccccccccccc

SEQ ID NO: 81837 - RNA, 18 nt, Human
caaacccccccccccaaa

SEQ ID NO: 81838 - RNA, 20 nt, Human
caaacccccccccccaaaag

SEQ ID NO: 81839 - RNA, 26 nt, Human
caaacccccccccccaaaagcccggc

SEQ ID NO: 81840 - RNA, 20 nt, Human
caacaaaacuccagcacgaa

SEQ ID NO: 81841 - RNA, 22 nt, Human
caacaaaacuccagcacgaaca

SEQ ID NO: 81842 - RNA, 20 nt, Human
caacagcaaugacugagaca

SEQ ID NO: 81843 - RNA, 21 nt, Human
caacagcaaugacugagacaa

SEQ ID NO: 81844 - RNA, 24 nt, Human
caagggcgccccguggagcccuuc

SEQ ID NO: 81845 - RNA, 21 nt, Human
cacaccacgacaccccccaaa

SEQ ID NO: 81846 - RNA, 21 nt, Human
caccuccaacugugcuuccgu

SEQ ID NO: 81847 - RNA, 25 nt, Human
cacgacaccccccaaacaaaccccc

SEQ ID NO: 81848 - RNA, 23 nt, Human
cagaggcguuccccccacuuccc

SEQ ID NO: 81849 - RNA, 21 nt, Human
cagcaaauggaggauugaggu

SEQ ID NO: 81850 - RNA, 22 nt, Human
cagcacgaacauacaacagcaa

SEQ ID NO: 81851 - RNA, 20 nt, Human
caguccuuaucucucauggu

SEQ ID NO: 81852 - RNA, 21 nt, Human
cagucuacuuuugguacuagc

SEQ ID NO: 81853 - RNA, 21 nt, Human
cauacaacagcaaugacugag

SEQ ID NO: 81854 - RNA, 18 nt, Human
caugauugugaaaaagac

SEQ ID NO: 81855 - RNA, 19 nt, Human
ccaacgccacagcaaaaca

SEQ ID NO: 81856 - RNA, 22 nt, Human
ccacaccacgacaccccccaaa

SEQ ID NO: 81857 - RNA, 24 nt, Human
ccacaccacgacaccccccaaaca

SEQ ID NO: 81858 - RNA, 20 nt, Human
cccaaaagcccggccccccc

SEQ ID NO: 81859 - RNA, 25 nt, Human
cccaaacaaacccccccccccaaaa

SEQ ID NO: 81860 - RNA, 22 nt, Human
cccacaccacgacaccccccaa

SEQ ID NO: 81861 - RNA, 23 nt, Human
cccacaccacgacaccccccaaa

SEQ ID NO: 81862 - RNA, 21 nt, Human
ccccaaaagcccggccccccc

SEQ ID NO: 81863 - RNA, 23 nt, Human
ccccaaaagcccggccccccccc

SEQ ID NO: 81864 - RNA, 20 nt, Human
ccccaaacaaaccccccccc

SEQ ID NO: 81865 - RNA, 23 nt, Human
ccccaaacaaaccccccccccca

SEQ ID NO: 81866 - RNA, 24 nt, Human
ccccaaacaaacccccccccccaa

SEQ ID NO: 81867 - RNA, 21 nt, Human
ccccaacgccacagcaaaaca

SEQ ID NO: 81868 - RNA, 19 nt, Human
cccccaaaagcccggcccc

SEQ ID NO: 81869 - RNA, 25 nt, Human
cccccaaaagcccggcccccccccc

SEQ ID NO: 81870 - RNA, 24 nt, Human
ccccccaaaagcccggcccccccc

SEQ ID NO: 81871 - RNA, 18 nt, Human
ccccccaaacaaaccccc

SEQ ID NO: 81872 - RNA, 23 nt, Human
ccccccaaacaaacccccccccc

SEQ ID NO: 81873 - RNA, 24 nt, Human
cccccccccccaaaagcccggccc

SEQ ID NO: 81874 - RNA, 20 nt, Human
cccgcccacaccacgacacc

SEQ ID NO: 81875 - RNA, 20 nt, Human
cccgcccggccgggcugccc

SEQ ID NO: 81876 - RNA, 18 nt, Human
ccgcccggccgggcugcc

SEQ ID NO: 81877 - RNA, 22 nt, Human
ccuguggacuucugggaaugaa

SEQ ID NO: 81878 - RNA, 24 nt, Human
cgacaccccccaaacaaacccccc

SEQ ID NO: 81879 - RNA, 25 nt, Human
cgcccacaccacgacaccccccaaa

SEQ ID NO: 81880 - RNA, 19 nt, Human
cgcgaggcguggagcggcg

SEQ ID NO: 81881 - RNA, 18 nt, Human
cggcgggcucgcuucccc

SEQ ID NO: 81882 - RNA, 23 nt, Human
cuacagaccaacaacuacucacg

SEQ ID NO: 81883 - RNA, 24 nt, Human
cuagagccggcaguccagaaguua

SEQ ID NO: 81884 - RNA, 19 nt, Human
cugcccccgcggaucccgc

SEQ ID NO: 81885 - RNA, 27 nt, Human
cuucacgguuauguuucugcaguuacc

SEQ ID NO: 81886 - RNA, 23 nt, Human
cuuccguguuuuuuuaaggcaga

SEQ ID NO: 81887 - RNA, 21 nt, Human
gaacagaggcguuccccccac

SEQ ID NO: 81888 - RNA, 23 nt, Human
gaccuuaugcuacagacauccaa

SEQ ID NO: 81889 - RNA, 20 nt, Human
gagcggcggagcgaggccgg

SEQ ID NO: 81890 - RNA, 20 nt, Human
gcagagaaccacuuuacuga

SEQ ID NO: 81891 - RNA, 18 nt, Human
gccccccccccaacgcca

SEQ ID NO: 81892 - RNA, 20 nt, Human
gcccgcccacaccacgacac

SEQ ID NO: 81893 - RNA, 21 nt, Human
ggcccuuggcgugagcagucc

SEQ ID NO: 81894 - RNA, 20 nt, Human
ggguuuuugggggaggaggg

SEQ ID NO: 81895 - RNA, 18 nt, Human
gucaaagaaccguucugg

SEQ ID NO: 81896 - RNA, 19 nt, Human
guccccagcaucugguuuc

SEQ ID NO: 81897 - RNA, 22 nt, Human
guggagcccuggcuguggccug

SEQ ID NO: 81898 - RNA, 23 nt, Human
uacaacagcaaugacugagacaa

SEQ ID NO: 81899 - RNA, 24 nt, Human
uacaacagcaaugacugagacaag

SEQ ID NO: 81900 - RNA, 20 nt, Human
uacauuuaacuccuuugaga

SEQ ID NO: 81901 - RNA, 20 nt, Human
uccuguggacuucugggaau

SEQ ID NO: 81902 - RNA, 19 nt, Human
ucggcgggcucgcuucccc

SEQ ID NO: 81903 - RNA, 23 nt, Human
ucguccggggcgcccccaguugc

SEQ ID NO: 81904 - RNA, 22 nt, Human
ucucauggucguccggggcgcc

SEQ ID NO: 81905 - RNA, 22 nt, Human
ugaaaagguacuagagccggca

SEQ ID NO: 81906 - RNA, 20 nt, Human
ugagcaguccccgccaccuc

SEQ ID NO: 81907 - RNA, 20 nt, Human
uggagcccuggcuguggccu

SEQ ID NO: 81908 - RNA, 21 nt, Human
uggagcccuggcuguggccug

SEQ ID NO: 81909 - RNA, 22 nt, Human
uggccugggcugugcguccugu

SEQ ID NO: 81910 - RNA, 21 nt, Human
ugggcacccucauuuuauuuu

SEQ ID NO: 81911 - RNA, 24 nt, Human
ugguggguuuuugggggaggaggg

SEQ ID NO: 81912 - RNA, 19 nt, Human
ugugcuggucaaagaaccg

SEQ ID NO: 81913 - RNA, 22 nt, Human
uguggcgugguaugcuguauag

SEQ ID NO: 81914 - RNA, 22 nt, Human
uuagaaaauauucuaaaauuua

SEQ ID NO: 81915 - RNA, 23 nt, Human
uucaaagucucaucgucccaccu

SEQ ID NO: 81916 - RNA, 24 nt, Human
uucaaagucucaucgucccaccuc

SEQ ID NO: 81917 - RNA, 20 nt, Human
uucauaaacagcaugcucau

SEQ ID NO: 81918 - RNA, 24 nt, Human
uuggcugaaauaaguguauuuuca

SEQ ID NO: 81919 - RNA, 25 nt, Human
uuucacaccaacaaaacuccagcac

SEQ ID NO: 81920 - RNA, 23 nt, Human
uuugguggguuuuugggggagga

SEQ ID NO: 81921 - RNA, 21 nt, Human
aacuuccgggucaauuuuccu

SEQ ID NO: 81922 - RNA, 21 nt, Human
aaggcgagcaauggaggaucc

SEQ ID NO: 81923 - RNA, 19 nt, Human
agaaaaacuuggccccaaa

SEQ ID NO: 81924 - RNA, 22 nt, Human
agaaaaacuuggccccaaaggg

SEQ ID NO: 81925 - RNA, 22 nt, Human
agcaauggaggauccagaaaaa

SEQ ID NO: 81926 - RNA, 20 nt, Human
aggcggccgucccggccguc

SEQ ID NO: 81927 - RNA, 19 nt, Human
cccaccccuugccacgccc

SEQ ID NO: 81928 - RNA, 19 nt, Human
ccccagguggcagaggggg

SEQ ID NO: 81929 - RNA, 23 nt, Human
ccgggcccgcaccgccccaggug

SEQ ID NO: 81930 - RNA, 22 nt, Human
ccuggcccggccauuuuucuuu

SEQ ID NO: 81931 - RNA, 22 nt, Human
ccuugccacgcccccuuccucc

SEQ ID NO: 81932 - RNA, 20 nt, Human
ccuuuaaaguuggggauagg

SEQ ID NO: 81933 - RNA, 24 nt, Human
cgggcuccgggcccgcaccgcccc

SEQ ID NO: 81934 - RNA, 21 nt, Human
cgggcuccgggcuccgggccc

SEQ ID NO: 81935 - RNA, 19 nt, Human
cuaauacucucacaccuuu

SEQ ID NO: 81936 - RNA, 21 nt, Human
cuagguuuugccugcacagcu

SEQ ID NO: 81937 - RNA, 21 nt, Human
cuucccagccaaugaccuggc

SEQ ID NO: 81938 - RNA, 18 nt, Human
gagcaauggaggauccag

SEQ ID NO: 81939 - RNA, 21 nt, Human
gcuggguggccuggcugguag

SEQ ID NO: 81940 - RNA, 23 nt, Human
gcuggguggccuggcugguaggc

SEQ ID NO: 81941 - RNA, 19 nt, Human
ggcuccgggcuccgggccc

SEQ ID NO: 81942 - RNA, 21 nt, Human
gggcaggcggccgucccggcc

SEQ ID NO: 81943 - RNA, 20 nt, Human
gggcuccgggcuccgggccc

SEQ ID NO: 81944 - RNA, 22 nt, Human
ggguggccuggcugguaggcgc

SEQ ID NO: 81945 - RNA, 21 nt, Human
ucaauuuuccuuucgcacaga

SEQ ID NO: 81946 - RNA, 23 nt, Human
uccagaaaaacuuggccccaaag

SEQ ID NO: 81947 - RNA, 21 nt, Human
ugaaaaacugaucaaaagcca

SEQ ID NO: 81948 - RNA, 22 nt, Human
ugaccuggcccggccauuuuuc

SEQ ID NO: 81949 - RNA, 21 nt, Human
ugccugcacagcuuguaggau

SEQ ID NO: 81950 - RNA, 19 nt, Human
uggccaaggcgagcaaugg

SEQ ID NO: 81951 - RNA, 22 nt, Human
uuaugcguuguuuuuuuuuccu

SEQ ID NO: 81952 - RNA, 24 nt, Human
uuguuuuuuuuuccugcuagguuu

SEQ ID NO: 81953 - RNA, 26 nt, Human
uuucgcacagacaccaaugugcccac

SEQ ID NO: 81954 - RNA, 19 nt, Human
uuuucuuuaugcguuguuu

SEQ ID NO: 81955 - RNA, 21 nt, Human
acagcuccuccagccacuccu

SEQ ID NO: 81956 - RNA, 21 nt, Human
cagcgcaggggcgaugggcga

SEQ ID NO: 81957 - RNA, 23 nt, Human
cagggccuggggacgccccgacg

SEQ ID NO: 81958 - RNA, 23 nt, Human
cauuuaaggguuuucugccucug

SEQ ID NO: 81959 - RNA, 20 nt, Human
ccaauccgucugucgccgcc

SEQ ID NO: 81960 - RNA, 18 nt, Human
ccccgccgcgcgacaccu

SEQ ID NO: 81961 - RNA, 25 nt, Human
ccuccagccacuccugcucugccgg

SEQ ID NO: 81962 - RNA, 22 nt, Human
cgcggccgacccagggccuggg

SEQ ID NO: 81963 - RNA, 20 nt, Human
cucucggccaauccgucugu

SEQ ID NO: 81964 - RNA, 23 nt, Human
cuguugcuccagcgccuccuggg

SEQ ID NO: 81965 - RNA, 18 nt, Human
gacaccuguccuggcucc

SEQ ID NO: 81966 - RNA, 20 nt, Human
gacaggaaguaggcacagag

SEQ ID NO: 81967 - RNA, 23 nt, Human
gauccagaugagaaggguggcug

SEQ ID NO: 81968 - RNA, 18 nt, Human
ggacggagaggaccggga

SEQ ID NO: 81969 - RNA, 18 nt, Human
ggcggcgggcggcggggc

SEQ ID NO: 81970 - RNA, 19 nt, Human
ggcgggcggcgggcggcgg

SEQ ID NO: 81971 - RNA, 24 nt, Human
ggcuguggccgcgguccgagcagc

SEQ ID NO: 81972 - RNA, 19 nt, Human
gggacgccaccgccucgag

SEQ ID NO: 81973 - RNA, 19 nt, Human
gggccccugacacuccugc

SEQ ID NO: 81974 - RNA, 23 nt, Human
gggcggggcgggacgggcgggca

SEQ ID NO: 81975 - RNA, 23 nt, Human
gggcucggcgggcggcgggcggc

SEQ ID NO: 81976 - RNA, 25 nt, Human
uccaaccacagcuccuccagccacu

SEQ ID NO: 81977 - RNA, 18 nt, Human
uccgcggccgacccaggg

SEQ ID NO: 81978 - RNA, 20 nt, Human
uccugcucugccggcgccac

SEQ ID NO: 81979 - RNA, 21 nt, Human
ucggcgggcggcgggcggcgg

SEQ ID NO: 81980 - RNA, 20 nt, Human
ugagaaggguggcugcagua

SEQ ID NO: 81981 - RNA, 27 nt, Human
ugcuccaaccacagcuccuccagccac

SEQ ID NO: 81982 - RNA, 18 nt, Human
ugcuccagcgccuccugg

SEQ ID NO: 81983 - RNA, 18 nt, Human
uggccgcgguccgagcaa

SEQ ID NO: 81984 - RNA, 19 nt, Human
uggcugcaguagggcuggg

SEQ ID NO: 81985 - RNA, 20 nt, Human
uggcugcaguagggcugggc

SEQ ID NO: 81986 - RNA, 19 nt, Human
uugcuccagcgccuccugg

SEQ ID NO: 81987 - RNA, 21 nt, Human
aaaauaagcaguaucccaaac

SEQ ID NO: 81988 - RNA, 21 nt, Human
aaauggcagcagaggaauccc

SEQ ID NO: 81989 - RNA, 25 nt, Human
aagcaugguucauggcaauagaagc

SEQ ID NO: 81990 - RNA, 19 nt, Human
aaggcuuucacagaaagca

SEQ ID NO: 81991 - RNA, 18 nt, Human
acaaaaccaccggccacc

SEQ ID NO: 81992 - RNA, 23 nt, Human
acagaaagcaccguuuuaugaac

SEQ ID NO: 81993 - RNA, 23 nt, Human
acaggcaauucaguacccagagc

SEQ ID NO: 81994 - RNA, 23 nt, Human
accaaguuaacauccuuauucca

SEQ ID NO: 81995 - RNA, 22 nt, Human
agcacaaaaccaccggccacca

SEQ ID NO: 81996 - RNA, 21 nt, Human
aggcaauucaguacccagagc

SEQ ID NO: 81997 - RNA, 24 nt, Human
aggcacuuacauugcuaucaaaug

SEQ ID NO: 81998 - RNA, 20 nt, Human
augcaguucauaaaaaccca

SEQ ID NO: 81999 - RNA, 24 nt, Human
auuuucuccaaacagcuuugaccu

SEQ ID NO: 82000 - RNA, 21 nt, Human
caaacagcuuugaccuaugcu

SEQ ID NO: 82001 - RNA, 26 nt, Human
caagacaguauuaaacugaugcauau

SEQ ID NO: 82002 - RNA, 24 nt, Human
cacacacacaucacuaaggacaca

SEQ ID NO: 82003 - RNA, 22 nt, Human
cacacacaucacuaaggacaca

SEQ ID NO: 82004 - RNA, 20 nt, Human
cacaucacuaaggacacagg

SEQ ID NO: 82005 - RNA, 22 nt, Human
cacauuuaaaauaaagcugucc

SEQ ID NO: 82006 - RNA, 20 nt, Human
cacuaaggacacaggacaaa

SEQ ID NO: 82007 - RNA, 21 nt, Human
cauugcuaucaaaugcaggaa

SEQ ID NO: 82008 - RNA, 18 nt, Human
ccacauuuaaaauaaagc

SEQ ID NO: 82009 - RNA, 22 nt, Human
ccaccggccaccaauaucuucc

SEQ ID NO: 82010 - RNA, 20 nt, Human
ccccagggaacgcauccucc

SEQ ID NO: 82011 - RNA, 18 nt, Human
ccggccaccaauaucuuc

SEQ ID NO: 82012 - RNA, 23 nt, Human
ccuccaagauguggcuagauaaa

SEQ ID NO: 82013 - RNA, 22 nt, Human
cuacuucaccaauuuaaaugac

SEQ ID NO: 82014 - RNA, 19 nt, Human
cucuaauuccacccaugcc

SEQ ID NO: 82015 - RNA, 21 nt, Human
cuuguaaaagaucgcaagcac

SEQ ID NO: 82016 - RNA, 21 nt, Human
cuuuuggccuuggcaucagcu

SEQ ID NO: 82017 - RNA, 19 nt, Human
gaacaugguuauaggcacu

SEQ ID NO: 82018 - RNA, 19 nt, Human
gaauauagaacaugguuau

SEQ ID NO: 82019 - RNA, 19 nt, Human
gauugaagucuugaugcag

SEQ ID NO: 82020 - RNA, 21 nt, Human
gcaguaucccaaacacaucau

SEQ ID NO: 82021 - RNA, 27 nt, Human
gcaugugcauggagacacacacacagu

SEQ ID NO: 82022 - RNA, 26 nt, Human
gcucauuuaucuucuuaaggcuuuca

SEQ ID NO: 82023 - RNA, 21 nt, Human
ggaacgcauccuccagcccuc

SEQ ID NO: 82024 - RNA, 19 nt, Human
uaaaaacaguucuugcagu

SEQ ID NO: 82025 - RNA, 24 nt, Human
uaaaauaagcaguaucccaaacac

SEQ ID NO: 82026 - RNA, 24 nt, Human
uacaaagguagaauacaaacgaac

SEQ ID NO: 82027 - RNA, 22 nt, Human
uacccagagcuugacuggagac

SEQ ID NO: 82028 - RNA, 25 nt, Human
uagaacaugguuauaggcacuuaca

SEQ ID NO: 82029 - RNA, 23 nt, Human
uauaaauaacuucccuuuuaaaa

SEQ ID NO: 82030 - RNA, 19 nt, Human
uauuucuccaucucugcug

SEQ ID NO: 82031 - RNA, 24 nt, Human
uccacccaugccauggguaaaaac

SEQ ID NO: 82032 - RNA, 22 nt, Human
ugacaaaaauaauaaccacaaa

SEQ ID NO: 82033 - RNA, 22 nt, Human
ugagauuggcgaaucuugguca

SEQ ID NO: 82034 - RNA, 24 nt, Human
ugaugcaguucauaaaaacccacu

SEQ ID NO: 82035 - RNA, 21 nt, Human
ugccauggguaaaaacaguuc

SEQ ID NO: 82036 - RNA, 21 nt, Human
ugcuuucuuacgacuccucca

SEQ ID NO: 82037 - RNA, 21 nt, Human
uucaguacccagagcuugacu

SEQ ID NO: 82038 - RNA, 19 nt, Human
uugaaggaaaacaguccaa

SEQ ID NO: 82039 - RNA, 24 nt, Human
uuggcaucagcuuucauguuaaaa

SEQ ID NO: 82040 - RNA, 25 nt, Human
uuuccuguguacugucaccuuuaau

SEQ ID NO: 82041 - RNA, 21 nt, Human
uuucuuacgacuccuccaaga

SEQ ID NO: 82042 - RNA, 20 nt, Human
uuuuaugaacaggcaauuca

SEQ ID NO: 82043 - RNA, 22 nt, Human
aaaggugaggucugaacccacu

SEQ ID NO: 82044 - RNA, 21 nt, Human
acugcccgcgucccgcgaggc

SEQ ID NO: 82045 - RNA, 20 nt, Human
aggcaugaaaugaucuuccu

SEQ ID NO: 82046 - RNA, 21 nt, Human
augaaucagcagaagucugaa

SEQ ID NO: 82047 - RNA, 21 nt, Human
ccccgccgacuccgcgccccg

SEQ ID NO: 82048 - RNA, 19 nt, Human
ccccgcgcgugcgcucccg

SEQ ID NO: 82049 - RNA, 21 nt, Human
cccgcgucccgcgaggccccg

SEQ ID NO: 82050 - RNA, 22 nt, Human
ccgccuacaaacagacacggau

SEQ ID NO: 82051 - RNA, 23 nt, Human
ccgcgcgugcgcucccggcuccc

SEQ ID NO: 82052 - RNA, 25 nt, Human
ccuacaaacagacacggaucaaucu

SEQ ID NO: 82053 - RNA, 19 nt, Human
ccucagcgccgcggucucc

SEQ ID NO: 82054 - RNA, 18 nt, Human
ccugaaaggugaggucug

SEQ ID NO: 82055 - RNA, 22 nt, Human
ccuuuccuuucacaucuaagaa

SEQ ID NO: 82056 - RNA, 19 nt, Human
cgcacugcccgcgucccgc

SEQ ID NO: 82057 - RNA, 19 nt, Human
cgcucccggcucccgcguc

SEQ ID NO: 82058 - RNA, 22 nt, Human
cggcucccgcguccucagcgcc

SEQ ID NO: 82059 - RNA, 21 nt, Human
cugcccacaaacagaagagua

SEQ ID NO: 82060 - RNA, 19 nt, Human
cuuccuuuccuuucacauc

SEQ ID NO: 82061 - RNA, 24 nt, Human
cuuccuuuccuuucacaucuaaga

SEQ ID NO: 82062 - RNA, 19 nt, Human
gaucuuccuuuccuuucac

SEQ ID NO: 82063 - RNA, 18 nt, Human
gcgcucccggcucccgcg

SEQ ID NO: 82064 - RNA, 20 nt, Human
gcucccggcucccgcguccu

SEQ ID NO: 82065 - RNA, 18 nt, Human
guaggcugaacuccaccc

SEQ ID NO: 82066 - RNA, 22 nt, Human
gucauagcucagagccaaaugg

SEQ ID NO: 82067 - RNA, 18 nt, Human
guuuaacuuuuuguuucc

SEQ ID NO: 82068 - RNA, 18 nt, Human
uaucaacaaggcaugaaa

SEQ ID NO: 82069 - RNA, 18 nt, Human
uaucaaggaaguuugcuu

SEQ ID NO: 82070 - RNA, 22 nt, Human
uccucagcgccgcggucuccga

SEQ ID NO: 82071 - RNA, 21 nt, Human
ucugcccacaaacagaagagu

SEQ ID NO: 82072 - RNA, 21 nt, Human
ucuuccuuuccuuucacaucu

SEQ ID NO: 82073 - RNA, 20 nt, Human
ugggagcuucucugucuuug

SEQ ID NO: 82074 - RNA, 21 nt, Human
aaacauuucacagacaguuca

SEQ ID NO: 82075 - RNA, 18 nt, Human
aaagaaaagaaauauggg

SEQ ID NO: 82076 - RNA, 24 nt, Human
aaauggcugaugagaggaccuagc

SEQ ID NO: 82077 - RNA, 21 nt, Human
aauaauuucacuccauaggcu

SEQ ID NO: 82078 - RNA, 21 nt, Human
aauaauuucacuccauaggcu

SEQ ID NO: 82079 - RNA, 23 nt, Human
agaaauaugggaaguagaccggc

SEQ ID NO: 82080 - RNA, 18 nt, Human
agguggaggggcgccacc

SEQ ID NO: 82081 - RNA, 28 nt, Human
auacaguuugaaaggacaaauggcugau

SEQ ID NO: 82082 - RNA, 21 nt, Human
augagaggaccuagcugcaga

SEQ ID NO: 82083 - RNA, 22 nt, Human
augaugcaaaaaauaauuucac

SEQ ID NO: 82084 - RNA, 22 nt, Human
augaugcaaaaaauaauuucac

SEQ ID NO: 82085 - RNA, 24 nt, Human
caguucauuccuauaucuuuagac

SEQ ID NO: 82086 - RNA, 25 nt, Human
cauuucucucccucgcggcuggggg

SEQ ID NO: 82087 - RNA, 21 nt, Human
ccagggugcggagggcgggga

SEQ ID NO: 82088 - RNA, 20 nt, Human
cccugggccagccaagaauc

SEQ ID NO: 82089 - RNA, 20 nt, Human
cccugggccagccaagaauc

SEQ ID NO: 82090 - RNA, 21 nt, Human
ccguggacugauccugcccgu

SEQ ID NO: 82091 - RNA, 23 nt, Human
ccguggacugauccugcccguau

SEQ ID NO: 82092 - RNA, 23 nt, Human
ccuccaaacggaaggcaugucug

SEQ ID NO: 82093 - RNA, 24 nt, Human
cugauccugcccguaucacaauac

SEQ ID NO: 82094 - RNA, 28 nt, Human
cugcccuguuacugccauuauuguugac

SEQ ID NO: 82095 - RNA, 18 nt, Human
cuuuagacaccaugguug

SEQ ID NO: 82096 - RNA, 22 nt, Human
gauaucaaaaaaauauccaggu

SEQ ID NO: 82097 - RNA, 19 nt, Human
gcugcagaaauucccuuca

SEQ ID NO: 82098 - RNA, 20 nt, Human
ggaaggcaugucugugggga

SEQ ID NO: 82099 - RNA, 24 nt, Human
uagggaguuuucacacguuucuug

SEQ ID NO: 82100 - RNA, 18 nt, Human
uaucacaauacaguuuga

SEQ ID NO: 82101 - RNA, 18 nt, Human
ucaguggagaugacccag

SEQ ID NO: 82102 - RNA, 20 nt, Human
ucaguggagaugacccaggu

SEQ ID NO: 82103 - RNA, 22 nt, Human
ucaguggagaugacccaggugg

SEQ ID NO: 82104 - RNA, 29 nt, Human
ucaugccgcugcagaaauucccuucauuu

SEQ ID NO: 82105 - RNA, 19 nt, Human
ucccguggacugauccugc

SEQ ID NO: 82106 - RNA, 19 nt, Human
ucggacggggugccgcggc

SEQ ID NO: 82107 - RNA, 20 nt, Human
ucuuuagacaccaugguugu

SEQ ID NO: 82108 - RNA, 18 nt, Human
ugagaggaccuagcugca

SEQ ID NO: 82109 - RNA, 20 nt, Human
ugagaggaccuagcugcaga

SEQ ID NO: 82110 - RNA, 21 nt, Human
uguagcagugccuccuucugc

SEQ ID NO: 82111 - RNA, 20 nt, Human
uuucacagacaguucauucc

SEQ ID NO: 82112 - RNA, 22 nt, Human
cagcauaaacaaaauuacuaau

SEQ ID NO: 82113 - RNA, 23 nt, Human
cuaaauuacauuaugccuugcua

SEQ ID NO: 82114 - RNA, 18 nt, Human
cuucugcuauaggcugga

SEQ ID NO: 82115 - RNA, 22 nt, Human
cuuuuguuuccugccuuguuca

SEQ ID NO: 82116 - RNA, 25 nt, Human
gacgcgugggucgcccacgcguccg

SEQ ID NO: 82117 - RNA, 21 nt, Human
gcucuaagcaaaaaguuacug

SEQ ID NO: 82118 - RNA, 22 nt, Human
uauaucaggagcagcauaaaca

SEQ ID NO: 82119 - RNA, 19 nt, Human
uauugcagucugaaaaugu

SEQ ID NO: 82120 - RNA, 20 nt, Human
ucugcuauaggcuggaaagu

SEQ ID NO: 82121 - RNA, 23 nt, Human
ugaaaaugcuggccagcaucuau

SEQ ID NO: 82122 - RNA, 19 nt, Human
ugaaaaugugcuucugcua

SEQ ID NO: 82123 - RNA, 26 nt, Human
ugacaaugacaauauaaagaaaagaa

SEQ ID NO: 82124 - RNA, 18 nt, Human
ugaggcaccaucaccgga

SEQ ID NO: 82125 - RNA, 22 nt, Human
uggaaaguguuauaucaggagc

SEQ ID NO: 82126 - RNA, 23 nt, Human
uggaaaguguuauaucaggagca

SEQ ID NO: 82127 - RNA, 25 nt, Human
uuaaaaugaaugaaaaugcuggcca

SEQ ID NO: 82128 - RNA, 20 nt, Human
uuucaguucugcucagucuu

SEQ ID NO: 82129 - RNA, 22 nt, Human
uuuuuuuuuuuuuuuuacuugg

SEQ ID NO: 82130 - RNA, 18 nt, Human
aacccagcaggcaccaag

SEQ ID NO: 82131 - RNA, 21 nt, Human
aacccagcaggcaccaagaga

SEQ ID NO: 82132 - RNA, 20 nt, Human
aagacauaaauacaaaaaua

SEQ ID NO: 82133 - RNA, 21 nt, Human
aaugucuggagcaggcagcag

SEQ ID NO: 82134 - RNA, 24 nt, Human
acacagacccuccccaucuacccu

SEQ ID NO: 82135 - RNA, 20 nt, Human
accagcagaagcugcagucc

SEQ ID NO: 82136 - RNA, 24 nt, Human
aggaagcccugggggaccuggaac

SEQ ID NO: 82137 - RNA, 23 nt, Human
aggaggacggggggagcaccagc

SEQ ID NO: 82138 - RNA, 18 nt, Human
aggcaccaagagaagccg

SEQ ID NO: 82139 - RNA, 23 nt, Human
agugggccccuucugggucucac

SEQ ID NO: 82140 - RNA, 19 nt, Human
caagaacaaaaugucugga

SEQ ID NO: 82141 - RNA, 19 nt, Human
caagagaagccggccccuu

SEQ ID NO: 82142 - RNA, 21 nt, Human
cagaaccaggaacuggcaagc

SEQ ID NO: 82143 - RNA, 18 nt, Human
cagccgugggcacaggcg

SEQ ID NO: 82144 - RNA, 23 nt, Human
cagccuucggucuccgcgccggg

SEQ ID NO: 82145 - RNA, 25 nt, Human
ccagcagcaaggaugugccaucucc

SEQ ID NO: 82146 - RNA, 21 nt, Human
ccccugcaacccagcaggcac

SEQ ID NO: 82147 - RNA, 22 nt, Human
ccccugcaacccagcaggcacc

SEQ ID NO: 82148 - RNA, 21 nt, Human
cccuccccaucuacccuugga

SEQ ID NO: 82149 - RNA, 23 nt, Human
cccugggggaccuggaacaaugg

SEQ ID NO: 82150 - RNA, 24 nt, Human
cccugggggaccuggaacaauggu

SEQ ID NO: 82151 - RNA, 18 nt, Human
ccuauacugccuccagga

SEQ ID NO: 82152 - RNA, 22 nt, Human
ccugcugguucuggccuugugc

SEQ ID NO: 82153 - RNA, 22 nt, Human
ccuucacacagacccuccccau

SEQ ID NO: 82154 - RNA, 26 nt, Human
cugugccauucacagcugcuguggga

SEQ ID NO: 82155 - RNA, 19 nt, Human
cuucacacagacccucccc

SEQ ID NO: 82156 - RNA, 19 nt, Human
cuucugggucucacagauu

SEQ ID NO: 82157 - RNA, 22 nt, Human
gagcaggcagcagccgugggca

SEQ ID NO: 82158 - RNA, 23 nt, Human
gagugggcucagugggccccuuc

SEQ ID NO: 82159 - RNA, 21 nt, Human
gccagccuucggucuccgcgc

SEQ ID NO: 82160 - RNA, 24 nt, Human
gccauucacagcugcugugggagg

SEQ ID NO: 82161 - RNA, 20 nt, Human
gcugcaggaaggucacugug

SEQ ID NO: 82162 - RNA, 18 nt, Human
gcuggagugagugggcuc

SEQ ID NO: 82163 - RNA, 18 nt, Human
ggagcaggcagcagccgu

SEQ ID NO: 82164 - RNA, 19 nt, Human
ggagcaggcagcagccgug

SEQ ID NO: 82165 - RNA, 24 nt, Human
ggaggaagcccugggggaccugga

SEQ ID NO: 82166 - RNA, 19 nt, Human
gggccaaguccccagcagc

SEQ ID NO: 82167 - RNA, 21 nt, Human
gugggcucagugggccccuuc

SEQ ID NO: 82168 - RNA, 22 nt, Human
uaagacauaaauacaaaaauaa

SEQ ID NO: 82169 - RNA, 20 nt, Human
uaagucucagacucaauccu

SEQ ID NO: 82170 - RNA, 20 nt, Human
uagcccaugaauccucacgc

SEQ ID NO: 82171 - RNA, 19 nt, Human
ucacacagacccuccccau

SEQ ID NO: 82172 - RNA, 22 nt, Human
ucacgccaacccuggagguagg

SEQ ID NO: 82173 - RNA, 18 nt, Human
ucaucuauaauagcccau

SEQ ID NO: 82174 - RNA, 20 nt, Human
uccaggaggacggggggagg

SEQ ID NO: 82175 - RNA, 18 nt, Human
ucucacagauucaagaac

SEQ ID NO: 82176 - RNA, 19 nt, Human
ucuccgcgccgggcggaag

SEQ ID NO: 82177 - RNA, 19 nt, Human
ugaauccucacgccaaccc

SEQ ID NO: 82178 - RNA, 18 nt, Human
ugagugccugcugguucu

SEQ ID NO: 82179 - RNA, 26 nt, Human
ugagugccugcugguucuggccuugu

SEQ ID NO: 82180 - RNA, 23 nt, Human
ugccccugcaacccagcaggcac

SEQ ID NO: 82181 - RNA, 22 nt, Human
ugggcucagugggccccuucug

SEQ ID NO: 82182 - RNA, 19 nt, Human
ugucggaugagguauagga

SEQ ID NO: 82183 - RNA, 19 nt, Human
ugucuggagcaggcagcag

SEQ ID NO: 82184 - RNA, 18 nt, Human
uucacagcugcuguggga

SEQ ID NO: 82185 - RNA, 18 nt, Human
uuccugccccugcaaccc

SEQ ID NO: 82186 - RNA, 23 nt, Human
uuucaucuauaauagcccaugaa

SEQ ID NO: 82187 - RNA, 21 nt, Human
aaaaauaauaggaagggcugc

SEQ ID NO: 82188 - RNA, 24 nt, Human
aaauacacaacaaccaucagaacc

SEQ ID NO: 82189 - RNA, 18 nt, Human
aacagaguuugaaguuca

SEQ ID NO: 82190 - RNA, 23 nt, Human
aacccucaacuuuaagaauguuu

SEQ ID NO: 82191 - RNA, 19 nt, Human
acaaccaucagaaccacau

SEQ ID NO: 82192 - RNA, 24 nt, Human
acacaacaaccaucagaaccacau

SEQ ID NO: 82193 - RNA, 20 nt, Human
acagaaauaaucucucuuau

SEQ ID NO: 82194 - RNA, 18 nt, Human
accaaacaccacauaagc

SEQ ID NO: 82195 - RNA, 21 nt, Human
accacauaagcacaaauuaaa

SEQ ID NO: 82196 - RNA, 22 nt, Human
acucgccccaaaugauaugaaa

SEQ ID NO: 82197 - RNA, 24 nt, Human
acugaaaaugcuguuuuggggacc

SEQ ID NO: 82198 - RNA, 18 nt, Human
agaaaaauaauaggaagg

SEQ ID NO: 82199 - RNA, 22 nt, Human
agaccuuuaacacugcaagccu

SEQ ID NO: 82200 - RNA, 19 nt, Human
agggcugaggggagggaca

SEQ ID NO: 82201 - RNA, 21 nt, Human
agugaaagaccucuugggcua

SEQ ID NO: 82202 - RNA, 21 nt, Human
auaggaagggcugccccagug

SEQ ID NO: 82203 - RNA, 19 nt, Human
aucaugcuugcauucauuc

SEQ ID NO: 82204 - RNA, 24 nt, Human
auucaaaaguucauccuaaucuua

SEQ ID NO: 82205 - RNA, 27 nt, Human
caaaaaaagcugaaauaauugguaaca

SEQ ID NO: 82206 - RNA, 30 nt, Human
caaggaacauguuagaggccaacccagcuu

SEQ ID NO: 82207 - RNA, 20 nt, Human
cacaacaaccaucagaacca

SEQ ID NO: 82208 - RNA, 21 nt, Human
cacaacaaccaucagaaccac

SEQ ID NO: 82209 - RNA, 20 nt, Human
cacauuaucuacggcagaau

SEQ ID NO: 82210 - RNA, 19 nt, Human
cacucacaccaaacaccac

SEQ ID NO: 82211 - RNA, 23 nt, Human
cagguccugggcccacugguguc

SEQ ID NO: 82212 - RNA, 20 nt, Human
cagugauuuugacauuuagg

SEQ ID NO: 82213 - RNA, 24 nt, Human
cauaagcacaaauuaaauauuguc

SEQ ID NO: 82214 - RNA, 23 nt, Human
cauuuaaagccacccccaggucc

SEQ ID NO: 82215 - RNA, 21 nt, Human
cauuuaggucaucacuuguuc

SEQ ID NO: 82216 - RNA, 23 nt, Human
ccaaaugauaugaaacagaaaca

SEQ ID NO: 82217 - RNA, 22 nt, Human
cccagggaacauguaaacaaau

SEQ ID NO: 82218 - RNA, 18 nt, Human
cccccagguccugggccc

SEQ ID NO: 82219 - RNA, 20 nt, Human
cccccagguccugggcccac

SEQ ID NO: 82220 - RNA, 22 nt, Human
ccggcgaagugggcggcucccc

SEQ ID NO: 82221 - RNA, 23 nt, Human
ccugaauuaugaaaaaagcuuau

SEQ ID NO: 82222 - RNA, 20 nt, Human
cgaagugggcggcuccccaa

SEQ ID NO: 82223 - RNA, 20 nt, Human
cgacccggcgaagugggcgg

SEQ ID NO: 82224 - RNA, 19 nt, Human
cgaucugcagaccuggauc

SEQ ID NO: 82225 - RNA, 18 nt, Human
cgauggccgcccccgccg

SEQ ID NO: 82226 - RNA, 24 nt, Human
cggcagaauauguacaaauguucc

SEQ ID NO: 82227 - RNA, 24 nt, Human
cucucuuauaacccucaacuuuaa

SEQ ID NO: 82228 - RNA, 20 nt, Human
cucuugggcuaagaaaaaua

SEQ ID NO: 82229 - RNA, 21 nt, Human
cugaaaauacacaacaaccau

SEQ ID NO: 82230 - RNA, 19 nt, Human
cugcacucacaccaaacac

SEQ ID NO: 82231 - RNA, 20 nt, Human
cuggaucugucccagggaac

SEQ ID NO: 82232 - RNA, 18 nt, Human
cuggugcagggcugaggg

SEQ ID NO: 82233 - RNA, 21 nt, Human
gaaaaauaauaggaagggccg

SEQ ID NO: 82234 - RNA, 20 nt, Human
gcgcagcacgauggccgccc

SEQ ID NO: 82235 - RNA, 23 nt, Human
ggacaauuauccacuccaaacac

SEQ ID NO: 82236 - RNA, 23 nt, Human
gggauccagugauacugaaaaua

SEQ ID NO: 82237 - RNA, 21 nt, Human
ggucuggauuucaaacuaauu

SEQ ID NO: 82238 - RNA, 22 nt, Human
ggugcagggcugaggggaggga

SEQ ID NO: 82239 - RNA, 18 nt, Human
guccugggcccacuggug

SEQ ID NO: 82240 - RNA, 18 nt, Human
gucuggauuucaaacuaa

SEQ ID NO: 82241 - RNA, 26 nt, Human
uaaccuuuagaccacagaaauaaucu

SEQ ID NO: 82242 - RNA, 24 nt, Human
uaauugaagaaggaacugaaaaug

SEQ ID NO: 82243 - RNA, 22 nt, Human
uaccauggaaaauguauguaac

SEQ ID NO: 82244 - RNA, 21 nt, Human
ucagaaccacauuaucuacgg

SEQ ID NO: 82245 - RNA, 20 nt, Human
ucagugaaagaccucuuggg

SEQ ID NO: 82246 - RNA, 22 nt, Human
ucagugaaagaccucuugggcu

SEQ ID NO: 82247 - RNA, 18 nt, Human
uccacagagucuucuucc

SEQ ID NO: 82248 - RNA, 21 nt, Human
uccacagagucuucuucccca

SEQ ID NO: 82249 - RNA, 24 nt, Human
uccacagagucuucuuccccagga

SEQ ID NO: 82250 - RNA, 21 nt, Human
uccuaccaaguaaauucaaaa

SEQ ID NO: 82251 - RNA, 20 nt, Human
ucugcagaccuggaucuguc

SEQ ID NO: 82252 - RNA, 20 nt, Human
ucugucccagggaacaugua

SEQ ID NO: 82253 - RNA, 22 nt, Human
ucuuauacguuuauaaaacggu

SEQ ID NO: 82254 - RNA, 19 nt, Human
ugaaaauacacaacaacca

SEQ ID NO: 82255 - RNA, 21 nt, Human
ugaagaaggaacugaaaaugc

SEQ ID NO: 82256 - RNA, 21 nt, Human
ugaauuaugaaaaaagcuuau

SEQ ID NO: 82257 - RNA, 23 nt, Human
ugaauuaugaaaaaagcuuaucu

SEQ ID NO: 82258 - RNA, 21 nt, Human
ugagcagagauccagagguga

SEQ ID NO: 82259 - RNA, 24 nt, Human
ugccugacucgccccaaaugauau

SEQ ID NO: 82260 - RNA, 21 nt, Human
ugcugaauuuuaggagauggu

SEQ ID NO: 82261 - RNA, 23 nt, Human
uggaaaacuauaaagucaaauca

SEQ ID NO: 82262 - RNA, 21 nt, Human
uggugcagggcugaggggagg

SEQ ID NO: 82263 - RNA, 23 nt, Human
uguaucagugaaagaccucuugg

SEQ ID NO: 82264 - RNA, 19 nt, Human
uguauguaacaguguggaa

SEQ ID NO: 82265 - RNA, 19 nt, Human
ugucacacuuauuaaaaca

SEQ ID NO: 82266 - RNA, 18 nt, Human
uguuacagaacaagaauu

SEQ ID NO: 82267 - RNA, 23 nt, Human
uuauuaaaacaaaaaaagcugaa

SEQ ID NO: 82268 - RNA, 24 nt, Human
uuccacaggacugacugaacuucc

SEQ ID NO: 82269 - RNA, 23 nt, Human
uuccccaggacccuucuuaucca

SEQ ID NO: 82270 - RNA, 18 nt, Human
uugcauucauuccacagg

SEQ ID NO: 82271 - RNA, 20 nt, Human
uuuaacacugcaagccucau

SEQ ID NO: 82272 - RNA, 24 nt, Human
uuucaaacuaauugaagaaggaac

SEQ ID NO: 82273 - RNA, 22 nt, Human
uuuucacuuugggaagacugga

SEQ ID NO: 82274 - RNA, 24 nt, Human
agcauugccgacaaaauuauaauc

SEQ ID NO: 82275 - RNA, 22 nt, Human
agcuacugugacaauacaccac

SEQ ID NO: 82276 - RNA, 19 nt, Human
aggcagcaacacaacaagc

SEQ ID NO: 82277 - RNA, 30 nt, Human
caacaguaaacucuguuaggaaauucuaaa

SEQ ID NO: 82278 - RNA, 19 nt, Human
cagcaacacaacaagccga

SEQ ID NO: 82279 - RNA, 18 nt, Human
caggacugcggcagcagc

SEQ ID NO: 82280 - RNA, 22 nt, Human
caguaaacucuguuaggaaauu

SEQ ID NO: 82281 - RNA, 21 nt, Human
gacaaaauuauaaucugcugg

SEQ ID NO: 82282 - RNA, 20 nt, Human
gggaaaaaaaacaacuagac

SEQ ID NO: 82283 - RNA, 23 nt, Human
ggggaaaaaaaacaacuagacaa

SEQ ID NO: 82284 - RNA, 22 nt, Human
guuuuaagagagagaugguagu

SEQ ID NO: 82285 - RNA, 24 nt, Human
uaaaaugccucaacagaguuugaa

SEQ ID NO: 82286 - RNA, 21 nt, Human
uaaaaugucuucaggccaaaa

SEQ ID NO: 82287 - RNA, 22 nt, Human
ucacaggucacacgcauuucca

SEQ ID NO: 82288 - RNA, 21 nt, Human
ucuaaaaugucuucaggccaa

SEQ ID NO: 82289 - RNA, 18 nt, Human
ugcggaaaagaagcccuu

SEQ ID NO: 82290 - RNA, 24 nt, Human
uggcaggacugcggcagcagcagg

SEQ ID NO: 82291 - RNA, 24 nt, Human
uggcauuugcggaaaagaagcccu

SEQ ID NO: 82292 - RNA, 22 nt, Human
uuugucuugggggaaaaaaaac

SEQ ID NO: 82293 - RNA, 18 nt, Human
uuuguugugccuugccuu

SEQ ID NO: 82294 - RNA, 22 nt, Human
aaaaaaacauuuuaguguggcc

SEQ ID NO: 82295 - RNA, 19 nt, Human
aaaacuuacucuauuuuga

SEQ ID NO: 82296 - RNA, 20 nt, Human
aaagguaccauagaaggcug

SEQ ID NO: 82297 - RNA, 25 nt, Human
aaccagccugcaucaccccuugcac

SEQ ID NO: 82298 - RNA, 24 nt, Human
aagaaaauccuuccccuccuccaa

SEQ ID NO: 82299 - RNA, 19 nt, Human
aaggucacuauauacagaa

SEQ ID NO: 82300 - RNA, 18 nt, Human
aaguggcaugaaccagcc

SEQ ID NO: 82301 - RNA, 22 nt, Human
aauccuuccccuccuccaacac

SEQ ID NO: 82302 - RNA, 22 nt, Human
aauugcucugauacaaaaugag

SEQ ID NO: 82303 - RNA, 18 nt, Human
acagacugcauauguagc

SEQ ID NO: 82304 - RNA, 20 nt, Human
acauaugaugugacuuuaac

SEQ ID NO: 82305 - RNA, 18 nt, Human
agaaaauccuuccccucc

SEQ ID NO: 82306 - RNA, 23 nt, Human
agaaauguuaguucauguuaaac

SEQ ID NO: 82307 - RNA, 21 nt, Human
agaauuuuaaacucgccucuu

SEQ ID NO: 82308 - RNA, 22 nt, Human
agacaaauacacaaauaaggcc

SEQ ID NO: 82309 - RNA, 20 nt, Human
aggaggucuggaaaaagcuc

SEQ ID NO: 82310 - RNA, 25 nt, Human
aggcaaaacuuuuucauuuuuugaa

SEQ ID NO: 82311 - RNA, 24 nt, Human
agggcauuaaaucuuauguaauuu

SEQ ID NO: 82312 - RNA, 19 nt, Human
auagaaggcugauagaaua

SEQ ID NO: 82313 - RNA, 21 nt, Human
aucuuucucuuugauuccaug

SEQ ID NO: 82314 - RNA, 21 nt, Human
augaaccagccugcaucaccc

SEQ ID NO: 82315 - RNA, 23 nt, Human
caaaaaaccauucucaaggcuaa

SEQ ID NO: 82316 - RNA, 20 nt, Human
caaugaaggggaguucugaa

SEQ ID NO: 82317 - RNA, 22 nt, Human
cacauaauauucauaauguuag

SEQ ID NO: 82318 - RNA, 22 nt, Human
cacuauauacagaaaaaggcaa

SEQ ID NO: 82319 - RNA, 23 nt, Human
cacuauauacagaaaaaggcaaa

SEQ ID NO: 82320 - RNA, 24 nt, Human
cacuauauacagaaaaaggcaaaa

SEQ ID NO: 82321 - RNA, 20 nt, Human
caugacgugcucuuucagcg

SEQ ID NO: 82322 - RNA, 20 nt, Human
ccacucaagcaaaagaaaac

SEQ ID NO: 82323 - RNA, 19 nt, Human
ccagccugcaucaccccuu

SEQ ID NO: 82324 - RNA, 24 nt, Human
ccauaaaaacaggaaaaugucaug

SEQ ID NO: 82325 - RNA, 23 nt, Human
ccccagaauaucugacaaaaaaa

SEQ ID NO: 82326 - RNA, 19 nt, Human
cccggcacguuacagugca

SEQ ID NO: 82327 - RNA, 23 nt, Human
ccucuugcaauauuucacaagaa

SEQ ID NO: 82328 - RNA, 27 nt, Human
ccucuugcaauauuucacaagaauugg

SEQ ID NO: 82329 - RNA, 20 nt, Human
ccugacaaaaagguaccaua

SEQ ID NO: 82330 - RNA, 22 nt, Human
cggaaaauacacagaaugaaga

SEQ ID NO: 82331 - RNA, 21 nt, Human
cuacguaaaaaaaaaaacauu

SEQ ID NO: 82332 - RNA, 18 nt, Human
cucaagcaaaagaaaacc

SEQ ID NO: 82333 - RNA, 23 nt, Human
cucagaguuuccauaaaaacagg

SEQ ID NO: 82334 - RNA, 18 nt, Human
cugcagcuugaaggcugu

SEQ ID NO: 82335 - RNA, 18 nt, Human
cugcaucaccccuugcac

SEQ ID NO: 82336 - RNA, 21 nt, Human
cugcaucaccccuugcacagu

SEQ ID NO: 82337 - RNA, 22 nt, Human
cuuucagcgagugcaauuuauc

SEQ ID NO: 82338 - RNA, 19 nt, Human
gacaaaaagguaccauaga

SEQ ID NO: 82339 - RNA, 22 nt, Human
gauaaaauaaaaagacaaauac

SEQ ID NO: 82340 - RNA, 23 nt, Human
gauuggucuaaccucccagcugu

SEQ ID NO: 82341 - RNA, 19 nt, Human
gcgagugcaauuuaucauu

SEQ ID NO: 82342 - RNA, 21 nt, Human
ggaaaauacacagaaugaaga

SEQ ID NO: 82343 - RNA, 19 nt, Human
ggucuaaccucccagcugu

SEQ ID NO: 82344 - RNA, 25 nt, Human
gucuuuuugucuuccaucuuuuggu

SEQ ID NO: 82345 - RNA, 22 nt, Human
uaaaaagacaaauacacaaaua

SEQ ID NO: 82346 - RNA, 21 nt, Human
uacaguauaauaggucuaaua

SEQ ID NO: 82347 - RNA, 24 nt, Human
uacuguccacucaagcaaaagaaa

SEQ ID NO: 82348 - RNA, 21 nt, Human
uauacagaaaaaggcaaaacu

SEQ ID NO: 82349 - RNA, 25 nt, Human
uauacagauaaaauaaaaagacaaa

SEQ ID NO: 82350 - RNA, 26 nt, Human
uauacagauaaaauaaaaagacaaau

SEQ ID NO: 82351 - RNA, 27 nt, Human
uaugguagcaaagaaagcuauggcaua

SEQ ID NO: 82352 - RNA, 22 nt, Human
ucaagcaaaagaaaaccucaca

SEQ ID NO: 82353 - RNA, 20 nt, Human
ucaaggaagggccuugguag

SEQ ID NO: 82354 - RNA, 20 nt, Human
ucagauacugcaaagacugc

SEQ ID NO: 82355 - RNA, 21 nt, Human
uccaaaauguuuaugguagca

SEQ ID NO: 82356 - RNA, 20 nt, Human
ucuaacggugaaaaguggca

SEQ ID NO: 82357 - RNA, 21 nt, Human
ucuaacggugaaaaguggcag

SEQ ID NO: 82358 - RNA, 23 nt, Human
ucugacaaaaaaaauuauacaga

SEQ ID NO: 82359 - RNA, 20 nt, Human
ucuuuugguuuacauuuaaa

SEQ ID NO: 82360 - RNA, 21 nt, Human
ugaaagcaauggcagagaaau

SEQ ID NO: 82361 - RNA, 23 nt, Human
ugaaagcaauggcagagaaaugc

SEQ ID NO: 82362 - RNA, 20 nt, Human
ugaaagcaauggcagagaag

SEQ ID NO: 82363 - RNA, 24 nt, Human
ugagcacuuagcaauuugcagccc

SEQ ID NO: 82364 - RNA, 19 nt, Human
ugcaaagacugcguguggg

SEQ ID NO: 82365 - RNA, 21 nt, Human
uggcaugaaccagccugcauc

SEQ ID NO: 82366 - RNA, 18 nt, Human
ugucacauagcagaugca

SEQ ID NO: 82367 - RNA, 19 nt, Human
uuaagggacguguuuuauu

SEQ ID NO: 82368 - RNA, 22 nt, Human
uuacaauccuaauuguccugac

SEQ ID NO: 82369 - RNA, 25 nt, Human
uuauaucuuucucuuugauuccaug

SEQ ID NO: 82370 - RNA, 18 nt, Human
uuccugugaguucucugu

SEQ ID NO: 82371 - RNA, 22 nt, Human
aaauaccuuuaacuucaucucu

SEQ ID NO: 82372 - RNA, 24 nt, Human
aacuuaugaccuucauuaagcccc

SEQ ID NO: 82373 - RNA, 19 nt, Human
aaugaaggaugucucuaaa

SEQ ID NO: 82374 - RNA, 21 nt, Human
acaaaccaaaaugagaaccuc

SEQ ID NO: 82375 - RNA, 26 nt, Human
accuucauuaagccccacuaguuacu

SEQ ID NO: 82376 - RNA, 22 nt, Human
agcagcagcagcagcagcagcc

SEQ ID NO: 82377 - RNA, 21 nt, Human
agccauaguuguuuauuugcu

SEQ ID NO: 82378 - RNA, 21 nt, Human
agccuagcucuggaaaaucgg

SEQ ID NO: 82379 - RNA, 19 nt, Human
aggaacuuuauuuuuaaac

SEQ ID NO: 82380 - RNA, 22 nt, Human
auacaucugcaaaggggccacc

SEQ ID NO: 82381 - RNA, 19 nt, Human
aucucuacuuguugcucuc

SEQ ID NO: 82382 - RNA, 21 nt, Human
cacagccuagcucuggaaaau

SEQ ID NO: 82383 - RNA, 25 nt, Human
cacccauaacacacuccuaugccac

SEQ ID NO: 82384 - RNA, 23 nt, Human
cagcagcagcagcagcagcagca

SEQ ID NO: 82385 - RNA, 23 nt, Human
cagcagcagcagcagcagcagcc

SEQ ID NO: 82386 - RNA, 18 nt, Human
cagcagcagcagcagccg

SEQ ID NO: 82387 - RNA, 19 nt, Human
cagcagcagcagcagccgc

SEQ ID NO: 82388 - RNA, 22 nt, Human
cagcagcagcagccgcuccucc

SEQ ID NO: 82389 - RNA, 24 nt, Human
cagucacuuuauuaucaggaacuu

SEQ ID NO: 82390 - RNA, 22 nt, Human
cauaaggcuaugacauaagcac

SEQ ID NO: 82391 - RNA, 24 nt, Human
cccaaaguucaaaaaauuaaaaca

SEQ ID NO: 82392 - RNA, 18 nt, Human
ccuuguugucauuucugu

SEQ ID NO: 82393 - RNA, 20 nt, Human
cuaaagccuuaucugggcca

SEQ ID NO: 82394 - RNA, 24 nt, Human
cucaucacugccgccggcaucgac

SEQ ID NO: 82395 - RNA, 20 nt, Human
cugcaaaggggccaccagca

SEQ ID NO: 82396 - RNA, 25 nt, Human
cuuacuguuaucccagaagguuuuc

SEQ ID NO: 82397 - RNA, 23 nt, Human
gccaaagagccagcgccuccuag

SEQ ID NO: 82398 - RNA, 23 nt, Human
gcuaugacauaagcacugaggca

SEQ ID NO: 82399 - RNA, 20 nt, Human
gucacuuuauuaucaggaac

SEQ ID NO: 82400 - RNA, 20 nt, Human
uaagccccacuaguuacuag

SEQ ID NO: 82401 - RNA, 18 nt, Human
uaaggcuaugacauaagc

SEQ ID NO: 82402 - RNA, 18 nt, Human
uaguaauaaauacauacg

SEQ ID NO: 82403 - RNA, 24 nt, Human
ucaucucuacuuguugcucuccca

SEQ ID NO: 82404 - RNA, 23 nt, Human
ugacauaagcacugaggcauccu

SEQ ID NO: 82405 - RNA, 19 nt, Human
ugacuuucucaacuaaugg

SEQ ID NO: 82406 - RNA, 19 nt, Human
uggcugaacuucccaggcg

SEQ ID NO: 82407 - RNA, 23 nt, Human
ugucaaaugaaggaugucucuaa

SEQ ID NO: 82408 - RNA, 19 nt, Human
uucaaggacagcaauacau

SEQ ID NO: 82409 - RNA, 25 nt, Human
uucaaggacagcaauacaucugcaa

SEQ ID NO: 82410 - RNA, 26 nt, Human
uucaaggacagcaauacaucugcaaa

SEQ ID NO: 82411 - RNA, 18 nt, Human
uucauuaagccccacuag

SEQ ID NO: 82412 - RNA, 23 nt, Human
uuucucaacuaaugggccucugg

SEQ ID NO: 82413 - RNA, 20 nt, Human
uuuuuuuuuuuuuuuugcca

SEQ ID NO: 82414 - RNA, 18 nt, Human
uuuuuuuuuuuuuuuuug

SEQ ID NO: 82415 - RNA, 24 nt, Human
uuuuuuuuuuuuuuuuugccauuu

SEQ ID NO: 82416 - RNA, 24 nt, Human
aaagugcugagauuauagcuguga

SEQ ID NO: 82417 - RNA, 19 nt, Human
aacacgaucaagccccacc

SEQ ID NO: 82418 - RNA, 25 nt, Human
aagugauccucccaccucagcuucc

SEQ ID NO: 82419 - RNA, 26 nt, Human
aagugcugagauuauagcugugagcc

SEQ ID NO: 82420 - RNA, 25 nt, Human
acacgaaggaaccaccaagacugga

SEQ ID NO: 82421 - RNA, 22 nt, Human
acaggcagcaacacgaucaagc

SEQ ID NO: 82422 - RNA, 22 nt, Human
accgugcccagccugaagcuag

SEQ ID NO: 82423 - RNA, 25 nt, Human
acucuguugcccagguuggagugca

SEQ ID NO: 82424 - RNA, 22 nt, Human
agauuauagcugugagccaccg

SEQ ID NO: 82425 - RNA, 18 nt, Human
agcuggucuugaacuccu

SEQ ID NO: 82426 - RNA, 24 nt, Human
agcuggucuugaacuccugggcuc

SEQ ID NO: 82427 - RNA, 21 nt, Human
agcugugagccaccgugccca

SEQ ID NO: 82428 - RNA, 24 nt, Human
aggcaucauguuaacaggcagcaa

SEQ ID NO: 82429 - RNA, 21 nt, Human
agugcagugaugcaauuacag

SEQ ID NO: 82430 - RNA, 23 nt, Human
agugcagugaugcaauuacagcu

SEQ ID NO: 82431 - RNA, 20 nt, Human
auugggcucaagugauccuc

SEQ ID NO: 82432 - RNA, 24 nt, Human
caaagugcugagauuauagcugug

SEQ ID NO: 82433 - RNA, 21 nt, Human
caagccccacacgaaggaacc

SEQ ID NO: 82434 - RNA, 24 nt, Human
caaggucuuacucuguugcccagg

SEQ ID NO: 82435 - RNA, 27 nt, Human
caagugauccucccaccucagcuuccu

SEQ ID NO: 82436 - RNA, 24 nt, Human
caccucagccucccaaagugcuga

SEQ ID NO: 82437 - RNA, 24 nt, Human
caccucagcuuccugagcaccugg

SEQ ID NO: 82438 - RNA, 22 nt, Human
cacgaaggaaccaccaagacug

SEQ ID NO: 82439 - RNA, 24 nt, Human
cacugcagcuuugaauugggcuca

SEQ ID NO: 82440 - RNA, 19 nt, Human
cagcaacacgaucaagccc

SEQ ID NO: 82441 - RNA, 20 nt, Human
cagcuuccugagcaccuggg

SEQ ID NO: 82442 - RNA, 19 nt, Human
caggcucaggcugauuucc

SEQ ID NO: 82443 - RNA, 19 nt, Human
caggcugauuuccgaacgc

SEQ ID NO: 82444 - RNA, 18 nt, Human
ccaaagugcugagauuau

SEQ ID NO: 82445 - RNA, 23 nt, Human
ccaaagugcugagauuauagcug

SEQ ID NO: 82446 - RNA, 20 nt, Human
cccagguuggagugcaguga

SEQ ID NO: 82447 - RNA, 22 nt, Human
ccggagucucccuauauugcac

SEQ ID NO: 82448 - RNA, 18 nt, Human
ccugaagcuagaggcugu

SEQ ID NO: 82449 - RNA, 22 nt, Human
ccugagcaccugggaccacaga

SEQ ID NO: 82450 - RNA, 19 nt, Human
cgaaggaaccaccaagacu

SEQ ID NO: 82451 - RNA, 24 nt, Human
cucaagugauccucccaccucagc

SEQ ID NO: 82452 - RNA, 24 nt, Human
cucaggcaauucucccaccucagc

SEQ ID NO: 82453 - RNA, 21 nt, Human
cucaggcugauuuccgaacgc

SEQ ID NO: 82454 - RNA, 21 nt, Human
cuccugggcucaggcaauucu

SEQ ID NO: 82455 - RNA, 19 nt, Human
cuggucuugaacuccuggg

SEQ ID NO: 82456 - RNA, 21 nt, Human
cuuacucuguugcccagguug

SEQ ID NO: 82457 - RNA, 25 nt, Human
cuuccugagcaccugggaccacaga

SEQ ID NO: 82458 - RNA, 20 nt, Human
cuugaacuccugggcucagg

SEQ ID NO: 82459 - RNA, 19 nt, Human
gagcaccugggaccacaga

SEQ ID NO: 82460 - RNA, 18 nt, Human
gauuauagcugugagcca

SEQ ID NO: 82461 - RNA, 24 nt, Human
gauuauagcugugagccaccgugc

SEQ ID NO: 82462 - RNA, 22 nt, Human
gcaacacgaucaagccccacac

SEQ ID NO: 82463 - RNA, 23 nt, Human
gcaauucucccaccucagccucc

SEQ ID NO: 82464 - RNA, 18 nt, Human
gcaccugggaccacagau

SEQ ID NO: 82465 - RNA, 18 nt, Human
gcucaagugauccuccca

SEQ ID NO: 82466 - RNA, 21 nt, Human
ggagugaggcccaggauucug

SEQ ID NO: 82467 - RNA, 19 nt, Human
gggagugaggcccaggauu

SEQ ID NO: 82468 - RNA, 22 nt, Human
gggcucaagugauccucccacc

SEQ ID NO: 82469 - RNA, 24 nt, Human
gggguagaaaguuucaaaggcgga

SEQ ID NO: 82470 - RNA, 24 nt, Human
gugauccucccaccucagcuuccu

SEQ ID NO: 82471 - RNA, 19 nt, Human
gugcagugaugcaauuaca

SEQ ID NO: 82472 - RNA, 21 nt, Human
uaacaggcagcaacacgauca

SEQ ID NO: 82473 - RNA, 22 nt, Human
uaagacaaggucuuacucuguu

SEQ ID NO: 82474 - RNA, 18 nt, Human
uagggcucucgggacccg

SEQ ID NO: 82475 - RNA, 24 nt, Human
uauauugcacaagcuggucuugaa

SEQ ID NO: 82476 - RNA, 19 nt, Human
ucaagccccacacgaagga

SEQ ID NO: 82477 - RNA, 20 nt, Human
ucacugcagcuuugaauugg

SEQ ID NO: 82478 - RNA, 21 nt, Human
ucacugcagcuuugaauuggg

SEQ ID NO: 82479 - RNA, 24 nt, Human
ucacugcagcuuugaauugggcuc

SEQ ID NO: 82480 - RNA, 18 nt, Human
ucagccucccaaagugcu

SEQ ID NO: 82481 - RNA, 20 nt, Human
uccacacauguagaucagau

SEQ ID NO: 82482 - RNA, 23 nt, Human
ucccaaagugcugagauuauagc

SEQ ID NO: 82483 - RNA, 19 nt, Human
ucccuauauugcacaagcu

SEQ ID NO: 82484 - RNA, 21 nt, Human
uccugggcucaggcaauucuc

SEQ ID NO: 82485 - RNA, 22 nt, Human
uccugggcucaggcaauucucc

SEQ ID NO: 82486 - RNA, 23 nt, Human
uccugggcucaggcaauucuccc

SEQ ID NO: 82487 - RNA, 26 nt, Human
ucucccaccucagccucccaaagugc

SEQ ID NO: 82488 - RNA, 24 nt, Human
ucuguugcccagguuggagugcag

SEQ ID NO: 82489 - RNA, 23 nt, Human
ucuuacucuguugcccagguugg

SEQ ID NO: 82490 - RNA, 24 nt, Human
ucuuacucuguugcccagguugga

SEQ ID NO: 82491 - RNA, 23 nt, Human
ucuugaacuccugggcucaggca

SEQ ID NO: 82492 - RNA, 20 nt, Human
ugaagcuagaggcuguuuuc

SEQ ID NO: 82493 - RNA, 22 nt, Human
ugagauuauagcugugagccac

SEQ ID NO: 82494 - RNA, 23 nt, Human
ugagauuauagcugugagccacc

SEQ ID NO: 82495 - RNA, 24 nt, Human
ugagauuauagcugugagccaccg

SEQ ID NO: 82496 - RNA, 24 nt, Human
ugaugcaauuacagcucacugcag

SEQ ID NO: 82497 - RNA, 24 nt, Human
ugcacaagcuggucuugaacuccu

SEQ ID NO: 82498 - RNA, 18 nt, Human
ugcagcuuugaauugggc

SEQ ID NO: 82499 - RNA, 18 nt, Human
ugcccagguuggagugca

SEQ ID NO: 82500 - RNA, 24 nt, Human
ugcccagguuggagugcagugaug

SEQ ID NO: 82501 - RNA, 19 nt, Human
uggagugcagugaugcaau

SEQ ID NO: 82502 - RNA, 28 nt, Human
uggagugcagugaugcaauucuagcacg

SEQ ID NO: 82503 - RNA, 24 nt, Human
uggcuaauuuugaaaaacucuuuu

SEQ ID NO: 82504 - RNA, 21 nt, Human
ugggaccacagaugugugcca

SEQ ID NO: 82505 - RNA, 20 nt, Human
ugggagugaggcccaggauu

SEQ ID NO: 82506 - RNA, 24 nt, Human
ugggcucaagugauccucccaccu

SEQ ID NO: 82507 - RNA, 24 nt, Human
uggucuugaacuccugggcucagg

SEQ ID NO: 82508 - RNA, 24 nt, Human
uugcccagguuggagugcagugau

SEQ ID NO: 82509 - RNA, 24 nt, Human
uuugaaaaacucuuuuuuguagag

SEQ ID NO: 82510 - RNA, 21 nt, Human
uuuuuuuuuaagacaaggucu

SEQ ID NO: 82511 - RNA, 22 nt, Human
aaauaucucugcagccuuagcc

SEQ ID NO: 82512 - RNA, 18 nt, Human
agaagcucauaaucccua

SEQ ID NO: 82513 - RNA, 23 nt, Human
aggugcggcugacagcccccggc

SEQ ID NO: 82514 - RNA, 18 nt, Human
augaagcacaaauggaaa

SEQ ID NO: 82515 - RNA, 22 nt, Human
augaagcacaaauggaaauuuc

SEQ ID NO: 82516 - RNA, 23 nt, Human
caaggggcucuugguuaagaucu

SEQ ID NO: 82517 - RNA, 19 nt, Human
cacagcccaucaggaacag

SEQ ID NO: 82518 - RNA, 23 nt, Human
cagcccaucaggaacaggugcgg

SEQ ID NO: 82519 - RNA, 19 nt, Human
cagcccccggcaccccugg

SEQ ID NO: 82520 - RNA, 19 nt, Human
cccccggcaccccuggugc

SEQ ID NO: 82521 - RNA, 19 nt, Human
cccuggggaaaggcagccg

SEQ ID NO: 82522 - RNA, 20 nt, Human
cuccagagcugccaaaaccu

SEQ ID NO: 82523 - RNA, 22 nt, Human
cugacagcccccggcaccccug

SEQ ID NO: 82524 - RNA, 22 nt, Human
gaaaggcagccggugccccaca

SEQ ID NO: 82525 - RNA, 19 nt, Human
gagcugccaaaaccucaag

SEQ ID NO: 82526 - RNA, 21 nt, Human
ucccuggggaaaggcagccgg

SEQ ID NO: 82527 - RNA, 19 nt, Human
ccuuuuguugcuacucucc

SEQ ID NO: 82528 - RNA, 22 nt, Human
cuccugaacucucucacucauu

SEQ ID NO: 82529 - RNA, 20 nt, Human
gagccggggcccgagcggcc

SEQ ID NO: 82530 - RNA, 18 nt, Human
ggguuuuuuuuuuuuuuu

SEQ ID NO: 82531 - RNA, 27 nt, Human
uuuccuuuuguugcuacucuccugaac

SEQ ID NO: 82532 - RNA, 30 nt, Human
uuuuuuuuccaccuuaaaaaaaaagagagu

SEQ ID NO: 82533 - RNA, 19 nt, Human
uuuuuuuuuuuuccaccuu

SEQ ID NO: 82534 - RNA, 24 nt, Human
uuuuuuuuuuuuuuuuuccaccuu

SEQ ID NO: 82535 - RNA, 26 nt, Human
uuuuuuuuuuuuuuuuuuuccaccuu

SEQ ID NO: 82536 - RNA, 23 nt, Human
uuuuuuuuuuuuuuuuuuuucca

SEQ ID NO: 82537 - RNA, 24 nt, Human
uuuuuuuuuuuuuuuuuuuuuccu

SEQ ID NO: 82538 - RNA, 18 nt, Human
aaacagcagaacuuuccu

SEQ ID NO: 82539 - RNA, 18 nt, Human
aaaccuuuccuaguuuca

SEQ ID NO: 82540 - RNA, 18 nt, Human
aaaccuuuccuaguuuca

SEQ ID NO: 82541 - RNA, 18 nt, Human
aaaccuuuccuaguuuca

SEQ ID NO: 82542 - RNA, 18 nt, Human
aaaccuuuccuaguuuca

SEQ ID NO: 82543 - RNA, 24 nt, Human
aaagugcugggauuacaggcguga

SEQ ID NO: 82544 - RNA, 24 nt, Human
aaagugcugggauuacaggcguga

SEQ ID NO: 82545 - RNA, 24 nt, Human
aaagugcugggauuacaggcguga

SEQ ID NO: 82546 - RNA, 24 nt, Human
aaagugcugggauuacaggcguga

SEQ ID NO: 82547 - RNA, 22 nt, Human
aacagggagcaaaggaaaaaaa

SEQ ID NO: 82548 - RNA, 22 nt, Human
aacagggagcaaaggaaaaaaa

SEQ ID NO: 82549 - RNA, 22 nt, Human
aacagggagcaaaggaaaaaaa

SEQ ID NO: 82550 - RNA, 23 nt, Human
aaccgguucuugaaaaucuucug

SEQ ID NO: 82551 - RNA, 23 nt, Human
aaccgguucuugaaaaucuucug

SEQ ID NO: 82552 - RNA, 23 nt, Human
aaccgguucuugaaaaucuucug

SEQ ID NO: 82553 - RNA, 23 nt, Human
aaccgguucuugaaaaucuucug

SEQ ID NO: 82554 - RNA, 22 nt, Human
aagaaaacaagcuagcagaaca

SEQ ID NO: 82555 - RNA, 19 nt, Human
aagcuccuucaccacagaa

SEQ ID NO: 82556 - RNA, 19 nt, Human
aagcuccuucaccacagaa

SEQ ID NO: 82557 - RNA, 19 nt, Human
aaggaaaaaaaucaccuca

SEQ ID NO: 82558 - RNA, 19 nt, Human
aaggaaaaaaaucaccuca

SEQ ID NO: 82559 - RNA, 19 nt, Human
aaggaaaaaaaucaccuca

SEQ ID NO: 82560 - RNA, 21 nt, Human
aagugauucuccugccuuagc

SEQ ID NO: 82561 - RNA, 21 nt, Human
aagugauucuccugccuuagc

SEQ ID NO: 82562 - RNA, 21 nt, Human
aagugauucuccugccuuagc

SEQ ID NO: 82563 - RNA, 21 nt, Human
aagugauucuccugccuuagc

SEQ ID NO: 82564 - RNA, 19 nt, Human
aagugcugggauuacaggc

SEQ ID NO: 82565 - RNA, 19 nt, Human
aagugcugggauuacaggc

SEQ ID NO: 82566 - RNA, 19 nt, Human
aagugcugggauuacaggc

SEQ ID NO: 82567 - RNA, 19 nt, Human
aagugcugggauuacaggc

SEQ ID NO: 82568 - RNA, 19 nt, Human
aagugcugggauuacaggc

SEQ ID NO: 82569 - RNA, 19 nt, Human
aagugcugggauuacaggc

SEQ ID NO: 82570 - RNA, 19 nt, Human
aagugcugggauuacaggc

SEQ ID NO: 82571 - RNA, 19 nt, Human
aagugcugggauuacaggc

SEQ ID NO: 82572 - RNA, 26 nt, Human
aagugcugggauuacaggcgugagcc

SEQ ID NO: 82573 - RNA, 26 nt, Human
aagugcugggauuacaggcgugagcc

SEQ ID NO: 82574 - RNA, 26 nt, Human
aagugcugggauuacaggcgugagcc

SEQ ID NO: 82575 - RNA, 19 nt, Human
aauagggcugauaaauaau

SEQ ID NO: 82576 - RNA, 19 nt, Human
aauagggcugauaaauaau

SEQ ID NO: 82577 - RNA, 19 nt, Human
aauagggcugauaaauaau

SEQ ID NO: 82578 - RNA, 19 nt, Human
aauagggcugauaaauaau

SEQ ID NO: 82579 - RNA, 23 nt, Human
acaagcagcuuuacccagagcag

SEQ ID NO: 82580 - RNA, 18 nt, Human
acaucagcuacuuuggca

SEQ ID NO: 82581 - RNA, 24 nt, Human
accacaucuccucugacuucaaaa

SEQ ID NO: 82582 - RNA, 24 nt, Human
accacaucuccucugacuucaaaa

SEQ ID NO: 82583 - RNA, 18 nt, Human
accacguuggucaggcug

SEQ ID NO: 82584 - RNA, 19 nt, Human
accaucaucuaacagguca

SEQ ID NO: 82585 - RNA, 24 nt, Human
accauguuggccaggcugguuucg

SEQ ID NO: 82586 - RNA, 24 nt, Human
accauguuggccaggcugguuucg

SEQ ID NO: 82587 - RNA, 24 nt, Human
accauguuggccaggcugguuucg

SEQ ID NO: 82588 - RNA, 24 nt, Human
accauguuggccaggcugguuucg

SEQ ID NO: 82589 - RNA, 24 nt, Human
acccaggcuggagugccgugguau

SEQ ID NO: 82590 - RNA, 24 nt, Human
acccaggcuggagugccgugguau

SEQ ID NO: 82591 - RNA, 24 nt, Human
acccaggcuggagugccgugguau

SEQ ID NO: 82592 - RNA, 24 nt, Human
acccauuuuccucccgcaauuccu

SEQ ID NO: 82593 - RNA, 24 nt, Human
acccauuuuccucccgcaauuccu

SEQ ID NO: 82594 - RNA, 24 nt, Human
accugaguagcugggauuacaggu

SEQ ID NO: 82595 - RNA, 24 nt, Human
accugaguagcugggauuacaggu

SEQ ID NO: 82596 - RNA, 24 nt, Human
accugaguagcugggauuacaggu

SEQ ID NO: 82597 - RNA, 24 nt, Human
accugaguagcugggauuacaggu

SEQ ID NO: 82598 - RNA, 23 nt, Human
accugugucaagcugaaaagcac

SEQ ID NO: 82599 - RNA, 20 nt, Human
acggaguuucaccacguugg

SEQ ID NO: 82600 - RNA, 21 nt, Human
acggaguuucaccacguuggu

SEQ ID NO: 82601 - RNA, 24 nt, Human
acggaguuucaccacguuggucag

SEQ ID NO: 82602 - RNA, 20 nt, Human
acuugaugggaaaaaguggu

SEQ ID NO: 82603 - RNA, 19 nt, Human
agaaaauucacaagcagcc

SEQ ID NO: 82604 - RNA, 18 nt, Human
agaaggcuggcucccaug

SEQ ID NO: 82605 - RNA, 18 nt, Human
agaauauucaucuaccuc

SEQ ID NO: 82606 - RNA, 18 nt, Human
agacucauucuuuccuug

SEQ ID NO: 82607 - RNA, 24 nt, Human
agacugaggugauaggaucgcuug

SEQ ID NO: 82608 - RNA, 24 nt, Human
agacuuuaagaaaccuuuccuagu

SEQ ID NO: 82609 - RNA, 24 nt, Human
agacuuuaagaaaccuuuccuagu

SEQ ID NO: 82610 - RNA, 24 nt, Human
agacuuuaagaaaccuuuccuagu

SEQ ID NO: 82611 - RNA, 24 nt, Human
agacuuuaagaaaccuuuccuagu

SEQ ID NO: 82612 - RNA, 18 nt, Human
agaggagcucccagggcc

SEQ ID NO: 82613 - RNA, 22 nt, Human
agaggagcucccagggccugga

SEQ ID NO: 82614 - RNA, 22 nt, Human
agaggagcucccagggccugga

SEQ ID NO: 82615 - RNA, 22 nt, Human
agaggagcucccagggccugga

SEQ ID NO: 82616 - RNA, 22 nt, Human
agaggagcucccagggccugga

SEQ ID NO: 82617 - RNA, 22 nt, Human
agagugagaggagcucccaggg

SEQ ID NO: 82618 - RNA, 22 nt, Human
agagugagaggagcucccaggg

SEQ ID NO: 82619 - RNA, 22 nt, Human
agagugagaggagcucccaggg

SEQ ID NO: 82620 - RNA, 23 nt, Human
agaugauagacaaaaccuagagc

SEQ ID NO: 82621 - RNA, 23 nt, Human
agcaacagggagcaaaggaaaaa

SEQ ID NO: 82622 - RNA, 23 nt, Human
agcaacagggagcaaaggaaaaa

SEQ ID NO: 82623 - RNA, 23 nt, Human
agcaacagggagcaaaggaaaaa

SEQ ID NO: 82624 - RNA, 19 nt, Human
agcacaaaugauuuucaau

SEQ ID NO: 82625 - RNA, 20 nt, Human
agcgauucuccugccucagc

SEQ ID NO: 82626 - RNA, 24 nt, Human
agcgauucuccugccucagccucc

SEQ ID NO: 82627 - RNA, 23 nt, Human
agcucauucuugggguccugugc

SEQ ID NO: 82628 - RNA, 23 nt, Human
aggaaaaaaaucaccucaaagaa

SEQ ID NO: 82629 - RNA, 23 nt, Human
aggaaaaaaaucaccucaaagaa

SEQ ID NO: 82630 - RNA, 23 nt, Human
aggaaaaaaaucaccucaaagaa

SEQ ID NO: 82631 - RNA, 23 nt, Human
aggaaaaaaaucaccucaaagaa

SEQ ID NO: 82632 - RNA, 20 nt, Human
aggaauuagaagacugucuu

SEQ ID NO: 82633 - RNA, 20 nt, Human
aggaauuagaagacugucuu

SEQ ID NO: 82634 - RNA, 20 nt, Human
aggaauuagaagacugucuu

SEQ ID NO: 82635 - RNA, 20 nt, Human
aggaauuagaagacugucuu

SEQ ID NO: 82636 - RNA, 24 nt, Human
agggaaaccagcuauucucuugag

SEQ ID NO: 82637 - RNA, 24 nt, Human
agggaaaccagcuauucucuugag

SEQ ID NO: 82638 - RNA, 24 nt, Human
agggaaaccagcuauucucuugag

SEQ ID NO: 82639 - RNA, 26 nt, Human
aggggacgcucuuguauuaucugugg

SEQ ID NO: 82640 - RNA, 19 nt, Human
agguuucugcugugccuga

SEQ ID NO: 82641 - RNA, 22 nt, Human
aguagagaugggguuucaccau

SEQ ID NO: 82642 - RNA, 18 nt, Human
aguagcugggauuacagg

SEQ ID NO: 82643 - RNA, 18 nt, Human
aguagcugggauuacagg

SEQ ID NO: 82644 - RNA, 18 nt, Human
aguagcugggauuacagg

SEQ ID NO: 82645 - RNA, 18 nt, Human
aguagcugggauuacagg

SEQ ID NO: 82646 - RNA, 21 nt, Human
aguagcugggauuacaggugu

SEQ ID NO: 82647 - RNA, 21 nt, Human
aguagcugggauuacaggugu

SEQ ID NO: 82648 - RNA, 21 nt, Human
aguagcugggauuacaggugu

SEQ ID NO: 82649 - RNA, 23 nt, Human
aguagcugggauuacaggugucc

SEQ ID NO: 82650 - RNA, 23 nt, Human
aguagcugggauuacaggugucc

SEQ ID NO: 82651 - RNA, 25 nt, Human
agucaucagaaccuaacaguucauc

SEQ ID NO: 82652 - RNA, 23 nt, Human
agugaucugcccaccuuggccuc

SEQ ID NO: 82653 - RNA, 23 nt, Human
agugaucugcccaccuuggccuc

SEQ ID NO: 82654 - RNA, 23 nt, Human
agugaucugcccaccuuggccuc

SEQ ID NO: 82655 - RNA, 23 nt, Human
agugaucugcccaccuuggccuc

SEQ ID NO: 82656 - RNA, 20 nt, Human
agugcaauggcgcgaucucg

SEQ ID NO: 82657 - RNA, 24 nt, Human
agugcaauggcgcgaucucggcuc

SEQ ID NO: 82658 - RNA, 18 nt, Human
agugcugggauuacaggc

SEQ ID NO: 82659 - RNA, 18 nt, Human
agugcugggauuacaggc

SEQ ID NO: 82660 - RNA, 20 nt, Human
aguuacauggcuuaaguugg

SEQ ID NO: 82661 - RNA, 18 nt, Human
auaaucaguaccagguac

SEQ ID NO: 82662 - RNA, 18 nt, Human
aucucuucacugcuagaa

SEQ ID NO: 82663 - RNA, 18 nt, Human
augggguuucaccauguu

SEQ ID NO: 82664 - RNA, 18 nt, Human
augggguuucaccauguu

SEQ ID NO: 82665 - RNA, 18 nt, Human
augggguuucaccauguu

SEQ ID NO: 82666 - RNA, 22 nt, Human
augggguuucaccauguuggcc

SEQ ID NO: 82667 - RNA, 22 nt, Human
augggguuucaccauguuggcc

SEQ ID NO: 82668 - RNA, 22 nt, Human
augggguuucaccauguuggcc

SEQ ID NO: 82669 - RNA, 22 nt, Human
augggguuucaccauguuggcc

SEQ ID NO: 82670 - RNA, 23 nt, Human
augggguuucaccauguuggcca

SEQ ID NO: 82671 - RNA, 23 nt, Human
augggguuucaccauguuggcca

SEQ ID NO: 82672 - RNA, 24 nt, Human
augggguuucaccauguuggccag

SEQ ID NO: 82673 - RNA, 24 nt, Human
augggguuucaccauguuggccag

SEQ ID NO: 82674 - RNA, 24 nt, Human
augggguuucaccauguuggccag

SEQ ID NO: 82675 - RNA, 19 nt, Human
augguaucccucugcugag

SEQ ID NO: 82676 - RNA, 23 nt, Human
auucucuugaggccaagccacuc

SEQ ID NO: 82677 - RNA, 23 nt, Human
auucucuugaggccaagccacuc

SEQ ID NO: 82678 - RNA, 23 nt, Human
auucucuugaggccaagccacuc

SEQ ID NO: 82679 - RNA, 23 nt, Human
auucucuugaggccaagccacuc

SEQ ID NO: 82680 - RNA, 24 nt, Human
auuucuguauuuuuaguagagaug

SEQ ID NO: 82681 - RNA, 24 nt, Human
auuucuguauuuuuaguagagaug

SEQ ID NO: 82682 - RNA, 24 nt, Human
auuucuguauuuuuaguagagaug

SEQ ID NO: 82683 - RNA, 24 nt, Human
auuucuguauuuuuaguagagaug

SEQ ID NO: 82684 - RNA, 24 nt, Human
auuuuuguauuuuuaguagagacg

SEQ ID NO: 82685 - RNA, 21 nt, Human
caaaaccuagagccuccuuug

SEQ ID NO: 82686 - RNA, 20 nt, Human
caaaggaaaaaaaucaccuc

SEQ ID NO: 82687 - RNA, 20 nt, Human
caaaggaaaaaaaucaccuc

SEQ ID NO: 82688 - RNA, 20 nt, Human
caaaggaaaaaaaucaccuc

SEQ ID NO: 82689 - RNA, 24 nt, Human
caaagugcugggauuacaggcgug

SEQ ID NO: 82690 - RNA, 24 nt, Human
caaagugcugggauuacaggcgug

SEQ ID NO: 82691 - RNA, 24 nt, Human
caaagugcugggauuacaggcgug

SEQ ID NO: 82692 - RNA, 24 nt, Human
caaagugcugggauuacaggcgug

SEQ ID NO: 82693 - RNA, 24 nt, Human
caacacccacucucgggucaccac

SEQ ID NO: 82694 - RNA, 24 nt, Human
caacacccacucucgggucaccac

SEQ ID NO: 82695 - RNA, 23 nt, Human
caacagggagcaaaggaaaaaaa

SEQ ID NO: 82696 - RNA, 20 nt, Human
caaccuccaccucccgggcu

SEQ ID NO: 82697 - RNA, 24 nt, Human
caaccuccaccucccgggcugaag

SEQ ID NO: 82698 - RNA, 24 nt, Human
caaccuccaccucccgggcugaag

SEQ ID NO: 82699 - RNA, 24 nt, Human
caaccuccaccucccgggcugaag

SEQ ID NO: 82700 - RNA, 24 nt, Human
caaccuccaccucccgggcugaag

SEQ ID NO: 82701 - RNA, 21 nt, Human
caagcugaaaagcacaaauga

SEQ ID NO: 82702 - RNA, 23 nt, Human
caagucuuccaauucacugcacu

SEQ ID NO: 82703 - RNA, 22 nt, Human
caaguugacuaaaucucguacu

SEQ ID NO: 82704 - RNA, 20 nt, Human
caauagcucuucaacaaguu

SEQ ID NO: 82705 - RNA, 22 nt, Human
cacaagcagcuuuacccagagc

SEQ ID NO: 82706 - RNA, 22 nt, Human
cacacccagaugcugcuucacc

SEQ ID NO: 82707 - RNA, 24 nt, Human
caccacgcccggcuaauuuuugua

SEQ ID NO: 82708 - RNA, 21 nt, Human
caccacguuggucaggcuggu

SEQ ID NO: 82709 - RNA, 22 nt, Human
caccacguuggucaggcugguc

SEQ ID NO: 82710 - RNA, 21 nt, Human
caccauguuggccaggcuggu

SEQ ID NO: 82711 - RNA, 21 nt, Human
caccauguuggccaggcuggu

SEQ ID NO: 82712 - RNA, 21 nt, Human
caccauguuggccaggcuggu

SEQ ID NO: 82713 - RNA, 21 nt, Human
caccauguuggccaggcuggu

SEQ ID NO: 82714 - RNA, 21 nt, Human
caccauguuggccaggcuggu

SEQ ID NO: 82715 - RNA, 21 nt, Human
caccauguuggccaggcuggu

SEQ ID NO: 82716 - RNA, 24 nt, Human
caccauguuggccaggcugguuuc

SEQ ID NO: 82717 - RNA, 24 nt, Human
caccauguuggccaggcugguuuc

SEQ ID NO: 82718 - RNA, 24 nt, Human
caccauguuggccaggcugguuuc

SEQ ID NO: 82719 - RNA, 24 nt, Human
caccauguuggccaggcugguuuc

SEQ ID NO: 82720 - RNA, 31 nt, Human
caccauguuggccaggcugguuucgaacucc

SEQ ID NO: 82721 - RNA, 31 nt, Human; identical to SEQ ID NO: 82720

SEQ ID NO: 82722 - RNA, 31 nt, Human; identical to SEQ ID NO: 82720

SEQ ID NO: 82723 - RNA, 31 nt, Human; identical to SEQ ID NO: 82720

SEQ ID NO: 82724 - RNA, 21 nt, Human
cacccacucucgggucaccac

SEQ ID NO: 82725 - RNA, 21 nt, Human
cacccacucucgggucaccac

SEQ ID NO: 82726 - RNA, 25 nt, Human
cacccagaaauagcuaacuacccau

SEQ ID NO: 82727 - RNA, 20 nt, Human
caccucaaagaaagcaacag

SEQ ID NO: 82728 - RNA, 20 nt, Human
caccucaaagaaagcaacag

SEQ ID NO: 82729 - RNA, 20 nt, Human
caccucaaagaaagcaacag

SEQ ID NO: 82730 - RNA, 19 nt, Human
cacucuccuuccauugaag

SEQ ID NO: 82731 - RNA, 19 nt, Human
cacucuccuuccauugaag

SEQ ID NO: 82732 - RNA, 19 nt, Human
cacucuccuuccauugaag

SEQ ID NO: 82733 - RNA, 21 nt, Human
cacugcaaccuccaccucccg

SEQ ID NO: 82734 - RNA, 21 nt, Human
cacugcaaccuccaccucccg

SEQ ID NO: 82735 - RNA, 21 nt, Human
cacugcaaccuccaccucccg

SEQ ID NO: 82736 - RNA, 21 nt, Human
cacugcaaccuccaccucccg

SEQ ID NO: 82737 - RNA, 23 nt, Human
cacugcaaccuccaccucccggg

SEQ ID NO: 82738 - RNA, 23 nt, Human
cacugcaaccuccaccucccggg

SEQ ID NO: 82739 - RNA, 23 nt, Human
cacugcaaccuccaccucccggg

SEQ ID NO: 82740 - RNA, 23 nt, Human
cacugcaaccuccaccucccggg

SEQ ID NO: 82741 - RNA, 21 nt, Human
cacugcaaccuccgccucccg

SEQ ID NO: 82742 - RNA, 23 nt, Human
cacugcaaccuccgccucccggg

SEQ ID NO: 82743 - RNA, 20 nt, Human
cacugcacugugaagaaaac

SEQ ID NO: 82744 - RNA, 19 nt, Human
cacuuuguaagcucaucuu

SEQ ID NO: 82745 - RNA, 25 nt, Human
cacuuuguaagcucaucuugggguc

SEQ ID NO: 82746 - RNA, 18 nt, Human
cacuuuguaagcucauuc

SEQ ID NO: 82747 - RNA, 18 nt, Human
cacuuuguaagcucauuc

SEQ ID NO: 82748 - RNA, 18 nt, Human
cacuuuguaagcucauuc

SEQ ID NO: 82749 - RNA, 25 nt, Human
cacuuuguaagcucauucuuggggu

SEQ ID NO: 82750 - RNA, 25 nt, Human
cacuuuguaagcucauucuuggggu

SEQ ID NO: 82751 - RNA, 25 nt, Human
cacuuuguaagcucauucuuggggu

SEQ ID NO: 82752 - RNA, 25 nt, Human
cacuuuguaagcucauucuuggguc

SEQ ID NO: 82753 - RNA, 20 nt, Human
cagaaccuaacaguucauca

SEQ ID NO: 82754 - RNA, 22 nt, Human
cagaacuacccugauacuuuuc

SEQ ID NO: 82755 - RNA, 22 nt, Human
cagaacuacccugauacuuuuc

SEQ ID NO: 82756 - RNA, 19 nt, Human
cagcaacagggagcaaagg

SEQ ID NO: 82757 - RNA, 19 nt, Human
cagcaacagggagcaaagg

SEQ ID NO: 82758 - RNA, 19 nt, Human
cagcaacagggagcaaagg

SEQ ID NO: 82759 - RNA, 23 nt, Human
cagcaacagggagcaaaggaaaa

SEQ ID NO: 82760 - RNA, 23 nt, Human
cagcaacagggagcaaaggaaaa

SEQ ID NO: 82761 - RNA, 23 nt, Human
cagcaacagggagcaaaggaaaa

SEQ ID NO: 82762 - RNA, 23 nt, Human
cagcaacagggagcaaaggaaaa

SEQ ID NO: 82763 - RNA, 24 nt, Human
cagcaacagggagcaaaggaaaaa

SEQ ID NO: 82764 - RNA, 22 nt, Human
cagcaacagggagcaaaggaag

SEQ ID NO: 82765 - RNA, 22 nt, Human
cagcaacagggagcaaaggaag

SEQ ID NO: 82766 - RNA, 20 nt, Human
cagcagaaaggccuucugga

SEQ ID NO: 82767 - RNA, 18 nt, Human
cagcagcuggacucuggg

SEQ ID NO: 82768 - RNA, 21 nt, Human
cagcccuaagccaacaacagc

SEQ ID NO: 82769 - RNA, 21 nt, Human
cagcccuaagccaacaacagc

SEQ ID NO: 82770 - RNA, 21 nt, Human
cagcccuaagccaacaacagc

SEQ ID NO: 82771 - RNA, 21 nt, Human
cagccgguguuuuuuguuuug

SEQ ID NO: 82772 - RNA, 21 nt, Human
cagccuccugaguagcuggag

SEQ ID NO: 82773 - RNA, 20 nt, Human
cagcuuccuuccugguggga

SEQ ID NO: 82774 - RNA, 20 nt, Human
cagcuuccuuccugguggga

SEQ ID NO: 82775 - RNA, 20 nt, Human
cagcuuccuuccugguggga

SEQ ID NO: 82776 - RNA, 20 nt, Human
cagcuuccuuccugguggga

SEQ ID NO: 82777 - RNA, 23 nt, Human
cagguguccaccaccaugaccgg

SEQ ID NO: 82778 - RNA, 23 nt, Human
cagguguccaccaccaugaccgg

SEQ ID NO: 82779 - RNA, 23 nt, Human
cagguguccaccaccaugaccgg

SEQ ID NO: 82780 - RNA, 23 nt, Human
cagguguccaccaccaugaccgg

SEQ ID NO: 82781 - RNA, 19 nt, Human
cagguugcaaaaccccuaa

SEQ ID NO: 82782 - RNA, 19 nt, Human
caguaccagguaccaauga

SEQ ID NO: 82783 - RNA, 26 nt, Human
cagugaucugcccaccuuggccuccc

SEQ ID NO: 82784 - RNA, 21 nt, Human
caguuugcaaaacccuuucuc

SEQ ID NO: 82785 - RNA, 20 nt, Human
cauaauuuugugcucauggc

SEQ ID NO: 82786 - RNA, 19 nt, Human
caucacuggaaccuauuuc

SEQ ID NO: 82787 - RNA, 24 nt, Human
cauguuggccaggcugguuucgaa

SEQ ID NO: 82788 - RNA, 24 nt, Human
cauguuggccaggcugguuucgaa

SEQ ID NO: 82789 - RNA, 24 nt, Human
cauguuggccaggcugguuucgaa

SEQ ID NO: 82790 - RNA, 24 nt, Human
cauguuggccaggcugguuucgaa

SEQ ID NO: 82791 - RNA, 22 nt, Human
ccaaagugcugggauuacaggc

SEQ ID NO: 82792 - RNA, 22 nt, Human
ccaaagugcugggauuacaggc

SEQ ID NO: 82793 - RNA, 22 nt, Human
ccaaagugcugggauuacaggc

SEQ ID NO: 82794 - RNA, 22 nt, Human
ccaaagugcugggauuacaggc

SEQ ID NO: 82795 - RNA, 22 nt, Human
ccaaagugcugggauuacaggc

SEQ ID NO: 82796 - RNA, 22 nt, Human
ccaaagugcugggauuacaggc

SEQ ID NO: 82797 - RNA, 22 nt, Human
ccaaagugcugggauuacaggc

SEQ ID NO: 82798 - RNA, 24 nt, Human
ccaaagugcugggauuacaggcgu

SEQ ID NO: 82799 - RNA, 24 nt, Human
ccaaagugcugggauuacaggcgu

SEQ ID NO: 82800 - RNA, 24 nt, Human
ccaaagugcugggauuacaggcgu

SEQ ID NO: 82801 - RNA, 24 nt, Human
ccaaagugcugggauuacaggcgu

SEQ ID NO: 82802 - RNA, 26 nt, Human
ccaagcccguuccucuuucuucauca

SEQ ID NO: 82803 - RNA, 25 nt, Human
ccacaucuccucugacuucaaaauc

SEQ ID NO: 82804 - RNA, 25 nt, Human
ccacaucuccucugacuucaaaauc

SEQ ID NO: 82805 - RNA, 24 nt, Human
ccaccucccgggcugaagugauuc

SEQ ID NO: 82806 - RNA, 24 nt, Human
ccaccucccgggcugaagugauuc

SEQ ID NO: 82807 - RNA, 24 nt, Human
ccaccucccgggcugaagugauuc

SEQ ID NO: 82808 - RNA, 24 nt, Human
ccaccucccgggcugaagugauuc

SEQ ID NO: 82809 - RNA, 18 nt, Human
ccacuccaacauuugaga

SEQ ID NO: 82810 - RNA, 26 nt, Human
ccaggcaucuggcugcacaaccacaa

SEQ ID NO: 82811 - RNA, 27 nt, Human
ccagugaucugcccaccuuggccuccc

SEQ ID NO: 82812 - RNA, 27 nt, Human
ccagugaucugcccaccuuggccuccc

SEQ ID NO: 82813 - RNA, 27 nt, Human
ccagugaucugcccaccuuggccuccc

SEQ ID NO: 82814 - RNA, 27 nt, Human
ccagugaucugcccaccuuggccuccc

SEQ ID NO: 82815 - RNA, 19 nt, Human
cccagaaauagcuaacuac

SEQ ID NO: 82816 - RNA, 19 nt, Human
cccagaaauagcuaacuac

SEQ ID NO: 82817 - RNA, 23 nt, Human
cccagaaauagcuaacuacccau

SEQ ID NO: 82818 - RNA, 20 nt, Human
cccaggcuggagugccgugg

SEQ ID NO: 82819 - RNA, 20 nt, Human
cccaggcuggagugccgugg

SEQ ID NO: 82820 - RNA, 20 nt, Human
cccgggcugaagugauucuc

SEQ ID NO: 82821 - RNA, 20 nt, Human
cccgggcugaagugauucuc

SEQ ID NO: 82822 - RNA, 20 nt, Human
cccgggcugaagugauucuc

SEQ ID NO: 82823 - RNA, 23 nt, Human
cccggguucuagcgauucuccug

SEQ ID NO: 82824 - RNA, 21 nt, Human
cccugagcagucuucagagac

SEQ ID NO: 82825 - RNA, 28 nt, Human
cccugguuccuugaggggucggaaagcc

SEQ ID NO: 82826 - RNA, 18 nt, Human
ccuaaucuaagcauagca

SEQ ID NO: 82827 - RNA, 19 nt, Human
ccucaaagaaagcaacagc

SEQ ID NO: 82828 - RNA, 18 nt, Human
ccuccagugaucugccca

SEQ ID NO: 82829 - RNA, 18 nt, Human
ccuccagugaucugccca

SEQ ID NO: 82830 - RNA, 18 nt, Human
ccuccagugaucugccca

SEQ ID NO: 82831 - RNA, 18 nt, Human
ccuccagugaucugccca

SEQ ID NO: 82832 - RNA, 21 nt, Human
ccucccgcaauuccuagaaaa

SEQ ID NO: 82833 - RNA, 24 nt, Human
ccucccgggcugaagugauucucc

SEQ ID NO: 82834 - RNA, 24 nt, Human
ccucccgggcugaagugauucucc

SEQ ID NO: 82835 - RNA, 24 nt, Human
ccucccgggcugaagugauucucc

SEQ ID NO: 82836 - RNA, 24 nt, Human
ccucccgggcugaagugauucucc

SEQ ID NO: 82837 - RNA, 24 nt, Human
ccucccggguucuagcgauucucc

SEQ ID NO: 82838 - RNA, 18 nt, Human
ccuccugagcgcaggggc

SEQ ID NO: 82839 - RNA, 26 nt, Human
ccucugacuucaaaaucaugcucauu

SEQ ID NO: 82840 - RNA, 21 nt, Human
ccugagaugcaugacuacuuc

SEQ ID NO: 82841 - RNA, 22 nt, Human
ccugaguagcugggauuacagg

SEQ ID NO: 82842 - RNA, 22 nt, Human
ccugaguagcugggauuacagg

SEQ ID NO: 82843 - RNA, 22 nt, Human
ccugaguagcugggauuacagg

SEQ ID NO: 82844 - RNA, 22 nt, Human
ccugaguagcugggauuacagg

SEQ ID NO: 82845 - RNA, 22 nt, Human
ccugaguagcugggauuacagg

SEQ ID NO: 82846 - RNA, 23 nt, Human
ccugaguagcugggauuacaggu

SEQ ID NO: 82847 - RNA, 23 nt, Human
ccugaguagcugggauuacaggu

SEQ ID NO: 82848 - RNA, 23 nt, Human
ccugaguagcugggauuacaggu

SEQ ID NO: 82849 - RNA, 23 nt, Human
ccugaguagcugggauuacaggu

SEQ ID NO: 82850 - RNA, 24 nt, Human
ccugaguagcugggauuacaggug

SEQ ID NO: 82851 - RNA, 24 nt, Human
ccugaguagcugggauuacaggug

SEQ ID NO: 82852 - RNA, 24 nt, Human
ccugaguagcugggauuacaggug

SEQ ID NO: 82853 - RNA, 24 nt, Human
ccugaguagcugggauuacaggug

SEQ ID NO: 82854 - RNA, 23 nt, Human
ccugccucagccuccugaguagc

SEQ ID NO: 82855 - RNA, 24 nt, Human
ccugccuuagccaccugaguagcu

SEQ ID NO: 82856 - RNA, 24 nt, Human
ccugccuuagccaccugaguagcu

SEQ ID NO: 82857 - RNA, 24 nt, Human
ccugccuuagccaccugaguagcu

SEQ ID NO: 82858 - RNA, 22 nt, Human
ccuuagccaccugaguagcugg

SEQ ID NO: 82859 - RNA, 22 nt, Human
ccuuagccaccugaguagcugg

SEQ ID NO: 82860 - RNA, 23 nt, Human
ccuucuggauucuggcuuauagg

SEQ ID NO: 82861 - RNA, 18 nt, Human
ccuuugugaacacagggu

SEQ ID NO: 82862 - RNA, 18 nt, Human
ccuuugugaacacagggu

SEQ ID NO: 82863 - RNA, 24 nt, Human
ccuuugugaacacaggguuuuaga

SEQ ID NO: 82864 - RNA, 24 nt, Human
ccuuugugaacacaggguuuuaga

SEQ ID NO: 82865 - RNA, 24 nt, Human
ccuuugugaacacaggguuuuaga

SEQ ID NO: 82866 - RNA, 24 nt, Human
ccuuugugaacacaggguuuuaga

SEQ ID NO: 82867 - RNA, 19 nt, Human
ccuuuuuuucugugcuggg

SEQ ID NO: 82868 - RNA, 20 nt, Human
cgaucccaagcacucuccuu

SEQ ID NO: 82869 - RNA, 20 nt, Human
cgaucccaagcacucuccuu

SEQ ID NO: 82870 - RNA, 20 nt, Human
cgaucccaagcacucuccuu

SEQ ID NO: 82871 - RNA, 20 nt, Human
cgaucccaagcacucuccuu

SEQ ID NO: 82872 - RNA, 24 nt, Human
cgcucugucgcccaggcuggagug

SEQ ID NO: 82873 - RNA, 18 nt, Human
cggacacucagugccccc

SEQ ID NO: 82874 - RNA, 24 nt, Human
cggaguuucaccacguuggucagg

SEQ ID NO: 82875 - RNA, 18 nt, Human
cggcaccacgcccggcua

SEQ ID NO: 82876 - RNA, 24 nt, Human
cgugguaugaucuuggcucacugc

SEQ ID NO: 82877 - RNA, 21 nt, Human
cuaaaaacagcagaacuuucc

SEQ ID NO: 82878 - RNA, 22 nt, Human
cuaaaaacagcagaacuuuccc

SEQ ID NO: 82879 - RNA, 21 nt, Human
cuaagccaacaacagccugaa

SEQ ID NO: 82880 - RNA, 21 nt, Human
cuaagccaacaacagccugaa

SEQ ID NO: 82881 - RNA, 21 nt, Human
cuaagccaacaacagccugaa

SEQ ID NO: 82882 - RNA, 21 nt, Human
cuaagccaacaacagccugaa

SEQ ID NO: 82883 - RNA, 22 nt, Human
cuaccaaguuuauuugcagugu

SEQ ID NO: 82884 - RNA, 22 nt, Human
cuaccaaguuuauuugcagugu

SEQ ID NO: 82885 - RNA, 22 nt, Human
cuaccaaguuuauuugcagugu

SEQ ID NO: 82886 - RNA, 22 nt, Human
cuaccaaguuuauuugcagugu

SEQ ID NO: 82887 - RNA, 27 nt, Human
cuagcgauucuccugccucagccuccu

SEQ ID NO: 82888 - RNA, 23 nt, Human
cucaaacuugucagcagaaaggc

SEQ ID NO: 82889 - RNA, 18 nt, Human
cucaaagaaagcaacagc

SEQ ID NO: 82890 - RNA, 18 nt, Human
cucaaagaaagcaacagc

SEQ ID NO: 82891 - RNA, 18 nt, Human
cucaaagaaagcaacagc

SEQ ID NO: 82892 - RNA, 18 nt, Human
cucaaagaaagcaacagc

SEQ ID NO: 82893 - RNA, 18 nt, Human
cucaagggcagaagaguc

SEQ ID NO: 82894 - RNA, 20 nt, Human
cucaagggcagaagagucac

SEQ ID NO: 82895 - RNA, 21 nt, Human
cucaagggcagaagagucacu

SEQ ID NO: 82896 - RNA, 18 nt, Human
cucacacccagaugcugc

SEQ ID NO: 82897 - RNA, 24 nt, Human
cucacugcaaccuccaccucccgg

SEQ ID NO: 82898 - RNA, 24 nt, Human
cucacugcaaccuccaccucccgg

SEQ ID NO: 82899 - RNA, 24 nt, Human
cucacugcaaccuccaccucccgg

SEQ ID NO: 82900 - RNA, 24 nt, Human
cucacugcaaccuccaccucccgg

SEQ ID NO: 82901 - RNA, 24 nt, Human
cucacugcaaccuccgccucccgg

SEQ ID NO: 82902 - RNA, 21 nt, Human
cucagaauuuccuccccaaug

SEQ ID NO: 82903 - RNA, 21 nt, Human
cucagaauuuccuccccaaug

SEQ ID NO: 82904 - RNA, 21 nt, Human
cucagaauuuccuccccaaug

SEQ ID NO: 82905 - RNA, 21 nt, Human
cucagaauuuccuccccaaug

SEQ ID NO: 82906 - RNA, 24 nt, Human
cuccagugaucugcccaccuuggc

SEQ ID NO: 82907 - RNA, 24 nt, Human
cuccagugaucugcccaccuuggc

SEQ ID NO: 82908 - RNA, 24 nt, Human
cuccagugaucugcccaccuuggc

SEQ ID NO: 82909 - RNA, 24 nt, Human
cuccagugaucugcccaccuuggc

SEQ ID NO: 82910 - RNA, 21 nt, Human
cucccacacugcaauaaguug

SEQ ID NO: 82911 - RNA, 20 nt, Human
cucccgcaauuccuagaaaa

SEQ ID NO: 82912 - RNA, 18 nt, Human
cucccgggcugaagugau

SEQ ID NO: 82913 - RNA, 18 nt, Human
cucccgggcugaagugau

SEQ ID NO: 82914 - RNA, 19 nt, Human
cucccgggcugaagugauu

SEQ ID NO: 82915 - RNA, 19 nt, Human
cucccgggcugaagugauu

SEQ ID NO: 82916 - RNA, 19 nt, Human
cucccgggcugaagugauu

SEQ ID NO: 82917 - RNA, 25 nt, Human
cucccgggcugaagugauucuccug

SEQ ID NO: 82918 - RNA, 25 nt, Human
cucccgggcugaagugauucuccug

SEQ ID NO: 82919 - RNA, 25 nt, Human
cucccgggcugaagugauucuccug

SEQ ID NO: 82920 - RNA, 25 nt, Human
cucccgggcugaagugauucuccug

SEQ ID NO: 82921 - RNA, 21 nt, Human
cucccggguucuagcgauucu

SEQ ID NO: 82922 - RNA, 23 nt, Human
cuccuccacaucaacaaccuuaa

SEQ ID NO: 82923 - RNA, 25 nt, Human
cuccucugacuucaaaaucaugcuc

SEQ ID NO: 82924 - RNA, 24 nt, Human
cucgcucugucgcccaggcuggag

SEQ ID NO: 82925 - RNA, 25 nt, Human
cucugucgcccaggcuggagugcaa

SEQ ID NO: 82926 - RNA, 18 nt, Human
cucuucuuuuucuucucu

SEQ ID NO: 82927 - RNA, 27 nt, Human
cugaccaaccacaggaaagccugcagu

SEQ ID NO: 82928 - RNA, 21 nt, Human
cugaguagcugggauuacagg

SEQ ID NO: 82929 - RNA, 21 nt, Human
cugaguagcugggauuacagg

SEQ ID NO: 82930 - RNA, 21 nt, Human
cugaguagcugggauuacagg

SEQ ID NO: 82931 - RNA, 21 nt, Human
cugaguagcugggauuacagg

SEQ ID NO: 82932 - RNA, 23 nt, Human
cugaguagcugggauuacaggug

SEQ ID NO: 82933 - RNA, 23 nt, Human
cugaguagcugggauuacaggug

SEQ ID NO: 82934 - RNA, 24 nt, Human
cugaguagcugggauuacaggugu

SEQ ID NO: 82935 - RNA, 24 nt, Human
cugaguagcugggauuacaggugu

SEQ ID NO: 82936 - RNA, 24 nt, Human
cugaguagcugggauuacaggugu

SEQ ID NO: 82937 - RNA, 24 nt, Human
cugaguagcugggauuacaggugu

SEQ ID NO: 82938 - RNA, 18 nt, Human
cugcaaccuccaccuccc

SEQ ID NO: 82939 - RNA, 18 nt, Human
cugcaaccuccaccuccc

SEQ ID NO: 82940 - RNA, 22 nt, Human
cugcaaccuccaccucccgggc

SEQ ID NO: 82941 - RNA, 22 nt, Human
cugcaaccuccaccucccgggc

SEQ ID NO: 82942 - RNA, 22 nt, Human
cugcaaccuccaccucccgggc

SEQ ID NO: 82943 - RNA, 23 nt, Human
cugcaaccuccaccucccgggcu

SEQ ID NO: 82944 - RNA, 23 nt, Human
cugcaaccuccaccucccgggcu

SEQ ID NO: 82945 - RNA, 23 nt, Human
cugcaaccuccaccucccgggcu

SEQ ID NO: 82946 - RNA, 23 nt, Human
cugcaaccuccaccucccgggcu

SEQ ID NO: 82947 - RNA, 23 nt, Human
cugcaaccuccgccucccggguu

SEQ ID NO: 82948 - RNA, 23 nt, Human
cugccucagccuccugaguagcu

SEQ ID NO: 82949 - RNA, 23 nt, Human
cugccuuagccaccugaguagcu

SEQ ID NO: 82950 - RNA, 23 nt, Human
cugccuuagccaccugaguagcu

SEQ ID NO: 82951 - RNA, 24 nt, Human
cuggaaccuacuucauuaauauug

SEQ ID NO: 82952 - RNA, 22 nt, Human
cuggagcccacuucauuaguac

SEQ ID NO: 82953 - RNA, 20 nt, Human
cuggagcggcaccacgcccg

SEQ ID NO: 82954 - RNA, 19 nt, Human
cugggcagauucugcaacu

SEQ ID NO: 82955 - RNA, 20 nt, Human
cugggguaucagguaggugu

SEQ ID NO: 82956 - RNA, 20 nt, Human
cugggguaucagguaggugu

SEQ ID NO: 82957 - RNA, 22 nt, Human
cuguauuuuuaguagagauggg

SEQ ID NO: 82958 - RNA, 22 nt, Human
cuguauuuuuaguagagauggg

SEQ ID NO: 82959 - RNA, 23 nt, Human
cuguauuuuuaguagagaugggg

SEQ ID NO: 82960 - RNA, 23 nt, Human
cuguauuuuuaguagagaugggg

SEQ ID NO: 82961 - RNA, 23 nt, Human
cuguauuuuuaguagagaugggg

SEQ ID NO: 82962 - RNA, 18 nt, Human
cugucacccaggcuggag

SEQ ID NO: 82963 - RNA, 19 nt, Human
cugucgcccaggcuggagu

SEQ ID NO: 82964 - RNA, 20 nt, Human
cuguuuuugccuucccuaga

SEQ ID NO: 82965 - RNA, 23 nt, Human
cuuaaagccuucugugucauuuc

SEQ ID NO: 82966 - RNA, 23 nt, Human
cuuagccaccugaguagcuggga

SEQ ID NO: 82967 - RNA, 24 nt, Human
cuuagccaccugaguagcugggau

SEQ ID NO: 82968 - RNA, 24 nt, Human
cuuagccaccugaguagcugggau

SEQ ID NO: 82969 - RNA, 24 nt, Human
cuuagccaccugaguagcugggau

SEQ ID NO: 82970 - RNA, 24 nt, Human
cuuagccaccugaguagcugggau

SEQ ID NO: 82971 - RNA, 19 nt, Human
cuuccagcccaucuguuau

SEQ ID NO: 82972 - RNA, 19 nt, Human
cuucucccugcucacacuu

SEQ ID NO: 82973 - RNA, 20 nt, Human
cuugcauagccagaaguccu

SEQ ID NO: 82974 - RNA, 20 nt, Human
cuugcauagccagaaguccu

SEQ ID NO: 82975 - RNA, 20 nt, Human
cuugcauagccagaaguccu

SEQ ID NO: 82976 - RNA, 20 nt, Human
cuugcauagccagaaguccu

SEQ ID NO: 82977 - RNA, 19 nt, Human
cuuuaauuuauuugugagg

SEQ ID NO: 82978 - RNA, 22 nt, Human
cuuucuggacgcuuuugcuaaa

SEQ ID NO: 82979 - RNA, 21 nt, Human
cuuuuuuuuuuuuuuuuuugg

SEQ ID NO: 82980 - RNA, 21 nt, Human
gaagaaucagaucccaauuca

SEQ ID NO: 82981 - RNA, 22 nt, Human
gacucuggggcucugucuucag

SEQ ID NO: 82982 - RNA, 18 nt, Human
gagaugggguuucaccau

SEQ ID NO: 82983 - RNA, 18 nt, Human
gagaugggguuucaccau

SEQ ID NO: 82984 - RNA, 18 nt, Human
gagaugggguuucaccau

SEQ ID NO: 82985 - RNA, 20 nt, Human
gagaugggguuucaccaugu

SEQ ID NO: 82986 - RNA, 20 nt, Human
gagaugggguuucaccaugu

SEQ ID NO: 82987 - RNA, 24 nt, Human
gagaugggguuucaccauguuggc

SEQ ID NO: 82988 - RNA, 24 nt, Human
gagaugggguuucaccauguuggc

SEQ ID NO: 82989 - RNA, 24 nt, Human
gagaugggguuucaccauguuggc

SEQ ID NO: 82990 - RNA, 24 nt, Human
gagaugggguuucaccauguuggc

SEQ ID NO: 82991 - RNA, 23 nt, Human
gagcagcagcuggacucugggca

SEQ ID NO: 82992 - RNA, 24 nt, Human
gagcagcagcuggacucugggcag

SEQ ID NO: 82993 - RNA, 19 nt, Human
gaguagcugggauuacagg

SEQ ID NO: 82994 - RNA, 19 nt, Human
gaguagcugggauuacagg

SEQ ID NO: 82995 - RNA, 19 nt, Human
gaguagcugggauuacagg

SEQ ID NO: 82996 - RNA, 19 nt, Human
gaguagcugggauuacagg

SEQ ID NO: 82997 - RNA, 25 nt, Human
gaguagcugggauuacaggugucca

SEQ ID NO: 82998 - RNA, 25 nt, Human
gaguagcugggauuacaggugucca

SEQ ID NO: 82999 - RNA, 25 nt, Human
gaguagcugggauuacaggugucca

SEQ ID NO: 83000 - RNA, 18 nt, Human
gauuacaggcgugagcca

SEQ ID NO: 83001 - RNA, 18 nt, Human
gauuacaggcgugagcca

SEQ ID NO: 83002 - RNA, 18 nt, Human
gauuacaggcgugagcca

SEQ ID NO: 83003 - RNA, 18 nt, Human
gauuacaggcgugagcca

SEQ ID NO: 83004 - RNA, 21 nt, Human
gauuacaggcgugagccacca

SEQ ID NO: 83005 - RNA, 21 nt, Human
gauuacaggcgugagccacca

SEQ ID NO: 83006 - RNA, 21 nt, Human
gauuacaggcgugagccacca

SEQ ID NO: 83007 - RNA, 21 nt, Human
gauuacaggcgugagccacca

SEQ ID NO: 83008 - RNA, 22 nt, Human
gauuacaggcgugagccaccau

SEQ ID NO: 83009 - RNA, 22 nt, Human
gauuacaggcgugagccaccau

SEQ ID NO: 83010 - RNA, 24 nt, Human
gauuacaggcgugagccaccaugc

SEQ ID NO: 83011 - RNA, 24 nt, Human
gauuacaggcgugagccaccaugc

SEQ ID NO: 83012 - RNA, 24 nt, Human
gauuacaggcgugagccaccaugc

SEQ ID NO: 83013 - RNA, 21 nt, Human
gcaaaacuaguaucuuccuuu

SEQ ID NO: 83014 - RNA, 24 nt, Human
gcaaaauagucccagcuacuuggg

SEQ ID NO: 83015 - RNA, 20 nt, Human
gcaaccuccaccucccgggc

SEQ ID NO: 83016 - RNA, 20 nt, Human
gcaaccuccaccucccgggc

SEQ ID NO: 83017 - RNA, 22 nt, Human
gcaaccuccgccucccggguuc

SEQ ID NO: 83018 - RNA, 18 nt, Human
gcaacggugcuaugccua

SEQ ID NO: 83019 - RNA, 19 nt, Human
gcacauuccucuucugcau

SEQ ID NO: 83020 - RNA, 19 nt, Human
gcccaggcuggagugcaau

SEQ ID NO: 83021 - RNA, 20 nt, Human
gcccaggcuggagugcaaug

SEQ ID NO: 83022 - RNA, 22 nt, Human
gcccggcuaauuuuuguauuuu

SEQ ID NO: 83023 - RNA, 19 nt, Human
gcccuaagccaacaacagc

SEQ ID NO: 83024 - RNA, 19 nt, Human
gcccuaagccaacaacagc

SEQ ID NO: 83025 - RNA, 22 nt, Human
gccuaggaggucaaggcaacag

SEQ ID NO: 83026 - RNA, 23 nt, Human
gcgauucuccugccucagccucc

SEQ ID NO: 83027 - RNA, 19 nt, Human
gcucuuguauuaucugugg

SEQ ID NO: 83028 - RNA, 19 nt, Human
gcuggagugcaauggcgcg

SEQ ID NO: 83029 - RNA, 23 nt, Human
gcuggucuggaacuccugaccuc

SEQ ID NO: 83030 - RNA, 23 nt, Human
gcugguuucgaacuccugaccuc

SEQ ID NO: 83031 - RNA, 23 nt, Human
gcugguuucgaacuccugaccuc

SEQ ID NO: 83032 - RNA, 23 nt, Human
gcugguuucgaacuccugaccuc

SEQ ID NO: 83033 - RNA, 23 nt, Human
gcugguuucgaacuccugaccuc

SEQ ID NO: 83034 - RNA, 18 nt, Human
ggaaaaccacucauuaac

SEQ ID NO: 83035 - RNA, 23 nt, Human
ggauacuuaaagccuucuguguc

SEQ ID NO: 83036 - RNA, 24 nt, Human
ggauuacaggcgugagccaccaug

SEQ ID NO: 83037 - RNA, 24 nt, Human
ggauuacaggcgugagccaccaug

SEQ ID NO: 83038 - RNA, 24 nt, Human
ggauuacaggcgugagccaccaug

SEQ ID NO: 83039 - RNA, 24 nt, Human
ggauuacaggcgugagccaccaug

SEQ ID NO: 83040 - RNA, 25 nt, Human
ggccagacaccaccauggacauucu

SEQ ID NO: 83041 - RNA, 24 nt, Human
ggcguuuaaaugguuuuaaaaucu

SEQ ID NO: 83042 - RNA, 24 nt, Human
ggcguuuaaaugguuuuaaaaucu

SEQ ID NO: 83043 - RNA, 24 nt, Human
ggcguuuaaaugguuuuaaaaucu

SEQ ID NO: 83044 - RNA, 24 nt, Human
ggcguuuaaaugguuuuaaaaucu

SEQ ID NO: 83045 - RNA, 19 nt, Human
ggcucuguaccuguggcug

SEQ ID NO: 83046 - RNA, 24 nt, Human
ggcuggucuggaacuccugaccuc

SEQ ID NO: 83047 - RNA, 24 nt, Human
ggcugguuucgaacuccugaccuc

SEQ ID NO: 83048 - RNA, 24 nt, Human
ggcugguuucgaacuccugaccuc

SEQ ID NO: 83049 - RNA, 24 nt, Human
ggcugguuucgaacuccugaccuc

SEQ ID NO: 83050 - RNA, 24 nt, Human
ggcugguuucgaacuccugaccuc

SEQ ID NO: 83051 - RNA, 23 nt, Human
gggaaaccagcuauucucuugag

SEQ ID NO: 83052 - RNA, 23 nt, Human
gggaaaccagcuauucucuugag

SEQ ID NO: 83053 - RNA, 19 nt, Human
gggguccaggaagucucag

SEQ ID NO: 83054 - RNA, 26 nt, Human
gggguccguggcucuguaccuguggc

SEQ ID NO: 83055 - RNA, 22 nt, Human
gggguuucaccauguuggccag

SEQ ID NO: 83056 - RNA, 22 nt, Human
gggguuucaccauguuggccag

SEQ ID NO: 83057 - RNA, 22 nt, Human
gggguuucaccauguuggccag

SEQ ID NO: 83058 - RNA, 22 nt, Human
gggguuucaccauguuggccag

SEQ ID NO: 83059 - RNA, 23 nt, Human
gggguuucaccauguuggccagg

SEQ ID NO: 83060 - RNA, 18 nt, Human
ggguuucaccauguuggc

SEQ ID NO: 83061 - RNA, 18 nt, Human
ggguuucaccauguuggc

SEQ ID NO: 83062 - RNA, 18 nt, Human
ggguuucaccauguuggc

SEQ ID NO: 83063 - RNA, 22 nt, Human
ggguuucaccauguuggccagg

SEQ ID NO: 83064 - RNA, 22 nt, Human
ggguuucaccauguuggccagg

SEQ ID NO: 83065 - RNA, 21 nt, Human
ggugguuucuuccauugacca

SEQ ID NO: 83066 - RNA, 21 nt, Human
ggugguuucuuccauugacca

SEQ ID NO: 83067 - RNA, 19 nt, Human
gguuucgaacuccugaccu

SEQ ID NO: 83068 - RNA, 19 nt, Human
gguuucgaacuccugaccu

SEQ ID NO: 83069 - RNA, 19 nt, Human
gguuucgaacuccugaccu

SEQ ID NO: 83070 - RNA, 19 nt, Human
gguuucgaacuccugaccu

SEQ ID NO: 83071 - RNA, 23 nt, Human
guagagaugggguuucaccaugu

SEQ ID NO: 83072 - RNA, 23 nt, Human
guagagaugggguuucaccaugu

SEQ ID NO: 83073 - RNA, 23 nt, Human
guagagaugggguuucaccaugu

SEQ ID NO: 83074 - RNA, 23 nt, Human
guagagaugggguuucaccaugu

SEQ ID NO: 83075 - RNA, 18 nt, Human
guagcugggauuacaggu

SEQ ID NO: 83076 - RNA, 18 nt, Human
guagcugggauuacaggu

SEQ ID NO: 83077 - RNA, 18 nt, Human
guagcugggauuacaggu

SEQ ID NO: 83078 - RNA, 24 nt, Human
guccuguggccuguaccuguggcu

SEQ ID NO: 83079 - RNA, 24 nt, Human
guccuguggcuuguaccuguggcu

SEQ ID NO: 83080 - RNA, 23 nt, Human
gucucacugucacccaggcugga

SEQ ID NO: 83081 - RNA, 23 nt, Human
gucucacugucacccaggcugga

SEQ ID NO: 83082 - RNA, 23 nt, Human
gucucacugucacccaggcugga

SEQ ID NO: 83083 - RNA, 23 nt, Human
gucucacugucacccaggcugga

SEQ ID NO: 83084 - RNA, 23 nt, Human
gugguaugaucuuggcucacugc

SEQ ID NO: 83085 - RNA, 23 nt, Human
gugguaugaucuuggcucacugc

SEQ ID NO: 83086 - RNA, 23 nt, Human
gugguaugaucuuggcucacugc

SEQ ID NO: 83087 - RNA, 23 nt, Human
gugguaugaucuuggcucacugc

SEQ ID NO: 83088 - RNA, 19 nt, Human
guuaguucccugauuuauc

SEQ ID NO: 83089 - RNA, 20 nt, Human
guuugcaaaacccuuucucc

SEQ ID NO: 83090 - RNA, 22 nt, Human
uaacagcacaacauuuacaaaa

SEQ ID NO: 83091 - RNA, 22 nt, Human
uaacagcacaacauuuacaaaa

SEQ ID NO: 83092 - RNA, 22 nt, Human
uaacagcacaacauuuacaaaa

SEQ ID NO: 83093 - RNA, 22 nt, Human
uaacagcacaacauuuacaaaa

SEQ ID NO: 83094 - RNA, 19 nt, Human
uaacaggucaucagguguc

SEQ ID NO: 83095 - RNA, 18 nt, Human
uaagccaacaacagccug

SEQ ID NO: 83096 - RNA, 22 nt, Human
uaagccaacaacagccugaaua

SEQ ID NO: 83097 - RNA, 22 nt, Human
uaagccaacaacagccugaaua

SEQ ID NO: 83098 - RNA, 22 nt, Human
uaagccaacaacagccugaaua

SEQ ID NO: 83099 - RNA, 22 nt, Human
uaagccaacaacagccugaaua

SEQ ID NO: 83100 - RNA, 21 nt, Human
uaagggacccuugcauagcca

SEQ ID NO: 83101 - RNA, 21 nt, Human
uaagggacccuugcauagcca

SEQ ID NO: 83102 - RNA, 21 nt, Human
uaagggacccuugcauagcca

SEQ ID NO: 83103 - RNA, 21 nt, Human
uaagggacccuugcauagcca

SEQ ID NO: 83104 - RNA, 23 nt, Human
uaaggugauguuccugagaugcc

SEQ ID NO: 83105 - RNA, 24 nt, Human
uaauuucuguauuuuuaguagaga

SEQ ID NO: 83106 - RNA, 24 nt, Human
uaauuucuguauuuuuaguagaga

SEQ ID NO: 83107 - RNA, 24 nt, Human
uaauuucuguauuuuuaguagaga

SEQ ID NO: 83108 - RNA, 24 nt, Human
uaauuucuguauuuuuaguagaga

SEQ ID NO: 83109 - RNA, 24 nt, Human
uaauuuuuguauuuuuaguagaga

SEQ ID NO: 83110 - RNA, 20 nt, Human
uacaauuaggugggcuuaga

SEQ ID NO: 83111 - RNA, 23 nt, Human
uacagaauucagccuuuucuaca

SEQ ID NO: 83112 - RNA, 24 nt, Human
uacaggcgugagccaccaugccca

SEQ ID NO: 83113 - RNA, 24 nt, Human
uacaggcgugagccaccaugccca

SEQ ID NO: 83114 - RNA, 24 nt, Human
uacaggcgugagccaccaugccca

SEQ ID NO: 83115 - RNA, 24 nt, Human
uacaggcgugagccaccaugccca

SEQ ID NO: 83116 - RNA, 23 nt, Human
uaccagagcuacaacaauaaaca

SEQ ID NO: 83117 - RNA, 23 nt, Human
uaccagagcuacaacaauaaaca

SEQ ID NO: 83118 - RNA, 23 nt, Human
uaccagagcuacaacaauaaaca

SEQ ID NO: 83119 - RNA, 23 nt, Human
uaccagagcuacaacaauaaaca

SEQ ID NO: 83120 - RNA, 23 nt, Human
uaccauaauuuugugcucauggc

SEQ ID NO: 83121 - RNA, 23 nt, Human
uaccauaauuuugugcucauggc

SEQ ID NO: 83122 - RNA, 23 nt, Human
uaccauaauuuugugcucauggc

SEQ ID NO: 83123 - RNA, 23 nt, Human
uaccauaauuuugugcucauggc

SEQ ID NO: 83124 - RNA, 19 nt, Human
uacccauuuuccucccgca

SEQ ID NO: 83125 - RNA, 19 nt, Human
uacccauuuuccucccgca

SEQ ID NO: 83126 - RNA, 22 nt, Human
uacuaaugaggaauuagaagac

SEQ ID NO: 83127 - RNA, 22 nt, Human
uacuaaugaggaauuagaagac

SEQ ID NO: 83128 - RNA, 22 nt, Human
uacuaaugaggaauuagaagac

SEQ ID NO: 83129 - RNA, 22 nt, Human
uacuaaugaggaauuagaagac

SEQ ID NO: 83130 - RNA, 24 nt, Human
uagaaagaauagggcugauaaaua

SEQ ID NO: 83131 - RNA, 24 nt, Human
uagaaagaauagggcugauaaaua

SEQ ID NO: 83132 - RNA, 24 nt, Human
uagaaagaauagggcugauaaaua

SEQ ID NO: 83133 - RNA, 24 nt, Human
uagaaagaauagggcugauaaaua

SEQ ID NO: 83134 - RNA, 18 nt, Human
uagaaggacugaagagug

SEQ ID NO: 83135 - RNA, 18 nt, Human
uagaaggacugaagagug

SEQ ID NO: 83136 - RNA, 18 nt, Human
uagaaggacugaagagug

SEQ ID NO: 83137 - RNA, 25 nt, Human
uagaaggcuggcucccaugcuguuc

SEQ ID NO: 83138 - RNA, 22 nt, Human
uagagaugggguuucaccaugu

SEQ ID NO: 83139 - RNA, 22 nt, Human
uagagaugggguuucaccaugu

SEQ ID NO: 83140 - RNA, 22 nt, Human
uagagaugggguuucaccaugu

SEQ ID NO: 83141 - RNA, 22 nt, Human
uagagaugggguuucaccaugu

SEQ ID NO: 83142 - RNA, 19 nt, Human
uagcuggagcggcaccacg

SEQ ID NO: 83143 - RNA, 19 nt, Human
uaguagagacggaguuuca

SEQ ID NO: 83144 - RNA, 25 nt, Human
uaguagagacggaguuucaccacgu

SEQ ID NO: 83145 - RNA, 24 nt, Human
uaguagagaugggguuucaccaug

SEQ ID NO: 83146 - RNA, 24 nt, Human
uaguagagaugggguuucaccaug

SEQ ID NO: 83147 - RNA, 24 nt, Human
uaguagagaugggguuucaccaug

SEQ ID NO: 83148 - RNA, 24 nt, Human
uaguagagaugggguuucaccaug

SEQ ID NO: 83149 - RNA, 25 nt, Human
uaguagagaugggguuucaccaugu

SEQ ID NO: 83150 - RNA, 25 nt, Human
uaguagagaugggguuucaccaugu

SEQ ID NO: 83151 - RNA, 26 nt, Human
uaguagagaugggguuucaccauguu

SEQ ID NO: 83152 - RNA, 26 nt, Human
uaguagagaugggguuucaccauguu

SEQ ID NO: 83153 - RNA, 26 nt, Human
uaguagagaugggguuucaccauguu

SEQ ID NO: 83154 - RNA, 18 nt, Human
uagugaguaauaaacugc

SEQ ID NO: 83155 - RNA, 18 nt, Human
uagugaguaauaaacugc

SEQ ID NO: 83156 - RNA, 21 nt, Human
uaguuucucuucuuuuucuuc

SEQ ID NO: 83157 - RNA, 22 nt, Human
uauccaaggaacaucuucagua

SEQ ID NO: 83158 - RNA, 19 nt, Human
uauuccauucuuuucucuc

SEQ ID NO: 83159 - RNA, 25 nt, Human
ucaauagcucuucaacaaguugacu

SEQ ID NO: 83160 - RNA, 18 nt, Human
ucaauguagacagacguc

SEQ ID NO: 83161 - RNA, 21 nt, Human
ucacauaaucgaucccaagca

SEQ ID NO: 83162 - RNA, 21 nt, Human
ucacauaaucgaucccaagca

SEQ ID NO: 83163 - RNA, 21 nt, Human
ucacauaaucgaucccaagca

SEQ ID NO: 83164 - RNA, 21 nt, Human
ucacauaaucgaucccaagca

SEQ ID NO: 83165 - RNA, 18 nt, Human
ucacccaggcuggagugc

SEQ ID NO: 83166 - RNA, 18 nt, Human
ucacccaggcuggagugc

SEQ ID NO: 83167 - RNA, 18 nt, Human
ucacccaggcuggagugc

SEQ ID NO: 83168 - RNA, 18 nt, Human
ucacccaggcuggagugc

SEQ ID NO: 83169 - RNA, 22 nt, Human
ucacucagaccaacucccuggc

SEQ ID NO: 83170 - RNA, 23 nt, Human
ucacugcaaccuccaccucccgg

SEQ ID NO: 83171 - RNA, 23 nt, Human
ucacugcaaccuccaccucccgg

SEQ ID NO: 83172 - RNA, 23 nt, Human
ucacugcaaccuccaccucccgg

SEQ ID NO: 83173 - RNA, 23 nt, Human
ucacugcaaccuccaccucccgg

SEQ ID NO: 83174 - RNA, 23 nt, Human
ucacugcaaccuccaccucccgg

SEQ ID NO: 83175 - RNA, 24 nt, Human
ucacugcaaccuccaccucccggg

SEQ ID NO: 83176 - RNA, 24 nt, Human
ucacugcaaccuccaccucccggg

SEQ ID NO: 83177 - RNA, 24 nt, Human
ucacugcaaccuccaccucccggg

SEQ ID NO: 83178 - RNA, 24 nt, Human
ucacugcaaccuccaccucccggg

SEQ ID NO: 83179 - RNA, 25 nt, Human
ucacugcaaccuccaccucccgggc

SEQ ID NO: 83180 - RNA, 25 nt, Human
ucacugcaaccuccaccucccgggc

SEQ ID NO: 83181 - RNA, 25 nt, Human
ucacugcaaccuccaccucccgggc

SEQ ID NO: 83182 - RNA, 26 nt, Human
ucacugcaaccuccaccucccgggcu

SEQ ID NO: 83183 - RNA, 27 nt, Human
ucacugcaaccuccaccucccgggcug

SEQ ID NO: 83184 - RNA, 27 nt, Human
ucacugcaaccuccaccucccgggcug

SEQ ID NO: 83185 - RNA, 27 nt, Human
ucacugcaaccuccaccucccgggcug

SEQ ID NO: 83186 - RNA, 23 nt, Human
ucacugcaaccuccgccucccgg

SEQ ID NO: 83187 - RNA, 24 nt, Human
ucacugcaaccuccgccucccggg

SEQ ID NO: 83188 - RNA, 25 nt, Human
ucacugcaaccuccgccucccgggu

SEQ ID NO: 83189 - RNA, 27 nt, Human
ucacugcaaccuccgccucccggguuc

SEQ ID NO: 83190 - RNA, 23 nt, Human
ucacugucacccaggcuggagug

SEQ ID NO: 83191 - RNA, 23 nt, Human
ucacugucacccaggcuggagug

SEQ ID NO: 83192 - RNA, 23 nt, Human
ucacugucacccaggcuggagug

SEQ ID NO: 83193 - RNA, 23 nt, Human
ucacugucacccaggcuggagug

SEQ ID NO: 83194 - RNA, 23 nt, Human
ucagcaacagggagcaaaggaaa

SEQ ID NO: 83195 - RNA, 23 nt, Human
ucagcaacagggagcaaaggaaa

SEQ ID NO: 83196 - RNA, 23 nt, Human
ucagcaacagggagcaaaggaaa

SEQ ID NO: 83197 - RNA, 21 nt, Human
ucagccauuuccugcuggagc

SEQ ID NO: 83198 - RNA, 23 nt, Human
ucagccuccugaguagcuggagc

SEQ ID NO: 83199 - RNA, 22 nt, Human
ucagcuacuuuggcauuugauu

SEQ ID NO: 83200 - RNA, 21 nt, Human
ucagcugcacgcuucucagga

SEQ ID NO: 83201 - RNA, 21 nt, Human
ucagcugcacgcuucucagga

SEQ ID NO: 83202 - RNA, 20 nt, Human
ucagcugcacgcuucucagu

SEQ ID NO: 83203 - RNA, 20 nt, Human
ucagcugcacgcuucucagu

SEQ ID NO: 83204 - RNA, 19 nt, Human
ucaggccagacaccaccau

SEQ ID NO: 83205 - RNA, 24 nt, Human
ucaggugucucagaacaaaccuga

SEQ ID NO: 83206 - RNA, 22 nt, Human
ucagugcccccuuccugauccu

SEQ ID NO: 83207 - RNA, 19 nt, Human
ucauucuugggguccuggg

SEQ ID NO: 83208 - RNA, 23 nt, Human
uccaaacugauuucaucccuggu

SEQ ID NO: 83209 - RNA, 20 nt, Human
uccaaugaacuuuacccaga

SEQ ID NO: 83210 - RNA, 26 nt, Human
uccacaugcaaguuugaaacagaacu

SEQ ID NO: 83211 - RNA, 26 nt, Human
uccacaugcaaguuugaaacagaacu

SEQ ID NO: 83212 - RNA, 19 nt, Human
uccacuccaacauuugaga

SEQ ID NO: 83213 - RNA, 19 nt, Human
uccacuccaacauuugaga

SEQ ID NO: 83214 - RNA, 19 nt, Human
uccacuccaacauuugaga

SEQ ID NO: 83215 - RNA, 19 nt, Human
uccacuccaacauuugaga

SEQ ID NO: 83216 - RNA, 19 nt, Human
uccacuuaacaugagaucu

SEQ ID NO: 83217 - RNA, 23 nt, Human
uccagugaucugcccaccuuggc

SEQ ID NO: 83218 - RNA, 23 nt, Human
uccauugaccacaucuccucuga

SEQ ID NO: 83219 - RNA, 23 nt, Human
uccauugaccacaucuccucuga

SEQ ID NO: 83220 - RNA, 24 nt, Human
ucccaaagugcugggauuacaggc

SEQ ID NO: 83221 - RNA, 24 nt, Human
ucccaaagugcugggauuacaggc

SEQ ID NO: 83222 - RNA, 24 nt, Human
ucccaaagugcugggauuacaggc

SEQ ID NO: 83223 - RNA, 24 nt, Human
ucccaaagugcugggauuacaggc

SEQ ID NO: 83224 - RNA, 26 nt, Human
ucccacacugcaauaaguugccuuau

SEQ ID NO: 83225 - RNA, 18 nt, Human
ucccagagcaacugugca

SEQ ID NO: 83226 - RNA, 24 nt, Human
ucccgggcugaagugauucuccug

SEQ ID NO: 83227 - RNA, 24 nt, Human
ucccgggcugaagugauucuccug

SEQ ID NO: 83228 - RNA, 24 nt, Human
ucccgggcugaagugauucuccug

SEQ ID NO: 83229 - RNA, 24 nt, Human
ucccgggcugaagugauucuccug

SEQ ID NO: 83230 - RNA, 21 nt, Human
ucccggguucuagcgauucuc

SEQ ID NO: 83231 - RNA, 24 nt, Human
ucccggguucuagcgauucuccug

SEQ ID NO: 83232 - RNA, 18 nt, Human
uccugagcgcaggggccc

SEQ ID NO: 83233 - RNA, 18 nt, Human
uccuuuuuuuuuuuuuuu

SEQ ID NO: 83234 - RNA, 18 nt, Human
uccuuuuuuuuuuuuuuu

SEQ ID NO: 83235 - RNA, 18 nt, Human
uccuuuuuuuuuuuuuuu

SEQ ID NO: 83236 - RNA, 18 nt, Human
uccuuuuuuuuuuuuuuu

SEQ ID NO: 83237 - RNA, 18 nt, Human
uccuuuuuuuuuuuuuuu

SEQ ID NO: 83238 - RNA, 18 nt, Human
uccuuuuuuuuuuuuuuu

SEQ ID NO: 83239 - RNA, 18 nt, Human
ucgcccaggcuggagugc

SEQ ID NO: 83240 - RNA, 18 nt, Human
ucgcuugagccuaggagg

SEQ ID NO: 83241 - RNA, 25 nt, Human
ucgguagcaacggugcuaugccuag

SEQ ID NO: 83242 - RNA, 22 nt, Human
ucuaaguuaucugaaaucagau

SEQ ID NO: 83243 - RNA, 22 nt, Human
ucuacagaucuuucaguuugca

SEQ ID NO: 83244 - RNA, 23 nt, Human
ucuagcgauucuccugccucagc

SEQ ID NO: 83245 - RNA, 23 nt, Human
ucuaguucagccauuuccugcug

SEQ ID NO: 83246 - RNA, 22 nt, Human
ucuaguuucucuucuuuuucuu

SEQ ID NO: 83247 - RNA, 22 nt, Human
ucucacugucacccaggcugga

SEQ ID NO: 83248 - RNA, 22 nt, Human
ucucacugucacccaggcugga

SEQ ID NO: 83249 - RNA, 22 nt, Human
ucucacugucacccaggcugga

SEQ ID NO: 83250 - RNA, 22 nt, Human
ucucacugucacccaggcugga

SEQ ID NO: 83251 - RNA, 24 nt, Human
ucucacugucacccaggcuggagu

SEQ ID NO: 83252 - RNA, 24 nt, Human
ucucacugucacccaggcuggagu

SEQ ID NO: 83253 - RNA, 24 nt, Human
ucucacugucacccaggcuggagu

SEQ ID NO: 83254 - RNA, 24 nt, Human
ucucacugucacccaggcuggagu

SEQ ID NO: 83255 - RNA, 18 nt, Human
ucucaugcuguaaugagc

SEQ ID NO: 83256 - RNA, 18 nt, Human
ucucaugcuguaaugagc

SEQ ID NO: 83257 - RNA, 23 nt, Human
ucucauuucccauuucucuuuca

SEQ ID NO: 83258 - RNA, 24 nt, Human
ucuccugccucagccuccugagua

SEQ ID NO: 83259 - RNA, 19 nt, Human
ucucgcucugucgcccagg

SEQ ID NO: 83260 - RNA, 22 nt, Human
ucucgcucugucgcccaggcug

SEQ ID NO: 83261 - RNA, 23 nt, Human
ucucgcucugucgcccaggcugg

SEQ ID NO: 83262 - RNA, 24 nt, Human
ucucgcucugucgcccaggcugga

SEQ ID NO: 83263 - RNA, 26 nt, Human
ucucgcucugucgcccaggcuggagu

SEQ ID NO: 83264 - RNA, 21 nt, Human
ucucuugaggccaagccacuc

SEQ ID NO: 83265 - RNA, 23 nt, Human
ucugaugugcuuuguucuggauu

SEQ ID NO: 83266 - RNA, 23 nt, Human
ucugcagacaccucaaacuuguc

SEQ ID NO: 83267 - RNA, 20 nt, Human
ucugcauuuccuggauuuga

SEQ ID NO: 83268 - RNA, 24 nt, Human
ucugucgcccaggcuggagugcaa

SEQ ID NO: 83269 - RNA, 24 nt, Human
ucugucuuuagugaguaauaaacu

SEQ ID NO: 83270 - RNA, 24 nt, Human
ucugucuuuagugaguaauaaacu

SEQ ID NO: 83271 - RNA, 25 nt, Human
ucuuagacagacacucgguagcaac

SEQ ID NO: 83272 - RNA, 21 nt, Human
ucuuuaucucuucacugcuag

SEQ ID NO: 83273 - RNA, 23 nt, Human
ugaaaaacacuuuuucuuccuuc

SEQ ID NO: 83274 - RNA, 23 nt, Human
ugaaaaacacuuuuucuuccuuc

SEQ ID NO: 83275 - RNA, 23 nt, Human
ugaaaaacacuuuuucuuccuuc

SEQ ID NO: 83276 - RNA, 18 nt, Human
ugaaagcuccuucaccac

SEQ ID NO: 83277 - RNA, 18 nt, Human
ugaaagcuccuucaccac

SEQ ID NO: 83278 - RNA, 21 nt, Human
ugaaauacugcuacucucuac

SEQ ID NO: 83279 - RNA, 22 nt, Human
ugaaauauucaugccagagguc

SEQ ID NO: 83280 - RNA, 22 nt, Human
ugaaauauucaugccagagguc

SEQ ID NO: 83281 - RNA, 22 nt, Human
ugaaauauucaugccagagguc

SEQ ID NO: 83282 - RNA, 23 nt, Human
ugaaauauucaugccagaggucc

SEQ ID NO: 83283 - RNA, 23 nt, Human
ugaaauauucaugccagaggucc

SEQ ID NO: 83284 - RNA, 23 nt, Human
ugaacacuuaguaaaagaaccag

SEQ ID NO: 83285 - RNA, 26 nt, Human
ugaagacucccagagcaacugugcau

SEQ ID NO: 83286 - RNA, 19 nt, Human
ugaagcugucaauucuggc

SEQ ID NO: 83287 - RNA, 20 nt, Human
ugaaggcccuuucuucuggu

SEQ ID NO: 83288 - RNA, 21 nt, Human
ugaauguuuucaucacuggaa

SEQ ID NO: 83289 - RNA, 20 nt, Human
ugacuggcauuugguuguac

SEQ ID NO: 83290 - RNA, 18 nt, Human
ugagacugguuuccugca

SEQ ID NO: 83291 - RNA, 21 nt, Human
ugagaggagcucccagggccu

SEQ ID NO: 83292 - RNA, 21 nt, Human
ugagaggagcucccagggccu

SEQ ID NO: 83293 - RNA, 21 nt, Human
ugagaggagcucccagggccu

SEQ ID NO: 83294 - RNA, 21 nt, Human
ugagaggagcucccagggccu

SEQ ID NO: 83295 - RNA, 23 nt, Human
ugagcagcagcuggacucugggc

SEQ ID NO: 83296 - RNA, 20 nt, Human
ugagccuaggaggucaaggc

SEQ ID NO: 83297 - RNA, 21 nt, Human
ugaggugauaggaucgcuuga

SEQ ID NO: 83298 - RNA, 19 nt, Human
ugaguccaguuucguugcc

SEQ ID NO: 83299 - RNA, 18 nt, Human
ugagugguuaaaauguca

SEQ ID NO: 83300 - RNA, 20 nt, Human
ugagugguuaaaaugucacu

SEQ ID NO: 83301 - RNA, 25 nt, Human
ugauagacaaaaccuagagccuccu

SEQ ID NO: 83302 - RNA, 20 nt, Human
ugauccucagcgcuucccuc

SEQ ID NO: 83303 - RNA, 24 nt, Human
ugaucugcccaccuuggccuccca

SEQ ID NO: 83304 - RNA, 24 nt, Human
ugaucugcccaccuuggccuccca

SEQ ID NO: 83305 - RNA, 24 nt, Human
ugaucugcccaccuuggccuccca

SEQ ID NO: 83306 - RNA, 24 nt, Human
ugaucugcccaccuuggccuccca

SEQ ID NO: 83307 - RNA, 18 nt, Human
ugauuucaucccugguuc

SEQ ID NO: 83308 - RNA, 20 nt, Human
ugauuuggagugaacucuuu

SEQ ID NO: 83309 - RNA, 21 nt, Human
ugauuuucaauagcucuucaa

SEQ ID NO: 83310 - RNA, 21 nt, Human
ugcaaaaccccuaaucuaagc

SEQ ID NO: 83311 - RNA, 24 nt, Human
ugcaaaacccuuucuccacuuaac

SEQ ID NO: 83312 - RNA, 18 nt, Human
ugcccuugcacacugggg

SEQ ID NO: 83313 - RNA, 18 nt, Human
ugcccuugcacacugggg

SEQ ID NO: 83314 - RNA, 18 nt, Human
ugcccuugcacacugggg

SEQ ID NO: 83315 - RNA, 18 nt, Human
ugcccuugcacacugggg

SEQ ID NO: 83316 - RNA, 24 nt, Human
ugccucagccuccugaguagcugg

SEQ ID NO: 83317 - RNA, 18 nt, Human
ugccugacuggcauuugg

SEQ ID NO: 83318 - RNA, 21 nt, Human
ugccuuagccaccugaguagc

SEQ ID NO: 83319 - RNA, 21 nt, Human
ugccuuagccaccugaguagc

SEQ ID NO: 83320 - RNA, 21 nt, Human
ugccuuagccaccugaguagc

SEQ ID NO: 83321 - RNA, 21 nt, Human
ugccuuagccaccugaguagc

SEQ ID NO: 83322 - RNA, 24 nt, Human
ugccuuagccaccugaguagcugg

SEQ ID NO: 83323 - RNA, 24 nt, Human
ugccuuagccaccugaguagcugg

SEQ ID NO: 83324 - RNA, 24 nt, Human
ugccuuagccaccugaguagcugg

SEQ ID NO: 83325 - RNA, 20 nt, Human
ugcuaccaaguuuauuugca

SEQ ID NO: 83326 - RNA, 20 nt, Human
ugcuaccaaguuuauuugca

SEQ ID NO: 83327 - RNA, 20 nt, Human
ugcuaccaaguuuauuugca

SEQ ID NO: 83328 - RNA, 20 nt, Human
ugcuaccaaguuuauuugca

SEQ ID NO: 83329 - RNA, 24 nt, Human
ugcugggauuacaggcgugagcca

SEQ ID NO: 83330 - RNA, 24 nt, Human
ugcugggauuacaggcgugagcca

SEQ ID NO: 83331 - RNA, 24 nt, Human
ugcugggauuacaggcgugagcca

SEQ ID NO: 83332 - RNA, 24 nt, Human
ugcugggauuacaggcgugagcca

SEQ ID NO: 83333 - RNA, 21 nt, Human
ugcuuuguccucagaguucuc

SEQ ID NO: 83334 - RNA, 23 nt, Human
uggaaccuacuucauuaauauug

SEQ ID NO: 83335 - RNA, 23 nt, Human
uggaaccuauuucauuaauacug

SEQ ID NO: 83336 - RNA, 19 nt, Human
uggaauguucucauuuccc

SEQ ID NO: 83337 - RNA, 23 nt, Human
uggaauguucucauuucccauuu

SEQ ID NO: 83338 - RNA, 21 nt, Human
uggacacugagacugguuucc

SEQ ID NO: 83339 - RNA, 23 nt, Human
uggagcccacuucauuaguacug

SEQ ID NO: 83340 - RNA, 23 nt, Human
uggagugcaauggcgcgaucucg

SEQ ID NO: 83341 - RNA, 24 nt, Human
uggagugcaauggcgcgaucucgg

SEQ ID NO: 83342 - RNA, 24 nt, Human
uggagugccgugguaugaucuugg

SEQ ID NO: 83343 - RNA, 24 nt, Human
uggagugccgugguaugaucuugg

SEQ ID NO: 83344 - RNA, 24 nt, Human
uggagugccgugguaugaucuugg

SEQ ID NO: 83345 - RNA, 24 nt, Human
uggagugccgugguaugaucuugg

SEQ ID NO: 83346 - RNA, 18 nt, Human
uggauacuuaaagccuuc

SEQ ID NO: 83347 - RNA, 25 nt, Human
uggaugccucucagcugcacgcuuc

SEQ ID NO: 83348 - RNA, 25 nt, Human
uggaugccucucagcugcacgcuuc

SEQ ID NO: 83349 - RNA, 25 nt, Human
uggcacugguagagugcuacacugu

SEQ ID NO: 83350 - RNA, 25 nt, Human
uggcacugguagagugcuacacugu

SEQ ID NO: 83351 - RNA, 24 nt, Human
uggccaggcugguuucgaacuccu

SEQ ID NO: 83352 - RNA, 24 nt, Human
uggccaggcugguuucgaacuccu

SEQ ID NO: 83353 - RNA, 24 nt, Human
uggccaggcugguuucgaacuccu

SEQ ID NO: 83354 - RNA, 24 nt, Human
uggccaggcugguuucgaacuccu

SEQ ID NO: 83355 - RNA, 21 nt, Human
uggcccagacucuuccagcug

SEQ ID NO: 83356 - RNA, 19 nt, Human
uggccuguaccuguggcug

SEQ ID NO: 83357 - RNA, 27 nt, Human
uggcuccacaugcaaguuuggggaacc

SEQ ID NO: 83358 - RNA, 27 nt, Human
uggcuccacaugcaaguuuggggaacc

SEQ ID NO: 83359 - RNA, 20 nt, Human
uggcucuguaccuguggcug

SEQ ID NO: 83360 - RNA, 20 nt, Human
uggcucuguaccuguggcug

SEQ ID NO: 83361 - RNA, 20 nt, Human
uggcucuguaccuguggcug

SEQ ID NO: 83362 - RNA, 22 nt, Human
uggcugcagucaguaguggcug

SEQ ID NO: 83363 - RNA, 22 nt, Human
uggcugcagucaguaguggcug

SEQ ID NO: 83364 - RNA, 23 nt, Human
ugggagacugaggugauaggauc

SEQ ID NO: 83365 - RNA, 22 nt, Human
ugggaucugucauuuuauagau

SEQ ID NO: 83366 - RNA, 22 nt, Human
ugggaucugucauuuuauagau

SEQ ID NO: 83367 - RNA, 22 nt, Human
ugggaucugucauuuuauagau

SEQ ID NO: 83368 - RNA, 22 nt, Human
ugggaucugucauuuuauagau

SEQ ID NO: 83369 - RNA, 18 nt, Human
ugggauuacaggcgugag

SEQ ID NO: 83370 - RNA, 18 nt, Human
ugggauuacaggcgugag

SEQ ID NO: 83371 - RNA, 18 nt, Human
ugggauuacaggcgugag

SEQ ID NO: 83372 - RNA, 18 nt, Human
ugggauuacaggcgugag

SEQ ID NO: 83373 - RNA, 22 nt, Human
ugggauuacaggcgugagccac

SEQ ID NO: 83374 - RNA, 22 nt, Human
ugggauuacaggcgugagccac

SEQ ID NO: 83375 - RNA, 22 nt, Human
ugggauuacaggcgugagccac

SEQ ID NO: 83376 - RNA, 22 nt, Human
ugggauuacaggcgugagccac

SEQ ID NO: 83377 - RNA, 23 nt, Human
ugggauuacaggcgugagccacc

SEQ ID NO: 83378 - RNA, 23 nt, Human
ugggauuacaggcgugagccacc

SEQ ID NO: 83379 - RNA, 23 nt, Human
ugggauuacaggcgugagccacc

SEQ ID NO: 83380 - RNA, 23 nt, Human
ugggauuacaggcgugagccacc

SEQ ID NO: 83381 - RNA, 24 nt, Human
ugggauuacaggcgugagccacca

SEQ ID NO: 83382 - RNA, 24 nt, Human
ugggauuacaggcgugagccacca

SEQ ID NO: 83383 - RNA, 24 nt, Human
ugggauuacaggcgugagccacca

SEQ ID NO: 83384 - RNA, 24 nt, Human
ugggauuacaggcgugagccacca

SEQ ID NO: 83385 - RNA, 25 nt, Human
ugggauuacaggcgugagccaccau

SEQ ID NO: 83386 - RNA, 25 nt, Human
ugggauuacaggcgugagccaccau

SEQ ID NO: 83387 - RNA, 25 nt, Human
ugggauuacaggcgugagccaccau

SEQ ID NO: 83388 - RNA, 25 nt, Human
ugggauuacaggcgugagccaccau

SEQ ID NO: 83389 - RNA, 21 nt, Human
ugggauuacagguguccacca

SEQ ID NO: 83390 - RNA, 21 nt, Human
ugggauuacagguguccacca

SEQ ID NO: 83391 - RNA, 21 nt, Human
ugggauuacagguguccacca

SEQ ID NO: 83392 - RNA, 21 nt, Human
ugggauuacagguguccacca

SEQ ID NO: 83393 - RNA, 24 nt, Human
ugggauuacagguguccaccacca

SEQ ID NO: 83394 - RNA, 24 nt, Human
ugggauuacagguguccaccacca

SEQ ID NO: 83395 - RNA, 24 nt, Human
ugggauuacagguguccaccacca

SEQ ID NO: 83396 - RNA, 24 nt, Human
ugggauuacagguguccaccacca

SEQ ID NO: 83397 - RNA, 25 nt, Human
ugggauuacagguguccaccaccau

SEQ ID NO: 83398 - RNA, 25 nt, Human
ugggauuacagguguccaccaccau

SEQ ID NO: 83399 - RNA, 25 nt, Human
ugggauuacagguguccaccaccau

SEQ ID NO: 83400 - RNA, 25 nt, Human
ugggauuacagguguccaccaccau

SEQ ID NO: 83401 - RNA, 18 nt, Human
uggggaacuuucaaugca

SEQ ID NO: 83402 - RNA, 24 nt, Human
ugggguuucaccauguuggccagg

SEQ ID NO: 83403 - RNA, 24 nt, Human
ugggguuucaccauguuggccagg

SEQ ID NO: 83404 - RNA, 24 nt, Human
ugggguuucaccauguuggccagg

SEQ ID NO: 83405 - RNA, 24 nt, Human
ugggguuucaccauguuggccagg

SEQ ID NO: 83406 - RNA, 23 nt, Human
uggguggacaccugugccaaggg

SEQ ID NO: 83407 - RNA, 23 nt, Human
uggguggacaccugugccaaggg

SEQ ID NO: 83408 - RNA, 22 nt, Human
ugguagaagacuuccuccucag

SEQ ID NO: 83409 - RNA, 24 nt, Human
uggucaggcuggucuggaacuccu

SEQ ID NO: 83410 - RNA, 21 nt, Human
uggugcgggguccaggaaguc

SEQ ID NO: 83411 - RNA, 20 nt, Human
ugguguuuucuggcaaacuu

SEQ ID NO: 83412 - RNA, 20 nt, Human
ugucgcccaggcuggagugc

SEQ ID NO: 83413 - RNA, 21 nt, Human
ugugccacauggcuccacaug

SEQ ID NO: 83414 - RNA, 21 nt, Human
ugugccacauggcuccacaug

SEQ ID NO: 83415 - RNA, 23 nt, Human
ugugccacauggcuccacaugca

SEQ ID NO: 83416 - RNA, 24 nt, Human
ugugccacauggcuccacaugcag

SEQ ID NO: 83417 - RNA, 20 nt, Human
ugugccugacuggcauuugg

SEQ ID NO: 83418 - RNA, 19 nt, Human
ugugcuuuguucuggauuu

SEQ ID NO: 83419 - RNA, 20 nt, Human
uguggcuuguaccuguggcu

SEQ ID NO: 83420 - RNA, 21 nt, Human
uguuugcuuuuauuacagaau

SEQ ID NO: 83421 - RNA, 25 nt, Human
uguuuuguuuuguuuuguuuugauu

SEQ ID NO: 83422 - RNA, 25 nt, Human
uguuuuguuuuguuuuguuuugauu

SEQ ID NO: 83423 - RNA, 27 nt, Human
uuaacaaaugacuugaugggaaaaagu

SEQ ID NO: 83424 - RNA, 19 nt, Human
uuaagaaaccuuuccuagu

SEQ ID NO: 83425 - RNA, 19 nt, Human
uuaagaaaccuuuccuagu

SEQ ID NO: 83426 - RNA, 19 nt, Human
uuaagaaaccuuuccuagu

SEQ ID NO: 83427 - RNA, 19 nt, Human
uuaagaaaccuuuccuagu

SEQ ID NO: 83428 - RNA, 20 nt, Human
uuacuuuaccaaauaacaag

SEQ ID NO: 83429 - RNA, 18 nt, Human
uuaguagagacggaguuu

SEQ ID NO: 83430 - RNA, 18 nt, Human
uuaguagagaugggguuu

SEQ ID NO: 83431 - RNA, 18 nt, Human
uuaguagagaugggguuu

SEQ ID NO: 83432 - RNA, 18 nt, Human
uuaguagagaugggguuu

SEQ ID NO: 83433 - RNA, 18 nt, Human
uuaguagagaugggguuu

SEQ ID NO: 83434 - RNA, 22 nt, Human
uuaguagagaugggguuucacc

SEQ ID NO: 83435 - RNA, 22 nt, Human
uuaguagagaugggguuucacc

SEQ ID NO: 83436 - RNA, 22 nt, Human
uuaguagagaugggguuucacc

SEQ ID NO: 83437 - RNA, 22 nt, Human
uuaguagagaugggguuucacc

SEQ ID NO: 83438 - RNA, 24 nt, Human
uuaguagagaugggguuucaccau

SEQ ID NO: 83439 - RNA, 24 nt, Human
uuaguagagaugggguuucaccau

SEQ ID NO: 83440 - RNA, 24 nt, Human
uuaguagagaugggguuucaccau

SEQ ID NO: 83441 - RNA, 24 nt, Human
uuaguagagaugggguuucaccau

SEQ ID NO: 83442 - RNA, 21 nt, Human
uuaguuuuaacaaaugacuug

SEQ ID NO: 83443 - RNA, 21 nt, Human
uucaauuggggaacuuucaau

SEQ ID NO: 83444 - RNA, 22 nt, Human
uucacugcccuugcacacuggg

SEQ ID NO: 83445 - RNA, 22 nt, Human
uucacugcccuugcacacuggg

SEQ ID NO: 83446 - RNA, 22 nt, Human
uucacugcccuugcacacuggg

SEQ ID NO: 83447 - RNA, 22 nt, Human
uucacugcccuugcacacuggg

SEQ ID NO: 83448 - RNA, 19 nt, Human
uucccccacggacacucag

SEQ ID NO: 83449 - RNA, 20 nt, Human
uuccuggauuugaaaacgga

SEQ ID NO: 83450 - RNA, 18 nt, Human
uucuagcgauucuccugc

SEQ ID NO: 83451 - RNA, 20 nt, Human
uucucauucugaauagaauc

SEQ ID NO: 83452 - RNA, 20 nt, Human
uucugcuuauuccauucuuu

SEQ ID NO: 83453 - RNA, 21 nt, Human
uucuuuagaaaucuagcaaau

SEQ ID NO: 83454 - RNA, 21 nt, Human
uucuuuagaaaucuagcaaau

SEQ ID NO: 83455 - RNA, 21 nt, Human
uucuuuagaaaucuagcaaau

SEQ ID NO: 83456 - RNA, 21 nt, Human
uucuuuagaaaucuagcaaau

SEQ ID NO: 83457 - RNA, 23 nt, Human
uugagacagucucgcucugucgc

SEQ ID NO: 83458 - RNA, 20 nt, Human
uugcaugguaucccucugcc

SEQ ID NO: 83459 - RNA, 19 nt, Human
uuggaccuuggugguuucu

SEQ ID NO: 83460 - RNA, 19 nt, Human
uuggaccuuggugguuucu

SEQ ID NO: 83461 - RNA, 18 nt, Human
uuggccucccaaagugcu

SEQ ID NO: 83462 - RNA, 18 nt, Human
uuggccucccaaagugcu

SEQ ID NO: 83463 - RNA, 18 nt, Human
uuggccucccaaagugcu

SEQ ID NO: 83464 - RNA, 18 nt, Human
uuggccucccaaagugcu

SEQ ID NO: 83465 - RNA, 24 nt, Human
uugggagacugaggugauaggauc

SEQ ID NO: 83466 - RNA, 25 nt, Human
uuguaagcucauucuugggguccgu

SEQ ID NO: 83467 - RNA, 23 nt, Human
uuguauuuuuaguagagacggag

SEQ ID NO: 83468 - RNA, 21 nt, Human
uuuaucucuucacugcuagaa

SEQ ID NO: 83469 - RNA, 22 nt, Human
uuucaauuggggaacuuucaau

SEQ ID NO: 83470 - RNA, 21 nt, Human
uuucaccacguuggucaggcu

SEQ ID NO: 83471 - RNA, 24 nt, Human
uuucaccauguuggccaggcuggu

SEQ ID NO: 83472 - RNA, 24 nt, Human
uuucaccauguuggccaggcuggu

SEQ ID NO: 83473 - RNA, 24 nt, Human
uuucaccauguuggccaggcuggu

SEQ ID NO: 83474 - RNA, 24 nt, Human
uuucaccauguuggccaggcuggu

SEQ ID NO: 83475 - RNA, 24 nt, Human
uuucugcuuauuccauucuuuucu

SEQ ID NO: 83476 - RNA, 18 nt, Human
uuucuggacgcuuuugcu

SEQ ID NO: 83477 - RNA, 20 nt, Human
uuucuguauuuuuaguagag

SEQ ID NO: 83478 - RNA, 20 nt, Human
uuucuguauuuuuaguagag

SEQ ID NO: 83479 - RNA, 20 nt, Human
uuucuguauuuuuaguagag

SEQ ID NO: 83480 - RNA, 20 nt, Human
uuucuguauuuuuaguagag

SEQ ID NO: 83481 - RNA, 21 nt, Human
uuugaaacagaacuacccuga

SEQ ID NO: 83482 - RNA, 20 nt, Human
uuugcaaaacccuuucucca

SEQ ID NO: 83483 - RNA, 24 nt, Human
uuugcaauucaguacaauuaggug

SEQ ID NO: 83484 - RNA, 21 nt, Human
uuugccaauauuaccugguua

SEQ ID NO: 83485 - RNA, 22 nt, Human
uuuggggucuucagcauuauua

SEQ ID NO: 83486 - RNA, 23 nt, Human
uuuggggucuucagcauuauuag

SEQ ID NO: 83487 - RNA, 21 nt, Human
uuuguucacauucaaaaguga

SEQ ID NO: 83488 - RNA, 19 nt, Human
uuuguuuuguuuuguuuug

SEQ ID NO: 83489 - RNA, 24 nt, Human
uuuuaaaaucuucucaggugaaaa

SEQ ID NO: 83490 - RNA, 24 nt, Human
uuuuaaaaucuucucaggugaaaa

SEQ ID NO: 83491 - RNA, 24 nt, Human
uuuuaaaaucuucucaggugaaaa

SEQ ID NO: 83492 - RNA, 24 nt, Human
uuuuaaaaucuucucaggugaaaa

SEQ ID NO: 83493 - RNA, 22 nt, Human
uuuugaacugccaaaucugcuu

SEQ ID NO: 83494 - RNA, 24 nt, Human
uuuuuaguagagacggaguuucac

SEQ ID NO: 83495 - RNA, 24 nt, Human
uuuuuaguagagaugggguuucac

SEQ ID NO: 83496 - RNA, 24 nt, Human
uuuuuaguagagaugggguuucac

SEQ ID NO: 83497 - RNA, 24 nt, Human
uuuuuaguagagaugggguuucac

SEQ ID NO: 83498 - RNA, 24 nt, Human
uuuuuaguagagaugggguuucac

SEQ ID NO: 83499 - RNA, 20 nt, Human
uuuuuguauuuuuaguagag

SEQ ID NO: 83500 - RNA, 27 nt, Human
uuuuuuuuuuuuugagccacagucuca

SEQ ID NO: 83501 - RNA, 27 nt, Human
uuuuuuuuuuuuugagccacagucuca

SEQ ID NO: 83502 - RNA, 27 nt, Human
uuuuuuuuuuuuugagccacagucuca

SEQ ID NO: 83503 - RNA, 18 nt, Human
uuuuuuuuuuuuuuuuug

SEQ ID NO: 83504 - RNA, 18 nt, Human
uuuuuuuuuuuuuuuuug

SEQ ID NO: 83505 - RNA, 18 nt, Human
uuuuuuuuuuuuuuuuug

SEQ ID NO: 83506 - RNA, 22 nt, Human
aaaagacacccgaggcgcagca

SEQ ID NO: 83507 - RNA, 24 nt, Human
aaaguguugggauuacaggcauga

SEQ ID NO: 83508 - RNA, 22 nt, Human
aacugaagcaaaaguauaccaa

SEQ ID NO: 83509 - RNA, 25 nt, Human
aagcacuccucccaccucagcuucu

SEQ ID NO: 83510 - RNA, 18 nt, Human
aaguauaccaauacggaa

SEQ ID NO: 83511 - RNA, 21 nt, Human
aaguguugggauuacaggcau

SEQ ID NO: 83512 - RNA, 26 nt, Human
aaguguugggauuacaggcaugagcc

SEQ ID NO: 83513 - RNA, 25 nt, Human
aaucuguccccucacgcuucucccg

SEQ ID NO: 83514 - RNA, 23 nt, Human
accucagcuucucaaaguguugg

SEQ ID NO: 83515 - RNA, 18 nt, Human
aggcaugagccaccgagc

SEQ ID NO: 83516 - RNA, 21 nt, Human
caaaagacacccgaggcgcag

SEQ ID NO: 83517 - RNA, 23 nt, Human
caaaguguugggauuacaggcau

SEQ ID NO: 83518 - RNA, 24 nt, Human
caaaguguugggauuacaggcaug

SEQ ID NO: 83519 - RNA, 21 nt, Human
cacccgaggcgcagcagaggc

SEQ ID NO: 83520 - RNA, 24 nt, Human
caccgccgcaaaagacacccgagg

SEQ ID NO: 83521 - RNA, 24 nt, Human
cacuccucccaccucagcuucuca

SEQ ID NO: 83522 - RNA, 23 nt, Human
cagcagaggcgcagcagugccac

SEQ ID NO: 83523 - RNA, 18 nt, Human
cagcagugccacagcggc

SEQ ID NO: 83524 - RNA, 25 nt, Human
cagugccacagcggcuccgccucug

SEQ ID NO: 83525 - RNA, 20 nt, Human
cauugugcaacauaaguacu

SEQ ID NO: 83526 - RNA, 20 nt, Human
ccaccgccgcaaaagacacc

SEQ ID NO: 83527 - RNA, 24 nt, Human
cccuauguugcccaggcuggucuu

SEQ ID NO: 83528 - RNA, 22 nt, Human
ccuauguugcccaggcuggucu

SEQ ID NO: 83529 - RNA, 18 nt, Human
ccucaagcacuccucccc

SEQ ID NO: 83530 - RNA, 19 nt, Human
ccucccaccucagcuucuc

SEQ ID NO: 83531 - RNA, 19 nt, Human
cgauacacaaacgcugagg

SEQ ID NO: 83532 - RNA, 23 nt, Human
cgccggucacaaaucuguccccu

SEQ ID NO: 83533 - RNA, 19 nt, Human
cucaagcacuccucccacc

SEQ ID NO: 83534 - RNA, 24 nt, Human
cucaagcacuccucccaccucagc

SEQ ID NO: 83535 - RNA, 24 nt, Human
cuccucccaccucagcuucucaaa

SEQ ID NO: 83536 - RNA, 27 nt, Human
cuccuggccucaagcacuccucccacc

SEQ ID NO: 83537 - RNA, 20 nt, Human
cuuuuccccuuuuuuuuuuu

SEQ ID NO: 83538 - RNA, 22 nt, Human
cuuuuccccuuuuuuuuuuucu

SEQ ID NO: 83539 - RNA, 20 nt, Human
gagcucagccaaagauguuu

SEQ ID NO: 83540 - RNA, 18 nt, Human
gauuacaggcaugagcca

SEQ ID NO: 83541 - RNA, 21 nt, Human
gauuacaggcaugagccaccg

SEQ ID NO: 83542 - RNA, 24 nt, Human
gauuacaggcaugagccaccgagc

SEQ ID NO: 83543 - RNA, 24 nt, Human
gcgccggucacaaaucuguccccu

SEQ ID NO: 83544 - RNA, 23 nt, Human
gcuggucuugaacuccuggccuc

SEQ ID NO: 83545 - RNA, 22 nt, Human
ggauuacaggcaugagccaccg

SEQ ID NO: 83546 - RNA, 19 nt, Human
ggcaugagccaccgagcuc

SEQ ID NO: 83547 - RNA, 24 nt, Human
ggcuggucuugaacuccuggccuc

SEQ ID NO: 83548 - RNA, 24 nt, Human
gggggucucccuauguugcccagg

SEQ ID NO: 83549 - RNA, 23 nt, Human
uaaacuggaaagguuaagcguca

SEQ ID NO: 83550 - RNA, 23 nt, Human
uauguugcccaggcuggucuuga

SEQ ID NO: 83551 - RNA, 24 nt, Human
uauguugcccaggcuggucuugaa

SEQ ID NO: 83552 - RNA, 23 nt, Human
ucaaaguguugggauuacaggca

SEQ ID NO: 83553 - RNA, 24 nt, Human
ucaaaguguugggauuacaggcau

SEQ ID NO: 83554 - RNA, 27 nt, Human
uccccuuuuuuuuuuucuucguaaaga

SEQ ID NO: 83555 - RNA, 24 nt, Human
ucucaaaguguugggauuacaggc

SEQ ID NO: 83556 - RNA, 23 nt, Human
ucucccuauguugcccaggcugg

SEQ ID NO: 83557 - RNA, 24 nt, Human
ucucccuauguugcccaggcuggu

SEQ ID NO: 83558 - RNA, 22 nt, Human
ucuguccccucacgcuucuccc

SEQ ID NO: 83559 - RNA, 21 nt, Human
ucuugaacuccuggccucaag

SEQ ID NO: 83560 - RNA, 22 nt, Human
ugaagcaaaaguauaccaauac

SEQ ID NO: 83561 - RNA, 18 nt, Human
ugagguaaauuugaaacu

SEQ ID NO: 83562 - RNA, 24 nt, Human
ugcccaggcuggucuugaacuccu

SEQ ID NO: 83563 - RNA, 21 nt, Human
uggccucaagcacuccuccca

SEQ ID NO: 83564 - RNA, 18 nt, Human
ugggauuacaggcaugag

SEQ ID NO: 83565 - RNA, 19 nt, Human
ugggauuacaggcaugagc

SEQ ID NO: 83566 - RNA, 21 nt, Human
ugggauuacaggcaugagcca

SEQ ID NO: 83567 - RNA, 22 nt, Human
ugggauuacaggcaugagccac

SEQ ID NO: 83568 - RNA, 23 nt, Human
ugggauuacaggcaugagccacc

SEQ ID NO: 83569 - RNA, 24 nt, Human
ugggauuacaggcaugagccaccg

SEQ ID NO: 83570 - RNA, 26 nt, Human
ugggauuacaggcaugagccaccgag

SEQ ID NO: 83571 - RNA, 20 nt, Human
ugguaaauaaguccgcuccu

SEQ ID NO: 83572 - RNA, 22 nt, Human
ugugguuugaaauuauauucca

SEQ ID NO: 83573 - RNA, 21 nt, Human
uuugaaauuauauuccagucu

SEQ ID NO: 83574 - RNA, 20 nt, Human
uuuuccccuuuuuuuuuuuc

SEQ ID NO: 83575 - RNA, 23 nt, Human
aaucuaaugaauuauuuuugacu

SEQ ID NO: 83576 - RNA, 24 nt, Human
cauuuugaucuuuuaccauucauu

SEQ ID NO: 83577 - RNA, 20 nt, Human
cugaaagcaaucauuuuacc

SEQ ID NO: 83578 - RNA, 22 nt, Human
cugaaagcaaucauuuuaccau

SEQ ID NO: 83579 - RNA, 19 nt, Human
cuuaacuugaccucccagg

SEQ ID NO: 83580 - RNA, 22 nt, Human
uaacuugaccucccaggaacau

SEQ ID NO: 83581 - RNA, 20 nt, Human
uacaaguacauguccaugcu

SEQ ID NO: 83582 - RNA, 24 nt, Human
ucuacaaguacauguccaugcuaa

SEQ ID NO: 83583 - RNA, 23 nt, Human
ugacucuuaacuugaccucccag

SEQ ID NO: 83584 - RNA, 18 nt, Human
uuaaguggaugguuaauu

SEQ ID NO: 83585 - RNA, 23 nt, Human
uuuuuuuuuguaagugaaaacug

SEQ ID NO: 83586 - RNA, 21 nt, Human
aaguggcccuggagcaggggu

SEQ ID NO: 83587 - RNA, 19 nt, Human
acacacaugcagacgcuug

SEQ ID NO: 83588 - RNA, 19 nt, Human
acacccggcccacaucuga

SEQ ID NO: 83589 - RNA, 21 nt, Human
accacacugccagccuuggga

SEQ ID NO: 83590 - RNA, 19 nt, Human
acccagcccugcacacacc

SEQ ID NO: 83591 - RNA, 18 nt, Human
acugagcucugggcgggg

SEQ ID NO: 83592 - RNA, 21 nt, Human
acugcccucuggcucugucca

SEQ ID NO: 83593 - RNA, 24 nt, Human
agcaacaccacacugccagccuug

SEQ ID NO: 83594 - RNA, 20 nt, Human
agcccgcgccgcccgcccag

SEQ ID NO: 83595 - RNA, 20 nt, Human
agcggggaggggggucugga

SEQ ID NO: 83596 - RNA, 20 nt, Human
aggaggcaggggugggggug

SEQ ID NO: 83597 - RNA, 19 nt, Human
aggcagcggggaggggggu

SEQ ID NO: 83598 - RNA, 21 nt, Human
aggcagcggggaggggggucu

SEQ ID NO: 83599 - RNA, 23 nt, Human
aggcagcggggaggggggucugg

SEQ ID NO: 83600 - RNA, 23 nt, Human
aggcuggcuacugagcucugggc

SEQ ID NO: 83601 - RNA, 21 nt, Human
caagacucucaagccacccga

SEQ ID NO: 83602 - RNA, 22 nt, Human
caaggccacccccuccuaagga

SEQ ID NO: 83603 - RNA, 21 nt, Human
cacagcuggaggcagaggacc

SEQ ID NO: 83604 - RNA, 19 nt, Human
cacagggugaagcccccuc

SEQ ID NO: 83605 - RNA, 21 nt, Human
cacauccggggcagccaugcc

SEQ ID NO: 83606 - RNA, 19 nt, Human
caccacacugccagccuug

SEQ ID NO: 83607 - RNA, 26 nt, Human
caccacacugccagccuuggaggguu

SEQ ID NO: 83608 - RNA, 24 nt, Human
cacccggcccacaucugaucacac

SEQ ID NO: 83609 - RNA, 23 nt, Human
cacggcggggacgcgaggacugg

SEQ ID NO: 83610 - RNA, 24 nt, Human
cacggcucugccucaaggccaccc

SEQ ID NO: 83611 - RNA, 19 nt, Human
cagcaguggggcugcccca

SEQ ID NO: 83612 - RNA, 18 nt, Human
cagcccgcgccgcccgcc

SEQ ID NO: 83613 - RNA, 20 nt, Human
cagccgcccaggccucgccg

SEQ ID NO: 83614 - RNA, 19 nt, Human
caggacccaggcuggcuac

SEQ ID NO: 83615 - RNA, 21 nt, Human
cagggccagcacacucagccc

SEQ ID NO: 83616 - RNA, 23 nt, Human
cagggcuccugggcccacaacuc

SEQ ID NO: 83617 - RNA, 23 nt, Human
ccacccgagccuccggagcagcc

SEQ ID NO: 83618 - RNA, 19 nt, Human
ccacugcccucuggcucug

SEQ ID NO: 83619 - RNA, 19 nt, Human
ccacugcccucuggcucug

SEQ ID NO: 83620 - RNA, 21 nt, Human
ccaggcuggcuacugagcucu

SEQ ID NO: 83621 - RNA, 21 nt, Human
cccaagacucucaagccaccc

SEQ ID NO: 83622 - RNA, 23 nt, Human
cccaagacucucaagccacccuu

SEQ ID NO: 83623 - RNA, 19 nt, Human
cccagcccugcacacaccc

SEQ ID NO: 83624 - RNA, 24 nt, Human
cccagcccugcacacacccggccg

SEQ ID NO: 83625 - RNA, 21 nt, Human
ccccaagcccucgagaagccc

SEQ ID NO: 83626 - RNA, 22 nt, Human
ccccaagcccucgagaagcccu

SEQ ID NO: 83627 - RNA, 20 nt, Human
cccccaagcccucgagaagc

SEQ ID NO: 83628 - RNA, 20 nt, Human
cccccaugcugcuccaggcg

SEQ ID NO: 83629 - RNA, 18 nt, Human
cccgcgaggcccccugcc

SEQ ID NO: 83630 - RNA, 19 nt, Human
cccgcgccgcccgcccagg

SEQ ID NO: 83631 - RNA, 19 nt, Human
cccgggccgcgccgcccgc

SEQ ID NO: 83632 - RNA, 18 nt, Human
cccugcacacacccggcc

SEQ ID NO: 83633 - RNA, 19 nt, Human
ccgcccgcccaggcccagc

SEQ ID NO: 83634 - RNA, 20 nt, Human
ccgcgaggcccccugccagg

SEQ ID NO: 83635 - RNA, 22 nt, Human
ccgcgccgcccgcaacggccgc

SEQ ID NO: 83636 - RNA, 26 nt, Human
ccgcgcgcgcccgggccgcgccgccc

SEQ ID NO: 83637 - RNA, 28 nt, Human
ccggagccucccaagacucucaagccaa

SEQ ID NO: 83638 - RNA, 19 nt, Human
ccggcagccgcagggcucc

SEQ ID NO: 83639 - RNA, 18 nt, Human
ccucaaggccacccccuc

SEQ ID NO: 83640 - RNA, 19 nt, Human
ccucaaggccacccccucc

SEQ ID NO: 83641 - RNA, 24 nt, Human
ccuccggagcagcccgcgccgccc

SEQ ID NO: 83642 - RNA, 23 nt, Human
ccugccugcugcgguccuggaag

SEQ ID NO: 83643 - RNA, 18 nt, Human
cgcccaggcccagccgcc

SEQ ID NO: 83644 - RNA, 18 nt, Human
cgcccaggccucgccgcu

SEQ ID NO: 83645 - RNA, 22 nt, Human
cgcccggagccucccaagacuc

SEQ ID NO: 83646 - RNA, 18 nt, Human
cgcccgggccgcgccgcc

SEQ ID NO: 83647 - RNA, 24 nt, Human
cggaacccgagcggggccuaccgg

SEQ ID NO: 83648 - RNA, 20 nt, Human
cggaggggcgaccugcgggg

SEQ ID NO: 83649 - RNA, 19 nt, Human
cggcagccgcagggcuccu

SEQ ID NO: 83650 - RNA, 21 nt, Human
cuccacacacuuggaccagca

SEQ ID NO: 83651 - RNA, 23 nt, Human
cugcacacacccggcccacaucu

SEQ ID NO: 83652 - RNA, 23 nt, Human
cugccugcugcgguccuggaagc

SEQ ID NO: 83653 - RNA, 20 nt, Human
cugcgguccuggaagcccgu

SEQ ID NO: 83654 - RNA, 22 nt, Human
cuggaagcccgucugaugcuga

SEQ ID NO: 83655 - RNA, 23 nt, Human
cuggaggaggcaggggugggggu

SEQ ID NO: 83656 - RNA, 24 nt, Human
cuggaggaggcaggggugggggug

SEQ ID NO: 83657 - RNA, 20 nt, Human
cugggcggggguaggggggu

SEQ ID NO: 83658 - RNA, 19 nt, Human
gaagcccccucggccacau

SEQ ID NO: 83659 - RNA, 22 nt, Human
gacaggugccaccugucaccag

SEQ ID NO: 83660 - RNA, 18 nt, Human
gagaagcccuggcaggac

SEQ ID NO: 83661 - RNA, 23 nt, Human
gagaagcccuggcaggacccagg

SEQ ID NO: 83662 - RNA, 21 nt, Human
gagcucugggcggggguaggg

SEQ ID NO: 83663 - RNA, 19 nt, Human
gcagccgcagggcuccugg

SEQ ID NO: 83664 - RNA, 18 nt, Human
gccacccccuccuaagga

SEQ ID NO: 83665 - RNA, 19 nt, Human
gcccccugccaggacauca

SEQ ID NO: 83666 - RNA, 23 nt, Human
gccccgcuccagccgauucgcag

SEQ ID NO: 83667 - RNA, 20 nt, Human
gccgcccgcaacggccgcgc

SEQ ID NO: 83668 - RNA, 25 nt, Human
gcgcccggagccucccaagacucuc

SEQ ID NO: 83669 - RNA, 22 nt, Human
gcgccgcccgcccaggcccagc

SEQ ID NO: 83670 - RNA, 18 nt, Human
gcggcgcgccggcgucgg

SEQ ID NO: 83671 - RNA, 19 nt, Human
gcggggacgcgaggacugg

SEQ ID NO: 83672 - RNA, 23 nt, Human
gcucuguccacggggaacuccca

SEQ ID NO: 83673 - RNA, 19 nt, Human
ggagcagcccgcgccgccc

SEQ ID NO: 83674 - RNA, 18 nt, Human
ggcgaccgcgcgggcagc

SEQ ID NO: 83675 - RNA, 22 nt, Human
gggaggggggucuggaggaggc

SEQ ID NO: 83676 - RNA, 19 nt, Human
gggcuccugggcccacaac

SEQ ID NO: 83677 - RNA, 20 nt, Human
gggcuccugggcccacaacu

SEQ ID NO: 83678 - RNA, 18 nt, Human
gggcugccccaagccugu

SEQ ID NO: 83679 - RNA, 21 nt, Human
ggggucuggaggaggcagggg

SEQ ID NO: 83680 - RNA, 24 nt, Human
gggucuggaggaggcagggguggg

SEQ ID NO: 83681 - RNA, 23 nt, Human
ggucuggaggaggcaggggugga

SEQ ID NO: 83682 - RNA, 21 nt, Human
ggugcaggcagcggggagggg

SEQ ID NO: 83683 - RNA, 19 nt, Human
guccacggggaacucccag

SEQ ID NO: 83684 - RNA, 23 nt, Human
gucuggaggaggcaggggugggg

SEQ ID NO: 83685 - RNA, 25 nt, Human
gucuggaggaggcaggggugggggu

SEQ ID NO: 83686 - RNA, 20 nt, Human
gugcaggcagcggggagggg

SEQ ID NO: 83687 - RNA, 24 nt, Human
gugcaggcagcggggagggggguc

SEQ ID NO: 83688 - RNA, 21 nt, Human
gugguacuggggccggggucc

SEQ ID NO: 83689 - RNA, 28 nt, Human
uaauaguagcaacaccacacugccaauc

SEQ ID NO: 83690 - RNA, 24 nt, Human
uagcaacaccacacugccagccuu

SEQ ID NO: 83691 - RNA, 21 nt, Human
ucaaggccacccccuccuaag

SEQ ID NO: 83692 - RNA, 21 nt, Human
ucaaguggcccuggagcaggg

SEQ ID NO: 83693 - RNA, 24 nt, Human
ucagcucccacggcugcgccggac

SEQ ID NO: 83694 - RNA, 18 nt, Human
uccacaugggacgagggc

SEQ ID NO: 83695 - RNA, 21 nt, Human
ucccaagacucucaagccacc

SEQ ID NO: 83696 - RNA, 22 nt, Human
ucccacggcugcgccggacacc

SEQ ID NO: 83697 - RNA, 23 nt, Human
ucgagaagcccuggcaggaccca

SEQ ID NO: 83698 - RNA, 20 nt, Human
ucucaagccacccgagccuc

SEQ ID NO: 83699 - RNA, 21 nt, Human
ucuggaggaggcagggguggg

SEQ ID NO: 83700 - RNA, 24 nt, Human
ucuggaggaggcaggggugggggu

SEQ ID NO: 83701 - RNA, 20 nt, Human
ugaauagaaacacaauccca

SEQ ID NO: 83702 - RNA, 19 nt, Human
ugaggccccugggggucag

SEQ ID NO: 83703 - RNA, 21 nt, Human
ugagucgacggcaggcagcgg

SEQ ID NO: 83704 - RNA, 19 nt, Human
ugauccagcucugacaggg

SEQ ID NO: 83705 - RNA, 18 nt, Human
ugcagggcucuggcuucc

SEQ ID NO: 83706 - RNA, 22 nt, Human
ugccagagcugagaccuccuac

SEQ ID NO: 83707 - RNA, 23 nt, Human
ugccagagcugagaccuccuacg

SEQ ID NO: 83708 - RNA, 18 nt, Human
ugcgggccaaguuggggc

SEQ ID NO: 83709 - RNA, 19 nt, Human
ugcgggggcugggcuucgg

SEQ ID NO: 83710 - RNA, 19 nt, Human
uggaagcccgucugaugcu

SEQ ID NO: 83711 - RNA, 21 nt, Human
uggaggaggcagggguggggg

SEQ ID NO: 83712 - RNA, 23 nt, Human
uggaggcagaggaccuucaagga

SEQ ID NO: 83713 - RNA, 18 nt, Human
uggcagaggcugcuggcg

SEQ ID NO: 83714 - RNA, 20 nt, Human
uggcagaggcugcuggcgcc

SEQ ID NO: 83715 - RNA, 18 nt, Human
uggcaggacccaggcugg

SEQ ID NO: 83716 - RNA, 20 nt, Human
uggccugcugcgggccaagu

SEQ ID NO: 83717 - RNA, 19 nt, Human
ugggacaggugccaccugu

SEQ ID NO: 83718 - RNA, 23 nt, Human
ugggacaggugccaccugucacc

SEQ ID NO: 83719 - RNA, 20 nt, Human
ugggggucagugaggcacgg

SEQ ID NO: 83720 - RNA, 18 nt, Human
ugguacuggggccuuccc

SEQ ID NO: 83721 - RNA, 18 nt, Human
uucccuugcugaauagaa

SEQ ID NO: 83722 - RNA, 22 nt, Human
aaacaagaaaagcaauaccuac

SEQ ID NO: 83723 - RNA, 19 nt, Human
aaaccagcagcaaagagcc

SEQ ID NO: 83724 - RNA, 22 nt, Human
aaagcccuuugagcuacugccu

SEQ ID NO: 83725 - RNA, 22 nt, Human
aagaaaagcaauaccuacggac

SEQ ID NO: 83726 - RNA, 18 nt, Human
acggacugguguacacuu

SEQ ID NO: 83727 - RNA, 24 nt, Human
acuccaggacccaggguccaacua

SEQ ID NO: 83728 - RNA, 21 nt, Human
agaauuccccaguucccgcuc

SEQ ID NO: 83729 - RNA, 22 nt, Human
agggaugggaaucucuccuacc

SEQ ID NO: 83730 - RNA, 23 nt, Human
caacagcaaccgugaggcagcaa

SEQ ID NO: 83731 - RNA, 21 nt, Human
caacuugcucucccacaccaa

SEQ ID NO: 83732 - RNA, 25 nt, Human
cagaauuccccaguucccgcuccuc

SEQ ID NO: 83733 - RNA, 19 nt, Human
cagcaagaaguaggagggg

SEQ ID NO: 83734 - RNA, 20 nt, Human
cagcaagaaguaggagggga

SEQ ID NO: 83735 - RNA, 20 nt, Human
caggaggagccgcagcagug

SEQ ID NO: 83736 - RNA, 24 nt, Human
ccaacuaauggcagagccccucuu

SEQ ID NO: 83737 - RNA, 21 nt, Human
ccacaccaagggaugggaauc

SEQ ID NO: 83738 - RNA, 20 nt, Human
ccuauagucaucccugcacu

SEQ ID NO: 83739 - RNA, 23 nt, Human
cgugaggcagcaagaaguaggag

SEQ ID NO: 83740 - RNA, 21 nt, Human
cuauagucaucccugcacucc

SEQ ID NO: 83741 - RNA, 21 nt, Human
cucacaaccggccccaaagcc

SEQ ID NO: 83742 - RNA, 19 nt, Human
cucucccacaccaagggau

SEQ ID NO: 83743 - RNA, 24 nt, Human
cucuugguuccuucaaacaagaaa

SEQ ID NO: 83744 - RNA, 23 nt, Human
cugcaacagcaaccgugaggcag

SEQ ID NO: 83745 - RNA, 18 nt, Human
cuugcucucccacaccaa

SEQ ID NO: 83746 - RNA, 23 nt, Human
gaaugcacguagggccagaauuc

SEQ ID NO: 83747 - RNA, 22 nt, Human
gaggcagcaagaaguaggaggg

SEQ ID NO: 83748 - RNA, 19 nt, Human
gcagcaagaaguaggaggg

SEQ ID NO: 83749 - RNA, 22 nt, Human
gccccaaagccgcggaagccuu

SEQ ID NO: 83750 - RNA, 24 nt, Human
gccgcggaagccuucagagacucc

SEQ ID NO: 83751 - RNA, 24 nt, Human
ggacugguguacacuuccauccuu

SEQ ID NO: 83752 - RNA, 19 nt, Human
ggccccaaagccgcggaag

SEQ ID NO: 83753 - RNA, 18 nt, Human
uccugggucugcaacagc

SEQ ID NO: 83754 - RNA, 24 nt, Human
ucucccacaccaagggaugggaau

SEQ ID NO: 83755 - RNA, 22 nt, Human
ugacaccauacacacaaaccca

SEQ ID NO: 83756 - RNA, 19 nt, Human
ugaggaaagccaucucaca

SEQ ID NO: 83757 - RNA, 19 nt, Human
ugaggcagcaagaaguagg

SEQ ID NO: 83758 - RNA, 23 nt, Human
ugaggguugauacugcugggaau

SEQ ID NO: 83759 - RNA, 22 nt, Human
ugcaacagcaaccgugaggcag

SEQ ID NO: 83760 - RNA, 22 nt, Human
ugccaaccacuccacaagcaga

SEQ ID NO: 83761 - RNA, 18 nt, Human
ugccuuagucuacccacu

SEQ ID NO: 83762 - RNA, 19 nt, Human
ugcugggaaugccaaccac

SEQ ID NO: 83763 - RNA, 22 nt, Human
uucaaacaagaaaagcaauacc

SEQ ID NO: 83764 - RNA, 19 nt, Human
uucccgcuccucugagggu

SEQ ID NO: 83765 - RNA, 22 nt, Human
uuugcaaagcccuuugagcuac

SEQ ID NO: 83766 - RNA, 20 nt, Human
aaaaaagaaacccaaaaacu

SEQ ID NO: 83767 - RNA, 25 nt, Human
aaaaaagaaacccaaaaacucaaga

SEQ ID NO: 83768 - RNA, 23 nt, Human
aaaaagaaacccaaaaacucaag

SEQ ID NO: 83769 - RNA, 21 nt, Human
aaaacaaauggaugaagagaa

SEQ ID NO: 83770 - RNA, 22 nt, Human
aaaagaaacccaaaaacucaag

SEQ ID NO: 83771 - RNA, 19 nt, Human
aaacaaauggaugaagaga

SEQ ID NO: 83772 - RNA, 19 nt, Human
aaacccaaaaacucaagaa

SEQ ID NO: 83773 - RNA, 24 nt, Human
aacagaccaagacucugucucaaa

SEQ ID NO: 83774 - RNA, 19 nt, Human
aacauggugaaaccccauc

SEQ ID NO: 83775 - RNA, 20 nt, Human
aacauggugaaaccccaucu

SEQ ID NO: 83776 - RNA, 21 nt, Human
aacauggugaaaccccaucuc

SEQ ID NO: 83777 - RNA, 21 nt, Human
aacauggugaaaccccaucuc

SEQ ID NO: 83778 - RNA, 20 nt, Human
aacgcucugagcuccgauuc

SEQ ID NO: 83779 - RNA, 19 nt, Human
aagguugcagugagcccag

SEQ ID NO: 83780 - RNA, 20 nt, Human
acaccacugcauuccagccu

SEQ ID NO: 83781 - RNA, 24 nt, Human
acaccacugcauuccagccugggc

SEQ ID NO: 83782 - RNA, 24 nt, Human
acaccacugcauuccagccugggc

SEQ ID NO: 83783 - RNA, 24 nt, Human
acagaccaagacucugucucaaaa

SEQ ID NO: 83784 - RNA, 22 nt, Human
accacugcauuccagccugggc

SEQ ID NO: 83785 - RNA, 24 nt, Human
accccaucucuacuaaaaauacaa

SEQ ID NO: 83786 - RNA, 19 nt, Human
accgacuucugagagcaaa

SEQ ID NO: 83787 - RNA, 24 nt, Human
acugcauuccagccugggcaacag

SEQ ID NO: 83788 - RNA, 24 nt, Human
agaagggcagaucacgaggccagg

SEQ ID NO: 83789 - RNA, 26 nt, Human
agagcaaauaaagcggagcccuggaa

SEQ ID NO: 83790 - RNA, 22 nt, Human
agagcacaccacugcauuccag

SEQ ID NO: 83791 - RNA, 19 nt, Human
agcaaauaaagcggagccc

SEQ ID NO: 83792 - RNA, 24 nt, Human
agcacaccacugcauuccagccug

SEQ ID NO: 83793 - RNA, 22 nt, Human
agccuggccaacauggugaaac

SEQ ID NO: 83794 - RNA, 24 nt, Human
agccuggccaacauggugaaaccc

SEQ ID NO: 83795 - RNA, 24 nt, Human
agccugggcaacagaccaagacuc

SEQ ID NO: 83796 - RNA, 24 nt, Human
aggcacuguggcucacaccuguaa

SEQ ID NO: 83797 - RNA, 22 nt, Human
aggcaggagaaucacuugaacc

SEQ ID NO: 83798 - RNA, 24 nt, Human
aggcaggagaaucacuugaaccug

SEQ ID NO: 83799 - RNA, 24 nt, Human
aggcugaggcaggagaaucacuug

SEQ ID NO: 83800 - RNA, 19 nt, Human
aggugaagguugcagugag

SEQ ID NO: 83801 - RNA, 24 nt, Human
aggugaagguugcagugagcccag

SEQ ID NO: 83802 - RNA, 21 nt, Human
agguugcagugagcccagagc

SEQ ID NO: 83803 - RNA, 22 nt, Human
agugugaaaacaaauggaugaa

SEQ ID NO: 83804 - RNA, 26 nt, Human
agugugaaaacaaauggaugaagaga

SEQ ID NO: 83805 - RNA, 19 nt, Human
augggccaggcacuguggc

SEQ ID NO: 83806 - RNA, 24 nt, Human
caaaaaaagaaacccaaaaacuca

SEQ ID NO: 83807 - RNA, 21 nt, Human
caacagaccaagacucugucu

SEQ ID NO: 83808 - RNA, 24 nt, Human
caacauggugaaaccccaucucua

SEQ ID NO: 83809 - RNA, 18 nt, Human
caacuuagggaggcagag

SEQ ID NO: 83810 - RNA, 23 nt, Human
caagacucugucucaaaaaaaga

SEQ ID NO: 83811 - RNA, 21 nt, Human
cacaccacugcauuccagccu

SEQ ID NO: 83812 - RNA, 19 nt, Human
cacaccuguaaucccagca

SEQ ID NO: 83813 - RNA, 24 nt, Human
cacaccuguaaucccagcaacuua

SEQ ID NO: 83814 - RNA, 19 nt, Human
cacaccuguagucccagcu

SEQ ID NO: 83815 - RNA, 24 nt, Human
caccacugcauuccagccugggca

SEQ ID NO: 83816 - RNA, 20 nt, Human
caccuguaaucccagcaacu

SEQ ID NO: 83817 - RNA, 25 nt, Human
caccuguaaucccagcaacuuaggg

SEQ ID NO: 83818 - RNA, 19 nt, Human
caccuguagucccagcuac

SEQ ID NO: 83819 - RNA, 24 nt, Human
caccuguagucccagcuacucaga

SEQ ID NO: 83820 - RNA, 18 nt, Human
cacugcauuccagccugg

SEQ ID NO: 83821 - RNA, 19 nt, Human
cacugcauuccagccuggg

SEQ ID NO: 83822 - RNA, 23 nt, Human
cacugcauuccagccugggcaac

SEQ ID NO: 83823 - RNA, 24 nt, Human
cacugcauuccagccugggcaaca

SEQ ID NO: 83824 - RNA, 24 nt, Human
cagaaggcugaggcaggagaauca

SEQ ID NO: 83825 - RNA, 24 nt, Human
cagaccaagacucugucucaaaag

SEQ ID NO: 83826 - RNA, 19 nt, Human
cagagcacaccacugcauu

SEQ ID NO: 83827 - RNA, 24 nt, Human
cagcuacucagaaggcugaggcag

SEQ ID NO: 83828 - RNA, 20 nt, Human
ccacugcauuccagccuggg

SEQ ID NO: 83829 - RNA, 21 nt, Human
ccacugcauuccagccugggc

SEQ ID NO: 83830 - RNA, 23 nt, Human
ccacugcauuccagccugggcaa

SEQ ID NO: 83831 - RNA, 24 nt, Human
ccacugcauuccagccugggcaac

SEQ ID NO: 83832 - RNA, 20 nt, Human
ccaggaguucgagaccagcc

SEQ ID NO: 83833 - RNA, 18 nt, Human
ccaggcacuguggcucac

SEQ ID NO: 83834 - RNA, 23 nt, Human
ccuggccaacauggugaaacccc

SEQ ID NO: 83835 - RNA, 24 nt, Human
ccuggccaacauggugaaacccca

SEQ ID NO: 83836 - RNA, 21 nt, Human
ccuguagucccagcuacucag

SEQ ID NO: 83837 - RNA, 24 nt, Human
cgagaccagccuggccaacauggu

SEQ ID NO: 83838 - RNA, 20 nt, Human
cuagcugggcaugguggugc

SEQ ID NO: 83839 - RNA, 23 nt, Human
cucacaccuguaaucccagcaac

SEQ ID NO: 83840 - RNA, 25 nt, Human
cucacaccuguaaucccagcaacuu

SEQ ID NO: 83841 - RNA, 21 nt, Human
cuccgauucacugaagaaaag

SEQ ID NO: 83842 - RNA, 23 nt, Human
cuggccaacauggugaaacccca

SEQ ID NO: 83843 - RNA, 19 nt, Human
gaagguugcagugagccca

SEQ ID NO: 83844 - RNA, 20 nt, Human
gaagguugcagugagcccag

SEQ ID NO: 83845 - RNA, 27 nt, Human
gaauaauuuuaaauugcauuuagcuaa

SEQ ID NO: 83846 - RNA, 21 nt, Human
gaucacgaggccaggaguucg

SEQ ID NO: 83847 - RNA, 24 nt, Human
gaucacgaggccaggaguucgaga

SEQ ID NO: 83848 - RNA, 20 nt, Human
gcagagaagggcagaucacg

SEQ ID NO: 83849 - RNA, 22 nt, Human
gcaggagaaucacuugaaccug

SEQ ID NO: 83850 - RNA, 24 nt, Human
gccaacauggugaaaccccaucuc

SEQ ID NO: 83851 - RNA, 22 nt, Human
ggcaugguggugcacaccugua

SEQ ID NO: 83852 - RNA, 22 nt, Human
gggcagaucacgaggccaggag

SEQ ID NO: 83853 - RNA, 24 nt, Human
gggcagaucacgaggccaggaguu

SEQ ID NO: 83854 - RNA, 24 nt, Human
gguggugcacaccuguagucccag

SEQ ID NO: 83855 - RNA, 18 nt, Human
gugaaaacaaauggauga

SEQ ID NO: 83856 - RNA, 22 nt, Human
guggcucacaccuguaauccca

SEQ ID NO: 83857 - RNA, 21 nt, Human
uaaaaauacaaaaacuagcug

SEQ ID NO: 83858 - RNA, 19 nt, Human
uaaagcggagcccuggaag

SEQ ID NO: 83859 - RNA, 19 nt, Human
uauuucagauuccuaacug

SEQ ID NO: 83860 - RNA, 24 nt, Human
ucaaaaaaagaaacccaaaaacuc

SEQ ID NO: 83861 - RNA, 24 nt, Human
ucacgaggccaggaguucgagacc

SEQ ID NO: 83862 - RNA, 20 nt, Human
ucucaaaaaaagaaacccaa

SEQ ID NO: 83863 - RNA, 21 nt, Human
ucucuacuaaaaauacaaaaa

SEQ ID NO: 83864 - RNA, 21 nt, Human
ucugagagcaaauaaagcgga

SEQ ID NO: 83865 - RNA, 19 nt, Human
ugaaaccccaucucuacua

SEQ ID NO: 83866 - RNA, 18 nt, Human
ugaaccuggaggugaagg

SEQ ID NO: 83867 - RNA, 20 nt, Human
ugaggcaggagaaucacuug

SEQ ID NO: 83868 - RNA, 24 nt, Human
ugaggcaggagaaucacuugaacc

SEQ ID NO: 83869 - RNA, 24 nt, Human
ugaggcaggagaaucacuugaacc

SEQ ID NO: 83870 - RNA, 20 nt, Human
ugaggugucacuagauuaga

SEQ ID NO: 83871 - RNA, 23 nt, Human
uggaggugaagguugcagugagc

SEQ ID NO: 83872 - RNA, 24 nt, Human
uggccaacauggugaaaccccauc

SEQ ID NO: 83873 - RNA, 21 nt, Human
uggcucacaccuguaauccca

SEQ ID NO: 83874 - RNA, 24 nt, Human
uggcucacaccuguaaucccagca

SEQ ID NO: 83875 - RNA, 18 nt, Human
uggugcacaccuguaguc

SEQ ID NO: 83876 - RNA, 22 nt, Human
uggugcacaccuguagucccag

SEQ ID NO: 83877 - RNA, 24 nt, Human
ugguggugcacaccuguaguccca

SEQ ID NO: 83878 - RNA, 20 nt, Human
ugucuggagggaaaccgaag

SEQ ID NO: 83879 - RNA, 24 nt, Human
uguggcucacaccuguaaucccag

SEQ ID NO: 83880 - RNA, 19 nt, Human
uugcagugagcccagagca

SEQ ID NO: 83881 - RNA, 19 nt, Human
agacuggccccaagaccag

SEQ ID NO: 83882 - RNA, 22 nt, Human
augggaaagagaagggaaaugg

SEQ ID NO: 83883 - RNA, 23 nt, Human
cacccagcuuccccugagacugg

SEQ ID NO: 83884 - RNA, 21 nt, Human
caccucacgaccgguaggggc

SEQ ID NO: 83885 - RNA, 28 nt, Human
cagcccccagucuuuuuuuuuuuuuuuu

SEQ ID NO: 83886 - RNA, 21 nt, Human
caggacagugagcaaagggga

SEQ ID NO: 83887 - RNA, 21 nt, Human
cagucuuuuuuuuuuuuuuuu

SEQ ID NO: 83888 - RNA, 18 nt, Human
ccaccccgcccuacaaug

SEQ ID NO: 83889 - RNA, 22 nt, Human
ccaggacagugagcaaagggga

SEQ ID NO: 83890 - RNA, 19 nt, Human
cccacucaccucacgaccg

SEQ ID NO: 83891 - RNA, 22 nt, Human
cccgcccuacaaugcugugagg

SEQ ID NO: 83892 - RNA, 20 nt, Human
ccuaacuuuggcccaccacc

SEQ ID NO: 83893 - RNA, 23 nt, Human
ccuugcgcugaacugccauuggc

SEQ ID NO: 83894 - RNA, 21 nt, Human
cgcugaacugccauuggcccu

SEQ ID NO: 83895 - RNA, 18 nt, Human
cugaccugugggcccucc

SEQ ID NO: 83896 - RNA, 20 nt, Human
cugugggcccucccucuccu

SEQ ID NO: 83897 - RNA, 20 nt, Human
gacagaugcccacucaccuc

SEQ ID NO: 83898 - RNA, 20 nt, Human
gagguggugggauggccugu

SEQ ID NO: 83899 - RNA, 20 nt, Human
gagucagugcagaggccggu

SEQ ID NO: 83900 - RNA, 18 nt, Human
gccggugccacuccagga

SEQ ID NO: 83901 - RNA, 23 nt, Human
uacaaaccaguuugaaagguggg

SEQ ID NO: 83902 - RNA, 23 nt, Human
uacaacagcaggggagggaguca

SEQ ID NO: 83903 - RNA, 21 nt, Human
uacaguauuuacaacagcagg

SEQ ID NO: 83904 - RNA, 21 nt, Human
uaugggaaagagaagggaaau

SEQ ID NO: 83905 - RNA, 20 nt, Human
uauuuucuuccuuugaaaua

SEQ ID NO: 83906 - RNA, 21 nt, Human
ucuaugggaaagagaagggaa

SEQ ID NO: 83907 - RNA, 24 nt, Human
ucuggagcuuuuucugaccugugg

SEQ ID NO: 83908 - RNA, 18 nt, Human
ugaaaggugggggaaucu

SEQ ID NO: 83909 - RNA, 19 nt, Human
ugaaaggugggggaaucua

SEQ ID NO: 83910 - RNA, 22 nt, Human
ugaacugccauuggcccuugga

SEQ ID NO: 83911 - RNA, 19 nt, Human
ugagacuggccccaagacc

SEQ ID NO: 83912 - RNA, 19 nt, Human
ugagacuggccccaagacc

SEQ ID NO: 83913 - RNA, 22 nt, Human
ugagacuggccccaagaccaga

SEQ ID NO: 83914 - RNA, 18 nt, Human
ugagcaaaggggaggaga

SEQ ID NO: 83915 - RNA, 22 nt, Human
ugagcaaaggggaggagagaag

SEQ ID NO: 83916 - RNA, 21 nt, Human
uggagcuuuuucugaccugug

SEQ ID NO: 83917 - RNA, 19 nt, Human
uuccccugagacuggcccc

SEQ ID NO: 83918 - RNA, 24 nt, Human
gaacagaacagaaugggaagaaaa

SEQ ID NO: 83919 - RNA, 19 nt, Human
guauuaggagaacagaaca

SEQ ID NO: 83920 - RNA, 22 nt, Human
ucuuuaauauuucuucuucuca

SEQ ID NO: 83921 - RNA, 26 nt, Human
ugggaagaaaauccaagacauccaga

SEQ ID NO: 83922 - RNA, 18 nt, Human
ugggaggagaagcagcau

SEQ ID NO: 83923 - RNA, 18 nt, Human
aaacacacacacacaaac

SEQ ID NO: 83924 - RNA, 21 nt, Human
aaacacacacacacaaacgug

SEQ ID NO: 83925 - RNA, 19 nt, Human
aacaggccgaagagggggg

SEQ ID NO: 83926 - RNA, 22 nt, Human
acaaacgugcaacgaagccaag

SEQ ID NO: 83927 - RNA, 23 nt, Human
acacacacacacaaacgugcaac

SEQ ID NO: 83928 - RNA, 22 nt, Human
acgcucaagaggcugcgaagag

SEQ ID NO: 83929 - RNA, 21 nt, Human
acgugaaguggcgauccagac

SEQ ID NO: 83930 - RNA, 22 nt, Human
agaggggggauuuaggggaggg

SEQ ID NO: 83931 - RNA, 29 nt, Human
agcuacugggaggguaaagccccaucagg

SEQ ID NO: 83932 - RNA, 23 nt, Human
aguuuauugaaggaaaaacgagg

SEQ ID NO: 83933 - RNA, 20 nt, Human
auccagagccucaggacagc

SEQ ID NO: 83934 - RNA, 18 nt, Human
auugaaggaaaaacgagg

SEQ ID NO: 83935 - RNA, 27 nt, Human
auugaaggaaaaacgaggggagaggag

SEQ ID NO: 83936 - RNA, 24 nt, Human
caaacacacacacacaaacgugca

SEQ ID NO: 83937 - RNA, 24 nt, Human
caagaggcugcgaagagcaaacac

SEQ ID NO: 83938 - RNA, 23 nt, Human
cacacacacacaaacgugcaacg

SEQ ID NO: 83939 - RNA, 23 nt, Human
cagcagaggaacucuuaggccuc

SEQ ID NO: 83940 - RNA, 23 nt, Human
caucaagcaauagaucugccaua

SEQ ID NO: 83941 - RNA, 23 nt, Human
cauccagagccucaggacagcuc

SEQ ID NO: 83942 - RNA, 23 nt, Human
ccacugagucacuuguggcuaaa

SEQ ID NO: 83943 - RNA, 23 nt, Human
ccuguguuagaauucuugggggg

SEQ ID NO: 83944 - RNA, 25 nt, Human
cgaagagcaaacacacacacacaaa

SEQ ID NO: 83945 - RNA, 18 nt, Human
gaagagcaaacacacaca

SEQ ID NO: 83946 - RNA, 22 nt, Human
gaggggucgggggauggcgggc

SEQ ID NO: 83947 - RNA, 26 nt, Human
gcgaagagcaaacacacacacacaaa

SEQ ID NO: 83948 - RNA, 21 nt, Human
gggaaaagggccaaucaaugc

SEQ ID NO: 83949 - RNA, 19 nt, Human
gggagaggagucagguggg

SEQ ID NO: 83950 - RNA, 20 nt, Human
gugcgggagugcagucguac

SEQ ID NO: 83951 - RNA, 19 nt, Human
ucuuggggggagaggauca

SEQ ID NO: 83952 - RNA, 23 nt, Human
ugaaggaaaaacgaggggagagg

SEQ ID NO: 83953 - RNA, 21 nt, Human
ugaaguggcgauccagacgcu

SEQ ID NO: 83954 - RNA, 22 nt, Human
ugacgagccucuguugacucug

SEQ ID NO: 83955 - RNA, 21 nt, Human
ugccauacccagggaaaaggg

SEQ ID NO: 83956 - RNA, 19 nt, Human
ugggaaagugcuggaaugg

SEQ ID NO: 83957 - RNA, 22 nt, Human
uguguuagaauucuugggggga

SEQ ID NO: 83958 - RNA, 26 nt, Human
uugaaggaaaaacgaggggagaggag

SEQ ID NO: 83959 - RNA, 18 nt, Human
uuuuuuuuuuuuuuuuug

SEQ ID NO: 83960 - RNA, 20 nt, Human
aaagaaggaaguguaugaug

SEQ ID NO: 83961 - RNA, 22 nt, Human
aaccagacagcauuggcuucag

SEQ ID NO: 83962 - RNA, 20 nt, Human
aaucuacgggguggguuuuc

SEQ ID NO: 83963 - RNA, 19 nt, Human
acccagaggcugaaagccu

SEQ ID NO: 83964 - RNA, 18 nt, Human
accgcugccgccgccgcc

SEQ ID NO: 83965 - RNA, 27 nt, Human
agaaggaaaaaaaccuaaggaacagaa

SEQ ID NO: 83966 - RNA, 27 nt, Human
agaaggaaaaaauccuaaggaacagaa

SEQ ID NO: 83967 - RNA, 24 nt, Human
agacaaggagggggcuugggagug

SEQ ID NO: 83968 - RNA, 26 nt, Human
agaggcugaaagccacagacggggcc

SEQ ID NO: 83969 - RNA, 24 nt, Human
agcaaacccccuccagagcugccc

SEQ ID NO: 83970 - RNA, 23 nt, Human
agcacaaaaauggcgcaaccaga

SEQ ID NO: 83971 - RNA, 18 nt, Human
aggguggaggugggggcg

SEQ ID NO: 83972 - RNA, 20 nt, Human
auccugaauggagaaaaccc

SEQ ID NO: 83973 - RNA, 24 nt, Human
auggcgccaguuccccagcaaacc

SEQ ID NO: 83974 - RNA, 23 nt, Human
caaccagacagcauuggcuucag

SEQ ID NO: 83975 - RNA, 23 nt, Human
caacuuuuuuaaaaaagaaggaa

SEQ ID NO: 83976 - RNA, 24 nt, Human
caacuuuuuuaaaaaagaaggaag

SEQ ID NO: 83977 - RNA, 22 nt, Human
cacagacggggccgcagggcag

SEQ ID NO: 83978 - RNA, 19 nt, Human
cacuucagaaggaaaaaaa

SEQ ID NO: 83979 - RNA, 25 nt, Human
cacuucagaaggaaaaaaaccuaag

SEQ ID NO: 83980 - RNA, 21 nt, Human
cagacccguggcccucauaaa

SEQ ID NO: 83981 - RNA, 22 nt, Human
caggcaggacacggggccccuc

SEQ ID NO: 83982 - RNA, 24 nt, Human
cauaaaauuaaacauaaaagcaca

SEQ ID NO: 83983 - RNA, 19 nt, Human
ccaaccgcugccgccgccg

SEQ ID NO: 83984 - RNA, 24 nt, Human
ccacaaagggcaaggaccuggcac

SEQ ID NO: 83985 - RNA, 21 nt, Human
ccagacagcauuggcuucaga

SEQ ID NO: 83986 - RNA, 27 nt, Human
cccacgugagcccuggugcuauagaga

SEQ ID NO: 83987 - RNA, 22 nt, Human
cccagaggcugaaagccacaga

SEQ ID NO: 83988 - RNA, 18 nt, Human
ccccagcaaacccccucc

SEQ ID NO: 83989 - RNA, 20 nt, Human
ccgggcucucgugaaacacu

SEQ ID NO: 83990 - RNA, 23 nt, Human
ccugaauggagaaaacccaacuu

SEQ ID NO: 83991 - RNA, 30 nt, Human
cucgugaaacacuucagaaggaaaaaaacc

SEQ ID NO: 83992 - RNA, 21 nt, Human
gaacacagacccguggcccuc

SEQ ID NO: 83993 - RNA, 22 nt, Human
gaccuggcacugacuccggcca

SEQ ID NO: 83994 - RNA, 20 nt, Human
gagccggccguccuccaggg

SEQ ID NO: 83995 - RNA, 23 nt, Human
gcaaacccccuccagagcugccc

SEQ ID NO: 83996 - RNA, 21 nt, Human
gcagggcagcagcucccgggc

SEQ ID NO: 83997 - RNA, 20 nt, Human
gcgauggcgccaguucccca

SEQ ID NO: 83998 - RNA, 20 nt, Human
gcggcggcgcagacgcggag

SEQ ID NO: 83999 - RNA, 20 nt, Human
gcggcggcgcagacguggag

SEQ ID NO: 84000 - RNA, 22 nt, Human
gcuucugcgguucuggaguccc

SEQ ID NO: 84001 - RNA, 19 nt, Human
ggaaaaaauccuaaggaac

SEQ ID NO: 84002 - RNA, 22 nt, Human
ggaaaaaauccuaaggaacaga

SEQ ID NO: 84003 - RNA, 18 nt, Human
ggagaaaacccaacuuuu

SEQ ID NO: 84004 - RNA, 20 nt, Human
ggcgcagacguggagcaggg

SEQ ID NO: 84005 - RNA, 26 nt, Human
gugaaacacuucagaaggaaaaaaac

SEQ ID NO: 84006 - RNA, 24 nt, Human
uaaaagcacaaaaauggcgcaacc

SEQ ID NO: 84007 - RNA, 25 nt, Human
uaaaagcacaaaaauggcgcaacca

SEQ ID NO: 84008 - RNA, 18 nt, Human
ucagaaggaaaaaauccu

SEQ ID NO: 84009 - RNA, 21 nt, Human
uccaggggugagcuggggagg

SEQ ID NO: 84010 - RNA, 25 nt, Human
uccaggggugagcuggggagggaag

SEQ ID NO: 84011 - RNA, 20 nt, Human
ucccacgugagcccuggugc

SEQ ID NO: 84012 - RNA, 24 nt, Human
ugaaagccacagacggggccgcag

SEQ ID NO: 84013 - RNA, 19 nt, Human
ugagaacuuggaaucuugc

SEQ ID NO: 84014 - RNA, 19 nt, Human
ugaggguggaggugggggc

SEQ ID NO: 84015 - RNA, 19 nt, Human
uggagcagggagcguccuc

SEQ ID NO: 84016 - RNA, 19 nt, Human
uggcggugggugggagggg

SEQ ID NO: 84017 - RNA, 24 nt, Human
ugggagugacuugaggcugugacg

SEQ ID NO: 84018 - RNA, 21 nt, Human
uguaugaugggaaucuacggg

SEQ ID NO: 84019 - RNA, 24 nt, Human
uucagaaggaaaaaaaccuaagga

SEQ ID NO: 84020 - RNA, 24 nt, Human
uucagaaggaaaaaauccuaagga

SEQ ID NO: 84021 - RNA, 21 nt, Human
uugaggcugugacggggucgc

SEQ ID NO: 84022 - RNA, 18 nt, Human
uugaggguggaggugggg

SEQ ID NO: 84023 - RNA, 20 nt, Human
uugaggguggaggugggggc

SEQ ID NO: 84024 - RNA, 22 nt, Human
uuggaaucuugcaagcacuggg

SEQ ID NO: 84025 - RNA, 18 nt, Human
uuuuuuuuuuugagggug

SEQ ID NO: 84026 - RNA, 18 nt, Human
uuuuuuuuuuuuugaggg

SEQ ID NO: 84027 - RNA, 22 nt, Human
uuuuuuuuuuuuuuuuugaggg

SEQ ID NO: 84028 - RNA, 24 nt, Human
aaaagcaugagaaaugcggacccc

SEQ ID NO: 84029 - RNA, 19 nt, Human
aaacugaaugaggcagaaa

SEQ ID NO: 84030 - RNA, 20 nt, Human
aaacugaaugaggcagaaac

SEQ ID NO: 84031 - RNA, 26 nt, Human
aaaguucucccaaccccuggccacau

SEQ ID NO: 84032 - RNA, 20 nt, Human
aacaugccacagacugagaa

SEQ ID NO: 84033 - RNA, 22 nt, Human
aagaaacuuagcuugaagccac

SEQ ID NO: 84034 - RNA, 20 nt, Human
aagaacuccaagcaagaggg

SEQ ID NO: 84035 - RNA, 19 nt, Human
aagcaaaaacaagacauga

SEQ ID NO: 84036 - RNA, 23 nt, Human
aagcaagagggucaagcauuuaa

SEQ ID NO: 84037 - RNA, 19 nt, Human
aagugagcagagagaggag

SEQ ID NO: 84038 - RNA, 20 nt, Human
aauuucaaacucagagggcu

SEQ ID NO: 84039 - RNA, 24 nt, Human
acaauaucucacgacugccauggc

SEQ ID NO: 84040 - RNA, 25 nt, Human
acacacacgcacgcacgcacauaca

SEQ ID NO: 84041 - RNA, 22 nt, Human
acaguccauggaccagaggccu

SEQ ID NO: 84042 - RNA, 23 nt, Human
acaguuccagaugaccacuguca

SEQ ID NO: 84043 - RNA, 20 nt, Human
acugccugccgcacuccugg

SEQ ID NO: 84044 - RNA, 19 nt, Human
acuuuguacagcacucuuc

SEQ ID NO: 84045 - RNA, 29 nt, Human
agaaagggagagagggaggaggaagggga

SEQ ID NO: 84046 - RNA, 24 nt, Human
agaaggacagcacacaaucacaag

SEQ ID NO: 84047 - RNA, 23 nt, Human
agacagauauccuacagcaaacc

SEQ ID NO: 84048 - RNA, 19 nt, Human
agagagaaacaaaagaaaa

SEQ ID NO: 84049 - RNA, 22 nt, Human
agagagggaggaggaaggggaa

SEQ ID NO: 84050 - RNA, 19 nt, Human
agagcuggggucccucggg

SEQ ID NO: 84051 - RNA, 18 nt, Human
agaggaaaccaaaccauc

SEQ ID NO: 84052 - RNA, 21 nt, Human
agagggcaugugacgggcagg

SEQ ID NO: 84053 - RNA, 21 nt, Human
agauuugcuauugagaaacuu

SEQ ID NO: 84054 - RNA, 19 nt, Human
agcaaaaacaagacaugaa

SEQ ID NO: 84055 - RNA, 21 nt, Human
agcauccauugacccccuagc

SEQ ID NO: 84056 - RNA, 22 nt, Human
aggaaagaaagggagagaggga

SEQ ID NO: 84057 - RNA, 19 nt, Human
aggcaagggagugagccaa

SEQ ID NO: 84058 - RNA, 24 nt, Human
aggcauaguugccaccacugcugu

SEQ ID NO: 84059 - RNA, 21 nt, Human
agggaagagcccuggggagga

SEQ ID NO: 84060 - RNA, 18 nt, Human
agggagagagggaggagg

SEQ ID NO: 84061 - RNA, 19 nt, Human
agggagagagggaggagga

SEQ ID NO: 84062 - RNA, 20 nt, Human
agggagugagccaagagaag

SEQ ID NO: 84063 - RNA, 20 nt, Human
aggggugggguggggagggg

SEQ ID NO: 84064 - RNA, 26 nt, Human
aggggugggguggggagggguggggg

SEQ ID NO: 84065 - RNA, 18 nt, Human
aggguugggguaggaagg

SEQ ID NO: 84066 - RNA, 19 nt, Human
agucaagagcugggguccc

SEQ ID NO: 84067 - RNA, 20 nt, Human
agucacaacugcauccaugc

SEQ ID NO: 84068 - RNA, 21 nt, Human
auggaccagaggccugcucca

SEQ ID NO: 84069 - RNA, 18 nt, Human
caaaaacaagacaugaaa

SEQ ID NO: 84070 - RNA, 20 nt, Human
caacugaggccugccugcca

SEQ ID NO: 84071 - RNA, 22 nt, Human
caagggaagagcccuggggagg

SEQ ID NO: 84072 - RNA, 20 nt, Human
caaggguuugccagauugua

SEQ ID NO: 84073 - RNA, 21 nt, Human
caagucccagaaaggcaaggg

SEQ ID NO: 84074 - RNA, 20 nt, Human
cacacacacacacacacaca

SEQ ID NO: 84075 - RNA, 18 nt, Human
cacauccccacacagacc

SEQ ID NO: 84076 - RNA, 19 nt, Human
cacauccccacacagaccu

SEQ ID NO: 84077 - RNA, 22 nt, Human
caccacaagugccaaaggccca

SEQ ID NO: 84078 - RNA, 20 nt, Human
cacgcugcuuuucggugcua

SEQ ID NO: 84079 - RNA, 21 nt, Human
cacguccucaacugaggccug

SEQ ID NO: 84080 - RNA, 21 nt, Human
cacugcaggacaggcggugac

SEQ ID NO: 84081 - RNA, 21 nt, Human
cacugugggcccucagaccac

SEQ ID NO: 84082 - RNA, 19 nt, Human
cagaaacacacacacacac

SEQ ID NO: 84083 - RNA, 24 nt, Human
cagaggcgggcugggaggccuccc

SEQ ID NO: 84084 - RNA, 23 nt, Human
cagaggugagcgaggagcccucu

SEQ ID NO: 84085 - RNA, 22 nt, Human
cagcccagaucucccggcucac

SEQ ID NO: 84086 - RNA, 23 nt, Human
cagcgaguccugccacaggucaa

SEQ ID NO: 84087 - RNA, 25 nt, Human
cagcgaguccugccacaggucaaac

SEQ ID NO: 84088 - RNA, 20 nt, Human
cagguacugccugccgcacu

SEQ ID NO: 84089 - RNA, 18 nt, Human
cauccccuggccuguagu

SEQ ID NO: 84090 - RNA, 21 nt, Human
caugaugcuggggagaggggu

SEQ ID NO: 84091 - RNA, 18 nt, Human
caugcaagggccaggaag

SEQ ID NO: 84092 - RNA, 24 nt, Human
cauggcagcagggcugcuggcacc

SEQ ID NO: 84093 - RNA, 20 nt, Human
ccaccccagugaacauggca

SEQ ID NO: 84094 - RNA, 19 nt, Human
ccacgcugcuuuucggugc

SEQ ID NO: 84095 - RNA, 18 nt, Human
ccagaugaccacugucaa

SEQ ID NO: 84096 - RNA, 24 nt, Human
ccagcccagaucucccggcucaca

SEQ ID NO: 84097 - RNA, 20 nt, Human
ccagggcccccagcccucag

SEQ ID NO: 84098 - RNA, 23 nt, Human
ccagugccaccccagugaacaug

SEQ ID NO: 84099 - RNA, 21 nt, Human
cccaaccccuggccacaugga

SEQ ID NO: 84100 - RNA, 24 nt, Human
cccaaccccuggccacauggaggu

SEQ ID NO: 84101 - RNA, 18 nt, Human
cccauccccuggccugua

SEQ ID NO: 84102 - RNA, 19 nt, Human
ccccacacagaccuggucc

SEQ ID NO: 84103 - RNA, 23 nt, Human
ccccagcccucagucaaagccuu

SEQ ID NO: 84104 - RNA, 18 nt, Human
cccccaagggaagagccc

SEQ ID NO: 84105 - RNA, 23 nt, Human
cccccagcccucagucaaagccc

SEQ ID NO: 84106 - RNA, 20 nt, Human
cccccuauugcuucuaaguc

SEQ ID NO: 84107 - RNA, 19 nt, Human
cccgggccggcggcucccg

SEQ ID NO: 84108 - RNA, 19 nt, Human
cccucagaccacaugcucu

SEQ ID NO: 84109 - RNA, 18 nt, Human
cccuggccagugguccga

SEQ ID NO: 84110 - RNA, 24 nt, Human
ccucgggcacagccuggcucugcu

SEQ ID NO: 84111 - RNA, 19 nt, Human
ccucugggaaagggcuguc

SEQ ID NO: 84112 - RNA, 19 nt, Human
ccugaaggagagguucuga

SEQ ID NO: 84113 - RNA, 24 nt, Human
ccuggccacauggaggucugcucc

SEQ ID NO: 84114 - RNA, 23 nt, Human
cgcuugggcuuuggagaaggggg

SEQ ID NO: 84115 - RNA, 20 nt, Human
cguaaaucaaacuggaauga

SEQ ID NO: 84116 - RNA, 24 nt, Human
cguccucaacugaggccugccugc

SEQ ID NO: 84117 - RNA, 21 nt, Human
cuagcacgcugccacccacgg

SEQ ID NO: 84118 - RNA, 21 nt, Human
cuccugaaggagagguucuga

SEQ ID NO: 84119 - RNA, 23 nt, Human
cucugaguacacccacuggugau

SEQ ID NO: 84120 - RNA, 19 nt, Human
cucugcucuugccucugcc

SEQ ID NO: 84121 - RNA, 21 nt, Human
cucuugguggccugcugcccc

SEQ ID NO: 84122 - RNA, 22 nt, Human
cugcucugaguacacccacugg

SEQ ID NO: 84123 - RNA, 18 nt, Human
cuggaaugauuaaggcug

SEQ ID NO: 84124 - RNA, 20 nt, Human
cugggaggccuccccagacc

SEQ ID NO: 84125 - RNA, 22 nt, Human
cugggguugugcucuugguggc

SEQ ID NO: 84126 - RNA, 19 nt, Human
cuggucccucagcuucugg

SEQ ID NO: 84127 - RNA, 20 nt, Human
cuggucccucagcuucuggc

SEQ ID NO: 84128 - RNA, 24 nt, Human
cuuccugucccauccauagcuacc

SEQ ID NO: 84129 - RNA, 18 nt, Human
cuugcucaugaugcuggg

SEQ ID NO: 84130 - RNA, 19 nt, Human
gaagugagugcacugggcc

SEQ ID NO: 84131 - RNA, 20 nt, Human
gacucaccuggcagcagcga

SEQ ID NO: 84132 - RNA, 19 nt, Human
gagaagccucagccggcgc

SEQ ID NO: 84133 - RNA, 19 nt, Human
gagagaaggaaagaaaggg

SEQ ID NO: 84134 - RNA, 19 nt, Human
gagcagcaucucuggaaag

SEQ ID NO: 84135 - RNA, 20 nt, Human
gagcagcgggacgcuugggc

SEQ ID NO: 84136 - RNA, 22 nt, Human
gagcagggagcauagguccugg

SEQ ID NO: 84137 - RNA, 20 nt, Human
gagcagggguggggugggga

SEQ ID NO: 84138 - RNA, 18 nt, Human
gagccggcugguugagac

SEQ ID NO: 84139 - RNA, 21 nt, Human
gagccuccuagccacagagga

SEQ ID NO: 84140 - RNA, 24 nt, Human
gaggagagaaggaaagaaagggag

SEQ ID NO: 84141 - RNA, 20 nt, Human
gagggggagaggcaagggag

SEQ ID NO: 84142 - RNA, 22 nt, Human
gagggguauggagaaggccugg

SEQ ID NO: 84143 - RNA, 19 nt, Human
gauggcaucuccgaggagu

SEQ ID NO: 84144 - RNA, 20 nt, Human
gcaaaaagaacuccaagcaa

SEQ ID NO: 84145 - RNA, 22 nt, Human
gcaggggugggguggggagggg

SEQ ID NO: 84146 - RNA, 20 nt, Human
gccaccuucacagaggggcg

SEQ ID NO: 84147 - RNA, 21 nt, Human
gccuguucccuacuucuuguc

SEQ ID NO: 84148 - RNA, 19 nt, Human
gcgcugcgcccgggccggc

SEQ ID NO: 84149 - RNA, 24 nt, Human
gcgggcgggcggggucggggucgc

SEQ ID NO: 84150 - RNA, 23 nt, Human
gcucugggccuuucccuuggcug

SEQ ID NO: 84151 - RNA, 18 nt, Human
gcugcgcccaggccucug

SEQ ID NO: 84152 - RNA, 20 nt, Human
ggaaagggcugucagaugcc

SEQ ID NO: 84153 - RNA, 22 nt, Human
ggaaugauuaaggcuguucuug

SEQ ID NO: 84154 - RNA, 18 nt, Human
ggagagagggaggaggaa

SEQ ID NO: 84155 - RNA, 18 nt, Human
ggaggaggaaggggaaag

SEQ ID NO: 84156 - RNA, 18 nt, Human
ggcaggcgggcgggcggg

SEQ ID NO: 84157 - RNA, 19 nt, Human
ggcccagcucuuccugagc

SEQ ID NO: 84158 - RNA, 18 nt, Human
ggccugggcugcaugcua

SEQ ID NO: 84159 - RNA, 25 nt, Human
ggccugggcugcaugcuagagacuc

SEQ ID NO: 84160 - RNA, 22 nt, Human
ggccugucccucuaacccuguu

SEQ ID NO: 84161 - RNA, 24 nt, Human
ggcucccgggcggugcucacacuc

SEQ ID NO: 84162 - RNA, 21 nt, Human
ggcugggagaagccucagccg

SEQ ID NO: 84163 - RNA, 22 nt, Human
gggaagccuggccggccaggcc

SEQ ID NO: 84164 - RNA, 23 nt, Human
gggagaagccucagccggcgccc

SEQ ID NO: 84165 - RNA, 22 nt, Human
gggagagggguauggagaaggc

SEQ ID NO: 84166 - RNA, 18 nt, Human
gggcaggcgggcgggcgg

SEQ ID NO: 84167 - RNA, 20 nt, Human
gggcugcuggcacccaggga

SEQ ID NO: 84168 - RNA, 20 nt, Human
ggggacagaugcagagaggg

SEQ ID NO: 84169 - RNA, 19 nt, Human
gggguggggguuuuaugag

SEQ ID NO: 84170 - RNA, 23 nt, Human
ggguaagaggagagcagacggga

SEQ ID NO: 84171 - RNA, 18 nt, Human
ggguaggaagggaaaaug

SEQ ID NO: 84172 - RNA, 21 nt, Human
ggguauggagaaggccugggc

SEQ ID NO: 84173 - RNA, 19 nt, Human
ggguggggagggguggggg

SEQ ID NO: 84174 - RNA, 19 nt, Human
ggguggggugaggccaagu

SEQ ID NO: 84175 - RNA, 18 nt, Human
gguccuggguggccagag

SEQ ID NO: 84176 - RNA, 21 nt, Human
gguccuggguggccagaggug

SEQ ID NO: 84177 - RNA, 18 nt, Human
gguggccugcugcccccu

SEQ ID NO: 84178 - RNA, 19 nt, Human
ggugguggagggggagagg

SEQ ID NO: 84179 - RNA, 19 nt, Human
gucacaauacagggggagg

SEQ ID NO: 84180 - RNA, 18 nt, Human
uaaaguucucccaacccc

SEQ ID NO: 84181 - RNA, 25 nt, Human
uaaaucaaacuggaaugauuaagaa

SEQ ID NO: 84182 - RNA, 19 nt, Human
uaacaguugucauugaggg

SEQ ID NO: 84183 - RNA, 25 nt, Human
uacacacaugaucaugugcauacac

SEQ ID NO: 84184 - RNA, 20 nt, Human
uagcuugugcagaagucagc

SEQ ID NO: 84185 - RNA, 22 nt, Human
uauugccuuggucuccaaggca

SEQ ID NO: 84186 - RNA, 20 nt, Human
uauuucauugcauagaacgu

SEQ ID NO: 84187 - RNA, 21 nt, Human
ucaaauaaaggaggagagaag

SEQ ID NO: 84188 - RNA, 18 nt, Human
ucacaaggucauguggag

SEQ ID NO: 84189 - RNA, 21 nt, Human
ucacaaggucauguggaggac

SEQ ID NO: 84190 - RNA, 20 nt, Human
ucacaagguggugguggagg

SEQ ID NO: 84191 - RNA, 19 nt, Human
ucagaccacaugcucugcc

SEQ ID NO: 84192 - RNA, 23 nt, Human
ucagucacaagguggugguggag

SEQ ID NO: 84193 - RNA, 24 nt, Human
uccaaggcacauccccacacagac

SEQ ID NO: 84194 - RNA, 19 nt, Human
uccccacacagaccugguc

SEQ ID NO: 84195 - RNA, 22 nt, Human
ucccuacuucuugucccauccc

SEQ ID NO: 84196 - RNA, 22 nt, Human
ucccucgggcacagccuggcuc

SEQ ID NO: 84197 - RNA, 19 nt, Human
uccuagccacagaggagag

SEQ ID NO: 84198 - RNA, 20 nt, Human
uccuggguggccagaggugu

SEQ ID NO: 84199 - RNA, 21 nt, Human
ucggcgccgccgcugccgccg

SEQ ID NO: 84200 - RNA, 23 nt, Human
ucugcuccgaugucacccagagg

SEQ ID NO: 84201 - RNA, 21 nt, Human
ugacagacagacagauauccu

SEQ ID NO: 84202 - RNA, 20 nt, Human
ugacccccuagcuccagccc

SEQ ID NO: 84203 - RNA, 22 nt, Human
ugacccccuagcuccagcccag

SEQ ID NO: 84204 - RNA, 18 nt, Human
ugagaaaacaucacgucc

SEQ ID NO: 84205 - RNA, 24 nt, Human
ugagacaguguuagguccuaaugu

SEQ ID NO: 84206 - RNA, 23 nt, Human
ugagcagagagaggaggcaaugc

SEQ ID NO: 84207 - RNA, 18 nt, Human
ugagccuccuagccacag

SEQ ID NO: 84208 - RNA, 23 nt, Human
ugcagagagggucacacaggaaa

SEQ ID NO: 84209 - RNA, 18 nt, Human
ugcagucaagagcugggg

SEQ ID NO: 84210 - RNA, 23 nt, Human
ugccacagacugagaauuucaca

SEQ ID NO: 84211 - RNA, 21 nt, Human
ugccacaggucaaacaugcca

SEQ ID NO: 84212 - RNA, 21 nt, Human
ugccaccacugcuguucuuuc

SEQ ID NO: 84213 - RNA, 23 nt, Human
ugcccaaacucuguguauaacgc

SEQ ID NO: 84214 - RNA, 24 nt, Human
ugcucugcccaaggauuguagggg

SEQ ID NO: 84215 - RNA, 22 nt, Human
ugcucuugccucugccucucug

SEQ ID NO: 84216 - RNA, 18 nt, Human
uggaaaaacuucuggcau

SEQ ID NO: 84217 - RNA, 18 nt, Human
uggagaagggggugagca

SEQ ID NO: 84218 - RNA, 22 nt, Human
uggagagaaggagcugauuuga

SEQ ID NO: 84219 - RNA, 18 nt, Human
uggcacgcucaggcaaca

SEQ ID NO: 84220 - RNA, 22 nt, Human
uggccucuuauuucagcgauga

SEQ ID NO: 84221 - RNA, 22 nt, Human
uggcucugcucuugccucugcc

SEQ ID NO: 84222 - RNA, 21 nt, Human
uggcuucccucagcccuugcu

SEQ ID NO: 84223 - RNA, 19 nt, Human
ugggggaugaggaguggca

SEQ ID NO: 84224 - RNA, 20 nt, Human
ugggggaugaggaguggcag

SEQ ID NO: 84225 - RNA, 24 nt, Human
uggggguggguaagaggagagcag

SEQ ID NO: 84226 - RNA, 20 nt, Human
ugggguaggaagggaaaaug

SEQ ID NO: 84227 - RNA, 18 nt, Human
ugggguggggaggggugg

SEQ ID NO: 84228 - RNA, 20 nt, Human
ugguaaaaaagcugaugagc

SEQ ID NO: 84229 - RNA, 21 nt, Human
uggugcaaaccagagcacucu

SEQ ID NO: 84230 - RNA, 18 nt, Human
uguaaaguucucccaacc

SEQ ID NO: 84231 - RNA, 24 nt, Human
ugucagaauuucaaacucagaggg

SEQ ID NO: 84232 - RNA, 21 nt, Human
uguccauacacacacauccug

SEQ ID NO: 84233 - RNA, 22 nt, Human
uucauuucuucaagagccaugc

SEQ ID NO: 84234 - RNA, 20 nt, Human
uucugaggcaaaaagaacuc

SEQ ID NO: 84235 - RNA, 19 nt, Human
uugcucagauggcugcauu

SEQ ID NO: 84236 - RNA, 24 nt, Human
uugcucaugaugcuggggagaggg

SEQ ID NO: 84237 - RNA, 24 nt, Human
uugcuucuaagucaacauucuccc

SEQ ID NO: 84238 - RNA, 21 nt, Human
uuggagaagggggugagcagg

SEQ ID NO: 84239 - RNA, 21 nt, Human
uuuuccacagcaaugauaccu

SEQ ID NO: 84240 - RNA, 22 nt, Human
aacggacccacacccagccacc

SEQ ID NO: 84241 - RNA, 18 nt, Human
aaucgcugcaacucaagg

SEQ ID NO: 84242 - RNA, 22 nt, Human
agacacugaaaucgcugcaacu

SEQ ID NO: 84243 - RNA, 22 nt, Human
agacaggcuuacacagggagag

SEQ ID NO: 84244 - RNA, 22 nt, Human
aggggucagcagcaguuccaga

SEQ ID NO: 84245 - RNA, 26 nt, Human
caaaaugccaccaucucauugaaccu

SEQ ID NO: 84246 - RNA, 19 nt, Human
caguuccagacuagaagcu

SEQ ID NO: 84247 - RNA, 21 nt, Human
ccagucccuggccugcacacc

SEQ ID NO: 84248 - RNA, 24 nt, Human
ccauaucaucccauuuugcagaua

SEQ ID NO: 84249 - RNA, 24 nt, Human
cuaaacaccgagacaggcuuacac

SEQ ID NO: 84250 - RNA, 19 nt, Human
cuccagucccugggcccac

SEQ ID NO: 84251 - RNA, 22 nt, Human
cugaggcccugugaugucacac

SEQ ID NO: 84252 - RNA, 19 nt, Human
cuggaggcggcucgcuuca

SEQ ID NO: 84253 - RNA, 22 nt, Human
gcuucaagggagagcaagaucc

SEQ ID NO: 84254 - RNA, 24 nt, Human
uagggaaacugaggcccugugaug

SEQ ID NO: 84255 - RNA, 22 nt, Human
uccagacuagaagcuacggagc

SEQ ID NO: 84256 - RNA, 23 nt, Human
ucccugggcccaccaguucaaca

SEQ ID NO: 84257 - RNA, 20 nt, Human
ugccuggccagucccuggcc

SEQ ID NO: 84258 - RNA, 21 nt, Human
uucaacggacccacacccagc

SEQ ID NO: 84259 - RNA, 19 nt, Human
uucaacggacccacacccg

SEQ ID NO: 84260 - RNA, 23 nt, Human
uuuuuagucaucauccccucccu

SEQ ID NO: 84261 - RNA, 26 nt, Human
aagcagucugacucccaaugcuuugu

SEQ ID NO: 84262 - RNA, 21 nt, Human
aaggggaggcugcagggcugg

SEQ ID NO: 84263 - RNA, 25 nt, Human
cagucugacucccaaugcuuugugu

SEQ ID NO: 84264 - RNA, 26 nt, Human
ccacuccccuucucuccuucuaccaa

SEQ ID NO: 84265 - RNA, 24 nt, Human
cccgugcuuccuccacuccccuuc

SEQ ID NO: 84266 - RNA, 24 nt, Human
cuccccuucucuccuucuaccaag

SEQ ID NO: 84267 - RNA, 21 nt, Human
gacugcaaggggaggcugcag

SEQ ID NO: 84268 - RNA, 22 nt, Human
gcuggaggaggguuagagcaac

SEQ ID NO: 84269 - RNA, 23 nt, Human
ggaggcugcagggcuggaggagg

SEQ ID NO: 84270 - RNA, 21 nt, Human
gugcuuccuccacuccccuuc

SEQ ID NO: 84271 - RNA, 24 nt, Human
uauacaagcagucugacucccaau

SEQ ID NO: 84272 - RNA, 22 nt, Human
ucccgugcuuccuccacucccc

SEQ ID NO: 84273 - RNA, 19 nt, Human
ugacugcaaggggaggcug

SEQ ID NO: 84274 - RNA, 22 nt, Human
ugacugcaaggggaggcugcag

SEQ ID NO: 84275 - RNA, 21 nt, Human
ugaugacugcaaggggaggcu

SEQ ID NO: 84276 - RNA, 21 nt, Human
uuucaggacaucguuuuccca

SEQ ID NO: 84277 - RNA, 21 nt, Human
aaaaaacccauaacaacaggc

SEQ ID NO: 84278 - RNA, 21 nt, Human
aaaaaagcaaccccccccgca

SEQ ID NO: 84279 - RNA, 20 nt, Human
aacaggcagcacaugccccc

SEQ ID NO: 84280 - RNA, 23 nt, Human
aacaggcagcacaugccccccac

SEQ ID NO: 84281 - RNA, 21 nt, Human
aaccguguugccccaugaccc

SEQ ID NO: 84282 - RNA, 18 nt, Human
aagcaaccccccccgcaa

SEQ ID NO: 84283 - RNA, 21 nt, Human
aagcaaccccccccgcaaaaa

SEQ ID NO: 84284 - RNA, 22 nt, Human
aagcaaccccccccgcaaaaaa

SEQ ID NO: 84285 - RNA, 22 nt, Human
acaacaggcagcacaugccccc

SEQ ID NO: 84286 - RNA, 21 nt, Human
acaccgcaccccaugcccaau

SEQ ID NO: 84287 - RNA, 23 nt, Human
accccccccgcaaaaaaaaccca

SEQ ID NO: 84288 - RNA, 20 nt, Human
agaaaaaagcaacccccccc

SEQ ID NO: 84289 - RNA, 21 nt, Human
agaaaaaagcaaccccccccg

SEQ ID NO: 84290 - RNA, 26 nt, Human
agaaaaaagcaaccccccccgcaaaa

SEQ ID NO: 84291 - RNA, 18 nt, Human
agcaggacggaccuucca

SEQ ID NO: 84292 - RNA, 21 nt, Human
aggcucuggagggagacagcc

SEQ ID NO: 84293 - RNA, 21 nt, Human
agggugggagacaagaggggg

SEQ ID NO: 84294 - RNA, 22 nt, Human
auaacaacaggcagcacaugcc

SEQ ID NO: 84295 - RNA, 23 nt, Human
caaaaaaaacccauaacaacagg

SEQ ID NO: 84296 - RNA, 22 nt, Human
caaagaccccagaaaaaagcaa

SEQ ID NO: 84297 - RNA, 23 nt, Human
caacccgacuguguccccacacc

SEQ ID NO: 84298 - RNA, 22 nt, Human
cacaccgcaccccaugcccaau

SEQ ID NO: 84299 - RNA, 24 nt, Human
caccgcaccccaugcccaaucuca

SEQ ID NO: 84300 - RNA, 21 nt, Human
cagaaaaaagcaacccccccc

SEQ ID NO: 84301 - RNA, 20 nt, Human
cagaggcccuucuccggcua

SEQ ID NO: 84302 - RNA, 24 nt, Human
cagcacaugccccccacaccgcac

SEQ ID NO: 84303 - RNA, 20 nt, Human
cagggugggagacaagaggg

SEQ ID NO: 84304 - RNA, 22 nt, Human
cagggugggagacaagaggggg

SEQ ID NO: 84305 - RNA, 18 nt, Human
caugacccgcucagaacu

SEQ ID NO: 84306 - RNA, 22 nt, Human
caugccccccacaccgcacccc

SEQ ID NO: 84307 - RNA, 18 nt, Human
cccacaccgcaccccaug

SEQ ID NO: 84308 - RNA, 20 nt, Human
cccaggacugccccauggcc

SEQ ID NO: 84309 - RNA, 22 nt, Human
cccaggacugccccauggcccc

SEQ ID NO: 84310 - RNA, 21 nt, Human
ccccacacccaggacugcccc

SEQ ID NO: 84311 - RNA, 22 nt, Human
ccccacaccgcaccccaugccc

SEQ ID NO: 84312 - RNA, 24 nt, Human
ccccagaaaaaagcaacccccccc

SEQ ID NO: 84313 - RNA, 18 nt, Human
ccccaugacccgcucaga

SEQ ID NO: 84314 - RNA, 18 nt, Human
ccccauggccccuccaga

SEQ ID NO: 84315 - RNA, 18 nt, Human
cccccgcaaaaaaaaccc

SEQ ID NO: 84316 - RNA, 23 nt, Human
cccccgcaaaaaaaacccauaac

SEQ ID NO: 84317 - RNA, 26 nt, Human
ccccgcaaaaaaaacccauaacaaca

SEQ ID NO: 84318 - RNA, 24 nt, Human
ccccuccagaccugcuccagaggc

SEQ ID NO: 84319 - RNA, 25 nt, Human
cccgcaaaaaaaacccauaacaaca

SEQ ID NO: 84320 - RNA, 22 nt, Human
cccugggucaacccgacugugu

SEQ ID NO: 84321 - RNA, 21 nt, Human
ccgcaccccaugcccaaucuu

SEQ ID NO: 84322 - RNA, 18 nt, Human
ccuccagaccugcuccag

SEQ ID NO: 84323 - RNA, 18 nt, Human
cgcaccccaugcccaauc

SEQ ID NO: 84324 - RNA, 22 nt, Human
cuccggcuaccccgugcucucc

SEQ ID NO: 84325 - RNA, 19 nt, Human
gagacagcccugggucaac

SEQ ID NO: 84326 - RNA, 21 nt, Human
gcacaugccccccacaccgca

SEQ ID NO: 84327 - RNA, 18 nt, Human
gccccccacaccgcaccc

SEQ ID NO: 84328 - RNA, 21 nt, Human
uaaccguguugccccaugacc

SEQ ID NO: 84329 - RNA, 19 nt, Human
uccagaccugcuccagagg

SEQ ID NO: 84330 - RNA, 21 nt, Human
uccccgcuaaccguguugccc

SEQ ID NO: 84331 - RNA, 24 nt, Human
uccggagggaggcucuggagggag

SEQ ID NO: 84332 - RNA, 22 nt, Human
ucuccggcuaccccgugcucuc

SEQ ID NO: 84333 - RNA, 18 nt, Human
uggagcucaaagacccca

SEQ ID NO: 84334 - RNA, 23 nt, Human
uggagcucaaagaccccagaaaa

SEQ ID NO: 84335 - RNA, 18 nt, Human
uggagggagacagcccug

SEQ ID NO: 84336 - RNA, 19 nt, Human
uuuuuuuuuuuuuuuugcu

SEQ ID NO: 84337 - RNA, 18 nt, Human
uuuuuuuuuuuuuuuuug

SEQ ID NO: 84338 - RNA, 20 nt, Human
uuuuuuuuuuuuuuuuugcu

SEQ ID NO: 84339 - RNA, 25 nt, Human
aaccacccucuaaauaggauguuau

SEQ ID NO: 84340 - RNA, 18 nt, Human
aacuuguuucccccagug

SEQ ID NO: 84341 - RNA, 21 nt, Human
acaaguucuauuuaaaagaaa

SEQ ID NO: 84342 - RNA, 24 nt, Human
acacauacaugcacaucuaucuac

SEQ ID NO: 84343 - RNA, 20 nt, Human
acagugcaaauauuugagaa

SEQ ID NO: 84344 - RNA, 25 nt, Human
acauacaugcacaucuaucuacaua

SEQ ID NO: 84345 - RNA, 20 nt, Human
accacccucuaaauaggaug

SEQ ID NO: 84346 - RNA, 18 nt, Human
acccgagcucguccccgc

SEQ ID NO: 84347 - RNA, 19 nt, Human
acccucuaaauaggauguu

SEQ ID NO: 84348 - RNA, 19 nt, Human
acgguagcggaggcggcag

SEQ ID NO: 84349 - RNA, 21 nt, Human
acuaaagauaggaggccuguu

SEQ ID NO: 84350 - RNA, 20 nt, Human
agcauguaaaauuuaaacca

SEQ ID NO: 84351 - RNA, 28 nt, Human
agccagcauuaugcugaauaacaggggu

SEQ ID NO: 84352 - RNA, 22 nt, Human
agcuuuucagcauguaaaauuu

SEQ ID NO: 84353 - RNA, 18 nt, Human
aggcccucgggcaucugc

SEQ ID NO: 84354 - RNA, 21 nt, Human
aguacauauguuauuugaauc

SEQ ID NO: 84355 - RNA, 23 nt, Human
auaaagaaauucucucucccuuu

SEQ ID NO: 84356 - RNA, 18 nt, Human
auaguuacaaaaaauaua

SEQ ID NO: 84357 - RNA, 27 nt, Human
caaacacauacaugcacaucuaucuac

SEQ ID NO: 84358 - RNA, 24 nt, Human
caaaugucuaaaugcugcagaaca

SEQ ID NO: 84359 - RNA, 20 nt, Human
cagcaauugcauuuacaaua

SEQ ID NO: 84360 - RNA, 23 nt, Human
cagccacaaaccuuggggauguu

SEQ ID NO: 84361 - RNA, 24 nt, Human
cauauagauaugcauauucaugua

SEQ ID NO: 84362 - RNA, 22 nt, Human
cauauucauguauguuugugua

SEQ ID NO: 84363 - RNA, 20 nt, Human
caugcacaucuaucuacaua

SEQ ID NO: 84364 - RNA, 22 nt, Human
cccaggccgcggagcacagggg

SEQ ID NO: 84365 - RNA, 18 nt, Human
cccauacauauguaugca

SEQ ID NO: 84366 - RNA, 24 nt, Human
ccuccgacccgcacgacuucaaac

SEQ ID NO: 84367 - RNA, 19 nt, Human
cggccggugcggcgugggg

SEQ ID NO: 84368 - RNA, 22 nt, Human
cucguccccgcggcggccggua

SEQ ID NO: 84369 - RNA, 18 nt, Human
cucuaaauaggauguuau

SEQ ID NO: 84370 - RNA, 23 nt, Human
cugcucugcagcuuuucagcaug

SEQ ID NO: 84371 - RNA, 18 nt, Human
gagcacaggggagcggcc

SEQ ID NO: 84372 - RNA, 24 nt, Human
gagcucguccccgcggcggccggu

SEQ ID NO: 84373 - RNA, 20 nt, Human
gauaugcauauucauguaug

SEQ ID NO: 84374 - RNA, 23 nt, Human
gccagccacaaaccuuggggaug

SEQ ID NO: 84375 - RNA, 19 nt, Human
gcggcgcaggcccaggccg

SEQ ID NO: 84376 - RNA, 21 nt, Human
gcugaauauucuccagaucua

SEQ ID NO: 84377 - RNA, 22 nt, Human
gcugaggcgcuaguuuccagag

SEQ ID NO: 84378 - RNA, 24 nt, Human
uaaaagaaaaaacauauacaaaca

SEQ ID NO: 84379 - RNA, 18 nt, Human
uaaauuaaaaaaaaccac

SEQ ID NO: 84380 - RNA, 23 nt, Human
uacacauugaguuaaaaguucac

SEQ ID NO: 84381 - RNA, 21 nt, Human
uaccuacccucaccauugagu

SEQ ID NO: 84382 - RNA, 24 nt, Human
uagaaaaaaagcccuauuuuaaau

SEQ ID NO: 84383 - RNA, 20 nt, Human
uagcacaaauaaaccugguu

SEQ ID NO: 84384 - RNA, 20 nt, Human
uagguacaucuaugcauaua

SEQ ID NO: 84385 - RNA, 24 nt, Human
uauaaaauuauauauacaaacaca

SEQ ID NO: 84386 - RNA, 18 nt, Human
uaucuuaaaaguugaaaa

SEQ ID NO: 84387 - RNA, 31 nt, Human
uaugcacacaggcauguauuaauuuaugcgg

SEQ ID NO: 84388 - RNA, 20 nt, Human
uaugcauauagauaugcaua

SEQ ID NO: 84389 - RNA, 19 nt, Human
uauguuauuugaaucuggc

SEQ ID NO: 84390 - RNA, 20 nt, Human
ucagcagaaauguaacugaa

SEQ ID NO: 84391 - RNA, 20 nt, Human
ucccccagugaaacaagagc

SEQ ID NO: 84392 - RNA, 18 nt, Human
ucgggcaucugcccugcc

SEQ ID NO: 84393 - RNA, 23 nt, Human
ugaacuagcagcaauugcauuua

SEQ ID NO: 84394 - RNA, 23 nt, Human
ugcauuacuacaauaaacagucu

SEQ ID NO: 84395 - RNA, 18 nt, Human
ugguuugguuccucugcu

SEQ ID NO: 84396 - RNA, 24 nt, Human
uguacagcugaggucugaugguuu

SEQ ID NO: 84397 - RNA, 20 nt, Human
uguaugcacacaggcaugua

SEQ ID NO: 84398 - RNA, 27 nt, Human
uguaugcacacaggcauguauuaauuu

SEQ ID NO: 84399 - RNA, 18 nt, Human
uguauggccagccacaaa

SEQ ID NO: 84400 - RNA, 24 nt, Human
ugugacaaaugucuaaaugcugca

SEQ ID NO: 84401 - RNA, 27 nt, Human
uuauauauacaaacacauacaugcagu

SEQ ID NO: 84402 - RNA, 22 nt, Human
uuuccacuguagguguuggaag

SEQ ID NO: 84403 - RNA, 21 nt, Human
aauaaaaacuaccauaacugc

SEQ ID NO: 84404 - RNA, 20 nt, Human
aauaauaaaaacuaccauaa

SEQ ID NO: 84405 - RNA, 20 nt, Human
acaagucaacucucucacac

SEQ ID NO: 84406 - RNA, 19 nt, Human
acgaagcggcaucucccuu

SEQ ID NO: 84407 - RNA, 19 nt, Human
aggaaauaauauauuucaa

SEQ ID NO: 84408 - RNA, 21 nt, Human
aucuguccucugucuccucuu

SEQ ID NO: 84409 - RNA, 24 nt, Human
caaaauaauaaaaacuaccauaac

SEQ ID NO: 84410 - RNA, 19 nt, Human
cacuuugcagcuugccacc

SEQ ID NO: 84411 - RNA, 23 nt, Human
cacuuugcagcuugccaccaacc

SEQ ID NO: 84412 - RNA, 19 nt, Human
cuucuucuuucuucuuucu

SEQ ID NO: 84413 - RNA, 22 nt, Human
gaccaaaauaauaaaaacuacc

SEQ ID NO: 84414 - RNA, 21 nt, Human
gguaaaacaagucaacucucu

SEQ ID NO: 84415 - RNA, 24 nt, Human
uaaaaacuaccauaacugcuauca

SEQ ID NO: 84416 - RNA, 23 nt, Human
uacuagcuguuuuccugagacac

SEQ ID NO: 84417 - RNA, 18 nt, Human
uagguaaaacaagucaac

SEQ ID NO: 84418 - RNA, 19 nt, Human
uccucugucuccucuuagg

SEQ ID NO: 84419 - RNA, 23 nt, Human
ucuacuagcuguuuuccugagac

SEQ ID NO: 84420 - RNA, 24 nt, Human
ucucucacaccuugcuccaaugua

SEQ ID NO: 84421 - RNA, 19 nt, Human
ucuucuucuuucuucuuuc

SEQ ID NO: 84422 - RNA, 22 nt, Human
ugaccaaaauaauaaaaacuac

SEQ ID NO: 84423 - RNA, 27 nt, Human
ugaccaaaauaauaaaaacuaccauaa

SEQ ID NO: 84424 - RNA, 22 nt, Human
ugcuugauaaaugguagcuuua

SEQ ID NO: 84425 - RNA, 22 nt, Human
uucuuucuucuuucuuuuacga

SEQ ID NO: 84426 - RNA, 19 nt, Human
uuucuuuuacgacguuucc

SEQ ID NO: 84427 - RNA, 22 nt, Human
aaaaagauaaaugugaacagaa

SEQ ID NO: 84428 - RNA, 20 nt, Human
aacagaaaauacccccuaau

SEQ ID NO: 84429 - RNA, 25 nt, Human
aaucugccucuccuacuuuuuccac

SEQ ID NO: 84430 - RNA, 20 nt, Human
agaguccgccccacagacca

SEQ ID NO: 84431 - RNA, 23 nt, Human
aggaagauguggcuugaaaaaga

SEQ ID NO: 84432 - RNA, 22 nt, Human
aggcagaaagauggucccaggg

SEQ ID NO: 84433 - RNA, 24 nt, Human
aucugccucuccuacuuuuuccac

SEQ ID NO: 84434 - RNA, 19 nt, Human
cccacagaccacacacuuc

SEQ ID NO: 84435 - RNA, 20 nt, Human
ccucuccuacuuuuuccaca

SEQ ID NO: 84436 - RNA, 25 nt, Human
cuugaaaaagauaaaugugaacaga

SEQ ID NO: 84437 - RNA, 22 nt, Human
gaugauugagguuuaagaggaa

SEQ ID NO: 84438 - RNA, 21 nt, Human
uaaaugugaacagaaaauacc

SEQ ID NO: 84439 - RNA, 20 nt, Human
ucccagggcuuguagccugu

SEQ ID NO: 84440 - RNA, 21 nt, Human
ucugccucuccuacuuuuucc

SEQ ID NO: 84441 - RNA, 20 nt, Human
ugaaaaagauaaaugugaac

SEQ ID NO: 84442 - RNA, 21 nt, Human
ugauugagguuuaagaggaag

SEQ ID NO: 84443 - RNA, 21 nt, Human
ugcaaggcugucaacaugaug

SEQ ID NO: 84444 - RNA, 25 nt, Human
ugcccuuaaggcagaaagauggucc

SEQ ID NO: 84445 - RNA, 24 nt, Human
uggaagugcaaggcugucaacaug

SEQ ID NO: 84446 - RNA, 20 nt, Human
uggaaucuggugccacagaa

SEQ ID NO: 84447 - RNA, 18 nt, Human
uguggaagugcaaggcug

SEQ ID NO: 84448 - RNA, 23 nt, Human
uguguaaaauauaaacugacauu

SEQ ID NO: 84449 - RNA, 24 nt, Human
uuagaggaagauguggcuugaaaa

SEQ ID NO: 84450 - RNA, 19 nt, Human
uucccaggguggaaucugg

SEQ ID NO: 84451 - RNA, 18 nt, Human
uuuuuuuuuuuuuuuuug

SEQ ID NO: 84452 - RNA, 18 nt, Human
uuuuuuuuuuuuuuuuug

SEQ ID NO: 84453 - RNA, 28 nt, Human
aaaaaaaaacaaaaacaaaaaccaaagc

SEQ ID NO: 84454 - RNA, 23 nt, Human
aaaaaaacaaaaacaaaaaccaa

SEQ ID NO: 84455 - RNA, 21 nt, Human
aaaaaacccaaaagcauuugc

SEQ ID NO: 84456 - RNA, 21 nt, Human
aaaacaaaaaccaaaaaaccc

SEQ ID NO: 84457 - RNA, 22 nt, Human
aaaaggagaaaaaaaaacaaaa

SEQ ID NO: 84458 - RNA, 23 nt, Human
aaaaggagaaaaaaaaacaaaaa

SEQ ID NO: 84459 - RNA, 26 nt, Human
aaaaggagaaaaaaaaacaaaaacaa

SEQ ID NO: 84460 - RNA, 24 nt, Human
aaaaggcagcgugcagaguaucau

SEQ ID NO: 84461 - RNA, 18 nt, Human
aaaaguacaacucauaca

SEQ ID NO: 84462 - RNA, 20 nt, Human
aaaauguaaacauuuccccc

SEQ ID NO: 84463 - RNA, 18 nt, Human
aaacaaaaacaaaaacca

SEQ ID NO: 84464 - RNA, 21 nt, Human
aaacaaaaacaaaaaccaaaa

SEQ ID NO: 84465 - RNA, 26 nt, Human
aaacaaaaacaaaaaccaaaaaaccc

SEQ ID NO: 84466 - RNA, 24 nt, Human
aaacaaaaaccaaaaaacccaaaa

SEQ ID NO: 84467 - RNA, 22 nt, Human
aaaccaaaaaacccaaaagcau

SEQ ID NO: 84468 - RNA, 23 nt, Human
aaaccaaacccccuccaauuggc

SEQ ID NO: 84469 - RNA, 25 nt, Human
aaacccaacagagucaaaagcucuc

SEQ ID NO: 84470 - RNA, 22 nt, Human
aaaguacaacucauacaaagca

SEQ ID NO: 84471 - RNA, 23 nt, Human
aaaguguucuuuauuuuuccuga

SEQ ID NO: 84472 - RNA, 21 nt, Human
aaauagguguuuccagaucuc

SEQ ID NO: 84473 - RNA, 22 nt, Human
aaaucauugugguauuuucccu

SEQ ID NO: 84474 - RNA, 22 nt, Human
aacaaaaaccaaaaaacccaaa

SEQ ID NO: 84475 - RNA, 19 nt, Human
aacagcugggaggcaggga

SEQ ID NO: 84476 - RNA, 24 nt, Human
aacucaguucacuuuucuggccuc

SEQ ID NO: 84477 - RNA, 21 nt, Human
aagagaacuucagcuucgguu

SEQ ID NO: 84478 - RNA, 21 nt, Human
aagcagauuauaacguggugc

SEQ ID NO: 84479 - RNA, 21 nt, Human
aagcaguucucuuuauagaac

SEQ ID NO: 84480 - RNA, 22 nt, Human
aagcgcucgacacuuguaaacg

SEQ ID NO: 84481 - RNA, 21 nt, Human
aagggcguuccgaaagcaagc

SEQ ID NO: 84482 - RNA, 22 nt, Human
aagugcuaggcaaccccaaacu

SEQ ID NO: 84483 - RNA, 22 nt, Human
aaguguuucaaaaaucugaaac

SEQ ID NO: 84484 - RNA, 19 nt, Human
acaaagcaagguuuaaaag

SEQ ID NO: 84485 - RNA, 20 nt, Human
acaaagcaagguuuaaaagu

SEQ ID NO: 84486 - RNA, 23 nt, Human
acacauucaaauaaaacccaaca

SEQ ID NO: 84487 - RNA, 21 nt, Human
acagccucgaacacugacauu

SEQ ID NO: 84488 - RNA, 18 nt, Human
accaaaaaacccaaaagc

SEQ ID NO: 84489 - RNA, 19 nt, Human
accaaacccccuccaauug

SEQ ID NO: 84490 - RNA, 23 nt, Human
acccccucccccccacccacucc

SEQ ID NO: 84491 - RNA, 23 nt, Human
acccuauguuuacacauuucaga

SEQ ID NO: 84492 - RNA, 19 nt, Human
acgggcgcgccggccccuc

SEQ ID NO: 84493 - RNA, 18 nt, Human
acucaguucacuuuucug

SEQ ID NO: 84494 - RNA, 24 nt, Human
acuuauucauccucugcauuagaa

SEQ ID NO: 84495 - RNA, 23 nt, Human
agaccaacaaaccuuuuucccca

SEQ ID NO: 84496 - RNA, 22 nt, Human
agagagugguuuugcuaaacaa

SEQ ID NO: 84497 - RNA, 27 nt, Human
agaggacaggggugauggucucaccag

SEQ ID NO: 84498 - RNA, 18 nt, Human
agaguaucauaagcagaa

SEQ ID NO: 84499 - RNA, 18 nt, Human
agcugggaggcagggaag

SEQ ID NO: 84500 - RNA, 19 nt, Human
agcugggaggcagggaagg

SEQ ID NO: 84501 - RNA, 18 nt, Human
aggaaggagaccaacaaa

SEQ ID NO: 84502 - RNA, 25 nt, Human
aggagaaaaaaaaacaaaaacaaaa

SEQ ID NO: 84503 - RNA, 26 nt, Human
aggagaaaaaaaaacaaaaacaaaaa

SEQ ID NO: 84504 - RNA, 22 nt, Human
aggcggcgcggacaaacuuggc

SEQ ID NO: 84505 - RNA, 19 nt, Human
agggggcgggggcgcgggg

SEQ ID NO: 84506 - RNA, 18 nt, Human
agugauggcuguuguauu

SEQ ID NO: 84507 - RNA, 21 nt, Human
auagggguugauuuuucuguu

SEQ ID NO: 84508 - RNA, 22 nt, Human
auggaagaacagauguccuuaa

SEQ ID NO: 84509 - RNA, 21 nt, Human
caaaaaccaaaaaacccaaaa

SEQ ID NO: 84510 - RNA, 24 nt, Human
caaaaaguacaacucauacaaagc

SEQ ID NO: 84511 - RNA, 27 nt, Human
caaccccaaacuccucacucacuaaaa

SEQ ID NO: 84512 - RNA, 23 nt, Human
cacaggaaggagaccaacaaacc

SEQ ID NO: 84513 - RNA, 21 nt, Human
cacauucaaauaaaacccaac

SEQ ID NO: 84514 - RNA, 21 nt, Human
cacccacucccuacccucccc

SEQ ID NO: 84515 - RNA, 22 nt, Human
cacccacucccuacccuccccc

SEQ ID NO: 84516 - RNA, 22 nt, Human
caccccgacgcggguggcgagg

SEQ ID NO: 84517 - RNA, 20 nt, Human
caccugagagugggaguuuu

SEQ ID NO: 84518 - RNA, 20 nt, Human
cacugugcgaggccacaggu

SEQ ID NO: 84519 - RNA, 19 nt, Human
cacuugaaaaggcaaguaa

SEQ ID NO: 84520 - RNA, 22 nt, Human
cagaacaucugcuucuauccuc

SEQ ID NO: 84521 - RNA, 24 nt, Human
cagcaucuguuguguauauucugc

SEQ ID NO: 84522 - RNA, 18 nt, Human
cagcccaggcggcgcgga

SEQ ID NO: 84523 - RNA, 18 nt, Human
cagucagaacggcuucgg

SEQ ID NO: 84524 - RNA, 23 nt, Human
caguuaagugacuuccugcaaac

SEQ ID NO: 84525 - RNA, 23 nt, Human
caucacgucacaaaccaaacccc

SEQ ID NO: 84526 - RNA, 18 nt, Human
ccaaaagcauuugccuuc

SEQ ID NO: 84527 - RNA, 22 nt, Human
ccaaacccccuccaauuggcca

SEQ ID NO: 84528 - RNA, 22 nt, Human
ccagaucucauuacuguuaugc

SEQ ID NO: 84529 - RNA, 21 nt, Human
ccagcggacauauguacacca

SEQ ID NO: 84530 - RNA, 26 nt, Human
ccagcucccaaacaguuaagugacuu

SEQ ID NO: 84531 - RNA, 19 nt, Human
ccagucccuaauguuaaaa

SEQ ID NO: 84532 - RNA, 23 nt, Human
ccaucacgucacaaaccaaaccc

SEQ ID NO: 84533 - RNA, 19 nt, Human
cccaggacauucacccgau

SEQ ID NO: 84534 - RNA, 19 nt, Human
cccaucacgucacaaacca

SEQ ID NO: 84535 - RNA, 23 nt, Human
cccaucacgucacaaaccaaacc

SEQ ID NO: 84536 - RNA, 21 nt, Human
cccaugaucacugcugacucc

SEQ ID NO: 84537 - RNA, 27 nt, Human
cccaugaucacugcugacuccccucau

SEQ ID NO: 84538 - RNA, 23 nt, Human
ccccacccacucccuacccuccc

SEQ ID NO: 84539 - RNA, 21 nt, Human
ccccccacccacucccuaccc

SEQ ID NO: 84540 - RNA, 24 nt, Human
ccccccacccacucccuacccucc

SEQ ID NO: 84541 - RNA, 21 nt, Human
cccccccacccacucccuacc

SEQ ID NO: 84542 - RNA, 22 nt, Human
cccccucccccccacccacucc

SEQ ID NO: 84543 - RNA, 22 nt, Human
ccccgcgccggccgcgaucccc

SEQ ID NO: 84544 - RNA, 25 nt, Human
ccccuccaauuggccaguggggagg

SEQ ID NO: 84545 - RNA, 21 nt, Human
ccccucccccccacccacucc

SEQ ID NO: 84546 - RNA, 18 nt, Human
ccccucugagccggcucc

SEQ ID NO: 84547 - RNA, 18 nt, Human
ccccucugagccggcucc

SEQ ID NO: 84548 - RNA, 19 nt, Human
cccuaauguuaaaagcagu

SEQ ID NO: 84549 - RNA, 21 nt, Human
cccuccuucuccuucagcauc

SEQ ID NO: 84550 - RNA, 19 nt, Human
cccucggccgccucgccgu

SEQ ID NO: 84551 - RNA, 22 nt, Human
ccgccgccucuagccgccgccc

SEQ ID NO: 84552 - RNA, 22 nt, Human
ccgcgaucccccgacgggcgcg

SEQ ID NO: 84553 - RNA, 20 nt, Human
ccgcgccgccgccucuagcc

SEQ ID NO: 84554 - RNA, 20 nt, Human
ccgcgccggccgcgaucccc

SEQ ID NO: 84555 - RNA, 18 nt, Human
ccuauggcaaaagagaac

SEQ ID NO: 84556 - RNA, 22 nt, Human
ccucccccccacccacucccua

SEQ ID NO: 84557 - RNA, 20 nt, Human
ccuccuggcucacguuccag

SEQ ID NO: 84558 - RNA, 21 nt, Human
cgacacuuguaaacgcgaaga

SEQ ID NO: 84559 - RNA, 24 nt, Human
cgagccaaagccccaggacauuca

SEQ ID NO: 84560 - RNA, 25 nt, Human
cgccggccccucugagccggcuccc

SEQ ID NO: 84561 - RNA, 21 nt, Human
cggagguucggcucgcccucc

SEQ ID NO: 84562 - RNA, 20 nt, Human
cggcuucgguggagaggugc

SEQ ID NO: 84563 - RNA, 25 nt, Human
cggcuucugaaccccugcuccggcc

SEQ ID NO: 84564 - RNA, 23 nt, Human
cgucacaaaccaaacccccucca

SEQ ID NO: 84565 - RNA, 21 nt, Human
cguuccggcauucucuugcuc

SEQ ID NO: 84566 - RNA, 26 nt, Human
cguuucgcugccucgugcuaccccua

SEQ ID NO: 84567 - RNA, 21 nt, Human
cuagagugcaccauagcuccc

SEQ ID NO: 84568 - RNA, 24 nt, Human
cucccccccacccacucccuaccc

SEQ ID NO: 84569 - RNA, 19 nt, Human
cuccgccgcgccgccgccu

SEQ ID NO: 84570 - RNA, 21 nt, Human
cuccuucuccuucagcaucug

SEQ ID NO: 84571 - RNA, 20 nt, Human
cugagagacagcaagcauaa

SEQ ID NO: 84572 - RNA, 22 nt, Human
cugguuccuguuuugugacauu

SEQ ID NO: 84573 - RNA, 18 nt, Human
cuuuuucuuuugcaaaac

SEQ ID NO: 84574 - RNA, 20 nt, Human
gaugacagaucaugcuggag

SEQ ID NO: 84575 - RNA, 20 nt, Human
gcaaaacacuacccuccuuc

SEQ ID NO: 84576 - RNA, 20 nt, Human
gccccaggacauucacccga

SEQ ID NO: 84577 - RNA, 21 nt, Human
gccuuacccccucccccccac

SEQ ID NO: 84578 - RNA, 19 nt, Human
gcgcggcggccaagggggc

SEQ ID NO: 84579 - RNA, 23 nt, Human
gcggcggccaagggggcgggggc

SEQ ID NO: 84580 - RNA, 22 nt, Human
gcgguggcugcggagguucggc

SEQ ID NO: 84581 - RNA, 28 nt, Human
ggaaacugcaagagaggugccgguaccc

SEQ ID NO: 84582 - RNA, 21 nt, Human
ggcgcggcggccaagggggcg

SEQ ID NO: 84583 - RNA, 18 nt, Human
ggcgggggcgcggggcgc

SEQ ID NO: 84584 - RNA, 23 nt, Human
ggcgguggcugcggagguucggc

SEQ ID NO: 84585 - RNA, 20 nt, Human
guaguaaauuugaguuaugg

SEQ ID NO: 84586 - RNA, 19 nt, Human
guuaaaaaaguaaacaaaa

SEQ ID NO: 84587 - RNA, 23 nt, Human
guugguucuuuucuuuuucuuuu

SEQ ID NO: 84588 - RNA, 18 nt, Human
guugguugaugucacugg

SEQ ID NO: 84589 - RNA, 18 nt, Human
uaaaacaaguugcugcau

SEQ ID NO: 84590 - RNA, 22 nt, Human
uaaaacccaacagagucaaaag

SEQ ID NO: 84591 - RNA, 25 nt, Human
uaaaacccaacagagucaaaagcuc

SEQ ID NO: 84592 - RNA, 22 nt, Human
uaaaacuauuaaauuuuccaga

SEQ ID NO: 84593 - RNA, 20 nt, Human
uaaaaggguaacagcuggga

SEQ ID NO: 84594 - RNA, 21 nt, Human
uaaaaucaucagaaagcguua

SEQ ID NO: 84595 - RNA, 20 nt, Human
uaaauuuuccagaauaugac

SEQ ID NO: 84596 - RNA, 19 nt, Human
uaaccaaagagaggagaua

SEQ ID NO: 84597 - RNA, 23 nt, Human
uaaguugguugaugucacugauc

SEQ ID NO: 84598 - RNA, 21 nt, Human
uaccccuacagccucgaacac

SEQ ID NO: 84599 - RNA, 22 nt, Human
uaggaaaauuuggaaaaguuaa

SEQ ID NO: 84600 - RNA, 21 nt, Human
uaggaacacaggaaggagacc

SEQ ID NO: 84601 - RNA, 22 nt, Human
uaggaacacaggaaggagacca

SEQ ID NO: 84602 - RNA, 19 nt, Human
uaguauuccauguugccug

SEQ ID NO: 84603 - RNA, 18 nt, Human
uagucuuucaaaaauuca

SEQ ID NO: 84604 - RNA, 20 nt, Human
uauuccauguugccugcauu

SEQ ID NO: 84605 - RNA, 23 nt, Human
uauuggaaguuggagucagccgu

SEQ ID NO: 84606 - RNA, 24 nt, Human
ucaacucacccagcggacauaugu

SEQ ID NO: 84607 - RNA, 19 nt, Human
ucaguucacuuuucuggcc

SEQ ID NO: 84608 - RNA, 20 nt, Human
ucauuccacaauggugaagg

SEQ ID NO: 84609 - RNA, 25 nt, Human
uccauggucuuuuuaauauaaaaag

SEQ ID NO: 84610 - RNA, 20 nt, Human
ucccagcaaccagccuucca

SEQ ID NO: 84611 - RNA, 23 nt, Human
ucccaucacgucacaaaccaaac

SEQ ID NO: 84612 - RNA, 19 nt, Human
ucccauggacugcucccag

SEQ ID NO: 84613 - RNA, 24 nt, Human
uccccuaguggcauuaggauacaa

SEQ ID NO: 84614 - RNA, 22 nt, Human
ucccguggccgguccgggccuc

SEQ ID NO: 84615 - RNA, 20 nt, Human
ucccuacccucccccgcaaa

SEQ ID NO: 84616 - RNA, 21 nt, Human
uccgccgcgccgccgccucua

SEQ ID NO: 84617 - RNA, 25 nt, Human
uccgccgcgccgccgccucuagccg

SEQ ID NO: 84618 - RNA, 21 nt, Human
ucgugagaaaacacuuuccuu

SEQ ID NO: 84619 - RNA, 19 nt, Human
ucuauaauuaaaaaaaccc

SEQ ID NO: 84620 - RNA, 18 nt, Human
ucuguuuacuuucucccc

SEQ ID NO: 84621 - RNA, 18 nt, Human
ucuuaacuacaaaacuca

SEQ ID NO: 84622 - RNA, 24 nt, Human
ugaaauagguaggcacccuauguu

SEQ ID NO: 84623 - RNA, 18 nt, Human
ugaauaaaugcaguguga

SEQ ID NO: 84624 - RNA, 24 nt, Human
ugaaucagaaacgaguauggguca

SEQ ID NO: 84625 - RNA, 18 nt, Human
ugacccgcgcccacugca

SEQ ID NO: 84626 - RNA, 19 nt, Human
ugacccgcgcccacugcag

SEQ ID NO: 84627 - RNA, 19 nt, Human
ugagaggacaggggugaug

SEQ ID NO: 84628 - RNA, 25 nt, Human
ugagcucagugagaaauaggcagcc

SEQ ID NO: 84629 - RNA, 21 nt, Human
ugaucacugcugacuccccuc

SEQ ID NO: 84630 - RNA, 24 nt, Human
ugauguuaacuaaaagcauaggaa

SEQ ID NO: 84631 - RNA, 19 nt, Human
ugcagugugaaucuauaau

SEQ ID NO: 84632 - RNA, 22 nt, Human
uggaaagaugccacacguggcg

SEQ ID NO: 84633 - RNA, 18 nt, Human
uggagucagccgugaccc

SEQ ID NO: 84634 - RNA, 20 nt, Human
uggcgagggccccgccgagc

SEQ ID NO: 84635 - RNA, 24 nt, Human
uggcgguggcugcggagguucggc

SEQ ID NO: 84636 - RNA, 18 nt, Human
uggcuguuguauuggaag

SEQ ID NO: 84637 - RNA, 20 nt, Human
ugggaaguaaaugugcauuu

SEQ ID NO: 84638 - RNA, 20 nt, Human
ugggaguacuuuuguccuuu

SEQ ID NO: 84639 - RNA, 19 nt, Human
ugguauuuucccuuggugu

SEQ ID NO: 84640 - RNA, 21 nt, Human
ugguguucacuaguuauaggg

SEQ ID NO: 84641 - RNA, 20 nt, Human
uguagugaaacuggacacau

SEQ ID NO: 84642 - RNA, 20 nt, Human
ugugcuauggcguuuuuuuu

SEQ ID NO: 84643 - RNA, 22 nt, Human
uuaaaauaaguguuucaaaaau

SEQ ID NO: 84644 - RNA, 21 nt, Human
uuaaucucaaaaguuaacgug

SEQ ID NO: 84645 - RNA, 20 nt, Human
uucagguaaauggcauagau

SEQ ID NO: 84646 - RNA, 25 nt, Human
uuggcgguggcugcggagguucggc

SEQ ID NO: 84647 - RNA, 22 nt, Human
uugguuuaaaauaaguguuuca

SEQ ID NO: 84648 - RNA, 18 nt, Human
uuuaaaaguucuguacuu

SEQ ID NO: 84649 - RNA, 24 nt, Human
uuuucuguuccuauuucagcuccc

SEQ ID NO: 84650 - RNA, 22 nt, Human
accuccacuuucuaaaaauaag

SEQ ID NO: 84651 - RNA, 18 nt, Human
agaagaaaaauuucucau

SEQ ID NO: 84652 - RNA, 20 nt, Human
agaggaagagagggcgugag

SEQ ID NO: 84653 - RNA, 23 nt, Human
agauaagaaacgauuuauuauag

SEQ ID NO: 84654 - RNA, 22 nt, Human
agccuguugccauggcagauuc

SEQ ID NO: 84655 - RNA, 19 nt, Human
aggaagagacgagcgaugg

SEQ ID NO: 84656 - RNA, 19 nt, Human
aggaggcggcaggagagag

SEQ ID NO: 84657 - RNA, 23 nt, Human
caaaaacacaauacaaggucuga

SEQ ID NO: 84658 - RNA, 18 nt, Human
cacaucgcucggaccucc

SEQ ID NO: 84659 - RNA, 24 nt, Human
cacccaaagcaaaaaucaaauuua

SEQ ID NO: 84660 - RNA, 24 nt, Human
cauccccaagaggagcccacccaa

SEQ ID NO: 84661 - RNA, 22 nt, Human
ccaaagcaaaaaucaaauuuau

SEQ ID NO: 84662 - RNA, 19 nt, Human
ccauccccaagaggagccc

SEQ ID NO: 84663 - RNA, 21 nt, Human
ccauccccaagaggagcccac

SEQ ID NO: 84664 - RNA, 25 nt, Human
cccaggucaugcuuacuaguuuguc

SEQ ID NO: 84665 - RNA, 21 nt, Human
ccccagcugccuccgccucca

SEQ ID NO: 84666 - RNA, 22 nt, Human
ccgcagcauucgaagaucucaa

SEQ ID NO: 84667 - RNA, 20 nt, Human
cgacacaggaggcggcagga

SEQ ID NO: 84668 - RNA, 19 nt, Human
cggaaggcugagaggaaga

SEQ ID NO: 84669 - RNA, 19 nt, Human
cggaccuccccagcugccu

SEQ ID NO: 84670 - RNA, 22 nt, Human
cggcgugcgggggcggcccggg

SEQ ID NO: 84671 - RNA, 23 nt, Human
cggcgugcgggggcggcccgggg

SEQ ID NO: 84672 - RNA, 20 nt, Human
cuucacagcugugacauggu

SEQ ID NO: 84673 - RNA, 24 nt, Human
gagaaagauucuuugaaauacaga

SEQ ID NO: 84674 - RNA, 18 nt, Human
gagauuuacugcagagaa

SEQ ID NO: 84675 - RNA, 22 nt, Human
gcaaaaaucaaauuuauggauc

SEQ ID NO: 84676 - RNA, 23 nt, Human
gcaaaaaucaaauuuauggauca

SEQ ID NO: 84677 - RNA, 18 nt, Human
gccaaaaacacaauacaa

SEQ ID NO: 84678 - RNA, 19 nt, Human
gcgugcgggggcggcccgg

SEQ ID NO: 84679 - RNA, 24 nt, Human
ggaccuccccagcugccuccgccu

SEQ ID NO: 84680 - RNA, 21 nt, Human
ggccccgacggcggagcagcc

SEQ ID NO: 84681 - RNA, 22 nt, Human
ggcggcaggagagaggaagaga

SEQ ID NO: 84682 - RNA, 23 nt, Human
gggcggcgugcgggggcggcccg

SEQ ID NO: 84683 - RNA, 20 nt, Human
gugcgggggcggcccggggc

SEQ ID NO: 84684 - RNA, 21 nt, Human
uaaaauuuccaguacuaccau

SEQ ID NO: 84685 - RNA, 23 nt, Human
uaauuuaccaaauaaaagaugac

SEQ ID NO: 84686 - RNA, 23 nt, Human
uagaaaacuacaagcuagcaaau

SEQ ID NO: 84687 - RNA, 21 nt, Human
uauagagagaagaaaaauuuc

SEQ ID NO: 84688 - RNA, 24 nt, Human
uauggcacugucacuuaaaauuuu

SEQ ID NO: 84689 - RNA, 26 nt, Human
ucaccgggcggaaggcugagaggaag

SEQ ID NO: 84690 - RNA, 18 nt, Human
ucauccaaaauauagaaa

SEQ ID NO: 84691 - RNA, 19 nt, Human
ucauccaaaauauagaaau

SEQ ID NO: 84692 - RNA, 18 nt, Human
uccccagcugccuccgcc

SEQ ID NO: 84693 - RNA, 22 nt, Human
ucgcucggaccuccccagcugc

SEQ ID NO: 84694 - RNA, 25 nt, Human
ucuaaaaauaagaaguuuacucagu

SEQ ID NO: 84695 - RNA, 19 nt, Human
ugacuaacaaaguucacaa

SEQ ID NO: 84696 - RNA, 25 nt, Human
ugagaggaagagagggcgugagggg

SEQ ID NO: 84697 - RNA, 22 nt, Human
ugcaaauuccccugcgagauuu

SEQ ID NO: 84698 - RNA, 21 nt, Human
ugcgagauuuacugcagagaa

SEQ ID NO: 84699 - RNA, 22 nt, Human
uggcacugucacuuaaaauuuu

SEQ ID NO: 84700 - RNA, 21 nt, Human
ugggagaaacugaaaccaccc

SEQ ID NO: 84701 - RNA, 23 nt, Human
ugggagaaacugaaaccacccua

SEQ ID NO: 84702 - RNA, 18 nt, Human
uggggcucggcggcgcgg

SEQ ID NO: 84703 - RNA, 23 nt, Human
uguacagagagcuggcuggugcu

SEQ ID NO: 84704 - RNA, 23 nt, Human
ugucacuuaaaauuuuuuuuuuu

SEQ ID NO: 84705 - RNA, 20 nt, Human
uuccucaccgggcggaaggc

SEQ ID NO: 84706 - RNA, 19 nt, Human
uuggacucacaggcuauua

SEQ ID NO: 84707 - RNA, 24 nt, Human
uuuuuuuuuuuaccauucuaucuu

SEQ ID NO: 84708 - RNA, 22 nt, Human
aaaaggaggcagagcuggcagg

SEQ ID NO: 84709 - RNA, 20 nt, Human
aaagcagcacuagcaaagca

SEQ ID NO: 84710 - RNA, 21 nt, Human
aaauacgguagcucuaugacc

SEQ ID NO: 84711 - RNA, 22 nt, Human
aaccuugcuugcucccucucac

SEQ ID NO: 84712 - RNA, 23 nt, Human
aacuuuugguuucuuuuccuccu

SEQ ID NO: 84713 - RNA, 19 nt, Human
aagaagagaagagagacaa

SEQ ID NO: 84714 - RNA, 22 nt, Human
aagcaauaaagacuggaagcag

SEQ ID NO: 84715 - RNA, 21 nt, Human
aagcccaccagggcaucagga

SEQ ID NO: 84716 - RNA, 20 nt, Human
aagggaagggggaggggagg

SEQ ID NO: 84717 - RNA, 23 nt, Human
aauaaccuccaguucccuccucc

SEQ ID NO: 84718 - RNA, 21 nt, Human
aauguggagaguugaaaagga

SEQ ID NO: 84719 - RNA, 23 nt, Human
acaaagcagcacuagcaaagcaa

SEQ ID NO: 84720 - RNA, 22 nt, Human
acagacagcaaccuuucccaca

SEQ ID NO: 84721 - RNA, 18 nt, Human
acagacucaagcacgcac

SEQ ID NO: 84722 - RNA, 22 nt, Human
accccaauaaccuccaguuccc

SEQ ID NO: 84723 - RNA, 20 nt, Human
accuggaguucccuguagcu

SEQ ID NO: 84724 - RNA, 26 nt, Human
agaaaagauaacauaguauuguuuaa

SEQ ID NO: 84725 - RNA, 21 nt, Human
agaagggaagggggaggggag

SEQ ID NO: 84726 - RNA, 19 nt, Human
agacucaagcacgcaacag

SEQ ID NO: 84727 - RNA, 21 nt, Human
agagacaagauuaagcaugag

SEQ ID NO: 84728 - RNA, 19 nt, Human
agagacaggccugcucaac

SEQ ID NO: 84729 - RNA, 20 nt, Human
agaggaaguggggugaagau

SEQ ID NO: 84730 - RNA, 19 nt, Human
agaggagaguugugcuuuu

SEQ ID NO: 84731 - RNA, 23 nt, Human
agaggccuuuucacucucugccc

SEQ ID NO: 84732 - RNA, 18 nt, Human
agaguugaaaaggaggca

SEQ ID NO: 84733 - RNA, 22 nt, Human
agcaggaggguggccauccugg

SEQ ID NO: 84734 - RNA, 18 nt, Human
agccaaggaauacaugca

SEQ ID NO: 84735 - RNA, 22 nt, Human
aggaagggaguuucuucccagu

SEQ ID NO: 84736 - RNA, 21 nt, Human
aggagagacaggccugcucaa

SEQ ID NO: 84737 - RNA, 21 nt, Human
aggcaauacaaaauguggaga

SEQ ID NO: 84738 - RNA, 24 nt, Human
aggcagacacuggcucacagacuc

SEQ ID NO: 84739 - RNA, 21 nt, Human
agggaugcaggugucuggcug

SEQ ID NO: 84740 - RNA, 20 nt, Human
aguaauagaggagccaggga

SEQ ID NO: 84741 - RNA, 20 nt, Human
caaagcagcacuagcaaagc

SEQ ID NO: 84742 - RNA, 19 nt, Human
caagaauaccaaguagucu

SEQ ID NO: 84743 - RNA, 19 nt, Human
cacaaaccagaaaauuagc

SEQ ID NO: 84744 - RNA, 19 nt, Human
cacagacucaagcacgcaa

SEQ ID NO: 84745 - RNA, 24 nt, Human
caccagggagaaaaaacagugccc

SEQ ID NO: 84746 - RNA, 18 nt, Human
cacuagcaaagcaaaggu

SEQ ID NO: 84747 - RNA, 20 nt, Human
cacucucccauucagccaag

SEQ ID NO: 84748 - RNA, 21 nt, Human
cagaauagcuuacaaacauac

SEQ ID NO: 84749 - RNA, 22 nt, Human
cagacagcaaccuuucccacag

SEQ ID NO: 84750 - RNA, 21 nt, Human
cagcagcaucaagacuuucau

SEQ ID NO: 84751 - RNA, 20 nt, Human
cagcaggaggguggccaucc

SEQ ID NO: 84752 - RNA, 18 nt, Human
caggaggguggccauccu

SEQ ID NO: 84753 - RNA, 25 nt, Human
cagggcaaaucccgaccucucuguu

SEQ ID NO: 84754 - RNA, 20 nt, Human
caguucccuccucccccccu

SEQ ID NO: 84755 - RNA, 19 nt, Human
ccaagcagcucccuugaag

SEQ ID NO: 84756 - RNA, 21 nt, Human
ccacuuccaagcagcucccuu

SEQ ID NO: 84757 - RNA, 24 nt, Human
cccaauaaccuccaguucccuccu

SEQ ID NO: 84758 - RNA, 22 nt, Human
cccacaaaccagaaaauuagcu

SEQ ID NO: 84759 - RNA, 19 nt, Human
ccccaauaaccuccaguuc

SEQ ID NO: 84760 - RNA, 20 nt, Human
ccccagggcaaaucccgacc

SEQ ID NO: 84761 - RNA, 22 nt, Human
cccccagggcaaaucccgaccu

SEQ ID NO: 84762 - RNA, 21 nt, Human
cccccuaacagcucccccucc

SEQ ID NO: 84763 - RNA, 22 nt, Human
ccccucagaaaacccaaagcuu

SEQ ID NO: 84764 - RNA, 18 nt, Human
cccuaacagcucccccuc

SEQ ID NO: 84765 - RNA, 21 nt, Human
ccucccccccucagaaaaccc

SEQ ID NO: 84766 - RNA, 24 nt, Human
ccucucuuccucccccagggcaaa

SEQ ID NO: 84767 - RNA, 20 nt, Human
ccuggccaaaugcccuagcc

SEQ ID NO: 84768 - RNA, 21 nt, Human
ccuggccaaaugcccuagccc

SEQ ID NO: 84769 - RNA, 22 nt, Human
ccuggccaaaugcccuagcccu

SEQ ID NO: 84770 - RNA, 23 nt, Human
ccuuccauccuaaccccaauaac

SEQ ID NO: 84771 - RNA, 18 nt, Human
ccuugcuugcucccucuc

SEQ ID NO: 84772 - RNA, 20 nt, Human
ccuuggcuaggucuaccccc

SEQ ID NO: 84773 - RNA, 18 nt, Human
cgcccagggcgggggcgg

SEQ ID NO: 84774 - RNA, 18 nt, Human
cucccucucacaucuucc

SEQ ID NO: 84775 - RNA, 23 nt, Human
cugaacuuggccucucuuccucc

SEQ ID NO: 84776 - RNA, 27 nt, Human
cuuacaaacauacuacuacuauuuauu

SEQ ID NO: 84777 - RNA, 24 nt, Human
cuuccauauaaaaacacuaucaua

SEQ ID NO: 84778 - RNA, 18 nt, Human
cuugcagaacauggggca

SEQ ID NO: 84779 - RNA, 20 nt, Human
cuugcucccucucacaucuu

SEQ ID NO: 84780 - RNA, 22 nt, Human
cuugggucugugggcccaaagu

SEQ ID NO: 84781 - RNA, 23 nt, Human
gaaaagaaggcaguaauaaagga

SEQ ID NO: 84782 - RNA, 21 nt, Human
gaaagcaacaucuacaggccc

SEQ ID NO: 84783 - RNA, 22 nt, Human
gaagggaagggggaggggaggg

SEQ ID NO: 84784 - RNA, 19 nt, Human
gagaaaaaacagugcccaa

SEQ ID NO: 84785 - RNA, 19 nt, Human
gaguaauagaggagccagg

SEQ ID NO: 84786 - RNA, 24 nt, Human
gcaaagcaaagguuuugugcagag

SEQ ID NO: 84787 - RNA, 18 nt, Human
gcaacagcaggagggugg

SEQ ID NO: 84788 - RNA, 18 nt, Human
gcaggagagaugguuccc

SEQ ID NO: 84789 - RNA, 23 nt, Human
gccaaaugcccuagcccuguccu

SEQ ID NO: 84790 - RNA, 20 nt, Human
gccuuuucacucucugccca

SEQ ID NO: 84791 - RNA, 18 nt, Human
gcucugagcaccagggag

SEQ ID NO: 84792 - RNA, 23 nt, Human
gcuguggggaggagaaccugggg

SEQ ID NO: 84793 - RNA, 18 nt, Human
ggaaagcaacaucuacag

SEQ ID NO: 84794 - RNA, 23 nt, Human
ggaaggcaauacaaaauguggag

SEQ ID NO: 84795 - RNA, 18 nt, Human
ggaagggggaggggaggg

SEQ ID NO: 84796 - RNA, 22 nt, Human
ggcugggggagacagagagcuc

SEQ ID NO: 84797 - RNA, 18 nt, Human
gggaagggggaggggagg

SEQ ID NO: 84798 - RNA, 18 nt, Human
gggcaaaucccgaccucu

SEQ ID NO: 84799 - RNA, 20 nt, Human
gggcaacagcaggagggugg

SEQ ID NO: 84800 - RNA, 19 nt, Human
ggggacuggcuguggggag

SEQ ID NO: 84801 - RNA, 27 nt, Human
gucuacccccuaacagcucccccuccu

SEQ ID NO: 84802 - RNA, 21 nt, Human
gugguggccuguugucacggc

SEQ ID NO: 84803 - RNA, 20 nt, Human
guucccuccucccccccuca

SEQ ID NO: 84804 - RNA, 23 nt, Human
uaaagcaauaaagacuggaagca

SEQ ID NO: 84805 - RNA, 21 nt, Human
uaaaggaccuggaguucccug

SEQ ID NO: 84806 - RNA, 23 nt, Human
uaaauagcaccuuugagucaaaa

SEQ ID NO: 84807 - RNA, 19 nt, Human
uaaccuccaguucccuccu

SEQ ID NO: 84808 - RNA, 20 nt, Human
uaaguccaggcaugaaugcc

SEQ ID NO: 84809 - RNA, 23 nt, Human
uacaagaauaccaaguagucuug

SEQ ID NO: 84810 - RNA, 21 nt, Human
uagaaaauacgguagcucuau

SEQ ID NO: 84811 - RNA, 18 nt, Human
uagccagccaucauccca

SEQ ID NO: 84812 - RNA, 26 nt, Human
uagugucggcccuacaagaauaccaa

SEQ ID NO: 84813 - RNA, 24 nt, Human
uauuaaaguaacaaaaagguguac

SEQ ID NO: 84814 - RNA, 21 nt, Human
ucacucucugcccaggaccuc

SEQ ID NO: 84815 - RNA, 19 nt, Human
ucacugagaaauugaagga

SEQ ID NO: 84816 - RNA, 20 nt, Human
uccaagcagcucccuugaag

SEQ ID NO: 84817 - RNA, 24 nt, Human
ucccuccucccccccucagaaaac

SEQ ID NO: 84818 - RNA, 18 nt, Human
uccugggacccagggggc

SEQ ID NO: 84819 - RNA, 20 nt, Human
ucgggcucagugagaggucu

SEQ ID NO: 84820 - RNA, 22 nt, Human
ucuacaggccccugaggguaga

SEQ ID NO: 84821 - RNA, 25 nt, Human
ugaaaaggaggcagagcuggcagga

SEQ ID NO: 84822 - RNA, 21 nt, Human
ugagacagacagcaaccuuuc

SEQ ID NO: 84823 - RNA, 22 nt, Human
ugagacagacagcaaccuuucc

SEQ ID NO: 84824 - RNA, 27 nt, Human
uggauacucuuugggucccaaaauuuc

SEQ ID NO: 84825 - RNA, 19 nt, Human
uggcaggaauggguaggag

SEQ ID NO: 84826 - RNA, 21 nt, Human
uggcaggaauggguagggaga

SEQ ID NO: 84827 - RNA, 19 nt, Human
uggccaaaaaacaucccca

SEQ ID NO: 84828 - RNA, 26 nt, Human
uggccaaaaaacauccccaguggaua

SEQ ID NO: 84829 - RNA, 21 nt, Human
uggcuggaaagcaacaucuac

SEQ ID NO: 84830 - RNA, 24 nt, Human
ugggaaggcaauacaaaaugugga

SEQ ID NO: 84831 - RNA, 20 nt, Human
ugucacggcagcaugagcac

SEQ ID NO: 84832 - RNA, 23 nt, Human
uuagaaaaauaaaagaaaagaua

SEQ ID NO: 84833 - RNA, 24 nt, Human
uuaggacaguaggaaucaggagag

SEQ ID NO: 84834 - RNA, 25 nt, Human
uuauuaaaguaacaaaaagguguac

SEQ ID NO: 84835 - RNA, 22 nt, Human
uucaacccacaaaccagaaaau

SEQ ID NO: 84836 - RNA, 20 nt, Human
uucacaguugcuaaccuugc

SEQ ID NO: 84837 - RNA, 19 nt, Human
uugaaaaggaggcagagcu

SEQ ID NO: 84838 - RNA, 21 nt, Human
uuugccacacauacacacaaa

SEQ ID NO: 84839 - RNA, 20 nt, Human
uuugguuucuuuuccuccuu

SEQ ID NO: 84840 - RNA, 20 nt, Human
aaauagauuuccuuguauau

SEQ ID NO: 84841 - RNA, 21 nt, Human
aacaugacaccaacacaauca

SEQ ID NO: 84842 - RNA, 24 nt, Human
aauuucucaaacuauaucaauauc

SEQ ID NO: 84843 - RNA, 21 nt, Human
caacuacaugauuucacacaa

SEQ ID NO: 84844 - RNA, 26 nt, Human
caacuacaugauuucacacaauucuc

SEQ ID NO: 84845 - RNA, 19 nt, Human
caugacaccaacacaauca

SEQ ID NO: 84846 - RNA, 19 nt, Human
cccagaccguguccuggcc

SEQ ID NO: 84847 - RNA, 19 nt, Human
cccgcgcugggcaacaggg

SEQ ID NO: 84848 - RNA, 18 nt, Human
ccgccgcugccgccgccg

SEQ ID NO: 84849 - RNA, 19 nt, Human
ccgccgcugccgccgccgc

SEQ ID NO: 84850 - RNA, 22 nt, Human
ccgccgcugccgccgccgcucu

SEQ ID NO: 84851 - RNA, 18 nt, Human
ccgcucuucggccggaga

SEQ ID NO: 84852 - RNA, 23 nt, Human
ccggcgcgugcggcucccgcguc

SEQ ID NO: 84853 - RNA, 21 nt, Human
cgacauaaaauagauuuccuu

SEQ ID NO: 84854 - RNA, 18 nt, Human
cgccgcugccgccgccgc

SEQ ID NO: 84855 - RNA, 19 nt, Human
cugccgccgccgcucuucg

SEQ ID NO: 84856 - RNA, 22 nt, Human
gacaccaacacaaucaaaaacg

SEQ ID NO: 84857 - RNA, 20 nt, Human
ggcaacagggagcgcagcga

SEQ ID NO: 84858 - RNA, 22 nt, Human
ggccggagauucggcggcccag

SEQ ID NO: 84859 - RNA, 19 nt, Human
ggccgggaacugagggcuc

SEQ ID NO: 84860 - RNA, 23 nt, Human
uaaaacaaaucguccacuucuac

SEQ ID NO: 84861 - RNA, 24 nt, Human
uauuugcaacuacaugauuucaca

SEQ ID NO: 84862 - RNA, 24 nt, Human
ucaaaggggcuaaaacaaaucguc

SEQ ID NO: 84863 - RNA, 20 nt, Human
ucccgccgcugccgccgccg

SEQ ID NO: 84864 - RNA, 20 nt, Human
uccggcgcgugcggcucccg

SEQ ID NO: 84865 - RNA, 21 nt, Human
uccuggccgggaacugagggc

SEQ ID NO: 84866 - RNA, 24 nt, Human
ugccucaaacuauuuuuuauuugc

SEQ ID NO: 84867 - RNA, 20 nt, Human
uggcccaucuaacuucacua

SEQ ID NO: 84868 - RNA, 23 nt, Human
uuucccgccgcugccgccgccgc

SEQ ID NO: 84869 - RNA, 21 nt, Human
uuuucccgccgcugccgccgc

SEQ ID NO: 84870 - RNA, 22 nt, Human
uuuuuucccgccgcugccgcua

SEQ ID NO: 84871 - RNA, 23 nt, Human
uuuuuuuuuuuuuuuugccucaa

SEQ ID NO: 84872 - RNA, 18 nt, Human
uuuuuuuuuuuuuuuuug

SEQ ID NO: 84873 - RNA, 21 nt, Human
uuuuuuuuuuuuuuuuugccu

SEQ ID NO: 84874 - RNA, 19 nt, Human
aaggugccuucuucuacca

SEQ ID NO: 84875 - RNA, 22 nt, Human
aggcagugccuuccaaggugcc

SEQ ID NO: 84876 - RNA, 22 nt, Human
auuucuucucaucuuccugcca

SEQ ID NO: 84877 - RNA, 19 nt, Human
cagugccuuccaaggugcc

SEQ ID NO: 84878 - RNA, 21 nt, Human
cagugccuuccaaggugccuu

SEQ ID NO: 84879 - RNA, 25 nt, Human
ccugaagauuucuucucaucuuccu

SEQ ID NO: 84880 - RNA, 20 nt, Human
cuucucaucuuccugccaug

SEQ ID NO: 84881 - RNA, 24 nt, Human
uaccaggugcugcaaauucauucc

SEQ ID NO: 84882 - RNA, 26 nt, Human
ucacccugaagauuucuucucaucuu

SEQ ID NO: 84883 - RNA, 23 nt, Human
uccaaggugccuucuucuaccag

SEQ ID NO: 84884 - RNA, 23 nt, Human
uuuuuuauucuuuucaggcucca

SEQ ID NO: 84885 - RNA, 24 nt, Human
aaaacacccuccccucccaucuuu

SEQ ID NO: 84886 - RNA, 24 nt, Human
aaaacacccuccccucccaucuuu

SEQ ID NO: 84887 - RNA, 23 nt, Human
aauuuuuuggccuuugcucagaa

SEQ ID NO: 84888 - RNA, 19 nt, Human
acacacccccaagcucuac

SEQ ID NO: 84889 - RNA, 21 nt, Human
acacccccaagcucuaccaaa

SEQ ID NO: 84890 - RNA, 20 nt, Human
acuuggaaggugggacucga

SEQ ID NO: 84891 - RNA, 26 nt, Human
cacacacacccccaagcucuaccaaa

SEQ ID NO: 84892 - RNA, 18 nt, Human
cacccccaagcucuacca

SEQ ID NO: 84893 - RNA, 19 nt, Human
cacccccaagcucuaccaa

SEQ ID NO: 84894 - RNA, 20 nt, Human
cacccuccccucccaucuuu

SEQ ID NO: 84895 - RNA, 24 nt, Human
cacccuccccucccaucuuuauga

SEQ ID NO: 84896 - RNA, 22 nt, Human
cagaagccacuaucccagggaa

SEQ ID NO: 84897 - RNA, 19 nt, Human
cccacacacacacccccaa

SEQ ID NO: 84898 - RNA, 20 nt, Human
cccagauguagagaggggcc

SEQ ID NO: 84899 - RNA, 21 nt, Human
cccccaagcucuaccaaaugc

SEQ ID NO: 84900 - RNA, 21 nt, Human
cccccacacacacacccccaa

SEQ ID NO: 84901 - RNA, 19 nt, Human
cccuccccucccaucuuua

SEQ ID NO: 84902 - RNA, 22 nt, Human
cuggaguucaccugugugcuca

SEQ ID NO: 84903 - RNA, 24 nt, Human
cuugccaaauucgguccaccccca

SEQ ID NO: 84904 - RNA, 22 nt, Human
gcuuguggagaagagaaguaga

SEQ ID NO: 84905 - RNA, 28 nt, Human
uauuuuaucaaaacacccuccccuccca

SEQ ID NO: 84906 - RNA, 22 nt, Human
uccacccccacacacacacccc

SEQ ID NO: 84907 - RNA, 24 nt, Human
uccacccccacacacacaccccca

SEQ ID NO: 84908 - RNA, 18 nt, Human
ugagaugccaggacuugg

SEQ ID NO: 84909 - RNA, 23 nt, Human
ugccaaauucgguccacccccac

SEQ ID NO: 84910 - RNA, 18 nt, Human
ugcucaguccugacuuaa

SEQ ID NO: 84911 - RNA, 20 nt, Human
uuggaaggugggacucgauc

SEQ ID NO: 84912 - RNA, 20 nt, Human
uuuacauccucccuccuaaa

SEQ ID NO: 84913 - RNA, 19 nt, Human
uuugcucagaagccacuau

SEQ ID NO: 84914 - RNA, 18 nt, Human
uuuggccuuugcucagaa

SEQ ID NO: 84915 - RNA, 23 nt, Human
uuuuuuaagcuuucuagaauuua

SEQ ID NO: 84916 - RNA, 23 nt, Human
uuuuuuuuuuuuuuuuaagcuuu

SEQ ID NO: 84917 - RNA, 22 nt, Human
uuuuuuuuuuuuuuuuuuuaag

SEQ ID NO: 84918 - RNA, 23 nt, Human
aaacuaaaccuaaugugagucua

SEQ ID NO: 84919 - RNA, 21 nt, Human
aacacaucauuagcaaacacu

SEQ ID NO: 84920 - RNA, 25 nt, Human
aaccucagcgcagaagaacuucagc

SEQ ID NO: 84921 - RNA, 25 nt, Human
acacugugcccucaaaccugcaagc

SEQ ID NO: 84922 - RNA, 21 nt, Human
aggcaggaaucacuguccgug

SEQ ID NO: 84923 - RNA, 25 nt, Human
cacaaacuaaaccuaaugugagucu

SEQ ID NO: 84924 - RNA, 24 nt, Human
caggcuccggagaggaagcugggg

SEQ ID NO: 84925 - RNA, 22 nt, Human
cagggguggauggaugauuugg

SEQ ID NO: 84926 - RNA, 23 nt, Human
cagggucaggccaauccccccuc

SEQ ID NO: 84927 - RNA, 24 nt, Human
ccaauccccccucaucuggaagcu

SEQ ID NO: 84928 - RNA, 23 nt, Human
ccugugaggcaggaaucacuguc

SEQ ID NO: 84929 - RNA, 19 nt, Human
cucccuaaaggagaguggg

SEQ ID NO: 84930 - RNA, 19 nt, Human
cuggggccaccugucggga

SEQ ID NO: 84931 - RNA, 18 nt, Human
ggaauaagcaaacagagu

SEQ ID NO: 84932 - RNA, 18 nt, Human
ggagccugggagguugug

SEQ ID NO: 84933 - RNA, 23 nt, Human
gugaggcaggaaucacuguccgu

SEQ ID NO: 84934 - RNA, 19 nt, Human
guggagaggcucuucauga

SEQ ID NO: 84935 - RNA, 27 nt, Human
uaaaaacacaucauuagcaaacacugu

SEQ ID NO: 84936 - RNA, 22 nt, Human
uaaaggagaguggggggcguga

SEQ ID NO: 84937 - RNA, 23 nt, Human
uagcaaacacugugcccucaaac

SEQ ID NO: 84938 - RNA, 19 nt, Human
ucaccugugaggcaggaau

SEQ ID NO: 84939 - RNA, 24 nt, Human
ucaggccagcugucucaggcgcag

SEQ ID NO: 84940 - RNA, 21 nt, Human
ucaucuggaagcugugacugc

SEQ ID NO: 84941 - RNA, 18 nt, Human
uccggagaggaagcuggg

SEQ ID NO: 84942 - RNA, 23 nt, Human
uccgugacuagcaaaugaggagc

SEQ ID NO: 84943 - RNA, 18 nt, Human
ucugugcgcaggcuccgg

SEQ ID NO: 84944 - RNA, 24 nt, Human
ucugugguguggggcccuuuaagc

SEQ ID NO: 84945 - RNA, 26 nt, Human
ugcccucaaaccugcaagcaugauuc

SEQ ID NO: 84946 - RNA, 22 nt, Human
uggauggaugauuuggagguca

SEQ ID NO: 84947 - RNA, 22 nt, Human
uggcuucugacucccacagggu

SEQ ID NO: 84948 - RNA, 19 nt, Human
ugugacugccgcugcugca

SEQ ID NO: 84949 - RNA, 21 nt, Human
uucaagaucgcuuagcuggau

SEQ ID NO: 84950 - RNA, 22 nt, Human
aagucaccuuugucuggaacca

SEQ ID NO: 84951 - RNA, 23 nt, Human
aagucaccuuugucuggaaccaa

SEQ ID NO: 84952 - RNA, 23 nt, Human
agaggugaaaggaggagaggagg

SEQ ID NO: 84953 - RNA, 18 nt, Human
aggaggagaggaggggag

SEQ ID NO: 84954 - RNA, 20 nt, Human
caguaguuugauuguuacug

SEQ ID NO: 84955 - RNA, 20 nt, Human
ccacuggguccgcucuccgc

SEQ ID NO: 84956 - RNA, 24 nt, Human
cccugcuccucggcuaguccaggg

SEQ ID NO: 84957 - RNA, 19 nt, Human
ccguccugggccgacugca

SEQ ID NO: 84958 - RNA, 22 nt, Human
gacaucuucugauagcagcacu

SEQ ID NO: 84959 - RNA, 25 nt, Human
gcagcacugaagcagucaguugugc

SEQ ID NO: 84960 - RNA, 21 nt, Human
gcugaguagaccguccugggc

SEQ ID NO: 84961 - RNA, 27 nt, Human
ggaaccaaugggaaaaaaccgguaccc

SEQ ID NO: 84962 - RNA, 18 nt, Human
ggugaaaggaggagagga

SEQ ID NO: 84963 - RNA, 23 nt, Human
gugaaaggaggagaggaggggag

SEQ ID NO: 84964 - RNA, 20 nt, Human
uaaaaguuccaaucauucac

SEQ ID NO: 84965 - RNA, 28 nt, Human
uccugggccgacugcagaccaacugugu

SEQ ID NO: 84966 - RNA, 18 nt, Human
ugaaaggaggagaggagg

SEQ ID NO: 84967 - RNA, 19 nt, Human
ugggaaaaaacuaggugca

SEQ ID NO: 84968 - RNA, 23 nt, Human
ugggaaaaaacuaggugcagagg

SEQ ID NO: 84969 - RNA, 18 nt, Human
ugucuggaaccaauggga

SEQ ID NO: 84970 - RNA, 24 nt, Human
ugucuggaaccaaugggaaaaaac

SEQ ID NO: 84971 - RNA, 19 nt, Human
uuuucuggcaaaacacuaa

SEQ ID NO: 84972 - RNA, 20 nt, Human
aaaccugaaccgcaaacuag

SEQ ID NO: 84973 - RNA, 20 nt, Human
aacaaacauuuacauaaaca

SEQ ID NO: 84974 - RNA, 21 nt, Human
cagcggcaaaccugaaccgca

SEQ ID NO: 84975 - RNA, 18 nt, Human
cagugugauuuuuaagga

SEQ ID NO: 84976 - RNA, 24 nt, Human
gaaaaaaaaacagguuuaaaguga

SEQ ID NO: 84977 - RNA, 24 nt, Human
ggccggcagcggcaaaccugaacc

SEQ ID NO: 84978 - RNA, 18 nt, Human
uacauaaacaauaaauga

SEQ ID NO: 84979 - RNA, 22 nt, Human
uacauaaacaauaaaugaaaaa

SEQ ID NO: 84980 - RNA, 23 nt, Human
uggccggcagcggcaaaccugaa

SEQ ID NO: 84981 - RNA, 20 nt, Human
uuuacauaaacaauaaauga

SEQ ID NO: 84982 - RNA, 18 nt, Human
acagcaaugguagugcau

SEQ ID NO: 84983 - RNA, 30 nt, Human
acagcaaugguagugcaucuaaaugugucc

SEQ ID NO: 84984 - RNA, 19 nt, Human
accaaaaaguagaacagca

SEQ ID NO: 84985 - RNA, 20 nt, Human
accgccugggcuuucuuccg

SEQ ID NO: 84986 - RNA, 21 nt, Human
agagacaaauggguuaaauaa

SEQ ID NO: 84987 - RNA, 18 nt, Human
aggcacgcacacgacucc

SEQ ID NO: 84988 - RNA, 20 nt, Human
cacuguauaaaaaauaucag

SEQ ID NO: 84989 - RNA, 24 nt, Human
cauugcucugaggcagcaaucugu

SEQ ID NO: 84990 - RNA, 21 nt, Human
ccucguccugcugcaggccuu

SEQ ID NO: 84991 - RNA, 20 nt, Human
cgaccaaggcacgcacacga

SEQ ID NO: 84992 - RNA, 22 nt, Human
cugcugcaggccuuuccucugg

SEQ ID NO: 84993 - RNA, 21 nt, Human
cugggcuuucuuccgcaaccu

SEQ ID NO: 84994 - RNA, 20 nt, Human
gcaaugguagugcaucuaaa

SEQ ID NO: 84995 - RNA, 19 nt, Human
uacaaaugggaaaaguaca

SEQ ID NO: 84996 - RNA, 22 nt, Human
uacaaccauugcucugaggcag

SEQ ID NO: 84997 - RNA, 23 nt, Human
uacagggaaaaguagagacaaau

SEQ ID NO: 84998 - RNA, 21 nt, Human
uaccaaaaaguagaacagcaa

SEQ ID NO: 84999 - RNA, 18 nt, Human
ucagguccucguccugcu

SEQ ID NO: 85000 - RNA, 23 nt, Human
uccugcugcaggccuuuccucug

SEQ ID NO: 85001 - RNA, 24 nt, Human
ugaguaaguauaucacuguauaaa

SEQ ID NO: 85002 - RNA, 18 nt, Human
ugcugcaggccuuuccuc

SEQ ID NO: 85003 - RNA, 23 nt, Human
uuuuuuuuuuuuuuuuuuaacag

SEQ ID NO: 85004 - RNA, 24 nt, Human
aaaaaaagacccuucucuguauca

SEQ ID NO: 85005 - RNA, 20 nt, Human
aaaaaaauucaaaaaccucu

SEQ ID NO: 85006 - RNA, 20 nt, Human
aaaagagcucaaacuguuca

SEQ ID NO: 85007 - RNA, 22 nt, Human
aaaauacaucacggauaaaaua

SEQ ID NO: 85008 - RNA, 24 nt, Human
aaacaaaaaaucaucaaggucaaa

SEQ ID NO: 85009 - RNA, 18 nt, Human
aaacaaauggcucacgag

SEQ ID NO: 85010 - RNA, 22 nt, Human
aaauaaaucucaggaaaggucc

SEQ ID NO: 85011 - RNA, 22 nt, Human
aaauagaugccugucuaaaugc

SEQ ID NO: 85012 - RNA, 22 nt, Human
aaaucaucaaggucaaaacuga

SEQ ID NO: 85013 - RNA, 24 nt, Human
aaaugucagagaaauauguaaacc

SEQ ID NO: 85014 - RNA, 22 nt, Human
aauaauggacggccaagaggaa

SEQ ID NO: 85015 - RNA, 21 nt, Human
aaucaucaaggucaaaacuga

SEQ ID NO: 85016 - RNA, 25 nt, Human
aaugaagaaaauacauuucaaaaga

SEQ ID NO: 85017 - RNA, 23 nt, Human
acaaagacuccucauccuaaaca

SEQ ID NO: 85018 - RNA, 22 nt, Human
acagaaaacagagaaauccaca

SEQ ID NO: 85019 - RNA, 21 nt, Human
accucauuaauguuuccaaaa

SEQ ID NO: 85020 - RNA, 23 nt, Human
acugcaauuacguuacaauuauu

SEQ ID NO: 85021 - RNA, 21 nt, Human
agaaauaacagguuuagagua

SEQ ID NO: 85022 - RNA, 19 nt, Human
agacagaaaacagagaaau

SEQ ID NO: 85023 - RNA, 21 nt, Human
agauagaaacagguccaaaua

SEQ ID NO: 85024 - RNA, 21 nt, Human
aggaagcaaacaaagcuuucc

SEQ ID NO: 85025 - RNA, 19 nt, Human
aggagguuuucuuauuagu

SEQ ID NO: 85026 - RNA, 22 nt, Human
aguggaaacaaaaaaucaucaa

SEQ ID NO: 85027 - RNA, 21 nt, Human
auacuuaaaaaaaaaaagacc

SEQ ID NO: 85028 - RNA, 24 nt, Human
auucaaaaaccucuuuuccauuau

SEQ ID NO: 85029 - RNA, 20 nt, Human
caaaagaaacaaauggcuca

SEQ ID NO: 85030 - RNA, 19 nt, Human
caaacaaagcuuuccauag

SEQ ID NO: 85031 - RNA, 18 nt, Human
cacugaaauacuuaaaaa

SEQ ID NO: 85032 - RNA, 22 nt, Human
cagaaaacagagaaauccacag

SEQ ID NO: 85033 - RNA, 19 nt, Human
cagauacagcaacugggcu

SEQ ID NO: 85034 - RNA, 23 nt, Human
cagcaaaagaaacaaauggcuca

SEQ ID NO: 85035 - RNA, 18 nt, Human
cagcaaaccaucaaacca

SEQ ID NO: 85036 - RNA, 20 nt, Human
caggaaagguccaaguccua

SEQ ID NO: 85037 - RNA, 23 nt, Human
cauaagaacuauauaaaugucag

SEQ ID NO: 85038 - RNA, 20 nt, Human
ccauagagaaaccacuuuca

SEQ ID NO: 85039 - RNA, 19 nt, Human
cccaagagucuaaccuuaa

SEQ ID NO: 85040 - RNA, 18 nt, Human
ccgccgccgccuccuugc

SEQ ID NO: 85041 - RNA, 18 nt, Human
cgcucggccgccgccgcc

SEQ ID NO: 85042 - RNA, 23 nt, Human
cguuuccacuacucgccacucgc

SEQ ID NO: 85043 - RNA, 20 nt, Human
cucgcucggccgccgccgcc

SEQ ID NO: 85044 - RNA, 21 nt, Human
cugacucaaacaauuugcccu

SEQ ID NO: 85045 - RNA, 22 nt, Human
gaagaaaauacauuucaaaaga

SEQ ID NO: 85046 - RNA, 20 nt, Human
gcaaaagaaacaaauggcuc

SEQ ID NO: 85047 - RNA, 18 nt, Human
gcaaaccaucaaaccauc

SEQ ID NO: 85048 - RNA, 22 nt, Human
ggaaauauuguuuaauuguaga

SEQ ID NO: 85049 - RNA, 25 nt, Human
ggaacuaccuagaauaggccaagcu

SEQ ID NO: 85050 - RNA, 20 nt, Human
ggaagcaaacaaagcuuucc

SEQ ID NO: 85051 - RNA, 21 nt, Human
ggaagcaaacaaagcuuucca

SEQ ID NO: 85052 - RNA, 23 nt, Human
gguccagaaagaaugcaaaggga

SEQ ID NO: 85053 - RNA, 20 nt, Human
gguucagacuuacaccaagu

SEQ ID NO: 85054 - RNA, 24 nt, Human
guaagacagaaaacagagaaaucc

SEQ ID NO: 85055 - RNA, 25 nt, Human
uaacacaucccuuaaggaauaagca

SEQ ID NO: 85056 - RNA, 19 nt, Human
uaagacagaaaacagagaa

SEQ ID NO: 85057 - RNA, 21 nt, Human
uaaggaauaagcauguauuug

SEQ ID NO: 85058 - RNA, 27 nt, Human
uaauaguaauaaauccaccauugggga

SEQ ID NO: 85059 - RNA, 23 nt, Human
uaaugcagcaaaccaucaaacca

SEQ ID NO: 85060 - RNA, 21 nt, Human
uagcaacuauaaccagcaaaa

SEQ ID NO: 85061 - RNA, 21 nt, Human
ucacugaaauacuuaaaaaaa

SEQ ID NO: 85062 - RNA, 19 nt, Human
ucagagacauacauuugca

SEQ ID NO: 85063 - RNA, 21 nt, Human
ucagauacagcaacugggcuu

SEQ ID NO: 85064 - RNA, 21 nt, Human
ucaggaaagguccaaguccua

SEQ ID NO: 85065 - RNA, 22 nt, Human
ucccugguuucuuuaauaguaa

SEQ ID NO: 85066 - RNA, 25 nt, Human
ucuaaccuuaaccucgcuuuguuua

SEQ ID NO: 85067 - RNA, 22 nt, Human
ucucaggaaagguccaaguccu

SEQ ID NO: 85068 - RNA, 22 nt, Human
ugaugaaccaucugcuucagaa

SEQ ID NO: 85069 - RNA, 23 nt, Human
ugcuucagaaaauaauggacggc

SEQ ID NO: 85070 - RNA, 23 nt, Human
uguaagacagaaaacagagaaau

SEQ ID NO: 85071 - RNA, 27 nt, Human
uguacagggacacaaagacuccucauc

SEQ ID NO: 85072 - RNA, 22 nt, Human
uguuuauuuaaaaaaaaaaauu

SEQ ID NO: 85073 - RNA, 21 nt, Human
uuaauaguaauaaauccacca

SEQ ID NO: 85074 - RNA, 21 nt, Human
uuagaauuagcaacuauaacc

SEQ ID NO: 85075 - RNA, 27 nt, Human
uucacugaaauacuuaaaaaaaaaaag

SEQ ID NO: 85076 - RNA, 22 nt, Human
uuguuuaauuguagauuaaccc

SEQ ID NO: 85077 - RNA, 21 nt, Human
uuucaaggguucugcaucucg

SEQ ID NO: 85078 - RNA, 18 nt, Human
uuucucagcucauuacug

SEQ ID NO: 85079 - RNA, 22 nt, Human
uuuuuuuuuuuucaaggguucu

SEQ ID NO: 85080 - RNA, 24 nt, Human
uuuuuuuuuuuuuuuuuuucaagg

SEQ ID NO: 85081 - RNA, 23 nt, Human
auaaccaacccaacugcaaaaca

SEQ ID NO: 85082 - RNA, 18 nt, Human
aucuggaggcacacggag

SEQ ID NO: 85083 - RNA, 19 nt, Human
ccagaugauguaucucucu

SEQ ID NO: 85084 - RNA, 22 nt, Human
cccuaagaaauaucauaugaag

SEQ ID NO: 85085 - RNA, 21 nt, Human
ccuauggcaguugauucucuc

SEQ ID NO: 85086 - RNA, 18 nt, Human
gcuacaugaaaaaccaga

SEQ ID NO: 85087 - RNA, 23 nt, Human
ggaauaaccaacccaacugcaaa

SEQ ID NO: 85088 - RNA, 29 nt, Human
ggagguugcggguggguggcggcuagagc

SEQ ID NO: 85089 - RNA, 21 nt, Human
gggaaggagguugcggguggg

SEQ ID NO: 85090 - RNA, 22 nt, Human
ggguccccagccaucggcgcuc

SEQ ID NO: 85091 - RNA, 20 nt, Human
gugaagaguaguuggaauaa

SEQ ID NO: 85092 - RNA, 23 nt, Human
uaacauuccccuaagaaauauca

SEQ ID NO: 85093 - RNA, 21 nt, Human
uccccagccaucggcgcucuc

SEQ ID NO: 85094 - RNA, 18 nt, Human
ucuaacucagguguaaaa

SEQ ID NO: 85095 - RNA, 23 nt, Human
ucuggccaacaacccguucccaa

SEQ ID NO: 85096 - RNA, 19 nt, Human
ucuucugaacaaaucugga

SEQ ID NO: 85097 - RNA, 20 nt, Human
ugaaaauucauugcuaagag

SEQ ID NO: 85098 - RNA, 22 nt, Human
ugaacaaaucuggaggcacacg

SEQ ID NO: 85099 - RNA, 24 nt, Human
ugaacaaaucuggaggcacacgga

SEQ ID NO: 85100 - RNA, 24 nt, Human
ugaguugaucuaaauucaggagaa

SEQ ID NO: 85101 - RNA, 22 nt, Human
uguccucgauaggagaccuuca

SEQ ID NO: 85102 - RNA, 23 nt, Human
uucaagagaauacucagacgguc

SEQ ID NO: 85103 - RNA, 23 nt, Human
uucaggagaaucuauaaaggcac

SEQ ID NO: 85104 - RNA, 21 nt, Human
aaaaguacucacaccaagccc

SEQ ID NO: 85105 - RNA, 18 nt, Human
aaacagggauaagggccu

SEQ ID NO: 85106 - RNA, 20 nt, Human
aagccccagcuggggacugg

SEQ ID NO: 85107 - RNA, 22 nt, Human
accccccaccccacgggccgcc

SEQ ID NO: 85108 - RNA, 21 nt, Human
acucuuccuccgcuucuccug

SEQ ID NO: 85109 - RNA, 23 nt, Human
cacaccaagccccagcuggggac

SEQ ID NO: 85110 - RNA, 18 nt, Human
caccucugcaugauggcc

SEQ ID NO: 85111 - RNA, 19 nt, Human
cacugcccugaucuggguc

SEQ ID NO: 85112 - RNA, 26 nt, Human
cagccagacccucaguccuuccuguc

SEQ ID NO: 85113 - RNA, 18 nt, Human
caggacagcugacuguuu

SEQ ID NO: 85114 - RNA, 21 nt, Human
ccaggggcgcauguuuuuccu

SEQ ID NO: 85115 - RNA, 25 nt, Human
cccgcccgcaccgcauucccagcca

SEQ ID NO: 85116 - RNA, 22 nt, Human
cccgccgcuucucccggacccc

SEQ ID NO: 85117 - RNA, 19 nt, Human
cccggacccccgcccgcac

SEQ ID NO: 85118 - RNA, 25 nt, Human
ccgcaccgcauucccagccaggauc

SEQ ID NO: 85119 - RNA, 22 nt, Human
ccuagaauggaagagggaaccc

SEQ ID NO: 85120 - RNA, 18 nt, Human
ccuccgcuucuccugucc

SEQ ID NO: 85121 - RNA, 23 nt, Human
ccuccuguugcugccgugcuugc

SEQ ID NO: 85122 - RNA, 19 nt, Human
ccugucccgcgaccccgcc

SEQ ID NO: 85123 - RNA, 22 nt, Human
ccuuccuguccuggacugggag

SEQ ID NO: 85124 - RNA, 21 nt, Human
ccuuuggccaggacagcugac

SEQ ID NO: 85125 - RNA, 22 nt, Human
cucccggacccccgcccgcacc

SEQ ID NO: 85126 - RNA, 22 nt, Human
cuccucguccucgucaucugau

SEQ ID NO: 85127 - RNA, 20 nt, Human
cuccuguugcugccgugcuu

SEQ ID NO: 85128 - RNA, 26 nt, Human
cugcugucauuguggcagccuucucc

SEQ ID NO: 85129 - RNA, 22 nt, Human
cuucucccggacccccgcccgc

SEQ ID NO: 85130 - RNA, 22 nt, Human
gcccugaucugggucuucagcc

SEQ ID NO: 85131 - RNA, 23 nt, Human
gccgcgggcuuguccccaguccc

SEQ ID NO: 85132 - RNA, 18 nt, Human
gccggggccccacauacu

SEQ ID NO: 85133 - RNA, 18 nt, Human
gguguccuuccaaacccc

SEQ ID NO: 85134 - RNA, 20 nt, Human
uacucacaccaagccccagc

SEQ ID NO: 85135 - RNA, 22 nt, Human
ucagccauuaaagcucaguguc

SEQ ID NO: 85136 - RNA, 20 nt, Human
uccagggugggccacuccuc

SEQ ID NO: 85137 - RNA, 22 nt, Human
uccccagucccaugcucggccu

SEQ ID NO: 85138 - RNA, 22 nt, Human
ucccugugaucugucacugccc

SEQ ID NO: 85139 - RNA, 20 nt, Human
uccuccuguugcugccgugc

SEQ ID NO: 85140 - RNA, 24 nt, Human
uccuguugcugccgugcuugcugc

SEQ ID NO: 85141 - RNA, 19 nt, Human
ucggccucgaguuccuccu

SEQ ID NO: 85142 - RNA, 26 nt, Human
ucucagaacuaaacagggauaagggc

SEQ ID NO: 85143 - RNA, 22 nt, Human
ucucuauggcacgcucauccuc

SEQ ID NO: 85144 - RNA, 18 nt, Human
ucugucacugcccugauc

SEQ ID NO: 85145 - RNA, 21 nt, Human
ugaccccccaccccacgggcc

SEQ ID NO: 85146 - RNA, 19 nt, Human
ugcuugcugcaaaauccgu

SEQ ID NO: 85147 - RNA, 25 nt, Human
uggcacgcucauccucaggguccac

SEQ ID NO: 85148 - RNA, 21 nt, Human
ugggaaugcuagcauauggua

SEQ ID NO: 85149 - RNA, 23 nt, Human
ugggucuucagccauuaaagcuc

SEQ ID NO: 85150 - RNA, 20 nt, Human
uucuccugucccgcgacccc

SEQ ID NO: 85151 - RNA, 21 nt, Human
aacaugcucuaagcaugcaga

SEQ ID NO: 85152 - RNA, 21 nt, Human
aacaugcucuaagcaugcaga

SEQ ID NO: 85153 - RNA, 18 nt, Human
agaacaugcucuaagcau

SEQ ID NO: 85154 - RNA, 18 nt, Human
agaacaugcucuaagcau

SEQ ID NO: 85155 - RNA, 24 nt, Human
agccguaccagcggcgagggcacg

SEQ ID NO: 85156 - RNA, 27 nt, Human
caaccucugaagcucugcugaccccuu

SEQ ID NO: 85157 - RNA, 27 nt, Human
caaccucugaagcucugcugaccccuu

SEQ ID NO: 85158 - RNA, 21 nt, Human
caccacaucacaagcgugaug

SEQ ID NO: 85159 - RNA, 26 nt, Human
ccacagccuucucugugaagccuccc

SEQ ID NO: 85160 - RNA, 22 nt, Human
ccacaucacaagcgugauggca

SEQ ID NO: 85161 - RNA, 22 nt, Human
ccagaccagguaggagccguac

SEQ ID NO: 85162 - RNA, 21 nt, Human
ccagcggcgagggcacgcucc

SEQ ID NO: 85163 - RNA, 23 nt, Human
ccaggggaaccacagccuucucu

SEQ ID NO: 85164 - RNA, 22 nt, Human
cccaguucagggccagcugccc

SEQ ID NO: 85165 - RNA, 25 nt, Human
ccccugggccaaggcccugacagac

SEQ ID NO: 85166 - RNA, 18 nt, Human
cccugacagacuagcagg

SEQ ID NO: 85167 - RNA, 18 nt, Human
cccugacagacuagcagg

SEQ ID NO: 85168 - RNA, 18 nt, Human
ccucugaagcucugcuga

SEQ ID NO: 85169 - RNA, 18 nt, Human
ccucugaagcucugcuga

SEQ ID NO: 85170 - RNA, 19 nt, Human
ccugcuggugcagcugcag

SEQ ID NO: 85171 - RNA, 22 nt, Human
ccugggccaaggcccugacaga

SEQ ID NO: 85172 - RNA, 23 nt, Human
ccugggccaaggcccugacagac

SEQ ID NO: 85173 - RNA, 23 nt, Human
ccugggccaaggcccugacagac

SEQ ID NO: 85174 - RNA, 21 nt, Human
cgggaagggcacugccuggca

SEQ ID NO: 85175 - RNA, 21 nt, Human
cucccgggugggggcucaggu

SEQ ID NO: 85176 - RNA, 21 nt, Human
cucccgggugggggcucaggu

SEQ ID NO: 85177 - RNA, 20 nt, Human
cugaccccugggccaaggcc

SEQ ID NO: 85178 - RNA, 19 nt, Human
gcccaguucagggccagcu

SEQ ID NO: 85179 - RNA, 19 nt, Human
ggcccaggggaaccacagc

SEQ ID NO: 85180 - RNA, 18 nt, Human
ggcccugacagacuagca

SEQ ID NO: 85181 - RNA, 18 nt, Human
ggcccugacagacuagca

SEQ ID NO: 85182 - RNA, 20 nt, Human
gggaagggcacugccuggca

SEQ ID NO: 85183 - RNA, 21 nt, Human
gggcucagguggggcaaccuc

SEQ ID NO: 85184 - RNA, 24 nt, Human
gugcagcugcagucccuggugggc

SEQ ID NO: 85185 - RNA, 21 nt, Human
guggggcaaccucugaagcuc

SEQ ID NO: 85186 - RNA, 21 nt, Human
guggggcaaccucugaagcuc

SEQ ID NO: 85187 - RNA, 24 nt, Human
uagcaggcccaguggucaugaaag

SEQ ID NO: 85188 - RNA, 21 nt, Human
ucagcggcgagggcacgcucc

SEQ ID NO: 85189 - RNA, 28 nt, Human
uccauguuccaagaacaugcucuaagca

SEQ ID NO: 85190 - RNA, 28 nt, Human
uccauguuccaagaacaugcucuaagca

SEQ ID NO: 85191 - RNA, 18 nt, Human
ucccuggugggccgggca

SEQ ID NO: 85192 - RNA, 24 nt, Human
uccgggaagggcacugccuggcag

SEQ ID NO: 85193 - RNA, 24 nt, Human
ugaagccucccagcucuuuccaga

SEQ ID NO: 85194 - RNA, 19 nt, Human
ugaccccugggccaaggcc

SEQ ID NO: 85195 - RNA, 21 nt, Human
ugaccccugggccaaggcccu

SEQ ID NO: 85196 - RNA, 21 nt, Human
ugaccccugggccaaggcccu

SEQ ID NO: 85197 - RNA, 23 nt, Human
uggcaggaguuagccaggccgcu

SEQ ID NO: 85198 - RNA, 21 nt, Human
uggggcaaccucugaagcucu

SEQ ID NO: 85199 - RNA, 21 nt, Human
uggggcaaccucugaagcucu

SEQ ID NO: 85200 - RNA, 24 nt, Human
uguuccaagaacaugcucuaagca

SEQ ID NO: 85201 - RNA, 24 nt, Human
uguuccaagaacaugcucuaagca

SEQ ID NO: 85202 - RNA, 19 nt, Human
aagcaacccagcccgaggc

SEQ ID NO: 85203 - RNA, 24 nt, Human
acacaguaguuucucaguagucug

SEQ ID NO: 85204 - RNA, 20 nt, Human
acaggaccucaaacaaagcc

SEQ ID NO: 85205 - RNA, 22 nt, Human
accacuuaucuacacuagccug

SEQ ID NO: 85206 - RNA, 21 nt, Human
accucaugcuaggcucuacaa

SEQ ID NO: 85207 - RNA, 26 nt, Human
acuuugaaagccuaggcuggaguuuc

SEQ ID NO: 85208 - RNA, 19 nt, Human
caaaguggggagcagagga

SEQ ID NO: 85209 - RNA, 19 nt, Human
caccucaugcuaggcucua

SEQ ID NO: 85210 - RNA, 20 nt, Human
cacuagccugccagcacucu

SEQ ID NO: 85211 - RNA, 18 nt, Human
cagcacacaauggcauca

SEQ ID NO: 85212 - RNA, 19 nt, Human
cagcugaaccuccuccuga

SEQ ID NO: 85213 - RNA, 22 nt, Human
ccagcccgaggcagcucccacc

SEQ ID NO: 85214 - RNA, 22 nt, Human
cccagcccgaggcagcucccac

SEQ ID NO: 85215 - RNA, 20 nt, Human
cccuuugacuuugaaagccu

SEQ ID NO: 85216 - RNA, 23 nt, Human
cccuuugacuuugaaagccuagg

SEQ ID NO: 85217 - RNA, 23 nt, Human
ccgauuccccuccagguucaugc

SEQ ID NO: 85218 - RNA, 18 nt, Human
ccucaugcuaggcucuac

SEQ ID NO: 85219 - RNA, 19 nt, Human
cgcaugaaguccccgauuc

SEQ ID NO: 85220 - RNA, 19 nt, Human
cuaaaacuagguuuucugc

SEQ ID NO: 85221 - RNA, 19 nt, Human
cuccagcagucuugaggca

SEQ ID NO: 85222 - RNA, 19 nt, Human
gaccucaaacaaagccuga

SEQ ID NO: 85223 - RNA, 19 nt, Human
gcccugauauugcagggcu

SEQ ID NO: 85224 - RNA, 21 nt, Human
gccuaggcuggaguuucgcau

SEQ ID NO: 85225 - RNA, 22 nt, Human
ggauuuccuuuucucucugccu

SEQ ID NO: 85226 - RNA, 21 nt, Human
uaaaauguccugacuccagca

SEQ ID NO: 85227 - RNA, 27 nt, Human
uacaggaccucaaacaaagggacauac

SEQ ID NO: 85228 - RNA, 19 nt, Human
uaugaccaagcaacccagc

SEQ ID NO: 85229 - RNA, 21 nt, Human
uaugaccaagcaacccagccc

SEQ ID NO: 85230 - RNA, 23 nt, Human
uauggcucuaugaccaagcaacc

SEQ ID NO: 85231 - RNA, 22 nt, Human
uccaauucuaguacaugccacc

SEQ ID NO: 85232 - RNA, 22 nt, Human
uccccgauuccccuccagguuc

SEQ ID NO: 85233 - RNA, 24 nt, Human
uccccgauuccccuccagguucau

SEQ ID NO: 85234 - RNA, 21 nt, Human
ucgcaugaaguccccgauucc

SEQ ID NO: 85235 - RNA, 29 nt, Human
ucuaugaccaagcaacccagcccgaggcc

SEQ ID NO: 85236 - RNA, 19 nt, Human
ugcagaguuuuaugcucca

SEQ ID NO: 85237 - RNA, 23 nt, Human
ugccagcacucuaucgcauuucu

SEQ ID NO: 85238 - RNA, 22 nt, Human
ugcccucggcucagagacaccu

SEQ ID NO: 85239 - RNA, 18 nt, Human
ugccuggguccccuucgc

SEQ ID NO: 85240 - RNA, 18 nt, Human
ugcuaggcucuacaaagu

SEQ ID NO: 85241 - RNA, 23 nt, Human
uggggagcagaggagcuugguac

SEQ ID NO: 85242 - RNA, 23 nt, Human
uguucacguggcucucuccuucu

SEQ ID NO: 85243 - RNA, 23 nt, Human
uuccgccagaaugcaugcaggca

SEQ ID NO: 85244 - RNA, 22 nt, Human
uucuaguuguuuaggccccagc

SEQ ID NO: 85245 - RNA, 22 nt, Human
uuuuuuuuuuuuuuuucaaugg

SEQ ID NO: 85246 - RNA, 20 nt, Human
acacaugcucuugcugugua

SEQ ID NO: 85247 - RNA, 24 nt, Human
acccagggcuucccacugccuggc

SEQ ID NO: 85248 - RNA, 19 nt, Human
aggauggucuugcagcccu

SEQ ID NO: 85249 - RNA, 19 nt, Human
agggugcugggcgaccugg

SEQ ID NO: 85250 - RNA, 21 nt, Human
caagcacaugcccacagcuug

SEQ ID NO: 85251 - RNA, 23 nt, Human
cacacacaugcucuugcugugua

SEQ ID NO: 85252 - RNA, 23 nt, Human
cacacacaugcucuugcugugua

SEQ ID NO: 85253 - RNA, 21 nt, Human
cacagcuugagcacacugucc

SEQ ID NO: 85254 - RNA, 26 nt, Human
cacaugcccacagcuugagcacacug

SEQ ID NO: 85255 - RNA, 20 nt, Human
cagcuccugaggccaaaccc

SEQ ID NO: 85256 - RNA, 18 nt, Human
caggcaagcacaugccca

SEQ ID NO: 85257 - RNA, 22 nt, Human
cagugaaggaccucucccgcag

SEQ ID NO: 85258 - RNA, 21 nt, Human
ccagggcuucccacugccugg

SEQ ID NO: 85259 - RNA, 24 nt, Human
ccccacugcacccccagcuccuga

SEQ ID NO: 85260 - RNA, 21 nt, Human
ccuggcaaguuccgagcuggc

SEQ ID NO: 85261 - RNA, 19 nt, Human
cggaggacacugcccccuc

SEQ ID NO: 85262 - RNA, 22 nt, Human
cuccuguccccaacaggcaguc

SEQ ID NO: 85263 - RNA, 19 nt, Human
gagcuggcuacgccccaug

SEQ ID NO: 85264 - RNA, 18 nt, Human
ggaggacacugcccccuc

SEQ ID NO: 85265 - RNA, 20 nt, Human
gggcagucccccacugcacc

SEQ ID NO: 85266 - RNA, 22 nt, Human
ucucccgcaggcaagcacaugc

SEQ ID NO: 85267 - RNA, 18 nt, Human
ugaccgccaacucuccuu

SEQ ID NO: 85268 - RNA, 25 nt, Human
ugaggccaaacccagggcuucccac

SEQ ID NO: 85269 - RNA, 24 nt, Human
ugcuguguacacacagugaaggac

SEQ ID NO: 85270 - RNA, 26 nt, Human
uggcacacacaugcucuugcugugua

SEQ ID NO: 85271 - RNA, 21 nt, Human
uguccaugcaucuccuguccc

SEQ ID NO: 85272 - RNA, 19 nt, Human
uguccuggcucggaggaca

SEQ ID NO: 85273 - RNA, 19 nt, Human
uugcagcccucacuaggcu

SEQ ID NO: 85274 - RNA, 25 nt, Human
cagcuuuauuaaugaccaggguaac

SEQ ID NO: 85275 - RNA, 24 nt, Human
ugaccaggguaacccgucgcggac

SEQ ID NO: 85276 - RNA, 23 nt, Human
ugaccaggguaacccgucgcggc

SEQ ID NO: 85277 - RNA, 25 nt, Human
aaaaagaacucacaggguuuguaaa

SEQ ID NO: 85278 - RNA, 21 nt, Human
aaaagaagucuuuuccaugcc

SEQ ID NO: 85279 - RNA, 19 nt, Human
aaaaugggagaggggagag

SEQ ID NO: 85280 - RNA, 25 nt, Human
aaacaacaacaacaaaacauugaaa

SEQ ID NO: 85281 - RNA, 27 nt, Human
aaacaacaacaacaaaaccccaguagg

SEQ ID NO: 85282 - RNA, 23 nt, Human
aaacaacugcuuuccuaaauuuc

SEQ ID NO: 85283 - RNA, 24 nt, Human
aaauaccugcucuugacagauucc

SEQ ID NO: 85284 - RNA, 22 nt, Human
aacguagucauaauacacaaaa

SEQ ID NO: 85285 - RNA, 27 nt, Human
aagaaaacaacaacaacaaaacauuga

SEQ ID NO: 85286 - RNA, 19 nt, Human
acacagugcaaaaugggag

SEQ ID NO: 85287 - RNA, 20 nt, Human
acagagcaaaagauggaagc

SEQ ID NO: 85288 - RNA, 19 nt, Human
agcaaaagauggaagcagg

SEQ ID NO: 85289 - RNA, 22 nt, Human
auaaaauaagaagcacaaccuc

SEQ ID NO: 85290 - RNA, 20 nt, Human
auaaccacaauaggaaucuc

SEQ ID NO: 85291 - RNA, 19 nt, Human
auaauuagaaaaauggcag

SEQ ID NO: 85292 - RNA, 22 nt, Human
auuuuuuuuucuuucagcuuaa

SEQ ID NO: 85293 - RNA, 22 nt, Human
caaugagaccuuguauaaccac

SEQ ID NO: 85294 - RNA, 19 nt, Human
caauuuacaaaaagaacuc

SEQ ID NO: 85295 - RNA, 18 nt, Human
cagagcaaaagauggaag

SEQ ID NO: 85296 - RNA, 20 nt, Human
caguuuauagaccuucccuc

SEQ ID NO: 85297 - RNA, 22 nt, Human
caguuuauagaccuucccucac

SEQ ID NO: 85298 - RNA, 20 nt, Human
cccucacauuccaauagggc

SEQ ID NO: 85299 - RNA, 21 nt, Human
cugcaaaaaagaagcauuacc

SEQ ID NO: 85300 - RNA, 19 nt, Human
gaacacuaacaauuuacaa

SEQ ID NO: 85301 - RNA, 20 nt, Human
guuuauagaccuucccucac

SEQ ID NO: 85302 - RNA, 22 nt, Human
uaaaauaagaagcacaaccucu

SEQ ID NO: 85303 - RNA, 27 nt, Human
uaaaauagaauaaagcucaacagcauu

SEQ ID NO: 85304 - RNA, 24 nt, Human
uaaaugacagccauuuucuucuca

SEQ ID NO: 85305 - RNA, 23 nt, Human
uaacauaaaauagaauaaagcuc

SEQ ID NO: 85306 - RNA, 23 nt, Human
uaaguaagagaauguaaguuuau

SEQ ID NO: 85307 - RNA, 22 nt, Human
uacaaaaagaacucacaggguu

SEQ ID NO: 85308 - RNA, 21 nt, Human
uacagagcaaaagauggaagc

SEQ ID NO: 85309 - RNA, 23 nt, Human
uacagagcaaaagauggaagcag

SEQ ID NO: 85310 - RNA, 21 nt, Human
uaccaagaaaacaacaacaac

SEQ ID NO: 85311 - RNA, 24 nt, Human
uaccaagaaaacaacaacaacaaa

SEQ ID NO: 85312 - RNA, 25 nt, Human
uaccaagaaaacaacaacaacaaaa

SEQ ID NO: 85313 - RNA, 19 nt, Human
uagaaaggacaacuaagcc

SEQ ID NO: 85314 - RNA, 22 nt, Human
uauaaauugggaccacaucugc

SEQ ID NO: 85315 - RNA, 19 nt, Human
uauaaccacaauaggaauc

SEQ ID NO: 85316 - RNA, 24 nt, Human
uauagaccuucccucacauuccaa

SEQ ID NO: 85317 - RNA, 26 nt, Human
uauuagcgacaauauuuugugcuagc

SEQ ID NO: 85318 - RNA, 21 nt, Human
ucagccaaccucugaauccaa

SEQ ID NO: 85319 - RNA, 25 nt, Human
ucaguuccuuccgacuucugaugug

SEQ ID NO: 85320 - RNA, 22 nt, Human
ucccuuugcaguuguacugucc

SEQ ID NO: 85321 - RNA, 24 nt, Human
uccuugacaauauuaaacuccuaa

SEQ ID NO: 85322 - RNA, 19 nt, Human
ucucaaugcagcuuucuuu

SEQ ID NO: 85323 - RNA, 22 nt, Human
ucugauuucaaauggaugcccc

SEQ ID NO: 85324 - RNA, 21 nt, Human
ucuguauuuuuaaagcugaaa

SEQ ID NO: 85325 - RNA, 20 nt, Human
ugacaauauuaaacuccuaa

SEQ ID NO: 85326 - RNA, 23 nt, Human
ugagcaauucacaacuuuacaga

SEQ ID NO: 85327 - RNA, 22 nt, Human
ugcaucgacacacagugcaaaa

SEQ ID NO: 85328 - RNA, 18 nt, Human
ugccuguuucuuauuuuu

SEQ ID NO: 85329 - RNA, 21 nt, Human
uuaaauagaaaggacaacuaa

SEQ ID NO: 85330 - RNA, 24 nt, Human
uuaucacuuuuuaaaagaaagcuu

SEQ ID NO: 85331 - RNA, 19 nt, Human
uuccucugauuucaaaugg

SEQ ID NO: 85332 - RNA, 23 nt, Human
uugagaaaacagaagucauuuua

SEQ ID NO: 85333 - RNA, 22 nt, Human
uuuauaauuagaaaaauggcag

SEQ ID NO: 85334 - RNA, 22 nt, Human
uuuccaugccuacuucuguuga

SEQ ID NO: 85335 - RNA, 18 nt, Human
uuugcaguuguacugucc

SEQ ID NO: 85336 - RNA, 21 nt, Human
aaaaaaaaauccaucuccuca

SEQ ID NO: 85337 - RNA, 19 nt, Human
aaaaaaacaaaaaaaaauc

SEQ ID NO: 85338 - RNA, 22 nt, Human
aaaguacaagaacugaucagag

SEQ ID NO: 85339 - RNA, 19 nt, Human
aacauaguaagaccccauc

SEQ ID NO: 85340 - RNA, 20 nt, Human
aacauaguaagaccccaucu

SEQ ID NO: 85341 - RNA, 21 nt, Human
aacauaguaagaccccaucuc

SEQ ID NO: 85342 - RNA, 18 nt, Human
aagaaucuguuucuucuu

SEQ ID NO: 85343 - RNA, 20 nt, Human
aagacauuuaacuccugggc

SEQ ID NO: 85344 - RNA, 22 nt, Human
aagauggccaagguggaaaacg

SEQ ID NO: 85345 - RNA, 22 nt, Human
aaggggaaggcuggaaaaggga

SEQ ID NO: 85346 - RNA, 21 nt, Human
aauaaaagggcagaugaugga

SEQ ID NO: 85347 - RNA, 23 nt, Human
acaaaaaaaaauccaucuccuca

SEQ ID NO: 85348 - RNA, 25 nt, Human
acaaaaaaaaauccaucuccucagg

SEQ ID NO: 85349 - RNA, 19 nt, Human
acagagugaaaccccgucu

SEQ ID NO: 85350 - RNA, 20 nt, Human
acagagugaaaccccgucuc

SEQ ID NO: 85351 - RNA, 23 nt, Human
acagcugcucugggugggcagca

SEQ ID NO: 85352 - RNA, 22 nt, Human
accccaucucuucccaccccca

SEQ ID NO: 85353 - RNA, 23 nt, Human
accccaucucuucccacccccaa

SEQ ID NO: 85354 - RNA, 20 nt, Human
accccgucucuaaaaaaaca

SEQ ID NO: 85355 - RNA, 18 nt, Human
acuucaagaauacaagag

SEQ ID NO: 85356 - RNA, 21 nt, Human
acuugggaagcugaugcagga

SEQ ID NO: 85357 - RNA, 27 nt, Human
agaaaaaagaagauuugacuucaagaa

SEQ ID NO: 85358 - RNA, 19 nt, Human
agaaggucuaaaaacagcc

SEQ ID NO: 85359 - RNA, 23 nt, Human
agaaggucuaaaaacagcccaga

SEQ ID NO: 85360 - RNA, 23 nt, Human
agaccccaucucuucccaccccc

SEQ ID NO: 85361 - RNA, 21 nt, Human
agcccagacucuuccaacccu

SEQ ID NO: 85362 - RNA, 22 nt, Human
agccuggacaacauaguaagac

SEQ ID NO: 85363 - RNA, 24 nt, Human
agccuggacaacauaguaagaccc

SEQ ID NO: 85364 - RNA, 22 nt, Human
agccugggugacagagugaaac

SEQ ID NO: 85365 - RNA, 24 nt, Human
agccugggugacagagugaaaccc

SEQ ID NO: 85366 - RNA, 22 nt, Human
agcuggauguggugguacacac

SEQ ID NO: 85367 - RNA, 22 nt, Human
aggcagcccuuggucacagcug

SEQ ID NO: 85368 - RNA, 26 nt, Human
aggcuaaaagugaauaaaagggaccc

SEQ ID NO: 85369 - RNA, 21 nt, Human
aggcuggaaaagggagccugg

SEQ ID NO: 85370 - RNA, 21 nt, Human
agggaaaaaggggaaggcugg

SEQ ID NO: 85371 - RNA, 21 nt, Human
aggguccagcugggggaggcc

SEQ ID NO: 85372 - RNA, 21 nt, Human
agugaaaccccgucucuaaaa

SEQ ID NO: 85373 - RNA, 19 nt, Human
aucuaugcugccuaguucu

SEQ ID NO: 85374 - RNA, 21 nt, Human
augcaggagggucacuugagc

SEQ ID NO: 85375 - RNA, 24 nt, Human
auucccagccugggugacagagug

SEQ ID NO: 85376 - RNA, 26 nt, Human
auugugccacugcaauucccagccug

SEQ ID NO: 85377 - RNA, 19 nt, Human
caaaaaaaaauccaucucc

SEQ ID NO: 85378 - RNA, 18 nt, Human
caaaauaccuuguguuug

SEQ ID NO: 85379 - RNA, 20 nt, Human
caaaguacaagaacugauca

SEQ ID NO: 85380 - RNA, 24 nt, Human
caacauaguaagaccccaucucuu

SEQ ID NO: 85381 - RNA, 23 nt, Human
caagguggaaaacgagaaagucc

SEQ ID NO: 85382 - RNA, 21 nt, Human
caagucucagcucaaauccca

SEQ ID NO: 85383 - RNA, 21 nt, Human
caaucaggcauaaagcuguga

SEQ ID NO: 85384 - RNA, 21 nt, Human
cacauguucccaccacacaag

SEQ ID NO: 85385 - RNA, 23 nt, Human
cacuugcagucccagcuacuugg

SEQ ID NO: 85386 - RNA, 24 nt, Human
cacuugcagucccagcuacuuggg

SEQ ID NO: 85387 - RNA, 22 nt, Human
cagacucuugaaggugagaaaa

SEQ ID NO: 85388 - RNA, 22 nt, Human
cagcagagaggagcccaaccug

SEQ ID NO: 85389 - RNA, 22 nt, Human
cagcugcucugggugggcagca

SEQ ID NO: 85390 - RNA, 19 nt, Human
cauaguaagaccccaucuc

SEQ ID NO: 85391 - RNA, 26 nt, Human
ccacugcaauucccagccugggugac

SEQ ID NO: 85392 - RNA, 21 nt, Human
ccacugcccaccccacauucc

SEQ ID NO: 85393 - RNA, 19 nt, Human
ccagcugggggaggcccuc

SEQ ID NO: 85394 - RNA, 20 nt, Human
ccaucucuucccacccccaa

SEQ ID NO: 85395 - RNA, 22 nt, Human
ccaucucuucccacccccaaaa

SEQ ID NO: 85396 - RNA, 23 nt, Human
cccaccucuuagccuggacaaca

SEQ ID NO: 85397 - RNA, 19 nt, Human
cccagccugggugacagag

SEQ ID NO: 85398 - RNA, 24 nt, Human
ccuggacaacauaguaagacccca

SEQ ID NO: 85399 - RNA, 19 nt, Human
ccuggaggugauaaugcug

SEQ ID NO: 85400 - RNA, 20 nt, Human
ccugggugacagagugaaac

SEQ ID NO: 85401 - RNA, 23 nt, Human
ccugggugacagagugaaacccc

SEQ ID NO: 85402 - RNA, 24 nt, Human
ccugggugacagagugaaaccccg

SEQ ID NO: 85403 - RNA, 22 nt, Human
cgagaaaguccuggaggugaua

SEQ ID NO: 85404 - RNA, 24 nt, Human
cgucucuaaaaaaacaaaaaaaaa

SEQ ID NO: 85405 - RNA, 23 nt, Human
cugcucucucaagaaucuguuuc

SEQ ID NO: 85406 - RNA, 19 nt, Human
cuggaagagguugcaggua

SEQ ID NO: 85407 - RNA, 18 nt, Human
cuucaagaauacaagagg

SEQ ID NO: 85408 - RNA, 21 nt, Human
cuugcagucccagcuacuugg

SEQ ID NO: 85409 - RNA, 22 nt, Human
cuugcagucccagcuacuuggg

SEQ ID NO: 85410 - RNA, 21 nt, Human
gaaggaagaagauggccaagg

SEQ ID NO: 85411 - RNA, 20 nt, Human
gaccccaucucuucccaccc

SEQ ID NO: 85412 - RNA, 21 nt, Human
gaccccaucucuucccacccc

SEQ ID NO: 85413 - RNA, 18 nt, Human
gagaagcuggcaauuucu

SEQ ID NO: 85414 - RNA, 22 nt, Human
gaggguccagcugggggaggcc

SEQ ID NO: 85415 - RNA, 18 nt, Human
gaugauggaauagaaaag

SEQ ID NO: 85416 - RNA, 19 nt, Human
gaugauggaauagaaaaga

SEQ ID NO: 85417 - RNA, 21 nt, Human
gcagccaggcugaccuguguc

SEQ ID NO: 85418 - RNA, 20 nt, Human
gccuggacaacauaguaaga

SEQ ID NO: 85419 - RNA, 24 nt, Human
gcuuccgagaagcuggcaauuucu

SEQ ID NO: 85420 - RNA, 18 nt, Human
ggagccuggaagagguug

SEQ ID NO: 85421 - RNA, 18 nt, Human
ggcaugaaaauaaaaggg

SEQ ID NO: 85422 - RNA, 21 nt, Human
ggcccacagggcaggggcauu

SEQ ID NO: 85423 - RNA, 20 nt, Human
gggaaggagacacagugggc

SEQ ID NO: 85424 - RNA, 19 nt, Human
gggaaggcuggaaaaggga

SEQ ID NO: 85425 - RNA, 25 nt, Human
gggauugugccacugcaauucccag

SEQ ID NO: 85426 - RNA, 19 nt, Human
gggcccccagcacagcagu

SEQ ID NO: 85427 - RNA, 24 nt, Human
gguaggggaaggagacacaguggg

SEQ ID NO: 85428 - RNA, 22 nt, Human
gguccagcagcagagaggagcc

SEQ ID NO: 85429 - RNA, 22 nt, Human
gucaaaguacaagaacugauca

SEQ ID NO: 85430 - RNA, 19 nt, Human
guggagggcuuuuugccug

SEQ ID NO: 85431 - RNA, 22 nt, Human
uaaaagggcagaugauggaaua

SEQ ID NO: 85432 - RNA, 21 nt, Human
uaaagcugugauucuccuagg

SEQ ID NO: 85433 - RNA, 19 nt, Human
uaacuccugggcauucaag

SEQ ID NO: 85434 - RNA, 22 nt, Human
uaggaggaaauaagaaagggca

SEQ ID NO: 85435 - RNA, 20 nt, Human
uaggggaaggagacacagug

SEQ ID NO: 85436 - RNA, 22 nt, Human
uaggggaaggagacacaguggg

SEQ ID NO: 85437 - RNA, 20 nt, Human
ucacuuccuaacucuucacc

SEQ ID NO: 85438 - RNA, 22 nt, Human
ucacuuccuaacucuucaccau

SEQ ID NO: 85439 - RNA, 22 nt, Human
ucagggaggacuuucugaugau

SEQ ID NO: 85440 - RNA, 20 nt, Human
uccccacugcccaccccaca

SEQ ID NO: 85441 - RNA, 18 nt, Human
ucccuuggaagguucaga

SEQ ID NO: 85442 - RNA, 18 nt, Human
uccggcauggagaaguac

SEQ ID NO: 85443 - RNA, 27 nt, Human
ucucuaaaaaaacaaaaaaaaauccau

SEQ ID NO: 85444 - RNA, 21 nt, Human
ugaaggugagaaaaaagaaga

SEQ ID NO: 85445 - RNA, 24 nt, Human
ugacagagugaaaccccgucucua

SEQ ID NO: 85446 - RNA, 19 nt, Human
ugaccaaaauaccuugugu

SEQ ID NO: 85447 - RNA, 21 nt, Human
ugccuggcgaccgggccccca

SEQ ID NO: 85448 - RNA, 25 nt, Human
ugccuggcgaccgggcccccagcac

SEQ ID NO: 85449 - RNA, 25 nt, Human
ugccugugucguucauuucucuuuc

SEQ ID NO: 85450 - RNA, 18 nt, Human
uggaagagguugcaggua

SEQ ID NO: 85451 - RNA, 22 nt, Human
uggaagagguugcagguagggg

SEQ ID NO: 85452 - RNA, 24 nt, Human
uggaauagaaaagaaauuaaagag

SEQ ID NO: 85453 - RNA, 22 nt, Human
uggacaacauaguaagacccca

SEQ ID NO: 85454 - RNA, 21 nt, Human
uggauacacacacuguguaug

SEQ ID NO: 85455 - RNA, 19 nt, Human
uggauggaguuacguagua

SEQ ID NO: 85456 - RNA, 21 nt, Human
ugggaagcugaugcaggaggg

SEQ ID NO: 85457 - RNA, 24 nt, Human
ugggaagcugaugcaggaggguca

SEQ ID NO: 85458 - RNA, 18 nt, Human
ugggcauucaagucucag

SEQ ID NO: 85459 - RNA, 23 nt, Human
uggugguacacacuugcaguccc

SEQ ID NO: 85460 - RNA, 23 nt, Human
uguaugaggguccagcuggggga

SEQ ID NO: 85461 - RNA, 18 nt, Human
uuagcuggaugugguggu

SEQ ID NO: 85462 - RNA, 25 nt, Human
uugggaagcugaugcaggaggguca

SEQ ID NO: 85463 - RNA, 23 nt, Human
uuuaaguuacguuccccacugcc

SEQ ID NO: 85464 - RNA, 19 nt, Human
uuuaggaggaaauaagaaa

SEQ ID NO: 85465 - RNA, 21 nt, Human
uuucauaguucacauguuccc

SEQ ID NO: 85466 - RNA, 19 nt, Human
uuuguuagaguucuuaucc

SEQ ID NO: 85467 - RNA, 21 nt, Human
uuuucacuuccuaacucuuca

SEQ ID NO: 85468 - RNA, 18 nt, Human
uuuugucucugcucucuc

SEQ ID NO: 85469 - RNA, 19 nt, Human
uuuuuuuuuuuuucacuuc

SEQ ID NO: 85470 - RNA, 22 nt, Human
uuuuuuuuuuuuucacuuccua

SEQ ID NO: 85471 - RNA, 21 nt, Human
aaguaaacgguacuuauacaa

SEQ ID NO: 85472 - RNA, 18 nt, Human
acacacugaaagcaguac

SEQ ID NO: 85473 - RNA, 24 nt, Human
agcaguagaauacaagugagugcc

SEQ ID NO: 85474 - RNA, 21 nt, Human
aggacagacggcucagaacgc

SEQ ID NO: 85475 - RNA, 25 nt, Human
caugaaguaaacgguacuuauacaa

SEQ ID NO: 85476 - RNA, 19 nt, Human
cauuuauucaugccaugaa

SEQ ID NO: 85477 - RNA, 24 nt, Human
ccacaaaucugcagccaacucgga

SEQ ID NO: 85478 - RNA, 20 nt, Human
cggcucagaacgcaccacaa

SEQ ID NO: 85479 - RNA, 21 nt, Human
cuccccaucuaacacggcuug

SEQ ID NO: 85480 - RNA, 20 nt, Human
gcaccacaaaucugcagcca

SEQ ID NO: 85481 - RNA, 19 nt, Human
uauacaaguguacagugac

SEQ ID NO: 85482 - RNA, 19 nt, Human
ucacaaugauggguggcuc

SEQ ID NO: 85483 - RNA, 18 nt, Human
uggcgcaggacagacggc

SEQ ID NO: 85484 - RNA, 20 nt, Human
uggcgcaggacagacggcuc

SEQ ID NO: 85485 - RNA, 21 nt, Human
uuucacaaugauggguggcuc

SEQ ID NO: 85486 - RNA, 27 nt, Human
aaaaaugugcacuuuucacuguugccc

SEQ ID NO: 85487 - RNA, 19 nt, Human
aaaagaaaaaggcacagag

SEQ ID NO: 85488 - RNA, 21 nt, Human
aaaagaaaaaggcacagagag

SEQ ID NO: 85489 - RNA, 24 nt, Human
aaaaggcacagagagacuuggaca

SEQ ID NO: 85490 - RNA, 19 nt, Human
aaacaaacaaacaaaaacc

SEQ ID NO: 85491 - RNA, 20 nt, Human
aaacaaacaaacaaaaacca

SEQ ID NO: 85492 - RNA, 21 nt, Human
aaacaaacaaacaaaaaccag

SEQ ID NO: 85493 - RNA, 21 nt, Human
aaacaagcagugcagcaagcc

SEQ ID NO: 85494 - RNA, 22 nt, Human
aaaccaccacccacaccacucc

SEQ ID NO: 85495 - RNA, 22 nt, Human
aaacuaauucauuacagagccc

SEQ ID NO: 85496 - RNA, 21 nt, Human
aaaggaugcccacacccaaga

SEQ ID NO: 85497 - RNA, 18 nt, Human
aaagucuccaaaagcuuc

SEQ ID NO: 85498 - RNA, 19 nt, Human
aaaugcagaggucacaauc

SEQ ID NO: 85499 - RNA, 24 nt, Human
aacacaaaaguuaacagaaaccaa

SEQ ID NO: 85500 - RNA, 24 nt, Human
aacacauucauauacucacaguua

SEQ ID NO: 85501 - RNA, 27 nt, Human
aacacuguuugcggucagaccagaugg

SEQ ID NO: 85502 - RNA, 21 nt, Human
aacauaccaacaagcacauua

SEQ ID NO: 85503 - RNA, 19 nt, Human
aacuaugcagccuaagagu

SEQ ID NO: 85504 - RNA, 24 nt, Human
aacuauugaaaaguucaaauacag

SEQ ID NO: 85505 - RNA, 18 nt, Human
aagaaaaaggcacagaga

SEQ ID NO: 85506 - RNA, 23 nt, Human
aagaaaagacagacaacugaaaa

SEQ ID NO: 85507 - RNA, 21 nt, Human
aagaaaccaccacccacacca

SEQ ID NO: 85508 - RNA, 20 nt, Human
aagagccgcuggauggaaga

SEQ ID NO: 85509 - RNA, 22 nt, Human
aagcaaacguaugcuggaagau

SEQ ID NO: 85510 - RNA, 26 nt, Human
aagcaaacguaugcuggaagauugug

SEQ ID NO: 85511 - RNA, 21 nt, Human
aagcagaagggaacagacuag

SEQ ID NO: 85512 - RNA, 22 nt, Human
aagcagcagcagcagcagcagc

SEQ ID NO: 85513 - RNA, 25 nt, Human
aagcagugcagcaagcccccgagau

SEQ ID NO: 85514 - RNA, 22 nt, Human
aagcuaaaaaaaggguucuuga

SEQ ID NO: 85515 - RNA, 19 nt, Human
aaggaagacauugcuuucu

SEQ ID NO: 85516 - RNA, 19 nt, Human
aaggcuaagagugcuuucc

SEQ ID NO: 85517 - RNA, 23 nt, Human
aaugaugugguaacaaauuuuag

SEQ ID NO: 85518 - RNA, 20 nt, Human
aauuacugaagaaauugcac

SEQ ID NO: 85519 - RNA, 21 nt, Human
aauuauguaauuaucucgcca

SEQ ID NO: 85520 - RNA, 19 nt, Human
aauucauuacagagcccca

SEQ ID NO: 85521 - RNA, 27 nt, Human
aauugcacugcuggaggaugagggcag

SEQ ID NO: 85522 - RNA, 21 nt, Human
acaaaggcaguucucuagggu

SEQ ID NO: 85523 - RNA, 25 nt, Human
acaacacucgaaaggaugcccacac

SEQ ID NO: 85524 - RNA, 21 nt, Human
acaaggacacgcagagggaag

SEQ ID NO: 85525 - RNA, 22 nt, Human
acacaaaaguuaacagaaacca

SEQ ID NO: 85526 - RNA, 19 nt, Human
acaccauggagcaaauaaa

SEQ ID NO: 85527 - RNA, 23 nt, Human
acagacaacugaaaaaagcacca

SEQ ID NO: 85528 - RNA, 22 nt, Human
acagacacaaacacacacacgc

SEQ ID NO: 85529 - RNA, 25 nt, Human
acagaggaagagaggcuaaucugga

SEQ ID NO: 85530 - RNA, 20 nt, Human
acagaugccucuggagcuga

SEQ ID NO: 85531 - RNA, 18 nt, Human
acagcacagagccaccgc

SEQ ID NO: 85532 - RNA, 23 nt, Human
acagcaggagauagaugcaggag

SEQ ID NO: 85533 - RNA, 24 nt, Human
acagguuguaagcaugagcugaca

SEQ ID NO: 85534 - RNA, 18 nt, Human
acccccaucccaaccccu

SEQ ID NO: 85535 - RNA, 22 nt, Human
acgaaguucuguguaggcugga

SEQ ID NO: 85536 - RNA, 19 nt, Human
acgcagagggaagaaagaa

SEQ ID NO: 85537 - RNA, 19 nt, Human
acuagccaugaggcgacac

SEQ ID NO: 85538 - RNA, 21 nt, Human
acuggaacaagacugaaucca

SEQ ID NO: 85539 - RNA, 20 nt, Human
agaaaccaaguaucuuuccc

SEQ ID NO: 85540 - RNA, 21 nt, Human
agacaacugaaaaaagcacca

SEQ ID NO: 85541 - RNA, 22 nt, Human
agacaacugaaaaaagcaccau

SEQ ID NO: 85542 - RNA, 22 nt, Human
agacagacaacugaaaaaagca

SEQ ID NO: 85543 - RNA, 25 nt, Human
agacggucacagaugccucuggagc

SEQ ID NO: 85544 - RNA, 19 nt, Human
agacucuacucugguggca

SEQ ID NO: 85545 - RNA, 23 nt, Human
agagccccagccucgaagaccuu

SEQ ID NO: 85546 - RNA, 20 nt, Human
agaggccuuccaacugucac

SEQ ID NO: 85547 - RNA, 19 nt, Human
agaggucacaaucagacac

SEQ ID NO: 85548 - RNA, 21 nt, Human
agcaaaugacugucugacccu

SEQ ID NO: 85549 - RNA, 18 nt, Human
agcaaugaugugguaaca

SEQ ID NO: 85550 - RNA, 22 nt, Human
agcagcagcagcagcagcagca

SEQ ID NO: 85551 - RNA, 20 nt, Human
agcauaagaaaccaccaccc

SEQ ID NO: 85552 - RNA, 20 nt, Human
agcggugcuggcagcuggcg

SEQ ID NO: 85553 - RNA, 18 nt, Human
agcuggugucucuccagc

SEQ ID NO: 85554 - RNA, 18 nt, Human
agcuguggggugcaucuc

SEQ ID NO: 85555 - RNA, 23 nt, Human
aggaaagggggagaggcaauggg

SEQ ID NO: 85556 - RNA, 25 nt, Human
aggaagccgccgggcgaggcucagg

SEQ ID NO: 85557 - RNA, 21 nt, Human
aggaaggcagggauuuggaug

SEQ ID NO: 85558 - RNA, 22 nt, Human
agucacauauuucaacaguaug

SEQ ID NO: 85559 - RNA, 23 nt, Human
aguuggacuaguucuguggaugu

SEQ ID NO: 85560 - RNA, 21 nt, Human
auaaaacaugccauucuggcc

SEQ ID NO: 85561 - RNA, 19 nt, Human
auagugcaacuuuuaaaac

SEQ ID NO: 85562 - RNA, 22 nt, Human
aucaccuuuuccuucugcugaa

SEQ ID NO: 85563 - RNA, 23 nt, Human
aucacucguuacuaaacuggacc

SEQ ID NO: 85564 - RNA, 20 nt, Human
auccaaaagucuccaaaagc

SEQ ID NO: 85565 - RNA, 19 nt, Human
aucccaaccccugucccca

SEQ ID NO: 85566 - RNA, 21 nt, Human
aucccguucucuguuuucccc

SEQ ID NO: 85567 - RNA, 25 nt, Human
augaaaaauagcaacauaccaacaa

SEQ ID NO: 85568 - RNA, 23 nt, Human
augaacaggucagccacaaccuu

SEQ ID NO: 85569 - RNA, 20 nt, Human
augauagggguauaucuaca

SEQ ID NO: 85570 - RNA, 18 nt, Human
augaugggacaugaaugg

SEQ ID NO: 85571 - RNA, 21 nt, Human
augcagccuaagaguagcaga

SEQ ID NO: 85572 - RNA, 21 nt, Human
auguagaccacugcaaggcua

SEQ ID NO: 85573 - RNA, 23 nt, Human
auuauaaaccuaucauugauugc

SEQ ID NO: 85574 - RNA, 26 nt, Human
auugcacugcuggaggaugagggcag

SEQ ID NO: 85575 - RNA, 18 nt, Human
caaaacaaacaaacaaaa

SEQ ID NO: 85576 - RNA, 25 nt, Human
caaaagaggacaaagcacauaggca

SEQ ID NO: 85577 - RNA, 21 nt, Human
caaaagucuccaaaagcuuca

SEQ ID NO: 85578 - RNA, 20 nt, Human
caaaauuccacgaacugcuc

SEQ ID NO: 85579 - RNA, 26 nt, Human
caaacaaacaaaaaccagugaccuau

SEQ ID NO: 85580 - RNA, 23 nt, Human
caaaggacacagcgugccgggua

SEQ ID NO: 85581 - RNA, 19 nt, Human
caaaggugggagcaucaag

SEQ ID NO: 85582 - RNA, 24 nt, Human
caacaagcacauuaaaaugaacca

SEQ ID NO: 85583 - RNA, 18 nt, Human
caacauacagaacuucac

SEQ ID NO: 85584 - RNA, 24 nt, Human
caacuuauauacagcaccuuacaa

SEQ ID NO: 85585 - RNA, 21 nt, Human
caaggggugcacccuacagua

SEQ ID NO: 85586 - RNA, 19 nt, Human
caaguaucuuucccaguuu

SEQ ID NO: 85587 - RNA, 22 nt, Human
cacaaucagacacuaaaaacua

SEQ ID NO: 85588 - RNA, 20 nt, Human
cacaccacucccacacgaag

SEQ ID NO: 85589 - RNA, 21 nt, Human
cacaccacucccacacgaagg

SEQ ID NO: 85590 - RNA, 22 nt, Human
caccaaaacugcaggugagaac

SEQ ID NO: 85591 - RNA, 22 nt, Human
cacccacaccacucccacacga

SEQ ID NO: 85592 - RNA, 22 nt, Human
cacccccaucccaaccccuguc

SEQ ID NO: 85593 - RNA, 21 nt, Human
caccugucauucaauuguccu

SEQ ID NO: 85594 - RNA, 18 nt, Human
cacucaccucgccuccgc

SEQ ID NO: 85595 - RNA, 24 nt, Human
cacugccgagcuuuggaaaauuuu

SEQ ID NO: 85596 - RNA, 20 nt, Human
cagaagggaacagacuagga

SEQ ID NO: 85597 - RNA, 20 nt, Human
cagaauaaccaccuugcauu

SEQ ID NO: 85598 - RNA, 24 nt, Human
cagacaacugaaaaaagcaccauu

SEQ ID NO: 85599 - RNA, 20 nt, Human
cagacagacacaaacacaca

SEQ ID NO: 85600 - RNA, 23 nt, Human
cagaccagauggaaguuuguauc

SEQ ID NO: 85601 - RNA, 21 nt, Human
cagcaaagaugcaacuuucca

SEQ ID NO: 85602 - RNA, 21 nt, Human
cagcagcagcaaaugacuguc

SEQ ID NO: 85603 - RNA, 25 nt, Human
cagcagcagcagcagcagcaaauga

SEQ ID NO: 85604 - RNA, 21 nt, Human
cagcaggagauagaugcagga

SEQ ID NO: 85605 - RNA, 23 nt, Human
cagcugagcauuacuaaaaugau

SEQ ID NO: 85606 - RNA, 22 nt, Human
caggaggggcccagcggccgcu

SEQ ID NO: 85607 - RNA, 26 nt, Human
caggauccacaacaacaaaaguguca

SEQ ID NO: 85608 - RNA, 22 nt, Human
cagggcccgaugggaacacggg

SEQ ID NO: 85609 - RNA, 18 nt, Human
caguucgagaagcagcag

SEQ ID NO: 85610 - RNA, 23 nt, Human
cauaaaauaagguauguauuuga

SEQ ID NO: 85611 - RNA, 20 nt, Human
cauaagaaaagacagacaac

SEQ ID NO: 85612 - RNA, 22 nt, Human
cauaagaaaagacagacaacug

SEQ ID NO: 85613 - RNA, 22 nt, Human
caucccaaccccuguccccaaa

SEQ ID NO: 85614 - RNA, 21 nt, Human
caugugcaacacauucauaua

SEQ ID NO: 85615 - RNA, 24 nt, Human
cauuacagagccccagccucgaag

SEQ ID NO: 85616 - RNA, 22 nt, Human
ccaaaacugcaggugagaacug

SEQ ID NO: 85617 - RNA, 18 nt, Human
ccacacccaagauucaac

SEQ ID NO: 85618 - RNA, 22 nt, Human
ccacaccuuaggagaaaaagcg

SEQ ID NO: 85619 - RNA, 20 nt, Human
ccacagacagacacaaacac

SEQ ID NO: 85620 - RNA, 19 nt, Human
ccaccacccacaccacucc

SEQ ID NO: 85621 - RNA, 22 nt, Human
ccacugugacucucaacuguau

SEQ ID NO: 85622 - RNA, 20 nt, Human
ccaggguuggggaggguccu

SEQ ID NO: 85623 - RNA, 24 nt, Human
cccaagccaaucucugcccugaga

SEQ ID NO: 85624 - RNA, 19 nt, Human
cccacacccccaucccaac

SEQ ID NO: 85625 - RNA, 21 nt, Human
cccacacccccaucccaaccc

SEQ ID NO: 85626 - RNA, 22 nt, Human
cccacacccccaucccaacccc

SEQ ID NO: 85627 - RNA, 19 nt, Human
cccacagacagacacaaac

SEQ ID NO: 85628 - RNA, 18 nt, Human
ccccaaauaaacacuguu

SEQ ID NO: 85629 - RNA, 27 nt, Human
ccccaagccaaucucugcccugagagc

SEQ ID NO: 85630 - RNA, 21 nt, Human
ccccagccucgaagaccuuuc

SEQ ID NO: 85631 - RNA, 19 nt, Human
ccgcauuacacaaaaacaa

SEQ ID NO: 85632 - RNA, 20 nt, Human
ccuaagaguagcagaguaac

SEQ ID NO: 85633 - RNA, 22 nt, Human
ccuaagaguagcagaguaacuc

SEQ ID NO: 85634 - RNA, 18 nt, Human
ccuauaucugcugaacuc

SEQ ID NO: 85635 - RNA, 24 nt, Human
ccuaucuuaucuuccauccaaaag

SEQ ID NO: 85636 - RNA, 26 nt, Human
ccucaaaacaaacaaacaaaaaccag

SEQ ID NO: 85637 - RNA, 21 nt, Human
ccucugcuggugucaggaggc

SEQ ID NO: 85638 - RNA, 21 nt, Human
ccuggggggugggagcuuugu

SEQ ID NO: 85639 - RNA, 19 nt, Human
ccuguccccaaauaaacac

SEQ ID NO: 85640 - RNA, 21 nt, Human
cgacggaucaccuucgagacc

SEQ ID NO: 85641 - RNA, 24 nt, Human
cgccacacuagccaugaggcgaca

SEQ ID NO: 85642 - RNA, 18 nt, Human
cgccuggguacaaaauuc

SEQ ID NO: 85643 - RNA, 21 nt, Human
cggucagaccagauggaaguu

SEQ ID NO: 85644 - RNA, 20 nt, Human
cguaagugguaaaauguuag

SEQ ID NO: 85645 - RNA, 21 nt, Human
cuacucuuucaacgccacacu

SEQ ID NO: 85646 - RNA, 23 nt, Human
cuagugacauacaauaacccaca

SEQ ID NO: 85647 - RNA, 23 nt, Human
cucaaaacaaacaaacaaaaacc

SEQ ID NO: 85648 - RNA, 20 nt, Human
cucaaaauaacaagucagaa

SEQ ID NO: 85649 - RNA, 24 nt, Human
cucccgcauuacacaaaaacaagg

SEQ ID NO: 85650 - RNA, 18 nt, Human
cuccgcaucugugggcac

SEQ ID NO: 85651 - RNA, 26 nt, Human
cugaaaaagcaaacguaugcuggaag

SEQ ID NO: 85652 - RNA, 25 nt, Human
cugacauuuucaaagucagaacaua

SEQ ID NO: 85653 - RNA, 21 nt, Human
cugaccaagaauccacugcaa

SEQ ID NO: 85654 - RNA, 21 nt, Human
cugcagauaagcccuucuccu

SEQ ID NO: 85655 - RNA, 24 nt, Human
cugcugcucuuauaaaagccagug

SEQ ID NO: 85656 - RNA, 24 nt, Human
cuggagagccagugaaccuucagg

SEQ ID NO: 85657 - RNA, 18 nt, Human
cugugcuccaacucuugc

SEQ ID NO: 85658 - RNA, 23 nt, Human
cuguggggugcaucuccugcuuc

SEQ ID NO: 85659 - RNA, 24 nt, Human
cuguuggccccuauuuccugccuc

SEQ ID NO: 85660 - RNA, 19 nt, Human
cuuaagcaagcaacacaaa

SEQ ID NO: 85661 - RNA, 20 nt, Human
cuuauagaugggauucaaga

SEQ ID NO: 85662 - RNA, 25 nt, Human
cuucccuaucuuaucuuccauccaa

SEQ ID NO: 85663 - RNA, 21 nt, Human
cuucccuucuugguuucuuuc

SEQ ID NO: 85664 - RNA, 20 nt, Human
cuuccuaacaaugcaaucca

SEQ ID NO: 85665 - RNA, 21 nt, Human
cuugguuucuuucuccagcug

SEQ ID NO: 85666 - RNA, 19 nt, Human
cuuuccucgcaccaagaag

SEQ ID NO: 85667 - RNA, 20 nt, Human
cuuuuuacccggugcucuuc

SEQ ID NO: 85668 - RNA, 24 nt, Human
gaaaaaggcacagagagacuugga

SEQ ID NO: 85669 - RNA, 21 nt, Human
gaaccuggggggugggagcuu

SEQ ID NO: 85670 - RNA, 20 nt, Human
gaaguucucccuugcccacc

SEQ ID NO: 85671 - RNA, 18 nt, Human
gaaguucuguguaggcug

SEQ ID NO: 85672 - RNA, 23 nt, Human
gaccuuucaaagucaugguuuga

SEQ ID NO: 85673 - RNA, 23 nt, Human
gacggucacagaugccucuggag

SEQ ID NO: 85674 - RNA, 18 nt, Human
gaggagccucuuucuuga

SEQ ID NO: 85675 - RNA, 18 nt, Human
gagguccuucacuuggcu

SEQ ID NO: 85676 - RNA, 22 nt, Human
gaugugggguggcugcugggag

SEQ ID NO: 85677 - RNA, 20 nt, Human
gauugcuuuauaauaaaaau

SEQ ID NO: 85678 - RNA, 23 nt, Human
gcaccagagccuuccuaaaaaga

SEQ ID NO: 85679 - RNA, 21 nt, Human
gcacucaucuaacuucuccac

SEQ ID NO: 85680 - RNA, 26 nt, Human
gcagaguguacugcagauaagccccc

SEQ ID NO: 85681 - RNA, 18 nt, Human
gcccacacccccauccca

SEQ ID NO: 85682 - RNA, 20 nt, Human
gcgcagugucugcuaaacgu

SEQ ID NO: 85683 - RNA, 22 nt, Human
gcuuggguguguguccaugugu

SEQ ID NO: 85684 - RNA, 18 nt, Human
gggaacacgggcuccuca

SEQ ID NO: 85685 - RNA, 21 nt, Human
gggaacacgggcuccucaucu

SEQ ID NO: 85686 - RNA, 22 nt, Human
gggggugggagcuuuguuucug

SEQ ID NO: 85687 - RNA, 21 nt, Human
ggggugggagcuuuguuucug

SEQ ID NO: 85688 - RNA, 24 nt, Human
ggguauuugaagauaaaugcagag

SEQ ID NO: 85689 - RNA, 18 nt, Human
ggguggcugcugggagcc

SEQ ID NO: 85690 - RNA, 18 nt, Human
gguagguuuugagcacug

SEQ ID NO: 85691 - RNA, 24 nt, Human
gguaugaacaggucagccacaacc

SEQ ID NO: 85692 - RNA, 21 nt, Human
ggucagaugggcaaaauucca

SEQ ID NO: 85693 - RNA, 23 nt, Human
gguugaaugggaggagccucuuu

SEQ ID NO: 85694 - RNA, 18 nt, Human
guaauuaucucgccaaua

SEQ ID NO: 85695 - RNA, 19 nt, Human
guacaaaauuccucugcug

SEQ ID NO: 85696 - RNA, 19 nt, Human
gucagcgguaugcccagga

SEQ ID NO: 85697 - RNA, 22 nt, Human
gugaggcacaacaaagguggga

SEQ ID NO: 85698 - RNA, 20 nt, Human
gugguaaaauguuaggcuac

SEQ ID NO: 85699 - RNA, 24 nt, Human
guucuuauagaugggauucaagau

SEQ ID NO: 85700 - RNA, 23 nt, Human
uaaaacuaacaauauuuaaaauu

SEQ ID NO: 85701 - RNA, 21 nt, Human
uaaaauagccuuaaacuagac

SEQ ID NO: 85702 - RNA, 22 nt, Human
uaaaauguuaggcuacgucccc

SEQ ID NO: 85703 - RNA, 23 nt, Human
uaaacaagcagugcagcaagccc

SEQ ID NO: 85704 - RNA, 21 nt, Human
uaaaugcagaggucacaauca

SEQ ID NO: 85705 - RNA, 24 nt, Human
uaagaaaagacagacaacugaaaa

SEQ ID NO: 85706 - RNA, 19 nt, Human
uaagaaaccaccacccaca

SEQ ID NO: 85707 - RNA, 23 nt, Human
uaagaaaccaccacccacaccac

SEQ ID NO: 85708 - RNA, 18 nt, Human
uaagccucaauucguccu

SEQ ID NO: 85709 - RNA, 23 nt, Human
uaauaaagaaugcugaaauauug

SEQ ID NO: 85710 - RNA, 23 nt, Human
uaauauauaauaaugcuuccuuc

SEQ ID NO: 85711 - RNA, 24 nt, Human
uaaugugcacggauaguguauaua

SEQ ID NO: 85712 - RNA, 23 nt, Human
uacaaauaaaaacauaagaaaag

SEQ ID NO: 85713 - RNA, 19 nt, Human
uacacaaaaacaaggacac

SEQ ID NO: 85714 - RNA, 22 nt, Human
uacaccgggaacaagggacaaa

SEQ ID NO: 85715 - RNA, 21 nt, Human
uacagaacuucacguaaaaca

SEQ ID NO: 85716 - RNA, 24 nt, Human
uacagcacagagccaccgcaccga

SEQ ID NO: 85717 - RNA, 20 nt, Human
uacaguauuaacaacuuuuu

SEQ ID NO: 85718 - RNA, 22 nt, Human
uacauagacuuuaaucuguaug

SEQ ID NO: 85719 - RNA, 22 nt, Human
uaccaacaagcacauuaaaaug

SEQ ID NO: 85720 - RNA, 20 nt, Human
uaccuuggcacacaacacag

SEQ ID NO: 85721 - RNA, 18 nt, Human
uagaggauggccccuguc

SEQ ID NO: 85722 - RNA, 18 nt, Human
uagcucacaaacaacuau

SEQ ID NO: 85723 - RNA, 21 nt, Human
uaggguauuugaagauaaaug

SEQ ID NO: 85724 - RNA, 19 nt, Human
uaguggcaaccaaaaagcu

SEQ ID NO: 85725 - RNA, 24 nt, Human
uaguuugcaugcaauuccccuaaa

SEQ ID NO: 85726 - RNA, 21 nt, Human
uauaaagcaaguugaaaaaca

SEQ ID NO: 85727 - RNA, 25 nt, Human
uaucuacauauauauaaugugcacg

SEQ ID NO: 85728 - RNA, 27 nt, Human
uaucuuaucuuccauccaaaagucucc

SEQ ID NO: 85729 - RNA, 25 nt, Human
uaucuuccauccaaaagucuccaaa

SEQ ID NO: 85730 - RNA, 20 nt, Human
uauugaaauacauaauuugc

SEQ ID NO: 85731 - RNA, 24 nt, Human
uauugaugcaaacuccugcaacaa

SEQ ID NO: 85732 - RNA, 23 nt, Human
uauuugaagauaaaugcagaggu

SEQ ID NO: 85733 - RNA, 22 nt, Human
ucaaaacaaacaaacaaaaacc

SEQ ID NO: 85734 - RNA, 28 nt, Human
ucacaaacaacuauugaaaaguucaaau

SEQ ID NO: 85735 - RNA, 19 nt, Human
ucacuggaacaagacugaa

SEQ ID NO: 85736 - RNA, 19 nt, Human
ucacuuccaucuuagccug

SEQ ID NO: 85737 - RNA, 23 nt, Human
ucacuuccaucuuagccugucca

SEQ ID NO: 85738 - RNA, 22 nt, Human
ucagaaccuccacugugacucu

SEQ ID NO: 85739 - RNA, 21 nt, Human
ucagagaggaaggcagggauu

SEQ ID NO: 85740 - RNA, 19 nt, Human
ucaugcucaacaguucucc

SEQ ID NO: 85741 - RNA, 23 nt, Human
ucauuuguuuccuggauguuagg

SEQ ID NO: 85742 - RNA, 20 nt, Human
uccaaagcauaagaaaccac

SEQ ID NO: 85743 - RNA, 21 nt, Human
uccaaagcauaagaaaccacc

SEQ ID NO: 85744 - RNA, 21 nt, Human
uccauccaaaagucuccaaaa

SEQ ID NO: 85745 - RNA, 21 nt, Human
ucccaaccccuguccccaaau

SEQ ID NO: 85746 - RNA, 19 nt, Human
ucccaccaaauguucuucc

SEQ ID NO: 85747 - RNA, 23 nt, Human
uccccggacaagccugugcucca

SEQ ID NO: 85748 - RNA, 27 nt, Human
uccccggacaagccugugcuccaacuc

SEQ ID NO: 85749 - RNA, 19 nt, Human
ucccugcgcccacagcaga

SEQ ID NO: 85750 - RNA, 23 nt, Human
uccuacaccgggaacaagggaca

SEQ ID NO: 85751 - RNA, 24 nt, Human
uccucaaaacaaacaaacaaaaac

SEQ ID NO: 85752 - RNA, 21 nt, Human
uccugcaacaauaaugacuuu

SEQ ID NO: 85753 - RNA, 21 nt, Human
ucuacagagguaagaagcaga

SEQ ID NO: 85754 - RNA, 18 nt, Human
ucucaugcucaacaguuc

SEQ ID NO: 85755 - RNA, 21 nt, Human
ucucuagggugguugaauggg

SEQ ID NO: 85756 - RNA, 20 nt, Human
ucugacccuggcaguaacau

SEQ ID NO: 85757 - RNA, 23 nt, Human
ucugacuguccaguucuugccuu

SEQ ID NO: 85758 - RNA, 22 nt, Human
ucugcaaaggacacagcgugcc

SEQ ID NO: 85759 - RNA, 18 nt, Human
ucugcuggugucaggagg

SEQ ID NO: 85760 - RNA, 26 nt, Human
ucuguguaggcuggaugugggguggc

SEQ ID NO: 85761 - RNA, 18 nt, Human
ucuugaaagaacaauagg

SEQ ID NO: 85762 - RNA, 25 nt, Human
ugaaaaaaaucuaaauuacugaaga

SEQ ID NO: 85763 - RNA, 26 nt, Human
ugaaaaaagcaccauuuuaagugagg

SEQ ID NO: 85764 - RNA, 22 nt, Human
ugaaaaacaacauuuuucugac

SEQ ID NO: 85765 - RNA, 25 nt, Human
ugaaaaacaacauuuuucugacuca

SEQ ID NO: 85766 - RNA, 18 nt, Human
ugaaaaauagcaacauac

SEQ ID NO: 85767 - RNA, 21 nt, Human
ugaaaagacaacauacagaac

SEQ ID NO: 85768 - RNA, 18 nt, Human
ugaaagaacaauaggccc

SEQ ID NO: 85769 - RNA, 20 nt, Human
ugaaagagaucaaacggaga

SEQ ID NO: 85770 - RNA, 21 nt, Human
ugaaagagaucaaacggagau

SEQ ID NO: 85771 - RNA, 22 nt, Human
ugaaagagaucaaacggagaua

SEQ ID NO: 85772 - RNA, 20 nt, Human
ugaaagcuaugaaaugaaaa

SEQ ID NO: 85773 - RNA, 21 nt, Human
ugaaaugaaaaauagcaacag

SEQ ID NO: 85774 - RNA, 18 nt, Human
ugaaccugggggguggga

SEQ ID NO: 85775 - RNA, 19 nt, Human
ugaaccuggggggugggag

SEQ ID NO: 85776 - RNA, 23 nt, Human
ugaagugcucugcaccagagccu

SEQ ID NO: 85777 - RNA, 18 nt, Human
ugaaugggaauggaugag

SEQ ID NO: 85778 - RNA, 21 nt, Human
ugacacaguuucugcaacaac

SEQ ID NO: 85779 - RNA, 23 nt, Human
ugagaacugaaaugauggaauca

SEQ ID NO: 85780 - RNA, 18 nt, Human
ugagagcuagagcugugg

SEQ ID NO: 85781 - RNA, 22 nt, Human
ugagcacugcauuccuuuaaga

SEQ ID NO: 85782 - RNA, 22 nt, Human
ugaggcaccuuaguugcugaaa

SEQ ID NO: 85783 - RNA, 22 nt, Human
ugauagggguauaucuacauau

SEQ ID NO: 85784 - RNA, 24 nt, Human
ugcagaacugaacuaagcugucga

SEQ ID NO: 85785 - RNA, 21 nt, Human
ugcccacacccccaucccaac

SEQ ID NO: 85786 - RNA, 21 nt, Human
ugcccccuccacuguucucug

SEQ ID NO: 85787 - RNA, 18 nt, Human
ugcgcccacagcagaaug

SEQ ID NO: 85788 - RNA, 21 nt, Human
ugcuaacccauaacuaaacac

SEQ ID NO: 85789 - RNA, 23 nt, Human
ugcucugagccccuucuugaggc

SEQ ID NO: 85790 - RNA, 22 nt, Human
ugcucugcaccagagccuuccu

SEQ ID NO: 85791 - RNA, 25 nt, Human
ugcucugcaccagagccuuccuaaa

SEQ ID NO: 85792 - RNA, 19 nt, Human
ugcuggaggaugagggcag

SEQ ID NO: 85793 - RNA, 18 nt, Human
uggaacaagacugaaucc

SEQ ID NO: 85794 - RNA, 18 nt, Human
uggaagauagaggauggc

SEQ ID NO: 85795 - RNA, 22 nt, Human
uggacacagacggucacagaug

SEQ ID NO: 85796 - RNA, 18 nt, Human
uggagagccagugaaccu

SEQ ID NO: 85797 - RNA, 24 nt, Human
uggcagaguguacugcagauaagc

SEQ ID NO: 85798 - RNA, 19 nt, Human
uggcagcuggcgguggugg

SEQ ID NO: 85799 - RNA, 18 nt, Human
uggcaguaacauaaacuu

SEQ ID NO: 85800 - RNA, 23 nt, Human
ugggagcaucaagugcaggaggg

SEQ ID NO: 85801 - RNA, 24 nt, Human
ugggaggagccucuuucuugaaag

SEQ ID NO: 85802 - RNA, 21 nt, Human
ugggagucauggaaucaucau

SEQ ID NO: 85803 - RNA, 20 nt, Human
ugggauuucuuguggcuugg

SEQ ID NO: 85804 - RNA, 19 nt, Human
ugggcuggaagcaacauuu

SEQ ID NO: 85805 - RNA, 20 nt, Human
ugggguuuggaacagucucu

SEQ ID NO: 85806 - RNA, 19 nt, Human
uggugucaggaggccuccc

SEQ ID NO: 85807 - RNA, 18 nt, Human
uguaaaagaaaaaggcac

SEQ ID NO: 85808 - RNA, 23 nt, Human
uguagaccacugcaaggcuaauc

SEQ ID NO: 85809 - RNA, 22 nt, Human
ugucugacccuggcaguaacau

SEQ ID NO: 85810 - RNA, 21 nt, Human
ugugcacggauaguguauaua

SEQ ID NO: 85811 - RNA, 21 nt, Human
ugugcuuuuuacccggugcuc

SEQ ID NO: 85812 - RNA, 21 nt, Human
ugugguggggagggugaggac

SEQ ID NO: 85813 - RNA, 19 nt, Human
uguguccauguguuuaugu

SEQ ID NO: 85814 - RNA, 24 nt, Human
uguugccauucuaaguagcaaaau

SEQ ID NO: 85815 - RNA, 23 nt, Human
uuaaauaacuauuuaacaaaggc

SEQ ID NO: 85816 - RNA, 21 nt, Human
uuagacucuacucugguggca

SEQ ID NO: 85817 - RNA, 24 nt, Human
uucaaagcaucccguucucuguuu

SEQ ID NO: 85818 - RNA, 20 nt, Human
uucacacuucuuucucuugu

SEQ ID NO: 85819 - RNA, 22 nt, Human
uucacguaaaacaguucccuug

SEQ ID NO: 85820 - RNA, 23 nt, Human
uucagagaggaaggcagggauuu

SEQ ID NO: 85821 - RNA, 23 nt, Human
uuccaauccucaaaacaaacaaa

SEQ ID NO: 85822 - RNA, 19 nt, Human
uuccacacagguuguaagc

SEQ ID NO: 85823 - RNA, 18 nt, Human
uuccccugcccacacccc

SEQ ID NO: 85824 - RNA, 20 nt, Human
uucuuaaugaugaaucccaa

SEQ ID NO: 85825 - RNA, 21 nt, Human
uucuuggaugcuucuggggac

SEQ ID NO: 85826 - RNA, 21 nt, Human
uugaaccuggggggugggagc

SEQ ID NO: 85827 - RNA, 23 nt, Human
uugcacugcuggaggaugagggc

SEQ ID NO: 85828 - RNA, 20 nt, Human
uugggguuuggaacagucuc

SEQ ID NO: 85829 - RNA, 22 nt, Human
uugggguuuggaacagucucuc

SEQ ID NO: 85830 - RNA, 20 nt, Human
uuguaucauuucagucuagu

SEQ ID NO: 85831 - RNA, 22 nt, Human
uugucuguucacaucucuguga

SEQ ID NO: 85832 - RNA, 26 nt, Human
uuuacuuauuccucugacacaguuuc

SEQ ID NO: 85833 - RNA, 23 nt, Human
uuucuaagaacagggucuucuug

SEQ ID NO: 85834 - RNA, 18 nt, Human
uuucuuggaugcuucugg

SEQ ID NO: 85835 - RNA, 21 nt, Human
aaacacaaaaucuguaccagu

SEQ ID NO: 85836 - RNA, 24 nt, Human
aaacacaaaaucuguaccaguuau

SEQ ID NO: 85837 - RNA, 23 nt, Human
aaauggcauuguuuaauaagaac

SEQ ID NO: 85838 - RNA, 20 nt, Human
aacgcuuuugcaaagacaac

SEQ ID NO: 85839 - RNA, 22 nt, Human
aagaaugaggaugaaauaaaga

SEQ ID NO: 85840 - RNA, 19 nt, Human
accacaauuccuaaaaaca

SEQ ID NO: 85841 - RNA, 18 nt, Human
acccagggcucccuccac

SEQ ID NO: 85842 - RNA, 28 nt, Human
agagaagaaaagcauaagcacuugagag

SEQ ID NO: 85843 - RNA, 19 nt, Human
aggaaaguugggggguggg

SEQ ID NO: 85844 - RNA, 27 nt, Human
agggaggaaaguuggggggugggcggg

SEQ ID NO: 85845 - RNA, 28 nt, Human
caccaugacucagauaccacaauuccua

SEQ ID NO: 85846 - RNA, 25 nt, Human
cccuccaccaccauaucucagguuc

SEQ ID NO: 85847 - RNA, 20 nt, Human
ccuuuaagaaugaggaugaa

SEQ ID NO: 85848 - RNA, 23 nt, Human
cgcaguaaaucucccacagucuc

SEQ ID NO: 85849 - RNA, 22 nt, Human
cuccccuucaagacauuuguca

SEQ ID NO: 85850 - RNA, 19 nt, Human
cugcauuuucugucuccuu

SEQ ID NO: 85851 - RNA, 21 nt, Human
gcauaagcacuugagagacca

SEQ ID NO: 85852 - RNA, 19 nt, Human
ggaaaguuggggggugggc

SEQ ID NO: 85853 - RNA, 19 nt, Human
ggagacauaaauuccaaac

SEQ ID NO: 85854 - RNA, 23 nt, Human
ggagcucugaccacucgacccag

SEQ ID NO: 85855 - RNA, 20 nt, Human
gggaauguggguggcagaga

SEQ ID NO: 85856 - RNA, 18 nt, Human
gggggugggcgggaugug

SEQ ID NO: 85857 - RNA, 18 nt, Human
ggguggcagagagaagaa

SEQ ID NO: 85858 - RNA, 22 nt, Human
guaaaucucccacagucucaca

SEQ ID NO: 85859 - RNA, 20 nt, Human
guccggagcucugaccacuc

SEQ ID NO: 85860 - RNA, 21 nt, Human
gucuucagcagguaauuucuu

SEQ ID NO: 85861 - RNA, 27 nt, Human
uaaauuccaaacucgaggggccucaca

SEQ ID NO: 85862 - RNA, 19 nt, Human
uaagaaugaggaugaaaua

SEQ ID NO: 85863 - RNA, 21 nt, Human
uauaaacacaaaaucuguacc

SEQ ID NO: 85864 - RNA, 19 nt, Human
uauggugaucaggagggug

SEQ ID NO: 85865 - RNA, 22 nt, Human
ucacaguacagaggaaauacaa

SEQ ID NO: 85866 - RNA, 26 nt, Human
ucacaugcacugucuguuuuucccuc

SEQ ID NO: 85867 - RNA, 18 nt, Human
ucaucugcaugccaaucu

SEQ ID NO: 85868 - RNA, 20 nt, Human
uccaugggaaggugaaggga

SEQ ID NO: 85869 - RNA, 21 nt, Human
uccggagcucugaccacucga

SEQ ID NO: 85870 - RNA, 19 nt, Human
ugaaguugcauggggcugg

SEQ ID NO: 85871 - RNA, 20 nt, Human
ugaggaugaaauaaagacau

SEQ ID NO: 85872 - RNA, 18 nt, Human
ugggaauguggguggcag

SEQ ID NO: 85873 - RNA, 19 nt, Human
uggggggugggcgggaugu

SEQ ID NO: 85874 - RNA, 20 nt, Human
uggggggugggcgggaugug

SEQ ID NO: 85875 - RNA, 20 nt, Human
ugucagaagucagagccugu

SEQ ID NO: 85876 - RNA, 21 nt, Human
ugucuccuuguuuauaaacac

SEQ ID NO: 85877 - RNA, 21 nt, Human
uguuggcgagagggccuuccu

SEQ ID NO: 85878 - RNA, 18 nt, Human
uuugucauauuuugaagu

SEQ ID NO: 85879 - RNA, 18 nt, Human
uuuuuuuuuuuuuuuuug

SEQ ID NO: 85880 - RNA, 18 nt, Human
aaacagauguaccuauaa

SEQ ID NO: 85881 - RNA, 18 nt, Human
aacauuuaagucauuuca

SEQ ID NO: 85882 - RNA, 21 nt, Human
aaugguacuugcaagacugac

SEQ ID NO: 85883 - RNA, 23 nt, Human
acacuuugaauaucaacaaagca

SEQ ID NO: 85884 - RNA, 24 nt, Human
agacugaccuauauaaagaaauaa

SEQ ID NO: 85885 - RNA, 20 nt, Human
agcauacuucauaaggucau

SEQ ID NO: 85886 - RNA, 21 nt, Human
auagaggcaacaugccaagaa

SEQ ID NO: 85887 - RNA, 18 nt, Human
gaaaauacucacggccuu

SEQ ID NO: 85888 - RNA, 25 nt, Human
gccaagaauuaaaguacaaccauaa

SEQ ID NO: 85889 - RNA, 21 nt, Human
gcuuagaaaauacucacggcc

SEQ ID NO: 85890 - RNA, 18 nt, Human
gugcuaaucaauaaagau

SEQ ID NO: 85891 - RNA, 24 nt, Human
uaaaauaguacaaauguuuacaaa

SEQ ID NO: 85892 - RNA, 21 nt, Human
uaaaauccucagugcuaauca

SEQ ID NO: 85893 - RNA, 19 nt, Human
uaaacuuuuaguuucacac

SEQ ID NO: 85894 - RNA, 21 nt, Human
uaaacuuuuaguuucacacuu

SEQ ID NO: 85895 - RNA, 19 nt, Human
uaaaguacaaccauaaacu

SEQ ID NO: 85896 - RNA, 23 nt, Human
uaaaguacaaccauaaacuuuua

SEQ ID NO: 85897 - RNA, 18 nt, Human
uaaaugggacauagaggc

SEQ ID NO: 85898 - RNA, 18 nt, Human
uauacagaaaaaaaugaa

SEQ ID NO: 85899 - RNA, 22 nt, Human
uaucacaauguuaaaauccuca

SEQ ID NO: 85900 - RNA, 27 nt, Human
ucauccaucaacauacaaccuuauuuc

SEQ ID NO: 85901 - RNA, 19 nt, Human
ucuaaacacuggcuuagaa

SEQ ID NO: 85902 - RNA, 23 nt, Human
ugccaaaauucauccaucaacau

SEQ ID NO: 85903 - RNA, 25 nt, Human
ugccaagaauuaaaguacaaccaua

SEQ ID NO: 85904 - RNA, 19 nt, Human
uguguacaucaaaaccaaa

SEQ ID NO: 85905 - RNA, 26 nt, Human
uuaaaguacaaccauaaacuuuuagu

SEQ ID NO: 85906 - RNA, 27 nt, Human
uuucacagcugcuuauaaaaugguacu

SEQ ID NO: 85907 - RNA, 23 nt, Human
aaaguguugggauuacaggugua

SEQ ID NO: 85908 - RNA, 22 nt, Human
aacuccuaggcucaagcaaucc

SEQ ID NO: 85909 - RNA, 19 nt, Human
aagcacacaccaccaugcc

SEQ ID NO: 85910 - RNA, 20 nt, Human
aagcacacaccaccaugccc

SEQ ID NO: 85911 - RNA, 20 nt, Human
aaguagcugggacuacaagc

SEQ ID NO: 85912 - RNA, 24 nt, Human
aaguagcugggacuacaagcacac

SEQ ID NO: 85913 - RNA, 21 nt, Human
aaguguugggauuacaggugu

SEQ ID NO: 85914 - RNA, 26 nt, Human
aaguguugggauuacagguguaagcc

SEQ ID NO: 85915 - RNA, 20 nt, Human
aaucauucaggacuagucug

SEQ ID NO: 85916 - RNA, 18 nt, Human
acagguguaagccaccgc

SEQ ID NO: 85917 - RNA, 25 nt, Human
acuauuauuacuauauuagacauau

SEQ ID NO: 85918 - RNA, 21 nt, Human
acucaauaagggaugcaauuu

SEQ ID NO: 85919 - RNA, 25 nt, Human
acucugucgccuaggcuggaaugca

SEQ ID NO: 85920 - RNA, 20 nt, Human
agacgauaacucacauccuc

SEQ ID NO: 85921 - RNA, 19 nt, Human
agagagaggauuuugccau

SEQ ID NO: 85922 - RNA, 20 nt, Human
agccaccgcacccaccccug

SEQ ID NO: 85923 - RNA, 21 nt, Human
agcugggacuacaagcacaca

SEQ ID NO: 85924 - RNA, 21 nt, Human
aggacauucacaaauggcaaa

SEQ ID NO: 85925 - RNA, 25 nt, Human
agguaauucucccaccucagccucc

SEQ ID NO: 85926 - RNA, 25 nt, Human
aucugucucugccucucucuccauc

SEQ ID NO: 85927 - RNA, 18 nt, Human
augucuucagggaucugu

SEQ ID NO: 85928 - RNA, 18 nt, Human
auucaucuggccucaaac

SEQ ID NO: 85929 - RNA, 23 nt, Human
caaaacaaccaaaaggcguuacc

SEQ ID NO: 85930 - RNA, 20 nt, Human
caaaguguugggauuacagg

SEQ ID NO: 85931 - RNA, 20 nt, Human
caaaguguugggauuacagg

SEQ ID NO: 85932 - RNA, 24 nt, Human
caaaguguugggauuacaggugua

SEQ ID NO: 85933 - RNA, 28 nt, Human
caacuccuaggcucaagcaauccucccu

SEQ ID NO: 85934 - RNA, 23 nt, Human
cacacaccaccaugcccggcuaa

SEQ ID NO: 85935 - RNA, 24 nt, Human
cacaccaccaugcccggcuaauuu

SEQ ID NO: 85936 - RNA, 24 nt, Human
caccaugcccggcuaauuuuugua

SEQ ID NO: 85937 - RNA, 24 nt, Human
caccucagccuccuaaguagcugg

SEQ ID NO: 85938 - RNA, 20 nt, Human
cacuccagcuucuauuucca

SEQ ID NO: 85939 - RNA, 24 nt, Human
cacucugucgccuaggcuggaaug

SEQ ID NO: 85940 - RNA, 20 nt, Human
caggccuggcugucugucau

SEQ ID NO: 85941 - RNA, 22 nt, Human
cauguuucccaggcuggccuuc

SEQ ID NO: 85942 - RNA, 30 nt, Human
cauuuugcuuucuuggguguacagucuuaa

SEQ ID NO: 85943 - RNA, 24 nt, Human
ccaccccuggauguauuucuuaac

SEQ ID NO: 85944 - RNA, 23 nt, Human
cccaccucagccuccuaaguagc

SEQ ID NO: 85945 - RNA, 19 nt, Human
ccuaaguagcugggacuac

SEQ ID NO: 85946 - RNA, 21 nt, Human
ccuaggcuggaaugcaggggc

SEQ ID NO: 85947 - RNA, 18 nt, Human
ccuggcuggcuggaagcu

SEQ ID NO: 85948 - RNA, 20 nt, Human
cucaagcaauccucccaccu

SEQ ID NO: 85949 - RNA, 27 nt, Human
cucaagcaauccucccaccuuggccuc

SEQ ID NO: 85950 - RNA, 24 nt, Human
cucagccuccuaaguagcugggac

SEQ ID NO: 85951 - RNA, 24 nt, Human
cucagguaauucucccaccucagc

SEQ ID NO: 85952 - RNA, 22 nt, Human
cucccgguaccccaaauuucau

SEQ ID NO: 85953 - RNA, 25 nt, Human
cuccuaggcucaagcaauccuccca

SEQ ID NO: 85954 - RNA, 26 nt, Human
cuucagggaucugucucugccucucu

SEQ ID NO: 85955 - RNA, 24 nt, Human
cuuccugggcucagguaauucucc

SEQ ID NO: 85956 - RNA, 20 nt, Human
gagacagggucucacucugu

SEQ ID NO: 85957 - RNA, 21 nt, Human
gagccaggacucaauaaggga

SEQ ID NO: 85958 - RNA, 18 nt, Human
gauuacagguguaagcca

SEQ ID NO: 85959 - RNA, 23 nt, Human
gauuacagguguaagccaccgca

SEQ ID NO: 85960 - RNA, 24 nt, Human
gcaaaguguugggauuacaggugu

SEQ ID NO: 85961 - RNA, 22 nt, Human
gcccggcuaauuuuuguauuuu

SEQ ID NO: 85962 - RNA, 22 nt, Human
gccuaggcuggaaugcaggggc

SEQ ID NO: 85963 - RNA, 25 nt, Human
gcuggaaugcaggggcaugaucuca

SEQ ID NO: 85964 - RNA, 22 nt, Human
ggauuacagguguaagccaccg

SEQ ID NO: 85965 - RNA, 19 nt, Human
ggcacaggugaauucggga

SEQ ID NO: 85966 - RNA, 23 nt, Human
gggcaugaucucaacucacugga

SEQ ID NO: 85967 - RNA, 20 nt, Human
gggguugggcuuuguuuucc

SEQ ID NO: 85968 - RNA, 23 nt, Human
guccuggcucuguaaggcaacuu

SEQ ID NO: 85969 - RNA, 21 nt, Human
guccuugagaugggaggaagu

SEQ ID NO: 85970 - RNA, 24 nt, Human
uaaaguguagauaacaauuuuuaa

SEQ ID NO: 85971 - RNA, 23 nt, Human
uaaaucauucaggacuagucugg

SEQ ID NO: 85972 - RNA, 19 nt, Human
uaagggguugggcuuuguu

SEQ ID NO: 85973 - RNA, 20 nt, Human
uaauucucccaccucagccu

SEQ ID NO: 85974 - RNA, 24 nt, Human
uacagguguaagccaccgcaccca

SEQ ID NO: 85975 - RNA, 21 nt, Human
uagagagaggauuuugccaug

SEQ ID NO: 85976 - RNA, 22 nt, Human
uagagagaggauuuugccaugu

SEQ ID NO: 85977 - RNA, 24 nt, Human
ucaagcaauccucccaccuuggcc

SEQ ID NO: 85978 - RNA, 20 nt, Human
ucauucaggacuagucuggc

SEQ ID NO: 85979 - RNA, 26 nt, Human
uccauagaguaaacaguucuuuuucc

SEQ ID NO: 85980 - RNA, 18 nt, Human
uccuaaguagcugggacu

SEQ ID NO: 85981 - RNA, 18 nt, Human
uccuaggcucaagcaauc

SEQ ID NO: 85982 - RNA, 22 nt, Human
uccucccaccuuggccucgcaa

SEQ ID NO: 85983 - RNA, 23 nt, Human
uccugaaagcuuugguucuucug

SEQ ID NO: 85984 - RNA, 20 nt, Human
uccugggcucagguaauucu

SEQ ID NO: 85985 - RNA, 23 nt, Human
uccugggcucagguaauucuccc

SEQ ID NO: 85986 - RNA, 23 nt, Human
ucgcaaaguguugggauuacagg

SEQ ID NO: 85987 - RNA, 24 nt, Human
ucgcaaaguguugggauuacaggu

SEQ ID NO: 85988 - RNA, 18 nt, Human
ucgccuaggcuggaaugc

SEQ ID NO: 85989 - RNA, 23 nt, Human
ucucacucugucgccuaggcugg

SEQ ID NO: 85990 - RNA, 24 nt, Human
ucucacucugucgccuaggcugga

SEQ ID NO: 85991 - RNA, 24 nt, Human
ucucccaccucagccuccuaagua

SEQ ID NO: 85992 - RNA, 18 nt, Human
ucucugccucucucucca

SEQ ID NO: 85993 - RNA, 21 nt, Human
ucucugcuuccugggcucagg

SEQ ID NO: 85994 - RNA, 22 nt, Human
ucugaaaugucuaauaaaugga

SEQ ID NO: 85995 - RNA, 24 nt, Human
ucugucgccuaggcuggaaugcag

SEQ ID NO: 85996 - RNA, 20 nt, Human
ucugucucugccucucucuc

SEQ ID NO: 85997 - RNA, 20 nt, Human
ugaaaucccugagaugccua

SEQ ID NO: 85998 - RNA, 18 nt, Human
ugacuuauggaaaaaggc

SEQ ID NO: 85999 - RNA, 20 nt, Human
ugagacagggucucacucug

SEQ ID NO: 86000 - RNA, 22 nt, Human
ugagacagggucucacucuguc

SEQ ID NO: 86001 - RNA, 21 nt, Human
ugcagcagaaggaagauuugc

SEQ ID NO: 86002 - RNA, 26 nt, Human
ugccauguuucccaggcuggccuuca

SEQ ID NO: 86003 - RNA, 25 nt, Human
ugcccggcuaauuuuuguauuuuuu

SEQ ID NO: 86004 - RNA, 18 nt, Human
ugcugacugcaacuuggg

SEQ ID NO: 86005 - RNA, 19 nt, Human
uggaaaaaggcauuuauua

SEQ ID NO: 86006 - RNA, 20 nt, Human
uggaaucucugcuuccuggg

SEQ ID NO: 86007 - RNA, 19 nt, Human
uggaaugcaggggcaugau

SEQ ID NO: 86008 - RNA, 23 nt, Human
uggaaugcaggggcaugaucuca

SEQ ID NO: 86009 - RNA, 20 nt, Human
uggcagaucucuacuccgau

SEQ ID NO: 86010 - RNA, 21 nt, Human
uggccuucaacuccuaggcuc

SEQ ID NO: 86011 - RNA, 21 nt, Human
ugggacuacaagcacacacca

SEQ ID NO: 86012 - RNA, 24 nt, Human
ugggacuacaagcacacaccacca

SEQ ID NO: 86013 - RNA, 18 nt, Human
ugggauuacagguguaag

SEQ ID NO: 86014 - RNA, 19 nt, Human
ugggauuacagguguaagc

SEQ ID NO: 86015 - RNA, 21 nt, Human
ugggauuacagguguaagcca

SEQ ID NO: 86016 - RNA, 22 nt, Human
ugggauuacagguguaagccac

SEQ ID NO: 86017 - RNA, 23 nt, Human
ugggauuacagguguaagccacc

SEQ ID NO: 86018 - RNA, 24 nt, Human
ugggauuacagguguaagccaccg

SEQ ID NO: 86019 - RNA, 24 nt, Human
ugucagcauauucaaaacaaccaa

SEQ ID NO: 86020 - RNA, 20 nt, Human
uguguaaagugcugaggagu

SEQ ID NO: 86021 - RNA, 20 nt, Human
uguuuuuccuuuccuguuuc

SEQ ID NO: 86022 - RNA, 21 nt, Human
uuaugugcccauuucugaacc

SEQ ID NO: 86023 - RNA, 27 nt, Human
uucacaaauggcaaauuauaagcccgu

SEQ ID NO: 86024 - RNA, 28 nt, Human
uucacaaauggcaaauuauaagcccguu

SEQ ID NO: 86025 - RNA, 19 nt, Human
uuccaagcaaucuuaacuc

SEQ ID NO: 86026 - RNA, 18 nt, Human
uucuauucaucuggccuc

SEQ ID NO: 86027 - RNA, 19 nt, Human
uugcuaaauugacuugagc

SEQ ID NO: 86028 - RNA, 21 nt, Human
uuggccucgcaaaguguuggg

SEQ ID NO: 86029 - RNA, 21 nt, Human
uugggauuacagguguaagcc

SEQ ID NO: 86030 - RNA, 24 nt, Human
uuguagcacaccuccugugcuccc

SEQ ID NO: 86031 - RNA, 19 nt, Human
uuucuuggguguacagucu

SEQ ID NO: 86032 - RNA, 18 nt, Human
uuuuucuuucuuuuuuga

SEQ ID NO: 86033 - RNA, 18 nt, Human
aaaagugcugaaugaacc

SEQ ID NO: 86034 - RNA, 22 nt, Human
aaaguaaacauaagacaaaacc

SEQ ID NO: 86035 - RNA, 22 nt, Human
aaccagagagcugguuccuccc

SEQ ID NO: 86036 - RNA, 23 nt, Human
aaggaggaacaggaacccccaga

SEQ ID NO: 86037 - RNA, 25 nt, Human
acacgaauuuccucugggcugcucc

SEQ ID NO: 86038 - RNA, 21 nt, Human
acccuggaauuuccaacaguu

SEQ ID NO: 86039 - RNA, 18 nt, Human
acucaggcugucuccccc

SEQ ID NO: 86040 - RNA, 22 nt, Human
agaaggaagagaguuaccaaaa

SEQ ID NO: 86041 - RNA, 20 nt, Human
agacggaagggaggacaagc

SEQ ID NO: 86042 - RNA, 25 nt, Human
agacguagcaguaaaaccauaauuc

SEQ ID NO: 86043 - RNA, 21 nt, Human
agagcugucucaucucccucu

SEQ ID NO: 86044 - RNA, 19 nt, Human
agaggcaggaggcaugggc

SEQ ID NO: 86045 - RNA, 19 nt, Human
agaggguaaggauugacag

SEQ ID NO: 86046 - RNA, 26 nt, Human
agcauugguugggcuagggguugggg

SEQ ID NO: 86047 - RNA, 20 nt, Human
aggaagagaguuaccaaaag

SEQ ID NO: 86048 - RNA, 18 nt, Human
aggaggaggaggggcggg

SEQ ID NO: 86049 - RNA, 19 nt, Human
agggaggacaagcugcaga

SEQ ID NO: 86050 - RNA, 19 nt, Human
agggaggggagaggcagga

SEQ ID NO: 86051 - RNA, 23 nt, Human
agucaaucaaugaaacugugaaa

SEQ ID NO: 86052 - RNA, 18 nt, Human
auagcaguagcagcaugu

SEQ ID NO: 86053 - RNA, 21 nt, Human
aucucauucccuccucuuuca

SEQ ID NO: 86054 - RNA, 26 nt, Human
aucucauucccuccucuuucacacga

SEQ ID NO: 86055 - RNA, 20 nt, Human
auuaccaccuguuucaccug

SEQ ID NO: 86056 - RNA, 21 nt, Human
auucucagacagagcuaaggg

SEQ ID NO: 86057 - RNA, 20 nt, Human
cagaagaaccgaaugcugac

SEQ ID NO: 86058 - RNA, 24 nt, Human
cagaagaaccgaaugcugacaucg

SEQ ID NO: 86059 - RNA, 18 nt, Human
cagaauaggggccgagaa

SEQ ID NO: 86060 - RNA, 23 nt, Human
cagagagcugucucaucucccuc

SEQ ID NO: 86061 - RNA, 22 nt, Human
caggcaucuuccuccuuacccu

SEQ ID NO: 86062 - RNA, 27 nt, Human
cagggagaacaggcaucuuccuccuua

SEQ ID NO: 86063 - RNA, 23 nt, Human
caguaaaaccauaauucucagac

SEQ ID NO: 86064 - RNA, 22 nt, Human
caguaaaccagagagcugguuc

SEQ ID NO: 86065 - RNA, 19 nt, Human
ccacugcuaauuccaacuu

SEQ ID NO: 86066 - RNA, 20 nt, Human
ccccagaacugccacugggc

SEQ ID NO: 86067 - RNA, 22 nt, Human
ccccccggagcagagccggggc

SEQ ID NO: 86068 - RNA, 19 nt, Human
ccccggagcagagccgggg

SEQ ID NO: 86069 - RNA, 20 nt, Human
ccgaggaggaggaggggcgg

SEQ ID NO: 86070 - RNA, 24 nt, Human
ccgccgcaaaggaggaacaggaac

SEQ ID NO: 86071 - RNA, 18 nt, Human
ccggggcgagccgaggcg

SEQ ID NO: 86072 - RNA, 19 nt, Human
ccucuucagacagggagaa

SEQ ID NO: 86073 - RNA, 19 nt, Human
ccuguuucaccugcuccuc

SEQ ID NO: 86074 - RNA, 18 nt, Human
cgaauuuccucugggcug

SEQ ID NO: 86075 - RNA, 21 nt, Human
cgagccgaggcgguacggcgg

SEQ ID NO: 86076 - RNA, 18 nt, Human
cggagcagagccggggcg

SEQ ID NO: 86077 - RNA, 23 nt, Human
cgguacggcggcggcggugggcc

SEQ ID NO: 86078 - RNA, 21 nt, Human
cuucagagcaagaaauucuag

SEQ ID NO: 86079 - RNA, 23 nt, Human
gaacaggcaucuuccuccuuacc

SEQ ID NO: 86080 - RNA, 21 nt, Human
gaacugccacugggcuuaccc

SEQ ID NO: 86081 - RNA, 22 nt, Human
gaagacuauguuccaguaaacc

SEQ ID NO: 86082 - RNA, 25 nt, Human
gaauaaucucauucccuccucuuuc

SEQ ID NO: 86083 - RNA, 19 nt, Human
gagcagagccggggcgagc

SEQ ID NO: 86084 - RNA, 20 nt, Human
gaggaacaggaacccccaga

SEQ ID NO: 86085 - RNA, 23 nt, Human
gaggcgguacggcggcggcggug

SEQ ID NO: 86086 - RNA, 24 nt, Human
gaggcgguacggcggcggcggugg

SEQ ID NO: 86087 - RNA, 23 nt, Human
gaugagggagaagacggaaggga

SEQ ID NO: 86088 - RNA, 21 nt, Human
gcggcggcggugggccggcga

SEQ ID NO: 86089 - RNA, 24 nt, Human
gcgguacggcggcggcggugggcc

SEQ ID NO: 86090 - RNA, 20 nt, Human
ggaagggaggacaagcugca

SEQ ID NO: 86091 - RNA, 21 nt, Human
ggagaacaggcaucuuccucc

SEQ ID NO: 86092 - RNA, 19 nt, Human
ggcgggccgcagcugcgcc

SEQ ID NO: 86093 - RNA, 22 nt, Human
ggcgggccgcagcugcgccggc

SEQ ID NO: 86094 - RNA, 21 nt, Human
gggccgaggaggaggaggggc

SEQ ID NO: 86095 - RNA, 22 nt, Human
ggggguagggagaaaaagaagg

SEQ ID NO: 86096 - RNA, 18 nt, Human
gggguuggagcccaugcc

SEQ ID NO: 86097 - RNA, 18 nt, Human
gguagggagaaaaagaag

SEQ ID NO: 86098 - RNA, 19 nt, Human
guagggagaaaaagaagga

SEQ ID NO: 86099 - RNA, 20 nt, Human
guagggagaaaaagaaggaa

SEQ ID NO: 86100 - RNA, 19 nt, Human
uaagacaaaacccuagugg

SEQ ID NO: 86101 - RNA, 22 nt, Human
uaaguagcacugcucaaggaga

SEQ ID NO: 86102 - RNA, 19 nt, Human
uaauucucagacagagcua

SEQ ID NO: 86103 - RNA, 22 nt, Human
uaccaaaaguaaacauaagaca

SEQ ID NO: 86104 - RNA, 27 nt, Human
uacccuggaauuuccaacaguucccac

SEQ ID NO: 86105 - RNA, 20 nt, Human
uacggcggcggcggugggcc

SEQ ID NO: 86106 - RNA, 30 nt, Human
uagcauugguugggcuagggguuggggggu

SEQ ID NO: 86107 - RNA, 21 nt, Human
uaggauccauggaauagcagu

SEQ ID NO: 86108 - RNA, 22 nt, Human
ucaucucccucuucagacaggg

SEQ ID NO: 86109 - RNA, 23 nt, Human
uccaacaguucccaccaaaaagu

SEQ ID NO: 86110 - RNA, 18 nt, Human
uccaacuuccaagccuuu

SEQ ID NO: 86111 - RNA, 22 nt, Human
uccaagccuuuuacucaggcug

SEQ ID NO: 86112 - RNA, 31 nt, Human
ucccccauucccuuccuccgaauaaucucaa

SEQ ID NO: 86113 - RNA, 22 nt, Human
ucccucuucagacagggagaac

SEQ ID NO: 86114 - RNA, 19 nt, Human
ugaaccagaauaggggccg

SEQ ID NO: 86115 - RNA, 20 nt, Human
ugagggagaagacggaaggg

SEQ ID NO: 86116 - RNA, 21 nt, Human
ugagggagaagacggaaggga

SEQ ID NO: 86117 - RNA, 18 nt, Human
ugccucuaaagucacccu

SEQ ID NO: 86118 - RNA, 22 nt, Human
uggaauuuccaacaguucccac

SEQ ID NO: 86119 - RNA, 20 nt, Human
ugggcuagggguuggggggu

SEQ ID NO: 86120 - RNA, 21 nt, Human
ugggcugcuccagcguuuguu

SEQ ID NO: 86121 - RNA, 23 nt, Human
ugggggguagggagaaaaagaag

SEQ ID NO: 86122 - RNA, 23 nt, Human
ugguguggggcaaggagguagag

SEQ ID NO: 86123 - RNA, 25 nt, Human
ugguguggggcaaggagguagaguc

SEQ ID NO: 86124 - RNA, 19 nt, Human
uguuaauuccuguccagag

SEQ ID NO: 86125 - RNA, 22 nt, Human
uguuucaccugcuccuccuuca

SEQ ID NO: 86126 - RNA, 19 nt, Human
uuccucugggcugcuccag

SEQ ID NO: 86127 - RNA, 24 nt, Human
uucugcuccccacugcuaauucca

SEQ ID NO: 86128 - RNA, 18 nt, Human
uuggagcccaugccucua

SEQ ID NO: 86129 - RNA, 21 nt, Human
uuuguuaauuccuguccagag

SEQ ID NO: 86130 - RNA, 20 nt, Human
agaggucuaagaaacgagcu

SEQ ID NO: 86131 - RNA, 21 nt, Human
agaggugggugggggaggggg

SEQ ID NO: 86132 - RNA, 24 nt, Human
agaggugggugggggagggggucc

SEQ ID NO: 86133 - RNA, 19 nt, Human
agccagagagguggguggg

SEQ ID NO: 86134 - RNA, 19 nt, Human
agccaguccuggggcucuc

SEQ ID NO: 86135 - RNA, 22 nt, Human
cacagauguuuauuccaggaag

SEQ ID NO: 86136 - RNA, 18 nt, Human
cagagccagcccccuccc

SEQ ID NO: 86137 - RNA, 21 nt, Human
cagcccccucccuucagcagc

SEQ ID NO: 86138 - RNA, 19 nt, Human
cugaagcaauagcgccccc

SEQ ID NO: 86139 - RNA, 19 nt, Human
ggugggugggggagggggu

SEQ ID NO: 86140 - RNA, 18 nt, Human
ucacggggcagccagucc

SEQ ID NO: 86141 - RNA, 28 nt, Human
ucagcagcugaagcaauagccggggucc

SEQ ID NO: 86142 - RNA, 21 nt, Human
uggaagccagagaggugggug

SEQ ID NO: 86143 - RNA, 18 nt, Human
uggggcucucagagccag

SEQ ID NO: 86144 - RNA, 20 nt, Human
ugggugggggaggggguccu

SEQ ID NO: 86145 - RNA, 19 nt, Human
ugugucacggggcagccag

SEQ ID NO: 86146 - RNA, 31 nt, Human
uuccaggaagaggucuaagaaacgagcuucc

SEQ ID NO: 86147 - RNA, 21 nt, Human
uuuuuuuuuuuuuuuuuucag

SEQ ID NO: 86148 - RNA, 18 nt, Human
agggggagccggggugga

SEQ ID NO: 86149 - RNA, 23 nt, Human
auuggcugggcaagggguggugu

SEQ ID NO: 86150 - RNA, 24 nt, Human
cagcagcauucaccaagcccuacu

SEQ ID NO: 86151 - RNA, 20 nt, Human
ccuccuguggagaagacaau

SEQ ID NO: 86152 - RNA, 22 nt, Human
cgccuccuguggagaagacaau

SEQ ID NO: 86153 - RNA, 22 nt, Human
gggcaaggggugguguuggggg

SEQ ID NO: 86154 - RNA, 20 nt, Human
gugcugggacacagaguuga

SEQ ID NO: 86155 - RNA, 25 nt, Human
uaaccaacauuucugagcauggcac

SEQ ID NO: 86156 - RNA, 26 nt, Human
ucauucauucauguaaccaacauuuc

SEQ ID NO: 86157 - RNA, 22 nt, Human
ugagcguugcuggcagggggga

SEQ ID NO: 86158 - RNA, 18 nt, Human
uggugugccagugcuggg

SEQ ID NO: 86159 - RNA, 18 nt, Human
ugucagacgccuccugug

SEQ ID NO: 86160 - RNA, 22 nt, Human
ugugccagugcugggacacaga

SEQ ID NO: 86161 - RNA, 25 nt, Human
uugcuggcagggggagccggggugg

SEQ ID NO: 86162 - RNA, 21 nt, Human
uuggcugggcaagggguggug

SEQ ID NO: 86163 - RNA, 23 nt, Human
aacacgugcagaugcaaaggaca

SEQ ID NO: 86164 - RNA, 22 nt, Human
agaaaaaaaugauaauaaauga

SEQ ID NO: 86165 - RNA, 19 nt, Human
augauaauaaaugagaaca

SEQ ID NO: 86166 - RNA, 23 nt, Human
caaaggacaacccaggccuaggc

SEQ ID NO: 86167 - RNA, 19 nt, Human
cacaugucuagcuucagag

SEQ ID NO: 86168 - RNA, 25 nt, Human
cacuggccaaagccugccaugaaac

SEQ ID NO: 86169 - RNA, 22 nt, Human
cgugcagaugcaaaggacaacc

SEQ ID NO: 86170 - RNA, 21 nt, Human
gacugcgaacacgugcagaug

SEQ ID NO: 86171 - RNA, 21 nt, Human
gcaaaggacaacccaggccua

SEQ ID NO: 86172 - RNA, 20 nt, Human
ggaggagauaaaccaauuuu

SEQ ID NO: 86173 - RNA, 23 nt, Human
ucaaagcacaugucuagcuucag

SEQ ID NO: 86174 - RNA, 18 nt, Human
ugcaaaggacaacccagg

SEQ ID NO: 86175 - RNA, 19 nt, Human
uuaggaugauaaucauuuc

SEQ ID NO: 86176 - RNA, 20 nt, Human
uucacuggccaaagccugcc

SEQ ID NO: 86177 - RNA, 24 nt, Human
aaaaaaaaaaaaaagaauggcagg

SEQ ID NO: 86178 - RNA, 28 nt, Human
aaaaaaaaaaaagaauggcaguaccaga

SEQ ID NO: 86179 - RNA, 20 nt, Human
aagcagugacuccuaaagaa

SEQ ID NO: 86180 - RNA, 19 nt, Human
agaacccauggggaggggg

SEQ ID NO: 86181 - RNA, 19 nt, Human
agaaguccaucuggugggg

SEQ ID NO: 86182 - RNA, 18 nt, Human
aggaaggagagaacccau

SEQ ID NO: 86183 - RNA, 25 nt, Human
aggaaggagagaacccauggggagg

SEQ ID NO: 86184 - RNA, 26 nt, Human
aggaaggagagaacccauggggaggg

SEQ ID NO: 86185 - RNA, 18 nt, Human
aguaccagaaggcauugg

SEQ ID NO: 86186 - RNA, 19 nt, Human
cagaggaaggagagaaccc

SEQ ID NO: 86187 - RNA, 21 nt, Human
cagugacuccuaaagaaguuc

SEQ ID NO: 86188 - RNA, 25 nt, Human
cauggggagggggugcagugggggu

SEQ ID NO: 86189 - RNA, 20 nt, Human
ccuaaagaaguucagaggaa

SEQ ID NO: 86190 - RNA, 20 nt, Human
ccucucccaggcaagaggac

SEQ ID NO: 86191 - RNA, 24 nt, Human
ggagaaguccaucugguggggaaa

SEQ ID NO: 86192 - RNA, 22 nt, Human
ggagagaacccauggggagggg

SEQ ID NO: 86193 - RNA, 20 nt, Human
ggggagggggugcagugggg

SEQ ID NO: 86194 - RNA, 23 nt, Human
ggggagggggugcagugggggug

SEQ ID NO: 86195 - RNA, 21 nt, Human
gggggugggucagggugggcu

SEQ ID NO: 86196 - RNA, 24 nt, Human
gggugggcucccuggaggagaagu

SEQ ID NO: 86197 - RNA, 24 nt, Human
gugggcucccuggaggagaagucc

SEQ ID NO: 86198 - RNA, 26 nt, Human
uccaauacuugaaaaaaaaaaaaaag

SEQ ID NO: 86199 - RNA, 28 nt, Human
uccaauacuugaaaaaaaaaaaaaagaa

SEQ ID NO: 86200 - RNA, 19 nt, Human
ucugcuuccccucuccccc

SEQ ID NO: 86201 - RNA, 20 nt, Human
ucugguggggagaauggucu

SEQ ID NO: 86202 - RNA, 22 nt, Human
ucugguggggagaauggucuag

SEQ ID NO: 86203 - RNA, 22 nt, Human
ugagggagguggaaggcccgug

SEQ ID NO: 86204 - RNA, 21 nt, Human
uggcaguaccagaaggcauug

SEQ ID NO: 86205 - RNA, 19 nt, Human
uggggagggggugcagugg

SEQ ID NO: 86206 - RNA, 22 nt, Human
uggggagggggugcaguggggg

SEQ ID NO: 86207 - RNA, 23 nt, Human
uuauuuauauaucuccccacccc

SEQ ID NO: 86208 - RNA, 18 nt, Human
uucagaggaaggagagaa

SEQ ID NO: 86209 - RNA, 22 nt, Human
aagaaagaaaggggcccuuugg

SEQ ID NO: 86210 - RNA, 21 nt, Human
aggaaagagaauuucacacac

SEQ ID NO: 86211 - RNA, 23 nt, Human
ccacacugcucucuggauucgaa

SEQ ID NO: 86212 - RNA, 28 nt, Human
cuggucaguuguuuuuuguuuuuuuuuu

SEQ ID NO: 86213 - RNA, 18 nt, Human
gaaccuagugaauucugg

SEQ ID NO: 86214 - RNA, 19 nt, Human
ggcccuuugguuguuucag

SEQ ID NO: 86215 - RNA, 22 nt, Human
uccucugcaauccucagaagaa

SEQ ID NO: 86216 - RNA, 21 nt, Human
uuccacacugcucucuggauu

SEQ ID NO: 86217 - RNA, 19 nt, Human
agagaggauggaucacagg

SEQ ID NO: 86218 - RNA, 24 nt, Human
agagaggauggaucacagggucua

SEQ ID NO: 86219 - RNA, 18 nt, Human
aggccaaggagcgggagg

SEQ ID NO: 86220 - RNA, 19 nt, Human
aggguggccauucagaggu

SEQ ID NO: 86221 - RNA, 21 nt, Human
caggccaaggagcgggaggug

SEQ ID NO: 86222 - RNA, 19 nt, Human
cuaggagagaggauggauc

SEQ ID NO: 86223 - RNA, 24 nt, Human
gaucacagggucuaaggguggcca

SEQ ID NO: 86224 - RNA, 21 nt, Human
gggaaggaaucuggggacagg

SEQ ID NO: 86225 - RNA, 22 nt, Human
gggagguggggcagcgaggcag

SEQ ID NO: 86226 - RNA, 21 nt, Human
gggcagcagagggcucagugg

SEQ ID NO: 86227 - RNA, 20 nt, Human
uagaagauggaggggcggca

SEQ ID NO: 86228 - RNA, 19 nt, Human
uauuaauuucauaacuggg

SEQ ID NO: 86229 - RNA, 23 nt, Human
ucuggcagggcagcagagggcuc

SEQ ID NO: 86230 - RNA, 23 nt, Human
ugaaacaagcaugagucaaguca

SEQ ID NO: 86231 - RNA, 24 nt, Human
ugugaaagugaaacaagcaugagu

SEQ ID NO: 86232 - RNA, 25 nt, Human
uugugugcgcugccucuggcauccu

SEQ ID NO: 86233 - RNA, 23 nt, Human
uuucccagcuugugugcgcugcc

SEQ ID NO: 86234 - RNA, 24 nt, Human
uuucccagcuugugugcgcugccu

SEQ ID NO: 86235 - RNA, 23 nt, Human
aaaacaauucucaacaaaacugg

SEQ ID NO: 86236 - RNA, 21 nt, Human
aaauggguucucuccaugccc

SEQ ID NO: 86237 - RNA, 18 nt, Human
aacggcagccccacccag

SEQ ID NO: 86238 - RNA, 24 nt, Human
aagaaaacaauucucaacaaaacu

SEQ ID NO: 86239 - RNA, 21 nt, Human
aagccccugcucgcacccugc

SEQ ID NO: 86240 - RNA, 19 nt, Human
agagaagcguggcccgaag

SEQ ID NO: 86241 - RNA, 24 nt, Human
agcaaagggauccuuaacuauaaa

SEQ ID NO: 86242 - RNA, 21 nt, Human
agccccugcucgcacccugcc

SEQ ID NO: 86243 - RNA, 19 nt, Human
aggggcuggaaggugaacu

SEQ ID NO: 86244 - RNA, 21 nt, Human
aggucaccuucugugguuuaa

SEQ ID NO: 86245 - RNA, 20 nt, Human
caacaaaacuggaguccaca

SEQ ID NO: 86246 - RNA, 20 nt, Human
caagacgguccuagguuuga

SEQ ID NO: 86247 - RNA, 22 nt, Human
caagagaagcguggcccgaagc

SEQ ID NO: 86248 - RNA, 24 nt, Human
caaucuucucuuucaccccuuuuc

SEQ ID NO: 86249 - RNA, 18 nt, Human
cacaguugucaaguaugc

SEQ ID NO: 86250 - RNA, 21 nt, Human
caccgcaaccgccucagaagc

SEQ ID NO: 86251 - RNA, 19 nt, Human
cacugugcugacacagaga

SEQ ID NO: 86252 - RNA, 23 nt, Human
cagcaggucaccuucugugguuu

SEQ ID NO: 86253 - RNA, 22 nt, Human
caugaauccacgcagucuucuu

SEQ ID NO: 86254 - RNA, 18 nt, Human
caugacuuaaucucuauc

SEQ ID NO: 86255 - RNA, 24 nt, Human
ccacccagagccugcugcguggcu

SEQ ID NO: 86256 - RNA, 21 nt, Human
cccgaagccccugcucgcacc

SEQ ID NO: 86257 - RNA, 18 nt, Human
ccguuccaaacuccggga

SEQ ID NO: 86258 - RNA, 22 nt, Human
ccucacagcaaagggauccuua

SEQ ID NO: 86259 - RNA, 18 nt, Human
ccugcugcguggcugcug

SEQ ID NO: 86260 - RNA, 22 nt, Human
cgacagccucccgcaacucuuu

SEQ ID NO: 86261 - RNA, 20 nt, Human
cucaaaguugcaaucuucuc

SEQ ID NO: 86262 - RNA, 20 nt, Human
cucaacaaaacuggagucca

SEQ ID NO: 86263 - RNA, 25 nt, Human
cucuuucaccccuuuucugaaaucu

SEQ ID NO: 86264 - RNA, 19 nt, Human
cugaaaucuugaagucugg

SEQ ID NO: 86265 - RNA, 21 nt, Human
cugcugugaggcuccccauga

SEQ ID NO: 86266 - RNA, 24 nt, Human
gaagccccugcucgcacccugccc

SEQ ID NO: 86267 - RNA, 19 nt, Human
gagcaccgcaaccgccuca

SEQ ID NO: 86268 - RNA, 24 nt, Human
gcagguuuuucccaguauuuguac

SEQ ID NO: 86269 - RNA, 21 nt, Human
gcccgaagccccugcucgcac

SEQ ID NO: 86270 - RNA, 22 nt, Human
gcgaccgagcaccgcaaccgcc

SEQ ID NO: 86271 - RNA, 24 nt, Human
ggaaagacaaaacguauuuauucc

SEQ ID NO: 86272 - RNA, 20 nt, Human
ggacggacuucagcaaaauc

SEQ ID NO: 86273 - RNA, 23 nt, Human
ggcgaccgagcaccgcaaccgcc

SEQ ID NO: 86274 - RNA, 23 nt, Human
ggggagagggugagagucguaag

SEQ ID NO: 86275 - RNA, 19 nt, Human
gugccuuaacggcagcccc

SEQ ID NO: 86276 - RNA, 26 nt, Human
uaacuacauggagucuaaucgagaca

SEQ ID NO: 86277 - RNA, 23 nt, Human
uagcaauagagauuacacugugc

SEQ ID NO: 86278 - RNA, 18 nt, Human
uagccgacagccucccgc

SEQ ID NO: 86279 - RNA, 26 nt, Human
uagccuuaguaauguaagaaaacaau

SEQ ID NO: 86280 - RNA, 18 nt, Human
ucagcaggucaccuucug

SEQ ID NO: 86281 - RNA, 19 nt, Human
uccaugcccaaugacaaag

SEQ ID NO: 86282 - RNA, 20 nt, Human
ucugaaaucuugaagucugg

SEQ ID NO: 86283 - RNA, 20 nt, Human
ucuuuuuuuccuccguuucc

SEQ ID NO: 86284 - RNA, 23 nt, Human
ugaagacccauauaaaaggccgg

SEQ ID NO: 86285 - RNA, 22 nt, Human
ugacaaagcaagacgguccuag

SEQ ID NO: 86286 - RNA, 19 nt, Human
ugagguuaagagcaggucc

SEQ ID NO: 86287 - RNA, 24 nt, Human
ugcaguuggugagguuucgggcgu

SEQ ID NO: 86288 - RNA, 23 nt, Human
uggggagagggugagagucguaa

SEQ ID NO: 86289 - RNA, 20 nt, Human
ugucaaguaugcuuucucag

SEQ ID NO: 86290 - RNA, 18 nt, Human
uucccuguuguuaucagc

SEQ ID NO: 86291 - RNA, 21 nt, Human
uuccucacuggugcaguuggu

SEQ ID NO: 86292 - RNA, 21 nt, Human
uuguaccacuuuucucagcag

SEQ ID NO: 86293 - RNA, 22 nt, Human
uuuaaaccaugacuuaaucucu

SEQ ID NO: 86294 - RNA, 18 nt, Human
uuucucagcaggucaccu

SEQ ID NO: 86295 - RNA, 23 nt, Human
uuuuuuuuuuuugagggaaagac

SEQ ID NO: 86296 - RNA, 19 nt, Human
uuuuuuuuuuuuugaggga

SEQ ID NO: 86297 - RNA, 28 nt, Human
uuuuuuuuuuuuuuuuuuuuuuugaggg

SEQ ID NO: 86298 - RNA, 22 nt, Human
aaacgucaccuccagaucaacc

SEQ ID NO: 86299 - RNA, 25 nt, Human
aaauccucccuuuaagagcccaggc

SEQ ID NO: 86300 - RNA, 22 nt, Human
aacaggccuguucauccacaac

SEQ ID NO: 86301 - RNA, 19 nt, Human
aagaaaacaaaacucucuc

SEQ ID NO: 86302 - RNA, 21 nt, Human
aagaaaacaaaacucucuccc

SEQ ID NO: 86303 - RNA, 22 nt, Human
aaggaggcagacacaggccuga

SEQ ID NO: 86304 - RNA, 18 nt, Human
accauuccaacaaagcgc

SEQ ID NO: 86305 - RNA, 23 nt, Human
accuccucauucuguggagaaac

SEQ ID NO: 86306 - RNA, 21 nt, Human
agacacaggccugaacugucc

SEQ ID NO: 86307 - RNA, 19 nt, Human
agccuagaaccuccagacc

SEQ ID NO: 86308 - RNA, 19 nt, Human
aggaagacugucacaacca

SEQ ID NO: 86309 - RNA, 20 nt, Human
aggccuguucauccacaacc

SEQ ID NO: 86310 - RNA, 23 nt, Human
agugacugucuucacccugggcu

SEQ ID NO: 86311 - RNA, 18 nt, Human
auccgugaagaccuccuc

SEQ ID NO: 86312 - RNA, 22 nt, Human
caagaaaacaaaacucucuccc

SEQ ID NO: 86313 - RNA, 23 nt, Human
cacacggucacgcaucaccgcuc

SEQ ID NO: 86314 - RNA, 23 nt, Human
cacagcugagggcccuccugcag

SEQ ID NO: 86315 - RNA, 23 nt, Human
cacaggccugaacuguccacccu

SEQ ID NO: 86316 - RNA, 19 nt, Human
cacagucccaaggaggcag

SEQ ID NO: 86317 - RNA, 18 nt, Human
cacagucccaaggaggcg

SEQ ID NO: 86318 - RNA, 18 nt, Human
cacggcauggccccgagc

SEQ ID NO: 86319 - RNA, 21 nt, Human
cagaugcuccaaggacucccc

SEQ ID NO: 86320 - RNA, 20 nt, Human
cagcucccgggggcugggga

SEQ ID NO: 86321 - RNA, 21 nt, Human
caggaagacugucacaaccau

SEQ ID NO: 86322 - RNA, 21 nt, Human
caguggcugccccagugcugc

SEQ ID NO: 86323 - RNA, 18 nt, Human
cauggcagccacccucca

SEQ ID NO: 86324 - RNA, 24 nt, Human
ccacuccacagucccaaggaggca

SEQ ID NO: 86325 - RNA, 21 nt, Human
ccaggcccgaccggcgggcgc

SEQ ID NO: 86326 - RNA, 18 nt, Human
ccaguaccuaacacccac

SEQ ID NO: 86327 - RNA, 18 nt, Human
cccacaugggacaagggc

SEQ ID NO: 86328 - RNA, 21 nt, Human
cccacuccacagucccaagga

SEQ ID NO: 86329 - RNA, 22 nt, Human
cccacugcucagagaucacacc

SEQ ID NO: 86330 - RNA, 20 nt, Human
ccccacaugggacaagggcu

SEQ ID NO: 86331 - RNA, 23 nt, Human
cccccggccuccugaucccgggc

SEQ ID NO: 86332 - RNA, 22 nt, Human
ccuagaaccuccagaccacaga

SEQ ID NO: 86333 - RNA, 20 nt, Human
ccugcaaaauccucccuuua

SEQ ID NO: 86334 - RNA, 22 nt, Human
ccugcaguucuucacaggagag

SEQ ID NO: 86335 - RNA, 21 nt, Human
ccugcccagcccggccaagaa

SEQ ID NO: 86336 - RNA, 30 nt, Human
ccuugguuuuggggggcacuaggaaggucc

SEQ ID NO: 86337 - RNA, 27 nt, Human
ccuuuaagagcccaggccagccuagaa

SEQ ID NO: 86338 - RNA, 20 nt, Human
cgcccccggccuccugaucc

SEQ ID NO: 86339 - RNA, 21 nt, Human
cgcucggcggaggaugggaau

SEQ ID NO: 86340 - RNA, 19 nt, Human
cgugaagaccuccucauuc

SEQ ID NO: 86341 - RNA, 21 nt, Human
cucaaccccacaugggacaag

SEQ ID NO: 86342 - RNA, 28 nt, Human
cuccccaucucacgugaaugcuuccuug

SEQ ID NO: 86343 - RNA, 19 nt, Human
cucgaagucucccuugccc

SEQ ID NO: 86344 - RNA, 18 nt, Human
cugcccagauuguggcau

SEQ ID NO: 86345 - RNA, 18 nt, Human
cugcugccugccugcuga

SEQ ID NO: 86346 - RNA, 23 nt, Human
cugcugccugccugcugagcagc

SEQ ID NO: 86347 - RNA, 21 nt, Human
gaggcuggagcggcguucagg

SEQ ID NO: 86348 - RNA, 19 nt, Human
gaguggugacuccacuccc

SEQ ID NO: 86349 - RNA, 26 nt, Human
gcccaacagaaaucuauccaaggacc

SEQ ID NO: 86350 - RNA, 19 nt, Human
gcccagauuguggcauccu

SEQ ID NO: 86351 - RNA, 18 nt, Human
gcccggaccccagggcga

SEQ ID NO: 86352 - RNA, 20 nt, Human
gccuagaaccuccagaccac

SEQ ID NO: 86353 - RNA, 25 nt, Human
gccugcacacacggucacgcaucac

SEQ ID NO: 86354 - RNA, 23 nt, Human
gcggccugcacacacggucacgc

SEQ ID NO: 86355 - RNA, 18 nt, Human
ggccggggcugcggccau

SEQ ID NO: 86356 - RNA, 24 nt, Human
gggaguccuggggacaggacuggu

SEQ ID NO: 86357 - RNA, 22 nt, Human
gggggcuggggaagacgcuggg

SEQ ID NO: 86358 - RNA, 19 nt, Human
gugcugcagcuggcucugg

SEQ ID NO: 86359 - RNA, 23 nt, Human
uaagacuugcgacucuucccaga

SEQ ID NO: 86360 - RNA, 20 nt, Human
uagaaccuccagaccacaga

SEQ ID NO: 86361 - RNA, 21 nt, Human
uauuagggaggacagccugca

SEQ ID NO: 86362 - RNA, 23 nt, Human
uauuagggaggacagccugcaaa

SEQ ID NO: 86363 - RNA, 18 nt, Human
ucacaaccaugccuuggg

SEQ ID NO: 86364 - RNA, 26 nt, Human
uccaaggacuccccuagucuagcugc

SEQ ID NO: 86365 - RNA, 21 nt, Human
uccacagucccaaggaggcag

SEQ ID NO: 86366 - RNA, 26 nt, Human
ucccaugggugcgggaggcugcugcc

SEQ ID NO: 86367 - RNA, 22 nt, Human
uccugugccaggcccggacccc

SEQ ID NO: 86368 - RNA, 19 nt, Human
ucucauggagaucuggauc

SEQ ID NO: 86369 - RNA, 23 nt, Human
ucucccuugcccaacagaaauug

SEQ ID NO: 86370 - RNA, 25 nt, Human
ugagcagcucagggcagaugucgcu

SEQ ID NO: 86371 - RNA, 25 nt, Human
ugcaaaauccucccuuuaagagccc

SEQ ID NO: 86372 - RNA, 23 nt, Human
ugcacggaugagugacugucuuc

SEQ ID NO: 86373 - RNA, 23 nt, Human
ugcugagcagcucagggcagaug

SEQ ID NO: 86374 - RNA, 20 nt, Human
uggaggcuggagcggcguuc

SEQ ID NO: 86375 - RNA, 18 nt, Human
uggaucucaaccccacau

SEQ ID NO: 86376 - RNA, 21 nt, Human
uggcaaaccggggaggcuuuu

SEQ ID NO: 86377 - RNA, 21 nt, Human
ugggacaagggcccagggacc

SEQ ID NO: 86378 - RNA, 20 nt, Human
uguggcaaaccggggaggcu

SEQ ID NO: 86379 - RNA, 20 nt, Human
uguucauccacaaccucaca

SEQ ID NO: 86380 - RNA, 18 nt, Human
uucccagaggaaagaaaa

SEQ ID NO: 86381 - RNA, 21 nt, Human
uucccagaggaaagaaaaccc

SEQ ID NO: 86382 - RNA, 24 nt, Human
uucccagaggaaagaaaaccccuc

SEQ ID NO: 86383 - RNA, 21 nt, Human
uucuguggagaaacggcccuu

SEQ ID NO: 86384 - RNA, 18 nt, Human
uuuuuuuuuuaccauucc

SEQ ID NO: 86385 - RNA, 20 nt, Human
aaaaaaaaaagggccugcca

SEQ ID NO: 86386 - RNA, 23 nt, Human
aaacaucccccaugcacugcagg

SEQ ID NO: 86387 - RNA, 22 nt, Human
aaagucccuucagagucaagaa

SEQ ID NO: 86388 - RNA, 24 nt, Human
aacuaaccugaaguauaaaaccuc

SEQ ID NO: 86389 - RNA, 18 nt, Human
aagaaaccucacugccau

SEQ ID NO: 86390 - RNA, 19 nt, Human
aagcagccgacagcuccuc

SEQ ID NO: 86391 - RNA, 24 nt, Human
acacccaggaagaaacauccccca

SEQ ID NO: 86392 - RNA, 21 nt, Human
acccaggaagaaacauccccc

SEQ ID NO: 86393 - RNA, 19 nt, Human
accugaacccacggccugg

SEQ ID NO: 86394 - RNA, 24 nt, Human
accugaacccacggccuggcacca

SEQ ID NO: 86395 - RNA, 19 nt, Human
acgcuaccaucacucccca

SEQ ID NO: 86396 - RNA, 25 nt, Human
agaaaaaaaaaaaagggccugccag

SEQ ID NO: 86397 - RNA, 22 nt, Human
agagggugaggccaaguccugg

SEQ ID NO: 86398 - RNA, 20 nt, Human
agcgugcgcacccaccccuc

SEQ ID NO: 86399 - RNA, 21 nt, Human
aggacagcggggucggaaggu

SEQ ID NO: 86400 - RNA, 22 nt, Human
aggccaaguccuggcgccuagc

SEQ ID NO: 86401 - RNA, 21 nt, Human
cacccaggaagaaacaucccc

SEQ ID NO: 86402 - RNA, 18 nt, Human
caccccucuacaaacgcg

SEQ ID NO: 86403 - RNA, 18 nt, Human
cacugcagcacauccucc

SEQ ID NO: 86404 - RNA, 28 nt, Human
cacugccauuccucacucagcagucuca

SEQ ID NO: 86405 - RNA, 24 nt, Human
cagcacauccuccuuagagagaga

SEQ ID NO: 86406 - RNA, 30 nt, Human
caugcacugcagcacauccuccuuagagag

SEQ ID NO: 86407 - RNA, 19 nt, Human
cccaccccucuacaaacgc

SEQ ID NO: 86408 - RNA, 22 nt, Human
cccagaggucaauccugggggc

SEQ ID NO: 86409 - RNA, 21 nt, Human
cccagccacacccaggaagaa

SEQ ID NO: 86410 - RNA, 29 nt, Human
ccccaugcacugcagcacauccuccuuag

SEQ ID NO: 86411 - RNA, 27 nt, Human
ccuaaaaauguucuuccuuccaaaaac

SEQ ID NO: 86412 - RNA, 18 nt, Human
ccucuacaaacgcguugc

SEQ ID NO: 86413 - RNA, 19 nt, Human
ccucuacaaacgcguugcu

SEQ ID NO: 86414 - RNA, 18 nt, Human
cgcaucugcaagcuucug

SEQ ID NO: 86415 - RNA, 22 nt, Human
cugaacccacggccuggcacca

SEQ ID NO: 86416 - RNA, 18 nt, Human
cugcagcacauccuccuu

SEQ ID NO: 86417 - RNA, 22 nt, Human
cuuccaaaaacuaacuaaccug

SEQ ID NO: 86418 - RNA, 20 nt, Human
gaacccacggccuggcacca

SEQ ID NO: 86419 - RNA, 18 nt, Human
gagagcagcccagccaca

SEQ ID NO: 86420 - RNA, 19 nt, Human
gagggugaggccaaguccu

SEQ ID NO: 86421 - RNA, 20 nt, Human
gagggugaggccaaguccug

SEQ ID NO: 86422 - RNA, 21 nt, Human
gagggugaggccaaguccugg

SEQ ID NO: 86423 - RNA, 22 nt, Human
gcaagcuucugccacaccugaa

SEQ ID NO: 86424 - RNA, 19 nt, Human
gcacugcagcacauccucc

SEQ ID NO: 86425 - RNA, 21 nt, Human
gcaucugcaagcuucugccac

SEQ ID NO: 86426 - RNA, 21 nt, Human
gcugcaauuucccuuucuucc

SEQ ID NO: 86427 - RNA, 21 nt, Human
guuuauucucugcggcuacag

SEQ ID NO: 86428 - RNA, 18 nt, Human
uaaaaauguucuuccuuc

SEQ ID NO: 86429 - RNA, 22 nt, Human
uaagagaacugagacuaauuga

SEQ ID NO: 86430 - RNA, 24 nt, Human
uaauugaagaaaccucacugccau

SEQ ID NO: 86431 - RNA, 20 nt, Human
ucacugccauuccucacuca

SEQ ID NO: 86432 - RNA, 18 nt, Human
ucaugguccauaaaugug

SEQ ID NO: 86433 - RNA, 18 nt, Human
uccuggcgccuagcuggg

SEQ ID NO: 86434 - RNA, 20 nt, Human
ucggcaaagaaaaaaaaaaa

SEQ ID NO: 86435 - RNA, 21 nt, Human
ucggcaaagaaaaaaaaaaaa

SEQ ID NO: 86436 - RNA, 20 nt, Human
ucucugcggcuacagggauu

SEQ ID NO: 86437 - RNA, 24 nt, Human
ucucugcggcuacagggauugccu

SEQ ID NO: 86438 - RNA, 19 nt, Human
ucugguuuccugaucagga

SEQ ID NO: 86439 - RNA, 22 nt, Human
ugagacuaauugaagaaaccuc

SEQ ID NO: 86440 - RNA, 19 nt, Human
ugaggccaaguccuggcgc

SEQ ID NO: 86441 - RNA, 25 nt, Human
ugggggcugaggagcugcaauuucc

SEQ ID NO: 86442 - RNA, 21 nt, Human
uuagaaauccccuuacgcuga

SEQ ID NO: 86443 - RNA, 19 nt, Human
aaacauauucucucucaca

SEQ ID NO: 86444 - RNA, 24 nt, Human
aaagugcugagauuacagguguga

SEQ ID NO: 86445 - RNA, 19 nt, Human
aaguagcugggauuacagg

SEQ ID NO: 86446 - RNA, 25 nt, Human
aaguagcugggauuacaggcgccgc

SEQ ID NO: 86447 - RNA, 24 nt, Human
aagugaucugccugccuuggccuc

SEQ ID NO: 86448 - RNA, 26 nt, Human
aagugcugagauuacaggugugagcc

SEQ ID NO: 86449 - RNA, 24 nt, Human
acagggucucaccauguuggucag

SEQ ID NO: 86450 - RNA, 24 nt, Human
accauguuggucaggcuggucucg

SEQ ID NO: 86451 - RNA, 19 nt, Human
acuauccugccuucuuucu

SEQ ID NO: 86452 - RNA, 24 nt, Human
agauuacaggugugagccaccgca

SEQ ID NO: 86453 - RNA, 19 nt, Human
agccaccgcaccuagccug

SEQ ID NO: 86454 - RNA, 24 nt, Human
auuuuuguauuuuuaguagagaca

SEQ ID NO: 86455 - RNA, 24 nt, Human
caaagugcugagauuacaggugug

SEQ ID NO: 86456 - RNA, 22 nt, Human
caagugaucugccugccuuggc

SEQ ID NO: 86457 - RNA, 24 nt, Human
caccacacccagcuaauuuuugua

SEQ ID NO: 86458 - RNA, 21 nt, Human
caccauguuggucaggcuggu

SEQ ID NO: 86459 - RNA, 24 nt, Human
caccauguuggucaggcuggucuc

SEQ ID NO: 86460 - RNA, 24 nt, Human
cagggucucaccauguuggucagg

SEQ ID NO: 86461 - RNA, 20 nt, Human
ccaaagugcugagauuacag

SEQ ID NO: 86462 - RNA, 21 nt, Human
ccaaagugcugagauuacagg

SEQ ID NO: 86463 - RNA, 21 nt, Human
ccaaagugcugagauuacagg

SEQ ID NO: 86464 - RNA, 24 nt, Human
ccaaagugcugagauuacaggugu

SEQ ID NO: 86465 - RNA, 22 nt, Human
ccaaguagcugggauuacaggc

SEQ ID NO: 86466 - RNA, 23 nt, Human
cccaaguagcugggauuacaggc

SEQ ID NO: 86467 - RNA, 23 nt, Human
cccaaguagcugggauuacaggc

SEQ ID NO: 86468 - RNA, 21 nt, Human
ccugaccucaagugaucugcc

SEQ ID NO: 86469 - RNA, 23 nt, Human
ccugaccucaagugaucugccug

SEQ ID NO: 86470 - RNA, 22 nt, Human
ccugccuuggccucccaaagug

SEQ ID NO: 86471 - RNA, 23 nt, Human
cuaauuuuuguauuuuuaguaga

SEQ ID NO: 86472 - RNA, 20 nt, Human
cucaagugaucugccugccu

SEQ ID NO: 86473 - RNA, 21 nt, Human
cucacagcagaaaaguauugg

SEQ ID NO: 86474 - RNA, 21 nt, Human
cucccaaagugcugagauuac

SEQ ID NO: 86475 - RNA, 26 nt, Human
cuccugaccucaagugaucugccugc

SEQ ID NO: 86476 - RNA, 23 nt, Human
cugccuuggccucccaaagugcu

SEQ ID NO: 86477 - RNA, 21 nt, Human
cugggauuacaggcgccgcca

SEQ ID NO: 86478 - RNA, 24 nt, Human
gaccucaagugaucugccugccuu

SEQ ID NO: 86479 - RNA, 18 nt, Human
gauuacaggugugagcca

SEQ ID NO: 86480 - RNA, 22 nt, Human
gauuacaggugugagccaccgc

SEQ ID NO: 86481 - RNA, 22 nt, Human
gccuuggccucccaaagugcug

SEQ ID NO: 86482 - RNA, 23 nt, Human
gcuggucucgaacuccugaccuc

SEQ ID NO: 86483 - RNA, 22 nt, Human
ggaaauaggcuuguucaaaagc

SEQ ID NO: 86484 - RNA, 24 nt, Human
ggcuggucucgaacuccugaccuc

SEQ ID NO: 86485 - RNA, 22 nt, Human
gggucucaccauguuggucagg

SEQ ID NO: 86486 - RNA, 19 nt, Human
ggucucgaacuccugaccu

SEQ ID NO: 86487 - RNA, 18 nt, Human
guagcugggauuacaggc

SEQ ID NO: 86488 - RNA, 19 nt, Human
uaaacauauucucucucac

SEQ ID NO: 86489 - RNA, 18 nt, Human
uaaccugguuuucaguaa

SEQ ID NO: 86490 - RNA, 24 nt, Human
uaauuuuuguauuuuuaguagaga

SEQ ID NO: 86491 - RNA, 23 nt, Human
uacaggcgccgccaccacaccca

SEQ ID NO: 86492 - RNA, 22 nt, Human
uacaggugugagccaccgcacc

SEQ ID NO: 86493 - RNA, 23 nt, Human
uacaggugugagccaccgcaccu

SEQ ID NO: 86494 - RNA, 22 nt, Human
uagagacagggucucaccaugu

SEQ ID NO: 86495 - RNA, 19 nt, Human
uagcaaggcuucugggcca

SEQ ID NO: 86496 - RNA, 24 nt, Human
uaguagagacagggucucaccaug

SEQ ID NO: 86497 - RNA, 26 nt, Human
uaguagagacagggucucaccauguu

SEQ ID NO: 86498 - RNA, 23 nt, Human
ucccaaagugcugagauuacagg

SEQ ID NO: 86499 - RNA, 24 nt, Human
ucucaccauguuggucaggcuggu

SEQ ID NO: 86500 - RNA, 21 nt, Human
ucucgaacuccugaccucaag

SEQ ID NO: 86501 - RNA, 18 nt, Human
ugaccucaagugaucugc

SEQ ID NO: 86502 - RNA, 24 nt, Human
ugaccucaagugaucugccugccu

SEQ ID NO: 86503 - RNA, 19 nt, Human
ugagauuacaggugugagc

SEQ ID NO: 86504 - RNA, 21 nt, Human
ugagauuacaggugugagcca

SEQ ID NO: 86505 - RNA, 22 nt, Human
ugagauuacaggugugagccac

SEQ ID NO: 86506 - RNA, 23 nt, Human
ugagauuacaggugugagccacc

SEQ ID NO: 86507 - RNA, 24 nt, Human
ugagauuacaggugugagccaccg

SEQ ID NO: 86508 - RNA, 18 nt, Human
ugccugccuuggccuccc

SEQ ID NO: 86509 - RNA, 24 nt, Human
ugcugagauuacaggugugagcca

SEQ ID NO: 86510 - RNA, 18 nt, Human
ugggauuacaggcgccgc

SEQ ID NO: 86511 - RNA, 19 nt, Human
ugggauuacaggcgccgcc

SEQ ID NO: 86512 - RNA, 20 nt, Human
ugggauuacaggcgccgcca

SEQ ID NO: 86513 - RNA, 23 nt, Human
ugggauuacaggcgccgccacca

SEQ ID NO: 86514 - RNA, 24 nt, Human
uggucaggcuggucucgaacuccu

SEQ ID NO: 86515 - RNA, 22 nt, Human
uuagaauauaaccugguuuuca

SEQ ID NO: 86516 - RNA, 24 nt, Human
uuaguagagacagggucucaccau

SEQ ID NO: 86517 - RNA, 18 nt, Human
uuggccucccaaagugcu

SEQ ID NO: 86518 - RNA, 20 nt, Human
uuuuuguauuuuuaguagag

SEQ ID NO: 86519 - RNA, 19 nt, Human
aaacaaaggaacugagugu

SEQ ID NO: 86520 - RNA, 18 nt, Human
aaagcacgggggaauaca

SEQ ID NO: 86521 - RNA, 22 nt, Human
agagagaggcaccagcuccagu

SEQ ID NO: 86522 - RNA, 22 nt, Human
augaugccagaagguaaagcac

SEQ ID NO: 86523 - RNA, 23 nt, Human
caccacagaaucauggcagcuuu

SEQ ID NO: 86524 - RNA, 24 nt, Human
cagaaucauggcagcuuuucauga

SEQ ID NO: 86525 - RNA, 19 nt, Human
cuagaacccgcugaaccgc

SEQ ID NO: 86526 - RNA, 18 nt, Human
gaauacagagguggaguc

SEQ ID NO: 86527 - RNA, 24 nt, Human
gggaauaaagaagagagaggccgg

SEQ ID NO: 86528 - RNA, 23 nt, Human
uacagagguggaguccugcuuuu

SEQ ID NO: 86529 - RNA, 24 nt, Human
uauuacagggaauaaagaagagag

SEQ ID NO: 86530 - RNA, 18 nt, Human
agggacagagggagagga

SEQ ID NO: 86531 - RNA, 18 nt, Human
aaagcggacacagcagug

SEQ ID NO: 86532 - RNA, 21 nt, Human
cacuuugcugccaaaagccuu

SEQ ID NO: 86533 - RNA, 25 nt, Human
cacuuugcugccaaaagccuuuaau

SEQ ID NO: 86534 - RNA, 23 nt, Human
gaaagcggacacagcagugcuuc

SEQ ID NO: 86535 - RNA, 24 nt, Human
guucccagguucagguuccuccca

SEQ ID NO: 86536 - RNA, 24 nt, Human
ugccaaaagccuuuaauaugcccu

SEQ ID NO: 86537 - RNA, 19 nt, Human
ugcccuggucccaggcugu

SEQ ID NO: 86538 - RNA, 25 nt, Human
ugguucccagguucagguuccuccc

SEQ ID NO: 86539 - RNA, 24 nt, Human
uuccagcuucaugguucccagguu

SEQ ID NO: 86540 - RNA, 20 nt, Human
aaagcacuaaacuuuagcaa

SEQ ID NO: 86541 - RNA, 24 nt, Human
aagacaccuuuuccuccuucuuuu

SEQ ID NO: 86542 - RNA, 24 nt, Human
aagcaaaaacaugagccacacaga

SEQ ID NO: 86543 - RNA, 24 nt, Human
acacagaggaugauuaauaauuuc

SEQ ID NO: 86544 - RNA, 25 nt, Human
acaccuuuuccuccuucuuuugaga

SEQ ID NO: 86545 - RNA, 20 nt, Human
agcagaagacucuaugauga

SEQ ID NO: 86546 - RNA, 22 nt, Human
auacauuuuuaaucgaaaaaaa

SEQ ID NO: 86547 - RNA, 20 nt, Human
cagcaagacaccuuuuccuc

SEQ ID NO: 86548 - RNA, 23 nt, Human
caguagauuugcuaaacugaucu

SEQ ID NO: 86549 - RNA, 22 nt, Human
cuauguaguccugguuccuccc

SEQ ID NO: 86550 - RNA, 23 nt, Human
cuccccagaucagaguuuaucau

SEQ ID NO: 86551 - RNA, 18 nt, Human
gaaaagcaaaaacaugag

SEQ ID NO: 86552 - RNA, 22 nt, Human
gcaagacaccuuuuccuccuuc

SEQ ID NO: 86553 - RNA, 22 nt, Human
gcuccaccaaagagucccugaa

SEQ ID NO: 86554 - RNA, 22 nt, Human
uagcaaauuaucauuucuagau

SEQ ID NO: 86555 - RNA, 18 nt, Human
uaugaugaauaucacugc

SEQ ID NO: 86556 - RNA, 20 nt, Human
ucagaguuuaucauaauacc

SEQ ID NO: 86557 - RNA, 18 nt, Human
ucuuugguaguugaggaa

SEQ ID NO: 86558 - RNA, 24 nt, Human
uguuuuucuuugguaguugaggaa

SEQ ID NO: 86559 - RNA, 25 nt, Human
uuaauaauuucacaaucucaaagca

SEQ ID NO: 86560 - RNA, 18 nt, Human
uuuucuuugguaguugag

SEQ ID NO: 86561 - RNA, 19 nt, Human
caccugucucugucccucc

SEQ ID NO: 86562 - RNA, 24 nt, Human
caccugucucugucccuccagagu

SEQ ID NO: 86563 - RNA, 21 nt, Human
ccaggcuggaauucacccagc

SEQ ID NO: 86564 - RNA, 19 nt, Human
cccagcaaggaacuggucu

SEQ ID NO: 86565 - RNA, 23 nt, Human
ccccaggcuggaauucacccagc

SEQ ID NO: 86566 - RNA, 22 nt, Human
ccugcuuuuuuauuuuucuuuu

SEQ ID NO: 86567 - RNA, 18 nt, Human
cucacucagaagcaacag

SEQ ID NO: 86568 - RNA, 20 nt, Human
cuccaaaggccugcuuuuuu

SEQ ID NO: 86569 - RNA, 21 nt, Human
cucugucccuccagaguuagg

SEQ ID NO: 86570 - RNA, 21 nt, Human
cuggugaucaaaguccucucc

SEQ ID NO: 86571 - RNA, 21 nt, Human
cuucccagcaaggaacugguc

SEQ ID NO: 86572 - RNA, 20 nt, Human
gcuucccagcaaggaacugg

SEQ ID NO: 86573 - RNA, 23 nt, Human
uauuuuucuuuuugccuuugcuu

SEQ ID NO: 86574 - RNA, 18 nt, Human
ucagaaccaagaagaaaa

SEQ ID NO: 86575 - RNA, 25 nt, Human
ucagaaccaagaagaaaauuuauuc

SEQ ID NO: 86576 - RNA, 26 nt, Human
uccccaggcuggaauucacccagcuc

SEQ ID NO: 86577 - RNA, 21 nt, Human
ucucuaaggcugucauuaccc

SEQ ID NO: 86578 - RNA, 20 nt, Human
ucucugucccuccagaguua

SEQ ID NO: 86579 - RNA, 18 nt, Human
ucucuuuuauguaucucu

SEQ ID NO: 86580 - RNA, 20 nt, Human
ugccuuugcuuuuuguuuug

SEQ ID NO: 86581 - RNA, 23 nt, Human
ugucacagcccgucuggguuggu

SEQ ID NO: 86582 - RNA, 25 nt, Human
uuagggcuucccagcaaggaacugg

SEQ ID NO: 86583 - RNA, 19 nt, Human
uucacccagcucagacacc

SEQ ID NO: 86584 - RNA, 24 nt, Human
uucagaaccaagaagaaaauuuau

SEQ ID NO: 86585 - RNA, 22 nt, Human
uuucuuuuugccuuugcuuuuu

SEQ ID NO: 86586 - RNA, 24 nt, Human
uuuuauguaucucuaaggcuguca

SEQ ID NO: 86587 - RNA, 22 nt, Human
aaaaaaaggcuucugcauggca

SEQ ID NO: 86588 - RNA, 19 nt, Human
aaaaaucaugauccuaugg

SEQ ID NO: 86589 - RNA, 25 nt, Human
aaagaagaaaaaagaaauuuuacaa

SEQ ID NO: 86590 - RNA, 23 nt, Human
aacugacuccauagacuggacau

SEQ ID NO: 86591 - RNA, 21 nt, Human
aagcaaagaagaaaaaagaaa

SEQ ID NO: 86592 - RNA, 24 nt, Human
acuauauuauacaaaaucaugacc

SEQ ID NO: 86593 - RNA, 22 nt, Human
acuguuuaaaaaccacauacca

SEQ ID NO: 86594 - RNA, 25 nt, Human
agaagaaaaaagaaauuuuacaaaa

SEQ ID NO: 86595 - RNA, 19 nt, Human
aggaaagacagacuuugaa

SEQ ID NO: 86596 - RNA, 24 nt, Human
aggagaggaggaaacuuuguagag

SEQ ID NO: 86597 - RNA, 19 nt, Human
aggcaacaaauuaaaaauc

SEQ ID NO: 86598 - RNA, 21 nt, Human
agugacuguuuaaaaaccaca

SEQ ID NO: 86599 - RNA, 25 nt, Human
auaaaauauuuccuucaucuuaaaa

SEQ ID NO: 86600 - RNA, 23 nt, Human
augcccauuuguaacugaagaaa

SEQ ID NO: 86601 - RNA, 20 nt, Human
caaauuaaaaaucaugaucc

SEQ ID NO: 86602 - RNA, 18 nt, Human
caauauaacuauacuaaa

SEQ ID NO: 86603 - RNA, 21 nt, Human
caauauaacuauacuaaaugc

SEQ ID NO: 86604 - RNA, 19 nt, Human
caccgccuucugccuccgc

SEQ ID NO: 86605 - RNA, 20 nt, Human
caucuuaaaaaaaaggcuuc

SEQ ID NO: 86606 - RNA, 22 nt, Human
ccaacugacuccauagacugga

SEQ ID NO: 86607 - RNA, 19 nt, Human
ccgccaccgguaccaacug

SEQ ID NO: 86608 - RNA, 22 nt, Human
cgguaccaacugacuccauaga

SEQ ID NO: 86609 - RNA, 22 nt, Human
cucggacaccgccuucugccuc

SEQ ID NO: 86610 - RNA, 27 nt, Human
cucggacaccgccuucugccucccccc

SEQ ID NO: 86611 - RNA, 22 nt, Human
gaccuaaaagaguguacugaga

SEQ ID NO: 86612 - RNA, 23 nt, Human
gcccauggaaauaucuaggacuc

SEQ ID NO: 86613 - RNA, 22 nt, Human
gcgaacaccgauggcuucgccg

SEQ ID NO: 86614 - RNA, 20 nt, Human
ggaaaaaagcaaagaagaaa

SEQ ID NO: 86615 - RNA, 21 nt, Human
ggacaccgccuucugccuccg

SEQ ID NO: 86616 - RNA, 26 nt, Human
ggcacugagucuuucaggaccacggu

SEQ ID NO: 86617 - RNA, 21 nt, Human
ggucaguagaaagcuauuuac

SEQ ID NO: 86618 - RNA, 20 nt, Human
uaaaauauuuccuucaucuu

SEQ ID NO: 86619 - RNA, 22 nt, Human
uaaaugcauuaucuuccaguaa

SEQ ID NO: 86620 - RNA, 21 nt, Human
uaaaugcccauuuguaacuga

SEQ ID NO: 86621 - RNA, 19 nt, Human
uaacuauacuaaaugcccc

SEQ ID NO: 86622 - RNA, 22 nt, Human
uaacugaagaaacucacagaca

SEQ ID NO: 86623 - RNA, 23 nt, Human
uaacugaagaaacucacagacac

SEQ ID NO: 86624 - RNA, 25 nt, Human
uaaguuuuaagacacagaucucaca

SEQ ID NO: 86625 - RNA, 20 nt, Human
uacaaaaucaugaccaugag

SEQ ID NO: 86626 - RNA, 28 nt, Human
uacaaaauggcaacuacuaugaccuaaa

SEQ ID NO: 86627 - RNA, 21 nt, Human
uacauaaguagugccgccuuu

SEQ ID NO: 86628 - RNA, 26 nt, Human
uacuaugaccuaaaagaguguacuga

SEQ ID NO: 86629 - RNA, 23 nt, Human
uagacuggacaucagcgaacacc

SEQ ID NO: 86630 - RNA, 23 nt, Human
uagauaacuagguaaggagagug

SEQ ID NO: 86631 - RNA, 25 nt, Human
uauaaggaaagacagacuuugaaac

SEQ ID NO: 86632 - RNA, 24 nt, Human
uaucccacagcucagauuuacaua

SEQ ID NO: 86633 - RNA, 27 nt, Human
uaugaacaaugcucacugcuaccugaa

SEQ ID NO: 86634 - RNA, 21 nt, Human
uccgcgccgccaccgguacca

SEQ ID NO: 86635 - RNA, 20 nt, Human
ucucacacaggcaguugggu

SEQ ID NO: 86636 - RNA, 18 nt, Human
ucucuuaaagcaagaaau

SEQ ID NO: 86637 - RNA, 27 nt, Human
ugaagaaacucacagacacaguaugaa

SEQ ID NO: 86638 - RNA, 18 nt, Human
ugaagaaacucacagacc

SEQ ID NO: 86639 - RNA, 21 nt, Human
uggaaugaacauuuguagaua

SEQ ID NO: 86640 - RNA, 19 nt, Human
uggcacugagucuuucagu

SEQ ID NO: 86641 - RNA, 22 nt, Human
uuccaguaaauaaacauuaugg

SEQ ID NO: 86642 - RNA, 22 nt, Human
uucucauaugaacaaugcucac

SEQ ID NO: 86643 - RNA, 23 nt, Human
uuuguaacugaagaaacucacag

SEQ ID NO: 86644 - RNA, 22 nt, Human
uuuuaccaaugugaaaaaagga

SEQ ID NO: 86645 - RNA, 24 nt, Human
aaaaaaacgaacuucaacaacagg

SEQ ID NO: 86646 - RNA, 18 nt, Human
aagaagaaaacaaaaaaa

SEQ ID NO: 86647 - RNA, 19 nt, Human
aagaagaaaacaaaaaaac

SEQ ID NO: 86648 - RNA, 22 nt, Human
auuuucuuucaagcaaaggcca

SEQ ID NO: 86649 - RNA, 21 nt, Human
caaaaaaacgaacuucaacaa

SEQ ID NO: 86650 - RNA, 18 nt, Human
ccaauaaccuuggaggag

SEQ ID NO: 86651 - RNA, 22 nt, Human
cgaacuucaacaacaggagucc

SEQ ID NO: 86652 - RNA, 20 nt, Human
cggccccagcaaacauuccu

SEQ ID NO: 86653 - RNA, 19 nt, Human
cuaauucuaaguaaaguga

SEQ ID NO: 86654 - RNA, 20 nt, Human
cugucuucaugcccuccaag

SEQ ID NO: 86655 - RNA, 18 nt, Human
cuucaacaacaggagucc

SEQ ID NO: 86656 - RNA, 24 nt, Human
gaagaaaacaaaaaaacgaacuuc

SEQ ID NO: 86657 - RNA, 22 nt, Human
gagcuuuacaaauaagaccagc

SEQ ID NO: 86658 - RNA, 19 nt, Human
gguagguuugaggaggugu

SEQ ID NO: 86659 - RNA, 21 nt, Human
uacaaauaagaccagcuauga

SEQ ID NO: 86660 - RNA, 19 nt, Human
uccaauaaccuuggaggag

SEQ ID NO: 86661 - RNA, 24 nt, Human
ugaauguuuaaaaaaagaagaaaa

SEQ ID NO: 86662 - RNA, 25 nt, Human
uuccugagugguagguuugaggagg

SEQ ID NO: 86663 - RNA, 21 nt, Human
uucuuucggccccagcaaaca

SEQ ID NO: 86664 - RNA, 20 nt, Human
uuuuguaauacucccuuuca

SEQ ID NO: 86665 - RNA, 21 nt, Human
aaacaaaguacaaacaaaacu

SEQ ID NO: 86666 - RNA, 22 nt, Human
aaacaagagggagaauggccgg

SEQ ID NO: 86667 - RNA, 24 nt, Human
aaaguucugggauuacaggcguga

SEQ ID NO: 86668 - RNA, 18 nt, Human
aacaaaguacaaacaaaa

SEQ ID NO: 86669 - RNA, 18 nt, Human
aagccugggauggaaaga

SEQ ID NO: 86670 - RNA, 19 nt, Human
aaguagcugggauuacagg

SEQ ID NO: 86671 - RNA, 25 nt, Human
aaguagcugggauuacaggcaccca

SEQ ID NO: 86672 - RNA, 19 nt, Human
acagagccucccucgguca

SEQ ID NO: 86673 - RNA, 23 nt, Human
accuuagccucccaaaguucugg

SEQ ID NO: 86674 - RNA, 19 nt, Human
acgggguuucaccaugcug

SEQ ID NO: 86675 - RNA, 20 nt, Human
acgggguuucaccaugcugg

SEQ ID NO: 86676 - RNA, 24 nt, Human
acgggguuucaccaugcuggccag

SEQ ID NO: 86677 - RNA, 25 nt, Human
agccuggucuggaacucuugaccuc

SEQ ID NO: 86678 - RNA, 18 nt, Human
aggaaggaugagaagagu

SEQ ID NO: 86679 - RNA, 19 nt, Human
aggaaggaugagaagaguc

SEQ ID NO: 86680 - RNA, 22 nt, Human
agggacaagucugggaaagaca

SEQ ID NO: 86681 - RNA, 24 nt, Human
aggugauccacccaccuuagccuc

SEQ ID NO: 86682 - RNA, 20 nt, Human
agugcaguggugcgaucaug

SEQ ID NO: 86683 - RNA, 23 nt, Human
agugcaguggugcgaucauggcu

SEQ ID NO: 86684 - RNA, 24 nt, Human
agugcaguggugcgaucauggcuc

SEQ ID NO: 86685 - RNA, 22 nt, Human
aguuaguuagcuaagguaacac

SEQ ID NO: 86686 - RNA, 24 nt, Human
aucaaugucaauauccugguuaug

SEQ ID NO: 86687 - RNA, 27 nt, Human
aucaaugucaauauccugguuaugaga

SEQ ID NO: 86688 - RNA, 22 nt, Human
augagaagagucccgcuggaaa

SEQ ID NO: 86689 - RNA, 23 nt, Human
augaucucaaaauagaaagcaua

SEQ ID NO: 86690 - RNA, 24 nt, Human
caaaguucugggauuacaggcgug

SEQ ID NO: 86691 - RNA, 21 nt, Human
caccacaaccuccaccuccaa

SEQ ID NO: 86692 - RNA, 21 nt, Human
caccaugcuggccagccuggu

SEQ ID NO: 86693 - RNA, 22 nt, Human
cacccaccuuagccucccaaag

SEQ ID NO: 86694 - RNA, 23 nt, Human
cacccaccuuagccucccaaagu

SEQ ID NO: 86695 - RNA, 24 nt, Human
caccucagccucccaaguagcugg

SEQ ID NO: 86696 - RNA, 20 nt, Human
caggcacccacuaccaugcc

SEQ ID NO: 86697 - RNA, 22 nt, Human
ccaaaguucugggauuacaggc

SEQ ID NO: 86698 - RNA, 24 nt, Human
ccaaaguucugggauuacaggcgu

SEQ ID NO: 86699 - RNA, 23 nt, Human
ccaaguagcugggauuacaggca

SEQ ID NO: 86700 - RNA, 19 nt, Human
ccacaaccuccaccuccaa

SEQ ID NO: 86701 - RNA, 24 nt, Human
ccacaaccuccaccuccaagguuc

SEQ ID NO: 86702 - RNA, 19 nt, Human
ccacccaccuuagccuccc

SEQ ID NO: 86703 - RNA, 18 nt, Human
ccacugcucucagccuaa

SEQ ID NO: 86704 - RNA, 23 nt, Human
ccauauggaaauaucccagauac

SEQ ID NO: 86705 - RNA, 24 nt, Human
ccaucccacgaaaagugaagugaa

SEQ ID NO: 86706 - RNA, 23 nt, Human
cccaaguagcugggauuacaggc

SEQ ID NO: 86707 - RNA, 24 nt, Human
cccaaguagcugggauuacaggca

SEQ ID NO: 86708 - RNA, 20 nt, Human
cccaccucagccucccaagu

SEQ ID NO: 86709 - RNA, 23 nt, Human
cccaccucagccucccaaguagc

SEQ ID NO: 86710 - RNA, 20 nt, Human
cccacgaaaagugaagugaa

SEQ ID NO: 86711 - RNA, 24 nt, Human
cccucggucacccaggcuagagug

SEQ ID NO: 86712 - RNA, 24 nt, Human
ccuccaagguucgagcaauucucc

SEQ ID NO: 86713 - RNA, 24 nt, Human
ccucccucggucacccaggcuaga

SEQ ID NO: 86714 - RNA, 21 nt, Human
cgaaaagugaagugaaaacaa

SEQ ID NO: 86715 - RNA, 27 nt, Human
cgagcaauucucccaccucagccuccc

SEQ ID NO: 86716 - RNA, 28 nt, Human
cucaccacaaccuccaccuccaagguuc

SEQ ID NO: 86717 - RNA, 24 nt, Human
cucagccucccaaguagcugggau

SEQ ID NO: 86718 - RNA, 25 nt, Human
cuuagccucccaaaguucugggauu

SEQ ID NO: 86719 - RNA, 21 nt, Human
gaaaacaagagggagaauggc

SEQ ID NO: 86720 - RNA, 21 nt, Human
gaaucuuucuacuugucugua

SEQ ID NO: 86721 - RNA, 23 nt, Human
gaccucaggugauccacccaccu

SEQ ID NO: 86722 - RNA, 25 nt, Human
gagcaauucucccaccucagccucc

SEQ ID NO: 86723 - RNA, 22 nt, Human
gagggagaauggccgggaagga

SEQ ID NO: 86724 - RNA, 23 nt, Human
gaucauggcucaccacaaccucc

SEQ ID NO: 86725 - RNA, 24 nt, Human
gauuacaggcacccacuaccaugc

SEQ ID NO: 86726 - RNA, 18 nt, Human
gauuacaggcgugagcca

SEQ ID NO: 86727 - RNA, 21 nt, Human
gauuacaggcgugagccacug

SEQ ID NO: 86728 - RNA, 22 nt, Human
gauuacaggcgugagccacugc

SEQ ID NO: 86729 - RNA, 23 nt, Human
gcccaguuaauuuuuuguauuuu

SEQ ID NO: 86730 - RNA, 18 nt, Human
ggaagugggcauccuggg

SEQ ID NO: 86731 - RNA, 19 nt, Human
ggcacccacuaccaugccc

SEQ ID NO: 86732 - RNA, 23 nt, Human
ggcugggguguggggguggaggg

SEQ ID NO: 86733 - RNA, 19 nt, Human
gggggguggggggugggag

SEQ ID NO: 86734 - RNA, 24 nt, Human
gggguggggggugggagggugcuu

SEQ ID NO: 86735 - RNA, 20 nt, Human
ggguguggggguggagggaa

SEQ ID NO: 86736 - RNA, 23 nt, Human
ggugugugggggggggugggggg

SEQ ID NO: 86737 - RNA, 18 nt, Human
guagcugggauuacaggc

SEQ ID NO: 86738 - RNA, 24 nt, Human
gugauccacccaccuuagccuccc

SEQ ID NO: 86739 - RNA, 20 nt, Human
guggagggaagugggcaucc

SEQ ID NO: 86740 - RNA, 21 nt, Human
guggagggaagugggcauccu

SEQ ID NO: 86741 - RNA, 24 nt, Human
uaaaaacaaaguacaaacaaaacu

SEQ ID NO: 86742 - RNA, 19 nt, Human
uaagcgagaaucuuucuac

SEQ ID NO: 86743 - RNA, 24 nt, Human
uaauuuuuuguauuuuuaguacag

SEQ ID NO: 86744 - RNA, 22 nt, Human
uacaggcgugagccacugcucu

SEQ ID NO: 86745 - RNA, 22 nt, Human
uacuugucuguauucugaguuc

SEQ ID NO: 86746 - RNA, 21 nt, Human
uagagugcaguggugcgauca

SEQ ID NO: 86747 - RNA, 24 nt, Human
uagagugcaguggugcgaucaugg

SEQ ID NO: 86748 - RNA, 24 nt, Human
uaguacagacgggguuucaccaug

SEQ ID NO: 86749 - RNA, 21 nt, Human
ucaauauccugguuaugagac

SEQ ID NO: 86750 - RNA, 24 nt, Human
ucaauauucauuuuuauuuuccuc

SEQ ID NO: 86751 - RNA, 27 nt, Human
ucaccacaaccuccaccuccaagguuc

SEQ ID NO: 86752 - RNA, 20 nt, Human
ucagccucccaaguagcugg

SEQ ID NO: 86753 - RNA, 21 nt, Human
uccaagguucgagcaauucuc

SEQ ID NO: 86754 - RNA, 23 nt, Human
uccaagguucgagcaauucuccc

SEQ ID NO: 86755 - RNA, 24 nt, Human
ucccaaaguucugggauuacaggc

SEQ ID NO: 86756 - RNA, 24 nt, Human
ucccaaguagcugggauuacaggc

SEQ ID NO: 86757 - RNA, 21 nt, Human
ucccagauacacggguuucug

SEQ ID NO: 86758 - RNA, 19 nt, Human
ucgggccacaguggcccau

SEQ ID NO: 86759 - RNA, 22 nt, Human
ucgggccacaguggcccaugag

SEQ ID NO: 86760 - RNA, 24 nt, Human
ucggucacccaggcuagagugcag

SEQ ID NO: 86761 - RNA, 26 nt, Human
ucucccaccucagccucccaaguagc

SEQ ID NO: 86762 - RNA, 21 nt, Human
ugaccucaggugauccaccca

SEQ ID NO: 86763 - RNA, 22 nt, Human
ugaccucaggugauccacccac

SEQ ID NO: 86764 - RNA, 24 nt, Human
ugaccucaggugauccacccaccu

SEQ ID NO: 86765 - RNA, 18 nt, Human
ugagaauguccuguaucu

SEQ ID NO: 86766 - RNA, 19 nt, Human
ugagacagagccucccucg

SEQ ID NO: 86767 - RNA, 24 nt, Human
ugauccacccaccuuagccuccca

SEQ ID NO: 86768 - RNA, 22 nt, Human
ugaucucaaaauagaaagcaua

SEQ ID NO: 86769 - RNA, 22 nt, Human
ugcaguggugcgaucauggcuc

SEQ ID NO: 86770 - RNA, 23 nt, Human
ugcaguggugcgaucauggcuca

SEQ ID NO: 86771 - RNA, 23 nt, Human
uggaaaaggagggacaagucugg

SEQ ID NO: 86772 - RNA, 18 nt, Human
uggagaguggauuccugg

SEQ ID NO: 86773 - RNA, 24 nt, Human
uggagggaagugggcauccugggg

SEQ ID NO: 86774 - RNA, 24 nt, Human
uggccagccuggucuggaacucuu

SEQ ID NO: 86775 - RNA, 21 nt, Human
ugggaaagacaggcaacaugg

SEQ ID NO: 86776 - RNA, 19 nt, Human
ugggauuacaggcacccac

SEQ ID NO: 86777 - RNA, 19 nt, Human
ugggauuacaggcacccac

SEQ ID NO: 86778 - RNA, 21 nt, Human
ugggauuacaggcacccacua

SEQ ID NO: 86779 - RNA, 24 nt, Human
ugggauuacaggcacccacuacca

SEQ ID NO: 86780 - RNA, 25 nt, Human
ugggauuacaggcacccacuaccau

SEQ ID NO: 86781 - RNA, 18 nt, Human
ugggauuacaggcgugag

SEQ ID NO: 86782 - RNA, 19 nt, Human
ugggauuacaggcgugagc

SEQ ID NO: 86783 - RNA, 21 nt, Human
ugggauuacaggcgugagcca

SEQ ID NO: 86784 - RNA, 22 nt, Human
ugggauuacaggcgugagccac

SEQ ID NO: 86785 - RNA, 22 nt, Human
ugggauuacaggcgugagccac

SEQ ID NO: 86786 - RNA, 24 nt, Human
ugggauuacaggcgugagccacug

SEQ ID NO: 86787 - RNA, 26 nt, Human
ugggauuacaggcgugagccacugcu

SEQ ID NO: 86788 - RNA, 18 nt, Human
uggggggggguggggggu

SEQ ID NO: 86789 - RNA, 21 nt, Human
ugggggggggugggggguggg

SEQ ID NO: 86790 - RNA, 25 nt, Human
uggggggggguggggggugggaggg

SEQ ID NO: 86791 - RNA, 23 nt, Human
uggucuggaacucuugaccucag

SEQ ID NO: 86792 - RNA, 19 nt, Human
uggugaugagaauguccug

SEQ ID NO: 86793 - RNA, 24 nt, Human
uggugcgaucauggcucaccacaa

SEQ ID NO: 86794 - RNA, 18 nt, Human
ugucccaaagaacuuuug

SEQ ID NO: 86795 - RNA, 20 nt, Human
uguggggguggagggaagug

SEQ ID NO: 86796 - RNA, 21 nt, Human
ugugugggggggggugggggg

SEQ ID NO: 86797 - RNA, 24 nt, Human
uguguggggggggguggggggugg

SEQ ID NO: 86798 - RNA, 23 nt, Human
uguuuuuguuuuuguuuuugcuu

SEQ ID NO: 86799 - RNA, 24 nt, Human
uuaguacagacgggguuucaccau

SEQ ID NO: 86800 - RNA, 24 nt, Human
uucgagcaauucucccaccucagc

SEQ ID NO: 86801 - RNA, 21 nt, Human
uugcaaugaucucaaaauaga

SEQ ID NO: 86802 - RNA, 19 nt, Human
uugccagggguuagggaca

SEQ ID NO: 86803 - RNA, 22 nt, Human
uugccagggguuagggacacgg

SEQ ID NO: 86804 - RNA, 18 nt, Human
uugcuuugcuuuugagac

SEQ ID NO: 86805 - RNA, 23 nt, Human
uugcuuugcuuuugagacagagc

SEQ ID NO: 86806 - RNA, 23 nt, Human
uuguauuuuuaguacagacgggg

SEQ ID NO: 86807 - RNA, 23 nt, Human
uuuaaaaacaaaguacaaacaaa

SEQ ID NO: 86808 - RNA, 21 nt, Human
uuucaccaugcuggccagccu

SEQ ID NO: 86809 - RNA, 22 nt, Human
uuuguuuuuguuuuugcuuugc

SEQ ID NO: 86810 - RNA, 24 nt, Human
uuuuuaguacagacgggguuucac

SEQ ID NO: 86811 - RNA, 21 nt, Human
uuuuuguauuuuuaguacaga

SEQ ID NO: 86812 - RNA, 24 nt, Human
uuuuuuguauuuuuaguacagacg

SEQ ID NO: 86813 - RNA, 19 nt, Human
aagcugggcuucaagaaug

SEQ ID NO: 86814 - RNA, 23 nt, Human
acagaaaauaauuuuugucagua

SEQ ID NO: 86815 - RNA, 22 nt, Human
accaugguccaaaaucucccag

SEQ ID NO: 86816 - RNA, 22 nt, Human
acugggacgcaagacagaucua

SEQ ID NO: 86817 - RNA, 24 nt, Human
acuuaucuacuacuauuugucugu

SEQ ID NO: 86818 - RNA, 19 nt, Human
agacaugcccaaacaggag

SEQ ID NO: 86819 - RNA, 18 nt, Human
agauaugaaagcugggcu

SEQ ID NO: 86820 - RNA, 19 nt, Human
agcuggaacugaauaagac

SEQ ID NO: 86821 - RNA, 19 nt, Human
aggcgcagugcauggcugu

SEQ ID NO: 86822 - RNA, 19 nt, Human
agggcgucaugagcuggaa

SEQ ID NO: 86823 - RNA, 21 nt, Human
auaagacaugcccaaacagga

SEQ ID NO: 86824 - RNA, 20 nt, Human
augaucucaaacuaacagaa

SEQ ID NO: 86825 - RNA, 23 nt, Human
cagcggccacugucacagcgaaa

SEQ ID NO: 86826 - RNA, 18 nt, Human
cauugugcugggccuagc

SEQ ID NO: 86827 - RNA, 22 nt, Human
ccaaaaucucccaggaggcagu

SEQ ID NO: 86828 - RNA, 24 nt, Human
ccgugugcauacugccuuuguccu

SEQ ID NO: 86829 - RNA, 23 nt, Human
cugccuuuguccucccacagucc

SEQ ID NO: 86830 - RNA, 22 nt, Human
cuugcugcaaaucuguucacaa

SEQ ID NO: 86831 - RNA, 25 nt, Human
cuugcugcaaaucuguucacaaaag

SEQ ID NO: 86832 - RNA, 19 nt, Human
cuuucuggcaaugcagcgg

SEQ ID NO: 86833 - RNA, 19 nt, Human
gaccaugguccaaaaucuc

SEQ ID NO: 86834 - RNA, 21 nt, Human
gaguugguucuucgggauggu

SEQ ID NO: 86835 - RNA, 20 nt, Human
uaagacaugcccaaacagga

SEQ ID NO: 86836 - RNA, 21 nt, Human
uacaagggucacagucugacc

SEQ ID NO: 86837 - RNA, 21 nt, Human
uauuucauuuuuugugugucu

SEQ ID NO: 86838 - RNA, 22 nt, Human
ucaugagcuggaacugaauaag

SEQ ID NO: 86839 - RNA, 23 nt, Human
ucccccaaacugacugggacgca

SEQ ID NO: 86840 - RNA, 26 nt, Human
ucuccacagucauuuucuccauugca

SEQ ID NO: 86841 - RNA, 19 nt, Human
ugaucucaaacuaacagaa

SEQ ID NO: 86842 - RNA, 25 nt, Human
ugcauucuaacuuuccuggcuaacc

SEQ ID NO: 86843 - RNA, 22 nt, Human
ugccuuuguccucccacagucc

SEQ ID NO: 86844 - RNA, 22 nt, Human
ugguccaaaaucucccaggagg

SEQ ID NO: 86845 - RNA, 20 nt, Human
ugucacagcgaaauuuauuc

SEQ ID NO: 86846 - RNA, 22 nt, Human
uguccucccacagucccuuuca

SEQ ID NO: 86847 - RNA, 19 nt, Human
uucacaaaaguuuuccugg

SEQ ID NO: 86848 - RNA, 24 nt, Human
uuuguaggaguugguucuucggga

SEQ ID NO: 86849 - RNA, 24 nt, Human
aaaagaaaaaagaacaggggcaaa

SEQ ID NO: 86850 - RNA, 18 nt, Human
aaaauuagcugggcgugg

SEQ ID NO: 86851 - RNA, 24 nt, Human
aacaaagugagacucugucuuaaa

SEQ ID NO: 86852 - RNA, 18 nt, Human
aacauggugaaacccauc

SEQ ID NO: 86853 - RNA, 19 nt, Human
aacauggugaaacccaucu

SEQ ID NO: 86854 - RNA, 20 nt, Human
aacauggugaaacccaucuc

SEQ ID NO: 86855 - RNA, 27 nt, Human
aaggcagacggauuaccugaggucagg

SEQ ID NO: 86856 - RNA, 19 nt, Human
acaaagugagacucugucu

SEQ ID NO: 86857 - RNA, 24 nt, Human
acaaagugagacucugucuuaaaa

SEQ ID NO: 86858 - RNA, 22 nt, Human
acaagacaccccugugaccacu

SEQ ID NO: 86859 - RNA, 22 nt, Human
acagauggcugggaguugagga

SEQ ID NO: 86860 - RNA, 18 nt, Human
acugcgcuccagccuggg

SEQ ID NO: 86861 - RNA, 23 nt, Human
acugcgcuccagccugggcaaca

SEQ ID NO: 86862 - RNA, 21 nt, Human
agaagguaacaccuauuucaa

SEQ ID NO: 86863 - RNA, 26 nt, Human
agacggauuaccugaggucaggaguu

SEQ ID NO: 86864 - RNA, 24 nt, Human
agcauggccaacauggugaaaccc

SEQ ID NO: 86865 - RNA, 23 nt, Human
agccccagcugccugcuggauuc

SEQ ID NO: 86866 - RNA, 24 nt, Human
agccugggcaacaaagugagacuc

SEQ ID NO: 86867 - RNA, 26 nt, Human
aggcagacggauuaccugaggucagg

SEQ ID NO: 86868 - RNA, 19 nt, Human
aggcggagguugcagggag

SEQ ID NO: 86869 - RNA, 26 nt, Human
aggucaggaguuggagacgagcaugg

SEQ ID NO: 86870 - RNA, 24 nt, Human
aucaccccacugcgcuccagccug

SEQ ID NO: 86871 - RNA, 21 nt, Human
augggcugugucaaucauacu

SEQ ID NO: 86872 - RNA, 19 nt, Human
auuucauuuaagcccucuc

SEQ ID NO: 86873 - RNA, 23 nt, Human
caaaagaaaaaagaacaggggca

SEQ ID NO: 86874 - RNA, 23 nt, Human
caacauggugaaacccaucucua

SEQ ID NO: 86875 - RNA, 24 nt, Human
caagaacacgcagccagccugugc

SEQ ID NO: 86876 - RNA, 24 nt, Human
caaggcagacggauuaccugaggu

SEQ ID NO: 86877 - RNA, 20 nt, Human
caccuguaaucccagcugcu

SEQ ID NO: 86878 - RNA, 24 nt, Human
caccuguaaucccagcugcuuggg

SEQ ID NO: 86879 - RNA, 19 nt, Human
cacugcgcuccagccuggg

SEQ ID NO: 86880 - RNA, 20 nt, Human
cacugcgcuccagccugggc

SEQ ID NO: 86881 - RNA, 21 nt, Human
cacugcgcuccagccugggca

SEQ ID NO: 86882 - RNA, 22 nt, Human
cacugcgcuccagccugggcaa

SEQ ID NO: 86883 - RNA, 23 nt, Human
cacugcgcuccagccugggcaac

SEQ ID NO: 86884 - RNA, 24 nt, Human
cacugcgcuccagccugggcaaca

SEQ ID NO: 86885 - RNA, 24 nt, Human
cagacggauuaccugaggucagga

SEQ ID NO: 86886 - RNA, 20 nt, Human
cagcauuugggaggccaagg

SEQ ID NO: 86887 - RNA, 23 nt, Human
cagcauuugggaggccaaggcag

SEQ ID NO: 86888 - RNA, 24 nt, Human
cagccaggcguggugguucauguc

SEQ ID NO: 86889 - RNA, 18 nt, Human
cagccccagcugccugcu

SEQ ID NO: 86890 - RNA, 19 nt, Human
cagccccagcugccugcug

SEQ ID NO: 86891 - RNA, 23 nt, Human
cagugcccaguugugcagauguu

SEQ ID NO: 86892 - RNA, 23 nt, Human
cauggccaacauggugaaaccca

SEQ ID NO: 86893 - RNA, 23 nt, Human
caugucuguaaucccagcauuug

SEQ ID NO: 86894 - RNA, 27 nt, Human
ccaaggcagacggauuaccugagguca

SEQ ID NO: 86895 - RNA, 20 nt, Human
ccacugcgcuccagccuggg

SEQ ID NO: 86896 - RNA, 20 nt, Human
ccacugcgcuccagccuggg

SEQ ID NO: 86897 - RNA, 21 nt, Human
ccacugcgcuccagccugggc

SEQ ID NO: 86898 - RNA, 23 nt, Human
ccacugcgcuccagccugggcaa

SEQ ID NO: 86899 - RNA, 24 nt, Human
ccacugcgcuccagccugggcaac

SEQ ID NO: 86900 - RNA, 23 nt, Human
ccagggucagaacaauacagaga

SEQ ID NO: 86901 - RNA, 21 nt, Human
ccccaaagagaagacugaauu

SEQ ID NO: 86902 - RNA, 20 nt, Human
ccccacugcgcuccagccug

SEQ ID NO: 86903 - RNA, 24 nt, Human
ccccacugcgcuccagccugggca

SEQ ID NO: 86904 - RNA, 20 nt, Human
ccugaggucaggaguuggag

SEQ ID NO: 86905 - RNA, 21 nt, Human
ccuguaaucccagcugcuugg

SEQ ID NO: 86906 - RNA, 23 nt, Human
cggauuaccugaggucaggaguu

SEQ ID NO: 86907 - RNA, 24 nt, Human
cuaaaaccccaaagagaagacuga

SEQ ID NO: 86908 - RNA, 19 nt, Human
cucaggauagaaauaguuu

SEQ ID NO: 86909 - RNA, 20 nt, Human
cucucauuucuccucccaca

SEQ ID NO: 86910 - RNA, 20 nt, Human
cuguaaucccagcauuuggg

SEQ ID NO: 86911 - RNA, 21 nt, Human
cuguaaucccagcugcuuggg

SEQ ID NO: 86912 - RNA, 21 nt, Human
cuguccagugcccaguugugc

SEQ ID NO: 86913 - RNA, 22 nt, Human
cuuucuguuauccuagucauuu

SEQ ID NO: 86914 - RNA, 23 nt, Human
gagacgagcauggccaacauggu

SEQ ID NO: 86915 - RNA, 23 nt, Human
gagaucaccccacugcgcuccag

SEQ ID NO: 86916 - RNA, 19 nt, Human
gagcauucaaguuucucua

SEQ ID NO: 86917 - RNA, 18 nt, Human
gauuaccugaggucagga

SEQ ID NO: 86918 - RNA, 23 nt, Human
gauuaccugaggucaggaguugg

SEQ ID NO: 86919 - RNA, 28 nt, Human
gcugaggcacaagaaucgcuucaaccca

SEQ ID NO: 86920 - RNA, 18 nt, Human
gcugcuguuuuguuuuga

SEQ ID NO: 86921 - RNA, 20 nt, Human
ggaaaaccacccucucuaau

SEQ ID NO: 86922 - RNA, 24 nt, Human
ggagguugcagggagaugagauca

SEQ ID NO: 86923 - RNA, 22 nt, Human
ggauuaccugaggucaggaguu

SEQ ID NO: 86924 - RNA, 24 nt, Human
ggccaacauggugaaacccaucuc

SEQ ID NO: 86925 - RNA, 21 nt, Human
ggcgggcaccuguaaucccag

SEQ ID NO: 86926 - RNA, 24 nt, Human
gggcgugguggcgggcaccuguaa

SEQ ID NO: 86927 - RNA, 24 nt, Human
gguggcgggcaccuguaaucccag

SEQ ID NO: 86928 - RNA, 24 nt, Human
ggugguucaugucuguaaucccag

SEQ ID NO: 86929 - RNA, 21 nt, Human
gguucaugucuguaaucccag

SEQ ID NO: 86930 - RNA, 22 nt, Human
guucuggcccaugggcuguguc

SEQ ID NO: 86931 - RNA, 18 nt, Human
uaaaaaaccaaggcccag

SEQ ID NO: 86932 - RNA, 19 nt, Human
uaaaaaaccaaggcccaga

SEQ ID NO: 86933 - RNA, 20 nt, Human
uaaaaaggaggcaaaagagu

SEQ ID NO: 86934 - RNA, 18 nt, Human
uacagauuuuaaaaaacc

SEQ ID NO: 86935 - RNA, 22 nt, Human
uaccuguguacucccugaaaac

SEQ ID NO: 86936 - RNA, 23 nt, Human
uagcuuauuuuaaauuucauuua

SEQ ID NO: 86937 - RNA, 20 nt, Human
ucaugucuguaaucccagca

SEQ ID NO: 86938 - RNA, 20 nt, Human
ucaugucuguaaucccagca

SEQ ID NO: 86939 - RNA, 18 nt, Human
uccacagaauagggaaaa

SEQ ID NO: 86940 - RNA, 24 nt, Human
uccagccaggcguggugguucaug

SEQ ID NO: 86941 - RNA, 24 nt, Human
uccagccugggcaacaaagugaga

SEQ ID NO: 86942 - RNA, 19 nt, Human
uccauugaggaaaaccacc

SEQ ID NO: 86943 - RNA, 22 nt, Human
ucuaaucaggagaucacguucu

SEQ ID NO: 86944 - RNA, 21 nt, Human
ucucuacuaaaaaugcaaaaa

SEQ ID NO: 86945 - RNA, 18 nt, Human
ugaaaacucugggacugu

SEQ ID NO: 86946 - RNA, 19 nt, Human
ugaaaacucugggacugua

SEQ ID NO: 86947 - RNA, 19 nt, Human
ugaaagagaaauaaggaau

SEQ ID NO: 86948 - RNA, 22 nt, Human
ugagaucaccccacugcgcucc

SEQ ID NO: 86949 - RNA, 23 nt, Human
ugaggaggaagguagacacugga

SEQ ID NO: 86950 - RNA, 18 nt, Human
ugcaaaaauuagcugggc

SEQ ID NO: 86951 - RNA, 24 nt, Human
ugcaaaaauuagcugggcguggug

SEQ ID NO: 86952 - RNA, 18 nt, Human
ugcccaguugugcagaug

SEQ ID NO: 86953 - RNA, 22 nt, Human
ugcuucaaacuaaucuaccugu

SEQ ID NO: 86954 - RNA, 23 nt, Human
uggauuccaagcaagcugaccau

SEQ ID NO: 86955 - RNA, 20 nt, Human
uggccaacauggugaaaccc

SEQ ID NO: 86956 - RNA, 23 nt, Human
uggccaacauggugaaacccauc

SEQ ID NO: 86957 - RNA, 22 nt, Human
uggcgggcaccuguaaucccag

SEQ ID NO: 86958 - RNA, 26 nt, Human
ugggaagcugaggcacaagaaucgcu

SEQ ID NO: 86959 - RNA, 18 nt, Human
ugggaggccaaggcagac

SEQ ID NO: 86960 - RNA, 24 nt, Human
ugggcaacaaagugagacucuguc

SEQ ID NO: 86961 - RNA, 24 nt, Human
ugguggcgggcaccuguaauccca

SEQ ID NO: 86962 - RNA, 24 nt, Human
uggugguucaugucuguaauccca

SEQ ID NO: 86963 - RNA, 22 nt, Human
ugguucaugucuguaaucccag

SEQ ID NO: 86964 - RNA, 24 nt, Human
ugguucaugucuguaaucccagca

SEQ ID NO: 86965 - RNA, 23 nt, Human
ugucuguaaucccagcauuuggg

SEQ ID NO: 86966 - RNA, 20 nt, Human
uuaaaaaaagaauaaggaau

SEQ ID NO: 86967 - RNA, 24 nt, Human
uuaaaaaaccaaggcccagagaag

SEQ ID NO: 86968 - RNA, 22 nt, Human
uuacagauuuuaaaaaaccaag

SEQ ID NO: 86969 - RNA, 18 nt, Human
uuagcugggcgugguggc

SEQ ID NO: 86970 - RNA, 24 nt, Human
uuagcugggcgugguggcgggcac

SEQ ID NO: 86971 - RNA, 26 nt, Human
uucaaaagaaaaaagaacaggggcaa

SEQ ID NO: 86972 - RNA, 24 nt, Human
uucaacccaggaggcggagguugc

SEQ ID NO: 86973 - RNA, 19 nt, Human
uucacucagccccagcugc

SEQ ID NO: 86974 - RNA, 20 nt, Human
uuccauugaggaaaaccacc

SEQ ID NO: 86975 - RNA, 24 nt, Human
uugggaagcugaggcacaagaauc

SEQ ID NO: 86976 - RNA, 24 nt, Human
uuuacagauuuuaaaaaaccaagg

SEQ ID NO: 86977 - RNA, 24 nt, Human
aaaaaugcauuuucugaauaagcu

SEQ ID NO: 86978 - RNA, 23 nt, Human
aaacuacaggguccaucagaaag

SEQ ID NO: 86979 - RNA, 25 nt, Human
accacagcuuauuagacuguacaac

SEQ ID NO: 86980 - RNA, 23 nt, Human
aggaugccuuucaagucagcuuc

SEQ ID NO: 86981 - RNA, 19 nt, Human
aguaccaaggaugccuuuc

SEQ ID NO: 86982 - RNA, 20 nt, Human
auuacagcuccaacauacac

SEQ ID NO: 86983 - RNA, 19 nt, Human
caaaugucuacagaagaau

SEQ ID NO: 86984 - RNA, 24 nt, Human
cagaagauauuccuguggcucucu

SEQ ID NO: 86985 - RNA, 24 nt, Human
cccgccgcaggggcucggacagcc

SEQ ID NO: 86986 - RNA, 19 nt, Human
cccgcguccgcgugcuccg

SEQ ID NO: 86987 - RNA, 24 nt, Human
ccgccacaccaucguccgcccgcc

SEQ ID NO: 86988 - RNA, 23 nt, Human
ccgcccgcguccgcgugcuccgc

SEQ ID NO: 86989 - RNA, 20 nt, Human
ccgccgcgccgcccgcgucc

SEQ ID NO: 86990 - RNA, 22 nt, Human
ccuuucaagucagcuucuacau

SEQ ID NO: 86991 - RNA, 18 nt, Human
cgggcccgcgagccgugu

SEQ ID NO: 86992 - RNA, 19 nt, Human
cguccgcccgccgcagggg

SEQ ID NO: 86993 - RNA, 23 nt, Human
cguguuggaacagguaccgcgac

SEQ ID NO: 86994 - RNA, 24 nt, Human
cuacaagcaguugccauugcauuu

SEQ ID NO: 86995 - RNA, 22 nt, Human
cuucacuuaguaccaaggaugc

SEQ ID NO: 86996 - RNA, 24 nt, Human
cuucaugcccgccgccgcgccgcc

SEQ ID NO: 86997 - RNA, 21 nt, Human
gacaggaaugucgugaaucug

SEQ ID NO: 86998 - RNA, 18 nt, Human
gacuguacaacagaagau

SEQ ID NO: 86999 - RNA, 24 nt, Human
gaugccuuucaagucagcuucuac

SEQ ID NO: 87000 - RNA, 23 nt, Human
ggaccggagccggcacgggcccg

SEQ ID NO: 87001 - RNA, 23 nt, Human
ggaggcuucaaauggcauaugca

SEQ ID NO: 87002 - RNA, 23 nt, Human
gggcucggacagccgcgccgggg

SEQ ID NO: 87003 - RNA, 22 nt, Human
guagauuaugaaaaaaaaaugg

SEQ ID NO: 87004 - RNA, 21 nt, Human
uaaaagcuggaggcuucaaau

SEQ ID NO: 87005 - RNA, 21 nt, Human
uaaacugucauuaaacuguga

SEQ ID NO: 87006 - RNA, 22 nt, Human
uaagaaacauaauugcaaccau

SEQ ID NO: 87007 - RNA, 20 nt, Human
uaagguaaaaauccaaguuu

SEQ ID NO: 87008 - RNA, 21 nt, Human
uaaucaguaucauucuauaac

SEQ ID NO: 87009 - RNA, 21 nt, Human
uacaaguguauuaaacacugg

SEQ ID NO: 87010 - RNA, 22 nt, Human
uacaccaugaaugcugaugcug

SEQ ID NO: 87011 - RNA, 21 nt, Human
uaccgcgaccacgacaccggc

SEQ ID NO: 87012 - RNA, 23 nt, Human
uauuagacuguacaacagaagau

SEQ ID NO: 87013 - RNA, 21 nt, Human
ucaguggacuuaaagccaaga

SEQ ID NO: 87014 - RNA, 22 nt, Human
uccaaguuacaaguguauuaaa

SEQ ID NO: 87015 - RNA, 19 nt, Human
uccgccacaccaucguccg

SEQ ID NO: 87016 - RNA, 20 nt, Human
ucuacagaagaaugcgcugu

SEQ ID NO: 87017 - RNA, 21 nt, Human
uggaaacuacaggguccauca

SEQ ID NO: 87018 - RNA, 28 nt, Human
uggcagaagacgccgucugguccagcga

SEQ ID NO: 87019 - RNA, 21 nt, Human
ugggacaggaaugucgugaau

SEQ ID NO: 87020 - RNA, 22 nt, Human
uuaaaaaagaucagccauagcc

SEQ ID NO: 87021 - RNA, 20 nt, Human
uuuuuuuuuuuuuuuugcaa

SEQ ID NO: 87022 - RNA, 22 nt, Human
uuuuuuuuuuuuuuuugcaauu

SEQ ID NO: 87023 - RNA, 18 nt, Human
acagagcuucuaguuaac

SEQ ID NO: 87024 - RNA, 22 nt, Human
acagcaucugguccagccugug

SEQ ID NO: 87025 - RNA, 18 nt, Human
accuagucuuaggccugg

SEQ ID NO: 87026 - RNA, 26 nt, Human
acgcccaauaaaacaaaguaggauga

SEQ ID NO: 87027 - RNA, 19 nt, Human
acucaagucaauuuuuagu

SEQ ID NO: 87028 - RNA, 23 nt, Human
agccaccgcacuauauuaccuug

SEQ ID NO: 87029 - RNA, 18 nt, Human
aggaauaaagcuaucuau

SEQ ID NO: 87030 - RNA, 24 nt, Human
aggggucgacauccacagcaucug

SEQ ID NO: 87031 - RNA, 18 nt, Human
agugcaggggucgacauc

SEQ ID NO: 87032 - RNA, 21 nt, Human
auccacagcaucugguccagc

SEQ ID NO: 87033 - RNA, 22 nt, Human
cacuauauuaccuugaaggaau

SEQ ID NO: 87034 - RNA, 19 nt, Human
cagcaucugguccagccug

SEQ ID NO: 87035 - RNA, 19 nt, Human
gcagaacaaagaaaaaagu

SEQ ID NO: 87036 - RNA, 19 nt, Human
gcugauuugcaucuucucu

SEQ ID NO: 87037 - RNA, 21 nt, Human
ggaguaaaagaugucuacagg

SEQ ID NO: 87038 - RNA, 20 nt, Human
ggcagaacaaagaaaaaagu

SEQ ID NO: 87039 - RNA, 21 nt, Human
gugcaggggucgacauccaca

SEQ ID NO: 87040 - RNA, 23 nt, Human
uaaaacaaaguaggaugaaaaaa

SEQ ID NO: 87041 - RNA, 25 nt, Human
uaaaagaugucuacaggcugggacu

SEQ ID NO: 87042 - RNA, 23 nt, Human
uaacucaagucaauuuuuaguau

SEQ ID NO: 87043 - RNA, 18 nt, Human
ucaaagaacuaagagaau

SEQ ID NO: 87044 - RNA, 25 nt, Human
ucaacgcccaauaaaacaaaguagg

SEQ ID NO: 87045 - RNA, 22 nt, Human
ucagugcaggggucgacaucca

SEQ ID NO: 87046 - RNA, 24 nt, Human
uccacagcaucugguccagccugu

SEQ ID NO: 87047 - RNA, 21 nt, Human
ucugcuuguuuugucucuaac

SEQ ID NO: 87048 - RNA, 25 nt, Human
ugaauaaaaugauugaguuuuguaa

SEQ ID NO: 87049 - RNA, 18 nt, Human
ugcuuacccuaccaauua

SEQ ID NO: 87050 - RNA, 21 nt, Human
uggcagaacaaagaaaaaagu

SEQ ID NO: 87051 - RNA, 25 nt, Human
uggcagaacaaagaaaaaagugugc

SEQ ID NO: 87052 - RNA, 20 nt, Human
uggcuguagacagcaaaacc

SEQ ID NO: 87053 - RNA, 20 nt, Human
ugucugcuuguuuugucucu

SEQ ID NO: 87054 - RNA, 23 nt, Human
uuaguauuuuucucauuguuuca

SEQ ID NO: 87055 - RNA, 24 nt, Human
acuugcauuuuacaagguaacauc

SEQ ID NO: 87056 - RNA, 19 nt, Human
cacugccuuuugcccuugc

SEQ ID NO: 87057 - RNA, 19 nt, Human
cagguggaaacugguguag

SEQ ID NO: 87058 - RNA, 27 nt, Human
caucuuuauuuuaaacagcuugcaugg

SEQ ID NO: 87059 - RNA, 18 nt, Human
cauggcacugccuuuugc

SEQ ID NO: 87060 - RNA, 18 nt, Human
uagcccacugcuguauca

SEQ ID NO: 87061 - RNA, 21 nt, Human
ugaacuccagguggaaacugg

SEQ ID NO: 87062 - RNA, 19 nt, Human
ugguguagggcugagcugg

SEQ ID NO: 87063 - RNA, 20 nt, Human
aagauccccugcccugggug

SEQ ID NO: 87064 - RNA, 22 nt, Human
aggguagcaccaccaaaguccc

SEQ ID NO: 87065 - RNA, 21 nt, Human
cacuggagcugugugccggcc

SEQ ID NO: 87066 - RNA, 18 nt, Human
cccacuguccucuggggc

SEQ ID NO: 87067 - RNA, 23 nt, Human
ccccugcccuggguggcagggcc

SEQ ID NO: 87068 - RNA, 18 nt, Human
cccuggguggcagggccc

SEQ ID NO: 87069 - RNA, 24 nt, Human
cccuggguggcagggcccugaucu

SEQ ID NO: 87070 - RNA, 21 nt, Human
cggaggacaggcagcgggcac

SEQ ID NO: 87071 - RNA, 27 nt, Human
gaucugaggcugguuucaaccuugugg

SEQ ID NO: 87072 - RNA, 18 nt, Human
gcagcaggguggcaggac

SEQ ID NO: 87073 - RNA, 18 nt, Human
guagguaccacuccaccc

SEQ ID NO: 87074 - RNA, 20 nt, Human
guggcggcagcaggguggca

SEQ ID NO: 87075 - RNA, 25 nt, Human
uagguaccacuccacccacuguccu

SEQ ID NO: 87076 - RNA, 20 nt, Human
ugaggcugguuucacggagg

SEQ ID NO: 87077 - RNA, 19 nt, Human
aaaacacuggaagcuguaa

SEQ ID NO: 87078 - RNA, 24 nt, Human
aaaagaaaagaaaaugacugaaaa

SEQ ID NO: 87079 - RNA, 19 nt, Human
aaacaguauuacaauuuuc

SEQ ID NO: 87080 - RNA, 19 nt, Human
aaacugguuugaaaaaagu

SEQ ID NO: 87081 - RNA, 22 nt, Human
aaaugaacagaaaaacccacau

SEQ ID NO: 87082 - RNA, 21 nt, Human
aaaugccuccuacccucaccc

SEQ ID NO: 87083 - RNA, 22 nt, Human
aacacugucauuuucuauuuag

SEQ ID NO: 87084 - RNA, 24 nt, Human
aacagaaaaacccacauuaaucca

SEQ ID NO: 87085 - RNA, 25 nt, Human
aagcauuuaauacugcaauaaaaug

SEQ ID NO: 87086 - RNA, 22 nt, Human
aauaaaaugaacagaaaaaccc

SEQ ID NO: 87087 - RNA, 22 nt, Human
aaugccuccuacccucacccca

SEQ ID NO: 87088 - RNA, 21 nt, Human
aauucaauuugccauggagaa

SEQ ID NO: 87089 - RNA, 24 nt, Human
acaaguguaggaauuaccagcacg

SEQ ID NO: 87090 - RNA, 20 nt, Human
accacacccaaauaccucag

SEQ ID NO: 87091 - RNA, 24 nt, Human
acucucaucacaaaaaaagccauu

SEQ ID NO: 87092 - RNA, 18 nt, Human
agaaaagaaaaugacuga

SEQ ID NO: 87093 - RNA, 21 nt, Human
agaaaagaaaaugacugaaaa

SEQ ID NO: 87094 - RNA, 24 nt, Human
agaaauuuauagaacaugagagua

SEQ ID NO: 87095 - RNA, 18 nt, Human
agaauuacgggacagaaa

SEQ ID NO: 87096 - RNA, 20 nt, Human
agcaaagaaaaaauguaaag

SEQ ID NO: 87097 - RNA, 19 nt, Human
aguuugugugaaaacacag

SEQ ID NO: 87098 - RNA, 27 nt, Human
auacuaauagagaucucuaaguacacc

SEQ ID NO: 87099 - RNA, 20 nt, Human
auagucaaaacacuggaagc

SEQ ID NO: 87100 - RNA, 22 nt, Human
auccuccccucuucaugucucu

SEQ ID NO: 87101 - RNA, 23 nt, Human
auuaaaaaucucuccuucaguuu

SEQ ID NO: 87102 - RNA, 19 nt, Human
caaaacacuggaagcugua

SEQ ID NO: 87103 - RNA, 21 nt, Human
cacagggauaaguaguucaac

SEQ ID NO: 87104 - RNA, 19 nt, Human
cacaguuaccuggaggacu

SEQ ID NO: 87105 - RNA, 18 nt, Human
cacccuuugaacagcaag

SEQ ID NO: 87106 - RNA, 21 nt, Human
caguaagaaaaacaucuaauc

SEQ ID NO: 87107 - RNA, 21 nt, Human
caucacaguuaccuggaggac

SEQ ID NO: 87108 - RNA, 22 nt, Human
caugcagaggucaaaaacaggc

SEQ ID NO: 87109 - RNA, 23 nt, Human
ccaaauaccucaguuucagugac

SEQ ID NO: 87110 - RNA, 22 nt, Human
ccaagccaggcaucgagggaua

SEQ ID NO: 87111 - RNA, 22 nt, Human
ccacaauuuauugaacuacaaa

SEQ ID NO: 87112 - RNA, 20 nt, Human
ccacauuaauccacuuuuaa

SEQ ID NO: 87113 - RNA, 26 nt, Human
ccacccuuugaacagcaaggugaccc

SEQ ID NO: 87114 - RNA, 20 nt, Human
cccccgcaucacaguuaccu

SEQ ID NO: 87115 - RNA, 21 nt, Human
cccgcccaccacgcuucuuuu

SEQ ID NO: 87116 - RNA, 19 nt, Human
ccgggugccucucccgcug

SEQ ID NO: 87117 - RNA, 20 nt, Human
ccucaccccacccccaguua

SEQ ID NO: 87118 - RNA, 24 nt, Human
cgagaauaaaucucugaaaaacau

SEQ ID NO: 87119 - RNA, 19 nt, Human
cgucuuaacauuaaaaauu

SEQ ID NO: 87120 - RNA, 23 nt, Human
cgucuuaacauuaaaaauucuag

SEQ ID NO: 87121 - RNA, 19 nt, Human
cuacccucaccccaccccc

SEQ ID NO: 87122 - RNA, 19 nt, Human
cucacaucaugcuauaacu

SEQ ID NO: 87123 - RNA, 22 nt, Human
cucaccccacccccaguuauac

SEQ ID NO: 87124 - RNA, 18 nt, Human
cucaggaaaugggagauu

SEQ ID NO: 87125 - RNA, 22 nt, Human
cuuugggcauuuccucgcgcug

SEQ ID NO: 87126 - RNA, 22 nt, Human
cuuuuaaaaaugaaguuacuau

SEQ ID NO: 87127 - RNA, 22 nt, Human
gaaaaacaucuaauccaacuca

SEQ ID NO: 87128 - RNA, 22 nt, Human
gaaguaaguuguggggccugag

SEQ ID NO: 87129 - RNA, 19 nt, Human
gacagugacaccuuugaaa

SEQ ID NO: 87130 - RNA, 23 nt, Human
gacuuuugagacacaaggggaug

SEQ ID NO: 87131 - RNA, 21 nt, Human
gagcuuccgggugccucuccc

SEQ ID NO: 87132 - RNA, 20 nt, Human
gccagacaccaagccaggca

SEQ ID NO: 87133 - RNA, 18 nt, Human
ggucaaaaacaggcaggc

SEQ ID NO: 87134 - RNA, 22 nt, Human
gugaaaacacagacaguaaaca

SEQ ID NO: 87135 - RNA, 20 nt, Human
gugcagacgccgggagcuuc

SEQ ID NO: 87136 - RNA, 20 nt, Human
uaaaaugaacagaaaaaccc

SEQ ID NO: 87137 - RNA, 23 nt, Human
uaaaaugaacagaaaaacccaca

SEQ ID NO: 87138 - RNA, 23 nt, Human
uaaauccaauaaacaaccaugau

SEQ ID NO: 87139 - RNA, 25 nt, Human
uaaauccaauaaacaaccaugauau

SEQ ID NO: 87140 - RNA, 21 nt, Human
uaagaaaaacaucuaauccaa

SEQ ID NO: 87141 - RNA, 21 nt, Human
uaagaaaaacaucuaauccag

SEQ ID NO: 87142 - RNA, 24 nt, Human
uaauccaacucaugcagaggucaa

SEQ ID NO: 87143 - RNA, 24 nt, Human
uacaaucaacuaaaauuugaugcc

SEQ ID NO: 87144 - RNA, 23 nt, Human
uaccaaaaaaagaaaagaaaaug

SEQ ID NO: 87145 - RNA, 25 nt, Human
uaccaaaaaaagaaaagaaaaugac

SEQ ID NO: 87146 - RNA, 22 nt, Human
uaccaaagaugaaauuauucag

SEQ ID NO: 87147 - RNA, 23 nt, Human
uaguuugaggcucuccuucaguu

SEQ ID NO: 87148 - RNA, 22 nt, Human
uauauacuacacaggacagcuu

SEQ ID NO: 87149 - RNA, 23 nt, Human
uauuuagugauucuucccuucca

SEQ ID NO: 87150 - RNA, 20 nt, Human
ucaaaaacaggcaggcaaga

SEQ ID NO: 87151 - RNA, 21 nt, Human
ucagugucacuauaguuucuu

SEQ ID NO: 87152 - RNA, 21 nt, Human
ucaucugaagcaauuauuuga

SEQ ID NO: 87153 - RNA, 22 nt, Human
uccagaaaauucaagccaguac

SEQ ID NO: 87154 - RNA, 22 nt, Human
uccuacccucaccccaccccca

SEQ ID NO: 87155 - RNA, 24 nt, Human
ucuaguaacuuuuaaaaaugaagu

SEQ ID NO: 87156 - RNA, 24 nt, Human
ucugacagugacaccuuugaaaca

SEQ ID NO: 87157 - RNA, 20 nt, Human
ucuuggugaguucuuggaug

SEQ ID NO: 87158 - RNA, 22 nt, Human
ugaaaaauaaguuuugcaagaa

SEQ ID NO: 87159 - RNA, 23 nt, Human
ugaaaacacagacaguaaacaca

SEQ ID NO: 87160 - RNA, 18 nt, Human
ugacagugacaccuuuga

SEQ ID NO: 87161 - RNA, 18 nt, Human
ugauagcaaagaaaaaau

SEQ ID NO: 87162 - RNA, 25 nt, Human
ugccacagaaauauauuacauagaa

SEQ ID NO: 87163 - RNA, 20 nt, Human
ugccauggagaacuucagau

SEQ ID NO: 87164 - RNA, 22 nt, Human
uggaauggaaaagaaaaauucu

SEQ ID NO: 87165 - RNA, 21 nt, Human
uggaggacucaccaaaccaca

SEQ ID NO: 87166 - RNA, 20 nt, Human
uguaagaugcugcaggaccu

SEQ ID NO: 87167 - RNA, 18 nt, Human
uuaaaugaaagcuuaagu

SEQ ID NO: 87168 - RNA, 23 nt, Human
uuaauaauuuagacaaugcccaa

SEQ ID NO: 87169 - RNA, 22 nt, Human
uuaccacacccaaauaccucag

SEQ ID NO: 87170 - RNA, 22 nt, Human
uuagaacagauaaauccaauaa

SEQ ID NO: 87171 - RNA, 24 nt, Human
uucaacaucugcuaauuauggacu

SEQ ID NO: 87172 - RNA, 22 nt, Human
uugcacuaaggaauuaaaaauc

SEQ ID NO: 87173 - RNA, 18 nt, Human
uuggacuguuuaaauuau

SEQ ID NO: 87174 - RNA, 27 nt, Human
uuguaccaaaaaaagaaaagaaaauga

SEQ ID NO: 87175 - RNA, 24 nt, Human
uuuagaaauuuuccaccacuuccu

SEQ ID NO: 87176 - RNA, 20 nt, Human
uuuauccuucccuuuuuuau

SEQ ID NO: 87177 - RNA, 24 nt, Human
uuugccagacaccaagccaggcau

SEQ ID NO: 87178 - RNA, 21 nt, Human
uuuuaaaaaugaaguuacuau

SEQ ID NO: 87179 - RNA, 19 nt, Human
aaggaagaaaaauuaaaaa

SEQ ID NO: 87180 - RNA, 22 nt, Human
aaggaagaaaaauuaaaaaaaa

SEQ ID NO: 87181 - RNA, 19 nt, Human
acuggagcucagagaagcc

SEQ ID NO: 87182 - RNA, 20 nt, Human
agagagaagagacuucagag

SEQ ID NO: 87183 - RNA, 21 nt, Human
aggaagaaaaauuaaaaaaaa

SEQ ID NO: 87184 - RNA, 22 nt, Human
ccacuggagcucagagaagcca

SEQ ID NO: 87185 - RNA, 25 nt, Human
cuucagggguaggagucugaaggua

SEQ ID NO: 87186 - RNA, 26 nt, Human
gaacaaaaaauggaaacaucacagga

SEQ ID NO: 87187 - RNA, 20 nt, Human
gagcucagagaagccaacag

SEQ ID NO: 87188 - RNA, 20 nt, Human
gcucagagaagccaacagcu

SEQ ID NO: 87189 - RNA, 25 nt, Human
uaaaaaaaaaauuauagaccuaaga

SEQ ID NO: 87190 - RNA, 25 nt, Human
uagggaacaaaaaauggaaacauca

SEQ ID NO: 87191 - RNA, 23 nt, Human
uaguguuuucuucuuccacugga

SEQ ID NO: 87192 - RNA, 23 nt, Human
uugaaguuuuuuaaaccaacauu

SEQ ID NO: 87193 - RNA, 22 nt, Human
uuugaaguuuuuuaaaccaaca

SEQ ID NO: 87194 - RNA, 25 nt, Human
uuuuuuuuuuuucuuugaaguuuuu

SEQ ID NO: 87195 - RNA, 18 nt, Human
uuuuuuuuuuuuucuuug

SEQ ID NO: 87196 - RNA, 18 nt, Human
uuuuuuuuuuuuucuuug

SEQ ID NO: 87197 - RNA, 22 nt, Human
aaaaaaauagacauacaaauca

SEQ ID NO: 87198 - RNA, 23 nt, Human
aagcaguaagaacuaaaauuuaa

SEQ ID NO: 87199 - RNA, 20 nt, Human
acauacaaaucacuuaguug

SEQ ID NO: 87200 - RNA, 25 nt, Human
aggaaggacaaguuucuucucagaa

SEQ ID NO: 87201 - RNA, 22 nt, Human
aggcugccacagaggaccacgc

SEQ ID NO: 87202 - RNA, 22 nt, Human
cuaccucuguggaaaacagcuc

SEQ ID NO: 87203 - RNA, 19 nt, Human
cugaguuuucuuuuucucu

SEQ ID NO: 87204 - RNA, 25 nt, Human
uaaacugaaaaaaauagacauacaa

SEQ ID NO: 87205 - RNA, 21 nt, Human
uacugaguuuucuuuuucucu

SEQ ID NO: 87206 - RNA, 21 nt, Human
ucuguggaaaacagcucugaa

SEQ ID NO: 87207 - RNA, 19 nt, Human
ugaaaaaaauagacauaca

SEQ ID NO: 87208 - RNA, 24 nt, Human
ugaaaaaaauagacauacaaauca

SEQ ID NO: 87209 - RNA, 19 nt, Human
ugcaaagugaacuugaaaa

SEQ ID NO: 87210 - RNA, 18 nt, Human
aacccacaccuccucucc

SEQ ID NO: 87211 - RNA, 24 nt, Human
aacccacucuucuucucucucccg

SEQ ID NO: 87212 - RNA, 19 nt, Human
aagcagccagggacugaga

SEQ ID NO: 87213 - RNA, 22 nt, Human
acccacucuucuucucucuccc

SEQ ID NO: 87214 - RNA, 23 nt, Human
acccugucccuccaggacuucca

SEQ ID NO: 87215 - RNA, 21 nt, Human
acuccucucagccuucugcug

SEQ ID NO: 87216 - RNA, 18 nt, Human
agcuccucuguccccucc

SEQ ID NO: 87217 - RNA, 18 nt, Human
agcuuuccucuccucccc

SEQ ID NO: 87218 - RNA, 19 nt, Human
aggccuccgagggaccccu

SEQ ID NO: 87219 - RNA, 26 nt, Human
aggccuccgagggaccccugcccaag

SEQ ID NO: 87220 - RNA, 21 nt, Human
cacucuucuucucucucccgu

SEQ ID NO: 87221 - RNA, 21 nt, Human
cagccuucugcugcccccagg

SEQ ID NO: 87222 - RNA, 21 nt, Human
ccaaaugccaaagcagccagg

SEQ ID NO: 87223 - RNA, 19 nt, Human
ccacucuucuucucucucc

SEQ ID NO: 87224 - RNA, 19 nt, Human
cccaaaugccaaagcagcc

SEQ ID NO: 87225 - RNA, 20 nt, Human
cccacaccuccucuccguuc

SEQ ID NO: 87226 - RNA, 20 nt, Human
ccccaaaugccaaagcagcc

SEQ ID NO: 87227 - RNA, 20 nt, Human
ccccagggcuaccucuuggu

SEQ ID NO: 87228 - RNA, 18 nt, Human
ccccccucucucagcucc

SEQ ID NO: 87229 - RNA, 27 nt, Human
cccugcccaacgcccugccccccucuc

SEQ ID NO: 87230 - RNA, 21 nt, Human
ccucucagccuucugcugccc

SEQ ID NO: 87231 - RNA, 23 nt, Human
ccucuuuccucugcucuuuuccc

SEQ ID NO: 87232 - RNA, 19 nt, Human
ccugccccccucucucagc

SEQ ID NO: 87233 - RNA, 23 nt, Human
ccuucugggacccugucccucca

SEQ ID NO: 87234 - RNA, 19 nt, Human
cucagcuccucuguccccu

SEQ ID NO: 87235 - RNA, 21 nt, Human
cucagcuccucuguccccucc

SEQ ID NO: 87236 - RNA, 18 nt, Human
cucccgucucucuguguc

SEQ ID NO: 87237 - RNA, 19 nt, Human
cuccuccccacagggaguc

SEQ ID NO: 87238 - RNA, 22 nt, Human
cucuugguuccuaacccacacc

SEQ ID NO: 87239 - RNA, 18 nt, Human
cugccccccucucucagc

SEQ ID NO: 87240 - RNA, 21 nt, Human
cugccccccucucucagcucc

SEQ ID NO: 87241 - RNA, 24 nt, Human
cuuuccucuuuccucugcucuuuu

SEQ ID NO: 87242 - RNA, 19 nt, Human
gcccugccccccucucuca

SEQ ID NO: 87243 - RNA, 21 nt, Human
gcccugccccccucucucagc

SEQ ID NO: 87244 - RNA, 20 nt, Human
gucccaguuccccaaaugcc

SEQ ID NO: 87245 - RNA, 20 nt, Human
uaacccacaccuccucuccg

SEQ ID NO: 87246 - RNA, 23 nt, Human
uagcuccugaucuuccuacuccu

SEQ ID NO: 87247 - RNA, 21 nt, Human
uagcuuuguuuuagggguaac

SEQ ID NO: 87248 - RNA, 27 nt, Human
uauucugucccuuuaauagcuuuguuu

SEQ ID NO: 87249 - RNA, 21 nt, Human
ucccaguuccccaaaugccaa

SEQ ID NO: 87250 - RNA, 23 nt, Human
uccgcccuucaaacccacucuuc

SEQ ID NO: 87251 - RNA, 23 nt, Human
uccucuccguucucuuuucauua

SEQ ID NO: 87252 - RNA, 18 nt, Human
ucucagccuucugcugcc

SEQ ID NO: 87253 - RNA, 20 nt, Human
ucucccgucucucugugucu

SEQ ID NO: 87254 - RNA, 20 nt, Human
ucucucagcuccucuguccc

SEQ ID NO: 87255 - RNA, 23 nt, Human
ucugcucuuuucccggaacccuc

SEQ ID NO: 87256 - RNA, 18 nt, Human
ucugggacccugucccuc

SEQ ID NO: 87257 - RNA, 18 nt, Human
ucuguccccuccuucugg

SEQ ID NO: 87258 - RNA, 23 nt, Human
ucuguccccuccuucugggaccc

SEQ ID NO: 87259 - RNA, 20 nt, Human
ucugugucuuuccucuuucc

SEQ ID NO: 87260 - RNA, 21 nt, Human
ucuucuucucucucccgucuc

SEQ ID NO: 87261 - RNA, 21 nt, Human
ugggacccugucccuccagga

SEQ ID NO: 87262 - RNA, 20 nt, Human
ugguuccuaacccacaccuc

SEQ ID NO: 87263 - RNA, 24 nt, Human
uuuguuuuagggguaacuccccuc

SEQ ID NO: 87264 - RNA, 22 nt, Human
uuuuuuuuuuuuuuaaacagga

SEQ ID NO: 87265 - RNA, 25 nt, Human
uuuuuuuuuuuuuuuuuuaaacagg

SEQ ID NO: 87266 - RNA, 24 nt, Human
aacuaggggucgguuccuucucag

SEQ ID NO: 87267 - RNA, 21 nt, Human
aacugcaaggugcucucaacu

SEQ ID NO: 87268 - RNA, 23 nt, Human
aagcaaaaccuaagcagagagug

SEQ ID NO: 87269 - RNA, 21 nt, Human
aaggaaaaagauauuuaaaaa

SEQ ID NO: 87270 - RNA, 24 nt, Human
acccaggcuagagugcaguggcau

SEQ ID NO: 87271 - RNA, 21 nt, Human
acugcaaccuccgccuccugg

SEQ ID NO: 87272 - RNA, 21 nt, Human
acugcaaccuccgccuccugg

SEQ ID NO: 87273 - RNA, 22 nt, Human
acugcaaccuccgccuccuggg

SEQ ID NO: 87274 - RNA, 18 nt, Human
agaagcagcagacuuucc

SEQ ID NO: 87275 - RNA, 20 nt, Human
agaaggaaaaagauauuuaa

SEQ ID NO: 87276 - RNA, 22 nt, Human
agaaggaaaaagauauuuaaaa

SEQ ID NO: 87277 - RNA, 18 nt, Human
agagggaggaguagaagg

SEQ ID NO: 87278 - RNA, 24 nt, Human
agcuuugaauuccugcugcuuggu

SEQ ID NO: 87279 - RNA, 20 nt, Human
aggaaaaagauauuuaaaaa

SEQ ID NO: 87280 - RNA, 23 nt, Human
aggaaaaagauauuuaaaaagcu

SEQ ID NO: 87281 - RNA, 19 nt, Human
aggaaaauggaggaguugc

SEQ ID NO: 87282 - RNA, 21 nt, Human
aggaaaucagagggagaugcc

SEQ ID NO: 87283 - RNA, 19 nt, Human
aggcaaggaggcacccagc

SEQ ID NO: 87284 - RNA, 25 nt, Human
aggcaaggaggcacccagcagagga

SEQ ID NO: 87285 - RNA, 20 nt, Human
aggggucgguuccuucucag

SEQ ID NO: 87286 - RNA, 20 nt, Human
agugcaguggcaugaccuug

SEQ ID NO: 87287 - RNA, 23 nt, Human
agugcaguggcaugaccuuggcu

SEQ ID NO: 87288 - RNA, 23 nt, Human
agugcaguggcaugaccuuggcu

SEQ ID NO: 87289 - RNA, 21 nt, Human
caacuugauccuuccuguccc

SEQ ID NO: 87290 - RNA, 20 nt, Human
cacaggguucucaccugcgg

SEQ ID NO: 87291 - RNA, 20 nt, Human
caccaagaaguggaacuuga

SEQ ID NO: 87292 - RNA, 19 nt, Human
cagaaggaaaucagaggga

SEQ ID NO: 87293 - RNA, 20 nt, Human
cagaucauccaugucuucuc

SEQ ID NO: 87294 - RNA, 23 nt, Human
cagauugagcuacagagaacacc

SEQ ID NO: 87295 - RNA, 22 nt, Human
cagcaagcagcuuugaauuccu

SEQ ID NO: 87296 - RNA, 19 nt, Human
cauccccaccaagaagugg

SEQ ID NO: 87297 - RNA, 26 nt, Human
cauggucccaaggcaaggaggcaccc

SEQ ID NO: 87298 - RNA, 21 nt, Human
cauguuugcagauugagcuac

SEQ ID NO: 87299 - RNA, 24 nt, Human
cauucuugucugaaagcuuggaga

SEQ ID NO: 87300 - RNA, 25 nt, Human
ccaaagcaagguccuucuccuacgg

SEQ ID NO: 87301 - RNA, 21 nt, Human
ccagcagaggaucccugaggc

SEQ ID NO: 87302 - RNA, 18 nt, Human
ccaugucuucucauucuc

SEQ ID NO: 87303 - RNA, 21 nt, Human
cccagcagaggaucccugagg

SEQ ID NO: 87304 - RNA, 25 nt, Human
ccccuaaauacaugaugccagcccu

SEQ ID NO: 87305 - RNA, 24 nt, Human
ccgccuccuggguucaagcgauuc

SEQ ID NO: 87306 - RNA, 21 nt, Human
ccgcucgcucuccagcugcac

SEQ ID NO: 87307 - RNA, 19 nt, Human
ccuauuuccuccagauuca

SEQ ID NO: 87308 - RNA, 21 nt, Human
ccuccaggacacagcaacaac

SEQ ID NO: 87309 - RNA, 19 nt, Human
ccuccgccuccuggguuca

SEQ ID NO: 87310 - RNA, 22 nt, Human
ccuccuggguucaagcgauucc

SEQ ID NO: 87311 - RNA, 19 nt, Human
ccuggguucaagcgauucc

SEQ ID NO: 87312 - RNA, 20 nt, Human
ccuggguucaagcgauuccc

SEQ ID NO: 87313 - RNA, 22 nt, Human
ccuuccuguccccauuuguccc

SEQ ID NO: 87314 - RNA, 21 nt, Human
cgcgggcuccugcggggcggg

SEQ ID NO: 87315 - RNA, 20 nt, Human
cgcucgcucuccagcugcac

SEQ ID NO: 87316 - RNA, 18 nt, Human
cgcucuggcaaagccccg

SEQ ID NO: 87317 - RNA, 19 nt, Human
cgcucuggcaaagccccgg

SEQ ID NO: 87318 - RNA, 24 nt, Human
cgcucugucacccaggcuagagug

SEQ ID NO: 87319 - RNA, 18 nt, Human
cgguggccgcucgcucuc

SEQ ID NO: 87320 - RNA, 21 nt, Human
cuaaaccacgauuugacaucu

SEQ ID NO: 87321 - RNA, 21 nt, Human
cuagcucucucucccuucuca

SEQ ID NO: 87322 - RNA, 24 nt, Human
cucacacaguuacagcaagcagcu

SEQ ID NO: 87323 - RNA, 19 nt, Human
cucauccccaccaagaagu

SEQ ID NO: 87324 - RNA, 23 nt, Human
cuccuggguucaagcgauuccag

SEQ ID NO: 87325 - RNA, 23 nt, Human
cucucccuucucauccccaccaa

SEQ ID NO: 87326 - RNA, 19 nt, Human
cucucucccuucucauccc

SEQ ID NO: 87327 - RNA, 23 nt, Human
cugcaaccuccgccuccuggguu

SEQ ID NO: 87328 - RNA, 26 nt, Human
cugcacaccgggaccgcgugcgcgca

SEQ ID NO: 87329 - RNA, 21 nt, Human
gaaguggaacuugaaccugcc

SEQ ID NO: 87330 - RNA, 19 nt, Human
gaccuuggcuuacugcaac

SEQ ID NO: 87331 - RNA, 22 nt, Human
gaguugcgccugucagaaacug

SEQ ID NO: 87332 - RNA, 22 nt, Human
gcaaccuccgccuccuggguuc

SEQ ID NO: 87333 - RNA, 19 nt, Human
gcacagauaaccuccugcu

SEQ ID NO: 87334 - RNA, 24 nt, Human
gcauggcuugguuugugauuccag

SEQ ID NO: 87335 - RNA, 22 nt, Human
gcgggcgcgggcugugccgggg

SEQ ID NO: 87336 - RNA, 27 nt, Human
gcggggcgggcgcgggcuguugacggc

SEQ ID NO: 87337 - RNA, 19 nt, Human
gcuagagugcaguggcaug

SEQ ID NO: 87338 - RNA, 18 nt, Human
gcucgcucuccagcugca

SEQ ID NO: 87339 - RNA, 18 nt, Human
gcucuggcaaagccccgg

SEQ ID NO: 87340 - RNA, 25 nt, Human
gcucugucacccaggcuagagugca

SEQ ID NO: 87341 - RNA, 22 nt, Human
ggagaagcagcagacuuuccag

SEQ ID NO: 87342 - RNA, 22 nt, Human
ggagguuggauuuggacuuaau

SEQ ID NO: 87343 - RNA, 19 nt, Human
gggcgcgggcugugccggg

SEQ ID NO: 87344 - RNA, 24 nt, Human
uaaaaagcuaugcuucaagaggac

SEQ ID NO: 87345 - RNA, 24 nt, Human
uaaaaucuguagaguauaaaacau

SEQ ID NO: 87346 - RNA, 19 nt, Human
uaaagguuuugucauagca

SEQ ID NO: 87347 - RNA, 21 nt, Human
uacugcaaccuccgccuccug

SEQ ID NO: 87348 - RNA, 23 nt, Human
uacugcaaccuccgccuccuggg

SEQ ID NO: 87349 - RNA, 23 nt, Human
uagagugcaguggcaugaccuug

SEQ ID NO: 87350 - RNA, 24 nt, Human
uagagugcaguggcaugaccuugg

SEQ ID NO: 87351 - RNA, 19 nt, Human
uccagaggaaagaaguuga

SEQ ID NO: 87352 - RNA, 20 nt, Human
ucccaaggcaaggaggcacc

SEQ ID NO: 87353 - RNA, 19 nt, Human
uccuggguucaagcgauuc

SEQ ID NO: 87354 - RNA, 19 nt, Human
ucuaaaccacgauuugaca

SEQ ID NO: 87355 - RNA, 23 nt, Human
ucuaaaccacgauuugacaucuu

SEQ ID NO: 87356 - RNA, 19 nt, Human
ucucauccccaccaagaag

SEQ ID NO: 87357 - RNA, 19 nt, Human
ucucgcucugucacccagg

SEQ ID NO: 87358 - RNA, 23 nt, Human
ucucgcucugucacccaggcuag

SEQ ID NO: 87359 - RNA, 26 nt, Human
ucucgcucugucacccaggcuagagu

SEQ ID NO: 87360 - RNA, 27 nt, Human
ucucgcucugucacccaggcuagagug

SEQ ID NO: 87361 - RNA, 24 nt, Human
ucugucacccaggcuagagugcag

SEQ ID NO: 87362 - RNA, 22 nt, Human
ucugugauccagaggacaggac

SEQ ID NO: 87363 - RNA, 20 nt, Human
ucuuuuuucucucuacaacu

SEQ ID NO: 87364 - RNA, 24 nt, Human
ugaaagcacgcucuggcaaagccc

SEQ ID NO: 87365 - RNA, 23 nt, Human
ugaaagcuuggagaagcagcaga

SEQ ID NO: 87366 - RNA, 24 nt, Human
ugaaauauauuugaucuaaaccac

SEQ ID NO: 87367 - RNA, 19 nt, Human
ugaaccugccauucccuaa

SEQ ID NO: 87368 - RNA, 22 nt, Human
ugagauggagucucgcucuguc

SEQ ID NO: 87369 - RNA, 21 nt, Human
ugcagauugagcuacagagaa

SEQ ID NO: 87370 - RNA, 20 nt, Human
ugcaguggcaugaccuuggc

SEQ ID NO: 87371 - RNA, 24 nt, Human
ugcugcuuggucugagagugcauc

SEQ ID NO: 87372 - RNA, 21 nt, Human
uggcacugacucaucuccaca

SEQ ID NO: 87373 - RNA, 21 nt, Human
uggcaugaccuuggcuuacug

SEQ ID NO: 87374 - RNA, 23 nt, Human
ugggguggccauggucccaaggc

SEQ ID NO: 87375 - RNA, 18 nt, Human
uggucccaaggcaaggag

SEQ ID NO: 87376 - RNA, 18 nt, Human
uguccagagagccgaagu

SEQ ID NO: 87377 - RNA, 20 nt, Human
ugucugugauccagaggaca

SEQ ID NO: 87378 - RNA, 24 nt, Human
uuacugcaaccuccgccuccuggg

SEQ ID NO: 87379 - RNA, 25 nt, Human
uuacugcaaccuccgccuccugggu

SEQ ID NO: 87380 - RNA, 27 nt, Human
uuacugcaaccuccgccuccuggguuc

SEQ ID NO: 87381 - RNA, 24 nt, Human
uuagagucagagggaggaguagaa

SEQ ID NO: 87382 - RNA, 20 nt, Human
uucaaaggcagauuggguca

SEQ ID NO: 87383 - RNA, 22 nt, Human
uucaaaggcagauugggucauc

SEQ ID NO: 87384 - RNA, 18 nt, Human
uuccagaauucagaccac

SEQ ID NO: 87385 - RNA, 21 nt, Human
uucccaagcaaaaccuaagca

SEQ ID NO: 87386 - RNA, 24 nt, Human
uucuacagucauuuuguuucugcc

SEQ ID NO: 87387 - RNA, 21 nt, Human
uuguauuauucuguccuuaca

SEQ ID NO: 87388 - RNA, 25 nt, Human
uuuuuuuuuuuugagauggagucuc

SEQ ID NO: 87389 - RNA, 22 nt, Human
uuuuuuuuuuuuuugagaugga

SEQ ID NO: 87390 - RNA, 25 nt, Human
aaacuuccccugcaacuaaacagag

SEQ ID NO: 87391 - RNA, 21 nt, Human
aacaacacagcgauuuccuca

SEQ ID NO: 87392 - RNA, 19 nt, Human
aacacagcgauuuccucau

SEQ ID NO: 87393 - RNA, 20 nt, Human
aacacagcgauuuccucauu

SEQ ID NO: 87394 - RNA, 19 nt, Human
agagagagggagggaggag

SEQ ID NO: 87395 - RNA, 22 nt, Human
agaggacuuugggguauauccc

SEQ ID NO: 87396 - RNA, 18 nt, Human
aggagagaucccgcagua

SEQ ID NO: 87397 - RNA, 20 nt, Human
aggcaugaagggaagucauc

SEQ ID NO: 87398 - RNA, 18 nt, Human
agggaaagggccauaaaa

SEQ ID NO: 87399 - RNA, 18 nt, Human
agugagagagagagagag

SEQ ID NO: 87400 - RNA, 20 nt, Human
augaagggaagucauccaca

SEQ ID NO: 87401 - RNA, 21 nt, Human
caguaggguaucauggguuuc

SEQ ID NO: 87402 - RNA, 24 nt, Human
caguaggguaucauggguuucugg

SEQ ID NO: 87403 - RNA, 23 nt, Human
cccucucucuuuaucucccucug

SEQ ID NO: 87404 - RNA, 18 nt, Human
ccuacaccccauuuuaga

SEQ ID NO: 87405 - RNA, 18 nt, Human
ccucucuaggagaugucc

SEQ ID NO: 87406 - RNA, 23 nt, Human
cugaaggcucugcaguucuuccu

SEQ ID NO: 87407 - RNA, 18 nt, Human
cugucucugucucugugg

SEQ ID NO: 87408 - RNA, 21 nt, Human
cuuccuggaaugacagccugg

SEQ ID NO: 87409 - RNA, 24 nt, Human
ggcagagagagagggagggaggag

SEQ ID NO: 87410 - RNA, 20 nt, Human
gggaaagggccauaaaagug

SEQ ID NO: 87411 - RNA, 19 nt, Human
gggaaggaggacaucugcu

SEQ ID NO: 87412 - RNA, 22 nt, Human
gggaaggaggacaucugcuuac

SEQ ID NO: 87413 - RNA, 18 nt, Human
ggggacugggaauuugag

SEQ ID NO: 87414 - RNA, 23 nt, Human
uauaucccaaacuuccccugcaa

SEQ ID NO: 87415 - RNA, 23 nt, Human
ucaaaaauauacaacuucaacag

SEQ ID NO: 87416 - RNA, 22 nt, Human
ucucugucucugugggcuucca

SEQ ID NO: 87417 - RNA, 22 nt, Human
ucucugugggcuuccaggggau

SEQ ID NO: 87418 - RNA, 19 nt, Human
ucugcagucuccacuccac

SEQ ID NO: 87419 - RNA, 19 nt, Human
ucugcagucuccacuccac

SEQ ID NO: 87420 - RNA, 21 nt, Human
ugagagagagagagagagagc

SEQ ID NO: 87421 - RNA, 20 nt, Human
ugcuuuucuugcugucucug

SEQ ID NO: 87422 - RNA, 22 nt, Human
uggccagauccuacaccccauu

SEQ ID NO: 87423 - RNA, 23 nt, Human
uugaucaaaaauauacaacuuca

SEQ ID NO: 87424 - RNA, 18 nt, Human
uuggagaggcugaaggcu

SEQ ID NO: 87425 - RNA, 23 nt, Human
uuucuugcugucucugucucugu

SEQ ID NO: 87426 - RNA, 24 nt, Human
uuuuuuuuuuaaagucagaaacuu

SEQ ID NO: 87427 - RNA, 21 nt, Human
uuuuuuuuuuuuuuuuuaaag

SEQ ID NO: 87428 - RNA, 20 nt, Human
aaagcaccaaccagccacag

SEQ ID NO: 87429 - RNA, 22 nt, Human
aagcaccaaccagccacagcag

SEQ ID NO: 87430 - RNA, 26 nt, Human
aaucaugacuauuuuaccugauuugg

SEQ ID NO: 87431 - RNA, 22 nt, Human
acaaagcaaccaggguccaaau

SEQ ID NO: 87432 - RNA, 24 nt, Human
acuaccauaaacaaagcaccaacc

SEQ ID NO: 87433 - RNA, 23 nt, Human
agacacaaagcaaccagggucca

SEQ ID NO: 87434 - RNA, 22 nt, Human
agagaauauaucuaaaauacaa

SEQ ID NO: 87435 - RNA, 22 nt, Human
caaagcaccaaccagccacagg

SEQ ID NO: 87436 - RNA, 18 nt, Human
ccauaaacaaagcaccaa

SEQ ID NO: 87437 - RNA, 21 nt, Human
cuggcggcggcggcuugggcg

SEQ ID NO: 87438 - RNA, 18 nt, Human
uaaauuacaacagaauuc

SEQ ID NO: 87439 - RNA, 19 nt, Human
uaccauaaacaaagcacca

SEQ ID NO: 87440 - RNA, 21 nt, Human
uagaaaacuagacacaaagca

SEQ ID NO: 87441 - RNA, 25 nt, Human
uagaaaacuagacacaaagcaacca

SEQ ID NO: 87442 - RNA, 20 nt, Human
uagaucugugcuuagcuaaa

SEQ ID NO: 87443 - RNA, 22 nt, Human
uaguaagucuaucaaguaagag

SEQ ID NO: 87444 - RNA, 20 nt, Human
uaucaaguaagagaugaagg

SEQ ID NO: 87445 - RNA, 22 nt, Human
ucacaacucuaauuauaacaau

SEQ ID NO: 87446 - RNA, 20 nt, Human
ucuguaauucaaaagucauu

SEQ ID NO: 87447 - RNA, 23 nt, Human
ugcacucaaccauucuacuuucc

SEQ ID NO: 87448 - RNA, 19 nt, Human
ugcuauggauuugcacuca

SEQ ID NO: 87449 - RNA, 21 nt, Human
ugugcuauggauuugcacuca

SEQ ID NO: 87450 - RNA, 22 nt, Human
ugugucaagcaugacaauuggu

SEQ ID NO: 87451 - RNA, 20 nt, Human
uugaaaucaugaacauuuau

SEQ ID NO: 87452 - RNA, 20 nt, Human
aaauuaaaaauaaauggccc

SEQ ID NO: 87453 - RNA, 25 nt, Human
aacucguuuguuugccugcccccua

SEQ ID NO: 87454 - RNA, 22 nt, Human
accugcuuccucucuccuuccu

SEQ ID NO: 87455 - RNA, 18 nt, Human
agaaacacaacagaggca

SEQ ID NO: 87456 - RNA, 22 nt, Human
agcaccagaaggaggcaaggaa

SEQ ID NO: 87457 - RNA, 18 nt, Human
agcgauccgguuacagag

SEQ ID NO: 87458 - RNA, 23 nt, Human
aggcaaggaaccaagcucuccaa

SEQ ID NO: 87459 - RNA, 22 nt, Human
aggugacgggggcggagguggg

SEQ ID NO: 87460 - RNA, 19 nt, Human
auuguguuuucuuuucacu

SEQ ID NO: 87461 - RNA, 21 nt, Human
caaaugugaaaucuaugcuuu

SEQ ID NO: 87462 - RNA, 21 nt, Human
caacuacauuuaugaagaaga

SEQ ID NO: 87463 - RNA, 26 nt, Human
caccugcuuccucucuccuuccucca

SEQ ID NO: 87464 - RNA, 18 nt, Human
caggcaacauguaaaauc

SEQ ID NO: 87465 - RNA, 24 nt, Human
caucuccucuucuucucucucaaa

SEQ ID NO: 87466 - RNA, 25 nt, Human
caucuccucuucuucucucucaaaa

SEQ ID NO: 87467 - RNA, 22 nt, Human
cauguaaaauccuaggagcaaa

SEQ ID NO: 87468 - RNA, 21 nt, Human
cauucacucuuuuguguucua

SEQ ID NO: 87469 - RNA, 22 nt, Human
cauucauuccagccuccaguga

SEQ ID NO: 87470 - RNA, 24 nt, Human
cauucauuccagccuccagugaga

SEQ ID NO: 87471 - RNA, 20 nt, Human
ccaaguaaucuuaguagcua

SEQ ID NO: 87472 - RNA, 21 nt, Human
ccaaugaauuccaagagcggg

SEQ ID NO: 87473 - RNA, 19 nt, Human
ccccucccugcgcucuccc

SEQ ID NO: 87474 - RNA, 24 nt, Human
cccuuugcaggcaacauguaaaau

SEQ ID NO: 87475 - RNA, 23 nt, Human
ccugcuuccucucuccuuccucc

SEQ ID NO: 87476 - RNA, 25 nt, Human
ccuggccccuccaucuccucuucuu

SEQ ID NO: 87477 - RNA, 24 nt, Human
ccuucagguaaagaaaaauacuag

SEQ ID NO: 87478 - RNA, 24 nt, Human
cuaaaaucuacaucccggcggcuc

SEQ ID NO: 87479 - RNA, 20 nt, Human
cuaggagcaaaggaugggaa

SEQ ID NO: 87480 - RNA, 19 nt, Human
cucaguguggaaaaaugaa

SEQ ID NO: 87481 - RNA, 24 nt, Human
cucauaauauaaaaauaaaaacau

SEQ ID NO: 87482 - RNA, 25 nt, Human
cuccagugagaaacacaagguaccc

SEQ ID NO: 87483 - RNA, 19 nt, Human
cuccgugcuggacggcucc

SEQ ID NO: 87484 - RNA, 21 nt, Human
cucuggacacuugugcgaguu

SEQ ID NO: 87485 - RNA, 22 nt, Human
cuggccccuccaucuccucuuc

SEQ ID NO: 87486 - RNA, 18 nt, Human
cuucuucuuugaaacuuu

SEQ ID NO: 87487 - RNA, 18 nt, Human
gagaaacacaacagaggc

SEQ ID NO: 87488 - RNA, 19 nt, Human
gaggugacgggggcggagg

SEQ ID NO: 87489 - RNA, 22 nt, Human
gcuuccucucuccuuccuccau

SEQ ID NO: 87490 - RNA, 22 nt, Human
gggcggaggugggcgaaggggc

SEQ ID NO: 87491 - RNA, 18 nt, Human
ggggaugggguggggcag

SEQ ID NO: 87492 - RNA, 20 nt, Human
ggggaugggguggggcaggg

SEQ ID NO: 87493 - RNA, 23 nt, Human
ggggcggaggugggcgaaggggc

SEQ ID NO: 87494 - RNA, 21 nt, Human
gguuacagaggcuggaaagaa

SEQ ID NO: 87495 - RNA, 22 nt, Human
guggcuccuggccccuccaucu

SEQ ID NO: 87496 - RNA, 18 nt, Human
guucuagugaucauucau

SEQ ID NO: 87497 - RNA, 21 nt, Human
uaaaaauaaaaacaugaaguu

SEQ ID NO: 87498 - RNA, 22 nt, Human
uaaaaauaaauggcccuccuuc

SEQ ID NO: 87499 - RNA, 25 nt, Human
uaacagaaaaacuggugcccaauua

SEQ ID NO: 87500 - RNA, 19 nt, Human
uaagagcaccagaaggagg

SEQ ID NO: 87501 - RNA, 23 nt, Human
uaagauggacaacucauaauaua

SEQ ID NO: 87502 - RNA, 19 nt, Human
uacauuuaugaagaagaaa

SEQ ID NO: 87503 - RNA, 24 nt, Human
uacuaggauaaauuccaacuacau

SEQ ID NO: 87504 - RNA, 20 nt, Human
uaggaaagaugauuauuaca

SEQ ID NO: 87505 - RNA, 18 nt, Human
uaggucagcgaggguggg

SEQ ID NO: 87506 - RNA, 26 nt, Human
uaguagcuaaaacuucaauaaaugac

SEQ ID NO: 87507 - RNA, 23 nt, Human
uauuguguuuucuuuucacuggu

SEQ ID NO: 87508 - RNA, 21 nt, Human
uccaucucuguuucuucuucu

SEQ ID NO: 87509 - RNA, 20 nt, Human
ucccggcggcucuugcagcc

SEQ ID NO: 87510 - RNA, 18 nt, Human
uccuaggagcaaaggaug

SEQ ID NO: 87511 - RNA, 22 nt, Human
uccucucuccuuccuccaugca

SEQ ID NO: 87512 - RNA, 23 nt, Human
ucuauagucauuuuaauuucugg

SEQ ID NO: 87513 - RNA, 21 nt, Human
ucuucucucucaaaacugcag

SEQ ID NO: 87514 - RNA, 19 nt, Human
ucuuggggauggggugggg

SEQ ID NO: 87515 - RNA, 22 nt, Human
ugaaauuaaaaauaaauggccc

SEQ ID NO: 87516 - RNA, 27 nt, Human
ugaagaagaaauucaaauacugaauca

SEQ ID NO: 87517 - RNA, 19 nt, Human
ugaucaguacaacugcuuu

SEQ ID NO: 87518 - RNA, 19 nt, Human
ugcaaagaaaaauguagug

SEQ ID NO: 87519 - RNA, 21 nt, Human
ugcccccuaaguuugacuccc

SEQ ID NO: 87520 - RNA, 19 nt, Human
ugcgcucucccgggagucg

SEQ ID NO: 87521 - RNA, 30 nt, Human
ugcuuugacuucaagugucaucauucacuu

SEQ ID NO: 87522 - RNA, 21 nt, Human
uggacaacucauaauauaaaa

SEQ ID NO: 87523 - RNA, 18 nt, Human
uggacacuugugcgaguu

SEQ ID NO: 87524 - RNA, 24 nt, Human
uggaguaagagcaccagaaggagg

SEQ ID NO: 87525 - RNA, 24 nt, Human
uggccacgaacuaaaaucuacauc

SEQ ID NO: 87526 - RNA, 24 nt, Human
uggcuccuggccccuccaucuccu

SEQ ID NO: 87527 - RNA, 18 nt, Human
ugggaagaaaggguccgg

SEQ ID NO: 87528 - RNA, 19 nt, Human
ugggaagaaaggguccgga

SEQ ID NO: 87529 - RNA, 18 nt, Human
ugguagguuuccuuuccu

SEQ ID NO: 87530 - RNA, 22 nt, Human
uggugcccaauagcuagccauu

SEQ ID NO: 87531 - RNA, 21 nt, Human
uuaauuucuggcuuauguuua

SEQ ID NO: 87532 - RNA, 20 nt, Human
uuaggucagcgagggugggg

SEQ ID NO: 87533 - RNA, 24 nt, Human
uucagguaaagaaaaauacuagga

SEQ ID NO: 87534 - RNA, 22 nt, Human
uuccuccgugcuggacggcucc

SEQ ID NO: 87535 - RNA, 27 nt, Human
uuuaaaaauaucuuuacucuuccaucu

SEQ ID NO: 87536 - RNA, 19 nt, Human
aaggaccggaagccuggaa

SEQ ID NO: 87537 - RNA, 21 nt, Human
aaggaccggaagccuggaacu

SEQ ID NO: 87538 - RNA, 21 nt, Human
cuugcgggacagcaaagaguc

SEQ ID NO: 87539 - RNA, 24 nt, Human
gaagccuggaacuuggagagcuga

SEQ ID NO: 87540 - RNA, 21 nt, Human
ugccuaaagucccaccuggga

SEQ ID NO: 87541 - RNA, 22 nt, Human
ugggaaggcuaaggaccggaag

SEQ ID NO: 87542 - RNA, 28 nt, Human
uuggagagcugaggcaacagagaggcug

SEQ ID NO: 87543 - RNA, 26 nt, Human
aaagcaaaagcaaaauacugccuaga

SEQ ID NO: 87544 - RNA, 23 nt, Human
aagcaaaagcaaaauacugccua

SEQ ID NO: 87545 - RNA, 24 nt, Human
aagcaaaauacugccuagauaugg

SEQ ID NO: 87546 - RNA, 23 nt, Human
agcgucucuccagaucacgaacc

SEQ ID NO: 87547 - RNA, 22 nt, Human
cuccagaucacgaaccuagccg

SEQ ID NO: 87548 - RNA, 18 nt, Human
uaaagcaaaagcaaaaua

SEQ ID NO: 87549 - RNA, 23 nt, Human
uaaagcaaaagcaaaauacugcc

SEQ ID NO: 87550 - RNA, 22 nt, Human
uaagcuaguauauauuaaagca

SEQ ID NO: 87551 - RNA, 20 nt, Human
ucaguucccaguuaaguugc

SEQ ID NO: 87552 - RNA, 18 nt, Human
ucccaguuaaguugcagg

SEQ ID NO: 87553 - RNA, 23 nt, Human
aaggaaaggucaggcugguuuau

SEQ ID NO: 87554 - RNA, 18 nt, Human
acugaagccaucucacuu

SEQ ID NO: 87555 - RNA, 21 nt, Human
aggggagcagcguguuccaga

SEQ ID NO: 87556 - RNA, 21 nt, Human
caggggagcagcguguuccag

SEQ ID NO: 87557 - RNA, 19 nt, Human
ccaggaugaucguuucccc

SEQ ID NO: 87558 - RNA, 18 nt, Human
ccauuuccuuuaaguuuc

SEQ ID NO: 87559 - RNA, 20 nt, Human
cucaugaacugaagccaucu

SEQ ID NO: 87560 - RNA, 18 nt, Human
ggggagcagcguguucca

SEQ ID NO: 87561 - RNA, 23 nt, Human
gggugcggcugcagcggacaggc

SEQ ID NO: 87562 - RNA, 24 nt, Human
ucaauuuccacuggugaugucuaa

SEQ ID NO: 87563 - RNA, 19 nt, Human
ucagaaucccaacagcugc

SEQ ID NO: 87564 - RNA, 22 nt, Human
ugcggcugcagcggacaggcac

SEQ ID NO: 87565 - RNA, 24 nt, Human
uggugaugucuaacucagaucccg

SEQ ID NO: 87566 - RNA, 21 nt, Human
agagcagaggcagccccaggc

SEQ ID NO: 87567 - RNA, 19 nt, Human
agagggcagcucugcccac

SEQ ID NO: 87568 - RNA, 18 nt, Human
agccagggccugcccgug

SEQ ID NO: 87569 - RNA, 19 nt, Human
aggugcgugcauggcagag

SEQ ID NO: 87570 - RNA, 19 nt, Human
agguggcuuuggugacugg

SEQ ID NO: 87571 - RNA, 19 nt, Human
cagguggcuggagggagaa

SEQ ID NO: 87572 - RNA, 19 nt, Human
cccauccagaagccuccag

SEQ ID NO: 87573 - RNA, 21 nt, Human
cccuaguggccggcuaggcag

SEQ ID NO: 87574 - RNA, 22 nt, Human
ccugcagaagagguaaugccga

SEQ ID NO: 87575 - RNA, 23 nt, Human
ccugcagaagagguaaugccgag

SEQ ID NO: 87576 - RNA, 19 nt, Human
gagccugcagaagagguaa

SEQ ID NO: 87577 - RNA, 18 nt, Human
gagggagaaggccacguc

SEQ ID NO: 87578 - RNA, 21 nt, Human
gagguucccagggucuuuggg

SEQ ID NO: 87579 - RNA, 22 nt, Human
gccagggccugcccguggcagc

SEQ ID NO: 87580 - RNA, 18 nt, Human
ggacaaggggagauacug

SEQ ID NO: 87581 - RNA, 23 nt, Human
ggagagcagaggcagccccaggc

SEQ ID NO: 87582 - RNA, 22 nt, Human
ggcagccccaggcuuggacccu

SEQ ID NO: 87583 - RNA, 19 nt, Human
ggcagcucugcccaccucu

SEQ ID NO: 87584 - RNA, 18 nt, Human
ggcuuuggugacugggug

SEQ ID NO: 87585 - RNA, 20 nt, Human
ggggcugcugccacugccag

SEQ ID NO: 87586 - RNA, 24 nt, Human
gggucuuggagagcagaggcagcc

SEQ ID NO: 87587 - RNA, 18 nt, Human
uauagccagggccugccc

SEQ ID NO: 87588 - RNA, 22 nt, Human
ucaagggucccauccagaagcc

SEQ ID NO: 87589 - RNA, 25 nt, Human
uccccagcaccccccagggaggaag

SEQ ID NO: 87590 - RNA, 20 nt, Human
ugaccaaggagcaaacuggc

SEQ ID NO: 87591 - RNA, 23 nt, Human
ugccccagacucaagggucccau

SEQ ID NO: 87592 - RNA, 23 nt, Human
ugcgugcauggcagagccugcag

SEQ ID NO: 87593 - RNA, 22 nt, Human
ugcuuagcuccuguccuuccug

SEQ ID NO: 87594 - RNA, 21 nt, Human
uggaagcccuugagaagaugg

SEQ ID NO: 87595 - RNA, 21 nt, Human
uggacccugcuuagcuccugu

SEQ ID NO: 87596 - RNA, 22 nt, Human
uggcuuuggugacugggugggg

SEQ ID NO: 87597 - RNA, 24 nt, Human
ugggucuuggagagcagaggcagc

SEQ ID NO: 87598 - RNA, 21 nt, Human
uggugcccuaguggccggcua

SEQ ID NO: 87599 - RNA, 20 nt, Human
ugucauguagguggcuuugg

SEQ ID NO: 87600 - RNA, 21 nt, Human
ccccucagaugccucuggcug

SEQ ID NO: 87601 - RNA, 23 nt, Human
ccggcucccccucagaugccucu

SEQ ID NO: 87602 - RNA, 20 nt, Human
ccucagaugccucuggcugg

SEQ ID NO: 87603 - RNA, 21 nt, Human
cuuggcaguuaaaaggaagug

SEQ ID NO: 87604 - RNA, 20 nt, Human
gcuucucacauucuccaaga

SEQ ID NO: 87605 - RNA, 19 nt, Human
guuaccggcucccccucag

SEQ ID NO: 87606 - RNA, 24 nt, Human
uauaaauauuuauuuuaaaaaauu

SEQ ID NO: 87607 - RNA, 22 nt, Human
uuucuuggcaguuaaaaggaag

SEQ ID NO: 87608 - RNA, 24 nt, Human
aaaaauucacagcgccugugagga

SEQ ID NO: 87609 - RNA, 26 nt, Human
aagaaccuucgcugaaagcccauggc

SEQ ID NO: 87610 - RNA, 18 nt, Human
aagagcaucaccacgacc

SEQ ID NO: 87611 - RNA, 19 nt, Human
acugguuuuuggccugucu

SEQ ID NO: 87612 - RNA, 21 nt, Human
agaaaacaaaguugcccuuuc

SEQ ID NO: 87613 - RNA, 22 nt, Human
agaaaccguggaaagcgcuggc

SEQ ID NO: 87614 - RNA, 20 nt, Human
agaccuccgaaguuggccag

SEQ ID NO: 87615 - RNA, 23 nt, Human
agagccucccguuggcccugccc

SEQ ID NO: 87616 - RNA, 19 nt, Human
agcaacagaaaccguggaa

SEQ ID NO: 87617 - RNA, 22 nt, Human
agccggccaauccucgucacag

SEQ ID NO: 87618 - RNA, 21 nt, Human
aggaaaaagaagaaaacaaag

SEQ ID NO: 87619 - RNA, 23 nt, Human
aggaaggaagucccaccccgccu

SEQ ID NO: 87620 - RNA, 22 nt, Human
aggaggccuggccggggaaccc

SEQ ID NO: 87621 - RNA, 21 nt, Human
aggaguuaaaaagagcaucac

SEQ ID NO: 87622 - RNA, 21 nt, Human
agggguccucggagcgcaggc

SEQ ID NO: 87623 - RNA, 23 nt, Human
aucaccacgaccucgcuacuggu

SEQ ID NO: 87624 - RNA, 23 nt, Human
aucagcuccccuccgaugcccaa

SEQ ID NO: 87625 - RNA, 19 nt, Human
auggcagagaaugagucuc

SEQ ID NO: 87626 - RNA, 19 nt, Human
caccacgaccucgcuacug

SEQ ID NO: 87627 - RNA, 20 nt, Human
caccacgcaccuugcagagc

SEQ ID NO: 87628 - RNA, 26 nt, Human
cacgcaccuugcagagcgugcgcacg

SEQ ID NO: 87629 - RNA, 25 nt, Human
cacggccagaccuccgaaguuggcc

SEQ ID NO: 87630 - RNA, 19 nt, Human
cagaaaacacaaaucucac

SEQ ID NO: 87631 - RNA, 28 nt, Human
cagcacggccuucuucccugaggggucc

SEQ ID NO: 87632 - RNA, 19 nt, Human
cagcaguucuuuaggaaca

SEQ ID NO: 87633 - RNA, 24 nt, Human
cagccaccccccuuauugggcaaa

SEQ ID NO: 87634 - RNA, 23 nt, Human
cauacacacaccuacuacacaga

SEQ ID NO: 87635 - RNA, 20 nt, Human
caugacccagggaugggggc

SEQ ID NO: 87636 - RNA, 19 nt, Human
ccaaucugcuccacagccg

SEQ ID NO: 87637 - RNA, 20 nt, Human
ccaccccgccuuccagcagc

SEQ ID NO: 87638 - RNA, 19 nt, Human
ccaccgcgcugacgcccgc

SEQ ID NO: 87639 - RNA, 21 nt, Human
ccagcagcagcgagccugugu

SEQ ID NO: 87640 - RNA, 25 nt, Human
ccccaagaacaugccaaucugcucc

SEQ ID NO: 87641 - RNA, 18 nt, Human
ccccgaagcccaggccca

SEQ ID NO: 87642 - RNA, 20 nt, Human
ccccuuauugggcaaaggag

SEQ ID NO: 87643 - RNA, 22 nt, Human
cccgaagcccaggcccacggcc

SEQ ID NO: 87644 - RNA, 18 nt, Human
cccugcaccuuccccaag

SEQ ID NO: 87645 - RNA, 20 nt, Human
ccgaagcccaggcccacggc

SEQ ID NO: 87646 - RNA, 18 nt, Human
ccgaugcccaagugcugc

SEQ ID NO: 87647 - RNA, 20 nt, Human
ccggaucuguuuaccaaccc

SEQ ID NO: 87648 - RNA, 18 nt, Human
ccguggacugcagggccc

SEQ ID NO: 87649 - RNA, 18 nt, Human
ccucccguuggcccugcc

SEQ ID NO: 87650 - RNA, 24 nt, Human
ccucuccggacagaggaaggaagu

SEQ ID NO: 87651 - RNA, 26 nt, Human
ccugcaccuuccccaagaacaugcca

SEQ ID NO: 87652 - RNA, 19 nt, Human
ccuucagggcuggcugcag

SEQ ID NO: 87653 - RNA, 18 nt, Human
cgcggagccggccugggc

SEQ ID NO: 87654 - RNA, 22 nt, Human
cgcuggccaccgcgcugacgcc

SEQ ID NO: 87655 - RNA, 25 nt, Human
cuccacagccguggacugcagggcc

SEQ ID NO: 87656 - RNA, 20 nt, Human
cuccaggcagccaccccccu

SEQ ID NO: 87657 - RNA, 22 nt, Human
cucccagcuccagcccauuggc

SEQ ID NO: 87658 - RNA, 22 nt, Human
cugaacagagauuggaagggag

SEQ ID NO: 87659 - RNA, 20 nt, Human
cugaagagaagucuguggag

SEQ ID NO: 87660 - RNA, 21 nt, Human
cugcaccuuccccaagaacau

SEQ ID NO: 87661 - RNA, 22 nt, Human
cugccagugccccgaagcccag

SEQ ID NO: 87662 - RNA, 21 nt, Human
cugggguuugcaaagagccuc

SEQ ID NO: 87663 - RNA, 18 nt, Human
cuguuugugcugcuuguu

SEQ ID NO: 87664 - RNA, 20 nt, Human
cuucgcugaaagcccauggc

SEQ ID NO: 87665 - RNA, 18 nt, Human
cuucuuggcgaccucugc

SEQ ID NO: 87666 - RNA, 22 nt, Human
cuugacaaggccuuuagccacc

SEQ ID NO: 87667 - RNA, 20 nt, Human
cuuguucucggggcgagccu

SEQ ID NO: 87668 - RNA, 24 nt, Human
gaaaacacaaaucucacucuagaa

SEQ ID NO: 87669 - RNA, 21 nt, Human
gaaccagccccacaggccugg

SEQ ID NO: 87670 - RNA, 23 nt, Human
gaagagaagucuguggaggcucc

SEQ ID NO: 87671 - RNA, 22 nt, Human
gacaggaaaggacuggaaccca

SEQ ID NO: 87672 - RNA, 23 nt, Human
gacaggaaaggacuggaacccag

SEQ ID NO: 87673 - RNA, 20 nt, Human
gagcaucaccacgaccucgc

SEQ ID NO: 87674 - RNA, 24 nt, Human
gagccucccguuggcccugcccag

SEQ ID NO: 87675 - RNA, 20 nt, Human
gagggguccucggagcgcag

SEQ ID NO: 87676 - RNA, 21 nt, Human
gcaaaauauucuucauguuua

SEQ ID NO: 87677 - RNA, 19 nt, Human
gcaccuuccccaagaacau

SEQ ID NO: 87678 - RNA, 24 nt, Human
gccccacaggccugggccucgcag

SEQ ID NO: 87679 - RNA, 21 nt, Human
gccccgaagcccaggcccacg

SEQ ID NO: 87680 - RNA, 22 nt, Human
gccucggacaggaaaggacugg

SEQ ID NO: 87681 - RNA, 19 nt, Human
gccugggcguggcccgcag

SEQ ID NO: 87682 - RNA, 23 nt, Human
gcgcuggccaccgcgcugacgcc

SEQ ID NO: 87683 - RNA, 21 nt, Human
ggaaaggacuggaacccagca

SEQ ID NO: 87684 - RNA, 20 nt, Human
ggacucucucccuucugcuu

SEQ ID NO: 87685 - RNA, 24 nt, Human
ggaggaggccuggccggggaaccc

SEQ ID NO: 87686 - RNA, 20 nt, Human
ggcauucccuguuccgcugc

SEQ ID NO: 87687 - RNA, 20 nt, Human
ggccaauccucgucacaggc

SEQ ID NO: 87688 - RNA, 21 nt, Human
guggacugcagggcccuggcc

SEQ ID NO: 87689 - RNA, 20 nt, Human
uaaaaagagcaucaccacga

SEQ ID NO: 87690 - RNA, 23 nt, Human
uaacauucacaucaggaaaaaga

SEQ ID NO: 87691 - RNA, 24 nt, Human
uacaagacuuguacaaaaggacau

SEQ ID NO: 87692 - RNA, 18 nt, Human
uagcaacagaaaccgugg

SEQ ID NO: 87693 - RNA, 21 nt, Human
uagcaacagaaaccgugggac

SEQ ID NO: 87694 - RNA, 19 nt, Human
uaggcaggagcugggcccu

SEQ ID NO: 87695 - RNA, 21 nt, Human
uauuucagaggacacacggag

SEQ ID NO: 87696 - RNA, 21 nt, Human
ucacccuacaaccauuuagca

SEQ ID NO: 87697 - RNA, 20 nt, Human
ucaggaaaaagaagaaaaca

SEQ ID NO: 87698 - RNA, 24 nt, Human
ucaucuucauucuugcacuucuca

SEQ ID NO: 87699 - RNA, 23 nt, Human
uccacagccguggacugcagggc

SEQ ID NO: 87700 - RNA, 25 nt, Human
uccacagccguggacugcagggccc

SEQ ID NO: 87701 - RNA, 18 nt, Human
ucccacaaucguaucugu

SEQ ID NO: 87702 - RNA, 18 nt, Human
ucccaccccgccuuccag

SEQ ID NO: 87703 - RNA, 22 nt, Human
uccccaagaacaugccaaucug

SEQ ID NO: 87704 - RNA, 24 nt, Human
ucccuguuccgcugcucccacccu

SEQ ID NO: 87705 - RNA, 22 nt, Human
uccgcgcccgccucugcgcgcu

SEQ ID NO: 87706 - RNA, 21 nt, Human
uccugguggaagaaccuucgc

SEQ ID NO: 87707 - RNA, 19 nt, Human
ucggagcgcaggcucuucu

SEQ ID NO: 87708 - RNA, 22 nt, Human
ucucccaauauggcagccaucc

SEQ ID NO: 87709 - RNA, 22 nt, Human
ucucggggcgagccuuagccuu

SEQ ID NO: 87710 - RNA, 21 nt, Human
ucugccagugccccgaagccc

SEQ ID NO: 87711 - RNA, 20 nt, Human
ucuuuaggaacauucagcug

SEQ ID NO: 87712 - RNA, 18 nt, Human
ugaaacaaguuguugauu

SEQ ID NO: 87713 - RNA, 27 nt, Human
ugaaagcccauggcagagaaugagucu

SEQ ID NO: 87714 - RNA, 18 nt, Human
ugacaccugugccucucc

SEQ ID NO: 87715 - RNA, 18 nt, Human
ugagggagagaguucccg

SEQ ID NO: 87716 - RNA, 22 nt, Human
ugcaggaagcugggauccgcgg

SEQ ID NO: 87717 - RNA, 22 nt, Human
ugcuccacagccguggacugca

SEQ ID NO: 87718 - RNA, 18 nt, Human
uggaaagcgcuggcuacg

SEQ ID NO: 87719 - RNA, 21 nt, Human
uggaagaaccuucgcugaaag

SEQ ID NO: 87720 - RNA, 18 nt, Human
uggaagggaguaaggacu

SEQ ID NO: 87721 - RNA, 21 nt, Human
uggcagagaaugagucucugg

SEQ ID NO: 87722 - RNA, 22 nt, Human
uggcagagaaugagucucuggg

SEQ ID NO: 87723 - RNA, 22 nt, Human
uggcuggaacuggugacaccug

SEQ ID NO: 87724 - RNA, 24 nt, Human
uggggcuucaucuucauucuugca

SEQ ID NO: 87725 - RNA, 20 nt, Human
uggucgggagcggaggcuga

SEQ ID NO: 87726 - RNA, 23 nt, Human
uguccucggcugugaggccccca

SEQ ID NO: 87727 - RNA, 22 nt, Human
uguggaggcuccggcugcaugc

SEQ ID NO: 87728 - RNA, 20 nt, Human
uguucauguuucuggguuuu

SEQ ID NO: 87729 - RNA, 19 nt, Human
uguuucuggguuuugcacu

SEQ ID NO: 87730 - RNA, 20 nt, Human
uuagcucagcaccucuccca

SEQ ID NO: 87731 - RNA, 22 nt, Human
uucauguuucuggguuuugcac

SEQ ID NO: 87732 - RNA, 24 nt, Human
uucccuguuccgcugcucccaccc

SEQ ID NO: 87733 - RNA, 25 nt, Human
uuugcaaagagccucccguuggccc

SEQ ID NO: 87734 - RNA, 24 nt, Human
uuuuuuuuuuuuucacuucccaug

SEQ ID NO: 87735 - RNA, 22 nt, Human
uuuuuuuuuuuuuuuuucacuu

SEQ ID NO: 87736 - RNA, 21 nt, Human
acucgcuccgggccgggccug

SEQ ID NO: 87737 - RNA, 22 nt, Human
agaaggaggggcggaaggaggg

SEQ ID NO: 87738 - RNA, 23 nt, Human
aggccgggcccgaggcccgggga

SEQ ID NO: 87739 - RNA, 20 nt, Human
aggcugccggggcugggagc

SEQ ID NO: 87740 - RNA, 22 nt, Human
agggggucugggggagcuggcg

SEQ ID NO: 87741 - RNA, 18 nt, Human
cacguguggccggggggu

SEQ ID NO: 87742 - RNA, 27 nt, Human
ccaccgccugcugcugcugcugcugcc

SEQ ID NO: 87743 - RNA, 19 nt, Human
ccagcccaucgggcggcgg

SEQ ID NO: 87744 - RNA, 22 nt, Human
ccauggccuccucgccgccccc

SEQ ID NO: 87745 - RNA, 18 nt, Human
ccccccgugggcggccga

SEQ ID NO: 87746 - RNA, 20 nt, Human
ccccggagaaggaggggcgg

SEQ ID NO: 87747 - RNA, 21 nt, Human
ccccggagaaggaggggcgga

SEQ ID NO: 87748 - RNA, 22 nt, Human
ccccgugggcggccgaucuccg

SEQ ID NO: 87749 - RNA, 19 nt, Human
ccgcccccgcugcccgggc

SEQ ID NO: 87750 - RNA, 18 nt, Human
ccgccgccgccgccgccg

SEQ ID NO: 87751 - RNA, 22 nt, Human
ccgccgccgccgccgccgccgc

SEQ ID NO: 87752 - RNA, 24 nt, Human
ccgccgccgccgccgccgccgccg

SEQ ID NO: 87753 - RNA, 23 nt, Human
ccgccgccgccgccgccgccgcu

SEQ ID NO: 87754 - RNA, 20 nt, Human
ccgccgccgccgccgcugau

SEQ ID NO: 87755 - RNA, 19 nt, Human
ccgccggccuuacggauca

SEQ ID NO: 87756 - RNA, 20 nt, Human
ccgccugcugcugcugcugc

SEQ ID NO: 87757 - RNA, 26 nt, Human
ccgccugcugcugcugcugcugcugc

SEQ ID NO: 87758 - RNA, 18 nt, Human
ccgcugcccgggccaucg

SEQ ID NO: 87759 - RNA, 19 nt, Human
ccggccagaggcucggccg

SEQ ID NO: 87760 - RNA, 19 nt, Human
ccugcugcugcugcugcug

SEQ ID NO: 87761 - RNA, 22 nt, Human
ccugcugcugcugcuggggagc

SEQ ID NO: 87762 - RNA, 21 nt, Human
cgcaggccgggcccgaggccc

SEQ ID NO: 87763 - RNA, 24 nt, Human
cgccgccgccgccgccgccgccgg

SEQ ID NO: 87764 - RNA, 23 nt, Human
cgcugcuguggccccccgugggc

SEQ ID NO: 87765 - RNA, 18 nt, Human
cggccaccgggccccgcc

SEQ ID NO: 87766 - RNA, 25 nt, Human
cggccagaggcucggccguggggcc

SEQ ID NO: 87767 - RNA, 20 nt, Human
cggcccagcccaucgggcgg

SEQ ID NO: 87768 - RNA, 22 nt, Human
cuccgggccgggccugggaccc

SEQ ID NO: 87769 - RNA, 20 nt, Human
cuccucgccgcccccgcugc

SEQ ID NO: 87770 - RNA, 18 nt, Human
gagcccggcccgcggggc

SEQ ID NO: 87771 - RNA, 18 nt, Human
gagcgcggcggcuggagc

SEQ ID NO: 87772 - RNA, 20 nt, Human
gaggggcggaaggagggugc

SEQ ID NO: 87773 - RNA, 20 nt, Human
gcaggcccuuccuggagccc

SEQ ID NO: 87774 - RNA, 18 nt, Human
gccaccgccugcugcugc

SEQ ID NO: 87775 - RNA, 26 nt, Human
gccaccgccugcugcugcugcugccg

SEQ ID NO: 87776 - RNA, 19 nt, Human
gccgggcccgaggcccggg

SEQ ID NO: 87777 - RNA, 23 nt, Human
gcugcugcugcugcugcugcggg

SEQ ID NO: 87778 - RNA, 23 nt, Human
gcugcugcugcugcugcugcugc

SEQ ID NO: 87779 - RNA, 18 nt, Human
gcugguaccagauguuga

SEQ ID NO: 87780 - RNA, 21 nt, Human
ggaggggcggaaggagggugc

SEQ ID NO: 87781 - RNA, 26 nt, Human
ggaguccugggcgagcgcccgguggc

SEQ ID NO: 87782 - RNA, 20 nt, Human
ggccagaggcucggccgugg

SEQ ID NO: 87783 - RNA, 20 nt, Human
ggcggcggcggcucggcgcc

SEQ ID NO: 87784 - RNA, 19 nt, Human
gggcgagcggccgcugcug

SEQ ID NO: 87785 - RNA, 19 nt, Human
gggcggcggcggcucggcg

SEQ ID NO: 87786 - RNA, 18 nt, Human
ggggauagcagcucggga

SEQ ID NO: 87787 - RNA, 23 nt, Human
gggggccccgagccgccggccuu

SEQ ID NO: 87788 - RNA, 21 nt, Human
ggggguggcgcgucguaggcc

SEQ ID NO: 87789 - RNA, 19 nt, Human
ggggucugggggagcuggc

SEQ ID NO: 87790 - RNA, 23 nt, Human
ggguggcgcgucguaggccccgg

SEQ ID NO: 87791 - RNA, 22 nt, Human
gguggcgcgucguaggccccgg

SEQ ID NO: 87792 - RNA, 22 nt, Human
gguucgugcaggcccuuccugg

SEQ ID NO: 87793 - RNA, 23 nt, Human
guggggccuggguaccuccgagg

SEQ ID NO: 87794 - RNA, 18 nt, Human
uaggacacguguggccgg

SEQ ID NO: 87795 - RNA, 23 nt, Human
uccgugcgccggguaguagccgu

SEQ ID NO: 87796 - RNA, 18 nt, Human
ucgccgcccccgcugccc

SEQ ID NO: 87797 - RNA, 19 nt, Human
ucgccgcccccgcugcccg

SEQ ID NO: 87798 - RNA, 21 nt, Human
ucggagccccgguaguagcca

SEQ ID NO: 87799 - RNA, 21 nt, Human
ucgggucgggggcucagaagg

SEQ ID NO: 87800 - RNA, 19 nt, Human
ucugggggagcuggcggcg

SEQ ID NO: 87801 - RNA, 24 nt, Human
ucuuccuggcugaccccggagaag

SEQ ID NO: 87802 - RNA, 19 nt, Human
ugcaaagagcaaagggcuc

SEQ ID NO: 87803 - RNA, 22 nt, Human
ugccggggcugggagcgcggcg

SEQ ID NO: 87804 - RNA, 22 nt, Human
ugcgggccagaugccggccacc

SEQ ID NO: 87805 - RNA, 20 nt, Human
ugcugcugcgggggccccga

SEQ ID NO: 87806 - RNA, 21 nt, Human
ugcugcugcugcugcugcugc

SEQ ID NO: 87807 - RNA, 21 nt, Human
ugcugcugcugcugcugcugc

SEQ ID NO: 87808 - RNA, 21 nt, Human
ugcugcugcugcugcugcugc

SEQ ID NO: 87809 - RNA, 21 nt, Human
ugcugcugcugcugcugcugc

SEQ ID NO: 87810 - RNA, 21 nt, Human
ugcugcugcugcugcugcugc

SEQ ID NO: 87811 - RNA, 24 nt, Human
ugcugcugcugcugcugcugcugc

SEQ ID NO: 87812 - RNA, 23 nt, Human
uggagggggucugggggagcugg

SEQ ID NO: 87813 - RNA, 21 nt, Human
uggccaccgccugcugcugcu

SEQ ID NO: 87814 - RNA, 26 nt, Human
uggccaccgccugcugcugcugcugc

SEQ ID NO: 87815 - RNA, 26 nt, Human
uggccccccgugggcggccgaucucc

SEQ ID NO: 87816 - RNA, 18 nt, Human
ugggagcgcggcggcugg

SEQ ID NO: 87817 - RNA, 23 nt, Human
uguggccgggggguggagggggu

SEQ ID NO: 87818 - RNA, 22 nt, Human
uuagcaccaaucaucgucacuc

SEQ ID NO: 87819 - RNA, 21 nt, Human
uucgugcaggcccuuccugga

SEQ ID NO: 87820 - RNA, 18 nt, Human
acguacacucaagcaaca

SEQ ID NO: 87821 - RNA, 21 nt, Human
agaggggaggagggggaggga

SEQ ID NO: 87822 - RNA, 27 nt, Human
agaggggaggagggggagggaggggcc

SEQ ID NO: 87823 - RNA, 19 nt, Human
agaguaaaagaggggagga

SEQ ID NO: 87824 - RNA, 21 nt, Human
agaguaaaagaggggaggagg

SEQ ID NO: 87825 - RNA, 24 nt, Human
agaguaaaagaggggaggaggggg

SEQ ID NO: 87826 - RNA, 23 nt, Human
agcagccacggagccgccgggac

SEQ ID NO: 87827 - RNA, 19 nt, Human
aggagggggagggaggggc

SEQ ID NO: 87828 - RNA, 24 nt, Human
agggaggggccacaggagccucac

SEQ ID NO: 87829 - RNA, 23 nt, Human
aggggaggagggggagggagggg

SEQ ID NO: 87830 - RNA, 25 nt, Human
aggggaggagggggagggaggggcc

SEQ ID NO: 87831 - RNA, 23 nt, Human
agggggagggaggggccacagga

SEQ ID NO: 87832 - RNA, 25 nt, Human
agggggagggaggggccacaggagc

SEQ ID NO: 87833 - RNA, 18 nt, Human
caaggugggcaaggccuc

SEQ ID NO: 87834 - RNA, 18 nt, Human
cagccacggagccgccgg

SEQ ID NO: 87835 - RNA, 19 nt, Human
cagcggaccucgcccggcc

SEQ ID NO: 87836 - RNA, 24 nt, Human
caggagccucaccaaggugggcaa

SEQ ID NO: 87837 - RNA, 23 nt, Human
ccaaggugggcaaggccuccccc

SEQ ID NO: 87838 - RNA, 21 nt, Human
cccccgagggccgacugcccc

SEQ ID NO: 87839 - RNA, 21 nt, Human
ccccgcgugcauccccggccc

SEQ ID NO: 87840 - RNA, 21 nt, Human
ccccggcccagcggccccggc

SEQ ID NO: 87841 - RNA, 22 nt, Human
cccggccccaccgccgcagccg

SEQ ID NO: 87842 - RNA, 19 nt, Human
ccgccgggaccgcagcgga

SEQ ID NO: 87843 - RNA, 20 nt, Human
cggcagggagggcgcggggc

SEQ ID NO: 87844 - RNA, 20 nt, Human
cggcccagcggccccggcag

SEQ ID NO: 87845 - RNA, 25 nt, Human
cuagaguaaaagaggggaggagggg

SEQ ID NO: 87846 - RNA, 22 nt, Human
cucagagcggagcagccacgga

SEQ ID NO: 87847 - RNA, 21 nt, Human
cucccgggccccgcgugcauc

SEQ ID NO: 87848 - RNA, 22 nt, Human
cuggaacacacgccugcugcau

SEQ ID NO: 87849 - RNA, 19 nt, Human
gaggagggggagggagggg

SEQ ID NO: 87850 - RNA, 21 nt, Human
gagggggagggaggggccaca

SEQ ID NO: 87851 - RNA, 18 nt, Human
gaguaaaagaggggagga

SEQ ID NO: 87852 - RNA, 23 nt, Human
gccccguguggaugauaaaacuc

SEQ ID NO: 87853 - RNA, 22 nt, Human
ggagggggagggaggggccaca

SEQ ID NO: 87854 - RNA, 22 nt, Human
ggcgcggggcgcgccaggcgcu

SEQ ID NO: 87855 - RNA, 20 nt, Human
ggggagggaggggccacagg

SEQ ID NO: 87856 - RNA, 20 nt, Human
gggggagggaggggccacag

SEQ ID NO: 87857 - RNA, 21 nt, Human
uaaaagaggggaggaggggga

SEQ ID NO: 87858 - RNA, 18 nt, Human
uccccggcccagcggccc

SEQ ID NO: 87859 - RNA, 24 nt, Human
ucuagaguaaaagaggggaggagg

SEQ ID NO: 87860 - RNA, 21 nt, Human
ugauaaaacucauccacugga

SEQ ID NO: 87861 - RNA, 21 nt, Human
aaaaccaaaaccgaaaagaaa

SEQ ID NO: 87862 - RNA, 20 nt, Human
aaaagcccgcaucuggcagc

SEQ ID NO: 87863 - RNA, 23 nt, Human
aaacagcugaagagaaagacucu

SEQ ID NO: 87864 - RNA, 26 nt, Human
aaacauuuaaaaaaaaccaaaaccga

SEQ ID NO: 87865 - RNA, 18 nt, Human
aaaccacaaaacaaaaga

SEQ ID NO: 87866 - RNA, 24 nt, Human
aaauaaaaaaaagcccgcaucugg

SEQ ID NO: 87867 - RNA, 26 nt, Human
aaaugaaaauuagaaacaaauaucuc

SEQ ID NO: 87868 - RNA, 21 nt, Human
aagaagacuaguaaacagcug

SEQ ID NO: 87869 - RNA, 18 nt, Human
aagagaugugauaagaaa

SEQ ID NO: 87870 - RNA, 31 nt, Human
aagcaaaauaaaacauuuaaaaaaaaccaag

SEQ ID NO: 87871 - RNA, 22 nt, Human
aagcauugacauugaguccaug

SEQ ID NO: 87872 - RNA, 22 nt, Human
aagcugaaaacacacccugacc

SEQ ID NO: 87873 - RNA, 18 nt, Human
aauucuugggagcaggaa

SEQ ID NO: 87874 - RNA, 26 nt, Human
acaaaacaaaagagcgcucagcggaa

SEQ ID NO: 87875 - RNA, 18 nt, Human
acaugagaagcauugaca

SEQ ID NO: 87876 - RNA, 20 nt, Human
acaugagaagcauugacauu

SEQ ID NO: 87877 - RNA, 18 nt, Human
acuuuguaaacacucuuc

SEQ ID NO: 87878 - RNA, 22 nt, Human
agaggcgcggccggcccggggc

SEQ ID NO: 87879 - RNA, 25 nt, Human
aggaacaaaucuuaccuauuucaau

SEQ ID NO: 87880 - RNA, 22 nt, Human
aggaauaacaguagaaccuauc

SEQ ID NO: 87881 - RNA, 20 nt, Human
aggcgcggccggcccggggc

SEQ ID NO: 87882 - RNA, 24 nt, Human
agugaaaacaggaaaggugagggg

SEQ ID NO: 87883 - RNA, 19 nt, Human
agugucaaaccacaaaaca

SEQ ID NO: 87884 - RNA, 24 nt, Human
aucacauuuaccucccaucaugaa

SEQ ID NO: 87885 - RNA, 18 nt, Human
augagaagcauugacauu

SEQ ID NO: 87886 - RNA, 23 nt, Human
caaaaccgaaaagaaacugcaac

SEQ ID NO: 87887 - RNA, 19 nt, Human
caaaccacaaaacaaaaga

SEQ ID NO: 87888 - RNA, 20 nt, Human
caaaccacaaaacaaaagag

SEQ ID NO: 87889 - RNA, 22 nt, Human
caaauaaaaaaaagcccgcauc

SEQ ID NO: 87890 - RNA, 24 nt, Human
caacucuaucugaaaaaaaacuua

SEQ ID NO: 87891 - RNA, 18 nt, Human
cacaaaacaaaagagcgc

SEQ ID NO: 87892 - RNA, 22 nt, Human
cacaaaacaaaagagcgcucag

SEQ ID NO: 87893 - RNA, 23 nt, Human
cacaaaacaaaagagcgcucagc

SEQ ID NO: 87894 - RNA, 18 nt, Human
caccacugccggcccgac

SEQ ID NO: 87895 - RNA, 22 nt, Human
cagagcuccgcgccccuggagg

SEQ ID NO: 87896 - RNA, 22 nt, Human
cagccaugcucauuugcuccuu

SEQ ID NO: 87897 - RNA, 21 nt, Human
cagcuccucccucgcgcugcc

SEQ ID NO: 87898 - RNA, 24 nt, Human
cagugaauuaauggggguagacac

SEQ ID NO: 87899 - RNA, 23 nt, Human
ccaaaaccgaaaagaaacugcaa

SEQ ID NO: 87900 - RNA, 25 nt, Human
ccaaaaccgaaaagaaacugcaaca

SEQ ID NO: 87901 - RNA, 22 nt, Human
cccauccccagagcuccgcgcc

SEQ ID NO: 87902 - RNA, 22 nt, Human
ccccuggaggccuccuccuccc

SEQ ID NO: 87903 - RNA, 23 nt, Human
cccucgccgccuccucuccccgc

SEQ ID NO: 87904 - RNA, 23 nt, Human
ccgcgucuggucccaacagaaau

SEQ ID NO: 87905 - RNA, 21 nt, Human
ccggcccgacgcccaucccca

SEQ ID NO: 87906 - RNA, 18 nt, Human
ccgggagcucggcguggc

SEQ ID NO: 87907 - RNA, 19 nt, Human
ccuccucccucuccgggcc

SEQ ID NO: 87908 - RNA, 18 nt, Human
ccuccucuccccgccucu

SEQ ID NO: 87909 - RNA, 21 nt, Human
ccucgccgccuccucuccccg

SEQ ID NO: 87910 - RNA, 19 nt, Human
ccugcgagcugggagaggg

SEQ ID NO: 87911 - RNA, 20 nt, Human
ccugcgggccggcggcuggc

SEQ ID NO: 87912 - RNA, 19 nt, Human
cgaaaagaaacugcaacau

SEQ ID NO: 87913 - RNA, 22 nt, Human
cggcccgacgcccauccccaga

SEQ ID NO: 87914 - RNA, 19 nt, Human
cgggacccucgccgccucc

SEQ ID NO: 87915 - RNA, 21 nt, Human
cuaaaaauaaacacauucaac

SEQ ID NO: 87916 - RNA, 23 nt, Human
cuacaggacuuuguaaacacucu

SEQ ID NO: 87917 - RNA, 21 nt, Human
cuaguaaacagcugaagagaa

SEQ ID NO: 87918 - RNA, 18 nt, Human
cucagcaccaccugguug

SEQ ID NO: 87919 - RNA, 19 nt, Human
cucccgcagaggcgcggcc

SEQ ID NO: 87920 - RNA, 22 nt, Human
cuccgcgucuggucccaacaga

SEQ ID NO: 87921 - RNA, 26 nt, Human
cuggaggccuccuccucccucuccgg

SEQ ID NO: 87922 - RNA, 21 nt, Human
gaaaacacacccugaccagga

SEQ ID NO: 87923 - RNA, 27 nt, Human
gaaaacaggaaaggugagggggccggu

SEQ ID NO: 87924 - RNA, 24 nt, Human
gaaaagaaacugcaacaaccccgg

SEQ ID NO: 87925 - RNA, 20 nt, Human
gacgcccauccccagagcuc

SEQ ID NO: 87926 - RNA, 23 nt, Human
gacucucugugaaggcuggauuc

SEQ ID NO: 87927 - RNA, 19 nt, Human
gccccgggacccucgccgc

SEQ ID NO: 87928 - RNA, 21 nt, Human
gcccggggccugcgagcuggg

SEQ ID NO: 87929 - RNA, 20 nt, Human
gccugcgggccggcggcugg

SEQ ID NO: 87930 - RNA, 23 nt, Human
ggauucagcaaagcugaaaacac

SEQ ID NO: 87931 - RNA, 18 nt, Human
ggcagcgccuuccucgcg

SEQ ID NO: 87932 - RNA, 21 nt, Human
ggcccgacgcccauccccaga

SEQ ID NO: 87933 - RNA, 19 nt, Human
ggccgggagcucggcgugg

SEQ ID NO: 87934 - RNA, 22 nt, Human
ggcgcagcuccucccucgcgcu

SEQ ID NO: 87935 - RNA, 24 nt, Human
gggagacagcaggcucguacagaa

SEQ ID NO: 87936 - RNA, 18 nt, Human
gggcagggacggagugag

SEQ ID NO: 87937 - RNA, 22 nt, Human
gguaaaacucuccugcagcggc

SEQ ID NO: 87938 - RNA, 24 nt, Human
gucuucuuuggucacugauaucuc

SEQ ID NO: 87939 - RNA, 24 nt, Human
uaaaaaaaaccaaaaccgaaaaga

SEQ ID NO: 87940 - RNA, 19 nt, Human
uaaaaaaaagcccgcaucu

SEQ ID NO: 87941 - RNA, 22 nt, Human
uaaaaaaaagcccgcaucuggc

SEQ ID NO: 87942 - RNA, 23 nt, Human
uaaaaaaaagcccgcaucuggca

SEQ ID NO: 87943 - RNA, 23 nt, Human
uaauucuugggagcaggaacaaa

SEQ ID NO: 87944 - RNA, 19 nt, Human
uaauuuccaucgugacuga

SEQ ID NO: 87945 - RNA, 18 nt, Human
uacaagaaaaccaaaccc

SEQ ID NO: 87946 - RNA, 23 nt, Human
uaggaauaacaguagaaccuauc

SEQ ID NO: 87947 - RNA, 25 nt, Human
uaugaaaaauaagaguauucauuau

SEQ ID NO: 87948 - RNA, 22 nt, Human
uaugauauugcucucaaaggaa

SEQ ID NO: 87949 - RNA, 23 nt, Human
ucaaaccacaaaacaaaagagcg

SEQ ID NO: 87950 - RNA, 18 nt, Human
ucaacaaaagugucaaac

SEQ ID NO: 87951 - RNA, 19 nt, Human
ucacugauaucuccaguga

SEQ ID NO: 87952 - RNA, 26 nt, Human
ucagcaaagcugaaaacacacccuga

SEQ ID NO: 87953 - RNA, 19 nt, Human
ucauuauugcuaaagggag

SEQ ID NO: 87954 - RNA, 22 nt, Human
ucccaacagaaaugaaugaaga

SEQ ID NO: 87955 - RNA, 28 nt, Human
ucccaucaugaacauuuaggacaaaaau

SEQ ID NO: 87956 - RNA, 19 nt, Human
ucccgcagaggcgcggccg

SEQ ID NO: 87957 - RNA, 23 nt, Human
ucccggagggcggcucgcgcacc

SEQ ID NO: 87958 - RNA, 22 nt, Human
ucccgucgcaggugggcaggga

SEQ ID NO: 87959 - RNA, 22 nt, Human
ucuccagugaauuaaugggggu

SEQ ID NO: 87960 - RNA, 18 nt, Human
ucugcucuucccuccuuu

SEQ ID NO: 87961 - RNA, 23 nt, Human
ucuuccagccaugcucauuugcu

SEQ ID NO: 87962 - RNA, 22 nt, Human
ucuucuuccuccccucccgcug

SEQ ID NO: 87963 - RNA, 20 nt, Human
ugaaacaaauaaaaaaaagc

SEQ ID NO: 87964 - RNA, 23 nt, Human
ugaagagaaagacucugucauua

SEQ ID NO: 87965 - RNA, 19 nt, Human
ugaccagaaauauuccugg

SEQ ID NO: 87966 - RNA, 24 nt, Human
ugaccagaaauauuccugggagca

SEQ ID NO: 87967 - RNA, 18 nt, Human
ugacuaaaaauaaacaca

SEQ ID NO: 87968 - RNA, 18 nt, Human
ugccccgcucccuucucc

SEQ ID NO: 87969 - RNA, 21 nt, Human
ugccccgcucccuucuccaaa

SEQ ID NO: 87970 - RNA, 21 nt, Human
ugcuccuuuagucuacaucuc

SEQ ID NO: 87971 - RNA, 23 nt, Human
ugcucuucccuccuuuaauuucc

SEQ ID NO: 87972 - RNA, 20 nt, Human
uggaaaaaggaaaccacaac

SEQ ID NO: 87973 - RNA, 22 nt, Human
uggaaguccugccccgcucccu

SEQ ID NO: 87974 - RNA, 24 nt, Human
uggauucagcaaagcugaaaacac

SEQ ID NO: 87975 - RNA, 18 nt, Human
uggccgggagcucggcgu

SEQ ID NO: 87976 - RNA, 23 nt, Human
ugggaaagcaaaauaaaacauuu

SEQ ID NO: 87977 - RNA, 22 nt, Human
ugggagcauguaagaacugagg

SEQ ID NO: 87978 - RNA, 22 nt, Human
ugggcggagccggcggccccgg

SEQ ID NO: 87979 - RNA, 23 nt, Human
ugguguguguccaugacucucug

SEQ ID NO: 87980 - RNA, 25 nt, Human
uguaaacacucuucuuccuccccuc

SEQ ID NO: 87981 - RNA, 23 nt, Human
uguguguccaugacucucuguga

SEQ ID NO: 87982 - RNA, 20 nt, Human
uuacuaucuuccagccaugc

SEQ ID NO: 87983 - RNA, 25 nt, Human
uuccacaauuuugcuucugcucuuc

SEQ ID NO: 87984 - RNA, 24 nt, Human
uuccuccccucccgcugggaaagc

SEQ ID NO: 87985 - RNA, 24 nt, Human
uuuuuuccauuaagauauuuuuuc

SEQ ID NO: 87986 - RNA, 18 nt, Human
uuuuuuuuuuuuuuuuug

SEQ ID NO: 87987 - RNA, 20 nt, Human
uuuuuuuuuuuuuuuuuggu

SEQ ID NO: 87988 - RNA, 18 nt, Human
acagcagugcccaucugg

SEQ ID NO: 87989 - RNA, 19 nt, Human
cagaacagcuaaacaggaa

SEQ ID NO: 87990 - RNA, 23 nt, Human
cagaacagcuaaacaggaaccag

SEQ ID NO: 87991 - RNA, 19 nt, Human
cagagccagucugccccuc

SEQ ID NO: 87992 - RNA, 21 nt, Human
cagagccagucugccccucgc

SEQ ID NO: 87993 - RNA, 21 nt, Human
caggcucaaccgcuugggacc

SEQ ID NO: 87994 - RNA, 24 nt, Human
ccaacuagugccuaaacuuuccua

SEQ ID NO: 87995 - RNA, 23 nt, Human
ccacagcagugcccaucuggaca

SEQ ID NO: 87996 - RNA, 23 nt, Human
ccccugcaccccgccgccaugcc

SEQ ID NO: 87997 - RNA, 21 nt, Human
ccugcagcuggggccgagccg

SEQ ID NO: 87998 - RNA, 18 nt, Human
ccugcgccccaccugagg

SEQ ID NO: 87999 - RNA, 23 nt, Human
ccugcgccccaccugaggccaga

SEQ ID NO: 88000 - RNA, 21 nt, Human
ccugcuguuuccugcagcugg

SEQ ID NO: 88001 - RNA, 25 nt, Human
cuaccagguuuauggcuuucuugag

SEQ ID NO: 88002 - RNA, 19 nt, Human
cuccacagcagugcccauc

SEQ ID NO: 88003 - RNA, 18 nt, Human
cuccucacccauccucug

SEQ ID NO: 88004 - RNA, 24 nt, Human
cugaggccagagccagucugcccc

SEQ ID NO: 88005 - RNA, 21 nt, Human
cugcagcuggggccgagcgca

SEQ ID NO: 88006 - RNA, 22 nt, Human
cugcgccccaccugaggccaga

SEQ ID NO: 88007 - RNA, 22 nt, Human
cuggacaauggggcagggcagg

SEQ ID NO: 88008 - RNA, 18 nt, Human
gccugcuguuuccugcag

SEQ ID NO: 88009 - RNA, 22 nt, Human
gcugggcguugaggcgggggcg

SEQ ID NO: 88010 - RNA, 18 nt, Human
ggcagggcaggucuggcc

SEQ ID NO: 88011 - RNA, 23 nt, Human
uaaacaggaaccaggacgcagug

SEQ ID NO: 88012 - RNA, 18 nt, Human
uaacuuuccccugcaccc

SEQ ID NO: 88013 - RNA, 19 nt, Human
uaacuuuccccugcacccc

SEQ ID NO: 88014 - RNA, 19 nt, Human
uaccagguuuauggcuuuc

SEQ ID NO: 88015 - RNA, 19 nt, Human
uacugugugcagggcacug

SEQ ID NO: 88016 - RNA, 18 nt, Human
uccccuggcucuccugcg

SEQ ID NO: 88017 - RNA, 24 nt, Human
uccucugugagagggcggggccug

SEQ ID NO: 88018 - RNA, 26 nt, Human
ucuggccuccucacccauccucugug

SEQ ID NO: 88019 - RNA, 18 nt, Human
ugagguaacgacacgagg

SEQ ID NO: 88020 - RNA, 23 nt, Human
ugggagaagcagacuccacagca

SEQ ID NO: 88021 - RNA, 20 nt, Human
uggggaaggggaucaccaag

SEQ ID NO: 88022 - RNA, 20 nt, Human
ugugcagggcacugugcugg

SEQ ID NO: 88023 - RNA, 22 nt, Human
ugugcugggcguugaggcgggg

SEQ ID NO: 88024 - RNA, 22 nt, Human
ugugugcagggcacugugcugg

SEQ ID NO: 88025 - RNA, 23 nt, Human
uuaaaaauggauauguugggccc

SEQ ID NO: 88026 - RNA, 21 nt, Human
uugaauauuacucccaacuag

SEQ ID NO: 88027 - RNA, 25 nt, Human
uugggcccagugacugauaugcuag

SEQ ID NO: 88028 - RNA, 21 nt, Human
aaagacacacggagacucaga

SEQ ID NO: 88029 - RNA, 18 nt, Human
acacagcaacaagcagaa

SEQ ID NO: 88030 - RNA, 20 nt, Human
agacaagcacggggaccacc

SEQ ID NO: 88031 - RNA, 22 nt, Human
agagaagagcaugcaucggagg

SEQ ID NO: 88032 - RNA, 19 nt, Human
cacccgcacacagcaacaa

SEQ ID NO: 88033 - RNA, 24 nt, Human
caccgccucuggggagcuccgcga

SEQ ID NO: 88034 - RNA, 22 nt, Human
ccagacaagcacggggaccacc

SEQ ID NO: 88035 - RNA, 20 nt, Human
ccuuuucccucuuccucccc

SEQ ID NO: 88036 - RNA, 22 nt, Human
cuggcuucccaauucugucuug

SEQ ID NO: 88037 - RNA, 19 nt, Human
gccgcacuggcuucccaau

SEQ ID NO: 88038 - RNA, 21 nt, Human
uaaacagacagaagacacaca

SEQ ID NO: 88039 - RNA, 22 nt, Human
uaaacagacagaagacacacaa

SEQ ID NO: 88040 - RNA, 25 nt, Human
uccccgcggggccgcacuggcuucc

SEQ ID NO: 88041 - RNA, 23 nt, Human
uucccaauucugucuugguuuuc

SEQ ID NO: 88042 - RNA, 18 nt, Human
aaccccccucucuucccc

SEQ ID NO: 88043 - RNA, 22 nt, Human
aagggccaucugcacacaaccc

SEQ ID NO: 88044 - RNA, 21 nt, Human
acaaccccccucucuuccccc

SEQ ID NO: 88045 - RNA, 22 nt, Human
acaaccccccucucuuccccca

SEQ ID NO: 88046 - RNA, 22 nt, Human
acacaaccccccucucuucccc

SEQ ID NO: 88047 - RNA, 19 nt, Human
accccccucucuuccccca

SEQ ID NO: 88048 - RNA, 19 nt, Human
aucugcacacaaccccccu

SEQ ID NO: 88049 - RNA, 25 nt, Human
cacacaaccccccucucuuccccca

SEQ ID NO: 88050 - RNA, 22 nt, Human
caugccugccuccugcugggga

SEQ ID NO: 88051 - RNA, 19 nt, Human
gggaggggagggcaggagg

SEQ ID NO: 88052 - RNA, 20 nt, Human
ugcuggggaggggagggcag

SEQ ID NO: 88053 - RNA, 23 nt, Human
aauauacauagagauucugcaca

SEQ ID NO: 88054 - RNA, 22 nt, Human
aggaauauagcccaggaggagg

SEQ ID NO: 88055 - RNA, 19 nt, Human
aguagaaggaaacaagucu

SEQ ID NO: 88056 - RNA, 24 nt, Human
auaaaauagaauauacauagagau

SEQ ID NO: 88057 - RNA, 22 nt, Human
caccgggccucuccuucugccu

SEQ ID NO: 88058 - RNA, 22 nt, Human
cagcuucuggugucgggaaccu

SEQ ID NO: 88059 - RNA, 19 nt, Human
cccaggaggaggagcuagg

SEQ ID NO: 88060 - RNA, 19 nt, Human
ccucagcugcaccgggccu

SEQ ID NO: 88061 - RNA, 23 nt, Human
ccuggagccagaguugccggggc

SEQ ID NO: 88062 - RNA, 22 nt, Human
cgccuucgccucaaaaauauuc

SEQ ID NO: 88063 - RNA, 27 nt, Human
cgccuucgccucaaaaauauucugaga

SEQ ID NO: 88064 - RNA, 24 nt, Human
cuugcagguacccagagccacuga

SEQ ID NO: 88065 - RNA, 22 nt, Human
gaggaggagcuaggacuuggca

SEQ ID NO: 88066 - RNA, 18 nt, Human
gauucugcacaaacguau

SEQ ID NO: 88067 - RNA, 24 nt, Human
gccacugaggcagggaggagcgcc

SEQ ID NO: 88068 - RNA, 19 nt, Human
gcugcaccgggccucuccu

SEQ ID NO: 88069 - RNA, 21 nt, Human
ggggcugcaaugugcucgcgg

SEQ ID NO: 88070 - RNA, 24 nt, Human
ggugagugggaaaguggggcagga

SEQ ID NO: 88071 - RNA, 25 nt, Human
guugccggggcugcugcuuuuaacu

SEQ ID NO: 88072 - RNA, 21 nt, Human
uacccagagccacugaggcag

SEQ ID NO: 88073 - RNA, 20 nt, Human
uauagcccaggaggaggagc

SEQ ID NO: 88074 - RNA, 22 nt, Human
ucagcugcaccgggccucuccu

SEQ ID NO: 88075 - RNA, 23 nt, Human
ucagucacaaaaugucguacauc

SEQ ID NO: 88076 - RNA, 20 nt, Human
ucugcuugcagguacccaga

SEQ ID NO: 88077 - RNA, 18 nt, Human
ugagacacauaaaaguag

SEQ ID NO: 88078 - RNA, 22 nt, Human
ugaggcagggaggagcgccucc

SEQ ID NO: 88079 - RNA, 20 nt, Human
ugcaccgggccucuccuucu

SEQ ID NO: 88080 - RNA, 23 nt, Human
ugccggggcugcugcuuuuaacu

SEQ ID NO: 88081 - RNA, 21 nt, Human
uucugcuugcagguacccaga

SEQ ID NO: 88082 - RNA, 23 nt, Human
uugccggggcugcugcuuuuaac

SEQ ID NO: 88083 - RNA, 21 nt, Human
uuucucccaacagcuucuggu

SEQ ID NO: 88084 - RNA, 19 nt, Human
uuugucaggaauauagccc

SEQ ID NO: 88085 - RNA, 21 nt, Human
uuuuagguuaaaauagccaag

SEQ ID NO: 88086 - RNA, 19 nt, Human
aacuuccccacccccauug

SEQ ID NO: 88087 - RNA, 23 nt, Human
aaugcccccgccuuggggacuag

SEQ ID NO: 88088 - RNA, 19 nt, Human
accccagcaacuuccccac

SEQ ID NO: 88089 - RNA, 22 nt, Human
agggagggaggcugcugcggug

SEQ ID NO: 88090 - RNA, 24 nt, Human
agggagggaggcugcugcgguggg

SEQ ID NO: 88091 - RNA, 22 nt, Human
agggccuguccagcuacuuccu

SEQ ID NO: 88092 - RNA, 24 nt, Human
agggccuguccagcuacuuccucc

SEQ ID NO: 88093 - RNA, 19 nt, Human
aggugggaguggcccuagg

SEQ ID NO: 88094 - RNA, 21 nt, Human
aggugggaguggcccuaggga

SEQ ID NO: 88095 - RNA, 21 nt, Human
caccccagcaacuuccccacc

SEQ ID NO: 88096 - RNA, 23 nt, Human
caccccagcaacuuccccacccc

SEQ ID NO: 88097 - RNA, 18 nt, Human
cagugucacaggccugga

SEQ ID NO: 88098 - RNA, 19 nt, Human
ccacccugccucaggcaug

SEQ ID NO: 88099 - RNA, 22 nt, Human
cccagcaacuuccccaccccca

SEQ ID NO: 88100 - RNA, 18 nt, Human
ccccaaugcccccgccuu

SEQ ID NO: 88101 - RNA, 22 nt, Human
ccccagugcuuucccuucccug

SEQ ID NO: 88102 - RNA, 23 nt, Human
cccccaccccagugcuuucccuu

SEQ ID NO: 88103 - RNA, 19 nt, Human
ccuccacucggcuccccgc

SEQ ID NO: 88104 - RNA, 20 nt, Human
ccuggagauuuuaauguccu

SEQ ID NO: 88105 - RNA, 22 nt, Human
cugcggugggcuagcccuucuc

SEQ ID NO: 88106 - RNA, 19 nt, Human
cugggaaucuggcuuucuc

SEQ ID NO: 88107 - RNA, 20 nt, Human
gaggugguuccugaccaccc

SEQ ID NO: 88108 - RNA, 19 nt, Human
gccagggggcggggcagga

SEQ ID NO: 88109 - RNA, 22 nt, Human
gcggggcaggaguggggggcag

SEQ ID NO: 88110 - RNA, 22 nt, Human
gcuuucccuucccugugucccc

SEQ ID NO: 88111 - RNA, 19 nt, Human
gcuuucuccugcuccccca

SEQ ID NO: 88112 - RNA, 21 nt, Human
ggacaggcacugaccaggccu

SEQ ID NO: 88113 - RNA, 22 nt, Human
ggcaggaggauuacucuccucg

SEQ ID NO: 88114 - RNA, 19 nt, Human
ggcaggaguggggggcagg

SEQ ID NO: 88115 - RNA, 20 nt, Human
ggcaggaguggggggcagga

SEQ ID NO: 88116 - RNA, 23 nt, Human
ggcaggaguggggggcaggagga

SEQ ID NO: 88117 - RNA, 23 nt, Human
ggcuuucuccugcucccccaccc

SEQ ID NO: 88118 - RNA, 20 nt, Human
gggaggcugcugcggugggc

SEQ ID NO: 88119 - RNA, 20 nt, Human
gggcaggaguggggggcagg

SEQ ID NO: 88120 - RNA, 22 nt, Human
gggcggggcaggaguggggggc

SEQ ID NO: 88121 - RNA, 24 nt, Human
gggcggggcaggaguggggggcag

SEQ ID NO: 88122 - RNA, 25 nt, Human
ggggcggggcaggaguggggggcag

SEQ ID NO: 88123 - RNA, 31 nt, Human
uagcccuucuccaccccagcaacuucccccc

SEQ ID NO: 88124 - RNA, 23 nt, Human
uccaccccagcaacuuccccacc

SEQ ID NO: 88125 - RNA, 23 nt, Human
uccagcuacuuccuccgcacuuu

SEQ ID NO: 88126 - RNA, 18 nt, Human
ucccugggaaucuggcuu

SEQ ID NO: 88127 - RNA, 19 nt, Human
ucuccugcucccccacccc

SEQ ID NO: 88128 - RNA, 20 nt, Human
ucuccugcucccccacccca

SEQ ID NO: 88129 - RNA, 23 nt, Human
ucuggcuuucuccugcucccccc

SEQ ID NO: 88130 - RNA, 24 nt, Human
ucuugcuggugaggggcagggccu

SEQ ID NO: 88131 - RNA, 19 nt, Human
uggugaggggcagggccug

SEQ ID NO: 88132 - RNA, 19 nt, Human
uucccugggaaucuggcuu

SEQ ID NO: 88133 - RNA, 21 nt, Human
uugaggugguuccugaccacc

SEQ ID NO: 88134 - RNA, 21 nt, Human
uuuugaaugacauuagaagcu

SEQ ID NO: 88135 - RNA, 21 nt, Human
aaaugaccagaaugaauggug

SEQ ID NO: 88136 - RNA, 28 nt, Human
aacaacaaaaaaagggcagagaaaagga

SEQ ID NO: 88137 - RNA, 21 nt, Human
aacccucccaccaaccccucg

SEQ ID NO: 88138 - RNA, 24 nt, Human
aagaggccgggugaggugggagug

SEQ ID NO: 88139 - RNA, 23 nt, Human
aagcagggaguguguguguaggg

SEQ ID NO: 88140 - RNA, 19 nt, Human
aaggauggcccagccagga

SEQ ID NO: 88141 - RNA, 24 nt, Human
acagaaaccaaguuugggcuuggg

SEQ ID NO: 88142 - RNA, 19 nt, Human
accagacucucagggccug

SEQ ID NO: 88143 - RNA, 19 nt, Human
acuacacuacaguuacacg

SEQ ID NO: 88144 - RNA, 20 nt, Human
acuacaguuacacgcacgcc

SEQ ID NO: 88145 - RNA, 23 nt, Human
agagaaaaggaaauggcccccca

SEQ ID NO: 88146 - RNA, 21 nt, Human
agagacaaagucaccccugcu

SEQ ID NO: 88147 - RNA, 19 nt, Human
agcauuuggcacuguuuga

SEQ ID NO: 88148 - RNA, 19 nt, Human
agcccaaggugaggggcag

SEQ ID NO: 88149 - RNA, 18 nt, Human
aggagagacaaagucacc

SEQ ID NO: 88150 - RNA, 18 nt, Human
aggagauggagugugcag

SEQ ID NO: 88151 - RNA, 21 nt, Human
aggagcccaugggggcugccc

SEQ ID NO: 88152 - RNA, 24 nt, Human
aggagggugggaaaggcgaagagg

SEQ ID NO: 88153 - RNA, 22 nt, Human
aggauggcccagccaggagaga

SEQ ID NO: 88154 - RNA, 21 nt, Human
aggcacaggcuucaaacuggc

SEQ ID NO: 88155 - RNA, 23 nt, Human
aggcagggucccccccaacauag

SEQ ID NO: 88156 - RNA, 18 nt, Human
aggcagguggugagcagg

SEQ ID NO: 88157 - RNA, 18 nt, Human
agggagugggcacaggcc

SEQ ID NO: 88158 - RNA, 19 nt, Human
agggagugggcacaggccu

SEQ ID NO: 88159 - RNA, 24 nt, Human
agggccuggccagcucagguccuu

SEQ ID NO: 88160 - RNA, 24 nt, Human
agggcggcagcagaggccugguuu

SEQ ID NO: 88161 - RNA, 19 nt, Human
aggugaggggcagccaggu

SEQ ID NO: 88162 - RNA, 18 nt, Human
aggugggaguggaggugg

SEQ ID NO: 88163 - RNA, 25 nt, Human
auagaacaacaaaaaaagggcagag

SEQ ID NO: 88164 - RNA, 23 nt, Human
aucccaaggcgcagaccagacuc

SEQ ID NO: 88165 - RNA, 19 nt, Human
caacccucccaccaacccc

SEQ ID NO: 88166 - RNA, 22 nt, Human
caccagcagugggcauggaccc

SEQ ID NO: 88167 - RNA, 25 nt, Human
cacccccugccccagcauuuggcac

SEQ ID NO: 88168 - RNA, 19 nt, Human
caccugcggcgucccgcuu

SEQ ID NO: 88169 - RNA, 24 nt, Human
caccuggagaggugagggggcacu

SEQ ID NO: 88170 - RNA, 22 nt, Human
cacgcacgcccccgaaggacac

SEQ ID NO: 88171 - RNA, 23 nt, Human
cacgcccccgaaggacacagcug

SEQ ID NO: 88172 - RNA, 21 nt, Human
cacuacaguuacacgcacgcc

SEQ ID NO: 88173 - RNA, 20 nt, Human
cacugguggcuagggguggg

SEQ ID NO: 88174 - RNA, 23 nt, Human
cacuugaacaguucggaggugag

SEQ ID NO: 88175 - RNA, 19 nt, Human
cagcucagauuagaggcag

SEQ ID NO: 88176 - RNA, 22 nt, Human
cagcugaggcaggguccccccc

SEQ ID NO: 88177 - RNA, 23 nt, Human
caggccgggugcacauggacacc

SEQ ID NO: 88178 - RNA, 19 nt, Human
caguggcauguggucccac

SEQ ID NO: 88179 - RNA, 22 nt, Human
caucugagccccaucacuauau

SEQ ID NO: 88180 - RNA, 19 nt, Human
ccaccaaccccucgcccug

SEQ ID NO: 88181 - RNA, 26 nt, Human
ccagagccucucuccugcuaggaaag

SEQ ID NO: 88182 - RNA, 22 nt, Human
ccaggccgggugcacauggaca

SEQ ID NO: 88183 - RNA, 19 nt, Human
ccagucccccagcccaagg

SEQ ID NO: 88184 - RNA, 21 nt, Human
ccagucccccagcccaaggug

SEQ ID NO: 88185 - RNA, 21 nt, Human
ccauugagcaccugacuacac

SEQ ID NO: 88186 - RNA, 25 nt, Human
cccagccaggagagacaaagucacc

SEQ ID NO: 88187 - RNA, 20 nt, Human
cccaugggggcugccccaga

SEQ ID NO: 88188 - RNA, 24 nt, Human
ccccaucccaaggcgcagaccaga

SEQ ID NO: 88189 - RNA, 25 nt, Human
cccccagucccccagcccaagguug

SEQ ID NO: 88190 - RNA, 21 nt, Human
ccccccaacauaggcagccuc

SEQ ID NO: 88191 - RNA, 26 nt, Human
cccccgaaggacacagcuggcaucca

SEQ ID NO: 88192 - RNA, 21 nt, Human
cccccugccccagcauuuggc

SEQ ID NO: 88193 - RNA, 21 nt, Human
ccccuugcccucaguucccca

SEQ ID NO: 88194 - RNA, 22 nt, Human
cccucaguuccccacuggcccc

SEQ ID NO: 88195 - RNA, 19 nt, Human
ccgccgccgccuucuccgc

SEQ ID NO: 88196 - RNA, 25 nt, Human
ccucccugucccaucccacuggggg

SEQ ID NO: 88197 - RNA, 21 nt, Human
ccucgcccuguguaaggcuuu

SEQ ID NO: 88198 - RNA, 21 nt, Human
ccucugcgggcugcgcugccc

SEQ ID NO: 88199 - RNA, 19 nt, Human
ccugaguguguaagggcca

SEQ ID NO: 88200 - RNA, 24 nt, Human
ccugucccaucccacuggggggag

SEQ ID NO: 88201 - RNA, 27 nt, Human
ccuuccuccacuauucucacagaaacc

SEQ ID NO: 88202 - RNA, 22 nt, Human
ccuugcccucaguuccccacug

SEQ ID NO: 88203 - RNA, 23 nt, Human
cggggagggggggcaguggcggc

SEQ ID NO: 88204 - RNA, 18 nt, Human
cgggucagcugaggcagg

SEQ ID NO: 88205 - RNA, 19 nt, Human
cuacacccaccccacccca

SEQ ID NO: 88206 - RNA, 19 nt, Human
cuaggggugggacagaggg

SEQ ID NO: 88207 - RNA, 24 nt, Human
cucucagggccuggccagcucagg

SEQ ID NO: 88208 - RNA, 23 nt, Human
cucuccuccgccgccgccuucuc

SEQ ID NO: 88209 - RNA, 22 nt, Human
cuggcccccaggcugggaugcc

SEQ ID NO: 88210 - RNA, 20 nt, Human
gaaaggugcaggcaguggca

SEQ ID NO: 88211 - RNA, 27 nt, Human
gaaauggccccccagucccccagccca

SEQ ID NO: 88212 - RNA, 18 nt, Human
gaaaugguuacaaugagc

SEQ ID NO: 88213 - RNA, 20 nt, Human
gacauucagcuuuagaaaug

SEQ ID NO: 88214 - RNA, 22 nt, Human
gagaaaugguuacaaugagcac

SEQ ID NO: 88215 - RNA, 23 nt, Human
gagaaggauuagacccagcuggg

SEQ ID NO: 88216 - RNA, 18 nt, Human
gagauagggagugggcac

SEQ ID NO: 88217 - RNA, 19 nt, Human
gagugggcacaggccugag

SEQ ID NO: 88218 - RNA, 24 nt, Human
gauagggagugggcacaggccuga

SEQ ID NO: 88219 - RNA, 20 nt, Human
gcaccagcagugggcaugga

SEQ ID NO: 88220 - RNA, 23 nt, Human
gcacuuggaggacacugguggcu

SEQ ID NO: 88221 - RNA, 24 nt, Human
gcagagaaaaggaaauggcccccc

SEQ ID NO: 88222 - RNA, 20 nt, Human
gcaggugccaacccucccac

SEQ ID NO: 88223 - RNA, 22 nt, Human
gcaguggcggcggcggcggcuu

SEQ ID NO: 88224 - RNA, 25 nt, Human
gccaacccucccaccaaccccucgc

SEQ ID NO: 88225 - RNA, 26 nt, Human
gccccagagccucucuccugcuagga

SEQ ID NO: 88226 - RNA, 20 nt, Human
gccucuccuccgccgccgcc

SEQ ID NO: 88227 - RNA, 20 nt, Human
gccucuccuccgccgccgcc

SEQ ID NO: 88228 - RNA, 19 nt, Human
gcgccgcggggaggggggg

SEQ ID NO: 88229 - RNA, 18 nt, Human
gcggcagcagaggccugg

SEQ ID NO: 88230 - RNA, 20 nt, Human
gcggcggcggcggcggcggc

SEQ ID NO: 88231 - RNA, 23 nt, Human
gcggcggcggcggcggcgggguu

SEQ ID NO: 88232 - RNA, 18 nt, Human
gcggcggcggcggcgggg

SEQ ID NO: 88233 - RNA, 23 nt, Human
gcggggaguguggggcaggaggg

SEQ ID NO: 88234 - RNA, 23 nt, Human
gcuaggggugggacagaggguuc

SEQ ID NO: 88235 - RNA, 21 nt, Human
ggaaaggcgaagaggccgggu

SEQ ID NO: 88236 - RNA, 23 nt, Human
ggagugugcaggugccaacccuc

SEQ ID NO: 88237 - RNA, 25 nt, Human
ggcaggagggugggaaagggggacc

SEQ ID NO: 88238 - RNA, 19 nt, Human
ggcggcggcggcggcggcg

SEQ ID NO: 88239 - RNA, 20 nt, Human
ggcggcggcggcggcggcgg

SEQ ID NO: 88240 - RNA, 23 nt, Human
ggcggcggcggcggcggcggcgg

SEQ ID NO: 88241 - RNA, 18 nt, Human
ggcggcgggguugggggg

SEQ ID NO: 88242 - RNA, 21 nt, Human
ggcgguaacucggccucuccu

SEQ ID NO: 88243 - RNA, 24 nt, Human
ggcuaggggugggacagaggguuc

SEQ ID NO: 88244 - RNA, 20 nt, Human
gggaaggagauagggagugg

SEQ ID NO: 88245 - RNA, 22 nt, Human
gggaaggagauagggagugggc

SEQ ID NO: 88246 - RNA, 22 nt, Human
gggaguggaggugggguggggc

SEQ ID NO: 88247 - RNA, 21 nt, Human
gggcagagaggccgggucagc

SEQ ID NO: 88248 - RNA, 19 nt, Human
gggcaguggcggcggcggc

SEQ ID NO: 88249 - RNA, 18 nt, Human
gggcgcgggcggcgggcg

SEQ ID NO: 88250 - RNA, 22 nt, Human
gggcggcagcagaggccugguu

SEQ ID NO: 88251 - RNA, 28 nt, Human
gggggcaguggcggcggcggcggcgggg

SEQ ID NO: 88252 - RNA, 24 nt, Human
gggggcaguggcggcggcggcggg

SEQ ID NO: 88253 - RNA, 19 nt, Human
gggugaggugggaguggag

SEQ ID NO: 88254 - RNA, 18 nt, Human
ggguugggggggcgcggg

SEQ ID NO: 88255 - RNA, 18 nt, Human
gguggggcagagaggccg

SEQ ID NO: 88256 - RNA, 22 nt, Human
gguggugagcaggagauggagu

SEQ ID NO: 88257 - RNA, 20 nt, Human
guggcggcggcggcggcggc

SEQ ID NO: 88258 - RNA, 20 nt, Human
guggcggcggcggcggcggc

SEQ ID NO: 88259 - RNA, 23 nt, Human
guggcggcggcggcggcggcggc

SEQ ID NO: 88260 - RNA, 18 nt, Human
guggggcaggaggguggg

SEQ ID NO: 88261 - RNA, 21 nt, Human
gugugugugugugugugugug

SEQ ID NO: 88262 - RNA, 29 nt, Human
uaagccccuacacccaccccaccccauaa

SEQ ID NO: 88263 - RNA, 21 nt, Human
uaaggcaaagggugaugucug

SEQ ID NO: 88264 - RNA, 26 nt, Human
uagaacaacaaaaaaagggcagagaa

SEQ ID NO: 88265 - RNA, 18 nt, Human
uagaggcagguggugagc

SEQ ID NO: 88266 - RNA, 20 nt, Human
uaucacugugacuauccuga

SEQ ID NO: 88267 - RNA, 25 nt, Human
uauccugacaccuggugggcuuggg

SEQ ID NO: 88268 - RNA, 22 nt, Human
uauucuccauugagcaccugac

SEQ ID NO: 88269 - RNA, 18 nt, Human
ucacccccugccccagca

SEQ ID NO: 88270 - RNA, 19 nt, Human
ucacccucccccuccuccc

SEQ ID NO: 88271 - RNA, 25 nt, Human
ucagggccuggccagcucagguccu

SEQ ID NO: 88272 - RNA, 23 nt, Human
ucagugagggagggacgaggcuc

SEQ ID NO: 88273 - RNA, 22 nt, Human
uccacuauucucacagaaacca

SEQ ID NO: 88274 - RNA, 21 nt, Human
uccaggccgggugcacauggu

SEQ ID NO: 88275 - RNA, 23 nt, Human
uccuccgccgccgccuucuccgc

SEQ ID NO: 88276 - RNA, 24 nt, Human
ucggccucuccuccgccgccgccu

SEQ ID NO: 88277 - RNA, 23 nt, Human
ugacacuagugagaaaugguuac

SEQ ID NO: 88278 - RNA, 21 nt, Human
ugagaaagcgacaagcaacau

SEQ ID NO: 88279 - RNA, 21 nt, Human
ugagcaggagauggagugugc

SEQ ID NO: 88280 - RNA, 24 nt, Human
ugagcaggagauggagugugcagg

SEQ ID NO: 88281 - RNA, 19 nt, Human
ugaggugggaguggaggug

SEQ ID NO: 88282 - RNA, 22 nt, Human
ugaguguguaagggccagauug

SEQ ID NO: 88283 - RNA, 23 nt, Human
ugaguguguaagggccagauugg

SEQ ID NO: 88284 - RNA, 18 nt, Human
ugccccagagccucucuc

SEQ ID NO: 88285 - RNA, 18 nt, Human
ugccccagagccucucuc

SEQ ID NO: 88286 - RNA, 19 nt, Human
ugccccagagccucucucc

SEQ ID NO: 88287 - RNA, 22 nt, Human
ugccccagcauuuggcacuguu

SEQ ID NO: 88288 - RNA, 23 nt, Human
ugcccucaguuccccacuggccc

SEQ ID NO: 88289 - RNA, 21 nt, Human
uggacacccacccuggcacca

SEQ ID NO: 88290 - RNA, 19 nt, Human
uggaggugggguggggcag

SEQ ID NO: 88291 - RNA, 18 nt, Human
uggcaccagcagugggca

SEQ ID NO: 88292 - RNA, 20 nt, Human
uggcauguggucccacuggg

SEQ ID NO: 88293 - RNA, 22 nt, Human
uggccccccagucccccagccc

SEQ ID NO: 88294 - RNA, 24 nt, Human
uggccccccagucccccagcccaa

SEQ ID NO: 88295 - RNA, 18 nt, Human
uggcggcggcggcggcgg

SEQ ID NO: 88296 - RNA, 19 nt, Human
ugggaaaggcgaagaggcc

SEQ ID NO: 88297 - RNA, 25 nt, Human
ugggaaaggcgaagaggccggguga

SEQ ID NO: 88298 - RNA, 19 nt, Human
ugggaaggagauagggagu

SEQ ID NO: 88299 - RNA, 20 nt, Human
ugggaggaccagccaggcug

SEQ ID NO: 88300 - RNA, 21 nt, Human
ugggaggaccagccaggcugc

SEQ ID NO: 88301 - RNA, 20 nt, Human
ugggaugccuuugggggaaa

SEQ ID NO: 88302 - RNA, 20 nt, Human
ugggcuuggggauguggcug

SEQ ID NO: 88303 - RNA, 20 nt, Human
ugggcuuggggauguggcug

SEQ ID NO: 88304 - RNA, 19 nt, Human
uggggauuguuuugucugu

SEQ ID NO: 88305 - RNA, 21 nt, Human
ugggggcugccccagagccuc

SEQ ID NO: 88306 - RNA, 18 nt, Human
ugggugccaaacaccugc

SEQ ID NO: 88307 - RNA, 22 nt, Human
ugucgaaugugaguccaguuuc

SEQ ID NO: 88308 - RNA, 21 nt, Human
ugucugaacugguaucacugu

SEQ ID NO: 88309 - RNA, 18 nt, Human
ugugcgugugcccagugg

SEQ ID NO: 88310 - RNA, 18 nt, Human
ugugugugugugugugug

SEQ ID NO: 88311 - RNA, 18 nt, Human
ugugugugugugugugug

SEQ ID NO: 88312 - RNA, 18 nt, Human
ugugugugugugugugug

SEQ ID NO: 88313 - RNA, 18 nt, Human
ugugugugugugugugug

SEQ ID NO: 88314 - RNA, 20 nt, Human
ugugugugugugugugugug

SEQ ID NO: 88315 - RNA, 21 nt, Human
ugugugugugugugugugugu

SEQ ID NO: 88316 - RNA, 21 nt, Human
ugugugugugugugugugugu

SEQ ID NO: 88317 - RNA, 21 nt, Human
ugugugugugugugugugugu

SEQ ID NO: 88318 - RNA, 21 nt, Human
ugugugugugugugugugugu

SEQ ID NO: 88319 - RNA, 21 nt, Human
ugugugugugugugugugugu

SEQ ID NO: 88320 - RNA, 22 nt, Human
ugugugugugugugugugugug

SEQ ID NO: 88321 - RNA, 21 nt, Human
uguguguguguucagcaaggg

SEQ ID NO: 88322 - RNA, 20 nt, Human
uguguguguuugugcgugug

SEQ ID NO: 88323 - RNA, 22 nt, Human
uguuguuuuuccaacuugucug

SEQ ID NO: 88324 - RNA, 19 nt, Human
uuaagcugggaggcacagg

SEQ ID NO: 88325 - RNA, 24 nt, Human
uugggacuccccaucccaaggcgc

SEQ ID NO: 88326 - RNA, 21 nt, Human
uuuguaagccccuacacccac

SEQ ID NO: 88327 - RNA, 21 nt, Human
acuugcggucccauuucugau

SEQ ID NO: 88328 - RNA, 19 nt, Human
agaugcugaugguuggacu

SEQ ID NO: 88329 - RNA, 18 nt, Human
aggcccagagcuucaccc

SEQ ID NO: 88330 - RNA, 18 nt, Human
caccaaaagccgaggccc

SEQ ID NO: 88331 - RNA, 21 nt, Human
cagcaauggauuuuaucuccc

SEQ ID NO: 88332 - RNA, 22 nt, Human
ccaccaaaagccgaggcccaga

SEQ ID NO: 88333 - RNA, 23 nt, Human
ccccaccaaaagccgaggcccag

SEQ ID NO: 88334 - RNA, 21 nt, Human
cgcacaguuuaaaaucaugau

SEQ ID NO: 88335 - RNA, 25 nt, Human
cuaccacuugcggucccauuucuga

SEQ ID NO: 88336 - RNA, 20 nt, Human
cuugcggucccauuucugau

SEQ ID NO: 88337 - RNA, 21 nt, Human
guugcaccauauuuugguuca

SEQ ID NO: 88338 - RNA, 18 nt, Human
uacacaguuuuaaauugg

SEQ ID NO: 88339 - RNA, 19 nt, Human
uauuucuuuugcagaagcu

SEQ ID NO: 88340 - RNA, 23 nt, Human
ucaacauaucuuuaagaguuuau

SEQ ID NO: 88341 - RNA, 21 nt, Human
ucacaguuuauccaugauuua

SEQ ID NO: 88342 - RNA, 21 nt, Human
ucauguggcaaacucacauuu

SEQ ID NO: 88343 - RNA, 22 nt, Human
uccccaccaaaagccgaggccc

SEQ ID NO: 88344 - RNA, 24 nt, Human
uccccaccaaaagccgaggcccag

SEQ ID NO: 88345 - RNA, 19 nt, Human
ucuuuugcagaagcuggga

SEQ ID NO: 88346 - RNA, 21 nt, Human
uggaggccaucgauuucuucu

SEQ ID NO: 88347 - RNA, 25 nt, Human
ugguuggacuauauucaugucucgu

SEQ ID NO: 88348 - RNA, 26 nt, Human
uuagcagcaauggauuuuaucucccc

SEQ ID NO: 88349 - RNA, 21 nt, Human
aaacagaaucacgagaggcaa

SEQ ID NO: 88350 - RNA, 21 nt, Human
aagaaucuguggccuccuuuc

SEQ ID NO: 88351 - RNA, 19 nt, Human
aagccccccagaggagauc

SEQ ID NO: 88352 - RNA, 19 nt, Human
aagcugcaccccaccccca

SEQ ID NO: 88353 - RNA, 20 nt, Human
aaggagggagacagcgcccc

SEQ ID NO: 88354 - RNA, 21 nt, Human
acaaacagaaucacgagaggc

SEQ ID NO: 88355 - RNA, 20 nt, Human
acaaagaagcaggcuuggga

SEQ ID NO: 88356 - RNA, 22 nt, Human
acagagcagcaacagcagcagc

SEQ ID NO: 88357 - RNA, 25 nt, Human
acagagcagcaacagcagcagccaa

SEQ ID NO: 88358 - RNA, 21 nt, Human
acccagaacccuccccaagac

SEQ ID NO: 88359 - RNA, 18 nt, Human
accccacccccaggguag

SEQ ID NO: 88360 - RNA, 24 nt, Human
agacaggcaugaggugccaucccu

SEQ ID NO: 88361 - RNA, 26 nt, Human
agacagguaagugaaggggcucaggg

SEQ ID NO: 88362 - RNA, 26 nt, Human
agcaacagcagcagccaagcccccca

SEQ ID NO: 88363 - RNA, 24 nt, Human
aggaaggggcaggcagggugaggg

SEQ ID NO: 88364 - RNA, 19 nt, Human
aggcaaaggcugaggcaug

SEQ ID NO: 88365 - RNA, 21 nt, Human
aggcaaagggaugccccaggg

SEQ ID NO: 88366 - RNA, 24 nt, Human
aggcaaauacagagcagcaacagc

SEQ ID NO: 88367 - RNA, 24 nt, Human
aggcaagggauguuggaggccaag

SEQ ID NO: 88368 - RNA, 24 nt, Human
aggcaugaggugccaucccugagg

SEQ ID NO: 88369 - RNA, 20 nt, Human
aggcugaggcauggaggugg

SEQ ID NO: 88370 - RNA, 21 nt, Human
aggcugaggcauggagguggg

SEQ ID NO: 88371 - RNA, 25 nt, Human
aggcugaggcauggagguggggggu

SEQ ID NO: 88372 - RNA, 20 nt, Human
agggaccuuggaucuggggu

SEQ ID NO: 88373 - RNA, 19 nt, Human
aggggggaagggagggcag

SEQ ID NO: 88374 - RNA, 21 nt, Human
aggugcacagggauggggggc

SEQ ID NO: 88375 - RNA, 19 nt, Human
aggugggggguggggagca

SEQ ID NO: 88376 - RNA, 20 nt, Human
aggugggggguggggagcag

SEQ ID NO: 88377 - RNA, 18 nt, Human
aucucacccacugagcaa

SEQ ID NO: 88378 - RNA, 22 nt, Human
augaggcggaccagaguguucc

SEQ ID NO: 88379 - RNA, 24 nt, Human
augguaacaccaaagaaaccccaa

SEQ ID NO: 88380 - RNA, 23 nt, Human
caacagcagcagccaagcccccc

SEQ ID NO: 88381 - RNA, 24 nt, Human
caacagcagcagccaagcccccca

SEQ ID NO: 88382 - RNA, 24 nt, Human
caacagcagcagccaagcccccca

SEQ ID NO: 88383 - RNA, 27 nt, Human
caacagcagcagccaagccccccagag

SEQ ID NO: 88384 - RNA, 20 nt, Human
caaccccugggcaccauccc

SEQ ID NO: 88385 - RNA, 21 nt, Human
caaccccugggcaccauccca

SEQ ID NO: 88386 - RNA, 23 nt, Human
caagacaagcuccaugggguguc

SEQ ID NO: 88387 - RNA, 22 nt, Human
cacacucggcucucucuggccc

SEQ ID NO: 88388 - RNA, 23 nt, Human
cacccagaacccuccccaagaca

SEQ ID NO: 88389 - RNA, 21 nt, Human
cacccagcucggccuucggcu

SEQ ID NO: 88390 - RNA, 25 nt, Human
cacgggcaggccccaguccuuguug

SEQ ID NO: 88391 - RNA, 23 nt, Human
cacuccuggcucuagcaauacau

SEQ ID NO: 88392 - RNA, 18 nt, Human
cagaacccuccccaagac

SEQ ID NO: 88393 - RNA, 24 nt, Human
cagacagggaggggggaagggagg

SEQ ID NO: 88394 - RNA, 20 nt, Human
cagacgaugcugcaggaagc

SEQ ID NO: 88395 - RNA, 19 nt, Human
cagcaacagcagcagccaa

SEQ ID NO: 88396 - RNA, 19 nt, Human
cagcaacagcagcagccaa

SEQ ID NO: 88397 - RNA, 19 nt, Human
cagcacccgguccagccac

SEQ ID NO: 88398 - RNA, 19 nt, Human
cagcagccaagccccccag

SEQ ID NO: 88399 - RNA, 19 nt, Human
cagcuggggcuuaagggcu

SEQ ID NO: 88400 - RNA, 25 nt, Human
cagggcacaacaucuucaggcaccc

SEQ ID NO: 88401 - RNA, 18 nt, Human
caggugccuacgcugacg

SEQ ID NO: 88402 - RNA, 28 nt, Human
ccacccagaacccuccccaagacaagcu

SEQ ID NO: 88403 - RNA, 24 nt, Human
ccacccagcucggccuucggcugc

SEQ ID NO: 88404 - RNA, 25 nt, Human
ccacugagcaacauugagcuuccca

SEQ ID NO: 88405 - RNA, 22 nt, Human
ccagaacccuccccaagacaag

SEQ ID NO: 88406 - RNA, 20 nt, Human
ccaguacugcagcuugggag

SEQ ID NO: 88407 - RNA, 20 nt, Human
ccaucccacggguccucucc

SEQ ID NO: 88408 - RNA, 18 nt, Human
cccagcucggccuucggc

SEQ ID NO: 88409 - RNA, 24 nt, Human
cccagcucggccuucggcugccuc

SEQ ID NO: 88410 - RNA, 18 nt, Human
ccccuggggccucagggu

SEQ ID NO: 88411 - RNA, 21 nt, Human
cccgccgccggcccgcagccg

SEQ ID NO: 88412 - RNA, 20 nt, Human
cccucccgccgccggcccgc

SEQ ID NO: 88413 - RNA, 22 nt, Human
ccgacagcuggggcuuaagggc

SEQ ID NO: 88414 - RNA, 21 nt, Human
ccuaggggaguacagacaaau

SEQ ID NO: 88415 - RNA, 25 nt, Human
ccucccgccgccggcccgcagccgg

SEQ ID NO: 88416 - RNA, 22 nt, Human
ccugccagcuuccacccagaac

SEQ ID NO: 88417 - RNA, 18 nt, Human
ccugggguaggcaaaggc

SEQ ID NO: 88418 - RNA, 20 nt, Human
ccugggguaggcaaaggcug

SEQ ID NO: 88419 - RNA, 27 nt, Human
cgaaagcagcgcgcgcagccagcaccc

SEQ ID NO: 88420 - RNA, 23 nt, Human
cgcagccagcacccgguccagcc

SEQ ID NO: 88421 - RNA, 18 nt, Human
cgcugacgacuauguggc

SEQ ID NO: 88422 - RNA, 20 nt, Human
cuacuuguggagagacaggu

SEQ ID NO: 88423 - RNA, 20 nt, Human
cuccccucccgccgccggcc

SEQ ID NO: 88424 - RNA, 19 nt, Human
cucccgccgccggcccgca

SEQ ID NO: 88425 - RNA, 25 nt, Human
cuccuggcucuagcaauacaucuua

SEQ ID NO: 88426 - RNA, 18 nt, Human
cugcaccccacccccagg

SEQ ID NO: 88427 - RNA, 19 nt, Human
cugcaccccacccccaggg

SEQ ID NO: 88428 - RNA, 24 nt, Human
cugggacugcccaaggcacuccug

SEQ ID NO: 88429 - RNA, 22 nt, Human
cugggcccuggacguugccaug

SEQ ID NO: 88430 - RNA, 20 nt, Human
cugggggaagugaacauggg

SEQ ID NO: 88431 - RNA, 21 nt, Human
gaagcugcaccccacccccag

SEQ ID NO: 88432 - RNA, 21 nt, Human
gacaaagaagcaggcuuggga

SEQ ID NO: 88433 - RNA, 19 nt, Human
gacaagcuccauggggugu

SEQ ID NO: 88434 - RNA, 21 nt, Human
gacagcuggggcuuaagggcu

SEQ ID NO: 88435 - RNA, 19 nt, Human
gagaggggguaccaaggcc

SEQ ID NO: 88436 - RNA, 24 nt, Human
gagcugggaugguaacaccaaaga

SEQ ID NO: 88437 - RNA, 18 nt, Human
gaggggggaagggagggc

SEQ ID NO: 88438 - RNA, 20 nt, Human
gaggggggaagggagggcag

SEQ ID NO: 88439 - RNA, 23 nt, Human
gaggggguaccaaggccucuccu

SEQ ID NO: 88440 - RNA, 18 nt, Human
gaggugccaucccugagg

SEQ ID NO: 88441 - RNA, 18 nt, Human
gaugccccaggggagagg

SEQ ID NO: 88442 - RNA, 21 nt, Human
gcagcaggcaagggauguugg

SEQ ID NO: 88443 - RNA, 22 nt, Human
gcagccagcacccgguccagcc

SEQ ID NO: 88444 - RNA, 22 nt, Human
gcccgcagccgggcucccucag

SEQ ID NO: 88445 - RNA, 21 nt, Human
gccuuuggcucuacuugugga

SEQ ID NO: 88446 - RNA, 18 nt, Human
gcgcagccagcacccggu

SEQ ID NO: 88447 - RNA, 18 nt, Human
gcugaggcauggaggugg

SEQ ID NO: 88448 - RNA, 21 nt, Human
ggaggggggaagggagggcag

SEQ ID NO: 88449 - RNA, 22 nt, Human
ggaggggggaagggagggcagu

SEQ ID NO: 88450 - RNA, 20 nt, Human
ggcagccacaaaggacagga

SEQ ID NO: 88451 - RNA, 24 nt, Human
gggagaggggguaccaaggccucu

SEQ ID NO: 88452 - RNA, 22 nt, Human
gggcaggcagggugagggaccu

SEQ ID NO: 88453 - RNA, 19 nt, Human
ggggaagggagggcagugg

SEQ ID NO: 88454 - RNA, 18 nt, Human
ggggagaggggguaccaa

SEQ ID NO: 88455 - RNA, 18 nt, Human
ggggggcucagaugcaga

SEQ ID NO: 88456 - RNA, 18 nt, Human
ggguaucccccauccauc

SEQ ID NO: 88457 - RNA, 22 nt, Human
gguaagugaaggggcucagggc

SEQ ID NO: 88458 - RNA, 21 nt, Human
ggugugagccccucgcucccu

SEQ ID NO: 88459 - RNA, 19 nt, Human
guagagggugcuguaugcc

SEQ ID NO: 88460 - RNA, 18 nt, Human
gucuggaucucacccacu

SEQ ID NO: 88461 - RNA, 22 nt, Human
uacagacaaauauagacagaca

SEQ ID NO: 88462 - RNA, 18 nt, Human
uaccaaggccucuccugg

SEQ ID NO: 88463 - RNA, 23 nt, Human
ucagggcaguguggagcugggac

SEQ ID NO: 88464 - RNA, 21 nt, Human
uccacaacaggcagguaaaaa

SEQ ID NO: 88465 - RNA, 22 nt, Human
uccacacccaggugcacaggga

SEQ ID NO: 88466 - RNA, 23 nt, Human
uccacacccaggugcacagggau

SEQ ID NO: 88467 - RNA, 19 nt, Human
uccacccagaacccucccc

SEQ ID NO: 88468 - RNA, 22 nt, Human
uccacccagaacccuccccaag

SEQ ID NO: 88469 - RNA, 18 nt, Human
uccccuggcucagagccc

SEQ ID NO: 88470 - RNA, 20 nt, Human
ucccugaggcgggcacgggc

SEQ ID NO: 88471 - RNA, 21 nt, Human
uccgaggucccaaggcaaccc

SEQ ID NO: 88472 - RNA, 22 nt, Human
uccuuguuggcacacucggcuc

SEQ ID NO: 88473 - RNA, 19 nt, Human
ucucacccacugagcaaca

SEQ ID NO: 88474 - RNA, 24 nt, Human
ucucuggcccagcugggaugcugg

SEQ ID NO: 88475 - RNA, 20 nt, Human
ugacucagggcacaacaucu

SEQ ID NO: 88476 - RNA, 22 nt, Human
ugaggcgggcacgggcaggccc

SEQ ID NO: 88477 - RNA, 18 nt, Human
ugagggaccuuggaucug

SEQ ID NO: 88478 - RNA, 20 nt, Human
ugagggaggagagccccuua

SEQ ID NO: 88479 - RNA, 19 nt, Human
ugcagcuugggagaaggag

SEQ ID NO: 88480 - RNA, 22 nt, Human
ugccaaggcaaagggaugcccc

SEQ ID NO: 88481 - RNA, 19 nt, Human
uggagcugggacugcccaa

SEQ ID NO: 88482 - RNA, 18 nt, Human
uggagguggggggugggg

SEQ ID NO: 88483 - RNA, 19 nt, Human
uggagguggggggugggga

SEQ ID NO: 88484 - RNA, 24 nt, Human
uggaucucacccacugagcaacau

SEQ ID NO: 88485 - RNA, 25 nt, Human
uggcagcaggcaagggauguuggag

SEQ ID NO: 88486 - RNA, 19 nt, Human
uggcgaggacaaagaagca

SEQ ID NO: 88487 - RNA, 20 nt, Human
uggcgaggacaaagaagcag

SEQ ID NO: 88488 - RNA, 20 nt, Human
ugggagaggccgugggagcc

SEQ ID NO: 88489 - RNA, 18 nt, Human
ugggagccgaaagcagcg

SEQ ID NO: 88490 - RNA, 22 nt, Human
ugggaggaaggggcaggcaggg

SEQ ID NO: 88491 - RNA, 22 nt, Human
ugggaggaaggggcaggcaggg

SEQ ID NO: 88492 - RNA, 21 nt, Human
ugggaugcuggggaggggcag

SEQ ID NO: 88493 - RNA, 21 nt, Human
ugggcccuggacguugccaug

SEQ ID NO: 88494 - RNA, 22 nt, Human
uggggaggggcaggguugcugg

SEQ ID NO: 88495 - RNA, 26 nt, Human
uggggaggggcaggguugcugggccg

SEQ ID NO: 88496 - RNA, 20 nt, Human
uggguaucccccauccaucc

SEQ ID NO: 88497 - RNA, 23 nt, Human
uguggcgaggacaaagaagcagg

SEQ ID NO: 88498 - RNA, 22 nt, Human
uucccauugccuuuggcucuac

SEQ ID NO: 88499 - RNA, 20 nt, Human
uuccucccgccgugugcccc

SEQ ID NO: 88500 - RNA, 21 nt, Human
uuccugggguaggcaaaggcu

SEQ ID NO: 88501 - RNA, 23 nt, Human
aaaaaaaaaaaaaaacacaaaag

SEQ ID NO: 88502 - RNA, 32 nt, Human
aaaaaaaaaaaaaacacaaaagggcaaaagag

SEQ ID NO: 88503 - RNA, 22 nt, Human
aaaaaaaaaaaacacaaaaggg

SEQ ID NO: 88504 - RNA, 24 nt, Human
aaaaaaaaaaaacacaaaagggca

SEQ ID NO: 88505 - RNA, 25 nt, Human
aaaaaaaaaaacacaaaagggcaag

SEQ ID NO: 88506 - RNA, 23 nt, Human
aaaaaaaaaacacaaaagggcaa

SEQ ID NO: 88507 - RNA, 19 nt, Human
aaguggcagcuacccaaaa

SEQ ID NO: 88508 - RNA, 29 nt, Human
acuucaaaaaaaaaaaaaaaaaaacacaa

SEQ ID NO: 88509 - RNA, 21 nt, Human
agagggggcagaacgcaguca

SEQ ID NO: 88510 - RNA, 22 nt, Human
agcacuuacaaaagaaaaagua

SEQ ID NO: 88511 - RNA, 21 nt, Human
agguacaagcaagaaacagug

SEQ ID NO: 88512 - RNA, 22 nt, Human
caaccggaggacugcagccaua

SEQ ID NO: 88513 - RNA, 21 nt, Human
caaguggcagcuacccaaaac

SEQ ID NO: 88514 - RNA, 19 nt, Human
cacagccucgguccauuuc

SEQ ID NO: 88515 - RNA, 18 nt, Human
caccuggguggcaacaga

SEQ ID NO: 88516 - RNA, 21 nt, Human
cagaaauaacauuuacaaacu

SEQ ID NO: 88517 - RNA, 20 nt, Human
cagaguuaggacuguccaga

SEQ ID NO: 88518 - RNA, 21 nt, Human
cagaugccugcguauuaacgu

SEQ ID NO: 88519 - RNA, 21 nt, Human
cagcguguggcuucaccaagc

SEQ ID NO: 88520 - RNA, 18 nt, Human
caggaggccuacuccugc

SEQ ID NO: 88521 - RNA, 21 nt, Human
cauaccaggccaauuuaugua

SEQ ID NO: 88522 - RNA, 23 nt, Human
cauaccaggccaauuuauguagc

SEQ ID NO: 88523 - RNA, 21 nt, Human
cauaugauugcaguguagacc

SEQ ID NO: 88524 - RNA, 18 nt, Human
ccaccuucuacucccagg

SEQ ID NO: 88525 - RNA, 21 nt, Human
ccaugaaugaauaugcaaauc

SEQ ID NO: 88526 - RNA, 24 nt, Human
cccuguuugucuuuuuuugggggu

SEQ ID NO: 88527 - RNA, 25 nt, Human
ccuguuugucuuuuuuugggggugg

SEQ ID NO: 88528 - RNA, 21 nt, Human
cguauuaacguauuaaaaauu

SEQ ID NO: 88529 - RNA, 22 nt, Human
cugcacugugccuugucuucuc

SEQ ID NO: 88530 - RNA, 19 nt, Human
cugcaguacucugcuuuug

SEQ ID NO: 88531 - RNA, 24 nt, Human
cugcugcuguuuaugugacugcuu

SEQ ID NO: 88532 - RNA, 19 nt, Human
ggacuguccagaucgucag

SEQ ID NO: 88533 - RNA, 24 nt, Human
gucuuuuuuuggggguggggggcg

SEQ ID NO: 88534 - RNA, 23 nt, Human
uaacaucaccuggguggcaacag

SEQ ID NO: 88535 - RNA, 21 nt, Human
uaaggcaagacugaaucuguc

SEQ ID NO: 88536 - RNA, 23 nt, Human
uaaggcaagacugaaucuguccc

SEQ ID NO: 88537 - RNA, 23 nt, Human
uacauagaaaauagauucuaacu

SEQ ID NO: 88538 - RNA, 24 nt, Human
uacuccugcugcuguuuaugugac

SEQ ID NO: 88539 - RNA, 18 nt, Human
uagcacuuacaaaagaaa

SEQ ID NO: 88540 - RNA, 25 nt, Human
uauacaagacuucaaaaaaaaaaaa

SEQ ID NO: 88541 - RNA, 21 nt, Human
ucaaaaaaaaaaaaaaaaaaa

SEQ ID NO: 88542 - RNA, 21 nt, Human
ucaaaaaaaaaaaaaaaaaaa

SEQ ID NO: 88543 - RNA, 21 nt, Human
ucaaacaucugagugucuugc

SEQ ID NO: 88544 - RNA, 23 nt, Human
ucaaacaucugagugucuugcau

SEQ ID NO: 88545 - RNA, 24 nt, Human
ucaaacugauauauauauauauau

SEQ ID NO: 88546 - RNA, 22 nt, Human
ucaccaagcugcacugugccuu

SEQ ID NO: 88547 - RNA, 23 nt, Human
ucacuuagcuucugccuccuagg

SEQ ID NO: 88548 - RNA, 18 nt, Human
ucagaguuucuuggugac

SEQ ID NO: 88549 - RNA, 21 nt, Human
ucagccagagguacaagcaag

SEQ ID NO: 88550 - RNA, 22 nt, Human
ugaauaugcaaaucagaugccu

SEQ ID NO: 88551 - RNA, 25 nt, Human
ugagugucuugcauuucgcgacccu

SEQ ID NO: 88552 - RNA, 22 nt, Human
ugauauauauauauauauuaua

SEQ ID NO: 88553 - RNA, 23 nt, Human
ugcaguacucugcuuuugaaaag

SEQ ID NO: 88554 - RNA, 18 nt, Human
ugccuugucuucucguca

SEQ ID NO: 88555 - RNA, 24 nt, Human
uggggguggggggcguaauuugag

SEQ ID NO: 88556 - RNA, 23 nt, Human
ugucuuuuuuugggggugggggg

SEQ ID NO: 88557 - RNA, 24 nt, Human
uucaagcaacagcaauaauacaaa

SEQ ID NO: 88558 - RNA, 19 nt, Human
uucccaccuucuacuccca

SEQ ID NO: 88559 - RNA, 19 nt, Human
uugaaaagcaggaggccua

SEQ ID NO: 88560 - RNA, 22 nt, Human
uuuacaguagccauucucaacu

SEQ ID NO: 88561 - RNA, 21 nt, Human
uuuguucaaguggcagcuacc

SEQ ID NO: 88562 - RNA, 22 nt, Human
ugaguccugggcuagaagccgg

SEQ ID NO: 88563 - RNA, 19 nt, Human
agccaaguuaagaugauug

SEQ ID NO: 88564 - RNA, 25 nt, Human
caucuaauauccaucuagacucaag

SEQ ID NO: 88565 - RNA, 21 nt, Human
ggcggagggggcuggcccccg

SEQ ID NO: 88566 - RNA, 21 nt, Human
ggcuggcccccgaggcugggc

SEQ ID NO: 88567 - RNA, 22 nt, Human
uagcauaaaaugacagcagccc

SEQ ID NO: 88568 - RNA, 20 nt, Human
uauggcaaauugucaacaga

SEQ ID NO: 88569 - RNA, 20 nt, Human
uauggcaaauugucaacaga

SEQ ID NO: 88570 - RNA, 21 nt, Human
uauggcaaauugucaacagau

SEQ ID NO: 88571 - RNA, 24 nt, Human
uguuagccaaguuaagaugauugg

SEQ ID NO: 88572 - RNA, 23 nt, Human
acgcugggcucaccagagagggu

SEQ ID NO: 88573 - RNA, 20 nt, Human
agaaagagacaggcuggcua

SEQ ID NO: 88574 - RNA, 24 nt, Human
aggcgugggugcccugggcagggu

SEQ ID NO: 88575 - RNA, 18 nt, Human
aggcugguacagugggga

SEQ ID NO: 88576 - RNA, 23 nt, Human
cacggaacacccagcuggcaaac

SEQ ID NO: 88577 - RNA, 23 nt, Human
cagcuuaucagaggcugguacag

SEQ ID NO: 88578 - RNA, 19 nt, Human
caggggaaguugggccccu

SEQ ID NO: 88579 - RNA, 21 nt, Human
cauaaaggacaacuggaggca

SEQ ID NO: 88580 - RNA, 18 nt, Human
ccagcuggcaaacacagg

SEQ ID NO: 88581 - RNA, 18 nt, Human
ccggcggcugcgucuccu

SEQ ID NO: 88582 - RNA, 25 nt, Human
ccucugagcuccaggggaaguuggg

SEQ ID NO: 88583 - RNA, 21 nt, Human
ccugcaaacaccuguccaccu

SEQ ID NO: 88584 - RNA, 25 nt, Human
ccugcaauguucauaaaggacaacu

SEQ ID NO: 88585 - RNA, 19 nt, Human
ccugcggcagcccagagga

SEQ ID NO: 88586 - RNA, 22 nt, Human
ccugcuggcucugccuccccca

SEQ ID NO: 88587 - RNA, 21 nt, Human
cgaggcgugggugcccugggc

SEQ ID NO: 88588 - RNA, 28 nt, Human
cggcagcccagaggaacucagagagagg

SEQ ID NO: 88589 - RNA, 22 nt, Human
cucacgucuugcucuauuccca

SEQ ID NO: 88590 - RNA, 21 nt, Human
cucccccaacuguggccaggu

SEQ ID NO: 88591 - RNA, 24 nt, Human
cugagcuccaggggaaguugggcc

SEQ ID NO: 88592 - RNA, 19 nt, Human
gaacacccagcuggcaaac

SEQ ID NO: 88593 - RNA, 20 nt, Human
gagcaggguggggcuaaaau

SEQ ID NO: 88594 - RNA, 20 nt, Human
gccaaggaggggacgcuggg

SEQ ID NO: 88595 - RNA, 21 nt, Human
gggcaggguccggcggcugcg

SEQ ID NO: 88596 - RNA, 18 nt, Human
uauuucaagccacaguca

SEQ ID NO: 88597 - RNA, 18 nt, Human
ucccagggcuccuggaag

SEQ ID NO: 88598 - RNA, 22 nt, Human
ucccagggcuccuggaagccaa

SEQ ID NO: 88599 - RNA, 22 nt, Human
ucuccuagggcaggugacaagc

SEQ ID NO: 88600 - RNA, 22 nt, Human
ugcgacuguugcaggggggcag

SEQ ID NO: 88601 - RNA, 19 nt, Human
uugggccccugcaaacacc

SEQ ID NO: 88602 - RNA, 22 nt, Human
uuucaagccacagucagauucu

SEQ ID NO: 88603 - RNA, 19 nt, Human
aaaaaaagggagguaagaa

SEQ ID NO: 88604 - RNA, 24 nt, Human
aagaggcuugccuuuugagaucag

SEQ ID NO: 88605 - RNA, 21 nt, Human
aauuauaaagaucacacggga

SEQ ID NO: 88606 - RNA, 20 nt, Human
agagugugugugagggugca

SEQ ID NO: 88607 - RNA, 20 nt, Human
ccccgccccgccccgccccc

SEQ ID NO: 88608 - RNA, 22 nt, Human
cuaaagccaaaaaaaauaaaua

SEQ ID NO: 88609 - RNA, 21 nt, Human
ggagaguuauaaaaaaaggga

SEQ ID NO: 88610 - RNA, 23 nt, Human
gguaagaaagcucacggaaaaga

SEQ ID NO: 88611 - RNA, 18 nt, Human
guuuauauuuucccacau

SEQ ID NO: 88612 - RNA, 30 nt, Human
guuuuuuuuguuuuuuguuuuugcuuuugg

SEQ ID NO: 88613 - RNA, 18 nt, Human
uauaaacacccaaccgac

SEQ ID NO: 88614 - RNA, 25 nt, Human
uauauaaacacccaaccgacuucug

SEQ ID NO: 88615 - RNA, 20 nt, Human
uccccgccccgccccgcccc

SEQ ID NO: 88616 - RNA, 22 nt, Human
ucucuuuuuuugugugugugug

SEQ ID NO: 88617 - RNA, 18 nt, Human
ugcaguguuuuuuuuuua

SEQ ID NO: 88618 - RNA, 22 nt, Human
uggagaguuauaaaaaaaggga

SEQ ID NO: 88619 - RNA, 24 nt, Human
uguaugaauagagaauauggagag

SEQ ID NO: 88620 - RNA, 22 nt, Human
uguguguguuuuuuuguuuuuu

SEQ ID NO: 88621 - RNA, 19 nt, Human
uguguuuuuuuguuuuuug

SEQ ID NO: 88622 - RNA, 23 nt, Human
uguuauguuuuuucucuuuuuuu

SEQ ID NO: 88623 - RNA, 24 nt, Human
uguuuugcuucuuuguuccucuua

SEQ ID NO: 88624 - RNA, 19 nt, Human
uuccaguugcaguguuuuu

SEQ ID NO: 88625 - RNA, 19 nt, Human
uucuuuguuccucuuauau

SEQ ID NO: 88626 - RNA, 26 nt, Human
uuguuuuuuguuuuuuuguuuuuuuu

SEQ ID NO: 88627 - RNA, 24 nt, Human
uuguuuuuuuuguuuuuuguuuuu

SEQ ID NO: 88628 - RNA, 24 nt, Human
uuuauauuuucccacauuuccugu

SEQ ID NO: 88629 - RNA, 21 nt, Human
uuuccuguuguuuugcuucuu

SEQ ID NO: 88630 - RNA, 22 nt, Human
uuuccuguuguuuugcuucuuu

SEQ ID NO: 88631 - RNA, 20 nt, Human
uuugagaucagaaacuguuc

SEQ ID NO: 88632 - RNA, 19 nt, Human
uuugcuucuuuguuccucu

SEQ ID NO: 88633 - RNA, 23 nt, Human
uuuuguuuuuuguuuuugcuuuu

SEQ ID NO: 88634 - RNA, 21 nt, Human
uuuuuguuuuuuguuuuugcu

SEQ ID NO: 88635 - RNA, 24 nt, Human
uuuuuuuguuuuuuguuuuugcuu

SEQ ID NO: 88636 - RNA, 22 nt, Human
uuuuuuuguuuuuuuuguuuuu

SEQ ID NO: 88637 - RNA, 19 nt, Human
aaaaagaagacccgaaaga

SEQ ID NO: 88638 - RNA, 21 nt, Human
aaacccagagaggucucugug

SEQ ID NO: 88639 - RNA, 18 nt, Human
aaagacgaggguccgugc

SEQ ID NO: 88640 - RNA, 20 nt, Human
aaagcucuccgccugcuccc

SEQ ID NO: 88641 - RNA, 24 nt, Human
aaaguuagagaggauggagggguu

SEQ ID NO: 88642 - RNA, 23 nt, Human
aacaucuggcacagauacacaga

SEQ ID NO: 88643 - RNA, 22 nt, Human
aaccucagagacaucucuguac

SEQ ID NO: 88644 - RNA, 21 nt, Human
acaucuuugauuucuggucau

SEQ ID NO: 88645 - RNA, 24 nt, Human
acauuaagggauuggcuugaaaag

SEQ ID NO: 88646 - RNA, 18 nt, Human
agacaauggggacaacua

SEQ ID NO: 88647 - RNA, 21 nt, Human
agacccgaaagaccgagucuu

SEQ ID NO: 88648 - RNA, 22 nt, Human
aggaagaaaggaaaacaucugg

SEQ ID NO: 88649 - RNA, 18 nt, Human
aggaaggguuaaggaaag

SEQ ID NO: 88650 - RNA, 23 nt, Human
aggcaaaaccuuuaauaacauga

SEQ ID NO: 88651 - RNA, 21 nt, Human
aggcaaagaaacccagagagg

SEQ ID NO: 88652 - RNA, 23 nt, Human
agggacuuugggaaagcugggau

SEQ ID NO: 88653 - RNA, 19 nt, Human
aguaaagaaggaagaaagg

SEQ ID NO: 88654 - RNA, 21 nt, Human
agucagcgcccuggcuccugg

SEQ ID NO: 88655 - RNA, 20 nt, Human
aguccuggggcgggggccgg

SEQ ID NO: 88656 - RNA, 18 nt, Human
auccccccuggccaccag

SEQ ID NO: 88657 - RNA, 21 nt, Human
aucuggcacagauacacagag

SEQ ID NO: 88658 - RNA, 19 nt, Human
caaacuggagaaaagacaa

SEQ ID NO: 88659 - RNA, 21 nt, Human
caaagaaacccagagaggucu

SEQ ID NO: 88660 - RNA, 20 nt, Human
caaggcaaagaaacccagag

SEQ ID NO: 88661 - RNA, 18 nt, Human
cacagagagaggaaugac

SEQ ID NO: 88662 - RNA, 26 nt, Human
cacagccccgggagacucaaggcaaa

SEQ ID NO: 88663 - RNA, 21 nt, Human
cacccccgcucaaacuggaga

SEQ ID NO: 88664 - RNA, 19 nt, Human
caccggcagcucuggagac

SEQ ID NO: 88665 - RNA, 24 nt, Human
caccggcagcucuggagacggcuc

SEQ ID NO: 88666 - RNA, 19 nt, Human
cacugcugggaggcgagcc

SEQ ID NO: 88667 - RNA, 21 nt, Human
ccaccaccugugacuuuuagu

SEQ ID NO: 88668 - RNA, 18 nt, Human
ccccccuggccaccaccu

SEQ ID NO: 88669 - RNA, 25 nt, Human
cccccgcucaaacuggagaaaagac

SEQ ID NO: 88670 - RNA, 19 nt, Human
cccgcccuucccccguucc

SEQ ID NO: 88671 - RNA, 20 nt, Human
cccugggucgccuauggccc

SEQ ID NO: 88672 - RNA, 20 nt, Human
cccuucccccguuccuuccc

SEQ ID NO: 88673 - RNA, 23 nt, Human
ccgccuccgucgucuuaacgccu

SEQ ID NO: 88674 - RNA, 18 nt, Human
ccucaccccgcccuuccc

SEQ ID NO: 88675 - RNA, 21 nt, Human
ccuccgucgucuuaacgccua

SEQ ID NO: 88676 - RNA, 19 nt, Human
ccugggcggugguugguuu

SEQ ID NO: 88677 - RNA, 18 nt, Human
ccuggggcgggggccggc

SEQ ID NO: 88678 - RNA, 21 nt, Human
cgcccgggcuagaaacccggg

SEQ ID NO: 88679 - RNA, 19 nt, Human
cgcccuggcuccugggcgc

SEQ ID NO: 88680 - RNA, 19 nt, Human
cggauggcaaaaaauagca

SEQ ID NO: 88681 - RNA, 19 nt, Human
cgugcagggcauggcuccg

SEQ ID NO: 88682 - RNA, 21 nt, Human
cgugugcugggggugagggcg

SEQ ID NO: 88683 - RNA, 21 nt, Human
cuaaagggucuuucuucccuc

SEQ ID NO: 88684 - RNA, 21 nt, Human
cucaaggcaaagaaacccaga

SEQ ID NO: 88685 - RNA, 21 nt, Human
cugacaucuuugauuucuggu

SEQ ID NO: 88686 - RNA, 20 nt, Human
cugcacaccgccgcccgggc

SEQ ID NO: 88687 - RNA, 21 nt, Human
cugcucccgacacccccgcuc

SEQ ID NO: 88688 - RNA, 23 nt, Human
cugggcguggggcagaggucaga

SEQ ID NO: 88689 - RNA, 24 nt, Human
cuggggguuggagggggagaguca

SEQ ID NO: 88690 - RNA, 20 nt, Human
gaaaaagaagacccgaaaga

SEQ ID NO: 88691 - RNA, 23 nt, Human
gaaauccccccuggccaccaccu

SEQ ID NO: 88692 - RNA, 20 nt, Human
gacaauggggacaacuauga

SEQ ID NO: 88693 - RNA, 20 nt, Human
gacacccccgcucaaacugg

SEQ ID NO: 88694 - RNA, 22 nt, Human
gacuuugggaaagcugggauuu

SEQ ID NO: 88695 - RNA, 18 nt, Human
gagcugccagcucgguuu

SEQ ID NO: 88696 - RNA, 18 nt, Human
gauucggaaauccccccu

SEQ ID NO: 88697 - RNA, 21 nt, Human
gcaaagaaacccagagagguc

SEQ ID NO: 88698 - RNA, 19 nt, Human
gccuguugccccgccuccg

SEQ ID NO: 88699 - RNA, 18 nt, Human
gcuaaagggucuuucuuc

SEQ ID NO: 88700 - RNA, 23 nt, Human
gcucaaacuggagaaaagacaga

SEQ ID NO: 88701 - RNA, 19 nt, Human
ggaaaaagaagacccgaaa

SEQ ID NO: 88702 - RNA, 20 nt, Human
ggagaaaagacagaguccug

SEQ ID NO: 88703 - RNA, 21 nt, Human
ggagcgugguaaagacgaggg

SEQ ID NO: 88704 - RNA, 22 nt, Human
ggcgcucccucagcacccaccc

SEQ ID NO: 88705 - RNA, 23 nt, Human
ggcgggggccggcugguuucccu

SEQ ID NO: 88706 - RNA, 20 nt, Human
gggcagaggucagaggucag

SEQ ID NO: 88707 - RNA, 19 nt, Human
gggcgcugcagcacgaccc

SEQ ID NO: 88708 - RNA, 18 nt, Human
ggggagcgaagcccguag

SEQ ID NO: 88709 - RNA, 21 nt, Human
gguuucauucuuuguaaaaag

SEQ ID NO: 88710 - RNA, 26 nt, Human
guaaaguccucuuccaaggagggaag

SEQ ID NO: 88711 - RNA, 19 nt, Human
gugaaugccucccucaggg

SEQ ID NO: 88712 - RNA, 20 nt, Human
gugcgagcgcgugugcuggg

SEQ ID NO: 88713 - RNA, 21 nt, Human
gugugugcgugcgugcgugug

SEQ ID NO: 88714 - RNA, 20 nt, Human
gugugugugugugugugugu

SEQ ID NO: 88715 - RNA, 25 nt, Human
uaaaggcaccggcagcucuggagac

SEQ ID NO: 88716 - RNA, 22 nt, Human
uaagggauuggcuugaaaaguu

SEQ ID NO: 88717 - RNA, 21 nt, Human
uagagaggauggagggguuag

SEQ ID NO: 88718 - RNA, 19 nt, Human
uagcugcuucggggcucug

SEQ ID NO: 88719 - RNA, 21 nt, Human
uaggaaggguuaaggaaaggg

SEQ ID NO: 88720 - RNA, 22 nt, Human
uaguaaaguccucuuccaagga

SEQ ID NO: 88721 - RNA, 18 nt, Human
ucaagcccacucuccgcg

SEQ ID NO: 88722 - RNA, 18 nt, Human
ucagcacccacccaacgc

SEQ ID NO: 88723 - RNA, 22 nt, Human
uccaaggagggaagaaugugga

SEQ ID NO: 88724 - RNA, 19 nt, Human
ucccccguuccuucccggg

SEQ ID NO: 88725 - RNA, 22 nt, Human
ucccucaccccgcccuuccccc

SEQ ID NO: 88726 - RNA, 21 nt, Human
ucccugggucgccuauggccc

SEQ ID NO: 88727 - RNA, 19 nt, Human
uccuggggcgggggccggc

SEQ ID NO: 88728 - RNA, 20 nt, Human
ucuauggcucgcuuaggcgg

SEQ ID NO: 88729 - RNA, 23 nt, Human
ucucuccaguucccugggucgcc

SEQ ID NO: 88730 - RNA, 18 nt, Human
ucugugugagugugugug

SEQ ID NO: 88731 - RNA, 18 nt, Human
ugagaagaguguucacug

SEQ ID NO: 88732 - RNA, 22 nt, Human
ugaggggaaaaugugggagagg

SEQ ID NO: 88733 - RNA, 25 nt, Human
ugagugugugugugugugugugugg

SEQ ID NO: 88734 - RNA, 22 nt, Human
ugcgccuggcuucucacagccc

SEQ ID NO: 88735 - RNA, 18 nt, Human
ugcucccgacacccccgc

SEQ ID NO: 88736 - RNA, 18 nt, Human
ugcugggaggcgagccgc

SEQ ID NO: 88737 - RNA, 18 nt, Human
ugcuucggggcucugaca

SEQ ID NO: 88738 - RNA, 18 nt, Human
uggagcccauuggggaaa

SEQ ID NO: 88739 - RNA, 21 nt, Human
uggcgcucccucagcacccac

SEQ ID NO: 88740 - RNA, 18 nt, Human
uggggcgggggccggcug

SEQ ID NO: 88741 - RNA, 20 nt, Human
uggggcgggggccggcugga

SEQ ID NO: 88742 - RNA, 18 nt, Human
uggggguuggagggggag

SEQ ID NO: 88743 - RNA, 24 nt, Human
uggggguuggagggggagagucag

SEQ ID NO: 88744 - RNA, 22 nt, Human
uggugccgaagggacagcuccc

SEQ ID NO: 88745 - RNA, 22 nt, Human
uggugcugaagggacagcuccc

SEQ ID NO: 88746 - RNA, 19 nt, Human
ugugcgagcgcgugugcug

SEQ ID NO: 88747 - RNA, 21 nt, Human
ugugcgugcgugcgugugugu

SEQ ID NO: 88748 - RNA, 18 nt, Human
ugugcugggggugagggc

SEQ ID NO: 88749 - RNA, 22 nt, Human
ugugugagugugugugugugug

SEQ ID NO: 88750 - RNA, 18 nt, Human
ugugugcgagcgcgugug

SEQ ID NO: 88751 - RNA, 22 nt, Human
ugugugcgugcgugcgugugug

SEQ ID NO: 88752 - RNA, 24 nt, Human
ugugugcgugcgugcgugugugug

SEQ ID NO: 88753 - RNA, 19 nt, Human
ugugugugugugcgugcgu

SEQ ID NO: 88754 - RNA, 20 nt, Human
ugugugugugugcgugcgug

SEQ ID NO: 88755 - RNA, 22 nt, Human
ugugugugugugcgugcgugcg

SEQ ID NO: 88756 - RNA, 18 nt, Human
ugugugugugugugugug

SEQ ID NO: 88757 - RNA, 19 nt, Human
ugugugugugugugugugc

SEQ ID NO: 88758 - RNA, 19 nt, Human
ugugugugugugugugugu

SEQ ID NO: 88759 - RNA, 21 nt, Human
ugugugugugugugugugugc

SEQ ID NO: 88760 - RNA, 24 nt, Human
ugugugugugugugugugugcgug

SEQ ID NO: 88761 - RNA, 18 nt, Human
uuaaggaaaggggaaggg

SEQ ID NO: 88762 - RNA, 26 nt, Human
uucggaaauccccccuggccaccacc

SEQ ID NO: 88763 - RNA, 21 nt, Human
uucuggagcucucuccaguuc

SEQ ID NO: 88764 - RNA, 24 nt, Human
uugaaaaguuagagaggauggagg

SEQ ID NO: 88765 - RNA, 26 nt, Human
uugaaaaguuagagaggauggagggg

SEQ ID NO: 88766 - RNA, 28 nt, Human
uugaaaaguuagagaggauggagggguu

SEQ ID NO: 88767 - RNA, 19 nt, Human
aaaacaugggcccccgagc

SEQ ID NO: 88768 - RNA, 19 nt, Human
aaagaagacggggcccaga

SEQ ID NO: 88769 - RNA, 22 nt, Human
aaagagggagagccgaguccug

SEQ ID NO: 88770 - RNA, 19 nt, Human
aaaggauaaggggacagga

SEQ ID NO: 88771 - RNA, 22 nt, Human
aaccccacaccccagcuacccc

SEQ ID NO: 88772 - RNA, 18 nt, Human
aaccgcacccggagcugc

SEQ ID NO: 88773 - RNA, 19 nt, Human
aacucccacccaagacccc

SEQ ID NO: 88774 - RNA, 24 nt, Human
aagaacuuggcaaagaagacgggg

SEQ ID NO: 88775 - RNA, 20 nt, Human
aagacccccugaccucaucc

SEQ ID NO: 88776 - RNA, 20 nt, Human
aagcaacccacauacagcca

SEQ ID NO: 88777 - RNA, 21 nt, Human
acagagaaaaacguauuuaca

SEQ ID NO: 88778 - RNA, 23 nt, Human
acagagaaaaacguauuuacaga

SEQ ID NO: 88779 - RNA, 18 nt, Human
accccagcuaccccauca

SEQ ID NO: 88780 - RNA, 23 nt, Human
accccaucagguccccgccaguc

SEQ ID NO: 88781 - RNA, 19 nt, Human
acccuucgcuaucuccccc

SEQ ID NO: 88782 - RNA, 19 nt, Human
agaaaaacguauuuacaga

SEQ ID NO: 88783 - RNA, 24 nt, Human
agccggcgaagggccucgaggggc

SEQ ID NO: 88784 - RNA, 30 nt, Human
agccucuucccaucccacccccaagcaacc

SEQ ID NO: 88785 - RNA, 22 nt, Human
agcggccuggggucuugaaggg

SEQ ID NO: 88786 - RNA, 18 nt, Human
agggaccugagguccugu

SEQ ID NO: 88787 - RNA, 22 nt, Human
aucccacccccaagcaacccac

SEQ ID NO: 88788 - RNA, 22 nt, Human
caaaccuuuaaucccaaaucag

SEQ ID NO: 88789 - RNA, 21 nt, Human
caaccccacaccccagcuacc

SEQ ID NO: 88790 - RNA, 25 nt, Human
caagcaacccacauacagccacaga

SEQ ID NO: 88791 - RNA, 24 nt, Human
cacauacagccacagagaaaaacg

SEQ ID NO: 88792 - RNA, 26 nt, Human
cacccccaagcaacccacauacagcc

SEQ ID NO: 88793 - RNA, 19 nt, Human
cacccugagguuuagagau

SEQ ID NO: 88794 - RNA, 22 nt, Human
cacccugagguuuagagauaga

SEQ ID NO: 88795 - RNA, 22 nt, Human
caggaagggaccugagguccug

SEQ ID NO: 88796 - RNA, 19 nt, Human
caucccccaaccccacacc

SEQ ID NO: 88797 - RNA, 25 nt, Human
ccaaccccacaccccagcuacccca

SEQ ID NO: 88798 - RNA, 22 nt, Human
ccacauacagccacagagaaaa

SEQ ID NO: 88799 - RNA, 22 nt, Human
ccacauacagccacagagaaaa

SEQ ID NO: 88800 - RNA, 19 nt, Human
ccacccccaagcaacccac

SEQ ID NO: 88801 - RNA, 21 nt, Human
ccagacccuucgcuaucuccc

SEQ ID NO: 88802 - RNA, 24 nt, Human
ccagacccuucgcuaucuccccca

SEQ ID NO: 88803 - RNA, 22 nt, Human
ccaucccacccccaagcaaccc

SEQ ID NO: 88804 - RNA, 18 nt, Human
cccaagacccccugaccu

SEQ ID NO: 88805 - RNA, 28 nt, Human
cccaagacccccugaccucaucccccaa

SEQ ID NO: 88806 - RNA, 21 nt, Human
cccaagagcuccagaggaaug

SEQ ID NO: 88807 - RNA, 24 nt, Human
cccaagcaacccacauacagccac

SEQ ID NO: 88808 - RNA, 19 nt, Human
cccacauacagccacagag

SEQ ID NO: 88809 - RNA, 23 nt, Human
cccacauacagccacagagaaaa

SEQ ID NO: 88810 - RNA, 25 nt, Human
cccacccccaagcaacccacauaca

SEQ ID NO: 88811 - RNA, 31 nt, Human
cccacccccaagcaacccacauacagccacc

SEQ ID NO: 88812 - RNA, 23 nt, Human
cccagaggaaaaacaaggccccc

SEQ ID NO: 88813 - RNA, 20 nt, Human
cccagggcuggggaagccuc

SEQ ID NO: 88814 - RNA, 24 nt, Human
cccaucccacccccaagcaaccca

SEQ ID NO: 88815 - RNA, 21 nt, Human
ccccaaccccacaccccagcu

SEQ ID NO: 88816 - RNA, 26 nt, Human
ccccaaccccacaccccagcuacccc

SEQ ID NO: 88817 - RNA, 18 nt, Human
ccccaacucccacccaag

SEQ ID NO: 88818 - RNA, 25 nt, Human
ccccaagcaacccacauacagccac

SEQ ID NO: 88819 - RNA, 26 nt, Human
ccccagcuaccccaucagguccccgc

SEQ ID NO: 88820 - RNA, 21 nt, Human
cccccaaccccacaccccagc

SEQ ID NO: 88821 - RNA, 23 nt, Human
cccccaacucccacccaagaccc

SEQ ID NO: 88822 - RNA, 22 nt, Human
cccccaagagcuccagaggaau

SEQ ID NO: 88823 - RNA, 25 nt, Human
cccccaagagcuccagaggaaugag

SEQ ID NO: 88824 - RNA, 24 nt, Human
ccccugaccucaucccccaacccc

SEQ ID NO: 88825 - RNA, 18 nt, Human
ccgagcagggagaacaca

SEQ ID NO: 88826 - RNA, 21 nt, Human
ccgcacccggagcugcagaug

SEQ ID NO: 88827 - RNA, 22 nt, Human
ccggcaagugaaucgauccaga

SEQ ID NO: 88828 - RNA, 20 nt, Human
ccucgaggggcgggagcgag

SEQ ID NO: 88829 - RNA, 19 nt, Human
ccugaccucaucccccaac

SEQ ID NO: 88830 - RNA, 18 nt, Human
ccugcagcuccaaggggc

SEQ ID NO: 88831 - RNA, 20 nt, Human
cgaguccugucuggaaucuc

SEQ ID NO: 88832 - RNA, 21 nt, Human
cgcuaucucccccaaccgcac

SEQ ID NO: 88833 - RNA, 21 nt, Human
cggcaagugaaucgauccaga

SEQ ID NO: 88834 - RNA, 23 nt, Human
cucccccaaccgcacccggagcu

SEQ ID NO: 88835 - RNA, 21 nt, Human
cucuucccaucccacccccaa

SEQ ID NO: 88836 - RNA, 25 nt, Human
cuuggcaaagaagacggggcccaga

SEQ ID NO: 88837 - RNA, 20 nt, Human
gaagacggggcccagaggaa

SEQ ID NO: 88838 - RNA, 19 nt, Human
gacccccugaccucauccc

SEQ ID NO: 88839 - RNA, 19 nt, Human
gaccucaucccccaacccc

SEQ ID NO: 88840 - RNA, 21 nt, Human
gaccucaucccccaaccccac

SEQ ID NO: 88841 - RNA, 20 nt, Human
gaccugggaaaugaaggggc

SEQ ID NO: 88842 - RNA, 18 nt, Human
gagccucuucccauccca

SEQ ID NO: 88843 - RNA, 21 nt, Human
gaucacagcgaggccagaccc

SEQ ID NO: 88844 - RNA, 21 nt, Human
gcaaagaagacggggcccaga

SEQ ID NO: 88845 - RNA, 23 nt, Human
gcccgcugaagcucccugcagcu

SEQ ID NO: 88846 - RNA, 22 nt, Human
gccucgaggggcgggagcgagg

SEQ ID NO: 88847 - RNA, 21 nt, Human
ggaagggggaggaggcagagc

SEQ ID NO: 88848 - RNA, 20 nt, Human
ggccuggggucuugaagggg

SEQ ID NO: 88849 - RNA, 21 nt, Human
ggccuggggucuugaaggggg

SEQ ID NO: 88850 - RNA, 21 nt, Human
gggcccccaacucccacccaa

SEQ ID NO: 88851 - RNA, 24 nt, Human
gggguucccuugggcucagaguuu

SEQ ID NO: 88852 - RNA, 22 nt, Human
gggucgggaagggggaggaggc

SEQ ID NO: 88853 - RNA, 21 nt, Human
gggucuugaagggggugaggg

SEQ ID NO: 88854 - RNA, 19 nt, Human
guguaaaaaaacaugggcc

SEQ ID NO: 88855 - RNA, 23 nt, Human
guguaaaaaaacaugggcccccg

SEQ ID NO: 88856 - RNA, 18 nt, Human
uacaauggagaaggucaa

SEQ ID NO: 88857 - RNA, 19 nt, Human
ucccaucccacccccaagc

SEQ ID NO: 88858 - RNA, 19 nt, Human
uccccagggcuggggaagc

SEQ ID NO: 88859 - RNA, 24 nt, Human
uccccagggcuggggaagccucug

SEQ ID NO: 88860 - RNA, 19 nt, Human
ucccccaaccccacacccc

SEQ ID NO: 88861 - RNA, 19 nt, Human
ucccccaaccgcacccgga

SEQ ID NO: 88862 - RNA, 22 nt, Human
ucgcuaucucccccaaccgcac

SEQ ID NO: 88863 - RNA, 25 nt, Human
ucucccggcaagugaaucgauccag

SEQ ID NO: 88864 - RNA, 24 nt, Human
ugaaagagggagagccgaguccug

SEQ ID NO: 88865 - RNA, 22 nt, Human
ugaagcucccugcagcuccaag

SEQ ID NO: 88866 - RNA, 19 nt, Human
ugaccucaucccccaaccc

SEQ ID NO: 88867 - RNA, 21 nt, Human
ugagcaccccacuagggcuaa

SEQ ID NO: 88868 - RNA, 21 nt, Human
ugagggacucaguuuccccug

SEQ ID NO: 88869 - RNA, 22 nt, Human
ugagguccuguguguguuugga

SEQ ID NO: 88870 - RNA, 24 nt, Human
ugagguuuagagauagaauucggc

SEQ ID NO: 88871 - RNA, 23 nt, Human
uggaaucucaaaugcgaaagucg

SEQ ID NO: 88872 - RNA, 26 nt, Human
ugggguacccaggaagggagggaguc

SEQ ID NO: 88873 - RNA, 25 nt, Human
ugggguucagaagagaaaaaugauc

SEQ ID NO: 88874 - RNA, 19 nt, Human
ugggguucagaggaggguc

SEQ ID NO: 88875 - RNA, 23 nt, Human
ugucuggaaucucaaaugcgaaa

SEQ ID NO: 88876 - RNA, 18 nt, Human
uucagaagagaaaaauga

SEQ ID NO: 88877 - RNA, 23 nt, Human
uuccaaaccuuuaaucccaaauc

SEQ ID NO: 88878 - RNA, 24 nt, Human
uuuccugagagaucugagcacccc

SEQ ID NO: 88879 - RNA, 20 nt, Human
uuugcaaagagccucuuccc

SEQ ID NO: 88880 - RNA, 24 nt, Human
uuugcaaagagccucuucccaucc

SEQ ID NO: 88881 - RNA, 23 nt, Human
uuuuuuuaaauuuccaaaccuuu

SEQ ID NO: 88882 - RNA, 18 nt, Human
aaccugcucuccagccca

SEQ ID NO: 88883 - RNA, 19 nt, Human
aagggagaagaggaugguc

SEQ ID NO: 88884 - RNA, 22 nt, Human
accuucaggaagcagaaaagag

SEQ ID NO: 88885 - RNA, 21 nt, Human
acugcaccggaggacccagca

SEQ ID NO: 88886 - RNA, 18 nt, Human
aggaagcagaaaagagcc

SEQ ID NO: 88887 - RNA, 18 nt, Human
aggaagcagaaaagagcc

SEQ ID NO: 88888 - RNA, 22 nt, Human
aggagucauuugggagugagag

SEQ ID NO: 88889 - RNA, 25 nt, Human
aggcagggaaaaaggaagcccaggu

SEQ ID NO: 88890 - RNA, 19 nt, Human
aggcagguaaccuucagga

SEQ ID NO: 88891 - RNA, 24 nt, Human
agggaaguaggggagauggggagg

SEQ ID NO: 88892 - RNA, 18 nt, Human
agguccgagguuggggag

SEQ ID NO: 88893 - RNA, 19 nt, Human
agucauuugggagugagag

SEQ ID NO: 88894 - RNA, 24 nt, Human
agugagagggaccaaugaaaagga

SEQ ID NO: 88895 - RNA, 20 nt, Human
auuaggcagggaaaaaggaa

SEQ ID NO: 88896 - RNA, 21 nt, Human
cagaaaagagcccagccggug

SEQ ID NO: 88897 - RNA, 21 nt, Human
ccccggggcugcggguggagc

SEQ ID NO: 88898 - RNA, 22 nt, Human
cccuaagacgaggaggaggagg

SEQ ID NO: 88899 - RNA, 20 nt, Human
ccucuggcugcucccagcuc

SEQ ID NO: 88900 - RNA, 20 nt, Human
cgaggaggaggaggaggcag

SEQ ID NO: 88901 - RNA, 22 nt, Human
cgccucuggcugcucccagcuc

SEQ ID NO: 88902 - RNA, 19 nt, Human
cggggcugcggguggagca

SEQ ID NO: 88903 - RNA, 19 nt, Human
cggugagaaagaaugggac

SEQ ID NO: 88904 - RNA, 25 nt, Human
cucagagcagguggagaacgaggga

SEQ ID NO: 88905 - RNA, 18 nt, Human
cucuggggagcugggcgc

SEQ ID NO: 88906 - RNA, 19 nt, Human
cugcccgaaccugcucucc

SEQ ID NO: 88907 - RNA, 23 nt, Human
gaaaagagggcgcggccauugaa

SEQ ID NO: 88908 - RNA, 20 nt, Human
gcauugcagggagacccccc

SEQ ID NO: 88909 - RNA, 20 nt, Human
gccggcccucccacugcacc

SEQ ID NO: 88910 - RNA, 21 nt, Human
gcggagccauugggaggaggg

SEQ ID NO: 88911 - RNA, 19 nt, Human
ggaaguaggggagaugggg

SEQ ID NO: 88912 - RNA, 24 nt, Human
ggaaguaggggagauggggaggga

SEQ ID NO: 88913 - RNA, 19 nt, Human
ggaggaggaggaggcaggg

SEQ ID NO: 88914 - RNA, 23 nt, Human
ggaggaggaggcagggggagcuc

SEQ ID NO: 88915 - RNA, 19 nt, Human
ggaggagggcggggccuaa

SEQ ID NO: 88916 - RNA, 22 nt, Human
ggaggagggcggggccuaaagc

SEQ ID NO: 88917 - RNA, 20 nt, Human
ggaggagucauuugggagug

SEQ ID NO: 88918 - RNA, 24 nt, Human
ggaggagucauuugggagugagag

SEQ ID NO: 88919 - RNA, 20 nt, Human
gggaaguaggggagaugggg

SEQ ID NO: 88920 - RNA, 20 nt, Human
gggcggagccauugggagga

SEQ ID NO: 88921 - RNA, 23 nt, Human
gggcggagccauugggaggaggg

SEQ ID NO: 88922 - RNA, 20 nt, Human
gggcgggccaacgaagggga

SEQ ID NO: 88923 - RNA, 20 nt, Human
gucccgaggacggaaggggg

SEQ ID NO: 88924 - RNA, 19 nt, Human
guggagcaagccggcccuc

SEQ ID NO: 88925 - RNA, 23 nt, Human
uaaccuucaggaagcagaaaaga

SEQ ID NO: 88926 - RNA, 21 nt, Human
ucccgaggacggaagggggcg

SEQ ID NO: 88927 - RNA, 25 nt, Human
ucccgaggacggaagggggcgcugc

SEQ ID NO: 88928 - RNA, 19 nt, Human
uccuccgggugggagcgag

SEQ ID NO: 88929 - RNA, 18 nt, Human
ugagagggaccaaugaaa

SEQ ID NO: 88930 - RNA, 27 nt, Human
uggagaggaggggccagaggaaagggg

SEQ ID NO: 88931 - RNA, 20 nt, Human
uggcuuccagcccccuuccc

SEQ ID NO: 88932 - RNA, 19 nt, Human
ugggagcgaggagucccga

SEQ ID NO: 88933 - RNA, 19 nt, Human
uugcaccgccucuggcugc

SEQ ID NO: 88934 - RNA, 21 nt, Human
agccggggggccgugggccac

SEQ ID NO: 88935 - RNA, 24 nt, Human
cacccccuucucgcaccagaggcc

SEQ ID NO: 88936 - RNA, 20 nt, Human
caccggggcagcgggggcgg

SEQ ID NO: 88937 - RNA, 21 nt, Human
cagcgcuucagcgacuccagu

SEQ ID NO: 88938 - RNA, 22 nt, Human
ccugcacccccuucucgcacca

SEQ ID NO: 88939 - RNA, 24 nt, Human
cucgcaccagaggccccgcucuuc

SEQ ID NO: 88940 - RNA, 21 nt, Human
cugcacccccuucucgcacca

SEQ ID NO: 88941 - RNA, 23 nt, Human
cugcacccccuucucgcaccaga

SEQ ID NO: 88942 - RNA, 23 nt, Human
ggacacgccccucggcucccccg

SEQ ID NO: 88943 - RNA, 18 nt, Human
gggcagcgggggcggggc

SEQ ID NO: 88944 - RNA, 18 nt, Human
aagggacagcucggcugu

SEQ ID NO: 88945 - RNA, 23 nt, Human
agagcuccaguccagagccugaa

SEQ ID NO: 88946 - RNA, 21 nt, Human
agcaucugaggccccaccccc

SEQ ID NO: 88947 - RNA, 18 nt, Human
cagagccugaaguguggu

SEQ ID NO: 88948 - RNA, 21 nt, Human
ccccagcaucugaggccccac

SEQ ID NO: 88949 - RNA, 18 nt, Human
ccccaugccagagagcuc

SEQ ID NO: 88950 - RNA, 22 nt, Human
cccccaugccagagagcuccag

SEQ ID NO: 88951 - RNA, 18 nt, Human
gaagauggggcagacugg

SEQ ID NO: 88952 - RNA, 19 nt, Human
gagcaaucuggauguccag

SEQ ID NO: 88953 - RNA, 20 nt, Human
gagcuccaguccagagccug

SEQ ID NO: 88954 - RNA, 22 nt, Human
ggaagggagcucagaggcgggg

SEQ ID NO: 88955 - RNA, 20 nt, Human
gggaagggagcucagaggcg

SEQ ID NO: 88956 - RNA, 18 nt, Human
ugccagagagcuccaguc

SEQ ID NO: 88957 - RNA, 23 nt, Human
ugccagagagcuccaguccagag

SEQ ID NO: 88958 - RNA, 23 nt, Human
ugggccuaaagagaagaggcuga

SEQ ID NO: 88959 - RNA, 22 nt, Human
uggggcagacugggccccagca

SEQ ID NO: 88960 - RNA, 22 nt, Human
aaaaaacaguguggaacaaaau

SEQ ID NO: 88961 - RNA, 24 nt, Human
aaaaacacaaagcagaucuaugug

SEQ ID NO: 88962 - RNA, 22 nt, Human
aaaagcaaaauaacauuuaaga

SEQ ID NO: 88963 - RNA, 21 nt, Human
aaaauaaaaacacaaagcaga

SEQ ID NO: 88964 - RNA, 19 nt, Human
aaacaguguggaacaaaau

SEQ ID NO: 88965 - RNA, 22 nt, Human
aaauaaaaacacaaagcagauc

SEQ ID NO: 88966 - RNA, 22 nt, Human
aaauagcucugcagcaaacccc

SEQ ID NO: 88967 - RNA, 23 nt, Human
aagaggagaaaacuuugacagaa

SEQ ID NO: 88968 - RNA, 20 nt, Human
aagcgcgaagggaggagggg

SEQ ID NO: 88969 - RNA, 19 nt, Human
acacuuccauaacuguagg

SEQ ID NO: 88970 - RNA, 26 nt, Human
agaaaauuccuaauggguuuaacuaa

SEQ ID NO: 88971 - RNA, 24 nt, Human
agaggagaaaacuuugacagaaga

SEQ ID NO: 88972 - RNA, 18 nt, Human
agauauaaaaaacagugu

SEQ ID NO: 88973 - RNA, 23 nt, Human
agccauccuuuuuuuuuuggcua

SEQ ID NO: 88974 - RNA, 22 nt, Human
aggcaaaagcaagauggaucca

SEQ ID NO: 88975 - RNA, 21 nt, Human
aguaaaugaaaggauggguua

SEQ ID NO: 88976 - RNA, 18 nt, Human
auaguacaugaaugaagc

SEQ ID NO: 88977 - RNA, 21 nt, Human
augacagauauaaaaaacagu

SEQ ID NO: 88978 - RNA, 22 nt, Human
caaaaugcaauguacaugacag

SEQ ID NO: 88979 - RNA, 20 nt, Human
caaugcauacauaguacaug

SEQ ID NO: 88980 - RNA, 19 nt, Human
cagcagacucuaggaccaa

SEQ ID NO: 88981 - RNA, 24 nt, Human
caguauuuaaagaauggugcucca

SEQ ID NO: 88982 - RNA, 18 nt, Human
caucuuauuauaaacaca

SEQ ID NO: 88983 - RNA, 23 nt, Human
cauuuaccaccaaugcauacaua

SEQ ID NO: 88984 - RNA, 21 nt, Human
cccaggucagggagcgagagc

SEQ ID NO: 88985 - RNA, 20 nt, Human
cgagccccgagcccgcagcc

SEQ ID NO: 88986 - RNA, 23 nt, Human
cucacauccauuuaccaccaaug

SEQ ID NO: 88987 - RNA, 21 nt, Human
cucagccucggccgccgcgac

SEQ ID NO: 88988 - RNA, 22 nt, Human
cugcagcaaaccccaggguugu

SEQ ID NO: 88989 - RNA, 18 nt, Human
cugcggcugcugaaggag

SEQ ID NO: 88990 - RNA, 20 nt, Human
gaagggaggaggggaaggga

SEQ ID NO: 88991 - RNA, 20 nt, Human
gaauguacuugauguacuug

SEQ ID NO: 88992 - RNA, 19 nt, Human
gaggaggggaagggagagg

SEQ ID NO: 88993 - RNA, 18 nt, Human
gccacaguuuuccacacu

SEQ ID NO: 88994 - RNA, 18 nt, Human
ggcgccuggggagcgggg

SEQ ID NO: 88995 - RNA, 21 nt, Human
ggcgcuggaggcagccgggga

SEQ ID NO: 88996 - RNA, 18 nt, Human
uaaaaaacaguguggaac

SEQ ID NO: 88997 - RNA, 23 nt, Human
uaacaacgacacaagggguucau

SEQ ID NO: 88998 - RNA, 23 nt, Human
uaaggcaaaagcaagauggaucc

SEQ ID NO: 88999 - RNA, 24 nt, Human
uaaggcaaaagcaagauggaucca

SEQ ID NO: 89000 - RNA, 23 nt, Human
uacaugacagauauaaaaaacag

SEQ ID NO: 89001 - RNA, 23 nt, Human
ucaaaaguuaauuguuggagacu

SEQ ID NO: 89002 - RNA, 21 nt, Human
ucaguggauaugaaggucauu

SEQ ID NO: 89003 - RNA, 21 nt, Human
uccacauacgugaaacagagu

SEQ ID NO: 89004 - RNA, 27 nt, Human
uccauaacuguaggcuuuauauaaggc

SEQ ID NO: 89005 - RNA, 23 nt, Human
uccccaggucagggagcgagagc

SEQ ID NO: 89006 - RNA, 25 nt, Human
ucuccaugaacaguauuuaaagaau

SEQ ID NO: 89007 - RNA, 18 nt, Human
ugaacaguauuuaaagaa

SEQ ID NO: 89008 - RNA, 23 nt, Human
ugaagcaucauugaucuuugcug

SEQ ID NO: 89009 - RNA, 25 nt, Human
ugacagauauaaaaaacagugugga

SEQ ID NO: 89010 - RNA, 25 nt, Human
ugcaaaagguggggggcgcuggagg

SEQ ID NO: 89011 - RNA, 24 nt, Human
ugcguccguggacucgaggugggc

SEQ ID NO: 89012 - RNA, 23 nt, Human
uggaaagaaauagcucugcagca

SEQ ID NO: 89013 - RNA, 21 nt, Human
uggggagcggggucucuggag

SEQ ID NO: 89014 - RNA, 23 nt, Human
uggggagcggggucucuggagcc

SEQ ID NO: 89015 - RNA, 19 nt, Human
uggggggcgcuggaggcag

SEQ ID NO: 89016 - RNA, 24 nt, Human
ugguauguagccauccuuuuuuuu

SEQ ID NO: 89017 - RNA, 23 nt, Human
uucaaaaaauaaaaauaaaaaca

SEQ ID NO: 89018 - RNA, 24 nt, Human
aaagaaaucuaaaaucaccaacug

SEQ ID NO: 89019 - RNA, 19 nt, Human
aagcugaaaagaaugagcc

SEQ ID NO: 89020 - RNA, 19 nt, Human
aauacagccuacucccuua

SEQ ID NO: 89021 - RNA, 18 nt, Human
acacgcuaaaggcaaagc

SEQ ID NO: 89022 - RNA, 20 nt, Human
acacgcuaaaggcaaagcca

SEQ ID NO: 89023 - RNA, 18 nt, Human
agaaacaagcugaaaaga

SEQ ID NO: 89024 - RNA, 18 nt, Human
agaaagaaaauccaggaa

SEQ ID NO: 89025 - RNA, 24 nt, Human
aguauagaaacaagcugaaaagaa

SEQ ID NO: 89026 - RNA, 22 nt, Human
aucaaagaaaucuaaaaucacc

SEQ ID NO: 89027 - RNA, 21 nt, Human
caacuauauuugugaaagcaa

SEQ ID NO: 89028 - RNA, 22 nt, Human
cacgcuaaaggcaaagccaauc

SEQ ID NO: 89029 - RNA, 25 nt, Human
cagaacgaucauuaacuccuaggca

SEQ ID NO: 89030 - RNA, 23 nt, Human
cagaauacacaaaaguauugaug

SEQ ID NO: 89031 - RNA, 19 nt, Human
caguuuagaaaauggauuu

SEQ ID NO: 89032 - RNA, 20 nt, Human
cauagaaucagacagauuua

SEQ ID NO: 89033 - RNA, 22 nt, Human
cauuccuccuaauaguuagaaa

SEQ ID NO: 89034 - RNA, 22 nt, Human
cguuucuguuuguucuugaggg

SEQ ID NO: 89035 - RNA, 21 nt, Human
cuaaaggcaaagccaaucucc

SEQ ID NO: 89036 - RNA, 20 nt, Human
cucaacaucauuuguugaaa

SEQ ID NO: 89037 - RNA, 19 nt, Human
cucagcucagcguuccucc

SEQ ID NO: 89038 - RNA, 24 nt, Human
cucauagcucccuguuucacaauc

SEQ ID NO: 89039 - RNA, 22 nt, Human
cucccuguuucacaaucaaaga

SEQ ID NO: 89040 - RNA, 20 nt, Human
cugcggagggagaccugggc

SEQ ID NO: 89041 - RNA, 20 nt, Human
cugcucagcucagcguuccu

SEQ ID NO: 89042 - RNA, 21 nt, Human
cuguuuguucuugagggaaac

SEQ ID NO: 89043 - RNA, 18 nt, Human
gaaagaaaauccaggaag

SEQ ID NO: 89044 - RNA, 18 nt, Human
gaaagcaagaauauguua

SEQ ID NO: 89045 - RNA, 24 nt, Human
gaacuauuuugaaugcugaucuca

SEQ ID NO: 89046 - RNA, 21 nt, Human
gauacaguguaucacuagcaa

SEQ ID NO: 89047 - RNA, 19 nt, Human
gcgcuguccucggugcugc

SEQ ID NO: 89048 - RNA, 21 nt, Human
ggaaaagcacauuccuccuaa

SEQ ID NO: 89049 - RNA, 27 nt, Human
ggaaauacaggcauagaaucagacaga

SEQ ID NO: 89050 - RNA, 19 nt, Human
gggcgcgggcgcugccggg

SEQ ID NO: 89051 - RNA, 22 nt, Human
ggggugugugucugggugugug

SEQ ID NO: 89052 - RNA, 20 nt, Human
ggugugugucugggugugug

SEQ ID NO: 89053 - RNA, 24 nt, Human
uaaauuuaaucagagauuacacag

SEQ ID NO: 89054 - RNA, 18 nt, Human
uaaauuuacagauauaaa

SEQ ID NO: 89055 - RNA, 18 nt, Human
uacaaacaguauagaaac

SEQ ID NO: 89056 - RNA, 18 nt, Human
uacccuugguggaaauga

SEQ ID NO: 89057 - RNA, 19 nt, Human
uagaaagaaaauccaggaa

SEQ ID NO: 89058 - RNA, 19 nt, Human
uagaauccacagaauacac

SEQ ID NO: 89059 - RNA, 23 nt, Human
uaguaaaaaauagaguuguuaua

SEQ ID NO: 89060 - RNA, 20 nt, Human
uauagaauggggacauucaa

SEQ ID NO: 89061 - RNA, 21 nt, Human
ucaaagaaaucuaaaaucacc

SEQ ID NO: 89062 - RNA, 23 nt, Human
ucaacuauaaccaguauaggaua

SEQ ID NO: 89063 - RNA, 19 nt, Human
uccacagaauacacaaaag

SEQ ID NO: 89064 - RNA, 20 nt, Human
uccacagaauacacaaaagu

SEQ ID NO: 89065 - RNA, 26 nt, Human
uccaggaaguaugcaaacuagacacc

SEQ ID NO: 89066 - RNA, 22 nt, Human
ucuguuuguucuugagggaaac

SEQ ID NO: 89067 - RNA, 20 nt, Human
ugaaauauagaauccacaga

SEQ ID NO: 89068 - RNA, 22 nt, Human
ugaaccgauaguuuuguaugga

SEQ ID NO: 89069 - RNA, 20 nt, Human
ugacccagaacgaucauuaa

SEQ ID NO: 89070 - RNA, 21 nt, Human
ugagggaaacauuauagcuca

SEQ ID NO: 89071 - RNA, 21 nt, Human
ugauugguaaacuaaaucugu

SEQ ID NO: 89072 - RNA, 20 nt, Human
ugcauuugcaaaucagagac

SEQ ID NO: 89073 - RNA, 22 nt, Human
uggaaauacaggcauagaauca

SEQ ID NO: 89074 - RNA, 24 nt, Human
uggaauuuuuagggaaaucuuguu

SEQ ID NO: 89075 - RNA, 21 nt, Human
uguaaauuucacauggacaca

SEQ ID NO: 89076 - RNA, 18 nt, Human
ugugugaauaugcgugug

SEQ ID NO: 89077 - RNA, 22 nt, Human
uguuggaaauacaggcauagaa

SEQ ID NO: 89078 - RNA, 23 nt, Human
uguuuuagaaucuucuugcuaga

SEQ ID NO: 89079 - RNA, 22 nt, Human
uuaugugucaucuggugcuccc

SEQ ID NO: 89080 - RNA, 25 nt, Human
uucacaaucaaagaaaucuaaaauc

SEQ ID NO: 89081 - RNA, 21 nt, Human
aaacaagaaacccaaagagaa

SEQ ID NO: 89082 - RNA, 19 nt, Human
aacaagaaacccaaagaga

SEQ ID NO: 89083 - RNA, 22 nt, Human
aagaaacccaaagagaaaagga

SEQ ID NO: 89084 - RNA, 24 nt, Human
aagccuaaaucauacagcgaggga

SEQ ID NO: 89085 - RNA, 21 nt, Human
accucagccugcaccgcuccc

SEQ ID NO: 89086 - RNA, 22 nt, Human
agacugccugggcagggguggg

SEQ ID NO: 89087 - RNA, 19 nt, Human
agagggaagaguccacucu

SEQ ID NO: 89088 - RNA, 24 nt, Human
agcgagagggaagaguccacucug

SEQ ID NO: 89089 - RNA, 20 nt, Human
agcuacaccauuggcaaggu

SEQ ID NO: 89090 - RNA, 19 nt, Human
aggcaaggaaagggcgggu

SEQ ID NO: 89091 - RNA, 20 nt, Human
aggggugggggcggggcgcu

SEQ ID NO: 89092 - RNA, 20 nt, Human
aggugguggauggaaccugg

SEQ ID NO: 89093 - RNA, 23 nt, Human
aucaccuuccaugugugugaucc

SEQ ID NO: 89094 - RNA, 24 nt, Human
aucucucguuuccugcucugcagg

SEQ ID NO: 89095 - RNA, 24 nt, Human
cacagcgaagagaauuagggaccc

SEQ ID NO: 89096 - RNA, 18 nt, Human
cagcagaagcaggguuug

SEQ ID NO: 89097 - RNA, 22 nt, Human
cagccccccagcugcccauccu

SEQ ID NO: 89098 - RNA, 21 nt, Human
cagcugcccauccucuaucuc

SEQ ID NO: 89099 - RNA, 23 nt, Human
cagcugcccauccucuaucucuc

SEQ ID NO: 89100 - RNA, 25 nt, Human
cagcugcccauccucuaucucucgu

SEQ ID NO: 89101 - RNA, 23 nt, Human
caggacagccccccagcugccca

SEQ ID NO: 89102 - RNA, 23 nt, Human
cauacagcgagggagcucaugca

SEQ ID NO: 89103 - RNA, 21 nt, Human
caucagggcagcagaagcagg

SEQ ID NO: 89104 - RNA, 19 nt, Human
cccaaagagaaaaggagca

SEQ ID NO: 89105 - RNA, 25 nt, Human
ccccaucaccuuccaugugugugau

SEQ ID NO: 89106 - RNA, 22 nt, Human
ccgcgccggcugggcucuggca

SEQ ID NO: 89107 - RNA, 18 nt, Human
cgcuccgcgccggcuggg

SEQ ID NO: 89108 - RNA, 27 nt, Human
cgggugccuuccacacacaggaguucu

SEQ ID NO: 89109 - RNA, 23 nt, Human
cucaugcaucacagcgaagagaa

SEQ ID NO: 89110 - RNA, 18 nt, Human
cuccacccaugcccccau

SEQ ID NO: 89111 - RNA, 19 nt, Human
cuccgcgccggcugggcuc

SEQ ID NO: 89112 - RNA, 27 nt, Human
cugagcaaagacugccugggcaggggu

SEQ ID NO: 89113 - RNA, 21 nt, Human
cugcaccgcucccgcuccgcg

SEQ ID NO: 89114 - RNA, 18 nt, Human
cugccugggcaggggugg

SEQ ID NO: 89115 - RNA, 19 nt, Human
cuguaggggugggggcggg

SEQ ID NO: 89116 - RNA, 19 nt, Human
gaagcagcccccgucccca

SEQ ID NO: 89117 - RNA, 20 nt, Human
gcaaggugguggauggaacc

SEQ ID NO: 89118 - RNA, 23 nt, Human
gcaggggugggugcagggggcuc

SEQ ID NO: 89119 - RNA, 21 nt, Human
ggauggaaccuggaaguuugg

SEQ ID NO: 89120 - RNA, 21 nt, Human
ggauggaaccuggaaguuugg

SEQ ID NO: 89121 - RNA, 20 nt, Human
ggcagaggggagcgagaggg

SEQ ID NO: 89122 - RNA, 22 nt, Human
ggcaggggugggugcagggggc

SEQ ID NO: 89123 - RNA, 18 nt, Human
gggacccuccacccaugc

SEQ ID NO: 89124 - RNA, 23 nt, Human
gggcagcagaagcaggguuuggg

SEQ ID NO: 89125 - RNA, 25 nt, Human
gggcagcagaagcaggguuuggggg

SEQ ID NO: 89126 - RNA, 21 nt, Human
gggcaggggugggugcagggg

SEQ ID NO: 89127 - RNA, 24 nt, Human
gggcaggggugggugcagggggcu

SEQ ID NO: 89128 - RNA, 22 nt, Human
gggugguggcaugggggaccgg

SEQ ID NO: 89129 - RNA, 19 nt, Human
gguagacgcaucagggcag

SEQ ID NO: 89130 - RNA, 18 nt, Human
gguggagaagcagccccc

SEQ ID NO: 89131 - RNA, 22 nt, Human
ggugggugcagggggcucagga

SEQ ID NO: 89132 - RNA, 24 nt, Human
uaaagaaggcaaggaaagggcggg

SEQ ID NO: 89133 - RNA, 24 nt, Human
uacaccauuggcaaggugguggau

SEQ ID NO: 89134 - RNA, 23 nt, Human
uagggacccuccacccaugcccc

SEQ ID NO: 89135 - RNA, 21 nt, Human
uccacccaugcccccaucacc

SEQ ID NO: 89136 - RNA, 21 nt, Human
ugagcaaagacugccugggca

SEQ ID NO: 89137 - RNA, 23 nt, Human
ugagcaaagacugccugggcagg

SEQ ID NO: 89138 - RNA, 19 nt, Human
ugcaccgcucccgcuccgc

SEQ ID NO: 89139 - RNA, 19 nt, Human
ugccugggcaggggugggu

SEQ ID NO: 89140 - RNA, 18 nt, Human
uggaaccuggaaguuugg

SEQ ID NO: 89141 - RNA, 20 nt, Human
uggaaccuggaaguuugggg

SEQ ID NO: 89142 - RNA, 24 nt, Human
ugggcaggggugggugcagggggc

SEQ ID NO: 89143 - RNA, 26 nt, Human
ugggcaggggugggugcagggggcuc

SEQ ID NO: 89144 - RNA, 18 nt, Human
ugggugcagggggcucag

SEQ ID NO: 89145 - RNA, 18 nt, Human
ugggugguggcauggggg

SEQ ID NO: 89146 - RNA, 22 nt, Human
ugguggauggaaccuggaaguu

SEQ ID NO: 89147 - RNA, 18 nt, Human
uguaggggugggggcggg

SEQ ID NO: 89148 - RNA, 19 nt, Human
ugugcaggcuguaggggug

SEQ ID NO: 89149 - RNA, 22 nt, Human
uuagggacccuccacccaugcc

SEQ ID NO: 89150 - RNA, 18 nt, Human
uuccacagcaggaccuuc

SEQ ID NO: 89151 - RNA, 25 nt, Human
uugguaaacaagaaacccaaagaga

SEQ ID NO: 89152 - RNA, 21 nt, Human
cacagcacaggcgcucuuccu

SEQ ID NO: 89153 - RNA, 20 nt, Human
cauaggauaagaccacagca

SEQ ID NO: 89154 - RNA, 21 nt, Human
cuccagugcucaggguucuau

SEQ ID NO: 89155 - RNA, 19 nt, Human
gauaagaccacagcacagg

SEQ ID NO: 89156 - RNA, 18 nt, Human
gcgcucuuccuccagugc

SEQ ID NO: 89157 - RNA, 24 nt, Human
gugaaacagcuagaagaaucaaag

SEQ ID NO: 89158 - RNA, 18 nt, Human
uaagaccacagcacaggc

SEQ ID NO: 89159 - RNA, 19 nt, Human
ugaaacagcuagaagaauc

SEQ ID NO: 89160 - RNA, 25 nt, Human
ugaaacagcuagaagaaucaaagag

SEQ ID NO: 89161 - RNA, 22 nt, Human
ugaaccucacagccaggacccu

SEQ ID NO: 89162 - RNA, 22 nt, Human
ugcccaauagugaaacagcuag

SEQ ID NO: 89163 - RNA, 24 nt, Human
uugggggauuccacauaggauaag

SEQ ID NO: 89164 - RNA, 24 nt, Human
aaagagccaccagagaggaaccaa

SEQ ID NO: 89165 - RNA, 23 nt, Human
aaaugaucagcacauucagaagc

SEQ ID NO: 89166 - RNA, 19 nt, Human
aaauuaggaaggaaaggga

SEQ ID NO: 89167 - RNA, 23 nt, Human
aagagccaccagagaggaaccaa

SEQ ID NO: 89168 - RNA, 26 nt, Human
aagagccaccagagaggaaccaaacc

SEQ ID NO: 89169 - RNA, 22 nt, Human
aagcaggacagaggagcucuga

SEQ ID NO: 89170 - RNA, 21 nt, Human
agacauccucugccacaagga

SEQ ID NO: 89171 - RNA, 19 nt, Human
agcaggacagaggagcucu

SEQ ID NO: 89172 - RNA, 23 nt, Human
agccaccagagaggaaccaaacc

SEQ ID NO: 89173 - RNA, 24 nt, Human
aggcgguggcagcggcggcggcgg

SEQ ID NO: 89174 - RNA, 18 nt, Human
augacaucucugggggac

SEQ ID NO: 89175 - RNA, 19 nt, Human
caaagagccaccagagagg

SEQ ID NO: 89176 - RNA, 24 nt, Human
caaagagccaccagagaggaacca

SEQ ID NO: 89177 - RNA, 27 nt, Human
caaagagccaccagagaggaaccaaac

SEQ ID NO: 89178 - RNA, 19 nt, Human
caaaugaucagcacauuca

SEQ ID NO: 89179 - RNA, 21 nt, Human
caggacagaggagcucugaug

SEQ ID NO: 89180 - RNA, 23 nt, Human
cccaaagagccaccagagaggaa

SEQ ID NO: 89181 - RNA, 20 nt, Human
ccucugccacaaggaaagcc

SEQ ID NO: 89182 - RNA, 19 nt, Human
ccugcucucuuuccuccca

SEQ ID NO: 89183 - RNA, 27 nt, Human
cugguauuuucccaggugauucucuuc

SEQ ID NO: 89184 - RNA, 23 nt, Human
cuuggaucagaggcgguggcagc

SEQ ID NO: 89185 - RNA, 18 nt, Human
gcucugaugacaucucug

SEQ ID NO: 89186 - RNA, 22 nt, Human
ggaaagccaccaauaccagccc

SEQ ID NO: 89187 - RNA, 20 nt, Human
ggaaggaugcaagaagggaa

SEQ ID NO: 89188 - RNA, 18 nt, Human
ggcagcggcggcggcggc

SEQ ID NO: 89189 - RNA, 19 nt, Human
ggcggcggcggcguccagc

SEQ ID NO: 89190 - RNA, 21 nt, Human
guccugcucucuuuccuccca

SEQ ID NO: 89191 - RNA, 20 nt, Human
guggcagcggcggcggcggc

SEQ ID NO: 89192 - RNA, 25 nt, Human
uauuuucccaggugauucucuucca

SEQ ID NO: 89193 - RNA, 23 nt, Human
ugauucucuuccaaccugugagu

SEQ ID NO: 89194 - RNA, 18 nt, Human
uggcagcggcggcggcgg

SEQ ID NO: 89195 - RNA, 18 nt, Human
aaacaaauguacccaaaa

SEQ ID NO: 89196 - RNA, 25 nt, Human
aaacaaauuauacaaucauguucuu

SEQ ID NO: 89197 - RNA, 18 nt, Human
aaacauguguaucuucca

SEQ ID NO: 89198 - RNA, 19 nt, Human
acaaggcacagcaucacca

SEQ ID NO: 89199 - RNA, 25 nt, Human
acagcaucaccauuaccaugugucc

SEQ ID NO: 89200 - RNA, 18 nt, Human
accaagguuuugaaacaa

SEQ ID NO: 89201 - RNA, 19 nt, Human
agcaaauauggaauuagcu

SEQ ID NO: 89202 - RNA, 21 nt, Human
agugacaaaggugcccuuuuu

SEQ ID NO: 89203 - RNA, 19 nt, Human
augagagaugccaucacuu

SEQ ID NO: 89204 - RNA, 19 nt, Human
auggcacaauauugacauu

SEQ ID NO: 89205 - RNA, 26 nt, Human
cacagcaucaccauuaccaugugucc

SEQ ID NO: 89206 - RNA, 19 nt, Human
cagaaauuaauagaaaugg

SEQ ID NO: 89207 - RNA, 22 nt, Human
cagcaaauauggaauuagcuua

SEQ ID NO: 89208 - RNA, 19 nt, Human
cagggcagcgcgagcggcc

SEQ ID NO: 89209 - RNA, 27 nt, Human
cagugauuucacgucccccuaagguuu

SEQ ID NO: 89210 - RNA, 18 nt, Human
ccaucacuuuuacuggac

SEQ ID NO: 89211 - RNA, 23 nt, Human
ccggucgacccgggaugaacacc

SEQ ID NO: 89212 - RNA, 22 nt, Human
cgacccgggaugaacaccacac

SEQ ID NO: 89213 - RNA, 23 nt, Human
gaaagaaccaguuugcuaccaga

SEQ ID NO: 89214 - RNA, 28 nt, Human
uaaacaaauuauacaaucauguucuuag

SEQ ID NO: 89215 - RNA, 18 nt, Human
uacauaagaaaacaaguu

SEQ ID NO: 89216 - RNA, 18 nt, Human
uaccauguguccucggag

SEQ ID NO: 89217 - RNA, 18 nt, Human
uagcuuauuuugcauuca

SEQ ID NO: 89218 - RNA, 19 nt, Human
uaugcuuuuaaucuugaug

SEQ ID NO: 89219 - RNA, 18 nt, Human
ucaguaucuuaggaugca

SEQ ID NO: 89220 - RNA, 19 nt, Human
ucuuaggaugcaaacaugu

SEQ ID NO: 89221 - RNA, 23 nt, Human
ugaaacaaauguacccaaaauau

SEQ ID NO: 89222 - RNA, 22 nt, Human
ugagagaugccaucacuuuuac

SEQ ID NO: 89223 - RNA, 18 nt, Human
ugcacagcaaauauggaa

SEQ ID NO: 89224 - RNA, 24 nt, Human
ugcacagcaaauauggaauuagcu

SEQ ID NO: 89225 - RNA, 24 nt, Human
uggaauuagcuuauuuugcauuca

SEQ ID NO: 89226 - RNA, 24 nt, Human
uguguaucuuccacggggcauucu

SEQ ID NO: 89227 - RNA, 20 nt, Human
uuaauagaaauggugaguuc

SEQ ID NO: 89228 - RNA, 24 nt, Human
uuucaugauaaccuucuuccugga

SEQ ID NO: 89229 - RNA, 20 nt, Human
aaaauuaaaaaucagaucca

SEQ ID NO: 89230 - RNA, 23 nt, Human
aaacaagcggucaaccacaaggg

SEQ ID NO: 89231 - RNA, 18 nt, Human
aaagggaguauugucuuc

SEQ ID NO: 89232 - RNA, 18 nt, Human
aagcauacaucuuccugc

SEQ ID NO: 89233 - RNA, 18 nt, Human
aauggacaaauucacuga

SEQ ID NO: 89234 - RNA, 20 nt, Human
acaagcauaagcauuucaca

SEQ ID NO: 89235 - RNA, 21 nt, Human
acaauggacaaauucacugaa

SEQ ID NO: 89236 - RNA, 21 nt, Human
agaugagacuggagauuugga

SEQ ID NO: 89237 - RNA, 21 nt, Human
aggcaguggcaaaauaugaca

SEQ ID NO: 89238 - RNA, 21 nt, Human
aguuaauuuuuuccccuccug

SEQ ID NO: 89239 - RNA, 19 nt, Human
auacauauacacaagcaua

SEQ ID NO: 89240 - RNA, 23 nt, Human
caaagcaacaguaccaagaauaa

SEQ ID NO: 89241 - RNA, 22 nt, Human
caagaaacaagcggucaaccac

SEQ ID NO: 89242 - RNA, 24 nt, Human
caagaaacaagcggucaaccacaa

SEQ ID NO: 89243 - RNA, 22 nt, Human
caagggcaagagguaaucugcu

SEQ ID NO: 89244 - RNA, 21 nt, Human
caauauauuaucacauuugua

SEQ ID NO: 89245 - RNA, 27 nt, Human
cacaacuaaaucacuucugaaaggcag

SEQ ID NO: 89246 - RNA, 20 nt, Human
cacuucugaaaggcaguggc

SEQ ID NO: 89247 - RNA, 18 nt, Human
caguggcaaaauaugaca

SEQ ID NO: 89248 - RNA, 24 nt, Human
cagugggagacuccauuccuagac

SEQ ID NO: 89249 - RNA, 18 nt, Human
ccaaaaccaagcugagca

SEQ ID NO: 89250 - RNA, 24 nt, Human
cuaauuagcccuccuggaucuucc

SEQ ID NO: 89251 - RNA, 18 nt, Human
cugaauaauucuucacaa

SEQ ID NO: 89252 - RNA, 22 nt, Human
cuggaaaagccugagcucuuuu

SEQ ID NO: 89253 - RNA, 18 nt, Human
cuugcagaggucacguag

SEQ ID NO: 89254 - RNA, 24 nt, Human
cuugcagaggucacguaguucaug

SEQ ID NO: 89255 - RNA, 24 nt, Human
cuuuacaacagcuagguccugccc

SEQ ID NO: 89256 - RNA, 22 nt, Human
gacaggcuuguccaaaaccaag

SEQ ID NO: 89257 - RNA, 18 nt, Human
gagacuggagauuuggag

SEQ ID NO: 89258 - RNA, 21 nt, Human
gccaaauacagaaauaaucua

SEQ ID NO: 89259 - RNA, 23 nt, Human
ggcaaaauaugacauagaugaga

SEQ ID NO: 89260 - RNA, 22 nt, Human
guuuucagcaaauugacucuaa

SEQ ID NO: 89261 - RNA, 26 nt, Human
uaaaaaaauuaaaaaucagauccaua

SEQ ID NO: 89262 - RNA, 21 nt, Human
uaaacaucagcaaccaaaaua

SEQ ID NO: 89263 - RNA, 22 nt, Human
uaauuaccaauauucaacaaau

SEQ ID NO: 89264 - RNA, 24 nt, Human
uacaauggacaaauucacugaaua

SEQ ID NO: 89265 - RNA, 20 nt, Human
uaccaagaauaacuuucuuc

SEQ ID NO: 89266 - RNA, 22 nt, Human
uaccaagaauaacuuucuucag

SEQ ID NO: 89267 - RNA, 20 nt, Human
uagaacaauacuacauaaca

SEQ ID NO: 89268 - RNA, 18 nt, Human
uagauucuuugugaccuc

SEQ ID NO: 89269 - RNA, 22 nt, Human
ucaaagcauacaucuuccugcc

SEQ ID NO: 89270 - RNA, 20 nt, Human
ucagcaaauugacucuaaau

SEQ ID NO: 89271 - RNA, 18 nt, Human
ucaggauuuucaaaaauc

SEQ ID NO: 89272 - RNA, 26 nt, Human
uccacaacuaaaucacuucugaaagg

SEQ ID NO: 89273 - RNA, 25 nt, Human
uccagaguuaaaaauaaaaauauug

SEQ ID NO: 89274 - RNA, 25 nt, Human
ucuuuacaacagcuagguccugccc

SEQ ID NO: 89275 - RNA, 19 nt, Human
ugaagcuggguggaaagca

SEQ ID NO: 89276 - RNA, 18 nt, Human
ugacauuugcaucucagu

SEQ ID NO: 89277 - RNA, 21 nt, Human
ugacauuugcaucucaguccu

SEQ ID NO: 89278 - RNA, 20 nt, Human
ugagaaacguuaaacaugaa

SEQ ID NO: 89279 - RNA, 18 nt, Human
ugauauguucgguuccug

SEQ ID NO: 89280 - RNA, 24 nt, Human
ugcaaauauacaucuuuuugcuuu

SEQ ID NO: 89281 - RNA, 18 nt, Human
ugcagugggagacuccau

SEQ ID NO: 89282 - RNA, 18 nt, Human
ugcauuacugugacauuu

SEQ ID NO: 89283 - RNA, 22 nt, Human
uggaaagcaguuaauggacuua

SEQ ID NO: 89284 - RNA, 22 nt, Human
uggacaggcuuguccaaaacca

SEQ ID NO: 89285 - RNA, 18 nt, Human
uggcaaacucucuuuaaa

SEQ ID NO: 89286 - RNA, 18 nt, Human
uggcaaacucucuuuaaa

SEQ ID NO: 89287 - RNA, 27 nt, Human
uguaaacaaaaauagaacaauacuaca

SEQ ID NO: 89288 - RNA, 21 nt, Human
uguuuuucuuugauacuuugc

SEQ ID NO: 89289 - RNA, 22 nt, Human
uuaaaugcauggucuuucuccc

SEQ ID NO: 89290 - RNA, 22 nt, Human
uuagcaauauauuaucacauuu

SEQ ID NO: 89291 - RNA, 25 nt, Human
uuuauaaauccuggaguuuagggga

SEQ ID NO: 89292 - RNA, 25 nt, Human
uuugaagaucucuuuguccuggaau

SEQ ID NO: 89293 - RNA, 22 nt, Human
uuuguaaacaaaaauagaacaa

SEQ ID NO: 89294 - RNA, 22 nt, Human
uuuguaccacagcugccagaaa

SEQ ID NO: 89295 - RNA, 19 nt, Human
uuuuaagcuuugaagcugg

SEQ ID NO: 89296 - RNA, 19 nt, Human
aaaaaaucagcccagauac

SEQ ID NO: 89297 - RNA, 19 nt, Human
aaaguugauugugcuuuuc

SEQ ID NO: 89298 - RNA, 25 nt, Human
aagaaaauaagaaauccuucauuga

SEQ ID NO: 89299 - RNA, 24 nt, Human
aagagugaaagcuuugcaauguga

SEQ ID NO: 89300 - RNA, 18 nt, Human
aauuucuuuuuacaaaau

SEQ ID NO: 89301 - RNA, 19 nt, Human
acaccagcucagaaaaguu

SEQ ID NO: 89302 - RNA, 23 nt, Human
acccacaagcaaggugggaaaga

SEQ ID NO: 89303 - RNA, 22 nt, Human
agacaggaagagguugacaagg

SEQ ID NO: 89304 - RNA, 18 nt, Human
aggaauucccucccacug

SEQ ID NO: 89305 - RNA, 22 nt, Human
auauugaagucuucuggcuaca

SEQ ID NO: 89306 - RNA, 21 nt, Human
auccuguucauccaguuucca

SEQ ID NO: 89307 - RNA, 21 nt, Human
caguagaaauggaagggcaaa

SEQ ID NO: 89308 - RNA, 19 nt, Human
cagugagacaaccauccuu

SEQ ID NO: 89309 - RNA, 19 nt, Human
cauagagaaaagaaagcca

SEQ ID NO: 89310 - RNA, 19 nt, Human
cccacaagcaaggugggaa

SEQ ID NO: 89311 - RNA, 21 nt, Human
cggcacucugggaaaaaaaaa

SEQ ID NO: 89312 - RNA, 18 nt, Human
cucugggaaaaaaaaaaa

SEQ ID NO: 89313 - RNA, 20 nt, Human
gcagaagagauuuacccaca

SEQ ID NO: 89314 - RNA, 24 nt, Human
uaaaaaaucagcccagauacagua

SEQ ID NO: 89315 - RNA, 20 nt, Human
uaaugauauagaaguaagau

SEQ ID NO: 89316 - RNA, 24 nt, Human
uaauggaguauuuacaagcucauu

SEQ ID NO: 89317 - RNA, 19 nt, Human
uaauuuguuuauacaguag

SEQ ID NO: 89318 - RNA, 19 nt, Human
uacaaaaaggacuacggca

SEQ ID NO: 89319 - RNA, 21 nt, Human
uagaaucaugcccaacaugua

SEQ ID NO: 89320 - RNA, 23 nt, Human
uagcaaucuuguuuuauagcaac

SEQ ID NO: 89321 - RNA, 26 nt, Human
uagcaaucuuucaaauauuguuuucu

SEQ ID NO: 89322 - RNA, 18 nt, Human
uagcagagcuugaugguc

SEQ ID NO: 89323 - RNA, 24 nt, Human
uaggagaagcaccaaacagugaga

SEQ ID NO: 89324 - RNA, 20 nt, Human
uauacaguagaaauggaagg

SEQ ID NO: 89325 - RNA, 22 nt, Human
uauacaguagaaauggaagggc

SEQ ID NO: 89326 - RNA, 18 nt, Human
uaucagauauuaacauac

SEQ ID NO: 89327 - RNA, 18 nt, Human
ucagauauuaacauacac

SEQ ID NO: 89328 - RNA, 22 nt, Human
ucagcccagauacaguaucaga

SEQ ID NO: 89329 - RNA, 21 nt, Human
uccugcaauuaggaugagauu

SEQ ID NO: 89330 - RNA, 24 nt, Human
ucuauaggcuaguauggguuuuua

SEQ ID NO: 89331 - RNA, 24 nt, Human
ucuauaggcuaguauggguuuuua

SEQ ID NO: 89332 - RNA, 22 nt, Human
ucugguauuguccauuugagaa

SEQ ID NO: 89333 - RNA, 20 nt, Human
uggaacuggcuuacaccagc

SEQ ID NO: 89334 - RNA, 27 nt, Human
ugggaaagagugaaagcuuugcaaugg

SEQ ID NO: 89335 - RNA, 19 nt, Human
uggugugcuggaacuggcu

SEQ ID NO: 89336 - RNA, 25 nt, Human
uguauuugauuugagacuauaaaau

SEQ ID NO: 89337 - RNA, 21 nt, Human
uuacaaaauuccaagaaaaua

SEQ ID NO: 89338 - RNA, 20 nt, Human
uuccaggggucaagacccag

SEQ ID NO: 89339 - RNA, 25 nt, Human
uugucaaguuguaguaguuuucuuu

SEQ ID NO: 89340 - RNA, 24 nt, Human
uuuaagaauuucuuaaauuccagg

SEQ ID NO: 89341 - RNA, 20 nt, Human
uuuagugguagcaaucuuuc

SEQ ID NO: 89342 - RNA, 18 nt, Human
uuuauacaguagaaaugg

SEQ ID NO: 89343 - RNA, 18 nt, Human
aaacaacaugacuucugu

SEQ ID NO: 89344 - RNA, 18 nt, Human
aaacaacaugacuucugu

SEQ ID NO: 89345 - RNA, 22 nt, Human
aaagaaauccacaaaacaacca

SEQ ID NO: 89346 - RNA, 18 nt, Human
aaagagcgaauuagcccu

SEQ ID NO: 89347 - RNA, 23 nt, Human
aaaucaguaccacugucagcuaa

SEQ ID NO: 89348 - RNA, 22 nt, Human
aacaguucuaaucucucuucuu

SEQ ID NO: 89349 - RNA, 24 nt, Human
aacaguucuaaucucucuucuuuu

SEQ ID NO: 89350 - RNA, 21 nt, Human
aaccaaccuaaaaaaucagua

SEQ ID NO: 89351 - RNA, 20 nt, Human
aacuccuucuaacaguucua

SEQ ID NO: 89352 - RNA, 25 nt, Human
aacuccuucuaacaguucuaaucuc

SEQ ID NO: 89353 - RNA, 19 nt, Human
aagcaggagcacagccaga

SEQ ID NO: 89354 - RNA, 19 nt, Human
aagcaggcgggcaggcagg

SEQ ID NO: 89355 - RNA, 23 nt, Human
acaaaacagagcgaauuagcccu

SEQ ID NO: 89356 - RNA, 22 nt, Human
acuaaagaaauccacaaaacaa

SEQ ID NO: 89357 - RNA, 20 nt, Human
acuuucaaaaaguguuacaa

SEQ ID NO: 89358 - RNA, 23 nt, Human
agaaauccacaaaacaaccaacc

SEQ ID NO: 89359 - RNA, 25 nt, Human
agaaauccacaaaacaaccaacccc

SEQ ID NO: 89360 - RNA, 22 nt, Human
aggcauugaaaacauauugaua

SEQ ID NO: 89361 - RNA, 24 nt, Human
aggcauugaaaacauauugauacc

SEQ ID NO: 89362 - RNA, 19 nt, Human
aggucaucaggcauugaaa

SEQ ID NO: 89363 - RNA, 22 nt, Human
aggucaucaggcauugaaaaca

SEQ ID NO: 89364 - RNA, 25 nt, Human
auuucaacuccuucuaacaguucua

SEQ ID NO: 89365 - RNA, 18 nt, Human
caaaacaaccaaccuaaa

SEQ ID NO: 89366 - RNA, 19 nt, Human
caaaacaaccaaccuaaaa

SEQ ID NO: 89367 - RNA, 21 nt, Human
caguauuucaaaucugaaaug

SEQ ID NO: 89368 - RNA, 21 nt, Human
caguauuucaaaucugaaaug

SEQ ID NO: 89369 - RNA, 25 nt, Human
cauggguuucuuuagaaacaggcuc

SEQ ID NO: 89370 - RNA, 24 nt, Human
ccacaaaacaaccaaccuaaaaaa

SEQ ID NO: 89371 - RNA, 18 nt, Human
cuaaagaaauccacaaaa

SEQ ID NO: 89372 - RNA, 24 nt, Human
cuacuaagauaauuucuuccaugc

SEQ ID NO: 89373 - RNA, 24 nt, Human
cuacuaagauaauuucuuccaugc

SEQ ID NO: 89374 - RNA, 24 nt, Human
cuguugacuucagaugugguuggu

SEQ ID NO: 89375 - RNA, 24 nt, Human
cuguugacuucagaugugguuggu

SEQ ID NO: 89376 - RNA, 22 nt, Human
cuuuuuuuuuuuaaagacaacc

SEQ ID NO: 89377 - RNA, 21 nt, Human
gcaaaggcaguacuuuuacca

SEQ ID NO: 89378 - RNA, 18 nt, Human
gcucguccugcgucuuga

SEQ ID NO: 89379 - RNA, 23 nt, Human
ggacuaagucggaaaggaaggac

SEQ ID NO: 89380 - RNA, 18 nt, Human
ggagcacagccagagagc

SEQ ID NO: 89381 - RNA, 20 nt, Human
uaaaaaaacaaaaacuacgg

SEQ ID NO: 89382 - RNA, 21 nt, Human
uaaagugcagaaacaacauga

SEQ ID NO: 89383 - RNA, 21 nt, Human
uaaagugcagaaacaacauga

SEQ ID NO: 89384 - RNA, 22 nt, Human
uaagucggaaaggaaggacuga

SEQ ID NO: 89385 - RNA, 18 nt, Human
uaccaugaacaucucuag

SEQ ID NO: 89386 - RNA, 24 nt, Human
uacuaaauauaauagucuagcaca

SEQ ID NO: 89387 - RNA, 22 nt, Human
uaugcacauacauacauaauug

SEQ ID NO: 89388 - RNA, 27 nt, Human
uaugcacauacauacauaauugaguua

SEQ ID NO: 89389 - RNA, 20 nt, Human
uaugcacauacauacauagu

SEQ ID NO: 89390 - RNA, 22 nt, Human
ucagguucagggagaccagaug

SEQ ID NO: 89391 - RNA, 24 nt, Human
ucaguaccacugucagcuaacaua

SEQ ID NO: 89392 - RNA, 30 nt, Human
ucuaaucucucuucuuuucaauacuuucuu

SEQ ID NO: 89393 - RNA, 22 nt, Human
ucucuagcugugauuauuaaau

SEQ ID NO: 89394 - RNA, 20 nt, Human
ucucucuucuuuucaauacu

SEQ ID NO: 89395 - RNA, 22 nt, Human
ucucucuucuuuucaauacuuu

SEQ ID NO: 89396 - RNA, 20 nt, Human
ucugaaacuucuucccgagg

SEQ ID NO: 89397 - RNA, 21 nt, Human
ucugaaauggguuacuuucaa

SEQ ID NO: 89398 - RNA, 21 nt, Human
ucugaaauggguuacuuucaa

SEQ ID NO: 89399 - RNA, 22 nt, Human
ucugguuggucaccaaucccug

SEQ ID NO: 89400 - RNA, 18 nt, Human
ucuuuucaauacuuucuu

SEQ ID NO: 89401 - RNA, 20 nt, Human
ucuuuuuuuuuuuaaagaca

SEQ ID NO: 89402 - RNA, 18 nt, Human
ugaaauggguuacuuuca

SEQ ID NO: 89403 - RNA, 22 nt, Human
ugaaauggguuacuuucaaaaa

SEQ ID NO: 89404 - RNA, 22 nt, Human
ugaaauggguuacuuucaaaaa

SEQ ID NO: 89405 - RNA, 20 nt, Human
ugaaauguuccaaugauacc

SEQ ID NO: 89406 - RNA, 20 nt, Human
ugaaucaucagcaugaaaaa

SEQ ID NO: 89407 - RNA, 22 nt, Human
ugacuucagaugugguugguau

SEQ ID NO: 89408 - RNA, 22 nt, Human
ugacuucagaugugguugguau

SEQ ID NO: 89409 - RNA, 18 nt, Human
ugagcuuggguucuuucu

SEQ ID NO: 89410 - RNA, 23 nt, Human
ugcaaaggcaguacuuuuaccau

SEQ ID NO: 89411 - RNA, 22 nt, Human
ugcucagauacagaguuaugau

SEQ ID NO: 89412 - RNA, 22 nt, Human
ugcucagauacagaguuaugau

SEQ ID NO: 89413 - RNA, 19 nt, Human
uggacaggucagcaaucag

SEQ ID NO: 89414 - RNA, 23 nt, Human
uguauauguguaugcacauacau

SEQ ID NO: 89415 - RNA, 19 nt, Human
uguguuuguauauguguau

SEQ ID NO: 89416 - RNA, 23 nt, Human
uguguuuguauauguguaugcac

SEQ ID NO: 89417 - RNA, 23 nt, Human
uuaccaugaacaucucuagcugu

SEQ ID NO: 89418 - RNA, 23 nt, Human
uuagaaaauuucaacuccuucua

SEQ ID NO: 89419 - RNA, 22 nt, Human
uucaaaaaguguuacaauugcc

SEQ ID NO: 89420 - RNA, 22 nt, Human
uucaaaaaguguuacaauugcc

SEQ ID NO: 89421 - RNA, 24 nt, Human
uucaacuccuucuaacaguucuaa

SEQ ID NO: 89422 - RNA, 19 nt, Human
uugagcuuggguucuuucu

SEQ ID NO: 89423 - RNA, 21 nt, Human
uuuuuuuuuuaaagacaacca

SEQ ID NO: 89424 - RNA, 23 nt, Human
aaaccagcuaugacaauuuauac

SEQ ID NO: 89425 - RNA, 22 nt, Human
aacauacacgggcaugccacca

SEQ ID NO: 89426 - RNA, 22 nt, Human
acacgaaguacaagaggaccag

SEQ ID NO: 89427 - RNA, 19 nt, Human
agaaugaauaaaugaacuu

SEQ ID NO: 89428 - RNA, 24 nt, Human
agaugcucccuugguaaauguuuc

SEQ ID NO: 89429 - RNA, 25 nt, Human
aggaagagcagagggagccgguacc

SEQ ID NO: 89430 - RNA, 23 nt, Human
caagagguaaguaaaagauucaa

SEQ ID NO: 89431 - RNA, 26 nt, Human
caauacaugcagauuuugugugugug

SEQ ID NO: 89432 - RNA, 18 nt, Human
caccaugggucggagcac

SEQ ID NO: 89433 - RNA, 24 nt, Human
caccaugggucggagcacacgaag

SEQ ID NO: 89434 - RNA, 18 nt, Human
cagacaacgcuaaaccaa

SEQ ID NO: 89435 - RNA, 23 nt, Human
caugcagauuuugugugugugga

SEQ ID NO: 89436 - RNA, 20 nt, Human
caugccaccaggguguguca

SEQ ID NO: 89437 - RNA, 21 nt, Human
ccacgacacucccagcaccac

SEQ ID NO: 89438 - RNA, 19 nt, Human
ccgccgccgccgccugcgc

SEQ ID NO: 89439 - RNA, 26 nt, Human
ccgccgccgccgccugcgccgccgcc

SEQ ID NO: 89440 - RNA, 27 nt, Human
ccgccgccgccgccugcgccgccgccu

SEQ ID NO: 89441 - RNA, 23 nt, Human
ccgccgccugcgccgccgccuga

SEQ ID NO: 89442 - RNA, 21 nt, Human
cgcuaugccgccgccgccgcc

SEQ ID NO: 89443 - RNA, 26 nt, Human
cgcugugcgcuaugccgccgccgccg

SEQ ID NO: 89444 - RNA, 22 nt, Human
cucaaucgucaagcugcaugca

SEQ ID NO: 89445 - RNA, 18 nt, Human
cugcuaaggcgcgcugug

SEQ ID NO: 89446 - RNA, 19 nt, Human
cugcugcugcugcugcugc

SEQ ID NO: 89447 - RNA, 27 nt, Human
cugugcgcuaugccgccgccgccgccu

SEQ ID NO: 89448 - RNA, 21 nt, Human
gaauuuguuuuuucauuuuuc

SEQ ID NO: 89449 - RNA, 18 nt, Human
gccagcccaaacagugua

SEQ ID NO: 89450 - RNA, 25 nt, Human
gccgccgccgccgccugcgccgccg

SEQ ID NO: 89451 - RNA, 18 nt, Human
gcuaaaccaacauacacg

SEQ ID NO: 89452 - RNA, 21 nt, Human
ggagcacacgaaguacaagag

SEQ ID NO: 89453 - RNA, 19 nt, Human
gggcaugccaccagggugu

SEQ ID NO: 89454 - RNA, 28 nt, Human
uaccuccgaugcugcugcugcugcugcc

SEQ ID NO: 89455 - RNA, 19 nt, Human
ugacaauuuauacuaaaca

SEQ ID NO: 89456 - RNA, 21 nt, Human
ugacagccugacaccuguuuc

SEQ ID NO: 89457 - RNA, 20 nt, Human
ugcuaaggcgcgcugugcgc

SEQ ID NO: 89458 - RNA, 18 nt, Human
ugcugcugcugcuaaggc

SEQ ID NO: 89459 - RNA, 21 nt, Human
ugcugcugcugcugcugcugc

SEQ ID NO: 89460 - RNA, 18 nt, Human
uggcugcaccagcgcggg

SEQ ID NO: 89461 - RNA, 19 nt, Human
uggcugcaccagcgcgggg

SEQ ID NO: 89462 - RNA, 19 nt, Human
uggcugcaccagcgcgggg

SEQ ID NO: 89463 - RNA, 22 nt, Human
uguggacagaagguacuuuuga

SEQ ID NO: 89464 - RNA, 24 nt, Human
aaugacaguaagauaagggaagaa

SEQ ID NO: 89465 - RNA, 24 nt, Human
acuuuaaaaaaggcauaacccagg

SEQ ID NO: 89466 - RNA, 18 nt, Human
agacgcgaccacacaacc

SEQ ID NO: 89467 - RNA, 19 nt, Human
agggaagaaaacauggagg

SEQ ID NO: 89468 - RNA, 22 nt, Human
caaaaaaauaguguacgaguac

SEQ ID NO: 89469 - RNA, 23 nt, Human
caaagaaaaggcaaauaaacaau

SEQ ID NO: 89470 - RNA, 20 nt, Human
caaguaacaauaaaagaaaa

SEQ ID NO: 89471 - RNA, 23 nt, Human
caauagugcaacuuuuaaguaca

SEQ ID NO: 89472 - RNA, 18 nt, Human
cucagcucgcucucucca

SEQ ID NO: 89473 - RNA, 24 nt, Human
gagacgcgaccacacaaccacuca

SEQ ID NO: 89474 - RNA, 22 nt, Human
gaguuacaacuccacacuucaa

SEQ ID NO: 89475 - RNA, 23 nt, Human
ggcauaacccagauguucccuca

SEQ ID NO: 89476 - RNA, 22 nt, Human
uaaaaaaggcauaacccagaug

SEQ ID NO: 89477 - RNA, 20 nt, Human
uaaaaagcaaguaacaauaa

SEQ ID NO: 89478 - RNA, 22 nt, Human
uaaacaaaguuuaaaaagcaag

SEQ ID NO: 89479 - RNA, 21 nt, Human
uaaagaaaacuacuuuaaaaa

SEQ ID NO: 89480 - RNA, 26 nt, Human
uacaaacaaagaaaaggcaaauaaac

SEQ ID NO: 89481 - RNA, 25 nt, Human
uacuuuaaaaaaggcauaacccaga

SEQ ID NO: 89482 - RNA, 25 nt, Human
uagggagaaaccuuuuacagauaag

SEQ ID NO: 89483 - RNA, 24 nt, Human
uccgagacgcgaccacacaaccac

SEQ ID NO: 89484 - RNA, 18 nt, Human
ugcaacauguuacuugau

SEQ ID NO: 89485 - RNA, 24 nt, Human
ugcaauagugcaacuuuuaaguac

SEQ ID NO: 89486 - RNA, 22 nt, Human
uggaaaacaaauauacaacuug

SEQ ID NO: 89487 - RNA, 25 nt, Human
uggcuaaacaaaguuuaaaaagcaa

SEQ ID NO: 89488 - RNA, 19 nt, Human
ugugcagaagggcuuagau

SEQ ID NO: 89489 - RNA, 22 nt, Human
uguuucugguacaggaccagca

SEQ ID NO: 89490 - RNA, 19 nt, Human
uuacaaacaaagaaaaggc

SEQ ID NO: 89491 - RNA, 30 nt, Human
uuaggacaaugacaguaagauaagggaagg

SEQ ID NO: 89492 - RNA, 23 nt, Human
uugacaguagggagaaaccuuuu

SEQ ID NO: 89493 - RNA, 23 nt, Human
aaaaaacccagacgacugguggg

SEQ ID NO: 89494 - RNA, 22 nt, Human
aaacaaaaccaaaacauuccga

SEQ ID NO: 89495 - RNA, 19 nt, Human
aaacaagaggaaacaaacc

SEQ ID NO: 89496 - RNA, 22 nt, Human
aaacaagaggaaacaaaccaaa

SEQ ID NO: 89497 - RNA, 23 nt, Human
aaacaagaggaaacaaaccaaaa

SEQ ID NO: 89498 - RNA, 24 nt, Human
aacagaaaaggggaaaaaacccag

SEQ ID NO: 89499 - RNA, 23 nt, Human
aacugaacacaauauugcccggu

SEQ ID NO: 89500 - RNA, 20 nt, Human
aagaaaaaaaaagagaacca

SEQ ID NO: 89501 - RNA, 18 nt, Human
aagcaggggguggggggu

SEQ ID NO: 89502 - RNA, 22 nt, Human
aagcaggggguggggggugggg

SEQ ID NO: 89503 - RNA, 19 nt, Human
aauguccacagccucacgc

SEQ ID NO: 89504 - RNA, 20 nt, Human
acaauuccucaacgcccccu

SEQ ID NO: 89505 - RNA, 23 nt, Human
acacucacugcccgcagcgcgcg

SEQ ID NO: 89506 - RNA, 24 nt, Human
acagaaaaggggaaaaaacccaga

SEQ ID NO: 89507 - RNA, 24 nt, Human
accaaaauggaggagagccauccg

SEQ ID NO: 89508 - RNA, 22 nt, Human
accauccccacauccauuccua

SEQ ID NO: 89509 - RNA, 23 nt, Human
acccaaaauaagaugacaaacaa

SEQ ID NO: 89510 - RNA, 24 nt, Human
acccaaaauaagaugacaaacaag

SEQ ID NO: 89511 - RNA, 18 nt, Human
acgccacaauuccucaac

SEQ ID NO: 89512 - RNA, 23 nt, Human
acuguauuuuauuggaaaacauu

SEQ ID NO: 89513 - RNA, 24 nt, Human
agagaugaggggcauggagagaga

SEQ ID NO: 89514 - RNA, 21 nt, Human
agaugacaaacaagaggaaac

SEQ ID NO: 89515 - RNA, 20 nt, Human
agcuaaaccucagaaagcca

SEQ ID NO: 89516 - RNA, 27 nt, Human
aggcagggaagagggcacggagcacag

SEQ ID NO: 89517 - RNA, 18 nt, Human
aggcaggugggcgaggga

SEQ ID NO: 89518 - RNA, 19 nt, Human
aggcaggugggcgagggaa

SEQ ID NO: 89519 - RNA, 18 nt, Human
agggaagaaggagaaaga

SEQ ID NO: 89520 - RNA, 18 nt, Human
aggggaaaaaacccagac

SEQ ID NO: 89521 - RNA, 23 nt, Human
aggggaagcaggggguggggggu

SEQ ID NO: 89522 - RNA, 20 nt, Human
agguauuuacagaacagcuc

SEQ ID NO: 89523 - RNA, 19 nt, Human
caaaaugaaagucuuaagg

SEQ ID NO: 89524 - RNA, 25 nt, Human
caaagcgaccauccccacauccauu

SEQ ID NO: 89525 - RNA, 18 nt, Human
caaggggaucuggggagg

SEQ ID NO: 89526 - RNA, 23 nt, Human
caccccugccccaacaggcugcu

SEQ ID NO: 89527 - RNA, 27 nt, Human
caccccugccccaacaggcugcuggga

SEQ ID NO: 89528 - RNA, 20 nt, Human
cagcagccagugggauguga

SEQ ID NO: 89529 - RNA, 22 nt, Human
cagcuaaaccucagaaagccaa

SEQ ID NO: 89530 - RNA, 21 nt, Human
cagcuugaacugaacacaaua

SEQ ID NO: 89531 - RNA, 18 nt, Human
cagcuugggacaaaucuu

SEQ ID NO: 89532 - RNA, 19 nt, Human
cagcuugggacaaaucuuu

SEQ ID NO: 89533 - RNA, 21 nt, Human
caugcaacggcaaagggcaug

SEQ ID NO: 89534 - RNA, 23 nt, Human
ccaaaacauuccgaaaaugucca

SEQ ID NO: 89535 - RNA, 24 nt, Human
ccaaaacauuccgaaaauguccac

SEQ ID NO: 89536 - RNA, 22 nt, Human
ccagcuaaaccucagaaagcca

SEQ ID NO: 89537 - RNA, 23 nt, Human
cccacccagcuaaaccucagaaa

SEQ ID NO: 89538 - RNA, 21 nt, Human
cccccucgaccccuccugggc

SEQ ID NO: 89539 - RNA, 18 nt, Human
ccgccgcgcguccgcgcc

SEQ ID NO: 89540 - RNA, 19 nt, Human
ccgccgcgcguccgcgccu

SEQ ID NO: 89541 - RNA, 19 nt, Human
ccucagaggcugggugccu

SEQ ID NO: 89542 - RNA, 20 nt, Human
ccuccacacucacugcccgc

SEQ ID NO: 89543 - RNA, 21 nt, Human
ccuucuggaaugccucucuug

SEQ ID NO: 89544 - RNA, 19 nt, Human
cgaaaauguccacagccuc

SEQ ID NO: 89545 - RNA, 19 nt, Human
cgagaagagagagaucaag

SEQ ID NO: 89546 - RNA, 22 nt, Human
cggagcacagaugugaggaagc

SEQ ID NO: 89547 - RNA, 20 nt, Human
cuccgccgcgcguccgcgcc

SEQ ID NO: 89548 - RNA, 18 nt, Human
gaaagaaaaaaaaagaga

SEQ ID NO: 89549 - RNA, 20 nt, Human
gagagccauccgggcuggag

SEQ ID NO: 89550 - RNA, 23 nt, Human
gagcacagaugugaggaagcggc

SEQ ID NO: 89551 - RNA, 21 nt, Human
gaggggaaagaaaaaaaaaga

SEQ ID NO: 89552 - RNA, 21 nt, Human
gcacggagcacagaugugagg

SEQ ID NO: 89553 - RNA, 23 nt, Human
gccuaccugcccuuacccucagc

SEQ ID NO: 89554 - RNA, 20 nt, Human
gcugcagcaguuccagcucc

SEQ ID NO: 89555 - RNA, 20 nt, Human
gcuggggaguaugggggcag

SEQ ID NO: 89556 - RNA, 25 nt, Human
ggaaaagccacuugaucgaccuggg

SEQ ID NO: 89557 - RNA, 27 nt, Human
ggaaugccucucuuggcaccccugccc

SEQ ID NO: 89558 - RNA, 18 nt, Human
ggagaagcgggaggugcu

SEQ ID NO: 89559 - RNA, 27 nt, Human
ggagaagcgggaggugcuggcggacca

SEQ ID NO: 89560 - RNA, 22 nt, Human
ggaucaagguuccuccggcggc

SEQ ID NO: 89561 - RNA, 18 nt, Human
ggcccccucgaccccucc

SEQ ID NO: 89562 - RNA, 20 nt, Human
ggccuuggaagacguggaug

SEQ ID NO: 89563 - RNA, 22 nt, Human
gggcagugaggggaagcagggg

SEQ ID NO: 89564 - RNA, 20 nt, Human
gggcauggagagagacucag

SEQ ID NO: 89565 - RNA, 26 nt, Human
ggggaaagaaaaaaaaagagaaccag

SEQ ID NO: 89566 - RNA, 21 nt, Human
ggggaagcagggggugggggg

SEQ ID NO: 89567 - RNA, 24 nt, Human
ggggagccagaugaaaugaacaga

SEQ ID NO: 89568 - RNA, 25 nt, Human
ggggaguaugggggcaggcaggugg

SEQ ID NO: 89569 - RNA, 20 nt, Human
gggggugggggguggggugg

SEQ ID NO: 89570 - RNA, 21 nt, Human
gggggugggguggggaggugg

SEQ ID NO: 89571 - RNA, 18 nt, Human
gggguggggagguggugg

SEQ ID NO: 89572 - RNA, 21 nt, Human
gggguggggaggugguggggg

SEQ ID NO: 89573 - RNA, 23 nt, Human
gggguggggagguggugggggga

SEQ ID NO: 89574 - RNA, 24 nt, Human
gggguguccggagcacggggauca

SEQ ID NO: 89575 - RNA, 27 nt, Human
ggguggggaggugguggggggagccag

SEQ ID NO: 89576 - RNA, 24 nt, Human
gguggggggugggguggggaggug

SEQ ID NO: 89577 - RNA, 18 nt, Human
guggggcccaucuucccu

SEQ ID NO: 89578 - RNA, 23 nt, Human
uaaaaaaaacaaaaccaaaacau

SEQ ID NO: 89579 - RNA, 21 nt, Human
uacccucagcucuuggcuggg

SEQ ID NO: 89580 - RNA, 24 nt, Human
uacccucagcucuuggcugggucu

SEQ ID NO: 89581 - RNA, 22 nt, Human
uagcaccagguauuuacagaac

SEQ ID NO: 89582 - RNA, 20 nt, Human
uaggacgggcccucagggcg

SEQ ID NO: 89583 - RNA, 24 nt, Human
ucacagggcugguugcaugcaacg

SEQ ID NO: 89584 - RNA, 19 nt, Human
ucagaagcaagggcacgga

SEQ ID NO: 89585 - RNA, 21 nt, Human
ucagaggcugggugccagagg

SEQ ID NO: 89586 - RNA, 24 nt, Human
ucaggaacgcgggcaaguccaauc

SEQ ID NO: 89587 - RNA, 20 nt, Human
ucaguccccuucugugaguu

SEQ ID NO: 89588 - RNA, 21 nt, Human
ucaguccuucuggaaugccuc

SEQ ID NO: 89589 - RNA, 22 nt, Human
uccgaaaauguccacagccuca

SEQ ID NO: 89590 - RNA, 24 nt, Human
uccgcgccuccacacucacugccc

SEQ ID NO: 89591 - RNA, 23 nt, Human
ugaacagaaaaggggaaaaaacc

SEQ ID NO: 89592 - RNA, 24 nt, Human
ugacaaacaagaggaaacaaaccu

SEQ ID NO: 89593 - RNA, 20 nt, Human
ugagaagagauucucaaagc

SEQ ID NO: 89594 - RNA, 18 nt, Human
ugagcaguccccacccag

SEQ ID NO: 89595 - RNA, 21 nt, Human
ugaggagggagcggcauggga

SEQ ID NO: 89596 - RNA, 28 nt, Human
ugauauauauuuuucuucacagcuugaa

SEQ ID NO: 89597 - RNA, 24 nt, Human
ugcccacauugacuuacuuguccc

SEQ ID NO: 89598 - RNA, 23 nt, Human
ugccccaucccuccuucccucag

SEQ ID NO: 89599 - RNA, 19 nt, Human
ugccucucuuggcaccccu

SEQ ID NO: 89600 - RNA, 23 nt, Human
ugccucucuuggcaccccugccc

SEQ ID NO: 89601 - RNA, 22 nt, Human
uggaagaggcgagggcaaaagg

SEQ ID NO: 89602 - RNA, 21 nt, Human
uggaaugccucucuuggcacc

SEQ ID NO: 89603 - RNA, 24 nt, Human
uggaaugccucucuuggcaccccu

SEQ ID NO: 89604 - RNA, 24 nt, Human
uggcaccccugccccaacaggcug

SEQ ID NO: 89605 - RNA, 22 nt, Human
uggcugggucucccacuaugcc

SEQ ID NO: 89606 - RNA, 20 nt, Human
uggggaggugguggggggag

SEQ ID NO: 89607 - RNA, 23 nt, Human
uggggaggugguggggggagcca

SEQ ID NO: 89608 - RNA, 20 nt, Human
ugggggcaggcaggugggcg

SEQ ID NO: 89609 - RNA, 19 nt, Human
uggggggugggguggggag

SEQ ID NO: 89610 - RNA, 19 nt, Human
ugguggggcccaucuuccc

SEQ ID NO: 89611 - RNA, 27 nt, Human
ugucaguccccuucuguuaccaagugg

SEQ ID NO: 89612 - RNA, 24 nt, Human
ugugaguguugcccacugucaguc

SEQ ID NO: 89613 - RNA, 19 nt, Human
uguuuuauugcaggugcgu

SEQ ID NO: 89614 - RNA, 20 nt, Human
uucugccuggggagggccuc

SEQ ID NO: 89615 - RNA, 24 nt, Human
uugcccgguuuaaaaaaaacaaaa

SEQ ID NO: 89616 - RNA, 26 nt, Human
aaaaaaaaaaaaaaaagggcggggag

SEQ ID NO: 89617 - RNA, 23 nt, Human
aaaaaaaaaaagggcggggaggg

SEQ ID NO: 89618 - RNA, 24 nt, Human
aaauccaccccaaauccgaaccag

SEQ ID NO: 89619 - RNA, 23 nt, Human
aaggggacagaggcaagaaaaga

SEQ ID NO: 89620 - RNA, 20 nt, Human
aauccaccccaaauccgaac

SEQ ID NO: 89621 - RNA, 21 nt, Human
accaguuuaaaaaaaaaaaaa

SEQ ID NO: 89622 - RNA, 21 nt, Human
acccagaaguggcccaguccu

SEQ ID NO: 89623 - RNA, 24 nt, Human
agaugagaaccaggggugagggcu

SEQ ID NO: 89624 - RNA, 24 nt, Human
agccaaucugggacccacugcccc

SEQ ID NO: 89625 - RNA, 19 nt, Human
aggaggggaacaaaaccaa

SEQ ID NO: 89626 - RNA, 19 nt, Human
aggcaagaaaagauguuga

SEQ ID NO: 89627 - RNA, 24 nt, Human
aguggaggaggggaacaaaaccag

SEQ ID NO: 89628 - RNA, 22 nt, Human
aucaagaaagaugagaaccagg

SEQ ID NO: 89629 - RNA, 27 nt, Human
caaaaccaaaauccaccccaaauccga

SEQ ID NO: 89630 - RNA, 21 nt, Human
caaaauccaccccaaauccga

SEQ ID NO: 89631 - RNA, 24 nt, Human
caccacugccccccagguuggagg

SEQ ID NO: 89632 - RNA, 19 nt, Human
caguccagcccuggaggca

SEQ ID NO: 89633 - RNA, 20 nt, Human
cagugcugggggguuggaga

SEQ ID NO: 89634 - RNA, 23 nt, Human
cagugcugggggguuggagacac

SEQ ID NO: 89635 - RNA, 21 nt, Human
cagugugagccaaucugggac

SEQ ID NO: 89636 - RNA, 24 nt, Human
ccaguuuaaaaaaaaaaaaaaaaa

SEQ ID NO: 89637 - RNA, 23 nt, Human
cccaaauccgaaccagccuggaa

SEQ ID NO: 89638 - RNA, 18 nt, Human
ccccuucugcugcccucc

SEQ ID NO: 89639 - RNA, 22 nt, Human
cccuccucugggcuccaggaag

SEQ ID NO: 89640 - RNA, 21 nt, Human
ccgaaccagccuggaaaaaaa

SEQ ID NO: 89641 - RNA, 18 nt, Human
ccuucugcugcccuccuc

SEQ ID NO: 89642 - RNA, 22 nt, Human
cggggagggggugggggagagu

SEQ ID NO: 89643 - RNA, 18 nt, Human
cuccacaccacugccccc

SEQ ID NO: 89644 - RNA, 24 nt, Human
cuccacaccacugccccccagguu

SEQ ID NO: 89645 - RNA, 19 nt, Human
cugcccuccucugggcucc

SEQ ID NO: 89646 - RNA, 19 nt, Human
cugcugcccuccucugggc

SEQ ID NO: 89647 - RNA, 21 nt, Human
gagaguggaggaggggaacaa

SEQ ID NO: 89648 - RNA, 22 nt, Human
gaugagagaaggggacagaggc

SEQ ID NO: 89649 - RNA, 23 nt, Human
gcaggggagaaagggagggguga

SEQ ID NO: 89650 - RNA, 19 nt, Human
gcccaguccugggggcagg

SEQ ID NO: 89651 - RNA, 22 nt, Human
gccuguggcuucuccacaccac

SEQ ID NO: 89652 - RNA, 23 nt, Human
gccuguggcuucuccacaccacu

SEQ ID NO: 89653 - RNA, 21 nt, Human
gcuccaggaaggagagcagau

SEQ ID NO: 89654 - RNA, 18 nt, Human
gcugaaggagaaucaaag

SEQ ID NO: 89655 - RNA, 20 nt, Human
ggacccacugccccacccag

SEQ ID NO: 89656 - RNA, 28 nt, Human
ggagacaccacccccuucugcugcccuc

SEQ ID NO: 89657 - RNA, 23 nt, Human
ggaggaggggaacaaaaccaaaa

SEQ ID NO: 89658 - RNA, 18 nt, Human
ggagggggugggggagag

SEQ ID NO: 89659 - RNA, 20 nt, Human
ggcaggggagaaagggaggg

SEQ ID NO: 89660 - RNA, 18 nt, Human
ggccgagggggcggcaac

SEQ ID NO: 89661 - RNA, 22 nt, Human
gggaacaaaaccaaaauccacc

SEQ ID NO: 89662 - RNA, 21 nt, Human
gggagggggugggggagagug

SEQ ID NO: 89663 - RNA, 21 nt, Human
gggcaggggagaaagggaggg

SEQ ID NO: 89664 - RNA, 20 nt, Human
ggggagggggugggggagag

SEQ ID NO: 89665 - RNA, 23 nt, Human
ggggagggggugggggagagugg

SEQ ID NO: 89666 - RNA, 22 nt, Human
gggggcaggggagaaagggagg

SEQ ID NO: 89667 - RNA, 22 nt, Human
gggggcaggggagaaagggagg

SEQ ID NO: 89668 - RNA, 19 nt, Human
ggggugagggcugaaggag

SEQ ID NO: 89669 - RNA, 21 nt, Human
gugaaaugagaagagccccgu

SEQ ID NO: 89670 - RNA, 20 nt, Human
ucagugugagccaaucuggg

SEQ ID NO: 89671 - RNA, 18 nt, Human
uccaggaaggagagcaga

SEQ ID NO: 89672 - RNA, 22 nt, Human
uccgaaccagccuggaaaaaaa

SEQ ID NO: 89673 - RNA, 20 nt, Human
ucuccacaccacugcccccc

SEQ ID NO: 89674 - RNA, 22 nt, Human
ucugcggcaggagcgcucaggc

SEQ ID NO: 89675 - RNA, 25 nt, Human
ucuuccucagugcugggggguugga

SEQ ID NO: 89676 - RNA, 22 nt, Human
ugagaaccaggggugagggcug

SEQ ID NO: 89677 - RNA, 19 nt, Human
ugagaagagccccguucuu

SEQ ID NO: 89678 - RNA, 18 nt, Human
ugagagaaggggacagag

SEQ ID NO: 89679 - RNA, 19 nt, Human
ugagggcugaaggagaauc

SEQ ID NO: 89680 - RNA, 23 nt, Human
ugagggcugaaggagaaucaaag

SEQ ID NO: 89681 - RNA, 22 nt, Human
uggaaaaaaaugaaaguucucg

SEQ ID NO: 89682 - RNA, 27 nt, Human
ugggggcaggggagaaagggaggggug

SEQ ID NO: 89683 - RNA, 21 nt, Human
uuccucagugcugggggguug

SEQ ID NO: 89684 - RNA, 27 nt, Human
uuuaaaacgacccuccggcagcggcuc

SEQ ID NO: 89685 - RNA, 21 nt, Human
aaaaaaaaaauuucaaaggga

SEQ ID NO: 89686 - RNA, 20 nt, Human
aaaaaggccugguaguaagu

SEQ ID NO: 89687 - RNA, 19 nt, Human
aaaagagaaagggaagaag

SEQ ID NO: 89688 - RNA, 22 nt, Human
aaacaaaaaaaaaauuucaaag

SEQ ID NO: 89689 - RNA, 21 nt, Human
aacauuuguauuuuuccuuua

SEQ ID NO: 89690 - RNA, 20 nt, Human
aagaacacugcaaccaaacu

SEQ ID NO: 89691 - RNA, 19 nt, Human
aagaagaaaaaaaucccca

SEQ ID NO: 89692 - RNA, 21 nt, Human
acaagauaagaacacugcaac

SEQ ID NO: 89693 - RNA, 23 nt, Human
agaaagggacccaaaaggacagu

SEQ ID NO: 89694 - RNA, 21 nt, Human
agagcccucucuguagguccu

SEQ ID NO: 89695 - RNA, 24 nt, Human
agaggaaccggaugggggcauuua

SEQ ID NO: 89696 - RNA, 24 nt, Human
aggaaauggggugugaugggucaa

SEQ ID NO: 89697 - RNA, 22 nt, Human
aggaggaaauggggugugaugg

SEQ ID NO: 89698 - RNA, 21 nt, Human
agucccucagagaggaggagg

SEQ ID NO: 89699 - RNA, 20 nt, Human
aucacccagcaccaccugaa

SEQ ID NO: 89700 - RNA, 27 nt, Human
auguuggacuuuuugacaggcaagacu

SEQ ID NO: 89701 - RNA, 22 nt, Human
caacagaugcacacccagaaaa

SEQ ID NO: 89702 - RNA, 18 nt, Human
caauuucaugugaaaccg

SEQ ID NO: 89703 - RNA, 19 nt, Human
caccuagugaggugugagg

SEQ ID NO: 89704 - RNA, 21 nt, Human
cacucuauaaaaaauaaccaa

SEQ ID NO: 89705 - RNA, 22 nt, Human
cagaagcuguaaaaauaaauua

SEQ ID NO: 89706 - RNA, 20 nt, Human
cagaugcacacccagaaaaa

SEQ ID NO: 89707 - RNA, 21 nt, Human
cagggggaaaaagaagaaaau

SEQ ID NO: 89708 - RNA, 18 nt, Human
ccaaccagagaaaaauac

SEQ ID NO: 89709 - RNA, 24 nt, Human
ccaauauccaaauucaagagagcu

SEQ ID NO: 89710 - RNA, 22 nt, Human
ccagaaaaaaaauguaugcccc

SEQ ID NO: 89711 - RNA, 23 nt, Human
ccagaagcuguaaaaauaaauua

SEQ ID NO: 89712 - RNA, 19 nt, Human
ccaugguccucaaaccaaa

SEQ ID NO: 89713 - RNA, 21 nt, Human
cccagaaaaaaaauguaugcc

SEQ ID NO: 89714 - RNA, 19 nt, Human
cccugguaaauucagcagc

SEQ ID NO: 89715 - RNA, 24 nt, Human
ccuauauuggggcuaaaccggggc

SEQ ID NO: 89716 - RNA, 24 nt, Human
ccucaaaccaaagagcccucucug

SEQ ID NO: 89717 - RNA, 23 nt, Human
ccucagaagcacggcuucccucc

SEQ ID NO: 89718 - RNA, 18 nt, Human
cuacaugugugaguggag

SEQ ID NO: 89719 - RNA, 24 nt, Human
cuauagcucugcaaagagaucaca

SEQ ID NO: 89720 - RNA, 18 nt, Human
cucagagaggaggaggaa

SEQ ID NO: 89721 - RNA, 19 nt, Human
cuguucgcauugcagaaua

SEQ ID NO: 89722 - RNA, 24 nt, Human
cuuuuuuuuuuuuuuggcagcggg

SEQ ID NO: 89723 - RNA, 21 nt, Human
gacacagaaaaaggccuggua

SEQ ID NO: 89724 - RNA, 21 nt, Human
gagaauucccauucagugacc

SEQ ID NO: 89725 - RNA, 18 nt, Human
gagagggaaagaggagga

SEQ ID NO: 89726 - RNA, 22 nt, Human
gagcuagcauucacagaacaca

SEQ ID NO: 89727 - RNA, 28 nt, Human
gagugaauuuuaauuguagugaaaccaa

SEQ ID NO: 89728 - RNA, 19 nt, Human
gaguugggaacaaagggug

SEQ ID NO: 89729 - RNA, 20 nt, Human
gaugcacacccagaaaaaaa

SEQ ID NO: 89730 - RNA, 22 nt, Human
gccaagcuuuccuagagcaaag

SEQ ID NO: 89731 - RNA, 19 nt, Human
gccugggcucucugcaccu

SEQ ID NO: 89732 - RNA, 20 nt, Human
gccugggcucucugcaccua

SEQ ID NO: 89733 - RNA, 18 nt, Human
gcuuuucaagugcaugau

SEQ ID NO: 89734 - RNA, 18 nt, Human
ggacccaaaaggacagug

SEQ ID NO: 89735 - RNA, 18 nt, Human
ggagagggaaagaggagg

SEQ ID NO: 89736 - RNA, 19 nt, Human
ggaucuuuccuugcccagg

SEQ ID NO: 89737 - RNA, 20 nt, Human
gggaaaaagaagaaaaucaa

SEQ ID NO: 89738 - RNA, 21 nt, Human
ggggaaaaagaagaaaaucaa

SEQ ID NO: 89739 - RNA, 24 nt, Human
guaaagagcuaauguuugucuaca

SEQ ID NO: 89740 - RNA, 19 nt, Human
guuucuuuagcucuuucca

SEQ ID NO: 89741 - RNA, 22 nt, Human
uaacuaauacugcuaauuuaac

SEQ ID NO: 89742 - RNA, 19 nt, Human
uaagaacacugcaaccaaa

SEQ ID NO: 89743 - RNA, 20 nt, Human
uagaucuuuccucguagccc

SEQ ID NO: 89744 - RNA, 20 nt, Human
uauccacuaucaagagcuua

SEQ ID NO: 89745 - RNA, 23 nt, Human
ucaaugacaugauuggaaaggag

SEQ ID NO: 89746 - RNA, 18 nt, Human
ucaccagccucaggcuug

SEQ ID NO: 89747 - RNA, 20 nt, Human
ucacuggucuucuuaauagu

SEQ ID NO: 89748 - RNA, 18 nt, Human
uccuagagcaaagggauc

SEQ ID NO: 89749 - RNA, 19 nt, Human
uccucaaaccaaagagccc

SEQ ID NO: 89750 - RNA, 19 nt, Human
uccuuuuuuuuuuuuuugg

SEQ ID NO: 89751 - RNA, 22 nt, Human
ucuacaaacacaaguguacuaa

SEQ ID NO: 89752 - RNA, 19 nt, Human
ucuccaguggacacagaaa

SEQ ID NO: 89753 - RNA, 27 nt, Human
ucuuuagcucuuuccacaucucucuuu

SEQ ID NO: 89754 - RNA, 20 nt, Human
ugaaaccagaagcuguaaaa

SEQ ID NO: 89755 - RNA, 18 nt, Human
ugaaacccuguugauuca

SEQ ID NO: 89756 - RNA, 22 nt, Human
ugaaacccuguugauucaugau

SEQ ID NO: 89757 - RNA, 23 nt, Human
ugaagugagaauuauuaaaauca

SEQ ID NO: 89758 - RNA, 24 nt, Human
ugagaaagaguaaagagcuaaugu

SEQ ID NO: 89759 - RNA, 19 nt, Human
ugagggcuaaaaacgugga

SEQ ID NO: 89760 - RNA, 24 nt, Human
ugcaaccaaacucauaacuaauac

SEQ ID NO: 89761 - RNA, 19 nt, Human
ugcauugugagguaugagg

SEQ ID NO: 89762 - RNA, 19 nt, Human
ugcuugcugcugucuuugc

SEQ ID NO: 89763 - RNA, 24 nt, Human
ugcuugcugcugucuuugcagauu

SEQ ID NO: 89764 - RNA, 26 nt, Human
uggaguugggaacaaagggugguuuc

SEQ ID NO: 89765 - RNA, 21 nt, Human
uggcagcggggagagggaaag

SEQ ID NO: 89766 - RNA, 24 nt, Human
uggcagcggggagagggaaagagg

SEQ ID NO: 89767 - RNA, 19 nt, Human
uggcagguucaguugcugg

SEQ ID NO: 89768 - RNA, 23 nt, Human
uggggugugaugggucaaaggca

SEQ ID NO: 89769 - RNA, 23 nt, Human
uguggaagaccaaaggauauacc

SEQ ID NO: 89770 - RNA, 22 nt, Human
uuaaacaaacaaacaaaaaaaa

SEQ ID NO: 89771 - RNA, 20 nt, Human
uucaaaaggcaaauaauuaa

SEQ ID NO: 89772 - RNA, 21 nt, Human
uucaacagaugcacacccaga

SEQ ID NO: 89773 - RNA, 24 nt, Human
uucaagagagcuagcauucacaga

SEQ ID NO: 89774 - RNA, 25 nt, Human
uucccaccacagcugugcuugacaa

SEQ ID NO: 89775 - RNA, 23 nt, Human
uuccucagaagcacggcuucccu

SEQ ID NO: 89776 - RNA, 19 nt, Human
uuuaccauaccagggagcc

SEQ ID NO: 89777 - RNA, 22 nt, Human
agaauuaccaacugguauauau

SEQ ID NO: 89778 - RNA, 26 nt, Human
agcaaaaacaauuugcuacuauucac

SEQ ID NO: 89779 - RNA, 20 nt, Human
aguaguucaaaggaauuacu

SEQ ID NO: 89780 - RNA, 26 nt, Human
caaagcaaaaacaauuugcuacuauu

SEQ ID NO: 89781 - RNA, 20 nt, Human
caccucaaaaacagaaucac

SEQ ID NO: 89782 - RNA, 22 nt, Human
ccgccgccgccgccgccgccgc

SEQ ID NO: 89783 - RNA, 22 nt, Human
ccgccgccgccgccgccgccgc

SEQ ID NO: 89784 - RNA, 23 nt, Human
ccgccgccgccgccgccgccgcu

SEQ ID NO: 89785 - RNA, 26 nt, Human
ccgccgccgccgccgccgccgcugcc

SEQ ID NO: 89786 - RNA, 26 nt, Human
ccgccgccgccgccgccgcugcccga

SEQ ID NO: 89787 - RNA, 19 nt, Human
ccggccgccagccgccgcc

SEQ ID NO: 89788 - RNA, 22 nt, Human
ccggccgccagccgccgccugc

SEQ ID NO: 89789 - RNA, 19 nt, Human
cgccgccgccgccgcugcc

SEQ ID NO: 89790 - RNA, 20 nt, Human
cuccggaagccgccgccgcc

SEQ ID NO: 89791 - RNA, 23 nt, Human
gccgccgccgccgccgccgccgg

SEQ ID NO: 89792 - RNA, 18 nt, Human
ggacaaaguacauaaaau

SEQ ID NO: 89793 - RNA, 18 nt, Human
uaaaaguuaugggaacau

SEQ ID NO: 89794 - RNA, 21 nt, Human
uacaugccauagaagacacua

SEQ ID NO: 89795 - RNA, 24 nt, Human
uacaugccauagaagacacuauua

SEQ ID NO: 89796 - RNA, 22 nt, Human
uagaagacacuauuauuuucau

SEQ ID NO: 89797 - RNA, 23 nt, Human
uagaauuaccaacugguauauau

SEQ ID NO: 89798 - RNA, 25 nt, Human
uagauuuucaaagcaaaaacaauuu

SEQ ID NO: 89799 - RNA, 24 nt, Human
uagcuaagcaguaguucaaaggaa

SEQ ID NO: 89800 - RNA, 22 nt, Human
ucuccuuguaaacaguuugaac

SEQ ID NO: 89801 - RNA, 20 nt, Human
ugaaggacaaaguacauaaa

SEQ ID NO: 89802 - RNA, 22 nt, Human
ugccuugugaagaaauccaaag

SEQ ID NO: 89803 - RNA, 21 nt, Human
uucaaagcaaaaacaauuugc

SEQ ID NO: 89804 - RNA, 20 nt, Human
uugcugaaaauguaugcuuu

SEQ ID NO: 89805 - RNA, 25 nt, Human
uuuuuuuuuuuuuuuuuuuuagggg

SEQ ID NO: 89806 - RNA, 19 nt, Human
aaaaaucuguaaggaaaug

SEQ ID NO: 89807 - RNA, 18 nt, Human
aaaauuagcugggcgugg

SEQ ID NO: 89808 - RNA, 25 nt, Human
aaccaggaagguggagguugcggug

SEQ ID NO: 89809 - RNA, 24 nt, Human
aaguagcuuuacaaccccuaaagu

SEQ ID NO: 89810 - RNA, 19 nt, Human
acaagaaaaguuacaaugu

SEQ ID NO: 89811 - RNA, 20 nt, Human
acaagagcgaaacucugucu

SEQ ID NO: 89812 - RNA, 21 nt, Human
acaagagcgaaacucugucuc

SEQ ID NO: 89813 - RNA, 23 nt, Human
accaacauggagaaacccugucu

SEQ ID NO: 89814 - RNA, 24 nt, Human
acuuugggaggccgaggugggcag

SEQ ID NO: 89815 - RNA, 20 nt, Human
agaagcagucucuagggcug

SEQ ID NO: 89816 - RNA, 18 nt, Human
agagcgaaacucugucuc

SEQ ID NO: 89817 - RNA, 22 nt, Human
agagcgaaacucugucucaaaa

SEQ ID NO: 89818 - RNA, 24 nt, Human
agcacuuugggaggccgagguggg

SEQ ID NO: 89819 - RNA, 23 nt, Human
agcugggcgugguggugcaugcc

SEQ ID NO: 89820 - RNA, 21 nt, Human
aggaagguggagguugcggug

SEQ ID NO: 89821 - RNA, 24 nt, Human
aggaagguggagguugcggugagc

SEQ ID NO: 89822 - RNA, 22 nt, Human
aggcaggagaaucccuugaacc

SEQ ID NO: 89823 - RNA, 24 nt, Human
aggcaggagaaucccuugaaccag

SEQ ID NO: 89824 - RNA, 21 nt, Human
aggccgaggugggcagaucac

SEQ ID NO: 89825 - RNA, 24 nt, Human
aggcugaggcaggagaaucccuug

SEQ ID NO: 89826 - RNA, 24 nt, Human
aggugcaguggcucacgccuguaa

SEQ ID NO: 89827 - RNA, 21 nt, Human
agguggagguugcggugagcc

SEQ ID NO: 89828 - RNA, 24 nt, Human
agguggagguugcggugagccgag

SEQ ID NO: 89829 - RNA, 22 nt, Human
aggugggcagaucaccugaggg

SEQ ID NO: 89830 - RNA, 22 nt, Human
aggugggcagaucaccugaggu

SEQ ID NO: 89831 - RNA, 24 nt, Human
aguggcucacgccuguaaucccag

SEQ ID NO: 89832 - RNA, 21 nt, Human
auaaaguagcuuuacaacccc

SEQ ID NO: 89833 - RNA, 24 nt, Human
auugcacucuagccugggcaacaa

SEQ ID NO: 89834 - RNA, 25 nt, Human
auugcacucuagccugggcaacaag

SEQ ID NO: 89835 - RNA, 21 nt, Human
auuuuucagaugacuucauuu

SEQ ID NO: 89836 - RNA, 24 nt, Human
caaauguaaaaaguuccaauucug

SEQ ID NO: 89837 - RNA, 23 nt, Human
caacaagagcgaaacucugucuc

SEQ ID NO: 89838 - RNA, 21 nt, Human
caacauggagaaacccugucu

SEQ ID NO: 89839 - RNA, 19 nt, Human
caaccccuaaaguaaaaga

SEQ ID NO: 89840 - RNA, 20 nt, Human
caagaaaaguuacaaugugc

SEQ ID NO: 89841 - RNA, 23 nt, Human
cacaaggauuaaccaaauuagac

SEQ ID NO: 89842 - RNA, 24 nt, Human
cacgccuguaaucccagcacuuug

SEQ ID NO: 89843 - RNA, 27 nt, Human
cagaucaccugaggucagaaguucgag

SEQ ID NO: 89844 - RNA, 24 nt, Human
cagcacuuugggaggccgaggugg

SEQ ID NO: 89845 - RNA, 24 nt, Human
cagccugaccaacauggagaaacc

SEQ ID NO: 89846 - RNA, 24 nt, Human
cagcuacuugggaggcugaggcag

SEQ ID NO: 89847 - RNA, 24 nt, Human
caugccuguaaucccagcuacuug

SEQ ID NO: 89848 - RNA, 27 nt, Human
cauucuauaucuaauaaaguagcuuua

SEQ ID NO: 89849 - RNA, 18 nt, Human
cauugcacucuagccugg

SEQ ID NO: 89850 - RNA, 19 nt, Human
cauugcacucuagccuggg

SEQ ID NO: 89851 - RNA, 21 nt, Human
cauugcacucuagccugggca

SEQ ID NO: 89852 - RNA, 24 nt, Human
cauugcacucuagccugggcaaca

SEQ ID NO: 89853 - RNA, 21 nt, Human
ccaaaagaagaauuacaaauc

SEQ ID NO: 89854 - RNA, 19 nt, Human
ccaggaagguggagguugc

SEQ ID NO: 89855 - RNA, 20 nt, Human
ccauugcacucuagccuggg

SEQ ID NO: 89856 - RNA, 21 nt, Human
ccauugcacucuagccugggc

SEQ ID NO: 89857 - RNA, 22 nt, Human
ccauugcacucuagccugggca

SEQ ID NO: 89858 - RNA, 23 nt, Human
ccauugcacucuagccugggcaa

SEQ ID NO: 89859 - RNA, 24 nt, Human
ccauugcacucuagccugggcaac

SEQ ID NO: 89860 - RNA, 18 nt, Human
cccguccacagucuggga

SEQ ID NO: 89861 - RNA, 21 nt, Human
cccuugaaccaggaaggugga

SEQ ID NO: 89862 - RNA, 22 nt, Human
ccugaccaacauggagaaaccc

SEQ ID NO: 89863 - RNA, 24 nt, Human
ccugaccaacauggagaaacccug

SEQ ID NO: 89864 - RNA, 22 nt, Human
ccugaggucagaaguucgagac

SEQ ID NO: 89865 - RNA, 21 nt, Human
ccuguaaucccagcuacuugg

SEQ ID NO: 89866 - RNA, 22 nt, Human
ccuguaaucccagcuacuuggg

SEQ ID NO: 89867 - RNA, 20 nt, Human
cgaggugggcagaucaccug

SEQ ID NO: 89868 - RNA, 24 nt, Human
cgaggugggcagaucaccugaggu

SEQ ID NO: 89869 - RNA, 23 nt, Human
cgccuguaaucccagcacuuugg

SEQ ID NO: 89870 - RNA, 24 nt, Human
cgccuguaaucccagcacuuuggg

SEQ ID NO: 89871 - RNA, 22 nt, Human
cucacgccuguaaucccagcac

SEQ ID NO: 89872 - RNA, 24 nt, Human
cucacgccuguaaucccagcacuu

SEQ ID NO: 89873 - RNA, 20 nt, Human
cugagaccacauuuaucugu

SEQ ID NO: 89874 - RNA, 23 nt, Human
gaagacaacccaacaaaauaugg

SEQ ID NO: 89875 - RNA, 21 nt, Human
gagaaacccugucuuuacuaa

SEQ ID NO: 89876 - RNA, 23 nt, Human
gagaccagccugaccaacaugga

SEQ ID NO: 89877 - RNA, 19 nt, Human
gagggcgaugacuagaggc

SEQ ID NO: 89878 - RNA, 25 nt, Human
gaggugggcagaucaccugagguca

SEQ ID NO: 89879 - RNA, 21 nt, Human
gagguugcggugagccgagau

SEQ ID NO: 89880 - RNA, 24 nt, Human
gaucaccugaggucagaaguucga

SEQ ID NO: 89881 - RNA, 19 nt, Human
gcagucucuagggcuggcu

SEQ ID NO: 89882 - RNA, 24 nt, Human
gccauugcacucuagccugggcaa

SEQ ID NO: 89883 - RNA, 20 nt, Human
gccuguaaucccagcuacuu

SEQ ID NO: 89884 - RNA, 20 nt, Human
ggaagguggagguugcggug

SEQ ID NO: 89885 - RNA, 19 nt, Human
ggagggguggcaguggcgg

SEQ ID NO: 89886 - RNA, 18 nt, Human
ggagguugcggugagccg

SEQ ID NO: 89887 - RNA, 20 nt, Human
ggagguugcggugagccgag

SEQ ID NO: 89888 - RNA, 22 nt, Human
ggagguugcggugagccgagau

SEQ ID NO: 89889 - RNA, 24 nt, Human
ggagguugcggugagccgagaugg

SEQ ID NO: 89890 - RNA, 23 nt, Human
ggcgugguggugcaugccuguaa

SEQ ID NO: 89891 - RNA, 20 nt, Human
gggaaaaaggacauuuaugc

SEQ ID NO: 89892 - RNA, 21 nt, Human
gguggcaguggcggugauguu

SEQ ID NO: 89893 - RNA, 24 nt, Human
gguggugcaugccuguaaucccag

SEQ ID NO: 89894 - RNA, 23 nt, Human
guauguguuuuuaaugucacaag

SEQ ID NO: 89895 - RNA, 24 nt, Human
guugcggugagccgagauggcgcc

SEQ ID NO: 89896 - RNA, 18 nt, Human
uaaaagcacuagcucagc

SEQ ID NO: 89897 - RNA, 23 nt, Human
uaaaagcacuagcucagcuccca

SEQ ID NO: 89898 - RNA, 21 nt, Human
uaaaguagcuuuacaaccccu

SEQ ID NO: 89899 - RNA, 24 nt, Human
uaagaagacaacccaacaaaauau

SEQ ID NO: 89900 - RNA, 24 nt, Human
uaaggccaggugcaguggcucacg

SEQ ID NO: 89901 - RNA, 22 nt, Human
uacaaccccuaaaguaaaagaa

SEQ ID NO: 89902 - RNA, 18 nt, Human
uacagaauaggaauucug

SEQ ID NO: 89903 - RNA, 23 nt, Human
uaccuuccaauuucacauguaug

SEQ ID NO: 89904 - RNA, 24 nt, Human
uaucaguaauaauacaaacucagc

SEQ ID NO: 89905 - RNA, 23 nt, Human
uaucuaauaaaguagcuuuacaa

SEQ ID NO: 89906 - RNA, 23 nt, Human
uaucuguucuccuaaaagcacua

SEQ ID NO: 89907 - RNA, 19 nt, Human
uauggcaguuacugaguua

SEQ ID NO: 89908 - RNA, 18 nt, Human
ucaggacagaaugacaca

SEQ ID NO: 89909 - RNA, 21 nt, Human
ucucuagggcuggcugagacc

SEQ ID NO: 89910 - RNA, 25 nt, Human
ugaaacucaaauguaaaaaguucca

SEQ ID NO: 89911 - RNA, 24 nt, Human
ugaccaacauggagaaacccuguc

SEQ ID NO: 89912 - RNA, 22 nt, Human
ugagccgagauggcgccauugc

SEQ ID NO: 89913 - RNA, 19 nt, Human
ugaggcaggagaaucccuu

SEQ ID NO: 89914 - RNA, 24 nt, Human
ugaggcaggagaaucccuugaacc

SEQ ID NO: 89915 - RNA, 25 nt, Human
ugaggcaggagaaucccuugaacca

SEQ ID NO: 89916 - RNA, 19 nt, Human
ugcacucuagccugggcaa

SEQ ID NO: 89917 - RNA, 23 nt, Human
ugccuguaaucccagcuacuugg

SEQ ID NO: 89918 - RNA, 24 nt, Human
ugccuguaaucccagcuacuuggg

SEQ ID NO: 89919 - RNA, 24 nt, Human
uggcucacgccuguaaucccagca

SEQ ID NO: 89920 - RNA, 20 nt, Human
ugggaggccgaggugggcag

SEQ ID NO: 89921 - RNA, 24 nt, Human
ugggaggccgaggugggcagauca

SEQ ID NO: 89922 - RNA, 18 nt, Human
ugggaggcugaggcagga

SEQ ID NO: 89923 - RNA, 19 nt, Human
ugggaggcugaggcaggag

SEQ ID NO: 89924 - RNA, 18 nt, Human
ugggagggguggcagugg

SEQ ID NO: 89925 - RNA, 24 nt, Human
ugggcagaucaccugaggucagaa

SEQ ID NO: 89926 - RNA, 21 nt, Human
uggugcaugccuguaauccca

SEQ ID NO: 89927 - RNA, 22 nt, Human
uggugcaugccuguaaucccag

SEQ ID NO: 89928 - RNA, 24 nt, Human
ugguggugcaugccuguaauccca

SEQ ID NO: 89929 - RNA, 18 nt, Human
uuagagacacugcaauau

SEQ ID NO: 89930 - RNA, 22 nt, Human
uuagcugggcgugguggugcau

SEQ ID NO: 89931 - RNA, 24 nt, Human
uuagcugggcgugguggugcaugc

SEQ ID NO: 89932 - RNA, 23 nt, Human
uuauuuuucagaugacuucauuu

SEQ ID NO: 89933 - RNA, 25 nt, Human
uucauuuuauuuuucagaugacuuc

SEQ ID NO: 89934 - RNA, 24 nt, Human
uugaaccaggaagguggagguugc

SEQ ID NO: 89935 - RNA, 18 nt, Human
uugcggugagccgagaug

SEQ ID NO: 89936 - RNA, 22 nt, Human
uugcggugagccgagauggcgc

SEQ ID NO: 89937 - RNA, 25 nt, Human
uugggaggccgaggugggcagauca

SEQ ID NO: 89938 - RNA, 24 nt, Human
uuguaagcuucuccuucucaguuc

SEQ ID NO: 89939 - RNA, 22 nt, Human
uuuauaauaacucaucuagacc

SEQ ID NO: 89940 - RNA, 22 nt, Human
uuugccuccuuuagagacacug

SEQ ID NO: 89941 - RNA, 18 nt, Human
ccagaagccugagccagg

SEQ ID NO: 89942 - RNA, 24 nt, Human
cgguuuuuuuuuuuuuuuuuuuuu

SEQ ID NO: 89943 - RNA, 26 nt, Human
guuuuuuuuuuuuuuuuuuuuugggg

SEQ ID NO: 89944 - RNA, 25 nt, Human
uuuuuuuuuuuugaaauugcucuca

SEQ ID NO: 89945 - RNA, 21 nt, Human
aaaaaaauuugaacaggacug

SEQ ID NO: 89946 - RNA, 20 nt, Human
aaaaaauagauacagccuuc

SEQ ID NO: 89947 - RNA, 24 nt, Human
aaaaagaaaaaaaaauagauacag

SEQ ID NO: 89948 - RNA, 24 nt, Human
aaaacaagauucuaaccacaaaug

SEQ ID NO: 89949 - RNA, 22 nt, Human
aaaagaaagaagaaacauacac

SEQ ID NO: 89950 - RNA, 20 nt, Human
aaaauacaucccauccucag

SEQ ID NO: 89951 - RNA, 22 nt, Human
aaagaaauggauaaaaaucaaa

SEQ ID NO: 89952 - RNA, 19 nt, Human
aaagacuggcaaaguucua

SEQ ID NO: 89953 - RNA, 24 nt, Human
aaauuaagccaagaucuuaaagac

SEQ ID NO: 89954 - RNA, 20 nt, Human
aacccuggaaaggcaaugaa

SEQ ID NO: 89955 - RNA, 20 nt, Human
aagagcugaaagcugcugcu

SEQ ID NO: 89956 - RNA, 23 nt, Human
aagccucuaaagaacaacugaag

SEQ ID NO: 89957 - RNA, 25 nt, Human
aauaauggaagcaaacaaaacaaga

SEQ ID NO: 89958 - RNA, 22 nt, Human
acacagacuaguguucaacugg

SEQ ID NO: 89959 - RNA, 18 nt, Human
acuaccuaaaaagcuguc

SEQ ID NO: 89960 - RNA, 22 nt, Human
acuccucccacaaauacuucua

SEQ ID NO: 89961 - RNA, 24 nt, Human
acugcaacucaucucccuaacauu

SEQ ID NO: 89962 - RNA, 18 nt, Human
acugcagucaauucugua

SEQ ID NO: 89963 - RNA, 21 nt, Human
agaaaaauacaucccauccuc

SEQ ID NO: 89964 - RNA, 19 nt, Human
agaaaccugcagacauauu

SEQ ID NO: 89965 - RNA, 20 nt, Human
agaacaacagaugaaaagga

SEQ ID NO: 89966 - RNA, 18 nt, Human
agaaggccacagccugac

SEQ ID NO: 89967 - RNA, 18 nt, Human
agaucuuaaagacuggca

SEQ ID NO: 89968 - RNA, 23 nt, Human
agauguuuaaaguuacacagacu

SEQ ID NO: 89969 - RNA, 21 nt, Human
agcacugaacagcaagaaaaa

SEQ ID NO: 89970 - RNA, 25 nt, Human
agccucuaaagaacaacugaagcca

SEQ ID NO: 89971 - RNA, 21 nt, Human
agcuacaaaaaaaaucagaua

SEQ ID NO: 89972 - RNA, 20 nt, Human
aggagggagaagaaaucaca

SEQ ID NO: 89973 - RNA, 21 nt, Human
caaaauaacugaaaaaagaac

SEQ ID NO: 89974 - RNA, 23 nt, Human
caaaauaacugaaaaaagaacca

SEQ ID NO: 89975 - RNA, 28 nt, Human
caaauauauuuccuucccaauaucuucc

SEQ ID NO: 89976 - RNA, 20 nt, Human
cacacaguggaagaagugau

SEQ ID NO: 89977 - RNA, 20 nt, Human
cacagacuaguguucaacug

SEQ ID NO: 89978 - RNA, 26 nt, Human
cacaugaagccaccuccuccacuacc

SEQ ID NO: 89979 - RNA, 18 nt, Human
cacccaucugcaucccgc

SEQ ID NO: 89980 - RNA, 21 nt, Human
cacgugccaugcccugcuagc

SEQ ID NO: 89981 - RNA, 22 nt, Human
cacugaacagcaagaaaaauac

SEQ ID NO: 89982 - RNA, 23 nt, Human
cagaacacacacacuuucugguc

SEQ ID NO: 89983 - RNA, 19 nt, Human
cagcaagaaaaauacaucc

SEQ ID NO: 89984 - RNA, 19 nt, Human
caggggaggagggagaaga

SEQ ID NO: 89985 - RNA, 19 nt, Human
ccaccuccuccacuaccua

SEQ ID NO: 89986 - RNA, 20 nt, Human
ccacucuugcaggggaggag

SEQ ID NO: 89987 - RNA, 21 nt, Human
cccaaguggaauauaaaugcc

SEQ ID NO: 89988 - RNA, 21 nt, Human
cccacacauuugcuucaagga

SEQ ID NO: 89989 - RNA, 23 nt, Human
cccgcacaccuugccccgcgccg

SEQ ID NO: 89990 - RNA, 25 nt, Human
cccgcacaccuugccccgcgccgca

SEQ ID NO: 89991 - RNA, 19 nt, Human
cccgcgccgcaguaaagag

SEQ ID NO: 89992 - RNA, 21 nt, Human
cccgugccccuucccgcccgc

SEQ ID NO: 89993 - RNA, 25 nt, Human
ccggagcucacgugccaugcccugc

SEQ ID NO: 89994 - RNA, 18 nt, Human
ccgugccccuucccgccc

SEQ ID NO: 89995 - RNA, 21 nt, Human
ccucccacaaauacuucuagu

SEQ ID NO: 89996 - RNA, 21 nt, Human
ccucccggggaccgcgggggu

SEQ ID NO: 89997 - RNA, 22 nt, Human
ccucuaaagaacaacugaagcu

SEQ ID NO: 89998 - RNA, 23 nt, Human
ccugcagacauauuuucaggucu

SEQ ID NO: 89999 - RNA, 28 nt, Human
ccuucaaaauaacugaaaaaagaaccaa

SEQ ID NO: 90000 - RNA, 19 nt, Human
cgugccaugcccugcuagc

SEQ ID NO: 90001 - RNA, 21 nt, Human
cuaaagaacaacugaagcuaa

SEQ ID NO: 90002 - RNA, 20 nt, Human
cuaaauaacccuggaaaggc

SEQ ID NO: 90003 - RNA, 21 nt, Human
cuagccucccggggaccgcgg

SEQ ID NO: 90004 - RNA, 24 nt, Human
cucagcuagaagaaagugaggcau

SEQ ID NO: 90005 - RNA, 23 nt, Human
cugaagcuaaaauaauaucuaac

SEQ ID NO: 90006 - RNA, 23 nt, Human
cugcuagauguuuaaaguuacac

SEQ ID NO: 90007 - RNA, 19 nt, Human
cuggagccugcugauggug

SEQ ID NO: 90008 - RNA, 22 nt, Human
cugucugggaacugagcuacag

SEQ ID NO: 90009 - RNA, 19 nt, Human
cuucaaaauaacugaaaaa

SEQ ID NO: 90010 - RNA, 18 nt, Human
gaaaaaacaaaccuaaga

SEQ ID NO: 90011 - RNA, 19 nt, Human
gaacucaauaauggaagca

SEQ ID NO: 90012 - RNA, 21 nt, Human
gaagaaaaugcauagcagagg

SEQ ID NO: 90013 - RNA, 22 nt, Human
gaagacaucuauuccggagcuc

SEQ ID NO: 90014 - RNA, 20 nt, Human
gaaggaggcagauuucugga

SEQ ID NO: 90015 - RNA, 23 nt, Human
gaucacuuuuuuaaaaauucuac

SEQ ID NO: 90016 - RNA, 19 nt, Human
gcgggggugcccgugcccc

SEQ ID NO: 90017 - RNA, 23 nt, Human
gggcauuugacaacaauggaaca

SEQ ID NO: 90018 - RNA, 24 nt, Human
ggugaaggaggcagauuucuggaa

SEQ ID NO: 90019 - RNA, 22 nt, Human
uaaaaagcugucugggaacuga

SEQ ID NO: 90020 - RNA, 26 nt, Human
uaaaagaaauggauaaaaaucaacug

SEQ ID NO: 90021 - RNA, 22 nt, Human
uaacaagccaccugcuccagaa

SEQ ID NO: 90022 - RNA, 23 nt, Human
uaagaucacuuuuuuaaaaauuc

SEQ ID NO: 90023 - RNA, 23 nt, Human
uaagccaagaucuuaaagacugg

SEQ ID NO: 90024 - RNA, 23 nt, Human
uaauacaacuuaaacgcaacuuu

SEQ ID NO: 90025 - RNA, 22 nt, Human
uaauggaagcaaacaaaacaag

SEQ ID NO: 90026 - RNA, 19 nt, Human
uacacuauagugguguggg

SEQ ID NO: 90027 - RNA, 18 nt, Human
uagcagaggagaaagcug

SEQ ID NO: 90028 - RNA, 20 nt, Human
uagcagaggagaaagcuggg

SEQ ID NO: 90029 - RNA, 18 nt, Human
uagccucccggggaccgc

SEQ ID NO: 90030 - RNA, 20 nt, Human
uaugacacaacuguuacaug

SEQ ID NO: 90031 - RNA, 20 nt, Human
ucaaaguauuuuucuguacu

SEQ ID NO: 90032 - RNA, 21 nt, Human
uccacuaccuaaaaagcuguc

SEQ ID NO: 90033 - RNA, 25 nt, Human
ucccacacauuugcuucaaggagaa

SEQ ID NO: 90034 - RNA, 22 nt, Human
uccggagcucacgugccaugcc

SEQ ID NO: 90035 - RNA, 18 nt, Human
uccuaggaccacucuugc

SEQ ID NO: 90036 - RNA, 21 nt, Human
ucuaaccacaaaugacugcac

SEQ ID NO: 90037 - RNA, 22 nt, Human
ugaaaaaacaaaccuaagauca

SEQ ID NO: 90038 - RNA, 22 nt, Human
ugaaaaaagaaccaagaaaagg

SEQ ID NO: 90039 - RNA, 24 nt, Human
ugaaagccucuaaagaacaacuga

SEQ ID NO: 90040 - RNA, 22 nt, Human
ugaaggaggcagauuucuggaa

SEQ ID NO: 90041 - RNA, 19 nt, Human
ugaccacagaacaacagau

SEQ ID NO: 90042 - RNA, 22 nt, Human
ugagggacagaggugugaaugu

SEQ ID NO: 90043 - RNA, 19 nt, Human
ugcaggggaggagggagaa

SEQ ID NO: 90044 - RNA, 24 nt, Human
ugcuucaugucacuccucccacaa

SEQ ID NO: 90045 - RNA, 20 nt, Human
uggaaaugcaaugaucccac

SEQ ID NO: 90046 - RNA, 18 nt, Human
uggaauauaaaugcccaa

SEQ ID NO: 90047 - RNA, 19 nt, Human
uggaggaacacaucugaug

SEQ ID NO: 90048 - RNA, 21 nt, Human
ugggaaagucugcuauguagc

SEQ ID NO: 90049 - RNA, 19 nt, Human
ugggucugcuuaaaagaaa

SEQ ID NO: 90050 - RNA, 18 nt, Human
ugucacuccucccacaaa

SEQ ID NO: 90051 - RNA, 22 nt, Human
ugucagacauuuaaucaggaug

SEQ ID NO: 90052 - RNA, 23 nt, Human
ugugaauuagacuucucaagucu

SEQ ID NO: 90053 - RNA, 24 nt, Human
uuacacagacuaguguucaacugg

SEQ ID NO: 90054 - RNA, 23 nt, Human
uuaggaggaacucaauaauggaa

SEQ ID NO: 90055 - RNA, 21 nt, Human
uuauaaaaacugcaacucauc

SEQ ID NO: 90056 - RNA, 24 nt, Human
uuaucaauuuugagggacagaggu

SEQ ID NO: 90057 - RNA, 24 nt, Human
uucaaaauaacugaaaaaagaacc

SEQ ID NO: 90058 - RNA, 23 nt, Human
uucagucccucuccucaauuucc

SEQ ID NO: 90059 - RNA, 24 nt, Human
uuuaagcucuaaugauuuaaagcu

SEQ ID NO: 90060 - RNA, 19 nt, Human
uuuaagugaacaaacuuua

SEQ ID NO: 90061 - RNA, 22 nt, Human
uuucuggucuaacaaacaucuu

SEQ ID NO: 90062 - RNA, 20 nt, Human
uuugaaagccucuaaagaac

SEQ ID NO: 90063 - RNA, 19 nt, Human
uuugacaacaauggaacag

SEQ ID NO: 90064 - RNA, 24 nt, Human
acaccauccuaguugccuccccaa

SEQ ID NO: 90065 - RNA, 21 nt, Human
cauccuaguugccuccccaaa

SEQ ID NO: 90066 - RNA, 24 nt, Human
ccacaccauccuaguugccucccc

SEQ ID NO: 90067 - RNA, 25 nt, Human
cggccacaccauccuaguugccucc

SEQ ID NO: 90068 - RNA, 23 nt, Human
ugcaaauccguggucggccacac

SEQ ID NO: 90069 - RNA, 18 nt, Human
ugcccuggggucccgucc

SEQ ID NO: 90070 - RNA, 26 nt, Human
aagcaggcaggugguggggggcaggg

SEQ ID NO: 90071 - RNA, 19 nt, Human
agaagcaagcaggcaggug

SEQ ID NO: 90072 - RNA, 24 nt, Human
agagaagcaagcaggcagguggug

SEQ ID NO: 90073 - RNA, 19 nt, Human
aggcagccagagaagcaag

SEQ ID NO: 90074 - RNA, 20 nt, Human
aggcaggugguggggggcag

SEQ ID NO: 90075 - RNA, 21 nt, Human
aggcaggugguggggggcagg

SEQ ID NO: 90076 - RNA, 22 nt, Human
aggcaggugguggggggcaggg

SEQ ID NO: 90077 - RNA, 22 nt, Human
aggugguggggggcaggggagc

SEQ ID NO: 90078 - RNA, 23 nt, Human
gcugucuucagaucucugcuucg

SEQ ID NO: 90079 - RNA, 18 nt, Human
gggcaggggagcaugggg

SEQ ID NO: 90080 - RNA, 19 nt, Human
gugguggggggcaggggag

SEQ ID NO: 90081 - RNA, 22 nt, Human
ucguagguucgucuuccuucca

SEQ ID NO: 90082 - RNA, 20 nt, Human
aacacgggaccuccccaccc

SEQ ID NO: 90083 - RNA, 22 nt, Human
aaccaggaagagcgcuccuccc

SEQ ID NO: 90084 - RNA, 21 nt, Human
aaucacuaauauaaaaaagga

SEQ ID NO: 90085 - RNA, 20 nt, Human
acacgggaccuccccacccc

SEQ ID NO: 90086 - RNA, 19 nt, Human
acugugucgagcuaguggg

SEQ ID NO: 90087 - RNA, 22 nt, Human
acuugcagcugggguggccugg

SEQ ID NO: 90088 - RNA, 20 nt, Human
aggagcgaaggagggaaggc

SEQ ID NO: 90089 - RNA, 18 nt, Human
aggaggcgaggcuuggca

SEQ ID NO: 90090 - RNA, 19 nt, Human
aggcacaggcguucccagc

SEQ ID NO: 90091 - RNA, 21 nt, Human
aggccgguggugcugaguggg

SEQ ID NO: 90092 - RNA, 18 nt, Human
agggguguuugggggucg

SEQ ID NO: 90093 - RNA, 26 nt, Human
aguggggagaggggacacaucaggau

SEQ ID NO: 90094 - RNA, 20 nt, Human
aguggguggccucugaagug

SEQ ID NO: 90095 - RNA, 19 nt, Human
cacccccauaaccaguaca

SEQ ID NO: 90096 - RNA, 26 nt, Human
cacuaauauaaaaaaggagcgaagga

SEQ ID NO: 90097 - RNA, 33 nt, Human
cagacagauguggggccuuuuauuauuuggggg

SEQ ID NO: 90098 - RNA, 18 nt, Human
cagcucagggcagggccc

SEQ ID NO: 90099 - RNA, 23 nt, Human
cagcuccuggucggcagcagggc

SEQ ID NO: 90100 - RNA, 19 nt, Human
ccacacaguucugcccgga

SEQ ID NO: 90101 - RNA, 18 nt, Human
ccaggccgguggugcuga

SEQ ID NO: 90102 - RNA, 31 nt, Human
ccaggccgguggugcugaguggguggccucc

SEQ ID NO: 90103 - RNA, 24 nt, Human
cccauggcuggcacaggcaggggc

SEQ ID NO: 90104 - RNA, 23 nt, Human
ccccaccccaagccuagugccuc

SEQ ID NO: 90105 - RNA, 18 nt, Human
ccccauaaccaguacaca

SEQ ID NO: 90106 - RNA, 22 nt, Human
ccccuccgcccuccgcccuccc

SEQ ID NO: 90107 - RNA, 25 nt, Human
cccgccgccccuccgcccuccgccc

SEQ ID NO: 90108 - RNA, 20 nt, Human
ccggagcagaugaacgaugg

SEQ ID NO: 90109 - RNA, 20 nt, Human
ccuccccaccccaagccuag

SEQ ID NO: 90110 - RNA, 18 nt, Human
ccuccccgcccuccuccc

SEQ ID NO: 90111 - RNA, 18 nt, Human
ccuccccgcccuccuccc

SEQ ID NO: 90112 - RNA, 20 nt, Human
ccuccccgcccuccucccgc

SEQ ID NO: 90113 - RNA, 19 nt, Human
ccucccgccgccccuccgc

SEQ ID NO: 90114 - RNA, 24 nt, Human
ccucccgccgccccuccgcccucc

SEQ ID NO: 90115 - RNA, 27 nt, Human
ccucccgccgccccuccgcccuccgcc

SEQ ID NO: 90116 - RNA, 23 nt, Human
ccugaagaguccccuuuaaaauc

SEQ ID NO: 90117 - RNA, 22 nt, Human
ccuggcuuggcaaugggugggg

SEQ ID NO: 90118 - RNA, 26 nt, Human
cgccuggacugcagacugugucgagc

SEQ ID NO: 90119 - RNA, 21 nt, Human
cggcgcaggaaggcacaggcg

SEQ ID NO: 90120 - RNA, 18 nt, Human
cuccgcccuccgcccucc

SEQ ID NO: 90121 - RNA, 24 nt, Human
cuccuccccgcccuccucccgccg

SEQ ID NO: 90122 - RNA, 20 nt, Human
cucugaaguggggagagggg

SEQ ID NO: 90123 - RNA, 25 nt, Human
gaacaagcgaaagcugccuuccugg

SEQ ID NO: 90124 - RNA, 19 nt, Human
gacagagggggcguuggcu

SEQ ID NO: 90125 - RNA, 18 nt, Human
gacgaggagggaggggag

SEQ ID NO: 90126 - RNA, 21 nt, Human
gagccgggaggcggcuccaca

SEQ ID NO: 90127 - RNA, 23 nt, Human
gcacccccauaaccaguacacaa

SEQ ID NO: 90128 - RNA, 21 nt, Human
gccccggggccuccccgagcc

SEQ ID NO: 90129 - RNA, 19 nt, Human
gcccggagcagaugaacga

SEQ ID NO: 90130 - RNA, 19 nt, Human
gcugccucucugcuccaag

SEQ ID NO: 90131 - RNA, 19 nt, Human
ggaaggccgaccgcccaca

SEQ ID NO: 90132 - RNA, 21 nt, Human
ggaaggccgaccgcccacagg

SEQ ID NO: 90133 - RNA, 22 nt, Human
ggaaggccgaccgcccacaggc

SEQ ID NO: 90134 - RNA, 18 nt, Human
ggagaggggacaggagga

SEQ ID NO: 90135 - RNA, 19 nt, Human
ggcacuugcagcuggggug

SEQ ID NO: 90136 - RNA, 22 nt, Human
ggcagcagggccagggaaggac

SEQ ID NO: 90137 - RNA, 20 nt, Human
gggaccuccccaccccaagc

SEQ ID NO: 90138 - RNA, 18 nt, Human
gggggcguuggcuucggc

SEQ ID NO: 90139 - RNA, 22 nt, Human
guucccagccccggggccuccc

SEQ ID NO: 90140 - RNA, 18 nt, Human
ucccagccccggggccuc

SEQ ID NO: 90141 - RNA, 26 nt, Human
ucccagccccggggccuccccgagcc

SEQ ID NO: 90142 - RNA, 21 nt, Human
ucccugaggcuggcuucccgg

SEQ ID NO: 90143 - RNA, 18 nt, Human
uccuccccgcccuccucc

SEQ ID NO: 90144 - RNA, 19 nt, Human
ucgcugcagucccugaggc

SEQ ID NO: 90145 - RNA, 21 nt, Human
ugaggcuggcuucccgguggc

SEQ ID NO: 90146 - RNA, 24 nt, Human
ugaguggguggccucugaaguggg

SEQ ID NO: 90147 - RNA, 22 nt, Human
ugccucuggcacccccauaacc

SEQ ID NO: 90148 - RNA, 18 nt, Human
ugcuggggaaacccgggg

SEQ ID NO: 90149 - RNA, 20 nt, Human
ugcuggggaaacccggggcu

SEQ ID NO: 90150 - RNA, 18 nt, Human
uggcuggcacaggcaggg

SEQ ID NO: 90151 - RNA, 20 nt, Human
uggcuucccgguggcagcuc

SEQ ID NO: 90152 - RNA, 20 nt, Human
ugggaggagaggggacagga

SEQ ID NO: 90153 - RNA, 24 nt, Human
uggguggggcccagggaguccauc

SEQ ID NO: 90154 - RNA, 22 nt, Human
ugguaggaggcgaggcuuggca

SEQ ID NO: 90155 - RNA, 19 nt, Human
ugguguggugugguaggag

SEQ ID NO: 90156 - RNA, 19 nt, Human
ugucccgaggcaggaacaa

SEQ ID NO: 90157 - RNA, 19 nt, Human
uguggugugguaggaggcg

SEQ ID NO: 90158 - RNA, 22 nt, Human
uuauuugggguuccucuauaug

SEQ ID NO: 90159 - RNA, 21 nt, Human
uucccgguggcagcucagggc

SEQ ID NO: 90160 - RNA, 24 nt, Human
uuggcagacgaggagggaggggag

SEQ ID NO: 90161 - RNA, 19 nt, Human
aaauaguuauaaagaagau

SEQ ID NO: 90162 - RNA, 19 nt, Human
aaauaguuauaaagaagau

SEQ ID NO: 90163 - RNA, 18 nt, Human
aagaugccaggaaaacag

SEQ ID NO: 90164 - RNA, 19 nt, Human
aaggcaccguggcccaggc

SEQ ID NO: 90165 - RNA, 24 nt, Human
aaggggaagcagggguuggugggg

SEQ ID NO: 90166 - RNA, 20 nt, Human
aauaaugaaggaagacagaa

SEQ ID NO: 90167 - RNA, 24 nt, Human
acaauaaauaguuauaaagaagau

SEQ ID NO: 90168 - RNA, 24 nt, Human
acaauaaauaguuauaaagaagau

SEQ ID NO: 90169 - RNA, 22 nt, Human
acccaggccccaggcagcgccc

SEQ ID NO: 90170 - RNA, 18 nt, Human
acccgccgcuucucuacc

SEQ ID NO: 90171 - RNA, 20 nt, Human
acccucugggugugaggccu

SEQ ID NO: 90172 - RNA, 20 nt, Human
acccucugggugugaggccu

SEQ ID NO: 90173 - RNA, 20 nt, Human
acccucugggugugaggccu

SEQ ID NO: 90174 - RNA, 20 nt, Human
acccucugggugugaggccu

SEQ ID NO: 90175 - RNA, 21 nt, Human
accugagcuggcacagggggc

SEQ ID NO: 90176 - RNA, 20 nt, Human
agaaggcucagcuacgagga

SEQ ID NO: 90177 - RNA, 20 nt, Human
agaaggcucagcuacgagga

SEQ ID NO: 90178 - RNA, 21 nt, Human
agacccgcagccagaauuugg

SEQ ID NO: 90179 - RNA, 23 nt, Human
agcugcacggucccccacucccc

SEQ ID NO: 90180 - RNA, 18 nt, Human
aggcaaccugggggcugc

SEQ ID NO: 90181 - RNA, 25 nt, Human
agggcacaaccuuguaggugccugc

SEQ ID NO: 90182 - RNA, 25 nt, Human
agggcacaaccuuguaggugccugc

SEQ ID NO: 90183 - RNA, 25 nt, Human
agggcacaaccuuguaggugccugc

SEQ ID NO: 90184 - RNA, 22 nt, Human
agggcugccccggggguggugu

SEQ ID NO: 90185 - RNA, 22 nt, Human
aggggaagcagggguugguggg

SEQ ID NO: 90186 - RNA, 21 nt, Human
agggguuggugggguaugagg

SEQ ID NO: 90187 - RNA, 22 nt, Human
agggguuggugggguaugaggc

SEQ ID NO: 90188 - RNA, 18 nt, Human
aggucuuucaugagucug

SEQ ID NO: 90189 - RNA, 18 nt, Human
aggucuuucaugagucug

SEQ ID NO: 90190 - RNA, 21 nt, Human
agucauuguugaaagaugcca

SEQ ID NO: 90191 - RNA, 24 nt, Human
agucugcaauccaggugucagccg

SEQ ID NO: 90192 - RNA, 27 nt, Human
auaaauaaugaaggaagaccgguaccc

SEQ ID NO: 90193 - RNA, 23 nt, Human
augacggagaccucuuggaggaa

SEQ ID NO: 90194 - RNA, 21 nt, Human
auucacuuccagcucccccag

SEQ ID NO: 90195 - RNA, 21 nt, Human
auucacuuccagcucccccag

SEQ ID NO: 90196 - RNA, 25 nt, Human
caaaggcaccguggcccaggcaacc

SEQ ID NO: 90197 - RNA, 20 nt, Human
caaaguuccugcugcccccc

SEQ ID NO: 90198 - RNA, 21 nt, Human
caacagaagccagcaagcuuc

SEQ ID NO: 90199 - RNA, 21 nt, Human
caacagaagccagcaagcuuc

SEQ ID NO: 90200 - RNA, 21 nt, Human
caacagaagccagcaagcuuc

SEQ ID NO: 90201 - RNA, 21 nt, Human
caacagaagccagcaagcuuc

SEQ ID NO: 90202 - RNA, 21 nt, Human
cacaacgcagguggaccuccc

SEQ ID NO: 90203 - RNA, 21 nt, Human
cacaacgcagguggaccuccc

SEQ ID NO: 90204 - RNA, 23 nt, Human
cacccagaacuccccuuccugga

SEQ ID NO: 90205 - RNA, 24 nt, Human
cacccagaacuccccuuccuggag

SEQ ID NO: 90206 - RNA, 18 nt, Human
cacccucugggaccugga

SEQ ID NO: 90207 - RNA, 19 nt, Human
cacccucugggaccuggaa

SEQ ID NO: 90208 - RNA, 23 nt, Human
cacccuguuagguuuucaucacu

SEQ ID NO: 90209 - RNA, 23 nt, Human
cacccuguuagguuuucaucacu

SEQ ID NO: 90210 - RNA, 23 nt, Human
cacccuguuagguuuucaucacu

SEQ ID NO: 90211 - RNA, 21 nt, Human
caccguggcccaggcaaccug

SEQ ID NO: 90212 - RNA, 22 nt, Human
caccugagcuggcacagggggc

SEQ ID NO: 90213 - RNA, 22 nt, Human
caccugagcuggcacagggggc

SEQ ID NO: 90214 - RNA, 22 nt, Human
caccugagcuggcacagggggc

SEQ ID NO: 90215 - RNA, 22 nt, Human
caccugagcuggcacagggggc

SEQ ID NO: 90216 - RNA, 20 nt, Human
cagcaagcuucccacccuuc

SEQ ID NO: 90217 - RNA, 20 nt, Human
cagcaagcuucccacccuuc

SEQ ID NO: 90218 - RNA, 20 nt, Human
cagcagugggggugcguccu

SEQ ID NO: 90219 - RNA, 20 nt, Human
cagcagugggggugcguccu

SEQ ID NO: 90220 - RNA, 18 nt, Human
cagcccccuggcagggcu

SEQ ID NO: 90221 - RNA, 18 nt, Human
cagcccccuggcagggcu

SEQ ID NO: 90222 - RNA, 18 nt, Human
cagcccccuggcagggcu

SEQ ID NO: 90223 - RNA, 18 nt, Human
cagcccccuggcagggcu

SEQ ID NO: 90224 - RNA, 20 nt, Human
cagcccccuggcagggcugg

SEQ ID NO: 90225 - RNA, 20 nt, Human
cagcccccuggcagggcugg

SEQ ID NO: 90226 - RNA, 20 nt, Human
cagcccccuggcagggcugg

SEQ ID NO: 90227 - RNA, 20 nt, Human
cagcccccuggcagggcugg

SEQ ID NO: 90228 - RNA, 18 nt, Human
cagccgccgccgccuccg

SEQ ID NO: 90229 - RNA, 19 nt, Human
cagccgccgccgccuccgg

SEQ ID NO: 90230 - RNA, 27 nt, Human
cagcucagcagcggcuccugcagcagg

SEQ ID NO: 90231 - RNA, 27 nt, Human
cagcucagcagcggcuccugcagcagg

SEQ ID NO: 90232 - RNA, 26 nt, Human
caggaggcagagccggcucaccuccu

SEQ ID NO: 90233 - RNA, 26 nt, Human
caggaggcagagccggcucaccuccu

SEQ ID NO: 90234 - RNA, 26 nt, Human
caggaggcagagccggcucaccuccu

SEQ ID NO: 90235 - RNA, 23 nt, Human
caguuccugugggucaggaauuc

SEQ ID NO: 90236 - RNA, 25 nt, Human
caucagaaggcucagcuaagaugag

SEQ ID NO: 90237 - RNA, 22 nt, Human
caucagaaggcucagcuacgag

SEQ ID NO: 90238 - RNA, 18 nt, Human
caucagcgcucauguuua

SEQ ID NO: 90239 - RNA, 18 nt, Human
caucagcgcucauguuua

SEQ ID NO: 90240 - RNA, 18 nt, Human
caucagcgcucauguuua

SEQ ID NO: 90241 - RNA, 18 nt, Human
caucagcgcucauguuua

SEQ ID NO: 90242 - RNA, 24 nt, Human
caugacggagaccucuuggaggaa

SEQ ID NO: 90243 - RNA, 24 nt, Human
caugacggagaccucuuggaggaa

SEQ ID NO: 90244 - RNA, 22 nt, Human
ccaaagaguuaaugaaggaaca

SEQ ID NO: 90245 - RNA, 25 nt, Human
ccaccagugcccgggcccggccugc

SEQ ID NO: 90246 - RNA, 27 nt, Human
ccacccagaacuccccuuccuggagcu

SEQ ID NO: 90247 - RNA, 22 nt, Human
ccacugcccugauggcgcuaag

SEQ ID NO: 90248 - RNA, 22 nt, Human
ccagaggugcagacccacagcc

SEQ ID NO: 90249 - RNA, 21 nt, Human
ccagcaagcuucccacccuuc

SEQ ID NO: 90250 - RNA, 21 nt, Human
ccagcaagcuucccacccuuc

SEQ ID NO: 90251 - RNA, 21 nt, Human
ccagcaagcuucccacccuuc

SEQ ID NO: 90252 - RNA, 21 nt, Human
ccagcccccacagugcaaggc

SEQ ID NO: 90253 - RNA, 21 nt, Human
ccagcccccacagugcaaggc

SEQ ID NO: 90254 - RNA, 21 nt, Human
ccagcccccacagugcaaggc

SEQ ID NO: 90255 - RNA, 21 nt, Human
ccagcccccacagugcaaggc

SEQ ID NO: 90256 - RNA, 21 nt, Human
ccaggccccaggcagcgcccg

SEQ ID NO: 90257 - RNA, 21 nt, Human
cccagaacuccccuuccugga

SEQ ID NO: 90258 - RNA, 19 nt, Human
cccagcugcugggaaccug

SEQ ID NO: 90259 - RNA, 19 nt, Human
cccagcugcugggaaccug

SEQ ID NO: 90260 - RNA, 19 nt, Human
cccagcugcugggaaccug

SEQ ID NO: 90261 - RNA, 19 nt, Human
cccagcugcugggaaccug

SEQ ID NO: 90262 - RNA, 22 nt, Human
ccccacagugcaaggcuggccg

SEQ ID NO: 90263 - RNA, 22 nt, Human
ccccacagugcaaggcuggccg

SEQ ID NO: 90264 - RNA, 22 nt, Human
ccccacagugcaaggcuggccg

SEQ ID NO: 90265 - RNA, 22 nt, Human
ccccacagugcaaggcuggccg

SEQ ID NO: 90266 - RNA, 19 nt, Human
ccccacucccccgcaggca

SEQ ID NO: 90267 - RNA, 20 nt, Human
ccccagggcugcgucucucc

SEQ ID NO: 90268 - RNA, 20 nt, Human
ccccagggcugcgucucucc

SEQ ID NO: 90269 - RNA, 20 nt, Human
ccccagggcugcgucucucc

SEQ ID NO: 90270 - RNA, 20 nt, Human
ccccagggcugcgucucucc

SEQ ID NO: 90271 - RNA, 23 nt, Human
ccccagguggcuguugguagagu

SEQ ID NO: 90272 - RNA, 23 nt, Human
ccccagguggcuguugguagagu

SEQ ID NO: 90273 - RNA, 18 nt, Human
cccccagguggcuguugg

SEQ ID NO: 90274 - RNA, 18 nt, Human
cccccagguggcuguugg

SEQ ID NO: 90275 - RNA, 21 nt, Human
cccccgcaggcagggcugccc

SEQ ID NO: 90276 - RNA, 21 nt, Human
cccgcguauggcagagcagcc

SEQ ID NO: 90277 - RNA, 19 nt, Human
cccggcccagcccuccaag

SEQ ID NO: 90278 - RNA, 24 nt, Human
cccggcccagcccuccaagcccga

SEQ ID NO: 90279 - RNA, 23 nt, Human
cccgggcccggccugcccagucc

SEQ ID NO: 90280 - RNA, 18 nt, Human
cccgggcuucacuuggcc

SEQ ID NO: 90281 - RNA, 23 nt, Human
cccgggcuucacuuggcccuggc

SEQ ID NO: 90282 - RNA, 18 nt, Human
cccuccaagcccgagggc

SEQ ID NO: 90283 - RNA, 24 nt, Human
cccucgggcuccagucaccugagc

SEQ ID NO: 90284 - RNA, 24 nt, Human
cccucgggcuccagucaccugagc

SEQ ID NO: 90285 - RNA, 24 nt, Human
cccucgggcuccagucaccugagc

SEQ ID NO: 90286 - RNA, 24 nt, Human
cccucgggcuccagucaccugagc

SEQ ID NO: 90287 - RNA, 19 nt, Human
cccucugggugugaggccu

SEQ ID NO: 90288 - RNA, 19 nt, Human
cccucugggugugaggccu

SEQ ID NO: 90289 - RNA, 19 nt, Human
cccucugggugugaggccu

SEQ ID NO: 90290 - RNA, 19 nt, Human
cccucugggugugaggccu

SEQ ID NO: 90291 - RNA, 22 nt, Human
cccucugggugugaggccucca

SEQ ID NO: 90292 - RNA, 22 nt, Human
cccucugggugugaggccucca

SEQ ID NO: 90293 - RNA, 22 nt, Human
cccucugggugugaggccucca

SEQ ID NO: 90294 - RNA, 22 nt, Human
cccucugggugugaggccucca

SEQ ID NO: 90295 - RNA, 19 nt, Human
cccugaggaacuccuccuc

SEQ ID NO: 90296 - RNA, 20 nt, Human
ccgccgccgccuccggcccg

SEQ ID NO: 90297 - RNA, 22 nt, Human
ccgccgccgccuccggcccgcc

SEQ ID NO: 90298 - RNA, 23 nt, Human
ccgccgccgccuccggcccgccc

SEQ ID NO: 90299 - RNA, 27 nt, Human
ccgccgccuccggcccgccccgcccgu

SEQ ID NO: 90300 - RNA, 22 nt, Human
ccggcccgccccgcccguuccc

SEQ ID NO: 90301 - RNA, 20 nt, Human
ccucaacaugaccaaagagu

SEQ ID NO: 90302 - RNA, 21 nt, Human
ccuccuuguagcugggcccac

SEQ ID NO: 90303 - RNA, 24 nt, Human
ccugcaaguccuccuuguagcugg

SEQ ID NO: 90304 - RNA, 24 nt, Human
ccuggagcugggacaggggucccc

SEQ ID NO: 90305 - RNA, 23 nt, Human
ccuggcuccuuccacccucuggg

SEQ ID NO: 90306 - RNA, 24 nt, Human
ccuggcuccuuccacccucuggga

SEQ ID NO: 90307 - RNA, 26 nt, Human
cgcagcucagcagcggcuccugcagc

SEQ ID NO: 90308 - RNA, 26 nt, Human
cgcagcucagcagcggcuccugcagc

SEQ ID NO: 90309 - RNA, 25 nt, Human
cgcccggcccagcccuccaagcccg

SEQ ID NO: 90310 - RNA, 19 nt, Human
cgcccgguagagaagacuc

SEQ ID NO: 90311 - RNA, 19 nt, Human
cgcccgguagagaagacuc

SEQ ID NO: 90312 - RNA, 24 nt, Human
cggaggcuucccguggaccccuag

SEQ ID NO: 90313 - RNA, 24 nt, Human
cggaggcuucccguggaccccuag

SEQ ID NO: 90314 - RNA, 24 nt, Human
cggaggcuucccguggaccccuag

SEQ ID NO: 90315 - RNA, 24 nt, Human
cggaggcuucccguggaccccuag

SEQ ID NO: 90316 - RNA, 21 nt, Human
cggcagccuccugcugacugg

SEQ ID NO: 90317 - RNA, 20 nt, Human
cggcagugcugaugcagagu

SEQ ID NO: 90318 - RNA, 20 nt, Human
cggcagugcugaugcagagu

SEQ ID NO: 90319 - RNA, 22 nt, Human
cggcccagcccuccaagcccga

SEQ ID NO: 90320 - RNA, 23 nt, Human
cggcuccgcgggcucccaucugc

SEQ ID NO: 90321 - RNA, 20 nt, Human
cguaugcauggcacgcggug

SEQ ID NO: 90322 - RNA, 20 nt, Human
cguaugcauggcacgcggug

SEQ ID NO: 90323 - RNA, 19 nt, Human
cucccccagguggcuguug

SEQ ID NO: 90324 - RNA, 19 nt, Human
cucccccagguggcuguug

SEQ ID NO: 90325 - RNA, 19 nt, Human
cuccuccacccagaacucc

SEQ ID NO: 90326 - RNA, 22 nt, Human
cuccugcagcagcagugggggu

SEQ ID NO: 90327 - RNA, 22 nt, Human
cucugggauccuggggucucug

SEQ ID NO: 90328 - RNA, 22 nt, Human
cucugggauccuggggucucug

SEQ ID NO: 90329 - RNA, 22 nt, Human
cucugggauccuggggucucug

SEQ ID NO: 90330 - RNA, 22 nt, Human
cucugggauccuggggucucug

SEQ ID NO: 90331 - RNA, 18 nt, Human
cuggcccagcaucuccug

SEQ ID NO: 90332 - RNA, 18 nt, Human
cuggcccagcaucuccug

SEQ ID NO: 90333 - RNA, 18 nt, Human
cuggcccagcaucuccug

SEQ ID NO: 90334 - RNA, 20 nt, Human
cugggauccuggggucucug

SEQ ID NO: 90335 - RNA, 20 nt, Human
cugggauccuggggucucug

SEQ ID NO: 90336 - RNA, 21 nt, Human
cugggcccacaaaggcaccgu

SEQ ID NO: 90337 - RNA, 22 nt, Human
cuugacccaggccccaggcagc

SEQ ID NO: 90338 - RNA, 19 nt, Human
cuuggcccuggcgccagua

SEQ ID NO: 90339 - RNA, 23 nt, Human
gaauggauggccugucaauccug

SEQ ID NO: 90340 - RNA, 23 nt, Human
gaauggauggccugucaauccug

SEQ ID NO: 90341 - RNA, 23 nt, Human
gaauggauggccugucaauccug

SEQ ID NO: 90342 - RNA, 24 nt, Human
gacccgccgcuucucuaccaaucc

SEQ ID NO: 90343 - RNA, 21 nt, Human
gacccgccgcuucucuaccuu

SEQ ID NO: 90344 - RNA, 19 nt, Human
gaccgagaaggggaagcag

SEQ ID NO: 90345 - RNA, 19 nt, Human
gagccugcaaguccuccuu

SEQ ID NO: 90346 - RNA, 19 nt, Human
gagggauccugggaagcuc

SEQ ID NO: 90347 - RNA, 19 nt, Human
gagggauccugggaagcuc

SEQ ID NO: 90348 - RNA, 19 nt, Human
gagggauccugggaagcuc

SEQ ID NO: 90349 - RNA, 19 nt, Human
gagggauccugggaagcuc

SEQ ID NO: 90350 - RNA, 23 nt, Human
gagugaugcggacgcagcggggg

SEQ ID NO: 90351 - RNA, 23 nt, Human
gagugaugcggacgcagcggggg

SEQ ID NO: 90352 - RNA, 18 nt, Human
gauccugggaagcucugg

SEQ ID NO: 90353 - RNA, 18 nt, Human
gauccugggaagcucugg

SEQ ID NO: 90354 - RNA, 18 nt, Human
gauccugggaagcucugg

SEQ ID NO: 90355 - RNA, 18 nt, Human
gauccugggaagcucugg

SEQ ID NO: 90356 - RNA, 20 nt, Human
gcagagcagccucucugugu

SEQ ID NO: 90357 - RNA, 19 nt, Human
gcagcagcagugggggugc

SEQ ID NO: 90358 - RNA, 19 nt, Human
gcagcagcagugggggugc

SEQ ID NO: 90359 - RNA, 22 nt, Human
gcagccuggaucucugcaggac

SEQ ID NO: 90360 - RNA, 18 nt, Human
gcagcgggggccagggcc

SEQ ID NO: 90361 - RNA, 18 nt, Human
gcagcgggggccagggcc

SEQ ID NO: 90362 - RNA, 18 nt, Human
gcaggaggcagagccggc

SEQ ID NO: 90363 - RNA, 18 nt, Human
gcaggaggcagagccggc

SEQ ID NO: 90364 - RNA, 18 nt, Human
gcaggaggcagagccggc

SEQ ID NO: 90365 - RNA, 18 nt, Human
gcccacaaaggcaccgug

SEQ ID NO: 90366 - RNA, 20 nt, Human
gcccagcaucuccuggcugu

SEQ ID NO: 90367 - RNA, 20 nt, Human
gcccagcaucuccuggcugu

SEQ ID NO: 90368 - RNA, 22 nt, Human
gcccugccuuuccuaugcaaac

SEQ ID NO: 90369 - RNA, 19 nt, Human
gcccuugacccaggcccca

SEQ ID NO: 90370 - RNA, 18 nt, Human
gccugcccaguccgccgc

SEQ ID NO: 90371 - RNA, 19 nt, Human
gccugucaauccugguugc

SEQ ID NO: 90372 - RNA, 19 nt, Human
gccugucaauccugguugc

SEQ ID NO: 90373 - RNA, 19 nt, Human
gccugucaauccugguugc

SEQ ID NO: 90374 - RNA, 19 nt, Human
gcggcuccugcagcagcag

SEQ ID NO: 90375 - RNA, 23 nt, Human
gcuccugcagcagcagugggggu

SEQ ID NO: 90376 - RNA, 19 nt, Human
gcugcaucuaccuggcucc

SEQ ID NO: 90377 - RNA, 21 nt, Human
ggaacuccuccuccuccaccc

SEQ ID NO: 90378 - RNA, 30 nt, Human
ggaagacagaaguagaauaucacuacuuug

SEQ ID NO: 90379 - RNA, 19 nt, Human
ggacaggagcucagaugcu

SEQ ID NO: 90380 - RNA, 20 nt, Human
ggaccccuaggccgcagccc

SEQ ID NO: 90381 - RNA, 20 nt, Human
ggaccccuaggccgcagccc

SEQ ID NO: 90382 - RNA, 20 nt, Human
ggaccccuaggccgcagccc

SEQ ID NO: 90383 - RNA, 20 nt, Human
ggaccccuaggccgcagccc

SEQ ID NO: 90384 - RNA, 18 nt, Human
ggcaggaggcagagccgg

SEQ ID NO: 90385 - RNA, 18 nt, Human
ggcaggaggcagagccgg

SEQ ID NO: 90386 - RNA, 18 nt, Human
ggcaggaggcagagccgg

SEQ ID NO: 90387 - RNA, 22 nt, Human
ggcaggaggcagagccggcuca

SEQ ID NO: 90388 - RNA, 22 nt, Human
ggcaggaggcagagccggcuca

SEQ ID NO: 90389 - RNA, 22 nt, Human
ggcaggaggcagagccggcuca

SEQ ID NO: 90390 - RNA, 22 nt, Human
ggcccaggcaaccugggggcug

SEQ ID NO: 90391 - RNA, 24 nt, Human
ggcuucacuuggcccuggcgccag

SEQ ID NO: 90392 - RNA, 21 nt, Human
gggcugcagucucaucagaag

SEQ ID NO: 90393 - RNA, 21 nt, Human
gggcugcagucucaucagaag

SEQ ID NO: 90394 - RNA, 21 nt, Human
gggcugcagucucaucagaag

SEQ ID NO: 90395 - RNA, 19 nt, Human
gggggcauggacaggaccc

SEQ ID NO: 90396 - RNA, 19 nt, Human
gggggcauggacaggaccc

SEQ ID NO: 90397 - RNA, 21 nt, Human
ggggugcguccuggcuccuuc

SEQ ID NO: 90398 - RNA, 21 nt, Human
ggggugcguccuggcuccuuc

SEQ ID NO: 90399 - RNA, 18 nt, Human
gggguggaacucgguguc

SEQ ID NO: 90400 - RNA, 19 nt, Human
gguagagaagacucggagc

SEQ ID NO: 90401 - RNA, 19 nt, Human
gguagagaagacucggagc

SEQ ID NO: 90402 - RNA, 19 nt, Human
ggugcuggggacagccagg

SEQ ID NO: 90403 - RNA, 21 nt, Human
ggugcuggggacagccaggua

SEQ ID NO: 90404 - RNA, 21 nt, Human
gguugcugggaaagccgcugu

SEQ ID NO: 90405 - RNA, 23 nt, Human
guggcgcaacagaagccagcaag

SEQ ID NO: 90406 - RNA, 23 nt, Human
guggcgcaacagaagccagcaag

SEQ ID NO: 90407 - RNA, 23 nt, Human
guggcgcaacagaagccagcaag

SEQ ID NO: 90408 - RNA, 23 nt, Human
guggcgcaacagaagccagcaag

SEQ ID NO: 90409 - RNA, 18 nt, Human
uaaaugaggaaaggaagg

SEQ ID NO: 90410 - RNA, 23 nt, Human
uauaaagaagaucugcugcccua

SEQ ID NO: 90411 - RNA, 23 nt, Human
uauaaagaagaucugcugcccua

SEQ ID NO: 90412 - RNA, 23 nt, Human
uauaaagaagaucugcugcccua

SEQ ID NO: 90413 - RNA, 23 nt, Human
uauaaagaagaucugcugcccua

SEQ ID NO: 90414 - RNA, 26 nt, Human
ucaaacucccugaggaaccggguguc

SEQ ID NO: 90415 - RNA, 18 nt, Human
ucaagcauuugcccugcc

SEQ ID NO: 90416 - RNA, 18 nt, Human
ucagccgccgccgccucc

SEQ ID NO: 90417 - RNA, 19 nt, Human
ucagccgccgccgccuccg

SEQ ID NO: 90418 - RNA, 23 nt, Human
ucagggucuuucaugagucugca

SEQ ID NO: 90419 - RNA, 22 nt, Human
uccaagaaccccguagcugcac

SEQ ID NO: 90420 - RNA, 21 nt, Human
uccaggugucagcuggggcug

SEQ ID NO: 90421 - RNA, 22 nt, Human
uccaggugucagcuggggcugc

SEQ ID NO: 90422 - RNA, 18 nt, Human
ucccccagguggcuguug

SEQ ID NO: 90423 - RNA, 18 nt, Human
ucccccagguggcuguug

SEQ ID NO: 90424 - RNA, 20 nt, Human
ucccccagguggcuguuggu

SEQ ID NO: 90425 - RNA, 20 nt, Human
ucccccagguggcuguuggu

SEQ ID NO: 90426 - RNA, 30 nt, Human
ucccccgcaggcagggcugccccggggguu

SEQ ID NO: 90427 - RNA, 22 nt, Human
ucccgggcuucacuuggcccug

SEQ ID NO: 90428 - RNA, 22 nt, Human
ucccugaggaacuccuccuccu

SEQ ID NO: 90429 - RNA, 23 nt, Human
uccuggagcugggacaggagcuc

SEQ ID NO: 90430 - RNA, 22 nt, Human
ucugcaauccaggugucagccg

SEQ ID NO: 90431 - RNA, 22 nt, Human
ucugcaauccaggugucagcug

SEQ ID NO: 90432 - RNA, 26 nt, Human
ucugcaauccaggugucagcuggggc

SEQ ID NO: 90433 - RNA, 18 nt, Human
ucugcagguggccggccu

SEQ ID NO: 90434 - RNA, 20 nt, Human
ugacccaggccccaggcagc

SEQ ID NO: 90435 - RNA, 20 nt, Human
ugaggaacuccuccuccucc

SEQ ID NO: 90436 - RNA, 21 nt, Human
ugaggcaaaguuccugcugcc

SEQ ID NO: 90437 - RNA, 19 nt, Human
ugcaaggcuggccggccca

SEQ ID NO: 90438 - RNA, 19 nt, Human
ugcaaggcuggccggccca

SEQ ID NO: 90439 - RNA, 19 nt, Human
ugcaaggcuggccggccca

SEQ ID NO: 90440 - RNA, 19 nt, Human
ugcaaggcuggccggccca

SEQ ID NO: 90441 - RNA, 22 nt, Human
ugccagccacggggggcaugga

SEQ ID NO: 90442 - RNA, 22 nt, Human
ugccagccacggggggcaugga

SEQ ID NO: 90443 - RNA, 23 nt, Human
ugccaugacggagaccucuugga

SEQ ID NO: 90444 - RNA, 23 nt, Human
ugccaugacggagaccucuugga

SEQ ID NO: 90445 - RNA, 23 nt, Human
ugccaugacggagaccucuugga

SEQ ID NO: 90446 - RNA, 18 nt, Human
ugcccgggaugcucgcug

SEQ ID NO: 90447 - RNA, 21 nt, Human
ugcccgggaugcucgcugggc

SEQ ID NO: 90448 - RNA, 19 nt, Human
ugcccuacccucugggugu

SEQ ID NO: 90449 - RNA, 21 nt, Human
ugcccuacccucuggguguga

SEQ ID NO: 90450 - RNA, 21 nt, Human
ugcccuacccucuggguguga

SEQ ID NO: 90451 - RNA, 21 nt, Human
ugcccuacccucuggguguga

SEQ ID NO: 90452 - RNA, 22 nt, Human
ugcccugccuuuccuaugcaaa

SEQ ID NO: 90453 - RNA, 18 nt, Human
ugcuggggacagccaggu

SEQ ID NO: 90454 - RNA, 18 nt, Human
ugcuggggacagccaggu

SEQ ID NO: 90455 - RNA, 23 nt, Human
uggacagugggccuuccagcaac

SEQ ID NO: 90456 - RNA, 18 nt, Human
uggaccccuaggccgcag

SEQ ID NO: 90457 - RNA, 18 nt, Human
uggaccccuaggccgcag

SEQ ID NO: 90458 - RNA, 18 nt, Human
uggaccccuaggccgcag

SEQ ID NO: 90459 - RNA, 18 nt, Human
uggaccccuaggccgcag

SEQ ID NO: 90460 - RNA, 19 nt, Human
uggaccccuaggccgcagc

SEQ ID NO: 90461 - RNA, 19 nt, Human
uggaccccuaggccgcagc

SEQ ID NO: 90462 - RNA, 19 nt, Human
uggaccccuaggccgcagc

SEQ ID NO: 90463 - RNA, 19 nt, Human
uggaccccuaggccgcagc

SEQ ID NO: 90464 - RNA, 21 nt, Human
uggaccccuaggccgcagccc

SEQ ID NO: 90465 - RNA, 23 nt, Human
uggaccccuaggccgcagccccc

SEQ ID NO: 90466 - RNA, 23 nt, Human
uggaccccuaggccgcagccccc

SEQ ID NO: 90467 - RNA, 23 nt, Human
uggaccccuaggccgcagccccc

SEQ ID NO: 90468 - RNA, 23 nt, Human
uggaccccuaggccgcagccccc

SEQ ID NO: 90469 - RNA, 18 nt, Human
uggcagggcugggaggca

SEQ ID NO: 90470 - RNA, 18 nt, Human
uggcagggcugggaggca

SEQ ID NO: 90471 - RNA, 18 nt, Human
uggcagggcugggaggca

SEQ ID NO: 90472 - RNA, 18 nt, Human
uggcagggcugggaggca

SEQ ID NO: 90473 - RNA, 20 nt, Human
uggcagggcugggaggcagg

SEQ ID NO: 90474 - RNA, 20 nt, Human
uggcagggcugggaggcagg

SEQ ID NO: 90475 - RNA, 20 nt, Human
uggcagggcugggaggcagg

SEQ ID NO: 90476 - RNA, 20 nt, Human
uggcagggcugggaggcagg

SEQ ID NO: 90477 - RNA, 20 nt, Human
uggcccagcaucuccuggcu

SEQ ID NO: 90478 - RNA, 20 nt, Human
uggcccagcaucuccuggcu

SEQ ID NO: 90479 - RNA, 20 nt, Human
uggcccagcaucuccuggcu

SEQ ID NO: 90480 - RNA, 22 nt, Human
uggcccagcaucuccuggcugu

SEQ ID NO: 90481 - RNA, 18 nt, Human
uggcccaggcaaccuggg

SEQ ID NO: 90482 - RNA, 21 nt, Human
uggcccaggcaaccugggggc

SEQ ID NO: 90483 - RNA, 25 nt, Human
uggcccaggcaaccugggggcugcu

SEQ ID NO: 90484 - RNA, 25 nt, Human
uggcccccagggcugcgucucuccu

SEQ ID NO: 90485 - RNA, 25 nt, Human
uggcccccagggcugcgucucuccu

SEQ ID NO: 90486 - RNA, 25 nt, Human
uggcccccagggcugcgucucuccu

SEQ ID NO: 90487 - RNA, 25 nt, Human
uggcccccagggcugcgucucuccu

SEQ ID NO: 90488 - RNA, 23 nt, Human
ugggagggauccugggaagcucu

SEQ ID NO: 90489 - RNA, 23 nt, Human
ugggagggauccugggaagcucu

SEQ ID NO: 90490 - RNA, 23 nt, Human
ugggagggauccugggaagcucu

SEQ ID NO: 90491 - RNA, 23 nt, Human
ugggagggauccugggaagcucu

SEQ ID NO: 90492 - RNA, 28 nt, Human
ugggauccuggggucucugccgucucag

SEQ ID NO: 90493 - RNA, 28 nt, Human
ugggauccuggggucucugccgucucag

SEQ ID NO: 90494 - RNA, 28 nt, Human
ugggauccuggggucucugccgucucag

SEQ ID NO: 90495 - RNA, 28 nt, Human
ugggauccuggggucucugccgucucag

SEQ ID NO: 90496 - RNA, 19 nt, Human
ugggguggaacucgguguc

SEQ ID NO: 90497 - RNA, 19 nt, Human
ugggguugcugggaaagcc

SEQ ID NO: 90498 - RNA, 22 nt, Human
uuaaugaaggaacacuucuuuu

SEQ ID NO: 90499 - RNA, 21 nt, Human
uuagcugugcauugucagcua

SEQ ID NO: 90500 - RNA, 18 nt, Human
uuccugugggucaggaau

SEQ ID NO: 90501 - RNA, 19 nt, Human
uucuuggccacugcccuga

SEQ ID NO: 90502 - RNA, 19 nt, Human
uugcccugccuuuccuaug

SEQ ID NO: 90503 - RNA, 19 nt, Human
agacuggagagcugagggc

SEQ ID NO: 90504 - RNA, 19 nt, Human
agccccgaggcuuauccuc

SEQ ID NO: 90505 - RNA, 24 nt, Human
auccuccugugauccauccaggcu

SEQ ID NO: 90506 - RNA, 19 nt, Human
caagaagcaccccacccuc

SEQ ID NO: 90507 - RNA, 19 nt, Human
caagaagcaccccacccuc

SEQ ID NO: 90508 - RNA, 21 nt, Human
cagcagagacuggagagcuga

SEQ ID NO: 90509 - RNA, 19 nt, Human
ccccacccuccugggcuag

SEQ ID NO: 90510 - RNA, 23 nt, Human
cccuccugggcuagaaccucgcu

SEQ ID NO: 90511 - RNA, 21 nt, Human
ccggaagacucggcccugggg

SEQ ID NO: 90512 - RNA, 24 nt, Human
ccucgcugcugcugcugcugguag

SEQ ID NO: 90513 - RNA, 22 nt, Human
ccugugauccauccaggcucuc

SEQ ID NO: 90514 - RNA, 20 nt, Human
cuccugggcuagaaccucgc

SEQ ID NO: 90515 - RNA, 22 nt, Human
uacaagaagcaccccacccucc

SEQ ID NO: 90516 - RNA, 19 nt, Human
ucagcagagacuggagagc

SEQ ID NO: 90517 - RNA, 18 nt, Human
uccugugauccauccagg

SEQ ID NO: 90518 - RNA, 18 nt, Human
ugcugguagagaugacca

SEQ ID NO: 90519 - RNA, 20 nt, Human
aaaaguguauacuauuuaca

SEQ ID NO: 90520 - RNA, 21 nt, Human
aaacaagcuauaauugugugc

SEQ ID NO: 90521 - RNA, 22 nt, Human
aaacauggcauggugugauugc

SEQ ID NO: 90522 - RNA, 20 nt, Human
aaauaccucccugcauuuuu

SEQ ID NO: 90523 - RNA, 20 nt, Human
aacagcuuauuuuguccuuu

SEQ ID NO: 90524 - RNA, 24 nt, Human
aagggccucguguccuuugagagc

SEQ ID NO: 90525 - RNA, 19 nt, Human
aggaaaguguguaaaagua

SEQ ID NO: 90526 - RNA, 19 nt, Human
auaaggcaacaaggcaaaa

SEQ ID NO: 90527 - RNA, 22 nt, Human
aucauaauugguuuacaaauug

SEQ ID NO: 90528 - RNA, 24 nt, Human
auuuucccaagguaaagccaggaa

SEQ ID NO: 90529 - RNA, 23 nt, Human
caagguaaagccaggaaacaaac

SEQ ID NO: 90530 - RNA, 21 nt, Human
caucaugagaagucuucaggc

SEQ ID NO: 90531 - RNA, 25 nt, Human
ccccucuaacuccauggacagacac

SEQ ID NO: 90532 - RNA, 21 nt, Human
cccggcgcgcugcugcggcca

SEQ ID NO: 90533 - RNA, 25 nt, Human
cccggcgcgcugcugcggccacugc

SEQ ID NO: 90534 - RNA, 23 nt, Human
ccucccugcauuuuuuuuuccug

SEQ ID NO: 90535 - RNA, 22 nt, Human
cgcgcugcugcggccacugcgg

SEQ ID NO: 90536 - RNA, 22 nt, Human
gaacuucuaagugauguccccu

SEQ ID NO: 90537 - RNA, 20 nt, Human
gcgcgcugcugcggccacug

SEQ ID NO: 90538 - RNA, 23 nt, Human
gcgcgcugcugcggccacugcgg

SEQ ID NO: 90539 - RNA, 21 nt, Human
gcuggggcgcggccagggccc

SEQ ID NO: 90540 - RNA, 20 nt, Human
ggaaggaaaacauggcaugg

SEQ ID NO: 90541 - RNA, 21 nt, Human
gugauugcaugggguaacccu

SEQ ID NO: 90542 - RNA, 19 nt, Human
uaaauauucccugccaagg

SEQ ID NO: 90543 - RNA, 21 nt, Human
uaaauauucccugccaagggc

SEQ ID NO: 90544 - RNA, 22 nt, Human
uaacaguacauuuggaagaaga

SEQ ID NO: 90545 - RNA, 19 nt, Human
uaaggagaacgauuuacua

SEQ ID NO: 90546 - RNA, 23 nt, Human
uaauugguuuacaaauuggaugc

SEQ ID NO: 90547 - RNA, 22 nt, Human
uaccauguuucccaguuggcuc

SEQ ID NO: 90548 - RNA, 22 nt, Human
uacccuguuaaaguagaaacaa

SEQ ID NO: 90549 - RNA, 21 nt, Human
uacuucaugauauaccauguu

SEQ ID NO: 90550 - RNA, 25 nt, Human
ucuccuggacucuccagaugccuug

SEQ ID NO: 90551 - RNA, 22 nt, Human
ugacaguaucauuauuuucagc

SEQ ID NO: 90552 - RNA, 18 nt, Human
ugaugugugaaacuucug

SEQ ID NO: 90553 - RNA, 20 nt, Human
ugccaagggccucguguccu

SEQ ID NO: 90554 - RNA, 19 nt, Human
uggcauacugguucaguug

SEQ ID NO: 90555 - RNA, 18 nt, Human
uggcauggugugauugca

SEQ ID NO: 90556 - RNA, 20 nt, Human
uggcauggugugauugcaug

SEQ ID NO: 90557 - RNA, 19 nt, Human
ugggaaaugguaaucuugg

SEQ ID NO: 90558 - RNA, 21 nt, Human
ugguuuuggcauacugguuca

SEQ ID NO: 90559 - RNA, 22 nt, Human
ugucaaggguuaagcgacucau

SEQ ID NO: 90560 - RNA, 19 nt, Human
ugugaaacuucugcuaucu

SEQ ID NO: 90561 - RNA, 23 nt, Human
uguggggcugcccuccaggaagg

SEQ ID NO: 90562 - RNA, 19 nt, Human
uuacagaggcagcauaccc

SEQ ID NO: 90563 - RNA, 21 nt, Human
uugcucagcuguuaaauaccu

SEQ ID NO: 90564 - RNA, 18 nt, Human
agcggaggcugcagccgc

SEQ ID NO: 90565 - RNA, 18 nt, Human
agggaggggagggggaac

SEQ ID NO: 90566 - RNA, 25 nt, Human
agggaggggagggggaacaccggcc

SEQ ID NO: 90567 - RNA, 21 nt, Human
cagcaagucaguggaagagug

SEQ ID NO: 90568 - RNA, 26 nt, Human
cagcagggccuuaggaaaaugugcuc

SEQ ID NO: 90569 - RNA, 18 nt, Human
cagggcacggcgcgggcg

SEQ ID NO: 90570 - RNA, 19 nt, Human
ccccagggaggggaggggg

SEQ ID NO: 90571 - RNA, 24 nt, Human
ccccaguauccuggcucccaggcu

SEQ ID NO: 90572 - RNA, 22 nt, Human
ccuccacgagaauggaaugcuu

SEQ ID NO: 90573 - RNA, 19 nt, Human
ccucgggacacugaggcug

SEQ ID NO: 90574 - RNA, 24 nt, Human
cucccaggcuagacucaggcccag

SEQ ID NO: 90575 - RNA, 18 nt, Human
gacagcagggccuuagga

SEQ ID NO: 90576 - RNA, 18 nt, Human
gaggcugcagccgcccgg

SEQ ID NO: 90577 - RNA, 20 nt, Human
gcacggcgcgggcgcuggag

SEQ ID NO: 90578 - RNA, 19 nt, Human
gcagggcacggcgcgggcg

SEQ ID NO: 90579 - RNA, 20 nt, Human
gccccagggaggggaggggg

SEQ ID NO: 90580 - RNA, 24 nt, Human
uauccuggcucccaggcuagacuc

SEQ ID NO: 90581 - RNA, 22 nt, Human
ucaguggaagagugggaaaagg

SEQ ID NO: 90582 - RNA, 22 nt, Human
uccuggcucccaggcuagacuc

SEQ ID NO: 90583 - RNA, 18 nt, Human
ugaggcugagagaggggc

SEQ ID NO: 90584 - RNA, 20 nt, Human
uggaaugcuucggggcccuc

SEQ ID NO: 90585 - RNA, 19 nt, Human
aaaagccaguaacuugaga

SEQ ID NO: 90586 - RNA, 19 nt, Human
aaaagccaguaacuugaga

SEQ ID NO: 90587 - RNA, 23 nt, Human
aacugauguuugguaaguauaaa

SEQ ID NO: 90588 - RNA, 22 nt, Human
aagccgcgccccucagcccaga

SEQ ID NO: 90589 - RNA, 18 nt, Human
cagacccggcucguagcc

SEQ ID NO: 90590 - RNA, 23 nt, Human
caguggccccgcgccggggcagg

SEQ ID NO: 90591 - RNA, 22 nt, Human
ccccucagcccagacccggcuc

SEQ ID NO: 90592 - RNA, 25 nt, Human
cccgcgccggggcagggaaggaggc

SEQ ID NO: 90593 - RNA, 20 nt, Human
ccgccccacuucgcggcccc

SEQ ID NO: 90594 - RNA, 22 nt, Human
ccgccccacuucgcggccccag

SEQ ID NO: 90595 - RNA, 19 nt, Human
ccuuccguugccgggcugg

SEQ ID NO: 90596 - RNA, 22 nt, Human
cgccccacuucgcggccccagc

SEQ ID NO: 90597 - RNA, 19 nt, Human
cgccccucagcccagaccc

SEQ ID NO: 90598 - RNA, 18 nt, Human
cgcgaagccgcgccccuc

SEQ ID NO: 90599 - RNA, 19 nt, Human
cguugccgggcuggggucc

SEQ ID NO: 90600 - RNA, 19 nt, Human
cucguagcccacccggccg

SEQ ID NO: 90601 - RNA, 18 nt, Human
gcagggaaggaggcccug

SEQ ID NO: 90602 - RNA, 19 nt, Human
gcagggaaggaggcccuga

SEQ ID NO: 90603 - RNA, 20 nt, Human
gccuuccguugccgggcugg

SEQ ID NO: 90604 - RNA, 20 nt, Human
gcggcggcccggcggcggcg

SEQ ID NO: 90605 - RNA, 21 nt, Human
uagcccacccggccgccccag

SEQ ID NO: 90606 - RNA, 21 nt, Human
ugccgggcugggguccaccgc

SEQ ID NO: 90607 - RNA, 23 nt, Human
uucugauuguucugcuuacuguc

SEQ ID NO: 90608 - RNA, 19 nt, Human
aagaaagugaagaagcgag

SEQ ID NO: 90609 - RNA, 23 nt, Human
agaagccaagauucagcugggca

SEQ ID NO: 90610 - RNA, 20 nt, Human
agggagaaggccggacgaug

SEQ ID NO: 90611 - RNA, 20 nt, Human
cagaagccaagauucagcug

SEQ ID NO: 90612 - RNA, 19 nt, Human
cagcucagagggccacugg

SEQ ID NO: 90613 - RNA, 21 nt, Human
uggaaaagaaagugaagaagc

SEQ ID NO: 90614 - RNA, 19 nt, Human
uggcuuggguccggcagug

SEQ ID NO: 90615 - RNA, 18 nt, Human
ugugccggucaagaagga

SEQ ID NO: 90616 - RNA, 19 nt, Human
uucauucuucccagaucaa

SEQ ID NO: 90617 - RNA, 21 nt, Human
accgugaagggugugccaggg

SEQ ID NO: 90618 - RNA, 19 nt, Human
agacaggaucggcccuggg

SEQ ID NO: 90619 - RNA, 18 nt, Human
agggggaacuccaggcag

SEQ ID NO: 90620 - RNA, 21 nt, Human
auggaggcaucacaagugcua

SEQ ID NO: 90621 - RNA, 20 nt, Human
caaaggcacuggggcaccug

SEQ ID NO: 90622 - RNA, 19 nt, Human
caucacaagugcuaggcuu

SEQ ID NO: 90623 - RNA, 20 nt, Human
cauccucccagaacugagag

SEQ ID NO: 90624 - RNA, 18 nt, Human
ccacugccgcucccgggc

SEQ ID NO: 90625 - RNA, 24 nt, Human
ccuauagcaaggcggugagggggc

SEQ ID NO: 90626 - RNA, 20 nt, Human
cuccuggccuggcaggcugg

SEQ ID NO: 90627 - RNA, 22 nt, Human
cuggggcauguuuauuuccucc

SEQ ID NO: 90628 - RNA, 19 nt, Human
cuuggccgccuggguagca

SEQ ID NO: 90629 - RNA, 23 nt, Human
gacuccuauagcaaggcggugag

SEQ ID NO: 90630 - RNA, 21 nt, Human
gagucauccucccagaacuga

SEQ ID NO: 90631 - RNA, 20 nt, Human
gcagggccuggugggaaugg

SEQ ID NO: 90632 - RNA, 20 nt, Human
gggugugugcagggccuggu

SEQ ID NO: 90633 - RNA, 24 nt, Human
ggucuggagcuuggccgccugggu

SEQ ID NO: 90634 - RNA, 26 nt, Human
ggugacuccuauagcaaggcggugag

SEQ ID NO: 90635 - RNA, 18 nt, Human
ggugugugcagggccugg

SEQ ID NO: 90636 - RNA, 20 nt, Human
uagcaaggcggugagggggc

SEQ ID NO: 90637 - RNA, 19 nt, Human
uccacugccgcucccgggc

SEQ ID NO: 90638 - RNA, 19 nt, Human
uccggaguucugggagucg

SEQ ID NO: 90639 - RNA, 18 nt, Human
ugaagggugugccagggc

SEQ ID NO: 90640 - RNA, 21 nt, Human
ugacugcagacaggaucggcc

SEQ ID NO: 90641 - RNA, 20 nt, Human
ugagagaggcccucggggca

SEQ ID NO: 90642 - RNA, 19 nt, Human
ugagggggcgggucugggg

SEQ ID NO: 90643 - RNA, 23 nt, Human
uggagucauccucccagaacuga

SEQ ID NO: 90644 - RNA, 21 nt, Human
uggcacggucuggagcuuggc

SEQ ID NO: 90645 - RNA, 22 nt, Human
ugggagagaccgaggcuccagg

SEQ ID NO: 90646 - RNA, 20 nt, Human
ugggagucgguuccacugcc

SEQ ID NO: 90647 - RNA, 19 nt, Human
uggggcaccugggucuggc

SEQ ID NO: 90648 - RNA, 21 nt, Human
ugggugugugcagggccuggu

SEQ ID NO: 90649 - RNA, 23 nt, Human
ugggugugugcagggccuggugg

SEQ ID NO: 90650 - RNA, 24 nt, Human
ugugugcagggccuggugggaaug

SEQ ID NO: 90651 - RNA, 22 nt, Human
aaacugaccaccacugcccagu

SEQ ID NO: 90652 - RNA, 24 nt, Human
aagguaccgauggcuucccuuccu

SEQ ID NO: 90653 - RNA, 23 nt, Human
acaaaguaccugagaagguaccg

SEQ ID NO: 90654 - RNA, 18 nt, Human
agaaggaauuccucucau

SEQ ID NO: 90655 - RNA, 19 nt, Human
agacaagcuguccuccccc

SEQ ID NO: 90656 - RNA, 24 nt, Human
agaugggcugggcuacaggcagga

SEQ ID NO: 90657 - RNA, 18 nt, Human
agcaagggccuggagaag

SEQ ID NO: 90658 - RNA, 19 nt, Human
aggaaggcagggcaggacu

SEQ ID NO: 90659 - RNA, 26 nt, Human
aggaaggggcuggcgagaccccgggg

SEQ ID NO: 90660 - RNA, 21 nt, Human
aggagguggcggcgggagcgg

SEQ ID NO: 90661 - RNA, 24 nt, Human
aggcagggcaggacuuucaaaaca

SEQ ID NO: 90662 - RNA, 21 nt, Human
agguaaggcugggggcucugg

SEQ ID NO: 90663 - RNA, 21 nt, Human
agguaggggcagguccuccag

SEQ ID NO: 90664 - RNA, 23 nt, Human
agguaggggcagguccuccagca

SEQ ID NO: 90665 - RNA, 25 nt, Human
agguccuccagcagccuggcagucc

SEQ ID NO: 90666 - RNA, 31 nt, Human
auccgauuucuuccccacuuuacccuccaag

SEQ ID NO: 90667 - RNA, 20 nt, Human
auggagacggggagagugag

SEQ ID NO: 90668 - RNA, 18 nt, Human
augggcugggcuacaggc

SEQ ID NO: 90669 - RNA, 19 nt, Human
caagcuguccucccccugg

SEQ ID NO: 90670 - RNA, 25 nt, Human
caaucucuacaaucucagcaagggc

SEQ ID NO: 90671 - RNA, 22 nt, Human
caauguccggcuggagaaaaug

SEQ ID NO: 90672 - RNA, 27 nt, Human
cacuuuacccuccaaagcagaaucuca

SEQ ID NO: 90673 - RNA, 23 nt, Human
cagcagacaagcuguccuccccc

SEQ ID NO: 90674 - RNA, 25 nt, Human
cagcagguaggggcagguccuccag

SEQ ID NO: 90675 - RNA, 24 nt, Human
caggaaggggcuggcgagaccccg

SEQ ID NO: 90676 - RNA, 25 nt, Human
ccaaagcagaaucucaauacuuucc

SEQ ID NO: 90677 - RNA, 23 nt, Human
ccccuccagccacgccgccgccu

SEQ ID NO: 90678 - RNA, 20 nt, Human
cccuggcuggcauucuccuc

SEQ ID NO: 90679 - RNA, 20 nt, Human
ccgccgccuccaucuccucg

SEQ ID NO: 90680 - RNA, 20 nt, Human
ccggccccagagcaguggaa

SEQ ID NO: 90681 - RNA, 18 nt, Human
ccggggaggggagcggug

SEQ ID NO: 90682 - RNA, 26 nt, Human
ccuccagccacgccgccgccuccauc

SEQ ID NO: 90683 - RNA, 24 nt, Human
ccugaaaccucacacucucccggg

SEQ ID NO: 90684 - RNA, 26 nt, Human
cggggccugggagcgcugggcagggg

SEQ ID NO: 90685 - RNA, 22 nt, Human
cucacaccaagggccugaaccc

SEQ ID NO: 90686 - RNA, 23 nt, Human
cucccgggcccuggcuccgaccc

SEQ ID NO: 90687 - RNA, 18 nt, Human
cugcgcggcgccccugcc

SEQ ID NO: 90688 - RNA, 25 nt, Human
cuggaaggccuuaccuccaccaccc

SEQ ID NO: 90689 - RNA, 26 nt, Human
cuuuacccuccaaagcagaaucucaa

SEQ ID NO: 90690 - RNA, 20 nt, Human
gaaggccuuaccuccaccac

SEQ ID NO: 90691 - RNA, 24 nt, Human
gagcggcagcgggcugagcugaug

SEQ ID NO: 90692 - RNA, 21 nt, Human
gagguggcggcgggagcgggc

SEQ ID NO: 90693 - RNA, 23 nt, Human
gauuucuuccccacuuuacccuc

SEQ ID NO: 90694 - RNA, 21 nt, Human
gccugggagcgcugggcaggg

SEQ ID NO: 90695 - RNA, 21 nt, Human
gcgcggcgacgcguggcgggg

SEQ ID NO: 90696 - RNA, 24 nt, Human
gcgcugggcagggggagcccuggc

SEQ ID NO: 90697 - RNA, 21 nt, Human
gcggcugcaggaaggggcugg

SEQ ID NO: 90698 - RNA, 19 nt, Human
gcguggcggggccugggag

SEQ ID NO: 90699 - RNA, 18 nt, Human
gcuggacaggacacaggg

SEQ ID NO: 90700 - RNA, 23 nt, Human
gcuggacaggacacaggggaggu

SEQ ID NO: 90701 - RNA, 18 nt, Human
ggacugggcgcggcgccg

SEQ ID NO: 90702 - RNA, 22 nt, Human
ggagacggggagagugaggggg

SEQ ID NO: 90703 - RNA, 21 nt, Human
ggcagggggagcccuggccgc

SEQ ID NO: 90704 - RNA, 19 nt, Human
ggcgccggccccagagcag

SEQ ID NO: 90705 - RNA, 21 nt, Human
ggcuacaggcaggaggaaggc

SEQ ID NO: 90706 - RNA, 22 nt, Human
gggagagugaggggguaggggg

SEQ ID NO: 90707 - RNA, 24 nt, Human
gggagcgcugggcagggggagccc

SEQ ID NO: 90708 - RNA, 19 nt, Human
gggcagguccuccagcagc

SEQ ID NO: 90709 - RNA, 20 nt, Human
gggcauccccuacccgggca

SEQ ID NO: 90710 - RNA, 20 nt, Human
gggcgcggcgccggccccag

SEQ ID NO: 90711 - RNA, 18 nt, Human
gggcuugcggcccgaagc

SEQ ID NO: 90712 - RNA, 20 nt, Human
ggggaggggagcgguggggc

SEQ ID NO: 90713 - RNA, 23 nt, Human
gguccucuggggcuuucagagag

SEQ ID NO: 90714 - RNA, 24 nt, Human
gguccucuggggcuuucagagagg

SEQ ID NO: 90715 - RNA, 19 nt, Human
gguggcggcgggagcgggc

SEQ ID NO: 90716 - RNA, 18 nt, Human
gugaggggguaggggggc

SEQ ID NO: 90717 - RNA, 21 nt, Human
uacaggcaggaggaaggcagg

SEQ ID NO: 90718 - RNA, 25 nt, Human
uaggggcagguccuccagcagccug

SEQ ID NO: 90719 - RNA, 24 nt, Human
ucaauacuuuccugaaaccucaca

SEQ ID NO: 90720 - RNA, 19 nt, Human
ucaaucucuacaaucucag

SEQ ID NO: 90721 - RNA, 19 nt, Human
ucacugggcauccccuacc

SEQ ID NO: 90722 - RNA, 18 nt, Human
ucaguuccucuaaaagcu

SEQ ID NO: 90723 - RNA, 18 nt, Human
uccagagcacucaaucuc

SEQ ID NO: 90724 - RNA, 22 nt, Human
uccccacuuuacccuccaaagc

SEQ ID NO: 90725 - RNA, 20 nt, Human
uccuccagcagccuggcagu

SEQ ID NO: 90726 - RNA, 20 nt, Human
uccuggucgggaccauggag

SEQ ID NO: 90727 - RNA, 19 nt, Human
ucucccgggcccuggcugg

SEQ ID NO: 90728 - RNA, 22 nt, Human
ucuuuuuuuuuuuuugcaguaa

SEQ ID NO: 90729 - RNA, 19 nt, Human
ugagcugaugcgggcgacg

SEQ ID NO: 90730 - RNA, 21 nt, Human
ugcacauucacugggcauccc

SEQ ID NO: 90731 - RNA, 25 nt, Human
ugcaggaaggggcuggcgagacccc

SEQ ID NO: 90732 - RNA, 19 nt, Human
uggaggggacagguugaga

SEQ ID NO: 90733 - RNA, 21 nt, Human
uggaggggacagguugagagg

SEQ ID NO: 90734 - RNA, 23 nt, Human
ugggagccugacgaugcagcagg

SEQ ID NO: 90735 - RNA, 18 nt, Human
ugggcuacaggcaggagg

SEQ ID NO: 90736 - RNA, 19 nt, Human
uguccucccccugggcucu

SEQ ID NO: 90737 - RNA, 19 nt, Human
uuaaagcuucaaggcuccc

SEQ ID NO: 90738 - RNA, 21 nt, Human
uuccccacuuuacccuccaaa

SEQ ID NO: 90739 - RNA, 24 nt, Human
uucuuccccacuuuacccuccaaa

SEQ ID NO: 90740 - RNA, 24 nt, Human
uuuagaugggcugggcuacaggca

SEQ ID NO: 90741 - RNA, 23 nt, Human
uuuucuuuuuuuuuuuuugcagu

SEQ ID NO: 90742 - RNA, 23 nt, Human
uuuuuucuuuuuuuuuuuuuggg

SEQ ID NO: 90743 - RNA, 22 nt, Human
accuggggucaccuggcuuccu

SEQ ID NO: 90744 - RNA, 23 nt, Human
agggaagggaggucuccggcagg

SEQ ID NO: 90745 - RNA, 20 nt, Human
agggaggucuccggcagggg

SEQ ID NO: 90746 - RNA, 21 nt, Human
caccugccccuccccgcucug

SEQ ID NO: 90747 - RNA, 19 nt, Human
cagccuccauucccccacc

SEQ ID NO: 90748 - RNA, 24 nt, Human
cagggaccuggucuagccaguccu

SEQ ID NO: 90749 - RNA, 24 nt, Human
cauuugccaucuucugauuggggg

SEQ ID NO: 90750 - RNA, 22 nt, Human
ccacaggggcugcaagaccucu

SEQ ID NO: 90751 - RNA, 22 nt, Human
ccauucccccaccugccccucc

SEQ ID NO: 90752 - RNA, 19 nt, Human
cccaccugccccuccccgc

SEQ ID NO: 90753 - RNA, 19 nt, Human
cccccaccugccccucccc

SEQ ID NO: 90754 - RNA, 18 nt, Human
ccccugugccccucgcuc

SEQ ID NO: 90755 - RNA, 20 nt, Human
cccugggguccugagccagu

SEQ ID NO: 90756 - RNA, 23 nt, Human
ccuccacacacagccucccaccu

SEQ ID NO: 90757 - RNA, 18 nt, Human
ccugcagccuccauuccc

SEQ ID NO: 90758 - RNA, 24 nt, Human
ccugcagccuccauucccccaccu

SEQ ID NO: 90759 - RNA, 21 nt, Human
ccuguuaggaccuuuguccca

SEQ ID NO: 90760 - RNA, 25 nt, Human
cgcuccacaccugggcaggucuaaa

SEQ ID NO: 90761 - RNA, 20 nt, Human
cggcagggguggggagugac

SEQ ID NO: 90762 - RNA, 22 nt, Human
cuccacacacagccucccaccu

SEQ ID NO: 90763 - RNA, 20 nt, Human
cucuggucagcauggcgugg

SEQ ID NO: 90764 - RNA, 19 nt, Human
cuuggucugggcucugggc

SEQ ID NO: 90765 - RNA, 21 nt, Human
gagcagcaguccgggugcggg

SEQ ID NO: 90766 - RNA, 18 nt, Human
gcauggcgugggugggga

SEQ ID NO: 90767 - RNA, 19 nt, Human
gcuuggucugggcucuggg

SEQ ID NO: 90768 - RNA, 20 nt, Human
ggacccgcaagggaggggca

SEQ ID NO: 90769 - RNA, 20 nt, Human
ggaccucggcgggggcaucc

SEQ ID NO: 90770 - RNA, 22 nt, Human
ggcagggagcagcaguccgggu

SEQ ID NO: 90771 - RNA, 23 nt, Human
gggaccuggucuagccaguccug

SEQ ID NO: 90772 - RNA, 22 nt, Human
gggagcagcaguccgggugcgg

SEQ ID NO: 90773 - RNA, 24 nt, Human
ggggaucgggggaccucggcgggg

SEQ ID NO: 90774 - RNA, 21 nt, Human
ggggcagggagcagcaguccg

SEQ ID NO: 90775 - RNA, 23 nt, Human
gggggaccucggcgggggcaucc

SEQ ID NO: 90776 - RNA, 21 nt, Human
gguguggcugcccaggagaga

SEQ ID NO: 90777 - RNA, 20 nt, Human
uccacacacagccucccacc

SEQ ID NO: 90778 - RNA, 20 nt, Human
uccacaggggcugcaagacc

SEQ ID NO: 90779 - RNA, 20 nt, Human
uccugagccagugacuccug

SEQ ID NO: 90780 - RNA, 24 nt, Human
uccugagccagugacuccuguuag

SEQ ID NO: 90781 - RNA, 23 nt, Human
ucugugguguggcugcccaggag

SEQ ID NO: 90782 - RNA, 21 nt, Human
uggaaggugccucuggagaug

SEQ ID NO: 90783 - RNA, 22 nt, Human
uggccuccacacacagccuccc

SEQ ID NO: 90784 - RNA, 18 nt, Human
ugggcagcuggccugcgu

SEQ ID NO: 90785 - RNA, 22 nt, Human
ugggcucugggcagcuggccug

SEQ ID NO: 90786 - RNA, 21 nt, Human
uggggucaccuggcuuccugg

SEQ ID NO: 90787 - RNA, 22 nt, Human
ugguggaccggcagggaccugg

SEQ ID NO: 90788 - RNA, 24 nt, Human
ugucccagaguccugccugcgggg

SEQ ID NO: 90789 - RNA, 25 nt, Human
uguguugugccuggggagacuguug

SEQ ID NO: 90790 - RNA, 25 nt, Human
uuacagauuuuuuuuucaaaggcuu

SEQ ID NO: 90791 - RNA, 24 nt, Human
uucaguuucugagguuaggaugcc

SEQ ID NO: 90792 - RNA, 18 nt, Human
uuccaggauggccuccac

SEQ ID NO: 90793 - RNA, 21 nt, Human
aaaaacaaguuccccagagaa

SEQ ID NO: 90794 - RNA, 19 nt, Human
aaaaugcuucuaaaaaaug

SEQ ID NO: 90795 - RNA, 21 nt, Human
aaacaaaaaugcauacacagc

SEQ ID NO: 90796 - RNA, 20 nt, Human
aaacaaaacggaagcacaaa

SEQ ID NO: 90797 - RNA, 22 nt, Human
aaacaaaacggaagcacaaaca

SEQ ID NO: 90798 - RNA, 24 nt, Human
aaacaaguuccccagagaagcugg

SEQ ID NO: 90799 - RNA, 21 nt, Human
aaacaauguaaaugaauccac

SEQ ID NO: 90800 - RNA, 18 nt, Human
aaacggaagcacaaacac

SEQ ID NO: 90801 - RNA, 23 nt, Human
aacugaccuucccuuaaggccug

SEQ ID NO: 90802 - RNA, 23 nt, Human
aagaaagccgagugauggaauca

SEQ ID NO: 90803 - RNA, 18 nt, Human
aagaauccuacauucagc

SEQ ID NO: 90804 - RNA, 18 nt, Human
aagcuuuaagagcugcuc

SEQ ID NO: 90805 - RNA, 22 nt, Human
aaggagacaaugagagaaggga

SEQ ID NO: 90806 - RNA, 21 nt, Human
acaaaguaaugaccauaauac

SEQ ID NO: 90807 - RNA, 23 nt, Human
acaauagaaagauacugccugga

SEQ ID NO: 90808 - RNA, 19 nt, Human
acccaaaaaaaaaaaaaaa

SEQ ID NO: 90809 - RNA, 19 nt, Human
acccaaaaaaaaaaaaaaa

SEQ ID NO: 90810 - RNA, 18 nt, Human
acgacagccgaauccaaa

SEQ ID NO: 90811 - RNA, 23 nt, Human
acggaagcacaaacaccuuucuu

SEQ ID NO: 90812 - RNA, 20 nt, Human
agagaacacaaaagaaucaa

SEQ ID NO: 90813 - RNA, 24 nt, Human
agcagaaacaaaacggaagcacaa

SEQ ID NO: 90814 - RNA, 20 nt, Human
agcgcccgcgcccgcgcccc

SEQ ID NO: 90815 - RNA, 22 nt, Human
aggcagagaacacaaaagaauc

SEQ ID NO: 90816 - RNA, 23 nt, Human
aguaccagaagugcuuggaagga

SEQ ID NO: 90817 - RNA, 20 nt, Human
aguguaaacaauguaaauga

SEQ ID NO: 90818 - RNA, 21 nt, Human
aucucaguccaguuccuccag

SEQ ID NO: 90819 - RNA, 22 nt, Human
augaaugugucuuccauuuagc

SEQ ID NO: 90820 - RNA, 23 nt, Human
caaaaaggaccugaaaaguccca

SEQ ID NO: 90821 - RNA, 22 nt, Human
caacaguauuccaugaggcuag

SEQ ID NO: 90822 - RNA, 22 nt, Human
caaugggucaccuggaacaaac

SEQ ID NO: 90823 - RNA, 20 nt, Human
cacagcucaaugggucaccu

SEQ ID NO: 90824 - RNA, 22 nt, Human
cacgaaagaacagguagcccca

SEQ ID NO: 90825 - RNA, 18 nt, Human
cacuuccuuugcccucca

SEQ ID NO: 90826 - RNA, 19 nt, Human
cagaaacaaaacggaagca

SEQ ID NO: 90827 - RNA, 25 nt, Human
cagagaacacaaaagaaucaagaca

SEQ ID NO: 90828 - RNA, 19 nt, Human
cagguuacaauagaaagau

SEQ ID NO: 90829 - RNA, 19 nt, Human
cauacacagcucaaugggu

SEQ ID NO: 90830 - RNA, 24 nt, Human
ccaaaaaaaaaaaaaaaaaaagaa

SEQ ID NO: 90831 - RNA, 21 nt, Human
cccagcccggcuacgggcgcg

SEQ ID NO: 90832 - RNA, 28 nt, Human
ccccagagaagcuggcacuuccuuugcc

SEQ ID NO: 90833 - RNA, 18 nt, Human
ccccgggggggggggcgg

SEQ ID NO: 90834 - RNA, 21 nt, Human
ccccgggggggggggcggugu

SEQ ID NO: 90835 - RNA, 21 nt, Human
cccgcgcccgcgccccaggaa

SEQ ID NO: 90836 - RNA, 18 nt, Human
ccgcgcccgcgccccagg

SEQ ID NO: 90837 - RNA, 18 nt, Human
ccggcuacgggcgcgagg

SEQ ID NO: 90838 - RNA, 20 nt, Human
cgacagccgaauccaaagcu

SEQ ID NO: 90839 - RNA, 18 nt, Human
cgccgaccaagagggccc

SEQ ID NO: 90840 - RNA, 20 nt, Human
cggcuacgggcgcgaggcag

SEQ ID NO: 90841 - RNA, 18 nt, Human
cuaaaucaguagcagggc

SEQ ID NO: 90842 - RNA, 18 nt, Human
cuggcccagcccggcuac

SEQ ID NO: 90843 - RNA, 25 nt, Human
cuguccgccccuucccugccccacg

SEQ ID NO: 90844 - RNA, 18 nt, Human
cuuauaguacaauccugc

SEQ ID NO: 90845 - RNA, 23 nt, Human
cuuauuuaucauaugaccacacg

SEQ ID NO: 90846 - RNA, 22 nt, Human
cuucccuuaaggccuggucaua

SEQ ID NO: 90847 - RNA, 22 nt, Human
cuugagacacgcuccuccaccu

SEQ ID NO: 90848 - RNA, 24 nt, Human
gagagaagggauaaaagcaaacau

SEQ ID NO: 90849 - RNA, 23 nt, Human
gaugaucaaagcagucagaggga

SEQ ID NO: 90850 - RNA, 31 nt, Human
gcagaauuacccaaaaaaaaaaaaaaaaaaa

SEQ ID NO: 90851 - RNA, 21 nt, Human
gcagagaacacaaaagaauca

SEQ ID NO: 90852 - RNA, 23 nt, Human
gcccguuaucuccacgacagccg

SEQ ID NO: 90853 - RNA, 20 nt, Human
gcgcgggagugacgucuccu

SEQ ID NO: 90854 - RNA, 19 nt, Human
ggagacaaugagagaaggg

SEQ ID NO: 90855 - RNA, 23 nt, Human
ggcgcgaggcaggccgggaagaa

SEQ ID NO: 90856 - RNA, 18 nt, Human
ggguacaaaguaaugacc

SEQ ID NO: 90857 - RNA, 18 nt, Human
gguacuaagaugggaagg

SEQ ID NO: 90858 - RNA, 21 nt, Human
guagcauagccucuuuaggug

SEQ ID NO: 90859 - RNA, 21 nt, Human
uaaaaaaugcagauguuuaua

SEQ ID NO: 90860 - RNA, 22 nt, Human
uacacacauaccugccaauaua

SEQ ID NO: 90861 - RNA, 21 nt, Human
uacccaaaaaaaaaaaaaaaa

SEQ ID NO: 90862 - RNA, 23 nt, Human
uacuaagaugggaaggagacaau

SEQ ID NO: 90863 - RNA, 21 nt, Human
uagcagggcuucauggcuagg

SEQ ID NO: 90864 - RNA, 23 nt, Human
uagcaguaacagaaaauuacaaa

SEQ ID NO: 90865 - RNA, 22 nt, Human
uauaguacaauccugccauaaa

SEQ ID NO: 90866 - RNA, 22 nt, Human
uaucacaguuacacuugaguuc

SEQ ID NO: 90867 - RNA, 19 nt, Human
uaucuggagauagguagga

SEQ ID NO: 90868 - RNA, 23 nt, Human
uaucuuucccaaugaguuacacu

SEQ ID NO: 90869 - RNA, 25 nt, Human
ucaccuggaacaaacuugcuugacu

SEQ ID NO: 90870 - RNA, 23 nt, Human
ucacucucucaccaacauuaaau

SEQ ID NO: 90871 - RNA, 19 nt, Human
ucccgguuccccaggacuc

SEQ ID NO: 90872 - RNA, 24 nt, Human
uccgaccaaauagcuguugcuacu

SEQ ID NO: 90873 - RNA, 18 nt, Human
ucuccuaacgccagcgcc

SEQ ID NO: 90874 - RNA, 19 nt, Human
ugagagaagggauaaaagc

SEQ ID NO: 90875 - RNA, 23 nt, Human
ugagauuacacacauaccugcca

SEQ ID NO: 90876 - RNA, 18 nt, Human
ugaguucuuggcaggcag

SEQ ID NO: 90877 - RNA, 25 nt, Human
ugccauaaaguauuaaagcacaaga

SEQ ID NO: 90878 - RNA, 20 nt, Human
ugcuucuaaaaaaugcagag

SEQ ID NO: 90879 - RNA, 19 nt, Human
ugcuugacuauauuacuga

SEQ ID NO: 90880 - RNA, 19 nt, Human
uggcagaauuacccaaaaa

SEQ ID NO: 90881 - RNA, 26 nt, Human
uggcagaauuacccaaaaaaaaaaaa

SEQ ID NO: 90882 - RNA, 19 nt, Human
uggcuucuggccuccaucc

SEQ ID NO: 90883 - RNA, 23 nt, Human
ugggaaggagacaaugagagaag

SEQ ID NO: 90884 - RNA, 20 nt, Human
ugucuuuccacauacugaag

SEQ ID NO: 90885 - RNA, 25 nt, Human
ugugaaaggugacccucauuucguu

SEQ ID NO: 90886 - RNA, 22 nt, Human
uucuuggcuucuggccuccauc

SEQ ID NO: 90887 - RNA, 24 nt, Human
uuuccacauacugaagaauccuac

SEQ ID NO: 90888 - RNA, 19 nt, Human
uuuuuugacauguaucugg

SEQ ID NO: 90889 - RNA, 21 nt, Human
agaaaggaaucuaacgagugc

SEQ ID NO: 90890 - RNA, 24 nt, Human
agcagaaaacgaguuuucuaagaa

SEQ ID NO: 90891 - RNA, 19 nt, Human
ccgggugaacaaaaaccac

SEQ ID NO: 90892 - RNA, 20 nt, Human
cugguuagcaugaaacagag

SEQ ID NO: 90893 - RNA, 23 nt, Human
ggaaauguggagagacugagagc

SEQ ID NO: 90894 - RNA, 22 nt, Human
ggagggaagggacgagggaagg

SEQ ID NO: 90895 - RNA, 20 nt, Human
ggggagggaagggacgaggg

SEQ ID NO: 90896 - RNA, 20 nt, Human
ucggggagggaagggacgag

SEQ ID NO: 90897 - RNA, 18 nt, Human
ugaacaaaaaccacacgg

SEQ ID NO: 90898 - RNA, 18 nt, Human
ugagagcgagguguggca

SEQ ID NO: 90899 - RNA, 19 nt, Human
uucucagggagagauggcg

SEQ ID NO: 90900 - RNA, 26 nt, Human
aagacacagacacacauaagacccac

SEQ ID NO: 90901 - RNA, 24 nt, Human
aaggagaagacacagacacacaua

SEQ ID NO: 90902 - RNA, 23 nt, Human
acagccuugggggugagaggcca

SEQ ID NO: 90903 - RNA, 19 nt, Human
acaggagagaaccacagac

SEQ ID NO: 90904 - RNA, 19 nt, Human
agaagacacagacacacau

SEQ ID NO: 90905 - RNA, 22 nt, Human
agacacagacacacauaagacc

SEQ ID NO: 90906 - RNA, 25 nt, Human
agcagccgcccuccucggcccccca

SEQ ID NO: 90907 - RNA, 19 nt, Human
aggaaagguggggaggccc

SEQ ID NO: 90908 - RNA, 18 nt, Human
aggagcagaacaggccca

SEQ ID NO: 90909 - RNA, 18 nt, Human
aggagcagaacaggccca

SEQ ID NO: 90910 - RNA, 20 nt, Human
aggcagggagugggcccugu

SEQ ID NO: 90911 - RNA, 21 nt, Human
aggcagggagugggcccugug

SEQ ID NO: 90912 - RNA, 22 nt, Human
aggcagggagugggcccuguga

SEQ ID NO: 90913 - RNA, 23 nt, Human
aggccagagccaagggcccugca

SEQ ID NO: 90914 - RNA, 21 nt, Human
agggucuaggaaggcucaggg

SEQ ID NO: 90915 - RNA, 22 nt, Human
agugggcacucugucccgggac

SEQ ID NO: 90916 - RNA, 20 nt, Human
cagcgggacagaccugagcc

SEQ ID NO: 90917 - RNA, 19 nt, Human
cagcuucaccauagacacc

SEQ ID NO: 90918 - RNA, 21 nt, Human
caggagagaaccacagacacc

SEQ ID NO: 90919 - RNA, 18 nt, Human
cagggguggggcgugaca

SEQ ID NO: 90920 - RNA, 24 nt, Human
caucugagaguccaagggucuagg

SEQ ID NO: 90921 - RNA, 18 nt, Human
ccaagagggaggcauagg

SEQ ID NO: 90922 - RNA, 24 nt, Human
ccaggaaagguggggaggcccaga

SEQ ID NO: 90923 - RNA, 19 nt, Human
cccaagagggaggcauagg

SEQ ID NO: 90924 - RNA, 23 nt, Human
cccacaugaaacagggguggggc

SEQ ID NO: 90925 - RNA, 22 nt, Human
cccagcuucaccauagacacca

SEQ ID NO: 90926 - RNA, 19 nt, Human
cccauaggcucggcagggc

SEQ ID NO: 90927 - RNA, 20 nt, Human
cccuccucggccccccaaga

SEQ ID NO: 90928 - RNA, 22 nt, Human
ccugcaucugagaguccaaggg

SEQ ID NO: 90929 - RNA, 24 nt, Human
cgcacacguguuagugcccacaug

SEQ ID NO: 90930 - RNA, 18 nt, Human
gagaggccagagccaagg

SEQ ID NO: 90931 - RNA, 20 nt, Human
gcagggccagagacagccuu

SEQ ID NO: 90932 - RNA, 19 nt, Human
gccagagacagccuugggg

SEQ ID NO: 90933 - RNA, 25 nt, Human
gccagagccaagggcccugcaucug

SEQ ID NO: 90934 - RNA, 21 nt, Human
gcccagggcagcgggacagac

SEQ ID NO: 90935 - RNA, 20 nt, Human
gcccagguccucaggagacc

SEQ ID NO: 90936 - RNA, 20 nt, Human
gcccaugagaacuugagugu

SEQ ID NO: 90937 - RNA, 18 nt, Human
ggaggcauaggcagggag

SEQ ID NO: 90938 - RNA, 21 nt, Human
ggcccagguccucaggagacc

SEQ ID NO: 90939 - RNA, 22 nt, Human
ggugagaggccagagccaaggg

SEQ ID NO: 90940 - RNA, 20 nt, Human
ucagggugggagggcccagc

SEQ ID NO: 90941 - RNA, 21 nt, Human
uccaagggucuaggaaggcuc

SEQ ID NO: 90942 - RNA, 21 nt, Human
uccagggcgaguguuuaagga

SEQ ID NO: 90943 - RNA, 22 nt, Human
ucucaugacagagcagccgccc

SEQ ID NO: 90944 - RNA, 21 nt, Human
ucuccuaggagcagaacaggc

SEQ ID NO: 90945 - RNA, 19 nt, Human
ugacagagcagccgcccuc

SEQ ID NO: 90946 - RNA, 22 nt, Human
ugaggagacacgaggggcacag

SEQ ID NO: 90947 - RNA, 28 nt, Human
ugcccagggcagcgggacagaccugagc

SEQ ID NO: 90948 - RNA, 26 nt, Human
ugcccgccaggaacgcacacguggug

SEQ ID NO: 90949 - RNA, 22 nt, Human
uggagaccccaggaaagguggg

SEQ ID NO: 90950 - RNA, 23 nt, Human
uggcuuggggagaaggugcaggu

SEQ ID NO: 90951 - RNA, 21 nt, Human
ugggagggcccagcuucacca

SEQ ID NO: 90952 - RNA, 21 nt, Human
uggggaggcccagagcagcaa

SEQ ID NO: 90953 - RNA, 21 nt, Human
ugucccgggacucccauaggc

SEQ ID NO: 90954 - RNA, 19 nt, Human
uucuaagugaaaaaggccc

SEQ ID NO: 90955 - RNA, 24 nt, Human
acaauagaaaauauuauuuccaaa

SEQ ID NO: 90956 - RNA, 22 nt, Human
auauuguccucuuuuuucugua

SEQ ID NO: 90957 - RNA, 22 nt, Human
cacacagggcaaacagaucacc

SEQ ID NO: 90958 - RNA, 22 nt, Human
uaacacaauagaaaauauuauu

SEQ ID NO: 90959 - RNA, 22 nt, Human
uccacuccaccgaugacgcacg

SEQ ID NO: 90960 - RNA, 21 nt, Human
ucccuguaccuugaaucccag

SEQ ID NO: 90961 - RNA, 18 nt, Human
ucucucagucagcagggu

SEQ ID NO: 90962 - RNA, 18 nt, Human
uuuuuuuuuuuuuuuuug

SEQ ID NO: 90963 - RNA, 22 nt, Human
uuuuuuuuuuuuuuuuuggcuu

SEQ ID NO: 90964 - RNA, 22 nt, Human
uuuuuuuuuuuuuuuuuuuggc

SEQ ID NO: 90965 - RNA, 24 nt, Human
aagcauucuggcacaaaugaaaug

SEQ ID NO: 90966 - RNA, 19 nt, Human
aaggcacucaguuaacaag

SEQ ID NO: 90967 - RNA, 21 nt, Human
aauguuuaaaauaauaacauu

SEQ ID NO: 90968 - RNA, 21 nt, Human
acaggcaucaaccagaagccu

SEQ ID NO: 90969 - RNA, 22 nt, Human
acccugggugccaggguugggg

SEQ ID NO: 90970 - RNA, 23 nt, Human
agaaaacaaguucagccuuaggc

SEQ ID NO: 90971 - RNA, 23 nt, Human
agaggaaggagcgugugcaggag

SEQ ID NO: 90972 - RNA, 21 nt, Human
aggaagacauuugcuuugaag

SEQ ID NO: 90973 - RNA, 21 nt, Human
aggaguccaggaggaggggag

SEQ ID NO: 90974 - RNA, 24 nt, Human
aggaguccaggaggaggggaggaa

SEQ ID NO: 90975 - RNA, 24 nt, Human
aggcaggacagggcucauuuugaa

SEQ ID NO: 90976 - RNA, 23 nt, Human
aggcugccaacacaugucaccca

SEQ ID NO: 90977 - RNA, 19 nt, Human
agggcacugaugcucccuc

SEQ ID NO: 90978 - RNA, 18 nt, Human
agugaaauaucaaagcug

SEQ ID NO: 90979 - RNA, 20 nt, Human
augaaauggaacugccucuu

SEQ ID NO: 90980 - RNA, 25 nt, Human
caaaaggcacucaguuaacaagcac

SEQ ID NO: 90981 - RNA, 28 nt, Human
caaacaaacugagacgaacauccucccg

SEQ ID NO: 90982 - RNA, 18 nt, Human
caaaggcuucaacauaca

SEQ ID NO: 90983 - RNA, 20 nt, Human
cacaaacaaacugagacgaa

SEQ ID NO: 90984 - RNA, 23 nt, Human
cacagcaucugacaauuuacaaa

SEQ ID NO: 90985 - RNA, 19 nt, Human
cacaugugaucccagcugg

SEQ ID NO: 90986 - RNA, 23 nt, Human
caggaagacauuugcuuugaagg

SEQ ID NO: 90987 - RNA, 27 nt, Human
caugucacccagccucuggggcccaaa

SEQ ID NO: 90988 - RNA, 22 nt, Human
ccagaaaacaaguucagccuua

SEQ ID NO: 90989 - RNA, 19 nt, Human
ccaugggccccacugaccc

SEQ ID NO: 90990 - RNA, 20 nt, Human
cccuucccacccugggugcc

SEQ ID NO: 90991 - RNA, 18 nt, Human
ccgggccucuccaccaaa

SEQ ID NO: 90992 - RNA, 28 nt, Human
ccucuugugggucuauuucagaaguugg

SEQ ID NO: 90993 - RNA, 22 nt, Human
cgccaaaagcccaguggcacag

SEQ ID NO: 90994 - RNA, 20 nt, Human
gaagaagucaauggcaaaag

SEQ ID NO: 90995 - RNA, 24 nt, Human
ggaggggcuguccuuguacauccu

SEQ ID NO: 90996 - RNA, 19 nt, Human
ggcaggcuaagguguagcc

SEQ ID NO: 90997 - RNA, 25 nt, Human
ggggagcaggcauggcaucugcgac

SEQ ID NO: 90998 - RNA, 21 nt, Human
ggguugggggugcuguaaguc

SEQ ID NO: 90999 - RNA, 20 nt, Human
guucaguucacaggcaucaa

SEQ ID NO: 91000 - RNA, 23 nt, Human
uaaaaguccacaugugaucccag

SEQ ID NO: 91001 - RNA, 26 nt, Human
uaaaauaauaacauuugcacagcauc

SEQ ID NO: 91002 - RNA, 21 nt, Human
uaacaagcacauccaugggcc

SEQ ID NO: 91003 - RNA, 24 nt, Human
uaacugaagaguaacugauuucac

SEQ ID NO: 91004 - RNA, 20 nt, Human
uaacuguacauccuaaagca

SEQ ID NO: 91005 - RNA, 24 nt, Human
uauaagaguauaaacuuaagacag

SEQ ID NO: 91006 - RNA, 23 nt, Human
ucacuggaaauaaaaguccacag

SEQ ID NO: 91007 - RNA, 20 nt, Human
ucagaguucaguucacaggc

SEQ ID NO: 91008 - RNA, 23 nt, Human
uccaaaaaugucuuaaacaccgg

SEQ ID NO: 91009 - RNA, 24 nt, Human
uccaggaagacauuugcuuugaag

SEQ ID NO: 91010 - RNA, 18 nt, Human
uccaggaggaggggagga

SEQ ID NO: 91011 - RNA, 23 nt, Human
uccauaacuguacauccuaaagc

SEQ ID NO: 91012 - RNA, 21 nt, Human
ucccagcuggaguguggucau

SEQ ID NO: 91013 - RNA, 24 nt, Human
ucccuccucugccagaauaaaggu

SEQ ID NO: 91014 - RNA, 19 nt, Human
ucugacaauuuacaaaggc

SEQ ID NO: 91015 - RNA, 18 nt, Human
ucuggcacaaaugaaaug

SEQ ID NO: 91016 - RNA, 19 nt, Human
ugacaauuuacaaaggcuu

SEQ ID NO: 91017 - RNA, 19 nt, Human
ugaccuauaaauauuaacc

SEQ ID NO: 91018 - RNA, 19 nt, Human
ugaccuauaaauauuaacc

SEQ ID NO: 91019 - RNA, 23 nt, Human
ugagaggccgggccucuccacca

SEQ ID NO: 91020 - RNA, 19 nt, Human
ugccagaauaaaggugacc

SEQ ID NO: 91021 - RNA, 20 nt, Human
ugcggguaggccuugugcag

SEQ ID NO: 91022 - RNA, 20 nt, Human
uggcaucugcggguaggccu

SEQ ID NO: 91023 - RNA, 19 nt, Human
uggccuggauggaugaguc

SEQ ID NO: 91024 - RNA, 20 nt, Human
ugggaaaagucuauccugga

SEQ ID NO: 91025 - RNA, 19 nt, Human
ugggaagaagucaauggca

SEQ ID NO: 91026 - RNA, 19 nt, Human
uggggaaagcugcuuccug

SEQ ID NO: 91027 - RNA, 19 nt, Human
ugugcagaacgccaaaagc

SEQ ID NO: 91028 - RNA, 22 nt, Human
uguucccagaaaacaaguucag

SEQ ID NO: 91029 - RNA, 24 nt, Human
uucuggcacaaaugaaauggaacu

SEQ ID NO: 91030 - RNA, 19 nt, Human
uugggggugcuguaaguga

SEQ ID NO: 91031 - RNA, 21 nt, Human
aaaagacugcccagaguggca

SEQ ID NO: 91032 - RNA, 24 nt, Human
aacaacauuguuuaaaucuucaau

SEQ ID NO: 91033 - RNA, 20 nt, Human
aaccccaugaacaggaaagc

SEQ ID NO: 91034 - RNA, 25 nt, Human
aagaagcuuggcaccaacuuugugc

SEQ ID NO: 91035 - RNA, 19 nt, Human
aauugcuucugucucuucc

SEQ ID NO: 91036 - RNA, 22 nt, Human
accauggugggggguguccaac

SEQ ID NO: 91037 - RNA, 19 nt, Human
agacuucgcagccgcugag

SEQ ID NO: 91038 - RNA, 19 nt, Human
agcccugaguggaagcagc

SEQ ID NO: 91039 - RNA, 19 nt, Human
aggaagaaaauauuucagg

SEQ ID NO: 91040 - RNA, 20 nt, Human
aggcaguggacuccugauag

SEQ ID NO: 91041 - RNA, 24 nt, Human
agucaaaucccacacugcacauac

SEQ ID NO: 91042 - RNA, 20 nt, Human
augcccuauuucuuuggagg

SEQ ID NO: 91043 - RNA, 22 nt, Human
auggagcagccaccacaagccc

SEQ ID NO: 91044 - RNA, 20 nt, Human
caaaagacugcccagagugg

SEQ ID NO: 91045 - RNA, 24 nt, Human
caaggccagacacuguagcccaug

SEQ ID NO: 91046 - RNA, 24 nt, Human
cacccuucagcugcuugggaggca

SEQ ID NO: 91047 - RNA, 25 nt, Human
cacugacacaaaagacugcccagag

SEQ ID NO: 91048 - RNA, 24 nt, Human
cagaagggcaaucaggauucaggc

SEQ ID NO: 91049 - RNA, 20 nt, Human
cagaggagaagcccugagug

SEQ ID NO: 91050 - RNA, 20 nt, Human
cagcugcguguguccucuca

SEQ ID NO: 91051 - RNA, 22 nt, Human
cagcuuuauuccucuagcuuca

SEQ ID NO: 91052 - RNA, 22 nt, Human
caggauucaggccgcgcccucc

SEQ ID NO: 91053 - RNA, 19 nt, Human
caguggacuccugauaguc

SEQ ID NO: 91054 - RNA, 24 nt, Human
caucuucagcugcguguguccucu

SEQ ID NO: 91055 - RNA, 19 nt, Human
ccacaaaaccuuggaggag

SEQ ID NO: 91056 - RNA, 18 nt, Human
ccacaaucuccaccucuu

SEQ ID NO: 91057 - RNA, 22 nt, Human
ccagaccuucugcacaggaagc

SEQ ID NO: 91058 - RNA, 22 nt, Human
ccaggauuaaaauuaaaagccc

SEQ ID NO: 91059 - RNA, 25 nt, Human
ccagggccacaggggcaagccaugc

SEQ ID NO: 91060 - RNA, 21 nt, Human
cccacacugcacauacuccgg

SEQ ID NO: 91061 - RNA, 25 nt, Human
ccccugcuacucugcgcagccccuu

SEQ ID NO: 91062 - RNA, 22 nt, Human
ccccuuuaagacacugacacaa

SEQ ID NO: 91063 - RNA, 20 nt, Human
cccgccugcgcaggccccuu

SEQ ID NO: 91064 - RNA, 18 nt, Human
cccugagucuuggcgccc

SEQ ID NO: 91065 - RNA, 18 nt, Human
ccgcgcccuccagggccc

SEQ ID NO: 91066 - RNA, 23 nt, Human
ccguuuagucacccuucagcugc

SEQ ID NO: 91067 - RNA, 21 nt, Human
ccuccagggccccugcuacuc

SEQ ID NO: 91068 - RNA, 23 nt, Human
ccucuucacgagguaagggagac

SEQ ID NO: 91069 - RNA, 24 nt, Human
ccucuugccaucaaaggcagaaac

SEQ ID NO: 91070 - RNA, 26 nt, Human
cgaccagaccuucugcacaggaagcu

SEQ ID NO: 91071 - RNA, 19 nt, Human
cgcaggccccuuuaagaca

SEQ ID NO: 91072 - RNA, 20 nt, Human
cuuggcaccaacuuugugcc

SEQ ID NO: 91073 - RNA, 18 nt, Human
cuugggaggcaggaagag

SEQ ID NO: 91074 - RNA, 20 nt, Human
cuuuccacaaaaccuuggag

SEQ ID NO: 91075 - RNA, 25 nt, Human
cuuugugccacauccucaacucuuc

SEQ ID NO: 91076 - RNA, 18 nt, Human
gaccaguaucaauacaug

SEQ ID NO: 91077 - RNA, 19 nt, Human
gagacuuccccucuucacg

SEQ ID NO: 91078 - RNA, 23 nt, Human
gcagaggagaagcccugagugga

SEQ ID NO: 91079 - RNA, 18 nt, Human
gccacaaucuccaccucu

SEQ ID NO: 91080 - RNA, 18 nt, Human
gcuuggcaccaacuuugu

SEQ ID NO: 91081 - RNA, 23 nt, Human
ggagacaaaagcagccauuugga

SEQ ID NO: 91082 - RNA, 25 nt, Human
gggcaaaaaccccaugaacaggaaa

SEQ ID NO: 91083 - RNA, 26 nt, Human
ggggguguccaacaugcucugcuggc

SEQ ID NO: 91084 - RNA, 22 nt, Human
uaaaaacagcaacuugucuucc

SEQ ID NO: 91085 - RNA, 24 nt, Human
uaaaaacagcaacuugucuuccca

SEQ ID NO: 91086 - RNA, 28 nt, Human
uacuguaacuacaacagcucgcaagaca

SEQ ID NO: 91087 - RNA, 21 nt, Human
ucaaaggcagaaaccgaagga

SEQ ID NO: 91088 - RNA, 21 nt, Human
ucaaaggcagaaaccgaagga

SEQ ID NO: 91089 - RNA, 30 nt, Human
ucauucuuagaccagcuaagagcugagggg

SEQ ID NO: 91090 - RNA, 20 nt, Human
uccacaaaaccuuggaggag

SEQ ID NO: 91091 - RNA, 18 nt, Human
uccagcugugaaguggga

SEQ ID NO: 91092 - RNA, 18 nt, Human
ucugcacaggaagcugga

SEQ ID NO: 91093 - RNA, 20 nt, Human
ucuuagaccagcuaagagcu

SEQ ID NO: 91094 - RNA, 22 nt, Human
ucuucaauuuccaauuuauuuc

SEQ ID NO: 91095 - RNA, 23 nt, Human
ugaaaagagcggugaccaacucg

SEQ ID NO: 91096 - RNA, 18 nt, Human
ugaagugggaccaguauc

SEQ ID NO: 91097 - RNA, 18 nt, Human
ugacacaaaagacugccc

SEQ ID NO: 91098 - RNA, 22 nt, Human
ugacacaaaagacugcccagag

SEQ ID NO: 91099 - RNA, 22 nt, Human
ugagacuccaggauuaaaauua

SEQ ID NO: 91100 - RNA, 18 nt, Human
ugaggcuggccuccucug

SEQ ID NO: 91101 - RNA, 23 nt, Human
ugcccuauuucuuuggagggaca

SEQ ID NO: 91102 - RNA, 19 nt, Human
ugcuggcccaguucccagc

SEQ ID NO: 91103 - RNA, 18 nt, Human
uggaaugaggugaggcug

SEQ ID NO: 91104 - RNA, 21 nt, Human
uggacuccugauagucccgcc

SEQ ID NO: 91105 - RNA, 19 nt, Human
uggaggagucaaaucccac

SEQ ID NO: 91106 - RNA, 21 nt, Human
uggagggacagaaucacuucu

SEQ ID NO: 91107 - RNA, 22 nt, Human
uggcauuugcugcugaggcucc

SEQ ID NO: 91108 - RNA, 22 nt, Human
ugggaggcaggaagagacuucc

SEQ ID NO: 91109 - RNA, 21 nt, Human
ugucuccagcugugaaguggg

SEQ ID NO: 91110 - RNA, 27 nt, Human
uuaaaguagcaagcggcuacuuuuccc

SEQ ID NO: 91111 - RNA, 24 nt, Human
uuaagacacugacacaaaagacug

SEQ ID NO: 91112 - RNA, 18 nt, Human
uuacaaucacuuggccac

SEQ ID NO: 91113 - RNA, 22 nt, Human
uucccagccgauccccugaguc

SEQ ID NO: 91114 - RNA, 23 nt, Human
uucucuguaaucgccgccacaau

SEQ ID NO: 91115 - RNA, 21 nt, Human
uucuuuggagggacagaauca

SEQ ID NO: 91116 - RNA, 22 nt, Human
uugcugcugaggcuccagggca

SEQ ID NO: 91117 - RNA, 19 nt, Human
aaagugcugggauuacagg

SEQ ID NO: 91118 - RNA, 20 nt, Human
aaagugcugggauuacaggc

SEQ ID NO: 91119 - RNA, 22 nt, Human
aaagugcugggauuacaggcgg

SEQ ID NO: 91120 - RNA, 24 nt, Human
aaagugcugggauuacaggcggga

SEQ ID NO: 91121 - RNA, 23 nt, Human
aaccacagaugagccugcugacc

SEQ ID NO: 91122 - RNA, 20 nt, Human
aaccucugccucccgaguuc

SEQ ID NO: 91123 - RNA, 22 nt, Human
aacuuuuccagaaguccauacg

SEQ ID NO: 91124 - RNA, 22 nt, Human
aagaaggccggcacacagcccc

SEQ ID NO: 91125 - RNA, 24 nt, Human
aagaauuuuccauuuaauauuguc

SEQ ID NO: 91126 - RNA, 18 nt, Human
aagcgaaaggagagccug

SEQ ID NO: 91127 - RNA, 20 nt, Human
aaggagagccugggccuaug

SEQ ID NO: 91128 - RNA, 22 nt, Human
aaguaaaaaaagacugaccuga

SEQ ID NO: 91129 - RNA, 18 nt, Human
aagugcugggauuacagg

SEQ ID NO: 91130 - RNA, 19 nt, Human
aagugcugggauuacaggc

SEQ ID NO: 91131 - RNA, 26 nt, Human
aagugcugggauuacaggcgggagcc

SEQ ID NO: 91132 - RNA, 24 nt, Human
acacugcugcacagacaugcuccu

SEQ ID NO: 91133 - RNA, 19 nt, Human
acagaagcacugugauacc

SEQ ID NO: 91134 - RNA, 18 nt, Human
acaggcgggagccaacau

SEQ ID NO: 91135 - RNA, 19 nt, Human
acccaggcuggagugcaau

SEQ ID NO: 91136 - RNA, 18 nt, Human
acccauggaaagugacac

SEQ ID NO: 91137 - RNA, 22 nt, Human
acccgcgcagcuccagucugca

SEQ ID NO: 91138 - RNA, 24 nt, Human
acgggguauccccauguuggucag

SEQ ID NO: 91139 - RNA, 24 nt, Human
acugaacccauggaaagugacacc

SEQ ID NO: 91140 - RNA, 20 nt, Human
acuguuugaagaauuuucca

SEQ ID NO: 91141 - RNA, 19 nt, Human
acuguuuucuucccaucuu

SEQ ID NO: 91142 - RNA, 21 nt, Human
acuucaaccucccaaaccaag

SEQ ID NO: 91143 - RNA, 23 nt, Human
acuucaaccucccaaaccaagcu

SEQ ID NO: 91144 - RNA, 23 nt, Human
agaacuuuuccagaaguccauac

SEQ ID NO: 91145 - RNA, 25 nt, Human
agaaggccggcacacagccggaccc

SEQ ID NO: 91146 - RNA, 21 nt, Human
agcaggcugggcuacugugcu

SEQ ID NO: 91147 - RNA, 21 nt, Human
agcugcacagcaucggucccc

SEQ ID NO: 91148 - RNA, 24 nt, Human
agggcuucuggaaugugcaggggc

SEQ ID NO: 91149 - RNA, 21 nt, Human
aguagcugggauuacaggcau

SEQ ID NO: 91150 - RNA, 19 nt, Human
agugaucaggcauuugcuc

SEQ ID NO: 91151 - RNA, 21 nt, Human
agugcaauggcgcgaucucag

SEQ ID NO: 91152 - RNA, 18 nt, Human
agugcugggauuacaggc

SEQ ID NO: 91153 - RNA, 20 nt, Human
aguucaagugauuuuccugc

SEQ ID NO: 91154 - RNA, 23 nt, Human
caaaaacacugcugcacagacau

SEQ ID NO: 91155 - RNA, 27 nt, Human
caaagugcugggauuacaggcgggagc

SEQ ID NO: 91156 - RNA, 22 nt, Human
caagugauuuuccugccucagc

SEQ ID NO: 91157 - RNA, 22 nt, Human
cacagcagucguuuggcgaaaa

SEQ ID NO: 91158 - RNA, 21 nt, Human
caccccacagccaucccuacc

SEQ ID NO: 91159 - RNA, 18 nt, Human
cacugcaaccucugccuc

SEQ ID NO: 91160 - RNA, 21 nt, Human
cacugcaaccucugccucccg

SEQ ID NO: 91161 - RNA, 19 nt, Human
cacugcuugaaagcugucc

SEQ ID NO: 91162 - RNA, 18 nt, Human
cagccagcggccccacaa

SEQ ID NO: 91163 - RNA, 19 nt, Human
cagccagcggccccacaag

SEQ ID NO: 91164 - RNA, 20 nt, Human
cagccuccugaguagcuggg

SEQ ID NO: 91165 - RNA, 22 nt, Human
caggccugccugagccugggcu

SEQ ID NO: 91166 - RNA, 20 nt, Human
caggcugggcuacugugcuc

SEQ ID NO: 91167 - RNA, 21 nt, Human
caggugauucacccacuuggg

SEQ ID NO: 91168 - RNA, 24 nt, Human
cauguuggucaggcuggucuugaa

SEQ ID NO: 91169 - RNA, 19 nt, Human
ccaaagugcugggauuaca

SEQ ID NO: 91170 - RNA, 22 nt, Human
ccaaagugcugggauuacaggc

SEQ ID NO: 91171 - RNA, 23 nt, Human
ccaaagugcugggauuacaggcg

SEQ ID NO: 91172 - RNA, 19 nt, Human
ccaggacgggcgaucugac

SEQ ID NO: 91173 - RNA, 19 nt, Human
ccauguuggucaggcuggu

SEQ ID NO: 91174 - RNA, 21 nt, Human
ccauguuggucaggcuggucu

SEQ ID NO: 91175 - RNA, 21 nt, Human
ccauguuggucaggcuggucu

SEQ ID NO: 91176 - RNA, 23 nt, Human
cccacagccaucccuaccaauca

SEQ ID NO: 91177 - RNA, 20 nt, Human
cccagagcacuucaaccucc

SEQ ID NO: 91178 - RNA, 24 nt, Human
ccccauguuggucaggcuggucuu

SEQ ID NO: 91179 - RNA, 20 nt, Human
cccgaguucaagugauuuuc

SEQ ID NO: 91180 - RNA, 23 nt, Human
cccgaguucaagugauuuuccug

SEQ ID NO: 91181 - RNA, 22 nt, Human
cccgcaucgucuucugagccug

SEQ ID NO: 91182 - RNA, 25 nt, Human
cccgcgcagcuccagucugcagcca

SEQ ID NO: 91183 - RNA, 24 nt, Human
cccggcuuguauuuuuaguagaga

SEQ ID NO: 91184 - RNA, 22 nt, Human
ccucccaaaccaagcucugcgg

SEQ ID NO: 91185 - RNA, 24 nt, Human
ccugaccucaggugauucacccac

SEQ ID NO: 91186 - RNA, 23 nt, Human
ccugaguagcugggauuacaggc

SEQ ID NO: 91187 - RNA, 24 nt, Human
ccugaguagcugggauuacaggca

SEQ ID NO: 91188 - RNA, 23 nt, Human
ccugccucagccuccugaguagc

SEQ ID NO: 91189 - RNA, 24 nt, Human
ccugccucagccuccugaguagcu

SEQ ID NO: 91190 - RNA, 28 nt, Human
ccuggacguggggaacacagggacgguu

SEQ ID NO: 91191 - RNA, 21 nt, Human
ccuggcccagcuaagcaucug

SEQ ID NO: 91192 - RNA, 27 nt, Human
cgcccaggggggcggggcaggggcggg

SEQ ID NO: 91193 - RNA, 21 nt, Human
cgcucuucgcccaggggggcg

SEQ ID NO: 91194 - RNA, 19 nt, Human
cggccugggugcagcaagc

SEQ ID NO: 91195 - RNA, 18 nt, Human
cggggcaggggcggggag

SEQ ID NO: 91196 - RNA, 24 nt, Human
cgggguauccccauguuggucagg

SEQ ID NO: 91197 - RNA, 20 nt, Human
cguggggaacacagggacgg

SEQ ID NO: 91198 - RNA, 23 nt, Human
cucacugcaaccucugccucccg

SEQ ID NO: 91199 - RNA, 24 nt, Human
cucacugcaaccucugccucccga

SEQ ID NO: 91200 - RNA, 24 nt, Human
cucagccuccugaguagcugggau

SEQ ID NO: 91201 - RNA, 22 nt, Human
cucaugcucucucucucccaca

SEQ ID NO: 91202 - RNA, 18 nt, Human
cucccgaguucaagugau

SEQ ID NO: 91203 - RNA, 21 nt, Human
cucccugacccgcgcagcucc

SEQ ID NO: 91204 - RNA, 26 nt, Human
cuccuggaagccaccccacagccauc

SEQ ID NO: 91205 - RNA, 22 nt, Human
cucugggccaggccugccugag

SEQ ID NO: 91206 - RNA, 19 nt, Human
cugaacccauggaaaguga

SEQ ID NO: 91207 - RNA, 23 nt, Human
cugaguagcugggauuacaggca

SEQ ID NO: 91208 - RNA, 24 nt, Human
cugaguagcugggauuacaggcau

SEQ ID NO: 91209 - RNA, 23 nt, Human
cugcaaccucugccucccgaguu

SEQ ID NO: 91210 - RNA, 24 nt, Human
cugcaaccucugccucccgaguuc

SEQ ID NO: 91211 - RNA, 23 nt, Human
cugccucccgaguucaagugauu

SEQ ID NO: 91212 - RNA, 19 nt, Human
cugggccagcaaagcccac

SEQ ID NO: 91213 - RNA, 20 nt, Human
cugggcuccuuugggagucu

SEQ ID NO: 91214 - RNA, 19 nt, Human
cuuacaacgcucugggauc

SEQ ID NO: 91215 - RNA, 23 nt, Human
cuucugagccugccugcugcauc

SEQ ID NO: 91216 - RNA, 21 nt, Human
cuugcucugucacccaggcug

SEQ ID NO: 91217 - RNA, 24 nt, Human
cuugcucugucacccaggcuggag

SEQ ID NO: 91218 - RNA, 18 nt, Human
cuuguauuuuuaguagag

SEQ ID NO: 91219 - RNA, 19 nt, Human
cuuguauuuuuaguagaga

SEQ ID NO: 91220 - RNA, 20 nt, Human
cuuguauuuuuaguagagac

SEQ ID NO: 91221 - RNA, 23 nt, Human
gaccucaggugauucacccacuu

SEQ ID NO: 91222 - RNA, 23 nt, Human
gagacgggguauccccauguugg

SEQ ID NO: 91223 - RNA, 24 nt, Human
gagacgggguauccccauguuggu

SEQ ID NO: 91224 - RNA, 22 nt, Human
gagagagagagaauacgacugc

SEQ ID NO: 91225 - RNA, 22 nt, Human
gaguagcugggauuacaggcau

SEQ ID NO: 91226 - RNA, 24 nt, Human
gaguagcugggauuacaggcaugc

SEQ ID NO: 91227 - RNA, 22 nt, Human
gaguucaagugauuuuccugcc

SEQ ID NO: 91228 - RNA, 19 nt, Human
gauacugagagagagagag

SEQ ID NO: 91229 - RNA, 19 nt, Human
gaucugcucucugucuaca

SEQ ID NO: 91230 - RNA, 18 nt, Human
gauuacaggcaugcgcca

SEQ ID NO: 91231 - RNA, 18 nt, Human
gauuacaggcgggagcca

SEQ ID NO: 91232 - RNA, 24 nt, Human
gauuacaggcgggagccaacaugc

SEQ ID NO: 91233 - RNA, 21 nt, Human
gauuuuccugccucagccucc

SEQ ID NO: 91234 - RNA, 22 nt, Human
gcaaccucugccucccgaguuc

SEQ ID NO: 91235 - RNA, 20 nt, Human
gcauauccgaacagccagca

SEQ ID NO: 91236 - RNA, 22 nt, Human
gccaccacgcccggcuuguauu

SEQ ID NO: 91237 - RNA, 18 nt, Human
gccaggccugccugagcc

SEQ ID NO: 91238 - RNA, 20 nt, Human
gccauccaccucuccuucuc

SEQ ID NO: 91239 - RNA, 24 nt, Human
gccccacaaguccgcgcucuucgc

SEQ ID NO: 91240 - RNA, 22 nt, Human
gccucccgaguucaagugauuu

SEQ ID NO: 91241 - RNA, 23 nt, Human
gcucugggaucccuacagggaug

SEQ ID NO: 91242 - RNA, 27 nt, Human
gcucugucacccaggcuggagugcaau

SEQ ID NO: 91243 - RNA, 20 nt, Human
gcugacggcuccuggcugca

SEQ ID NO: 91244 - RNA, 19 nt, Human
gcuggagugcaauggcgcg

SEQ ID NO: 91245 - RNA, 23 nt, Human
gcuggucuugaacuccugaccuc

SEQ ID NO: 91246 - RNA, 19 nt, Human
ggauuacaggcaugcgcca

SEQ ID NO: 91247 - RNA, 20 nt, Human
ggcaguucucuuuucccacu

SEQ ID NO: 91248 - RNA, 24 nt, Human
ggcccagcuaagcaucugcagcca

SEQ ID NO: 91249 - RNA, 20 nt, Human
ggccugggugcagcaagcuc

SEQ ID NO: 91250 - RNA, 24 nt, Human
ggcuggucuugaacuccugaccuc

SEQ ID NO: 91251 - RNA, 21 nt, Human
gggcaggggcggggagucgcc

SEQ ID NO: 91252 - RNA, 20 nt, Human
gggcauggggcaguucucuu

SEQ ID NO: 91253 - RNA, 19 nt, Human
gggggcggggcaggggcgg

SEQ ID NO: 91254 - RNA, 23 nt, Human
gggguauccccauguuggucagg

SEQ ID NO: 91255 - RNA, 19 nt, Human
ggucuugaacuccugaccu

SEQ ID NO: 91256 - RNA, 23 nt, Human
guagagacgggguauccccaugu

SEQ ID NO: 91257 - RNA, 18 nt, Human
guagcugggauuacaggc

SEQ ID NO: 91258 - RNA, 20 nt, Human
guagcugggauuacaggcau

SEQ ID NO: 91259 - RNA, 24 nt, Human
gucuugcucugucacccaggcugg

SEQ ID NO: 91260 - RNA, 19 nt, Human
gugacucugggccaggccu

SEQ ID NO: 91261 - RNA, 21 nt, Human
gugauucacccacuugggcuu

SEQ ID NO: 91262 - RNA, 24 nt, Human
gugauuuuccugccucagccuccu

SEQ ID NO: 91263 - RNA, 20 nt, Human
gugccuugucagguucugga

SEQ ID NO: 91264 - RNA, 18 nt, Human
guggcccccuccuggaag

SEQ ID NO: 91265 - RNA, 20 nt, Human
uaaaaaaagacugaccugaa

SEQ ID NO: 91266 - RNA, 25 nt, Human
uaaaaaaagacugaccugaacagaa

SEQ ID NO: 91267 - RNA, 25 nt, Human
uaacugaacccauggaaagugacac

SEQ ID NO: 91268 - RNA, 20 nt, Human
uaauuuguaaaaugacauuu

SEQ ID NO: 91269 - RNA, 23 nt, Human
uacaggcaugcgccaccacgccc

SEQ ID NO: 91270 - RNA, 22 nt, Human
uacaggugaaccacagaugagc

SEQ ID NO: 91271 - RNA, 21 nt, Human
uaccagcaucacuacucuggu

SEQ ID NO: 91272 - RNA, 22 nt, Human
uagagcuuccagauaaucacau

SEQ ID NO: 91273 - RNA, 23 nt, Human
uagcucccaggugggucaauuuc

SEQ ID NO: 91274 - RNA, 24 nt, Human
uaguagagacgggguauccccaug

SEQ ID NO: 91275 - RNA, 18 nt, Human
ucaagugauuuuccugcc

SEQ ID NO: 91276 - RNA, 18 nt, Human
ucaaucccuggcccagcu

SEQ ID NO: 91277 - RNA, 18 nt, Human
ucacccaggcuggagugc

SEQ ID NO: 91278 - RNA, 18 nt, Human
ucacugcaaccucugccu

SEQ ID NO: 91279 - RNA, 19 nt, Human
ucacugcaaccucugccuc

SEQ ID NO: 91280 - RNA, 22 nt, Human
ucacugcaaccucugccucccg

SEQ ID NO: 91281 - RNA, 24 nt, Human
ucacugcaaccucugccucccgag

SEQ ID NO: 91282 - RNA, 24 nt, Human
ucagaacaaugcacaagggaaaac

SEQ ID NO: 91283 - RNA, 20 nt, Human
ucagccuccugaguagcugg

SEQ ID NO: 91284 - RNA, 25 nt, Human
uccagggaaaggaugacccacagau

SEQ ID NO: 91285 - RNA, 21 nt, Human
uccaucacacugcucagaaca

SEQ ID NO: 91286 - RNA, 24 nt, Human
ucccaaagugcugggauuacaggc

SEQ ID NO: 91287 - RNA, 20 nt, Human
ucccacuugggaccaaagcc

SEQ ID NO: 91288 - RNA, 21 nt, Human
ucccgaguucaagugauuuuc

SEQ ID NO: 91289 - RNA, 24 nt, Human
ucccgaguucaagugauuuuccug

SEQ ID NO: 91290 - RNA, 21 nt, Human
uccgcgcucuucgcccagggg

SEQ ID NO: 91291 - RNA, 24 nt, Human
uccugaguagcugggauuacaggc

SEQ ID NO: 91292 - RNA, 18 nt, Human
uccuuugggagucuagaa

SEQ ID NO: 91293 - RNA, 20 nt, Human
ucuacggccuggacgugggg

SEQ ID NO: 91294 - RNA, 19 nt, Human
ucuccaaaaacgauaauca

SEQ ID NO: 91295 - RNA, 20 nt, Human
ucucugucuacaggugaacc

SEQ ID NO: 91296 - RNA, 20 nt, Human
ucucuuuucccacuugggac

SEQ ID NO: 91297 - RNA, 24 nt, Human
ucugcagccaggggaggaugagac

SEQ ID NO: 91298 - RNA, 24 nt, Human
ucugucacccaggcuggagugcaa

SEQ ID NO: 91299 - RNA, 26 nt, Human
ucuucccaucuuuucacuuaaaggaa

SEQ ID NO: 91300 - RNA, 23 nt, Human
ucuugaacuccugaccucaggug

SEQ ID NO: 91301 - RNA, 23 nt, Human
ucuugcucugucacccaggcugg

SEQ ID NO: 91302 - RNA, 24 nt, Human
ucuugcucugucacccaggcugga

SEQ ID NO: 91303 - RNA, 21 nt, Human
ugaauaaacuaccugccccau

SEQ ID NO: 91304 - RNA, 20 nt, Human
ugacauuuggccagagugau

SEQ ID NO: 91305 - RNA, 22 nt, Human
ugaccucaggugauucacccac

SEQ ID NO: 91306 - RNA, 24 nt, Human
ugaccucaggugauucacccacuu

SEQ ID NO: 91307 - RNA, 18 nt, Human
ugacucugggccaggccu

SEQ ID NO: 91308 - RNA, 18 nt, Human
ugagacagagucuugcuc

SEQ ID NO: 91309 - RNA, 22 nt, Human
ugagacagagucuugcucuguc

SEQ ID NO: 91310 - RNA, 26 nt, Human
ugaucaggcauuugcucucaucuuag

SEQ ID NO: 91311 - RNA, 24 nt, Human
ugccucagccuccugaguagcugg

SEQ ID NO: 91312 - RNA, 22 nt, Human
ugccucccgaguucaagugauu

SEQ ID NO: 91313 - RNA, 24 nt, Human
ugcucucaugcucucucucuccca

SEQ ID NO: 91314 - RNA, 24 nt, Human
ugcucugucacccaggcuggagug

SEQ ID NO: 91315 - RNA, 24 nt, Human
ugcugcacagacaugcuccuggca

SEQ ID NO: 91316 - RNA, 26 nt, Human
ugcugggauuacaggcgggagccaac

SEQ ID NO: 91317 - RNA, 20 nt, Human
uggaaugugcaggggcaaaa

SEQ ID NO: 91318 - RNA, 23 nt, Human
uggagugcaauggcgcgaucuca

SEQ ID NO: 91319 - RNA, 24 nt, Human
uggagugcaauggcgcgaucucag

SEQ ID NO: 91320 - RNA, 20 nt, Human
uggauaaggggggacuacug

SEQ ID NO: 91321 - RNA, 18 nt, Human
uggcauauccgaacagcc

SEQ ID NO: 91322 - RNA, 21 nt, Human
uggccgagaugggaccucaca

SEQ ID NO: 91323 - RNA, 24 nt, Human
uggcgcgaucucagcucacugcaa

SEQ ID NO: 91324 - RNA, 18 nt, Human
ugggauuacaggcaugcg

SEQ ID NO: 91325 - RNA, 21 nt, Human
ugggauuacaggcaugcgcca

SEQ ID NO: 91326 - RNA, 22 nt, Human
ugggauuacaggcaugcgccac

SEQ ID NO: 91327 - RNA, 24 nt, Human
ugggauuacaggcaugcgccacca

SEQ ID NO: 91328 - RNA, 18 nt, Human
ugggauuacaggcgggag

SEQ ID NO: 91329 - RNA, 19 nt, Human
ugggauuacaggcgggagc

SEQ ID NO: 91330 - RNA, 21 nt, Human
ugggauuacaggcgggagcca

SEQ ID NO: 91331 - RNA, 25 nt, Human
ugggauuacaggcgggagccaacau

SEQ ID NO: 91332 - RNA, 18 nt, Human
uggggcaguucucuuuuc

SEQ ID NO: 91333 - RNA, 24 nt, Human
uggucaggcuggucuugaacuccu

SEQ ID NO: 91334 - RNA, 20 nt, Human
ugucacccaggcuggagugc

SEQ ID NO: 91335 - RNA, 23 nt, Human
ugucuacaggugaaccacagaug

SEQ ID NO: 91336 - RNA, 18 nt, Human
ugugcaggggcaaaaaca

SEQ ID NO: 91337 - RNA, 18 nt, Human
uguggacagcuuuccugg

SEQ ID NO: 91338 - RNA, 20 nt, Human
uuaaaggaagcaccuuacgg

SEQ ID NO: 91339 - RNA, 18 nt, Human
uuaguagagacgggguau

SEQ ID NO: 91340 - RNA, 20 nt, Human
uuauuuaugagacagagucu

SEQ ID NO: 91341 - RNA, 20 nt, Human
uucaaccucccaaaccaagc

SEQ ID NO: 91342 - RNA, 21 nt, Human
uucaagugauuuuccugccuc

SEQ ID NO: 91343 - RNA, 23 nt, Human
uucaagugauuuuccugccucag

SEQ ID NO: 91344 - RNA, 24 nt, Human
uucaagugauuuuccugccucagc

SEQ ID NO: 91345 - RNA, 20 nt, Human
uucacagauagaagauucag

SEQ ID NO: 91346 - RNA, 23 nt, Human
uucacagauagaagauucagcau

SEQ ID NO: 91347 - RNA, 21 nt, Human
uuccaggcaguugugcuguga

SEQ ID NO: 91348 - RNA, 24 nt, Human
uugcucugucacccaggcuggagu

SEQ ID NO: 91349 - RNA, 23 nt, Human
uuguauuuuuaguagagacgggg

SEQ ID NO: 91350 - RNA, 21 nt, Human
uuuuuaguagagacgggguau

SEQ ID NO: 91351 - RNA, 20 nt, Human
aaaaaaaaauccagccuggg

SEQ ID NO: 91352 - RNA, 24 nt, Human
aaaaaaauccagccuggggguaaa

SEQ ID NO: 91353 - RNA, 20 nt, Human
aaauuuaaacaccuauaacc

SEQ ID NO: 91354 - RNA, 21 nt, Human
aacauuuacugauuaagaguc

SEQ ID NO: 91355 - RNA, 21 nt, Human
aacccugugcuuucucaaaac

SEQ ID NO: 91356 - RNA, 25 nt, Human
aacuuugcucuuucaccugguuuaa

SEQ ID NO: 91357 - RNA, 18 nt, Human
aagcugaagagggagggg

SEQ ID NO: 91358 - RNA, 19 nt, Human
aaggaaauuuaaacaccua

SEQ ID NO: 91359 - RNA, 18 nt, Human
agagggaggggagggaca

SEQ ID NO: 91360 - RNA, 21 nt, Human
agagggaggggagggacaagc

SEQ ID NO: 91361 - RNA, 26 nt, Human
agcuggggccgggugagauaaucuuc

SEQ ID NO: 91362 - RNA, 19 nt, Human
aucacuuuccuuccauugu

SEQ ID NO: 91363 - RNA, 23 nt, Human
augaucaugaaggucugaauauc

SEQ ID NO: 91364 - RNA, 18 nt, Human
auggcuagugucucuucu

SEQ ID NO: 91365 - RNA, 21 nt, Human
cacucccacccccauuaggag

SEQ ID NO: 91366 - RNA, 24 nt, Human
cagaaucagugucugggaagcuga

SEQ ID NO: 91367 - RNA, 24 nt, Human
cauaaaaauaaauaagaguuucac

SEQ ID NO: 91368 - RNA, 24 nt, Human
ccuauaacccugugcuuucucaaa

SEQ ID NO: 91369 - RNA, 25 nt, Human
ccucucuuaaaaacucuuacaugag

SEQ ID NO: 91370 - RNA, 22 nt, Human
cgaaugacacauaaguaggcac

SEQ ID NO: 91371 - RNA, 19 nt, Human
cuuucucaaaacuucauua

SEQ ID NO: 91372 - RNA, 24 nt, Human
gaaccgaaguaacacucccacccc

SEQ ID NO: 91373 - RNA, 22 nt, Human
gaaucagugucugggaagcuga

SEQ ID NO: 91374 - RNA, 18 nt, Human
gcugggccccuccacacc

SEQ ID NO: 91375 - RNA, 24 nt, Human
gggccccuccacaccggucagcuu

SEQ ID NO: 91376 - RNA, 20 nt, Human
guggcaguaaauaaauaaac

SEQ ID NO: 91377 - RNA, 21 nt, Human
uaaaaauaaauaagaguuuca

SEQ ID NO: 91378 - RNA, 23 nt, Human
uacucuguguacucgguaaaaaa

SEQ ID NO: 91379 - RNA, 25 nt, Human
ucacuguccuuuucacagaaucacu

SEQ ID NO: 91380 - RNA, 23 nt, Human
ucagcccucucuuaaaaacucuu

SEQ ID NO: 91381 - RNA, 20 nt, Human
ucagcuuauauagcuggggc

SEQ ID NO: 91382 - RNA, 22 nt, Human
ucagcuuauauagcuggggccg

SEQ ID NO: 91383 - RNA, 19 nt, Human
ucccuggaguuggcccugc

SEQ ID NO: 91384 - RNA, 22 nt, Human
ucccuggaguuggcccugcugg

SEQ ID NO: 91385 - RNA, 23 nt, Human
ucgguaaaaaaaaaaaaaaaaaa

SEQ ID NO: 91386 - RNA, 24 nt, Human
ucguggaaggaaucccuggaguug

SEQ ID NO: 91387 - RNA, 22 nt, Human
ugcugggccccuccacaccggu

SEQ ID NO: 91388 - RNA, 20 nt, Human
uggaguuggcccugcugggc

SEQ ID NO: 91389 - RNA, 21 nt, Human
uggcccugcugggccccucca

SEQ ID NO: 91390 - RNA, 18 nt, Human
ugggaagcugaagaggga

SEQ ID NO: 91391 - RNA, 19 nt, Human
ugggaaggcucugaaagug

SEQ ID NO: 91392 - RNA, 19 nt, Human
ugucucuucuccugggcca

SEQ ID NO: 91393 - RNA, 23 nt, Human
uuaaacaccuauaacccugugcu

SEQ ID NO: 91394 - RNA, 22 nt, Human
uucacagaaucacuuuccuucc

SEQ ID NO: 91395 - RNA, 19 nt, Human
uugcucuuucaccugguuu

SEQ ID NO: 91396 - RNA, 24 nt, Human
uuguauguuuuucugucguggaag

SEQ ID NO: 91397 - RNA, 26 nt, Human
uuguauguuuuucugucguggaagga

SEQ ID NO: 91398 - RNA, 19 nt, Human
uuuuuuuuuuugagcaaau

SEQ ID NO: 91399 - RNA, 21 nt, Human
aaacaagaaacagcaaaugga

SEQ ID NO: 91400 - RNA, 29 nt, Human
aaacaagaaacagcaaauggagggacccc

SEQ ID NO: 91401 - RNA, 22 nt, Human
aaacagaagaaucauaaucuag

SEQ ID NO: 91402 - RNA, 22 nt, Human
aaaugaacaaaacauguagaug

SEQ ID NO: 91403 - RNA, 22 nt, Human
aacagaagaaucauaaucuaga

SEQ ID NO: 91404 - RNA, 20 nt, Human
aaccaaacacagugagugac

SEQ ID NO: 91405 - RNA, 19 nt, Human
aaccgcacuagcagcggcg

SEQ ID NO: 91406 - RNA, 25 nt, Human
aagaagggggacauucuagguuacg

SEQ ID NO: 91407 - RNA, 23 nt, Human
aagcaagaagggggacauucuag

SEQ ID NO: 91408 - RNA, 24 nt, Human
aaugaaugaggcuugggggaaaga

SEQ ID NO: 91409 - RNA, 23 nt, Human
acacacauacacacucgcacaca

SEQ ID NO: 91410 - RNA, 20 nt, Human
acacacuuccgagcgagugc

SEQ ID NO: 91411 - RNA, 24 nt, Human
accucaugugaaugauugagccau

SEQ ID NO: 91412 - RNA, 18 nt, Human
accugaagccaccaacac

SEQ ID NO: 91413 - RNA, 21 nt, Human
acggaugugcgccccagaugu

SEQ ID NO: 91414 - RNA, 22 nt, Human
agaaaacauaccccuuucccag

SEQ ID NO: 91415 - RNA, 21 nt, Human
agaagaggagggagcguagag

SEQ ID NO: 91416 - RNA, 18 nt, Human
agaaugcaguugcaugga

SEQ ID NO: 91417 - RNA, 23 nt, Human
agaccaaagccagaaaaaugaaa

SEQ ID NO: 91418 - RNA, 20 nt, Human
agagaagcaagaagggggac

SEQ ID NO: 91419 - RNA, 23 nt, Human
agcagcggcggcggcggcggcgg

SEQ ID NO: 91420 - RNA, 18 nt, Human
agcauuucacugaggugg

SEQ ID NO: 91421 - RNA, 21 nt, Human
agcccaggcaguccgcggcaa

SEQ ID NO: 91422 - RNA, 23 nt, Human
agcggcggcggcggcggcggcgg

SEQ ID NO: 91423 - RNA, 18 nt, Human
agcugguaacaauaacca

SEQ ID NO: 91424 - RNA, 19 nt, Human
auacaauguguagcucuuc

SEQ ID NO: 91425 - RNA, 18 nt, Human
aucuuggcaaauccuacu

SEQ ID NO: 91426 - RNA, 19 nt, Human
augaagaaagggccaaucc

SEQ ID NO: 91427 - RNA, 23 nt, Human
auucacaguuguagcauuucacu

SEQ ID NO: 91428 - RNA, 21 nt, Human
auuuuguauguacaaaggcug

SEQ ID NO: 91429 - RNA, 22 nt, Human
caaacucaguaaaaacuggcug

SEQ ID NO: 91430 - RNA, 19 nt, Human
caagaaacagcaaauggau

SEQ ID NO: 91431 - RNA, 21 nt, Human
caaggcaaagugcauuccuuc

SEQ ID NO: 91432 - RNA, 18 nt, Human
caagugcuugugugugug

SEQ ID NO: 91433 - RNA, 23 nt, Human
cacacacuuccgagcgagugcac

SEQ ID NO: 91434 - RNA, 21 nt, Human
cacacucgcacucccacccga

SEQ ID NO: 91435 - RNA, 27 nt, Human
cacagugagugaccauuauaaacaaga

SEQ ID NO: 91436 - RNA, 22 nt, Human
cacaguuguagcauuucacuga

SEQ ID NO: 91437 - RNA, 19 nt, Human
caccugcuaccagcacccu

SEQ ID NO: 91438 - RNA, 29 nt, Human
cacggcacacacacauacacacucgcaca

SEQ ID NO: 91439 - RNA, 27 nt, Human
cacucccacccgacagccggccaggga

SEQ ID NO: 91440 - RNA, 21 nt, Human
cacucgcacacacuuccgagc

SEQ ID NO: 91441 - RNA, 19 nt, Human
cagcaaaaacgagaccccg

SEQ ID NO: 91442 - RNA, 24 nt, Human
cagcaaaaacgagaccccgauucg

SEQ ID NO: 91443 - RNA, 18 nt, Human
cagccaccugaagccacc

SEQ ID NO: 91444 - RNA, 25 nt, Human
cagccggccagggacagucaccccc

SEQ ID NO: 91445 - RNA, 23 nt, Human
caggcaguccgcggcaaguugcc

SEQ ID NO: 91446 - RNA, 22 nt, Human
caggggggcauggcaguuuuga

SEQ ID NO: 91447 - RNA, 21 nt, Human
cagugagugaccauuauaaac

SEQ ID NO: 91448 - RNA, 26 nt, Human
cccgacacggcacacacacauacaca

SEQ ID NO: 91449 - RNA, 24 nt, Human
cccucgaaguccgccccccucacc

SEQ ID NO: 91450 - RNA, 19 nt, Human
ccgccccccucaccggggc

SEQ ID NO: 91451 - RNA, 18 nt, Human
ccgccgggcugcgccgug

SEQ ID NO: 91452 - RNA, 21 nt, Human
ccggggcaguucuucuccucu

SEQ ID NO: 91453 - RNA, 19 nt, Human
ccucgaaguccgccccccu

SEQ ID NO: 91454 - RNA, 18 nt, Human
ccugcuaucucaggcuga

SEQ ID NO: 91455 - RNA, 22 nt, Human
cggcggcagcagccaccugaag

SEQ ID NO: 91456 - RNA, 22 nt, Human
cggcggcggcagcagccaccug

SEQ ID NO: 91457 - RNA, 27 nt, Human
cuagcagcggcggcggcggcggcggcg

SEQ ID NO: 91458 - RNA, 21 nt, Human
cucccacccgacagccggcca

SEQ ID NO: 91459 - RNA, 19 nt, Human
cugaagcucaccucaugug

SEQ ID NO: 91460 - RNA, 22 nt, Human
cuugggggaaagaaggagagag

SEQ ID NO: 91461 - RNA, 22 nt, Human
gaagaagaggagggagcguaga

SEQ ID NO: 91462 - RNA, 23 nt, Human
gaagaagaggagggagcguagag

SEQ ID NO: 91463 - RNA, 22 nt, Human
gaagacauagacgauagccccc

SEQ ID NO: 91464 - RNA, 21 nt, Human
gaaugcaguugcauggagccg

SEQ ID NO: 91465 - RNA, 21 nt, Human
gcaaauggaucauuucugauc

SEQ ID NO: 91466 - RNA, 25 nt, Human
gcacacacacauacacacucgcaca

SEQ ID NO: 91467 - RNA, 23 nt, Human
gcaguugcauggagccagggcuu

SEQ ID NO: 91468 - RNA, 18 nt, Human
gcgccccaagaagacaua

SEQ ID NO: 91469 - RNA, 24 nt, Human
gcggcggcggcggcggcggcagca

SEQ ID NO: 91470 - RNA, 24 nt, Human
gcggcggcggcggcggcggcggca

SEQ ID NO: 91471 - RNA, 22 nt, Human
ggcggcggcggcggcagcagcc

SEQ ID NO: 91472 - RNA, 22 nt, Human
guaaauuguugaguaaacagaa

SEQ ID NO: 91473 - RNA, 19 nt, Human
guaacuuguuaaacacauu

SEQ ID NO: 91474 - RNA, 18 nt, Human
guguguguguguguaggu

SEQ ID NO: 91475 - RNA, 19 nt, Human
uaaacagaagaaucauaau

SEQ ID NO: 91476 - RNA, 19 nt, Human
uagacgauagccccccgcc

SEQ ID NO: 91477 - RNA, 21 nt, Human
uagccccccgccgggcugcgc

SEQ ID NO: 91478 - RNA, 21 nt, Human
uauaaacaagaaaagaaaggc

SEQ ID NO: 91479 - RNA, 25 nt, Human
uaucugaaauuacuugaugcaaagg

SEQ ID NO: 91480 - RNA, 24 nt, Human
uaugaaugagacuuuuguuucuga

SEQ ID NO: 91481 - RNA, 24 nt, Human
uaugugcaagugcuugugugugug

SEQ ID NO: 91482 - RNA, 20 nt, Human
ucaaugucuguccuuuuuuu

SEQ ID NO: 91483 - RNA, 20 nt, Human
ucacucgacgggaaaacggg

SEQ ID NO: 91484 - RNA, 19 nt, Human
ucaguaaaaacuggcugca

SEQ ID NO: 91485 - RNA, 22 nt, Human
uccagcaaaaacgagaccccga

SEQ ID NO: 91486 - RNA, 19 nt, Human
ucccugggaagauccagga

SEQ ID NO: 91487 - RNA, 23 nt, Human
uccgcggcaaguugcccucgaag

SEQ ID NO: 91488 - RNA, 23 nt, Human
ucgcaccagcggcggaaaccgca

SEQ ID NO: 91489 - RNA, 24 nt, Human
ucucuucgcaccagcggcggaaac

SEQ ID NO: 91490 - RNA, 25 nt, Human
ucuuccagcaaaaacgagaccccga

SEQ ID NO: 91491 - RNA, 18 nt, Human
ucuuuguaaauuguugag

SEQ ID NO: 91492 - RNA, 19 nt, Human
ugaaaucagguuaacuggu

SEQ ID NO: 91493 - RNA, 25 nt, Human
ugaagaagaggagggagcguagagg

SEQ ID NO: 91494 - RNA, 24 nt, Human
ugaaggaacaagugaaaucaaaga

SEQ ID NO: 91495 - RNA, 24 nt, Human
ugaaugagacuuuuguuucugaaa

SEQ ID NO: 91496 - RNA, 24 nt, Human
ugaccauuauaaacaagaaaagaa

SEQ ID NO: 91497 - RNA, 20 nt, Human
ugagcugguaacaauaacca

SEQ ID NO: 91498 - RNA, 21 nt, Human
ugaguaaacagaagaaucaua

SEQ ID NO: 91499 - RNA, 23 nt, Human
ugcacacucgcacucccacccga

SEQ ID NO: 91500 - RNA, 21 nt, Human
ugcauguguuuguauguaugu

SEQ ID NO: 91501 - RNA, 18 nt, Human
uggaaaacaagaaacagc

SEQ ID NO: 91502 - RNA, 18 nt, Human
ugggauucuucuuggcuu

SEQ ID NO: 91503 - RNA, 19 nt, Human
ugggggaaagaaggagaga

SEQ ID NO: 91504 - RNA, 19 nt, Human
ugggguuauugaagaagag

SEQ ID NO: 91505 - RNA, 23 nt, Human
ugggguuauugaagaagaggagg

SEQ ID NO: 91506 - RNA, 22 nt, Human
uguaagagugugugugugugua

SEQ ID NO: 91507 - RNA, 18 nt, Human
uguccugcucaccugcua

SEQ ID NO: 91508 - RNA, 23 nt, Human
uguccugcucaccugcuaccagc

SEQ ID NO: 91509 - RNA, 21 nt, Human
uguguagcucuucaaugucug

SEQ ID NO: 91510 - RNA, 19 nt, Human
uguguagguauguuugcau

SEQ ID NO: 91511 - RNA, 23 nt, Human
uguguguguuugugaguaugugu

SEQ ID NO: 91512 - RNA, 24 nt, Human
uguuugcauguguuuguauguaug

SEQ ID NO: 91513 - RNA, 22 nt, Human
uucaugaagaaagggccaaucc

SEQ ID NO: 91514 - RNA, 22 nt, Human
uuccauuuccuuauagucugug

SEQ ID NO: 91515 - RNA, 21 nt, Human
uucgucuggcgccccaagaag

SEQ ID NO: 91516 - RNA, 21 nt, Human
uucuagguuacgucaauucac

SEQ ID NO: 91517 - RNA, 18 nt, Human
uugagcugguaacaauaa

SEQ ID NO: 91518 - RNA, 23 nt, Human
uugcuuagcaaaugcauuccuga

SEQ ID NO: 91519 - RNA, 18 nt, Human
uuggaagaauuuuguaug

SEQ ID NO: 91520 - RNA, 22 nt, Human
uuguaagagugugugugugugu

SEQ ID NO: 91521 - RNA, 19 nt, Human
uuguauguaugugcaagug

SEQ ID NO: 91522 - RNA, 21 nt, Human
aacgacgacacgaaccuacau

SEQ ID NO: 91523 - RNA, 21 nt, Human
aacgacgacacgaaccuacau

SEQ ID NO: 91524 - RNA, 18 nt, Human
acgacacgaaccuacaug

SEQ ID NO: 91525 - RNA, 18 nt, Human
acgacacgaaccuacaug

SEQ ID NO: 91526 - RNA, 19 nt, Human
agacagcagccacuagucc

SEQ ID NO: 91527 - RNA, 19 nt, Human
agacagcagccacuagucc

SEQ ID NO: 91528 - RNA, 24 nt, Human
cauugucacugaggcagacagcag

SEQ ID NO: 91529 - RNA, 24 nt, Human
cauugucacugaggcagacagcag

SEQ ID NO: 91530 - RNA, 21 nt, Human
ccaucugcagauauuccuugu

SEQ ID NO: 91531 - RNA, 21 nt, Human
cccgcagcugcggcuacagac

SEQ ID NO: 91532 - RNA, 26 nt, Human
cugggccaucugcagauauuccuugu

SEQ ID NO: 91533 - RNA, 18 nt, Human
ggccaucugcagauauuc

SEQ ID NO: 91534 - RNA, 20 nt, Human
uaauuuaggacccaagggug

SEQ ID NO: 91535 - RNA, 20 nt, Human
uaauuuaggacccaagggug

SEQ ID NO: 91536 - RNA, 22 nt, Human
uaauuuaggacccaagggugac

SEQ ID NO: 91537 - RNA, 22 nt, Human
uaauuuaggacccaagggugac

SEQ ID NO: 91538 - RNA, 18 nt, Human
uccugagccucgaagagc

SEQ ID NO: 91539 - RNA, 20 nt, Human
ucugggccaucugcagauau

SEQ ID NO: 91540 - RNA, 25 nt, Human
ugaggcagacagcagccacuagucc

SEQ ID NO: 91541 - RNA, 25 nt, Human
ugaggcagacagcagccacuagucc

SEQ ID NO: 91542 - RNA, 20 nt, Human
ugucucagagccaacgacga

SEQ ID NO: 91543 - RNA, 20 nt, Human
ugucucagagccaacgacga

SEQ ID NO: 91544 - RNA, 20 nt, Human
uuuuuuuuuuuuuuuuucac

SEQ ID NO: 91545 - RNA, 26 nt, Human
uuuuuuuuuuuuuuuuucacuguuga

SEQ ID NO: 91546 - RNA, 26 nt, Human
uuuuuuuuuuuuuuuuucacuguuga

SEQ ID NO: 91547 - RNA, 24 nt, Human
uuuuuuuuuuuuuuuuuuucacug

SEQ ID NO: 91548 - RNA, 26 nt, Human
acuacaacuagguagucucuagggac

SEQ ID NO: 91549 - RNA, 22 nt, Human
aggcuuuuccacaaaugaggug

SEQ ID NO: 91550 - RNA, 22 nt, Human
ccgauaacaaagaggcuuuucc

SEQ ID NO: 91551 - RNA, 19 nt, Human
guuuuaggggccuuggaaa

SEQ ID NO: 91552 - RNA, 22 nt, Human
uaaaaaagauacugucucuuua

SEQ ID NO: 91553 - RNA, 19 nt, Human
ucucuagggaccaugaccu

SEQ ID NO: 91554 - RNA, 24 nt, Human
ugacaauaauuauaaauguagguc

SEQ ID NO: 91555 - RNA, 24 nt, Human
ugacacaaggccgauaacaaagag

SEQ ID NO: 91556 - RNA, 22 nt, Human
uuaguguguaauuguuuuucuc

SEQ ID NO: 91557 - RNA, 19 nt, Human
agcagacauaauuccaaaa

SEQ ID NO: 91558 - RNA, 19 nt, Human
agcagacauaauuccaaaa

SEQ ID NO: 91559 - RNA, 20 nt, Human
cagcagacauaauuccaaaa

SEQ ID NO: 91560 - RNA, 28 nt, Human
uccaaaaaccuuuuacagaacgaucucu

SEQ ID NO: 91561 - RNA, 28 nt, Human
uccaaaaaccuuuuacagaacgaucucu

SEQ ID NO: 91562 - RNA, 21 nt, Human
uccugcccagcagacauucau

SEQ ID NO: 91563 - RNA, 25 nt, Human
uuccugcccacagacauucauacag

SEQ ID NO: 91564 - RNA, 24 nt, Human
uuuuuuuuuuuuuuuuucauuuuu

SEQ ID NO: 91565 - RNA, 25 nt, Human
uuuuuuuuuuuuuuuuuucauuuuu

SEQ ID NO: 91566 - RNA, 25 nt, Human
uuuuuuuuuuuuuuuuuucauuuuu

SEQ ID NO: 91567 - RNA, 24 nt, Human
aaaaaaaaaaaaaaaaagcucaag

SEQ ID NO: 91568 - RNA, 23 nt, Human
aaaaaaaaaaaaaaaagcucaag

SEQ ID NO: 91569 - RNA, 26 nt, Human
aaaacaaaguuuuaaagaaaguagaa

SEQ ID NO: 91570 - RNA, 18 nt, Human
aaaagaaaaagaaaauca

SEQ ID NO: 91571 - RNA, 18 nt, Human
aaaagaaaaagaaaauca

SEQ ID NO: 91572 - RNA, 19 nt, Human
aaacaagaaagaugacaca

SEQ ID NO: 91573 - RNA, 21 nt, Human
aaaccccaucuccacaaaaaa

SEQ ID NO: 91574 - RNA, 21 nt, Human
aaaccccaucuccacaaaaaa

SEQ ID NO: 91575 - RNA, 23 nt, Human
aaagcaucaaggcguccuuacag

SEQ ID NO: 91576 - RNA, 23 nt, Human
aaagcaucaaggcguccuuacag

SEQ ID NO: 91577 - RNA, 21 nt, Human
aaaguuuuaaagaaaguagaa

SEQ ID NO: 91578 - RNA, 21 nt, Human
aacacaugacucaggaucuca

SEQ ID NO: 91579 - RNA, 19 nt, Human
aacauagugaaaccccauc

SEQ ID NO: 91580 - RNA, 19 nt, Human
aacauagugaaaccccauc

SEQ ID NO: 91581 - RNA, 20 nt, Human
aacauagugaaaccccaucu

SEQ ID NO: 91582 - RNA, 20 nt, Human
aacauagugaaaccccaucu

SEQ ID NO: 91583 - RNA, 21 nt, Human
aacauagugaaaccccaucuc

SEQ ID NO: 91584 - RNA, 21 nt, Human
aacauagugaaaccccaucuc

SEQ ID NO: 91585 - RNA, 21 nt, Human
aacauagugaaaccccaucuc

SEQ ID NO: 91586 - RNA, 21 nt, Human
aacauagugaaaccccaucuc

SEQ ID NO: 91587 - RNA, 18 nt, Human
aagaaaguagaauccucu

SEQ ID NO: 91588 - RNA, 19 nt, Human
aagaaaguagaauccucug

SEQ ID NO: 91589 - RNA, 18 nt, Human
aagaagagcccagugauc

SEQ ID NO: 91590 - RNA, 24 nt, Human
aagcugaggugggaggaucgcuug

SEQ ID NO: 91591 - RNA, 24 nt, Human
aagcugaggugggaggaucgcuug

SEQ ID NO: 91592 - RNA, 20 nt, Human
aagggaacagaagagugcca

SEQ ID NO: 91593 - RNA, 23 nt, Human
aaguacguaaaaaugcucaaaau

SEQ ID NO: 91594 - RNA, 23 nt, Human
aaguacguaaaaaugcucaaaau

SEQ ID NO: 91595 - RNA, 24 nt, Human
aagugaucugccugccuuggcuuc

SEQ ID NO: 91596 - RNA, 24 nt, Human
aagugaucugccugccuuggcuuc

SEQ ID NO: 91597 - RNA, 26 nt, Human
aaugcccuuccacgccccaaggcauu

SEQ ID NO: 91598 - RNA, 23 nt, Human
acacagccucucuccucaugccu

SEQ ID NO: 91599 - RNA, 23 nt, Human
acacagccucucuccucaugccu

SEQ ID NO: 91600 - RNA, 21 nt, Human
acagaacacgaagcagucccc

SEQ ID NO: 91601 - RNA, 19 nt, Human
acagaaugagacuaucucc

SEQ ID NO: 91602 - RNA, 22 nt, Human
acagagaaaaaguuccucuaga

SEQ ID NO: 91603 - RNA, 22 nt, Human
acagagaaaaaguuccucuaga

SEQ ID NO: 91604 - RNA, 27 nt, Human
acugcagucuacugcaucuugcgugca

SEQ ID NO: 91605 - RNA, 23 nt, Human
acuugcugguuguuuaagugaaa

SEQ ID NO: 91606 - RNA, 25 nt, Human
agaaaaaguuccucuagaaauugaa

SEQ ID NO: 91607 - RNA, 25 nt, Human
agaaaaaguuccucuagaaauugaa

SEQ ID NO: 91608 - RNA, 19 nt, Human
agaacacgaagcagucccc

SEQ ID NO: 91609 - RNA, 24 nt, Human
agaacuuugagaagcugagguggg

SEQ ID NO: 91610 - RNA, 24 nt, Human
agaacuuugagaagcugagguggg

SEQ ID NO: 91611 - RNA, 24 nt, Human
agagauucuccugucucagccucc

SEQ ID NO: 91612 - RNA, 24 nt, Human
agagccacucccuucaggcaagcc

SEQ ID NO: 91613 - RNA, 24 nt, Human
agagccacucccuucaggcaagcc

SEQ ID NO: 91614 - RNA, 24 nt, Human
agaguacugggauuacaggcauga

SEQ ID NO: 91615 - RNA, 24 nt, Human
agaguacugggauuacaggcauga

SEQ ID NO: 91616 - RNA, 22 nt, Human
agauucuccugucucagccucc

SEQ ID NO: 91617 - RNA, 19 nt, Human
agcaguaacaaggugggga

SEQ ID NO: 91618 - RNA, 19 nt, Human
agcaguaacaaggugggga

SEQ ID NO: 91619 - RNA, 19 nt, Human
agcccagugauccugagaa

SEQ ID NO: 91620 - RNA, 23 nt, Human
agccugggacaguggccagacca

SEQ ID NO: 91621 - RNA, 24 nt, Human
agcuacuugggaggcugagguggg

SEQ ID NO: 91622 - RNA, 24 nt, Human
agcuacuugggaggcugagguggg

SEQ ID NO: 91623 - RNA, 22 nt, Human
agcuuaggcaacauagugaaac

SEQ ID NO: 91624 - RNA, 22 nt, Human
agcuuaggcaacauagugaaac

SEQ ID NO: 91625 - RNA, 21 nt, Human
aggaagucagccucggcagga

SEQ ID NO: 91626 - RNA, 24 nt, Human
aggaucgcuugagcccaggaguuu

SEQ ID NO: 91627 - RNA, 24 nt, Human
aggaucgcuugagcccaggaguuu

SEQ ID NO: 91628 - RNA, 24 nt, Human
aggcacaguauuucaugccuguag

SEQ ID NO: 91629 - RNA, 24 nt, Human
aggcacaguauuucaugccuguag

SEQ ID NO: 91630 - RNA, 19 nt, Human
aggcagaaggaagccucug

SEQ ID NO: 91631 - RNA, 24 nt, Human
aggcugaggugggaggacagcuug

SEQ ID NO: 91632 - RNA, 24 nt, Human
aggcugaggugggaggacagcuug

SEQ ID NO: 91633 - RNA, 23 nt, Human
agggaagugggugccugcucagg

SEQ ID NO: 91634 - RNA, 23 nt, Human
aggugggaggaucgcuugagccc

SEQ ID NO: 91635 - RNA, 23 nt, Human
aggugggaggaucgcuugagccc

SEQ ID NO: 91636 - RNA, 23 nt, Human
agguuuccgucuugcuguagggc

SEQ ID NO: 91637 - RNA, 20 nt, Human
aguacugggauuacaggcau

SEQ ID NO: 91638 - RNA, 20 nt, Human
aguacugggauuacaggcau

SEQ ID NO: 91639 - RNA, 22 nt, Human
aguacugggauuacaggcauga

SEQ ID NO: 91640 - RNA, 19 nt, Human
aguagcaguaacaaggugg

SEQ ID NO: 91641 - RNA, 19 nt, Human
aguagcaguaacaaggugg

SEQ ID NO: 91642 - RNA, 18 nt, Human
aguagcugggauuacagg

SEQ ID NO: 91643 - RNA, 18 nt, Human
aguagcugggauuacagg

SEQ ID NO: 91644 - RNA, 24 nt, Human
aguauuucaugccuguagucccag

SEQ ID NO: 91645 - RNA, 24 nt, Human
agugcaguugugucaucuuggcuc

SEQ ID NO: 91646 - RNA, 24 nt, Human
agugcaguugugucaucuuggcuc

SEQ ID NO: 91647 - RNA, 22 nt, Human
aguguuauccacuccuggguuu

SEQ ID NO: 91648 - RNA, 22 nt, Human
aguguuauccacuccuggguuu

SEQ ID NO: 91649 - RNA, 18 nt, Human
auaccagcugccuuccuc

SEQ ID NO: 91650 - RNA, 20 nt, Human
aucgcuugagcccaggaguu

SEQ ID NO: 91651 - RNA, 24 nt, Human
aucgcuugagcccaggaguuugag

SEQ ID NO: 91652 - RNA, 24 nt, Human
augagguuuugccguauuggccag

SEQ ID NO: 91653 - RNA, 24 nt, Human
augagguuuugccguauuggccag

SEQ ID NO: 91654 - RNA, 19 nt, Human
augccuguagucccagaac

SEQ ID NO: 91655 - RNA, 19 nt, Human
augccuguagucccagaac

SEQ ID NO: 91656 - RNA, 24 nt, Human
auggacacacaccuguagucucag

SEQ ID NO: 91657 - RNA, 24 nt, Human
auggacacacaccuguagucucag

SEQ ID NO: 91658 - RNA, 23 nt, Human
auggcaacugaaauguuccaacc

SEQ ID NO: 91659 - RNA, 27 nt, Human
auugaaaaaaaaaaaaaaaaaagcuug

SEQ ID NO: 91660 - RNA, 27 nt, Human
auugaaaaaaaaaaaaaaaaaagcuug

SEQ ID NO: 91661 - RNA, 19 nt, Human
auugcacuucugcuucugc

SEQ ID NO: 91662 - RNA, 24 nt, Human
auugccccccugcacuccagucug

SEQ ID NO: 91663 - RNA, 24 nt, Human
auugccccccugcacuccagucug

SEQ ID NO: 91664 - RNA, 24 nt, Human
auuguguauaugcacugugaaccc

SEQ ID NO: 91665 - RNA, 24 nt, Human
auuucuaaauaaagaaaaugggaa

SEQ ID NO: 91666 - RNA, 22 nt, Human
caaaagaaaaagaaaaucagaa

SEQ ID NO: 91667 - RNA, 22 nt, Human
caaaagaaaaagaaaaucagaa

SEQ ID NO: 91668 - RNA, 20 nt, Human
caagaaagaugacacaggua

SEQ ID NO: 91669 - RNA, 19 nt, Human
caagaagagcccagugauc

SEQ ID NO: 91670 - RNA, 22 nt, Human
caagagauucuccugucucagc

SEQ ID NO: 91671 - RNA, 22 nt, Human
caagagauucuccugucucagc

SEQ ID NO: 91672 - RNA, 22 nt, Human
caagccagacauccccucugcc

SEQ ID NO: 91673 - RNA, 22 nt, Human
caagccagacauccccucugcc

SEQ ID NO: 91674 - RNA, 24 nt, Human
caagccagacauccccucugccaa

SEQ ID NO: 91675 - RNA, 24 nt, Human
caagccagacauccccucugccaa

SEQ ID NO: 91676 - RNA, 22 nt, Human
caagugaucugccugccuuggc

SEQ ID NO: 91677 - RNA, 22 nt, Human
caagugaucugccugccuuggc

SEQ ID NO: 91678 - RNA, 24 nt, Human
cacaccuguagucucagcuacuug

SEQ ID NO: 91679 - RNA, 24 nt, Human
cacaccuguagucucagcuacuug

SEQ ID NO: 91680 - RNA, 22 nt, Human
cacaguauuucaugccuguagu

SEQ ID NO: 91681 - RNA, 22 nt, Human
cacaguauuucaugccuguagu

SEQ ID NO: 91682 - RNA, 21 nt, Human
cacauccccaggccucagcug

SEQ ID NO: 91683 - RNA, 21 nt, Human
cacauccccaggccucagcug

SEQ ID NO: 91684 - RNA, 21 nt, Human
caccacagccucugccuccug

SEQ ID NO: 91685 - RNA, 21 nt, Human
caccacagccucugccuccug

SEQ ID NO: 91686 - RNA, 18 nt, Human
caccgcacccaguccaaa

SEQ ID NO: 91687 - RNA, 18 nt, Human
caccgcacccaguccaaa

SEQ ID NO: 91688 - RNA, 23 nt, Human
caccgcacccaguccaaaaugga

SEQ ID NO: 91689 - RNA, 23 nt, Human
caccgcacccaguccaaaaugga

SEQ ID NO: 91690 - RNA, 20 nt, Human
caccuguagucucagcuacu

SEQ ID NO: 91691 - RNA, 23 nt, Human
caccuguagucucagcuacuugg

SEQ ID NO: 91692 - RNA, 24 nt, Human
caccuguagucucagcuacuuggg

SEQ ID NO: 91693 - RNA, 24 nt, Human
caccuguagucucagcuacuuggg

SEQ ID NO: 91694 - RNA, 18 nt, Human
cacgugaaacaguaaggg

SEQ ID NO: 91695 - RNA, 18 nt, Human
cacuccagucugggugac

SEQ ID NO: 91696 - RNA, 18 nt, Human
cacuccagucugggugac

SEQ ID NO: 91697 - RNA, 22 nt, Human
cacuccagucugggugacagaa

SEQ ID NO: 91698 - RNA, 22 nt, Human
cacuccagucugggugacagaa

SEQ ID NO: 91699 - RNA, 24 nt, Human
cacuccagucugggugacagaaug

SEQ ID NO: 91700 - RNA, 24 nt, Human
cacuccagucugggugacagaaug

SEQ ID NO: 91701 - RNA, 23 nt, Human
cacugcagucuacugcaucugcc

SEQ ID NO: 91702 - RNA, 23 nt, Human
cacugcagucuacugcaucugcc

SEQ ID NO: 91703 - RNA, 28 nt, Human
cacugcagucuacugcaucuugcgugca

SEQ ID NO: 91704 - RNA, 24 nt, Human
cacuggaacacaugacucaggauc

SEQ ID NO: 91705 - RNA, 24 nt, Human
cagaacuuugagaagcugaggugg

SEQ ID NO: 91706 - RNA, 24 nt, Human
cagaacuuugagaagcugaggugg

SEQ ID NO: 91707 - RNA, 20 nt, Human
cagaauuauaacuaaggggu

SEQ ID NO: 91708 - RNA, 20 nt, Human
cagaauuauaacuaaggggu

SEQ ID NO: 91709 - RNA, 24 nt, Human
cagaguacugggauuacaggcaug

SEQ ID NO: 91710 - RNA, 24 nt, Human
cagaguacugggauuacaggcaug

SEQ ID NO: 91711 - RNA, 20 nt, Human
cagccucugccuccuggauu

SEQ ID NO: 91712 - RNA, 21 nt, Human
cagcuacuugggaggcugagg

SEQ ID NO: 91713 - RNA, 24 nt, Human
cagcuacuugggaggcugaggugg

SEQ ID NO: 91714 - RNA, 24 nt, Human
cagcuacuugggaggcugaggugg

SEQ ID NO: 91715 - RNA, 19 nt, Human
cagcugaguguaaaugagc

SEQ ID NO: 91716 - RNA, 18 nt, Human
caggcgauguggcuggaa

SEQ ID NO: 91717 - RNA, 20 nt, Human
cauuccaguucaccuggcug

SEQ ID NO: 91718 - RNA, 20 nt, Human
cauuccaguucaccuggcug

SEQ ID NO: 91719 - RNA, 27 nt, Human
ccaacaaaaacucucugcuauauugaa

SEQ ID NO: 91720 - RNA, 21 nt, Human
ccacaccuggcuaauuuuugu

SEQ ID NO: 91721 - RNA, 21 nt, Human
ccacaccuggcuaauuuuugu

SEQ ID NO: 91722 - RNA, 23 nt, Human
ccacagccucugccuccuggauu

SEQ ID NO: 91723 - RNA, 22 nt, Human
ccaccaaucuucuggaaguaaa

SEQ ID NO: 91724 - RNA, 22 nt, Human
ccacguucagaagucucaacuu

SEQ ID NO: 91725 - RNA, 21 nt, Human
ccagaggagcaaaguguagua

SEQ ID NO: 91726 - RNA, 24 nt, Human
ccagaguacugggauuacaggcau

SEQ ID NO: 91727 - RNA, 24 nt, Human
ccagaguacugggauuacaggcau

SEQ ID NO: 91728 - RNA, 24 nt, Human
ccaggccaggcacaguauuucaug

SEQ ID NO: 91729 - RNA, 24 nt, Human
ccaggccaggcacaguauuucaug

SEQ ID NO: 91730 - RNA, 24 nt, Human
ccaggccucagcugccucaucuau

SEQ ID NO: 91731 - RNA, 24 nt, Human
ccaggccucagcugccucaucuau

SEQ ID NO: 91732 - RNA, 20 nt, Human
cccaagccacuggaacacau

SEQ ID NO: 91733 - RNA, 18 nt, Human
cccagaacuuugagaagc

SEQ ID NO: 91734 - RNA, 18 nt, Human
cccagaacuuugagaagc

SEQ ID NO: 91735 - RNA, 24 nt, Human
cccagaguacugggauuacaggca

SEQ ID NO: 91736 - RNA, 24 nt, Human
cccagaguacugggauuacaggca

SEQ ID NO: 91737 - RNA, 19 nt, Human
ccccaaggcauuccaguuc

SEQ ID NO: 91738 - RNA, 19 nt, Human
ccccaaggcauuccaguuc

SEQ ID NO: 91739 - RNA, 19 nt, Human
ccccaggccucagcugccu

SEQ ID NO: 91740 - RNA, 21 nt, Human
ccccugcacuccagucugggu

SEQ ID NO: 91741 - RNA, 21 nt, Human
ccccugcacuccagucugggu

SEQ ID NO: 91742 - RNA, 23 nt, Human
ccccugcacuccagucuggguga

SEQ ID NO: 91743 - RNA, 23 nt, Human
ccccugcacuccagucuggguga

SEQ ID NO: 91744 - RNA, 24 nt, Human
ccccugcacuccagucugggugac

SEQ ID NO: 91745 - RNA, 23 nt, Human
cccgaguagcugggauuacaggu

SEQ ID NO: 91746 - RNA, 23 nt, Human
cccgaguagcugggauuacaggu

SEQ ID NO: 91747 - RNA, 24 nt, Human
cccgaguagcugggauuacaggug

SEQ ID NO: 91748 - RNA, 24 nt, Human
cccgaguagcugggauuacaggug

SEQ ID NO: 91749 - RNA, 19 nt, Human
cccugcacuccagucuggg

SEQ ID NO: 91750 - RNA, 19 nt, Human
cccugcacuccagucuggg

SEQ ID NO: 91751 - RNA, 19 nt, Human
cccugcacuccagucuggg

SEQ ID NO: 91752 - RNA, 19 nt, Human
cccugcacuccagucuggg

SEQ ID NO: 91753 - RNA, 19 nt, Human
cccugcacuccagucuggg

SEQ ID NO: 91754 - RNA, 20 nt, Human
cccugcacuccagucugggu

SEQ ID NO: 91755 - RNA, 20 nt, Human
cccugcacuccagucugggu

SEQ ID NO: 91756 - RNA, 23 nt, Human
cccugcacuccagucugggugac

SEQ ID NO: 91757 - RNA, 23 nt, Human
cccugcacuccagucugggugac

SEQ ID NO: 91758 - RNA, 21 nt, Human
ccgaguagcugggauuacagg

SEQ ID NO: 91759 - RNA, 21 nt, Human
ccgaguagcugggauuacagg

SEQ ID NO: 91760 - RNA, 19 nt, Human
ccguauuggccaggcuggu

SEQ ID NO: 91761 - RNA, 19 nt, Human
ccguauuggccaggcuggu

SEQ ID NO: 91762 - RNA, 22 nt, Human
ccguauuggccaggcuggucuc

SEQ ID NO: 91763 - RNA, 23 nt, Human
ccguauuggccaggcuggucucg

SEQ ID NO: 91764 - RNA, 23 nt, Human
ccguauuggccaggcuggucucg

SEQ ID NO: 91765 - RNA, 24 nt, Human
ccuccuggauucaagagauucucc

SEQ ID NO: 91766 - RNA, 24 nt, Human
ccuccuggauucaagagauucucc

SEQ ID NO: 91767 - RNA, 19 nt, Human
ccucugccaagaagagccc

SEQ ID NO: 91768 - RNA, 19 nt, Human
ccucugccaagaagagccc

SEQ ID NO: 91769 - RNA, 21 nt, Human
ccugaccucaagugaucugcc

SEQ ID NO: 91770 - RNA, 21 nt, Human
ccugaccucaagugaucugcc

SEQ ID NO: 91771 - RNA, 23 nt, Human
ccugaccucaagugaucugccug

SEQ ID NO: 91772 - RNA, 23 nt, Human
ccugaccucaagugaucugccug

SEQ ID NO: 91773 - RNA, 24 nt, Human
ccugcacuccagucugggugacag

SEQ ID NO: 91774 - RNA, 24 nt, Human
ccugcacuccagucugggugacag

SEQ ID NO: 91775 - RNA, 21 nt, Human
ccuguagucucagcuacuugg

SEQ ID NO: 91776 - RNA, 21 nt, Human
ccuguagucucagcuacuugg

SEQ ID NO: 91777 - RNA, 24 nt, Human
cgcccuguugcccaagcuggagug

SEQ ID NO: 91778 - RNA, 24 nt, Human
cgcccuguugcccaagcuggagug

SEQ ID NO: 91779 - RNA, 25 nt, Human
cgcccuguugcccaagcuggagugc

SEQ ID NO: 91780 - RNA, 25 nt, Human
cgcccuguugcccaagcuggagugc

SEQ ID NO: 91781 - RNA, 18 nt, Human
cgugauugccccccugca

SEQ ID NO: 91782 - RNA, 24 nt, Human
cuauauugaaagugcauccagggg

SEQ ID NO: 91783 - RNA, 18 nt, Human
cucaagugaucugccugc

SEQ ID NO: 91784 - RNA, 20 nt, Human
cucaagugaucugccugccu

SEQ ID NO: 91785 - RNA, 23 nt, Human
cucaagugaucugccugccuugg

SEQ ID NO: 91786 - RNA, 24 nt, Human
cucaccacagccucugccuccugg

SEQ ID NO: 91787 - RNA, 24 nt, Human
cucaccacagccucugccuccugg

SEQ ID NO: 91788 - RNA, 24 nt, Human
cucagccucccgaguagcugggau

SEQ ID NO: 91789 - RNA, 24 nt, Human
cucagccucccgaguagcugggau

SEQ ID NO: 91790 - RNA, 21 nt, Human
cucagggaaauugccugaaaa

SEQ ID NO: 91791 - RNA, 26 nt, Human
cuccugaccucaagugaucugccugc

SEQ ID NO: 91792 - RNA, 26 nt, Human
cuccugaccucaagugaucugccugc

SEQ ID NO: 91793 - RNA, 24 nt, Human
cucgcccuguugcccaagcuggag

SEQ ID NO: 91794 - RNA, 24 nt, Human
cucgcccuguugcccaagcuggag

SEQ ID NO: 91795 - RNA, 21 nt, Human
cugcacuccagucugggugac

SEQ ID NO: 91796 - RNA, 21 nt, Human
cugcacuccagucugggugac

SEQ ID NO: 91797 - RNA, 23 nt, Human
cugcacuccagucugggugacag

SEQ ID NO: 91798 - RNA, 23 nt, Human
cugcacuccagucugggugacag

SEQ ID NO: 91799 - RNA, 23 nt, Human
cugcagggcugugaagugagaca

SEQ ID NO: 91800 - RNA, 24 nt, Human
cuggaaggcaggcagaaggaagcc

SEQ ID NO: 91801 - RNA, 23 nt, Human
cugucucagccucccgaguagcu

SEQ ID NO: 91802 - RNA, 23 nt, Human
cugucucagccucccgaguagcu

SEQ ID NO: 91803 - RNA, 25 nt, Human
cuuaggaagggggagaucagagaga

SEQ ID NO: 91804 - RNA, 25 nt, Human
cuuaggaagggggagaucagagaga

SEQ ID NO: 91805 - RNA, 21 nt, Human
gaaaccccaucuccacaaaaa

SEQ ID NO: 91806 - RNA, 21 nt, Human
gaaaccccaucuccacaaaaa

SEQ ID NO: 91807 - RNA, 22 nt, Human
gaaugagggccucauccgaaga

SEQ ID NO: 91808 - RNA, 22 nt, Human
gacagaaugagacuaucuccaa

SEQ ID NO: 91809 - RNA, 23 nt, Human
gaccucaagugaucugccugccu

SEQ ID NO: 91810 - RNA, 23 nt, Human
gaccucaagugaucugccugccu

SEQ ID NO: 91811 - RNA, 22 nt, Human
gacuugcaaaagaaaaagaaaa

SEQ ID NO: 91812 - RNA, 23 nt, Human
gagaccagcuuaggcaacauagu

SEQ ID NO: 91813 - RNA, 22 nt, Human
gagcagcugaguguaaaugagc

SEQ ID NO: 91814 - RNA, 18 nt, Human
gagcauucacauaucaaa

SEQ ID NO: 91815 - RNA, 18 nt, Human
gagcauucacauaucaaa

SEQ ID NO: 91816 - RNA, 21 nt, Human
gaggacagcuugagccuggga

SEQ ID NO: 91817 - RNA, 21 nt, Human
gaggacagcuugagccuggga

SEQ ID NO: 91818 - RNA, 21 nt, Human
gaggcugaggugggaggacag

SEQ ID NO: 91819 - RNA, 21 nt, Human
gaggcugaggugggaggacag

SEQ ID NO: 91820 - RNA, 21 nt, Human
gaggugggaggaucgcuugag

SEQ ID NO: 91821 - RNA, 18 nt, Human
gagguuuugccguauugg

SEQ ID NO: 91822 - RNA, 18 nt, Human
gagguuuugccguauugg

SEQ ID NO: 91823 - RNA, 22 nt, Human
gagguuuugccguauuggccag

SEQ ID NO: 91824 - RNA, 22 nt, Human
gagguuuugccguauuggccag

SEQ ID NO: 91825 - RNA, 23 nt, Human
gaucaagcuccaccaaucuucug

SEQ ID NO: 91826 - RNA, 24 nt, Human
gaucgcuugagcccaggaguuuga

SEQ ID NO: 91827 - RNA, 24 nt, Human
gaucgcuugagcccaggaguuuga

SEQ ID NO: 91828 - RNA, 18 nt, Human
gauuacaggcaugaguca

SEQ ID NO: 91829 - RNA, 18 nt, Human
gauuacaggcaugaguca

SEQ ID NO: 91830 - RNA, 22 nt, Human
gauuacaggcaugagucaccgc

SEQ ID NO: 91831 - RNA, 22 nt, Human
gauuacaggcaugagucaccgc

SEQ ID NO: 91832 - RNA, 23 nt, Human
gauuacaggcaugagucaccgca

SEQ ID NO: 91833 - RNA, 23 nt, Human
gauuacaggcaugagucaccgca

SEQ ID NO: 91834 - RNA, 23 nt, Human
gcaguccccgucggcaugggcug

SEQ ID NO: 91835 - RNA, 18 nt, Human
gcccagugauccugagaa

SEQ ID NO: 91836 - RNA, 22 nt, Human
gccccaaggcauuccaguucac

SEQ ID NO: 91837 - RNA, 22 nt, Human
gccccaaggcauuccaguucac

SEQ ID NO: 91838 - RNA, 22 nt, Human
gcccuguugcccaagcuggagu

SEQ ID NO: 91839 - RNA, 22 nt, Human
gcccuguugcccaagcuggagu

SEQ ID NO: 91840 - RNA, 25 nt, Human
gcccuguugcccaagcuggagugca

SEQ ID NO: 91841 - RNA, 25 nt, Human
gcccuguugcccaagcuggagugca

SEQ ID NO: 91842 - RNA, 22 nt, Human
gcccuuccacgccccaaggcau

SEQ ID NO: 91843 - RNA, 20 nt, Human
gccucaucuauaaaugaagg

SEQ ID NO: 91844 - RNA, 20 nt, Human
gccucaucuauaaaugaagg

SEQ ID NO: 91845 - RNA, 20 nt, Human
gccugaagccaguguuaucc

SEQ ID NO: 91846 - RNA, 20 nt, Human
gccugaagccaguguuaucc

SEQ ID NO: 91847 - RNA, 24 nt, Human
gccugggaggucgagacuacagug

SEQ ID NO: 91848 - RNA, 24 nt, Human
gccugggaggucgagacuacagug

SEQ ID NO: 91849 - RNA, 24 nt, Human
gccuuggcuucccagaguacuggg

SEQ ID NO: 91850 - RNA, 24 nt, Human
gccuuggcuucccagaguacuggg

SEQ ID NO: 91851 - RNA, 21 nt, Human
gcucaccacagccucugccuc

SEQ ID NO: 91852 - RNA, 21 nt, Human
gcucaccacagccucugccuc

SEQ ID NO: 91853 - RNA, 23 nt, Human
gcuggucucgaacuccugaccuc

SEQ ID NO: 91854 - RNA, 23 nt, Human
gcuggucucgaacuccugaccuc

SEQ ID NO: 91855 - RNA, 18 nt, Human
ggacaguggccagaccaa

SEQ ID NO: 91856 - RNA, 23 nt, Human
ggauaagaugucuucaugucuug

SEQ ID NO: 91857 - RNA, 25 nt, Human
ggauaagaugucuucaugucuuggg

SEQ ID NO: 91858 - RNA, 22 nt, Human
ggaucgcuugagcccaggaguu

SEQ ID NO: 91859 - RNA, 22 nt, Human
ggaucgcuugagcccaggaguu

SEQ ID NO: 91860 - RNA, 22 nt, Human
ggauuacaggcaugagucaccg

SEQ ID NO: 91861 - RNA, 22 nt, Human
ggauuacaggcaugagucaccg

SEQ ID NO: 91862 - RNA, 25 nt, Human
ggcaggaggcuggagguuagggacc

SEQ ID NO: 91863 - RNA, 25 nt, Human
ggcaggaggcuggagguuagggacc

SEQ ID NO: 91864 - RNA, 24 nt, Human
ggcuggucucgaacuccugaccuc

SEQ ID NO: 91865 - RNA, 24 nt, Human
ggcuggucucgaacuccugaccuc

SEQ ID NO: 91866 - RNA, 23 nt, Human
gggacaguggccagaccaaguag

SEQ ID NO: 91867 - RNA, 19 nt, Human
gggagguuuccgucuugcu

SEQ ID NO: 91868 - RNA, 19 nt, Human
ggucucgaacuccugaccu

SEQ ID NO: 91869 - RNA, 19 nt, Human
ggucucgaacuccugaccu

SEQ ID NO: 91870 - RNA, 18 nt, Human
guagcugggauuacaggu

SEQ ID NO: 91871 - RNA, 18 nt, Human
guagcugggauuacaggu

SEQ ID NO: 91872 - RNA, 22 nt, Human
guauuucaugccuguaguccca

SEQ ID NO: 91873 - RNA, 22 nt, Human
guauuucaugccuguaguccca

SEQ ID NO: 91874 - RNA, 22 nt, Human
gugaaacaguaagggaacagaa

SEQ ID NO: 91875 - RNA, 23 nt, Human
guguaguagcaguaacaaggugg

SEQ ID NO: 91876 - RNA, 23 nt, Human
guguaguagcaguaacaaggugg

SEQ ID NO: 91877 - RNA, 22 nt, Human
gugucaucuuggcucaccacag

SEQ ID NO: 91878 - RNA, 22 nt, Human
gugucaucuuggcucaccacag

SEQ ID NO: 91879 - RNA, 22 nt, Human
guuaaccacaggacuuuggauc

SEQ ID NO: 91880 - RNA, 22 nt, Human
guuaaccacaggacuuuggauc

SEQ ID NO: 91881 - RNA, 21 nt, Human
guucacauccccaggccucag

SEQ ID NO: 91882 - RNA, 22 nt, Human
guuccaaccccaauauugaauu

SEQ ID NO: 91883 - RNA, 19 nt, Human
uaaaaugcaccuggucccc

SEQ ID NO: 91884 - RNA, 19 nt, Human
uaaaaugcaccuggucccc

SEQ ID NO: 91885 - RNA, 22 nt, Human
uaacagagaaaaaguuccucua

SEQ ID NO: 91886 - RNA, 22 nt, Human
uaacagagaaaaaguuccucua

SEQ ID NO: 91887 - RNA, 21 nt, Human
uaagaugucuucaugucuugg

SEQ ID NO: 91888 - RNA, 18 nt, Human
uaauuuuuguguuuuuag

SEQ ID NO: 91889 - RNA, 18 nt, Human
uaauuuuuguguuuuuag

SEQ ID NO: 91890 - RNA, 24 nt, Human
uaauuuuuguguuuuuaguaauga

SEQ ID NO: 91891 - RNA, 24 nt, Human
uaauuuuuguguuuuuaguaauga

SEQ ID NO: 91892 - RNA, 24 nt, Human
uacaggcaugagucaccgcaccca

SEQ ID NO: 91893 - RNA, 24 nt, Human
uacaggcaugagucaccgcaccca

SEQ ID NO: 91894 - RNA, 19 nt, Human
uacagugagccgugauugc

SEQ ID NO: 91895 - RNA, 19 nt, Human
uacagugagccgugauugc

SEQ ID NO: 91896 - RNA, 24 nt, Human
uacugggauuacaggcaugaguca

SEQ ID NO: 91897 - RNA, 24 nt, Human
uacugggauuacaggcaugaguca

SEQ ID NO: 91898 - RNA, 22 nt, Human
uagaaauugaaaaaaaaaaaaa

SEQ ID NO: 91899 - RNA, 22 nt, Human
uagaaauugaaaaaaaaaaaaa

SEQ ID NO: 91900 - RNA, 20 nt, Human
uagaauccucugugugcucc

SEQ ID NO: 91901 - RNA, 21 nt, Human
uagacuugcaaaagaaaaaga

SEQ ID NO: 91902 - RNA, 24 nt, Human
uagcaguaacaagguggggacugu

SEQ ID NO: 91903 - RNA, 24 nt, Human
uagcaguaacaagguggggacugu

SEQ ID NO: 91904 - RNA, 20 nt, Human
uaggcaacauagugaaaccc

SEQ ID NO: 91905 - RNA, 20 nt, Human
uaggcaacauagugaaaccc

SEQ ID NO: 91906 - RNA, 19 nt, Human
uaguaaugaugagguuuug

SEQ ID NO: 91907 - RNA, 19 nt, Human
uaguaaugaugagguuuug

SEQ ID NO: 91908 - RNA, 20 nt, Human
uagugugaaagcaggcuggg

SEQ ID NO: 91909 - RNA, 21 nt, Human
uaucaaaugaaacacuccuaa

SEQ ID NO: 91910 - RNA, 21 nt, Human
uaucaaaugaaacacuccuaa

SEQ ID NO: 91911 - RNA, 23 nt, Human
ucaccacagccucugccuccugg

SEQ ID NO: 91912 - RNA, 23 nt, Human
ucaccacagccucugccuccugg

SEQ ID NO: 91913 - RNA, 20 nt, Human
ucagccucccgaguagcugg

SEQ ID NO: 91914 - RNA, 20 nt, Human
ucagccucccgaguagcugg

SEQ ID NO: 91915 - RNA, 18 nt, Human
ucaugccuguagucccag

SEQ ID NO: 91916 - RNA, 25 nt, Human
uccacaaaaaaaauaaaaaguuagc

SEQ ID NO: 91917 - RNA, 25 nt, Human
uccacaaaaaaaauaaaaaguuagc

SEQ ID NO: 91918 - RNA, 20 nt, Human
uccaggaauuaacagagaaa

SEQ ID NO: 91919 - RNA, 24 nt, Human
uccagucugggugacagaaugaga

SEQ ID NO: 91920 - RNA, 24 nt, Human
uccagucugggugacagaaugaga

SEQ ID NO: 91921 - RNA, 24 nt, Human
ucccagaguacugggauuacaggc

SEQ ID NO: 91922 - RNA, 24 nt, Human
ucccagaguacugggauuacaggc

SEQ ID NO: 91923 - RNA, 24 nt, Human
uccccaggccaggcacaguauuuc

SEQ ID NO: 91924 - RNA, 24 nt, Human
uccccaggccaggcacaguauuuc

SEQ ID NO: 91925 - RNA, 21 nt, Human
uccccaggccucagcugccuc

SEQ ID NO: 91926 - RNA, 18 nt, Human
uccccauggaccauuugu

SEQ ID NO: 91927 - RNA, 23 nt, Human
ucccgaguagcugggauuacagg

SEQ ID NO: 91928 - RNA, 23 nt, Human
ucccgaguagcugggauuacagg

SEQ ID NO: 91929 - RNA, 24 nt, Human
ucccgaguagcugggauuacaggu

SEQ ID NO: 91930 - RNA, 24 nt, Human
ucccgaguagcugggauuacaggu

SEQ ID NO: 91931 - RNA, 21 nt, Human
uccuggauucaagagauucuc

SEQ ID NO: 91932 - RNA, 21 nt, Human
uccuggauucaagagauucuc

SEQ ID NO: 91933 - RNA, 24 nt, Human
uccuggauucaagagauucuccug

SEQ ID NO: 91934 - RNA, 24 nt, Human
uccuggauucaagagauucuccug

SEQ ID NO: 91935 - RNA, 22 nt, Human
uccuuagugugaaagcaggcug

SEQ ID NO: 91936 - RNA, 24 nt, Human
uccuuagugugaaagcaggcuggg

SEQ ID NO: 91937 - RNA, 19 nt, Human
ucgcuugagcccaggaguu

SEQ ID NO: 91938 - RNA, 21 nt, Human
ucgcuugagcccaggaguuug

SEQ ID NO: 91939 - RNA, 21 nt, Human
ucgcuugagcccaggaguuug

SEQ ID NO: 91940 - RNA, 19 nt, Human
ucgucacauuauuguguau

SEQ ID NO: 91941 - RNA, 24 nt, Human
ucuccugucucagccucccgagua

SEQ ID NO: 91942 - RNA, 24 nt, Human
ucuccugucucagccucccgagua

SEQ ID NO: 91943 - RNA, 21 nt, Human
ucucgaacuccugaccucaag

SEQ ID NO: 91944 - RNA, 21 nt, Human
ucucgaacuccugaccucaag

SEQ ID NO: 91945 - RNA, 22 nt, Human
ucucgcccuguugcccaagcug

SEQ ID NO: 91946 - RNA, 23 nt, Human
ucucgcccuguugcccaagcugg

SEQ ID NO: 91947 - RNA, 23 nt, Human
ucucgcccuguugcccaagcugg

SEQ ID NO: 91948 - RNA, 24 nt, Human
ucucgcccuguugcccaagcugga

SEQ ID NO: 91949 - RNA, 24 nt, Human
ucucgcccuguugcccaagcugga

SEQ ID NO: 91950 - RNA, 26 nt, Human
ucucgcccuguugcccaagcuggagu

SEQ ID NO: 91951 - RNA, 26 nt, Human
ucucgcccuguugcccaagcuggagu

SEQ ID NO: 91952 - RNA, 27 nt, Human
ucucgcccuguugcccaagcuggagug

SEQ ID NO: 91953 - RNA, 20 nt, Human
ucugcaggaccaucuccauu

SEQ ID NO: 91954 - RNA, 22 nt, Human
ugaaaaaaaaaaaaaaaaaagc

SEQ ID NO: 91955 - RNA, 20 nt, Human
ugaaacaagaaagaugacac

SEQ ID NO: 91956 - RNA, 22 nt, Human
ugaaacacuccuaaugcccuuc

SEQ ID NO: 91957 - RNA, 22 nt, Human
ugaaacacuccuaaugcccuuc

SEQ ID NO: 91958 - RNA, 21 nt, Human
ugaaacaguaagggaacagaa

SEQ ID NO: 91959 - RNA, 23 nt, Human
ugaaacaguaagggaacagaaga

SEQ ID NO: 91960 - RNA, 23 nt, Human
ugaaacaguaagggaacagaaga

SEQ ID NO: 91961 - RNA, 19 nt, Human
ugaaagugcauccaggggc

SEQ ID NO: 91962 - RNA, 24 nt, Human
ugacagaaugagacuaucuccaaa

SEQ ID NO: 91963 - RNA, 24 nt, Human
ugacagaaugagacuaucuccaaa

SEQ ID NO: 91964 - RNA, 18 nt, Human
ugaccucaagugaucugc

SEQ ID NO: 91965 - RNA, 18 nt, Human
ugaccucaagugaucugc

SEQ ID NO: 91966 - RNA, 24 nt, Human
ugaccucaagugaucugccugccu

SEQ ID NO: 91967 - RNA, 24 nt, Human
ugaccucaagugaucugccugccu

SEQ ID NO: 91968 - RNA, 18 nt, Human
ugacucaggaucucagca

SEQ ID NO: 91969 - RNA, 24 nt, Human
ugagaccagcuuaggcaacauagu

SEQ ID NO: 91970 - RNA, 23 nt, Human
ugagcccaggaguuugagaccag

SEQ ID NO: 91971 - RNA, 23 nt, Human
ugagcccaggaguuugagaccag

SEQ ID NO: 91972 - RNA, 20 nt, Human
ugagccgugauugccccccu

SEQ ID NO: 91973 - RNA, 20 nt, Human
ugagccgugauugccccccu

SEQ ID NO: 91974 - RNA, 18 nt, Human
ugagccugggaggucgag

SEQ ID NO: 91975 - RNA, 18 nt, Human
ugagccugggaggucgag

SEQ ID NO: 91976 - RNA, 22 nt, Human
ugagccugggaggucgagacua

SEQ ID NO: 91977 - RNA, 22 nt, Human
ugagccugggaggucgagacua

SEQ ID NO: 91978 - RNA, 18 nt, Human
ugaggugggaggacagcu

SEQ ID NO: 91979 - RNA, 18 nt, Human
ugaggugggaggacagcu

SEQ ID NO: 91980 - RNA, 24 nt, Human
ugaggugggaggacagcuugagcc

SEQ ID NO: 91981 - RNA, 24 nt, Human
ugaggugggaggacagcuugagcc

SEQ ID NO: 91982 - RNA, 18 nt, Human
ugaggugggaggaucgcu

SEQ ID NO: 91983 - RNA, 18 nt, Human
ugaggugggaggaucgcu

SEQ ID NO: 91984 - RNA, 20 nt, Human
ugaggugggaggaucgcuug

SEQ ID NO: 91985 - RNA, 20 nt, Human
ugaggugggaggaucgcuug

SEQ ID NO: 91986 - RNA, 23 nt, Human
ugaggugggaggaucgcuugagc

SEQ ID NO: 91987 - RNA, 23 nt, Human
ugaggugggaggaucgcuugagc

SEQ ID NO: 91988 - RNA, 24 nt, Human
ugaggugggaggaucgcuugagcc

SEQ ID NO: 91989 - RNA, 24 nt, Human
ugaggugggaggaucgcuugagcc

SEQ ID NO: 91990 - RNA, 24 nt, Human
ugagguuuugccguauuggccagg

SEQ ID NO: 91991 - RNA, 24 nt, Human
ugagguuuugccguauuggccagg

SEQ ID NO: 91992 - RNA, 30 nt, Human
ugaugagguuuugccguauuggccaggcuu

SEQ ID NO: 91993 - RNA, 30 nt, Human; identical to SEQ ID NO: 91992

SEQ ID NO: 91994 - RNA, 18 nt, Human
ugcaaaagaaaaagaaaa

SEQ ID NO: 91995 - RNA, 18 nt, Human
ugcaaaagaaaaagaaaa

SEQ ID NO: 91996 - RNA, 20 nt, Human
ugcauggacacacaccugua

SEQ ID NO: 91997 - RNA, 20 nt, Human
ugcauggacacacaccugua

SEQ ID NO: 91998 - RNA, 24 nt, Human
ugccguauuggccaggcuggucuc

SEQ ID NO: 91999 - RNA, 24 nt, Human
ugccguauuggccaggcuggucuc

SEQ ID NO: 92000 - RNA, 21 nt, Human
ugccucaucuauaaaugaagg

SEQ ID NO: 92001 - RNA, 21 nt, Human
ugccucaucuauaaaugaagg

SEQ ID NO: 92002 - RNA, 19 nt, Human
ugccuuggcuucccagagu

SEQ ID NO: 92003 - RNA, 19 nt, Human
ugccuuggcuucccagagu

SEQ ID NO: 92004 - RNA, 23 nt, Human
ugcugggcaggaggcuggagguu

SEQ ID NO: 92005 - RNA, 20 nt, Human
ugcuucugcaggaccaucuc

SEQ ID NO: 92006 - RNA, 20 nt, Human
uggagugcaguugugucauc

SEQ ID NO: 92007 - RNA, 20 nt, Human
uggagugcaguugugucauc

SEQ ID NO: 92008 - RNA, 24 nt, Human
uggagugcaguugugucaucuugg

SEQ ID NO: 92009 - RNA, 24 nt, Human
uggagugcaguugugucaucuugg

SEQ ID NO: 92010 - RNA, 22 nt, Human
uggccagaccaaguaggaaguc

SEQ ID NO: 92011 - RNA, 24 nt, Human
uggccagaccaaguaggaagucag

SEQ ID NO: 92012 - RNA, 24 nt, Human
uggccaggcuggucucgaacuccu

SEQ ID NO: 92013 - RNA, 24 nt, Human
uggccaggcuggucucgaacuccu

SEQ ID NO: 92014 - RNA, 21 nt, Human
uggcugcagaaucgcaaggug

SEQ ID NO: 92015 - RNA, 19 nt, Human
ugggaagagacuucaagac

SEQ ID NO: 92016 - RNA, 19 nt, Human
ugggaggcugaggugggag

SEQ ID NO: 92017 - RNA, 19 nt, Human
ugggaggcugaggugggag

SEQ ID NO: 92018 - RNA, 24 nt, Human
ugggaggucgagacuacagugagc

SEQ ID NO: 92019 - RNA, 24 nt, Human
ugggaggucgagacuacagugagc

SEQ ID NO: 92020 - RNA, 18 nt, Human
ugggauuacaggcaugag

SEQ ID NO: 92021 - RNA, 18 nt, Human
ugggauuacaggcaugag

SEQ ID NO: 92022 - RNA, 18 nt, Human
ugggauuacaggcaugag

SEQ ID NO: 92023 - RNA, 18 nt, Human
ugggauuacaggcaugag

SEQ ID NO: 92024 - RNA, 21 nt, Human
ugggauuacaggcaugaguca

SEQ ID NO: 92025 - RNA, 21 nt, Human
ugggauuacaggcaugaguca

SEQ ID NO: 92026 - RNA, 22 nt, Human
ugggauuacaggcaugagucac

SEQ ID NO: 92027 - RNA, 22 nt, Human
ugggauuacaggcaugagucac

SEQ ID NO: 92028 - RNA, 23 nt, Human
ugggauuacaggcaugagucacc

SEQ ID NO: 92029 - RNA, 23 nt, Human
ugggauuacaggcaugagucacc

SEQ ID NO: 92030 - RNA, 24 nt, Human
ugggauuacaggcaugagucaccg

SEQ ID NO: 92031 - RNA, 24 nt, Human
ugggauuacaggcaugagucaccg

SEQ ID NO: 92032 - RNA, 21 nt, Human
ugggauuacaggugcucgccg

SEQ ID NO: 92033 - RNA, 21 nt, Human
ugggauuacaggugcucgccg

SEQ ID NO: 92034 - RNA, 22 nt, Human
ugggauuacaggugcucgccgc

SEQ ID NO: 92035 - RNA, 22 nt, Human
ugggauuacaggugcucgccgc

SEQ ID NO: 92036 - RNA, 24 nt, Human
ugggauuacaggugcucgccgcca

SEQ ID NO: 92037 - RNA, 24 nt, Human
ugggauuacaggugcucgccgcca

SEQ ID NO: 92038 - RNA, 18 nt, Human
ugggcaggaggcuggagg

SEQ ID NO: 92039 - RNA, 19 nt, Human
ugggccuggcauagaccaa

SEQ ID NO: 92040 - RNA, 19 nt, Human
ugggccuggcauagaccaa

SEQ ID NO: 92041 - RNA, 18 nt, Human
ugggucagaauacagaac

SEQ ID NO: 92042 - RNA, 19 nt, Human
ugggugccugcucaggguu

SEQ ID NO: 92043 - RNA, 18 nt, Human
uguaaagggagguuuccg

SEQ ID NO: 92044 - RNA, 23 nt, Human
uguaaaugagccaucaucuuccu

SEQ ID NO: 92045 - RNA, 23 nt, Human
uguaaaugagccaucaucuuccu

SEQ ID NO: 92046 - RNA, 24 nt, Human
ugucucagccucccgaguagcugg

SEQ ID NO: 92047 - RNA, 24 nt, Human
ugucucagccucccgaguagcugg

SEQ ID NO: 92048 - RNA, 21 nt, Human
ugugaaauucacuuuucccca

SEQ ID NO: 92049 - RNA, 23 nt, Human
uuaaagaaaguagaauccucugu

SEQ ID NO: 92050 - RNA, 22 nt, Human
uuaguaaugaugagguuuugcc

SEQ ID NO: 92051 - RNA, 22 nt, Human
uuaguaaugaugagguuuugcc

SEQ ID NO: 92052 - RNA, 19 nt, Human
uuauaaaugcaggcaccac

SEQ ID NO: 92053 - RNA, 23 nt, Human
uucaugucuugggaccaauuucu

SEQ ID NO: 92054 - RNA, 21 nt, Human
uuccaaccccaauauugaauu

SEQ ID NO: 92055 - RNA, 20 nt, Human
uuccuguuucuagaaugaca

SEQ ID NO: 92056 - RNA, 20 nt, Human
uuccuguuucuagaaugaca

SEQ ID NO: 92057 - RNA, 23 nt, Human
uuccuugacauuuuuuuaugagc

SEQ ID NO: 92058 - RNA, 23 nt, Human
uuccuugacauuuuuuuaugagc

SEQ ID NO: 92059 - RNA, 25 nt, Human
uuccuugacauuuuuuuaugagccg

SEQ ID NO: 92060 - RNA, 25 nt, Human
uuccuugacauuuuuuuaugagccg

SEQ ID NO: 92061 - RNA, 21 nt, Human
uucuucagaugauuacacaga

SEQ ID NO: 92062 - RNA, 22 nt, Human
uugagcccaggaguuugagacc

SEQ ID NO: 92063 - RNA, 22 nt, Human
uugagcccaggaguuugagacc

SEQ ID NO: 92064 - RNA, 23 nt, Human
uugaggucuaagaaccaacaaaa

SEQ ID NO: 92065 - RNA, 23 nt, Human
uugaggucuaagaaccaacaaaa

SEQ ID NO: 92066 - RNA, 18 nt, Human
uugcagagcagcugagug

SEQ ID NO: 92067 - RNA, 18 nt, Human
uugcagagcagcugagug

SEQ ID NO: 92068 - RNA, 22 nt, Human
uugcccaagcuggagugcaguu

SEQ ID NO: 92069 - RNA, 22 nt, Human
uugcccaagcuggagugcaguu

SEQ ID NO: 92070 - RNA, 22 nt, Human
uugccccccugcacuccagucu

SEQ ID NO: 92071 - RNA, 24 nt, Human
uugccguauuggccaggcuggucu

SEQ ID NO: 92072 - RNA, 24 nt, Human
uugccguauuggccaggcuggucu

SEQ ID NO: 92073 - RNA, 20 nt, Human
uugggaccaauuucuucaga

SEQ ID NO: 92074 - RNA, 22 nt, Human
uuguguuuuuaguaaugaugag

SEQ ID NO: 92075 - RNA, 22 nt, Human
uuguguuuuuaguaaugaugag

SEQ ID NO: 92076 - RNA, 22 nt, Human
uuuguucccuguuuguccacuc

SEQ ID NO: 92077 - RNA, 18 nt, Human
uuuuuguguuuuuaguaa

SEQ ID NO: 92078 - RNA, 18 nt, Human
uuuuuguguuuuuaguaa

SEQ ID NO: 92079 - RNA, 23 nt, Human
uuuuuguguuuuuaguaaugaug

SEQ ID NO: 92080 - RNA, 23 nt, Human
uuuuuguguuuuuaguaaugaug

SEQ ID NO: 92081 - RNA, 18 nt, Human
uuuuuuuuuuaaacaagg

SEQ ID NO: 92082 - RNA, 18 nt, Human
uuuuuuuuuuaaacaagg

SEQ ID NO: 92083 - RNA, 21 nt, Human
aaaaaaaaaaaaaaaaagucu

SEQ ID NO: 92084 - RNA, 21 nt, Human
aaaaaaaaaaaaaaaaagucu

SEQ ID NO: 92085 - RNA, 21 nt, Human
aaaaaaaaaaaaaaaaagucu

SEQ ID NO: 92086 - RNA, 27 nt, Human
aaacaaccaacgaaagaucuuugagac

SEQ ID NO: 92087 - RNA, 27 nt, Human
aaacaaccaacgaaagaucuuugagac

SEQ ID NO: 92088 - RNA, 27 nt, Human
aaacaaccaacgaaagaucuuugagac

SEQ ID NO: 92089 - RNA, 23 nt, Human
aaagagaaagcaggaacaaagaa

SEQ ID NO: 92090 - RNA, 23 nt, Human
aaagagaaagcaggaacaaagaa

SEQ ID NO: 92091 - RNA, 23 nt, Human
aaagagaaagcaggaacaaagaa

SEQ ID NO: 92092 - RNA, 21 nt, Human
aaaggcagagaugaugggcac

SEQ ID NO: 92093 - RNA, 21 nt, Human
aaaggcagagaugaugggcac

SEQ ID NO: 92094 - RNA, 21 nt, Human
aaaggcagagaugaugggcac

SEQ ID NO: 92095 - RNA, 25 nt, Human
aacaauaacauguauggcacugaaa

SEQ ID NO: 92096 - RNA, 25 nt, Human
aacaauaacauguauggcacugaaa

SEQ ID NO: 92097 - RNA, 23 nt, Human
aacacaaauauggggaauuuaua

SEQ ID NO: 92098 - RNA, 23 nt, Human
aacacaaauauggggaauuuaua

SEQ ID NO: 92099 - RNA, 23 nt, Human
aacacaaauauggggaauuuaua

SEQ ID NO: 92100 - RNA, 18 nt, Human
aacacuuugggaggcuga

SEQ ID NO: 92101 - RNA, 18 nt, Human
aacacuuugggaggcuga

SEQ ID NO: 92102 - RNA, 18 nt, Human
aacacuuugggaggcuga

SEQ ID NO: 92103 - RNA, 24 nt, Human
aacacuuugggaggcugagguggg

SEQ ID NO: 92104 - RNA, 24 nt, Human
aacacuuugggaggcugagguggg

SEQ ID NO: 92105 - RNA, 24 nt, Human
aacacuuugggaggcugagguggg

SEQ ID NO: 92106 - RNA, 18 nt, Human
aacaggaugaaaugaagg

SEQ ID NO: 92107 - RNA, 18 nt, Human
aacaggaugaaaugaagg

SEQ ID NO: 92108 - RNA, 18 nt, Human
aacaggaugaaaugaagg

SEQ ID NO: 92109 - RNA, 19 nt, Human
aacauggugaaacccuguc

SEQ ID NO: 92110 - RNA, 19 nt, Human
aacauggugaaacccuguc

SEQ ID NO: 92111 - RNA, 19 nt, Human
aacauggugaaacccuguc

SEQ ID NO: 92112 - RNA, 20 nt, Human
aacauggugaaacccugucu

SEQ ID NO: 92113 - RNA, 20 nt, Human
aacauggugaaacccugucu

SEQ ID NO: 92114 - RNA, 20 nt, Human
aacauggugaaacccugucu

SEQ ID NO: 92115 - RNA, 21 nt, Human
aacauggugaaacccugucuc

SEQ ID NO: 92116 - RNA, 21 nt, Human
aacauggugaaacccugucuc

SEQ ID NO: 92117 - RNA, 21 nt, Human
aacauggugaaacccugucuc

SEQ ID NO: 92118 - RNA, 23 nt, Human
aaccccacgauuagucucaucuc

SEQ ID NO: 92119 - RNA, 20 nt, Human
aagaccccgcgcucggcgcc

SEQ ID NO: 92120 - RNA, 19 nt, Human
aagcaggaacaaagaacua

SEQ ID NO: 92121 - RNA, 19 nt, Human
aagcaggaacaaagaacua

SEQ ID NO: 92122 - RNA, 19 nt, Human
aagcaggaacaaagaacua

SEQ ID NO: 92123 - RNA, 18 nt, Human
aaggagcuggccuggagg

SEQ ID NO: 92124 - RNA, 18 nt, Human
aaggagcuggccuggagg

SEQ ID NO: 92125 - RNA, 18 nt, Human
aaggagcuggccuggagg

SEQ ID NO: 92126 - RNA, 21 nt, Human
aagguacaaaugcaaggcaau

SEQ ID NO: 92127 - RNA, 21 nt, Human
aagguacaaaugcaaggcaau

SEQ ID NO: 92128 - RNA, 19 nt, Human
aaugaagguaaagaaggga

SEQ ID NO: 92129 - RNA, 19 nt, Human
aaugaagguaaagaaggga

SEQ ID NO: 92130 - RNA, 21 nt, Human
acaaaaagggcggaggauaug

SEQ ID NO: 92131 - RNA, 21 nt, Human
acaaaaagggcggaggauaug

SEQ ID NO: 92132 - RNA, 21 nt, Human
acaaaaagggcggaggauaug

SEQ ID NO: 92133 - RNA, 24 nt, Human
acaauaacauguauggcacugaaa

SEQ ID NO: 92134 - RNA, 19 nt, Human
acagaaaaggagcuggccu

SEQ ID NO: 92135 - RNA, 19 nt, Human
acagaaaaggagcuggccu

SEQ ID NO: 92136 - RNA, 19 nt, Human
acagaaaaggagcuggccu

SEQ ID NO: 92137 - RNA, 22 nt, Human
acagaaaaggagcuggccugga

SEQ ID NO: 92138 - RNA, 22 nt, Human
acagaaaaggagcuggccugga

SEQ ID NO: 92139 - RNA, 22 nt, Human
acagaaaaggagcuggccugga

SEQ ID NO: 92140 - RNA, 23 nt, Human
acagagcgagacucugucucaaa

SEQ ID NO: 92141 - RNA, 24 nt, Human
acagagcgagacucugucucaaaa

SEQ ID NO: 92142 - RNA, 24 nt, Human
acagagcgagacucugucucaaaa

SEQ ID NO: 92143 - RNA, 24 nt, Human
acagagcgagacucugucucaaaa

SEQ ID NO: 92144 - RNA, 21 nt, Human
acagagucuagggaaacacac

SEQ ID NO: 92145 - RNA, 21 nt, Human
acagagucuagggaaacacac

SEQ ID NO: 92146 - RNA, 22 nt, Human
acagagucuagggaaacacacc

SEQ ID NO: 92147 - RNA, 22 nt, Human
acagagucuagggaaacacacc

SEQ ID NO: 92148 - RNA, 19 nt, Human
acaggcaaagggcuucaca

SEQ ID NO: 92149 - RNA, 19 nt, Human
acaggcaaagggcuucaca

SEQ ID NO: 92150 - RNA, 19 nt, Human
acaggcaaagggcuucaca

SEQ ID NO: 92151 - RNA, 18 nt, Human
accaggaaccucguuugg

SEQ ID NO: 92152 - RNA, 18 nt, Human
accaggaaccucguuugg

SEQ ID NO: 92153 - RNA, 24 nt, Human
acccugucucuacuaaaaauacaa

SEQ ID NO: 92154 - RNA, 24 nt, Human
acccugucucuacuaaaaauacaa

SEQ ID NO: 92155 - RNA, 24 nt, Human
acccugucucuacuaaaaauacaa

SEQ ID NO: 92156 - RNA, 19 nt, Human
accgcccacagcccaaaca

SEQ ID NO: 92157 - RNA, 28 nt, Human
acucugucucaaaaaaaaaaaaaaaaaa

SEQ ID NO: 92158 - RNA, 28 nt, Human
acucugucucaaaaaaaaaaaaaaaaaa

SEQ ID NO: 92159 - RNA, 28 nt, Human
acucugucucaaaaaaaaaaaaaaaaaa

SEQ ID NO: 92160 - RNA, 18 nt, Human
acugcccuccagccuggg

SEQ ID NO: 92161 - RNA, 18 nt, Human
acugcccuccagccuggg

SEQ ID NO: 92162 - RNA, 18 nt, Human
acugcccuccagccuggg

SEQ ID NO: 92163 - RNA, 24 nt, Human
acugcccuccagccugggcgacag

SEQ ID NO: 92164 - RNA, 24 nt, Human
acugcccuccagccugggcgacag

SEQ ID NO: 92165 - RNA, 24 nt, Human
acugcccuccagccugggcgacag

SEQ ID NO: 92166 - RNA, 21 nt, Human
agaaaacacuugagcaagagc

SEQ ID NO: 92167 - RNA, 21 nt, Human
agaaaacacuugagcaagagc

SEQ ID NO: 92168 - RNA, 22 nt, Human
agacagagaggugguuacagag

SEQ ID NO: 92169 - RNA, 22 nt, Human
agacagagaggugguuacagag

SEQ ID NO: 92170 - RNA, 22 nt, Human
agacagagaggugguuacagag

SEQ ID NO: 92171 - RNA, 24 nt, Human
agacagauuugguggcagcagcca

SEQ ID NO: 92172 - RNA, 24 nt, Human
agacagauuugguggcagcagcca

SEQ ID NO: 92173 - RNA, 24 nt, Human
agacagauuugguggcagcagcca

SEQ ID NO: 92174 - RNA, 22 nt, Human
agacuuccaugggcaaagauca

SEQ ID NO: 92175 - RNA, 22 nt, Human
agacuuccaugggcaaagauca

SEQ ID NO: 92176 - RNA, 22 nt, Human
agacuuccaugggcaaagauca

SEQ ID NO: 92177 - RNA, 23 nt, Human
agacuuccaugggcaaagaucaa

SEQ ID NO: 92178 - RNA, 23 nt, Human
agauaggagauggucucucaaga

SEQ ID NO: 92179 - RNA, 22 nt, Human
agauaggagauggucucucaga

SEQ ID NO: 92180 - RNA, 22 nt, Human
agauaggagauggucucucaga

SEQ ID NO: 92181 - RNA, 24 nt, Human
agccugggcgacagagcgagacuc

SEQ ID NO: 92182 - RNA, 24 nt, Human
agccugggcgacagagcgagacuc

SEQ ID NO: 92183 - RNA, 24 nt, Human
agccugggcgacagagcgagacuc

SEQ ID NO: 92184 - RNA, 21 nt, Human
aggcaggagaauggcgugaac

SEQ ID NO: 92185 - RNA, 21 nt, Human
aggcaggagaauggcgugaac

SEQ ID NO: 92186 - RNA, 24 nt, Human
aggcaggagaauggcgugaacccg

SEQ ID NO: 92187 - RNA, 24 nt, Human
aggcaggagaauggcgugaacccg

SEQ ID NO: 92188 - RNA, 24 nt, Human
aggcaggagaauggcgugaacccg

SEQ ID NO: 92189 - RNA, 18 nt, Human
aggcugaggcaggagaau

SEQ ID NO: 92190 - RNA, 18 nt, Human
aggcugaggcaggagaau

SEQ ID NO: 92191 - RNA, 19 nt, Human
aggcugaggcaggagaaug

SEQ ID NO: 92192 - RNA, 19 nt, Human
aggcugaggcaggagaaug

SEQ ID NO: 92193 - RNA, 22 nt, Human
aggcugagguggguggaucaug

SEQ ID NO: 92194 - RNA, 22 nt, Human
aggcugagguggguggaucaug

SEQ ID NO: 92195 - RNA, 22 nt, Human
aggcugagguggguggaucaug

SEQ ID NO: 92196 - RNA, 24 nt, Human
agguggguggaucaugaggucagg

SEQ ID NO: 92197 - RNA, 24 nt, Human
agguggguggaucaugaggucagg

SEQ ID NO: 92198 - RNA, 24 nt, Human
agguggguggaucaugaggucagg

SEQ ID NO: 92199 - RNA, 23 nt, Human
aguggcucacgccuguaauccca

SEQ ID NO: 92200 - RNA, 23 nt, Human
aguggcucacgccuguaauccca

SEQ ID NO: 92201 - RNA, 23 nt, Human
aguggcucacgccuguaauccca

SEQ ID NO: 92202 - RNA, 21 nt, Human
aguguccuuccacuggguggc

SEQ ID NO: 92203 - RNA, 21 nt, Human
aguguccuuccacuggguggc

SEQ ID NO: 92204 - RNA, 21 nt, Human
aguguccuuccacuggguggc

SEQ ID NO: 92205 - RNA, 24 nt, Human
aguuggagcuugcagugagcugag

SEQ ID NO: 92206 - RNA, 24 nt, Human
aguuggagcuugcagugagcugag

SEQ ID NO: 92207 - RNA, 24 nt, Human
aguuggagcuugcagugagcugag

SEQ ID NO: 92208 - RNA, 24 nt, Human
aucgugccacugcccuccagccug

SEQ ID NO: 92209 - RNA, 24 nt, Human
aucgugccacugcccuccagccug

SEQ ID NO: 92210 - RNA, 24 nt, Human
aucgugccacugcccuccagccug

SEQ ID NO: 92211 - RNA, 18 nt, Human
augaaaugaagguaaaga

SEQ ID NO: 92212 - RNA, 18 nt, Human
augaaaugaagguaaaga

SEQ ID NO: 92213 - RNA, 18 nt, Human
augaaaugaagguaaaga

SEQ ID NO: 92214 - RNA, 20 nt, Human
auuccuggcaauagguccaa

SEQ ID NO: 92215 - RNA, 20 nt, Human
auuccuggcaauagguccaa

SEQ ID NO: 92216 - RNA, 20 nt, Human
auuccuggcaauagguccaa

SEQ ID NO: 92217 - RNA, 20 nt, Human
caaaagcuggaacugaacac

SEQ ID NO: 92218 - RNA, 20 nt, Human
caaaagcuggaacugaacac

SEQ ID NO: 92219 - RNA, 20 nt, Human
caaaagcuggaacugaacac

SEQ ID NO: 92220 - RNA, 27 nt, Human
caaaagcuggaacugaacacaaauaug

SEQ ID NO: 92221 - RNA, 27 nt, Human
caaaagcuggaacugaacacaaauaug

SEQ ID NO: 92222 - RNA, 27 nt, Human
caaaagcuggaacugaacacaaauaug

SEQ ID NO: 92223 - RNA, 21 nt, Human
caacacuuugggaggcugagg

SEQ ID NO: 92224 - RNA, 24 nt, Human
caacacuuugggaggcugaggugg

SEQ ID NO: 92225 - RNA, 24 nt, Human
caacacuuugggaggcugaggugg

SEQ ID NO: 92226 - RNA, 24 nt, Human
caacacuuugggaggcugaggugg

SEQ ID NO: 92227 - RNA, 24 nt, Human
caagaccaucccggcuaacauggu

SEQ ID NO: 92228 - RNA, 24 nt, Human
caagaccaucccggcuaacauggu

SEQ ID NO: 92229 - RNA, 24 nt, Human
caagaccaucccggcuaacauggu

SEQ ID NO: 92230 - RNA, 21 nt, Human
caagaccccgcgcucggcgcc

SEQ ID NO: 92231 - RNA, 22 nt, Human
cacaagcccgcucagaaaacac

SEQ ID NO: 92232 - RNA, 22 nt, Human
cacaagcccgcucagaaaacac

SEQ ID NO: 92233 - RNA, 20 nt, Human
cacaggccgcuucuggacac

SEQ ID NO: 92234 - RNA, 20 nt, Human
cacaggccgcuucuggacac

SEQ ID NO: 92235 - RNA, 21 nt, Human
cacaucccugagggggcagaa

SEQ ID NO: 92236 - RNA, 21 nt, Human
cacaucccugagggggcagaa

SEQ ID NO: 92237 - RNA, 21 nt, Human
cacaucccugagggggcagaa

SEQ ID NO: 92238 - RNA, 20 nt, Human
caccuguagucccagcuacu

SEQ ID NO: 92239 - RNA, 20 nt, Human
caccuguagucccagcuacu

SEQ ID NO: 92240 - RNA, 20 nt, Human
caccuguagucccagcuacu

SEQ ID NO: 92241 - RNA, 23 nt, Human
caccuguagucccagcuacuugg

SEQ ID NO: 92242 - RNA, 23 nt, Human
caccuguagucccagcuacuugg

SEQ ID NO: 92243 - RNA, 23 nt, Human
caccuguagucccagcuacuugg

SEQ ID NO: 92244 - RNA, 24 nt, Human
cacgccuguaaucccaacacuuug

SEQ ID NO: 92245 - RNA, 24 nt, Human
cacgccuguaaucccaacacuuug

SEQ ID NO: 92246 - RNA, 24 nt, Human
cacgccuguaaucccaacacuuug

SEQ ID NO: 92247 - RNA, 24 nt, Human
cacugcccuccagccugggcgaca

SEQ ID NO: 92248 - RNA, 24 nt, Human
cacugcccuccagccugggcgaca

SEQ ID NO: 92249 - RNA, 24 nt, Human
cacugcccuccagccugggcgaca

SEQ ID NO: 92250 - RNA, 18 nt, Human
cagaaaacacuugagcaa

SEQ ID NO: 92251 - RNA, 18 nt, Human
cagaaaacacuugagcaa

SEQ ID NO: 92252 - RNA, 27 nt, Human
cagaaaaggagcuggccuggaguccca

SEQ ID NO: 92253 - RNA, 20 nt, Human
cagaaaccgugcauccugaa

SEQ ID NO: 92254 - RNA, 20 nt, Human
cagaaaccgugcauccugaa

SEQ ID NO: 92255 - RNA, 20 nt, Human
cagaaaccgugcauccugaa

SEQ ID NO: 92256 - RNA, 23 nt, Human
cagcagauuucuuccauuaguuu

SEQ ID NO: 92257 - RNA, 18 nt, Human
cagcaguccgugacucgg

SEQ ID NO: 92258 - RNA, 24 nt, Human
cagcuacuuggaaggcugaggcag

SEQ ID NO: 92259 - RNA, 24 nt, Human
cagcuacuuggaaggcugaggcag

SEQ ID NO: 92260 - RNA, 24 nt, Human
cagcuacuuggaaggcugaggcag

SEQ ID NO: 92261 - RNA, 20 nt, Human
cagcugaaacauuccuggca

SEQ ID NO: 92262 - RNA, 20 nt, Human
cagcugaaacauuccuggca

SEQ ID NO: 92263 - RNA, 20 nt, Human
cagcugaaacauuccuggca

SEQ ID NO: 92264 - RNA, 18 nt, Human
caugauccuguaaagcag

SEQ ID NO: 92265 - RNA, 18 nt, Human
caugauccuguaaagcag

SEQ ID NO: 92266 - RNA, 18 nt, Human
caugauccuguaaagcag

SEQ ID NO: 92267 - RNA, 25 nt, Human
cauguuugcuucuucagagccaaaa

SEQ ID NO: 92268 - RNA, 25 nt, Human
cauguuugcuucuucagagccaaaa

SEQ ID NO: 92269 - RNA, 25 nt, Human
cauguuugcuucuucagagccaaaa

SEQ ID NO: 92270 - RNA, 26 nt, Human
cauguuugcuucuucagagccaaaag

SEQ ID NO: 92271 - RNA, 26 nt, Human
cauguuugcuucuucagagccaaaag

SEQ ID NO: 92272 - RNA, 24 nt, Human
ccaaacucucacucuaggacaaaa

SEQ ID NO: 92273 - RNA, 24 nt, Human
ccaaacucucacucuaggacaaaa

SEQ ID NO: 92274 - RNA, 24 nt, Human
ccaaacucucacucuaggacaaaa

SEQ ID NO: 92275 - RNA, 22 nt, Human
ccaaccaaggcuggcucuacag

SEQ ID NO: 92276 - RNA, 22 nt, Human
ccaaccaaggcuggcucuacag

SEQ ID NO: 92277 - RNA, 22 nt, Human
ccaaccaaggcuggcucuacag

SEQ ID NO: 92278 - RNA, 20 nt, Human
ccacagcccaaacaaaccgg

SEQ ID NO: 92279 - RNA, 21 nt, Human
ccacgugcauaucacaagccc

SEQ ID NO: 92280 - RNA, 21 nt, Human
ccacgugcauaucacaagccc

SEQ ID NO: 92281 - RNA, 20 nt, Human
ccacugcccuccagccuggg

SEQ ID NO: 92282 - RNA, 20 nt, Human
ccacugcccuccagccuggg

SEQ ID NO: 92283 - RNA, 20 nt, Human
ccacugcccuccagccuggg

SEQ ID NO: 92284 - RNA, 21 nt, Human
ccacugcccuccagccugggc

SEQ ID NO: 92285 - RNA, 21 nt, Human
ccacugcccuccagccugggc

SEQ ID NO: 92286 - RNA, 21 nt, Human
ccacugcccuccagccugggc

SEQ ID NO: 92287 - RNA, 21 nt, Human
ccacugcccuccagccugggc

SEQ ID NO: 92288 - RNA, 21 nt, Human
ccacugcccuccagccugggc

SEQ ID NO: 92289 - RNA, 21 nt, Human
ccacugcccuccagccugggc

SEQ ID NO: 92290 - RNA, 23 nt, Human
ccacugcccuccagccugggcga

SEQ ID NO: 92291 - RNA, 24 nt, Human
ccacugcccuccagccugggcgac

SEQ ID NO: 92292 - RNA, 24 nt, Human
ccacugcccuccagccugggcgac

SEQ ID NO: 92293 - RNA, 24 nt, Human
ccacugcccuccagccugggcgac

SEQ ID NO: 92294 - RNA, 24 nt, Human
ccaguggugcagcagauuucuucc

SEQ ID NO: 92295 - RNA, 25 nt, Human
cccacagcccaaacaaaccgggggc

SEQ ID NO: 92296 - RNA, 22 nt, Human
cccggcuaacauggugaaaccc

SEQ ID NO: 92297 - RNA, 22 nt, Human
cccggcuaacauggugaaaccc

SEQ ID NO: 92298 - RNA, 22 nt, Human
cccggcuaacauggugaaaccc

SEQ ID NO: 92299 - RNA, 22 nt, Human
cccggcuaacauggugaaaccc

SEQ ID NO: 92300 - RNA, 22 nt, Human
cccggcuaacauggugaaaccc

SEQ ID NO: 92301 - RNA, 22 nt, Human
cccggcuaacauggugaaaccc

SEQ ID NO: 92302 - RNA, 24 nt, Human
cccggcuaacauggugaaacccug

SEQ ID NO: 92303 - RNA, 24 nt, Human
cccggcuaacauggugaaacccug

SEQ ID NO: 92304 - RNA, 24 nt, Human
cccggcuaacauggugaaacccug

SEQ ID NO: 92305 - RNA, 23 nt, Human
cccuccagccugggcgacagagc

SEQ ID NO: 92306 - RNA, 23 nt, Human
cccuccagccugggcgacagagc

SEQ ID NO: 92307 - RNA, 23 nt, Human
cccuccagccugggcgacagagc

SEQ ID NO: 92308 - RNA, 19 nt, Human
ccgggcgcaguggcucacg

SEQ ID NO: 92309 - RNA, 22 nt, Human
ccugggcgacagagcgagacuc

SEQ ID NO: 92310 - RNA, 22 nt, Human
ccugggcgacagagcgagacuc

SEQ ID NO: 92311 - RNA, 22 nt, Human
ccugggcgacagagcgagacuc

SEQ ID NO: 92312 - RNA, 22 nt, Human
ccuguaaucccaacacuuuggg

SEQ ID NO: 92313 - RNA, 21 nt, Human
ccuguagucccagcuacuugg

SEQ ID NO: 92314 - RNA, 21 nt, Human
ccuguagucccagcuacuugg

SEQ ID NO: 92315 - RNA, 21 nt, Human
ccuguagucccagcuacuugg

SEQ ID NO: 92316 - RNA, 21 nt, Human
ccuuaaaucguucccucccuc

SEQ ID NO: 92317 - RNA, 23 nt, Human
cgccuguaaucccaacacuuugg

SEQ ID NO: 92318 - RNA, 24 nt, Human
cgccuguaaucccaacacuuuggg

SEQ ID NO: 92319 - RNA, 24 nt, Human
cgccuguaaucccaacacuuuggg

SEQ ID NO: 92320 - RNA, 20 nt, Human
cgcucagaaaacacuugagc

SEQ ID NO: 92321 - RNA, 20 nt, Human
cgcucagaaaacacuugagc

SEQ ID NO: 92322 - RNA, 21 nt, Human
cgggcaccuguagucccagcu

SEQ ID NO: 92323 - RNA, 21 nt, Human
cgggcaccuguagucccagcu

SEQ ID NO: 92324 - RNA, 21 nt, Human
cgggcaccuguagucccagcu

SEQ ID NO: 92325 - RNA, 19 nt, Human
cgugccacugcccuccagc

SEQ ID NO: 92326 - RNA, 19 nt, Human
cgugccacugcccuccagc

SEQ ID NO: 92327 - RNA, 19 nt, Human
cgugccacugcccuccagc

SEQ ID NO: 92328 - RNA, 19 nt, Human
cuaacauggugaaacccug

SEQ ID NO: 92329 - RNA, 19 nt, Human
cuaacauggugaaacccug

SEQ ID NO: 92330 - RNA, 19 nt, Human
cuaacauggugaaacccug

SEQ ID NO: 92331 - RNA, 24 nt, Human
cuacaaaagcuggaacugaacaca

SEQ ID NO: 92332 - RNA, 24 nt, Human
cuacaaaagcuggaacugaacaca

SEQ ID NO: 92333 - RNA, 24 nt, Human
cuacaaaagcuggaacugaacaca

SEQ ID NO: 92334 - RNA, 18 nt, Human
cucaaaaaaaaaaaaaaa

SEQ ID NO: 92335 - RNA, 18 nt, Human
cucaaaaaaaaaaaaaaa

SEQ ID NO: 92336 - RNA, 23 nt, Human
cucaaaaaaaaaaaaaaaaaaaa

SEQ ID NO: 92337 - RNA, 22 nt, Human
cucacgccuguaaucccaacac

SEQ ID NO: 92338 - RNA, 22 nt, Human
cucacgccuguaaucccaacac

SEQ ID NO: 92339 - RNA, 22 nt, Human
cucacgccuguaaucccaacac

SEQ ID NO: 92340 - RNA, 24 nt, Human
cucacgccuguaaucccaacacuu

SEQ ID NO: 92341 - RNA, 24 nt, Human
cucacgccuguaaucccaacacuu

SEQ ID NO: 92342 - RNA, 24 nt, Human
cucacgccuguaaucccaacacuu

SEQ ID NO: 92343 - RNA, 19 nt, Human
cucaucuccacggcaggcc

SEQ ID NO: 92344 - RNA, 19 nt, Human
cucugucucaaaaaaaaaa

SEQ ID NO: 92345 - RNA, 19 nt, Human
cucugucucaaaaaaaaaa

SEQ ID NO: 92346 - RNA, 19 nt, Human
cucugucucaaaaaaaaaa

SEQ ID NO: 92347 - RNA, 18 nt, Human
cucuuggagcuggagcag

SEQ ID NO: 92348 - RNA, 18 nt, Human
cugaacacaaauaugggg

SEQ ID NO: 92349 - RNA, 18 nt, Human
cugaacacaaauaugggg

SEQ ID NO: 92350 - RNA, 18 nt, Human
cugaacacaaauaugggg

SEQ ID NO: 92351 - RNA, 22 nt, Human
cugcaguuucucuugcauuucc

SEQ ID NO: 92352 - RNA, 22 nt, Human
cuggagucccacacucaaaggc

SEQ ID NO: 92353 - RNA, 22 nt, Human
cuggagucccacacucaaaggc

SEQ ID NO: 92354 - RNA, 22 nt, Human
cuggagucccacacucaaaggc

SEQ ID NO: 92355 - RNA, 20 nt, Human
cuguguuuacaacuucacuu

SEQ ID NO: 92356 - RNA, 20 nt, Human
cuguguuuacaacuucacuu

SEQ ID NO: 92357 - RNA, 20 nt, Human
cuguguuuacaacuucacuu

SEQ ID NO: 92358 - RNA, 18 nt, Human
cuuccuggccuucucuga

SEQ ID NO: 92359 - RNA, 18 nt, Human
cuuccuggccuucucuga

SEQ ID NO: 92360 - RNA, 18 nt, Human
cuuccuggccuucucuga

SEQ ID NO: 92361 - RNA, 24 nt, Human
cuugcagugagcugagaucgugcc

SEQ ID NO: 92362 - RNA, 24 nt, Human
cuugcagugagcugagaucgugcc

SEQ ID NO: 92363 - RNA, 24 nt, Human
cuugcagugagcugagaucgugcc

SEQ ID NO: 92364 - RNA, 24 nt, Human
cuugcccgggcgcaguggcucacg

SEQ ID NO: 92365 - RNA, 24 nt, Human
cuugcccgggcgcaguggcucacg

SEQ ID NO: 92366 - RNA, 19 nt, Human
gaaacccugucucuacuaa

SEQ ID NO: 92367 - RNA, 19 nt, Human
gaaacccugucucuacuaa

SEQ ID NO: 92368 - RNA, 21 nt, Human
gaaaugaagguaaagaaggga

SEQ ID NO: 92369 - RNA, 19 nt, Human
gaacauggacgucauagcc

SEQ ID NO: 92370 - RNA, 24 nt, Human
gacagagcgagacucugucucaaa

SEQ ID NO: 92371 - RNA, 24 nt, Human
gacagagcgagacucugucucaaa

SEQ ID NO: 92372 - RNA, 23 nt, Human
gagaucgugccacugcccuccag

SEQ ID NO: 92373 - RNA, 20 nt, Human
gagcauaaccuucccgaucc

SEQ ID NO: 92374 - RNA, 20 nt, Human
gagcauaaccuucccgaucc

SEQ ID NO: 92375 - RNA, 23 nt, Human
gagcuugcagugagcugagaucg

SEQ ID NO: 92376 - RNA, 23 nt, Human
gagcuugcagugagcugagaucg

SEQ ID NO: 92377 - RNA, 20 nt, Human
gaggguguccugggaacagg

SEQ ID NO: 92378 - RNA, 20 nt, Human
gaggguguccugggaacagg

SEQ ID NO: 92379 - RNA, 24 nt, Human
gcaaagaucaauaagguacaaaug

SEQ ID NO: 92380 - RNA, 24 nt, Human
gcaaagaucaauaagguacaaaug

SEQ ID NO: 92381 - RNA, 24 nt, Human
gcaaagaucaauaagguacaaaug

SEQ ID NO: 92382 - RNA, 21 nt, Human
gcacaggccgcuucuggacac

SEQ ID NO: 92383 - RNA, 21 nt, Human
gcacaggccgcuucuggacac

SEQ ID NO: 92384 - RNA, 18 nt, Human
gcaguccgugacucggug

SEQ ID NO: 92385 - RNA, 21 nt, Human
gcaucacucuccucgcaccca

SEQ ID NO: 92386 - RNA, 20 nt, Human
gccaaaagauaaugucuaca

SEQ ID NO: 92387 - RNA, 20 nt, Human
gccaaaagauaaugucuaca

SEQ ID NO: 92388 - RNA, 20 nt, Human
gccaaaagauaaugucuaca

SEQ ID NO: 92389 - RNA, 22 nt, Human
gccacugcccuccagccugggc

SEQ ID NO: 92390 - RNA, 22 nt, Human
gccacugcccuccagccugggc

SEQ ID NO: 92391 - RNA, 22 nt, Human
gccacugcccuccagccugggc

SEQ ID NO: 92392 - RNA, 24 nt, Human
gccacugcccuccagccugggcga

SEQ ID NO: 92393 - RNA, 24 nt, Human
gccacugcccuccagccugggcga

SEQ ID NO: 92394 - RNA, 23 nt, Human
gccgccauuucccgcuuuucccg

SEQ ID NO: 92395 - RNA, 21 nt, Human
gccuucucugaugcuccccac

SEQ ID NO: 92396 - RNA, 21 nt, Human
gccuucucugaugcuccccac

SEQ ID NO: 92397 - RNA, 21 nt, Human
gccuucucugaugcuccccac

SEQ ID NO: 92398 - RNA, 24 nt, Human
gcgacagagcgagacucugucuca

SEQ ID NO: 92399 - RNA, 24 nt, Human
gcgacagagcgagacucugucuca

SEQ ID NO: 92400 - RNA, 24 nt, Human
gcgacagagcgagacucugucuca

SEQ ID NO: 92401 - RNA, 20 nt, Human
gcgcaguggcucacgccugu

SEQ ID NO: 92402 - RNA, 20 nt, Human
gcgcaguggcucacgccugu

SEQ ID NO: 92403 - RNA, 20 nt, Human
gcgcaguggcucacgccugu

SEQ ID NO: 92404 - RNA, 20 nt, Human
gcgggcaccuguagucccag

SEQ ID NO: 92405 - RNA, 18 nt, Human
gcgucucuagucauguuu

SEQ ID NO: 92406 - RNA, 18 nt, Human
gcgucucuagucauguuu

SEQ ID NO: 92407 - RNA, 18 nt, Human
gcgucucuagucauguuu

SEQ ID NO: 92408 - RNA, 24 nt, Human
gcuaacauggugaaacccugucuc

SEQ ID NO: 92409 - RNA, 24 nt, Human
gcuaacauggugaaacccugucuc

SEQ ID NO: 92410 - RNA, 24 nt, Human
gcuaacauggugaaacccugucuc

SEQ ID NO: 92411 - RNA, 22 nt, Human
gcugaggcaggagaauggcgug

SEQ ID NO: 92412 - RNA, 22 nt, Human
gcugaggcaggagaauggcgug

SEQ ID NO: 92413 - RNA, 22 nt, Human
gcugaggcaggagaauggcgug

SEQ ID NO: 92414 - RNA, 23 nt, Human
ggaaaaagacagagaggugguua

SEQ ID NO: 92415 - RNA, 27 nt, Human
ggaaacacaccauucuuccuggccuuc

SEQ ID NO: 92416 - RNA, 27 nt, Human
ggaaacacaccauucuuccuggccuuc

SEQ ID NO: 92417 - RNA, 27 nt, Human
ggaaacacaccauucuuccuggccuuc

SEQ ID NO: 92418 - RNA, 19 nt, Human
ggagaguuuaauacugaaa

SEQ ID NO: 92419 - RNA, 19 nt, Human
ggagaguuuaauacugaaa

SEQ ID NO: 92420 - RNA, 19 nt, Human
ggagaguuuaauacugaaa

SEQ ID NO: 92421 - RNA, 18 nt, Human
ggagcuugcagugagcug

SEQ ID NO: 92422 - RNA, 18 nt, Human
ggagcuugcagugagcug

SEQ ID NO: 92423 - RNA, 18 nt, Human
ggagcuugcagugagcug

SEQ ID NO: 92424 - RNA, 20 nt, Human
ggagcuugcagugagcugag

SEQ ID NO: 92425 - RNA, 24 nt, Human
ggagcuugcagugagcugagaucg

SEQ ID NO: 92426 - RNA, 24 nt, Human
ggagcuugcagugagcugagaucg

SEQ ID NO: 92427 - RNA, 24 nt, Human
ggagcuugcagugagcugagaucg

SEQ ID NO: 92428 - RNA, 20 nt, Human
ggaggugacaucauguggga

SEQ ID NO: 92429 - RNA, 20 nt, Human
ggaggugacaucauguggga

SEQ ID NO: 92430 - RNA, 24 nt, Human
ggcaccuguagucccagcuacuug

SEQ ID NO: 92431 - RNA, 24 nt, Human
ggcaccuguagucccagcuacuug

SEQ ID NO: 92432 - RNA, 24 nt, Human
ggcaccuguagucccagcuacuug

SEQ ID NO: 92433 - RNA, 22 nt, Human
ggcacgguggcgggcaccugua

SEQ ID NO: 92434 - RNA, 22 nt, Human
ggcacgguggcgggcaccugua

SEQ ID NO: 92435 - RNA, 22 nt, Human
ggcacgguggcgggcaccugua

SEQ ID NO: 92436 - RNA, 21 nt, Human
ggcacugaaauaaaagccaca

SEQ ID NO: 92437 - RNA, 24 nt, Human
ggccacgaggccgagacugcaacc

SEQ ID NO: 92438 - RNA, 23 nt, Human
ggcgcaguggcucacgccuguaa

SEQ ID NO: 92439 - RNA, 23 nt, Human
ggcgcaguggcucacgccuguaa

SEQ ID NO: 92440 - RNA, 23 nt, Human
ggcgcaguggcucacgccuguaa

SEQ ID NO: 92441 - RNA, 21 nt, Human
ggcgggcaccuguagucccag

SEQ ID NO: 92442 - RNA, 21 nt, Human
ggcgggcaccuguagucccag

SEQ ID NO: 92443 - RNA, 21 nt, Human
gggaacagguagagguggccg

SEQ ID NO: 92444 - RNA, 26 nt, Human
gggaauaguaagggagagagauggac

SEQ ID NO: 92445 - RNA, 26 nt, Human
gggaauaguaagggagagagauggac

SEQ ID NO: 92446 - RNA, 22 nt, Human
gggcacaggaaacaagucuggg

SEQ ID NO: 92447 - RNA, 22 nt, Human
gggcacaggaaacaagucuggg

SEQ ID NO: 92448 - RNA, 22 nt, Human
gggcacaggaaacaagucuggg

SEQ ID NO: 92449 - RNA, 24 nt, Human
gggcgcaguggcucacgccuguaa

SEQ ID NO: 92450 - RNA, 24 nt, Human
ggguggaucaugaggucaggagau

SEQ ID NO: 92451 - RNA, 19 nt, Human
gguacaaaugcaaggcaau

SEQ ID NO: 92452 - RNA, 19 nt, Human
gguacaaaugcaaggcaau

SEQ ID NO: 92453 - RNA, 21 nt, Human
gguggaucaugaggucaggag

SEQ ID NO: 92454 - RNA, 21 nt, Human
gguggaucaugaggucaggag

SEQ ID NO: 92455 - RNA, 21 nt, Human
gguggaucaugaggucaggag

SEQ ID NO: 92456 - RNA, 23 nt, Human
gguggcgggcaccuguaguccca

SEQ ID NO: 92457 - RNA, 23 nt, Human
gguggcgggcaccuguaguccca

SEQ ID NO: 92458 - RNA, 23 nt, Human
gguggcgggcaccuguaguccca

SEQ ID NO: 92459 - RNA, 24 nt, Human
gguggcgggcaccuguagucccag

SEQ ID NO: 92460 - RNA, 24 nt, Human
gguggcgggcaccuguagucccag

SEQ ID NO: 92461 - RNA, 23 nt, Human
gguggguggaucaugaggucagg

SEQ ID NO: 92462 - RNA, 23 nt, Human
gguggguggaucaugaggucagg

SEQ ID NO: 92463 - RNA, 23 nt, Human
gguggguggaucaugaggucagg

SEQ ID NO: 92464 - RNA, 22 nt, Human
ggugugcagguaacugugcaaa

SEQ ID NO: 92465 - RNA, 22 nt, Human
gguuacagagucuagggaaaca

SEQ ID NO: 92466 - RNA, 22 nt, Human
gguuacagagucuagggaaaca

SEQ ID NO: 92467 - RNA, 21 nt, Human
gugaaacccugucucuacuaa

SEQ ID NO: 92468 - RNA, 21 nt, Human
gugaaacccugucucuacuaa

SEQ ID NO: 92469 - RNA, 25 nt, Human
guuucagauaagcagggauaaaggu

SEQ ID NO: 92470 - RNA, 19 nt, Human
uaaagugccaucuacaaaa

SEQ ID NO: 92471 - RNA, 19 nt, Human
uaaagugccaucuacaaaa

SEQ ID NO: 92472 - RNA, 19 nt, Human
uaaagugccaucuacaaaa

SEQ ID NO: 92473 - RNA, 22 nt, Human
uaacauggugaaacccugucuc

SEQ ID NO: 92474 - RNA, 22 nt, Human
uaacauggugaaacccugucuc

SEQ ID NO: 92475 - RNA, 22 nt, Human
uaacauggugaaacccugucuc

SEQ ID NO: 92476 - RNA, 24 nt, Human
uaacauggugaaacccugucucua

SEQ ID NO: 92477 - RNA, 24 nt, Human
uaacauggugaaacccugucucua

SEQ ID NO: 92478 - RNA, 24 nt, Human
uaacauggugaaacccugucucua

SEQ ID NO: 92479 - RNA, 18 nt, Human
uaccaggaaccucguuug

SEQ ID NO: 92480 - RNA, 18 nt, Human
uaccaggaaccucguuug

SEQ ID NO: 92481 - RNA, 23 nt, Human
uagucucaucuccacggcaggcc

SEQ ID NO: 92482 - RNA, 19 nt, Human
uaugaagcagggagauaag

SEQ ID NO: 92483 - RNA, 19 nt, Human
uaugaagcagggagauaag

SEQ ID NO: 92484 - RNA, 19 nt, Human
uaugaagcagggagauaag

SEQ ID NO: 92485 - RNA, 19 nt, Human
uaugccagcuggaagugug

SEQ ID NO: 92486 - RNA, 24 nt, Human
uauggcacugaaauaaaagccaca

SEQ ID NO: 92487 - RNA, 24 nt, Human
uauggcacugaaauaaaagccaca

SEQ ID NO: 92488 - RNA, 26 nt, Human
uauggcacugaaauaaaagccacaua

SEQ ID NO: 92489 - RNA, 26 nt, Human
uauggcacugaaauaaaagccacaua

SEQ ID NO: 92490 - RNA, 26 nt, Human
uauggcacugaaauaaaagccacaua

SEQ ID NO: 92491 - RNA, 22 nt, Human
ucaaaaaaaaaaaaaaaaaaaa

SEQ ID NO: 92492 - RNA, 22 nt, Human
ucaaaaaaaaaaaaaaaaaaaa

SEQ ID NO: 92493 - RNA, 23 nt, Human
ucaaaaaaaaaaaaaaaaaaaaa

SEQ ID NO: 92494 - RNA, 23 nt, Human
ucaaaaaaaaaaaaaaaaaaaaa

SEQ ID NO: 92495 - RNA, 23 nt, Human
ucaaaaaaaaaaaaaaaaaaaaa

SEQ ID NO: 92496 - RNA, 23 nt, Human
ucagacaucuuaacuaauguaau

SEQ ID NO: 92497 - RNA, 23 nt, Human
ucagacaucuuaacuaauguaau

SEQ ID NO: 92498 - RNA, 18 nt, Human
ucaggaaggaaaaagaca

SEQ ID NO: 92499 - RNA, 18 nt, Human
ucaggaaggaaaaagaca

SEQ ID NO: 92500 - RNA, 18 nt, Human
ucaggaaggaaaaagaca

SEQ ID NO: 92501 - RNA, 18 nt, Human
ucaugaggucaggagauc

SEQ ID NO: 92502 - RNA, 18 nt, Human
ucaugaggucaggagauc

SEQ ID NO: 92503 - RNA, 18 nt, Human
ucaugaggucaggagauc

SEQ ID NO: 92504 - RNA, 24 nt, Human
ucaugaggucaggagaucaagacc

SEQ ID NO: 92505 - RNA, 24 nt, Human
ucaugaggucaggagaucaagacc

SEQ ID NO: 92506 - RNA, 24 nt, Human
ucaugaggucaggagaucaagacc

SEQ ID NO: 92507 - RNA, 22 nt, Human
uccacggcaggccuggaugaag

SEQ ID NO: 92508 - RNA, 19 nt, Human
uccacuuggcguggaugau

SEQ ID NO: 92509 - RNA, 19 nt, Human
uccacuuggcguggaugau

SEQ ID NO: 92510 - RNA, 19 nt, Human
uccacuuggcguggaugau

SEQ ID NO: 92511 - RNA, 23 nt, Human
uccagccugggcgacagagcgag

SEQ ID NO: 92512 - RNA, 23 nt, Human
uccagccugggcgacagagcgag

SEQ ID NO: 92513 - RNA, 23 nt, Human
uccagccugggcgacagagcgag

SEQ ID NO: 92514 - RNA, 24 nt, Human
uccagccugggcgacagagcgaga

SEQ ID NO: 92515 - RNA, 24 nt, Human
uccagccugggcgacagagcgaga

SEQ ID NO: 92516 - RNA, 24 nt, Human
uccagccugggcgacagagcgaga

SEQ ID NO: 92517 - RNA, 22 nt, Human
ucccacacucaaaggcagagau

SEQ ID NO: 92518 - RNA, 27 nt, Human
ucccauccacaccauagauggcgcccu

SEQ ID NO: 92519 - RNA, 21 nt, Human
uccccauaaccacacuguguu

SEQ ID NO: 92520 - RNA, 21 nt, Human
uccccauaaccacacuguguu

SEQ ID NO: 92521 - RNA, 21 nt, Human
uccccauaaccacacuguguu

SEQ ID NO: 92522 - RNA, 24 nt, Human
uccgcugcgcaccgcccacagccc

SEQ ID NO: 92523 - RNA, 25 nt, Human
uccgcugcgcaccgcccacagccca

SEQ ID NO: 92524 - RNA, 21 nt, Human
ucgcacccaggggauccugcg

SEQ ID NO: 92525 - RNA, 21 nt, Human
ucgcacccaggggauccugcg

SEQ ID NO: 92526 - RNA, 20 nt, Human
ucgugccacugcccuccagc

SEQ ID NO: 92527 - RNA, 20 nt, Human
ucgugccacugcccuccagc

SEQ ID NO: 92528 - RNA, 20 nt, Human
ucgugccacugcccuccagc

SEQ ID NO: 92529 - RNA, 23 nt, Human
ucgugccacugcccuccagccug

SEQ ID NO: 92530 - RNA, 23 nt, Human
ucgugccacugcccuccagccug

SEQ ID NO: 92531 - RNA, 23 nt, Human
ucgugccacugcccuccagccug

SEQ ID NO: 92532 - RNA, 20 nt, Human
ucuccacggcaggccuggau

SEQ ID NO: 92533 - RNA, 19 nt, Human
ucuccgcugcgcaccgccc

SEQ ID NO: 92534 - RNA, 22 nt, Human
ucucuacuaaaaauacaaaaaa

SEQ ID NO: 92535 - RNA, 22 nt, Human
ucucuacuaaaaauacaaaaaa

SEQ ID NO: 92536 - RNA, 22 nt, Human
ucucuacuaaaaauacaaaaaa

SEQ ID NO: 92537 - RNA, 25 nt, Human
ucugcaguuucucuugcauuuccug

SEQ ID NO: 92538 - RNA, 23 nt, Human
ucuggacacugcagcaaggugcg

SEQ ID NO: 92539 - RNA, 23 nt, Human
ucuggacacugcagcaaggugcg

SEQ ID NO: 92540 - RNA, 23 nt, Human
ucuggacacugcagcaaggugcg

SEQ ID NO: 92541 - RNA, 23 nt, Human
ucugucucaaaaaaaaaaaaaaa

SEQ ID NO: 92542 - RNA, 23 nt, Human
ucugucucaaaaaaaaaaaaaaa

SEQ ID NO: 92543 - RNA, 23 nt, Human
ucugucucaaaaaaaaaaaaaaa

SEQ ID NO: 92544 - RNA, 20 nt, Human
ucuuugagacuuccaugggc

SEQ ID NO: 92545 - RNA, 20 nt, Human
ucuuugagacuuccaugggc

SEQ ID NO: 92546 - RNA, 20 nt, Human
ucuuugagacuuccaugggc

SEQ ID NO: 92547 - RNA, 20 nt, Human
ugaaaaaccucuuggagcug

SEQ ID NO: 92548 - RNA, 19 nt, Human
ugaagugcacauugcucaa

SEQ ID NO: 92549 - RNA, 24 nt, Human
ugagaucgugccacugcccuccag

SEQ ID NO: 92550 - RNA, 24 nt, Human
ugagaucgugccacugcccuccag

SEQ ID NO: 92551 - RNA, 22 nt, Human
ugagcugagaucgugccacugc

SEQ ID NO: 92552 - RNA, 22 nt, Human
ugagcugagaucgugccacugc

SEQ ID NO: 92553 - RNA, 22 nt, Human
ugagcugagaucgugccacugc

SEQ ID NO: 92554 - RNA, 23 nt, Human
ugaggcaggagaauggcgugaac

SEQ ID NO: 92555 - RNA, 23 nt, Human
ugaggcaggagaauggcgugaac

SEQ ID NO: 92556 - RNA, 24 nt, Human
ugaggcaggagaauggcgugaacc

SEQ ID NO: 92557 - RNA, 24 nt, Human
ugaggcaggagaauggcgugaacc

SEQ ID NO: 92558 - RNA, 24 nt, Human
ugaggcaggagaauggcgugaacc

SEQ ID NO: 92559 - RNA, 25 nt, Human
ugaggcaggagaauggcgugaaccc

SEQ ID NO: 92560 - RNA, 25 nt, Human
ugaggcaggagaauggcgugaaccc

SEQ ID NO: 92561 - RNA, 25 nt, Human
ugaggcaggagaauggcgugaaccc

SEQ ID NO: 92562 - RNA, 21 nt, Human
ugagguggguggaucaugagg

SEQ ID NO: 92563 - RNA, 21 nt, Human
ugagguggguggaucaugagg

SEQ ID NO: 92564 - RNA, 21 nt, Human
ugagguggguggaucaugagg

SEQ ID NO: 92565 - RNA, 22 nt, Human
ugagguggguggaucaugaggu

SEQ ID NO: 92566 - RNA, 22 nt, Human
ugagguggguggaucaugaggu

SEQ ID NO: 92567 - RNA, 22 nt, Human
ugagguggguggaucaugaggu

SEQ ID NO: 92568 - RNA, 24 nt, Human
ugagguggguggaucaugagguca

SEQ ID NO: 92569 - RNA, 24 nt, Human
ugagguggguggaucaugagguca

SEQ ID NO: 92570 - RNA, 24 nt, Human
ugagguggguggaucaugagguca

SEQ ID NO: 92571 - RNA, 19 nt, Human
ugauggggaggugacauca

SEQ ID NO: 92572 - RNA, 22 nt, Human
ugauggggaggugacaucaugu

SEQ ID NO: 92573 - RNA, 20 nt, Human
ugcauuuccugugcagucug

SEQ ID NO: 92574 - RNA, 20 nt, Human
ugccuugagcccaaacgagc

SEQ ID NO: 92575 - RNA, 20 nt, Human
ugccuugagcccaaacgagc

SEQ ID NO: 92576 - RNA, 20 nt, Human
ugccuugagcccaaacgagc

SEQ ID NO: 92577 - RNA, 20 nt, Human
uggaaggcugaggcaggaga

SEQ ID NO: 92578 - RNA, 20 nt, Human
uggaaggcugaggcaggaga

SEQ ID NO: 92579 - RNA, 20 nt, Human
uggaaggcugaggcaggaga

SEQ ID NO: 92580 - RNA, 20 nt, Human
uggaaggcugaggcaggaga

SEQ ID NO: 92581 - RNA, 20 nt, Human
uggaaggcugaggcaggaga

SEQ ID NO: 92582 - RNA, 20 nt, Human
uggaaggcugaggcaggaga

SEQ ID NO: 92583 - RNA, 19 nt, Human
uggagcuugcagugagcug

SEQ ID NO: 92584 - RNA, 19 nt, Human
uggagcuugcagugagcug

SEQ ID NO: 92585 - RNA, 19 nt, Human
uggagcuugcagugagcug

SEQ ID NO: 92586 - RNA, 22 nt, Human
uggcgggcaccuguagucccag

SEQ ID NO: 92587 - RNA, 22 nt, Human
uggcgggcaccuguagucccag

SEQ ID NO: 92588 - RNA, 21 nt, Human
uggcucacgccuguaauccca

SEQ ID NO: 92589 - RNA, 21 nt, Human
uggcucacgccuguaauccca

SEQ ID NO: 92590 - RNA, 21 nt, Human
uggcucacgccuguaauccca

SEQ ID NO: 92591 - RNA, 24 nt, Human
uggcucacgccuguaaucccaaca

SEQ ID NO: 92592 - RNA, 24 nt, Human
uggcucacgccuguaaucccaaca

SEQ ID NO: 92593 - RNA, 24 nt, Human
uggcucacgccuguaaucccaaca

SEQ ID NO: 92594 - RNA, 20 nt, Human
ugggaggcugaggugggugg

SEQ ID NO: 92595 - RNA, 20 nt, Human
ugggaggcugaggugggugg

SEQ ID NO: 92596 - RNA, 20 nt, Human
ugggaggcugaggugggugg

SEQ ID NO: 92597 - RNA, 23 nt, Human
ugggaggcugagguggguggauc

SEQ ID NO: 92598 - RNA, 23 nt, Human
ugggaggcugagguggguggauc

SEQ ID NO: 92599 - RNA, 23 nt, Human
ugggaggcugagguggguggauc

SEQ ID NO: 92600 - RNA, 24 nt, Human
ugggaggcugagguggguggauca

SEQ ID NO: 92601 - RNA, 24 nt, Human
ugggaggcugagguggguggauca

SEQ ID NO: 92602 - RNA, 24 nt, Human
ugggaggcugagguggguggauca

SEQ ID NO: 92603 - RNA, 23 nt, Human
uggggaggugacaucauguggga

SEQ ID NO: 92604 - RNA, 23 nt, Human
uggggaggugacaucauguggga

SEQ ID NO: 92605 - RNA, 19 nt, Human
ugguccacauccccuccag

SEQ ID NO: 92606 - RNA, 20 nt, Human
uguccugggaacagguagag

SEQ ID NO: 92607 - RNA, 20 nt, Human
uguccugggaacagguagag

SEQ ID NO: 92608 - RNA, 18 nt, Human
ugugcaaaauucugcagu

SEQ ID NO: 92609 - RNA, 20 nt, Human
ugugcuggaagguggaccaa

SEQ ID NO: 92610 - RNA, 21 nt, Human
ugugguccacauccccuccag

SEQ ID NO: 92611 - RNA, 21 nt, Human
uuaccggcaucacucuccucg

SEQ ID NO: 92612 - RNA, 21 nt, Human
uuaccggcaucacucuccucg

SEQ ID NO: 92613 - RNA, 23 nt, Human
uuauaugcccucuccccauaacc

SEQ ID NO: 92614 - RNA, 23 nt, Human
uuauaugcccucuccccauaacc

SEQ ID NO: 92615 - RNA, 21 nt, Human
uucacagaaaaggagcuggcc

SEQ ID NO: 92616 - RNA, 21 nt, Human
uucacagaaaaggagcuggcc

SEQ ID NO: 92617 - RNA, 21 nt, Human
uucacagaaaaggagcuggcc

SEQ ID NO: 92618 - RNA, 22 nt, Human
uucccgggcucuccgcugcgca

SEQ ID NO: 92619 - RNA, 23 nt, Human
uucugcaguuucucuugcauuuc

SEQ ID NO: 92620 - RNA, 18 nt, Human
uugcagugagcugagauc

SEQ ID NO: 92621 - RNA, 18 nt, Human
uugcagugagcugagauc

SEQ ID NO: 92622 - RNA, 21 nt, Human
uugcagugagcugagaucgug

SEQ ID NO: 92623 - RNA, 21 nt, Human
uugcagugagcugagaucgug

SEQ ID NO: 92624 - RNA, 21 nt, Human
uugcagugagcugagaucgug

SEQ ID NO: 92625 - RNA, 22 nt, Human
uugcagugagcugagaucgugc

SEQ ID NO: 92626 - RNA, 22 nt, Human
uugcagugagcugagaucgugc

SEQ ID NO: 92627 - RNA, 22 nt, Human
uugcagugagcugagaucgugc

SEQ ID NO: 92628 - RNA, 25 nt, Human
uugggaggcugagguggguggauca

SEQ ID NO: 92629 - RNA, 25 nt, Human
uugggaggcugagguggguggauca

SEQ ID NO: 92630 - RNA, 25 nt, Human
uugggaggcugagguggguggauca

SEQ ID NO: 92631 - RNA, 26 nt, Human
uuggucaaccccacgauuagucucau

SEQ ID NO: 92632 - RNA, 19 nt, Human
uuucccgcuuuucccgggc

SEQ ID NO: 92633 - RNA, 21 nt, Human
uuucccgggcucuccgcugcg

SEQ ID NO: 92634 - RNA, 23 nt, Human
uuucccgggcucuccgcugcgca

SEQ ID NO: 92635 - RNA, 18 nt, Human
uuuuuuuuuaaaaaaagg

SEQ ID NO: 92636 - RNA, 22 nt, Human
uuuuuuuuuuaaaaaaaggucu

SEQ ID NO: 92637 - RNA, 22 nt, Human
uuuuuuuuuuaaaaaaaggucu

SEQ ID NO: 92638 - RNA, 23 nt, Human
uuuuuuuuuuuuaaaaaaagguc

SEQ ID NO: 92639 - RNA, 23 nt, Human
uuuuuuuuuuuuaaaaaaagguc

SEQ ID NO: 92640 - RNA, 23 nt, Human
uuuuuuuuuuuuaaaaaaagguc

SEQ ID NO: 92641 - RNA, 18 nt, Human
aaaaaaccaccaaccaac

SEQ ID NO: 92642 - RNA, 23 nt, Human
aaauaacauacuuaagaauuuug

SEQ ID NO: 92643 - RNA, 21 nt, Human
aacaucacaaaaccauaaucc

SEQ ID NO: 92644 - RNA, 23 nt, Human
aaccgccucacaauagcacccau

SEQ ID NO: 92645 - RNA, 24 nt, Human
aaguacccucugcagcaugagagu

SEQ ID NO: 92646 - RNA, 18 nt, Human
aaguucuuccacaucauc

SEQ ID NO: 92647 - RNA, 19 nt, Human
acaaacuaaaaaaaaccac

SEQ ID NO: 92648 - RNA, 19 nt, Human
acagaaaauaacauacuua

SEQ ID NO: 92649 - RNA, 20 nt, Human
acagucuuaaguggggggaa

SEQ ID NO: 92650 - RNA, 18 nt, Human
acaguuaaaacuccaccc

SEQ ID NO: 92651 - RNA, 21 nt, Human
accgaaaaccagagcgccgag

SEQ ID NO: 92652 - RNA, 21 nt, Human
acuaaaaaaaaccaccaacca

SEQ ID NO: 92653 - RNA, 22 nt, Human
acuaaaaaaaaccaccaaccaa

SEQ ID NO: 92654 - RNA, 19 nt, Human
agaaaaaagaaacugucau

SEQ ID NO: 92655 - RNA, 23 nt, Human
agaggcaggugcagggcacaccc

SEQ ID NO: 92656 - RNA, 24 nt, Human
agaguccuaugugcucauaggucu

SEQ ID NO: 92657 - RNA, 20 nt, Human
aggacaaacaucacaaaacc

SEQ ID NO: 92658 - RNA, 26 nt, Human
aggacaaacaucacaaaaccauaauc

SEQ ID NO: 92659 - RNA, 18 nt, Human
agggcacacccaccgaaa

SEQ ID NO: 92660 - RNA, 24 nt, Human
auagaaacacacuuuaagauacca

SEQ ID NO: 92661 - RNA, 25 nt, Human
auaucauaaaaauucauuacuucaa

SEQ ID NO: 92662 - RNA, 21 nt, Human
aucacaaaaccauaaucccag

SEQ ID NO: 92663 - RNA, 23 nt, Human
auccacacauaccagugcguaug

SEQ ID NO: 92664 - RNA, 20 nt, Human
caaguuucugauuugcuuca

SEQ ID NO: 92665 - RNA, 21 nt, Human
cacaaaaccauaaucccagau

SEQ ID NO: 92666 - RNA, 24 nt, Human
cacaaaaccauaaucccagauaaa

SEQ ID NO: 92667 - RNA, 19 nt, Human
cacagguaugagcugcgag

SEQ ID NO: 92668 - RNA, 25 nt, Human
cacagguaugagcugcgagcacuca

SEQ ID NO: 92669 - RNA, 18 nt, Human
caggcucaaaccaucuac

SEQ ID NO: 92670 - RNA, 19 nt, Human
cagggcucgcuaacuccuc

SEQ ID NO: 92671 - RNA, 24 nt, Human
cauccacacauaccagugcguaug

SEQ ID NO: 92672 - RNA, 23 nt, Human
cauuuccacuucacaaguuucug

SEQ ID NO: 92673 - RNA, 24 nt, Human
cauuuccacuucacaaguuucuga

SEQ ID NO: 92674 - RNA, 24 nt, Human
ccagauaaauggucuaaaaugcag

SEQ ID NO: 92675 - RNA, 25 nt, Human
ccaugcccacagaugccuaaguucu

SEQ ID NO: 92676 - RNA, 18 nt, Human
ccgagugugagcagggcu

SEQ ID NO: 92677 - RNA, 19 nt, Human
ccgcaccugcugaggccug

SEQ ID NO: 92678 - RNA, 22 nt, Human
ccucccgggcugagugcucagc

SEQ ID NO: 92679 - RNA, 20 nt, Human
ccuuuauuaaugagaauggg

SEQ ID NO: 92680 - RNA, 20 nt, Human
cgggcugagugcucagcucu

SEQ ID NO: 92681 - RNA, 21 nt, Human
cgucuagaguccuaugugcuc

SEQ ID NO: 92682 - RNA, 20 nt, Human
cuaugugcucauaggucuuu

SEQ ID NO: 92683 - RNA, 20 nt, Human
cucagcucuggccuccggcc

SEQ ID NO: 92684 - RNA, 21 nt, Human
cuccgcaccugcugaggccug

SEQ ID NO: 92685 - RNA, 24 nt, Human
cucgcuaacuccucacggccuggg

SEQ ID NO: 92686 - RNA, 21 nt, Human
cuuaaaguacccucugcagca

SEQ ID NO: 92687 - RNA, 22 nt, Human
cuuacaguuaaaacuccacccc

SEQ ID NO: 92688 - RNA, 24 nt, Human
gacaaacaucacaaaaccauaauc

SEQ ID NO: 92689 - RNA, 19 nt, Human
gagccuuugaccaugccca

SEQ ID NO: 92690 - RNA, 19 nt, Human
gcugagucaugucucugcu

SEQ ID NO: 92691 - RNA, 18 nt, Human
ggauuucaaggcgacgcc

SEQ ID NO: 92692 - RNA, 21 nt, Human
gggcacacccaccgaaaacca

SEQ ID NO: 92693 - RNA, 23 nt, Human
gggggaagaggcaggugcagggc

SEQ ID NO: 92694 - RNA, 23 nt, Human
ggugcagugacggcuccgcaccu

SEQ ID NO: 92695 - RNA, 22 nt, Human
guaggucaaaaugagagggaaa

SEQ ID NO: 92696 - RNA, 19 nt, Human
gugcagugacggcuccgca

SEQ ID NO: 92697 - RNA, 23 nt, Human
uaaaaaaaaccaccaaccaacca

SEQ ID NO: 92698 - RNA, 19 nt, Human
uaacuuuuucacaauuacu

SEQ ID NO: 92699 - RNA, 19 nt, Human
uaauucaauugcaacuacc

SEQ ID NO: 92700 - RNA, 19 nt, Human
uacaguuaaaacuccaccc

SEQ ID NO: 92701 - RNA, 22 nt, Human
uacaguuaaaacuccaccccuc

SEQ ID NO: 92702 - RNA, 23 nt, Human
uaccaaauauaccaucuucucac

SEQ ID NO: 92703 - RNA, 18 nt, Human
uacuugaaaauucauagc

SEQ ID NO: 92704 - RNA, 21 nt, Human
uagaauacacagucuuaagug

SEQ ID NO: 92705 - RNA, 20 nt, Human
uaucauaaaaauucauuacu

SEQ ID NO: 92706 - RNA, 23 nt, Human
uauuuaugcugguagauccaggg

SEQ ID NO: 92707 - RNA, 21 nt, Human
ucaaaaugagagggaaauaca

SEQ ID NO: 92708 - RNA, 28 nt, Human
ucagcccauucauuuauugcuuuccuua

SEQ ID NO: 92709 - RNA, 22 nt, Human
ucccgggcugagugcucagcuc

SEQ ID NO: 92710 - RNA, 23 nt, Human
ucucacuuggcauacaaacuaaa

SEQ ID NO: 92711 - RNA, 18 nt, Human
ugagagggaaauacagua

SEQ ID NO: 92712 - RNA, 22 nt, Human
ugagccuuugaccaugcccaca

SEQ ID NO: 92713 - RNA, 22 nt, Human
ugauggaaggaguaugucuuaa

SEQ ID NO: 92714 - RNA, 18 nt, Human
ugauuugcuucacuuucu

SEQ ID NO: 92715 - RNA, 27 nt, Human
ugccucaccaccuuuagaacauuucca

SEQ ID NO: 92716 - RNA, 18 nt, Human
ugcucagcucuggccucc

SEQ ID NO: 92717 - RNA, 20 nt, Human
ugcugguagauccaggggca

SEQ ID NO: 92718 - RNA, 23 nt, Human
ugguagauccaggggcauuguag

SEQ ID NO: 92719 - RNA, 22 nt, Human
uguacaaaauugucacauagaa

SEQ ID NO: 92720 - RNA, 21 nt, Human
uguaggcccuuccugcguggu

SEQ ID NO: 92721 - RNA, 18 nt, Human
ugugagcagggcucgcua

SEQ ID NO: 92722 - RNA, 24 nt, Human
uuaguuugcucacacuuucucuca

SEQ ID NO: 92723 - RNA, 20 nt, Human
uuauucacauuaccuggcua

SEQ ID NO: 92724 - RNA, 20 nt, Human
uucacaaguuucugauuugc

SEQ ID NO: 92725 - RNA, 22 nt, Human
uuuaugcugguagauccagggg

SEQ ID NO: 92726 - RNA, 21 nt, Human
uuuauuaacuucuacaaccgc

SEQ ID NO: 92727 - RNA, 22 nt, Human
uuugagccuuugaccaugccca

SEQ ID NO: 92728 - RNA, 19 nt, Human
aaauguuaaauaugcaagc

SEQ ID NO: 92729 - RNA, 21 nt, Human
aacaggugagaucacaaaggc

SEQ ID NO: 92730 - RNA, 18 nt, Human
auguuaaaaaagguuuga

SEQ ID NO: 92731 - RNA, 25 nt, Human
caggugagaucacaaaggcuucugc

SEQ ID NO: 92732 - RNA, 24 nt, Human
cauuuuguuccaccaaguuaucca

SEQ ID NO: 92733 - RNA, 24 nt, Human
cauuuuguuccaccaaguuaucca

SEQ ID NO: 92734 - RNA, 24 nt, Human
ccucugugacccaauuuaucaccu

SEQ ID NO: 92735 - RNA, 23 nt, Human
ccugccauacguugcuucucuug

SEQ ID NO: 92736 - RNA, 24 nt, Human
cugacaguuggugaagagcuucuu

SEQ ID NO: 92737 - RNA, 24 nt, Human
cuuugcccagggauuccaacaccu

SEQ ID NO: 92738 - RNA, 18 nt, Human
gagcuucuuaaaagaaug

SEQ ID NO: 92739 - RNA, 19 nt, Human
ggcucagaaaacauuagug

SEQ ID NO: 92740 - RNA, 22 nt, Human
uagggaacagccucuguccuuu

SEQ ID NO: 92741 - RNA, 19 nt, Human
uauguuaaaaaagguuuga

SEQ ID NO: 92742 - RNA, 18 nt, Human
uauuucuuuuuuuccucu

SEQ ID NO: 92743 - RNA, 18 nt, Human
uauuucuuuuuuuccucu

SEQ ID NO: 92744 - RNA, 22 nt, Human
ucugccucugugacccaauuua

SEQ ID NO: 92745 - RNA, 21 nt, Human
ugaggaaaucuuugcccaggg

SEQ ID NO: 92746 - RNA, 21 nt, Human
ugaggaaaucuuugcccaggg

SEQ ID NO: 92747 - RNA, 21 nt, Human
ugauuucugccucugugaccc

SEQ ID NO: 92748 - RNA, 19 nt, Human
ugcccagggauuccaacac

SEQ ID NO: 92749 - RNA, 19 nt, Human
ugcccagggauuccaacac

SEQ ID NO: 92750 - RNA, 20 nt, Human
uuaaauaugcaagcuguacu

SEQ ID NO: 92751 - RNA, 25 nt, Human
uucugugguugccuucugccauagg

SEQ ID NO: 92752 - RNA, 22 nt, Human
uucuuuuuuuccucuuccuucc

SEQ ID NO: 92753 - RNA, 19 nt, Human
uugccuucugacaguuggu

SEQ ID NO: 92754 - RNA, 24 nt, Human
uuucuuuuuuuccucuuccuuccc

SEQ ID NO: 92755 - RNA, 23 nt, Human
uuugcccagggauuccaacaccu

SEQ ID NO: 92756 - RNA, 22 nt, Human
uuuucugugguugccuucugac

SEQ ID NO: 92757 - RNA, 23 nt, Human
acagaggagggcugggcugccug

SEQ ID NO: 92758 - RNA, 19 nt, Human
agaggagggcugggcugcc

SEQ ID NO: 92759 - RNA, 20 nt, Human
ucuuugauguugacagagga

SEQ ID NO: 92760 - RNA, 24 nt, Human
ucuuugauguugacagaggagggc

SEQ ID NO: 92761 - RNA, 18 nt, Human
ugacagaggagggcuggg

SEQ ID NO: 92762 - RNA, 19 nt, Human
ugacagaggagggcugggc

SEQ ID NO: 92763 - RNA, 24 nt, Human
aaacauuugaaucauuagaccaua

SEQ ID NO: 92764 - RNA, 24 nt, Human
aaagugcugggauuacagguguga

SEQ ID NO: 92765 - RNA, 22 nt, Human
aaguagcugggauugcaggcau

SEQ ID NO: 92766 - RNA, 24 nt, Human
aaguagcugggauugcaggcaugc

SEQ ID NO: 92767 - RNA, 18 nt, Human
aagugcugggauuacagg

SEQ ID NO: 92768 - RNA, 19 nt, Human
aagugcugggauuacaggu

SEQ ID NO: 92769 - RNA, 25 nt, Human
acaugaacuuuuuuuuuuuuuuuuu

SEQ ID NO: 92770 - RNA, 23 nt, Human
acauuuucuuuuuuuugagacgg

SEQ ID NO: 92771 - RNA, 23 nt, Human
acggaguuucacucguugcccag

SEQ ID NO: 92772 - RNA, 24 nt, Human
acggggcuucuccauguuggucag

SEQ ID NO: 92773 - RNA, 25 nt, Human
acucguugcccaggcuggagugcaa

SEQ ID NO: 92774 - RNA, 18 nt, Human
aggaagagaaagacauuu

SEQ ID NO: 92775 - RNA, 22 nt, Human
aggaagagaaagacauuuucuu

SEQ ID NO: 92776 - RNA, 19 nt, Human
aggauuuuguuucuccaua

SEQ ID NO: 92777 - RNA, 24 nt, Human
aggugauccgcccaccuuggacuc

SEQ ID NO: 92778 - RNA, 24 nt, Human
agugauucuccugccucagccuuc

SEQ ID NO: 92779 - RNA, 20 nt, Human
agugcaauggcgcaaucucg

SEQ ID NO: 92780 - RNA, 24 nt, Human
agugcaauggcgcaaucucggcuc

SEQ ID NO: 92781 - RNA, 24 nt, Human
auuacaggugugaguaaccacgcc

SEQ ID NO: 92782 - RNA, 24 nt, Human
caaagugcugggauuacaggugug

SEQ ID NO: 92783 - RNA, 20 nt, Human
caagugauucuccugccuca

SEQ ID NO: 92784 - RNA, 22 nt, Human
caagugauucuccugccucagc

SEQ ID NO: 92785 - RNA, 18 nt, Human
caccuugcccuccucuuc

SEQ ID NO: 92786 - RNA, 21 nt, Human
caccuugcccuccucuuccug

SEQ ID NO: 92787 - RNA, 21 nt, Human
cacucguugcccaggcuggag

SEQ ID NO: 92788 - RNA, 23 nt, Human
cagccuccaccuccuggguucaa

SEQ ID NO: 92789 - RNA, 20 nt, Human
caggcaugcgccgccaugcc

SEQ ID NO: 92790 - RNA, 21 nt, Human
caggcucccgggcccggcccc

SEQ ID NO: 92791 - RNA, 19 nt, Human
cauaucaaacccuuucacc

SEQ ID NO: 92792 - RNA, 26 nt, Human
cauuagaccauaaugcuucacccuaa

SEQ ID NO: 92793 - RNA, 21 nt, Human
ccaaagugcugggauuacagg

SEQ ID NO: 92794 - RNA, 21 nt, Human
ccaaagugcugggauuacagg

SEQ ID NO: 92795 - RNA, 24 nt, Human
ccaaagugcugggauuacaggugu

SEQ ID NO: 92796 - RNA, 22 nt, Human
ccaaguagcugggauugcaggc

SEQ ID NO: 92797 - RNA, 24 nt, Human
ccaaguagcugggauugcaggcau

SEQ ID NO: 92798 - RNA, 24 nt, Human
ccaccuccuggguucaagugauuc

SEQ ID NO: 92799 - RNA, 19 nt, Human
ccauguuggucaggcuggu

SEQ ID NO: 92800 - RNA, 22 nt, Human
ccauguuggucaggcuggucuc

SEQ ID NO: 92801 - RNA, 23 nt, Human
ccauguuggucaggcuggucucg

SEQ ID NO: 92802 - RNA, 19 nt, Human
cccaccuuggacucccaaa

SEQ ID NO: 92803 - RNA, 18 nt, Human
cccaggcuggagugcaau

SEQ ID NO: 92804 - RNA, 24 nt, Human
cccgaccucaggugauccgcccac

SEQ ID NO: 92805 - RNA, 19 nt, Human
cccgggcccggccccgccc

SEQ ID NO: 92806 - RNA, 18 nt, Human
ccgcagccuccaccuccu

SEQ ID NO: 92807 - RNA, 23 nt, Human
ccgcagccuccaccuccuggguu

SEQ ID NO: 92808 - RNA, 24 nt, Human
ccgcagccuccaccuccuggguuc

SEQ ID NO: 92809 - RNA, 18 nt, Human
ccgggcccggccccgccc

SEQ ID NO: 92810 - RNA, 22 nt, Human
ccuccaccuccuggguucaagu

SEQ ID NO: 92811 - RNA, 21 nt, Human
ccuccuggguucaagugauuc

SEQ ID NO: 92812 - RNA, 24 nt, Human
ccuccuggguucaagugauucucc

SEQ ID NO: 92813 - RNA, 23 nt, Human
ccugccucagccuuccaaguagc

SEQ ID NO: 92814 - RNA, 24 nt, Human
ccugccucagccuuccaaguagcu

SEQ ID NO: 92815 - RNA, 23 nt, Human
ccuggguucaagugauucuccuc

SEQ ID NO: 92816 - RNA, 23 nt, Human
ccuggguucaagugauucuccug

SEQ ID NO: 92817 - RNA, 18 nt, Human
ccuugcccuccucuuccu

SEQ ID NO: 92818 - RNA, 18 nt, Human
cgaccucaggugauccgc

SEQ ID NO: 92819 - RNA, 20 nt, Human
cgcgcagccagacaccuugc

SEQ ID NO: 92820 - RNA, 23 nt, Human
cggaguuucacucguugcccagg

SEQ ID NO: 92821 - RNA, 24 nt, Human
cggggcuucuccauguuggucagg

SEQ ID NO: 92822 - RNA, 20 nt, Human
cguugcccaggcuggagugc

SEQ ID NO: 92823 - RNA, 24 nt, Human
cucagccuuccaaguagcugggau

SEQ ID NO: 92824 - RNA, 24 nt, Human
cuccauguuggucaggcuggucuc

SEQ ID NO: 92825 - RNA, 19 nt, Human
cucccgggcccggccccgc

SEQ ID NO: 92826 - RNA, 20 nt, Human
cuccuggguucaagugauuc

SEQ ID NO: 92827 - RNA, 21 nt, Human
cuccuggguucaagugauucu

SEQ ID NO: 92828 - RNA, 24 nt, Human
cucguugcccaggcuggagugcaa

SEQ ID NO: 92829 - RNA, 18 nt, Human
cugaagccacaggcuccc

SEQ ID NO: 92830 - RNA, 23 nt, Human
cugccucagccuuccaaguagcu

SEQ ID NO: 92831 - RNA, 22 nt, Human
cuuuuuuuuuuuuuuuuuaagg

SEQ ID NO: 92832 - RNA, 20 nt, Human
gaacuuuuuuuuuuuuuuuu

SEQ ID NO: 92833 - RNA, 23 nt, Human
gaccucaggugauccgcccaccu

SEQ ID NO: 92834 - RNA, 23 nt, Human
gagacggggcuucuccauguugg

SEQ ID NO: 92835 - RNA, 19 nt, Human
gauuacaggugugaguaac

SEQ ID NO: 92836 - RNA, 22 nt, Human
gauugcaggcaugcgccgccau

SEQ ID NO: 92837 - RNA, 24 nt, Human
gauugcaggcaugcgccgccaugc

SEQ ID NO: 92838 - RNA, 19 nt, Human
gcccaggcuggagugcaau

SEQ ID NO: 92839 - RNA, 25 nt, Human
gcuaaauuuuuuuuugcauuuuuag

SEQ ID NO: 92840 - RNA, 19 nt, Human
gcuggagugcaauggcgca

SEQ ID NO: 92841 - RNA, 23 nt, Human
gcuggucucgaacucccgaccuc

SEQ ID NO: 92842 - RNA, 22 nt, Human
ggaguuucacucguugcccagg

SEQ ID NO: 92843 - RNA, 22 nt, Human
gggcuucuccauguuggucagg

SEQ ID NO: 92844 - RNA, 23 nt, Human
guagagacggggcuucuccaugu

SEQ ID NO: 92845 - RNA, 18 nt, Human
guagcugggauugcaggc

SEQ ID NO: 92846 - RNA, 24 nt, Human
gugauucuccugccucagccuucc

SEQ ID NO: 92847 - RNA, 24 nt, Human
guuucacucguugcccaggcugga

SEQ ID NO: 92848 - RNA, 24 nt, Human
uaguagagacggggcuucuccaug

SEQ ID NO: 92849 - RNA, 19 nt, Human
ucaagugauucuccugccu

SEQ ID NO: 92850 - RNA, 24 nt, Human
ucaccgcagccuccaccuccuggg

SEQ ID NO: 92851 - RNA, 27 nt, Human
ucaccgcagccuccaccuccuggguuc

SEQ ID NO: 92852 - RNA, 19 nt, Human
ucacucguugcccaggcug

SEQ ID NO: 92853 - RNA, 21 nt, Human
ucacucguugcccaggcugga

SEQ ID NO: 92854 - RNA, 23 nt, Human
uccaaguagcugggauugcaggc

SEQ ID NO: 92855 - RNA, 24 nt, Human
uccaaguagcugggauugcaggca

SEQ ID NO: 92856 - RNA, 24 nt, Human
uccauguuggucaggcuggucucg

SEQ ID NO: 92857 - RNA, 23 nt, Human
ucccaaagugcugggauuacagg

SEQ ID NO: 92858 - RNA, 20 nt, Human
ucccgggcccggccccgccc

SEQ ID NO: 92859 - RNA, 24 nt, Human
uccugaagccacaggcucccgggc

SEQ ID NO: 92860 - RNA, 21 nt, Human
uccuggguucaagugauucuc

SEQ ID NO: 92861 - RNA, 24 nt, Human
uccuggguucaagugauucuccug

SEQ ID NO: 92862 - RNA, 23 nt, Human
ucuccauaucaaacccuuucacc

SEQ ID NO: 92863 - RNA, 24 nt, Human
ucuccauaucaaacccuuucacca

SEQ ID NO: 92864 - RNA, 26 nt, Human
ucuccugccucagccuuccaaguagc

SEQ ID NO: 92865 - RNA, 18 nt, Human
ucuuuuuuuugagacgga

SEQ ID NO: 92866 - RNA, 24 nt, Human
ugauccgcccaccuuggacuccca

SEQ ID NO: 92867 - RNA, 20 nt, Human
ugauucuccugccucagccu

SEQ ID NO: 92868 - RNA, 23 nt, Human
ugcaauggcgcaaucucggcuca

SEQ ID NO: 92869 - RNA, 26 nt, Human
ugcagccaaacgcgcagccagacacc

SEQ ID NO: 92870 - RNA, 18 nt, Human
ugcccaggcuggagugca

SEQ ID NO: 92871 - RNA, 21 nt, Human
ugcccaggcuggagugcaaug

SEQ ID NO: 92872 - RNA, 21 nt, Human
ugcccaggcuggagugcaaug

SEQ ID NO: 92873 - RNA, 24 nt, Human
ugcccaggcuggagugcaauggcg

SEQ ID NO: 92874 - RNA, 24 nt, Human
ugccucagccuuccaaguagcugg

SEQ ID NO: 92875 - RNA, 20 nt, Human
ugcugggauuacagguguga

SEQ ID NO: 92876 - RNA, 23 nt, Human
uggagugcaauggcgcaaucucg

SEQ ID NO: 92877 - RNA, 24 nt, Human
uggagugcaauggcgcaaucucgg

SEQ ID NO: 92878 - RNA, 18 nt, Human
ugggauuacaggugugag

SEQ ID NO: 92879 - RNA, 18 nt, Human
ugggauuacaggugugag

SEQ ID NO: 92880 - RNA, 19 nt, Human
ugggauuacaggugugagu

SEQ ID NO: 92881 - RNA, 22 nt, Human
ugggauuacaggugugaguaac

SEQ ID NO: 92882 - RNA, 24 nt, Human
ugggauuacaggugugaguaacca

SEQ ID NO: 92883 - RNA, 18 nt, Human
ugggauugcaggcaugcg

SEQ ID NO: 92884 - RNA, 20 nt, Human
ugggauugcaggcaugcgcc

SEQ ID NO: 92885 - RNA, 21 nt, Human
ugggauugcaggcaugcgccg

SEQ ID NO: 92886 - RNA, 24 nt, Human
ugggauugcaggcaugcgccgcca

SEQ ID NO: 92887 - RNA, 23 nt, Human
uggguucaagugauucuccugcc

SEQ ID NO: 92888 - RNA, 24 nt, Human
uggguucaagugauucuccugccu

SEQ ID NO: 92889 - RNA, 23 nt, Human
uggucaggcuggucucgaacucc

SEQ ID NO: 92890 - RNA, 19 nt, Human
uggucucgaacucccgacc

SEQ ID NO: 92891 - RNA, 25 nt, Human
uguuucuccauaucaaacccuuuca

SEQ ID NO: 92892 - RNA, 18 nt, Human
uuaguagagacggggcuu

SEQ ID NO: 92893 - RNA, 24 nt, Human
uuaguagagacggggcuucuccau

SEQ ID NO: 92894 - RNA, 21 nt, Human
uucaagugauucuccugccuc

SEQ ID NO: 92895 - RNA, 23 nt, Human
uucaagugauucuccugccucag

SEQ ID NO: 92896 - RNA, 24 nt, Human
uucaagugauucuccugccucagc

SEQ ID NO: 92897 - RNA, 22 nt, Human
uucacucguugcccaggcugga

SEQ ID NO: 92898 - RNA, 24 nt, Human
uucacucguugcccaggcuggagu

SEQ ID NO: 92899 - RNA, 22 nt, Human
uuccugaagccacaggcucccg

SEQ ID NO: 92900 - RNA, 25 nt, Human
uuccugaagccacaggcucccgggc

SEQ ID NO: 92901 - RNA, 18 nt, Human
uugcccaggcuggagugc

SEQ ID NO: 92902 - RNA, 19 nt, Human
uuggacucccaaagugcug

SEQ ID NO: 92903 - RNA, 21 nt, Human
uuucacucguugcccaggcug

SEQ ID NO: 92904 - RNA, 22 nt, Human
uuucacucguugcccaggcugg

SEQ ID NO: 92905 - RNA, 23 nt, Human
uuucacucguugcccaggcugga

SEQ ID NO: 92906 - RNA, 26 nt, Human
uuucuuuuuuuugagacggaguuuca

SEQ ID NO: 92907 - RNA, 19 nt, Human
uuuuuaguagagacggggc

SEQ ID NO: 92908 - RNA, 21 nt, Human
uuuuuugcauuuuuaguagag

SEQ ID NO: 92909 - RNA, 24 nt, Human
uuuuuugcauuuuuaguagagacg

SEQ ID NO: 92910 - RNA, 20 nt, Human
aacaaaagacagcaccagaa

SEQ ID NO: 92911 - RNA, 20 nt, Human
aacaaaagacagcaccagaa

SEQ ID NO: 92912 - RNA, 22 nt, Human
aacauaagaagcacaaauccca

SEQ ID NO: 92913 - RNA, 22 nt, Human
aagaagcacaaaucccacugcu

SEQ ID NO: 92914 - RNA, 19 nt, Human
aagagcccaaagcgacccg

SEQ ID NO: 92915 - RNA, 21 nt, Human
aagagcccaaagcgacccgug

SEQ ID NO: 92916 - RNA, 19 nt, Human
aagcgacccguguccccgc

SEQ ID NO: 92917 - RNA, 21 nt, Human
aagcuggccgcgcgcucugcc

SEQ ID NO: 92918 - RNA, 22 nt, Human
aaggugcugguggaagauguga

SEQ ID NO: 92919 - RNA, 22 nt, Human
aaggugcugguggaagauguga

SEQ ID NO: 92920 - RNA, 24 nt, Human
aaguaacaaauauuuacucaaaau

SEQ ID NO: 92921 - RNA, 24 nt, Human
aaguaacaaauauuuacucaaaau

SEQ ID NO: 92922 - RNA, 27 nt, Human
aagugccaaaaaucuuugccauaaacu

SEQ ID NO: 92923 - RNA, 27 nt, Human
aagugccaaaaaucuuugccauaaacu

SEQ ID NO: 92924 - RNA, 23 nt, Human
acacaggaaaccaaaccucuucc

SEQ ID NO: 92925 - RNA, 23 nt, Human
acacaggaaaccaaaccucuucc

SEQ ID NO: 92926 - RNA, 24 nt, Human
acacucaauacccacauucugcaa

SEQ ID NO: 92927 - RNA, 24 nt, Human
acacucaauacccacauucugcaa

SEQ ID NO: 92928 - RNA, 22 nt, Human
acagucaccaaaugaauaacau

SEQ ID NO: 92929 - RNA, 18 nt, Human
accacacaggggaucugc

SEQ ID NO: 92930 - RNA, 21 nt, Human
acuacuggacacaggaaacca

SEQ ID NO: 92931 - RNA, 20 nt, Human
acuauuaggcagaaaaaaac

SEQ ID NO: 92932 - RNA, 21 nt, Human
acucccacuaggcagccccca

SEQ ID NO: 92933 - RNA, 18 nt, Human
acuggacacaggaaacca

SEQ ID NO: 92934 - RNA, 18 nt, Human
acuggacacaggaaacca

SEQ ID NO: 92935 - RNA, 20 nt, Human
agacucaaagugccuggcaa

SEQ ID NO: 92936 - RNA, 18 nt, Human
agauuuucgacauaaagc

SEQ ID NO: 92937 - RNA, 21 nt, Human
agggaggagccgcccugggua

SEQ ID NO: 92938 - RNA, 21 nt, Human
agggguggaagagcccaaagc

SEQ ID NO: 92939 - RNA, 20 nt, Human
aucgaggguacagcaggccu

SEQ ID NO: 92940 - RNA, 20 nt, Human
augaucccacuacuggacac

SEQ ID NO: 92941 - RNA, 20 nt, Human
augaucccacuacuggacac

SEQ ID NO: 92942 - RNA, 25 nt, Human
caaagugccaaaaaucuuugccaua

SEQ ID NO: 92943 - RNA, 25 nt, Human
caaagugccaaaaaucuuugccaua

SEQ ID NO: 92944 - RNA, 26 nt, Human
caaagugccaaaaaucuuugccauag

SEQ ID NO: 92945 - RNA, 22 nt, Human
caaaucccacugcuaccaccgc

SEQ ID NO: 92946 - RNA, 23 nt, Human
cacagucaccaaaugaauaacau

SEQ ID NO: 92947 - RNA, 23 nt, Human
cacagucaccaaaugaauaacau

SEQ ID NO: 92948 - RNA, 23 nt, Human
cacagucaccaaaugaauaacau

SEQ ID NO: 92949 - RNA, 23 nt, Human
caccaauugcaguggacacagcc

SEQ ID NO: 92950 - RNA, 23 nt, Human
caccaauugcaguggacacagcc

SEQ ID NO: 92951 - RNA, 23 nt, Human
caccaauugcaguggacacagcc

SEQ ID NO: 92952 - RNA, 19 nt, Human
caccagaaaguuucuuccc

SEQ ID NO: 92953 - RNA, 19 nt, Human
caccagaaaguuucuuccc

SEQ ID NO: 92954 - RNA, 18 nt, Human
cacuacuggacacaggaa

SEQ ID NO: 92955 - RNA, 18 nt, Human
cacuacuggacacaggaa

SEQ ID NO: 92956 - RNA, 23 nt, Human
cacucaauacccacauucugcaa

SEQ ID NO: 92957 - RNA, 26 nt, Human
cacucaauacccacauucugcaauaa

SEQ ID NO: 92958 - RNA, 26 nt, Human
cacucaauacccacauucugcaauaa

SEQ ID NO: 92959 - RNA, 19 nt, Human
cagucggcuuucucauguu

SEQ ID NO: 92960 - RNA, 21 nt, Human
cauaagaagcacaaaucccac

SEQ ID NO: 92961 - RNA, 18 nt, Human
caucgaggguacagcagg

SEQ ID NO: 92962 - RNA, 22 nt, Human
cauuauaaaaaaagucucugaa

SEQ ID NO: 92963 - RNA, 21 nt, Human
ccaaagcgacccguguccccg

SEQ ID NO: 92964 - RNA, 22 nt, Human
ccaaagcgacccguguccccgc

SEQ ID NO: 92965 - RNA, 19 nt, Human
ccaccaugguuccagcucc

SEQ ID NO: 92966 - RNA, 19 nt, Human
ccaccaugguuccagcucc

SEQ ID NO: 92967 - RNA, 22 nt, Human
ccaccgcagcugguguucuuuu

SEQ ID NO: 92968 - RNA, 21 nt, Human
ccagaagucacuucuguugca

SEQ ID NO: 92969 - RNA, 21 nt, Human
ccagaagucacuucuguugca

SEQ ID NO: 92970 - RNA, 21 nt, Human
ccagaagucacuucuguugca

SEQ ID NO: 92971 - RNA, 19 nt, Human
cccauuauccucauagccc

SEQ ID NO: 92972 - RNA, 19 nt, Human
cccauuauccucauagccc

SEQ ID NO: 92973 - RNA, 22 nt, Human
cccucagcuuugaaggaaguac

SEQ ID NO: 92974 - RNA, 21 nt, Human
ccuagacguugcuuugcgggg

SEQ ID NO: 92975 - RNA, 23 nt, Human
ccuccgagggugugcucugaucu

SEQ ID NO: 92976 - RNA, 20 nt, Human
ccugccguucccacggcggu

SEQ ID NO: 92977 - RNA, 23 nt, Human
cgaaacuaaaagucucggcgcug

SEQ ID NO: 92978 - RNA, 23 nt, Human
cgccccuggcucgggauagugcg

SEQ ID NO: 92979 - RNA, 24 nt, Human
cggcugggacuggcacagucucuc

SEQ ID NO: 92980 - RNA, 24 nt, Human
cuaacucccacuaggcagccccca

SEQ ID NO: 92981 - RNA, 24 nt, Human
cuaacucccacuaggcagccccca

SEQ ID NO: 92982 - RNA, 24 nt, Human
cuaagccaaugaaaaaucauucaa

SEQ ID NO: 92983 - RNA, 19 nt, Human
cucaaagugccuggcaacu

SEQ ID NO: 92984 - RNA, 19 nt, Human
cucaaagugccuggcaacu

SEQ ID NO: 92985 - RNA, 24 nt, Human
cucaauacccacauucugcaauaa

SEQ ID NO: 92986 - RNA, 24 nt, Human
cucaauacccacauucugcaauaa

SEQ ID NO: 92987 - RNA, 19 nt, Human
cucccacuaggcagccccc

SEQ ID NO: 92988 - RNA, 19 nt, Human
cucccacuaggcagccccc

SEQ ID NO: 92989 - RNA, 22 nt, Human
cucugaaaauucagagaacaaa

SEQ ID NO: 92990 - RNA, 20 nt, Human
cugccaaguuggccccucgc

SEQ ID NO: 92991 - RNA, 20 nt, Human
cuggcacagucggcuuucuc

SEQ ID NO: 92992 - RNA, 23 nt, Human
cugggacuggcacagucucucuc

SEQ ID NO: 92993 - RNA, 22 nt, Human
cuucucagcuagaauguacccc

SEQ ID NO: 92994 - RNA, 23 nt, Human
cuucuugcuguuuggcuucucuu

SEQ ID NO: 92995 - RNA, 23 nt, Human
cuucuugcuguuuggcuucucuu

SEQ ID NO: 92996 - RNA, 18 nt, Human
cuuugccauaaacucuuc

SEQ ID NO: 92997 - RNA, 18 nt, Human
cuuugccauaaacucuuc

SEQ ID NO: 92998 - RNA, 22 nt, Human
gaaacuaaaagucucggcgcug

SEQ ID NO: 92999 - RNA, 21 nt, Human
gaacaaaagacagcaccagaa

SEQ ID NO: 93000 - RNA, 18 nt, Human
gacauaaagccaaaacag

SEQ ID NO: 93001 - RNA, 19 nt, Human
gaccacacaggggaucugc

SEQ ID NO: 93002 - RNA, 22 nt, Human
gcugauccgcuucgggcccgcu

SEQ ID NO: 93003 - RNA, 19 nt, Human
gcugggacuggcacagucg

SEQ ID NO: 93004 - RNA, 18 nt, Human
ggcaguaaggugcuggug

SEQ ID NO: 93005 - RNA, 18 nt, Human
ggcaguaaggugcuggug

SEQ ID NO: 93006 - RNA, 20 nt, Human
gggcaguaaggugcuggugg

SEQ ID NO: 93007 - RNA, 20 nt, Human
gggcaguaaggugcuggugg

SEQ ID NO: 93008 - RNA, 22 nt, Human
gggcggcugggacuggcacagu

SEQ ID NO: 93009 - RNA, 22 nt, Human
gggcggcugggacuggcacagu

SEQ ID NO: 93010 - RNA, 23 nt, Human
gguaacagacauacaaagagaaa

SEQ ID NO: 93011 - RNA, 23 nt, Human
gguaacagacauacaaagagaaa

SEQ ID NO: 93012 - RNA, 23 nt, Human
gguaacagacauacaaagagaaa

SEQ ID NO: 93013 - RNA, 19 nt, Human
gguagggccgggcggggcu

SEQ ID NO: 93014 - RNA, 21 nt, Human
uaaagccaaaacagauuguuu

SEQ ID NO: 93015 - RNA, 21 nt, Human
uaaagccaaaacagauuguuu

SEQ ID NO: 93016 - RNA, 18 nt, Human
uaacaagguaacagacau

SEQ ID NO: 93017 - RNA, 23 nt, Human
uaacaccaucuugaaaacaaagu

SEQ ID NO: 93018 - RNA, 23 nt, Human
uaacaccaucuugaaaacaaagu

SEQ ID NO: 93019 - RNA, 19 nt, Human
uaacagacauacaaagaga

SEQ ID NO: 93020 - RNA, 19 nt, Human
uaacagacauacaaagaga

SEQ ID NO: 93021 - RNA, 19 nt, Human
uaacagacauacaaagaga

SEQ ID NO: 93022 - RNA, 22 nt, Human
uaagccaaugaaaaaucauuca

SEQ ID NO: 93023 - RNA, 22 nt, Human
uaagccaaugaaaaaucauuca

SEQ ID NO: 93024 - RNA, 18 nt, Human
uacacagucaccaaauga

SEQ ID NO: 93025 - RNA, 18 nt, Human
uacacagucaccaaauga

SEQ ID NO: 93026 - RNA, 18 nt, Human
uacacagucaccaaauga

SEQ ID NO: 93027 - RNA, 22 nt, Human
uacauagacuaucugacaaccc

SEQ ID NO: 93028 - RNA, 22 nt, Human
uacauagacuaucugacaaccc

SEQ ID NO: 93029 - RNA, 18 nt, Human
uaccaccgcagcuggugu

SEQ ID NO: 93030 - RNA, 20 nt, Human
uaccacuguuaccaccaauu

SEQ ID NO: 93031 - RNA, 20 nt, Human
uaccacuguuaccaccaauu

SEQ ID NO: 93032 - RNA, 21 nt, Human
uacuauuaggcagaaaaaaac

SEQ ID NO: 93033 - RNA, 21 nt, Human
uacuauuaggcagaaaaaaac

SEQ ID NO: 93034 - RNA, 19 nt, Human
uacuggacacaggaaacca

SEQ ID NO: 93035 - RNA, 19 nt, Human
uagaguuccuuggugagca

SEQ ID NO: 93036 - RNA, 23 nt, Human
uaggcagcccccaccaugguucc

SEQ ID NO: 93037 - RNA, 23 nt, Human
uaggcagcccccaccaugguucc

SEQ ID NO: 93038 - RNA, 22 nt, Human
uaggccugggcaguaaggugcu

SEQ ID NO: 93039 - RNA, 22 nt, Human
uaggccugggcaguaaggugcu

SEQ ID NO: 93040 - RNA, 23 nt, Human
uauauuuuaaagcuauaacagau

SEQ ID NO: 93041 - RNA, 23 nt, Human
uauauuuuaaagcuauaacagau

SEQ ID NO: 93042 - RNA, 19 nt, Human
uauuaacaagguaacagac

SEQ ID NO: 93043 - RNA, 19 nt, Human
uauuaacaagguaacagac

SEQ ID NO: 93044 - RNA, 19 nt, Human
uauuaacaagguaacagac

SEQ ID NO: 93045 - RNA, 21 nt, Human
uauuaacaagguaacagacau

SEQ ID NO: 93046 - RNA, 21 nt, Human
uauuaacaagguaacagacau

SEQ ID NO: 93047 - RNA, 22 nt, Human
ucaaaagauaacaccaucuuga

SEQ ID NO: 93048 - RNA, 22 nt, Human
ucaaaagauaacaccaucuuga

SEQ ID NO: 93049 - RNA, 20 nt, Human
ucaauacccacauucugcaa

SEQ ID NO: 93050 - RNA, 22 nt, Human
ucaauacccacauucugcaaaa

SEQ ID NO: 93051 - RNA, 22 nt, Human
ucaauacccacauucugcaaaa

SEQ ID NO: 93052 - RNA, 24 nt, Human
ucaauacccacauucugcaauaaa

SEQ ID NO: 93053 - RNA, 24 nt, Human
ucaauacccacauucugcaauaaa

SEQ ID NO: 93054 - RNA, 22 nt, Human
ucauucaaaucacacucaauac

SEQ ID NO: 93055 - RNA, 23 nt, Human
ucauucaaaucacacucaauacc

SEQ ID NO: 93056 - RNA, 23 nt, Human
ucauucaaaucacacucaauacc

SEQ ID NO: 93057 - RNA, 27 nt, Human
uccacaauccauuggugguccuaacuc

SEQ ID NO: 93058 - RNA, 27 nt, Human
uccacaauccauuggugguccuaacuc

SEQ ID NO: 93059 - RNA, 22 nt, Human
uccaucucagucaguggcuuug

SEQ ID NO: 93060 - RNA, 24 nt, Human
uccaucucagucaguggcuuuguu

SEQ ID NO: 93061 - RNA, 24 nt, Human
uccaucucagucaguggcuuuguu

SEQ ID NO: 93062 - RNA, 18 nt, Human
uccauuucuuguucuucu

SEQ ID NO: 93063 - RNA, 18 nt, Human
uccauuucuuguucuucu

SEQ ID NO: 93064 - RNA, 18 nt, Human
ucccacuaggcagccccc

SEQ ID NO: 93065 - RNA, 20 nt, Human
ucccauuauccucauagccc

SEQ ID NO: 93066 - RNA, 21 nt, Human
uccccgcacgcauagucccug

SEQ ID NO: 93067 - RNA, 21 nt, Human
ucccuggagggcgcucucugc

SEQ ID NO: 93068 - RNA, 21 nt, Human
uccgcagcaagggucuggggc

SEQ ID NO: 93069 - RNA, 19 nt, Human
uccugccguucccacggcg

SEQ ID NO: 93070 - RNA, 18 nt, Human
ucucagcucacuccaucu

SEQ ID NO: 93071 - RNA, 18 nt, Human
ucucagcucacuccaucu

SEQ ID NO: 93072 - RNA, 22 nt, Human
ucucauggaagugugggucauc

SEQ ID NO: 93073 - RNA, 23 nt, Human
ucucugaaaauucagagaacaaa

SEQ ID NO: 93074 - RNA, 26 nt, Human
ucucugcaaagcuggccgcgcgcucu

SEQ ID NO: 93075 - RNA, 22 nt, Human
ucugaauauuucaagagcauaa

SEQ ID NO: 93076 - RNA, 22 nt, Human
ucugaauauuucaagagcauaa

SEQ ID NO: 93077 - RNA, 21 nt, Human
ucuuguucuucuccugccuca

SEQ ID NO: 93078 - RNA, 21 nt, Human
ugacugaaguagaguuccuug

SEQ ID NO: 93079 - RNA, 18 nt, Human
ugagggcaggauagguga

SEQ ID NO: 93080 - RNA, 18 nt, Human
ugagggcaggauagguga

SEQ ID NO: 93081 - RNA, 19 nt, Human
ugcacauaaagccaaaaca

SEQ ID NO: 93082 - RNA, 19 nt, Human
ugcacauaaagccaaaaca

SEQ ID NO: 93083 - RNA, 23 nt, Human
ugcaguggacacagccaugagcu

SEQ ID NO: 93084 - RNA, 23 nt, Human
ugcaguggacacagccaugagcu

SEQ ID NO: 93085 - RNA, 23 nt, Human
ugcaguggacacagccaugagcu

SEQ ID NO: 93086 - RNA, 18 nt, Human
ugcauguauuaagucuau

SEQ ID NO: 93087 - RNA, 18 nt, Human
ugcauguauuaagucuau

SEQ ID NO: 93088 - RNA, 18 nt, Human
ugccauaaacucuuccuc

SEQ ID NO: 93089 - RNA, 18 nt, Human
ugccauaaacucuuccuc

SEQ ID NO: 93090 - RNA, 19 nt, Human
ugcgcgcgugggcguagga

SEQ ID NO: 93091 - RNA, 23 nt, Human
ugcggagggaggagccgcccugg

SEQ ID NO: 93092 - RNA, 21 nt, Human
ugcugguggaagaugugaggg

SEQ ID NO: 93093 - RNA, 21 nt, Human
ugcugguggaagaugugaggg

SEQ ID NO: 93094 - RNA, 20 nt, Human
uggagaauuucugaauauuu

SEQ ID NO: 93095 - RNA, 19 nt, Human
uggcuucucuuuuaucauc

SEQ ID NO: 93096 - RNA, 19 nt, Human
uggcuucucuuuuaucauc

SEQ ID NO: 93097 - RNA, 21 nt, Human
ugggcaguaaggugcuggugg

SEQ ID NO: 93098 - RNA, 21 nt, Human
uggguagggccgggcggggcu

SEQ ID NO: 93099 - RNA, 20 nt, Human
uggugguccuaacucccacu

SEQ ID NO: 93100 - RNA, 20 nt, Human
uggugguccuaacucccacu

SEQ ID NO: 93101 - RNA, 19 nt, Human
ugucauggcuccauuuucc

SEQ ID NO: 93102 - RNA, 19 nt, Human
ugucauggcuccauuuucc

SEQ ID NO: 93103 - RNA, 23 nt, Human
uguugacaccaauugcaguggac

SEQ ID NO: 93104 - RNA, 21 nt, Human
uguugcauguauuaagucuau

SEQ ID NO: 93105 - RNA, 21 nt, Human
uguugcauguauuaagucuau

SEQ ID NO: 93106 - RNA, 23 nt, Human
uuaaagcuauaacagauuuugca

SEQ ID NO: 93107 - RNA, 23 nt, Human
uuaaagcuauaacagauuuugca

SEQ ID NO: 93108 - RNA, 18 nt, Human
uucaagagcauaaaaaaa

SEQ ID NO: 93109 - RNA, 18 nt, Human
uucaagagcauaaaaaaa

SEQ ID NO: 93110 - RNA, 23 nt, Human
uucagagaacaaaagacagcacc

SEQ ID NO: 93111 - RNA, 23 nt, Human
uucagagaacaaaagacagcacc

SEQ ID NO: 93112 - RNA, 20 nt, Human
uuccaagguccuuggugagg

SEQ ID NO: 93113 - RNA, 20 nt, Human
uuccaagguccuuggugagg

SEQ ID NO: 93114 - RNA, 23 nt, Human
uuccugccguucccacggcgguu

SEQ ID NO: 93115 - RNA, 20 nt, Human
uucucagcuagaauguaccc

SEQ ID NO: 93116 - RNA, 20 nt, Human
uucucagcuagaauguaccc

SEQ ID NO: 93117 - RNA, 23 nt, Human
uugaauggauaaauuguugagca

SEQ ID NO: 93118 - RNA, 23 nt, Human
uugaauggauaaauuguugagca

SEQ ID NO: 93119 - RNA, 18 nt, Human
uugcggggggcgcccucc

SEQ ID NO: 93120 - RNA, 21 nt, Human
uuggugagguggcuuccagau

SEQ ID NO: 93121 - RNA, 21 nt, Human
uuggugagguggcuuccagau

SEQ ID NO: 93122 - RNA, 28 nt, Human
uuggugguccuaacucccacuaggcagc

SEQ ID NO: 93123 - RNA, 28 nt, Human
uuggugguccuaacucccacuaggcagc

SEQ ID NO: 93124 - RNA, 19 nt, Human
uugucauguaucccuuccu

SEQ ID NO: 93125 - RNA, 19 nt, Human
uuuccagacuggauccuga

SEQ ID NO: 93126 - RNA, 19 nt, Human
uuuccagacuggauccuga

SEQ ID NO: 93127 - RNA, 22 nt, Human
uuuccugaaauuaaaauccugg

SEQ ID NO: 93128 - RNA, 22 nt, Human
uuuccugaaauuaaaauccugg

SEQ ID NO: 93129 - RNA, 19 nt, Human
uuucuguuuuccagacugg

SEQ ID NO: 93130 - RNA, 19 nt, Human
uuucuguuuuccagacugg

SEQ ID NO: 93131 - RNA, 23 nt, Human
uuucuuguucuucuccugccuca

SEQ ID NO: 93132 - RNA, 25 nt, Human
aaaaaacaaaacaaaacaaaacaaa

SEQ ID NO: 93133 - RNA, 25 nt, Human
aaaaaacaaaacaaaacaaaacaaa

SEQ ID NO: 93134 - RNA, 21 nt, Human
aaaaagcaaauauaguuagcc

SEQ ID NO: 93135 - RNA, 24 nt, Human
aaaaagcaaauauaguuagccaag

SEQ ID NO: 93136 - RNA, 24 nt, Human
aaaaagcaaauauaguuagccaag

SEQ ID NO: 93137 - RNA, 25 nt, Human
aaaacaaaacaaacaaaauagcacc

SEQ ID NO: 93138 - RNA, 25 nt, Human
aaaacaaacaaaauagcaccaucaa

SEQ ID NO: 93139 - RNA, 24 nt, Human
aaaagcaauaagaaggcauaaagc

SEQ ID NO: 93140 - RNA, 24 nt, Human
aaaagcaauaagaaggcauaaagc

SEQ ID NO: 93141 - RNA, 23 nt, Human
aaaaggaggagaaccugugaaaa

SEQ ID NO: 93142 - RNA, 22 nt, Human
aaacaaaacaaaacaaaacaaa

SEQ ID NO: 93143 - RNA, 22 nt, Human
aaacaaaacaaaacaaaacaaa

SEQ ID NO: 93144 - RNA, 21 nt, Human
aaacaaaacaaaacaaacaaa

SEQ ID NO: 93145 - RNA, 21 nt, Human
aaacaaaacaaaacaaacaaa

SEQ ID NO: 93146 - RNA, 19 nt, Human
aaacaaacaaaauagcacc

SEQ ID NO: 93147 - RNA, 23 nt, Human
aaacaaacaaaauagcaccauca

SEQ ID NO: 93148 - RNA, 24 nt, Human
aaagugcugggauuauagacauga

SEQ ID NO: 93149 - RNA, 24 nt, Human
aaagugcugggauuauagacauga

SEQ ID NO: 93150 - RNA, 21 nt, Human
aaaugcauaaaaagaccccag

SEQ ID NO: 93151 - RNA, 21 nt, Human
aaaugcauaaaaagaccccag

SEQ ID NO: 93152 - RNA, 27 nt, Human
aacaaaacaaaacaaaacaaacaaaaa

SEQ ID NO: 93153 - RNA, 27 nt, Human
aacaaaacaaaacaaaacaaacaaaaa

SEQ ID NO: 93154 - RNA, 22 nt, Human
aacacaaaagauaaaaggagga

SEQ ID NO: 93155 - RNA, 19 nt, Human
aacacagugaaacccuguc

SEQ ID NO: 93156 - RNA, 19 nt, Human
aacacagugaaacccuguc

SEQ ID NO: 93157 - RNA, 20 nt, Human
aacacagugaaacccugucu

SEQ ID NO: 93158 - RNA, 20 nt, Human
aacacagugaaacccugucu

SEQ ID NO: 93159 - RNA, 21 nt, Human
aacacagugaaacccugucuc

SEQ ID NO: 93160 - RNA, 21 nt, Human
aacacagugaaacccugucuc

SEQ ID NO: 93161 - RNA, 22 nt, Human
aaccugugaaaacacuucccuc

SEQ ID NO: 93162 - RNA, 21 nt, Human
aagcaaauauaguuagccaag

SEQ ID NO: 93163 - RNA, 21 nt, Human
aagcaaauauaguuagccaag

SEQ ID NO: 93164 - RNA, 23 nt, Human
aagcaauaagaaggcauaaagca

SEQ ID NO: 93165 - RNA, 23 nt, Human
aagcaauaagaaggcauaaagca

SEQ ID NO: 93166 - RNA, 19 nt, Human
aagcagagaugaaagaggg

SEQ ID NO: 93167 - RNA, 22 nt, Human
aagcagagaugaaagaggggac

SEQ ID NO: 93168 - RNA, 22 nt, Human
aagcagagaugaaagaggggac

SEQ ID NO: 93169 - RNA, 19 nt, Human
aaggaggagaaccugugaa

SEQ ID NO: 93170 - RNA, 18 nt, Human
aagguucaagugaccaac

SEQ ID NO: 93171 - RNA, 21 nt, Human
aagugcugggauuauagacau

SEQ ID NO: 93172 - RNA, 21 nt, Human
aagugcugggauuauagacau

SEQ ID NO: 93173 - RNA, 26 nt, Human
aagugcugggauuauagacaugagcc

SEQ ID NO: 93174 - RNA, 26 nt, Human
aagugcugggauuauagacaugagcc

SEQ ID NO: 93175 - RNA, 18 nt, Human
aaucagaagggaagacaa

SEQ ID NO: 93176 - RNA, 23 nt, Human
aaugcaaaugcauaaaaagaccc

SEQ ID NO: 93177 - RNA, 23 nt, Human
aaugcaaaugcauaaaaagaccc

SEQ ID NO: 93178 - RNA, 25 nt, Human
acaaaacaaaacaaaacaaacaaaa

SEQ ID NO: 93179 - RNA, 25 nt, Human
acaaaacaaaacaaaacaaacaaaa

SEQ ID NO: 93180 - RNA, 27 nt, Human
acaaaacaaaacaaacaaaauagcacc

SEQ ID NO: 93181 - RNA, 27 nt, Human
acaaaacaaaacaaacaaaauagcacc

SEQ ID NO: 93182 - RNA, 18 nt, Human
acaaguuuuuuucuuagu

SEQ ID NO: 93183 - RNA, 23 nt, Human
acagagcgagauucugucucaaa

SEQ ID NO: 93184 - RNA, 24 nt, Human
acagagcgagauucugucucaaaa

SEQ ID NO: 93185 - RNA, 24 nt, Human
acagagcgagauucugucucaaaa

SEQ ID NO: 93186 - RNA, 22 nt, Human
accagugaacugagaugucagc

SEQ ID NO: 93187 - RNA, 18 nt, Human
acccugucucuacuaaaa

SEQ ID NO: 93188 - RNA, 18 nt, Human
acccugucucuacuaaaa

SEQ ID NO: 93189 - RNA, 23 nt, Human
accucuuggguucaagcaaaucc

SEQ ID NO: 93190 - RNA, 23 nt, Human
accucuuggguucaagcaaaucc

SEQ ID NO: 93191 - RNA, 21 nt, Human
acgccacugcacuccagccug

SEQ ID NO: 93192 - RNA, 22 nt, Human
acgccacugcacuccagccugg

SEQ ID NO: 93193 - RNA, 24 nt, Human
acgccacugcacuccagccugggc

SEQ ID NO: 93194 - RNA, 24 nt, Human
acgccacugcacuccagccugggc

SEQ ID NO: 93195 - RNA, 24 nt, Human
acugcacuccagccugggcgacag

SEQ ID NO: 93196 - RNA, 24 nt, Human
acugcacuccagccugggcgacag

SEQ ID NO: 93197 - RNA, 26 nt, Human
acugcacuccagccugggcgacagag

SEQ ID NO: 93198 - RNA, 26 nt, Human
acugcacuccagccugggcgacagag

SEQ ID NO: 93199 - RNA, 19 nt, Human
acugcagccuuggaccucu

SEQ ID NO: 93200 - RNA, 20 nt, Human
acugcagccuuggaccucuu

SEQ ID NO: 93201 - RNA, 20 nt, Human
acugcagccuuggaccucuu

SEQ ID NO: 93202 - RNA, 18 nt, Human
agaaggcauaaagcaagu

SEQ ID NO: 93203 - RNA, 18 nt, Human
agaaggcauaaagcaagu

SEQ ID NO: 93204 - RNA, 18 nt, Human
agacaagagcaaacgucu

SEQ ID NO: 93205 - RNA, 20 nt, Human
agcaaauccucccaccucaa

SEQ ID NO: 93206 - RNA, 20 nt, Human
agcaaauccucccaccucaa

SEQ ID NO: 93207 - RNA, 24 nt, Human
agcacuuugggaggccgagguggg

SEQ ID NO: 93208 - RNA, 24 nt, Human
agcacuuugggaggccgagguggg

SEQ ID NO: 93209 - RNA, 25 nt, Human
agccaagcauauauauaucauaaaa

SEQ ID NO: 93210 - RNA, 25 nt, Human
agccaagcauauauauaucauaaaa

SEQ ID NO: 93211 - RNA, 21 nt, Human
agccaggugugguggcgggcc

SEQ ID NO: 93212 - RNA, 21 nt, Human
agccaggugugguggcgggcc

SEQ ID NO: 93213 - RNA, 24 nt, Human
agccugggcgacagagcgagauuc

SEQ ID NO: 93214 - RNA, 24 nt, Human
agccugggcgacagagcgagauuc

SEQ ID NO: 93215 - RNA, 19 nt, Human
agcggugugaacauggcuc

SEQ ID NO: 93216 - RNA, 19 nt, Human
agcggugugaacauggcuc

SEQ ID NO: 93217 - RNA, 24 nt, Human
agcuuuuguucucucccuuuugau

SEQ ID NO: 93218 - RNA, 23 nt, Human
aggcaggaagcucagucugaaca

SEQ ID NO: 93219 - RNA, 19 nt, Human
aggcaggagaauauaaucc

SEQ ID NO: 93220 - RNA, 18 nt, Human
aggcaggagaauggccug

SEQ ID NO: 93221 - RNA, 24 nt, Human
aggcaggagaauggccugaacccg

SEQ ID NO: 93222 - RNA, 24 nt, Human
aggcaggagaauggcgugaacccg

SEQ ID NO: 93223 - RNA, 24 nt, Human
aggcaggagaauggcgugaacccg

SEQ ID NO: 93224 - RNA, 22 nt, Human
aggcaggcaggaagcucagucu

SEQ ID NO: 93225 - RNA, 21 nt, Human
aggccgagguggguggaucac

SEQ ID NO: 93226 - RNA, 21 nt, Human
aggccgagguggguggaucac

SEQ ID NO: 93227 - RNA, 24 nt, Human
aggcgcgguggcucacgccuguaa

SEQ ID NO: 93228 - RNA, 24 nt, Human
aggcgcgguggcucacgccuguaa

SEQ ID NO: 93229 - RNA, 24 nt, Human
aggcggagcuugcggugagccgag

SEQ ID NO: 93230 - RNA, 24 nt, Human
aggcggagcuugcggugagccgag

SEQ ID NO: 93231 - RNA, 20 nt, Human
aggcggccaaggcccaaccu

SEQ ID NO: 93232 - RNA, 18 nt, Human
aggcugaggcaggagaau

SEQ ID NO: 93233 - RNA, 19 nt, Human
aggcugaggcaggagaaug

SEQ ID NO: 93234 - RNA, 19 nt, Human
aggcugaggcaggagaaug

SEQ ID NO: 93235 - RNA, 24 nt, Human
agguggguggaucacgaggucagg

SEQ ID NO: 93236 - RNA, 24 nt, Human
agguggguggaucacgaggucagg

SEQ ID NO: 93237 - RNA, 22 nt, Human
agucucaacagguauaccuuuc

SEQ ID NO: 93238 - RNA, 21 nt, Human
agucuccgaguccccuaaccu

SEQ ID NO: 93239 - RNA, 23 nt, Human
agugcagcggugugaacauggcu

SEQ ID NO: 93240 - RNA, 23 nt, Human
agugcagcggugugaacauggcu

SEQ ID NO: 93241 - RNA, 24 nt, Human
agugcagcggugugaacauggcuc

SEQ ID NO: 93242 - RNA, 24 nt, Human
agugcagcggugugaacauggcuc

SEQ ID NO: 93243 - RNA, 24 nt, Human
agugcugggauuauagacaugagc

SEQ ID NO: 93244 - RNA, 24 nt, Human
agugcugggauuauagacaugagc

SEQ ID NO: 93245 - RNA, 21 nt, Human
auaauccaagcagagaugaaa

SEQ ID NO: 93246 - RNA, 21 nt, Human
auaauccaagcagagaugaaa

SEQ ID NO: 93247 - RNA, 24 nt, Human
aucacgccacugcacuccagccug

SEQ ID NO: 93248 - RNA, 24 nt, Human
aucacgccacugcacuccagccug

SEQ ID NO: 93249 - RNA, 21 nt, Human
auccaagcagagaugaaagag

SEQ ID NO: 93250 - RNA, 24 nt, Human
aucggccaggcgcgguggcucacg

SEQ ID NO: 93251 - RNA, 24 nt, Human
aucggccaggcgcgguggcucacg

SEQ ID NO: 93252 - RNA, 22 nt, Human
augcaaaugcauaaaaagaccc

SEQ ID NO: 93253 - RNA, 22 nt, Human
augcaaaugcauaaaaagaccc

SEQ ID NO: 93254 - RNA, 22 nt, Human
caaaaaaacaaaacaaaacaaa

SEQ ID NO: 93255 - RNA, 22 nt, Human
caaaaaaacaaaacaaaacaaa

SEQ ID NO: 93256 - RNA, 27 nt, Human
caaaaaaacaaaacaaaacaaaacaaa

SEQ ID NO: 93257 - RNA, 23 nt, Human
caaaaagcaaauauaguuagcca

SEQ ID NO: 93258 - RNA, 23 nt, Human
caaaaagcaaauauaguuagcca

SEQ ID NO: 93259 - RNA, 21 nt, Human
caaaacaaaacaaaacaaaca

SEQ ID NO: 93260 - RNA, 21 nt, Human
caaaacaaaacaaaacaaaca

SEQ ID NO: 93261 - RNA, 24 nt, Human
caaaacaaaacaaaacaaacaaaa

SEQ ID NO: 93262 - RNA, 24 nt, Human
caaaacaaaacaaaacaaacaaaa

SEQ ID NO: 93263 - RNA, 21 nt, Human
caaaacaaacaaaauagcacc

SEQ ID NO: 93264 - RNA, 21 nt, Human
caaaacaaacaaaauagcacc

SEQ ID NO: 93265 - RNA, 24 nt, Human
caaagugcugggauuauagacaug

SEQ ID NO: 93266 - RNA, 24 nt, Human
caaagugcugggauuauagacaug

SEQ ID NO: 93267 - RNA, 20 nt, Human
caacucaagggcucaggcgg

SEQ ID NO: 93268 - RNA, 22 nt, Human
caaguguguuccauuccugucc

SEQ ID NO: 93269 - RNA, 20 nt, Human
cacaguuauucacaguggcc

SEQ ID NO: 93270 - RNA, 19 nt, Human
caccagcuaaaaacauucc

SEQ ID NO: 93271 - RNA, 19 nt, Human
caccagcuaaaaacauucc

SEQ ID NO: 93272 - RNA, 24 nt, Human
caccucaaccucccaaagugcugg

SEQ ID NO: 93273 - RNA, 24 nt, Human
caccucaaccucccaaagugcugg

SEQ ID NO: 93274 - RNA, 24 nt, Human
cacgccuguaaucccagcacuuug

SEQ ID NO: 93275 - RNA, 24 nt, Human
cacgccuguaaucccagcacuuug

SEQ ID NO: 93276 - RNA, 23 nt, Human
cacuccagccugggcgacagagc

SEQ ID NO: 93277 - RNA, 23 nt, Human
cacuccagccugggcgacagagc

SEQ ID NO: 93278 - RNA, 24 nt, Human
cacuccagccugggcgacagagcg

SEQ ID NO: 93279 - RNA, 24 nt, Human
cacuccagccugggcgacagagcg

SEQ ID NO: 93280 - RNA, 19 nt, Human
cacugcacuccagccuggg

SEQ ID NO: 93281 - RNA, 19 nt, Human
cacugcacuccagccuggg

SEQ ID NO: 93282 - RNA, 20 nt, Human
cacugcacuccagccugggc

SEQ ID NO: 93283 - RNA, 20 nt, Human
cacugcacuccagccugggc

SEQ ID NO: 93284 - RNA, 20 nt, Human
cacugcacuccagccugggc

SEQ ID NO: 93285 - RNA, 21 nt, Human
cacugcacuccagccugggcg

SEQ ID NO: 93286 - RNA, 22 nt, Human
cacugcacuccagccugggcga

SEQ ID NO: 93287 - RNA, 22 nt, Human
cacugcacuccagccugggcga

SEQ ID NO: 93288 - RNA, 23 nt, Human
cacugcacuccagccugggcgac

SEQ ID NO: 93289 - RNA, 24 nt, Human
cacugcacuccagccugggcgaca

SEQ ID NO: 93290 - RNA, 24 nt, Human
cacugcacuccagccugggcgaca

SEQ ID NO: 93291 - RNA, 24 nt, Human
cagcacuuugggaggccgaggugg

SEQ ID NO: 93292 - RNA, 24 nt, Human
cagcacuuugggaggccgaggugg

SEQ ID NO: 93293 - RNA, 24 nt, Human
cagcuacucgggaggcugaggcag

SEQ ID NO: 93294 - RNA, 24 nt, Human
cagcuacucgggaggcugaggcag

SEQ ID NO: 93295 - RNA, 19 nt, Human
caggcagccaccagucacc

SEQ ID NO: 93296 - RNA, 18 nt, Human
caggccuauccacuacca

SEQ ID NO: 93297 - RNA, 22 nt, Human
cagucuccgaguccccuaaccu

SEQ ID NO: 93298 - RNA, 23 nt, Human
cauaaaagcaauaagaaggcaua

SEQ ID NO: 93299 - RNA, 23 nt, Human
cauaaaagcaauaagaaggcaua

SEQ ID NO: 93300 - RNA, 18 nt, Human
cauaagagaaaggagaca

SEQ ID NO: 93301 - RNA, 18 nt, Human
caucgcagucuccgaguc

SEQ ID NO: 93302 - RNA, 19 nt, Human
caucuaagacaagagcaaa

SEQ ID NO: 93303 - RNA, 21 nt, Human
caucuguuuccccauguuuuu

SEQ ID NO: 93304 - RNA, 18 nt, Human
cauggccucacuuccugu

SEQ ID NO: 93305 - RNA, 20 nt, Human
cauggcucacugcagccuug

SEQ ID NO: 93306 - RNA, 20 nt, Human
cauggcucacugcagccuug

SEQ ID NO: 93307 - RNA, 18 nt, Human
ccaaagugcugggauuau

SEQ ID NO: 93308 - RNA, 18 nt, Human
ccaaagugcugggauuau

SEQ ID NO: 93309 - RNA, 24 nt, Human
ccaaagugcugggauuauagacau

SEQ ID NO: 93310 - RNA, 24 nt, Human
ccaaagugcugggauuauagacau

SEQ ID NO: 93311 - RNA, 20 nt, Human
ccaagcagagaugaaagagc

SEQ ID NO: 93312 - RNA, 20 nt, Human
ccaagcagagaugaaagagc

SEQ ID NO: 93313 - RNA, 20 nt, Human
ccacugcacuccagccuggg

SEQ ID NO: 93314 - RNA, 20 nt, Human
ccacugcacuccagccuggg

SEQ ID NO: 93315 - RNA, 20 nt, Human
ccacugcacuccagccuggg

SEQ ID NO: 93316 - RNA, 20 nt, Human
ccacugcacuccagccuggg

SEQ ID NO: 93317 - RNA, 21 nt, Human
ccacugcacuccagccugggc

SEQ ID NO: 93318 - RNA, 21 nt, Human
ccacugcacuccagccugggc

SEQ ID NO: 93319 - RNA, 21 nt, Human
ccacugcacuccagccugggc

SEQ ID NO: 93320 - RNA, 21 nt, Human
ccacugcacuccagccugggc

SEQ ID NO: 93321 - RNA, 23 nt, Human
ccacugcacuccagccugggcga

SEQ ID NO: 93322 - RNA, 23 nt, Human
ccacugcacuccagccugggcga

SEQ ID NO: 93323 - RNA, 23 nt, Human
ccacugcacuccagccugggcga

SEQ ID NO: 93324 - RNA, 24 nt, Human
ccacugcacuccagccugggcgac

SEQ ID NO: 93325 - RNA, 24 nt, Human
ccacugcacuccagccugggcgac

SEQ ID NO: 93326 - RNA, 23 nt, Human
ccagcuaaaaacauucccaaagc

SEQ ID NO: 93327 - RNA, 23 nt, Human
ccagcuaaaaacauucccaaagc

SEQ ID NO: 93328 - RNA, 23 nt, Human
ccagcuaaaaacauucucaaacc

SEQ ID NO: 93329 - RNA, 27 nt, Human
ccagcuaaaaacauucucaaacccugc

SEQ ID NO: 93330 - RNA, 24 nt, Human
cccaaccucacgugcccagaaagu

SEQ ID NO: 93331 - RNA, 19 nt, Human
cccaagguucaagugacca

SEQ ID NO: 93332 - RNA, 23 nt, Human
cccauguuuuucuugucauccuu

SEQ ID NO: 93333 - RNA, 23 nt, Human
ccccuguagucccagcuacucgg

SEQ ID NO: 93334 - RNA, 23 nt, Human
ccccuguagucccagcuacucgg

SEQ ID NO: 93335 - RNA, 24 nt, Human
ccccuguagucccagcuacucggg

SEQ ID NO: 93336 - RNA, 24 nt, Human
ccccuguagucccagcuacucggg

SEQ ID NO: 93337 - RNA, 23 nt, Human
cccuggcucuucugccucccucc

SEQ ID NO: 93338 - RNA, 20 nt, Human
cccuguagucccagcuacuc

SEQ ID NO: 93339 - RNA, 20 nt, Human
cccuguagucccagcuacuc

SEQ ID NO: 93340 - RNA, 24 nt, Human
ccuauccacuaccaucugagcauc

SEQ ID NO: 93341 - RNA, 22 nt, Human
ccucccaccucaaccucccaaa

SEQ ID NO: 93342 - RNA, 22 nt, Human
ccucccaccucaaccucccaaa

SEQ ID NO: 93343 - RNA, 26 nt, Human
ccucccaccucaaccucccaaagugc

SEQ ID NO: 93344 - RNA, 22 nt, Human
ccucccuccauggccucacuuc

SEQ ID NO: 93345 - RNA, 22 nt, Human
ccuggcuaacacagugaaaccc

SEQ ID NO: 93346 - RNA, 22 nt, Human
ccuggcuaacacagugaaaccc

SEQ ID NO: 93347 - RNA, 24 nt, Human
ccuggcuaacacagugaaacccug

SEQ ID NO: 93348 - RNA, 24 nt, Human
ccuggcuaacacagugaaacccug

SEQ ID NO: 93349 - RNA, 22 nt, Human
ccugggcgacagagcgagauuc

SEQ ID NO: 93350 - RNA, 22 nt, Human
ccugggcgacagagcgagauuc

SEQ ID NO: 93351 - RNA, 22 nt, Human
ccuguaaucccagcacuuuggg

SEQ ID NO: 93352 - RNA, 19 nt, Human
ccuguagucccagcuacuc

SEQ ID NO: 93353 - RNA, 21 nt, Human
ccuguagucccagcuacucgg

SEQ ID NO: 93354 - RNA, 21 nt, Human
ccuguagucccagcuacucgg

SEQ ID NO: 93355 - RNA, 22 nt, Human
ccuguagucccagcuacucggg

SEQ ID NO: 93356 - RNA, 22 nt, Human
ccuguagucccagcuacucggg

SEQ ID NO: 93357 - RNA, 23 nt, Human
cgaaggcccaagagcaaaacccu

SEQ ID NO: 93358 - RNA, 24 nt, Human
cgagaucacgccacugcacuccag

SEQ ID NO: 93359 - RNA, 24 nt, Human
cgagaucacgccacugcacuccag

SEQ ID NO: 93360 - RNA, 24 nt, Human
cgagguggguggaucacgagguca

SEQ ID NO: 93361 - RNA, 26 nt, Human
cgccacugcacuccagccugggcgac

SEQ ID NO: 93362 - RNA, 26 nt, Human
cgccacugcacuccagccugggcgac

SEQ ID NO: 93363 - RNA, 23 nt, Human
cgccuguaaucccagcacuuugg

SEQ ID NO: 93364 - RNA, 24 nt, Human
cgccuguaaucccagcacuuuggg

SEQ ID NO: 93365 - RNA, 24 nt, Human
cgccuguaaucccagcacuuuggg

SEQ ID NO: 93366 - RNA, 27 nt, Human
cgcuccacccuuuccuggcaccaucgc

SEQ ID NO: 93367 - RNA, 24 nt, Human
cggccaggcgcgguggcucacgcc

SEQ ID NO: 93368 - RNA, 24 nt, Human
cggccaggcgcgguggcucacgcc

SEQ ID NO: 93369 - RNA, 24 nt, Human
cgucacaggccuauccacuaccau

SEQ ID NO: 93370 - RNA, 20 nt, Human
cucacgaugguagcaccuuc

SEQ ID NO: 93371 - RNA, 22 nt, Human
cucacgccuguaaucccagcac

SEQ ID NO: 93372 - RNA, 22 nt, Human
cucacgccuguaaucccagcac

SEQ ID NO: 93373 - RNA, 24 nt, Human
cucacgccuguaaucccagcacuu

SEQ ID NO: 93374 - RNA, 24 nt, Human
cucacgccuguaaucccagcacuu

SEQ ID NO: 93375 - RNA, 21 nt, Human
cucacugcagccuuggaccuc

SEQ ID NO: 93376 - RNA, 21 nt, Human
cucacugcagccuuggaccuc

SEQ ID NO: 93377 - RNA, 25 nt, Human
cucacugcagccuuggaccucuugg

SEQ ID NO: 93378 - RNA, 25 nt, Human
cucacugcagccuuggaccucuugg

SEQ ID NO: 93379 - RNA, 20 nt, Human
cucaggcggccaaggcccaa

SEQ ID NO: 93380 - RNA, 21 nt, Human
cuccagaaaugcuaauucucu

SEQ ID NO: 93381 - RNA, 21 nt, Human
cucccaccucaaccucccaaa

SEQ ID NO: 93382 - RNA, 21 nt, Human
cucccuccauggccucacuuc

SEQ ID NO: 93383 - RNA, 20 nt, Human
cucugucacccaagcuugag

SEQ ID NO: 93384 - RNA, 18 nt, Human
cugcaggguuucgguagg

SEQ ID NO: 93385 - RNA, 18 nt, Human
cuggcuaacacagugaaa

SEQ ID NO: 93386 - RNA, 18 nt, Human
cuggcuaacacagugaaa

SEQ ID NO: 93387 - RNA, 24 nt, Human
cuggcuaacacagugaaacccugu

SEQ ID NO: 93388 - RNA, 24 nt, Human
cuggcuaacacagugaaacccugu

SEQ ID NO: 93389 - RNA, 21 nt, Human
cugucucaaaaaaacaaaaca

SEQ ID NO: 93390 - RNA, 21 nt, Human
cugucucaaaaaaacaaaaca

SEQ ID NO: 93391 - RNA, 19 nt, Human
cuugcggugagccgagauc

SEQ ID NO: 93392 - RNA, 19 nt, Human
cuuguaaaaaucauuugaa

SEQ ID NO: 93393 - RNA, 19 nt, Human
cuuguaaaaaucauuugaa

SEQ ID NO: 93394 - RNA, 18 nt, Human
gaaaaaaaacacaaaaga

SEQ ID NO: 93395 - RNA, 26 nt, Human
gaaaaaaaacacaaaagauaaaagga

SEQ ID NO: 93396 - RNA, 19 nt, Human
gaaacccugucucuacuaa

SEQ ID NO: 93397 - RNA, 19 nt, Human
gaacauggcucacugcagc

SEQ ID NO: 93398 - RNA, 19 nt, Human
gaacauggcucacugcagc

SEQ ID NO: 93399 - RNA, 24 nt, Human
gacagagcgagauucugucucaaa

SEQ ID NO: 93400 - RNA, 24 nt, Human
gacagagcgagauucugucucaaa

SEQ ID NO: 93401 - RNA, 22 nt, Human
gacgcacccaggggcugcucag

SEQ ID NO: 93402 - RNA, 23 nt, Human
gagaucacgccacugcacuccag

SEQ ID NO: 93403 - RNA, 30 nt, Human
gagcaucuaagacaagagcaaacgucuaaa

SEQ ID NO: 93404 - RNA, 18 nt, Human
gagcuugcggugagccga

SEQ ID NO: 93405 - RNA, 18 nt, Human
gagcuugcggugagccga

SEQ ID NO: 93406 - RNA, 23 nt, Human
gagguggguggaucacgagguca

SEQ ID NO: 93407 - RNA, 23 nt, Human
gagguggguggaucacgagguca

SEQ ID NO: 93408 - RNA, 18 nt, Human
gauuauagacaugagcca

SEQ ID NO: 93409 - RNA, 18 nt, Human
gauuauagacaugagcca

SEQ ID NO: 93410 - RNA, 21 nt, Human
gauuauagacaugagccacca

SEQ ID NO: 93411 - RNA, 21 nt, Human
gauuauagacaugagccacca

SEQ ID NO: 93412 - RNA, 24 nt, Human
gauuauagacaugagccaccauac

SEQ ID NO: 93413 - RNA, 24 nt, Human
gauuauagacaugagccaccauac

SEQ ID NO: 93414 - RNA, 20 nt, Human
gcaaaugcauaaaaagaccc

SEQ ID NO: 93415 - RNA, 20 nt, Human
gcaaaugcauaaaaagaccc

SEQ ID NO: 93416 - RNA, 21 nt, Human
gcaagggaagggcacuucaaa

SEQ ID NO: 93417 - RNA, 24 nt, Human
gcacuccagccugggcgacagagc

SEQ ID NO: 93418 - RNA, 24 nt, Human
gcacuccagccugggcgacagagc

SEQ ID NO: 93419 - RNA, 24 nt, Human
gcagaaagucagccucauccggga

SEQ ID NO: 93420 - RNA, 22 nt, Human
gccacugcacuccagccugggc

SEQ ID NO: 93421 - RNA, 22 nt, Human
gccacugcacuccagccugggc

SEQ ID NO: 93422 - RNA, 24 nt, Human
gccacugcacuccagccugggcga

SEQ ID NO: 93423 - RNA, 24 nt, Human
gccacugcacuccagccugggcga

SEQ ID NO: 93424 - RNA, 20 nt, Human
gccgagaucacgccacugca

SEQ ID NO: 93425 - RNA, 20 nt, Human
gccgagaucacgccacugca

SEQ ID NO: 93426 - RNA, 24 nt, Human
gcgacagagcgagauucugucuca

SEQ ID NO: 93427 - RNA, 24 nt, Human
gcgacagagcgagauucugucuca

SEQ ID NO: 93428 - RNA, 19 nt, Human
gcgggguacaggcaggcag

SEQ ID NO: 93429 - RNA, 22 nt, Human
gcuaaaaacauucucaaacccu

SEQ ID NO: 93430 - RNA, 24 nt, Human
gcuaacacagugaaacccugucuc

SEQ ID NO: 93431 - RNA, 24 nt, Human
gcuaacacagugaaacccugucuc

SEQ ID NO: 93432 - RNA, 22 nt, Human
gcucacugcagccuuggaccuc

SEQ ID NO: 93433 - RNA, 22 nt, Human
gcucacugcagccuuggaccuc

SEQ ID NO: 93434 - RNA, 20 nt, Human
gcucugucacccaagcuuga

SEQ ID NO: 93435 - RNA, 20 nt, Human
gcucugucacccaagcuuga

SEQ ID NO: 93436 - RNA, 22 nt, Human
gcugaggcaggagaauggcgug

SEQ ID NO: 93437 - RNA, 22 nt, Human
gcugaggcaggagaauggcgug

SEQ ID NO: 93438 - RNA, 18 nt, Human
ggaaaaaagauacuuaaa

SEQ ID NO: 93439 - RNA, 18 nt, Human
ggaaaaaagauacuuaaa

SEQ ID NO: 93440 - RNA, 22 nt, Human
ggagagcuuauuuaaaacuugu

SEQ ID NO: 93441 - RNA, 22 nt, Human
ggagagcuuauuuaaaacuugu

SEQ ID NO: 93442 - RNA, 18 nt, Human
ggagcuugcggugagccg

SEQ ID NO: 93443 - RNA, 18 nt, Human
ggagcuugcggugagccg

SEQ ID NO: 93444 - RNA, 24 nt, Human
ggagcuugcggugagccgagauca

SEQ ID NO: 93445 - RNA, 24 nt, Human
ggagcuugcggugagccgagauca

SEQ ID NO: 93446 - RNA, 19 nt, Human
ggauuauagacaugagcca

SEQ ID NO: 93447 - RNA, 19 nt, Human
ggauuauagacaugagcca

SEQ ID NO: 93448 - RNA, 21 nt, Human
ggccaggcgcgguggcucacg

SEQ ID NO: 93449 - RNA, 23 nt, Human
ggccaggcgcgguggcucacgcc

SEQ ID NO: 93450 - RNA, 22 nt, Human
ggggacggggucuugcucuguc

SEQ ID NO: 93451 - RNA, 22 nt, Human
ggggacggggucuugcucuguc

SEQ ID NO: 93452 - RNA, 24 nt, Human
ggguggaucacgaggucaggagau

SEQ ID NO: 93453 - RNA, 21 nt, Human
gguggaucacgaggucaggag

SEQ ID NO: 93454 - RNA, 21 nt, Human
gguggaucacgaggucaggag

SEQ ID NO: 93455 - RNA, 23 nt, Human
gguggcucacgccuguaauccca

SEQ ID NO: 93456 - RNA, 23 nt, Human
gguggcucacgccuguaauccca

SEQ ID NO: 93457 - RNA, 24 nt, Human
gguggcucacgccuguaaucccag

SEQ ID NO: 93458 - RNA, 24 nt, Human
gguggcucacgccuguaaucccag

SEQ ID NO: 93459 - RNA, 18 nt, Human
gucaccuucuucugaagc

SEQ ID NO: 93460 - RNA, 21 nt, Human
gugaaacccugucucuacuaa

SEQ ID NO: 93461 - RNA, 21 nt, Human
gugaaacccugucucuacuaa

SEQ ID NO: 93462 - RNA, 18 nt, Human
uaaaaagaccccagagca

SEQ ID NO: 93463 - RNA, 18 nt, Human
uaaaaagaccccagagca

SEQ ID NO: 93464 - RNA, 24 nt, Human
uaaaaggaggagaaccugugaaaa

SEQ ID NO: 93465 - RNA, 25 nt, Human
uaaaauaauccaagcagagaugaaa

SEQ ID NO: 93466 - RNA, 21 nt, Human
uaacacagugaaacccugucu

SEQ ID NO: 93467 - RNA, 21 nt, Human
uaacacagugaaacccugucu

SEQ ID NO: 93468 - RNA, 22 nt, Human
uaacacagugaaacccugucuc

SEQ ID NO: 93469 - RNA, 22 nt, Human
uaacacagugaaacccugucuc

SEQ ID NO: 93470 - RNA, 24 nt, Human
uaacacagugaaacccugucucua

SEQ ID NO: 93471 - RNA, 24 nt, Human
uaacacagugaaacccugucucua

SEQ ID NO: 93472 - RNA, 22 nt, Human
uacugugguccaugaguuggua

SEQ ID NO: 93473 - RNA, 19 nt, Human
uagaauauuaacagugggc

SEQ ID NO: 93474 - RNA, 21 nt, Human
uaggaaacacaguuauucaca

SEQ ID NO: 93475 - RNA, 19 nt, Human
uaucaucgccucgaggaca

SEQ ID NO: 93476 - RNA, 18 nt, Human
ucacgaggucaggagauc

SEQ ID NO: 93477 - RNA, 18 nt, Human
ucacgaggucaggagauc

SEQ ID NO: 93478 - RNA, 24 nt, Human
ucacgaggucaggagaucaagacc

SEQ ID NO: 93479 - RNA, 24 nt, Human
ucacgaggucaggagaucaagacc

SEQ ID NO: 93480 - RNA, 23 nt, Human
ucacgccacugcacuccagccug

SEQ ID NO: 93481 - RNA, 23 nt, Human
ucacgccacugcacuccagccug

SEQ ID NO: 93482 - RNA, 24 nt, Human
ucacugcagccuuggaccucuugg

SEQ ID NO: 93483 - RNA, 25 nt, Human
ucacugcagccuuggaccucuuggg

SEQ ID NO: 93484 - RNA, 25 nt, Human
ucacugcagccuuggaccucuuggg

SEQ ID NO: 93485 - RNA, 20 nt, Human
ucauccgggauauaucucgu

SEQ ID NO: 93486 - RNA, 23 nt, Human
uccagccugggcgacagagcgag

SEQ ID NO: 93487 - RNA, 23 nt, Human
uccagccugggcgacagagcgag

SEQ ID NO: 93488 - RNA, 24 nt, Human
uccagccugggcgacagagcgaga

SEQ ID NO: 93489 - RNA, 24 nt, Human
uccagccugggcgacagagcgaga

SEQ ID NO: 93490 - RNA, 26 nt, Human
uccauuuucuugaaacauggcccuuu

SEQ ID NO: 93491 - RNA, 20 nt, Human
ucccaaagccuuaagcauaa

SEQ ID NO: 93492 - RNA, 18 nt, Human
ucccaaagugcugggauu

SEQ ID NO: 93493 - RNA, 18 nt, Human
ucccaaagugcugggauu

SEQ ID NO: 93494 - RNA, 24 nt, Human
ucccaaagugcugggauuauagac

SEQ ID NO: 93495 - RNA, 24 nt, Human
ucccaaagugcugggauuauagac

SEQ ID NO: 93496 - RNA, 22 nt, Human
uccccagcagaaagucagccuc

SEQ ID NO: 93497 - RNA, 19 nt, Human
uccccuaaccugccuaacu

SEQ ID NO: 93498 - RNA, 21 nt, Human
uccccuaaccugccuaacucc

SEQ ID NO: 93499 - RNA, 27 nt, Human
uccucccaccucaaccucccaaagugc

SEQ ID NO: 93500 - RNA, 27 nt, Human
uccucccaccucaaccucccaaagugc

SEQ ID NO: 93501 - RNA, 23 nt, Human
ucuaagacaagagcaaacgucua

SEQ ID NO: 93502 - RNA, 23 nt, Human
ucucacgaugguagcaccuucgu

SEQ ID NO: 93503 - RNA, 18 nt, Human
ucugaaucauaagcccuc

SEQ ID NO: 93504 - RNA, 18 nt, Human
ucugaaucauaagcccuc

SEQ ID NO: 93505 - RNA, 25 nt, Human
ucugcaggcuucuaauauuuauugc

SEQ ID NO: 93506 - RNA, 19 nt, Human
ucugcaggguuucgguagg

SEQ ID NO: 93507 - RNA, 24 nt, Human
ucugucacccaagcuugagugcag

SEQ ID NO: 93508 - RNA, 24 nt, Human
ucugucacccaagcuugagugcag

SEQ ID NO: 93509 - RNA, 18 nt, Human
ucuugcucugucacccaa

SEQ ID NO: 93510 - RNA, 18 nt, Human
ucuugcucugucacccaa

SEQ ID NO: 93511 - RNA, 24 nt, Human
ucuugcucugucacccaagcuuga

SEQ ID NO: 93512 - RNA, 24 nt, Human
ucuugcucugucacccaagcuuga

SEQ ID NO: 93513 - RNA, 24 nt, Human
ucuugcucugucacccaagcuuga

SEQ ID NO: 93514 - RNA, 25 nt, Human
ucuugcucugucacccaagcuugag

SEQ ID NO: 93515 - RNA, 25 nt, Human
ucuugcucugucacccaagcuugag

SEQ ID NO: 93516 - RNA, 27 nt, Human
ugaaaaaaaacacaaaagauaaaagga

SEQ ID NO: 93517 - RNA, 19 nt, Human
ugaaaacacuucccucccc

SEQ ID NO: 93518 - RNA, 18 nt, Human
ugaaacauggcccuuuug

SEQ ID NO: 93519 - RNA, 22 nt, Human
ugaaagagcaaaugcaaaugca

SEQ ID NO: 93520 - RNA, 22 nt, Human
ugaaagagcaaaugcaaaugca

SEQ ID NO: 93521 - RNA, 22 nt, Human
ugagccgagaucacgccacugc

SEQ ID NO: 93522 - RNA, 22 nt, Human
ugagccgagaucacgccacugc

SEQ ID NO: 93523 - RNA, 20 nt, Human
ugaggcaggagaauggccug

SEQ ID NO: 93524 - RNA, 24 nt, Human
ugaggcaggagaauggccugaacc

SEQ ID NO: 93525 - RNA, 25 nt, Human
ugaggcaggagaauggccugaaccc

SEQ ID NO: 93526 - RNA, 23 nt, Human
ugaggcaggagaauggcgugaac

SEQ ID NO: 93527 - RNA, 23 nt, Human
ugaggcaggagaauggcgugaac

SEQ ID NO: 93528 - RNA, 24 nt, Human
ugaggcaggagaauggcgugaacc

SEQ ID NO: 93529 - RNA, 24 nt, Human
ugaggcaggagaauggcgugaacc

SEQ ID NO: 93530 - RNA, 25 nt, Human
ugaggcaggagaauggcgugaaccc

SEQ ID NO: 93531 - RNA, 25 nt, Human
ugaggcaggagaauggcgugaaccc

SEQ ID NO: 93532 - RNA, 21 nt, Human
ugaggugaugauaaauccauu

SEQ ID NO: 93533 - RNA, 18 nt, Human
ugcauaaaaagaccccag

SEQ ID NO: 93534 - RNA, 28 nt, Human
ugccaccagcuaaaaacauucccaaagc

SEQ ID NO: 93535 - RNA, 28 nt, Human
ugccaccagcuaaaaacauucccaaagc

SEQ ID NO: 93536 - RNA, 21 nt, Human
ugcucagacagcagaugcucc

SEQ ID NO: 93537 - RNA, 24 nt, Human
ugcucugucacccaagcuugagug

SEQ ID NO: 93538 - RNA, 24 nt, Human
ugcucugucacccaagcuugagug

SEQ ID NO: 93539 - RNA, 20 nt, Human
uggaaaaaagauacuuaaau

SEQ ID NO: 93540 - RNA, 21 nt, Human
uggcgggguacaggcaggcag

SEQ ID NO: 93541 - RNA, 22 nt, Human
uggcucacgccuguaaucccag

SEQ ID NO: 93542 - RNA, 22 nt, Human
uggcucacgccuguaaucccag

SEQ ID NO: 93543 - RNA, 24 nt, Human
uggcucacgccuguaaucccagca

SEQ ID NO: 93544 - RNA, 24 nt, Human
uggcucacgccuguaaucccagca

SEQ ID NO: 93545 - RNA, 25 nt, Human
uggcucacugcagccuuggaccucu

SEQ ID NO: 93546 - RNA, 25 nt, Human
uggcucacugcagccuuggaccucu

SEQ ID NO: 93547 - RNA, 19 nt, Human
uggcucuucugccucccuc

SEQ ID NO: 93548 - RNA, 23 nt, Human
ugggaggccgagguggguggauc

SEQ ID NO: 93549 - RNA, 23 nt, Human
ugggaggccgagguggguggauc

SEQ ID NO: 93550 - RNA, 24 nt, Human
ugggaggccgagguggguggauca

SEQ ID NO: 93551 - RNA, 24 nt, Human
ugggaggccgagguggguggauca

SEQ ID NO: 93552 - RNA, 18 nt, Human
ugggauuauagacaugag

SEQ ID NO: 93553 - RNA, 18 nt, Human
ugggauuauagacaugag

SEQ ID NO: 93554 - RNA, 22 nt, Human
ugggauuauagacaugagccac

SEQ ID NO: 93555 - RNA, 22 nt, Human
ugggauuauagacaugagccac

SEQ ID NO: 93556 - RNA, 24 nt, Human
ugggauuauagacaugagccacca

SEQ ID NO: 93557 - RNA, 24 nt, Human
ugggauuauagacaugagccacca

SEQ ID NO: 93558 - RNA, 18 nt, Human
uggggcuugaucucaaaa

SEQ ID NO: 93559 - RNA, 21 nt, Human
ugggggccuccuguccaucag

SEQ ID NO: 93560 - RNA, 22 nt, Human
uggguucaagcaaauccuccca

SEQ ID NO: 93561 - RNA, 22 nt, Human
uggguucaagcaaauccuccca

SEQ ID NO: 93562 - RNA, 23 nt, Human
ugguaguguggaauuuagcuuug

SEQ ID NO: 93563 - RNA, 23 nt, Human
ugguaguguggaauuuagcuuug

SEQ ID NO: 93564 - RNA, 23 nt, Human
ugguggcgggccccuguaguccc

SEQ ID NO: 93565 - RNA, 23 nt, Human
ugguggcgggccccuguaguccc

SEQ ID NO: 93566 - RNA, 24 nt, Human
ugguggcgggccccuguaguccca

SEQ ID NO: 93567 - RNA, 24 nt, Human
ugguggcgggccccuguaguccca

SEQ ID NO: 93568 - RNA, 21 nt, Human
ugucacccaagcuugagugca

SEQ ID NO: 93569 - RNA, 19 nt, Human
ugugaaaacacuucccucc

SEQ ID NO: 93570 - RNA, 19 nt, Human
ugugaacauggcucacugc

SEQ ID NO: 93571 - RNA, 19 nt, Human
ugugaacauggcucacugc

SEQ ID NO: 93572 - RNA, 23 nt, Human
ugugguggcgggccccuguaguc

SEQ ID NO: 93573 - RNA, 23 nt, Human
ugugguggcgggccccuguaguc

SEQ ID NO: 93574 - RNA, 26 nt, Human
uuaaaaaauguuuuggaaaaaagaua

SEQ ID NO: 93575 - RNA, 26 nt, Human
uuaaaaaauguuuuggaaaaaagaua

SEQ ID NO: 93576 - RNA, 23 nt, Human
uuaaaaguuuucaaacaaauuug

SEQ ID NO: 93577 - RNA, 23 nt, Human
uuaaaaguuuucaaacaaauuug

SEQ ID NO: 93578 - RNA, 25 nt, Human
uucaagcaaauccucccaccucaac

SEQ ID NO: 93579 - RNA, 25 nt, Human
uucaagcaaauccucccaccucaac

SEQ ID NO: 93580 - RNA, 23 nt, Human
uucagcagggcuugaaaaaaaac

SEQ ID NO: 93581 - RNA, 21 nt, Human
uucccaagguucaagugacca

SEQ ID NO: 93582 - RNA, 21 nt, Human
uugaauuuuuaaaagauuuca

SEQ ID NO: 93583 - RNA, 24 nt, Human
uugauuuaaaaaaaaauaggcaua

SEQ ID NO: 93584 - RNA, 18 nt, Human
uugcggugagccgagauc

SEQ ID NO: 93585 - RNA, 18 nt, Human
uugcggugagccgagauc

SEQ ID NO: 93586 - RNA, 20 nt, Human
uugcggugagccgagaucac

SEQ ID NO: 93587 - RNA, 20 nt, Human
uugcggugagccgagaucac

SEQ ID NO: 93588 - RNA, 21 nt, Human
uugcggugagccgagaucacg

SEQ ID NO: 93589 - RNA, 21 nt, Human
uugcggugagccgagaucacg

SEQ ID NO: 93590 - RNA, 25 nt, Human
uugggaggccgagguggguggauca

SEQ ID NO: 93591 - RNA, 25 nt, Human
uugggaggccgagguggguggauca

SEQ ID NO: 93592 - RNA, 22 nt, Human
uugguagauuuucaaaaucuca

SEQ ID NO: 93593 - RNA, 22 nt, Human
uuugaauuuuuaaaagauuuca

SEQ ID NO: 93594 - RNA, 27 nt, Human
uuuuuggggacggggucuugcucuguc

SEQ ID NO: 93595 - RNA, 27 nt, Human
uuuuuggggacggggucuugcucuguc

SEQ ID NO: 93596 - RNA, 19 nt, Human
uuuuuuuuuuuuuuuuuaa

SEQ ID NO: 93597 - RNA, 19 nt, Human
uuuuuuuuuuuuuuuuuaa

SEQ ID NO: 93598 - RNA, 25 nt, Human
uuuuuuuuuuuuuuuuuuuuuaagg

SEQ ID NO: 93599 - RNA, 25 nt, Human
aauaaaaaauggaugaacaauugaa

SEQ ID NO: 93600 - RNA, 21 nt, Human
acacauacauacauauacaca

SEQ ID NO: 93601 - RNA, 24 nt, Human
accaaaaacagauaagcaaaucag

SEQ ID NO: 93602 - RNA, 20 nt, Human
agccucuuccuuagcagucc

SEQ ID NO: 93603 - RNA, 33 nt, Human
auacagaaacacacauacauacauauacacagu

SEQ ID NO: 93604 - RNA, 26 nt, Human
caaaaacagauaagcaaaucagaaug

SEQ ID NO: 93605 - RNA, 21 nt, Human
cacauacauacauauacacac

SEQ ID NO: 93606 - RNA, 18 nt, Human
caccaccugcggccagac

SEQ ID NO: 93607 - RNA, 22 nt, Human
caccugcggccagacgucaggc

SEQ ID NO: 93608 - RNA, 21 nt, Human
cagauggacucccuccgacuc

SEQ ID NO: 93609 - RNA, 24 nt, Human
cuaccgcgccaugcagccucuucc

SEQ ID NO: 93610 - RNA, 18 nt, Human
cucucugguuucccaggg

SEQ ID NO: 93611 - RNA, 33 nt, Human
gcauauacagaaacacacauacauacauauagu

SEQ ID NO: 93612 - RNA, 27 nt, Human
uacauacauauacacacgguauuuuac

SEQ ID NO: 93613 - RNA, 20 nt, Human
uaccaaaacaaggaggcaau

SEQ ID NO: 93614 - RNA, 21 nt, Human
uagaaagucauuucuuuaaaa

SEQ ID NO: 93615 - RNA, 22 nt, Human
uagauuaucaucugguaaccaa

SEQ ID NO: 93616 - RNA, 22 nt, Human
ucaauacaucacuguugcuuuc

SEQ ID NO: 93617 - RNA, 19 nt, Human
uccccgaccuacuuggccg

SEQ ID NO: 93618 - RNA, 22 nt, Human
ucccucacggaccgggccccua

SEQ ID NO: 93619 - RNA, 25 nt, Human
uccuuggcuaggcaaagccgggguc

SEQ ID NO: 93620 - RNA, 21 nt, Human
ugaaauuagagagucacugag

SEQ ID NO: 93621 - RNA, 20 nt, Human
ugaccaaaaacagauaagca

SEQ ID NO: 93622 - RNA, 20 nt, Human
ugcggccagacgucaggcgc

SEQ ID NO: 93623 - RNA, 21 nt, Human
ugcggccagacgucaggcgcg

SEQ ID NO: 93624 - RNA, 20 nt, Human
ugguuucccaggggcagccg

SEQ ID NO: 93625 - RNA, 22 nt, Human
ugugaaauuagagagucacuga

SEQ ID NO: 93626 - RNA, 31 nt, Human
ugugugcauauacagaaacacacauacagug

SEQ ID NO: 93627 - RNA, 24 nt, Human
ugugugugcauauacagaaacaca

SEQ ID NO: 93628 - RNA, 25 nt, Human
uguugcuuucauuuugguaaguucu

SEQ ID NO: 93629 - RNA, 26 nt, Human
uuuacaugguuuuauuauacauuacu

SEQ ID NO: 93630 - RNA, 26 nt, Human
aaacagaagucagauaagagggaccc

SEQ ID NO: 93631 - RNA, 19 nt, Human
acacaguauucucccuucc

SEQ ID NO: 93632 - RNA, 20 nt, Human
agaagagguuagcuggggua

SEQ ID NO: 93633 - RNA, 18 nt, Human
agagagcaugaaaagacc

SEQ ID NO: 93634 - RNA, 21 nt, Human
agauaagagagagcuggccug

SEQ ID NO: 93635 - RNA, 19 nt, Human
agaugucuuuauugaggcc

SEQ ID NO: 93636 - RNA, 20 nt, Human
agcaugaaaagaccaguggg

SEQ ID NO: 93637 - RNA, 23 nt, Human
aggacaagggaaggcaggagaga

SEQ ID NO: 93638 - RNA, 25 nt, Human
aggcaggagagagcaugaaaagacc

SEQ ID NO: 93639 - RNA, 19 nt, Human
agggaaggacaagggaagg

SEQ ID NO: 93640 - RNA, 21 nt, Human
agggaggggccccuggguccc

SEQ ID NO: 93641 - RNA, 23 nt, Human
aggggcucaagugggagggggga

SEQ ID NO: 93642 - RNA, 23 nt, Human
aguauggagagugauggaagaga

SEQ ID NO: 93643 - RNA, 25 nt, Human
caaacacaguauucucccuuccuuc

SEQ ID NO: 93644 - RNA, 23 nt, Human
caagaaagaguauggagagugau

SEQ ID NO: 93645 - RNA, 25 nt, Human
cagcauauagaccccaguuagcucu

SEQ ID NO: 93646 - RNA, 18 nt, Human
caugaaaagaccaguggg

SEQ ID NO: 93647 - RNA, 24 nt, Human
ccccugggucccagauucugaguu

SEQ ID NO: 93648 - RNA, 21 nt, Human
cucagggaaggacaagggaag

SEQ ID NO: 93649 - RNA, 20 nt, Human
cucccuuccuucuggccaag

SEQ ID NO: 93650 - RNA, 22 nt, Human
cugagauacagucccaaacaca

SEQ ID NO: 93651 - RNA, 24 nt, Human
gaauuccuuuuuuuuuuuuuuuuu

SEQ ID NO: 93652 - RNA, 18 nt, Human
gacaagggaaggcaggag

SEQ ID NO: 93653 - RNA, 19 nt, Human
gauucugaguuaggggcuc

SEQ ID NO: 93654 - RNA, 25 nt, Human
gcaugaaaagaccaguggggcugaa

SEQ ID NO: 93655 - RNA, 21 nt, Human
ggaaggacaagggaaggcagg

SEQ ID NO: 93656 - RNA, 20 nt, Human
ggacaagggaaggcaggaga

SEQ ID NO: 93657 - RNA, 21 nt, Human
ggauaagaaacagaagucaga

SEQ ID NO: 93658 - RNA, 20 nt, Human
ggcccagagcaguggacaga

SEQ ID NO: 93659 - RNA, 22 nt, Human
gggccccugggucccagauucu

SEQ ID NO: 93660 - RNA, 21 nt, Human
ggguagggaggggccccuggg

SEQ ID NO: 93661 - RNA, 24 nt, Human
gucagaaagauacaggauuagaga

SEQ ID NO: 93662 - RNA, 21 nt, Human
uaagagagagcuggccuggug

SEQ ID NO: 93663 - RNA, 25 nt, Human
uaagagagagcuggccuggugucua

SEQ ID NO: 93664 - RNA, 22 nt, Human
uagcucuauggcagagaauaac

SEQ ID NO: 93665 - RNA, 22 nt, Human
uaggggcucaagugggaggggg

SEQ ID NO: 93666 - RNA, 22 nt, Human
ucauuugcucaucaaaugaggg

SEQ ID NO: 93667 - RNA, 20 nt, Human
uccagaagagguuagcuggg

SEQ ID NO: 93668 - RNA, 19 nt, Human
ucccuggaggaacucaggg

SEQ ID NO: 93669 - RNA, 18 nt, Human
uccuuuuuuuuuuuuuuu

SEQ ID NO: 93670 - RNA, 18 nt, Human
uccuuuuuuuuuuuuuuu

SEQ ID NO: 93671 - RNA, 24 nt, Human
ugaaaagaccaguggggcugaaag

SEQ ID NO: 93672 - RNA, 20 nt, Human
ugaggccucucauuugaccc

SEQ ID NO: 93673 - RNA, 20 nt, Human
uggcccagagcaguggacag

SEQ ID NO: 93674 - RNA, 20 nt, Human
ugggauaagaaacagaaguc

SEQ ID NO: 93675 - RNA, 21 nt, Human
ugggaucuggguuggcucucc

SEQ ID NO: 93676 - RNA, 25 nt, Human
ugucucagcacccagcauauagacc

SEQ ID NO: 93677 - RNA, 18 nt, Human
uuaugggauaagaaacag

SEQ ID NO: 93678 - RNA, 18 nt, Human
uuuuuuucaugcugcccc

SEQ ID NO: 93679 - RNA, 25 nt, Human
aacuggagaguuaauugacugcugg

SEQ ID NO: 93680 - RNA, 22 nt, Human
aaggagcuggcugggugugggg

SEQ ID NO: 93681 - RNA, 23 nt, Human
acacuaaaucuaccaagcacaau

SEQ ID NO: 93682 - RNA, 18 nt, Human
agaauuaguuagcuagua

SEQ ID NO: 93683 - RNA, 18 nt, Human
agagagcagacaggcuga

SEQ ID NO: 93684 - RNA, 23 nt, Human
agcaaagaacaagaucuguuccg

SEQ ID NO: 93685 - RNA, 20 nt, Human
agcagcuacagagaaggggu

SEQ ID NO: 93686 - RNA, 20 nt, Human
aguuuucccccacccuccac

SEQ ID NO: 93687 - RNA, 24 nt, Human
cacucuaugccugugaguuagaaa

SEQ ID NO: 93688 - RNA, 19 nt, Human
cagaauagaggacagaaga

SEQ ID NO: 93689 - RNA, 24 nt, Human
cagcaaagaacaagaucuguuccg

SEQ ID NO: 93690 - RNA, 33 nt, Human
caugacccuugaugguccagcaaagaacaaggg

SEQ ID NO: 93691 - RNA, 18 nt, Human
cauuucaagcccucucca

SEQ ID NO: 93692 - RNA, 23 nt, Human
cauuugaaaaggcauuugcugaa

SEQ ID NO: 93693 - RNA, 18 nt, Human
ccaaggcugagccuucuc

SEQ ID NO: 93694 - RNA, 18 nt, Human
ccaaucagagacaugaac

SEQ ID NO: 93695 - RNA, 18 nt, Human
ccaaucagagacaugaac

SEQ ID NO: 93696 - RNA, 20 nt, Human
ccuuguugagcaaggagaga

SEQ ID NO: 93697 - RNA, 22 nt, Human
cuaggaagccagcugacccaau

SEQ ID NO: 93698 - RNA, 24 nt, Human
cugcauuugaaaaggcauuugcug

SEQ ID NO: 93699 - RNA, 22 nt, Human
cugcuaagugggauugcugcau

SEQ ID NO: 93700 - RNA, 22 nt, Human
cuggaggagggaucccaacuga

SEQ ID NO: 93701 - RNA, 18 nt, Human
cuugaauauccaaguuca

SEQ ID NO: 93702 - RNA, 20 nt, Human
cuugccaacuagagggaagu

SEQ ID NO: 93703 - RNA, 20 nt, Human
gaagacuguuagaggccuug

SEQ ID NO: 93704 - RNA, 23 nt, Human
gacgcaaagggagugggaaaaga

SEQ ID NO: 93705 - RNA, 18 nt, Human
gagcaaaucaaccuccca

SEQ ID NO: 93706 - RNA, 21 nt, Human
gaugauggaaaagggaaagga

SEQ ID NO: 93707 - RNA, 21 nt, Human
gccaauugugggaguacugau

SEQ ID NO: 93708 - RNA, 21 nt, Human
gcucagaaggcacuuugggau

SEQ ID NO: 93709 - RNA, 20 nt, Human
ggaaaggagcuggcugggug

SEQ ID NO: 93710 - RNA, 21 nt, Human
gggaaaggagcuggcugggug

SEQ ID NO: 93711 - RNA, 25 nt, Human
guuuucccccacccuccacuccugc

SEQ ID NO: 93712 - RNA, 18 nt, Human
uagaggccuuguugagcc

SEQ ID NO: 93713 - RNA, 26 nt, Human
ucaaccucccaucccaguuuccuaau

SEQ ID NO: 93714 - RNA, 23 nt, Human
ucagagacaugaacccaucagaa

SEQ ID NO: 93715 - RNA, 20 nt, Human
ucaucagaauuguuuggagu

SEQ ID NO: 93716 - RNA, 19 nt, Human
ucccaucccaguuuccuaa

SEQ ID NO: 93717 - RNA, 24 nt, Human
ucccccacccuccacuccugcuga

SEQ ID NO: 93718 - RNA, 21 nt, Human
ugauggaaaagggaaaggagc

SEQ ID NO: 93719 - RNA, 21 nt, Human
ugauuuauaaguuugcuucca

SEQ ID NO: 93720 - RNA, 24 nt, Human
ugccaugacccuugaugguccagc

SEQ ID NO: 93721 - RNA, 20 nt, Human
ugcccuggccaauuguggga

SEQ ID NO: 93722 - RNA, 22 nt, Human
ugcugaaugaugcugcuccuga

SEQ ID NO: 93723 - RNA, 20 nt, Human
ugcugccaccuugugcuguc

SEQ ID NO: 93724 - RNA, 20 nt, Human
ugcuugcugccaccuugugc

SEQ ID NO: 93725 - RNA, 18 nt, Human
uggaggagggaucccaac

SEQ ID NO: 93726 - RNA, 20 nt, Human
ugggaaaagagaugauggaa

SEQ ID NO: 93727 - RNA, 24 nt, Human
ugggaaaagagaugauggaaaagg

SEQ ID NO: 93728 - RNA, 19 nt, Human
ugggauuuuuuuuuuuuuc

SEQ ID NO: 93729 - RNA, 24 nt, Human
ugugauuuuguuuucaucagaauu

SEQ ID NO: 93730 - RNA, 20 nt, Human
ugugcugucuguaugguagu

SEQ ID NO: 93731 - RNA, 19 nt, Human
uucccccacccuccacucc

SEQ ID NO: 93732 - RNA, 23 nt, Human
uugaaauaaguuuaacaaagcca

SEQ ID NO: 93733 - RNA, 20 nt, Human
uugcugaaugaugcugcucc

SEQ ID NO: 93734 - RNA, 23 nt, Human
uugcugcauuugaaaaggcauuu

SEQ ID NO: 93735 - RNA, 20 nt, Human
uugcugccaccuugugcugu

SEQ ID NO: 93736 - RNA, 22 nt, Human
uugcugccaccuugugcugucu

SEQ ID NO: 93737 - RNA, 25 nt, Human
uuuagagagcaaaucaaccucccau

SEQ ID NO: 93738 - RNA, 18 nt, Human
uuucccccacccuccacu

SEQ ID NO: 93739 - RNA, 19 nt, Human
uuuguuuucaucagaauug

SEQ ID NO: 93740 - RNA, 22 nt, Human
uuuuuuuuuuuucagugccuca

SEQ ID NO: 93741 - RNA, 18 nt, Human
aaacagcucccuccuucc

SEQ ID NO: 93742 - RNA, 22 nt, Human
aaucuccauuucugccuuccuc

SEQ ID NO: 93743 - RNA, 19 nt, Human
acagcucccuccuuccacu

SEQ ID NO: 93744 - RNA, 20 nt, Human
agaggaaaggagucuggggc

SEQ ID NO: 93745 - RNA, 18 nt, Human
agcaguucacucccugca

SEQ ID NO: 93746 - RNA, 23 nt, Human
augagacagcuaggaguuuggag

SEQ ID NO: 93747 - RNA, 22 nt, Human
auucacugucauuuaagauggu

SEQ ID NO: 93748 - RNA, 19 nt, Human
cagcucccuccuuccacuc

SEQ ID NO: 93749 - RNA, 22 nt, Human
caggucaagcguugccugugcc

SEQ ID NO: 93750 - RNA, 18 nt, Human
ccccaagaaaccucucug

SEQ ID NO: 93751 - RNA, 25 nt, Human
cucccuccuuccacucuccugcgcg

SEQ ID NO: 93752 - RNA, 21 nt, Human
gagacagcuaggaguuuggag

SEQ ID NO: 93753 - RNA, 22 nt, Human
gauuccucaucccugggacccc

SEQ ID NO: 93754 - RNA, 19 nt, Human
gggcaagggaugagacagc

SEQ ID NO: 93755 - RNA, 20 nt, Human
ggucaagcguugccugugcc

SEQ ID NO: 93756 - RNA, 19 nt, Human
guggggacacaugucuaca

SEQ ID NO: 93757 - RNA, 21 nt, Human
gugguccuugagucuuuggaa

SEQ ID NO: 93758 - RNA, 19 nt, Human
ucagaggaaaggagucugg

SEQ ID NO: 93759 - RNA, 20 nt, Human
ucagaggaaaggagucuggg

SEQ ID NO: 93760 - RNA, 18 nt, Human
uccucaauccagacuugu

SEQ ID NO: 93761 - RNA, 19 nt, Human
ugcagccaggugccuguug

SEQ ID NO: 93762 - RNA, 18 nt, Human
uggagcaguucacucccu

SEQ ID NO: 93763 - RNA, 18 nt, Human
uggcugcagccaggugcc

SEQ ID NO: 93764 - RNA, 23 nt, Human
ugggaccccaagaaaccucucug

SEQ ID NO: 93765 - RNA, 19 nt, Human
uuggagcaguucacucccu

SEQ ID NO: 93766 - RNA, 20 nt, Human
aacaaaaaccauucuagaaa

SEQ ID NO: 93767 - RNA, 20 nt, Human
aagcugacaccuugguggcc

SEQ ID NO: 93768 - RNA, 21 nt, Human
accagcauagguucuggagga

SEQ ID NO: 93769 - RNA, 18 nt, Human
caaaaaaaauuaagggca

SEQ ID NO: 93770 - RNA, 20 nt, Human
caccagaggaagcugacacc

SEQ ID NO: 93771 - RNA, 23 nt, Human
cagaggaagcugacaccuuggug

SEQ ID NO: 93772 - RNA, 19 nt, Human
cagcauagguucuggagga

SEQ ID NO: 93773 - RNA, 19 nt, Human
caguacacaggugaaccag

SEQ ID NO: 93774 - RNA, 23 nt, Human
ccauccaccagcugaagauuuua

SEQ ID NO: 93775 - RNA, 19 nt, Human
ccuuuuguucuucaaaagu

SEQ ID NO: 93776 - RNA, 19 nt, Human
cuagaaaucacccagaaca

SEQ ID NO: 93777 - RNA, 25 nt, Human
cuccugguuuggaaggcgauucacu

SEQ ID NO: 93778 - RNA, 22 nt, Human
cugcugccgaggcuugcugcuu

SEQ ID NO: 93779 - RNA, 23 nt, Human
ggcggccgcucgcgaucuagaac

SEQ ID NO: 93780 - RNA, 21 nt, Human
gugcaaaaauucacuuagcuu

SEQ ID NO: 93781 - RNA, 27 nt, Human
uaaaacauuguuuucuaaacacuaaca

SEQ ID NO: 93782 - RNA, 19 nt, Human
uaagggcaaacugaaaaua

SEQ ID NO: 93783 - RNA, 23 nt, Human
uaccagauaccuuaacuuguauu

SEQ ID NO: 93784 - RNA, 24 nt, Human
uaccagauaccuuaacuuguauuu

SEQ ID NO: 93785 - RNA, 26 nt, Human
uaccagauaccuuaacuuguauuucu

SEQ ID NO: 93786 - RNA, 19 nt, Human
uagcuuuucuuuuguuuuu

SEQ ID NO: 93787 - RNA, 21 nt, Human
ucagagacucaacaaaaacca

SEQ ID NO: 93788 - RNA, 19 nt, Human
ucaguacacaggugaacca

SEQ ID NO: 93789 - RNA, 20 nt, Human
uccaccagcugaagauuuua

SEQ ID NO: 93790 - RNA, 21 nt, Human
uccuuucuuuucuccugguuu

SEQ ID NO: 93791 - RNA, 20 nt, Human
ucuggaaaagaauaacaaac

SEQ ID NO: 93792 - RNA, 22 nt, Human
ucuucaaaagucaccauccacc

SEQ ID NO: 93793 - RNA, 20 nt, Human
ugcucaugggugcggcgggc

SEQ ID NO: 93794 - RNA, 18 nt, Human
ugcugcuuuuuucucauc

SEQ ID NO: 93795 - RNA, 19 nt, Human
uggaaaagaauaacaaacc

SEQ ID NO: 93796 - RNA, 28 nt, Human
uuagcuuuucuuuuguuuuuuugguguu

SEQ ID NO: 93797 - RNA, 22 nt, Human
uucuucaaaagucaccauccac

SEQ ID NO: 93798 - RNA, 24 nt, Human
uuggaaggcgauucacugguuuuu

SEQ ID NO: 93799 - RNA, 24 nt, Human
uuucuguugccaaagccuuuuguu

SEQ ID NO: 93800 - RNA, 22 nt, Human
uuuguucuucaaaagucaccau

SEQ ID NO: 93801 - RNA, 22 nt, Human
uuuuuuuuuuuuuuuaauguuu

SEQ ID NO: 93802 - RNA, 19 nt, Human
uuuuuuuuuuuuuuuuuaa

SEQ ID NO: 93803 - RNA, 22 nt, Human
aaccuucauuuuccccugggga

SEQ ID NO: 93804 - RNA, 22 nt, Human
agauuauuuauuguaaaaaugu

SEQ ID NO: 93805 - RNA, 20 nt, Human
aucaucuuuaucuuuucuuu

SEQ ID NO: 93806 - RNA, 22 nt, Human
auccagugaugagcggguuaca

SEQ ID NO: 93807 - RNA, 18 nt, Human
cacugcaggaggccucgg

SEQ ID NO: 93808 - RNA, 21 nt, Human
caggagaaucuucauccagug

SEQ ID NO: 93809 - RNA, 18 nt, Human
cgcugcacaggugcaggg

SEQ ID NO: 93810 - RNA, 18 nt, Human
gagaaucuucauccagug

SEQ ID NO: 93811 - RNA, 22 nt, Human
gcugcacaggugcagggccccg

SEQ ID NO: 93812 - RNA, 21 nt, Human
uaacauuaauguaacuccagu

SEQ ID NO: 93813 - RNA, 24 nt, Human
uaacuccagugaaaaaaaugaauu

SEQ ID NO: 93814 - RNA, 21 nt, Human
uaucaggaauaaacauuaagc

SEQ ID NO: 93815 - RNA, 24 nt, Human
uccagugaugagcggguuacacgg

SEQ ID NO: 93816 - RNA, 21 nt, Human
ucuguugugaaaucagugcug

SEQ ID NO: 93817 - RNA, 25 nt, Human
ugaaaaaaaugaauuugaucaauua

SEQ ID NO: 93818 - RNA, 20 nt, Human
uggggaaauagcauuaaaaa

SEQ ID NO: 93819 - RNA, 20 nt, Human
uucugaguagaucaucuuua

SEQ ID NO: 93820 - RNA, 24 nt, Human
aagcuuuuggauauaccaggcagc

SEQ ID NO: 93821 - RNA, 23 nt, Human
aaggaagaucuuguauuguaugg

SEQ ID NO: 93822 - RNA, 20 nt, Human
aauaaguguaugaaaaaaaa

SEQ ID NO: 93823 - RNA, 22 nt, Human
aaucagguauacuucuauccuu

SEQ ID NO: 93824 - RNA, 20 nt, Human
acacaauguugagccacuaa

SEQ ID NO: 93825 - RNA, 21 nt, Human
acgaagcugaauagacaugcu

SEQ ID NO: 93826 - RNA, 21 nt, Human
acuccauggccauacccugga

SEQ ID NO: 93827 - RNA, 20 nt, Human
agccaauaaagcgaugguug

SEQ ID NO: 93828 - RNA, 19 nt, Human
aggcaaaaaucaagcagag

SEQ ID NO: 93829 - RNA, 25 nt, Human
aggcaaaaaucaagcagaggggacc

SEQ ID NO: 93830 - RNA, 18 nt, Human
aggcagaaucacaauaug

SEQ ID NO: 93831 - RNA, 20 nt, Human
aggcgcuggaggggggcggu

SEQ ID NO: 93832 - RNA, 21 nt, Human
aggggggcgguggcuccgggg

SEQ ID NO: 93833 - RNA, 22 nt, Human
agguuucccugggcugugcuuu

SEQ ID NO: 93834 - RNA, 22 nt, Human
aguuuggauucaggaaagcgug

SEQ ID NO: 93835 - RNA, 19 nt, Human
auucagacugccaaaaaua

SEQ ID NO: 93836 - RNA, 22 nt, Human
auucaggaaagcgugauuauuc

SEQ ID NO: 93837 - RNA, 24 nt, Human
cacagcauaacagacgguugcaag

SEQ ID NO: 93838 - RNA, 24 nt, Human
cacauccccaagguucuggcagca

SEQ ID NO: 93839 - RNA, 23 nt, Human
cagccaauaaagcgaugguugau

SEQ ID NO: 93840 - RNA, 18 nt, Human
cagcugaaaugggaacac

SEQ ID NO: 93841 - RNA, 24 nt, Human
caggacugccagcccacagagagc

SEQ ID NO: 93842 - RNA, 24 nt, Human
caggaggaauaaaaagcuuuugga

SEQ ID NO: 93843 - RNA, 19 nt, Human
caggcacagaaaauaucau

SEQ ID NO: 93844 - RNA, 19 nt, Human
cagguauacuucuauccuu

SEQ ID NO: 93845 - RNA, 26 nt, Human
cauggccauacccuggaauucuuccc

SEQ ID NO: 93846 - RNA, 22 nt, Human
ccaaaaauagaugaaauagcuc

SEQ ID NO: 93847 - RNA, 21 nt, Human
ccacaugcaaauaaaaaggua

SEQ ID NO: 93848 - RNA, 24 nt, Human
ccagaugaagcccagaagugagcu

SEQ ID NO: 93849 - RNA, 20 nt, Human
cccacagagagcucagcccu

SEQ ID NO: 93850 - RNA, 27 nt, Human
cccguggcuggaugaaaaccggggucc

SEQ ID NO: 93851 - RNA, 18 nt, Human
cccuggaauucuucccuu

SEQ ID NO: 93852 - RNA, 19 nt, Human
ccuuucaacaauauguuca

SEQ ID NO: 93853 - RNA, 24 nt, Human
cgguggcugggagggagccuccug

SEQ ID NO: 93854 - RNA, 20 nt, Human
cucaguuugaguucagaaga

SEQ ID NO: 93855 - RNA, 25 nt, Human
cucccccaucuucuuucugggcaaa

SEQ ID NO: 93856 - RNA, 26 nt, Human
cuggaggggggcgguggcuccgggug

SEQ ID NO: 93857 - RNA, 20 nt, Human
cuuccaggacugccagccca

SEQ ID NO: 93858 - RNA, 19 nt, Human
cuuggauuagguccaaagc

SEQ ID NO: 93859 - RNA, 23 nt, Human
gaguaggcaguugagguuguugg

SEQ ID NO: 93860 - RNA, 18 nt, Human
gccccuccuuggaggccc

SEQ ID NO: 93861 - RNA, 18 nt, Human
ggaggggggcgguggcug

SEQ ID NO: 93862 - RNA, 22 nt, Human
ggcgcuggaggggggcggugga

SEQ ID NO: 93863 - RNA, 21 nt, Human
ggcggggagcgcccgcagcga

SEQ ID NO: 93864 - RNA, 23 nt, Human
ggcugggagggagccuccuggcc

SEQ ID NO: 93865 - RNA, 27 nt, Human
gggaaaaaaaggcgcuggaggggggcg

SEQ ID NO: 93866 - RNA, 22 nt, Human
ggggaaaaaaaggcgcuggagg

SEQ ID NO: 93867 - RNA, 21 nt, Human
ggggaggggccaugugucaca

SEQ ID NO: 93868 - RNA, 21 nt, Human
gggggcgguggcugggaggga

SEQ ID NO: 93869 - RNA, 22 nt, Human
ggggggcgguggcugggaggga

SEQ ID NO: 93870 - RNA, 22 nt, Human
guagaacagacaugucuuggaa

SEQ ID NO: 93871 - RNA, 26 nt, Human
guugguucuuuucuuuuuuuuuuuuu

SEQ ID NO: 93872 - RNA, 28 nt, Human
uaaaaugaccaacauuuugacuaacgag

SEQ ID NO: 93873 - RNA, 19 nt, Human
uaaaauuucaagaagagua

SEQ ID NO: 93874 - RNA, 19 nt, Human
uaaagcgaguugcugaguu

SEQ ID NO: 93875 - RNA, 20 nt, Human
uaaagcgaguugcugaguua

SEQ ID NO: 93876 - RNA, 22 nt, Human
uaaagcgaguugcugaguuaga

SEQ ID NO: 93877 - RNA, 24 nt, Human
uaaagcgaguugcugaguuagacc

SEQ ID NO: 93878 - RNA, 25 nt, Human
uaaagcgaguugcugaguuagaccc

SEQ ID NO: 93879 - RNA, 18 nt, Human
uaacauaaaaugaccaac

SEQ ID NO: 93880 - RNA, 22 nt, Human
uaagaaaaguccccaaaggcag

SEQ ID NO: 93881 - RNA, 22 nt, Human
uacagauugaaucacaaagcca

SEQ ID NO: 93882 - RNA, 18 nt, Human
uaccaggcagcuuucugu

SEQ ID NO: 93883 - RNA, 22 nt, Human
uagaacagacaugucuuggaau

SEQ ID NO: 93884 - RNA, 24 nt, Human
uagugucaaccauacccacuacgg

SEQ ID NO: 93885 - RNA, 20 nt, Human
ucaagaagaguaaggcauua

SEQ ID NO: 93886 - RNA, 19 nt, Human
ucagaagagacauaauacu

SEQ ID NO: 93887 - RNA, 21 nt, Human
uccacaugcaaauaaaaaggu

SEQ ID NO: 93888 - RNA, 22 nt, Human
uccacaugcaaauaaaaagguu

SEQ ID NO: 93889 - RNA, 22 nt, Human
uccaggacugccagcccacaga

SEQ ID NO: 93890 - RNA, 18 nt, Human
uccauggccauacccugg

SEQ ID NO: 93891 - RNA, 24 nt, Human
uccccaagguucuggcagcagagg

SEQ ID NO: 93892 - RNA, 24 nt, Human
ugaaaaaaaaaucauaacugaagg

SEQ ID NO: 93893 - RNA, 23 nt, Human
ugaggaaggaagaucuugggucg

SEQ ID NO: 93894 - RNA, 19 nt, Human
ugagggacuaagcaucuau

SEQ ID NO: 93895 - RNA, 25 nt, Human
ugcucgcgguuggcccggacgugug

SEQ ID NO: 93896 - RNA, 22 nt, Human
ugcugaccucauucaguugaug

SEQ ID NO: 93897 - RNA, 21 nt, Human
uggaacuugaaauuggcacca

SEQ ID NO: 93898 - RNA, 22 nt, Human
uggaagaggcaaaaaucaagca

SEQ ID NO: 93899 - RNA, 20 nt, Human
uggaggggggcgguggcugg

SEQ ID NO: 93900 - RNA, 20 nt, Human
uggauauaccaggcagcuuu

SEQ ID NO: 93901 - RNA, 26 nt, Human
uggcaccaggaaaauuaaaaggaaaa

SEQ ID NO: 93902 - RNA, 18 nt, Human
uggcagcagagggcgggg

SEQ ID NO: 93903 - RNA, 24 nt, Human
uggcagggggaggggccauguguc

SEQ ID NO: 93904 - RNA, 18 nt, Human
uggcccggacgugugcug

SEQ ID NO: 93905 - RNA, 22 nt, Human
uggcuuccaggacugccagccc

SEQ ID NO: 93906 - RNA, 22 nt, Human
ugggaaaagaguuugcugaaaa

SEQ ID NO: 93907 - RNA, 22 nt, Human
ugggaacacaauguugagccac

SEQ ID NO: 93908 - RNA, 24 nt, Human
ugggaacacaauguugagccacua

SEQ ID NO: 93909 - RNA, 18 nt, Human
ugggagggagccuccugg

SEQ ID NO: 93910 - RNA, 25 nt, Human
ugggcaaagggaugcuuggauuagg

SEQ ID NO: 93911 - RNA, 22 nt, Human
ugguucuuuucuuuuuuuuuuu

SEQ ID NO: 93912 - RNA, 21 nt, Human
uguauggggggaaaaaaaggc

SEQ ID NO: 93913 - RNA, 20 nt, Human
ugugaggagguuucccuggg

SEQ ID NO: 93914 - RNA, 22 nt, Human
uguugagccacuaaaccacccc

SEQ ID NO: 93915 - RNA, 19 nt, Human
uuauuccagcaaaauacuu

SEQ ID NO: 93916 - RNA, 24 nt, Human
uucaaucuuuuuauuacugccucc

SEQ ID NO: 93917 - RNA, 18 nt, Human
uucuaauuuuggucuuca

SEQ ID NO: 93918 - RNA, 23 nt, Human
uucugggcaaagggaugcuugga

SEQ ID NO: 93919 - RNA, 19 nt, Human
uucuuuuuuuuuuuuuucc

SEQ ID NO: 93920 - RNA, 24 nt, Human
uugaaucacaaagccauuuccuaa

SEQ ID NO: 93921 - RNA, 20 nt, Human
uugcugaguuagacccuauu

SEQ ID NO: 93922 - RNA, 18 nt, Human
uuggaccaguaauugauu

SEQ ID NO: 93923 - RNA, 19 nt, Human
uuugcugaaaaucugccca

SEQ ID NO: 93924 - RNA, 23 nt, Human
uuuuauuacugccuccuccccca

SEQ ID NO: 93925 - RNA, 20 nt, Human
uuuuggauauaccaggcagc

SEQ ID NO: 93926 - RNA, 21 nt, Human
uuuuggauauaccaggcagcu

SEQ ID NO: 93927 - RNA, 24 nt, Human
uuuuuuuuuccuccucaguucuuc

SEQ ID NO: 93928 - RNA, 26 nt, Human
uuuuuuuuuuuuuuccuccucaguuc

SEQ ID NO: 93929 - RNA, 21 nt, Human
aaaaugcuuuuaagcaaucug

SEQ ID NO: 93930 - RNA, 26 nt, Human
aaacagacaaacaaauaagaaaucuc

SEQ ID NO: 93931 - RNA, 18 nt, Human
aaaguauuacucccagag

SEQ ID NO: 93932 - RNA, 19 nt, Human
aacagaacaguggugcuuu

SEQ ID NO: 93933 - RNA, 21 nt, Human
acugcaauuuccaggaucauu

SEQ ID NO: 93934 - RNA, 19 nt, Human
agaagauguacaaaugcuu

SEQ ID NO: 93935 - RNA, 22 nt, Human
agcgcccggccccgcccccccu

SEQ ID NO: 93936 - RNA, 24 nt, Human
aggaaaugaacagaacaguggugc

SEQ ID NO: 93937 - RNA, 18 nt, Human
aguauuuuuauagaaaug

SEQ ID NO: 93938 - RNA, 22 nt, Human
cagcucccagcccggccguccc

SEQ ID NO: 93939 - RNA, 25 nt, Human
ccagcucccagcccggccgucccga

SEQ ID NO: 93940 - RNA, 22 nt, Human
cccagaguaaaaacagacaaac

SEQ ID NO: 93941 - RNA, 21 nt, Human
cccguagcgcccggccccgcc

SEQ ID NO: 93942 - RNA, 19 nt, Human
gaaaugaacagaacagugg

SEQ ID NO: 93943 - RNA, 22 nt, Human
gcagccuuggugcgcggccgcu

SEQ ID NO: 93944 - RNA, 18 nt, Human
gccuuggugcgcggccgc

SEQ ID NO: 93945 - RNA, 20 nt, Human
gcuaggaaaugaacagaaca

SEQ ID NO: 93946 - RNA, 18 nt, Human
ggcggcggccgcuucccg

SEQ ID NO: 93947 - RNA, 20 nt, Human
uaaaaugaaacaucuuguua

SEQ ID NO: 93948 - RNA, 22 nt, Human
uagaacagcuaggaaaugaaca

SEQ ID NO: 93949 - RNA, 24 nt, Human
uaggaaaacaauauuuuaaaggaa

SEQ ID NO: 93950 - RNA, 22 nt, Human
uauaauaacaaagaaguauuac

SEQ ID NO: 93951 - RNA, 22 nt, Human
uccagcucccagcccggccguc

SEQ ID NO: 93952 - RNA, 19 nt, Human
ucccagaguaaaaacagac

SEQ ID NO: 93953 - RNA, 23 nt, Human
ucccgcugugggcuccagcuccc

SEQ ID NO: 93954 - RNA, 19 nt, Human
ugcgaggcccgggcggcgg

SEQ ID NO: 93955 - RNA, 24 nt, Human
ugcucaucuuaauaguuuucuuaa

SEQ ID NO: 93956 - RNA, 22 nt, Human
ugggcuccagcucccagcccgg

SEQ ID NO: 93957 - RNA, 22 nt, Human
uuagaaaagcauuauuugaaaa

SEQ ID NO: 93958 - RNA, 24 nt, Human
uucaugaaucuacuuucacauuua

SEQ ID NO: 93959 - RNA, 18 nt, Human
uucccgcugugggcucca

SEQ ID NO: 93960 - RNA, 22 nt, Human
aaaaugcagcauuccccaaaug

SEQ ID NO: 93961 - RNA, 24 nt, Human
aaaugcagccaaaacccuuuacug

SEQ ID NO: 93962 - RNA, 22 nt, Human
aacaauagaauccgaagaagaa

SEQ ID NO: 93963 - RNA, 20 nt, Human
aaccaacucucccugugucu

SEQ ID NO: 93964 - RNA, 23 nt, Human
acaaaaugcagcauuccccaaau

SEQ ID NO: 93965 - RNA, 21 nt, Human
acucuguucuucacuuacauu

SEQ ID NO: 93966 - RNA, 22 nt, Human
agacaaccaacucucccugugu

SEQ ID NO: 93967 - RNA, 20 nt, Human
agcagccccugugaagaagu

SEQ ID NO: 93968 - RNA, 24 nt, Human
aggcaugggggcaucauggugggg

SEQ ID NO: 93969 - RNA, 26 nt, Human
cacacgcacaaauuagacccacaagu

SEQ ID NO: 93970 - RNA, 18 nt, Human
cacccccugcccugccac

SEQ ID NO: 93971 - RNA, 26 nt, Human
cagcaaacaauagaauccgaagaaga

SEQ ID NO: 93972 - RNA, 21 nt, Human
cagcauuccccaaaugcagcc

SEQ ID NO: 93973 - RNA, 23 nt, Human
cagccccugugaagaaguccccc

SEQ ID NO: 93974 - RNA, 18 nt, Human
caggacacaaaccaaucu

SEQ ID NO: 93975 - RNA, 23 nt, Human
caggacacaaaccaaucuuacag

SEQ ID NO: 93976 - RNA, 18 nt, Human
caggcccuucccucagug

SEQ ID NO: 93977 - RNA, 19 nt, Human
cauuucaggggcucgguua

SEQ ID NO: 93978 - RNA, 25 nt, Human
cauuuuugugcucaggcaacaggag

SEQ ID NO: 93979 - RNA, 21 nt, Human
ccaccgcuguugccccaccug

SEQ ID NO: 93980 - RNA, 18 nt, Human
ccacgcccaggcaugggg

SEQ ID NO: 93981 - RNA, 21 nt, Human
ccacgcccaggcaugggggca

SEQ ID NO: 93982 - RNA, 20 nt, Human
cccauuuuugugcucaggca

SEQ ID NO: 93983 - RNA, 22 nt, Human
cccccggggaccagucuggccc

SEQ ID NO: 93984 - RNA, 22 nt, Human
ccccgggugggaaccgcgugcu

SEQ ID NO: 93985 - RNA, 18 nt, Human
ccccugcccugccaccgc

SEQ ID NO: 93986 - RNA, 19 nt, Human
ccccugugaagaagucccc

SEQ ID NO: 93987 - RNA, 19 nt, Human
cccuaaagagaaagagcuc

SEQ ID NO: 93988 - RNA, 21 nt, Human
cccugugucuguuuuucaggg

SEQ ID NO: 93989 - RNA, 20 nt, Human
ccgcuguugccccaccuggc

SEQ ID NO: 93990 - RNA, 22 nt, Human
cgaacaaaaugcagcauucccc

SEQ ID NO: 93991 - RNA, 25 nt, Human
cgaacaaaaugcagcauuccccaaa

SEQ ID NO: 93992 - RNA, 18 nt, Human
cgccaguggucacugguc

SEQ ID NO: 93993 - RNA, 22 nt, Human
cgucacaucuccugagggcgaa

SEQ ID NO: 93994 - RNA, 18 nt, Human
cuggcccaccacccccug

SEQ ID NO: 93995 - RNA, 21 nt, Human
cuggcuucccuacaccgugug

SEQ ID NO: 93996 - RNA, 23 nt, Human
cuucuguggcugggccgucuuuu

SEQ ID NO: 93997 - RNA, 24 nt, Human
cuuguuccuucgucacaucuccug

SEQ ID NO: 93998 - RNA, 19 nt, Human
gaccuuguuccuucgucac

SEQ ID NO: 93999 - RNA, 21 nt, Human
gagcuguguggccggcugggg

SEQ ID NO: 94000 - RNA, 24 nt, Human
gcccaccacccccugcccugccac

SEQ ID NO: 94001 - RNA, 19 nt, Human
gccggcuggggcugaaaau

SEQ ID NO: 94002 - RNA, 18 nt, Human
gcuccaucaugggguaug

SEQ ID NO: 94003 - RNA, 21 nt, Human
ggaggcuugaacccaggcccu

SEQ ID NO: 94004 - RNA, 22 nt, Human
ggggcaucaugguggggcuggg

SEQ ID NO: 94005 - RNA, 20 nt, Human
gucacuggucacuuuccuga

SEQ ID NO: 94006 - RNA, 18 nt, Human
gucacuuaaacaugaucu

SEQ ID NO: 94007 - RNA, 25 nt, Human
gugcccauuuuugugcucaggcaac

SEQ ID NO: 94008 - RNA, 23 nt, Human
ucaugguggggcugggggagagc

SEQ ID NO: 94009 - RNA, 24 nt, Human
uccagcaaacaauagaauccgaag

SEQ ID NO: 94010 - RNA, 24 nt, Human
uccagcaaacaauagaauccgaag

SEQ ID NO: 94011 - RNA, 21 nt, Human
uccccaaaugcagccaaaacc

SEQ ID NO: 94012 - RNA, 23 nt, Human
ucccuacaccgugugcuccauca

SEQ ID NO: 94013 - RNA, 20 nt, Human
ucccugugucuguuuuucag

SEQ ID NO: 94014 - RNA, 18 nt, Human
ucuccugagggcgaaggu

SEQ ID NO: 94015 - RNA, 18 nt, Human
ugaagagacaaccaacuc

SEQ ID NO: 94016 - RNA, 26 nt, Human
ugaagagacaaccaacucucccugug

SEQ ID NO: 94017 - RNA, 20 nt, Human
ugaaguauauuuuuggagcu

SEQ ID NO: 94018 - RNA, 21 nt, Human
ugaaguauauuuuuggagcug

SEQ ID NO: 94019 - RNA, 24 nt, Human
ugccccugccagcccaagggucau

SEQ ID NO: 94020 - RNA, 19 nt, Human
uggcaaaugaucuuccccc

SEQ ID NO: 94021 - RNA, 20 nt, Human
uggcaguacugggcauuuca

SEQ ID NO: 94022 - RNA, 21 nt, Human
uggcaguacugggcauuucag

SEQ ID NO: 94023 - RNA, 25 nt, Human
uggcaguacugggcauuucaggggc

SEQ ID NO: 94024 - RNA, 24 nt, Human
uggggcugggggagagcgaagggc

SEQ ID NO: 94025 - RNA, 20 nt, Human
uggucaggacacaaaccaau

SEQ ID NO: 94026 - RNA, 21 nt, Human
ugugcuccaucaugggguaug

SEQ ID NO: 94027 - RNA, 22 nt, Human
uuacuggagccaccuuccuaac

SEQ ID NO: 94028 - RNA, 21 nt, Human
aaaaaaaacaacuuugagcau

SEQ ID NO: 94029 - RNA, 31 nt, Human
aaaauuuuggaaaggggcuggagcugaagcc

SEQ ID NO: 94030 - RNA, 21 nt, Human
aaacaaacaaaaaaaacaacu

SEQ ID NO: 94031 - RNA, 18 nt, Human
aaacaggaaaaaaaccga

SEQ ID NO: 94032 - RNA, 19 nt, Human
aaacaggaaaaaaaccgaa

SEQ ID NO: 94033 - RNA, 25 nt, Human
aaacaggaaaaaaaccgaacaucug

SEQ ID NO: 94034 - RNA, 23 nt, Human
aaagcaaaaagugaaauucagaa

SEQ ID NO: 94035 - RNA, 22 nt, Human
aacccacggacgccauucaucu

SEQ ID NO: 94036 - RNA, 18 nt, Human
aagaaaaacaccauuggg

SEQ ID NO: 94037 - RNA, 24 nt, Human
aaugcuaauuaacugcaggcugag

SEQ ID NO: 94038 - RNA, 18 nt, Human
acaauaagucauuacgac

SEQ ID NO: 94039 - RNA, 22 nt, Human
accaaaaagagucuuuuuuucc

SEQ ID NO: 94040 - RNA, 22 nt, Human
agaaacaggaaaaaaaccgaac

SEQ ID NO: 94041 - RNA, 24 nt, Human
agaaagauacagguuucucaccaa

SEQ ID NO: 94042 - RNA, 25 nt, Human
agaaauguggaggaugaccgguacc

SEQ ID NO: 94043 - RNA, 28 nt, Human
agagaggagggccaucagaggggcuggg

SEQ ID NO: 94044 - RNA, 21 nt, Human
agagcaccaaaaagcaaaaag

SEQ ID NO: 94045 - RNA, 21 nt, Human
aggacagaaguguuuuaacac

SEQ ID NO: 94046 - RNA, 26 nt, Human
aggcagagacagauggagaggggacc

SEQ ID NO: 94047 - RNA, 21 nt, Human
aggcugagucucuuacuucug

SEQ ID NO: 94048 - RNA, 21 nt, Human
agggaggaggucaaaucuauc

SEQ ID NO: 94049 - RNA, 23 nt, Human
aguaucacaaccccuacccuccc

SEQ ID NO: 94050 - RNA, 22 nt, Human
aguggcagcagagaggagggcc

SEQ ID NO: 94051 - RNA, 20 nt, Human
auaaaagcagcauagaaaga

SEQ ID NO: 94052 - RNA, 19 nt, Human
auauauauauauauauaua

SEQ ID NO: 94053 - RNA, 19 nt, Human
auauauauauauauauaua

SEQ ID NO: 94054 - RNA, 19 nt, Human
auauauauauauauauaua

SEQ ID NO: 94055 - RNA, 19 nt, Human
auauauauauauauauaua

SEQ ID NO: 94056 - RNA, 19 nt, Human
auauauauauauauauaua

SEQ ID NO: 94057 - RNA, 19 nt, Human
auauauauauauauauaua

SEQ ID NO: 94058 - RNA, 18 nt, Human
augacaggagcacaugug

SEQ ID NO: 94059 - RNA, 23 nt, Human
augacaggagcacauguggccuu

SEQ ID NO: 94060 - RNA, 22 nt, Human
augugcgugugugugugugugu

SEQ ID NO: 94061 - RNA, 21 nt, Human
caaacaaacaaaaaaaacaac

SEQ ID NO: 94062 - RNA, 27 nt, Human
caaccccuacccuccccuuagcacucc

SEQ ID NO: 94063 - RNA, 20 nt, Human
caagaaaaacaccauuggga

SEQ ID NO: 94064 - RNA, 22 nt, Human
caagaaaaacaccauugggaaa

SEQ ID NO: 94065 - RNA, 23 nt, Human
caagaaaaacaccauugggaaac

SEQ ID NO: 94066 - RNA, 18 nt, Human
caccauugggaaaccuca

SEQ ID NO: 94067 - RNA, 18 nt, Human
cacuccaccucucucugc

SEQ ID NO: 94068 - RNA, 19 nt, Human
cauagaaagauacagguuu

SEQ ID NO: 94069 - RNA, 24 nt, Human
ccacaauaagucauuacgacccgu

SEQ ID NO: 94070 - RNA, 24 nt, Human
ccacacagaaaguggcugucuccu

SEQ ID NO: 94071 - RNA, 24 nt, Human
ccccuacccuccccuuagcacucc

SEQ ID NO: 94072 - RNA, 25 nt, Human
ccccuacccuccccuuagcacucca

SEQ ID NO: 94073 - RNA, 18 nt, Human
cccguuacuggcccucug

SEQ ID NO: 94074 - RNA, 18 nt, Human
ccuccccuuagcacucca

SEQ ID NO: 94075 - RNA, 22 nt, Human
ccuccgacaguucugaguucac

SEQ ID NO: 94076 - RNA, 22 nt, Human
ccucuguguuuuacuaccaccu

SEQ ID NO: 94077 - RNA, 24 nt, Human
cuaccaccucaagauacaguuagg

SEQ ID NO: 94078 - RNA, 18 nt, Human
cucacaggacagaagugu

SEQ ID NO: 94079 - RNA, 20 nt, Human
cugccaggcagagacagaug

SEQ ID NO: 94080 - RNA, 22 nt, Human
cuuccaaucugcugcacaucug

SEQ ID NO: 94081 - RNA, 19 nt, Human
cuugaaaauaacagggagg

SEQ ID NO: 94082 - RNA, 22 nt, Human
cuugaacccagcccugucucuu

SEQ ID NO: 94083 - RNA, 18 nt, Human
gagggccaucagaggggc

SEQ ID NO: 94084 - RNA, 24 nt, Human
gcaaguuucagagcaccaaaaagc

SEQ ID NO: 94085 - RNA, 21 nt, Human
gcaucgccggaggcagggugc

SEQ ID NO: 94086 - RNA, 23 nt, Human
gccauucaucuucuuguuaaaau

SEQ ID NO: 94087 - RNA, 23 nt, Human
gcgugcgccugccaggcagagac

SEQ ID NO: 94088 - RNA, 22 nt, Human
ggaaaaaaaccgaacaucugug

SEQ ID NO: 94089 - RNA, 19 nt, Human
ggcagaacaaugacaggga

SEQ ID NO: 94090 - RNA, 18 nt, Human
ggcaucgccggaggcagg

SEQ ID NO: 94091 - RNA, 23 nt, Human
gggccaucagaggggcuggggcg

SEQ ID NO: 94092 - RNA, 19 nt, Human
guauauauauauauauaua

SEQ ID NO: 94093 - RNA, 19 nt, Human
guauauauauauauauaua

SEQ ID NO: 94094 - RNA, 22 nt, Human
guauauaugugcgugugugugu

SEQ ID NO: 94095 - RNA, 20 nt, Human
guggcagcagagaggagggc

SEQ ID NO: 94096 - RNA, 19 nt, Human
guguauauauauauauaua

SEQ ID NO: 94097 - RNA, 20 nt, Human
guguguauauauauauauau

SEQ ID NO: 94098 - RNA, 21 nt, Human
gugugugugugugugugugug

SEQ ID NO: 94099 - RNA, 21 nt, Human
gugugugugugugugugugug

SEQ ID NO: 94100 - RNA, 21 nt, Human
gugugugugugugugugugug

SEQ ID NO: 94101 - RNA, 21 nt, Human
gugugugugugugugugugug

SEQ ID NO: 94102 - RNA, 21 nt, Human
gugugugugugugugugugug

SEQ ID NO: 94103 - RNA, 20 nt, Human
uaaaagcagcauagaaagau

SEQ ID NO: 94104 - RNA, 21 nt, Human
uaaaaucccagcuacuugaaa

SEQ ID NO: 94105 - RNA, 22 nt, Human
uaaacaaacaaacaaaaaaaac

SEQ ID NO: 94106 - RNA, 24 nt, Human
uaaacaaacaaacaaaaaaaacaa

SEQ ID NO: 94107 - RNA, 20 nt, Human
uaaagagacuaaaugugggc

SEQ ID NO: 94108 - RNA, 24 nt, Human
uaauaaacaaacaaacaaaaaaaa

SEQ ID NO: 94109 - RNA, 25 nt, Human
uacagauauaaaagcagcauagaaa

SEQ ID NO: 94110 - RNA, 19 nt, Human
uacagguuucucaccaacu

SEQ ID NO: 94111 - RNA, 20 nt, Human
uaccacacagaaaguggcug

SEQ ID NO: 94112 - RNA, 22 nt, Human
uagaaagauacagguuucucac

SEQ ID NO: 94113 - RNA, 21 nt, Human
uauaaaaugaaugagcuggaa

SEQ ID NO: 94114 - RNA, 19 nt, Human
uauauauauauauauauau

SEQ ID NO: 94115 - RNA, 19 nt, Human
uauauauauauauauauau

SEQ ID NO: 94116 - RNA, 19 nt, Human
uauauauauauauauauau

SEQ ID NO: 94117 - RNA, 19 nt, Human
uauauauauauauauauau

SEQ ID NO: 94118 - RNA, 19 nt, Human
uaugugcgugugugugugu

SEQ ID NO: 94119 - RNA, 24 nt, Human
uaugugcgugugugugugugugua

SEQ ID NO: 94120 - RNA, 25 nt, Human
ucagaaacaggaaaaaaaccgaaca

SEQ ID NO: 94121 - RNA, 20 nt, Human
ucagaggggcuggggcggca

SEQ ID NO: 94122 - RNA, 24 nt, Human
uccaacacauuuacaagaaaaaca

SEQ ID NO: 94123 - RNA, 20 nt, Human
ucccauugcaaaucaucuuu

SEQ ID NO: 94124 - RNA, 28 nt, Human
ucucuuuaggcagaacaaugacagggau

SEQ ID NO: 94125 - RNA, 21 nt, Human
ucugcucucuuuucaguucuc

SEQ ID NO: 94126 - RNA, 18 nt, Human
ucuugguuugcuguuugg

SEQ ID NO: 94127 - RNA, 24 nt, Human
ucuuuaggcagaacaaugacaggg

SEQ ID NO: 94128 - RNA, 19 nt, Human
ugcgccugccaggcagaga

SEQ ID NO: 94129 - RNA, 24 nt, Human
ugcguguguguguguguguauaua

SEQ ID NO: 94130 - RNA, 22 nt, Human
uggaaugaguggcagcagagag

SEQ ID NO: 94131 - RNA, 19 nt, Human
uguauauaaagaacauugu

SEQ ID NO: 94132 - RNA, 18 nt, Human
uguauauauauauauaua

SEQ ID NO: 94133 - RNA, 22 nt, Human
uguauauauauauauauauaua

SEQ ID NO: 94134 - RNA, 19 nt, Human
ugucaaaacugccagaaug

SEQ ID NO: 94135 - RNA, 20 nt, Human
ugugcgugugugugugugug

SEQ ID NO: 94136 - RNA, 18 nt, Human
uguguauauauauauaua

SEQ ID NO: 94137 - RNA, 20 nt, Human
uguguauauauauauauaua

SEQ ID NO: 94138 - RNA, 20 nt, Human
uguguauauauauauauaua

SEQ ID NO: 94139 - RNA, 22 nt, Human
uguguauauauauauauauaua

SEQ ID NO: 94140 - RNA, 24 nt, Human
uguguauauaugugcgugugugug

SEQ ID NO: 94141 - RNA, 19 nt, Human
uguguguauauaugugcgu

SEQ ID NO: 94142 - RNA, 18 nt, Human
uguguguguauauauaua

SEQ ID NO: 94143 - RNA, 18 nt, Human
uguguguguauauaugug

SEQ ID NO: 94144 - RNA, 23 nt, Human
uguguguguauauaugugcgugu

SEQ ID NO: 94145 - RNA, 26 nt, Human
uguguguguguauauauauauaaugu

SEQ ID NO: 94146 - RNA, 23 nt, Human
uguguguguguauauauauauau

SEQ ID NO: 94147 - RNA, 21 nt, Human
uguguguguguauauaugugc

SEQ ID NO: 94148 - RNA, 23 nt, Human
uguguguguguauauaugugcgu

SEQ ID NO: 94149 - RNA, 18 nt, Human
uguguguguguguauaua

SEQ ID NO: 94150 - RNA, 23 nt, Human
uguguguguguguauauauauau

SEQ ID NO: 94151 - RNA, 21 nt, Human
uguguguguguguauauaugu

SEQ ID NO: 94152 - RNA, 18 nt, Human
uguguguguguguguaua

SEQ ID NO: 94153 - RNA, 20 nt, Human
uguguguguguguguauaua

SEQ ID NO: 94154 - RNA, 21 nt, Human
uguguguguguguguauauaa

SEQ ID NO: 94155 - RNA, 31 nt, Human
uguguguguguguguguauauaugugcgugg

SEQ ID NO: 94156 - RNA, 18 nt, Human
ugugugugugugugugug

SEQ ID NO: 94157 - RNA, 18 nt, Human
ugugugugugugugugug

SEQ ID NO: 94158 - RNA, 18 nt, Human
ugugugugugugugugug

SEQ ID NO: 94159 - RNA, 18 nt, Human
ugugugugugugugugug

SEQ ID NO: 94160 - RNA, 18 nt, Human
ugugugugugugugugug

SEQ ID NO: 94161 - RNA, 18 nt, Human
ugugugugugugugugug

SEQ ID NO: 94162 - RNA, 18 nt, Human
ugugugugugugugugug

SEQ ID NO: 94163 - RNA, 18 nt, Human
ugugugugugugugugug

SEQ ID NO: 94164 - RNA, 18 nt, Human
ugugugugugugugugug

SEQ ID NO: 94165 - RNA, 18 nt, Human
ugugugugugugugugug

SEQ ID NO: 94166 - RNA, 18 nt, Human
ugugugugugugugugug

SEQ ID NO: 94167 - RNA, 18 nt, Human
ugugugugugugugugug

SEQ ID NO: 94168 - RNA, 18 nt, Human
ugugugugugugugugug

SEQ ID NO: 94169 - RNA, 18 nt, Human
ugugugugugugugugug

SEQ ID NO: 94170 - RNA, 18 nt, Human
ugugugugugugugugug

SEQ ID NO: 94171 - RNA, 24 nt, Human
uguguguguguguguguguauaua

SEQ ID NO: 94172 - RNA, 20 nt, Human
ugugugugugugugugugug

SEQ ID NO: 94173 - RNA, 22 nt, Human
ugugugugugugugugugugag

SEQ ID NO: 94174 - RNA, 21 nt, Human
ugugugugugugugugugugu

SEQ ID NO: 94175 - RNA, 21 nt, Human
ugugugugugugugugugugu

SEQ ID NO: 94176 - RNA, 21 nt, Human
ugugugugugugugugugugu

SEQ ID NO: 94177 - RNA, 21 nt, Human
ugugugugugugugugugugu

SEQ ID NO: 94178 - RNA, 21 nt, Human
ugugugugugugugugugugu

SEQ ID NO: 94179 - RNA, 21 nt, Human
ugugugugugugugugugugu

SEQ ID NO: 94180 - RNA, 21 nt, Human
ugugugugugugugugugugu

SEQ ID NO: 94181 - RNA, 21 nt, Human
ugugugugugugugugugugu

SEQ ID NO: 94182 - RNA, 21 nt, Human
ugugugugugugugugugugu

SEQ ID NO: 94183 - RNA, 21 nt, Human
ugugugugugugugugugugu

SEQ ID NO: 94184 - RNA, 21 nt, Human
ugugugugugugugugugugu

SEQ ID NO: 94185 - RNA, 21 nt, Human
ugugugugugugugugugugu

SEQ ID NO: 94186 - RNA, 21 nt, Human
ugugugugugugugugugugu

SEQ ID NO: 94187 - RNA, 21 nt, Human
ugugugugugugugugugugu

SEQ ID NO: 94188 - RNA, 21 nt, Human
ugugugugugugugugugugu

SEQ ID NO: 94189 - RNA, 21 nt, Human
ugugugugugugugugugugu

SEQ ID NO: 94190 - RNA, 21 nt, Human
ugugugugugugugugugugu

SEQ ID NO: 94191 - RNA, 21 nt, Human
ugugugugugugugugugugu

SEQ ID NO: 94192 - RNA, 21 nt, Human
ugugugugugugugugugugu

SEQ ID NO: 94193 - RNA, 21 nt, Human
ugugugugugugugugugugu

SEQ ID NO: 94194 - RNA, 21 nt, Human
ugugugugugugugugugugu

SEQ ID NO: 94195 - RNA, 21 nt, Human
ugugugugugugugugugugu

SEQ ID NO: 94196 - RNA, 21 nt, Human
ugugugugugugugugugugu

SEQ ID NO: 94197 - RNA, 21 nt, Human
ugugugugugugugugugugu

SEQ ID NO: 94198 - RNA, 21 nt, Human
ugugugugugugugugugugu

SEQ ID NO: 94199 - RNA, 21 nt, Human
ugugugugugugugugugugu

SEQ ID NO: 94200 - RNA, 21 nt, Human
ugugugugugugugugugugu

SEQ ID NO: 94201 - RNA, 22 nt, Human
ugugugugugugugugugugua

SEQ ID NO: 94202 - RNA, 22 nt, Human
ugugugugugugugugugugug

SEQ ID NO: 94203 - RNA, 22 nt, Human
ugugugugugugugugugugug

SEQ ID NO: 94204 - RNA, 22 nt, Human
ugugugugugugugugugugug

SEQ ID NO: 94205 - RNA, 22 nt, Human
ugugugugugugugugugugug

SEQ ID NO: 94206 - RNA, 22 nt, Human
ugugugugugugugugugugug

SEQ ID NO: 94207 - RNA, 22 nt, Human
ugugugugugugugugugugug

SEQ ID NO: 94208 - RNA, 22 nt, Human
ugugugugugugugugugugug

SEQ ID NO: 94209 - RNA, 22 nt, Human
ugugugugugugugugugugug

SEQ ID NO: 94210 - RNA, 21 nt, Human
uucagaaacaggaaaaaaacc

SEQ ID NO: 94211 - RNA, 24 nt, Human
uucuuuucagaaacaggaaaaaaa

SEQ ID NO: 94212 - RNA, 23 nt, Human
uugaaaaauuuuggaaaggggcu

SEQ ID NO: 94213 - RNA, 24 nt, Human
uuucgcguugguuguguugucuuu

SEQ ID NO: 94214 - RNA, 21 nt, Human
aaaaagacagggaagaaugug

SEQ ID NO: 94215 - RNA, 19 nt, Human
aaacaaaacccaaaaagac

SEQ ID NO: 94216 - RNA, 25 nt, Human
aaacaaacaaaauaacaauaaaaaa

SEQ ID NO: 94217 - RNA, 21 nt, Human
aaacgaaacugucacagcaac

SEQ ID NO: 94218 - RNA, 20 nt, Human
aaacugucacagcaaccaca

SEQ ID NO: 94219 - RNA, 23 nt, Human
aaagacgugaaacccagcccuca

SEQ ID NO: 94220 - RNA, 18 nt, Human
aaagcacagaaaaaccag

SEQ ID NO: 94221 - RNA, 23 nt, Human
aaagcacagaaaaaccagauucu

SEQ ID NO: 94222 - RNA, 18 nt, Human
aaaguaaagcauggguuu

SEQ ID NO: 94223 - RNA, 21 nt, Human
aacaaaaaacaaaacccaaaa

SEQ ID NO: 94224 - RNA, 23 nt, Human
aacaaaaaacaaaacccaaaaag

SEQ ID NO: 94225 - RNA, 21 nt, Human
aacaaacaaacaaacaaaaua

SEQ ID NO: 94226 - RNA, 26 nt, Human
aacaaacaaacaaacaaaauaacaau

SEQ ID NO: 94227 - RNA, 27 nt, Human
aacaacaaaaaacaaaacccaaaaagg

SEQ ID NO: 94228 - RNA, 26 nt, Human
aacaacaacaaaaaacaaaacccaaa

SEQ ID NO: 94229 - RNA, 20 nt, Human
aacaaggagaaaccccgucu

SEQ ID NO: 94230 - RNA, 21 nt, Human
aacaaggagaaaccccgucuc

SEQ ID NO: 94231 - RNA, 25 nt, Human
aaccacaacaacaacaaaaaacaaa

SEQ ID NO: 94232 - RNA, 18 nt, Human
aagcaggcugaauuucca

SEQ ID NO: 94233 - RNA, 24 nt, Human
aagcaggcugaauuuccacucccc

SEQ ID NO: 94234 - RNA, 21 nt, Human
aagcuaggaagaaaaauugau

SEQ ID NO: 94235 - RNA, 25 nt, Human
aaggaacaugauucucugcuguugu

SEQ ID NO: 94236 - RNA, 19 nt, Human
acaaaacccaaaaagacag

SEQ ID NO: 94237 - RNA, 22 nt, Human
acaacaacaaaaaacaaaaccc

SEQ ID NO: 94238 - RNA, 22 nt, Human
acaacaacaacaaaaaacaaaa

SEQ ID NO: 94239 - RNA, 26 nt, Human
acagagaggcugugggguguuauuau

SEQ ID NO: 94240 - RNA, 18 nt, Human
acaggucccaaacuaaag

SEQ ID NO: 94241 - RNA, 23 nt, Human
accaaccugcacagcacauccag

SEQ ID NO: 94242 - RNA, 26 nt, Human
accacaacaacaacaaaaaacaaaac

SEQ ID NO: 94243 - RNA, 23 nt, Human
accacagcccacaagagcaggcc

SEQ ID NO: 94244 - RNA, 24 nt, Human
accccgucuccacuaaaaauacaa

SEQ ID NO: 94245 - RNA, 22 nt, Human
accugcacagcacauccagcag

SEQ ID NO: 94246 - RNA, 21 nt, Human
acuccagccugggagacaaga

SEQ ID NO: 94247 - RNA, 28 nt, Human
acucccgucucaaaacaaacaaacaaac

SEQ ID NO: 94248 - RNA, 20 nt, Human
acugcaaauaugaacuguag

SEQ ID NO: 94249 - RNA, 18 nt, Human
acugcccagguuugcaga

SEQ ID NO: 94250 - RNA, 18 nt, Human
agaacuacagacacucca

SEQ ID NO: 94251 - RNA, 21 nt, Human
agaagaugcccacagcguucc

SEQ ID NO: 94252 - RNA, 20 nt, Human
agaauggcacacuggcuccg

SEQ ID NO: 94253 - RNA, 22 nt, Human
agagguuaccgugagccgagau

SEQ ID NO: 94254 - RNA, 24 nt, Human
agagguuaccgugagccgagauug

SEQ ID NO: 94255 - RNA, 19 nt, Human
agauggggaggggagcugg

SEQ ID NO: 94256 - RNA, 21 nt, Human
agauggggaggggagcuggug

SEQ ID NO: 94257 - RNA, 19 nt, Human
agcagccaucaggguaagc

SEQ ID NO: 94258 - RNA, 20 nt, Human
agcguuccagaugugugugg

SEQ ID NO: 94259 - RNA, 24 nt, Human
agcugcagggccccccagugugga

SEQ ID NO: 94260 - RNA, 24 nt, Human
aggagauggggaggggagcuggga

SEQ ID NO: 94261 - RNA, 19 nt, Human
aggaggcagauggggucgg

SEQ ID NO: 94262 - RNA, 21 nt, Human
aggcaaguggggacaaaaagg

SEQ ID NO: 94263 - RNA, 24 nt, Human
aggcagagguuaccgugagccgag

SEQ ID NO: 94264 - RNA, 22 nt, Human
aggcagcucaggcuggcugccc

SEQ ID NO: 94265 - RNA, 22 nt, Human
aggcaggagacucgcccgaacc

SEQ ID NO: 94266 - RNA, 24 nt, Human
aggcaggagacucgcccgaaccug

SEQ ID NO: 94267 - RNA, 22 nt, Human
aggcagguagucaacguuuugg

SEQ ID NO: 94268 - RNA, 21 nt, Human
aggccaagguggggggaucac

SEQ ID NO: 94269 - RNA, 20 nt, Human
aggcugaggcaggagacucg

SEQ ID NO: 94270 - RNA, 20 nt, Human
agggaagaaugugggaggca

SEQ ID NO: 94271 - RNA, 23 nt, Human
agguggggggaucaccugagguc

SEQ ID NO: 94272 - RNA, 21 nt, Human
aguggcucaugccuguaaucc

SEQ ID NO: 94273 - RNA, 21 nt, Human
aguggcucaugccuguaaucc

SEQ ID NO: 94274 - RNA, 24 nt, Human
aguggcucaugccuguaauccugg

SEQ ID NO: 94275 - RNA, 23 nt, Human
aguugggcgugguggcgcaugcc

SEQ ID NO: 94276 - RNA, 25 nt, Human
aucuacgcaaucggugaccccacca

SEQ ID NO: 94277 - RNA, 21 nt, Human
augcauucugugggugguguc

SEQ ID NO: 94278 - RNA, 19 nt, Human
augccuguaauccuggcac

SEQ ID NO: 94279 - RNA, 23 nt, Human
auggagcccaugggcagaagaug

SEQ ID NO: 94280 - RNA, 18 nt, Human
auugcacuccagccuggg

SEQ ID NO: 94281 - RNA, 21 nt, Human
auugcacuccagccugggaga

SEQ ID NO: 94282 - RNA, 24 nt, Human
auugcgcgauugcacuccagccug

SEQ ID NO: 94283 - RNA, 19 nt, Human
caaaaucaguugggcgugg

SEQ ID NO: 94284 - RNA, 24 nt, Human
caacaaaaaacaaaacccaaaaag

SEQ ID NO: 94285 - RNA, 23 nt, Human
caacaacaacaaaaaacaaaacc

SEQ ID NO: 94286 - RNA, 23 nt, Human
caacaacaacaaaaaacaaaacc

SEQ ID NO: 94287 - RNA, 21 nt, Human
caaccugcacagcacauccag

SEQ ID NO: 94288 - RNA, 24 nt, Human
caacugagccucauucucucucag

SEQ ID NO: 94289 - RNA, 21 nt, Human
caaggagaaaccccgucucca

SEQ ID NO: 94290 - RNA, 19 nt, Human
caagguagggauggggcug

SEQ ID NO: 94291 - RNA, 24 nt, Human
caagguggggggaucaccugaggu

SEQ ID NO: 94292 - RNA, 25 nt, Human
cacagcaaccacagcccacaagagc

SEQ ID NO: 94293 - RNA, 26 nt, Human
caccaaaccuaagccuuaaccacaga

SEQ ID NO: 94294 - RNA, 21 nt, Human
cacccuagacaugucuggcug

SEQ ID NO: 94295 - RNA, 23 nt, Human
cagaaaacgaaacugucacagca

SEQ ID NO: 94296 - RNA, 29 nt, Human
cagaaaacgaaacugucacagcaaccacu

SEQ ID NO: 94297 - RNA, 26 nt, Human
cagaagaugcccacagcguuccagau

SEQ ID NO: 94298 - RNA, 23 nt, Human
cagacuauccacaacugagccuc

SEQ ID NO: 94299 - RNA, 20 nt, Human
cagagaaaacagacuaucca

SEQ ID NO: 94300 - RNA, 24 nt, Human
cagaguuuugcucuguugcccagg

SEQ ID NO: 94301 - RNA, 21 nt, Human
cagcagaagguuugcaaacug

SEQ ID NO: 94302 - RNA, 19 nt, Human
cagccaaggccaggugugg

SEQ ID NO: 94303 - RNA, 18 nt, Human
cagccucugggcagcacg

SEQ ID NO: 94304 - RNA, 24 nt, Human
cagcuacucagaaggcugaggcag

SEQ ID NO: 94305 - RNA, 24 nt, Human
caguguggagugcccccaccuccc

SEQ ID NO: 94306 - RNA, 24 nt, Human
caguucugaagaaagccuccaaga

SEQ ID NO: 94307 - RNA, 18 nt, Human
caucccccuuuaaaaacc

SEQ ID NO: 94308 - RNA, 19 nt, Human
caugaaaaacuaguaagcu

SEQ ID NO: 94309 - RNA, 20 nt, Human
caugccuguaauccuggcac

SEQ ID NO: 94310 - RNA, 24 nt, Human
caugccuguaauccuggcacuuug

SEQ ID NO: 94311 - RNA, 18 nt, Human
ccaaaaagacagggaaga

SEQ ID NO: 94312 - RNA, 21 nt, Human
ccaaaugggcaaaggaaaucc

SEQ ID NO: 94313 - RNA, 22 nt, Human
ccaacagacaccagcgcacaug

SEQ ID NO: 94314 - RNA, 23 nt, Human
ccaaccugcacagcacauccagc

SEQ ID NO: 94315 - RNA, 24 nt, Human
ccacaacaacaacaaaaaacaaaa

SEQ ID NO: 94316 - RNA, 19 nt, Human
ccagcccuggagcugcagg

SEQ ID NO: 94317 - RNA, 22 nt, Human
ccaugccagcuccucuuugccu

SEQ ID NO: 94318 - RNA, 20 nt, Human
ccauggaggaggcagcucag

SEQ ID NO: 94319 - RNA, 19 nt, Human
cccaauggugcuccuccuc

SEQ ID NO: 94320 - RNA, 23 nt, Human
cccacggucacccaaccgugccu

SEQ ID NO: 94321 - RNA, 18 nt, Human
ccccaccgcaaucugggc

SEQ ID NO: 94322 - RNA, 22 nt, Human
ccccgccccaauggugcuccuc

SEQ ID NO: 94323 - RNA, 19 nt, Human
ccgcagacagcaagugcac

SEQ ID NO: 94324 - RNA, 21 nt, Human
ccgccccucaggccuccuaac

SEQ ID NO: 94325 - RNA, 18 nt, Human
ccgccugccgccuccagc

SEQ ID NO: 94326 - RNA, 20 nt, Human
ccgcucccugaccgaggggc

SEQ ID NO: 94327 - RNA, 23 nt, Human
ccugaccaacaaggagaaacccc

SEQ ID NO: 94328 - RNA, 24 nt, Human
ccugaccaacaaggagaaaccccg

SEQ ID NO: 94329 - RNA, 21 nt, Human
ccugcaaucccagcuacucag

SEQ ID NO: 94330 - RNA, 23 nt, Human
ccugcacagcacauccagcagga

SEQ ID NO: 94331 - RNA, 23 nt, Human
ccugcggagccgcuggcacagcc

SEQ ID NO: 94332 - RNA, 19 nt, Human
ccugcugccugccgccugc

SEQ ID NO: 94333 - RNA, 24 nt, Human
ccuggcugagcacauuggacaguc

SEQ ID NO: 94334 - RNA, 25 nt, Human
ccugggaggcagagguuaccgugag

SEQ ID NO: 94335 - RNA, 22 nt, Human
ccuguaauccuggcacuuuggg

SEQ ID NO: 94336 - RNA, 23 nt, Human
ccuuccccacuggaugagucagg

SEQ ID NO: 94337 - RNA, 19 nt, Human
ccuucuguaccaccaugcc

SEQ ID NO: 94338 - RNA, 24 nt, Human
cgauugcacuccagccugggagac

SEQ ID NO: 94339 - RNA, 18 nt, Human
cgccugccgccuccagcc

SEQ ID NO: 94340 - RNA, 23 nt, Human
cggagccgcuggcacagccccca

SEQ ID NO: 94341 - RNA, 24 nt, Human
cuaguucaguucugaagaaagccu

SEQ ID NO: 94342 - RNA, 24 nt, Human
cucaugccuguaauccuggcacuu

SEQ ID NO: 94343 - RNA, 20 nt, Human
cuccagaguuggaagggccc

SEQ ID NO: 94344 - RNA, 21 nt, Human
cucccugaccgaggggccucc

SEQ ID NO: 94345 - RNA, 19 nt, Human
cugaauuuccacuccccac

SEQ ID NO: 94346 - RNA, 19 nt, Human
cugaccaacaaggagaaac

SEQ ID NO: 94347 - RNA, 20 nt, Human
cugacucaaggagaugggga

SEQ ID NO: 94348 - RNA, 25 nt, Human
cugcagggccccccagucgaccggu

SEQ ID NO: 94349 - RNA, 18 nt, Human
cugcauuuccaagagaug

SEQ ID NO: 94350 - RNA, 21 nt, Human
cugcugccugccgccugccgc

SEQ ID NO: 94351 - RNA, 19 nt, Human
cugcuucucugccgacucc

SEQ ID NO: 94352 - RNA, 22 nt, Human
cuggcacuuugggaggccaagg

SEQ ID NO: 94353 - RNA, 19 nt, Human
cuggucucacccuagacau

SEQ ID NO: 94354 - RNA, 24 nt, Human
cuucguuuucuauuuauuuacauu

SEQ ID NO: 94355 - RNA, 19 nt, Human
gaaaaaaaacaggucccaa

SEQ ID NO: 94356 - RNA, 23 nt, Human
gaaagggauucuugaaaugugaa

SEQ ID NO: 94357 - RNA, 22 nt, Human
gaaguugguuuggucuacugac

SEQ ID NO: 94358 - RNA, 23 nt, Human
gacaagcaaagacgugaaaccca

SEQ ID NO: 94359 - RNA, 23 nt, Human
gacacaguggcucaugccuguaa

SEQ ID NO: 94360 - RNA, 18 nt, Human
gagaaaaaaaacaggucc

SEQ ID NO: 94361 - RNA, 21 nt, Human
gagaaaccccgucuccacuaa

SEQ ID NO: 94362 - RNA, 19 nt, Human
gagacagccaugucucaug

SEQ ID NO: 94363 - RNA, 21 nt, Human
gagauggggaggggagcuggu

SEQ ID NO: 94364 - RNA, 23 nt, Human
gagauugcgcgauugcacuccag

SEQ ID NO: 94365 - RNA, 19 nt, Human
gagcgggcagcagccaagg

SEQ ID NO: 94366 - RNA, 24 nt, Human
gagcucacuaccguacaauuccag

SEQ ID NO: 94367 - RNA, 24 nt, Human
gaucaccugagguccgggguuuga

SEQ ID NO: 94368 - RNA, 24 nt, Human
gauugcacuccagccugggagaca

SEQ ID NO: 94369 - RNA, 25 nt, Human
gauugcacuccagccugggagacaa

SEQ ID NO: 94370 - RNA, 20 nt, Human
gcacuuugggaggccaaggu

SEQ ID NO: 94371 - RNA, 23 nt, Human
gcacuuugggaggccaagguggg

SEQ ID NO: 94372 - RNA, 19 nt, Human
gcagaagaugcccacagcg

SEQ ID NO: 94373 - RNA, 21 nt, Human
gcagacagcaagugcacagag

SEQ ID NO: 94374 - RNA, 22 nt, Human
gcagaucagccucugggcagca

SEQ ID NO: 94375 - RNA, 22 nt, Human
gcccacaagagcaggccaggcu

SEQ ID NO: 94376 - RNA, 21 nt, Human
gcccuggagcugcagggcccc

SEQ ID NO: 94377 - RNA, 21 nt, Human
gccgccuccagccuggcugag

SEQ ID NO: 94378 - RNA, 21 nt, Human
gccucuuggcgcagcagcccu

SEQ ID NO: 94379 - RNA, 22 nt, Human
gcugcagggccccccagugugg

SEQ ID NO: 94380 - RNA, 20 nt, Human
ggacaaaaaggacaagcaaa

SEQ ID NO: 94381 - RNA, 21 nt, Human
ggagauggggaggggagcugg

SEQ ID NO: 94382 - RNA, 22 nt, Human
ggaucaccugagguccgggguu

SEQ ID NO: 94383 - RNA, 22 nt, Human
ggcaagauguguccuguuucca

SEQ ID NO: 94384 - RNA, 23 nt, Human
ggcgugguggcgcaugccugcaa

SEQ ID NO: 94385 - RNA, 20 nt, Human
gggaagaaugugggaggcag

SEQ ID NO: 94386 - RNA, 22 nt, Human
gggacaucuggcaucuuugguc

SEQ ID NO: 94387 - RNA, 24 nt, Human
gggaucaccugagguccgggguuu

SEQ ID NO: 94388 - RNA, 18 nt, Human
gggcagcacgagcagggu

SEQ ID NO: 94389 - RNA, 24 nt, Human
gggcagcagccaaggccaggugug

SEQ ID NO: 94390 - RNA, 23 nt, Human
gggcugcucucgacagcuggcca

SEQ ID NO: 94391 - RNA, 26 nt, Human
gggugcuuuuauugcaacagugacuc

SEQ ID NO: 94392 - RNA, 19 nt, Human
gguccgggguuugagacca

SEQ ID NO: 94393 - RNA, 18 nt, Human
ggugcaggcaagugggga

SEQ ID NO: 94394 - RNA, 24 nt, Human
gguggcgcaugccugcaaucccag

SEQ ID NO: 94395 - RNA, 20 nt, Human
guggagugcccccaccuccc

SEQ ID NO: 94396 - RNA, 19 nt, Human
guggggggaucaccugagg

SEQ ID NO: 94397 - RNA, 18 nt, Human
guuugguucagacacgcu

SEQ ID NO: 94398 - RNA, 21 nt, Human
uaaaaaaccacaacaacaaca

SEQ ID NO: 94399 - RNA, 23 nt, Human
uaaaaaaccacaacaacaacaaa

SEQ ID NO: 94400 - RNA, 25 nt, Human
uaaaaaaccacaacaacaacaaaaa

SEQ ID NO: 94401 - RNA, 22 nt, Human
uaaaaaccugcucaagaccgga

SEQ ID NO: 94402 - RNA, 19 nt, Human
uaaaaauacaaaaucaguu

SEQ ID NO: 94403 - RNA, 22 nt, Human
uaaaagcaugagcuacccuggc

SEQ ID NO: 94404 - RNA, 21 nt, Human
uaagccuuaaccacagaaaug

SEQ ID NO: 94405 - RNA, 19 nt, Human
uaagcuguuguaauggcuc

SEQ ID NO: 94406 - RNA, 20 nt, Human
uagaguuccccaccaaggac

SEQ ID NO: 94407 - RNA, 25 nt, Human
uagauauaaugaccuguaacuauga

SEQ ID NO: 94408 - RNA, 20 nt, Human
uagcugccuaccccgcccca

SEQ ID NO: 94409 - RNA, 20 nt, Human
uaucaagucugaacagcagg

SEQ ID NO: 94410 - RNA, 24 nt, Human
uauucaauucuacaguuuccagga

SEQ ID NO: 94411 - RNA, 18 nt, Human
ucacagcaaccacagccc

SEQ ID NO: 94412 - RNA, 18 nt, Human
ucagcagaggcugggaac

SEQ ID NO: 94413 - RNA, 23 nt, Human
ucagugauuuauucaauucuaca

SEQ ID NO: 94414 - RNA, 18 nt, Human
ucagugucaucugcugag

SEQ ID NO: 94415 - RNA, 18 nt, Human
ucaguugggcgugguggc

SEQ ID NO: 94416 - RNA, 24 nt, Human
ucaguugggcgugguggcgcaugc

SEQ ID NO: 94417 - RNA, 26 nt, Human
uccaaccaguaaaagcaugagcuacc

SEQ ID NO: 94418 - RNA, 20 nt, Human
ucccucagcccaagcacucu

SEQ ID NO: 94419 - RNA, 24 nt, Human
ucccucagcccaagcacucuguca

SEQ ID NO: 94420 - RNA, 20 nt, Human
uccgcagacagcaagugcac

SEQ ID NO: 94421 - RNA, 20 nt, Human
uccuccacagccugcugccu

SEQ ID NO: 94422 - RNA, 22 nt, Human
ucuaacccagcacugcccuaga

SEQ ID NO: 94423 - RNA, 26 nt, Human
ucugcaaacagcuuaaaaaaaaaaaa

SEQ ID NO: 94424 - RNA, 18 nt, Human
ucugccgacuccaaggua

SEQ ID NO: 94425 - RNA, 21 nt, Human
ucuggggacaucuggcaucuu

SEQ ID NO: 94426 - RNA, 19 nt, Human
ugaaaaacuaguaagcugu

SEQ ID NO: 94427 - RNA, 24 nt, Human
ugacaaagcacagaaaaaccagau

SEQ ID NO: 94428 - RNA, 21 nt, Human
ugaccagagaguuggagaauu

SEQ ID NO: 94429 - RNA, 20 nt, Human
ugacccggcagcuacaugcc

SEQ ID NO: 94430 - RNA, 23 nt, Human
ugaccgaggggccuccuccacag

SEQ ID NO: 94431 - RNA, 18 nt, Human
ugaccugggagccuggaa

SEQ ID NO: 94432 - RNA, 21 nt, Human
ugacuucuuuccuguggacuc

SEQ ID NO: 94433 - RNA, 22 nt, Human
ugagacagaguuuugcucuguu

SEQ ID NO: 94434 - RNA, 21 nt, Human
ugagaccagccugaccaacaa

SEQ ID NO: 94435 - RNA, 24 nt, Human
ugagaccagccugaccaacaagga

SEQ ID NO: 94436 - RNA, 22 nt, Human
ugagaccaggccuugacagugg

SEQ ID NO: 94437 - RNA, 20 nt, Human
ugagagauaaaaggacacag

SEQ ID NO: 94438 - RNA, 22 nt, Human
ugagccgagauugcgcgauugc

SEQ ID NO: 94439 - RNA, 24 nt, Human
ugaggcaggagacucgcccgaacc

SEQ ID NO: 94440 - RNA, 19 nt, Human
ugagguccaggagggcuuu

SEQ ID NO: 94441 - RNA, 23 nt, Human
ugcaaauguggcccuguccgggg

SEQ ID NO: 94442 - RNA, 20 nt, Human
ugcacuccagccugggagac

SEQ ID NO: 94443 - RNA, 19 nt, Human
ugcagagagcgggcagcag

SEQ ID NO: 94444 - RNA, 22 nt, Human
ugcagagagcgggcagcagcca

SEQ ID NO: 94445 - RNA, 24 nt, Human
ugccugcaaucccagcuacucaga

SEQ ID NO: 94446 - RNA, 23 nt, Human
ugccuguaauccuggcacuuugg

SEQ ID NO: 94447 - RNA, 25 nt, Human
ugcucagagaaaacagacuauccac

SEQ ID NO: 94448 - RNA, 23 nt, Human
ugcucuguugcccaggcuuugug

SEQ ID NO: 94449 - RNA, 22 nt, Human
ugcugucagcagaggcugggaa

SEQ ID NO: 94450 - RNA, 24 nt, Human
uggcacuuugggaggccaaggugg

SEQ ID NO: 94451 - RNA, 19 nt, Human
uggcucaugccuguaaucc

SEQ ID NO: 94452 - RNA, 24 nt, Human
uggcucaugccuguaauccuggca

SEQ ID NO: 94453 - RNA, 24 nt, Human
ugggaggccaagguggggggauca

SEQ ID NO: 94454 - RNA, 20 nt, Human
ugggcagaggcccucgugac

SEQ ID NO: 94455 - RNA, 19 nt, Human
uggggaggggagcuggugg

SEQ ID NO: 94456 - RNA, 24 nt, Human
ugguggcgcaugccugcaauccca

SEQ ID NO: 94457 - RNA, 21 nt, Human
ugucaaguugacacuaagcag

SEQ ID NO: 94458 - RNA, 22 nt, Human
ugucacagcaaccacagcccac

SEQ ID NO: 94459 - RNA, 22 nt, Human
uguccccaacagacaccagcgc

SEQ ID NO: 94460 - RNA, 27 nt, Human
ugugaccugugagacagccaugucuca

SEQ ID NO: 94461 - RNA, 24 nt, Human
uguggcccuguccgggguacugac

SEQ ID NO: 94462 - RNA, 22 nt, Human
ugugggggaaguuuuauuuguu

SEQ ID NO: 94463 - RNA, 20 nt, Human
uguguuaaaaaaccacaaca

SEQ ID NO: 94464 - RNA, 21 nt, Human
uuagaguaaauuagggacuug

SEQ ID NO: 94465 - RNA, 18 nt, Human
uuccaagagaugauccac

SEQ ID NO: 94466 - RNA, 18 nt, Human
uuccuuggcggguggugc

SEQ ID NO: 94467 - RNA, 24 nt, Human
uuccuuggcggguggugcugagca

SEQ ID NO: 94468 - RNA, 21 nt, Human
uugacacuaagcagugaugaa

SEQ ID NO: 94469 - RNA, 19 nt, Human
uugacagugggggcaaguc

SEQ ID NO: 94470 - RNA, 19 nt, Human
uugcucuguugcccaggcu

SEQ ID NO: 94471 - RNA, 24 nt, Human
uuuaaguagaacaaacuaaauaca

SEQ ID NO: 94472 - RNA, 20 nt, Human
uuuggucuucucuggucccu

SEQ ID NO: 94473 - RNA, 19 nt, Human
uuuugcucuguugcccagg

SEQ ID NO: 94474 - RNA, 24 nt, Human
uuuugcucuguugcccaggcuuug

SEQ ID NO: 94475 - RNA, 25 nt, Human
uuuugcucuguugcccaggcuuugu

SEQ ID NO: 94476 - RNA, 18 nt, Human
aaagaggaggggcugggc

SEQ ID NO: 94477 - RNA, 19 nt, Human
aacaaaagucgcuucuaac

SEQ ID NO: 94478 - RNA, 22 nt, Human
aagcagucgagaaucaacccaa

SEQ ID NO: 94479 - RNA, 22 nt, Human
acacaaaaccccccaaaauucu

SEQ ID NO: 94480 - RNA, 29 nt, Human
acagaagagaaaaagacccacauccaaaa

SEQ ID NO: 94481 - RNA, 22 nt, Human
acagacagagaggaaaagagag

SEQ ID NO: 94482 - RNA, 24 nt, Human
acagagggggagagacagacagag

SEQ ID NO: 94483 - RNA, 25 nt, Human
acagagggggagagacagacagaga

SEQ ID NO: 94484 - RNA, 23 nt, Human
acagcuggguucagaucuccagc

SEQ ID NO: 94485 - RNA, 21 nt, Human
acauuacaggaaaaaaaaauc

SEQ ID NO: 94486 - RNA, 22 nt, Human
acccaaaagauugucacaguuu

SEQ ID NO: 94487 - RNA, 22 nt, Human
acccaaauaucccgacacccac

SEQ ID NO: 94488 - RNA, 26 nt, Human
acccacaaacaaaaucagaggaaagc

SEQ ID NO: 94489 - RNA, 21 nt, Human
acccacauccaaacaaaccca

SEQ ID NO: 94490 - RNA, 20 nt, Human
acgggccacaccacgcacac

SEQ ID NO: 94491 - RNA, 25 nt, Human
agacagagaggaaaagagagguggg

SEQ ID NO: 94492 - RNA, 19 nt, Human
agagagagagaggauagag

SEQ ID NO: 94493 - RNA, 24 nt, Human
agcaagguaguucacaaguaugcu

SEQ ID NO: 94494 - RNA, 23 nt, Human
agcaagugaaacagugaaaaaaa

SEQ ID NO: 94495 - RNA, 20 nt, Human
agcacuuuuuuuccacaagu

SEQ ID NO: 94496 - RNA, 22 nt, Human
agcaugaauuucuuuaucccuu

SEQ ID NO: 94497 - RNA, 24 nt, Human
agcugggugggguuggcacggugc

SEQ ID NO: 94498 - RNA, 25 nt, Human
aggaaaaaaaaaucugaaaccaaaa

SEQ ID NO: 94499 - RNA, 22 nt, Human
aggccaggcaucggaggccagg

SEQ ID NO: 94500 - RNA, 18 nt, Human
agguagaggaggacgggc

SEQ ID NO: 94501 - RNA, 28 nt, Human
aucagaacagaagagaaaaagacccaca

SEQ ID NO: 94502 - RNA, 22 nt, Human
aucuugagucagaaaucgaaau

SEQ ID NO: 94503 - RNA, 18 nt, Human
augaauuucuuuaucccu

SEQ ID NO: 94504 - RNA, 21 nt, Human
augccaggcugcgggccgugc

SEQ ID NO: 94505 - RNA, 25 nt, Human
caaaaucagaacagaagagaaaaag

SEQ ID NO: 94506 - RNA, 22 nt, Human
caacacacaaaaccccccaaaa

SEQ ID NO: 94507 - RNA, 21 nt, Human
caagagcaagugaaacaguga

SEQ ID NO: 94508 - RNA, 23 nt, Human
cacacggaccacgcacacgcggc

SEQ ID NO: 94509 - RNA, 18 nt, Human
cacagcauccggugggcc

SEQ ID NO: 94510 - RNA, 18 nt, Human
cacauccaaacaaaccca

SEQ ID NO: 94511 - RNA, 22 nt, Human
cacauccaaacaaacccaagag

SEQ ID NO: 94512 - RNA, 19 nt, Human
caccacgcacacagaugcc

SEQ ID NO: 94513 - RNA, 19 nt, Human
caccgagacacaccccagg

SEQ ID NO: 94514 - RNA, 24 nt, Human
caccgagacacaccccagggccag

SEQ ID NO: 94515 - RNA, 23 nt, Human
cacgcacacagaugccaagccac

SEQ ID NO: 94516 - RNA, 19 nt, Human
cacgccacgcacacagaug

SEQ ID NO: 94517 - RNA, 22 nt, Human
cacgcucagcuucaggccucug

SEQ ID NO: 94518 - RNA, 23 nt, Human
caggggccaaccuggagcccagg

SEQ ID NO: 94519 - RNA, 24 nt, Human
caucaugaauaucauuuggaccuc

SEQ ID NO: 94520 - RNA, 19 nt, Human
ccaaacaaacccaagagca

SEQ ID NO: 94521 - RNA, 22 nt, Human
ccaacacacaaaaccccccaaa

SEQ ID NO: 94522 - RNA, 23 nt, Human
ccaagccacgggccacgccacac

SEQ ID NO: 94523 - RNA, 21 nt, Human
ccacacacacagaugccaggc

SEQ ID NO: 94524 - RNA, 19 nt, Human
ccacgcacacagaugccaa

SEQ ID NO: 94525 - RNA, 20 nt, Human
ccaggacaggccucuaccag

SEQ ID NO: 94526 - RNA, 23 nt, Human
ccaggccacgggccacaccacgc

SEQ ID NO: 94527 - RNA, 23 nt, Human
ccaggccacgggccacgccacac

SEQ ID NO: 94528 - RNA, 23 nt, Human
ccaggccacgggccacgccacgc

SEQ ID NO: 94529 - RNA, 23 nt, Human
ccaggccacgggccacgccacgc

SEQ ID NO: 94530 - RNA, 18 nt, Human
cccaaauaucccgacacc

SEQ ID NO: 94531 - RNA, 22 nt, Human
cccacaaacaaaaucagaacag

SEQ ID NO: 94532 - RNA, 19 nt, Human
ccccccguuuucuuugucc

SEQ ID NO: 94533 - RNA, 24 nt, Human
ccccugggggaggggcacagcugg

SEQ ID NO: 94534 - RNA, 22 nt, Human
ccgccgcgccugcggcaucugc

SEQ ID NO: 94535 - RNA, 24 nt, Human
ccgccgcgccugcggcaucugcuc

SEQ ID NO: 94536 - RNA, 25 nt, Human
ccgccgcgccugcggcaucugcucu

SEQ ID NO: 94537 - RNA, 19 nt, Human
ccgcgccugcggcaucugc

SEQ ID NO: 94538 - RNA, 20 nt, Human
ccggcaggccaggggccagu

SEQ ID NO: 94539 - RNA, 24 nt, Human
ccucuaccaggacugccuuucccg

SEQ ID NO: 94540 - RNA, 22 nt, Human
ccuggagcccaggacaggccuc

SEQ ID NO: 94541 - RNA, 20 nt, Human
ccuggaguugggccucuguc

SEQ ID NO: 94542 - RNA, 18 nt, Human
ccuugagggaaagaggag

SEQ ID NO: 94543 - RNA, 21 nt, Human
cgaaaagcagucgagaaucaa

SEQ ID NO: 94544 - RNA, 18 nt, Human
cgacacccacaaacaaaa

SEQ ID NO: 94545 - RNA, 25 nt, Human
cgcagaagagaacaaaagucgcuuc

SEQ ID NO: 94546 - RNA, 21 nt, Human
cgcggcggacgcaccaacgcc

SEQ ID NO: 94547 - RNA, 24 nt, Human
cggcacacggaccacgcacacgcg

SEQ ID NO: 94548 - RNA, 22 nt, Human
cggugcuguguccggcaggcca

SEQ ID NO: 94549 - RNA, 23 nt, Human
cuuuguccauuucugaguagcuc

SEQ ID NO: 94550 - RNA, 24 nt, Human
gaaaagcagucgagaaucaaccca

SEQ ID NO: 94551 - RNA, 18 nt, Human
gaagacagagggggagag

SEQ ID NO: 94552 - RNA, 21 nt, Human
gagacacaccccagggccaga

SEQ ID NO: 94553 - RNA, 21 nt, Human
gagacagacagagaggaaaag

SEQ ID NO: 94554 - RNA, 18 nt, Human
gaggaggcagagggcugc

SEQ ID NO: 94555 - RNA, 20 nt, Human
gagggaaagaggaggggcug

SEQ ID NO: 94556 - RNA, 21 nt, Human
gagggccacccucaggggcca

SEQ ID NO: 94557 - RNA, 18 nt, Human
gaguagcugcgguggggc

SEQ ID NO: 94558 - RNA, 21 nt, Human
gcaggccaggggccagugggg

SEQ ID NO: 94559 - RNA, 19 nt, Human
gcaguguuucagggaggcc

SEQ ID NO: 94560 - RNA, 18 nt, Human
gcaguugagaggagugga

SEQ ID NO: 94561 - RNA, 21 nt, Human
gccacaccacgcacacagaug

SEQ ID NO: 94562 - RNA, 18 nt, Human
gccuggagcugggugggg

SEQ ID NO: 94563 - RNA, 20 nt, Human
gcggcggacgcaccaacgcc

SEQ ID NO: 94564 - RNA, 26 nt, Human
gcucucucugggaagaaaacuuuagc

SEQ ID NO: 94565 - RNA, 21 nt, Human
gcuucugaggaugcuugaaga

SEQ ID NO: 94566 - RNA, 29 nt, Human
ggaaaaaaaaaucugaaaccaaaaaugcu

SEQ ID NO: 94567 - RNA, 19 nt, Human
ggagagagguagaggagga

SEQ ID NO: 94568 - RNA, 23 nt, Human
ggagaggggcaguagcagcagug

SEQ ID NO: 94569 - RNA, 18 nt, Human
ggagggagggugggcagg

SEQ ID NO: 94570 - RNA, 20 nt, Human
ggagggagggugggcagggc

SEQ ID NO: 94571 - RNA, 23 nt, Human
ggaguggagggagggugggcagg

SEQ ID NO: 94572 - RNA, 18 nt, Human
ggccggagcaacggcaca

SEQ ID NO: 94573 - RNA, 21 nt, Human
ggccuggagcugggugggguu

SEQ ID NO: 94574 - RNA, 18 nt, Human
ggcgauggggcugagaga

SEQ ID NO: 94575 - RNA, 20 nt, Human
gggcagggcuggaggauggg

SEQ ID NO: 94576 - RNA, 23 nt, Human
gggccagaggcgaacgcaucuga

SEQ ID NO: 94577 - RNA, 19 nt, Human
gggcugggccagcuggggc

SEQ ID NO: 94578 - RNA, 19 nt, Human
ggggcugggccagcugggg

SEQ ID NO: 94579 - RNA, 21 nt, Human
ggucggagcuggggugagggg

SEQ ID NO: 94580 - RNA, 18 nt, Human
ggugggccuggagcuggg

SEQ ID NO: 94581 - RNA, 18 nt, Human
gguuggcacggugcugug

SEQ ID NO: 94582 - RNA, 21 nt, Human
gucgcuucuaacugggcacaa

SEQ ID NO: 94583 - RNA, 27 nt, Human
uacgcagaagagaacaaaagucgcuuc

SEQ ID NO: 94584 - RNA, 25 nt, Human
uagaacuccugauagccacgcacac

SEQ ID NO: 94585 - RNA, 19 nt, Human
uagagaagacagaggggga

SEQ ID NO: 94586 - RNA, 26 nt, Human
uauauacauucacauuaacguacacg

SEQ ID NO: 94587 - RNA, 22 nt, Human
uaugcucucucugggaagaaaa

SEQ ID NO: 94588 - RNA, 21 nt, Human
ucaggcggggcgcagugucug

SEQ ID NO: 94589 - RNA, 22 nt, Human
ucagggucuucccuggggagga

SEQ ID NO: 94590 - RNA, 20 nt, Human
ucccgacacccacaaacaaa

SEQ ID NO: 94591 - RNA, 20 nt, Human
ucccuggaaagccgaggccc

SEQ ID NO: 94592 - RNA, 20 nt, Human
ucccuggggaggaggcagag

SEQ ID NO: 94593 - RNA, 22 nt, Human
uccggugggccuggagcugggu

SEQ ID NO: 94594 - RNA, 18 nt, Human
uccuggaguugggccucu

SEQ ID NO: 94595 - RNA, 18 nt, Human
ucucccuuuuuaaucagg

SEQ ID NO: 94596 - RNA, 18 nt, Human
ucugagggguggcugggc

SEQ ID NO: 94597 - RNA, 19 nt, Human
ucugauagaaaacgucacc

SEQ ID NO: 94598 - RNA, 18 nt, Human
ucugucccuggaaagccg

SEQ ID NO: 94599 - RNA, 25 nt, Human
ugaaaagucacagggggcgugagga

SEQ ID NO: 94600 - RNA, 22 nt, Human
ugagagaggucggagcuggggu

SEQ ID NO: 94601 - RNA, 20 nt, Human
ugagaggaguggagggaggg

SEQ ID NO: 94602 - RNA, 24 nt, Human
ugagaggaguggagggaggguggg

SEQ ID NO: 94603 - RNA, 23 nt, Human
ugaggcaggugcacugaaugcgg

SEQ ID NO: 94604 - RNA, 24 nt, Human
ugaggcaggugcacugaaugcggu

SEQ ID NO: 94605 - RNA, 22 nt, Human
ugagggaaagaggaggggcugg

SEQ ID NO: 94606 - RNA, 23 nt, Human
ugagggaaagaggaggggcuggg

SEQ ID NO: 94607 - RNA, 21 nt, Human
ugaguagcucuuuugccaaca

SEQ ID NO: 94608 - RNA, 22 nt, Human
ugcacccaaauaucccgacacc

SEQ ID NO: 94609 - RNA, 24 nt, Human
ugccaacacacaaaaccccccaaa

SEQ ID NO: 94610 - RNA, 21 nt, Human
ugcuuccuuugcuuuuuuaaa

SEQ ID NO: 94611 - RNA, 23 nt, Human
ugcuugaagagacguugucagga

SEQ ID NO: 94612 - RNA, 22 nt, Human
ugcuuuuuuggauuuccuuugg

SEQ ID NO: 94613 - RNA, 18 nt, Human
uggaagaaaggggaguag

SEQ ID NO: 94614 - RNA, 18 nt, Human
uggagcugggugggguug

SEQ ID NO: 94615 - RNA, 20 nt, Human
uggagggagggugggcaggg

SEQ ID NO: 94616 - RNA, 21 nt, Human
uggagggagggugggcagggc

SEQ ID NO: 94617 - RNA, 23 nt, Human
uggagggagggugggcagggcug

SEQ ID NO: 94618 - RNA, 24 nt, Human
uggagggagggugggcagggcugg

SEQ ID NO: 94619 - RNA, 21 nt, Human
uggcugggcaggagcaccagg

SEQ ID NO: 94620 - RNA, 23 nt, Human
uggcugggcaggagcaccagggc

SEQ ID NO: 94621 - RNA, 19 nt, Human
ugggagggagcacgucuga

SEQ ID NO: 94622 - RNA, 21 nt, Human
ugggcacaaacccucugcacc

SEQ ID NO: 94623 - RNA, 25 nt, Human
ugggcacaaacccucugcacccaaa

SEQ ID NO: 94624 - RNA, 22 nt, Human
ugggucacucccguauugcacu

SEQ ID NO: 94625 - RNA, 21 nt, Human
ugucacaguuuuguuucggaa

SEQ ID NO: 94626 - RNA, 21 nt, Human
uguccgguauccuuggcuggc

SEQ ID NO: 94627 - RNA, 20 nt, Human
ugucuaaagcucagucgagg

SEQ ID NO: 94628 - RNA, 24 nt, Human
uuagcacuuuuuuuccacaagugg

SEQ ID NO: 94629 - RNA, 21 nt, Human
uugagggaaagaggaggggcu

SEQ ID NO: 94630 - RNA, 24 nt, Human
uuugccaacacacaaaacccccca

SEQ ID NO: 94631 - RNA, 24 nt, Human
uuuggaagaaaggggaguagcugc

SEQ ID NO: 94632 - RNA, 21 nt, Human
aaaaaaaaaaaaaagaaagag

SEQ ID NO: 94633 - RNA, 24 nt, Human
aaaaaauagaaaaaaugauuagag

SEQ ID NO: 94634 - RNA, 24 nt, Human
aaaaaauagaaaaaaugauuagag

SEQ ID NO: 94635 - RNA, 23 nt, Human
aaaaacacaaaaggaaauggggc

SEQ ID NO: 94636 - RNA, 23 nt, Human
aaaaacacaaaaggaaauggggc

SEQ ID NO: 94637 - RNA, 19 nt, Human
aaaaagaaagagccuguaa

SEQ ID NO: 94638 - RNA, 19 nt, Human
aaaaagaaagagccuguaa

SEQ ID NO: 94639 - RNA, 18 nt, Human
aaaacagaagccagccug

SEQ ID NO: 94640 - RNA, 18 nt, Human
aaaacagaagccagccug

SEQ ID NO: 94641 - RNA, 23 nt, Human
aaaaggaaauggggcaaacaaaa

SEQ ID NO: 94642 - RNA, 23 nt, Human
aaaaggaaauggggcaaacaaaa

SEQ ID NO: 94643 - RNA, 24 nt, Human
aaaauaccauauauauaacuguga

SEQ ID NO: 94644 - RNA, 24 nt, Human
aaaauaccauauauauaacuguga

SEQ ID NO: 94645 - RNA, 23 nt, Human
aaacaaacaaacacacaguaugg

SEQ ID NO: 94646 - RNA, 23 nt, Human
aaacaaacaaacacacaguaugg

SEQ ID NO: 94647 - RNA, 24 nt, Human
aaacaaacaaacacacaguauggc

SEQ ID NO: 94648 - RNA, 24 nt, Human
aaacaaacaaacacacaguauggc

SEQ ID NO: 94649 - RNA, 22 nt, Human
aaacaucuagaaguacaaaaaa

SEQ ID NO: 94650 - RNA, 22 nt, Human
aaacaucuagaaguacaaaaaa

SEQ ID NO: 94651 - RNA, 24 nt, Human
aaacaugugagcuguacaacacca

SEQ ID NO: 94652 - RNA, 24 nt, Human
aaacaugugagcuguacaacacca

SEQ ID NO: 94653 - RNA, 20 nt, Human
aaagaugggcagcacacauc

SEQ ID NO: 94654 - RNA, 21 nt, Human
aaaucccugaauaaaacagaa

SEQ ID NO: 94655 - RNA, 21 nt, Human
aaaucccugaauaaaacagaa

SEQ ID NO: 94656 - RNA, 23 nt, Human
aaaugacuuagcacuguuuucca

SEQ ID NO: 94657 - RNA, 23 nt, Human
aaaugacuuagcacuguuuucca

SEQ ID NO: 94658 - RNA, 18 nt, Human
aaauuagggcacugagug

SEQ ID NO: 94659 - RNA, 18 nt, Human
aaauuagggcacugagug

SEQ ID NO: 94660 - RNA, 24 nt, Human
aacaaaacaaaaaauaagaaugcu

SEQ ID NO: 94661 - RNA, 24 nt, Human
aacaaaacaaaaaauaagaaugcu

SEQ ID NO: 94662 - RNA, 20 nt, Human
aacacacaguauggccaaug

SEQ ID NO: 94663 - RNA, 19 nt, Human
aagaugggcagcacacauc

SEQ ID NO: 94664 - RNA, 20 nt, Human
aauaugcuguuacauacaug

SEQ ID NO: 94665 - RNA, 20 nt, Human
aauaugcuguuacauacaug

SEQ ID NO: 94666 - RNA, 18 nt, Human
aaucccugaauaaaacag

SEQ ID NO: 94667 - RNA, 18 nt, Human
aaucccugaauaaaacag

SEQ ID NO: 94668 - RNA, 21 nt, Human
aaugaaaguaacaccucccuc

SEQ ID NO: 94669 - RNA, 18 nt, Human
acaaaaaaaaaaauagaa

SEQ ID NO: 94670 - RNA, 18 nt, Human
acaaaaaaaaaaauagaa

SEQ ID NO: 94671 - RNA, 24 nt, Human
acaaacaaacacacaguauggcca

SEQ ID NO: 94672 - RNA, 24 nt, Human
acaaacaaacacacaguauggcca

SEQ ID NO: 94673 - RNA, 24 nt, Human
acaaugaaaguaacaccucccuca

SEQ ID NO: 94674 - RNA, 24 nt, Human
acaaugaaaguaacaccucccuca

SEQ ID NO: 94675 - RNA, 25 nt, Human
acacagaaguuuauugugaaaguaa

SEQ ID NO: 94676 - RNA, 25 nt, Human
acacagaaguuuauugugaaaguaa

SEQ ID NO: 94677 - RNA, 22 nt, Human
acugcaacuuuaauaacuguaa

SEQ ID NO: 94678 - RNA, 22 nt, Human
acugcaacuuuaauaacuguaa

SEQ ID NO: 94679 - RNA, 18 nt, Human
acuuagcacuguuuucca

SEQ ID NO: 94680 - RNA, 18 nt, Human
acuuagcacuguuuucca

SEQ ID NO: 94681 - RNA, 18 nt, Human
agaaaaugcauccucugc

SEQ ID NO: 94682 - RNA, 19 nt, Human
agacagacagaagcagcau

SEQ ID NO: 94683 - RNA, 19 nt, Human
agacagacagaagcagcau

SEQ ID NO: 94684 - RNA, 23 nt, Human
agccuguaaucccaguacucugg

SEQ ID NO: 94685 - RNA, 24 nt, Human
agccuguaaucccaguacucuggg

SEQ ID NO: 94686 - RNA, 24 nt, Human
agccuguaaucccaguacucuggg

SEQ ID NO: 94687 - RNA, 20 nt, Human
agcuguacaacaccaaaacc

SEQ ID NO: 94688 - RNA, 20 nt, Human
agcuguacaacaccaaaacc

SEQ ID NO: 94689 - RNA, 23 nt, Human
aggaguucgagaccagccugggc

SEQ ID NO: 94690 - RNA, 23 nt, Human
aggaguucgagaccagccugggc

SEQ ID NO: 94691 - RNA, 22 nt, Human
aggaucacuuaaaaagcgauuc

SEQ ID NO: 94692 - RNA, 24 nt, Human
aggaucgcuugaugccaggaguuc

SEQ ID NO: 94693 - RNA, 24 nt, Human
aggaucgcuugaugccaggaguuc

SEQ ID NO: 94694 - RNA, 18 nt, Human
aggcaggaggaucgcuug

SEQ ID NO: 94695 - RNA, 18 nt, Human
aggcaggaggaucgcuug

SEQ ID NO: 94696 - RNA, 24 nt, Human
aggcuaaggcaggaggaucgcuug

SEQ ID NO: 94697 - RNA, 24 nt, Human
aggcuaaggcaggaggaucgcuug

SEQ ID NO: 94698 - RNA, 20 nt, Human
aguacucugggaggcuaagg

SEQ ID NO: 94699 - RNA, 20 nt, Human
aguacucugggaggcuaagg

SEQ ID NO: 94700 - RNA, 23 nt, Human
agugcagaaguaaaaaaccaagg

SEQ ID NO: 94701 - RNA, 23 nt, Human
agugcagaaguaaaaaaccaagg

SEQ ID NO: 94702 - RNA, 18 nt, Human
auaaugcaaacaacauca

SEQ ID NO: 94703 - RNA, 20 nt, Human
auaaugcaaacaacaucagc

SEQ ID NO: 94704 - RNA, 21 nt, Human
aucgcuugaugccaggaguuc

SEQ ID NO: 94705 - RNA, 24 nt, Human
aucgcuugaugccaggaguucgag

SEQ ID NO: 94706 - RNA, 25 nt, Human
auuaaaaaaaaaaaaaagaaagagu

SEQ ID NO: 94707 - RNA, 25 nt, Human
auuaaaaaaaaaaaaaagaaagagu

SEQ ID NO: 94708 - RNA, 21 nt, Human
auugacuuuuuaaaaaaaucc

SEQ ID NO: 94709 - RNA, 21 nt, Human
caaaacaaaaaauaagaaugc

SEQ ID NO: 94710 - RNA, 21 nt, Human
caaaacaaaaaauaagaaugc

SEQ ID NO: 94711 - RNA, 25 nt, Human
caaaacaucuagaaguacaaaaaaa

SEQ ID NO: 94712 - RNA, 25 nt, Human
caaaacaucuagaaguacaaaaaaa

SEQ ID NO: 94713 - RNA, 21 nt, Human
caaaauaccauauauauaacu

SEQ ID NO: 94714 - RNA, 21 nt, Human
caaaauaccauauauauaacu

SEQ ID NO: 94715 - RNA, 22 nt, Human
caaacacacaguauggccaaug

SEQ ID NO: 94716 - RNA, 22 nt, Human
caacacugcgagacccugucuc

SEQ ID NO: 94717 - RNA, 22 nt, Human
caacacugcgagacccugucuc

SEQ ID NO: 94718 - RNA, 19 nt, Human
caacuagaagcaaugugua

SEQ ID NO: 94719 - RNA, 19 nt, Human
caacuagaagcaaugugua

SEQ ID NO: 94720 - RNA, 18 nt, Human
cacaaaaggaaauggggc

SEQ ID NO: 94721 - RNA, 18 nt, Human
cacaaaaggaaauggggc

SEQ ID NO: 94722 - RNA, 22 nt, Human
cacagaugaacauuuucucucu

SEQ ID NO: 94723 - RNA, 22 nt, Human
cacagaugaacauuuucucucu

SEQ ID NO: 94724 - RNA, 18 nt, Human
cacaguauggccaauggu

SEQ ID NO: 94725 - RNA, 18 nt, Human
cacaguauggccaauggu

SEQ ID NO: 94726 - RNA, 20 nt, Human
cagaacagaagcuaaaacaa

SEQ ID NO: 94727 - RNA, 20 nt, Human
cagaacagaagcuaaaacaa

SEQ ID NO: 94728 - RNA, 21 nt, Human
caguacucugggaggcuaagg

SEQ ID NO: 94729 - RNA, 21 nt, Human
caguacucugggaggcuaagg

SEQ ID NO: 94730 - RNA, 24 nt, Human
caguacucugggaggcuaaggcag

SEQ ID NO: 94731 - RNA, 24 nt, Human
caguacucugggaggcuaaggcag

SEQ ID NO: 94732 - RNA, 24 nt, Human
caugcauaacuucaaauauauaac

SEQ ID NO: 94733 - RNA, 24 nt, Human
caugcauaacuucaaauauauaac

SEQ ID NO: 94734 - RNA, 25 nt, Human
ccaaaaccaaccaaauucauucaua

SEQ ID NO: 94735 - RNA, 25 nt, Human
ccaaaaccaaccaaauucauucaua

SEQ ID NO: 94736 - RNA, 18 nt, Human
ccagcauuaagacagaca

SEQ ID NO: 94737 - RNA, 18 nt, Human
ccagcauuaagacagaca

SEQ ID NO: 94738 - RNA, 25 nt, Human
ccaggaguucgagaccagccugggc

SEQ ID NO: 94739 - RNA, 25 nt, Human
ccaggaguucgagaccagccugggc

SEQ ID NO: 94740 - RNA, 24 nt, Human
ccuauauacaaugaaaguaacacc

SEQ ID NO: 94741 - RNA, 24 nt, Human
ccugggcaacacugcgagacccug

SEQ ID NO: 94742 - RNA, 24 nt, Human
ccugggcaacacugcgagacccug

SEQ ID NO: 94743 - RNA, 18 nt, Human
ccuguaaucccaguacuc

SEQ ID NO: 94744 - RNA, 23 nt, Human
ccuguacuacuggagaaaaaggg

SEQ ID NO: 94745 - RNA, 23 nt, Human
ccuguacuacuggagaaaaaggg

SEQ ID NO: 94746 - RNA, 24 nt, Human
cuuauucagacuucaguccauuuu

SEQ ID NO: 94747 - RNA, 24 nt, Human
cuuauucagacuucaguccauuuu

SEQ ID NO: 94748 - RNA, 20 nt, Human
gacaauagaggaaaauguac

SEQ ID NO: 94749 - RNA, 20 nt, Human
gacaauagaggaaaauguac

SEQ ID NO: 94750 - RNA, 24 nt, Human
gaucgcuugaugccaggaguucga

SEQ ID NO: 94751 - RNA, 24 nt, Human
gaucgcuugaugccaggaguucga

SEQ ID NO: 94752 - RNA, 20 nt, Human
gauuacagaacagaagcuaa

SEQ ID NO: 94753 - RNA, 18 nt, Human
ggaucacuuaaaaagcga

SEQ ID NO: 94754 - RNA, 23 nt, Human
ggaucgcuugaugccaggaguuc

SEQ ID NO: 94755 - RNA, 23 nt, Human
ggaucgcuugaugccaggaguuc

SEQ ID NO: 94756 - RNA, 20 nt, Human
ggucaucaccaccaccuaaa

SEQ ID NO: 94757 - RNA, 21 nt, Human
guggcagacagcucuaugcua

SEQ ID NO: 94758 - RNA, 21 nt, Human
guggcagacagcucuaugcua

SEQ ID NO: 94759 - RNA, 22 nt, Human
uaaaaaaaaaaaaaagaaagag

SEQ ID NO: 94760 - RNA, 25 nt, Human
uaaaaacacaaaaggaaauggggca

SEQ ID NO: 94761 - RNA, 25 nt, Human
uaaaaacacaaaaggaaauggggca

SEQ ID NO: 94762 - RNA, 18 nt, Human
uaaaaagcgauucccuca

SEQ ID NO: 94763 - RNA, 18 nt, Human
uaaaaagcgauucccuca

SEQ ID NO: 94764 - RNA, 21 nt, Human
uaaaacagaagccagccugug

SEQ ID NO: 94765 - RNA, 21 nt, Human
uaaaacagaagccagccugug

SEQ ID NO: 94766 - RNA, 20 nt, Human
uaaaaugcuauagacuauaa

SEQ ID NO: 94767 - RNA, 20 nt, Human
uaaaaugcuauagacuauaa

SEQ ID NO: 94768 - RNA, 24 nt, Human
uaaauaaugcaaacaacaucagca

SEQ ID NO: 94769 - RNA, 24 nt, Human
uaaauaaugcaaacaacaucagca

SEQ ID NO: 94770 - RNA, 22 nt, Human
uaacaccucccucaucagucaa

SEQ ID NO: 94771 - RNA, 22 nt, Human
uaacaccucccucaucagucaa

SEQ ID NO: 94772 - RNA, 21 nt, Human
uaaggcaggaggaucgcuuga

SEQ ID NO: 94773 - RNA, 21 nt, Human
uaaggcaggaggaucgcuuga

SEQ ID NO: 94774 - RNA, 23 nt, Human
uaagugcagaaguaaaaaaccaa

SEQ ID NO: 94775 - RNA, 23 nt, Human
uaagugcagaaguaaaaaaccaa

SEQ ID NO: 94776 - RNA, 21 nt, Human
uaaguuuuuagccuguaaaua

SEQ ID NO: 94777 - RNA, 21 nt, Human
uaaguuuuuagccuguaaaua

SEQ ID NO: 94778 - RNA, 24 nt, Human
uacaaugaaaguaacaccucccuc

SEQ ID NO: 94779 - RNA, 20 nt, Human
uacagaacagaagcuaaaac

SEQ ID NO: 94780 - RNA, 20 nt, Human
uacagaacagaagcuaaaac

SEQ ID NO: 94781 - RNA, 22 nt, Human
uacagaacagaagcuaaaacaa

SEQ ID NO: 94782 - RNA, 22 nt, Human
uacagaacagaagcuaaaacaa

SEQ ID NO: 94783 - RNA, 19 nt, Human
uacuggagaaaaagggcuc

SEQ ID NO: 94784 - RNA, 21 nt, Human
uagaaaaaaugauuagagaaa

SEQ ID NO: 94785 - RNA, 21 nt, Human
uagaaaaaaugauuagagaaa

SEQ ID NO: 94786 - RNA, 20 nt, Human
uagaaguacaaaaaaaaaaa

SEQ ID NO: 94787 - RNA, 20 nt, Human
uagaaguacaaaaaaaaaaa

SEQ ID NO: 94788 - RNA, 20 nt, Human
uagacuauaaaaacacaaaa

SEQ ID NO: 94789 - RNA, 20 nt, Human
uagacuauaaaaacacaaaa

SEQ ID NO: 94790 - RNA, 19 nt, Human
uagaggaaaauguaccauc

SEQ ID NO: 94791 - RNA, 19 nt, Human
uagaggaaaauguaccauc

SEQ ID NO: 94792 - RNA, 23 nt, Human
uaugaaauaagaccuauauacaa

SEQ ID NO: 94793 - RNA, 24 nt, Human
uaugaaauaagaccuauauacaaa

SEQ ID NO: 94794 - RNA, 22 nt, Human
uccuuuccaugcauaacuucaa

SEQ ID NO: 94795 - RNA, 22 nt, Human
uccuuuccaugcauaacuucaa

SEQ ID NO: 94796 - RNA, 20 nt, Human
ucgcuugaugccaggaguuc

SEQ ID NO: 94797 - RNA, 22 nt, Human
ucucuauuaaaaaaaaaaaaaa

SEQ ID NO: 94798 - RNA, 22 nt, Human
ucucuauuaaaaaaaaaaaaaa

SEQ ID NO: 94799 - RNA, 19 nt, Human
ugaaaaaauaucaaauugc

SEQ ID NO: 94800 - RNA, 19 nt, Human
ugaaaaaauaucaaauugc

SEQ ID NO: 94801 - RNA, 24 nt, Human
ugaaaaaauaucaaauugcaucaa

SEQ ID NO: 94802 - RNA, 24 nt, Human
ugaaaaaauaucaaauugcaucaa

SEQ ID NO: 94803 - RNA, 20 nt, Human
ugaaaaaauauuuguaagga

SEQ ID NO: 94804 - RNA, 20 nt, Human
ugaaaaaauauuuguaagga

SEQ ID NO: 94805 - RNA, 19 nt, Human
ugaaaguaacaccucccuc

SEQ ID NO: 94806 - RNA, 19 nt, Human
ugaaaguaacaccucccuc

SEQ ID NO: 94807 - RNA, 24 nt, Human
ugaauaaaacagaagccagccugu

SEQ ID NO: 94808 - RNA, 24 nt, Human
ugaauaaaacagaagccagccugu

SEQ ID NO: 94809 - RNA, 24 nt, Human
ugagaaauagaccguaguaccucc

SEQ ID NO: 94810 - RNA, 24 nt, Human
ugagaaauagaccguaguaccucc

SEQ ID NO: 94811 - RNA, 18 nt, Human
ugagcuguacaacaccaa

SEQ ID NO: 94812 - RNA, 18 nt, Human
ugagcuguacaacaccaa

SEQ ID NO: 94813 - RNA, 21 nt, Human
ugauuacagaacagaagcuaa

SEQ ID NO: 94814 - RNA, 18 nt, Human
ugcaauuugacaguaagc

SEQ ID NO: 94815 - RNA, 20 nt, Human
ugcuauagacuauaaaaaca

SEQ ID NO: 94816 - RNA, 20 nt, Human
ugcuauagacuauaaaaaca

SEQ ID NO: 94817 - RNA, 21 nt, Human
uggaagaaaaugcauccucug

SEQ ID NO: 94818 - RNA, 21 nt, Human
uggaagaaaaugcauccucug

SEQ ID NO: 94819 - RNA, 23 nt, Human
ugggaggcuaaggcaggaggauc

SEQ ID NO: 94820 - RNA, 23 nt, Human
ugggaggcuaaggcaggaggauc

SEQ ID NO: 94821 - RNA, 24 nt, Human
ugggcaacacugcgagacccuguc

SEQ ID NO: 94822 - RNA, 24 nt, Human
ugggcaacacugcgagacccuguc

SEQ ID NO: 94823 - RNA, 18 nt, Human
uguacaacaccaaaacca

SEQ ID NO: 94824 - RNA, 18 nt, Human
uguacaacaccaaaacca

SEQ ID NO: 94825 - RNA, 24 nt, Human
uguacaacaccaaaaccaaccaaa

SEQ ID NO: 94826 - RNA, 24 nt, Human
uguacaacaccaaaaccaaccaaa

SEQ ID NO: 94827 - RNA, 22 nt, Human
uuaauggaagaaaaugcauccu

SEQ ID NO: 94828 - RNA, 22 nt, Human
uuaauggaagaaaaugcauccu

SEQ ID NO: 94829 - RNA, 25 nt, Human
uuagaaaugcagguauuauaaucau

SEQ ID NO: 94830 - RNA, 25 nt, Human
uuagaaaugcagguauuauaaucau

SEQ ID NO: 94831 - RNA, 18 nt, Human
uuccagaauuaauggaag

SEQ ID NO: 94832 - RNA, 20 nt, Human
uugacuuuuuaaaaaaaucc

SEQ ID NO: 94833 - RNA, 22 nt, Human
uugaugccaggaguucgagacc

SEQ ID NO: 94834 - RNA, 22 nt, Human
uugaugccaggaguucgagacc

SEQ ID NO: 94835 - RNA, 19 nt, Human
uugcaauuugacaguaagc

SEQ ID NO: 94836 - RNA, 24 nt, Human
uuuauuugauacaggauaucuguu

SEQ ID NO: 94837 - RNA, 24 nt, Human
uuuauuugauacaggauaucuguu

SEQ ID NO: 94838 - RNA, 18 nt, Human
uuuguagcugauucauca

SEQ ID NO: 94839 - RNA, 18 nt, Human
aaaggaacuccugcccuu

SEQ ID NO: 94840 - RNA, 26 nt, Human
aaggaacuccugcccuucuaggugcc

SEQ ID NO: 94841 - RNA, 22 nt, Human
agagaagcagggcgugaaggag

SEQ ID NO: 94842 - RNA, 20 nt, Human
agggucggagcccaggcggg

SEQ ID NO: 94843 - RNA, 21 nt, Human
auaaaacauacuagcugcucc

SEQ ID NO: 94844 - RNA, 27 nt, Human
cagggucggagcccaggcggguccgcc

SEQ ID NO: 94845 - RNA, 22 nt, Human
ccacagagagggcaagacuuca

SEQ ID NO: 94846 - RNA, 18 nt, Human
ccgccgccgccgccgccg

SEQ ID NO: 94847 - RNA, 18 nt, Human
ccgccgccgccgccgccg

SEQ ID NO: 94848 - RNA, 18 nt, Human
ccgccgccgccgccgccg

SEQ ID NO: 94849 - RNA, 18 nt, Human
ccgccgccgccgccgccg

SEQ ID NO: 94850 - RNA, 24 nt, Human
ccgccgccgccgccgccgccgccg

SEQ ID NO: 94851 - RNA, 24 nt, Human
ccgccgccgccgccgccgccgccg

SEQ ID NO: 94852 - RNA, 24 nt, Human
ccgccgccgccgccgccgccgccg

SEQ ID NO: 94853 - RNA, 24 nt, Human
ccgccgccgccgccgccgccgccg

SEQ ID NO: 94854 - RNA, 25 nt, Human
ccgccgccgccgccgccgccgccgg

SEQ ID NO: 94855 - RNA, 24 nt, Human
ccgccgccgccgccgccgccggcu

SEQ ID NO: 94856 - RNA, 27 nt, Human
ccgccgccgccgccgccggcuauccgg

SEQ ID NO: 94857 - RNA, 19 nt, Human
ccucuaaaccugcagcagg

SEQ ID NO: 94858 - RNA, 18 nt, Human
cucccggccgccgccgcc

SEQ ID NO: 94859 - RNA, 21 nt, Human
cuccugcccuucuaggugcca

SEQ ID NO: 94860 - RNA, 23 nt, Human
gccgccgccgccgccgccgccgg

SEQ ID NO: 94861 - RNA, 21 nt, Human
gccgccgccgccgccggcuau

SEQ ID NO: 94862 - RNA, 23 nt, Human
gcgagcgagggagagaagcaggg

SEQ ID NO: 94863 - RNA, 19 nt, Human
gggcagggucggagcccag

SEQ ID NO: 94864 - RNA, 22 nt, Human
uaacucccaacucacugguccu

SEQ ID NO: 94865 - RNA, 21 nt, Human
uccugcccuucuaggugccac

SEQ ID NO: 94866 - RNA, 22 nt, Human
ucuaaaccugcagcagggagau

SEQ ID NO: 94867 - RNA, 19 nt, Human
ugaaggaggggccucuccc

SEQ ID NO: 94868 - RNA, 20 nt, Human
ugcgagcgagggagagaagc

SEQ ID NO: 94869 - RNA, 24 nt, Human
uggaaccacugaugugauauccca

SEQ ID NO: 94870 - RNA, 19 nt, Human
aacuugggagucaccggca

SEQ ID NO: 94871 - RNA, 20 nt, Human
aagaaaaucucaacacuuca

SEQ ID NO: 94872 - RNA, 20 nt, Human
aauccacacccgcucucccc

SEQ ID NO: 94873 - RNA, 25 nt, Human
acacgcacgcagcccagugugugug

SEQ ID NO: 94874 - RNA, 21 nt, Human
acccgcucuccccucccgccc

SEQ ID NO: 94875 - RNA, 20 nt, Human
acuagagcacaaagcucuca

SEQ ID NO: 94876 - RNA, 21 nt, Human
agaacagcucgcucccgaaga

SEQ ID NO: 94877 - RNA, 22 nt, Human
agacaaauccacacccgcucuc

SEQ ID NO: 94878 - RNA, 18 nt, Human
agaggcugaaucaaaaac

SEQ ID NO: 94879 - RNA, 22 nt, Human
aggccuccgagacguggaaacg

SEQ ID NO: 94880 - RNA, 23 nt, Human
caaaacaacuugcuuaaaaccug

SEQ ID NO: 94881 - RNA, 28 nt, Human
caaaacuacuagagcacaaagcucucau

SEQ ID NO: 94882 - RNA, 25 nt, Human
caaauuucaggcaaauucacaaccc

SEQ ID NO: 94883 - RNA, 21 nt, Human
caagacaaauccacacccgcu

SEQ ID NO: 94884 - RNA, 25 nt, Human
cacacccgcucuccccucccgcccg

SEQ ID NO: 94885 - RNA, 24 nt, Human
caccccaccccuguggcacacaca

SEQ ID NO: 94886 - RNA, 21 nt, Human
cacuccacacgcacgcagccc

SEQ ID NO: 94887 - RNA, 26 nt, Human
cagcucgcucccgaagaaggagcaac

SEQ ID NO: 94888 - RNA, 23 nt, Human
caggcaaauucacaacccaguga

SEQ ID NO: 94889 - RNA, 19 nt, Human
ccagagacacgcgugugcg

SEQ ID NO: 94890 - RNA, 24 nt, Human
cccaccccuguggcacacacagga

SEQ ID NO: 94891 - RNA, 23 nt, Human
ccccuguggcacacacaggaccc

SEQ ID NO: 94892 - RNA, 18 nt, Human
ccggcaccuggagaaccc

SEQ ID NO: 94893 - RNA, 19 nt, Human
cgacucggggaggccgcgg

SEQ ID NO: 94894 - RNA, 20 nt, Human
cgcgggacgccgcagcagca

SEQ ID NO: 94895 - RNA, 21 nt, Human
cggggaggccgcgggacgccg

SEQ ID NO: 94896 - RNA, 21 nt, Human
cguggaaacgcaacaauuacc

SEQ ID NO: 94897 - RNA, 18 nt, Human
cuaauggagggaugagaa

SEQ ID NO: 94898 - RNA, 19 nt, Human
cuggacaccccaccccugu

SEQ ID NO: 94899 - RNA, 25 nt, Human
cuguccagagacacgcgugugcgcg

SEQ ID NO: 94900 - RNA, 18 nt, Human
gacaccccaccccugugg

SEQ ID NO: 94901 - RNA, 20 nt, Human
gagaagaucauaaucagagg

SEQ ID NO: 94902 - RNA, 18 nt, Human
gcccagugugugugggga

SEQ ID NO: 94903 - RNA, 22 nt, Human
gucccacuccacacgcacgcag

SEQ ID NO: 94904 - RNA, 19 nt, Human
uaacacaaaaccuuaaugu

SEQ ID NO: 94905 - RNA, 20 nt, Human
uacuacacuacuaccuuaau

SEQ ID NO: 94906 - RNA, 25 nt, Human
uacugaacucugaauucugaaaauu

SEQ ID NO: 94907 - RNA, 28 nt, Human
uaguauggacaaaacaacuugcuuaaaa

SEQ ID NO: 94908 - RNA, 20 nt, Human
ucaaaacuacuagagcacaa

SEQ ID NO: 94909 - RNA, 22 nt, Human
ucccgaguuggaggccuggcag

SEQ ID NO: 94910 - RNA, 23 nt, Human
uccuagaggauaacacaaaaccc

SEQ ID NO: 94911 - RNA, 23 nt, Human
ucggcgccguagcuguccagaga

SEQ ID NO: 94912 - RNA, 19 nt, Human
ucugaaauuaaaagaagga

SEQ ID NO: 94913 - RNA, 18 nt, Human
ugacugaugcccaacuac

SEQ ID NO: 94914 - RNA, 20 nt, Human
ugagaagaucauaaucagag

SEQ ID NO: 94915 - RNA, 20 nt, Human
ugcaagaaaagcaaguucau

SEQ ID NO: 94916 - RNA, 24 nt, Human
ugcaagaaaagcaaguucauauuu

SEQ ID NO: 94917 - RNA, 22 nt, Human
uggacaaaacaacuugcuuaaa

SEQ ID NO: 94918 - RNA, 18 nt, Human
uggaggccuggcaggugg

SEQ ID NO: 94919 - RNA, 21 nt, Human
uguugagugaagaaccaugcu

SEQ ID NO: 94920 - RNA, 20 nt, Human
uugcuuaaaaccugacugau

SEQ ID NO: 94921 - RNA, 23 nt, Human
uuguucaaaacuuuuuuaaaggu

SEQ ID NO: 94922 - RNA, 21 nt, Human
aaaugcccuuuggaccaacuc

SEQ ID NO: 94923 - RNA, 23 nt, Human
aaauggggcccauggauggagcu

SEQ ID NO: 94924 - RNA, 20 nt, Human
aacaccugcguggagaacag

SEQ ID NO: 94925 - RNA, 18 nt, Human
aaggauauuuaugacauu

SEQ ID NO: 94926 - RNA, 23 nt, Human
augcccuuuggaccaacucagga

SEQ ID NO: 94927 - RNA, 25 nt, Human
caaaauggggcccauggauggagcu

SEQ ID NO: 94928 - RNA, 20 nt, Human
caacucaggacaagguacaa

SEQ ID NO: 94929 - RNA, 21 nt, Human
cggggcgcgcggaacaccugc

SEQ ID NO: 94930 - RNA, 21 nt, Human
gcgcggaacaccugcguggag

SEQ ID NO: 94931 - RNA, 21 nt, Human
guggagaacagaccuggcuca

SEQ ID NO: 94932 - RNA, 26 nt, Human
ugacauuguaaaugcccuuuggacca

SEQ ID NO: 94933 - RNA, 19 nt, Human
uggagaacagaccuggcuc

SEQ ID NO: 94934 - RNA, 22 nt, Human
uggagaacagaccuggcucagg

SEQ ID NO: 94935 - RNA, 19 nt, Human
aagcagcaagcuccgaagc

SEQ ID NO: 94936 - RNA, 21 nt, Human
auuaagcagcaagcuccgaag

SEQ ID NO: 94937 - RNA, 21 nt, Human
aaaaaacccaaacacgcaaac

SEQ ID NO: 94938 - RNA, 22 nt, Human
aacacgcaaacucgucccgcca

SEQ ID NO: 94939 - RNA, 24 nt, Human
aacucgucccgccagcucagcccc

SEQ ID NO: 94940 - RNA, 22 nt, Human
aagugggcaaggguggcgggcc

SEQ ID NO: 94941 - RNA, 25 nt, Human
accgcucaaacucuguaaggagacg

SEQ ID NO: 94942 - RNA, 22 nt, Human
acggaugcucugugccgugugc

SEQ ID NO: 94943 - RNA, 20 nt, Human
agaaaaucacauauuucauc

SEQ ID NO: 94944 - RNA, 20 nt, Human
agauggugcugacaguucag

SEQ ID NO: 94945 - RNA, 23 nt, Human
aggaaagcgaaggagaagugggc

SEQ ID NO: 94946 - RNA, 26 nt, Human
aggaaguuacauuagagaaaaucaca

SEQ ID NO: 94947 - RNA, 22 nt, Human
caaagucgaucagcaguugcca

SEQ ID NO: 94948 - RNA, 19 nt, Human
ccacaccgcccagcgcucc

SEQ ID NO: 94949 - RNA, 21 nt, Human
ccagaacagggaaaaccuauu

SEQ ID NO: 94950 - RNA, 18 nt, Human
ccaggggaggaggaagac

SEQ ID NO: 94951 - RNA, 23 nt, Human
cccgcuccacaccgcccagcgcu

SEQ ID NO: 94952 - RNA, 24 nt, Human
ccgacuucucucucaauauuuccu

SEQ ID NO: 94953 - RNA, 18 nt, Human
ccuggacucuucucucuu

SEQ ID NO: 94954 - RNA, 21 nt, Human
ccuggccgacuucucucucaa

SEQ ID NO: 94955 - RNA, 18 nt, Human
cucuucucucuuuugccu

SEQ ID NO: 94956 - RNA, 21 nt, Human
cugcgcagucauugccugugu

SEQ ID NO: 94957 - RNA, 25 nt, Human
cuuucuggauguacuaaaugccgcu

SEQ ID NO: 94958 - RNA, 27 nt, Human
gacaacagagacacaaaagggagggcc

SEQ ID NO: 94959 - RNA, 19 nt, Human
ggaggaggaagacgggagg

SEQ ID NO: 94960 - RNA, 19 nt, Human
gggcucaggaaagcgaagg

SEQ ID NO: 94961 - RNA, 21 nt, Human
ggggaggaggaagacgggagg

SEQ ID NO: 94962 - RNA, 23 nt, Human
ggggugaugacagaauguuccag

SEQ ID NO: 94963 - RNA, 20 nt, Human
guuuuacuugguuaacuucu

SEQ ID NO: 94964 - RNA, 23 nt, Human
guuuuacuugguuaacuucuugc

SEQ ID NO: 94965 - RNA, 19 nt, Human
uaaaaaacccaaacacgca

SEQ ID NO: 94966 - RNA, 20 nt, Human
uagacaacagagacacaaag

SEQ ID NO: 94967 - RNA, 18 nt, Human
ucaugggauccugguguu

SEQ ID NO: 94968 - RNA, 18 nt, Human
uccacaccgcccagcgcu

SEQ ID NO: 94969 - RNA, 21 nt, Human
uccagaacgugacagaggugg

SEQ ID NO: 94970 - RNA, 18 nt, Human
uccccgccccuuccugga

SEQ ID NO: 94971 - RNA, 19 nt, Human
ucccgccagcucagccccg

SEQ ID NO: 94972 - RNA, 25 nt, Human
ugacagagguggugccuacacaacu

SEQ ID NO: 94973 - RNA, 19 nt, Human
uggaggaugcugagccacc

SEQ ID NO: 94974 - RNA, 18 nt, Human
uggccgacuucucucuca

SEQ ID NO: 94975 - RNA, 18 nt, Human
uuagagaaaaucacauau

SEQ ID NO: 94976 - RNA, 21 nt, Human
uugcuucgggaauuuaaggaa

SEQ ID NO: 94977 - RNA, 21 nt, Human
uuuuuuuuuuuuuuuguguga

SEQ ID NO: 94978 - RNA, 18 nt, Human
uuuuuuuuuuuuuuuuug

SEQ ID NO: 94979 - RNA, 19 nt, Human
uuuuuuuuuuuuuuuuugu

SEQ ID NO: 94980 - RNA, 22 nt, Human
aacacaagacccuacaaaccca

SEQ ID NO: 94981 - RNA, 24 nt, Human
aagcaacacaagacccuacaaacc

SEQ ID NO: 94982 - RNA, 23 nt, Human
agaaaugucugaaaccuggacaa

SEQ ID NO: 94983 - RNA, 22 nt, Human
agaagcaacacaagacccuaca

SEQ ID NO: 94984 - RNA, 24 nt, Human
agacagacacucaaagaggaucuc

SEQ ID NO: 94985 - RNA, 24 nt, Human
agacccuacaaacccaccuaugga

SEQ ID NO: 94986 - RNA, 21 nt, Human
aggcaacuccccaaggccaag

SEQ ID NO: 94987 - RNA, 22 nt, Human
auagcaucuuccccaaccuaga

SEQ ID NO: 94988 - RNA, 23 nt, Human
auagcaucuuccccaaccuagaa

SEQ ID NO: 94989 - RNA, 23 nt, Human
caacacaagacccuacaaaccca

SEQ ID NO: 94990 - RNA, 26 nt, Human
caaccuagaaaugucugaaaccugga

SEQ ID NO: 94991 - RNA, 19 nt, Human
caagacccuacaaacccac

SEQ ID NO: 94992 - RNA, 24 nt, Human
caagccuaaaggcaacuccccaag

SEQ ID NO: 94993 - RNA, 22 nt, Human
cacuugguucucuaagaugaag

SEQ ID NO: 94994 - RNA, 19 nt, Human
caggggccaugcagagcug

SEQ ID NO: 94995 - RNA, 20 nt, Human
ccaagccuggagagaccagg

SEQ ID NO: 94996 - RNA, 19 nt, Human
ccagaacauucugugucac

SEQ ID NO: 94997 - RNA, 20 nt, Human
ccccaaccuagaaaugucug

SEQ ID NO: 94998 - RNA, 22 nt, Human
ccccaaggccaagaugagccag

SEQ ID NO: 94999 - RNA, 24 nt, Human
ccugagccuuagcaggggccaugc

SEQ ID NO: 95000 - RNA, 23 nt, Human
cuaaaggcaacuccccaaggcca

SEQ ID NO: 95001 - RNA, 22 nt, Human
cucccacccagaacauucugug

SEQ ID NO: 95002 - RNA, 24 nt, Human
cucuaagaugaagaagggcggcuc

SEQ ID NO: 95003 - RNA, 23 nt, Human
cucugcgggcauguggggauguc

SEQ ID NO: 95004 - RNA, 23 nt, Human
cuggacaaagacagacacucaaa

SEQ ID NO: 95005 - RNA, 18 nt, Human
gaaaaggagaggcuugag

SEQ ID NO: 95006 - RNA, 18 nt, Human
gaaaccuggacaaagaca

SEQ ID NO: 95007 - RNA, 21 nt, Human
gacaaagacagacacucaaag

SEQ ID NO: 95008 - RNA, 20 nt, Human
gacccuacaaacccaccuau

SEQ ID NO: 95009 - RNA, 21 nt, Human
gaggggcagggagaggcccag

SEQ ID NO: 95010 - RNA, 20 nt, Human
gcagggagaggcccagguca

SEQ ID NO: 95011 - RNA, 19 nt, Human
ggagagaccagaagcaaca

SEQ ID NO: 95012 - RNA, 21 nt, Human
ggagaggcuugaggacucaag

SEQ ID NO: 95013 - RNA, 19 nt, Human
ggcagggagaggcccaggu

SEQ ID NO: 95014 - RNA, 21 nt, Human
uagaaaugucugaaaccugga

SEQ ID NO: 95015 - RNA, 19 nt, Human
ucccaauagcaucuucccc

SEQ ID NO: 95016 - RNA, 21 nt, Human
ucucugcgggcauguggggau

SEQ ID NO: 95017 - RNA, 19 nt, Human
ugaggacucaagccuaaag

SEQ ID NO: 95018 - RNA, 20 nt, Human
uggacgaaaaggagaggcuu

SEQ ID NO: 95019 - RNA, 20 nt, Human
ugucugaaaccuggacaaag

SEQ ID NO: 95020 - RNA, 22 nt, Human
aacuuugcagagaggcagccuu

SEQ ID NO: 95021 - RNA, 18 nt, Human
accaacaggcucugccgu

SEQ ID NO: 95022 - RNA, 20 nt, Human
cccaccagaccaaaauuugg

SEQ ID NO: 95023 - RNA, 20 nt, Human
ggcuccugugugcaggucac

SEQ ID NO: 95024 - RNA, 22 nt, Human
ugccguguucaauagcagcuca

SEQ ID NO: 95025 - RNA, 20 nt, Human
caaccggagcagcccggcag

SEQ ID NO: 95026 - RNA, 22 nt, Human
gagcgugugugguugcacugga

SEQ ID NO: 95027 - RNA, 18 nt, Human
gggagguugcuuccguug

SEQ ID NO: 95028 - RNA, 18 nt, Human
gucaaacuccacagacaa

SEQ ID NO: 95029 - RNA, 18 nt, Human
uaggacggcagcuggcuu

SEQ ID NO: 95030 - RNA, 20 nt, Human
ugagcgugugugguugcacu

SEQ ID NO: 95031 - RNA, 24 nt, Human
uggcguuuccaaccggagcagccc

SEQ ID NO: 95032 - RNA, 22 nt, Human
ugucuuauucugccuccucugg

SEQ ID NO: 95033 - RNA, 18 nt, Human
uuggauuaggacggcagc

SEQ ID NO: 95034 - RNA, 21 nt, Human
aagugcuggagagcuggugaa

SEQ ID NO: 95035 - RNA, 24 nt, Human
accuugaagaguucccacuggagg

SEQ ID NO: 95036 - RNA, 19 nt, Human
agaaaccaaucauggcccc

SEQ ID NO: 95037 - RNA, 22 nt, Human
ccggcucauuccucuaaugacc

SEQ ID NO: 95038 - RNA, 18 nt, Human
ccuuccuucuccaucagc

SEQ ID NO: 95039 - RNA, 25 nt, Human
cucuucuuccguucuuucuucucug

SEQ ID NO: 95040 - RNA, 18 nt, Human
cugcugcuuuccaccaag

SEQ ID NO: 95041 - RNA, 19 nt, Human
cugcugcuuuccaccaagu

SEQ ID NO: 95042 - RNA, 18 nt, Human
cuuucuucucugccuccu

SEQ ID NO: 95043 - RNA, 23 nt, Human
gaaaccaaucauggccccacugg

SEQ ID NO: 95044 - RNA, 18 nt, Human
gaugaaggaugaaaagag

SEQ ID NO: 95045 - RNA, 19 nt, Human
gcuccuucucuuccugauc

SEQ ID NO: 95046 - RNA, 23 nt, Human
ggaugaaaagagaccuugaagag

SEQ ID NO: 95047 - RNA, 18 nt, Human
uaacauauccugcuuuga

SEQ ID NO: 95048 - RNA, 21 nt, Human
uccuucugcgguggaggguca

SEQ ID NO: 95049 - RNA, 23 nt, Human
ucucuucuuccguucuuucuucu

SEQ ID NO: 95050 - RNA, 21 nt, Human
ucugccuccucccugccuucc

SEQ ID NO: 95051 - RNA, 23 nt, Human
ucugcgguggagggucaggggac

SEQ ID NO: 95052 - RNA, 21 nt, Human
ucuuucuucucugccuccucc

SEQ ID NO: 95053 - RNA, 19 nt, Human
ugaccgaagcgucucgcag

SEQ ID NO: 95054 - RNA, 20 nt, Human
uuuccaccaagugcuggaga

SEQ ID NO: 95055 - RNA, 25 nt, Human
uuucuucucugccuccucccugccu

SEQ ID NO: 95056 - RNA, 20 nt, Human
aaggaaggagagggcagggc

SEQ ID NO: 95057 - RNA, 18 nt, Human
aggaaggagagggcaggg

SEQ ID NO: 95058 - RNA, 21 nt, Human
agucucuaaaacaaucagugc

SEQ ID NO: 95059 - RNA, 27 nt, Human
aguugugguuuguguuuucuaugucug

SEQ ID NO: 95060 - RNA, 22 nt, Human
caacccccacggccccucuacu

SEQ ID NO: 95061 - RNA, 20 nt, Human
caugccuccuuucccaugua

SEQ ID NO: 95062 - RNA, 22 nt, Human
ccucaacccccacggccccucu

SEQ ID NO: 95063 - RNA, 23 nt, Human
ccucaacccccacggccccucua

SEQ ID NO: 95064 - RNA, 20 nt, Human
ccugccucaacccccacggc

SEQ ID NO: 95065 - RNA, 21 nt, Human
ccuuaacuggaaagggaugaa

SEQ ID NO: 95066 - RNA, 20 nt, Human
gaaggagagggcagggccuc

SEQ ID NO: 95067 - RNA, 19 nt, Human
ggagcaucccagagucagu

SEQ ID NO: 95068 - RNA, 25 nt, Human
guuuguguuuucuaugucuggaagg

SEQ ID NO: 95069 - RNA, 23 nt, Human
uaugagauuaggccugaugguau

SEQ ID NO: 95070 - RNA, 20 nt, Human
ucaacccccacggccccucu

SEQ ID NO: 95071 - RNA, 24 nt, Human
ucagucccauaucagaggcaugcc

SEQ ID NO: 95072 - RNA, 19 nt, Human
ucaguccugugccaggcuc

SEQ ID NO: 95073 - RNA, 21 nt, Human
ucaguccugugccaggcucca

SEQ ID NO: 95074 - RNA, 19 nt, Human
ucagugucauguuucuaug

SEQ ID NO: 95075 - RNA, 18 nt, Human
ucauguuucuaugggcca

SEQ ID NO: 95076 - RNA, 22 nt, Human
ucauuugcccugccucaacccc

SEQ ID NO: 95077 - RNA, 21 nt, Human
ucccagagucaguccugugcc

SEQ ID NO: 95078 - RNA, 21 nt, Human
ucuaugggccaggcucagucc

SEQ ID NO: 95079 - RNA, 19 nt, Human
ugagauuaggccugauggu

SEQ ID NO: 95080 - RNA, 19 nt, Human
ugccucaacccccacggcc

SEQ ID NO: 95081 - RNA, 18 nt, Human
ugcuagggacgcuguguc

SEQ ID NO: 95082 - RNA, 20 nt, Human
ugggguuaguccaugcuuug

SEQ ID NO: 95083 - RNA, 18 nt, Human
uucccauguacugcucca

SEQ ID NO: 95084 - RNA, 24 nt, Human
uugggguuaguccaugcuuugggu

SEQ ID NO: 95085 - RNA, 23 nt, Human
uuggguguugguuuccuguguca

SEQ ID NO: 95086 - RNA, 18 nt, Human
uuucccauguacugcucc

SEQ ID NO: 95087 - RNA, 24 nt, Human
uuuggguaaggaaggagagggcag

SEQ ID NO: 95088 - RNA, 20 nt, Human
uuuucaggaggaagccaaac

SEQ ID NO: 95089 - RNA, 23 nt, Human
uuuuuuuuuuucaggaggaagcc

SEQ ID NO: 95090 - RNA, 22 nt, Human
uuuuuuuuuuuuuuuuuucagg

SEQ ID NO: 95091 - RNA, 21 nt, Human
aaaaccugccuggaccccaaa

SEQ ID NO: 95092 - RNA, 20 nt, Human
accugccuggaccccaaagc

SEQ ID NO: 95093 - RNA, 25 nt, Human
caaagcgggccccgcucuucccguc

SEQ ID NO: 95094 - RNA, 23 nt, Human
caagugacgagcagggugcuggu

SEQ ID NO: 95095 - RNA, 21 nt, Human
caccagacaggaggccccaaa

SEQ ID NO: 95096 - RNA, 20 nt, Human
caggaggccccaaaaccugc

SEQ ID NO: 95097 - RNA, 19 nt, Human
cagggugcugcgcugcggc

SEQ ID NO: 95098 - RNA, 24 nt, Human
cccaaaaccugccuggaccccaaa

SEQ ID NO: 95099 - RNA, 24 nt, Human
cccaccagacaggaggccccaaaa

SEQ ID NO: 95100 - RNA, 22 nt, Human
ccccaaaaccugccuggacccc

SEQ ID NO: 95101 - RNA, 27 nt, Human
ccucccaccagacaggaggccccaaaa

SEQ ID NO: 95102 - RNA, 21 nt, Human
ccuggaccccaaagcgggccc

SEQ ID NO: 95103 - RNA, 23 nt, Human
cucuucccgucguuaucuuucua

SEQ ID NO: 95104 - RNA, 18 nt, Human
cugcgcugcggccuccuc

SEQ ID NO: 95105 - RNA, 19 nt, Human
cugcgcugcggccuccucc

SEQ ID NO: 95106 - RNA, 19 nt, Human
cuggaagugcuuccauuca

SEQ ID NO: 95107 - RNA, 19 nt, Human
cuucugauauggaggugaa

SEQ ID NO: 95108 - RNA, 21 nt, Human
gccccaaaaccugccuggacc

SEQ ID NO: 95109 - RNA, 18 nt, Human
ugauauggaggugaaguu

SEQ ID NO: 95110 - RNA, 24 nt, Human
ugccuggaccccaaagcgggcccc

SEQ ID NO: 95111 - RNA, 20 nt, Human
ugcggccuccucccaccaga

SEQ ID NO: 95112 - RNA, 23 nt, Human
uggaagugcuuccauucagaaac

SEQ ID NO: 95113 - RNA, 20 nt, Human
uggaccccaaagcgggcccc

SEQ ID NO: 95114 - RNA, 20 nt, Human
uucccgucguuaucuuucua

SEQ ID NO: 95115 - RNA, 21 nt, Human
aagcagaacaccggaggcccg

SEQ ID NO: 95116 - RNA, 22 nt, Human
aagcagaacaccggaggcccga

SEQ ID NO: 95117 - RNA, 23 nt, Human
acaaccagcagaaaccaacagcc

SEQ ID NO: 95118 - RNA, 18 nt, Human
accaggcagcagcucagc

SEQ ID NO: 95119 - RNA, 18 nt, Human
agauggcacauggugcca

SEQ ID NO: 95120 - RNA, 20 nt, Human
agcacgccgagaagagccag

SEQ ID NO: 95121 - RNA, 19 nt, Human
agcagaacaccggaggccc

SEQ ID NO: 95122 - RNA, 19 nt, Human
aggcccgaccagccaagga

SEQ ID NO: 95123 - RNA, 28 nt, Human
caaggaccuacaaccagcagaaaccaac

SEQ ID NO: 95124 - RNA, 21 nt, Human
cagcacgccgagaagagccag

SEQ ID NO: 95125 - RNA, 20 nt, Human
ccagccaaggaccuacaacc

SEQ ID NO: 95126 - RNA, 19 nt, Human
ccccgcacugcucccuccu

SEQ ID NO: 95127 - RNA, 22 nt, Human
ccgaccagccaaggaccuacaa

SEQ ID NO: 95128 - RNA, 23 nt, Human
cgagaagagccagccuagccuca

SEQ ID NO: 95129 - RNA, 26 nt, Human
cgagaagagccagccuagccucagau

SEQ ID NO: 95130 - RNA, 24 nt, Human
cggggagaagcagaacaccggagg

SEQ ID NO: 95131 - RNA, 19 nt, Human
cugcucccuccuuauuggc

SEQ ID NO: 95132 - RNA, 22 nt, Human
cuucaccaggcagcagcucagc

SEQ ID NO: 95133 - RNA, 22 nt, Human
gaagagccagccuagccucaga

SEQ ID NO: 95134 - RNA, 19 nt, Human
gagaagcagaacaccggag

SEQ ID NO: 95135 - RNA, 25 nt, Human
gaggcccgaccagccaaggaccuac

SEQ ID NO: 95136 - RNA, 23 nt, Human
gcagaacaccggaggcccgacca

SEQ ID NO: 95137 - RNA, 22 nt, Human
uuuuuuuuuuuuuuuuuuacag

SEQ ID NO: 95138 - RNA, 22 nt, Human
aaacuuauggagggaaaaaaac

SEQ ID NO: 95139 - RNA, 22 nt, Human
aaugguuuauuuccaagugguc

SEQ ID NO: 95140 - RNA, 22 nt, Human
acuugauuaauuucccugaaau

SEQ ID NO: 95141 - RNA, 25 nt, Human
aucaacaucauuaccaaaaucuucc

SEQ ID NO: 95142 - RNA, 23 nt, Human
cccagcccguccgguaaccgcgc

SEQ ID NO: 95143 - RNA, 30 nt, Human
gaaaaaaacccucauagauugacuguaaaa

SEQ ID NO: 95144 - RNA, 22 nt, Human
guccccuuagaaccuuuccaaa

SEQ ID NO: 95145 - RNA, 20 nt, Human
guuaaacuuauggagggaaa

SEQ ID NO: 95146 - RNA, 21 nt, Human
uaaaauacacuuuuaaaucaa

SEQ ID NO: 95147 - RNA, 22 nt, Human
uaaacuuauggagggaaaaaaa

SEQ ID NO: 95148 - RNA, 24 nt, Human
uagaaucauauuaaagaaaaacua

SEQ ID NO: 95149 - RNA, 25 nt, Human
ugcaaaaauaaaaucacuuuccaau

SEQ ID NO: 95150 - RNA, 18 nt, Human
uguaagauuugauuccuu

SEQ ID NO: 95151 - RNA, 23 nt, Human
uuaagaaauauuauacuaaucaa

SEQ ID NO: 95152 - RNA, 25 nt, Human
uuugcaaaaauaaaaucacuuucca

SEQ ID NO: 95153 - RNA, 23 nt, Human
aaaaaaaacuacaaaaaaggcau

SEQ ID NO: 95154 - RNA, 18 nt, Human
aaaaaacugauccuccaa

SEQ ID NO: 95155 - RNA, 23 nt, Human
aaaacaaaaaacugauccuccaa

SEQ ID NO: 95156 - RNA, 25 nt, Human
aaaacaauaacaaacagaacacuag

SEQ ID NO: 95157 - RNA, 21 nt, Human
aaacaaaaaacugauccucca

SEQ ID NO: 95158 - RNA, 22 nt, Human
aaacaaguacauggauauuccc

SEQ ID NO: 95159 - RNA, 20 nt, Human
aaaccagcaucucauaaaca

SEQ ID NO: 95160 - RNA, 23 nt, Human
aacagagaaacaaguacauuaau

SEQ ID NO: 95161 - RNA, 24 nt, Human
aaccucugaggucccuacuuucaa

SEQ ID NO: 95162 - RNA, 24 nt, Human
aaccuuuuucuucuugacuggcac

SEQ ID NO: 95163 - RNA, 21 nt, Human
aagaacacaaaccaaguagcu

SEQ ID NO: 95164 - RNA, 19 nt, Human
aagcaaaguacagagaugc

SEQ ID NO: 95165 - RNA, 19 nt, Human
acaaaccaaguagcugugg

SEQ ID NO: 95166 - RNA, 18 nt, Human
acaaagcgucccucaagg

SEQ ID NO: 95167 - RNA, 19 nt, Human
acuauuucgucuucucuuu

SEQ ID NO: 95168 - RNA, 27 nt, Human
acugucaggggagcaccuggggccggc

SEQ ID NO: 95169 - RNA, 23 nt, Human
agaaaaccagcaucucauaaaca

SEQ ID NO: 95170 - RNA, 28 nt, Human
agaagguuugugugugugugugugugug

SEQ ID NO: 95171 - RNA, 22 nt, Human
agagaugccuagaaccccacua

SEQ ID NO: 95172 - RNA, 25 nt, Human
agccaggaugguugagguaagcgug

SEQ ID NO: 95173 - RNA, 18 nt, Human
agcgcaauaagaaaaugg

SEQ ID NO: 95174 - RNA, 22 nt, Human
aggaaaaaacaaccaacaacaa

SEQ ID NO: 95175 - RNA, 18 nt, Human
agggguggggcggggugg

SEQ ID NO: 95176 - RNA, 19 nt, Human
agggguggggcgggguggg

SEQ ID NO: 95177 - RNA, 20 nt, Human
agguaaaccucugagguccc

SEQ ID NO: 95178 - RNA, 26 nt, Human
auaaaaaaaaaaaaaacuacaaaaaa

SEQ ID NO: 95179 - RNA, 23 nt, Human
aucaucccgaaugagaguccuac

SEQ ID NO: 95180 - RNA, 21 nt, Human
aucuguagcacaacccuccuc

SEQ ID NO: 95181 - RNA, 26 nt, Human
augcuuuuuuuuaaacacguaaagga

SEQ ID NO: 95182 - RNA, 20 nt, Human
caaaacaauaacaaacagaa

SEQ ID NO: 95183 - RNA, 23 nt, Human
caaacaaguacauggauauuccc

SEQ ID NO: 95184 - RNA, 21 nt, Human
caaagcaggcagaaccugccc

SEQ ID NO: 95185 - RNA, 23 nt, Human
caaagcgucccucaaggccccuc

SEQ ID NO: 95186 - RNA, 21 nt, Human
caaaggaaaaaacaaccaaca

SEQ ID NO: 95187 - RNA, 21 nt, Human
caaaggacaugcacacggcca

SEQ ID NO: 95188 - RNA, 19 nt, Human
caacagagaaacaaguaca

SEQ ID NO: 95189 - RNA, 19 nt, Human
caaccagaaaugcacagac

SEQ ID NO: 95190 - RNA, 19 nt, Human
caagaauuacauagccaag

SEQ ID NO: 95191 - RNA, 22 nt, Human
caauagcagcaaacaaugugaa

SEQ ID NO: 95192 - RNA, 21 nt, Human
caccccaccuccacugccacc

SEQ ID NO: 95193 - RNA, 18 nt, Human
caccucccuucaacacuu

SEQ ID NO: 95194 - RNA, 18 nt, Human
cacgcagccucccaaaca

SEQ ID NO: 95195 - RNA, 21 nt, Human
cacgcagccucccaaacaccc

SEQ ID NO: 95196 - RNA, 20 nt, Human
cacugccaccacaguggccc

SEQ ID NO: 95197 - RNA, 22 nt, Human
cagcccucuggaggcuccagga

SEQ ID NO: 95198 - RNA, 22 nt, Human
cagccgcccgccgcccagaccc

SEQ ID NO: 95199 - RNA, 23 nt, Human
cagccuccacacucuugccaccu

SEQ ID NO: 95200 - RNA, 18 nt, Human
cagccucccaaacacccc

SEQ ID NO: 95201 - RNA, 23 nt, Human
caggacuugugcccuugccccau

SEQ ID NO: 95202 - RNA, 20 nt, Human
caggcgcagggaagagaaga

SEQ ID NO: 95203 - RNA, 21 nt, Human
ccaaguagcuguggguugaac

SEQ ID NO: 95204 - RNA, 23 nt, Human
ccacacucuugccaccucccuuc

SEQ ID NO: 95205 - RNA, 21 nt, Human
ccaccuccacugccaccacag

SEQ ID NO: 95206 - RNA, 20 nt, Human
ccagccgcccgccgcccaga

SEQ ID NO: 95207 - RNA, 24 nt, Human
cccaaaacuugaacaaauuccaga

SEQ ID NO: 95208 - RNA, 21 nt, Human
cccaaacaccccaccuccacu

SEQ ID NO: 95209 - RNA, 26 nt, Human
cccaaacaccccaccuccacugccac

SEQ ID NO: 95210 - RNA, 19 nt, Human
cccaaacaccccaccuccc

SEQ ID NO: 95211 - RNA, 19 nt, Human
cccagacccucagacuugc

SEQ ID NO: 95212 - RNA, 19 nt, Human
cccagcaucacaggcgcag

SEQ ID NO: 95213 - RNA, 23 nt, Human
ccccgcgcucccucgcgcucuuc

SEQ ID NO: 95214 - RNA, 20 nt, Human
ccccucgggagccuccuccu

SEQ ID NO: 95215 - RNA, 18 nt, Human
cccgaucagaugaagugc

SEQ ID NO: 95216 - RNA, 22 nt, Human
cccucgcgcucuucugccccuc

SEQ ID NO: 95217 - RNA, 19 nt, Human
ccgacccugcuacgcuggc

SEQ ID NO: 95218 - RNA, 22 nt, Human
ccgagcacaggaugacccugcc

SEQ ID NO: 95219 - RNA, 19 nt, Human
ccggcccccgccagccugu

SEQ ID NO: 95220 - RNA, 22 nt, Human
ccucacaccuccucccgccugu

SEQ ID NO: 95221 - RNA, 21 nt, Human
ccuccgagcacaggaugaccc

SEQ ID NO: 95222 - RNA, 22 nt, Human
ccuccuccucacaccuccuccc

SEQ ID NO: 95223 - RNA, 21 nt, Human
ccucucgauacacacaacauc

SEQ ID NO: 95224 - RNA, 21 nt, Human
ccugggcagcuggggagggcu

SEQ ID NO: 95225 - RNA, 20 nt, Human
ccuguccccggugugggcac

SEQ ID NO: 95226 - RNA, 20 nt, Human
ccuugccccaucacgacaga

SEQ ID NO: 95227 - RNA, 22 nt, Human
cgacagacaaagcgucccucaa

SEQ ID NO: 95228 - RNA, 19 nt, Human
cgccaaagcaggcagaacc

SEQ ID NO: 95229 - RNA, 23 nt, Human
cgccagccugugugggaucgcgc

SEQ ID NO: 95230 - RNA, 20 nt, Human
cgcccgccgcccagacccuc

SEQ ID NO: 95231 - RNA, 18 nt, Human
cgcuggguccaccauggc

SEQ ID NO: 95232 - RNA, 18 nt, Human
cggcucucgcuucugcug

SEQ ID NO: 95233 - RNA, 23 nt, Human
cuaaaacccucuucuacuuuaaa

SEQ ID NO: 95234 - RNA, 20 nt, Human
cuacaaaaaaggcaucugua

SEQ ID NO: 95235 - RNA, 21 nt, Human
cuagaaccccacuacagcugu

SEQ ID NO: 95236 - RNA, 23 nt, Human
cuagaaccccacuacagcugugc

SEQ ID NO: 95237 - RNA, 20 nt, Human
cucacaccuccucccgccug

SEQ ID NO: 95238 - RNA, 19 nt, Human
cucauaaacaggucacuac

SEQ ID NO: 95239 - RNA, 26 nt, Human
cucccccaccgcucaggguuaugcaa

SEQ ID NO: 95240 - RNA, 23 nt, Human
cuccucccgccuguccucccuca

SEQ ID NO: 95241 - RNA, 20 nt, Human
cuccuccucacaccuccucc

SEQ ID NO: 95242 - RNA, 20 nt, Human
cucgcugcuacugcgccgac

SEQ ID NO: 95243 - RNA, 20 nt, Human
cucgcuucugcugccccgcg

SEQ ID NO: 95244 - RNA, 21 nt, Human
cugcuacgcuggcuggugccc

SEQ ID NO: 95245 - RNA, 20 nt, Human
cuguagcacaacccuccucc

SEQ ID NO: 95246 - RNA, 21 nt, Human
cuuaaaaaccaccuguucucu

SEQ ID NO: 95247 - RNA, 26 nt, Human
cuugccaccucccuucaacacuuccu

SEQ ID NO: 95248 - RNA, 21 nt, Human
cuuggaaauggaaugguuuua

SEQ ID NO: 95249 - RNA, 22 nt, Human
gaagguuugugugugugugugu

SEQ ID NO: 95250 - RNA, 21 nt, Human
gagcacaggaugacccugcca

SEQ ID NO: 95251 - RNA, 20 nt, Human
gagcaccuggggccggcucc

SEQ ID NO: 95252 - RNA, 19 nt, Human
gaggcuccaggacuuugca

SEQ ID NO: 95253 - RNA, 18 nt, Human
gauuguuuuuuucucacc

SEQ ID NO: 95254 - RNA, 18 nt, Human
gcaaaguacagagaugcc

SEQ ID NO: 95255 - RNA, 21 nt, Human
gcagcuggggagggcuguggg

SEQ ID NO: 95256 - RNA, 22 nt, Human
gcccagacccucagacuugcgc

SEQ ID NO: 95257 - RNA, 19 nt, Human
gcccgacaaaccuccacug

SEQ ID NO: 95258 - RNA, 21 nt, Human
gcgucccucaaggcccccgcg

SEQ ID NO: 95259 - RNA, 22 nt, Human
gcugccccgcgcucccucgcgc

SEQ ID NO: 95260 - RNA, 23 nt, Human
gcugcggccuguccccggugugg

SEQ ID NO: 95261 - RNA, 24 nt, Human
ggagggguggggcggggugggccu

SEQ ID NO: 95262 - RNA, 19 nt, Human
ggaugguuuguuggggugg

SEQ ID NO: 95263 - RNA, 23 nt, Human
ggccacgcuacgcuacuguaacc

SEQ ID NO: 95264 - RNA, 22 nt, Human
ggccccaaccacgugggcccgc

SEQ ID NO: 95265 - RNA, 19 nt, Human
gggacagguggccuuuccc

SEQ ID NO: 95266 - RNA, 21 nt, Human
gggagggcuguggguccuggc

SEQ ID NO: 95267 - RNA, 21 nt, Human
gggccggcccccgccagccug

SEQ ID NO: 95268 - RNA, 20 nt, Human
ggggugggccugugcccgag

SEQ ID NO: 95269 - RNA, 21 nt, Human
ggugcaaccagaaaugcacag

SEQ ID NO: 95270 - RNA, 22 nt, Human
guaaaacaaaaaacugauccuc

SEQ ID NO: 95271 - RNA, 23 nt, Human
guaaaacaaaaaacugauccucc

SEQ ID NO: 95272 - RNA, 21 nt, Human
gucccuacuuucaaacaccag

SEQ ID NO: 95273 - RNA, 23 nt, Human
guguguguguguguguaucugug

SEQ ID NO: 95274 - RNA, 20 nt, Human
uaaaaacuacuaugaugcua

SEQ ID NO: 95275 - RNA, 25 nt, Human
uaaaaauaaacuguauuaaaucugu

SEQ ID NO: 95276 - RNA, 21 nt, Human
uaaaacccucuucuacuuuaa

SEQ ID NO: 95277 - RNA, 21 nt, Human
uaaacauacccaaaacuugaa

SEQ ID NO: 95278 - RNA, 20 nt, Human
uaacaaaacaauaacaaaca

SEQ ID NO: 95279 - RNA, 30 nt, Human
uaacaaaacaauaacaaacagaacacuagg

SEQ ID NO: 95280 - RNA, 23 nt, Human
uaacagauuaaacauacccaaaa

SEQ ID NO: 95281 - RNA, 23 nt, Human
uaaccaagaggugacuucagcca

SEQ ID NO: 95282 - RNA, 21 nt, Human
uacaaugacuuauaaagugac

SEQ ID NO: 95283 - RNA, 22 nt, Human
uacacacaacauccaggacuug

SEQ ID NO: 95284 - RNA, 18 nt, Human
uacagagaugccuagaac

SEQ ID NO: 95285 - RNA, 24 nt, Human
uacaugcauaugagcaagcaaagu

SEQ ID NO: 95286 - RNA, 25 nt, Human
uacggaauauaauaacauacaauga

SEQ ID NO: 95287 - RNA, 22 nt, Human
uacuaugaugcuacgcccccga

SEQ ID NO: 95288 - RNA, 19 nt, Human
uagaaaaccagcaucucau

SEQ ID NO: 95289 - RNA, 22 nt, Human
uagcauuaugguguaauuaaca

SEQ ID NO: 95290 - RNA, 23 nt, Human
uagcuacacgcaaagaauaacac

SEQ ID NO: 95291 - RNA, 24 nt, Human
uagguugaguacccuaauuuuccu

SEQ ID NO: 95292 - RNA, 23 nt, Human
uaguacauaacagauuaaacaua

SEQ ID NO: 95293 - RNA, 24 nt, Human
uaucuguguguuuaaaucaagggg

SEQ ID NO: 95294 - RNA, 27 nt, Human
uauuuuuuuuuucucucucucucuuuu

SEQ ID NO: 95295 - RNA, 18 nt, Human
ucacaggcgcaaaggaca

SEQ ID NO: 95296 - RNA, 19 nt, Human
ucacuggaugguuuguugg

SEQ ID NO: 95297 - RNA, 18 nt, Human
ucagacagacgccgcagc

SEQ ID NO: 95298 - RNA, 24 nt, Human
ucauacuggccuuaugaacauccu

SEQ ID NO: 95299 - RNA, 24 nt, Human
ucaucggaaccgaacuuagguuga

SEQ ID NO: 95300 - RNA, 22 nt, Human
uccacugccaccacaguggccc

SEQ ID NO: 95301 - RNA, 23 nt, Human
uccacugccaccacaguggccca

SEQ ID NO: 95302 - RNA, 20 nt, Human
ucccuacuuucaaacaccag

SEQ ID NO: 95303 - RNA, 22 nt, Human
ucccugcacacacaacaaaaac

SEQ ID NO: 95304 - RNA, 22 nt, Human
uccucccucacacgucagccuc

SEQ ID NO: 95305 - RNA, 18 nt, Human
uccugggcagcuggggag

SEQ ID NO: 95306 - RNA, 23 nt, Human
ucucacgcacgcggccucggggc

SEQ ID NO: 95307 - RNA, 20 nt, Human
ucucccgagacgccuccuuu

SEQ ID NO: 95308 - RNA, 24 nt, Human
ucucuagguaaaccucugaggucc

SEQ ID NO: 95309 - RNA, 22 nt, Human
ucugggaaacgccaaacaggcu

SEQ ID NO: 95310 - RNA, 23 nt, Human
ucuguaauacaauguucuaagag

SEQ ID NO: 95311 - RNA, 25 nt, Human
ucuguagcacaacccuccuccccca

SEQ ID NO: 95312 - RNA, 18 nt, Human
ugaaacaucuaagauaac

SEQ ID NO: 95313 - RNA, 21 nt, Human
ugaaacaucuaagauaacccu

SEQ ID NO: 95314 - RNA, 19 nt, Human
ugaaccuggacgugagcug

SEQ ID NO: 95315 - RNA, 21 nt, Human
ugaagugcccagcaucacagg

SEQ ID NO: 95316 - RNA, 19 nt, Human
ugacuacaugcauaugagc

SEQ ID NO: 95317 - RNA, 22 nt, Human
ugagaaugcaaaccuuuuucuu

SEQ ID NO: 95318 - RNA, 20 nt, Human
ugagcuggcugcagggccgu

SEQ ID NO: 95319 - RNA, 22 nt, Human
ugcacacacaacaaaaacagcg

SEQ ID NO: 95320 - RNA, 21 nt, Human
ugcccgccaaagcaggcagaa

SEQ ID NO: 95321 - RNA, 23 nt, Human
ugcugccccgcgcucccucgcgc

SEQ ID NO: 95322 - RNA, 21 nt, Human
uggaggcuccaggacuuugca

SEQ ID NO: 95323 - RNA, 21 nt, Human
ugggcaccgccccuuccccuc

SEQ ID NO: 95324 - RNA, 18 nt, Human
ugggcagcuggggagggc

SEQ ID NO: 95325 - RNA, 20 nt, Human
ugguggcacguaagacacac

SEQ ID NO: 95326 - RNA, 26 nt, Human
uguagcacaacccuccucccccaccg

SEQ ID NO: 95327 - RNA, 26 nt, Human
ugucacuaaguuuuuuaaaggaaggg

SEQ ID NO: 95328 - RNA, 24 nt, Human
uguccaaucagaugacucugggaa

SEQ ID NO: 95329 - RNA, 20 nt, Human
uguguguguguaucugugug

SEQ ID NO: 95330 - RNA, 21 nt, Human
uguguguguguaucugugugu

SEQ ID NO: 95331 - RNA, 21 nt, Human
uguguguguguguaucugugu

SEQ ID NO: 95332 - RNA, 23 nt, Human
uguguguguguguaucugugugu

SEQ ID NO: 95333 - RNA, 22 nt, Human
uguguguguguguguguaucug

SEQ ID NO: 95334 - RNA, 18 nt, Human
ugugugugugugugugug

SEQ ID NO: 95335 - RNA, 18 nt, Human
ugugugugugugugugug

SEQ ID NO: 95336 - RNA, 18 nt, Human
ugugugugugugugugug

SEQ ID NO: 95337 - RNA, 18 nt, Human
ugugugugugugugugug

SEQ ID NO: 95338 - RNA, 18 nt, Human
ugugugugugugugugug

SEQ ID NO: 95339 - RNA, 21 nt, Human
ugugugugugugugugugugu

SEQ ID NO: 95340 - RNA, 21 nt, Human
ugugugugugugugugugugu

SEQ ID NO: 95341 - RNA, 21 nt, Human
ugugugugugugugugugugu

SEQ ID NO: 95342 - RNA, 21 nt, Human
ugugugugugugugugugugu

SEQ ID NO: 95343 - RNA, 21 nt, Human
ugugugugugugugugugugu

SEQ ID NO: 95344 - RNA, 21 nt, Human
ugugugugugugugugugugu

SEQ ID NO: 95345 - RNA, 21 nt, Human
ugugugugugugugugugugu

SEQ ID NO: 95346 - RNA, 22 nt, Human
ugugugugugugugugugugua

SEQ ID NO: 95347 - RNA, 22 nt, Human
ugugugugugugugugugugug

SEQ ID NO: 95348 - RNA, 22 nt, Human
ugugugugugugugugugugug

SEQ ID NO: 95349 - RNA, 20 nt, Human
uuaaaggaaggggcagggga

SEQ ID NO: 95350 - RNA, 21 nt, Human
uuaacaaaacaauaacaaaca

SEQ ID NO: 95351 - RNA, 19 nt, Human
uuacaacagagaaacaagu

SEQ ID NO: 95352 - RNA, 22 nt, Human
uuacauagccaagaugugcaaa

SEQ ID NO: 95353 - RNA, 20 nt, Human
uucuggagggguggggcggg

SEQ ID NO: 95354 - RNA, 28 nt, Human
uucuggagggguggggcggggugggccu

SEQ ID NO: 95355 - RNA, 26 nt, Human
uugaucacauaaaaaaaaaaaaaacu

SEQ ID NO: 95356 - RNA, 21 nt, Human
uugccucaaaguccugcuugc

SEQ ID NO: 95357 - RNA, 20 nt, Human
uugcugaauuuuucuauguu

SEQ ID NO: 95358 - RNA, 24 nt, Human
uugcugaauuuuucuauguuuuuu

SEQ ID NO: 95359 - RNA, 18 nt, Human
uuggcaccaaaggauucc

SEQ ID NO: 95360 - RNA, 19 nt, Human
uuucauguuugucuuuuug

SEQ ID NO: 95361 - RNA, 24 nt, Human
uuugugugugugugugugugugug

SEQ ID NO: 95362 - RNA, 23 nt, Human
uuuguuggggugguggucacagg

SEQ ID NO: 95363 - RNA, 18 nt, Human
uuuuucuucuugacuggc

SEQ ID NO: 95364 - RNA, 22 nt, Human
aaaaaaaaaaaaaacggaaaag

SEQ ID NO: 95365 - RNA, 25 nt, Human
aaaaaaaaaaaaaacggaaaaggga

SEQ ID NO: 95366 - RNA, 27 nt, Human
aaaaaaaaaaaaccaaacugaacaaaa

SEQ ID NO: 95367 - RNA, 24 nt, Human
aaaaaaaaaaaccaaaaaaccaag

SEQ ID NO: 95368 - RNA, 25 nt, Human
aaaaaaaaaaagaaaaagaaaagaa

SEQ ID NO: 95369 - RNA, 22 nt, Human
aaaaaaaacaaccaugaauaug

SEQ ID NO: 95370 - RNA, 24 nt, Human
aaaaaaaacggaaaagggaacaaa

SEQ ID NO: 95371 - RNA, 20 nt, Human
aaaaaaccaaaaaaccaaaa

SEQ ID NO: 95372 - RNA, 20 nt, Human
aaaaaaccaaacugaacaaa

SEQ ID NO: 95373 - RNA, 20 nt, Human
aaaaaagucuccucuaauuu

SEQ ID NO: 95374 - RNA, 23 nt, Human
aaaaagaaaaagaaaagaaaaaa

SEQ ID NO: 95375 - RNA, 21 nt, Human
aaaaaugagagacccuuagau

SEQ ID NO: 95376 - RNA, 20 nt, Human
aaaacaaacuacggaagggc

SEQ ID NO: 95377 - RNA, 21 nt, Human
aaaacaaacuacggaagggcu

SEQ ID NO: 95378 - RNA, 20 nt, Human
aaaacacaaagaacaaaaac

SEQ ID NO: 95379 - RNA, 21 nt, Human
aaaacacaaagaacaaaaaca

SEQ ID NO: 95380 - RNA, 24 nt, Human
aaaagaaaaaaaaaaacaaccaug

SEQ ID NO: 95381 - RNA, 18 nt, Human
aaaauagcagcacacucu

SEQ ID NO: 95382 - RNA, 20 nt, Human
aaaauuccccugcccucuug

SEQ ID NO: 95383 - RNA, 21 nt, Human
aaacacaaagaacaaaaacaa

SEQ ID NO: 95384 - RNA, 21 nt, Human
aaacagacacccacaccucuu

SEQ ID NO: 95385 - RNA, 23 nt, Human
aaacugaacaaaacaaaauuaaa

SEQ ID NO: 95386 - RNA, 20 nt, Human
aaagaacaaaaacaaccaga

SEQ ID NO: 95387 - RNA, 21 nt, Human
aaauagcccuguucugauuuu

SEQ ID NO: 95388 - RNA, 24 nt, Human
aacacaaagaacaaaaacaaccag

SEQ ID NO: 95389 - RNA, 27 nt, Human
aaccaaaaaaccaaaaaagaaaaaaaa

SEQ ID NO: 95390 - RNA, 18 nt, Human
aacgugaauaaggaugga

SEQ ID NO: 95391 - RNA, 21 nt, Human
aacgugaauaaggauggauga

SEQ ID NO: 95392 - RNA, 18 nt, Human
aacuggucucgcucuccc

SEQ ID NO: 95393 - RNA, 20 nt, Human
aagaaaacaaacuacggaag

SEQ ID NO: 95394 - RNA, 21 nt, Human
aagaagaagcaggaugucaca

SEQ ID NO: 95395 - RNA, 24 nt, Human
aagaagagaaagaacaacaacaac

SEQ ID NO: 95396 - RNA, 18 nt, Human
aagcagccucuucaccuc

SEQ ID NO: 95397 - RNA, 20 nt, Human
aagggugaugaacauaaugg

SEQ ID NO: 95398 - RNA, 18 nt, Human
aagguagaaaaagaccag

SEQ ID NO: 95399 - RNA, 24 nt, Human
aaguggagaggaagaaaaauucaa

SEQ ID NO: 95400 - RNA, 21 nt, Human
aaucacuuaacacugaacaga

SEQ ID NO: 95401 - RNA, 20 nt, Human
aauccagaaucaucaaaagc

SEQ ID NO: 95402 - RNA, 23 nt, Human
acaaagaacaaaaacaaccagaa

SEQ ID NO: 95403 - RNA, 23 nt, Human
acaacaaaaagagcaaguucaaa

SEQ ID NO: 95404 - RNA, 18 nt, Human
acaacaacaacaaaaaga

SEQ ID NO: 95405 - RNA, 23 nt, Human
acacccaucaucacacaaggccc

SEQ ID NO: 95406 - RNA, 22 nt, Human
accaaaaaaccaaaaaagaaaa

SEQ ID NO: 95407 - RNA, 18 nt, Human
accagcaauaacuuuucu

SEQ ID NO: 95408 - RNA, 19 nt, Human
accagggucuaacugggag

SEQ ID NO: 95409 - RNA, 18 nt, Human
acuacaggaagaguggaa

SEQ ID NO: 95410 - RNA, 18 nt, Human
acucauucuauagcuaca

SEQ ID NO: 95411 - RNA, 18 nt, Human
acuccugacuuaguaaca

SEQ ID NO: 95412 - RNA, 19 nt, Human
acucgcaccgguccucccc

SEQ ID NO: 95413 - RNA, 19 nt, Human
acucgcaccgguccucccc

SEQ ID NO: 95414 - RNA, 19 nt, Human
acuuccuaaaaaccuuuuc

SEQ ID NO: 95415 - RNA, 21 nt, Human
agaaaaagaaaagaaaaaaaa

SEQ ID NO: 95416 - RNA, 19 nt, Human
agaaaagacuccauucugg

SEQ ID NO: 95417 - RNA, 19 nt, Human
agaaagaagaagagaccag

SEQ ID NO: 95418 - RNA, 20 nt, Human
agaacaacaacaacaaaaag

SEQ ID NO: 95419 - RNA, 24 nt, Human
agaacuaaaccaauuaaaaauaaa

SEQ ID NO: 95420 - RNA, 30 nt, Human
agaagagaaagaacaacaacaacaaaaagg

SEQ ID NO: 95421 - RNA, 23 nt, Human
agagaagcagccucuucucccgg

SEQ ID NO: 95422 - RNA, 27 nt, Human
agagagaagguggagcagaagggaccc

SEQ ID NO: 95423 - RNA, 24 nt, Human
agagucaucugauccugccuuaug

SEQ ID NO: 95424 - RNA, 23 nt, Human
agcccagccaaguuuaaaagcag

SEQ ID NO: 95425 - RNA, 18 nt, Human
aggaacaccagaacugug

SEQ ID NO: 95426 - RNA, 24 nt, Human
agggagggggcaaaagagaagagg

SEQ ID NO: 95427 - RNA, 25 nt, Human
agggagggggcaaaagagaagaggg

SEQ ID NO: 95428 - RNA, 27 nt, Human
aggugggggcagaauuuuugggagguc

SEQ ID NO: 95429 - RNA, 21 nt, Human
aguauucagcaugacuugcau

SEQ ID NO: 95430 - RNA, 23 nt, Human
aguggaaaguuacagacuguaaa

SEQ ID NO: 95431 - RNA, 21 nt, Human
auaaaauaauucuucaaauag

SEQ ID NO: 95432 - RNA, 22 nt, Human
aucagaggaaaaaaaaaaaacc

SEQ ID NO: 95433 - RNA, 22 nt, Human
caaaaagagcaaguucaaaucc

SEQ ID NO: 95434 - RNA, 21 nt, Human
caaaaaggucccugggaguga

SEQ ID NO: 95435 - RNA, 20 nt, Human
caaaaugccacacccugaug

SEQ ID NO: 95436 - RNA, 19 nt, Human
caaacagacacccacaccu

SEQ ID NO: 95437 - RNA, 25 nt, Human
caaagaacaaaaacaaccagaaaga

SEQ ID NO: 95438 - RNA, 24 nt, Human
caaagaacgccagauaccagaagc

SEQ ID NO: 95439 - RNA, 18 nt, Human
caaagagacuaagagcua

SEQ ID NO: 95440 - RNA, 18 nt, Human
caaauaggcaccaaaugc

SEQ ID NO: 95441 - RNA, 21 nt, Human
caacaacaacaaaaagagcaa

SEQ ID NO: 95442 - RNA, 30 nt, Human
caacaacaauaaaaaaaaaaaaaacggaag

SEQ ID NO: 95443 - RNA, 22 nt, Human
caaccagaaagaagaagagacc

SEQ ID NO: 95444 - RNA, 19 nt, Human
caaguuuaaaagcagacac

SEQ ID NO: 95445 - RNA, 19 nt, Human
caauugugcaaaaaaaaaa

SEQ ID NO: 95446 - RNA, 22 nt, Human
cacaaagaacaaaaacaaccag

SEQ ID NO: 95447 - RNA, 24 nt, Human
cacacccaucaucacacaaggccc

SEQ ID NO: 95448 - RNA, 23 nt, Human
cacaccucuuauagaguacacug

SEQ ID NO: 95449 - RNA, 20 nt, Human
cacauagaccaaggaugacc

SEQ ID NO: 95450 - RNA, 22 nt, Human
caccaaaaauuaguuuuuuucu

SEQ ID NO: 95451 - RNA, 19 nt, Human
caccagaacuguguaccaa

SEQ ID NO: 95452 - RNA, 24 nt, Human
caccaugaaaugaauuugcaccuc

SEQ ID NO: 95453 - RNA, 21 nt, Human
cacccuaaaacacaaagaaca

SEQ ID NO: 95454 - RNA, 26 nt, Human
cacccuaaaacacaaagaacaaaaac

SEQ ID NO: 95455 - RNA, 28 nt, Human
cacccuaaaacacaaagaacaaaaacaa

SEQ ID NO: 95456 - RNA, 22 nt, Human
cacuucccucuccaaaacuuca

SEQ ID NO: 95457 - RNA, 21 nt, Human
cagaaaagacuccauucugga

SEQ ID NO: 95458 - RNA, 20 nt, Human
cagaacagagccuccaguac

SEQ ID NO: 95459 - RNA, 18 nt, Human
cagaaucaucaaaagcca

SEQ ID NO: 95460 - RNA, 20 nt, Human
cagagcucccagggcacagu

SEQ ID NO: 95461 - RNA, 24 nt, Human
cagccaucuaucuuugcaccagca

SEQ ID NO: 95462 - RNA, 23 nt, Human
cagcccugcucacacugcuucug

SEQ ID NO: 95463 - RNA, 23 nt, Human
cagcgcaaaaaaaaaaaaaaacc

SEQ ID NO: 95464 - RNA, 23 nt, Human
caggagccaaucaccugugucca

SEQ ID NO: 95465 - RNA, 22 nt, Human
caggaugucacagaacaugaaa

SEQ ID NO: 95466 - RNA, 22 nt, Human
cauccugaccaaacagacaccc

SEQ ID NO: 95467 - RNA, 25 nt, Human
cauucaaaaccauuuucaaauccau

SEQ ID NO: 95468 - RNA, 23 nt, Human
ccaaagaacgccagauaccagaa

SEQ ID NO: 95469 - RNA, 21 nt, Human
ccaaucaccuguguccaacug

SEQ ID NO: 95470 - RNA, 18 nt, Human
ccacacccaucaucacac

SEQ ID NO: 95471 - RNA, 18 nt, Human
ccauacuuaucugaccua

SEQ ID NO: 95472 - RNA, 22 nt, Human
ccaucaucacacaaggccccaa

SEQ ID NO: 95473 - RNA, 21 nt, Human
ccauuuucaaauccaucuuua

SEQ ID NO: 95474 - RNA, 18 nt, Human
cccacacccaucaucaca

SEQ ID NO: 95475 - RNA, 27 nt, Human
cccacacccaucaucacacaaggcccc

SEQ ID NO: 95476 - RNA, 22 nt, Human
cccauagcuacauuuccccauu

SEQ ID NO: 95477 - RNA, 19 nt, Human
ccccaucaugucccuccuu

SEQ ID NO: 95478 - RNA, 18 nt, Human
cccccacugauggagaaa

SEQ ID NO: 95479 - RNA, 24 nt, Human
ccccggccuggaaaaggguuuuuc

SEQ ID NO: 95480 - RNA, 19 nt, Human
ccccucucccuccugcuuu

SEQ ID NO: 95481 - RNA, 20 nt, Human
ccccucucccuccugcuuuc

SEQ ID NO: 95482 - RNA, 21 nt, Human
ccccuuccuaccuccaauucc

SEQ ID NO: 95483 - RNA, 21 nt, Human
cccggcggccccucucccucc

SEQ ID NO: 95484 - RNA, 23 nt, Human
cccuuggucuccaucugccuccg

SEQ ID NO: 95485 - RNA, 28 nt, Human
ccggcggccccucucccuccugcuuucc

SEQ ID NO: 95486 - RNA, 25 nt, Human
ccucacucgcaccgguccuccccuu

SEQ ID NO: 95487 - RNA, 22 nt, Human
ccucucccuccugcuuuccccg

SEQ ID NO: 95488 - RNA, 22 nt, Human
ccugaccuccuuccuuuggcua

SEQ ID NO: 95489 - RNA, 25 nt, Human
ccuuggggcccaggagagugugcug

SEQ ID NO: 95490 - RNA, 19 nt, Human
ccuuuggcuaaauaggggg

SEQ ID NO: 95491 - RNA, 22 nt, Human
cgcaaaaaaaaaaaaaaaccaa

SEQ ID NO: 95492 - RNA, 24 nt, Human
cgcaaaaaaaaaaaaaaaccaaac

SEQ ID NO: 95493 - RNA, 21 nt, Human
cgcaccgguccuccccuuaaa

SEQ ID NO: 95494 - RNA, 18 nt, Human
cggcagccccacacccau

SEQ ID NO: 95495 - RNA, 21 nt, Human
cggcccccacugauggagaaa

SEQ ID NO: 95496 - RNA, 22 nt, Human
cgggacuacaggaagaguggaa

SEQ ID NO: 95497 - RNA, 25 nt, Human
cuaaaacacaaagaacaaaaacaac

SEQ ID NO: 95498 - RNA, 22 nt, Human
cuaccagaagaaaacaaacuac

SEQ ID NO: 95499 - RNA, 22 nt, Human
cuauucucaagguuggacuguc

SEQ ID NO: 95500 - RNA, 19 nt, Human
cucaagggucagucaccau

SEQ ID NO: 95501 - RNA, 23 nt, Human
cuccccuuccuaccuccaauucc

SEQ ID NO: 95502 - RNA, 20 nt, Human
cuccucuggaacaaaacucc

SEQ ID NO: 95503 - RNA, 22 nt, Human
cucggcccccacugauggagaa

SEQ ID NO: 95504 - RNA, 23 nt, Human
cugcagagaugauccuaaacaca

SEQ ID NO: 95505 - RNA, 24 nt, Human
cugccuugaaggggagggaggauc

SEQ ID NO: 95506 - RNA, 19 nt, Human
cuucucccagcccuguccc

SEQ ID NO: 95507 - RNA, 18 nt, Human
cuuggcuguuauggaccc

SEQ ID NO: 95508 - RNA, 25 nt, Human
cuuuuacauaaucaaacaauaacug

SEQ ID NO: 95509 - RNA, 18 nt, Human
gaaaaaaaaaaacaaccc

SEQ ID NO: 95510 - RNA, 21 nt, Human
gaacaacaacaacaaaaagag

SEQ ID NO: 95511 - RNA, 19 nt, Human
gaagaaaugccaaggccac

SEQ ID NO: 95512 - RNA, 18 nt, Human
gaaggggagggaggaucc

SEQ ID NO: 95513 - RNA, 22 nt, Human
gaagguggagcagaagggaggc

SEQ ID NO: 95514 - RNA, 22 nt, Human
gaaugggcucccaagcagaaac

SEQ ID NO: 95515 - RNA, 25 nt, Human
gacugggggcaggaagggagggggc

SEQ ID NO: 95516 - RNA, 18 nt, Human
gagaagaggggaggagua

SEQ ID NO: 95517 - RNA, 21 nt, Human
gagcucgccucucagcacgca

SEQ ID NO: 95518 - RNA, 22 nt, Human
gaggaucccuugguucaauguc

SEQ ID NO: 95519 - RNA, 18 nt, Human
gagggcagagagagaagg

SEQ ID NO: 95520 - RNA, 19 nt, Human
gaguccugguaggaacacc

SEQ ID NO: 95521 - RNA, 20 nt, Human
gaucuccaaacagccuggug

SEQ ID NO: 95522 - RNA, 18 nt, Human
gcaaaaaaaaaaaaaaaa

SEQ ID NO: 95523 - RNA, 23 nt, Human
gcaauaaaauuaacaacaacaau

SEQ ID NO: 95524 - RNA, 22 nt, Human
gccaauacaacauuuuugccau

SEQ ID NO: 95525 - RNA, 21 nt, Human
gccagcccggcggccccucuc

SEQ ID NO: 95526 - RNA, 23 nt, Human
gcgcaguuugagacagaggaggg

SEQ ID NO: 95527 - RNA, 28 nt, Human
ggagcagaagggaggcgaggauugggug

SEQ ID NO: 95528 - RNA, 21 nt, Human
ggagccaaucaccugugucca

SEQ ID NO: 95529 - RNA, 19 nt, Human
ggagugagaccgcccugcc

SEQ ID NO: 95530 - RNA, 24 nt, Human
ggcagaaaagccuaacaacccccg

SEQ ID NO: 95531 - RNA, 21 nt, Human
ggcagagagagaagguggagc

SEQ ID NO: 95532 - RNA, 21 nt, Human
ggcaggcugggggaacaacuc

SEQ ID NO: 95533 - RNA, 25 nt, Human
ggccccucucccuccugcuuucccc

SEQ ID NO: 95534 - RNA, 18 nt, Human
gggcaaaagagaagaggg

SEQ ID NO: 95535 - RNA, 25 nt, Human
gggcgagcagagccucggggcugau

SEQ ID NO: 95536 - RNA, 19 nt, Human
ggggagaggugagggcaga

SEQ ID NO: 95537 - RNA, 20 nt, Human
gggggagaggugagggcaga

SEQ ID NO: 95538 - RNA, 23 nt, Human
gggucuaacugggagcccgaugg

SEQ ID NO: 95539 - RNA, 20 nt, Human
gguguccaugccaggggagg

SEQ ID NO: 95540 - RNA, 24 nt, Human
guagagauccaacuacacuccuga

SEQ ID NO: 95541 - RNA, 21 nt, Human
guaggcugcaggcgaagggau

SEQ ID NO: 95542 - RNA, 23 nt, Human
uaaaaaaaugagagacccuuaga

SEQ ID NO: 95543 - RNA, 21 nt, Human
uaaaacacaaagaacaaaaac

SEQ ID NO: 95544 - RNA, 21 nt, Human
uaaaacacaaagaacaaaaac

SEQ ID NO: 95545 - RNA, 24 nt, Human
uaaaagcagacacacacgaaugua

SEQ ID NO: 95546 - RNA, 23 nt, Human
uaaacuagucagaaaacagguua

SEQ ID NO: 95547 - RNA, 21 nt, Human
uaaauaggggguuuucggggg

SEQ ID NO: 95548 - RNA, 20 nt, Human
uaacaacccccgacuuuccc

SEQ ID NO: 95549 - RNA, 25 nt, Human
uaacacugaacagauaagaccucuu

SEQ ID NO: 95550 - RNA, 24 nt, Human
uaacaugaaaaaaaaaagucuccu

SEQ ID NO: 95551 - RNA, 19 nt, Human
uaaggagagggcaaaaucc

SEQ ID NO: 95552 - RNA, 23 nt, Human
uaaggcacuuuauuuccccaaag

SEQ ID NO: 95553 - RNA, 18 nt, Human
uaggaaaccugcagagau

SEQ ID NO: 95554 - RNA, 19 nt, Human
uaggauuuggccaaaagag

SEQ ID NO: 95555 - RNA, 21 nt, Human
uagggucaugcuaacucacaa

SEQ ID NO: 95556 - RNA, 22 nt, Human
uaguaucguugugccugaaaug

SEQ ID NO: 95557 - RNA, 20 nt, Human
uauaacugagagagaggaga

SEQ ID NO: 95558 - RNA, 22 nt, Human
uauccugccaauucagugugau

SEQ ID NO: 95559 - RNA, 19 nt, Human
uaucguugugccugaaaug

SEQ ID NO: 95560 - RNA, 23 nt, Human
uaugcuuagcauauauuuuuggc

SEQ ID NO: 95561 - RNA, 19 nt, Human
ucaccucccuucaacuauc

SEQ ID NO: 95562 - RNA, 26 nt, Human
ucagcaggaaggggugucucuugagu

SEQ ID NO: 95563 - RNA, 19 nt, Human
ucagcauuaauuucccuuu

SEQ ID NO: 95564 - RNA, 24 nt, Human
ucaggguugucuucuccucuggcu

SEQ ID NO: 95565 - RNA, 23 nt, Human
ucagucccagagcucccagggca

SEQ ID NO: 95566 - RNA, 23 nt, Human
ucauuaccugucaauuacaauug

SEQ ID NO: 95567 - RNA, 23 nt, Human
ucccacuuuccccauuccguggg

SEQ ID NO: 95568 - RNA, 23 nt, Human
ucccauacuuaucugaccuauuu

SEQ ID NO: 95569 - RNA, 24 nt, Human
uccccugaccuccuuccuuuggcu

SEQ ID NO: 95570 - RNA, 19 nt, Human
uccccuguggcccauggag

SEQ ID NO: 95571 - RNA, 20 nt, Human
ucccugggagugagaccgcc

SEQ ID NO: 95572 - RNA, 22 nt, Human
ucuaaacacacuucccaagaga

SEQ ID NO: 95573 - RNA, 18 nt, Human
ucuccaaaacuucaaaau

SEQ ID NO: 95574 - RNA, 22 nt, Human
ucuccaaaacuucaaaauucac

SEQ ID NO: 95575 - RNA, 27 nt, Human
ucuggcuuugucacuuaaaggucggac

SEQ ID NO: 95576 - RNA, 20 nt, Human
ugaacuagaaaaucaauuau

SEQ ID NO: 95577 - RNA, 23 nt, Human
ugaaucuucuuacccuauuuugc

SEQ ID NO: 95578 - RNA, 21 nt, Human
ugacauaaggugcaagucuau

SEQ ID NO: 95579 - RNA, 18 nt, Human
ugaccuccuuccuuuggc

SEQ ID NO: 95580 - RNA, 18 nt, Human
ugacuauaucaugucacc

SEQ ID NO: 95581 - RNA, 21 nt, Human
ugacuuaguaacagguggcug

SEQ ID NO: 95582 - RNA, 22 nt, Human
ugagacagaggagggagaagga

SEQ ID NO: 95583 - RNA, 20 nt, Human
ugagagaauaacauggacuu

SEQ ID NO: 95584 - RNA, 22 nt, Human
ugaggauaccagggucuaacug

SEQ ID NO: 95585 - RNA, 21 nt, Human
ugagggcagagagagaaggug

SEQ ID NO: 95586 - RNA, 21 nt, Human
ugagggcagagagagaaggug

SEQ ID NO: 95587 - RNA, 18 nt, Human
ugagguaaagaauacucc

SEQ ID NO: 95588 - RNA, 21 nt, Human
ugaugcugucaggguugucuu

SEQ ID NO: 95589 - RNA, 18 nt, Human
ugcaaaaaaaaaaaaaaa

SEQ ID NO: 95590 - RNA, 23 nt, Human
ugcagaugaagccccgcuuuuga

SEQ ID NO: 95591 - RNA, 21 nt, Human
ugccacacccugauguucagc

SEQ ID NO: 95592 - RNA, 25 nt, Human
ugccuuauguucuuaaccuuucagu

SEQ ID NO: 95593 - RNA, 24 nt, Human
ugcuccaaccucuuugcuaacuga

SEQ ID NO: 95594 - RNA, 22 nt, Human
ugcuguacuucaaauaggcacc

SEQ ID NO: 95595 - RNA, 19 nt, Human
ugcugugcucuccaguggg

SEQ ID NO: 95596 - RNA, 24 nt, Human
uggaacaaaacuccuaccaaagag

SEQ ID NO: 95597 - RNA, 23 nt, Human
uggaagaagaagcaggaugucac

SEQ ID NO: 95598 - RNA, 18 nt, Human
uggagcagaagggaggcg

SEQ ID NO: 95599 - RNA, 22 nt, Human
uggcaggcugggggaacaacuc

SEQ ID NO: 95600 - RNA, 21 nt, Human
uggccaaaagaggggaaggau

SEQ ID NO: 95601 - RNA, 19 nt, Human
uggcccgaugauuugcugg

SEQ ID NO: 95602 - RNA, 20 nt, Human
uggcccgaugauuugcuggg

SEQ ID NO: 95603 - RNA, 22 nt, Human
uggcccgaugauuugcugggga

SEQ ID NO: 95604 - RNA, 24 nt, Human
ugggaaagagaaaagcuagaagga

SEQ ID NO: 95605 - RNA, 21 nt, Human
ugggggcaggaagggaggggg

SEQ ID NO: 95606 - RNA, 22 nt, Human
uggugucugcaaugaacugcau

SEQ ID NO: 95607 - RNA, 22 nt, Human
ugugagguauuaugaaaacaaa

SEQ ID NO: 95608 - RNA, 20 nt, Human
ugugcaaaaaaaaaaaaaaa

SEQ ID NO: 95609 - RNA, 22 nt, Human
ugugcucuccagugggguccug

SEQ ID NO: 95610 - RNA, 19 nt, Human
uguuuagaauccagaauca

SEQ ID NO: 95611 - RNA, 26 nt, Human
uuauaaaauagcagcacacucuguga

SEQ ID NO: 95612 - RNA, 21 nt, Human
uucaaaauaaggccuccugga

SEQ ID NO: 95613 - RNA, 22 nt, Human
uucaacccucauacuaugaaac

SEQ ID NO: 95614 - RNA, 26 nt, Human
uucacccuaaaacacaaagaacaaaa

SEQ ID NO: 95615 - RNA, 19 nt, Human
uucaccucccuucaacuau

SEQ ID NO: 95616 - RNA, 21 nt, Human
uuccuaccuccaauucccaca

SEQ ID NO: 95617 - RNA, 22 nt, Human
uugcaauaaaauuaacaacaac

SEQ ID NO: 95618 - RNA, 23 nt, Human
uugcauaaaccaucccaucuauc

SEQ ID NO: 95619 - RNA, 18 nt, Human
uuggcuguuauggacccg

SEQ ID NO: 95620 - RNA, 22 nt, Human
uuggcuguuauggacccgcaug

SEQ ID NO: 95621 - RNA, 21 nt, Human
uuguguuuaagcaggagcagg

SEQ ID NO: 95622 - RNA, 20 nt, Human
uuuccugacaccugguaccu

SEQ ID NO: 95623 - RNA, 26 nt, Human
uuugcugcuucuguuuaagcucaagg

SEQ ID NO: 95624 - RNA, 19 nt, Human
aaacaugagagcccccagg

SEQ ID NO: 95625 - RNA, 30 nt, Human
aagccaguuuuauuucacaaucaucuuuaa

SEQ ID NO: 95626 - RNA, 19 nt, Human
accagccuaaaccuugcag

SEQ ID NO: 95627 - RNA, 23 nt, Human
accgaaaugcagacauggcuggu

SEQ ID NO: 95628 - RNA, 20 nt, Human
agaaagcaaagcaaagagga

SEQ ID NO: 95629 - RNA, 22 nt, Human
agaaagcaaagcaaagaggaau

SEQ ID NO: 95630 - RNA, 18 nt, Human
agcaaagcaaagaggaau

SEQ ID NO: 95631 - RNA, 22 nt, Human
agcagcuccuuggccacaaaga

SEQ ID NO: 95632 - RNA, 18 nt, Human
aggaaaacagcaaccacc

SEQ ID NO: 95633 - RNA, 22 nt, Human
aggagaagcugagcagaaagca

SEQ ID NO: 95634 - RNA, 18 nt, Human
aggcagggaggugggugg

SEQ ID NO: 95635 - RNA, 18 nt, Human
aggcagggcgggagugcg

SEQ ID NO: 95636 - RNA, 18 nt, Human
agggacaaugggagagga

SEQ ID NO: 95637 - RNA, 18 nt, Human
agggaggaaaacagcaac

SEQ ID NO: 95638 - RNA, 18 nt, Human
caaggcaggcgacgggcc

SEQ ID NO: 95639 - RNA, 18 nt, Human
caauccaaaugcaauaac

SEQ ID NO: 95640 - RNA, 24 nt, Human
cacaaucaucuuuauuacaguagg

SEQ ID NO: 95641 - RNA, 19 nt, Human
cacaggagaagcugagcag

SEQ ID NO: 95642 - RNA, 22 nt, Human
cacccccagcuagaguugggaa

SEQ ID NO: 95643 - RNA, 24 nt, Human
cacugcgcggcggauccccagcug

SEQ ID NO: 95644 - RNA, 21 nt, Human
cagaaagcaaagcaaagagga

SEQ ID NO: 95645 - RNA, 20 nt, Human
cagcccgcccgccgcccgcg

SEQ ID NO: 95646 - RNA, 20 nt, Human
cagcggccccuccucugcuu

SEQ ID NO: 95647 - RNA, 23 nt, Human
caucuuuauuacaguaggaugau

SEQ ID NO: 95648 - RNA, 23 nt, Human
ccaauccaaaugcaauaacccua

SEQ ID NO: 95649 - RNA, 21 nt, Human
ccaccagccuaaaccuugcag

SEQ ID NO: 95650 - RNA, 22 nt, Human
ccagccuaaaccuugcagccuu

SEQ ID NO: 95651 - RNA, 19 nt, Human
ccccagggguggggggggg

SEQ ID NO: 95652 - RNA, 18 nt, Human
cccugcugcauuuucccu

SEQ ID NO: 95653 - RNA, 19 nt, Human
cccugcuggaggauggggc

SEQ ID NO: 95654 - RNA, 21 nt, Human
ccgcgcgcgcgcgccgcuucc

SEQ ID NO: 95655 - RNA, 22 nt, Human
ccuccagggcaucccugcugca

SEQ ID NO: 95656 - RNA, 23 nt, Human
ccucccucucuagacaggggcug

SEQ ID NO: 95657 - RNA, 21 nt, Human
ccucucuagacaggggcucag

SEQ ID NO: 95658 - RNA, 19 nt, Human
ccuucagcagcaaagcugu

SEQ ID NO: 95659 - RNA, 23 nt, Human
cgagucccaaggcaggcgacggg

SEQ ID NO: 95660 - RNA, 23 nt, Human
cgcccgccgcccgcgcgcgcgcg

SEQ ID NO: 95661 - RNA, 18 nt, Human
cuagacaggggcucagcc

SEQ ID NO: 95662 - RNA, 22 nt, Human
cugcggggauggguaggaccag

SEQ ID NO: 95663 - RNA, 20 nt, Human
cugcuggucagaugcaggga

SEQ ID NO: 95664 - RNA, 18 nt, Human
gacaaugggagaggaggg

SEQ ID NO: 95665 - RNA, 20 nt, Human
gacauggcuggccgggcccc

SEQ ID NO: 95666 - RNA, 23 nt, Human
gagcauuuuggcaguugaaaaca

SEQ ID NO: 95667 - RNA, 24 nt, Human
gagcccccaggggugggggggggc

SEQ ID NO: 95668 - RNA, 18 nt, Human
gauguggugugguuccug

SEQ ID NO: 95669 - RNA, 19 nt, Human
gcacuagagcauuuuggca

SEQ ID NO: 95670 - RNA, 18 nt, Human
gcccgcgcgcgcgcgccg

SEQ ID NO: 95671 - RNA, 24 nt, Human
gcgggcucgcgagucccaaggcag

SEQ ID NO: 95672 - RNA, 24 nt, Human
ggauccccagcccgcccgccgccc

SEQ ID NO: 95673 - RNA, 22 nt, Human
ggccggagagcgcggggcgcgg

SEQ ID NO: 95674 - RNA, 24 nt, Human
ggcgcugcuggucagaugcaggga

SEQ ID NO: 95675 - RNA, 26 nt, Human
gggacaaugggagaggagggcaugac

SEQ ID NO: 95676 - RNA, 24 nt, Human
gggcagcgaacaggcagggcggga

SEQ ID NO: 95677 - RNA, 20 nt, Human
gggcucagccaccuccaggg

SEQ ID NO: 95678 - RNA, 19 nt, Human
ggguggcagcggccccucc

SEQ ID NO: 95679 - RNA, 20 nt, Human
uagagcauuuuggcaguuga

SEQ ID NO: 95680 - RNA, 23 nt, Human
uaggaugaugguccugggccacc

SEQ ID NO: 95681 - RNA, 18 nt, Human
uaggccccucccucuagg

SEQ ID NO: 95682 - RNA, 18 nt, Human
uccaagaagccaaagcca

SEQ ID NO: 95683 - RNA, 20 nt, Human
uccaagaagccaaagccagu

SEQ ID NO: 95684 - RNA, 21 nt, Human
uccccagcccgcccgccgccc

SEQ ID NO: 95685 - RNA, 24 nt, Human
uccugggccaccagccuaaaccuu

SEQ ID NO: 95686 - RNA, 19 nt, Human
ucucuggcugaggccuagg

SEQ ID NO: 95687 - RNA, 23 nt, Human
ucucuggcugaggccuaggcccc

SEQ ID NO: 95688 - RNA, 19 nt, Human
ugagagcccccaggggugg

SEQ ID NO: 95689 - RNA, 23 nt, Human
ugagagcccccaggggugggggg

SEQ ID NO: 95690 - RNA, 22 nt, Human
ugagcagaaagcaaagcaaaga

SEQ ID NO: 95691 - RNA, 24 nt, Human
ugcaauaacccuagaagggacaac

SEQ ID NO: 95692 - RNA, 18 nt, Human
ugcuggucagaugcaggg

SEQ ID NO: 95693 - RNA, 18 nt, Human
uggcagcggccccuccuc

SEQ ID NO: 95694 - RNA, 23 nt, Human
ugggauggccaggcccccauuau

SEQ ID NO: 95695 - RNA, 20 nt, Human
ugguccugggccaccagccu

SEQ ID NO: 95696 - RNA, 24 nt, Human
uucaggcuuagauguggugugguu

SEQ ID NO: 95697 - RNA, 20 nt, Human
uuuggcaguugaaaacauga

SEQ ID NO: 95698 - RNA, 24 nt, Human
uuuuuuuuuuuuuuuuuuuccaag

SEQ ID NO: 95699 - RNA, 21 nt, Human
aaaagcagguaucagagccug

SEQ ID NO: 95700 - RNA, 24 nt, Human
aaaagcagguaucagagccugacc

SEQ ID NO: 95701 - RNA, 19 nt, Human
aagaggaggcaggugccaa

SEQ ID NO: 95702 - RNA, 28 nt, Human
aauaguacacugcaauaaaugccuugau

SEQ ID NO: 95703 - RNA, 22 nt, Human
accaucaacaucuuuacaauga

SEQ ID NO: 95704 - RNA, 21 nt, Human
agaguacaaaugagccugaaa

SEQ ID NO: 95705 - RNA, 23 nt, Human
aggcagcuuuccuaggaaucucu

SEQ ID NO: 95706 - RNA, 25 nt, Human
aggcagcuuuccuaggaaucucuuc

SEQ ID NO: 95707 - RNA, 24 nt, Human
aggggaagagaguacaaaugagcc

SEQ ID NO: 95708 - RNA, 18 nt, Human
agguaucagagccugacc

SEQ ID NO: 95709 - RNA, 27 nt, Human
auaguacacugcaauaaaugccuucuc

SEQ ID NO: 95710 - RNA, 18 nt, Human
auucuauuucacccucuc

SEQ ID NO: 95711 - RNA, 22 nt, Human
caagggcucguuuccgucaaca

SEQ ID NO: 95712 - RNA, 22 nt, Human
cagcgggggagagcaguccccu

SEQ ID NO: 95713 - RNA, 21 nt, Human
cagcugccucaucuggggggu

SEQ ID NO: 95714 - RNA, 23 nt, Human
ccagaggcccugcccugccuccu

SEQ ID NO: 95715 - RNA, 21 nt, Human
ccaucaacaucuuuacaauga

SEQ ID NO: 95716 - RNA, 25 nt, Human
ccaucaacaucuuuacaaugaaaac

SEQ ID NO: 95717 - RNA, 21 nt, Human
cgaccgagacuucucaaaaac

SEQ ID NO: 95718 - RNA, 18 nt, Human
cgcugccacugccggagc

SEQ ID NO: 95719 - RNA, 18 nt, Human
cugcgacagccgcuccac

SEQ ID NO: 95720 - RNA, 19 nt, Human
cuguggagacggcagugga

SEQ ID NO: 95721 - RNA, 19 nt, Human
gaagacuucccuuaccgac

SEQ ID NO: 95722 - RNA, 22 nt, Human
gaagaggaggcaggugccaaua

SEQ ID NO: 95723 - RNA, 18 nt, Human
gacgaugagaggggaaga

SEQ ID NO: 95724 - RNA, 24 nt, Human
gccuccgcugccacugccggagcc

SEQ ID NO: 95725 - RNA, 20 nt, Human
gcuccacuuccgggccacag

SEQ ID NO: 95726 - RNA, 18 nt, Human
ggaagacuucccuuaccg

SEQ ID NO: 95727 - RNA, 18 nt, Human
gggguggccgaagaggag

SEQ ID NO: 95728 - RNA, 26 nt, Human
gucacagcugccucaucugggggguu

SEQ ID NO: 95729 - RNA, 19 nt, Human
uaaaugccuugauggcagc

SEQ ID NO: 95730 - RNA, 22 nt, Human
uauauagcacagaaaaauauac

SEQ ID NO: 95731 - RNA, 19 nt, Human
ucagagucguggcuucccu

SEQ ID NO: 95732 - RNA, 21 nt, Human
ucucaaaaacacuucccgaau

SEQ ID NO: 95733 - RNA, 22 nt, Human
ucucagggugauccccugaucc

SEQ ID NO: 95734 - RNA, 19 nt, Human
ucuuugguaauagugucuc

SEQ ID NO: 95735 - RNA, 19 nt, Human
ugacgaugagaggggaaga

SEQ ID NO: 95736 - RNA, 19 nt, Human
ugacgaugagaggggaaga

SEQ ID NO: 95737 - RNA, 20 nt, Human
ugagaccaucaacaucuuua

SEQ ID NO: 95738 - RNA, 24 nt, Human
ugagagaagacuauggucagaguc

SEQ ID NO: 95739 - RNA, 21 nt, Human
ugcaaaaagagaauaaggcag

SEQ ID NO: 95740 - RNA, 18 nt, Human
ugccggagccgcacugcg

SEQ ID NO: 95741 - RNA, 19 nt, Human
uggaagacuucccuuaccg

SEQ ID NO: 95742 - RNA, 19 nt, Human
uggagacggcaguggaagc

SEQ ID NO: 95743 - RNA, 22 nt, Human
uggcagcauggacuuguucaca

SEQ ID NO: 95744 - RNA, 19 nt, Human
uggccgaagaggaggcagg

SEQ ID NO: 95745 - RNA, 21 nt, Human
uggccgaagaggaggcaggug

SEQ ID NO: 95746 - RNA, 19 nt, Human
uuggaagacuucccuuacc

SEQ ID NO: 95747 - RNA, 20 nt, Human
uuuuuaaucacuggcaaguu

SEQ ID NO: 95748 - RNA, 22 nt, Human
aaaaaaaaaaaaaaaaaagcau

SEQ ID NO: 95749 - RNA, 23 nt, Human
aaaaaaaaaaaaaaaagcaucug

SEQ ID NO: 95750 - RNA, 20 nt, Human
aaaaaaaaaaagcaucuggg

SEQ ID NO: 95751 - RNA, 24 nt, Human
aaaaagacagcugccgcggacaug

SEQ ID NO: 95752 - RNA, 18 nt, Human
aaaauuagcugggcgugg

SEQ ID NO: 95753 - RNA, 24 nt, Human
aaacagaaguggauggcagcaggg

SEQ ID NO: 95754 - RNA, 20 nt, Human
aaaccagcagaugugggcag

SEQ ID NO: 95755 - RNA, 19 nt, Human
aaagcccaggggucugccu

SEQ ID NO: 95756 - RNA, 20 nt, Human
aacauggugaaaucccgucu

SEQ ID NO: 95757 - RNA, 21 nt, Human
aacauggugaaaucccgucuc

SEQ ID NO: 95758 - RNA, 23 nt, Human
aagagcauuugggggccaggcgc

SEQ ID NO: 95759 - RNA, 19 nt, Human
aagcagcagcucagugagc

SEQ ID NO: 95760 - RNA, 19 nt, Human
aagcgugaaagcugucagc

SEQ ID NO: 95761 - RNA, 23 nt, Human
aagggacagagaggugcccucca

SEQ ID NO: 95762 - RNA, 20 nt, Human
aaucccgucucuaccgaaaa

SEQ ID NO: 95763 - RNA, 24 nt, Human
acacauagcaccagcacacauaaa

SEQ ID NO: 95764 - RNA, 22 nt, Human
accagcacacauaaaagcagca

SEQ ID NO: 95765 - RNA, 21 nt, Human
accauggaagccccacccaga

SEQ ID NO: 95766 - RNA, 18 nt, Human
acugcacuccagccgggg

SEQ ID NO: 95767 - RNA, 27 nt, Human
acugucuccaaaaaaaaaaaaaaaaaa

SEQ ID NO: 95768 - RNA, 20 nt, Human
agacaagagcaaaacugucu

SEQ ID NO: 95769 - RNA, 20 nt, Human
agacaggaaaagaauggccc

SEQ ID NO: 95770 - RNA, 24 nt, Human
agacaggaaaagaauggcccagaa

SEQ ID NO: 95771 - RNA, 21 nt, Human
agacaggaaaagaauggcccg

SEQ ID NO: 95772 - RNA, 19 nt, Human
agagacagugagacacgga

SEQ ID NO: 95773 - RNA, 23 nt, Human
agagcugcaguugggaucagcca

SEQ ID NO: 95774 - RNA, 24 nt, Human
agcacuuugggagaccgaaguggg

SEQ ID NO: 95775 - RNA, 22 nt, Human
agcaucucccaucccuggguuu

SEQ ID NO: 95776 - RNA, 24 nt, Human
agccuggccaacauggugaaaucc

SEQ ID NO: 95777 - RNA, 19 nt, Human
agcugcaguugggaucagc

SEQ ID NO: 95778 - RNA, 20 nt, Human
agcugggcgugguugggugc

SEQ ID NO: 95779 - RNA, 24 nt, Human
aggcgccguggcucaugccuguaa

SEQ ID NO: 95780 - RNA, 19 nt, Human
aggcggagguuacagugag

SEQ ID NO: 95781 - RNA, 24 nt, Human
aggcggagguuacagugaguugag

SEQ ID NO: 95782 - RNA, 21 nt, Human
aggcugaggcaggaguauccg

SEQ ID NO: 95783 - RNA, 22 nt, Human
aggggcacacagucgacaggac

SEQ ID NO: 95784 - RNA, 19 nt, Human
aggugcccuccacacagug

SEQ ID NO: 95785 - RNA, 23 nt, Human
aucaugccacugcacuccagccg

SEQ ID NO: 95786 - RNA, 19 nt, Human
augccuguaaucccagcac

SEQ ID NO: 95787 - RNA, 24 nt, Human
caacauggugaaaucccgucucua

SEQ ID NO: 95788 - RNA, 22 nt, Human
caagagcaaaacugucuccaaa

SEQ ID NO: 95789 - RNA, 21 nt, Human
cacaacccccugugagguagg

SEQ ID NO: 95790 - RNA, 25 nt, Human
cacaugggcugaagcuuccagagac

SEQ ID NO: 95791 - RNA, 24 nt, Human
caccagcacacauaaaagcagcag

SEQ ID NO: 95792 - RNA, 18 nt, Human
caccccacccaggguggc

SEQ ID NO: 95793 - RNA, 23 nt, Human
caccccgaccacaccccacccag

SEQ ID NO: 95794 - RNA, 24 nt, Human
cacuccagccggggagacaagagc

SEQ ID NO: 95795 - RNA, 18 nt, Human
cacugcacuccagccggg

SEQ ID NO: 95796 - RNA, 19 nt, Human
cacugcacuccagccgggg

SEQ ID NO: 95797 - RNA, 24 nt, Human
cacugcacuccagccggggagaca

SEQ ID NO: 95798 - RNA, 19 nt, Human
cagaaauucagcacaaaga

SEQ ID NO: 95799 - RNA, 22 nt, Human
cagaaggaagugggugccccau

SEQ ID NO: 95800 - RNA, 23 nt, Human
cagagaggugcccuccacacagu

SEQ ID NO: 95801 - RNA, 21 nt, Human
cagaguaaacagaaguggaug

SEQ ID NO: 95802 - RNA, 24 nt, Human
cagcacuuugggagaccgaagugg

SEQ ID NO: 95803 - RNA, 21 nt, Human
cagcaggaaagcccagggguc

SEQ ID NO: 95804 - RNA, 24 nt, Human
cagcuacccaggaggcugaggcag

SEQ ID NO: 95805 - RNA, 22 nt, Human
caggaaaagaauggcccagaaa

SEQ ID NO: 95806 - RNA, 24 nt, Human
caggagcagagucuccguggccag

SEQ ID NO: 95807 - RNA, 24 nt, Human
caggggucugccucccucccacgg

SEQ ID NO: 95808 - RNA, 30 nt, Human
caugaacacacauagcaccagcacacauag

SEQ ID NO: 95809 - RNA, 20 nt, Human
caugccuguaaucccagcac

SEQ ID NO: 95810 - RNA, 25 nt, Human
cauuugggggccaggcgccguggcu

SEQ ID NO: 95811 - RNA, 22 nt, Human
ccacaccccacccaggguggcc

SEQ ID NO: 95812 - RNA, 26 nt, Human
ccacaccccacccaggguggccagag

SEQ ID NO: 95813 - RNA, 25 nt, Human
ccacccagaaggaagugggugcccc

SEQ ID NO: 95814 - RNA, 19 nt, Human
ccacugcacuccagccggg

SEQ ID NO: 95815 - RNA, 24 nt, Human
ccacugcacuccagccggggagac

SEQ ID NO: 95816 - RNA, 19 nt, Human
ccagagacagugagacacg

SEQ ID NO: 95817 - RNA, 21 nt, Human
ccagcagaugugggcaggggc

SEQ ID NO: 95818 - RNA, 18 nt, Human
ccaggcgccguggcucau

SEQ ID NO: 95819 - RNA, 22 nt, Human
ccauggaagccccacccagaag

SEQ ID NO: 95820 - RNA, 19 nt, Human
cccagaaggaagugggugc

SEQ ID NO: 95821 - RNA, 19 nt, Human
cccaugcaggccgaggugg

SEQ ID NO: 95822 - RNA, 18 nt, Human
cccccacagcagagcugc

SEQ ID NO: 95823 - RNA, 20 nt, Human
ccccgacugcucugcucuuc

SEQ ID NO: 95824 - RNA, 22 nt, Human
cccgucucuaccgaaaauacaa

SEQ ID NO: 95825 - RNA, 21 nt, Human
cccuuauaguagcaaaaagac

SEQ ID NO: 95826 - RNA, 22 nt, Human
ccgaccacaccccacccagggu

SEQ ID NO: 95827 - RNA, 18 nt, Human
ccgccggagcccgccuga

SEQ ID NO: 95828 - RNA, 21 nt, Human
ccguggccagcaggaaagccc

SEQ ID NO: 95829 - RNA, 23 nt, Human
ccuaugcuaugcucccacccuuc

SEQ ID NO: 95830 - RNA, 26 nt, Human
ccuccacacaguguggccaacugcuu

SEQ ID NO: 95831 - RNA, 23 nt, Human
ccucucugcucucugcgcaaagg

SEQ ID NO: 95832 - RNA, 23 nt, Human
ccuggccaacauggugaaauccc

SEQ ID NO: 95833 - RNA, 24 nt, Human
ccuggccaacauggugaaaucccg

SEQ ID NO: 95834 - RNA, 20 nt, Human
ccuguaaucccagcacuuug

SEQ ID NO: 95835 - RNA, 24 nt, Human
cgaagugggcggaucacuugaggu

SEQ ID NO: 95836 - RNA, 18 nt, Human
cgacaggacgggucuaca

SEQ ID NO: 95837 - RNA, 18 nt, Human
cgacugcucugcucuucu

SEQ ID NO: 95838 - RNA, 24 nt, Human
cgagacuagccuggccaacauggu

SEQ ID NO: 95839 - RNA, 21 nt, Human
cgccggagcccgccugagagc

SEQ ID NO: 95840 - RNA, 23 nt, Human
cgccuccagcccccucaguacac

SEQ ID NO: 95841 - RNA, 20 nt, Human
cggagacagaaacuuggugg

SEQ ID NO: 95842 - RNA, 24 nt, Human
cggaucacuugaggucaugaguuc

SEQ ID NO: 95843 - RNA, 24 nt, Human
cguggcucaugccuguaaucccag

SEQ ID NO: 95844 - RNA, 21 nt, Human
cucacauuuaauccucacaac

SEQ ID NO: 95845 - RNA, 24 nt, Human
cucaugccuguaaucccagcacuu

SEQ ID NO: 95846 - RNA, 19 nt, Human
cucccacccuucgccucca

SEQ ID NO: 95847 - RNA, 23 nt, Human
cucccacccuucgccuccagccc

SEQ ID NO: 95848 - RNA, 20 nt, Human
cuccccacugaagccccaaa

SEQ ID NO: 95849 - RNA, 19 nt, Human
cucccgcggagacagaaac

SEQ ID NO: 95850 - RNA, 22 nt, Human
cucucugcgcaaaggccuccau

SEQ ID NO: 95851 - RNA, 21 nt, Human
cucugcucuucugccucuugg

SEQ ID NO: 95852 - RNA, 25 nt, Human
cucugguggggcugggaacaccagg

SEQ ID NO: 95853 - RNA, 19 nt, Human
cugaagccccaaaccagca

SEQ ID NO: 95854 - RNA, 26 nt, Human
cugaagccccaaaccagcagaugugg

SEQ ID NO: 95855 - RNA, 22 nt, Human
cugaagcuuccagagacaguga

SEQ ID NO: 95856 - RNA, 23 nt, Human
cugcaguugggaucagccaggac

SEQ ID NO: 95857 - RNA, 23 nt, Human
cuugcacgggacucccgcggaga

SEQ ID NO: 95858 - RNA, 21 nt, Human
cuuugggagaccgaagugggc

SEQ ID NO: 95859 - RNA, 20 nt, Human
gaaggaagugggugccccau

SEQ ID NO: 95860 - RNA, 25 nt, Human
gaagugggcggaucacuugagguca

SEQ ID NO: 95861 - RNA, 22 nt, Human
gacacuucuggccaagugguuc

SEQ ID NO: 95862 - RNA, 23 nt, Human
gagaucaugccacugcacuccag

SEQ ID NO: 95863 - RNA, 19 nt, Human
gagcaaaacugucuccaaa

SEQ ID NO: 95864 - RNA, 28 nt, Human
gagcaaaacugucuccaaaaaaaaaaaa

SEQ ID NO: 95865 - RNA, 20 nt, Human
gagguuacagugaguugaga

SEQ ID NO: 95866 - RNA, 18 nt, Human
gaucacuugaggucauga

SEQ ID NO: 95867 - RNA, 24 nt, Human
gaucacuugaggucaugaguucga

SEQ ID NO: 95868 - RNA, 24 nt, Human
gccaacauggugaaaucccgucuc

SEQ ID NO: 95869 - RNA, 23 nt, Human
gcccccgacugcucugcucuucu

SEQ ID NO: 95870 - RNA, 21 nt, Human
gcucccggcacggggcucugg

SEQ ID NO: 95871 - RNA, 18 nt, Human
gcucugcucuucugccuc

SEQ ID NO: 95872 - RNA, 21 nt, Human
gcucugcucuucugccucuug

SEQ ID NO: 95873 - RNA, 22 nt, Human
ggacaugaacacacauagcacc

SEQ ID NO: 95874 - RNA, 21 nt, Human
ggaggcggagguuacagugag

SEQ ID NO: 95875 - RNA, 18 nt, Human
ggagguuacagugaguug

SEQ ID NO: 95876 - RNA, 21 nt, Human
ggagguuacagugaguugaga

SEQ ID NO: 95877 - RNA, 25 nt, Human
ggagguuacagugaguugagaguug

SEQ ID NO: 95878 - RNA, 23 nt, Human
ggaucacuugaggucaugaguuc

SEQ ID NO: 95879 - RNA, 20 nt, Human
ggcccccgacugcucugcuc

SEQ ID NO: 95880 - RNA, 19 nt, Human
ggcuggaguaagauuuuug

SEQ ID NO: 95881 - RNA, 21 nt, Human
gggcucugguggggcugggaa

SEQ ID NO: 95882 - RNA, 24 nt, Human
gggcucugguggggcugggaacac

SEQ ID NO: 95883 - RNA, 20 nt, Human
ggggcucugguggggcuggg

SEQ ID NO: 95884 - RNA, 22 nt, Human
ggggcucugguggggcugggaa

SEQ ID NO: 95885 - RNA, 19 nt, Human
ggggcugggaacaccagga

SEQ ID NO: 95886 - RNA, 22 nt, Human
gucagcuccccacugaagcccc

SEQ ID NO: 95887 - RNA, 22 nt, Human
guggcucaugccuguaauccca

SEQ ID NO: 95888 - RNA, 19 nt, Human
gugggcggaucacuugagg

SEQ ID NO: 95889 - RNA, 24 nt, Human
gugguugggugcuuguaaucccag

SEQ ID NO: 95890 - RNA, 23 nt, Human
uaccauggaagccccacccagaa

SEQ ID NO: 95891 - RNA, 24 nt, Human
uagccuggccaacauggugaaauc

SEQ ID NO: 95892 - RNA, 18 nt, Human
uagcugggcgugguuggg

SEQ ID NO: 95893 - RNA, 22 nt, Human
uauaguagcaaaaagacagcug

SEQ ID NO: 95894 - RNA, 28 nt, Human
uaugcuaugcucccacccuucgccucca

SEQ ID NO: 95895 - RNA, 21 nt, Human
ucacauggccccaggcaggcu

SEQ ID NO: 95896 - RNA, 24 nt, Human
ucagcacaaagagagguguucaca

SEQ ID NO: 95897 - RNA, 22 nt, Human
ucaugccuguaaucccagcacu

SEQ ID NO: 95898 - RNA, 18 nt, Human
ucccacccuucgccucca

SEQ ID NO: 95899 - RNA, 19 nt, Human
ucccacccuucgccuccag

SEQ ID NO: 95900 - RNA, 19 nt, Human
uccccacugaagccccaaa

SEQ ID NO: 95901 - RNA, 18 nt, Human
uccccaggcgugggcugc

SEQ ID NO: 95902 - RNA, 21 nt, Human
uccccaggcgugggcugcugg

SEQ ID NO: 95903 - RNA, 24 nt, Human
uccccaggcgugggcugcuggcuc

SEQ ID NO: 95904 - RNA, 27 nt, Human
uccccaggcgugggcugcuggcuccca

SEQ ID NO: 95905 - RNA, 22 nt, Human
ucccggcacggggcucuggugg

SEQ ID NO: 95906 - RNA, 22 nt, Human
ucccucccacgggcccccacag

SEQ ID NO: 95907 - RNA, 19 nt, Human
uccguggccagcaggaaag

SEQ ID NO: 95908 - RNA, 20 nt, Human
ucuccaaaaaaaaaaaaaaa

SEQ ID NO: 95909 - RNA, 24 nt, Human
ucuccguggccagcaggaaagccc

SEQ ID NO: 95910 - RNA, 18 nt, Human
ucugggacagagcucuaa

SEQ ID NO: 95911 - RNA, 23 nt, Human
ugacuacccaggucacacgugcc

SEQ ID NO: 95912 - RNA, 25 nt, Human
ugagcaucucccaucccuggguuuc

SEQ ID NO: 95913 - RNA, 19 nt, Human
ugagguagguaucauugcc

SEQ ID NO: 95914 - RNA, 18 nt, Human
ugcagggacgcaggcccc

SEQ ID NO: 95915 - RNA, 18 nt, Human
ugccacuauccuccucac

SEQ ID NO: 95916 - RNA, 23 nt, Human
ugccucccucccacgggccccca

SEQ ID NO: 95917 - RNA, 23 nt, Human
ugccuguaaucccagcacuuugg

SEQ ID NO: 95918 - RNA, 24 nt, Human
ugccuguaaucccagcacuuuggg

SEQ ID NO: 95919 - RNA, 24 nt, Human
ugcuuguaaucccagcuacccagg

SEQ ID NO: 95920 - RNA, 24 nt, Human
uggccaacauggugaaaucccguc

SEQ ID NO: 95921 - RNA, 20 nt, Human
uggcccagaaauucagcaca

SEQ ID NO: 95922 - RNA, 24 nt, Human
uggcucaugccuguaaucccagca

SEQ ID NO: 95923 - RNA, 21 nt, Human
uggcucccaggcucccuuucc

SEQ ID NO: 95924 - RNA, 19 nt, Human
ugggagaccgaagugggcg

SEQ ID NO: 95925 - RNA, 24 nt, Human
ugggagaccgaagugggcggauca

SEQ ID NO: 95926 - RNA, 22 nt, Human
uggucacauggccccaggcagg

SEQ ID NO: 95927 - RNA, 22 nt, Human
ugguugggugcuuguaauccca

SEQ ID NO: 95928 - RNA, 20 nt, Human
uguaaucccagcuacccagg

SEQ ID NO: 95929 - RNA, 20 nt, Human
uuacagugaguugagaguug

SEQ ID NO: 95930 - RNA, 21 nt, Human
uuagcugggcgugguugggug

SEQ ID NO: 95931 - RNA, 22 nt, Human
uuagcugggcgugguugggugc

SEQ ID NO: 95932 - RNA, 19 nt, Human
uuccaaagagagggaucug

SEQ ID NO: 95933 - RNA, 22 nt, Human
uuugcagaguaaacagaagugg

SEQ ID NO: 95934 - RNA, 21 nt, Human
aacaagguuguggagaaaggc

SEQ ID NO: 95935 - RNA, 21 nt, Human
aagaggagagaggcccgggga

SEQ ID NO: 95936 - RNA, 23 nt, Human
aauucaaaucauaaacauaauuc

SEQ ID NO: 95937 - RNA, 23 nt, Human
acugcagcuccucagcgguaacc

SEQ ID NO: 95938 - RNA, 21 nt, Human
agagaggcccggggaggggga

SEQ ID NO: 95939 - RNA, 19 nt, Human
agcgguaaccacccucccc

SEQ ID NO: 95940 - RNA, 21 nt, Human
aggcaagaggagagaggcccg

SEQ ID NO: 95941 - RNA, 22 nt, Human
aggcaagaggagagaggcccgg

SEQ ID NO: 95942 - RNA, 20 nt, Human
aggcaguuuucccaagucug

SEQ ID NO: 95943 - RNA, 22 nt, Human
aucauaaacauaauuccacuac

SEQ ID NO: 95944 - RNA, 19 nt, Human
cauuagcauuucacauuua

SEQ ID NO: 95945 - RNA, 24 nt, Human
cauuauggaauccauagaacaagg

SEQ ID NO: 95946 - RNA, 23 nt, Human
cauuguaacauuauggaauccau

SEQ ID NO: 95947 - RNA, 21 nt, Human
cccggggagggggacuguccu

SEQ ID NO: 95948 - RNA, 21 nt, Human
cccuccccgggccugcucacc

SEQ ID NO: 95949 - RNA, 23 nt, Human
ccggggagggggacuguccuggg

SEQ ID NO: 95950 - RNA, 24 nt, Human
ccucagcgguaaccacccuccccg

SEQ ID NO: 95951 - RNA, 23 nt, Human
cggggagggggacuguccugggu

SEQ ID NO: 95952 - RNA, 24 nt, Human
cucggcagcgccgccgagacaacu

SEQ ID NO: 95953 - RNA, 21 nt, Human
gcccggggagggggacugucc

SEQ ID NO: 95954 - RNA, 18 nt, Human
gggacucguaggcaagag

SEQ ID NO: 95955 - RNA, 22 nt, Human
guuagaucaaugauagaaauga

SEQ ID NO: 95956 - RNA, 21 nt, Human
uagaacaagguuguggagaaa

SEQ ID NO: 95957 - RNA, 18 nt, Human
uagugugacuccuccaau

SEQ ID NO: 95958 - RNA, 25 nt, Human
uccgagaggccuacgaggagagggg

SEQ ID NO: 95959 - RNA, 23 nt, Human
uccucagcgguaaccacccuccc

SEQ ID NO: 95960 - RNA, 23 nt, Human
ugaaugccuucacagaugaauuc

SEQ ID NO: 95961 - RNA, 21 nt, Human
ugauagaaaugaagauucaua

SEQ ID NO: 95962 - RNA, 20 nt, Human
ugauugaagcugugggaaga

SEQ ID NO: 95963 - RNA, 22 nt, Human
ugggaagacugauaguugauag

SEQ ID NO: 95964 - RNA, 18 nt, Human
ugugaaauguugcuuucg

SEQ ID NO: 95965 - RNA, 26 nt, Human
uucaauaccaccuaaauauauugauc

SEQ ID NO: 95966 - RNA, 25 nt, Human
uugauaguauuagugugacuccucc

SEQ ID NO: 95967 - RNA, 24 nt, Human
uuugaaugccuucacagaugaauu

SEQ ID NO: 95968 - RNA, 22 nt, Human
uuugugaaauguugcuuucgac

SEQ ID NO: 95969 - RNA, 22 nt, Human
aaaacacccguacccccaccga

SEQ ID NO: 95970 - RNA, 27 nt, Human
agccggcgcuggcgcgcugucgucacg

SEQ ID NO: 95971 - RNA, 18 nt, Human
cagacgagaacccaaacg

SEQ ID NO: 95972 - RNA, 22 nt, Human
cccguacgcaguugcauuuccg

SEQ ID NO: 95973 - RNA, 19 nt, Human
ccggcgcuggcgcgcuguc

SEQ ID NO: 95974 - RNA, 19 nt, Human
ccguacccccaccgaagau

SEQ ID NO: 95975 - RNA, 19 nt, Human
cguaaaacacccguacccc

SEQ ID NO: 95976 - RNA, 23 nt, Human
cugcagacgagaacccaaacgca

SEQ ID NO: 95977 - RNA, 18 nt, Human
gagaacccaaacgcauca

SEQ ID NO: 95978 - RNA, 21 nt, Human
gagggucugcagacgagaacc

SEQ ID NO: 95979 - RNA, 20 nt, Human
ggaaagaaaacaauagaaaa

SEQ ID NO: 95980 - RNA, 23 nt, Human
guaaaacacccguacccccaccg

SEQ ID NO: 95981 - RNA, 21 nt, Human
uaaaacacccguacccccacc

SEQ ID NO: 95982 - RNA, 24 nt, Human
uaaaacacccguacccccaccgaa

SEQ ID NO: 95983 - RNA, 23 nt, Human
uacgcggccagcccguacgcagu

SEQ ID NO: 95984 - RNA, 18 nt, Human
uagcauugagaaaucaac

SEQ ID NO: 95985 - RNA, 27 nt, Human
uauucuagcucuuuugaagaugguuua

SEQ ID NO: 95986 - RNA, 20 nt, Human
uuaaacguuugauaugcuuc

SEQ ID NO: 95987 - RNA, 18 nt, Human
aaaaaaacaaagagggaa

SEQ ID NO: 95988 - RNA, 18 nt, Human
aaaaaagccauccaauga

SEQ ID NO: 95989 - RNA, 23 nt, Human
aaaaacaaagagggaaaaaaggc

SEQ ID NO: 95990 - RNA, 21 nt, Human
aaaaagccauccaaugaggca

SEQ ID NO: 95991 - RNA, 24 nt, Human
aaacaaagagggaaaaaaggcuca

SEQ ID NO: 95992 - RNA, 18 nt, Human
aaguaacccagugcagga

SEQ ID NO: 95993 - RNA, 18 nt, Human
acugcaacugucgugcau

SEQ ID NO: 95994 - RNA, 22 nt, Human
agaacugcuuuuauuuggauaa

SEQ ID NO: 95995 - RNA, 19 nt, Human
agaaugucaccgaaugaaa

SEQ ID NO: 95996 - RNA, 19 nt, Human
caagggcacugaugaggcu

SEQ ID NO: 95997 - RNA, 22 nt, Human
caagguacccugcugcuuaccc

SEQ ID NO: 95998 - RNA, 24 nt, Human
caaguacauuucuccccuucuccc

SEQ ID NO: 95999 - RNA, 23 nt, Human
cacucugauuuuaucccaggggc

SEQ ID NO: 96000 - RNA, 20 nt, Human
caggggcccgguccauucuu

SEQ ID NO: 96001 - RNA, 23 nt, Human
cauaaccuacuccgaccuccaga

SEQ ID NO: 96002 - RNA, 23 nt, Human
ccaguggauagcggcgguuggcc

SEQ ID NO: 96003 - RNA, 18 nt, Human
cccauacugcaacugucg

SEQ ID NO: 96004 - RNA, 24 nt, Human
cccucagucggugggucacucacc

SEQ ID NO: 96005 - RNA, 18 nt, Human
ccuacuccgaccuccaga

SEQ ID NO: 96006 - RNA, 18 nt, Human
cguccucuaggugugagg

SEQ ID NO: 96007 - RNA, 18 nt, Human
cuacuccgaccuccagau

SEQ ID NO: 96008 - RNA, 23 nt, Human
cuauaaaugaaaaaugugguucu

SEQ ID NO: 96009 - RNA, 20 nt, Human
cucaccccucgcuucagggg

SEQ ID NO: 96010 - RNA, 20 nt, Human
gccauccaaugaggcaaccc

SEQ ID NO: 96011 - RNA, 18 nt, Human
gcggcgguuggccauaac

SEQ ID NO: 96012 - RNA, 19 nt, Human
ggaugcaaacaucuauaaa

SEQ ID NO: 96013 - RNA, 21 nt, Human
ggcuuguucuuuccaaaaggu

SEQ ID NO: 96014 - RNA, 18 nt, Human
gggcacugaugaggcuac

SEQ ID NO: 96015 - RNA, 24 nt, Human
uaaaaaaacaaagagggaaaaaag

SEQ ID NO: 96016 - RNA, 21 nt, Human
uaaaguaacccagugcaggac

SEQ ID NO: 96017 - RNA, 20 nt, Human
uaaccaagauggaauucaca

SEQ ID NO: 96018 - RNA, 25 nt, Human
uacccugcugcuuacccacuucaac

SEQ ID NO: 96019 - RNA, 23 nt, Human
uacucugcaagucgauuagaaaa

SEQ ID NO: 96020 - RNA, 22 nt, Human
uauguuguuacauucacacuua

SEQ ID NO: 96021 - RNA, 22 nt, Human
ucucagacauuagcugaaccaa

SEQ ID NO: 96022 - RNA, 24 nt, Human
ucucagacauuagcugaaccaagu

SEQ ID NO: 96023 - RNA, 22 nt, Human
ucucccuggaggaaaaaaaaaa

SEQ ID NO: 96024 - RNA, 21 nt, Human
ugaaaauguuagaauccggag

SEQ ID NO: 96025 - RNA, 19 nt, Human
ugaaguaggcuuguucuuu

SEQ ID NO: 96026 - RNA, 20 nt, Human
ugaggcuacucugaaagcug

SEQ ID NO: 96027 - RNA, 19 nt, Human
ugaguuuccaggaaaaaua

SEQ ID NO: 96028 - RNA, 24 nt, Human
ugaguuuccaggaaaaauaggcac

SEQ ID NO: 96029 - RNA, 20 nt, Human
ugccccuucugggugucaug

SEQ ID NO: 96030 - RNA, 21 nt, Human
uggaauucacaguauguuguu

SEQ ID NO: 96031 - RNA, 19 nt, Human
uggaggaaaaaaaaaaagc

SEQ ID NO: 96032 - RNA, 25 nt, Human
ugggagagaaugucaccgaauggug

SEQ ID NO: 96033 - RNA, 22 nt, Human
ugugguucuucugccccuucug

SEQ ID NO: 96034 - RNA, 23 nt, Human
uguuguuacauucacacuuaaaa

SEQ ID NO: 96035 - RNA, 21 nt, Human
uuaaaaaaacaaagagggaaa

SEQ ID NO: 96036 - RNA, 19 nt, Human
uucccauacugcaacuguc

SEQ ID NO: 96037 - RNA, 22 nt, Human
uuuccaggaaaaauaggcacug

SEQ ID NO: 96038 - RNA, 21 nt, Human
aagcaaaagucaaaggaccua

SEQ ID NO: 96039 - RNA, 20 nt, Human
accagaaaaaaccuugaggc

SEQ ID NO: 96040 - RNA, 18 nt, Human
acuuccggaaugcaccuc

SEQ ID NO: 96041 - RNA, 18 nt, Human
agaaaaaaccuugaggcg

SEQ ID NO: 96042 - RNA, 23 nt, Human
agaaguuuuuuucuccucuucuu

SEQ ID NO: 96043 - RNA, 20 nt, Human
caaccagaaggcagcggcga

SEQ ID NO: 96044 - RNA, 24 nt, Human
caccucgcuacaccccguagccga

SEQ ID NO: 96045 - RNA, 21 nt, Human
cagcgucaccuaagaggcgac

SEQ ID NO: 96046 - RNA, 25 nt, Human
ccggaaugcaccucgcuacaccccc

SEQ ID NO: 96047 - RNA, 20 nt, Human
ccggguuguuacuugccucc

SEQ ID NO: 96048 - RNA, 19 nt, Human
ccuccguagaggaagcaaa

SEQ ID NO: 96049 - RNA, 22 nt, Human
ccuccguagaggaagcaaaagu

SEQ ID NO: 96050 - RNA, 20 nt, Human
gacccacauccgcugugcgg

SEQ ID NO: 96051 - RNA, 19 nt, Human
gcgacccacauccgcugug

SEQ ID NO: 96052 - RNA, 24 nt, Human
ggcagcggcgaagguugcaggcac

SEQ ID NO: 96053 - RNA, 23 nt, Human
guuaacagccaauaugcgaccag

SEQ ID NO: 96054 - RNA, 21 nt, Human
uaagaggcgacccacauccgc

SEQ ID NO: 96055 - RNA, 23 nt, Human
uagaggaagcaaaagucaaagga

SEQ ID NO: 96056 - RNA, 21 nt, Human
uccggaaugcaccucgcuaca

SEQ ID NO: 96057 - RNA, 19 nt, Human
uucuccucuucuuuuucuu

SEQ ID NO: 96058 - RNA, 19 nt, Human
uuucuccucuucuuuuucu

SEQ ID NO: 96059 - RNA, 19 nt, Human
uuucuccucuucuuuuucu

SEQ ID NO: 96060 - RNA, 21 nt, Human
aaagaggcuccuaaguacccc

SEQ ID NO: 96061 - RNA, 22 nt, Human
aaagugccaccuuuguuuuaga

SEQ ID NO: 96062 - RNA, 25 nt, Human
aaauacacaaaagaaaacaauuuac

SEQ ID NO: 96063 - RNA, 23 nt, Human
aagaccagaacaaauguuaggac

SEQ ID NO: 96064 - RNA, 22 nt, Human
aaucacaguaauccacauaacc

SEQ ID NO: 96065 - RNA, 24 nt, Human
acaaaagaaaacaauuuacacuca

SEQ ID NO: 96066 - RNA, 21 nt, Human
acaaaauaaugaacaauuauc

SEQ ID NO: 96067 - RNA, 23 nt, Human
acagagaaaaaauuaaguuuuca

SEQ ID NO: 96068 - RNA, 18 nt, Human
acauuuuucuccacuuuc

SEQ ID NO: 96069 - RNA, 21 nt, Human
acuuacaagcagcuccaaucc

SEQ ID NO: 96070 - RNA, 21 nt, Human
agaccagaacaaauguuagga

SEQ ID NO: 96071 - RNA, 18 nt, Human
agauuaaacucuaauauu

SEQ ID NO: 96072 - RNA, 24 nt, Human
agcauagguuuaauuucauuuuua

SEQ ID NO: 96073 - RNA, 23 nt, Human
agccaagcaacaaaaaauagcua

SEQ ID NO: 96074 - RNA, 23 nt, Human
aggaguauauuuaagaauauggu

SEQ ID NO: 96075 - RNA, 23 nt, Human
aguaaaggaaaaauugaccuaaa

SEQ ID NO: 96076 - RNA, 20 nt, Human
aguuuugcaccuuccaugcu

SEQ ID NO: 96077 - RNA, 21 nt, Human
auacagagcaacaaaguuaca

SEQ ID NO: 96078 - RNA, 20 nt, Human
auacagguacaaugcacagu

SEQ ID NO: 96079 - RNA, 19 nt, Human
augcaagaccagaacaaau

SEQ ID NO: 96080 - RNA, 23 nt, Human
auuaugccauacagagcaacaaa

SEQ ID NO: 96081 - RNA, 24 nt, Human
auucaaaagccaagcaacaaaaaa

SEQ ID NO: 96082 - RNA, 22 nt, Human
auugacaaaauaaugaacaauu

SEQ ID NO: 96083 - RNA, 25 nt, Human
caaaaaauagcuacaguauucaaau

SEQ ID NO: 96084 - RNA, 18 nt, Human
caaaagccaagcaacaaa

SEQ ID NO: 96085 - RNA, 23 nt, Human
caacaaacauuuaaaugcacuuc

SEQ ID NO: 96086 - RNA, 24 nt, Human
caagaccagaacaaauguuaggac

SEQ ID NO: 96087 - RNA, 26 nt, Human
cacaucucaaaacaauucugcaaauu

SEQ ID NO: 96088 - RNA, 21 nt, Human
cacccccaauuauacaguagc

SEQ ID NO: 96089 - RNA, 21 nt, Human
cagaaccucugaaggcaaaau

SEQ ID NO: 96090 - RNA, 19 nt, Human
cagccagccauucauccua

SEQ ID NO: 96091 - RNA, 18 nt, Human
cauacaaguauaaauaca

SEQ ID NO: 96092 - RNA, 22 nt, Human
cauacauacaaguauaaauaca

SEQ ID NO: 96093 - RNA, 18 nt, Human
cauagaacugcaacaagc

SEQ ID NO: 96094 - RNA, 23 nt, Human
ccaagaaagcccuucccucccuc

SEQ ID NO: 96095 - RNA, 24 nt, Human
ccaagcaacaaaaaauagcuacag

SEQ ID NO: 96096 - RNA, 22 nt, Human
ccaaucuggucagaaccucuga

SEQ ID NO: 96097 - RNA, 18 nt, Human
ccauaacaauauacacua

SEQ ID NO: 96098 - RNA, 18 nt, Human
cccaauuauacaguagca

SEQ ID NO: 96099 - RNA, 19 nt, Human
ccccaauuauacaguagca

SEQ ID NO: 96100 - RNA, 22 nt, Human
ccuccgcccgcuccuucauuca

SEQ ID NO: 96101 - RNA, 19 nt, Human
ccugguauuaucaccccca

SEQ ID NO: 96102 - RNA, 21 nt, Human
cuaauauuuacaacugcaaaa

SEQ ID NO: 96103 - RNA, 22 nt, Human
cuagcuaucuuuuuaacugucc

SEQ ID NO: 96104 - RNA, 20 nt, Human
cucccucaucuugcacucag

SEQ ID NO: 96105 - RNA, 18 nt, Human
cugggaggcugaccuuuu

SEQ ID NO: 96106 - RNA, 18 nt, Human
cugguuugccugggaggc

SEQ ID NO: 96107 - RNA, 18 nt, Human
gaagcaguggcagcaaca

SEQ ID NO: 96108 - RNA, 20 nt, Human
gaagucagaugacugugcaa

SEQ ID NO: 96109 - RNA, 22 nt, Human
gaccuuuucuuucuuacagagc

SEQ ID NO: 96110 - RNA, 21 nt, Human
gcaaacuuuaccucaacagaa

SEQ ID NO: 96111 - RNA, 25 nt, Human
ggcugcccuuuaauaaauaaaguca

SEQ ID NO: 96112 - RNA, 24 nt, Human
guugcacugcacacaucugguaga

SEQ ID NO: 96113 - RNA, 21 nt, Human
guuuucaguucaacaagaggu

SEQ ID NO: 96114 - RNA, 21 nt, Human
uaaaauuccugguauuaucac

SEQ ID NO: 96115 - RNA, 19 nt, Human
uaaaggaaacaacucacua

SEQ ID NO: 96116 - RNA, 21 nt, Human
uaacauaaaaaagugccaccu

SEQ ID NO: 96117 - RNA, 21 nt, Human
uacaauauuaugccauacaga

SEQ ID NO: 96118 - RNA, 20 nt, Human
uacagagugaaaagugaaua

SEQ ID NO: 96119 - RNA, 19 nt, Human
uaccacagaauaaauucaa

SEQ ID NO: 96120 - RNA, 23 nt, Human
uaccacagaauaaauucaagauu

SEQ ID NO: 96121 - RNA, 19 nt, Human
uaccccaaguucaaauaac

SEQ ID NO: 96122 - RNA, 19 nt, Human
uaccccaaguucaaauaac

SEQ ID NO: 96123 - RNA, 23 nt, Human
uacugacccauaacaauauacac

SEQ ID NO: 96124 - RNA, 26 nt, Human
uagcuacaguauucaaaucauaaaua

SEQ ID NO: 96125 - RNA, 26 nt, Human
uauaaauacacaaaagaaaacaauuu

SEQ ID NO: 96126 - RNA, 19 nt, Human
uauacaguagcacaaccac

SEQ ID NO: 96127 - RNA, 20 nt, Human
uauguggagauaaagacuug

SEQ ID NO: 96128 - RNA, 22 nt, Human
uauuuacaacugcaacauaaca

SEQ ID NO: 96129 - RNA, 20 nt, Human
uauuuuuuccucuucaagcc

SEQ ID NO: 96130 - RNA, 24 nt, Human
ucaaauucaauuuuggaaguacua

SEQ ID NO: 96131 - RNA, 21 nt, Human
ucaacaagaggucgaauccaa

SEQ ID NO: 96132 - RNA, 18 nt, Human
ucagaagucagaugacug

SEQ ID NO: 96133 - RNA, 22 nt, Human
ucauccuaauguucuuagcugc

SEQ ID NO: 96134 - RNA, 20 nt, Human
ucccuacaaagaggcuccua

SEQ ID NO: 96135 - RNA, 21 nt, Human
ucuaaauuaccaagaaagccc

SEQ ID NO: 96136 - RNA, 18 nt, Human
ugaaacaugcaaaucaua

SEQ ID NO: 96137 - RNA, 24 nt, Human
ugaagaauaaagcagcacuuacaa

SEQ ID NO: 96138 - RNA, 20 nt, Human
ugaaugcuugaggcaucuua

SEQ ID NO: 96139 - RNA, 19 nt, Human
ugacaacuggcugcccuuu

SEQ ID NO: 96140 - RNA, 19 nt, Human
ugauaaccauaaacuauaa

SEQ ID NO: 96141 - RNA, 23 nt, Human
uguaacaaaaauacagagaaaaa

SEQ ID NO: 96142 - RNA, 21 nt, Human
uuaaacucuaauauuuacaac

SEQ ID NO: 96143 - RNA, 21 nt, Human
uuaaaggaaacaacucacuaa

SEQ ID NO: 96144 - RNA, 21 nt, Human
uuacagagugaaaagugaaua

SEQ ID NO: 96145 - RNA, 24 nt, Human
uuacugaaguuaugcaagaccaga

SEQ ID NO: 96146 - RNA, 19 nt, Human
uuauguaguuuuuacauga

SEQ ID NO: 96147 - RNA, 20 nt, Human
uucauuuuuauaaggaagac

SEQ ID NO: 96148 - RNA, 20 nt, Human
uugacaaaauaaugaacaag

SEQ ID NO: 96149 - RNA, 23 nt, Human
uuuaagguuaacauaaaaaagug

SEQ ID NO: 96150 - RNA, 23 nt, Human
aaaguucugcucuguccccacuu

SEQ ID NO: 96151 - RNA, 21 nt, Human
aacacacugggcaacauaaga

SEQ ID NO: 96152 - RNA, 18 nt, Human
aacuaacucuuuaccaca

SEQ ID NO: 96153 - RNA, 23 nt, Human
aacucaaacuaacucuuuaccac

SEQ ID NO: 96154 - RNA, 20 nt, Human
aacuggaagguaguuuggaa

SEQ ID NO: 96155 - RNA, 19 nt, Human
aagaaauuaugaagacuag

SEQ ID NO: 96156 - RNA, 22 nt, Human
aaugauacaaaacaaaacacaa

SEQ ID NO: 96157 - RNA, 23 nt, Human
acaaaacacaaaaggcuuuuggc

SEQ ID NO: 96158 - RNA, 21 nt, Human
acauguuggauaugcauuggg

SEQ ID NO: 96159 - RNA, 19 nt, Human
accaguaucaucuccuggc

SEQ ID NO: 96160 - RNA, 26 nt, Human
acccuucaagguuaaauacacguggc

SEQ ID NO: 96161 - RNA, 20 nt, Human
acucuaugccuguauucaaa

SEQ ID NO: 96162 - RNA, 19 nt, Human
acugugauucaaacgacau

SEQ ID NO: 96163 - RNA, 21 nt, Human
acugugauucaaacgacauca

SEQ ID NO: 96164 - RNA, 20 nt, Human
acuuaugcaaaagagaauca

SEQ ID NO: 96165 - RNA, 19 nt, Human
agaaauuaugaagacuaga

SEQ ID NO: 96166 - RNA, 23 nt, Human
agaaauuaugaagacuagaaaaa

SEQ ID NO: 96167 - RNA, 18 nt, Human
agaagcccaguguuucuu

SEQ ID NO: 96168 - RNA, 20 nt, Human
agacagggggauguggccua

SEQ ID NO: 96169 - RNA, 18 nt, Human
agauccagcugagaugac

SEQ ID NO: 96170 - RNA, 18 nt, Human
agcaugauauuucauaga

SEQ ID NO: 96171 - RNA, 18 nt, Human
agcauugauuuauuuucc

SEQ ID NO: 96172 - RNA, 18 nt, Human
agccauguggccugaaag

SEQ ID NO: 96173 - RNA, 18 nt, Human
aggcuuuuggcagcaagc

SEQ ID NO: 96174 - RNA, 26 nt, Human
auaaagcaaaaauaugucaugcacuu

SEQ ID NO: 96175 - RNA, 20 nt, Human
augcacuuaugcaaaagaga

SEQ ID NO: 96176 - RNA, 22 nt, Human
caaaacacaaaaggcuuuuggc

SEQ ID NO: 96177 - RNA, 25 nt, Human
caccaaaacucccagguuauugcag

SEQ ID NO: 96178 - RNA, 23 nt, Human
caccuuugucuuuguccaggcuc

SEQ ID NO: 96179 - RNA, 20 nt, Human
cacugugaaucacacaucug

SEQ ID NO: 96180 - RNA, 18 nt, Human
cacuuaugcaaaagagaa

SEQ ID NO: 96181 - RNA, 19 nt, Human
cagaucagaaacacacugg

SEQ ID NO: 96182 - RNA, 20 nt, Human
cagggagcuucuccaccuuc

SEQ ID NO: 96183 - RNA, 20 nt, Human
caugcucaugucucccuccu

SEQ ID NO: 96184 - RNA, 21 nt, Human
cauugggugacauagucugua

SEQ ID NO: 96185 - RNA, 23 nt, Human
ccagcuggagucucucuccucuc

SEQ ID NO: 96186 - RNA, 20 nt, Human
ccagcuggcccuugauuuca

SEQ ID NO: 96187 - RNA, 20 nt, Human
cccacagaucacacacuucc

SEQ ID NO: 96188 - RNA, 21 nt, Human
cccuccuucuccucucagccc

SEQ ID NO: 96189 - RNA, 18 nt, Human
cccugaccuggugaaccc

SEQ ID NO: 96190 - RNA, 21 nt, Human
ccuccagcuggcccuugauuu

SEQ ID NO: 96191 - RNA, 18 nt, Human
ccucucagccuuccugcc

SEQ ID NO: 96192 - RNA, 18 nt, Human
ccuggcugaaugcgugag

SEQ ID NO: 96193 - RNA, 25 nt, Human
cgaagcacugaaacacucgaaugug

SEQ ID NO: 96194 - RNA, 21 nt, Human
cucagcccugaccccacuauc

SEQ ID NO: 96195 - RNA, 29 nt, Human
cucagcccugaccccacuauccgguuccg

SEQ ID NO: 96196 - RNA, 20 nt, Human
cuccaccaaaacucccaggu

SEQ ID NO: 96197 - RNA, 21 nt, Human
cuccaccaaaacucccagguu

SEQ ID NO: 96198 - RNA, 27 nt, Human
cucucagcccugaccccacuaucccuc

SEQ ID NO: 96199 - RNA, 21 nt, Human
cuggauuauucccugagcaca

SEQ ID NO: 96200 - RNA, 22 nt, Human
gaccccacuaucccucacuccc

SEQ ID NO: 96201 - RNA, 19 nt, Human
gagguuccugggcaccugc

SEQ ID NO: 96202 - RNA, 21 nt, Human
gagguuccugggcaccugcuu

SEQ ID NO: 96203 - RNA, 20 nt, Human
gcccugagguuccugggcac

SEQ ID NO: 96204 - RNA, 24 nt, Human
ggaaaauacuguuuuccaacccag

SEQ ID NO: 96205 - RNA, 24 nt, Human
ggaacaauaugagcaucaaggaca

SEQ ID NO: 96206 - RNA, 21 nt, Human
ggcaaauuagggaacaauaug

SEQ ID NO: 96207 - RNA, 18 nt, Human
ggggauguggccuaagaa

SEQ ID NO: 96208 - RNA, 21 nt, Human
guaauaaagcaaaaauauguc

SEQ ID NO: 96209 - RNA, 18 nt, Human
guccaggcucagccaugc

SEQ ID NO: 96210 - RNA, 19 nt, Human
guccaggcucagccaugcu

SEQ ID NO: 96211 - RNA, 21 nt, Human
gugaagaaauuaugaagacua

SEQ ID NO: 96212 - RNA, 22 nt, Human
uaaaaaaagucugaacucuaug

SEQ ID NO: 96213 - RNA, 20 nt, Human
uacaaaacaaaacacaaaag

SEQ ID NO: 96214 - RNA, 22 nt, Human
uaccaccugcucaaaauucuua

SEQ ID NO: 96215 - RNA, 23 nt, Human
uagaauuaucucugugacuaaua

SEQ ID NO: 96216 - RNA, 23 nt, Human
uaguacacacagcccugagguuc

SEQ ID NO: 96217 - RNA, 18 nt, Human
uauacagauuguuaucuc

SEQ ID NO: 96218 - RNA, 24 nt, Human
uaucucccuuuauaaacaacaauc

SEQ ID NO: 96219 - RNA, 25 nt, Human
uaugcaaaagagaaucaucggacuc

SEQ ID NO: 96220 - RNA, 20 nt, Human
ucaaaaaugaggaacuggaa

SEQ ID NO: 96221 - RNA, 18 nt, Human
ucaagacauugacagaau

SEQ ID NO: 96222 - RNA, 26 nt, Human
ucagcagucucccaaacauaccaccu

SEQ ID NO: 96223 - RNA, 21 nt, Human
ucaggagcugagaugagcuuu

SEQ ID NO: 96224 - RNA, 18 nt, Human
uccaccaaaacucccagg

SEQ ID NO: 96225 - RNA, 21 nt, Human
ucccaaacucucccugaccuu

SEQ ID NO: 96226 - RNA, 23 nt, Human
uccuggcugaaugcgugagcccu

SEQ ID NO: 96227 - RNA, 28 nt, Human
uccuggcugaaugcgugaggagcucauu

SEQ ID NO: 96228 - RNA, 19 nt, Human
ucucccuccuucuccucuc

SEQ ID NO: 96229 - RNA, 27 nt, Human
ucuuuuauaaacaaaaauuuucugaau

SEQ ID NO: 96230 - RNA, 20 nt, Human
ugaaaccuucuuuagccaug

SEQ ID NO: 96231 - RNA, 20 nt, Human
ugagguuccugggcaccugc

SEQ ID NO: 96232 - RNA, 21 nt, Human
ugagguuccugggcaccugcu

SEQ ID NO: 96233 - RNA, 21 nt, Human
ugcaaaagagaaucaucggac

SEQ ID NO: 96234 - RNA, 20 nt, Human
ugcaguucccaaacucuccc

SEQ ID NO: 96235 - RNA, 27 nt, Human
ugcauauacauauauuagcauaucaua

SEQ ID NO: 96236 - RNA, 18 nt, Human
ugcucuguccccacuucu

SEQ ID NO: 96237 - RNA, 22 nt, Human
uggagcaugauauuucauagau

SEQ ID NO: 96238 - RNA, 23 nt, Human
uggcagauggggcuaaggaccag

SEQ ID NO: 96239 - RNA, 27 nt, Human
ugugcccacagaucacaccacccaagg

SEQ ID NO: 96240 - RNA, 23 nt, Human
uucaagacauugacagaaucaga

SEQ ID NO: 96241 - RNA, 18 nt, Human
uuccaacccagcuggagu

SEQ ID NO: 96242 - RNA, 20 nt, Human
uucccugagcacauguugga

SEQ ID NO: 96243 - RNA, 21 nt, Human
uucuuuagccauguggccuga

SEQ ID NO: 96244 - RNA, 21 nt, Human
uugcaguucccaaacucuccc

SEQ ID NO: 96245 - RNA, 19 nt, Human
uugcaucagaucagaaaca

SEQ ID NO: 96246 - RNA, 21 nt, Human
agaggugaguguggaaggcuu

SEQ ID NO: 96247 - RNA, 22 nt, Human
cuucucccugugauagaagaag

SEQ ID NO: 96248 - RNA, 24 nt, Human
aaaagaaccagcccauuuucuagg

SEQ ID NO: 96249 - RNA, 25 nt, Human
aaaagaugcaaaggugaauuccauu

SEQ ID NO: 96250 - RNA, 19 nt, Human
aaagaagagggccaaaaga

SEQ ID NO: 96251 - RNA, 18 nt, Human
aaagacacaaaagaugca

SEQ ID NO: 96252 - RNA, 19 nt, Human
aaauagccuuccagcaagg

SEQ ID NO: 96253 - RNA, 20 nt, Human
aacaaggagaacagaaggaa

SEQ ID NO: 96254 - RNA, 24 nt, Human
aagaaagacacaaaagaugcaaag

SEQ ID NO: 96255 - RNA, 18 nt, Human
aagccaacagacuuugga

SEQ ID NO: 96256 - RNA, 18 nt, Human
aagccuacaacagggcca

SEQ ID NO: 96257 - RNA, 18 nt, Human
agaaagaagagggccaaa

SEQ ID NO: 96258 - RNA, 19 nt, Human
agaaagaagagggccaaaa

SEQ ID NO: 96259 - RNA, 22 nt, Human
agaacaaggagaacagaaggaa

SEQ ID NO: 96260 - RNA, 22 nt, Human
agacagacgguggacccaaagc

SEQ ID NO: 96261 - RNA, 20 nt, Human
agaucaggaaucuauaagac

SEQ ID NO: 96262 - RNA, 22 nt, Human
agcaaggccugcgcuucacccc

SEQ ID NO: 96263 - RNA, 20 nt, Human
agcuggguugcucucugccu

SEQ ID NO: 96264 - RNA, 20 nt, Human
agcuggguugcucucugccu

SEQ ID NO: 96265 - RNA, 21 nt, Human
agcuuuuaaaauguugccacu

SEQ ID NO: 96266 - RNA, 18 nt, Human
aggggcaggcuuuguggg

SEQ ID NO: 96267 - RNA, 21 nt, Human
agucaagagccaaucaacagc

SEQ ID NO: 96268 - RNA, 18 nt, Human
aguucagauucaucccuu

SEQ ID NO: 96269 - RNA, 21 nt, Human
aucuauuugaucuuuaauugc

SEQ ID NO: 96270 - RNA, 23 nt, Human
auggaaguaaauagccuuccagc

SEQ ID NO: 96271 - RNA, 26 nt, Human
caaaagaaccaugcaccucagagaag

SEQ ID NO: 96272 - RNA, 26 nt, Human
caagccuacaacagggccaaggcugg

SEQ ID NO: 96273 - RNA, 24 nt, Human
caaggaccuucacuggcccagaac

SEQ ID NO: 96274 - RNA, 18 nt, Human
caagggcuccuccagagg

SEQ ID NO: 96275 - RNA, 20 nt, Human
cacagucaagagccaaucaa

SEQ ID NO: 96276 - RNA, 18 nt, Human
cacagugcauggagaaaa

SEQ ID NO: 96277 - RNA, 20 nt, Human
caccauaccaaggaauaagc

SEQ ID NO: 96278 - RNA, 18 nt, Human
cacuguauuccucagaau

SEQ ID NO: 96279 - RNA, 25 nt, Human
cagaacaagccuacaacagggccaa

SEQ ID NO: 96280 - RNA, 22 nt, Human
cagaaggaaauuaggucugaga

SEQ ID NO: 96281 - RNA, 23 nt, Human
cagaaggaaauuaggucugagau

SEQ ID NO: 96282 - RNA, 23 nt, Human
cagacagacgguggacccaaagc

SEQ ID NO: 96283 - RNA, 19 nt, Human
cagacgguggacccaaagc

SEQ ID NO: 96284 - RNA, 22 nt, Human
caggcaccaccagcucucagug

SEQ ID NO: 96285 - RNA, 22 nt, Human
caggcaccaccagcucucagug

SEQ ID NO: 96286 - RNA, 18 nt, Human
caggccauggagagacac

SEQ ID NO: 96287 - RNA, 22 nt, Human
cagggccaaggcuggcuccugc

SEQ ID NO: 96288 - RNA, 23 nt, Human
caucacagucaagagccaaucaa

SEQ ID NO: 96289 - RNA, 20 nt, Human
ccaaaagaaccagcccauuu

SEQ ID NO: 96290 - RNA, 18 nt, Human
ccaccagcucucaguguc

SEQ ID NO: 96291 - RNA, 18 nt, Human
ccaccagcucucaguguc

SEQ ID NO: 96292 - RNA, 24 nt, Human
ccacucaacagaacaagccuacaa

SEQ ID NO: 96293 - RNA, 22 nt, Human
ccagaacagaacaaggagaaca

SEQ ID NO: 96294 - RNA, 20 nt, Human
cccuuugcccuaccuggcug

SEQ ID NO: 96295 - RNA, 21 nt, Human
ccuccagcaggacacagaaau

SEQ ID NO: 96296 - RNA, 24 nt, Human
cucccugggacagcaggcaccacc

SEQ ID NO: 96297 - RNA, 24 nt, Human
cucccugggacagcaggcaccacc

SEQ ID NO: 96298 - RNA, 23 nt, Human
cugccugggaugaggggcaggcu

SEQ ID NO: 96299 - RNA, 19 nt, Human
cugcgcuucaccccuuugc

SEQ ID NO: 96300 - RNA, 23 nt, Human
cugcucuguggagggcgaugcaa

SEQ ID NO: 96301 - RNA, 23 nt, Human
cuuccaaaagaaccaugcaccuc

SEQ ID NO: 96302 - RNA, 19 nt, Human
cuucuguguccccuuuugg

SEQ ID NO: 96303 - RNA, 18 nt, Human
cuuugcccuaccuggcug

SEQ ID NO: 96304 - RNA, 18 nt, Human
gaaguaaauagccuucca

SEQ ID NO: 96305 - RNA, 20 nt, Human
gacagcaggcaccaccagcu

SEQ ID NO: 96306 - RNA, 20 nt, Human
gacagcaggcaccaccagcu

SEQ ID NO: 96307 - RNA, 20 nt, Human
gauaagaaagacacaaaaga

SEQ ID NO: 96308 - RNA, 20 nt, Human
gaugcaaaggugaauuccau

SEQ ID NO: 96309 - RNA, 22 nt, Human
gcaagccugcucuguggagggc

SEQ ID NO: 96310 - RNA, 24 nt, Human
gcagacagacgguggacccaaagc

SEQ ID NO: 96311 - RNA, 24 nt, Human
gcaggacacagaaauggauuggaa

SEQ ID NO: 96312 - RNA, 19 nt, Human
gccuuguggguguggucag

SEQ ID NO: 96313 - RNA, 24 nt, Human
gcuuguggagggcgaugcaacucu

SEQ ID NO: 96314 - RNA, 18 nt, Human
gguaaagaaagugacaag

SEQ ID NO: 96315 - RNA, 20 nt, Human
uaaaaccuccagcaggacac

SEQ ID NO: 96316 - RNA, 24 nt, Human
uaagaaagacacaaaagaugcaaa

SEQ ID NO: 96317 - RNA, 21 nt, Human
uaguucagauucaucccuuuc

SEQ ID NO: 96318 - RNA, 23 nt, Human
uaguucagauucaucccuuucug

SEQ ID NO: 96319 - RNA, 22 nt, Human
uaucuauuugaucuuuaauugc

SEQ ID NO: 96320 - RNA, 18 nt, Human
ucagaacaaggaccuuca

SEQ ID NO: 96321 - RNA, 22 nt, Human
ucaggccauggagagacacugu

SEQ ID NO: 96322 - RNA, 18 nt, Human
uccaaaagaaccaugcaa

SEQ ID NO: 96323 - RNA, 20 nt, Human
ucccugcucaggccauggag

SEQ ID NO: 96324 - RNA, 23 nt, Human
ucuagaucaggaaucuauaagac

SEQ ID NO: 96325 - RNA, 25 nt, Human
ucuagguuaaaaccuccagcaggac

SEQ ID NO: 96326 - RNA, 22 nt, Human
ucucagugucuggggaaagagc

SEQ ID NO: 96327 - RNA, 22 nt, Human
ucucagugucuggggaaagagc

SEQ ID NO: 96328 - RNA, 20 nt, Human
ucucccugcucaggccaugg

SEQ ID NO: 96329 - RNA, 24 nt, Human
ucuuccaaaagaaccaugcaccuc

SEQ ID NO: 96330 - RNA, 21 nt, Human
ucuuuucucuuucacucucuc

SEQ ID NO: 96331 - RNA, 19 nt, Human
ugagaacugaagccacaga

SEQ ID NO: 96332 - RNA, 20 nt, Human
ugagaacugaagccacagaa

SEQ ID NO: 96333 - RNA, 19 nt, Human
ugaguuuucuuuucucuuu

SEQ ID NO: 96334 - RNA, 24 nt, Human
ugccacuauagaguaagaaaagga

SEQ ID NO: 96335 - RNA, 18 nt, Human
ugccugggaugaggggca

SEQ ID NO: 96336 - RNA, 18 nt, Human
ugccugggaugaggggca

SEQ ID NO: 96337 - RNA, 19 nt, Human
ugccugggaugaggggcag

SEQ ID NO: 96338 - RNA, 21 nt, Human
ugccugggaugaggggcaggc

SEQ ID NO: 96339 - RNA, 20 nt, Human
ugcuuuggcaaauucugacu

SEQ ID NO: 96340 - RNA, 20 nt, Human
uggacccaaagcaagugcca

SEQ ID NO: 96341 - RNA, 19 nt, Human
uggagaaaauccaagggcu

SEQ ID NO: 96342 - RNA, 19 nt, Human
uggcaaagccagggugcuc

SEQ ID NO: 96343 - RNA, 22 nt, Human
uggcccagaacagaacaaggag

SEQ ID NO: 96344 - RNA, 24 nt, Human
uggcccagaacagaacaaggagaa

SEQ ID NO: 96345 - RNA, 21 nt, Human
uggcugcugcccauaucugcu

SEQ ID NO: 96346 - RNA, 22 nt, Human
uggcugcugcccauaucugcuc

SEQ ID NO: 96347 - RNA, 20 nt, Human
ugggacagcaggcaccacca

SEQ ID NO: 96348 - RNA, 20 nt, Human
ugggacagcaggcaccacca

SEQ ID NO: 96349 - RNA, 21 nt, Human
ugggccucagaaagaagaggg

SEQ ID NO: 96350 - RNA, 18 nt, Human
uguagcagcagccagugc

SEQ ID NO: 96351 - RNA, 19 nt, Human
uguauuccucagaauaaag

SEQ ID NO: 96352 - RNA, 21 nt, Human
uucaaaaucagaacaaggacc

SEQ ID NO: 96353 - RNA, 19 nt, Human
uucacuggcaagaccugca

SEQ ID NO: 96354 - RNA, 21 nt, Human
uucacuggcaagaccugcaga

SEQ ID NO: 96355 - RNA, 21 nt, Human
uucccaaagauggacauuuuc

SEQ ID NO: 96356 - RNA, 21 nt, Human
uuggcaaauucugacuacaag

SEQ ID NO: 96357 - RNA, 22 nt, Human
uuucccaaagauggacauuuuc

SEQ ID NO: 96358 - RNA, 22 nt, Human
aaacaggaaaaaagauaguugg

SEQ ID NO: 96359 - RNA, 27 nt, Human
aaccaagauacaaaauuaucaccacaa

SEQ ID NO: 96360 - RNA, 21 nt, Human
aaccaggaaauugaaauuggu

SEQ ID NO: 96361 - RNA, 20 nt, Human
accaggaaauugaaauuggu

SEQ ID NO: 96362 - RNA, 20 nt, Human
agauaguuggaguucugcug

SEQ ID NO: 96363 - RNA, 27 nt, Human
aguucugugucauuuuaucacuugugu

SEQ ID NO: 96364 - RNA, 19 nt, Human
auaagcaccacugcaacca

SEQ ID NO: 96365 - RNA, 27 nt, Human
auuaucuuguuuccucuucuuggcuuu

SEQ ID NO: 96366 - RNA, 24 nt, Human
auuuauuaucuuguuuccucuucu

SEQ ID NO: 96367 - RNA, 24 nt, Human
caaccacggcgucugagauuugag

SEQ ID NO: 96368 - RNA, 18 nt, Human
cacaggaaguuacaaaga

SEQ ID NO: 96369 - RNA, 23 nt, Human
ccuggguacccuucacccaguuu

SEQ ID NO: 96370 - RNA, 18 nt, Human
ccuuuuaacaugaaccuc

SEQ ID NO: 96371 - RNA, 26 nt, Human
cuauauuguucauuuuaauuuucaug

SEQ ID NO: 96372 - RNA, 25 nt, Human
cuuuuauuucucccccuucccccaa

SEQ ID NO: 96373 - RNA, 22 nt, Human
ggguacccuucacccaguuuuc

SEQ ID NO: 96374 - RNA, 18 nt, Human
ggguuuuuuuuuaacuug

SEQ ID NO: 96375 - RNA, 18 nt, Human
gguacaauguguguauau

SEQ ID NO: 96376 - RNA, 28 nt, Human
guuuguuuuuuuuuuauugcuuuuuugg

SEQ ID NO: 96377 - RNA, 18 nt, Human
uaaaaaaaacaggaaaaa

SEQ ID NO: 96378 - RNA, 19 nt, Human
uacaaaauuaucaccacaa

SEQ ID NO: 96379 - RNA, 28 nt, Human
uacaaauuuaaaaaaaacaggaaaaaag

SEQ ID NO: 96380 - RNA, 25 nt, Human
uaguggguuuuuuuuuaacuuguuu

SEQ ID NO: 96381 - RNA, 23 nt, Human
uauguauccaagcaaaaggcaga

SEQ ID NO: 96382 - RNA, 25 nt, Human
uauguauccaagcaaaaggcagagc

SEQ ID NO: 96383 - RNA, 19 nt, Human
uccuggguacccuucaccc

SEQ ID NO: 96384 - RNA, 23 nt, Human
ugguacagagugguccuggguaa

SEQ ID NO: 96385 - RNA, 24 nt, Human
uguauaagcaccacugcaaccaag

SEQ ID NO: 96386 - RNA, 21 nt, Human
uguuuuauuugaggggaaagc

SEQ ID NO: 96387 - RNA, 24 nt, Human
uguuuuguacauuuauuaucuugu

SEQ ID NO: 96388 - RNA, 26 nt, Human
uguuuuuuuuuuauugcuuuuuugga

SEQ ID NO: 96389 - RNA, 24 nt, Human
uuaaaaaaaacaggaaaaaagaua

SEQ ID NO: 96390 - RNA, 28 nt, Human
uugcaaccacggcgucugagauuugagu

SEQ ID NO: 96391 - RNA, 23 nt, Human
uugcuuuuuuggaggagguggau

SEQ ID NO: 96392 - RNA, 29 nt, Human
uuuuuuuuuuuuuuuauaguuuguuuuuu

SEQ ID NO: 96393 - RNA, 18 nt, Human
caccaccccgagacgcag

SEQ ID NO: 96394 - RNA, 25 nt, Human
cagucaccaccccgagacgcagaac

SEQ ID NO: 96395 - RNA, 18 nt, Human
ccacagcagcuccugccc

SEQ ID NO: 96396 - RNA, 18 nt, Human
cccuguacugagcucucc

SEQ ID NO: 96397 - RNA, 22 nt, Human
ccuguacugagcucuccaaaga

SEQ ID NO: 96398 - RNA, 23 nt, Human
cuggaggacagcaacagagccaa

SEQ ID NO: 96399 - RNA, 23 nt, Human
gacagcaacagagccaaggugag

SEQ ID NO: 96400 - RNA, 18 nt, Human
gcccuggaggacagcaac

SEQ ID NO: 96401 - RNA, 19 nt, Human
ggaaguggaaagugcucgc

SEQ ID NO: 96402 - RNA, 21 nt, Human
ggcaaagucccucuggccccc

SEQ ID NO: 96403 - RNA, 20 nt, Human
gucccucuggcccccucugg

SEQ ID NO: 96404 - RNA, 21 nt, Human
uggaaagugcucgcccuggag

SEQ ID NO: 96405 - RNA, 18 nt, Human
uggacccagucaccaccc

SEQ ID NO: 96406 - RNA, 21 nt, Human
aagugaauccccucacagcuc

SEQ ID NO: 96407 - RNA, 18 nt, Human
auagaguaucuuucaaac

SEQ ID NO: 96408 - RNA, 19 nt, Human
caccgauaaacagauucca

SEQ ID NO: 96409 - RNA, 21 nt, Human
caccgauaaacagauuccaca

SEQ ID NO: 96410 - RNA, 25 nt, Human
cuccuuuuuuuccuuucauuguuca

SEQ ID NO: 96411 - RNA, 22 nt, Human
gaaaugaacuccuuuaaaucaa

SEQ ID NO: 96412 - RNA, 19 nt, Human
ggcaaauaaauuagaccua

SEQ ID NO: 96413 - RNA, 22 nt, Human
uaaaucaacugauuuguaugga

SEQ ID NO: 96414 - RNA, 23 nt, Human
uaaauuagaccuauguuaaagcg

SEQ ID NO: 96415 - RNA, 24 nt, Human
uaaugcccaguaugcgaaaugaac

SEQ ID NO: 96416 - RNA, 23 nt, Human
uccaaagaucgacagcacguggg

SEQ ID NO: 96417 - RNA, 22 nt, Human
uccgcacacaagugaauccccu

SEQ ID NO: 96418 - RNA, 22 nt, Human
ucuccuuuuuuuccuuucauug

SEQ ID NO: 96419 - RNA, 19 nt, Human
uuugcuagaaacuggucca

SEQ ID NO: 96420 - RNA, 24 nt, Human
uuugcuagaaacugguccaaagau

SEQ ID NO: 96421 - RNA, 24 nt, Human
uuuuuuuucuccuuuuuuuccuuu

SEQ ID NO: 96422 - RNA, 19 nt, Human
acccagagcugggggaacc

SEQ ID NO: 96423 - RNA, 21 nt, Human
agaaagggacugggggcugcc

SEQ ID NO: 96424 - RNA, 20 nt, Human
caauagagaagaauuacaug

SEQ ID NO: 96425 - RNA, 22 nt, Human
cacaguguuccuggcacucugg

SEQ ID NO: 96426 - RNA, 21 nt, Human
cacucuggcucaggaaaaggg

SEQ ID NO: 96427 - RNA, 23 nt, Human
ccagagcugggggaaccggcaga

SEQ ID NO: 96428 - RNA, 19 nt, Human
cucaggaaaaggggagacu

SEQ ID NO: 96429 - RNA, 25 nt, Human
cugagcugggacagaaagggacugg

SEQ ID NO: 96430 - RNA, 20 nt, Human
gacagaaagggacugggggc

SEQ ID NO: 96431 - RNA, 18 nt, Human
gcgaugcagagccgggua

SEQ ID NO: 96432 - RNA, 19 nt, Human
ggaaaaggggagacucugc

SEQ ID NO: 96433 - RNA, 20 nt, Human
ggaaaaggggagacucugcu

SEQ ID NO: 96434 - RNA, 19 nt, Human
ggagacucugcugguucug

SEQ ID NO: 96435 - RNA, 23 nt, Human
uaaauggaaaccuuacaauagag

SEQ ID NO: 96436 - RNA, 26 nt, Human
ucccuucugaacaaagacguccacag

SEQ ID NO: 96437 - RNA, 18 nt, Human
ucuggcucaggaaaaggg

SEQ ID NO: 96438 - RNA, 23 nt, Human
ugaacaaagacguccacaguguu

SEQ ID NO: 96439 - RNA, 21 nt, Human
uggaaaacugagcugggacag

SEQ ID NO: 96440 - RNA, 19 nt, Human
uuaaucaucggaagcaaac

SEQ ID NO: 96441 - RNA, 24 nt, Human
acacagcggcacccgccggcuucc

SEQ ID NO: 96442 - RNA, 18 nt, Human
caaaggguugaauugguc

SEQ ID NO: 96443 - RNA, 19 nt, Human
ccucugagcuccggacagg

SEQ ID NO: 96444 - RNA, 26 nt, Human
cugaagccaaggcaguuugaguccau

SEQ ID NO: 96445 - RNA, 23 nt, Human
cuggaagugcuuuagcuucuuuc

SEQ ID NO: 96446 - RNA, 21 nt, Human
cuuuccuacacagcggcaccc

SEQ ID NO: 96447 - RNA, 18 nt, Human
ucuggaagugcuuuagcu

SEQ ID NO: 96448 - RNA, 21 nt, Human
ugacgggacuccccugaagcc

SEQ ID NO: 96449 - RNA, 22 nt, Human
aaaaaaauauaaucccacagca

SEQ ID NO: 96450 - RNA, 24 nt, Human
aaaaacagcuguuaucaagcacaa

SEQ ID NO: 96451 - RNA, 31 nt, Human
aaaagaaaaagcacagucuauucauccaggg

SEQ ID NO: 96452 - RNA, 23 nt, Human
aaacaguaaaucuucaucuuaac

SEQ ID NO: 96453 - RNA, 18 nt, Human
aaacugccaagagccaug

SEQ ID NO: 96454 - RNA, 24 nt, Human
aaauaaaaaacguuaaugaccuag

SEQ ID NO: 96455 - RNA, 26 nt, Human
aaauauugaaaaucaagugcgaaacu

SEQ ID NO: 96456 - RNA, 23 nt, Human
aacgaguaacaaagaaacaguaa

SEQ ID NO: 96457 - RNA, 22 nt, Human
aagaaaaagcacagucuauuca

SEQ ID NO: 96458 - RNA, 21 nt, Human
aagcacaaaauuuuaaucuaa

SEQ ID NO: 96459 - RNA, 24 nt, Human
aauaauguauauccuucuugccuc

SEQ ID NO: 96460 - RNA, 20 nt, Human
accuagaaaagcaaaagccc

SEQ ID NO: 96461 - RNA, 19 nt, Human
agaaaaagaaaaagcacag

SEQ ID NO: 96462 - RNA, 22 nt, Human
agagcuuaccuuucacugucuu

SEQ ID NO: 96463 - RNA, 27 nt, Human
agguguugugaaauuacauuggucacu

SEQ ID NO: 96464 - RNA, 18 nt, Human
auguacaaaugugcaagu

SEQ ID NO: 96465 - RNA, 22 nt, Human
caaacagcuguaccaacgagua

SEQ ID NO: 96466 - RNA, 26 nt, Human
cacagcagcagcuauuuaaaauaaga

SEQ ID NO: 96467 - RNA, 21 nt, Human
caugcuuauuauacuauggga

SEQ ID NO: 96468 - RNA, 22 nt, Human
ccccaagaaacuuugaagccag

SEQ ID NO: 96469 - RNA, 24 nt, Human
cgaccuuuccccaagaaacuuuga

SEQ ID NO: 96470 - RNA, 22 nt, Human
cgcaacgcucagucaaccccuc

SEQ ID NO: 96471 - RNA, 20 nt, Human
cgggagaaagcuaaggcucg

SEQ ID NO: 96472 - RNA, 21 nt, Human
cuaaauacagcaguaucugcc

SEQ ID NO: 96473 - RNA, 19 nt, Human
cuagaaaagcaaaagccca

SEQ ID NO: 96474 - RNA, 18 nt, Human
cucaaugacauaagaugc

SEQ ID NO: 96475 - RNA, 20 nt, Human
cucgcaacgcucagucaacc

SEQ ID NO: 96476 - RNA, 20 nt, Human
cugcaagaacaaaucagaug

SEQ ID NO: 96477 - RNA, 26 nt, Human
gaaaaagcacagucuauucauccagg

SEQ ID NO: 96478 - RNA, 22 nt, Human
gaaaagguuucuauauaccuuc

SEQ ID NO: 96479 - RNA, 24 nt, Human
gacaaucaguaaaaaucuacagua

SEQ ID NO: 96480 - RNA, 23 nt, Human
gaguaacaaagaaacaguaaauc

SEQ ID NO: 96481 - RNA, 21 nt, Human
ggaaaaaaaauauaaucccac

SEQ ID NO: 96482 - RNA, 24 nt, Human
gggagagaaaaagaaaaagcacag

SEQ ID NO: 96483 - RNA, 19 nt, Human
gggucgacccacgcguccg

SEQ ID NO: 96484 - RNA, 23 nt, Human
guaaaccucuaaaacugaagacg

SEQ ID NO: 96485 - RNA, 18 nt, Human
gugggucgacccacgcgu

SEQ ID NO: 96486 - RNA, 21 nt, Human
gugggucgacccacgcguccg

SEQ ID NO: 96487 - RNA, 23 nt, Human
guuauauuuggcauguuaaggaa

SEQ ID NO: 96488 - RNA, 24 nt, Human
guucaagauacgaaggcuuucaau

SEQ ID NO: 96489 - RNA, 24 nt, Human
uaaaaacuaacagccauggcacca

SEQ ID NO: 96490 - RNA, 22 nt, Human
uaaaacaaacagcuguaccaac

SEQ ID NO: 96491 - RNA, 19 nt, Human
uaaaccgaccuuuccccaa

SEQ ID NO: 96492 - RNA, 19 nt, Human
uaaacuacuuaaagccucu

SEQ ID NO: 96493 - RNA, 20 nt, Human
uaaacugccaagagccauga

SEQ ID NO: 96494 - RNA, 20 nt, Human
uaaagccucugcacuagucc

SEQ ID NO: 96495 - RNA, 20 nt, Human
uacucaagacagucuggugg

SEQ ID NO: 96496 - RNA, 25 nt, Human
uacuuuuuuuuaaaguacaaaggag

SEQ ID NO: 96497 - RNA, 20 nt, Human
uagaagaacaucugcaagaa

SEQ ID NO: 96498 - RNA, 20 nt, Human
uagaagaacaucugcaagaa

SEQ ID NO: 96499 - RNA, 22 nt, Human
uagaagaacaucugcaagaaca

SEQ ID NO: 96500 - RNA, 19 nt, Human
uauuuuggcuucagugagu

SEQ ID NO: 96501 - RNA, 28 nt, Human
ucaauccggacgcgugggucgacccacg

SEQ ID NO: 96502 - RNA, 21 nt, Human
ucuacaguaaccugaucaacc

SEQ ID NO: 96503 - RNA, 23 nt, Human
ucucaaugacauaagaugcuuua

SEQ ID NO: 96504 - RNA, 19 nt, Human
ugaaaugaaacaaagcagu

SEQ ID NO: 96505 - RNA, 21 nt, Human
ugaaaugacagccaaaaaucc

SEQ ID NO: 96506 - RNA, 24 nt, Human
ugaaaugacagccaaaaauccacc

SEQ ID NO: 96507 - RNA, 22 nt, Human
ugacagccaaaaauccaccuaa

SEQ ID NO: 96508 - RNA, 22 nt, Human
ugaccaauccuuaccuuccuua

SEQ ID NO: 96509 - RNA, 23 nt, Human
ugagguaaaccgaccuuucccca

SEQ ID NO: 96510 - RNA, 22 nt, Human
ugcaacaaauaucuguaaggua

SEQ ID NO: 96511 - RNA, 23 nt, Human
ugcaugcuuauuauacuauggga

SEQ ID NO: 96512 - RNA, 24 nt, Human
uggaauagcgucuuccauguggga

SEQ ID NO: 96513 - RNA, 23 nt, Human
uggauuuuaaaaaaacccaaaaa

SEQ ID NO: 96514 - RNA, 23 nt, Human
uggcaccauaauacauuuuguga

SEQ ID NO: 96515 - RNA, 24 nt, Human
uggcaccauaauacauuuugugag

SEQ ID NO: 96516 - RNA, 22 nt, Human
uggcucaagauacuacauugcu

SEQ ID NO: 96517 - RNA, 24 nt, Human
ugggagguucaagauacgaaggcu

SEQ ID NO: 96518 - RNA, 21 nt, Human
ugguacaugauacagauuggu

SEQ ID NO: 96519 - RNA, 26 nt, Human
uguuauguuuucacaaaauuugcuac

SEQ ID NO: 96520 - RNA, 21 nt, Human
uuaaagccucugcacuagucc

SEQ ID NO: 96521 - RNA, 22 nt, Human
uuaaagccucugcacuagucca

SEQ ID NO: 96522 - RNA, 18 nt, Human
uuccaucacuuucagaaa

SEQ ID NO: 96523 - RNA, 21 nt, Human
uucuggauuuuaaaaaaaccc

SEQ ID NO: 96524 - RNA, 18 nt, Human
uucuucucaauucuguuc

SEQ ID NO: 96525 - RNA, 21 nt, Human
uuuaaaauaagacagccacag

SEQ ID NO: 96526 - RNA, 18 nt, Human
uuugauagaagaacaucu

SEQ ID NO: 96527 - RNA, 21 nt, Human
uuuuaaacuacuuaaagccuc

SEQ ID NO: 96528 - RNA, 19 nt, Human
aaaauuagaaggaaagggg

SEQ ID NO: 96529 - RNA, 18 nt, Human
aaacaagcaaaaauaaca

SEQ ID NO: 96530 - RNA, 18 nt, Human
aacuuauucaccuucccc

SEQ ID NO: 96531 - RNA, 24 nt, Human
aagcaaaaauaacaaaauuuuuac

SEQ ID NO: 96532 - RNA, 23 nt, Human
aagucccagaacccaggucagaa

SEQ ID NO: 96533 - RNA, 23 nt, Human
aauccacuccuucaaaaacccug

SEQ ID NO: 96534 - RNA, 21 nt, Human
acaaagaaaauccacuccuuc

SEQ ID NO: 96535 - RNA, 22 nt, Human
acaaagaaaauccacuccuuca

SEQ ID NO: 96536 - RNA, 21 nt, Human
accaaccuccaacuuauucac

SEQ ID NO: 96537 - RNA, 22 nt, Human
accccaaaaggagaagggugac

SEQ ID NO: 96538 - RNA, 23 nt, Human
agaaacaagcaaaaauaacaaaa

SEQ ID NO: 96539 - RNA, 19 nt, Human
agaacaacaaauccugcaa

SEQ ID NO: 96540 - RNA, 21 nt, Human
agaaggaaaggggggaucuaa

SEQ ID NO: 96541 - RNA, 18 nt, Human
agagcauaaagugaaaug

SEQ ID NO: 96542 - RNA, 18 nt, Human
aggaagagacugcuuccc

SEQ ID NO: 96543 - RNA, 19 nt, Human
aggagaagggugacgagga

SEQ ID NO: 96544 - RNA, 21 nt, Human
auuugcagauguuauuuccuu

SEQ ID NO: 96545 - RNA, 23 nt, Human
auuuuuacaaagagaguugagag

SEQ ID NO: 96546 - RNA, 19 nt, Human
caacaaagaaaauccacuc

SEQ ID NO: 96547 - RNA, 18 nt, Human
caacagacaaaccucccc

SEQ ID NO: 96548 - RNA, 19 nt, Human
cacgauguguucaggugug

SEQ ID NO: 96549 - RNA, 27 nt, Human
cacgauguguucagguguggcguagcg

SEQ ID NO: 96550 - RNA, 20 nt, Human
cacucuguccuuuucaauau

SEQ ID NO: 96551 - RNA, 25 nt, Human
cacucuguccuuuucaauauuuucc

SEQ ID NO: 96552 - RNA, 27 nt, Human
cacucuguccuuuucaauauuuuccca

SEQ ID NO: 96553 - RNA, 19 nt, Human
cagaacaacaaauccugca

SEQ ID NO: 96554 - RNA, 24 nt, Human
caggucagaacaacaaauccugca

SEQ ID NO: 96555 - RNA, 22 nt, Human
caggugugucuggagcccuugg

SEQ ID NO: 96556 - RNA, 22 nt, Human
ccaacuuauucaccuuccccua

SEQ ID NO: 96557 - RNA, 24 nt, Human
ccagaacccaggucagaacaacaa

SEQ ID NO: 96558 - RNA, 22 nt, Human
ccccauuccaucuggagauaaa

SEQ ID NO: 96559 - RNA, 19 nt, Human
ccucugguucugacucucu

SEQ ID NO: 96560 - RNA, 22 nt, Human
cugcaacaaagaaaauccacuc

SEQ ID NO: 96561 - RNA, 22 nt, Human
cugcuggucucucaccccaaaa

SEQ ID NO: 96562 - RNA, 23 nt, Human
cuuauucaccuuccccuaauuca

SEQ ID NO: 96563 - RNA, 22 nt, Human
cuucccacuuguaagucaggga

SEQ ID NO: 96564 - RNA, 21 nt, Human
gaacccaggucagaacaacaa

SEQ ID NO: 96565 - RNA, 19 nt, Human
gagcacaguuagcaaagua

SEQ ID NO: 96566 - RNA, 23 nt, Human
gagcacaguuagcaaaguacggc

SEQ ID NO: 96567 - RNA, 20 nt, Human
guugcuaggaccccauucca

SEQ ID NO: 96568 - RNA, 18 nt, Human
uaucuaaaacaggccuga

SEQ ID NO: 96569 - RNA, 23 nt, Human
uauucucuuccccugucucuuca

SEQ ID NO: 96570 - RNA, 22 nt, Human
ucauuaaucagaaacaagcaaa

SEQ ID NO: 96571 - RNA, 19 nt, Human
uccaaacaaaccuacccca

SEQ ID NO: 96572 - RNA, 22 nt, Human
uccaaacaaaccuaccccacga

SEQ ID NO: 96573 - RNA, 23 nt, Human
ucccagaacccaggucagaacaa

SEQ ID NO: 96574 - RNA, 21 nt, Human
ucccauguauucucuuccccu

SEQ ID NO: 96575 - RNA, 23 nt, Human
uccccugucucuucagccccuua

SEQ ID NO: 96576 - RNA, 24 nt, Human
uccccugucucuucagccccuuac

SEQ ID NO: 96577 - RNA, 18 nt, Human
ucccucugguucugacuc

SEQ ID NO: 96578 - RNA, 18 nt, Human
uccucucuguuccagcuu

SEQ ID NO: 96579 - RNA, 21 nt, Human
ucucuauucugacuucuuucu

SEQ ID NO: 96580 - RNA, 23 nt, Human
ucuguccuuuucaauauuuuccc

SEQ ID NO: 96581 - RNA, 21 nt, Human
ucuuugauuucuguuccaaac

SEQ ID NO: 96582 - RNA, 22 nt, Human
ugaaaagccacuuaaccacuaa

SEQ ID NO: 96583 - RNA, 21 nt, Human
ugacgaggaggcucauggugu

SEQ ID NO: 96584 - RNA, 19 nt, Human
ugagaacauguuucaugca

SEQ ID NO: 96585 - RNA, 29 nt, Human
ugcaaugaagaagaggaagugaggagcac

SEQ ID NO: 96586 - RNA, 21 nt, Human
ugcccaaugcucccauguccc

SEQ ID NO: 96587 - RNA, 19 nt, Human
ugcuauggaacaagucuga

SEQ ID NO: 96588 - RNA, 21 nt, Human
uggaacaagucugauguggca

SEQ ID NO: 96589 - RNA, 20 nt, Human
uggcucccagugugcugccc

SEQ ID NO: 96590 - RNA, 19 nt, Human
uguacuuugcauugaagga

SEQ ID NO: 96591 - RNA, 25 nt, Human
uuaaucagaaacaagcaaaaauaac

SEQ ID NO: 96592 - RNA, 23 nt, Human
uuagaaggaaaggggggaucucc

SEQ ID NO: 96593 - RNA, 24 nt, Human
uucaacacagaguuuuauugagaa

SEQ ID NO: 96594 - RNA, 23 nt, Human
uucaggugugucuggagcccuug

SEQ ID NO: 96595 - RNA, 23 nt, Human
uuccaaacaaaccuaccccacga

SEQ ID NO: 96596 - RNA, 21 nt, Human
uuccccugucucuucagcccc

SEQ ID NO: 96597 - RNA, 18 nt, Human
uugaacauguggagguug

SEQ ID NO: 96598 - RNA, 20 nt, Human
augggagaggagacaugaug

SEQ ID NO: 96599 - RNA, 20 nt, Human
gaaugggagaggagacauga

SEQ ID NO: 96600 - RNA, 20 nt, Human
uaauaaauuuacaguuuuaa

SEQ ID NO: 96601 - RNA, 23 nt, Human
ugggagaggagacaugaugaugg

SEQ ID NO: 96602 - RNA, 21 nt, Human
uuaauguguguaaaaucaggg

SEQ ID NO: 96603 - RNA, 22 nt, Human
uuugcugauguuuaaauaauaa

SEQ ID NO: 96604 - RNA, 20 nt, Human
augcagaaagagaaacaauu

SEQ ID NO: 96605 - RNA, 20 nt, Human
cuccuggguugcuggguucu

SEQ ID NO: 96606 - RNA, 21 nt, Human
uaugcagaaagagaaacaauu

SEQ ID NO: 96607 - RNA, 19 nt, Human
uugguuuuuauuaacaaau

SEQ ID NO: 96608 - RNA, 23 nt, Human
uuuuuuuuuuuuuuuugguuuuu

SEQ ID NO: 96609 - RNA, 29 nt, Human
aaccuuuuaaaaucaggcauguucgcuga

SEQ ID NO: 96610 - RNA, 23 nt, Human
aauuccuuuuucuauauuuccac

SEQ ID NO: 96611 - RNA, 22 nt, Human
accccggcagcccuccucgcug

SEQ ID NO: 96612 - RNA, 19 nt, Human
acucagaaccugggcugca

SEQ ID NO: 96613 - RNA, 24 nt, Human
agaccaggacugaagucuuaggaa

SEQ ID NO: 96614 - RNA, 21 nt, Human
agagguccuggguuccagaga

SEQ ID NO: 96615 - RNA, 19 nt, Human
agccaauucccaagcccag

SEQ ID NO: 96616 - RNA, 21 nt, Human
agcccagaccccggcagcccu

SEQ ID NO: 96617 - RNA, 18 nt, Human
caacugccaauaugacau

SEQ ID NO: 96618 - RNA, 21 nt, Human
caagguaucucuccuaucuuc

SEQ ID NO: 96619 - RNA, 22 nt, Human
caaucuaucuccaacucaucuc

SEQ ID NO: 96620 - RNA, 23 nt, Human
cacccuaaccuuuugacugaucu

SEQ ID NO: 96621 - RNA, 23 nt, Human
caccgucaccaucacccuaaccu

SEQ ID NO: 96622 - RNA, 20 nt, Human
cacucacaucagcucuuacc

SEQ ID NO: 96623 - RNA, 20 nt, Human
cacucuucucccccgccgcu

SEQ ID NO: 96624 - RNA, 23 nt, Human
cacucuucucccccgccgcucaa

SEQ ID NO: 96625 - RNA, 19 nt, Human
cagaucccaucacacacac

SEQ ID NO: 96626 - RNA, 21 nt, Human
cagccaauucccaagcccaga

SEQ ID NO: 96627 - RNA, 21 nt, Human
ccaccgucaccaucacccuaa

SEQ ID NO: 96628 - RNA, 22 nt, Human
ccagaccccggcagcccuccuc

SEQ ID NO: 96629 - RNA, 18 nt, Human
ccagagacacagaugugg

SEQ ID NO: 96630 - RNA, 18 nt, Human
cccaagcccagaccccgg

SEQ ID NO: 96631 - RNA, 24 nt, Human
cccaagcccagaccccggcagccc

SEQ ID NO: 96632 - RNA, 18 nt, Human
cccucucccucacucuuu

SEQ ID NO: 96633 - RNA, 20 nt, Human
ccgcccucugaccugcgcac

SEQ ID NO: 96634 - RNA, 18 nt, Human
ccucacucuuuuuaucca

SEQ ID NO: 96635 - RNA, 18 nt, Human
ccucccucucccucacuc

SEQ ID NO: 96636 - RNA, 20 nt, Human
ccucccucucccucacucuu

SEQ ID NO: 96637 - RNA, 23 nt, Human
ccucuugaauaaauuccuuuuuc

SEQ ID NO: 96638 - RNA, 19 nt, Human
ccugacaccucccucuccc

SEQ ID NO: 96639 - RNA, 21 nt, Human
ccuggaggaaaagacuccucu

SEQ ID NO: 96640 - RNA, 27 nt, Human
cucaucucuauuucacuucuuuuugaa

SEQ ID NO: 96641 - RNA, 25 nt, Human
cucccucucccucacucuuuuuauc

SEQ ID NO: 96642 - RNA, 20 nt, Human
cucugaccugcgcacucuuc

SEQ ID NO: 96643 - RNA, 23 nt, Human
cucuuuggcaacucagaaccugg

SEQ ID NO: 96644 - RNA, 20 nt, Human
cugaaguagcauucuugggu

SEQ ID NO: 96645 - RNA, 24 nt, Human
gaccaggacugaagucuuaggaac

SEQ ID NO: 96646 - RNA, 23 nt, Human
gaccccggcagcccuccucgcug

SEQ ID NO: 96647 - RNA, 19 nt, Human
gauacaaguuugcacaccu

SEQ ID NO: 96648 - RNA, 21 nt, Human
gcugcagccugacaccucccu

SEQ ID NO: 96649 - RNA, 22 nt, Human
gggcugcagccugacaccuccc

SEQ ID NO: 96650 - RNA, 20 nt, Human
guguaauuuuugaaaaagaa

SEQ ID NO: 96651 - RNA, 19 nt, Human
uaaaagacacacaaacucc

SEQ ID NO: 96652 - RNA, 22 nt, Human
uacagaucccaucacacacacu

SEQ ID NO: 96653 - RNA, 19 nt, Human
uauaaccuaacuuucuuuu

SEQ ID NO: 96654 - RNA, 22 nt, Human
uauccaaucuaucuccaacuca

SEQ ID NO: 96655 - RNA, 22 nt, Human
uaucuccaacucaucucuauuu

SEQ ID NO: 96656 - RNA, 27 nt, Human
uauuuccaccgucaccaucacccuaac

SEQ ID NO: 96657 - RNA, 18 nt, Human
ucagaaccugggcugcag

SEQ ID NO: 96658 - RNA, 18 nt, Human
uccaacugccaauaugac

SEQ ID NO: 96659 - RNA, 24 nt, Human
uccagggcaaacuuuuuauaaaag

SEQ ID NO: 96660 - RNA, 19 nt, Human
ucccaggaauccuggcgcc

SEQ ID NO: 96661 - RNA, 20 nt, Human
ucccuuuccgcugggugcca

SEQ ID NO: 96662 - RNA, 19 nt, Human
ugaaaaacgguuaaagcca

SEQ ID NO: 96663 - RNA, 22 nt, Human
ugaccugcgcacucuucucccc

SEQ ID NO: 96664 - RNA, 24 nt, Human
ugguaggucuucagauacaaguuu

SEQ ID NO: 96665 - RNA, 19 nt, Human
uguaguguaauuuuugaaa

SEQ ID NO: 96666 - RNA, 23 nt, Human
uucacaaccggcgugucucaauu

SEQ ID NO: 96667 - RNA, 19 nt, Human
uuccuggaggaaaagacuc

SEQ ID NO: 96668 - RNA, 23 nt, Human
uucgcugaaaauccagauuucca

SEQ ID NO: 96669 - RNA, 19 nt, Human
uucugauuucacagagcca

SEQ ID NO: 96670 - RNA, 21 nt, Human
uugaaaaacgguuaaagccaa

SEQ ID NO: 96671 - RNA, 20 nt, Human
uuugacugaucuccugaagu

SEQ ID NO: 96672 - RNA, 22 nt, Human
uuugucaucagucaguagguau

SEQ ID NO: 96673 - RNA, 19 nt, Human
aaaaacuccagauguugac

SEQ ID NO: 96674 - RNA, 21 nt, Human
agaccaaaaacuccagauguu

SEQ ID NO: 96675 - RNA, 23 nt, Human
cacaugaccugagaggggacaag

SEQ ID NO: 96676 - RNA, 21 nt, Human
caugaccugagaggggacaag

SEQ ID NO: 96677 - RNA, 23 nt, Human
cuugcaaucacacuuauauugcu

SEQ ID NO: 96678 - RNA, 20 nt, Human
gagaccaaaaacuccagaug

SEQ ID NO: 96679 - RNA, 21 nt, Human
gagggcagaaauccacagugc

SEQ ID NO: 96680 - RNA, 18 nt, Human
ggagggcagaaauccaca

SEQ ID NO: 96681 - RNA, 23 nt, Human
guggcccacagccucaggaggug

SEQ ID NO: 96682 - RNA, 25 nt, Human
ucucuaagauuucugugcucggucc

SEQ ID NO: 96683 - RNA, 22 nt, Human
ucucugaggagaccaaaaacuc

SEQ ID NO: 96684 - RNA, 24 nt, Human
ucuugcaaucacacuuauauugcu

SEQ ID NO: 96685 - RNA, 24 nt, Human
ugaggagaccaaaaacuccagaug

SEQ ID NO: 96686 - RNA, 19 nt, Human
ugcuuguagugagacccag

SEQ ID NO: 96687 - RNA, 23 nt, Human
uggcccacagccucaggagguga

SEQ ID NO: 96688 - RNA, 22 nt, Human
uguucugcacacagaaaacacc

SEQ ID NO: 96689 - RNA, 24 nt, Human
uuauauugcuucuccuuacuggug

SEQ ID NO: 96690 - RNA, 27 nt, Human
uucacuuuuacucacaggauggugggc

SEQ ID NO: 96691 - RNA, 24 nt, Human
uucuccuuacuggugugauggagc

SEQ ID NO: 96692 - RNA, 22 nt, Human
uuuacucacaggauggugggca

SEQ ID NO: 96693 - RNA, 20 nt, Human
aaggaacuguagcuuaaaag

SEQ ID NO: 96694 - RNA, 22 nt, Human
aaggauggagagaaggaacugu

SEQ ID NO: 96695 - RNA, 25 nt, Human
caccccacucucccccaguguccag

SEQ ID NO: 96696 - RNA, 22 nt, Human
cacucucccccaguguccagaa

SEQ ID NO: 96697 - RNA, 21 nt, Human
ccaguguccagaacuccugcu

SEQ ID NO: 96698 - RNA, 20 nt, Human
uaaaagggggugaaguucug

SEQ ID NO: 96699 - RNA, 21 nt, Human
aagaacacaagcucuacacca

SEQ ID NO: 96700 - RNA, 22 nt, Human
aagaacacaagcucuacaccag

SEQ ID NO: 96701 - RNA, 23 nt, Human
aagaacacaagcucuacaccagg

SEQ ID NO: 96702 - RNA, 22 nt, Human
aagcuccaaggaugggccaaga

SEQ ID NO: 96703 - RNA, 23 nt, Human
agaaggacagaauaagacccagg

SEQ ID NO: 96704 - RNA, 18 nt, Human
agcuccaaggaugggcca

SEQ ID NO: 96705 - RNA, 19 nt, Human
aggcugaggcuagcaggga

SEQ ID NO: 96706 - RNA, 23 nt, Human
auacaacauaccaagcccgcccc

SEQ ID NO: 96707 - RNA, 24 nt, Human
auggagccuccaugcccucucugg

SEQ ID NO: 96708 - RNA, 18 nt, Human
caaccagcaaguccccag

SEQ ID NO: 96709 - RNA, 20 nt, Human
cagccaaauggaagacaugu

SEQ ID NO: 96710 - RNA, 19 nt, Human
ccuaaaugcaucccacuca

SEQ ID NO: 96711 - RNA, 19 nt, Human
cgcccccuaaaugcauccc

SEQ ID NO: 96712 - RNA, 19 nt, Human
gacagggcagcuacacaug

SEQ ID NO: 96713 - RNA, 19 nt, Human
gagccuccaugcccucucu

SEQ ID NO: 96714 - RNA, 24 nt, Human
gcccgcccccuaaaugcaucccac

SEQ ID NO: 96715 - RNA, 22 nt, Human
ggacuccuggggaccacagcuu

SEQ ID NO: 96716 - RNA, 21 nt, Human
ggaugccauugguugacuggg

SEQ ID NO: 96717 - RNA, 24 nt, Human
ggauucauacaacauaccaagccc

SEQ ID NO: 96718 - RNA, 23 nt, Human
gguccaaggauggagagaagaag

SEQ ID NO: 96719 - RNA, 21 nt, Human
uaaagcuccaaggaugggcca

SEQ ID NO: 96720 - RNA, 19 nt, Human
uaaaugcaucccacucagg

SEQ ID NO: 96721 - RNA, 21 nt, Human
uacacaugaauccaaauaguc

SEQ ID NO: 96722 - RNA, 24 nt, Human
ucacuuauaaagcuccaaggauug

SEQ ID NO: 96723 - RNA, 18 nt, Human
uccuggggaccacagcuu

SEQ ID NO: 96724 - RNA, 19 nt, Human
ucucagggcauuugugaag

SEQ ID NO: 96725 - RNA, 21 nt, Human
ucuccaaaaggaacagagagu

SEQ ID NO: 96726 - RNA, 24 nt, Human
ucuccaaaaggaacagagagugga

SEQ ID NO: 96727 - RNA, 20 nt, Human
ugagcagaugguaguuugca

SEQ ID NO: 96728 - RNA, 24 nt, Human
ugagcagaugguaguuugcaugga

SEQ ID NO: 96729 - RNA, 19 nt, Human
uggaagacauguauaggac

SEQ ID NO: 96730 - RNA, 24 nt, Human
uggaaguugagcagaugguaguuu

SEQ ID NO: 96731 - RNA, 18 nt, Human
uggggguggaagagguug

SEQ ID NO: 96732 - RNA, 24 nt, Human
uggggguggaagagguuguaugga

SEQ ID NO: 96733 - RNA, 18 nt, Human
ugugaagguccaaggaug

SEQ ID NO: 96734 - RNA, 21 nt, Human
uuccagccugcaagaugagcu

SEQ ID NO: 96735 - RNA, 21 nt, Human
uuggaggcaucagaaggacag

SEQ ID NO: 96736 - RNA, 20 nt, Human
aauccacaccagugugucca

SEQ ID NO: 96737 - RNA, 19 nt, Human
acuucccuggcccccgcug

SEQ ID NO: 96738 - RNA, 19 nt, Human
agagauggagaagggaagg

SEQ ID NO: 96739 - RNA, 20 nt, Human
agauggccagugggcuggug

SEQ ID NO: 96740 - RNA, 21 nt, Human
agcaaggagaguggaagagaa

SEQ ID NO: 96741 - RNA, 28 nt, Human
aggaagccauguggcgguggugaccuca

SEQ ID NO: 96742 - RNA, 20 nt, Human
aggccaggacugggccccuu

SEQ ID NO: 96743 - RNA, 24 nt, Human
cacgcaggaggaagccauguggcg

SEQ ID NO: 96744 - RNA, 19 nt, Human
ccaaaaagacuggcucuga

SEQ ID NO: 96745 - RNA, 22 nt, Human
ccagugccucugcugcagccca

SEQ ID NO: 96746 - RNA, 22 nt, Human
ccccagugccucugcugcagcc

SEQ ID NO: 96747 - RNA, 26 nt, Human
cccccagugccucugcugcagcccau

SEQ ID NO: 96748 - RNA, 23 nt, Human
ccccgcugcccccagugccucug

SEQ ID NO: 96749 - RNA, 23 nt, Human
cucagaggcagaaacugggcaua

SEQ ID NO: 96750 - RNA, 19 nt, Human
cucugcugcagcccaucca

SEQ ID NO: 96751 - RNA, 19 nt, Human
cugcccccagugccucugc

SEQ ID NO: 96752 - RNA, 18 nt, Human
cugcugcagcccauccag

SEQ ID NO: 96753 - RNA, 18 nt, Human
cuggggaaacucggggac

SEQ ID NO: 96754 - RNA, 22 nt, Human
gagauggccagugggcuggugg

SEQ ID NO: 96755 - RNA, 18 nt, Human
gaggcagaaacugggcau

SEQ ID NO: 96756 - RNA, 23 nt, Human
gcagcuccggguggagauggcca

SEQ ID NO: 96757 - RNA, 21 nt, Human
gcaggaggaagccauguggcg

SEQ ID NO: 96758 - RNA, 19 nt, Human
gccauguggcggugucugg

SEQ ID NO: 96759 - RNA, 21 nt, Human
ggaagagaacaggggcaggag

SEQ ID NO: 96760 - RNA, 20 nt, Human
ggacugggccccuuucuacu

SEQ ID NO: 96761 - RNA, 23 nt, Human
ggagaagccaggccaggacuggg

SEQ ID NO: 96762 - RNA, 22 nt, Human
ggaggugugcaugucagggcag

SEQ ID NO: 96763 - RNA, 21 nt, Human
ggagguuugggguuacccuca

SEQ ID NO: 96764 - RNA, 20 nt, Human
ggcugguggggcaggggagg

SEQ ID NO: 96765 - RNA, 21 nt, Human
gggcaggaguuuuggagguuu

SEQ ID NO: 96766 - RNA, 23 nt, Human
gguagcaaggagaguggaagaga

SEQ ID NO: 96767 - RNA, 24 nt, Human
ggugucuggggaaacucggggacu

SEQ ID NO: 96768 - RNA, 18 nt, Human
guccuuuucugggcuuuc

SEQ ID NO: 96769 - RNA, 19 nt, Human
gugcaaugccucacuucca

SEQ ID NO: 96770 - RNA, 23 nt, Human
gugugugugugugcgugugugug

SEQ ID NO: 96771 - RNA, 21 nt, Human
gugugugugugugugugcgug

SEQ ID NO: 96772 - RNA, 19 nt, Human
gugugugugugugugugug

SEQ ID NO: 96773 - RNA, 22 nt, Human
uagcaaggagaguggaagagaa

SEQ ID NO: 96774 - RNA, 22 nt, Human
ucagaggcagaaacugggcaua

SEQ ID NO: 96775 - RNA, 22 nt, Human
ucagggguagagggccagagag

SEQ ID NO: 96776 - RNA, 22 nt, Human
uccacaccaguguguccaucuc

SEQ ID NO: 96777 - RNA, 18 nt, Human
uccccgugcaaugccuca

SEQ ID NO: 96778 - RNA, 19 nt, Human
uccccgugcaaugccucac

SEQ ID NO: 96779 - RNA, 21 nt, Human
uccccgugcaaugccucacuu

SEQ ID NO: 96780 - RNA, 23 nt, Human
ucccucagaggcagaaacugggc

SEQ ID NO: 96781 - RNA, 18 nt, Human
ucccuggcccccgcugcc

SEQ ID NO: 96782 - RNA, 23 nt, Human
ucuguccuuuucugggcuuuccc

SEQ ID NO: 96783 - RNA, 19 nt, Human
ugaguggggaugucagauc

SEQ ID NO: 96784 - RNA, 20 nt, Human
ugagugugugugugugugug

SEQ ID NO: 96785 - RNA, 18 nt, Human
ugauacguacgucucccc

SEQ ID NO: 96786 - RNA, 22 nt, Human
uggagguuugggguuacccuca

SEQ ID NO: 96787 - RNA, 25 nt, Human
uggguagcaaggagaguggaagaga

SEQ ID NO: 96788 - RNA, 23 nt, Human
ugugagcucugucucccuggcag

SEQ ID NO: 96789 - RNA, 21 nt, Human
ugugcgugugugugugugugu

SEQ ID NO: 96790 - RNA, 21 nt, Human
ugugcgugugugugugugugu

SEQ ID NO: 96791 - RNA, 19 nt, Human
ugugugcgugugugugugu

SEQ ID NO: 96792 - RNA, 21 nt, Human
ugugugcgugugugugugugu

SEQ ID NO: 96793 - RNA, 21 nt, Human
ugugugugcgugugugugugu

SEQ ID NO: 96794 - RNA, 21 nt, Human
ugugugugcgugugugugugu

SEQ ID NO: 96795 - RNA, 21 nt, Human
ugugugugcgugugugugugu

SEQ ID NO: 96796 - RNA, 25 nt, Human
ugugugugcgugugugugugugugu

SEQ ID NO: 96797 - RNA, 21 nt, Human
ugugugugugcgugugugugu

SEQ ID NO: 96798 - RNA, 25 nt, Human
ugugugugugcgugugugugugugu

SEQ ID NO: 96799 - RNA, 18 nt, Human
ugugugugugugcgcaca

SEQ ID NO: 96800 - RNA, 19 nt, Human
ugugugugugugcgcacau

SEQ ID NO: 96801 - RNA, 20 nt, Human
ugugugugugugcgugugug

SEQ ID NO: 96802 - RNA, 25 nt, Human
ugugugugugugcgugugugugugu

SEQ ID NO: 96803 - RNA, 21 nt, Human
ugugugugugugugcgcacau

SEQ ID NO: 96804 - RNA, 21 nt, Human
ugugugugugugugcgugugu

SEQ ID NO: 96805 - RNA, 21 nt, Human
ugugugugugugugcgugugu

SEQ ID NO: 96806 - RNA, 18 nt, Human
ugugugugugugugugcg

SEQ ID NO: 96807 - RNA, 23 nt, Human
ugugugugugugugugcgcacau

SEQ ID NO: 96808 - RNA, 23 nt, Human
uuccaaaggagaagccaggccag

SEQ ID NO: 96809 - RNA, 19 nt, Human
uucugggcuuucccucaga

SEQ ID NO: 96810 - RNA, 26 nt, Human
aaacaagugacagcuugaaaaucagg

SEQ ID NO: 96811 - RNA, 22 nt, Human
aacaugguuucugagaggccuc

SEQ ID NO: 96812 - RNA, 19 nt, Human
aagaagccaaauggauuuc

SEQ ID NO: 96813 - RNA, 24 nt, Human
aagccacuucuaugaagaagccaa

SEQ ID NO: 96814 - RNA, 20 nt, Human
acaaccuaaccccuccaccc

SEQ ID NO: 96815 - RNA, 18 nt, Human
acuccugugccgucaucc

SEQ ID NO: 96816 - RNA, 18 nt, Human
agagaggggagaaaagga

SEQ ID NO: 96817 - RNA, 22 nt, Human
agagaugggcuugcuuugcacc

SEQ ID NO: 96818 - RNA, 19 nt, Human
aggaaaauugaagaaccag

SEQ ID NO: 96819 - RNA, 18 nt, Human
aggcuuugugcaguauca

SEQ ID NO: 96820 - RNA, 20 nt, Human
agguaugagaugcagggaga

SEQ ID NO: 96821 - RNA, 20 nt, Human
caaccuaaccccuccaccca

SEQ ID NO: 96822 - RNA, 18 nt, Human
caagugacagcuugaaaa

SEQ ID NO: 96823 - RNA, 23 nt, Human
caaugcgucuucauaaaucaaac

SEQ ID NO: 96824 - RNA, 21 nt, Human
caccccaccagacucucugcc

SEQ ID NO: 96825 - RNA, 21 nt, Human
cacugugccaauucccaaagc

SEQ ID NO: 96826 - RNA, 22 nt, Human
cagagucacagcccugcucccc

SEQ ID NO: 96827 - RNA, 18 nt, Human
cagcugccugagcccucc

SEQ ID NO: 96828 - RNA, 18 nt, Human
cauuaucauuccuuccuc

SEQ ID NO: 96829 - RNA, 18 nt, Human
cauucaugucugaucugu

SEQ ID NO: 96830 - RNA, 22 nt, Human
ccaggcccuggcccccacccac

SEQ ID NO: 96831 - RNA, 19 nt, Human
ccccacccacgugcagaac

SEQ ID NO: 96832 - RNA, 21 nt, Human
ccccacccacgugcagaaccu

SEQ ID NO: 96833 - RNA, 22 nt, Human
ccccuccacccauucaugucug

SEQ ID NO: 96834 - RNA, 27 nt, Human
ccccuccaccccaccagacucucugcc

SEQ ID NO: 96835 - RNA, 18 nt, Human
ccccugguggccaacugg

SEQ ID NO: 96836 - RNA, 19 nt, Human
ccuccacccauucaugucu

SEQ ID NO: 96837 - RNA, 18 nt, Human
ccuccaccccaccagacu

SEQ ID NO: 96838 - RNA, 21 nt, Human
cugagucaccauuaucauucc

SEQ ID NO: 96839 - RNA, 18 nt, Human
cugccagccaguucacag

SEQ ID NO: 96840 - RNA, 20 nt, Human
cuuugcaccaucuacucucc

SEQ ID NO: 96841 - RNA, 19 nt, Human
gaacaaauuuccauauccu

SEQ ID NO: 96842 - RNA, 20 nt, Human
gaguaaagcccaggcccugg

SEQ ID NO: 96843 - RNA, 20 nt, Human
gccagccccuccaccccacc

SEQ ID NO: 96844 - RNA, 21 nt, Human
gccucuuccucugggaagcca

SEQ ID NO: 96845 - RNA, 24 nt, Human
gggaaucucgaugcuaauaacauc

SEQ ID NO: 96846 - RNA, 21 nt, Human
gguaugagaugcagggagaaa

SEQ ID NO: 96847 - RNA, 23 nt, Human
uaauaacaucacuuacauaacac

SEQ ID NO: 96848 - RNA, 23 nt, Human
uaccauggacaaagcuggucuca

SEQ ID NO: 96849 - RNA, 25 nt, Human
ucaaaacaaaauauagaacaagaac

SEQ ID NO: 96850 - RNA, 23 nt, Human
ucagcaagaggacgauggggagc

SEQ ID NO: 96851 - RNA, 19 nt, Human
ucagcaugugcucugggug

SEQ ID NO: 96852 - RNA, 19 nt, Human
ucagccagagucacagccc

SEQ ID NO: 96853 - RNA, 19 nt, Human
uccacaggacagaggggcc

SEQ ID NO: 96854 - RNA, 22 nt, Human
ucccaguucacccuugucgcuu

SEQ ID NO: 96855 - RNA, 22 nt, Human
ucuagaaaugcagucaacccag

SEQ ID NO: 96856 - RNA, 20 nt, Human
ucuauagagacuccugugcc

SEQ ID NO: 96857 - RNA, 20 nt, Human
ucugaucuguaaauuggaag

SEQ ID NO: 96858 - RNA, 20 nt, Human
ucugaucuguaaauuggaag

SEQ ID NO: 96859 - RNA, 22 nt, Human
ucugaucuguaaauuggaagau

SEQ ID NO: 96860 - RNA, 23 nt, Human
ucugaucuguaaauuggaagaua

SEQ ID NO: 96861 - RNA, 22 nt, Human
ugaagaagccaaauggauuucu

SEQ ID NO: 96862 - RNA, 18 nt, Human
ugaguaaguccucuccca

SEQ ID NO: 96863 - RNA, 22 nt, Human
ugaguaaguccucucccaguuc

SEQ ID NO: 96864 - RNA, 24 nt, Human
ugcagucaacccagagaggggaga

SEQ ID NO: 96865 - RNA, 22 nt, Human
ugccucauucucagcccucagc

SEQ ID NO: 96866 - RNA, 25 nt, Human
ugcuuugcaccaucuacucucccuu

SEQ ID NO: 96867 - RNA, 21 nt, Human
uggauuucuaacaaugcgucu

SEQ ID NO: 96868 - RNA, 22 nt, Human
ugggaagccacuucuaugaaga

SEQ ID NO: 96869 - RNA, 18 nt, Human
ugugagcugacaaggccg

SEQ ID NO: 96870 - RNA, 19 nt, Human
uguugaaaugucuggccug

SEQ ID NO: 96871 - RNA, 22 nt, Human
uucaaaacaaaauauagaacaa

SEQ ID NO: 96872 - RNA, 24 nt, Human
uuccuuccucuugcuuuggaagau

SEQ ID NO: 96873 - RNA, 25 nt, Human
uuuccugggcucagccagagucaca

SEQ ID NO: 96874 - RNA, 19 nt, Human
aaaaacucuccagcucugu

SEQ ID NO: 96875 - RNA, 21 nt, Human
aaacagcauuaaauaggaacu

SEQ ID NO: 96876 - RNA, 19 nt, Human
aaacauaugaaacaggaaa

SEQ ID NO: 96877 - RNA, 18 nt, Human
aaaggagcucucaccagg

SEQ ID NO: 96878 - RNA, 18 nt, Human
aaagugcugggauuacaa

SEQ ID NO: 96879 - RNA, 24 nt, Human
aaagugcugggauuacaagcauga

SEQ ID NO: 96880 - RNA, 24 nt, Human
aacuuaccccguuuaacccacuaa

SEQ ID NO: 96881 - RNA, 20 nt, Human
aagaaccuucuugggacuca

SEQ ID NO: 96882 - RNA, 23 nt, Human
aagaaccuucuugggacucaucc

SEQ ID NO: 96883 - RNA, 24 nt, Human
aagcgauucucaugccucagccuc

SEQ ID NO: 96884 - RNA, 19 nt, Human
aagugcugggauuacaagc

SEQ ID NO: 96885 - RNA, 21 nt, Human
aagugcugggauuacaagcau

SEQ ID NO: 96886 - RNA, 26 nt, Human
aagugcugggauuacaagcaugagcc

SEQ ID NO: 96887 - RNA, 19 nt, Human
acacugaagucucaugaca

SEQ ID NO: 96888 - RNA, 19 nt, Human
accaccgccaccauccccu

SEQ ID NO: 96889 - RNA, 27 nt, Human
acccugaaacauaugaaacaggaaagc

SEQ ID NO: 96890 - RNA, 23 nt, Human
accucggccucccaaagugcugg

SEQ ID NO: 96891 - RNA, 20 nt, Human
accuucugccugaccacuuc

SEQ ID NO: 96892 - RNA, 24 nt, Human
acggaguuucaccaucuugaccag

SEQ ID NO: 96893 - RNA, 18 nt, Human
acuccucccuuccuucuc

SEQ ID NO: 96894 - RNA, 27 nt, Human
acucugucgcccaggcuggagagcugu

SEQ ID NO: 96895 - RNA, 23 nt, Human
acugcagcauuucacacaggaua

SEQ ID NO: 96896 - RNA, 23 nt, Human
agacagacuugggccaugcccuu

SEQ ID NO: 96897 - RNA, 20 nt, Human
aggagcagcugagcccagag

SEQ ID NO: 96898 - RNA, 21 nt, Human
aggcucccagaauccacuccc

SEQ ID NO: 96899 - RNA, 27 nt, Human
aucaagucuuuccauuuaaaaaaaagu

SEQ ID NO: 96900 - RNA, 20 nt, Human
augaucaaggcacucaaacc

SEQ ID NO: 96901 - RNA, 22 nt, Human
augccucagccuccugggcagc

SEQ ID NO: 96902 - RNA, 23 nt, Human
augccucagccuccugggcagcu

SEQ ID NO: 96903 - RNA, 20 nt, Human
auucuauucguccuccuucc

SEQ ID NO: 96904 - RNA, 22 nt, Human
auuuuguauuuuuaguacagac

SEQ ID NO: 96905 - RNA, 24 nt, Human
caaagugcugggauuacaagcaug

SEQ ID NO: 96906 - RNA, 18 nt, Human
caacaccugaauuaacug

SEQ ID NO: 96907 - RNA, 25 nt, Human
cacaaucaaaaauuauaggaguacc

SEQ ID NO: 96908 - RNA, 23 nt, Human
cacaccgacauuaaagagaccaa

SEQ ID NO: 96909 - RNA, 22 nt, Human
caccaccaccgccaccaucccc

SEQ ID NO: 96910 - RNA, 19 nt, Human
caccaccgccaccaucccc

SEQ ID NO: 96911 - RNA, 20 nt, Human
caccgacauuaaagagacca

SEQ ID NO: 96912 - RNA, 23 nt, Human
caccuaaugcuggcuaucuccuc

SEQ ID NO: 96913 - RNA, 18 nt, Human
cacuaaccaaaagauuaa

SEQ ID NO: 96914 - RNA, 24 nt, Human
cacucaaaccacaaggcauccuga

SEQ ID NO: 96915 - RNA, 22 nt, Human
cacucugucgcccaggcuggag

SEQ ID NO: 96916 - RNA, 24 nt, Human
cagaguuuuggagcucugagcccu

SEQ ID NO: 96917 - RNA, 19 nt, Human
cagcacccaaguacugcug

SEQ ID NO: 96918 - RNA, 21 nt, Human
caggaaaaugauggaaguuaa

SEQ ID NO: 96919 - RNA, 19 nt, Human
caggugccugccaccaggc

SEQ ID NO: 96920 - RNA, 24 nt, Human
caggugccugccaccaggccaagc

SEQ ID NO: 96921 - RNA, 21 nt, Human
caugcuacuaaacgucaggga

SEQ ID NO: 96922 - RNA, 22 nt, Human
cauggaauggaagcccacuuaa

SEQ ID NO: 96923 - RNA, 19 nt, Human
ccaaagugcugggauuaca

SEQ ID NO: 96924 - RNA, 24 nt, Human
ccaaagugcugggauuacaagcau

SEQ ID NO: 96925 - RNA, 25 nt, Human
ccaccaccaccgccaccauccccuu

SEQ ID NO: 96926 - RNA, 18 nt, Human
ccaccaccgccaccaucc

SEQ ID NO: 96927 - RNA, 26 nt, Human
ccaccaggccaagcuaaauuuuguau

SEQ ID NO: 96928 - RNA, 20 nt, Human
ccacuaaccaaaagauuaaa

SEQ ID NO: 96929 - RNA, 20 nt, Human
ccaggguaaauccaacaguu

SEQ ID NO: 96930 - RNA, 19 nt, Human
ccagguucaagcgauucuc

SEQ ID NO: 96931 - RNA, 21 nt, Human
ccauggcacuguaagacuugg

SEQ ID NO: 96932 - RNA, 22 nt, Human
cccuaaaccacauaaagucccu

SEQ ID NO: 96933 - RNA, 18 nt, Human
cccuuuuuguuuucuacc

SEQ ID NO: 96934 - RNA, 20 nt, Human
ccuccuuccaaagaaccuuc

SEQ ID NO: 96935 - RNA, 24 nt, Human
ccugaucucaagugaucugcccac

SEQ ID NO: 96936 - RNA, 19 nt, Human
ccugggcagcugggauuac

SEQ ID NO: 96937 - RNA, 24 nt, Human
ccugggcagcugggauuacaggug

SEQ ID NO: 96938 - RNA, 21 nt, Human
cuaaaccacauaaagucccug

SEQ ID NO: 96939 - RNA, 21 nt, Human
cucaagugaucugcccaccuc

SEQ ID NO: 96940 - RNA, 24 nt, Human
cucaagugaucugcccaccucggc

SEQ ID NO: 96941 - RNA, 24 nt, Human
cucacucugucgcccaggcuggag

SEQ ID NO: 96942 - RNA, 25 nt, Human
cucucuucaaaagacacauuccaaa

SEQ ID NO: 96943 - RNA, 23 nt, Human
cugaaacuaugaaagcauugcuc

SEQ ID NO: 96944 - RNA, 20 nt, Human
cugagcccuaaaccacauaa

SEQ ID NO: 96945 - RNA, 18 nt, Human
cugaguuugaucuucuug

SEQ ID NO: 96946 - RNA, 24 nt, Human
cugcaaccuccgccugccagguuc

SEQ ID NO: 96947 - RNA, 19 nt, Human
cugccugaccacuucugga

SEQ ID NO: 96948 - RNA, 19 nt, Human
cuucucagucaagucacua

SEQ ID NO: 96949 - RNA, 18 nt, Human
gaacauuaacacugaagu

SEQ ID NO: 96950 - RNA, 21 nt, Human
gaaccuucuugggacucaucc

SEQ ID NO: 96951 - RNA, 20 nt, Human
gaagagacauuuguaaccau

SEQ ID NO: 96952 - RNA, 18 nt, Human
gaccaggcugguccugac

SEQ ID NO: 96953 - RNA, 22 nt, Human
gacgaugggcuaggguuccagc

SEQ ID NO: 96954 - RNA, 25 nt, Human
gagguggccggcuggagauggcggu

SEQ ID NO: 96955 - RNA, 18 nt, Human
gauuacaagcaugagcca

SEQ ID NO: 96956 - RNA, 19 nt, Human
gauuacaagcaugagccac

SEQ ID NO: 96957 - RNA, 22 nt, Human
gauuacaagcaugagccacugc

SEQ ID NO: 96958 - RNA, 18 nt, Human
gauuacaggugccugcca

SEQ ID NO: 96959 - RNA, 21 nt, Human
gauucucaugccucagccucc

SEQ ID NO: 96960 - RNA, 22 nt, Human
gcaaccuccgccugccagguuc

SEQ ID NO: 96961 - RNA, 18 nt, Human
gcagcugggauuacaggu

SEQ ID NO: 96962 - RNA, 20 nt, Human
gcagcugggauuacaggugc

SEQ ID NO: 96963 - RNA, 18 nt, Human
gccaggucccauaguacu

SEQ ID NO: 96964 - RNA, 23 nt, Human
gcgauucucaugccucagccucc

SEQ ID NO: 96965 - RNA, 18 nt, Human
gcugccagccggcuggcu

SEQ ID NO: 96966 - RNA, 21 nt, Human
gcugggauuacaagcaugagc

SEQ ID NO: 96967 - RNA, 21 nt, Human
ggaagcccacuuaaaaaucaa

SEQ ID NO: 96968 - RNA, 18 nt, Human
ggagacaguguuuuaaug

SEQ ID NO: 96969 - RNA, 22 nt, Human
ggauuacaagcaugagccacug

SEQ ID NO: 96970 - RNA, 21 nt, Human
ggcugccagccggcuggcuuc

SEQ ID NO: 96971 - RNA, 19 nt, Human
gggaacugaaagacgcacc

SEQ ID NO: 96972 - RNA, 24 nt, Human
gggaaucccucauuugaccaaauc

SEQ ID NO: 96973 - RNA, 22 nt, Human
ggugagcucacaaucaaaaauu

SEQ ID NO: 96974 - RNA, 24 nt, Human
gugaucugcccaccucggccuccc

SEQ ID NO: 96975 - RNA, 20 nt, Human
guuuaccugauauugcuuug

SEQ ID NO: 96976 - RNA, 19 nt, Human
uaaaccacauaaagucccu

SEQ ID NO: 96977 - RNA, 24 nt, Human
uaaagagaccaacugugcaacccu

SEQ ID NO: 96978 - RNA, 24 nt, Human
uaaaggagcucucaccagggcacc

SEQ ID NO: 96979 - RNA, 24 nt, Human
uaaauuuuguauuuuuaguacaga

SEQ ID NO: 96980 - RNA, 25 nt, Human
uaagaaacaucucaagugugauuca

SEQ ID NO: 96981 - RNA, 18 nt, Human
uacccagucccuuaagaa

SEQ ID NO: 96982 - RNA, 25 nt, Human
uaccccguuuaacccacuaaccagu

SEQ ID NO: 96983 - RNA, 20 nt, Human
uacucuaacuuaccccguuu

SEQ ID NO: 96984 - RNA, 19 nt, Human
uacucuaaugaaugcuaac

SEQ ID NO: 96985 - RNA, 22 nt, Human
uagggcacaugaucaaggcacu

SEQ ID NO: 96986 - RNA, 26 nt, Human
uaguacagacggaguuucaccaucuu

SEQ ID NO: 96987 - RNA, 21 nt, Human
uauacauaauuuaucuauaug

SEQ ID NO: 96988 - RNA, 18 nt, Human
ucaaaagacacauuccaa

SEQ ID NO: 96989 - RNA, 19 nt, Human
ucaaaagacacauuccaaa

SEQ ID NO: 96990 - RNA, 20 nt, Human
ucaaaagacacauuccaaaa

SEQ ID NO: 96991 - RNA, 18 nt, Human
ucaacaccugaauuaacu

SEQ ID NO: 96992 - RNA, 18 nt, Human
ucaccagggcaccuucug

SEQ ID NO: 96993 - RNA, 18 nt, Human
ucacugcaaccuccgccu

SEQ ID NO: 96994 - RNA, 19 nt, Human
ucacugcaaccuccgccug

SEQ ID NO: 96995 - RNA, 20 nt, Human
ucacugcaaccuccgccugc

SEQ ID NO: 96996 - RNA, 24 nt, Human
ucacugcaaccuccgccugccagg

SEQ ID NO: 96997 - RNA, 27 nt, Human
ucacugcaaccuccgccugccagguuc

SEQ ID NO: 96998 - RNA, 23 nt, Human
ucagggauaggcagagucaaaga

SEQ ID NO: 96999 - RNA, 18 nt, Human
uccaaagaaccuucuugg

SEQ ID NO: 97000 - RNA, 20 nt, Human
uccacggccaccaccaccgc

SEQ ID NO: 97001 - RNA, 18 nt, Human
ucccaaagugcugggauu

SEQ ID NO: 97002 - RNA, 24 nt, Human
ucccaaagugcugggauuacaagc

SEQ ID NO: 97003 - RNA, 22 nt, Human
ucccccuacucuaacuuacccc

SEQ ID NO: 97004 - RNA, 21 nt, Human
ucccuuccuucucacauuaaa

SEQ ID NO: 97005 - RNA, 22 nt, Human
uccucauauuauagcaccucau

SEQ ID NO: 97006 - RNA, 24 nt, Human
uccugggcagcugggauuacaggu

SEQ ID NO: 97007 - RNA, 18 nt, Human
ucgcccaggcuggagagc

SEQ ID NO: 97008 - RNA, 18 nt, Human
ucggccucccaaagugcu

SEQ ID NO: 97009 - RNA, 21 nt, Human
ucuaaacuaaaggaaaacagc

SEQ ID NO: 97010 - RNA, 23 nt, Human
ucucacucugucgcccaggcugg

SEQ ID NO: 97011 - RNA, 24 nt, Human
ucucacucugucgcccaggcugga

SEQ ID NO: 97012 - RNA, 24 nt, Human
ucucacucugucgcccaggcugga

SEQ ID NO: 97013 - RNA, 23 nt, Human
ucugaaacuaugaaagcauugcu

SEQ ID NO: 97014 - RNA, 18 nt, Human
ucugucgcccaggcugga

SEQ ID NO: 97015 - RNA, 21 nt, Human
ucuuaggcuauugcccaguuu

SEQ ID NO: 97016 - RNA, 22 nt, Human
ucuucaaaagacacauuccaaa

SEQ ID NO: 97017 - RNA, 24 nt, Human
ucuuuaaauuggcaugcuuaaccc

SEQ ID NO: 97018 - RNA, 23 nt, Human
ugaacauuaacacugaagucuca

SEQ ID NO: 97019 - RNA, 23 nt, Human
ugaagaacucugugugcccaaga

SEQ ID NO: 97020 - RNA, 24 nt, Human
ugaauggaccuccaagguacagga

SEQ ID NO: 97021 - RNA, 21 nt, Human
ugacauaaagugaccuuauuu

SEQ ID NO: 97022 - RNA, 22 nt, Human
ugaccaaaucccucauuugguc

SEQ ID NO: 97023 - RNA, 19 nt, Human
ugacugagaugugcaggug

SEQ ID NO: 97024 - RNA, 23 nt, Human
ugagaaagggaagaggcucccag

SEQ ID NO: 97025 - RNA, 22 nt, Human
ugagauggagucucacucuguc

SEQ ID NO: 97026 - RNA, 19 nt, Human
ugagcagaugggggcugcc

SEQ ID NO: 97027 - RNA, 21 nt, Human
ugagcagaugggggcugccag

SEQ ID NO: 97028 - RNA, 22 nt, Human
ugagcagaugggggcugccagc

SEQ ID NO: 97029 - RNA, 19 nt, Human
ugagccacugcgccagguc

SEQ ID NO: 97030 - RNA, 18 nt, Human
ugaggaaagcaacuuggu

SEQ ID NO: 97031 - RNA, 18 nt, Human
ugaucucaagugaucugc

SEQ ID NO: 97032 - RNA, 24 nt, Human
ugaucugcccaccucggccuccca

SEQ ID NO: 97033 - RNA, 26 nt, Human
ugcaacccugaaacauaugaaacagg

SEQ ID NO: 97034 - RNA, 21 nt, Human
ugccaaggccugagagucucc

SEQ ID NO: 97035 - RNA, 21 nt, Human
ugccaaggccugagagucucc

SEQ ID NO: 97036 - RNA, 24 nt, Human
ugccagguucaagcgauucucaug

SEQ ID NO: 97037 - RNA, 19 nt, Human
ugcccaagaagcugggcaa

SEQ ID NO: 97038 - RNA, 21 nt, Human
ugccucagccuccugggcagc

SEQ ID NO: 97039 - RNA, 24 nt, Human
ugccucagccuccugggcagcugg

SEQ ID NO: 97040 - RNA, 18 nt, Human
ugccucuaaaaccuaagc

SEQ ID NO: 97041 - RNA, 24 nt, Human
ugcugggauuacaagcaugagcca

SEQ ID NO: 97042 - RNA, 21 nt, Human
uggaagcccacuuaaaaauca

SEQ ID NO: 97043 - RNA, 22 nt, Human
uggaccuccaagguacaggagc

SEQ ID NO: 97044 - RNA, 24 nt, Human
uggagucucacucugucgcccagg

SEQ ID NO: 97045 - RNA, 19 nt, Human
uggauugaagaacucugug

SEQ ID NO: 97046 - RNA, 23 nt, Human
uggcauugguggcccaacagggg

SEQ ID NO: 97047 - RNA, 22 nt, Human
ugggauuacaagcaugagccac

SEQ ID NO: 97048 - RNA, 22 nt, Human
ugggauuacaagcaugagccac

SEQ ID NO: 97049 - RNA, 24 nt, Human
ugggauuacaagcaugagccacug

SEQ ID NO: 97050 - RNA, 26 nt, Human
ugggauuacaagcaugagccacugcg

SEQ ID NO: 97051 - RNA, 30 nt, Human
ugggauuacaagcaugagccacugcgccaa

SEQ ID NO: 97052 - RNA, 21 nt, Human
ugggauuacaggugccugcca

SEQ ID NO: 97053 - RNA, 22 nt, Human
ugggauuacaggugccugccac

SEQ ID NO: 97054 - RNA, 24 nt, Human
ugggauuacaggugccugccacca

SEQ ID NO: 97055 - RNA, 24 nt, Human
uggucaaaaugacuaaauaugauc

SEQ ID NO: 97056 - RNA, 21 nt, Human
uguauuuuuaguacagacgga

SEQ ID NO: 97057 - RNA, 21 nt, Human
ugucuuccuaucccucccccu

SEQ ID NO: 97058 - RNA, 21 nt, Human
uguuuucuacccuaacuucuc

SEQ ID NO: 97059 - RNA, 19 nt, Human
uuaacccaaauaggugagc

SEQ ID NO: 97060 - RNA, 25 nt, Human
uuaaugguuuuuaaauaugucuucc

SEQ ID NO: 97061 - RNA, 24 nt, Human
uuaguacagacggaguuucaccau

SEQ ID NO: 97062 - RNA, 23 nt, Human
uucaacuacuaacgagacuugaa

SEQ ID NO: 97063 - RNA, 18 nt, Human
uucaagaaacaggaaaau

SEQ ID NO: 97064 - RNA, 19 nt, Human
uucaagaaacaggaaaaug

SEQ ID NO: 97065 - RNA, 23 nt, Human
uucaagcgauucucaugccucag

SEQ ID NO: 97066 - RNA, 23 nt, Human
uucacaguauucucacuucuccu

SEQ ID NO: 97067 - RNA, 20 nt, Human
uuccuaucccucccccuacu

SEQ ID NO: 97068 - RNA, 27 nt, Human
uuccuaucccucccccuacucuaacuu

SEQ ID NO: 97069 - RNA, 23 nt, Human
uuguauuuuuaguacagacggag

SEQ ID NO: 97070 - RNA, 21 nt, Human
uuuauaguugaagaaccauca

SEQ ID NO: 97071 - RNA, 22 nt, Human
uuuguaaccauuaucuccauuu

SEQ ID NO: 97072 - RNA, 24 nt, Human
uuuuuaguacagacggaguuucac

SEQ ID NO: 97073 - RNA, 21 nt, Human
aaaagcuuuggguuuuguuuu

SEQ ID NO: 97074 - RNA, 22 nt, Human
aaaauauaaacagcauugcaga

SEQ ID NO: 97075 - RNA, 22 nt, Human
aaacaaaaaauaacacugaaau

SEQ ID NO: 97076 - RNA, 24 nt, Human
aaacaggcacaacaguguaaccuu

SEQ ID NO: 97077 - RNA, 22 nt, Human
aaacaugaagaacuaagugaca

SEQ ID NO: 97078 - RNA, 20 nt, Human
aaaggcauucaacuguucau

SEQ ID NO: 97079 - RNA, 26 nt, Human
aaaugaccaacaaaaacuuuaagaac

SEQ ID NO: 97080 - RNA, 19 nt, Human
aacuaaguuccuuuuauga

SEQ ID NO: 97081 - RNA, 19 nt, Human
aagcaaaaacuuuaaauac

SEQ ID NO: 97082 - RNA, 24 nt, Human
aauaaggccucuuuuucuucauau

SEQ ID NO: 97083 - RNA, 21 nt, Human
aaucugcuggaaacuucccuc

SEQ ID NO: 97084 - RNA, 23 nt, Human
acacacacacacacacacacaca

SEQ ID NO: 97085 - RNA, 23 nt, Human
acacacacacacacacacacaca

SEQ ID NO: 97086 - RNA, 23 nt, Human
acacacacacacacacacacaca

SEQ ID NO: 97087 - RNA, 23 nt, Human
acacacacacacacacacacaca

SEQ ID NO: 97088 - RNA, 23 nt, Human
acacacacacacacacacacaca

SEQ ID NO: 97089 - RNA, 28 nt, Human
acacacacacacacacacacacagaguu

SEQ ID NO: 97090 - RNA, 26 nt, Human
acacacacacacacacacagaguuua

SEQ ID NO: 97091 - RNA, 25 nt, Human
accuacagacagaacauuuuaaagg

SEQ ID NO: 97092 - RNA, 21 nt, Human
agaagcuuaguggucacaaac

SEQ ID NO: 97093 - RNA, 19 nt, Human
agacaaacaggcacaacag

SEQ ID NO: 97094 - RNA, 25 nt, Human
agacaaacaggcacaacaguguaac

SEQ ID NO: 97095 - RNA, 20 nt, Human
agccugaaaucugcuggaaa

SEQ ID NO: 97096 - RNA, 20 nt, Human
aguaaggagcauaaaaaaga

SEQ ID NO: 97097 - RNA, 20 nt, Human
agugaccucauuagaagagc

SEQ ID NO: 97098 - RNA, 20 nt, Human
auacaguucauauuucccca

SEQ ID NO: 97099 - RNA, 21 nt, Human
augaacaccagguccacacca

SEQ ID NO: 97100 - RNA, 19 nt, Human
auugcuacagcaaaacaag

SEQ ID NO: 97101 - RNA, 21 nt, Human
auuugacuagucauuuaaacc

SEQ ID NO: 97102 - RNA, 18 nt, Human
caacagaaaguaauugcu

SEQ ID NO: 97103 - RNA, 18 nt, Human
caagauaaugagaaauau

SEQ ID NO: 97104 - RNA, 25 nt, Human
caaguuuaaaugcaagcauaaaaug

SEQ ID NO: 97105 - RNA, 24 nt, Human
caauaaaaaaacuacugagcacau

SEQ ID NO: 97106 - RNA, 23 nt, Human
cacaaacaaaaaauaacacugaa

SEQ ID NO: 97107 - RNA, 20 nt, Human
cacacacacacacacacaca

SEQ ID NO: 97108 - RNA, 20 nt, Human
cacacacacacacacacaca

SEQ ID NO: 97109 - RNA, 20 nt, Human
cacacacacacacacacaca

SEQ ID NO: 97110 - RNA, 20 nt, Human
cacacacacacacacacaca

SEQ ID NO: 97111 - RNA, 20 nt, Human
cacacacacacacacacaca

SEQ ID NO: 97112 - RNA, 20 nt, Human
cacacacacacacacacaca

SEQ ID NO: 97113 - RNA, 20 nt, Human
cacacacacacacacacaca

SEQ ID NO: 97114 - RNA, 20 nt, Human
cacacacacacacacacaca

SEQ ID NO: 97115 - RNA, 20 nt, Human
cacacacacacacacacaca

SEQ ID NO: 97116 - RNA, 20 nt, Human
cacacacacacacacacaca

SEQ ID NO: 97117 - RNA, 22 nt, Human
cacacacacacacacacacaca

SEQ ID NO: 97118 - RNA, 22 nt, Human
cacacacacacacacacacaca

SEQ ID NO: 97119 - RNA, 22 nt, Human
cacacacacacacacacacaca

SEQ ID NO: 97120 - RNA, 22 nt, Human
cacacacacacacacacacaca

SEQ ID NO: 97121 - RNA, 26 nt, Human
cacacacacacacacacacacacaca

SEQ ID NO: 97122 - RNA, 26 nt, Human
cacacacacacacacacacacacaca

SEQ ID NO: 97123 - RNA, 26 nt, Human
cacacacacacacacacacacacaca

SEQ ID NO: 97124 - RNA, 26 nt, Human
cacacacacacacacacacacacaca

SEQ ID NO: 97125 - RNA, 26 nt, Human
cacacacacacacacacacacacaca

SEQ ID NO: 97126 - RNA, 28 nt, Human
cacacacacacacagaguuuauaucccu

SEQ ID NO: 97127 - RNA, 19 nt, Human
cacaguuaagaaauaaggc

SEQ ID NO: 97128 - RNA, 25 nt, Human
cacguagaaaaaaaaauucaugauu

SEQ ID NO: 97129 - RNA, 18 nt, Human
cagaagcuuaguggucac

SEQ ID NO: 97130 - RNA, 18 nt, Human
cagcauugcagacaaaca

SEQ ID NO: 97131 - RNA, 21 nt, Human
cagccugaaaucugcuggaaa

SEQ ID NO: 97132 - RNA, 24 nt, Human
cauucacuaauaauuuggcaauga

SEQ ID NO: 97133 - RNA, 25 nt, Human
cauugcacuuggucauuuuauugcc

SEQ ID NO: 97134 - RNA, 19 nt, Human
cggggagaagccgacgucc

SEQ ID NO: 97135 - RNA, 24 nt, Human
cuacuuuucuauagauauuacacu

SEQ ID NO: 97136 - RNA, 23 nt, Human
cucaaagaauaccugaacuauac

SEQ ID NO: 97137 - RNA, 19 nt, Human
cucacacguagaaaaaaaa

SEQ ID NO: 97138 - RNA, 21 nt, Human
cucacacguagaaaaaaaaau

SEQ ID NO: 97139 - RNA, 18 nt, Human
cucauucugcucauacau

SEQ ID NO: 97140 - RNA, 19 nt, Human
cugaacuauacauucacua

SEQ ID NO: 97141 - RNA, 23 nt, Human
cugaaguuugaaaagcuuugggu

SEQ ID NO: 97142 - RNA, 26 nt, Human
cugaaucccuggaacauuaugaacac

SEQ ID NO: 97143 - RNA, 19 nt, Human
cuggaacauuaugaacacc

SEQ ID NO: 97144 - RNA, 19 nt, Human
cuguucucucuuuacaucu

SEQ ID NO: 97145 - RNA, 18 nt, Human
gaaacuucccucauccca

SEQ ID NO: 97146 - RNA, 24 nt, Human
gaagguaacagcuuuguauuaaga

SEQ ID NO: 97147 - RNA, 23 nt, Human
gaauaaaggaaucauuuuuccca

SEQ ID NO: 97148 - RNA, 18 nt, Human
gauguaccuacagacaga

SEQ ID NO: 97149 - RNA, 24 nt, Human
gcaaaacaaaauauauauauaaau

SEQ ID NO: 97150 - RNA, 32 nt, Human
gcaaaacaaaauauauauauaaauucacccuu

SEQ ID NO: 97151 - RNA, 21 nt, Human
gccuguucucucuuuacaucu

SEQ ID NO: 97152 - RNA, 22 nt, Human
guaaaaauauauauauauauau

SEQ ID NO: 97153 - RNA, 25 nt, Human
uaaaauaagcagaaaaguacagcaa

SEQ ID NO: 97154 - RNA, 19 nt, Human
uaaagcauaaaacaauuuu

SEQ ID NO: 97155 - RNA, 25 nt, Human
uaaagcauaaaacaauuuuuggcaa

SEQ ID NO: 97156 - RNA, 21 nt, Human
uaaguaacuuuugaagaaaca

SEQ ID NO: 97157 - RNA, 20 nt, Human
uaaguuccuuuuaugacucc

SEQ ID NO: 97158 - RNA, 20 nt, Human
uacacacacacacacacaca

SEQ ID NO: 97159 - RNA, 25 nt, Human
uacacacacacacacacacacacac

SEQ ID NO: 97160 - RNA, 21 nt, Human
uacaucuucagacuuaaauuc

SEQ ID NO: 97161 - RNA, 25 nt, Human
uacugugugucucaaagaauaccug

SEQ ID NO: 97162 - RNA, 25 nt, Human
uauacacacacacacacacacacac

SEQ ID NO: 97163 - RNA, 24 nt, Human
uauauacacacacacacacacaca

SEQ ID NO: 97164 - RNA, 25 nt, Human
uauauacacacacacacacacacag

SEQ ID NO: 97165 - RNA, 21 nt, Human
uauaucaccauauuuauagua

SEQ ID NO: 97166 - RNA, 21 nt, Human
uauguuguuuacuggcauuuc

SEQ ID NO: 97167 - RNA, 18 nt, Human
uauugcuacagcaaaaca

SEQ ID NO: 97168 - RNA, 21 nt, Human
ucacaguaaggagcauaaaaa

SEQ ID NO: 97169 - RNA, 23 nt, Human
ucacccaaaauauaaacagcauu

SEQ ID NO: 97170 - RNA, 18 nt, Human
ucaguaguauuuucaagc

SEQ ID NO: 97171 - RNA, 23 nt, Human
ucccagcacaguuaagaaauaag

SEQ ID NO: 97172 - RNA, 22 nt, Human
ucccgcggggagaagccgacgu

SEQ ID NO: 97173 - RNA, 25 nt, Human
uccuuuuaugacuccuauagugcaa

SEQ ID NO: 97174 - RNA, 23 nt, Human
ucugcuggaaacuucccucaucc

SEQ ID NO: 97175 - RNA, 18 nt, Human
ucugugaucacaguaagg

SEQ ID NO: 97176 - RNA, 21 nt, Human
ucugugaucacaguaaggagc

SEQ ID NO: 97177 - RNA, 23 nt, Human
ugacaagauaaugagaaauauuu

SEQ ID NO: 97178 - RNA, 19 nt, Human
ugacauacuaacauucuuu

SEQ ID NO: 97179 - RNA, 20 nt, Human
uggguuuguuugguuuucuu

SEQ ID NO: 97180 - RNA, 23 nt, Human
uggucacaaacaaaaaauaacac

SEQ ID NO: 97181 - RNA, 19 nt, Human
ugucaaaauaggaaaccuc

SEQ ID NO: 97182 - RNA, 21 nt, Human
uguguuuuuagauguaccuac

SEQ ID NO: 97183 - RNA, 21 nt, Human
uguuuacauauuuuauaugug

SEQ ID NO: 97184 - RNA, 20 nt, Human
uuaagacagaagcuuagugg

SEQ ID NO: 97185 - RNA, 23 nt, Human
uuaguggucacaaacaaaaaaua

SEQ ID NO: 97186 - RNA, 19 nt, Human
uuauaugugcuguaguuuc

SEQ ID NO: 97187 - RNA, 19 nt, Human
uuaucaaggacagaaaggu

SEQ ID NO: 97188 - RNA, 21 nt, Human
uucacaauuuuuaaguaacaa

SEQ ID NO: 97189 - RNA, 25 nt, Human
uucagacuuaaauucuguagaaggu

SEQ ID NO: 97190 - RNA, 25 nt, Human
uucauauuuccccaaauguuuaaca

SEQ ID NO: 97191 - RNA, 19 nt, Human
uuccaugcuguucaacuuu

SEQ ID NO: 97192 - RNA, 23 nt, Human
uucccccaaaccccuaauguaag

SEQ ID NO: 97193 - RNA, 23 nt, Human
uugcagacaaacaggcacaacag

SEQ ID NO: 97194 - RNA, 20 nt, Human
uuggucauuaaaagaaagua

SEQ ID NO: 97195 - RNA, 18 nt, Human
uuuaacaaggagaaaaua

SEQ ID NO: 97196 - RNA, 19 nt, Human
uuuauaguauagaucucuu

SEQ ID NO: 97197 - RNA, 24 nt, Human
uuuaucaaggacagaaagguaaga

SEQ ID NO: 97198 - RNA, 21 nt, Human
uuucuaggauuacaauauuuu

SEQ ID NO: 97199 - RNA, 19 nt, Human
uuuggcaaugaagauucca

SEQ ID NO: 97200 - RNA, 18 nt, Human
accuguagaggaugugga

SEQ ID NO: 97201 - RNA, 20 nt, Human
agaagaaaauggagacaugg

SEQ ID NO: 97202 - RNA, 22 nt, Human
agacauggaagguuaaggagcu

SEQ ID NO: 97203 - RNA, 24 nt, Human
caaaugaaagagcacagauuugau

SEQ ID NO: 97204 - RNA, 22 nt, Human
cacagcaucccuaugagauagg

SEQ ID NO: 97205 - RNA, 23 nt, Human
cagccuuugguccccgaccugua

SEQ ID NO: 97206 - RNA, 23 nt, Human
cgaccuguagaggauguggaucu

SEQ ID NO: 97207 - RNA, 21 nt, Human
cuuugguccccgaccuguaga

SEQ ID NO: 97208 - RNA, 21 nt, Human
gaagaaaauggagacauggaa

SEQ ID NO: 97209 - RNA, 20 nt, Human
uaccuuuauuuaaugcucac

SEQ ID NO: 97210 - RNA, 21 nt, Human
uagcaggaaacucacauaaug

SEQ ID NO: 97211 - RNA, 26 nt, Human
ugaaagagcacagauuugauuccacg

SEQ ID NO: 97212 - RNA, 21 nt, Human
aaacaggaagugggggcaggg

SEQ ID NO: 97213 - RNA, 22 nt, Human
aaacaggaagugggggcagggg

SEQ ID NO: 97214 - RNA, 22 nt, Human
aaagaaaauacagggaagaaac

SEQ ID NO: 97215 - RNA, 19 nt, Human
aagggaggagcuggugacc

SEQ ID NO: 97216 - RNA, 22 nt, Human
acugaggcaacagcucaaccca

SEQ ID NO: 97217 - RNA, 21 nt, Human
agaaagaaaauacagggaaga

SEQ ID NO: 97218 - RNA, 26 nt, Human
agaaagaaaauacagggaagaaacgg

SEQ ID NO: 97219 - RNA, 27 nt, Human
agaaagaaaauacagggaagaaacggu

SEQ ID NO: 97220 - RNA, 24 nt, Human
agagacagaaaagcaucuguuggg

SEQ ID NO: 97221 - RNA, 23 nt, Human
agaggaggggguaggggaagggg

SEQ ID NO: 97222 - RNA, 21 nt, Human
agaggcucagcuccaagaccu

SEQ ID NO: 97223 - RNA, 18 nt, Human
agcaaggaaggggcucag

SEQ ID NO: 97224 - RNA, 23 nt, Human
agcauggggguagcacgugguca

SEQ ID NO: 97225 - RNA, 18 nt, Human
agcccuggccuccaccgu

SEQ ID NO: 97226 - RNA, 18 nt, Human
aggaggggguaggggaag

SEQ ID NO: 97227 - RNA, 19 nt, Human
aggagucggcaggagggag

SEQ ID NO: 97228 - RNA, 19 nt, Human
aggcagcuggugauaaggg

SEQ ID NO: 97229 - RNA, 18 nt, Human
agggccccaagaacagcc

SEQ ID NO: 97230 - RNA, 20 nt, Human
aggggcucagggugagggag

SEQ ID NO: 97231 - RNA, 24 nt, Human
agggggcacauggagcucaguggg

SEQ ID NO: 97232 - RNA, 19 nt, Human
aggguuaggagcugaucug

SEQ ID NO: 97233 - RNA, 25 nt, Human
aggugugugcaguggggaaggguug

SEQ ID NO: 97234 - RNA, 24 nt, Human
caaccccucuggaaagaaaucaac

SEQ ID NO: 97235 - RNA, 19 nt, Human
cacugcccagccuugcccc

SEQ ID NO: 97236 - RNA, 20 nt, Human
cacuggaugggagagggccc

SEQ ID NO: 97237 - RNA, 20 nt, Human
cacuggccuuucccugagcc

SEQ ID NO: 97238 - RNA, 21 nt, Human
cagaagaggcagcuggugaua

SEQ ID NO: 97239 - RNA, 21 nt, Human
cagccaccacguguugucuug

SEQ ID NO: 97240 - RNA, 18 nt, Human
cagccagaaaacugugca

SEQ ID NO: 97241 - RNA, 20 nt, Human
caggacucugcaaaugguaa

SEQ ID NO: 97242 - RNA, 19 nt, Human
caggaucccuguucaaccc

SEQ ID NO: 97243 - RNA, 24 nt, Human
caggggugggagaagggggagggg

SEQ ID NO: 97244 - RNA, 25 nt, Human
caggggugggagaagggggaggggg

SEQ ID NO: 97245 - RNA, 19 nt, Human
cagggugagggaggcagag

SEQ ID NO: 97246 - RNA, 21 nt, Human
cagguccugagcuauagcccu

SEQ ID NO: 97247 - RNA, 18 nt, Human
ccaucaguuguuccuggg

SEQ ID NO: 97248 - RNA, 19 nt, Human
cccaagaacagccucugag

SEQ ID NO: 97249 - RNA, 19 nt, Human
cccaugguccugccuacuu

SEQ ID NO: 97250 - RNA, 18 nt, Human
ccugagcuauagcccugg

SEQ ID NO: 97251 - RNA, 22 nt, Human
ccugccuacuuugauccagagg

SEQ ID NO: 97252 - RNA, 18 nt, Human
ccugggucacccacagaa

SEQ ID NO: 97253 - RNA, 21 nt, Human
ccugugugagugcugcaaggc

SEQ ID NO: 97254 - RNA, 24 nt, Human
cggagggagggugcagcugcaugu

SEQ ID NO: 97255 - RNA, 20 nt, Human
cucaaaguagagaaagaaaa

SEQ ID NO: 97256 - RNA, 23 nt, Human
cucaaaguagagaaagaaaauac

SEQ ID NO: 97257 - RNA, 21 nt, Human
cugaucugggcuaugaccaua

SEQ ID NO: 97258 - RNA, 24 nt, Human
cugcaaggccaucaguuguuccug

SEQ ID NO: 97259 - RNA, 27 nt, Human
gaaaauacagggaagaaaccgguaccc

SEQ ID NO: 97260 - RNA, 22 nt, Human
gaccuuggcuuucccccgucac

SEQ ID NO: 97261 - RNA, 22 nt, Human
gagaaagaaaauacagggaaga

SEQ ID NO: 97262 - RNA, 25 nt, Human
gagaaagaaaauacagggaagaaac

SEQ ID NO: 97263 - RNA, 24 nt, Human
gagaacaagggaggagcuggugac

SEQ ID NO: 97264 - RNA, 19 nt, Human
gaggaggaagccauggaga

SEQ ID NO: 97265 - RNA, 22 nt, Human
gagggaggaggaagccauggag

SEQ ID NO: 97266 - RNA, 18 nt, Human
gagggggaggugggagga

SEQ ID NO: 97267 - RNA, 20 nt, Human
gauccagagggagaaaaaag

SEQ ID NO: 97268 - RNA, 20 nt, Human
gaugggagagggcccaaaca

SEQ ID NO: 97269 - RNA, 18 nt, Human
gcaggggugggagaaggg

SEQ ID NO: 97270 - RNA, 19 nt, Human
gcaguggggaaggguuggg

SEQ ID NO: 97271 - RNA, 22 nt, Human
gccccagagagacuagaacuga

SEQ ID NO: 97272 - RNA, 22 nt, Human
gcccuggccuccaccguuuucc

SEQ ID NO: 97273 - RNA, 23 nt, Human
gcccuggccuccaccguuuuccg

SEQ ID NO: 97274 - RNA, 19 nt, Human
gcgcggcuccuagagagac

SEQ ID NO: 97275 - RNA, 20 nt, Human
ggaagugggggcaggggugg

SEQ ID NO: 97276 - RNA, 18 nt, Human
ggcaggggugggagaagg

SEQ ID NO: 97277 - RNA, 22 nt, Human
gggcaggggugggagaaggggg

SEQ ID NO: 97278 - RNA, 21 nt, Human
ggggugggagaagggggaggg

SEQ ID NO: 97279 - RNA, 21 nt, Human
ggugagggaggcagagacaga

SEQ ID NO: 97280 - RNA, 21 nt, Human
ggugcagagcaaggaaggggc

SEQ ID NO: 97281 - RNA, 20 nt, Human
ggugggagaagggggagggg

SEQ ID NO: 97282 - RNA, 24 nt, Human
guagcacguggucagaugcagaga

SEQ ID NO: 97283 - RNA, 28 nt, Human
guauugcggcagagaggaggggguaggg

SEQ ID NO: 97284 - RNA, 24 nt, Human
gugggaggaaggaucggagggaga

SEQ ID NO: 97285 - RNA, 18 nt, Human
uagagaaagaaaauacag

SEQ ID NO: 97286 - RNA, 24 nt, Human
ucaaaguagagaaagaaaauacag

SEQ ID NO: 97287 - RNA, 24 nt, Human
uccagagggagaaaaaagagccca

SEQ ID NO: 97288 - RNA, 23 nt, Human
ucccagguccugagcuauagccc

SEQ ID NO: 97289 - RNA, 18 nt, Human
ucccaugguccugccuac

SEQ ID NO: 97290 - RNA, 21 nt, Human
uccucaagguguagggcccca

SEQ ID NO: 97291 - RNA, 23 nt, Human
uccugagcuauagcccuggccuc

SEQ ID NO: 97292 - RNA, 22 nt, Human
ucggcaggagggaggaggaagc

SEQ ID NO: 97293 - RNA, 18 nt, Human
ucuaggcuccagccagaa

SEQ ID NO: 97294 - RNA, 21 nt, Human
ucucggacacugcccagccuu

SEQ ID NO: 97295 - RNA, 22 nt, Human
ucucucggacacugcccagccu

SEQ ID NO: 97296 - RNA, 27 nt, Human
ucucuggaaauuucuauuuccaaccgu

SEQ ID NO: 97297 - RNA, 19 nt, Human
ugagccccucgguucacac

SEQ ID NO: 97298 - RNA, 22 nt, Human
ugagccucaggggaggucccag

SEQ ID NO: 97299 - RNA, 19 nt, Human
ugaggcaacagcucaaccc

SEQ ID NO: 97300 - RNA, 21 nt, Human
ugaggcaacagcucaacccag

SEQ ID NO: 97301 - RNA, 20 nt, Human
ugagugcugcaaggccauca

SEQ ID NO: 97302 - RNA, 18 nt, Human
ugcaaggccaucaguugu

SEQ ID NO: 97303 - RNA, 20 nt, Human
ugccccaccuagccgaguca

SEQ ID NO: 97304 - RNA, 26 nt, Human
uggaaagaaaucaacagcaaacaagg

SEQ ID NO: 97305 - RNA, 22 nt, Human
ugggagaagggggagggggagg

SEQ ID NO: 97306 - RNA, 19 nt, Human
ugggagagggcccaaacag

SEQ ID NO: 97307 - RNA, 21 nt, Human
ugggaggccuguucuaggcuc

SEQ ID NO: 97308 - RNA, 20 nt, Human
uggugauaaggguuaggagc

SEQ ID NO: 97309 - RNA, 24 nt, Human
uguugggggacugaggcaacagcu

SEQ ID NO: 97310 - RNA, 18 nt, Human
uuccugggagaaaauugu

SEQ ID NO: 97311 - RNA, 18 nt, Human
uugcugaauggccguuuc

SEQ ID NO: 97312 - RNA, 19 nt, Human
uugcugaauggccguuucu

SEQ ID NO: 97313 - RNA, 22 nt, Human
uuuccugagccccucgguucaa

SEQ ID NO: 97314 - RNA, 20 nt, Human
uuuuuuuuuuuuuuuuuugg

SEQ ID NO: 97315 - RNA, 24 nt, Human
uuuuuuuuuuuuuuuuuuguguuu

SEQ ID NO: 97316 - RNA, 21 nt, Human
acagugcuuuauugugcuauu

SEQ ID NO: 97317 - RNA, 24 nt, Human
ccuaauauguaacuucucuuugau

SEQ ID NO: 97318 - RNA, 21 nt, Human
cugguuccucaucucucuucc

SEQ ID NO: 97319 - RNA, 18 nt, Human
cuugcaaacuccuggaua

SEQ ID NO: 97320 - RNA, 24 nt, Human
uacaagcucugguuccucaucucu

SEQ ID NO: 97321 - RNA, 21 nt, Human
ucccagaauuaaagauauacu

SEQ ID NO: 97322 - RNA, 20 nt, Human
ucucuuugauaaagugaaaa

SEQ ID NO: 97323 - RNA, 22 nt, Human
ugaauuaguguuaagcaccugu

SEQ ID NO: 97324 - RNA, 21 nt, Human
uuugauaaagugaaaacaagu

SEQ ID NO: 97325 - RNA, 20 nt, Human
acacagaagaggugcugaca

SEQ ID NO: 97326 - RNA, 20 nt, Human
acagaagaggugcugacagu

SEQ ID NO: 97327 - RNA, 19 nt, Human
accacacagaagaggugcu

SEQ ID NO: 97328 - RNA, 21 nt, Human
acgcagccacgugggucccca

SEQ ID NO: 97329 - RNA, 19 nt, Human
agaggugacagcagcaggg

SEQ ID NO: 97330 - RNA, 19 nt, Human
aggccgacagauggggaca

SEQ ID NO: 97331 - RNA, 19 nt, Human
aggugcugacaguggggga

SEQ ID NO: 97332 - RNA, 19 nt, Human
cacacagaagaggugcuga

SEQ ID NO: 97333 - RNA, 19 nt, Human
cagcagcaggggcacgcag

SEQ ID NO: 97334 - RNA, 21 nt, Human
cggagggcuccaggcgaacug

SEQ ID NO: 97335 - RNA, 22 nt, Human
cucaccacacagaagaggugcu

SEQ ID NO: 97336 - RNA, 23 nt, Human
gacagcagcaggggcacgcagcc

SEQ ID NO: 97337 - RNA, 18 nt, Human
gaggugacagcagcaggg

SEQ ID NO: 97338 - RNA, 22 nt, Human
gcggagggcuccaggcgaacug

SEQ ID NO: 97339 - RNA, 22 nt, Human
ggggcggggcgggacuuugggg

SEQ ID NO: 97340 - RNA, 18 nt, Human
ugcccagcgcacgugacg

SEQ ID NO: 97341 - RNA, 20 nt, Human
ugggagaggugacagcagca

SEQ ID NO: 97342 - RNA, 24 nt, Human
uggggacaggaagcugucgggauc

SEQ ID NO: 97343 - RNA, 18 nt, Human
aaaaaggcuuccgucucu

SEQ ID NO: 97344 - RNA, 19 nt, Human
accacaaggagucaaggag

SEQ ID NO: 97345 - RNA, 20 nt, Human
agacuuuggggaaaaaggcu

SEQ ID NO: 97346 - RNA, 30 nt, Human
aggccggcaggaggcuaggcagcaagagaa

SEQ ID NO: 97347 - RNA, 19 nt, Human
augaugacauaaaccacaa

SEQ ID NO: 97348 - RNA, 20 nt, Human
caaggagcuaaaacaaccac

SEQ ID NO: 97349 - RNA, 22 nt, Human
caauuuucauucuaaucuuaua

SEQ ID NO: 97350 - RNA, 18 nt, Human
gacuuuggggaaaaaggc

SEQ ID NO: 97351 - RNA, 20 nt, Human
gaggccggcaggaggcuagg

SEQ ID NO: 97352 - RNA, 24 nt, Human
uagaucacaauaaagguaugcuga

SEQ ID NO: 97353 - RNA, 19 nt, Human
ucuucagcucugcaccagc

SEQ ID NO: 97354 - RNA, 20 nt, Human
uggaggacccuccaaaaucu

SEQ ID NO: 97355 - RNA, 19 nt, Human
uuggggaaaaaggcuuccg

SEQ ID NO: 97356 - RNA, 23 nt, Human
uuguggaggacccuccaaaaucu

SEQ ID NO: 97357 - RNA, 20 nt, Human
aaauaaauauccuggcaaga

SEQ ID NO: 97358 - RNA, 21 nt, Human
agaaggcagggaggagggagc

SEQ ID NO: 97359 - RNA, 23 nt, Human
agaaggcagggaggagggagcgg

SEQ ID NO: 97360 - RNA, 18 nt, Human
agagaaggcagggaggag

SEQ ID NO: 97361 - RNA, 24 nt, Human
agagcacauauacggagaugccaa

SEQ ID NO: 97362 - RNA, 18 nt, Human
agauggcggaggccagca

SEQ ID NO: 97363 - RNA, 23 nt, Human
aggaaacagggagucgcaggggg

SEQ ID NO: 97364 - RNA, 22 nt, Human
aggagcacagggcuggcucagg

SEQ ID NO: 97365 - RNA, 22 nt, Human
aggcagggaggagggagcgggg

SEQ ID NO: 97366 - RNA, 23 nt, Human
aggcagggaggagggagcggggg

SEQ ID NO: 97367 - RNA, 20 nt, Human
agggaguaggggauuagggg

SEQ ID NO: 97368 - RNA, 18 nt, Human
caaaaggggacggcgaua

SEQ ID NO: 97369 - RNA, 18 nt, Human
caacauuuacccagucca

SEQ ID NO: 97370 - RNA, 22 nt, Human
caugcaagaaaaggagggaacu

SEQ ID NO: 97371 - RNA, 25 nt, Human
ccagagcacauauacggagaugcca

SEQ ID NO: 97372 - RNA, 19 nt, Human
cggagaaguuacauccaaa

SEQ ID NO: 97373 - RNA, 26 nt, Human
cggcgauagaaaaguagauggaauac

SEQ ID NO: 97374 - RNA, 23 nt, Human
cgggaggcaguguucuccagagg

SEQ ID NO: 97375 - RNA, 20 nt, Human
gaccugggccagcgggaggc

SEQ ID NO: 97376 - RNA, 28 nt, Human
gaggaacgauucucucucguggggucca

SEQ ID NO: 97377 - RNA, 18 nt, Human
gagugaauagcacaaaua

SEQ ID NO: 97378 - RNA, 22 nt, Human
ggacuggagaggagaccugggc

SEQ ID NO: 97379 - RNA, 24 nt, Human
ggacuggagaggagaccugggcca

SEQ ID NO: 97380 - RNA, 21 nt, Human
ggacuggguaccagcagagaa

SEQ ID NO: 97381 - RNA, 18 nt, Human
ggagaggagaccugggcc

SEQ ID NO: 97382 - RNA, 19 nt, Human
ggagcacagggcuggcuca

SEQ ID NO: 97383 - RNA, 18 nt, Human
ggagcgggggaucaggcu

SEQ ID NO: 97384 - RNA, 22 nt, Human
ggagggaggagcacagggcugg

SEQ ID NO: 97385 - RNA, 23 nt, Human
ggaguguugggggagggaggagc

SEQ ID NO: 97386 - RNA, 24 nt, Human
ggccaggaucugugaacggggcag

SEQ ID NO: 97387 - RNA, 22 nt, Human
gggaagggagugaauagcacaa

SEQ ID NO: 97388 - RNA, 19 nt, Human
gggacuggagaggagaccu

SEQ ID NO: 97389 - RNA, 19 nt, Human
gggaggagggagcggggga

SEQ ID NO: 97390 - RNA, 27 nt, Human
gggaguaggggauuaggggacaggggu

SEQ ID NO: 97391 - RNA, 20 nt, Human
ggggagggaggagcacaggg

SEQ ID NO: 97392 - RNA, 19 nt, Human
gggggagggaggagcacag

SEQ ID NO: 97393 - RNA, 22 nt, Human
ggggguuggagggaguagggga

SEQ ID NO: 97394 - RNA, 19 nt, Human
gucgcagggggacuggaga

SEQ ID NO: 97395 - RNA, 20 nt, Human
guuuauuuuuuucucucuca

SEQ ID NO: 97396 - RNA, 20 nt, Human
uaaauauccuggcaagaggg

SEQ ID NO: 97397 - RNA, 19 nt, Human
uaagauggcggaggccagc

SEQ ID NO: 97398 - RNA, 21 nt, Human
uacagugggaggggggguugg

SEQ ID NO: 97399 - RNA, 19 nt, Human
uacaugcaagaaaaggagg

SEQ ID NO: 97400 - RNA, 18 nt, Human
uagggaguguugggggag

SEQ ID NO: 97401 - RNA, 19 nt, Human
uagggaguguugggggagg

SEQ ID NO: 97402 - RNA, 18 nt, Human
ucgugggguccaagacua

SEQ ID NO: 97403 - RNA, 22 nt, Human
ugcaagaaaaggagggaacuga

SEQ ID NO: 97404 - RNA, 22 nt, Human
ugggaggggggguuggagggag

SEQ ID NO: 97405 - RNA, 23 nt, Human
ugggaggggggguuggagggagu

SEQ ID NO: 97406 - RNA, 22 nt, Human
ugguagggaguguugggggagg

SEQ ID NO: 97407 - RNA, 24 nt, Human
uguugggggagggaggagcacagg

SEQ ID NO: 97408 - RNA, 20 nt, Human
uugguagggaguguuggggg

SEQ ID NO: 97409 - RNA, 19 nt, Human
aguauuuguuuuuauuuuu

SEQ ID NO: 97410 - RNA, 19 nt, Human
ccuugagucuagauuuagg

SEQ ID NO: 97411 - RNA, 21 nt, Human
gaaagucucucugcuaggagc

SEQ ID NO: 97412 - RNA, 21 nt, Human
gagaaacccccaaauuugcuc

SEQ ID NO: 97413 - RNA, 21 nt, Human
gucaucucugggaaccuugag

SEQ ID NO: 97414 - RNA, 18 nt, Human
uccggcaaaagcguggag

SEQ ID NO: 97415 - RNA, 19 nt, Human
ucucugggaaccuugaguc

SEQ ID NO: 97416 - RNA, 18 nt, Human
ucugcuaggagcuuucca

SEQ ID NO: 97417 - RNA, 21 nt, Human
ugagucuagauuuagggcuga

SEQ ID NO: 97418 - RNA, 22 nt, Human
uuugagaaacccccaaauuugc

SEQ ID NO: 97419 - RNA, 21 nt, Human
uuugcucugauggccuuucuu

SEQ ID NO: 97420 - RNA, 20 nt, Human
aaaaagcagagcagagagcg

SEQ ID NO: 97421 - RNA, 25 nt, Human
aaaaagcagagcagagagcguuuuc

SEQ ID NO: 97422 - RNA, 24 nt, Human
aaaacagacucaacaacucagcug

SEQ ID NO: 97423 - RNA, 19 nt, Human
aaaacaguagaaaaaaagc

SEQ ID NO: 97424 - RNA, 18 nt, Human
aaggcagggccguaagcc

SEQ ID NO: 97425 - RNA, 22 nt, Human
acaacagaagccaaauuuacag

SEQ ID NO: 97426 - RNA, 22 nt, Human
agaaaaaaagcagagcagagag

SEQ ID NO: 97427 - RNA, 18 nt, Human
agaaauucgcacuccccc

SEQ ID NO: 97428 - RNA, 23 nt, Human
aggagaaaaggagucucugcugg

SEQ ID NO: 97429 - RNA, 22 nt, Human
auccugugucucauaaucuggg

SEQ ID NO: 97430 - RNA, 22 nt, Human
aucugggcgucugcaggucugg

SEQ ID NO: 97431 - RNA, 23 nt, Human
caacagaagccaaauuuacagca

SEQ ID NO: 97432 - RNA, 18 nt, Human
caaggcagggccguaagc

SEQ ID NO: 97433 - RNA, 18 nt, Human
cacacuguuuuuuaugcc

SEQ ID NO: 97434 - RNA, 21 nt, Human
cacacuguuuuuuaugccacu

SEQ ID NO: 97435 - RNA, 19 nt, Human
caccggcaaaccagagggc

SEQ ID NO: 97436 - RNA, 19 nt, Human
cacucccuuaaagagugca

SEQ ID NO: 97437 - RNA, 18 nt, Human
cacuguguaaccacacug

SEQ ID NO: 97438 - RNA, 19 nt, Human
cacuguguaaccacacugu

SEQ ID NO: 97439 - RNA, 24 nt, Human
cagaagccaaauuuacagcaggag

SEQ ID NO: 97440 - RNA, 22 nt, Human
cagagcagagagcguuuuccau

SEQ ID NO: 97441 - RNA, 22 nt, Human
cagcaguacccuaguacauuga

SEQ ID NO: 97442 - RNA, 18 nt, Human
cagcucaucaaggucagu

SEQ ID NO: 97443 - RNA, 19 nt, Human
cagcucccugguugcaccu

SEQ ID NO: 97444 - RNA, 20 nt, Human
caggagacaggucuaccugc

SEQ ID NO: 97445 - RNA, 25 nt, Human
cauggccugugcccuguaaugacgc

SEQ ID NO: 97446 - RNA, 22 nt, Human
ccagggaggcacaacauggccc

SEQ ID NO: 97447 - RNA, 19 nt, Human
ccauguguugcgucuuccu

SEQ ID NO: 97448 - RNA, 21 nt, Human
ccgacaggccaagaaauucgc

SEQ ID NO: 97449 - RNA, 24 nt, Human
ccugcaccaccggcaaaccagagg

SEQ ID NO: 97450 - RNA, 25 nt, Human
cgcccaccuucccaugccccugcag

SEQ ID NO: 97451 - RNA, 20 nt, Human
cucgcaggcccuggcugacc

SEQ ID NO: 97452 - RNA, 22 nt, Human
cugaggcagcgguggccgggac

SEQ ID NO: 97453 - RNA, 21 nt, Human
cugcagcuaccuccccaggaa

SEQ ID NO: 97454 - RNA, 19 nt, Human
cugccccucugcccggccc

SEQ ID NO: 97455 - RNA, 19 nt, Human
cugcccggcccucucacca

SEQ ID NO: 97456 - RNA, 25 nt, Human
cuuccugcgaggccuucacaaagau

SEQ ID NO: 97457 - RNA, 21 nt, Human
gacaggucuaccugcaccacc

SEQ ID NO: 97458 - RNA, 19 nt, Human
gaggcagaggcugaggcag

SEQ ID NO: 97459 - RNA, 24 nt, Human
gcagcaguacccuaguacauugac

SEQ ID NO: 97460 - RNA, 18 nt, Human
gccacuguccgcugggca

SEQ ID NO: 97461 - RNA, 18 nt, Human
gcccuguaaugacgcagc

SEQ ID NO: 97462 - RNA, 18 nt, Human
gccuucacaaagaugauu

SEQ ID NO: 97463 - RNA, 21 nt, Human
gcuccuuuccaucugccccuc

SEQ ID NO: 97464 - RNA, 24 nt, Human
gcugcauuuucacugaagcauuua

SEQ ID NO: 97465 - RNA, 22 nt, Human
ggaggcagaggcugaggcagcg

SEQ ID NO: 97466 - RNA, 20 nt, Human
ggccuaggcuccuuuccauc

SEQ ID NO: 97467 - RNA, 21 nt, Human
gggaggcagaggcugaggcag

SEQ ID NO: 97468 - RNA, 21 nt, Human
guuguaaaugcuucauccugu

SEQ ID NO: 97469 - RNA, 21 nt, Human
uaaccaaagcauccuguacau

SEQ ID NO: 97470 - RNA, 18 nt, Human
uacccuaguacauugacg

SEQ ID NO: 97471 - RNA, 21 nt, Human
uaggagaaaaggagucucugc

SEQ ID NO: 97472 - RNA, 26 nt, Human
uaggcuccuuuccaucugccccuccu

SEQ ID NO: 97473 - RNA, 21 nt, Human
ucaacggccuccucuugcucc

SEQ ID NO: 97474 - RNA, 21 nt, Human
ucagaaagaggcugggaggca

SEQ ID NO: 97475 - RNA, 19 nt, Human
ucaguggcugagaagagug

SEQ ID NO: 97476 - RNA, 21 nt, Human
ucaguggcugagaagagugaa

SEQ ID NO: 97477 - RNA, 24 nt, Human
uccauggccugugcccuguaauga

SEQ ID NO: 97478 - RNA, 21 nt, Human
ucccagggagaacgaggaacc

SEQ ID NO: 97479 - RNA, 21 nt, Human
uccccugcccgcccaccuucc

SEQ ID NO: 97480 - RNA, 23 nt, Human
uccccugcccgcccaccuuccca

SEQ ID NO: 97481 - RNA, 23 nt, Human
ucccgcugcccucgcaggcccug

SEQ ID NO: 97482 - RNA, 19 nt, Human
ucccugguugcaccuggcc

SEQ ID NO: 97483 - RNA, 18 nt, Human
ucccuuaaagagugcagg

SEQ ID NO: 97484 - RNA, 18 nt, Human
ucugcagcuaccucccca

SEQ ID NO: 97485 - RNA, 22 nt, Human
ucugcagcuaccuccccaggaa

SEQ ID NO: 97486 - RNA, 23 nt, Human
ugaaaggaggugaaggugacaac

SEQ ID NO: 97487 - RNA, 24 nt, Human
ugaagugaaucaacggccuccucu

SEQ ID NO: 97488 - RNA, 24 nt, Human
ugacaacagaagccaaauuuacag

SEQ ID NO: 97489 - RNA, 20 nt, Human
ugacccuccccugcccgccc

SEQ ID NO: 97490 - RNA, 18 nt, Human
ugagaagagugaaccggg

SEQ ID NO: 97491 - RNA, 21 nt, Human
ugagaagagugaaccggguug

SEQ ID NO: 97492 - RNA, 24 nt, Human
ugagaggcagugcgcccgccuccc

SEQ ID NO: 97493 - RNA, 22 nt, Human
ugaggcagggaggcucccgcug

SEQ ID NO: 97494 - RNA, 20 nt, Human
ugcacagcucaucaagguca

SEQ ID NO: 97495 - RNA, 24 nt, Human
ugccccugcagcucccugguugca

SEQ ID NO: 97496 - RNA, 25 nt, Human
ugccccugcagcucccugguugcac

SEQ ID NO: 97497 - RNA, 24 nt, Human
uggcugagaagagugaaccggguu

SEQ ID NO: 97498 - RNA, 21 nt, Human
ugggaggcagaggcugagggg

SEQ ID NO: 97499 - RNA, 19 nt, Human
ugggcgucugcaggucugg

SEQ ID NO: 97500 - RNA, 21 nt, Human
uggugcggcacagaggccuga

SEQ ID NO: 97501 - RNA, 21 nt, Human
uucaauggugcggcacagagg

SEQ ID NO: 97502 - RNA, 21 nt, Human
uucacugaagcauuuauuaug

SEQ ID NO: 97503 - RNA, 22 nt, Human
uucacugaagcauuuauuaugc

SEQ ID NO: 97504 - RNA, 24 nt, Human
uuuacaaaacagacucaacaacuc

SEQ ID NO: 97505 - RNA, 20 nt, Human
aaaccucuggaucugcaucc

SEQ ID NO: 97506 - RNA, 19 nt, Human
aaaggaaauggcguggagg

SEQ ID NO: 97507 - RNA, 23 nt, Human
aagccggggccuaacccaggaga

SEQ ID NO: 97508 - RNA, 23 nt, Human
aaggaaaaggaaauggcguggag

SEQ ID NO: 97509 - RNA, 20 nt, Human
aagggaggguguggggcagg

SEQ ID NO: 97510 - RNA, 20 nt, Human
acggugugauuaagccucug

SEQ ID NO: 97511 - RNA, 18 nt, Human
acuggcuuggcuguguga

SEQ ID NO: 97512 - RNA, 21 nt, Human
agaaggaaauagggaaaagga

SEQ ID NO: 97513 - RNA, 24 nt, Human
agacaggaggagaaggaaauaggg

SEQ ID NO: 97514 - RNA, 18 nt, Human
aggagaaggaaauaggga

SEQ ID NO: 97515 - RNA, 22 nt, Human
aggaggcgaacaggaggccaga

SEQ ID NO: 97516 - RNA, 20 nt, Human
agggaggccuucaucccugc

SEQ ID NO: 97517 - RNA, 22 nt, Human
augaucaucuuaguucugucac

SEQ ID NO: 97518 - RNA, 24 nt, Human
augccagccagggcuggcccugaa

SEQ ID NO: 97519 - RNA, 21 nt, Human
auuuuuauuucagcucagggg

SEQ ID NO: 97520 - RNA, 21 nt, Human
caaaguaagcaaauggggagc

SEQ ID NO: 97521 - RNA, 23 nt, Human
caaaguaagcaaauggggagccc

SEQ ID NO: 97522 - RNA, 24 nt, Human
cacucugauuagaagagccaaagg

SEQ ID NO: 97523 - RNA, 18 nt, Human
cagacacccagccucacc

SEQ ID NO: 97524 - RNA, 23 nt, Human
cagcaauaggggggucuuccugg

SEQ ID NO: 97525 - RNA, 20 nt, Human
cagcagcaauaggggggucu

SEQ ID NO: 97526 - RNA, 19 nt, Human
cagcaguggaacuugggac

SEQ ID NO: 97527 - RNA, 18 nt, Human
cagcauggggcaggaggu

SEQ ID NO: 97528 - RNA, 23 nt, Human
cagggguggagagugggcacaaa

SEQ ID NO: 97529 - RNA, 21 nt, Human
cauccuugacuggcuuggcug

SEQ ID NO: 97530 - RNA, 24 nt, Human
ccagacacccagccucacccucca

SEQ ID NO: 97531 - RNA, 19 nt, Human
ccagccagggcuggcccug

SEQ ID NO: 97532 - RNA, 20 nt, Human
ccagccuuguaggauuuuuc

SEQ ID NO: 97533 - RNA, 23 nt, Human
ccaggagguucugcacaggguca

SEQ ID NO: 97534 - RNA, 23 nt, Human
ccaugcuccaugcuuccagacac

SEQ ID NO: 97535 - RNA, 22 nt, Human
cccaaaaguacacauugaguac

SEQ ID NO: 97536 - RNA, 19 nt, Human
cccacagaaauggcagggc

SEQ ID NO: 97537 - RNA, 20 nt, Human
cccagcaaagcucgcuucca

SEQ ID NO: 97538 - RNA, 24 nt, Human
cccagccucacccuccaugccagc

SEQ ID NO: 97539 - RNA, 23 nt, Human
cccaugcuccaugcuuccagaca

SEQ ID NO: 97540 - RNA, 21 nt, Human
cccgcugcuucucaaacaggc

SEQ ID NO: 97541 - RNA, 24 nt, Human
cccucucaggcuagcuacccccuc

SEQ ID NO: 97542 - RNA, 19 nt, Human
cccuguguccugaaugguc

SEQ ID NO: 97543 - RNA, 20 nt, Human
ccuccaugccagccagggcu

SEQ ID NO: 97544 - RNA, 22 nt, Human
ccugaacacuccccugggaucc

SEQ ID NO: 97545 - RNA, 22 nt, Human
ccuuggaggguucccucucagg

SEQ ID NO: 97546 - RNA, 18 nt, Human
cgugcaagcuccugcccu

SEQ ID NO: 97547 - RNA, 20 nt, Human
cuacccccucucccagcaaa

SEQ ID NO: 97548 - RNA, 21 nt, Human
cuagagagcaacacucaaccg

SEQ ID NO: 97549 - RNA, 19 nt, Human
cuccagcacuugcuagucc

SEQ ID NO: 97550 - RNA, 21 nt, Human
cuccugcccucugugguccca

SEQ ID NO: 97551 - RNA, 21 nt, Human
cucucugagcucugguucugg

SEQ ID NO: 97552 - RNA, 19 nt, Human
cucuggaucugcauccauc

SEQ ID NO: 97553 - RNA, 21 nt, Human
cugcauccauccuugacuggc

SEQ ID NO: 97554 - RNA, 19 nt, Human
cugggcuugcgucuuucuu

SEQ ID NO: 97555 - RNA, 22 nt, Human
cuugcccgcugcuucucaaaca

SEQ ID NO: 97556 - RNA, 19 nt, Human
cuugcgucuuucuugcccg

SEQ ID NO: 97557 - RNA, 20 nt, Human
cuuggaggguucccucucag

SEQ ID NO: 97558 - RNA, 24 nt, Human
gaaggaaaaggaaauggcguggag

SEQ ID NO: 97559 - RNA, 24 nt, Human
gagaaauaaugagagaagggccgg

SEQ ID NO: 97560 - RNA, 22 nt, Human
gagaaggaaauagggaaaagga

SEQ ID NO: 97561 - RNA, 20 nt, Human
gagagggucagagagaaaua

SEQ ID NO: 97562 - RNA, 18 nt, Human
gaggaggguaagggaggg

SEQ ID NO: 97563 - RNA, 22 nt, Human
gaggccguguacauggggcugu

SEQ ID NO: 97564 - RNA, 21 nt, Human
gagguucugcacagggucagu

SEQ ID NO: 97565 - RNA, 20 nt, Human
gcagggccucugggcuugcg

SEQ ID NO: 97566 - RNA, 24 nt, Human
gccagaaaccucuggaucugcauc

SEQ ID NO: 97567 - RNA, 20 nt, Human
gcucccagcuugcacucuga

SEQ ID NO: 97568 - RNA, 24 nt, Human
ggaaauagggaaaaggaguuggga

SEQ ID NO: 97569 - RNA, 19 nt, Human
gggccugagccaguaggga

SEQ ID NO: 97570 - RNA, 21 nt, Human
ggguaagggaggguguggggc

SEQ ID NO: 97571 - RNA, 22 nt, Human
ggugaggaaggguaggaagaga

SEQ ID NO: 97572 - RNA, 22 nt, Human
gucaggaugugagucuguggcc

SEQ ID NO: 97573 - RNA, 24 nt, Human
guccugaauggucuggaggagggu

SEQ ID NO: 97574 - RNA, 18 nt, Human
uaacccaggagaaacaau

SEQ ID NO: 97575 - RNA, 23 nt, Human
uaacccaggagaaacaauggcaa

SEQ ID NO: 97576 - RNA, 19 nt, Human
uaagcaaauggggagcccc

SEQ ID NO: 97577 - RNA, 22 nt, Human
uacauggggcuguguccagagg

SEQ ID NO: 97578 - RNA, 18 nt, Human
uagcuacccccucuccca

SEQ ID NO: 97579 - RNA, 20 nt, Human
uaggaagagaggggauccug

SEQ ID NO: 97580 - RNA, 23 nt, Human
uccaugccagccagggcuggccc

SEQ ID NO: 97581 - RNA, 21 nt, Human
ucccuguguccugaauggucu

SEQ ID NO: 97582 - RNA, 20 nt, Human
uccgcaggcaggaaacgcgg

SEQ ID NO: 97583 - RNA, 20 nt, Human
ucuggaggaggguaagggag

SEQ ID NO: 97584 - RNA, 21 nt, Human
ucuggaggaggguaagggagg

SEQ ID NO: 97585 - RNA, 25 nt, Human
ugaaggaaaaggaaauggcguggag

SEQ ID NO: 97586 - RNA, 21 nt, Human
ugagagaagggcuaggcuuga

SEQ ID NO: 97587 - RNA, 21 nt, Human
ugagagaagggcuaggcuuga

SEQ ID NO: 97588 - RNA, 22 nt, Human
ugagcaguggggagagggucag

SEQ ID NO: 97589 - RNA, 23 nt, Human
ugagcaguggggagagggucagg

SEQ ID NO: 97590 - RNA, 20 nt, Human
ugaggccguguacauggggc

SEQ ID NO: 97591 - RNA, 23 nt, Human
ugaguacccaccacuagccacug

SEQ ID NO: 97592 - RNA, 18 nt, Human
ugauuaagccucuggaaa

SEQ ID NO: 97593 - RNA, 18 nt, Human
ugccagaaaccucuggau

SEQ ID NO: 97594 - RNA, 22 nt, Human
ugccgagggaggcaggggccug

SEQ ID NO: 97595 - RNA, 19 nt, Human
ugccugugcucccagcuug

SEQ ID NO: 97596 - RNA, 21 nt, Human
ugccugugcucccagcuugca

SEQ ID NO: 97597 - RNA, 27 nt, Human
ugccugugcucccagcuugcacucuga

SEQ ID NO: 97598 - RNA, 30 nt, Human
ugcuccaugcuuccagacacccagccucaa

SEQ ID NO: 97599 - RNA, 22 nt, Human
uggaggaggguaagggagggug

SEQ ID NO: 97600 - RNA, 21 nt, Human
uggcguggaggacggugugau

SEQ ID NO: 97601 - RNA, 20 nt, Human
uggggaggcugcaaguggga

SEQ ID NO: 97602 - RNA, 21 nt, Human
uggggcaggagguacuggcuc

SEQ ID NO: 97603 - RNA, 21 nt, Human
uguccagaggggcuguuugug

SEQ ID NO: 97604 - RNA, 19 nt, Human
uuaguucugucacugccag

SEQ ID NO: 97605 - RNA, 19 nt, Human
uucuugcccgcugcuucuc

SEQ ID NO: 97606 - RNA, 24 nt, Human
uugaaggaaaaggaaauggcgugg

SEQ ID NO: 97607 - RNA, 24 nt, Human
uugacuggcuuggcugugugauuu

SEQ ID NO: 97608 - RNA, 23 nt, Human
uuuuuuuuuuuuuuuuuaucuuu

SEQ ID NO: 97609 - RNA, 18 nt, Human
aaaauggacccauucaaa

SEQ ID NO: 97610 - RNA, 19 nt, Human
aacuaguacaccccaaccu

SEQ ID NO: 97611 - RNA, 27 nt, Human
aagaacaaaacacaaaaaacaaaaaga

SEQ ID NO: 97612 - RNA, 25 nt, Human
aaguaacuuuaaaaaauuauacuga

SEQ ID NO: 97613 - RNA, 18 nt, Human
acaaaacacaaaaaacaa

SEQ ID NO: 97614 - RNA, 21 nt, Human
acaaaacacaaaaaacaaaaa

SEQ ID NO: 97615 - RNA, 19 nt, Human
agaacaaaacacaaaaaac

SEQ ID NO: 97616 - RNA, 19 nt, Human
aggaucccugggcgcgggg

SEQ ID NO: 97617 - RNA, 21 nt, Human
aggcuauggaagggcaaaaug

SEQ ID NO: 97618 - RNA, 21 nt, Human
auuuuaugcuaaaaaagauuc

SEQ ID NO: 97619 - RNA, 18 nt, Human
caaaacacaaaaaacaaa

SEQ ID NO: 97620 - RNA, 24 nt, Human
caaauuuccucccagggaccaggc

SEQ ID NO: 97621 - RNA, 19 nt, Human
caaccucaguggaaagcaa

SEQ ID NO: 97622 - RNA, 24 nt, Human
caaugcccagggauuaggcuaugg

SEQ ID NO: 97623 - RNA, 19 nt, Human
caucugaaaaauuucuaga

SEQ ID NO: 97624 - RNA, 20 nt, Human
ccugggcgcggggcaggggc

SEQ ID NO: 97625 - RNA, 23 nt, Human
cgaaaggagcuggaggaucccug

SEQ ID NO: 97626 - RNA, 20 nt, Human
cgcgggcgaaaggagcugga

SEQ ID NO: 97627 - RNA, 21 nt, Human
cgcgggcgaaaggagcuggag

SEQ ID NO: 97628 - RNA, 26 nt, Human
cucccuguaaugguuauguuuccaac

SEQ ID NO: 97629 - RNA, 18 nt, Human
cugacuuuaaagaacaaa

SEQ ID NO: 97630 - RNA, 20 nt, Human
gaaaggagcuggaggauccc

SEQ ID NO: 97631 - RNA, 21 nt, Human
gaccaggcccuauuaacccug

SEQ ID NO: 97632 - RNA, 26 nt, Human
gaccugacuuuaaagaacaaaacaca

SEQ ID NO: 97633 - RNA, 21 nt, Human
gcuauggaagggcaaaaugga

SEQ ID NO: 97634 - RNA, 18 nt, Human
gggcaggggccggcggag

SEQ ID NO: 97635 - RNA, 18 nt, Human
gggcgcgggcgaaaggag

SEQ ID NO: 97636 - RNA, 20 nt, Human
guuguuucuuuccaagauaa

SEQ ID NO: 97637 - RNA, 28 nt, Human
uaaaaaagauucgcaaugaaacaaucag

SEQ ID NO: 97638 - RNA, 19 nt, Human
uaaaaaauuauacugauca

SEQ ID NO: 97639 - RNA, 24 nt, Human
uaaagaacaaaacacaaaaaacaa

SEQ ID NO: 97640 - RNA, 24 nt, Human
uaacuaguacaccccaaccucagu

SEQ ID NO: 97641 - RNA, 21 nt, Human
uagaagccauccauagcacac

SEQ ID NO: 97642 - RNA, 21 nt, Human
uauggaagggcaaaauggacc

SEQ ID NO: 97643 - RNA, 18 nt, Human
ucccugggcgcggggcag

SEQ ID NO: 97644 - RNA, 19 nt, Human
ucccugggcgcggggcagg

SEQ ID NO: 97645 - RNA, 22 nt, Human
ucccugggcgcggggcaggggc

SEQ ID NO: 97646 - RNA, 22 nt, Human
ucccuguaaugguuauguuucc

SEQ ID NO: 97647 - RNA, 24 nt, Human
ucccuguaaugguuauguuuccaa

SEQ ID NO: 97648 - RNA, 22 nt, Human
ucucccagaagcaucugaaaaa

SEQ ID NO: 97649 - RNA, 21 nt, Human
ucugaaaaauuucuagagggg

SEQ ID NO: 97650 - RNA, 20 nt, Human
uggaaagcaaugcccaggga

SEQ ID NO: 97651 - RNA, 23 nt, Human
uguaguuuuuguuagaagccauc

SEQ ID NO: 97652 - RNA, 19 nt, Human
uguccggagcgaacggagg

SEQ ID NO: 97653 - RNA, 21 nt, Human
uuaaaaaauuauacugaucaa

SEQ ID NO: 97654 - RNA, 20 nt, Human
uugcaucuguuaaguguccc

SEQ ID NO: 97655 - RNA, 24 nt, Human
aaucaucaaggccauggugcuuaa

SEQ ID NO: 97656 - RNA, 18 nt, Human
agugaaucaucaaggcca

SEQ ID NO: 97657 - RNA, 21 nt, Human
ccgcaggugucuggagcagca

SEQ ID NO: 97658 - RNA, 18 nt, Human
ccgccgccgccgcaggug

SEQ ID NO: 97659 - RNA, 22 nt, Human
ccgccgccgccguuacaggcag

SEQ ID NO: 97660 - RNA, 26 nt, Human
ccgccgcggggucgccgccgccgccg

SEQ ID NO: 97661 - RNA, 22 nt, Human
cuuucacgucuuacuacucucc

SEQ ID NO: 97662 - RNA, 26 nt, Human
ucgccgccgccgccgcaggugucugg

SEQ ID NO: 97663 - RNA, 24 nt, Human
ugaaucaucaaggccauggugcuu

SEQ ID NO: 97664 - RNA, 25 nt, Human
aaacaacaaagggauauaaaauuaa

SEQ ID NO: 97665 - RNA, 22 nt, Human
aauguugucacaauuuugggug

SEQ ID NO: 97666 - RNA, 23 nt, Human
agcauguguaucucuauaucucu

SEQ ID NO: 97667 - RNA, 19 nt, Human
agucucuguccuggugagg

SEQ ID NO: 97668 - RNA, 21 nt, Human
caugaucaccaacaggcaaga

SEQ ID NO: 97669 - RNA, 21 nt, Human
cucguugauaauucagcagca

SEQ ID NO: 97670 - RNA, 24 nt, Human
gagcaugaucaccaacaggccgug

SEQ ID NO: 97671 - RNA, 18 nt, Human
uaaaaguuaacuugaaaa

SEQ ID NO: 97672 - RNA, 18 nt, Human
uaucaaauguuuauuuua

SEQ ID NO: 97673 - RNA, 22 nt, Human
uguacuagaaaacaacaaaggg

SEQ ID NO: 97674 - RNA, 18 nt, Human
uucuggucagccuauacc

SEQ ID NO: 97675 - RNA, 22 nt, Human
uuuuuuuuuuuuuuuuuuucag

SEQ ID NO: 97676 - RNA, 23 nt, Human
aaaaugcacucgcccagcuguga

SEQ ID NO: 97677 - RNA, 23 nt, Human
aagaggccaaagcgcucgauuug

SEQ ID NO: 97678 - RNA, 27 nt, Human
aagaggccaaagcgcucggugggcacc

SEQ ID NO: 97679 - RNA, 23 nt, Human
aaggaaggugucuuuagaugagg

SEQ ID NO: 97680 - RNA, 20 nt, Human
accagggacagagucugagg

SEQ ID NO: 97681 - RNA, 19 nt, Human
agaugaggggguuggggag

SEQ ID NO: 97682 - RNA, 28 nt, Human
agcagcgccuguccggaaggcuucuggg

SEQ ID NO: 97683 - RNA, 19 nt, Human
agcuuccuugucacuccuu

SEQ ID NO: 97684 - RNA, 23 nt, Human
agggaaagggggcccccuucaga

SEQ ID NO: 97685 - RNA, 18 nt, Human
aggugucuuuagaugagg

SEQ ID NO: 97686 - RNA, 26 nt, Human
cacuacuuacaaaaaacuauucaaaa

SEQ ID NO: 97687 - RNA, 18 nt, Human
cagacacccccgagucuc

SEQ ID NO: 97688 - RNA, 26 nt, Human
cagcagcgccuguccggaaggcuucc

SEQ ID NO: 97689 - RNA, 22 nt, Human
cagggacagagucugaggagaa

SEQ ID NO: 97690 - RNA, 21 nt, Human
ccccagagggauccgcagggg

SEQ ID NO: 97691 - RNA, 20 nt, Human
cccccgagucucuaguugga

SEQ ID NO: 97692 - RNA, 24 nt, Human
cggggcagcagcgccuguccggaa

SEQ ID NO: 97693 - RNA, 21 nt, Human
cucaggacaaacaggucuggc

SEQ ID NO: 97694 - RNA, 18 nt, Human
cugaccaccacggcugca

SEQ ID NO: 97695 - RNA, 24 nt, Human
cugggcagcugggcaccgcaggug

SEQ ID NO: 97696 - RNA, 24 nt, Human
gaggaaaagcacuacuuacaaaaa

SEQ ID NO: 97697 - RNA, 22 nt, Human
gcagggaaagggggcccccuuc

SEQ ID NO: 97698 - RNA, 18 nt, Human
gccuucucuugccucagc

SEQ ID NO: 97699 - RNA, 22 nt, Human
gcucugcccaccacagcuucca

SEQ ID NO: 97700 - RNA, 21 nt, Human
gcugucuuugugcucagguga

SEQ ID NO: 97701 - RNA, 18 nt, Human
gcuuguuuuggggcucug

SEQ ID NO: 97702 - RNA, 22 nt, Human
ggaaggcuucuggccucugucc

SEQ ID NO: 97703 - RNA, 18 nt, Human
ggcugcagaggucuccgg

SEQ ID NO: 97704 - RNA, 23 nt, Human
gugagggugucuggccggguauc

SEQ ID NO: 97705 - RNA, 20 nt, Human
uauucaaaaugcacucgccc

SEQ ID NO: 97706 - RNA, 20 nt, Human
ucaaaaugcacucgcccagc

SEQ ID NO: 97707 - RNA, 25 nt, Human
uccccagcgggcagggaaagggggc

SEQ ID NO: 97708 - RNA, 18 nt, Human
ucucuugccucagccugg

SEQ ID NO: 97709 - RNA, 20 nt, Human
ucugcccaccacagcuucca

SEQ ID NO: 97710 - RNA, 23 nt, Human
ucuuugugcucaggugagcagcc

SEQ ID NO: 97711 - RNA, 23 nt, Human
ugaagagcggacaguuuucucag

SEQ ID NO: 97712 - RNA, 18 nt, Human
ugccucagccugggcagc

SEQ ID NO: 97713 - RNA, 21 nt, Human
ugccucagccugggcagcugg

SEQ ID NO: 97714 - RNA, 22 nt, Human
uggaaggcugcuuguuuugggg

SEQ ID NO: 97715 - RNA, 22 nt, Human
uggaggggcggccgagcuguug

SEQ ID NO: 97716 - RNA, 24 nt, Human
uggaugcugcacagaagaggccaa

SEQ ID NO: 97717 - RNA, 18 nt, Human
uggcuugacagccagugg

SEQ ID NO: 97718 - RNA, 21 nt, Human
uggggaggggagucauaagac

SEQ ID NO: 97719 - RNA, 18 nt, Human
uguuuuggggcucugccc

SEQ ID NO: 97720 - RNA, 22 nt, Human
uucacugagacgccgcucccca

SEQ ID NO: 97721 - RNA, 22 nt, Human
uugugcucaggugagcagccuc

SEQ ID NO: 97722 - RNA, 18 nt, Human
aaagaaauugaaaugaga

SEQ ID NO: 97723 - RNA, 20 nt, Human
aagacugggcauuauuuaga

SEQ ID NO: 97724 - RNA, 22 nt, Human
acauuaacaaaaucuuaucuga

SEQ ID NO: 97725 - RNA, 22 nt, Human
agacagggaccuaaaaagggaa

SEQ ID NO: 97726 - RNA, 21 nt, Human
agggaaaggaugggaggagga

SEQ ID NO: 97727 - RNA, 19 nt, Human
augguccagugagccuggc

SEQ ID NO: 97728 - RNA, 23 nt, Human
auugaaaugagaucuugcccuuu

SEQ ID NO: 97729 - RNA, 23 nt, Human
caacuagucucuugcuugacuuu

SEQ ID NO: 97730 - RNA, 28 nt, Human
cacccacuucucugguuguugucgggac

SEQ ID NO: 97731 - RNA, 18 nt, Human
ccagaagucuucuuacug

SEQ ID NO: 97732 - RNA, 19 nt, Human
ccagaagucuucuuacugu

SEQ ID NO: 97733 - RNA, 23 nt, Human
ccuaaaaagggaaaggaugggag

SEQ ID NO: 97734 - RNA, 20 nt, Human
cuggccccagaacucccuuc

SEQ ID NO: 97735 - RNA, 18 nt, Human
cuugacuuuggggagaag

SEQ ID NO: 97736 - RNA, 24 nt, Human
gaaagauugucuugcugccugaga

SEQ ID NO: 97737 - RNA, 20 nt, Human
gacagggaccuaaaaaggga

SEQ ID NO: 97738 - RNA, 29 nt, Human
gagaugaaacaagucucuucaccacagaa

SEQ ID NO: 97739 - RNA, 27 nt, Human
gccccagaacucccuucaacuagucuc

SEQ ID NO: 97740 - RNA, 24 nt, Human
ggccauuaaauccaggggggagcc

SEQ ID NO: 97741 - RNA, 18 nt, Human
ggcccucuaauaaagaaa

SEQ ID NO: 97742 - RNA, 20 nt, Human
gggcacuuagucaaagagaa

SEQ ID NO: 97743 - RNA, 23 nt, Human
gggcacuuagucaaagagaaaca

SEQ ID NO: 97744 - RNA, 23 nt, Human
uaagugacugguugaaaucagga

SEQ ID NO: 97745 - RNA, 23 nt, Human
uagaacacaucaauaaggcccuc

SEQ ID NO: 97746 - RNA, 24 nt, Human
uauuaguuucaccacuuugagaga

SEQ ID NO: 97747 - RNA, 22 nt, Human
ucacuggauaguuuuuuucugg

SEQ ID NO: 97748 - RNA, 18 nt, Human
uccuggguucacccuuug

SEQ ID NO: 97749 - RNA, 26 nt, Human
ucucugguuguauaagacagggacug

SEQ ID NO: 97750 - RNA, 20 nt, Human
ugagagacauggcugcugcc

SEQ ID NO: 97751 - RNA, 18 nt, Human
ugauagagagauaauacc

SEQ ID NO: 97752 - RNA, 23 nt, Human
uggaaagacuuagaacacaucaa

SEQ ID NO: 97753 - RNA, 22 nt, Human
ugggaggaggaucauccugcag

SEQ ID NO: 97754 - RNA, 18 nt, Human
ugggaugugccuggccaa

SEQ ID NO: 97755 - RNA, 21 nt, Human
ugguccagugagccuggcccc

SEQ ID NO: 97756 - RNA, 20 nt, Human
uuagaggcuggagacuaauu

SEQ ID NO: 97757 - RNA, 26 nt, Human
uugagauaauaaacuguuuuauuuau

SEQ ID NO: 97758 - RNA, 20 nt, Human
uugcugccugagaugggaug

SEQ ID NO: 97759 - RNA, 20 nt, Human
uuuggagaaagagaacugug

SEQ ID NO: 97760 - RNA, 23 nt, Human
aaacaauuuacugacaaaaaaag

SEQ ID NO: 97761 - RNA, 19 nt, Human
aaagcagcugcuucaaguu

SEQ ID NO: 97762 - RNA, 21 nt, Human
acaauuuacugacaaaaaaag

SEQ ID NO: 97763 - RNA, 19 nt, Human
cagccaaaacuaaugcuug

SEQ ID NO: 97764 - RNA, 19 nt, Human
cuguugucuucaucuucug

SEQ ID NO: 97765 - RNA, 21 nt, Human
cuguugucuucaucuucuguu

SEQ ID NO: 97766 - RNA, 24 nt, Human
uaaaaacaauuuacugacaaaaaa

SEQ ID NO: 97767 - RNA, 22 nt, Human
uacugacaaaaaaagcaagcac

SEQ ID NO: 97768 - RNA, 21 nt, Human
ugcuuguucuuuguuaguggg

SEQ ID NO: 97769 - RNA, 19 nt, Human
uucuucuuaaagcagcugc

SEQ ID NO: 97770 - RNA, 21 nt, Human
uuguuaguggguauuucuucu

SEQ ID NO: 97771 - RNA, 20 nt, Human
aaaauuuaaagacagaggaa

SEQ ID NO: 97772 - RNA, 23 nt, Human
aagagaaagcggacuacgcagga

SEQ ID NO: 97773 - RNA, 23 nt, Human
aagagaaagcggacuacgcagga

SEQ ID NO: 97774 - RNA, 26 nt, Human
aaggaucuuguugucccugacugaca

SEQ ID NO: 97775 - RNA, 19 nt, Human
acaccauugauguaugcua

SEQ ID NO: 97776 - RNA, 21 nt, Human
acaccuacuucacucuuagac

SEQ ID NO: 97777 - RNA, 19 nt, Human
acagaaccuggcggcgccc

SEQ ID NO: 97778 - RNA, 24 nt, Human
acaggauccauuuggaaaauauca

SEQ ID NO: 97779 - RNA, 24 nt, Human
acugcauauccuuuucggccauaa

SEQ ID NO: 97780 - RNA, 18 nt, Human
agaacccacucaagcugu

SEQ ID NO: 97781 - RNA, 22 nt, Human
agaagaaagcuggcacugcuca

SEQ ID NO: 97782 - RNA, 28 nt, Human
agaucuguuguuauuaaggaugaccuuu

SEQ ID NO: 97783 - RNA, 19 nt, Human
augguaaaacauaccccug

SEQ ID NO: 97784 - RNA, 21 nt, Human
caacacgggaucccugaaguu

SEQ ID NO: 97785 - RNA, 25 nt, Human
caagagcaaaggaggaagcaugcaa

SEQ ID NO: 97786 - RNA, 24 nt, Human
caagcuaauuuuauucuuucccaa

SEQ ID NO: 97787 - RNA, 21 nt, Human
cacucgguuuguccaacagag

SEQ ID NO: 97788 - RNA, 20 nt, Human
cacuuaauacugccagucac

SEQ ID NO: 97789 - RNA, 19 nt, Human
cagaguauaaucaaggguu

SEQ ID NO: 97790 - RNA, 23 nt, Human
cauugcacucgguuuguccaaca

SEQ ID NO: 97791 - RNA, 21 nt, Human
cauuuucagaaaagcaucauu

SEQ ID NO: 97792 - RNA, 25 nt, Human
ccagaaguccucuagcucugcauua

SEQ ID NO: 97793 - RNA, 24 nt, Human
ccagagccccucuaucuuagccag

SEQ ID NO: 97794 - RNA, 21 nt, Human
cccacauauggaacauuuggc

SEQ ID NO: 97795 - RNA, 21 nt, Human
cccacuucccugccagaaguc

SEQ ID NO: 97796 - RNA, 18 nt, Human
ccccacuucccugccaga

SEQ ID NO: 97797 - RNA, 31 nt, Human
cucaaacuguaaccacaaaggguguccccag

SEQ ID NO: 97798 - RNA, 25 nt, Human
cucauauacuccugccccacccucc

SEQ ID NO: 97799 - RNA, 25 nt, Human
cuccauggcaacacgggaucccuga

SEQ ID NO: 97800 - RNA, 23 nt, Human
cugcauauccuuuucggccauaa

SEQ ID NO: 97801 - RNA, 24 nt, Human
cuggcggcgcccaggauccucucc

SEQ ID NO: 97802 - RNA, 20 nt, Human
cuguaaccacaaaggguguc

SEQ ID NO: 97803 - RNA, 21 nt, Human
cuguguguggcaaagccaaga

SEQ ID NO: 97804 - RNA, 18 nt, Human
cuucaaguggggcuuccc

SEQ ID NO: 97805 - RNA, 19 nt, Human
cuucuuucaguugcuacca

SEQ ID NO: 97806 - RNA, 24 nt, Human
gaacacuuccccacuucccugcca

SEQ ID NO: 97807 - RNA, 22 nt, Human
gaacauuuggcaugccuccaug

SEQ ID NO: 97808 - RNA, 28 nt, Human
gaucuuguugucccugacugacacccac

SEQ ID NO: 97809 - RNA, 23 nt, Human
gccaagaucauaaaauacaaaug

SEQ ID NO: 97810 - RNA, 19 nt, Human
gccauaaccacauucaccc

SEQ ID NO: 97811 - RNA, 22 nt, Human
ggaaaaacucgauuuucagcca

SEQ ID NO: 97812 - RNA, 24 nt, Human
guggaagauaacaaagcccauaua

SEQ ID NO: 97813 - RNA, 23 nt, Human
uaaaauuuaaagacagaggaaaa

SEQ ID NO: 97814 - RNA, 19 nt, Human
uacauccaaggagccagag

SEQ ID NO: 97815 - RNA, 19 nt, Human
uacuauauacacacauacc

SEQ ID NO: 97816 - RNA, 21 nt, Human
uacuauauacacacauaccug

SEQ ID NO: 97817 - RNA, 24 nt, Human
uacuccugccccacccuccaaaga

SEQ ID NO: 97818 - RNA, 23 nt, Human
uauauacacacauaccugaacug

SEQ ID NO: 97819 - RNA, 24 nt, Human
uauuuuauacaaucuaugcugagu

SEQ ID NO: 97820 - RNA, 23 nt, Human
ucaaacuguaaccacaaagggug

SEQ ID NO: 97821 - RNA, 19 nt, Human
ucaagaaauuccuccaucu

SEQ ID NO: 97822 - RNA, 24 nt, Human
uccaauaaaaaaaaggcaaggaaa

SEQ ID NO: 97823 - RNA, 21 nt, Human
ucccaagagcaaaggaggaag

SEQ ID NO: 97824 - RNA, 19 nt, Human
ucccugcaaacaggacugg

SEQ ID NO: 97825 - RNA, 25 nt, Human
uccuaccauuccaauaaaaaaaagg

SEQ ID NO: 97826 - RNA, 21 nt, Human
ucggccauaaccacauucacc

SEQ ID NO: 97827 - RNA, 23 nt, Human
ucuggaacacuuccccacuuccc

SEQ ID NO: 97828 - RNA, 25 nt, Human
ugaaagguguguaucauuuuuuaga

SEQ ID NO: 97829 - RNA, 18 nt, Human
ugagagaggaugcucaua

SEQ ID NO: 97830 - RNA, 22 nt, Human
ugcaaacaggacuggucuucaa

SEQ ID NO: 97831 - RNA, 24 nt, Human
ugcacucgguuuguccaacagagu

SEQ ID NO: 97832 - RNA, 18 nt, Human
ugcagagaacccacucaa

SEQ ID NO: 97833 - RNA, 21 nt, Human
ugcauucauacuauauacaca

SEQ ID NO: 97834 - RNA, 19 nt, Human
ugcucauauacuccugccc

SEQ ID NO: 97835 - RNA, 19 nt, Human
uggaagauaacaaagccca

SEQ ID NO: 97836 - RNA, 18 nt, Human
ugggagaagcucuccugg

SEQ ID NO: 97837 - RNA, 20 nt, Human
ugggagaagcucuccuggug

SEQ ID NO: 97838 - RNA, 19 nt, Human
uguaguagaguguucacuc

SEQ ID NO: 97839 - RNA, 22 nt, Human
uucaaagucucccagagccccc

SEQ ID NO: 97840 - RNA, 26 nt, Human
uucacuagaauacacagggaaaagga

SEQ ID NO: 97841 - RNA, 18 nt, Human
uucauucacuagaauaca

SEQ ID NO: 97842 - RNA, 23 nt, Human
uuuucagaaaagcaucauucauu

SEQ ID NO: 97843 - RNA, 19 nt, Human
uuuucagccacuuguaccu

SEQ ID NO: 97844 - RNA, 26 nt, Human
uuuucggccauaaccacauucaccca

SEQ ID NO: 97845 - RNA, 23 nt, Human
uuuuuuuuuuuuuuuuaaguuuu

SEQ ID NO: 97846 - RNA, 19 nt, Human
uuuuuuuuuuuuuuuuuaa

SEQ ID NO: 97847 - RNA, 19 nt, Human
aaaggccagaaccaguguc

SEQ ID NO: 97848 - RNA, 23 nt, Human
aaccagugucaaagggucagggu

SEQ ID NO: 97849 - RNA, 18 nt, Human
aagauuuuuauuggggca

SEQ ID NO: 97850 - RNA, 19 nt, Human
acauggaagcucaucuucc

SEQ ID NO: 97851 - RNA, 20 nt, Human
acauggaagcucaucuuccc

SEQ ID NO: 97852 - RNA, 18 nt, Human
agaaggagguccccaagc

SEQ ID NO: 97853 - RNA, 19 nt, Human
aggagaacaagcagagggc

SEQ ID NO: 97854 - RNA, 22 nt, Human
aggagaacaagcagagggcagg

SEQ ID NO: 97855 - RNA, 23 nt, Human
aggcggggccaggggggccaggu

SEQ ID NO: 97856 - RNA, 22 nt, Human
auaagacacaacuuuagcccuc

SEQ ID NO: 97857 - RNA, 22 nt, Human
caacuuuagcccucccugaucu

SEQ ID NO: 97858 - RNA, 24 nt, Human
cagacuccugaggggaugagggag

SEQ ID NO: 97859 - RNA, 22 nt, Human
cagccuagccucagaaucuaaa

SEQ ID NO: 97860 - RNA, 23 nt, Human
cagcucacaucuacaggcagcaa

SEQ ID NO: 97861 - RNA, 23 nt, Human
caggcagcuugagaaaaggcagg

SEQ ID NO: 97862 - RNA, 23 nt, Human
cagugucaaagggucaggguuga

SEQ ID NO: 97863 - RNA, 22 nt, Human
ccagaaugaguaugaggauaau

SEQ ID NO: 97864 - RNA, 20 nt, Human
ccuacacuaagaaauaacag

SEQ ID NO: 97865 - RNA, 22 nt, Human
ccucuuucuugaccuuuuccca

SEQ ID NO: 97866 - RNA, 22 nt, Human
ccugaagcuugaggaaaaaaaa

SEQ ID NO: 97867 - RNA, 21 nt, Human
cucagccuagccucagaaucu

SEQ ID NO: 97868 - RNA, 19 nt, Human
gaaacaucauuuuuuacac

SEQ ID NO: 97869 - RNA, 21 nt, Human
gagaacaagcagagggcaggc

SEQ ID NO: 97870 - RNA, 22 nt, Human
gcaggaaaggccagaaccagug

SEQ ID NO: 97871 - RNA, 19 nt, Human
gccucaagcuuacaggccc

SEQ ID NO: 97872 - RNA, 20 nt, Human
ggaguaguggcucaagccug

SEQ ID NO: 97873 - RNA, 20 nt, Human
gggcaggcggggccaggggg

SEQ ID NO: 97874 - RNA, 22 nt, Human
gggcaggcggggccaggggggc

SEQ ID NO: 97875 - RNA, 23 nt, Human
gggcaggcggggccaggggggcc

SEQ ID NO: 97876 - RNA, 20 nt, Human
gucuacccacauuuucuuuc

SEQ ID NO: 97877 - RNA, 20 nt, Human
uaacagaauagggagguguu

SEQ ID NO: 97878 - RNA, 20 nt, Human
uaaggcauaagcccaguguu

SEQ ID NO: 97879 - RNA, 26 nt, Human
uaaguacucagccuagccucagaauc

SEQ ID NO: 97880 - RNA, 24 nt, Human
uacaaucaagucuugauucucuua

SEQ ID NO: 97881 - RNA, 20 nt, Human
uacacuaagaaauaacagaa

SEQ ID NO: 97882 - RNA, 22 nt, Human
ucagccuagccucagaaucuaa

SEQ ID NO: 97883 - RNA, 21 nt, Human
ucccugaucucuuucugccuc

SEQ ID NO: 97884 - RNA, 20 nt, Human
ucucuuauuucugucuugcc

SEQ ID NO: 97885 - RNA, 25 nt, Human
ucugccucuuucuugaccuuuuccc

SEQ ID NO: 97886 - RNA, 24 nt, Human
ucuuucuugaccuuuucccaguca

SEQ ID NO: 97887 - RNA, 20 nt, Human
ugagaaaaggcaggaaaggc

SEQ ID NO: 97888 - RNA, 21 nt, Human
ugagacugugaaaucugauuu

SEQ ID NO: 97889 - RNA, 21 nt, Human
ugagcugaaauuuaaggcuag

SEQ ID NO: 97890 - RNA, 19 nt, Human
uggaagcucaucuucccca

SEQ ID NO: 97891 - RNA, 18 nt, Human
uggcauaagacacaacuu

SEQ ID NO: 97892 - RNA, 22 nt, Human
uggcauaagacacaacuuuagc

SEQ ID NO: 97893 - RNA, 19 nt, Human
uguagccguauaauaagua

SEQ ID NO: 97894 - RNA, 22 nt, Human
ugucuaccuacacuaagaaaua

SEQ ID NO: 97895 - RNA, 22 nt, Human
uguuucauuccuuuaauguuug

SEQ ID NO: 97896 - RNA, 20 nt, Human
uguuugcagacauagaccuu

SEQ ID NO: 97897 - RNA, 19 nt, Human
uuagauaaguguaaaugug

SEQ ID NO: 97898 - RNA, 22 nt, Human
uuauuagauaaguguaaaugug

SEQ ID NO: 97899 - RNA, 20 nt, Human
uucugccucuuucuugaccu

SEQ ID NO: 97900 - RNA, 19 nt, Human
uuuacaaucaagucuugau

SEQ ID NO: 97901 - RNA, 21 nt, Human
uuuagcccucccugaucucuu

SEQ ID NO: 97902 - RNA, 18 nt, Human
uuucuuuuuuuuuuuuug

SEQ ID NO: 97903 - RNA, 18 nt, Human
uuugaggauuccaggcag

SEQ ID NO: 97904 - RNA, 20 nt, Human
uuugaggauuccaggcagcu

SEQ ID NO: 97905 - RNA, 24 nt, Human
uuuucuuuuuuuuuuuuugagacu

SEQ ID NO: 97906 - RNA, 21 nt, Human
cccagaugaggaggcugagga

SEQ ID NO: 97907 - RNA, 20 nt, Human
ccgccgcggcuccggggcuc

SEQ ID NO: 97908 - RNA, 20 nt, Human
ccggggcucucuagcugcgc

SEQ ID NO: 97909 - RNA, 21 nt, Human
ccucucccgccgcggcuccgg

SEQ ID NO: 97910 - RNA, 22 nt, Human
cuccggggcucucuagcugcgc

SEQ ID NO: 97911 - RNA, 21 nt, Human
cugcgccccccggccccucgu

SEQ ID NO: 97912 - RNA, 18 nt, Human
cuggcugcgcguuccucu

SEQ ID NO: 97913 - RNA, 26 nt, Human
cuucccaaggcuggcugcgcguuccu

SEQ ID NO: 97914 - RNA, 18 nt, Human
gccugggcuucccaaggc

SEQ ID NO: 97915 - RNA, 18 nt, Human
ggcugccgggccugggcu

SEQ ID NO: 97916 - RNA, 23 nt, Human
uagcugcgccccccggccccucg

SEQ ID NO: 97917 - RNA, 22 nt, Human
ucucccgccgcggcuccggggc

SEQ ID NO: 97918 - RNA, 22 nt, Human
ugaaaaaccuggaggauacuau

SEQ ID NO: 97919 - RNA, 22 nt, Human
uugaaaaaccuggaggauacua

SEQ ID NO: 97920 - RNA, 19 nt, Human
uuuuuuuuuuuucuuuucg

SEQ ID NO: 97921 - RNA, 21 nt, Human
uuuuuuuuuuuucuuuucggu

SEQ ID NO: 97922 - RNA, 24 nt, Human
uuuuuuuuuuuuuuuucuuuucgg

SEQ ID NO: 97923 - RNA, 24 nt, Human
uuuuuuuuuuuuuuuuuuucuuuu

SEQ ID NO: 97924 - RNA, 24 nt, Human
uuuuuuuuuuuuuuuuuuuucuuu

SEQ ID NO: 97925 - RNA, 26 nt, Human
uuuuuuuuuuuuuuuuuuuuuucuuu

SEQ ID NO: 97926 - RNA, 24 nt, Human
aaagugcugggauuacaggcauga

SEQ ID NO: 97927 - RNA, 23 nt, Human
aagaaacucauggcuuuuaaucc

SEQ ID NO: 97928 - RNA, 22 nt, Human
aagcaguucugccucagccucc

SEQ ID NO: 97929 - RNA, 24 nt, Human
aagcaguucugccucagccuccca

SEQ ID NO: 97930 - RNA, 19 nt, Human
aaguagcugggauuacagg

SEQ ID NO: 97931 - RNA, 24 nt, Human
aaguagcugggauuacaggccagc

SEQ ID NO: 97932 - RNA, 19 nt, Human
aagugcugggauuacaggc

SEQ ID NO: 97933 - RNA, 21 nt, Human
aagugcugggauuacaggcau

SEQ ID NO: 97934 - RNA, 26 nt, Human
aagugcugggauuacaggcaugagcc

SEQ ID NO: 97935 - RNA, 18 nt, Human
acaggguuucaccauguu

SEQ ID NO: 97936 - RNA, 23 nt, Human
acaggguuucaccauguuggcca

SEQ ID NO: 97937 - RNA, 24 nt, Human
acaggguuucaccauguuggccag

SEQ ID NO: 97938 - RNA, 18 nt, Human
accauguuggccaggcug

SEQ ID NO: 97939 - RNA, 22 nt, Human
accccaacccccucagugcccu

SEQ ID NO: 97940 - RNA, 21 nt, Human
acccccccaccacaccccaac

SEQ ID NO: 97941 - RNA, 25 nt, Human
aggcuggagugcaguggcgcgaucu

SEQ ID NO: 97942 - RNA, 23 nt, Human
agugauccaccugccucagccuc

SEQ ID NO: 97943 - RNA, 24 nt, Human
agugauccaccugccucagccucc

SEQ ID NO: 97944 - RNA, 23 nt, Human
agugcaguggcgcgaucuuggcu

SEQ ID NO: 97945 - RNA, 23 nt, Human
agugcaguggcgcgaucuuggcu

SEQ ID NO: 97946 - RNA, 18 nt, Human
agugcugggauuacaggc

SEQ ID NO: 97947 - RNA, 21 nt, Human
auucucucccucccuucuccc

SEQ ID NO: 97948 - RNA, 24 nt, Human
caaagugcugggauuacaggcaug

SEQ ID NO: 97949 - RNA, 20 nt, Human
caaccuccaccuccuggguu

SEQ ID NO: 97950 - RNA, 23 nt, Human
caaccuccaccuccuggguucaa

SEQ ID NO: 97951 - RNA, 19 nt, Human
caagcaguucugccucagc

SEQ ID NO: 97952 - RNA, 26 nt, Human
cacaccccaacccccucagugcccuu

SEQ ID NO: 97953 - RNA, 21 nt, Human
caccauguuggccaggcuggu

SEQ ID NO: 97954 - RNA, 24 nt, Human
caccauguuggccaggcuggucuc

SEQ ID NO: 97955 - RNA, 27 nt, Human
caccauguuggccaggcuggucucaaa

SEQ ID NO: 97956 - RNA, 25 nt, Human
caccccaacccccucagugcccugg

SEQ ID NO: 97957 - RNA, 23 nt, Human
caccugccucagccucccaaagu

SEQ ID NO: 97958 - RNA, 21 nt, Human
cacugcaaccuccaccuccug

SEQ ID NO: 97959 - RNA, 23 nt, Human
cacugcaaccuccaccuccuggg

SEQ ID NO: 97960 - RNA, 24 nt, Human
caggguuucaccauguuggccagg

SEQ ID NO: 97961 - RNA, 18 nt, Human
cagugcccugggguuuga

SEQ ID NO: 97962 - RNA, 19 nt, Human
caguggcgcgaucuuggcu

SEQ ID NO: 97963 - RNA, 19 nt, Human
cauggcuuuuaauccuggc

SEQ ID NO: 97964 - RNA, 24 nt, Human
cauguuggccaggcuggucucaaa

SEQ ID NO: 97965 - RNA, 23 nt, Human
ccaaagugcugggauuacaggca

SEQ ID NO: 97966 - RNA, 24 nt, Human
ccaaagugcugggauuacaggcau

SEQ ID NO: 97967 - RNA, 26 nt, Human
ccaccugccucagccucccaaagugc

SEQ ID NO: 97968 - RNA, 21 nt, Human
ccagugauccaccugccucag

SEQ ID NO: 97969 - RNA, 27 nt, Human
ccagugauccaccugccucagccuccc

SEQ ID NO: 97970 - RNA, 24 nt, Human
cccaaagugcugggauuacaggca

SEQ ID NO: 97971 - RNA, 23 nt, Human
cccaaguagcugggauuacaggc

SEQ ID NO: 97972 - RNA, 19 nt, Human
ccccaacccccucagugcc

SEQ ID NO: 97973 - RNA, 20 nt, Human
ccccaccacaccccaacccc

SEQ ID NO: 97974 - RNA, 23 nt, Human
ccccaccacaccccaacccccuc

SEQ ID NO: 97975 - RNA, 23 nt, Human
ccccaccacaccccaacccccuc

SEQ ID NO: 97976 - RNA, 18 nt, Human
cccccaccacaccccaac

SEQ ID NO: 97977 - RNA, 21 nt, Human
ccccccaccacaccccaaccc

SEQ ID NO: 97978 - RNA, 22 nt, Human
cccccccaccacaccccaaccc

SEQ ID NO: 97979 - RNA, 19 nt, Human
cccucagugcccugggguu

SEQ ID NO: 97980 - RNA, 21 nt, Human
ccgccacaccuggcuaauugu

SEQ ID NO: 97981 - RNA, 19 nt, Human
ccuccaccuccuggguuca

SEQ ID NO: 97982 - RNA, 24 nt, Human
ccuccaccuccuggguucaagcag

SEQ ID NO: 97983 - RNA, 21 nt, Human
ccugaccuccagugauccacc

SEQ ID NO: 97984 - RNA, 23 nt, Human
ccugaccuccagugauccaccug

SEQ ID NO: 97985 - RNA, 24 nt, Human
ccugccucagccucccaaagugcu

SEQ ID NO: 97986 - RNA, 24 nt, Human
ccuggcaggacaaggaaaaccccg

SEQ ID NO: 97987 - RNA, 24 nt, Human
cgcccaggcuggagugcaguggcg

SEQ ID NO: 97988 - RNA, 24 nt, Human
cucacugcaaccuccaccuccugg

SEQ ID NO: 97989 - RNA, 27 nt, Human
cucacugcaaccuccaccuccuggguu

SEQ ID NO: 97990 - RNA, 24 nt, Human
cucagccucccaaguagcugggau

SEQ ID NO: 97991 - RNA, 21 nt, Human
cuccuggguucaagcaguucu

SEQ ID NO: 97992 - RNA, 18 nt, Human
cugcaaccuccaccuccu

SEQ ID NO: 97993 - RNA, 24 nt, Human
cugcaaccuccaccuccuggguuc

SEQ ID NO: 97994 - RNA, 24 nt, Human
cugccucagccucccaaagugcug

SEQ ID NO: 97995 - RNA, 23 nt, Human
cugccucagccucccaaguagcu

SEQ ID NO: 97996 - RNA, 26 nt, Human
cuggcuaauuguauuuuuaguagaga

SEQ ID NO: 97997 - RNA, 28 nt, Human
cuggcuaauuguauuuuuaguagagaca

SEQ ID NO: 97998 - RNA, 24 nt, Human
gaccuccagugauccaccugccuc

SEQ ID NO: 97999 - RNA, 18 nt, Human
gagacagucuggcucugu

SEQ ID NO: 98000 - RNA, 18 nt, Human
gauuacaggcaugagccg

SEQ ID NO: 98001 - RNA, 24 nt, Human
gauuacaggcaugagccgucaugc

SEQ ID NO: 98002 - RNA, 19 nt, Human
gauuacaggccagcuggga

SEQ ID NO: 98003 - RNA, 19 nt, Human
gcccaggcuggagugcagu

SEQ ID NO: 98004 - RNA, 20 nt, Human
gcccaggcuggagugcagug

SEQ ID NO: 98005 - RNA, 20 nt, Human
gcccugggguuugaagcaaa

SEQ ID NO: 98006 - RNA, 25 nt, Human
gcucugucgcccaggcuggagugca

SEQ ID NO: 98007 - RNA, 19 nt, Human
gcugggggggggggggggc

SEQ ID NO: 98008 - RNA, 23 nt, Human
gcuggucucaaacuccugaccuc

SEQ ID NO: 98009 - RNA, 24 nt, Human
ggauuacaggcaugagccgucaug

SEQ ID NO: 98010 - RNA, 25 nt, Human
ggcgcgaugacggcucacugcaacc

SEQ ID NO: 98011 - RNA, 24 nt, Human
ggcucugucgcccaggcuggagug

SEQ ID NO: 98012 - RNA, 24 nt, Human
ggcuggucucaaacuccugaccuc

SEQ ID NO: 98013 - RNA, 22 nt, Human
ggguuucaccauguuggccagg

SEQ ID NO: 98014 - RNA, 24 nt, Human
gugauccaccugccucagccuccc

SEQ ID NO: 98015 - RNA, 24 nt, Human
uaauaaaauucucucccucccuuc

SEQ ID NO: 98016 - RNA, 23 nt, Human
uacaggcaugagccgucaugccc

SEQ ID NO: 98017 - RNA, 20 nt, Human
uacccccccaccacacccca

SEQ ID NO: 98018 - RNA, 22 nt, Human
uacccccccaccacaccccaac

SEQ ID NO: 98019 - RNA, 22 nt, Human
uagagacaggguuucaccaugu

SEQ ID NO: 98020 - RNA, 24 nt, Human
uaguagagacaggguuucaccaug

SEQ ID NO: 98021 - RNA, 26 nt, Human
uaguagagacaggguuucaccauguu

SEQ ID NO: 98022 - RNA, 23 nt, Human
ucacugcaaccuccaccuccugg

SEQ ID NO: 98023 - RNA, 24 nt, Human
ucacugcaaccuccaccuccuggg

SEQ ID NO: 98024 - RNA, 25 nt, Human
ucacugcaaccuccaccuccugggu

SEQ ID NO: 98025 - RNA, 27 nt, Human
ucacugcaaccuccaccuccuggguuc

SEQ ID NO: 98026 - RNA, 20 nt, Human
ucagccucccaaguagcugg

SEQ ID NO: 98027 - RNA, 19 nt, Human
ucagugcccugggguuuga

SEQ ID NO: 98028 - RNA, 20 nt, Human
ucagugcccugggguuugaa

SEQ ID NO: 98029 - RNA, 22 nt, Human
uccagugauccaccugccucag

SEQ ID NO: 98030 - RNA, 24 nt, Human
ucccaaagugcugggauuacaggc

SEQ ID NO: 98031 - RNA, 24 nt, Human
ucccaaguagcugggauuacaggc

SEQ ID NO: 98032 - RNA, 24 nt, Human
uccugcugggggggggggggggca

SEQ ID NO: 98033 - RNA, 19 nt, Human
uccuggguucaagcaguuc

SEQ ID NO: 98034 - RNA, 21 nt, Human
uccuggguucaagcaguucug

SEQ ID NO: 98035 - RNA, 24 nt, Human
ucgcccaggcuggagugcaguggc

SEQ ID NO: 98036 - RNA, 19 nt, Human
ucuggcucugucgcccagg

SEQ ID NO: 98037 - RNA, 23 nt, Human
ucuggcucugucgcccaggcugg

SEQ ID NO: 98038 - RNA, 24 nt, Human
ucuggcucugucgcccaggcugga

SEQ ID NO: 98039 - RNA, 24 nt, Human
ucugucgcccaggcuggagugcag

SEQ ID NO: 98040 - RNA, 21 nt, Human
ugcaguggcgcgaucuuggcu

SEQ ID NO: 98041 - RNA, 24 nt, Human
ugccucagccucccaaagugcugg

SEQ ID NO: 98042 - RNA, 24 nt, Human
ugccucagccucccaaguagcugg

SEQ ID NO: 98043 - RNA, 20 nt, Human
ugcugggauuacaggcauga

SEQ ID NO: 98044 - RNA, 22 nt, Human
ugcugggggggggggggggcag

SEQ ID NO: 98045 - RNA, 24 nt, Human
ugcugggggggggggggggcaguu

SEQ ID NO: 98046 - RNA, 23 nt, Human
uggagugcaguggcgcgaucuug

SEQ ID NO: 98047 - RNA, 24 nt, Human
uggagugcaguggcgcgaucuugg

SEQ ID NO: 98048 - RNA, 24 nt, Human
uggccaggcuggucucaaacuccu

SEQ ID NO: 98049 - RNA, 28 nt, Human
uggcgcgaugacggcucacugcaaccuc

SEQ ID NO: 98050 - RNA, 24 nt, Human
uggcucugucgcccaggcuggagu

SEQ ID NO: 98051 - RNA, 18 nt, Human
ugggauuacaggcaugag

SEQ ID NO: 98052 - RNA, 19 nt, Human
ugggauuacaggcaugagc

SEQ ID NO: 98053 - RNA, 20 nt, Human
ugggauuacaggcaugagcc

SEQ ID NO: 98054 - RNA, 20 nt, Human
ugggauuacaggcaugagcc

SEQ ID NO: 98055 - RNA, 21 nt, Human
ugggauuacaggcaugagccg

SEQ ID NO: 98056 - RNA, 22 nt, Human
ugggauuacaggcaugagccgu

SEQ ID NO: 98057 - RNA, 23 nt, Human
ugggauuacaggcaugagccguc

SEQ ID NO: 98058 - RNA, 24 nt, Human
ugggauuacaggcaugagccguca

SEQ ID NO: 98059 - RNA, 19 nt, Human
ugggauuacaggccagcug

SEQ ID NO: 98060 - RNA, 24 nt, Human
ugggauuacaggccagcugggauu

SEQ ID NO: 98061 - RNA, 21 nt, Human
uuacaggccagcugggauuac

SEQ ID NO: 98062 - RNA, 24 nt, Human
uuaguagagacaggguuucaccau

SEQ ID NO: 98063 - RNA, 22 nt, Human
uuaguggcgcgaugacggcucu

SEQ ID NO: 98064 - RNA, 21 nt, Human
uugagacagucuggcucuguc

SEQ ID NO: 98065 - RNA, 23 nt, Human
uugcugcucuccugcuggggggg

SEQ ID NO: 98066 - RNA, 18 nt, Human
uuguauuuuuaguagaga

SEQ ID NO: 98067 - RNA, 24 nt, Human
uuucaccauguuggccaggcuggu

SEQ ID NO: 98068 - RNA, 24 nt, Human
uuuuuaguagagacaggguuucac

SEQ ID NO: 98069 - RNA, 25 nt, Human
aaacaaauacauuuuauugcacaua

SEQ ID NO: 98070 - RNA, 22 nt, Human
aagauuacagaauauuuccuaa

SEQ ID NO: 98071 - RNA, 19 nt, Human
aaguauugaaguauugcac

SEQ ID NO: 98072 - RNA, 21 nt, Human
aauaaaagcccacagugcaga

SEQ ID NO: 98073 - RNA, 19 nt, Human
accaacaucuaacuccuuc

SEQ ID NO: 98074 - RNA, 22 nt, Human
acugaacacaaaauacaaacaa

SEQ ID NO: 98075 - RNA, 20 nt, Human
aggucugaagauuacagaau

SEQ ID NO: 98076 - RNA, 24 nt, Human
auucuacuuuuauuucacauauau

SEQ ID NO: 98077 - RNA, 23 nt, Human
cacuguauaaaagauuauaaagg

SEQ ID NO: 98078 - RNA, 22 nt, Human
cauggcaauaaaagcccacagu

SEQ ID NO: 98079 - RNA, 23 nt, Human
cucauagucuuugcuuaugucuu

SEQ ID NO: 98080 - RNA, 23 nt, Human
cugucuacagcugaggaaguaaa

SEQ ID NO: 98081 - RNA, 22 nt, Human
uaaaagcccacagugcagauuu

SEQ ID NO: 98082 - RNA, 22 nt, Human
uacaaaucuuaguuucauaagc

SEQ ID NO: 98083 - RNA, 24 nt, Human
uacugaacacaaaauacaaacaaa

SEQ ID NO: 98084 - RNA, 25 nt, Human
uaguuaaucucaggucaagucaagc

SEQ ID NO: 98085 - RNA, 23 nt, Human
uauaaaggcaaagaaauauguac

SEQ ID NO: 98086 - RNA, 19 nt, Human
uccaacacuauucuauguc

SEQ ID NO: 98087 - RNA, 18 nt, Human
ucggaccacagagcagcc

SEQ ID NO: 98088 - RNA, 20 nt, Human
ucuauggaagacuucggacc

SEQ ID NO: 98089 - RNA, 20 nt, Human
ugaacacaaaauacaaacaa

SEQ ID NO: 98090 - RNA, 18 nt, Human
ugcaugaagggcucucac

SEQ ID NO: 98091 - RNA, 20 nt, Human
uucccaagacacuauaaaaa

SEQ ID NO: 98092 - RNA, 25 nt, Human
uucucuguaagacacuguauaaaag

SEQ ID NO: 98093 - RNA, 21 nt, Human
uuucacaaagucucuauggaa

SEQ ID NO: 98094 - RNA, 20 nt, Human
uuucauaagcauuuguccau

SEQ ID NO: 98095 - RNA, 24 nt, Human
uuuuuuuuuuuuuuuuuuguguuu

SEQ ID NO: 98096 - RNA, 27 nt, Human
uuuuuuuuuuuuuuuuuuuuuuugggg

SEQ ID NO: 98097 - RNA, 27 nt, Human
aaggugcuggggggaccacaggcggga

SEQ ID NO: 98098 - RNA, 18 nt, Human
aggaagcacagaagccuu

SEQ ID NO: 98099 - RNA, 18 nt, Human
aggguggggggcauggug

SEQ ID NO: 98100 - RNA, 23 nt, Human
cacagaaaagcccuccuuggcca

SEQ ID NO: 98101 - RNA, 20 nt, Human
caggguggggggcauggugg

SEQ ID NO: 98102 - RNA, 20 nt, Human
cccacagaaaagcccuccuu

SEQ ID NO: 98103 - RNA, 27 nt, Human
cccaggcccaucccacagaaaagcccc

SEQ ID NO: 98104 - RNA, 22 nt, Human
ccccacacccagcucucccagc

SEQ ID NO: 98105 - RNA, 18 nt, Human
ccgguggcggcgugggcu

SEQ ID NO: 98106 - RNA, 18 nt, Human
cucccgguggcggcgugg

SEQ ID NO: 98107 - RNA, 23 nt, Human
cuccucccguccucugccgggcu

SEQ ID NO: 98108 - RNA, 29 nt, Human
cugcagccgugggaggacagcagggugaa

SEQ ID NO: 98109 - RNA, 24 nt, Human
cugccugugugucugcuuggagcu

SEQ ID NO: 98110 - RNA, 20 nt, Human
gcagggaaggugcugggggg

SEQ ID NO: 98111 - RNA, 19 nt, Human
gcuggggggaccacaggcg

SEQ ID NO: 98112 - RNA, 19 nt, Human
gggccggcacugacaggag

SEQ ID NO: 98113 - RNA, 20 nt, Human
guccacugagaagcaccgug

SEQ ID NO: 98114 - RNA, 21 nt, Human
gucuccucccguccucugccg

SEQ ID NO: 98115 - RNA, 22 nt, Human
gugagggguguggcaggguggg

SEQ ID NO: 98116 - RNA, 19 nt, Human
ucccacagaaaagcccucc

SEQ ID NO: 98117 - RNA, 22 nt, Human
uccccacacccagcucucccag

SEQ ID NO: 98118 - RNA, 19 nt, Human
ugagaagcaccguggggcc

SEQ ID NO: 98119 - RNA, 18 nt, Human
ugagggguguggcagggu

SEQ ID NO: 98120 - RNA, 19 nt, Human
ugagggguguggcagggug

SEQ ID NO: 98121 - RNA, 24 nt, Human
ugccuggggguugggggccugcug

SEQ ID NO: 98122 - RNA, 20 nt, Human
ugcuggggggaccacaggcg

SEQ ID NO: 98123 - RNA, 21 nt, Human
uggagcugggcacggcugggc

SEQ ID NO: 98124 - RNA, 19 nt, Human
uggcaggguggggggcaug

SEQ ID NO: 98125 - RNA, 21 nt, Human
uggccauggucgggagaugca

SEQ ID NO: 98126 - RNA, 22 nt, Human
uggcggcgugggcugggcaggg

SEQ ID NO: 98127 - RNA, 19 nt, Human
ugggcugggcagggaaggc

SEQ ID NO: 98128 - RNA, 24 nt, Human
uggggccuggccacugccugugug

SEQ ID NO: 98129 - RNA, 24 nt, Human
ugggugggccggcacugacaggag

SEQ ID NO: 98130 - RNA, 23 nt, Human
ugguggggcagggaaggugcugg

SEQ ID NO: 98131 - RNA, 23 nt, Human
aaagucccuucuagagguggcuu

SEQ ID NO: 98132 - RNA, 18 nt, Human
agacuggcuggaaguguc

SEQ ID NO: 98133 - RNA, 24 nt, Human
agccgguggcuggcacugcccaga

SEQ ID NO: 98134 - RNA, 23 nt, Human
agggagcaggcagcagacuggcu

SEQ ID NO: 98135 - RNA, 24 nt, Human
agugucaacucagugcaaaggacu

SEQ ID NO: 98136 - RNA, 24 nt, Human
cacucgucuucccugucauccacu

SEQ ID NO: 98137 - RNA, 26 nt, Human
ccagaaugaaggagauggucugagga

SEQ ID NO: 98138 - RNA, 20 nt, Human
ccaggccucagguuaggaag

SEQ ID NO: 98139 - RNA, 25 nt, Human
ccccacucgucuucccugucaucca

SEQ ID NO: 98140 - RNA, 21 nt, Human
cccgugcgcccuccuccccca

SEQ ID NO: 98141 - RNA, 20 nt, Human
ccucccuugccccucucguc

SEQ ID NO: 98142 - RNA, 21 nt, Human
ccucccuugccccucucgucu

SEQ ID NO: 98143 - RNA, 19 nt, Human
cgcccuccucccccacccc

SEQ ID NO: 98144 - RNA, 23 nt, Human
cuagagguggcuucacccuuuuc

SEQ ID NO: 98145 - RNA, 19 nt, Human
cucagcccgugcgcccucc

SEQ ID NO: 98146 - RNA, 18 nt, Human
gaaguucuuggggggagg

SEQ ID NO: 98147 - RNA, 19 nt, Human
gcccuccucccccacccca

SEQ ID NO: 98148 - RNA, 27 nt, Human
gcucagcccgugcgcccuccuccccca

SEQ ID NO: 98149 - RNA, 22 nt, Human
gcuccgggccgccccuauccgc

SEQ ID NO: 98150 - RNA, 24 nt, Human
ggcacugcccagaaugaaggagau

SEQ ID NO: 98151 - RNA, 22 nt, Human
ggggggaggccaaagucccuuc

SEQ ID NO: 98152 - RNA, 22 nt, Human
uagagguggcuucacccuuuuc

SEQ ID NO: 98153 - RNA, 23 nt, Human
ucccaggaacaguccaguuucag

SEQ ID NO: 98154 - RNA, 19 nt, Human
ucugaggaaccccaggccu

SEQ ID NO: 98155 - RNA, 19 nt, Human
ucuguguucccucugugac

SEQ ID NO: 98156 - RNA, 18 nt, Human
ugagcagcucugccccca

SEQ ID NO: 98157 - RNA, 18 nt, Human
ugccuggcuggcuccggg

SEQ ID NO: 98158 - RNA, 18 nt, Human
uggcuccgggccgccccu

SEQ ID NO: 98159 - RNA, 20 nt, Human
uggcuggaagugucaggugu

SEQ ID NO: 98160 - RNA, 22 nt, Human
uggcuggcuccgggccgccccu

SEQ ID NO: 98161 - RNA, 20 nt, Human
ugggaaguucuuggggggag

SEQ ID NO: 98162 - RNA, 23 nt, Human
ugggaaguucuuggggggaggcc

SEQ ID NO: 98163 - RNA, 23 nt, Human
ugggucagccgguggcuggcacu

SEQ ID NO: 98164 - RNA, 23 nt, Human
uucccugucauccacuguccucc

SEQ ID NO: 98165 - RNA, 21 nt, Human
aaacauuggcucuuccuuggg

SEQ ID NO: 98166 - RNA, 27 nt, Human
aaagccaaggccaaaggcuggagggga

SEQ ID NO: 98167 - RNA, 27 nt, Human
aaauaggcuagaaaagccaaggccaaa

SEQ ID NO: 98168 - RNA, 24 nt, Human
aagcuuggcugagcagagggaacu

SEQ ID NO: 98169 - RNA, 26 nt, Human
agccuuguguuggaggcugcugugau

SEQ ID NO: 98170 - RNA, 18 nt, Human
aggcaccaggucucaugg

SEQ ID NO: 98171 - RNA, 18 nt, Human
cagcagggccuugcugca

SEQ ID NO: 98172 - RNA, 23 nt, Human
cagggugggacaugggggagggg

SEQ ID NO: 98173 - RNA, 25 nt, Human
cauggcccugaaagcugauaacaag

SEQ ID NO: 98174 - RNA, 18 nt, Human
ccaaaggcuggaggggag

SEQ ID NO: 98175 - RNA, 21 nt, Human
ccaaggccaaaggcuggaggg

SEQ ID NO: 98176 - RNA, 18 nt, Human
cuagaaaagccaaggcca

SEQ ID NO: 98177 - RNA, 19 nt, Human
cucguccaugagccuaggu

SEQ ID NO: 98178 - RNA, 18 nt, Human
cugcagguaaauaggcua

SEQ ID NO: 98179 - RNA, 23 nt, Human
gaaaagccaaggccaaaggcugg

SEQ ID NO: 98180 - RNA, 20 nt, Human
gaaagagccaggcaccaggu

SEQ ID NO: 98181 - RNA, 20 nt, Human
gacagauggagauugggcag

SEQ ID NO: 98182 - RNA, 23 nt, Human
gagaggacagucagcauguccag

SEQ ID NO: 98183 - RNA, 22 nt, Human
gaugcuggggaaagggaagaga

SEQ ID NO: 98184 - RNA, 22 nt, Human
gauguugaagaccgccucugcu

SEQ ID NO: 98185 - RNA, 23 nt, Human
gauugggcagcagggccuugcug

SEQ ID NO: 98186 - RNA, 23 nt, Human
gcaggauguugaagaccgccucu

SEQ ID NO: 98187 - RNA, 20 nt, Human
gccuucccaucucguccaug

SEQ ID NO: 98188 - RNA, 20 nt, Human
ggagauugggcagcagggcc

SEQ ID NO: 98189 - RNA, 24 nt, Human
ggaucugucuagcuuuuggccacu

SEQ ID NO: 98190 - RNA, 20 nt, Human
ggggaggggcugggggcuga

SEQ ID NO: 98191 - RNA, 20 nt, Human
ggucuggguguaggguuauc

SEQ ID NO: 98192 - RNA, 20 nt, Human
ggugacgaaagagccaggca

SEQ ID NO: 98193 - RNA, 25 nt, Human
uagcuguguggggcuggcaggaugu

SEQ ID NO: 98194 - RNA, 19 nt, Human
uauggguccaaaacauugg

SEQ ID NO: 98195 - RNA, 24 nt, Human
ucagcauguccagccuggggucug

SEQ ID NO: 98196 - RNA, 21 nt, Human
ucaugggaugagguacagggu

SEQ ID NO: 98197 - RNA, 20 nt, Human
uccaaaacauuggcucuucc

SEQ ID NO: 98198 - RNA, 20 nt, Human
uccuuggggagugaugcugg

SEQ ID NO: 98199 - RNA, 23 nt, Human
ugaaccauggcccugaaagcuga

SEQ ID NO: 98200 - RNA, 23 nt, Human
ugacgaaagagccaggcaccagg

SEQ ID NO: 98201 - RNA, 18 nt, Human
ugagcagagggaacuagg

SEQ ID NO: 98202 - RNA, 18 nt, Human
uggcugagcagagggaac

SEQ ID NO: 98203 - RNA, 24 nt, Human
uggguccaaaacauuggcucuucc

SEQ ID NO: 98204 - RNA, 19 nt, Human
uguguggggcuggcaggau

SEQ ID NO: 98205 - RNA, 25 nt, Human
uguuggaggcugcugugaugucagg

SEQ ID NO: 98206 - RNA, 24 nt, Human
uuaucugcuguuccgacuugguuu

SEQ ID NO: 98207 - RNA, 21 nt, Human
uuccuuggggagugaugcugg

SEQ ID NO: 98208 - RNA, 28 nt, Human
uuggcucuuccuuggggagugaugcugg

SEQ ID NO: 98209 - RNA, 18 nt, Human
agcugagacacuggagcu

SEQ ID NO: 98210 - RNA, 23 nt, Human
agguuacccucccaccccccacu

SEQ ID NO: 98211 - RNA, 24 nt, Human
caaggaggccuggccuggagaaga

SEQ ID NO: 98212 - RNA, 23 nt, Human
cagaucagggaggagggggugac

SEQ ID NO: 98213 - RNA, 24 nt, Human
cagcaggcgggggcagccuggcag

SEQ ID NO: 98214 - RNA, 24 nt, Human
caguuuagagggaagaagaguggg

SEQ ID NO: 98215 - RNA, 19 nt, Human
cccaccccccacuggggga

SEQ ID NO: 98216 - RNA, 22 nt, Human
cccucccaccccccacuggggg

SEQ ID NO: 98217 - RNA, 22 nt, Human
cuggagcugggugcacagcagg

SEQ ID NO: 98218 - RNA, 20 nt, Human
gaaaggcagcggggcguggg

SEQ ID NO: 98219 - RNA, 19 nt, Human
gagcugggugcacagcagg

SEQ ID NO: 98220 - RNA, 22 nt, Human
gaggcagcgauuaagggcucau

SEQ ID NO: 98221 - RNA, 22 nt, Human
ggagcugggugcacagcaggcg

SEQ ID NO: 98222 - RNA, 18 nt, Human
ggaggagggggugacacu

SEQ ID NO: 98223 - RNA, 18 nt, Human
ggcagcggggcgugggga

SEQ ID NO: 98224 - RNA, 25 nt, Human
uccccuagaggcagcgauuaagggc

SEQ ID NO: 98225 - RNA, 18 nt, Human
ugacuaaggaagccccca

SEQ ID NO: 98226 - RNA, 19 nt, Human
ugacuaaggaagcccccag

SEQ ID NO: 98227 - RNA, 18 nt, Human
uggccuggagaagaguga

SEQ ID NO: 98228 - RNA, 19 nt, Human
ugggaaaggcagcggggcg

SEQ ID NO: 98229 - RNA, 23 nt, Human
ugggugcacagcaggcgggggca

SEQ ID NO: 98230 - RNA, 20 nt, Human
aacugcaccggcugcagccu

SEQ ID NO: 98231 - RNA, 19 nt, Human
aagcagucacugaggccag

SEQ ID NO: 98232 - RNA, 24 nt, Human
aagcagucacugaggccagggagc

SEQ ID NO: 98233 - RNA, 19 nt, Human
accccaaacccgugacaac

SEQ ID NO: 98234 - RNA, 20 nt, Human
acugcucuguccccgacccc

SEQ ID NO: 98235 - RNA, 22 nt, Human
agcuggggaccaggggcuggag

SEQ ID NO: 98236 - RNA, 24 nt, Human
aggcagcuccgaagcagucacuga

SEQ ID NO: 98237 - RNA, 18 nt, Human
caccucauagcaccccca

SEQ ID NO: 98238 - RNA, 23 nt, Human
ccagcuucagaggccagcugggg

SEQ ID NO: 98239 - RNA, 24 nt, Human
ccaguuggguccauggcccuuccc

SEQ ID NO: 98240 - RNA, 22 nt, Human
ccccaaacccgugacaacgucc

SEQ ID NO: 98241 - RNA, 18 nt, Human
ccccagagaacucccucc

SEQ ID NO: 98242 - RNA, 21 nt, Human
cccccaucccaugugugggga

SEQ ID NO: 98243 - RNA, 20 nt, Human
cccgaccccaaacccgugac

SEQ ID NO: 98244 - RNA, 21 nt, Human
cccgaccccaaacccgugacc

SEQ ID NO: 98245 - RNA, 19 nt, Human
cccgugacaacguccgagg

SEQ ID NO: 98246 - RNA, 20 nt, Human
cccucggcuccgaguccauu

SEQ ID NO: 98247 - RNA, 18 nt, Human
cccuuuggcaagagcugg

SEQ ID NO: 98248 - RNA, 19 nt, Human
ccucauagcacccccagaa

SEQ ID NO: 98249 - RNA, 19 nt, Human
ccucggcuccgaguccauu

SEQ ID NO: 98250 - RNA, 21 nt, Human
ccugcacccaggucauggggc

SEQ ID NO: 98251 - RNA, 20 nt, Human
ccuguuguccuucuacucca

SEQ ID NO: 98252 - RNA, 20 nt, Human
ccuuuggcaagagcugggga

SEQ ID NO: 98253 - RNA, 22 nt, Human
cucauagcacccccagaaggcu

SEQ ID NO: 98254 - RNA, 23 nt, Human
cucccccaucccaugugugggga

SEQ ID NO: 98255 - RNA, 21 nt, Human
cuggaccagucucugccuccc

SEQ ID NO: 98256 - RNA, 24 nt, Human
cuucuacuccaggcccuuuggcaa

SEQ ID NO: 98257 - RNA, 23 nt, Human
gaacucccuccaaguugcugccc

SEQ ID NO: 98258 - RNA, 18 nt, Human
gcacuggaggccagggcc

SEQ ID NO: 98259 - RNA, 22 nt, Human
gccagcuucagaggccagcugg

SEQ ID NO: 98260 - RNA, 23 nt, Human
gccagcuucagaggccagcuggg

SEQ ID NO: 98261 - RNA, 18 nt, Human
gccagggccucccugggg

SEQ ID NO: 98262 - RNA, 21 nt, Human
gccagggccucccuggggugg

SEQ ID NO: 98263 - RNA, 21 nt, Human
gcuggggaccaggggcuggag

SEQ ID NO: 98264 - RNA, 22 nt, Human
ggaccagucucugccuccccca

SEQ ID NO: 98265 - RNA, 21 nt, Human
ggaucaccucauagcaccccc

SEQ ID NO: 98266 - RNA, 20 nt, Human
ggccagcuucagaggccagc

SEQ ID NO: 98267 - RNA, 31 nt, Human
ggccagcuucagaggccagcugggggguccc

SEQ ID NO: 98268 - RNA, 23 nt, Human
gggaaggcacuggaggccagggc

SEQ ID NO: 98269 - RNA, 23 nt, Human
gggaggcccucggcuccgagucc

SEQ ID NO: 98270 - RNA, 26 nt, Human
ggggcuggagacaaauggcagcucug

SEQ ID NO: 98271 - RNA, 21 nt, Human
gggggguccaggaaagggguu

SEQ ID NO: 98272 - RNA, 20 nt, Human
gggguugggccaugagccag

SEQ ID NO: 98273 - RNA, 21 nt, Human
ggguccaggaaagggguuggg

SEQ ID NO: 98274 - RNA, 19 nt, Human
gggugggagugguugcggg

SEQ ID NO: 98275 - RNA, 19 nt, Human
ucacugaggccagggagcc

SEQ ID NO: 98276 - RNA, 22 nt, Human
uccaggaaagggguugggccau

SEQ ID NO: 98277 - RNA, 23 nt, Human
uccaggaaagggguugggccaug

SEQ ID NO: 98278 - RNA, 22 nt, Human
uccauggcccuucccaagcucu

SEQ ID NO: 98279 - RNA, 24 nt, Human
ucccaagcucugcugggaggcccu

SEQ ID NO: 98280 - RNA, 18 nt, Human
uccccagagaacucccuc

SEQ ID NO: 98281 - RNA, 20 nt, Human
uccccagagaacucccucca

SEQ ID NO: 98282 - RNA, 19 nt, Human
ucucugccucccccauccc

SEQ ID NO: 98283 - RNA, 23 nt, Human
ugaggccagggagccugcaccca

SEQ ID NO: 98284 - RNA, 18 nt, Human
ugcucuguccccgacccc

SEQ ID NO: 98285 - RNA, 18 nt, Human
ugcugggaggcccucggc

SEQ ID NO: 98286 - RNA, 22 nt, Human
uggaggaaaacguguaacugca

SEQ ID NO: 98287 - RNA, 24 nt, Human
uggaggccagggccucccuggggu

SEQ ID NO: 98288 - RNA, 21 nt, Human
uggcaagagcuggggaccagg

SEQ ID NO: 98289 - RNA, 22 nt, Human
uggggcccaguuggguccaugg

SEQ ID NO: 98290 - RNA, 24 nt, Human
ugggggguccaggaaagggguugg

SEQ ID NO: 98291 - RNA, 19 nt, Human
uguaacugcaccggcugca

SEQ ID NO: 98292 - RNA, 20 nt, Human
aagaaugccucaugaucccc

SEQ ID NO: 98293 - RNA, 23 nt, Human
agaauggaaacauggcaaaagaa

SEQ ID NO: 98294 - RNA, 25 nt, Human
agaauggaaacauggcaaaagaaga

SEQ ID NO: 98295 - RNA, 19 nt, Human
agcuuaaucugaaagaggu

SEQ ID NO: 98296 - RNA, 23 nt, Human
aggguguuccugggucuccaaag

SEQ ID NO: 98297 - RNA, 23 nt, Human
auuuccccuucuaacuucuguua

SEQ ID NO: 98298 - RNA, 21 nt, Human
caagauggcagaauggaaaca

SEQ ID NO: 98299 - RNA, 24 nt, Human
caauugcucacguagaagacccuc

SEQ ID NO: 98300 - RNA, 23 nt, Human
cacuuuuucuuuaaauccuuuga

SEQ ID NO: 98301 - RNA, 23 nt, Human
cagaucuuuucagccccuugcuu

SEQ ID NO: 98302 - RNA, 18 nt, Human
cagggcacuucccaggug

SEQ ID NO: 98303 - RNA, 20 nt, Human
caggugcaaaacaggcaggg

SEQ ID NO: 98304 - RNA, 20 nt, Human
ccagaagagaugacggaggc

SEQ ID NO: 98305 - RNA, 23 nt, Human
ccccacgauccauguaucccaga

SEQ ID NO: 98306 - RNA, 23 nt, Human
gauccccacgauccauguauccc

SEQ ID NO: 98307 - RNA, 22 nt, Human
gaugacggaggcuaccuucaga

SEQ ID NO: 98308 - RNA, 21 nt, Human
gcauauggggagaaaggagag

SEQ ID NO: 98309 - RNA, 18 nt, Human
gguuguggauuuaguuuc

SEQ ID NO: 98310 - RNA, 26 nt, Human
guuacauuaagcaaauugcauauggg

SEQ ID NO: 98311 - RNA, 18 nt, Human
uaagaaggugagguagug

SEQ ID NO: 98312 - RNA, 21 nt, Human
uaagaccagggcacuucccag

SEQ ID NO: 98313 - RNA, 19 nt, Human
uaaucuucagagaggcgac

SEQ ID NO: 98314 - RNA, 19 nt, Human
uacauuaagcaaauugcau

SEQ ID NO: 98315 - RNA, 23 nt, Human
uagggucaaaagugaaagccaac

SEQ ID NO: 98316 - RNA, 25 nt, Human
ucagaucuuuucagccccuugcuuc

SEQ ID NO: 98317 - RNA, 20 nt, Human
uccccacgauccauguaucc

SEQ ID NO: 98318 - RNA, 19 nt, Human
uccugggucuccaaagguu

SEQ ID NO: 98319 - RNA, 22 nt, Human
ugaaagagguuuuuaagaaggu

SEQ ID NO: 98320 - RNA, 19 nt, Human
ugaaagccaacaauuugga

SEQ ID NO: 98321 - RNA, 21 nt, Human
uggcagaauggaaacauggca

SEQ ID NO: 98322 - RNA, 24 nt, Human
uggcagaauggaaacauggcaaaa

SEQ ID NO: 98323 - RNA, 19 nt, Human
uggggagaaaggagaggga

SEQ ID NO: 98324 - RNA, 21 nt, Human
ugggucuccaaagguugugga

SEQ ID NO: 98325 - RNA, 22 nt, Human
uuacagucuauaaagcaaugac

SEQ ID NO: 98326 - RNA, 19 nt, Human
uucagaucuuuucagcccc

SEQ ID NO: 98327 - RNA, 21 nt, Human
aacaaaaacaaaaccccaaaa

SEQ ID NO: 98328 - RNA, 26 nt, Human
aacaggaaaguucagaacaaaaacaa

SEQ ID NO: 98329 - RNA, 23 nt, Human
aaggaccccugcccuccaguccc

SEQ ID NO: 98330 - RNA, 24 nt, Human
aaggaccccugcccuccagucccc

SEQ ID NO: 98331 - RNA, 21 nt, Human
aauaccggaaacguuauauac

SEQ ID NO: 98332 - RNA, 25 nt, Human
acaaaaacaaaaccccaaaaguaaa

SEQ ID NO: 98333 - RNA, 24 nt, Human
acaaaaccccaaaaguaaaaaggc

SEQ ID NO: 98334 - RNA, 18 nt, Human
accccaaaaguaaaaagg

SEQ ID NO: 98335 - RNA, 22 nt, Human
accggggcaggagggaacaagg

SEQ ID NO: 98336 - RNA, 24 nt, Human
agaaaggacaggugcaugaaggca

SEQ ID NO: 98337 - RNA, 19 nt, Human
agagcacccugggacccca

SEQ ID NO: 98338 - RNA, 20 nt, Human
agcccugaaaagguaacagg

SEQ ID NO: 98339 - RNA, 22 nt, Human
caaaaccccaaaaguaaaaagg

SEQ ID NO: 98340 - RNA, 25 nt, Human
caaaaguaaaaaggcuacguguagc

SEQ ID NO: 98341 - RNA, 21 nt, Human
caagacccaggcccgucucca

SEQ ID NO: 98342 - RNA, 20 nt, Human
cacagccccccaaguuggcc

SEQ ID NO: 98343 - RNA, 20 nt, Human
cagaaggaccccugcccucc

SEQ ID NO: 98344 - RNA, 19 nt, Human
cagagagugcccacagacu

SEQ ID NO: 98345 - RNA, 20 nt, Human
caggcggugauggcccccuc

SEQ ID NO: 98346 - RNA, 19 nt, Human
caggugcaugaaggcagag

SEQ ID NO: 98347 - RNA, 23 nt, Human
cauacacgccaccuacaugugac

SEQ ID NO: 98348 - RNA, 18 nt, Human
ccccaaaaguaaaaaggc

SEQ ID NO: 98349 - RNA, 18 nt, Human
ccccagggcagaaggacc

SEQ ID NO: 98350 - RNA, 19 nt, Human
ccccagggcagaaggaccc

SEQ ID NO: 98351 - RNA, 22 nt, Human
ccccagggcagaaggaccccug

SEQ ID NO: 98352 - RNA, 25 nt, Human
cccccaaguuggccaagcugagucu

SEQ ID NO: 98353 - RNA, 21 nt, Human
cccugggaccccagggcagag

SEQ ID NO: 98354 - RNA, 18 nt, Human
ccggggcaggagggaaca

SEQ ID NO: 98355 - RNA, 18 nt, Human
ccuccaguccccaagacc

SEQ ID NO: 98356 - RNA, 21 nt, Human
ccuccaguccccaagacccag

SEQ ID NO: 98357 - RNA, 23 nt, Human
ccuccaguccccaagacccaggc

SEQ ID NO: 98358 - RNA, 22 nt, Human
ccuguggccagagcugcggggc

SEQ ID NO: 98359 - RNA, 23 nt, Human
cucauacacgccaccuacaugug

SEQ ID NO: 98360 - RNA, 23 nt, Human
cuccaguccccaagacccaggcc

SEQ ID NO: 98361 - RNA, 19 nt, Human
cucggcucucgaaccgggg

SEQ ID NO: 98362 - RNA, 25 nt, Human
gaaaggacaggugcaugaaggcaga

SEQ ID NO: 98363 - RNA, 25 nt, Human
gaacaaggugagcugugcagcccac

SEQ ID NO: 98364 - RNA, 20 nt, Human
gaaggcagagagugcccaca

SEQ ID NO: 98365 - RNA, 18 nt, Human
gacccaggcccgucucca

SEQ ID NO: 98366 - RNA, 20 nt, Human
gaccccugcccuccaguccc

SEQ ID NO: 98367 - RNA, 20 nt, Human
gcacugcagaggucccugug

SEQ ID NO: 98368 - RNA, 18 nt, Human
gcccgucuccacucauac

SEQ ID NO: 98369 - RNA, 20 nt, Human
gccugcggggcgcgggccgg

SEQ ID NO: 98370 - RNA, 21 nt, Human
gcggcgcgggcggcgggcggc

SEQ ID NO: 98371 - RNA, 23 nt, Human
ggacgggcgggcuggguggacac

SEQ ID NO: 98372 - RNA, 23 nt, Human
ggcagaaggaccccugcccucca

SEQ ID NO: 98373 - RNA, 18 nt, Human
ggcggcgcgggcggcggg

SEQ ID NO: 98374 - RNA, 25 nt, Human
ggcggcgcgggcggcgggcggccug

SEQ ID NO: 98375 - RNA, 18 nt, Human
ggggcaggagggaacaag

SEQ ID NO: 98376 - RNA, 20 nt, Human
gguaacaggaaaguucagaa

SEQ ID NO: 98377 - RNA, 21 nt, Human
guaaaaaggcuacguguagca

SEQ ID NO: 98378 - RNA, 25 nt, Human
uagaaaggacaggugcaugaaggca

SEQ ID NO: 98379 - RNA, 18 nt, Human
ucagaacaaaaacaaaac

SEQ ID NO: 98380 - RNA, 22 nt, Human
ucagaacaaaaacaaaacccca

SEQ ID NO: 98381 - RNA, 19 nt, Human
uccccaagacccaggcccg

SEQ ID NO: 98382 - RNA, 21 nt, Human
uccccaagacccaggcccguc

SEQ ID NO: 98383 - RNA, 21 nt, Human
ucucugggcgaguggcuccca

SEQ ID NO: 98384 - RNA, 18 nt, Human
ugcagcccacaggacggg

SEQ ID NO: 98385 - RNA, 21 nt, Human
uggccaagcugagucucuggg

SEQ ID NO: 98386 - RNA, 20 nt, Human
uggcucccaggagaggccug

SEQ ID NO: 98387 - RNA, 19 nt, Human
ugggaccccagggcagaag

SEQ ID NO: 98388 - RNA, 19 nt, Human
ugggaccccagggcagaag

SEQ ID NO: 98389 - RNA, 18 nt, Human
ugggcgaguggcucccag

SEQ ID NO: 98390 - RNA, 21 nt, Human
uucagaacaaaaacaaaaccc

SEQ ID NO: 98391 - RNA, 20 nt, Human
aaaaacacuaaaucaacuug

SEQ ID NO: 98392 - RNA, 22 nt, Human
aaaacacagaaaauucaaagag

SEQ ID NO: 98393 - RNA, 26 nt, Human
aaaacaccaucaucauagcaaggaua

SEQ ID NO: 98394 - RNA, 24 nt, Human
aaacauccaugcaacacuucguga

SEQ ID NO: 98395 - RNA, 19 nt, Human
aacaauggcuaaaacaucc

SEQ ID NO: 98396 - RNA, 21 nt, Human
aaccaagaagggaagggccca

SEQ ID NO: 98397 - RNA, 25 nt, Human
aaggaacuugcucaagaaguuugua

SEQ ID NO: 98398 - RNA, 24 nt, Human
acaauggagaaagcagacaccaga

SEQ ID NO: 98399 - RNA, 28 nt, Human
acaccagaaggaacuugcuccccgaggg

SEQ ID NO: 98400 - RNA, 18 nt, Human
acccucucauccccaaaa

SEQ ID NO: 98401 - RNA, 19 nt, Human
acucauuuuuccuauccca

SEQ ID NO: 98402 - RNA, 19 nt, Human
acugcaccgucagcccagc

SEQ ID NO: 98403 - RNA, 23 nt, Human
agaaaauucaaagagaugucccc

SEQ ID NO: 98404 - RNA, 23 nt, Human
agaaagcagacaccagaaggaac

SEQ ID NO: 98405 - RNA, 21 nt, Human
agaagaaccugcagaaauccu

SEQ ID NO: 98406 - RNA, 24 nt, Human
agagguaaaaacacuaaaucaacu

SEQ ID NO: 98407 - RNA, 24 nt, Human
agcacccucucauccccaaaacac

SEQ ID NO: 98408 - RNA, 19 nt, Human
agcugcaucucaccauagc

SEQ ID NO: 98409 - RNA, 20 nt, Human
agguggccauggagaagcag

SEQ ID NO: 98410 - RNA, 25 nt, Human
agucccuucugccagcggcucccgu

SEQ ID NO: 98411 - RNA, 19 nt, Human
auaaaacagaaaaacaccc

SEQ ID NO: 98412 - RNA, 25 nt, Human
auaaaacagaaaaacacccuucuuc

SEQ ID NO: 98413 - RNA, 19 nt, Human
caaacaauggaaaacauga

SEQ ID NO: 98414 - RNA, 18 nt, Human
caagacagagguaaaaac

SEQ ID NO: 98415 - RNA, 23 nt, Human
cacccucucauccccaaaacacc

SEQ ID NO: 98416 - RNA, 19 nt, Human
cacccucucauccccaaag

SEQ ID NO: 98417 - RNA, 21 nt, Human
cagcuguccucaggagucugu

SEQ ID NO: 98418 - RNA, 19 nt, Human
caggaaaggcuucuuggua

SEQ ID NO: 98419 - RNA, 23 nt, Human
cauauaacucagcaauaaaugcc

SEQ ID NO: 98420 - RNA, 18 nt, Human
ccaacaauggcuaaaaca

SEQ ID NO: 98421 - RNA, 26 nt, Human
ccaagacagagguaaaaacacuaaau

SEQ ID NO: 98422 - RNA, 21 nt, Human
ccagcggcucccgugugucca

SEQ ID NO: 98423 - RNA, 19 nt, Human
ccccaagaugcagaagagg

SEQ ID NO: 98424 - RNA, 20 nt, Human
ccccugagccucagcuucag

SEQ ID NO: 98425 - RNA, 21 nt, Human
cccguguguccauaucuugga

SEQ ID NO: 98426 - RNA, 20 nt, Human
cccuucugccagcggcuccc

SEQ ID NO: 98427 - RNA, 19 nt, Human
ccucucauccccaaaacac

SEQ ID NO: 98428 - RNA, 24 nt, Human
cuucucccucucuauguccaggcu

SEQ ID NO: 98429 - RNA, 24 nt, Human
cuucuuuguuucaaacaauggaaa

SEQ ID NO: 98430 - RNA, 22 nt, Human
cuugcucaagaucaugcaccca

SEQ ID NO: 98431 - RNA, 20 nt, Human
cuuuguacacagauuacucc

SEQ ID NO: 98432 - RNA, 22 nt, Human
gaaagcagacaccagaaggaac

SEQ ID NO: 98433 - RNA, 18 nt, Human
gaagucccuucugccagc

SEQ ID NO: 98434 - RNA, 23 nt, Human
gaagucccuucugccagcggcuc

SEQ ID NO: 98435 - RNA, 19 nt, Human
gagaagcagcaguggccuc

SEQ ID NO: 98436 - RNA, 27 nt, Human
gaucuucauuagcccaugcaacagccu

SEQ ID NO: 98437 - RNA, 19 nt, Human
gaugccaucuucagcguag

SEQ ID NO: 98438 - RNA, 22 nt, Human
gcaaaacacagaaaauucaaag

SEQ ID NO: 98439 - RNA, 20 nt, Human
gcacccucucauccccaaaa

SEQ ID NO: 98440 - RNA, 20 nt, Human
ggagaaagcagacaccagaa

SEQ ID NO: 98441 - RNA, 18 nt, Human
ggcgagcacccagacugc

SEQ ID NO: 98442 - RNA, 19 nt, Human
uaaaaacacuaaaucaacu

SEQ ID NO: 98443 - RNA, 26 nt, Human
uaaaaacacuaaaucaacuugguauc

SEQ ID NO: 98444 - RNA, 21 nt, Human
uaaaacagaaaaacacccuuc

SEQ ID NO: 98445 - RNA, 23 nt, Human
uacaauggagaaagcagacacca

SEQ ID NO: 98446 - RNA, 23 nt, Human
uagcaggaccuucacaccaggaa

SEQ ID NO: 98447 - RNA, 19 nt, Human
uauaaaacagaaaaacacc

SEQ ID NO: 98448 - RNA, 19 nt, Human
ucaaaagcagaaaaacaca

SEQ ID NO: 98449 - RNA, 22 nt, Human
ucaaaagcagaaaaacacaaac

SEQ ID NO: 98450 - RNA, 20 nt, Human
ucaaacaauggaaaacauga

SEQ ID NO: 98451 - RNA, 19 nt, Human
ucaaagagauguccccaag

SEQ ID NO: 98452 - RNA, 25 nt, Human
ucaaagagauguccccaagaugcag

SEQ ID NO: 98453 - RNA, 21 nt, Human
ucacgggccagcugggggcau

SEQ ID NO: 98454 - RNA, 21 nt, Human
ucagugaggugaaggacuuca

SEQ ID NO: 98455 - RNA, 24 nt, Human
ucgcugaaaagguggccauggaga

SEQ ID NO: 98456 - RNA, 20 nt, Human
ucucuaucuugucacccucu

SEQ ID NO: 98457 - RNA, 23 nt, Human
ucucuaucuugucacccucucug

SEQ ID NO: 98458 - RNA, 20 nt, Human
ucugacuucuucucccucuc

SEQ ID NO: 98459 - RNA, 22 nt, Human
ugaaaagacccugcuggggaau

SEQ ID NO: 98460 - RNA, 24 nt, Human
ugacugaaaaaauguccaggaggu

SEQ ID NO: 98461 - RNA, 21 nt, Human
ugagaaauggauagcacccuc

SEQ ID NO: 98462 - RNA, 24 nt, Human
ugagaaauggauagcacccucuuc

SEQ ID NO: 98463 - RNA, 22 nt, Human
uggagaaagcagacaccagaag

SEQ ID NO: 98464 - RNA, 20 nt, Human
uggagcgcugcgccgcugcc

SEQ ID NO: 98465 - RNA, 23 nt, Human
ugggcugguacagcaaaacacag

SEQ ID NO: 98466 - RNA, 19 nt, Human
uggggugggauccccuucc

SEQ ID NO: 98467 - RNA, 22 nt, Human
ugguacagcaaaacacagaaaa

SEQ ID NO: 98468 - RNA, 21 nt, Human
uguaacagacaggcacacccc

SEQ ID NO: 98469 - RNA, 23 nt, Human
uguguuaggcuacugcuucaaga

SEQ ID NO: 98470 - RNA, 24 nt, Human
uuacauagguaaacuuacaucaug

SEQ ID NO: 98471 - RNA, 19 nt, Human
uuagcccaugcaacagccu

SEQ ID NO: 98472 - RNA, 21 nt, Human
uuagcccaugcaacagccuug

SEQ ID NO: 98473 - RNA, 21 nt, Human
uuagggggacagugaacauau

SEQ ID NO: 98474 - RNA, 22 nt, Human
uuauguaaucacccagguauua

SEQ ID NO: 98475 - RNA, 21 nt, Human
uucaaaagcagaaaaacacaa

SEQ ID NO: 98476 - RNA, 21 nt, Human
uucaaaagcagaaaaacacaa

SEQ ID NO: 98477 - RNA, 22 nt, Human
uucaaaagcagaaaaacacaaa

SEQ ID NO: 98478 - RNA, 24 nt, Human
uucaaaagcagaaaaacacaaacc

SEQ ID NO: 98479 - RNA, 24 nt, Human
uucaggaagaagaaccugcagaaa

SEQ ID NO: 98480 - RNA, 21 nt, Human
uucauggguauaagugcaggu

SEQ ID NO: 98481 - RNA, 27 nt, Human
uuccucacuuccccaaaagaauuccua

SEQ ID NO: 98482 - RNA, 20 nt, Human
uuucccaagacccuuuucca

SEQ ID NO: 98483 - RNA, 20 nt, Human
uuuuccagcugcaucucacc

SEQ ID NO: 98484 - RNA, 21 nt, Human
aaagguugcccaggaacuuac

SEQ ID NO: 98485 - RNA, 21 nt, Human
aagagaccagaugcauaagca

SEQ ID NO: 98486 - RNA, 23 nt, Human
aauaaaccaaaaggaguauuugc

SEQ ID NO: 98487 - RNA, 18 nt, Human
accagaugcauaagcaca

SEQ ID NO: 98488 - RNA, 20 nt, Human
agagcuggaguuacagggag

SEQ ID NO: 98489 - RNA, 22 nt, Human
agcaaggugguaagaauaaacc

SEQ ID NO: 98490 - RNA, 21 nt, Human
aggguagaaaaaaugaauacc

SEQ ID NO: 98491 - RNA, 18 nt, Human
aguaagagaauuaaaguc

SEQ ID NO: 98492 - RNA, 24 nt, Human
caaaugccuguccacuguagcucc

SEQ ID NO: 98493 - RNA, 25 nt, Human
caaggugguaagaauaaaccaacug

SEQ ID NO: 98494 - RNA, 19 nt, Human
cagcauucccaaggaacac

SEQ ID NO: 98495 - RNA, 26 nt, Human
ccaaaaagagaccagaugcauaagca

SEQ ID NO: 98496 - RNA, 21 nt, Human
ccuggagcccccuuauuacuc

SEQ ID NO: 98497 - RNA, 23 nt, Human
ccuguccacuguagcuccaaaaa

SEQ ID NO: 98498 - RNA, 22 nt, Human
cucaugguaaugucuuuuugcc

SEQ ID NO: 98499 - RNA, 23 nt, Human
gcuggaguuacagggaggcuagu

SEQ ID NO: 98500 - RNA, 21 nt, Human
ggaagaaaucaaaaagguugc

SEQ ID NO: 98501 - RNA, 18 nt, Human
ggagcccccuuauuacuc

SEQ ID NO: 98502 - RNA, 19 nt, Human
uaagugugcucugaaguga

SEQ ID NO: 98503 - RNA, 28 nt, Human
ucaaaaagguugcccaggaacuuacaaa

SEQ ID NO: 98504 - RNA, 23 nt, Human
ucugaagugaaaagaagcaguaa

SEQ ID NO: 98505 - RNA, 21 nt, Human
ugccuguccacuguagcucca

SEQ ID NO: 98506 - RNA, 20 nt, Human
ugcugucacaaaugccuguc

SEQ ID NO: 98507 - RNA, 18 nt, Human
uggaguuacagggaggcu

SEQ ID NO: 98508 - RNA, 22 nt, Human
uguagcuccaaaaagagaccag

SEQ ID NO: 98509 - RNA, 30 nt, Human
uugcgagcuccccguaccuccuaaggcucu

SEQ ID NO: 98510 - RNA, 23 nt, Human
uuuuuuuuuuuuuuuuuuauugg

SEQ ID NO: 98511 - RNA, 22 nt, Human
aaagaaaaaguaaucuuuccca

SEQ ID NO: 98512 - RNA, 20 nt, Human
aaagaaagaccugaauggug

SEQ ID NO: 98513 - RNA, 18 nt, Human
aacagcauaguacaaccc

SEQ ID NO: 98514 - RNA, 19 nt, Human
acauauuuuacauguaugu

SEQ ID NO: 98515 - RNA, 20 nt, Human
acauauuuuacauguaugug

SEQ ID NO: 98516 - RNA, 22 nt, Human
acccugacuugcugugugccuu

SEQ ID NO: 98517 - RNA, 21 nt, Human
acuuaaguuuuuucucuccaa

SEQ ID NO: 98518 - RNA, 19 nt, Human
agggauucauuuuccaggg

SEQ ID NO: 98519 - RNA, 21 nt, Human
aggucccuccagcuacugcuc

SEQ ID NO: 98520 - RNA, 24 nt, Human
caacccuauuuaaaaaagaaagac

SEQ ID NO: 98521 - RNA, 18 nt, Human
caagaaguacuuguuccc

SEQ ID NO: 98522 - RNA, 23 nt, Human
caagcaccucacccugagacagg

SEQ ID NO: 98523 - RNA, 22 nt, Human
cacaguaucccagguaucaagg

SEQ ID NO: 98524 - RNA, 24 nt, Human
caccauauuaacaggagauuauuc

SEQ ID NO: 98525 - RNA, 22 nt, Human
caccccgcccccacuaaaauaa

SEQ ID NO: 98526 - RNA, 18 nt, Human
cagguaucaagaaguacu

SEQ ID NO: 98527 - RNA, 28 nt, Human
cauaacagcauaguacaacccuauuuaa

SEQ ID NO: 98528 - RNA, 18 nt, Human
ccagcucucucagcauga

SEQ ID NO: 98529 - RNA, 21 nt, Human
ccccucugcaaugcaagggcu

SEQ ID NO: 98530 - RNA, 22 nt, Human
cccgucaaacacauaaagaaaa

SEQ ID NO: 98531 - RNA, 22 nt, Human
cccuaccgcgaugugcgcacaa

SEQ ID NO: 98532 - RNA, 23 nt, Human
cccugagcugggagacaaggucc

SEQ ID NO: 98533 - RNA, 19 nt, Human
ccugccccuuuccacgccc

SEQ ID NO: 98534 - RNA, 19 nt, Human
cggaaagaaagaccugaau

SEQ ID NO: 98535 - RNA, 21 nt, Human
cggggaagagguugagauggc

SEQ ID NO: 98536 - RNA, 21 nt, Human
cucaaauucuauuuguaaagg

SEQ ID NO: 98537 - RNA, 20 nt, Human
cucauaacagcauaguacaa

SEQ ID NO: 98538 - RNA, 20 nt, Human
cugcaaugcaagggcuggga

SEQ ID NO: 98539 - RNA, 22 nt, Human
gaaaauaaucaggaagaaugua

SEQ ID NO: 98540 - RNA, 22 nt, Human
gaauguacaccauauuaacagg

SEQ ID NO: 98541 - RNA, 20 nt, Human
gacaggggccucggaaagaa

SEQ ID NO: 98542 - RNA, 21 nt, Human
gcacaacaguauugugacccu

SEQ ID NO: 98543 - RNA, 23 nt, Human
gccucaucccuguaucugcuagu

SEQ ID NO: 98544 - RNA, 26 nt, Human
gcuacugcuccaacccugacuugcug

SEQ ID NO: 98545 - RNA, 21 nt, Human
gcucuggccugccccuuucca

SEQ ID NO: 98546 - RNA, 22 nt, Human
ggaggaaagagcccugagcugg

SEQ ID NO: 98547 - RNA, 23 nt, Human
ggccucggaaagaaagaccugaa

SEQ ID NO: 98548 - RNA, 18 nt, Human
gggcugggagagcaauuc

SEQ ID NO: 98549 - RNA, 19 nt, Human
ggguagcucuggccugccc

SEQ ID NO: 98550 - RNA, 20 nt, Human
guccucuuucaugggccccu

SEQ ID NO: 98551 - RNA, 24 nt, Human
guggaggaaagagcccugagcugg

SEQ ID NO: 98552 - RNA, 23 nt, Human
uaaccucacugaugcucaaauuc

SEQ ID NO: 98553 - RNA, 21 nt, Human
uacaccauauuaacaggagau

SEQ ID NO: 98554 - RNA, 24 nt, Human
uagaacucugccaaaggcaguucu

SEQ ID NO: 98555 - RNA, 23 nt, Human
ucaaacacauaaagaaaaaguaa

SEQ ID NO: 98556 - RNA, 18 nt, Human
ucacccugagacaggggc

SEQ ID NO: 98557 - RNA, 21 nt, Human
ucccaccccgcccccacuaaa

SEQ ID NO: 98558 - RNA, 21 nt, Human
ucccagguaucaagaaguacu

SEQ ID NO: 98559 - RNA, 20 nt, Human
ucccccuuuguaaaacgggc

SEQ ID NO: 98560 - RNA, 21 nt, Human
ucccuccagcuacugcuccaa

SEQ ID NO: 98561 - RNA, 23 nt, Human
ucuccaaugggcaggcauugcuu

SEQ ID NO: 98562 - RNA, 23 nt, Human
ucugcaaugcaagggcugggaga

SEQ ID NO: 98563 - RNA, 19 nt, Human
ucugcggguagcucuggcc

SEQ ID NO: 98564 - RNA, 21 nt, Human
ucugggcacaguaucccaggu

SEQ ID NO: 98565 - RNA, 21 nt, Human
ucuuuagagauagagggauuc

SEQ ID NO: 98566 - RNA, 18 nt, Human
ugagcagaggccagggcu

SEQ ID NO: 98567 - RNA, 23 nt, Human
ugagcugggagacaaggucccuc

SEQ ID NO: 98568 - RNA, 24 nt, Human
ugaggggcucuccaacaauugucu

SEQ ID NO: 98569 - RNA, 21 nt, Human
ugccaaaggcaguucucuucu

SEQ ID NO: 98570 - RNA, 26 nt, Human
ugccuccagcucucucagcaugauuc

SEQ ID NO: 98571 - RNA, 18 nt, Human
ugcuccaacccugacuug

SEQ ID NO: 98572 - RNA, 24 nt, Human
uguacaccauauuaacaggagauu

SEQ ID NO: 98573 - RNA, 21 nt, Human
ugugcgcacaacaguauugug

SEQ ID NO: 98574 - RNA, 25 nt, Human
uguuuauucauuaaagccacucaua

SEQ ID NO: 98575 - RNA, 21 nt, Human
uuucccaccccgcccccacua

SEQ ID NO: 98576 - RNA, 22 nt, Human
uuuuuuuuuuuuuuuuucggau

SEQ ID NO: 98577 - RNA, 23 nt, Human
uuuuuuuuuuuuuuuuuuuucgg

SEQ ID NO: 98578 - RNA, 24 nt, Human
aaaaaaacaaacaacaaacaacaa

SEQ ID NO: 98579 - RNA, 23 nt, Human
aaaacaaacaaacaaaaaauccc

SEQ ID NO: 98580 - RNA, 21 nt, Human
aaacaaaacaaaacaaacaaa

SEQ ID NO: 98581 - RNA, 23 nt, Human
aaacaaacaaacaaaaaauccca

SEQ ID NO: 98582 - RNA, 23 nt, Human
aaacaaacaacaaacaacaaaca

SEQ ID NO: 98583 - RNA, 21 nt, Human
aacaaacaacaaacaaaacaa

SEQ ID NO: 98584 - RNA, 22 nt, Human
aaccaaaccccccgcucaacua

SEQ ID NO: 98585 - RNA, 23 nt, Human
aaccaaagcaaaccaaacccccc

SEQ ID NO: 98586 - RNA, 20 nt, Human
aagcaaaaacaaacaacuga

SEQ ID NO: 98587 - RNA, 26 nt, Human
aagcaaaaacaaacaacugaaaaaau

SEQ ID NO: 98588 - RNA, 18 nt, Human
aagcaaaccaaacccccc

SEQ ID NO: 98589 - RNA, 25 nt, Human
acaaaacaaaacaaacaaacaaaaa

SEQ ID NO: 98590 - RNA, 24 nt, Human
acaaacaacaaacaacaaacaaaa

SEQ ID NO: 98591 - RNA, 22 nt, Human
agcaaaaacaaacaacugaaaa

SEQ ID NO: 98592 - RNA, 23 nt, Human
aucaaauugucuucaauauaagu

SEQ ID NO: 98593 - RNA, 22 nt, Human
caaaaaaauucuuuuauguaca

SEQ ID NO: 98594 - RNA, 20 nt, Human
caaaacaaaacaaacaaaca

SEQ ID NO: 98595 - RNA, 23 nt, Human
caaacaacaaacaaaacaaaaca

SEQ ID NO: 98596 - RNA, 25 nt, Human
caaacaacaaacaaaacaaaacaaa

SEQ ID NO: 98597 - RNA, 23 nt, Human
caaacaacaaacaacaaacaaaa

SEQ ID NO: 98598 - RNA, 18 nt, Human
caaaccaaaccccccgcu

SEQ ID NO: 98599 - RNA, 21 nt, Human
caaaccccccgcucaacuaca

SEQ ID NO: 98600 - RNA, 20 nt, Human
caaagcaaaccaaacccccc

SEQ ID NO: 98601 - RNA, 24 nt, Human
caacaaacaacaaacaaaacaaaa

SEQ ID NO: 98602 - RNA, 21 nt, Human
caaugcagaaugaauacuaaa

SEQ ID NO: 98603 - RNA, 20 nt, Human
cagaaugaauacuaaaauua

SEQ ID NO: 98604 - RNA, 18 nt, Human
cugaaaaaauauaaacca

SEQ ID NO: 98605 - RNA, 21 nt, Human
gaaaaaauauaaaccaaagca

SEQ ID NO: 98606 - RNA, 20 nt, Human
gcagcugggacuggcgggac

SEQ ID NO: 98607 - RNA, 20 nt, Human
ggcaaaaaaacaaacaacaa

SEQ ID NO: 98608 - RNA, 18 nt, Human
ggcgcgcgcagcugggac

SEQ ID NO: 98609 - RNA, 18 nt, Human
uaaaagacaaacauaaag

SEQ ID NO: 98610 - RNA, 21 nt, Human
uaaaagacaaacauaaaguaa

SEQ ID NO: 98611 - RNA, 22 nt, Human
uaaaccaaagcaaaccaaaccc

SEQ ID NO: 98612 - RNA, 18 nt, Human
uaacuuagccugggccga

SEQ ID NO: 98613 - RNA, 25 nt, Human
uacaauaucuugucuagagucuagc

SEQ ID NO: 98614 - RNA, 21 nt, Human
uagagucuagcaaauauagua

SEQ ID NO: 98615 - RNA, 20 nt, Human
uagcaaugcagaaugaauac

SEQ ID NO: 98616 - RNA, 24 nt, Human
uaguaccuuucauugcaggauuuc

SEQ ID NO: 98617 - RNA, 24 nt, Human
uaguggcaaaaaaacaaacaacaa

SEQ ID NO: 98618 - RNA, 21 nt, Human
uauaaaccaaagcaaaccaaa

SEQ ID NO: 98619 - RNA, 21 nt, Human
uauaacaagcaaaaacaaaca

SEQ ID NO: 98620 - RNA, 23 nt, Human
uaucuugucuagagucuagcaaa

SEQ ID NO: 98621 - RNA, 22 nt, Human
uggcaaaaaaacaaacaacaaa

SEQ ID NO: 98622 - RNA, 19 nt, Human
uggcgggaccuggcgcugg

SEQ ID NO: 98623 - RNA, 24 nt, Human
uggggggcgcgcgcagcugggacu

SEQ ID NO: 98624 - RNA, 20 nt, Human
uguaucaaauugucuucaau

SEQ ID NO: 98625 - RNA, 23 nt, Human
aaaaguccaggaugggacaagcg

SEQ ID NO: 98626 - RNA, 22 nt, Human
aagcugagccccagcgccuagu

SEQ ID NO: 98627 - RNA, 24 nt, Human
aagcugcuguggccacaggagcug

SEQ ID NO: 98628 - RNA, 19 nt, Human
acacaacgucuacaaccuu

SEQ ID NO: 98629 - RNA, 20 nt, Human
acagauaaaaacacauuaca

SEQ ID NO: 98630 - RNA, 20 nt, Human
agcaggaccaguggcuccga

SEQ ID NO: 98631 - RNA, 18 nt, Human
agcccugggccagccccu

SEQ ID NO: 98632 - RNA, 21 nt, Human
aggaccaguggcuccgacucc

SEQ ID NO: 98633 - RNA, 20 nt, Human
aggcaguggccccaaggggc

SEQ ID NO: 98634 - RNA, 19 nt, Human
agggaggauggauggucuu

SEQ ID NO: 98635 - RNA, 19 nt, Human
aguggcuccgacuccaccc

SEQ ID NO: 98636 - RNA, 25 nt, Human
agugucaacacugaaaaauuuuaac

SEQ ID NO: 98637 - RNA, 23 nt, Human
caacacugaaaaauuuuaacaga

SEQ ID NO: 98638 - RNA, 24 nt, Human
caagguggagcagagaggcagcca

SEQ ID NO: 98639 - RNA, 18 nt, Human
cagcagcaggaccagugg

SEQ ID NO: 98640 - RNA, 19 nt, Human
cagcagcaggaccaguggc

SEQ ID NO: 98641 - RNA, 22 nt, Human
cagcaggaccaguggcuccgac

SEQ ID NO: 98642 - RNA, 20 nt, Human
cagccccuguccccacccug

SEQ ID NO: 98643 - RNA, 19 nt, Human
cagcccugggccagccccu

SEQ ID NO: 98644 - RNA, 21 nt, Human
caggaugggacaagcgcccuu

SEQ ID NO: 98645 - RNA, 19 nt, Human
ccaggaugggacaagcgcc

SEQ ID NO: 98646 - RNA, 21 nt, Human
ccccagcgccuagucucuuca

SEQ ID NO: 98647 - RNA, 20 nt, Human
ccuccugguggcacacggga

SEQ ID NO: 98648 - RNA, 19 nt, Human
cggcaggagcggcagggga

SEQ ID NO: 98649 - RNA, 19 nt, Human
cucuguaccgugagccucc

SEQ ID NO: 98650 - RNA, 24 nt, Human
cugcugggccguccagaaccaugc

SEQ ID NO: 98651 - RNA, 18 nt, Human
cuguaccgugagccucag

SEQ ID NO: 98652 - RNA, 19 nt, Human
gacaugagaggaaaagucc

SEQ ID NO: 98653 - RNA, 20 nt, Human
gagcagagaggcagccagca

SEQ ID NO: 98654 - RNA, 20 nt, Human
gaggguggagggaguagagu

SEQ ID NO: 98655 - RNA, 23 nt, Human
gccagccccuguccccacccugg

SEQ ID NO: 98656 - RNA, 20 nt, Human
gcugagccccagcgccuagu

SEQ ID NO: 98657 - RNA, 21 nt, Human
ggagcagagaggcagccagca

SEQ ID NO: 98658 - RNA, 20 nt, Human
ggaggguggagggaguagag

SEQ ID NO: 98659 - RNA, 22 nt, Human
ggcacacgggaucagggaggga

SEQ ID NO: 98660 - RNA, 22 nt, Human
gggccucugacaucaggacccu

SEQ ID NO: 98661 - RNA, 18 nt, Human
guccuggacuuuggugcc

SEQ ID NO: 98662 - RNA, 18 nt, Human
guggcuccgacuccaccc

SEQ ID NO: 98663 - RNA, 25 nt, Human
uaaaaacacauuacacaacgucuac

SEQ ID NO: 98664 - RNA, 21 nt, Human
uaagagggaagcugagcccca

SEQ ID NO: 98665 - RNA, 24 nt, Human
uacacaacgucuacaaccuucaca

SEQ ID NO: 98666 - RNA, 20 nt, Human
uccaccccacuggguguccu

SEQ ID NO: 98667 - RNA, 23 nt, Human
uccaccccacuggguguccugga

SEQ ID NO: 98668 - RNA, 24 nt, Human
ucucuucaguucugcagcaaagac

SEQ ID NO: 98669 - RNA, 19 nt, Human
ugagaaccuccugcccggc

SEQ ID NO: 98670 - RNA, 22 nt, Human
ugagccucaggcaguggcccca

SEQ ID NO: 98671 - RNA, 18 nt, Human
uggacgaagggaggaugg

SEQ ID NO: 98672 - RNA, 24 nt, Human
uggccccaaggggccucgccaugg

SEQ ID NO: 98673 - RNA, 24 nt, Human
ugggacaagcgcccuuagucuguc

SEQ ID NO: 98674 - RNA, 18 nt, Human
ugguggacgaagggagga

SEQ ID NO: 98675 - RNA, 22 nt, Human
uuaacagauaaaaacacauuac

SEQ ID NO: 98676 - RNA, 21 nt, Human
uuacacaacgucuacaaccuu

SEQ ID NO: 98677 - RNA, 18 nt, Human
uuuuuuuuuuuuuuucug

SEQ ID NO: 98678 - RNA, 19 nt, Human
uuuuuuuuuuuuuuucugu

SEQ ID NO: 98679 - RNA, 25 nt, Human
accccgggcaggcagcagagcagcg

SEQ ID NO: 98680 - RNA, 23 nt, Human
agccuggcuggggccccagacac

SEQ ID NO: 98681 - RNA, 21 nt, Human
aggaaagguggggcagggggg

SEQ ID NO: 98682 - RNA, 19 nt, Human
aggcuggacuuugaaagag

SEQ ID NO: 98683 - RNA, 19 nt, Human
aggcuggggccacugggca

SEQ ID NO: 98684 - RNA, 22 nt, Human
cagcagagcagcggaaacagga

SEQ ID NO: 98685 - RNA, 19 nt, Human
cagguggcuguuacaggca

SEQ ID NO: 98686 - RNA, 20 nt, Human
ccggccagccuggcuggggc

SEQ ID NO: 98687 - RNA, 21 nt, Human
cugcauccugaaacuggcgcg

SEQ ID NO: 98688 - RNA, 21 nt, Human
gaaggaaaggaaagguggggc

SEQ ID NO: 98689 - RNA, 21 nt, Human
gcagagcagcggaaacaggag

SEQ ID NO: 98690 - RNA, 21 nt, Human
gcaggcagcagagcagcggaa

SEQ ID NO: 98691 - RNA, 22 nt, Human
ggaaggaaaggaaagguggggc

SEQ ID NO: 98692 - RNA, 19 nt, Human
ggcaggcagcagagcagcg

SEQ ID NO: 98693 - RNA, 18 nt, Human
ggcagguguccccagggc

SEQ ID NO: 98694 - RNA, 19 nt, Human
ggggggcggcgguguucua

SEQ ID NO: 98695 - RNA, 24 nt, Human
gugcugacucaggcuggaguguaa

SEQ ID NO: 98696 - RNA, 21 nt, Human
guggggcaggggggcggcggu

SEQ ID NO: 98697 - RNA, 26 nt, Human
uaagucccaaggcagguugcuaggag

SEQ ID NO: 98698 - RNA, 23 nt, Human
uaaucuggaaacaucaucuuugc

SEQ ID NO: 98699 - RNA, 21 nt, Human
uccagguggcuguuacaggca

SEQ ID NO: 98700 - RNA, 22 nt, Human
ucuccuagacccugcauccuga

SEQ ID NO: 98701 - RNA, 18 nt, Human
uggcuggggccccagaca

SEQ ID NO: 98702 - RNA, 22 nt, Human
ugguaccccgggcaggcagcag

SEQ ID NO: 98703 - RNA, 19 nt, Human
uguucuaagucccaaggca

SEQ ID NO: 98704 - RNA, 21 nt, Human
aacaaagaaauauauauaaga

SEQ ID NO: 98705 - RNA, 21 nt, Human
aagcuggccgcgcgcucugcc

SEQ ID NO: 98706 - RNA, 23 nt, Human
agaagacgaaguacagcugaagu

SEQ ID NO: 98707 - RNA, 23 nt, Human
caaaaauagacaagaguuaacaa

SEQ ID NO: 98708 - RNA, 24 nt, Human
cggccgcagcggcagcuacaacaa

SEQ ID NO: 98709 - RNA, 24 nt, Human
cucuccgcucaauuuccaagagcc

SEQ ID NO: 98710 - RNA, 20 nt, Human
cugccaaguuggccccucgc

SEQ ID NO: 98711 - RNA, 19 nt, Human
gaaauuagaagacgaagua

SEQ ID NO: 98712 - RNA, 18 nt, Human
gagccagcuuugaagcca

SEQ ID NO: 98713 - RNA, 22 nt, Human
uaacaaagaaauauauauaaga

SEQ ID NO: 98714 - RNA, 21 nt, Human
uccccgcacgcauagucccug

SEQ ID NO: 98715 - RNA, 21 nt, Human
ucccuggagggcgcucucugc

SEQ ID NO: 98716 - RNA, 26 nt, Human
ucucugcaaagcuggccgcgcgcucu

SEQ ID NO: 98717 - RNA, 20 nt, Human
uucacauuuacagaauuaua

SEQ ID NO: 98718 - RNA, 21 nt, Human
uugaagccaagugcccccccc

SEQ ID NO: 98719 - RNA, 24 nt, Human
uuuuuuuuuuuuuuuuucacauuu

SEQ ID NO: 98720 - RNA, 23 nt, Human
aaaaacaugaagggagacaugac

SEQ ID NO: 98721 - RNA, 22 nt, Human
agaaaaauaaaaaacaacugag

SEQ ID NO: 98722 - RNA, 21 nt, Human
gaaaaauaaaaaacaacugag

SEQ ID NO: 98723 - RNA, 22 nt, Human
gaccggcuuuaacacgccuggc

SEQ ID NO: 98724 - RNA, 24 nt, Human
gggagggguccuugcaguuggugc

SEQ ID NO: 98725 - RNA, 24 nt, Human
gggggagggguccuugcaguuggu

SEQ ID NO: 98726 - RNA, 21 nt, Human
uaaaaaacaacugaggugaug

SEQ ID NO: 98727 - RNA, 24 nt, Human
uauuagaaaaauaaaaaacaacug

SEQ ID NO: 98728 - RNA, 19 nt, Human
ugcaguuggugccuacgga

SEQ ID NO: 98729 - RNA, 21 nt, Human
aaaaaaaaaaagcauucaggg

SEQ ID NO: 98730 - RNA, 28 nt, Human
aaaaaaaaaaagcauucagggaagaagg

SEQ ID NO: 98731 - RNA, 21 nt, Human
aaaaaaaagcauucagggaag

SEQ ID NO: 98732 - RNA, 22 nt, Human
aacacaaaauucugggaauaag

SEQ ID NO: 98733 - RNA, 25 nt, Human
aaccuugaaaaggcauggcagugga

SEQ ID NO: 98734 - RNA, 25 nt, Human
aacuguuuuggaagauugucucccu

SEQ ID NO: 98735 - RNA, 18 nt, Human
aagaagagcugagguccu

SEQ ID NO: 98736 - RNA, 22 nt, Human
aaguuacuuccaauuugaaagc

SEQ ID NO: 98737 - RNA, 20 nt, Human
aauccuaucuccuugcuugc

SEQ ID NO: 98738 - RNA, 20 nt, Human
accagcuugaagugaguuua

SEQ ID NO: 98739 - RNA, 22 nt, Human
acgugcuguucuuuacauggag

SEQ ID NO: 98740 - RNA, 24 nt, Human
acucuuuggacauaagugagacag

SEQ ID NO: 98741 - RNA, 21 nt, Human
aggauucugucaguuggccuc

SEQ ID NO: 98742 - RNA, 22 nt, Human
agggaagaaggccaagaucuau

SEQ ID NO: 98743 - RNA, 26 nt, Human
caagagcaaggucauuuguauccauu

SEQ ID NO: 98744 - RNA, 21 nt, Human
cagcucaggguagaguggcag

SEQ ID NO: 98745 - RNA, 24 nt, Human
cagugcccuacugccagcucaggg

SEQ ID NO: 98746 - RNA, 21 nt, Human
ccaucuguagaaacaagaaga

SEQ ID NO: 98747 - RNA, 22 nt, Human
ccucaucuagauaaaggcugaa

SEQ ID NO: 98748 - RNA, 23 nt, Human
ccugugcuaaagugcuauaaaag

SEQ ID NO: 98749 - RNA, 21 nt, Human
ccuucuuuuauucaacucuag

SEQ ID NO: 98750 - RNA, 24 nt, Human
cuccugcuguacacacaugcacag

SEQ ID NO: 98751 - RNA, 20 nt, Human
cugucccuauggagcuguug

SEQ ID NO: 98752 - RNA, 19 nt, Human
cuuuagaagacccccccaa

SEQ ID NO: 98753 - RNA, 18 nt, Human
gaaacucuccaagagcac

SEQ ID NO: 98754 - RNA, 18 nt, Human
gaacaaauggauagcucu

SEQ ID NO: 98755 - RNA, 21 nt, Human
gcuuuagaagacccccccaaa

SEQ ID NO: 98756 - RNA, 21 nt, Human
ggccaaaaaaaaaaagcauuc

SEQ ID NO: 98757 - RNA, 23 nt, Human
guugaauaaaguuacuuccaauu

SEQ ID NO: 98758 - RNA, 18 nt, Human
uaaaaacguaacacaaaa

SEQ ID NO: 98759 - RNA, 20 nt, Human
uaaagugcuauaaaagggac

SEQ ID NO: 98760 - RNA, 22 nt, Human
uaacacaaaauucugggaauaa

SEQ ID NO: 98761 - RNA, 26 nt, Human
uaacacaaaauucugggaauaagaau

SEQ ID NO: 98762 - RNA, 21 nt, Human
uacucagugcccuacugccag

SEQ ID NO: 98763 - RNA, 18 nt, Human
uccuuggaacagacgugc

SEQ ID NO: 98764 - RNA, 20 nt, Human
ucuauagccacucuuuggac

SEQ ID NO: 98765 - RNA, 18 nt, Human
ucucccuagagaguaaga

SEQ ID NO: 98766 - RNA, 22 nt, Human
ucucugacaucagaauagggau

SEQ ID NO: 98767 - RNA, 19 nt, Human
ucugucaguuggccucuga

SEQ ID NO: 98768 - RNA, 20 nt, Human
ugaagugucauauguuagga

SEQ ID NO: 98769 - RNA, 23 nt, Human
ugccagcucaggguagaguggca

SEQ ID NO: 98770 - RNA, 25 nt, Human
ugcuguacacacaugcacaggccug

SEQ ID NO: 98771 - RNA, 20 nt, Human
uguagaaacaagaagagcug

SEQ ID NO: 98772 - RNA, 24 nt, Human
uguugcagaugggagggaaaaaaa

SEQ ID NO: 98773 - RNA, 23 nt, Human
uuacuuccaauuugaaagcuuua

SEQ ID NO: 98774 - RNA, 21 nt, Human
uuaggagguaaaaacguaaca

SEQ ID NO: 98775 - RNA, 24 nt, Human
uuuagaagacccccccaaaacugg

SEQ ID NO: 98776 - RNA, 20 nt, Human
uuucuugggggccaaaaaaa

SEQ ID NO: 98777 - RNA, 22 nt, Human
aaaccaagccgaccuacaccuc

SEQ ID NO: 98778 - RNA, 20 nt, Human
aacccgcuugcccagcuccg

SEQ ID NO: 98779 - RNA, 22 nt, Human
aagccgaccuacaccucuuacc

SEQ ID NO: 98780 - RNA, 18 nt, Human
acaccgcgaggccagcgg

SEQ ID NO: 98781 - RNA, 25 nt, Human
acuccgcgguucagggacgcggcug

SEQ ID NO: 98782 - RNA, 23 nt, Human
acugcauuguggcacaguucuga

SEQ ID NO: 98783 - RNA, 23 nt, Human
agaugcuggagcccgauaaggcc

SEQ ID NO: 98784 - RNA, 22 nt, Human
agccacaggcacgggugcuucc

SEQ ID NO: 98785 - RNA, 22 nt, Human
aggaaagaggguaaagggggau

SEQ ID NO: 98786 - RNA, 25 nt, Human
caagagaagccgggcgagagccucg

SEQ ID NO: 98787 - RNA, 19 nt, Human
caccggcgcccgcggguca

SEQ ID NO: 98788 - RNA, 21 nt, Human
cagagcucccgcucccucuuc

SEQ ID NO: 98789 - RNA, 22 nt, Human
cagcaagaugcccugggcucca

SEQ ID NO: 98790 - RNA, 21 nt, Human
ccaaacaaacguggcgggucg

SEQ ID NO: 98791 - RNA, 22 nt, Human
cccacuguggcucagagcagcu

SEQ ID NO: 98792 - RNA, 22 nt, Human
ccccgccgacaccggccucggc

SEQ ID NO: 98793 - RNA, 19 nt, Human
cccgccccgccgacaccgg

SEQ ID NO: 98794 - RNA, 24 nt, Human
ccgccccgccgacaccggccucgg

SEQ ID NO: 98795 - RNA, 18 nt, Human
ccgccgacaccggccucg

SEQ ID NO: 98796 - RNA, 20 nt, Human
ccgccgcgaccgccccgccc

SEQ ID NO: 98797 - RNA, 20 nt, Human
ccgcucccucuuccucugcc

SEQ ID NO: 98798 - RNA, 22 nt, Human
ccucuuacccaggcugucgcag

SEQ ID NO: 98799 - RNA, 28 nt, Human
cgaggcaacggcccaggcucacgcuguc

SEQ ID NO: 98800 - RNA, 23 nt, Human
cgcccgcgggucaaacacaaaca

SEQ ID NO: 98801 - RNA, 24 nt, Human
cgccgacaccggccucggccgcgc

SEQ ID NO: 98802 - RNA, 26 nt, Human
cgcgaccgccccgccccgccgacacc

SEQ ID NO: 98803 - RNA, 20 nt, Human
cggcccaggcucacgcuguc

SEQ ID NO: 98804 - RNA, 23 nt, Human
cgggcgggcgccggcaaccagcu

SEQ ID NO: 98805 - RNA, 23 nt, Human
cucccaacccgcuugcccagcuc

SEQ ID NO: 98806 - RNA, 20 nt, Human
cucgcagagcucccgcuccc

SEQ ID NO: 98807 - RNA, 23 nt, Human
cucggccgcgcgccaccggcgcc

SEQ ID NO: 98808 - RNA, 19 nt, Human
gagcagcuugacacggugc

SEQ ID NO: 98809 - RNA, 19 nt, Human
gaggccagcgggcgggcgg

SEQ ID NO: 98810 - RNA, 23 nt, Human
gcagaaaaccaagccgaccuaca

SEQ ID NO: 98811 - RNA, 23 nt, Human
gcccccucuccaaaugucacaca

SEQ ID NO: 98812 - RNA, 18 nt, Human
gcccggccucgcagagcu

SEQ ID NO: 98813 - RNA, 25 nt, Human
gcgaccgccccgccccgccgacacc

SEQ ID NO: 98814 - RNA, 19 nt, Human
ggccagcgggcgggcgggc

SEQ ID NO: 98815 - RNA, 23 nt, Human
ggcugccgcgggcaaagcggcgc

SEQ ID NO: 98816 - RNA, 22 nt, Human
gggcgggugugcggacccucca

SEQ ID NO: 98817 - RNA, 19 nt, Human
uacaccucuuacccaggcu

SEQ ID NO: 98818 - RNA, 22 nt, Human
uagcagaaaaccaagccgaccu

SEQ ID NO: 98819 - RNA, 19 nt, Human
ucaaacacaaacacgacuc

SEQ ID NO: 98820 - RNA, 19 nt, Human
ucccaggcccccucuccaa

SEQ ID NO: 98821 - RNA, 30 nt, Human
uccccuccgucuccucuccccucaugagaa

SEQ ID NO: 98822 - RNA, 20 nt, Human
uccucugccuccgccgcgac

SEQ ID NO: 98823 - RNA, 22 nt, Human
uccucugccuccgccgcgaccg

SEQ ID NO: 98824 - RNA, 23 nt, Human
ucgaggcaacggcccaggcucac

SEQ ID NO: 98825 - RNA, 24 nt, Human
ucucccaacccgcuugcccagcuc

SEQ ID NO: 98826 - RNA, 22 nt, Human
ugacacggugcucagaacugca

SEQ ID NO: 98827 - RNA, 19 nt, Human
ugcuuaaguuucucugcag

SEQ ID NO: 98828 - RNA, 19 nt, Human
uggagggaagcuugggcug

SEQ ID NO: 98829 - RNA, 23 nt, Human
uggcucagagcagcuugacacgg

SEQ ID NO: 98830 - RNA, 18 nt, Human
ugucuucgcuguucuccc

SEQ ID NO: 98831 - RNA, 21 nt, Human
aaacagaccaagcacacaggu

SEQ ID NO: 98832 - RNA, 22 nt, Human
aaauaggcacacauauauuccu

SEQ ID NO: 98833 - RNA, 21 nt, Human
aacagaccaagcacacaggua

SEQ ID NO: 98834 - RNA, 23 nt, Human
aacccuaaguguaaauauuuuug

SEQ ID NO: 98835 - RNA, 23 nt, Human
aagcacacagguaacacugaaau

SEQ ID NO: 98836 - RNA, 23 nt, Human
acaagacagcagcaaguucugag

SEQ ID NO: 98837 - RNA, 21 nt, Human
acacaaaauacugccuuuaag

SEQ ID NO: 98838 - RNA, 18 nt, Human
acagcaccugaggccucc

SEQ ID NO: 98839 - RNA, 23 nt, Human
acccuaacaaggaaacaagaagc

SEQ ID NO: 98840 - RNA, 22 nt, Human
agacagcagcaaguucugagca

SEQ ID NO: 98841 - RNA, 25 nt, Human
agacugggcucuuccaggggugggg

SEQ ID NO: 98842 - RNA, 18 nt, Human
agcagcaaguucugagca

SEQ ID NO: 98843 - RNA, 26 nt, Human
aggaaagaguaagagcuucuguucag

SEQ ID NO: 98844 - RNA, 19 nt, Human
aggaagagccacagggcca

SEQ ID NO: 98845 - RNA, 24 nt, Human
aggaagagccacagggccaggcgc

SEQ ID NO: 98846 - RNA, 19 nt, Human
aggaaggaguuuagcucug

SEQ ID NO: 98847 - RNA, 20 nt, Human
aggaaggaguuuagcucuga

SEQ ID NO: 98848 - RNA, 19 nt, Human
aggagggagggaggaagag

SEQ ID NO: 98849 - RNA, 18 nt, Human
aggcacacauauauuccu

SEQ ID NO: 98850 - RNA, 19 nt, Human
aggcagcgggcgaggggug

SEQ ID NO: 98851 - RNA, 21 nt, Human
aguccuugguuuagcugcuuc

SEQ ID NO: 98852 - RNA, 20 nt, Human
augcggggagggcggggggc

SEQ ID NO: 98853 - RNA, 21 nt, Human
caagaagcuccuggaggacac

SEQ ID NO: 98854 - RNA, 22 nt, Human
caagaagcuccuggaggacaca

SEQ ID NO: 98855 - RNA, 23 nt, Human
caagacagcagcaaguucugagc

SEQ ID NO: 98856 - RNA, 19 nt, Human
caaggcccuaacagaugac

SEQ ID NO: 98857 - RNA, 22 nt, Human
caaggcccuaacagaugacuca

SEQ ID NO: 98858 - RNA, 25 nt, Human
cacagcccugcccccaucuugagau

SEQ ID NO: 98859 - RNA, 21 nt, Human
cacagguaacacugaaauagg

SEQ ID NO: 98860 - RNA, 23 nt, Human
cacccauccauccaaccuuccau

SEQ ID NO: 98861 - RNA, 23 nt, Human
caccugaggccuccagcaggccc

SEQ ID NO: 98862 - RNA, 18 nt, Human
cagcagcaaguucugagc

SEQ ID NO: 98863 - RNA, 20 nt, Human
cagcagggccuucaagcaca

SEQ ID NO: 98864 - RNA, 24 nt, Human
cagcaguaggggcugggcuuccag

SEQ ID NO: 98865 - RNA, 26 nt, Human
cagcaguaggggcugggcuuccagca

SEQ ID NO: 98866 - RNA, 19 nt, Human
cagcccugcccccaucuug

SEQ ID NO: 98867 - RNA, 24 nt, Human
caggacaccacaccaucuuuccca

SEQ ID NO: 98868 - RNA, 26 nt, Human
caggcccucagcccggcaggcccaua

SEQ ID NO: 98869 - RNA, 19 nt, Human
caggcucaugauucaggcc

SEQ ID NO: 98870 - RNA, 22 nt, Human
cagggccaggcgcgagggagga

SEQ ID NO: 98871 - RNA, 22 nt, Human
cauuuccucuugaauagcucca

SEQ ID NO: 98872 - RNA, 22 nt, Human
ccaagcacacagguaacacuga

SEQ ID NO: 98873 - RNA, 23 nt, Human
ccaagcacacagguaacacugaa

SEQ ID NO: 98874 - RNA, 27 nt, Human
ccaaggcccuaacagaugacucagcag

SEQ ID NO: 98875 - RNA, 22 nt, Human
ccaccugguuuggguaugcaag

SEQ ID NO: 98876 - RNA, 23 nt, Human
ccacggcucuccccagccucagc

SEQ ID NO: 98877 - RNA, 30 nt, Human
ccagcaggcccucagcccggcaggcccauu

SEQ ID NO: 98878 - RNA, 20 nt, Human
ccauccacggccauccaccc

SEQ ID NO: 98879 - RNA, 20 nt, Human
cccauccauccaaccuucca

SEQ ID NO: 98880 - RNA, 20 nt, Human
cccaucuugagauucagaau

SEQ ID NO: 98881 - RNA, 21 nt, Human
cccauggacagcaccugaggc

SEQ ID NO: 98882 - RNA, 24 nt, Human
ccccaaggauaauaacaucccuuu

SEQ ID NO: 98883 - RNA, 24 nt, Human
ccggcacagcuggcugggccgagg

SEQ ID NO: 98884 - RNA, 22 nt, Human
ccucagcugacacacacacaaa

SEQ ID NO: 98885 - RNA, 23 nt, Human
ccucagggaccacggcucucccc

SEQ ID NO: 98886 - RNA, 25 nt, Human
ccucagggaccacggcucuccccag

SEQ ID NO: 98887 - RNA, 21 nt, Human
ccuccagcaggcccucagccc

SEQ ID NO: 98888 - RNA, 18 nt, Human
ccugagaugggcguaaag

SEQ ID NO: 98889 - RNA, 19 nt, Human
ccugaggccuccagcaggc

SEQ ID NO: 98890 - RNA, 18 nt, Human
ccuugguuuagcugcuuc

SEQ ID NO: 98891 - RNA, 20 nt, Human
cggcucuccccagccucagc

SEQ ID NO: 98892 - RNA, 18 nt, Human
cucugacccauccucagg

SEQ ID NO: 98893 - RNA, 20 nt, Human
cugacacacacacaaaggag

SEQ ID NO: 98894 - RNA, 22 nt, Human
cugcgcauccacggccauccac

SEQ ID NO: 98895 - RNA, 19 nt, Human
cuggagggccgggcgcagg

SEQ ID NO: 98896 - RNA, 21 nt, Human
cuuaacccuugcccugggagc

SEQ ID NO: 98897 - RNA, 22 nt, Human
gaaggagggagggaggaagagc

SEQ ID NO: 98898 - RNA, 22 nt, Human
gaccacggcucuccccagccuc

SEQ ID NO: 98899 - RNA, 18 nt, Human
gagcagucaggccccagg

SEQ ID NO: 98900 - RNA, 18 nt, Human
gaggcagcgggcgagggg

SEQ ID NO: 98901 - RNA, 19 nt, Human
gaggcagcgggcgaggggu

SEQ ID NO: 98902 - RNA, 27 nt, Human
gcaggcccucagcccggcaggcccauu

SEQ ID NO: 98903 - RNA, 19 nt, Human
gcccuaacagaugacucag

SEQ ID NO: 98904 - RNA, 23 nt, Human
gcccucagcccggcaggcccaua

SEQ ID NO: 98905 - RNA, 23 nt, Human
ggaggagagggaugcggggaggg

SEQ ID NO: 98906 - RNA, 20 nt, Human
ggaugacacaggggaaucug

SEQ ID NO: 98907 - RNA, 21 nt, Human
ggcagacauaccacgguuccu

SEQ ID NO: 98908 - RNA, 20 nt, Human
ggcagcccuggcccgggaag

SEQ ID NO: 98909 - RNA, 24 nt, Human
ggccggcagaaggcuggcuggagg

SEQ ID NO: 98910 - RNA, 18 nt, Human
ggcgcgagggaggagagg

SEQ ID NO: 98911 - RNA, 18 nt, Human
ggcucuuccagggguggg

SEQ ID NO: 98912 - RNA, 19 nt, Human
gggaaguacacagggcaga

SEQ ID NO: 98913 - RNA, 23 nt, Human
gggaggcagcgggcgaggggugg

SEQ ID NO: 98914 - RNA, 22 nt, Human
gggcagcuggcuucaggccucg

SEQ ID NO: 98915 - RNA, 19 nt, Human
gggccggcagaaggcuggc

SEQ ID NO: 98916 - RNA, 22 nt, Human
gggcgagggguggggggggggg

SEQ ID NO: 98917 - RNA, 21 nt, Human
ggggagggcggggggcgaggg

SEQ ID NO: 98918 - RNA, 22 nt, Human
ggggcgagggacgccgggcuca

SEQ ID NO: 98919 - RNA, 19 nt, Human
gggggaaggagggagggag

SEQ ID NO: 98920 - RNA, 19 nt, Human
ggggggaaggagggaggga

SEQ ID NO: 98921 - RNA, 23 nt, Human
ggggggaaggagggagggaggaa

SEQ ID NO: 98922 - RNA, 22 nt, Human
gggggggggaaggagggaggga

SEQ ID NO: 98923 - RNA, 23 nt, Human
ggggggggggaaggagggaggga

SEQ ID NO: 98924 - RNA, 21 nt, Human
gguggggggggggggaaggag

SEQ ID NO: 98925 - RNA, 20 nt, Human
guaaagucaaacagaccaag

SEQ ID NO: 98926 - RNA, 24 nt, Human
guaaagucaaacagaccaagcaca

SEQ ID NO: 98927 - RNA, 19 nt, Human
guaaauauuuuuguccaca

SEQ ID NO: 98928 - RNA, 20 nt, Human
guauuaacccaacuuaacua

SEQ ID NO: 98929 - RNA, 20 nt, Human
guggggggggggggaaggag

SEQ ID NO: 98930 - RNA, 18 nt, Human
uaacccuaacaaggaaac

SEQ ID NO: 98931 - RNA, 19 nt, Human
uaagagcuucuguucaggc

SEQ ID NO: 98932 - RNA, 23 nt, Human
uaagcugguauuaacccaacuua

SEQ ID NO: 98933 - RNA, 18 nt, Human
uaugcaaggcacugcgca

SEQ ID NO: 98934 - RNA, 24 nt, Human
ucagcagggccuucaagcacagcc

SEQ ID NO: 98935 - RNA, 22 nt, Human
ucaggcaccagccagggaagcc

SEQ ID NO: 98936 - RNA, 18 nt, Human
uccaaccuuccauccauc

SEQ ID NO: 98937 - RNA, 21 nt, Human
uccacacaaauaggcacacau

SEQ ID NO: 98938 - RNA, 24 nt, Human
uccacacaaauaggcacacauaua

SEQ ID NO: 98939 - RNA, 20 nt, Human
uccacggccauccacggcca

SEQ ID NO: 98940 - RNA, 22 nt, Human
ucccauggacagcaccugaggc

SEQ ID NO: 98941 - RNA, 21 nt, Human
ucuacggaaguguccugagau

SEQ ID NO: 98942 - RNA, 26 nt, Human
ucugggcuggggcagacaggcaggac

SEQ ID NO: 98943 - RNA, 21 nt, Human
ucuugaauagcuccaaacccu

SEQ ID NO: 98944 - RNA, 21 nt, Human
ugaaauaggaaagaguaagag

SEQ ID NO: 98945 - RNA, 18 nt, Human
ugacacacacacaaagga

SEQ ID NO: 98946 - RNA, 18 nt, Human
ugagaugggcguaaaguc

SEQ ID NO: 98947 - RNA, 18 nt, Human
ugagcagucaggccccag

SEQ ID NO: 98948 - RNA, 22 nt, Human
ugcucaacaaaacgcucccacc

SEQ ID NO: 98949 - RNA, 22 nt, Human
uggcugggccgagggaggcagc

SEQ ID NO: 98950 - RNA, 19 nt, Human
ugggccgagggaggcagcg

SEQ ID NO: 98951 - RNA, 22 nt, Human
ugggcguaaagucaaacagacc

SEQ ID NO: 98952 - RNA, 18 nt, Human
ugggcuggggcagacagg

SEQ ID NO: 98953 - RNA, 19 nt, Human
ugggcuggggcagacaggc

SEQ ID NO: 98954 - RNA, 19 nt, Human
uggggggggggggaaggag

SEQ ID NO: 98955 - RNA, 28 nt, Human
uguccacacaaauaggcacacauauagu

SEQ ID NO: 98956 - RNA, 22 nt, Human
uuaacccuaacaaggaaacaag

SEQ ID NO: 98957 - RNA, 25 nt, Human
uuaacccuaacaaggaaacaagaag

SEQ ID NO: 98958 - RNA, 18 nt, Human
uugaauagcuccaaaccc

SEQ ID NO: 98959 - RNA, 24 nt, Human
uuucccauggacagcaccugaggc

SEQ ID NO: 98960 - RNA, 26 nt, Human
uuuuuuuuuuuuuucucaacuugauu

SEQ ID NO: 98961 - RNA, 27 nt, Human
aaaaaagaaagagggggaaacaaagaa

SEQ ID NO: 98962 - RNA, 23 nt, Human
aaacaaaaccuagcucaagccug

SEQ ID NO: 98963 - RNA, 18 nt, Human
aaagaaagaagguagaca

SEQ ID NO: 98964 - RNA, 19 nt, Human
aacuagauugcagcucugc

SEQ ID NO: 98965 - RNA, 18 nt, Human
aacucaaggcugccuuau

SEQ ID NO: 98966 - RNA, 24 nt, Human
aagaaggaaaauacaaagaaagaa

SEQ ID NO: 98967 - RNA, 25 nt, Human
acaacgcucuugcauagcccgaagc

SEQ ID NO: 98968 - RNA, 21 nt, Human
agaaaaacaaaaccuagcuca

SEQ ID NO: 98969 - RNA, 23 nt, Human
agaaaaacaaaaccuagcucaag

SEQ ID NO: 98970 - RNA, 18 nt, Human
agaaggaaaauacaaaga

SEQ ID NO: 98971 - RNA, 18 nt, Human
agaaggccaaaguuacgg

SEQ ID NO: 98972 - RNA, 25 nt, Human
agaaggccucuuucugcucaggguu

SEQ ID NO: 98973 - RNA, 21 nt, Human
aggaaaauacaaagaaagaag

SEQ ID NO: 98974 - RNA, 26 nt, Human
augaaaggaaaucuaggggaaaggag

SEQ ID NO: 98975 - RNA, 20 nt, Human
cagaaggccucuuucugcuc

SEQ ID NO: 98976 - RNA, 18 nt, Human
cauagcccgaagcccaga

SEQ ID NO: 98977 - RNA, 18 nt, Human
cuaauccauucccaggcc

SEQ ID NO: 98978 - RNA, 19 nt, Human
cucaccaggagaaaaacaa

SEQ ID NO: 98979 - RNA, 27 nt, Human
cugcagugucuuuuuggugacuuguua

SEQ ID NO: 98980 - RNA, 23 nt, Human
cuuucagcucugcugaaaccuaa

SEQ ID NO: 98981 - RNA, 20 nt, Human
gaaaaacaaaaccuagcuca

SEQ ID NO: 98982 - RNA, 19 nt, Human
gaaggaaaauacaaagaaa

SEQ ID NO: 98983 - RNA, 25 nt, Human
gagaaaaacaaaaccuagcucaagc

SEQ ID NO: 98984 - RNA, 19 nt, Human
gagagaaaguagauaggga

SEQ ID NO: 98985 - RNA, 27 nt, Human
gagccagcuccaggacucugccaccag

SEQ ID NO: 98986 - RNA, 23 nt, Human
gcccagagagaaagaguuggcuu

SEQ ID NO: 98987 - RNA, 26 nt, Human
ggagaaaaacaaaaccuagcucaagc

SEQ ID NO: 98988 - RNA, 23 nt, Human
uacaaagaaagaagguagacaac

SEQ ID NO: 98989 - RNA, 21 nt, Human
uacaaguugguagccuguugg

SEQ ID NO: 98990 - RNA, 23 nt, Human
uagacaacgcucuugcauagccc

SEQ ID NO: 98991 - RNA, 20 nt, Human
uagagccagcuccaggacuc

SEQ ID NO: 98992 - RNA, 26 nt, Human
uaguguuuauuuuuccauuuuuaaaa

SEQ ID NO: 98993 - RNA, 21 nt, Human
ucaggguuucugcagugucuu

SEQ ID NO: 98994 - RNA, 24 nt, Human
ucccugaaccaauacaaaucucua

SEQ ID NO: 98995 - RNA, 24 nt, Human
ucucuaugcaacucaaggcugccu

SEQ ID NO: 98996 - RNA, 24 nt, Human
ucugcucaggguuucugcaguguc

SEQ ID NO: 98997 - RNA, 19 nt, Human
ucugcugaaaccuaaucca

SEQ ID NO: 98998 - RNA, 22 nt, Human
ugaaaccuaauccauucccagg

SEQ ID NO: 98999 - RNA, 21 nt, Human
ugacuuguuagcagccagugg

SEQ ID NO: 99000 - RNA, 18 nt, Human
ugagcagaaggccaaagu

SEQ ID NO: 99001 - RNA, 20 nt, Human
ugagcagaaggccaaaguua

SEQ ID NO: 99002 - RNA, 21 nt, Human
ugccaccagcuuucagcucug

SEQ ID NO: 99003 - RNA, 18 nt, Human
ugcucaggguuucugcag

SEQ ID NO: 99004 - RNA, 26 nt, Human
uggcuugugagaagacaugaggaguc

SEQ ID NO: 99005 - RNA, 22 nt, Human
uucugcucaggguuucugcagu

SEQ ID NO: 99006 - RNA, 19 nt, Human
uugcauagcccgaagccca

SEQ ID NO: 99007 - RNA, 22 nt, Human
uugcauagcccgaagcccagag

SEQ ID NO: 99008 - RNA, 21 nt, Human
aaacagaaaagaaaguucccc

SEQ ID NO: 99009 - RNA, 22 nt, Human
aaaguuccccacccuacccccc

SEQ ID NO: 99010 - RNA, 22 nt, Human
acagaaccaaauaaaaacaaau

SEQ ID NO: 99011 - RNA, 19 nt, Human
acucuguuuaucuggaaca

SEQ ID NO: 99012 - RNA, 25 nt, Human
agcauaacucuuccuucaugauacu

SEQ ID NO: 99013 - RNA, 25 nt, Human
agcggcuccggcccggccagccccu

SEQ ID NO: 99014 - RNA, 21 nt, Human
auaaagcauaacucuuccuuc

SEQ ID NO: 99015 - RNA, 20 nt, Human
cagaaaagaaaguuccccac

SEQ ID NO: 99016 - RNA, 19 nt, Human
cauuccuuggcaaucaagu

SEQ ID NO: 99017 - RNA, 18 nt, Human
cccugcucauuuaaacuc

SEQ ID NO: 99018 - RNA, 21 nt, Human
ccgccagcucaagaguaaaga

SEQ ID NO: 99019 - RNA, 18 nt, Human
ccucgaggcucaggccca

SEQ ID NO: 99020 - RNA, 18 nt, Human
cggacgaugacaccgcca

SEQ ID NO: 99021 - RNA, 19 nt, Human
cuaccccccauaaauuguc

SEQ ID NO: 99022 - RNA, 21 nt, Human
cuguagcggcuccggcccggc

SEQ ID NO: 99023 - RNA, 23 nt, Human
gagccagucuuguuagcagcuaa

SEQ ID NO: 99024 - RNA, 25 nt, Human
uaaaaacaaauuuuugaaaaagcaa

SEQ ID NO: 99025 - RNA, 21 nt, Human
uaaagaaaaacagaaaagaaa

SEQ ID NO: 99026 - RNA, 23 nt, Human
ucagcacuagucacacauccagu

SEQ ID NO: 99027 - RNA, 24 nt, Human
ucaucacuauuuuccauaucuaau

SEQ ID NO: 99028 - RNA, 21 nt, Human
uccccacccuaccccccauaa

SEQ ID NO: 99029 - RNA, 22 nt, Human
ucuguuuaucuggaacagaacc

SEQ ID NO: 99030 - RNA, 21 nt, Human
ugacggacgaugacaccgcca

SEQ ID NO: 99031 - RNA, 22 nt, Human
ugauacuuuccaacaaagggag

SEQ ID NO: 99032 - RNA, 22 nt, Human
ugccucaggcccccccuguagc

SEQ ID NO: 99033 - RNA, 22 nt, Human
uggaacagaaccaaauaaaaac

SEQ ID NO: 99034 - RNA, 23 nt, Human
uggaacagaaccaaauaaaaaca

SEQ ID NO: 99035 - RNA, 19 nt, Human
uguagcggcuccggcccgg

SEQ ID NO: 99036 - RNA, 24 nt, Human
uuaagguaauuuacauuccuuggc

SEQ ID NO: 99037 - RNA, 22 nt, Human
uuacauuuguuuaugggagauc

SEQ ID NO: 99038 - RNA, 18 nt, Human
aagaaacagcaaccgcgc

SEQ ID NO: 99039 - RNA, 20 nt, Human
agaguccuuuucaucacccu

SEQ ID NO: 99040 - RNA, 19 nt, Human
aucacccauuugaguuaaa

SEQ ID NO: 99041 - RNA, 21 nt, Human
cauuugaguuaaaacacccua

SEQ ID NO: 99042 - RNA, 18 nt, Human
cccgugccgccgccgccg

SEQ ID NO: 99043 - RNA, 21 nt, Human
cccgugccgccgccgccgccg

SEQ ID NO: 99044 - RNA, 24 nt, Human
cccuacgccgccgcccgugccgcc

SEQ ID NO: 99045 - RNA, 27 nt, Human
ccgcccgugccgccgccgccgccgccg

SEQ ID NO: 99046 - RNA, 29 nt, Human
ccgccgcccgugccgccgccgccgccggc

SEQ ID NO: 99047 - RNA, 18 nt, Human
ccgccgccgccgccgccg

SEQ ID NO: 99048 - RNA, 25 nt, Human
ccgccgccgccgccgccggucccgg

SEQ ID NO: 99049 - RNA, 24 nt, Human
ccggagccagagaagaaacagcaa

SEQ ID NO: 99050 - RNA, 23 nt, Human
cucugcuuucuccucuuguuccu

SEQ ID NO: 99051 - RNA, 24 nt, Human
cugaagaauuucaucuaaaguuuu

SEQ ID NO: 99052 - RNA, 23 nt, Human
gaaacagcaaccgcgcgcgccaa

SEQ ID NO: 99053 - RNA, 24 nt, Human
gaaguacaaaagaacuucaccgaa

SEQ ID NO: 99054 - RNA, 23 nt, Human
gaguuaaaacacccuacgccgcc

SEQ ID NO: 99055 - RNA, 20 nt, Human
uaaaacacccuacgccgccg

SEQ ID NO: 99056 - RNA, 23 nt, Human
uaaaacacccuacgccgccgccc

SEQ ID NO: 99057 - RNA, 22 nt, Human
uacaaaagaacuucaccgaaga

SEQ ID NO: 99058 - RNA, 24 nt, Human
uacaaaagaacuucaccgaagaag

SEQ ID NO: 99059 - RNA, 21 nt, Human
uccucuuguuccuuccuucgu

SEQ ID NO: 99060 - RNA, 24 nt, Human
uccuuuucaucacccauuugaguu

SEQ ID NO: 99061 - RNA, 24 nt, Human
uuaaaacacccuacgccgccgccc

SEQ ID NO: 99062 - RNA, 19 nt, Human
uuccuuccuucguuucuuu

SEQ ID NO: 99063 - RNA, 20 nt, Human
uuguuccuuccuucguuucu

SEQ ID NO: 99064 - RNA, 19 nt, Human
agaguccuuuucaucaccc

SEQ ID NO: 99065 - RNA, 21 nt, Human
agaguugcugccggucuccuc

SEQ ID NO: 99066 - RNA, 19 nt, Human
aucacccauuugaguuaaa

SEQ ID NO: 99067 - RNA, 19 nt, Human
augugcagacacuucccug

SEQ ID NO: 99068 - RNA, 24 nt, Human
caacucgaaccgcucccgcggcgg

SEQ ID NO: 99069 - RNA, 25 nt, Human
cagaaccugagccugauucugcuga

SEQ ID NO: 99070 - RNA, 18 nt, Human
cagcaggucccuuucuuc

SEQ ID NO: 99071 - RNA, 23 nt, Human
caucuucuucuccucugucuucc

SEQ ID NO: 99072 - RNA, 21 nt, Human
cauuugaguuaaaacacccua

SEQ ID NO: 99073 - RNA, 19 nt, Human
cccuacggggccgcggccg

SEQ ID NO: 99074 - RNA, 20 nt, Human
cccugcgggccucccgcucc

SEQ ID NO: 99075 - RNA, 19 nt, Human
cccuuccuccuccuccucu

SEQ ID NO: 99076 - RNA, 22 nt, Human
cccuucucuucugucuuuccca

SEQ ID NO: 99077 - RNA, 23 nt, Human
ccgagcuggucuuccucucgcug

SEQ ID NO: 99078 - RNA, 20 nt, Human
ccgaggcgggcugcgacucc

SEQ ID NO: 99079 - RNA, 20 nt, Human
ccgcccgccgcucgcgcucc

SEQ ID NO: 99080 - RNA, 18 nt, Human
ccgcuuggaaucccgguc

SEQ ID NO: 99081 - RNA, 19 nt, Human
ccggccuggccucaccugg

SEQ ID NO: 99082 - RNA, 18 nt, Human
ccucccgcuccuugcgcc

SEQ ID NO: 99083 - RNA, 18 nt, Human
ccuccucuuccuccuccu

SEQ ID NO: 99084 - RNA, 20 nt, Human
ccuccucuuccuccuccucc

SEQ ID NO: 99085 - RNA, 20 nt, Human
ccuccucuuccucuuccucc

SEQ ID NO: 99086 - RNA, 23 nt, Human
ccuggccucaccuggcuuccggc

SEQ ID NO: 99087 - RNA, 19 nt, Human
cggccgaggcgggcugcga

SEQ ID NO: 99088 - RNA, 24 nt, Human
cggucaucagaauuuuuuaagcgu

SEQ ID NO: 99089 - RNA, 24 nt, Human
cuaugaugccuacauuuuucuuuu

SEQ ID NO: 99090 - RNA, 21 nt, Human
cucaccuggcuuccggccguc

SEQ ID NO: 99091 - RNA, 21 nt, Human
cucagaaccugagccugauuc

SEQ ID NO: 99092 - RNA, 23 nt, Human
cuccuccuccucuuccuccuccu

SEQ ID NO: 99093 - RNA, 22 nt, Human
cuccuccucuuccuccuccucc

SEQ ID NO: 99094 - RNA, 19 nt, Human
cuccuccucuuccucuucc

SEQ ID NO: 99095 - RNA, 19 nt, Human
cuccucuuccucuuccucc

SEQ ID NO: 99096 - RNA, 23 nt, Human
cuccuucugcugcucccgcaucu

SEQ ID NO: 99097 - RNA, 23 nt, Human
cucugcuuucuccucuuguuccu

SEQ ID NO: 99098 - RNA, 22 nt, Human
cugagccugagaagaaacagca

SEQ ID NO: 99099 - RNA, 23 nt, Human
cugcucccgcugcuccuucugcu

SEQ ID NO: 99100 - RNA, 20 nt, Human
cuuuccucuuuucaucuuuu

SEQ ID NO: 99101 - RNA, 22 nt, Human
cuuuccucuuuucaucuuuucu

SEQ ID NO: 99102 - RNA, 21 nt, Human
cuuucuuccauuuucucuucu

SEQ ID NO: 99103 - RNA, 24 nt, Human
cuuugucgcuguaguccucucuca

SEQ ID NO: 99104 - RNA, 19 nt, Human
gcagacacuucccugcggg

SEQ ID NO: 99105 - RNA, 21 nt, Human
gcaggucccuuucuuccauuu

SEQ ID NO: 99106 - RNA, 22 nt, Human
gcuuggaaucccggucaucaga

SEQ ID NO: 99107 - RNA, 19 nt, Human
ggcgggcugcgacuccagu

SEQ ID NO: 99108 - RNA, 20 nt, Human
gugcagacacuucccugcgg

SEQ ID NO: 99109 - RNA, 24 nt, Human
guucuucucgaugucguuuccgac

SEQ ID NO: 99110 - RNA, 20 nt, Human
uaaaacacccuacggggccg

SEQ ID NO: 99111 - RNA, 23 nt, Human
uaaaacacccuacggggccgcgg

SEQ ID NO: 99112 - RNA, 25 nt, Human
ucagaaccugagccugauucugcug

SEQ ID NO: 99113 - RNA, 21 nt, Human
ucccgcugcuccuucugcugc

SEQ ID NO: 99114 - RNA, 18 nt, Human
ucccuuucucuccuggaa

SEQ ID NO: 99115 - RNA, 18 nt, Human
uccuccucuuccucuucc

SEQ ID NO: 99116 - RNA, 21 nt, Human
uccucuuguuccuuccuucgu

SEQ ID NO: 99117 - RNA, 18 nt, Human
uccuucugcucccgcugc

SEQ ID NO: 99118 - RNA, 24 nt, Human
uccuucugcucccgcugcuccuuc

SEQ ID NO: 99119 - RNA, 18 nt, Human
uccuucugcugcucccgc

SEQ ID NO: 99120 - RNA, 24 nt, Human
uccuuuucaucacccauuugaguu

SEQ ID NO: 99121 - RNA, 20 nt, Human
ucuccuccuccuccucuucc

SEQ ID NO: 99122 - RNA, 18 nt, Human
ucucucagcucccccucc

SEQ ID NO: 99123 - RNA, 19 nt, Human
ucucucagcucccccuccu

SEQ ID NO: 99124 - RNA, 24 nt, Human
ucuuccuccuccuccucuucuucc

SEQ ID NO: 99125 - RNA, 19 nt, Human
ucuuccucuuccuccucuc

SEQ ID NO: 99126 - RNA, 20 nt, Human
ucuuuccucuuuucaucuuu

SEQ ID NO: 99127 - RNA, 23 nt, Human
ugaagaauuucaucuaaaguuuu

SEQ ID NO: 99128 - RNA, 19 nt, Human
ugagaagaaacagcaaccg

SEQ ID NO: 99129 - RNA, 20 nt, Human
ugagaagaaacagcaaccgc

SEQ ID NO: 99130 - RNA, 21 nt, Human
ugagccugagaagaaacagca

SEQ ID NO: 99131 - RNA, 21 nt, Human
ugaucuccaugcagugaucuc

SEQ ID NO: 99132 - RNA, 24 nt, Human
ugaugugcagacacuucccugcgg

SEQ ID NO: 99133 - RNA, 18 nt, Human
ugcagugaucucucagcu

SEQ ID NO: 99134 - RNA, 20 nt, Human
ugcagugaucucucagcucc

SEQ ID NO: 99135 - RNA, 22 nt, Human
ugcagugaucucucagcucccc

SEQ ID NO: 99136 - RNA, 21 nt, Human
ugccauuucccuucucuucug

SEQ ID NO: 99137 - RNA, 18 nt, Human
ugcucccuugccauuucc

SEQ ID NO: 99138 - RNA, 19 nt, Human
ugcuggggugguuugaugg

SEQ ID NO: 99139 - RNA, 18 nt, Human
uggccucaccuggcuucc

SEQ ID NO: 99140 - RNA, 19 nt, Human
uggcuggcuuucacuuugu

SEQ ID NO: 99141 - RNA, 19 nt, Human
uggcuuccggccgucuccc

SEQ ID NO: 99142 - RNA, 21 nt, Human
uggggugguuugauggccaaa

SEQ ID NO: 99143 - RNA, 23 nt, Human
uucccauucccggcgagcuuuau

SEQ ID NO: 99144 - RNA, 19 nt, Human
uuccuccuccuccucuucc

SEQ ID NO: 99145 - RNA, 19 nt, Human
uuccuuccuucguuucuuu

SEQ ID NO: 99146 - RNA, 21 nt, Human
uucuucggcagacugcucuga

SEQ ID NO: 99147 - RNA, 18 nt, Human
uugcugccggucuccucc

SEQ ID NO: 99148 - RNA, 20 nt, Human
uugcugccggucuccuccuc

SEQ ID NO: 99149 - RNA, 20 nt, Human
uuguuccuuccuucguuucu

SEQ ID NO: 99150 - RNA, 23 nt, Human
uuucccauucccggcgagcuuua

SEQ ID NO: 99151 - RNA, 25 nt, Human
uuucuuccucacuuacuucuucggc

SEQ ID NO: 99152 - RNA, 20 nt, Human
uuucuuuccucuuuucaucu

SEQ ID NO: 99153 - RNA, 20 nt, Human
aaaaagccaaaacgaaacaa

SEQ ID NO: 99154 - RNA, 20 nt, Human
aaaacgaaacaaccagagga

SEQ ID NO: 99155 - RNA, 23 nt, Human
aaccaaagcagggaaaagagucg

SEQ ID NO: 99156 - RNA, 20 nt, Human
aagccaaaacgaaacaacca

SEQ ID NO: 99157 - RNA, 25 nt, Human
aagccaaaacgaaacaaccagagga

SEQ ID NO: 99158 - RNA, 18 nt, Human
aaggagccacggguccgg

SEQ ID NO: 99159 - RNA, 22 nt, Human
acccugggcccguccaccgagc

SEQ ID NO: 99160 - RNA, 18 nt, Human
accguccgggggggagcc

SEQ ID NO: 99161 - RNA, 19 nt, Human
agcgcccccguggcuccuc

SEQ ID NO: 99162 - RNA, 19 nt, Human
aggcaggaccgggccccuc

SEQ ID NO: 99163 - RNA, 22 nt, Human
aggcaggaccgggccccucgga

SEQ ID NO: 99164 - RNA, 19 nt, Human
caaaaccuccgugagguag

SEQ ID NO: 99165 - RNA, 24 nt, Human
caaacaaaccaaagcagggaaaag

SEQ ID NO: 99166 - RNA, 18 nt, Human
cagcagcgcccccguggc

SEQ ID NO: 99167 - RNA, 19 nt, Human
cagcgcccccguggcuccu

SEQ ID NO: 99168 - RNA, 18 nt, Human
cagcgcggggccgcgcga

SEQ ID NO: 99169 - RNA, 24 nt, Human
caggaccgggccccucggaccgcu

SEQ ID NO: 99170 - RNA, 19 nt, Human
ccaccgagccccgagugac

SEQ ID NO: 99171 - RNA, 19 nt, Human
ccccgguagaagucgggcu

SEQ ID NO: 99172 - RNA, 19 nt, Human
cccgagcgcuccagcagcu

SEQ ID NO: 99173 - RNA, 24 nt, Human
cccggggucggagcagcgcggggc

SEQ ID NO: 99174 - RNA, 23 nt, Human
cccugggcccguccaccgagccc

SEQ ID NO: 99175 - RNA, 24 nt, Human
cccugggcccguccaccgagcccc

SEQ ID NO: 99176 - RNA, 27 nt, Human
ccgccgcccggggaccccgagcgcucc

SEQ ID NO: 99177 - RNA, 26 nt, Human
ccgccgccgccgcccggggaccccga

SEQ ID NO: 99178 - RNA, 20 nt, Human
ccgccugccuccuccucugc

SEQ ID NO: 99179 - RNA, 25 nt, Human
ccucggaccgcuacaccugggccuc

SEQ ID NO: 99180 - RNA, 20 nt, Human
ccucugcgccgccgccgccg

SEQ ID NO: 99181 - RNA, 23 nt, Human
ccucugcgccgccgccgccgccc

SEQ ID NO: 99182 - RNA, 21 nt, Human
cgcaccguccgggggggagcc

SEQ ID NO: 99183 - RNA, 22 nt, Human
cgcccggggaccccgagcgcuc

SEQ ID NO: 99184 - RNA, 24 nt, Human
cgcucccacccugggcccguccac

SEQ ID NO: 99185 - RNA, 19 nt, Human
cggcggcggaggggcccgg

SEQ ID NO: 99186 - RNA, 20 nt, Human
cucauaaaguaguuuuauuu

SEQ ID NO: 99187 - RNA, 19 nt, Human
cuccagcagcucuggcgcc

SEQ ID NO: 99188 - RNA, 22 nt, Human
cuccagcagcucuggcgccgcc

SEQ ID NO: 99189 - RNA, 18 nt, Human
cucccgaggggacaggug

SEQ ID NO: 99190 - RNA, 18 nt, Human
cucugcgccgccgccgcc

SEQ ID NO: 99191 - RNA, 21 nt, Human
cucugugcuggacguggcucc

SEQ ID NO: 99192 - RNA, 21 nt, Human
gaccccgagcgcuccagcagc

SEQ ID NO: 99193 - RNA, 19 nt, Human
gccaaaacgaaacaaccag

SEQ ID NO: 99194 - RNA, 19 nt, Human
gcccggggaccccgagcgc

SEQ ID NO: 99195 - RNA, 24 nt, Human
gcggcggaggggcccggggucgga

SEQ ID NO: 99196 - RNA, 18 nt, Human
ggcccggggucggagcag

SEQ ID NO: 99197 - RNA, 20 nt, Human
ggcggcggcggaggggcccg

SEQ ID NO: 99198 - RNA, 18 nt, Human
gggaccagcacaaaaccu

SEQ ID NO: 99199 - RNA, 20 nt, Human
guggcuccaggaccuggagc

SEQ ID NO: 99200 - RNA, 23 nt, Human
uccaggaccuggagcugacaggc

SEQ ID NO: 99201 - RNA, 19 nt, Human
uccucugcgccgccgccgc

SEQ ID NO: 99202 - RNA, 19 nt, Human
ucggagcagcgcggggccg

SEQ ID NO: 99203 - RNA, 24 nt, Human
ucugugcuggacguggcuccagga

SEQ ID NO: 99204 - RNA, 26 nt, Human
ugacaggcaggaccgggccccuucuu

SEQ ID NO: 99205 - RNA, 21 nt, Human
ugcggccaguccggaagcugg

SEQ ID NO: 99206 - RNA, 22 nt, Human
uggcgguggggcagccccucuu

SEQ ID NO: 99207 - RNA, 20 nt, Human
uggcuccaggaccuggagcu

SEQ ID NO: 99208 - RNA, 21 nt, Human
uggggagggagaaaaagccaa

SEQ ID NO: 99209 - RNA, 27 nt, Human
aaaaaaaaaaaaaacagacacacaaaa

SEQ ID NO: 99210 - RNA, 22 nt, Human
aaaaaaaaaaacagacacacaa

SEQ ID NO: 99211 - RNA, 18 nt, Human
aaaaaaaaaacagacaca

SEQ ID NO: 99212 - RNA, 18 nt, Human
aaaaaaaacagacacaca

SEQ ID NO: 99213 - RNA, 23 nt, Human
aaaaaaacaaaacaaaacacuaa

SEQ ID NO: 99214 - RNA, 20 nt, Human
aaaaaaacagacacacaaaa

SEQ ID NO: 99215 - RNA, 26 nt, Human
aaaaacaagacuaaaaaacaaacccc

SEQ ID NO: 99216 - RNA, 23 nt, Human
aaaacaaaacaaaacacuaagau

SEQ ID NO: 99217 - RNA, 18 nt, Human
aaaacaagacuaaaaaac

SEQ ID NO: 99218 - RNA, 20 nt, Human
aaaauaguacuaaucacuuu

SEQ ID NO: 99219 - RNA, 23 nt, Human
aaacaaaccccacacacacuccc

SEQ ID NO: 99220 - RNA, 20 nt, Human
aaacagaaauaaggggauuc

SEQ ID NO: 99221 - RNA, 24 nt, Human
aacaaaaaaaaauaguacuaauca

SEQ ID NO: 99222 - RNA, 24 nt, Human
aaccaaaauaagcugaaaaaaucc

SEQ ID NO: 99223 - RNA, 22 nt, Human
aagaggagggaaaaaaacaaaa

SEQ ID NO: 99224 - RNA, 26 nt, Human
aagaggagggaaaaaaacaaaacaaa

SEQ ID NO: 99225 - RNA, 18 nt, Human
aagcugaaaaaaucccua

SEQ ID NO: 99226 - RNA, 21 nt, Human
aaguguucuccccacccccac

SEQ ID NO: 99227 - RNA, 18 nt, Human
aauaagcugaaaaaaucc

SEQ ID NO: 99228 - RNA, 19 nt, Human
aauuaaaaaaacaagacua

SEQ ID NO: 99229 - RNA, 23 nt, Human
acaaaaaaaaaaaaaaaaaaaaa

SEQ ID NO: 99230 - RNA, 21 nt, Human
acaaaacacuaagauguccca

SEQ ID NO: 99231 - RNA, 26 nt, Human
acaagacuaaaaaacaaaccccacac

SEQ ID NO: 99232 - RNA, 21 nt, Human
acucaauucauuuggugcauu

SEQ ID NO: 99233 - RNA, 19 nt, Human
agaaaagaggaggggcaag

SEQ ID NO: 99234 - RNA, 21 nt, Human
agaauugagacaugagaaagc

SEQ ID NO: 99235 - RNA, 24 nt, Human
agacuaaaaaacaaaccccacaca

SEQ ID NO: 99236 - RNA, 20 nt, Human
agaggaggggcaagaugggc

SEQ ID NO: 99237 - RNA, 20 nt, Human
aucacuuuucugacaauaca

SEQ ID NO: 99238 - RNA, 18 nt, Human
augggcuccacccacuuu

SEQ ID NO: 99239 - RNA, 25 nt, Human
auugagacaugagaaagcauugguu

SEQ ID NO: 99240 - RNA, 21 nt, Human
auuuccucuacauaacagguc

SEQ ID NO: 99241 - RNA, 22 nt, Human
caaaauaagcugaaaaaauccc

SEQ ID NO: 99242 - RNA, 19 nt, Human
caaaccccacacacacucc

SEQ ID NO: 99243 - RNA, 20 nt, Human
caagacuaaaaaacaaaccc

SEQ ID NO: 99244 - RNA, 21 nt, Human
caagacuaaaaaacaaacccc

SEQ ID NO: 99245 - RNA, 24 nt, Human
cacacacucccccccaaaaaaaag

SEQ ID NO: 99246 - RNA, 18 nt, Human
caccuggcugcucuaggg

SEQ ID NO: 99247 - RNA, 23 nt, Human
cagaaauaaggggauuccccuga

SEQ ID NO: 99248 - RNA, 21 nt, Human
cagagucauccacaagcaugc

SEQ ID NO: 99249 - RNA, 24 nt, Human
cagcaaauggcaaacaaauguccu

SEQ ID NO: 99250 - RNA, 25 nt, Human
cagcaaauggcaaacaaauguccuu

SEQ ID NO: 99251 - RNA, 24 nt, Human
ccaaaaaaaucagcaaauggcaaa

SEQ ID NO: 99252 - RNA, 20 nt, Human
cccacacacacuccccccca

SEQ ID NO: 99253 - RNA, 21 nt, Human
cccacccccacccuaccccca

SEQ ID NO: 99254 - RNA, 23 nt, Human
ccccacacacacucccccccaaa

SEQ ID NO: 99255 - RNA, 24 nt, Human
ccccacccccacccuacccccagc

SEQ ID NO: 99256 - RNA, 18 nt, Human
ccccacccuacccccagc

SEQ ID NO: 99257 - RNA, 24 nt, Human
ccccccaaaaaaaagaggagggaa

SEQ ID NO: 99258 - RNA, 23 nt, Human
ccucauaugcaaaacagaaauug

SEQ ID NO: 99259 - RNA, 21 nt, Human
cuaaaaaacaaaccccacaca

SEQ ID NO: 99260 - RNA, 22 nt, Human
cuacugagcugcaaaucuaugc

SEQ ID NO: 99261 - RNA, 22 nt, Human
cucccccccaaaaaaaagagga

SEQ ID NO: 99262 - RNA, 23 nt, Human
cugaugaugaccucagcuucucc

SEQ ID NO: 99263 - RNA, 25 nt, Human
gaaaaaaacaaaacaaaacacuaag

SEQ ID NO: 99264 - RNA, 23 nt, Human
gaaggguuuuuguuuguuuaaua

SEQ ID NO: 99265 - RNA, 21 nt, Human
gaguggaaccagggagcagcu

SEQ ID NO: 99266 - RNA, 18 nt, Human
gcguccuagaaaagagga

SEQ ID NO: 99267 - RNA, 25 nt, Human
ggaaaaaaauuuuuuuaauuacaaa

SEQ ID NO: 99268 - RNA, 24 nt, Human
gggcauuugucauuauugcaaaaa

SEQ ID NO: 99269 - RNA, 21 nt, Human
ggguggagagaaaaggcaacu

SEQ ID NO: 99270 - RNA, 19 nt, Human
gucuucagcugcauucuag

SEQ ID NO: 99271 - RNA, 19 nt, Human
guggagagaaaaggcaacu

SEQ ID NO: 99272 - RNA, 23 nt, Human
uaaaaaaacaagacuaaaaaaca

SEQ ID NO: 99273 - RNA, 18 nt, Human
uaaaaaacaaaccccaca

SEQ ID NO: 99274 - RNA, 23 nt, Human
uaaaaaacaaaccccacacacac

SEQ ID NO: 99275 - RNA, 28 nt, Human
uaaaaaacaaaccccacacacacucccc

SEQ ID NO: 99276 - RNA, 22 nt, Human
uaagagcaccagauggggaaca

SEQ ID NO: 99277 - RNA, 21 nt, Human
uaagcugaaaaaaucccuauu

SEQ ID NO: 99278 - RNA, 30 nt, Human
uaagcugaaaaaaucccuauuaacacuuaa

SEQ ID NO: 99279 - RNA, 18 nt, Human
uaccuaugggccuugucu

SEQ ID NO: 99280 - RNA, 27 nt, Human
uaccucaacauuuuuaaaaauuggaaa

SEQ ID NO: 99281 - RNA, 19 nt, Human
uauagugcguccuagaaaa

SEQ ID NO: 99282 - RNA, 18 nt, Human
ucagugaaagaaguuagg

SEQ ID NO: 99283 - RNA, 21 nt, Human
uccccacccccacccuacccc

SEQ ID NO: 99284 - RNA, 21 nt, Human
ucuaaacuagaucuaggaagu

SEQ ID NO: 99285 - RNA, 20 nt, Human
ugaaggguuuuuguuuguuc

SEQ ID NO: 99286 - RNA, 18 nt, Human
ugagacaugagaaagcau

SEQ ID NO: 99287 - RNA, 23 nt, Human
ugaugccgacaccagcugugcag

SEQ ID NO: 99288 - RNA, 21 nt, Human
ugcaaaacagaaauaagggga

SEQ ID NO: 99289 - RNA, 18 nt, Human
uggaaccagggagcagcu

SEQ ID NO: 99290 - RNA, 18 nt, Human
uggaaucaauccguccuc

SEQ ID NO: 99291 - RNA, 21 nt, Human
ugggaaagauuaccucaacau

SEQ ID NO: 99292 - RNA, 20 nt, Human
ugucuucuagcaccaccccu

SEQ ID NO: 99293 - RNA, 21 nt, Human
uguuacagagucauccacaag

SEQ ID NO: 99294 - RNA, 28 nt, Human
uguucuccccacccccacccuaccccca

SEQ ID NO: 99295 - RNA, 27 nt, Human
uuaaacaacaaaaaaaaaaaaaaaaaa

SEQ ID NO: 99296 - RNA, 24 nt, Human
uuccucuacauaacaggucuucag

SEQ ID NO: 99297 - RNA, 23 nt, Human
uucuccccacccccacccuaccc

SEQ ID NO: 99298 - RNA, 24 nt, Human
uuuucugacaauacaauuacucaa

SEQ ID NO: 99299 - RNA, 20 nt, Human
uuuuuuuuuuuugaaggguu

SEQ ID NO: 99300 - RNA, 20 nt, Human
uuuuuuuuuuuuugaagggu

SEQ ID NO: 99301 - RNA, 18 nt, Human
uuuuuuuuuuuuuuuuug

SEQ ID NO: 99302 - RNA, 23 nt, Human
uuuuuuuuuuuuuuuuugaaggg

SEQ ID NO: 99303 - RNA, 22 nt, Human
augaaagccaguuacauaaaua

SEQ ID NO: 99304 - RNA, 22 nt, Human
caagagcccggcggcacgaggc

SEQ ID NO: 99305 - RNA, 21 nt, Human
ccggacgccuggcgcucgcgc

SEQ ID NO: 99306 - RNA, 20 nt, Human
cgcugagguaccaagagccc

SEQ ID NO: 99307 - RNA, 22 nt, Human
cggcggccggacgccuggcgcu

SEQ ID NO: 99308 - RNA, 18 nt, Human
gcggccggacgccuggcg

SEQ ID NO: 99309 - RNA, 23 nt, Human
uuuuuuuuuuuuuuggggacgga

SEQ ID NO: 99310 - RNA, 18 nt, Human
aaacaacugaaaaaccac

SEQ ID NO: 99311 - RNA, 23 nt, Human
aaaccggcaauuaauuaauccug

SEQ ID NO: 99312 - RNA, 18 nt, Human
aacacaaaaccaucaaac

SEQ ID NO: 99313 - RNA, 18 nt, Human
aacugaaaaaccacagau

SEQ ID NO: 99314 - RNA, 24 nt, Human
aauaaacaacugaaaaaccacaga

SEQ ID NO: 99315 - RNA, 24 nt, Human
acaaaaccaucaaaccacucuggc

SEQ ID NO: 99316 - RNA, 19 nt, Human
acaacugaaaaaccacaga

SEQ ID NO: 99317 - RNA, 23 nt, Human
acaacugaaaaaccacagauggu

SEQ ID NO: 99318 - RNA, 18 nt, Human
acacaaaaccaucaaacc

SEQ ID NO: 99319 - RNA, 22 nt, Human
caaagccgccacuuccuccaag

SEQ ID NO: 99320 - RNA, 19 nt, Human
caacugaaaaaccacagau

SEQ ID NO: 99321 - RNA, 18 nt, Human
caagcagccgagaggagc

SEQ ID NO: 99322 - RNA, 19 nt, Human
caagguaggagggggcgca

SEQ ID NO: 99323 - RNA, 19 nt, Human
caucaaaccacucuggcca

SEQ ID NO: 99324 - RNA, 21 nt, Human
ccaccggacucaaagccgcca

SEQ ID NO: 99325 - RNA, 18 nt, Human
cggcaagcagccgagagg

SEQ ID NO: 99326 - RNA, 21 nt, Human
cuaacacaaaaccaucaaacc

SEQ ID NO: 99327 - RNA, 20 nt, Human
gaguaugaaaaccggcaauu

SEQ ID NO: 99328 - RNA, 23 nt, Human
gauaaacaucaguuucagccuuc

SEQ ID NO: 99329 - RNA, 20 nt, Human
ggaagacuaacacaaaacca

SEQ ID NO: 99330 - RNA, 27 nt, Human
uaaaauaaacaacugaaaaaccacaga

SEQ ID NO: 99331 - RNA, 19 nt, Human
uaaacaacugaaaaaccac

SEQ ID NO: 99332 - RNA, 18 nt, Human
uaaaggccaaaacuaaaa

SEQ ID NO: 99333 - RNA, 20 nt, Human
uaaggucuuuauacacagaa

SEQ ID NO: 99334 - RNA, 22 nt, Human
uaggagggggcgcagaauagca

SEQ ID NO: 99335 - RNA, 21 nt, Human
ucaaaggcagcacuuuaaaau

SEQ ID NO: 99336 - RNA, 18 nt, Human
ugaaagggaaaaaguguc

SEQ ID NO: 99337 - RNA, 21 nt, Human
ugaagauaaacaucaguuuca

SEQ ID NO: 99338 - RNA, 26 nt, Human
ugaagauaaacaucaguuucagccuu

SEQ ID NO: 99339 - RNA, 24 nt, Human
uggcggcagggugucucggcaagc

SEQ ID NO: 99340 - RNA, 18 nt, Human
uuaaauuaaaggccaaaa

SEQ ID NO: 99341 - RNA, 25 nt, Human
aaaaaacaaacaaaaaaauacccac

SEQ ID NO: 99342 - RNA, 23 nt, Human
aaaaacaacaacaacaaaaaaaa

SEQ ID NO: 99343 - RNA, 21 nt, Human
aaaacaaacaaaaaaauaccc

SEQ ID NO: 99344 - RNA, 26 nt, Human
aaaacaaacaaaaaaauacccacuca

SEQ ID NO: 99345 - RNA, 23 nt, Human
aaaauaguaagacccaaagauau

SEQ ID NO: 99346 - RNA, 22 nt, Human
aaaaugaagacuguagcucucu

SEQ ID NO: 99347 - RNA, 22 nt, Human
aaacaacaacaacaaaaaaaac

SEQ ID NO: 99348 - RNA, 23 nt, Human
aaacaacaacaacaaaaaaaaca

SEQ ID NO: 99349 - RNA, 24 nt, Human
aaacaacaacaacaaaaaaaacaa

SEQ ID NO: 99350 - RNA, 20 nt, Human
aacaacaaaaaaaacaaaca

SEQ ID NO: 99351 - RNA, 24 nt, Human
aacagggugagacgcgccucaaaa

SEQ ID NO: 99352 - RNA, 20 nt, Human
aacaugguaaaacccugucu

SEQ ID NO: 99353 - RNA, 21 nt, Human
aacaugguaaaacccugucuc

SEQ ID NO: 99354 - RNA, 24 nt, Human
aacgcgccauugcacuccagccug

SEQ ID NO: 99355 - RNA, 26 nt, Human
aaggugggcagaucacuugaggguca

SEQ ID NO: 99356 - RNA, 19 nt, Human
acaaaaaaaacaaacaaaa

SEQ ID NO: 99357 - RNA, 18 nt, Human
acaacaaaaaaaacaaac

SEQ ID NO: 99358 - RNA, 19 nt, Human
acaacaaaaaaaacaaaca

SEQ ID NO: 99359 - RNA, 20 nt, Human
acaacaaaaaaaacaaacaa

SEQ ID NO: 99360 - RNA, 26 nt, Human
acaacaacaaaaaaaacaaacaaaaa

SEQ ID NO: 99361 - RNA, 23 nt, Human
acagcggcagcagcaaacuccag

SEQ ID NO: 99362 - RNA, 22 nt, Human
acagggugagacgcgccucaaa

SEQ ID NO: 99363 - RNA, 24 nt, Human
accacaagccccugaacaaacugc

SEQ ID NO: 99364 - RNA, 24 nt, Human
accaccacaagccccugaacaaac

SEQ ID NO: 99365 - RNA, 18 nt, Human
acccagcuccgcugccuc

SEQ ID NO: 99366 - RNA, 25 nt, Human
accccaggccuccucgagcaauccu

SEQ ID NO: 99367 - RNA, 18 nt, Human
acccugucucuacuaaaa

SEQ ID NO: 99368 - RNA, 25 nt, Human
acgcgccucaaaaacaagggaacgc

SEQ ID NO: 99369 - RNA, 24 nt, Human
acuccagccugggcaacaggguga

SEQ ID NO: 99370 - RNA, 24 nt, Human
agagaacgcgccauugcacuccag

SEQ ID NO: 99371 - RNA, 24 nt, Human
agcacuuagggaggccaagguggg

SEQ ID NO: 99372 - RNA, 22 nt, Human
agccuggccaacaugguaaaac

SEQ ID NO: 99373 - RNA, 24 nt, Human
agccuggccaacaugguaaaaccc

SEQ ID NO: 99374 - RNA, 22 nt, Human
agccugggcaacagggugagac

SEQ ID NO: 99375 - RNA, 23 nt, Human
agcggcagcagcaaacuccagcc

SEQ ID NO: 99376 - RNA, 22 nt, Human
aggcaagagaaucacuucaacc

SEQ ID NO: 99377 - RNA, 25 nt, Human
aggcaagagaaucacuucaaccugg

SEQ ID NO: 99378 - RNA, 21 nt, Human
aggccaaggugggcagaucac

SEQ ID NO: 99379 - RNA, 24 nt, Human
auugcacuccagccugggcaacag

SEQ ID NO: 99380 - RNA, 20 nt, Human
caacaaaaaaaacaaacaaa

SEQ ID NO: 99381 - RNA, 21 nt, Human
caacaaaaaaaacaaacaaaa

SEQ ID NO: 99382 - RNA, 22 nt, Human
caacaacaaaaaaaacaaacaa

SEQ ID NO: 99383 - RNA, 21 nt, Human
caacaacaacaaaaaaaacaa

SEQ ID NO: 99384 - RNA, 25 nt, Human
caacaacaacaaaaaaaacaaacaa

SEQ ID NO: 99385 - RNA, 24 nt, Human
caacaugguaaaacccugucucua

SEQ ID NO: 99386 - RNA, 24 nt, Human
caagaccagccuggccaacauggu

SEQ ID NO: 99387 - RNA, 23 nt, Human
caagccccugaacaaacugcaca

SEQ ID NO: 99388 - RNA, 23 nt, Human
caaggugggcagaucacuugagg

SEQ ID NO: 99389 - RNA, 21 nt, Human
cacaagccccugaacaaacug

SEQ ID NO: 99390 - RNA, 22 nt, Human
cacagcggcagcagcaaacucc

SEQ ID NO: 99391 - RNA, 18 nt, Human
cacagcucaggccucgcc

SEQ ID NO: 99392 - RNA, 23 nt, Human
cacagcucaggccucgccggaac

SEQ ID NO: 99393 - RNA, 20 nt, Human
caccacaagccccugaacaa

SEQ ID NO: 99394 - RNA, 22 nt, Human
caccaccacaagccccugaaca

SEQ ID NO: 99395 - RNA, 23 nt, Human
caccaccacaagccccugaacaa

SEQ ID NO: 99396 - RNA, 24 nt, Human
caccaccacaagccccugaacaaa

SEQ ID NO: 99397 - RNA, 21 nt, Human
caccuguaaucccagcuacuc

SEQ ID NO: 99398 - RNA, 24 nt, Human
caccuguaaucccagcuacucggg

SEQ ID NO: 99399 - RNA, 24 nt, Human
cacgccuauaaucccagcacuuag

SEQ ID NO: 99400 - RNA, 20 nt, Human
cacuccagccugggcaacag

SEQ ID NO: 99401 - RNA, 23 nt, Human
cacuccagccugggcaacagggu

SEQ ID NO: 99402 - RNA, 24 nt, Human
cacuccagccugggcaacagggug

SEQ ID NO: 99403 - RNA, 24 nt, Human
cacuugagggucaggaguucaaga

SEQ ID NO: 99404 - RNA, 19 nt, Human
cacuugcaagcacauuggc

SEQ ID NO: 99405 - RNA, 25 nt, Human
cagaucacuugagggucaggaguuc

SEQ ID NO: 99406 - RNA, 24 nt, Human
cagcacuuagggaggccaaggugg

SEQ ID NO: 99407 - RNA, 22 nt, Human
cagcagcaaacuccagccgcgc

SEQ ID NO: 99408 - RNA, 18 nt, Human
cauugcacuccagccugg

SEQ ID NO: 99409 - RNA, 19 nt, Human
cauugcacuccagccuggg

SEQ ID NO: 99410 - RNA, 21 nt, Human
cauugcacuccagccugggca

SEQ ID NO: 99411 - RNA, 23 nt, Human
cauugcacuccagccugggcaac

SEQ ID NO: 99412 - RNA, 24 nt, Human
cauugcacuccagccugggcaaca

SEQ ID NO: 99413 - RNA, 21 nt, Human
ccaaagauauuauucugugcu

SEQ ID NO: 99414 - RNA, 22 nt, Human
ccaccuccucagugcaggaucc

SEQ ID NO: 99415 - RNA, 20 nt, Human
ccaguguccuccaaaucucc

SEQ ID NO: 99416 - RNA, 20 nt, Human
ccauugcacuccagccuggg

SEQ ID NO: 99417 - RNA, 21 nt, Human
ccauugcacuccagccugggc

SEQ ID NO: 99418 - RNA, 22 nt, Human
ccauugcacuccagccugggca

SEQ ID NO: 99419 - RNA, 23 nt, Human
ccauugcacuccagccugggcaa

SEQ ID NO: 99420 - RNA, 24 nt, Human
ccauugcacuccagccugggcaac

SEQ ID NO: 99421 - RNA, 23 nt, Human
cccagcuccgcugccucacagaa

SEQ ID NO: 99422 - RNA, 26 nt, Human
ccucaaaaacaacaacaacaaaaaaa

SEQ ID NO: 99423 - RNA, 20 nt, Human
ccuccaaaucuccaugugga

SEQ ID NO: 99424 - RNA, 21 nt, Human
ccuccaaaucuccauguggac

SEQ ID NO: 99425 - RNA, 23 nt, Human
ccuccucgagcaauccucuucuu

SEQ ID NO: 99426 - RNA, 27 nt, Human
ccucgagcaauccucuucuuuccaccu

SEQ ID NO: 99427 - RNA, 22 nt, Human
ccuggccaacaugguaaaaccc

SEQ ID NO: 99428 - RNA, 24 nt, Human
ccuggccaacaugguaaaacccug

SEQ ID NO: 99429 - RNA, 21 nt, Human
ccuguaaucccagcuacucgg

SEQ ID NO: 99430 - RNA, 20 nt, Human
cgccucaaaaacaacaacaa

SEQ ID NO: 99431 - RNA, 24 nt, Human
cgccucaaaaacaacaacaacaaa

SEQ ID NO: 99432 - RNA, 21 nt, Human
cggaacccgcagccuucaccc

SEQ ID NO: 99433 - RNA, 23 nt, Human
cucaaaaacaacaacaacaaaaa

SEQ ID NO: 99434 - RNA, 27 nt, Human
cucacagaccccaggccuccucgaggg

SEQ ID NO: 99435 - RNA, 22 nt, Human
cucacgccuauaaucccagcac

SEQ ID NO: 99436 - RNA, 24 nt, Human
cucacgccuauaaucccagcacuu

SEQ ID NO: 99437 - RNA, 24 nt, Human
cucacgucucucacacgcagccuc

SEQ ID NO: 99438 - RNA, 18 nt, Human
cucucggacucaccacca

SEQ ID NO: 99439 - RNA, 22 nt, Human
cucucuaaaugccagcugaaua

SEQ ID NO: 99440 - RNA, 21 nt, Human
cuguaaucccagcuacucggg

SEQ ID NO: 99441 - RNA, 19 nt, Human
cugugcuaauauuaaagaa

SEQ ID NO: 99442 - RNA, 24 nt, Human
cuugagggucaggaguucaagacc

SEQ ID NO: 99443 - RNA, 21 nt, Human
gagcaugguggcucacgccua

SEQ ID NO: 99444 - RNA, 25 nt, Human
gaucacuugagggucaggaguucaa

SEQ ID NO: 99445 - RNA, 21 nt, Human
gcacuccagccugggcaacag

SEQ ID NO: 99446 - RNA, 24 nt, Human
gccaacaugguaaaacccugucuc

SEQ ID NO: 99447 - RNA, 22 nt, Human
gccauugcacuccagccugggc

SEQ ID NO: 99448 - RNA, 24 nt, Human
gccauugcacuccagccugggcaa

SEQ ID NO: 99449 - RNA, 19 nt, Human
ggcaccuguaaucccagcu

SEQ ID NO: 99450 - RNA, 23 nt, Human
ggcgcgguggugggcaccuguaa

SEQ ID NO: 99451 - RNA, 21 nt, Human
ggcugagcaugguggcucacg

SEQ ID NO: 99452 - RNA, 23 nt, Human
gggaggccaaggugggcagauca

SEQ ID NO: 99453 - RNA, 19 nt, Human
gggaggcugaggcaagaga

SEQ ID NO: 99454 - RNA, 23 nt, Human
gggaggcugaggcaagagaauca

SEQ ID NO: 99455 - RNA, 27 nt, Human
gggcagaucacuugagggucaggaguu

SEQ ID NO: 99456 - RNA, 24 nt, Human
gguggcucacgccuauaaucccag

SEQ ID NO: 99457 - RNA, 23 nt, Human
gguggugggcaccuguaauccca

SEQ ID NO: 99458 - RNA, 24 nt, Human
gguggugggcaccuguaaucccag

SEQ ID NO: 99459 - RNA, 24 nt, Human
uaaaaauaguaagacccaaagaua

SEQ ID NO: 99460 - RNA, 21 nt, Human
uaaaauucauuggcuucaagu

SEQ ID NO: 99461 - RNA, 22 nt, Human
uaaagcacuaaaaugaagacug

SEQ ID NO: 99462 - RNA, 23 nt, Human
uagauuaaaauucauuggcuuca

SEQ ID NO: 99463 - RNA, 18 nt, Human
ucaaaaacaacaacaaca

SEQ ID NO: 99464 - RNA, 24 nt, Human
ucacuugagggucaggaguucaag

SEQ ID NO: 99465 - RNA, 26 nt, Human
ucaggcccgaauguguaaagcacuaa

SEQ ID NO: 99466 - RNA, 22 nt, Human
uccaccuccucagugcaggauc

SEQ ID NO: 99467 - RNA, 23 nt, Human
uccagccugggcaacagggugag

SEQ ID NO: 99468 - RNA, 24 nt, Human
uccagccugggcaacagggugaga

SEQ ID NO: 99469 - RNA, 21 nt, Human
uccucgagcaauccucuucuu

SEQ ID NO: 99470 - RNA, 28 nt, Human
ucgagcaauccucuucuuuccaccuccu

SEQ ID NO: 99471 - RNA, 25 nt, Human
ucgggaggcugaggcaagagaauca

SEQ ID NO: 99472 - RNA, 25 nt, Human
ucucggacucaccaccacaagcccc

SEQ ID NO: 99473 - RNA, 23 nt, Human
ucucuacuaaaaauuaaaaaauu

SEQ ID NO: 99474 - RNA, 21 nt, Human
ugaagacuguagcucucuaaa

SEQ ID NO: 99475 - RNA, 19 nt, Human
ugagacgcgccucaaaaac

SEQ ID NO: 99476 - RNA, 18 nt, Human
ugaggcaagagaaucacu

SEQ ID NO: 99477 - RNA, 19 nt, Human
ugaggcaagagaaucacuu

SEQ ID NO: 99478 - RNA, 24 nt, Human
ugaggcaagagaaucacuucaacc

SEQ ID NO: 99479 - RNA, 22 nt, Human
ugcacuccagccugggcaacag

SEQ ID NO: 99480 - RNA, 24 nt, Human
uggccaacaugguaaaacccuguc

SEQ ID NO: 99481 - RNA, 21 nt, Human
uggcucacgccuauaauccca

SEQ ID NO: 99482 - RNA, 22 nt, Human
uggcucacgccuauaaucccag

SEQ ID NO: 99483 - RNA, 24 nt, Human
uggcucacgccuauaaucccagca

SEQ ID NO: 99484 - RNA, 25 nt, Human
ugggcagaucacuugagggucagga

SEQ ID NO: 99485 - RNA, 24 nt, Human
ugguggcucacgccuauaauccca

SEQ ID NO: 99486 - RNA, 22 nt, Human
uggugggcaccuguaaucccag

SEQ ID NO: 99487 - RNA, 20 nt, Human
ugugcuaauauuaaagaauc

SEQ ID NO: 99488 - RNA, 22 nt, Human
ugugcuaauauuaaagaaucua

SEQ ID NO: 99489 - RNA, 20 nt, Human
uguguaaagcacuaaaauga

SEQ ID NO: 99490 - RNA, 25 nt, Human
uuacccuaaacuuaaaguucuuaac

SEQ ID NO: 99491 - RNA, 18 nt, Human
uuagcugggcgcgguggu

SEQ ID NO: 99492 - RNA, 24 nt, Human
uuagcugggcgcgguggugggcac

SEQ ID NO: 99493 - RNA, 23 nt, Human
uugagggucaggaguucaagacc

SEQ ID NO: 99494 - RNA, 23 nt, Human
aagaaaaaaauggcaauucacac

SEQ ID NO: 99495 - RNA, 22 nt, Human
aagacuuagucaaaacaggaua

SEQ ID NO: 99496 - RNA, 22 nt, Human
aagcauuuggacuaucaaucuu

SEQ ID NO: 99497 - RNA, 19 nt, Human
aaugugccaccaaacacua

SEQ ID NO: 99498 - RNA, 19 nt, Human
agaaggaagaaaauugaga

SEQ ID NO: 99499 - RNA, 22 nt, Human
agaauguuuuagguaggggcag

SEQ ID NO: 99500 - RNA, 18 nt, Human
agggguuacauccacagg

SEQ ID NO: 99501 - RNA, 21 nt, Human
agguaggggcagagaaggaag

SEQ ID NO: 99502 - RNA, 24 nt, Human
aucaaucuucaccuugguccugca

SEQ ID NO: 99503 - RNA, 21 nt, Human
auccuauacuuaccaaacaga

SEQ ID NO: 99504 - RNA, 21 nt, Human
caaaaugaauacaugucccua

SEQ ID NO: 99505 - RNA, 21 nt, Human
caccagcaccagguugagaaa

SEQ ID NO: 99506 - RNA, 28 nt, Human
caccagcaccagguugaguugguggucc

SEQ ID NO: 99507 - RNA, 21 nt, Human
caggauacagagaucuggaug

SEQ ID NO: 99508 - RNA, 22 nt, Human
cauaacucuaaaagaaucuaca

SEQ ID NO: 99509 - RNA, 26 nt, Human
cauccagaaacuuuguggucagcacc

SEQ ID NO: 99510 - RNA, 21 nt, Human
ccccaugaccaacauuuccuc

SEQ ID NO: 99511 - RNA, 21 nt, Human
ccuaaaaucuacuuagguagg

SEQ ID NO: 99512 - RNA, 21 nt, Human
ccugggucgccgucuccaaga

SEQ ID NO: 99513 - RNA, 22 nt, Human
ccugggucgccgucuccaagag

SEQ ID NO: 99514 - RNA, 24 nt, Human
cuagaaaaggaaauuaucuucuuu

SEQ ID NO: 99515 - RNA, 21 nt, Human
cuguauucacuuuuccuuuca

SEQ ID NO: 99516 - RNA, 19 nt, Human
gaacccaccuaaaaucuac

SEQ ID NO: 99517 - RNA, 19 nt, Human
gaacccaccuaaaaucuac

SEQ ID NO: 99518 - RNA, 18 nt, Human
gaugcaaaaugccagcua

SEQ ID NO: 99519 - RNA, 22 nt, Human
gcagagaaggaagaaaauugag

SEQ ID NO: 99520 - RNA, 20 nt, Human
gcuaagggguuacauccaca

SEQ ID NO: 99521 - RNA, 18 nt, Human
gcuccuuuuucuguaugu

SEQ ID NO: 99522 - RNA, 24 nt, Human
gggcagagaaggaagaaaauugag

SEQ ID NO: 99523 - RNA, 23 nt, Human
guccuuuucucuuugccuacuuc

SEQ ID NO: 99524 - RNA, 26 nt, Human
uaacaguaaacauuaaaugaagaucc

SEQ ID NO: 99525 - RNA, 21 nt, Human
uaagaaaaaaauggcaauuca

SEQ ID NO: 99526 - RNA, 20 nt, Human
uagggaagcuaaaaaucuga

SEQ ID NO: 99527 - RNA, 20 nt, Human
uauacaaauucaagagcauu

SEQ ID NO: 99528 - RNA, 18 nt, Human
ucauuguuuuaguguuca

SEQ ID NO: 99529 - RNA, 21 nt, Human
ucauuuaauccucaucacauc

SEQ ID NO: 99530 - RNA, 24 nt, Human
uccacagggggagcaaagcagggu

SEQ ID NO: 99531 - RNA, 22 nt, Human
ucccaacuguaaacacguacaa

SEQ ID NO: 99532 - RNA, 18 nt, Human
ucccaagaacuaucccag

SEQ ID NO: 99533 - RNA, 21 nt, Human
uccccaaacuauaccuagcuc

SEQ ID NO: 99534 - RNA, 20 nt, Human
ucugucagcugaccacccac

SEQ ID NO: 99535 - RNA, 22 nt, Human
ucuucccaacccaccuaagacu

SEQ ID NO: 99536 - RNA, 19 nt, Human
ugagaagccaguaagaaaa

SEQ ID NO: 99537 - RNA, 23 nt, Human
ugauacuuugccccaugguaaca

SEQ ID NO: 99538 - RNA, 19 nt, Human
uggaugaauucaauuuuaa

SEQ ID NO: 99539 - RNA, 19 nt, Human
uucaccuugguccugcagc

SEQ ID NO: 99540 - RNA, 19 nt, Human
uucaccuugguccugcagc

SEQ ID NO: 99541 - RNA, 21 nt, Human
uuuucuguaugucagugaaag

SEQ ID NO: 99542 - RNA, 22 nt, Human
aaaaaaaaaaaaaaaggcagag

SEQ ID NO: 99543 - RNA, 19 nt, Human
aaaaaaaaaaaagcuuuaa

SEQ ID NO: 99544 - RNA, 21 nt, Human
aaaaaaaaaaagcuuuaagaa

SEQ ID NO: 99545 - RNA, 20 nt, Human
aaaacuacagugacauucuc

SEQ ID NO: 99546 - RNA, 21 nt, Human
aaaaggaggcuggugggagaa

SEQ ID NO: 99547 - RNA, 18 nt, Human
aaaaucugcaaggugcug

SEQ ID NO: 99548 - RNA, 19 nt, Human
aaacacauguugagacucc

SEQ ID NO: 99549 - RNA, 20 nt, Human
aaacuuauuagagcuauaaa

SEQ ID NO: 99550 - RNA, 19 nt, Human
aaaguugaaauucacauuu

SEQ ID NO: 99551 - RNA, 24 nt, Human
aaauugccaggcucaaugacaagc

SEQ ID NO: 99552 - RNA, 23 nt, Human
aacaagucacuggauagcugccc

SEQ ID NO: 99553 - RNA, 20 nt, Human
aacacagggagaccccgucu

SEQ ID NO: 99554 - RNA, 20 nt, Human
aacauagcaagaccccaucu

SEQ ID NO: 99555 - RNA, 21 nt, Human
aagaccccaucuguacaaaaa

SEQ ID NO: 99556 - RNA, 23 nt, Human
aagauccucacuacccccuaccc

SEQ ID NO: 99557 - RNA, 18 nt, Human
aagcucuccugccaucuc

SEQ ID NO: 99558 - RNA, 24 nt, Human
aaggcagaaggauugcuugaggcc

SEQ ID NO: 99559 - RNA, 21 nt, Human
acaaacuuauuagagcuauaa

SEQ ID NO: 99560 - RNA, 22 nt, Human
acacaauuaucagcacccacac

SEQ ID NO: 99561 - RNA, 24 nt, Human
acaucacugcaucccaggccuggg

SEQ ID NO: 99562 - RNA, 25 nt, Human
acaucacugcaucccaggccugggc

SEQ ID NO: 99563 - RNA, 18 nt, Human
acauucucuacacagaac

SEQ ID NO: 99564 - RNA, 21 nt, Human
acccccaaagaaaauacacaa

SEQ ID NO: 99565 - RNA, 20 nt, Human
accucaaucauccucagcau

SEQ ID NO: 99566 - RNA, 24 nt, Human
acuaacugcaucacuaaccagucu

SEQ ID NO: 99567 - RNA, 23 nt, Human
acugcacuccagccuggccgaua

SEQ ID NO: 99568 - RNA, 20 nt, Human
acugcaucacuaaccagucu

SEQ ID NO: 99569 - RNA, 18 nt, Human
agaugggaggaucacuug

SEQ ID NO: 99570 - RNA, 23 nt, Human
agaugggaggaucacuugagccc

SEQ ID NO: 99571 - RNA, 24 nt, Human
agcagcucaugcccacaaucccag

SEQ ID NO: 99572 - RNA, 24 nt, Human
agccuggccgauagaaugagaccc

SEQ ID NO: 99573 - RNA, 24 nt, Human
agcuugggcaacauagcaagaccc

SEQ ID NO: 99574 - RNA, 20 nt, Human
aggaguuugagaccagccug

SEQ ID NO: 99575 - RNA, 24 nt, Human
aggaucacuugagcccaggaguuu

SEQ ID NO: 99576 - RNA, 24 nt, Human
aggauugcuugaggccaggaguuu

SEQ ID NO: 99577 - RNA, 18 nt, Human
aggcagaaggauugcuug

SEQ ID NO: 99578 - RNA, 22 nt, Human
aggcagaaggauugcuugaggc

SEQ ID NO: 99579 - RNA, 18 nt, Human
agggaguuggggagcugg

SEQ ID NO: 99580 - RNA, 19 nt, Human
agggccacauuuucuucuu

SEQ ID NO: 99581 - RNA, 24 nt, Human
aggugcaguggcucaugucuguaa

SEQ ID NO: 99582 - RNA, 23 nt, Human
aguggcucaugucuguaauccca

SEQ ID NO: 99583 - RNA, 22 nt, Human
auagaaugagacccugucuuaa

SEQ ID NO: 99584 - RNA, 24 nt, Human
auagaaugagacccugucuuaaaa

SEQ ID NO: 99585 - RNA, 21 nt, Human
aucaagacaauuccaaaaagu

SEQ ID NO: 99586 - RNA, 24 nt, Human
aucacuugagcccaggaguuugag

SEQ ID NO: 99587 - RNA, 19 nt, Human
augucuguaaucccaauac

SEQ ID NO: 99588 - RNA, 23 nt, Human
auuauauacacaaaacaacagaa

SEQ ID NO: 99589 - RNA, 24 nt, Human
auugcaccacugcacuccagccug

SEQ ID NO: 99590 - RNA, 21 nt, Human
caagacaauuccaaaaaguga

SEQ ID NO: 99591 - RNA, 26 nt, Human
caaggcagaaggauugcuugaggcca

SEQ ID NO: 99592 - RNA, 18 nt, Human
caaguuacauacucagga

SEQ ID NO: 99593 - RNA, 19 nt, Human
caccaccauguaaagagug

SEQ ID NO: 99594 - RNA, 18 nt, Human
cacugcacuccagccugg

SEQ ID NO: 99595 - RNA, 21 nt, Human
cacugcacuccagccuggccg

SEQ ID NO: 99596 - RNA, 23 nt, Human
cacugcacuccagccuggccgau

SEQ ID NO: 99597 - RNA, 25 nt, Human
cacugcacuccagccuggccgauag

SEQ ID NO: 99598 - RNA, 19 nt, Human
cacugcaucccaggccugg

SEQ ID NO: 99599 - RNA, 24 nt, Human
cacugcaucccaggccugggcgau

SEQ ID NO: 99600 - RNA, 24 nt, Human
cagcacuuuggggggccaaggcag

SEQ ID NO: 99601 - RNA, 25 nt, Human
cauagcaagaccccaucuguacaaa

SEQ ID NO: 99602 - RNA, 20 nt, Human
caucacugcaucccaggccu

SEQ ID NO: 99603 - RNA, 24 nt, Human
caugcccacaaucccagcacuuug

SEQ ID NO: 99604 - RNA, 23 nt, Human
caugggucuggggcccgccucuc

SEQ ID NO: 99605 - RNA, 20 nt, Human
caugucuguaaucccaauac

SEQ ID NO: 99606 - RNA, 23 nt, Human
ccaaaacacuugagaaacaguaa

SEQ ID NO: 99607 - RNA, 22 nt, Human
ccacauuuucuucuugcuccua

SEQ ID NO: 99608 - RNA, 19 nt, Human
ccacugcacuccagccugg

SEQ ID NO: 99609 - RNA, 19 nt, Human
ccacugcacuccagccugg

SEQ ID NO: 99610 - RNA, 20 nt, Human
ccacugcacuccagccuggc

SEQ ID NO: 99611 - RNA, 22 nt, Human
ccacugcacuccagccuggccg

SEQ ID NO: 99612 - RNA, 23 nt, Human
ccacugcacuccagccuggccga

SEQ ID NO: 99613 - RNA, 23 nt, Human
ccacugcacuccagccuggccga

SEQ ID NO: 99614 - RNA, 18 nt, Human
ccagacaaagacacaaac

SEQ ID NO: 99615 - RNA, 18 nt, Human
cccaaagaaaauacacaa

SEQ ID NO: 99616 - RNA, 20 nt, Human
cccaauacucugggaggcca

SEQ ID NO: 99617 - RNA, 25 nt, Human
cccagaguuugagguuacagugagc

SEQ ID NO: 99618 - RNA, 20 nt, Human
ccugccaucuccaagcccac

SEQ ID NO: 99619 - RNA, 23 nt, Human
ccugucuuaaaaaaaaaaaaaaa

SEQ ID NO: 99620 - RNA, 18 nt, Human
ccuguggucccagcuacu

SEQ ID NO: 99621 - RNA, 21 nt, Human
ccuguggucccagcuacuugg

SEQ ID NO: 99622 - RNA, 26 nt, Human
ccuuuagggccacauuuucuucuuga

SEQ ID NO: 99623 - RNA, 18 nt, Human
cgggucgggccgggcugg

SEQ ID NO: 99624 - RNA, 22 nt, Human
cuaacccccuuuagggccacau

SEQ ID NO: 99625 - RNA, 18 nt, Human
cuacccccuaccccucaa

SEQ ID NO: 99626 - RNA, 30 nt, Human
cucaagggaagggagcugaaaaaccacccc

SEQ ID NO: 99627 - RNA, 20 nt, Human
cucacuacccccuaccccuc

SEQ ID NO: 99628 - RNA, 24 nt, Human
cucaugcccacaaucccagcacuu

SEQ ID NO: 99629 - RNA, 20 nt, Human
cucaugucuguaaucccaau

SEQ ID NO: 99630 - RNA, 26 nt, Human
cugcagcacuuuaggcacuauucuaa

SEQ ID NO: 99631 - RNA, 22 nt, Human
cugcagugagcugugauugcac

SEQ ID NO: 99632 - RNA, 19 nt, Human
cugcaucccaggccugggc

SEQ ID NO: 99633 - RNA, 19 nt, Human
cugcaucccaggccugggc

SEQ ID NO: 99634 - RNA, 18 nt, Human
cugccgaaaaaucaagac

SEQ ID NO: 99635 - RNA, 20 nt, Human
cuggccgauagaaugagacc

SEQ ID NO: 99636 - RNA, 19 nt, Human
cuguaaucccaauacucug

SEQ ID NO: 99637 - RNA, 21 nt, Human
cuguaaucccaauacucuggg

SEQ ID NO: 99638 - RNA, 20 nt, Human
cuuaaaaaaaaaaaaaaagg

SEQ ID NO: 99639 - RNA, 20 nt, Human
cuuaaaaaauggcagggagu

SEQ ID NO: 99640 - RNA, 22 nt, Human
cuucuugcuccuaagaaaaaau

SEQ ID NO: 99641 - RNA, 20 nt, Human
cuugaggccaggaguuuaag

SEQ ID NO: 99642 - RNA, 19 nt, Human
cuuuuggacaucaccacca

SEQ ID NO: 99643 - RNA, 21 nt, Human
cuuuuggacaucaccaccaug

SEQ ID NO: 99644 - RNA, 22 nt, Human
gagacuccuccauuccuuccag

SEQ ID NO: 99645 - RNA, 18 nt, Human
gagccccagaguuugagg

SEQ ID NO: 99646 - RNA, 20 nt, Human
gagcgggcuggagucugaac

SEQ ID NO: 99647 - RNA, 20 nt, Human
gaggcugaggugcaaggaua

SEQ ID NO: 99648 - RNA, 20 nt, Human
gauagaaugagacccugucu

SEQ ID NO: 99649 - RNA, 18 nt, Human
gauagcuugagccuggga

SEQ ID NO: 99650 - RNA, 24 nt, Human
gaucacuugagcccaggaguuuga

SEQ ID NO: 99651 - RNA, 24 nt, Human
gauugcuugaggccaggaguuuaa

SEQ ID NO: 99652 - RNA, 22 nt, Human
gcaaagcaacugaauucaggag

SEQ ID NO: 99653 - RNA, 22 nt, Human
gcccaggaguuugagaccagcc

SEQ ID NO: 99654 - RNA, 24 nt, Human
gccgauagaaugagacccugucuu

SEQ ID NO: 99655 - RNA, 24 nt, Human
gccugggaggacaaggcugcagug

SEQ ID NO: 99656 - RNA, 19 nt, Human
gcggucgggucgggccggg

SEQ ID NO: 99657 - RNA, 21 nt, Human
gcuggagucugaacugacuuc

SEQ ID NO: 99658 - RNA, 24 nt, Human
gcugggcaggugcaguggcucaug

SEQ ID NO: 99659 - RNA, 22 nt, Human
ggaucacuugagcccaggaguu

SEQ ID NO: 99660 - RNA, 23 nt, Human
ggaucacuugagcccaggaguuu

SEQ ID NO: 99661 - RNA, 22 nt, Human
ggauugcuugaggccaggaguu

SEQ ID NO: 99662 - RNA, 23 nt, Human
ggauugcuugaggccaggaguuu

SEQ ID NO: 99663 - RNA, 18 nt, Human
ggcaggugcaguggcuca

SEQ ID NO: 99664 - RNA, 22 nt, Human
gggaguuggggagcugggcagg

SEQ ID NO: 99665 - RNA, 22 nt, Human
gggcaggugcaguggcucaugu

SEQ ID NO: 99666 - RNA, 21 nt, Human
gggcuuugaguacaaaccacg

SEQ ID NO: 99667 - RNA, 22 nt, Human
guaaagcuauuucaacaaaagu

SEQ ID NO: 99668 - RNA, 20 nt, Human
guaguggugcaugccugugg

SEQ ID NO: 99669 - RNA, 20 nt, Human
gugcacaccuggaauugggc

SEQ ID NO: 99670 - RNA, 22 nt, Human
uaaaaagagauccaaaucaaga

SEQ ID NO: 99671 - RNA, 24 nt, Human
uaaaagagcccaauaauuucugca

SEQ ID NO: 99672 - RNA, 23 nt, Human
uaaagcuauuucaacaaaagucu

SEQ ID NO: 99673 - RNA, 21 nt, Human
uaaugaacacacuuacucaga

SEQ ID NO: 99674 - RNA, 22 nt, Human
uacacaaaacaacagaacuaga

SEQ ID NO: 99675 - RNA, 23 nt, Human
uagggccacauuuucuucuugcu

SEQ ID NO: 99676 - RNA, 21 nt, Human
uaguaaugagcagaagcacac

SEQ ID NO: 99677 - RNA, 24 nt, Human
uaguggugcaugccugugguccca

SEQ ID NO: 99678 - RNA, 20 nt, Human
uauauacacaaaacaacaga

SEQ ID NO: 99679 - RNA, 21 nt, Human
uauauacacaaaacaacagaa

SEQ ID NO: 99680 - RNA, 24 nt, Human
uaucagcacccacacauguauaca

SEQ ID NO: 99681 - RNA, 21 nt, Human
uauuagagcuauaaaguggag

SEQ ID NO: 99682 - RNA, 24 nt, Human
ucacuacccccuaccccucaacua

SEQ ID NO: 99683 - RNA, 21 nt, Human
ucaggagaugaaagagggaag

SEQ ID NO: 99684 - RNA, 22 nt, Human
ucaugcccacaaucccagcacu

SEQ ID NO: 99685 - RNA, 22 nt, Human
ucaugucuguaaucccaauacu

SEQ ID NO: 99686 - RNA, 19 nt, Human
uccaaaacacuugagaaac

SEQ ID NO: 99687 - RNA, 24 nt, Human
uccgcaagcucacaggugcuuugc

SEQ ID NO: 99688 - RNA, 23 nt, Human
ucuccugccaucuccaagcccac

SEQ ID NO: 99689 - RNA, 18 nt, Human
ucuguagacaucaucaaa

SEQ ID NO: 99690 - RNA, 19 nt, Human
ucugucuuuggcugcagca

SEQ ID NO: 99691 - RNA, 26 nt, Human
ucuuuucuuugauugucaaaaguuga

SEQ ID NO: 99692 - RNA, 23 nt, Human
ugaaagagggaagccauuaaagg

SEQ ID NO: 99693 - RNA, 18 nt, Human
ugacuuccgcaagcucac

SEQ ID NO: 99694 - RNA, 19 nt, Human
ugacuucuccccuucuuuu

SEQ ID NO: 99695 - RNA, 23 nt, Human
ugagcccaggaguuugagaccag

SEQ ID NO: 99696 - RNA, 24 nt, Human
ugagccugggaggacaaggcugca

SEQ ID NO: 99697 - RNA, 20 nt, Human
ugaucacaucacugcauccc

SEQ ID NO: 99698 - RNA, 21 nt, Human
ugcaccacugcacuccagccu

SEQ ID NO: 99699 - RNA, 24 nt, Human
ugccuguggucccagcuacuuggg

SEQ ID NO: 99700 - RNA, 18 nt, Human
uggacaucaccaccaugu

SEQ ID NO: 99701 - RNA, 22 nt, Human
uggcagggaguuggggagcugg

SEQ ID NO: 99702 - RNA, 24 nt, Human
uggccgauagaaugagacccuguc

SEQ ID NO: 99703 - RNA, 21 nt, Human
uggcucaugucuguaauccca

SEQ ID NO: 99704 - RNA, 22 nt, Human
uggcucaugucuguaaucccaa

SEQ ID NO: 99705 - RNA, 24 nt, Human
uggcucaugucuguaaucccaaua

SEQ ID NO: 99706 - RNA, 21 nt, Human
uggcugcagcacuuuaggcac

SEQ ID NO: 99707 - RNA, 24 nt, Human
ugggaggccaagaugggaggauca

SEQ ID NO: 99708 - RNA, 22 nt, Human
ugggcaacauagcaagacccca

SEQ ID NO: 99709 - RNA, 18 nt, Human
uggugcaugccugugguc

SEQ ID NO: 99710 - RNA, 24 nt, Human
uggugcaugccuguggucccagcu

SEQ ID NO: 99711 - RNA, 21 nt, Human
uguacaaaaaaauaaaaagga

SEQ ID NO: 99712 - RNA, 23 nt, Human
uguacaaaaaaauaaaaaggagg

SEQ ID NO: 99713 - RNA, 24 nt, Human
uguacaaaaaaauaaaaaggaggc

SEQ ID NO: 99714 - RNA, 23 nt, Human
ugucuguaaucccaauacucugg

SEQ ID NO: 99715 - RNA, 21 nt, Human
uuaaaggucuucagaguagac

SEQ ID NO: 99716 - RNA, 18 nt, Human
uucagagaugagguagac

SEQ ID NO: 99717 - RNA, 19 nt, Human
uuccagaauuuucagagau

SEQ ID NO: 99718 - RNA, 21 nt, Human
uucuccaaaacacuugagaaa

SEQ ID NO: 99719 - RNA, 22 nt, Human
uugagcccaggaguuugagacc

SEQ ID NO: 99720 - RNA, 22 nt, Human
uugaggccaggaguuuaagacc

SEQ ID NO: 99721 - RNA, 23 nt, Human
uugcaccacugcacuccagccug

SEQ ID NO: 99722 - RNA, 21 nt, Human
uuucccagcacaugggucugg

SEQ ID NO: 99723 - RNA, 20 nt, Human
aaaagcuucauuugcaaggg

SEQ ID NO: 99724 - RNA, 20 nt, Human
acucuggacagcagggaacc

SEQ ID NO: 99725 - RNA, 21 nt, Human
agaaauugucacuaugucccc

SEQ ID NO: 99726 - RNA, 20 nt, Human
aggaaaaugcuccugaauau

SEQ ID NO: 99727 - RNA, 19 nt, Human
auagcuuuggcucuuggaa

SEQ ID NO: 99728 - RNA, 18 nt, Human
auggaaguugguuccagc

SEQ ID NO: 99729 - RNA, 23 nt, Human
cauauauauuccaugagacaucc

SEQ ID NO: 99730 - RNA, 19 nt, Human
ccuauuuuacccaguuggu

SEQ ID NO: 99731 - RNA, 21 nt, Human
cuaacucaagcucuuucucag

SEQ ID NO: 99732 - RNA, 18 nt, Human
cuucuugacaaaucccag

SEQ ID NO: 99733 - RNA, 18 nt, Human
gaaaugaaauugcacaaa

SEQ ID NO: 99734 - RNA, 25 nt, Human
gcauaucacaccuacuaacaucaca

SEQ ID NO: 99735 - RNA, 20 nt, Human
ggacagcagggaaccgaaga

SEQ ID NO: 99736 - RNA, 25 nt, Human
guaaaauuuuucuucaccuuuuuaa

SEQ ID NO: 99737 - RNA, 26 nt, Human
guaaaauuuuucuucaccuuuuuaaa

SEQ ID NO: 99738 - RNA, 19 nt, Human
gugcugacuggcaggaaaa

SEQ ID NO: 99739 - RNA, 19 nt, Human
uaaaacauuagcagauaga

SEQ ID NO: 99740 - RNA, 30 nt, Human
uaaauacaaaaauauaaauauaaaacauuu

SEQ ID NO: 99741 - RNA, 19 nt, Human
uaacccaggagaaauuguc

SEQ ID NO: 99742 - RNA, 23 nt, Human
uaacucaagcucuuucucagcau

SEQ ID NO: 99743 - RNA, 20 nt, Human
uaagaaguaaaugagaaaaa

SEQ ID NO: 99744 - RNA, 24 nt, Human
uaagauggacaacacuguauuucc

SEQ ID NO: 99745 - RNA, 22 nt, Human
uacagaacaggauauacuguaa

SEQ ID NO: 99746 - RNA, 23 nt, Human
uaucacugauucuacuucaaucu

SEQ ID NO: 99747 - RNA, 18 nt, Human
uauccuguucauguuucu

SEQ ID NO: 99748 - RNA, 19 nt, Human
uauuccaugagacauccua

SEQ ID NO: 99749 - RNA, 18 nt, Human
ucaagcucuuucucagca

SEQ ID NO: 99750 - RNA, 25 nt, Human
ucaaucuaacucaagcucuuucuca

SEQ ID NO: 99751 - RNA, 19 nt, Human
ucagcaucacuuuuaacuc

SEQ ID NO: 99752 - RNA, 21 nt, Human
ugaaaugaaauugcacaaaug

SEQ ID NO: 99753 - RNA, 23 nt, Human
ugcauaucacaccuacuaacauc

SEQ ID NO: 99754 - RNA, 22 nt, Human
uggacagcagggaaccgaagaa

SEQ ID NO: 99755 - RNA, 18 nt, Human
uggagacagcauggguag

SEQ ID NO: 99756 - RNA, 20 nt, Human
uggauaauggaaguugguuc

SEQ ID NO: 99757 - RNA, 18 nt, Human
ugugcugacuggcaggaa

SEQ ID NO: 99758 - RNA, 19 nt, Human
uguuuuguucauguuuccc

SEQ ID NO: 99759 - RNA, 28 nt, Human
uuguuugugagguugcuuaagggagaac

SEQ ID NO: 99760 - RNA, 27 nt, Human
uuucucagcaucacuuuuaacucuggg

SEQ ID NO: 99761 - RNA, 25 nt, Human
aaaagaagaaagacuuggauguuca

SEQ ID NO: 99762 - RNA, 21 nt, Human
aaaaugacauagaaauagggc

SEQ ID NO: 99763 - RNA, 28 nt, Human
aaagauuuacaagaaucagcaguaacaa

SEQ ID NO: 99764 - RNA, 21 nt, Human
aaaucugcuaguuucuuaaaa

SEQ ID NO: 99765 - RNA, 24 nt, Human
aaguagaagcaaaaagauuuacaa

SEQ ID NO: 99766 - RNA, 24 nt, Human
aauaagaacuuuaaaauuguacaa

SEQ ID NO: 99767 - RNA, 24 nt, Human
aaucauaguccaagucugaaucug

SEQ ID NO: 99768 - RNA, 20 nt, Human
acaacuuaaaaaagaagaaa

SEQ ID NO: 99769 - RNA, 18 nt, Human
acaguuauaucuggcacg

SEQ ID NO: 99770 - RNA, 18 nt, Human
acauauagaguguccaga

SEQ ID NO: 99771 - RNA, 18 nt, Human
acccggccacugagcccc

SEQ ID NO: 99772 - RNA, 20 nt, Human
accucucuugggauggaaug

SEQ ID NO: 99773 - RNA, 20 nt, Human
agcucauauuaaagcaacag

SEQ ID NO: 99774 - RNA, 28 nt, Human
agggacccggccacugagccccugccuu

SEQ ID NO: 99775 - RNA, 21 nt, Human
agugguucuuucuuuugccuu

SEQ ID NO: 99776 - RNA, 21 nt, Human
augacauagaaauagggcguc

SEQ ID NO: 99777 - RNA, 18 nt, Human
caacaaaugacaacacga

SEQ ID NO: 99778 - RNA, 19 nt, Human
caacacgaaggaaugucac

SEQ ID NO: 99779 - RNA, 20 nt, Human
caacacgaaggaaugucaca

SEQ ID NO: 99780 - RNA, 22 nt, Human
caaccuccgagccgccaguccc

SEQ ID NO: 99781 - RNA, 19 nt, Human
caagaaucagcaguaacaa

SEQ ID NO: 99782 - RNA, 24 nt, Human
cacaguauuuaccacuuugauguc

SEQ ID NO: 99783 - RNA, 18 nt, Human
cagcaguaacaagauuga

SEQ ID NO: 99784 - RNA, 23 nt, Human
cagggacccggccacugagcccc

SEQ ID NO: 99785 - RNA, 22 nt, Human
cccggccacugagccccugccu

SEQ ID NO: 99786 - RNA, 25 nt, Human
ccggagcccaggucuaggcauguac

SEQ ID NO: 99787 - RNA, 21 nt, Human
ccuccgagccgccagucccug

SEQ ID NO: 99788 - RNA, 19 nt, Human
ccuuucuaauuuuguggaa

SEQ ID NO: 99789 - RNA, 20 nt, Human
cucauauuaaagcaacagua

SEQ ID NO: 99790 - RNA, 19 nt, Human
cuccuucacuuaaauauuu

SEQ ID NO: 99791 - RNA, 20 nt, Human
cuggccggagcccaggucua

SEQ ID NO: 99792 - RNA, 22 nt, Human
gagccgccagucccuggcgcag

SEQ ID NO: 99793 - RNA, 21 nt, Human
ggagaaugcagcugucacccc

SEQ ID NO: 99794 - RNA, 19 nt, Human
ggccacugagccccugccu

SEQ ID NO: 99795 - RNA, 22 nt, Human
uaaaaaagaagaaagacuugga

SEQ ID NO: 99796 - RNA, 22 nt, Human
uaacacauaaacaauuucccuu

SEQ ID NO: 99797 - RNA, 19 nt, Human
uaaguaaugauguucucac

SEQ ID NO: 99798 - RNA, 21 nt, Human
uacagcucagaacuguugucc

SEQ ID NO: 99799 - RNA, 24 nt, Human
uacagcucagaacuguuguccuuu

SEQ ID NO: 99800 - RNA, 20 nt, Human
uagggcgucucucacugaaa

SEQ ID NO: 99801 - RNA, 21 nt, Human
uauuucacaguauuuaccacu

SEQ ID NO: 99802 - RNA, 23 nt, Human
ucacugaaacaagacaguuauau

SEQ ID NO: 99803 - RNA, 26 nt, Human
ucagcggcggcugcgagcggcccccu

SEQ ID NO: 99804 - RNA, 22 nt, Human
ucaggauucuggaggguggcaa

SEQ ID NO: 99805 - RNA, 30 nt, Human
uccacccaucugauuggucacucaacaaaa

SEQ ID NO: 99806 - RNA, 24 nt, Human
ucccggacgcgucacgcagaccuc

SEQ ID NO: 99807 - RNA, 28 nt, Human
ucgacauccacgcuguugggcgcuggcc

SEQ ID NO: 99808 - RNA, 19 nt, Human
ucucuguaaaacuuugccu

SEQ ID NO: 99809 - RNA, 24 nt, Human
ucuucuuccccacccccuucauca

SEQ ID NO: 99810 - RNA, 25 nt, Human
ucuuuugccuucucagggucacaaa

SEQ ID NO: 99811 - RNA, 25 nt, Human
ugaaaguagaagcaaaaagauuuac

SEQ ID NO: 99812 - RNA, 19 nt, Human
ugacaacuuaaaaaagaag

SEQ ID NO: 99813 - RNA, 25 nt, Human
ugacauagaaauagggcgucucuca

SEQ ID NO: 99814 - RNA, 20 nt, Human
ugagaaaagguauuucacag

SEQ ID NO: 99815 - RNA, 19 nt, Human
ugccguaacauuuucuuac

SEQ ID NO: 99816 - RNA, 18 nt, Human
uggcgcagggcaagcgcu

SEQ ID NO: 99817 - RNA, 22 nt, Human
uggcgcagggcaagcgcugcgg

SEQ ID NO: 99818 - RNA, 18 nt, Human
ugggauggaaugucucug

SEQ ID NO: 99819 - RNA, 22 nt, Human
uguacauuguauuguacauaca

SEQ ID NO: 99820 - RNA, 23 nt, Human
uguacgguggucuugcugagggu

SEQ ID NO: 99821 - RNA, 22 nt, Human
uguccagaguuuaaggcgaaau

SEQ ID NO: 99822 - RNA, 19 nt, Human
ugucuucuuccccaccccc

SEQ ID NO: 99823 - RNA, 23 nt, Human
ugucuuuggaaccauacaaaucu

SEQ ID NO: 99824 - RNA, 22 nt, Human
uucccuucauugucaguucagc

SEQ ID NO: 99825 - RNA, 21 nt, Human
uucuccuucacuuaaauauuu

SEQ ID NO: 99826 - RNA, 22 nt, Human
uucuccuucacuuaaauauuuu

SEQ ID NO: 99827 - RNA, 19 nt, Human
uucuuuugccuucucaggg

SEQ ID NO: 99828 - RNA, 19 nt, Human
uucuuuugccuucucaggg

SEQ ID NO: 99829 - RNA, 19 nt, Human
uuucacaguauuuaccacu

SEQ ID NO: 99830 - RNA, 21 nt, Human
aaaacaaaacaacaaaacaaa

SEQ ID NO: 99831 - RNA, 22 nt, Human
aaaacaaaacacagcgugccuu

SEQ ID NO: 99832 - RNA, 20 nt, Human
aaacaaaacaacaaaacaaa

SEQ ID NO: 99833 - RNA, 24 nt, Human
aaacaaaacacagcgugccuuuga

SEQ ID NO: 99834 - RNA, 23 nt, Human
aaacaacaaaacaaagcaaguac

SEQ ID NO: 99835 - RNA, 18 nt, Human
aaaccagguaaucaaagg

SEQ ID NO: 99836 - RNA, 21 nt, Human
aacaaaacaaagcaaguacac

SEQ ID NO: 99837 - RNA, 22 nt, Human
aacaacaaaacaaagcaaguac

SEQ ID NO: 99838 - RNA, 23 nt, Human
aacacucuuccaccgugaugcca

SEQ ID NO: 99839 - RNA, 21 nt, Human
aacugcagcggcgagcggcga

SEQ ID NO: 99840 - RNA, 24 nt, Human
aacugcagcggcgagcggcgagcc

SEQ ID NO: 99841 - RNA, 20 nt, Human
aagguggagaucagaaagug

SEQ ID NO: 99842 - RNA, 21 nt, Human
agaagaagguggagaucagaa

SEQ ID NO: 99843 - RNA, 23 nt, Human
agaggcaauuuauuuucuaaggc

SEQ ID NO: 99844 - RNA, 20 nt, Human
agcaccgacggccgcagcag

SEQ ID NO: 99845 - RNA, 19 nt, Human
agcagcaccgacggccgca

SEQ ID NO: 99846 - RNA, 19 nt, Human
agcucaacugcagcggcga

SEQ ID NO: 99847 - RNA, 19 nt, Human
agcuuuaaaaaggcuggca

SEQ ID NO: 99848 - RNA, 19 nt, Human
aggcagcugcaggagcagc

SEQ ID NO: 99849 - RNA, 23 nt, Human
augauaagaguuucaauaggcac

SEQ ID NO: 99850 - RNA, 20 nt, Human
caaaacugacaauaugauua

SEQ ID NO: 99851 - RNA, 19 nt, Human
caaaucacugugccaacac

SEQ ID NO: 99852 - RNA, 23 nt, Human
caacaaaacaaagcaaguacaca

SEQ ID NO: 99853 - RNA, 26 nt, Human
caacugcagcggcgagcggcgagcca

SEQ ID NO: 99854 - RNA, 24 nt, Human
caaggugagaaauccgucaaauca

SEQ ID NO: 99855 - RNA, 23 nt, Human
cagaaaaggcagcugcaggagca

SEQ ID NO: 99856 - RNA, 19 nt, Human
cagaagacucauuaaacga

SEQ ID NO: 99857 - RNA, 19 nt, Human
cagaauaaaccaaaacuga

SEQ ID NO: 99858 - RNA, 19 nt, Human
cagaauaaaccaaaacuga

SEQ ID NO: 99859 - RNA, 23 nt, Human
cagcagaguaauaaaaacuccaa

SEQ ID NO: 99860 - RNA, 22 nt, Human
cagccaguagacaccacuuucu

SEQ ID NO: 99861 - RNA, 23 nt, Human
cagcuugucuauauuucccaaaa

SEQ ID NO: 99862 - RNA, 18 nt, Human
cauaaagacggugucugu

SEQ ID NO: 99863 - RNA, 25 nt, Human
cauauuuauuucaauuuucugaaag

SEQ ID NO: 99864 - RNA, 22 nt, Human
ccaaguagcugcauccugugcu

SEQ ID NO: 99865 - RNA, 20 nt, Human
cccuccugucaucuccccgc

SEQ ID NO: 99866 - RNA, 20 nt, Human
cccucucuguggcucccucc

SEQ ID NO: 99867 - RNA, 27 nt, Human
ccuggaccccucucuguggcucccucc

SEQ ID NO: 99868 - RNA, 25 nt, Human
ccuugcgcggaaggugagacccuuc

SEQ ID NO: 99869 - RNA, 22 nt, Human
cgcaauaccaucacagcagagu

SEQ ID NO: 99870 - RNA, 18 nt, Human
cucaaaacaaaacacagc

SEQ ID NO: 99871 - RNA, 28 nt, Human
cucaaaacaaaacacagcgugccuuuga

SEQ ID NO: 99872 - RNA, 20 nt, Human
cucagaaaagccuggacccc

SEQ ID NO: 99873 - RNA, 26 nt, Human
cucccuccacauuuacccuucagauc

SEQ ID NO: 99874 - RNA, 21 nt, Human
cuccucacuguaaguuagagg

SEQ ID NO: 99875 - RNA, 20 nt, Human
cuccuggguuccagcuuguc

SEQ ID NO: 99876 - RNA, 21 nt, Human
cucuucucagaaaagccugga

SEQ ID NO: 99877 - RNA, 21 nt, Human
cugauggcagaaaaggcagcu

SEQ ID NO: 99878 - RNA, 23 nt, Human
cuucucagaaaagccuggacccc

SEQ ID NO: 99879 - RNA, 23 nt, Human
cuuuccaaaucacugugccaaca

SEQ ID NO: 99880 - RNA, 25 nt, Human
gaaagagugugugugugugugugug

SEQ ID NO: 99881 - RNA, 19 nt, Human
gaagaggcugccucucuuc

SEQ ID NO: 99882 - RNA, 25 nt, Human
gaaggugagacccuucucuucuguu

SEQ ID NO: 99883 - RNA, 21 nt, Human
gcaauaccaucacagcagagu

SEQ ID NO: 99884 - RNA, 20 nt, Human
gcagaauaaaccaaaacuga

SEQ ID NO: 99885 - RNA, 19 nt, Human
gcagaguguacuguacacc

SEQ ID NO: 99886 - RNA, 20 nt, Human
ggggcccaggauucccuccu

SEQ ID NO: 99887 - RNA, 22 nt, Human
gugaaaaaacaaaacaacaaaa

SEQ ID NO: 99888 - RNA, 24 nt, Human
guggagaucagaaaguguucuucu

SEQ ID NO: 99889 - RNA, 19 nt, Human
gugugugugugugugugug

SEQ ID NO: 99890 - RNA, 23 nt, Human
guguguuuguguguguguguguu

SEQ ID NO: 99891 - RNA, 24 nt, Human
guuuaaaaaagaaaaagaaaaccc

SEQ ID NO: 99892 - RNA, 19 nt, Human
uaaaacucccaacugcucc

SEQ ID NO: 99893 - RNA, 23 nt, Human
uaacuuacuagaaaccagguaau

SEQ ID NO: 99894 - RNA, 25 nt, Human
uaaguuagaggcaauuuauuuucua

SEQ ID NO: 99895 - RNA, 23 nt, Human
uaauaaaaacuccaacacuuaac

SEQ ID NO: 99896 - RNA, 19 nt, Human
uacacauuauaggauguau

SEQ ID NO: 99897 - RNA, 21 nt, Human
uacaccacuuuaaaugauaag

SEQ ID NO: 99898 - RNA, 23 nt, Human
uacaguuuaaaaaagaaaaagaa

SEQ ID NO: 99899 - RNA, 20 nt, Human
uagaaaccagguaaucaaag

SEQ ID NO: 99900 - RNA, 20 nt, Human
ucaaccgugaaugggguggg

SEQ ID NO: 99901 - RNA, 18 nt, Human
ucaacugcagcggcgagc

SEQ ID NO: 99902 - RNA, 24 nt, Human
ucacugugccaacacacugcuuug

SEQ ID NO: 99903 - RNA, 19 nt, Human
ucagaaaagccuggacccc

SEQ ID NO: 99904 - RNA, 26 nt, Human
ucagaagacucauuaaacgagccuag

SEQ ID NO: 99905 - RNA, 18 nt, Human
ucagccuugcgcggaagg

SEQ ID NO: 99906 - RNA, 18 nt, Human
ucccaacugcuccugggu

SEQ ID NO: 99907 - RNA, 18 nt, Human
ucccuccugucaucuccc

SEQ ID NO: 99908 - RNA, 21 nt, Human
uccuuagcucucagaagacuc

SEQ ID NO: 99909 - RNA, 21 nt, Human
ucuccccgcccucaaaacaaa

SEQ ID NO: 99910 - RNA, 22 nt, Human
ucucugugaacaaggugagaaa

SEQ ID NO: 99911 - RNA, 26 nt, Human
ucucuuguuggcagaauaaaccaaaa

SEQ ID NO: 99912 - RNA, 19 nt, Human
ucuguggccuccaccgcuu

SEQ ID NO: 99913 - RNA, 25 nt, Human
ugaaaaaacaaaacaacaaaacaaa

SEQ ID NO: 99914 - RNA, 23 nt, Human
ugacacaucauugaguagugaaa

SEQ ID NO: 99915 - RNA, 24 nt, Human
ugaccuccacaguaacuugauucu

SEQ ID NO: 99916 - RNA, 24 nt, Human
ugaugaugcaggcauuaauccuuu

SEQ ID NO: 99917 - RNA, 20 nt, Human
ugauugugaaaaaacaaaac

SEQ ID NO: 99918 - RNA, 25 nt, Human
uggaauuaagaaaaaucuaacacuc

SEQ ID NO: 99919 - RNA, 25 nt, Human
uggaccccucucuguggcucccucc

SEQ ID NO: 99920 - RNA, 22 nt, Human
uggcagaauaaaccaaaacuga

SEQ ID NO: 99921 - RNA, 25 nt, Human
ugggggcccaggauucccuccuguc

SEQ ID NO: 99922 - RNA, 23 nt, Human
ugggguggggagaucgaaguuuu

SEQ ID NO: 99923 - RNA, 23 nt, Human
ugggguggggagaucgaaguuuu

SEQ ID NO: 99924 - RNA, 23 nt, Human
ugugaaaaaacaaaacaacaaaa

SEQ ID NO: 99925 - RNA, 24 nt, Human
ugugaacaaggugagaaauccguc

SEQ ID NO: 99926 - RNA, 18 nt, Human
ugugugugugugugugug

SEQ ID NO: 99927 - RNA, 18 nt, Human
ugugugugugugugugug

SEQ ID NO: 99928 - RNA, 19 nt, Human
ugugugugugugugugugu

SEQ ID NO: 99929 - RNA, 19 nt, Human
ugugugugugugugugugu

SEQ ID NO: 99930 - RNA, 22 nt, Human
ugugugugugugugugugugag

SEQ ID NO: 99931 - RNA, 25 nt, Human
uguguguguguguguguuugugugu

SEQ ID NO: 99932 - RNA, 23 nt, Human
uguguguguguguguuugugugu

SEQ ID NO: 99933 - RNA, 21 nt, Human
uguguguguguguuugugugu

SEQ ID NO: 99934 - RNA, 26 nt, Human
uguguguguguguuugugugugugug

SEQ ID NO: 99935 - RNA, 23 nt, Human
uguguguguguuugugugugugu

SEQ ID NO: 99936 - RNA, 26 nt, Human
uguguguguguuugugugugugugug

SEQ ID NO: 99937 - RNA, 21 nt, Human
uguguguguuugugugugugu

SEQ ID NO: 99938 - RNA, 21 nt, Human
uguguguguuugugugugugu

SEQ ID NO: 99939 - RNA, 21 nt, Human
uguguguguuugugugugugu

SEQ ID NO: 99940 - RNA, 23 nt, Human
uguguguguuugugugugugugu

SEQ ID NO: 99941 - RNA, 23 nt, Human
uguguguuugugugugugugugu

SEQ ID NO: 99942 - RNA, 23 nt, Human
uguguuugugugugugugugugu

SEQ ID NO: 99943 - RNA, 20 nt, Human
uguucuuuuuccccccuagc

SEQ ID NO: 99944 - RNA, 20 nt, Human
uguuugugugugugugugug

SEQ ID NO: 99945 - RNA, 25 nt, Human
uguuugugugugugugugugugugg

SEQ ID NO: 99946 - RNA, 18 nt, Human
uuaaaaaucuccccucuc

SEQ ID NO: 99947 - RNA, 21 nt, Human
uucauuguagaaugcuuugaa

SEQ ID NO: 99948 - RNA, 21 nt, Human
uuccuggaagaggcugccucu

SEQ ID NO: 99949 - RNA, 23 nt, Human
uuucccaaaagagccaagcuguu

SEQ ID NO: 99950 - RNA, 20 nt, Human
uuuuaaaaaucuccccucuc

SEQ ID NO: 99951 - RNA, 28 nt, Human
uuuuaaaaaucuccccucucgguuguau

SEQ ID NO: 99952 - RNA, 24 nt, Human
uuuucugaaaggauaggauaaaca

SEQ ID NO: 99953 - RNA, 23 nt, Human
aaacaacgguagucaauucacac

SEQ ID NO: 99954 - RNA, 22 nt, Human
aaaccggaacaauugaggccua

SEQ ID NO: 99955 - RNA, 20 nt, Human
aaagaaaauaaaaaaccgga

SEQ ID NO: 99956 - RNA, 27 nt, Human
aaauaugcuaagacacucaccuuaccc

SEQ ID NO: 99957 - RNA, 22 nt, Human
aacaaacagcgugaaugugcau

SEQ ID NO: 99958 - RNA, 19 nt, Human
aacccacagacaaagcugg

SEQ ID NO: 99959 - RNA, 22 nt, Human
acaccaauacuaacccacagac

SEQ ID NO: 99960 - RNA, 23 nt, Human
acagaaggcuaacugaaagcaca

SEQ ID NO: 99961 - RNA, 24 nt, Human
acagacaaagcugggugccuggag

SEQ ID NO: 99962 - RNA, 25 nt, Human
acagacaaagcugggugccuggagc

SEQ ID NO: 99963 - RNA, 20 nt, Human
acaguggagaaguagcuucg

SEQ ID NO: 99964 - RNA, 19 nt, Human
agacaacauaugacuucua

SEQ ID NO: 99965 - RNA, 19 nt, Human
agauacucauacauacacc

SEQ ID NO: 99966 - RNA, 22 nt, Human
auacauacaccaauacuaaccc

SEQ ID NO: 99967 - RNA, 29 nt, Human
auauauacauacagauacucauacauaca

SEQ ID NO: 99968 - RNA, 18 nt, Human
caagcacuaacuuuccgc

SEQ ID NO: 99969 - RNA, 19 nt, Human
cacagacaaagcugggugc

SEQ ID NO: 99970 - RNA, 25 nt, Human
caccagaaaaaguagucauuguucc

SEQ ID NO: 99971 - RNA, 21 nt, Human
cagaaggcuaacugaaagcac

SEQ ID NO: 99972 - RNA, 19 nt, Human
cauacagauacucauacau

SEQ ID NO: 99973 - RNA, 21 nt, Human
cauguuaacacaccagaaaaa

SEQ ID NO: 99974 - RNA, 20 nt, Human
cauuguuccugcucccagaa

SEQ ID NO: 99975 - RNA, 21 nt, Human
cauuuaugguuuaucaacaag

SEQ ID NO: 99976 - RNA, 22 nt, Human
ccaauacuaacccacagaccgg

SEQ ID NO: 99977 - RNA, 24 nt, Human
ccacaagcugucacuaguuuuauu

SEQ ID NO: 99978 - RNA, 21 nt, Human
ccacagacaaagcugggugcc

SEQ ID NO: 99979 - RNA, 21 nt, Human
ccaugaaagaaaaugucagcc

SEQ ID NO: 99980 - RNA, 24 nt, Human
ccucaccuccuuggcucaggauca

SEQ ID NO: 99981 - RNA, 21 nt, Human
ccugcucugcuccucaccucc

SEQ ID NO: 99982 - RNA, 20 nt, Human
cucacagaauacaaaucagu

SEQ ID NO: 99983 - RNA, 18 nt, Human
gacuguggauucgggaca

SEQ ID NO: 99984 - RNA, 23 nt, Human
gcaguguaaauugguuguagucc

SEQ ID NO: 99985 - RNA, 18 nt, Human
gcccuggaggguucaggu

SEQ ID NO: 99986 - RNA, 24 nt, Human
ggagcaaaagugacagcucugugg

SEQ ID NO: 99987 - RNA, 26 nt, Human
gggacaguggagaaguagcuucggag

SEQ ID NO: 99988 - RNA, 21 nt, Human
gguaccuguacaccucuuugu

SEQ ID NO: 99989 - RNA, 24 nt, Human
guacauguggguauauauguguau

SEQ ID NO: 99990 - RNA, 23 nt, Human
guggaccugccuggcugguugug

SEQ ID NO: 99991 - RNA, 20 nt, Human
uaacugaaagcacaagugca

SEQ ID NO: 99992 - RNA, 23 nt, Human
uauaaauaccguguauauauaca

SEQ ID NO: 99993 - RNA, 19 nt, Human
uauauacauacagauacuc

SEQ ID NO: 99994 - RNA, 19 nt, Human
uauauauacauacagauac

SEQ ID NO: 99995 - RNA, 19 nt, Human
uauguguauacaagauggu

SEQ ID NO: 99996 - RNA, 24 nt, Human
uauguuccaaaaggauuuaccauu

SEQ ID NO: 99997 - RNA, 18 nt, Human
ucaaaaugaugaaguaca

SEQ ID NO: 99998 - RNA, 18 nt, Human
ucaacaagaagguaaucu

SEQ ID NO: 99999 - RNA, 18 nt, Human
ucauuguuccugcuccca

SEQ ID NO: 100000 - RNA, 22 nt, Human
uccaaaaggauuuaccauugaa

SEQ ID NO: 100001 - RNA, 22 nt, Human
ucuguacauguggguauauaug

SEQ ID NO: 100002 - RNA, 20 nt, Human
ucuuuguaugcauguaugac

SEQ ID NO: 100003 - RNA, 22 nt, Human
ugaaacaaacagcgugaaugug

SEQ ID NO: 100004 - RNA, 19 nt, Human
ugaaagcacaagugcaaac

SEQ ID NO: 100005 - RNA, 20 nt, Human
ugaaagcacaagugcaaaca

SEQ ID NO: 100006 - RNA, 21 nt, Human
ugaacgggacaguggagaagu

SEQ ID NO: 100007 - RNA, 19 nt, Human
ugaggagggagagauucuc

SEQ ID NO: 100008 - RNA, 22 nt, Human
ugcauaagaaagcgugugugug

SEQ ID NO: 100009 - RNA, 18 nt, Human
ugccugcucugcuccuca

SEQ ID NO: 100010 - RNA, 19 nt, Human
ugcugaccuugaugcggga

SEQ ID NO: 100011 - RNA, 18 nt, Human
uggaaaaaaaaaucucug

SEQ ID NO: 100012 - RNA, 21 nt, Human
uggcauuugguggugaaauug

SEQ ID NO: 100013 - RNA, 22 nt, Human
uggcgagcucuaauaaaaagcc

SEQ ID NO: 100014 - RNA, 24 nt, Human
uggugugagcuuugaugauucauu

SEQ ID NO: 100015 - RNA, 20 nt, Human
ugguuguggcagcauucaga

SEQ ID NO: 100016 - RNA, 24 nt, Human
uguaaagaaaauaaaaaaccggaa

SEQ ID NO: 100017 - RNA, 22 nt, Human
uguacaccucuuuguaugcaug

SEQ ID NO: 100018 - RNA, 21 nt, Human
uguauauauacauacagauac

SEQ ID NO: 100019 - RNA, 31 nt, Human
uguauauauacauacagauacucauacauag

SEQ ID NO: 100020 - RNA, 26 nt, Human
ugucaaaaugaugaaguacagacuaa

SEQ ID NO: 100021 - RNA, 20 nt, Human
ugucuuaguuuccacccacc

SEQ ID NO: 100022 - RNA, 19 nt, Human
ugugaaguucgauagcugu

SEQ ID NO: 100023 - RNA, 24 nt, Human
ugugcaugugcgguuaaaaccuuu

SEQ ID NO: 100024 - RNA, 18 nt, Human
uguggguauauaugugua

SEQ ID NO: 100025 - RNA, 20 nt, Human
uguggguauauauguguaua

SEQ ID NO: 100026 - RNA, 22 nt, Human
uuaaaggagggaggaagaugcu

SEQ ID NO: 100027 - RNA, 19 nt, Human
uuaacacaccagaaaaagu

SEQ ID NO: 100028 - RNA, 22 nt, Human
uucagggaaaauucagaagauu

SEQ ID NO: 100029 - RNA, 27 nt, Human
uuccacccaccuugcuuaaccuugcaa

SEQ ID NO: 100030 - RNA, 18 nt, Human
uucuacuuccuacagaag

SEQ ID NO: 100031 - RNA, 18 nt, Human
uugaugcgggaggcccug

SEQ ID NO: 100032 - RNA, 23 nt, Human
uuguuccugcucccagaagauca

SEQ ID NO: 100033 - RNA, 20 nt, Human
uuucuuggcauuugguggug

SEQ ID NO: 100034 - RNA, 23 nt, Human
uuuuaugccuguauauaugaaac

SEQ ID NO: 100035 - RNA, 22 nt, Human
uuuucggguuugcaaacaacgg

SEQ ID NO: 100036 - RNA, 19 nt, Human
agagaaacucuucccaccc

SEQ ID NO: 100037 - RNA, 24 nt, Human
aggaaggaggcugccccaggccca

SEQ ID NO: 100038 - RNA, 20 nt, Human
aggagguugcugucuuucau

SEQ ID NO: 100039 - RNA, 21 nt, Human
aggcccaggggggucgggccc

SEQ ID NO: 100040 - RNA, 18 nt, Human
aggcugccucugcagggg

SEQ ID NO: 100041 - RNA, 20 nt, Human
auggagagaaacucuuccca

SEQ ID NO: 100042 - RNA, 26 nt, Human
cacugguaggaggcaaaggugggaaa

SEQ ID NO: 100043 - RNA, 22 nt, Human
caggcccaggggggucgggccc

SEQ ID NO: 100044 - RNA, 21 nt, Human
ccacacucagguucugccccc

SEQ ID NO: 100045 - RNA, 24 nt, Human
ccccaggcccaggggggucgggcc

SEQ ID NO: 100046 - RNA, 25 nt, Human
ccccaggcccaggggggucgggccc

SEQ ID NO: 100047 - RNA, 21 nt, Human
cccgcgacccgaagaagcgcg

SEQ ID NO: 100048 - RNA, 20 nt, Human
ccggagugcacccgcgaccc

SEQ ID NO: 100049 - RNA, 22 nt, Human
ccggcaggaaggggccucuucc

SEQ ID NO: 100050 - RNA, 25 nt, Human
cgccccauccacacucagguucugc

SEQ ID NO: 100051 - RNA, 22 nt, Human
cugcaggggccaucacugccac

SEQ ID NO: 100052 - RNA, 20 nt, Human
gaaacucuucccaccccggc

SEQ ID NO: 100053 - RNA, 22 nt, Human
gaaacucuucccaccccggcag

SEQ ID NO: 100054 - RNA, 21 nt, Human
gcaaaggugggacuagggagg

SEQ ID NO: 100055 - RNA, 18 nt, Human
gcccaggggggucgggcc

SEQ ID NO: 100056 - RNA, 22 nt, Human
gccccauccacacucagguucu

SEQ ID NO: 100057 - RNA, 20 nt, Human
ggcccggugaccucaggcug

SEQ ID NO: 100058 - RNA, 21 nt, Human
ggccgaggcgggagccgggcc

SEQ ID NO: 100059 - RNA, 19 nt, Human
gggaggugacccgcauggg

SEQ ID NO: 100060 - RNA, 21 nt, Human
gggccgaggcgggagccgggc

SEQ ID NO: 100061 - RNA, 20 nt, Human
uacaaagaugagguucacug

SEQ ID NO: 100062 - RNA, 23 nt, Human
uacaggaaggaggcugccccagg

SEQ ID NO: 100063 - RNA, 18 nt, Human
uagcacguuuuucauuca

SEQ ID NO: 100064 - RNA, 21 nt, Human
uaggaggcaaaggugggacua

SEQ ID NO: 100065 - RNA, 22 nt, Human
ugcacccgcgacccgaagaagc

SEQ ID NO: 100066 - RNA, 19 nt, Human
uucagauuuacccaggagg

SEQ ID NO: 100067 - RNA, 27 nt, Human
uuuuucauucagauuuacccaggaggu

SEQ ID NO: 100068 - RNA, 18 nt, Human
uuuuuuuuuuuuuuuuug

SEQ ID NO: 100069 - RNA, 21 nt, Human
uuuuuuuuuuuuuuuuugcau

SEQ ID NO: 100070 - RNA, 23 nt, Human
uuuuuuuuuuuuuuuuugcauga

SEQ ID NO: 100071 - RNA, 22 nt, Human
aagcucccagcuagagcugccu

SEQ ID NO: 100072 - RNA, 24 nt, Human
acucccaugggcaguccauaaagu

SEQ ID NO: 100073 - RNA, 20 nt, Human
acucuguccuguccccugcu

SEQ ID NO: 100074 - RNA, 21 nt, Human
acucuguccuguccccugcug

SEQ ID NO: 100075 - RNA, 21 nt, Human
agccagaggccaagcucccag

SEQ ID NO: 100076 - RNA, 24 nt, Human
aggggacucagauggagccagagg

SEQ ID NO: 100077 - RNA, 24 nt, Human
auggagccagaggccaagcuccca

SEQ ID NO: 100078 - RNA, 23 nt, Human
caagcucccagcuagagcugccu

SEQ ID NO: 100079 - RNA, 23 nt, Human
cagauggagccagaggccaagcu

SEQ ID NO: 100080 - RNA, 21 nt, Human
cagcgcccaagacuggcuccc

SEQ ID NO: 100081 - RNA, 18 nt, Human
ccauagggcccagcccag

SEQ ID NO: 100082 - RNA, 21 nt, Human
ccauagggcccagcccaguuc

SEQ ID NO: 100083 - RNA, 24 nt, Human
ccuggugauggugauggugccucc

SEQ ID NO: 100084 - RNA, 23 nt, Human
ccuguccccugcuggaucuuggg

SEQ ID NO: 100085 - RNA, 26 nt, Human
cuggugauggugauggugccuccacc

SEQ ID NO: 100086 - RNA, 19 nt, Human
ggugauggugauggugccu

SEQ ID NO: 100087 - RNA, 23 nt, Human
ggugauggugauggugccuccac

SEQ ID NO: 100088 - RNA, 23 nt, Human
ggugcugggcucucucccagggg

SEQ ID NO: 100089 - RNA, 21 nt, Human
gugauggugauggugccucca

SEQ ID NO: 100090 - RNA, 21 nt, Human
uacucuguccuguccccugcu

SEQ ID NO: 100091 - RNA, 21 nt, Human
uagggcccagcccaguucucu

SEQ ID NO: 100092 - RNA, 21 nt, Human
uccagcugccaagcaagaaga

SEQ ID NO: 100093 - RNA, 19 nt, Human
ugccuggugauggugaugg

SEQ ID NO: 100094 - RNA, 21 nt, Human
ugcugggcucucucccagggg

SEQ ID NO: 100095 - RNA, 23 nt, Human
uggugauggugauggugccucca

SEQ ID NO: 100096 - RNA, 30 nt, Human
uucucuggggcuuuauuauugggcaaacaa

SEQ ID NO: 100097 - RNA, 19 nt, Human
uugguguccaggcucugca

SEQ ID NO: 100098 - RNA, 24 nt, Human
aaaaaagaaauauuuagcaaauau

SEQ ID NO: 100099 - RNA, 18 nt, Human
aaaauuagcugggcaugg

SEQ ID NO: 100100 - RNA, 18 nt, Human
aaagagcaacaugucaca

SEQ ID NO: 100101 - RNA, 22 nt, Human
aaauggcgaaaccccgucucua

SEQ ID NO: 100102 - RNA, 20 nt, Human
acaccacuguacuccagccu

SEQ ID NO: 100103 - RNA, 22 nt, Human
acaccacuguacuccagccugg

SEQ ID NO: 100104 - RNA, 24 nt, Human
acaccacuguacuccagccugggc

SEQ ID NO: 100105 - RNA, 24 nt, Human
acagagcaagacuccaccucaaaa

SEQ ID NO: 100106 - RNA, 20 nt, Human
acaugcgcagcauguaugca

SEQ ID NO: 100107 - RNA, 22 nt, Human
accacuguacuccagccugggc

SEQ ID NO: 100108 - RNA, 24 nt, Human
accacuguacuccagccugggcga

SEQ ID NO: 100109 - RNA, 24 nt, Human
acccaggaggcggagguugcagug

SEQ ID NO: 100110 - RNA, 24 nt, Human
accccgucucuauuaaaaauacaa

SEQ ID NO: 100111 - RNA, 24 nt, Human
acuguacuccagccugggcgacag

SEQ ID NO: 100112 - RNA, 26 nt, Human
acuguacuccagccugggcgacagag

SEQ ID NO: 100113 - RNA, 21 nt, Human
agacaacacugauauaucucc

SEQ ID NO: 100114 - RNA, 24 nt, Human
agccugggcgacagagcaagacuc

SEQ ID NO: 100115 - RNA, 23 nt, Human
agcugggcaugguggugggugcc

SEQ ID NO: 100116 - RNA, 26 nt, Human
aggcagaucacuugacgucaggaguu

SEQ ID NO: 100117 - RNA, 18 nt, Human
aggcaggagaaucaugug

SEQ ID NO: 100118 - RNA, 24 nt, Human
aggcaggagaaucaugugaaccca

SEQ ID NO: 100119 - RNA, 26 nt, Human
aggcaggcagaucacuugacgucagg

SEQ ID NO: 100120 - RNA, 20 nt, Human
aggcggagguugcagugagc

SEQ ID NO: 100121 - RNA, 24 nt, Human
aggcggagguugcagugagcuggg

SEQ ID NO: 100122 - RNA, 22 nt, Human
aguaggugggugcagugguuca

SEQ ID NO: 100123 - RNA, 21 nt, Human
agugguucaugccuguauugg

SEQ ID NO: 100124 - RNA, 24 nt, Human
aucacaccacuguacuccagccug

SEQ ID NO: 100125 - RNA, 21 nt, Human
caaacaaaacugacuacaacc

SEQ ID NO: 100126 - RNA, 21 nt, Human
caagacuccaccucaaaaaag

SEQ ID NO: 100127 - RNA, 26 nt, Human
caaggcaggcagaucacuugacguca

SEQ ID NO: 100128 - RNA, 21 nt, Human
cacaccacuguacuccagccu

SEQ ID NO: 100129 - RNA, 30 nt, Human
cacaccacuguacuccagccugggcgacaa

SEQ ID NO: 100130 - RNA, 19 nt, Human
cacuguacuccagccuggg

SEQ ID NO: 100131 - RNA, 20 nt, Human
cacuguacuccagccugggc

SEQ ID NO: 100132 - RNA, 21 nt, Human
cacuguacuccagccugggcg

SEQ ID NO: 100133 - RNA, 22 nt, Human
cacuguacuccagccugggcga

SEQ ID NO: 100134 - RNA, 23 nt, Human
cacuguacuccagccugggcgac

SEQ ID NO: 100135 - RNA, 24 nt, Human
cacuguacuccagccugggcgaca

SEQ ID NO: 100136 - RNA, 24 nt, Human
cagaaaaaacauaaauggaaucca

SEQ ID NO: 100137 - RNA, 26 nt, Human
cagaaaaaacauaaauggaauccagg

SEQ ID NO: 100138 - RNA, 24 nt, Human
cagaucacuugacgucaggaguuc

SEQ ID NO: 100139 - RNA, 21 nt, Human
caggauggaaucagaaaaaac

SEQ ID NO: 100140 - RNA, 24 nt, Human
caggcagaucacuugacgucagga

SEQ ID NO: 100141 - RNA, 21 nt, Human
caugcgcagcauguaugcaug

SEQ ID NO: 100142 - RNA, 21 nt, Human
cauuucuguuaauacuaaggg

SEQ ID NO: 100143 - RNA, 18 nt, Human
ccaaagagcaacauguca

SEQ ID NO: 100144 - RNA, 20 nt, Human
ccacuguacuccagccuggg

SEQ ID NO: 100145 - RNA, 20 nt, Human
ccacuguacuccagccuggg

SEQ ID NO: 100146 - RNA, 21 nt, Human
ccacuguacuccagccugggc

SEQ ID NO: 100147 - RNA, 21 nt, Human
ccacuguacuccagccugggc

SEQ ID NO: 100148 - RNA, 23 nt, Human
ccacuguacuccagccugggcga

SEQ ID NO: 100149 - RNA, 24 nt, Human
ccacuguacuccagccugggcgac

SEQ ID NO: 100150 - RNA, 20 nt, Human
ccccaaaagggaaaaacaca

SEQ ID NO: 100151 - RNA, 26 nt, Human
ccucaaaaaagaaauauuuagcaaau

SEQ ID NO: 100152 - RNA, 22 nt, Human
ccuggccaaauggcgaaacccc

SEQ ID NO: 100153 - RNA, 23 nt, Human
ccuggccaaauggcgaaaccccg

SEQ ID NO: 100154 - RNA, 22 nt, Human
ccugggcgacagagcaagacuc

SEQ ID NO: 100155 - RNA, 25 nt, Human
cuacaaccaguguuuauucuugauu

SEQ ID NO: 100156 - RNA, 23 nt, Human
cuugacgucaggaguucaagacc

SEQ ID NO: 100157 - RNA, 18 nt, Human
gacuggaguaucuccccc

SEQ ID NO: 100158 - RNA, 23 nt, Human
gagaaucaugugaacccaggagg

SEQ ID NO: 100159 - RNA, 21 nt, Human
gaggcggagguugcagugagc

SEQ ID NO: 100160 - RNA, 22 nt, Human
gagguugcagugagcugggauc

SEQ ID NO: 100161 - RNA, 18 nt, Human
gaucacuugacgucagga

SEQ ID NO: 100162 - RNA, 24 nt, Human
gaucacuugacgucaggaguucaa

SEQ ID NO: 100163 - RNA, 22 nt, Human
gcaggagaaucaugugaaccca

SEQ ID NO: 100164 - RNA, 24 nt, Human
gccuggccaaauggcgaaaccccg

SEQ ID NO: 100165 - RNA, 18 nt, Human
ggagguugcagugagcug

SEQ ID NO: 100166 - RNA, 22 nt, Human
ggagguugcagugagcugggau

SEQ ID NO: 100167 - RNA, 23 nt, Human
ggagguugcagugagcugggauc

SEQ ID NO: 100168 - RNA, 24 nt, Human
ggagguugcagugagcugggauca

SEQ ID NO: 100169 - RNA, 20 nt, Human
ggaugagaugguuguugcug

SEQ ID NO: 100170 - RNA, 22 nt, Human
ggaugagaugguuguugcugga

SEQ ID NO: 100171 - RNA, 23 nt, Human
ggcaugguggugggugccuguaa

SEQ ID NO: 100172 - RNA, 19 nt, Human
ggccaaauggcgaaacccc

SEQ ID NO: 100173 - RNA, 23 nt, Human
ggccagcugacugguuccuuuac

SEQ ID NO: 100174 - RNA, 23 nt, Human
gggaucacaccacuguacuccag

SEQ ID NO: 100175 - RNA, 24 nt, Human
guacuccagccugggcgacagagc

SEQ ID NO: 100176 - RNA, 25 nt, Human
uaaacccagcuacuuaggaagcuga

SEQ ID NO: 100177 - RNA, 25 nt, Human
uaagucacaaaauggugguuaaaag

SEQ ID NO: 100178 - RNA, 26 nt, Human
uaauaaccaaaacuuuacuaacauac

SEQ ID NO: 100179 - RNA, 22 nt, Human
uacuccagccugggcgacagag

SEQ ID NO: 100180 - RNA, 20 nt, Human
uaggaagcugaggcaggaga

SEQ ID NO: 100181 - RNA, 24 nt, Human
uaggaagcugaggcaggagaauca

SEQ ID NO: 100182 - RNA, 23 nt, Human
ucacaccacuguacuccagccug

SEQ ID NO: 100183 - RNA, 23 nt, Human
ucacuugacgucaggaguucaag

SEQ ID NO: 100184 - RNA, 18 nt, Human
ucagugaaauaccaaagg

SEQ ID NO: 100185 - RNA, 27 nt, Human
uccaaguugaagaauuucagccaaaga

SEQ ID NO: 100186 - RNA, 24 nt, Human
uccagccugggcgacagagcaaga

SEQ ID NO: 100187 - RNA, 19 nt, Human
ucuaaguaggugggugcag

SEQ ID NO: 100188 - RNA, 21 nt, Human
ucucuauuaaaaauacaaaaa

SEQ ID NO: 100189 - RNA, 18 nt, Human
ugaaauaccaaaggaguc

SEQ ID NO: 100190 - RNA, 23 nt, Human
ugaaauaccaaaggagucaagga

SEQ ID NO: 100191 - RNA, 23 nt, Human
ugaacccaggaggcggagguugc

SEQ ID NO: 100192 - RNA, 18 nt, Human
ugaggcaggagaaucaug

SEQ ID NO: 100193 - RNA, 22 nt, Human
ugaggcaggagaaucaugugaa

SEQ ID NO: 100194 - RNA, 24 nt, Human
ugaggcaggagaaucaugugaacc

SEQ ID NO: 100195 - RNA, 25 nt, Human
ugaggcaggagaaucaugugaaccc

SEQ ID NO: 100196 - RNA, 24 nt, Human
ugccuguaaacccagcuacuuagg

SEQ ID NO: 100197 - RNA, 18 nt, Human
uggaaucagaaaaaacau

SEQ ID NO: 100198 - RNA, 24 nt, Human
ugggagaccaaggcaggcagauca

SEQ ID NO: 100199 - RNA, 20 nt, Human
uggugggugccuguaaaccc

SEQ ID NO: 100200 - RNA, 24 nt, Human
ugguggugggugccuguaaaccca

SEQ ID NO: 100201 - RNA, 19 nt, Human
uguaagucacaaaauggug

SEQ ID NO: 100202 - RNA, 24 nt, Human
ugucauggaaaaaugaaaaaucuc

SEQ ID NO: 100203 - RNA, 27 nt, Human
uuaaaaguccuuuucuucccucucgug

SEQ ID NO: 100204 - RNA, 24 nt, Human
uuagcugggcaugguggugggugc

SEQ ID NO: 100205 - RNA, 22 nt, Human
uucaaauuccuuucuguaaguc

SEQ ID NO: 100206 - RNA, 19 nt, Human
uugcagugagcugggauca

SEQ ID NO: 100207 - RNA, 20 nt, Human
uugcagugagcugggaucac

SEQ ID NO: 100208 - RNA, 23 nt, Human
uugcagugagcugggaucacacc

SEQ ID NO: 100209 - RNA, 22 nt, Human
aaccuuuucucucaaucuccac

SEQ ID NO: 100210 - RNA, 22 nt, Human
aagcaaauuccacaagguugca

SEQ ID NO: 100211 - RNA, 22 nt, Human
agacaccaucaucucuccccag

SEQ ID NO: 100212 - RNA, 19 nt, Human
aucaucucuccccagaauu

SEQ ID NO: 100213 - RNA, 22 nt, Human
auccacuuacucaggaagcaaa

SEQ ID NO: 100214 - RNA, 20 nt, Human
cucuccccagaauucuuggg

SEQ ID NO: 100215 - RNA, 18 nt, Human
cuggcucccuguuucugu

SEQ ID NO: 100216 - RNA, 18 nt, Human
cuuggaaaaucaaagccg

SEQ ID NO: 100217 - RNA, 22 nt, Human
gagaagccagagcaucuuuagg

SEQ ID NO: 100218 - RNA, 19 nt, Human
gaucuguaacuggcucccu

SEQ ID NO: 100219 - RNA, 19 nt, Human
guccaugauuuaacugucc

SEQ ID NO: 100220 - RNA, 24 nt, Human
guuuccacacuucuuccuugucau

SEQ ID NO: 100221 - RNA, 20 nt, Human
uacauucugaaccacuugga

SEQ ID NO: 100222 - RNA, 18 nt, Human
ucacucugcugcagacac

SEQ ID NO: 100223 - RNA, 21 nt, Human
ucagcuacaaaagcuuaguga

SEQ ID NO: 100224 - RNA, 25 nt, Human
ucauugcugagguuguauauccacu

SEQ ID NO: 100225 - RNA, 18 nt, Human
uccagcuuccucaguucc

SEQ ID NO: 100226 - RNA, 25 nt, Human
ucuccacugcugucacucugcugca

SEQ ID NO: 100227 - RNA, 25 nt, Human
ucuccacugcugucacucugcugca

SEQ ID NO: 100228 - RNA, 20 nt, Human
ucuugcuccucuucagucua

SEQ ID NO: 100229 - RNA, 20 nt, Human
ugaaccacuuggaaaaucaa

SEQ ID NO: 100230 - RNA, 23 nt, Human
ugagcauucaagagagaagccag

SEQ ID NO: 100231 - RNA, 18 nt, Human
uggaaaaucaaagccgua

SEQ ID NO: 100232 - RNA, 22 nt, Human
uguaagauaacuuuccaguuca

SEQ ID NO: 100233 - RNA, 23 nt, Human
uuagugagcauucaagagagaag

SEQ ID NO: 100234 - RNA, 20 nt, Human
uuccucaguuccaaguacug

SEQ ID NO: 100235 - RNA, 21 nt, Human
uucgaucaugaaaagggcacu

SEQ ID NO: 100236 - RNA, 20 nt, Human
aauuucucugacuauacauu

SEQ ID NO: 100237 - RNA, 22 nt, Human
acauugaaaaauaguagaggaa

SEQ ID NO: 100238 - RNA, 20 nt, Human
acauuucuccccacaucucu

SEQ ID NO: 100239 - RNA, 27 nt, Human
accuagcauucuuuuuuuuuuuuuuuu

SEQ ID NO: 100240 - RNA, 18 nt, Human
agaaaacuccauagacua

SEQ ID NO: 100241 - RNA, 20 nt, Human
agcauguagguagcuuaaaa

SEQ ID NO: 100242 - RNA, 19 nt, Human
aggacgucacuaacaaaaa

SEQ ID NO: 100243 - RNA, 18 nt, Human
aggcuuuuauucauacaa

SEQ ID NO: 100244 - RNA, 20 nt, Human
aucauacuuucuaguuuucu

SEQ ID NO: 100245 - RNA, 21 nt, Human
cacaaaacucuuuaagacuac

SEQ ID NO: 100246 - RNA, 20 nt, Human
ccagggaaaucagaaaacuc

SEQ ID NO: 100247 - RNA, 23 nt, Human
ccauggaguauuuacuccaggga

SEQ ID NO: 100248 - RNA, 26 nt, Human
ccuucuauauaccuuuguaacuucaa

SEQ ID NO: 100249 - RNA, 23 nt, Human
cucaucuacuuuuaauaucuucc

SEQ ID NO: 100250 - RNA, 24 nt, Human
cuuuuuuuuuuuuuuuuuuuuuaa

SEQ ID NO: 100251 - RNA, 23 nt, Human
ggaauauuuuagucauaugccag

SEQ ID NO: 100252 - RNA, 19 nt, Human
gucacuaacaaaaaucuug

SEQ ID NO: 100253 - RNA, 24 nt, Human
uacaaaaguucugugauccccaga

SEQ ID NO: 100254 - RNA, 24 nt, Human
uagcauucuuuuuuuuuuuuuuuu

SEQ ID NO: 100255 - RNA, 20 nt, Human
uauaccuuuguaacuucaac

SEQ ID NO: 100256 - RNA, 21 nt, Human
uccagggaaaucagaaaacuc

SEQ ID NO: 100257 - RNA, 23 nt, Human
uccccagaaagccuuauuuacau

SEQ ID NO: 100258 - RNA, 25 nt, Human
uccccgccauagagccagggcacaa

SEQ ID NO: 100259 - RNA, 18 nt, Human
ucgcauaaggaucgacua

SEQ ID NO: 100260 - RNA, 24 nt, Human
ucuucagaggaaacaggacgucac

SEQ ID NO: 100261 - RNA, 27 nt, Human
ugacauugaaaaauaguagaggaauau

SEQ ID NO: 100262 - RNA, 22 nt, Human
ugacuauacauuuucaauuuuc

SEQ ID NO: 100263 - RNA, 21 nt, Human
ugauuguuuacauuucucccc

SEQ ID NO: 100264 - RNA, 21 nt, Human
uucaaaucugguuguauugau

SEQ ID NO: 100265 - RNA, 24 nt, Human
uucauggaauaauucaugaaaauu

SEQ ID NO: 100266 - RNA, 23 nt, Human
uuuacauuucuccccacaucucu

SEQ ID NO: 100267 - RNA, 26 nt, Human
uuucugauucuguguaccuucuauau

SEQ ID NO: 100268 - RNA, 21 nt, Human
uuugguauuuuuacucuuucc

SEQ ID NO: 100269 - RNA, 22 nt, Human
aaaaaaaaaaaacaaacuaaag

SEQ ID NO: 100270 - RNA, 23 nt, Human
aaaaaaacaaacuaaagucuaaa

SEQ ID NO: 100271 - RNA, 22 nt, Human
aaaaaaccugaauccauagucc

SEQ ID NO: 100272 - RNA, 25 nt, Human
aaaaaaccugaauccauaguccaaa

SEQ ID NO: 100273 - RNA, 26 nt, Human
aaacuaaagucuaaaacuagaaguaa

SEQ ID NO: 100274 - RNA, 25 nt, Human
aaagccuuaaacagaaaacuaauuc

SEQ ID NO: 100275 - RNA, 24 nt, Human
aaccugaauccauaguccaaauaa

SEQ ID NO: 100276 - RNA, 20 nt, Human
aacuuacugcucccaccacu

SEQ ID NO: 100277 - RNA, 22 nt, Human
acaaaaaggcacauaaaauccc

SEQ ID NO: 100278 - RNA, 18 nt, Human
acaauacagaggcaaagc

SEQ ID NO: 100279 - RNA, 25 nt, Human
acaauacagaggcaaagcuguuguc

SEQ ID NO: 100280 - RNA, 23 nt, Human
acccccuucccuuccccuccccu

SEQ ID NO: 100281 - RNA, 20 nt, Human
accccuuucuuuccuuuccu

SEQ ID NO: 100282 - RNA, 24 nt, Human
acuacagcucaacaauugaaucuu

SEQ ID NO: 100283 - RNA, 23 nt, Human
agaagucucuccaguuuaaaagc

SEQ ID NO: 100284 - RNA, 21 nt, Human
agcggcgcggagaaacggcuc

SEQ ID NO: 100285 - RNA, 24 nt, Human
aggaggcggcggcggcggcggcgg

SEQ ID NO: 100286 - RNA, 24 nt, Human
aggcggcggcggcggcggcggcgg

SEQ ID NO: 100287 - RNA, 19 nt, Human
aucugaaaaagguacaaaa

SEQ ID NO: 100288 - RNA, 28 nt, Human
auguaacaaaagcguguugaagcauauc

SEQ ID NO: 100289 - RNA, 18 nt, Human
auuguuuguacuugucca

SEQ ID NO: 100290 - RNA, 19 nt, Human
caaaugcaauguaacaaaa

SEQ ID NO: 100291 - RNA, 19 nt, Human
cacaauacagaggcaaagc

SEQ ID NO: 100292 - RNA, 19 nt, Human
cacauaaaaucccagugcu

SEQ ID NO: 100293 - RNA, 18 nt, Human
cacccccuucccuucccc

SEQ ID NO: 100294 - RNA, 24 nt, Human
cacugugcuaguagacuacaaagu

SEQ ID NO: 100295 - RNA, 18 nt, Human
cagcggcagcaccaacag

SEQ ID NO: 100296 - RNA, 24 nt, Human
caguuuaaaagcuuuuuuuuuucc

SEQ ID NO: 100297 - RNA, 19 nt, Human
cauuauguacacauacuau

SEQ ID NO: 100298 - RNA, 18 nt, Human
cauuugugcuaagaacuu

SEQ ID NO: 100299 - RNA, 18 nt, Human
cccaaaccaaaaagaaaa

SEQ ID NO: 100300 - RNA, 25 nt, Human
cccaaaccaaaaagaaaauaaaaaa

SEQ ID NO: 100301 - RNA, 18 nt, Human
ccccuccccacccccuuc

SEQ ID NO: 100302 - RNA, 19 nt, Human
ccccuccccuccccacccc

SEQ ID NO: 100303 - RNA, 20 nt, Human
cccuccccacccccuucuuc

SEQ ID NO: 100304 - RNA, 18 nt, Human
cccuuccccuccccuccc

SEQ ID NO: 100305 - RNA, 18 nt, Human
ccuccagcaagcacugug

SEQ ID NO: 100306 - RNA, 21 nt, Human
ccuuccccuccccuccccacc

SEQ ID NO: 100307 - RNA, 19 nt, Human
cgaaagauauaaacaugca

SEQ ID NO: 100308 - RNA, 24 nt, Human
cgaaagauauaaacaugcaaaaaa

SEQ ID NO: 100309 - RNA, 25 nt, Human
cggcagcaccaacagcggcgcggag

SEQ ID NO: 100310 - RNA, 19 nt, Human
cggcgcggagaaacggcuc

SEQ ID NO: 100311 - RNA, 23 nt, Human
cggcggcggcggcggcggcggag

SEQ ID NO: 100312 - RNA, 24 nt, Human
cggcuccaggcaguuuccaccccc

SEQ ID NO: 100313 - RNA, 25 nt, Human
cuccaggcaguuuccacccccuucc

SEQ ID NO: 100314 - RNA, 18 nt, Human
cugcucuccgcuccccgc

SEQ ID NO: 100315 - RNA, 19 nt, Human
cugguacacaauacagagg

SEQ ID NO: 100316 - RNA, 21 nt, Human
cugguacacaauacagaggca

SEQ ID NO: 100317 - RNA, 18 nt, Human
cuuaucguuucagaaauc

SEQ ID NO: 100318 - RNA, 23 nt, Human
cuucccuuccccuccccucccca

SEQ ID NO: 100319 - RNA, 21 nt, Human
cuucgcugcucuccgcucccc

SEQ ID NO: 100320 - RNA, 20 nt, Human
cuucuccauagacuaugcca

SEQ ID NO: 100321 - RNA, 23 nt, Human
gaaaaaaaaaaaacaaacuaaag

SEQ ID NO: 100322 - RNA, 21 nt, Human
gcggcggcggcggcggaggag

SEQ ID NO: 100323 - RNA, 20 nt, Human
gcggcggcggcggcggcggc

SEQ ID NO: 100324 - RNA, 20 nt, Human
gcggcggcggcggcggcggc

SEQ ID NO: 100325 - RNA, 24 nt, Human
gcggcggcggcggcggcggcggcg

SEQ ID NO: 100326 - RNA, 30 nt, Human
ggaggaggcggcggcggcggcggcggcgac

SEQ ID NO: 100327 - RNA, 18 nt, Human
ggcgcggagaaacggcuc

SEQ ID NO: 100328 - RNA, 20 nt, Human
ggcggaggaggaggaggcag

SEQ ID NO: 100329 - RNA, 23 nt, Human
ggcggcggcggcggcggcggcgg

SEQ ID NO: 100330 - RNA, 20 nt, Human
guacauggauuaagaccaaa

SEQ ID NO: 100331 - RNA, 22 nt, Human
gugauaugaaaacucccuuuau

SEQ ID NO: 100332 - RNA, 23 nt, Human
guugucagaagucucuccaguuu

SEQ ID NO: 100333 - RNA, 21 nt, Human
uaaaacauuugugcuaagaac

SEQ ID NO: 100334 - RNA, 22 nt, Human
uaaaagcuuuuuuuuuuccauu

SEQ ID NO: 100335 - RNA, 22 nt, Human
uaaacagaaaacuaauuccaau

SEQ ID NO: 100336 - RNA, 22 nt, Human
uagaaguaauguacauuuucca

SEQ ID NO: 100337 - RNA, 21 nt, Human
uagcauuuuauucagaacgcu

SEQ ID NO: 100338 - RNA, 22 nt, Human
uaguagugccaccagugucagg

SEQ ID NO: 100339 - RNA, 20 nt, Human
uccccaaaccaaaaagaaaa

SEQ ID NO: 100340 - RNA, 24 nt, Human
uccccaaaccaaaaagaaaauaaa

SEQ ID NO: 100341 - RNA, 19 nt, Human
uccccacccccuucuucgc

SEQ ID NO: 100342 - RNA, 21 nt, Human
ucccuuccccuccccucccca

SEQ ID NO: 100343 - RNA, 19 nt, Human
uccuuuuuuuuuuuuuugg

SEQ ID NO: 100344 - RNA, 18 nt, Human
ucucccuccccaaaccaa

SEQ ID NO: 100345 - RNA, 30 nt, Human
ucuuuccuuuccuuuuuuuuuuuuuugguu

SEQ ID NO: 100346 - RNA, 23 nt, Human
ugaaaaaaaaaaaacaaacuaaa

SEQ ID NO: 100347 - RNA, 18 nt, Human
ugaaguggaaaaauacag

SEQ ID NO: 100348 - RNA, 23 nt, Human
ugaaguggaaaaauacagaaaua

SEQ ID NO: 100349 - RNA, 21 nt, Human
ugauaugaaaacucccuuuau

SEQ ID NO: 100350 - RNA, 19 nt, Human
ugcagccuaugccaaagcc

SEQ ID NO: 100351 - RNA, 25 nt, Human
uggaaaaauacagaaauaaaaaagu

SEQ ID NO: 100352 - RNA, 20 nt, Human
ugucaggccaccccuuucuu

SEQ ID NO: 100353 - RNA, 21 nt, Human
uuuaagauuuuagugaaaaaa

SEQ ID NO: 100354 - RNA, 21 nt, Human
uuuccuuuccuuuuuuuuuuu

SEQ ID NO: 100355 - RNA, 18 nt, Human
uuuguauuuuaauaaaag

SEQ ID NO: 100356 - RNA, 23 nt, Human
aaagaaaaaaagguaauuaaaga

SEQ ID NO: 100357 - RNA, 18 nt, Human
aagccuucgcacacagug

SEQ ID NO: 100358 - RNA, 21 nt, Human
acccccauucucacucuccag

SEQ ID NO: 100359 - RNA, 21 nt, Human
acgcgcgccugccuccuggcu

SEQ ID NO: 100360 - RNA, 19 nt, Human
agagcucuguucgccugcu

SEQ ID NO: 100361 - RNA, 22 nt, Human
auaaaaaacagauacgagagua

SEQ ID NO: 100362 - RNA, 19 nt, Human
aucuacccaaguaaagcug

SEQ ID NO: 100363 - RNA, 22 nt, Human
cacacagugucagaaaaaucaa

SEQ ID NO: 100364 - RNA, 24 nt, Human
cacacagugucagaaaaaucaaaa

SEQ ID NO: 100365 - RNA, 23 nt, Human
cacagugucagaaaaaucaaaaa

SEQ ID NO: 100366 - RNA, 23 nt, Human
caucucuguauccaaggccagag

SEQ ID NO: 100367 - RNA, 19 nt, Human
ccccauucucacucuccag

SEQ ID NO: 100368 - RNA, 21 nt, Human
cgaauggcagagaaaagccac

SEQ ID NO: 100369 - RNA, 22 nt, Human
gcagagaaaagccacccuuguc

SEQ ID NO: 100370 - RNA, 24 nt, Human
gcagagaaaagccacccuugucag

SEQ ID NO: 100371 - RNA, 20 nt, Human
gccugcucacccccauucuc

SEQ ID NO: 100372 - RNA, 21 nt, Human
gcgaagcacccgcggagaacg

SEQ ID NO: 100373 - RNA, 19 nt, Human
ggagaacgucuggauuugg

SEQ ID NO: 100374 - RNA, 20 nt, Human
uaaaaaacagauacgagagu

SEQ ID NO: 100375 - RNA, 23 nt, Human
uaaagauucugcccucuuccuuc

SEQ ID NO: 100376 - RNA, 23 nt, Human
uaagauaaaaaacagauacgaga

SEQ ID NO: 100377 - RNA, 21 nt, Human
ucagaacaccuuggacuccaa

SEQ ID NO: 100378 - RNA, 20 nt, Human
uccgcgaagcacccgcggaa

SEQ ID NO: 100379 - RNA, 23 nt, Human
uggcagagaaaagccacccuugu

SEQ ID NO: 100380 - RNA, 18 nt, Human
ugucagaaaaaucaaaaa

SEQ ID NO: 100381 - RNA, 19 nt, Human
ugucagaaaaaucaaaaag

SEQ ID NO: 100382 - RNA, 26 nt, Human
ugucagaaaaaucaaaaagaaaagaa

SEQ ID NO: 100383 - RNA, 23 nt, Human
uguccgcgaagcacccgcggagg

SEQ ID NO: 100384 - RNA, 19 nt, Human
ugugguggaaaagugacaa

SEQ ID NO: 100385 - RNA, 19 nt, Human
uucgcacacagugucagaa

SEQ ID NO: 100386 - RNA, 19 nt, Human
aaggccuggccuuggaggg

SEQ ID NO: 100387 - RNA, 18 nt, Human
acauugacuuucuugucc

SEQ ID NO: 100388 - RNA, 24 nt, Human
accccgcgcuccaugcccaggccg

SEQ ID NO: 100389 - RNA, 19 nt, Human
accggcccugucccugccc

SEQ ID NO: 100390 - RNA, 21 nt, Human
acuagccccgaccaccucagc

SEQ ID NO: 100391 - RNA, 19 nt, Human
agccaagcugguccccaga

SEQ ID NO: 100392 - RNA, 20 nt, Human
agccugagccaagcuggucc

SEQ ID NO: 100393 - RNA, 18 nt, Human
agcgagacuuggacugga

SEQ ID NO: 100394 - RNA, 21 nt, Human
aggggauggugcuugcggggu

SEQ ID NO: 100395 - RNA, 24 nt, Human
auggugcuugcgggguggagcugg

SEQ ID NO: 100396 - RNA, 21 nt, Human
caagcaucgcgccugcagccc

SEQ ID NO: 100397 - RNA, 19 nt, Human
caagcugguccccagacuc

SEQ ID NO: 100398 - RNA, 18 nt, Human
caccccgcgcuccaugcc

SEQ ID NO: 100399 - RNA, 21 nt, Human
cacuucuguuuauaagcuggg

SEQ ID NO: 100400 - RNA, 18 nt, Human
cagcuccugggucuccgc

SEQ ID NO: 100401 - RNA, 25 nt, Human
ccagugacccuccuuaccuuguccu

SEQ ID NO: 100402 - RNA, 20 nt, Human
cccgaccaccucagcguccg

SEQ ID NO: 100403 - RNA, 26 nt, Human
cccgaccaccucagcguccggccgcc

SEQ ID NO: 100404 - RNA, 25 nt, Human
ccgaccaccucagcguccggccgcc

SEQ ID NO: 100405 - RNA, 21 nt, Human
ccgccgcgucuucccgccggc

SEQ ID NO: 100406 - RNA, 18 nt, Human
ccggcccugucccugccc

SEQ ID NO: 100407 - RNA, 19 nt, Human
ccugcagcccgcgucccuc

SEQ ID NO: 100408 - RNA, 18 nt, Human
ccugcucuggcccuggcc

SEQ ID NO: 100409 - RNA, 22 nt, Human
ccugucccugcccuugcucccu

SEQ ID NO: 100410 - RNA, 25 nt, Human
ccugucccugcccuugcucccuggg

SEQ ID NO: 100411 - RNA, 19 nt, Human
cgccgcgccucgccucgcc

SEQ ID NO: 100412 - RNA, 24 nt, Human
cgccgggggcucggacugggcgcg

SEQ ID NO: 100413 - RNA, 23 nt, Human
cgccucgccucgggcucugcucu

SEQ ID NO: 100414 - RNA, 24 nt, Human
cggccagcaggggauguccgcgcu

SEQ ID NO: 100415 - RNA, 18 nt, Human
cuccgccggaucggcccc

SEQ ID NO: 100416 - RNA, 22 nt, Human
cucgccgcucgccgcucgccgc

SEQ ID NO: 100417 - RNA, 21 nt, Human
cucuccgccggaucggccccc

SEQ ID NO: 100418 - RNA, 23 nt, Human
cucuugggccccagugacccucc

SEQ ID NO: 100419 - RNA, 21 nt, Human
cuggccaccgccgcgucuucc

SEQ ID NO: 100420 - RNA, 23 nt, Human
gacuuggacuggagucgggucga

SEQ ID NO: 100421 - RNA, 20 nt, Human
gagcagcugaugcgggcugc

SEQ ID NO: 100422 - RNA, 18 nt, Human
gcacacauuugggaagcc

SEQ ID NO: 100423 - RNA, 18 nt, Human
gcagcggcgccgcgccuc

SEQ ID NO: 100424 - RNA, 20 nt, Human
gccuuggagggucccccccg

SEQ ID NO: 100425 - RNA, 20 nt, Human
gcgccgcgccucgccucgcc

SEQ ID NO: 100426 - RNA, 18 nt, Human
gcgggguggagcugggag

SEQ ID NO: 100427 - RNA, 21 nt, Human
ggaaauguagcgagacuugga

SEQ ID NO: 100428 - RNA, 22 nt, Human
ggaugggugcugcucacaccca

SEQ ID NO: 100429 - RNA, 19 nt, Human
ggccaagccaagguugucc

SEQ ID NO: 100430 - RNA, 20 nt, Human
ggccaccgccgcgucuuccc

SEQ ID NO: 100431 - RNA, 19 nt, Human
ggccccagugacccuccuu

SEQ ID NO: 100432 - RNA, 20 nt, Human
ggccgcucgccgcucgccgc

SEQ ID NO: 100433 - RNA, 19 nt, Human
gggacgguggaugggugcu

SEQ ID NO: 100434 - RNA, 24 nt, Human
gggaggagggccuguuuggccucu

SEQ ID NO: 100435 - RNA, 23 nt, Human
gggagggaggagggccuguuugg

SEQ ID NO: 100436 - RNA, 18 nt, Human
gggauguccgcgcugggc

SEQ ID NO: 100437 - RNA, 19 nt, Human
ggggauggugcuugcgggg

SEQ ID NO: 100438 - RNA, 18 nt, Human
gggguggagcugggaggg

SEQ ID NO: 100439 - RNA, 18 nt, Human
uaacagaucuuaugaagg

SEQ ID NO: 100440 - RNA, 23 nt, Human
uauaaaaauaacagaucuuauga

SEQ ID NO: 100441 - RNA, 20 nt, Human
uccagaggcucugccacccc

SEQ ID NO: 100442 - RNA, 20 nt, Human
uccccaaggccuggccuugg

SEQ ID NO: 100443 - RNA, 19 nt, Human
ucccgagccgccgccgccg

SEQ ID NO: 100444 - RNA, 19 nt, Human
ucccugggaggggacggug

SEQ ID NO: 100445 - RNA, 23 nt, Human
ucgccgcucgccgcucgccgcuc

SEQ ID NO: 100446 - RNA, 23 nt, Human
ucuccgcgggccgcucgccgcuc

SEQ ID NO: 100447 - RNA, 19 nt, Human
ucuugggccccagugaccc

SEQ ID NO: 100448 - RNA, 19 nt, Human
ucuugggccccagugaccc

SEQ ID NO: 100449 - RNA, 22 nt, Human
ugcgggguggagcugggaggga

SEQ ID NO: 100450 - RNA, 24 nt, Human
uggagcugggagggaggagggccu

SEQ ID NO: 100451 - RNA, 19 nt, Human
uggagucggguguccggcc

SEQ ID NO: 100452 - RNA, 21 nt, Human
ugggaggggacgguggauggg

SEQ ID NO: 100453 - RNA, 23 nt, Human
ugggaggggacgguggauggguc

SEQ ID NO: 100454 - RNA, 24 nt, Human
ugggaggggacgguggaugggugc

SEQ ID NO: 100455 - RNA, 19 nt, Human
ugucccugcccuugcuccc

SEQ ID NO: 100456 - RNA, 21 nt, Human
uguccgcgcugggccucccuu

SEQ ID NO: 100457 - RNA, 18 nt, Human
uuucuuguccacgugggg

SEQ ID NO: 100458 - RNA, 20 nt, Human
uuuuuuuuuuuuaagagucc

SEQ ID NO: 100459 - RNA, 19 nt, Human
uuuuuuuuuuuuuuuuuaa

SEQ ID NO: 100460 - RNA, 21 nt, Human
aaccagaaaugcaggacggcc

SEQ ID NO: 100461 - RNA, 21 nt, Human
aggcauuggggucuggaaacc

SEQ ID NO: 100462 - RNA, 23 nt, Human
agugggcccagcagcucugggcu

SEQ ID NO: 100463 - RNA, 21 nt, Human
auaaggggcaaccuaggcaca

SEQ ID NO: 100464 - RNA, 19 nt, Human
caaacugcccacauuccuc

SEQ ID NO: 100465 - RNA, 19 nt, Human
caacgcaacagggaaaaua

SEQ ID NO: 100466 - RNA, 18 nt, Human
cacagcaggcccaggccc

SEQ ID NO: 100467 - RNA, 23 nt, Human
cacucaguauaaaaacgcagaga

SEQ ID NO: 100468 - RNA, 21 nt, Human
caggcccaggcccaggacaca

SEQ ID NO: 100469 - RNA, 20 nt, Human
ccacuuccugacaagcuccg

SEQ ID NO: 100470 - RNA, 18 nt, Human
cccacauuccuccauccu

SEQ ID NO: 100471 - RNA, 19 nt, Human
ccgcucagcucuugccccu

SEQ ID NO: 100472 - RNA, 23 nt, Human
ccgguguuccgcucagcucuugc

SEQ ID NO: 100473 - RNA, 21 nt, Human
ccucugaggcaacccuggccc

SEQ ID NO: 100474 - RNA, 21 nt, Human
cgaaugggaggcauugggguc

SEQ ID NO: 100475 - RNA, 23 nt, Human
cggccagugggcccagcagcucu

SEQ ID NO: 100476 - RNA, 21 nt, Human
cuuggccucugaggcaacccu

SEQ ID NO: 100477 - RNA, 19 nt, Human
gggcccagcagcucugggc

SEQ ID NO: 100478 - RNA, 25 nt, Human
uaaaaaauaaggggcaaccuaggca

SEQ ID NO: 100479 - RNA, 23 nt, Human
uaaggaagcaaccacucuaacgu

SEQ ID NO: 100480 - RNA, 22 nt, Human
uaggcacacucaguauaaaaac

SEQ ID NO: 100481 - RNA, 22 nt, Human
ucagcugaagggggaacugaga

SEQ ID NO: 100482 - RNA, 22 nt, Human
uccauccugaaaggcuaaggaa

SEQ ID NO: 100483 - RNA, 21 nt, Human
uccgccaaguugcuacggcca

SEQ ID NO: 100484 - RNA, 23 nt, Human
uccgccaaguugcuacggccacu

SEQ ID NO: 100485 - RNA, 21 nt, Human
ucuggaaacuuggccucugag

SEQ ID NO: 100486 - RNA, 22 nt, Human
ugaaaggcuaaggaagcaacca

SEQ ID NO: 100487 - RNA, 21 nt, Human
ugaagcagcugccgcgacggc

SEQ ID NO: 100488 - RNA, 18 nt, Human
uggccucugaggcaaccc

SEQ ID NO: 100489 - RNA, 19 nt, Human
uggccucugaggcaacccu

SEQ ID NO: 100490 - RNA, 22 nt, Human
ugggcccagcagcucugggcug

SEQ ID NO: 100491 - RNA, 18 nt, Human
uggggucuggaaaccaga

SEQ ID NO: 100492 - RNA, 22 nt, Human
uuggagaugcucuguggccuga

SEQ ID NO: 100493 - RNA, 22 nt, Human
uuggccucugaggcaacccugg

SEQ ID NO: 100494 - RNA, 24 nt, Human
uuggccucugaggcaacccuggcc

SEQ ID NO: 100495 - RNA, 22 nt, Human
acagcacuaaggacacagccgc

SEQ ID NO: 100496 - RNA, 19 nt, Human
agggcgcuguggggguggg

SEQ ID NO: 100497 - RNA, 23 nt, Human
cagggcgcugugggggugggugc

SEQ ID NO: 100498 - RNA, 22 nt, Human
ccucugcucaguccugcuccuc

SEQ ID NO: 100499 - RNA, 21 nt, Human
cggccgggugcagggcgcugu

SEQ ID NO: 100500 - RNA, 20 nt, Human
gccgcagggagucgggaaga

SEQ ID NO: 100501 - RNA, 20 nt, Human
gcgcugugggggugggugcu

SEQ ID NO: 100502 - RNA, 18 nt, Human
gggcagcggccgggugca

SEQ ID NO: 100503 - RNA, 23 nt, Human
uaacagcacuaaggacacagccg

SEQ ID NO: 100504 - RNA, 23 nt, Human
ucuuuuuuuuuuuuuuuuuuuaa

SEQ ID NO: 100505 - RNA, 19 nt, Human
ugcagggcgcugugggggu

SEQ ID NO: 100506 - RNA, 24 nt, Human
uuuuuuuuuuuuaaaaacagugcu

SEQ ID NO: 100507 - RNA, 23 nt, Human
aaaagaaagagagcauggauugg

SEQ ID NO: 100508 - RNA, 26 nt, Human
aaaauacaguacuugucaugcaccag

SEQ ID NO: 100509 - RNA, 26 nt, Human
aaagaaagagagcauggauuggcgac

SEQ ID NO: 100510 - RNA, 18 nt, Human
aaagacccugcagcaguu

SEQ ID NO: 100511 - RNA, 20 nt, Human
aagcuguccaggccuuugcc

SEQ ID NO: 100512 - RNA, 26 nt, Human
acuucaggacccaaggucaggagcug

SEQ ID NO: 100513 - RNA, 20 nt, Human
agaaagagagcauggauugg

SEQ ID NO: 100514 - RNA, 22 nt, Human
agcgagguguaaagacacaugg

SEQ ID NO: 100515 - RNA, 20 nt, Human
aggaaccuggaguuugcuau

SEQ ID NO: 100516 - RNA, 20 nt, Human
aggaaggggugcugggcugg

SEQ ID NO: 100517 - RNA, 23 nt, Human
aggaaggggugcugggcugggga

SEQ ID NO: 100518 - RNA, 18 nt, Human
aggcagagaaggggagac

SEQ ID NO: 100519 - RNA, 18 nt, Human
aggcagauaggcaccagg

SEQ ID NO: 100520 - RNA, 21 nt, Human
aggggugcugggcuggggagu

SEQ ID NO: 100521 - RNA, 21 nt, Human
aguagacagagaaaagaaaga

SEQ ID NO: 100522 - RNA, 24 nt, Human
aucuccacugccccuccagaauga

SEQ ID NO: 100523 - RNA, 24 nt, Human
caccaguuuggccaauauauagac

SEQ ID NO: 100524 - RNA, 23 nt, Human
cagaacaccagccuggauuugcc

SEQ ID NO: 100525 - RNA, 19 nt, Human
cagccuggauuugccagca

SEQ ID NO: 100526 - RNA, 25 nt, Human
cagccuggauuugccagcauuugag

SEQ ID NO: 100527 - RNA, 20 nt, Human
caggacccaaggucaggagc

SEQ ID NO: 100528 - RNA, 21 nt, Human
caggacccaaggucaggagcu

SEQ ID NO: 100529 - RNA, 18 nt, Human
caggaggaacagaucgug

SEQ ID NO: 100530 - RNA, 19 nt, Human
caggccagugaggucacuu

SEQ ID NO: 100531 - RNA, 21 nt, Human
caggccuggagagggguuggg

SEQ ID NO: 100532 - RNA, 23 nt, Human
cagugugaggggcuuugcccaga

SEQ ID NO: 100533 - RNA, 22 nt, Human
cauuuuuggaggcuguggugcc

SEQ ID NO: 100534 - RNA, 19 nt, Human
ccaaggucaggagcugcca

SEQ ID NO: 100535 - RNA, 18 nt, Human
ccaggccuucuccagagg

SEQ ID NO: 100536 - RNA, 25 nt, Human
ccagugaggucacuucaggacccaa

SEQ ID NO: 100537 - RNA, 19 nt, Human
ccaguuuugcuaaaggcca

SEQ ID NO: 100538 - RNA, 18 nt, Human
cccaaggcugaugagguc

SEQ ID NO: 100539 - RNA, 22 nt, Human
cccaggaggaacagaucgugcc

SEQ ID NO: 100540 - RNA, 21 nt, Human
ccccaggcccagagugaccuc

SEQ ID NO: 100541 - RNA, 20 nt, Human
ccguccagggccugagcgug

SEQ ID NO: 100542 - RNA, 19 nt, Human
ccugagaugugacaacagc

SEQ ID NO: 100543 - RNA, 20 nt, Human
ccugcagcaguuaaacacag

SEQ ID NO: 100544 - RNA, 22 nt, Human
cugagcccagacagaacaccag

SEQ ID NO: 100545 - RNA, 21 nt, Human
cugaucuccacugccccucca

SEQ ID NO: 100546 - RNA, 18 nt, Human
cugcaggggguuuggguc

SEQ ID NO: 100547 - RNA, 20 nt, Human
cuucccaggaggaacagauc

SEQ ID NO: 100548 - RNA, 19 nt, Human
cuuggaguggaguauggag

SEQ ID NO: 100549 - RNA, 21 nt, Human
gaggaaggggugcugggcugg

SEQ ID NO: 100550 - RNA, 24 nt, Human
gagugggaaccucgguccaugacg

SEQ ID NO: 100551 - RNA, 22 nt, Human
gcccagacagaacaccagccug

SEQ ID NO: 100552 - RNA, 20 nt, Human
gcugcaggggguuugggucc

SEQ ID NO: 100553 - RNA, 22 nt, Human
ggacugccuguccguccagggc

SEQ ID NO: 100554 - RNA, 22 nt, Human
ggaugucugagcccagacagaa

SEQ ID NO: 100555 - RNA, 20 nt, Human
gggcuuugcccagagugggg

SEQ ID NO: 100556 - RNA, 19 nt, Human
ggguuggggaguggugggg

SEQ ID NO: 100557 - RNA, 18 nt, Human
gguugggcagggcagggc

SEQ ID NO: 100558 - RNA, 18 nt, Human
gugaggcagagaagggga

SEQ ID NO: 100559 - RNA, 20 nt, Human
guggagcucuguggagccug

SEQ ID NO: 100560 - RNA, 21 nt, Human
guggagguggcccucacccug

SEQ ID NO: 100561 - RNA, 26 nt, Human
uaaaaaaauacaguacuugucaugca

SEQ ID NO: 100562 - RNA, 25 nt, Human
uaaaaaaaucauuauaagaagcuag

SEQ ID NO: 100563 - RNA, 24 nt, Human
uaaauaacaaccugcuuauuaugc

SEQ ID NO: 100564 - RNA, 22 nt, Human
uacaauuauagaaaauagaagg

SEQ ID NO: 100565 - RNA, 19 nt, Human
uagaaaaagacccugcagc

SEQ ID NO: 100566 - RNA, 19 nt, Human
uagaaaaagacccugcagc

SEQ ID NO: 100567 - RNA, 20 nt, Human
uagacagagaaaagaaagag

SEQ ID NO: 100568 - RNA, 23 nt, Human
uaucauuaguaaaaaaaucauua

SEQ ID NO: 100569 - RNA, 19 nt, Human
ucaugcagucaugaguggg

SEQ ID NO: 100570 - RNA, 19 nt, Human
uccaggcagauaggcacca

SEQ ID NO: 100571 - RNA, 18 nt, Human
uccaggccuuugccucca

SEQ ID NO: 100572 - RNA, 23 nt, Human
ucccaaggcugaugaggucucug

SEQ ID NO: 100573 - RNA, 19 nt, Human
uccccaggcccagagugac

SEQ ID NO: 100574 - RNA, 18 nt, Human
ucccgagagagggcauga

SEQ ID NO: 100575 - RNA, 18 nt, Human
ucgugccuguggggcuga

SEQ ID NO: 100576 - RNA, 18 nt, Human
ucuacaaucccuugcagu

SEQ ID NO: 100577 - RNA, 25 nt, Human
ucuccuucccugccccucucuguug

SEQ ID NO: 100578 - RNA, 22 nt, Human
ucucuguugacugaugccacuu

SEQ ID NO: 100579 - RNA, 22 nt, Human
ucuuccaggccuucuccagagg

SEQ ID NO: 100580 - RNA, 20 nt, Human
ugacaggguuauguggauga

SEQ ID NO: 100581 - RNA, 21 nt, Human
ugacgaagggugagcuuggug

SEQ ID NO: 100582 - RNA, 18 nt, Human
ugagagcuagaaacuugu

SEQ ID NO: 100583 - RNA, 20 nt, Human
ugagcccagacagaacaccg

SEQ ID NO: 100584 - RNA, 22 nt, Human
ugagggucaguucccugagaug

SEQ ID NO: 100585 - RNA, 18 nt, Human
ugccagcauuugagaaua

SEQ ID NO: 100586 - RNA, 22 nt, Human
ugccccuucucaggcaaaacug

SEQ ID NO: 100587 - RNA, 22 nt, Human
ugccugagggucaguucccuga

SEQ ID NO: 100588 - RNA, 21 nt, Human
ugccuucugcaaggugugccu

SEQ ID NO: 100589 - RNA, 18 nt, Human
ugcuccgggaacaucugc

SEQ ID NO: 100590 - RNA, 22 nt, Human
uggaagaugcaugggugaccac

SEQ ID NO: 100591 - RNA, 19 nt, Human
uggacugccuguccgucca

SEQ ID NO: 100592 - RNA, 18 nt, Human
uggagagggguuggggag

SEQ ID NO: 100593 - RNA, 23 nt, Human
uggaggcuguggugccuggcguc

SEQ ID NO: 100594 - RNA, 24 nt, Human
uggaugucugagcccagacagaac

SEQ ID NO: 100595 - RNA, 20 nt, Human
uggcaggccagugaggucac

SEQ ID NO: 100596 - RNA, 21 nt, Human
uggcucggcuccgucaugcag

SEQ ID NO: 100597 - RNA, 19 nt, Human
ugucugagcccagacagaa

SEQ ID NO: 100598 - RNA, 23 nt, Human
uucaggacccaaggucaggagcu

SEQ ID NO: 100599 - RNA, 19 nt, Human
uuggaggcuguggugccug

SEQ ID NO: 100600 - RNA, 25 nt, Human
uuggaggcuguggugccuggcgucu

SEQ ID NO: 100601 - RNA, 23 nt, Human
uuguccaguuuugcuaaaggcca

SEQ ID NO: 100602 - RNA, 22 nt, Human
uuuuuuuguugcccaggcuaaa

SEQ ID NO: 100603 - RNA, 23 nt, Human
aaaacaccaggacagcggaagcg

SEQ ID NO: 100604 - RNA, 27 nt, Human
aaaacaccaggacagcggaagcgggca

SEQ ID NO: 100605 - RNA, 23 nt, Human
aaacaacaguguguuuccaaaca

SEQ ID NO: 100606 - RNA, 20 nt, Human
aacagagaagccuucacgga

SEQ ID NO: 100607 - RNA, 23 nt, Human
aagugacccgugauacauguggu

SEQ ID NO: 100608 - RNA, 21 nt, Human
aaugacacuaaaauuauuugu

SEQ ID NO: 100609 - RNA, 26 nt, Human
acaaaggcaaacuuucgcaugucuag

SEQ ID NO: 100610 - RNA, 22 nt, Human
acccugcgacccgcccaggcug

SEQ ID NO: 100611 - RNA, 19 nt, Human
acuguucccuguccucccc

SEQ ID NO: 100612 - RNA, 20 nt, Human
agacccugcgacccgcccag

SEQ ID NO: 100613 - RNA, 19 nt, Human
agggcaggguauuagguuc

SEQ ID NO: 100614 - RNA, 20 nt, Human
auaugacaauauccccaaau

SEQ ID NO: 100615 - RNA, 28 nt, Human
augguacaaaggcaaacuuucgcauguc

SEQ ID NO: 100616 - RNA, 20 nt, Human
auggucaugaaagcaaaguu

SEQ ID NO: 100617 - RNA, 19 nt, Human
auguacaguauaguagaau

SEQ ID NO: 100618 - RNA, 23 nt, Human
caaacagaaaauaugugcugaua

SEQ ID NO: 100619 - RNA, 26 nt, Human
caauauccccaaauggaaaugacacu

SEQ ID NO: 100620 - RNA, 20 nt, Human
caccaggacagcggaagcgg

SEQ ID NO: 100621 - RNA, 19 nt, Human
cacugcaccguauccagcc

SEQ ID NO: 100622 - RNA, 23 nt, Human
cagccucauuccuccuuccuucc

SEQ ID NO: 100623 - RNA, 21 nt, Human
ccaaauggaaaugacacuaaa

SEQ ID NO: 100624 - RNA, 19 nt, Human
cccugagaacaaguggaaa

SEQ ID NO: 100625 - RNA, 18 nt, Human
cccugcgacccgcccagg

SEQ ID NO: 100626 - RNA, 18 nt, Human
ccgccgccgccgccgccg

SEQ ID NO: 100627 - RNA, 21 nt, Human
ccgccgccgccgccgccgcgg

SEQ ID NO: 100628 - RNA, 24 nt, Human
ccgccgccgccgccgcggucgccg

SEQ ID NO: 100629 - RNA, 25 nt, Human
ccgccgccgccgccgcggucgccgg

SEQ ID NO: 100630 - RNA, 18 nt, Human
ccgccgccgccgcggucg

SEQ ID NO: 100631 - RNA, 20 nt, Human
ccgcggagacccugcgaccc

SEQ ID NO: 100632 - RNA, 19 nt, Human
ccgcggucgccggcucugc

SEQ ID NO: 100633 - RNA, 28 nt, Human
ccggcaccugccuguugggcugacuugg

SEQ ID NO: 100634 - RNA, 25 nt, Human
ccggcucugccguucuuggcccccg

SEQ ID NO: 100635 - RNA, 20 nt, Human
ccuccuuccuuccuuaaugu

SEQ ID NO: 100636 - RNA, 24 nt, Human
ccugcgcccgcggagacccugcga

SEQ ID NO: 100637 - RNA, 18 nt, Human
cgccgccgccgccgccgc

SEQ ID NO: 100638 - RNA, 21 nt, Human
cuccgccgccgccgccgccgc

SEQ ID NO: 100639 - RNA, 21 nt, Human
cucuuccaagggucuuccaaa

SEQ ID NO: 100640 - RNA, 23 nt, Human
cuucacggaguaguggauaaaua

SEQ ID NO: 100641 - RNA, 18 nt, Human
cuuuaaagcacaguccuu

SEQ ID NO: 100642 - RNA, 19 nt, Human
gaagguuacgggcucggga

SEQ ID NO: 100643 - RNA, 22 nt, Human
gagaauuuuaacauaugggugg

SEQ ID NO: 100644 - RNA, 26 nt, Human
gaucauuacuuuaucauuaguucaaa

SEQ ID NO: 100645 - RNA, 19 nt, Human
gcaguuggcugaccugaca

SEQ ID NO: 100646 - RNA, 22 nt, Human
gccuccgccgccgccgccgccg

SEQ ID NO: 100647 - RNA, 18 nt, Human
gguucaaguguggcuggc

SEQ ID NO: 100648 - RNA, 22 nt, Human
guaaaacaccaggacagcggaa

SEQ ID NO: 100649 - RNA, 19 nt, Human
guagaacagagaagccuuc

SEQ ID NO: 100650 - RNA, 25 nt, Human
guagaacagagaagccuucacggag

SEQ ID NO: 100651 - RNA, 18 nt, Human
gugacacaaauaaacacc

SEQ ID NO: 100652 - RNA, 23 nt, Human
uaagauucuaaugauaagugcca

SEQ ID NO: 100653 - RNA, 18 nt, Human
uaaguauauauauauaca

SEQ ID NO: 100654 - RNA, 21 nt, Human
uaaugagaauuuuaacauaug

SEQ ID NO: 100655 - RNA, 18 nt, Human
uacaguuagggcaguugg

SEQ ID NO: 100656 - RNA, 18 nt, Human
uacaguuagggcaguugg

SEQ ID NO: 100657 - RNA, 26 nt, Human
uacgcuggaauuucugaugacugcac

SEQ ID NO: 100658 - RNA, 24 nt, Human
uacuagaaaaaagucucuaacauu

SEQ ID NO: 100659 - RNA, 26 nt, Human
uagaauaauacugacaacuauagaca

SEQ ID NO: 100660 - RNA, 18 nt, Human
uaugaugauauuuuuauc

SEQ ID NO: 100661 - RNA, 25 nt, Human
ucauaaucucaauguuguuuaucca

SEQ ID NO: 100662 - RNA, 19 nt, Human
uccacacggacugcagcca

SEQ ID NO: 100663 - RNA, 25 nt, Human
ucccucccccuuuauaugguacaaa

SEQ ID NO: 100664 - RNA, 24 nt, Human
uccuccuuccuuccuuaauguucu

SEQ ID NO: 100665 - RNA, 23 nt, Human
ucuaaccucuccacugaacuccu

SEQ ID NO: 100666 - RNA, 18 nt, Human
ucucagaggauaucucug

SEQ ID NO: 100667 - RNA, 24 nt, Human
ugaaaaaaaauuaaugcuuuugaa

SEQ ID NO: 100668 - RNA, 19 nt, Human
ugacaauauccccaaaugg

SEQ ID NO: 100669 - RNA, 18 nt, Human
ugacacaaauaaacaccc

SEQ ID NO: 100670 - RNA, 22 nt, Human
ugacacaaauaaacaccccuau

SEQ ID NO: 100671 - RNA, 21 nt, Human
ugacugcacaagguaagauuc

SEQ ID NO: 100672 - RNA, 22 nt, Human
ugagaucauuacuuuaucauuu

SEQ ID NO: 100673 - RNA, 18 nt, Human
ugauaugacaauaucccc

SEQ ID NO: 100674 - RNA, 27 nt, Human
ugauggcagagaaaguucuccccgagg

SEQ ID NO: 100675 - RNA, 21 nt, Human
ugccuccgccgccgccgccgc

SEQ ID NO: 100676 - RNA, 21 nt, Human
ugcugucgcggcugaaacugc

SEQ ID NO: 100677 - RNA, 21 nt, Human
uggaauuucugaugacugcac

SEQ ID NO: 100678 - RNA, 21 nt, Human
uggcaccgucgagucugugcg

SEQ ID NO: 100679 - RNA, 18 nt, Human
uguaagaaggauaugaag

SEQ ID NO: 100680 - RNA, 24 nt, Human
uguacaguuagggcaguuggcuga

SEQ ID NO: 100681 - RNA, 20 nt, Human
uguacuucacacugcuacuu

SEQ ID NO: 100682 - RNA, 20 nt, Human
uuaaagcacaguccuuuauc

SEQ ID NO: 100683 - RNA, 23 nt, Human
uuacuaauucaacuuagucgugu

SEQ ID NO: 100684 - RNA, 19 nt, Human
uuauccaaauguaucacgu

SEQ ID NO: 100685 - RNA, 19 nt, Human
uucaguucaguuggguccu

SEQ ID NO: 100686 - RNA, 25 nt, Human
uuccuugguuaacauuauuagcuau

SEQ ID NO: 100687 - RNA, 19 nt, Human
uugaauaguaguugauggc

SEQ ID NO: 100688 - RNA, 20 nt, Human
uuuccaucuuuacuucuugg

SEQ ID NO: 100689 - RNA, 19 nt, Human
aaccggcucgacacccgcu

SEQ ID NO: 100690 - RNA, 24 nt, Human
aagaaaaaaaccuugacaagagaa

SEQ ID NO: 100691 - RNA, 24 nt, Human
aagaaaaaaaccuugacaagagaa

SEQ ID NO: 100692 - RNA, 22 nt, Human
aagucauaaaacuaaucagaac

SEQ ID NO: 100693 - RNA, 19 nt, Human
accuggggccucgcugccc

SEQ ID NO: 100694 - RNA, 18 nt, Human
accuugacaagagaaaag

SEQ ID NO: 100695 - RNA, 18 nt, Human
accuugacaagagaaaag

SEQ ID NO: 100696 - RNA, 22 nt, Human
agccugucgugaaagccgugau

SEQ ID NO: 100697 - RNA, 21 nt, Human
aggcacaguuccaguuggcuu

SEQ ID NO: 100698 - RNA, 21 nt, Human
aggcacaguuccaguuggcuu

SEQ ID NO: 100699 - RNA, 27 nt, Human
cacgggcuccuccuccaaucacagccc

SEQ ID NO: 100700 - RNA, 23 nt, Human
caguacauuucgaauuaagguuc

SEQ ID NO: 100701 - RNA, 19 nt, Human
cccuccccacggcgucaga

SEQ ID NO: 100702 - RNA, 18 nt, Human
ccucgcugcccuccccac

SEQ ID NO: 100703 - RNA, 18 nt, Human
cgccagggacccgggcgu

SEQ ID NO: 100704 - RNA, 18 nt, Human
cgcugcccuccccacggc

SEQ ID NO: 100705 - RNA, 21 nt, Human
cuccuccuccaaucacagccc

SEQ ID NO: 100706 - RNA, 18 nt, Human
gacaagagaaaaggcaca

SEQ ID NO: 100707 - RNA, 18 nt, Human
gacaagagaaaaggcaca

SEQ ID NO: 100708 - RNA, 22 nt, Human
gauuggaagaggucaccacugc

SEQ ID NO: 100709 - RNA, 22 nt, Human
gauuggaagaggucaccacugc

SEQ ID NO: 100710 - RNA, 19 nt, Human
uaagaaaaaaaccuugaca

SEQ ID NO: 100711 - RNA, 19 nt, Human
uaagaaaaaaaccuugaca

SEQ ID NO: 100712 - RNA, 18 nt, Human
ugccuccggcaggguguc

SEQ ID NO: 100713 - RNA, 18 nt, Human
ugccuccggcaggguguc

SEQ ID NO: 100714 - RNA, 20 nt, Human
ugcgcgcagcuccgcgcgcg

SEQ ID NO: 100715 - RNA, 20 nt, Human
ugguguaguaaguaccuggg

SEQ ID NO: 100716 - RNA, 20 nt, Human
uguaagaaaaaaaccuugac

SEQ ID NO: 100717 - RNA, 20 nt, Human
uguaagaaaaaaaccuugac

SEQ ID NO: 100718 - RNA, 19 nt, Human
uguaguaaguaccuggggc

SEQ ID NO: 100719 - RNA, 18 nt, Human
uguaguaaguaccuuagc

SEQ ID NO: 100720 - RNA, 19 nt, Human
aaacaaauagccacauugg

SEQ ID NO: 100721 - RNA, 20 nt, Human
aaacagacaucaucuaagca

SEQ ID NO: 100722 - RNA, 21 nt, Human
agcauuuacuuacagcucugc

SEQ ID NO: 100723 - RNA, 19 nt, Human
auuuacuuacagcucugcc

SEQ ID NO: 100724 - RNA, 18 nt, Human
caccacgaaaaugagaca

SEQ ID NO: 100725 - RNA, 23 nt, Human
cuagacacuccacauacuuaauu

SEQ ID NO: 100726 - RNA, 25 nt, Human
uaagcaaaucaccacgaaaaugaga

SEQ ID NO: 100727 - RNA, 21 nt, Human
uauagcacgggaaacagacau

SEQ ID NO: 100728 - RNA, 25 nt, Human
ucuagacacuccacauacuuaauuc

SEQ ID NO: 100729 - RNA, 20 nt, Human
ucuccggucugcagccaucc

SEQ ID NO: 100730 - RNA, 23 nt, Human
uggggcccugcgcuggcgaaugu

SEQ ID NO: 100731 - RNA, 18 nt, Human
ugguugaguuuauagaug

SEQ ID NO: 100732 - RNA, 20 nt, Human
uugaguuuauagaugacugg

SEQ ID NO: 100733 - RNA, 22 nt, Human
uuuauaaccuccuaacauauac

SEQ ID NO: 100734 - RNA, 20 nt, Human
aaagacagcggggggacugc

SEQ ID NO: 100735 - RNA, 20 nt, Human
aaagacagcggggggacugc

SEQ ID NO: 100736 - RNA, 24 nt, Human
aaagcuuuuauccaacaagagccu

SEQ ID NO: 100737 - RNA, 24 nt, Human
aaagcuuuuauccaacaagagccu

SEQ ID NO: 100738 - RNA, 24 nt, Human
aaagcuuuuauccaacaagagccu

SEQ ID NO: 100739 - RNA, 24 nt, Human
aagcuuuuauccaacaagagccua

SEQ ID NO: 100740 - RNA, 24 nt, Human
aagcuuuuauccaacaagagccua

SEQ ID NO: 100741 - RNA, 19 nt, Human
accccauaccuugucccuc

SEQ ID NO: 100742 - RNA, 19 nt, Human
accccauaccuugucccuc

SEQ ID NO: 100743 - RNA, 19 nt, Human
accccauaccuugucccuc

SEQ ID NO: 100744 - RNA, 18 nt, Human
accugggguccccacagc

SEQ ID NO: 100745 - RNA, 18 nt, Human
accugggguccccacagc

SEQ ID NO: 100746 - RNA, 18 nt, Human
accugggguccccacagc

SEQ ID NO: 100747 - RNA, 22 nt, Human
acucaaagaaaugccaggccag

SEQ ID NO: 100748 - RNA, 23 nt, Human
acucaaagaaaugccaggccagg

SEQ ID NO: 100749 - RNA, 21 nt, Human
acuugaccugagccuccgaga

SEQ ID NO: 100750 - RNA, 21 nt, Human
agauaauggaggccccggagc

SEQ ID NO: 100751 - RNA, 18 nt, Human
agccgccagaccugcccu

SEQ ID NO: 100752 - RNA, 18 nt, Human
agccgccagaccugcccu

SEQ ID NO: 100753 - RNA, 18 nt, Human
agccgccagaccugcccu

SEQ ID NO: 100754 - RNA, 22 nt, Human
agcuccacgauguucggaugac

SEQ ID NO: 100755 - RNA, 22 nt, Human
agcuggaucccgggcgccuggu

SEQ ID NO: 100756 - RNA, 22 nt, Human
agcuggaucccgggcgccuggu

SEQ ID NO: 100757 - RNA, 23 nt, Human
agcuuuuauccaacaagagccua

SEQ ID NO: 100758 - RNA, 19 nt, Human
aggcccgggccaggccgaa

SEQ ID NO: 100759 - RNA, 20 nt, Human
aggcccgggccaggccgaaa

SEQ ID NO: 100760 - RNA, 20 nt, Human
aggccgaaauccgcugcagc

SEQ ID NO: 100761 - RNA, 19 nt, Human
agggauccagcucagccuc

SEQ ID NO: 100762 - RNA, 21 nt, Human
aguggcagcuuggaaaagccc

SEQ ID NO: 100763 - RNA, 22 nt, Human
auccaacaagagccuauagcuu

SEQ ID NO: 100764 - RNA, 22 nt, Human
auccaacaagagccuauagcuu

SEQ ID NO: 100765 - RNA, 24 nt, Human
augagaccccugcagccacggaug

SEQ ID NO: 100766 - RNA, 19 nt, Human
caccacuccucccaagaag

SEQ ID NO: 100767 - RNA, 19 nt, Human
caccacuccucccaagaag

SEQ ID NO: 100768 - RNA, 19 nt, Human
caccacuccucccaagaag

SEQ ID NO: 100769 - RNA, 23 nt, Human
caccacugaucggaagaccuggu

SEQ ID NO: 100770 - RNA, 23 nt, Human
caccacugaucggaagaccuggu

SEQ ID NO: 100771 - RNA, 19 nt, Human
cacccaccacuccucccaa

SEQ ID NO: 100772 - RNA, 19 nt, Human
cacccaccacuccucccaa

SEQ ID NO: 100773 - RNA, 19 nt, Human
cacccaccacuccucccaa

SEQ ID NO: 100774 - RNA, 22 nt, Human
cacccggccuuuuucugggggc

SEQ ID NO: 100775 - RNA, 22 nt, Human
cacccggccuuuuucugggggc

SEQ ID NO: 100776 - RNA, 22 nt, Human
cacccggccuuuuucugggggc

SEQ ID NO: 100777 - RNA, 19 nt, Human
cacccuucacagacaccac

SEQ ID NO: 100778 - RNA, 19 nt, Human
cacccuucacagacaccac

SEQ ID NO: 100779 - RNA, 19 nt, Human
caccugggguccccacagc

SEQ ID NO: 100780 - RNA, 19 nt, Human
caccugggguccccacagc

SEQ ID NO: 100781 - RNA, 19 nt, Human
caccugggguccccacagc

SEQ ID NO: 100782 - RNA, 19 nt, Human
caccugggguccccacagc

SEQ ID NO: 100783 - RNA, 19 nt, Human
caccugggguccccacagc

SEQ ID NO: 100784 - RNA, 22 nt, Human
cagcaggcgcagcccggccucc

SEQ ID NO: 100785 - RNA, 24 nt, Human
cagcaguggguucagggcagacag

SEQ ID NO: 100786 - RNA, 24 nt, Human
cagcaguggguucagggcagacag

SEQ ID NO: 100787 - RNA, 19 nt, Human
cagcgugauuucccgcaag

SEQ ID NO: 100788 - RNA, 18 nt, Human
cagcucagccuccagccc

SEQ ID NO: 100789 - RNA, 18 nt, Human
cagcucagccuccagccc

SEQ ID NO: 100790 - RNA, 23 nt, Human
cagcuccacgauguucggaugac

SEQ ID NO: 100791 - RNA, 19 nt, Human
cagcuuggaaaagcccggc

SEQ ID NO: 100792 - RNA, 25 nt, Human
caucaccaggaagaugcucuccagg

SEQ ID NO: 100793 - RNA, 24 nt, Human
caucccaggccagcgguccaccac

SEQ ID NO: 100794 - RNA, 23 nt, Human
caucccaggccagcguccaccac

SEQ ID NO: 100795 - RNA, 22 nt, Human
caucuggaguccugccaggccc

SEQ ID NO: 100796 - RNA, 22 nt, Human
caucuggaguccugccaggccc

SEQ ID NO: 100797 - RNA, 22 nt, Human
caucuggaguccugccaggccc

SEQ ID NO: 100798 - RNA, 20 nt, Human
ccaacaagagccuauagcuu

SEQ ID NO: 100799 - RNA, 22 nt, Human
ccaccacuccucccaagaagca

SEQ ID NO: 100800 - RNA, 22 nt, Human
ccaccacuccucccaagaagca

SEQ ID NO: 100801 - RNA, 22 nt, Human
ccaccacuccucccaagaagca

SEQ ID NO: 100802 - RNA, 24 nt, Human
ccacggccuccuguuggguccucc

SEQ ID NO: 100803 - RNA, 24 nt, Human
ccacggccuccuguuggguccucc

SEQ ID NO: 100804 - RNA, 25 nt, Human
ccaggcccaccuggggguccccugg

SEQ ID NO: 100805 - RNA, 25 nt, Human
ccaggcccaccuggggguccccugg

SEQ ID NO: 100806 - RNA, 25 nt, Human
ccaggcccaccuggggguccccugg

SEQ ID NO: 100807 - RNA, 21 nt, Human
cccaggccagcgguccaccac

SEQ ID NO: 100808 - RNA, 21 nt, Human
ccccccggugucacccggccu

SEQ ID NO: 100809 - RNA, 20 nt, Human
cccccggugucacccggccu

SEQ ID NO: 100810 - RNA, 20 nt, Human
cccccggugucacccggccu

SEQ ID NO: 100811 - RNA, 18 nt, Human
ccccggagcaccugcagc

SEQ ID NO: 100812 - RNA, 24 nt, Human
cccgcaagcugcugauggggaugc

SEQ ID NO: 100813 - RNA, 22 nt, Human
ccggugucacccggccuuuuuc

SEQ ID NO: 100814 - RNA, 20 nt, Human
ccuccagcccagggcucucc

SEQ ID NO: 100815 - RNA, 20 nt, Human
ccuccagcccagggcucucc

SEQ ID NO: 100816 - RNA, 20 nt, Human
ccuccagcccagggcucucc

SEQ ID NO: 100817 - RNA, 18 nt, Human
ccuccguguggggagcag

SEQ ID NO: 100818 - RNA, 18 nt, Human
ccuccguguggggagcag

SEQ ID NO: 100819 - RNA, 18 nt, Human
ccuccguguggggagcag

SEQ ID NO: 100820 - RNA, 22 nt, Human
ccuccguguggggagcagggau

SEQ ID NO: 100821 - RNA, 20 nt, Human
ccucugcuugugcucuucuc

SEQ ID NO: 100822 - RNA, 21 nt, Human
ccucugcuugugcucuucucg

SEQ ID NO: 100823 - RNA, 23 nt, Human
ccucuuguccucaucuggagucc

SEQ ID NO: 100824 - RNA, 23 nt, Human
ccucuuguccucaucuggagucc

SEQ ID NO: 100825 - RNA, 23 nt, Human
ccucuuguccucaucuggagucc

SEQ ID NO: 100826 - RNA, 19 nt, Human
ccugcagccacggauggag

SEQ ID NO: 100827 - RNA, 19 nt, Human
ccugcagccacggauggag

SEQ ID NO: 100828 - RNA, 19 nt, Human
ccugcagccacggauggag

SEQ ID NO: 100829 - RNA, 20 nt, Human
ccugcccuuccagggugcac

SEQ ID NO: 100830 - RNA, 20 nt, Human
ccugcccuuccagggugcac

SEQ ID NO: 100831 - RNA, 20 nt, Human
ccugcccuuccagggugcac

SEQ ID NO: 100832 - RNA, 21 nt, Human
ccuggcccaaguugcacccac

SEQ ID NO: 100833 - RNA, 21 nt, Human
ccugggguccccacagccaac

SEQ ID NO: 100834 - RNA, 21 nt, Human
ccugggguccccacagccaac

SEQ ID NO: 100835 - RNA, 21 nt, Human
ccugggguccccacagccaac

SEQ ID NO: 100836 - RNA, 20 nt, Human
ccuugucccucuuguccuca

SEQ ID NO: 100837 - RNA, 20 nt, Human
ccuugucccucuuguccuca

SEQ ID NO: 100838 - RNA, 20 nt, Human
ccuugucccucuuguccuca

SEQ ID NO: 100839 - RNA, 21 nt, Human
cgcagcccggccuccgacagc

SEQ ID NO: 100840 - RNA, 22 nt, Human
cgccaugccgagcgcuggcccc

SEQ ID NO: 100841 - RNA, 21 nt, Human
cggccuccuguuggguccucc

SEQ ID NO: 100842 - RNA, 21 nt, Human
cgggccaggccgaaauccgcu

SEQ ID NO: 100843 - RNA, 23 nt, Human
cgugugccaggcccaccgucagg

SEQ ID NO: 100844 - RNA, 21 nt, Human
cuagggacagggccuggccca

SEQ ID NO: 100845 - RNA, 21 nt, Human
cugcguggugguucccaacag

SEQ ID NO: 100846 - RNA, 21 nt, Human
cuggccgaccaguggcagcug

SEQ ID NO: 100847 - RNA, 23 nt, Human
cuucucgacacgcuuauuucugg

SEQ ID NO: 100848 - RNA, 23 nt, Human
gaccacaugagaccccugcagcc

SEQ ID NO: 100849 - RNA, 23 nt, Human
gaccacaugagaccccugcagcc

SEQ ID NO: 100850 - RNA, 23 nt, Human
gaccacaugagaccccugcagcc

SEQ ID NO: 100851 - RNA, 24 nt, Human
gaccacaugagaccccugcagcca

SEQ ID NO: 100852 - RNA, 24 nt, Human
gaccacaugagaccccugcagcca

SEQ ID NO: 100853 - RNA, 24 nt, Human
gaccacaugagaccccugcagcca

SEQ ID NO: 100854 - RNA, 22 nt, Human
gagaccccugcagccacggaug

SEQ ID NO: 100855 - RNA, 22 nt, Human
gagaccccugcagccacggaug

SEQ ID NO: 100856 - RNA, 19 nt, Human
gaggcuggccagguccugc

SEQ ID NO: 100857 - RNA, 18 nt, Human
gcacgggacagccccggg

SEQ ID NO: 100858 - RNA, 18 nt, Human
gcacgggacagccccggg

SEQ ID NO: 100859 - RNA, 18 nt, Human
gcacgggacagccccggg

SEQ ID NO: 100860 - RNA, 21 nt, Human
gcagcaguggguucagggcag

SEQ ID NO: 100861 - RNA, 21 nt, Human
gcagcaguggguucagggcag

SEQ ID NO: 100862 - RNA, 21 nt, Human
gcagcaguggguucagggcag

SEQ ID NO: 100863 - RNA, 25 nt, Human
gcagcaguggguucagggcagacag

SEQ ID NO: 100864 - RNA, 21 nt, Human
gcccagggcucuccugguagc

SEQ ID NO: 100865 - RNA, 21 nt, Human
gcccagggcucuccugguagc

SEQ ID NO: 100866 - RNA, 21 nt, Human
gcccagggcucuccugguagc

SEQ ID NO: 100867 - RNA, 21 nt, Human
gccugugcgccagcagcucgg

SEQ ID NO: 100868 - RNA, 22 nt, Human
gcuggccccgccucucuugcgc

SEQ ID NO: 100869 - RNA, 20 nt, Human
ggaauacaggcgugugccag

SEQ ID NO: 100870 - RNA, 20 nt, Human
ggaauacaggcgugugccag

SEQ ID NO: 100871 - RNA, 20 nt, Human
ggagaagaggccugugcgcc

SEQ ID NO: 100872 - RNA, 22 nt, Human
ggagcaccugcagcacgaugca

SEQ ID NO: 100873 - RNA, 22 nt, Human
ggagccgccagaccugcccuuc

SEQ ID NO: 100874 - RNA, 20 nt, Human
ggaggccccggagcaccugc

SEQ ID NO: 100875 - RNA, 20 nt, Human
ggaguccugccaggcccacc

SEQ ID NO: 100876 - RNA, 21 nt, Human
ggaguccugccaggcccaccu

SEQ ID NO: 100877 - RNA, 21 nt, Human
ggaguccugccaggcccaccu

SEQ ID NO: 100878 - RNA, 22 nt, Human
ggcagcaguggguucagggcag

SEQ ID NO: 100879 - RNA, 22 nt, Human
ggcagcaguggguucagggcag

SEQ ID NO: 100880 - RNA, 22 nt, Human
ggcagcaguggguucagggcag

SEQ ID NO: 100881 - RNA, 19 nt, Human
ggccccgccucucuugcgc

SEQ ID NO: 100882 - RNA, 21 nt, Human
ggccgaaauccgcugcagcag

SEQ ID NO: 100883 - RNA, 19 nt, Human
ggcuggggcggcccgcuug

SEQ ID NO: 100884 - RNA, 18 nt, Human
ggcugggggcgguggcuc

SEQ ID NO: 100885 - RNA, 18 nt, Human
gggcagacagugggagga

SEQ ID NO: 100886 - RNA, 18 nt, Human
gggcagacagugggagga

SEQ ID NO: 100887 - RNA, 18 nt, Human
gggcagacagugggagga

SEQ ID NO: 100888 - RNA, 19 nt, Human
gggcugggagcccccggug

SEQ ID NO: 100889 - RNA, 18 nt, Human
ggggagaagaggccugug

SEQ ID NO: 100890 - RNA, 25 nt, Human
gggggcagcaguggguucagggcag

SEQ ID NO: 100891 - RNA, 25 nt, Human
gggggcagcaguggguucagggcag

SEQ ID NO: 100892 - RNA, 25 nt, Human
gggggcagcaguggguucagggcag

SEQ ID NO: 100893 - RNA, 27 nt, Human
gguguuggcauauuauccaggaggcug

SEQ ID NO: 100894 - RNA, 21 nt, Human
gucccucuuguccucaucugg

SEQ ID NO: 100895 - RNA, 21 nt, Human
gucccucuuguccucaucugg

SEQ ID NO: 100896 - RNA, 21 nt, Human
gucccucuuguccucaucugg

SEQ ID NO: 100897 - RNA, 21 nt, Human
gucugcguggugguucccaac

SEQ ID NO: 100898 - RNA, 20 nt, Human
guuguuguagggcugcuucc

SEQ ID NO: 100899 - RNA, 19 nt, Human
uacaggcgugugccaggcc

SEQ ID NO: 100900 - RNA, 19 nt, Human
uacaggcgugugccaggcc

SEQ ID NO: 100901 - RNA, 20 nt, Human
uaccuugucccucuuguccu

SEQ ID NO: 100902 - RNA, 20 nt, Human
uaccuugucccucuuguccu

SEQ ID NO: 100903 - RNA, 20 nt, Human
uaccuugucccucuuguccu

SEQ ID NO: 100904 - RNA, 22 nt, Human
uaccuugucccucuuguccuca

SEQ ID NO: 100905 - RNA, 22 nt, Human
uaccuugucccucuuguccuca

SEQ ID NO: 100906 - RNA, 22 nt, Human
uaccuugucccucuuguccuca

SEQ ID NO: 100907 - RNA, 23 nt, Human
ucacaguaacccaucaccaggaa

SEQ ID NO: 100908 - RNA, 22 nt, Human
ucacccggccuuuuucuggggg

SEQ ID NO: 100909 - RNA, 22 nt, Human
ucacccggccuuuuucuggggg

SEQ ID NO: 100910 - RNA, 22 nt, Human
ucacccggccuuuuucuggggg

SEQ ID NO: 100911 - RNA, 22 nt, Human
ucacugggcgugcccagcagcu

SEQ ID NO: 100912 - RNA, 26 nt, Human
ucacugggcgugcccagcagcugcac

SEQ ID NO: 100913 - RNA, 25 nt, Human
ucagagccacggccuccuguugggu

SEQ ID NO: 100914 - RNA, 25 nt, Human
ucagagccacggccuccuguugggu

SEQ ID NO: 100915 - RNA, 25 nt, Human
ucagagccacggccuccuguugggu

SEQ ID NO: 100916 - RNA, 20 nt, Human
uccaccacaacucaaagaca

SEQ ID NO: 100917 - RNA, 20 nt, Human
uccaccacaacucaaagaca

SEQ ID NO: 100918 - RNA, 20 nt, Human
uccaccacaacucaaagaca

SEQ ID NO: 100919 - RNA, 20 nt, Human
uccagcucagccuccagccc

SEQ ID NO: 100920 - RNA, 22 nt, Human
ucccaccccauaccuugucccc

SEQ ID NO: 100921 - RNA, 22 nt, Human
ucccaccccauaccuugucccc

SEQ ID NO: 100922 - RNA, 22 nt, Human
ucccaccccauaccuugucccc

SEQ ID NO: 100923 - RNA, 19 nt, Human
ucccaggccagcgguccac

SEQ ID NO: 100924 - RNA, 19 nt, Human
ucccaggccagcgguccac

SEQ ID NO: 100925 - RNA, 18 nt, Human
ucccaggccagcguccac

SEQ ID NO: 100926 - RNA, 20 nt, Human
ucccaggccagcguccacca

SEQ ID NO: 100927 - RNA, 23 nt, Human
uccuccguguggggagcagggau

SEQ ID NO: 100928 - RNA, 24 nt, Human
uccucugcuugugcucuucucgac

SEQ ID NO: 100929 - RNA, 21 nt, Human
ucggccaguaugcagcccaca

SEQ ID NO: 100930 - RNA, 22 nt, Human
ucuccaggcaguccccggccgu

SEQ ID NO: 100931 - RNA, 21 nt, Human
ucucuugcgcgcaggcgcaga

SEQ ID NO: 100932 - RNA, 22 nt, Human
ucugcucgcacuccagaucugg

SEQ ID NO: 100933 - RNA, 19 nt, Human
ucugggggcagcagugggu

SEQ ID NO: 100934 - RNA, 19 nt, Human
ucugggggcagcagugggu

SEQ ID NO: 100935 - RNA, 19 nt, Human
ucugggggcagcagugggu

SEQ ID NO: 100936 - RNA, 20 nt, Human
ucuuagggucguacaugaac

SEQ ID NO: 100937 - RNA, 20 nt, Human
ugacgcaggcggagcagcag

SEQ ID NO: 100938 - RNA, 21 nt, Human
ugauggggaugccauccuucu

SEQ ID NO: 100939 - RNA, 19 nt, Human
ugcacgggacagccccggg

SEQ ID NO: 100940 - RNA, 19 nt, Human
ugcacgggacagccccggg

SEQ ID NO: 100941 - RNA, 19 nt, Human
ugcacgggacagccccggg

SEQ ID NO: 100942 - RNA, 19 nt, Human
ugcagcagagaggggagug

SEQ ID NO: 100943 - RNA, 18 nt, Human
ugccaggcccaccugggg

SEQ ID NO: 100944 - RNA, 18 nt, Human
ugccaggcccaccugggg

SEQ ID NO: 100945 - RNA, 18 nt, Human
ugccaggcccaccugggg

SEQ ID NO: 100946 - RNA, 21 nt, Human
ugcugguggucugcguggugg

SEQ ID NO: 100947 - RNA, 20 nt, Human
uggaaaagcccggccagaug

SEQ ID NO: 100948 - RNA, 20 nt, Human
uggaggccccggagcaccug

SEQ ID NO: 100949 - RNA, 20 nt, Human
uggcucgcggcacccuucac

SEQ ID NO: 100950 - RNA, 20 nt, Human
uggcucgcggcacccuucac

SEQ ID NO: 100951 - RNA, 18 nt, Human
ugggaauacaggcgugug

SEQ ID NO: 100952 - RNA, 21 nt, Human
ugggaauacaggcgugugcca

SEQ ID NO: 100953 - RNA, 21 nt, Human
ugggaauacaggcgugugcca

SEQ ID NO: 100954 - RNA, 21 nt, Human
ugggacaccauaggcccgggc

SEQ ID NO: 100955 - RNA, 19 nt, Human
ugggagcccccggugucac

SEQ ID NO: 100956 - RNA, 19 nt, Human
ugggagcccccggugucac

SEQ ID NO: 100957 - RNA, 18 nt, Human
ugggaggaagucagugga

SEQ ID NO: 100958 - RNA, 18 nt, Human
ugggaggaagucagugga

SEQ ID NO: 100959 - RNA, 18 nt, Human
ugggaggaagucagugga

SEQ ID NO: 100960 - RNA, 23 nt, Human
ugggggcagcaguggguucaggg

SEQ ID NO: 100961 - RNA, 23 nt, Human
ugggggcagcaguggguucaggg

SEQ ID NO: 100962 - RNA, 23 nt, Human
ugggggcagcaguggguucaggg

SEQ ID NO: 100963 - RNA, 18 nt, Human
ugucacacuuccugaacu

SEQ ID NO: 100964 - RNA, 20 nt, Human
ugugcagauaauggaggccc

SEQ ID NO: 100965 - RNA, 23 nt, Human
uguuggguccuccguguggggag

SEQ ID NO: 100966 - RNA, 23 nt, Human
uguuggguccuccguguggggag

SEQ ID NO: 100967 - RNA, 23 nt, Human
uguuggguccuccguguggggag

SEQ ID NO: 100968 - RNA, 21 nt, Human
uuccccacaaccaccuccuuc

SEQ ID NO: 100969 - RNA, 21 nt, Human
uucuggguguccaaauccuug

SEQ ID NO: 100970 - RNA, 22 nt, Human
uucuuagggucguacaugaaca

SEQ ID NO: 100971 - RNA, 18 nt, Human
uuuuuuuuuuuuuuucug

SEQ ID NO: 100972 - RNA, 18 nt, Human
uuuuuuuuuuuuuuucug

SEQ ID NO: 100973 - RNA, 18 nt, Human
uuuuuuuuuuuuuuucug

SEQ ID NO: 100974 - RNA, 22 nt, Human
uuuuuuuuuuuuuuuuucuguu

SEQ ID NO: 100975 - RNA, 22 nt, Human
uuuuuuuuuuuuuuuuucuguu

SEQ ID NO: 100976 - RNA, 21 nt, Human
aaaaaaaaaaaaaaaagccaa

SEQ ID NO: 100977 - RNA, 20 nt, Human
aaaaaaaaaagccaacucua

SEQ ID NO: 100978 - RNA, 24 nt, Human
aaaaaagccaacucuacuauugga

SEQ ID NO: 100979 - RNA, 18 nt, Human
aaaaccccaaggugcaca

SEQ ID NO: 100980 - RNA, 22 nt, Human
aaacaauguugccgccucccac

SEQ ID NO: 100981 - RNA, 20 nt, Human
aaacagggcccaguaccgug

SEQ ID NO: 100982 - RNA, 24 nt, Human
aacaacuaagaauacuaaaaggaa

SEQ ID NO: 100983 - RNA, 27 nt, Human
aaggccauggugaagcaauagauugga

SEQ ID NO: 100984 - RNA, 18 nt, Human
aagggacaaacaagggga

SEQ ID NO: 100985 - RNA, 21 nt, Human
aauagcaagagcacucaagga

SEQ ID NO: 100986 - RNA, 21 nt, Human
acuggggccaaucauuuuucu

SEQ ID NO: 100987 - RNA, 26 nt, Human
agaaaaauucaaacaucucucaccug

SEQ ID NO: 100988 - RNA, 20 nt, Human
agaaggcggacccuggcucu

SEQ ID NO: 100989 - RNA, 23 nt, Human
agaaggugaguguuuaaggcaag

SEQ ID NO: 100990 - RNA, 24 nt, Human
agccuggucaagcccacacuggag

SEQ ID NO: 100991 - RNA, 25 nt, Human
aggaagagaaaaauucaaacaucuc

SEQ ID NO: 100992 - RNA, 24 nt, Human
aggagagggugagauuagggcugg

SEQ ID NO: 100993 - RNA, 24 nt, Human
agggcccaccugaguccaaauagc

SEQ ID NO: 100994 - RNA, 19 nt, Human
agucuucagucucccagcc

SEQ ID NO: 100995 - RNA, 19 nt, Human
auggaacgcaguauaccuc

SEQ ID NO: 100996 - RNA, 20 nt, Human
caaaagcaccaacuuagccc

SEQ ID NO: 100997 - RNA, 18 nt, Human
caaaaugaugccuaaacc

SEQ ID NO: 100998 - RNA, 20 nt, Human
caaauccacccacuaugacc

SEQ ID NO: 100999 - RNA, 22 nt, Human
caacaaauccacccacuaugac

SEQ ID NO: 101000 - RNA, 27 nt, Human
caacuugaaacaauguugccgccuccc

SEQ ID NO: 101001 - RNA, 21 nt, Human
caagagcacucaaggacaagg

SEQ ID NO: 101002 - RNA, 22 nt, Human
cacagcccugaaaaagugucag

SEQ ID NO: 101003 - RNA, 18 nt, Human
cacccgggcugagucuuc

SEQ ID NO: 101004 - RNA, 20 nt, Human
cagcaggaggcuugggaucc

SEQ ID NO: 101005 - RNA, 21 nt, Human
ccaaauagcccaaggccaagc

SEQ ID NO: 101006 - RNA, 22 nt, Human
ccaacuuagcccccgcuaucau

SEQ ID NO: 101007 - RNA, 21 nt, Human
ccaagccuggucaagcccaca

SEQ ID NO: 101008 - RNA, 20 nt, Human
ccacacuggaggagagggug

SEQ ID NO: 101009 - RNA, 20 nt, Human
ccaccagaggccccgcccug

SEQ ID NO: 101010 - RNA, 22 nt, Human
cccaccgaguucccgaccgcca

SEQ ID NO: 101011 - RNA, 31 nt, Human
cccacuaugaccaaaaaaaaaaaaaaaaaaa

SEQ ID NO: 101012 - RNA, 18 nt, Human
cccaguaccguggccccg

SEQ ID NO: 101013 - RNA, 22 nt, Human
cccccuuucaccccuguauucc

SEQ ID NO: 101014 - RNA, 23 nt, Human
cccgaccgccaccagaggccccg

SEQ ID NO: 101015 - RNA, 21 nt, Human
ccucacucaaucacagcccug

SEQ ID NO: 101016 - RNA, 23 nt, Human
ccucacucaaucacagcccugaa

SEQ ID NO: 101017 - RNA, 24 nt, Human
ccugcagaaggcggacccuggcuc

SEQ ID NO: 101018 - RNA, 20 nt, Human
ccuggcucucgggggccgag

SEQ ID NO: 101019 - RNA, 22 nt, Human
cguguaggaaggcuuuuuuaaa

SEQ ID NO: 101020 - RNA, 21 nt, Human
cuaaacccuaacuucuaacuc

SEQ ID NO: 101021 - RNA, 27 nt, Human
cuaugaccaaaaaaaaaaaaaaaaaag

SEQ ID NO: 101022 - RNA, 23 nt, Human
cucucgcucuugucaauuuggcc

SEQ ID NO: 101023 - RNA, 19 nt, Human
cugccucauaaggccaugg

SEQ ID NO: 101024 - RNA, 21 nt, Human
gcaauagauuggaaugaagca

SEQ ID NO: 101025 - RNA, 20 nt, Human
gcuugggauccuggucaucc

SEQ ID NO: 101026 - RNA, 19 nt, Human
ggccgaggagggggaaaca

SEQ ID NO: 101027 - RNA, 24 nt, Human
gggccgaggagggggaaacagggc

SEQ ID NO: 101028 - RNA, 23 nt, Human
gggugguggaggcuaacuuaagu

SEQ ID NO: 101029 - RNA, 19 nt, Human
gguaggagguggacgucag

SEQ ID NO: 101030 - RNA, 18 nt, Human
uaagagaagggggaaagg

SEQ ID NO: 101031 - RNA, 22 nt, Human
uaaugagcuacaaacuaaauua

SEQ ID NO: 101032 - RNA, 24 nt, Human
uagcacugucauuacaaaaccccu

SEQ ID NO: 101033 - RNA, 24 nt, Human
uagcccaaggccaagccuggucaa

SEQ ID NO: 101034 - RNA, 25 nt, Human
uauaaaacuaggcacauuuuuuuaa

SEQ ID NO: 101035 - RNA, 21 nt, Human
uauuggauauaaccugaaaua

SEQ ID NO: 101036 - RNA, 22 nt, Human
uauuggauauaaccugaaauau

SEQ ID NO: 101037 - RNA, 19 nt, Human
ucaagcccacacuggagga

SEQ ID NO: 101038 - RNA, 19 nt, Human
ucagggccucccagauucc

SEQ ID NO: 101039 - RNA, 23 nt, Human
ucccgaccgccaccagaggcccc

SEQ ID NO: 101040 - RNA, 20 nt, Human
ucgggucagcccggcccugg

SEQ ID NO: 101041 - RNA, 23 nt, Human
ugaacaacuaagaauacuaaaag

SEQ ID NO: 101042 - RNA, 21 nt, Human
ugaagcacaaucccugucuca

SEQ ID NO: 101043 - RNA, 18 nt, Human
ugacagagacaaaucaua

SEQ ID NO: 101044 - RNA, 26 nt, Human
ugacagagacaaaucauaaaaaaaaa

SEQ ID NO: 101045 - RNA, 27 nt, Human
ugacagagacaaaucauaaaaaaaaaa

SEQ ID NO: 101046 - RNA, 18 nt, Human
ugcagaaggcggacccug

SEQ ID NO: 101047 - RNA, 22 nt, Human
ugcccucacucaaucacagccc

SEQ ID NO: 101048 - RNA, 23 nt, Human
uggaaugaagcacaaucccuguc

SEQ ID NO: 101049 - RNA, 20 nt, Human
uggccaacuugaaacaaugu

SEQ ID NO: 101050 - RNA, 19 nt, Human
ugggaacccugcagaaggc

SEQ ID NO: 101051 - RNA, 18 nt, Human
ugggguaggagguggacg

SEQ ID NO: 101052 - RNA, 18 nt, Human
uuaaaauagacuccuccc

SEQ ID NO: 101053 - RNA, 21 nt, Human
uuaaggcaaguucagagggcc

SEQ ID NO: 101054 - RNA, 22 nt, Human
uuauaccaacccucuucagcaa

SEQ ID NO: 101055 - RNA, 23 nt, Human
uucccgaccgccaccagaggccc

SEQ ID NO: 101056 - RNA, 21 nt, Human
uuucacugguuccccccuuuc

SEQ ID NO: 101057 - RNA, 22 nt, Human
uuucacugguuccccccuuuca

SEQ ID NO: 101058 - RNA, 19 nt, Human
uuuuauaccaacccucuuc

SEQ ID NO: 101059 - RNA, 21 nt, Human
aaaaaacaaaaaaaaccuggg

SEQ ID NO: 101060 - RNA, 23 nt, Human
aaaaaacaaaaaaaaccugggca

SEQ ID NO: 101061 - RNA, 21 nt, Human
aaaacaaaaaaaaccugggca

SEQ ID NO: 101062 - RNA, 22 nt, Human
aaaacaaggguuucaucugaac

SEQ ID NO: 101063 - RNA, 20 nt, Human
aaacaguuuuagucauuuuc

SEQ ID NO: 101064 - RNA, 31 nt, Human
aaccaugggaggaaaaacgaaacuguaaccc

SEQ ID NO: 101065 - RNA, 19 nt, Human
aagcagaaccuacauugua

SEQ ID NO: 101066 - RNA, 19 nt, Human
aaugcuuaagcaaaaaaga

SEQ ID NO: 101067 - RNA, 24 nt, Human
aauggugucuuggaggcaaacuac

SEQ ID NO: 101068 - RNA, 22 nt, Human
aauuaacugcaaaaucuuuucu

SEQ ID NO: 101069 - RNA, 19 nt, Human
acaaggguuucaucugaac

SEQ ID NO: 101070 - RNA, 21 nt, Human
agagccaagugaaccauggga

SEQ ID NO: 101071 - RNA, 18 nt, Human
aggccagggcgaaccgga

SEQ ID NO: 101072 - RNA, 22 nt, Human
aucaaguaauaaauacauacaa

SEQ ID NO: 101073 - RNA, 24 nt, Human
augaaaaggaacaaagaacaccau

SEQ ID NO: 101074 - RNA, 24 nt, Human
caaaaaaaaccugggcaguuccua

SEQ ID NO: 101075 - RNA, 19 nt, Human
caaaacaaaaucccuacag

SEQ ID NO: 101076 - RNA, 25 nt, Human
caaagaacaccauggguaacaaagg

SEQ ID NO: 101077 - RNA, 18 nt, Human
caaaguuuggggggcugg

SEQ ID NO: 101078 - RNA, 20 nt, Human
caaauauggccguccgcgcc

SEQ ID NO: 101079 - RNA, 19 nt, Human
caaguaauaaauacauaca

SEQ ID NO: 101080 - RNA, 18 nt, Human
caaugcuuaaaaaacaaa

SEQ ID NO: 101081 - RNA, 23 nt, Human
caauggugucuuggaggcaaacu

SEQ ID NO: 101082 - RNA, 24 nt, Human
caggccccgggugcggcgcagggg

SEQ ID NO: 101083 - RNA, 22 nt, Human
caucaaguaauaaauacauaca

SEQ ID NO: 101084 - RNA, 24 nt, Human
caucuuguaaaaagauggaaaucc

SEQ ID NO: 101085 - RNA, 24 nt, Human
ccauuuugaaaacaaggguuucau

SEQ ID NO: 101086 - RNA, 18 nt, Human
ccccgcgcccggcgcccc

SEQ ID NO: 101087 - RNA, 18 nt, Human
ccccgcgccuccgggugc

SEQ ID NO: 101088 - RNA, 22 nt, Human
ccccgcgccuccgggugcgcuc

SEQ ID NO: 101089 - RNA, 18 nt, Human
ccccgggggugugcuggg

SEQ ID NO: 101090 - RNA, 18 nt, Human
ccccgggggugugcuggg

SEQ ID NO: 101091 - RNA, 25 nt, Human
cccgcgccuccgggugcgcucggcg

SEQ ID NO: 101092 - RNA, 20 nt, Human
ccgcagucucacccaggccc

SEQ ID NO: 101093 - RNA, 18 nt, Human
ccgcgagggcggcggcgg

SEQ ID NO: 101094 - RNA, 23 nt, Human
ccgcgcccguccgagcgcccgcc

SEQ ID NO: 101095 - RNA, 18 nt, Human
ccgcgcccugccgccgcc

SEQ ID NO: 101096 - RNA, 18 nt, Human
ccgcggcggcugcgggag

SEQ ID NO: 101097 - RNA, 19 nt, Human
ccuccgggugcgcucggcg

SEQ ID NO: 101098 - RNA, 19 nt, Human
ccuucaaaaccaacaaggc

SEQ ID NO: 101099 - RNA, 22 nt, Human
cgcaaacuuuccgcggagccgg

SEQ ID NO: 101100 - RNA, 20 nt, Human
cgcccugccgccgccgcagu

SEQ ID NO: 101101 - RNA, 24 nt, Human
cgcccugccgccgccgcagucuca

SEQ ID NO: 101102 - RNA, 22 nt, Human
cgccugaggcccgcgcgcgucc

SEQ ID NO: 101103 - RNA, 26 nt, Human
cgcgagggcggcggcggcggcggcga

SEQ ID NO: 101104 - RNA, 18 nt, Human
cgcggagccggcggggcg

SEQ ID NO: 101105 - RNA, 21 nt, Human
cggcucgggccgcgccggcaa

SEQ ID NO: 101106 - RNA, 18 nt, Human
cgggagggggcggcccgg

SEQ ID NO: 101107 - RNA, 19 nt, Human
cgggagggggcggcccggc

SEQ ID NO: 101108 - RNA, 20 nt, Human
cuguagguucagagccaagu

SEQ ID NO: 101109 - RNA, 19 nt, Human
gaaauccuucaaaaccaac

SEQ ID NO: 101110 - RNA, 20 nt, Human
gagggcggcggcggcggcgg

SEQ ID NO: 101111 - RNA, 27 nt, Human
gcggcggcggcgaggccgggcgguagc

SEQ ID NO: 101112 - RNA, 27 nt, Human
gcggcggcggcggcgaggccgggcggu

SEQ ID NO: 101113 - RNA, 23 nt, Human
gcggcggcggcggcggcgaggcc

SEQ ID NO: 101114 - RNA, 20 nt, Human
ggaaaaacgaaacuguaacc

SEQ ID NO: 101115 - RNA, 22 nt, Human
ggaggcaaacuacaguuugcug

SEQ ID NO: 101116 - RNA, 18 nt, Human
ggccgggagggggcggcc

SEQ ID NO: 101117 - RNA, 23 nt, Human
ggccgggcgguagcgcugcagcc

SEQ ID NO: 101118 - RNA, 18 nt, Human
ggcgcggcggggccaggc

SEQ ID NO: 101119 - RNA, 18 nt, Human
ggcuggggucccggcggc

SEQ ID NO: 101120 - RNA, 19 nt, Human
gggcgcggcggggccaggc

SEQ ID NO: 101121 - RNA, 24 nt, Human
gggcggccggggccgggagggggc

SEQ ID NO: 101122 - RNA, 24 nt, Human
gguaacaaauguauacaaaagaga

SEQ ID NO: 101123 - RNA, 25 nt, Human
uaaaaaacaaaaaaaaccugggcag

SEQ ID NO: 101124 - RNA, 20 nt, Human
uaaagggagacaaugguguc

SEQ ID NO: 101125 - RNA, 23 nt, Human
uaacugcaaaaucuuuucucaau

SEQ ID NO: 101126 - RNA, 21 nt, Human
ucaaaacaaaaucccuacagu

SEQ ID NO: 101127 - RNA, 23 nt, Human
ucaucuuguaaaaagauggaaau

SEQ ID NO: 101128 - RNA, 18 nt, Human
uccccuugaugguggggg

SEQ ID NO: 101129 - RNA, 21 nt, Human
ucccggcggcgccugaggccc

SEQ ID NO: 101130 - RNA, 18 nt, Human
uccgaagagcacuuucuu

SEQ ID NO: 101131 - RNA, 19 nt, Human
ucugaacaggggagaugaa

SEQ ID NO: 101132 - RNA, 22 nt, Human
ugcaaauccuaauuaacugcaa

SEQ ID NO: 101133 - RNA, 24 nt, Human
ugccaaaguuuggggggcuggggu

SEQ ID NO: 101134 - RNA, 18 nt, Human
uggcaaaugggaaccggc

SEQ ID NO: 101135 - RNA, 19 nt, Human
uggggggcuggggucccgg

SEQ ID NO: 101136 - RNA, 18 nt, Human
uggggucccggcggcgcc

SEQ ID NO: 101137 - RNA, 24 nt, Human
uggguaacaaauguauacaaaaga

SEQ ID NO: 101138 - RNA, 22 nt, Human
ugguggguugcucuuucuucug

SEQ ID NO: 101139 - RNA, 24 nt, Human
uguauacaaaagagaagauuaaag

SEQ ID NO: 101140 - RNA, 18 nt, Human
agcuggggcagcagcugc

SEQ ID NO: 101141 - RNA, 21 nt, Human
cagcgcucccgguugcuccuc

SEQ ID NO: 101142 - RNA, 22 nt, Human
ccagcccagcgcucccgguugc

SEQ ID NO: 101143 - RNA, 23 nt, Human
cccagcgcucccgguugcuccuc

SEQ ID NO: 101144 - RNA, 19 nt, Human
ccccagaugcauccucucu

SEQ ID NO: 101145 - RNA, 22 nt, Human
cccgguugcuccuccagcuucc

SEQ ID NO: 101146 - RNA, 18 nt, Human
ccgguugcuccuccagcu

SEQ ID NO: 101147 - RNA, 22 nt, Human
ccuuagugcuuugcucucccca

SEQ ID NO: 101148 - RNA, 18 nt, Human
cgagaaaggaucugagug

SEQ ID NO: 101149 - RNA, 18 nt, Human
cuaacccagacucagccc

SEQ ID NO: 101150 - RNA, 19 nt, Human
cugaugcugaauuccuuag

SEQ ID NO: 101151 - RNA, 18 nt, Human
cuuagugcuuugcucucc

SEQ ID NO: 101152 - RNA, 19 nt, Human
gacucagcccucugcaggc

SEQ ID NO: 101153 - RNA, 21 nt, Human
gcacugggcaauuugcacccc

SEQ ID NO: 101154 - RNA, 18 nt, Human
uaggaggcagcuggggca

SEQ ID NO: 101155 - RNA, 18 nt, Human
ucugcaggcugaugcuga

SEQ ID NO: 101156 - RNA, 19 nt, Human
ugccugggaaacagaaggc

SEQ ID NO: 101157 - RNA, 22 nt, Human
ugcuuugcucuccccagaugca

SEQ ID NO: 101158 - RNA, 21 nt, Human
uggcaauggguaggaggcagc

SEQ ID NO: 101159 - RNA, 23 nt, Human
ugggcaauuugcaccccagccca

SEQ ID NO: 101160 - RNA, 21 nt, Human
aaaaaggaccccaaauauaaa

SEQ ID NO: 101161 - RNA, 21 nt, Human
aaaaaggaccccaaauauaaa

SEQ ID NO: 101162 - RNA, 21 nt, Human
aaggaccccaaauauaaaggu

SEQ ID NO: 101163 - RNA, 21 nt, Human
aaggaccccaaauauaaaggu

SEQ ID NO: 101164 - RNA, 23 nt, Human
aaggaccccaaauauaaagguag

SEQ ID NO: 101165 - RNA, 23 nt, Human
aaggaccccaaauauaaagguag

SEQ ID NO: 101166 - RNA, 18 nt, Human
aaggcaaagauugcccuc

SEQ ID NO: 101167 - RNA, 18 nt, Human
aaggcaaagauugcccuc

SEQ ID NO: 101168 - RNA, 21 nt, Human
aagggaaauggcagcuuuucu

SEQ ID NO: 101169 - RNA, 21 nt, Human
aagggaaauggcagcuuuucu

SEQ ID NO: 101170 - RNA, 22 nt, Human
aauauaaagguagggaaaggga

SEQ ID NO: 101171 - RNA, 22 nt, Human
aauauaaagguagggaaaggga

SEQ ID NO: 101172 - RNA, 20 nt, Human
accccaaauauaaagguagg

SEQ ID NO: 101173 - RNA, 20 nt, Human
accccaaauauaaagguagg

SEQ ID NO: 101174 - RNA, 19 nt, Human
agaaaugggaaggagaagg

SEQ ID NO: 101175 - RNA, 19 nt, Human
agaaaugggaaggagaagg

SEQ ID NO: 101176 - RNA, 20 nt, Human
agagaggcccccucaccccc

SEQ ID NO: 101177 - RNA, 22 nt, Human
agaggcccccucacccccaccc

SEQ ID NO: 101178 - RNA, 21 nt, Human
agagugcugcagagcucgaaa

SEQ ID NO: 101179 - RNA, 19 nt, Human
agcuggacgcagagggccc

SEQ ID NO: 101180 - RNA, 20 nt, Human
aggagaaggagaagccucaa

SEQ ID NO: 101181 - RNA, 22 nt, Human
aggagaaggagaagccucaaaa

SEQ ID NO: 101182 - RNA, 28 nt, Human
aggcagagauucgcuuguguggguuaga

SEQ ID NO: 101183 - RNA, 22 nt, Human
aggcagcaaaguaaucucugua

SEQ ID NO: 101184 - RNA, 22 nt, Human
aggcagcaaaguaaucucugua

SEQ ID NO: 101185 - RNA, 18 nt, Human
aggcccccucacccccac

SEQ ID NO: 101186 - RNA, 24 nt, Human
aggcgcgcggaaacugggagggcu

SEQ ID NO: 101187 - RNA, 21 nt, Human
aguguagagaaaugggaagga

SEQ ID NO: 101188 - RNA, 21 nt, Human
aguguagagaaaugggaagga

SEQ ID NO: 101189 - RNA, 18 nt, Human
caccaugugaccagcugc

SEQ ID NO: 101190 - RNA, 19 nt, Human
caccaugugaccagcugcc

SEQ ID NO: 101191 - RNA, 20 nt, Human
cacugggcggggcccucugg

SEQ ID NO: 101192 - RNA, 22 nt, Human
cagagggcccgaccauagacac

SEQ ID NO: 101193 - RNA, 21 nt, Human
cagcagcagcugugcucccga

SEQ ID NO: 101194 - RNA, 21 nt, Human
cccacccucaccaugugacca

SEQ ID NO: 101195 - RNA, 25 nt, Human
ccccauacacccgagcucgguccgg

SEQ ID NO: 101196 - RNA, 22 nt, Human
ccggagcagcuggacgcagagg

SEQ ID NO: 101197 - RNA, 19 nt, Human
ccucaaaaggagagguggg

SEQ ID NO: 101198 - RNA, 19 nt, Human
ccucaaaaggagagguggg

SEQ ID NO: 101199 - RNA, 19 nt, Human
ccucagagauaaaggcaaa

SEQ ID NO: 101200 - RNA, 19 nt, Human
ccucagagauaaaggcaaa

SEQ ID NO: 101201 - RNA, 22 nt, Human
ccuccauagccucagagauaaa

SEQ ID NO: 101202 - RNA, 22 nt, Human
ccuccauagccucagagauaaa

SEQ ID NO: 101203 - RNA, 18 nt, Human
ccucuggaggcagcccaa

SEQ ID NO: 101204 - RNA, 19 nt, Human
ccucuggggggaaaggcuc

SEQ ID NO: 101205 - RNA, 23 nt, Human
cugugcucccgacuccuccaucu

SEQ ID NO: 101206 - RNA, 19 nt, Human
gagaaggagaagccucaaa

SEQ ID NO: 101207 - RNA, 21 nt, Human
gagaaggagaagccucaaaag

SEQ ID NO: 101208 - RNA, 19 nt, Human
gagcagcuggacgcagagg

SEQ ID NO: 101209 - RNA, 21 nt, Human
gagcagcuggacgcagagggc

SEQ ID NO: 101210 - RNA, 20 nt, Human
gaggugggaggggaauguca

SEQ ID NO: 101211 - RNA, 20 nt, Human
gaggugggaggggaauguca

SEQ ID NO: 101212 - RNA, 22 nt, Human
gcccccucacccccacccucac

SEQ ID NO: 101213 - RNA, 19 nt, Human
gcuggacgcagagggcccg

SEQ ID NO: 101214 - RNA, 19 nt, Human
ggaaggagaaggagaagcc

SEQ ID NO: 101215 - RNA, 22 nt, Human
ggacaagagggaacauaccccu

SEQ ID NO: 101216 - RNA, 22 nt, Human
ggacaagagggaacauaccccu

SEQ ID NO: 101217 - RNA, 18 nt, Human
ggcaaagauugcccucuc

SEQ ID NO: 101218 - RNA, 18 nt, Human
ggcaaagauugcccucuc

SEQ ID NO: 101219 - RNA, 23 nt, Human
gggacaagagggaacauaccccu

SEQ ID NO: 101220 - RNA, 23 nt, Human
gggacaagagggaacauaccccu

SEQ ID NO: 101221 - RNA, 21 nt, Human
gggagacccucacgccagccc

SEQ ID NO: 101222 - RNA, 21 nt, Human
gggugcugugggggcggcccg

SEQ ID NO: 101223 - RNA, 19 nt, Human
uaaaaaaaaaaaaaagacc

SEQ ID NO: 101224 - RNA, 20 nt, Human
uaaaaaaaaaaaaaagacca

SEQ ID NO: 101225 - RNA, 27 nt, Human
uaaaaaaggaccccaaauauaaaggua

SEQ ID NO: 101226 - RNA, 27 nt, Human
uaaaaaaggaccccaaauauaaaggua

SEQ ID NO: 101227 - RNA, 19 nt, Human
uagagaaaugggaaggaga

SEQ ID NO: 101228 - RNA, 19 nt, Human
uagagaaaugggaaggaga

SEQ ID NO: 101229 - RNA, 19 nt, Human
uauaaagguagggaaaggg

SEQ ID NO: 101230 - RNA, 19 nt, Human
uauaaagguagggaaaggg

SEQ ID NO: 101231 - RNA, 24 nt, Human
ucaaaaggagaggugggaggggaa

SEQ ID NO: 101232 - RNA, 24 nt, Human
ucaaaaggagaggugggaggggaa

SEQ ID NO: 101233 - RNA, 21 nt, Human
ucagguaccaccgacugcacu

SEQ ID NO: 101234 - RNA, 19 nt, Human
uccagaagggaaauggcag

SEQ ID NO: 101235 - RNA, 19 nt, Human
uccagaagggaaauggcag

SEQ ID NO: 101236 - RNA, 24 nt, Human
uccauggcagccacuccauugcuc

SEQ ID NO: 101237 - RNA, 25 nt, Human
uccuacggccccauacacccgagcu

SEQ ID NO: 101238 - RNA, 20 nt, Human
uccuguauaaaaaaggaccc

SEQ ID NO: 101239 - RNA, 18 nt, Human
uggaggaggacccuccau

SEQ ID NO: 101240 - RNA, 18 nt, Human
uggaggaggacccuccau

SEQ ID NO: 101241 - RNA, 21 nt, Human
ugggaaggagaaggagaagcc

SEQ ID NO: 101242 - RNA, 20 nt, Human
uggggggaaaggcuccacgg

SEQ ID NO: 101243 - RNA, 21 nt, Human
uguccagaagggaaauggcag

SEQ ID NO: 101244 - RNA, 21 nt, Human
uguccagaagggaaauggcag

SEQ ID NO: 101245 - RNA, 24 nt, Human
uuccauggcagccacuccauugcu

SEQ ID NO: 101246 - RNA, 21 nt, Human
uuccuguauaaaaaaggaccc

SEQ ID NO: 101247 - RNA, 23 nt, Human
uuuaaaaaaaaaaaaaagaccau

SEQ ID NO: 101248 - RNA, 23 nt, Human
uuuaaaaaaaaaaaaaagaccau

SEQ ID NO: 101249 - RNA, 23 nt, Human
caggcacccccacugucucaccc

SEQ ID NO: 101250 - RNA, 22 nt, Human
ccaggcacccccacugucucac

SEQ ID NO: 101251 - RNA, 21 nt, Human
ccccacugucucaccccucuc

SEQ ID NO: 101252 - RNA, 20 nt, Human
uggaggccgggggucccggg

SEQ ID NO: 101253 - RNA, 21 nt, Human
aaauccaaacaccgcggccuc

SEQ ID NO: 101254 - RNA, 18 nt, Human
acaggagggaagauggug

SEQ ID NO: 101255 - RNA, 21 nt, Human
acaugacaggagcaacaagaa

SEQ ID NO: 101256 - RNA, 23 nt, Human
acuccacgcccagcaaauccaaa

SEQ ID NO: 101257 - RNA, 22 nt, Human
agacacacaaacccaaggaacg

SEQ ID NO: 101258 - RNA, 29 nt, Human
agacaggaggaaaaaugaagagggacccc

SEQ ID NO: 101259 - RNA, 18 nt, Human
agacaggagggaagaugg

SEQ ID NO: 101260 - RNA, 19 nt, Human
agaugcagacacacaaacc

SEQ ID NO: 101261 - RNA, 19 nt, Human
aggaacaggagagagaggg

SEQ ID NO: 101262 - RNA, 18 nt, Human
aggaagaaggcagacagg

SEQ ID NO: 101263 - RNA, 22 nt, Human
aggaggaaaaaugaagacacaa

SEQ ID NO: 101264 - RNA, 23 nt, Human
aggagggaagauggugacacaug

SEQ ID NO: 101265 - RNA, 26 nt, Human
aggcaaggaaauggauaaaagggacc

SEQ ID NO: 101266 - RNA, 23 nt, Human
aggcagacaggagggaagauggu

SEQ ID NO: 101267 - RNA, 20 nt, Human
agggagagggaggaagaaag

SEQ ID NO: 101268 - RNA, 20 nt, Human
agggcagauggggacacagg

SEQ ID NO: 101269 - RNA, 19 nt, Human
aggggcuggggcgggggau

SEQ ID NO: 101270 - RNA, 22 nt, Human
aggggcuggggcgggggauggg

SEQ ID NO: 101271 - RNA, 22 nt, Human
agucaggaauaaaaaaaugcaa

SEQ ID NO: 101272 - RNA, 19 nt, Human
caagaagggcagaugggga

SEQ ID NO: 101273 - RNA, 21 nt, Human
caagaagggcagauggggaca

SEQ ID NO: 101274 - RNA, 23 nt, Human
cacaaacccaaggaacggaaaau

SEQ ID NO: 101275 - RNA, 22 nt, Human
cagacacacaaacccaaggaac

SEQ ID NO: 101276 - RNA, 18 nt, Human
cagacgggaagagugagg

SEQ ID NO: 101277 - RNA, 22 nt, Human
cagccggggcgcugagcggcgg

SEQ ID NO: 101278 - RNA, 24 nt, Human
ccacgcccagcaaauccaaacacc

SEQ ID NO: 101279 - RNA, 18 nt, Human
cccaaggaacggaaaaug

SEQ ID NO: 101280 - RNA, 24 nt, Human
ccccacuccacgcccagcaaaucc

SEQ ID NO: 101281 - RNA, 18 nt, Human
cccgggcgcgcggacugg

SEQ ID NO: 101282 - RNA, 21 nt, Human
ccgcccagccggggcgcugag

SEQ ID NO: 101283 - RNA, 26 nt, Human
ccuagccccggcccgggcgcgcggac

SEQ ID NO: 101284 - RNA, 18 nt, Human
cggcgccgcugcuacugc

SEQ ID NO: 101285 - RNA, 22 nt, Human
cgggaagagugagguuggagug

SEQ ID NO: 101286 - RNA, 21 nt, Human
cuagccccggcccgggcgcgc

SEQ ID NO: 101287 - RNA, 25 nt, Human
gaaaauggaaaggcagggagaggga

SEQ ID NO: 101288 - RNA, 19 nt, Human
gagaugcagacacacaaac

SEQ ID NO: 101289 - RNA, 24 nt, Human
gagcggcgguaacagcggcggugu

SEQ ID NO: 101290 - RNA, 26 nt, Human
gaggaagaaagagaggaacaggagag

SEQ ID NO: 101291 - RNA, 20 nt, Human
gagugagguuggagugccuu

SEQ ID NO: 101292 - RNA, 24 nt, Human
gagugugugucaggggcuggggcg

SEQ ID NO: 101293 - RNA, 19 nt, Human
gaucaggggagaggggugu

SEQ ID NO: 101294 - RNA, 18 nt, Human
gcaaauccaaacaccgcg

SEQ ID NO: 101295 - RNA, 20 nt, Human
gcaaggaaauggauaaaacc

SEQ ID NO: 101296 - RNA, 25 nt, Human
gcaaggaaauggauaaaaccgaggg

SEQ ID NO: 101297 - RNA, 20 nt, Human
gcagacagacgggaagagug

SEQ ID NO: 101298 - RNA, 19 nt, Human
gcagacaggaggaaaaaug

SEQ ID NO: 101299 - RNA, 22 nt, Human
gcagauggggacacaggugcag

SEQ ID NO: 101300 - RNA, 20 nt, Human
gcagccccgggggacccggc

SEQ ID NO: 101301 - RNA, 20 nt, Human
gccggggcgcugagcggcgg

SEQ ID NO: 101302 - RNA, 24 nt, Human
gcggcgguggcuuuguggucccgg

SEQ ID NO: 101303 - RNA, 19 nt, Human
gcgggggaugggcgcggcc

SEQ ID NO: 101304 - RNA, 20 nt, Human
gcgguggcuuuguggucccg

SEQ ID NO: 101305 - RNA, 19 nt, Human
ggagagagagagagaggaa

SEQ ID NO: 101306 - RNA, 21 nt, Human
ggagagggaggaagaaagaga

SEQ ID NO: 101307 - RNA, 22 nt, Human
ggaggaagaaggcagacaggag

SEQ ID NO: 101308 - RNA, 25 nt, Human
ggaggagaaacaggggucuacgggg

SEQ ID NO: 101309 - RNA, 23 nt, Human
ggcccgggcgcgcggacuggcgg

SEQ ID NO: 101310 - RNA, 23 nt, Human
ggcgguggcuuuguggucccggg

SEQ ID NO: 101311 - RNA, 23 nt, Human
ggcugaagggaagggggagaccc

SEQ ID NO: 101312 - RNA, 18 nt, Human
ggcuggggcgggggaugg

SEQ ID NO: 101313 - RNA, 18 nt, Human
gggaaugggcugaaggga

SEQ ID NO: 101314 - RNA, 21 nt, Human
gggacccggcgguggggggcc

SEQ ID NO: 101315 - RNA, 19 nt, Human
gggcagauggggacacagg

SEQ ID NO: 101316 - RNA, 19 nt, Human
gggccggcgcccaggcccc

SEQ ID NO: 101317 - RNA, 20 nt, Human
ggggaaugggcugaagggaa

SEQ ID NO: 101318 - RNA, 18 nt, Human
ggggacccggcggugggg

SEQ ID NO: 101319 - RNA, 18 nt, Human
ggggagagggguguggug

SEQ ID NO: 101320 - RNA, 21 nt, Human
ggggggccuagccccggcccg

SEQ ID NO: 101321 - RNA, 21 nt, Human
ggggggccuagccccggcccg

SEQ ID NO: 101322 - RNA, 20 nt, Human
ggucuacgggguacagucag

SEQ ID NO: 101323 - RNA, 21 nt, Human
gugagguuggagugccuuucc

SEQ ID NO: 101324 - RNA, 20 nt, Human
uccaaacaccgcggccucug

SEQ ID NO: 101325 - RNA, 23 nt, Human
uccacgcccagcaaauccaaaca

SEQ ID NO: 101326 - RNA, 20 nt, Human
uccccugaggggcaugggcg

SEQ ID NO: 101327 - RNA, 21 nt, Human
uccuggcaccucagucgaucc

SEQ ID NO: 101328 - RNA, 26 nt, Human
ucuacgggguacagucaggcaagggg

SEQ ID NO: 101329 - RNA, 19 nt, Human
ugacaggagcaacaagaag

SEQ ID NO: 101330 - RNA, 21 nt, Human
ugaucaggggagaggggugug

SEQ ID NO: 101331 - RNA, 22 nt, Human
ugcagacacacaaacccaagga

SEQ ID NO: 101332 - RNA, 19 nt, Human
ugcuacugcagccccgggg

SEQ ID NO: 101333 - RNA, 22 nt, Human
uggggcugcaguuucuccuggc

SEQ ID NO: 101334 - RNA, 18 nt, Human
uuuuuuuuuuuuuuuuug

SEQ ID NO: 101335 - RNA, 20 nt, Human
uuuuuuuuuuuuuuuuugcu

SEQ ID NO: 101336 - RNA, 23 nt, Human
uuuuuuuuuuuuuuuuugcuggg

SEQ ID NO: 101337 - RNA, 20 nt, Human
aggccuccagauagcaaucc

SEQ ID NO: 101338 - RNA, 21 nt, Human
aggccuccagauagcaauccu

SEQ ID NO: 101339 - RNA, 21 nt, Human
cagcagcuggaaggccuccag

SEQ ID NO: 101340 - RNA, 27 nt, Human
ccuccagauagcaauccuccacagcuc

SEQ ID NO: 101341 - RNA, 23 nt, Human
cgccuggacgccgcccgccgcgg

SEQ ID NO: 101342 - RNA, 24 nt, Human
cuccacagcucuguagggcuugcu

SEQ ID NO: 101343 - RNA, 21 nt, Human
cuccagauagcaauccuccac

SEQ ID NO: 101344 - RNA, 22 nt, Human
gccgccgcucgccuacuccggg

SEQ ID NO: 101345 - RNA, 21 nt, Human
gccuccagauagcaauccucc

SEQ ID NO: 101346 - RNA, 21 nt, Human
gcggcgccgcuggggcgggcg

SEQ ID NO: 101347 - RNA, 23 nt, Human
ggaaggccuccagauagcaaucc

SEQ ID NO: 101348 - RNA, 20 nt, Human
ggcgggcggggggugcgcuc

SEQ ID NO: 101349 - RNA, 19 nt, Human
uacuccggggcuccccgga

SEQ ID NO: 101350 - RNA, 20 nt, Human
acauuuaauaaaaauaaccc

SEQ ID NO: 101351 - RNA, 26 nt, Human
aguauugaacuuuucucacuuuggga

SEQ ID NO: 101352 - RNA, 20 nt, Human
auuauuugccuuuuuggcua

SEQ ID NO: 101353 - RNA, 21 nt, Human
ccggcgccguaaagcccgacu

SEQ ID NO: 101354 - RNA, 19 nt, Human
cuuaaagccuccaacaccc

SEQ ID NO: 101355 - RNA, 20 nt, Human
gacaacacgaauuuaaagcu

SEQ ID NO: 101356 - RNA, 23 nt, Human
uaaagcccgacuccagccgaaaa

SEQ ID NO: 101357 - RNA, 22 nt, Human
uaauuuuuauuaaguuuucccu

SEQ ID NO: 101358 - RNA, 20 nt, Human
uaccuuaaagccuccaacac

SEQ ID NO: 101359 - RNA, 23 nt, Human
uaccuuaaagccuccaacaccca

SEQ ID NO: 101360 - RNA, 25 nt, Human
ucccaggacaacacgaauuuaaagc

SEQ ID NO: 101361 - RNA, 21 nt, Human
ucuaaucagaaaaaccagaau

SEQ ID NO: 101362 - RNA, 18 nt, Human
uuaaagccuccaacaccc

SEQ ID NO: 101363 - RNA, 19 nt, Human
uuggcuauuucccucagua

SEQ ID NO: 101364 - RNA, 24 nt, Human
uuuacauguguagaauauuuacaa

SEQ ID NO: 101365 - RNA, 24 nt, Human
aaaauagguacaacuuggaagcca

SEQ ID NO: 101366 - RNA, 21 nt, Human
aacacaaacugugcuagcacu

SEQ ID NO: 101367 - RNA, 18 nt, Human
aacugugcuagcacuuuc

SEQ ID NO: 101368 - RNA, 20 nt, Human
aacugugcuagcacuuucuu

SEQ ID NO: 101369 - RNA, 18 nt, Human
acagucagcccugcagca

SEQ ID NO: 101370 - RNA, 18 nt, Human
agcaaauccacaacacaa

SEQ ID NO: 101371 - RNA, 25 nt, Human
caacagugcauggacaagauuccga

SEQ ID NO: 101372 - RNA, 22 nt, Human
cacaacacaaacugugcuagca

SEQ ID NO: 101373 - RNA, 18 nt, Human
cagacugucacugaaaaa

SEQ ID NO: 101374 - RNA, 18 nt, Human
cagugcauggacaagauu

SEQ ID NO: 101375 - RNA, 22 nt, Human
cauacaaagacaaaugcuugcc

SEQ ID NO: 101376 - RNA, 18 nt, Human
ccucugaggccggagccc

SEQ ID NO: 101377 - RNA, 19 nt, Human
ccugcagcauucgcaacag

SEQ ID NO: 101378 - RNA, 22 nt, Human
uaacuccaaaauagguacaacu

SEQ ID NO: 101379 - RNA, 18 nt, Human
uagcacauucacagcuuc

SEQ ID NO: 101380 - RNA, 24 nt, Human
uauggaaguagcaaauccacaaca

SEQ ID NO: 101381 - RNA, 22 nt, Human
ucacagcuucaacugcuacaga

SEQ ID NO: 101382 - RNA, 21 nt, Human
ugaaaagugguggaacuuggc

SEQ ID NO: 101383 - RNA, 21 nt, Human
ugaaccaugucaaguaaacua

SEQ ID NO: 101384 - RNA, 23 nt, Human
ugccccuagcacauucacagcuu

SEQ ID NO: 101385 - RNA, 21 nt, Human
ugugaaaagugguggaacuug

SEQ ID NO: 101386 - RNA, 19 nt, Human
aaaaaaaaaaauucaacuu

SEQ ID NO: 101387 - RNA, 21 nt, Human
aaacaauggaaccaaaagaaa

SEQ ID NO: 101388 - RNA, 19 nt, Human
aacacaguaaaauucuccu

SEQ ID NO: 101389 - RNA, 19 nt, Human
aagaaaaaaaacacaagag

SEQ ID NO: 101390 - RNA, 25 nt, Human
aagaaaaaaaacacaagagcccuag

SEQ ID NO: 101391 - RNA, 19 nt, Human
aagacagcuccagugcccu

SEQ ID NO: 101392 - RNA, 22 nt, Human
aaugucuccaaacaauggaacc

SEQ ID NO: 101393 - RNA, 21 nt, Human
acauagcagaagaaaaaaaac

SEQ ID NO: 101394 - RNA, 18 nt, Human
accagcaaggacaagaca

SEQ ID NO: 101395 - RNA, 19 nt, Human
agaaaaaaaacacaagagc

SEQ ID NO: 101396 - RNA, 20 nt, Human
agaaaaaaaacacaagagcc

SEQ ID NO: 101397 - RNA, 23 nt, Human
agaaaaaaaacacaagagcccua

SEQ ID NO: 101398 - RNA, 25 nt, Human
agaaaaccagcaaggacaagacagc

SEQ ID NO: 101399 - RNA, 21 nt, Human
agaagaaaaaaaacacaagag

SEQ ID NO: 101400 - RNA, 24 nt, Human
agcagaagaaaaaaaacacaagag

SEQ ID NO: 101401 - RNA, 21 nt, Human
augcuccacuccaguccacuc

SEQ ID NO: 101402 - RNA, 21 nt, Human
caagacagcuccagugcccuc

SEQ ID NO: 101403 - RNA, 26 nt, Human
caagucacauagcagaagaaaaaaaa

SEQ ID NO: 101404 - RNA, 24 nt, Human
cacaagagcccuaguggcaagcgc

SEQ ID NO: 101405 - RNA, 24 nt, Human
cacauagcagaagaaaaaaaacac

SEQ ID NO: 101406 - RNA, 22 nt, Human
cacuccaguccacucagcgggc

SEQ ID NO: 101407 - RNA, 18 nt, Human
cagaagaaaaaaaacaca

SEQ ID NO: 101408 - RNA, 24 nt, Human
cagaagaaaaaaaacacaagagcc

SEQ ID NO: 101409 - RNA, 22 nt, Human
cagcgggcugcucccagagccc

SEQ ID NO: 101410 - RNA, 24 nt, Human
cagucgcugcugccgccgcuccug

SEQ ID NO: 101411 - RNA, 20 nt, Human
cagugcccuccuggucucuc

SEQ ID NO: 101412 - RNA, 19 nt, Human
ccaaacaauggaaccaaaa

SEQ ID NO: 101413 - RNA, 22 nt, Human
ccaaacaauggaaccaaaagaa

SEQ ID NO: 101414 - RNA, 20 nt, Human
ccaaugcuccacuccagucc

SEQ ID NO: 101415 - RNA, 20 nt, Human
ccagaaaaccagcaaggaca

SEQ ID NO: 101416 - RNA, 22 nt, Human
ccauggaaacccucugggaacc

SEQ ID NO: 101417 - RNA, 21 nt, Human
ccccauggaaacccucuggga

SEQ ID NO: 101418 - RNA, 20 nt, Human
cccccagucgcugcugccgc

SEQ ID NO: 101419 - RNA, 28 nt, Human
ccgccgcccccagucgcugcugccgccg

SEQ ID NO: 101420 - RNA, 20 nt, Human
ccgccgccgcccccagucgc

SEQ ID NO: 101421 - RNA, 28 nt, Human
ccgccgccgcccccagucgcugcugccg

SEQ ID NO: 101422 - RNA, 19 nt, Human
ccgcuccugcuccgggucc

SEQ ID NO: 101423 - RNA, 19 nt, Human
ccuguccccucuuccacca

SEQ ID NO: 101424 - RNA, 22 nt, Human
cgccgccgccgcccccagucgc

SEQ ID NO: 101425 - RNA, 21 nt, Human
cucaaaugcccugucuccacc

SEQ ID NO: 101426 - RNA, 21 nt, Human
cuccacuccaguccacucagc

SEQ ID NO: 101427 - RNA, 21 nt, Human
cugcugccgccgcuccugcuc

SEQ ID NO: 101428 - RNA, 24 nt, Human
gaaaaccagcaaggacaagacagc

SEQ ID NO: 101429 - RNA, 19 nt, Human
gacagcuccagugcccucc

SEQ ID NO: 101430 - RNA, 21 nt, Human
gcagaagaaaaaaaacacaag

SEQ ID NO: 101431 - RNA, 18 nt, Human
gcgccgccgccgccccca

SEQ ID NO: 101432 - RNA, 24 nt, Human
gcuccacuccaguccacucagcgg

SEQ ID NO: 101433 - RNA, 19 nt, Human
ggcugcucccagagcccag

SEQ ID NO: 101434 - RNA, 18 nt, Human
uccaacgcgccgccgccg

SEQ ID NO: 101435 - RNA, 22 nt, Human
uccaacgcgccgccgccgcccc

SEQ ID NO: 101436 - RNA, 18 nt, Human
ucgcugcugccgccgcuc

SEQ ID NO: 101437 - RNA, 19 nt, Human
ucgcugcugccgccgcucc

SEQ ID NO: 101438 - RNA, 22 nt, Human
ucgcugcugccgccgcuccugc

SEQ ID NO: 101439 - RNA, 25 nt, Human
ucucucagccaaugcuccacuccag

SEQ ID NO: 101440 - RNA, 22 nt, Human
ugaagaaaccaagaguuugugc

SEQ ID NO: 101441 - RNA, 23 nt, Human
ugccagccccaguguuucugagg

SEQ ID NO: 101442 - RNA, 22 nt, Human
ugcccaggaaugucuccaaaca

SEQ ID NO: 101443 - RNA, 18 nt, Human
uggaaccaaaagaaacac

SEQ ID NO: 101444 - RNA, 19 nt, Human
uggaaccaaaagaaacaca

SEQ ID NO: 101445 - RNA, 22 nt, Human
ugggaaccauccagaaaaccag

SEQ ID NO: 101446 - RNA, 22 nt, Human
uggugggcgagcccauccuccu

SEQ ID NO: 101447 - RNA, 24 nt, Human
aaaacacaaauaauaauuaagaca

SEQ ID NO: 101448 - RNA, 22 nt, Human
aaaaggagaacacgggaugagg

SEQ ID NO: 101449 - RNA, 25 nt, Human
aaacgggaaccaggacacaugggga

SEQ ID NO: 101450 - RNA, 19 nt, Human
aacguuagugccaggaaag

SEQ ID NO: 101451 - RNA, 18 nt, Human
aaggaacugacuucggca

SEQ ID NO: 101452 - RNA, 20 nt, Human
aaggacaagggggagggaca

SEQ ID NO: 101453 - RNA, 21 nt, Human
aaguagcuggcaugaagccgg

SEQ ID NO: 101454 - RNA, 22 nt, Human
acacaaacugagacuaaggcag

SEQ ID NO: 101455 - RNA, 25 nt, Human
accccaccuucccccugccuucaca

SEQ ID NO: 101456 - RNA, 20 nt, Human
acccgcgaacacgcauccuc

SEQ ID NO: 101457 - RNA, 23 nt, Human
acccucacccccacagcuagagg

SEQ ID NO: 101458 - RNA, 24 nt, Human
acucccagccccauaugagcccac

SEQ ID NO: 101459 - RNA, 21 nt, Human
agagaaaacaguccaggccag

SEQ ID NO: 101460 - RNA, 20 nt, Human
agcacacacccgcgaacacg

SEQ ID NO: 101461 - RNA, 19 nt, Human
agcuagaggagggggcggu

SEQ ID NO: 101462 - RNA, 22 nt, Human
aggaaccucucauucaaccgcc

SEQ ID NO: 101463 - RNA, 20 nt, Human
aggagggggcggucgcugcu

SEQ ID NO: 101464 - RNA, 18 nt, Human
aggcagaagauguagagc

SEQ ID NO: 101465 - RNA, 18 nt, Human
aggcuggggggcaggggg

SEQ ID NO: 101466 - RNA, 22 nt, Human
agggggccugugccaccacaug

SEQ ID NO: 101467 - RNA, 21 nt, Human
aggguguggucccugcccucg

SEQ ID NO: 101468 - RNA, 23 nt, Human
agguagaacuagggugcccuucu

SEQ ID NO: 101469 - RNA, 24 nt, Human
auaccccuaacacagagauaaccc

SEQ ID NO: 101470 - RNA, 18 nt, Human
auggggagccgagagaaa

SEQ ID NO: 101471 - RNA, 22 nt, Human
caaauaauaauuaagacacaca

SEQ ID NO: 101472 - RNA, 22 nt, Human
cacaaacugagacuaaggcaga

SEQ ID NO: 101473 - RNA, 23 nt, Human
cacacacccgcgaacacgcaucc

SEQ ID NO: 101474 - RNA, 24 nt, Human
cacacacccgcgaacacgcauccu

SEQ ID NO: 101475 - RNA, 26 nt, Human
cacaccccuccagaggguaccacccc

SEQ ID NO: 101476 - RNA, 22 nt, Human
caccucagagccaccuggagcu

SEQ ID NO: 101477 - RNA, 22 nt, Human
cacuaagcacuucagugccucc

SEQ ID NO: 101478 - RNA, 21 nt, Human
cagagauaaccccacucaagg

SEQ ID NO: 101479 - RNA, 19 nt, Human
cagagccaccuggagcuga

SEQ ID NO: 101480 - RNA, 18 nt, Human
cagaggcuggggggcagg

SEQ ID NO: 101481 - RNA, 18 nt, Human
cagcccuaggcugugcuc

SEQ ID NO: 101482 - RNA, 24 nt, Human
cagcuccggcuccacaaggaacug

SEQ ID NO: 101483 - RNA, 18 nt, Human
caggaccccaccuucccc

SEQ ID NO: 101484 - RNA, 25 nt, Human
caggaccccaccuucccccugccuu

SEQ ID NO: 101485 - RNA, 21 nt, Human
caggggagccaaagagggaaa

SEQ ID NO: 101486 - RNA, 18 nt, Human
caugaagccggcccaccc

SEQ ID NO: 101487 - RNA, 24 nt, Human
ccaaaguuuuugaugaugccccca

SEQ ID NO: 101488 - RNA, 24 nt, Human
ccaaccuuagaggaggugagggga

SEQ ID NO: 101489 - RNA, 19 nt, Human
ccacaugggacccucaccc

SEQ ID NO: 101490 - RNA, 23 nt, Human
ccaccacaugggacccucacccc

SEQ ID NO: 101491 - RNA, 23 nt, Human
ccacccaaccuccgggagggccc

SEQ ID NO: 101492 - RNA, 20 nt, Human
ccacccagcggacaaguggg

SEQ ID NO: 101493 - RNA, 23 nt, Human
ccacucggugaggccccuucaaa

SEQ ID NO: 101494 - RNA, 23 nt, Human
ccagaggcuggggggcagggggc

SEQ ID NO: 101495 - RNA, 19 nt, Human
ccaggaccccaccuucccc

SEQ ID NO: 101496 - RNA, 20 nt, Human
ccaguccauugagcuggggg

SEQ ID NO: 101497 - RNA, 21 nt, Human
cccacagcuagaggagggggc

SEQ ID NO: 101498 - RNA, 18 nt, Human
cccacccaaccuccggga

SEQ ID NO: 101499 - RNA, 21 nt, Human
cccaccuucccccugccuuca

SEQ ID NO: 101500 - RNA, 21 nt, Human
cccagccccauaugagcccac

SEQ ID NO: 101501 - RNA, 20 nt, Human
cccccugccuucacaagaca

SEQ ID NO: 101502 - RNA, 22 nt, Human
ccccuguugucugccgccgcuc

SEQ ID NO: 101503 - RNA, 23 nt, Human
ccgcagaaacaccugugaacgca

SEQ ID NO: 101504 - RNA, 23 nt, Human
ccgcgcccagcuccggcuccaca

SEQ ID NO: 101505 - RNA, 23 nt, Human
ccgggagagaggaaaaggagaac

SEQ ID NO: 101506 - RNA, 18 nt, Human
ccucacccccacagcuag

SEQ ID NO: 101507 - RNA, 21 nt, Human
ccugugacagcgaugggaagg

SEQ ID NO: 101508 - RNA, 24 nt, Human
cgcagcacacacccgcgaacacgc

SEQ ID NO: 101509 - RNA, 20 nt, Human
cgccgcucucucaccuccuc

SEQ ID NO: 101510 - RNA, 20 nt, Human
cggcucugggccgccggccc

SEQ ID NO: 101511 - RNA, 23 nt, Human
cucaacacugagacgggcucccc

SEQ ID NO: 101512 - RNA, 21 nt, Human
cucacccccacagcuagagga

SEQ ID NO: 101513 - RNA, 18 nt, Human
cuccagaggguaccaccc

SEQ ID NO: 101514 - RNA, 18 nt, Human
cugacuucggcagcugcu

SEQ ID NO: 101515 - RNA, 19 nt, Human
cugacuucggcagcugcuc

SEQ ID NO: 101516 - RNA, 23 nt, Human
cugggggugggggugggacaggc

SEQ ID NO: 101517 - RNA, 18 nt, Human
gaaacaccugugaacgca

SEQ ID NO: 101518 - RNA, 21 nt, Human
gaaacaccugugaacgcagca

SEQ ID NO: 101519 - RNA, 20 nt, Human
gaacacgcauccucgcggac

SEQ ID NO: 101520 - RNA, 22 nt, Human
gagaagaaggguagcuggggcu

SEQ ID NO: 101521 - RNA, 24 nt, Human
gagccaccuggagcugagagggua

SEQ ID NO: 101522 - RNA, 19 nt, Human
gagcugggggugggggugg

SEQ ID NO: 101523 - RNA, 23 nt, Human
gcccagcuccggcuccacaagga

SEQ ID NO: 101524 - RNA, 24 nt, Human
gccgccgcucucucaccuccucug

SEQ ID NO: 101525 - RNA, 19 nt, Human
gccggcccacccaaccucc

SEQ ID NO: 101526 - RNA, 23 nt, Human
gcggacacgcagggacacacgcg

SEQ ID NO: 101527 - RNA, 21 nt, Human
gcucugggccgccggcccggg

SEQ ID NO: 101528 - RNA, 23 nt, Human
gcucugggccgccggcccggggu

SEQ ID NO: 101529 - RNA, 22 nt, Human
ggaaccucucauucaaccgccu

SEQ ID NO: 101530 - RNA, 23 nt, Human
ggacaagggggagggacagcagc

SEQ ID NO: 101531 - RNA, 23 nt, Human
ggaggagcugugaaagacacaga

SEQ ID NO: 101532 - RNA, 18 nt, Human
ggaggugaggggacucca

SEQ ID NO: 101533 - RNA, 20 nt, Human
ggcacgcuuggcucggcucu

SEQ ID NO: 101534 - RNA, 18 nt, Human
gggacccucacccccaca

SEQ ID NO: 101535 - RNA, 20 nt, Human
gggcagggggcggccagggu

SEQ ID NO: 101536 - RNA, 22 nt, Human
ggggguaucaagagccaggagg

SEQ ID NO: 101537 - RNA, 20 nt, Human
gggggugggggugggacagg

SEQ ID NO: 101538 - RNA, 20 nt, Human
ggguauguacaugaggaggu

SEQ ID NO: 101539 - RNA, 23 nt, Human
gguacaggggagccaaagaggga

SEQ ID NO: 101540 - RNA, 18 nt, Human
gguaucaagagccaggag

SEQ ID NO: 101541 - RNA, 22 nt, Human
gguuuacagucuagguggagaa

SEQ ID NO: 101542 - RNA, 19 nt, Human
gugcaggucagaggggcca

SEQ ID NO: 101543 - RNA, 31 nt, Human
uaaaacacaaauaauaauuaagacacacaaa

SEQ ID NO: 101544 - RNA, 22 nt, Human
uaaaauaaaaaugcccagcacu

SEQ ID NO: 101545 - RNA, 18 nt, Human
uaaauaauucuaaugcca

SEQ ID NO: 101546 - RNA, 20 nt, Human
uaagacacacaaacugagac

SEQ ID NO: 101547 - RNA, 27 nt, Human
uaauaauuaagacacacaaacugagac

SEQ ID NO: 101548 - RNA, 23 nt, Human
uaccagguccccagcucagcccu

SEQ ID NO: 101549 - RNA, 19 nt, Human
uagcuggcaugaagccggc

SEQ ID NO: 101550 - RNA, 28 nt, Human
uaggaaccucucauucaaccgccuaguu

SEQ ID NO: 101551 - RNA, 18 nt, Human
uauaccccuaacacagag

SEQ ID NO: 101552 - RNA, 25 nt, Human
ucaacacugagacgggcuccccagu

SEQ ID NO: 101553 - RNA, 25 nt, Human
uccaaaguuuuugaugaugccccca

SEQ ID NO: 101554 - RNA, 22 nt, Human
uccaggaaagggggugaauuuc

SEQ ID NO: 101555 - RNA, 22 nt, Human
uccaggaaagggggugaauuuc

SEQ ID NO: 101556 - RNA, 18 nt, Human
ucccagccccauaugagc

SEQ ID NO: 101557 - RNA, 19 nt, Human
uccccuguugucugccgcc

SEQ ID NO: 101558 - RNA, 20 nt, Human
uccucgcggacacgcaggga

SEQ ID NO: 101559 - RNA, 20 nt, Human
ucgcgcuuccaggacugcag

SEQ ID NO: 101560 - RNA, 22 nt, Human
ucuuaggaaccucucauucaac

SEQ ID NO: 101561 - RNA, 24 nt, Human
ucuugugugucccuuccccuucca

SEQ ID NO: 101562 - RNA, 21 nt, Human
ugaaaaagaauucaggucuga

SEQ ID NO: 101563 - RNA, 19 nt, Human
ugaaagacacagaacagua

SEQ ID NO: 101564 - RNA, 19 nt, Human
ugaaagacacagaacagua

SEQ ID NO: 101565 - RNA, 20 nt, Human
ugaagccggcccacccaacc

SEQ ID NO: 101566 - RNA, 29 nt, Human
ugaagggaaaggacaagggggagggaaag

SEQ ID NO: 101567 - RNA, 23 nt, Human
ugagcaccugcuguauauucagc

SEQ ID NO: 101568 - RNA, 18 nt, Human
ugagcugggggugggggu

SEQ ID NO: 101569 - RNA, 22 nt, Human
ugccaggaaagacaacuacucc

SEQ ID NO: 101570 - RNA, 19 nt, Human
ugcccagcacucuuaggaa

SEQ ID NO: 101571 - RNA, 19 nt, Human
ugccucggugccucggcga

SEQ ID NO: 101572 - RNA, 24 nt, Human
uggaagguguuuggggucagaccc

SEQ ID NO: 101573 - RNA, 22 nt, Human
ugggaaggagccacaccccucc

SEQ ID NO: 101574 - RNA, 20 nt, Human
uggggaggaggaaguagcug

SEQ ID NO: 101575 - RNA, 21 nt, Human
uggggaggaggaaguagcugg

SEQ ID NO: 101576 - RNA, 21 nt, Human
ugggggugggacaggcaccuc

SEQ ID NO: 101577 - RNA, 22 nt, Human
ugggggugggggugggacaggc

SEQ ID NO: 101578 - RNA, 19 nt, Human
uguccaggaaaggggguga

SEQ ID NO: 101579 - RNA, 20 nt, Human
uuaaaacacaaauaauaauu

SEQ ID NO: 101580 - RNA, 20 nt, Human
uuaggaaccucucauucaac

SEQ ID NO: 101581 - RNA, 18 nt, Human
uuagugccaggaaagaca

SEQ ID NO: 101582 - RNA, 19 nt, Human
uuuaaagucacuaagaauc

SEQ ID NO: 101583 - RNA, 24 nt, Human
uuuuuuuuuuuuuuuuuuuuaaag

SEQ ID NO: 101584 - RNA, 22 nt, Human
aaaaaaacaaaaccgaacaaaa

SEQ ID NO: 101585 - RNA, 23 nt, Human
aaaaaccuaauugcauaaugcua

SEQ ID NO: 101586 - RNA, 20 nt, Human
aaaacaaaaccgaacaaaac

SEQ ID NO: 101587 - RNA, 19 nt, Human
aaaaccgaacaaaacaaag

SEQ ID NO: 101588 - RNA, 20 nt, Human
aaacaaggaaacauauucuu

SEQ ID NO: 101589 - RNA, 20 nt, Human
aaacaauucaaacccuuccc

SEQ ID NO: 101590 - RNA, 20 nt, Human
aaaccgaacaaaacaaagcg

SEQ ID NO: 101591 - RNA, 23 nt, Human
aaagacacagaccccgacgagcc

SEQ ID NO: 101592 - RNA, 20 nt, Human
aaagcgccccuacgcggccc

SEQ ID NO: 101593 - RNA, 27 nt, Human
aaagcgccccuacgcggcccgaacccc

SEQ ID NO: 101594 - RNA, 19 nt, Human
aacaaagcgccccuacgcg

SEQ ID NO: 101595 - RNA, 22 nt, Human
aagcauagccauauuauuuaac

SEQ ID NO: 101596 - RNA, 24 nt, Human
aaggaaaaaccuaauugcauaaug

SEQ ID NO: 101597 - RNA, 20 nt, Human
acagaccccgacgagccacg

SEQ ID NO: 101598 - RNA, 26 nt, Human
acagcauuuacaaaugcacaaaacaa

SEQ ID NO: 101599 - RNA, 19 nt, Human
acccugcccucccuucccc

SEQ ID NO: 101600 - RNA, 24 nt, Human
agaauaaacuucuuguaaaaauaa

SEQ ID NO: 101601 - RNA, 21 nt, Human
agcaaauaaggaaaaaccuaa

SEQ ID NO: 101602 - RNA, 22 nt, Human
agcaagcggggacaggggaggg

SEQ ID NO: 101603 - RNA, 27 nt, Human
agccccacccugcccucccuuccccaa

SEQ ID NO: 101604 - RNA, 21 nt, Human
agcccguccgagucugggcgg

SEQ ID NO: 101605 - RNA, 21 nt, Human
caaaacaaagcgccccuacgc

SEQ ID NO: 101606 - RNA, 19 nt, Human
caaaaccgaacaaaacaaa

SEQ ID NO: 101607 - RNA, 21 nt, Human
caaaacucccaagcaccucgg

SEQ ID NO: 101608 - RNA, 23 nt, Human
caaggaaacauauucuuaauucg

SEQ ID NO: 101609 - RNA, 24 nt, Human
caauaauuggcaucuuuuucacac

SEQ ID NO: 101610 - RNA, 19 nt, Human
caaugaaauacuguuuaaa

SEQ ID NO: 101611 - RNA, 22 nt, Human
cacagcccgaagugaaaagaaa

SEQ ID NO: 101612 - RNA, 20 nt, Human
caccccgaaaagacgagccc

SEQ ID NO: 101613 - RNA, 18 nt, Human
cacgucaguuccucagcc

SEQ ID NO: 101614 - RNA, 21 nt, Human
cagaucucccaaaugagaaua

SEQ ID NO: 101615 - RNA, 19 nt, Human
cauucaaaacucccaagca

SEQ ID NO: 101616 - RNA, 21 nt, Human
cauuccaugaagucagcgaua

SEQ ID NO: 101617 - RNA, 24 nt, Human
ccaagcaccucggauuuuugcccc

SEQ ID NO: 101618 - RNA, 22 nt, Human
cccacccugcccucccuucccc

SEQ ID NO: 101619 - RNA, 20 nt, Human
ccccuacgcggcccgaaccc

SEQ ID NO: 101620 - RNA, 22 nt, Human
cccuacgcggcccgaaccccuc

SEQ ID NO: 101621 - RNA, 18 nt, Human
cccugcccucccuucccc

SEQ ID NO: 101622 - RNA, 19 nt, Human
ccgcgggucccgcgaaccc

SEQ ID NO: 101623 - RNA, 19 nt, Human
ccuauucuacccaacacag

SEQ ID NO: 101624 - RNA, 22 nt, Human
ccucagccccacccugcccucc

SEQ ID NO: 101625 - RNA, 18 nt, Human
ccucggagccaaaagaca

SEQ ID NO: 101626 - RNA, 25 nt, Human
ccuuuuuuuaguggcccaauauggc

SEQ ID NO: 101627 - RNA, 23 nt, Human
cgaacaaaacaaagcgccccuac

SEQ ID NO: 101628 - RNA, 21 nt, Human
cgaacccagccgcucuccaaa

SEQ ID NO: 101629 - RNA, 24 nt, Human
cggcccgaaccccucucggaagcc

SEQ ID NO: 101630 - RNA, 18 nt, Human
cggcccgagcucuaggag

SEQ ID NO: 101631 - RNA, 18 nt, Human
cggggacaggggaggggg

SEQ ID NO: 101632 - RNA, 21 nt, Human
cucagccccacccugcccucc

SEQ ID NO: 101633 - RNA, 20 nt, Human
cucccgggucugcacgaccg

SEQ ID NO: 101634 - RNA, 26 nt, Human
cucgcacucucaaaaaaacaaaaccc

SEQ ID NO: 101635 - RNA, 18 nt, Human
cucucaaaaaaacaaaac

SEQ ID NO: 101636 - RNA, 21 nt, Human
gaaccccucucggaagcccag

SEQ ID NO: 101637 - RNA, 20 nt, Human
gacacagaccccgacgagcc

SEQ ID NO: 101638 - RNA, 20 nt, Human
gaccgccucucucgcacucu

SEQ ID NO: 101639 - RNA, 23 nt, Human
gagcaagcggggacaggggaggg

SEQ ID NO: 101640 - RNA, 21 nt, Human
gagccacggcccgagcucuag

SEQ ID NO: 101641 - RNA, 22 nt, Human
gaguaagcuuuaaauuaaaaaa

SEQ ID NO: 101642 - RNA, 19 nt, Human
gaucauuuaagagugccua

SEQ ID NO: 101643 - RNA, 21 nt, Human
gcccgaaccccucucggaagc

SEQ ID NO: 101644 - RNA, 23 nt, Human
gcccgaaccccucucggaagccc

SEQ ID NO: 101645 - RNA, 19 nt, Human
ggagggcagugaggauagg

SEQ ID NO: 101646 - RNA, 19 nt, Human
ggagggcggagaggagagg

SEQ ID NO: 101647 - RNA, 21 nt, Human
gggaagccccggcccggccgc

SEQ ID NO: 101648 - RNA, 24 nt, Human
gggaagccccggcccggccgccga

SEQ ID NO: 101649 - RNA, 19 nt, Human
guguuguuguuuuucagug

SEQ ID NO: 101650 - RNA, 21 nt, Human
uaaacaaggaaacauauucuu

SEQ ID NO: 101651 - RNA, 21 nt, Human
uaaagaaaacaauucaaaccc

SEQ ID NO: 101652 - RNA, 24 nt, Human
uaagagagacuggggagggcagug

SEQ ID NO: 101653 - RNA, 21 nt, Human
uauggcgguggaagggaggcu

SEQ ID NO: 101654 - RNA, 21 nt, Human
ucacuuauccuacaagugugc

SEQ ID NO: 101655 - RNA, 23 nt, Human
uccaacgcuuuuagaggcagauc

SEQ ID NO: 101656 - RNA, 23 nt, Human
uccccaaaauugcuucucuucau

SEQ ID NO: 101657 - RNA, 25 nt, Human
ucucucgcacucucaaaaaaacaaa

SEQ ID NO: 101658 - RNA, 19 nt, Human
ugaaaagaaaaugagaaaa

SEQ ID NO: 101659 - RNA, 23 nt, Human
ugaaguaucagcugucucugaaa

SEQ ID NO: 101660 - RNA, 20 nt, Human
ugccacuuuggcuuguauau

SEQ ID NO: 101661 - RNA, 18 nt, Human
ugcugaguaauuaacugg

SEQ ID NO: 101662 - RNA, 22 nt, Human
uggggagggcagugaggauagg

SEQ ID NO: 101663 - RNA, 22 nt, Human
uguaacaauaauuggcaucuuu

SEQ ID NO: 101664 - RNA, 24 nt, Human
uuacacagcccgaagugaaaagaa

SEQ ID NO: 101665 - RNA, 23 nt, Human
uuacaucuuuaaagaaaacaauu

SEQ ID NO: 101666 - RNA, 19 nt, Human
uuaguauaauuuuucagug

SEQ ID NO: 101667 - RNA, 27 nt, Human
uucaaaacucccaagcaccucggauuu

SEQ ID NO: 101668 - RNA, 20 nt, Human
uucaaaugguuuuuccauac

SEQ ID NO: 101669 - RNA, 20 nt, Human
uucauguauaucuuccuugc

SEQ ID NO: 101670 - RNA, 23 nt, Human
uuccucagccccacccugcccuc

SEQ ID NO: 101671 - RNA, 21 nt, Human
uuuaaugugaaguuacuuaau

SEQ ID NO: 101672 - RNA, 18 nt, Human
uuucauguauaucuuccu

SEQ ID NO: 101673 - RNA, 23 nt, Human
uuuuuuuuuuuuuuagcuaugga

SEQ ID NO: 101674 - RNA, 19 nt, Human
aagaaggggaaaggagagg

SEQ ID NO: 101675 - RNA, 19 nt, Human
agaggaggagagggcggag

SEQ ID NO: 101676 - RNA, 22 nt, Human
agaggaggagagggcggaggcc

SEQ ID NO: 101677 - RNA, 21 nt, Human
agcgagaagaaggggaaagga

SEQ ID NO: 101678 - RNA, 23 nt, Human
caaaauuuaaaaacaaaaccgaa

SEQ ID NO: 101679 - RNA, 19 nt, Human
cagccgccgccgguugcug

SEQ ID NO: 101680 - RNA, 22 nt, Human
cagccgcgcccccucgaugccu

SEQ ID NO: 101681 - RNA, 25 nt, Human
ccagcgcccuuccaacguccgcugc

SEQ ID NO: 101682 - RNA, 19 nt, Human
ccgcgccgcccgacucugc

SEQ ID NO: 101683 - RNA, 23 nt, Human
ccgcgccgcccgacucugcgugu

SEQ ID NO: 101684 - RNA, 20 nt, Human
ccgcugccccggcagguucc

SEQ ID NO: 101685 - RNA, 23 nt, Human
ccggacggcagccgcgcccccuc

SEQ ID NO: 101686 - RNA, 19 nt, Human
cggacggcagccgcgcccc

SEQ ID NO: 101687 - RNA, 18 nt, Human
cguccggacggcagccgc

SEQ ID NO: 101688 - RNA, 20 nt, Human
cgugcagaauacauuuagau

SEQ ID NO: 101689 - RNA, 21 nt, Human
cucgcucgaggggugcccgga

SEQ ID NO: 101690 - RNA, 23 nt, Human
cuguccggugguggacucuucug

SEQ ID NO: 101691 - RNA, 19 nt, Human
gaaaggagaggaggagagg

SEQ ID NO: 101692 - RNA, 19 nt, Human
gaaaggagaggaggagagg

SEQ ID NO: 101693 - RNA, 18 nt, Human
gaggagagggcggaggcc

SEQ ID NO: 101694 - RNA, 18 nt, Human
gaggggugcccggaauuc

SEQ ID NO: 101695 - RNA, 19 nt, Human
gcagguucccucggggcuc

SEQ ID NO: 101696 - RNA, 19 nt, Human
gccgcgcccccucgaugcc

SEQ ID NO: 101697 - RNA, 22 nt, Human
gccgggcgcaagggagaccccg

SEQ ID NO: 101698 - RNA, 19 nt, Human
gcgugugcgagggacgcgg

SEQ ID NO: 101699 - RNA, 21 nt, Human
gggaaaggagaggaggagagg

SEQ ID NO: 101700 - RNA, 18 nt, Human
ggggaaaggagaggagga

SEQ ID NO: 101701 - RNA, 23 nt, Human
ggggaaaggagaggaggagaggg

SEQ ID NO: 101702 - RNA, 21 nt, Human
ucguccggacggcagccgcgc

SEQ ID NO: 101703 - RNA, 23 nt, Human
ugaacggucccagccgaggccca

SEQ ID NO: 101704 - RNA, 21 nt, Human
uucaaaauuuaaaaacaaaac

SEQ ID NO: 101705 - RNA, 20 nt, Human
uuuuauauaaaugacucuua

SEQ ID NO: 101706 - RNA, 19 nt, Human
aaacuacgaaagcggggug

SEQ ID NO: 101707 - RNA, 19 nt, Human
aaacuacgaaagcggggug

SEQ ID NO: 101708 - RNA, 19 nt, Human
aaacuacgaaagcggggug

SEQ ID NO: 101709 - RNA, 20 nt, Human
accaccagcguguccaggaa

SEQ ID NO: 101710 - RNA, 18 nt, Human
acccccacccccacccca

SEQ ID NO: 101711 - RNA, 25 nt, Human
acccccacccccaccccacccccac

SEQ ID NO: 101712 - RNA, 22 nt, Human
acccugucccucaaauccucug

SEQ ID NO: 101713 - RNA, 25 nt, Human
accuucacccccacccccaccccac

SEQ ID NO: 101714 - RNA, 18 nt, Human
acggaaaggaagcuugug

SEQ ID NO: 101715 - RNA, 18 nt, Human
acggccccaggcaucgcg

SEQ ID NO: 101716 - RNA, 24 nt, Human
agagaagccaguaaccccccugag

SEQ ID NO: 101717 - RNA, 24 nt, Human
agagaagccaguaaccccccugag

SEQ ID NO: 101718 - RNA, 24 nt, Human
agagaagccaguaaccccccugag

SEQ ID NO: 101719 - RNA, 25 nt, Human
agagcccccucaccgccaagcagac

SEQ ID NO: 101720 - RNA, 19 nt, Human
agccaguaaccccccugag

SEQ ID NO: 101721 - RNA, 19 nt, Human
agccaguaaccccccugag

SEQ ID NO: 101722 - RNA, 19 nt, Human
agccaguaaccccccugag

SEQ ID NO: 101723 - RNA, 22 nt, Human
agccccuccucuuucuuccucc

SEQ ID NO: 101724 - RNA, 20 nt, Human
agcccugcgcacgcgggaag

SEQ ID NO: 101725 - RNA, 24 nt, Human
agugcucacuccagaaaacuccaa

SEQ ID NO: 101726 - RNA, 24 nt, Human
agugcucacuccagaaaacuccaa

SEQ ID NO: 101727 - RNA, 24 nt, Human
agugcucacuccagaaaacuccaa

SEQ ID NO: 101728 - RNA, 21 nt, Human
auggacauuuacgguaguggg

SEQ ID NO: 101729 - RNA, 21 nt, Human
auggacauuuacgguaguggg

SEQ ID NO: 101730 - RNA, 21 nt, Human
auggacauuuacgguaguggg

SEQ ID NO: 101731 - RNA, 20 nt, Human
caagaaaugcccacaugaau

SEQ ID NO: 101732 - RNA, 20 nt, Human
caagaaaugcccacaugaau

SEQ ID NO: 101733 - RNA, 20 nt, Human
caagaaaugcccacaugaau

SEQ ID NO: 101734 - RNA, 22 nt, Human
caagagaagccaguaacccccc

SEQ ID NO: 101735 - RNA, 22 nt, Human
caagagaagccaguaacccccc

SEQ ID NO: 101736 - RNA, 22 nt, Human
caagagaagccaguaacccccc

SEQ ID NO: 101737 - RNA, 18 nt, Human
cacaccugaagucgcccc

SEQ ID NO: 101738 - RNA, 19 nt, Human
caccccacccccacuccca

SEQ ID NO: 101739 - RNA, 19 nt, Human
caccccacccccacuccca

SEQ ID NO: 101740 - RNA, 20 nt, Human
caccccacccccacucccac

SEQ ID NO: 101741 - RNA, 26 nt, Human
cacccccaccccacccccacucccac

SEQ ID NO: 101742 - RNA, 21 nt, Human
cacccccacccccaccccacc

SEQ ID NO: 101743 - RNA, 30 nt, Human
cacccggaccuccaagaucucggaacgggg

SEQ ID NO: 101744 - RNA, 20 nt, Human
caccgccaagcagaccccca

SEQ ID NO: 101745 - RNA, 21 nt, Human
caccuucacccccacccccac

SEQ ID NO: 101746 - RNA, 22 nt, Human
cagaaaacuccaacacagugaa

SEQ ID NO: 101747 - RNA, 22 nt, Human
cagaauggucagagccagggug

SEQ ID NO: 101748 - RNA, 20 nt, Human
cagccagccccuccucuuuc

SEQ ID NO: 101749 - RNA, 21 nt, Human
cagccccuccucuuucuuccu

SEQ ID NO: 101750 - RNA, 23 nt, Human
cagccgcgcgcagguaccgugcg

SEQ ID NO: 101751 - RNA, 23 nt, Human
cagccgcgcgcagguaccgugcg

SEQ ID NO: 101752 - RNA, 25 nt, Human
cauuuuuaaaagcucuauuuucuaa

SEQ ID NO: 101753 - RNA, 26 nt, Human
cauuuuuaaaagcucuauuuucuaaa

SEQ ID NO: 101754 - RNA, 26 nt, Human
cauuuuuaaaagcucuauuuucuaaa

SEQ ID NO: 101755 - RNA, 19 nt, Human
ccaccccacccccacuccc

SEQ ID NO: 101756 - RNA, 23 nt, Human
ccaguaaccccccugagcuuccc

SEQ ID NO: 101757 - RNA, 23 nt, Human
ccaguaaccccccugagcuuccc

SEQ ID NO: 101758 - RNA, 23 nt, Human
ccaguaaccccccugagcuuccc

SEQ ID NO: 101759 - RNA, 22 nt, Human
cccaccccacccccacucccac

SEQ ID NO: 101760 - RNA, 21 nt, Human
cccacccccaccccaccccca

SEQ ID NO: 101761 - RNA, 23 nt, Human
cccacccccacucccacccggac

SEQ ID NO: 101762 - RNA, 20 nt, Human
ccccaccccacccccacucc

SEQ ID NO: 101763 - RNA, 23 nt, Human
ccccacccccaccccacccccac

SEQ ID NO: 101764 - RNA, 23 nt, Human
ccccaccuucacccccaccccca

SEQ ID NO: 101765 - RNA, 21 nt, Human
cccccaccccacccccacucc

SEQ ID NO: 101766 - RNA, 24 nt, Human
cccccaccccacccccacucccac

SEQ ID NO: 101767 - RNA, 27 nt, Human
cccccacccccaccccacccccacucc

SEQ ID NO: 101768 - RNA, 22 nt, Human
cccccaccuucacccccacccc

SEQ ID NO: 101769 - RNA, 20 nt, Human
cccccacucccacccggacc

SEQ ID NO: 101770 - RNA, 23 nt, Human
cccccacucccacccggaccucc

SEQ ID NO: 101771 - RNA, 20 nt, Human
ccccccaccuucacccccac

SEQ ID NO: 101772 - RNA, 24 nt, Human
cccccuccgacccugucccucaaa

SEQ ID NO: 101773 - RNA, 26 nt, Human
ccccgccgcccgcugccugcucuccc

SEQ ID NO: 101774 - RNA, 21 nt, Human
ccccugagcuucccuaguuca

SEQ ID NO: 101775 - RNA, 22 nt, Human
ccccugagcuucccuaguucac

SEQ ID NO: 101776 - RNA, 22 nt, Human
ccccugagcuucccuaguucac

SEQ ID NO: 101777 - RNA, 22 nt, Human
ccccugagcuucccuaguucac

SEQ ID NO: 101778 - RNA, 22 nt, Human
cccgccuucccugagcgcgccc

SEQ ID NO: 101779 - RNA, 19 nt, Human
cccuccucuuucuuccucc

SEQ ID NO: 101780 - RNA, 21 nt, Human
cccugagcgcgcccgcccccc

SEQ ID NO: 101781 - RNA, 19 nt, Human
cccugcgcacgcgggaagg

SEQ ID NO: 101782 - RNA, 18 nt, Human
ccgcagccgcgcgcaggu

SEQ ID NO: 101783 - RNA, 18 nt, Human
ccgcagccgcgcgcaggu

SEQ ID NO: 101784 - RNA, 23 nt, Human
ccgcaggcgcgcacccgccuucc

SEQ ID NO: 101785 - RNA, 23 nt, Human
ccgccccccaccuucacccccac

SEQ ID NO: 101786 - RNA, 20 nt, Human
ccgccgcccgcugccugcuc

SEQ ID NO: 101787 - RNA, 21 nt, Human
ccgccgcccgcugccugcucu

SEQ ID NO: 101788 - RNA, 24 nt, Human
ccgccgccggcuccaugcugcucc

SEQ ID NO: 101789 - RNA, 22 nt, Human
ccgcugccugcucucccccucu

SEQ ID NO: 101790 - RNA, 24 nt, Human
ccuccaagaucucggaacggcucu

SEQ ID NO: 101791 - RNA, 22 nt, Human
ccuucacccccacccccacccc

SEQ ID NO: 101792 - RNA, 18 nt, Human
cgccccccaccuucaccc

SEQ ID NO: 101793 - RNA, 23 nt, Human
cgccccccaccuucacccccacc

SEQ ID NO: 101794 - RNA, 19 nt, Human
cgccccggcccggugcagc

SEQ ID NO: 101795 - RNA, 22 nt, Human
cgccgcccgcugccugcucucc

SEQ ID NO: 101796 - RNA, 19 nt, Human
cggaacggcucugagcccu

SEQ ID NO: 101797 - RNA, 18 nt, Human
cgggaagggcugccggag

SEQ ID NO: 101798 - RNA, 21 nt, Human
cgggaagggcugccggaggcg

SEQ ID NO: 101799 - RNA, 25 nt, Human
cgguagugggggaaggcauauaucu

SEQ ID NO: 101800 - RNA, 25 nt, Human
cgguagugggggaaggcauauaucu

SEQ ID NO: 101801 - RNA, 25 nt, Human
cgguagugggggaaggcauauaucu

SEQ ID NO: 101802 - RNA, 23 nt, Human
cgguagugggggaaggcuuauau

SEQ ID NO: 101803 - RNA, 19 nt, Human
cuaaaugaaaacuacgaaa

SEQ ID NO: 101804 - RNA, 19 nt, Human
cuaaaugaaaacuacgaaa

SEQ ID NO: 101805 - RNA, 19 nt, Human
cuaaaugaaaacuacgaaa

SEQ ID NO: 101806 - RNA, 21 nt, Human
cucaagagaagccaguaaccc

SEQ ID NO: 101807 - RNA, 21 nt, Human
cucaagagaagccaguaaccc

SEQ ID NO: 101808 - RNA, 21 nt, Human
cucaagagaagccaguaaccc

SEQ ID NO: 101809 - RNA, 22 nt, Human
cucaccgccaagcagaccccca

SEQ ID NO: 101810 - RNA, 22 nt, Human
cuccaugcugcuccccgccgcc

SEQ ID NO: 101811 - RNA, 22 nt, Human
cuccccgccgcccgcugccugc

SEQ ID NO: 101812 - RNA, 18 nt, Human
cuccccgccgccggcucc

SEQ ID NO: 101813 - RNA, 25 nt, Human
cuccggugcuggcggaagagccccc

SEQ ID NO: 101814 - RNA, 21 nt, Human
cugcucucccccucuccgcag

SEQ ID NO: 101815 - RNA, 19 nt, Human
cuggcggaagagcccccuc

SEQ ID NO: 101816 - RNA, 23 nt, Human
cuggugaccagccagccccuccu

SEQ ID NO: 101817 - RNA, 21 nt, Human
cuucucagcauucgagagauc

SEQ ID NO: 101818 - RNA, 22 nt, Human
gaaaacuccaacacagugaaaa

SEQ ID NO: 101819 - RNA, 22 nt, Human
gaaaacuccaacacagugaaaa

SEQ ID NO: 101820 - RNA, 22 nt, Human
gaaaacuccaacacagugaaaa

SEQ ID NO: 101821 - RNA, 21 nt, Human
gaauggucagagccagggugg

SEQ ID NO: 101822 - RNA, 20 nt, Human
gacccugucccucaaauccu

SEQ ID NO: 101823 - RNA, 19 nt, Human
gcagccgccgagcgcacgc

SEQ ID NO: 101824 - RNA, 22 nt, Human
gccccacccucuggugaccagc

SEQ ID NO: 101825 - RNA, 23 nt, Human
gccccaggcaucgcgcacgucca

SEQ ID NO: 101826 - RNA, 22 nt, Human
gcccccucaccgccaagcagac

SEQ ID NO: 101827 - RNA, 24 nt, Human
gcccccucaccgccaagcagaccc

SEQ ID NO: 101828 - RNA, 20 nt, Human
gcccgccccccaccuucacc

SEQ ID NO: 101829 - RNA, 25 nt, Human
gcccgccccccaccuucacccccac

SEQ ID NO: 101830 - RNA, 23 nt, Human
gccgagcgcacgcgguccgcccc

SEQ ID NO: 101831 - RNA, 20 nt, Human
ggaacggcucugagcccugc

SEQ ID NO: 101832 - RNA, 23 nt, Human
ggaggcugcgaggcucgcaagaa

SEQ ID NO: 101833 - RNA, 23 nt, Human
ggaggcugcgaggcucgcaagaa

SEQ ID NO: 101834 - RNA, 23 nt, Human
ggaggcugcgaggcucgcaagaa

SEQ ID NO: 101835 - RNA, 19 nt, Human
ggcagacggccccaggcau

SEQ ID NO: 101836 - RNA, 21 nt, Human
gggcuccgcgccguggagcag

SEQ ID NO: 101837 - RNA, 18 nt, Human
gggucgggugagaguggc

SEQ ID NO: 101838 - RNA, 21 nt, Human
gggucgggugagaguggcggg

SEQ ID NO: 101839 - RNA, 23 nt, Human
ggucagagccagggugggggccg

SEQ ID NO: 101840 - RNA, 20 nt, Human
gguccacgggcagacggccc

SEQ ID NO: 101841 - RNA, 22 nt, Human
guccacgggcagacggccccag

SEQ ID NO: 101842 - RNA, 26 nt, Human
gugcagcaccaccagcguguccagga

SEQ ID NO: 101843 - RNA, 19 nt, Human
guggagcagcagcagcucc

SEQ ID NO: 101844 - RNA, 20 nt, Human
guggagcagcagcagcuccg

SEQ ID NO: 101845 - RNA, 25 nt, Human
ucacccccacccccaccccaccccc

SEQ ID NO: 101846 - RNA, 24 nt, Human
ucacuccagaaaacuccaacacag

SEQ ID NO: 101847 - RNA, 24 nt, Human
ucacuccagaaaacuccaacacag

SEQ ID NO: 101848 - RNA, 24 nt, Human
ucacuccagaaaacuccaacacag

SEQ ID NO: 101849 - RNA, 18 nt, Human
uccaggaagcccucccgg

SEQ ID NO: 101850 - RNA, 20 nt, Human
ucccacccggaccuccaaga

SEQ ID NO: 101851 - RNA, 18 nt, Human
uccccgccgccggcucca

SEQ ID NO: 101852 - RNA, 22 nt, Human
ucccugagcgcgcccgcccccc

SEQ ID NO: 101853 - RNA, 20 nt, Human
uccucuggagggaccgcggu

SEQ ID NO: 101854 - RNA, 28 nt, Human
ucggugacugaugaucuaaguucccgag

SEQ ID NO: 101855 - RNA, 26 nt, Human
ucggugacugaugaucuaaguuuccc

SEQ ID NO: 101856 - RNA, 22 nt, Human
ucucggaacggcucugagcccu

SEQ ID NO: 101857 - RNA, 24 nt, Human
ucuggugaccagccagccccuccu

SEQ ID NO: 101858 - RNA, 19 nt, Human
ugaaaaggcagaagcggug

SEQ ID NO: 101859 - RNA, 19 nt, Human
ugaaaaggcagaagcggug

SEQ ID NO: 101860 - RNA, 19 nt, Human
ugaaaaggcagaagcggug

SEQ ID NO: 101861 - RNA, 24 nt, Human
ugaccagccagccccuccucuuuc

SEQ ID NO: 101862 - RNA, 18 nt, Human
ugcugcuccccgccgccc

SEQ ID NO: 101863 - RNA, 20 nt, Human
ugcugcuccccgccgcccgc

SEQ ID NO: 101864 - RNA, 20 nt, Human
ugcugcuccccgccgcccgc

SEQ ID NO: 101865 - RNA, 19 nt, Human
ugcuggcggaagagccccc

SEQ ID NO: 101866 - RNA, 22 nt, Human
ugcuggcggaagagcccccucc

SEQ ID NO: 101867 - RNA, 18 nt, Human
uggcccagcuccucagcc

SEQ ID NO: 101868 - RNA, 22 nt, Human
uggucagagccagggugggggc

SEQ ID NO: 101869 - RNA, 18 nt, Human
ugugacucaagagaagcc

SEQ ID NO: 101870 - RNA, 18 nt, Human
ugugacucaagagaagcc

SEQ ID NO: 101871 - RNA, 18 nt, Human
ugugacucaagagaagcc

SEQ ID NO: 101872 - RNA, 19 nt, Human
ugugacucaagagaagcca

SEQ ID NO: 101873 - RNA, 19 nt, Human
ugugacucaagagaagcca

SEQ ID NO: 101874 - RNA, 19 nt, Human
ugugacucaagagaagcca

SEQ ID NO: 101875 - RNA, 24 nt, Human
uguuccccccuucagaucuucuca

SEQ ID NO: 101876 - RNA, 27 nt, Human
uucacccccacccccaccccaccccca

SEQ ID NO: 101877 - RNA, 23 nt, Human
uucuuuuuuacauuuuuauaaga

SEQ ID NO: 101878 - RNA, 23 nt, Human
uucuuuuuuacauuuuuauaaga

SEQ ID NO: 101879 - RNA, 20 nt, Human
aaaauaucacaaaaucaaaa

SEQ ID NO: 101880 - RNA, 19 nt, Human
aaaggaaacaaucagaaaa

SEQ ID NO: 101881 - RNA, 22 nt, Human
aaauccgcuucucuguguuuca

SEQ ID NO: 101882 - RNA, 18 nt, Human
aacauuucucaggaguua

SEQ ID NO: 101883 - RNA, 21 nt, Human
aacccgcgggaaucucuccuc

SEQ ID NO: 101884 - RNA, 18 nt, Human
aagaaaaaaauguaugga

SEQ ID NO: 101885 - RNA, 23 nt, Human
aagaaauaaauagguuaagaaga

SEQ ID NO: 101886 - RNA, 21 nt, Human
aagcaacccuggaaauuaaau

SEQ ID NO: 101887 - RNA, 24 nt, Human
aauugcugguauugcuuaugagca

SEQ ID NO: 101888 - RNA, 21 nt, Human
acacucuucccuucuuuccca

SEQ ID NO: 101889 - RNA, 21 nt, Human
acugagagccacuaguuaugu

SEQ ID NO: 101890 - RNA, 18 nt, Human
agaaaaauuuaacaaaga

SEQ ID NO: 101891 - RNA, 18 nt, Human
agaagaaagcaaucuagg

SEQ ID NO: 101892 - RNA, 21 nt, Human
agacaaagaaaaaaauguaug

SEQ ID NO: 101893 - RNA, 24 nt, Human
agacaggcuugcaggcuuacaggc

SEQ ID NO: 101894 - RNA, 20 nt, Human
agauaagacaaagaaaaaaa

SEQ ID NO: 101895 - RNA, 22 nt, Human
aggcuuuccgccgcuccccguu

SEQ ID NO: 101896 - RNA, 22 nt, Human
agggcuuccagagagugucguu

SEQ ID NO: 101897 - RNA, 24 nt, Human
aguacaaaauaucacaaaaucaaa

SEQ ID NO: 101898 - RNA, 21 nt, Human
agugggagauucauccaucgg

SEQ ID NO: 101899 - RNA, 21 nt, Human
auaaaggaaacaaucagaaaa

SEQ ID NO: 101900 - RNA, 21 nt, Human
aucacugccuucucccacuuc

SEQ ID NO: 101901 - RNA, 22 nt, Human
augugugugugugugugugugu

SEQ ID NO: 101902 - RNA, 22 nt, Human
augugugugugugugugugugu

SEQ ID NO: 101903 - RNA, 20 nt, Human
caaguuuuuauacucaaucu

SEQ ID NO: 101904 - RNA, 21 nt, Human
caccaccagcguguccaggaa

SEQ ID NO: 101905 - RNA, 18 nt, Human
cacccugagacacucuau

SEQ ID NO: 101906 - RNA, 30 nt, Human
cacccugagacacucuauaaaggaaacaag

SEQ ID NO: 101907 - RNA, 22 nt, Human
cauccucucuuaccccucugcu

SEQ ID NO: 101908 - RNA, 25 nt, Human
caugugugugugugugugugugugu

SEQ ID NO: 101909 - RNA, 21 nt, Human
ccaccucuuggaguucaaucu

SEQ ID NO: 101910 - RNA, 22 nt, Human
ccccaggcaucgcgcacgucca

SEQ ID NO: 101911 - RNA, 22 nt, Human
cccccagacgcgcagcggcccg

SEQ ID NO: 101912 - RNA, 25 nt, Human
cccccguggcugugcgcagguaccc

SEQ ID NO: 101913 - RNA, 23 nt, Human
cccgugcaguggccgagcggccg

SEQ ID NO: 101914 - RNA, 18 nt, Human
cccuccuccacuuugucc

SEQ ID NO: 101915 - RNA, 22 nt, Human
cccuuaggcuccgcccccuguc

SEQ ID NO: 101916 - RNA, 20 nt, Human
ccgccacgcgggcgcugccc

SEQ ID NO: 101917 - RNA, 27 nt, Human
ccggcgucucccacccccuuaggcucc

SEQ ID NO: 101918 - RNA, 22 nt, Human
ccucacauuuuaacugagagcc

SEQ ID NO: 101919 - RNA, 23 nt, Human
ccuggaaugucacacacuccuaa

SEQ ID NO: 101920 - RNA, 27 nt, Human
cgaccccuggaaugucacacacuccuu

SEQ ID NO: 101921 - RNA, 21 nt, Human
cgacugccgucacccaagugc

SEQ ID NO: 101922 - RNA, 18 nt, Human
cgcagccgagcucaaagc

SEQ ID NO: 101923 - RNA, 19 nt, Human
cgccccggcccggugcagc

SEQ ID NO: 101924 - RNA, 19 nt, Human
cgccuagcgcggacgcagc

SEQ ID NO: 101925 - RNA, 21 nt, Human
cgccuggauugcuucugggaa

SEQ ID NO: 101926 - RNA, 27 nt, Human
cgcucaaacuaaagcgccgccggggac

SEQ ID NO: 101927 - RNA, 21 nt, Human
cggaacccgcgggaaucucuc

SEQ ID NO: 101928 - RNA, 23 nt, Human
cucacuccacuccaccaccucau

SEQ ID NO: 101929 - RNA, 20 nt, Human
cucagcuucauuacccuccc

SEQ ID NO: 101930 - RNA, 18 nt, Human
cucuucccuucuuuccca

SEQ ID NO: 101931 - RNA, 23 nt, Human
cucuucccuucuuucccacgcug

SEQ ID NO: 101932 - RNA, 18 nt, Human
cuucccuucuuucccacg

SEQ ID NO: 101933 - RNA, 19 nt, Human
gaagaaagcaaucuaggcg

SEQ ID NO: 101934 - RNA, 18 nt, Human
gacacucuauaaaggaaa

SEQ ID NO: 101935 - RNA, 19 nt, Human
gcaacgucgcgguggcccc

SEQ ID NO: 101936 - RNA, 22 nt, Human
gcacucucuccuuccuaggaga

SEQ ID NO: 101937 - RNA, 24 nt, Human
gcacuuucccucagaaaacccuga

SEQ ID NO: 101938 - RNA, 23 nt, Human
gcgcagguacccugcaacgucgc

SEQ ID NO: 101939 - RNA, 18 nt, Human
gcgccuggauugcuucug

SEQ ID NO: 101940 - RNA, 20 nt, Human
gcucagcuucauuacccucc

SEQ ID NO: 101941 - RNA, 21 nt, Human
gcuggagugggagauucaucc

SEQ ID NO: 101942 - RNA, 21 nt, Human
gcuuggggccccgugcagugg

SEQ ID NO: 101943 - RNA, 19 nt, Human
ggaaccuggcgucaguccc

SEQ ID NO: 101944 - RNA, 22 nt, Human
ggaguugggcgagggucuccag

SEQ ID NO: 101945 - RNA, 19 nt, Human
ggcagacgaccccaggcau

SEQ ID NO: 101946 - RNA, 19 nt, Human
gggccagauaagacaaaga

SEQ ID NO: 101947 - RNA, 23 nt, Human
gggccagauaagacaaagaaaaa

SEQ ID NO: 101948 - RNA, 19 nt, Human
gggcgagggucuccagggc

SEQ ID NO: 101949 - RNA, 21 nt, Human
gggcuccgcgccguggagcag

SEQ ID NO: 101950 - RNA, 20 nt, Human
ggugggugggggugggaaau

SEQ ID NO: 101951 - RNA, 22 nt, Human
guccacgggcagacgaccccag

SEQ ID NO: 101952 - RNA, 25 nt, Human
gugcagcaccaccagcguguccagg

SEQ ID NO: 101953 - RNA, 19 nt, Human
guggagcagcagcagcucc

SEQ ID NO: 101954 - RNA, 20 nt, Human
guggagcagcagcagcuccg

SEQ ID NO: 101955 - RNA, 19 nt, Human
guggccccgcuccucggcc

SEQ ID NO: 101956 - RNA, 21 nt, Human
gugugugugugugugugugug

SEQ ID NO: 101957 - RNA, 21 nt, Human
gugugugugugugugugugug

SEQ ID NO: 101958 - RNA, 23 nt, Human
uaaaccaaauuacccaccucuug

SEQ ID NO: 101959 - RNA, 22 nt, Human
uaaagucguugugggcggcugg

SEQ ID NO: 101960 - RNA, 25 nt, Human
uaaaucccaaagcagugcaccuuua

SEQ ID NO: 101961 - RNA, 28 nt, Human
uaacaaagaaauaaauagguuaagaaga

SEQ ID NO: 101962 - RNA, 23 nt, Human
uaagacaguugcugaacaacuaa

SEQ ID NO: 101963 - RNA, 25 nt, Human
uagcaugugugugugugugugugug

SEQ ID NO: 101964 - RNA, 18 nt, Human
uagcuccgggcuuuuccu

SEQ ID NO: 101965 - RNA, 22 nt, Human
ucagaaaaauuuaacaaagaaa

SEQ ID NO: 101966 - RNA, 20 nt, Human
ucagaaaacccugaaaagca

SEQ ID NO: 101967 - RNA, 21 nt, Human
ucagaaaacccugaaaagcaa

SEQ ID NO: 101968 - RNA, 21 nt, Human
ucagcagacauuggagugaac

SEQ ID NO: 101969 - RNA, 28 nt, Human
ucauaugcacuuucccucagaaaacccu

SEQ ID NO: 101970 - RNA, 18 nt, Human
uccaggaagcccucccgg

SEQ ID NO: 101971 - RNA, 24 nt, Human
ucccacccccuuaggcuccgcccc

SEQ ID NO: 101972 - RNA, 20 nt, Human
ucccacccccuuaggcuccu

SEQ ID NO: 101973 - RNA, 24 nt, Human
uccuaaauaucccuggaaauccgc

SEQ ID NO: 101974 - RNA, 23 nt, Human
uccucagucuucagguuuuccuu

SEQ ID NO: 101975 - RNA, 20 nt, Human
ucucuguguuucgcuucaug

SEQ ID NO: 101976 - RNA, 22 nt, Human
ucugguggaguugggcgagggu

SEQ ID NO: 101977 - RNA, 23 nt, Human
ugaaaagcaaacgaccccuggaa

SEQ ID NO: 101978 - RNA, 20 nt, Human
ugaaguaucaguuguuccaa

SEQ ID NO: 101979 - RNA, 23 nt, Human
ugaccucugcacccugagacacu

SEQ ID NO: 101980 - RNA, 24 nt, Human
ugaccucugcacccugagacacuc

SEQ ID NO: 101981 - RNA, 18 nt, Human
ugagagaagggaacccug

SEQ ID NO: 101982 - RNA, 22 nt, Human
ugaucaagcaacccuggaaauu

SEQ ID NO: 101983 - RNA, 20 nt, Human
ugcgcagguacccugcaacu

SEQ ID NO: 101984 - RNA, 19 nt, Human
ugcugaacaacuaaaaagu

SEQ ID NO: 101985 - RNA, 20 nt, Human
ugggccaaggggccggcguc

SEQ ID NO: 101986 - RNA, 23 nt, Human
ugggugggggugggaaauugggu

SEQ ID NO: 101987 - RNA, 23 nt, Human
ugucacacacuccuaaauauccc

SEQ ID NO: 101988 - RNA, 20 nt, Human
ugugggcggcuggggaaccu

SEQ ID NO: 101989 - RNA, 18 nt, Human
ugugugugugugugugug

SEQ ID NO: 101990 - RNA, 18 nt, Human
ugugugugugugugugug

SEQ ID NO: 101991 - RNA, 18 nt, Human
ugugugugugugugugug

SEQ ID NO: 101992 - RNA, 18 nt, Human
ugugugugugugugugug

SEQ ID NO: 101993 - RNA, 18 nt, Human
ugugugugugugugugug

SEQ ID NO: 101994 - RNA, 18 nt, Human
ugugugugugugugugug

SEQ ID NO: 101995 - RNA, 18 nt, Human
ugugugugugugugugug

SEQ ID NO: 101996 - RNA, 21 nt, Human
ugugugugugugugugugugu

SEQ ID NO: 101997 - RNA, 21 nt, Human
ugugugugugugugugugugu

SEQ ID NO: 101998 - RNA, 21 nt, Human
ugugugugugugugugugugu

SEQ ID NO: 101999 - RNA, 21 nt, Human
ugugugugugugugugugugu

SEQ ID NO: 102000 - RNA, 21 nt, Human
ugugugugugugugugugugu

SEQ ID NO: 102001 - RNA, 21 nt, Human
ugugugugugugugugugugu

SEQ ID NO: 102002 - RNA, 21 nt, Human
ugugugugugugugugugugu

SEQ ID NO: 102003 - RNA, 21 nt, Human
ugugugugugugugugugugu

SEQ ID NO: 102004 - RNA, 21 nt, Human
ugugugugugugugugugugu

SEQ ID NO: 102005 - RNA, 22 nt, Human
ugugugugugugugugugugug

SEQ ID NO: 102006 - RNA, 22 nt, Human
ugugugugugugugugugugug

SEQ ID NO: 102007 - RNA, 22 nt, Human
ugugugugugugugugugugug

SEQ ID NO: 102008 - RNA, 22 nt, Human
ugugugugugugugugugugug

SEQ ID NO: 102009 - RNA, 26 nt, Human
uuucccucagaaaacccugaaaagca

SEQ ID NO: 102010 - RNA, 19 nt, Human
uuucuuagucugaccucug

SEQ ID NO: 102011 - RNA, 23 nt, Human
uuuuaugaauugcugguauugcu

SEQ ID NO: 102012 - RNA, 21 nt, Human
uuuuuuuuuuuuuuuuuuaca

SEQ ID NO: 102013 - RNA, 21 nt, Human
aaaaacaaagucuucaacuug

SEQ ID NO: 102014 - RNA, 25 nt, Human
aaaaacaaagucuucaacuugggug

SEQ ID NO: 102015 - RNA, 23 nt, Human
aacaaaugacauuaaaagucagg

SEQ ID NO: 102016 - RNA, 23 nt, Human
agacaaaagcaucaggacaaacc

SEQ ID NO: 102017 - RNA, 31 nt, Human
agagagacacacagacacacauacauuccuu

SEQ ID NO: 102018 - RNA, 24 nt, Human
agcaagggaaaagccaaggaaaga

SEQ ID NO: 102019 - RNA, 18 nt, Human
agccauuggagaggggcu

SEQ ID NO: 102020 - RNA, 18 nt, Human
agccucagaggccguggg

SEQ ID NO: 102021 - RNA, 22 nt, Human
aggcgaacgggaguagcaguuc

SEQ ID NO: 102022 - RNA, 24 nt, Human
aggggcagguccuccagggggcuc

SEQ ID NO: 102023 - RNA, 26 nt, Human
aguccuggguccuccgcugcugggag

SEQ ID NO: 102024 - RNA, 22 nt, Human
caaaugacauuaaaagucagga

SEQ ID NO: 102025 - RNA, 19 nt, Human
caccgcucccagugacagu

SEQ ID NO: 102026 - RNA, 21 nt, Human
caccgcucccagugacaguuu

SEQ ID NO: 102027 - RNA, 26 nt, Human
cacucccucccuugcugcuuuuuucg

SEQ ID NO: 102028 - RNA, 23 nt, Human
cacugggcagcccccccgggaac

SEQ ID NO: 102029 - RNA, 18 nt, Human
cagagagacacacagaca

SEQ ID NO: 102030 - RNA, 19 nt, Human
cagcugugcccuggagcag

SEQ ID NO: 102031 - RNA, 22 nt, Human
caggacaaaccauuuuaaaaac

SEQ ID NO: 102032 - RNA, 23 nt, Human
cagguuaaaaagauguugcuuaa

SEQ ID NO: 102033 - RNA, 19 nt, Human
ccccccuagaucgccgguc

SEQ ID NO: 102034 - RNA, 19 nt, Human
cccccgggaacuucccgcc

SEQ ID NO: 102035 - RNA, 19 nt, Human
cccccuagaucgccggucc

SEQ ID NO: 102036 - RNA, 19 nt, Human
ccccgccgagccucagagg

SEQ ID NO: 102037 - RNA, 21 nt, Human
ccccuagaucgccggucccug

SEQ ID NO: 102038 - RNA, 23 nt, Human
cccgccaggucccgggacucccg

SEQ ID NO: 102039 - RNA, 21 nt, Human
cccgcccgccaggcagccgca

SEQ ID NO: 102040 - RNA, 23 nt, Human
cccgggacucccggcagcccgag

SEQ ID NO: 102041 - RNA, 24 nt, Human
cccuacaggcacuugcgugucgcc

SEQ ID NO: 102042 - RNA, 23 nt, Human
cccuagaucgccggucccugcuc

SEQ ID NO: 102043 - RNA, 19 nt, Human
ccgcuguccuuuccuuccu

SEQ ID NO: 102044 - RNA, 19 nt, Human
ccggccugugccccuuugc

SEQ ID NO: 102045 - RNA, 20 nt, Human
ccuagaucgccggucccugc

SEQ ID NO: 102046 - RNA, 19 nt, Human
ccuccuuggccgcaccgcu

SEQ ID NO: 102047 - RNA, 23 nt, Human
cgccgcgguggcuggaugcugac

SEQ ID NO: 102048 - RNA, 22 nt, Human
cgccggucccugcuccuuucac

SEQ ID NO: 102049 - RNA, 26 nt, Human
cgccucgcuuuuuuagcuuaaccccu

SEQ ID NO: 102050 - RNA, 19 nt, Human
cgcuacagaucucugugag

SEQ ID NO: 102051 - RNA, 22 nt, Human
cggacagggcagccgccagcca

SEQ ID NO: 102052 - RNA, 18 nt, Human
cggagcccggacugcugg

SEQ ID NO: 102053 - RNA, 23 nt, Human
cggcagcccgaggaaggagagug

SEQ ID NO: 102054 - RNA, 24 nt, Human
cgggaacuucccgccuacgaccga

SEQ ID NO: 102055 - RNA, 23 nt, Human
cgggacucccggcagcccgagga

SEQ ID NO: 102056 - RNA, 24 nt, Human
cgggccaagccgugggcuaaugcc

SEQ ID NO: 102057 - RNA, 23 nt, Human
cguccgggccaagccgugggcua

SEQ ID NO: 102058 - RNA, 19 nt, Human
cugagccauuggagagggg

SEQ ID NO: 102059 - RNA, 27 nt, Human
cuucacucccucccuugcugcuuuuuu

SEQ ID NO: 102060 - RNA, 22 nt, Human
cuuuccuuccuuucccgguuuu

SEQ ID NO: 102061 - RNA, 22 nt, Human
gacauuaaaagucaggagagcu

SEQ ID NO: 102062 - RNA, 22 nt, Human
gacuccacagagagacacacag

SEQ ID NO: 102063 - RNA, 25 nt, Human
gagccucagaggccgugggagccgg

SEQ ID NO: 102064 - RNA, 18 nt, Human
gcaagggaaaagccaagg

SEQ ID NO: 102065 - RNA, 19 nt, Human
gccaaggaaagauaaaaua

SEQ ID NO: 102066 - RNA, 20 nt, Human
gccgcagccccgccgagccu

SEQ ID NO: 102067 - RNA, 23 nt, Human
gcggacagggcagccgccagcca

SEQ ID NO: 102068 - RNA, 22 nt, Human
gcugccgggcgugcggcgggcc

SEQ ID NO: 102069 - RNA, 23 nt, Human
ggaaagcgucuacggagcccgga

SEQ ID NO: 102070 - RNA, 18 nt, Human
ggcagcacugcuuccucc

SEQ ID NO: 102071 - RNA, 23 nt, Human
ggcaucggagacugacagaagga

SEQ ID NO: 102072 - RNA, 18 nt, Human
ggcgggcccccgagaagc

SEQ ID NO: 102073 - RNA, 19 nt, Human
gggcagguccuccaggggg

SEQ ID NO: 102074 - RNA, 25 nt, Human
gggcagguccuccagggggcucggu

SEQ ID NO: 102075 - RNA, 22 nt, Human
gggcgugcggcgggcccccgag

SEQ ID NO: 102076 - RNA, 26 nt, Human
gugccgguuucuucucccuuuuuucc

SEQ ID NO: 102077 - RNA, 21 nt, Human
guuuuaaggaggcucggcaga

SEQ ID NO: 102078 - RNA, 19 nt, Human
uaaaaacaaagucuucaac

SEQ ID NO: 102079 - RNA, 19 nt, Human
uaaaguagaggcaacgugg

SEQ ID NO: 102080 - RNA, 25 nt, Human
uaacaaaugacauuaaaagucagga

SEQ ID NO: 102081 - RNA, 21 nt, Human
uaagaucugccugccaaaagc

SEQ ID NO: 102082 - RNA, 19 nt, Human
uacaggucguaacgauugc

SEQ ID NO: 102083 - RNA, 21 nt, Human
uaccuacgcuacagaucucug

SEQ ID NO: 102084 - RNA, 23 nt, Human
uacggagcccggacugcuggggc

SEQ ID NO: 102085 - RNA, 26 nt, Human
uacggagcccggacugcuggggcagc

SEQ ID NO: 102086 - RNA, 23 nt, Human
uagcuuaaccccuaugaagaauu

SEQ ID NO: 102087 - RNA, 21 nt, Human
uaggcacucauugagcugcug

SEQ ID NO: 102088 - RNA, 19 nt, Human
uaucugcaauuacauguua

SEQ ID NO: 102089 - RNA, 20 nt, Human
ucagagagggugccgguuuc

SEQ ID NO: 102090 - RNA, 20 nt, Human
ucagcagccucggcgcccgg

SEQ ID NO: 102091 - RNA, 21 nt, Human
ucaggaaagcuccggagcccg

SEQ ID NO: 102092 - RNA, 20 nt, Human
uccagaagagccuuuggucg

SEQ ID NO: 102093 - RNA, 18 nt, Human
uccuggguccuccgcugc

SEQ ID NO: 102094 - RNA, 24 nt, Human
ucgccggucccugcuccuuucacc

SEQ ID NO: 102095 - RNA, 19 nt, Human
ucguuuuucuuuuuccccu

SEQ ID NO: 102096 - RNA, 19 nt, Human
ucuccagaagagccuuugg

SEQ ID NO: 102097 - RNA, 23 nt, Human
ucuccagaagagccuuuggucgc

SEQ ID NO: 102098 - RNA, 21 nt, Human
ucugcaauuacauguuagaac

SEQ ID NO: 102099 - RNA, 23 nt, Human
ugaauuagucguuuuucuuuuuc

SEQ ID NO: 102100 - RNA, 27 nt, Human
ugacagaaggacugggaugguuaaucu

SEQ ID NO: 102101 - RNA, 23 nt, Human
ugacauuaaaagucaggagagcu

SEQ ID NO: 102102 - RNA, 18 nt, Human
ugagauuggcaaaagggg

SEQ ID NO: 102103 - RNA, 25 nt, Human
ugagcugcugccgccgcuguccuuu

SEQ ID NO: 102104 - RNA, 18 nt, Human
ugaggcagaacugcaggg

SEQ ID NO: 102105 - RNA, 19 nt, Human
ugccaaaagcccgccccuc

SEQ ID NO: 102106 - RNA, 21 nt, Human
ugcccagugcucugggcuucu

SEQ ID NO: 102107 - RNA, 19 nt, Human
ugcugcuuuuuucgcugaa

SEQ ID NO: 102108 - RNA, 18 nt, Human
uggcaaaaggggaagcaa

SEQ ID NO: 102109 - RNA, 18 nt, Human
ugggagagcgccgcggug

SEQ ID NO: 102110 - RNA, 23 nt, Human
ugggagagcgccgcgguggcugg

SEQ ID NO: 102111 - RNA, 18 nt, Human
ugggaugguuaaucugga

SEQ ID NO: 102112 - RNA, 24 nt, Human
uuacauguuagaacagauuuugca

SEQ ID NO: 102113 - RNA, 20 nt, Human
uuagcugcuuaacauaugac

SEQ ID NO: 102114 - RNA, 19 nt, Human
uuccccuuuccuuugcucc

SEQ ID NO: 102115 - RNA, 22 nt, Human
uuccuccuuggccgcaccgcuc

SEQ ID NO: 102116 - RNA, 18 nt, Human
uuccugguuaaugacucc

SEQ ID NO: 102117 - RNA, 21 nt, Human
uuccuuucccgguuuuguggg

SEQ ID NO: 102118 - RNA, 22 nt, Human
uucuguugccucucagagaggg

SEQ ID NO: 102119 - RNA, 21 nt, Human
uugaaaaacccgcccccauuu

SEQ ID NO: 102120 - RNA, 22 nt, Human
uugcggcugcacugggcagccc

SEQ ID NO: 102121 - RNA, 24 nt, Human
uugcgugucgcccccuuuuuugcu

SEQ ID NO: 102122 - RNA, 19 nt, Human
uugcuuuuuuccuucacuc

SEQ ID NO: 102123 - RNA, 19 nt, Human
uuggcaaaaggggaagcaa

SEQ ID NO: 102124 - RNA, 19 nt, Human
uuuucuuuuuccccuuucc

SEQ ID NO: 102125 - RNA, 24 nt, Human
uuuugcuuuuuuccuucacucccu

SEQ ID NO: 102126 - RNA, 18 nt, Human
uuuuuuuuccuguuuuga

SEQ ID NO: 102127 - RNA, 18 nt, Human
uuuuuuuuuuuuuuccug

SEQ ID NO: 102128 - RNA, 23 nt, Human
uuuuuuuuuuuuuuuccuguuuu

SEQ ID NO: 102129 - RNA, 25 nt, Human
uuuuuuuuuuuuuuuuuccuguuuu

SEQ ID NO: 102130 - RNA, 24 nt, Human
uuuuuuuuuuuuuuuuuuccuggg

SEQ ID NO: 102131 - RNA, 21 nt, Human
aaaacaaaugagaaacguccc

SEQ ID NO: 102132 - RNA, 21 nt, Human
aaacaaaugagaaacgucccc

SEQ ID NO: 102133 - RNA, 21 nt, Human
aaagccccccgccccgcccca

SEQ ID NO: 102134 - RNA, 18 nt, Human
aacaccuauaagccacaa

SEQ ID NO: 102135 - RNA, 21 nt, Human
aacacucacacccccaaaacc

SEQ ID NO: 102136 - RNA, 22 nt, Human
aacgugcucccggccacgcccc

SEQ ID NO: 102137 - RNA, 27 nt, Human
acacaccaaaaggagugagaaaaacaa

SEQ ID NO: 102138 - RNA, 22 nt, Human
acacccccaaaaccaacaccua

SEQ ID NO: 102139 - RNA, 23 nt, Human
acacucacacccccaaaaccaac

SEQ ID NO: 102140 - RNA, 19 nt, Human
acacuggcggcccucccuc

SEQ ID NO: 102141 - RNA, 22 nt, Human
acagccggccaaggccaccagc

SEQ ID NO: 102142 - RNA, 25 nt, Human
acccccaaaaccaacaccuauaagc

SEQ ID NO: 102143 - RNA, 21 nt, Human
accguuuagguggcuguggcc

SEQ ID NO: 102144 - RNA, 18 nt, Human
agaaaaacaaaugagaaa

SEQ ID NO: 102145 - RNA, 19 nt, Human
agaaaaacaaaugagaaac

SEQ ID NO: 102146 - RNA, 20 nt, Human
agagacuggaaaacaagcuu

SEQ ID NO: 102147 - RNA, 23 nt, Human
agccaacgugcucccggccacgc

SEQ ID NO: 102148 - RNA, 19 nt, Human
agcccggcgcugucagcgc

SEQ ID NO: 102149 - RNA, 18 nt, Human
agcccucccggggcgcgg

SEQ ID NO: 102150 - RNA, 21 nt, Human
aggcgcagaagaaacugaacc

SEQ ID NO: 102151 - RNA, 22 nt, Human
agugagaaaaacaaaugagaaa

SEQ ID NO: 102152 - RNA, 22 nt, Human
augagaaacgucccccaaacac

SEQ ID NO: 102153 - RNA, 24 nt, Human
caaaaccaacaccuauaagccaca

SEQ ID NO: 102154 - RNA, 25 nt, Human
caaaugagaaacgucccccaaacac

SEQ ID NO: 102155 - RNA, 24 nt, Human
caacacaccaaaaggagugagaaa

SEQ ID NO: 102156 - RNA, 25 nt, Human
caacacaccaaaaggagugagaaaa

SEQ ID NO: 102157 - RNA, 22 nt, Human
cacaccaaaaggagugagaaaa

SEQ ID NO: 102158 - RNA, 20 nt, Human
cacacccccaaaaccaacac

SEQ ID NO: 102159 - RNA, 24 nt, Human
cacccccaaaaccaacaccuauaa

SEQ ID NO: 102160 - RNA, 26 nt, Human
cacccccaaaaccaacaccuauaagc

SEQ ID NO: 102161 - RNA, 21 nt, Human
caccccccaugccugaagcaa

SEQ ID NO: 102162 - RNA, 23 nt, Human
cacucacacccccaaaaccaaca

SEQ ID NO: 102163 - RNA, 23 nt, Human
cacuggcggccugcaaagccccc

SEQ ID NO: 102164 - RNA, 25 nt, Human
cagaagaaacugaaccguuuaggug

SEQ ID NO: 102165 - RNA, 20 nt, Human
cagcgcggagcagccggcgg

SEQ ID NO: 102166 - RNA, 21 nt, Human
cagcuucuaggcucccuggag

SEQ ID NO: 102167 - RNA, 22 nt, Human
cagcuucuaggcucccuggagg

SEQ ID NO: 102168 - RNA, 19 nt, Human
caggagaaacaagaagaga

SEQ ID NO: 102169 - RNA, 19 nt, Human
caggucucugagcacagcc

SEQ ID NO: 102170 - RNA, 22 nt, Human
cauaaccccacgggguucucuu

SEQ ID NO: 102171 - RNA, 21 nt, Human
ccaaaaccaacaccuauaagc

SEQ ID NO: 102172 - RNA, 26 nt, Human
ccaaacacucacacccccaaaaccaa

SEQ ID NO: 102173 - RNA, 23 nt, Human
cccaaaaccaacaccuauaagcc

SEQ ID NO: 102174 - RNA, 23 nt, Human
cccaaacacucacacccccaaaa

SEQ ID NO: 102175 - RNA, 25 nt, Human
cccaaacacucacacccccaaaacc

SEQ ID NO: 102176 - RNA, 20 nt, Human
cccagcccgagaccccggcc

SEQ ID NO: 102177 - RNA, 20 nt, Human
cccaugccugaagcaacgug

SEQ ID NO: 102178 - RNA, 19 nt, Human
ccccaaaaccaacaccuau

SEQ ID NO: 102179 - RNA, 25 nt, Human
ccccaaaaccaacaccuauaagcca

SEQ ID NO: 102180 - RNA, 19 nt, Human
ccccaccccccaugccuga

SEQ ID NO: 102181 - RNA, 19 nt, Human
cccccaaaaccaacaccua

SEQ ID NO: 102182 - RNA, 25 nt, Human
cccccaaaaccaacaccuauaagcc

SEQ ID NO: 102183 - RNA, 22 nt, Human
cccccaaacacucacaccccca

SEQ ID NO: 102184 - RNA, 21 nt, Human
ccccccaccccccaugccuga

SEQ ID NO: 102185 - RNA, 24 nt, Human
ccccccaccccccaugccugaagc

SEQ ID NO: 102186 - RNA, 18 nt, Human
ccccccgccccgccccag

SEQ ID NO: 102187 - RNA, 20 nt, Human
cccccgccccgccccagccc

SEQ ID NO: 102188 - RNA, 20 nt, Human
cccccugucagccggaggac

SEQ ID NO: 102189 - RNA, 25 nt, Human
ccccuacugcagcagugggcaggag

SEQ ID NO: 102190 - RNA, 23 nt, Human
cccgagaccccggcccucccggc

SEQ ID NO: 102191 - RNA, 19 nt, Human
cccgcgugcgcugcucucc

SEQ ID NO: 102192 - RNA, 19 nt, Human
cccgcgugcgcugcucucc

SEQ ID NO: 102193 - RNA, 23 nt, Human
cccgcgugcgcugcucucccguc

SEQ ID NO: 102194 - RNA, 19 nt, Human
cccggcccucccggcgggc

SEQ ID NO: 102195 - RNA, 24 nt, Human
ccgccgccgccgcugaggcagccg

SEQ ID NO: 102196 - RNA, 20 nt, Human
ccgcugaggcagccgccagg

SEQ ID NO: 102197 - RNA, 20 nt, Human
ccucccggcgggcuccuccc

SEQ ID NO: 102198 - RNA, 20 nt, Human
ccugcaaagccccccgcccc

SEQ ID NO: 102199 - RNA, 22 nt, Human
ccugcaaagccccccgccccgc

SEQ ID NO: 102200 - RNA, 19 nt, Human
ccugcccggcgcccgcccc

SEQ ID NO: 102201 - RNA, 21 nt, Human
ccuugggucucgucugaggcc

SEQ ID NO: 102202 - RNA, 20 nt, Human
cgacacuggcggcccucccu

SEQ ID NO: 102203 - RNA, 18 nt, Human
cgaggggcugggagccgg

SEQ ID NO: 102204 - RNA, 24 nt, Human
cgccccgccccagcccggcgcugu

SEQ ID NO: 102205 - RNA, 18 nt, Human
cgccgccgccgccgcuga

SEQ ID NO: 102206 - RNA, 24 nt, Human
cgcuccccccaccccccaugccug

SEQ ID NO: 102207 - RNA, 25 nt, Human
cgcuccccccaccccccaugccuga

SEQ ID NO: 102208 - RNA, 22 nt, Human
cggccugcaaagccccccgccc

SEQ ID NO: 102209 - RNA, 22 nt, Human
cggcuccccagcccgagacccc

SEQ ID NO: 102210 - RNA, 24 nt, Human
cgucccccaaacacucacaccccc

SEQ ID NO: 102211 - RNA, 21 nt, Human
cuccccagcccgagaccccgg

SEQ ID NO: 102212 - RNA, 21 nt, Human
cuccccccaccccccaugccu

SEQ ID NO: 102213 - RNA, 21 nt, Human
cucccccuaacucacccuccc

SEQ ID NO: 102214 - RNA, 24 nt, Human
cucccggggcgcggccgcggugca

SEQ ID NO: 102215 - RNA, 18 nt, Human
cucucccgucccggcucc

SEQ ID NO: 102216 - RNA, 21 nt, Human
cucuguccaacacaccaaaag

SEQ ID NO: 102217 - RNA, 18 nt, Human
cugagccugcgccgccgc

SEQ ID NO: 102218 - RNA, 18 nt, Human
cugcaggagcccuucucu

SEQ ID NO: 102219 - RNA, 19 nt, Human
gacacuggcggcccucccu

SEQ ID NO: 102220 - RNA, 18 nt, Human
gagaaaaacaaaugagaa

SEQ ID NO: 102221 - RNA, 19 nt, Human
gagcacagccggccaaggc

SEQ ID NO: 102222 - RNA, 20 nt, Human
gccugcaggagcccuucucu

SEQ ID NO: 102223 - RNA, 18 nt, Human
gcuccccccaccccccau

SEQ ID NO: 102224 - RNA, 22 nt, Human
ggaaaacaagcuuccaacagaa

SEQ ID NO: 102225 - RNA, 18 nt, Human
gggacgcuccccccaccc

SEQ ID NO: 102226 - RNA, 24 nt, Human
gggucucccccuaacucacccucc

SEQ ID NO: 102227 - RNA, 18 nt, Human
uacaacauuuuuuccaau

SEQ ID NO: 102228 - RNA, 20 nt, Human
uacugcagcagugggcagga

SEQ ID NO: 102229 - RNA, 21 nt, Human
uacugcagcagugggcaggag

SEQ ID NO: 102230 - RNA, 22 nt, Human
ucacacccccaaaaccaacacc

SEQ ID NO: 102231 - RNA, 23 nt, Human
uccccagcccgagaccccggccc

SEQ ID NO: 102232 - RNA, 21 nt, Human
ucccccaaacacucacacccc

SEQ ID NO: 102233 - RNA, 20 nt, Human
ucccccuaacucacccuccc

SEQ ID NO: 102234 - RNA, 22 nt, Human
ucccggcuccccagcccgagac

SEQ ID NO: 102235 - RNA, 26 nt, Human
ucugagccugcgccgccgccgccgcu

SEQ ID NO: 102236 - RNA, 24 nt, Human
ucugaggccccagcagccugaggc

SEQ ID NO: 102237 - RNA, 20 nt, Human
ugagaaaaacaaaugagaaa

SEQ ID NO: 102238 - RNA, 21 nt, Human
ugagaaaaacaaaugagaaac

SEQ ID NO: 102239 - RNA, 30 nt, Human
ugagaaaaacaaaugagaaacgucccccaa

SEQ ID NO: 102240 - RNA, 31 nt, Human
ugagaaaaacaaaugagaaacgucccccaaa

SEQ ID NO: 102241 - RNA, 19 nt, Human
ugaggcgcagaagaaacug

SEQ ID NO: 102242 - RNA, 20 nt, Human
ugauuugggacgcucccccc

SEQ ID NO: 102243 - RNA, 23 nt, Human
ugauuugggacgcuccccccacc

SEQ ID NO: 102244 - RNA, 22 nt, Human
ugcagcagugggcaggagaaac

SEQ ID NO: 102245 - RNA, 26 nt, Human
ugcagcagugggcaggagaaacaaga

SEQ ID NO: 102246 - RNA, 19 nt, Human
ugccugaagcaacgugcac

SEQ ID NO: 102247 - RNA, 21 nt, Human
ugcuccuccccuacugcagca

SEQ ID NO: 102248 - RNA, 22 nt, Human
ugggacgcuccccccacccccc

SEQ ID NO: 102249 - RNA, 20 nt, Human
uggguaaaaacauuaaauua

SEQ ID NO: 102250 - RNA, 21 nt, Human
uucacucuuaaaugcucugcc

SEQ ID NO: 102251 - RNA, 19 nt, Human
uucucuugcuggagagggu

SEQ ID NO: 102252 - RNA, 22 nt, Human
uuuuuugaucaugcacaagucu

SEQ ID NO: 102253 - RNA, 20 nt, Human
uuuuuuuuuuuuuuuuuugg

SEQ ID NO: 102254 - RNA, 21 nt, Human
acacuggugguuucauuucaa

SEQ ID NO: 102255 - RNA, 23 nt, Human
gccgccccacgucgagaccagug

SEQ ID NO: 102256 - RNA, 25 nt, Human
uaaaacuuuaggaauaucugcacau

SEQ ID NO: 102257 - RNA, 19 nt, Human
uaugcuagagaacugacau

SEQ ID NO: 102258 - RNA, 22 nt, Human
ucagacauggucauauauaugc

SEQ ID NO: 102259 - RNA, 20 nt, Human
ugacauuucagacaugguca

SEQ ID NO: 102260 - RNA, 25 nt, Human
uugauaacacuggugguuucauuuc

SEQ ID NO: 102261 - RNA, 24 nt, Human
aagaacauacaaaguauacuaaag

SEQ ID NO: 102262 - RNA, 23 nt, Human
aagcagacacacacgcacaaacc

SEQ ID NO: 102263 - RNA, 18 nt, Human
aaggagcugggggcgagg

SEQ ID NO: 102264 - RNA, 20 nt, Human
accaaaguauuuccaaaagc

SEQ ID NO: 102265 - RNA, 21 nt, Human
acccccaggccccuggcagcg

SEQ ID NO: 102266 - RNA, 23 nt, Human
agacacacacgcacaaacccagc

SEQ ID NO: 102267 - RNA, 19 nt, Human
agagacagcaagagaccca

SEQ ID NO: 102268 - RNA, 21 nt, Human
agagacccacccccaggcccc

SEQ ID NO: 102269 - RNA, 21 nt, Human
agcugggggcgagggagccua

SEQ ID NO: 102270 - RNA, 22 nt, Human
aggcaaacauacagcgaaccuu

SEQ ID NO: 102271 - RNA, 18 nt, Human
aggccccuggcagcgcag

SEQ ID NO: 102272 - RNA, 21 nt, Human
aggccccuggcagcgcagugg

SEQ ID NO: 102273 - RNA, 19 nt, Human
caagagacccacccccagg

SEQ ID NO: 102274 - RNA, 19 nt, Human
caauauuuaagaacauaca

SEQ ID NO: 102275 - RNA, 21 nt, Human
cacacacgcacaaacccagca

SEQ ID NO: 102276 - RNA, 18 nt, Human
cacacgcacaaacccagc

SEQ ID NO: 102277 - RNA, 30 nt, Human
cacuuuauuuaaauuauuugguaauuuuaa

SEQ ID NO: 102278 - RNA, 19 nt, Human
cagcaagagacccaccccc

SEQ ID NO: 102279 - RNA, 21 nt, Human
cagcaagagacccacccccag

SEQ ID NO: 102280 - RNA, 19 nt, Human
cagcgcaguggauccggga

SEQ ID NO: 102281 - RNA, 19 nt, Human
cagugggacuuuucuucug

SEQ ID NO: 102282 - RNA, 18 nt, Human
ccccaggccccuggcagc

SEQ ID NO: 102283 - RNA, 19 nt, Human
cccccaggccccuggcagc

SEQ ID NO: 102284 - RNA, 21 nt, Human
cccccaggccccuggcagcgc

SEQ ID NO: 102285 - RNA, 20 nt, Human
ccgcuaagcagacacacacg

SEQ ID NO: 102286 - RNA, 21 nt, Human
ccgugaguuccucuauuauuc

SEQ ID NO: 102287 - RNA, 20 nt, Human
ccuuauaauuagcaucugcc

SEQ ID NO: 102288 - RNA, 23 nt, Human
cgcuaagcagacacacacgcaca

SEQ ID NO: 102289 - RNA, 19 nt, Human
gaaaaaauaaaaucuacag

SEQ ID NO: 102290 - RNA, 19 nt, Human
gagcgagccaaggagcugg

SEQ ID NO: 102291 - RNA, 21 nt, Human
gagcugggggcgagggagccu

SEQ ID NO: 102292 - RNA, 21 nt, Human
gauccgggaucgcuggagacg

SEQ ID NO: 102293 - RNA, 20 nt, Human
gcgagccaaggagcuggggg

SEQ ID NO: 102294 - RNA, 21 nt, Human
ggcaaacauacagcgaaccuu

SEQ ID NO: 102295 - RNA, 23 nt, Human
gggcugcgguggaggagcugagc

SEQ ID NO: 102296 - RNA, 19 nt, Human
guggauccgggaucgcugg

SEQ ID NO: 102297 - RNA, 23 nt, Human
guucagagaccaaaguauuucca

SEQ ID NO: 102298 - RNA, 22 nt, Human
uaagcagacacacacgcacaaa

SEQ ID NO: 102299 - RNA, 25 nt, Human
uaagcagacacacacgcacaaaccc

SEQ ID NO: 102300 - RNA, 24 nt, Human
uagcaguacaaaaucuuugacuau

SEQ ID NO: 102301 - RNA, 24 nt, Human
uagguagccuuuuuguccaaggca

SEQ ID NO: 102302 - RNA, 24 nt, Human
ucacaagacuuucuuuuccucagu

SEQ ID NO: 102303 - RNA, 22 nt, Human
ucacugcugggcugcgguggag

SEQ ID NO: 102304 - RNA, 23 nt, Human
uccaaggcaaacauacagcgaac

SEQ ID NO: 102305 - RNA, 23 nt, Human
uccuccagguaacaaagcaaaca

SEQ ID NO: 102306 - RNA, 19 nt, Human
ucuguuuuuacuucuugcu

SEQ ID NO: 102307 - RNA, 22 nt, Human
ucuucugcaguagcugagggca

SEQ ID NO: 102308 - RNA, 23 nt, Human
ugaaaacccucacugacgcuccu

SEQ ID NO: 102309 - RNA, 21 nt, Human
ugaccaugggacacagacaug

SEQ ID NO: 102310 - RNA, 21 nt, Human
ugagcgagccaaggagcuggg

SEQ ID NO: 102311 - RNA, 21 nt, Human
ugagcgagccaaggagcuggg

SEQ ID NO: 102312 - RNA, 22 nt, Human
uguuguggucuggggaucaugu

SEQ ID NO: 102313 - RNA, 22 nt, Human
uuguuguggucuggggaucaug

SEQ ID NO: 102314 - RNA, 26 nt, Human
uuucuuuuccucagugggacuuuucu

SEQ ID NO: 102315 - RNA, 24 nt, Human
uuuguuguggucuggggaucaugu

SEQ ID NO: 102316 - RNA, 21 nt, Human
uuuuacuucuugcuaauuaca

SEQ ID NO: 102317 - RNA, 21 nt, Human
aaaauauaugucuuccaacua

SEQ ID NO: 102318 - RNA, 20 nt, Human
aaagaaauccaggucuucca

SEQ ID NO: 102319 - RNA, 23 nt, Human
aagucuuccagcaaauccagucu

SEQ ID NO: 102320 - RNA, 24 nt, Human
aauccaugucuuccaauaauuuca

SEQ ID NO: 102321 - RNA, 23 nt, Human
agaaagaaauccaggucuuccag

SEQ ID NO: 102322 - RNA, 22 nt, Human
aguucuuccagaaaaaucuaga

SEQ ID NO: 102323 - RNA, 26 nt, Human
caguaaaucaagucuuccagcaaauc

SEQ ID NO: 102324 - RNA, 22 nt, Human
uccacaucuuccagacaaucca

SEQ ID NO: 102325 - RNA, 25 nt, Human
uccagaaaaaucugugucuuccacc

SEQ ID NO: 102326 - RNA, 18 nt, Human
ucuuccagaaaauccacg

SEQ ID NO: 102327 - RNA, 22 nt, Human
ucuuccagcuaauccaugucuc

SEQ ID NO: 102328 - RNA, 21 nt, Human
uggucuuccaccaaauccaga

SEQ ID NO: 102329 - RNA, 24 nt, Human
uucaaggucuuccaucaaauacag

SEQ ID NO: 102330 - RNA, 18 nt, Human
aaaacucaaggacuugga

SEQ ID NO: 102331 - RNA, 20 nt, Human
aaauuugccaucucaauuug

SEQ ID NO: 102332 - RNA, 21 nt, Human
aacaaagaaggcggggaaaga

SEQ ID NO: 102333 - RNA, 23 nt, Human
aagcccguccccugaucugcgcu

SEQ ID NO: 102334 - RNA, 23 nt, Human
aaguauagcucuucccuccacug

SEQ ID NO: 102335 - RNA, 26 nt, Human
acaaaacucaaggacuuggaguauug

SEQ ID NO: 102336 - RNA, 19 nt, Human
acccuccccggccggggau

SEQ ID NO: 102337 - RNA, 18 nt, Human
agcucuucccuccacugg

SEQ ID NO: 102338 - RNA, 18 nt, Human
aggaacugaagucuaauc

SEQ ID NO: 102339 - RNA, 18 nt, Human
aguaacauuaggcuucag

SEQ ID NO: 102340 - RNA, 20 nt, Human
agugaaggggugcggccgaa
